(19) United States
(12) Patent Application Publication
(10) Pub. No.: US 2025/0051457 A1
(43) Pub. Date: Feb. 13, 2025

(54) ASGR INHIBITORS

(71) Applicant: Amgen Inc., Thousand Oaks, CA (US)

(72) Inventors: Paul Nioi, Wellesley, MA (US); Peter Coward, San Francisco, CA (US); Christopher Murawsky, Vancouver, CA (US); Derek E. Piper, Santa Clara, CA (US); Fernando Garces, San Mateo, CA (US); Jun Zhang, Foster City, CA (US); Yang Li, Mountain View, CA (US); Brian Mingtung Chan, Port Coquitlam, CA (US)

(21) Appl. No.: 18/770,259

(22) Filed: Jul. 11, 2024

Related U.S. Application Data
(63) Continuation of application No. 16/987,237, filed on Aug. 6, 2020.
Application No. 16/987,237 is a continuation of application No. 16/230,356, filed on Dec. 21, 2018, now Pat. No. 11,066,472.
Application No. 16/230,356 is a division of application No. 15/279,162, filed on Sep. 28, 2016, now Pat. No. 10,358,497.
(60) Provisional application No. 62/234,546, filed on Sep. 29, 2015.
(60) Provisional application No. 62/259,553, filed on Nov. 24, 2015.
(60) Provisional application No. 62/319,740, filed on Apr. 7, 2016.

(51) Int. Cl. C07K 16/28; A61K 39/00; A61K 39/395; A61K 45/06; A61P 3/06; A61P 9/04; A61P 9/10; C07H 21/02; C07K 14/705; C12N 15/113

(52) U.S. Cl. CPC C07K 16/2851; A61K 39/3955; A61K 2039/505; A61K 2039/507; A61K 45/06; A61P 3/06; A61P 9/04; A61P 9/10; C07H 21/02; C07K 14/705; C07K 14/7056; C07K 16/28; C07K 2317/21; C07K 2317/24; C07K 2317/30; C07K 2317/56; C07K 2317/565; C07K 2317/76; C07K 2317/77; C07K 2317/92; C07K 2317/94; C12N 15/1138

(57) ABSTRACT

Antigen binding proteins that interact with ASGR, ASGR-1 and/or ASGR-2 are described as well as methods of making and using such antigen binding proteins. Methods of treating and preventing cardiovascular disease by administering a pharmaceutically effective amount of ASGR, ASGR-1 and/or ASGR-2 antigen binding proteins. Methods of treating and preventing cardiovascular disease by administering a pharmaceutically effective amount of interfering RNA compositions that reduce expression of ASGR, ASGR-1 and/or ASGR-2 are described.

### CROSS REFERENCE TO RELATED APPLICATIONS

[0001] This application is a continuation of U.S. patent application Ser. No. 16/987,237, filed Aug. 6, 2020, which is a continuation of U.S. patent application Ser. No. 16/230,356, filed Dec. 21, 2018, now U.S. Pat. No. 11,066,472, issued Jul. 20, 2021, which is a divisional of U.S. patent application Ser. No. 15/279,162, filed Sep. 28, 2016, now U.S. Pat. No. 10,358,497, issued Jul. 23, 2019, which claims priority to U.S. Provisional Patent Application No. 62/319,740, filed Apr. 7, 2016, U.S. Provisional Patent Application No. 62/259,553, filed Nov. 24, 2015, and U.S. Provisional Patent Application No. 62/234,546, filed Sep. 29, 2015. Each of the aforementioned related applications are incorporated herein by reference in its entirety.

### REFERENCE TO THE SEQUENCE LISTING AND TABLES IN ELECTRONIC FORMAT

[0002] This application contains a Sequence Listing which has been submitted electronically in XML format and is hereby incorporated by reference in its entirety. Said electronic copy, created on Jun. 11, 2024, is named APMOL017C2_SEQLIST.xml and is 49,021,178 bytes in size, and is being replaced by a Replacement Sequence Listing, named APMOL017C2REPLACEMENTseglist.xml, created on Sep. 9, 2024, which is 49,032,680 bytes in size. The present application is being filed along with a collection of Tables in electronic format. The collection of Tables is provided as four files entitled TABLE10A.txt, TABLE10B.txt, TABLE10C.txt, and TABLE10D.txt, created and last saved on Sep. 26, 2016, which are 88,431, 356,111, 699,631, and 688,275 bytes in size respectively. The information in the electronic format of the collection of Tables is incorporated herein by reference in its entirety.

### FIELD

[0003] The field of this invention relates to compositions and methods related to ASGR inhibitors, including but not limited to anti-ASGR, anti-ASGR-1, and/or anti-ASGR-2 antigen binding proteins.

### BACKGROUND OF VARIOUS EMBODIMENTS

[0004] Cardiovascular disease involving the heart or blood vessels remains a leading cause of global mortality. Cardiovascular disease includes coronary artery disease (CAD) which can lead to angina and myocardial infarction (MI), stroke, hypertensive heart disease, rheumatic heart disease, and other disorders of the cardiovascular system. Medicines for treating cardiovascular disease, and in particular coronary artery disease, have been introduced over the years (e.g., the small molecule class of drugs called statins and the recently approved Repatha®, an antibody targeting PCSK9).

### SUMMARY OF VARIOUS EMBODIMENTS

[0005] In some aspects, the invention provides an isolated antigen binding protein that binds to human ASGR and inhibits ASGR function. In one embodiment, the invention comprises an isolated antigen binding protein that binds to human ASGR and inhibits ASGR binding to ligand. In another embodiment, the invention comprises an isolated antigen binding protein that binds to human ASGR-1 and inhibits ASGR-1 binding to ligand and/or ASGR-1 interaction with ASGR-2. In another embodiment, the invention comprises an isolated antigen binding protein that binds to human ASGR-2 and inhibits ASGR-2 binding to ligand and/or ASGR-2 interaction with ASGR-1. In yet another embodiment, the invention comprises an isolated antigen binding protein that binds to human ASGR-1 and human ASGR-2, and inhibits ASGR-1 and/or ASGR-2 binding to ligand. In some embodiments, the isolated binding protein binds specifically to human ASGR, ASGR-1 and/or ASGR-2.

[0006] In some aspects, the invention provides an isolated antigen binding protein, wherein the isolated antigen binding protein binds to human ASGR-1 and comprises one or more VH CDR1, VH CDR2 or VH CDR3 having an amino acid sequence identical to or comprising 1, 2, or 3 amino acid residue substitutions, deletions or insertions in each CDR relative to the VH of any of the sequences set forth in Tables 3-7. In some aspects, the invention comprises an isolated antigen binding protein, wherein the isolated antigen binding protein binds to human ASGR-1 and comprises one or more VL CDR1, VL CDR2 or VL CDR3 having an amino acid sequence identical to or comprising 1, 2, or 3 amino acid residue substitutions, deletions or insertions in each CDR relative to the VL of any of the sequences set forth in Tables 3-7. In some embodiments, the isolated antigen binding protein comprises one or more VH CDR1, VH CDR2 or VH CDR3 having an amino acid sequence identical to or comprising 1, 2, or 3 amino acid residue substitutions, deletions or insertions in each CDR relative to the VH of any of the sequences set forth in Tables 3-7, and one or more VL CDR1, VL CDR2 or VL CDR3 having an amino acid sequence identical to or comprising 1, 2, or 3 amino acid residue substitutions, deletions or insertions in each CDR relative to the VL of any of the sequences set forth in Tables 3-7. In some embodiments, the isolated antigen binding protein comprises one VH CDR1, VH CDR2 or VH CDR3 having an amino acid sequence identical to or comprising 1, 2, or 3 amino acid residue substitutions, deletions or insertions in each CDR relative to the VH of any of the sequences set forth in Tables 3-7, and one VL CDR1, VL CDR2 or VL CDR3 having an amino acid sequence identical to or comprising 1, 2, or 3 amino acid residue substitutions, deletions or insertions in each CDR relative to the VL of any of the sequences set forth in Tables 3-7. In some embodiments, the isolated antigen binding protein comprises two VH CDR1, VH CDR2 or VH CDR3 having an amino acid sequence identical to or comprising 1, 2, or 3 amino acid residue substitutions, deletions or insertions in each CDR relative to the VH of any of the sequences set forth in Tables 3-7, and two VL CDR1, VL CDR2 or VL CDR3 having an amino acid sequence identical to or comprising 1, 2, or 3 amino acid residue substitutions, deletions or insertions in each CDR relative to the VL of any of the sequences set forth in Tables 3-7. In some embodiments, the isolated antigen binding protein comprises the VH CDR1, VH CDR2 and VH CDR3 having an amino acid sequence identical to or comprising 1, 2, or 3 amino acid residue substitutions, deletions or insertions in each CDR relative to the VH of any of the sequences set forth in Tables 3-7, and the VL CDR1, VL CDR2 and VL CDR3 having an amino acid sequence identical to or comprising 1, 2, or 3 amino acid residue substitutions, deletions or insertions in each CDR relative to the VL of any of the sequences set forth in Tables 3-7. In some embodiments, the isolated antigen binding protein comprises the VH CDR1, VH CDR2, VH CDR3, VL CDR1, VL CDR2, and VL CDR3 having an amino acid sequence identical to any of the sequences set forth in Tables 3-7. In some embodiments, the isolated antigen binding protein comprises the VH CDR1, VH CDR2 or VH CDR3 having an amino acid sequence identical to or comprising 1, 2, or 3 amino acid residue substitutions, deletions or insertions in each CDR relative to the VH of any of the sequences set forth in TABLE A. In some embodiments, the isolated antigen binding protein comprises the VL CDR1, VL CDR2 or VL CDR3 having an amino acid sequence identical to or comprising 1, 2, or 3 amino acid residue substitutions, deletions or insertions in each CDR relative to the VL of any of the sequences set forth in TABLE A. In some embodiments, the isolated antigen binding protein comprises the VH CDR1, VH CDR2, and VH CDR3 having an amino acid sequence identical to or comprising 1, 2, or 3 amino acid residue substitutions, deletions or insertions in each CDR relative to the VH of any of the sequences set forth in TABLE A, and the VL CDR1, VL CDR2 and VL CDR3, having an amino acid sequence identical to or comprising 1, 2, or 3 amino acid residue substitutions, deletions or insertions in each CDR relative to the VL of any of the sequences set forth in TABLE A. In some embodiments, the isolated antigen binding protein comprises the VH CDR1, VH CDR2, VH CDR3, VL CDR1, VL CDR2, and VL CDR3 having an amino acid sequence identical to any of the sequences set forth in TABLE A. In some embodiments, the isolated antigen binding protein comprises the VH CDR1, VH CDR2 or VH CDR3 having an amino acid sequence identical to or comprising 1, 2, or 3 amino acid residue substitutions, deletions or insertions in each CDR relative to the VH of any of the sequences set forth in TABLE B. In some embodiments, the isolated antigen binding protein comprises the VL CDR1, VL CDR2 or VL CDR3 having an amino acid sequence identical to or comprising 1, 2, or 3 amino acid residue substitutions, deletions or insertions in each CDR relative to the VL of any of the sequences set forth in TABLE B. In some embodiments, the isolated antigen binding protein comprises the VH CDR1, VH CDR2, and VH CDR3 having an amino acid sequence identical to or comprising 1, 2, or 3 amino acid residue substitutions, deletions or insertions in each CDR relative to the VH of any of the sequences set forth in TABLE B, and the VL CDR1, VL CDR2 and VL CDR3 having an amino acid sequence identical to or comprising 1, 2, or 3 amino acid residue substitutions, deletions or insertions in each CDR relative to the VL of any of the sequences set forth in TABLE B. In some embodiments, the isolated antigen binding protein comprises the VH CDR1, VH CDR2, VH CDR3, VL CDR1, VL CDR2, and VL CDR3 having an amino acid sequence identical to any of the sequences set forth in TABLE B. In still some embodiments, the isolated antigen binding protein comprises the VH CDR1, VH CDR2 or VH CDR3 having an amino acid sequence identical to or comprising 1, 2, or 3 amino acid residue substitutions, deletions or insertions in each CDR relative to the VH of any of the sequences set forth in TABLE C. In some embodiments, the isolated antigen binding protein comprises the VL CDR1, VL CDR2 or VL CDR3 having an amino acid sequence identical to or comprising 1, 2, or 3 amino acid residue substitutions, deletions or insertions in each CDR relative to the VL of any of the sequences set forth in TABLE C. In some embodiments, the isolated antigen binding protein comprises the VH CDR1, VH CDR2, and VH CDR3 having an amino acid sequence identical to or comprising 1, 2, or 3 amino acid residue substitutions, deletions or insertions in each CDR relative to the VH of any of the sequences set forth in TABLE C, and the VL CDR1, VL CDR2 and VL CDR3, having an amino acid sequence identical to or comprising 1, 2, or 3 amino acid residue substitutions, deletions or insertions in each CDR relative to the VL of any of the sequences set forth in TABLE C. In some embodiments, the isolated antigen binding protein comprises the VH CDR1, VH CDR2, VH CDR3, VL CDR1, VL CDR2, and VL CDR3 having an amino acid sequence identical to any of the sequences set forth in TABLE C. In further embodiments, the isolated antigen binding protein comprises the VH CDR1, VH CDR2 or VH CDR3 having an amino acid sequence identical to or comprising 1, 2, or 3 amino acid residue substitutions, deletions or insertions in each CDR relative to the VH of any of the sequences set forth in Table 6. In some embodiments, the isolated antigen binding protein comprises the VL CDR1, VL CDR2 or VL CDR3 having an amino acid sequence identical to or comprising 1, 2, or 3 amino acid residue substitutions, deletions or insertions in each CDR relative to the VL of any of the sequences set forth in Table 6. In some embodiments, the isolated antigen binding protein comprises the VH CDR1, VH CDR2, and VH CDR3 having an amino acid sequence identical to or comprising 1, 2, or 3 amino acid residue substitutions, deletions or insertions in each CDR relative to the VH of any of the sequences set forth in Table 6, and the VL CDR1, VL CDR2 and VL CDR3, having an amino acid sequence identical to or comprising 1, 2, or 3 amino acid residue substitutions, deletions or insertions in each CDR relative to the VL of any of the sequences set forth in Table 6. In some embodiments, the isolated antigen binding protein comprises the VH CDR1, VH CDR2, VH CDR3, VL CDR1, VL CDR2, and VL CDR3 having an amino acid sequence identical to any of the sequences set forth in Table 6.

[0007] In some aspects, the invention provides an isolated antigen binding protein, wherein the antigen binding protein specifically binds human ASGR-1 and comprises a heavy chain variable domain having at least 90% identity to any of the VH domain amino acid sequences set forth in Tables 3-7. In some aspects, the invention provides an isolated antigen binding protein, wherein the antigen binding protein specifically binds human ASGR-1 and comprises a light chain variable domain having at least 90% identity to any of the VL domain amino acid sequences set forth in Tables 3-7. In some embodiments, the invention provides an isolated antigen binding protein, wherein the antigen binding protein specifically binds human ASGR-1 and comprises a heavy chain variable domain having at least 90% identity to any of the VH domain amino acid sequences set forth in Tables 3-7, and a light chain variable domain having at least 90% identity to any of the VL domain amino acid sequences set forth in Tables 3-7. In some embodiments, the invention provides an isolated antigen binding protein, wherein the antigen binding protein specifically binds human ASGR-1 and comprises a heavy chain variable domain having any of the VH domain amino acid sequences set forth in Tables 3-7, and a light chain variable domain having any of the VL domain amino acid sequences set forth in Tables 3-7. In some embodiments, the invention provides an isolated antigen binding protein, wherein the antigen binding protein specifically binds human ASGR-1 and comprises a heavy chain variable domain having at least 90% identity to any of the VH domain amino acid sequences set forth in Table A. In some embodiments, the invention provides an isolated antigen binding protein, wherein the antigen binding protein specifically binds human ASGR-1 and comprises a light chain variable domain having at least 90% identity to any of the VL domain amino acid sequences set forth in Table A. In some embodiments, the invention provides an isolated antigen binding protein, wherein the antigen binding protein specifically binds human ASGR-1 and comprises a heavy chain variable domain having at least 90% identity to any of the VH domain amino acid sequences set forth in Table A, and a light chain variable domain having at least 90% identity to any of the VL domain amino acid sequences set forth in Table A. In some embodiments, the invention provides an isolated antigen binding protein, wherein the antigen binding protein specifically binds human ASGR-1 and comprises a heavy chain variable domain having any of the VH domain amino acid sequences set forth in Table A, and a light chain variable domain having any of the VL domain amino acid sequences set forth in Table A. In some embodiments, the invention provides an isolated antigen binding protein, wherein the antigen binding protein specifically binds human ASGR-1 and comprises a heavy chain variable domain having at least 90% identity to any of the VH domain amino acid sequences set forth in Table B. In some embodiments, the invention provides an isolated antigen binding protein, wherein the antigen binding protein specifically binds human ASGR-1 and comprises a light chain variable domain having at least 90% identity to any of the VL domain amino acid sequences set forth in Table B. In some embodiments, the invention provides an isolated antigen binding protein, wherein the antigen binding protein specifically binds human ASGR-1 and comprises a heavy chain variable domain having at least 90% identity to any of the VH domain amino acid sequences set forth in Table B, and a light chain variable domain having at least 90% identity to any of the VL domain amino acid sequences set forth in Table B. In some embodiments, the invention provides an isolated antigen binding protein, wherein the antigen binding protein specifically binds human ASGR-1 and comprises a heavy chain variable domain having any of the VH domain amino acid sequences set forth in Table B, and a light chain variable domain having any of the VL domain amino acid sequences set forth in Table B. In some embodiments, the invention provides an isolated antigen binding protein, wherein the antigen binding protein specifically binds human ASGR-1 and comprises a heavy chain variable domain having at least 90% identity to any of the VH domain amino acid sequences set forth in Table C. In some embodiments, the invention provides an isolated antigen binding protein, wherein the antigen binding protein specifically binds human ASGR-1 and comprises a light chain variable domain having at least 90% identity to any of the VL domain amino acid sequences set forth in Table C. In some embodiments, the invention provides an isolated antigen binding protein, wherein the antigen binding protein specifically binds human ASGR-1 and comprises a heavy chain variable domain having at least 90% identity to any of the VH domain amino acid sequences set forth in Table C, and a light chain variable domain having at least 90% identity to any of the VL domain amino acid sequences set forth in Table C. In some embodiments, the invention provides an isolated antigen binding protein, wherein the antigen binding protein specifically binds human ASGR-1 and comprises a heavy chain variable domain having any of the VH domain amino acid sequences set forth in Table C, and a light chain variable domain having any of the VL domain amino acid sequences set forth in Table C. In some embodiments, the invention provides an isolated antigen binding protein, wherein the antigen binding protein specifically binds human ASGR-1 and comprises a heavy chain variable domain having at least 90% identity to any of the VH domain amino acid sequences set forth in Table 6. In some embodiments, the invention provides an isolated antigen binding protein, wherein the antigen binding protein specifically binds human ASGR-1 and comprises a light chain variable domain having at least 90% identity to any of the VL domain amino acid sequences set forth in Table 6. In some embodiments, the invention provides an isolated antigen binding protein, wherein the antigen binding protein specifically binds human ASGR-1 and comprises a heavy chain variable domain having at least 90% identity to any of the VH domain amino acid sequences set forth in Table 6, and a light chain variable domain having at least 90% identity to any of the VL domain amino acid sequences set forth in Table 6. In some embodiments, the invention provides an isolated antigen binding protein, wherein the antigen binding protein specifically binds human ASGR-1 and comprises a heavy chain variable domain having any of the VH domain amino acid sequences set forth in Table 6, and a light chain variable domain having any of the VL domain amino acid sequences set forth in Table 6.

[0008] In some aspects, the invention provides an isolated antigen binding protein, wherein the antigen binding protein binds human ASGR-1 and comprises one or more VH CDR1, VH CDR2 or VH CDR3 having an amino acid sequence identical to or comprising no more than 18 amino acid residue substitutions, insertions or deletions in each CDR relative to the VH of any of the sequences set forth in Table 19A as depicted in FIG. 55. In some embodiments, the invention provides an isolated antigen binding protein, wherein the antigen binding protein binds human ASGR-1 and comprises one or more VH CDR1, VH CDR2 or VH CDR3 having an amino acid sequence identical to or comprising a conservative subsitutuion of any of the amino acid sequences set forth in Table 19B or 19C, as depicted in FIG. 55. In some aspects, the invention comprises an isolated antigen binding protein, wherein the isolated antigen binding protein binds to human ASGR-1 and comprises one or more VL CDR1, VL CDR2 or VL CDR3 having an amino acid sequence identical to or comprising no more than 14 amino acid residue substitutions, insertions or deletions in each CDR relative to the VL of any of the sequences set forth in Table 20A as depicted in FIG. 55. In some embodiments, the invention provides an isolated antigen binding protein, wherein the antigen binding protein binds human ASGR-1 and comprises one or more VL CDR1, VL CDR2 or VL CDR3 having an amino acid sequence identical to or comprising a conservative subsitutuion of any of the amino acid sequences set forth in Table 20B or 20C, as depicted in FIG. 55. In some embodiments, the isolated antigen binding protein comprises one or more VH CDR1, VH CDR2 or VH CDR3 having an amino acid sequence identical to or comprising no more than 18 amino acid residue substitutions, insertions or deletions in each CDR relative to the VH of any of the sequences set forth in Table 19A, as depicted in FIG. 55, and one or more VL CDR1, VL CDR2 or VL CDR3 having an amino acid sequence identical to or comprising no more than 14 amino acid residue substitutions, insertions or deletions in each CDR relative to the VL of any of the sequences set forth in Table 20A as depicted in FIG. 55. In some embodiments, the invention provides an isolated antigen binding protein, wherein the antigen binding protein binds human ASGR-1 and comprises one or more VH CDR1, VH CDR2 or VH CDR3 having an amino acid sequence identical to or comprising a conservative subsitutuion of any of the amino acid sequences set forth in Table 19B or 19C, as depicted in FIG. 55, and one or more VL CDR1, VL CDR2 or VL CDR3 having an amino acid sequence identical to or comprising a conservative subsitutuion of any of the amino acid sequences set forth in Table 20B or 20C, as depicted in FIG. 55. In some embodiments, the isolated antigen binding protein comprises one VH CDR1, VH CDR2 or VH CDR3 having an amino acid sequence identical no more than 18 amino acid residue substitutions, insertions or deletions in each CDR relative to the VH of any of the sequences set forth in Table 19A, as depicted in FIG. 55, and one VL CDR1, VL CDR2 or VL CDR3 having an amino acid sequence identical to or comprising no more than 14 amino acid residue substitutions, insertions or deletions in each CDR relative to the VL of any of the sequences set forth in Table 20A, as depicted in FIG. 55. In some embodiments, the invention provides an isolated antigen binding protein, wherein the antigen binding protein binds human ASGR-1 and comprises one VH CDR1, VH CDR2 or VH CDR3 having an amino acid sequence identical to or comprising a conservative subsitutuion of any of the amino acid sequences set forth in Table 19B or 19C, as depicted in FIG. 55, and one VL CDR1, VL CDR2 or VL CDR3 having an amino acid sequence identical to or comprising a conservative subsitutuion of any of the amino acid sequences set forth in Table 20B or 20C, as depicted in FIG. 55. In some embodiments, the isolated antigen binding protein comprises two VH CDR1, VH CDR2 or VH CDR3 having an amino acid sequence identical to or comprising up to 18 amino acid residue substitutions, insertions or deletions in each CDR relative to the VH of any of the sequences set forth in Table 19A, as depicted in FIG. 55, and two VL CDR1, VL CDR2 or VL CDR3 having an amino acid sequence identical to or comprising up to 14 amino acid residue substitutions, insertions or deletions in each CDR relative to the VL of any of the sequences set forth in Table 20A, as depicted in FIG. 55. In some embodiments, the invention provides an isolated antigen binding protein, wherein the antigen binding protein binds human ASGR-1 and comprises two VH CDR1, VH CDR2 or VH CDR3 having an amino acid sequence identical to or comprising a conservative subsitutuion of any of the amino acid sequences set forth in Table 19B or 19C, as depicted in FIG. 55, and two VL CDR1, VL CDR2 or VL CDR3 having an amino acid sequence identical to or comprising a conservative subsitutuion of any of the amino acid sequences set forth in Tables 20B or 20C, as depicted in FIG. 55. In some embodiments, the isolated antigen binding protein comprises the VH CDR1, VH CDR2 and VH CDR3 having an amino acid sequence identical to or comprising up to 18 amino acid residue substitutions, insertions or deletions in each CDR relative to the VH of any of the sequences set forth in Table 19A, as depicted in FIG. 55, and the VL CDR1, VL CDR2 and VL CDR3 having an amino acid sequence identical to or comprising up to 14 amino acid residue substitutions, insertions or deletions in each CDR relative to the VL of any of the sequences set forth in Table 20A, as depicted in FIG. 55. In some embodiments, the invention provides an isolated antigen binding protein, wherein the antigen binding protein binds human ASGR-1 and comprises the VH CDR1, VH CDR2 or VH CDR3 having an amino acid sequence identical to or comprising a conservative subsitutuion of any of the amino acid sequences set forth in Table 19B or 19C, as depicted in FIG. 55, and the VL CDR1, VL CDR2 or VL CDR3 having an amino acid sequence identical to or comprising a conservative subsitutuion of any of the amino acid sequences set forth in Table 20B or 20C, as depicted in FIG. 55.

[0009] In some aspects, the invention provides an isolated antigen binding protein, wherein the antigen binding protein specifically binds human ASGR-1 and comprises a heavy chain variable domain having at least 90% identity to any of the VH domain amino acid sequences set forth in Tables 19A, as depicted in FIG. 55 or in Tables 21-34 as depicted in FIG. 56 or in Tables 49-95 as depicted in FIG. 56. In some aspects, the invention provides an isolated antigen binding protein, wherein the antigen binding protein specifically binds human ASGR-1 and comprises a light chain variable domain having at least 90% identity to any of the VL domain amino acid sequences set forth in Table 20A, as depicted in FIG. 55, or in Tables 35-48, as depicted in FIG. 56 or in Tables 96-134 as depicted in FIG. 57. In some embodiments, the antigen binding protein comprises a heavy chain variable domain having at least 90% identity to any of the VH domain amino acid sequences set forth in Tables 19A as depicted in FIG. 55, or in Tables 21-34 as depicted in FIG. 56 or in Tables 49-95 as depicted in FIG. 57, and a light chain variable domain having at least 90% identity to any of the VL domain amino acid sequences set forth in Table 20A as depicted in FIG. 55 or in Tables 35-48 as depicted in FIG. 56 or in Tables 96-134 as depicted in FIG. 57. In some embodiments, the antigen binding protein comprises a heavy chain variable domain having any of the VH domain amino acid sequences set forth in Tables 19A as depicted in FIG. 55, or in Tables 21-34 as depicted in FIG. 56 or in Tables 49-95 as depicted in FIG. 57, and a light chain variable domain having any of the VL domain amino acid sequences set forth in Table 20A as depicted in FIG. 55 or in Tables 35-48 as depicted in FIG. 56 or in Tables 96-134 as depicted in FIG. 57.

[0010] In some aspects, the invention provides an antigen binding protein that specifically binds to human ASGR-1 at an epitope that is bound by any of the antigen binding proteins disclosed herein. In some embodiments, the invention provides an isolated antigen binding protein that specifically binds to human ASGR-1 at an epitope that is bound by at least one of the antigen binding proteins set forth in Tables 2-7. In some embodiments, the invention provides an isolated antigen binding protein that specifically binds to human ASGR-1 at an epitope that is bound by at least one of the antigen binding proteins set forth in Table A. In some embodiments, the invention provides an isolated antigen binding protein that specifically binds to human ASGR-1 at an epitope that is bound by at least one of the antigen binding proteins set forth in Table B. In some embodiments, the invention provides an isolated antigen binding protein that specifically binds to human ASGR-1 at an epitope that is bound by at least one of the antigen binding proteins set forth in Table C. In some embodiments, the invention provides an isolated antigen binding protein that specifically binds to human ASGR-1 at an epitope that is bound by at least one of the antigen binding proteins set forth in Table 6.

[0011] In some aspects, the invention provides an isolated antigen binding protein that competes for binding to human ASGR-1 with any of the antigen binding proteins disclosed herein. In some embodiments, the invention provides an isolated antigen binding protein that competes for binding with any of the antigen binding proteins set forth in Tables 2-7. In some embodiments, the invention provides an isolated antigen binding protein that competes for binding with any of the antigen binding proteins set forth in Table A. In some embodiments, the invention provides an isolated antigen binding protein that competes for binding with any of the antigen binding proteins set forth in Table B. In still some embodiments, the invention provides an isolated antigen binding protein that competes for binding with any of the antigen binding proteins set forth in Table C. In yet another embodiment, the invention provides an isolated antigen binding protein that competes for binding with any of the antigen binding proteins set forth in Table 6.

[0012] In some aspects, the invention provides an isolated antigen binding protein that binds to human ASGR-1 within the carbohydrate recognition domain (“CRD”) (also known as the carbohydrate binding domain or “CBD”) and inhibits human ASGR-1 binding to ligand. In some embodiments, the antigen binding protein binds to human ASGR-1 within residues 148-291, or 149-291, or 150-291, or 151-291, or 152-291, or 153-291, or 154-291, or 155-291 of SEQ ID NO:5. In some embodiments, the invention comprises an isolated antigen binding protein that binds to human ASGR-1 CBD within Helix α-1. In some embodiments, the invention comprises an isolated antigen binding protein that binds to human ASGR-1 within residues 174-186 of SEQ ID NO:5. In some embodiments, the invention comprises an isolated antigen binding protein that binds to human ASGR-1 CBD within Helix α-2. In some embodiments, the invention comprises an isolated antigen binding protein that binds to human ASGR-1 CBD within residues 194-206 of SEQ ID NO:5. In some embodiments, the invention comprises an isolated antigen binding protein that binds to human ASGR-1 within residues 237-273 or residues 240-267 of SEQ ID NO:5. In some embodiments, the antigen binding protein binds to ASGR-1 having an amino acid sequence that is at least 90% identical to SEQ ID NO:5. In some embodiments, the antigen binding protein is an antibody.

[0013] In some aspects, the invention provides an isolated antigen binding protein or an antibody that binds to human ASGR-1 and inhibits human ASGR-1 function. In some embodiments, the isolated antigen binding protein or an antibody binds to human ASGR-1 and inhibits human ASGR-1 from binding to a ligand. In some embodiments, the antigen binding protein or antibody or a paratope in an antibody binds to human ASGR-1 at an epitope comprising at least one of the following amino acid residues: Q240, D242, W244, E253, N265, D266, D267, N209, R237, P238, E239, P241, D243, Y245, G246, H247, G252, C255, H257, T259, D260, V268, R271, Y273, R237, Q240, D242, W244, E253, N265, D266, D267, N209, P238, E239, P241, D243, Y245, G246, H247, G252, C255, H257, T259, V268, R271, Y273, N209, R237, Q240, D242, W244, E253, H257, T259, N265, D266, D267, Y273, P238, E239, P241, D243, Y245, G246, H247, G252, C255, F258, D260, R263, W264, V268, R271, D216, Q217, N218, G219, P220, W221, Y229, E230, K234, W236, E239, Q240, P241, D242, D243, W244, Y245, G246, L249, G250, G251, G252, D254, Q270, H215, K222, T231, G232, R237, P238, H247, G248, E253, C255, D266, V268, C269, W195, N209, N235, R237, P238, E239, Q240, D242, H257, T259, D260, D261, R263, N265, D267, R271, Y273, Q198, Q202, P207, V208, F233, W236, D243, E253, F258, G262, W264, D266, H161, E162, W195, E196, Q198, K199, F200, Q202, H203, H204, G232, F233, K234, N235, W236, R237, P238, D261, G262, R263, V159, E160, R163, T193, 5194, E197, V201, I205, G206, P207, Y229, E230, T231, E239, F258, T259, D260, W264, W167, 5171, G172, K173, A174, A176, D177, N180, Y181, R183, L184, E185, D186, Q270, P272, W275, P155, N157, W158, F168, 5169, R170, W175, A178, D179, C182, A187, W211, C269, R271, Y273, R274, C277, T279, R170, W195, E196, K199, Q202, H203, H204, I205, G206, P207, V208, F233, K234, N235, W236, P238, D260, D261, G262, R263, R274, N157, V159, F168, S169, S171, S194, Q198, F200, V201, T210, R237, E239, Q240, F258, T259, W264, H161, 5194, W195, E196, Q198, K199, F200, Q202, H203, F233, K234, N235, W236, R237, P238, R263, E160, E162, V192, T193, E197, V201, H204, Y229, E230, T231, G232, E239, Q240, P241, D261, G262, W264, H161, E162, T193, 5194, W195, E196, K199, Q202, T231, G232, F233, K234, N235, P238, D261, R263, R163, V192, E197, Q198, H203, P207, D228, E230, W236, R237, D260, G262, or W264, T193, 5194, W195, E196, P220, W221, G226, T227, D228, Y229, E230, T231, G232, F233, K234, N235, W236, R237, P238, E239, G252, H161, E162, V191, V192, E197, Q198, D216, G219, K222, W223, D225, R263, W264, R170, 5171, G172, A174, H204, I205, G206, P207, V208, N209, H257, D260, N265, D267, Q270, R271, P272, Y273, R274, W167, F168, S169, K173, W175, D177, Y181, Q202, H203, T210, W211, R237, F258, T259, D261, D266, V268, C269, W275, R170, S171, G172, K173, A174, D177, P207, V208, N209, R237, Q240, W244, G246, H247, G248, L249, E253, H257, T259, D260, N265, D267, Q270, R271, P272, Y273, R274, S169, W175, A176, A178, T210, W211, W236, P238, E239, D242, Y245, G250, G251, F258, D261, G262, R263, W264, D266, V268, C269, W275, N157, R170, S171, G172, Q202, H203, H204, I205, G206, P207, V208, N209, T210, D260, R271, P272, Y273, R274, V156, W158, V159, H161, W167, F168, S169, K173, K199, F200, V201, W211, R237, H257, F258, T259, D261, D267, V268, Q270, or W275 (SEQ ID NO:5). In some embodiments, the antigen binding protein or antibody or paratope in an antibody binds to human ASGR-1 at an epitope comprising at least one of the following residues: Q240, D242, W244, E253, N265, D266, D267, R237, Q240, D242, W244, E253, N265, D266, D267, N209, R237, Q240, D242, W244, E253, H257, T259, N265, D266, D267, Y273, D216, Q217, N218, G219, P220, W221, Y229, E230, K234, W236, E239, Q240, P241, D242, D243, W244, Y245, G246, L249, G250, G251, G252, D254, Q270, W195, N209, N235, R237, P238, E239, Q240, D242, H257, T259, D260, D261, R263, N265, D267, R271, Y273, H161, E162, W195, E196, Q198, K199, F200, Q202, H203, H204, G232, F233, K234, N235, W236, R237, P238, D261, G262, R263, W167, S171, G172, K173, A174, A176, D177, N180, Y181, R183, L184, E185, D186, Q270, P272, W275, R170, W195, E196, K199, Q202, H203, H204, I205, G206, P207, V208, F233, K234, N235, W236, P238, D260, D261, G262, R263, R274, H161, S194, W195, E196, Q198, K199, F200, Q202, H203, F233, K234, N235, W236, R237, P238, R263, H161, E162, T193, S194, W195, E196, K199, Q202, T231, G232, F233, K234, N235, P238, D261, R263, T193, S194, W195, E196, P220, W221, G226, T227, D228, Y229, E230, T231, G232, F233, K234, N235, W236, R237, P238, E239, G252, R170, S171, G172, A174, H204, I205, G206, P207, V208, N209, H257, D260, N265, D267, Q270, R271, P272, Y273, R274, R170, S171, G172, K173, A174, D177, P207, V208, N209, R237, Q240, W244, G246, H247, G248, L249, E253, H257, T259, D260, N265, D267, Q270, R271, P272, Y273, R274, N157, R170, S171, G172, Q202, H203, H204, I205, G206, P207, V208, N209, T210, D260, R271, P272, Y273, R274 (SEQ ID NO:5). In some embodiments, the antigen binding protein or antibody or paratope in an antibody binds to human ASGR-1 at an epitope comprising at least one of the following residues: Q240, D242, W244, E253, N265, D266, D267, N209, R237, P238, E239, P241, D243, Y245, G246, H247, G252, C255, H257, T259, D260, V268, R271, Y273, R237, Q240, D242, W244, E253, N265, D266, D267, N209, P238, E239, P241, D243, Y245, G246, H247, G252, C255, H257, T259, V268, R271, Y273, N209, R237, Q240, D242, W244, E253, H257, T259, N265, D266, D267, Y273, P238, E239, P241, D243, Y245, G246, H247, G252, C255, F258, D260, R263, W264, V268, R271, D216, Q217, N218, G219, P220, W221, Y229, E230, K234, W236, E239, Q240, P241, D242, D243, W244, Y245, G246, L249, G250, G251, G252, D254, Q270, H215, K222, T231, G232, R237, P238, H247, G248, E253, C255, D266, V268, C269, W195, N209, N235, R237, P238, E239, Q240, D242, H257, T259, D260, D261, R263, N265, D267, R271, Y273, Q198, Q202, P207, V208, F233, W236, D243, E253, F258, G262, W264, D266, R170, S171, G172, A174, H204, I205, G206, P207, V208, N209, H257, D260, N265, D267, Q270, R271, P272, Y273, R274, W167, F168, S169, K173, W175, D177, Y181, Q202, H203, T210, W211, R237, F258, T259, D261, D266, V268, C269, W275, R170, S171, G172, K173, A174, D177, P207, V208, N209, R237, Q240, W244, G246, H247, G248, L249, E253, H257, T259, D260, N265, D267, Q270, R271, P272, Y273, R274, S169, W175, A176, A178, T210, W211, W236, P238, E239, D242, Y245, G250, G251, F258, D261, G262, R263, W264, D266, V268, C269, or W275 (SEQ ID NO:5). In some embodiments, the antigen binding protein or antibody or paratope in an antibody binds to human ASGR-1 at an epitope comprising at least one of the following residues: Q240, D242, W244, E253, N265, D266, D267, R237, Q240, D242, W244, E253, N265, D266, D267, N209, R237, Q240, D242, W244, E253, H257, T259, N265, D266, D267, Y273, D216, Q217, N218, G219, P220, W221, Y229, E230, K234, W236, E239, Q240, P241, D242, D243, W244, Y245, G246, L249, G250, G251, G252, D254, Q270, W195, N209, N235, R237, P238, E239, Q240, D242, H257, T259, D260, D261, R263, N265, D267, R271, Y273, R170, 5171, G172, A174, H204, I205, G206, P207, V208, N209, H257, D260, N265, D267, Q270, R271, P272, Y273, R274, R170, 5171, G172, K173, A174, D177, P207, V208, N209, R237, Q240, W244, G246, H247, G248, L249, E253, H257, T259, D260, N265, D267, Q270, R271, P272, Y273, or R274 (SEQ ID NO:5). In some embodiments, the antigen binding protein or antibody or paratope in an antibody binds to human ASGR-1 at an epitope comprising at least one of the following residues: Q240, D242, W244, E253, N265, D266, D267, N209, R237, P238, E239, P241, D243, Y245, G246, H247, G252, C255, H257, T259, D260, V268, R271, Y273, R237, Q240, D242, W244, E253, N265, D266, D267, N209, P238, E239, P241, D243, Y245, G246, H247, G252, C255, H257, T259, V268, R271, Y273, N209, R237, Q240, D242, W244, E253, H257, T259, N265, D266, D267, or Y273 (SEQ ID NO:5). In some embodiments, the antigen binding protein or antibody or paratope in an antibody binds to human ASGR-1 at an epitope comprising at least one of the following residues: Q240, D242, W244, E253, N265, D266, D267, R237, Q240, D242, W244, E253, N265, D266, D267, N209, R237, Q240, D242, W244, E253, H257, T259, N265, D266, D267, or Y273 (SEQ ID NO:5). In some embodiments, the antigen binding protein or antibody or paratope in an antibody binds to human ASGR-1 at an epitope comprising at least one of the following residues: D216, Q217, N218, G219, P220, W221, Y229, E230, K234, W236, E239, Q240, P241, D242, D243, W244, Y245, G246, L249, G250, G251, G252, D254, Q270, H215, K222, T231, G232, R237, P238, H247, G248, E253, C255, D266, V268, C269, W195, N209, N235, R237, P238, E239, Q240, D242, H257, T259, D260, D261, R263, N265, D267, R271, Y273, Q198, Q202, P207, V208, F233, W236, D243, E253, F258, G262, W264, D266, H161, E162, W195, E196, Q198, K199, F200, Q202, H203, H204, G232, F233, K234, N235, W236, R237, P238, D261, G262, R263, V159, E160, R163, T193, S194, E197, V201, I205, G206, P207, Y229, E230, T231, E239, F258, T259, D260, W264, W167, S171, G172, K173, A174, A176, D177, N180, Y181, R183, L184, E185, D186, Q270, P272, W275, P155, N157, W158, F168, S169, R170, W175, A178, D179, C182, A187, W211, C269, R271, Y273, R274, C277, T279, R170, W195, E196, K199, Q202, H203, H204, I205, G206, P207, V208, F233, K234, N235, W236, P238, D260, D261, G262, R263, R274, N157, V159, F168, S169, S171, S194, Q198, F200, V201, T210, R237, E239, Q240, F258, T259, W264, H161, S194, W195, E196, Q198, K199, F200, Q202, H203, F233, K234, N235, W236, R237, P238, R263, E160, E162, V192, T193, E197, V201, H204, Y229, E230, T231, G232, E239, Q240, P241, D261, G262, W264, H161, E162, T193, S194, W195, E196, K199, Q202, T231, G232, F233, K234, N235, P238, D261, R263, R163, V192, E197, Q198, H203, P207, D228, E230, W236, R237, D260, G262, or W264, T193, S194, W195, E196, P220, W221, G226, T227, D228, Y229, E230, T231, G232, F233, K234, N235, W236, R237, P238, E239, G252, H161, E162, V191, V192, E197, Q198, D216, G219, K222, W223, D225, R263, W264, R170, S171, G172, A174, H204, I205, G206, P207, V208, N209, H257, D260, N265, D267, Q270, R271, P272, Y273, R274, W167, F168, S169, K173, W175, D177, Y181, Q202, H203, T210, W211, R237, F258, T259, D261, D266, V268, C269, W275, R170, S171, G172, K173, A174, D177, P207, V208, N209, R237, Q240, W244, G246, H247, G248, L249, E253, H257, T259, D260, N265, D267, Q270, R271, P272, Y273, R274, S169, W175, A176, A178, T210, W211, W236, P238, E239, D242, Y245, G250, G251, F258, D261, G262, R263, W264, D266, V268, C269, W275, N157, R170, S171, G172, Q202, H203, H204, I205, G206, P207, V208, N209, T210, D260, R271, P272, Y273, R274, V156, W158, V159, H161, W167, F168, S169, K173, K199, F200, V201, W211, R237, H257, F258, T259, D261, D267, V268, Q270, or W275 (SEQ ID NO:5). In some embodiments, the antigen binding protein or antibody or paratope in an antibody binds to human ASGR-1 at an epitope comprising at least one of the following residues: D216, Q217, N218, G219, P220, W221, Y229, E230, K234, W236, E239, Q240, P241, D242, D243, W244, Y245, G246, L249, G250, G251, G252, D254, Q270, W195, N209, N235, R237, P238, E239, Q240, D242, H257, T259, D260, D261, R263, N265, D267, R271, Y273, H161, E162, W195, E196, Q198, K199, F200, Q202, H203, H204, G232, F233, K234, N235, W236, R237, P238, D261, G262, R263, W167, S171, G172, K173, A174, A176, D177, N180, Y181, R183, L184, E185, D186, Q270, P272, W275, R170, W195, E196, K199, Q202, H203, H204, I205, G206, P207, V208, F233, K234, N235, W236, P238, D260, D261, G262, R263, R274, H161, S194, W195, E196, Q198, K199, F200, Q202, H203, F233, K234, N235, W236, R237, P238, R263, H161, E162, T193, S194, W195, E196, K199, Q202, T231, G232, F233, K234, N235, P238, D261, R263, T193, S194, W195, E196, P220, W221, G226, T227, D228, Y229, E230, T231, G232, F233, K234, N235, W236, R237, P238, E239, G252, R170, S171, G172, A174, H204, I205, G206, P207, V208, N209, H257, D260, N265, D267, Q270, R271, P272, Y273, R274, R170, S171, G172, K173, A174, D177, P207, V208, N209, R237, Q240, W244, G246, H247, G248, L249, E253, H257, T259, D260, N265, D267, Q270, R271, P272, Y273, R274, N157, R170, 5171, G172, Q202, H203, H204, I205, G206, P207, V208, N209, T210, D260, R271, P272, Y273, or R274 (SEQ ID NO:5). In some embodiments, the antigen binding protein or antibody or paratope in an antibody binds to human ASGR-1 at an epitope comprising at least one of the following residues: D216, Q217, N218, G219, P220, W221, Y229, E230, K234, W236, E239, Q240, P241, D242, D243, W244, Y245, G246, L249, G250, G251, G252, D254, Q270, H215, K222, T231, G232, R237, P238, H247, G248, E253, C255, D266, V268, C269, W195, N209, N235, R237, P238, E239, Q240, D242, H257, T259, D260, D261, R263, N265, D267, R271, Y273, Q198, Q202, P207, V208, F233, W236, D243, E253, F258, G262, W264, D266, R170, S171, G172, A174, H204, I205, G206, P207, V208, N209, H257, D260, N265, D267, Q270, R271, P272, Y273, R274, W167, F168, S169, K173, W175, D177, Y181, Q202, H203, T210, W211, R237, F258, T259, D261, D266, V268, C269, W275, R170, S171, G172, K173, A174, D177, P207, V208, N209, R237, Q240, W244, G246, H247, G248, L249, E253, H257, T259, D260, N265, D267, Q270, R271, P272, Y273, R274, S169, W175, A176, A178, T210, W211, W236, P238, E239, D242, Y245, G250, G251, F258, D261, G262, R263, W264, D266, V268, C269, or W275 (SEQ ID NO:5). In some embodiments, the antigen binding protein or antibody or paratope in an antibody binds to human ASGR-1 at an epitope comprising at least one of the following residues: D216, Q217, N218, G219, P220, W221, Y229, E230, K234, W236, E239, Q240, P241, D242, D243, W244, Y245, G246, L249, G250, G251, G252, D254, Q270, W195, N209, N235, R237, P238, E239, Q240, D242, H257, T259, D260, D261, R263, N265, D267, R271, Y273, R170, S171, G172, A174, H204, I205, G206, P207, V208, N209, H257, D260, N265, D267, Q270, R271, P272, Y273, R274, R170, S171, G172, K173, A174, D177, P207, V208, N209, R237, Q240, W244, G246, H247, G248, L249, E253, H257, T259, D260, N265, D267, Q270, R271, P272, Y273, or R274 (SEQ ID NO:5). In some embodiments when the antigen binding protein or antibody or paratope in an antibody binds to human ASGR-1 at an epitope comprising at least one of the following residues: H161, E162, W195, E196, Q198, K199, F200, Q202, H203, H204, G232, F233, K234, N235, W236, R237, P238, D261, G262, R263, V159, E160, R163, T193, S194, E197, V201, I205, G206, P207, Y229, E230, T231, E239, F258, T259, D260, W264, W167, S171, G172, K173, A174, A176, D177, N180, Y181, R183, L184, E185, D186, Q270, P272, W275, P155, N157, W158, F168, S169, R170, W175, A178, D179, C182, A187, W211, C269, R271, Y273, R274, C277, T279, R170, W195, E196, K199, Q202, H203, H204, I205, G206, P207, V208, F233, K234, N235, W236, P238, D260, D261, G262, R263, R274, N157, V159, F168, S169, S171, S194, Q198, F200, V201, T210, R237, E239, Q240, F258, T259, W264, H161, 5194, W195, E196, Q198, K199, F200, Q202, H203, F233, K234, N235, W236, R237, P238, R263, E160, E162, V192, T193, E197, V201, H204, Y229, E230, T231, G232, E239, Q240, P241, D261, G262, W264, H161, E162, T193, 5194, W195, E196, K199, Q202, T231, G232, F233, K234, N235, P238, D261, R263, R163, V192, E197, Q198, H203, P207, D228, E230, W236, R237, D260, G262, W264, T193, 5194, W195, E196, P220, W221, G226, T227, D228, Y229, E230, T231, G232, F233, K234, N235, W236, R237, P238, E239, G252, H161, E162, V191, V192, E197, Q198, D216, G219, K222, W223, D225, R263, W264, N157, R170, 5171, G172, Q202, H203, H204, I205, G206, P207, V208, N209, T210, D260, R271, P272, Y273, R274, V156, W158, V159, H161, W167, F168, 5169, K173, K199, F200, V201, W211, R237, H257, F258, T259, D261, D267, V268, Q270, or W275 (SEQ ID NO:5). In some embodiments, the antigen binding protein or antibody or paratope in an antibody binds to human ASGR-1 at an epitope comprising at least one of the following residues: H161, E162, W195, E196, Q198, K199, F200, Q202, H203, H204, G232, F233, K234, N235, W236, R237, P238, D261, G262, R263, W167, S171, G172, K173, A174, A176, D177, N180, Y181, R183, L184, E185, D186, Q270, P272, W275, R170, W195, E196, K199, Q202, H203, H204, I205, G206, P207, V208, F233, K234, N235, W236, P238, D260, D261, G262, R263, R274, H161, S194, W195, E196, Q198, K199, F200, Q202, H203, F233, K234, N235, W236, R237, P238, R263, H161, E162, T193, S194, W195, E196, K199, Q202, T231, G232, F233, K234, N235, P238, D261, R263, T193, S194, W195, E196, P220, W221, G226, T227, D228, Y229, E230, T231, G232, F233, K234, N235, W236, R237, P238, E239, G252, N157, R170, S171, G172, Q202, H203, H204, I205, G206, P207, V208, N209, T210, D260, R271, P272, Y273, or R274 (SEQ ID NO:5). In some embodiments, the antigen binding protein or antibody or a paratope in an antibody binds to human ASGR-1 at an epitope comprising at least one of the following amino acid residues: H161, E162, W195, E196, Q198, K199, F200, Q202, H203, H204, G232, F233, K234, N235, W236, R237, P238, D261, G262, R263, V159, E160, R163, T193, S194, E197, V201, I205, G206, P207, Y229, E230, T231, E239, F258, T259, D260, or W264 (SEQ ID NO:5). In some embodiments, the antigen binding protein or antibody or a paratope in an antibody binds to human ASGR-1 at an epitope comprising at least one of the following amino acid residues: H161, E162, W195, E196, Q198, K199, F200, Q202, H203, H204, G232, F233, K234, N235, W236, R237, P238, D261, G262, or R263 (SEQ ID NO:5). In some embodiments, the antigen binding protein or antibody or a paratope in an antibody binds to human ASGR1 at an epitope comprising at least one of the following amino acid residues: W167, S171, G172, K173, A174, A176, D177, N180, Y181, R183, L184, E185, D186, Q270, P272, W275, P155, N157, W158, F168, 5169, R170, W175, A178, D179, C182, A187, W211, C269, R271, Y273, R274, C277, or T279 (SEQ ID NO:5). In some embodiments, the antigen binding protein or antibody or a paratope in an antibody binds to human ASGR-1 at an epitope comprising at least one of the following amino acid residues: W167, S171, G172, K173, A174, A176, D177, N180, Y181, R183, L184, E185, D186, Q270, P272, or W275 (SEQ ID NO:5). In some embodiments, the antigen binding protein or antibody or a paratope in an antibody binds to human ASGR-1 at an epitope comprising at least one of the following amino acid residues: R170, W195, E196, K199, Q202, H203, H204, I205, G206, P207, V208, F233, K234, N235, W236, P238, D260, D261, G262, R263, R274, N157, V159, F168, S169, S171, S194, Q198, F200, V201, T210, R237, E239, Q240, F258, T259, or W264 (SEQ ID NO:5). In some embodiments, the antigen binding protein or antibody or a paratope in an antibody binds to human ASGR-1 at an epitope comprising at least one of the following amino acid residues: R170, W195, E196, K199, Q202, H203, H204, I205, G206, P207, V208, F233, K234, N235, W236, P238, D260, D261, G262, R263, or R274 (SEQ ID NO:5). In some embodiments, the antigen binding protein or antibody or a paratope in an antibody binds to human ASGR-1 at an epitope comprising at least one of the following amino acid residues: H161, S194, W195, E196, Q198, K199, F200, Q202, H203, F233, K234, N235, W236, R237, P238, R263, E160, E162, V192, T193, E197, V201, H204, Y229, E230, T231, G232, E239, Q240, P241, D261, G262, or W264 (SEQ ID NO:5). In some embodiments, the antigen binding protein or antibody or a paratope in an antibody binds to human ASGR-1 at an epitope comprising at least one of the following amino acid residues: H161, S194, W195, E196, Q198, K199, F200, Q202, H203, F233, K234, N235, W236, R237, P238, or R263 (SEQ ID NO:5). In some embodiments, the antigen binding protein or antibody or a paratope in an antibody binds to human ASGR-1 at an epitope comprising at least one of the following amino acid residues: H161, E162, T193, S194, W195, E196, K199, Q202, T231, G232, F233, K234, N235, P238, D261, R263, R163, V192, E197, Q198, H203, P207, D228, E230, W236, R237, D260, G262, or W264 (SEQ ID NO:5). In some embodiments, the antigen binding protein or antibody or a paratope in an antibody binds to human ASGR-1 at an epitope comprising at least one of the following amino acid residues: H161, E162, T193, S194, W195, E196, K199, Q202, T231, G232, F233, K234, N235, P238, D261, or R263 (SEQ ID NO:5). In some embodiments, the antigen binding protein or antibody or a paratope in an antibody binds to human ASGR-1 at an epitope comprising at least one of the following amino acid residues: T193, S194, W195, E196, P220, W221, G226, T227, D228, Y229, E230, T231, G232, F233, K234, N235, W236, R237, P238, E239, G252, H161, E162, V191, V192, E197, Q198, D216, G219, K222, W223, D225, R263, or W264 (SEQ ID NO:5). In some embodiments, the antigen binding protein or antibody or a paratope in an antibody binds to human ASGR-1 at an epitope comprising at least one of the following amino acid residues: T193, S194, W195, E196, P220, W221, G226, T227, D228, Y229, E230, T231, G232, F233, K234, N235, W236, R237, P238, E239, or G252 (SEQ ID NO:5). In some embodiments, the antigen binding protein or antibody or a paratope in an antibody binds to human ASGR-1 at an epitope comprising at least one of the following amino acid residues: D216, Q217, N218, G219, P220, W221, Y229, E230, K234, W236, E239, Q240, P241, D242, D243, W244, Y245, G246, L249, G250, G251, G252, D254, Q270, H215, K222, T231, G232, R237, P238, H247, G248, E253, C255, D266, V268, or C269 (SEQ ID NO:5). In some embodiments, the antigen binding protein or antibody or a paratope in an antibody binds to human ASGR-1 at an epitope comprising at least one of the following amino acid residues: D216, Q217, N218, G219, P220, W221, Y229, E230, K234, W236, E239, Q240, P241, D242, D243, W244, Y245, G246, L249, G250, G251, G252, D254, or Q270 (SEQ ID NO:5). In some embodiments, the antigen binding protein or antibody or a paratope in an antibody binds to human ASGR-1 at an epitope comprising at least one of the following amino acid residues: W195, N209, N235, R237, P238, E239, Q240, D242, H257, T259, D260, D261, R263, N265, D267, R271, Y273, Q198, Q202, P207, V208, F233, W236, D243, E253, F258, G262, W264, or D266 (SEQ ID NO:5). In some embodiments when the antigen binding protein or antibody or a paratope in an antibody is bound to human ASGR-1, the antigen binding protein or antibody or a paratope in an antibody is positioned 5 angstroms or less from at least one of the following residues: W195, N209, N235, R237, P238, E239, Q240, D242, H257, T259, D260, D261, R263, N265, D267, R271, or Y273 (SEQ ID NO:5). In some embodiments, the antigen binding protein or antibody or a paratope in an antibody binds to human ASGR-1 at an epitope comprising at least one of the following amino acid residues: N157, R170, S171, G172, Q202, H203, H204, I205, G206, P207, V208, N209, T210, D260, R271, P272, Y273, R274, V156, W158, V159, H161, W167, F168, S169, K173, K199, F200, V201, W211, R237, H257, F258, T259, D261, D267, V268, Q270, or W275 (SEQ ID NO:5). In some embodiments, the antigen binding protein or antibody or a paratope in an antibody binds to human ASGR-1 at an epitope comprising at least one of the following amino acid residues: N157, R170, S171, G172, Q202, H203, H204, I205, G206, P207, V208, N209, T210, D260, R271, P272, Y273, or R274 (SEQ ID NO:5). In some embodiments, the antigen binding protein or antibody or a paratope in an antibody binds to human ASGR-1 at an epitope comprising at least one of the following amino acid residues: R170, 5171, G172, A174, H204, I205, G206, P207, V208, N209, H257, D260, N265, D267, Q270, R271, P272, Y273, R274, W167, F168, 5169, K173, W175, D177, Y181, Q202, H203, T210, W211, R237, F258, T259, D261, D266, V268, C269, or W275 (SEQ ID NO:5). In some embodiments, the antigen binding protein or antibody or a paratope in an antibody binds to human ASGR-1 at an epitope comprising at least one of the following amino acid residues: R170, S171, G172, A174, H204, I205, G206, P207, V208, N209, H257, D260, N265, D267, Q270, R271, P272, Y273, or R274 (SEQ ID NO:5). In some embodiments, the antigen binding protein or antibody or a paratope in an antibody binds to human ASGR-1 at an epitope comprising at least one of the following amino acid residues: R170, S171, G172, K173, A174, D177, P207, V208, N209, R237, Q240, W244, G246, H247, G248, L249, E253, H257, T259, D260, N265, D267, Q270, R271, P272, Y273, R274, S169, W175, A176, A178, T210, W211, W236, P238, E239, D242, Y245, G250, G251, F258, D261, G262, R263, W264, D266, V268, C269, or W275 (SEQ ID NO:5). In some embodiments, the antigen binding protein or antibody or a paratope in an antibody binds to human ASGR-1 at an epitope comprising at least one of the following amino acid residues: R170, S171, G172, K173, A174, D177, P207, V208, N209, R237, Q240, W244, G246, H247, G248, L249, E253, H257, T259, D260, N265, D267, Q270, R271, P272, Y273, or R274 (SEQ ID NO:5).

[0014] In some aspects, the invention provides an isolated antigen binding protein or an antibody or a paratope in an antibody that specifically binds to human ASGR-1 and inhibits human ASGR-1 function. In some embodiments, the isolated antigen binding protein or an antibody or a paratope in an antibody specifically binds to human ASGR-1 and inhibits human ASGR-1 from binding to a ligand. In some embodiments, the antigen binding protein or antibody or a paratope in an antibody specifically binds to human ASGR-1 within residues 148-291 of SEQ ID NO:5. In some embodiments when the antigen binding protein or antibody or a paratope in an antibody is bound to human ASGR-1, the antigen binding protein or antibody or a paratope in an antibody is positioned 8 angstroms or less from at least one of the following residues: Q240, D242, W244, E253, N265, D266, D267, N209, R237, P238, E239, P241, D243, Y245, G246, H247, G252, C255, H257, T259, D260, V268, R271, Y273, R237, Q240, D242, W244, E253, N265, D266, D267, N209, P238, E239, P241, D243, Y245, G246, H247, G252, C255, H257, T259, V268, R271, Y273, N209, R237, Q240, D242, W244, E253, H257, T259, N265, D266, D267, Y273, P238, E239, P241, D243, Y245, G246, H247, G252, C255, F258, D260, R263, W264, V268, R271, D216, Q217, N218, G219, P220, W221, Y229, E230, K234, W236, E239, Q240, P241, D242, D243, W244, Y245, G246, L249, G250, G251, G252, D254, Q270, H215, K222, T231, G232, R237, P238, H247, G248, E253, C255, D266, V268, C269, W195, N209, N235, R237, P238, E239, Q240, D242, H257, T259, D260, D261, R263, N265, D267, R271, Y273, Q198, Q202, P207, V208, F233, W236, D243, E253, F258, G262, W264, D266, H161, E162, W195, E196, Q198, K199, F200, Q202, H203, H204, G232, F233, K234, N235, W236, R237, P238, D261, G262, R263, V159, E160, R163, T193, 5194, E197, V201, I205, G206, P207, Y229, E230, T231, E239, F258, T259, D260, W264, W167, 5171, G172, K173, A174, A176, D177, N180, Y181, R183, L184, E185, D186, Q270, P272, W275, P155, N157, W158, F168, 5169, R170, W175, A178, D179, C182, A187, W211, C269, R271, Y273, R274, C277, T279, R170, W195, E196, K199, Q202, H203, H204, I205, G206, P207, V208, F233, K234, N235, W236, P238, D260, D261, G262, R263, R274, N157, V159, F168, S169, S171, S194, Q198, F200, V201, T210, R237, E239, Q240, F258, T259, W264, H161, S194, W195, E196, Q198, K199, F200, Q202, H203, F233, K234, N235, W236, R237, P238, R263, E160, E162, V192, T193, E197, V201, H204, Y229, E230, T231, G232, E239, Q240, P241, D261, G262, W264, H161, E162, T193, S194, W195, E196, K199, Q202, T231, G232, F233, K234, N235, P238, D261, R263, R163, V192, E197, Q198, H203, P207, D228, E230, W236, R237, D260, G262, or W264, T193, S194, W195, E196, P220, W221, G226, T227, D228, Y229, E230, T231, G232, F233, K234, N235, W236, R237, P238, E239, G252, H161, E162, V191, V192, E197, Q198, D216, G219, K222, W223, D225, R263, W264, R170, S171, G172, A174, H204, I205, G206, P207, V208, N209, H257, D260, N265, D267, Q270, R271, P272, Y273, R274, W167, F168, S169, K173, W175, D177, Y181, Q202, H203, T210, W211, R237, F258, T259, D261, D266, V268, C269, W275, R170, S171, G172, K173, A174, D177, P207, V208, N209, R237, Q240, W244, G246, H247, G248, L249, E253, H257, T259, D260, N265, D267, Q270, R271, P272, Y273, R274, S169, W175, A176, A178, T210, W211, W236, P238, E239, D242, Y245, G250, G251, F258, D261, G262, R263, W264, D266, V268, C269, W275, N157, R170, S171, G172, Q202, H203, H204, I205, G206, P207, V208, N209, T210, D260, R271, P272, Y273, R274, V156, W158, V159, H161, W167, F168, S169, K173, K199, F200, V201, W211, R237, H257, F258, T259, D261, D267, V268, Q270, or W275 (SEQ ID NO:5). In some embodiments when the antigen binding protein or antibody or a paratope in an antibody is bound to human ASGR-1, the antigen binding protein or antibody or a paratope in an antibody is positioned 5 angstroms or less from at least one of the following residues: Q240, D242, W244, E253, N265, D266, D267, R237, Q240, D242, W244, E253, N265, D266, D267, N209, R237, Q240, D242, W244, E253, H257, T259, N265, D266, D267, Y273, D216, Q217, N218, G219, P220, W221, Y229, E230, K234, W236, E239, Q240, P241, D242, D243, W244, Y245, G246, L249, G250, G251, G252, D254, Q270, W195, N209, N235, R237, P238, E239, Q240, D242, H257, T259, D260, D261, R263, N265, D267, R271, Y273, H161, E162, W195, E196, Q198, K199, F200, Q202, H203, H204, G232, F233, K234, N235, W236, R237, P238, D261, G262, R263, W167, S171, G172, K173, A174, A176, D177, N180, Y181, R183, L184, E185, D186, Q270, P272, W275, R170, W195, E196, K199, Q202, H203, H204, I205, G206, P207, V208, F233, K234, N235, W236, P238, D260, D261, G262, R263, R274, H161, S194, W195, E196, Q198, K199, F200, Q202, H203, F233, K234, N235, W236, R237, P238, R263, H161, E162, T193, S194, W195, E196, K199, Q202, T231, G232, F233, K234, N235, P238, D261, R263, T193, S194, W195, E196, P220, W221, G226, T227, D228, Y229, E230, T231, G232, F233, K234, N235, W236, R237, P238, E239, G252, R170, S171, G172, A174, H204, I205, G206, P207, V208, N209, H257, D260, N265, D267, Q270, R271, P272, Y273, R274, R170, S171, G172, K173, A174, D177, P207, V208, N209, R237, Q240, W244, G246, H247, G248, L249, E253, H257, T259, D260, N265, D267, Q270, R271, P272, Y273, R274, N157, R170, S171, G172, Q202, H203, H204, I205, G206, P207, V208, N209, T210, D260, R271, P272, Y273, or R274 (SEQ ID NO:5).

[0015] In some embodiments when the antigen binding protein or antibody or a paratope in an antibody is bound to human ASGR-1, the antigen binding protein or antibody or a paratope in an antibody is positioned 8 angstroms or less from at least one of the following residues: Q240, D242, W244, E253, N265, D266, D267, N209, R237, P238, E239, P241, D243, Y245, G246, H247, G252, C255, H257, T259, D260, V268, R271, Y273, R237, Q240, D242, W244, E253, N265, D266, D267, N209, P238, E239, P241, D243, Y245, G246, H247, G252, C255, H257, T259, V268, R271, Y273, N209, R237, Q240, D242, W244, E253, H257, T259, N265, D266, D267, Y273, P238, E239, P241, D243, Y245, G246, H247, G252, C255, F258, D260, R263, W264, V268, R271, D216, Q217, N218, G219, P220, W221, Y229, E230, K234, W236, E239, Q240, P241, D242, D243, W244, Y245, G246, L249, G250, G251, G252, D254, Q270, H215, K222, T231, G232, R237, P238, H247, G248, E253, C255, D266, V268, C269, W195, N209, N235, R237, P238, E239, Q240, D242, H257, T259, D260, D261, R263, N265, D267, R271, Y273, Q198, Q202, P207, V208, F233, W236, D243, E253, F258, G262, W264, D266, R170, S171, G172, A174, H204, I205, G206, P207, V208, N209, H257, D260, N265, D267, Q270, R271, P272, Y273, R274, W167, F168, S169, K173, W175, D177, Y181, Q202, H203, T210, W211, R237, F258, T259, D261, D266, V268, C269, W275, R170, S171, G172, K173, A174, D177, P207, V208, N209, R237, Q240, W244, G246, H247, G248, L249, E253, H257, T259, D260, N265, D267, Q270, R271, P272, Y273, R274, S169, W175, A176, A178, T210, W211, W236, P238, E239, D242, Y245, G250, G251, F258, D261, G262, R263, W264, D266, V268, C269, or W275 (SEQ ID NO:5). In some embodiments when the antigen binding protein or antibody or a paratope in an antibody is bound to human ASGR-1, the antigen binding protein or antibody or a paratope in an antibody is positioned 5 angstroms or less from at least one of the following residues: Q240, D242, W244, E253, N265, D266, D267, R237, Q240, D242, W244, E253, N265, D266, D267, N209, R237, Q240, D242, W244, E253, H257, T259, N265, D266, D267, Y273, D216, Q217, N218, G219, P220, W221, Y229, E230, K234, W236, E239, Q240, P241, D242, D243, W244, Y245, G246, L249, G250, G251, G252, D254, Q270, W195, N209, N235, R237, P238, E239, Q240, D242, H257, T259, D260, D261, R263, N265, D267, R271, Y273, R170, S171, G172, A174, H204, I205, G206, P207, V208, N209, H257, D260, N265, D267, Q270, R271, P272, Y273, R274, R170, S171, G172, K173, A174, D177, P207, V208, N209, R237, Q240, W244, G246, H247, G248, L249, E253, H257, T259, D260, N265, D267, Q270, R271, P272, Y273, or R274 (SEQ ID NO:5). In some embodiments when the antigen binding protein or antibody or a paratope in an antibody is bound to human ASGR-1, the antigen binding protein or antibody or a paratope in an antibody is positioned 8 angstroms or less from at least one of the following residues: Q240, D242, W244, E253, N265, D266, D267, N209, R237, P238, E239, P241, D243, Y245, G246, H247, G252, C255, H257, T259, D260, V268, R271, Y273, R237, Q240, D242, W244, E253, N265, D266, D267, N209, P238, E239, P241, D243, Y245, G246, H247, G252, C255, H257, T259, V268, R271, Y273, N209, R237, Q240, D242, W244, E253, H257, T259, N265, D266, D267, or Y273 (SEQ ID NO:5). In some embodiments when the antigen binding protein or antibody or a paratope in an antibody is bound to human ASGR-1, the antigen binding protein or antibody or a paratope in an antibody is positioned 5 angstroms or less from at least one of the following residues: Q240, D242, W244, E253, N265, D266, D267, R237, Q240, D242, W244, E253, N265, D266, D267, N209, R237, Q240, D242, W244, E253, H257, T259, N265, D266, D267, or Y273 (SEQ ID NO:5). In some embodiments when the antigen binding protein or antibody or a paratope in an antibody is bound to human ASGR-1, the antigen binding protein or antibody or a paratope in an antibody is positioned 8 angstroms or less from at least one of the following residues: Q240, D242, W244, E253, N265, D266, D267, R237, Q240, D242, W244, E253, N265, D266, D267, N209, R237, Q240, D242, W244, E253, H257, T259, N265, D266, D267, or Y273 (SEQ ID NO:5). In some embodiments when the antigen binding protein or antibody or a paratope in an antibody is bound to human ASGR-1, the antigen binding protein or antibody or a paratope in an antibody is positioned 5 angstroms or less from at least one of the following residues: Q240, D242, W244, E253, N265, D266, or D267 (SEQ ID NO:5). In some embodiments when the antigen binding protein or antibody or a paratope in an antibody is bound to human ASGR-1, the antigen binding protein or antibody or a paratope in an antibody is positioned 8 angstroms or less from at least one of the following residues: R237, Q240, D242, W244, E253, N265, D266, D267, N209, P238, E239, P241, D243, Y245, G246, H247, G252, C255, H257, T259, V268, R271, or Y273 (SEQ ID NO:5). In some embodiments when the antigen binding protein or antibody or a paratope in an antibody is bound to human ASGR-1, the antigen binding protein or antibody or a paratope in an antibody is positioned 5 angstroms or less from at least one of the following residues: R237, Q240, D242, W244, E253, N265, D266, or D267 (SEQ ID NO:5). In some embodiments when the antigen binding protein or antibody or a paratope in an antibody is bound to human ASGR-1, the antigen binding protein or antibody or a paratope in an antibody is positioned 8 angstroms or less from at least one of the following residues: N209, R237, Q240, D242, W244, E253, H257, T259, N265, D266, D267, Y273, P238, E239, P241, D243, Y245, G246, H247, G252, C255, F258, D260, R263, W264, V268, or R271 (SEQ ID NO:5). In some embodiments when the antigen binding protein or antibody or a paratope in an antibody is bound to human ASGR-1, the antigen binding protein or antibody or a paratope in an antibody is positioned 5 angstroms or less from at least one of the following residues: N209, R237, Q240, D242, W244, E253, H257, T259, N265, D266, D267, or Y273 (SEQ ID NO:5). In some embodiments when the antigen binding protein or antibody or a paratope in an antibody is bound to human ASGR-1, the antigen binding protein or antibody or a paratope in an antibody is positioned 8 angstroms or less from at least one of the following residues: D216, Q217, N218, G219, P220, W221, Y229, E230, K234, W236, E239, Q240, P241, D242, D243, W244, Y245, G246, L249, G250, G251, G252, D254, Q270, H215, K222, T231, G232, R237, P238, H247, G248, E253, C255, D266, V268, or C269 (SEQ ID NO:5). In some embodiments when the antigen binding protein or antibody is bound to human ASGR-1, the antigen binding protein or antibody or a paratope in an antibody is positioned 5 angstroms or less from at least one of the following residues: D216, Q217, N218, G219, P220, W221, Y229, E230, K234, W236, E239, Q240, P241, D242, D243, W244, Y245, G246, L249, G250, G251, G252, D254, or Q270 (SEQ ID NO:5). In some embodiments when the antigen binding protein or antibody or a paratope in an antibody is bound to human ASGR-1, the antigen binding protein or antibody or a paratope in an antibody is positioned 8 angstroms or less from at least one of the following residues: W195, N209, N235, R237, P238, E239, Q240, D242, H257, T259, D260, D261, R263, N265, D267, R271, Y273, Q198, Q202, P207, V208, F233, W236, D243, E253, F258, G262, W264, or D266 (SEQ ID NO:5). In some embodiments when the antigen binding protein or antibody or a paratope in an antibody is bound to human ASGR-1, the antigen binding protein or antibody or a paratope in an antibody is positioned 5 angstroms or less from at least one of the following residues: W195, N209, N235, R237, P238, E239, Q240, D242, H257, T259, D260, D261, R263, N265, D267, R271, or Y273 (SEQ ID NO:5). In some embodiments when the antigen binding protein or antibody or a paratope in an antibody is bound to human ASGR-1, the antigen binding protein or antibody or a paratope in an antibody is positioned 8 angstroms or less from at least one of the following residues: R170, S171, G172, A174, H204, I205, G206, P207, V208, N209, H257, D260, N265, D267, Q270, R271, P272, Y273, R274, W167, F168, S169, K173, W175, D177, Y181, Q202, H203, T210, W211, R237, F258, T259, D261, D266, V268, C269, or W275 (SEQ ID NO:5). In some embodiments when the antigen binding protein or antibody or a paratope in an antibody is bound to human ASGR-1, the antigen binding protein or antibody or a paratope in an antibody is positioned 5 angstroms or less from at least one of the following residues: R170, S171, G172, A174, H204, I205, G206, P207, V208, N209, H257, D260, N265, D267, Q270, R271, P272, Y273, or R274 (SEQ ID NO:5). In some embodiments when the antigen binding protein or antibody or a paratope in an antibody is bound to human ASGR-1, the antigen binding protein or antibody or a paratope in an antibody is positioned 8 angstroms or less from at least one of the following residues: R170, S171, G172, K173, A174, D177, P207, V208, N209, R237, Q240, W244, G246, H247, G248, L249, E253, H257, T259, D260, N265, D267, Q270, R271, P272, Y273, R274, S169, W175, A176, A178, T210, W211, W236, P238, E239, D242, Y245, G250, G251, F258, D261, G262, R263, W264, D266, V268, C269, or W275 (SEQ ID NO:5). In some embodiments when the antigen binding protein or antibody or a paratope in an antibody is bound to human ASGR-1, the antigen binding protein or antibody or a paratope in an antibody is positioned 5 angstroms or less from at least one of the following residues: R170, S171, G172, K173, A174, D177, P207, V208, N209, R237, Q240, W244, G246, H247, G248, L249, E253, H257, T259, D260, N265, D267, Q270, R271, P272, Y273, or R274 (SEQ ID NO:5). In some embodiments when the antigen binding protein or antibody or a paratope in an antibody is bound to human ASGR-1, the antigen binding protein or antibody or a paratope in an antibody is positioned 8 angstroms or less from at least one of the following residues: D216, Q217, N218, G219, P220, W221, Y229, E230, K234, W236, E239, Q240, P241, D242, D243, W244, Y245, G246, L249, G250, G251, G252, D254, Q270, H215, K222, T231, G232, R237, P238, H247, G248, E253, C255, D266, V268, C269, W195, N209, N235, R237, P238, E239, Q240, D242, H257, T259, D260, D261, R263, N265, D267, R271, Y273, Q198, Q202, P207, V208, F233, W236, D243, E253, F258, G262, W264, D266, H161, E162, W195, E196, Q198, K199, F200, Q202, H203, H204, G232, F233, K234, N235, W236, R237, P238, D261, G262, R263, V159, E160, R163, T193, 5194, E197, V201, I205, G206, P207, Y229, E230, T231, E239, F258, T259, D260, W264, W167, 5171, G172, K173, A174, A176, D177, N180, Y181, R183, L184, E185, D186, Q270, P272, W275, P155, N157, W158, F168, 5169, R170, W175, A178, D179, C182, A187, W211, C269, R271, Y273, R274, C277, T279, R170, W195, E196, K199, Q202, H203, H204, I205, G206, P207, V208, F233, K234, N235, W236, P238, D260, D261, G262, R263, R274, N157, V159, F168, S169, S171, S194, Q198, F200, V201, T210, R237, E239, Q240, F258, T259, W264, H161, S194, W195, E196, Q198, K199, F200, Q202, H203, F233, K234, N235, W236, R237, P238, R263, E160, E162, V192, T193, E197, V201, H204, Y229, E230, T231, G232, E239, Q240, P241, D261, G262, W264, H161, E162, T193, S194, W195, E196, K199, Q202, T231, G232, F233, K234, N235, P238, D261, R263, R163, V192, E197, Q198, H203, P207, D228, E230, W236, R237, D260, G262, or W264, T193, S194, W195, E196, P220, W221, G226, T227, D228, Y229, E230, T231, G232, F233, K234, N235, W236, R237, P238, E239, G252, H161, E162, V191, V192, E197, Q198, D216, G219, K222, W223, D225, R263, W264, R170, S171, G172, A174, H204, I205, G206, P207, V208, N209, H257, D260, N265, D267, Q270, R271, P272, Y273, R274, W167, F168, S169, K173, W175, D177, Y181, Q202, H203, T210, W211, R237, F258, T259, D261, D266, V268, C269, W275, R170, S171, G172, K173, A174, D177, P207, V208, N209, R237, Q240, W244, G246, H247, G248, L249, E253, H257, T259, D260, N265, D267, Q270, R271, P272, Y273, R274, S169, W175, A176, A178, T210, W211, W236, P238, E239, D242, Y245, G250, G251, F258, D261, G262, R263, W264, D266, V268, C269, W275, N157, R170, S171, G172, Q202, H203, H204, I205, G206, P207, V208, N209, T210, D260, R271, P272, Y273, R274, V156, W158, V159, H161, W167, F168, S169, K173, K199, F200, V201, W211, R237, H257, F258, T259, D261, D267, V268, Q270, or W275 (SEQ ID NO:5). In some embodiments when the antigen binding protein or antibody or a paratope in an antibody is bound to human ASGR-1, the antigen binding protein or antibody or a paratope in an antibody is positioned 5 angstroms or less from at least one of the following residues of human ASGR-1 (SEQ ID NO:5): D216, Q217, N218, G219, P220, W221, Y229, E230, K234, W236, E239, Q240, P241, D242, D243, W244, Y245, G246, L249, G250, G251, G252, D254, Q270, W195, N209, N235, R237, P238, E239, Q240, D242, H257, T259, D260, D261, R263, N265, D267, R271, Y273, H161, E162, W195, E196, Q198, K199, F200, Q202, H203, H204, G232, F233, K234, N235, W236, R237, P238, D261, G262, R263, W167, S171, G172, K173, A174, A176, D177, N180, Y181, R183, L184, E185, D186, Q270, P272, W275, R170, W195, E196, K199, Q202, H203, H204, I205, G206, P207, V208, F233, K234, N235, W236, P238, D260, D261, G262, R263, R274, H161, 5194, W195, E196, Q198, K199, F200, Q202, H203, F233, K234, N235, W236, R237, P238, R263, H161, E162, T193, 5194, W195, E196, K199, Q202, T231, G232, F233, K234, N235, P238, D261, R263, T193, 5194, W195, E196, P220, W221, G226, T227, D228, Y229, E230, T231, G232, F233, K234, N235, W236, R237, P238, E239, G252, R170, 5171, G172, A174, H204, I205, G206, P207, V208, N209, H257, D260, N265, D267, Q270, R271, P272, Y273, R274, R170, 5171, G172, K173, A174, D177, P207, V208, N209, R237, Q240, W244, G246, H247, G248, L249, E253, H257, T259, D260, N265, D267, Q270, R271, P272, Y273, R274, N157, R170, 5171, G172, Q202, H203, H204, I205, G206, P207, V208, N209, T210, D260, R271, P272, Y273, or R274 (SEQ ID NO:5). In some embodiments when the antigen binding protein or antibody or a paratope in an antibody is bound to human ASGR-1, the antigen binding protein or antibody or a paratope in an antibody is positioned 8 angstroms or less from at least one of the following residues: H161, E162, W195, E196, Q198, K199, F200, Q202, H203, H204, G232, F233, K234, N235, W236, R237, P238, D261, G262, R263, V159, E160, R163, T193, S194, E197, V201, I205, G206, P207, Y229, E230, T231, E239, F258, T259, D260, W264, W167, S171, G172, K173, A174, A176, D177, N180, Y181, R183, L184, E185, D186, Q270, P272, W275, P155, N157, W158, F168, S169, R170, W175, A178, D179, C182, A187, W211, C269, R271, Y273, R274, C277, T279, R170, W195, E196, K199, Q202, H203, H204, I205, G206, P207, V208, F233, K234, N235, W236, P238, D260, D261, G262, R263, R274, N157, V159, F168, S169, S171, S194, Q198, F200, V201, T210, R237, E239, Q240, F258, T259, W264, H161, S194, W195, E196, Q198, K199, F200, Q202, H203, F233, K234, N235, W236, R237, P238, R263, E160, E162, V192, T193, E197, V201, H204, Y229, E230, T231, G232, E239, Q240, P241, D261, G262, W264, H161, E162, T193, S194, W195, E196, K199, Q202, T231, G232, F233, K234, N235, P238, D261, R263, R163, V192, E197, Q198, H203, P207, D228, E230, W236, R237, D260, G262, or W264, T193, S194, W195, E196, P220, W221, G226, T227, D228, Y229, E230, T231, G232, F233, K234, N235, W236, R237, P238, E239, G252, H161, E162, V191, V192, E197, Q198, D216, G219, K222, W223, D225, R263, W264, N157, R170, S171, G172, Q202, H203, H204, I205, G206, P207, V208, N209, T210, D260, R271, P272, Y273, R274, V156, W158, V159, H161, W167, F168, S169, K173, K199, F200, V201, W211, R237, H257, F258, T259, D261, D267, V268, Q270, or W275 (SEQ ID NO:5). In some embodiments when the antigen binding protein or antibody or a paratope in an antibody is bound to human ASGR-1, the antigen binding protein or antibody or a paratope in an antibody is positioned 5 angstroms or less from at least one of the following residues: H161, E162, W195, E196, Q198, K199, F200, Q202, H203, H204, G232, F233, K234, N235, W236, R237, P238, D261, G262, R263, W167, 5171, G172, K173, A174, A176, D177, N180, Y181, R183, L184, E185, D186, Q270, P272, W275, R170, W195, E196, K199, Q202, H203, H204, I205, G206, P207, V208, F233, K234, N235, W236, P238, D260, D261, G262, R263, R274, H161, 5194, W195, E196, Q198, K199, F200, Q202, H203, F233, K234, N235, W236, R237, P238, R263, H161, E162, T193, S194, W195, E196, K199, Q202, T231, G232, F233, K234, N235, P238, D261, R263, T193, S194, W195, E196, P220, W221, G226, T227, D228, Y229, E230, T231, G232, F233, K234, N235, W236, R237, P238, E239, G252, N157, R170, S171, G172, Q202, H203, H204, I205, G206, P207, V208, N209, T210, D260, R271, P272, Y273, R274, V156, W158, V159, H161, W167, F168, S169, K173, (SEQ ID NO:5). In some embodiments when the antigen binding protein or antibody or a paratope in an antibody is bound to human ASGR-1, the antigen binding protein or antibody or a paratope in an antibody is positioned 8 angstroms or less from at least one of the following residues: H161, E162, W195, E196, Q198, K199, F200, Q202, H203, H204, G232, F233, K234, N235, W236, R237, P238, D261, G262, R263, V159, E160, R163, T193, S194, E197, V201, I205, G206, P207, Y229, E230, T231, E239, F258, T259, D260, or W264 (SEQ ID NO:5). In some embodiments when the antigen binding protein or antibody or a paratope in an antibody is bound to human ASGR-1, the antigen binding protein or antibody or a paratope in an antibody is positioned 5 angstroms or less from at least one of the following residues of human ASGR-1 (SEQ ID NO:5): H161, E162, W195, E196, Q198, K199, F200, Q202, H203, H204, G232, F233, K234, N235, W236, R237, P238, D261, G262, or R263 (SEQ ID NO:5). In some embodiments when the antigen binding protein or antibody or a paratope in an antibody is bound to human ASGR-1, the antigen binding protein or antibody or a paratope in an antibody is positioned 8 angstroms or less from at least one of the following residues: W167, S171, G172, K173, A174, A176, D177, N180, Y181, R183, L184, E185, D186, Q270, P272, W275, P155, N157, W158, F168, S169, R170, W175, A178, D179, C182, A187, W211, C269, R271, Y273, R274, C277, or T279 (SEQ ID NO:5). In some embodiments when the antigen binding protein or antibody or a paratope in an antibody is bound to human ASGR-1, the antigen binding protein or antibody or a paratope in an antibody is positioned 5 angstroms or less from at least one of the following residues: W167, S171, G172, K173, A174, A176, D177, N180, Y181, R183, L184, E185, D186, Q270, P272, or W275 (SEQ ID NO:5). In some embodiments when the antigen binding protein or antibody or a paratope in an antibody is bound to human ASGR-1, the antigen binding protein or antibody or a paratope in an antibody is positioned 8 angstroms or less from at least one of the following residues: R170, W195, E196, K199, Q202, H203, H204, I205, G206, P207, V208, F233, K234, N235, W236, P238, D260, D261, G262, R263, R274, N157, V159, F168, S169, S171, S194, Q198, F200, V201, T210, R237, E239, Q240, F258, T259, or W264 (SEQ ID NO:5). In some embodiments when the antigen binding protein or antibody or a paratope in an antibody is bound to human ASGR-1, the antigen binding protein or or a paratope in an antibody is positioned 5 angstroms or less from at least one of the following residues: R170, W195, E196, K199, Q202, H203, H204, I205, G206, P207, V208, F233, K234, N235, W236, P238, D260, D261, G262, R263, or R274 (SEQ ID NO:5). In some embodiments when the antigen binding protein or antibody or a paratope in an antibody is bound to human ASGR-1, the antigen binding protein or antibody or a paratope in an antibody is positioned 8 angstroms or less from at least one of the following residues: H161, S194, W195, E196, Q198, K199, F200, Q202, H203, F233, K234, N235, W236, R237, P238, R263, E160, E162, V192, T193, E197, V201, H204, Y229, E230, T231, G232, E239, Q240, P241, D261, G262, or W264 (SEQ ID NO:5). In some embodiments when the antigen binding protein or antibody or a paratope in an antibody is bound to human ASGR-1, the antigen binding protein or antibody or a paratope in an antibody is positioned 5 angstroms or less from at least one of the following residues: H161, S194, W195, E196, Q198, K199, F200, Q202, H203, F233, K234, N235, W236, R237, P238, or R263 (SEQ ID NO:5). In some embodiments when the antigen binding protein or antibody or a paratope in an antibody is bound to human ASGR-1, the antigen binding protein or antibody or a paratope in an antibody is positioned 8 angstroms or less from at least one of the following residues: H161, E162, T193, S194, W195, E196, K199, Q202, T231, G232, F233, K234, N235, P238, D261, R263, R163, V192, E197, Q198, H203, P207, D228, E230, W236, R237, D260, G262, or W264 (SEQ ID NO:5). In some embodiments when the antigen binding protein or antibody or a paratope in an antibody is bound to human ASGR-1, the antigen binding protein or antibody or a paratope in an antibody is positioned 5 angstroms or less from at least one of the following residues: H161, E162, T193, S194, W195, E196, K199, Q202, T231, G232, F233, K234, N235, P238, D261, or R263 (SEQ ID NO:5). In some embodiments when the antigen binding protein or antibody or a paratope in an antibody is bound to human ASGR-1, the antigen binding protein or antibody or a paratope in an antibody is positioned 8 angstroms or less from at least one of the following residues: T193, S194, W195, E196, P220, W221, G226, T227, D228, Y229, E230, T231, G232, F233, K234, N235, W236, R237, P238, E239, G252, H161, E162, V191, V192, E197, Q198, D216, G219, K222, W223, D225, R263, or W264 (SEQ ID NO:5). In some embodiments when the antigen binding protein or antibody or a paratope in an antibody is bound to human ASGR-1, the antigen binding protein or antibody or a paratope in an antibody is positioned 5 angstroms or less from at least one of the following residues: T193, S194, W195, E196, P220, W221, G226, T227, D228, Y229, E230, T231, G232, F233, K234, N235, W236, R237, P238, E239, or G252 (SEQ ID NO:5). In some embodiments when the antigen binding protein or antibody or a paratope in an antibody is bound to human ASGR-1, the antigen binding protein or antibody or a paratope in an antibody is positioned 8 angstroms or less from at least one of the following residues: N157, R170, S171, G172, Q202, H203, H204, I205, G206, P207, V208, N209, T210, D260, R271, P272, Y273, R274, V156, W158, V159, H161, W167, F168, S169, K173, K199, F200, V201, W211, R237, H257, F258, T259, D261, D267, V268, Q270 or W275 (SEQ ID NO:5). In some embodiments when the antigen binding protein or antibody or a paratope in an antibody is bound to human ASGR-1, the antigen binding protein or antibody or a paratope in an antibody is positioned 5 angstroms or less from at least one of the following residues: N157, R170, S171, G172, Q202, H203, H204, I205, G206, P207, V208, N209, T210, D260, R271, P272, Y273 or R274 (SEQ ID NO:5).

[0016] In some aspects, the invention comprises an isolated antigen binding protein or antibody that specifically binds to human ASGR-1 and inhibits human ASGR-1 function. In some embodiments, the isolated antigen binding protein or antibody that specifically binds to human ASGR-1 inhibits binding of human ASGR-1 binding to a ligand. In some embodiments, the antigen binding protein or antibody specifically binds to human ASGR-1 at a location that overlaps with a location where a ligand binds to human ASGR-1. In some embodiments, the location where a ligand binds to ASGR-1 includes at least one amino acid residue selected from the group consisting of: N209, R237, Q240, D242, W244, E253, H257, T259, N265, D266, D267, Y273, P238, E239, P241, D243, Y245, G246, H247, G252, C255, F258, D260, R263, W264, V268, or R271 (SEQ ID NO:5). In some embodiments, an isolated antigen binding protein or an antibody specifically binds to human ASGR-1 at a location that overlaps with a location that a ligand binds to ASGR-1. In some embodiments, the location that a ligand binds to human ASGR-1 includes at least one amino acid residue selected from the group consisting of: N209, R237, Q240, D242, W244, E253, H257, T259, N265, D266, D267, and Y273 (SEQ ID NO:5).

[0017] In some aspects, the invention comprises an isolated antigen binding protein that binds to human ASGR-1 and inhibits human ASGR, ASGR-1 and/or ASGR-2 function, wherein the antigen binding protein does not bind to a variant ASGR-1 protein, and wherein said variant ASGR-1 protein comprises a single mutation of a residue selected the group consisting of: R170, 5171, G172, R183, L184, W195, E196, K199, H203, H204, P207, V208, N209, H215, D216, P220, D225, D228, R237, P238, E239, P241, D242, D243, Y245, G246, H247, G248, L249, G251, E253, T259, D260, R263, N265, Q270, R271, P272, R274, and E280 as shown in SEQ ID NO:5. In some embodiments, an isolated antigen binding protein or an antibody is contemplated. An antigen binding protein “does not bind” to a variant ASGR-1 protein when the measured reduction in antibody binding signal to a variant ASGR-1 protein (compared to that determined for binding to wild type ASGR-1) is statistically significant as measured by any number of methods known to one skilled in the art, such as the method described in Example 7E below. In some embodiments, the variant ASGR-1 protein comprises a single mutation of a residue at a position selected from the group consisting of: W195, E196, K199, H203, H204, P207, P220, G251, and R263 as shown in SEQ ID NO:5. In some embodiments, the single mutation is selected from the group consisting of H203, H204, P220, and G251. In some embodiments, the single mutation is selected from the group consisting of W195, E196 and K199. In some embodiments, the single mutation is selected from the group consisting of W195, E196 and H204. In some embodiments, the single mutation is selected from the group consisting W195, K199, and R263. In some embodiments, the single mutation is selected from the group consisting of W195 and E196. In some embodiments, the single mutation is selected from the group consisting of W195 and K199. In some embodiments, the single mutation is selected from the group consisting of W195 or P207. In some embodiments, the single mutation is selected from the group consisting of W195 and R263. In some embodiments, the single mutation is selected from the group consisting of H203 and H204. In some embodiments, the single mutation is selected from the group consisting of K199 and R263. In some embodiments, the single mutation is a mutation of residue W195. In some embodiments, the variant ASGR-1 protein comprises a single mutation of a residue selected the group consisting of: R170, S171, R183, L184, H215, P220, P238, G246, H247, G248, G251, and N265 as shown in SEQ ID NO:5. In some embodiments, the single mutation is selected from the group consisting of R183, L184, H215, P220, G246, G248, G251, and N265. In some embodiments, the single mutation is selected from the group consisting of L184, P220, P238, H247, and G251. In some embodiments, the single mutation is selected from the group consisting of R170, S171, and L184. In some embodiments, the single mutation is a mutation of residue R183. In some embodiments, the single mutation is a mutation of residue L184. In some embodiments, the variant ASGR-1 protein comprises a single mutation of a residue at a position selected from the group consisting of: P241, D242, D243, Y245, G251, E253 and D260 as shown in SEQ ID NO:5. In some embodiments, the single mutation is selected from the group consisting of P241, D243, Y245, G251, E253 and D260. In some embodiments, the single mutation is selected from the group consisting of P241, D243, and E253. In some embodiments, the single mutation is a mutation of residue D260. In some embodiments, the variant ASGR-1 protein comprises a single mutation of a residue at a position selected from the group consisting or comprising: R170, R237, E239, P241, T259, D260, R263, and N265 as shown in SEQ ID NO:5. In some embodiments, the single mutation is selected from the group consisting of R237, D260 and R263. In some embodiments, the single mutation is selected from the group consisting of R237, T259, D260 and R263. In some embodiments, the single mutation is selected from the group consisting of R170, R237, P241, T259, D260, R263 and N265. In some embodiments, the single mutation is selected from the group consisting of R237, E239, P241, T259, D260, R263 and N265. In some embodiments, the variant ASGR-1 protein comprises a single mutation of a residue at a position selected from the group consisting or comprising: R170, S171, G172, E196, H204, P207, V208, N209, H215, D216, D225, D228, P238, P241, D242, D243, H247, G248, L249, G251, D260, R263, N265, Q270, R271, P272, R274 and E280 as shown in SEQ ID NO:5. In some embodiments, the single mutation is selected from the group consisting of R170, S171, G172, E196, H204, P207, V208, N209, H215, D216, D225, D228, P238, P241, D242, D243, H247, G248, L249, G251, D260, R263, N265, Q270, R271, P272, R274 and E280 as shown in SEQ ID NO:5. In some embodiments, the single mutation is selected from the group consisting of R170, S171, G172, E196, H204, P207, H215, D216, D225, D228, D243, G248, L249, G251, D260, Q270, R271, P272, R274 and E280. In some embodiments, the single mutation is selected from the group consisting of G172, V208, R271, P272 and R274. In some embodiments, the single mutation is selected from the group consisting of G172, R271 and R274. In some embodiments, the single mutation is selected from the group consisting of G172, N209, and R271. In some embodiments, the single mutation is selected from the group consisting of R170, G172, V208, R271 and P272. In some embodiments, the single mutation is selected from the group consisting of G172, V208, P238, R271, P272 and R274. In some embodiments, the single mutation is selected from the group consisting of G172, P238, R271, P272 and R274. In some embodiments, the variant ASGR-1 protein comprises a single mutation of a residue at a position selected from the group consisting or comprising: G172, P238, R271 and R274 as shown in SEQ ID NO:5. In some embodiments, the variant ASGR-1 protein comprises a single mutation of a residue at a position selected from the group consisting or comprising: R170, G172, V208 and R274 as shown in SEQ ID NO:5. In some embodiments, the variant ASGR-1 protein comprises a single mutation of a residue at a position selected from the group consisting or comprising: R170, R183, H215 and Q270 as shown in SEQ ID NO:5. In some embodiments, the variant ASGR-1 protein comprises a single mutation of a residue at a position selected from the group consisting or comprising: P241, T259, and N265 as shown in SEQ ID NO:5. In some embodiments, the variant ASGR-1 protein comprises a single mutation of a residue at a position selected from the group consisting or comprising: P207 and R263 as shown in SEQ ID NO:5. In some embodiments, the variant ASGR-1 protein comprises a single mutation of a residue at a position selected from the group consisting or comprising: G172, P241, D242, H247, L249, N265, R271 and P272 as shown in SEQ ID NO:5. In some embodiments, the antigen binding protein or antibody does not bind to two or more variant ASGR-1 proteins, wherein the variant ASGR-1 proteins comprise the single mutations of the group individually.

[0018] In some aspects, the invention comprises a vector comprising a nucleic acid molecule as described herein. In some embodiments, the invention comprises a host cell comprising a nucleic acid molecule as described herein.

[0019] In some aspects, the invention comprises a nucleic acid molecule encoding the antigen binding protein as described herein.

[0020] In some aspects, the invention comprises a pharmaceutical composition comprising at least one antigen binding protein described herein.

[0021] In some aspects, the invention provides a method of treating or preventing a cardiovascular disease comprising administering to a patient in need thereof a therapeutically effective dose of an ASGR inhibitor as described herein. In some embodiments, the ASGR inhibitor is an inhibitor of ASGR-1. In some embodiments, the ASGR inhibitor is an inhibitor of ASGR-2. In some embodiments, the ASGR inhibitor is an inhibitor of ASGR-1 and ASGR-2. In some embodiments, the ASGR, ASGR-1 and/or ASGR-2 inhibitor is one or more of the antigen binding proteins described herein. In some embodiments, the ASGR, ASGR-1 and/or ASGR-2 inhibitor is an interfering RNA (e.g., siRNA or shRNA) as described herein. In some embodiments, the relative risk reduction of a cardiovascular event is at least about 5%, at least about 10%, at least about 15%, at least about 20%, at least about 25%, at least about 30%, at least about 35%, at least about 40%, at least about 45%, at least about 50%, at least about 55%, at least about 60% in the patient.

[0022] In some aspects, the invention provides a method of decreasing the risk of acquiring coronary artery disease or having a myocardial infarction (MI) comprising administering to a patient in need thereof a therapeutically effective dose of an ASGR inhibitor as described herein. In some embodiments, the ASGR inhibitor is an inhibitor of ASGR-1. In some embodiments, the ASGR inhibitor is an inhibitor of ASGR-2. In some embodiments, the ASGR inhibitor is an inhibitor of ASGR-1 and ASGR-2. In some embodiments, the ASGR, ASGR-1 and/or ASGR-2 inhibitor is one or more of the antigen binding proteins described herein. In some embodiments, the ASGR, ASGR-1 and/or ASGR-2 inhibitor is an interfering RNA (e.g., siRNA or shRNA) as described herein. In some embodiments, the relative risk reduction of coronary artery disease or MI is at least about 5%, at least about 10%, at least about 15%, at least about 20%, at least about 25%, at least about 30%, at least about 35%, at least about 40%, at least about 45%, at least about 50%, at least about 55%, at least about 60% in the patient.

[0023] In other aspects, the invention provides a method of reducing blood LDL cholesterol levels in a patient comprising administering to a patient in need thereof a therapeutically effective dose of an ASGR inhibitor as described herein. In some embodiments, the ASGR inhibitor is an inhibitor of ASGR-1. In some embodiments, the ASGR inhibitor is an inhibitor of ASGR-2. In some embodiments, the ASGR inhibitor is an inhibitor of ASGR-1 and ASGR-2. In some embodiments, the ASGR, ASGR-1 and/or ASGR-2 inhibitor is one or more of the antigen binding proteins described herein. In some embodiments, the ASGR, ASGR-1 and/or ASGR-2 inhibitor is an interfering RNA (e.g., siRNA or shRNA) as described herein. In some embodiments, blood LDL cholesterol is reduced by at least about 20%, at least about 25%, at least about 30%, at least about 35%, at least about 40%, at least about 45%, at least about 50%, at least about 55%, at least about 60%, at least about 65%, at least about 70%, at least about 75%, at least about 80%, at least about 85%, or at least about 90% as compared to a predose level of blood LDL cholesterol in the patient.

[0024] In still other aspects, the invention provides a method of reducing non-HDL cholesterol levels in a patient comprising administering to a patient in need thereof a therapeutically effective dose of an ASGR inhibitor as described herein. In some embodiments, the ASGR inhibitor is an inhibitor of ASGR-1. In some embodiments, the ASGR inhibitor is an inhibitor of ASGR-2. In some embodiments, the ASGR inhibitor is an inhibitor of ASGR-1 and ASGR-2. In some embodiments, the ASGR, ASGR-1 and/or ASGR-2 inhibitor is one or more of the antigen binding proteins described herein. In some embodiments, the ASGR, ASGR-1 and/or ASGR-2 inhibitor is an interfering RNA (e.g., siRNA or shRNA) as described herein. In some embodiments, non-HDL cholesterol is reduced by at least about 20%, at least about 25%, at least about 30%, at least about 35%, at least about 40%, at least about 45%, at least about 50%, at least about 55%, at least about 60%, at least about 65%, at least about 70%, at least about 75%, at least about 80%, at least about 85%, or at least about 90% as compared to a predose level of non-HDL cholesterol in the patient.

[0025] In some aspects, the invention provides a method of increasing alkaline phosphatase (“ALP”) levels in a patient comprising administering to a patient in need thereof a therapeutically effective dose of an ASGR inhibitor as described herein. In some embodiments, the ASGR inhibitor is an inhibitor of ASGR-1. In some embodiments, the ASGR inhibitor is an inhibitor of ASGR-2. In some embodiments, the ASGR inhibitor is an inhibitor of ASGR-1 and ASGR-2. In some embodiments, the ASGR, ASGR-1 and/or ASGR-2 inhibitor is one or more of the antigen binding proteins described herein. In some embodiments, the ASGR, ASGR-1 and/or ASGR-2 inhibitor is an interfering RNA (e.g., siRNA or shRNA) as described herein. In some embodiments, ALP levels are increased at least about 40%, at least about 45%, at least about 50%, at least about 55%, at least about 60%, at least about 65%, at least about 70%, at least about 75%, at least about 80%, at least about 85%, or at least about 90% as compared to a predose ALP level in the patient. In some embodiments, ALP levels are increased at least about 1.25×, 1.5×, 2×, 2.5×, 3×, 3.5×, 4×, 4.5×, and 5× over pretreatment.

[0026] In some aspects, the invention provides a method of antagonizing ASGR, ASGR-1 and/or ASGR-2 in a patient comprising administering to a patient in need thereof a therapeutically effective dose of an ASGR inhibitor as described herein. In some embodiments, the ASGR inhibitor is an inhibitor of ASGR-1. In some embodiments, the ASGR inhibitor is an inhibitor of ASGR-2. In some embodiments, the ASGR inhibitor is an inhibitor of ASGR-1 and ASGR-2. In some embodiments, the ASGR, ASGR-1 and/or ASGR-2 inhibitor is one or more of the antigen binding proteins described herein. In some embodiments, the ASGR, ASGR-1 and/or ASGR-2 inhibitor is an interfering RNA (e.g., siRNA or shRNA) as described herein.

### BRIEF DESCRIPTION OF THE FIGURES

[0027] FIG. 1A. ASGR-1 sequence alignments of human (SEQ ID NO: 32699), cynomolgus monkey (cyno) (SEQ ID NO: 32700), dog (SEQ ID NO: 32701), pig (SEQ ID NO: 32702), rat (SEQ ID NO: 32703) and mouse ASGR-1 (SEQ ID NO: 32704). The boxed areas denoting different regions of ASGR-1 (i.e., cytoplasmic, transmembrane, and the carbohydrate binding domain (CBD; also called the carbohydrate recognition domain, or CRD) are representative of the approximate amino acid locations of these regions; the human Y273 amino acid is boxed.

[0028] FIG. 1B. Human ASGR-1 sequence alignments (SEQ ID NOS 32705-32710, respectively, in order of appearance).

[0029] FIG. 2. ASGR-2 sequence alignments of human (SEQ ID NO: 32713), cyno (SEQ ID NO: 32714), dog (SEQ ID NO: 32716), pig (SEQ ID NO: 32715), rat (SEQ ID NO: 32712) and mouse ASGR-2 (SEQ ID NO: 32711). The boxed areas denoting different regions of ASGR-2 (i.e., cytoplasmic, transmembrane, and the carbohydrate binding domain (CBD; also called the carbohydrate recognition domain, or CRD) are representative of the approximate amino acid locations of these regions.

[0030] FIG. 3. Human ASGR-1 (SEQ ID NO: 32717) vs. human ASGR-2v2 (SEQ ID NO: 32718) alignments are provided.

[0031] FIG. 4. The del12 variant is associated with a splicing error and frameshift in ASGR-1. (A) Overview of the structure of the ASGR-1 mRNA. Exons 4 and 5 are highlighted (the del12 variant lies within intron 4 between exons 4 and 5 in the unspliced RNA) along with the positions of the PCR primers (red arrows) used to amplify the cDNA. (B) Agarose gel showing the PCR products generated by amplifying cDNA generated from RNA isolated from the blood of del12 carriers and non-carriers. Arrows indicate both the size of the expected PCR product (239 bp) along with the size of the truncated band (217 bp) observed only in del12 heterozygote carriers. (C) Shown is the sequence difference between the full-length (239 bp) and variant (217 bp) cDNA fragments based on Sanger sequencing. The variant sequence in del12 carriers lacks 22 bp at the end of exon 4 compared to the wild-type sequence that results in frame-shift and introduction of a stop codon. (D) Diagrammatic representation of the splicing defect observed in del12 carriers. The sequence around the exon 4-intron 4 boundary (exon 4 sequence in capital letters and intron 4 sequence in small letters) is shown along with the 5′ splice site in non-carriers and the cryptic 5′ splice site activated in del12 carriers. (E) Quantification of the full-length (239 bp) and variant (217 bp) cDNA fragments from heterozygote del12 carriers and non-carriers by direct digital counting of sequencing reads generated following sequencing of the amplified cDNA product from carriers and non-carriers of del12 using the Illumina TruSeq method. The percentage of incorrectly spliced ASGR-1 transcript is shown. Note that the incorrectly spliced form was completely undetectable in non-carriers.

[0032] FIG. 5. (A) The del12 variant was typed in the indicated populations a total of 41,648 CAD cases and 247,374 controls. For each cohort, the square (diamond in the case of the combined estimate) indicates the estimated odds ratio and the line shows the 95% confidence interval. There was no evidence of heterogeneity across the eight study populations (Phet=0.96). (B) Kaplan-Meier curves for survival to first myocardial infarction in carriers and non-carriers of del12 in ASGR-1 stratified by sex. The proportion of individuals that have not had a myocardial infarction is shown on the y-axis and plotted against age on the x-axis. Males and females are represented separately and a distinction is made between del12 carriers and non-carriers in each case.

[0033] FIG. 6. Comparison of relationship between CAD and non-HDL cholesterol levels between previously identified sequence variants and del12 in ASGR-1. Based on the Icelandic population, the estimated odds ratio (OR) of the minor allele for coronary artery disease (CAD, 41,648 cases and 247,374 controls) as a function of the estimated effect of the minor allele on non-HDL cholesterol levels (N=119,146). A full list of the sequence variants included is provided in Table 1.7. The error bars represent 95% confidence intervals. The del12 variant in ASGR-1 is shown. The line indicates the best linear regression fit through the origin.

[0034] FIG. 7. Analysis of serum ALP, ALT, and AST from ASGR-1 knockout mice is provided. Panel A is data from the male mice studied and Panel B is data from the female mice.

[0035] FIG. 8. RNAi in vitro data in CHO cells transfected with hASGR-1 using construct S1662. Panel A is a western blot demonstrating reduction of expression of human ASGR-1. Panel B is a graphical representation of the relative reduction in expression of human ASGR-1. Panel C demonstrates that CHO cells receiving construct S1662 displays a dramatic reduction in internalization of ligand (β-GalNAc).

[0036] FIG. 9. RNAi in vitro data in CHO cells transfected with mASGR-1 using various constructs. Panel A is a western blot demonstrating reduction of expression of mouse ASGR-1. Panel B is a graphical representation of the relative reduction in expression of mouse ASGR-1. Panel C demonstrates that CHO cells receiving the various constructs display a dramatic reduction in internalization of ligand (0-GalNAc).

[0037] FIG. 10. RNAi in vitro data in HepG2 cells using construct S1662. Panel A is a western blot demonstrating reduction of expression of human ASGR-1. Panel B is a graphical representation of the relative reduction in expression of human ASGR-1.

[0038] FIG. 11. RNAi in vitro data in CHO cells transfected with hASGR-2 using various constructs. Panel A is a western blot demonstrating reduction of expression of human ASGR-2. Panel B is a graphical representation of the relative reduction in expression of human ASGR-2 by the various constructs.

[0039] FIG. 12. RNAi in vitro data in CHO cells transfected with mASGR-1 and mASGR-2 using various other constructs. Panel A is a western blot demonstrating reduction of expression of mouse ASGR-1 (anti-mouse ASGR-1 or anti-flag) or mouse ASGR-2 (anti-his). Panel B is a graphical representation of the relative reduction in expression of mouse ASGR-1 by the various constructs. Panel C is a graphical representation of the relative reduction in expression of mouse ASGR-2 by the various constructs.

[0040] FIG. 13. RNAi in vitro data in HepG2 cells using various constructs. Panel A is a western blot demonstrating reduction of expression of human ASGR-2. Panel B is a graphical representation of the relative reduction in expression of human ASGR-2 by the various constructs.

[0041] FIG. 14. RNAi in vivo data in in C57BL/6J mice using various constructs over the course of 7 days with three injections total, one injection at day 0, one injection at day 2 and one injection at day 4. Panel A is a graphical representation of quantitative per data showing the relative reduction in expression of mASGR-1 RNA in the liver. Panel B is a graphical representation of the relative reduction in expression of mASGR-2 RNA in the liver.

[0042] FIG. 15. RNAi in vivo data in in C57BL/6J mice using various constructs over the course of 7 days with three injections total, one injection at day 0, one injection at day 2, and one injection at day 4. Panel A is a western blot demonstrating reduction of expression of mouse ASGR-1 protein. Panel B is a graphical representation of the relative increase of serum ALP activity.

[0043] FIG. 16. RNAi in vivo data in C57BL/6J mice using various constructs over the course of 7 days with one injection at day 0. Panel A is a graphical representation of the relative reduction in expression of mASGR-2 in the liver. Panel B is a graphical representation of the relative reduction in expression of mASGR-1 in the liver.

[0044] FIG. 17. RNAi in vivo data in C57BL/6J mice using various ASGR-2 constructs over the course of 7 days with one injection at day 0. The figure is a graphical representation of the relative increase in serum ALP activity.

[0045] FIG. 18. Panel A shows a computer representation of the crystal structure of the ASGR-1/lactose complex. Panel B is a computer representation of the observed electron density. Panel C is an enlarged view of the carbohydrate binding domain.

[0046] FIG. 19. Panel A shows a computer representation of the crystal structure of the ASGR-1/galactose complex. Panel B is a computer representation of the observed electron density. Panel C is an enlarged view of the carbohydrate binding domain.

[0047] FIG. 20. A computer representation of the crystal structure of an enlarged view of the conformational difference of R237 between the ASGR-1/lactose (white) complex and ASGR-1/galactose (black) complex.

[0048] FIG. 21. Panel A shows a computer representation of the crystal structure of the ASGR-1/GalNAc complex. Panel B is a computer representation of the observed electron density. Panel C is an enlarged view of the carbohydrate binding domain.

[0049] FIG. 22. Panel A shows a depiction of the structure of the ASGR-1 CBD and the 5E5 Fab. Panel B is an enlarged view of the ASGR-1 CBD and 5E5 Fab that represents a disordered carbohydrate binding loop with a dashed line and highlights the indirect inhibition of ASGR-1 CBD and the ligand (GalNAc) binding. Panel B also incorporates a double-headed arrow which represents a 5 angstrom distance from tip to tip.

[0050] FIG. 23. Panel A shows a depiction of the structure of the ASGR-1 CB and the 22G5 Fab. Panel B is an enlarged view of the ASGR-1 CBD and 22G5 Fab that represents a disordered carbohydrate binding loop with a dashed line and highlights the indirect inhibition of ASGR-1 CBD and the ligand (GalNAc) binding. Panel B also incorporates a double-headed arrow which represents a 5 angstrom distance from tip to tip.

[0051] FIG. 24. A depiction of the structure of the ASGR-1 CBD and the 4A2 Fab.

[0052] FIG. 25. An enlarged view of the structure of the ASGR-1 CBD and the 4A2 Fab that shows the CDRs of the 4A2 Fab that interact with ASGR-1 CBD Helix alpha-2 and highlights the indirect inhibition of ASGR-1 CBD and the ligand (GalNAc) binding. The figure incorporates a double-headed arrow which represents a 5 angstrom distance from tip to tip.

[0053] FIG. 26. An enlarged view of the structure of the ASGR-1 CBD and the carbohydrate binding loop with and without and the 4A2 Fab that includes a double-headed arrow which represents a 5 angstrom distance from tip to tip.

[0054] FIG. 27. A depiction of the structure of ASGR-1 CBD and the 7E11 Fab.

[0055] FIG. 28. An enlarged view of the structure of the ASGR-1 CBD and the 7E11 Fab. The figure represents a disordered carbohydrate binding loop with a dashed line and highlights the indirect inhibition of ASGR-1 CBD and the ligand (GalNAc) binding. The figure incorporates a double-headed arrow which represents a 5 angstrom distance from tip to tip.

[0056] FIG. 29. A depiction of the structure of the ASGR-1 CBD and the 4H6 Fab.

[0057] FIG. 30. An enlarged view of structure of the ASGR-1 CBD and the 4H6 Fab. The figure represents a disordered carbohydrate binding loop with a dashed line and highlights the indirect inhibition of ASGR-1 CBD and the ligand (GalNAc) binding. The figure incorporates a double-headed arrow which represents a 5 angstrom distance from tip to tip.

[0058] FIG. 31. A depiction of the structure of the ASGR-1 CBD and the 72G9 Fab.

[0059] FIG. 32. Panel A is an enlarged view of the structure of ASGR-1 CBD and the 72G9 Fab; and Panel B is a depiction of the structure of ASGR-1 CBD and the 72G9 Fab that also overlays the structure of ASGR-1 CBD and the ligand and highlights the direct inhibition of ASGR-1 CBD and the ligand (GalNAc) binding.

[0060] FIG. 33. A depiction of the structure of the ASGR-1 CBD and the 194A4 Fab.

[0061] FIG. 34. An enlarged view of the structure of the ASGR-1 CBD and the 194A4 Fab. The figure represents a disordered carbohydrate binding loop with a dashed line and highlights the indirect inhibition of ASGR-1 CBD and the ligand (GalNAc) binding. The figure incorporates a double-headed arrow which represents a 5 angstrom distance from tip to tip.

[0062] FIG. 35. A depiction of the structure of the ASGR-1 CBD and the 54E9 Fab.

[0063] FIG. 36. Panel A is an enlarged view of the structure of the ASGR-1 CBD and the 54E9 Fab; and Panel B is a depiction of the structure of the ASGR-1 CBD and the 54E9 Fab that also overlays the structure of ASGR-1 CBD and the ligand and highlights the direct inhibition of ASGR-1 CBD and the ligand (GalNAc) binding.

[0064] FIG. 37. Panel A is a depiction of the structure of the ASGR-1 CBD and the 218G4 Fab; and Panel B is an enlarged view of the structure of the ASGR-1 CBD and the 218G4 Fab.

[0065] FIG. 38. Panels A and B are enlarged views of the structure of ASGR-1 CBD and the 218G4 Fab that also overlays the structure of ASGR-1 CBD and the ligand. These figures highlight the direct inhibition of ASGR-1 CBD and the ligand (GalNAc) binding when the 218G4 Fab is present.

[0066] FIG. 39. A depiction of the structure of the ASGR-1 CBD and the 176H4 Fab.

[0067] FIG. 40. An enlarged view of the structure of the ASGR-1 CBD and the 176H4 Fab that also overlays the structure of ASGR-1 CBD and the ligand. This figure highlight the direct inhibition of ASGR-1 CBD and the ligand (GalNAc) binding when the 176H4 Fab is present.

[0068] FIG. 41. A depiction of the structure of the ASGR-1 CBD and the 194C10 Fab. This figure depicts represents a disordered carbohydrate binding loop with a dashed line and highlights possible indirect inhibition of ASGR-1 CBD and the ligand (GalNAc) binding.

[0069] FIG. 42. An enlarged view of the structure of the ASGR-1 CBD and the 194C10 Fab. This figure shows the CDRs of the 194C10 that interact with the ASGR-1 CBD and highlights that there may be direct inhibition of the ASGR-1 CBD and the ligand (GalNAc) binding.

[0070] FIG. 43. Panels A-C are graphical representations showing antibody binding results from human ASGR-1 and human ASGR-2 expressing cells.

[0071] FIG. 44. Panel A is a graphical representation of the effect of ASGR-1 antibody, 4A2, on serum LDL cholesterol levels in obese cynomolgus monkeys. Panel B is a graphical representation of the effect of ASGR-1 antibody, 4A2, on serum alkaline phosphatase levels in obese cynomolgus monkeys. Data is expressed in the % change from baseline.

[0072] FIG. 45. Panel A is a graphical representation of the effect of ASGR-1 antibody, 4A2, on serum LDL cholesterol levels in normal cynomolgus monkeys. Panel B is a graphical representation of the effect of ASGR-1 antibody, 4A2, on serum alkaline phosphatase levels in normal cynomolgus monkeys. Data is expressed in the % change from baseline.

[0073] FIG. 46. A coefficient of determination heat map representing the coefficient of determination profiles of test ASGR-1 ligand blocking antibody-reference antibody combinations from an Arginine/Glutamic Acid scanning mutagenesis (Example 7E). Dark shading represents highly similar data, while light shading represents highly dissimilar data. The relative epitope profiling (antibody competition/binding) bin assignments are also indicated.

[0074] FIG. 47. A computer representation showing alternative views of the ASGR-1 CBD protein and the surface locations of amino acid residues identified as being important for antibody binding via Arginine/Glutamic Acid scanning mutagenesis (Example 7E). The relative epitope profiling (antibody competition/binding) bin assignments are also indicated. Ligand (GalNAc) is shown as a stick representation (black). The ASGR-1 CBD is shown as a surface representation (light grey). The positions of amino acids identified by Arg/Glu mutational scanning are indicated (dark grey surface). The relative positions of key amino acids in each bin are shown for reference only.

[0075] FIG. 48. A table presenting various protein sequences for human, mouse, rat, pig, dog and cynomolgus monkey ASGR, ASGR-1 and ASGR-2 (Table 1).

[0076] FIG. 49. Two tables presenting variable light and heavy chain CDR1, CDR2 and CDR3 amino acid sequences for certain antigen binding proteins of the present invention (Table 2A and Table 2B). Table 2A presents the Variable Light Chain CDR1, CDR2 and CDR3, while Table 2B presents the Variable Heavy Chain CDR1, CDR2, and CDR3. The CDR sequences in Tables 2A and 2B are wrapped due to space issues, and unless stated otherwise, should be understood to be a single amino acid sequence.

[0077] FIG. 50. A table presenting the amino acid sequences of the light and heavy chain variable domains for certain antigen binding proteins of the present invention are displayed in a table (Table 3). The amino acid sequences of the light and heavy chain variable domains in Table 3 are wrapped due to space issues, and unless stated otherwise, should be understood to be single amino acid sequences.

[0078] FIG. 51. A table presenting a protein alignment of light and heavy variable regions for certain antigen binding proteins of the present invention (Table 4). An asterisk “*” denotes a stop codon. Sequences containing a stop codon are represented as distinct sequences in the Sequence Listing, however, these sequences are related. Generally speaking, however, the amino acid sequences of the light and heavy chain variable domains in the protein alignment presented in Table 4 are wrapped due to space issues, and unless stated otherwise, like in the case of sequences with one or more stop codons, should be understood to be single amino acid sequences.

[0079] FIG. 52. A table presenting a consensus protein alignment of light and heavy variable regions for certain antigen binding proteins of the present invention (Table 5). An asterisk “*” denotes a stop codon. Sequences containing a stop codon are represented as distinct sequences in the Sequence Listing, however, these sequences are related. Generally speaking, however, the amino acid sequences of the light and heavy chain variable domains in the consensus protein alignment presented in Table 5 are wrapped due to space issues, and unless stated otherwise, like in the case of sequences with one or more stop codons, should be understood to be single amino acid sequences.

[0080] FIG. 53. A table presenting a protein alignment of light and heavy variable regions for certain optimized antigen binding proteins of the present invention (Table 6). The amino acid sequences of the light and heavy chain variable domains in the protein alignment presented in Table 6 are wrapped due to space issues, and unless stated otherwise, should be understood to be single amino acid sequences.

[0081] FIG. 54. A table presenting a consensus protein alignment of light and heavy variable regions for certain optimized antigen binding proteins of the present invention (Table 7). The amino acid sequences of the light and heavy chain variable domains in the consensus protein alignment presented in Table 7 are wrapped due to space issues, and unless stated otherwise, should be understood to be single amino acid sequences.

[0082] FIG. 55. A group of tables presenting the consensus sequences of various heavy and light chain variable regions (Tables 19A and 20A, respectively), as well as the consensus sequences of CDRs of various heavy and light chain variable regions (Tables 19B and C and Tables 20B and 20C, respectively) for certain antigen binding proteins of the present invention.

[0083] FIG. 56. A group of tables presenting the detailed consensus protein alignment of various light and heavy chain variable regions for certain antigen binding proteins of the present invention (Tables 21-48). The shading of amino acid residues in the consensus protein alignment presented in Tables 21-48 denote particular residues that one of ordinary skill in the art may wish to target for engineering.

[0084] FIG. 57. A group of tables presenting the consensus protein alignment of various light and heavy chain variable regions for certain antigen binding proteins of the present invention (Tables 49-134).

[0085] FIG. 58. A graph depicting the credibility of protein measurements in cynomolgus monkey. Log10 RFU of mean protein levels in the two species are plotted and the ones with low credibility (light dots) and high credibility (darker dots) are marked.

[0086] FIG. 59. Serum protein analysis of cynomolgus monkey treated with anti-ASGR-1 antibodies. Panel A is a graph depicting TNFSF8 protein levels in individual animals of different treatment group across the time points. Panel B is a graph depicting normalized TNFSF8 protein levels (percent of time point 0) in individual animals of different treatment groups across the time points. Panel C is a graph depicting TNFSF8 protein levels in each treatment group (n=3, error bar represents the SEM), and Panel D is a graph depicting the distribution of TNFSF8 protein levels in human ASGR1 del12 carriers and non-carriers.

[0087] FIG. 60. A table presenting ASGR-1 residues identified as hits via Arg/Glu scanning mutagenesis.

### DETAILED DESCRIPTION OF THE VARIOUS EMBODIMENTS

[0088] As shown in Example 1 below, sequence variants in ASGR-1 (which resulted in either a faster degrading ASGR1 or a loss of function ASGR1 mutation) resulted in a lowering in the level of non-HDL cholesterol in humans. This in turn resulted in a decrease in the risk of coronary artery disease experienced by these people. As loss of function mutations in ASGR-1 resulted in both the lowering of non-HDL cholesterol and the lowering of coronary artery disease, antibodies and inhibitory RNA that effectively block ASGR can be used to lower the risk of coronary artery disease.

[0089] The present invention is directed to inhibitors of ASGR, ASGR-1 and/or ASGR-2. The present invention provides antigen binding proteins that specifically bind to human ASGR, ASGR-1 and/or ASGR-2 and inhibit human ASGR, ASGR-1 and/or ASGR-2 binding to a ligand. The present invention also provides antigen binding proteins that specifically bind to other species of ASGR, ASGR-1 and/or ASGR-2. The present invention is further directed to methods of treating or preventing cardiovascular disease in a human subject comprising administering an inhibitor of ASGR, ASGR-1 and/or ASGR-2, wherein the ASGR inhibitor an antigen binding protein and/or an interfering RNA (e.g., siRNA or shRNA).

[0090] The present invention further provides compositions, kits, and methods relating to antigen binding proteins that specifically bind to human ASGR, human ASGR-1, and/or human ASGR-2. Also provided are nucleic acid molecules comprising a sequence of polynucleotides that encode all or a portion of a polypeptide that specifically binds to human ASGR, human ASGR-1, and/or human ASGR-2. The present invention further provides vectors and plasmids comprising such nucleic acids, and cells or cell lines comprising such nucleic acids and/or vectors and plasmids. The provided methods further include, for example, methods of making, identifying, or isolating antigen binding proteins that bind to human ASGR, human ASGR-1, and/or human ASGR-2, methods of determining whether an antigen binding protein binds to human ASGR, human ASGR-1, and/or human ASGR-2, methods of making compositions, such as pharmaceutical compositions, comprising an antigen binding protein that binds to human ASGR, human ASGR-1, and/or human ASGR-2, and methods for administering an antigen binding protein that binds human ASGR, human ASGR-1, and/or human ASGR-2 to a human subject.

[0091] It is to be understood that both the foregoing general description and the following detailed description are exemplary and explanatory only and are not restrictive of the invention as claimed. In this application, the use of the singular includes the plural unless specifically stated otherwise. In this application, the use of “or” means “and/or” unless stated otherwise. Furthermore, the use of the term “including”, as well as other forms, such as “includes” and “included”, is not limiting. Also, terms such as “element” or “component” encompass both elements and components comprising one unit and elements and components that comprise more than one subunit unless specifically stated otherwise. Also, the use of the term “portion” can include part of a moiety or the entire moiety.

[0092] Unless otherwise defined herein, scientific and technical terms used in connection with the present invention shall have the meanings that are commonly understood by those of ordinary skill in the art. Further, unless otherwise required by context, singular terms shall include pluralities and plural terms shall include the singular. Generally, nomenclatures used in connection with, and techniques of, cell and tissue culture, molecular biology, immunology, microbiology, genetics and protein and nucleic acid chemistry and hybridization described herein are those well-known and commonly used in the art. The methods and techniques of the present invention are generally performed according to conventional methods well known in the art and as described in various general and more specific references that are cited and discussed throughout the present specification unless otherwise indicated. See, e.g., Sambrook et al. Molecular Cloning: A Laboratory Manual, 2d ed., Cold Spring Harbor Laboratory Press, Cold Spring Harbor, N.Y. (1989) and Ausubel et al., Current Protocols in Molecular Biology, Greene Publishing Associates (1992), and Harlow and Lane Antibodies: A Laboratory Manual Cold Spring Harbor Laboratory Press, Cold Spring Harbor, N.Y. (1990), which are incorporated herein by reference. Enzymatic reactions and purification techniques are performed according to manufacturer's specifications, as commonly accomplished in the art or as described herein. The terminology used in connection with, and the laboratory procedures and techniques of, analytical chemistry, synthetic organic chemistry, and medicinal and pharmaceutical chemistry described herein are those well-known and commonly used in the art. Standard techniques can be used for chemical syntheses, chemical analyses, pharmaceutical preparation, formulation, and delivery, and treatment of patients.

[0093] Polynucleotide and polypeptide sequences are indicated using standard one- or three-letter abbreviations. Unless otherwise indicated, polypeptide sequences have their amino termini at the left and their carboxy termini at the right, and single-stranded nucleic acid sequences, and the top strand of double-stranded nucleic acid sequences, have their 5′ termini at the left and their 3′ termini at the right. A particular section of a polypeptide can be designated by amino acid residue number such as amino acids 1 to 50, or by the actual residue at that site such as asparagine to proline. A particular polypeptide or polynucleotide sequence also can be described by explaining how it differs from a reference sequence.

[0094] The following terms, unless otherwise indicated, shall be understood to have the following meanings:

[0095] The term “inhibitor” as used herein, is a compound that decreases the magnitude of at least one activity or function of a molecule compared to the magnitude of the activity or function observed in the absence of the inhibitor. In some instances, an inhibitor will substantially decrease the magnitude of at least one activity or function of a molecule compared to the magnitude of the activity or function observed in the absence of the inhibitor. In some instances, an inhibitor will completely diminish the magnitude of at least one activity or function of a molecule compared to the magnitude of the activity or function observed in the absence of the inhibitor. Certain exemplary inhibitors include, but are not limited to, proteins, peptides, antibodies, peptibodies, aptamers, antisense oligonucleotides, interfering RNA, carbohydrates or small organic molecules.

[0096] The term “isolated molecule” (where the molecule is, for example, a polypeptide, a polynucleotide, antigen binding protein or an antibody) is a molecule that by virtue of its origin or source of derivation (1) is not associated with naturally associated components that accompany it in its native state, (2) is substantially free of other molecules from the same species (3) is expressed by a cell from a different species, or (4) does not occur in nature. Thus, a molecule that is chemically synthesized, or expressed in a cellular system different from the cell from which it naturally originates, will be “isolated” from its naturally associated components. A molecule also may be rendered substantially free of naturally associated components by isolation, using purification techniques well known in the art. Molecule purity or homogeneity may be assayed by a number of means well known in the art. For example, the purity of a polypeptide sample may be assayed using polyacrylamide gel electrophoresis and staining of the gel to visualize the polypeptide using techniques well known in the art. For certain purposes, higher resolution may be provided by using HPLC or other means well known in the art for purification.

[0097] The terms “polynucleotide,” “oligonucleotide” and “nucleic acid” are used interchangeably throughout and include DNA molecules (e.g., cDNA or genomic DNA), RNA molecules (e.g., mRNA), analogs of the DNA or RNA generated using nucleotide analogs (e.g., peptide nucleic acids and non-naturally occurring nucleotide analogs), and hybrids thereof. The nucleic acid molecule can be single-stranded or double-stranded. In one embodiment, the nucleic acid molecules of the invention comprise a contiguous open reading frame encoding an antibody, or a fragment, derivative, mutein, or variant thereof, of the invention.

[0098] A “vector” is a nucleic acid that can be used to introduce another nucleic acid linked to it into a cell. One type of vector is a “plasmid,” which refers to a linear or circular double stranded DNA molecule into which additional nucleic acid segments can be ligated. Another type of vector is a viral vector (e.g., replication defective retroviruses, adenoviruses and adeno-associated viruses), wherein additional DNA segments can be introduced into the viral genome. Certain vectors are capable of autonomous replication in a host cell into which they are introduced (e.g., bacterial vectors comprising a bacterial origin of replication and episomal mammalian vectors). Other vectors (e.g., non-episomal mammalian vectors) are integrated into the genome of a host cell upon introduction into the host cell, and thereby are replicated along with the host genome. An “expression vector” is a type of vector that can direct the expression of a chosen polynucleotide.

[0099] A nucleotide sequence is “operably linked” to a regulatory sequence if the regulatory sequence affects the expression (e.g., the level, timing, or location of expression) of the nucleotide sequence. A “regulatory sequence” is a nucleic acid that affects the expression (e.g., the level, timing, or location of expression) of a nucleic acid to which it is operably linked. The regulatory sequence can, for example, exert its effects directly on the regulated nucleic acid, or through the action of one or more other molecules (e.g., polypeptides that bind to the regulatory sequence and/or the nucleic acid). Examples of regulatory sequences include promoters, enhancers and other expression control elements (e.g., polyadenylation signals). Further examples of regulatory sequences are described in, for example, Goeddel, 1990, Gene Expression Technology: Methods in Enzymology 185, Academic Press, San Diego, CA and Baron et al., 1995, Nucleic Acids Res. 23:3605-06.

[0100] A “host cell” is a cell that can be used to express a nucleic acid, e.g., a nucleic acid of the invention. A host cell can be a prokaryote, for example, E. coli, or it can be a eukaryote, for example, a single-celled eukaryote (e.g., a yeast or other fungus), a plant cell (e.g., a tobacco or tomato plant cell), an animal cell (e.g., a human cell, a monkey cell, a hamster cell, a rat cell, a mouse cell, or an insect cell) or a hybridoma. Typically, a host cell is a cultured cell that can be transformed or transfected with a polypeptide-encoding nucleic acid, which can then be expressed in the host cell. The phrase “recombinant host cell” can be used to denote a host cell that has been transformed or transfected with a nucleic acid to be expressed. A host cell also can be a cell that comprises the nucleic acid but does not express it at a desired level unless a regulatory sequence is introduced into the host cell such that it becomes operably linked with the nucleic acid. It is understood that the term host cell refers not only to the particular subject cell but to the progeny or potential progeny of such a cell. Because certain modifications may occur in succeeding generations due to, e.g., mutation or environmental influence, such progeny may not, in fact, be identical to the parent cell, but are still included within the scope of the term as used herein.

### ASGR

[0101] Genomic database analysis is one manner that allows for the discovery of associations between disease states and particular targets and/or pathways. For example, genetic analysis of patients with familial hypercholesterolemia resulted in the discovery of proprotein convertase subtilisin/kexin type 9 (PCSK9) being involved with regulating serum LDL cholesterol levels and risk of developing coronary artery disease, and ultimately, in the development of the recently approved Repatha®, an anti-hPCSK9 antibody (see, e.g., Jackson et al., U.S. Pat. No. 8,030,457). Advances in DNA sequencing technology provide the means to sequence the genomes of large numbers of individuals allowing for discovery of rare variants. deCODE Genetics (an Amgen company) has previously reported methods to analyze whole genomes of large numbers of Icelanders in order to search for associations between genetic variants and traits of interest. (Gudbjartsson et al., Nature Genetics; Vol. 47 (5) May 2015; p.435-444).

[0102] This methodology has now been applied in the search for novel genetic variants that affect cardiovascular disease, including cholesterol levels, and the risk for developing coronary artery disease and myocardial infarction (MI). The groundbreaking analysis performed has identified novel sequence variants of the Ashwell-Morell Receptor that are implicated in cardiovascular disease.

[0103] In the present invention, whole-genome sequencing of the Icelandic population discovered a rare, 12 base pair deletion (“del12”) in intron 4 of the ASGR-1 gene that is also present in other European ancestry populations. This deletion leads to a frameshift predicted to generate a truncated ASGR-1 receptor subunit that is lacking both the oligomerization and extracellular carbohydrate recognition domains (also known as “CRD,” “carbohydrate binding domain” or “CBD”) or may generate an unstable and rapidly degraded transcript (and therefore no protein) due to nonsense mediated decay. In the present invention, whole-genome sequencing of the Icelandic population also discovered a second rare loss of function variant in the ASGR-1 gene; namely, a 4 base pair insertion in exon 7 (c. 469-472dupAACT or “W158X”). This 4 base pair insertion in exon 7 causes a frameshift and introduces a premature stop codon at amino acid 158 out of the 291 amino acid full length protein (NP_001662.1:p.W158X). This variant is predicted to encode a protein lacking the carbohydrate recognition domain of the receptor or may generate an unstable and rapidly degraded transcript (and therefore no protein) due to nonsense mediated decay. Furthermore, the W158X variant effects all reported refseq transcripts of ASGR-1 regardless of tissue or cell type of expression. Without wishing to be bound by any particular hypothesis, the analysis indicates that del12 and W158X results in lower non-HDL cholesterol levels, protection against CAD and MI, leading to prolonged life. Additionally, the analysis indicates that del12 and W158X also associates with increased levels of circulating ALP and vitamin B12. Supporting this del12 and W158X association with increased levels of ALP are data from mice having a Y272C variant in ASGR-1, showing that these mice exhibit a phenotype of increased plasma ALP (Sabrautzki et al., Mamm. Genome, 23, 416-430, 2012). The Y272 position in mouse ASGR-1 corresponds to the Y273 position in human ASGR-1 (see FIG. 1A).

[0104] The Ashwell-Morell Receptor (AMR), originally named the hepatic asialoglycoprotein receptor, was one of the first cellular receptors to be isolated and identified. (Grewal, Methods in Enzymology, Volume 479, Chapter 13, 2010, pp. 223-241). This receptor is also known as the Ashwell Receptor, the hepatic galactose/N-acetylgalactosamine (GalNAc) receptor, or the hepatic lectin receptor. However, this receptor is now more commonly known as “ASGPR,” or simply “ASGR.”

[0105] ASGR is a C-type lectin that is expressed on the surface of hepatocytes and is made up of 48 kDa major subunit(s) (ASGR-1) and 40 kDa minor subunit(s) (ASGR-2). (Roggenbuck et al., Autoimmune Highlights, 2012, 3:119-125). Functional variants of ASGR are formed by the oligomerization of the ASGR-1 and ASGR-2 subunits. (Grewal). The receptor complexes can comprise homo-oligomers and hetero-oligomers of the ASGR-1 and ASGR-2 subunits, with (ASGR-1)₂-(ASGR-2)₁ trimer being the most common form and having the highest affinity to substrate. (Grewal). Other identified forms of ASGR include (ASGR-1)₂, (ASGR-1)₃, (ASGR-1)₂-(ASGR-2)₂, (ASGR-1)₃-(ASGR-2)₂. (Grewal).

[0106] The polynucleotide and polypeptide sequences for several species of ASGR-1 and ASGR-2 are known. Table 1 presents sequences for human, mouse, rat, pig, dog and cynomolgus. FIGS. 1A, 1B and 2 present sequence alignments of various species of ASGR-1 and ASGR-2, and FIG. 3 presents a sequence alignment between human ASGR-1 and human ASGR-2.

[0107] ASGR-1 is a single pass transmembrane protein and is the major subunit of ASGR. The galactose (Gal) or N-acetylgalactosamine (GalNAc) residues of glycoproteins are exposed by removal of sialic acid by sialidases, hence the term asialoglycoprotein for the ligands of ASGR. Although ASGR expression is detected in other tissues, liver is the predominant site of expression. A circulating form of the receptor, generated from ASGR-1 transcripts lacking exon two, has also been reported. (Liu J, Hu B, Yang Y, et al. A new splice variant of the major subunit of human asialoglycoprotein receptor encodes a secreted form in hepatocytes. PloS one 2010; 5:e12934). The del12 and W158X variants are predicted to truncate both the membrane bound and the circulating form of the receptor, and as mentioned above, the W158X variant may generate an unstable and rapidly degraded transcript (and therefore no protein) due to nonsense mediated decay.

[0108] The primary reported function of ASGR is to bind and internalize glycoproteins in the circulation that contain terminal galactose or N-acetylgalactosamine residues (asialoglycoproteins), resulting in the clearance of these proteins from the circulation. (Roggenbuck). Reported endogenous ligands include components of the blood coagulation system, such as platelets and Von Willebrand Factor. (Grewal).

[0109] As used herein, the terms “ASGR, ASGR-1, and/or ASGR-2 function” or “ASGR, ASGR-1, and/or ASGR-2 activity” includes any biological effect of ASGR, ASGR-1 and/or ASGR-2. In certain embodiments, ASGR function or activity includes the ability of ASGR to interact or bind to a ligand. In some embodiments, ASGR function or activity is represented by the ability of ASGR to interact or bind to sugars including but not limited to lactose, galactose, and/or GalNAc or glycoproteins displaying such sugars including but not limited to fetuin, orosomucoid and/or alkaline phosphatase. In some embodiments, ASGR function or activity includes any biological activity resulting from ASGR response. Exemplary activities include, but are not limited to, clearance of asialoglycoproteins from the circulation; clearance of IgA from circulation; removal of apoptotic cells; clearance of low density lipoprotein (LDL) and/or the disposal of cellular fibronectin (Roggenbuck).

[0110] Given the location of ASGR on the surface of liver hepatocytes and its implication in hepatocyte entry by certain viruses (Roggenbuck), the receptor has become a target of convenience for therapeutics that require delivery to the liver and internalization into the cells. Examples of these uses include the targeted delivery of doxorubicin to hepatocellular carcinoma (Wei et al., Int J Nanomedicine, 2015, 10:5123-37), gene delivery to hepatocytes (D'Souza et al., J Control Release, 2015, 203:126-39), and targeted delivery of siRNA to hepatocytes (Rajeev et al., Chembiochem, 2015, 16(6):903-8).

[0111] Although the ASGR and its ability to mediate endocytosis and degradation of desialylated glycoproteins has been known for nearly 4 decades, the endogenous ligands and the physiological function of the receptor have been difficult to establish. (Weigel P H, Yik J H. Glycans as endocytosis signals: the cases of the asialoglycoprotein and hyaluronan/chondroitin sulfate receptors. Biochimica et biophysica acta 2002; 1572:341-63). It has been reported that ASGR-1−/− mice (lacking any ASGR activity) thrive normally and do not accumulate desialylated glycoproteins in their circulation although they are unable to clear exogenously added asialoglycoproteins, suggesting that under normal physiological condition ASGR is not essential for homeostasis of circulating asialoglycoproteins. (Tozawa R, Ishibashi S, Osuga J, et al. Asialoglycoprotein receptor deficiency in mice lacking the major receptor subunit. Its obligate requirement for the stable expression of oligomeric receptor. The Journal of Biological Chemistry 2001; 276:12624-8).

[0112] In contrast to the ASGR-1 knockout mice which lack an apparent phenotype, the present invention has established a clear physiological role for human ASGR-1 in cardiovascular disease, for example, but not limited to, the regulation of non-HDL levels and modulation of CAD and MI risk. The present invention has also demonstrated the association of del12 and W158X with increased levels of circulating ALP and vitamin B12. Furthermore, the present invention shows that disturbing one allele of ASGR-1 appears to have an overall beneficial effect as heterozygotes carriers of del12 live on average 1.5 years longer than non-carriers.

[0113] Surprisingly, the various embodiments provided herein demonstrate that the del12 variant and the W158 variant both have an effect on non-HDL levels that is opposite to their effect on ALP and vitamin B12 levels; decreasing non-HDL and increasing ALP and vitamin B12. While not wishing to be bound by any particular hypothesis, it is important to note that the common variant previously described that associates with ALP and LDL cholesterol also has opposing effects on these serum components; hence ASGR-1 may affect the level of these molecules through different mechanisms. It is unlikely that the ALP increase mediated by del12 or W158X reflects an underlying liver disease since other measures of liver function are not affected. Both ALP and the vitamin B12 transporter in the circulation, haptocorrin, are asialylated glycoproteins known to bind ASGR-1 and be cleared from the circulation by the receptor (Tuin A, Huizinga-Van der Vlag A, van Loenen-Weemaes A M, Meijer D K, Poelstra K. On the role and fate of LPS-dephosphorylating activity in the rat liver. American Journal of Physiology Gastrointestinal and Liver Physiology 2006; 290:G377-85; Furger E, Fedosov S N, Lildballe D L, et al. Comparison of recombinant human haptocorrin expressed in human embryonic kidney cells and native haptocorrin. PloS one 2012; 7:e37421; Burger R L, Schneider R J, Mehlman C S, Allen R H. Human plasma R-type vitamin B12-binding proteins. II. The role of transcobalamin I, transcobalamin III, and the normal granulocyte vitamin B12-binding protein in the plasma transport of vitamin B12. The Journal of Biological Chemistry 1975; 250:7707-13; Steirer L M, Park E I, Townsend R R, Baenziger J U. The asialoglycoprotein receptor regulates levels of plasma glycoproteins terminating with sialic acid alpha 2,6 galactose. The Journal of Biological Chemistry 2009; 284:3777-83). While not wishing to be bound by any particular hypothesis, the more likely reason for the increased levels of ALP and vitamin B12 in del12 carriers and in W158X carriers is decreased clearance of desialylated forms of these molecules from the circulation, due to reduced number of functional ASGR receptors in del12 carriers and in W158X carriers, suggesting a role for ASGR-1 in maintaining homeostasis of circulating ALP and vitamin B12.

[0114] While not wishing to be bound by any particular hypothesis, the decreased levels of non-HDL in del12 carriers and in W158X carriers in the face of reduced ASGR-1 function suggest that ASGR-1 affects non-HDL levels by mechanisms other than direct binding and endocytosis of cholesterol particles. In mice expressing a hypomorphic form of neuraminidase 1 (Neul), a sialidase that cleaves the sialic acid residues thereby generating substrates for ASGR-1, the LDL receptor (LDLR) is sialylated and this form of the receptor was more stable and took up LDL cholesterol more avidly (LDL levels were decreased in these mice) than the asialylated form of the wild type LDLR (Yang A, Gyulay G, Mitchell M, White E, Trigatti B L Igdoura S A. Hypomorphic sialidase expression decreases serum cholesterol by downregulation of VLDL production in mice Journal of Lipid Research 2012; 53:2573-2585). Both ASGR and LDLR are located in clathrin-coated pits on hepatocytes and ASGR may be capable of interacting with the asialylated form of the LDLR and blocking its activity.

[0115] Two novel rare variants in ASGR-1 have been identified herein that play a role in cardiovascular disease, including, but not limited to, lowering non-HDL levels and protecting against CAD and MI. These variants disrupt ASGR-1 protein function. Accordingly, the present invention is further directed to methods of inhibiting ASGR function, methods of inhibiting ASGR-1 function and/or methods of inhibiting ASGR-2 function. The present invention is further directed to molecules (for example, but not limited to, antigen binding proteins or interfering RNA) that inhibit ASGR function, ASGR-1 function and/or ASGR-2 function.

### Antigen Binding Proteins

[0116] In some embodiments, the invention comprises antigen binding proteins that bind to ASGR, ASGR-1, and/or ASGR-2 of different species, including, but not limited to, human, cynomolgus, porcine, canine, murine and rat. In some embodiments, the antigen binding proteins specifically bind to ASGR, ASGR-1, and/or ASGR-2 of different species, including, but not limited to, human, cynomolgus, porcine, canine, and murine and rat. Exemplary amino acid sequences of human, cyno, dog, pig, rat and mouse ASGR-1 and ASGR-2 are provided in FIGS. 1-3. In some embodiments, the antigen binding proteins further inhibit ASGR, ASGR-1 and/or ASGR-2 from binding to a ligand.

[0117] An “antigen binding protein” is a protein comprising an antigen binding fragment that binds to an antigen and, optionally, a scaffold or framework portion that allows the antigen binding fragment to adopt a conformation that promotes binding of the antigen binding protein to the antigen. In the instant application, the antigen is ASGR, ASGR-1 and/or ASGR-2 protein or a fragment thereof. In some embodiments, the antigen binding fragment comprises at least one CDR from an antibody that binds to the antigen, and in some embodiments comprises the heavy chain CDR3 from an antibody that binds to the antigen. In some embodiments, the antigen binding fragment comprises all three CDRs from the heavy chain of an antibody that binds to the antigen or from the light chain of an antibody that binds to the antigen. In still some embodiments, the antigen binding fragment comprises all six CDRs from an antibody that binds to the antigen (three from the heavy chain and three from the light chain). The antigen binding fragment in certain embodiments is an antibody fragment.

[0118] Nonlimiting examples of antigen binding proteins include antibodies, antibody fragments (e.g., an antigen binding fragment of an antibody), antibody derivatives, and antibody analogs. Further specific examples include, but are not limited to, a single-chain variable fragment (scFv), a nanobody (e.g. VH domain of camelid heavy chain antibodies; VHH fragment, see Cortez-Retamozo et al., Cancer Research, Vol. 64:2853-57, 2004), a Fab fragment, a Fab′ fragment, a F(ab′)2 fragment, a Fv fragment, a Fd fragment, and a complementarity determining region (CDR) fragment. These molecules can be derived from any mammalian source, such as human, mouse, rat, rabbit, or pig, dog, or camelid. Antibody fragments may compete for binding of a target antigen with an intact antibody and the fragments may be produced by the modification of intact antibodies (e.g. enzymatic or chemical cleavage) or synthesized de novo using recombinant DNA technologies or peptide synthesis. The antigen binding protein can comprise, for example, an alternative protein scaffold or artificial scaffold with grafted CDRs or CDR derivatives. Such scaffolds include, but are not limited to, antibody-derived scaffolds comprising mutations introduced to, for example, stabilize the three-dimensional structure of the antigen binding protein as well as wholly synthetic scaffolds comprising, for example, a biocompatible polymer. See, for example, Korndorfer et al., 2003, Proteins: Structure, Function, and Bioinformatics, Volume 53, Issue 1:121-129 (2003); Roque et al., Biotechnol. Prog. 20:639-654 (2004). In addition, peptide antibody mimetics (“PAMs”) can be used, as well as scaffolds based on antibody mimetics utilizing fibronectin components as a scaffold.

[0119] An antigen binding protein can also include a protein comprising one or more antibody fragments incorporated into a single polypeptide chain or into multiple polypeptide chains. For instance, antigen binding proteins can include, but are not limited to, a diabody (see, e.g., EP 404,097; WO 93/11161; and Hollinger et al., Proc. Natl. Acad. Sci. USA, Vol. 90:6444-6448, 1993); an intrabody; a domain antibody (single VL or VH domain or two or more VH domains joined by a peptide linker; see Ward et al., Nature, Vol. 341:544-546, 1989); a maxibody (2 scFvs fused to Fc region, see Fredericks et al., Protein Engineering, Design & Selection, Vol. 17:95-106, 2004 and Powers et al., Journal of Immunological Methods, Vol. 251:123-135, 2001); a triabody; a tetrabody; a minibody (scFv fused to CH3 domain; see Olafsen et al., Protein Eng Des Sel., Vol.17:315-23, 2004); a peptibody (one or more peptides attached to an Fc region, see WO 00/24782); a linear antibody (a pair of tandem Fd segments (VH-CH1-VH-CH1) which, together with complementary light chain polypeptides, form a pair of antigen binding regions, see Zapata et al., Protein Eng., Vol. 8:1057-1062, 1995); a small modular immunopharmaceutical (see U.S. Patent Publication No. 20030133939); and immunoglobulin fusion proteins (e.g. IgG-scFv, IgG-Fab, 2scFv-IgG, 4scFv-IgG, VH-IgG, IgG-VH, and Fab-scFv-Fc).

[0120] In certain embodiments, an antigen binding protein can have, for example, the structure of an immunoglobulin. An “immunoglobulin” is a tetrameric molecule, with each tetramer comprising two identical pairs of polypeptide chains, each pair having one “light” (about 25 kDa) and one “heavy” chain (about 50-70 kDa). The amino-terminal portion of each chain includes a variable region of about 100 to 110 or more amino acids primarily responsible for antigen recognition. The carboxy-terminal portion of each chain defines a constant region primarily responsible for effector function.

[0121] Within light and heavy chains, the variable (V) and constant regions (C) are joined by a “J” region of about 12 or more amino acids, with the heavy chain also including a “D” region of about 10 more amino acids. See generally, Fundamental Immunology Ch. 7 (Paul, W., ed., 2nd ed. Raven Press, N.Y. (1989)) (incorporated by reference in its entirety for all purposes). The variable regions of each light/heavy chain pair form the antibody binding site such that an intact immunoglobulin has two binding sites.

[0122] Immunoglobulin chains exhibit the same general structure of relatively conserved framework regions (FR) joined by three hypervariable regions, also called complementarity determining regions or CDRs. From N-terminus to C-terminus, both light and heavy chains comprise the domains FR1, CDR1, FR2, CDR2, FR3, CDR3 and FR4.

[0123] Human light chains are classified as kappa and lambda light chains. The term “light chain” refers to a polypeptide comprising, from amino terminus to carboxyl terminus, a single immunoglobulin light chain variable region (VL) and a single immunoglobulin light chain constant domain (CL). Heavy chains are classified as mu (μ), delta (Δ), gamma (γ), alpha (α), and epsilon (ε), and define the antibody's isotype as IgM, IgD, IgG, IgA, and IgE, respectively. The term “heavy chain” refers to a polypeptide comprising, from amino terminus to carboxyl terminus, a single immunoglobulin heavy chain variable region (VH), an immunoglobulin heavy chain constant domain 1 (CH1), an immunoglobulin hinge region, an immunoglobulin heavy chain constant domain 2 (CH2), an immunoglobulin heavy chain constant domain 3 (CH3), and optionally an immunoglobulin heavy chain constant domain 4 (CH4). The IgG-class is further divided into subclasses, namely, IgG1, IgG2, IgG3, and IgG4. The IgA-class is further divided into subclasses, namely IgA1 and IgA2. The IgM has subclasses including, but not limited to, IgM1 and IgM2. The heavy chains in IgG, IgA, and IgD antibodies have three domains (CH1, CH2, and CH3), whereas the heavy chains in IgM and IgE antibodies have four domains (CH1, CH2, CH3, and CH4). The immunoglobulin heavy chain constant domains can be from any immunoglobulin isotype, including subtypes. The antibody chains are linked together via inter-polypeptide disulfide bonds between the CL domain and the CH1 domain (i.e. between the light and heavy chain) and between the hinge regions of the antibody heavy chains.

[0124] The term “antibody” refers to an intact immunoglobulin of any isotype, and includes, for instance, chimeric, humanized, human, and bispecific antibodies. An “antibody” is a species of an antigen binding protein. An intact antibody will generally comprise at least two full-length heavy chains and two full-length light chains. Antibody sequences can be derived solely from a single species, or can be “chimeric,” that is, different portions of the antibody can be derived from two different species as described further below. Unless otherwise indicated, the term “antibody” also includes antibodies comprising two substantially full-length heavy chains and two substantially full-length light chains provided the antibodies retain the same or similar binding and/or function as the antibody comprised of two full length light and heavy chains. For example, antibodies having 1, 2, 3, 4, or 5 amino acid residue substitutions, insertions or deletions at the N-terminus and/or C-terminus of the heavy and/or light chains are included in the definition provided that the antibodies retain the same or similar binding and/or function as the antibodies comprising two full length heavy chains and two full length light chains. Furthermore, unless explicitly excluded, antibodies include, for example, monoclonal antibodies, polyclonal antibodies, chimeric antibodies, humanized antibodies, human antibodies, bispecific antibodies, and synthetic antibodies. In some sections of the present disclosure, examples of antigen binding proteins are described herein in terms of the hybridoma line number as “number/letter/number” (e.g., 25A4). In these cases, the exact name denotes a specific monoclonal antibody derived from a specific hybridoma having a specific light chain variable region and heavy chain variable region. In some sections of the present disclosure, examples of antigen binding proteins are described herein in terms of “number/letter/number/“dot”/number” (e.g., 25A4.001) or number/letter/number/“dot”/number/“dot”/number (e.g., 25A4.001.001). In these cases, the name denotes a variant of a specific antibody having a light chain variable region and a heavy chain variable region that is related to, but distinct from the antibody derived from a hybridoma. That is, for example, an antigen binding protein named 25A4 is not the same as an antibody named 25A4.001 or an antibody named 25A4.001.001.

[0125] A “polyclonal antibody” refers to a population of antibodies that are typically widely varied in composition and binding specificity. A “monoclonal antibody” (“mAb”) as used herein refers to one or more of a population of antibodies having identical sequences. Monoclonal antibodies bind to the antigen at a particular epitope on the antigen.

[0126] In some embodiments, the antigen binding protein is a “fragment” or “antigen binding fragment” of an antibody. As used herein and unless otherwise specified, an “antibody fragment” refers to the Fab, Fab′, F(ab′)2, and Fv fragments that contain at least one CDR of an immunoglobulin that is sufficient to confer specific antigen binding to ASGR, ASGR-1 and/or ASGR-2. Antibody fragments may be produced by recombinant DNA techniques or by enzymatic or chemical cleavage of intact antibodies.

[0127] A Fab fragment is a monovalent fragment having the VL, VH, CL and CH1 domains; a F(ab′)2 fragment is a bivalent fragment having two Fab fragments linked by a disulfide bridge at the hinge region; a Fd fragment has the VH and CH1 domains; an Fv fragment has the VL and VH domains of a single arm of an antibody; and a dAb fragment has a VH domain, a VL domain, or an antigen-binding fragment of a VH or VL domain (U.S. Pat. Nos. 6,846,634, 6,696,245, US App. Pub. No. 05/0202512, 04/0202995, 04/0038291, 04/0009507, 03/0039958, Ward et al., Nature 341:544-546 (1989)). In certain embodiments, these antibody fragments can be incorporated into single domain antibodies, single-chain antibodies, maxibodies, minibodies, intrabodies, diabodies, triabodies, tetrabodies, v-NAR and bis-scFv (see e.g., Hollinger and Hudson, 2005, Nature Biotechnology, 23, 9, 1126-1136). Other antigen binding proteins envisioned are antibody polypeptides such as those disclosed in U.S. Pat. No. 6,703,199, including fibronectin polypeptide monobodies, the polypeptides as disclosed in U.S. Patent Publication 2005/0238646. In some embodiments, the antibodies comprise at least one CDR set forth in Tables 2 or 6 herein.

[0128] A “single-chain variable fragment” (“scFv”) is a fusion protein in which a VL and a VH region are joined via a linker (e.g., a synthetic sequence of amino acid residues) to form a continuous protein chain wherein the linker is long enough to allow the protein chain to fold back on itself and form a monovalent antigen binding site (see, e.g., Bird et al., Science 242:423-26 (1988) and Huston et al., 1988, Proc. Natl. Acad. Sci. USA 85:5879-83 (1988)). For the sake of clarity, a “single-chain variable fragment” is not an antibody or an antibody fragment as defined herein. Diabodies are bivalent antibodies comprising two polypeptide chains, wherein each polypeptide chain comprises VH and VL domains joined by a linker that is too short to allow for pairing between two domains on the same chain, thus allowing each domain to pair with a complementary domain on another polypeptide chain (see, e.g., Holliger et al., 1993, Proc. Natl. Acad. Sci. USA 90:6444-48 (1993), and Poljak et al., Structure 2:1121-23 (1994)). If the two polypeptide chains of a diabody are identical, then a diabody resulting from their pairing will have two identical antigen binding sites. Polypeptide chains having different sequences can be used to make a diabody with two different antigen binding sites. Similarly, tribodies and tetrabodies are antibodies comprising three and four polypeptide chains, respectively, and forming three and four antigen binding sites, respectively, which can be the same or different.

[0129] The term “CDR” refers to the complementarity determining region (also termed “minimal recognition units” or “hypervariable region”) within antibody variable sequences. The CDRs permit the antigen binding protein to specifically bind to a particular antigen of interest. There are three heavy chain variable region CDRs (CDRH1, CDRH2 and CDRH3) and three light chain variable region CDRs (CDRL1, CDRL2 and CDRL3). The CDRs in each of the two chains typically are aligned by the framework regions to form a structure that binds specifically to a specific epitope or domain on the target protein. From N-terminus to C-terminus, naturally-occurring light and heavy chain variable regions both typically conform to the following order of these elements: FR1, CDR1, FR2, CDR2, FR3, CDR3 and FR4. A numbering system has been devised for assigning numbers to amino acids that occupy positions in each of these domains. This numbering system is defined in Kabat Sequences of Proteins of Immunological Interest (1987 and 1991, NIH, Bethesda, MD), or Chothia & Lesk, 1987, J. Mol. Biol. 196:901-917; Chothia et al., 1989, Nature 342:878-883. Complementarity determining regions (CDRs) and framework regions (FR) of a given antibody may be identified using this system. Other numbering systems for the amino acids in immunoglobulin chains include IMGT® (the international ImMunoGeneTics information system; Lefranc et al, Dev. Comp. Immunol. 29:185-203; 2005) and AHo (Honegger and Pluckthun, J. Mol. Biol. 309(3):657-670; 2001). One or more CDRs may be incorporated into a molecule either covalently or noncovalently to make it an antigen binding protein.

[0130] In some embodiments, an antigen binding protein of the invention may incorporate the CDR(s) as part of a larger polypeptide chain, may covalently link the CDR(s) to another polypeptide chain, or may incorporate the CDR(s) noncovalently. The antigen binding molecules may comprise at least one of the CDRs described herein incorporated into a biocompatible framework structure. In one example, the biocompatible framework structure comprises a polypeptide or portion thereof that is sufficient to form a conformationally stable structural support, or framework, or scaffold, which is able to display one or more sequences of amino acids that bind to an antigen (e.g., CDRs, a variable region, etc.) in a localized surface region. Such structures can be a naturally occurring polypeptide or polypeptide “fold” (a structural motif), or can have one or more modifications, such as additions, deletions or substitutions of amino acids, relative to a naturally occurring polypeptide or fold. These scaffolds can be derived from a polypeptide of any species (or of more than one species), such as a human, other mammal, other vertebrate, invertebrate, plant, bacteria or virus.

[0131] Typically the biocompatible framework structures are based on protein scaffolds or skeletons other than immunoglobulin domains. For example, those based on fibronectin, ankyrin, lipocalin, neocarzinostatin, cytochrome b, CP1 zinc finger, PST1, coiled coil, LACI-D1, Z domain and tendamistat domains may be used (See e.g., Nygren and Uhlen, 1997, Current Opinion in Structural Biology, 7, 463-469).

[0132] An antigen binding protein may have one or more binding sites. If there is more than one binding site, the binding sites may be identical to one another or may be different. For example, an antibody typically has two identical binding sites, while a “bispecific” or “bifunctional” antibody has two different binding sites. The two binding sites of a bispecific antigen binding protein or antibody will bind to two different epitopes, which can reside on the same or different protein targets.

[0133] In some embodiments, the ASGR-1 antigen binding protein is a bispecific antibody. In certain embodiments, a bispecific antibody binds to ASGR, ASGR-1 or ASGR-2 and PCSK9. In some embodiments, a bispecific antibody will bind to the ASGR-1 CBD and will inhibit ASGR-1 function, in addition to binding to PCSK9 and inhibiting the binding of PCSK9 to the LDLR. Methods of making bispecific antibodies are known in the art. One such method of making a “bispecific,” or “bifunctional” antigen binding protein or antibody involves the fusion of hybridomas or linking of Fab′ fragments. See, e.g., Songsivilai and Lachmann, 1990, Clin. Exp. Immunol. 79:315-321; Kostelny et al., 1992, J. Immunol. 148:1547-1553. Another method involves engineering the Fc portion of the heavy chains such as to create “knobs” and “holes” which facilitate heterodimer formation of the heavy chains when co-expressed in a cell. U.S. Pat. No. 7,695,963. Still another method also involves engineering the Fc portion of the heavy chain but uses electrostatic steering to encourage heterodimer formation while discouraging homodimer formation of the heavy chains when co-expressed in a cell. WO 09/089,004, which is incorporated herein by reference in its entirety.

[0134] The term “human antibody” includes antibodies having antibody regions such as variable and constant regions or domains which correspond substantially to human germline immunoglobulin sequences known in the art, including, for example, those described by Kabat et al. (1991) (loc. cit.). The human antibodies of the invention may include amino acid residues not encoded by human germline immunoglobulin sequences (e.g., mutations introduced by random or site-specific mutagenesis in vitro or by somatic mutation in vivo), for example in the CDRs, and in particular, in CDR3. The human antibodies can have at least one, two, three, four, five, or more positions replaced with an amino acid residue that is not encoded by the human germline immunoglobulin sequence. The definition of human antibodies as used herein also contemplates fully human antibodies, which include only non-artificially and/or genetically altered human sequences of antibodies as those can be derived by using technologies or systems known in the art, such as for example, phage display technology or transgenic mouse technology, including but not limited to the Xenomouse.

[0135] A humanized antibody has a sequence that differs from the sequence of an antibody derived from a non-human species by one or more amino acid substitutions, deletions, and/or additions, such that the humanized antibody is less likely to induce an immune response, and/or induces a less severe immune response, as compared to the non-human species antibody, when it is administered to a human subject. In one embodiment, certain amino acids in the framework and constant domains of the heavy and/or light chains of the non-human species antibody are mutated to produce the humanized antibody. In another embodiment, the constant domain(s) from a human antibody are fused to the variable domain(s) of a non-human species. In another embodiment, one or more amino acid residues in one or more CDR sequences of a non-human antibody are changed to reduce the likely immunogenicity of the non-human antibody when it is administered to a human subject, wherein the changed amino acid residues either are not critical for immunospecific binding of the antibody to its antigen, or the changes to the amino acid sequence that are made are conservative changes, such that the binding of the humanized antibody to the antigen is not significantly worse than the binding of the non-human antibody to the antigen. Examples of how to make humanized antibodies may be found in U.S. Pat. Nos. 6,054,297, 5,886,152 and 5,877,293.

[0136] The term “chimeric antibody” refers to an antibody that contains one or more regions from one antibody and one or more regions from one or more other antibodies. In one embodiment, one or more of the CDRs are derived from a human anti-ASGR, ASGR-1 or ASGR-2 antibody. In another embodiment, all of the CDRs are derived from a human anti-ASGR, ASGR-1 or ASGR-2 antibody. In another embodiment, the CDRs from more than one human anti-ASGR, ASGR-1 or ASGR-2 antibodies are mixed and matched in a chimeric antibody. For instance, a chimeric antibody may comprise a CDR1 from the light chain of a first human anti-ASGR, ASGR-1 or ASGR-2 antibody, a CDR2 and a CDR3 from the light chain of a second human anti-ASGR, ASGR-1 or ASGR-2 antibody, and the CDRs from the heavy chain from a third anti-ASGR, ASGR-1 or ASGR-2 antibody. Further, the framework regions may be derived from one of the same anti-ASGR, ASGR-1 or ASGR-2 antibodies, from one or more different antibodies, such as a human antibody, or from a humanized antibody. In one example of a chimeric antibody, a portion of the heavy and/or light chain is identical with, homologous to, or derived from an antibody from a particular species or belonging to a particular antibody class or subclass, while the remainder of the chain(s) is/are identical with, homologous to, or derived from an antibody or antibodies from another species or belonging to another antibody class or subclass. Also included are fragments of such antibodies that exhibit the desired biological activity.

[0137] A “neutralizing antigen binding protein” or “inhibitory antigen binding protein” or “antagonizing antigen binding protein” (e.g., “neutralizing antibody” or “inhibitory antibody” or “antagonizing antibody”) refers to an antigen binding protein or antibody, respectively, that binds to a target molecule and reduces and/or prevents the biological effect of that target molecule. This can be done, for example, by directly blocking a site on the target molecule through which the target molecule interacts with other molecules (e.g. blocking a ligand binding site of a receptor) or by indirectly blocking a site on the target molecule through which the target molecule interacts with other molecules (such as structural or energetic alterations in the target molecule). In some embodiments, these terms can also denote an antigen binding protein or antibody that prevents the target molecule to which it is bound from performing a biological function. In assessing the binding and/or specificity of an antigen binding protein, e.g., an antibody or immunologically functional fragment thereof, an antibody or fragment can substantially inhibit binding of a target molecule to its binding partner when an excess of antibody reduces the quantity of binding partner bound to the target molecule by at least about 1-20, 20-30%, 30-40%, 40-50%, 50-60%, 60-70%, 70-80%, 80-85%, 85-90%, 90-95%, 95-97%, 97-98%, 98-99%, 99.5%, 99.9% and 100%. In some embodiments, inhibition is complete. The measurement of reduction of binding is done using various assays known to those skilled in the art, (e.g., an in vitro competitive binding assay) and performed using relevant control molecules so that actual inhibition is measured. For example, numerous competition assays are well known in the art, with nonlimiting examples being competition ELISA, use of the BiaCore® platform, the Kinexa® platform, or the like. Further examples include: solid phase direct or indirect radioimmunoassay (RIA), solid phase direct or indirect enzyme immunoassay (EIA), sandwich competition assay (see, e.g., Stahli et al., 1983, Methods in Enzymology 9:242-253); solid phase direct biotin-avidin EIA (see, e.g., Kirkland et al., 1986, J. Immunol. 137:3614-3619) solid phase direct labeled assay, solid phase direct labeled sandwich assay (see, e.g., Harlow and Lane, 1988, Antibodies, A Laboratory Manual, Cold Spring Harbor Press); solid phase direct label RIA using I-125 label (see, e.g., Morel et al., 1988, Molec. Immunol. 25:7-15); solid phase direct biotin-avidin EIA (see, e.g., Cheung, et al., 1990, Virology 176:546-552); and direct labeled RIA (Moldenhauer et al., 1990, Scand. J. Immunol. 32:7-82). Typically, such an assay involves the use of purified antigen bound to a solid surface or cells bearing either of these, an unlabelled test antigen binding protein and a labeled reference antigen binding protein. In some embodiments, in the case of ASGR, ASGR-1 and/or ASGR-2, such a neutralizing antigen binding protein or antibody can diminish the ability of ASGR, ASGR-1 and/or ASGR-2 to bind to a ligand. In some embodiments, the neutralizing ability is characterized and/or described via a competition assay. In some embodiments, the neutralizing ability is described in terms of an IC₅₀ or EC₅₀ value. The antigen binding proteins in at least Table C are strong neutralizers. In some embodiments, the antibodies or antigen binding proteins neutralize by binding to ASGR, ASGR-1 and/or ASGR-2 and preventing ASGR, ASGR-1 and/or ASGR-2 from binding to a ligand, including sugars such as lactose, galactose, and/or GalNAc or glycoproteins displaying such sugars, such as fetuin, orosomucoid and/or alkaline phosphatase (or reducing the ability of ASGR, ASGR-1 and/or ASGR-2 to bind to ligand).

[0138] Competitive inhibition can be measured by determining the amount of labelled ligand bound to the solid surface or cells in the presence of the test antigen binding protein. Usually the test antigen binding protein is present in excess. Antigen binding proteins or antibodies identified by competition assay (competing antigen binding proteins or antibodies) include antigen binding proteins binding to the same epitope as the reference antigen binding proteins and antigen binding proteins binding to an adjacent epitope sufficiently proximal to the epitope bound by the reference antigen binding protein for steric hindrance to occur. Usually, when a competing antigen binding protein is present in excess, it will inhibit (e.g., reduce) specific binding of a reference antigen binding protein to a target antigen by at least 40-45%, 45-50%, 50-55%, 55-60%, 60-65%, 65-70%, 70-75% or 75% or more. In some embodiments, binding is inhibited by at least 40%, 45%, 50%, 55%, 60%, 65%, 70%, 75%, 80%, 85%, 90%, or 95%. In some embodiments, binding is inhibited by at least 80-85%, 85-90%, 90-95%, 95-97%, or 97% or more, including up to 100% inhibition.

[0139] In some embodiments, a ligand binding assay is used where cells expressing the target protein (e.g., ASGR-1) are mixed with antigen binding proteins and incubated for a time period, then washed. These cells are then incubated with labelled ligand (e.g., β-GalNAc) for a time period and then washed and analyzed for ligand binding, where reduced ligand binding as compared to a relevant control antigen binding protein indicates inhibition of binding due to the antigen binding protein blocking or inhibiting this binding.

[0140] Another manner in which the reduction in binding can be measured is the half maximal inhibitory concentration (IC50). The IC50 measures the amount or concentration of antigen binding protein that is needed to inhibit a given attribute (e.g., ligand binding) by half. In certain embodiments, the antigen binding proteins (e.g., human antibodies) have an IC50 value of 90 nM or less, in another embodiment, an IC50 value of 80 nM or less, in another embodiment, 70 nM or less, in another embodiment, 60 nM or less, in another embodiment, 50 nM or less, in another embodiment, 40 nM or less, in another embodiment, 30 nM or less, in another embodiment 25 nM or less.

[0141] In certain embodiments, the antigen binding proteins of the invention bind to an ASGR-1 monomer. In some embodiments, the antigen binding proteins of the invention bind to an ASGR-1 oligomer. In further embodiments, the antigen binding proteins of the invention bind to an ASGR-2 monomer. In some embodiments, the antigen binding proteins of the invention bind to an ASGR-2 oligomer. In certain embodiments, the antigen binding proteins of the invention bind to both ASGR-1 monomers and ASGR-2 monomers. In certain embodiments, the antigen binding proteins of the invention bind to an ASGR oligomer comprising an (ASGR-1)₂-(ASGR-2)₁ trimer. In some embodiments, the antigen binding proteins of the invention bind to an ASGR oligomer comprising an (ASGR-1)₂ dimer. In further embodiments, the antigen binding proteins of the invention bind to an ASGR oligomer comprising an (ASGR-1)₃ trimer. In yet further embodiments, the antigen binding proteins of the invention bind to an ASGR oligomer comprising an (ASGR-1)₂-(ASGR-2)₂ tetramer. In further embodiments, the antigen binding proteins of the invention bind to an ASGR oligomer comprising an (ASGR-1)₃-(ASGR-2)₂ pentamer. In some embodiments, the antigen binding proteins of the invention bind to a multimeric complex comprising at least two subunits of ASGR-1 and/or ASGR-2.

[0142] In certain embodiments, the antigen binding proteins (e.g., antibodies, antibody fragments, etc.) bind to ASGR, ASGR-1 and/or ASGR-2 and inhibit ASGR, ASGR-1 and/or ASGR-2 from binding to a ligand, wherein the antigen binding proteins comprise specific amino acid residues at particular positons in the molecule (e.g., in the VH, VL or CDRs). These residues may be involved in the binding properties of desired molecules (e.g., part of the paratope). A “paratope” are used herein is the location in an antibody that binds to the antigen. The paratope can comprise several amino acid residues from the VH and/or VL CDRs, and also can comprise residues from the framework regions. The paratope binds to the antigen's epitope. Paratopes can be determined using methodologies similar to those described determining epitopes. Once the amino acid residues involved in the binding properties of desired molecules, are identified, this information can be used to design antigen binding proteins (e.g., antibodies, antibody fragments, etc.) that can bind to ASGR, ASGR-1 and/or ASGR-2 and inhibit ASGR function (e.g., inhibit ASGR, ASGR-1 and/or ASGR-2 from binding to ligand).

[0143] The binding site (or interface) between the representative antibodies and human ASGR-1 can be determined/defined a number of ways. For example, binding of representative antigen binding proteins (e.g., antibodies) to human ASGR-1 was analyzed in Example 10 using X-ray crystallography, and the binding site or interface was determined using distance. The crystal structure of the antibody/huASGR1 complex provides information as to which residues of representative antibodies form the interface with human ASGR-1. As mentioned above, one of ordinary skill in the art may use this information to design antigen binding proteins and antigen binding protein variants, including those that contain variable domains having 90% identity or greater, 95% identity or greater, 97% identity or greater, 99% identity or greater, or those antigen binding protein variants that contain variable domains having 20 or less, 15 or less, or 10 or less, or 5 or less insertions, deletions, and/or substitutions within the light chain and/or heavy chain variable domain of the antigen binding proteins disclosed herein. One may wish to maintain the amino acids within the interface while altering non-interface residues. Thus, in some embodiments, one may design and create antigen binding proteins and antigen binding protein variants of the antigen binding proteins disclosed herein having one or more amino acid additions, substitutions, and/or deletions within one or more CDRs that maintain binding to human ASGR-1 and inhibit ASGR, ASGR-1 and/or ASGR-2 function (e.g., inhibit ASGR, ASGR-1 and/or ASGR-2 from binding to ligand).

[0144] In some embodiments, the antigen binding protein or the antibody comprises a light chain variable region and/or a heavy chain variable region, wherein the light chain variable region comprises at least 1, 2, 3, 4, 5, 6, 7, 8, 9, 10, 11, 12, 13 or all amino acid residues selected from the group consisting of Q27, R30, D32, H91, Y92, S93, Y94, I2, G28, I29, L33, Q90, P95, and R96 of SEQ ID NO:25010 and/or the heavy chain variable region comprises at least 1, 2, 3, 4, 5, 6, 7, 8, 9, 10, 11, 12, 13, 14, 15, 16, 17, 18, 19, 20, 21, 22, 23 or all amino acid residues selected from the group consisting of S30, N31, W52, Y53, D54, S56, N57, Y59, Y101, S102, S103, G104, W105, Y106, D107, Y32, V33, V50, G55, K58, N74, E99, V100, and Y108 of SEQ ID NO:29016. In some embodiments, the light chain variable region comprises at least 1, 2, 3, 4, 5, 6 or all amino acid residues selected from the group consisting of Q27, R30, D32, H91, Y92, 593, and Y94 of SEQ ID NO:25010 and/or the heavy chain variable region comprises at least 1, 2, 3, 4, 5, 6, 7, 8, 9, 10, 11, 12, 13, 14, or all amino acid residues selected from the group consisting of S30, N31, W52, Y53, D54, S56, N57, Y59, Y101, S102, S103, G104, W105, Y106, and D107 of SEQ ID NO:29016. In some embodiments, the antigen binding protein or the antibody comprises a light chain variable region and/or a heavy chain variable region, wherein the light chain variable region comprises at least 1, 2, 3, 4, 5, 6, 7, 8, 9, 10, 11, 12, 13, 14, 15 or all amino acid residues selected from the group consisting of H31, S33, N34, N36, Y38, W56, Y97, Y98, 129, S32, N35, N37, Y55, T59, Q96, N99, T100 of SEQ ID NO:25164 and/or the heavy chain variable region comprises at least 1, 2, 3, 4, 5, 6, 7, 8, 9, 10, 11, 12, 13, 14, 15, 16, 17, 18, 19, 20, 21, 22, 23, 24, 25, 26 or all amino acid residues selected from the group consisting of T28, F29, T30, N31, Y32, D33, W50, H52, S55, N57, S99, 5100, G101, W102, Y103, Y27, 134, N35, W47, M51, P53, N54, G56, T58, G59, Y104, D106 of SEQ ID NO:29170. In some embodiments, the light chain variable region comprises at least 1, 2, 3, 4, 5, 6, 7 or all amino acid residues selected from the group consisting H31, S33, N34, N36, Y38, W56, Y97, Y98 of SEQ ID NO:25164 and/or the heavy chain variable region comprises at least 1, 2, 3, 4, 5, 6, 7, 8, 9, 10, 11, 12, 13, 14, or all amino acid residues selected from the group consisting of T28, F29, T30, N31, Y32, D33, W50, H52, S55, N57, S99, 5100, G101, W102, Y103 of SEQ ID NO:29170. In some embodiments, the antigen binding protein or the antibody comprises a light chain variable region and/or a heavy chain variable region, wherein the light chain variable region comprises at least 1, 2, 3, 4, 5, 6, 7, 8, 9, 10, 11, 12, 13, 14, 15, 16, 17, 18 or all amino acid residues selected from the group consisting of 130, Y32, T91, Y92, S93, T94, 196, 12, Q27, N28, 129, S31, L33, N34, T50, S67, Q89, Q90, P95 of SEQ ID NO:24908 and/or the heavy chain variable region comprises at least 1, 2, 3, 4, 5, 6, 7, 8, 9, 10, 11, 12, 13, 14, 15, 16, 17, 18, 19, 20, 21, 22 or all amino acid residues selected from the group consisting of S30, S31,150, W52, H53, S56, N57, Y59, S01, M102, G103, T28, F29, F32, G33, H35, W47, 151, D54, K58, D99, L100, G104 of SEQ ID NO:28914. In some embodiments, the light chain variable region comprises at least 1, 2, 3, 4, 5, 6 or all amino acid residues selected from the group consisting 130, Y32, T91, Y92, S93, T94, 196 of SEQ ID NO:24908 and/or the heavy chain variable region comprises at least 1, 2, 3, 4, 5, 6, 7, 8, 9, 10 or all amino acid residues selected from the group consisting of S30, S31, I50, W52, H53, S56, N57, Y59, S01, M102, G103 of SEQ ID NO:28914. In some embodiments, the antigen binding protein or the antibody comprises a light chain variable region and/or a heavy chain variable region, wherein the light chain variable region comprises at least 1, 2, 3, 4, 5, 6, 7, 8, 9, 10, 11, 12, 13, 14, 15 or all amino acid residues selected from the group consisting of Y32, 591, Y92, R93, Thr94, Pro95, F97, Ile2, Q27, N28, G100, Ile29, 530, 531, Q90, and L96 of SEQ ID NO:24362 and/or the heavy chain variable region comprises at least 1, 2, 3, 4, 5, 6, 7, 8, 9, 10, 11, 12, 13, 14, 15, 16, 17, 18, 19, 20, 21, 22, 23, 24, 25, 26, 27 or all amino acid residues selected from the group consisting of A33, Val50, Ile51, S52, R53, S54, G55, G56, Y57, Y59, R99, A101, A103, G104, E106, S30, S31, Y32, Met34, N35, W47, S49, Thr58, R72, N74, L100, Val102, and S105 of SEQ ID NO:28368. In some embodiments, the light chain variable region comprises at least 1, 2, 3, 4, 5, 6, or all amino acid residues selected from the group consisting of Y32, S91, Y92, R93, Thr94, Pro95, and F97 of SEQ ID NO:24362, and/or the heavy chain variable region comprises at least 1, 2, 3, 4, 5, 6, 7, 8, 9, 10, 11, 12, 13, 14, or all amino acid residues selected from the group consisting of A33, Val50, Ile51, S52, R53, S54, G55, G56, Y57, Y59, R99, A101, A103, G104, and E106 of SEQ ID NO:28368. In some embodiments, the antigen binding protein or the antibody comprises a light chain variable region and/or a heavy chain variable region, wherein the light chain variable region comprises at least 1, 2, 3, 4, 5, 6, 7, 8, 9, 10, 11, 12, 13, 14, 15, 16, 17 or all amino acid residues selected from the group consisting of Q27, W32, A91, N92, S93, F94, F96, D1, I2, G28, I29, S30, R31, Y49, G50, Q89, Q90, and P95 of SEQ ID NO:24930 and/or the heavy chain variable region comprises at least 1, 2, 3, 4, 5, 6, 7, 8, 9, 10, 11, 12, 13, 14, 15, 16, 17, 18, 19, 20, 21, 22 or all amino acid residues selected from the group consisting of Y33, H35, W50, H52, S55, G57, T58, N59, D99, G100, T101, S102, D31, Y32, L34, W47, 151, N54, G56, Y60, Q65, S103, and F104 of SEQ ID NO:28936. In some embodiments, the light chain variable region comprises at least 1, 2, 3, 4, 5, 6 or all amino acid residues selected from the group consisting of Q27, W32, A91, N92, S93, F94, and F96 of SEQ ID NO:24930 and/or the heavy chain variable region comprises at least 1, 2, 3, 4, 5, 6, 7, 8, 9, 10, 11 or all amino acid residues selected from the group consisting of Y33, H35, W50, H52, S55, G57, T58, N59, D99, G100, T101, and S102 of SEQ ID NO:28936. In some embodiments, the antigen binding protein or the antibody comprises a light chain variable region and/or a heavy chain variable region, wherein the light chain variable region comprises at least 1, 2, 3, 4, 5, 6, 7, 8, 9, 10, 11, 12, 13, 14, 15, 16, 17, 18, 19 or all amino acid residue selected from the group consisting of Y32, Y49, T50, Q55, S91, H92, S93, F94, F96, S28, I29, T30, N33, L46, S53, L54, S56, Q89, Q90, and P95 of SEQ ID NO:28074 and/or the heavy chain variable region comprises at least 1, 2, 3, 4, 5, 6, 7, 8, 9, 10, 11, 12, 13, 14, 15, 16, 17, 18, 19, 20, 21, 22, 23, 24, 25, 26, 27, 28 or all amino acid residues selected from the group consisting of G26, F27, T28, S30, S31, Y32, S33, S52, G53, S54, S56, Y57, Y59, R98, G100, S101, R102, V2, F29, N35, S50, T51, S55, 158, R72, G99, G103, F104 and D105 of SEQ ID NO:32080. In some embodiments, the light chain variable region comprises at least 1, 2, 3, 4, 5, 6, 7, 8 or all amino acid residues selected from the group consisting of Y32, Y49, T50, Q55, S91, H92, S93, F94, and F96 of SEQ ID NO:28074 and/or heavy chain variable region comprises at least 1, 2, 3, 4, 5, 6, 7, 8, 9, 10, 11, 12, 13, 14, 15, 16 or all amino acid residues selected from the group consisting of G26, F27, T28, S30, S31, Y32, S33, S52, G53, S54, S56, Y57, Y59, R98, G100, S101 and R102 of SEQ ID NO:32080. In some embodiments, the antigen binding protein or the antibody comprises a light chain variable region and/or a heavy chain variable region, wherein the light chain variable region comprises at least 1, 2, 3, 4, 5, 6, 7, 8, 9, 10, 11, 12, 13, 14, 15, 16, 17, 18, 19, 20, 21 or all amino acid residues selected from the group consisting of V29, S30, I32, Y33, L47, Y50, R55, A56, T57, Y94, G28, N31, L48, I49, G51, N54, G58, I59, S68, G69, D93, and S95 of SEQ ID NO:26814 and/or the heavy chain variable region comprises at least 1, 2, 3, 4, 5, 6, 7, 8, 9, 10, 11, 12, 13, 14, 15, 16, 17, 18, 19, 20, 21, 22, 23, 24, 25 or all amino acid residues selected from the group consisting of V31, Y32, Y33, W50, N52, S55, G57, R98, G99, Y100, D101, I102, T204, V2, Y27, T30, L34, N35, P53, N54, G56, T58, N59, A97, L103, and G105 of SEQ ID NO:30820. In some embodiments, the light chain variable region comprises at least 1, 2, 3, 4, 5, 6, 7, 8, 9, or all amino acid residues selected from the group consisting of V29, S30, I32, Y33, L47, Y50, R55, A56, T57, and Y94 of SEQ ID NO:26814 and/or heavy chain variable region comprises at least 1, 2, 3, 4, 5, 6, 7, 8, 9, 10, 11, 12 or all amino acid residues selected from the group consisting of V31, Y32, Y33, W50, N52, S55, G57, R98, G99, Y100, D101, I102, and T204 of SEQ ID NO:30820. In some embodiments, the antigen binding protein or the antibody comprises a light chain variable region and/or a heavy chain variable region, wherein the light chain variable region comprises at least 1, 2, 3 or all amino acid residues selected from the group consisting of N31, Y50, V51, Q54 SEQ ID NO:27482; and/or the heavy chain variable region comprises at least 1, 2, 3, 4, 5, 6, 7, 8, 9, 10, 11, 12, 13, 14, 15, 16, 17, 18, 19, 20, 21, 22, 23, 24, 25, 26, 27 or all amino acid residues selected from the group consisting of N30, S31, Y32, S52, Y54, N55, K59, R98, D100, F101, W102, S103, G104, Y105, K107, D110, V2, Y27, T28, F29, G33, W50, A53, G56, N57, H99, Y106, or G108 of SEQ ID NO:31488. In some embodiments, the antigen binding protein or the antibody comprises a light chain variable region and/or a heavy chain variable region, wherein the heavy chain variable region comprises at least 1, 2, 3, 4, 5, 6, 7, 8, 9, 10, 11, 12, 13, 14, 15, or all amino acid residues selected from the group consisting of N30, S31, Y32, S52, Y54, N55, K59, R98, D100, F101, W102, S103, G104, Y105, K107, and D110 of SEQ ID NO:31488. In some embodiments, the antigen binding protein or the antibody comprises a light chain variable region and/or a heavy chain variable region, wherein the light chain variable region comprises at least 1, 2, 3, 4, 5, 6, 7, 8, 9, 10, 11, or all amino acid residues selected from the group consisting of Y33, Y50, D51, N53, K54, S57, V34, S52, R55, P56, G58, and G65 of SEQ ID NO:27780 and/or the heavy chain variable region comprises at least 1, 2, 3, 4, 5, 6, 7, 8, 9, 10, 11, 12, 13, 14, 15, 16, 17, 18, 19, 20, 21, 22, 23, 24, 25 or all amino acid residues selected from the group consisting of Q1, V2, F27, S30, S31, Y32, Y53, D54, W99, Y100, Y101, Y102, G26, T28, F29, G33, W52, G55, R72, N74, N98, Y103, Y104, D107, and V108 of SEQ ID NO:31786. In some embodiments, the light chain variable region comprises at least 1, 2, 3, 4, 5 or all amino acid residues selected from the group consisting of Y33, Y50, D51, N53, K54 and S57 of SEQ ID NO:27780 and/or heavy chain variable region comprises at least 1, 2, 3, 4, 5, 6, 7, 8, 9, 10, 11 or all amino acid residues selected from the group consisting of Q1, V2, F27, S30, S31, Y32, Y53, D54, W99, Y100, Y101, and Y102 of SEQ ID NO:31786. In some embodiments, the antigen binding protein or the antibody comprises a light chain variable region and/or a heavy chain variable region, wherein the light chain variable region comprises at least 1, 2, 3, 4, 5, 6, 7, 8, 9, 10, 11, 12, 13, 14, 15, 16, 17, 18, 19 or all amino acid residues selected from the group consisting of H31, G32, D33, G34, K35, Y37, I97, Q98, I99, I2, Q27, S28, L29, L30, T36, E55, Q95, S96, P100, and W101 of SEQ ID NO:26536 and/or the heavy chain variable region comprises at least 1, 2, 3, 4, 5, 6, 7, 8, 9, 10, 11, 12, 13, 14, 15, 16, 17, 18, 19, 20, 21, 22, 23 or all amino acid residues selected from the group consisting of S31, W52, Y53, D54, Y57, Y59, D102, F103, W104, T28, S30, Y32, G33, W47, I50, I51, S56, K58, Y60, K65, D99, H101, S105, and G106 of SEQ ID NO:30542. In some embodiments, the light chain variable region comprises at least 1, 2, 3, 4, 5, 6, 7, 8 or all amino acid residues selected from the group consisting of H31, G32, D33, G34, K35, Y37, I97, Q98, and 199 of SEQ ID NO:26536 and/or heavy chain variable region comprises at least 1, 2, 3, 4, 5, 6, 7, 8 or all amino acid residues selected from the group consisting of S31, W52, Y53, D54, Y57, Y59, D102, F103 and W104 of SEQ ID NO:30542. In some embodiments, the antigen binding protein or the antibody comprises a light chain variable region and/or a heavy chain variable region, wherein the light chain variable region comprises at least 1, 2, 3, 4, 5, 6, 7, 8, 9, 10, 11, 12, 13, 14, 15, 16, 17, 18, 19 or all amino acid residues selected from the group consisting of N30, S31, Y33, F50, S54, S68, Y92, E93, W97, S28, V29, G32, L47, G51, A52, S53, R55, A56, G69, Q90, Q91, S94, and S95 of SEQ ID NO:26826 and/or the heavy chain variable region comprises at least 1, 2, 3, 4, 5, 6, 7, 8, 9, 10, 11, 12, 13, 14, 15, 16, 17, 18, 19, 20, 21, 22, 23, 24 or all amino acid residues selected from the group consisting of R30, Y31, Y33, E50, S54, S56, N58, D98, Y99, G100, S28, Y32, W34, S35, W47, G49, 151, S52, H53, G55, T57, R97, A101, F102 and D103 of SEQ ID NO:30832. In some embodiments, the light chain variable region comprises at least 1, 2, 3, 4, 5, 6, 7, 8 or all amino acid residues selected from the group consisting of N30, S31, Y33, F50, S54, S68, Y92, E93, and W97 of SEQ ID NO:26826 and/or heavy chain variable region comprises at least 1, 2, 3, 4, 5, 6, 7, 8, 9 or all amino acid residues selected from the group consisting of R30, Y31, Y33, E50, S54, S56, N58, D98, Y99 and G100 of SEQ ID NO:30832.

[0145] In further embodiments, consensus sequences among the antigen binding proteins of the inventions are envisioned. For example, the variable heavy chain and variable light chain regions (VH and VL) and the CDRs (HCDR1/2/3 and LCDR1/2/3) of the invention include consensus sequences derived from groups of related monoclonal antibodies. In some embodiments, the antigen binding proteins (e.g., antibodies) may be related by both sequence homology and function. As described herein, a “consensus sequence” refers to amino acid sequences having conserved amino acids common among a number of sequences and amino acids that vary within given amino acid sequences at certain positions. In some embodiments, the varied amino acid at a certain position is a substitution. In some embodiments, the varied amino acid at a certain position is a deletion. In some embodiments, the varied amino acid at a certain position is an addition or insertion. These varied amino acids will be apparent to one of skill in the art when analyzing particular antibody VH, VL and/or CDR sequences.

[0146] For example, antibody sequences were analyzed using the following methodology. The Smith-Waterman algorithm was used to align amino acid sequences against translated IMGT germline V, D and J genes. The V gene was located first, then the J gene was located in the region downstream from located V gene, and finally the D gene was located in the region between V and J regions. Note, that since D gene is a relatively short sequence that is located in the hypervariable CDR3 region, a spurious match is possible and as such, was taken into consideration.

[0147] Sequences from each group were then subjected to sequence similarity alignment interrogation using a program that employs a standard ClustalW algorithm (see, Thompson et al., 1994, Nucleic Acids Res. 22:4673-4680). In some cases, the Biosum cost matrix was used with a gap creation penalty of 50 was employed along with a gap extension penalty of 0.1. The sequence logos were generated by Geneious (v8.1.7, Biomatters) once the alignments were made and then exported as PDF images. The consensus sequences were generated in Geneious (v8.1.7, Biomatters) with a 0% threshold and exported as FASTA files. Amino acids that varied within each group were noted with the notation X within each consensus sequence. See Table 19A VH Consensus 1-14 and Table 20A VL Consensus 1-14 in FIG. 55, and Tables 21-48 in FIG. 56 for the consensus sequences resulting from this analysis. In other cases, the consensus sequences were generated in Abinitio. See Table 19A VH Consensus-15-60 and Table 20A VL Consensus 15-54 in FIG. 55, and Tables 49-134 in FIG. 57 for the consensus sequences resulting from this analysis.

[0148] Alternatively, different methods of analysis readily available to one of skill in the art can be used. For example, consensus sequences can be determined using standard phylogenetic analyses of the CDRs corresponding to the VH (i.e., Variable Heavy, etc.) & VL (i.e., Variable Light, etc.) of antibodies. For example, amino acid sequences corresponding to the entire variable domains of either VH or VL can be converted to FASTA formatting for ease in processing comparative alignments and inferring phylogenies. Next, framework regions of these sequences can be replaced with an artificial linker sequence so that examination of the CDRs alone can be performed without introducing any amino acid position weighting bias due to coincident events (e.g., such as unrelated antibodies that serendipitously share a common germline framework heritage) while still keeping CDRs contiguous within the same sequence corresponding to a VH or VL. VH or VL sequences of this format can then be subjected to sequence similarity alignment interrogation using a program that employs a standard ClustalW-like algorithm (see, Thompson et al., 1994, Nucleic Acids Res. 22:4673-4680). A gap creation penalty of 8.0 can be employed along with a gap extension penalty of 2.0. This program likewise generated phylograms (phylogenetic tree illustrations) based on sequence similarity alignments using either UPGMA (unweighted pair group method using arithmetic averages) or Neighbor-Joining methods (see, Saitou and Nei, 1987, Molecular Biology and Evolution 4:406-425) to construct & illustrate similarity and distinction of sequence groups via branch length comparison and grouping. The original sequence alignments generated can be employed to empirically examine and document the occurrence of amino acids tolerated at each position with a consensus group. Consensus sequences for the groups of similar sequences within each CDR can then be prepared.

[0149] In another type of approach, CDR consensus sequences can be determined for each separate CDR, independently of their contiguous context within the same sequence corresponding to a VH or VL. In this approach the consensus sequences can be determined by aligning each H-CDR1, H-CDR2, H-CDR3, L-CDR1, L-CDR2, and L-CDR3 in groups, i.e., by aligning the individual H-CDR1 sequences of the antigen binding proteins to determine a H-CDR1 consensus sequence, by aligning the individual H-CDR2 sequences of the antigen binding proteins to determine a H-CDR2 consensus sequence, by aligning the individual H-CDR3 sequences of the antigen binding proteins to determine a H-CDR3 consensus sequence, by aligning the individual L-CDR1 sequences of the antigen binding proteins to determine a L-CDR1 consensus sequence, by aligning the individual L-CDR2 sequences of the antigen binding proteins to determine a L-CDR2 consensus sequence, and by aligning the individual L-CDR3 sequences of the antigen binding proteins to determine a L-CDR3 consensus sequence. Similarities between sequences within each individual CDR sequences can be identified. Consensus sequences for the groups of similar sequences within each CDR can then be prepared.

[0150] Various embodiments of Variable Heavy chain (VH) Consensus amino acid sequences of the present invention are set forth in Table 19A of FIG. 55 (CDRs are underlined, with the first being CDR1). Various embodiments of VH CDR Consensus amino acid sequences of the present invention are set forth in Tables 19B and 19C of FIG. 55. In some cases, an “X” is present in the amino acid sequences set forth in Tables 19A and 19B which signifies that more than one amino acid (or no amino acid) may be present at this location (see FIGS. 56 and 57 for details of the consensus protein alignment). In some cases a “-” is present in Table 19A (which is the result of the consensus alignment) and signifies that no amino acid is present at the location (see FIGS. 56 and 57 for details of the consensus protein alignment). The VH Consensus sequences and the VH CDR Consensus sequences are based on analysis of 8 or more aligned VH/VH CDR antibody sequences, as described above. In some cases, the VH/VH CDR Consensus sequence is based on analysis of 25 or more, 50 or more, 75 or more, or 100 or more aligned VH antibody sequences. In one case, the VH/VH CDR Consensus sequence is based on analysis of 149 aligned VH antibody sequences.

[0151] Various embodiments of Variable Light chain (VL) Consensus amino acid sequences of the present invention are set forth in Table 20A of FIG. 55 (CDRs are underlined, with the first being CDR1). Various embodiments of VL CDR Consensus amino acid sequences of the present invention are set forth in Tables 20B and 20C of FIG. 55. As mentioned above, in some cases, an “X” is present in the amino acid sequences set forth in Tables 20A and 20B which signifies that more than one amino acid (or no amino acid) may be present at this location (see FIGS. 56 and 57 for details of the consensus protein alignment). In some cases a “-” is present in Table 20A (which is the result of the consensus alignment) and signifies that no amino acid is present at the location (see FIGS. 56 and 57 for details of the consensus protein alignment). The VL Consensus sequences and the VL CDR Consensus sequences are based on analysis of 8 or more aligned VL/VL CDR antibody sequences, as described above. In some cases, the VL/VL CDR Consensus sequence is based on analysis of 25 or more, 50 or more, 75 or more, or 100 or more, 125 or more, or 150 or more aligned VL antibody sequences. In one case, the VL/VL CDR Consensus sequence is based on analysis of 209 aligned VL antibody sequences.

[0152] As discussed above, the consensus sequences in certain embodiments can comprise substitutions, deletions, or additions/insertions at different positions in the sequence. Specific examples of these substitutions, deletions, or additions/insertions can be found in Tables 19C and 20C of FIG. 55, as well as Tables 21-48 of FIG. 56 and Tables 49-134 of FIG. 57, all of which are included herein. However, in no way should the amino acid substitutions, deletions, or additions/insertions exemplified in Tables 19A-C and 20A-C in FIG. 55 or in Tables 21-48 in FIG. 56 or in Tables 49-134 in FIG. 57 be construed to limit the invention to only those amino acid substitutions, deletions, or additions at any position in the identified consensus sequences (VH, VL and/or CDRs) with any amino acid is contemplated herein.

[0153] In certain embodiments, the antigen binding proteins of the invention comprise 3 VH CDRs and 3 VL CDRs, wherein at least one VH CDR is a VH1 CDR selected from Table 19B or Table 19C as depicted in FIG. 55. In certain embodiments, the antigen binding proteins of the invention comprise 3 VH CDRs and 3 VL CDRs, wherein at least one VH CDR is a VH2 CDR selected from Table 19B or Table 19C as depicted in FIG. 55. In certain embodiments, the antigen binding proteins of the invention comprise 3 VH CDRs and 3 VL CDRs, wherein at least one VH CDR is a VH3 CDR selected from Table 19B or Table 19C as depicted in FIG. 55. In certain embodiments, the antigen binding proteins of the invention comprise 3 VH CDRs and 3 VL CDRs, wherein the VH1 CDR, the VH2 CDR and the VH3 CDR is selected from Table 19B or Table 19C as depicted in FIG. 55.

[0154] In certain embodiments, the antigen binding proteins of the invention comprise 3 VH CDRs and 3 VL CDRs, wherein at least one VL CDR is a VL1 CDR selected from Table 20B or Table 20C as depicted in FIG. 55. In certain embodiments, the antigen binding proteins of the invention comprise 3 VH CDRs and 3 VL CDRs, wherein at least one VL CDR is a VL2 CDR selected from Table 20B or Table 20C as depicted in FIG. 55. In certain embodiments, the antigen binding proteins of the invention comprise 3 VH CDRs and 3 VL CDRs, wherein at least one VL CDR is a VL3 CDR selected from Table 20B or Table 20C as depicted in FIG. 55. In certain embodiments, the antigen binding proteins of the invention comprise 3 VH CDRs and 3 VL CDRs, wherein the VL1 CDR, the VL2 CDR and the VL3 CDR is selected from Table 20B or Table 20C as depicted in FIG. 55.

[0155] In some embodiments, antigen binding proteins comprise no more than one, two, three, four, five, or six amino acid additions, deletions or substitutions of a VH. In some embodiments, antigen binding proteins comprise no more than one, two, three, four, five, or six amino acid additions, deletions or substitutions of a VL. In further embodiments, antigen binding proteins comprise no more than one, two, three, four, five, or six amino acid additions, deletions or substitutions within a VH1 CDR. In further embodiments, antigen binding proteins comprise no more than one, two, three, four, five, or six amino acid additions, deletions or substitutions within a VH2 CDR. In further embodiments, antigen binding proteins comprise no more than one, two, three, four, five, or six amino acid additions, deletions or substitutions within a VH3 CDR. In further embodiments, antigen binding proteins comprise no more than one, two, three, four, five, or six amino acid additions, deletions or substitutions within a VL1 CDR. In further embodiments, antigen binding proteins comprise no more than one, two, three, four, five, or six amino acid additions, deletions or substitutions within a VL2 CDR. In further embodiments, antigen binding proteins comprise no more than one, two, three, four, five, or six amino acid additions, deletions or substitutions within a VL3 CDR.

[0156] In some embodiments, antigen binding proteins comprise no more than one, two, three, four, five, or six amino acid additions, deletions or substitutions of a VH consensus sequence. In some embodiments, antigen binding proteins comprise no more than one, two, three, four, five, or six amino acid additions, deletions or substitutions of a VL consensus sequence. In further embodiments, antigen binding proteins comprise no more than one, two, three, four, five, or six amino acid additions, deletions or substitutions within a VH1 CDR Consensus sequence. In further embodiments, antigen binding proteins comprise no more than one, two, three, four, five, or six amino acid additions, deletions or substitutions within a VH2 CDR Consensus sequence. In further embodiments, antigen binding proteins comprise no more than one, two, three, four, five, or six amino acid additions, deletions or substitutions within a VH3 CDR Consensus sequence. In further embodiments, antigen binding proteins comprise no more than one, two, three, four, five, or six amino acid additions, deletions or substitutions within a VL1 CDR Consensus sequence. In further embodiments, antigen binding proteins comprise no more than one, two, three, four, five, or six amino acid additions, deletions or substitutions within a VL2 CDR Consensus sequence. In further embodiments, antigen binding proteins comprise no more than one, two, three, four, five, or six amino acid additions, deletions or substitutions within a VL3 CDR Consensus sequence.

[0157] In some embodiments, framework consensus sequences are encompassed by the present invention. Examples of these framework consensus sequences and additions, deletions or substitutions are shown in Tables 21-48 in FIG. 56 and Tables 49-134 in FIG. 57 herein.

[0158] In a further embodiment, the antigen binding proteins of the invention bind to ASGR of different species, including, but not limited to, human, cynomolgus, porcine, canine, murine and rat. In some embodiments, the antigen binding proteins of the invention bind to human. In some embodiments, the antigen binding proteins of the invention bind to cynomolgus ASGR. In some embodiments, the antigen binding proteins of the invention bind to porcine ASGR. In some embodiments, the antigen binding proteins of the invention bind to canine ASGR. In some embodiments, the antigen binding proteins of the invention bind to murine ASGR. In some embodiments, the antigen binding proteins of the invention bind to rat ASGR. In some embodiments, the antigen binding proteins specifically bind to ASGR of the different species.

[0159] In some embodiments, the antigen binding proteins of the invention bind to ASGR-1 of different species, including, but not limited to, human, cynomolgus, porcine, canine, murine and rat. In some embodiments, the antigen binding proteins of the invention bind to human ASGR-1. In some embodiments, the antigen binding proteins of the invention bind to cynomolgus ASGR-1. In some embodiments, the antigen binding proteins of the invention bind to porcine ASGR-1. In some embodiments, the antigen binding proteins of the invention bind to canine ASGR-1. In some embodiments, the antigen binding proteins of the invention bind to murine ASGR-1. In some embodiments, the antigen binding proteins of the invention bind to rat ASGR-1. In some embodiments, the antigen binding proteins specifically bind to ASGR-1 of the different species.

[0160] In some embodiments, the antigen binding proteins of the invention binds to ASGR-2 of different species, including, but not limited to, human, cynomolgus, porcine, canine, murine and rat. In some embodiments, the antigen binding proteins of the invention bind to human ASGR-2. In some embodiments, the antigen binding proteins of the invention bind to cynomolgus ASGR-2. In some embodiments, the antigen binding proteins of the invention bind to porcine ASGR-2. In some embodiments, the antigen binding proteins of the invention bind to canine ASGR-2. In some embodiments, the antigen binding proteins of the invention bind to murine ASGR-2. In some embodiments, the antigen binding proteins of the invention bind to rat ASGR-2. In some embodiments, the antigen binding proteins specifically bind to ASGR-2 of the different species.

[0161] In some embodiments, the antigen binding proteins of the invention bind to ASGR, ASGR-1 and/or ASGR-2 from two or more different species, and/or bind ASGR, ASGR-1 and/or ASGR-2 from the same species. For example, but not limited to: an antibody that binds human and cynomolgus ASGR-1; an antibody that binds to human, cynomolgus and porcine ASGR-1; an antibody that binds to human, cynomolgus, rat and murine ASGR-2; an antibody that binds human ASGR-1 and human ASGR-2; an antibody that binds human and cynomolgus ASGR-1 and ASGR-2. In some embodiments, the antigen binding proteins specifically bind to ASGR, ASGR-1 and/or ASGR-2 from two or more different species and/or specifically bind ASGR, ASGR-1 and/or ASGR-2 from the same species.

[0162] As discussed herein, the ASGR receptor, and ASGR-1 and/or ASGR-2 separately, internalize into the cell upon ligand binding. Accordingly, in certain embodiments, the invention provides antigen binding proteins that inhibit or reduce internalization of ASGR, ASGR-1 and/or ASGR-2. In certain embodiments, the antigen binding proteins of the invention reduce ligand binding and also inhibit internalization of ASGR, ASGR-1 and/or ASGR-2. In some embodiments, the antigen binding proteins of the invention inhibit internalization without necessarily inhibiting ligand binding.

[0163] In some embodiments, the antigen binding proteins (e.g., antibodies) of the invention are pH and/or calcium insensitive molecules, as well as binding to ASGR, ASGR-1 and/or ASGR-2 and inhibiting the binding to a ligand. It is envisioned that these properties are desired to reduce or prevent the molecule from disassociating from the receptor during the endocytotic process in order to extend the half-life of the molecule. In some embodiments, the antigen binding proteins (e.g., antibodies) with pH-independent binding to its antigen such that the affinity for the antigen binding at physiological pH (i.e., pH 7.4) is similar to that at endosomal pH (i.e., pH 5.5-6.0). In some embodiments, the antigen binding proteins (e.g., antibodies) with calcium-independent binding to its antigen such that the affinity for the antigen binding at assay conditions (i.e., 1 mM calcium) is similar to that in the absence of exogenously added calcium. In some embodiments, the antigen binding proteins with both pH- and calcium-independent binding to its antigen such that the affinity for the antigen binding at physiologic pH and in the presence of calcium is similar to that at endosomal pH (i.e., pH 5.5-6.0) and in the absence of calcium. Any number of methods known to one skilled in the art can be used to measure pH and/or calcium insensitivity, such as the method described in Example 7C below.

[0164] ASGR-1, an asialoglycoprotein receptor, contains an N-term cytosolic domain, a transmembrane domain, a stalk region and a carbohydrate recognition domain (CRD) (alternatively known as the carbohydrate binding domain, or “CBD”). The carbohydrate recognition domain (“CRD”) structure of ASGR-1 is reported in literature (M. Meier et al, JMB (2000)300, 857-865). The structure of ASGR-1 at a higher resolution than reported, and also when bound to various ligands (e.g., sugars including but not limited to lactose, galactose, and/or GalNAc or glycoproteins displaying such sugars including but not limited to fetuin, orosomucoid and/or alkaline phosphatase) is provided herein (see Example 10 and FIGS. 18-21 herein). Given the importance of this domain to the function of ASGR-1, in some embodiments, it is desirable to target this domain with the antigen binding proteins of the present invention.

[0165] Accordingly, in some embodiments, the antigen binding proteins of the invention bind to the CBD of ASGR-1. In certain embodiments, the antigen binding proteins of the invention bind to the CBD of human ASGR-1. In certain embodiments, the antigen binding proteins of the invention bind to the CBD of SEQ ID NO:5. In some embodiments, the antigen binding proteins of the invention bind to amino acid residues selected from the group consisting of 148-291, 149-291, 150-291, 151-291, 152-291, 153-291, and 154-291 of SEQ ID NO:5. In some embodiments, the invention comprises an isolated antigen binding protein that binds to human ASGR-1 CBD within Helix α-1 or Helix α-2. In some embodiments, the invention comprises an isolated antigen binding protein that binds to human ASGR-1 CBD within residues 174-186 of SEQ ID NO:5. In some embodiments, the invention comprises an isolated antigen binding protein that binds to human ASGR-1 CBD within residues 194-206 of SEQ ID NO:5. In some embodiments, the invention comprises an isolated antigen binding protein that binds to human ASGR-1 CBD at the same or overlapping binding site as where a ligand binds (e.g., sugars including but not limited to lactose, galactose, and/or GalNAc or glycoproteins displaying such sugars including but not limited to fetuin, orosomucoid and/or alkaline phosphatase or other sugars and glycoproteins capable of binding to ASGR, ASGR-1, and/or ASGR-2). In some embodiments, the invention comprises an isolated antigen binding protein that binds to human ASGR-1 CBD within residues 237-273 or residues 240-267 of SEQ ID NO:5. In some embodiments, the antigen binding proteins of the invention bind to the CBD of cynomolgus ASGR-1. In some embodiments, the antigen binding proteins of the invention bind to the CBD of porcine ASGR-1. In some embodiments, the antigen binding proteins of the invention bind to the CBD of canine ASGR-1. In some embodiments, the antigen binding proteins of the invention bind to the CBD of murine ASGR-1. In yet some embodiments, the antigen binding proteins of the invention bind to the CBD of rat ASGR-1. In yet some embodiments, the antigen binding proteins of the invention bind to the CBD of two or more different ASGR-1 species, for example, but not limited to, human ASGR-1 and cynomolgus ASGR-1, or human ASGR-1, cynomolgus ASGR-1 and canine ASGR-1, or human ASGR-1 and murine ASGR-1.

[0166] In further embodiments, the antigen binding proteins of the invention bind to ASGR-1 and inhibit binding of ligand to ASGR-1. In a specific embodiment, the ligands that are inhibited include, but are not limited to, sugars including but not limited to lactose, galactose, and/or GalNAc or glycoproteins displaying such sugars including but not limited to fetuin, orosomucoid and/or alkaline phosphatase or other sugars and glycoproteins capable of binding to ASGR, ASGR-1, and/or ASGR-2.

[0167] The tyrosine at position 272 of murine ASGR-1 (position 273 of human ASGR-1 (SEQ ID NO:5)) appears to be important for protein stability, as it displays hydrogen bonding to D266 of murine ASGR-1 and several van der Waals contacts to other residues of murine ASGR-1 (N208, W210, H256, and R270). Additionally, by analogy with other lectins, Y272 of murine ASGR-1 may play a role in carbohydrate binding and function of ASGR-1. Accordingly, in some embodiments, the antigen binding proteins of the invention bind to or interact with Y273 of human ASGR-1. In some embodiments, the antigen binding proteins of the invention bind to ASGR-1 at an epitope that comprises Y273 of human ASGR-1. In some embodiments, the antigen binding proteins of the invention bind to ASGR-1 at an epitope that results in Y273 of human ASGR-1 being unable to take part in binding ligand.

[0168] Analysis of the crystal structure of hASGR-1 revealed specific amino acids that are involved in the interaction between hASGR-1 and the ligands (e.g., sugars including but not limited to lactose, galactose, and/or GalNAc or glycoproteins displaying such sugars including but not limited to fetuin, orosomucoid and/or alkaline phosphatase). Accordingly, in further embodiments, the antigen binding proteins of the invention bind to or interact with at least one of Q240, D242, W244, E253, N265, D266, D267, N209, R237, P238, E239, P241, D243, Y245, G246, H247, G252, C255, H257, T259, D260, V268, R271, Y273, F258, R263, or W264. In some embodiments, the antigen binding proteins of the invention bind at an epitope comprising at least one of Q240, D242, W244, E253, N265, D266, D267, N209, R237, P238, E239, P241, D243, Y245, G246, H247, G252, C255, H257, T259, D260, V268, R271, Y273, F258, R263, or W264. In further embodiments, the antigen binding proteins of the invention bind to hASGR-land block or reduce the binding or interaction of at least one of Q240, D242, W244, E253, N265, D266, D267, N209, R237, P238, E239, P241, D243, Y245, G246, H247, G252, C255, H257, T259, D260, V268, R271, Y273, F258, R263, or W264 with a ligand (e.g., sugars including but not limited to lactose, galactose, and/or GalNAc or glycoproteins displaying such sugars including but not limited to fetuin, orosomucoid and/or alkaline phosphatase).

[0169] In further embodiments, the antigen binding proteins of the invention bind to or interact with at least one of Q240, D242, W244, E253, N265, D266, D267, R237, P238, H257, T259, or Y273. In some embodiments, the antigen binding proteins of the invention bind at an epitope comprising at least one of Q240, D242, W244, E253, N265, D266, D267, R237, P238, H257, T259, or Y273. In further embodiments, the antigen binding proteins of the invention bind to hASGR-1 and block or reduce the binding or interaction of at least one of Q240, D242, W244, E253, N265, D266, D267, R237, P238, H257, T259, or Y273 with a ligand (e.g., sugars including but not limited to lactose, galactose, and/or GalNAc or glycoproteins displaying such sugars including but not limited to fetuin, orosomucoid and/or alkaline phosphatase).

[0170] In some embodiments, the antigen binding proteins of the invention bind to or interact with at least two of Q240, D242, W244, E253, N265, D266, D267, N209, R237, P238, E239, P241, D243, Y245, G246, H247, G252, C255, H257, T259, D260, V268, R271, Y273, F258, R263, or W264. In some embodiments, the antigen binding proteins of the invention bind to or interact with at least three of Q240, D242, W244, E253, N265, D266, D267, N209, R237, P238, E239, P241, D243, Y245, G246, H247, G252, C255, H257, T259, D260, V268, R271, Y273, F258, R263, or W264. In some embodiments, the antigen binding proteins of the invention bind to or interact with at least four of Q240, D242, W244, E253, N265, D266, D267, N209, R237, P238, E239, P241, D243, Y245, G246, H247, G252, C255, H257, T259, D260, V268, R271, Y273, F258, R263, or W264. In some embodiments, the antigen binding proteins of the invention bind to or interact with at least five of Q240, D242, W244, E253, N265, D266, D267, N209, R237, P238, E239, P241, D243, Y245, G246, H247, G252, C255, H257, T259, D260, V268, R271, Y273, F258, R263, or W264. In some embodiments, the antigen binding proteins of the invention bind to or interact with at least six of Q240, D242, W244, E253, N265, D266, D267, N209, R237, P238, E239, P241, D243, Y245, G246, H247, G252, C255, H257, T259, D260, V268, R271, Y273, F258, R263, or W264. In some embodiments, the antigen binding proteins of the invention bind to or interact with at least seven of Q240, D242, W244, E253, N265, D266, D267, N209, R237, P238, E239, P241, D243, Y245, G246, H247, G252, C255, H257, T259, D260, V268, R271, Y273, F258, R263, or W264. In some embodiments, the antigen binding proteins of the invention bind to or interact with at least eight of Q240, D242, W244, E253, N265, D266, D267, N209, R237, P238, E239, P241, D243, Y245, G246, H247, G252, C255, H257, T259, D260, V268, R271, Y273, F258, R263, or W264. In some embodiments, the antigen binding proteins of the invention bind to or interact with at least nine of Q240, D242, W244, E253, N265, D266, D267, N209, R237, P238, E239, P241, D243, Y245, G246, H247, G252, C255, H257, T259, D260, V268, R271, Y273, F258, R263, or W264. In some embodiments, the antigen binding proteins of the invention bind to or interact with at least ten of Q240, D242, W244, E253, N265, D266, D267, N209, R237, P238, E239, P241, D243, Y245, G246, H247, G252, C255, H257, T259, D260, V268, R271, Y273, F258, R263, or W264. In some embodiments, the antigen binding proteins of the invention bind to or interact with at least eleven of Q240, D242, W244, E253, N265, D266, D267, N209, R237, P238, E239, P241, D243, Y245, G246, H247, G252, C255, H257, T259, D260, V268, R271, Y273, F258, R263, or W264. In some embodiments, the antigen binding proteins of the invention bind to or interact with at least twelve of Q240, D242, W244, E253, N265, D266, D267, N209, R237, P238, E239, P241, D243, Y245, G246, H247, G252, C255, H257, T259, D260, V268, R271, Y273, F258, R263, or W264. In some embodiments, the antigen binding proteins of the invention bind to or interact with at least thirteen of Q240, D242, W244, E253, N265, D266, D267, N209, R237, P238, E239, P241, D243, Y245, G246, H247, G252, C255, H257, T259, D260, V268, R271, Y273, F258, R263, or W264. In some embodiments, the antigen binding proteins of the invention bind to or interact with at least fourteen of Q240, D242, W244, E253, N265, D266, D267, N209, R237, P238, E239, P241, D243, Y245, G246, H247, G252, C255, H257, T259, D260, V268, R271, Y273, F258, R263, or W264. In some embodiments, the antigen binding proteins of the invention bind to or interact with at least fifteen of Q240, D242, W244, E253, N265, D266, D267, N209, R237, P238, E239, P241, D243, Y245, G246, H247, G252, C255, H257, T259, D260, V268, R271, Y273, F258, R263, or W264. In some embodiments, the antigen binding proteins of the invention bind to or interact with at least sixteen of Q240, D242, W244, E253, N265, D266, D267, N209, R237, P238, E239, P241, D243, Y245, G246, H247, G252, C255, H257, T259, D260, V268, R271, Y273, F258, R263, or W264. In some embodiments, the antigen binding proteins of the invention bind to or interact with at least seventeen of Q240, D242, W244, E253, N265, D266, D267, N209, R237, P238, E239, P241, D243, Y245, G246, H247, G252, C255, H257, T259, D260, V268, R271, Y273, F258, R263, or W264. In some embodiments, the antigen binding proteins of the invention bind to or interact with at least eighteen of Q240, D242, W244, E253, N265, D266, D267, N209, R237, P238, E239, P241, D243, Y245, G246, H247, G252, C255, H257, T259, D260, V268, R271, Y273, F258, R263, or W264. In some embodiments, the antigen binding proteins of the invention bind to or interact with at least nineteen of Q240, D242, W244, E253, N265, D266, D267, N209, R237, P238, E239, P241, D243, Y245, G246, H247, G252, C255, H257, T259, D260, V268, R271, Y273, F258, R263, or W264. In some embodiments, the antigen binding proteins of the invention bind to or interact with at least twenty of Q240, D242, W244, E253, N265, D266, D267, N209, R237, P238, E239, P241, D243, Y245, G246, H247, G252, C255, H257, T259, D260, V268, R271, Y273, F258, R263, or W264.

[0171] In some embodiments, the antigen binding proteins of the invention bind to or interact with at least two of Q240, D242, W244, E253, N265, D266, D267, R237, P238, H257, T259, or Y273. In some embodiments, the antigen binding proteins of the invention bind to or interact with at least three of Q240, D242, W244, E253, N265, D266, D267, R237, P238, H257, T259, or Y273. In some embodiments, the antigen binding proteins of the invention bind to or interact with at least four of Q240, D242, W244, E253, N265, D266, D267, R237, P238, H257, T259, or Y273. In some embodiments, the antigen binding proteins of the invention bind to or interact with at least five of Q240, D242, W244, E253, N265, D266, D267, R237, P238, H257, T259, or Y273. In some embodiments, the antigen binding proteins of the invention bind to or interact with at least six of Q240, D242, W244, E253, N265, D266, D267, R237, P238, H257, T259, or Y273. In some embodiments, the antigen binding proteins of the invention bind to or interact with at least seven of Q240, D242, W244, E253, N265, D266, D267, R237, P238, H257, T259, or Y273. In some embodiments, the antigen binding proteins of the invention bind to or interact with at least eight of Q240, D242, W244, E253, N265, D266, D267, R237, P238, H257, T259, or Y273. In some embodiments, the antigen binding proteins of the invention bind to or interact with at least nine of Q240, D242, W244, E253, N265, D266, D267, R237, P238, H257, T259, or Y273. In some embodiments, the antigen binding proteins of the invention bind to or interact with at least ten of Q240, D242, W244, E253, N265, D266, D267, R237, P238, H257, T259, or Y273. In some embodiments, the antigen binding proteins of the invention bind to or interact with at least eleven of Q240, D242, W244, E253, N265, D266, D267, R237, P238, H257, T259, or Y273. In some embodiments, the antigen binding proteins of the invention bind to or interact with at least all of Q240, D242, W244, E253, N265, D266, D267, R237, P238, H257, T259, or Y273.

[0172] In some embodiments, the antigen binding proteins of the invention bind at an epitope comprising at least two of Q240, D242, W244, E253, N265, D266, D267, N209, R237, P238, E239, P241, D243, Y245, G246, H247, G252, C255, H257, T259, D260, V268, R271, Y273, F258, R263, or W264. In some embodiments, the antigen binding proteins of the invention bind at an epitope comprising at least three of Q240, D242, W244, E253, N265, D266, D267, N209, R237, P238, E239, P241, D243, Y245, G246, H247, G252, C255, H257, T259, D260, V268, R271, Y273, F258, R263, or W264. In some embodiments, the antigen binding proteins of the invention bind at an epitope comprising at least four of Q240, D242, W244, E253, N265, D266, D267, N209, R237, P238, E239, P241, D243, Y245, G246, H247, G252, C255, H257, T259, D260, V268, R271, Y273, F258, R263, or W264. In some embodiments, the antigen binding proteins of the invention bind at an epitope comprising at least five of Q240, D242, W244, E253, N265, D266, D267, N209, R237, P238, E239, P241, D243, Y245, G246, H247, G252, C255, H257, T259, D260, V268, R271, Y273, F258, R263, or W264. In some embodiments, the antigen binding proteins of the invention bind at an epitope comprising at least six of Q240, D242, W244, E253, N265, D266, D267, N209, R237, P238, E239, P241, D243, Y245, G246, H247, G252, C255, H257, T259, D260, V268, R271, Y273, F258, R263, or W264. In some embodiments, the antigen binding proteins of the invention bind at an epitope comprising at least seven of Q240, D242, W244, E253, N265, D266, D267, N209, R237, P238, E239, P241, D243, Y245, G246, H247, G252, C255, H257, T259, D260, V268, R271, Y273, F258, R263, or W264. In some embodiments, the antigen binding proteins of the invention bind at an epitope comprising at least eight of Q240, D242, W244, E253, N265, D266, D267, N209, R237, P238, E239, P241, D243, Y245, G246, H247, G252, C255, H257, T259, D260, V268, R271, Y273, F258, R263, or W264. In some embodiments, the antigen binding proteins of the invention bind at an epitope comprising at least nine of Q240, D242, W244, E253, N265, D266, D267, N209, R237, P238, E239, P241, D243, Y245, G246, H247, G252, C255, H257, T259, D260, V268, R271, Y273, F258, R263, or W264. In some embodiments, the antigen binding proteins of the invention bind at an epitope comprising at least ten of Q240, D242, W244, E253, N265, D266, D267, N209, R237, P238, E239, P241, D243, Y245, G246, H247, G252, C255, H257, T259, D260, V268, R271, Y273, F258, R263, or W264. In some embodiments, the antigen binding proteins of the invention bind at an epitope comprising at least eleven of Q240, D242, W244, E253, N265, D266, D267, N209, R237, P238, E239, P241, D243, Y245, G246, H247, G252, C255, H257, T259, D260, V268, R271, Y273, F258, R263, or W264. In some embodiments, the antigen binding proteins of the invention bind at an epitope comprising at least twelve of Q240, D242, W244, E253, N265, D266, D267, N209, R237, P238, E239, P241, D243, Y245, G246, H247, G252, C255, H257, T259, D260, V268, R271, Y273, F258, R263, or W264. In some embodiments, the antigen binding proteins of the invention bind at an epitope comprising at least thirteen of Q240, D242, W244, E253, N265, D266, D267, N209, R237, P238, E239, P241, D243, Y245, G246, H247, G252, C255, H257, T259, D260, V268, R271, Y273, F258, R263, or W264. In some embodiments, the antigen binding proteins of the invention bind at an epitope comprising at least fourteen of Q240, D242, W244, E253, N265, D266, D267, N209, R237, P238, E239, P241, D243, Y245, G246, H247, G252, C255, H257, T259, D260, V268, R271, Y273, F258, R263, or W264. In some embodiments, the antigen binding proteins of the invention bind at an epitope comprising at least fifteen of Q240, D242, W244, E253, N265, D266, D267, N209, R237, P238, E239, P241, D243, Y245, G246, H247, G252, C255, H257, T259, D260, V268, R271, Y273, F258, R263, or W264. In some embodiments, the antigen binding proteins of the invention bind at an epitope comprising at least sixteen of Q240, D242, W244, E253, N265, D266, D267, N209, R237, P238, E239, P241, D243, Y245, G246, H247, G252, C255, H257, T259, D260, V268, R271, Y273, F258, R263, or W264. In some embodiments, the antigen binding proteins of the invention bind at an epitope comprising at least seventeen of Q240, D242, W244, E253, N265, D266, D267, N209, R237, P238, E239, P241, D243, Y245, G246, H247, G252, C255, H257, T259, D260, V268, R271, Y273, F258, R263, or W264. In some embodiments, the antigen binding proteins of the invention bind at an epitope comprising at least eighteen of Q240, D242, W244, E253, N265, D266, D267, N209, R237, P238, E239, P241, D243, Y245, G246, H247, G252, C255, H257, T259, D260, V268, R271, Y273, F258, R263, or W264. In some embodiments, the antigen binding proteins of the invention bind at an epitope comprising at least nineteen of Q240, D242, W244, E253, N265, D266, D267, N209, R237, P238, E239, P241, D243, Y245, G246, H247, G252, C255, H257, T259, D260, V268, R271, Y273, F258, R263, or W264. In some embodiments, the antigen binding proteins of the invention bind at an epitope comprising at least twenty of Q240, D242, W244, E253, N265, D266, D267, N209, R237, P238, E239, P241, D243, Y245, G246, H247, G252, C255, H257, T259, D260, V268, R271, Y273, F258, R263, or W264.

[0173] In some embodiments, the antigen binding proteins of the invention bind at an epitope comprising at least two of Q240, D242, W244, E253, N265, D266, D267, R237, P238, H257, T259, or Y273. In some embodiments, the antigen binding proteins of the invention bind at an epitope comprising at least three of Q240, D242, W244, E253, N265, D266, D267, R237, P238, H257, T259, or Y273. In some embodiments, the antigen binding proteins of the invention bind at an epitope comprising at least four of Q240, D242, W244, E253, N265, D266, D267, R237, P238, H257, T259, or Y273. In some embodiments, the antigen binding proteins of the invention bind at an epitope comprising at least five of Q240, D242, W244, E253, N265, D266, D267, R237, P238, H257, T259, or Y273. In some embodiments, the antigen binding proteins of the invention bind at an epitope comprising at least six of Q240, D242, W244, E253, N265, D266, D267, R237, P238, H257, T259, or Y273. In some embodiments, the antigen binding proteins of the invention bind at an epitope comprising at least seven of Q240, D242, W244, E253, N265, D266, D267, R237, P238, H257, T259, or Y273. In some embodiments, the antigen binding proteins of the invention bind at an epitope comprising at least eight of Q240, D242, W244, E253, N265, D266, D267, R237, P238, H257, T259, or Y273. In some embodiments, the antigen binding proteins of the invention bind at an epitope comprising at least nine of Q240, D242, W244, E253, N265, D266, D267, R237, P238, H257, T259, or Y273. In some embodiments, the antigen binding proteins of the invention bind at an epitope comprising at least ten of Q240, D242, W244, E253, N265, D266, D267, R237, P238, H257, T259, or Y273. In some embodiments, the antigen binding proteins of the invention bind at an epitope comprising at least eleven of Q240, D242, W244, E253, N265, D266, D267, R237, P238, H257, T259, or Y273. In some embodiments, the antigen binding proteins of the invention bind at an epitope comprising all of Q240, D242, W244, E253, N265, D266, D267, R237, P238, H257, T259, or Y273.

[0174] In further embodiments, the antigen binding proteins of the invention bind to hASGR-1 and block or reduce the binding or interaction of at least two of Q240, D242, W244, E253, N265, D266, D267, N209, R237, P238, E239, P241, D243, Y245, G246, H247, G252, C255, H257, T259, D260, V268, R271, Y273, F258, R263, or W264 with a ligand (e.g., sugars including but not limited to lactose, galactose, and/or GalNAc or glycoproteins displaying such sugars including but not limited to fetuin, orosomucoid and/or alkaline phosphatase). In further embodiments, the antigen binding proteins of the invention bind to hASGR-1 and block or reduce the binding or interaction of at least three of Q240, D242, W244, E253, N265, D266, D267, N209, R237, P238, E239, P241, D243, Y245, G246, H247, G252, C255, H257, T259, D260, V268, R271, Y273, F258, R263, or W264 with a ligand (e.g., sugars including but not limited to lactose, galactose, and/or GalNAc or glycoproteins displaying such sugars including but not limited to fetuin, orosomucoid and/or alkaline phosphatase). In further embodiments, the antigen binding proteins of the invention bind to hASGR-1 and block or reduce the binding or interaction of at least four of Q240, D242, W244, E253, N265, D266, D267, N209, R237, P238, E239, P241, D243, Y245, G246, H247, G252, C255, H257, T259, D260, V268, R271, Y273, F258, R263, or W264 with a ligand (e.g, sugars including but not limited to lactose, galactose, and/or GalNAc or glycoproteins displaying such sugars including but not limited to fetuin, orosomucoid and/or alkaline phosphatase). In further embodiments, the antigen binding proteins of the invention bind to hASGR-1 and block or reduce the binding or interaction of at least five of Q240, D242, W244, E253, N265, D266, D267, N209, R237, P238, E239, P241, D243, Y245, G246, H247, G252, C255, H257, T259, D260, V268, R271, Y273, F258, R263, or W264 with a ligand (e.g, sugars including but not limited to lactose, galactose, and/or GalNAc or glycoproteins displaying such sugars including but not limited to fetuin, orosomucoid and/or alkaline phosphatase). In further embodiments, the antigen binding proteins of the invention bind to hASGR-1 and block or reduce the binding or interaction of at least six of Q240, D242, W244, E253, N265, D266, D267, N209, R237, P238, E239, P241, D243, Y245, G246, H247, G252, C255, H257, T259, D260, V268, R271, Y273, F258, R263, or W264 with a ligand (e.g, sugars including but not limited to lactose, galactose, and/or GalNAc or glycoproteins displaying such sugars including but not limited to fetuin, orosomucoid and/or alkaline phosphatase). In further embodiments, the antigen binding proteins of the invention bind to hASGR-1 and block or reduce the binding or interaction of at least seven of Q240, D242, W244, E253, N265, D266, D267, N209, R237, P238, E239, P241, D243, Y245, G246, H247, G252, C255, H257, T259, D260, V268, R271, Y273, F258, R263, or W264 with a ligand (e.g., sugars including but not limited to lactose, galactose, and/or GalNAc or glycoproteins displaying such sugars including but not limited to fetuin, orosomucoid and/or alkaline phosphatase). In further embodiments, the antigen binding proteins of the invention bind to hASGR-1 and block or reduce the binding or interaction of at least eight of Q240, D242, W244, E253, N265, D266, D267, N209, R237, P238, E239, P241, D243, Y245, G246, H247, G252, C255, H257, T259, D260, V268, R271, Y273, F258, R263, or W264 with a ligand (e.g, sugars including but not limited to lactose, galactose, and/or GalNAc or glycoproteins displaying such sugars including but not limited to fetuin, orosomucoid and/or alkaline phosphatase). In further embodiments, the antigen binding proteins of the invention bind to hASGR-1 and block or reduce the binding or interaction of at least nine of Q240, D242, W244, E253, N265, D266, D267, N209, R237, P238, E239, P241, D243, Y245, G246, H247, G252, C255, H257, T259, D260, V268, R271, Y273, F258, R263, or W264 with a ligand (e.g., lactose, galactose and/or GalNAc). In further embodiments, the antigen binding proteins of the invention bind to hASGR-1 and block or reduce the binding or interaction of at least ten of Q240, D242, W244, E253, N265, D266, D267, N209, R237, P238, E239, P241, D243, Y245, G246, H247, G252, C255, H257, T259, D260, V268, R271, Y273, F258, R263, or W264 with a ligand (e.g., lactose, galactose and/or GalNAc). In further embodiments, the antigen binding proteins of the invention bind to hASGR-1 and block or reduce the binding or interaction of at least eleven of Q240, D242, W244, E253, N265, D266, D267, N209, R237, P238, E239, P241, D243, Y245, G246, H247, G252, C255, H257, T259, D260, V268, R271, Y273, F258, R263, or W264 with a ligand (e.g., lactose, galactose and/or GalNAc). In further embodiments, the antigen binding proteins of the invention bind to hASGR-1 and block or reduce the binding or interaction of at least twelve of Q240, D242, W244, E253, N265, D266, D267, N209, R237, P238, E239, P241, D243, Y245, G246, H247, G252, C255, H257, T259, D260, V268, R271, Y273, F258, R263, or W264 with a ligand (e.g., lactose, galactose and/or GalNAc). In further embodiments, the antigen binding proteins of the invention bind to hASGR-1 and block or reduce the binding or interaction of at least thirteen of Q240, D242, W244, E253, N265, D266, D267, N209, R237, P238, E239, P241, D243, Y245, G246, H247, G252, C255, H257, T259, D260, V268, R271, Y273, F258, R263, or W264 with a ligand (e.g., lactose, galactose and/or GalNAc). In further embodiments, the antigen binding proteins of the invention bind to hASGR-1 and block or reduce the binding or interaction of at least fourteen of Q240, D242, W244, E253, N265, D266, D267, N209, R237, P238, E239, P241, D243, Y245, G246, H247, G252, C255, H257, T259, D260, V268, R271, Y273, F258, R263, or W264 with a ligand (e.g., lactose, galactose and/or GalNAc). In further embodiments, the antigen binding proteins of the invention bind to hASGR-1 and block or reduce the binding or interaction of at least fifteen of Q240, D242, W244, E253, N265, D266, D267, N209, R237, P238, E239, P241, D243, Y245, G246, H247, G252, C255, H257, T259, D260, V268, R271, Y273, F258, R263, or W264 with a ligand (e.g., lactose, galactose and/or GalNAc). In further embodiments, the antigen binding proteins of the invention bind to hASGR-1 and block or reduce the binding or interaction of at least sixteen of Q240, D242, W244, E253, N265, D266, D267, N209, R237, P238, E239, P241, D243, Y245, G246, H247, G252, C255, H257, T259, D260, V268, R271, Y273, F258, R263, or W264 with a ligand (e.g., lactose, galactose and/or GalNAc). In further embodiments, the antigen binding proteins of the invention bind to hASGR-1 and block or reduce the binding or interaction of at least seventeen of Q240, D242, W244, E253, N265, D266, D267, N209, R237, P238, E239, P241, D243, Y245, G246, H247, G252, C255, H257, T259, D260, V268, R271, Y273, F258, R263, or W264 with a ligand (e.g., lactose, galactose and/or GalNAc). In further embodiments, the antigen binding proteins of the invention bind to hASGR-1 and block or reduce the binding or interaction of at least eighteen of Q240, D242, W244, E253, N265, D266, D267, N209, R237, P238, E239, P241, D243, Y245, G246, H247, G252, C255, H257, T259, D260, V268, R271, Y273, F258, R263, or W264 with a ligand (e.g., lactose, galactose and/or GalNAc). In further embodiments, the antigen binding proteins of the invention bind to hASGR-1 and block or reduce the binding or interaction of at least nineteen of Q240, D242, W244, E253, N265, D266, D267, N209, R237, P238, E239, P241, D243, Y245, G246, H247, G252, C255, H257, T259, D260, V268, R271, Y273, F258, R263, or W264 with a ligand (e.g., lactose, galactose and/or GalNAc). In further embodiments, the antigen binding proteins of the invention bind to hASGR-1 and block or reduce the binding or interaction of at least twenty of Q240, D242, W244, E253, N265, D266, D267, N209, R237, P238, E239, P241, D243, Y245, G246, H247, G252, C255, H257, T259, D260, V268, R271, Y273, F258, R263, or W264 with a ligand (e.g., lactose, galactose and/or GalNAc).

[0175] In further embodiments, the antigen binding proteins of the invention bind to hASGR-1 and block or reduce the binding or interaction of at least two of Q240, D242, W244, E253, N265, D266, D267, R237, P238, H257, T259, or Y273 with a ligand (e.g., lactose, galactose and/or GalNAc). In further embodiments, the antigen binding proteins of the invention bind to hASGR-1 and block or reduce the binding or interaction of at least three of Q240, D242, W244, E253, N265, D266, D267, R237, P238, H257, T259, or Y273 with a ligand (e.g., lactose, galactose and/or GalNAc). In further embodiments, the antigen binding proteins of the invention bind to hASGR-1 and block or reduce the binding or interaction of at least four of Q240, D242, W244, E253, N265, D266, D267, R237, P238, H257, T259, or Y273 with a ligand (e.g., lactose, galactose and/or GalNAc). In further embodiments, the antigen binding proteins of the invention bind to hASGR-1 and block or reduce the binding or interaction of at least five of Q240, D242, W244, E253, N265, D266, D267, R237, P238, H257, T259, or Y273 with a ligand (e.g., lactose, galactose and/or GalNAc). In further embodiments, the antigen binding proteins of the invention bind to hASGR-1 and block or reduce the binding or interaction of at least six of Q240, D242, W244, E253, N265, D266, D267, R237, P238, H257, T259, or Y273 with a ligand (e.g., lactose, galactose and/or GalNAc). In further embodiments, the antigen binding proteins of the invention bind to hASGR-1 and block or reduce the binding or interaction of at least seven of Q240, D242, W244, E253, N265, D266, D267, R237, P238, H257, T259, or Y273 with a ligand (e.g., lactose, galactose and/or GalNAc). In further embodiments, the antigen binding proteins of the invention bind to hASGR-1 and block or reduce the binding or interaction of at least eight of Q240, D242, W244, E253, N265, D266, D267, R237, P238, H257, T259, or Y273 with a ligand (e.g., lactose, galactose and/or GalNAc). In further embodiments, the antigen binding proteins of the invention bind to hASGR-1 and block or reduce the binding or interaction of at least nine of Q240, D242, W244, E253, N265, D266, D267, R237, P238, H257, T259, or Y273 with a ligand (e.g., lactose, galactose and/or GalNAc). In further embodiments, the antigen binding proteins of the invention bind to hASGR-1 and block or reduce the binding or interaction of at least ten of Q240, D242, W244, E253, N265, D266, D267, R237, P238, H257, T259, or Y273 with a ligand (e.g., lactose, galactose and/or GalNAc). In further embodiments, the antigen binding proteins of the invention bind to hASGR-1 and block or reduce the binding or interaction of at least eleven of Q240, D242, W244, E253, N265, D266, D267, R237, P238, H257, T259, or Y273 with a ligand (e.g., lactose, galactose and/or GalNAc). In further embodiments, the antigen binding proteins of the invention bind to hASGR-1 and block or reduce the binding or interaction of all of Q240, D242, W244, E253, N265, D266, D267, R237, P238, H257, T259, or Y273 with a ligand (e.g., lactose, galactose and/or GalNAc).

[0176] In order to relate unique antigen binding protein sequence features to specific functions or binding characteristics, sequences from antigen binding proteins of the invention from various characterization bins can be analyzed. For example, antigen binding proteins of the invention can be tested for their ability to bind a variety of binning probes (e.g., membrane preps from cells expressing ASGR-1 from different species or soluble huASGR-1). For each unique binding bin, the heavy and light chain sequences from each of the antigen binding proteins can be compared and claded based on, for example: 1. the unique VDJ and VJ rearrangements; 2. divergence from germline (ie. unique somatic hypermutation); and 3. relatedness to other antigen binding proteins of the same bin. Accordingly, in certain embodiments, the antigen binding proteins comprising the same or similar sequence features and patterns, will have substantially the same or similar binding characteristics. In specific embodiments, these antigen binding proteins can bind to the same or similar epitope with varying affinities.

[0177] The exemplary antigen binding proteins described herein have properties based on the epitope on ASGR, ASGR-1 and/or ASGR-2 that is bound by the antigen binding protein. The term “epitope” includes any determinant capable of being bound by an antigen binding protein, such as an antibody. An epitope is a region of an antigen that is bound by, or interacts with, an antigen binding protein that targets that antigen, and when the antigen is a protein, includes specific amino acids that directly contact, or interact with, the antigen binding protein. An epitope can be formed both by contiguous amino acids or non-contiguous amino acids juxtaposed by tertiary folding of a protein. A “linear epitope” is an epitope where an amino acid primary sequence comprises the recognized epitope. A linear epitope typically includes at least 3 or at least 4, and more usually, at least 5 or at least 6 or at least 7, for example, about 8 to about 10 amino acids in a unique sequence.

[0178] A “conformational epitope”, in contrast to a linear epitope, is a group of discontinuous amino acids (e.g., in a polypeptide, amino acid residues that are not contiguous in the polypeptide's primary sequence but that, in the context of the polypeptide's tertiary and quaternary structure, are near enough to each other to be bound by an antigen binding protein). Epitope determinants can include chemically active surface groupings of molecules such as amino acids, sugar side chains, phosphoryl or sulfonyl groups, and can have specific three dimensional structural characteristics, and/or specific charge characteristics. Generally, antigen binding proteins specific for a particular target molecule will preferentially recognize an epitope on the target molecule in a complex mixture of proteins and/or macromolecules.

[0179] Methods of characterizing the epitope bound by an antigen binding protein are well known in the art, including, but not limited to, binning (competition and/or cross-competition) (Miller et al “Epitope binning of murine monoclonal antibodies by a multiplexed pairing assay” J Immunol Methods (2011) 365, 118-25), peptide mapping (e.g., PEPSPOT™) (Albert et al “The B-cell Epitope of the Monoclonal Anti-Factor VIII Antibody ESH8 Characterized by Peptide Array Analysis” 2008 Thromb Haemost 99, 634-7), mutagenesis methods such as chimeras (Song et al “Epitope Mapping of Ibalizumab, a Humanized Anti-CD4 Monoclonal Antibody with Anti-HIV-1 Activity in Infected Patients” J. Virol. (2010) 84, 6935-6942), alanine scanning (Cunningham and Wells “High-resolution epitope mapping of HGH-receptor interactions by alanine-scanning mutagenesis” Science (1989) 244, 1081-1085), arginine scanning (Lim et al “A diversity of antibody epitopes can induce signaling through the erythropoietin receptor” Biochemistry (2010) 49, 3797-3804), HD exchange methods (Coates et al “Epitope mapping by amide hydrogen/deuterium exchange coupled with immobilization of antibody, on-line proteolysis, liquid chromatography and mass spectrometry” Rapid Commun. Mass Spectrom. (2009) 23 639-647), NMR cross saturation methods (Morgan et al “Precise epitope mapping of malaria parasite inhibitory antibodies by TROSY NMR cross-saturation” Biochemistry (2005) 44, 518-23), and crystallography (Gerhardt et al “Structure of IL-17A in complex with a potent, fully human neutralizing antibody” J. Mol. Biol (2009) 394, 905-21). The methods vary in the level of detail they provide as to the amino acids comprising the epitope.

[0180] Antigen binding proteins of the present invention include those that have an identical or overlapping epitope with an exemplary antigen binding protein described in Tables 2-7. In some embodiments, the antigen binding protein has an identical epitope as to the exemplary antigen binding proteins. In other embodiments, the antigen binding protein binds only a subset of the same amino acids as the exemplary antigen binding protein. In some embodiments, antigen binding proteins that might bind to any of the epitopes that are bound by the antibodies listed in Tables A, B, C or 6 are especially useful.

[0181] In certain embodiments, the antigen binding proteins of the present invention have an identical or overlapping epitope to the antigen binding proteins in Table 2-7 and comprise a) a light chain variable domain having at least 90% identity, at least 95% identity, or is identical to the amino acid sequence of the antigen binding proteins described in Tables 2-7; b) a heavy chain variable domain having at least 90% identity, at least 95% identity, or is identical to the amino acid sequence of the antigen binding proteins set forth in Tables 2-7; or c) the light chain variable domain of a) and the heavy chain variable domain of b).

[0182] In certain embodiments, the antigen binding protein of the present invention has an identical or overlapping epitope to the antigen binding proteins selected from the group consisting of 25A4, 4H6, 4A2, 5E5, 7E11, 54E9, 22G5, 194A4, 218G4, 176H4 and 194C10 wherein the antigen binding protein comprises a light chain variable domain having at least 90% identity, at least 95% identity, or is identical to the amino acid sequence of 25A4 and a heavy chain variable domain having at least 90% identity, at least 95% identity, or is identical to the amino acid sequence of 25A4; those comprising a light chain variable domain having at least 90% identity, at least 95% identity, or is identical to the amino acid sequence of 4H6 and a heavy chain variable domain having at least 90% identity, at least 95% identity, or is identical to the amino acid sequence of 4H6; those comprising a light chain variable domain having at least 90% identity, at least 95% identity, or is identical to the amino acid sequence of 4A2 and a heavy chain variable domain having at least 90% identity, at least 95% identity, or is identical to the amino acid sequence of 4A2; those comprising a light chain variable domain having at least 90% identity, at least 95% identity, or is identical to the amino acid sequence of 5E5 and a heavy chain variable domain having at least 90% identity, at least 95% identity, or is identical to the amino acid sequence of 5E5; those comprising a light chain variable domain having at least 90% identity, at least 95% identity, or is identical to the amino acid sequence of 7E11 and a heavy chain variable domain having at least 90% identity, at least 95% identity, or is identical to the amino acid sequence of 7E11; those comprising a light chain variable domain having at least 90% identity, at least 95% identity, or is identical to the amino acid sequence of 54E9 and a heavy chain variable domain having at least 90% identity, at least 95% identity, or is identical to the amino acid sequence of 54E9; those comprising a light chain variable domain having at least 90% identity, at least 95% identity, or is identical to the amino acid sequence of 22G5 and a heavy chain variable domain having at least 90% identity, at least 95% identity, or is identical to the amino acid sequence of 22G5; those comprising a light chain variable domain having at least 90% identity, at least 95% identity, or is identical to the amino acid sequence of 194A4 and a heavy chain variable domain having at least 90% identity, at least 95% identity, or is identical to the amino acid sequence of 194A4; those comprising a light chain variable domain having at least 90% identity, at least 95% identity, or is identical to the amino acid sequence of 218G4G4 and a heavy chain variable domain having at least 90% identity, at least 95% identity, or is identical to the amino acid sequence of 218G4; those comprising a light chain variable domain having at least 90% identity, at least 95% identity, or is identical to the amino acid sequence of 176H4 and a heavy chain variable domain having at least 90% identity, at least 95% identity, or is identical to the amino acid sequence of 176H4; those comprising a light chain variable domain having at least 90% identity, at least 95% identity, or is identical to the amino acid sequence of 194C10 and a heavy chain variable domain having at least 90% identity, at least 95% identity, or is identical to the amino acid sequence of 194C10.

[0183] In certain embodiments, the ASGR-1 antigen binding protein of the invention has an identical or overlapping epitope as the antibodies in Tables 2-7, and comprises a light chain variable domain comprising an LCDR1 having no more than three amino acid additions, deletions, or substitutions from the LCDR1 sequence set forth in Table 2; an LCDR2 having no more than three amino acid additions, deletions, or substitutions from the LCDR2 sequence set forth in Table 2; and an LCDR3 having no more than three amino acid additions, deletions, or substitutions from the LCDR3 sequence set forth in Table 2; and a heavy chain variable domain comprising a) an HCDR1 having no more than three amino acid additions, deletions, or substitutions from the HCDR1 sequence set forth in Table 2; an HCDR2 having no more than three amino acid additions, deletions, or substitutions from the HCDR2 sequence set forth in Table 2; and an HCDR3 having no more than three amino acid additions, deletions, or substitutions from the HCDR3 sequence set forth in Table 2.

[0184] In certain embodiments, the ASGR-1 antigen binding protein of the invention has an identical or overlapping epitope as the antibodies in Tables A, B, C or 6, and comprises a light chain variable domain comprising an LCDR1 having no more than three amino acid additions, deletions, or substitutions from the LCDR1 sequence set forth in Tables A, B, C or 6; an LCDR2 having no more than three amino acid additions, deletions, or substitutions from the LCDR2 sequence set forth in Tables A, B, C or 6; and an LCDR3 having no more than three amino acid additions, deletions, or substitutions from the LCDR3 sequence set forth in Tables A, B, C or 6; and a heavy chain variable domain comprising a) an HCDR1 having no more than three amino acid additions, deletions, or substitutions from the HCDR1 sequence set forth in Tables A, B, C or 6; an HCDR2 having no more than three amino acid additions, deletions, or substitutions from the HCDR2 sequence set forth in Tables A, B, C or 6; and an HCDR3 having no more than three amino acid additions, deletions, or substitutions from the HCDR3 sequence set forth in Tables A, B, C or 6.

[0185] In certain embodiments, the ASGR-1 antigen binding protein of the invention has an identical or overlapping epitope as the antibody, 25A4, and comprises a light chain variable domain comprising an LCDR1 having no more than three amino acid additions, deletions, or substitutions from the LCDR1 sequence set forth in SEQ ID NO:480; an LCDR2 having no more than three amino acid additions, deletions, or substitutions from the LCDR2 sequence set forth in SEQ ID NO:8492; and an LCDR3 having no more than three amino acid additions, deletions, or substitutions from the LCDR3 sequence set forth in SEQ ID NO:16504; and a heavy chain variable domain comprising an HCDR1 having no more than three amino acid additions, deletions, or substitutions from the HCDR1 sequence set forth in SEQ ID NO:4488; an HCDR2 having no more than three amino acid additions, deletions, or substitutions from the HCDR2 sequence set forth in SEQ ID NO:12500; and an HCDR3 having no more than three amino acid additions, deletions, or substitutions from the HCDR3 sequence set forth in SEQ ID NO:20512.

[0186] In certain embodiments, the ASGR-1 antigen binding protein of the invention has an identical or overlapping epitope as the antibody, 4H6, and comprises a light chain variable domain comprising an LCDR1 having no more than three amino acid additions, deletions, or substitutions from the LCDR1 sequence set forth in SEQ ID NO:894; an LCDR2 having no more than three amino acid additions, deletions, or substitutions from the LCDR2 sequence set forth in SEQ ID NO:8906; and an LCDR3 having no more than three amino acid additions, deletions, or substitutions from the LCDR3 sequence set forth in SEQ ID NO:16918; and a heavy chain variable domain comprising an HCDR1 having no more than three amino acid additions, deletions, or substitutions from the HCDR1 sequence set forth in SEQ ID NO:4902; an HCDR2 having no more than three amino acid additions, deletions, or substitutions from the HCDR2 sequence set forth in SEQ ID NO:12914; and an HCDR3 having no more than three amino acid additions, deletions, or substitutions from the HCDR3 sequence set forth in SEQ ID NO:20926.

[0187] In certain embodiments, the ASGR-1 antigen binding protein of the invention has an identical or overlapping epitope as the antibody, 4A2, and comprises a light chain variable domain comprising an LCDR1 having no more than three amino acid additions, deletions, or substitutions from the LCDR1 sequence set forth in SEQ ID NO:1130; an LCDR2 having no more than three amino acid additions, deletions, or substitutions from the LCDR2 sequence set forth in SEQ ID NO:9142; and an LCDR3 having no more than three amino acid additions, deletions, or substitutions from the LCDR3 sequence set forth in SEQ ID NO:17154; and a heavy chain variable domain comprising an HCDR1 having no more than three amino acid additions, deletions, or substitutions from the HCDR1 sequence set forth in SEQ ID NO:5136; an HCDR2 having no more than three amino acid additions, deletions, or substitutions from the HCDR2 sequence set forth in SEQ ID NO:13148; and an HCDR3 having no more than three amino acid additions, deletions, or substitutions from the HCDR3 sequence set forth in SEQ ID NO:21160.

[0188] In certain embodiments, the ASGR-1 antigen binding protein of the invention has an identical or overlapping epitope as the antibody, 5E5, and comprises a light chain variable domain comprising an LCDR1 having no more than three amino acid additions, deletions, or substitutions from the LCDR1 sequence set forth in SEQ ID NO:974; an LCDR2 having no more than three amino acid additions, deletions, or substitutions from the LCDR2 sequence set forth in SEQ ID NO:8986; and an LCDR3 having no more than three amino acid additions, deletions, or substitutions from the LCDR3 sequence set forth in SEQ ID NO:16998; and a heavy chain variable domain comprising an HCDR1 having no more than three amino acid additions, deletions, or substitutions from the HCDR1 sequence set forth in SEQ ID NO:4982; an HCDR2 having no more than three amino acid additions, deletions, or substitutions from the HCDR2 sequence set forth in SEQ ID NO:12994; and an HCDR3 having no more than three amino acid additions, deletions, or substitutions from the HCDR3 sequence set forth in SEQ ID NO:21006.

[0189] In certain embodiments, the ASGR-1 antigen binding protein of the invention has an identical or overlapping epitope as the antibody, 7E11, and comprises a light chain variable domain comprising an LCDR1 having no more than three amino acid additions, deletions, or substitutions from the LCDR1 sequence set forth in SEQ ID NO:872; an LCDR2 having no more than three amino acid additions, deletions, or substitutions from the LCDR2 sequence set forth in SEQ ID NO:8884; and an LCDR3 having no more than three amino acid additions, deletions, or substitutions from the LCDR3 sequence set forth in SEQ ID NO:16896; and a heavy chain variable domain comprising an HCDR1 having no more than three amino acid additions, deletions, or substitutions from the HCDR1 sequence set forth in SEQ ID NO:4880; an HCDR2 having no more than three amino acid additions, deletions, or substitutions from the HCDR2 sequence set forth in SEQ ID NO:12892; and an HCDR3 having no more than three amino acid additions, deletions, or substitutions from the HCDR3 sequence set forth in SEQ ID NO:20904.

[0190] In certain embodiments, the ASGR-1 antigen binding protein of the invention has an identical or overlapping epitope as the antibody, 54E9, and comprises a light chain variable domain comprising an LCDR1 having no more than three amino acid additions, deletions, or substitutions from the LCDR1 sequence set forth in SEQ ID NO:3448; an LCDR2 having no more than three amino acid additions, deletions, or substitutions from the LCDR2 sequence set forth in SEQ ID NO:11460; and an LCDR3 having no more than three amino acid additions, deletions, or substitutions from the LCDR3 sequence set forth in SEQ ID NO:19472; and a heavy chain variable domain comprising an HCDR1 having no more than three amino acid additions, deletions, or substitutions from the HCDR1 sequence set forth in SEQ ID NO:7452; an HCDR2 having no more than three amino acid additions, deletions, or substitutions from the HCDR2 sequence set forth in SEQ ID NO:15464; and an HCDR3 having no more than three amino acid additions, deletions, or substitutions from the HCDR3 sequence set forth in SEQ ID NO:23476.

[0191] In certain embodiments, the ASGR-1 antigen binding protein of the invention has an identical or overlapping epitope as the antibody, 22G5, and comprises a light chain variable domain comprising an LCDR1 having no more than three amino acid additions, deletions, or substitutions from the LCDR1 sequence set forth in SEQ ID NO:326; an LCDR2 having no more than three amino acid additions, deletions, or substitutions from the LCDR2 sequence set forth in SEQ ID NO:8338; and an LCDR3 having no more than three amino acid additions, deletions, or substitutions from the LCDR3 sequence set forth in SEQ ID NO:16350; and a heavy chain variable domain comprising an HCDR1 having no more than three amino acid additions, deletions, or substitutions from the HCDR1 sequence set forth in SEQ ID NO:4334; an HCDR2 having no more than three amino acid additions, deletions, or substitutions from the HCDR2 sequence set forth in SEQ ID NO:12346; and an HCDR3 having no more than three amino acid additions, deletions, or substitutions from the HCDR3 sequence set forth in SEQ ID NO:20358.

[0192] In certain embodiments, the ASGR-1 antigen binding protein of the invention has an identical or overlapping epitope as the antibody, 194A4, and comprises a light chain variable domain comprising an LCDR1 having no more than three amino acid additions, deletions, or substitutions from the LCDR1 sequence set forth in SEQ ID NO:2780; an LCDR2 having no more than three amino acid additions, deletions, or substitutions from the LCDR2 sequence set forth in SEQ ID NO:10792; and an LCDR3 having no more than three amino acid additions, deletions, or substitutions from the LCDR3 sequence set forth in SEQ ID NO:18804; and a heavy chain variable domain comprising an HCDR1 having no more than three amino acid additions, deletions, or substitutions from the HCDR1 sequence set forth in SEQ ID NO:6786; an HCDR2 having no more than three amino acid additions, deletions, or substitutions from the HCDR2 sequence set forth in SEQ ID NO:14798; and an HCDR3 having no more than three amino acid additions, deletions, or substitutions from the HCDR3 sequence set forth in SEQ ID NO:22810.

[0193] In certain embodiments, the ASGR-1 antigen binding protein of the invention has an identical or overlapping epitope as the antibody, 218G4, and comprises a light chain variable domain comprising an LCDR1 having no more than three amino acid additions, deletions, or substitutions from the LCDR1 sequence set forth in SEQ ID NO:3746; an LCDR2 having no more than three amino acid additions, deletions, or substitutions from the LCDR2 sequence set forth in SEQ ID NO:11758; and an LCDR3 having no more than three amino acid additions, deletions, or substitutions from the LCDR3 sequence set forth in SEQ ID NO:19770; and a heavy chain variable domain comprising an HCDR1 having no more than three amino acid additions, deletions, or substitutions from the HCDR1 sequence set forth in SEQ ID NO:7750; an HCDR2 having no more than three amino acid additions, deletions, or substitutions from the HCDR2 sequence set forth in SEQ ID NO:15762; and an HCDR3 having no more than three amino acid additions, deletions, or substitutions from the HCDR3 sequence set forth in SEQ ID NO:23774.

[0194] In certain embodiments, the ASGR-1 antigen binding protein of the invention has an identical or overlapping epitope as the antibody, 176H4, and comprises a light chain variable domain comprising an LCDR1 having no more than three amino acid additions, deletions, or substitutions from the LCDR1 sequence set forth in SEQ ID NO:2502; an LCDR2 having no more than three amino acid additions, deletions, or substitutions from the LCDR2 sequence set forth in SEQ ID NO:10514; and an LCDR3 having no more than three amino acid additions, deletions, or substitutions from the LCDR3 sequence set forth in SEQ ID NO:18526; and a heavy chain variable domain comprising an HCDR1 having no more than three amino acid additions, deletions, or substitutions from the HCDR1 sequence set forth in SEQ ID NO:6508; an HCDR2 having no more than three amino acid additions, deletions, or substitutions from the HCDR2 sequence set forth in SEQ ID NO:14520; and an HCDR3 having no more than three amino acid additions, deletions, or substitutions from the HCDR3 sequence set forth in SEQ ID NO:22532.

[0195] In certain embodiments, the ASGR-1 antigen binding protein of the invention has an identical or overlapping epitope as the antibody, 194C10, and comprises a light chain variable domain comprising an LCDR1 having no more than three amino acid additions, deletions, or substitutions from the LCDR1 sequence set forth in SEQ ID NO:2792; an LCDR2 having no more than three amino acid additions, deletions, or substitutions from the LCDR2 sequence set forth in SEQ ID NO:10804; and an LCDR3 having no more than three amino acid additions, deletions, or substitutions from the LCDR3 sequence set forth in SEQ ID NO:18816; and a heavy chain variable domain comprising an HCDR1 having no more than three amino acid additions, deletions, or substitutions from the HCDR1 sequence set forth in SEQ ID NO:6798; an HCDR2 having no more than three amino acid additions, deletions, or substitutions from the HCDR2 sequence set forth in SEQ ID NO:14810; and an HCDR3 having no more than three amino acid additions, deletions, or substitutions from the HCDR3 sequence set forth in SEQ ID NO:22822.

[0196] Antigen binding proteins that have an identical or overlapping epitope will often compete for binding to the antigen, ASGR, ASGR1 and/or ASGR2. Thus, in certain embodiments, an antigen binding protein (e.g., antibody or antibody fragment thereof) of the invention competes with the antigen binding proteins described in Tables 2-7. In some embodiments, an antigen binding protein (e.g., antibody or antibody fragment thereof) of the invention competes with the antigen binding proteins described in Tables A, B and C. In some embodiments, an antigen binding protein (e.g., antibody or antibody fragment thereof) of the invention competes with the antigen binding proteins described in Table 6. To “compete” or “competition” means the antigen binding proteins compete for the same epitope or binding site on a target. Such competition can be determined by an assay in which the reference antigen binding protein (e.g., antibody or antibody fragment thereof) prevents or inhibits specific binding of a test antigen binding protein. Numerous types of competitive binding assays can be used to determine if a test molecule competes with a reference molecule for binding. Examples of assays that can be employed include solid phase direct or indirect radioimmunoassay (RIA), solid phase direct or indirect enzyme immunoassay (EIA), sandwich competition assay (see, e.g., Stahli et al. (1983) Methods in Enzymology 9:242-253), solid phase direct biotin-avidin EIA (see, e.g., Kirkland et al., (1986) J. Immunol. 137:3614-3619), solid phase direct labeled assay, solid phase direct labeled sandwich assay, Luminex (Jia et al “A novel method of Multiplexed Competitive Antibody Binning for the characterization of monoclonal antibodies” J. Immunological Methods (2004) 288, 91-98) and surface plasmon resonance ((Song et al “Epitope Mapping of Ibalizumab, a Humanized Anti-CD4 Monoclonal Antibody with Anti-HIV-1 Activity in Infected Patients” J. Virol. (2010) 84, 6935-6942). An exemplary method of determining competition is described in Example 7D. Usually, when a competing antigen binding protein is present in excess, it will inhibit binding of a reference antigen binding protein to a common antigen by at least 50%, 55%, 60%, 65%, 70%, or 75%. In some instances, binding to ASGR-1 is inhibited by at least 80%, 85%, 90%, 95%, 96%, 97%, 98%, 99%, or more.

[0197] Besides competition, antigen binding proteins (e.g., antibodies or antibody fragments thereof) with identical, overlapping, or similar epitopes may be affected by mutagenesis of ASGR, ASGR-1 and/or ASGR-2 similarly. In brief, the domain(s)/region(s) containing residues that are in contact with or are buried by an antibody can be identified by mutating specific residues in ASGR, ASGR-1 and/or ASGR-2 (e.g., a wild-type antigen) and determining whether the antigen binding protein can bind the mutated or variant ASGR, ASGR-1 and/or ASGR-2 protein. By making a number of individual mutations, residues that play a direct role in binding or that are in sufficiently close proximity to the antibody such that a mutation can affect binding between the antigen binding protein and antigen can be identified. From the knowledge of these amino acids, the domain(s) or region(s) of the antigen that contain residues in contact with the antigen binding protein or covered by the antibody can be elucidated. Such a domain can include the binding epitope of an antigen binding protein. As mentioned above, one specific example of this general approach utilizes an arginine/glutamic acid scanning protocol (see, e.g., Nanevicz, T., et al., 1995, J. Biol. Chem., 270:37, 21619-21625 and Zupnick, A., et al., 2006, J. Biol. Chem., 281:29, 20464-20473). In general, arginine and glutamic acids are substituted (typically individually) for an amino acid in the wild-type polypeptide because these amino acids are charged and bulky and thus have the potential to disrupt binding between an antigen binding protein and an antigen in the region of the antigen where the mutation is introduced. Arginine residues that exist in the wild-type antigen are replaced with glutamic acid. A variety of such individual mutants are obtained and the collected binding results analyzed to determine what residues affect binding. In Example 7E, scanning arginine/glutamic acid mutagenesis was performed using the human ASGR-1 CBD domain and the effect on exemplary antibodies was determined. Included with the scope of the invention are ASGR, ASGR-1 and/or ASGR-2 antigen binding proteins having characteristics such that they are affected in a similar way as an exemplary antibody to mutagenesis.

[0198] Example 7E describes one such arginine/glutamic acid scanning of ASGR-1 for ASGR-1 antigen binding proteins provided herein. A series of mutant ASGR-1 antigens were created, with each mutant antigen having a single mutation. Binding of each mutant ASGR-1 antigen with various ASGR-1 antigen binding proteins was measured and compared to the ability of the selected antigen binding proteins to bind to human ASGR-1 (SEQ ID NO:5). In certain embodiments, binding of an antigen binding protein of the present invention to ASGR-1 is inhibited by a single mutation in ASGR-1, wherein the single mutation is selected from the group consisting of R170, S171, G172, R183, L184, W195, E196, K199, H203, H204, P207, V208, N209, H215, D216, P220, D225, D228, R237, P238, E239, P241, D242, D243, Y245, G246, H247, G248, L249, G251, E253, T259, D260, R263, N265, Q270, R271, P272, R274, and E280 as shown in SEQ ID NO:5. In some embodiments, the ASGR-1 antigen binding proteins share the attributes of antibody 4A2 and their binding to ASGR-1 is inhibited a mutation of any of W195, E196, K199, H204, P207, and R263. In some embodiments, the ASGR-1 antigen binding proteins share the attributes of antibody 4B3 and their binding to ASGR-1 is inhibited by a mutation of any of H203, H204, P220, and G251. In some embodiments, the ASGR-1 antigen binding proteins share the attributes of antibody 5E5 and their binding to ASGR-1 is inhibited by a mutation of any of W195, K199, and R263. In some embodiments, the ASGR-1 antigen binding proteins share the attributes of antibody 6G7 and their binding to ASGR-1 is inhibited by a mutation of any of R183, L184, H215, P220, P238, G246, H247, G248, G251, and N265. In some embodiments, the ASGR-1 antigen binding proteins share the attributes of antibody 149D11 and their binding is inhibited by a mutation of any of R170, S171, and L184. In some embodiments, the ASGR-1 antigen binding proteins share the attributes of antibody 175F4 and their binding is inhibited by a mutation of R183. In some embodiments, the ASGR-1 antigen binding proteins share the attributes of antibody 17H6 and their binding is inhibited by a mutation of any of P241, D242, D243, Y245, G251, and E253. In some embodiments, the ASGR-1 antigen binding proteins share the attributes of antibody 194A4 and their binding is inhibited by a mutation of D260. In some embodiments, the ASGR-1 antigen binding proteins share the attributes of antibody 60C12 and their binding is inhibited by a mutation of any of R170, R237, E239, P241, T259, D260, R263, and N265. In some embodiments, the ASGR-1 antigen binding proteins share the attributes of antibody 65D5 and their binding is inhibited by a mutation of any of R237, T259, D260 and R263. In some embodiments, the ASGR-1 antigen binding proteins share the attributes of antibody 190F8 or 191Gland their binding is inhibited by a mutation of any of R170, 5171, G172, E196, H204, P207, V208, N209, H215, D216, D225, D228, P238, D243, G248, L249, G251, D260, Q270, R271, P272, R274 and E280. In some embodiments, the ASGR-1 antigen binding proteins share the attributes of antibody 199A7 and their binding is inhibited by a mutation of any of R170, R183, H215 and Q270. In some embodiments, the ASGR-1 antigen binding proteins share the attributes of antibody 146B6 and their binding is inhibited by a mutation of any of P241, T259, and N265. In some embodiments, the ASGR-1 antigen binding proteins share the attributes of antibody 193E7 and their binding is inhibited by a mutation of any of P207 and R263. In some embodiments, any of two or more, three or more, four or more, five or more, six or more, seven or more, eight or more nine or more, ten or more, or all of the single mutations of the aforementioned groups individually inhibit binding of the ASGR-1 antigen binding protein to ASGR-1.

[0199] Binding of various anti-ASGR-1 antigen binding proteins (e.g., antibodies 5E5, 22G5, 7E11, 4A2, 4H6, 72G9, 194A4, 54E9, 218G4, 176H4 and 194C10) were further analyzed using X-ray crystallography. The results from the X-ray crystallography were highly correlated with the results from the Arginine/Glutamic acid mutagenesis profiling described above and in Example 7E. The interface between an antigen binding protein and the antigen can be determined/defined a number of ways. In Examples 10B-L, the interface was determined by selecting interface residues having at least one atom within a predefined distance to its partner protein. In some embodiments, ASGR-1 residues that are within the interface with antibody, 5E5, as determined by distance of 8Å or less are: H161, E162, W195, E196, Q198, K199, F200, Q202, H203, H204, G232, F233, K234, N235, W236, R237, P238, D261, G262, R263, V159, E160, R163, T193, 5194, E197, V201, I205, G206, P207, Y229, E230, T231, E239, F258, T259, D260, or W264 (SEQ ID NO:5). In some embodiments, ASGR-1 residues that are within the interface with antibody, 5E5, as determined by distance of 5A or less are: H161, E162, W195, E196, Q198, K199, F200, Q202, H203, H204, G232, F233, K234, N235, W236, R237, P238, D261, G262, or R263 (SEQ ID NO:5). In certain embodiments, the ASGR-1 antigen binding protein forms an interface with ASGR-1 that overlaps with that of antibody 5E5, including those wherein any of: H161, E162, W195, E196, Q198, K199, F200, Q202, H203, H204, G232, F233, K234, N235, W236, R237, P238, D261, G262, R263, V159, E160, R163, T193, S194, E197, V201, I205, G206, P207, Y229, E230, T231, E239, F258, T259, D260, or W264 (SEQ ID NO:5) are within the interface. In certain embodiments, the ASGR-1 antigen binding protein forms an interface with ASGR-1 that overlaps with that of antibody 5E5, including those wherein any of: H161, E162, W195, E196, Q198, K199, F200, Q202, H203, H204, G232, F233, K234, N235, W236, R237, or P238 (SEQ ID NO:5) are within the interface.

[0200] In some embodiments, ASGR-1 residues that are within the interface with antibody, 22G5, as determined by distance of 8 Å or less are: W167, S171, G172, K173, A174, A176, D177, N180, Y181, R183, L184, E185, D186, Q270, P272, W275, P155, N157, W158, F168, S169, R170, W175, A178, D179, C182, A187, W211, C269, R271, Y273, R274, C277, or T279 (SEQ ID NO:5). In some embodiments, ASGR-1 residues that are within the interface with antibody, 22G5, as determined by distance of 5 Å or less are: W167, S171, G172, K173, A174, A176, D177, N180, Y181, R183, L184, E185, D186, Q270, P272, or W275 (SEQ ID NO:5). In certain embodiments, the ASGR-1 antigen binding protein forms an interface with ASGR-1 that overlaps with that of antibody 5E5, including those wherein any of: W167, S171, G172, K173, A174, A176, D177, N180, Y181, R183, L184, E185, D186, Q270, P272, W275, P155, N157, W158, F168, S169, R170, W175, A178, D179, C182, A187, W211, C269, R271, Y273, R274, C277, or T279 (SEQ ID NO:5) are within the interface. In certain embodiments, the ASGR-1 antigen binding protein forms an interface with ASGR-1 that overlaps with that of antibody 5E5, including those wherein any of: W167, S171, G172, K173, A174, A176, D177, N180, Y181, R183, L184, E185, D186, Q270, P272, or W275 (SEQ ID NO:5) are within the interface.

[0201] In some embodiments, ASGR-1 residues that are within the interface with antibody, 4A2, as determined by distance of 8Å or less are: R170, W195, E196, K199, Q202, H203, H204, I205, G206, P207, V208, F233, K234, N235, W236, P238, D260, D261, G262, R263, R274, P155, N157, W158, F168, S169, R170, W175, A178, D179, C182, A187, W211, C269, R271, Y273, R274, C277, or T279 (SEQ ID NO:5). In some embodiments, ASGR-1 residues that are within the interface with antibody, 4A2, as determined by distance of 5 Å or less are: R170, W195, E196, K199, Q202, H203, H204, I205, G206, P207, V208, F233, K234, N235, W236, P238, D260, D261, G262, R263, or R274 (SEQ ID NO:5). In certain embodiments, the ASGR-1 antigen binding protein forms an interface with ASGR-1 that overlaps with that of antibody 4A2, including those wherein any of: R170, W195, E196, K199, Q202, H203, H204, I205, G206, P207, V208, F233, K234, N235, W236, P238, D260, D261, G262, R263, R274, P155, N157, W158, F168, S169, R170, W175, A178, D179, C182, A187, W211, C269, R271, Y273, R274, C277, or T279 (SEQ ID NO:5) are within the interface. In certain embodiments, the ASGR-1 antigen binding protein forms an interface with ASGR-1 that overlaps with that of antibody 4A2, including those wherein any of: R170, W195, E196, K199, Q202, H203, H204, I205, G206, P207, V208, F233, K234, N235, W236, P238, D260, D261, G262, R263, R274 (SEQ ID NO:5) are within the interface.

[0202] In some embodiments, ASGR-1 residues that are within the interface with antibody, 7E11, as determined by distance of 8Å or less are: H161, S194, W195, E196, Q198, K199, F200, Q202, H203, F233, K234, N235, W236, R237, P238, R263, E160, E162, V192, T193, E197, V201, H204, Y229, E230, T231, G232, E239, Q240, P241, D261, G262, or W264 (SEQ ID NO:5). In some embodiments, ASGR-1 residues that are within the interface with antibody, 7E11, as determined by distance of 5 Å or less are: H161, S194, W195, E196, Q198, K199, F200, Q202, H203, F233, K234, N235, W236, R237, P238, or R263 (SEQ ID NO:5). In certain embodiments, the ASGR-1 antigen binding protein forms an interface with ASGR-1 that overlaps with that of antibody 7E11, including those wherein any of: H161, S194, W195, E196, Q198, K199, F200, Q202, H203, F233, K234, N235, W236, R237, P238, R263, E160, E162, V192, T193, E197, V201, H204, Y229, E230, T231, G232, E239, Q240, P241, D261, G262, or W264 (SEQ ID NO:5) are within the interface. In certain embodiments, the ASGR-1 antigen binding protein forms an interface with ASGR-1 that overlaps with that of antibody 7E11, including those wherein any of are within the surface: H161, S194, W195, E196, Q198, K199, F200, Q202, H203, F233, K234, N235, W236, R237, P238, or R263 (SEQ ID NO:5) are within the interface.

[0203] In some embodiments, ASGR-1 residues that are within the interface with antibody, 4H6, as determined by distance of 8Å or less are: H161, E162, T193, S194, W195, E196, K199, Q202, T231, G232, F233, K234, N235, P238, D261, R263, R163, V192, E197, Q198, H203, P207, D228, E230, W236, R237, D260, G262, or W264 (SEQ ID NO:5). In some embodiments, ASGR-1 residues that are within the interface with antibody, 4H6, as determined by distance of 5 Å or less are: H161, E162, T193, S194, W195, E196, K199, Q202, T231, G232, F233, K234, N235, P238, D261, or R263 (SEQ ID NO:5). In certain embodiments, the ASGR-1 antigen binding protein forms an interface with ASGR-1 that overlaps with that of antibody 4H6, including those wherein any of: H161, E162, T193, 5194, W195, E196, K199, Q202, T231, G232, F233, K234, N235, P238, D261, R263, R163, V192, E197, Q198, H203, P207, D228, E230, W236, R237, D260, G262, or W264 (SEQ ID NO:5) are within the interface. In certain embodiments, the ASGR-1 antigen binding protein forms an interface with ASGR-1 that overlaps with that of antibody 4H6, including those wherein any of are within the surface: H161, E162, T193, S194, W195, E196, K199, Q202, T231, G232, F233, K234, N235, P238, D261, or R263 (SEQ ID NO:5) are within the interface.

[0204] In some embodiments, ASGR-1 residues that are within the interface with antibody, 72G9, as determined by distance of 8Å or less are: D216, Q217, N218, G219, P220, W221, Y229, E230, K234, W236, E239, Q240, P241, D242, D243, W244, Y245, G246, L249, G250, G251, G252, D254, Q270, H215, K222, T231, G232, R237, P238, H247, G248, E253, C255, D266, V268, or C269 (SEQ ID NO:5). In some embodiments, ASGR-1 residues that are within the interface with antibody, 72G9, as determined by distance of 5 Å or less are: D216, Q217, N218, G219, P220, W221, Y229, E230, K234, W236, E239, Q240, P241, D242, D243, W244, Y245, G246, L249, G250, G251, G252, D254, or Q270 (SEQ ID NO:5). In certain embodiments, the ASGR-1 antigen binding protein forms an interface with ASGR-1 that overlaps with that of antibody 72G9, including those wherein any of: D216, Q217, N218, G219, P220, W221, Y229, E230, K234, W236, E239, Q240, P241, D242, D243, W244, Y245, G246, L249, G250, G251, G252, D254, Q270, H215, K222, T231, G232, R237, P238, H247, G248, E253, C255, D266, V268, C269 (SEQ ID NO:5) are within the interface. In certain embodiments, the ASGR-1 antigen binding protein forms an interface with ASGR-1 that overlaps with that of antibody 72G9, including those wherein any of: D216, Q217, N218, G219, P220, W221, Y229, E230, K234, W236, E239, Q240, P241, D242, D243, W244, Y245, G246, L249, G250, G251, G252, D254, or Q270 (SEQ ID NO:5) are within the interface.

[0205] In some embodiments, ASGR-1 residues that are within the interface with antibody, 194A4, as determined by distance of 8Å or less are: T193, S194, W195, E196, P220, W221, G226, T227, D228, Y229, E230, T231, G232, F233, K234, N235, W236, R237, P238, E239, G252, H161, E162, V191, V192, E197, Q198, D216, G219, K222, W223, D225, R263, or W264 (SEQ ID NO:5). In some embodiments, ASGR-1 residues that are within the interface with antibody, 194A4, as determined by distance of 5 Å or less are: T193, S194, W195, E196, P220, W221, G226, T227, D228, Y229, E230, T231, G232, F233, K234, N235, W236, R237, P238, E239, or G252 (SEQ ID NO:5). In certain embodiments, the ASGR-1 antigen binding protein forms an interface with ASGR-1 that overlaps with that of antibody 194A4, including those wherein any of: T193, S194, W195, E196, P220, W221, G226, T227, D228, Y229, E230, T231, G232, F233, K234, N235, W236, R237, P238, E239, G252, H161, E162, V191, V192, E197, Q198, D216, G219, K222, W223, D225, R263, or W264 (SEQ ID NO:5) are within the interface. In certain embodiments, the ASGR-1 antigen binding protein forms an interface with ASGR-1 that overlaps with that of antibody 194A4, including those wherein any of are within the surface: T193, S194, W195, E196, P220, W221, G226, T227, D228, Y229, E230, T231, G232, F233, K234, N235, W236, R237, P238, E239, or G252 (SEQ ID NO:5) within the interface.

[0206] In some embodiments, ASGR-1 residues that are within the interface with antibody, 194C10, as determined by distance of 8Å or less are: N157, R170, S171, G172, Q202, H203, H204, I205, G206, P207, V208, N209, T210, D260, R271, P272, Y273, R274, V156, W158, V159, H161, W167, F168, S169, K173, K199, F200, V201, W211, R237, H257, F258, T259, D261, D267, V268, Q270 or W275 (SEQ ID NO:5). In some embodiments, ASGR-1 residues that are within the interface with antibody, 194C10, as determined by distance of 5 Å or less are: N157, R170, S171, G172, Q202, H203, H204, I205, G206, P207, V208, N209, T210, D260, R271, P272, Y273 or R274 (SEQ ID NO:5). In certain embodiments, the ASGR-1 antigen binding protein forms an interface with ASGR-1 that overlaps with that of antibody 194C10, including those wherein any of: N157, R170, S171, G172, Q202, H203, H204, I205, G206, P207, V208, N209, T210, D260, R271, P272, Y273, R274, V156, W158, V159, H161, W167, F168, S169, K173, K199, F200, V201, W211, R237, H257, F258, T259, D261, D267, V268, Q270, or W275 (SEQ ID NO:5) are within the interface. In certain embodiments, the ASGR-1 antigen binding protein forms an interface with ASGR-1 that overlaps with that of antibody 194C10, including those wherein any of: N157, R170, S171, G172, Q202, H203, H204, I205, G206, P207, V208, N209, T210, D260, R271, P272, Y273, or R274 (SEQ ID NO:5) are within the interface.

[0207] In some embodiments, ASGR-1 residues that are within the interface with antibody, 54E9, as determined by distance of 8Å or less are: W195, N209, N235, R237, P238, E239, Q240, D242, H257, T259, D260, D261, R263, N265, D267, R271, Y273, Q198, Q202, P207, V208, F233, W236, D243, E253, F258, G262, W264, or D266 (SEQ ID NO:5). In some embodiments, ASGR-1 residues that are within the interface with antibody, 54E9, as determined by distance of 5 Å or less are: W195, N209, N235, R237, P238, E239, Q240, D242, H257, T259, D260, D261, R263, N265, D267, R271, or Y273 (SEQ ID NO:5). In certain embodiments, the ASGR-1 antigen binding protein forms an interface with ASGR-1 that overlaps with that of antibody 54E9, including those wherein any of: W195, N209, N235, R237, P238, E239, Q240, D242, H257, T259, D260, D261, R263, N265, D267, R271, Y273, Q198, Q202, P207, V208, F233, W236, D243, E253, F258, G262, W264, or D266 (SEQ ID NO:5) are within the interface. In certain embodiments, the ASGR-1 antigen binding protein forms an interface with ASGR-1 that overlaps with that of antibody 54E9, including those wherein any of: W195, N209, N235, R237, P238, E239, Q240, D242, H257, T259, D260, D261, R263, N265, D267, R271, or Y273 (SEQ ID NO:5) are within the interface.

[0208] In some embodiments, ASGR-1 residues that are within the interface with antibody, 218G4, as determined by distance of 8Å or less are: R170, S171, G172, A174, H204, I205, G206, P207, V208, N209, H257, D260, N265, D267, Q270, R271, P272, Y273, R274, W167, F168, S169, K173, W175, D177, Y181, Q202, H203, T210, W211, R237, F258, T259, D261, D266, V268, C269, or W275 (SEQ ID NO:5). In some embodiments, ASGR-1 residues that are within the interface with antibody, 218G4, as determined by distance of 5 Å or less are: R170, S171, G172, A174, H204, I205, G206, P207, V208, N209, H257, D260, N265, D267, Q270, R271, P272, Y273, or R274 (SEQ ID NO:5). In certain embodiments, the ASGR-1 antigen binding protein forms an interface with ASGR-1 that overlaps with that of antibody 218G4, including those wherein any of: R170, S171, G172, A174, H204, I205, G206, P207, V208, N209, H257, D260, N265, D267, Q270, R271, P272, Y273, R274, W167, F168, S169, K173, W175, D177, Y181, Q202, H203, T210, W211, R237, F258, T259, D261, D266, V268, C269, or W275 (SEQ ID NO:5) are within the interface. In certain embodiments, the ASGR-1 antigen binding protein forms an interface with ASGR-1 that overlaps with that of antibody 218G4, including those wherein any of: R170, S171, G172, K173, A174, D177, P207, V208, N209, R237, Q240, W244, G246, H247, G248, L249, E253, H257, T259, D260, N265, D267, Q270, R271, P272, Y273 or R274 (SEQ ID NO:5) are within the interface.

[0209] In some embodiments, ASGR-1 residues that are within the interface with antibody, 176H4, as determined by distance of 8Å or less are: R170, S171, G172, K173, A174, D177, P207, V208, N209, R237, Q240, W244, G246, H247, G248, L249, E253, H257, T259, D260, N265, D267, Q270, R271, P272, Y273, R274, S169, W175, A176, A178, T210, W211, W236, P238, E239, D242, Y245, G250, G251, F258, D261, G262, R263, W264, D266, V268, C269, or W275 (SEQ ID NO:5). In some embodiments, ASGR-1 residues that are within the interface with antibody, 176H4, as determined by distance of 5 Å or less are: R170, S171, G172, K173, A174, D177, P207, V208, N209, R237, Q240, W244, G246, H247, G248, L249, E253, H257, T259, D260, N265, D267, Q270, R271, P272, Y273 or R274 (SEQ ID NO:5). In certain embodiments, the ASGR-1 antigen binding protein forms an interface with ASGR-1 that overlaps with that of antibody 176H4, including those wherein any of: R170, 5171, G172, K173, A174, D177, P207, V208, N209, R237, Q240, W244, G246, H247, G248, L249, E253, H257, T259, D260, N265, D267, Q270, R271, P272, Y273, R274, S169, W175, A176, A178, T210, W211, W236, P238, E239, D242, Y245, G250, G251, F258, D261, G262, R263, W264, D266, V268, C269, W275 (SEQ ID NO:5) are within the interface. In certain embodiments, the ASGR-1 antigen binding protein forms an interface with ASGR-1 that overlaps with that of antibody 176H4, including those wherein any of: R170, S171, G172, K173, A174, D177, P207, V208, N209, R237, Q240, W244, G246, H247, G248, L249, E253, H257, T259, D260, N265, D267, Q270, R271, P272, Y273, R274 (SEQ ID NO:5) are within the interface.

[0210] In some embodiments, the ASGR-1 residues that are involved in ligand binding are also in close proximity to the areas where antibodies 72G9, 54E9, 218G4 or 176H4 bind and can be useful for manipulating ASGR-1 binding to ligand. In some embodiments, the ASGR-1 antigen binding protein forms an interface with ASGR-1 that overlaps with that of antibody 72G9 and the ligand (e.g., GalNAc), including those wherein any of Q240, D242, W244, E239, P241, D243, Y245, G246, G252, R237, E253, P238, H247, C255, or V268 (SEQ ID NO:5) are within the interface. In some embodiments, the ASGR-1 antigen binding protein forms an interface with ASGR-1 that overlaps with that of antibody 72G9 and the ligand (e.g., GalNAc), including those wherein any of Q240, D242, or W244 (SEQ ID NO:5) are within the interface. In some embodiments, the ASGR-1 antigen binding protein forms an interface with ASGR-1 that overlaps with that of antibody 72G9 and the ligand (e.g., GalNAc), including those wherein any of Q240, D242, W244, E239, P241, D243, Y245, G246 or G252 (SEQ ID NO:5) are within the interface. In some embodiments, the ASGR-1 antigen binding protein forms an interface with ASGR-1 that overlaps with that of antibody 72G9 and the ligand (e.g., GalNAc), including those wherein any of Q240, D242, W244, R237 or E253 (SEQ ID NO:5) are within the interface. As noted in the examples below, the extent of inhibition resulting from 72G9 is lower than other direct blocking antibodies provided herein. While not intended to be limiting, this is understood to occur due to the nature of the relative orientations of the ASGR-1 protein and the antibody when bound to one another. For example, when the 72G9 antibody is bound to ASGR-1, there is still sufficient space for a ligand to reach the binding site, to some (although lesser) extent. In some embodiments, the ASGR-1 antigen binding protein forms an interface with ASGR-1 that overlaps with that of antibody 54E9 and the ligand (e.g., GalNAc), including those wherein any of N209, R237, Q240, D242, H257, T259, N265, D267, Y273, P238, E239, D260, R263, R271, E253, D266, D243, F258, or W264 (SEQ ID NO:5) are within the interface. In some embodiments, the ASGR-1 antigen binding protein forms an interface with ASGR-1 that overlaps with that of antibody 54E9 and the ligand (e.g., GalNAc), including those wherein any of N209, R237, Q240, D242, H257, T259, N265, D267, or Y273 (SEQ ID NO:5) are within the interface. In some embodiments, the ASGR-1 antigen binding protein forms an interface with ASGR-1 that overlaps with that of antibody 54E9 and the ligand (e.g., GalNAc), including those wherein any of N209, R237, Q240, D242, H257, T259, N265, D267, Y273, P238, E239, D260, R263, or R271 (SEQ ID NO:5) are within the interface. In some embodiments, the ASGR-1 antigen binding protein forms an interface with ASGR-1 that overlaps with that of antibody 54E9 and the ligand (e.g., GalNAc), including those wherein any of N209, R237, Q240, D242, H257, T259, N265, D267, Y273, E253 or D266 (SEQ ID NO:5) are within the interface. In some embodiments, the ASGR-1 antigen binding protein forms an interface with ASGR-1 that overlaps with that of antibody 218G4 and the ligand (e.g., GalNAc), including those wherein any of N209, H257, N265, D267, Y273, D260, R271, R237, T259, D266, F258 or V268 (SEQ ID NO:5) are within the interface. In some embodiments, the ASGR-1 antigen binding protein forms an interface with ASGR-1 that overlaps with that of antibody 218G4 and the ligand (e.g., GalNAc), including those wherein any of N209, H257, N265, D267, or Y273 (SEQ ID NO:5) are within the interface. In some embodiments, the ASGR-1 antigen binding protein forms an interface with ASGR-1 that overlaps with that of antibody 218G4 and the ligand (e.g., GalNAc), including those wherein any of N209, H257, N265, D267, Y273, D260 or R271 (SEQ ID NO:5) are within the interface. In some embodiments, the ASGR-1 antigen binding protein forms an interface with ASGR-1 that overlaps with that of antibody 218G4 and the ligand (e.g., GalNAc), including those wherein any of N209, H257, N265, D267, Y273. R237, T259 or D266 (SEQ ID NO:5) are within the interface. In some embodiments, the ASGR-1 antigen binding protein forms an interface with ASGR-1 that overlaps with that of antibody 176H4 and the ligand (e.g., GalNAc), including those wherein any of N209, R237, Q240, W244, E253, H257, T259, N265, D267, Y273, G246, H247, D260, R271, D266, P238, E239, Y245, F258, R263, W264, or V268 (SEQ ID NO:5) are within the interface. In some embodiments, the ASGR-1 antigen binding protein forms an interface with ASGR-1 that overlaps with that of antibody 176H4 and the ligand (e.g., GalNAc), including those wherein any of N209, R237, Q240, W244, E253, H257, T259, N265, D267, or Y273 (SEQ ID NO:5) are within the interface. In some embodiments, the ASGR-1 antigen binding protein forms an interface with ASGR-1 that overlaps with that of antibody 176H4 and the ligand (e.g., GalNAc), including those wherein any of N209, R237, Q240, W244, E253, H257, T259, N265, D267, Y273, G246, H247, D260, or R271 (SEQ ID NO:5) are within the interface. In some embodiments, the ASGR-1 antigen binding protein forms an interface with ASGR-1 that overlaps with that of antibody 176H4 and the ligand (e.g., GalNAc), including those wherein any of N209, R237, Q240, W244, E253, H257, T259, N265, D267, Y273, or D266 (SEQ ID NO:5) are within the interface.

[0211] As discussed above, the binding interaction between huASGR-1 and ligand (e.g., lactose, galactose, GalNAc), as well as the binding interaction between huASGR-1 and various embodiments of the antigen binding proteins (e.g., antibodies) of the present invention was evaluated using x-ray crystallography as described in Example 10. The binding interaction between huASGR-1 and various embodiments of the antigen binding proteins (e.g., antibodies) of the present invention was also evaluated using methodologies, including epitope binning as described in Example 7D, and arginine/glutamic acid mutational profiling as described in Example 7E. A summary of the data obtained through these methodologies is set forth in Table D below. This summary illustrates the various binding characteristics of representative antigen binding proteins (e.g., antibodies) of the present invention and their ability to directly and/or indirectly inhibit ligand binding to huASGR-1. In some embodiments, antibodies that interact with residues in common across different ligands can result in a similar form of inhibition (direct) across the various ligands. Examples of such residues are underlined and in bold in Table D.

TABLE D
Summary of Binding Characteristics of Representative Antigen Binding
Proteins Derived from Examples 7 and 10.

| | | Interaction Site | Interaction Site | |
|---|---|---|---|---|
| Ligand/mAb | mAb | (crystal structure | (crystal structure | |
| Name | Epitope (bin) | <5 angstroms) | 5-8 angstroms) | R/E scan |
| Ligand/ | ND | Q240, D242, W244, | N209, R237, P238, | ND |
| Lactose | | E253, N265, D266, | E239, P241, D243, | |
| | | D267 | Y245, G246, H247, | |
| | | | G252, C255, H257, | |
| | | | T259, D260, V268, | |
| | | | R271, Y273 | |
| Ligand/ | ND | R237, D240, D242, | N209, P238, E239, | ND |
| Galactose | | W244, E253, N265, | P241, D243, Y245, | |
| | | D266, D267 | G246, H247, G252, | |
| | | | C255, H257, T259, | |
| | | | V268, R271, Y273 | |
| Ligand/ | ND | N209, R237, D240, | P238, E239, P241, | ND |
| GalNAc | | D242, W244, E253, | D243, Y245, G246, | |
| | | H257, T259, N265, | H247, G252, C255, | |
| | | D266, D267, Y273 | F258, D260, R263, | |
| | | | W264, V268, R271 | |
| 5E5-Interaction | A | H161, E162, W195, | V159, E160, R163, | W195, |
| is representative | | E196, Q198, K199, | T193, S194, E197, | K199 |
| of indirect | | F200, Q202, H203, | V201, I205, G206, | |
| inhibition of | | H204, G232, F233, | P207, Y229, E230, | |
| ligand binding | | K234, P238, D261, | T231, E239, F258, | |
| | | G262, R263 | T259, D260, W264 | |
| 4A2-Interaction | A | R170, W195, E196, | N157, V159, F168, | W195 |
| is representative | | K199, Q202, H203, | S169, S171, S194, | |
| of indirect | | H204, I205, G206, | Q198, F200, V201, | |
| inhibition of | | P207, V208, F233, | T210, R237, E239, | |
| ligand binding | | K234, N235, W236, | Q240, F258, T259, | |
| | | P238, D260, D261, | W264 | |
| | | G262, R263, R274 | | |
| 7E11-Interaction | A | H161, S194, W195, | E160, E162, V192, | W195 |
| is representative | | E196, Q198, K199, | T193, E197, V201, | |
| of indirect | | F200, Q202, H203, | H204, Y229, E230, | |
| inhibition of | | F233, K234, N235, | T231, G232, E239, | |
| ligand binding | | W236, R237, P238, | Q240, P241, D261, | |
| | | R263 | G262, W264 | |
| 4H6-Interaction | A | H161, E162, T193, | R163, V192, E197, | ND |
| is representative | | S194, W195, E196, | Q198, H203, P207, | |
| of indirect | | K199, Q202, T231, | D228, E230, W236, | |
| inhibition of | | G232, F233, K234, | R237, D260, G262, | |
| ligand binding | | N235, P238, D261, | W264 | |
| | | R263 | | |
| 22G5-Interaction | B | W167, S171, G172, | P155, N157, W158, | R183, L184, |
| is representative | | K173, A174, A176, | F168, S169, R170, | H215, P220, |
| of indirect | | D177, N180, Y181, | W175, A178, D179, | G246, G248, |
| inhibition of | | R183, L184, E185, | C182, R271, Y273, | G251, N265 |
| ligand binding | | D186, Q270, P272, | R274, C277, T279 | |
| | | W275 | | |
| 194A4- | C | T193, S194, W195, | H161, E162, V191, | D260 |
| Interaction | | E196, P220, W221, | V192, E197, Q198, | |
| is representative | | G226, T227, D228, | D216, G219, K222, | |
| of indirect | | Y229, E230, T231, | W223, D225, R263, | |
| inhibition of | | G232, F233, K234, | W264 | |
| ligand binding | | N235, W236, R237, | | |
| | | P238, E239, G252 | | |
| 72G9-Interaction | C | D216, Q217, N218, | H215, K222, T231, | P241, D242, |
| is representative | | G219, P220, W221, | G232, R237, P238, | D243, Y245, |
| of direct | | Y229, E230, K234, | H247, G248, E253, | G251, E253 |
| inhibition of | | W236, E239, Q240, | C255, D266, V268, | |
| ligand binding | | P241, D242, D243, | C269 | |
| | | W244, Y245, G246, | | |
| | | L249, G250, G251, | | |
| | | G252, D254, Q270 | | |
| 54E9-Interaction | E | W195, N209, N235, | Q198, Q202, P207, | R237, E239, |
| is representative | | R237, P238, E239, | V208, F233, W236, | P241, T259, |
| of direct | | Q240, D242, H257, | D243, E253, F258, | D260, R263, |
| inhibition of | | T259, D260, D261, | G262, W264, D266 | N265 |
| ligand binding | | R263, N265, D267, | | |
| | | R271, Y273 | | |
| 218G4- | L/O | R170, D171, G172, | W167, F168, S169, | R171, G172, |
| Interaction | | AA174, H204, I205, | H173, W175, D177, | R238, R274 |
| is representative | | G206, P207, V208, | Y181, Q202, H203, | |
| of direct | | N209, H257, D260, | T210, W211, R237, | |
| inhibition of | | N265, D267, Q270, | F258, T259, D261, | |
| ligand binding | | R271, P272, Y273, | D266, V268, C269, | |
| | | R274 | W275 | |
| 176H4- | L/R | R170, S171, G172, | S169, W175, A176, | G172, P241, |
| Interaction | | K173, A174, D177, | A178, T210, W211, | D242, H247, |
| is representative | | P207, V208, N209, | W236, P238, E239, | L249, N265, |
| of direct | | R237, Q240, W244, | D242, Y245, G250, | R271, P272 |
| inhibition of | | G246, H247, G248, | G251, F258, D261, | |
| ligand binding | | L249, E253, H257, | G262, R263, W264, | |
| | | T259, D260, N265, | D266, V268, C269, | |
| | | D267, Q270, R271, | W275 | |
| | | P272, Y273, R274 | | |
| 194C10- | L/T | N157, R170, S171, | V156, W158, V159, | R170, G172, |
| Interaction | | G172, Q202, H203, | H161, W167, F168, | V208, R274 |
| is representative | | H204, I205, G206, | S169, K173, K199, | |
| of direct and/or | | P207, V208, N209, | F200, V201, W211, | |
| indirect | | T210, D260, R271, | R237, H257, F258, | |
| inhibition of | | P272, Y273, R274 | T259, D261, D267, | |
| ligand binding | | | V268, Q270, W275 | |

[0212] In some embodiments, the antibody can directly inhibit ASGR-1 CBD/Ligand binding. While described herein in greater detail, and while not intended to be limiting by theory, such an interaction can denote that the antibody interacts with the section of ASGR-1 CBD that binds to its ligand directly, such that a paratope or other section of an antigen binding protein (e.g., antibody) directly obstructs the ligand's access to the binding site in ASGR1 CBD. An antigen binding protein or antibody can be designated as a direct inhibitor when it has one or more of the characteristics of the direct inhibitors provided herein, including the examples below (such as example 10, or the crystal structures referenced therein). Some examples of direct inhibition are shown by 72G9, 54E9, 218G4 and 176H4 and are indicated in Table D. In some embodiments, a direct inhibitor can bind to one or more of residues 237-273 or residues 240-267 of SEQ ID NO:5 of ASGR-1.

[0213] In some embodiments, the antigen binding protein or antibody can indirectly inhibit ASGR-1 CBD/Ligand binding. While described herein in greater detail, and while not intended to be limiting by theory, this denotes that the antigen binding protein or antibody binds to ASGR-1 CBD, but need not directly obstruct the ligand's access to the binding site in ASGR-1 CBD. An antigen binding protein or antibody can be designated as an indirect inhibitor when it has one or more of the characteristics of the indirect inhibitors provided herein, including the examples below (such as example 10 or the crystal structures provided therein). Some examples of indirect inhibition are shown by 5E5, 4A2, 7E11, 4H6, 22G5, 194A4, and are indicated in Table D. While not limiting, it is noted that indirect inhibition can occur from a variety of interactions or rearrangements. For example, indirect inhibition may occur from a conformational rearrangement of the carbohydrate binding loop occurs which could impair the carbohydrate binding loop from binding to/interacting with ligand (i.e., carbohydrates). In some embodiments, an indirect inhibitor can bind to one or more of the residues in ASGR-1 CBD helix alpha 1 and/or helix alpha 2. In some embodiments, the antibody binds to ASGR-1 and results in the disordering of the CBD.

[0214] In some embodiments, an antigen binding protein or antibody can have characteristics of both direct and indirect inhibition and/or bind to areas on ASGR-1 CBD that are common to both types of inhibition. Of course, such an embodiment may have sufficient inhibition capability through its direct, indirect, or both direct and indirect interactions.

[0215] In some embodiments, the distinction between direct and indirect inhibition need not be made. In some embodiments, denoting that an antigen binding protein or antibody provides direct or indirect inhibition means that it provides at least that form of inhibition (e.g., ASGR-1 CBD/Ligand blocking). In some embodiments, an antigen binding protein or antibody that provides direct inhibition, may also provide indirect aspects as well (such as other conformational changes). In addition, as shown in Table D, as the interation between ASGR-1 CBD and its ligands can vary for each of the noted three ligands, what may be a direct or indirect interaction for one ligand, need not be direct or indirect for another. While the antibodies provided herein that have the properties of direct and/or indirect inhibition will function accordingly, and the guidance provided herein allows for one to screen for and produce additional such antibodies, the fact that an antibody simply binds to ASGR-1 CBD does not necessarily mean that it will bind at the relevant locations on ASGR-1 to allow for direct or indirect inhibition.

[0216] In some embodiments, an isolated antigen binding protein that binds to human ASGR and inhibits ASGR function is provided. In one embodiment, the invention comprises an isolated antigen binding protein that binds to human ASGR and inhibits ASGR binding to ligand. In another embodiment, the invention comprises an isolated antigen binding protein that binds to human ASGR-1 and inhibits ASGR-1 binding to ligand and/or ASGR-1 interaction with ASGR-2. In another embodiment, the invention comprises an isolated antigen binding protein that binds to human ASGR-2 and inhibits ASGR-2 binding to ligand and/or ASGR-2 interaction with ASGR-1. In yet another embodiment, the invention comprises an isolated antigen binding protein that binds to human ASGR-1 and human ASGR-2, and inhibits ASGR-1 and/or ASGR-2 binding to ligand. In some embodiments, the isolated binding protein binds specifically to human ASGR, ASGR-1 and/or ASGR-2.

[0217] In some embodiments, an isolated antigen binding protein is provided, wherein the isolated antigen binding protein binds to human ASGR-1 and comprises one or more VH CDR1, VH CDR2 or VH CDR3 having an amino acid sequence identical to or comprising 1, 2, or 3 amino acid residue substitutions, deletions or insertions in each CDR relative to the VH of any of the sequences set forth in Tables 3-7. In some embodiments, the invention comprises an isolated antigen binding protein, wherein the isolated antigen binding protein binds to human ASGR-1 and comprises one or more VL CDR1, VL CDR2 or VL CDR3 having an amino acid sequence identical to or comprising 1, 2, or 3 amino acid residue substitutions, deletions or insertions in each CDR relative to the VL of any of the sequences set forth in Tables 3-7. In some embodiments, the isolated antigen binding protein comprises one or more VH CDR1, VH CDR2 or VH CDR3 having an amino acid sequence identical to or comprising 1, 2, or 3 amino acid residue substitutions, deletions or insertions in each CDR relative to the VH of any of the sequences set forth in Tables 3-7, and one or more VL CDR1, VL CDR2 or VL CDR3 having an amino acid sequence identical to or comprising 1, 2, or 3 amino acid residue substitutions, deletions or insertions in each CDR relative to the VL of any of the sequences set forth in Tables 3-7. In some embodiments, the isolated antigen binding protein comprises one VH CDR1, VH CDR2 or VH CDR3 having an amino acid sequence identical to or comprising 1, 2, or 3 amino acid residue substitutions, deletions or insertions in each CDR relative to the VH of any of the sequences set forth in Tables 3-7, and one VL CDR1, VL CDR2 or VL CDR3 having an amino acid sequence identical to or comprising 1, 2, or 3 amino acid residue substitutions, deletions or insertions in each CDR relative to the VL of any of the sequences set forth in Tables 3-7. In some embodiments, the isolated antigen binding protein comprises two VH CDR1, VH CDR2 or VH CDR3 having an amino acid sequence identical to or comprising 1, 2, or 3 amino acid residue substitutions, deletions or insertions in each CDR relative to the VH of any of the sequences set forth in Tables 3-7, and two VL CDR1, VL CDR2 or VL CDR3 having an amino acid sequence identical to or comprising 1, 2, or 3 amino acid residue substitutions, deletions or insertions in each CDR relative to the VL of any of the sequences set forth in Tables 3-7. In some embodiments, the isolated antigen binding protein comprises the VH CDR1, VH CDR2 and VH CDR3 having an amino acid sequence identical to or comprising 1, 2, or 3 amino acid residue substitutions, deletions or insertions in each CDR relative to the VH of any of the sequences set forth in Tables 3-7, and the VL CDR1, VL CDR2 and VL CDR3 having an amino acid sequence identical to or comprising 1, 2, or 3 amino acid residue substitutions, deletions or insertions in each CDR relative to the VL of any of the sequences set forth in Tables 3-7. In some embodiments, the isolated antigen binding protein comprises the VH CDR1, VH CDR2, VH CDR3, VL CDR1, VL CDR2, and VL CDR3 having an amino acid sequence identical to any of the sequences set forth in Tables 3-7. In some embodiments, the isolated antigen binding protein comprises the VH CDR1, VH CDR2 or VH CDR3 having an amino acid sequence identical to or comprising 1, 2, or 3 amino acid residue substitutions, deletions or insertions in each CDR relative to the VH of any of the sequences set forth in TABLE A. In some embodiments, the isolated antigen binding protein comprises the VL CDR1, VL CDR2 or VL CDR3 having an amino acid sequence identical to or comprising 1, 2, or 3 amino acid residue substitutions, deletions or insertions in each CDR relative to the VL of any of the sequences set forth in TABLE A. In some embodiments, the isolated antigen binding protein comprises the VH CDR1, VH CDR2, and VH CDR3 having an amino acid sequence identical to or comprising 1, 2, or 3 amino acid residue substitutions, deletions or insertions in each CDR relative to the VH of any of the sequences set forth in TABLE A, and the VL CDR1, VL CDR2 and VL CDR3, having an amino acid sequence identical to or comprising 1, 2, or 3 amino acid residue substitutions, deletions or insertions in each CDR relative to the VL of any of the sequences set forth in TABLE A. In some embodiments, the isolated antigen binding protein comprises the VH CDR1, VH CDR2, VH CDR3, VL CDR1, VL CDR2, and VL CDR3 having an amino acid sequence identical to any of the sequences set forth in TABLE A. In some embodiments, the isolated antigen binding protein comprises the VH CDR1, VH CDR2 or VH CDR3 having an amino acid sequence identical to or comprising 1, 2, or 3 amino acid residue substitutions, deletions or insertions in each CDR relative to the VH of any of the sequences set forth in TABLE B. In some embodiments, the isolated antigen binding protein comprises the VL CDR1, VL CDR2 or VL CDR3 having an amino acid sequence identical to or comprising 1, 2, or 3 amino acid residue substitutions, deletions or insertions in each CDR relative to the VL of any of the sequences set forth in TABLE B. In some embodiments, the isolated antigen binding protein comprises the VH CDR1, VH CDR2, and VH CDR3 having an amino acid sequence identical to or comprising 1, 2, or 3 amino acid residue substitutions, deletions or insertions in each CDR relative to the VH of any of the sequences set forth in TABLE B, and the VL CDR1, VL CDR2 and VL CDR3 having an amino acid sequence identical to or comprising 1, 2, or 3 amino acid residue substitutions, deletions or insertions in each CDR relative to the VL of any of the sequences set forth in TABLE B. In some embodiments, the isolated antigen binding protein comprises the VH CDR1, VH CDR2, VH CDR3, VL CDR1, VL CDR2, and VL CDR3 having an amino acid sequence identical to any of the sequences set forth in TABLE B. In still some embodiments, the isolated antigen binding protein comprises the VH CDR1, VH CDR2 or VH CDR3 having an amino acid sequence identical to or comprising 1, 2, or 3 amino acid residue substitutions, deletions or insertions in each CDR relative to the VH of any of the sequences set forth in TABLE C. In some embodiments, the isolated antigen binding protein comprises the VL CDR1, VL CDR2 or VL CDR3 having an amino acid sequence identical to or comprising 1, 2, or 3 amino acid residue substitutions, deletions or insertions in each CDR relative to the VL of any of the sequences set forth in TABLE C. In some embodiments, the isolated antigen binding protein comprises the VH CDR1, VH CDR2, and VH CDR3 having an amino acid sequence identical to or comprising 1, 2, or 3 amino acid residue substitutions, deletions or insertions in each CDR relative to the VH of any of the sequences set forth in TABLE C, and the VL CDR1, VL CDR2 and VL CDR3, having an amino acid sequence identical to or comprising 1, 2, or 3 amino acid residue substitutions, deletions or insertions in each CDR relative to the VL of any of the sequences set forth in TABLE C. In some embodiments, the isolated antigen binding protein comprises the VH CDR1, VH CDR2, VH CDR3, VL CDR1, VL CDR2, and VL CDR3 having an amino acid sequence identical to any of the sequences set forth in TABLE C. In further embodiments, the isolated antigen binding protein comprises the VH CDR1, VH CDR2 or VH CDR3 having an amino acid sequence identical to or comprising 1, 2, or 3 amino acid residue substitutions, deletions or insertions in each CDR relative to the VH of any of the sequences set forth in Table 6. In some embodiments, the isolated antigen binding protein comprises the VL CDR1, VL CDR2 or VL CDR3 having an amino acid sequence identical to or comprising 1, 2, or 3 amino acid residue substitutions, deletions or insertions in each CDR relative to the VL of any of the sequences set forth in Table 6. In some embodiments, the isolated antigen binding protein comprises the VH CDR1, VH CDR2, and VH CDR3 having an amino acid sequence identical to or comprising 1, 2, or 3 amino acid residue substitutions, deletions or insertions in each CDR relative to the VH of any of the sequences set forth in Table 6, and the VL CDR1, VL CDR2 and VL CDR3, having an amino acid sequence identical to or comprising 1, 2, or 3 amino acid residue substitutions, deletions or insertions in each CDR relative to the VL of any of the sequences set forth in Table 6. In some embodiments, the isolated antigen binding protein comprises the VH CDR1, VH CDR2, VH CDR3, VL CDR1, VL CDR2, and VL CDR3 having an amino acid sequence identical to any of the sequences set forth in Table 6.

[0218] In some embodiments, an isolated antigen binding protein is provided, wherein the antigen binding protein specifically binds human ASGR-1 and comprises a heavy chain variable domain having at least 90% identity to any of the VH domain amino acid sequences set forth in Tables 3-7. In some aspects, the invention provides an isolated antigen binding protein, wherein the antigen binding protein specifically binds human ASGR-1 and comprises a light chain variable domain having at least 90% identity to any of the VL domain amino acid sequences set forth in Tables 3-7. In some embodiments, the invention provides an isolated antigen binding protein, wherein the antigen binding protein specifically binds human ASGR-1 and comprises a heavy chain variable domain having at least 90% identity to any of the VH domain amino acid sequences set forth in Tables 3-7, and a light chain variable domain having at least 90% identity to any of the VL domain amino acid sequences set forth in Tables 3-7. In some embodiments, the invention provides an isolated antigen binding protein, wherein the antigen binding protein specifically binds human ASGR-1 and comprises a heavy chain variable domain having any of the VH domain amino acid sequences set forth in Tables 3-7, and a light chain variable domain having any of the VL domain amino acid sequences set forth in Tables 3-7. In some embodiments, the invention provides an isolated antigen binding protein, wherein the antigen binding protein specifically binds human ASGR-1 and comprises a heavy chain variable domain having at least 90% identity to any of the VH domain amino acid sequences set forth in Table A. In some embodiments, the invention provides an isolated antigen binding protein, wherein the antigen binding protein specifically binds human ASGR-1 and comprises a light chain variable domain having at least 90% identity to any of the VL domain amino acid sequences set forth in Table A. In some embodiments, the invention provides an isolated antigen binding protein, wherein the antigen binding protein specifically binds human ASGR-1 and comprises a heavy chain variable domain having at least 90% identity to any of the VH domain amino acid sequences set forth in Table A, and a light chain variable domain having at least 90% identity to any of the VL domain amino acid sequences set forth in Table A. In some embodiments, the invention provides an isolated antigen binding protein, wherein the antigen binding protein specifically binds human ASGR-1 and comprises a heavy chain variable domain having any of the VH domain amino acid sequences set forth in Table A, and a light chain variable domain having any of the VL domain amino acid sequences set forth in Table A. In some embodiments, the invention provides an isolated antigen binding protein, wherein the antigen binding protein specifically binds human ASGR-1 and comprises a heavy chain variable domain having at least 90% identity to any of the VH domain amino acid sequences set forth in Table B. In some embodiments, the invention provides an isolated antigen binding protein, wherein the antigen binding protein specifically binds human ASGR-1 and comprises a light chain variable domain having at least 90% identity to any of the VL domain amino acid sequences set forth in Table B. In some embodiments, the invention provides an isolated antigen binding protein, wherein the antigen binding protein specifically binds human ASGR-1 and comprises a heavy chain variable domain having at least 90% identity to any of the VH domain amino acid sequences set forth in Table B, and a light chain variable domain having at least 90% identity to any of the VL domain amino acid sequences set forth in Table B. In some embodiments, the invention provides an isolated antigen binding protein, wherein the antigen binding protein specifically binds human ASGR-1 and comprises a heavy chain variable domain having any of the VH domain amino acid sequences set forth in Table B, and a light chain variable domain having any of the VL domain amino acid sequences set forth in Table B. In some embodiments, the invention provides an isolated antigen binding protein, wherein the antigen binding protein specifically binds human ASGR-1 and comprises a heavy chain variable domain having at least 90% identity to any of the VH domain amino acid sequences set forth in Table C. In some embodiments, the invention provides an isolated antigen binding protein, wherein the antigen binding protein specifically binds human ASGR-1 and comprises a light chain variable domain having at least 90% identity to any of the VL domain amino acid sequences set forth in Table C. In some embodiments, the invention provides an isolated antigen binding protein, wherein the antigen binding protein specifically binds human ASGR-1 and comprises a heavy chain variable domain having at least 90% identity to any of the VH domain amino acid sequences set forth in Table C, and a light chain variable domain having at least 90% identity to any of the VL domain amino acid sequences set forth in Table C. In some embodiments, the invention provides an isolated antigen binding protein, wherein the antigen binding protein specifically binds human ASGR-1 and comprises a heavy chain variable domain having any of the VH domain amino acid sequences set forth in Table C, and a light chain variable domain having any of the VL domain amino acid sequences set forth in Table C. In some embodiments, the invention provides an isolated antigen binding protein, wherein the antigen binding protein specifically binds human ASGR-1 and comprises a heavy chain variable domain having at least 90% identity to any of the VH domain amino acid sequences set forth in Table 6. In some embodiments, the invention provides an isolated antigen binding protein, wherein the antigen binding protein specifically binds human ASGR-1 and comprises a light chain variable domain having at least 90% identity to any of the VL domain amino acid sequences set forth in Table 6. In some embodiments, the invention provides an isolated antigen binding protein, wherein the antigen binding protein specifically binds human ASGR-1 and comprises a heavy chain variable domain having at least 90% identity to any of the VH domain amino acid sequences set forth in Table 6, and a light chain variable domain having at least 90% identity to any of the VL domain amino acid sequences set forth in Table 6. In some embodiments, the invention provides an isolated antigen binding protein, wherein the antigen binding protein specifically binds human ASGR-1 and comprises a heavy chain variable domain having any of the VH domain amino acid sequences set forth in Table 6, and a light chain variable domain having any of the VL domain amino acid sequences set forth in Table 6.

[0219] In some embodiments, an isolated antigen binding protein is provided, wherein the antigen binding protein binds human ASGR-1 and comprises one or more VH CDR1, VH CDR2 or VH CDR3 having an amino acid sequence identical to or comprising no more than 18 amino acid residue substitutions, insertions or deletions in each CDR relative to the VH of any of the sequences set forth in Table 19A as depicted in FIG. 55. In some embodiments, the invention provides an isolated antigen binding protein, wherein the antigen binding protein binds human ASGR-1 and comprises one or more VH CDR1, VH CDR2 or VH CDR3 having an amino acid sequence identical to or comprising a conservative subsitutuion of any of the amino acid sequences set forth in Table 19B or 19C, as depicted in FIG. 55. In some aspects, the invention comprises an isolated antigen binding protein, wherein the isolated antigen binding protein binds to human ASGR-1 and comprises one or more VL CDR1, VL CDR2 or VL CDR3 having an amino acid sequence identical to or comprising no more than 14 amino acid residue substitutions, insertions or deletions in each CDR relative to the VL of any of the sequences set forth in Table 20A as depicted in FIG. 55. In some embodiments, the invention provides an isolated antigen binding protein, wherein the antigen binding protein binds human ASGR-1 and comprises one or more VL CDR1, VL CDR2 or VL CDR3 having an amino acid sequence identical to or comprising a conservative subsitutuion of any of the amino acid sequences set forth in Table 20B or 20C, as depicted in FIG. 55. In some embodiments, the isolated antigen binding protein comprises one or more VH CDR1, VH CDR2 or VH CDR3 having an amino acid sequence identical to or comprising no more than 18 amino acid residue substitutions, insertions or deletions in each CDR relative to the VH of any of the sequences set forth in Table 19A, as depicted in FIG. 55, and one or more VL CDR1, VL CDR2 or VL CDR3 having an amino acid sequence identical to or comprising no more than 14 amino acid residue substitutions, insertions or deletions in each CDR relative to the VL of any of the sequences set forth in Table 20A as depicted in FIG. 55. In some embodiments, the invention provides an isolated antigen binding protein, wherein the antigen binding protein binds human ASGR-1 and comprises one or more VH CDR1, VH CDR2 or VH CDR3 having an amino acid sequence identical to or comprising a conservative subsitutuion of any of the amino acid sequences set forth in Table 19B or 19C, as depicted in FIG. 55, and one or more VL CDR1, VL CDR2 or VL CDR3 having an amino acid sequence identical to or comprising a conservative subsitutuion of any of the amino acid sequences set forth in Table 20B or 20C, as depicted in FIG. 55. In some embodiments, the isolated antigen binding protein comprises one VH CDR1, VH CDR2 or VH CDR3 having an amino acid sequence identical no more than 18 amino acid residue substitutions, insertions or deletions in each CDR relative to the VH of any of the sequences set forth in Table 19A, as depicted in FIG. 55, and one VL CDR1, VL CDR2 or VL CDR3 having an amino acid sequence identical to or comprising no more than 14 amino acid residue substitutions, insertions or deletions in each CDR relative to the VL of any of the sequences set forth in Table 20A, as depicted in FIG. 55. In some embodiments, the invention provides an isolated antigen binding protein, wherein the antigen binding protein binds human ASGR-1 and comprises one VH CDR1, VH CDR2 or VH CDR3 having an amino acid sequence identical to or comprising a conservative subsitutuion of any of the amino acid sequences set forth in Table 19B or 19C, as depicted in FIG. 55, and one VL CDR1, VL CDR2 or VL CDR3 having an amino acid sequence identical to or comprising a conservative subsitutuion of any of the amino acid sequences set forth in Table 20B or 20C, as depicted in FIG. 55. In some embodiments, the isolated antigen binding protein comprises two VH CDR1, VH CDR2 or VH CDR3 having an amino acid sequence identical to or comprising up to 18 amino acid residue substitutions, insertions or deletions in each CDR relative to the VH of any of the sequences set forth in Table 19A, as depicted in FIG. 55, and two VL CDR1, VL CDR2 or VL CDR3 having an amino acid sequence identical to or comprising up to 14 amino acid residue substitutions, insertions or deletions in each CDR relative to the VL of any of the sequences set forth in Table 20A, as depicted in FIG. 55. In some embodiments, the invention provides an isolated antigen binding protein, wherein the antigen binding protein binds human ASGR-1 and comprises two VH CDR1, VH CDR2 or VH CDR3 having an amino acid sequence identical to or comprising a conservative subsitutuion of any of the amino acid sequences set forth in Table 19B or 19C, as depicted in FIG. 55, and two VL CDR1, VL CDR2 or VL CDR3 having an amino acid sequence identical to or comprising a conservative subsitutuion of any of the amino acid sequences set forth in Table 20B or 20C, as depicted in FIG. 55. In some embodiments, the isolated antigen binding protein comprises the VH CDR1, VH CDR2 and VH CDR3 having an amino acid sequence identical to or comprising up to 18 amino acid residue substitutions, insertions or deletions in each CDR relative to the VH of any of the sequences set forth in Table 19A, as depicted in FIG. 55, and the VL CDR1, VL CDR2 and VL CDR3 having an amino acid sequence identical to or comprising up to 14 amino acid residue substitutions, insertions or deletions in each CDR relative to the VL of any of the sequences set forth in Table 20A, as depicted in FIG. 55. In some embodiments, the invention provides an isolated antigen binding protein, wherein the antigen binding protein binds human ASGR-1 and comprises the VH CDR1, VH CDR2 or VH CDR3 having an amino acid sequence identical to or comprising a conservative subsitutuion of any of the amino acid sequences set forth in Table 19B or 19C, as depicted in FIG. 55, and the VL CDR1, VL CDR2 or VL CDR3 having an amino acid sequence identical to or comprising a conservative subsitutuion of any of the amino acid sequences set forth in Table 20B or 20C, as depicted in FIG. 55.

[0220] In some embodiments, an isolated antigen binding protein is provided, wherein the antigen binding protein specifically binds human ASGR-1 and comprises a heavy chain variable domain having at least 90% identity to any of the VH domain amino acid sequences set forth in Tables 19A, as depicted in FIG. 55 or in Tables 21-34 as depicted in FIG. 56 or in Tables 49-95 as depicted in FIG. 56. In some aspects, the invention provides an isolated antigen binding protein, wherein the antigen binding protein specifically binds human ASGR-1 and comprises a light chain variable domain having at least 90% identity to any of the VL domain amino acid sequences set forth in Table 20A, as depicted in FIG. 55, or in Tables 35-48, as depicted in FIG. 56 or in Tables 96-134 as depicted in FIG. 57. In some embodiments, the antigen binding protein comprises a heavy chain variable domain having at least 90% identity to any of the VH domain amino acid sequences set forth in Tables 19A as depicted in FIG. 55, or in Tables 21-34 as depicted in FIG. 56 or in Tables 49-95 as depicted in FIG. 57, and a light chain variable domain having at least 90% identity to any of the VL domain amino acid sequences set forth in Table 20A as depicted in FIG. 55 or in Tables 35-48 as depicted in FIG. 56 or in Tables 96-134 as depicted in FIG. 57. In some embodiments, the antigen binding protein comprises a heavy chain variable domain having any of the VH domain amino acid sequences set forth in Tables 19A as depicted in FIG. 55, or in Tables 21-34 as depicted in FIG. 56 or in Tables 49-95 as depicted in FIG. 57, and a light chain variable domain having any of the VL domain amino acid sequences set forth in Table 20A as depicted in FIG. 55 or in Tables 35-48 as depicted in FIG. 56 or in Tables 96-134 as depicted in FIG. 57.

[0221] In some embodiments, an antigen binding protein that specifically binds to human ASGR-1 at an epitope that is bound by any of the antigen binding proteins disclosed herein is provided. In some embodiments, the invention provides an isolated antigen binding protein that specifically binds to human ASGR-1 at an epitope that is bound by at least one of the antigen binding proteins set forth in Tables 2-7. In some embodiments, the invention provides an isolated antigen binding protein that specifically binds to human ASGR-1 at an epitope that is bound by at least one of the antigen binding proteins set forth in Table A. In some embodiments, the invention provides an isolated antigen binding protein that specifically binds to human ASGR-1 at an epitope that is bound by at least one of the antigen binding proteins set forth in Table B. In some embodiments, the invention provides an isolated antigen binding protein that specifically binds to human ASGR-1 at an epitope that is bound by at least one of the antigen binding proteins set forth in Table C. In some embodiments, the invention provides an isolated antigen binding protein that specifically binds to human ASGR-1 at an epitope that is bound by at least one of the antigen binding proteins set forth in Table 6.

[0222] In some embodiments, the invention provides an isolated antigen binding protein that competes for binding to human ASGR-1 with any of the antigen binding proteins disclosed herein. In some embodiments, the invention provides an isolated antigen binding protein that competes for binding with any of the antigen binding proteins set forth in Tables 2-7. In some embodiments, the invention provides an isolated antigen binding protein that competes for binding with any of the antigen binding proteins set forth in Table A. In some embodiments, the invention provides an isolated antigen binding protein that competes for binding with any of the antigen binding proteins set forth in Table B. In still some embodiments, the invention provides an isolated antigen binding protein that competes for binding with any of the antigen binding proteins set forth in Table C. In yet another embodiment, the invention provides an isolated antigen binding protein that competes for binding with any of the antigen binding proteins set forth in Table 6.

[0223] In some embodiments, an isolated antigen binding protein that binds to human ASGR-1 within the carbohydrate recognition domain (“CRD”) (also known as the carbohydrate binding domain or “CBD”) and inhibits human ASGR-1 binding to ligand is provided. In some embodiments, the antigen binding protein binds to human ASGR-1 within residues 148-291, or 149-291, or 150-291, or 151-291, or 152-291, or 153-291, or 154-291, or 155-291 of SEQ ID NO:5. In some embodiments, the invention comprises an isolated antigen binding protein that binds to human ASGR-1 CBD within Helix α-1. In some embodiments, the invention comprises an isolated antigen binding protein that binds to human ASGR-1 within residues 174-186 of SEQ ID NO:5. In some embodiments, the invention comprises an isolated antigen binding protein that binds to human ASGR-1 CBD within Helix α-2. In some embodiments, the invention comprises an isolated antigen binding protein that binds to human ASGR-1 CBD within residues 194-206 of SEQ ID NO:5. In some embodiments, the invention comprises an isolated antigen binding protein that binds to human ASGR-1 within residues 237-273 or residues 240-267 of SEQ ID NO:5. In some embodiments, the antigen binding protein binds to ASGR-1 having an amino acid sequence that is at least 90% identical to SEQ ID NO:5. In some embodiments, the antigen binding protein is an antibody.

[0224] In some embodiments, an isolated antigen binding protein or an antibody that binds to human ASGR-1 and inhibits human ASGR-1 function is provided. In some embodiments, the isolated antigen binding protein or an antibody binds to human ASGR-1 and inhibits human ASGR-1 from binding to a ligand. In some embodiments, the antigen binding protein or antibody or a paratope in an antibody binds to human ASGR-1 at an epitope comprising at least one of the following amino acid residues: Q240, D242, W244, E253, N265, D266, D267, N209, R237, P238, E239, P241, D243, Y245, G246, H247, G252, C255, H257, T259, D260, V268, R271, Y273, R237, Q240, D242, W244, E253, N265, D266, D267, N209, P238, E239, P241, D243, Y245, G246, H247, G252, C255, H257, T259, V268, R271, Y273, N209, R237, Q240, D242, W244, E253, H257, T259, N265, D266, D267, Y273, P238, E239, P241, D243, Y245, G246, H247, G252, C255, F258, D260, R263, W264, V268, R271, D216, Q217, N218, G219, P220, W221, Y229, E230, K234, W236, E239, Q240, P241, D242, D243, W244, Y245, G246, L249, G250, G251, G252, D254, Q270, H215, K222, T231, G232, R237, P238, H247, G248, E253, C255, D266, V268, C269, W195, N209, N235, R237, P238, E239, Q240, D242, H257, T259, D260, D261, R263, N265, D267, R271, Y273, Q198, Q202, P207, V208, F233, W236, D243, E253, F258, G262, W264, D266, H161, E162, W195, E196, Q198, K199, F200, Q202, H203, H204, G232, F233, K234, N235, W236, R237, P238, D261, G262, R263, V159, E160, R163, T193, 5194, E197, V201, I205, G206, P207, Y229, E230, T231, E239, F258, T259, D260, W264, W167, 5171, G172, K173, A174, A176, D177, N180, Y181, R183, L184, E185, D186, Q270, P272, W275, P155, N157, W158, F168, 5169, R170, W175, A178, D179, C182, A187, W211, C269, R271, Y273, R274, C277, T279, R170, W195, E196, K199, Q202, H203, H204, I205, G206, P207, V208, F233, K234, N235, W236, P238, D260, D261, G262, R263, R274, N157, V159, F168, 5169, 5171, 5194, Q198, F200, V201, T210, R237, E239, Q240, F258, T259, W264, H161, 5194, W195, E196, Q198, K199, F200, Q202, H203, F233, K234, N235, W236, R237, P238, R263, E160, E162, V192, T193, E197, V201, H204, Y229, E230, T231, G232, E239, Q240, P241, D261, G262, W264, H161, E162, T193, 5194, W195, E196, K199, Q202, T231, G232, F233, K234, N235, P238, D261, R263, R163, V192, E197, Q198, H203, P207, D228, E230, W236, R237, D260, G262, or W264, T193, 5194, W195, E196, P220, W221, G226, T227, D228, Y229, E230, T231, G232, F233, K234, N235, W236, R237, P238, E239, G252, H161, E162, V191, V192, E197, Q198, D216, G219, K222, W223, D225, R263, W264, R170, S171, G172, A174, H204, I205, G206, P207, V208, N209, H257, D260, N265, D267, Q270, R271, P272, Y273, R274, W167, F168, S169, K173, W175, D177, Y181, Q202, H203, T210, W211, R237, F258, T259, D261, D266, V268, C269, W275, R170, S171, G172, K173, A174, D177, P207, V208, N209, R237, Q240, W244, G246, H247, G248, L249, E253, H257, T259, D260, N265, D267, Q270, R271, P272, Y273, R274, S169, W175, A176, A178, T210, W211, W236, P238, E239, D242, Y245, G250, G251, F258, D261, G262, R263, W264, D266, V268, C269, W275, N157, R170, S171, G172, Q202, H203, H204, I205, G206, P207, V208, N209, T210, D260, R271, P272, Y273, R274, V156, W158, V159, H161, W167, F168, S169, K173, K199, F200, V201, W211, R237, H257, F258, T259, D261, D267, V268, Q270, or W275 (SEQ ID NO:5). In some embodiments, the antigen binding protein or antibody or paratope in an antibody binds to human ASGR-1 at an epitope comprising at least one of the following residues: Q240, D242, W244, E253, N265, D266, D267, R237, Q240, D242, W244, E253, N265, D266, D267, N209, R237, Q240, D242, W244, E253, H257, T259, N265, D266, D267, Y273, D216, Q217, N218, G219, P220, W221, Y229, E230, K234, W236, E239, Q240, P241, D242, D243, W244, Y245, G246, L249, G250, G251, G252, D254, Q270, W195, N209, N235, R237, P238, E239, Q240, D242, H257, T259, D260, D261, R263, N265, D267, R271, Y273, H161, E162, W195, E196, Q198, K199, F200, Q202, H203, H204, G232, F233, K234, N235, W236, R237, P238, D261, G262, R263, W167, S171, G172, K173, A174, A176, D177, N180, Y181, R183, L184, E185, D186, Q270, P272, W275, R170, W195, E196, K199, Q202, H203, H204, I205, G206, P207, V208, F233, K234, N235, W236, P238, D260, D261, G262, R263, R274, H161, S194, W195, E196, Q198, K199, F200, Q202, H203, F233, K234, N235, W236, R237, P238, R263, H161, E162, T193, S194, W195, E196, K199, Q202, T231, G232, F233, K234, N235, P238, D261, R263, T193, S194, W195, E196, P220, W221, G226, T227, D228, Y229, E230, T231, G232, F233, K234, N235, W236, R237, P238, E239, G252, R170, S171, G172, A174, H204, I205, G206, P207, V208, N209, H257, D260, N265, D267, Q270, R271, P272, Y273, R274, R170, S171, G172, K173, A174, D177, P207, V208, N209, R237, Q240, W244, G246, H247, G248, L249, E253, H257, T259, D260, N265, D267, Q270, R271, P272, Y273, R274, N157, R170, S171, G172, Q202, H203, H204, I205, G206, P207, V208, N209, T210, D260, R271, P272, Y273, R274 (SEQ ID NO:5). In some embodiments, the antigen binding protein or antibody or paratope in an antibody binds to human ASGR-1 at an epitope comprising at least one of the following residues: Q240, D242, W244, E253, N265, D266, D267, N209, R237, P238, E239, P241, D243, Y245, G246, H247, G252, C255, H257, T259, D260, V268, R271, Y273, R237, Q240, D242, W244, E253, N265, D266, D267, N209, P238, E239, P241, D243, Y245, G246, H247, G252, C255, H257, T259, V268, R271, Y273, N209, R237, Q240, D242, W244, E253, H257, T259, N265, D266, D267, Y273, P238, E239, P241, D243, Y245, G246, H247, G252, C255, F258, D260, R263, W264, V268, R271, D216, Q217, N218, G219, P220, W221, Y229, E230, K234, W236, E239, Q240, P241, D242, D243, W244, Y245, G246, L249, G250, G251, G252, D254, Q270, H215, K222, T231, G232, R237, P238, H247, G248, E253, C255, D266, V268, C269, W195, N209, N235, R237, P238, E239, Q240, D242, H257, T259, D260, D261, R263, N265, D267, R271, Y273, Q198, Q202, P207, V208, F233, W236, D243, E253, F258, G262, W264, D266, R170, S171, G172, A174, H204, I205, G206, P207, V208, N209, H257, D260, N265, D267, Q270, R271, P272, Y273, R274, W167, F168, S169, K173, W175, D177, Y181, Q202, H203, T210, W211, R237, F258, T259, D261, D266, V268, C269, W275, R170, S171, G172, K173, A174, D177, P207, V208, N209, R237, Q240, W244, G246, H247, G248, L249, E253, H257, T259, D260, N265, D267, Q270, R271, P272, Y273, R274, S169, W175, A176, A178, T210, W211, W236, P238, E239, D242, Y245, G250, G251, F258, D261, G262, R263, W264, D266, V268, C269, or W275 (SEQ ID NO:5). In some embodiments, the antigen binding protein or antibody or paratope in an antibody binds to human ASGR-1 at an epitope comprising at least one of the following residues: Q240, D242, W244, E253, N265, D266, D267, R237, Q240, D242, W244, E253, N265, D266, D267, N209, R237, Q240, D242, W244, E253, H257, T259, N265, D266, D267, Y273, D216, Q217, N218, G219, P220, W221, Y229, E230, K234, W236, E239, Q240, P241, D242, D243, W244, Y245, G246, L249, G250, G251, G252, D254, Q270, W195, N209, N235, R237, P238, E239, Q240, D242, H257, T259, D260, D261, R263, N265, D267, R271, Y273, R170, 5171, G172, A174, H204, I205, G206, P207, V208, N209, H257, D260, N265, D267, Q270, R271, P272, Y273, R274, R170, 5171, G172, K173, A174, D177, P207, V208, N209, R237, Q240, W244, G246, H247, G248, L249, E253, H257, T259, D260, N265, D267, Q270, R271, P272, Y273, or R274 (SEQ ID NO:5). In some embodiments, the antigen binding protein or antibody or paratope in an antibody binds to human ASGR-1 at an epitope comprising at least one of the following residues: Q240, D242, W244, E253, N265, D266, D267, N209, R237, P238, E239, P241, D243, Y245, G246, H247, G252, C255, H257, T259, D260, V268, R271, Y273, R237, Q240, D242, W244, E253, N265, D266, D267, N209, P238, E239, P241, D243, Y245, G246, H247, G252, C255, H257, T259, V268, R271, Y273, N209, R237, Q240, D242, W244, E253, H257, T259, N265, D266, D267, or Y273 (SEQ ID NO:5). In some embodiments, the antigen binding protein or antibody or paratope in an antibody binds to human ASGR-1 at an epitope comprising at least one of the following residues: Q240, D242, W244, E253, N265, D266, D267, R237, Q240, D242, W244, E253, N265, D266, D267, N209, R237, Q240, D242, W244, E253, H257, T259, N265, D266, D267, or Y273 (SEQ ID NO:5). In some embodiments, the antigen binding protein or antibody or paratope in an antibody binds to human ASGR-1 at an epitope comprising at least one of the following residues: D216, Q217, N218, G219, P220, W221, Y229, E230, K234, W236, E239, Q240, P241, D242, D243, W244, Y245, G246, L249, G250, G251, G252, D254, Q270, H215, K222, T231, G232, R237, P238, H247, G248, E253, C255, D266, V268, C269, W195, N209, N235, R237, P238, E239, Q240, D242, H257, T259, D260, D261, R263, N265, D267, R271, Y273, Q198, Q202, P207, V208, F233, W236, D243, E253, F258, G262, W264, D266, H161, E162, W195, E196, Q198, K199, F200, Q202, H203, H204, G232, F233, K234, N235, W236, R237, P238, D261, G262, R263, V159, E160, R163, T193, S194, E197, V201, I205, G206, P207, Y229, E230, T231, E239, F258, T259, D260, W264, W167, S171, G172, K173, A174, A176, D177, N180, Y181, R183, L184, E185, D186, Q270, P272, W275, P155, N157, W158, F168, S169, R170, W175, A178, D179, C182, A187, W211, C269, R271, Y273, R274, C277, T279, R170, W195, E196, K199, Q202, H203, H204, I205, G206, P207, V208, F233, K234, N235, W236, P238, D260, D261, G262, R263, R274, N157, V159, F168, S169, S171, S194, Q198, F200, V201, T210, R237, E239, Q240, F258, T259, W264, H161, S194, W195, E196, Q198, K199, F200, Q202, H203, F233, K234, N235, W236, R237, P238, R263, E160, E162, V192, T193, E197, V201, H204, Y229, E230, T231, G232, E239, Q240, P241, D261, G262, W264, H161, E162, T193, S194, W195, E196, K199, Q202, T231, G232, F233, K234, N235, P238, D261, R263, R163, V192, E197, Q198, H203, P207, D228, E230, W236, R237, D260, G262, or W264, T193, S194, W195, E196, P220, W221, G226, T227, D228, Y229, E230, T231, G232, F233, K234, N235, W236, R237, P238, E239, G252; H161, E162, V191, V192, E197, Q198, D216, G219, K222, W223, D225, R263, W264, R170, S171, G172, A174, H204, I205, G206, P207, V208, N209, H257, D260, N265, D267, Q270, R271, P272, Y273, R274, W167, F168, S169, K173, W175, D177, Y181, Q202, H203, T210, W211, R237, F258, T259, D261, D266, V268, C269, W275, R170, S171, G172, K173, A174, D177, P207, V208, N209, R237, Q240, W244, G246, H247, G248, L249, E253, H257, T259, D260, N265, D267, Q270, R271, P272, Y273, R274, S169, W175, A176, A178, T210, W211, W236, P238, E239, D242, Y245, G250, G251, F258, D261, G262, R263, W264, D266, V268, C269, W275, N157, R170, S171, G172, Q202, H203, H204, I205, G206, P207, V208, N209, T210, D260, R271, P272, Y273, R274, V156, W158, V159, H161, W167, F168, S169, K173, K199, F200, V201, W211, R237, H257, F258, T259, D261, D267, V268, Q270, or W275 (SEQ ID NO:5). In some embodiments, the antigen binding protein or antibody or paratope in an antibody binds to human ASGR-1 at an epitope comprising at least one of the following residues: D216, Q217, N218, G219, P220, W221, Y229, E230, K234, W236, E239, Q240, P241, D242, D243, W244, Y245, G246, L249, G250, G251, G252, D254, Q270, W195, N209, N235, R237, P238, E239, Q240, D242, H257, T259, D260, D261, R263, N265, D267, R271, Y273, H161, E162, W195, E196, Q198, K199, F200, Q202, H203, H204, G232, F233, K234, N235, W236, R237, P238, D261, G262, R263, W167, S171, G172, K173, A174, A176, D177, N180, Y181, R183, L184, E185, D186, Q270, P272, W275, R170, W195, E196, K199, Q202, H203, H204, I205, G206, P207, V208, F233, K234, N235, W236, P238, D260, D261, G262, R263, R274, H161, S194, W195, E196, Q198, K199, F200, Q202, H203, F233, K234, N235, W236, R237, P238, R263, H161, E162, T193, S194, W195, E196, K199, Q202, T231, G232, F233, K234, N235, P238, D261, R263, T193, S194, W195, E196, P220, W221, G226, T227, D228, Y229, E230, T231, G232, F233, K234, N235, W236, R237, P238, E239, G252, R170, S171, G172, A174, H204, I205, G206, P207, V208, N209, H257, D260, N265, D267, Q270, R271, P272, Y273, R274, R170, S171, G172, K173, A174, D177, P207, V208, N209, R237, Q240, W244, G246, H247, G248, L249, E253, H257, T259, D260, N265, D267, Q270, R271, P272, Y273, R274, N157, R170, 5171, G172, Q202, H203, H204, I205, G206, P207, V208, N209, T210, D260, R271, P272, Y273, or R274 (SEQ ID NO:5). In some embodiments, the antigen binding protein or antibody or paratope in an antibody binds to human ASGR-1 at an epitope comprising at least one of the following residues: D216, Q217, N218, G219, P220, W221, Y229, E230, K234, W236, E239, Q240, P241, D242, D243, W244, Y245, G246, L249, G250, G251, G252, D254, Q270, H215, K222, T231, G232, R237, P238, H247, G248, E253, C255, D266, V268, C269, W195, N209, N235, R237, P238, E239, Q240, D242, H257, T259, D260, D261, R263, N265, D267, R271, Y273, Q198, Q202, P207, V208, F233, W236, D243, E253, F258, G262, W264, D266, R170, S171, G172, A174, H204, I205, G206, P207, V208, N209, H257, D260, N265, D267, Q270, R271, P272, Y273, R274, W167, F168, S169, K173, W175, D177, Y181, Q202, H203, T210, W211, R237, F258, T259, D261, D266, V268, C269, W275, R170, S171, G172, K173, A174, D177, P207, V208, N209, R237, Q240, W244, G246, H247, G248, L249, E253, H257, T259, D260, N265, D267, Q270, R271, P272, Y273, R274, S169, W175, A176, A178, T210, W211, W236, P238, E239, D242, Y245, G250, G251, F258, D261, G262, R263, W264, D266, V268, C269, or W275 (SEQ ID NO:5). In some embodiments, the antigen binding protein or antibody or paratope in an antibody binds to human ASGR-1 at an epitope comprising at least one of the following residues: D216, Q217, N218, G219, P220, W221, Y229, E230, K234, W236, E239, Q240, P241, D242, D243, W244, Y245, G246, L249, G250, G251, G252, D254, Q270, W195, N209, N235, R237, P238, E239, Q240, D242, H257, T259, D260, D261, R263, N265, D267, R271, Y273, R170, S171, G172, A174, H204, I205, G206, P207, V208, N209, H257, D260, N265, D267, Q270, R271, P272, Y273, R274, R170, S171, G172, K173, A174, D177, P207, V208, N209, R237, Q240, W244, G246, H247, G248, L249, E253, H257, T259, D260, N265, D267, Q270, R271, P272, Y273, or R274 (SEQ ID NO:5). In some embodiments when the antigen binding protein or antibody or paratope in an antibody binds to human ASGR-1 at an epitope comprising at least one of the following residues: H161, E162, W195, E196, Q198, K199, F200, Q202, H203, H204, G232, F233, K234, N235, W236, R237, P238, D261, G262, R263, V159, E160, R163, T193, S194, E197, V201, I205, G206, P207, Y229, E230, T231, E239, F258, T259, D260, W264, W167, S171, G172, K173, A174, A176, D177, N180, Y181, R183, L184, E185, D186, Q270, P272, W275, P155, N157, W158, F168, S169, R170, W175, A178, D179, C182, A187, W211, C269, R271, Y273, R274, C277, T279, R170, W195, E196, K199, Q202, H203, H204, I205, G206, P207, V208, F233, K234, N235, W236, P238, D260, D261, G262, R263, R274, N157, V159, F168, S169, S171, S194, Q198, F200, V201, T210, R237, E239, Q240, F258, T259, W264, H161, 5194, W195, E196, Q198, K199, F200, Q202, H203, F233, K234, N235, W236, R237, P238, R263, E160, E162, V192, T193, E197, V201, H204, Y229, E230, T231, G232, E239, Q240, P241, D261, G262, W264, H161, E162, T193, 5194, W195, E196, K199, Q202, T231, G232, F233, K234, N235, P238, D261, R263, R163, V192, E197, Q198, H203, P207, D228, E230, W236, R237, D260, G262, W264, T193, 5194, W195, E196, P220, W221, G226, T227, D228, Y229, E230, T231, G232, F233, K234, N235, W236, R237, P238, E239, G252, H161, E162, V191, V192, E197, Q198, D216, G219, K222, W223, D225, R263, W264, N157, R170, 5171, G172, Q202, H203, H204, I205, G206, P207, V208, N209, T210, D260, R271, P272, Y273, R274, V156, W158, V159, H161, W167, F168, 5169, K173, K199, F200, V201, W211, R237, H257, F258, T259, D261, D267, V268, Q270, or W275 (SEQ ID NO:5). In some embodiments, the antigen binding protein or antibody or paratope in an antibody binds to human ASGR-1 at an epitope comprising at least one of the following residues: H161, E162, W195, E196, Q198, K199, F200, Q202, H203, H204, G232, F233, K234, N235, W236, R237, P238, D261, G262, R263, W167, S171, G172, K173, A174, A176, D177, N180, Y181, R183, L184, E185, D186, Q270, P272, W275, R170, W195, E196, K199, Q202, H203, H204, I205, G206, P207, V208, F233, K234, N235, W236, P238, D260, D261, G262, R263, R274, H161, S194, W195, E196, Q198, K199, F200, Q202, H203, F233, K234, N235, W236, R237, P238, R263, H161, E162, T193, S194, W195, E196, K199, Q202, T231, G232, F233, K234, N235, P238, D261, R263, T193, S194, W195, E196, P220, W221, G226, T227, D228, Y229, E230, T231, G232, F233, K234, N235, W236, R237, P238, E239, G252, N157, R170, S171, G172, Q202, H203, H204, I205, G206, P207, V208, N209, T210, D260, R271, P272, Y273, or R274 (SEQ ID NO:5). In some embodiments, the antigen binding protein or antibody or a paratope in an antibody binds to human ASGR-1 at an epitope comprising at least one of the following amino acid residues: H161, E162, W195, E196, Q198, K199, F200, Q202, H203, H204, G232, F233, K234, N235, W236, R237, P238, D261, G262, R263, V159, E160, R163, T193, S194, E197, V201, I205, G206, P207, Y229, E230, T231, E239, F258, T259, D260, or W264 (SEQ ID NO:5). In some embodiments, the antigen binding protein or antibody or a paratope in an antibody binds to human ASGR-1 at an epitope comprising at least one of the following amino acid residues: H161, E162, W195, E196, Q198, K199, F200, Q202, H203, H204, G232, F233, K234, N235, W236, R237, P238, D261, G262, or R263 (SEQ ID NO:5). In some embodiments, the antigen binding protein or antibody or a paratope in an antibody binds to human ASGR1 at an epitope comprising at least one of the following amino acid residues: W167, S171, G172, K173, A174, A176, D177, N180, Y181, R183, L184, E185, D186, Q270, P272, W275, P155, N157, W158, F168, 5169, R170, W175, A178, D179, C182, A187, W211, C269, R271, Y273, R274, C277, or T279 (SEQ ID NO:5). In some embodiments, the antigen binding protein or antibody or a paratope in an antibody binds to human ASGR-1 at an epitope comprising at least one of the following amino acid residues: W167, S171, G172, K173, A174, A176, D177, N180, Y181, R183, L184, E185, D186, Q270, P272, or W275 (SEQ ID NO:5). In some embodiments, the antigen binding protein or antibody or a paratope in an antibody binds to human ASGR-1 at an epitope comprising at least one of the following amino acid residues: R170, W195, E196, K199, Q202, H203, H204, I205, G206, P207, V208, F233, K234, N235, W236, P238, D260, D261, G262, R263, R274, N157, V159, F168, S169, S171, S194, Q198, F200, V201, T210, R237, E239, Q240, F258, T259, or W264 (SEQ ID NO:5). In some embodiments, the antigen binding protein or antibody or a paratope in an antibody binds to human ASGR-1 at an epitope comprising at least one of the following amino acid residues: R170, W195, E196, K199, Q202, H203, H204, I205, G206, P207, V208, F233, K234, N235, W236, P238, D260, D261, G262, R263, or R274 (SEQ ID NO:5). In some embodiments, the antigen binding protein or antibody or a paratope in an antibody binds to human ASGR-1 at an epitope comprising at least one of the following amino acid residues: H161, S194, W195, E196, Q198, K199, F200, Q202, H203, F233, K234, N235, W236, R237, P238, R263, E160, E162, V192, T193, E197, V201, H204, Y229, E230, T231, G232, E239, Q240, P241, D261, G262, or W264 (SEQ ID NO:5). In some embodiments, the antigen binding protein or antibody or a paratope in an antibody binds to human ASGR-1 at an epitope comprising at least one of the following amino acid residues: H161, S194, W195, E196, Q198, K199, F200, Q202, H203, F233, K234, N235, W236, R237, P238, or R263 (SEQ ID NO:5). In some embodiments, the antigen binding protein or antibody or a paratope in an antibody binds to human ASGR-1 at an epitope comprising at least one of the following amino acid residues: H161, E162, T193, S194, W195, E196, K199, Q202, T231, G232, F233, K234, N235, P238, D261, R263, R163, V192, E197, Q198, H203, P207, D228, E230, W236, R237, D260, G262, or W264 (SEQ ID NO:5). In some embodiments, the antigen binding protein or antibody or a paratope in an antibody binds to human ASGR-1 at an epitope comprising at least one of the following amino acid residues: H161, E162, T193, S194, W195, E196, K199, Q202, T231, G232, F233, K234, N235, P238, D261, or R263 (SEQ ID NO:5). In some embodiments, the antigen binding protein or antibody or a paratope in an antibody binds to human ASGR-1 at an epitope comprising at least one of the following amino acid residues: T193, S194, W195, E196, P220, W221, G226, T227, D228, Y229, E230, T231, G232, F233, K234, N235, W236, R237, P238, E239, G252, H161, E162, V191, V192, E197, Q198, D216, G219, K222, W223, D225, R263, or W264 (SEQ ID NO:5). In some embodiments, the antigen binding protein or antibody or a paratope in an antibody binds to human ASGR-1 at an epitope comprising at least one of the following amino acid residues: T193, S194, W195, E196, P220, W221, G226, T227, D228, Y229, E230, T231, G232, F233, K234, N235, W236, R237, P238, E239, or G252 (SEQ ID NO:5). In some embodiments, the antigen binding protein or antibody or a paratope in an antibody binds to human ASGR-1 at an epitope comprising at least one of the following amino acid residues: D216, Q217, N218, G219, P220, W221, Y229, E230, K234, W236, E239, Q240, P241, D242, D243, W244, Y245, G246, L249, G250, G251, G252, D254, Q270, H215, K222, T231, G232, R237, P238, H247, G248, E253, C255, D266, V268, or C269 (SEQ ID NO:5). In some embodiments, the antigen binding protein or antibody or a paratope in an antibody binds to human ASGR-1 at an epitope comprising at least one of the following amino acid residues: D216, Q217, N218, G219, P220, W221, Y229, E230, K234, W236, E239, Q240, P241, D242, D243, W244, Y245, G246, L249, G250, G251, G252, D254, or Q270 (SEQ ID NO:5). In some embodiments, the antigen binding protein or antibody or a paratope in an antibody binds to human ASGR-1 at an epitope comprising at least one of the following amino acid residues: W195, N209, N235, R237, P238, E239, Q240, D242, H257, T259, D260, D261, R263, N265, D267, R271, Y273, Q198, Q202, P207, V208, F233, W236, D243, E253, F258, G262, W264, or D266 (SEQ ID NO:5). In some embodiments when the antigen binding protein or antibody or a paratope in an antibody is bound to human ASGR-1, the antigen binding protein or antibody or a paratope in an antibody is positioned 5 angstroms or less from at least one of the following residues: W195, N209, N235, R237, P238, E239, Q240, D242, H257, T259, D260, D261, R263, N265, D267, R271, or Y273 (SEQ ID NO:5). In some embodiments, the antigen binding protein or antibody or a paratope in an antibody binds to human ASGR-1 at an epitope comprising at least one of the following amino acid residues: N157, R170, S171, G172, Q202, H203, H204, I205, G206, P207, V208, N209, T210, D260, R271, P272, Y273, R274, V156, W158, V159, H161, W167, F168, S169, K173, K199, F200, V201, W211, R237, H257, F258, T259, D261, D267, V268, Q270, or W275 (SEQ ID NO:5). In some embodiments, the antigen binding protein or antibody or a paratope in an antibody binds to human ASGR-1 at an epitope comprising at least one of the following amino acid residues: N157, R170, S171, G172, Q202, H203, H204, I205, G206, P207, V208, N209, T210, D260, R271, P272, Y273, or R274 (SEQ ID NO:5). In some embodiments, the antigen binding protein or antibody or a paratope in an antibody binds to human ASGR-1 at an epitope comprising at least one of the following amino acid residues: R170, 5171, G172, A174, H204, I205, G206, P207, V208, N209, H257, D260, N265, D267, Q270, R271, P272, Y273, R274, W167, F168, 5169, K173, W175, D177, Y181, Q202, H203, T210, W211, R237, F258, T259, D261, D266, V268, C269, or W275 (SEQ ID NO:5). In some embodiments, the antigen binding protein or antibody or a paratope in an antibody binds to human ASGR-1 at an epitope comprising at least one of the following amino acid residues: R170, S171, G172, A174, H204, I205, G206, P207, V208, N209, H257, D260, N265, D267, Q270, R271, P272, Y273, or R274 (SEQ ID NO:5). In some embodiments, the antigen binding protein or antibody or a paratope in an antibody binds to human ASGR-1 at an epitope comprising at least one of the following amino acid residues: R170, S171, G172, K173, A174, D177, P207, V208, N209, R237, Q240, W244, G246, H247, G248, L249, E253, H257, T259, D260, N265, D267, Q270, R271, P272, Y273, R274, S169, W175, A176, A178, T210, W211, W236, P238, E239, D242, Y245, G250, G251, F258, D261, G262, R263, W264, D266, V268, C269, or W275 (SEQ ID NO:5). In some embodiments, the antigen binding protein or antibody or a paratope in an antibody binds to human ASGR-1 at an epitope comprising at least one of the following amino acid residues: R170, S171, G172, K173, A174, D177, P207, V208, N209, R237, Q240, W244, G246, H247, G248, L249, E253, H257, T259, D260, N265, D267, Q270, R271, P272, Y273, or R274 (SEQ ID NO:5).

[0225] In some embodiments, an isolated antigen binding protein or an antibody or a paratope in an antibody that specifically binds to human ASGR-1 and inhibits human ASGR-1 function is provided. In some embodiments, the isolated antigen binding protein or an antibody or a paratope in an antibody specifically binds to human ASGR-1 and inhibits human ASGR-1 from binding to a ligand. In some embodiments, the antigen binding protein or antibody or a paratope in an antibody specifically binds to human ASGR-1 within residues 148-291 of SEQ ID NO:5. In some embodiments when the antigen binding protein or antibody or a paratope in an antibody is bound to human ASGR-1, the antigen binding protein or antibody or a paratope in an antibody is positioned 8 angstroms or less from at least one of the following residues: Q240, D242, W244, E253, N265, D266, D267, N209, R237, P238, E239, P241, D243, Y245, G246, H247, G252, C255, H257, T259, D260, V268, R271, Y273, R237, Q240, D242, W244, E253, N265, D266, D267, N209, P238, E239, P241, D243, Y245, G246, H247, G252, C255, H257, T259, V268, R271, Y273, N209, R237, Q240, D242, W244, E253, H257, T259, N265, D266, D267, Y273, P238, E239, P241, D243, Y245, G246, H247, G252, C255, F258, D260, R263, W264, V268, R271, D216, Q217, N218, G219, P220, W221, Y229, E230, K234, W236, E239, Q240, P241, D242, D243, W244, Y245, G246, L249, G250, G251, G252, D254, Q270, H215, K222, T231, G232, R237, P238, H247, G248, E253, C255, D266, V268, C269, W195, N209, N235, R237, P238, E239, Q240, D242, H257, T259, D260, D261, R263, N265, D267, R271, Y273, Q198, Q202, P207, V208, F233, W236, D243, E253, F258, G262, W264, D266, H161, E162, W195, E196, Q198, K199, F200, Q202, H203, H204, G232, F233, K234, N235, W236, R237, P238, D261, G262, R263, V159, E160, R163, T193, 5194, E197, V201, I205, G206, P207, Y229, E230, T231, E239, F258, T259, D260, W264, W167, 5171, G172, K173, A174, A176, D177, N180, Y181, R183, L184, E185, D186, Q270, P272, W275, P155, N157, W158, F168, 5169, R170, W175, A178, D179, C182, A187, W211, C269, R271, Y273, R274, C277, T279, R170, W195, E196, K199, Q202, H203, H204, I205, G206, P207, V208, F233, K234, N235, W236, P238, D260, D261, G262, R263, R274, N157, V159, F168, S169, S171, S194, Q198, F200, V201, T210, R237, E239, Q240, F258, T259, W264, H161, S194, W195, E196, Q198, K199, F200, Q202, H203, F233, K234, N235, W236, R237, P238, R263, E160, E162, V192, T193, E197, V201, H204, Y229, E230, T231, G232, E239, Q240, P241, D261, G262, W264, H161, E162, T193, S194, W195, E196, K199, Q202, T231, G232, F233, K234, N235, P238, D261, R263, R163, V192, E197, Q198, H203, P207, D228, E230, W236, R237, D260, G262, or W264, T193, S194, W195, E196, P220, W221, G226, T227, D228, Y229, E230, T231, G232, F233, K234, N235, W236, R237, P238, E239, G252, H161, E162, V191, V192, E197, Q198, D216, G219, K222, W223, D225, R263, W264, R170, S171, G172, A174, H204, I205, G206, P207, V208, N209, H257, D260, N265, D267, Q270, R271, P272, Y273, R274, W167, F168, S169, K173, W175, D177, Y181, Q202, H203, T210, W211, R237, F258, T259, D261, D266, V268, C269, W275, R170, S171, G172, K173, A174, D177, P207, V208, N209, R237, Q240, W244, G246, H247, G248, L249, E253, H257, T259, D260, N265, D267, Q270, R271, P272, Y273, R274, S169, W175, A176, A178, T210, W211, W236, P238, E239, D242, Y245, G250, G251, F258, D261, G262, R263, W264, D266, V268, C269, W275, N157, R170, S171, G172, Q202, H203, H204, I205, G206, P207, V208, N209, T210, D260, R271, P272, Y273, R274, V156, W158, V159, H161, W167, F168, S169, K173, K199, F200, V201, W211, R237, H257, F258, T259, D261, D267, V268, Q270, or W275 (SEQ ID NO:5). In some embodiments when the antigen binding protein or antibody or a paratope in an antibody is bound to human ASGR-1, the antigen binding protein or antibody or a paratope in an antibody is positioned 5 angstroms or less from at least one of the following residues: Q240, D242, W244, E253, N265, D266, D267, R237, Q240, D242, W244, E253, N265, D266, D267, N209, R237, Q240, D242, W244, E253, H257, T259, N265, D266, D267, Y273, D216, Q217, N218, G219, P220, W221, Y229, E230, K234, W236, E239, Q240, P241, D242, D243, W244, Y245, G246, L249, G250, G251, G252, D254, Q270, W195, N209, N235, R237, P238, E239, Q240, D242, H257, T259, D260, D261, R263, N265, D267, R271, Y273, H161, E162, W195, E196, Q198, K199, F200, Q202, H203, H204, G232, F233, K234, N235, W236, R237, P238, D261, G262, R263, W167, S171, G172, K173, A174, A176, D177, N180, Y181, R183, L184, E185, D186, Q270, P272, W275, R170, W195, E196, K199, Q202, H203, H204, I205, G206, P207, V208, F233, K234, N235, W236, P238, D260, D261, G262, R263, R274, H161, S194, W195, E196, Q198, K199, F200, Q202, H203, F233, K234, N235, W236, R237, P238, R263, H161, E162, T193, S194, W195, E196, K199, Q202, T231, G232, F233, K234, N235, P238, D261, R263, T193, S194, W195, E196, P220, W221, G226, T227, D228, Y229, E230, T231, G232, F233, K234, N235, W236, R237, P238, E239, G252, R170, S171, G172, A174, H204, I205, G206, P207, V208, N209, H257, D260, N265, D267, Q270, R271, P272, Y273, R274, R170, S171, G172, K173, A174, D177, P207, V208, N209, R237, Q240, W244, G246, H247, G248, L249, E253, H257, T259, D260, N265, D267, Q270, R271, P272, Y273, R274, N157, R170, S171, G172, Q202, H203, H204, I205, G206, P207, V208, N209, T210, D260, R271, P272, Y273, or R274 (SEQ ID NO:5).

[0226] In some embodiments when the antigen binding protein or antibody or a paratope in an antibody is bound to human ASGR-1, the antigen binding protein or antibody or a paratope in an antibody is positioned 8 angstroms or less from at least one of the following residues: Q240, D242, W244, E253, N265, D266, D267, N209, R237, P238, E239, P241, D243, Y245, G246, H247, G252, C255, H257, T259, D260, V268, R271, Y273, R237, Q240, D242, W244, E253, N265, D266, D267, N209, P238, E239, P241, D243, Y245, G246, H247, G252, C255, H257, T259, V268, R271, Y273, N209, R237, Q240, D242, W244, E253, H257, T259, N265, D266, D267, Y273, P238, E239, P241, D243, Y245, G246, H247, G252, C255, F258, D260, R263, W264, V268, R271, D216, Q217, N218, G219, P220, W221, Y229, E230, K234, W236, E239, Q240, P241, D242, D243, W244, Y245, G246, L249, G250, G251, G252, D254, Q270, H215, K222, T231, G232, R237, P238, H247, G248, E253, C255, D266, V268, C269, W195, N209, N235, R237, P238, E239, Q240, D242, H257, T259, D260, D261, R263, N265, D267, R271, Y273, Q198, Q202, P207, V208, F233, W236, D243, E253, F258, G262, W264, D266, R170, S171, G172, A174, H204, I205, G206, P207, V208, N209, H257, D260, N265, D267, Q270, R271, P272, Y273, R274, W167, F168, S169, K173, W175, D177, Y181, Q202, H203, T210, W211, R237, F258, T259, D261, D266, V268, C269, W275, R170, S171, G172, K173, A174, D177, P207, V208, N209, R237, Q240, W244, G246, H247, G248, L249, E253, H257, T259, D260, N265, D267, Q270, R271, P272, Y273, R274, S169, W175, A176, A178, T210, W211, W236, P238, E239, D242, Y245, G250, G251, F258, D261, G262, R263, W264, D266, V268, C269, or W275 (SEQ ID NO:5). In some embodiments when the antigen binding protein or antibody or a paratope in an antibody is bound to human ASGR-1, the antigen binding protein or antibody or a paratope in an antibody is positioned 5 angstroms or less from at least one of the following residues: Q240, D242, W244, E253, N265, D266, D267, R237, Q240, D242, W244, E253, N265, D266, D267, N209, R237, Q240, D242, W244, E253, H257, T259, N265, D266, D267, Y273, D216, Q217, N218, G219, P220, W221, Y229, E230, K234, W236, E239, Q240, P241, D242, D243, W244, Y245, G246, L249, G250, G251, G252, D254, Q270, W195, N209, N235, R237, P238, E239, Q240, D242, H257, T259, D260, D261, R263, N265, D267, R271, Y273, R170, S171, G172, A174, H204, I205, G206, P207, V208, N209, H257, D260, N265, D267, Q270, R271, P272, Y273, R274, R170, S171, G172, K173, A174, D177, P207, V208, N209, R237, Q240, W244, G246, H247, G248, L249, E253, H257, T259, D260, N265, D267, Q270, R271, P272, Y273, or R274 (SEQ ID NO:5). In some embodiments when the antigen binding protein or antibody or a paratope in an antibody is bound to human ASGR-1, the antigen binding protein or antibody or a paratope in an antibody is positioned 8 angstroms or less from at least one of the following residues: Q240, D242, W244, E253, N265, D266, D267, N209, R237, P238, E239, P241, D243, Y245, G246, H247, G252, C255, H257, T259, D260, V268, R271, Y273, R237, Q240, D242, W244, E253, N265, D266, D267, N209, P238, E239, P241, D243, Y245, G246, H247, G252, C255, H257, T259, V268, R271, Y273, N209, R237, Q240, D242, W244, E253, H257, T259, N265, D266, D267, or Y273 (SEQ ID NO:5). In some embodiments when the antigen binding protein or antibody or a paratope in an antibody is bound to human ASGR-1, the antigen binding protein or antibody or a paratope in an antibody is positioned 5 angstroms or less from at least one of the following residues: Q240, D242, W244, E253, N265, D266, D267, R237, Q240, D242, W244, E253, N265, D266, D267, N209, R237, Q240, D242, W244, E253, H257, T259, N265, D266, D267, or Y273 (SEQ ID NO:5). In some embodiments when the antigen binding protein or antibody or a paratope in an antibody is bound to human ASGR-1, the antigen binding protein or antibody or a paratope in an antibody is positioned 8 angstroms or less from at least one of the following residues: Q240, D242, W244, E253, N265, D266, D267, R237, Q240, D242, W244, E253, N265, D266, D267, N209, R237, Q240, D242, W244, E253, H257, T259, N265, D266, D267, or Y273 (SEQ ID NO:5). In some embodiments when the antigen binding protein or antibody or a paratope in an antibody is bound to human ASGR-1, the antigen binding protein or antibody or a paratope in an antibody is positioned 5 angstroms or less from at least one of the following residues: Q240, D242, W244, E253, N265, D266, or D267 (SEQ ID NO:5). In some embodiments when the antigen binding protein or antibody or a paratope in an antibody is bound to human ASGR-1, the antigen binding protein or antibody or a paratope in an antibody is positioned 8 angstroms or less from at least one of the following residues: R237, Q240, D242, W244, E253, N265, D266, D267, N209, P238, E239, P241, D243, Y245, G246, H247, G252, C255, H257, T259, V268, R271, or Y273 (SEQ ID NO:5). In some embodiments when the antigen binding protein or antibody or a paratope in an antibody is bound to human ASGR-1, the antigen binding protein or antibody or a paratope in an antibody is positioned 5 angstroms or less from at least one of the following residues: R237, Q240, D242, W244, E253, N265, D266, or D267 (SEQ ID NO:5). In some embodiments when the antigen binding protein or antibody or a paratope in an antibody is bound to human ASGR-1, the antigen binding protein or antibody or a paratope in an antibody is positioned 8 angstroms or less from at least one of the following residues: N209, R237, Q240, D242, W244, E253, H257, T259, N265, D266, D267, Y273, P238, E239, P241, D243, Y245, G246, H247, G252, C255, F258, D260, R263, W264, V268, or R271 (SEQ ID NO:5). In some embodiments when the antigen binding protein or antibody or a paratope in an antibody is bound to human ASGR-1, the antigen binding protein or antibody or a paratope in an antibody is positioned 5 angstroms or less from at least one of the following residues: N209, R237, Q240, D242, W244, E253, H257, T259, N265, D266, D267, or Y273 (SEQ ID NO:5). In some embodiments when the antigen binding protein or antibody or a paratope in an antibody is bound to human ASGR-1, the antigen binding protein or antibody or a paratope in an antibody is positioned 8 angstroms or less from at least one of the following residues: D216, Q217, N218, G219, P220, W221, Y229, E230, K234, W236, E239, Q240, P241, D242, D243, W244, Y245, G246, L249, G250, G251, G252, D254, Q270, H215, K222, T231, G232, R237, P238, H247, G248, E253, C255, D266, V268, or C269 (SEQ ID NO:5). In some embodiments when the antigen binding protein or antibody is bound to human ASGR-1, the antigen binding protein or antibody or a paratope in an antibody is positioned 5 angstroms or less from at least one of the following residues: D216, Q217, N218, G219, P220, W221, Y229, E230, K234, W236, E239, Q240, P241, D242, D243, W244, Y245, G246, L249, G250, G251, G252, D254, or Q270 (SEQ ID NO:5). In some embodiments when the antigen binding protein or antibody or a paratope in an antibody is bound to human ASGR-1, the antigen binding protein or antibody or a paratope in an antibody is positioned 8 angstroms or less from at least one of the following residues: W195, N209, N235, R237, P238, E239, Q240, D242, H257, T259, D260, D261, R263, N265, D267, R271, Y273, Q198, Q202, P207, V208, F233, W236, D243, E253, F258, G262, W264, or D266 (SEQ ID NO:5). In some embodiments when the antigen binding protein or antibody or a paratope in an antibody is bound to human ASGR-1, the antigen binding protein or antibody or a paratope in an antibody is positioned 5 angstroms or less from at least one of the following residues: W195, N209, N235, R237, P238, E239, Q240, D242, H257, T259, D260, D261, R263, N265, D267, R271, or Y273 (SEQ ID NO:5). In some embodiments when the antigen binding protein or antibody or a paratope in an antibody is bound to human ASGR-1, the antigen binding protein or antibody or a paratope in an antibody is positioned 8 angstroms or less from at least one of the following residues: R170, S171, G172, A174, H204, I205, G206, P207, V208, N209, H257, D260, N265, D267, Q270, R271, P272, Y273, R274, W167, F168, S169, K173, W175, D177, Y181, Q202, H203, T210, W211, R237, F258, T259, D261, D266, V268, C269, or W275 (SEQ ID NO:5). In some embodiments when the antigen binding protein or antibody or a paratope in an antibody is bound to human ASGR-1, the antigen binding protein or antibody or a paratope in an antibody is positioned 5 angstroms or less from at least one of the following residues: R170, S171, G172, A174, H204, I205, G206, P207, V208, N209, H257, D260, N265, D267, Q270, R271, P272, Y273, or R274 (SEQ ID NO:5). In some embodiments when the antigen binding protein or antibody or a paratope in an antibody is bound to human ASGR-1, the antigen binding protein or antibody or a paratope in an antibody is positioned 8 angstroms or less from at least one of the following residues: R170, S171, G172, K173, A174, D177, P207, V208, N209, R237, Q240, W244, G246, H247, G248, L249, E253, H257, T259, D260, N265, D267, Q270, R271, P272, Y273, R274, S169, W175, A176, A178, T210, W211, W236, P238, E239, D242, Y245, G250, G251, F258, D261, G262, R263, W264, D266, V268, C269, or W275 (SEQ ID NO:5). In some embodiments when the antigen binding protein or antibody or a paratope in an antibody is bound to human ASGR-1, the antigen binding protein or antibody or a paratope in an antibody is positioned 5 angstroms or less from at least one of the following residues: R170, S171, G172, K173, A174, D177, P207, V208, N209, R237, Q240, W244, G246, H247, G248, L249, E253, H257, T259, D260, N265, D267, Q270, R271, P272, Y273, or R274 (SEQ ID NO:5). In some embodiments when the antigen binding protein or antibody or a paratope in an antibody is bound to human ASGR-1, the antigen binding protein or antibody or a paratope in an antibody is positioned 8 angstroms or less from at least one of the following residues: D216, Q217, N218, G219, P220, W221, Y229, E230, K234, W236, E239, Q240, P241, D242, D243, W244, Y245, G246, L249, G250, G251, G252, D254, Q270, H215, K222, T231, G232, R237, P238, H247, G248, E253, C255, D266, V268, C269, W195, N209, N235, R237, P238, E239, Q240, D242, H257, T259, D260, D261, R263, N265, D267, R271, Y273, Q198, Q202, P207, V208, F233, W236, D243, E253, F258, G262, W264, D266, H161, E162, W195, E196, Q198, K199, F200, Q202, H203, H204, G232, F233, K234, N235, W236, R237, P238, D261, G262, R263, V159, E160, R163, T193, 5194, E197, V201, I205, G206, P207, Y229, E230, T231, E239, F258, T259, D260, W264, W167, 5171, G172, K173, A174, A176, D177, N180, Y181, R183, L184, E185, D186, Q270, P272, W275, P155, N157, W158, F168, 5169, R170, W175, A178, D179, C182, A187, W211, C269, R271, Y273, R274, C277, T279, R170, W195, E196, K199, Q202, H203, H204, I205, G206, P207, V208, F233, K234, N235, W236, P238, D260, D261, G262, R263, R274, N157, V159, F168, S169, S171, S194, Q198, F200, V201, T210, R237, E239, Q240, F258, T259, W264, H161, S194, W195, E196, Q198, K199, F200, Q202, H203, F233, K234, N235, W236, R237, P238, R263, E160, E162, V192, T193, E197, V201, H204, Y229, E230, T231, G232, E239, Q240, P241, D261, G262, W264, H161, E162, T193, S194, W195, E196, K199, Q202, T231, G232, F233, K234, N235, P238, D261, R263, R163, V192, E197, Q198, H203, P207, D228, E230, W236, R237, D260, G262, or W264, T193, S194, W195, E196, P220, W221, G226, T227, D228, Y229, E230, T231, G232, F233, K234, N235, W236, R237, P238, E239, G252, H161, E162, V191, V192, E197, Q198, D216, G219, K222, W223, D225, R263, W264, R170, S171, G172, A174, H204, I205, G206, P207, V208, N209, H257, D260, N265, D267, Q270, R271, P272, Y273, R274, W167, F168, S169, K173, W175, D177, Y181, Q202, H203, T210, W211, R237, F258, T259, D261, D266, V268, C269, W275, R170, S171, G172, K173, A174, D177, P207, V208, N209, R237, Q240, W244, G246, H247, G248, L249, E253, H257, T259, D260, N265, D267, Q270, R271, P272, Y273, R274, S169, W175, A176, A178, T210, W211, W236, P238, E239, D242, Y245, G250, G251, F258, D261, G262, R263, W264, D266, V268, C269, W275, N157, R170, S171, G172, Q202, H203, H204, I205, G206, P207, V208, N209, T210, D260, R271, P272, Y273, R274, V156, W158, V159, H161, W167, F168, S169, K173, K199, F200, V201, W211, R237, H257, F258, T259, D261, D267, V268, Q270, or W275 (SEQ ID NO:5). In some embodiments when the antigen binding protein or antibody or a paratope in an antibody is bound to human ASGR-1, the antigen binding protein or antibody or a paratope in an antibody is positioned 5 angstroms or less from at least one of the following residues of human ASGR-1 (SEQ ID NO:5): D216, Q217, N218, G219, P220, W221, Y229, E230, K234, W236, E239, Q240, P241, D242, D243, W244, Y245, G246, L249, G250, G251, G252, D254, Q270, W195, N209, N235, R237, P238, E239, Q240, D242, H257, T259, D260, D261, R263, N265, D267, R271, Y273, H161, E162, W195, E196, Q198, K199, F200, Q202, H203, H204, G232, F233, K234, N235, W236, R237, P238, D261, G262, R263, W167, S171, G172, K173, A174, A176, D177, N180, Y181, R183, L184, E185, D186, Q270, P272, W275, R170, W195, E196, K199, Q202, H203, H204, I205, G206, P207, V208, F233, K234, N235, W236, P238, D260, D261, G262, R263, R274, H161, 5194, W195, E196, Q198, K199, F200, Q202, H203, F233, K234, N235, W236, R237, P238, R263, H161, E162, T193, 5194, W195, E196, K199, Q202, T231, G232, F233, K234, N235, P238, D261, R263, T193, 5194, W195, E196, P220, W221, G226, T227, D228, Y229, E230, T231, G232, F233, K234, N235, W236, R237, P238, E239, G252, R170, 5171, G172, A174, H204, I205, G206, P207, V208, N209, H257, D260, N265, D267, Q270, R271, P272, Y273, R274, R170, 5171, G172, K173, A174, D177, P207, V208, N209, R237, Q240, W244, G246, H247, G248, L249, E253, H257, T259, D260, N265, D267, Q270, R271, P272, Y273, R274, N157, R170, 5171, G172, Q202, H203, H204, I205, G206, P207, V208, N209, T210, D260, R271, P272, Y273, or R274 (SEQ ID NO:5). In some embodiments when the antigen binding protein or antibody or a paratope in an antibody is bound to human ASGR-1, the antigen binding protein or antibody or a paratope in an antibody is positioned 8 angstroms or less from at least one of the following residues: H161, E162, W195, E196, Q198, K199, F200, Q202, H203, H204, G232, F233, K234, N235, W236, R237, P238, D261, G262, R263, V159, E160, R163, T193, S194, E197, V201, I205, G206, P207, Y229, E230, T231, E239, F258, T259, D260, W264, W167, S171, G172, K173, A174, A176, D177, N180, Y181, R183, L184, E185, D186, Q270, P272, W275, P155, N157, W158, F168, S169, R170, W175, A178, D179, C182, A187, W211, C269, R271, Y273, R274, C277, T279, R170, W195, E196, K199, Q202, H203, H204, I205, G206, P207, V208, F233, K234, N235, W236, P238, D260, D261, G262, R263, R274, N157, V159, F168, S169, S171, S194, Q198, F200, V201, T210, R237, E239, Q240, F258, T259, W264, H161, S194, W195, E196, Q198, K199, F200, Q202, H203, F233, K234, N235, W236, R237, P238, R263, E160, E162, V192, T193, E197, V201, H204, Y229, E230, T231, G232, E239, Q240, P241, D261, G262, W264, H161, E162, T193, S194, W195, E196, K199, Q202, T231, G232, F233, K234, N235, P238, D261, R263, R163, V192, E197, Q198, H203, P207, D228, E230, W236, R237, D260, G262, or W264, T193, S194, W195, E196, P220, W221, G226, T227, D228, Y229, E230, T231, G232, F233, K234, N235, W236, R237, P238, E239, G252, H161, E162, V191, V192, E197, Q198, D216, G219, K222, W223, D225, R263, W264, N157, R170, S171, G172, Q202, H203, H204, I205, G206, P207, V208, N209, T210, D260, R271, P272, Y273, R274, V156, W158, V159, H161, W167, F168, S169, K173, K199, F200, V201, W211, R237, H257, F258, T259, D261, D267, V268, Q270, or W275 (SEQ ID NO:5). In some embodiments when the antigen binding protein or antibody or a paratope in an antibody is bound to human ASGR-1, the antigen binding protein or antibody or a paratope in an antibody is positioned 5 angstroms or less from at least one of the following residues: H161, E162, W195, E196, Q198, K199, F200, Q202, H203, H204, G232, F233, K234, N235, W236, R237, P238, D261, G262, R263, W167, 5171, G172, K173, A174, A176, D177, N180, Y181, R183, L184, E185, D186, Q270, P272, W275, R170, W195, E196, K199, Q202, H203, H204, I205, G206, P207, V208, F233, K234, N235, W236, P238, D260, D261, G262, R263, R274, H161, 5194, W195, E196, Q198, K199, F200, Q202, H203, F233, K234, N235, W236, R237, P238, R263, H161, E162, T193, S194, W195, E196, K199, Q202, T231, G232, F233, K234, N235, P238, D261, R263, T193, S194, W195, E196, P220, W221, G226, T227, D228, Y229, E230, T231, G232, F233, K234, N235, W236, R237, P238, E239, G252, N157, R170, S171, G172, Q202, H203, H204, I205, G206, P207, V208, N209, T210, D260, R271, P272, Y273, R274, V156, W158, V159, H161, W167, F168, S169, K173, (SEQ ID NO:5). In some embodiments when the antigen binding protein or antibody or a paratope in an antibody is bound to human ASGR-1, the antigen binding protein or antibody or a paratope in an antibody is positioned 8 angstroms or less from at least one of the following residues: H161, E162, W195, E196, Q198, K199, F200, Q202, H203, H204, G232, F233, K234, N235, W236, R237, P238, D261, G262, R263, V159, E160, R163, T193, S194, E197, V201, I205, G206, P207, Y229, E230, T231, E239, F258, T259, D260, or W264 (SEQ ID NO:5). In some embodiments when the antigen binding protein or antibody or a paratope in an antibody is bound to human ASGR-1, the antigen binding protein or antibody or a paratope in an antibody is positioned 5 angstroms or less from at least one of the following residues of human ASGR-1 (SEQ ID NO:5): H161, E162, W195, E196, Q198, K199, F200, Q202, H203, H204, G232, F233, K234, N235, W236, R237, P238, D261, G262, or R263 (SEQ ID NO:5). In some embodiments when the antigen binding protein or antibody or a paratope in an antibody is bound to human ASGR-1, the antigen binding protein or antibody or a paratope in an antibody is positioned 8 angstroms or less from at least one of the following residues: W167, S171, G172, K173, A174, A176, D177, N180, Y181, R183, L184, E185, D186, Q270, P272, W275, P155, N157, W158, F168, S169, R170, W175, A178, D179, C182, A187, W211, C269, R271, Y273, R274, C277, or T279 (SEQ ID NO:5). In some embodiments when the antigen binding protein or antibody or a paratope in an antibody is bound to human ASGR-1, the antigen binding protein or antibody or a paratope in an antibody is positioned 5 angstroms or less from at least one of the following residues: W167, S171, G172, K173, A174, A176, D177, N180, Y181, R183, L184, E185, D186, Q270, P272, or W275 (SEQ ID NO:5). In some embodiments when the antigen binding protein or antibody or a paratope in an antibody is bound to human ASGR-1, the antigen binding protein or antibody or a paratope in an antibody is positioned 8 angstroms or less from at least one of the following residues: R170, W195, E196, K199, Q202, H203, H204, I205, G206, P207, V208, F233, K234, N235, W236, P238, D260, D261, G262, R263, R274, N157, V159, F168, S169, S171, S194, Q198, F200, V201, T210, R237, E239, Q240, F258, T259, or W264 (SEQ ID NO:5). In some embodiments when the antigen binding protein or antibody or a paratope in an antibody is bound to human ASGR-1, the antigen binding protein or or a paratope in an antibody is positioned 5 angstroms or less from at least one of the following residues: R170, W195, E196, K199, Q202, H203, H204, I205, G206, P207, V208, F233, K234, N235, W236, P238, D260, D261, G262, R263, or R274 (SEQ ID NO:5). In some embodiments when the antigen binding protein or antibody or a paratope in an antibody is bound to human ASGR-1, the antigen binding protein or antibody or a paratope in an antibody is positioned 8 angstroms or less from at least one of the following residues: H161, S194, W195, E196, Q198, K199, F200, Q202, H203, F233, K234, N235, W236, R237, P238, R263, E160, E162, V192, T193, E197, V201, H204, Y229, E230, T231, G232, E239, Q240, P241, D261, G262, or W264 (SEQ ID NO:5). In some embodiments when the antigen binding protein or antibody or a paratope in an antibody is bound to human ASGR-1, the antigen binding protein or antibody or a paratope in an antibody is positioned 5 angstroms or less from at least one of the following residues: H161, S194, W195, E196, Q198, K199, F200, Q202, H203, F233, K234, N235, W236, R237, P238, or R263 (SEQ ID NO:5). In some embodiments when the antigen binding protein or antibody or a paratope in an antibody is bound to human ASGR-1, the antigen binding protein or antibody or a paratope in an antibody is positioned 8 angstroms or less from at least one of the following residues: H161, E162, T193, S194, W195, E196, K199, Q202, T231, G232, F233, K234, N235, P238, D261, R263, R163, V192, E197, Q198, H203, P207, D228, E230, W236, R237, D260, G262, or W264 (SEQ ID NO:5). In some embodiments when the antigen binding protein or antibody or a paratope in an antibody is bound to human ASGR-1, the antigen binding protein or antibody or a paratope in an antibody is positioned 5 angstroms or less from at least one of the following residues: H161, E162, T193, S194, W195, E196, K199, Q202, T231, G232, F233, K234, N235, P238, D261, or R263 (SEQ ID NO:5). In some embodiments when the antigen binding protein or antibody or a paratope in an antibody is bound to human ASGR-1, the antigen binding protein or antibody or a paratope in an antibody is positioned 8 angstroms or less from at least one of the following residues: T193, S194, W195, E196, P220, W221, G226, T227, D228, Y229, E230, T231, G232, F233, K234, N235, W236, R237, P238, E239, G252, H161, E162, V191, V192, E197, Q198, D216, G219, K222, W223, D225, R263, or W264 (SEQ ID NO:5). In some embodiments when the antigen binding protein or antibody or a paratope in an antibody is bound to human ASGR-1, the antigen binding protein or antibody or a paratope in an antibody is positioned 5 angstroms or less from at least one of the following residues: T193, S194, W195, E196, P220, W221, G226, T227, D228, Y229, E230, T231, G232, F233, K234, N235, W236, R237, P238, E239, or G252 (SEQ ID NO:5). In some embodiments when the antigen binding protein or antibody or a paratope in an antibody is bound to human ASGR-1, the antigen binding protein or antibody or a paratope in an antibody is positioned 8 angstroms or less from at least one of the following residues: N157, R170, S171, G172, Q202, H203, H204, I205, G206, P207, V208, N209, T210, D260, R271, P272, Y273, R274, V156, W158, V159, H161, W167, F168, S169, K173, K199, F200, V201, W211, R237, H257, F258, T259, D261, D267, V268, Q270 or W275 (SEQ ID NO:5). In some embodiments when the antigen binding protein or antibody or a paratope in an antibody is bound to human ASGR-1, the antigen binding protein or antibody or a paratope in an antibody is positioned 5 angstroms or less from at least one of the following residues: N157, R170, S171, G172, Q202, H203, H204, I205, G206, P207, V208, N209, T210, D260, R271, P272, Y273 or R274 (SEQ ID NO:5).

[0227] In some embodiments, an isolated antigen binding protein or antibody that specifically binds to human ASGR-1 and inhibits human ASGR-1 function is provided. In some embodiments, the isolated antigen binding protein or antibody that specifically binds to human ASGR-1 inhibits binding of human ASGR-1 binding to a ligand. In some embodiments, the antigen binding protein or antibody specifically binds to human ASGR-1 at a location that overlaps with a location where a ligand binds to human ASGR-1. In some embodiments, the location where a ligand binds to ASGR-1 includes at least one amino acid residue selected from the group consisting of: N209, R237, Q240, D242, W244, E253, H257, T259, N265, D266, D267, Y273, P238, E239, P241, D243, Y245, G246, H247, G252, C255, F258, D260, R263, W264, V268, or R271 (SEQ ID NO:5). In some embodiments, an isolated antigen binding protein or an antibody specifically binds to human ASGR-1 at a location that overlaps with a location that a ligand binds to ASGR-1. In some embodiments, the location that a ligand binds to human ASGR-1 includes at least one amino acid residue selected from the group consisting of: N209, R237, Q240, D242, W244, E253, H257, T259, N265, D266, D267, and Y273 (SEQ ID NO:5).

[0228] In some embodiments, an isolated antigen binding protein that binds to human ASGR-1 and inhibits human ASGR, ASGR-1 and/or ASGR-2 function is provided, wherein the antigen binding protein does not bind to a variant ASGR-1 protein, and wherein said variant ASGR-1 protein comprises a single mutation of a residue selected the group consisting of: R170, 5171, G172, R183, L184, W195, E196, K199, H203, H204, P207, V208, N209, H215, D216, P220, D225, D228, R237, P238, E239, P241, D242, D243, Y245, G246, H247, G248, L249, G251, E253, T259, D260, R263, N265, Q270, R271, P272, R274, and E280 as shown in SEQ ID NO:5. In some embodiments, an isolated antigen binding protein or an antibody is contemplated. An antigen binding protein “does not bind” to a variant ASGR-1 protein when the measured reduction in antibody binding signal to a variant ASGR-1 protein (compared to that determined for binding to wild type ASGR-1) is statistically significant as measured by any number of methods known to one skilled in the art, such as the method described in Example 7E below. In some embodiments, the variant ASGR-1 protein comprises a single mutation of a residue at a position selected from the group consisting of: W195, E196, K199, H203, H204, P207, P220, G251, and R263 as shown in SEQ ID NO:5. In some embodiments, the single mutation is selected from the group consisting of H203, H204, P220, and G251. In some embodiments, the single mutation is selected from the group consisting of W195, E196 and K199. In some embodiments, the single mutation is selected from the group consisting of W195, E196 and H204. In some embodiments, the single mutation is selected from the group consisting W195, K199, and R263. In some embodiments, the single mutation is selected from the group consisting of W195 and E196. In some embodiments, the single mutation is selected from the group consisting of W195 and K199. In some embodiments, the single mutation is selected from the group consisting of W195 or P207. In some embodiments, the single mutation is selected from the group consisting of W195 and R263. In some embodiments, the single mutation is selected from the group consisting of H203 and H204. In some embodiments, the single mutation is selected from the group consisting of K199 and R263. In some embodiments, the single mutation is a mutation of residue W195. In some embodiments, the variant ASGR-1 protein comprises a single mutation of a residue selected the group consisting of: R170, S171, R183, L184, H215, P220, P238, G246, H247, G248, G251, and N265 as shown in SEQ ID NO:5. In some embodiments, the single mutation is selected from the group consisting of R183, L184, H215, P220, G246, G248, G251, and N265. In some embodiments, the single mutation is selected from the group consisting of L184, P220, P238, H247, and G251. In some embodiments, the single mutation is selected from the group consisting of R170, S171, and L184. In some embodiments, the single mutation is a mutation of residue R183. In some embodiments, the single mutation is a mutation of residue L184. In some embodiments, the variant ASGR-1 protein comprises a single mutation of a residue at a position selected from the group consisting of: P241, D242, D243, Y245, G251, E253 and D260 as shown in SEQ ID NO:5. In some embodiments, the single mutation is selected from the group consisting of P241, D243, Y245, G251, E253 and D260. In some embodiments, the single mutation is selected from the group consisting of P241, D243, and E253. In some embodiments, the single mutation is a mutation of residue D260. In some embodiments, the variant ASGR-1 protein comprises a single mutation of a residue at a position selected from the group consisting or comprising: R170, R237, E239, P241, T259, D260, R263, and N265 as shown in SEQ ID NO:5. In some embodiments, the single mutation is selected from the group consisting of R237, D260 and R263. In some embodiments, the single mutation is selected from the group consisting of R237, T259, D260 and R263. In some embodiments, the single mutation is selected from the group consisting of R170, R237, P241, T259, D260, R263 and N265. In some embodiments, the single mutation is selected from the group consisting of R237, E239, P241, T259, D260, R263 and N265. In some embodiments, the variant ASGR-1 protein comprises a single mutation of a residue at a position selected from the group consisting or comprising: R170, S171, G172, E196, H204, P207, V208, N209, H215, D216, D225, D228, P238, P241, D242, D243, H247, G248, L249, G251, D260, R263, N265, Q270, R271, P272, R274 and E280 as shown in SEQ ID NO:5. In some embodiments, the single mutation is selected from the group consisting of R170, S171, G172, E196, H204, P207, V208, N209, H215, D216, D225, D228, P238, P241, D242, D243, H247, G248, L249, G251, D260, R263, N265, Q270, R271, P272, R274 and E280 as shown in SEQ ID NO:5. In some embodiments, the single mutation is selected from the group consisting of R170, S171, G172, E196, H204, P207, H215, D216, D225, D228, D243, G248, L249, G251, D260, Q270, R271, P272, R274 and E280. In some embodiments, the single mutation is selected from the group consisting of G172, V208, R271, P272 and R274. In some embodiments, the single mutation is selected from the group consisting of G172, R271 and R274. In some embodiments, the single mutation is selected from the group consisting of G172, N209, and R271. In some embodiments, the single mutation is selected from the group consisting of R170, G172, V208, R271 and P272. In some embodiments, the single mutation is selected from the group consisting of G172, V208, P238, R271, P272 and R274. In some embodiments, the single mutation is selected from the group consisting of G172, P238, R271, P272 and R274. In some embodiments, the variant ASGR-1 protein comprises a single mutation of a residue at a position selected from the group consisting or comprising: G172, P238, R271 and R274 as shown in SEQ ID NO:5. In some embodiments, the variant ASGR-1 protein comprises a single mutation of a residue at a position selected from the group consisting or comprising: R170, G172, V208 and R274 as shown in SEQ ID NO:5. In some embodiments, the variant ASGR-1 protein comprises a single mutation of a residue at a position selected from the group consisting or comprising: R170, R183, H215 and Q270 as shown in SEQ ID NO:5. In some embodiments, the variant ASGR-1 protein comprises a single mutation of a residue at a position selected from the group consisting or comprising: P241, T259, and N265 as shown in SEQ ID NO:5. In some embodiments, the variant ASGR-1 protein comprises a single mutation of a residue at a position selected from the group consisting or comprising: P207 and R263 as shown in SEQ ID NO:5. In some embodiments, the variant ASGR-1 protein comprises a single mutation of a residue at a position selected from the group consisting or comprising: G172, P241, D242, H247, L249, N265, R271 and P272 as shown in SEQ ID NO:5. In some embodiments, the antigen binding protein or antibody does not bind to two or more variant ASGR-1 proteins, wherein the variant ASGR-1 proteins comprise the single mutations of the group individually.

[0229] A “CDR grafted antibody” is an antibody comprising one or more CDRs derived from an antibody of a particular species or isotype and the framework of another antibody of the same or different species or isotype.

[0230] A “multi-specific antibody” is an antibody that recognizes more than one epitope on one or more antigens. A subclass of this type of antibody is a “bi-specific antibody” which recognizes two distinct epitopes on the same or different antigens.

[0231] An antigen binding protein including an antibody “specifically binds” to an antigen, such as ASGR, ASGR-1 or ASGR-2, if it binds to the antigen with a tight binding affinity as determined by a equilibrium dissociation constant (K_{D}, or corresponding K_{D}, as defined below) value of 10⁻⁷ M or less. An antigen binding protein that specifically binds to human ASGR, ASGR-1 or ASGR-2 may be able to bind to ASGR, ASGR-1 or ASGR-2 from other species as well with the same or different affinities.

[0232] Affinity can be determined using a variety of techniques known in the art, for example but not limited to, equilibrium methods (e.g., enzyme-linked immunoabsorbent assay (ELISA); KinExA, Rathanaswami et al. Analytical Biochemistry, Vol. 373:52-60, 2008; or radioimmunoassay (RIA)), or by a surface plasmon resonance assay or other mechanism of kinetics-based assay (e.g., BIACORE® analysis or Octet® analysis (ForteBio)), and other methods such as indirect binding assays, competitive binding assays fluorescence resonance energy transfer (FRET), gel electrophoresis and chromatography (e.g., gel filtration). These and other methods may utilize a label on one or more of the components being examined and/or employ a variety of detection methods including but not limited to chromogenic, fluorescent, luminescent, or isotopic labels. A detailed description of binding affinities and kinetics can be found in Paul, W. E., ed., Fundamental Immunology, 4th Ed., Lippincott-Raven, Philadelphia (1999), which focuses on antibody-immunogen interactions. One example of a competitive binding assay is a radioimmunoassay comprising the incubation of labeled antigen with the antibody of interest in the presence of increasing amounts of unlabeled antigen, and the detection of the antibody bound to the labeled antigen. The affinity of the antibody of interest for a particular antigen and the binding off-rates can be determined from the data by scatchard plot analysis. Competition with a second antibody can also be determined using radioimmunoassays. In this case, the antigen is incubated with antibody of interest conjugated to a labeled compound in the presence of increasing amounts of an unlabeled second antibody.

[0233] Further embodiments of the invention provide antigen binding molecules (e.g., antibodies) that specifically bind ASGR, ASGR-1 and/or ASGR-2 with an equilibrium dissociation constant or K_{D} (k_{off}/kₒₙ) of less than 10⁻⁷ M, or of less than 10⁻⁸ M, or of less than 10⁻⁹ M, or of less than 10⁻¹⁰ M, or of less than 10⁻¹¹ M, or of less than 10⁻¹² M, or of less than 10⁻¹³ M, or of less than 5×10⁻¹³ M (lower values indicating tighter binding affinity). Yet further embodiments of the invention are antigen binding molecules that specifically bind ASGR, ASGR-1 and/or ASGR-2 with an equilibrium dissociation constant or K_{D} (k_{off}/kₒₙ) of less than about 10⁻⁷ M, or of less than about 10⁻⁸ M, or of less than about 10⁻⁹ M, or of less than about 10⁻¹⁰ M, or of less than about 10⁻¹¹ M, or of less than about 10⁻¹² M, or of less than about 10⁻¹³ M, or of less than about 5×10⁻¹³ M.

[0234] In still another embodiment, an antigen binding protein of the invention (e.g., an antibody) that specifically bind ASGR, ASGR-1 and/or ASGR-2 has an equilibrium dissociation constant or K_{D} (k_{off}/kₒₙ) of between about 10⁻⁷ M and about 10⁻⁸ M, between about 10⁻⁸ M and about 10⁻⁹ M, between about 10⁻⁹ M and about 10⁻¹⁰ M, between about 10⁻¹⁰ M and about 10⁻¹¹ M, between about 10⁻¹¹ M and about 10⁻¹² M, between about 10⁻¹² M and about 10⁻¹³ M. In still another embodiment, an antibody of the invention that specifically bind ASGR, ASGR-1 and/or ASGR-2 has an equilibrium dissociation constant or K_{D} (k_{off}/kₒₙ) of between 10⁻⁷ M and 10⁻⁸ M, between 10⁻⁸ M and 10⁻⁹ M, between 10⁻⁹ M and 10⁻¹⁰ M, between 10⁻¹⁰ M and 10⁻¹¹ M, between 10⁻¹¹ M and 10⁻¹² M, between 10⁻¹² M and 10⁻¹³ M.

[0235] It will be appreciated that an antigen binding protein of the present invention (e.g., an antibody or fragments thereof) may have at least one amino acid substitution, providing that the antigen binding protein retains the same or better desired binding specificity (e.g., binding to human ASGR, human ASGR-1, and/or human ASGR-2) (See Example 14). Therefore, modifications to the antigen binding protein structures are encompassed within the scope of the invention. In one embodiment, the antigen binding protein (e.g., but not limited to, an antibody) comprises sequences that each independently differ by 5, 4, 3, 2, 1, or 0 single amino acid additions, substitutions, and/or deletions from a CDR sequence of those set forth in Table 2 herein. As used herein, a CDR sequence that differs by no more than a total of, for example, four amino acid additions, substitutions and/or deletions from a CDR sequence shown in Table 2 below refers to a sequence with 4, 3, 2, 1 or 0 single amino acid additions, substitutions, and/or deletions compared with the sequences shown in Table 2. These may include amino acid substitutions, which may be conservative or non-conservative that do not destroy the desired binding capability of an antibody. Conservative amino acid substitutions may encompass non-naturally occurring amino acid residues, which are typically incorporated by chemical peptide synthesis rather than by synthesis in biological systems. These include peptidomimetics and other reversed or inverted forms of amino acid moieties. A conservative amino acid substitution may also involve a substitution of a native amino acid residue with a normative residue such that there is little or no effect on the polarity or charge of the amino acid residue at that position. In some embodiments, the one or more substitutions to one or more of the antibody sequences can be as follows for each noted section in the noted antibody: 1) VH1|1-08/D6|6-19|RF1/JH4, 25A4 H CDR2 sequence —WMYPN---SGNTGYAQKFQG, where N at 11 can be S or Q and T at 12 can be A or V, such that the sequence can be Trp Met Tyr Pro Asn Ser Gly X1 X2 Gly Tyr Ala Gln Lys Phe Gln Gly (SEQ ID NO: 50259) wherein X1=N or S or Q or a conservative substitution thereof, X2=T or A or V or a conservative substitution thereof. 2) VH1|1-08/D6|6-191RF1/JH4, 4A2 H CDR2 sequence—WMHPN---SGNTGYAQKFQG, where N at 11 can be S or Q, and T at 12 can be A or E, such that the sequence can be Trp Met His Pro Asn Ser Gly X1 X2 Gly Tyr Ala Gln Lys Phe Gln Gly (SEQ ID NO: 50260) wherein X1=N or S or Q or a conservative substitution thereof, X2=T or A or E or a conservative substitution thereof. 3) VK41B3/JK3, 4A2 L CDR3 sequence—QQYYN-----------------------TPVT, where N at 5 can be Q, and T at 29 can be A, such that the sequence can be Gln Gln Tyr Tyr X1 X2 Pro Val Thr (SEQ ID NO: 50261) wherein X1=N or Q or a conservative substitution thereof, X2=T or A or a conservative substitution thereof. 4) VH1|1-02/D1|1-1|RF1/JH4, 4H6 H CDR3 sequence—DGTS----------------------SFDY, where D at 1 can be S, G at 2 can be A, such that the sequence can be X1 X2 Thr Ser Ser Phe Asp Tyr (SEQ ID NO: 50262) wherein X1=D or S or a conservative substitution thereof, X2=or A or a conservative substitution thereof. 5) VH3|3-33/D4|4-11|RF2/JH6 and VH3|3-07/D4|4-11|RF2/JH6, 7E11 H CDR2 sequence—IIWHD---GSNKYYADSVKG, where D at 5 can be S or E, G at 9 can be A, D at 16 can be E, and S at 17 can be A, such that the sequence can be Ile Ile Trp His X1 X2 Ser Asn Lys Tyr Tyr Ala X3 X4 Val Lys Gly (SEQ ID NO: 50263) wherein X1=D or S or E or a conservative substitution thereof, X2=G or A or a conservative substitution thereof, X3=D or E or a conservative substitution thereof, X4=S or A or a conservative substitution thereof. 6) VH3|3-33/D6|6-6|RF1/JH6 and VH3|3-07/D6|6-6|RF1/JH6, 5E5 H CDR2 sequence VIWYD---GSNKYYADSVKG, where G at 9 can be A, D at 16 can be E or G, and S at 17 can be A, such that the sequence can be Val Ile Trp Tyr Asp X1 Ser Asn Lys Tyr Tyr Ala X2 X3 Val Lys Gly (SEQ ID NO: 50264) wherein X1=G or A or a conservative substitution thereof X2=D or E or G or a conservative substitution thereof X3=S or A or a conservative substitution thereof. 7) VH3|3-33/D6|6-6|RF1/JH6 and VH3|3-07/D6|6-6|RF1/JH6, 5E5 H CDR3 sequence EVYSSGW----------------YDYGMDV, where W at 7 can be F, such that the sequence can be Glu Val Tyr Ser Ser Gly X1 Tyr Asp Tyr Gly Met Asp Val (SEQ ID NO: 50265) wherein X1=W or F or a conservative substitution thereof.

[0236] In some embodiments, any one or more of the above CDR sequences can be combined with any one or more of the CDR sequences provided herein (e.g., Table 2 in FIG. 49, and Tables 19A-C and Tables 20A-C in FIG. 55). In some embodiments, any one or more of the above CDR sequences can be combined with any one or more CDR sequences provided herein for the designated antibody to provide an antibody of 6 CDRs (LCDR1, LCDR2, LCDR3, HCDR1, HCDR2, and HCDR3). For example, any one or more of the above CDRs can be used as one of the CDRs for the antibodies provided in Table 2 in FIG. 49 and/or Tables 19A, 19B, 19C, 20A, 20B and/or 20C in FIG. 55. In some embodiments, the variant positions provided in the above consensus sequences can be further combined as optional variations with the variations of sequence provided in Table 2 in FIG. 49, and Tables 19A-C and Tables 20A-C in FIG. 55, such that any demonstrated combination of sequences in one consensus sequence (e.g., for an antibody, such as 4A2 H CDR2 above) can be combined with all permissible options outlined for the relevant antibody in Table 2 in FIG. 49, and Tables 19A-C and Tables 20A-C in FIG. 55 (e.g., the corresponding 4A2 H CDR2), which can further be combined with any of the other 4A2 sequences in Table 2 in FIG. 49, and Tables 19A-C and Tables 20A-C in FIG. 55 (e.g., HCDR1, HCDR3, LCDR1, LCDR2, and LCDR3). Of course, 4A2 L CDR3 noted above can similarly be combined, and/or combined with the immediate combination as well. Thus, such sequences are not disclosed herein as needing to be alternative sequences, but are contemplated as additional options for the noted sequences. In some embodiments, variants of such sequences are also contemplated. Such variants can retain or have superior desired activity. Examples of such aspects are provided in Example 14 and tables 6 and 7. In some embodiments, any one or more of the FR regions in tables 6 and 7 can be combined with any one or more of the CDR sequences provided herein. In some embodiments, any one or more of the FR regions provided in Table 6 or 7 can be combined with the corresponding CDR set for the corresponding antibody (as a set of 6 CDRs). Thus, variants of antibody 4A2 are provided that include 6 CDRs (HCDR1, HCDR2, HCDR3, LCDR1, LCDR2, and LCDR3) and 8 FRs HFR1, HFR2, HFR3, HFR4, LFR1, LFR2, LFR3, and LFR4), any particular sequence of which can be from any of the designated sequences for antibody 4A2 provided herein (the present paragraph, Tables 2, 6 and/or 7, tables 19A, 19B, and 19C, 20A, 20B and 20C, etc).

[0237] Non-conservative substitutions may involve the exchange of a member of one class of amino acids or amino acid mimetics for a member from another class with different physical properties (e.g. size, polarity, hydrophobicity, charge). In certain embodiments, such substituted residues may be introduced into regions of a human antibody that are homologous with non-human antibodies, or into the non-homologous regions of the molecule.

[0238] Moreover, one skilled in the art may generate test variants containing a single amino acid substitution at each desired amino acid residue. The variants can then be screened using activity assays known to those skilled in the art. Such variants could be used to gather information about suitable variants. For example, if one discovered that a change to a particular amino acid residue resulted in destroyed, undesirably reduced, or unsuitable activity, variants with such a change may be avoided. In other words, based on information gathered from such routine experiments, one skilled in the art can readily determine the amino acids where further substitutions should be avoided either alone or in combination with other mutations.

[0239] A skilled artisan will be able to determine suitable variants of the antigen binding protein as set forth herein using well-known techniques. In certain embodiments, one skilled in the art may identify suitable areas of the molecule that may be changed without destroying activity by targeting regions not believed to be important for activity. In certain embodiments, one can identify residues and portions of the molecules that are conserved among similar polypeptides as has been describe above. In certain embodiments, even areas that may be important for biological activity or for structure may be subject to conservative amino acid substitutions without destroying the biological activity or without adversely affecting the polypeptide structure.

[0240] Additionally, one skilled in the art can review structure-function studies identifying residues in similar polypeptides that are important for activity or structure. In view of such a comparison, one can predict the importance of amino acid residues in a protein that correspond to amino acid residues which are important for activity or structure in similar proteins. One skilled in the art may opt for chemically similar amino acid substitutions for such predicted important amino acid residues.

[0241] In some embodiments, one skilled in the art may identify residues that may be changed that result in enhanced properties as desired. For example, an amino acid substitution (conservative or non-conservative) may result in enhanced binding affinity to human ASGR, human ASGR-1, and/or human ASGR-2, or enhanced binding affinity to other species of ASGR, ASGR-1, and/or ASGR-2.

[0242] One skilled in the art can also analyze the three-dimensional structure and amino acid sequence in relation to that structure in similar polypeptides. In view of such information, one skilled in the art may predict the alignment of amino acid residues of an antibody with respect to its three dimensional structure. In certain embodiments, one skilled in the art may choose not to make radical changes to amino acid residues predicted to be on the surface of the protein, since such residues may be involved in important interactions with other molecules. A number of scientific publications have been devoted to the prediction of secondary structure. See Moult J., Curr. Op. in Biotech., 7(4):422-427 (1996), Chou et al., Biochemistry, 13(2):222-245 (1974); Chou et al., Biochemistry, 113(2):211-222 (1974); Chou et al., Adv. Enzymol. Relat. Areas Mol. Biol., 47:45-148 (1978); Chou et al., Ann. Rev. Biochem., 47:251-276 and Chou et al., Biophys. J., 26:367-384 (1979). Moreover, computer programs are currently available to assist with predicting secondary structure. One method of predicting secondary structure is based upon homology modeling. For example, two polypeptides or proteins which have a sequence identity of greater than 30%, or similarity greater than 40% often have similar structural topologies. The growth of the protein structural database (PDB) has provided enhanced predictability of secondary structure, including the potential number of folds within a polypeptide's or protein's structure. See Holm et al., Nucl. Acid. Res., 27(1):244-247 (1999). Additional methods of predicting secondary structure include “threading” (Jones, D., Curr. Opin. Struct. Biol., 7(3):377-87 (1997); Sippl et al., Structure, 4(1):15-19 (1996)), “profile analysis” (Bowie et al., Science, 253:164-170 (1991); Gribskov et al., Meth. Enzym., 183:146-159 (1990); Gribskov et al., Proc. Nat. Acad. Sci., 84(13):4355-4358 (1987)), and “evolutionary linkage” (See Holm, supra (1999), and Brenner, supra (1997)).

[0243] In certain embodiments, variants of the antigen binding protein include glycosylation variants wherein the number and/or type of glycosylation site has been altered compared to the amino acid sequences of a parent polypeptide. In certain embodiments, variants comprise a greater or a lesser number of N-linked glycosylation sites than the native protein. Alternatively, substitutions which eliminate this sequence will remove an existing N-linked carbohydrate chain. Also provided is a rearrangement of N-linked carbohydrate chains wherein one or more N-linked glycosylation sites (typically those that are naturally occurring) are eliminated and one or more new N-linked sites are created. Additional antibody variants include cysteine variants wherein one or more cysteine residues are deleted from or substituted for another amino acid (e.g., serine) as compared to the parent amino acid sequence. Cysteine variants may be useful when antibodies must be refolded into a biologically active conformation such as after the isolation of insoluble inclusion bodies. Cysteine variants generally have fewer cysteine residues than the native protein, and typically have an even number to minimize interactions resulting from unpaired cysteines.

[0244] Desired amino acid substitutions (whether conservative or non-conservative) can be determined by those skilled in the art at the time such substitutions are desired. In certain embodiments, amino acid substitutions can be used to identify important residues of antibodies to the target of interest, or to increase or decrease the affinity of the antibodies to the target of interest described herein.

[0245] According to certain embodiments, desired amino acid substitutions are those which: (1) reduce susceptibility to proteolysis, (2) reduce susceptibility to oxidation, (3) alter binding affinity for forming protein complexes, (4) alter binding affinities, and/or (4) confer or modify other physiochemical or functional properties on such polypeptides. According to certain embodiments, single or multiple amino acid substitutions (in certain embodiments, conservative amino acid substitutions) may be made in the naturally-occurring sequence (in certain embodiments, in the portion of the polypeptide outside the domain(s) forming intermolecular contacts). In certain embodiments, a conservative amino acid substitution typically may not substantially change the structural characteristics of the parent sequence (e.g., a replacement amino acid should not tend to break a helix that occurs in the parent sequence, or disrupt other types of secondary structure that characterizes the parent sequence). Examples of art-recognized polypeptide secondary and tertiary structures are described in Proteins, Structures and Molecular Principles (Creighton, Ed., W. H. Freeman and Company, New York (1984)); Introduction to Protein Structure (C. Branden and J. Tooze, eds., Garland Publishing, New York, N.Y. (1991)); and Thornton et al. Nature 354:105 (1991), which are each incorporated herein by reference.

### Antigen Binding Protein Sequences

[0246] The amino acid sequences of the light chain CDRs of exemplary antigen binding proteins (antibodies) and the heavy chain CDRs of exemplary antigen binding proteins (antibodies) are shown in Tables 2-7, in addition to the exemplary antigen binding proteins described above as consensus light chain CDRs and/or consensus heavy chain CDRs (see Tables 19 B and C and Tables 20 B and C in FIG. 55). Also shown are polynucleotide sequences which encode the amino acid sequences of the CDRs (Table 2). Tables 3-7 and Tables A, B and C further provide the amino acid sequences of the VH and VL of exemplary antigen binding proteins (e.g., antibodies), in addition to the exemplary antigen binding proteins described above as consensus variable light chain sequences and/or consensus variable heavy chain sequences (see Table 19A and Table 20A in FIG. 55, as well as the Tables in FIGS. 56 and 57). Table 3 further provides the polynucleotide (DNA) sequences encoding the amino acid sequences of the variable light and variable heavy domains for exemplary antibodies.

[0247] Particular embodiments of antigen binding proteins of the present invention comprise one or more amino acid sequences that are identical to the amino acid sequences of one or more of the CDRs and/or FRs (framework regions) illustrated herein in Tables 2-7, and Tables A-C below. In one embodiment, the antigen binding protein comprises a light chain CDR1 sequence illustrated herein in Table 2 in FIG. 49 and Table C below. In another embodiment, the antigen binding protein comprises a light chain CDR2 sequence illustrated herein in Table 2 in FIG. 49 and Table C below. In another embodiment, the antigen binding protein comprises a light chain CDR3 sequence illustrated in herein in Table 2 in FIG. 49 and Table C below. In another embodiment, the antigen binding protein comprises a heavy chain CDR1 sequence illustrated in herein in Table 2 in FIG. 49 and Table C below. In another embodiment, the antigen binding protein comprises a heavy chain CDR2 sequence illustrated herein in Table 2 in FIG. 49 and Table C below. In another embodiment, the antigen binding protein comprises a heavy chain CDR3 sequence illustrated herein in Table 2 in FIG. 49 and Table C below. In another embodiment, the antigen binding protein comprises a light chain FR1 sequence illustrated herein in Tables 3-7 in FIGS. 50-54, respectively. In another embodiment, the antigen binding protein comprises a light chain FR2 sequence illustrated herein in Tables 3-7 in FIGS. 50-54, respectively. In another embodiment, the antigen binding protein comprises a light chain FR3 sequence illustrated herein in Tables 3-7 in FIGS. 50-54, respectively. In another embodiment, the antigen binding protein comprises a light chain FR4 sequence illustrated herein in Table 3-7 in FIGS. 50-54, respectively. In another embodiment, the antigen binding protein comprises a heavy chain FR1 sequence illustrated herein in Table 3-7 in FIGS. 50-54, respectively. In another embodiment, the antigen binding protein comprises a heavy chain FR2 sequence illustrated herein in Table 3-7 in FIGS. 50-54, respectively. In another embodiment, the antigen binding protein comprises a heavy chain FR3 sequence illustrated herein in Table 3-7 in FIGS. 50-54, respectively. In another embodiment, the antigen binding protein comprises a heavy chain FR4 sequence illustrated herein in Table 3-7 in FIGS. 50-54, respectively.

[0248] In another embodiment, at least one of the antigen binding protein's CDR3 sequences differs by no more than 6, 5, 4, 3, 2, 1 or 0 single amino acid addition, substitution, and/or deletion from a CDR3 sequence from the sequences as shown in Table 2 in FIG. 49 or Table C below. In another embodiment, the antigen binding protein's light chain CDR3 sequence differs by no more than 6, 5, 4, 3, 2, 1 or 0 single amino acid addition, substitution, and/or deletion from a light chain CDR3 sequence from the sequences as shown in Table 2 in FIG. 49 or Table C below and the antigen binding protein's heavy chain CDR3 sequence differs by no more than 6, 5, 4, 3, 2, 1 or 0 single amino acid addition, substitution, and/or deletion from a heavy chain CDR3 sequence from the sequences as shown in Table 2 in FIG. 49 or Table C below. In another embodiment, the antigen binding protein further comprises 1, 2, 3, 4, or 5 CDR sequences that each independently differs by 6, 5, 4, 3, 2, 1, or 0 single amino acid additions, substitutions, and/or deletions from a CDR sequence of the sequences shown in Table 2 in FIG. 49 or Table C below. In another embodiment, the antigen binding protein comprises the CDRs of the light chain variable region and the CDRs of the heavy chain variable region set forth in Table 2 in FIG. 49 or Table C below. In a further embodiment, the antigen binding protein comprises the CDRs of any one of the antibodies in Table 2 in FIG. 49 or Table C below. In one embodiment, the antigen binding protein is a human antibody. In another embodiment, the antigen binding protein is a humanized antibody. In certain embodiments, the VH CDRs and the VL CDRs are paired in a manner indicated in Tables 2-7 in FIGS. 49-54, respectively.

[0249] In one embodiment, the antigen binding protein (e.g., an antibody) comprises a light chain variable domain comprising a sequence of amino acids that differs from the sequence of a light chain variable domain listed in Table 3-7 in FIGS. 50-54, respectively at 15, 14, 13, 12, 11, 10, 9, 8, 7, 6, 5, 4, 3, 2, 1 or 0 residues, wherein each such sequence difference is independently either a deletion, insertion, or substitution of one amino acid residue. In another embodiment, the antigen binding protein (e.g., an antibody) comprises a heavy chain variable domain comprising a sequence of amino acids that differs from the sequence of a heavy chain variable domain listed in Table 3-7 in FIGS. 50-54, respectively at 15, 14, 13, 12, 11, 10, 9, 8, 7, 6, 5, 4, 3, 2, 1 or 0 residues, wherein each such sequence difference is independently either a deletion, insertion, or substitution of one amino acid residue. In certain embodiments, the antigen binding protein comprises a light chain variable domain and a heavy chain variable domain that are paired in a manner indicated in Tables 3-7 in FIGS. 50-54, respectively. In certain embodiments, the antigen binding protein comprises a light chain variable domain and a heavy chain variable domain that are paired in a manner indicated in Tables A-C below.

[0250] In a particular embodiment, the antigen binding protein (e.g., antibody) binds to human ASGR-1 and comprises a heavy chain variable domain containing one or more VH CDR1 (HCDR1), VH CDR2 (HCDR2) and/or VH CDR3 (HCDR3), wherein the VH CDR1 (HCDR1) has an amino acid sequence identical to, or comprising not more than 3 amino acid additions/insertions, deletions or substitutions as compared to, the amino acid sequences selected from the group consisting of SEQ ID NO:5136, SEQ ID NO:50001, SEQ ID NO:50012 and SEQ ID NO:50468; the VH CDR2 (HCDR2) has an amino acid sequence identical to, or comprising not more than 3 amino acid additions/insertions, deletions or substitutions as compared to, the amino acid sequences selected from the group consisting of SEQ ID NO:13148, SEQ ID NO:50002, SEQ ID NO:50014, and SEQ ID NO:50260; and the VH CDR3 (HCDR3) has an amino acid sequence identical to, or comprising not more than 3 amino acid additions/insertions, deletions or substitutions as compared to, the amino acid sequences selected from the group consisting of SEQ ID NO:21160, SEQ ID NO:50003, and SEQ ID NO:50470.

[0251] In a particular embodiment, the antigen binding protein (e.g., antibody) binds to human ASGR-1 and comprises a light chain variable domain containing one or more VL CDR1 (LCDR1), VL CDR2 (LCDR2) and/or VL CDR3 (LCDR3), wherein the VL CDR1 (LCDR1) has an amino acid sequence identical to, or comprising not more than 3 amino acid additions/insertions, deletions or substitutions as compared to, the amino acid sequences selected from the group consisting of SEQ ID NO:1130, SEQ ID NO:50133, SEQ ID NO:50156 and SEQ ID NO:50162; the VL CDR2 (LCDR2) has an amino acid sequence identical to, or comprising not more than 3 amino acid additions/insertions, deletions or substitutions as compared to, the amino acid sequences selected from the group consisting of SEQ ID NO:9142, SEQ ID NO:50157, SEQ ID NO:50163, SEQ ID NO:50229, SEQ ID NO:50619, SEQ ID NO:50643 and SEQ ID NO:50649; and the VL CDR3 (LCDR3) has an amino acid sequence identical to, or comprising not more than 3 amino acid additions/insertions, deletions or substitutions as compared to, the amino acid sequences selected from the group consisting of SEQ ID NO:17154, SEQ ID NO:50134, SEQ ID NO:50164, and SEQ ID NO:50261.

[0252] In a particular embodiment, the antigen binding protein (e.g., antibody) binds to human ASGR-1 and comprises A) a heavy chain variable domain containing one or more VH CDR1 (HCDR1), VH CDR2 (HCDR2) and/or VH CDR3 (HCDR3), wherein the VH CDR1 (HCDR1) has an amino acid sequence identical to, or comprising not more than 3 amino acid additions/insertions, deletions or substitutions as compared to, the amino acid sequences selected from the group consisting of SEQ ID NO:5136, SEQ ID NO:50001, SEQ ID NO:50012 and SEQ ID NO:50468; the VH CDR2 (HCDR2) has an amino acid sequence identical to, or comprising not more than 3 amino acid additions/insertions, deletions or substitutions as compared to, the amino acid sequences selected from the group consisting of SEQ ID NO:13148, SEQ ID NO:50002, SEQ ID NO:50014, and SEQ ID NO:50260; and the VH CDR3 (HCDR3) has an amino acid sequence identical to, or comprising not more than 3 amino acid additions/insertions, deletions or substitutions as compared to, the amino acid sequences selected from the group consisting of SEQ ID NO:21160, SEQ ID NO:50003, and SEQ ID NO:50470; and B) a light chain variable domain containing one or more VL CDR1 (LCDR1), VL CDR2 (LCDR2) and/or VL CDR3 (LCDR3), wherein the VL CDR1 (LCDR1) has an amino acid sequence identical to, or comprising not more than 3 amino acid additions/insertions, deletions or substitutions as compared to, the amino acid sequences selected from the group consisting of SEQ ID NO:1130, SEQ ID NO:50133, SEQ ID NO:50156 and SEQ ID NO:50162; the VL CDR2 (LCDR2) has an amino acid sequence identical to, or comprising not more than 3 amino acid additions/insertions, deletions or substitutions as compared to, the amino acid sequences selected from the group consisting of SEQ ID NO:9142, SEQ ID NO:50157, SEQ ID NO:50163, SEQ ID NO:50229, SEQ ID NO:50619, SEQ ID NO:50643 and SEQ ID NO:50649; and the VL CDR3 (LCDR3) has an amino acid sequence identical to, or comprising not more than 3 amino acid additions/insertions, deletions or substitutions as compared to, the amino acid sequences selected from the group consisting of SEQ ID NO:17154, SEQ ID NO:50134, SEQ ID NO:50164, and SEQ ID NO:50261. In one embodiment, the antigen binding protein (e.g., antibody) comprises A) a heavy chain variable domain containing a VH CDR1 (HCDR1), a VH CDR2 (HCDR2) and a VH CDR3 (HCDR3), wherein the VH CDR1 (HCDR1) has an amino acid sequence identical to, or comprising not more than 3 amino acid additions/insertions, deletions or substitutions as compared to, the amino acid sequences selected from the group consisting of SEQ ID NO:5136, SEQ ID NO:50001, SEQ ID NO:50012 and SEQ ID NO:50468; the VH CDR2 (HCDR2) has an amino acid sequence identical to, or comprising not more than 3 amino acid additions/insertions, deletions or substitutions as compared to, the amino acid sequences selected from the group consisting of SEQ ID NO:13148, SEQ ID NO:50002, SEQ ID NO:50014, and SEQ ID NO:50260; and the VH CDR3 (HCDR3) has an amino acid sequence identical to, or comprising not more than 3 amino acid additions/insertions, deletions or substitutions as compared to, the amino acid sequences selected from the group consisting of SEQ ID NO:21160, SEQ ID NO:50003, and SEQ ID NO:50470; and B) a light chain variable domain containing a VL CDR1 (LCDR1), a VL CDR2 (LCDR2) and a VL CDR3 (LCDR3), wherein the VL CDR1 (LCDR1) has an amino acid sequence identical to, or comprising not more than 3 amino acid additions/insertions, deletions or substitutions as compared to, the amino acid sequences selected from the group consisting of SEQ ID NO:1130, SEQ ID NO:50133, SEQ ID NO:50156 and SEQ ID NO:50162; the VL CDR2 (LCDR2) has an amino acid sequence identical to, or comprising not more than 3 amino acid additions/insertions, deletions or substitutions as compared to, the amino acid sequences selected from the group consisting of SEQ ID NO:9142, SEQ ID NO:50157, SEQ ID NO:50163, SEQ ID NO:50229, SEQ ID NO:50619, SEQ ID NO:50643 and SEQ ID NO:50649; and the VL CDR3 (LCDR3) has an amino acid sequence identical to, or comprising not more than 3 amino acid additions/insertions, deletions or substitutions as compared to, the amino acid sequences selected from the group consisting of SEQ ID NO:17154, SEQ ID NO:50134, SEQ ID NO:50164, and SEQ ID NO:50261. In one embodiment, the antigen binding protein comprises A) a heavy chain variable domain containing a VH CDR1 (HCDR1), a VH CDR2 (HCDR2) and a VH CDR3 (HCDR3), wherein the VH CDR1 (HCDR1) amino acid sequence is selected from the group consisting of SEQ ID NO:5136, SEQ ID NO:50001, SEQ ID NO:50012 and SEQ ID NO:50468; the VH CDR2 (HCDR2) amino acid sequence is selected from the group consisting of SEQ ID NO:13148, SEQ ID NO:50002, SEQ ID NO:50014, and SEQ ID NO:50260; and the VH CDR3 (HCDR3) amino acid sequence is selected from the group consisting of SEQ ID NO:21160, SEQ ID NO:50003, and SEQ ID NO:50470; and B) a light chain variable domain containing a VL CDR1 (LCDR1), a VL CDR2 (LCDR2) and a VL CDR3 (LCDR3), wherein the VL CDR1 (LCDR1) amino acid sequence is selected from the group consisting of SEQ ID NO:1130, SEQ ID NO:50133, SEQ ID NO:50156 and SEQ ID NO:50162; the VL CDR2 (LCDR2) amino acid sequence is selected from the group consisting of SEQ ID NO:9142, SEQ ID NO:50157, SEQ ID NO:50163, SEQ ID NO:50229, SEQ ID NO:50619, SEQ ID NO:50643 and SEQ ID NO:50649; and the VL CDR3 (LCDR3) amino acid sequence is selected from the group consisting of SEQ ID NO:17154, SEQ ID NO:50134, SEQ ID NO:50164, and SEQ ID NO:50261. In one embodiment, the antigen binding protein comprises a heavy chain variable domain and a light chain variable domain containing a VH CDR1 having the amino acid sequence set forth in SEQ ID NO:5136; a VH CDR2 having the amino acid sequence set forth in SEQ ID NO:13148; a VH CDR3 having the amino acid sequence set forth in SEQ ID NO:21160; a VL CDR1 having the amino acid sequence set forth in SEQ ID NO:1130; a VL CDR2 having the amino acid sequence set forth in SEQ ID NO:9142; and a VL CDR3 having the amino acid sequence set forth in SEQ ID NO:17154.

[0253] In a particular embodiment, the antigen binding protein (e.g., antibody) comprises a) a light chain variable domain having no more than ten or no more than five amino acid additions/insertions, deletions or substitutions from the amino acid sequence set forth in SEQ ID NO:25164 or SEQ ID NO:50326; b) a heavy chain variable domain having no more than ten or no more than five amino acid additions/insertions, deletions or substitutions from the amino acid sequence set forth in SEQ ID NO:29170 or SEQ ID NO:50266; or c) the light chain variable domain of a) and the heavy chain variable domain of b). In one embodiment, the antigen binding protein comprises a light chain variable domain having the amino acid sequence set forth in SEQ ID NO:25164 or SEQ ID NO:50326; and a heavy chain variable domain having the amino acid sequence set forth in SEQ ID NO:29170 or SEQ ID NO:50266. In one embodiment, the antigen binding protein comprises a light chain variable domain having the amino acid sequence set forth in SEQ ID NO:50326; and a heavy chain variable domain having the amino acid sequence set forth in SEQ ID NO:50266. In one embodiment, the antigen binding protein comprises a light chain variable domain having the amino acid sequence set forth in SEQ ID NO:25164; and a heavy chain variable domain having the amino acid sequence set forth in SEQ ID NO:29170.

[0254] While specific embodiments relating to the antigen binding protein identified as 4A2 are set forth above with particularity, the embodiments of the present invention are not intended to be limited in scope to this individual embodiment. The embodiments directed to 4A2 are intended merely as single illustrations of individual embodiments. It is fully anticipated that the embodiments of the present invention include antigen binding proteins comprising heavy chain variable domains containing one or more VH CDR1 (HCDR1), VH CDR2 (HCDR2) and/or VH CDR3 (HCDR3) and/or light chain variable domains containing one or more VL CDR1 (LCDR1), VL CDR2 (LCDR2) and/or VL CDR3 (LCDR3) as set forth in Tables 2-7 in FIGS. 49-57, respectively, as well as Tables 19A-C and Tables 20A-C in FIG. 55, Tables 21-134 in FIGS. 56 and 57, and Tables A, B and C.

TABLE A
Exemplary Heavy and Light Chain Variable Regions

| Ab | SEQ ID NOs: | Ab | SEQ ID NOS: | Ab | SEQ ID NOs: | Ab | SEQ ID NOs: |
|---|---|---|---|---|---|---|---|
| name | VH/VL | name | VH/VL | name | VH/VL | name | VH/VL |
| 10G6 | 29184/25178 | 59F2 | 31512/27506 | 147E9 | 30172/26166 | 191G10 | 30846/26840 |
| 11E2 | 29040/25034 | 5E5 | 29016/25010 | 184E7 | 30660/26654 | 191G12 | 30730/26724 |
| 11F5 | 29054/25048 | 60D2 | 31518/27512 | 194A4 | 30820/26814 | 192C10 | 30764/26758 |
| 12E9 | 29186/25180 | 60E8 | 29494/25488 | 208A2 | 28136/24130 | 192C8 | 30756/26750 |
| 12F11 | 29178/25172 | 63A10 | 31536/27530 | 210G10 | 31054/27048 | 192E4 | 30744/26738 |
| 12F12 | 29188/25182 | 63G7 | 31534/27528 | 4B1 | 28878/24872 | 192G6 | 30752/26746 |
| 13F6 | 28772/24766 | 64B12 | 29624/25618 | 60E12 | 29502/25496 | 192G8 | 30760/26754 |
| 148E10 | 28132/24126 | 65F10 | 28134/24128 | 61A1 | 29504/25498 | 192H10 | 30768/26762 |
| 154F4 | 31392/27386 | 68G6 | 28224/24218 | 62H10 | 31832/27826 | 193C7 | 30794/26788 |
| 159H8 | 31416/27410 | 6A6 | 28806/24800 | 63H8 | 29604/25598 | 194B7 | 30828/26822 |
| 160B12 | 31418/27412 | 6D4 | 28816/24810 | 72G9 | 32080/28074 | 194C1 | 30816/26810 |
| 175D10 | 30538/26532 | 6D9 | 29154/25148 | 8D8 | 29168/25162 | 196C7 | 30870/26864 |
| 177D2 | 31858/27852 | 6G6 | 29198/25192 | 12D2 | 29036/25030 | 197B6 | 30894/26888 |
| 25A4 | 28522/ 24516 | 70D1 | 29670/25664 | 148H10 | 30196/26190 | 197E11 | 30906/26900 |
| 25D12 | 28510/24504 | 7A10 | 29194/25188 | 173C11 | 30520/26514 | 197F2 | 30886/26880 |
| 26C4 | 28580/24574 | 7E11 | 28914/24908 | 179C2 | 30570/26564 | 197G3 | 30888/26882 |
| 27E7 | 28744/24738 | 7F4 | 28814/24808 | 47C1 | 29286/25280 | 198G3 | 30620/26614 |
| 28H2 | 29190/25184 | 7F8 | 28948/24942 | 49C1 | 29320/25314 | 213B3 | 31092/27086 |
| 29E2 | 29192/25186 | 7G4 | 28966/24960 | 60C12 | 29500/25494 | 219H1 | 31156/27150 |
| 29E6 | 28550/24544 | 8D12 | 29050/25044 | 60G2 | 29482/25476 | 74C8 | 29768/25762 |
| 29H8 | 28798/24792 | 9F12LC1 | 28216/24210 | 65D5 | 29632/25626 | 74G6 | 29894/25888 |
| 32D6 | 29196/25190 | 9F12LC2 | 28217/24211 | 66H11 | 28130/24124 | 75G3 | 29714/25708 |
| 3G7 | 28840/24834 | 9G9 | 28790/24784 | 71A6 | 28128/24122 | 89A11 | 30028/26022 |
| 45B4 | 29252/25246 | 65E9 | 31538/27532 | 73G1 | 31556/27550 | 74B2 | 29736/25730 |
| 49F10 | 29334/25328 | 72B4 | 31552/27546 | 49C5 | 32086/28080 | 74H7 | 29966/25960 |
| 4A2 | 29170/25164 | 7H7 | 28944/24938 | 49D10 | 32088/28082 | 85F7 | 29766/25760 |
| 4B3 | 28750/24744 | 9C11 | 28856/24850 | 51E3 | 30958/26952 | 198B9 | 30918/26912 |
| 4H6 | 28936/24930 | 12B12 | 28978/24972 | 51F4 | 31476/27470 | 199A7 | 30932/26926 |
| 50D4 | 29362/25356 | 147D10 | 30174/26168 | 53E8 | 32090/28084 | 218G4 | 31786/27780 |
| 50G9 | 32082/28076 | 149D11 | 30226/26220 | 54E9 | 31488/27482 | 146A8 | 31332/27326 |
| 51E9 | 29366/25360 | 149F8 | 30222/26216 | 56E3 | 31492/27486 | 146B6 | 31334/27328 |
| 52G11 | 28138/24132 | 151B9 | 31372/27366 | 56G1 | 31490/27484 | 149A1 | 31344/27338 |
| 52H1 | 31482/27476 | 175F4 | 31456/27450 | 190C11 | 30602/26596 | 172B12 | 31452/27446 |
| 53F2 | 28140/24134 | 22G5 | 28368/24362 | 190E6 | 30642/26636 | 172C3 | 31450/27444 |
| 53F7 | 29412/25406 | 48B12 | 31820/27814 | 190F12 | 30618/26612 | 193E7 | 30796/26790 |
| 55B1 | 29430/25424 | 52H2 | 29380/25374 | 190F8 | 30712/26706 | 199E3 | 30926/26920 |
| 56E5 | 29466/25460 | 6G7 | 28880/24874 | 190G11 | 30608/26602 | 226F9 | 31264/27258 |
| 65C12 | 32078/28072 | 7G2 | 28942/24936 | 190H9 | 30716/26710 | 227C1 | 31280/27274 |
| 176H4 | 30542/26536 | 72F5 | 29700/25694 | 48D7 | 29306/25300 | | |
| 194C10 | 30832/26826 | 191A10 | 30724/26718 | 52D10 | 29388/25382 | | |
| 191E10 | 30726/26720 | 191G1 | 30628/26622 | 59E6 | 29590/25584 | | |
| 196F4 | 30868/26862 | 227F2 | 31282/27276 | 64E2 | 31836/27830 | | |
| 198D2 | 31604/27598 | 31D12LC1 | 29176/25170 | 57A7 | 29554/25548 | | |
| 202A3 | 30972/26966 | 31D12LC2 | 29174/25168 | 58G11 | 31510/27504 | | |
| 204G6 | 31004/26998 | 7C3LC1 | 28212/24206 | 64G12 | 29626/25620 | | |
| 224G1 | 31196/27190 | 7C3LC2 | 28214/24208 | | | | |

TABLE B

| Ab | SEQ ID NOS: | Ab | SEQ ID NOS: | Ab | SEQ ID NOs: | Ab | SEQ ID NOS: |
|---|---|---|---|---|---|---|---|
| name | VH/VL | name | VH/VL | name | VH/VL | name | VH/VL |
| 175D10 | 30538/26532 | 184E7 | 30660/26654 | 192E4 | 30744/26738 | 74B2 | 29736/25730 |
| 25A4 | 28522/24516 | 194A4 | 30820/26814 | 192G6 | 30752/26746 | 74H7 | 29966/25960 |
| 26C4 | 28580/24574 | 208A2 | 28136/24130 | 192G8 | 30760/26754 | 85F7 | 29766/25760 |
| 29H8 | 28798/24792 | 210G10 | 31054/27048 | 192H10 | 30768/26762 | 218G4 | 31786/27780 |
| 49F10 | 29334/25328 | 4B1 | 28878/24872 | 193C7 | 30794/26788 | 172B12 | 31452/27446 |
| 4A2 | 29170/25164 | 72G9 | 32080/28074 | 194B7 | 30828/26822 | 172C3 | 31450/27444 |
| 4H6 | 28936/24930 | 190C11 | 30602/26596 | 194C1 | 30816/26810 | 193E7 | 30796/26790 |
| 50D4 | 29362/25356 | 190E6 | 30642/26636 | 196C7 | 30870/26864 | 199E3 | 30926/26920 |
| 51E9 | 29366/25360 | 190F12 | 30618/26612 | 197B6 | 30894/26888 | 191E10 | 30726/26720 |
| 52H1 | 31482/27476 | 190F8 | 30712/26706 | 197E11 | 30906/26900 | 196F4 | 30868/26862 |
| 55B1 | 29430/25424 | 190G11 | 30608/26602 | 197F2 | 30886/26880 | 198D2 | 31604/27598 |
| 56E5 | 29466/25460 | 190H9 | 30716/26710 | 197G3 | 30888/26882 | 202A3 | 30972/26966 |
| 64B12 | 29624/25618 | 191A10 | 30724/26718 | 198G3 | 30620/26614 | 204G6 | 31004/26998 |
| 6G6 | 29198/25192 | 191G1 | 30628/26622 | 213B3 | 31092/27086 | 10G6 | 29184/25178 |
| 7F4 | 28814/24808 | 191G10 | 30846/26840 | 219H1 | 31156/27150 | 160B12 | 31418/27412 |
| 7G4 | 28966/24960 | 191G12 | 30730/26724 | 74C8 | 29768/25762 | 177D2 | 31858/27852 |
| 149F8 | 30222/26216 | 192C10 | 30764/26758 | 74G6 | 29894/25888 | 53F7 | 29412/25406 |
| 48B12 | 31820/27814 | 192C8 | 30756/26750 | 75G3 | 29714/25708 | 63A10 | 31536/24530 |
| 7E11 | 28914/24908 | 198B9 | 30918/26912 | 146B6 | 31334/27328 | 22G5 | 28368/24362 |
| 6G7 | 28880/24874 | 199A7 | 30932/26926 | 176H4 | 30542/26536 | 5E5 | 29016/25010 |
| 147E9 | 30172/26166 | 146A8 | 31332/27326 | 149A1 | 31344/27338 | 194C10 | 30832/26826 |
| 54E9 | 31488/27482 | 12D2 | 29036/25030 | | | | |

TABLE C
Exemplary Heavy and Light Chain Variable Regions and Heavy and Light Chain CDR1/2/3

| | VH | VL | HCDR1 | HCDR2 | HCDR3 | LCDR1 | LCDR2 | LCDR3 |
|---|---|---|---|---|---|---|---|---|
| Ab | SEQ ID | SEQ ID | SEQ ID | SEQ ID | SEQ ID | SEQ ID | SEQ ID | SEQ ID |
| name | NOs: | NOs: | NOs: | NOs: | NOs: | NOs: | NOs: | NOs: |
| 25A4 | 28522 or | 24516 or | 4488, | 12500, | 20512, | 480, | 8492, | 16504, |
| | 50266 | 50316 | 50468, | 50002, | 50003 or | 50133 or | 50157, | 50134, |
| | | | 50001 or | 50014 or | 50470 | 50162 | 50229, | 50164 or |
| | | | 50013 | 50259 | | | 50619, | 50620 |
| | | | | | | | 50643 or | |
| | | | | | | | 50649 | |
| 26C4 | 28580 or | 24574 or | 4546, | 12588 or | 20570, | 538, | 8550, | 16562, |
| | 50266 | 50316 | 50001, | 50002 | 50003 or | 50133 or | 50157, | 50134, |
| | | | 50013 or | | 50470 | 50156 | 50163, | 50164 or |
| | | | 50468 | | | | 50229, | 50620 |
| | | | | | | | 50619, | |
| | | | | | | | 50643 or | |
| | | | | | | | 50649 | |
| 29H8 | 28798 or | 24792 or | 4764, | 12776 or | 20788 or | 756 or | 8768, | 16780 or |
| | 50266 | 50316 | 50001, | 50002 | 50003 or | 50133 | 50157, | 50134 |
| | | | 50013 or | | 50470 | | 50163 | |
| | | | 50468 | | | | 50229, | |
| | | | | | | | 50619, | |
| | | | | | | | 50643 or | |
| | | | | | | | 50649 | |
| 4A2 | 29170 or | 25164 or | 5136, | 13148, | 21160, | 1130, | 9142, | 17154, |
| | 50266 | 50326 | 50001, | 50002, | 50003 or | 50133, | 50157, | 50134, |
| | | | 50013, or | 50014 or | 50470 | 50156 or | 50163 | 50164 or |
| | | | 50468 | 50260 | | 50162 | 50229, | 50261 |
| | | | | | | | 50619, | |
| | | | | | | | 50643 or | |
| | | | | | | | 50649 | |
| 4H6 | 28936 or | 24930 or | 4902 or | 12914 or | 20926 or | 894, | 8096, | 16918 or |
| | 50272 | 50321 | 50019 | 50020 | 50021 or | 50147 or | 50148 or | 50149 |
| | | | | | 50262 | 50159 | 50160 | |
| 56E5 | 29466 or | 25460 or | 5432, | 13444 or | 21456 or | 1426 or | 9438, | 17450 or |
| | 50272 | 50321 | 50019 or | 50020 | 50021 | 50147 | 50123, | 50149 |
| | | | 50058 | | | | 50131, | |
| | | | | | | | 50136, | |
| | | | | | | | 50139, | |
| | | | | | | | 50142, | |
| | | | | | | | 50145, | |
| | | | | | | | 50148, | |
| | | | | | | | 50154, | |
| | | | | | | | 50160, | |
| | | | | | | | 50181, | |
| | | | | | | | 50184, | |
| | | | | | | | 50199, | |
| | | | | | | | 50202, | |
| | | | | | | | 50213 or | |
| | | | | | | | 50248 | |
| 7F4 | 28814 or | 24808 or | 4780, | 12792 or | 20804 or | 772, | 8784, | 16796 or |
| | 50284 | 50312 | 50046 or | 50047 | 50048 | 50122, | 50123, | 50124 |
| | | | 50075 | | | 50130, | 50131, | |
| | | | | | | 50135 or | 50136, | |
| | | | | | | 50198 | 50139, | |
| | | | | | | | 50142, | |
| | | | | | | | 50145, | |
| | | | | | | | 50148, | |
| | | | | | | | 50154, | |
| | | | | | | | 50160, | |
| | | | | | | | 50181, | |
| | | | | | | | 50199 or | |
| | | | | | | | 50213 | |
| 7G4 | 28966 or | 24960 or | 4932, | 12944, | 20956 or | 924, | 8936, | 16948 |
| | 50267 | 50315 | 50004, | 50005, | 50006 | 50122, | 50123, | |
| | | | 50037 or | 50008, | | 50130, | 50131, | |
| | | | 50107 | 50017, | | 50135, | 50136, | |
| | | | | 50023, | | 50198, or | 50139, | |
| | | | | 50026, | | 50247 | 50142, | |
| | | | | 50038, | | | 50145, | |
| | | | | 50053, | | | 50148, | |
| | | | | 50067, | | | 50154, | |
| | | | | 50073, | | | 50160, | |
| | | | | 50085, | | | 50181, | |
| | | | | 50088, | | | 50184, | |
| | | | | 50100, | | | 50199, | |
| | | | | 50108, | | | 50202, | |
| | | | | 50238 or | | | 50213 or | |
| | | | | 50254 | | | 50248 | |
| 48B12 | 31820 or | 27814 | 7784, | 15796, | 23808 | 3780 | 11792 or | 19804 |
| | 50267 | | 50034, | 50032, | | | 50126 | |
| | | | 50055, | 50035, | | | | |
| | | | 50093, | 50056, | | | | |
| | | | 50113 or | 50070, | | | | |
| | | | 50116 | 50091, | | | | |
| | | | | 50105 or | | | | |
| | | | | 50117 | | | | |
| 184E7 | 30660 or | 26654 or | 6626, | 14638 or | 22650 | 2620, | 10632, | 18644 or |
| | 50272 | 50320 | 50019 or | 50020 | | 50138, | 50123, | 50146 |
| | | | 50237 | | | 50144, | 50131, | |
| | | | | | | 50147, | 50136, | |
| | | | | | | 50183 or | 50139, | |
| | | | | | | 50212 | 50142, | |
| | | | | | | | 50145, | |
| | | | | | | | 50148, | |
| | | | | | | | 50154, | |
| | | | | | | | 50160, | |
| | | | | | | | 50181, | |
| | | | | | | | 50184, | |
| | | | | | | | 50199, | |
| | | | | | | | 50202, | |
| | | | | | | | 50213 or | |
| | | | | | | | 50248 | |
| 194A4 | 30820 | 26814 or | 6786 | 14798, | 22810 | 2780 or | 10792, | 18804 or |
| | | 50342 | | 50020, | | 50206 | 50128 or | 50208 |
| | | | | 50050, | | | 50207 | |
| | | | | 50059 or | | | | |
| | | | | 50079 | | | | |
| 4B1 | 28878 | 24872 or | 4844 | 12856 | 20868 | 836, | 8848, | 16860, |
| | | 50323 | | | | 50141 or | 50123, | 50143 or |
| | | | | | | 50153 | 50131, | 50203 |
| | | | | | | | 50136, | |
| | | | | | | | 50139, | |
| | | | | | | | 50142, | |
| | | | | | | | 50145, | |
| | | | | | | | 50148, | |
| | | | | | | | 50154, | |
| | | | | | | | 50160, | |
| | | | | | | | 50181, | |
| | | | | | | | 50184, | |
| | | | | | | | 50199, | |
| | | | | | | | 50202, | |
| | | | | | | | 50213 or | |
| | | | | | | | 50248 | |
| 190F8 | 30712 or | 26706 or | 6678, | 14690, | 22702 or | 2672, | 10684 or | 18696, |
| | 50271 | 50318 | 50007, | 50017, | 50018 | 50138 or | 50139 | 50140, or |
| | | | 50016, | 50023, | | 50144 | | 50146 |
| | | | 50037, | 50038 or | | | | |
| | | | 50066, | 50088 | | | | |
| | | | 50072 | | | | | |
| | | | 50084, | | | | | |
| | | | 50237 or | | | | | |
| | | | 50253 | | | | | |
| 191G1 | 30628 or | 26622 or | 6594, | 14606, | 22618 or | 2588, | 10600, | 18612 or |
| | 50271 | 50318 | 50004, | 50008 or | 50018 | 50138, | 50123, | 50140 |
| | | | 50007, | 50017 | | 50144, | 50131, | |
| | | | 50016, | | | 50147, | 50136, | |
| | | | 50022, | | | 50183, or | 50139, | |
| | | | 50025, | | | 50212 | 50142, | |
| | | | 50037, | | | | 50145, | |
| | | | 50066, | | | | 50148, | |
| | | | 50072, | | | | 50154, | |
| | | | 50084, | | | | 50160, | |
| | | | 50087, | | | | 50181, | |
| | | | 50096, | | | | 50184, | |
| | | | 50099, | | | | 50199, | |
| | | | 50107, | | | | 50202, | |
| | | | 50237 or | | | | 50213 or | |
| | | | 50252 | | | | 50214 | |
| 191G10 | 30846 or | 26840 or | 6812, | 14824, | 22836 or | 2806, | 10818 or | 18830 or |
| | 50271 | 50318 | 50004, | 50017, | 50018 | 50138 or | 50139 | 50140 |
| | | | 50007, | 50023, | | 50144 | | |
| | | | 50016, | 50038, or | | | | |
| | | | 50022, | 50088 | | | | |
| | | | 50025, | | | | | |
| | | | 50037, | | | | | |
| | | | 50066, | | | | | |
| | | | 50072, | | | | | |
| | | | 50084, | | | | | |
| | | | 50087, | | | | | |
| | | | 50096, | | | | | |
| | | | 50099, | | | | | |
| | | | 50107, | | | | | |
| | | | 50237 or | | | | | |
| | | | 50253 | | | | | |
| 194C1 | 30816 | 26810 | 6782, | 14794, | 22806 | 2776, | 10788, | 18800 or |
| | | | 50004, | 50008, or | | 50138, | 50123, | 50140 |
| | | | 50007, | 50017 | | 50144, | 50131, | |
| | | | 50016, | | | 50147, | 50136, | |
| | | | 50022, | | | 50183 or | 50139, | |
| | | | 50025, | | | 50212 | 50142, | |
| | | | 50037, | | | | 50145, | |
| | | | 50066, | | | | 50148, | |
| | | | 50072, | | | | 50154, | |
| | | | 50084, | | | | 50160, | |
| | | | 50087, | | | | 50181, | |
| | | | 50096, | | | | 50184, | |
| | | | 50099, | | | | 50199, | |
| | | | 50107, | | | | 50202, | |
| | | | 50237 or | | | | 50213 or | |
| | | | 50253 | | | | 50248 | |
| 197G3 | 30888 or | 26882 or | 6854, | 14866, | 22878 or | 2848, | 10860, | 18872 or |
| | 50273 | 50320 | 50016 or | 50017, | 50024 | 50138 or | 50123, | 50140 |
| | | | 50022 | 50023, | | 50144 | 50131, | |
| | | | | 50038, or | | | 50136, | |
| | | | | 50088 | | | 50139, | |
| | | | | | | | 50142, | |
| | | | | | | | 50145, | |
| | | | | | | | 50148, | |
| | | | | | | | 50154, | |
| | | | | | | | 50160, | |
| | | | | | | | 50181, | |
| | | | | | | | 50184, | |
| | | | | | | | 50199, | |
| | | | | | | | 50202, | |
| | | | | | | | 50213 or | |
| | | | | | | | 50248 | |
| 198G3 | 30620 or | 26614 or | 6586, | 14598, | 22610 or | 2580 or | 10592 or | 18604 or |
| | 50271 | 50318 | 50007, | 50017, or | 50018 | 50138 | 50139 | 50140 |
| | | | 50016, | 50038 | | | | |
| | | | 50037, | | | | | |
| | | | 50066, | | | | | |
| | | | 50072, | | | | | |
| | | | 50084, | | | | | |
| | | | 50237 or | | | | | |
| | | | 50253 | | | | | |
| 75G3 | 29714 or | 25708 or | 5680, | 13692 | 21704 or | 1674 or | 9686 or | 17698 or |
| | 50283 | 50314 | 50010 or | | 50235 | 50127 | 50128 | 50129 |
| | | | 50233 | | | | | |
| 218G4 | 31786 or | 27780 or | 7750, | 15762, | 23774 | 3746 or | 11758 or | 19770 or |
| | 50298 | 50335 | 50004, | 50005, | | 50189 | 50190 | 50191 |
| | | | 50025, | 50008, | | | | |
| | | | 50037, | 50017, | | | | |
| | | | 50087, | 50023, | | | | |
| | | | 50096 or | 50026, | | | | |
| | | | 50253 | 50038, | | | | |
| | | | | 50053, | | | | |
| | | | | 50067, | | | | |
| | | | | 50073, | | | | |
| | | | | 50085, | | | | |
| | | | | 50088, | | | | |
| | | | | 50100, | | | | |
| | | | | 50108, | | | | |
| | | | | 50238 or | | | | |
| | | | | 50254 | | | | |
| 193E7 | 30796 | 26790 or | 6762 | 14774, | 22786 | 2756, | 10768, | 18780 or |
| | | 50312 | | 50011, or | | 50122, | 50123 or | 50124 |
| | | | | 50234 | | 50130, | 50142 | |
| | | | | | | 50135, | | |
| | | | | | | 50198, or | | |
| | | | | | | 50247 | | |
| 198D2 | 31604 or | 27598 or | 7568, | 15580 or | 23592 | 3564 or | 11576 or | 19588 or |
| | 50273 | 50335 | 50004, | 50023 | | 50189 | 50190 | 50191 |
| | | | 50007, | | | | | |
| | | | 50016, | | | | | |
| | | | 50022, | | | | | |
| | | | 50025, | | | | | |
| | | | 50037, | | | | | |
| | | | 50066, | | | | | |
| | | | 50072, | | | | | |
| | | | 50084, | | | | | |
| | | | 50087, | | | | | |
| | | | 50096, | | | | | |
| | | | 50099, | | | | | |
| | | | 50107, | | | | | |
| | | | 50237 or | | | | | |
| | | | 50253 | | | | | |
| 202A3 | 30972 | 26966 or | 6938 | 14950 | 22962 | 2932, | 10944, | 18956 or |
| | | 50317 | | | | 50122, | 50123, | 50137 |
| | | | | | | 50130, | 50131, | |
| | | | | | | 50135, | 50136, | |
| | | | | | | 50198, or | 50139, | |
| | | | | | | 50247 | 50142, | |
| | | | | | | | 50148, or | |
| | | | | | | | 50213 | |
| 7E11 | 28914 or | 24908 or | 4880, | 12892 or | 20904 or | 872 or | 8884, | 16896, or |
| | 50273 | 50319 | 50004, | 50263 or | 50024 | 50141 or | 50123, | 50143 |
| | | | 50007, | 50023 | | 50153 | 50131, | |
| | | | 50022, | | | | 50136, | |
| | | | 50025 or | | | | 50139, | |
| | | | 50037 | | | | 50142, | |
| | | | | | | | 50145, | |
| | | | | | | | 50148, | |
| | | | | | | | 50154, | |
| | | | | | | | 50160, | |
| | | | | | | | 50181, | |
| | | | | | | | 50199 or | |
| | | | | | | | 50213 | |
| 22G5 | 28368 | 24362 or | 4334, | 12346 or | 20358 or | 326, | 8338, | 16350 |
| | | 50323 | 50031, | 50032 | 50033 | 50141, | 50123, | |
| | | | 50034, | | | 50153, | 50131, | |
| | | | 50055, | | | 50180 or | 50136, | |
| | | | 50093, | | | 50201 | 50139, | |
| | | | 50113 or | | | | 50142, | |
| | | | 50116 | | | | 50148, | |
| | | | | | | | 50154 or | |
| | | | | | | | 50160 | |
| 5E5 | 29016 or | 25010 or | 4982, | 12994, | 21006, | 974, | 8986, | 16998 or |
| | 50267 | 50315 | 50004, | 50005, | 50006 or | 50122, | 50123, | 50132 |
| | | | 50037 or | 50008, | 50265 | 50130, | 50131, | |
| | | | 50107 | 50017, | | 50135, | 50136, | |
| | | | | 50023, | | 50198, or | 50139, | |
| | | | | 50026, | | 50247 | 50142, | |
| | | | | 50038, | | | 50145, | |
| | | | | 50053, | | | 50148, | |
| | | | | 50067, | | | 50154, | |
| | | | | 50073, | | | 50160, | |
| | | | | 50085, | | | 50181, | |
| | | | | 50088, | | | 50184, | |
| | | | | 50100, | | | 50199, | |
| | | | | 50108, | | | 50202, | |
| | | | | 50238, | | | 50213 or | |
| | | | | 50254 or | | | 50248 | |
| | | | | 50264 | | | | |
| 54E9 | 31488 or | 27482 or | 7452 or | 15464 or | 23476 or | 3448 or | 11460 or | 19472 or |
| | 50303 | 50338 | 50102 | 50103 | 50227 | 50195 | 50196 | 50197 |
| 6G7 | 28880 | 24874 or | 4846, | 12858 | 20870 or | 838 or | 8850 or | 16862 or |
| | | 50334 | 50004, | | 50098 | 50186 | 50187 | 50188 |
| | | | 50007, | | | | | |
| | | | 50016, | | | | | |
| | | | 50022, | | | | | |
| | | | 50025, | | | | | |
| | | | 50037, | | | | | |
| | | | 50066, | | | | | |
| | | | 50072, | | | | | |
| | | | 50084, | | | | | |
| | | | 50087, | | | | | |
| | | | 50096, | | | | | |
| | | | 50099, | | | | | |
| | | | 50107, | | | | | |
| | | | 50237 or | | | | | |
| | | | 50253 | | | | | |
| 176H4 | 30542 or | 26536 or | 6508, | 14520, | 22532, or | 2502, | 10514, | 18526 or |
| | 50282 | 50322 | 50004, | 50023, | 50255 | 50150, or | 50151, | 50152 |
| | | | 50007, | 50053, | | 50174 | 50175 or | |
| | | | 50016, | 50085 or | | | 50205 | |
| | | | 50022, | 50254 | | | | |
| | | | 50025, | | | | | |
| | | | 50037, | | | | | |
| | | | 50066, | | | | | |
| | | | 50072, | | | | | |
| | | | 50084, | | | | | |
| | | | 50087, | | | | | |
| | | | 50096, | | | | | |
| | | | 50099, | | | | | |
| | | | 50107, | | | | | |
| | | | 50237 or | | | | | |
| | | | 50253 | | | | | |
| 194C10 | 30832 | 26826 or | 6798 or | 14810, | 22822 | 2792 or | 10804 or | 18816 or |
| | | 50314 | 50233 | 50011 or | | 50146 | 50128 | 50129 |
| | | | | 50234 | | | | |

[0255] In the exemplary embodiments described above, the antigen binding proteins maintain desired binding to the various desired species of ASGR, ASGR-1 and/or ASGR-2.

[0256] In another embodiment, the light-chain variable domain comprises a sequence of amino acids that is at least 70%, 75%, 80%, 85%, 90%, 91%, 92%, 93%, 94%, 95%, 96%, 97%, 98%, 99% or 100% identical to the sequence of a light chain variable domain listed above.

[0257] In another embodiment, the light chain variable domain comprises a sequence of amino acids that is encoded by a nucleotide sequence that is at least 70%, 75%, 80%, 85%, 90%, 91%, 92%, 93%, 94%, 95%, 96%, 97%, 98%, 99% or 100% identical to the polynucleotide sequence listed above. In another embodiment, the light chain variable domain comprises a sequence of amino acids that is encoded by a polynucleotide that hybridizes under moderately stringent conditions to the complement of a polynucleotide that encodes a light chain variable domain selected from the sequences listed above. In another embodiment, the light chain variable domain comprises a sequence of amino acids that is encoded by a polynucleotide that hybridizes under stringent conditions to the complement of a polynucleotide that encodes a light chain variable domain selected from the group consisting of the sequences listed above.

[0258] In another embodiment, the heavy chain variable domain comprises a sequence of amino acids that is at least 70%, 75%, 80%, 85%, 90%, 91%, 92%, 93%, 94%, 95%, 96%, 97%, 98%, 99% or 100% identical to the sequence of a heavy chain variable domain selected from the sequences listed above. In another embodiment, the heavy chain variable domain comprises a sequence of amino acids that is encoded by a nucleotide sequence that is at least 70%, 75%, 80%, 85%, 90%, 91%, 92%, 93%, 94%, 95%, 96%, 97%, 98%, 99% or 100% identical to a nucleotide sequence that encodes a heavy chain variable domain selected from the sequences listed above. In another embodiment, the heavy chain variable domain comprises a sequence of amino acids that is encoded by a polynucleotide that hybridizes under moderately stringent conditions to the complement of a polynucleotide that encodes a heavy chain variable domain selected from the sequences listed above. In another embodiment, the heavy chain variable domain comprises a sequence of amino acids that is encoded by a polynucleotide that hybridizes under stringent conditions to the complement of a polynucleotide that encodes a heavy chain variable domain selected from the sequences listed above.

[0259] In the exemplary embodiments described above, the antigen binding proteins maintain desired binding to the various desired species of ASGR, ASGR-1 and/or ASGR-2.

[0260] Antigen binding proteins of the invention (e.g., antibodies) can comprise any constant region known in the art. The light chain constant region can be, for example, a kappa- or lambda-type light chain constant region, e.g., a human kappa- or lambda-type light chain constant region. The heavy chain constant region can be, for example, an alpha-, delta-, epsilon-, gamma-, or mu-type heavy chain constant regions, e.g., a human alpha-, delta-, epsilon-, gamma-, or mu-type heavy chain constant region.

[0261] Techniques are known for deriving an antibody of a different subclass or isotype from an antibody of interest, i.e., subclass switching. Thus, IgG antibodies may be derived from an IgM antibody, for example, and vice versa. Such techniques allow the preparation of new antibodies that possess the antigen-binding properties of a given antibody (the parent antibody), but also exhibit biological properties associated with an antibody isotype or subclass different from that of the parent antibody. Recombinant DNA techniques may be employed. Cloned DNA encoding particular antibody polypeptides may be employed in such procedures, e.g., DNA encoding the constant domain of an antibody of the desired isotype. See also Lanitto et al., Methods Mol. Biol. 178:303-16 (2002).

[0262] In one embodiment, an antigen binding protein of the invention further comprises the constant light chain kappa or lambda domains or a fragment of these. Exemplary sequences of the light chain constant regions and polynucleotides encoding them are provided in Table 15 below, and are generally well known in the art. In another embodiment, an antigen binding protein of the invention further comprises a heavy chain constant domain, or a fragment thereof, such as the IgG1 or IgG2 heavy chain constant region provided in Table 15.

[0263] The antigen binding proteins (for example, antibodies) of the present invention include those having a desired isotype (for example, IgA, IgG1, IgG2, IgG3, IgG4, IgM, IgE, and IgD) as well as Fab or F(ab′)2 fragments thereof. Moreover, if an IgG4 is desired, it may also be desired to introduce a point mutation in the hinge region as described in Bloom et al., 1997, Protein Science 6:407, (incorporated by reference herein) to alleviate a tendency to form intra-H chain disulfide bonds that can lead to heterogeneity in the IgG4 antibodies.

### Generation of Antibodies

[0264] Antibodies of the invention may be prepared by techniques that are well known to those skilled in the art. For example, by immunizing an animal (e.g., a mouse or rat or rabbit) and then by immortalizing spleen cells harvested from the animal after completion of the immunization schedule. The spleen cells can be immortalized using any technique known in the art, e.g., by fusing them with myeloma cells to produce hybridomas. See, for example, Antibodies; Harlow and Lane, Cold Spring Harbor Laboratory Press, 1^{st} Edition, e.g. from 1988, or 2^{nd} Edition, e.g. from 2014).

[0265] In one embodiment, a humanized monoclonal antibody comprises the variable domain of a murine antibody (or all or part of the antigen binding site thereof) and a constant domain derived from a human antibody. Alternatively, a humanized antibody fragment may comprise the antigen binding site of a murine monoclonal antibody and a variable domain fragment (lacking the antigen-binding site) derived from a human antibody. Procedures for the production of engineered monoclonal antibodies include those described in Riechmann et al., 1988, Nature 332:323, Liu et al., 1987, Proc. Nat. Acad. Sci. USA 84:3439, Larrick et al., 1989, Bio/Technology 7:934, and Winter et al., 1993, TIPS 14:139. In one embodiment, the chimeric antibody is a CDR grafted antibody. Techniques for humanizing antibodies are discussed in, e.g., U.S. Pat. Nos. 5,869,619; 5,225,539; 5,821,337; 5,859,205; 6,881,557, Padlan et al., 1995, FASEB J. 9:133-39, Tamura et al., 2000, J. Immunol. 164:1432-41, Zhang, W., et al., Molecular Immunology. 42(12):1445-1451, 2005; Hwang W. et al., Methods. 36(1):35-42, 2005; Dall'Acqua W F, et al., Methods 36(1):43-60, 2005; and Clark, M., Immunology Today. 21(8):397-402, 2000.

[0266] An antibody of the present invention may also be a fully human monoclonal antibody. Fully human monoclonal antibodies may be generated by any number of techniques with which those having ordinary skill in the art will be familiar. Such methods include, but are not limited to, Epstein Barr Virus (EBV) transformation of human peripheral blood cells (e.g., containing B lymphocytes), in vitro immunization of human B-cells, fusion of spleen cells from immunized transgenic mice carrying inserted human immunoglobulin genes, isolation from human immunoglobulin V region phage libraries, or other procedures as known in the art and based on the disclosure herein.

[0267] Procedures have been developed for generating human monoclonal antibodies in non-human animals. For example, mice in which one or more endogenous immunoglobulin genes have been inactivated by various means have been prepared. Human immunoglobulin genes have been introduced into the mice to replace the inactivated mouse genes. In this technique, elements of the human heavy and light chain locus are introduced into strains of mice derived from embryonic stem cell lines that contain targeted disruptions of the endogenous heavy chain and light chain loci (see also Bruggemann et al., Curr. Opin. Biotechnol. 8:455-58 (1997)). For example, human immunoglobulin transgenes may be mini-gene constructs, or transloci on yeast artificial chromosomes, which undergo B-cell-specific DNA rearrangement and hypermutation in the mouse lymphoid tissue.

[0268] Antibodies produced in the animal incorporate human immunoglobulin polypeptide chains encoded by the human genetic material introduced into the animal. In one embodiment, a non-human animal, such as a transgenic mouse, is immunized with a suitable immunogen.

[0269] Examples of techniques for production and use of transgenic animals for the production of human or partially human antibodies are described in U.S. Pat. Nos. 5,814,318, 5,569,825, and 5,545,806, Davis et al., Production of human antibodies from transgenic mice in Lo, ed. Antibody Engineering: Methods and Protocols, Humana Press, NJ:191-200 (2003), Kellermann et al., 2002, Curr Opin Biotechnol. 13:593-97, Russel et al., 2000, Infect Immun. 68:1820-26, Gallo et al., 2000, Eur J Immun. 30:534-40, Davis et al., 1999, Cancer Metastasis Rev. 18:421-25, Green, 1999, J Immunol Methods. 231:11-23, Jakobovits, 1998, Advanced Drug Delivery Reviews 31:33-42, Green et al., 1998, J Exp Med. 188:483-95, Jakobovits A, 1998, Exp. Opin. Invest. Drugs. 7:607-14, Tsuda et al., 1997, Genomics. 42:413-21, Mendez et al., 1997, Nat Genet. 15:146-56, Jakobovits, 1994, Curr Biol. 4:761-63, Arbones et al., 1994, Immunity. 1:247-60, Green et al., 1994, Nat Genet. 7:13-21, Jakobovits et al., 1993, Nature. 362:255-58, Jakobovits et al., 1993, Proc Natl Acad Sci USA. 90:2551-55. Chen, J., M. Trounstine, F. W. Alt, F. Young, C. Kurahara, J. Loring, D. Huszar. “Immunoglobulin gene rearrangement in B-cell deficient mice generated by targeted deletion of the JH locus.” International Immunology 5 (1993): 647-656, Choi et al., 1993, Nature Genetics 4: 117-23, Fishwild et al., 1996, Nature Biotechnology 14: 845-51, Harding et al., 1995, Annals of the New York Academy of Sciences, Lonberg et al., 1994, Nature 368: 856-59, Lonberg, 1994, Transgenic Approaches to Human Monoclonal Antibodies in Handbook of Experimental Pharmacology 113: 49-101, Lonberg et al., 1995, Internal Review of Immunology 13: 65-93, Neuberger, 1996, Nature Biotechnology 14: 826, Taylor et al., 1992, Nucleic Acids Research 20: 6287-95, Taylor et al., 1994, International Immunology 6: 579-91, Tomizuka et al., 1997, Nature Genetics 16: 133-43, Tomizuka et al., 2000, Proceedings of the National Academy of Sciences USA 97: 722-27, Tuaillon et al., 1993, Proceedings of the National Academy of Sciences USA 90: 3720-24, and Tuaillon et al., 1994, Journal of Immunology 152: 2912-20; Lonberg et al., Nature 368:856, 1994; Taylor et al., Int. Immun. 6:579, 1994; U.S. Pat. No. 5,877,397; Bruggemann et al., 1997 Curr. Opin. Biotechnol. 8:455-58; Jakobovits et al., 1995 Ann. N. Y. Acad. Sci. 764:525-35. In addition, protocols involving the XenoMouse® (Abgenix, now Amgen, Inc.) are described, for example in U.S. Pub. No. 2005/0118643 and WO 05/694879, WO 98/24838, WO 00/76310, and U.S. Pat. No. 7,064,244.

[0270] Lymphoid cells from the immunized transgenic mice are fused with myeloma cells for example to produce hybridomas. Myeloma cells for use in hybridoma-producing fusion procedures preferably are non-antibody-producing, have high fusion efficiency, and enzyme deficiencies that render them incapable of growing in certain selective media which support the growth of only the desired fused cells (hybridomas). Examples of suitable cell lines for use in such fusions include Sp-20, P3-X63/Ag8, P3-X63-Ag8.653, NS1/1.Ag41, Sp210-Ag14, FO, NSO/U, MPC-11, MPC11-X45-GTG 1.7 and S194/5XX0 Bul; examples of cell lines used in rat fusions include R210.RCY3, Y3-Ag 1.2.3, IR983F and 4B210. Other cell lines useful for cell fusions are U-266, GM1500-GRG2, LICR-LON-HMy2 and UC729-6.

[0271] The lymphoid (e.g., spleen) cells and the myeloma cells may be combined for a few minutes with a membrane fusion-promoting agent, such as polyethylene glycol or a nonionic detergent, and then plated at low density on a selective medium that supports the growth of hybridoma cells but not unfused myeloma cells. One selection media is HAT (hypoxanthine, aminopterin, thymidine). After a sufficient time, usually about one to two weeks, colonies of cells are observed. Single colonies are isolated, and antibodies produced by the cells may be tested for binding activity to, for example, human ASGR-1, using any one of a variety of immunoassays known in the art and described herein. The hybridomas are cloned (e.g., by limited dilution cloning or by soft agar plaque isolation) and positive clones that produce an antibody specific to, for example, human ASGR-1, are selected and cultured. The monoclonal antibodies from the hybridoma cultures may be isolated from the supernatants of hybridoma cultures. Thus the present invention provides hybridomas that comprise polynucleotides encoding the antigen binding proteins of the invention in the chromosomes of the cell. These hybridomas can be cultured according to methods described herein and known in the art.

[0272] Another method for generating human antibodies of the invention includes immortalizing human peripheral blood cells by EBV transformation. See, e.g., U.S. Pat. No. 4,464,456. Such an immortalized B-cell line (or lymphoblastoid cell line) producing a monoclonal antibody that specifically binds to, for example, human ASGR-1, can be identified by immunodetection methods as provided herein, for example, an ELISA, and then isolated by standard cloning techniques. The stability of the lymphoblastoid cell line producing an antibody may be improved by fusing the transformed cell line with a murine myeloma to produce a mouse-human hybrid cell line according to methods known in the art (see, e.g., Glasky et al., Hybridoma 8:377-89 (1989)). Still another method to generate human monoclonal antibodies is in vitro immunization, which includes priming human splenic B-cells with antigen, followed by fusion of primed B-cells with a heterohybrid fusion partner. See, e.g., Boerner et al., 1991 J. Immunol. 147:86-95.

[0273] In certain embodiments, a B-cell that is producing a desired antibody is selected and the light chain and heavy chain variable regions are cloned from the B-cell according to molecular biology techniques known in the art (WO 92/02551; U.S. Pat. No. 5,627,052; Babcook et al., Proc. Natl. Acad. Sci. USA 93:7843-48 (1996)) and described herein. B-cells from an immunized animal may be isolated from the spleen, lymph node, or peripheral blood sample by selecting a cell that is producing a desired antibody. B-cells may also be isolated from humans, for example, from a peripheral blood sample. Methods for detecting single B-cells that are producing an antibody with the desired specificity are well known in the art, for example, by plaque formation, fluorescence-activated cell sorting, in vitro stimulation followed by detection of specific antibody, and the like. Methods for selection of specific antibody-producing B-cells include, for example, preparing a single cell suspension of B-cells in soft agar that contains antigen. Binding of the specific antibody produced by the B-cell to the antigen results in the formation of a complex, which may be visible as an immunoprecipitate. After the B-cells producing the desired antibody are selected, the specific antibody genes may be cloned by isolating and amplifying DNA or mRNA according to methods known in the art and described herein.

[0274] An additional method for obtaining antibodies of the invention is by phage display. See, e.g., Winter et al., 1994 Annu. Rev. Immunol. 12:433-55; Burton et al., 1994 Adv. Immunol. 57:191-280. Human or murine immunoglobulin variable region gene combinatorial libraries may be created in phage vectors that can be screened to select Ig fragments (Fab, Fv, sFv, or multimers thereof) that bind specifically to TGF-beta binding protein or variant or fragment thereof. See, e.g., U.S. Pat. No. 5,223,409; Huse et al., 1989 Science 246:1275-81; Sastry et al., Proc. Natl. Acad. Sci. USA 86:5728-32 (1989); Alting-Mees et al., Strategies in Molecular Biology 3:1-9 (1990); Kang et al., 1991 Proc. Natl. Acad. Sci. USA 88:4363-66; Hoogenboom et al., 1992 J. Molec. Biol. 227:381-388; Schlebusch et al., 1997 Hybridoma 16:47-52 and references cited therein. For example, a library containing a plurality of polynucleotide sequences encoding Ig variable region fragments may be inserted into the genome of a filamentous bacteriophage, such as M13 or a variant thereof, in frame with the sequence encoding a phage coat protein. A fusion protein may be a fusion of the coat protein with the light chain variable region domain and/or with the heavy chain variable region domain. According to certain embodiments, immunoglobulin Fab fragments may also be displayed on a phage particle (see, e.g., U.S. Pat. No. 5,698,426).

[0275] Heavy and light chain immunoglobulin cDNA expression libraries may also be prepared in lambda phage, for example, using λImmunoZap™(H) and λImmunoZap™(L) vectors (Stratagene, La Jolla, California). Briefly, mRNA is isolated from a B-cell population, and used to create heavy and light chain immunoglobulin cDNA expression libraries in the λImmunoZap(H) and λImmunoZap(L) vectors. These vectors may be screened individually or co-expressed to form Fab fragments or antibodies (see Huse et al., supra; see also Sastry et al., supra). Positive plaques may subsequently be converted to a non-lytic plasmid that allows high level expression of monoclonal antibody fragments from E. coli.

[0276] In one embodiment, in a hybridoma the variable regions of a gene expressing a monoclonal antibody of interest are amplified using nucleotide primers. These primers may be synthesized by one of ordinary skill in the art, or may be purchased from commercially available sources. (See, e.g., Stratagene (La Jolla, California), which sells primers for mouse and human variable regions including, among others, primers for V_{Ha}, V_{Hb}, V_{Hc}, V_{Hd}, C_{Hl}, V_{L} and CL regions.) These primers may be used to amplify heavy or light chain variable regions, which may then be inserted into vectors such as ImmunoZAP™H or ImmunoZAP™L (Stratagene), respectively. These vectors may then be introduced into E. coli, yeast, or mammalian-based systems for expression. Large amounts of a single-chain protein containing a fusion of the V_{H} and V_{L} domains may be produced using these methods (see Bird et al., Science 242:423-426, 1988).

[0277] In certain embodiments, the antigen binding proteins of the invention are obtained from transgenic animals (e.g., mice) that produce “heavy chain only” antibodies or “HCAbs.” HCAbs are analogous to naturally occurring camel and llama single-chain VHH antibodies.

[0278] See, for example, U.S. Pat. Nos. 8,507,748 and 8,502,014, and U.S. Patent Application Publication Nos. US2009/0285805A1, US2009/0169548A1, US2009/0307787A1, US2011/0314563A1, US2012/0151610A1, WO2008/122886A2, and WO2009/013620A2.

[0279] Once cells producing antibodies according to the invention have been obtained using any of the above-described immunization and other techniques, the specific antibody genes may be cloned by isolating and amplifying DNA or mRNA therefrom according to standard procedures as described herein. The antibodies produced therefrom may be sequenced and the CDRs identified and the DNA coding for the CDRs may be manipulated as described previously to generate other antibodies according to the invention.

[0280] In certain embodiments, antibodies are generated by first identifying antibodies that bind to cells expressing, for example, human ASGR, human ASGR-1 and/or human ASGR-2, and/or compete for binding with the antibodies described in this application.

[0281] It will be understood by one skilled in the art that some proteins, such as antibodies, may undergo a variety of posttranslational modifications. The type and extent of these modifications often depends on the host cell line used to express the protein as well as the culture conditions. Such modifications may include variations in glycosylation, methionine oxidation, diketopiperazine formation, aspartate isomerization and asparagine deamidation. A frequent modification is the loss of a carboxy-terminal basic residue (such as lysine or arginine) due to the action of carboxypeptidases (as described in Harris, R. J. Journal of Chromatography 705:129-134, 1995).

[0282] An alternative method for production of a murine monoclonal antibody is to inject the hybridoma cells into the peritoneal cavity of a syngeneic mouse, for example, a mouse that has been treated (e.g., pristane-primed) to promote formation of ascites fluid containing the monoclonal antibody. Monoclonal antibodies can be isolated and purified by a variety of well-established techniques. Such isolation techniques include affinity chromatography with Protein-A Sepharose, size-exclusion chromatography, and ion-exchange chromatography (see, for example, Coligan at pages 2.7.1-2.7.12 and pages 2.9.1-2.9.3; Baines et al., “Purification of Immunoglobulin G (IgG),” in Methods in Molecular Biology, Vol. 10, pages 79-104 (The Humana Press, Inc. 1992)). Monoclonal antibodies may be purified by affinity chromatography using an appropriate ligand selected based on particular properties of the antibody (e.g., heavy or light chain isotype, binding specificity, etc.). Examples of a suitable ligand, immobilized on a solid support, include Protein A, Protein G, an anticonstant region (light chain or heavy chain) antibody, an anti-idiotype antibody, and a TGF-beta binding protein, or fragment or variant thereof.

[0283] Molecular evolution of the complementarity determining regions (CDRs) in the center of the antibody binding site also has been used to isolate antibodies with increased affinity, for example, those as described by Schier et al., 1996, J. Mol. Biol. 263:551. Accordingly, such techniques are useful in preparing antibodies of the invention.

[0284] Although human, partially human, or humanized antibodies will be suitable for many applications, particularly those involving administration of the antibody to a human subject, other types of antigen binding proteins will be suitable for certain applications. The non-human antibodies of the invention can be, for example, derived from any antibody-producing animal, such as mouse, rat, rabbit, goat, donkey, or non-human primate (for example, monkey such as cynomologus or rhesus monkey or ape (e.g., chimpanzee)). Non-human antibodies of the invention can be used, for example, in in vitro and cell-culture based applications, or any other application where an immune response to the antibody of the invention does not occur, is insignificant, can be prevented, is not a concern, or is desired. An antibody from a particular species can be made by, for example, immunizing an animal of that species with the desired immunogen or using an artificial system for generating antibodies of that species (e.g., a bacterial or phage display-based system for generating antibodies of a particular species), or by converting an antibody from one species into an antibody from another species by replacing, e.g., the constant region of the antibody with a constant region from the other species, or by replacing one or more amino acid residues of the antibody so that it more closely resembles the sequence of an antibody from the other species. In one embodiment, the antibody is a chimeric antibody comprising amino acid sequences derived from antibodies from two or more different species.

[0285] Antibodies also may be prepared by any of a number of other conventional techniques. For example, they may be purified from cells that naturally express them (e.g., an antibody can be purified from a hybridoma that produces it), or produced in recombinant expression systems, using any technique known in the art. See, for example, Monoclonal Antibodies, Hybridomas: A New Dimension in Biological Analyses, Kenneth et al. (eds.), Plenum Press, New York (1980); and Antibodies: A Laboratory Manual, Harlow and Land (eds.), Cold Spring Harbor Laboratory Press, Cold Spring Harbor, NY, (1988).

[0286] Where it is desired to improve the affinity of antibodies according to the invention containing one or more of the above-mentioned CDRs can be obtained by a number of affinity maturation protocols including maintaining the CDRs (Yang et al., J. Mol. Biol., 254, 392-403, 1995), chain shuffling (Marks et al., Bio/Technology, 10, 779-783, 1992), use of mutation strains of E. coli. (Low et al., J. Mol. Biol., 250, 350-368, 1996), DNA shuffling (Patten et al., Curr. Opin. Biotechnol., 8, 724-733, 1997), phage display (Thompson et al., J. Mol. Biol., 256, 7-88, 1996) and additional PCR techniques (Crameri, et al., Nature, 391, 288-291, 1998). All of these methods of affinity maturation are discussed by Vaughan et al. (Nature Biotechnology, 16, 535-539, 1998).

[0287] Single chain antibodies may be formed by linking heavy and light chain variable domain (Fv region) fragments via an amino acid bridge (short peptide linker), resulting in a single polypeptide chain. Such single-chain Fvs (scFvs) have been prepared by fusing DNA encoding a peptide linker between DNAs encoding the two variable domain polypeptides (V_{L} and V_{H}). The resulting polypeptides can fold back on themselves to form antigen-binding monomers, or they can form multimers (e.g., dimers, trimers, or tetramers), depending on the length of a flexible linker between the two variable domains (Kortt et al., 1997, Prot. Eng. 10:423; Kortt et al., 2001, Biomol. Eng. 18:95-108). By combining different V_{L} and V_{H}-comprising polypeptides, one can form multimeric scFvs that bind to different epitopes (Kriangkum et al., 2001, Biomol. Eng. 18:31-40). Techniques developed for the production of single chain antibodies include those described in U.S. Pat. No. 4,946,778; Bird, 1988, Science 242:423; Huston et al., 1988, Proc. Natl. Acad. Sci. USA 85:5879; Ward et al., 1989, Nature 334:544, de Graaf et al., 2002, Methods Mol Biol. 178:379-87.

[0288] Antigen binding fragments derived from an antibody can also be obtained, for example, by proteolytic hydrolysis of the antibody, for example, pepsin or papain digestion of whole antibodies according to conventional methods. By way of example, antibody fragments can be produced by enzymatic cleavage of antibodies with pepsin to provide a 5S fragment termed F(ab′)2. This fragment can be further cleaved using a thiol reducing agent to produce 3.5S Fab′ monovalent fragments. Optionally, the cleavage reaction can be performed using a blocking group for the sulfhydryl groups that result from cleavage of disulfide linkages. As an alternative, an enzymatic cleavage using papain produces two monovalent Fab fragments and an Fc fragment directly. These methods are described, for example, by Goldenberg, U.S. Pat. No. 4,331,647, Nisonoff et al., Arch. Biochem. Biophys. 89:230, 1960; Porter, Biochem. J. 73:119, 1959; Edelman et al., in Methods in Enzymology 1:422 (Academic Press 1967); and by Andrews, S. M. and Titus, J. A. in Current Protocols in Immunology (Coligan J. E., et al., eds), John Wiley & Sons, New York (2003), pages 2.8.1-2.8.10 and 2.10A.1-2.10A.5. Other methods for cleaving antibodies, such as separating heavy chains to form monovalent light-heavy chain fragments (Fd), further cleaving of fragments, or other enzymatic, chemical, or genetic techniques may also be used, so long as the fragments bind to the antigen that is recognized by the intact antibody.

[0289] Another exemplary form of an antigen binding protein is a peptide comprising one or more complementarity determining regions (CDRs) of an antibody. CDRs can be obtained by constructing polynucleotides that encode the CDR of interest. Such polynucleotides are prepared, for example, by using the polymerase chain reaction to synthesize the variable region using mRNA of antibody-producing cells as a template (see, for example, Larrick et al., Methods: A Companion to Methods in Enzymology 2:106, 1991; Courtenay-Luck, “Genetic Manipulation of Monoclonal Antibodies,” in Monoclonal Antibodies: Production, Engineering and Clinical Application, Ritter et al. (eds.), page 166 (Cambridge University Press 1995); and Ward et al., “Genetic Manipulation and Expression of Antibodies,” in Monoclonal Antibodies: Principles and Applications, Birch et al., (eds.), page 137 (Wiley-Liss, Inc. 1995)). The antibody fragment further may comprise at least one variable region domain of an antibody described herein. Thus, for example, the V region domain may be monomeric and be a V_{H} or V_{L} domain, which is capable of independently binding a desired target (e.g., human ASGR-1) with an affinity at least equal to 10⁻⁷M or less as described herein.

[0290] The variable region may be any naturally occurring variable domain or an engineered version thereof. By engineered version is meant a variable region that has been created using recombinant DNA engineering techniques. Such engineered versions include those created, for example, from a specific antibody variable region by insertions, deletions, or changes in or to the amino acid sequences of the specific antibody. One of ordinary skill in the art can use any known methods for identifying amino acid residues appropriate for engineering, such as the amino acid residues depicted with shading in Tables 21-48 of FIG. 56. Additional examples include engineered variable regions containing at least one CDR and optionally one or more framework amino acids from a first antibody and the remainder of the variable region domain from a second antibody. Engineered versions of antibody variable domains may be generated by any number of techniques with which those having ordinary skill in the art will be familiar, including but not limited to the methods outlined in Example 14 below.

[0291] The variable region may be covalently attached at a C-terminal amino acid to at least one other antibody domain or a fragment thereof. Thus, for example, a VH that is present in the variable region may be linked to an immunoglobulin CH1 domain. Similarly a V_{L} domain may be linked to a C_{K} domain. In this way, for example, the antibody may be a Fab fragment wherein the antigen binding domain contains associated V_{H} and V_{L} domains covalently linked at their C-termini to a CH1 and C_{K} domain, respectively. The CH1 domain may be extended with further amino acids, for example to provide a hinge region or a portion of a hinge region domain as found in a Fab′ fragment, or to provide further domains, such as antibody CH2 and CH3 domains.

### Derivatives and Variants

[0292] The nucleotide sequences of the antigen binding proteins of the present invention, encoding the corresponding amino acid sequences of the antibodies of the present invention, can be altered, for example, by random mutagenesis or by site-directed mutagenesis (e.g., oligonucleotide-directed site-specific mutagenesis) to create an altered polynucleotide comprising one or more particular nucleotide substitutions, deletions, or insertions as compared to the non-mutated polynucleotide. Examples of techniques for making such alterations are described in Walder et al., 1986, Gene 42:133; Bauer et al. 1985, Gene 37:73; Craik, BioTechniques, January 1985, 12-19; Smith et al., 1981, Genetic Engineering: Principles and Methods, Plenum Press; and U.S. Pat. Nos. 4,518,584 and 4,737,462. These and other methods can be used to make, for example, derivatives of the antigen binding proteins that have a desired property, for example, increased affinity, avidity, or specificity for a desired target, increased activity or stability in vivo or in vitro, or reduced in vivo side-effects as compared to the underivatized antibody.

[0293] Other derivatives of the antigen binding proteins within the scope of this invention include covalent or aggregative conjugates of the antigen binding proteins, with other proteins or polypeptides, such as by expression of recombinant fusion proteins comprising heterologous polypeptides fused to the N-terminus or C-terminus of a polypeptide. For example, the conjugated peptide may be a heterologous signal (or leader) polypeptide, e.g., the yeast alpha-factor leader, or a peptide such as an epitope tag. Antigen binding protein-containing fusion proteins can comprise peptides added to facilitate purification or identification of antigen binding protein (e.g., poly-His). An antigen binding protein also can be linked to the FLAG peptide as described in Hopp et al., Bio/Technology 6:1204, 1988, and U.S. Pat. No. 5,011,912. The FLAG peptide is highly antigenic and provides an epitope reversibly bound by a specific monoclonal antibody (mAb), enabling rapid assay and facile purification of expressed recombinant protein. Reagents useful for preparing fusion proteins in which the FLAG peptide is fused to a given polypeptide are commercially available (Sigma, St. Louis, MO).

[0294] In another embodiment, the antigen binding proteins within the scope of this invention include antibody conjugates where antibody is conjugated to a non-proteinaceous chemical (drug) to form an antibody drug conjugate (ADC). Generally the ADC comprises an antibody conjugated to a chemotherapeutic agent, e.g., a cytotoxic agent, a cytostatic agent, a toxin, or a radioactive agent. A linker molecule can be used to conjugate the drug to the antibody. A wide variety of linkers and drugs useful in ADC technology are known in the art and may be used in embodiments of the present invention. (See US20090028856; US2009/0274713; US2007/0031402; WO2005/084390; WO2009/099728; U.S. Pat. Nos. 5,208,020; 5,416,064; 5,475,092; 5,585,499; 6,436,931; 6,372,738; and 6,340,701, all incorporated herein by reference).

[0295] In another embodiment, oligomers that contain one or more antigen binding proteins may be employed in certain embodiments of the present invention. Oligomers may be in the form of covalently-linked or non-covalently-linked dimers, trimers, or higher oligomers. Oligomers comprising two or more antigen binding protein are contemplated for use, with one example being a homodimer. Other oligomers include heterodimers, homotrimers, heterotrimers, homotetramers, heterotetramers, etc.

[0296] One embodiment is directed to oligomers comprising multiple antigen binding proteins joined via covalent or non-covalent interactions between peptide moieties fused to the antigen binding proteins. Such peptides may be peptide linkers (spacers), or peptides that have the property of promoting oligomerization. Leucine zippers and certain polypeptides derived from antibodies are among the peptides that can promote oligomerization of antigen binding proteins attached thereto, as described in more detail below.

[0297] In particular embodiments, the oligomers comprise from two to four antigen binding proteins. The antigen binding proteins of the oligomer may be in any form, such as any of the forms described above, e.g., variants.

[0298] In one embodiment, an oligomer is prepared using polypeptides derived from immunoglobulins. Preparation of fusion proteins comprising certain heterologous polypeptides fused to various portions of antibody-derived polypeptides (including the Fc domain) has been described, e.g., by Ashkenazi et al., 1991, PNAS USA 88:10535; Byrn et al., 1990, Nature 344:677; and Hollenbaugh et al., 1992 “Construction of Immunoglobulin Fusion Proteins”, in Current Protocols in Immunology, Suppl. 4, pages 10.19.1-10.19.11.

[0299] One embodiment of the present invention is directed to a dimer comprising two fusion proteins created by fusing an antigen binding fragment of an anti-ASGR, ASGR-1, and/or ASGR-2 antibody to the Fc region of an antibody. The dimer can be made by, for example, inserting a gene fusion encoding the fusion protein into an appropriate expression vector, expressing the gene fusion in host cells transformed with the recombinant expression vector, and allowing the expressed fusion protein to assemble much like antibody molecules, whereupon interchain disulfide bonds form between the Fc moieties to yield the dimer.

[0300] The term “Fc polypeptide” as used herein includes native and mutein forms of polypeptides derived from the Fc region of an antibody. Truncated forms of such polypeptides containing the hinge region that promotes dimerization also are included. Fusion proteins comprising Fc moieties (and oligomers formed therefrom) offer the advantage of facile purification by affinity chromatography over Protein A or Protein G columns.

[0301] One suitable Fc polypeptide, described in PCT application WO 93/10151 (hereby incorporated by reference), is a single chain polypeptide extending from the N-terminal hinge region to the native C-terminus of the Fc region of a human IgG1 antibody. Another useful Fc polypeptide is the Fc mutein described in U.S. Pat. No. 5,457,035 and in Baum et al., 1994, EMBO J. 13:3992-4001. The amino acid sequence of this mutein is identical to that of the native Fc sequence presented in WO 93/10151, except that amino acid 19 has been changed from Leu to Ala, amino acid 20 has been changed from Leu to Glu, and amino acid 22 has been changed from Gly to Ala. The mutein exhibits reduced affinity for Fc receptors.

[0302] In some embodiments, the variable portion of the heavy and/or light chains of a desired antibody may be substituted for the variable portion of an antibody heavy and/or light chain.

[0303] Alternatively, the oligomer is a fusion protein comprising multiple antigen binding proteins, with or without peptide linkers (spacer peptides). Among the suitable peptide linkers are those described in U.S. Pat. Nos. 4,751,180 and 4,935,233.

[0304] Another method for preparing oligomeric antigen binding proteins involves use of a leucine zipper. Leucine zipper domains are peptides that promote oligomerization of the proteins in which they are found. Leucine zippers were originally identified in several DNA-binding proteins (Landschulz et al., 1988, Science 240:1759), and have since been found in a variety of different proteins. Among the known leucine zippers are naturally occurring peptides and derivatives thereof that dimerize or trimerize. Examples of leucine zipper domains suitable for producing soluble oligomeric proteins are described in PCT application WO 94/10308, and the leucine zipper derived from lung surfactant protein D (SPD) described in Hoppe et al., 1994, FEBS Letters 344:191, hereby incorporated by reference. The use of a modified leucine zipper that allows for stable trimerization of a heterologous protein fused thereto is described in Fanslow et al., 1994, Semin. Immunol. 6:267-78. In one approach, recombinant fusion proteins comprising a desired antibody fragment or derivative fused to a leucine zipper peptide are expressed in suitable host cells, and the soluble oligomeric antibody fragments or derivatives that form are recovered from the culture supernatant.

[0305] In another embodiment, the antigen binding proteins (e.g., antibodies) can be conjugated to a suitable vehicle to enhance the half-life thereof. Suitable vehicles include, but are not limited to Fc, albumin, transferrin, and the like. These and other suitable vehicles are known in the art. Such conjugated CDR peptides may be in monomeric, dimeric, tetrameric, or other form. In one embodiment, one or more water-soluble polymer is bonded at one or more specific position, for example at the amino terminus, of a binding agent. In an example, an antibody derivative comprises one or more water soluble polymer attachments, including, but not limited to, polyethylene glycol, polyoxyethylene glycol, or polypropylene glycol. See, e.g., U.S. Pat. Nos. 4,640,835, 4,496,689, 4,301,144, 4,670,417, 4,791,192 and 4,179,337. In certain embodiments, a derivative comprises one or more of monomethoxy-polyethylene glycol, dextran, cellulose, or other carbohydrate based polymers, poly-(N-vinyl pyrrolidone)-polyethylene glycol, propylene glycol homopolymers, a polypropylene oxide/ethylene oxide co-polymer, polyoxyethylated polyols (e.g., glycerol) and polyvinyl alcohol, as well as mixtures of such polymers. In certain embodiments, one or more water-soluble polymer is randomly attached to one or more side chains. In certain embodiments, PEG can act to improve the therapeutic capacity for a binding agent, such as an antibody. Certain such methods are discussed, for example, in U.S. Pat. No. 6,133,426, which is hereby incorporated by reference for any purpose. In certain embodiments, antibodies of the invention may be chemically bonded with polymers, lipids, or other moieties.

### Nucleic Acids Encoding Antigen Binding Proteins

[0306] In another embodiment, the present invention provides isolated nucleic acid molecules that encode the antigen binding proteins of the present invention. In addition, provided are vectors comprising the nucleic acids, cell comprising the nucleic acids, and methods of making the antigen binding proteins of the invention. The nucleic acids comprise, for example, polynucleotides that encode all or part of an antigen binding protein, for example, one or both chains of an antibody of the invention, or a fragment, derivative, mutein, or variant thereof, polynucleotides sufficient for use as hybridization probes, PCR primers or sequencing primers for identifying, analyzing, mutating or amplifying a polynucleotide encoding a polypeptide, antisense nucleic acids for inhibiting expression of a polynucleotide, and complementary sequences of the foregoing. The nucleic acids can be any length as appropriate for the desired use or function, and can comprise one or more additional sequences, for example, regulatory sequences, and/or be part of a larger nucleic acid, for example, a vector. The nucleic acids can be single-stranded or double-stranded and can comprise RNA and/or DNA nucleotides, and artificial variants thereof (e.g., peptide nucleic acids).

[0307] Nucleic acids encoding antibody polypeptides (e.g., heavy or light chain, variable domain only, or full length) may be isolated from B-cells of mice that have been immunized with antigen. The nucleic acid may be isolated by conventional procedures such as polymerase chain reaction (PCR).

[0308] Nucleic acid sequences encoding the variable regions of the heavy and light chain variable regions are included herein. The skilled artisan will appreciate that, due to the degeneracy of the genetic code, each of the polypeptide sequences disclosed herein is encoded by a large number of other nucleic acid sequences. The present invention provides each degenerate nucleotide sequence encoding each antigen binding protein of the invention.

[0309] The invention further provides nucleic acids that hybridize to other nucleic acids under particular hybridization conditions. Methods for hybridizing nucleic acids are well-known in the art. See, e.g., Current Protocols in Molecular Biology, John Wiley & Sons, N.Y. (1989), 6.3.1-6.3.6. As defined herein, for example, a moderately stringent hybridization condition uses a prewashing solution containing 5× sodium chloride/sodium citrate (SSC), 0.5% SDS, 1.0 mM EDTA (pH 8.0), hybridization buffer of about 50% formamide, 6× SSC, and a hybridization temperature of 550 C (or other similar hybridization solutions, such as one containing about 50% formamide, with a hybridization temperature of 420 C), and washing conditions of 600 C, in 0.5× SSC, 0.1% SDS. A stringent hybridization condition hybridizes in 6×SSC at 450 C, followed by one or more washes in 0.1× SSC, 0.2% SDS at 680 C. Furthermore, one of skill in the art can manipulate the hybridization and/or washing conditions to increase or decrease the stringency of hybridization such that nucleic acids comprising nucleotide sequences that are at least 65, 70, 75, 80, 85, 90, 95, 98 or 99% identical to each other typically remain hybridized to each other. The basic parameters affecting the choice of hybridization conditions and guidance for devising suitable conditions are set forth by, for example, Sambrook, Fritsch, and Maniatis (1989, Molecular Cloning: A Laboratory Manual, Cold Spring Harbor Laboratory Press, Cold Spring Harbor, N.Y., chapters 9 and 11; and Current Protocols in Molecular Biology, 1995, Ausubel et al., eds., John Wiley & Sons, Inc., sections 2.10 and 6.3-6.4), and can be readily determined by those having ordinary skill in the art based on, for example, the length and/or base composition of the DNA. Changes can be introduced by mutation into a nucleic acid, thereby leading to changes in the amino acid sequence of a polypeptide (e.g., an antigen binding protein) that it encodes. Mutations can be introduced using any technique known in the art. In one embodiment, one or more particular amino acid residues are changed using, for example, a site-directed mutagenesis protocol. In another embodiment, one or more randomly selected residues is changed using, for example, a random mutagenesis protocol. However it is made, a mutant polypeptide can be expressed and screened for a desired property.

[0310] Mutations can be introduced into a nucleic acid without significantly altering the biological activity of a polypeptide that it encodes. For example, one can make nucleotide substitutions leading to amino acid substitutions at non-essential amino acid residues. In one embodiment, a nucleotide sequence provided herein for of the antibodies of the present invention, or a desired fragment, variant, or derivative thereof, is mutated such that it encodes an amino acid sequence comprising one or more deletions or substitutions of amino acid residues that are shown herein for the light chains of the antibodies of the present invention or the heavy chains of the antibodies of the present invention to be residues where two or more sequences differ. In another embodiment, the mutagenesis inserts an amino acid adjacent to one or more amino acid residues shown herein for the light chains of the antibodies of the present invention or the heavy chains of the antibodies of the present invention to be residues where two or more sequences differ. Alternatively, one or more mutations can be introduced into a nucleic acid that selectively change the biological activity of a polypeptide that it encodes.

[0311] In another embodiment, the present invention provides vectors comprising a nucleic acid encoding a polypeptide of the invention or a portion thereof. Examples of vectors include, but are not limited to, plasmids, viral vectors, non-episomal mammalian vectors and expression vectors, for example, recombinant expression vectors.

[0312] The recombinant expression vectors of the invention can comprise a nucleic acid of the invention in a form suitable for expression of the nucleic acid in a host cell. The recombinant expression vectors include one or more regulatory sequences, selected on the basis of the host cells to be used for expression, which is operably linked to the nucleic acid sequence to be expressed. Regulatory sequences include those that direct constitutive expression of a nucleotide sequence in many types of host cells (e.g., SV40 early gene enhancer, Rous sarcoma virus promoter and cytomegalovirus promoter), those that direct expression of the nucleotide sequence only in certain host cells (e.g., tissue-specific regulatory sequences, see Voss et al., 1986, Trends Biochem. Sci. 11:287, Maniatis et al., 1987, Science 236:1237, incorporated by reference herein in their entireties), and those that direct inducible expression of a nucleotide sequence in response to particular treatment or condition (e.g., the metallothionein promoter in mammalian cells and the tet-responsive and/or streptomycin responsive promoter in both prokaryotic and eukaryotic systems (see id.). It will be appreciated by those skilled in the art that the design of the expression vector can depend on such factors as the choice of the host cell to be transformed, the level of expression of protein desired, etc. The expression vectors of the invention can be introduced into host cells to thereby produce proteins or peptides, including fusion proteins or peptides, encoded by nucleic acids as described herein.

[0313] In another embodiment, the present invention provides host cells into which a recombinant expression vector of the invention has been introduced. A host cell can be any prokaryotic cell or eukaryotic cell. Prokaryotic host cells include gram negative or gram positive organisms, for example E. coli or bacilli. Higher eukaryotic cells include insect cells, yeast cells, and established cell lines of mammalian origin. Examples of suitable mammalian host cell lines include Chinese hamster ovary (CHO) cells or their derivatives such as Veggie CHO and related cell lines which grow in serum-free media (see Rasmussen et al., 1998, Cytotechnology 28:31) or CHO strain DXB-11, which is deficient in DHFR (see Urlaub et al., 1980, Proc. Natl. Acad. Sci. USA 77:4216-20). Additional CHO cell lines include CHO-K1 (ATCC #CCL-61), EM9 (ATCC #CRL-1861), and UV20 (ATCC #CRL-1862). Additional host cells include the COS-7 line of monkey kidney cells (ATCC CRL 1651) (see Gluzman et al., 1981, Cell 23:175), L cells, C127 cells, 3T3 cells (ATCC CCL 163), AM-1/D cells (described in U.S. Pat. No. 6,210,924), HeLa cells, BHK (ATCC CRL 10) cell lines, the CV1/EBNA cell line derived from the African green monkey kidney cell line CV1 (ATCC CCL 70) (see McMahan et al., 1991, EMBO J. 10:2821), human embryonic kidney cells such as 293, 293 EBNA or MSR 293, human epidermal A431 cells, human Colo205 cells, other transformed primate cell lines, normal diploid cells, cell strains derived from in vitro culture of primary tissue, primary explants, HL-60, U937, HaK or Jurkat cells. Appropriate cloning and expression vectors for use with bacterial, fungal, yeast, and mammalian cellular hosts are described by Pouwels et al. (Cloning Vectors: A Laboratory Manual, Elsevier, New York, 1985).

[0314] Vector DNA can be introduced into prokaryotic or eukaryotic cells via conventional transformation or transfection techniques. For stable transfection of mammalian cells, it is known that, depending upon the expression vector and transfection technique used, only a small fraction of cells may integrate the foreign DNA into their genome. In order to identify and select these integrants, a gene that encodes a selectable marker (e.g., for resistance to antibiotics) is generally introduced into the host cells along with the gene of interest. Additional selectable markers include those which confer resistance to drugs, such as G418, hygromycin and methotrexate. Cells stably transfected with the introduced nucleic acid can be identified by drug selection (e.g., cells that have incorporated the selectable marker gene will survive, while the other cells die), among other methods.

[0315] The transformed cells can be cultured under conditions that promote expression of the polypeptide, and the polypeptide recovered by conventional protein purification procedures. Polypeptides contemplated for use herein include substantially homogeneous recombinant mammalian antibody polypeptides substantially free of contaminating endogenous materials.

[0316] Cells containing the nucleic acid encoding the antigen binding proteins of the present invention also include hybridomas. The production and culturing of hybridomas are discussed in the antibody section above.

[0317] In some embodiments, a vector comprising a nucleic acid molecule as described herein is provided. In some embodiments, the invention comprises a host cell comprising a nucleic acid molecule as described herein.

[0318] In some embodiments, a nucleic acid molecule encoding the antigen binding protein as described herein is provided.

[0319] In some embodiments, a pharmaceutical composition comprising at least one antigen binding protein described herein is provided.

### Antigen Binding Protein Production

[0320] The antigen binding proteins of the invention can be produced by any method known in the art for the synthesis of proteins (e.g., antibodies), in particular, by chemical synthesis or preferably, by recombinant expression techniques.

[0321] Recombinant expression of the antigen binding proteins requires construction of an expression vector containing a polynucleotide that encodes the antigen binding proteins. Once a polynucleotide encoding the antigen binding proteins molecule has been obtained, the vector for the production of the antigen binding proteins may be produced by recombinant DNA technology. An expression vector is constructed containing the antigen binding proteins coding sequences and appropriate transcriptional and translational control signals. These methods include, for example, in vitro recombinant DNA techniques, synthetic techniques, and in vivo genetic recombination.

[0322] The expression vector is transferred to a host cell by conventional techniques and the transfected cells are then cultured by conventional techniques to produce an antigen binding proteins of the invention. In one embodiment of the invention, vectors encoding both the heavy and light chains of an antibody may be co-expressed in the host cell for expression of the entire immunoglobulin molecule, as detailed below.

[0323] A variety of host-expression vector systems may be utilized to express the antigen binding proteins of the invention. Such host-expression systems represent vehicles by which the coding sequences of interest may be produced and subsequently purified, but also represent cells which may, when transformed or transfected with the appropriate nucleotide coding sequences, express an antibody molecule of the invention in situ. Bacterial cells such as E. coli, and eukaryotic cells are commonly used for the expression of a recombinant antibody molecule, especially for the expression of whole recombinant antibody molecule. For example, mammalian cells such as Chinese hamster ovary cells (CHO), in conjunction with a vector such as the major intermediate early gene promoter element from human cytomegalovirus is an effective expression system for antibodies (Foecking et al., Gene 45:101 (1986); Cockett et al., Bio/Technology 8:2 (1990)).

[0324] In addition, a host cell strain may be chosen which modulates the expression of the inserted sequences, or modifies and processes the gene product in the specific fashion desired. Such modifications (e.g., glycosylation) and processing (e.g., cleavage) of protein products may be important for the function of the protein. Different host cells have characteristic and specific mechanisms for the post-translational processing and modification of proteins and gene products. Appropriate cell lines or host systems can be chosen to ensure the correct modification and processing of the foreign protein expressed. To this end, eukaryotic host cells which possess the cellular machinery for proper processing of the primary transcript, glycosylation, and phosphorylation of the gene product may be used. Such mammalian host cells include, but are not limited to, CHO, COS, 293, 3T3, or myeloma cells.

[0325] For long-term, high-yield production of recombinant proteins, stable expression is preferred. For example, cell lines which stably express the antibody molecule may be engineered. Rather than using expression vectors which contain viral origins of replication, host cells can be transformed with DNA controlled by appropriate expression control elements (e.g., promoter, enhancer, sequences, transcription terminators, polyadenylation sites, etc.), and a selectable marker. Following the introduction of the foreign DNA, engineered cells may be allowed to grow for 1-2 days in an enriched media, and then are switched to a selective media. The selectable marker in the recombinant plasmid confers resistance to the selection and allows cells to stably integrate the plasmid into their chromosomes and grow to form foci which in turn can be cloned and expanded into cell lines. This method may advantageously be used to engineer cell lines which express the antibody molecule. Such engineered cell lines may be particularly useful in screening and evaluation of compounds that interact directly or indirectly with the antibody molecule.

[0326] A number of selection systems may be used, including but not limited to the herpes simplex virus thymidine kinase (Wigler et al., Cell 11:223 (1977)), hypoxanthine-guanine phosphoribosyltransferase (Szybalska & Szybalski, Proc. Natl. Acad. Sci. USA 48:202 (1992)), and adenine phosphoribosyltransferase (Lowy et al., Cell 22:817 (1980)) genes can be employed in tk, hgprt or aprt-cells, respectively. Also, antimetabolite resistance can be used as the basis of selection for the following genes: dhfr, which confers resistance to methotrexate (Wigler et al., Proc. Natl. Acad. Sci. USA 77:357 (1980); O'Hare et al., Proc. Natl. Acad. Sci. USA 78:1527 (1981)); gpt, which confers resistance to mycophenolic acid (Mulligan & Berg, Proc. Natl. Acad. Sci. USA 78:2072 (1981)); neo, which confers resistance to the aminoglycoside G-418 (Wu and Wu, Biotherapy 3:87-95 (1991)); and hygro, which confers resistance to hygromycin (Santerre et al., Gene 30:147 (1984)). Methods commonly known in the art of recombinant DNA technology may be routinely applied to select the desired recombinant clone, and such methods are described, for example, in Ausubel et al. (eds.), Current Protocols in Molecular Biology, John Wiley & Sons, NY (1993); Kriegler, Gene Transfer and Expression, A Laboratory Manual, Stockton Press, NY (1990); and in Chapters 12 and 13, Dracopoli et al. (eds), Current Protocols in Human Genetics, John Wiley & Sons, NY (1994); Colberre-Garapin et al., J. Mol. Biol. 150:1 (1981), which are incorporated by reference herein in their entireties.

[0327] The expression levels of an antibody molecule can be increased by vector amplification (for a review, see Bebbington and Hentschel, “The use of vectors based on gene amplification for the expression of cloned genes in mammalian cells” (DNA Cloning, Vol. 3. Academic Press, New York, 1987)). When a marker in the vector system expressing antibody is amplifiable, increase in the level of inhibitor present in culture of host cell will increase the number of copies of the marker gene. Since the amplified region is associated with the antibody gene, production of the antibody will also increase (Crouse et al., Mol. Cell. Biol. 3:257 (1983)).

[0328] The host cell may be co-transfected with two expression vectors of the invention, for example, the first vector encoding an antibody heavy chain derived polypeptide and the second vector encoding an antibody light chain derived polypeptide. The two vectors may contain identical selectable markers which enable equal expression of heavy and light chain polypeptides. Alternatively, a single vector may be used which encodes, and is capable of expressing, for example, both antibody heavy and light chain polypeptides. In such situations, the light chain should be placed before the heavy chain to avoid an excess of toxic free heavy chain (Proudfoot, Nature 322:52 (1986); Kohler, Proc. Natl. Acad. Sci. USA 77:2197 (1980)). The coding sequences for the heavy and light chains may comprise cDNA or genomic DNA.

[0329] Once an antibody molecule of the invention has been produced by an animal, chemically synthesized, or recombinantly expressed, it may be purified by any method known in the art for purification of an immunoglobulin molecule, for example, by chromatography (e.g., ion exchange, affinity, particularly by affinity for the specific antigen after Protein A, and size-exclusion chromatography), centrifugation, differential solubility, or by any other standard technique for the purification of proteins. In addition, the antibodies of the present invention or fragments thereof can be fused to heterologous polypeptide sequences described herein or otherwise known in the art, to facilitate purification.

[0330] In some embodiments, the present invention encompasses antibodies recombinantly fused or chemically conjugated (including both covalently and non-covalently conjugations) to a polypeptide. Fused or conjugated antibodies of the present invention may be used for ease in purification. See e.g., Harbor et al., supra, and PCT publication WO 93/21232; EP 439,095; Naramura et al., Immunol. Lett. 39:91-99 (1994); U.S. Pat. No. 5,474,981; Gillies et al., Proc. Natl. Acad. Sci. 89:1428-1432 (1992); Fell et al., J. Immunol. 146:2446-2452 (1991).

[0331] Moreover, the antibodies or fragments thereof of the present invention can be fused to marker sequences, such as a peptide to facilitate purification. In preferred embodiments, the marker amino acid sequence is a hexa-histidine peptide, such as the tag provided in a pQE vector (QIAGEN, Inc., 9259 Eton Avenue, Chatsworth, Calif., 91311), among others, many of which are commercially available. As described in Gentz et al., Proc. Natl. Acad. Sci. USA 86:821-824 (1989), for instance, hexa-histidine provides for convenient purification of the fusion protein. Other peptide tags useful for purification include, but are not limited to, the “HA” tag, which corresponds to an epitope derived from the influenza hemagglutinin protein (Wilson et al., Cell 37:767 (1984)) and the “flag” tag.

### Antibody Effector Function

[0332] In some embodiments, the present invention provides antigen binding proteins (e.g., antibodies) with altered effector function (e.g., decreasing or increasing effector function). Nonlimiting examples of methods for increasing effector function can be found in U.S. Pat. Nos. 5,624,821, 6,602,684, 7,029,872, U.S. Patent Application Publication Nos. 2006/0067930A1, 2005/0272128A1, 2005/0079605A1, 2005/0123546A1, 2004/0072290A1, 2006/0257399A1, 2004/0261148A1, 2007/0092521, 2006/0040325A1, and 2006/0039904A1, and International Patent Application Publication Nos. WO 04/029207, WO03011878, WO05044859, WO 06071856, and WO 06071280.

[0333] Methods of engineering Fc regions of antibodies so as to alter effector functions are known in the art (e.g., U.S. Patent Publication No. 20040185045 and PCT Publication No. WO 2004/016750, both to Koenig et al., which describe altering the Fc region to enhance the binding affinity for Fc gamma RIIB as compared with the binding affinity for FC gamma RIIA; see, also, PCT Publication Nos. WO 99/58572 to Armour et al., WO 99/51642 to Idusogie et al., and U.S. Pat. No. 6,395,272 to Deo et al.). Methods of modifying the Fc region to decrease binding affinity to Fc gamma RIIB are also known in the art (e.g., U.S. Patent Publication No. 20010036459 and PCT Publication No. WO 01/79299, both to Ravetch et al.). Modified antibodies having variant Fc regions with enhanced binding affinity for Fc gamma RIIIA and/or Fc gamma RIIA as compared with a wildtype Fc region have also been described (e.g., PCT Publication Nos. WO 2004/063351, to Stavenhagen et al., the disclosure of which is incorporated herein in its entirety).

[0334] Antibody effector function may also be modified through the generation of antibodies with altered glycosylation patterns. Such altered glycosylation patterns have been demonstrated to increase or decrease the ADCC ability of antibodies, as desired. Such carbohydrate modifications can be accomplished by, for example, expressing the antibody in a host cell with altered glycosylation machinery. Cells with altered glycosylation machinery have been described in the art and can be used as host cells in which to express recombinant antibodies of the invention to thereby produce an antibody with altered glycosylation.

### Half-Life Alteration

[0335] In some embodiments, the present invention provides for antigen binding proteins (e.g., antibodies) which have an extended half-life in vivo. In particular, the present invention provides antigen binding proteins which have a half-life in a mammal (for example, but not limited to, a human), of greater than 3 days, greater than 7 days, greater than 10 days, greater than 15 days, greater than 25 days, greater than 30 days, greater than 35 days, greater than 40 days, greater than 45 days, greater than 2 months, greater than 3 months, greater than 4 months, or greater than 5 months.

[0336] To prolong the serum circulation of antigen binding proteins (for example, monoclonal antibodies) or antibody fragments (for example, Fab fragments) in vivo, for example, inert polymer molecules such as high molecular weight polyethyleneglycol (PEG) can be attached to the antibodies (including antibody fragments thereof) with or without a multifunctional linker either through site-specific conjugation of the PEG to the N- or C-terminus of the antibodies or via epsilon-amino groups present on lysine residues. Linear or branched polymer derivatization that results in minimal loss of biological activity will be used. The degree of conjugation can be closely monitored by SDS-PAGE and mass spectrometry to ensure proper conjugation of PEG molecules to the antigen binding proteins. Unreacted PEG can be separated from antigen binding proteins-PEG conjugates by size-exclusion or by ion-exchange chromatography. PEG-derivatized antigen binding proteins can be tested for binding activity as well as for in vivo efficacy using methods known to those of skill in the art, for example, by immunoassays described herein.

[0337] In certain embodiments, antibodies having an increased half-life in vivo can also be generated by introducing one or more amino acid modifications (i.e., substitutions, insertions or deletions) into an IgG constant domain, or FcRn binding fragment thereof (e.g., Fc or hinge Fc domain fragment). See, e.g., International Publication No. WO 98/23289; International Publication No. WO 97/34631; and U.S. Pat. No. 6,277,375, each of which is incorporated herein by reference in its entirety.

### Conjugates

[0338] In some embodiments, covalent modifications of the antigen binding proteins of the invention are included within the scope of this invention. They may be made by chemical synthesis or by enzymatic or chemical cleavage of the antigen binding proteins, if applicable. Other types of covalent modifications of the antigen binding proteins are introduced into the molecule by reacting targeted amino acid residues of the antibody with an organic derivatizing agent that is capable of reacting with selected side chains or the N- or C-terminal residues.

[0339] Cysteinyl residues most commonly are reacted with alpha-haloacetates (and corresponding amines), such as chloroacetic acid or chloroacetamide, to give carboxymethyl or carboxyamidomethyl derivatives. Similarly, iodo-reagents may also be used. Cysteinyl residues also are derivatized by reaction with bromotrifluoroacetone, alpha-bromo-beta-(5-imidazolyl)propionic acid, chloroacetyl phosphate, N-alkylmaleimides, 3-nitro-2-pyridyl disulfide, methyl 2-pyridyl disulfide, p-chloromercuribenzoate, 2-chloromercuri-4-nitrophenol, or chloro-7-nitrobenzo-2-oxa-1,3-diazole.

[0340] Histidyl residues are derivatized by reaction with diethylpyrocarbonate at pH 5.5-7.0 because this agent is relatively specific for the histidyl side chain. Para-bromophenacyl bromide also is useful; the reaction is preferably performed in 0.1 M sodium cacodylate at pH 6.0.

[0341] Lysyl and amino-terminal residues are reacted with succinic or other carboxylic acid anhydrides. Derivatization with these agents has the effect of reversing the charge of the lysinyl residues. Other suitable reagents for derivatizing.alpha.-amino-containing residues and/or e-amino-containing residues include imidoesters such as methyl picolinimidate, pyridoxal phosphate, pyridoxal, chloroborohydride, trinitrobenzenesulfonic acid, O-methylisourea, 2,4-pentanedione, and transaminase-catalyzed reaction with glyoxylate.

[0342] Arginyl residues are modified by reaction with one or several conventional reagents, among them phenylglyoxal, 2,3-butanedione, 1,2-cyclohexanedione, and ninhydrin. Derivatization of arginyl residues generally requires that the reaction be performed in alkaline conditions because of the high pKa of the guanidine functional group. Furthermore, these reagents may react with the epsilon-amino groups of lysine as well as the arginine epsilon-amino group.

[0343] The specific modification of tyrosyl residues may be made, with particular interest in introducing spectral labels into tyrosyl residues by reaction with aromatic diazonium compounds or tetranitromethane. Most commonly, N-acetylimidazole and tetranitromethane are used to form O-acetyl tyrosyl species and 3-nitro derivatives, respectively. Tyrosyl residues are iodinated using I¹²⁵ or I¹³¹ to prepare labeled proteins for use in radioimmunoassay.

[0344] Carboxyl side groups (aspartyl or glutamyl) are selectively modified by reaction with carbodiimides (R—N══C══N—R′), where R and R′ are different alkyl groups, such as 1-cyclohexyl-3-(2-morpholinyl-4-ethyl)carbodiimide or 1-ethyl-3-(4-azonia-4,4-dimethylpentyl)carbodiimide. Furthermore, aspartyl and glutamyl residues are converted to asparaginyl and glutaminyl residues by reaction with ammonium ions.

[0345] Glutaminyl and asparaginyl residues are frequently deamidated to the corresponding glutamyl and aspartyl residues, respectively. These residues are deamidated under neutral or basic conditions. The deamidated form of these residues falls within the scope of this invention.

[0346] Other modifications include hydroxylation of proline and lysine, phosphorylation of hydroxyl groups of seryl or threonyl residues, methylation of the .alpha.-amino groups of lysine, arginine, and histidine side chains (T. E. Creighton, Proteins: Structure and Molecular Properties, W.H. Freeman & Co., San Francisco, pp. 79-86 (1983)), acetylation of the N-terminal amine, and amidation of any C-terminal carboxyl group.

[0347] Another type of covalent modification involves chemically or enzymatically coupling glycosides to the antibody. These procedures are advantageous in that they do not require production of the antibody in a host cell that has glycosylation capabilities for N- or O-linked glycosylation. Depending on the coupling mode used, the sugar(s) may be attached to (a) arginine and histidine, (b) free carboxyl groups, (c) free sulfhydryl groups such as those of cysteine, (d) free hydroxyl groups such as those of serine, threonine, or hydroxyproline, (e) aromatic residues such as those of phenylalanine, tyrosine, or tryptophan, or (f) the amide group of glutamine. These methods are described in WO 87/05330 published 11 Sep. 1987, and in Aplin and Wriston, CRC Crit. Rev. Biochem., pp. 259-306 (1981).

### Interfering RNA

[0348] In some embodiments, the present invention provides polynucleotide compositions that target ASGR-1 and/or ASGR-2 and are useful for methods for treatment, therapy, and prophylaxis in disease related to ASGR, ASGR-1 and/or ASGR-2 expression, where reduction or inhibition of the expression or function of a selected target polynucleotide sequence is desired. Examples of polynucleotides that can be used to target ASGR-1 and/or ASGR-2 sequences and reduce ASGR-1 and/or ASGR-2 expression include, but are not limited to, antisense oligonucleotides, and RNA interference (RNAi) agents, including short or small interfering RNA (siRNA), short hairpin RNA (shRNA), and microRNA (miRNA). See, for example, U.S. Pat. Nos. 6,506,559; 8,394,628; 7,056,704; 7,078,196; 6,107,094; 5,898,031; 6,573,099; and European Patent No. 1,144,623. See also, for example, U.S. patent application publication nos. 2015/0259689; 2015/0197746; 2011/0092565; U.S. Pat. Nos. 8,877,917; 8,507,455; and 7,579,451.

[0349] In certain embodiments, a composition for inhibiting the function or expression of a target polynucleotide sequence (e.g. ASGR-1 mRNA sequence, ASGR-2 mRNA sequence) in a mammalian cell, according to this invention, comprises an agent that provides to a mammalian cell an at least partially double-stranded RNA molecule (e.g., an interfering RNA molecule). A double-stranded RNA molecule may include chemical modifications to ribonucleotides, including modifications to the ribose sugar, base, or backbone components of the ribonucleotides, such as those described herein or known in the art. Any such modifications, as used in a double-stranded RNA molecule (e.g. siRNA, shRNA, or the like), are encompassed by the term “double-stranded RNA” for the purposes of this disclosure. Thus, in general, the term “RNA” may also include RNA-DNA hybrids and polynucleotides comprising one or more modified nucleotides (e.g. nucleotides with modifications at the 2′ position of the ribose ring), except where specified otherwise, e.g., where a 2′—OH group of ribose is required for a particular linkage.

[0350] In some embodiments at least 10% of a partially double-stranded RNA molecule is double-stranded. Alternatively, the double stranded portion of these RNA molecules can be at least 30% of the length of the molecule. In another embodiment, the double stranded portion of these molecules can be at least 50% of the length of the molecule. In still another embodiment, the double stranded portion of these molecules can be at least 70% of the length of the molecule. In another embodiment, the double stranded portion of these molecules can be at least 90% of the length of the molecule. In another embodiment, the molecule can be double stranded over its entire length. Alternatively, the double-stranded portion of these molecules can occur at either or both termini, or in some middle portion of the molecule, if the molecule is linear. Similarly, the double-stranded portion can be in any location if the molecule is circular. In certain embodiments of the present invention, the double-stranded portion of the RNA molecule becomes double-stranded only when the molecule is in the mammalian cell. In still other embodiment of this invention, the partially double-stranded molecule is an RNA/DNA hybrid, for example, a single strand containing RNA and DNA, prepared in vitro; or a duplex of two such single strands or portions thereof. In yet another embodiment, the RNA molecule, made in vivo or in vitro, is a duplex comprised of an RNA single strand and a DNA single strand. In some embodiments, the partially double-stranded RNA molecule comprises a polynucleotide sequence that is substantially homologous to the target polynucleotide sequence in order to effectively reduce or inhibit the function or expression thereof. The necessary homology may be suitably defined by use of a computer algorithm. As known in the art and discussed herein, “homology” or “identity” means the degree of sequence relatedness between two polypeptide or two polynucleotide sequences as determined by the identity of the match between two lengths of such sequences. Both identity and homology can be readily calculated by methods in the prior art [See also, e.g., COMPUTATIONAL MOLECULAR BIOLOGY, Lesk, A. M., ed., Oxford University Press, New York, (1988); BIOCOMPUTING: INFORMATICS AND GENOME PROJECTS, Smith, D. W., ed., Academic Press, New York, (1993); COMPUTER ANALYSIS OF SEQUENCE DATA, PART I, Griffin, A. M., and Griffin, H. G., eds., Humana Press, New Jersey, (1994); SEQUENCE ANALYSIS IN MOLECULAR BIOLOGY, von Heinje, G., Academic Press, (1987); and SEQUENCE ANALYSIS PRIMER, Gribskov, M. and Devereux, J., eds., M Stockton Press, New York, (1991)]. While there exist a number of methods to measure identity and homology between two polynucleotide sequences, the terms “identity”, “similarity” and homology are well known to skilled artisans [H. Carillo and D. Lipton, SIAM J. Applied Math., 48:1073 (1988)]. Methods commonly employed to determine identity or homology between two sequences include, but are not limited to, those disclosed in Guide to Huge Computers, Martin J. Bishop, ed., Academic Press, San Diego, 1994, and H. Carillo and D. Lipton, SIAM J. Applied Math., 48:1073 (1988). Preferred methods to determine identity or homology are designed to give the largest match between the two sequences tested. Methods to determine identity and similarity are codified in computer programs. Preferred computer program to determine identity and homology between two sequences include, but are not limited to, the algorithm BESTFIT from the GCG program package [J. Devereux et al., Nucl. Acids Res., 12(1):387 (1984)], the related MACVECTOR program (Oxford), and the FASTA (Pearson) programs. For instance, searches for sequence similarities in databases between significant naturally occurring mammalian polynucleotide sequences and target polynucleotide sequences enable the design of suitable RNA molecules desired for use in the invention. The algorithm and/or the degree of homology necessary for any particular RNA molecule may be selected by one of skill in the art, depending on the identity of the target, and/or the closeness of homology of the target sequence to any naturally occurring mammalian sequence, which is desired to be left functioning normally after use of the methods of this invention.

[0351] In some embodiments, a polynucleotide composition for reducing the expression or function of ASGR-1 and/or ASGR-2 sequences is an RNAi agent comprising a double-stranded RNA molecule which comprises two antiparallel strands of contiguous nucleotides that are sufficiently complementary to each other to hybridize to form a duplex region. “Hybridize” or “hybridization” refers to the pairing of complementary polynucleotides, typically via hydrogen bonding (e.g. Watson-Crick, Hoogsteen or reversed Hoogsteen hydrogen bonding) between complementary bases in the two polynucleotides. The strand comprising a region having a sequence that is substantially complementary to a target sequence (e.g. target mRNA) is referred to as the “antisense strand.” The “sense strand” refers to the strand that includes a region that is substantially complementary to a region of the antisense strand. In some embodiments, the sense strand may comprise a region that has a sequence that is substantially identical to the target sequence.

[0352] As used herein, a first sequence is “complementary” to a second sequence if a polynucleotide comprising the first sequence can hybridize to a polynucleotide comprising the second sequence to form a duplex region under certain conditions, such as physiological conditions. Other such conditions can include moderate or stringent hybridization conditions, which are known to those of skill in the art. A first sequence is considered to be fully complementary (100% complementary) to a second sequence if a polynucleotide comprising the first sequence base pairs with a polynucleotide comprising the second sequence over the entire length of one or both nucleotide sequences without any mismatches. A sequence is “substantially complementary” to a target sequence if the sequence is at least about 80%, 85%, 90%, 95%, 96%, 97%, 98%, 99% or 100% complementary to a target sequence. Percent complementarity can be calculated by dividing the number of bases in a first sequence that are complementary to bases at corresponding positions in a second or target sequence by the total length of the first sequence. A sequence may also be said to be substantially complementary to another sequence if there are no more than 5, 4, 3, or 2 mismatches over a 30 base pair duplex region when the two sequences are hybridized. Generally, if any nucleotide overhangs, as defined herein, are present, the sequence of such overhangs is not considered in determining the degree of complementarity between two sequences. By way of example, a sense strand of 21 nucleotides in length and an antisense strand of 21 nucleotides in length that hybridize to form a 19 base pair duplex region with a 2 nucleotide overhang at the 3′ end of each strand would be considered to be fully complementary as the term is used herein.

[0353] In some embodiments, a region of the antisense strand comprises a sequence that is fully complementary to a region of the target RNA sequence (e.g. ASGR-1 and/or ASGR-2 mRNA). In such embodiments, the sense strand may comprise a sequence that is fully complementary to the sequence of the antisense strand. In other such embodiments, the sense strand may comprise a sequence that is substantially complementary to the sequence of the antisense strand, e.g. having 1, 2, 3, 4, or 5 mismatches in the duplex region formed by the sense and antisense strands. In certain embodiments, it is preferred that any mismatches occur within the terminal regions (e.g. within 6, 5, 4, 3, or 2 nucleotides of the 5′ and/or 3′ ends of the strands). In one embodiment, any mismatches in the duplex region formed from the sense and antisense strands occur within 6, 5, 4, 3, or 2 nucleotides of the 5′ end of the antisense strand.

[0354] In certain embodiments, the sense strand and antisense strand of the double-stranded RNA may be two separate molecules that hybridize to form a duplex region, but are otherwise unconnected. Such double-stranded RNA molecules formed from two separate strands are referred to as “small interfering RNAs” or “short interfering RNAs” (siRNAs).

[0355] In other embodiments, the sense strand and the antisense strand that hybridize to form a duplex region may be part of a single RNA molecule, i.e. the sense and antisense strands are part of a self-complementary region of a single RNA molecule. In such cases, a single RNA molecule comprises a duplex region (also referred to as a stem region) and a loop region. The 3′ end of the sense strand is connected to the 5′ end of the antisense strand by a contiguous sequence of unpaired nucleotides, which will form the loop region. The loop region is typically of a sufficient length to allow the RNA molecule to fold back on itself such that the antisense strand can base pair with the sense strand to form the duplex or stem region. The loop region can comprise from about 3 to about 25, from about 5 to about 15, or from about 8 to about 12 unpaired nucleotides. Such RNA molecules with at least partially self-complementary regions are referred to as “short hairpin RNAs” (shRNAs). The length of a single, at least partially self-complementary RNA molecule can be from about 35 nucleotides to about 100 nucleotides, from about 45 nucleotides to about 85 nucleotides, or from about 50 to about 60 nucleotides and comprise a duplex region and loop region each having the lengths recited herein.

[0356] In some embodiments, the double-stranded RNA molecule comprises a sense strand and an antisense strand, wherein the antisense strand comprises a region having a sequence that is substantially or fully complementary to an ASGR-1 messenger RNA (mRNA) sequence and/or ASGR-2 mRNA sequence. As used herein, an “ASGR-1 mRNA sequence” or “ASGR-2 mRNA sequence” refers to any messenger RNA sequence, including splice variants, encoding an ASGR-1 protein or ASGR-2 protein, including ASGR-1 or ASGR-2 protein variants or isoforms from any species (e.g. mouse, rat, non-human primate, human).

[0357] The sense strand of the double-stranded RNA molecule typically comprises a sequence that is sufficiently complementary to the sequence of the antisense strand such that the two strands hybridize under physiological conditions to form a duplex region. A “duplex region” refers to the region in two complementary or substantially complementary polynucleotides that form base pairs with one another, either by Watson-Crick base pairing or other hydrogen bonding interaction, to create a duplex between the two polynucleotides. The duplex region of the RNA molecule should be of sufficient length to allow the RNA molecule to enter the RNA interference pathway, e.g. by engaging the Dicer enzyme and/or the RISC complex. For instance, in some embodiments, the duplex region is about 15 to about 30 base pairs in length. Other lengths for the duplex region within this range are also suitable, such as about 15 to about 28 base pairs, about 15 to about 26 base pairs, about 15 to about 24 base pairs, about 15 to about 22 base pairs, about 17 to about 28 base pairs, about 17 to about 26 base pairs, about 17 to about 24 base pairs, about 17 to about 23 base pairs, about 17 to about 21 base pairs, about 19 to about 25 base pairs, about 19 to about 23 base pairs, or about 19 to about 21 base pairs. In one embodiment, the duplex region is about 17 to about 24 base pairs in length. In another embodiment, the duplex region is about 19 to about 21 base pairs in length.

[0358] For embodiments in which the sense strand and antisense strand are two separate molecules (e.g. RNAi agent is a siRNA), the sense strand and antisense strand need not be the same length as the length of the duplex region. For instance, one or both strands may be longer than the duplex region and have one or more unpaired nucleotides or mismatches flanking the duplex region. Thus, in some embodiments, the double-stranded RNA molecule comprises at least one nucleotide overhang. As used herein, a “nucleotide overhang” refers to the unpaired nucleotide or nucleotides that extend beyond the duplex region at the terminal ends of the strands. Nucleotide overhangs are typically created when the 3′ end of one strand extends beyond the 5′ end of the other strand or when the 5′ end of one strand extends beyond the 3′ end of the other strand. The length of a nucleotide overhang is generally between 1 and 6 nucleotides, 1 and 5 nucleotides, 1 and 4 nucleotides, 1 and 3 nucleotides, 2 and 6 nucleotides, 2 and 5 nucleotides, or 2 and 4 nucleotides. In some embodiments, the nucleotide overhang comprises 1, 2, 3, 4, 5, or 6 nucleotides. In one particular embodiment, the nucleotide overhang comprises 1 to 4 nucleotides. In certain embodiments, the nucleotide overhang comprises 2 nucleotides. The nucleotides in the overhang can be ribonucleotides, deoxyribonucleotides, or modified nucleotides as described herein.

[0359] The nucleotide overhang can be at the 5′ end or 3′ end of one or both strands. For example, in one embodiment, the double-stranded RNA molecule comprises a nucleotide overhang at the 5′ end and the 3′ end of the antisense strand. In another embodiment, the double-stranded RNA molecule comprises a nucleotide overhang at the 5′ end and the 3′ end of the sense strand. In some embodiments, the double-stranded RNA molecule comprises a nucleotide overhang at the 5′ end of the sense strand and the 5′ end of the antisense strand. In other embodiments, the double-stranded RNA molecule comprises a nucleotide overhang at the 3′ end of the sense strand and the 3′ end of the antisense strand.

[0360] The double-stranded RNA molecules may comprise a single nucleotide overhang at one end of the molecule and a blunt end at the other. A “blunt end” means that the sense strand and antisense strand are fully base-paired at the end of the molecule and there are no unpaired nucleotides that extend beyond the duplex region. In some embodiments, the double-stranded RNA molecule comprises a nucleotide overhang at the 3′ end of the sense strand and a blunt end at the 5′ end of the sense strand and 3′ end of the antisense strand. In other embodiments, the double-stranded RNA molecule comprises a nucleotide overhang at the 3′ end of the antisense strand and a blunt end at the 5′ end of the antisense strand and the 3′ end of the sense strand. In certain embodiments, the double-stranded RNA molecule comprises a blunt end at both ends of the double-stranded RNA molecule. In such embodiments, the sense strand and antisense strand have the same length and the duplex region is the same length as the sense and antisense strands (i.e. the molecule is double-stranded over its entire length).

[0361] The sense strand and antisense strand can each independently be about 15 to about 30 nucleotides in length, about 18 to about 28 nucleotides in length, about 19 to about 27 nucleotides in length, about 19 to about 25 nucleotides in length, about 19 to about 23 nucleotides in length, about 21 to about 25 nucleotides in length, or about 21 to about 23 nucleotides in length. In certain embodiments, the sense strand and antisense strand are each about 18, about 19, about 20, about 21, about 22, about 23, about 24, or about 25 nucleotides in length. In some embodiments, the sense strand and antisense strand have the same length but form a duplex region that is shorter than the strands such that the double-stranded RNA molecule has two nucleotide overhangs. For instance, in one embodiment, the double-stranded RNA molecule comprises (i) a sense strand and an antisense strand that are each 21 nucleotides in length, (ii) a duplex region that is 19 base pairs in length, and (iii) nucleotide overhangs of 2 unpaired nucleotides at both the 3′ end of the sense strand and the 3′ end of the antisense strand. In another embodiment, the double-stranded RNA molecule comprises (i) a sense strand and an antisense strand that are each 23 nucleotides in length, (ii) a duplex region that is 21 base pairs in length, and (iii) nucleotide overhangs of 2 unpaired nucleotides at both the 3′ end of the sense strand and the 3′ end of the antisense strand. In other embodiments, the sense strand and antisense strand have the same length and form a duplex region over their entire length such that there are no nucleotide overhangs on either end of the double-stranded molecule. In one such embodiment, the double-stranded RNA molecule is blunt ended and comprises (i) a sense strand and an antisense strand, each of which is 21 nucleotides in length, and (ii) a duplex region that is 21 base pairs in length. In another such embodiment, the double-stranded RNA molecule is blunt ended and comprises (i) a sense strand and an antisense strand, each of which is 23 nucleotides in length, and (ii) a duplex region that is 23 base pairs in length.

[0362] In other embodiments, the sense strand or the antisense strand is longer than the other strand and the two strands form a duplex region having a length equal to that of the shorter strand such that the double-stranded RNA molecule comprises at least one nucleotide overhang. For example, in one embodiment, the double-stranded RNA molecule comprises (i) a sense strand that is 19 nucleotides in length, (ii) an antisense strand that is 21 nucleotides in length, (iii) a duplex region of 19 base pairs in length, and (iv) a single nucleotide overhang of 2 unpaired nucleotides at the 3′ end of the antisense strand. In another embodiment, the double-stranded RNA molecule comprises (i) a sense strand that is 21 nucleotides in length, (ii) an antisense strand that is 23 nucleotides in length, (iii) a duplex region of 21 base pairs in length, and (iv) a single nucleotide overhang of 2 unpaired nucleotides at the 3′ end of the antisense strand.

[0363] Off-target toxicity is a constant concern in the development of pharmaceutical products. With interfering RNA agents, the potential exists for homology with certain endogenous polynucleotide sequences that could lead to unintended toxic effects in the patient receiving the interfering RNA. Accordingly, in some embodiments, the RNA molecule comprises a polynucleotide sequence that is also substantially non-homologous to any naturally occurring, normally functioning, and essential mammalian polynucleotide sequence, so that the RNA molecule does not adversely affect the function of any essential naturally occurring mammalian polynucleotide sequence, when used in the methods of this invention. Such naturally occurring functional mammalian polynucleotide sequences include mammalian sequences that encode desired proteins, as well as mammalian sequences that are non-coding, but that provide for essential regulatory sequences in a healthy mammal. Preferably, the RNA molecule useful in the methods of the invention must be sufficiently distinct in sequence from any mammalian polynucleotide sequence expressed in the target cells (e.g. liver cells) for which the function is intended to be undisturbed after any of the methods of this invention are performed. As described for determining the homology to the target sequence above, one of skill in the art may resort to the above-identified computer algorithms to define the essential lack of homology between the RNA molecule polynucleotide sequence and the normal mammalian sequences expressed in the target cells. For example, in a specific embodiment, the homology between the sequence of an RNAi agent and the selected normal sequence expressed in the target cells is less than the homologies of the formulae described above. In some embodiments, there is almost no homology at all between the sequence of an RNAi agent and any normal mammalian sequence.

[0364] The double-stranded RNA molecules used in the methods of the invention may comprise one or more modified nucleotides. A “modified nucleotide” refers to a nucleotide that has one or more chemical modifications to the nucleoside, nucleobase, pentose ring, or phosphate group. The double-stranded RNA molecules may comprise combinations of modified nucleotides, ribonucleotides, and deoxyribonucleotides. Incorporation of modified nucleotides into one or both strands of double-stranded RNA molecules can improve the in vivo stability of the RNA molecules, e.g., by reducing the molecules' susceptibility to nucleases and other degradation processes. The potency of double-stranded RNA molecules for reducing expression of the target gene can also be enhanced by incorporation of modified nucleotides.

[0365] In certain embodiments, the modified nucleotides have a modification of the ribose sugar. These sugar modifications can include modifications at the 2′ and/or 5′ position of the pentose ring. A 2′-modified nucleotide refers to a nucleotide having a pentose ring with a substituent at the 2′ position other than H or OH. Such 2′-modifications include, but are not limited to, 2′-O-alkyl (e.g. 0-C₁-C₁₀ or O—C₁-C₁₀ substituted alkyl), 2′-O-allyl (O—CH₂CH═CH₂), 2′-C-allyl, 2′-fluoro, 2′-O-methyl (OCH₃), 2′-O-methoxyethyl (O—(CH₂)₂OCH₃), 2′-OCF₃, 2′-O(CH₂)₂SCH₃, 2′-O-aminoalkyl, 2′-amino (e.g. NH₂), 2′-O-ethylamine, and 2′-azido. Modifications at the 5′ position of the pentose ring include, but are not limited to, 5′-methyl (R or S); 5′-vinyl, and 5′-methoxy.

[0366] The double-stranded RNA molecules employed in the methods of the invention may also comprise one or more modified internucleotide linkages. As used herein, the term “modified internucleotide linkage” refers to an internucleotide linkage other than the natural 3′ to 5′ phosphodiester linkage. In some embodiments, the modified internucleotide linkage is a phosphorous-containing internucleotide linkage, such as a phosphotriester, aminoalkylphosphotriester, an alkylphosphonate (e.g. methylphosphonate, 3′-alkylene phosphonate), a phosphinate, a phosphoramidate (e.g. 3′-amino phosphoramidate and aminoalkylphosphoramidate), a phosphorothioate (P═S), a chiral phosphorothioate, a phosphorodithioate, a thionophosphoramidate, a thionoalkylphosphonate, a thionoalkylphosphotriester, and a boranophosphate. In one embodiment, a modified internucleotide linkage is a 2′ to 5′ phosphodiester linkage. In other embodiments, the modified internucleotide linkage is a non-phosphorous-containing internucleotide linkage and thus can be referred to as a modified internucleoside linkage. Such non-phosphorous-containing linkages include, but are not limited to, morpholino linkages (formed in part from the sugar portion of a nucleoside); siloxane linkages (—O—Si(H)₂—O—); sulfide, sulfoxide and sulfone linkages; formacetyl and thioformacetyl linkages; alkene containing backbones; sulfamate backbones; methylenemethylimino (—CH₂—N(CH₃)—O—CH₂—) and methylenehydrazino linkages; sulfonate and sulfonamide linkages; amide linkages; and others having mixed N, O, S and CH₂ component parts. In one embodiment, the modified internucleoside linkage is a peptide-based linkage (e.g. aminoethylglycine) to create a peptide nucleic acid or PNA, such as those described in U.S. Pat. Nos. 5,539,082; 5,714,331; and 5,719,262. Other suitable modified internucleotide and internucleoside linkages that may be employed in the double-stranded RNA molecules are described in U.S. Pat. Nos. 6,693,187, 9,181,551, U.S. Patent Publication No. 2016/0122761, and Deleavey and Damha, Chemistry and Biology, Vol. 19: 937-954, 2012, all of which are hereby incorporated by reference in their entireties.

### Interfering RNA Delivery

[0367] The interfering RNA compounds can be administered by any method suitable for administration of nucleic acid agents, such as a DNA vaccine or gene therapy vectors. These methods include gene guns, bio injectors, and skin patches as well as needle-free methods such as the micro-particle DNA vaccine technology disclosed in U.S. Pat. No. 6,194,389, and the mammalian transdermal needle-free vaccination with powder-form vaccine as disclosed in U.S. Pat. No. 6,168,587. Additionally, intranasal delivery is possible, as described in, inter alia, Hamajima et al. (1998), Clin. Immunol. Immunopathol., 88(2), 205-10. Liposomes (e.g., as described in U.S. Pat. No. 6,472,375) and microencapsulation can also be used. Biodegradable targetable microparticle delivery systems can also be used (e.g., as described in U.S. Pat. No. 6,471,996).

[0368] In one embodiment, the active compounds are prepared with carriers that will protect the compound against rapid elimination from the body, such as a controlled release formulation, including implants and microencapsulated delivery systems. Biodegradable, biocompatible polymers can be used, such as ethylene vinyl acetate, polyanhydrides, polyglycolic acid, collagen, polyorthoesters, and polylactic acid. Such formulations can be prepared using standard techniques. The materials can also be obtained commercially from, for example, Alza Corporation and Nova Pharmaceuticals, Inc. Liposomal suspensions can also be used as pharmaceutically acceptable carriers. These can be prepared according to methods known to those skilled in the art, for example, as described in U.S. Pat. No. 4,522,811.

[0369] The interfering RNA molecule may be conjugated to one or more carbohydrate moieties to optimize one or more properties of the interfering RNA molecule. In many cases, the carbohydrate moiety will be attached to a modified subunit of the interfering RNA molecule or at the 5′ or 3′ end of one of strands of the interfering RNA molecule. E.g., the ribose sugar of one or more ribonucleotide subunits of an interfering RNA molecule can be replaced with another moiety, e.g., a non-carbohydrate (preferably cyclic) carrier to which is attached a carbohydrate moiety. A cyclic carrier may be a carbocyclic ring system, i.e., all ring atoms are carbon atoms, or a heterocyclic ring system, i.e., one or more ring atoms may be a heteroatom, e.g., nitrogen, oxygen, sulfur. The cyclic carrier may be a monocyclic ring system, or may contain two or more rings, e.g. fused rings. The cyclic carrier may be a fully saturated ring system, or it may contain one or more double bonds.

[0370] The carbohydrate moiety may be attached to the polynucleotide via a carrier. The carriers include (i) at least one “backbone attachment point,” preferably two “backbone attachment points” and (ii) at least one “tethering attachment point.” A “backbone attachment point” as used herein refers to a functional group, e.g. a hydroxyl group, or generally, a bond available for, and that is suitable for incorporation of the carrier into the backbone, e.g., the phosphate, or modified phosphate, e.g., sulfur containing, backbone, of a ribonucleic acid. A “tethering attachment point” (TAP) in some embodiments refers to a constituent ring atom of the cyclic carrier, e.g., a carbon atom or a heteroatom (distinct from an atom which provides a backbone attachment point), that connects a selected moiety. The moiety can be, e.g., a carbohydrate, e.g. monosaccharide, disaccharide, trisaccharide, tetrasaccharide, oligosaccharide and polysaccharide. Optionally, the selected moiety is connected by an intervening tether to the cyclic carrier. Thus, the cyclic carrier will often include a functional group, e.g., an amino group, or generally, provide a bond, that is suitable for incorporation or tethering of another chemical entity, e.g., a ligand to the constituent ring.

[0371] In some embodiments the interfering RNA molecule of the invention is conjugated to a carbohydrate moiety via a carrier, wherein the carrier can be cyclic group or acyclic group; in specific embodiments, the cyclic group is selected from pyrrolidinyl, pyrazolinyl, pyrazolidinyl, imidazolinyl, imidazolidinyl, piperidinyl, piperazinyl, [1,3]dioxolane, oxazolidinyl, isoxazolidinyl, morpholinyl, thiazolidinyl, isothiazolidinyl, quinoxalinyl, pyridazinonyl, tetrahydrofuryl and decalin; preferably, the acyclic group is selected from serinol backbone or diethanolamine backbone.

### Targeting the Interfering RNA

[0372] Given that ASGR, ASGR-1 and/or ASGR-2 is expressed on the surface of liver cells (e.g. hepatocytes), in certain embodiments, it is desirable to deliver the interfering RNA molecules to those liver cells so that the interfering effect can be exerted specifically within liver cells. Accordingly, in certain embodiments, the interfering RNA molecules are specifically targeted to liver cells using various methodologies known in the art and described herein. For example, in certain embodiments, antigen binding proteins (e.g. antibodies) or other targeting moieties disclosed herein below can be used to specifically target the interfering RNA molecules to the hepatocytes using various different receptors expressed on the surface of hepatocytes. In certain embodiments, the interfering RNA molecules are targeted to liver cells using the surface expressed ASGR, ASGR-1 and/or ASGR-2. In these embodiments, it is envisioned that this can result in a self-regulating system that reduces the amount of RNAi agent delivered to the liver cells as expression of ASGR, ASGR-1, and/or ASGR-2 is reduced due to the effect of the targeted interfering RNA.

[0373] A wide variety of targeting moieties can be coupled to the oligonucleotides of the present invention. In some embodiments, the targeting moieties are coupled, e.g., covalently, either directly or indirectly via an intervening tether.

[0374] In some embodiments, a targeting moiety alters the distribution, targeting or lifetime of the molecule into which it is incorporated. In preferred embodiments a targeting moiety provides an enhanced affinity for a selected target, e.g., molecule, cell or cell type, compartment, receptor e.g., a cellular or organ compartment, tissue, organ or region of the body, as, e.g., compared to a species absent such a targeting moiety. Targeting moieties providing enhanced affinity for a selected target are also termed targeting moieties.

[0375] Some targeting moieties can have endosomolytic properties. The endosomolytic targeting moieties promote the lysis of the endosome and/or transport of the composition of the invention, or its components, from the endosome to the cytoplasm of the cell. The endosomolytic targeting moiety may be a polyanionic peptide or peptidomimetic which shows pH-dependent membrane activity and fusogenicity. In one embodiment, the endosomolytic targeting moiety assumes its active conformation at endosomal pH. The “active” conformation is that conformation in which the endosomolytic targeting moiety promotes lysis of the endosome and/or transport of the composition of the invention, or its components, from the endosome to the cytoplasm of the cell. Exemplary endosomolytic targeting moieties include the GALA peptide (Subbarao et al., Biochemistry, 1987, 26: 2964-2972), the EALA peptide (Vogel et al., J. Am. Chem. Soc., 1996, 118: 1581-1586), and their derivatives (Turk et al., Biochem. Biophys. Acta, 2002, 1559: 56-68). In one embodiment, the endosomolytic component may contain a chemical group (e.g., an amino acid) which will undergo a change in charge or protonation in response to a change in pH. The endosomolytic component may be linear or branched.

[0376] In certain embodiments, targeting moieties can improve transport, hybridization, and specificity properties and may also improve nuclease resistance of the resultant natural or modified oligoribonucleotide, or a polymeric molecule comprising any combination of monomers described herein and/or natural or modified ribonucleotides.

[0377] In some embodiments, targeting moieties in general can include therapeutic modifiers, e.g., for enhancing uptake; diagnostic compounds or reporter groups e.g., for monitoring distribution; cross-linking agents; and nuclease-resistance conferring moieties. General examples include lipids, steroids, vitamins, sugars, proteins, peptides, polyamines, and peptide mimics.

[0378] Targeting moieties can include a naturally occurring substance, such as a protein (e.g., human serum albumin (I), low-density lipoprotein (LDL), high-density lipoprotein (HDL), or globulin); a carbohydrate (e.g., a dextran, pullulan, chitin, chitosan, inulin, cyclodextrin or hyaluronic acid); or a lipid. The targeting moiety may also be a recombinant or synthetic molecule, such as a synthetic polymer, e.g., a synthetic polyamino acid, an oligonucleotide (e.g. an aptamer). Examples of polyamino acids include polyamino acid is a polylysine (PLL), poly L-aspartic acid, poly L-glutamic acid, styrene-maleic acid anhydride copolymer, poly(L-lactide-co-glycolide) copolymer, divinyl ether-maleic anhydride copolymer, N-(2-hydroxypropyl)methacrylamide copolymer (HMPA), polyethylene glycol (PEG), polyvinyl alcohol (PVA), polyurethane, poly(2-ethylacrylic acid), N-isopropylacrylamide polymers, or polyphosphazine. Example of polyamines include: polyethylenimine, polylysine (PLL), spermine, spermidine, polyamine, pseudopeptide-polyamine, peptidomimetic polyamine, dendrimer polyamine, arginine, amidine, protamine, cationic lipid, cationic porphyrin, quaternary salt of a polyamine, or an alpha helical peptide.

[0379] Targeting moieties can also include other targeting groups, e.g., a cell or tissue targeting agent, e.g., a lectin, glycoprotein, lipid or protein, e.g., an antibody, that binds to a specified cell type such as a kidney cell. A targeting group can be a thyrotropin, melanotropin, lectin, glycoprotein, surfactant protein A, Mucin carbohydrate, multivalent lactose, multivalent galactose, N-acetyl-galactosamine, N-acetyl-glucosamine multivalent mannose, multivalent fucose, glycosylated polyaminoacids, multivalent galactose, transferrin, bisphosphonate, polyglutamate, polyaspartate, a lipid, cholesterol, a steroid, bile acid, folate, vitamin B12, biotin, an RGD peptide, an RGD peptide mimetic or an aptamer.

[0380] Other examples of targeting moieties include dyes, intercalating agents (e.g. acridines), cross-linkers (e.g. psoralene, mitomycin C), porphyrins (TPPC4, texaphyrin, Sapphyrin), polycyclic aromatic hydrocarbons (e.g., phenazine, dihydrophenazine), artificial endonucleases or a chelator (e.g. EDTA), lipophilic molecules, e.g, cholesterol, cholic acid, 1-pyrene butyric acid, dihydrotestosterone, 1,3-Bis-O(hexadecyl)glycerol, geranyloxyhexyl group, hexadecylglycerol, borneol, menthol, 1,3-propanediol, heptadecyl group, palmitic acid, myristic acid, 03-(oleoyl)lithocholic acid, 03-(oleoyl)cholenic acid, dimethoxytrityl, or phenoxazine) and peptide conjugates (e.g., antennapedia peptide, Tat peptide), alkylating agents, phosphate, amino, mercapto, PEG (e.g., PEG-40K), MPEG, [MPEG]₂, polyamino, alkyl, substituted alkyl, radiolabeled markers, enzymes, haptens (e.g. biotin), transport/absorption facilitators (e.g., aspirin, vitamin E, folic acid), synthetic ribonucleases (e.g., imidazole, bisimidazole, histamine, imidazole clusters, acridine-imidazole conjugates, Eu3+ complexes of tetraazamacrocycles), dinitrophenyl, HRP, or AP.

[0381] Targeting moieties can be proteins, e.g., glycoproteins, or peptides, e.g., molecules having a specific affinity for a co-moiety, or antigen binding proteins, such as antibodies; e.g., an antibody, that binds to a specified cell type such as a liver hepatocyte. Targeting moieties may also include hormones and hormone receptors. They can also include non-peptidic species, such as lipids, lectins, carbohydrates, vitamins, cofactors, multivalent lactose, multivalent galactose, N-acetyl-galactosamine, N-acetyl-glucosamine multivalent mannose, multivalent fucose, or aptamers. The targeting moiety can be, for example, a lipopolysaccharide.

[0382] The targeting moiety can be a substance, e.g, a drug, which can increase the uptake of the interfering RNA molecule into the cell, for example, by disrupting the cell's cytoskeleton, e.g., by disrupting the cell's microtubules, microfilaments, and/or intermediate filaments. The drug can be, for example, taxon, vincristine, vinblastine, cytochalasin, nocodazole, jasplakinolide, latrunculin A, phalloidin, swinholide A, indanocine, or myoseverin.

[0383] The targeting moiety can increase the uptake of the interfering RNA molecule into the cell by activating an inflammatory response, for example. Exemplary targeting moieties that would have such an effect include tumor necrosis factor alpha (TNFalpha), interleukin-1 beta, or gamma interferon.

[0384] In one embodiment, the targeting moiety is a lipid or lipid-based molecule. Such a lipid or lipid-based molecule preferably binds a serum protein, e.g., human serum albumin (I). A serum protein binding targeting moiety, in certain embodiments, allows for distribution of the conjugate to a target tissue, e.g., a non-kidney target tissue of the body. For example, the target tissue can be the liver, including hepatocytes or parenchymal cells of the liver. Other molecules that can bind serum proteins can also be used as targeting moieties. For example, naproxen or aspirin can be used. A lipid or lipid-based targeting moiety can (a) increase resistance to degradation of the conjugate, (b) increase targeting or transport into a target cell or cell membrane, and/or (c) can be used to adjust binding to a serum protein.

[0385] A lipid based targeting moiety can be used to modulate, e.g., control the binding of the conjugate to a target tissue. For example, a lipid or lipid-based targeting moiety that binds to a serum protein more strongly will be less likely to be targeted to the kidney and therefore less likely to be cleared from the body. A lipid or lipid-based targeting moiety that binds to a serum protein less strongly can be used to target the conjugate to the kidney, if so desired.

[0386] In one embodiment, the lipid based targeting moiety binds human serum albumin. In a specific embodiment, it binds human serum albumin with a sufficient affinity such that the conjugate will be preferably distributed to a non-kidney tissue. In certain embodiments, it is preferred that the affinity not be so strong that the human serum albumin targeting moiety binding cannot be reversed.

[0387] In another preferred embodiment, the lipid based targeting moiety binds human serum albumin weakly or not at all, such that the conjugate will be preferably distributed to the kidney. Other moieties that target to kidney cells can also be used in place of or in addition to the lipid-based targeting moiety.

[0388] In another embodiment, the targeting moiety is for example a vitamin, e.g., a vitamin, which is taken up by a target cell, e.g., a proliferating cell. Exemplary vitamins include vitamin A, E, and K. Other exemplary vitamins include B vitamins, e.g., folic acid, B12, riboflavin, biotin, pyridoxal or other vitamins or nutrients taken up by cells. Also included are low density lipoprotein (LDL) and high-density lipoprotein (HDL).

[0389] In another embodiment, the targeting moiety is a cell-permeation agent, preferably a helical cell-permeation agent. In some embodiments, the agent is amphipathic. An exemplary agent is a peptide such as tat or antennopedia. If the agent is a peptide, it can be modified, including a peptidylmimetic, invertomers, non-peptide or pseudo-peptide linkages, and use of D-amino acids. The helical agent is preferably an alpha-helical agent, which preferably has a lipophilic and a lipophobic phase.

[0390] The targeting moiety can be a peptide or peptidomimetic. A peptidomimetic (also referred to herein as an oligopeptidomimetic) is a molecule capable of folding into a defined three-dimensional structure similar to a natural peptide. The peptide or peptidomimetic moiety can be about 5-50 amino acids long, e.g., about 5, 10, 15, 20, 25, 30, 35, 40, 45, or 50 amino acids long. A peptide or peptidomimetic can be, for example, a cell permeation peptide, cationic peptide, amphipathic peptide, or hydrophobic peptide (e.g., consisting primarily of Tyr, Trp or Phe). The peptide moiety can be a dendrimer peptide, constrained peptide or crosslinked peptide. In another alternative, the peptide moiety can include a hydrophobic membrane translocation sequence (MTS). An exemplary hydrophobic MTS-containing peptide is RFGF having the amino acid sequence AAVALLPAVLLALLAP. An RFGF analogue (e.g., amino acid sequence AALLPVLLAAP) containing a hydrophobic MTS can also be a targeting moiety. The peptide moiety can be a “delivery” peptide, which can carry large polar molecules including peptides, oligonucleotides, and protein across cell membranes. For example, sequences from the HIV Tat protein (GRKKRRQRRRPPQ) and the Drosophila Antennapedia protein (RQIKIWFQNRRMKWKK) have been found to be capable of functioning as delivery peptides. A peptide or peptidomimetic can be encoded by a random sequence of DNA, such as a peptide identified from a phage-display library, or one-bead-one-compound (OBOC) combinatorial library (Lam et al., Nature, 354:82-84, 1991). In some embodiments, the peptide or peptidomimetic tethered to an interfering RNA molecule via an incorporated monomer unit is a cell targeting peptide such as an arginine-glycine-aspartic acid (RGD)-peptide, or RGD mimic. A peptide moiety can range in length from about 5 amino acids to about 40 amino acids. The peptide moieties can have a structural modification, such as to increase stability or direct conformational properties. Any of the structural modifications described below can be utilized. An RGD peptide can facilitate targeting of an interfering RNA molecule to cells of a variety of other tissues, including the lung, kidney, spleen, or liver (Aoki et al., Cancer Gene Therapy 8:783-787, 2001). The RGD peptide can be linear or cyclic, and can be modified, e.g., glycosylated or methylated to facilitate targeting to specific tissues. For example, a glycosylated RGD peptide can deliver an interfering RNA molecule to a cell expressing αVβ₃ (Haubner et al., Jour. Nucl. Med., 42:326-336, 2001). Peptides that target markers enriched in proliferating cells can be used. E.g., RGD containing peptides and peptidomimetics can target cells, in particular cells that exhibit an integrin. Thus, one could use RGD peptides, cyclic peptides containing RGD, RGD peptides that include D-amino acids, as well as synthetic RGD mimics. In addition to RGD, one can use other moieties that target the integrin ligand.

[0391] A “cell permeation peptide” is capable of permeating a cell, e.g., a microbial cell, such as a bacterial or fungal cell, or a mammalian cell, such as a human cell. A microbial cell-permeating peptide can be, for example, an α-helical linear peptide (e.g., LL-37 or Cercopin P1), a disulfide bond-containing peptide (e.g., α-defensin, β-defensin or bactenecin), or a peptide containing only one or two dominating amino acids (e.g., PR-39 or indolicidin). A cell permeation peptide can also include a nuclear localization signal (NLS). For example, a cell permeation peptide can be a bipartite amphipathic peptide, such as MPG, which is derived from the fusion peptide domain of HIV-1 gp41 and the NLS of SV40 large T antigen (Simeoni et al., Nucl. Acids Res. 31:2717-2724, 2003).

[0392] In one embodiment, a targeting peptide can be an amphipathic α-helical peptide. Exemplary amphipathic α-helical peptides include, but are not limited to, cecropins, lycotoxins, pardaxins, buforin, CPF, bombinin-like peptide (BLP), cathelicidins, ceratotoxins, S. clava peptides, hagfish intestinal antimicrobial peptides (HFIAPs), magainines, brevinins-2, dermaseptins, melittins, pleurocidin, H.sub.2A peptides, Xenopus peptides, esculentin-1, and caerins.

[0393] Peptide and peptidomimetic targeting moieties include those having naturally occurring or modified peptides, e.g., D or L peptides; a, 3, or 7 peptides; N-methyl peptides; azapeptides; peptides having one or more amide, i.e., peptide, linkages replaced with one or more urea, thiourea, carbamate, or sulfonyl urea linkages; or cyclic peptides.

[0394] The targeting moiety can be any moiety that is capable of targeting a specific receptor. Examples are: folate, GalNAc, galactose, mannose, mannose-6P, clusters of sugars such as GalNAc cluster, mannose cluster, galactose cluster, or an aptamer. A cluster is a combination of two or more sugar units. The targeting moieties also include integrin receptor moieties, chemokine receptor moieties, transferrin, biotin, serotonin receptor moieties, PSMA, endothelin, GCPII, somatostatin, LDL and HDL moieties. The targeting moieties can also be based on nucleic acid, e.g., an aptamer. The aptamer can be unmodified or have any combination of modifications disclosed herein.

[0395] Other exemplary endosomal release agents include imidazoles, poly or oligoimidazoles, PEIs, peptides, fusogenic peptides, polycarboxylates, polycations, masked oligo or poly cations or anions, acetals, polyacetals, ketals/polyketals, orthoesters, polymers with masked or unmasked cationic or anionic charges, dendrimers with masked or unmasked cationic or anionic charges.

[0396] Pharmacokinetic (“PK”) modulators include lipophiles, bile acids, steroids, phospholipid analogues, peptides, protein binding agents, PEG, vitamins etc. Exemplary PK modulators include, but are not limited to, cholesterol, fatty acids, cholic acid, lithocholic acid, dialkylglycerides, diacylglyceride, phospholipids, sphingolipids, naproxen, ibuprofen, vitamin E, biotin etc. Oligonucleotides that comprise a number of phosphorothioate linkages are also known to bind to serum protein, thus short oligonucleotides, e.g. oligonucleotides of about 5 bases, 10 bases, 15 bases or 20 bases, comprising multiple of phosphorothioate linkages in the backbone are also amenable to the present invention as targeting moieties (e.g. as PK modulating moieties). In addition, aptamers that bind serum components (e.g. serum proteins) are also amenable to the present invention as PK modulating moieties.

[0397] When two or more targeting moieties are present, the targeting moieties can all have same properties, all have different properties or some targeting moieties have the same properties while others have different properties. For example, a targeting moiety can have targeting properties, have endosomolytic activity and/or have PK modulating properties. In certain embodiments, all the have different properties.

[0398] In some embodiments, a targeting moiety can be conjugated to nucleobases, sugar moieties, or internucleosidic linkages of nucleic acid molecules. Conjugation to purine nucleobases or derivatives thereof can occur at any position including, endocyclic and exocyclic atoms. In some embodiments, the 2-, 6-, 7-, or 8-positions of a purine nucleobase are attached to a conjugate moiety. Conjugation to pyrimidine nucleobases or derivatives thereof can also occur at any position. In some embodiments, the 2-, 5-, and 6-positions of a pyrimidine nucleobase can be substituted with a conjugate moiety. Conjugation to sugar moieties of nucleosides can occur at any carbon atom. Example carbon atoms of a sugar moiety that can be attached to a conjugate moiety include the 2′, 3′, and 5′ carbon atoms. The 1′ position can also be attached to a conjugate moiety, such as in an abasic residue. Internucleosidic linkages can also bear conjugate moieties. For phosphorus-containing linkages (e.g., phosphodiester, phosphorothioate, phosphorodithioate, phosphoroamidate, and the like), the conjugate moiety can be attached directly to the phosphorus atom or to an O, N, or S atom bound to the phosphorus atom. For amine- or amide-containing internucleosidic linkages (e.g., PNA), the conjugate moiety can be attached to the nitrogen atom of the amine or amide or to an adjacent carbon atom.

[0399] It is envisioned that any suitable targeting moiety in the field of RNA interference may be used, although the targeting moiety is typically a carbohydrate e.g. monosaccharide (such as GalNAc), disaccharide, trisaccharide, tetrasaccharide, polysaccharide. Linkers that conjugate the targeting moiety to the nucleic acid include those discussed herein. For example, the targeting moiety can be one or more GalNAc derivatives attached through a bivalent or trivalent branched linker.

[0400] In certain embodiments, cleavable linking groups are utilized. A cleavable linking group is one which is sufficiently stable outside the cell, but which upon entry into a target cell is cleaved to release the two parts the linker is holding together. In one embodiment, the cleavable linking group is cleaved at least 10 times or more, and in some embodiments, at least 100 times faster in the target cell or under a first reference condition (which can, e.g., be selected to mimic or represent intracellular conditions) than in the blood of a subject, or under a second reference condition (which can, e.g., be selected to mimic or represent conditions found in the blood or serum).

[0401] Cleavable linking groups are susceptible to cleavage agents, e.g., pH, redox potential or the presence of degradative molecules. Generally, cleavage agents are more prevalent or found at higher levels or activities inside cells than in serum or blood. Examples of such degradative agents include: redox agents which are selected for particular substrates or which have no substrate specificity, including, e.g., oxidative or reductive enzymes or reductive agents such as mercaptans, present in cells, that can degrade a redox cleavable linking group by reduction; esterases; endosomes or agents that can create an acidic environment, e.g., those that result in a pH of five or lower; enzymes that can hydrolyze or degrade an acid cleavable linking group by acting as a general acid, peptidases (which can be substrate specific), and phosphatases.

[0402] A cleavable linkage group, such as a disulfide bond can be susceptible to pH. The pH of human serum is 7.4, while the average intracellular pH is slightly lower, ranging from about 7.1-7.3. Endosomes have a more acidic pH, in the range of 5.5-6.0, and lysosomes have an even more acidic pH at around 5.0. Some linkers will have a cleavable linking group that is cleaved at a preferred pH, thereby releasing the cationic lipid from the moiety inside the cell, or into the desired compartment of the cell.

[0403] A linker can include a cleavable linking group that is cleavable by a particular enzyme. The type of cleavable linking group incorporated into a linker can depend on the cell to be targeted. For example, liver targeting moieties can be linked to the cationic lipids through a linker that includes an ester group. Liver cells are rich in esterases, and therefore the linker will be cleaved more efficiently in liver cells than in cell types that are not esterase-rich. Other cell-types rich in esterases include cells of the lung, renal cortex, and testis. Linkers that contain peptide bonds can be used when targeting cell types rich in peptidases, such as liver cells and synoviocytes.

[0404] In general, the suitability of a candidate cleavable linking group can be evaluated by testing the ability of a degradative agent (or condition) to cleave the candidate linking group. It will also be desirable to also test the candidate cleavable linking group for the ability to resist cleavage in the blood or when in contact with other non-target tissue. Thus one can determine the relative susceptibility to cleavage between a first and a second condition, where the first is selected to be indicative of cleavage in a target cell and the second is selected to be indicative of cleavage in other tissues or biological fluids, e.g., blood or serum. The evaluations can be carried out in cell free systems, in cells, in cell culture, in organ or tissue culture, or in whole animals. It may be useful to make initial evaluations in cell-free or culture conditions and to confirm by further evaluations in whole animals. In some embodiments, useful candidate compounds are cleaved at least 2, 4, 10 or 100 times faster in the cell (or under in vitro conditions selected to mimic intracellular conditions) as compared to blood or serum (or under in vitro conditions selected to mimic extracellular conditions).

[0405] In some embodiments, redox cleavable linking groups are utilized. Redox cleavable linking groups are cleaved upon reduction or oxidation. An example of reductively cleavable linking group is a disulphide linking group (—S—S—). To determine if a candidate cleavable linking group is a suitable “reductively cleavable linking group,” or for example is suitable for use with a particular interfering RNA molecule and particular targeting agent one can look to methods described herein. For example, a candidate can be evaluated by incubation with dithiothreitol (DTT), or other reducing agent using reagents know in the art, which mimic the rate of cleavage which would be observed in a cell, e.g., a target cell. The candidates can also be evaluated under conditions which are selected to mimic blood or serum conditions. In a specific embodiment, candidate compounds are cleaved by at most 10% in the blood. In some embodiments, useful candidate compounds are degraded at least 2, 4, 10 or 100 times faster in the cell (or under in vitro conditions selected to mimic intracellular conditions) as compared to blood (or under in vitro conditions selected to mimic extracellular conditions). The rate of cleavage of candidate compounds can be determined using standard enzyme kinetics assays under conditions chosen to mimic intracellular media and compared to conditions chosen to mimic extracellular media.

[0406] In yet some embodiments, phosphate-based cleavable linking groups are cleaved by agents that degrade or hydrolyze the phosphate group. An example of an agent that cleaves phosphate groups in cells are enzymes such as phosphatases in cells. Examples of phosphate-based linking groups are —O—P(O)(Ork)-O—, —O—P(S)(Ork)-O—, —O—P(S)(SRk)-O—, —S—P(O) (Ork)-O—, —O—P(O)(Ork)-S—, —S—P(O)(Ork)-S—, —O—P(S)(Ork)-S—, —S—P(S)(Ork)-O—, —O—P(O)(Rk)-O—, —O—P(S)(Rk)-O—, —S—P(O)(Rk)-O—, —S—P(S)(Rk)-O—, —S—P(O)(Rk)-S—, —O—P(S)(Rk)-S—. Specific embodiments include —O—P(O)(OH)—O—, —O—P(S)(OH)—O—, —O—P(S)(SH)—O—, —S—P(O)(OH)—O—, —O—P(O)(OH)—S—, —S—P(O)(OH)—S—, —O—P(S)(OH)—S—, —S—P(S)(OH)—O—, —O—P(O)(H)—O—, —O—P(S)(H)—O—, —S—P(O)(H)—O—, —S—P(S)(H)—O—, —S—P(O)(H)—S—, —O—P(S)(H)—S—. Another specific embodiment is —O—P(O)(OH)—O—. These candidates can be evaluated using methods analogous to those described above.

[0407] In some embodiments, acid cleavable linking groups, which are linking groups that are cleaved under acidic conditions, are envisioned. In some embodiments acid cleavable linking groups are cleaved in an acidic environment with a pH of about 6.5 or lower (e.g., about 6.0, 5.5, 5.0, or lower), or by agents such as enzymes that can act as a general acid. In a cell, specific low pH organelles, such as endosomes and lysosomes can provide a cleaving environment for acid cleavable linking groups. Examples of acid cleavable linking groups include but are not limited to hydrazones, esters, and esters of amino acids. Acid cleavable groups can have the general formula —C══NN—, C(O)O, or —OC(O). A specific embodiment is when the carbon attached to the oxygen of the ester (the alkoxy group) is an aryl group, substituted alkyl group, or tertiary alkyl group such as dimethyl pentyl or t-butyl. These candidates can be evaluated using methods analogous to those described above.

[0408] In some embodiments, ester-based cleavable linking groups, which are cleaved by enzymes such as esterases and amidases in cells, are envisioned. Examples of ester-based cleavable linking groups include but are not limited to esters of alkylene, alkenylene and alkynylene groups. Ester cleavable linking groups have the general formula —C(O)O—, or —OC(O)—. These candidates can be evaluated using methods analogous to those described above.

[0409] In yet further embodiments, peptide-based cleavable linking groups, which are cleaved by enzymes such as peptidases and proteases in cells, are envisioned. Peptide-based cleavable linking groups are peptide bonds formed between amino acids to yield oligopeptides (e.g., dipeptides, tripeptides etc.) and polypeptides. Peptide-based cleavable groups do not include the amide group (—C(O)NH—). The amide group can be formed between any alkylene, alkenylene or alkynelene. A peptide bond is a special type of amide bond formed between amino acids to yield peptides and proteins. The peptide based cleavage group is generally limited to the peptide bond (i.e., the amide bond) formed between amino acids yielding peptides and proteins and does not include the entire amide functional group. Peptide-based cleavable linking groups have the general formula —NHCHR^{A}C(O)NHCHR^{B}C(O)—, where R^{A} and R^{B} are the R groups of the two adjacent amino acids. These candidates can be evaluated using methods analogous to those described above. As used herein, “carbohydrate” refers to a compound which is either a carbohydrate per se made up of one or more monosaccharide units having at least 6 carbon atoms (which may be linear, branched or cyclic) with an oxygen, nitrogen or sulfur atom bonded to each carbon atom; or a compound having as a part thereof a carbohydrate moiety made up of one or more monosaccharide units each having at least six carbon atoms (which may be linear, branched or cyclic), with an oxygen, nitrogen or sulfur atom bonded to each carbon atom. Representative carbohydrates include the sugars (mono-, di-, tri- and oligosaccharides containing from about 4-9 monosaccharide units), and polysaccharides such as starches, glycogen, cellulose and polysaccharide gums.

### Synthesis of Interfering RNA

[0410] The interfering RNA molecules that can be employed in the methods of the present invention can readily be made using techniques known in the art, for example, using conventional RNA solid phase synthesis. See, for example, U.S. Pat. No. 8,877,917. The polynucleotides of the double-stranded RNA molecules can be assembled on a suitable nucleic acid synthesizer utilizing standard nucleotide or nucleoside precursors (e.g. phosphoramidites). Automated nucleic acid synthesizers are sold commercially by several vendors, including DNA/RNA synthesizers from Applied Biosystems (Foster City, CA), MerMade synthesizers from BioAutomation (Irving, TX), and OligoPilot synthesizers from GE Healthcare Life Sciences (Pittsburgh, PA).

[0411] The 2′ silyl protecting group can be used in conjunction with acid labile dimethoxytrityl (DMT) at the 5′ position of ribonucleosides to synthesize oligonucleotides via phosphoramidite chemistry. Final deprotection conditions are known not to significantly degrade RNA products. All syntheses can be conducted in any automated or manual synthesizer on large, medium, or small scale. The syntheses may also be carried out in multiple well plates or glass slides.

[0412] The 2′-O-silyl group can be removed via exposure to fluoride ions, which can include any source of fluoride ion, e.g., those salts containing fluoride ion paired with inorganic counterions e.g., cesium fluoride and potassium fluoride or those salts containing fluoride ion paired with an organic counterion, e.g., a tetraalkylammonium fluoride. A crown ether catalyst can be utilized in combination with the inorganic fluoride in the deprotection reaction. Preferred fluoride ion source are tetrabutylammonium fluoride or aminehydrofluorides (e.g., combining aqueous HF with triethylamine in a dipolar aprotic solvent, e.g., dimethylformamide).

[0413] The choice of protecting groups for use on the phosphite triesters and phosphotriesters can alter the stability of the triesters towards fluoride. Methyl protection of the phosphotriester or phosphitetriester can stabilize the linkage against fluoride ions and improve process yields.

[0414] Since ribonucleosides have a reactive 2′ hydroxyl substituent, it can be desirable to protect the reactive 2′ position in RNA with a protecting group that is orthogonal to a 5′-O—dimethoxytrityl protecting group, e.g., one stable to treatment with acid. Silyl protecting groups meet this criterion and can be readily removed in a final fluroide deprotection step that can result in minimal RNA degradation.

[0415] Tetrazole catalysts can be used in the standard phosphoramidite coupling reaction. Preferred catalysts include e.g., tetrazole, S-ethyl-tetrazole, p-nitrophenyltetrazole.

[0416] See also, for example, Trufert et al., Tetrahedron, 52:3005, 1996; and Manoharan, “Oligonucleotide Conjugates in Antisense Technology,” in Antisense Drug Technology, ed. S. T. Crooke, Marcel Dekker, Inc., 2001. The protected monomer compounds can be separated from a reaction mixture and further purified by a method such as column chromatography, high pressure liquid chromatography, or recrystallization. As can be appreciated by the skilled artisan, further methods of synthesizing the compounds of the formulae herein will be evident to those of ordinary skill in the art. Additionally, the various synthetic steps may be performed in an alternate sequence or order to give the desired compounds. Other synthetic chemistry transformations, protecting groups (e.g., for hydroxyl, amino, etc. present on the bases) and protecting group methodologies (protection and deprotection) useful in synthesizing the compounds described herein are known in the art and include, for example, those such as described in R. Larock, Comprehensive Organic Transformations, VCH Publishers (1989); T. W. Greene and P. G. M. Wuts, Protective Groups in Organic Synthesis, 2d. Ed., John Wiley and Sons (1991); L. Fieser and M. Fieser, Fieser and Fieser's Reagents for Organic Synthesis, John Wiley and Sons (1994); and L. Paquette, ed., Encyclopedia of Reagents for Organic Synthesis, John Wiley and Sons (1995), and subsequent editions thereof.

### Methods of Treatment

[0417] In further embodiments of the present invention, a method of treating a human subject, comprising administering a therapeutic dosage of the antigen binding proteins or antibodies or interfering RNA (e.g., siRNA or shRNA) of the present invention is provided. In one embodiment, the antigen binding proteins are monoclonal antibodies. In one embodiment, the antigen binding proteins are human antibodies. In another embodiment, the antigen binding proteins or antibodies are humanized antibodies. In another embodiment, interfering RNA (e.g., siRNA or shRNA) is administered. As used herein the term “subject” refers to a mammal, including humans, and can be used interchangeably with the term “patient”.

[0418] Given the results of the Icelandic study presented in the examples below, there need not be any particular further manipulation downstream in a host receiving a therapy involving administering the ASGR inhibitor (e.g., antigen binding proteins or antibodies or RNAi) to the host. That is, in some embodiments, the antibody (or RNAi) need simply be one or more of the antibodies (or RNAi) described herein, which binds to (and inhibits) ASGR (such as ASGR1), and be administered in an amount, and at a frequency sufficient to reduce the risk of cardiovascular disease, myocardial infarction, or other disorders provided herein. In some embodiments, the antibody (or RNAi) is administered in an amount sufficient to result in a lowering of non-HDL cholesterol. In some embodiments, the antibody (or RNAi) is administered in an amount sufficient to result in lowering LDL cholesterol. While not intended to be limiting unless expressed otherwise, below is a description of various embodiments through which ASGR can have an impact on various disorders, and thus, how the various antibodies (or RNAi) provided herein (which can inhibit (e.g., reduce) ASGR function) can have an impact on the various disorders provided herein.

[0419] In some embodiments, the ASGR inhibitor (e.g., antigen binding proteins or antibodies or RNAi) operates through ASGR's role in platelet clearance. Inhibiting (e.g., reducing) the receptor results in a reduction in clearance of old platelets. Such older platelets do not coagulate as well as new platelets and as a result, the blood is thinner. As a result, plaques can lessen and there can be a positive impact (e.g., stroke is lessened) for the subject.

[0420] In some embodiments, the ASGR inhibitor (e.g., antigen binding proteins or antibodies or RNAi) binds to ASGR to alter inflammation. For example, reducing the ASGR-1 receptor results in a modification of the immune response. Normally, there can be an increase in proinflammatory cytokines. These proinflammatory cytokines are circulating in the native state (one where the ASGR1 receptor is not reduced). However, ALP (alkaline phosphatase) can have an anti-inflammatory role thereby reducing inflammation and coagulopathy systemically. In some embodiments, the mechanism of action involves reducing ASGR1 which increases ALP and therefore reduces inflammation.

[0421] In some embodiments, and without intending to be limited by theory (unless expressed otherwise), the ASGR inhibitor (e.g., antigen binding proteins or antibodies or RNAi) can reduce an activity due to ASGR interacting with one or more other molecules, either directly or indirectly. For example, various embodiments for various proteins are provided herein in Examples 18 and 19. As noted above, this selection of proteins can also be useful for determining the effectiveness of the ASGR inhibitor (e.g., antigen binding proteins or antibodies or RNAi) (and/or the amount of the antibody and/or identification of a subject who can respond to the therapy (or RNAi)) by monitoring one or more of these proteins as a Cardiovascular Disease marker. Thus, these markers are useful as markers and, without intending to be limited by theory, in some embodiments, one or more of the proteins disclosed below is the protein through which (directly or indirectly) ASGR1 modulation achieves its benefit for one or more of the disorders provided herein, including cardiovascular disease.

[0422] In addition to the marker proteins described in Examples 18 and 19 herein (which also allow for various mechanisms of action and monitoring the effectiveness of various ASGR inhibitors (e.g., antigen binding proteins or antibodies or RNAi) and dosage regimes), the following proteins of interest are those that interact with ASGR, and ASGR-1 in particular, directly by binding to them. Thus, these are additional interactions that can be inhibited (e.g., reduced) for various embodiments provided herein, by various ASGR inhibitors (e.g., antigen binding proteins or antibodies or RNAi). While not intending to be limited by theory (unless explicitly stated otherwise), ASGR-1's binding to one or more of the following proteins can be inhibited (e.g., reduced) by using an ASGR-1 inhibitor (e.g., antigen binding protein or antibody or RNAi) provided herein that inhibits (e.g., reduces) the noted binding. While in some embodiments, the protein interactions are contemplated as resulting mechanisms of action that occur downstream from when ASGR levels are effectively reduced by an ASGR inhibitor (e.g., antigen binding protein or antibody binding or via RNAi), the following list is a list of proteins that directly bind to ASGR1, and thus whose direct binding to ASGR-1 can be inhibited (e.g., reduced) by one or more of the antigen binding proteins or antibodies provided herein (or RNAi). In some embodiments, the ASGR-1 inhibitor (e.g., antigen binding protein or antibody or RNAi) inhibits (e.g., reduces) ASGR-1's binding to one or more of: Alpha-2-HS-glycoprotein (aka Fetuin A) (see Tozawa et al, J Biol Chem (2001) 276:12624-12628); Asialoglycoprotein receptor 1 (see Stockert et al (1977) Science 197:667-668), Orosomucoid (aka alpha-1-acid glycoprotein) (see Tozawa et al, J Biol Chem (2001) 276:12624-12628), Alkaline phosphatase, (see Hardonk M J, Scholtens H B. Histochemistry. 1980; 69(3):289-97 and Scholtens H B, Meijer D K, Hardonk M J. Liver. 1982 March; 2(1):14-21), LDL and chylomicrons (Windler et al Biochem J (1991) 276:79-87), Fibronectin (see Rotundo et al Hepatology (1998) 28:475-485), and IgA (see Stockert et al PNAS (1982) 79:6229-6231). In some embodiments, the ASGR inhibitor (e.g., antigen binding protein or antibody or RNAi) antibody binds to ASGR and inhibits (e.g., reduces) ASGR's interaction with a molecule that has a terminal Gal or GalNAc, including, but not limited to protein ligands, synthetic polysaccharides, solid substrates, etc. In some embodiments, the ASGR inhibitor (e.g., antigen binding proteins or antibodies or RNAi) inhibits (e.g., reduces) ASGR1's ability to bind to an asialylated molecule. In some embodiments, the invention provides a method of treating or preventing a cardiovascular disease comprising administering to a patient in need thereof a therapeutically effective dose of an ASGR inhibitor as described herein. In some embodiments, the cardiovascular disease is coronary artery disease or myocardial infarction. In some embodiments, the ASGR inhibitor is an inhibitor of ASGR-1. In some embodiments, the ASGR inhibitor is an inhibitor of ASGR-2. In some embodiments, the ASGR inhibitor is an inhibitor of ASGR-1 and ASGR-2. In some embodiments, the ASGR, ASGR-1 and/or ASGR-2 inhibitor is one or more of the antigen binding proteins described herein. In some embodiments, the ASGR, ASGR-1 and/or ASGR-2 inhibitor is an interfering RNA (e.g., siRNA or shRNA) as described herein. In some embodiments, the relative risk reduction of a cardiovascular event is at least about 5%, at least about 10%, at least about 15%, at least about 20%, at least about 25%, at least about 30%, at least about 35%, at least about 40%, at least about 45%, at least about 50%, at least about 55%, at least about 60% in the patient. Some non-limiting examples of cardiovascular disease include atherosclerotic diseases, such as, for example, coronary heart disease, coronary artery disease, peripheral arterial disease, stroke (ischaemic and hemorrhagic), angina pectoris, cerebrovascular disease, acute coronary syndrome, and myocardial infarction. In some embodiments, the ASGR, ASGR-1 and/or ASGR-2 inhibitors of the present invention are useful in reducing the risk of: nonfatal heart attacks, fatal and non-fatal strokes, certain types of heart surgery, hospitalization for heart failure, chest pain in patients with heart disease, and/or cardiovascular events because of established heart disease such as prior heart attack, prior heart surgery, and/or chest pain with evidence of clogged arteries. In some embodiments, the ASGR, ASGR-1 and/or ASGR-2 inhibitors of the present invention and methods can be used to reduce the risk of recurrent cardiovascular events.

[0423] In some embodiments, the invention provides a method of decreasing the risk of acquiring coronary artery disease or having an MI comprising administering to a patient in need thereof a therapeutically effective dose of an ASGR inhibitor as described herein. In some embodiments, the ASGR inhibitor is an inhibitor of ASGR-1. In some embodiments, the ASGR inhibitor is an inhibitor of ASGR-2. In some embodiments, the ASGR inhibitor is an inhibitor of ASGR-1 and ASGR-2. In some embodiments, the ASGR, ASGR-1 and/or ASGR-2 inhibitor is one or more of the antigen binding proteins described herein. In some embodiments, the ASGR, ASGR-1 and/or ASGR-2 inhibitor is an interfering RNA (e.g., siRNA or shRNA) as described herein. In some embodiments, the relative risk reduction of coronary artery disease or MI is at least about 5%, at least about 10%, at least about 15%, at least about 20%, at least about 25%, at least about 30%, at least about 35%, at least about 40%, at least about 45%, at least about 50%, at least about 55%, at least about 60% in the patient.

[0424] In some embodiments, the invention provides a method of reducing blood LDL cholesterol levels in a patient comprising administering to a patient in need thereof a therapeutically effective dose of an ASGR inhibitor as described herein. In some embodiments, the ASGR inhibitor is an inhibitor of ASGR-1. In some embodiments, the ASGR inhibitor is an inhibitor of ASGR-2. In some embodiments, the ASGR inhibitor is an inhibitor of ASGR-1 and ASGR-2. In some embodiments, the ASGR, ASGR-1 and/or ASGR-2 inhibitor is one or more of the antigen binding proteins described herein. In some embodiments, the ASGR, ASGR-1 and/or ASGR-2 inhibitor is an interfering RNA (e.g., siRNA or shRNA) as described herein. In some embodiments, the blood LDL cholesterol level in the patient is reduced by at least about 15%, as compared to a predose level of blood LDL cholesterol in the patient. In some embodiments of this aspect of the invention, the blood LDL cholesterol level of said patient is lowered by at least about 5%, at least about 10%, at least about 15%, at least about 20%, at least about 25%, at least about 30%, at least about 35%, at least about 40%, at least about 45%, at least about 50%, at least about 55%, at least about 60%, at least about 65%, at least about 70%, at least about 75%, at least about 80%, at least about 85%, or at least about 90% as compared to a predose level of blood LDL cholesterol in the patient.

[0425] In some embodiments, the invention provides a method of reducing non-HDL cholesterol levels in a patient comprising administering to a patient in need thereof a therapeutically effective dose of an ASGR inhibitor as described herein. In some embodiments, the ASGR inhibitor is an inhibitor of ASGR-1. In some embodiments, the ASGR inhibitor is an inhibitor of ASGR-2. In some embodiments, the ASGR inhibitor is an inhibitor of ASGR-1 and ASGR-2. In some embodiments, the ASGR, ASGR-1 and/or ASGR-2 inhibitor is one or more of the antigen binding proteins described herein. In some embodiments, the ASGR, ASGR-1 and/or ASGR-2 inhibitor is an interfering RNA (e.g., siRNA or shRNA) as described herein. In some embodiments, the non-HDL cholesterol level in the patient is reduced by at least about 5%, as compared to a predose level of non-HDL cholesterol in the patient. In some embodiments of this aspect of the invention, the non-HDL cholesterol level of said patient is lowered by at least about 10%, at least about 15%, at least about 20%, at least about 25%, at least about 30%, at least about 35%, at least about 40%, at least about 45%, at least about 50%, at least about 55%, at least about 60%, at least about 65%, at least about 70%, at least about 75%, at least about 80%, at least about 85%, or at least about 90% as compared to a predose level of non-HDL cholesterol in the patient.

[0426] In some embodiments, the invention provides a method of increasing ALP levels in a patient comprising administering to a patient in need thereof a therapeutically effective dose of of an ASGR inhibitor as described herein. In some embodiments, the ASGR inhibitor is an inhibitor of ASGR-1. In some embodiments, the ASGR inhibitor is an inhibitor of ASGR-2. In some embodiments, the ASGR inhibitor is an inhibitor of ASGR-1 and ASGR-2. In some embodiments, the ASGR, ASGR-1 and/or ASGR-2 inhibitor is one or more of the antigen binding proteins described herein. In some embodiments, the ASGR, ASGR-1 and/or ASGR-2 inhibitor is an interfering RNA (e.g., siRNA or shRNA) as described herein. In some embodiments, the ALP level in the patient is increased by at least about 30%, as compared to a predose level of ALP in the patient. In some embodiments of this aspect of the invention, the ALP level of said patient is increased by at least about at least about 35%, at least about 40%, at least about 45%, at least about 50%, at least about 55%, at least about 60%, at least about 65%, at least about 70%, at least about 75%, at least about 80%, at least about 85%, or at least about 90% as compared to a predose ALP level in the patient. In some embodiments, ALP levels are increased at least about 1.25×, 1.5×, 2×, 2.5×, 3×, 3.5×, 4×, 4.5×, and 5× over pretreatment.

[0427] In some embodiments, the invention provides a method of antagonizing ASGR, ASGR-1 and/or ASGR-2 in a patient comprising administering to a patient in need thereof a therapeutically effective dose of an ASGR inhibitor as described herein. In some embodiments, the ASGR inhibitor is an inhibitor of ASGR-1. In some embodiments, the ASGR inhibitor is an inhibitor of ASGR-2. In some embodiments, the ASGR inhibitor is an inhibitor of ASGR-1 and ASGR-2. In some embodiments, the ASGR, ASGR-1 and/or ASGR-2 inhibitor is one or more of the antigen binding proteins described herein. In some embodiments, the ASGR, ASGR-1 and/or ASGR-2 inhibitor is an interfering RNA (e.g., siRNA or shRNA) as described herein.

[0428] In some embodiments, a method of treating or preventing a cardiovascular disease is provided and comprises administering to a patient in need thereof a therapeutically effective dose of an ASGR inhibitor as described herein. In some embodiments, the ASGR inhibitor is an inhibitor of ASGR-1. In some embodiments, the ASGR inhibitor is an inhibitor of ASGR-2. In some embodiments, the ASGR inhibitor is an inhibitor of ASGR-1 and ASGR-2. In some embodiments, the ASGR, ASGR-1 and/or ASGR-2 inhibitor is one or more of the antigen binding proteins described herein. In some embodiments, the ASGR, ASGR-1 and/or ASGR-2 inhibitor is an interfering RNA (e.g., siRNA or shRNA) as described herein. In some embodiments, the relative risk reduction of a cardiovascular event is at least about 5%, at least about 10%, at least about 15%, at least about 20%, at least about 25%, at least about 30%, at least about 35%, at least about 40%, at least about 45%, at least about 50%, at least about 55%, at least about 60% in the patient.

[0429] The term “treatment” encompasses alleviation of at least one symptom or other embodiment of a disorder, or reduction of disease severity, and the like. An antigen binding protein, in particular a human antibody according to the present invention, need not effect a complete cure, or eradicate every symptom or manifestation of a disease, to constitute a viable therapeutic agent. As is recognized in the pertinent field, drugs employed as therapeutic agents may reduce the severity of a given disease state, but need not abolish every manifestation of the disease to be regarded as useful therapeutic agents. Simply reducing the impact of a disease (for example, by reducing the number or severity of its symptoms, or by increasing the effectiveness of another treatment, or by producing another beneficial effect), or reducing the likelihood that the disease will occur or worsen in a subject, is sufficient. One embodiment of the invention is directed to a method comprising administering to a patient an antigen binding protein or interfering RNA in an amount and for a time sufficient to induce a sustained improvement over baseline of an indicator that reflects the severity of the particular disorder.

[0430] The term “prevention” encompasses prevention of at least one symptom or other embodiment of a disorder, and the like. A prophylactically administered treatment incorporating an antigen binding protein, in particular a human antibody according to the present invention, need not be completely effective in preventing the onset of a condition in order to constitute a viable prophylactic agent. Simply reducing the likelihood that the disease will occur or worsen in a subject, is sufficient.

[0431] The term “non-HDL cholesterol” encompasses all cholesterol-containing proatherogenic lipoproteins, including LDL cholesterol, very-low-density lipoprotein, intermediate-density lipoprotein, lipoprotein(a), and chylomicron. Non-HDL cholesterol levels are calculated by subtracting HDL cholesterol levels from total cholesterol levels.

[0432] As is understood in the pertinent field, pharmaceutical compositions comprising the antigen binding proteins and/or interfering RNA are administered to a subject in a manner appropriate to the indication and the composition. In one embodiment, pharmaceutical compositions comprise the human antibodies of the present invention. In another embodiment, pharmaceutical compositions comprise interfering RNA. Pharmaceutical compositions may be administered by any suitable technique, including but not limited to parenterally, topically, or by inhalation. If injected, the pharmaceutical composition can be administered, for example, via intra-articular, intravenous, intramuscular, intralesional, intraperitoneal or subcutaneous routes, by bolus injection, or continuous infusion. Delivery by inhalation includes, for example, nasal or oral inhalation, use of a nebulizer, inhalation of the antigen binding protein in aerosol form, and the like. Other alternatives include oral preparations including pills, syrups, or lozenges.

[0433] Advantageously, the antigen binding proteins or interfering RNA are administered in the form of a composition comprising one or more additional components such as a physiologically acceptable carrier, excipient or diluent. Optionally, the composition additionally comprises one or more physiologically active agents. In various particular embodiments, the composition comprises one, two, three, four, five, or six physiologically active agents in addition to one or more antigen binding proteins (e.g, human antibodies) or interfering RNA.

[0434] Kits for use by medical practitioners are provided including one or more antigen binding proteins or interfering RNA and a label or other instructions for use in treating any of the conditions discussed herein. In one embodiment, the kit includes a sterile preparation of one or more human antibodies, or one or more interfering RNA which may be in the form of a composition as disclosed herein, and may be in one or more vials.

[0435] Dosages and the frequency of administration may vary according to such factors as the route of administration, the particular antigen binding proteins or interfering RNA employed, the nature and severity of the disease to be treated, whether the condition is acute or chronic, and the size and general condition of the subject. Appropriate dosages can be determined by procedures known in the pertinent art, e.g. in clinical trials that may involve dose escalation studies.

[0436] An antigen binding protein, e.g., monoclonal antibodies, or interfering RNA may be administered, for example, once or more than once, e.g., at regular intervals over a period of time. In particular embodiments, an antigen binding protein or interfering RNA is administered over a period of at least once a month or more, e.g., for one, two, or three months or even indefinitely. For treating chronic conditions, long-term treatment is generally most effective. However, for treating acute conditions, administration for shorter periods, e.g. from one to six weeks, may be sufficient. In general, the antigen binding protein or interfering RNA is administered until the patient manifests a medically relevant degree of improvement over baseline for the chosen indicator or indicators.

[0437] One example of therapeutic regimens provided herein comprise subcutaneous injection of an antigen binding protein or interfering RNA once a week, or once every two weeks, or once every month, once every other month, once every three months, once every six months or longer, at an appropriate dosage, to treat a condition in which it is desired to target cells expressing ASGR, ASGR-1 and/or ASGR-2. Weekly or monthly administration of antigen binding protein could be continued until a desired result is achieved, e.g., the subject's symptoms subside. Treatment may resume as needed, or, alternatively, maintenance doses may be administered.

[0438] In some embodiments, one or more of the markers in Tables 18.1, 18.2, 19.3, and 19.4 can be used to determine whether or not the amount of ASGR inhibitor (e.g., antigen binding protein and/or antibody and/or RNAi) administered is sufficient for its intended therapeutic application. In some embodiments, when one or more of the alterations in protein level, for the proteins outlined in one or more of Tables 18.1, 18.2, 19.3, and 19.4 changes in response to administering the antigen binding protein, antibody and/or RNAi, the antigen binding protein, antibody and/or RNAi is having an effect in the host. In some embodiments, the amount is sufficient when it alters the level of non-HDL cholesterol to a desired amount or reduces it by a desired amount. In some embodiments, the markers used can be one or more of those in one or more of Tiers 1, 2, 3, 4, and 5 of Table 19.4. In some embodiments, the markers used can be one or more of those in one or more of Tiers 1 and 5 of Table 19.4.

### Combination Therapies

[0439] Particular embodiments of methods and compositions of the invention involve the use of at least one antigen binding protein and/or interfering RNA and one or more other therapeutics useful for treating or preventing cardiovascular disease, for example. In one embodiment, antigen binding proteins and/or interfering RNA are administered alone or in combination with other agents useful for treating the condition with which the patient is afflicted. Examples of such agents include both proteinaceous and non-proteinaceous drugs. When multiple therapeutics are co-administered, dosages may be adjusted accordingly, as is recognized in the pertinent art. “Co-administration” and combination therapy are not limited to simultaneous administration, but also include treatment regimens in which an antigen binding protein is administered at least once during a course of treatment that involves administering at least one other therapeutic agent to the patient. In certain embodiments, an antigen binding protein or interfering RNA is administered prior to the administration of at least one other therapeutic agent. In certain embodiments, an antigen binding protein or interfering RNA is administered concurrent with the administration of at least one other therapeutic agent. In certain embodiments, an antigen binding protein or interfering RNA is administered subsequent to the administration of at least one other therapeutic agent.

[0440] In one embodiment, the at least one antigen binding protein or antibody and/or the interfering RNA is administered to a subject in combination with an anti-PCSK9 antibody (e.g., Repatha®, Praluent®, bococizumab). In another embodiment, the at least one antigen binding protein or antibody and/or the interfering RNA is administered to a subject in combination with at least one other cholesterol-lowering (serum and/or total body cholesterol) agent. In some embodiments, the agents that increase the expression of LDLR, have been observed to increase serum HDL levels, lower LDL levels or lower triglyceride levels. Exemplary agents include, but are not limited to, statins (e.g., atorvastatin, cerivastatin, fluvastatin, lovastatin, mevastatin, pitavastatin, pravastatin, rosuvastatin, simvastatin), Nicotinic acid (Niacin) (NIACOR, NIASPAN (slow release niacin), SLO-NIACIN (slow release niacin)), Fibric acid (LOPID (Gemfibrozil), TRICOR (fenofibrate), Bile acid sequestrants (QUESTRAN (cholestyramine), colesevelam (WELCHOL), COLESTID (colestipol)), Cholesterol absorption inhibitors (ZETIA (ezetimibe)), combining nicotinic acid with statin (ADVICOR (LOVASTATIN and NIASPAN), combining a statin with an absorption inhibitor (VYTORIN (ZOCOR and ZETIA) and/or lipid modifying agents. In some embodiments, the at least one antigen binding protein and/or interfering RNA is combined with PPAR gamma agonists, PPAR alpha/gamma agonists, squalene synthase inhibitors, CETP inhibitors, anti-hypertensives, anti-diabetic agents (such as sulphonyl ureas, insulin, GLP-1 analogs, DDPIV inhibitors), ApoB modulators, MTP inhibitors and/or arteriosclerosis obliterans treatments. In some embodiments, the at least one antigen binding protein and/or interfering RNA is combined with an agent that increases the level of LDLR protein in a subject, such as statins, certain cytokines like oncostatin M, estrogen, and/or certain herbal ingredients such as berberine. In some embodiments, the at least one antigen binding protein and/or interfering RNA is combined with an agent that increases serum cholesterol levels in a subject (such as certain anti-psychotic agents, certain HIV protease inhibitors, dietary factors such as high fructose, sucrose, cholesterol or certain fatty acids and certain nuclear receptor agonists and antagonists for RXR, RAR, LXR, FXR). The combination of the two can allow for the undesirable side-effects of other agents to be mitigated by the antigen binding protein or interfering RNA.

### Diagnostic Uses

[0441] In one embodiment, antigen binding proteins of the invention are useful for detecting the presence of ASGR, ASGR-1 and/or ASGR-2 in a biological sample. The term “detecting” as used herein encompasses quantitative or qualitative detection. In certain embodiments, a biological sample comprises a cell or tissue. In certain embodiments, such tissues include tissues that express ASGR, ASGR-1 and/or ASGR-2 at higher levels relative to other tissues.

[0442] In one embodiment, the invention provides a method of detecting the presence of ASGR, ASGR-1 and/or ASGR-2 in a biological sample. In certain embodiments, the method comprises contacting the biological sample with an antigen binding protein of the invention under conditions permissive for binding of an antigen binding protein to ASGR, ASGR-1 and/or ASGR-2, and detecting whether a complex is formed between the antigen binding protein and ASGR, ASGR-1 and/or ASGR-2.

[0443] In one embodiment, the invention provides a method of diagnosing a disorder associated with increased or decreased expression of ASGR, ASGR-1 and/or ASGR-2. In certain embodiments, the method comprises contacting a test cell with an antigen binding protein; determining the level of expression (either quantitatively or qualitatively) of ASGR, ASGR-1 and/or ASGR-2 by the test cell by detecting binding of the antigen binding protein to ASGR, ASGR-1 and/or ASGR-2; and comparing the level of expression of ASGR, ASGR-1 and/or ASGR-2 by the test cell with the level of expression of ASGR, ASGR-1 and/or ASGR-2 by a control cell (e.g., a normal cell of the same tissue origin as the test cell or a cell that expresses ASGR, ASGR-1 and/or ASGR-2 at levels comparable to such a normal cell), wherein a higher or lower level of expression of ASGR, ASGR-1 and/or ASGR-2 by the test cell as compared to the control cell indicates the presence of a disorder associated with increased or decreased expression of ASGR, ASGR-1 and/or ASGR-2. In certain embodiments, the test cell is obtained from an individual suspected of having a disorder associated with increased or decreased expression of ASGR, ASGR-1 and/or ASGR-2.

[0444] In certain embodiments, a method of diagnosis or detection, such as those described above, comprises detecting binding of an antigen binding protein of the invention to ASGR, ASGR-1 and/or ASGR-2 expressed on the surface of a cell or in a membrane preparation obtained from a cell expressing ASGR, ASGR-1 and/or ASGR-2 on its surface. In certain embodiments, the method comprises contacting a cell with an antigen binding protein under conditions permissive for binding of an antigen binding protein of the invention to ASGR, ASGR-1 and/or ASGR-2, and detecting whether a complex is formed between the antigen binding protein of the invention and ASGR, ASGR-1 and/or ASGR-2 on the cell surface. An exemplary assay for detecting binding of an antigen binding protein of the invention to ASGR, ASGR-1 and/or ASGR-2 expressed on the surface of a cell is a “FACS” assay.

[0445] Certain other methods can be used to detect binding of antigen binding protein of the invention to ASGR, ASGR-1 and/or ASGR-2. Such methods include, but are not limited to, antigen-binding assays that are well known in the art, such as western blots, radioimmunoassays, ELISA (enzyme linked immunosorbent assay), “sandwich” immunoassays, immunoprecipitation assays, fluorescent immunoassays, protein A immunoassays, and immunohistochemistry (IHC).

[0446] In certain embodiments, antigen binding proteins of the invention are labeled. Labels include, but are not limited to, labels or moieties that are detected directly (such as fluorescent, chromophoric, electron-dense, chemiluminescent, and radioactive labels), as well as moieties, such as enzymes or ligands, that are detected indirectly, e.g., through an enzymatic reaction or molecular interaction. Exemplary labels include, but are not limited to, the radioisotopes ³²P, ¹⁴C, ¹²⁵I, ³H, and ¹³¹I, fluorophores such as rare earth chelates or fluorescein and its derivatives, rhodamine and its derivatives, dansyl, umbelliferone, luciferases, e.g., firefly luciferase and bacterial luciferase (U.S. Pat. No. 4,737,456), luciferin, 2,3-dihydrophthalazinediones, horseradish peroxidase (HRP), alkaline phosphatase, beta-galactosidase, glucoamylase, lysozyme, saccharide oxidases, e.g., glucose oxidase, galactose oxidase, and glucose-6-phosphate dehydrogenase, heterocyclic oxidases such as uricase and xanthine oxidase, coupled with an enzyme that employs hydrogen peroxide to oxidize a dye precursor such as HRP, lactoperoxidase, or microperoxidase, biotin/avidin, spin labels, bacteriophage labels, stable free radicals, and the like.

[0447] In certain embodiments, antigen binding proteins of the invention are immobilized on an insoluble matrix. Immobilization entails separating the antigen binding protein of the invention from any ASGR, ASGR-1 and/or ASGR-2 that remains free in solution. This conventionally is accomplished by either insolubilizing the antigen binding protein of the invention before the assay procedure, as by adsorption to a water-insoluble matrix or surface (see, e.g., Bennich et al., U.S. Pat. No. 3,720,760), or by covalent coupling (for example, using glutaraldehyde cross-linking), or by insolubilizing the antigen binding protein of the invention after formation of a complex between the antigen binding protein of the invention and ASGR, ASGR-1 and/or ASGR-2, e.g., by immunoprecipitation.

[0448] The invention having been described, the following examples are offered by way of illustration, and not limitation.

[0449] Numerous sequences have been provided herein. Where there is a discrepancy in the sequences, the sequences in the tables presented within the figures control, unless there is an indication otherwise. If there is any unintended difference between the same consensus sequences, the consensus sequences as provided in the figures (from the tables within the figures) will control (unless indicated otherwise). For any further discrepancies (rather than just alternative sequences) the sequences within Tables 1-7 will control, unless designated otherwise. The figures contain multiple sequences, sequence alignments and sequence components of various nucleic and amino acid sequences. The present specification references this information in terms of the designated tables and/or the designated figures. Either reference (via figure or table) can be used and either designation (figure or table) will indicate the alternative designation as well, where appropriate. Thus, FIG. 48 designates Table 1, FIG. 49 designates Table 2, FIG. 50 designates Table 3, FIG. 51 designates Table 4, FIG. 52 designates Table 5, FIG. 53 designates Table 6, FIG. 54 designates Table 7, FIG. 55 designates Tables 19A, 19B, 19C, 20A, 20B, and 20C, FIG. 56 designates Tables 21-48, and FIG. 57 designates Tables 49-134, and vice versa. As such, any discussion herein in regard to the above figures or tables is interchangeable with respect to the “table” or “figure” nomenclature.

### EXAMPLES

### Example 1—Identification of Rare Sequence Variants that Disrupt ASGR-1 function and lower non-HDL cholesterol and protect against coronary artery disease

[0450] The level of circulating non-high density lipoprotein (non-HDL) cholesterol is heritable and strongly correlated with the risk of coronary artery disease (CAD) and myocardial infraction (MI). Whole-genome sequencing offers the potential to search for rare sequence variants that have large effects on serum lipid levels and hence the risk of cardiovascular disease, such as CAD and MI.

### Methods

### Study Participants:

[0451] Details of the population sample sets from Iceland, Denmark and The Netherlands, used to measure the various lipids traits (non-HDL cholesterol, HDL cholesterol, LDL cholesterol and triglycerides), alkaline phosphatase (ALP), ferritin, and vitamin B12, are outlined in Table 1.2. The dataset for ferritin is not shown. The coronary artery disease case-control sample sets that were a part of the study are outlined in Table 1.1.

### Icelandic Study Population

[0452] Study participants were enrolled as part of various genetics programs at deCODE. Blood lipid levels (total cholesterol, non-high density lipoprotein cholesterol (non-HDL-C), low density lipoprotein cholesterol (LDL-C), high density lipoprotein cholesterol (HDL-C) and triglycerides), alkaline phosphatase and vitamin B12 levels were obtained from three of the largest laboratories in Iceland: 1) Landspítali—The National University Hospital of Iceland (LUH), Reykjavik (measurements performed between the years 1993 and 2012, hospitalized and ambulatory patients), 2) The Laboratory in Mjódd (RAM), Reykjavik (measurements performed between 2004 and 2012, ambulatory patients) and 3) Akureyri Hospital, The Regional Hospital in North Iceland, Akureyri (performed between 2004 and 2010, hospitalized and ambulatory patients). Information on the participants is outlined in Table 1.2. Lipid levels were adjusted for sex, year of birth and age at measurement, lipid lowering medication and measurement site, using the average of multiple measurements for an individual, and then normalized to a standard normal distribution using quantile normalization. To obtain effect estimates in mmol/L the estimates from the regression analysis were multiplied by the estimated standard deviation of lipid level in the population. Given their approximately log-normal distribution, triglyceride levels were log-transformed before adjustment and the corresponding effect estimates are presented as percentage change instead of units of mmol/L. The total number of individuals with non-HDL cholesterol, LDL cholesterol, HDL cholesterol and triglycerides in Iceland is shown in the Table 1.3 below. For each lipid, the number of chip-typed and directly imputed individuals and those with familial imputations is also shown.

TABLE 1.3
Lipid levels of Icelandic Study Participants

| | Non-HDL-C | LDL-C | HDL-C | Triglycerides |
|---|---|---|---|---|
| Total number | 119,146 | 53,841 | 119,514 | 80,111 |
| Direct | 69,277 | 51,029 | 69,414 | 59,678 |
| imputation | | | | |
| Familial | 49,869 | 2,812 | 50,100 | 20,433 |
| imputation | | | | |

The total number of Icelandic individuals with lipid values used in the study and the breakdown into those that were chip-typed and directly imputed (Direct imputation) and those that were first and second degree relatives of chip-typed individuals and had their genotypes inferred based on genealogy (Familial imputation).

[0453] Non-HDL cholesterol was obtained by subtracting HDL cholesterol from total cholesterol and measures the amount of cholesterol carried within all atherogenic lipoprotein particles (VLDL, IDL, LDL, chylomicrons and Lp(a)). The LDL cholesterol was calculated using the Friedewald equation (for triglyceride levels <4.00 mmol/L) (Friedewald, W. T., Levy, R. I. & Fredrickson, D. S. Estimation of the concentration of low-density lipoprotein cholesterol in plasma, without use of the preparative ultracentrifuge. Clin. Chem. 18, 499-502 (1972)). Total cholesterol and HDL-cholesterol values are a mixture of fasting and non-fasting values, whereas triglycerides are fasting values exclusively.

[0454] Coronary artery disease (CAD) was defined as a) individuals in the MONICA registry who suffered myocardial infarction (MI) before the age of 75 in Iceland between 1981 and 2002 and satisfied the MONICA criteria (Gudbjartsson, et al., Large-scale whole-genome sequencing of the Icelandic population. Nature genetics 2015), b) subjects with CAD discharge diagnoses (ICD 9 codes 410.*, 411.*, 412.*, 414.* or ICD 10 codes 120.0, I21.*, I22.*, I23.*, I24.*, I25.*) from LUH, c) subjects diagnosed with significant angiographic CAD (see defined below) identified from a nationwide clinical registry of coronary angiography and percutaneous coronary interventions at LUH between the years 1987 and 2012, d) subjects undergoing coronary artery bypass grafting (CABG) procedures at LUH between the years 2002 and 2011 or e) cause of death or contributing cause of death listed as MI or CAD (ICD 9 or 10 codes) on death registries between the years 1996 and 2009. Coronary angiograms in the nationwide registry were evaluated by an interventional cardiologist. Patients were considered to have significant angiographic CAD if one or more of the three major epicardial coronary vessels or the left main coronary artery was found to have at least 50% stenosis by visual estimation.

### Non-Icelandic Study Populations

[0455] Characteristics of the non-Icelandic sample sets are outlined in Table 1.1 and Table 1.2. All the studies outlined in Tables 1.1 and 1.2 were approved by appropriate bioethics and/or data protection authorities. For samples from the Nijmegen Biomedical Study, Netherlands, the lipid values (namely, total cholesterol, HDL-cholesterol and triglycerides) were all non-fasting values. For samples from the Danish Inter99 and Addition studies, the lipid values were all fasting values. All participating subjects donating biological samples signed informed consents. Personal identities of the phenotypes and biological samples were encrypted by a third party system provided by the Icelandic Data Protection Authority.

### Data Generation and Analysis

### Whole-Genome Sequencing, SNP Calling, and Imputation

[0456] The Icelandic samples were genotyped using Illumina microarrays (Samani N J et al., Genomewide association analysis of coronary artery disease. The New England journal of medicine 2007; 357:443-53). The whole-genomes of 2,636 Icelanders were sequenced using the standard TruSeq methodology (Illumina) to a mean depth of at least 10× (median 20×) (Samani N J et al., Genomewide association analysis of coronary artery disease. The New England journal of medicine 2007; 357:443-53). For improved sequencing coverage of the GC-rich intron 4 in ASGR-1 gene, the whole-genome sequence data generated for 738 Icelanders was analyzed using TruSeq PCR-free method from Illumina (mean depth of 30×). The del12 variant in intron 4 of ASGR-1 was detected in this dataset.

### Single-Track Assay SNP and Microsatellite Genotyping:

[0457] We performed single SNP genotyping of rs186021206, using the Centaurus (Nanogen) platform (Gretarsdottir S, et al., Genome-wide association study identifies a sequence variant within the DAB2IP gene conferring susceptibility to abdominal aortic aneurysm. Nature genetics 2010; 42:692). The del12 variant was genotyped using a PCR based method with the following primers: forward primer (NED labelled) 5′-TTCATCTTTCTTCCCACATTGC-3′ (SEQ ID NO: 32600), reverse primer 5′-GGGCCTGAGAGAGACGTTCA-3′ (SEQ ID NO: 32601). An internal size standard was added to the resulting PCR products and the fragments were separated and detected on an Applied Biosystems model 3730 sequencer, using in-house Allele Caller software. Statistical analyses:

[0458] Associations between imputed genotypes and serum lipids (non-HDL cholesterol, HDL cholesterol, LDL cholesterol and triglycerides), ALP, ferritin and vitamin B12 levels in the Icelandic dataset were tested using a generalized linear regression, assuming an additive genetic model (Samani N J et al., Genomewide association analysis of coronary artery disease. The New England journal of medicine 2007; 357:443-53; and Olsen M H, et al., N-terminal pro-brain natriuretic peptide, but not high sensitivity C-reactive protein, improves cardiovascular risk prediction in the general population. European heart journal 2007; 28:1374-81). For the Icelandic dataset, logistic regression was used to test for association between the del12 variant and coronary artery disease and myocardial infarction, treating the disease status as the response and the number of copies of del12 an individual carries as the explanatory variable. Coronary artery disease case-control association analysis for the non-Icelandic sample sets was done using the NEMO software (Jorgensen A B, et al., Loss-of-function mutations in APOC3 and risk of ischemic vascular disease. The New England journal of medicine 2014; 371:32-41) assuming a multiplicative risk model. Results for the Icelandic and the non-Icelandic sample sets were combined using a Mantel-Haenszel fixed effects model. To estimate the effect of the del12 variant on myocardial infarction-free survival, Kaplan-Meier curves were estimated for survival to first myocardial infarction in heterozygous carriers and non-carriers (Hoogendoorn E H, et al., Thyroid function and prevalence of anti-thyroperoxidase antibodies in a population with borderline sufficient iodine intake: influences of age and sex. Clinical chemistry 2006; 52:104-11) by dividing the corresponding chi-square statistic by 1.36 for non-HDL cholesterol, 1.57 for HDL cholesterol, 1.40 for triglycerides, 1.53 for ALP, 1.30 for vitamin B12, 1.71 for coronary artery disease and 1.48 for myocardial infarction.

[0459] To obtain a reliable imputation of the del12 variant, 3,799 Icelandic individuals were genotyped for the del12 variant and those genotypes were used as a training set for imputation of the del12 variant into the rest of the Icelandic population. The imputation information for del12 was 0.99.

[0460] The Icelandic samples were genotyped using Illumina microarrays as described above (Gudbartssoon, D F, et al., Large Scale whole-genome sequencing of the Icelandic population. Nature Genetics 2015). The whole-genomes of 2,636 Icelanders were sequenced using Illumina standard TruSeq methodology to a mean depth of at least 10× (median 20×) (Di Angelantonio E, et al., Major lipids, apolipoproteins, and risk of vascular disease. Jama 2009; 302:1993-2000). A total of 35.5 million autosomal SNPs and INDEL's were identified using the Genome Analysis Toolkit version 2.3.9. Information about haplotype sharing was used to improve variant genotyping, taking advantage of the fact that all sequenced individuals had also been chip-typed and long-range-phased. Variants were annotated using Ensembl release 72 and Variant Effect Predictor (VEP) version 2.8. Of the 35.5 million sequence variants found, 25.3 million variants passed the quality threshold and were imputed into 104,220 Icelanders who had been genotyped using Illumina chips. Additionally, using the Icelandic genealogy, genotype probabilities were calculated for 294,212 untyped individuals who are first and second degree relatives of the chip-typed individuals born after 1880 (Gudbartssoon, D F, et al., Large Scale whole-genome sequencing of the Icelandic population. Nature Genetics 2015). The informativeness of genotype imputation (imputation information) was estimated by the ratio of the variance of imputed expected allele counts and the variance of the actual allele counts:

$$\frac{Var ( E ( θ \vert chip data ) )}{Var ( θ )} ,$$

where θ is the allele count. Var(E(θ|chip data)) was estimated by the observed variance of the imputed expected counts and Var(θ) was estimated by p(1−p), where p is the allele frequency.

[0461] For improved sequencing coverage of the GC-rich intron 4 in ASGR-1 gene, whole-genome sequence (“WGS”) data generated for 738 Icelanders was analyzed using TruSeq PCR-free method from Illumina (mean depth of 30×). This PCR-free method gave much better coverage of GC-rich regions including the ASGR-1 intron 4. The del12 variant in intron 4 of ASGR-1 was detected in five individuals in this dataset.

[0462] To provide improved coverage of the associated region (1 Mb centered on ASGR-1), a new dataset was analyzed that included an additional 5,817 WGS individuals (on top of the 2,636 WGS Icelanders). These additional individuals were sequenced with either Illumina TruSeq PCR free or TrueSeq Nano methods. These Illumina TrueSeq methods give enhanced sequence coverage as compared to the standard Illumina TrueSeq method (median sequencing depth 32×). The identified sequence variants were imputed into 150,656 Icelandic chipped-typed individuals, and with the use of genealogy information, into primary and secondary relatives of chip-typed individuals that were un-typed. In this expanded dataset, we identified another rare (0.027%), novel variant, W158X. The W158X variant is a four bp INDEL in exon 7 of ASGR-1 (NM_001671.4:c.469_472dupAACT) that causes frameshift and introduction of premature stop codon at amino acid 158 out of the 291 amino acid full length protein (NP_001662.1:p.Trpl58X). A total of 345 individuals were Sanger-sequenced based on the imputation predicted carriers and non-carriers of c.469_472dupAACT. In this dataset, 79 c.469_472dupAACT carriers and 270 non-carriers were identified. This genotype data was then used to re-impute the variant into the Icelandic dataset. For non-HDL cholesterol, a larger sample set (n=136,261) was used in the association analysis outlined in Tables 1.4A and 1.4B.

[0463] Associations between imputed genotypes and serum lipids (non-HDL cholesterol, HDL cholesterol, LDL cholesterol and triglycerides), ALP and vitamin B12 levels in the Icelandic dataset were tested using a generalized linear regression, assuming an additive genetic model (Gudbjartsson D F, et al., Large-scale whole-genome sequencing of the Icelandic population. Nature genetics 2015; and Steinthorsdottir V, et al., Identification of low-frequency and rare sequence variants associated with elevated or reduced risk of type 2 diabetes. Nature genetics 2014; 46:294-8). All measurements were adjusted for age, sex and measurement site, and average was taken over the available measurements after adjustment and inverse normal transformation. The lipid measurements were further adjusted for statin use. Removing individual known to take lipid lowering drugs in the Icelandic dataset did not alter the association with non-HDL cholesterol. The effect, in standardized units, changed from −0.29 (95% CI −0.38, −0.20; P=4.0×10⁻¹¹) to −0.30 (−0.39, −0.21; P=6.7×10⁻¹¹) This amounted to excluding 16,295 individuals, out of 119,146 individuals with non-HDL cholesterol information.

[0464] The lipid, ALP and vitamin B12 measurements from the Danish Inter99 study, ADDITION Denmark screening cohort, and the Nijmegen biomedical study, were adjusted and transformed in the same way and tested for association with allele count of del12 and rs186021206 using the linear regression implemented in the R software package. Results from the different populations were combined using the inverse variance fixed-effects method with METAL (Willer C J, et al., METAL: fast and efficient meta-analysis of genomewide association scans. Bioinformatics 2010; 26:2190-1). Effect estimates from the regression analysis are expressed in units of standard deviation (SD). To obtain effect estimates in mg/dL for non-HDL cholesterol, LDL cholesterol and HDL cholesterol, the estimates from the regression analysis were multiplied by the estimated SD of the population distributions. Triglyceride, ALP and vitamin B12 levels were log-transformed before adjustment as their distributions are approximately log-normal, and the corresponding effect estimates are presented as percentage change.

[0465] For the Icelandic dataset, logistic regression was used to test for association between the del12 variant and coronary artery disease and myocardial infarction, treating the disease status as the response and the number of copies of the deletion an individual carries as the explanatory variable. Other available individual characteristics that correlate with disease status were also included in the model as nuisance variables (Gudbjartsson D F, et al., Large-scale whole-genome sequencing of the Icelandic population. Nature genetics 2015). Coronary artery disease case-control association analysis for the non-Icelandic sample sets was done using the NEMO software (Gretarsdottir S, et al., The gene encoding phosphodiesterase 4D confers risk of ischemic stroke. Nature genetics 2003; 35:131-8) assuming a multiplicative risk model. Results for the Icelandic and the non-Icelandic sample sets were combined using a Mantel-Haenszel fixed-effects model. Heterogeneity in the effect estimate was tested assuming that the estimated odds ratios for different groups follows a log-normal distribution using a likelihood ratio test with degrees of freedom equal to the number of groups compared minus one.

[0466] To estimate the effect of the del12 variant on myocardial infarction free survival, we estimated the Kaplan-Meier curves for survival to first myocardial infarction in heterozygous carriers and non-carriers stratified by sex and tested the difference in survival between carriers and non-carriers using the Cox proportional model. The analysis was performed using the survival library in the R software package. The survival analysis was based on 87,718 chip genotyped Icelanders and 44,655 Icelandic first and second degree relatives of chip typed individuals after restricting our analysis to those who lived to be at least 40 years old. Death was treated as a censoring event.

### Functional Characterization of the Del12 Variant in ASGR-1

cDNA Preparation, Amplification, Sanger Sequencing and Next Generation Sequencing:

[0467] RNA was isolated from blood samples from carriers and non-carriers of del12. Following cDNA generation, the region between exon 3 and 5 in ASGR-1 was PCR amplified and the identified PCR products (two for del12 carriers and one for non-carriers) were Sanger sequenced using standard methodology to determine the sequence difference between the identified cDNA products. To quantify the ratio between the two amplified cDNA PCR products, they were sequenced using Illumina MiSeq instrument coupled with the MiSeq v2 reagent kit.

### Western Blot Analysis:

[0468] The wild type ASGR-1 cDNA and ASGR-1 cDNA with the 22 bp deletion were transiently overexpressed in HeLa cells to determine if ASGR-1 transcripts with the 22 bp deletion generated stable truncated ASGR-1 protein as evaluated by western blot analysis.

[0469] RNA was isolated from blood samples using a Qiagen RNA maxi kit. Concentration and quality of the RNA was determined using an Agilent 2100 Bioanalyzer (Agilent Technologies), all samples had RIN values over 7. Following cDNA generation, the region between exon 3 and 5 in ASGR-1 was PCR amplified using the Advantage® 2 Polymerase kit (Clontech) with the forward primer, CACTCAGGTCCTTCTGCTGTTTC (SEQ ID NO: 32602) and the reverse primer, 5′-ACCTCGCCTCCTCCTGCT-3′ (SEQ ID NO: 32603). The resulting products were resolved on agarose gel and the identified PCR products (two for del12 carriers and one for non-carriers) were Sanger sequenced using standard methodology to determine the sequence difference between the identified cDNA products. To quantitate the ratio between the two amplified cDNA PCR products, they were sequenced using Illumina MiSeq instrument coupled with the MiSeq v2 reagent kit.

### Transient Overexpression of Wild Type and Mutated ASGR-1 Harbouring the 22 bp Deletion at the End of Exon 4 in HeLa Cells.

Generation and Cloning of Wild Type and Mutated ASGR-1 cDNA:

[0470] cDNA of ASGR-1 was obtained by PCR on human liver marathon ready cDNA (BD biosciences Clontech). The primers used were Forward 5′GCCAGCCCTATCATGACCAA′3 (SEQ ID NO: 32604) and Reverse 5′GCAGGTCGAGGCATTGAAGA′3 (SEQ ID NO: 32605). The resulting cDNA contained all exons including the start and stop codons of ASGR-1. PCR product was run on 1.6% Agarose gel and a band of the correct size was excised out and purified using QIAquick gel extraction kit (QIAGEN 28704) following the manufacturer's protocol. For cloning of ASGR-1 cDNA into pcDNA3.1/V5-His TOPO vector (Invitrogen K4800-01), 21 of the gel extraction product was used and the manufacturer's protocol was followed resulting in pcDNA3.1_ASGR-1_WT. Transformed TOP10 chemically competent cells (Invitrogen C4040-10) were plated on LB plates containing 50 μg/ml ampicillin. Colonies were expanded in 3 ml LB medium containing 50 μg/ml ampicillin. Plasmids were purified using QIAGEN plasmid mini kit (QIAGEN 12125) following the manufacturer's protocol. The plasmid sequence was confirmed by Sanger sequencing using the following sequencing primers: T7: 5′TAATACGACTCACTATAGGG′3 (SEQ ID NO: 32606), BGH: 5′TAGAAGGCACAGTCGAGG′3 (SEQ ID NO: 32607) and ASGR-1: 5′GAGGCAATGTGGGAAGAAAGATG′3 (SEQ ID NO: 32608) Introduction of 22 bp deletion in ASGR-1:

[0471] In order to generate a cDNA representative of the del12 carrier mRNA, targeted mutagenesis was performed. The Q5 Site-directed mutagenesis kit (New England BioLabs E0554S) and the pcDNA3.1_ASGR-1_WT plasmid was used as a template. In short, a PCR reaction was performed using the following primers 5′GAGGCAATGTGGGAAGAAAGATGAAGTCG′3 (SEQ ID NO: 32609) and 5′CTGGGCCTCCGTGCTCGC′3 (SEQ ID NO: 32610), resulting in a double-stranded DNA fragment representing the entire pcDNA3.1_ASGR-1_WT plasmid lacking the 22 bp at the end of exon 4. Following the manufacturers recommendation, 1 uL of the PCR reaction was used in the KLD reaction (New England BioLabs E0554S) wherein the PCR fragment is phosphorylated, re-circularized and the non-mutated template plasmid is removed. Mutated plasmids were transformed into NEB 5-alpha Competent cells (New England BioLabs C2987H) and plated on LB plates containing 50 μg/ml ampicillin. Colonies were expanded in 3 ml LB medium containing 50 μg/ml ampicillin. Plasmids were purified using QIAGEN plasmid mini kit (QIAGEN 12125) following the manufacturer's protocol. ASGR-1_22 bp_del sequence was confirmed by Sanger sequencing. Expression of ASGR-1 in Cultured cells:

[0472] Two days prior to transfection, 100,000 HeLa cells (Public Health England 93021013) were seeded into each well of a 6-well plate in 3 mL of DMEM medium (11995-065, ThermoFisher) supplemented with 10% fetal calf serum (ThermoFisher 10500-064) and 50 units/mL penicillin and 50 μg/mL streptomycin (ThermoFisher 15070-063). Cells were incubated at 37° C. and 5% CO₂ in a humidified incubator.

[0473] The day before transfection, media was replaced with the without antibiotics. On the day of transfection, for each transfected well, 2.5 ug of plasmids containing ASGR-1_WT or ASGR-1_de122 cDNA were diluted in 125 uL Opti-Mem medium (ThermoFisher 31985-047) and 5 μL of P3000 reagent (ThermoFisher L3000-008). Next, 3.75 uL Lipofectamine 3000 (ThermoFisher L3000-008) were mixed with 125 μL of Opti-Mem. Subsequently, the diluted plasmid solution was mixed with the Lipofectamine 3000 solution at a 1:1 ratio and incubated at room temperature for 5 minutes before the addition of 250 μL of the combined solution to each transfected well.

[0474] 24 hours post transfection, the spent media was replaced with fresh without antibiotics. Selected wells were supplemented with 10 uM MG132 (TOCRIS 1748) for 4.5 hours prior to harvesting of cells. 48 hours post transfection cells were harvested for analysis by washing wells 2× with PBS (ThermoFisher 14190-250) followed by an 8 minute incubation with 1 mL of 0.5 mM EDTA in PBS (ThermoFisher 15575-020). Next, the EDTA solution was aspirated and cells dislodged by pipetting of 2 mL of fresh media. 3×6-wells were pooled for each experimental condition and cells were spun down at 300×g for 5 minutes. The equivalent of 2×6-wells were lysed in 200 μL of RIPA buffer for Western blot analysis. The remainder of cells were split in two and lysed in 300 uL RLT buffer (Qiagen 74106) or 900 uL Tissue and Cell lysis solution (Epicentre MTC096H) and snap frozen on dry ice for RNA and DNA extraction respectively. Three different transient expression experiments were done and all gave the same results.

### Quantitative PCR Analysis:

[0475] RNA was isolated from cells using the RNeasy Mini Kit (Qiagen 74106) according to manufacturer's recommendations, and concentration and quality was determined with Nanodrop 1000 spectrophotometer (Thermo Scientific). cDNA was synthesized using the High capacity cDNA reverse transcriptase kit (ThermoFisher). DNA was isolated from cells using the MasterPure DNA Purification Kit (Epicentre MCD85201) according to manufacturer's recommendation.

[0476] Analysis of gene expression and transfection efficiency was performed on total cDNA and DNA respectively, with real-time PCR on an ABI Prism 7900HT Sequence Detection System (ThermoFisher) using forward (AGACCTTCAGCATCTGGACAATG (SEQ ID NO: 32611)) and reverse (CGAGGTCCGGAGCAGAGA (SEQ ID NO: 32612)) primers and fluorescent labelled probe spanning exon junction 2-3 of the ASGR-1 gene (6FAM-CAGAAAAGGGCCACCTC-MGB (SEQ ID NO: 32613) (ThermoFisher). Human betaActin assay (ThermoFisher 4326315E) was run in parallel to verify normalization of input cDNA and DNA.

### Western Blot Analysis:

[0477] Cells corresponding to two wells of a 6 well plate were lysed using 200 μl of RIPA buffer with 1:100 Halt protease and phosphatase inhibitor cocktail (Thermo Scientific 78442). Lysates were kept on ice for 10 min with agitation followed by sonication for 20 sec (Branson 2510) and additional agitation on ice for 10 min. Lysates were spun down at 4° C. for 15 min at 14,000×g. Total protein amount of lysates was estimated using the Pierce BCA protein assay kit (Thermo Scientific 23227). Samples were prepared using Novex Bolt LDS sample buffer (4×) (Life technologies B0007) and Novex Bolt sample reducing agent (10×) (Life technologies B0009) and run on Novex Nupage 4-12% Bis-Tris gel (Life technologies NPO335BOX). Total protein amount per lane was 24 g and PageRuler (Thermo scientific 26616) was used to estimate protein size. The gel was run at a constant of 200V for 50 min. Proteins were transferred to a nitrocellulose membrane (Life technologies IB23002) using iBlot2 (Life technologies). Membranes were allowed to dry and were then hydrated with MQ water before blotting. Membranes were blocked for 1 hour at room temperature using Odyssey blocking buffer PBS (Li-Cor 927-40000). Primary antibodies used were α-ASGR-1 (Sigma-Aldrich HPA011954) 1:500 (recognizes amino acid 1-41) and α-beta-actin (Abcam ab6276) 1:5000 incubated in blocking buffer with the addition of 0.1% Tween for 3 hours at room temperature. Secondary antibodies used were α-Rabbit 680RD (Li-Cor 926-68073) and α-Mouse 800CW (Li-Cor 926-32212) both 1:20,000 in PBST+0.01% SDS for 1 hour at room temperature. After washing the membrane it was allowed to dry and then scanned using the Odyssey infrared imaging system (Li-Cor Biosciences).

Other Diseases and Traits in deCODE Database:

[0478] The deCODE Genetics phenotype database contains medical information on diseases and traits obtained through collaboration with specialists in each field. This includes information on cardiovascular diseases (e.g., myocardial infarction, coronary arterial disease, peripheral arterial disease, atrial fibrillation, sick sinus syndrome and stroke), metabolic disorders (e.g., obesity, diabetes, and metabolic syndrome), psychiatric disorders (e.g., schizophrenia, bipolar disorder, anxiety and depression), addictions (e.g., nicotine, alcohol), inflammatory diseases (e.g., rheumatoid arthritis, lupus, and asthma), musculoskeletal disorders (e.g., osteoarthritis, osteoporosis), eye diseases (e.g., glaucoma), kidney diseases (e.g., kidney stones, kidney failure) and 29 types of cancer. Anthropometric measures have also been collected through several of these projects. Routinely measured traits from patient workups (e.g., sodium, potassium, bicarbonate, calcium, phosphate, creatinine, blood cell counts, hemoglobin, hematocrit, immunoglobulins, iron, vitamins, lipids, liver function tests and more) were obtained from the Landspitali University Hospital, Reykjavik, and the Icelandic Medical Center Laboratory in Mjodd (Laeknasetrid), Reykjavik. The number of independent and uncorrelated secondary traits tested for association with del12 amounts to 400.

### Results

Association of Sequence Variants with Non-HDL Cholesterol Levels

[0479] Sequence variants were first identified through whole-genome sequencing (“WSG”) of 2,636 Icelanders to a median depth of 20×. These variants were imputed (assisted by long-range phased haplotypes) into the genomes of 104,220 Icelanders who had been genotyped using Illumina single nucleotide polymorphism (SNP) arrays. In addition, Icelandic genealogical information was used to calculate genotype probabilities for 294,212 close relatives to those genotyped. Using these data we screened for novel rare variants that associated with non-HDL cholesterol levels (n=119,146). A set of seven correlated (pairwise r2>0.7) rare non-coding SNPs on chromosome 17p13.1 associated with non-HDL cholesterol level. The seven variants span 80kb, including the asialoglycoprotein receptor 1 and 2 (ASGR-1 and ASGR-2) genes. The strongest association was represented by rs186021206 (minor allele frequency (MAF)=0.43%) located downstream of ASGR-1 that associates with 8.9±1.5 mg/dl lowering of non-HDL cholesterol (P=1.4×10⁻⁹) (Table 1.4B).

[0480] The associated region was well covered by the whole-genome sequencing except for intron 4 of ASGR-1. This intron is 79 base pairs (bp) long and very GC rich. To explore this region further 738 individuals were whole genome sequenced with PCR-free sequencing (Illumina), that gave enhanced coverage of the intron and led to the identification of a 12 bp deletion within the intron; NM_001671.4:c.284-36_283+33delCTGGGGCTGGGG here after referred to as del12. Following direct genotyping of del12 and imputation into the Icelandic dataset, we observed that del12 (MAF=0.41%) is highly correlated with rs186021206 (r2=0.86) and the six other correlated SNPs and associates even more strongly with lowering of non-HDL cholesterol levels (decrease of 10.2±1.5 mg/dl, P=2.5×10⁻¹⁰) (Table 1.9A). Del12 also increases HDL cholesterol and decreases triglyceride (TG) levels, albeit to a much lesser degree than for non-HDL cholesterol (Tables 1.4A and 1.9B). None of the seven SNPs maintained a significant association with non-HDL cholesterol after adjusting for del12 indicating that del12 is sufficient to explain the non-HDL association.

[0481] To validate the del12 association with non-HDL cholesterol levels, del12 in samples from The Netherlands (Nijmegen Biomedical Study 18) and Denmark (Danish Inter9919 and Danish Addition study 20) were genotyped. Del12 associated with non-HDL cholesterol in each sample set with similar effect size as in Iceland (Table 1.2, Tables 1.4A and 1.4B and Table 1.9B). When all three datasets were combined with the Icelandic discovery data, it was established that del12 lowers non-HDL cholesterol by 11.6±1.5 mg/dl (P=1.0×10⁻¹⁶) (Table 1.9B).

[0482] To identify additional additional loss of function variants in ASGR-1, an extended dataset was screened based on sequence variants identified through whole-genome sequencing (“WSG”) of an additional group of 5,817 WGS Icelanders on top of the 2,636 described above. In this dataset, a rare four bp insertion mutation was identified; namely, MAF=0.027%; NM_001671.4:c.469_472dupAACT. As mentioned throughout, this frameshift mutation introduces a premature stop codon at amino acid 158 out of the 291 amino acid full length protein (NP_001662.1:p.W158X). Potential carriers and non-carriers were directly genotyped using Sanger sequencing. Those genotypes were then used to re-impute p.W158X into 150,656 Icelandic chipped typed individuals and their first and second degree relatives. In this dataset, c.469_472dupAACT associates significantly with a decrease in non-HDL cholesterol (−21.6 mg/dL, 95% CI−34.2 to −9.6) and an increase in ALP (45.3% increase, 95% CI 20.4 to 68.2, P=7.9×10⁻⁶) (Table 1.8). The direction of the effects of c.469_472dupAACT and the effect sizes are similar to that of del12 (Table 1.8). Given that a single test was performed, these results provide a significant replication of the ASGR-1 loss of function effect on non-HDL and ALP. Furthermore, since W158X is not correlated with del12 (i.e. there was no overlap between individuals carrying W158X and del12), the W158X variant provides yet further proof that the loss of function in the ASGR-1 gene is responsible for the observed changes in non-HDL, Triglycerides, Alkaline Phosphatase, Ferritin and Vitamin B12 levels. For coronary artery disease, the odds ratio for W158X (c.469_472dupAACT) was 0.65 (95% CI 0.26 to 1.40; P=0.24). As mentioned above, the W158X (c.469_472dupAACT) variant is independent of del12 and none of the 79 carriers found in Iceland carried del12. The variant also appears to be specific to the Icelandic population as it is not detected in large population databases such as (Exome Aggregation Consortium (ExAC), Exome Variant Server (EVS), Genomes of the Netherlands (GoNL) and dbSNP.

Del12 within Intron 4 of Asgr-1 Causes a Splicing Error Resulting in A Frameshift

[0483] Since del12 is located in intron 4 of ASGR-1, we examined its effect on splicing between exons 4 and 5. The region between exon 3 and 5 in cDNA generated from blood samples from 12 non-carriers and 12 heterozygous carriers of del12 was PCR amplified (FIG. 4). The PCR products were resolved by gel electrophoresis demonstrating a band of 239 bp in non-carrier. In del12 carriers, however, a smaller 217 bp band was noted in addition to the expected 239 bp PCR product (FIG. 4B). Upon Sanger sequencing of the cDNA products we identified in the 217 bp cDNA fragment a 22 bp deletion at the end of exon 4 (FIG. 4C). The deletion of these 22 bp from the ASGR-1 transcript appears to be driven by a pseudo 5′-splice site in exon 4 (FIG. 4D). It causes a frameshift in carriers such that, if translated, the resulting protein would lack both the oligomerization and carbohydrate recognition domains. To quantify this splicing defect we used the Illumina TruSeq method for direct digital counting of sequencing reads that were generated by sequencing the two cDNA products found in del12 carriers. On average, 32±13% of the total ASGR-1 transcripts were accounted for by the incorrectly spliced isoform (FIG. 4E). This form could not be detected in non-carriers (FIG. 4E). Together, these data identify ASGR-1 as the target gene for the non-HDL association at this locus and are consistent with the associated mutation, del12, disrupting the function of the ASGR-1 protein. ASGR-1 is the major subunit of the hepatic asialoglycoprotein receptor (ASGR) known to recognize and mediate the endocytosis and degradation of a wide variety of desialylated glycoproteins that contain terminal galactose (Gal) or N-acetylgalactosamine (Gal-NAc) residues on their N-linked carbohydrate chains (Morell A G, Gregoriadis G, Scheinberg I H, Hickman J, Ashwell G. The role of sialic acid in determining the survival of glycoproteins in the circulation. The Journal of biological chemistry 1971; 246:1461-7; Van Den Hamer C J, Morell A G, Scheinberg I H, Hickman J, Ashwell G. Physical and chemical studies on ceruloplasmin. IX. The role of galactosyl residues in the clearance of ceruloplasmin from the circulation. The Journal of biological chemistry 1970; 245:4397-402; Ashwell G, Harford J. Carbohydrate-specific receptors of the liver. Annual review of biochemistry 1982; 51:531-54; Weigel P H. Galactosyl and N-acetylgalactosaminyl homeostasis: a function for mammalian asialoglycoprotein receptors. BioEssays: news and reviews in molecular, cellular and developmental biology 1994; 16:519-24).

### The Del12 Variant in Asgr-1 and Risk of Coronary Artery Disease

[0484] Given the effect of del12 on non-HDL cholesterol levels, its impact on risk of CAD in 33,090 cases and 236,254 controls from Iceland and 8,558 cases and 11,120 controls from the USA, the UK, New Zealand and Denmark was assessed. It was found that carriers of del12 have a lower risk of CAD than non-carriers (odds ratio 0.66; 95% confidence interval [CI] 0.55 to 0.79; P=6.3×10⁻⁶) (FIG. 5A). There was no evidence of heterogeneity across the eight study populations (Phet=0.96). Del12 also decreases risk of MI in Iceland (hazard ratio 0.64; 95% CI, 0.64 to 0.80; P=8.5×10⁻⁵) (FIG. 5B). In addition, del12 carriers have a 1.5 years longer lifespan than non-carriers (95% CI, 0.2 to 2.8 years; P=0.020).

[0485] There is a strong positive correlation between the effect of sequence variants on non-HDL cholesterol levels and risk of CAD (Haddad L, Day I N, Hunt S, Williams R R, Humphries S E, Hopkins P N. Evidence for a third genetic locus causing familial hypercholesterolemia. A non-LDLR, non-APOB kindred. Journal of lipid research 1999; 40:1113-22; Timms K M, Wagner S, Samuels M E, et al. A mutation in PCSK9 causing autosomal-dominant hypercholesterolemia in a Utah pedigree. Human genetics 2004; 114:349-53; Varret M, Rabes J P, Saint-Jore B, et al. A third major locus for autosomal dominant hypercholesterolemia maps to 1p34.1-p32. American journal of human genetics 1999; 64:1378-87; Hunt S C, Hopkins P N, Bulka K, et al. Genetic localization to chromosome 1p32 of the third locus for familial hypercholesterolemia in a Utah kindred. Arterioscler Thromb Vasc Biol 2000; 20:1089-93; Do R, Willer C J, Schmidt E M, et al. Common variants associated with plasma triglycerides and risk for coronary artery disease. Nature genetics 2013; 45:1345-52) (FIG. 6, Table 1.5). However, several published variants, deviate from the overall trend. For example, LPA and ANGPTL4 variants have a substantially greater effect on CAD than their non-HDL effects would predict while the effect of the APOE variants is weaker than predicted by the non-HDL effect. Del12 in ASGR-1 is another example of a variant whose effect on CAD is stronger than predicted by the effect non-HDL cholesterol effect (FIG. 6, Table 1.5).

Association of Del12 with Serum Levels of Alp and Vitamin B12

[0486] To determine the overall effect of del12 in ASGR-1, its effect on a variety of human diseases and other traits in the Icelandic dataset was screened. A highly significant association of del12 with higher levels of circulating alkaline phosphatase (ALP) (33.6±2.8 U/L increase, P=3.6×10-63) and vitamin B12 (58.4±8.3 pmol/L increase, P=3.1×10-12) was observed (Tables 8A and 8B and Table 18). An increase in ALP levels may reflect liver disease, however, there was no increase in del 12 carriers in serum gamma glutamyl transferase (GGT), bilirubin, alanine aminotransferase or other measures of liver function that commonly parallel changes in ALP in liver disease (Table 1.6).

[0487] The del12 association with higher levels of ALP and vitamin B12 in individuals from the Danish Inter99 study with comparable effect sizes (P9.9×10-69 for ALP and P=9.9×10-14 for vitamin B12) was replicated (Table 1.10).

[0488] A common variant upstream of ASGR-1 (rs314253; MAF35.1%) has been reported to associate modestly with both LDL cholesterol and ALP levels (Chambers J C, Zhang W, Sehmi J, et al. Genome-wide association study identifies loci influencing concentrations of liver enzymes in plasma. Nature genetics 2011; 43:1131-8; Willer C J, Schmidt E M, Sengupta, et al. Discovery and refinement of loci associated with lipid levels. Nature genetics 2013; 45:1274-83). This common variant association is replicated in the data of the present invention (strongest association for both ALP and non-HDL with the correlated rs56093546; MAF21.6%) and that its associations with ALP and non-HDL are independent of the rare signal represented by del2 (r2<0.001, Table 1.5) as demonstrated. As for del12, this common variant has opposite effects on ALP and non-HDL; the allele that increases ALP decreases non-HDL (see Chambers; Willer) (Table 1.7).

TABLE 1.1

| | | Definition of | Ascertainment | |
|---|---|---|---|---|
| Study | Design | CAD and MI cases | of controls | Reference |
| Iceland | Case/ | CAD and MI cases | Study of | Helgadottir A, |
| | control | were defined by: | participants | Thorleifsson G, |
| | | a) discharge diagnoses | from various | Manolescu A, |
| | | (ICD 9 codes 410.*, | deCODE | et al. A common |
| | | 411.*, 412.*, 414.* | genetics | variant on |
| | | or ICD 10 codes | programs | chromosome 9p21 |
| | | I20.0, I21.*, I22.*, | without | affects the risk of |
| | | I23.*, I24.*, I25.*) | known CVD. | myocardial |
| | | from LUH, | | infarction. Science |
| | | b) significant angiographic | | (New York, NY) |
| | | CAD (≥50% stenosis of | | 2007; 316:1 |
| | | the major coronary vessels), | | 491-3. |
| | | c) undergone coronary | | |
| | | revascularisation (CABG) | | |
| | | d) MI or CAD (ICD 9 or 10 | | |
| | | codes) listed in death | | |
| | | registries, or | | |
| | | e) MI before the age of 75 | | |
| | | from MONICA registry | | |
| UK 1- | Case/ | | | |
| Leicester | control | Cases included MI patients | Controls | Helgadottir A, |
| MI study | | admitted to the coronary | included adult | Manolescu A, |
| | | care units of the Leicester | visitors of | Thorleifsson G, |
| | | Royal infirmary, Leicester | individuals | et al. The gene |
| | | and the Royal Hallamshire | with non- | ecoding 5- |
| | | Hospital, Sheffield and | cardiovascular | lipoxygenase |
| | | satisfied the WHO criteria | disease from | activating protein |
| | | for acute MI. | each hospital | confers risk of |
| | | | or individuals | myocardial |
| | | | from three | infarction and |
| | | | primary care | stroke. Nature |
| | | | practices | genetics 2004; |
| | | | located in the | 36:23 3-9. |
| | | | same | |
| | | | geographical | |
| | | | area. | |
| | | | Individuals | |
| | | | who reported | |
| | | | a history of | |
| | | | CAD were | |
| | | | excluded. | |
| UK2-BHF | Case/ | The British Heart Foundation | Controls were | Genome-wide |
| Family | control | Family Heart Study (BHF- | blood donors | association study |
| Heart | | FHS) CAD cases were index | recruited by the | of 14,000 cases |
| Study | | cases from families of | United Kingdom | of seven common |
| | | European ancestry with a | Blood Service | diseases and 3,000 |
| | | strong familial history of | (UKBS) as | shared controls. |
| | | defined CAD recruited from | part of the | Nature 2007; |
| | | throughout the United | Wellcome Trust | 447:6 61-78, and |
| | | Kingdom. CAD was defined | Case Control | Samani NJ, |
| | | as a validated history of | Consortium | Erdmann J, Hall |
| | | myocardial infarction or | Study. | AS, et al. |
| | | coronary revascularisation | | Genomewide |
| | | (PTCA or CABG) before the | | association analysis |
| | | 66th birthday. | | of coronary artery |
| | | | | disease. The New |
| | | | | England journal of |
| | | | | medicine 2007; |
| | | | | 357:4 43-53. |
| Emory | Case/ | Cases were identified from | | |
| (Atlanta, | control | subjects undergoing cardiac | | |
| Georgia, | | catheterization at the Emory | | |
| USA) | | University Hospital. CAD | Controls included | Helgadottir A, |
| | | cases included those that | individuals | et al. (2007) |
| | | had at least one significant | undergoing | |
| | | stenosis (≥50%) in any of | cardiac | |
| | | the major coronary arteries | catheterization | |
| | | on angiography, or those | with no or | |
| | | without significant stenosis | minimal CAD | |
| | | but had history of MI, CABG, | (<20% stenosis) | |
| | | or PCI. | and had no prior | |
| | | | history of MI or | |
| | | | CAD. Additional | |
| | | | controls were | |
| | | | recruited from the | |
| | | | Grady Memorial | |
| | | | Hospitals and | |
| | | | Clinical Registry | |
| | | | in Neurology | |
| | | | (CRIN) and | |
| | | | included | |
| | | | individuals with | |
| | | | non-vascular | |
| | | | neurological | |
| | | | disease (mainly | |
| | | | Parkinson’s and | |
| | | | Alzheimer’s | |
| | | | diseases), their | |
| | | | spouses, unrelated | |
| | | | friends and | |
| | | | community | |
| | | | volunteers; | |
| | | | excluding those | |
| | | | with a known | |
| | | | history of CAD. | |
| Duke | Case/ | Participants were enrolled | Controls included | Helgadottir A, |
| (Durham, | control | at Duke University Medical | those with no | et al (2007) |
| North | | Center through the cardiac | history of MI | |
| Carolina, | | catheterization laboratories. | prior or subsequent | |
| USA) | | MI cases included those | to the index cardiac | |
| | | with self-reported history | catheterization and | |
| | | of MI (corroborated by | no PCI or CABG | |
| | | review of medical records), | ejection fraction | |
| | | or those who suffered an MI | on left ventriculo- | |
| | | during the study follow-up | gram greater than | |
| | | period. | 40%, and stenosis | |
| | | | less than 50% on | |
| | | | coronary angio- | |
| | | | graphy. | |
| UPenn | Case/ | The study participants were | Controls included | Helgadottir A, |
| (Philadelphia, | control | enrolled at the University | individuals | et al. (2007) |
| Pennsylvania, | | of Pennsylvania Medical | without | |
| USA) | | Center and included subjects | significant luminal | |
| | | undergoing cardiac | stenosis on | |
| | | catheterization. CAD cases | coronary angio- | |
| | | included those that had at | graphy (luminal | |
| | | least one significant stenosis | stenosis less than | |
| | | (≥50%) in any of the major | 50%). | |
| | | cornoary arteries on angio- | | |
| | | graphy, or those without | | |
| | | significant stenosis but had | | |
| | | history of MI, CABG, or | | |
| | | PCI. | | |
| New Zealand | Case/ | a) Significant angiography | Study participants | Gretarsdottir S, |
| | control | CAD (≥50% stenosis of the | without known | Baas AF, |
| | | major coronary vessels), b) | CAD and ultrasound | Thorleifsson G, |
| | | CABG-procedures c) MI or | screened for carotid | et al. Genome- |
| | | CAD (ICD 9 or 10 codes) in | artery disease and | wide association |
| | | a clinical registry. | abdominal aortic | study identifies a |
| | | | aneurysm, with | sequence variant |
| | | | ankle brachial index | within the DAB2IP |
| | | | to exclude | gene conferring |
| | | | peripheral artery | susceptibility to |
| | | | disease. | abdominal aortic |
| | | | | aneurysm. Nature |
| | | | | genetics 2010; |
| | | | | 42:69 2-7. |
| Denmark 1 | Case/ | Cases were identified from | Individuals in | |
| (Gentofte | control | subject investigated by | Monica10 and Inter99 | |
| cadlab) | | coronary artery angiography | studies without CAD | |
| | | because of suspected ischemic | diagnosis based on | |
| | | heart disease, valvular heart | information from | |
| | | disease or cardiomyopathy. | the Danish National | |
| | | CAD cases included those | Patient Registry and | |
| | | that had a least one | the Danish Register | |
| | | significant stenosis (≥50%) | of Causes of Death. | |
| | | in any of the major coronary | | |
| | | arteries on angiography | | |
| Denmark 2 | Case/ | Monica10 is a population | Individuals in | Olsen MH, |
| (Monica10) | control | based study. Participants were | Monica10 and Inter99 | Hansen TW, |
| | | recruited from the Danish | studies without CAD | Christensen MK, |
| | | Central Personal Register as | diagnosis based on | et al. N-terminal |
| | | random samples of the | information from | pro-brain natriuretic |
| | | population in the southern | the Danish National | peptide, but not |
| | | part of the formor Copenhagen | Patient Registry | high sensitivity C- |
| | | County. Cardiovascular | and the Danish | reactive protein, |
| | | events were defined as first | Register of | improves cardio- |
| | | ever non-fatal or fatal CVD | Causes of Death. | vascular risk |
| | | (ICD-8: 390-448/ICD-10: | | prediction in the |
| | | I00-I79). Assessment of the | | general population. |
| | | cardiovascular endpoints | | European heart |
| | | was based on endpoint from | | journal 2007; 28:13 |
| | | | | 74-81. |
| Denmark 3 | Case/ | The Inter99 study is a | Individuals in | 14. Jorgensen AB, |
| (Inter99) | control | population-based randomization | Monica10 and Inter99 | Frikke-Schmidt R, |
| | | controlled trial (CT00289237, | studies without CAD | Nordestgaard BG, |
| | | ClinicalTrials.gov) | diagnosis based on | Tybjaerg-Hansen |
| | | investigating the effects of | information from the | A. Loss-of-function |
| | | lifestyle intervention on | Danish National | mutations in APOC3 |
| | | cardiovascular events were | Patient Registry and | and risk of ischemic |
| | | defined as first ever non- | the Danish Register | vascular disease. |
| | | fatal or fatal CVD (ICD-8: | of Causes of Death. | The New England |
| | | 390-448/ICD-10: I00-I79). | | journal of medicine |
| | | Assessment of the cardio- | | 2014; 371:3 2-41. |
| | | vascular endpoints was based | | |
| | | on data from the Danish | | |
| | | National Patient Registry | | |
| | | and the Danish Registry of | | |
| | | Causes of Death. | | |
| Sweden | Case/ | Ischemic stroke patients from | Population-based | Gretarsdottir et al |
| | Control | the clinic at Karolinska | controls, either | (2008) |
| | | University Hospital, Stockholm. | healthy blood donors | Traylor et al |
| | | The ischemic stroke diagnosis | or healthy volunteers | (2012) |
| | | was based on clinical findings | recruited at the | |
| | | and brain imaging (CT or | Karolinska Hospital | |
| | | MRI). | | |
| South | Case/ | Ischemic stroke patients | Gender and age | Traylor et al |
| Germany | Control | recruited at the stroke unit | matched individuals | (2008) |
| | | of the Department of Neurology, | without history of | Gschwendtner et al |
| | | Klinikum Grosshadern, | cardiovascular | (2009) |
| | | University of Munich. Diagnoses | disease selected | Wichmann et al |
| | | were based on clinical findings | from the KORA S4 | (2005) |
| | | and imaging evidence (either | Study | |
| | | CT or MRI), and were clinically | | |
| | | confirmed by neurologists. | | |
| West | Case/ | Ischemic stroke patients recruited | Population controls | Traylor et al |
| Germany | Control | through hospitals participating | with a self-reported | (2008) |
| | | in the regional Westphalian | history of stroke from | Berger et al |
| | | Stroke Register. Diagnoses were | the population based | (2007) |
| | | based on clinical findings and | Dortmund Health | |
| | | imaging evidence (either CT | Study | |
| | | or MRI), and were clinically | | |
| | | confirmed by neurologists | | |
| United | Case/ | Ischemic stroke patients | Community controls, | Traylor et al |
| Kingdom | Control | recruited through a cerebro- | age and gender | (2008) |
| | | vascular service clinic. All | matched and free of | Gschwendtner et al |
| | | cases were phenotyped by | symptomatic | (2009) |
| | | one experienced stroke | cerebrovascular | |
| | | neurologist with review of | disease were recruited | |
| | | original brain imaging with CT | from the same | |
| | | or MRI. | geographic area as | |
| | | | the patients. | |

TABLE 1.2
Characteristics of Participants in the Discovery and Replication Studies of the association
of del12 Variant with Plasma Lipid, Alkaline Phosphatase, and Vitamin B12 levels

| | | | Nijmegen | | | | | |
|---|---|---|---|---|---|---|---|---|
| | | | Biomedical Study | | Inter99 study | | Addition Study | |
| Trait^{a} | Iceland | | (Netherlands)^{c} | | (Denmark)^{d} | | (Denmark)^{e} | |
| Ancestry | Caucasian | | Caucasian | | Caucasian | | Caucasian | |
| N^{b} | 194,958 | | 5,645 | | 7,633 | | 9,689 | |
| Mean age (SD), yrs | 58.2 | (40.6-75.8) | 55.8 | (38.0-73.6) | 48.5 | (36.1-55.5) | 59.9 | (53.1-66.7) |
| Gender, % female | 53.4% | | 53.6% | | 49.9% | | 46.4% | |
| Non-HDL cholesterol | 154.7 | (109.1-200.3) | 170.7 | (129.4-212.0) | 161.6 | (117.5-205.7) | 164.7 | (124.0-205.4) |
| (SD), mg/dL | | | | | | | | |
| LDL cholesterol (SD), | 133.0 | (91.6-174.4) | 138.6 | (102.2-175.0) | 137.2 | (99.7-174.7) | 139.3 | (101.9-176.1) |
| mg/dL | | | | | | | | |
| HDL cholesterol (SD), | 54.7 | (37.7-71.7) | 52.6 | (39.2-66.0) | 54.2 | (38.4-70.0) | 60.0 | (43.6-76.4) |
| mg/dL | | | | | | | | |
| Total Cholesterol | 208.0 | (162.6-253.4) | 223.4 | (180.9-265.9) | 215.8 | (173.6-258.0) | 224.7 | (183.9-265.5) |
| (SD), mg/dL | | | | | | | | |
| Triglycerides (SD), | 133.6 | (67.6-190.5) | 155.8 | (94.5-256.8) | 105.8 | (60.8-183.9) | 117.4 | (73.5-187.3) |

| mg/dL | | | | | | |
|---|---|---|---|---|---|---|
| Alkaline phosphatase | 87.1 | (53.5-141.7) | na | 41.3 | (30.7-55.6) | na |
| (SD), IU/l | | | | | | |
| Vitamin B12 (SD), | 398 | (256-618) | na | 398 | (286-554) | na |

pmol/l

^{a}The average values (where available) for each of the traits listed is shown (±one SD).
^{b}Number ofindividuals with measurements for at least one of the traits.
^{c}Wetzels et al (2007)⁵,
^{d}Jörgensen et al(2003)⁶,
^{e}Lauritzen et al (2000)⁷.

TABLE 1.4A
Association of del12 with Non-HDL Cholesterol, LDL Cholesterol, HDL Cholesterol,
Triglyceride, ALP and Vitamin B12 in Iceland, Denmark and The Netherlands

| | | del12 freq. | | | Population mean |
|---|---|---|---|---|---|
| | Study population (n) | (%) | Effect (95% CI)^{a} | P value | value^{e} (±1SD) |
| | Non-HDL cholesterol | | mg/dL | | mg/dL |
| Discovery | Iceland (119,146) | 0.41 | −13.6 (−17.7, −9.4) | 2.5 × 10⁻¹⁰ | 154.7 (109.1-200.3) |
| Replication | Denmark A^{b} (6,182) | 0.22 | −21.3 (−36.8, −5.9) | 0.0069 | 161.6 (117.5-205.7) |
| Replication | Denmark B^{c} (9,656) | 0.32 | −22.2 (−32.8, −11.7) | 3.8 × 10⁻⁵ | 164.7 (124.0-205.4) |
| Replication | The Netherlands^{d} (5,537) | 0.50 | −17.0 (−28.3, −5.7) | 0.0032 | 170.7 (129.4-212.0) |
| | Combined | | −15.3 (−18.9, −11.7) | 1.0 × 10⁻¹⁶ | |
| | LDL cholesterol | | mg/dL | | |
| Discovery | Iceland (53,841) | 0.41 | −9.5 (−14.0, −5.1) | 2.8 × 10⁻⁵ | 133.0 (91.6-174.4 |
| Replication | Denmark A (6,098) | 0.22 | −22.1 (−35.5, −8.7) | 0.0012 | 137.2 (99.7-174.7) |
| Replication | Denmark B (8,080) | 0.32 | −19.0 (−29.2, −8.8) | 0.00026 | 139.3 (101.9-176.1) |
| Replication | The Netherlands (5,523) | 0.50 | −16.0 (−26.1, −6.0) | 0.0018 | 138.6 (102.2-175.0) |
| | Combined | | −12.5 (−16.2, −8.8) | 3.9 × 10⁻¹¹ | |
| | HDL cholesterol | | mg/dL | | mg/dL |
| Discovery | Iceland (119,514) | 0.41 | 2.4 (0.7, 4.1) | 0.0058 | 54.7 (37.7-71.7) |
| Replication | Denmark A (6,182) | 0.22 | 4.6 (−0.8, 9.9) | 0.096 | 54.2 (38.4-70.0) |
| Replication | Denmark B (9,656) | 0.32 | 2.4 (−1.8, 6.7) | 0.26 | 60.0 (43.6-76.4) |
| Replication | The Netherlands (5,537) | 0.50 | 2.4 (−1.3, 6.0) | 0.20 | 52.6 (39.2-66.0) |
| | Combined | | 2.5 (1.1, 4.0) | 0.00039 | |
| | Triglyceride | | % change | | mg/dL |
| Discovery | Iceland (80,011) | 0.41 | −6.1 (−10.8, −1.5) | 0.012 | 133.6 (67.6-190.5) |
| Replication | Denmark A (6,182) | 0.22 | −6.0 (−25.2, 11.4) | 0.53 | 105.8 (60.8-183.9) |
| Replication | Denmark B (8,163) | 0.32 | −8.9 (−21.0, 2.3) | 0.15 | 117.4 (73.5-187.3) |
| Replication | The Netherlands (5,537) | 0.50 | −4.4 (−17.9, 8.2) | 0.52 | 155.8 (94.5-256.8) |
| | Combined | | −6.3 (−10.3, −2.3) | 0.0032 | |
| | ALP | | % change | | U/L |
| Discovery | Iceland (126,060) | 0.41 | 50.1 (42.9, 57.2) | 3.6 × 10⁻⁶³ | 87.1 (53.5-141.7) |
| Replication | Denmark A^{c} (5,829) | 0.22 | 29.1 (14.8, 42.5) | 3.1 × 10⁻⁶ | 41.3 (30.7-55.6) |
| | Combined | | 46.5 (40.1, 52.7) | 5.6 × 10⁻⁶⁹ | |
| | Vitamin B12 | | % change | | pmol/L |
| Discovery | Iceland (97,910) | 0.41 | 16.6 (11.5, 21.5) | 3.1 × 10⁻¹² | 398 (256-618) |
| Replication | Denmark A^{c} (5,826) | 0.22 | 18.6 (3.9, 32.4) | 0.0053 | 398 (286-554) |
| | Combined | | 16.8 (12.0, 21.5) | 8.3 × 10⁻¹⁴ | |

^{a}Effect estimates and 95% confidence intervals (95% CI) in mg/dL for the non-HDL cholesterol and HDL cholesterol and as percentage change for triglyceride, ALP and vitamin B12.
^{b}The Danish Inter99 study (Jørgensen et al. 2003).
^{c}The Danish Addition study (van den Donk et al. 2011).
^{d}The Nijmegen Biomedical Study (Hoogendoorn et al. 2006).
^{e}For triglyceride, ALP and vitamin B12, the population mean and the SD are calculated for log-transformed values and transformed back to original units. To convert the values for non-HDL and HDL cholesterol to millimoles per liter, multiply by 0.02586. To convert triglyceride to mmol/L, multiply by 0.01129.

TABLE 1.4B
Association of del12 and rs186021206 with Cholesterols, Triglyceride, Alkaline Phosphatase
and Vitamin B12 Measurements in Iceland, Denmark and the Netherlands.

| | | rs186021206 | | | | del12 | | |
|---|---|---|---|---|---|---|---|---|
| | | | Effect | | | | Effect | |
| Trait/Cohort (n)^{a} | | Effect^{b} | (95% CI)^{c} | P | P_{adj}^{d} | Effect^{b} | (95% CI)^{c} | P |
| Non-HDL cholesterol | | SD | mg/dL | | | | mg/dL | |
| Iceland | | −0.28 | −12.9 | 1.4 × 10⁻⁹ | 0.39 | −0.30 | −13.6 | 2.5 × 10⁻¹⁰ |
| (119,146) | | | (−17.1, −8.7) | | | | (−17.7, −9.4) | |
| Denmark | A | −0.38 | −16.7 | 0.0038 | 0.64 | −0.48 | −21.3 | 0.0069 |
| (6,182) | | | (−27.9, −5.4) | | | | (−36.8, −5.9) | |
| Denmark | B | −0.32 | −13.1 | 0.0011 | 0.74 | −0.55 | −22.2 | 3.8 × 10⁻⁵ |
| (9,656) | | | (−21.0, −5.3) | | | | (−32.8, −11.7) | |
| The Netherlands | | −0.23 | −9.7 | 0.062 | 0.19 | −0.41 | −17.0 | 0.0032 |
| (5,537) | | | (−19.9, 0.5) | | | | (−28.3, −5.7) | |
| Combined | | −0.29 | −12.9 | 2.0 × 10⁻¹⁴ | 0.24 | −0.34 | −15.3 | 1.0 × 10⁻¹⁶ |
| | | | (−16.3, −9.6) | | | | (−18.9, −11.7) | |
| LDL cholesterol | | | mg/dL | | | | mg/dL | |
| Iceland | | −0.22 | −9.2 | 5.5 × 10⁻⁵ | 0.78 | −0.23 | −9.5 | 2.8 × 10⁻⁵ |
| (53,841) | | | (−13.6, −4.7) | | | | (−14.0, −5.1) | |
| Denmark | A | −0.43 | −16.1 | 0.0012 | 0.56 | −0.59 | −22.1 | 0.0012 |
| (6,098) | | | (−25.8, −6.3) | | | | (−35.5, −8.7) | |
| Denmark | B | −0.34 | −12.5 | 0.0016 | 0.86 | −0.51 | −19.0 | 0.00026 |
| (8,080) | | | (−20.3, −4.7) | | | | (−29.2, −8.8) | |
| The Netherlands | | −0.36 | −13.2 | 0.0041 | 0.81 | −0.44 | −16.0 | 0.0018 |
| (5,523) | | | (−22.3, −4.2) | | | | (−26.1, −6.0) | |
| Combined | | −0.28 | −11.1 | 1.0 × 10⁻¹⁰ | 0.70 | −0.31 | −12.5 | 3.9 × 10⁻¹¹ |
| | | | (−14.5, −7.8) | | | | (−16.2, −8.8) | |
| Total cholesterol | | | mg/dL | | | | mg/dL | |
| Iceland | | −0.22 | −9.9 | 3.1 × 10⁻⁶ | 0.78 | −0.23 | −10.5 | 6.5 × 10⁻⁷ |
| (125,381) | | | (−14.0, −5.7) | | | | (−14.7, −6.4) | |
| Denmark | A | −0.32 | −13.5 | 0.014 | 0.54 | −0.33 | −14.0 | 0.063 |
| (6,182) | | | (−24.2, −2.8) | | | | (−28.7, 0.8) | |
| Denmark | B | −0.30 | −12.0 | 0.0027 | 0.97 | −0.47 | −19.2 | 0.00040 |
| (9,656) | | | (−19.9, −4.2) | | | | (−29.8, −8.6) | |
| The Netherlands | | −0.21 | −9.0 | 0.0927 | 0.48 | −0.33 | −14.1 | 0.018 |
| (5,537) | | | (−19.5, 1.5) | | | | (−25.7, −2.5) | |
| Combined | | −0.24 | −10.5 | 5.1 × 10⁻¹⁰ | 0.68 | −0.27 | −12.0 | 5.6 × 10⁻¹¹ |
| | | | (−13.8, −7.2) | | | | (−15.6, −8.5) | |
| HDL cholesterol | | | mg/dL | | | | mg/dL | |
| Iceland | | 0.13 | 2.2 | 0.011 | 0.0055 | 0.14 | 2.4 | 0.0058 |
| (119,514) | | | (0.5, 3.9) | | | | (0.7, 4.1) | |
| Denmark | A | 0.15 | 2.4 | 0.22 | 0.84 | 0.29 | 4.6 | 0.096 |
| (6,182) | | | (−1.5, 6.4) | | | | (−0.8, 9.9) | |
| Denmark | B | 0.03 | 0.4 | 0.79 | 0.32 | 0.15 | 2.4 | 0.26 |
| (9,656) | | | (−2.7, 3.6) | | | | (−1.8, 6.7) | |
| The Netherlands | | 0.02 | 0.2 | 0.9 | 0.043 | 0.18 | 2.4 | 0.20 |
| (5,537) | | | (−3.1, 3.5) | | | | (−1.3, 6.0) | |
| Combined | | 0.10 | 1.6 | 0.01 | 0.001 | 0.15 | 2.5 | 0.00039 |
| | | | (0.4, 2.9) | | | | (1.1, 4.0) | |
| Triglyceride | | | % change | | | | % change | |
| Iceland | | −0.11 | −5.4 | 0.027 | 0.13 | −0.12 | −6.1 | 0.012 |
| (80,011) | | | (−10.1, −0.8) | | | | (−10.8, −1.5) | |
| Denmark | A | −0.26 | −13.4 | 0.046 | 0.11 | −0.11 | −6.0 | 0.53 |
| (6,182) | | | (−26.1, −1.6) | | | | (−25.2, 11.4) | |
| Denmark | B | −0.03 | −1.3 | 0.79 | 0.099 | −0.2 | −8.9 | 0.15 |
| (8,163) | | | (−11.2, 8.0) | | | | (−21.0, 2.3) | |
| The Netherlands | | 0.13 | 6.5 | 0.32 | 0.0057 | −0.09 | −4.4 | 0.52 |
| (5,537) | | | (−7.0, 19.1) | | | | (−17.9, 8.2) | |
| Combined | | −0.09 | −4.2 | 0.028 | 0.0066 | −0.13 | −6.3 | 0.003 |
| | | | (−7.9, −0.6) | | | | (−10.3, −2.3) | |
| ALP | | | % change | | | | % change | |
| Iceland | | 0.82 | 48.9 | 1.2 × 10⁻⁶¹ | 0.10 | 0.84 | 50.1 | 3.6 × 10⁻⁶³ |
| (126,060) | | | (41.8, 55.8) | | | | (42.9, 57.2) | |
| Denmark | A | 0.70 | 23.0 | 2.2 × 10⁻⁷ | 0.092 | 0.86 | 29.1 | 3.1 × 10⁻⁶ |
| (6,035) | | | (13.2, 32.4) | | | | (14.8, 42.5) | |
| Combined | | 0.80 | 41.5 | 1.9 × 10⁻⁶⁷ | 0.026 | 0.84 | 46.5 | 5.6 × 10⁻⁶⁹ |
| | | | (35.9, 47.0) | | | | (40.1, 52.7) | |
| Vitamin B12 | | | % change | | | | % change | |
| Iceland | | 0.33 | 15.8 | 2.0 × 10⁻¹¹ | 0.15 | 0.35 | 16.6 | 3.1 × 10⁻¹² |
| (97,910) | | | (10.8, 20.7) | | | | (11.5, 21.5) | |
| Denmark | A | 0.49 | 17.6 | 0.00027 | 0.011 | 0.52 | 18.6 | 0.0053 |
| (6,032) | | | (7.2, 27.7) | | | | (3.9, 32.4) | |
| Combined | | 0.35 | 16.1 | 4.3 × 10⁻¹⁴ | 0.84 | 0.36 | 16.8 | 8.3 × 10⁻¹⁴ |
| | | | (11.6, 20.6) | | | | (12.0, 21.5) | |

^{a}Number of individuals with trait value and genotypes.
^{b}Effect estimates from the regression in units of standard deviations (SD) of the distributions of the adjusted values.
^{c}Effect estimates and 95% confidence intervals (95% CI) in mg/dL for the cholesterol, and as percentage change for triglyceride, ALP and vitamin B12.
^{d}P-values adjusted for the effect of del12. “The Netherlands”, The Nijmegen Biomedical Study¹⁵; “Denmark A”, The Danish Inter99 study⁶; “Denmark B”, The Danish Addition study¹⁶.

TABLE 1.5
The association of published lipid variants with non-HDL cholesterol
levels and coronary artery disease in Iceland.

| Build 36 position | | | | | | Coronary | | |
|---|---|---|---|---|---|---|---|---|
| | Position | | | Non-HDL (mg/dL) | | artery disease | | |
| Chr | (hg18) | MAF | Info | Effect | SE | OR | 95% CI | |
| 1 | 25,641,524 | 0.47184 | 0.996 | 0.7 | 0.2 | 0.99 | 0.97 | 1.02 |
| 1 | 55,278,235 | 0.01173 | 0.986 | −17.2 | 1.0 | 0.73 | 0.66 | 0.81 |
| 1 | 62,725,961 | 0.21814 | 0.996 | 1.6 | 0.3 | 1.01 | 0.98 | 1.03 |
| 1 | 62,906,518 | 0.33844 | 0.998 | −2.3 | 0.2 | 0.99 | 0.97 | 1.01 |
| 1 | 92,766,395 | 0.19052 | 0.999 | 0.8 | 0.3 | 0.99 | 0.97 | 1.02 |
| 1 | 109,620,053 | 0.20789 | 0.999 | 4.8 | 0.3 | 1.08 | 1.06 | 1.11 |
| 1 | 110,000,250 | 0.41287 | 0.995 | 1.0 | 0.2 | 1.01 | 0.99 | 1.03 |
| 1 | 149,225,460 | 0.15162 | 0.997 | −0.7 | 0.3 | 1.03 | 1.00 | 1.06 |
| 1 | 154,967,275 | 0.28892 | 0.998 | −0.5 | 0.2 | 0.99 | 0.97 | 1.02 |
| 1 | 219,036,651 | 0.28689 | 0.994 | 0.9 | 0.2 | 1.01 | 0.98 | 1.03 |
| 1 | 228,362,314 | 0.39128 | 0.999 | −1.1 | 0.2 | 0.99 | 0.97 | 1.01 |
| 1 | 232,915,962 | 0.4424 | 0.999 | 1.2 | 0.2 | 1.00 | 0.98 | 1.03 |
| 2 | 21,087,477 | 0.04518 | 0.999 | −6.1 | 0.5 | 0.94 | 0.89 | 0.99 |
| 2 | 21,117,405 | 0.3491 | 0.997 | 2.9 | 0.2 | 1.05 | 1.03 | 1.07 |
| 2 | 21,139,562 | 0.1408 | 0.999 | 4.3 | 0.3 | 1.08 | 1.04 | 1.11 |
| 2 | 27,584,444 | 0.34466 | 0.998 | −1.8 | 0.2 | 1.00 | 0.98 | 1.03 |
| 2 | 27,584,716 | 0.20151 | 0.995 | −1.4 | 0.3 | 1.00 | 0.97 | 1.02 |
| 2 | 43,927,385 | 0.27892 | 0.999 | −2.6 | 0.2 | 0.95 | 0.93 | 0.98 |
| 2 | 43,953,086 | 0.19027 | 0.997 | −1.5 | 0.3 | 0.96 | 0.94 | 0.99 |
| 2 | 63,003,061 | 0.32014 | 0.997 | 0.9 | 0.2 | 1.02 | 1.00 | 1.05 |
| 2 | 118,293,189 | 0.07895 | 0.998 | −0.8 | 0.4 | 1.02 | 0.98 | 1.06 |
| 2 | 121,025,958 | 0.41077 | 0.994 | 0.6 | 0.2 | 1.03 | 1.01 | 1.06 |
| 2 | 169,538,401 | 0.37685 | 0.999 | −0.5 | 0.2 | 0.99 | 0.97 | 1.01 |
| 2 | 216,012,629 | 0.32322 | 0.998 | 0.8 | 0.2 | 0.95 | 0.93 | 0.97 |
| 3 | 12,271,469 | 0.3667 | 0.998 | −1.2 | 0.2 | 0.99 | 0.97 | 1.02 |
| 3 | 32,508,014 | 0.07924 | 0.997 | −1.6 | 0.4 | 0.98 | 0.94 | 1.02 |
| 3 | 133,691,893 | 0.11977 | 0.998 | −1.1 | 0.3 | 0.99 | 0.96 | 1.03 |
| 3 | 172,209,912 | 0.07646 | 0.999 | 0.8 | 0.4 | 1.08 | 1.04 | 1.12 |
| 4 | 3,442,937 | 0.40281 | 0.991 | 0.7 | 0.2 | 1.03 | 1.00 | 1.05 |
| 4 | 25,672,088 | 0.14802 | 0.993 | 0.9 | 0.3 | 1.04 | 1.01 | 1.07 |
| 4 | 88,249,285 | 0.40279 | 0.999 | 0.7 | 0.2 | 1.00 | 0.98 | 1.02 |
| 4 | 100,233,828 | 0.42298 | 0.998 | 0.5 | 0.2 | 1.01 | 0.99 | 1.03 |
| 5 | 74,661,243 | 0.35407 | 0.999 | 2.8 | 0.2 | 1.04 | 1.02 | 1.06 |
| 5 | 122,883,315 | 0.47211 | 0.995 | 0.5 | 0.2 | 1.00 | 0.98 | 1.02 |
| 5 | 156,322,875 | 0.35741 | 0.998 | 1.7 | 0.2 | 1.01 | 0.99 | 1.03 |
| 6 | 16,217,142 | 0.46163 | 0.995 | −0.8 | 0.2 | 0.99 | 0.97 | 1.01 |
| 6 | 26,201,120 | 0.06713 | 1.000 | −1.5 | 0.4 | 0.99 | 0.95 | 1.03 |
| 6 | 31,373,469 | 0.29084 | 0.993 | 0.8 | 0.2 | 1.02 | 1.00 | 1.04 |
| 6 | 43,865,874 | 0.47286 | 0.993 | 0.9 | 0.2 | 1.02 | 1.00 | 1.04 |
| 6 | 100,706,818 | 0.19956 | 0.998 | −1.0 | 0.3 | 1.00 | 0.97 | 1.02 |
| 6 | 116,444,196 | 0.40848 | 0.998 | −0.6 | 0.2 | 0.98 | 0.96 | 1.00 |
| 6 | 127,494,332 | 0.47183 | 0.999 | 0.9 | 0.2 | 1.01 | 0.99 | 1.03 |
| 6 | 139,873,450 | 0.42692 | 0.999 | −0.7 | 0.2 | 0.98 | 0.96 | 1.00 |
| 6 | 160,881,127 | 0.01773 | 1.000 | 4.0 | 0.8 | 1.31 | 1.21 | 1.41 |
| 6 | 160,930,108 | 0.06104 | 0.984 | 2.3 | 0.4 | 1.27 | 1.22 | 1.33 |
| 7 | 21,573,877 | 0.22512 | 0.992 | 1.5 | 0.3 | 1.00 | 0.98 | 1.02 |
| 7 | 25,958,351 | 0.14423 | 0.993 | 0.9 | 0.3 | 1.05 | 1.02 | 1.08 |
| 7 | 44,548,856 | 0.2013 | 0.990 | 2.0 | 0.3 | 1.02 | 1.00 | 1.05 |
| 7 | 44,567,220 | 0.42549 | 0.998 | −1.2 | 0.2 | 0.97 | 0.95 | 0.99 |
| 7 | 72,620,810 | 0.11552 | 0.998 | −0.9 | 0.3 | 1.02 | 0.99 | 1.06 |
| 7 | 72,697,942 | 0.46468 | 0.997 | 0.5 | 0.2 | 0.99 | 0.97 | 1.01 |
| 7 | 130,095,474 | 0.44163 | 0.998 | −0.5 | 0.2 | 0.96 | 0.94 | 0.98 |
| 8 | 9,221,641 | 0.07554 | 0.997 | 1.9 | 0.4 | 1.04 | 1.00 | 1.08 |
| 8 | 18,316,718 | 0.18705 | 0.996 | −1.3 | 0.3 | 0.96 | 0.94 | 0.99 |
| 8 | 19,888,502 | 0.08181 | 0.996 | −2.1 | 0.4 | 0.93 | 0.89 | 0.97 |
| 8 | 19,910,123 | 0.45471 | 0.996 | −1.0 | 0.2 | 0.96 | 0.94 | 0.98 |
| 8 | 55,584,167 | 0.24432 | 1.000 | 1.0 | 0.2 | 1.02 | 0.99 | 1.04 |
| 8 | 59,548,473 | 0.31037 | 0.998 | −1.4 | 0.2 | 0.99 | 0.97 | 1.01 |
| 8 | 116,733,072 | 0.26318 | 0.999 | −1.1 | 0.2 | 1.00 | 0.97 | 1.02 |
| 8 | 126,543,488 | 0.22755 | 0.997 | −1.9 | 0.3 | 0.96 | 0.94 | 0.99 |
| 8 | 126,551,803 | 0.49199 | 0.999 | −2.3 | 0.2 | 0.95 | 0.93 | 0.97 |
| 8 | 145,094,645 | 0.385 | 0.990 | 0.7 | 0.2 | 0.98 | 0.96 | 1.00 |
| 9 | 2,630,759 | 0.09898 | 0.998 | −1.3 | 0.4 | 0.97 | 0.94 | 1.01 |
| 9 | 16,894,846 | 0.31865 | 0.998 | −0.5 | 0.2 | 0.97 | 0.95 | 0.99 |
| 9 | 106,704,122 | 0.25781 | 0.999 | −1.1 | 0.2 | 0.97 | 0.95 | 0.99 |
| 9 | 106,724,051 | 0.28833 | 0.997 | −0.6 | 0.2 | 0.99 | 0.97 | 1.02 |
| 9 | 135,122,694 | 0.38646 | 0.997 | −0.9 | 0.2 | 0.99 | 0.97 | 1.01 |
| 9 | 135,143,989 | 0.15248 | 0.995 | 1.0 | 0.3 | 1.05 | 1.02 | 1.08 |
| 10 | 94,829,632 | 0.42892 | 0.993 | −0.6 | 0.2 | 0.99 | 0.97 | 1.01 |
| 11 | 18,612,847 | 0.30731 | 0.998 | 0.8 | 0.2 | 1.02 | 1.00 | 1.04 |
| 11 | 61,305,450 | 0.27208 | 0.991 | 0.8 | 0.2 | 1.01 | 0.99 | 1.04 |
| 11 | 61,354,548 | 0.38782 | 0.998 | −1.1 | 0.2 | 1.00 | 0.98 | 1.02 |
| 11 | 116,144,314 | 0.06787 | 0.999 | −5.8 | 0.4 | 0.94 | 0.91 | 0.98 |
| 11 | 116,159,645 | 0.46743 | 0.999 | −0.5 | 0.2 | 0.97 | 0.95 | 0.99 |
| 11 | 116,206,564 | 0.00228 | 0.979 | −15.1 | 2.3 | 0.91 | 0.73 | 1.14 |
| 11 | 122,039,714 | 0.40275 | 0.996 | 0.6 | 0.2 | 1.01 | 0.99 | 1.03 |
| 11 | 125,749,162 | 0.10572 | 0.999 | 0.7 | 0.3 | 1.02 | 0.99 | 1.06 |
| 12 | 110,492,139 | 0.38236 | 0.999 | 0.8 | 0.2 | 0.94 | 0.92 | 0.96 |
| 12 | 110,794,963 | 0.2284 | 0.999 | 0.8 | 0.3 | 0.94 | 0.92 | 0.97 |
| 12 | 119,901,033 | 0.30901 | 0.994 | 0.9 | 0.2 | 1.03 | 1.01 | 1.05 |
| 13 | 31,851,388 | 0.44766 | 0.999 | −0.7 | 0.2 | 0.99 | 0.97 | 1.01 |
| 14 | 23,953,727 | 0.49889 | 0.995 | 0.8 | 0.2 | 0.98 | 0.96 | 1.01 |
| 15 | 56,518,445 | 0.19278 | 0.999 | −0.6 | 0.3 | 0.99 | 0.97 | 1.02 |
| 16 | 55,542,640 | 0.38939 | 0.991 | −1.8 | 0.2 | 0.97 | 0.95 | 0.99 |
| 16 | 55,572,592 | 0.06047 | 0.997 | 2.9 | 0.5 | 1.04 | 1.00 | 1.09 |
| 16 | 66,485,543 | 0.10432 | 1.000 | −0.8 | 0.3 | 0.97 | 0.94 | 1.01 |
| 16 | 70,665,594 | 0.14755 | 0.997 | 1.3 | 0.3 | 1.03 | 1.00 | 1.06 |
| 17 | 7,032,374 | 0.35058 | 0.996 | −1.0 | 0.2 | 0.98 | 0.96 | 1.00 |
| 17 | 8,101,874 | 0.49481 | 0.998 | −0.4 | 0.2 | 0.96 | 0.94 | 0.98 |
| 17 | 39,281,652 | 0.03364 | 0.989 | 1.3 | 0.6 | 1.08 | 1.02 | 1.15 |
| 17 | 42,746,803 | 0.28266 | 0.998 | 0.6 | 0.2 | 1.02 | 1.00 | 1.04 |
| 17 | 64,394,061 | 0.32561 | 0.995 | 0.5 | 0.2 | 1.03 | 1.01 | 1.05 |
| 18 | 45,363,953 | 0.01171 | 0.999 | 4.8 | 1.0 | 1.00 | 0.91 | 1.09 |
| 19 | 8,335,323 | 0.02392 | 0.965 | −4.7 | 0.7 | 0.80 | 0.74 | 0.86 |
| 19 | 11,063,306 | 0.0888 | 0.995 | −6.8 | 0.4 | 0.89 | 0.86 | 0.92 |
| 19 | 11,088,602 | 0.45236 | 0.997 | 1.4 | 0.2 | 1.02 | 1.00 | 1.04 |
| 19 | 19,268,718 | 0.07838 | 0.997 | −3.8 | 0.4 | 0.96 | 0.92 | 1.00 |
| 19 | 50,103,781 | 0.16819 | 0.980 | 8.4 | 0.3 | 1.05 | 1.02 | 1.08 |
| 19 | 50,103,919 | 0.05236 | 0.968 | −16.9 | 0.5 | 0.83 | 0.79 | 0.87 |
| 19 | 53,898,229 | 0.39118 | 0.997 | 1.1 | 0.2 | 1.00 | 0.98 | 1.03 |
| 19 | 57,016,028 | 0.27115 | 0.999 | 0.6 | 0.2 | 1.03 | 1.01 | 1.06 |
| 19 | 59,489,660 | 0.21613 | 0.990 | −0.6 | 0.3 | 0.99 | 0.96 | 1.02 |
| 20 | 12,910,718 | 0.45731 | 0.998 | 0.4 | 0.2 | 1.00 | 0.98 | 1.03 |
| 20 | 17,793,921 | 0.15541 | 0.991 | 0.8 | 0.3 | 0.98 | 0.95 | 1.01 |
| 20 | 38,613,850 | 0.34358 | 0.997 | −1.1 | 0.2 | 0.98 | 0.96 | 1.00 |
| 20 | 39,157,752 | 0.45945 | 0.997 | 1.1 | 0.2 | 0.99 | 0.97 | 1.01 |
| 20 | 42,475,778 | 0.04599 | 0.993 | −1.3 | 0.5 | 0.98 | 0.93 | 1.03 |
| 20 | 44,018,827 | 0.21978 | 0.998 | 1.3 | 0.3 | 0.98 | 0.96 | 1.01 |

Shown are the build 36 positions (hg18), minor allele frequency (MAF), imputation information, the non-HDL effect in mg/dL and the standard error of the estimate (SE), and the OR for coronary artery disease and 95% CI for the minor allele.

TABLE 1.6
Association of del12 with various measures of liver function in Iceland

| Phenotype | n^{a} | Effect^{b} | Effect (95% CI)^{c} | P | Mean (±1 SD)^{d} | |
|---|---|---|---|---|---|---|
| | % change | | | | | |
| Alanine | 144,402 | 0.087 | 5.8 (−0.4, 12.2) | 0.065 | 28.7 (15.0-54.8 ) | units/L |
| Transaminase | | | | | | |
| Alkaline | 126,060 | 0.840 | 50.1 (42.9, 57.2) | 3.6×10⁻⁶³ | 87.1 (53.5-141.7) | units/L |
| Phosphatase | | | | | | |
| Aspartate | 144,931 | 0.072 | 4.1 (−2.9, 11.4) | 0.095 | 28.1 (14.2-55.6) | units/L |
| Transaminase | | | | | | |
| Bilirubin | 94,805 | 0.054 | 3.7 (−2.6, 10.4) | 0.25 | 9.1 (4.6-18.0) | μm/L |
| Gamma Glutamyl | 138,844 | 0.113 | 10.3 (1.7, 19.2) | 0.015 | 30.9 (13.1-72.9) | units/L |
| Transpeptidase | | | | | | |
| | g/L | | | | | |
| Albumin | 78,555 | −0.109 | −0.72 (−1.37, 0.06) | 0.033 | 39.5 (33.0-46.0) | g/L |

^{a}Number of individuals used in the association analysis for each of the traits.
^{b}Effect estimate, in units ofstandard deviation, from regression of adjusted trait values on the expected genotype count of del12.
^{c}Effect estimates and 95% CI in original units. For traits with log-normal distribution the effects are presented as percentage change with 95% CI.
^{d}Mean trait values, ±one SD, in the Icelandic population.
For traits with log-normal distribution the mean and SD is calculated for log-transformed trait values and transformed back to original units.

TABLE 1.7
Common Variants at the ASGR-1 Locus Associated with Non-HDL
Cholesterol and Alkaline Phosphatase in Iceland

| | rs314253 | rs56093546 | del12 |
|---|---|---|---|
| Chromosome position | 17:7032374 | 17:7004539 | 17:7020979 |
| MAF (%) | 35.06 | 21.63 | 0.43 |
| Effect^{a} on non-HDL | −0.03 | −0.04 | −0.30 |
| cholesterol (P value) | (5.9 × 10⁻⁶) | (2.0 × 10⁻⁶)⁻ | (2.5 × 10⁻¹⁰) |
| Adjusted for | — | 0.022 | 7.9 × 10⁻¹¹ |
| rs314253 (P) | | | |
| Adjusted for | 0.0068 | — | 7.2 × 10⁻¹¹ |
| rs56093546 (P) | | | |
| Adjusted for del12 (P) | 6.4 × 10⁻⁷ | 1.7 × 10⁻⁶ | — |
| Effect^{a} on ALP | 0.050 | 0.068 | 0.82 |
| (P value) | (3.9 × 10⁻²¹) | (7.4 × 10⁻²⁸) | (3.6 × 10⁻⁶³) |
| Adjusted for | — | 5.7 × 10⁻¹² | 4.1 × 10⁻⁶⁶ |
| rs314253 (P) | | | |
| Adjusted for | 0.000042 | — | 2.0 × 10⁻⁶⁶ |
| rs56093546 (P) | | | |
| Adjusted for del12 (P) | 4.2 × 10⁻²⁴ | 4.0 × 10⁻³¹ | — |
| r², D′ (relative to | — | 0.29, 0.76 | 0.001, 0.60 |
| rs314253) | | | |
| r², D′ (relative to | 0.29, 0.76 | — | 0.001, 1.00 |
| rs56093546) | | | |

^{a}Effect estimates from the regression in units of standard deviations of the distributions of the adjusted values.
The association of rs314253 with LDL cholesterol was reported in Willer et al 2013 and with ALP in Chambers et al., 2011.

TABLE 1.8
Association of p.w158X and del12 with Cholesterols, Triglyceride, Alkaline
Phosphatase, Vitamin B12 and CAD in an extended Icelandic dataset

| | p.W158X | | | del12 | | |
|---|---|---|---|---|---|---|
| | | Effect | | | Effect | |
| Trait/(n)^{a} | Effect^{b} | (95% CI)^{c} | P | Effect^{b} | (95% CI)^{c} | P |
| Non-HDL cholesterol | SD | mg/dL | | SD | mg/dL | |
| (136,261) | −0.45 | −21.6 | 0.00057 | −0.29 | −13.3 | 4.0 × 10⁻¹¹ |
| | | (−34.2, −9.6) | | | (−17.2, −9.3) | |
| LDL cholesterol | | mg/dL | | | mg/dL | |
| (53,932) | −0.38 | −15.9 | 0.064 | −0.23 | −9.7 | 2.8 × 10⁻⁵ |
| | | (−32.7, 0.9) | | | (−14.1, −5.1) | |
| Total cholesterol | | mg/dL | | | mg/dL | |
| (131,879) | −0.30 | −13.5 | 0.091 | −0.23 | −10.4 | 1.4 × 10⁻⁷ |
| | | (−29.3, 2.2) | | | (−14.2, −6.5) | |
| HDL cholesterol | | mg/dL | | | mg/dL | |
| (124,437) | 0.14 | 2.4 | 0.45 | 0.15 | 2.5 | 0.0016 |
| | | (−3.9, 8.7) | | | (1.0, 4.0) | |
| Triglyceride | | % change | | | % change | |
| (82,569) | −0.17 | −8.4 | 0.33 | −0.12 | −6.0 | 0.0075 |
| | | (−25.5, 7.2) | | | (−10.4, −1.8) | |
| ALP | | % change | | | % change | |
| (131,966) | 0.77 | 45.3 | 7.9 × 10⁻⁶ | 0.80 | 47.7 | 5.6 × 10⁻⁷⁶ |
| | | (20.4, 68.2) | | | (2.2, 87.1) | |
| Vitamin B12 | | % change | | | % change | |
| (102,624) | 0.26 | 15.6 | 0.084 | 0.33 | 17.5 | 5.6 × 10⁻¹⁶ |
| | | (−4.3, 34.0) | | | (3.1, 30.9) | |
| CAD | | OR | P | | OR | P |
| (35,134/275,567) | | 0.61 | 0.24 | | 0.66 | 4.5 × 10⁻⁵ |
| | | (0.26, 1.40) | | | (0.54, 0.81) | |

^{a}Number of individuals with trait value and genotypes.
^{b}Effect estimates from the regression in units of standard deviations (SD) of the distributions of the adjusted values.
^{c}Effect estimates and 95% confidence intervals (95% CI) in mg/dL for the cholesterols, and as percentage change for triglyceride, ALP and vitamin B12.
^{d}P-values adjusted for the effect of del12. This analysis was done on an updated Icelandic dataset that includes 8,453 WGS individuals and imputation into 150,656 Icelandic individuals. For none-HDL cholesterol association analysis an updated sample set was used that contained 136,261 Icelanders.

TABLE 1.9A
Correlation and conditional analysis for del12 and the seven other SNPs that
show the strongest association at 17p13.1 with non-HDL cholesterol in Iceland

| | | | | EA. freq | | non-HDL | | | |
|---|---|---|---|---|---|---|---|---|---|
| Variant | Pos | EA | OA | (%) | r^{2 d} | Effect^{c} | P | P_{adjdel12}^{a} | P_{adjSNP}^{b} |
| chr17: 6930020: S | 6930020 | T | C | 0.39 | 0.85 | −0.243 | 5.2 × 10⁻⁷ | 0.10 | 2.8E−05 |
| rs188743906 | 6931736 | T | C | 0.39 | 0.85 | −0.243 | 5.2 × 10⁻⁷ | 0.18 | 2.9E−05 |
| rs150983647 | 6942021 | T | C | 0.44 | 0.76 | −0.232 | 5.3 × 10⁻⁷ | 0.39 | 7.6E−05 |
| chr17: 6944653: S | 6944653 | A | G | 0.39 | 0.85 | −0.242 | 5.9 × 10⁻⁷ | 0.10 | 2.3E−05 |
| rs146261845 | 6952978 | T | C | 0.40 | 0.75 | −0.259 | 1.1 × 10⁻⁷ | 0.88 | 0.00053 |
| chr17: 6961021: S | 6961021 | C | T | 0.39 | 0.85 | −0.250 | 2.2 × 10⁻⁷ | 0.18 | 0.00010 |
| rs186021206 | 7010136 | A | G | 0.43 | 0.86 | −0.283 | 1.4 × 10⁻⁹ | 0.39 | 0.067 |
| del12 | 7020979 | del12 | — | 0.41 | | −0.297 | 2.5 × 10⁻¹⁰ | — | — |

^{a}P-value for correlation between the SNP and the trait, tested conditional on the association of the trait with del12.
^{b}P-value for the correlation between the trait and del12, tested conditional on the association of the trait with the SNP.
^{c}Effect estimated in units of standardized trait values.
^{d}Correlation r2 between del12 and sequencing genotypes of the SNPs in 2,128 Icelandic individuals. Shown are the build 36 positions (hg18).

TABLE 1.9B
Association of del12 with Non-HDL Cholesterol,
HDL Cholesterol and Triglyceride Measurements,
in Iceland, Denmark and the Netherlands

| | | | | Mean |
|---|---|---|---|---|
| | | | | value^{b} in |
| | | Change^{a} | | non-carriers |
| | Study | [symbol] SE | | (SD) |
| | population (n) | mg/dl | P value | mg/dl |
| | Non-HDL | | | |
| | cholesterol | | | |
| Discovery | Iceland (119,146) | −10.4 ± 1.5 | 2.5 × 10⁻¹⁰ | 156.8 (38.2) |
| Replication | The Netherlands^{c} | −15.4 ± 5.4 | 0.0032 | 170.7 (41.3) |
| | (5,156) | | | |
| Replication | Denmark A^{d} | −17.4 ± 8.1 | 0.0069 | 158.3 (42.9) |
| | (5,968) | | | |
| Replication | Denmark B^{e} | −21.6 ± 5.4 | 3.8 × 10⁻⁵ | 164.5 (40.5) |
| | (8,822) | | | |
| | Combined | −11.6 ± 1.5 | 1.0 × 10⁻¹⁶ | |
| | HDL cholesterol | | | |
| Discovery | Iceland (119,514) | 0 ± 0.4 | 0.0058 | 55.2 (15.8) |
| Replication | The Netherlands | 2.7 ± 1.5 | 0.20 | 52.2 (13.1) |
| | (5,537) | | | |
| Replication | Denmark A | 1.2 ± 2.7 | 0.096 | 55.2 (15.4) |
| | (6,182) | | | |
| Replication | Denmark B | 1.5 ± 1.2 | 0.26 | 59.9 (16.2) |
| | (9,656) | | | |
| | Combined | 0 ± 0.4 | 0.00039 | |
| | Tri- | | | |
| | glyceride—mg/dl | | | |
| Discovery | Iceland (80,011) | −1.2 ± 1.5 | 0.012 | 130.9 (75.2) |
| Replication | The Netherlands | −0.4 ± 5.8 | 0.52 | 176.9 (121.2) |
| | (5,537) | | | |
| Replication | Denmark A | 8.1 ± 6.9 | 0.53 | 116.8 (84.0) |
| | (6,182) | | | |
| Replication | Denmark B | −3.5 ± 2.3 | 0.15 | 131.8 (118.5) |
| | (8,163) | | | |
| | Combined | −1.5 ± 1.2 | 0.0030 | |

^{a}Effect size, ±standard error, represents the difference in mean values between heterozygote carriers and non-carriers of the variants after adjusting for age, sex and, for Iceland, site and statin use.
^{b}Calculated based on unadjusted values.
^{c}The Nijmegen Biomedical Study (Wetzels et al. 2007).
^{d}The Danish Inter99 study (Jørgensen et al. 2003).
^{e}The Danish Addition study (Lauritzen et al. 2000). To convert the values for non-HDL cholesterol to millimoles per liter, multiply by 0.02586.

TABLE 1.10
Association of del12 with Alkaline Phosphatase and Vitamin
B12 Serum Measurements in Iceland and Denmark

| | | | | Mean value^{b} |
|---|---|---|---|---|
| | Study | | | in non- |
| | population (n) | Change^{a} ± SE | P value | carriers (SD) |
| | ALP | U/L | | U/L |
| Discovery | Iceland (126,060) | +33.6 ± 2.8 | 3.6 × 10⁻⁶³ | 92.8 (64.0) |
| Replication | Denmark A | +15.8 ± 2.6 | 1.7 × 10⁻⁶ | 42.9 (13.5) |
| | (5,829) | | | |
| | Combined | +24.1 ± 1.9 | 9.9 × 10⁻⁶⁹ | |
| | Vitamin B12 | pmol/L | | pmol/L |
| Discovery | Iceland (97,910) | +58.4 ± 8.3 | 3.1 × 10⁻¹² | 439.0 (171.0) |
| Replication | Denmark A | +75.9 ± 29.2 | 0.0069 | 420.0 (146.0) |
| | (5,826) | | | |
| | Combined | +59.7 ± 7.9 | 9.9 × 10⁻¹⁴ | |

^{a}Effect size, ±standard error, represents the difference in mean values between heterozygote carriers and non-carriers of the variants after adjusting for age, sex and, for Iceland, site and statin use.
^{b}Calculated based on unadjusted values.
^{c}The Nijmegen Biomedical Study (Wetzels et al. 2007).
^{d}The Danish Inter99 study (Jørgensen et al. 2003).
^{e}The Danish Addition study (Lauritzen et al. 2000). To convert the values for non-HDL cholesterol to millimoles per liter, multiply by 0.02586.

### Example 2-ALP Data from ASGR-1 Knockout Mice

[0489] ASGR-1 KG mice (strain B6.129S4-ASGR-1^{tmlSau}/SaubJxmJ) were obtained from Jackson Labs and maintained on a chow diet. Serum was collected from male and female animals after a 4 hr fast and tested in an Olympus AU640 Clinical Chemistry Analyzer. Compared to wild-type mice, serum ALP is elevated in ASGR-1 knockout mice (*, p<0.05; ****, p<0.0001, one-way ANOVA with Dunnett test). Levels of alanine transaminase (ALT) and aspartate transaminase (AST) were not significantly different between the groups. These data are summarized in FIG. 7 herein. WT=wild-type; HE=heterozygous; HO=homozygous.

### Example 3-RNAi

### Material and Methods

siRNA Constructs

TABLE 3.1

| | | Primary | | SEQ | | SEQ |
|---|---|---|---|---|---|---|
| | Vendor | Gene | Target | ID | matched | ID |
| Vendor | catalog# | Target | Sequence | NO: | control | NO: |
| Fisher/Ambion | S1662 | hASGR-1 | ACUUCACAGC | 32614 | ACUUCACACGC | 32632 |
| | | | GAGCACGGA | | AGCACGGA | |
| GE/Dharmacon | D-011215-01 | hASGR-2 | GCCAAGGACU | 32615 | GCCAAGGAGAA | 32633 |
| | | | UUCAAGAUA | | UCAAGAUA | |
| GE/Dharmacon | D-011215-03 | hASGR-2 | UGACGGAGGU | 32616 | UGACGGAGCAG | 32634 |
| | | | CCAGGCAAU | | CAGGCAAU | |
| GE/Dharmacon | D-011215-04 | hASGR-2 | AGUGAUGGCU | 32617 | AGUGAUGGGAG | 32635 |
| | | | CUUGGAAAU | | UUGGAAAU | |
| Fisher/Ambion | S1665 | hASGR-2 | GACUAUAGGC | 32618 | GACUAUAGCGU | 32636 |
| | | | ACAACUACA | | CAACUACA | |
| Fisher/Ambion | S194296 | hASGR-2 | CUGUGUGACU | 32619 | CUGUGUGAGAC | 32637 |
| | | | GGGUCCCAA | | GGUCCCAA | |
| Fisher/Ambion | S194297 | hASGR-2 | CACCUCUGGC | 32620 | CACCUCUGCGA | 32638 |
| | | | UAACCCAUA | | AACCCAUA | |
| GE/Dharmacon | D-042958-01 | mASGR-1 | GAGACAGGCU | 32621 | GAGACAGGGAA | 32639 |
| | | | UCCAGAAUU | | CCAGAAUU | |
| GE/Dharmacon | D-042958-04 | mASGR-1 | UGAAGUUAGU | 32622 | UGAAGUUACAC | 32640 |
| | | | GGAGUCGAA | | GAGUCGAA | |
| Fisher/Ambion | S62656 | mASGR-1 | AGAUCACUCC | 32623 | AGAUCACUGGU | 32641 |
| | | | AGUUUGCUA | | GUUUGCUA | |
| Qiagen | S102735796 | mASGR-1 | CCAUCAUGAC | 32624 | CCAUCAUGUGU | 32642 |
| | | | AAAGGAUUA | | AAGGAUUA | |
| GE/Dharmacon | D-061966-01 | mASGR-2 | GGAUGGAACU | 32625 | GGAUGGAAGAC | 32643 |
| | | | GAUUAUAGA | | AUUAUAGA | |
| GE/Dharmacon | D-061966-02 | mASGR-2 | GGAAUUGGGC | 32626 | GGAAUUGGCGG | 32644 |
| | | | CUUCACUCA | | UUCACUCA | |
| GE/Dharmacon | D-061966-03 | mASGR-2 | GACGGAACAU | 32627 | GACGGAACUAG | 32645 |
| | | | CACCCACUA | | ACCCACUA | |
| GE/Dharmacon | D-061966-04 | mASGR-2 | GGAUAGGUCU | 32628 | GGAUAGGUGAA | 32646 |
| | | | UACCGACAG | | ACCGACAG | |
| GE/Dharmacon | S62659 | mASGR-2 | GCAGGAUCCU | 32629 | GCAGGAUCGAU | 32647 |
| | | | AGGAUAGAA | | GGAUAGAA | |
| Fisher/Ambion | S62660 | mASGR-2 | ACAUUGCUCU | 32630 | ACAUUGCUGAA | 32648 |
| | | | UUCACCUGA | | UCACCUGA | |
| Fisher/Ambion | S62661 | mASGR-2 | GAAGAGUUUC | 32631 | GAAGAGUUAGC | 32649 |
| | | | GGACCCUGA | | GACCCUGA | |

### Expression Analysis

[0490] RNA was isolated from the HepG2, CHOs stable cell lines, or liver tissues treated with scrambled siRNA, matched control siRNA or siRNAs against hASGR-1, hASGR-2, mASGR-1 or mASGR-2 using the Qiacube and standard Qiagen RNA isolation protocol. The RNA was DNase treated using the RQ1 DNase kit (Promega). Quantitative PCR was performed according to the manufacturer's protocol on the Quantstudio 7 using the indicated primer probe set (hASGR-1: Hs01005019_m1; hASGR-2: Hs00910102_m1; mASGR-1: Mm01245581_m1, mASGR-2:Mm00431863_m1) from Applied Biosystems. 50 ng RNA/well was used and normalized with 18S internal control.

siRNA Transfection

[0491] Cells were transfected with 10 nM indicated scrambled siRNA, matched control siRNA or siRNAs against hASGR-1, hASGR-2, mASGR-1 or mASGR-2 siRNA for 3-4 days, using Lipofectamine RNAIMAX (Thermo Scientific) following manufacturer's RNAi reverse transfection protocol. Transfection was done in 96 well Screenstar microplates (Greiner bio-one) for internalization assay as well as in 96 well clear tissue culture plates (Corning) for QPCR and Western blotting.

### Western Blotting

[0492] Cells were lysed in RIPA buffer containing inhibitors 3-4 days after siRNA transfection. Cell lysates were passed through a 21 gauge syringe five times and then centrifuged at 13000 rpm at 4° C. for 15 mins. Supernatants were collected and protein concentrations were determined. If needed, 30 ug of protein was deglycosylated using the deglycosylation kit (Genzyme). 10 ug-30 ug of total protein was loaded in each well. The gel was transferred onto a nitrocellulose membrane and the membrane was blocked with 5% blocking buffer for 1 hr at RT. Membrane was then probed with anti-mASGR-1 (1:1000, R &D), hASGR-1 (1:1000, ProteinTech), hASGR-2 (1:1000, Abcam), anti-flag (1:5000, Sigma), anti-his (1:1000, Cell signaling) and mouse anti 3-actin (1:5000, Thermo Fisher or Cell signaling) o/n at 4° C. The membrane was further probed with anti-mouse and anti-rat secondary antibodies to detection the indicated bands.

### Ligand Internalization Assay

[0493] CHO stable cell lines were treated with scrambled siRNA, matched control siRNA or siRNAs against hASGR-1, hASGR-2, mASGR-1 or mASGR-2 siRNA for 3-4 days and plated in 96-well plate. Biotin-GalNAc-PAA was incubated and streptavidin-Alexa488 was further added to cells. Draq5 was used to counterstain cells (for both cytoplasm and nuclei). Cells were scanned with Operetta Image System and data analyzed by Columbus.

### Animal Study

[0494] All animal housing conditions and research protocols were approved by the Amgen Institutional Animal Care and Use Committee (IACUC). Mice were housed in a specified-pathogen free, AAALAC, Intl-accredited facility in ventilated microisolators. Procedures and housing rooms are positively pressured and regulated on a 12:12 dark:light cycle. All animals received reverse-osmosis purified water ad libitum via an automatic watering system. 10-12 week old C57BL/6J animals (The Jackson Laboratory) were singly housed and were fed standard chow (2020× Teklad global soy protein-free extruded rodent diet; Harlan).

[0495] siRNAs modified for in vivo studies were formulated with Invivofectamine 3.0 (Thermo Scientific) following the manufacturer's protocol. In brief, siRNAs were pre-mixed with complex buffer (provided by manufacturer) and Invivofectamine 3.0, and then incubated at 50° C. for 30 minute and further diluted by PBS before injection.

[0496] Mice were i.v. injected with buffer, indicated siRNA and matched control siRNA at 1-2 mg/kg body weight in 0.25 ml buffer at indicated time. Liver total RNA from harvested animals was processed for qPCR analysis.

[0497] Data from these studies is provided in FIGS. 8-17 herein.

### Example 4—Y272C Mutant Data

[0498] Stable pools of Chinese hamster ovary (CHO) cells expressing C-terminal FLAG epitope-tagged murine wild-type or Y272C ASGR-1 were generated by established methods using puromycin selection. Cell surface expression of ASGR-1 was confirmed by FACS using anti-FLAG antibody both during selection process and at the time of the experiment. Ligand binding was assessed by FACS using β-GalNAc-PAA-biotin (Glycotech Corporation) and streptavidin-phycoerythrin (PE). Briefly, ligand was added to 100 ul cells (1×10⁶cells) in Dulbecco's Modified Eagle Medium (DMEM) without phenol red plus 2% bovine serum albumin (BSA) and incubated on ice for 60 minutes. Cells were then washed 3× with DMEM without phenol red plus 2% BSA. Streptavidin-PE was then added at 1 μg/ml for 20 minutes on ice followed by 3 more washes in DMEM without phenol red plus 2% BSA, at which point the cells were resuspended in 0.5 ml DMEM without phenol red plus 2% BSA and 5 ul of 0.1 mM SyTOx Blue viability dye and analyzed on a BD LSR II (BD Biosciences). Data are presented as Median Fluorescence Intensity as shown in Table 4.1, below.

TABLE 4.1
ASGR-1 Y272C has reduced ligand binding
compared to wild-type ASGR-1

| | β-GalNAc-PAA-biotin, ug/ml | | | Anti-FLAG |
|---|---|---|---|---|
| | 0 | 0.1 | 0.3 | antibody |
| Parental | 5.23 | 5.52 | 5.57 | 7.3 |
| WT | 4.87 | 763.51 | 1394.86 | 3959.65 |
| Y272C | 5.28 | 5.47 | 6.10 | 973.38 |

### Example 5-Generation of Antibodies

### Molecular Cloning of ASGR-1 and ASGR-2 Sequences

[0499] For production of recombinant ASGR-1 and ASGR-2 vectors, cDNA sequences were synthesized, obtained from a commercial source or compiled from RNA sequencing data (Amgen). Human, mouse and rat ASGR cDNA clones were from obtained commercially (OriGene Technologies, Inc.). All other ASGR cDNAs were synthesized (Integrated DNA Technologies, Inc.). GenBank accession numbers are as follows: human ASGR-1 (NM_001671.4), human ASGR-2 (NM_080913.3), mouse ASGR-1 (BC022106.1), mouse ASGR-2 (BC011197.1), rat ASGR-1 (NM_012503), rat ASGR-2 (NM_017189), pig ASGR-1 (NM_001244458), pig ASGR-2 (XM_005669199), dog ASGR-1 (XM_546579), dog ASGR-2 (XM_003434599), cynomologus monkey ASGR-1 (XP_005582755). Since the NCBI entry for cynomologus ASGR-2 was a partial amino acid sequence (NCBI protein accession #EHH57653), the complete nucleotide sequence was compiled through the analysis of the cyno genome (genome build Macaca_fascicularis_5.0; GenBank accession number GCA_000364345.1; Washington University) and RNA sequencing data (Amgen) from cyno liver, heart and skin tissue. For transient or stable mammalian expression, cDNAs were cloned into pTT5 (National Research Council of Canada), pSLX235a (SureTech) or pJiF1 (Boyce Lab, Massachusetts General Hospital, U.S. Pat. No. 7,192,933). For individual recombinant protein production in mammalian cells, most sequences were tagged at their C-termini with a 6×His purification tag. For complexes of huASGR-1 and huASGR-2, huASGR-2 was expressed without the 6×His tag. For recombinant expression in E. coli, sequences were cloned into pET21a (Novagen, EMD Millipore). The amino acid sequences of the resultant ASGR proteins are shown in Table 1.

### Expression and Purification of Recombinant Proteins

### Generation of Stable CHO—S Cell Pools for Recombinant Protein Expression

[0500] CHO—S(Invitrogen, Carlsbad, California) cells were transfected with the pSLX235a vector encoding ASGR-1 or ASGR-2 using Lipofectamine LTX according to the manufacturer's recommendations (ThermoFisher Scientific). Stable pools were selected using 10 ug/ml puromycin (single selections) or 10 ug/ml puromycin and 400 ug/ml hygromycin (double selections) and by culturing the cells in fresh media every 2 days. Stable pools were then used for recombinant protein production.

Recombinant Protein Production and Purification from CHO—S Cell Stable Pools

[0501] Cells from the selected stable pools were expanded in growth medium. When sufficient cell numbers had been obtained, cultures were seeded in 2 L conical flasks in a volume of 1 L of growth medium at a viable cell density of 8×10⁵ cells/ml. Cells were then cultured in suspension at 37° C., in 5% CO₂ for three days, after which the temperature was dropped to 31° C. for the final 7 days of production. Centrifugation was used to pellet the cells, and the resulting supernatant was filtered to generate conditioned medium.

[0502] Individual recombinant proteins were purified via the 6×His tag using Ni-Excel resin (GE Healthcare). Briefly, 1.4 L of conditioned medium was loaded onto 3×5 ml Ni-Excel Hi-trap columns and then washed with 10 column volumes of wash buffer (25 mM HEPES, pH7.6, 250 mM NaCl, 1 mM CaCl₂, 50 mM imidazole). Protein was eluted from the columns with 7 column volumes of elution buffer (25 mM HEPES, pH7.6, 250 mM NaCl, 1 mM CaCl₂, 400 mM imidazole). The eluted fractions were loaded onto a HiLoad Superdex 200 column via 2×10 ml injections and eluted with 25 mM HEPES, pH 7.6; 150 mM NaCl, 1 mM CaCl₂. The final fractions were collected based on their expected molecular weight. The identity of the proteins in each eluted peak was confirmed by LC-TOF-MS after deglycosylation (with N-glycanase, 0-glycanase and sialidase) and reduction. ASGR-1/ASGR-2 complexes were purified by pre-incubating the ASGR-1-6×His Tag conditioned medium with ASGR-2-no 6×His Tag conditioned medium. These conditions permitted association of both proteins giving a complex that could be purified via the standard two-step Ni-Excel/SEC method.

Recombinant Protein Production and Purification from E. coli

[0503] E. coli codon optimized sequences were cloned into the pET21a expression plasmid. Plasmids were transformed into E. coli strain BL21(DE3) Star (ThermoFisher Scientific Inc.) and individual clones were selected using carbenicillin. For expression, cells were grown in 1 L TB growth medium (supplemented with carbenicillin) in a 4 L flask at 37° C. with shaking. When an optical density of 2 was achieved, protein expression was induced by the addition of 1 mM IPTG (final concentration). After 4 hours of induction at 37° C., the cell paste was harvested by centrifugation (recovering between 7 and 14 g cell paste/L culture). Protein localization into the insoluble fraction was confirmed by SDS-PAGE.

[0504] Inclusion bodies were recovered from the cell paste and solubilized in 6M guanidinium containing 10 mM DTT. Successful protein refolding was established by screening a matrix of 32 conditions that included a variety of buffers, pHs, denaturants, stabilizing agents and reducing agents. The refolding procedure was initiated by rapidly diluting the dissolved inclusion bodies at a ratio of 1:15 into the appropriate refold buffer, maintaining approximately 1 mg of protein per condition. The samples were then incubated at 4° C. for 60 hours. The resulting batches were analysed by SDS-PAGE and Ion Exchange chromatography to identify the optimal refolding conditions. For the ASGR-1 CBD (148-291), the final refold conditions were: pH 9.5, 2.5M urea, 20% glycerol, 4 mM cysteine and 4 mM cystamine.

### Generation of Anti-ASGR Immune Responses

### Mouse Strains

[0505] Fully human antibodies to human ASGR were generated by immunizing XENOMOUSE® transgenic mice (U.S. Pat. Nos. 6,114,598; 6,162,963; 6,833,268; 7,049,426; 7,064,244, which are incorporated herein by references in their entirety; Green et al., 1994, Nature Genetics 7:13-21; Mendez et al., 1997, Nature Genetics 15:146-156; Green and Jakobovitis, 1998, J. Ex. Med, 188:483-495; Kellerman and Green, Current Opinion in Biotechnology 13, 593-597, 2002). Animals from the XMG2-K, XMG2-KL, XMG4-K and XMG4-KL XENOMOUSE® strains were used for all immunizations.

[0506] Mouse anti-human ASGR antibodies were generated by immunizing BALB/c, C57BL/6 and CD-1 mice (Charles River Laboratories, San Diego, California) as well as B6.129S4-ASGR-1^{tm/Sau}/SaubJxmJ (ASGR-1 KO mice) and C57BL6 ×129 F1 mice (Jackson Laboratory, Sacramento, CA).

[0507] Fully human, heavy chain only antibodies (HCAbs) were generated by immunizing the VH4 and 8V3 strains of transgenic Harbour mice (Janssens et al. 2006, PNAS 103:15130-15135; Harbour Biologics, Rotterdam, Netherlands). Rat anti-mouse ASGR antibodies were generated using Brown Norway Rats (Charles River Laboratories, San Diego, California).

### Immunizations

[0508] Multiple immunogens and routes of immunization were used to generate anti-human ASGR immune responses. For genetic immunizations, mice were immunized 12-14 times over 6-8 weeks using the Helios Gene Gun system according to the manufacturer's instructions (BioRad, Hercules, California). Briefly, expression vectors encoding wild type human or mouse ASGR-1 (or both huASGR-1+huASGR-2, muASGR-1+muASGR-2) were coated onto gold beads (BioRad, Hercules, California) and delivered to the epidermis of a shaved mouse or rat abdomen. For cell-based immunizations, mice and rats were immunized with CHO-s cells (Invitrogen, Carlsbad, California) or 293-6E cells (National Resource Council of Canada) transiently transfected with expression vectors encoding human or mouse ASGR-1 (or both huASGR-1+huASGR-2, muASGR-1+muASGR-2). Animals were immunized with cells mixed with Alum prepared from aluminum potassium sulfate (EMD Chemicals Inc., Gibbstown, NJ) and CpG-ODN (Eurofins MWG Operon LLC, Huntsville, AL) 10 times over 6 weeks using a protocol that alternated between sub-cutaneous and intraperitoneal injections. The initial boost was comprised of 4×10⁶ cells while subsequent boosts contained 2×10⁶ cells. For soluble protein immunizations, mice were immunized with a variety of human ASGR recombinant proteins representing the complete extracellular domain (ECD), the carbohydrate binding domain (CBD) or the complex of ASGR-1 and ASGR-2 ECDs (Table 5.1). Animals were immunized with recombinant protein (or recombinant protein conjugated to KLH using standard methods) mixed with Alum and CpG-ODN, Complete Freund's Adjuvant (Sigma), or MPL+ Adjuvant (Sigma) 10 times over 4-6 weeks using sub-cutaneous injections. The initial boost was comprised of 10 g while subsequent boosts contained 5-10 g. Human ASGR-1-specific serum titers were monitored by live-cell FACS analysis on an Accuri flow cytometer (BD Biosciences). Animals with the highest antigen-specific serum titers were sacrificed and used for hybridoma generation (Kohler and Milstein, 1975).

TABLE 5.1
Soluble, Recombinant Protein Antigens Used for Immunizations

| Recombinant Protein Immunogen | Source |
|---|---|
| huASGR-1 (Cat#: C428) ECD-KLH conjugate | Novoprotein |
| huASGR-1 (64-291) ECD-KLH conjugate | Amgen |
| huASGR-1 (64-291) ECD | Amgen |
| huASGR-1 (154-291) CBD | Amgen |
| huASGR-1(64-291)/huASGR-2 (61-287) | Amgen |
| ECD Complex | |
| huASGR-1(64-291)/huASGR-2 (61-287) | Amgen |
| ECD Complex-KLH conjugate | |
| muASGR-1 (63-284) | Amgen |

### Preparation of Monoclonal Antibodies

### Hybridoma Generation

[0509] Animals exhibiting suitable serum titers were identified and lymphocytes were obtained from spleen and/or draining lymphnodes. Pooled lymphocytes (from each immunization cohort) were dissociated from lymphoid tissue by grinding in a suitable medium (for example, Dulbecco's Modified Eagle Medium (DMEM); Invitrogen, Carlsbad, CA). B cells were selected and/or expanded using standard methods, and fused with a suitable fusion partner using techniques that were known in the art.

### Antigen Enrichment of Hybridoma Pools

[0510] Fused hybridoma pools from each immune tissue harvest were used as a source of material for FACS-based enrichments using a variety of probes. To enrich for hybridomas expressing antibodies specific to native (full length, on-cell) human, cyno, mouse, rat, dog, or pig ASGR-1 (and native human ASGR-2) membranes were prepared from 293T cells transiently expressing the relevant ASGR cDNA construct. 24 hours after transfection using 293-fectin (ThermoFisher Scientific Inc.), cells were biotinylated with E-Z link NHS-LC-LC- Biotin according to the manufacturer's recommendation (ThermoFisher Scientific Inc.). After biotinylation, cells were homogenized with a needle and syringe to form membrane fragments and referred to as “membrane preps”. The biotinylated membrane preps were then used to detect hybridomas expressing surface antibodies specific to the target of interest via standard biotin-streptavidin chemistry. To enrich for hybridomas capable of binding to the recombinant ASGR-1 ECD or CBD, soluble, 6×His-tagged ASGR-1 proteins were used (Amgen).

[0511] To enrich hybridoma pools for the antigen of interest, they were first incubated with the appropriate membrane prep or soluble probe. For soluble forms of ASGR-1, the recombinant protein probes were added to the hybridomas and allowed to bind. Excess probe was then washed away and the antigen-specific hybridomas were identified by simultaneous detection of surface IgG (with an Alexa 488 conjugated secondary antibody (Jackson ImmunoResearch) (Gt anti-mouse Fc for wild type mouse hybridomas and Gt anti-human Fc for transgenic mouse hybridomas)) and the soluble ASGR-1 probe via its 6×His tag (using an Amgen-derived anti-6×His monoclonal antibody conjugated to Alexa 647 via an Alexa 647 labeling kit (ThermoFisher Scientific Inc). Hybridomas expressing surface IgG and binding antigen were detected by FACS analysis on an Accuri flow cytometer. Dual positive events were sorted as single cells into 384-well plates on a FACS Aria cell sorter (BD Biosciences). For native forms of ASGR-1, biotinylated membrane preps were prepared as described from 293T cells transiently expressing the appropriate antigen. After washing away unbound probe, dual positive hybridomas expressing cell surface IgG and binding antigen were detected using an Alexa 488 conjugated secondary antibody (to detect IgG) and streptavidin conjugated to Alexa 647 (Jackson ImmunoResearch) to detect antigen. These events were sorted as single cells into 384-well plates on a FACS Aria cell sorter. After several days of culture, the hybridoma supernatants containing monoclonal antibodies were collected and used in the screening assays described in the examples below.

### Example 6: Identification of ASGR-1 Specific Antibodies

[0512] The following Table 6.1 summarizes the approximate numbers of antibodies assayed:

TABLE 6.1
Summary of the identification and selection of huASGR-1
binding, ligand blocking antibodies.

| ASGR-1 Screen | Number of Antibodies |
|---|---|
| huASGR-1 Binders | 15731 |
| huASGR-1-Ligand Blockers (>60%) | 5306 |
| Sequences Unique huASGR-1-Ligand | 2603 (disclosed in Table 3) |
| Blockers | |
| huASGR-1-Ligand Blockers (>50%) | 172 (disclosed in Table 3) |

### Example 6-A: Initial Selection of ASGR-1 Specific Binding Antibodies

[0513] Hybridoma supernatants (monoclonal antibodies) were screened for binding to human ASGR-1 transiently expressed on Human Embryonic Kidney (HEK) 293 cells using the Cell Insight™ High Content Imaging Platform (ThermoFisher Scientific). Human ASGR-1 was transiently expressed on host HEK 293 cells by transfection using human ASGR-1 DNA, Gibco™ Opti-MEM® media and 293Fectin™ reagents following the protocol set out by the manufacturer. Transfected HEK 293 cells expressing the human ASGR-1, hybridoma supernatant or control samples, Alexa Fluor®488 IgG Fc fragment-specific detection antibody and Hoechst 33342 stain were mixed and incubated for 3 hours at room temperature. Samples were then washed and analyzed on the CellInsight™ system. Supernatants were counter-screened against HEK 293 cells transfected with empty parental vector (referred to as mock). Analysis was done using irrelevant IgG antibody supernatant sample signal; hybridoma supernatant samples showing two times or greater signal over irrelevant IgG antibody sample were considered to be exhibiting ASGR-1-specific binding profiles and selected for further characterization. See Table 6.1.

### Example 6-B: Identification of ASGR-1 Receptor-Ligand Blocking Antibodies

[0514] ASGR-1-binding hybridoma supernatants were tested for their ability to block ASGR-1 from binding ligand. Competitive binding assays were performed on the antigen specific hybridoma supernatant samples using FACS on either HEK 293 cells transiently expressing human ASGR-1 or CHO—S cells stably expressing Human ASGR-1 as follows. HEK 293 cells or CHO—S cells expressing human ASGR-1 were mixed with the antibody sample (hybridoma supernatants specific for ASGR-1) and incubated for 1 hour at 4° C., and then washed twice. Cells with bound sample were then incubated with precomplexed β-GalNAc-PAA-Biotin (GlycoTech, Gaithersburg, Maryland)/Alexa Fluor® 647—Streptavidin for 45 minutes at 4° C. The concentration of β-GalNAc-PAA-Biotin was used at the binding EC50 concentration on the specific cell line. The concentration of Alexa Fluor® 647 Streptavidin was used at a 2:1 molar ratio to β-GalNAc-PAA-Biotin. The 7-AAD cell viability stain was then added and the cells incubated for a further 15 minutes at 4° C., washed twice and resuspended in FACS buffer. Where tolerated by cell viability, FACS buffer supplemented with 1 mM Calcium Chloride was used in all steps. Samples were analyzed using a BD Accuri™ Flow Cytometer and an Intellicyt HyperCyt Autosampler. Analysis was done using irrelevant (non-ASGR-1 specific) IgG antibody supernatant control signal on both mock transfected HEK 293 cells and Human ASGR-1 transfected HEK 293 cells to determine maximum and minimum β-GalNAc-PAA-Biotin binding signal. Using these maximum and minimum binding signals, the % β-GalNAc-PAA-Biotin binding inhibition was determined. ASGR-1 antibodies having the ability to reduce ligand binding ≥60% were identified (Table 6.1), and sequenced using methods available to those skilled in the art. The sequences of unique ASGR-1-specific, ligand blocking antibodies are displayed in Table 2-7 herein.

[0515] The unique ASGR-1-specific, ligand blocking antibodies were then tested for their ability to block the GalNAc ligand under more stringent conditions using a single, known antibody concentration (5 ug/ml). The receptor-ligand blocking assays were performed using 293T cells transiently expressing ASGR-1 or CHOs cells that had been stably transfected with ASGR-1. ASGR-1 antibodies having the ability to reduce ligand binding ≥50% were identified. See Table 6.1.

### Example 7: Antibody Characterization Assays

### A. ASGR-1 Species Cross Reactivity, ASGR-2 Selectivity Assays and Hepatoma (HEPG2) Binding Assays

[0516] Human ASGR-1-specific, ligand competing antibody samples were tested for binding to ASGR-1 from other species (cynomologus monkey ASGR-1, mouse ASGR-1, rat ASGR-1, dog ASGR-1, and pig ASGR-1) as well as to human ASGR-2 in FACS binding assays at normalized antibody concentrations. For cell-based assays, HEK 293 cells expressing the appropriate antigen of interest were mixed with antibody sample or controls, incubated for 1 hour at 4° C., and then washed twice. Cells with bound antibody were then incubated with Alexa Fluor® 647 IgG Fc fragment-specific detection antibody and 7-AAD viability stain for 15 minutes at 4° C., washed once and resuspended in FACS buffer. Samples were analyzed using a BD Accuri™ Flow Cytometer and an Intellicyt HyperCyt Autosampler. As a negative control, supernatants and controls were also screened against HEK 293 cells transfected with empty parental vector. Analysis was done using irrelevant (non-ASGR-1 specific) IgG antibody supernatant sample signal; hybridoma supernatant samples showing at least two times the signal over irrelevant IgG antibody sample were considered to be exhibiting ASGR-1—species specific binding profiles. For membrane-prep binding assays, ASGR-1 species specific membrane preps were used to coat LumAvidin® microspheres (beads) and tested for binding to selected hybridoma supernatants or controls. Briefly, ASGR-1 species specific membrane preps were incubated with streptavidin-coated LumAvidin® beads for 45 minutes in the dark at room temperature and washed twice. Beads were resuspeneded in FACS buffer containing StabilGuard®. Antigen-bound beads were then incubated with normalized antibody sample for 1 hour in the dark at room temperature, washed twice, incubated with Alexa Fluor® 488 IgG Fc fragment-specific detection antibody for 15 minutes in the dark at room temperature, washed once and finally resuspended in FACS buffer. Samples were analyzed using an Intellicyt iQue™ Screener Platform. FACS buffer supplemented with 1 mM Calcium Chloride was used in all steps. As a negative control, supernatants and controls were also screened against a non-ASGR-1 antigen membrane prep coated on the LumAvidin® beads. Analysis was done using irrelevant (non-ASGR-1 specific) IgG antibody supernatant sample signal; hybridoma supernatant samples showing at least two times the signal over irrelevant IgG antibody sample were considered to be exhibiting specific binding profiles. See Table 7.1.

[0517] Human ASGR-1-specific, ligand competing hybridoma supernatant samples were screened for binding to the human hepatocellular carcinoma cell line HepG2 (ATCC HB-8065) at normalized antibody concentrations. For FACS binding assays, HepG2 cells were mixed with normalized antibody samples or controls, incubated for 1 hour at 4° C., and washed twice. Cells with bound antibody were then incubated with Alexa Fluor® 647 IgG Fc fragment-specific detection antibody and 7-AAD viability stain for 15 minutes at 4° C., washed once and resuspended in FACS buffer. Samples were analyzed using a BD Accuri™ Flow Cytometer and an Intellicyt HyperCyt Autosampler. For high content imaging binding assays, HepG2 cells were mixed with normalized antibody samples or controls, incubated for 1 hour at room temperature and washed twice. Cells with bound antibody were then incubated with Alexa Fluor® 488 IgG Fc fragment-specific detection antibody and Hoechst 33342 stain for 30 minutes at room temperature, washed twice and analyzed on the CellInsight™ system. Where tolerated by cell viability, FACS buffer supplemented with 1 mM Calcium Chloride was used in all steps. Analysis was done using irrelevant (non-ASGR-1 specific) IgG antibody supernatant sample signal; hybridoma supernatant samples showing two times or greater signal over irrelevant IgG antibody sample were considered to be exhibiting HepG2 ASGR-1 specific binding profiles. See Table 7.1.

TABLE 7.1
Summary of the binding specificities of the selected human ASGR-1 binding antibodies.

| | Binding Data Summary | | | | | | | |
|---|---|---|---|---|---|---|---|---|
| | Human | Cyno | Mouse | Rat | Dog | Pig | HEPG2 | Human |
| mAb | ASGR-1 | ASGR-1 | ASGR-1 | ASGR-1 | ASGR-1 | ASGR-1 | Cells | ASGR-2 |
| 25A4 | Y | Y | N | Y | N | Y | Y | N |
| 26C4 | Y | Y | N | Y | N | Y | Y | N |
| 29H8 | Y | Y | N | Y | N | Y | Y | N |
| 4A2 | Y | Y | N | Y | N | Y | Y | N |
| 4H6 | Y | Y | Y | Y | N | Y | Y | N |
| 56E5 | Y | Y | N | N | N | Y | Y | N |
| 7F4 | Y | Y | N | no | Y | Y | Y | Y |
| | | | | data | | | | |
| 7G4 | Y | Y | N | N | N | Y | Y | N |
| 48B12 | Y | Y | N | N | N | Y | Y | N |
| 184E7 | Y | Y | Y | Y | Y | Y | Y | N |
| 194A4 | Y | Y | N | Y | Y | Y | Y | N |
| 4B1 | Y | Y | Y | Y | Y | Y | Y | N |
| 72G9 | Y | Y | Y | Y | Y | Y | Y | N |
| 190F8 | Y | Y | N | N | Y | Y | Y | N |
| 191G1 | Y | Y | N | N | Y | Y | Y | N |
| 191G10 | Y | Y | N | N | Y | Y | Y | N |
| 194C1 | Y | Y | N | N | Y | Y | Y | N |
| 197G3 | Y | Y | N | N | Y | Y | Y | N |
| 198G3 | Y | Y | N | N | Y | Y | Y | N |
| 75G3 | Y | Y | N | N | Y | Y | Y | N |
| 218G4 | Y | Y | N | N | Y | Y | Y | N |
| 193E7 | Y | Y | N | N | Y | N | Y | N |
| 198D2 | Y | Y | N | Y | N | Y | Y | N |
| 202A3 | Y | Y | N | N | Y | Y | Y | N |
| 7E11 | Y | Y | N | N | N | Y | Y | N |
| 22G5 | Y | Y | N | N | N | N | Y | N |
| 5E5 | Y | Y | N | Y | N | N | Y | N |
| 54E9 | Y | Y | N | N | Y | N | Y | N |
| 6G7 | Y | Y | N | Y | N | N | Y | Y |
| 176H4 | Y | Y | N | N | Y | Y | Y | N |
| 194C10 | Y | Y | N | N | Y | Y | Y | N |
| 12D2 | Y | Y | Y | Y | Y | Y | Y | N |

B. Relative Binding Affinities for ASGR-Specific mAbs

[0518] To assess antibody and antigen interaction strength (relative binding affinity), ASGR-1 specific, ligand competing antibody hybridoma supernatants were tested in a limiting antigen binding assay. Titrated amounts of recombinant, soluble ASGR-1 biotinylated protein was incubated with streptavidin-coated LumAvidin Beads® for 45 minutes in the dark at room temperature and washed twice. Beads were resuspeneded in FACS buffer containing StabilGuard® and 0.05% Sodium Azide. Antigen-bound beads were then incubated with normalized hybridoma supernatant sample or controls for 18 hours in the dark at room temperature, washed twice, incubated with Alexa Fluor®488 IgG fragment-specific detection antibody for 15 minutes in the dark at room temperature, washed once and finally resuspended in FACS buffer. Samples were analyzed using an Intellicyt iQue™ Screener Platform. FACS buffer supplemented with 1 mM Calcium Chloride was used in all steps. Analysis was done using irrelevant (non-ASGR-1 specific) IgG antibody supernatant sample signal; hybridoma supernatant samples showing at least two times or greater signal over irrelevant IgG antibody sample were considered to be exhibiting ASGR-1 specific binding profiles. In this assay method, the antibody binding signal correlates with antibody affinity. Antibody binding data for a representative antigen coating concentration that fell in the linear range of the instrument signal detection is shown in Table 7.2. The degree of antibody binding to the target (ASGR-1) correlates with the measured fluorescent intensity and thus allows a relative comparison of affinities across the panel.

TABLE 7.2
Limited Antigen Binding Assay to Assess Relative Affinities of selected mAbs

| | Soluble | | Soluble | | Soluble | | Soluble |
|---|---|---|---|---|---|---|---|
| | ASGR-1 | | ASGR-1 | | ASGR-1 | | ASGR-1 |
| | 2.5 ng/mL | | 2.5 ng/mL | | 2.5 ng/mL | | 2.5 ng/mL |
| | (FACS | | (FACS | | (FACS | | (FACS |
| mAb | Geomean) | mAb | Geomean) | mAb | Geomean) | mAb | Geomean) |
| 25A4 | 17952 | 48B12 | 26989 | 194C1 | 16937 | 7E11 | 4662 |
| 26C4 | 12007 | 184E7 | 40198 | 197G3 | 17708 | 22G5 | 1078 |
| 29H8 | 12179 | 194A4 | 38934 | 198G3 | 25969 | 5E5 | 3278 |
| 4A2 | 16604 | 4B1 | 10060 | 75G3 | 35840 | 54E9 | 6487 |
| 4H6 | 2990 | 72G9 | 34014 | 218G4 | 15105 | 6G7 | 2290 |
| 56E5 | 22648 | 190F8 | 13899 | 193E7 | 18315 | 176H4 | 29444 |
| 7F4 | 4910 | 191G1 | 9546 | 198D2 | 1872 | 194C10 | 21854 |
| 7G4 | 6795 | 191G10 | 24154 | 202A3 | 2152 | 12D2 | 105 |

### C. pH and Calcium Sensitivity

[0519] This Example characterizes ASGR-1 antibodies based on the effect of pH and/or calcium on their ability to bind the target. For this example, a label-free, kinetic antibody-ASGR-1 binding assay was employed to assess the sensitivity of the antibodies to changes in pH and calcium. Briefly, the ASGR-1-specific, ligand-competing antibodies were first immobilized and then allowed to bind recombinant, soluble huASGR-1 under physiological conditions (ie. pH 7.4, 1 mM CaCl₂)). The amount of binding was determined and set to 100%. In order to determine if the antibody-ASGR-1 interaction was sensitive to changes in pH or Ca, the assay buffer was then changed to conditions lacking calcium, a reduced pH (pH 5.6) or both lacking calcium and reduced pH (pH 5.6), and dissociation of ASGR-1 from the mAbs monitored. The amount of ASGR-1 remaining bound under each condition was assessed and expressed as a percent of the starting signal. If a >10% difference in ASGR-1 binding signal was calculated (when compared to that measured under physiological conditions), a particular antibody was classified as being sensitive to that condition. Using this method, the selected antibodies were classified into 5 categories:
[0520] 1. affected by the removal of calcium
[0521] 2. unaffected by the removal of calcium or drop in pH
[0522] 3. affected when both calcium is removed and pH is dropped
[0523] 4. affected by calcium removal, pH drop and both combined
[0524] 5. affected by the drop in pH

[0525] The relative dissociation of ASGR-1 from antibodies was measured using a label-free assay on an OctetHTX instrument (ForteBio). Antibody samples were captured on anti-HuFc kinetic biosensors (ForteBio cat #18-5064) at 5 μg/mL in assay buffer (10 mM Tris, 0.1% Triton, 150 mM NaCl, 1 mg/mL BSA, 1 mM CaCl₂), pH7.4) for three minutes. A one minute baseline stabilization step was performed in assay buffer. Soluble ASGR-1 (Amgen) at 6 μg/ml in assay buffer was added and association to the antibodies was monitored for two minutes. Subsequent dissociation of ASGR-1 from the antibodies was performed by incubating the ASGR-1-mAb complexes for 10 minutes under each of the following conditions:

| | |
|---|---|
| pH 7.4 + calcium | 10 mM Tris, 0.1% Triton, 150 mM NaCl, |
| | 1 mg/mL BSA, pH7.4, 1 mM CaCl2 |
| pH 7.4 − calcium | 10 mM Tris, 0.1% Triton, 150 mM NaCl, |
| | 1 mg/mL BSA, pH7.4 |
| pH 5.6 + calcium | 10 mM Tris, 0.1% Triton, 150 mM NaCl, |
| | 1 mg/mL BSA, pH5.6, 1 mM CaCl2 |
| pH 5.6 − calcium | 10 mM Tris, 0.1% Triton, 150 mM NaCl, |
| | 1 mg/mL BSA, pH5.6 |

[0526] The binding signal at the end of the 2 minute association phase for each dissociation experiment was set to 100% and used to represent the maximal level of ASGR-1 binding. After 1 minute of dissociation, the percentage of ASGR-1 remaining bound was calculated. The lower the percent remaining at a given time point indicates increased levels of dissociation in response to the test conditions (ie. different pH and/or calcium concentrations). The change in the percentage of ASGR-1 remaining bound in response to each test condition relative to the percent remaining in the control conditions (ie. pH 7.4+calcium) was determined. Cut-offs for an antibody to be categorized as being sensitive to a particular condition were set to >10% (ie. if >10% of the ASGR-1 dissociates from the antibody under a particular test condition compared to control condition, it was deemed sensitive to that condition). The analysis was done using the 1 minute dissociation time point (except for mAb 149A1 which was binned based on the 4 minute dissociation time point). Using this analysis, the ASGR-1-binding, receptor-ligand blocking antibodies were separated into groups according to their dissociation profiles in response to pH and calcium (Table 7.3). Antibodies belonging to each category were observed.

TABLE 7.3
pH and Calcium Sensitivity of ASGR-1-mAb Interactions
pH and Calcium Sensitivity Determination
(% Change Compared to pH 7.4 + Calcium)

| | pH 7.4 | pH 5.6 | pH 5.6 | | | pH and | |
|---|---|---|---|---|---|---|---|
| | minus | plus | minus | Calcium | pH | calcium | pH |
| mAb | Calcium | Calcium | Calcium | sensitive | sensitive | sensitive | bin |
| 10G6 | 7% | 4% | 15% | N | N | Y | 3 |
| 148E10 | 7% | 19% | 33% | N | Y | Y | 5 |
| 154F4 | 10% | 41% | 67% | N | Y | Y | 5 |
| 159H8 | 6% | 10% | 26% | N | Y | Y | 5 |
| 160B12 | 6% | 8% | 22% | N | N | Y | 3 |
| 175D10 | 4% | −3% | 2% | N | N | N | 2 |
| 177D2 | 3% | 2% | 10% | N | N | Y | 3 |
| 25A4 | 2% | −3% | −1% | N | N | N | 2 |
| 26C4 | 3% | 2% | 2% | N | N | N | 2 |
| 27E7 | 20% | 35% | 46% | Y | Y | Y | 4 |
| 29E2 | 5% | 25% | 38% | N | Y | Y | 5 |
| 29H8 | 2% | −2% | 2% | N | N | N | 2 |
| 31D12 | 10% | 27% | 34% | Y | Y | Y | 4 |
| 32D6 | 26% | 33% | 55% | Y | Y | Y | 4 |
| 45B4 | 4% | 10% | 23% | N | Y | Y | 5 |
| 49F10 | 4% | −2% | 8% | N | N | N | 2 |
| 4A2 | 1% | −3% | 1% | N | N | N | 2 |
| 4B3 | 12% | 33% | 45% | Y | Y | Y | 4 |
| 4H6 | 5% | −1% | 2% | N | N | N | 2 |
| 50D4 | 6% | 0% | 9% | N | N | N | 2 |
| 50G9 | 37% | 62% | 44% | Y | Y | Y | 4 |
| 51E9 | 3% | −5% | 2% | N | N | N | 2 |
| 52G11 | 15% | 1% | 13% | Y | N | Y | 1 |
| 52H1 | 5% | −1% | 10% | N | N | N | 2 |
| 53F2 | 15% | 1% | 13% | Y | N | Y | 1 |
| 53F7 | 9% | 3% | 13% | N | N | Y | 3 |
| 55B1 | 5% | −2% | 4% | N | N | N | 2 |
| 56E5 | 1% | −6% | −1% | N | N | N | 2 |
| 57A7 | 13% | 13% | 29% | Y | Y | Y | 4 |
| 58G11 | 38% | 12% | 51% | Y | Y | Y | 4 |
| 59F2 | 48% | 52% | 74% | Y | Y | Y | 4 |
| 5E5 | 7% | 18% | 42% | N | Y | Y | 5 |
| 60D2 | 20% | 42% | 49% | Y | Y | Y | 4 |
| 60E8 | 3% | 11% | 18% | N | Y | Y | 5 |
| 63A10 | 8% | 3% | 47% | N | N | Y | 3 |
| 63G7 | 20% | 15% | 59% | Y | Y | Y | 4 |
| 64B12 | 6% | 6% | 7% | N | N | N | 2 |
| 65F10 | 25% | 18% | 37% | Y | Y | Y | 4 |
| 68G6 | 22% | 39% | 47% | Y | Y | Y | 4 |
| 6D9 | 14% | 25% | 42% | Y | Y | Y | 4 |
| 6G6 | 1% | −3% | 0% | N | N | N | 2 |
| 70D1 | 17% | 12% | 29% | Y | Y | Y | 4 |
| 7E11 | 9% | 5% | 14% | N | N | Y | 3 |
| 7F4 | 4% | 6% | 9% | N | N | N | 2 |
| 7G4 | 2% | 1% | 7% | N | N | N | 2 |
| 9G9 | 25% | 38% | 55% | Y | Y | Y | 4 |
| 65E9 | 22% | 30% | 35% | Y | Y | Y | 4 |
| 72B4 | 32% | 26% | 43% | Y | Y | Y | 4 |
| 147D10 | 13% | 4% | 11% | Y | N | Y | 1 |
| 149D11 | 11% | 3% | 11% | Y | N | Y | 1 |
| 149F8 | 1% | −8% | −1% | N | N | N | 2 |
| 22G5 | 40% | 35% | No | Y | Y | No | 4* |
| | | | Data | | | Data | |
| 48B12 | 4% | −6% | 0% | N | N | N | 2 |
| 52H2 | 26% | 11% | 32% | Y | Y | Y | 4 |
| 6G7 | 8% | 4% | 16% | N | N | Y | 3 |
| 64G12 | 24% | 10% | 24% | Y | N | Y | 1 |
| 72F5 | 64% | 20% | 30% | Y | Y | Y | 4 |
| 147E9 | 5% | −4% | 20% | N | N | Y | 3 |
| 184E7 | 1% | −9% | −3% | N | N | N | 2 |
| 194A4 | −1% | −7% | −3% | N | N | N | 2 |
| 208A2 | −4% | −10% | −5% | N | N | N | 2 |
| 210G10 | −3% | −10% | −5% | N | N | N | 2 |
| 4B1 | 6% | −5% | −2% | N | N | N | 2 |
| 62H10 | 13% | −2% | 14% | Y | N | Y | 1 |
| 72G9 | 1% | −7% | −1% | N | N | N | 2 |
| 148H10 | 45% | 10% | 47% | Y | N | Y | 1 |
| 173C11 | 17% | 0% | 29% | Y | N | Y | 1 |
| 179C2 | 25% | 0% | 45% | Y | N | Y | 1 |
| 47C1 | 13% | −1% | 10% | Y | N | Y | 1 |
| 49C1 | 72% | 23% | 64% | Y | Y | Y | 4 |
| 60C12 | 14% | −3% | 12% | Y | N | Y | 1 |
| 60G2 | 36% | 7% | 31% | Y | N | Y | 1 |
| 65D5 | 34% | 7% | 61% | Y | N | Y | 1 |
| 66H11 | 81% | 36% | 52% | Y | Y | Y | 4 |
| 73G1 | 100% | 33% | 62% | Y | Y | Y | 4 |
| 51E3 | 65% | 16% | 42% | Y | Y | Y | 4 |
| 53E8 | 68% | 20% | 64% | Y | Y | Y | 4 |
| 54E9 | 79% | 24% | 75% | Y | Y | Y | 4 |
| 56E3 | 75% | 21% | 16% | Y | Y | Y | 4 |
| 190C11 | −1% | −6% | −6% | N | N | N | 2 |
| 190E6 | −1% | −12% | −6% | N | N | N | 2 |
| 190F12 | −1% | −6% | −6% | N | N | N | 2 |
| 190F8 | −1% | −5% | −5% | N | N | N | 2 |
| 190G11 | −2% | −8% | −5% | N | N | N | 2 |
| 190H9 | −1% | −6% | −7% | N | N | N | 2 |
| 191A10 | 0% | −5% | −5% | N | N | N | 2 |
| 191G1 | −10% | −15% | −11% | N | N | N | 2 |
| 191G10 | 0% | −5% | −5% | N | N | N | 2 |
| 191G12 | −2% | −5% | −6% | N | N | N | 2 |
| 192C10 | −1% | −6% | −6% | N | N | N | 2 |
| 192C8 | −9% | −14% | −14% | N | N | N | 2 |
| 192E4 | −2% | −9% | −8% | N | N | N | 2 |
| 192G6 | −1% | −6% | −6% | N | N | N | 2 |
| 192G8 | −1% | −5% | −6% | N | N | N | 2 |
| 192H10 | 0% | −5% | −4% | N | N | N | 2 |
| 193C7 | −1% | −8% | −8% | N | N | N | 2 |
| 194B7 | 1% | −4% | −4% | N | N | N | 2 |
| 194C1 | −7% | −12% | −8% | N | N | N | 2 |
| 196C7 | −8% | −12% | −12% | N | N | N | 2 |
| 197B6 | −1% | −8% | −7% | N | N | N | 2 |
| 197E11 | −1% | −5% | −4% | N | N | N | 2 |
| 197F2 | 0% | −6% | −6% | N | N | N | 2 |
| 197G3 | 2% | −3% | −3% | N | N | N | 2 |
| 198G3 | −1% | −4% | −4% | N | N | N | 2 |
| 213B3 | −1% | −7% | −3% | N | N | N | 2 |
| 219H1 | 2% | −3% | 1% | N | N | N | 2 |
| 74C8 | 1% | −7% | −3% | N | N | N | 2 |
| 74G6 | 1% | −9% | −4% | N | N | N | 2 |
| 75G3 | −1% | −1% | 2% | N | N | N | 2 |
| 74B2 | 8% | −9% | −5% | N | N | N | 2 |
| 74H7 | 1% | −2% | 1% | N | N | N | 2 |
| 85F7 | 2% | −2% | 2% | N | N | N | 2 |
| 198B9 | 3% | 2% | 11% | N | N | Y | 3 |
| 199A7 | 1% | 1% | 10% | N | N | Y | 3 |
| 218G4 | 1% | −4% | 0% | N | N | N | 2 |
| 146A8 | 2% | −9% | 25% | N | N | Y | 3 |
| 146B6 | 2% | −5% | 13% | N | N | Y | 3 |
| 149A1 | 2% | −7% | 9% | N | N | Y | 3* |
| 172B12 | −14% | −27% | −13% | N | N | N | 2 |
| 172C3 | −9% | −26% | 0% | N | N | N | 2 |
| 193E7 | −9% | −9% | −4% | N | N | N | 2 |
| 199E3 | −5% | −4% | −4% | N | N | N | 2 |
| 226F9 | 100% | 51% | 77% | Y | Y | Y | 4 |
| 227C1 | 100% | 54% | 73% | Y | Y | Y | 4 |
| 227F2 | 80% | 50% | 100% | Y | Y | Y | 4 |
| 65C12 | 13% | 0% | 23% | Y | N | Y | 1 |
| 176H4 | 2% | −4% | 26% | N | N | Y | 3 |
| 194C10 | 2% | 10% | 16% | N | Y | Y | 5 |
| 191E10 | −1% | −9% | −9% | N | N | N | 2 |
| 196F4 | −8% | −5% | −6% | N | N | N | 2 |
| 198D2 | −8% | −30% | −28% | N | N | N | 2 |
| 202A3 | −21% | −22% | −23% | N | N | N | 2 |
| 204G6 | −5% | −11% | −10% | N | N | N | 2 |
| 224G1 | 77% | 41% | 65% | Y | Y | Y | 4 |
| 52D10 | 21% | 3% | 45% | Y | N | Y | 1 |
| 64E2 | 48% | 29% | 49% | Y | Y | Y | 4 |

*No actual data; bin predicted on the totality of information regarding the antibody.

### D. Relative Epitope Binning/Profiling

[0527] A common way to characterize epitopes is through competition experiments. Antibodies that compete with each other can be thought of as binding the same or overlapping site on the target. This example describes a method of determining competition for binding to hASGR-1 and the results of the method when applied to a number of antibodies described herein.

[0528] Binning experiments can be conducted in a number of ways, and the method employed may have an effect on the assay results. Common to these methods is that ASGR-1 is typically bound by one reference antibody and probed by another. If the reference antibody prevents the binding of the probe antibody then the antibodies are said to be in the same bin. The order in which the antibodies are employed is important. If antibody A is employed as the reference antibody and blocks the binding of antibody B the converse is not always true: antibody B used as the reference antibody will not necessarily block antibody A. There are a number of factors in play here: the binding of an antibody can cause conformational changes in the target which prevent the binding of the second antibody, or epitopes which overlap but do not completely occlude each other may allow for the second antibody to still have enough high-affinity interactions with the target to allow binding. In general, if competition is observed in either order the antibodies are said to bin together, and if both antibodies can block each other then it is likely that the epitopes overlap more completely.

[0529] For this example, a modified antibody-antibody competition assay was used to determine the relative epitope binning profiles of the ASGR-1 specific, ligand blocking antibodies in a high throughput manner. Briefly, individual antibodies were tested for their ability to compete for binding with a panel of reference antibodies chosen based on their different binding characterstics (eg. species cross reactivity, HEPG2 binding, etc.) and primary sequences. The pattern of competition/binding of each test antibody with the reference antibody panel was then determined and compared to those produced from the other test antibodies. The degree of correlation between the individual test antibody competition/binding profiles was then compared. Antibodies that showed similar competition/binding profiles were binned (grouped) together (eg. Binning Profile A, B, etc.).

[0530] Biotinylated recombinant soluble human ASGR-1 protein was coupled to streptavidin coated, uniquely barcoded LumAvidin Beads® (LumAvidin Microspheres, Cat #:L101-LXXX-01; Luminex Corp., Austin, Texas, U.S.A.) for 45 minutes in the dark at room temperature and washed twice. The reference antibody hybridoma supernatant samples were incubated with the antigen-coated beads for 1 hour in the dark at room temperature and washed three times. Beads were resuspended in FACS buffer containing StabilGuard®. The antigen-coated, reference antibody-bound beads were pooled and then divided into individual sample wells containing a normalized (2.5 ug/ml) test antibody (hybridoma supernatant) sample (or negative control), incubated for 1 hour in the dark at room temperature and washed twice. The samples were then incubated with Alexa Fluor® 488 IgG fragment-specific detection antibody for 15 minutes in the dark at room temperature, washed once and resuspended in FACS buffer. FACS buffer supplemented with 1 mM Calcium Chloride was used in all steps. Samples were analyzed using an Intellicyt iQue™ Screener Platform.

[0531] To determine the antibody competition/binding profiles of the individual test antibodies, the reference-only antibody binding signal was subtracted from the reference plus test antibody signal for each competition/binding reaction (ie. across the entire reference antibody set). An individual antibody binding profile was defined as the collection of net binding values for each competition/binding reaction. The degree of similarity between individual profiles was then assessed by calculating the coefficient of determination between each of the test antibody profiles. Test antibodies showing high degrees of similarity (R²≥0.8) to each other were then grouped into common binning profiles. Separate binning profiles were only defined if there were two or more samples with a high degree of correlation. If individual unique antibody binning profiles were observed (ie. they displayed a low degree of similarity to other test antibody binding profiles), the bin was classified as unknown. Using this method, the ASGR-1-binding, receptor-ligand blocking antibodies were sub-divided into 14 unique binning profiles (A, B, C, D, E, L, M, N, O, P, Q, R, T and unknown) (Table 7.4). Antibodies that displayed a unique binning profile (as defined above) but shared a relatively high degree of similarity to another profile (R²=0.6-0.8) were categorized as a sub-bin (ie. A.1, A.2, etc.) of that profile.

TABLE 7.4
Relative Epitope Binning/Profiling of ASGR-1
Specific Receptor-Ligand Blocking mAbs

| | Epitope | | Epitope | | Epitope | | Epitope |
|---|---|---|---|---|---|---|---|
| mAb | BIN | mAb | BIN | mAb | BIN | mAb | BIN |
| 10G6 | A | 52H1 | A | 9C11 | A.3 | 60G2 | E |
| 11E2 | A | 53F2 | A | 12B12 | B | 65D5 | E |
| 11F5 | A | 53F7 | A | 147D10 | B | 66H11 | E |
| 12E9 | A | 55B1 | A | 149D11 | B | 71A6 | E |
| 12F11 | A | 56E5 | A | 149F8 | B | 73G1 | E |
| 12F12 | A | 57A7 | A | 151B9 | B | 49C5 | E.1 |
| 13F6 | A | 58G11 | A | 175F4 | B | 49D10 | E.1 |
| 148E10 | A | 59F2 | A | 22G5 | B | 51E3 | E.1 |
| 154F4 | A | 5E5 | A | 48B12 | B | 51F4 | E.1 |
| 159H8 | A | 60D2 | A | 52H2 | B | 53E8 | E.1 |
| 160B12 | A | 60E8 | A | 6G7 | B | 54E9 | E.1 |
| 175D10 | A | 63A10 | A | 7G2 | B | 56E3 | E.1 |
| 177D2 | A | 63G7 | A | 64G12 | B.1 | 56G1 | E.1 |
| 25A4 | A | 64B12 | A | 72F5 | B.1 | 190C11 | L |
| 25D12 | A | 65F10 | A | 147E9 | C | 190E6 | L |
| 26C4 | A | 68G6 | A | 184E7 | C | 190F12 | L |
| 27E7 | A | 6A6 | A | 194A4 | C | 190F8 | L |
| 28H2 | A | 6D4 | A | 208A2 | C | 190G11 | L |
| 29E2 | A | 6D9 | A | 210G10 | C | 190H9 | L |
| 29E6 | A | 6G6 | A | 4B1 | C | 191A10 | L |
| 29H8 | A | 70D1 | A | 60E12 | C | 191G1 | L |
| 31D12 | A | 7A10 | A | 61A1 | C | 191G10 | L |
| 32D6 | A | 7C3 | A | 62H10 | C | 191G12 | L |
| 3G7 | A | 7E11 | A | 63H8 | C | 192C10 | L |
| 45B4 | A | 7F4 | A | 72G9 | C | 192C8 | L |
| 49F10 | A | 7F8 | A | 8D8 | D.1 | 192E4 | L |
| 4A2 | A | 7G4 | A | 12D2 | E | 192G6 | L |
| 4B3 | A | 8D12 | A | 148H10 | E | 192G8 | L |
| 4H6 | A | 9F12 | A | 173C11 | E | 192H10 | L |
| 50D4 | A | 9G9 | A | 179C2 | E | 193C7 | L |
| 50G9 | A | 65E9 | A.1 | 47C1 | E | 194B7 | L |
| 51E9 | A | 72B4 | A.1 | 49C1 | E | 194C1 | L |
| 52G11 | A | 7H7 | A.2 | 60C12 | E | 196C7 | L |
| 197B6 | L | 197F2 | L | 198G3 | L | 219H1 | L |
| 197E11 | L | 197G3 | L | 213B3 | L | 74C8 | L |
| 74G6 | L | 74H7 | M.1 | 218G4 | O | 172B12 | Q |
| 75G3 | M | 85F7 | M.1 | 146A8 | P | 172C3 | Q |
| 89A11 | M | 198B9 | N | 146B6 | P | 193E7 | Q |
| 74B2 | M.1 | 199A7 | N | 149A1 | P | 199E3 | Q |
| 226F9 | Q | 227F2 | Q | 176H4 | R | | |
| 227C1 | Q | 65C12 | Q | 194C10 | T | | |

### E. Epitope Mapping—Arginine/Glutamic Acid Mutational Profiling

[0532] This Example characterizes ASGR-1 antibodies based on the effect of mutagenesis of ASGR-1 on their ability to bind the target. Previous data indicated that the ASGR-1 CBD is primarily responsible for antibody binding for the panel of antibodies. As such, only the ASGR-1 CBD was considered structurally in the context of the full length ASGR-1 in the design of mutation sites.

[0533] Arginine/Glutamic acid mutational mapping was used to characterize epitopes bound by human ASGR-1-specific, ligand blocking antibodies. Briefly, 144 individual point mutations were made across the CBD domain of human ASGR-1 protein (SEQ ID NO:5) starting at position 148. Ninety-one constructs, representing surface residues (modelled using the ASGR-1 crystal structure in the PyMOL Molecular Graphics System (Version 1.8; Schrödinger, LLC.)) and therefore potentially accessible for antibody binding, were selected for these assays. Mutant hASGR-1 variants were constructed such that non-arginine residues were changed to arginine and where wild type arginine residues were mutated to glutamic acid. Each mutant hASGR-1 sequence was then cloned into a mammalian expression vector and used to transiently transfect CHOs cells. The ability of human ASGR-1-specific, ligand competing antibodies to bind to the mutant hASGR-1 proteins was assessed by FACS as described above.

[0534] Antibodies were tested for binding to the individual mutant and wild type ASGR-1 constructs using normalized antibody concentrations (5 ug/ml). CHO—S cells transiently expressing the appropriate mutated or non-mutated antigen of interest were mixed with antibody sample or controls, incubated for 1 hour at 4° C., and then washed twice. Cells with bound antibody were then incubated with Alexa Fluor® 647 IgG Fc fragment-specific detection antibody and 7-AAD viability stain for 15 minutes at 4° C., washed once and resuspended in FACS buffer. Samples were analyzed using a BD Accuri™ Flow Cytometer and an Intellicyt HyperCyt Autosampler. As a negative control, supernatants and controls were also screened against CHO—S cells transfected with empty parental vector (referred to as mock). In order to exclude mutants that were poorly expressed or produced mis-folded antigen, only constructs that yielded a binding data average of at least 25% or greater compared to the average binding observed on wildtype hASGR-1 was used for further analysis. Because mutant hASGR-1 expression levels varied relative to each other, sample binding data for each construct was normalized for expression by dividing the binding data from an antibody not affected by the mutations (e.g., 65C12) by the binding values of each test antibody on a given mutant construct. Also, because the antibody binding affinities varied amongst the samples, the expression corrected data (above) was further normalized by comparing test antibody binding on each mutant construct to wild type hASGR-1. Identification of specific mutations that affected test antibody binding was performed by an interquartile range (IQR) analysis to determine statistical outliers. A mutation was identified as a “hit” if the calculated values were ≥3× the IQR (above the 3^{rd} quartile/upper fence) for a given mutant construct. Although IQR analysis was used here to determine signifance and identify hits, one skilled in the art will recognize that a number of methods could be employed in order to normalize the data (eg. using epitope-tagged constructs or other ASGR-1-binding antibodies directed against non-CBD epitopes). Any statistically significant reduction in antibody binding signal to a mutant construct (compared to that determined for binding to wild type ASGR-1) determined by these methods could be used for hit identification.

[0535] For illustrative purposes, Table 7.5 shows the IQR analysis with a single mutant construct (i.e., H203).

TABLE 7.5
IQR analysis (representative data for construct H203)

| | | | | | Antibody Binding | | | |
|---|---|---|---|---|---|---|---|---|
| | | | Expression | | Normalization | | | |
| | FACS Binding | | Normalization | | to wt ASGR1 | | >Q3 + 3xIQR | |
| | Geomean | | to mAb 65C12 | | Binding | | Gating | |
| | wt | | wt | | wt | | wt | |
| mAb | ASGR1 | H203 | ASGR1 | H203 | ASGR1 | H203 | ASGR1 | H203 |
| 4A2 | 41104 | 18946 | 1.3644 | 1.3597 | 1.0000 | 0.9966 | 1.0000 | 0.9966 |
| 7E11 | 45453 | 14714 | 1.2338 | 1.7509 | 1.0000 | 1.4191 | 1.0000 | 1.4191 |
| 56E5 | 42617 | 20345 | 1.3159 | 1.2662 | 1.0000 | 0.9622 | 1.0000 | 0.9622 |
| 7G4 | 48526 | 18542 | 1.1557 | 1.3893 | 1.0000 | 1.2022 | 1.0000 | 1.2022 |
| 53F7 | 43474 | 18081 | 1.2900 | 1.4248 | 1.0000 | 1.1045 | 1.0000 | 1.1045 |
| 10G6 | 43059 | 18213 | 1.3024 | 1.4145 | 1.0000 | 1.0860 | 1.0000 | 1.0860 |
| 26C4 | 45991 | 13484 | 1.2194 | 1.9105 | 1.0000 | 1.5668 | 1.0000 | 1.5668 |
| 6G6 | 47628 | 20505 | 1.1775 | 1.2564 | 1.0000 | 1.0670 | 1.0000 | 1.0670 |
| 29H8 | 40927 | 13217 | 1.3702 | 1.9491 | 1.0000 | 1.4225 | 1.0000 | 1.4225 |
| 25A4 | 55579 | 20036 | 1.0090 | 1.2858 | 1.0000 | 1.2743 | 1.0000 | 1.2743 |
| 32D6 | 36128 | 13465 | 1.5522 | 1.9132 | 1.0000 | 1.2325 | 1.0000 | 1.2325 |
| 198D2 | 16882 | 7138 | 3.3219 | 3.6090 | 1.0000 | 1.0864 | 1.0000 | 1.0864 |
| 4B3 | 35561 | 1696 | 1.5770 | 15.1900 | 1.0000 | 9.6323 | 1.0000 | 9.6323 |
| 50G9 | 37326 | 1506 | 1.5024 | 17.1095 | 1.0000 | 11.3879 | 1.0000 | 11.3879 |
| 60D2 | 29631 | 1368 | 1.8926 | 18.8256 | 1.0000 | 9.9467 | 1.0000 | 9.9467 |
| 59F2 | 27915 | 1346 | 2.0089 | 19.1372 | 1.0000 | 9.5260 | 1.0000 | 9.5260 |
| 60E8 | 38653 | 1518 | 1.4509 | 16.9692 | 1.0000 | 11.6960 | 1.0000 | 11.6960 |
| 65E9 | 29613 | 1471 | 1.8938 | 17.5097 | 1.0000 | 9.2460 | 1.0000 | 9.2460 |
| 5E5 | 40651 | 12616 | 1.3796 | 2.0420 | 1.0000 | 1.4802 | 1.0000 | 1.4802 |
| 29E2 | 25781 | 15058 | 2.1752 | 1.7108 | 1.0000 | 0.7865 | 1.0000 | 0.7865 |
| 45B4 | 30350 | 14012 | 1.8478 | 1.8385 | 1.0000 | 0.9950 | 1.0000 | 0.9950 |
| 6G7 | 38643 | 15089 | 1.4512 | 1.7073 | 1.0000 | 1.1764 | 1.0000 | 1.1764 |
| 72F5 | 27993 | 10499 | 2.0034 | 2.4537 | 1.0000 | 1.2248 | 1.0000 | 1.2248 |
| 22G5 | 45048 | 15060 | 1.2449 | 1.7105 | 1.0000 | 1.3740 | 1.0000 | 1.3740 |
| 48B12 | 52493 | 20467 | 1.0683 | 1.2587 | 1.0000 | 1.1782 | 1.0000 | 1.1782 |
| 151B9 | 23527 | 9738 | 2.3837 | 2.6454 | 1.0000 | 1.1098 | 1.0000 | 1.1098 |
| 52H2 | 47957 | 18609 | 1.1694 | 1.3843 | 1.0000 | 1.1838 | 1.0000 | 1.1838 |
| 149D11 | 23601 | 8866 | 2.3761 | 2.9055 | 1.0000 | 1.2228 | 1.0000 | 1.2228 |
| 175F4 | 33619 | 14804 | 1.6681 | 1.7401 | 1.0000 | 1.0432 | 1.0000 | 1.0432 |
| 147E9 | 40166 | 21513 | 1.3962 | 1.1975 | 1.0000 | 0.8577 | 1.0000 | 0.8577 |
| 61A1 | 39965 | 20142 | 1.4032 | 1.2790 | 1.0000 | 0.9115 | 1.0000 | 0.9115 |
| 184E7 | 42704 | 18354 | 1.3132 | 1.4036 | 1.0000 | 1.0688 | 1.0000 | 1.0688 |
| 72G9 | 36507 | 18778 | 1.5361 | 1.3719 | 1.0000 | 0.8931 | 1.0000 | 0.8931 |
| 194A4 | 16291 | 12149 | 3.4424 | 2.1204 | 1.0000 | 0.6160 | 1.0000 | 0.6160 |
| 60C12 | 31286 | 19812 | 1.7925 | 1.3003 | 1.0000 | 0.7254 | 1.0000 | 0.7254 |
| 173C11 | 28526 | 13861 | 1.9659 | 1.8586 | 1.0000 | 0.9454 | 1.0000 | 0.9454 |
| 56E3 | 33876 | 20425 | 1.6555 | 1.2613 | 1.0000 | 0.7619 | 1.0000 | 0.7619 |
| 54E9 | 38589 | 15344 | 1.4533 | 1.6789 | 1.0000 | 1.1552 | 1.0000 | 1.1552 |
| 65D5 | 41007 | 20291 | 1.3676 | 1.2696 | 1.0000 | 0.9283 | 1.0000 | 0.9283 |
| 190F8 | 36503 | 15073 | 1.5363 | 1.7091 | 1.0000 | 1.1125 | 1.0000 | 1.1125 |
| 198G3 | 21467 | 13143 | 2.6124 | 1.9600 | 1.0000 | 0.7503 | 1.0000 | 0.7503 |
| 191G10 | 33829 | 17045 | 1.6578 | 1.5114 | 1.0000 | 0.9117 | 1.0000 | 0.9117 |
| 202A3 | 24848 | 12497 | 2.2570 | 2.0614 | 1.0000 | 0.9134 | 1.0000 | 0.9134 |
| 194C1 | 20860 | 11044 | 2.6884 | 2.3325 | 1.0000 | 0.8676 | 1.0000 | 0.8676 |
| 176H4 | 33506 | 10237 | 1.6737 | 2.5166 | 1.0000 | 1.5036 | 1.0000 | 1.5036 |
| 197G3 | 13308 | 3503 | 4.2141 | 7.3547 | 1.0000 | 1.7453 | 1.0000 | 1.7453 |
| 191G1 | 25298 | 10876 | 2.2168 | 2.3687 | 1.0000 | 1.0685 | 1.0000 | 1.0685 |
| 213B3 | 15070 | 12846 | 3.7212 | 2.0054 | 1.0000 | 0.5389 | 1.0000 | 0.5389 |
| 218G4 | 12212 | 7933 | 4.5923 | 3.2472 | 1.0000 | 0.7071 | 1.0000 | 0.7071 |
| 75G3 | 37223 | 14472 | 1.5066 | 1.7801 | 1.0000 | 1.1815 | 1.0000 | 1.1815 |
| 194C10 | 28138 | 13217 | 1.9930 | 1.9491 | 1.0000 | 0.9780 | 1.0000 | 0.9780 |
| 85F7 | 32968 | 16509 | 1.7010 | 1.5605 | 1.0000 | 0.9174 | 1.0000 | 0.9174 |
| 199A7 | 17005 | 9455 | 3.2978 | 2.7247 | 1.0000 | 0.8262 | 1.0000 | 0.8262 |
| 146B6 | 24138 | 14412 | 2.3233 | 1.7875 | 1.0000 | 0.7694 | 1.0000 | 0.7694 |
| 193E7 | 35508 | 13783 | 1.5794 | 1.8691 | 1.0000 | 1.1835 | 1.0000 | 1.1835 |
| 65C12 | 56080 | 25761 | 1.0000 | 1.0000 | 1.0000 | 1.0000 | 1.0000 | 1.0000 |

[0536] The bolded, underlined, and italicized values for antibodies 4B3, 50G9, 60D2, 59F2, 60E8, and 65E9 in Table 7.5 represent the statistically significant hits (i.e., >3× the IQR) whose binding was affected by mutations H203.

[0537] A summary of the hASGR-1 residues important for binding of the representative antibodies is shown in (FIG. 60, labeled as Table 7.6 in the figure). In addition, this analysis revealed that the mutation of some ASGR-1 residues had more dramatic effects on a given antibody binding than others. This likely reflects the relative contribution or importance that these residues have in mediating interactions with specific test antibodies. The degree by which each mutation impacted the ability of a test antibody to bind was determined by calculating the magnitude of an individual binding data point above the upper gate determined by each IQR analysis. The relative impact of each mutation on the binding of a given test antibody was then ranked using this method and displayed as a heatmap in FIG. 60. Dark grey shading indicates the data point deviated dramatically from the upper gate (ie. a large effect on antibody binding), while light grey/white shading indicates the data point was very close to the cut offs (ie. 3× the IQR) (FIG. 60). When aligned with the relative epitope profiling bin assignments (Example 7D above), this analysis reveals a set of core ASGR-1 amino acid positions that, when mutated, disrupt test antibody binding. As such, these positions are likely part of the ASGR-1 epitopes bound by the selected antibodies. These amino acid residues either directly contact or are involved in the interaction with the antibody, or are in close enough proximity that, when mutated, interfere with antibody binding. Amino acid positions identified as statistically significant hits, but barely made the cut offs, and map to surface ASGR-1 locations distinct from the main epitope bins (FIG. 47) may represent residues that, when mutated, disrupt the conformation of ASGR-1 such that an antibody that binds to a distinct epitope is affected (ie. an indirect effect). mAb 197G3 is an example of an antibody displaying a range of binding sensitivities in this assay, yet the most important residues (R274 and R271) can be identified by rank ordering them as described.

[0538] In order to compare the mutational hit patterns of the individual test antibodies with each other, the coefficient of determination between the test antibodies was determined. The expression and antibody binding normalized data set was used to generate binding profiles for each test antibody across the mutant panel. The resulting profiles for each individual test antibody were then compared for their degree of similarity to all of the other test antibodies. The coefficient of determination (R²) for each combination was determined and converted into a heat map in order to visualize the resulting patterns (FIG. 46). For simplicity, a representative antibody from each unique mutational profile (Reference Antibody) is shown in FIG. 46. This analysis revealed 7 predominant hit patterns or mutational clusters. Test antibodies affected by the 7 predominant mutational clusters correspond to those from competition/binding binning profiles A, B, C, E and L (3 distinct hit/mutational clusters of bin A antibodies and 1 distinct hit/mutational cluster of bin B, bin C, bin E and bin L antibodies). The remaining antibodies, categorized as displaying separate binning profiles (compared to bins A, B, C, E and L), are affected by distinct mutations in ASGR-1, but also include residues that partially overlap with test antibodies belonging to the predominant bins.

[0539] This data indicates the selected antibodies bind to epitopes that partially overlap with the 7 predominant epitope regions. The residues important for the binding of antibodies belonging to the 7 predominant epitope regions were then mapped onto a computer representation of the surface of the ASGR-1 structure using the PyMOL Molecular Graphics System (Version 1.8; Schrödinger, LLC.) (FIG. 47). A residue on the surface of ASGR-1 was considered part of the same epitope region if at least one antibody from a distinct binning profile (ie. A, B, C, E and L) was identified as being sensitive to mutation. For example, the predominant epitope region for antibodies belonging to binning profile C includes hASGR-1 residues P241, D242, D243, Y245, G251 and E253 (SEQ ID NO:5). The binding of antibody 147E9 is affected by mutation of all of these residues, while antibody 184E7 is only disrupted by mutation of P241, D243 and E253. Thus, the predominant epitope region of ASGR-1 bound by antibodies belonging to binning profile C is defined as including one or more of (but not limited to) P241, D242, D243, Y245, G251 and E253 (SEQ ID NO:5). Also, note that the antibody 194A4 was classified as belonging to Bin C as determined in Example 7D, however, the results of this arginine/glutamic acid mutational profiling (as well as the results from crystal structure analysis of the ASGR-1 CBD/194A4 complex described in Example 10H) suggests that the relative epitope profiling may have been inaccurate.

[0540] Antibodies belonging to binning profile A were further sub-divided into 3 distinct mutational clusters. These clusters mapped to ASGR-1 surface positions that overlap with, or are in extremely close physical proximity to, each other consistent with a common binning profile. Antibodies that displayed binning profiles distinct from the 5 major bins (i.e., A, B, C, E and L) also showed distinct patterns of mutations that affected their binding (FIG. 46). Some binning profiles (R, O, M, M.1 and T) share significant overlap with antibodies from binning profile L, and can be considered sub-bins of this profile. Taken together, this data indicates that antibodies capable of blocking ASGR-1-ligand interactions bind to 5 major epitope regions. In addition, blocking antibodies were identified that bind to partially overlapping epitopes of these major regions.

### Example 8: ASGR Internalization Assay

[0541] To determine whether the antibodies bind and also prevent internalization of ASGR-1 into cells expressing ASGR-1, an in vitro internalization assay is performed of various antibody samples.

### Human ASGR-1 Internalization Cellular Imaging Assay Protocol

### Reagents:

[0542] U2OS (Human Osteosarcoma) cell line
[0543] McCoy's 5A Medium: Gibco, #16600-082
[0544] MEM NEAA (100×): Gibco, #11140-050
[0545] Penicillin-Streptomycin (10,000 U/ml, 100×) Gibco, #15140-122
[0546] L-Glutamine (100×): Gibco, #25030-081
[0547] Fetal Bovine Serum: Gibco, #16000-044
[0548] DPBS (without Ca and Mg): Gibco, #14190-136
[0549] DPBS (with Ca and Mg): Gibco, #14040-133
[0550] Cell Dissociation Buffer: Gibco, #13151-014
[0551] 1 Liter Filter: Corning, #430517
[0552] Hepes Buffer (1M): Gibco, #15630-080
[0553] BacMam Virus—huASGR-1: GS: SNAP26f
[0554] β-GalNAc-PAA-Biotin: GlycoTech, #01-011
[0555] SNAP-Surface Alexa Fluor 546: New England Biolabs, #S9132S
[0556] Streptavidin-Alexa Fluor 633: Life Technologies, #521375
[0557] Hoechst 33342: Invitrogen, #H3570
[0558] Pitstop2: abeam Biochemical, #ab120687
[0559] Pitstop2—negative control: abeam Biochemical, #ab120688
[0560] Paraformaldehyde (8% Aqueous Solution): Electron Microscopy Sciences, #157-8-100
[0561] Imaging plate—96 well Optical Bottom: Thermo Scientific Nunc, #165305
[0562] Operetta High Content Imager: Perkin Elmer
   U2OS complete growth medium:
[0563] McCoy's 5A with 10% FBS, 1× MEM NEAA, 1× L-Glutamine, and 1× Penicillin-Streptomycin Medium was filtered before use on cells
   U2OS cell plating and culturing:

[0564] U2OS cells were grown to 75-85% confluence in T175 before plating into a 96 well plate.
[0565] 1. The U2OS culture medium was aspirated off the cells in the T175 flask
[0566] 2. Cells were washed with 10 mls of DPBS and aspirated off
[0567] 3. 3 mls of Cell Dissociation Buffer was added to the cells and incubated for 5 minutes inside a cell incubator (37° C., 5% CO2) to detach the cells from the T175 flask.
[0568] 4. The detached cells were diluted with 7 mls of the growth medium
[0569] 5. 1 ml of cells were used to count the number of cells available to plate
[0570] 6. The cells were diluted in growth medium to give a final concentration of 28,000 cells/well and BacMam virus (huASGR-1: GS: SNAP26f) was also added to the cells at this time with the desired concentration (MOI).
[0571] 7. The cells were mixed together with the BacMam virus for 1-2 minutes and then plated on the 96 well imaging plate at a volume of 100 ul/well.
[0572] 8. The plate was placed inside an incubator (37° C., 5% CO2) for 16-20 hours before treatment.

[0573] Treatment of Cells (16-20 hours incubation)
[0574] 1. The next day, the medium on the 96 well plate was dumped out and washed once with DPBS.
[0575] 2. McCoy's 5A Medium plus 10 mM of Hepes buffer (assay buffer) was added to the cells (100 ul) for 1 hour inside the incubator.
[0576] 3. After the 1 hour incubation, the medium was dumped out and washed once with DPBS containing Ca and Mg.
[0577] 4. Pitstop2 and Pitstop2 negative control were prepared in assay buffer at 20 uM.
[0578] 5. Volume of 100 ul per well of the inhibitors were added to the U2OS cells for 15 minutes inside the incubator.
[0579] 6. GalNAc-biotin (100 nM) and streptavidin-Alexa633 (100 nM) were pre-mixed in assay buffer and incubated for 10 minutes at room temperature.
[0580] 7. SNAP-Surface Alexa Fluor 546 (2.5 uM) was prepared in assay buffer.
[0581] 8. After the 15 minutes incubation, both GalNAc-biotin-streptavidin-Alexa633 and SNAP-Surface Alexa Fluor 546 were directly added (10 ul) to the medium containing Pitstop2 inhibitors for 30 minutes inside the incubator.
[0582] 9. After the 30 minutes incubation, medium was dumped out and the cells were washed once with DPBS.
[0583] 10. The cells were fixed by adding 50 ul of 4% Paraformaldehyde (8% paraformaldehyde was diluted with DPBS) containing Hoechst dye (1:5000 dilution) to the cells for 10 minutes at room temperature.
[0584] 11. After 10 minutes incubation, the cells were washed twice with DPBS and 100 ul of DPBS was added to each well.
[0585] 12. The plate was imaged on the Operetta instrument with three channels measuring the different fluorescence dyes.
[0586] 1) Hoechst was measured using filters in the range of excitation: 360-400 nm and emission: 410-480 nm
[0587] 2) GalNAc-biotin-streptavidin-Alexa633 was measured using filters in the range of excitation: 600-630 nm and emission: 640-680 nm
[0588] 3) SNAP-Surface Alexa Fluor 546 was measured using filters in the range of excitation: 520-550 nm and emission: 560-630
[0589] 13. Harmony 3.5 software (Perkin Elmer) was used to identify and quantify internalized spots for fluorescence dyes added in the assay.

[0590] This internalization assay can be performed to assay the antigen binding proteins of the invention to determine how much they reduce or inhibit internalization of ASGR, ASGR-1, and/or ASGR-2.

### Example 9: Additional Ligand Blocking Assays

### Preparation of Desialylated Protein Ligands (Asialofetuin and Orosomucoid)

### A. Asialofetuin

[0591] Bovine fetuin (AHSG) was obtained commercially (Sigma) and purified using a CaptoQ Impres (GE Healthcare Life Sciences) matrix. Briefly, the material was loaded in 25 mM TRIS pH 7.9 at up to 17 mg/ml resin, resolved in 20 mM BisTRIS (pH6.5) with a gradient of sodium chloride. The main peak was gradient pooled (˜0.15M NaCl final) and resolved on a SuperDex200 SEC (GE Healthcare Life Sciences) in Hepes-buffered saline (pH 7.9). The purified AHSG was then concentrated and incubated with Innolink Biotin 354S (EMD Millipore) according to the manufacturer's instructions. The biotinylated protein was then desalted by gel filtration and concentrated once again.

[0592] The purified, biotinylated protein was subsequently desialyalated by incubation with C. perfringens neuraminidase (Sigma; 1 unit/10 mg protein for 12 hours at 37° C. in 50 mM sodium phosphate, 9 mM HEPES, 0.12M NaCl, pH6). The resulting material was harvested and digested for an additional 3 hours with A. ureafaciens neuraminidase (QAbio; 0.5 units/10 mg protein at 37° C.). The digested sample was diluted 3 fold with 20 mM HEPES containing 0.15M NaCl (pH 7.5) (HBS) to neutral pH and applied to a monomeric Avidin agarose (Pierce) HR16/10 column, run at 60 cm/hour. The loaded column was held for 15 minutes then washed with four column volumes of HBS. The biotinylated, desialyalated protein was finally eluted with three column volumes of HBS containing 2 mM Biotin plus an additional two column volumes of 0.1M Glycine-HCl (pH 2.8), which was immediately neutralized during collection with 50 mM TRIS Base). Protein-containing fractions from both types of elutions were identified, pooled, concentrated, dialyzed extensively against 10 mM HEPES, 0.14M NaCl (pH 7.5), re-concentrated and finally filtered sterilized. The purified lots were then analyzed by SDS-PAGE and mass spectrometry prior to use in the described assays.

### B. Orosomucoid

[0593] Bovine orosomucoid (AGP) was obtained commercially (Sigma) and purified over SuperDex200 resin equilibrated in HBS (pH7.9) by size exclusion chromatography. The front of the main AGP peak was combined from 3 individual runs to generate hyperglycosylated AGP, with the remainder of the main peaks (from the 3 combined runs) to generate hypoglycosylated AGP. For biotinylation, the purified AGP was concentrated to 5 mg/ml and incubated with Innolink Biotin 354S as described. The biotinylated protein was then desalted by gel filtration and concentrated.

[0594] After biotinylation, the protein was desialyalated by incubating it for 18 hours at 37° C. with one unit of C. perfringens neuraminidase (Sigma) per 10 mg protein in 50 mM sodium phosphate, 9 mM HEPES, 0.12M NaCl (pH6). The resulting material was harvested and digested for an additional 6 hours at 37° C. with 0.5 units A. ureafaciens neuraminidase (QAbio) per 10 mg protein. The sample was diluted 3 fold with HBS to achieve a neutral pH and applied to a monomeric Avidin agarose (Pierce) HR16/10 column, run at 60 cm/hour. The loaded column was held for 15 minutes and then washed with four column volumes of HBS. The biotinylated, desialyalated protein was subsequently eluted with three column volumes of HBS containing 2 mM Biotin, plus two column volumes 0.1M Glycine-HCl (pH 2.8), which was immediately neutralized during collection with 50 mM TRIS Base. Protein-containing fractions from both types of elutions were identified, pooled, concentrated, dialyzed extensively against 10 mM HEPES, 0.14M NaCl (pH 7.5), re-concentrated and finally filtered sterilized. The purified lots were then analyzed by SDS-PAGE and mass spectrometry prior to use in the described assays.

[0595] These ligands can be used in additional ligand binding assays to determine antigen binding protein inhibition of ligand binding to ASGR, ASGR-1 and/or ASGR-2.

### Example 10: Crystal Structure Analysis of Interaction Between Ligands and ASGR-1 and Antibodies and ASGR-1

A. Crystal Structures of ASGR-1 Carbohydrate Binding Domain with Ligand Bound

### Introduction

[0596] The crystal structure of ligand free ASGR-1 CBD (carbohydrate binding domain) has been previously described (1). Protein expression of ASGR-1 CBD (SEQ ID NO:5), purification and crystallization was performed similar to the published method, however the structures described here differ from the published crystal structure. Analysis of these structures shows extra N- and C-terminal amino acids compared to the published structure, how various ligands interact with the ASGR-1 carbohydrate binding domain, and possible selectivity determinants between ASGR-1/ASGR-2 for various saccharides.

### Results

### Lactose Binds in the Carbohydrate Binding Pocket of ASGR-1

[0597] Protein crystals of the ASGR-1/Lactose complex were grown and the crystal structure was determined at 2.05 Å. Although a method similar to that of the published structure was followed, clear electron density is present for the lactose disaccharide in the carbohydrate binding pocket. See FIGS. 18A and 18B. In this structure, the galactose ring of the lactose disaccharide sits on top of the calcium ion at the carbohydrate binding domain and forms the majority of the contacts with the ASGR-1 protein. Hydrogen bonds are formed between lactose and ASGR-1 amino acids Q240, D242, E253, and N265. Additionally, van der Waals interactions are formed with at least W244 (SEQ ID NO:5). See FIG. 18C.

[0598] Analysis of the crystal structure identifies specific amino acids involved in the interaction between ASGR-1 and lactose. Interacting with at least these amino acids by an alternate molecule can completely or partially affect the interaction between ASGR-1 and lactose.

ASGR-1/Lactose Analysis (Distances Below were Calculated with PyMOL):

[0599] Amino acids with at least one non-hydrogen atom 4.5 Å or less to the bound lactose molecule were identified and include: Q240, D242, W244, E253, N265, D266, D267 (SEQ ID NO:5).

[0600] Amino acids with at least one non-hydrogen atom 5 Å or less to the bound lactose molecule were identified and include: Q240, D242, W244, E253, N265, D266, D267 (SEQ ID NO:5).

[0601] Amino acids with at least one non-hydrogen atom 5-8 Å from the bound lactose molecule were identified and include: N209, R237, P238, E239, P241, D243, Y245, G246, H247, G252, C255, H257, T259, D260, V268, R271, Y273 (SEQ ID NO:5).

### Galactose Binds in the Carbohydrate Binding Pocket of ASGR-1 Similar to Lactose

[0602] Protein crystals of the ASGR-1/Galactose complex were grown and the crystal structure was determined at 2.4 Å. Although a method similar to that of the published structure was followed, clear electron density is present for the galactose saccharide in the carbohydrate binding domain. See FIGS. 19A and 19B.

[0603] In this structure, galactose sits on top of the calcium ion at the carbohydrate binding site and forms contacts with the ASGR-1 protein. Hydrogen bonds are formed between galactose and ASGR-1 amino acids Q240, D242, E253, and N265 (SEQ ID NO:5). Additionally, van der Waals interactions are formed with at least W244. See FIG. 19C.

[0604] Analysis of the crystal structure identifies specific amino acids involved in the interaction between ASGR-1 and galactose. Interacting with at least these amino acids by an alternate molecule may completely or partially affect the interaction between ASGR-1 and galactose. Distances below were calculated with PyMOL.

ASGR-1/Galactose Analysis (Distances Below were Calculated with PyMOL):

[0605] Amino acids with at least one non-hydrogen atom 4.5 Å or less to the bound galactose molecule were identified and include: R237, Q240, D242, W244, E253, N265, D266, D267 (SEQ ID NO:5). Amino acids with at least one non-hydrogen atom 5 Å or less to the bound lactose molecule were identified and include: R237, Q240, D242, W244, E253, N265, D266, D267 (SEQ ID NO:5).

[0606] Amino acids with at least one non-hydrogen atom 5-8 Å from the bound lactose molecule were identified and include: N209, P238, E239, P241, D243, Y245, G246, H247, G252, C255, H257, T259, V268, R271, Y273 (SEQ ID NO:5).

[0607] When comparing the ASGR-1/Lactose and ASGR-1/Galactose structures, the galactose rings of each saccharide superimpose very well. One difference in the proteins in the two structures is the conformation of R237, an amino acid in close proximity to the carbohydrate binding site. In the superimposition shown in FIG. 20, the ASGR-1/Lactose structure is shown in white and the ASGR-1/Galactose structure is shown in black.

### N-Acetyl-D-Galactosamine (GalNAc) Binds in the Carbohydrate Binding Pocket of ASGR-1 Similar to Galactose, Buts Forms Additional Interactions

[0608] Protein crystals of the ASGR-1/GalNAc complex were grown and the crystal structure was determined at 2.2 Å. Although a method similar to that of the published structure was followed, clear electron density is present for the GalNAc saccharide in the carbohydrate binding pocket. See FIG. 21A and FIG. 21B.

[0609] In this structure, GalNAc sits on top of the calcium ion at the carbohydrate binding site and forms contacts with the ASGR-1 protein. Hydrogen bonds are formed between GalNAc and ASGR-1 amino acids Q240, D242, E253, and N265. Additionally, van der Waals interactions are formed with at least W244. In this structure, R237 is in a similar conformation as observed in the galactose complex. However, in this case hydrogen bonds are formed between R237 and the acetyl of GalNAc. These additional interactions with R237 help explain both the observed tighter binding of GalNAc (than galactose) to ASGR-1, and the tighter binding to GalNAc to ASGR-1 (than ASGR-2, in which this amino acid is Ala rather than Arg). See FIG. 21C.

ASGR-1/GalNAc Analysis (Distances were Calculated with PyMOL):

[0610] Analysis of the crystal structure identifies specific amino acids involved in the interaction between ASGR-1 and GalNAc. Interacting with at least one of these amino acids by an alternate molecule may completely or partially inhibit the interaction between ASGR-1 and GalNAc.

[0611] Amino acids with at least one atom 4.5 Å or less to the bound GalNAc molecule were identified and include: N209, R237, Q240, D242, W244, E253, H257, T259, N265, D266, D267, Y273 (SEQ ID NO:5). Amino acids with at least one non-hydrogen atom 5 Å or less to the bound lactose molecule were identified and include: N209, R237, Q240, D242, W244, E253, H257, T259, N265, D266, D267, Y273 (SEQ ID NO:5).

[0612] Amino acids with at least one non-hydrogen atom 5-8 Å from the bound lactose molecule were identified and include: P238, E239, P241, D243, Y245, G246, H247, G252, C255, F258, D260, R263, W264, V268, R271 (SEQ ID NO:5).

[0613] The coordinates for the ASGR-1 CBD/GalNAc crystal structure complex are presented in Table 10.1.

### Methods

### ASGR-1 Expression and Purification

[0614] For all chrystallography experiments in Example 12, Human ASGR-1 CBD protein (SEQ ID NO:5) was expressed in E. coli and refolded and purified.

### ASGR-1 Crystallization

[0615] Purified human ASGR-1 CBD (148-291) protein was concentrated to 8-12 mg/ml. ASGR-1/carbohydrate complex crystals grow in 0.1 M sodium cacodylate pH 6.8, 0.08 M ammonium sulfate, 21-23% PEG 8000 in the presence of 20 mM ligand (lactose, galactose or GalNAc).

### Data Collection and Structure Determination

[0616] Datasets for ASGR-1 CBD complexes were collected on a Rigaku FR-E X-ray source (ASGR-1/Lactose and ASGR-1/Galactose) or at Berkeley Advanced Light Source beamline 5.0.2 (ASGR-1/GalNAc). All datasets were processed with iMosflm(2) and scaled with AIMLESS(3) from the CCP4 program suite(4).

[0617] ASGR-1/Lactose crystals grow in the C2 space group with unit cell dimensions a=113.5, b=32.3, c=40.4 Å, ß=92.3° with one complex molecule per asymmetric unit, and diffract to 2.05 Å resolution. The ASGR-1 structure was solved by molecular replacement with the program PHASER(5) using the published ASGR-1 structure(1) as the starting search model. The structure was improved with multiple rounds of model building with Coot(6) and refinement with PHENIX(7). The refined structure has R=18.9 and R_{free}=24.4.

[0618] ASGR-1/Galactose crystals grow in the C2 space group with unit cell dimensions a=113.1, b=32.7, c=40.7 Å, ß=91.6° with one complex molecule per asymmetric unit, and diffract to 2.4 Å resolution. The ASGR-1/Lactose structure was used as the starting molecule for molecular replacement, and model building and refinement were performed as described for the ASGR-1/Lactose complex to R=15.8 and R_{free}=22.9.

[0619] ASGR-1/GalNAc crystals grow in the C2 space group with unit cell dimensions a=112.7, b=32.3, c=40.5 Å, ß=91.7° with one complex molecule per asymmetric unit, and diffract to 2.2 Å resolution. The ASGR-1/Lactose structure was used as the starting molecule for molecular replacement, and model building and refinement were performed as described for the ASGR-1/Lactose complex to R=16.5 and R_{free}=23.0.

[0620] Structure analysis and distance calculations were performed with the program PyMOL(8).

### REFERENCES

[0621] 1. Meier, M., Bider, M. D., Malashkevich, V. N., Spiess, M., and Burkhard, P. (2000) Crystal structure of the carbohydrate recognition domain of the H1 subunit of the asialoglycoprotein receptor. Journal of molecular biology 300, 857-865
[0622] 2. Battye, T. G., Kontogiannis, L., Johnson, O., Powell, H. R., and Leslie, A. G. (2011) iMOSFLM: a new graphical interface for diffraction-image processing with MOSFLM. Acta crystallographica 67, 271-281
[0623] 3. Evans, P. (2006) Scaling and assessment of data quality. Acta crystallographica 62, 72-82
[0624] 4. CCP4. (1994) The CCP4 suite: programs for protein crystallography. Acta crystallographica 50, 760-763
[0625] 5. McCoy, A. J., Grosse-Kunstleve, R. W., Adams, P. D., Winn, M. D., Storoni, L. C., and Read, R. J. (2007) Phaser crystallographic software. Journal of applied crystallography 40, 658-674
[0626] 6. Emsley, P., Lohkamp, B., Scott, W. G., and Cowtan, K. (2010) Features and development of Coot. Acta crystallographica 66, 486-501
[0627] 7. Adams, P. D., Afonine, P. V., Bunkoczi, G., Chen, V. B., Davis, I. W., Echols, N., Headd, J. J., Hung, L. W., Kapral, G. J., Grosse-Kunstleve, R. W., McCoy, A. J., Moriarty, N. W., Oeffner, R., Read, R. J., Richardson, D. C., Richardson, J. S., Terwilliger, T. C., and Zwart, P. H. (2010) PHENIX: a comprehensive Python-based system for macromolecular structure solution. Acta crystallographica 66, 213-221
[0628] 8. DeLano, W. L. (2002) The PyMOL Molecular Graphics System. Palo Alto
   B. Crystal Structure of ASGR-1 Carbohydrate Binding Domain (CBD) with 5E5

[0629] The present example presents the crystal structure of the ASGR-1 CBD bound to the Fab fragment of 5E5, determined to 1.95 Å resolution (the conditions for which are described in the below). This structure, depicted in FIGS. 22A&B, shows that when 5E5 binds to/interacts with ASGR-1, a conformational rearrangement of the carbohydrate binding loop occurs, impairing the carbohydrate binding loop from binding to/interacting with ligand (i.e., carbohydrates). This demonstrates that the 5E5 Fab indirectly inhibits the ASGR-1 CBD/Ligand binding.

[0630] The depicted structure also allows one to identify specific core ASGR amino acid residues for the interaction interface of 5E5 with ASGR-1. This was defined as residues that are within 5 Å of the 5E5 protein. The core residues are as follows: H161, E162, W195, E196, Q198, K199, F200, Q202, H203, H204, G232, F233, K234, N235, W236, R237, P238, D261, G262, R263 (SEQ ID NO:5).

[0631] The structures were also used to identify boundary ASGR-1 amino acid residues for the interaction interface with 5E5. These residues were ASGR-1 residues that were from 5-8 Å of the 5E5 protein. The boundary residues are as follows: V159, E160, R163, T193, S194, E197, V201, I205, G206, P207, Y229, E230, T231, E239, F258, T259, D260, W264 (SEQ ID NO:5).

[0632] Specific core 5E5 amino acid residues of the interaction interface with ASGR-1 were defined as 5E5 residues that are within 5 Å of the ASGR-1 protein. The core 5E5 Heavy Chain residues include: S30, N31, W52, Y53, D54, S56, N57, Y59, Y101, S102, S103, G104, W105, Y106, D107; and the core 5E5 Light Chain residues include: 5E5 Light Chain: Q27, R30, D32, H91, Y92, S93, Y94.

[0633] Boundary 5E5 amino acid residues of the interaction interface with ASGR-1 were defined as 5E5 residues that are 5-8 Å from the ASGR-1 protein. The boundary 5E5 Heavy Chain residues include: Y32, V33, V50, G55, K58, N74, E99, V100, Y108; and the boundary 5E5 Light Chain residues include: 12, G28, 129, L33, Q90, P95, R96.

### Methods

### Expression and Purification of Protein Samples

[0634] The 5E5 Fab fragment was generated by cleaving the 5E5 mAb with caspase 3. Post caspase cleavage, the Fab was isolated by purification on a MonoS ion exchange column. Ni Sepharose Excel subtraction was then performed to ensure the Fc domain was removed from the sample.

5E5 mAb Heavy Chain (SEQ ID NO: 32695):
QVQLVESGGGVVQPGRSLRLSCAASGFTFSNYVMHWVRQAPGKGLEWVAV
IWYDGSNKYYADSVKGRFTISRDNSKNTLYLQMNSLRAEDTAVYYCTREV
YSSGWYDYGMDVWGQGTTVTVSSASTKGPSVFPLAPSSKSTSGGTAALGC
LVKDYFPEPVTVSWNSGALTSGVHTFPAVLQSSGLYSLSSVVTVPSSSLG
TQTYICNVNHKPSNTKVDKKVEPKSCGSDEVDGGDKTHTCPPCPAPELLG
GPSVFLFPPKPKDTLMISRTPEVTCVVVDVSHEDPEVKFNWYVDGVEVHN
AKTKPREEQYNSTYRVVSVLTVLHQDWLNGKEYKCKVSNKALPAPIEKTI
SKAKGQPREPQVYTLPPSREEMTKNQVSLTCLVKGFYPSDIAVEWESNGQ
PENNYKTTPPVLDSDGSFFLYSKLTVDKSRWQQGNVFSCSVMHEALHNHY
TQKSLSLSPGHHHHHH
5E5 mAb Light Chain (SEQ ID NO: 32696):
DIQMTQSPSSLSASVGDRVTITCRASQGIRNDLGWYQQKPGKAPKRLIYA
ASSLQSGVPSRFSGSGSGTEFTLTISSLQPEDFATYYCLQHYSYPRTFGQ
GTKVEVKRTVAAPSVFIFPPSDEQLKSGTASVVCLLNNFYPREAKVQWKV
DNALQSGNSQESVTEQDSKDSTYSLSSTLTLSKADYEKHKVYACEVTHQG
LSSPVTKSFNRGEC
5E5 Fab Heavy Chain (Post Cleavage)
(SEQ ID NO: 32697):
QVQLVESGGGVVQPGRSLRLSCAASGFTFSNYVMHWVRQAPGKGLEWVAV
IWYDGSNKYYADSVKGRFTISRDNSKNTLYLQMNSLRAEDTAVYYCTREV
YSSGWYDYGMDVWGQGTTVTVSSASTKGPSVFPLAPSSKSTSGGTAALGC
LVKDYFPEPVTVSWNSGALTSGVHTFPAVLQSSGLYSLSSVVTVPSSSLG
TQTYICNVNHKPSNTKVDKKVEPKSCGSDEVD
5E5 Fab Light Chain (Post Cleavage)
(SEQ ID NO: 32698):
DIQMTQSPSSLSASVGDRVTITCRASQGIRNDLGWYQQKPGKAPKRLIYA
ASSLQSGVPSRFSGSGSGTEFTLTISSLQPEDFATYYCLQHYSYPRTFGQ
GTKVEVKRTVAAPSVFIFPPSDEQLKSGTASVVCLLNNFYPREAKVQWKV
DNALQSGNSQESVTEQDSKDSTYSLSSTLTLSKADYEKHKVYACEVTHQG
LSSPVTKSFNRGEC

### Complex Formation and Crystallization

[0635] The ASGR-1 CBD/5E5 Fab complex was made by mixing a molar excess of ASGR-1 CBD with 5E5 Fab. The complex was separated from excess ASGR-1 by purification on a size exclusion chromatography column. The ASGR-1 CBD/5E5 Fab complex was concentrated to 10 mg/ml and crystallizes in 0.1 M Tris pH 8.5, 12% PEG 4000.

### Data Collection and Structure Determination

[0636] The dataset for the ASGR-1 CBD/5E5 Fab complex crystal was collected on beamline 5.0.2 at the Berkeley synchrotron and processed with Mosflm¹/Aimless².

[0637] ASGR-1 CBD/5E5 Fab complex crystals grow in the P2₁ space group with unit cell dimensions a=62.93, b=41.75, c=118.89 Å and ß=97.16 with one complex molecule per asymmetric unit, and diffract to 1.95 Å resolution. The ASGR-1 CBD/5E5 Fab complex structure was solved by molecular replacement with the program Molrep². The structure was improved with multiple rounds of model building with Coot³ and refinement with Phenix⁴, to a final R=25.9/R_{free}=30.5. While the electron density for the ASGR-1 CBD and 5E5 Fab variable domain (along with the corresponding interface) is quite good, the electron density for the 5E5 constant domain is poor (most likely due to poor packing within the crystal lattice). This likely explains the higher R/R_{free} observed from this structure refinement.

[0638] Core interaction interface amino acids were determined as being all amino acid residues with at least one non-hydrogen atom less than or equal to 5 Å from the partner protein. 5 Å was chosen as the core region cutoff distance to allow for atoms within a van der Waals radius plus a possible water-mediated hydrogen bond. Boundary interaction interface amino acids were determined as all amino acid residues with at least one non-hydrogen atom less than or equal to 8 Å from the partner protein but not included in the core interaction list. Less than or equal to 8 Å was chosen as the boundary region cutoff distance to allow for the length of an extended arginine amino acid. Amino acids that met these distance criteria were calculated with the program PyMOL⁵.

### REFERENCES

[0639] 1. Battye, T. G., Kontogiannis, L., Johnson, O., Powell, H. R. & Leslie, A. G. iMOSFLM: a new graphical interface for diffraction-image processing with MOSFLM. Acta Crystallogr D Biol Crystallogr 67, 271-81 (2011).
[0640] 2. CCP4. The CCP4 suite: programs for protein crystallography. Acta Crystallogr D Biol Crystallogr 50, 760-3 (1994).
[0641] 3. Emsley, P., Lohkamp, B., Scott, W. G. & Cowtan, K. Features and development of Coot. Acta Crystallogr D Biol Crystallogr 66, 486-501 (2010).
[0642] 4. Adams, P. D. et al. PHENIX: a comprehensive Python-based system for macromolecular structure solution. Acta Crystallogr D Biol Crystallogr 66, 213-21 (2010).
[0643] 5. DeLano, W. L. The PyMOL Molecular Graphics System. (Palo Alto, 2002).
   C. Crystal Structure of ASGR-1 Carbohydrate Binding Domain (CBD) with 22G5

[0644] The present example presents the crystal structure of the ASGR-1 CBD bound to the Fab fragment of 22G5, determined to 2.1 Å resolution (the conditions of which are described above in B). This structure, depicted in FIGS. 23A&B, shows that when 22G5 binds to/interacts with ASGR-1, a conformational rearrangement of the carbohydrate binding loop occurs, impairing the carbohydrate binding loop from binding to/interacting with ligand (i.e., carbohydrates). This demonstrates that the 22G5 Fab indirectly inhibits the ASGR-1 CBD/Ligand binding.

[0645] The depicted structure also allows one to identify specific core ASGR amino acid residues for the interaction interface of 22G5 with ASGR-1. This was defined as residues that are within 5 Å of the 22G5 protein. The core residues are as follows: W167, S171, G172, K173, A174, A176, D177, N180, Y181, R183, L184, E185, D186, Q270, P272, W275 (SEQ ID NO:5).

[0646] The structures were also used to identify boundary ASGR-1 amino acid residues for the interaction interface with 22G5. These residues were ASGR-1 residues that were from 5-8 Å of the 22G5 protein. The boundary residues are as follows: P155, N157, W158, F168, S169, R170, W175, A178, D179, C182, A187, W211, C269, R271, Y273, R274, C277, T279 (SEQ ID NO:5).

[0647] Specific core 22G5 amino acid residues of the interaction interface with ASGR-1 were defined as 22G5 residues that are within 5 Å of the ASGR-1 protein. The core 22G5 Heavy Chain residues include: A33, V50, 151, S52, R53, S54, G55, G56, Y57, Y59, R99, A101, A103, G104, E106; and the core 22G5 Light Chain residues include: 22G5 Light Chain: Y32, S91, Y92, R93, Thr94, Pro95, F97.

[0648] Boundary 22G5 amino acid residues of the interaction interface with ASGR-1 were defined as 22G5 residues that are 5-8 Å from the ASGR-1 protein. The boundary 22G5 Heavy Chain residues include: S30, S31, Y32, M34, N35, W47, S49, T58, R72, N74, L100, V102, S105; and the boundary 22G5 Light Chain residues include: 12, Q27, N28, G100, 129, S30, S31, Q90, L96.

### Methods:

[0649] The same methods were followed as described above in Example 10B except for the following changes:
[0650] The 22G5 Fab fragment was generated by cleaving the 22G5-IgG4 mAb with papain;
[0651] The ASGR-1 CBD/22G5 Fab complex was concentrated to 8 mg/ml and crystallized in 0.1 Bis-Tris pH 6.5, 0.2 sodium malonate, 20% PEG 3350;
[0652] The dataset was processed with XDS/Aimless;
[0653] ASGR-1 CBD/22G5 Fab complex crystals grow in the P212121 space group with unit cell dimensions a=46.04, b=80.34, c=169.14 Å with one complex molecule per asymmetric unit, and diffract to 2.1 Å resolution; and
[0654] The structure was improved with multiple rounds of model building with Coot3 and refinement with Phenix4, to a final R=17.8/R_{free}=22.5.
   D. Crystal Structure of ASGR-1 Carbohydrate Binding Domain (CBD) with 4A2

[0655] The present example presents the crystal structure of the ASGR-1 CBD bound to the Fab fragment of 4A2, determined to 2.15 Å resolution (the conditions of which are described above in section B of this Example). This structure, depicted in FIGS. 24, 25 and 26, shows that when 4A2 binds to/interacts with ASGR-1, a conformational rearrangement of the carbohydrate binding loop occurs, impairing the carbohydrate binding loop from binding to/interacting with ligand (i.e., carbohydrates). This demonstrates that the 4A2 Fab indirectly inhibits the ASGR-1 CBD/Ligand binding.

[0656] The depicted structure also allows one to identify specific core ASGR amino acid residues for the interaction interface of 4A2 with ASGR-1. This was defined as residues that are within 5 Å of the 4A2 protein. The core residues are as follows: R170, W195, E196, K199, Q202, H203, H204, I205, G206, P207, V208, F233, K234, N235, W236, P238, D260, D261, G262, R263, R274 (SEQ ID NO:5).

[0657] The structures were also used to identify boundary ASGR-1 amino acid residues for the interaction interface with 4A2. These residues were ASGR-1 residues that were from 5-8 Å of the 4A2 protein. The boundary residues are as follows: N157, V159, F168, S169, S171, S194, Q198, F200, V201, T210, R237, E239, Q240, F258, T259, W264 (SEQ ID NO:5).

[0658] Specific core 4A2 amino acid residues of the interaction interface with ASGR-1 were defined as 4A2 residues that are within 5 Å of the ASGR-1 protein. The core 4A2 Heavy Chain residues include: T28, F29, T30, N31, Y32, D33, W50, H52, S55, N57, S99, S100, G101, W102, Y103; and the core 4A2 Light Chain residues include: 4A2 Light Chain: H31, S33, N34, N36, Y38, W56, Y97, Y98.

[0659] Boundary 4A2 amino acid residues of the interaction interface with ASGR-1 were defined as 4A2 residues that are 5-8 Å from the ASGR-1 protein. The boundary 4A2 Heavy Chain residues include: Y27, 134, N35, W47, M51, P53, N54, G56, T58, G59, Y104, D106; and the boundary 4A2 Light Chain residues include: 129, S32, N35, N37, Y55, T59, Q96, N99, T100.

[0660] The coordinates for the ASGR-1 CBD/4A2 crystal structure complex are presented in Table 10.2.

### Methods:

[0661] The same methods were followed as described above in part B of this Example except for the following changes:

[0662] 1. For this antibody only, a double stop codon was inserted at the end of CH1 domain that allowed for expression of a 4A2 Fab. The Fab purification was carried out via an affinity and a cation exchanger column. The final sequence of 4A2 Fab is:

Heavy Chain (SEQ ID NO: 32650):
QVQLVQSGTEVKKPGASVKVSCKASGYTFTNYDINWVRQATGQGLEWMGW
MHPNSGNTGYAQKFQGRVTLTRDTSISTAYMELSSLRSEDTAVYYCASSS
GWYYFDYWGQGTLVTVSSASTKGPSVFPLAPSSKSTSGGTAALGCLVKDY
FPEPVTVSWNSGALTSGVHTFPAVLQSSGLYSLSSVVTVPSSSLGTQTYI
CNVNHKPSNTKVDKKVEPKSCGSDEVDGGD
Light Chain (SEQ ID NO: 32651):
DIVMTQSPDSLAVSLGERATINCKSSQSILHSSNNNNYLAWFQQKPGQPP
KLLLYWASTRESGVPDRFSGSGSGTDFTLTISSLQPEDVAVYYCQQYYNT
PVTFGPGTKVGIKRTVAAPSVFIFPPSDEQLKSGTASVVCLLNNFYPREA
KVQWKVDNALQSGNSQESVTEQDSKDSTYSLSSTLTLSKADYEKHKVYAC
EVTHQGLSSPVTKSFNRGEC

[0663] 1. The ASGR-1 CBD/4A2 Fab complex was concentrated to 20 mg/ml and crystallized in 0.2 M Tri-Lithium citrate and 20% PEG3350;
[0664] 2. The ASGR-1 CBD/4A2 Fab complex crystals grow in the P2₁2₁2₁ space group with unit cell dimensions a=63.42, b=76.37, c=156.67 Å with one complex molecule per asymmetric unit, and diffract to 2.15 Å resolution; and
[0665] 3. The structure was improved with multiple rounds of model building with Coot³ and refinement with Phenix⁴, to a final R=17.9/R_{free}=21.8.
   Crystal Structure of ASGR-1 Carbohydrate Binding Domain (CBD) with 7E11

[0666] The present example presents the crystal structure of the ASGR-1 CBD bound to the Fab fragment of 7E11, determined to 2.0 Å resolution (the conditions of which are described above in section B of this Example). This structure, depicted in FIGS. 27 and 28, shows that when 7E11 binds to/interacts with ASGR-1, a conformational rearrangement of the carbohydrate binding loop occurs, impairing the carbohydrate binding loop from binding to/interacting with ligand (i.e., carbohydrates). This demonstrates that the 7E11 Fab indirectly inhibits the ASGR-1 CBD/Ligand binding.

[0667] The depicted structure also allows one to identify specific core ASGR amino acid residues for the interaction interface of 7E11 with ASGR-1. This was defined as residues that are within 5 Å of the 7E11 protein. The core residues are as follows: H161, S194, W195, E196, Q198, K199, F200, Q202, H203, F233, K234, N235, W236, R237, P238, R263 (SEQ ID NO:5).

[0668] The structures were also used to identify boundary ASGR-1 amino acid residues for the interaction interface with 7E11. These residues were ASGR-1 residues that were from 5-8 Å of the 7E11 protein. The boundary residues are as follows: E160, E162, V192, T193, E197, V201, H204, Y229, E230, T231, G232, E239, Q240, P241, D261, G262, W264 (SEQ ID NO:5).

[0669] Specific core 7E11 amino acid residues of the interaction interface with ASGR-1 were defined as 7E11 residues that are within 5 Å of the ASGR-1 protein. The core 7E11 Heavy Chain residues include: S30, S31, 150, W52, H53, S56, N57, Y59, S01, M102, G103; and the core 7E11 Light Chain residues include: 130, Y32, T91, Y92, S93, T94, 196.

[0670] Boundary 7E11 amino acid residues of the interaction interface with ASGR-1 were defined as 7E11 residues that are 5-8 Å from the ASGR-1 protein. The boundary 7E11 Heavy Chain residues include: T28, F29, F32, G33, H35, W47, 151, D54, K58, D99, L100, G104; and the boundary 7E11 Light Chain residues include: 12, Q27, N28, 129, S31, L33, N34, T50, S67, Q89, Q90, P95.

### Methods:

[0671] The same methods were followed as described above in part B of this example except for the following changes:

[0672] The 7E11 Fab fragment was generated by cleaving the 7E11 mAb with caspase 3:

7E11 mAb Heavy Chain (SEQ ID NO: 32652):
QVQLVESGGGVVQPGRSLRLSCAASGFTFSSFGMHWVRQAPGKGLEWVAI
IWHDGSNKYYADSVKGRFTISRDNSNNTLYLQMSSLRAEDTAVYYCARDL
SMGGMDVWGQGTTVTVSSASTKGPSVFPLAPSSKSTSGGTAALGCLVKDY
FPEPVTVSWNSGALTSGVHTFPAVLQSSGLYSLSSVVTVPSSSLGTQTYI
CNVNHKPSNTKVDKKVEPKSCGSDEVDGGDKTHTCPPCPAPELLGGPSVF
LFPPKPKDTLMISRTPEVTCVVVDVSHEDPEVKFNWYVDGVEVHNAKTKP
REEQYNSTYRVVSVLTVLHQDWLNGKEYKCKVSNKALPAPIEKTISKAKG
QPREPQVYTLPPSREEMTKNQVSLTCLVKGFYPSDIAVEWESNGQPENNY
KTTPPVLDSDGSFFLYSKLTVDKSRWQQGNVFSCSVMHEALHNHYTQKSL
SLSPGHHHHHH
7E11 mAb Light Chain (SEQ ID NO: 32653):
DIQMTQSPSSLSASVGDRVTIACRASQNIISYLNWYQQKPGKAPKFLIYT
ASSLQSGVPSRFSGSGSGTDFTLTISSLQPEDFAIYYCQQTYSTPLTFGG
GTKVEIKRTVAAPSVFIFPPSDEQLKSGTASVVCLLNNFYPREAKVQWKV
DNALQSGNSQESVTEQDSKDSTYSLSSTLTLSKADYEKHKVYACEVTHQG
LSSPVTKSFNRGEC
7E11 Fab Heavy Chain (Post-Cleavage)
(SEQ ID NO: 32654):
QVQLVESGGGVVQPGRSLRLSCAASGFTFSSFGMHWVRQAPGKGLEWVAI
IWHDGSNKYYADSVKGRFTISRDNSNNTLYLQMSSLRAEDTAVYYCARDL
SMGGMDVWGQGTTVTVSSASTKGPSVFPLAPSSKSTSGGTAALGCLVKDY
FPEPVTVSWNSGALTSGVHTFPAVLQSSGLYSLSSVVTVPSSSLGTQTYI
CNVNHKPSNTKVDKKVEPKSCGSDEVD
7E11 Fab Light Chain (Post-Cleavage)
(SEQ ID NO: 32655):
DIQMTQSPSSLSASVGDRVTIACRASQNIISYLNWYQQKPGKAPKFLIYT
ASSLQSGVPSRFSGSGSGTDFTLTISSLQPEDFAIYYCQQTYSTPLTFGG
GTKVEIKRTVAAPSVFIFPPSDEQLKSGTASVVCLLNNFYPREAKVQWKV
DNALQSGNSQESVTEQDSKDSTYSLSSTLTLSKADYEKHKVYACEVTHQG
LSSPVTKSFNRGEC

[0673] 1. The ASGR-1 CBD/7E11 Fab complex was concentrated to 20 mg/ml and crystallized in 0.2 M Potassium Phosphate monobasic and 20% PEG3350;
[0674] 2. The ASGR-1 CBD/7E11 Fab complex crystals grow in the P6222 space group with unit cell dimensions a=105.75, b=105.75, c=193.75 Å and β=120.0° with one complex molecule per asymmetric unit, and diffract to 2.0 Å resolution;
[0675] 3. The dataset was processed with XDS/CCP4;
[0676] 4. The ASGR-1 CBD/7E11 Fab complex structure was solved by molecular replacement with the program Phaser; and
[0677] 5. The structure was improved with multiple rounds of model building with Coot³ and refinement with Phenix⁴, to a final R=21.4/R_{free}=26.9.
   E. Crystal Structure of ASGR-1 Carbohydrate Binding Domain (CBD) with 4H6

[0678] The present example presents the crystal structure of the ASGR-1 CBD bound to the Fab fragment of 4H6, determined to 2.6 Å resolution (the conditions of which are described above in section B of this Example). This structure, depicted in FIGS. 29 and 30, shows that when 4H6 binds to/interacts with ASGR-1, a conformational rearrangement of the carbohydrate binding loop occurs, impairing the carbohydrate binding loop from binding to/interacting with ligand (i.e., carbohydrates). This demonstrates that the 4H6 Fab indirectly inhibits the ASGR-1 CBD/Ligand binding.

[0679] The depicted structure also allows one to identify specific core ASGR amino acid residues for the interaction interface of 4H6 with ASGR-1. This was defined as residues that are within 5 Å of the 4H6 protein. The core residues are as follows: H161, E162, T193, S194, W195, E196, K199, Q202, T231, G232, F233, K234, N235, P238, D261, R263 (SEQ ID NO:5).

[0680] The structures were also used to identify boundary ASGR-1 amino acid residues for the interaction interface with 4H6. These residues were ASGR-1 residues that were from 5-8 Å of the 4H6 protein. The boundary residues are as follows: R163, V192, E197, Q198, H203, P207, D228, E230, W236, R237, D260, G262, W264 (SEQ ID NO:5).

[0681] Specific core 4H6 amino acid residues of the interaction interface with ASGR-1 were defined as 4H6 residues that are within 5 Å of the ASGR-1 protein. The core 4H6 Heavy Chain residues include: Y33, H35, W50, H52, S55, G57, T58, N59, D99, G100, T101, S102; and the core 4H6 Light Chain residues include: Q27, W32, A91, N92, S93, F94, F96.

[0682] Boundary 4H6 amino acid residues of the interaction interface with ASGR-1 were defined as 4H6 residues that are 5-8 Å from the ASGR-1 protein. The boundary 4H6 Heavy Chain residues include: D31, Y32, L34, W47, 151, N54, G56, Y60, Q65, S103, F104; and the boundary 4H6 Light Chain residues include: D1, I2, G28, 129, S30, R31, Y49, G50, Q89, Q90, P95.

### Methods:

[0683] The same methods were followed as described above in part B of this example except for the following changes:
[0684] 1. The 4H6 Fab fragment was generated by cleaving the 4H6 mAb with caspase 3.

4H6 mAb Heavy Chain (SEQ ID NO: 32656):
QVQLVQSGAEVKKPGASVKVSCKASGYTFTDYYLHWVRQAPGQGLEWMGW
IHPNSGGTNYAQKFQGRVTMTRDTSISTAYMGLSSLRSDDTAVYYCARDG
TSSFDYWGQGTLVTVSSASTKGPSVFPLAPSSKSTSGGTAALGCLVKDYF
PEPVTVSWNSGALTSGVHTFPAVLQSSGLYSLSSVVTVPSSSLGTQTYIC
NVNHKPSNTKVDKKVEPKSCGSDEVDGGDKTHTCPPCPAPELLGGPSVFL
FPPKPKDTLMISRTPEVTCVVVDVSHEDPEVKFNWYVDGVEVHNAKTKPR
EEQYNSTYRVVSVLTVLHQDWLNGKEYKCKVSNKALPAPIEKTISKAKGQ
PREPQVYTLPPSREEMTKNQVSLTCLVKGFYPSDIAVEWESNGQPENNYK
TTPPVLDSDGSFFLYSKLTVDKSRWQQGNVFSCSVMHEALHNHYTQKSLS
LSPGHHHHHH
4H6 mAb Light Chain (SEQ ID NO: 32657):
DIQMTQSPSSVSASVGDRVTITCRASQGISRWLAWYQQKPGKAPKLLIYG
ASSLQSGVPSRFSGSGSGTDFTLTISSLQPEDFAIYYCQQANSFPFTFGP
GTKVDIKGTVAAPSVFIFPPSDEQLKSGTASVVCLLNNFYPREAKVQWKV
DNALQSGNSQESVTEQDSKDSTYSLSSTLTLSKADYEKHKVYACEVTHQG
LSSPVTKSFNRGEC
4H6 Fab Heavy Chain (Post-Cleavage)
(SEQ ID NO: 32658):
QVQLVQSGAEVKKPGASVKVSCKASGYTFTDYYLHWVRQAPGOGLEWMGW
IHPNSGGTNYAQKFQGRVTMTRDTSISTAYMGLSSLRSDDTAVYYCARDG
TSSFDYWGQGTLVTVSSASTKGPSVFPLAPSSKSTSGGTAALGCLVKDYF
PEPVTVSWNSGALTSGVHTFPAVLQSSGLYSLSSVVTVPSSSLGTQTYIC
NVNHKPSNTKVDKKVEPKSCGSDEVD
4H6 Fab Light Chain (Post-Cleavage)
(SEQ ID NO: 32659):
DIQMTQSPSSVSASVGDRVTITCRASQGISRWLAWYQQKPGKAPKLLIYG
ASSLQSGVPSRFSGSGSGTDFTLTISSLQPEDFAIYYCQQANSFPFTFGP
GTKVDIKGTVAAPSVFIFPPSDEQLKSGTASVVCLLNNFYPREAKVQWKV
DNALQSGNSQESVTEQDSKDSTYSISSTITISKADYEKHKVYACEVTHQG
ISSPVTKSENRGEC

[0685] 2. The ASGR-1 CBD/4H6 Fab complex was concentrated to 20 mg/ml and crystallized in 0.2M Sodium fluoride, 0.1 M Bis Tris propane pH8.5, 20% PEG3350;
[0686] 3. The dataset was collected on beamline ID22 at the APS synchrotron and processed with HKL2000/CCP4;
[0687] 4. The ASGR-1 CBD/4H6 Fab complex crystals grow in the P12₁1 space group with unit cell dimensions a=57.20, b=43.58, c=131.65 Å and β=90.7° with one complex molecule per asymmetric unit, and diffract to 2.6 Å resolution;
[0688] 5. The ASGR-1 CBD/4H6 Fab complex structure was solved by molecular replacement with the program Phaser; and
[0689] 6. The structure was improved with multiple rounds of model building with Coot³ and refinement with Phenix⁴, to a final R=17.9/R_{free}=22.5.
   F. Crystal Structure of ASGR-1 Carbohydrate Binding Domain (CBD) with 72G9

[0690] The present example presents the crystal structure of the ASGR-1 CBD bound to the Fab fragment of 72G9, determined to 2.55 Å resolution (the conditions of which are described above in section B of this Example). This structure, depicted in FIGS. 31 and 32A and 32B, shows that when 72G9 binds to/interacts with ASGR-1, the CDR H2 loop of the Fab fragment appears to directly block the ligand (i.e., carbohydrate) binding/interacting to ASGR-1 CBD. This demonstrates that the 72G9 Fab directly inhibits the ASGR-1 CBD/Ligand binding.

[0691] The depicted structure also allows one to identify specific core ASGR amino acid residues for the interaction interface of 72G9 with ASGR-1. This was defined as residues that are within 5 Å of the 72G9 protein. The core residues are as follows: D216, Q217, N218, G219, P220, W221, Y229, E230, K234, W236, E239, Q240, P241, D242, D243, W244, Y245, G246, L249, G250, G251, G252, D254, Q270 ((SEQ ID NO:5).

[0692] The structures were also used to identify boundary ASGR-1 amino acid residues for the interaction interface with 72G9. These residues were ASGR-1 residues that were from 5-8 Å of the 72G9 protein. The boundary residues are as follows: H215, K222, T231, G232, R237, P238, H247, G248, E253, C255, D266, V268, C269 (SEQ ID NO:5).

[0693] Specific core 72G9 amino acid residues of the interaction interface with ASGR-1 were defined as 72G9 residues that are within 5 Å of the ASGR-1 protein. The core 72G9 Heavy Chain residues include: G26, F27, T28, S30, S31, Y32, S33, S52, G53, S54, S56, Y57, Y59, R98, G100, S101, R102; and the core 72G9 Light Chain residues include: Y32, Y49, T50, Q55, S91, H92, S93, F94, F96.

[0694] Boundary 72G9 amino acid residues of the interaction interface with ASGR-1 were defined as 72G9 residues that are 5-8 Å from the ASGR-1 protein. The boundary 72G9 Heavy Chain residues include: V2, F29, N35, S50, T51, S55, 158, R72, G99, G103, F104, D105; and the boundary 72G9 Light Chain residues include: S28, 129, T30, N33, L46, S53, L54, S56, Q89, Q90, P95.

### Methods:

[0695] The same methods were followed as described above in part B of this example except for the following changes:
[0696] 1. The 72G9 Fab fragment was generated by cleaving the 72G9 mAb with caspase 3

72G9 mAb Heavy Chain (SEQ ID NO: 32660):
EVQLVESGGGLVKPGGSLRLSCAASGFTFSSYSMNWVRQAPGKGLEWVSS
ISGSSSYIYYADSVKGRFTISRDNAKNSLYLQMNSLRAEDTAVYFCARGG
SRGFDPWGQGTLVTVSSASTKGPSVFPLAPSSKSTSGGTAALGCLVKDYF
PEPVTVSWNSGALTSGVHTFPAVLQSSGLYSLSSVVTVPSSSLGTQTYIC
NVNHKPSNTKVDKKVEPKSCGSDEVDGGDKTHTCPPCPAPELLGGPSVFL
FPPKPKDTLMISRTPEVTCVVVDVSHEDPEVKFNWYVDGVEVHNAKTKPR
EEQYNSTYRVVSVLTVLHQDWLNGKEYKCKVSNKALPAPIEKTISKAKGQ
PREPQVYTLPPSREEMTKNQVSLTCLVKGFYPSDIAVEWESNGQPENNYK
TTPPVLDSDGSFFLYSKLTVDKSRWQQGNVFSCSVMHEALHNHYTQKSLS
LSPGHHHHHH
72G9 mAb Light Chain (SEQ ID NO: 32661):
DIQMTQSPSSLSASVGDRVTITCRASQSITSYLNWYQQKPGKAPKLLIYT
ASSLQSGVPSRFSGSGSGTDFTLTISSLQPEDFATYYCQQSHSFPFTFGP
GTKVDIKRTVAAPSVFIFPPSDEQLKSGTASVVCLLNNFYPREAKVQWKV
DNALQSGNSQESVTEQDSKDSTYSLSSTLTLSKADYEKHKVYACEVTHQG
LSSPVTKSFNRGEC
72G9 Fab Heavy Chain (Post-Cleavage)
(SEQ ID NO: 32662):
EVQLVESGGGLVKPGGSLRLSCAASGFTFSSYSMNWVRQAPGKGLEWVSS
ISGSSSYIYYADSVKGRFTISRDNAKNSLYLQMNSLRAEDTAVYFCARGG
SRGFDPWGQGTLVTVSSASTKGPSVFPLAPSSKSTSGGTAALGCLVKDYF
PEPVTVSWNSGALTSGVHTFPAVLQSSGLYSLSSVVTVPSSSLGTQTYIC
NVNHKPSNTKVDKKVEPKSCGSDEVD
72G9 Fab Light Chain (Post-Cleavage)
(SEQ ID NO: 32663):
DIQMTQSPSSLSASVGDRVTITCRASQSITSYLNWYQQKPGKAPKLLIYT
ASSLQSGVPSRFSGSGSGTDFTLTISSLQPEDFATYYCQQSHSFPFTFGP
GTKVDIKRTVAAPSVFIFPPSDEQLKSGTASVVCLLNNFYPREAKVQWKV
DNALQSGNSQESVTEQDSKDSTYSLSSTLTLSKADYEKHKVYACEVTHQG
LSSPVTKSFNRGEC

[0697] 2. The 72G9 Fab/ASGR-1 CBD complex was concentrated to 0.2 M Magnesium Sulfate heptahydrate, 20% PEG3350;
[0698] 3. The ASGR-1 CBD/72G9 Fab complex crystals grew in the P2₁ space group with unit cell dimensions a=100.98, b=64.95, c=100.68 Å and β=96.43° with one complex molecule per asymmetric unit, and diffract to 2.55 Å resolution;
[0699] 4. The dataset was processed with XDS/CCP4;
[0700] 5. The ASGR-1 CBD/72G9 Fab complex structure was solved by molecular replacement with the program Phaser; and
[0701] 6. The structure was improved with multiple rounds of model building with Coot³ and refinement with Phenix⁴, to a final R=20.4/R_{free}=23.4.
   G. Crystal Structure of ASGR-1 Carbohydrate Binding Domain (CBD) with 194A4

[0702] The present example presents the crystal structure of the ASGR-1 CBD bound to the Fab fragment of 194A4, determined to 2.6 Å resolution (the conditions of which are described above in section B of this Example). This structure, depicted in FIGS. 33 and 34, shows that when 194A4 binds to/interacts with ASGR-1, a conformational rearrangement of the carbohydrate binding loop occurs, impairing the carbohydrate binding loop from binding to/interacting with ligand (i.e., carbohydrates). This demonstrates that the 194A4 Fab indirectly inhibits the ASGR-1 CBD/Ligand binding.

[0703] The depicted structure also allows one to identify specific core ASGR amino acid residues for the interaction interface of 194A4 with ASGR-1. This was defined as residues that are within 5 Å of the 194A4 protein. The core residues are as follows: T193, S194, W195, E196, P220, W221, G226, T227, D228, Y229, E230, T231, G232, F233, K234, N235, W236, R237, P238, E239, G252 (SEQ ID NO:5).

[0704] The structures were also used to identify boundary ASGR-1 amino acid residues for the interaction interface with 194A4. These residues were ASGR-1 residues that were from 5-8 Å of the 194A4 protein. The boundary residues are as follows: H161, E162, V191, V192, E197, Q198, D216, G219, K222, W223, D225, R263, W264 (SEQ ID NO:5).

[0705] Specific core 194A4 amino acid residues of the interaction interface with ASGR-1 were defined as 194A4 residues that are within 5 Å of the ASGR-1 protein. The core 194A4 Heavy Chain residues include: V31, Y32, Y33, W50, N52, S55, G57, R98, G99, Y100, D101, I102, T204; and the core 194A4 Light Chain residues include: V29, S30, I32, Y33, L47, Y50, R55, A56, T57, Y94.

[0706] Boundary 194A4 amino acid residues of the interaction interface with ASGR-1 were defined as 194A4 residues that are 5-8 Å from the ASGR-1 protein. The boundary 194A4 Heavy Chain residues include: V2, Y27, T30, L34, N35, P53, N54, G56, T58, N59, A97, L103, G105; and the boundary 194A4 Light Chain residues include: G28, N31, L48, I49, G51, N54, G58, I59, S68, G69, D93, S95.

### Methods:

[0707] The same methods were followed as described above in part B of this example except for the following changes:
[0708] 1. The 194A4 Fab fragment was generated by cleaving the 194A4 mAb with caspase 3.

194A4 mAb Heavy Chain (SEQ ID NO: 32664):
QVQLVQSGTEVKKPGASLKVSCKASGYTFTVYYLNWVRQAPGQGLEWMGW
INPNSGGTNYAQKFQGRVTMTRDTSISTAYMELSRLRSDDTAVYYCARGY
DILTGWGQGTLVTVSSASTKGPSVFPLAPSSKSTSGGTAALGCLVKDYFP
EPVTVSWNSGALTSGVHTFPAVLQSSGLYSLSSVVTVPSSSLGTQTYICN
VNHKPSNTKVDKKVEPKSCGSDEVDGGDKTHTCPPCPAPELLGGPSVFLF
PPKPKDTLMISRTPEVTCVVVDVSHEDPEVKFNWYVDGVEVHNAKTKPRE
EQYNSTYRVVSVLTVLHQDWLNGKEYKCKVSNKALPAPIEKTISKAKGQP
REPQVYTLPPSREEMTKNQVSLTCLVKGFYPSDIAVEWESNGQPENNYKT
TPPVLDSDGSFFLYSKLTVDKSRWQQGNVFSCSVMHEALHNHYTQKSLSL
SPGHHHHHH
194A4 mAb Light Chain (SEQ ID NO: 32665):
EIVLTQSPGTLSLSPGERATLSCRASRGVSNIYLAWYQQKPGQAPRLLIY
GASNRATGIPDRFSGSGSGTDFTLTISRLEPEDFAVYYCQHNDYSMFTFG
PGTKVDIKRTVAAPSVFIFPPSDEQLKSGTASVVCLLNNFYPREAKVQWK
VDNALQSGNSQESVTEQDSKDSTYSLSSTLTLSKADYEKHKVYACEVTHQ
GLSSPVTKSFNRGEC
194A4 Fab Heavy Chain (Post-Cleavage)
(SEQ ID NO: 32666):
QVQLVQSGTEVKKPGASLKVSCKASGYTFTVYYLNWVRQAPGQGLEWMGW
INPNSGGTNYAQKFQGRVTMTRDTSISTAYMELSRLRSDDTAVYYCARGY
DILTGWGQGTLVTVSSASTKGPSVFPLAPSSKSTSGGTAALGCLVKDYFP
EPVTVSWNSGALTSGVHTFPAVLQSSGLYSLSSVVTVPSSSLGTQTYICN
VNHKPSNTKVDKKVEPKSCGSDEVD
194A4 Fab Light Chain (Post-Cleavage)
(SEQ ID NO: 32667):
EIVLTQSPGTLSLSPGERATLSCRASRGVSNIYLAWYQQKPGQAPRLLIY
GASNRATGIPDRFSGSGSGTDFTLTISRLEPEDFAVYYCQHNDYSMFTFG
PGTKVDIKRTVAAPSVFIFPPSDEQLKSGTASVVCLLNNFYPREAKVQWK
VDNALQSGNSQESVTEQDSKDSTYSLSSTLTLSKADYEKHKVYACEVTHQ
GLSSPVTKSFNRGEC

[0709] 2. The 194A4 Fab/ASGR-1 CBD complex was concentrated to 13.1 mg/mL and crystallized with 0.2 M Sodium chloride, 0.1M MES pH6.0, 20% PEG2000 MME;
[0710] 3. The dataset was processed with XDS/CCP4;
[0711] 4. The 194A4 Fab/ASGR-1 CBD complex crystals grow in the P2₁2₁2₁ space group with unit cell dimensions a=52.23, b=66.40, c=177.75 Å with one complex molecule per asymmetric unit, and diffract to 2.6 Å resolution;
[0712] 5. The ASGR-1 CBD/194A4 Fab complex structure was solved by molecular replacement with the program Phaser; and
[0713] 6. The structure was improved with multiple rounds of model building with Coot³ and refinement with Phenix⁴, to a final R=20.1/R_{free}=24.6.
   H. Crystal Structure of ASGR-1 Carbohydrate Binding Domain (CBD) with 54E9

[0714] The present example presents the crystal structure of the ASGR-1 CBD bound to the Fab fragment of 54E9, determined to 2.6 Å resolution (the conditions of which are described above in section B of this Example). This structure, depicted in FIG. 35 and FIG. 36A and FIG. 36B, shows that when 54E9 binds to/interacts with ASGR-1, the CDR H3 loop of the Fab fragment appears to directly block the ligand (i.e., carbohydrate) from binding/interacting to ASGR-1 CBD. This demonstrates that the 54E9 Fab directly inhibits the ASGR-1 CBD/Ligand binding.

[0715] The depicted structure also allows one to identify specific core ASGR amino acid residues for the interaction interface of 54E9 with ASGR-1. This was defined as residues that are within 5 Å of the 54E9 protein. The core residues are as follows: W195, N209, N235, R237, P238, E239, Q240, D242, H257, T259, D260, D261, R263, N265, D267, R271, Y273 (SEQ ID NO:5).

[0716] The structures were also used to identify boundary ASGR-1 amino acid residues for the interaction interface with 54E9. These residues were ASGR-1 residues that were from 5-8 Å of the 54E9 protein. The boundary residues are as follows: Q198, Q202, P207, V208, F233, W236, D243, E253, F258, G262, W264, D266 (SEQ ID NO:5).

[0717] Specific core 54E9 amino acid residues of the interaction interface with ASGR-1 were defined as 54E9 residues that are within 5 Å of the ASGR-1 protein. The core 54E9 Heavy Chain residues include: N30, S31, Y32, S52, Y54, N55, K59, R98, D100, F101, W102, S103, G104, Y105, K107, D110; and the core 54E9 Light Chain residues include: none.

[0718] Boundary 54E9 amino acid residues of the interaction interface with ASGR-1 were defined as 54E9 residues that are 5-8 Å from the ASGR-1 protein. The boundary 54E9 Heavy Chain residues include: V2, Y27, T28, F29, G33, W50, A53, G56, N57, H99, Y106, G108; and the boundary 54E9 Light Chain residues include: N31, Y50, V51, Q54.

### Methods:

[0719] The same methods were followed as described above in part B of this example except for the following changes:
[0720] 1. The 54E9 Fab fragment was generated by cleaving the 54E9 mAb with caspase 3.

54E9 mAb Heavy Chain (SEQ ID NO: 32668):
QVQLVQSGAEVKKPGASVKVSCKASGYTFNSYGISWVRLAPGQGLEWMGW
ISAYNGNTKNAQKLQGRVTMTTDTSTSTAYMELRSLRSDDTAVYYCARHD
FWSGYYKGMDVWGQGTTVTVSSASTKGPSVFPLAPSSKSTSGGTAALGCL
VKDYFPEPVTVSWNSGALTSGVHTFPAVLQSSGLYSLSSVVTVPSSSLGT
QTYICNVNHKPSNTKVDKKVEPKSCGSDEVDGGDKTHTCPPCPAPELLGG
PSVFLFPPKPKDTLMISRTPEVTCVVVDVSHEDPEVKFNWYVDGVEVHNA
KTKPREEQYNSTYRVVSVLTVLHQDWLNGKEYKCKVSNKALPAPIEKTIS
KAKGQPREPQVYTLPPSREEMTKNQVSLTCLVKGFYPSDIAVEWESNGQP
ENNYKTTPPVLDSDGSFFLYSKLTVDKSRWQQGNVFSCSVMHEALHNHYT
QKSLSLSPGHHHHHH
54E9 mAb Light Chain (SEQ ID NO: 32669):
QSVLTQPPSASGTPGQRVTISCSGSNSNIGNNIVTWYQQLPGTAPKLLIY
VNDQRPSGVPDRFSGSKSGTSASLAISGLQSEDEADYYCAAWDDSLNGWV
FGGGTTLTVLGQPKAAPSVTLFPPSSEELQANKATLVCLISDFYPGAVTV
AWKADSSPVKAGVETTTPSKQSNNKYAASSYLSLTPEQWKSHRSYSCQVT
HEGSTVEKTVAPTECS
54E9 Fab Heavy Chain (Post-Cleavage)
(SEQ ID NO: 32670):
QVQLVQSGAEVKKPGASVKVSCKASGYTFNSYGISWVRLAPGQGLEWMGW
ISAYNGNTKNAQKLQGRVTMTTDTSTSTAYMELRSLRSDDTAVYYCARHD
FWSGYYKGMDVWGQGTTVTVSSASTKGPSVFPLAPSSKSTSGGTAALGCL
VKDYFPEPVTVSWNSGALTSGVHTFPAVLQSSGLYSLSSVVTVPSSSLGT
QTYICNVNHKPSNTKVDKKVEPKSCGSDEVD
54E9 Fab Light Chain (Post-Cleavage)
(SEQ ID NO: 32671):
QSVLTQPPSASGTPGQRVTISCSGSNSNIGNNIVTWYQQLPGTAPKLLIY
VNDQRPSGVPDRFSGSKSGTSASLAISGLQSEDEADYYCAAWDDSLNGWV
FGGGTTLTVLGQPKAAPSVTLFPPSSEELQANKATLVCLISDFYPGAVTV
AWKADSSPVKAGVETTTPSKQSNNKYAASSYLSLTPEQWKSHRSYSCQVT
HEGSTVEKTVAPTECS

[0721] 1. The 54E9 Fab/ASGR-1 CBD complex was concentrated to 14.8 mg/mL and crystallized with 0.2 M Magnesium Chloride hexahydrate, 20% PEG3350;
[0722] 2. The dataset was processed with XDS/CCP4;
[0723] 3. The 54E9 Fab/ASGR-1 CBD complex crystals grow in the I2 space group with unit cell dimensions a=64.66, b=41.65, c=224.59 Å and β=97.60° with one complex molecule per asymmetric unit, and diffract to 2.6 Å resolution;
[0724] 4. The 54E9 Fab/ASGR-1 CBD complex structure was solved by molecular replacement with the program Phaser; and
[0725] 5. The structure was improved with multiple rounds of model building with Coot³ and refinement with Phenix⁴, to a final R=19.1/R_{free}=25.9.
   I. Crystal Structure of ASGR-1 Carbohydrate Binding Domain (CBD) with 218G4

[0726] The present example presents the crystal structure of the ASGR-1 CBD bound to the Fab fragment of 218G4, determined to 2.4 Å resolution (the conditions of which are described above in section B of this Example). This structure, depicted in FIGS. 37 and 38, shows that when 218G4 binds to/interacts with ASGR-1, it impairs its ability to bind to ligand (e.g., carbohydrate). This demonstrates that the 218G4 Fab directly inhibits the ASGR-1 CBD/Ligand binding.

[0727] The depicted structure also allows one to identify specific core ASGR amino acid residues for the interaction interface of 218G4 with ASGR-1. This was defined as residues that are within 5 Å of the 218G4 protein. The core residues are as follows: R170, 5171, G172, A174, H204, I205, G206, P207, V208, N209, H257, D260, N265, D267, Q270, R271, P272, Y273, R274 (SEQ ID NO:5).

[0728] The structures were also used to identify boundary ASGR-1 amino acid residues for the interaction interface with 218G4. These residues were ASGR-1 residues that were from 5-8 Å of the 218G4 protein. The boundary residues are as follows: W167, F168, S169, K173, W175, D177, Y181, Q202, H203, T210, W211, R237, F258, T259, D261, D266, V268, C269, W275 (SEQ ID NO:5).

[0729] Specific core 218G4 amino acid residues of the interaction interface with ASGR-1 were defined as 218G4 residues that are within 5 Å of the ASGR-1 protein. The core 218G4 Heavy Chain residues include: Q1, V2, F27, S30, S31, Y32, Y53, D54, W99, Y100, Y101, Y102; and the core 218G4 Light Chain residues include: Y33, Y50, D51, N53, K54, S57.

[0730] Boundary 218G4 amino acid residues of the interaction interface with ASGR-1 were defined as 218G4 residues that are 5-8 Å from the ASGR-1 protein. The boundary 218G4 Heavy Chain residues include: G26, T28, F29, G33, W52, G55, R72, N74, N98, Y103, Y104, D107, V108; and the boundary 218G4 Light Chain residues include: V34, S52, R55, P56, G58, G65.

[0731] The coordinates for the ASGR-1 CBD/GalNAc crystal structure complex are presented in Table 10.3.

### Methods:

[0732] The same methods were followed as described above in part B of this example except for the following changes:
[0733] 1. The 218G4 Fab fragment was generated by cleaving the 218G4 mAb with caspase 3.

218G4 mAb Heavy Chain (SEQ ID NO: 32672):
QVQLVESGGGVVQPGRSLRLSCAASGFTFSSYGLHWVRQAPGKGLEWVAV
IWYDGSNKYYADSVKGRFTISRDNSKNTLYLQMNSLRVEDTAVYYCANWY
YYYYGMDVWGQGTTVTVSSASTKGPSVFPLAPSSKSTSGGTAALGCLVKD
YFPEPVTVSWNSGALTSGVHTFPAVLQSSGLYSLSSVVTVPSSSLGTQTY
ICNVNHKPSNTKVDKKVEPKSCGSDEVDGGDKTHTCPPCPAPELLGGPSV
FLFPPKPKDTLMISRTPEVTCVVVDVSHEDPEVKFNWYVDGVEVHNAKTK
PREEQYNSTYRVVSVLTVLHQDWLNGKEYKCKVSNKALPAPIEKTISKAK
GQPREPQVYTLPPSREEMTKNQVSLTCLVKGFYPSDIAVEWESNGQPENN
YKTTPPVLDSDGSFFLYSKLTVDKSRWQQGNVFSCSVMHEALHNHYTQKS
LSLSPGHHHHHH
218G4 mAb Light Chain (SEQ ID NO: 32673):
QSVLTQPPSVSAAPGQKVTISCSGSSSNIGNNYVSWYQQLPGTAPKLLLY
DSNKRPSGIPARFSGSKSGTSATLGITGLQTGDEADYYCGTWDSSLNTVV
FGGGTKLTVLSQPKAAPSVTLFPPSSEELQANKATLVCLISDFYPGAVTV
AWKADSSPVKAGVETTTPSKQSNNKYAASSYLSLTPEQWKSHRSYSCQVT
HEGSTVEKTVAPTECS
218G4 Fab Heavy Chain (Post-Cleavage)
(SEQ ID NO: 32674):
QVQLVESGGGVVQPGRSLRLSCAASGFTFSSYGLHWVRQAPGKGLEWVAV
IWYDGSNKYYADSVKGRFTISRDNSKNTLYLQMNSLRVEDTAVYYCANWY
YYYYGMDVWGQGTTVTVSSASTKGPSVFPLAPSSKSTSGGTAALGCLVKD
YFPEPVTVSWNSGALTSGVHTFPAVLQSSGLYSLSSVVTVPSSSLGTQTY
ICNVNHKPSNTKVDKKVEPKSCGSDEVD

### 218G4 Fab Light Chain (Post-Cleavage):

[0734] Same sequence as 218G4 mAb Light chain
[0735] 1. The 218G4 Fab/ASGR-1 CBD complex was concentrated to 16.4 mg/mL and crystallized with 0.1M Tris pH8 and 1.6M Lithium Sulfate;
[0736] 2. The dataset was collected from a single crystal on beamline ID22 at the Argonne National Laboratory and processed with XDS/CCP4;
[0737] 3. The 218G4 Fab/ASGR-1 CBD complex crystals grow in the C222 space group with unit cell dimensions a=137.24, b=245.26, c=118.91 Å with two complex molecules per asymmetric unit and diffract to 2.6 Å resolution;
[0738] 4. The 218G4 Fab/ASGR-1 CBD complex structure was solved by molecular replacement with the program Phaser; and
[0739] 5. The structure was improved with multiple rounds of model building with Coot³ and refinement with Phenix⁴, to a final R_{factor}=18.4/R_{free}=21.6.
   J. Crystal Structure of ASGR-1 Carbohydrate Binding Domain (CBD) with 176H4

[0740] The present example presents the crystal structure of the ASGR-1 CBD bound to the Fab fragment of 176H5, determined to 2.3 Å resolution (the conditions of which are described above in section B of this Example). This structure, depicted in FIGS. 39 and 40, show that when 176H4 binds to/interacts with ASGR-1, it appears to block ligand (e.g., carbohydrate) binding by ASGR-1 CBD, with the paratope of the 176H4 antibody located directly on top of the carbohydrate binding pocket. This demonstrates that the 174H4 Fab directly inhibits the ASGR-1 CBD/Ligand binding.

[0741] The depicted structure also allows one to identify specific core ASGR amino acid residues for the interaction interface of 176H4 with ASGR-1. This was defined as residues that are within 5 Å of the 176H4 protein. The core residues are as follows: R170, 5171, G172, K173, A174, D177, P207, V208, N209, R237, Q240, W244, G246, H247, G248, L249, E253, H257, T259, D260, N265, D267, Q270, R271, P272, Y273, R274 (SEQ ID NO:5).

[0742] The structures were also used to identify boundary ASGR-1 amino acid residues for the interaction interface with 176H4. These residues were ASGR-1 residues that were from 5-8 Å of the 176H4 protein. The boundary residues are as follows: S169, W175, A176, A178, T210, W211, W236, P238, E239, D242, Y245, G250, G251, F258, D261, G262, R263, W264, D266, V268, C269, W275 (SEQ ID NO:5).

[0743] Specific core 176H4 amino acid residues of the interaction interface with ASGR-1 were defined as 176H4 residues that are within 5 Å of the ASGR-1 protein. The core 176H4 Heavy Chain residues include: S31, W52, Y53, D54, Y57, Y59, D102, F103, W104; and the core 176H4 Light Chain residues include: H31, G32, D33, G34, K35, Y37, I97, Q98, 199.

[0744] Boundary 176H4 amino acid residues of the interaction interface with ASGR-1 were defined as 176H4 residues that are 5-8 Å from the ASGR-1 protein. The boundary 176H4 Heavy Chain residues include: T28, S30, Y32, G33, W47, I50, I51, S56, K58, Y60, K65, D99, H101, S105, G106; and the boundary 176H4 Light Chain residues include: 12, Q27, S28, L29, L30, T36, E55, Q95, S96, P100, W101.

### Methods:

[0745] The same methods were followed as described above in part B of this example except for the following changes:
[0746] 1. The 176H4 Fab fragment was generated by cleaving the 176H4 mAb with caspase 3.

176H4 mAb Heavy Chain (SEQ ID NO: 32675):
QVQLVESGGGVVQPGRSLRLSCAASGFTFSSYGMHWVRQAPGKGLEWVAI
IWYDGSYKYYADSVKGRFTISRDNSKNTLYLQMSSLRAEDTAVYYCARDA
HDFWSGYFAYWGQGALVTVSSASTKGPSVFPLAPSSKSTSGGTAALGCLV
KDYFPEPVTVSWNSGALTSGVHTFPAVLQSSGLYSLSSVVTVPSSSLGTQ
TYICNVNHKPSNTKVDKKVEPKSCGSDEVDGGDKTHTCPPCPAPELLGGP
SVFLFPPKPKDTLMISRTPEVTCVVVDVSHEDPEVKFNWYVDGVEVHNAK
TKPREEQYNSTYRVVSVLTVLHQDWLNGKEYKCKVSNKALPAPIEKTISK
AKGQPREPQVYTLPPSREEMTKNQVSLTCLVKGFYPSDIAVEWESNGQPE
NNYKTTPPVLDSDGSFFLYSKLTVDKSRWQQGNVFSCSVMHEALHNHYTQ
KSLSLSPGHHHHHH
176H4 mAb Light Chain (SEQ ID NO: 32676):
DIVMTQTPLSLSVTPGQPASISCKSSQSLLHGDGKTYLYWYLQKPGQPPQ
LLIYEVSNRFSGVPDRFSGSGSGTDFTLKISRVEAEDVGIYYCMQSIQIP
WTFGQGTRVEIKRTVAAPSVFIFPPSDEQLKSGTASVVCLLNNFYPREAK
VQWKVDNALQSGNSQESVTEQDSKDSTYSLSSTLTLSKADYEKHKVYACE
VTHQGLSSPVTKSFNRGEC
176H4 Fab Heavy Chain (Post-Cleavage)
(SEQ ID NO: 32677):
QVQLVESGGGVVQPGRSLRLSCAASGFTFSSYGMHWVRQAPGKGLEWVAI
IWYDGSYKYYADSVKGRFTISRDNSKNTLYLQMSSLRAEDTAVYYCARDA
HDFWSGYFAYWGQGALVTVSSASTKGPSVFPLAPSSKSTSGGTAALGCLV
KDYFPEPVTVSWNSGALTSGVHTFPAVLQSSGLYSLSSVVTVPSSSLGTQ
TYICNVNHKPSNTKVDKKVEPKSCGSDEVD
176H4 Fab Light Chain (Post-Cleavage):
Same sequence as 176H4 mAb Light chain

[0747] 1. The 176H4 Fab/ASGR-1 CBD complex was concentrated to 14.9 mg/mL and crystallized with 0.2 M Sodium Nitrate, 20% PEG3350;
[0748] 2. The dataset was collected from a single crystal on beamline ID22 at the Argonne National Laboratory and processed with XDS/CCP4;
[0749] 3. The 176H4 Fab/ASGR-1 CBD complex crystals grow in the 1121 space group with unit cell dimensions a=68.31, b=126.31, c=134.13 Å and β=101.6° with two complex molecules per asymmetric unit, and diffract to 2.3 Å resolution;
[0750] 4. The 176H4 Fab/ASGR-1 CBD complex structure was solved by molecular replacement with the program Phaser; and
[0751] 5. The structure was improved with multiple rounds of model building with Coot³ and refinement with Phenix⁴, to a final R_{factor}=17.9/R_{free}=23.3.
   K. Crystal Structure of ASGR-1 Carbohydrate Binding Domain (CBD) with 194C10

[0752] The present example presents the crystal structure of the ASGR-1 CBD bound to the Fab fragment of 194C10, determined to 2.6 Å resolution (the conditions of which are described above in section B of this Example). This structure, depicted in FIGS. 41 and 42, shows that when 194C10 binds to/interacts with ASGR-1, it likely induces a conformational rearrangement of the carbohydrate binding loop, impairing ASGR-1 CBD from binding to ligand (e.g., carbohydrate), as well as possibly blocking the ligand (e.g., carbohydrate) binding by ASGR-1 CBD, with the paratope of the 194C10 Fab. These data indicate that the 174H4 Fab may directly and/or indirectly inhibit the ASGR-1 CBD/Ligand binding.

[0753] The depicted structure also allows one to identify specific core ASGR amino acid residues for the interaction interface of 194C10 with ASGR-1. This was defined as residues that are within 5 Å of the 194C10 protein. The core residues are as follows: N157, R170, 5171, G172, Q202, H203, H204, I205, G206, P207, V208, N209, T210, D260, R271, P272, Y273, R274 (SEQ ID NO:5).

[0754] The structures were also used to identify boundary ASGR-1 amino acid residues for the interaction interface with 194C10. These residues were ASGR-1 residues that were from 5-8 Å of the 194C10 protein. The boundary residues are as follows: V156, W158, V159, H161, W167, F168, S169, K173, K199, F200, V201, W211, R237, H257, F258, T259, D261, D267, V268, Q270, W275 (SEQ ID NO:5).

[0755] Specific core 194C10 amino acid residues of the interaction interface with ASGR-1 were defined as 194C10 residues that are within 5 Å of the ASGR-1 protein. The core 194C10 Heavy Chain residues include: R30, Y31, Y33, E50, S54, S56, N58, D98, Y99, G100; and the core 194C10 Light Chain residues include: N30, S31, Y33, F50, S54, S68, Y92, E93, W97.

[0756] Boundary 194C10 amino acid residues of the interaction interface with ASGR-1 were defined as 194C10 residues that are 5-8 Å from the ASGR-1 protein. The boundary 194C10 Heavy Chain residues include: S28, Y32, W34, S35, W47, G49, 151, S52, H53, G55, T57, R97, A101, F102, D103; and the boundary 194C10 Light Chain residues include: S28, V29, G32, L47, G51, A52, S53, R55, A56, G69, Q90, Q91, S94, S95.

[0757] The coordinates for the ASGR-1 CBD/GalNAc crystal structure complex are presented in Table 10.4.

### Methods:

[0758] The same methods were followed as described above in part B of this example except for the following changes:
[0759] 1. 194C10 Fab fragment was generated by cleaving the 194C10 mAb with caspase 3.

194C10 mAb Heavy Chain (SEQ ID NO: 32678):
QVQLQQWGAGLLKPSETLSLTCAVSGGSFRYYYWSWIRQPPGKGLEWFGE
INHAGSTNYNPSLKSRVTISIDTSKNQFSLKLRSVTAADTAVYYCARDYG
AFDIWGQGTMVTVSSASTKGPSVFPLAPSSKSTSGGTAALGCLVKDYFPE
PVTVSWNSGALTSGVHTFPAVLQSSGLYSLSSVVTVPSSSLGTQTYICNV
NHKPSNTKVDKKVEPKSCG
194C10 mAb Light Chain (SEQ ID NO: 32679):
EIVLTQSPGTLSLSPGERATLSCRASPSVNSGYLAWYQQKPGQTPRLLIF
GASSRATGIPDRFSASGSGADFTLTISRLEPEDFAVYFCQQYESSPWTFG
QGTKVEIKRTVAAPSVFIFPPSDEQLKSGTASVVCLLNNFYPREAKVQWK
VDNALQSGNSQESVTEQDSKDSTYSLSSTLTLSKADYEKHKVYACEVTHQ
GLSSPVTKSFNRGEC*
194C10 Fab Heavy Chain (Post-Cleavage)
(SEQ ID NO: 32680):
QVQLQQWGAGLLKPSETLSLTCAVSGGSFRYYYWSWIRQPPGKGLEWFGE
INHAGSTNYNPSLKSRVTISIDTSKNQFSLKLRSVTAADTAVYYCARDYG
AFDIWGQGTMVTVSSASTKGPSVFPLAPSSKSTSGGTAALGCLVKDYFPE
PVTVSWNSGALTSGVHTFPAVLQSSGLYSLSSVVTVPSSSLGTQTYICNV
NHKPSNTKVDKKVEPKSCGSDEVD
194C10 Fab Light Chain (Post-Cleavage):
Same sequence as 194C10 mAb Light chain

[0760] 1. The 194C10 Fab/ASGR-1 CBD complex was concentrated to 13.6 mg/mL and crystallized with 0.2 M Ammonium Sulfate, 0.1 M Tris pH7.5, 20% PEG5000MME;
[0761] 2. The dataset was collected from a single crystal on beamline ID22 at the Argonne National Laboratory and processed with XDS/CCP4;
[0762] 3. The 194C10 Fab/ASGR-1 CBD complex crystals grow in the P12₁1 space group with unit cell dimensions a=65.62, b=130.44, c=85.93 Å and β=111.6° with two complex molecules per asymmetric unit, and diffract to 2.6 Å resolution;
[0763] 4. The 194C10 Fab/ASGR-1 CBD complex structure was solved by molecular replacement with the program Phaser; and
[0764] 5. The structure was improved with multiple rounds of model building with Coot³ and refinement with Phenix⁴, to a final R_{factor}=17.1/R_{free}=22.8.

### L. Interaction Between GalNAc, ASGR-1 and Certain Antibodies

[0765] The structure of the 72G9/ASGR-1 complex (Item G above) was overlaid on the ASGR-1/ligand (GalNac) structure (Item A above) and the result of this combination is depicted in FIG. 31B. The structure of the 54E9/ASGR-1 complex (Item I above) was also overlaid on the ASGR-1/ligand (GalNac) structure (Item A above) and the result of this combination is depicted in FIG. 35B. The structure of the 218G4/ASGR-1 complex (Item J above) was overlaid on the ASGR-1/ligand (GalNac) structure (Item A above) and the result of this combination is depicted in FIG. 38. The structure of the 176H4/ASGR-1 complex (Item K above) was overlaid on the ASGR-1/ligand (GalNac) structure (Item A above) and the result of this combination is depicted in FIG. 40. These figures demonstrate areas on ASGR-1 which can be usefully targeted to inhibit ASGR-1 interaction with a ligand, e.g., GalNac. These figures show that 72G9, 54E9, 218G4 and 176H4 directly interact with a subset of amino acid residues that are specifically involved in binding to the ligand (e.g., GalNAc).

[0766] As noted above, analysis of the crystal structures identified specific amino acids involved in the interaction between ASGR-1 and the partner proteins (the core and boundary regions of the interface on the ASGR-1 surface) and the spatial requirements of these partner proteins to interact with ASGR-1. The structures suggest ways to inhibit the interaction between ASGR-1 and a ligand, GalNAc. First, as noted above, binding an agent to ASGR-1 where it shares residues in common with the binding site of a ligand such as GalNAc would inhibit the interaction between ASGR-1 and the ligand. Second, an agent that binds outside of the residues in common can sterically interfere with the ligand that are either N- or C-terminal to the ligand to prevent the interaction between ASGR-1 and a ligand.

[0767] In some embodiments, the residues that are involved in both ligand binding and are close to the areas where the above noted antigen binding proteins bind are especially useful for manipulating ASGR-1binding to ligand. For example, amino acid residues from interfaces in common in both the core region and boundary region for the different binding partners are listed in Table 10.5 below.

TABLE 10.5

| Parameters | Amino acid position(s) |
|---|---|
| 72G9/GalNAc both under 5 Å | Q240, D242, W244 |
| 72G9 under 5 Å/GalNAc 5-8 Å | E239, P241, D243, Y245, G246, |
| | G252 |
| 72G9 at 5-8 Å/GalNAc under 5 Å | R237, E253 |
| 72G9/GalNAc both at 5-8 Å | P238, H247, C255, V268 |
| 54E9/GalNAc both under 5 Å | N209, R237, Q240, D242, H257, |
| | T259, N265, D267, Y273 |
| 54E9 under 5 Å/GalNAc 5-8 Å | P238, E239, D260, R263, R271 |
| 54E9 at 5-8 Å/GalNAc under 5 Å | E253, D266 |
| 54E9/GalNAc both at 5-8 Å | D243, F258, W264 |
| 218G4/GalNAc both under 5 Å | N209, H257, N265, D267, Y273 |
| 218G4 under 5 Å/GalNAc 5-8 Å | D260, R271 |
| 218G4 at 5-8 Å/GalNAc under 5 Å | R237, T259, D266 |
| 218G4/GalNAc both at 5-8 Å | F258, V268 |
| 176H4/GalNAc both under 5 Å | N209, R237, Q240, W244, E253, |
| | H257, T259, N265, D267, Y273 |
| 176H4 under 5 Å/GalNAc 5-8 Å | G246, H247, D260, R271 |
| 176H4 at 5-8 Å/GalNAc under 5 Å | D266 |
| 176H4/GalNAc both at 5-8 Å | P238, E239, Y245, F258, R263, |
| | W264, V268 |

[0768] As will be appreciated by one of skill in the art, in some embodiments, the antigen binding proteins bind to and/or block at least one of the above noted residues.

[0769] Antigen binding proteins and molecules that interact with the relevant areas or residues of the structure of ASGR-1 (including those areas or residues within 15, 15-8, 8, 8-5, 5, or fewer angstroms from where ligands, such as GalNAc, or the antibodies, interact with ASGR-1) depicted in the figures (e.g., FIGS. 19-42) and/or their corresponding positions on the structures from the coordinates are also contemplated.

### Example 11: Determination of the Binding Affinity of ASGR-1 Specific Antibodies

[0770] To quantitate the binding affinity of specific antibodies for ASGR-1 (either purified from hybridoma supernatants or made recombinantly), association and dissociation rates can be measured using a ForteBio Octet instrument. The antibodies were covalently coupled to AR2G tips to load levels close to 2 nm and then bound to the soluble human ASGR-1 carbohydrate binding domain (CBD; amino acid residues 154-281; N-terminal 6×His tag) in a 3-fold serial dilution series starting typically at 30 nM with either 3-point or 6-point dilution series. Experimental kinetic results were globally fit to a 1:1 binding model in order to determine the association and dissociation rate constants as well as the equilibrium dissociation constant. Association and dissociation times were chosen to ensure that curvature was present during association curves and measured dissociation levels dropped at least 5% from starting levels. All Octet buffers contained 10 mM Tris (pH7.5), 150 mM NaCl, 1 mM CaCl₂), 0.10 mg/ml BSA and 0.13% Triton X-100. Octet assays were run at 27° C. Because this assay only measures binding to the ASGR-1 CBD, antibodies that recognize epitopes partially or entirely outside the CBD and/or recognize ASGR-1 in the context of a native ASGR complex, for example, as could occur on cell membranes, may not score as positive in this assay. Data provided for representative antibodies in TABLE 11.1.

TABLE 11.1

| | Octet |
|---|---|
| | binding |
| Ab name | K_{D} (nM) |
| 4H6 | 4.8 |
| 4B1 | >30 |
| 4A2 | 0.06 |
| 5E5 | 7.6 |
| 6G7 | 2.0 |
| 7G4 | 0.9 |
| 7F4 | 1.2 |
| 7E11 | 1.6 |
| 12D2 | >30 |
| 22G5 | 1.4 |
| 25A4 | 0.03 |
| 26C4 | 0.4 |
| 29H8 | 1.0 |
| 48B12 | 0.3 |
| 54E9 | >30 |
| 56E5 | 0.5 |
| 72G9 | 0.5 |
| 75G3 | 1.0 |
| 176H4 | 0.8 |
| 184E7 | 0.3 |
| 190F8 | 0.6 |
| 191G1 | 2.4 |
| 191G10 | 0.5 |
| 193E7 | 3.5 |
| 194A4 | 0.7 |
| 194C1 | 1.3 |
| 194C10 | 4 |
| 197G3 | 0.8 |
| 198D2 | >30 |
| 198G3 | 0.04 |
| 202A3 | >30 |
| 218G4 | 2.6 |
| 4A2.001 | 0.06 |
| 4A2.001.003 | 0.04 |
| 4A2.001.004 | 0.03 |
| 4A2.001.005 | 0.02 |
| 4A2.001.010 | 0.04 |
| 4A2.001.012 | 0.04 |
| 25A4.001 | 0.06 |
| 25A4.001.021 | 0.04 |
| 4H6.009 | 0.28 |
| 7E11.001 | 0.71 |
| 7E11.001.005 | 0.42 |
| 7E11.001.007 | 0.62 |
| 5E5.016 | 1.46 |
| 5E5.019 | 1.80 |
| 5E5.005 | 2.00 |

### Example 12: CHO—S:huASGR-1 Cell Binding Assay

[0771] CHO—S stable high-expressing cell line were developed for both human ASGR-1 as well as mouse ASGR-1. A typical 384 well plate multiplex flow cytometry-based cell binding method is described as followed: Parental CHO—S cells and CHO—S:huASGR-1 cells were respectively labeled using a CellTrace CFSE Cell Proliferation Kit (ThermoFisher Catalog #C34554) and CellTrace Violet Cell Proliferation Kit (ThermoFisher Catalog #C34557) CHO—S:muASGR-1 were not labeled. 20 ul of cells at 4° C. were added to duplicate wells of the 384 well plate. The cells were equally mixed from all three cell lines (30K cells/well). Then 20 ul of the ASGR-1 antibodies (either purified from hybridoma supernatants or made recombinantly) were added in an 11-point dose response using a 1:2 fold serial dilution starting at 100 nM. The cells and antibodies were incubated for 30 min at 4C and then spun down and washed twice with FACS buffer containing 1 mM CaCl₂). 30 ul of anti-hulgG-APC secondary antibodies were then added at a 1:1000 dilution) for 30 min at 4° C. and then washed once with the same buffer. 60 ul of PI (1:1000) was added and then the cells were read by a core flow cytometry facility. The cells were gated first for live cells, then for single cells and finally for the cell dyes to separate the mixed cells into the three different cell populations. Histograms of signal vs count representing the binding profile of each antibody at each antibody concentration were automatically analyzed for the median of the binding signal and then a binding graph was made with log 10 antibody concentration in nM on the X axis with standard deviation of the median signals from the duplicate wells on the Y-axis. The binding curves were fit with a standard four parameter sigmoidal binding curve and EC50's reported for all graphs with full curves. Data provided for representative antibodies in TABLE 12.1.

TABLE 12.1

| | Cell binding |
|---|---|
| Ab name | EC50 (nM) |
| 4H6 | 1.70 |
| 4B1 | 4.1 |
| 4A2 | 0.82 |
| 4A2.001 | 1.8 |
| 5E5 | 3.80 |
| 6G7 | 0.6 |
| 7G4 | 0.69 |
| 7F4 | 5.40 |
| 7E11 | 1.40 |
| 7E11.001 | 3.2 |
| 12D2 | 3.2 |
| 22G5 | 7.2 |
| 25A4 | 1.6 |
| 25A4.001 | 1.2 |
| 26C4 | 11 |
| 29H8 | 1.9 |
| 48B12 | 38 |
| 54E9 | 5 |
| 56E5 | 1.1 |
| 72G9 | 0.41 |
| 75G3 | 1 |
| 176H4 | 1 |
| 184E7 | 1 |
| 190F8 | 9 |
| 191G1 | 0.16 |
| 191G10 | 0.31 |
| 193E7 | 0.13 |
| 194A4 | 25 |
| 194C1 | 0.11 |
| 194C10 | 0.56 |
| 197G3 | 0.25 |
| 198D2 | 0.14 |
| 198G3 | 0.21 |
| 202A3 | 0.8 |
| 218G4 | 2.2 |

[0772] For human ASGR-2, CHO—S stable cells expressing C-terminal His-tagged human ASGR-2 were resuspended in cold flow buffer (10 mM Tris, pH 7.5, 137 mM NaCl, 1 mM CaCl₂) and 2% fetal bovine serum) and 1.5×10e6 cells per well were added to a 96-well, v-bottom plate in a volume of 80 ul. 80 ul of antibody at 400 nM was then added to each well. After incubation on ice for 30 min, the cells were centrifuged at 1400 rpm for 3 min and then washed twice in cold flow buffer. The cells were then resuspended in 120 ul of anti-human IgG-APC (diluted 1:1000 in flow buffer) and incubated on ice for 30 minutes, centrifuged and washed twice as before, and resuspended in 200 ul cold flow buffer, and then analyzed on a BD-LSR II flow cytometer. Data provided for antibody 7F4 in FIG. 43.

### Example 13: CHO—S:huASGR-1 Ligand Blocking Assay

[0773] All ASGR-1 antibodies that bound either human or mouse ASGR-1 stable CHO—S cells were then tested for ligand blocking using both a protein ligand and a synthetic sugar ligand. The method in brief is as follows: first, 20 ul of either CHO-Shuman or mouse ASGR-1 cells were added to wells of a 384 well plate (30k cells/well) followed by spin and discarding the supernatant. Second, 10 ul of the antibodies (either purified from hybridoma supernatants or made recombinantly) were added in duplicate to the cells in a dilution series (200 nM top concentration, 1:2 serial dilution, 11 point curve) and were incubated for 30 min at 4C. Third, 10 ul of the minimally biotinylated ligands were added at 2× their binding EC05, so that the wells contained a final 20 ul volume with Ab starting at 100 nM and the ligand at their EC50. After 30 min incubation at 4° C., the plate was spun and washed twice with FACS buffer+1 mM CaCl2) followed by the detection streptavidin-AF647 at 1:1000 dilution. After 30 min at 4° C., the cells were spun and washed once and then 60 ul PI added at 1:1000 dilution and the plates delivered to a core flow cytometry facility. The plates were read and processed similarly to the cell binding method except the signal now represents an inhibition curve and typically decreases a function of increasing antibody concentration. IC50 nM potency and % Inhibition were reported. The desialylated, biotinylated asialofetuin (see Example 9A) and biotinylated GalNAc-PAA (Fisher #NC9024754) were used as ligands with measured binding EC50s of 10.7 and 5.4 nM. Differences in the ability of antibodies to block these two ligands could occur as a result of differences in, for example, avidity stemming from differences in the number and/or orientation of the ASGR binding terminal sugar residues of each ligand, steric hindrance between antibody and each ligand, and/or changes in the conformation of ASGR induced by antibody binding that selectively alters the binding of each ligand. Data provided for representative antibodies in TABLE 13.1.

TABLE 13.1
Ligand Blocking

| | bn-GalNAc-PAA | | bn-asialofetuin | |
|---|---|---|---|---|
| Ab name | IC50 (nM) | % Inhibition | IC50 (nM) | % Inhibition |
| 4H6 | 8.1 | 20% | 12 | 85% |
| 4B1 | 42 | 36% | 64 | 75% |
| 4A2 | 54 | 70% | 11 | 99% |
| 4A2.001 | 28 | 75 | 12 | 99 |
| 5E5 | >200 | 0% | 16 | 95% |
| 6G7 | >200 | 0% | 11 | 99% |
| 7G4 | 20 | −30% | 14 | 96% |
| 7F4 | 0.24 | 30% | 2.6 | 99% |
| 7E11 | 40 | 37% | 13 | 99% |
| 7E11.001 | >100 | 50 | 13 | 99 |
| 12D2 | 2.1 | 10% | 10 | 20% |
| 22G5 | 11 | 93% | 3.4 | 99% |
| 25A4 | 40 | 77% | 11 | 99% |
| 25A4.001 | 31 | 68 | 8.1 | 99 |
| 26C4 | 36 | 83% | 6.6 | 99% |
| 29H8 | 17 | 99% | 7 | 99% |
| 48B12 | 86 | 94% | 19 | 99% |
| 54E9 | 100 | 19% | 50 | 75% |
| 56E5 | 45 | 99% | 23 | 99% |
| 72G9 | 24 | 20% | 53 | 20% |
| 75G3 | 115 | 99% | 29 | 99% |
| 176H4 | 73 | 79% | 59 | 99% |
| 184E7 | 10 | 99% | 23 | 99% |
| 190F8 | 44 | 83% | 34 | 98% |
| 191G1 | 62 | 78% | 24 | 99% |
| 191G10 | 56 | 99% | 27 | 99% |
| 193E7 | 33 | 60% | 30 | 99% |
| 194A4 | 48 | 60% | 57 | 99% |
| 194C1 | 72 | 89% | 34 | 99% |
| 194C10 | 87 | 99% | 30 | 99% |
| 197G3 | 15 | 74% | 29 | 90% |
| 198D2 | 55 | 99% | 22 | 99% |
| 198G3 | 5 | 81% | 26 | 99% |
| 202A3 | 32 | 96% | 16 | 98% |
| 218G4 | 71 | 99% | 28 | 99% |

### Example 14: ASGR-1 Specific Antibody Optimization (Chemical Degradation Site Engineering)

[0774] Variable domain sequence motifs having a high risk of sidechain degradation were engineered out of ASGR-1 specific antibodies. See for example, ASGR-1 specific antibody sequences in Tables 6 and 7.

[0775] Certain high risk motifs included: (1) CDR ‘NG’ and ‘NT’ sequences prone to asparagine deamidation, (2) CDR ‘DG,’ ‘DH’, ‘DS,’ and ‘DT’ sequences prone to aspartic acid isomerization, (3) and CDR3 tryptophans prone to oxidation. Bioinformatics and structural analyses were used to identify substitutions likely to retain binding affinity to the ASGR-1 CBD. Typically, substitution identities were derived from germline sequences or from sequence-related ASGR-1 CBD-binding mAbs. These substitutions were then modeled into a homology model of the unbound mAb using the software MOE (CCG)¹ to predict structural fitness. For cases in which the bioinformatics or structural analyses did not provide a clear substitution identity, residue types chemically similar to the parent residue were identified.

[0776] Variable domain sequence motifs violating multiple sequence alignment-based pair-wise residue covariance trends² were also engineered out of ASGR-1 specific antibodies. Substitution identities for covariance violators were identified using a hybrid bioinformatics/structural approach similar to that used to remediate degradation sites.
[0777] 1. Molecular Operating Environment (MOE), 2013.08; Chemical Computing Group, Inc., 1010 Sherbooke St. West, Suit #910, Montreal, QC, Canada, H3A 2R7, 2016.
[0778] 2. Kannan, G. Method of Correlated Mutational Analysis to Improve Therapeutic Antibodies. US Patent Application PCT/US2012/028596 filed Mar. 9, 2012.

### Example 15: Epitope Mapping Using Peptide Arrays

[0779] Custom peptide microarrays were obtained commercially (PEPperPRINT GmbH). For epitope mapping using linear arrays, the antigen (ASGR-1) was translated into 291 different overlapping 15 amino acid (aa) peptides printed in duplicate (582 peptide spots per array copy). For epitope mapping using cyclized arrays, the antigen (ASGR-1) was translated into 888 different overlapping 7 aa, 10 aa and 13 aa peptides printed in duplicate (1,776 peptide spots per array copy). Peptide cyclization was accomplished using N- to C-terminal thioether formation with and without an additional scaffold for varying conformational restriction. Each PEPperCHIP® Peptide array is framed by Flag (DYKDDDDKAS) and HA (YPYDVPDYAG) control peptides. Assay buffer was PBS-T (PBS, pH7.4, 0.05% Tween 20), blocking buffer was Rockland Blocking Buffer (Rockland Immunochemicals), staining buffer was assay buffer+10% Rockland Blocking buffer. Secondary antibody was goat anti-human IRDye680LT (Li-Cor). Control antibodies were anti-FLAG M2 DyLight800, anti-HA DyLight680. Arrays were scanned on Li-Cor Odyssey with an offset of 0.65 mm, 21 um resolution.

[0780] Array staining and detection was per manufacturer's instructions. Briefly, arrays were pre-stained with secondary antibodies for 30 minutes, washed and scanned to detect background binding. Arrays were then stained with commercially available primary antibodies overnight, followed by washing and 30 minute incubation with labeled secondary antibodies. Arrays were scanned to detect binding of anti-ASGR-1 antibodies. Finally, arrays were stained with control antibodies for 45 minutes prior to washing and scanning to detect control peptides.

[0781] Antigen binding proteins with desired binding properties can be identified using this assay.

### Example 16: In Vivo Studies

[0782] RNAi constructs that reduce expression of ASGR-1 and/or ASGR-2 and/or antigen binding proteins, such as monoclonal antibodies, that inhibit ligand binding to ASGR, ASGR-1, and/or ASGR-2 in vitro can be administered in vivo to a relevant animal model and levels and/or activity of endogenous blood proteins like alkaline phosphatase measured. In addition, the clearance of exogenously administered ASGR ligands (for example asialoglycoproteins, certain non-asialylated proteins, synthetic ligands, etc.) can be inhibited by pre-treatment with RNAi or a co- or pre-administered antibody.

[0783] Additionally, physiologic effects of the antigen binding proteins or RNAi can be evaluated in relevant animal models of cardiovascular disease using readouts including blood pressure, primary and secondary hemostasis, heart function and morphology, endothelial function, LDL cholesterol levels, non-HDL cholesterol levels, inflammation, and atherosclerosis.

### Example 17: Effect of ASGR-1 Antibody 4A2 on Serum LDL Cholesterol and Alkaline Phosphatase in Normal and Obese Cynomolgus Monkeys

[0784] The purpose of the study was to evaluate the LDL cholesterol (LDL-C)-lowering activity of anti-ASGR inhibitors. In general, cynomolgus monkeys do not have high levels of total cholesterol, HDL-C or LDL-C. Therefore, both normal and dyslipidemic models were utilized in this example. In the dyslipidemic model, monkeys were selected if their LDL levels were at least 100 mg/dL (normal is 40-60 mg/dL), and if there body mass index was over 41 kg/m² (normal is below 35 kg/m²). Animals that met these criteria on standard diet were classified as spontaneously obese dyslipidemic. Other animals were fed a high-fat diet (HFD; 4.15 kcal/gm, 32% fat) prior to inclusion in the study and were classified as HFD obese dyslipidemic.

[0785] Naive male spontaneous obese dyslipidemic and HFD obese dyslipidemic cynomolgus monkeys were given a single subcutaneous injection of anti-ASGR-1 antibody 4A2.001 (IgGlz-SEFL2) (10 mg/kg in 10 mM sodium acetate, 9% sucrose, 0.01% polysorbate-80, pH 5.2). Naive male and female normal cynomolgus monkeys were given a single intravenous injection of anti-ASGR-1 antibody 4A2.001 (IgGlz-SEFL2) (100 mg/kg in 10 mM sodium acetate, 9% sucrose, 0.01% polysorbate-80, pH 5.2). Blood was collected from overnight fasted animals to monitor LDL-C and alkaline phosphatase (ALP) levels post-antibody injection. Blood was collected 70, 118, 190 and 268 hours post-injection (dyslipidemic models) and at 0.05, 0.25, 0.5, 1, 4, 8, 24, 48, 72, 168, 240, 336, 504, 672, 840, 1008, and 1176 hours post-injection (normal). LDL-C decrease (%) and ALP increase (%) were the main endpoints of the study and were measured on Roche C311 and C501 chemistry analyzers. Baseline levels of LDL-C and ALP were established from blood collected 7 days prior to antibody administration.

Dyslipidemic model:
[0786] Species: Macaca fascicularis
[0787] Weight Range: >7.0 kg
[0788] BMI Range: >41 kg/m²
[0789] Age range: 12-17 years
[0790] Time on HFD: 6 months
[0791] Source: KBI monkey colony
[0792] Number and Sex: 3 male spontaneous obese monkeys and 3 male HFD induced obese monkeys (BMI>41, LDL>80 mg/dL)). Animals were selected from a larger pool based on similar baseline LDL and ALP levels
   Normal model:
[0793] Species: Macaca fascicularis
[0794] Weight Range: 2.6-4.2 kg
[0795] Age range: 2.5-4 years
[0796] Number and Sex: 2 male and 1 female fed normal laboratory diet
   Data for this study is provided in FIG. 44 (dyslipidemic model) and FIG. 45 (normal model).

### Example 18: Proteomic Profiling of Serum Samples from Human ASGR1 Carriers and Controls

### Introduction

[0797] As described above in Example 1, ASGR1 loss-of-function (LOF) was found to be associated with a beneficial phenotype (protected from coronary artery disease, lower LDL cholesterol and longer life span) in human¹. To understand the mechanism of action underlying this association and find potential biomarkers, proteomic measurement of human serum samples were performed and compared to changes in circulating protein levels between the ASGR1 LOF variant carriers and controls.

### Materials and Methods

### Sample Collection and Proteomic Profiling

[0798] A total of 333 human serum samples were acquired from the deCODE Icelandic population study, including 100 ASGR1 del12 heterozygous carriers (cases group) and 233 non-carriers (controls group). The Case/Control Groups are well matched by sex, age and collection time/freezer storage time. 150 ul serum samples were shipped to SomaLogic Inc, where 1310 proteins were measured by the SOMAscan Assay 1.3k. The 1310 proteins were SOMAmer® Reagents Generated to Human Proteins, the complete list of tested proteins are summarized in the SOMAscan Assay 1.3K Content, Rev 1 (Effective: Sep. 21, 2015) which is incorporated by reference herein in its entirety.

[0799] The SOMAscan assay measured serum protein concentration using a Slow Off-rate Modified DNA Aptamer (SOMAmer)-based capture array². Each of the 1310 proteins is bond by its respective fluorescently labeled SOMAmer in the assay and their concentrations are reflected by the respective SOMAmer's relative fluorescence units (RFU).

### Data Analysis

[0800] 2 Samples were removed due to low volume that did not meet Somascan requirements and 13 samples were removed because they had been treated with EDTA. The RFU data of each measured protein was log transformed, then centered and scaled to calculate standardized RFU values for this protein. Principle components (PCs) were derived from 1310 standardized RFU values by principle components analysis. An outlier removal based on Hotellings T2 distribution of PC1 and PC2 was applied and excluded another 8 samples from further analysis.

[0801] After QC, the remaining 93 ASGR1 Del12 heterozygous Carriers (cases group) and 217 samples without the Del12 allele (controls group) and their standardized RFU values of each protein were analyzed by a linear model adjusting for Age, Sex, FreezerTime and the first 10 PCs,

$$Yi = β0 + β 1 Gi + β 2 AGEi + β 3 SEXi + β 4 FTi + β 5 PC 1 i + ⋯ + β 15 PC 10 i + ε i$$

where Yi is the standardized RFU value for the i^{th} sample for a particular protein, Gi is the Del12 genotype the i^{th} sample and β1 capture the estimates of the mean difference between human samples with Del12 and without Del12. Since 1310 tests were performed for the proteins on Somascan platform, we calculated the significant threshold by Bonferroni method (0.05/1310=3.82×10⁻⁵) assuming these are independent tests. However, the Bonferroni correction is likely too stringent because proteins are often correlated with each other therefore these tests are not independent. Thus a realistic threshold of significance (5.19×10⁻⁵) was obtained by performing 100,000 permutations using the method by Sham and Purcell 20143.

### Results and Discussion

[0802] Using the permutation threshold, 41 Proteins were identified to have significant serum levels between human ASGR1 del12 carriers and non-carriers (P<5.19×10⁻⁵). Of those, 26 show significant increase in the carriers (Table 18.1) and 15 decrease significantly in the carriers (Table 18.2). These changes are likely to mediate the beneficial effects resulting from ASGR1 loss of function seen in the del12 carriers. The levels of these proteins in blood can serve as biomarkers for ASGR1 loss of function and be used to assess ASGR1-targeted therapy during drug development.

TABLE 18.1
Proteins with significant increase in serum of ASGR1 del12 carriers.

| | Estimate | | |
|---|---|---|---|
| p value | (SD) | Gene | Full Name |
| 3.71E−54 | 1.34 | TNFSF8 | Tumor necrosis factor ligand |
| | | | superfamily member 8 |
| 1.33E−52 | 1.45 | CD163 | Scavenger receptor cysteine-rich |
| | | | type 1 protein M130 |
| 2.07E−25 | 1.09 | CSF1R | Macrophage colony-stimulating |
| | | | factor 1 receptor |
| 1.44E−24 | 1.16 | LYVE1 | Lymphatic vessel endothelial |
| | | | hyaluronic acid receptor 1 |
| 1.03E−22 | 0.65 | IL6ST | Interleukin-6 receptor subunit beta |
| 4.56E−15 | 0.67 | IL18BP | Interleukin-18-binding protein |
| 1.16E−12 | 0.74 | CD300C | CMRF35-like molecule 6 |
| 2.47E−12 | 0.59 | TYRO3 | Tyrosine-protein kinase receptor |
| | | | TYRO3 |
| 8.85E−12 | 0.80 | LRP8 | Low-density lipoprotein receptor- |
| | | | related protein 8 |
| 1.76E−09 | 0.66 | IL1RL1 | Interleukin-1 receptor-like 1 |
| 2.62E−09 | 0.61 | ISLR2 | Immunoglobulin superfamily |
| | | | containing leucine-rich |
| | | | repeat protein 2 |
| 4.01E−09 | 0.55 | SIGLEC7 | Sialic acid-binding Ig-like lectin 7 |
| 4.47E−09 | 0.48 | NRXN3 | Neurexin-3-beta |
| 1.03E−07 | 0.58 | PLAU | Urokinase-type plasminogen activator |
| 2.96E−07 | 0.37 | CD55 | Complement decay-accelerating factor |
| 8.27E−07 | 0.53 | CD48 | CD48 antigen |
| 1.22E−06 | 0.31 | TNFRSF21 | Tumor necrosis factor receptor |
| | | | superfamily member 21 |
| 1.62E−06 | 0.36 | MRC2 | C-type mannose receptor 2 |
| 3.82E−06 | 0.57 | KLK13 | Kallikrein-13 |
| 4.95E−06 | 0.33 | IGF1R | Insulin-like growth factor 1 receptor |
| 1.46E−05 | 0.45 | ANGPT2 | Angiopoietin-2 |
| 2.02E−05 | 0.39 | CNTN4 | Contactin-4 |
| 2.57E−05 | 0.47 | FCGR3B | Low affinity immunoglobulin |
| | | | gamma Fc region receptor III-B |
| 2.93E−05 | 0.38 | C1S | Complement C1s subcomponent |
| 3.92E−05 | 0.40 | LY9 | T-lymphocyte surface antigen Ly-9 |
| 4.48E−05 | 0.46 | CD200R1 | Cell surface glycoprotein CD200 |
| | | | receptor 1 |

TABLE 18.2
Proteins with significant decrease in serum of ASGR1 del12 carriers.

| | Estimate | | |
|---|---|---|---|
| p value | (SD) | Gene | Target Full Name |
| 1.08E−09 | −0.52 | CD93 | Complement component C1q receptor |
| 6.32E−09 | −0.50 | IDS | Iduronate 2-sulfatase |
| 1.56E−07 | −0.34 | RGMB | RGM domain family member B |
| 2.91E−07 | −0.44 | TGFBI | Transforming growth factor-beta- |
| | | | induced protein ig-h3 |
| 5.56E−07 | −0.48 | LUM | Lumican |
| 6.67E−07 | −0.46 | MMP2 | 72 kDa type IV collagenase |
| 1.36E−06 | −0.38 | FLRT2 | Leucine-rich repeat transmembrane |
| | | | protein FLRT2 |
| 2.18E−06 | −0.48 | AHSG | Alpha-2-HS-glycoprotein |
| 2.44E−06 | −0.37 | CSH1 | Chorionic somatomammotropin |
| | | CSH2 | hormone |
| 3.16E−06 | −0.54 | ESM1 | Endothelial cell-specific molecule 1 |
| 1.36E−05 | −0.52 | AFM | Afamin |
| 1.67E−05 | −0.48 | TNFRSF17 | Tumor necrosis factor receptor |
| | | | superfamily member 17 |
| 2.68E−05 | −0.46 | OMD | Osteomodulin |
| 4.69E−05 | −0.23 | GDI2 | Rab GDP dissociation inhibitor beta |
| 5.09E−05 | −0.45 | SPOCK2 | Testican-2 |

### REFERENCES

[0803] 1 See also, Nioi, P. et al. Variant ASGR1 Associated with a Reduced Risk of Coronary Artery Disease. The New England journal of medicine 374, 2131-2141, doi:10.1056/NEJMoa1508419 (2016).
[0804] 2 Gold, L. et al. Aptamer-based multiplexed proteomic technology for biomarker discovery. PLoS One 5, e15004, doi:10.1371/journal.pone.0015004 (2010).
[0805] 3 Sham, P. C. & Purcell, S. M. Statistical power and significance testing in large-scale genetic studies. Nature reviews. Genetics 15, 335-346, doi:10.1038/nrg3706 (2014).

### Example 19: Proteomic Profiling of Serum Samples from ASGR1 Cyno PK-PD Study

### Introduction

[0806] As described above in Example 1, ASGR1 loss-of-function (LOF) was found to be associated with a beneficial phenotype (protected from coronary artery disease, lower LDL cholesterol and longer life span) in human¹. Certain ASGR-1 antigen binding proteins disclosed herein were found to mimic the LOF effects, and can be useful in the treatment of coronary artery disease. In brief, cynomolgus monkeys were treated with certain ASGR-1 specific, ligand blocking antibodies in order to study the PK-PD profile of these antibodies. Moreover, a dose-dependent elevation of alkaline phosphatase (ALP) levels was observed in the Ab-treated cynos, which resembles the ALP elevation seen in human ASGR1 LOF carriers. In addition to ALP, proteomic profiling in human serum identified 41 proteins that potentially underlie the beneficial effects caused by ASGR1 LOF as described above in Example 18. To compare effects of anti-ASGR1 antibody treatment with the human ASGR1 LOF and identify comparable signatures in cynomolgus monkey, proteomic measurement of the serum samples from this study was conducted. The list of proteins with altered levels in the antibody-treated animals is compared to the ones identified in human LOF carriers.

### Materials and Methods

Sample selection and Proteomic Profiling

[0807] 6 animal groups with 3 animals in each group were selected for proteomic profiling. The 6 groups include 5 antibody-treated groups (mAb1/25A4, mAb2/4A2, mAb3/7E11, mAb4/5E5 and mAb8/4H6) and a vehicle control group (mAb6). The animals were dosed once at 100 mg/kg. Serum samples from time points 0, 168, 336, 504, 672 and 1176 hours were collected for each animal (Table 19.1 & 19.2). The only exception is group mAb8/4H6, where time point 1008 hour is used instead of 1176 hour. 120 ul serum samples were shipped to SomaLogic Inc, where 1310 proteins (see table 18.0) were measured by the SOMAscan Assay 1.3k.

[0808] The SOMAscan assay measures serum protein concentration using a Slow Off-rate Modified DNA Aptamer (SOMAmer)-based capture array². Each of the 1310 proteins is bond by its respective fluorescently labeled SOMAmer in the assay and their concentrations are reflected by the respective SOMAmer's relative fluorescence units (RFU).

TABLE 19.1
Serum sample selection

| | | Time points | | | | | |
|---|---|---|---|---|---|---|---|
| | | D 0 | D 8 | D 15 | D 22 | D 29 | D 50 |
| Animal | Animal | 0 | 168 | 336 | 504 | 672 | 1176 |
| group | Number | hr | hr | hr | hr | hr | hr |
| 25A4 | 701, 702, | ✓ | ✓ | ✓ | ✓ | ✓ | ✓ |
| | 703 | | | | | | |
| 4A2 | 704, 705, | ✓ | ✓ | ✓ | ✓ | ✓ | ✓ |
| | 706 | | | | | | |
| 7E11 | 707, 708, | ✓ | ✓ | ✓ | ✓ | ✓ | ✓ |
| | 711 | | | | | | |
| 5E5 | 709, 710, | ✓ | ✓ | ✓ | ✓ | ✓ | ✓ |
| | 712 | | | | | | |
| SEFL2- | 716, 717, | ✓ | ✓ | ✓ | ✓ | ✓ | ✓ |
| control | 718 | | | | | | |
| 4H6 | 204, 205, | ✓ | ✓ | ✓ | ✓ | ✓ | ✓* |
| | 206 | | | | | | |

*4H6 was collected at D 43 (1008 hr).

TABLE 19.2
List of all sample groups by treatment and time points.

| | Treatment | | # of | |
|---|---|---|---|---|
| | (e.g., drug, | Time | Samples | |
| Sample group | vehicle, etc.) | point | in Group | Subject ID |
| 25A4_D0 | mAb1 | 0 Hr | 3 | 701, 702, 703 |
| 25A4_D8 | mAb1 | 168 Hr | 3 | 701, 702, 703 |
| 25A4_D15 | mAb1 | 336 Hr | 3 | 701, 702, 703 |
| 25A4_D22 | mAb1 | 504 Hr | 3 | 701, 702, 703 |
| 25A4_D29 | mAb1 | 672 Hr | 3 | 701, 702, 703 |
| 25A4_D50 | mAb1 | 1176 Hr | 3 | 701, 702, 703 |
| 4A2_D0 | mAb2 | 0 Hr | 3 | 704, 705, 706 |
| 4A2_D8 | mAb2 | 168 Hr | 3 | 704, 705, 706 |
| 4A2_D15 | mAb2 | 336 Hr | 3 | 704, 705, 706 |
| 4A2_D22 | mAb2 | 504 Hr | 3 | 704, 705, 706 |
| 4A2_D29 | mAb2 | 672 Hr | 3 | 704, 705, 706 |
| 4A2_D50 | mAb2 | 1176 Hr | 3 | 704, 705, 706 |
| 7E11_D0 | mAb3 | 0 Hr | 3 | 707, 708, 711 |
| 7E11_D8 | mAb3 | 168 Hr | 3 | 707, 708, 711 |
| 7E11_D15 | mAb3 | 336 Hr | 3 | 707, 708, 711 |
| 7E11_D22 | mAb3 | 504 Hr | 3 | 707, 708, 711 |
| 7E11_D29 | mAb3 | 672 Hr | 3 | 707, 708, 711 |
| 7E11_D50 | mAb3 | 1176 Hr | 3 | 707, 708, 711 |
| 5E5_D0 | mAb4 | 0 Hr | 3 | 709, 710, 712 |
| 5E5_D8 | mAb4 | 168 Hr | 3 | 709, 710, 712 |
| 5E5_D15 | mAb4 | 336 Hr | 3 | 709, 710, 712 |
| 5E5_D22 | mAb4 | 504 Hr | 3 | 709, 710, 712 |
| 5E5_D29 | mAb4 | 672 Hr | 3 | 709, 710, 712 |
| 5E5_D50 | mAb4 | 1176 Hr | 3 | 709, 710, 712 |
| CTL_D0 | mAb6 | 0 Hr | 3 | 716, 717, 718 |
| CTL_D8 | mAb6 | 168 Hr | 3 | 716, 717, 718 |
| CTL_D15 | mAb6 | 336 Hr | 3 | 716, 717, 718 |
| CTL_D22 | mAb6 | 504 Hr | 3 | 716, 717, 718 |
| CTL_D29 | mAb6 | 672 Hr | 3 | 716, 717, 718 |
| CTL_D50 | mAb6 | 1176 Hr | 3 | 716, 717, 718 |
| 4H6_D0 | mAb8 | 0 Hr | 3 | 204, 205, 206 |
| 4H6_D8 | mAb8 | 168 Hr | 3 | 204, 205, 206 |
| 4H6_D15 | mAb8 | 336 Hr | 3 | 204, 205, 206 |
| 4H6_D22 | mAb8 | 504 Hr | 3 | 204, 205, 206 |
| 4H6_D29 | mAb8 | 672 Hr | 3 | 204, 205, 206 |
| 4H6_D43 | mAb8 | 1008 Hr | 3 | 204, 205, 206 |

### Data Analysis

[0809] As the SOMAscan assay was developed for humans, some proteins in cynomolgus monkey may not be recognized by the SOMAmer reagents. As a result, SOMAscan measurements of these proteins would have low credibility and may not reflect the true protein levels. A simple criterion was defined to determine the credibility of the measurements, assuming the serum levels of a given protein are in relatively close range in human and cynomolgus monkey. The mean and range of each protein level in human are calculated based on the 217 human control samples from the human proteomic study described in Example 18. The mean and range of each protein level in cynomolgus monkey are calculated based on a total of 48 samples including measurements of all time points for the SEFL-2 control group and the pre-treatment (DO) and washout period (D50) measurements of all the other groups. A protein measurement would be assigned low credibility if (1) its range in cynomolgus monkey is not overlapping with human; and (2) there is a 5 fold difference between the mean level of this protein in human and cynomolgus monkey. A total of 162 proteins were determined as low-credibility by these criteria and were excluded (FIG. 58, which depicts a summary of the credibility of protein measurements in cynomolgus monkey). In FIG. 58, log 10 RFU of mean protein levels in the two species are plotted and the ones with low credibility (light shading) and high credibility (black) are marked.

[0810] One sample in the 4H6 group was removed due to low volume that did not meet the requirements for the SOMAscan assay. No outliers were found in the principle components analysis. A linear mixed model adjusting for potential confounding factors was used to test whether the ASGR1 antibody treatment changes each protein ley differently from the control group over time points,

$${Y}_{ti} = {β}_{0} + {β}_{1} {TREATGROUP}_{i} + {β}_{2} {TIME}_{ti} + {β}_{3} ( {TREATGROUP}_{i} ) ( {TIME}_{ti} ) + {β}_{4} {COV}_{ti} + ⋯ + {β}_{m - 4} {COV}_{ti} + {b}_{0 i} + {ε}_{ti}$$

which is determined by the p-value for β₃ (i.e., treatment by time interaction; mean difference in slopes between treatment conditions). The random effect b₀_{ᵢ} captures individual animal heterogeneity. The TREATGROUP is coded as (25A4=4A2=7E11=5E5=4H6=1; SELF-2=0) and TIME is coded as (D8=D15=D22=D29=1; D0=D50=0) to test for the ASGR1 antibodies effect after treatment comparing to pre-treatment and washout period. Since multiple tests were performed for the proteins on SOMAscan platform, a Bonferroni corrected significant threshold (5×10⁻⁵) was used.

### Results and Discussion

[0811] 33 proteins were identified to have significant serum level changes after ASGR1 antibody treatment (Table 19.3; P<5×10⁻⁵). Interestingly, all the 33 proteins show increased levels (1.36˜10.18 fold) after ASGR1 antibody treatment.

TABLE 19.3
Proteins with significant changes after ASGR1 antibody
treatment in Cynomolgus monkey.

| | Estimated | | |
|---|---|---|---|
| | Fold | | |
| P-value | Change | Gene | Full Name |
| 1.87E−13 | 10.18 | TNFSF8 | Tumor necrosis factor ligand |
| | | | superfamily member 8 |
| 1.01E−06 | 8.56 | ASGR1 | Asialoglycoprotein receptor 1 |
| 1.35E−10 | 3.93 | ADGRE2 | Adhesion G protein-coupled |
| | | | receptor E2 |
| 2.74E−11 | 2.86 | CD86 | T-lymphocyte activation antigen |
| | | | CD86 |
| 1.46E−11 | 2.81 | TNFRSF21 | Tumor necrosis factor receptor |
| | | | superfamily member 21 |
| 7.48E−10 | 2.57 | L1CAM | Neural cell adhesion molecule L1 |
| 6.09E−12 | 2.42 | PLXNC1 | Plexin-C1 |
| 1.22E−07 | 2.11 | MRC2 | C-type mannose receptor 2 |
| 1.18E−06 | 2.10 | AMIGO2 | Amphoterin-induced protein 2 |
| 2.28E−11 | 2.02 | ANGPT2 | Angiopoietin-2 |
| 6.68E−09 | 1.99 | INSR | Insulin receptor |
| 1.02E−10 | 1.93 | IL17RA | Interleukin-17 receptor A |
| 7.12E−12 | 1.90 | NRXN3 | Neurexin-3-beta |
| 5.95E−06 | 1.85 | GPNMB | Transmembrane glycoprotein NMB |
| 2.03E−06 | 1.74 | IGF1R | Insulin-like growth factor 1 receptor |
| 3.91E−09 | 1.73 | PLAUR | Urokinase plasminogen activator |
| | | | surface receptor |
| 3.58E−09 | 1.69 | FGFR1 | Fibroblast growth factor receptor 1 |
| 1.26E−06 | 1.60 | LRP8 | Low-density lipoprotein |
| | | | receptor-related protein 8 |
| 3.87E−09 | 1.55 | LYPD3 | Ly6/PLAUR domain-containing |
| | | | protein 3 |
| 3.17E−06 | 1.55 | GRN | Granulins |
| 4.27E−05 | 1.54 | CNTN4 | Contactin-4 |
| 4.59E−07 | 1.54 | KDR | Vascular endothelial growth |
| | | | factor receptor 2 |
| 4.99E−06 | 1.53 | IL12RB2 | Interleukin-12 receptor subunit |
| | | | beta-2 |
| 5.85E−06 | 1.52 | ROBO3 | Roundabout homolog 3 |
| 1.44E−06 | 1.50 | ALCAM | CD166 antigen |
| 3.83E−05 | 1.46 | TYRO3 | Tyrosine-protein kinase receptor |
| | | | TYRO3 |
| 3.09E−05 | 1.45 | CADM1 | Cell adhesion molecule 1 |
| 1.53E−08 | 1.44 | JAG1 | Protein jagged-1 |
| 2.58E−09 | 1.43 | ISLR2 | Immunoglobulin superfamily |
| | | | containing |
| | | | leucine-rich repeat protein 2 |
| 3.11E−05 | 1.39 | SET | Protein SET |
| 4.64E−05 | 1.38 | IL20RA | Interleukin-20 receptor subunit alpha |
| 2.15E−06 | 1.36 | KLRK1 | NKG2-D type II integral membrane |
| | | | protein |
| 2.39E−05 | 1.36 | GFRA2 | GDNF family receptor alpha-2 |

[0812] To compare results from this study with the human proteomic study, a list of proteins made by the 33 proteins in Table 19.3 and the top 41 proteins identified in human was compiled. This results in a list of 64 proteins total. The estimates of protein level change and p-value of the changes in the studies were compared (Table 19.4). Based on concordance of change in the cyno (in response to ASGR1 antibody treatment) and human (in response to ASGR1 LOF) studies, the proteins are classified into 5 tiers. Tier 1 includes 10 proteins that pass the stringent Bonferroni corrected significance level (p<5×10⁻⁵) in both studies with the same direction of changes. The number of proteins supported by strong evidence in both studies are much higher than the number one would expect by chance (p=1.58×10⁻⁸; Fisher's exact test). It indicates that ASGR1 Ab treatment can induce a serum protein levels change in cyno that is similar to the effect of del12 LOF variant in Human. Therefore, these proteins are the core biomarkers. For example, the strongest biomarker TNFSF8 had more than 10 fold increase after ASGR1 Antibody treatment (FIGS. 59A-59D, which depict the results of serum protein levels of TNFSF8 in cyno and human studies).

[0813] Tier 2 contains 12 proteins with strong evidence (p<5×10⁻⁵) in the cyno study and suggestive evidence (p<0.05) in human with the same direction of changes. Both Tier 1 and 2 proteins have increased levels in both studies. Tier 3 includes 11 proteins that are found significant only in the cyno study but not human. These proteins are likely to be biomarkers specific for the drug modality or for cynomolgus monkeys. For example, the soluble secreted form of ASGR1 increased more than 10 fold after antibody treatment but no significant difference was observed in human between the ASGR1 del12 carriers and non-carriers. Tier 4 contains 17 proteins with significant evidence (p<5×10⁻⁵) in the human study but not supported by the cyno study. Majority of the proteins in Tier 4 has decrease levels in human del12 carriers. This observation may indicate a difference between antibody treatment and constitutive gene LOF. It could also possibly be due to species difference or simply caused by lower statistical power in the cyno study.

[0814] Lastly, there are 14 proteins with significant changes in human classified as Tier 5 because they were excluded in the cyno study due to the low credibility of their SOMAmer reagents.

[0815] In summary, the two studies show high degree of concordance between the antibody treatment in cynomolgus monkey and ASGR1 LOF in humans, with 10 proteins (Tier 1) showing very significant changes in the same direction in both studies. The ASGR-1 antibody treatment is working well as a way of mimicking the effects of ASGR1 LOF in humans and can be useful in the treatment of coronary artery disease.

TABLE 19.4
Five tiers of protein biomarkers and comparison of the estimates
of protein level change and p-value between the two studies.

| | | human | | Cyno | | |
|---|---|---|---|---|---|---|
| | | Estimate | | Estimate | | |
| Target Full Name | Gene | (SD) | P-value | log2FC | P-value | Tier |
| Tumor necrosis factor ligand | TNFSF8 | 1.34 | 3.7E−54 | 3.35 | 1.87E−13 | 1 |
| superfamily member 8 | | | | | | |
| Tumor necrosis factor receptor | TNFRSF21 | 0.31 | 1.2E−06 | 1.49 | 1.46E−11 | 1 |
| superfamily member 21 | | | | | | |
| C-type mannose receptor 2 | MRC2 | 0.36 | 1.6E−06 | 1.08 | 1.22E−07 | 1 |
| Angiopoietin-2 | ANGPT2 | 0.45 | 1.5E−05 | 1.01 | 2.28E−11 | 1 |
| Neurexin-3-beta | NRXN3 | 0.48 | 4.5E−09 | 0.93 | 7.12E−12 | 1 |
| Insulin-like growth factor | IGF1R | 0.33 | 5.0E−06 | 0.80 | 2.03E−06 | 1 |
| 1 receptor | | | | | | |
| Low-density lipoprotein | LRP8 | 0.80 | 8.9E−12 | 0.68 | 1.26E−06 | 1 |
| receptor-related protein 8 | | | | | | |
| Contactin-4 | CNTN4 | 0.39 | 2.0E−05 | 0.63 | 4.27E−05 | 1 |
| Tyrosine-protein kinase | TYRO3 | 0.59 | 2.5E−12 | 0.55 | 3.83E−05 | 1 |
| receptor TYRO3 | | | | | | |
| Immunoglobulin superfamily | ISLR2 | 0.61 | 2.6E−09 | 0.52 | 2.58E−09 | 1 |
| containing leucine-rich | | | | | | |
| repeat protein 2 | | | | | | |
| T-lymphocyte activation | CD86 | 0.39 | 2.1E−03 | 1.52 | 2.74E−11 | 2 |
| antigen CD86 | | | | | | |
| Neural cell adhesion | L1CAM | 0.30 | 5.5E−03 | 1.36 | 7.48E−10 | 2 |
| molecule L1 | | | | | | |
| Plexin-C1 | PLXNC1 | 0.40 | 1.0E−04 | 1.28 | 6.09E−12 | 2 |
| Amphoterin-induced | AMIGO2 | 0.44 | 1.9E−04 | 1.07 | 1.18E−06 | 2 |
| protein 2 | | | | | | |
| Interleukin-17 receptor | IL17RA | 0.29 | 0.03 | 0.95 | 1.02E−10 | 2 |
| A | | | | | | |
| Urokinase plasminogen | PLAUR | 0.35 | 3.3E−04 | 0.79 | 3.91E−09 | 2 |
| activator surface receptor | | | | | | |
| Fibroblast growth factor | FGFR1 | 0.30 | 2.3E−03 | 0.75 | 3.58E−09 | 2 |
| receptor 1 | | | | | | |
| Granulins | GRN | 0.27 | 5.7E−03 | 0.63 | 3.17E−06 | 2 |
| CD166 antigen | ALCAM | 0.20 | 9.1E−03 | 0.58 | 1.44E−06 | 2 |
| Protein jagged-1 | JAG1 | 0.17 | 0.01 | 0.53 | 1.53E−08 | 2 |
| Protein SET | SET | 0.28 | 2.1E−03 | 0.47 | 3.11E−05 | 2 |
| GDNF family receptor | GFRA2 | 0.39 | 9.2E−05 | 0.44 | 2.39E−05 | 2 |
| alpha-2 | | | | | | |
| Asialoglycoprotein | ASGR1 | 0.00 | 0.99 | 3.10 | 1.01E−06 | 3 |
| receptor 1 | | | | | | |
| Adhesion G protein-coupled | ADGRE2 | 0.04 | 0.70 | 1.97 | 1.35E−10 | 3 |
| receptor E2 | | | | | | |
| Insulin receptor | INSR | 0.20 | 0.06 | 1.00 | 6.68E−09 | 3 |
| Transmembrane glycoprotein | GPNMB | −0.22 | 0.01 | 0.89 | 5.95E−06 | 3 |
| NMB | | | | | | |
| Ly6/PLAUR domain-containing | LYPD3 | −0.06 | 0.26 | 0.63 | 3.87E−09 | 3 |
| protein 3 | | | | | | |
| Vascular endothelial growth | KDR | 0.19 | 0.09 | 0.63 | 4.59E−07 | 3 |
| factor receptor 2 | | | | | | |
| Interleukin-12 receptor | IL12RB2 | 0.11 | 0.38 | 0.61 | 4.99E−06 | 3 |
| subunit beta-2 | | | | | | |
| Roundabout homolog 3 | ROBO3 | 0.08 | 0.55 | 0.61 | 5.85E−06 | 3 |
| Cell adhesion molecule 1 | CADM1 | −0.17 | 0.02 | 0.53 | 3.09E−05 | 3 |
| Interleukin-20 receptor | IL20RA | 0.05 | 0.69 | 0.47 | 4.64E−05 | 3 |
| subunit alpha | | | | | | |
| NKG2-D type II integral | KLRK1 | −0.14 | 0.25 | 0.44 | 2.15E−06 | 3 |
| membrane protein | | | | | | |
| Lymphatic vessel endothelial | LYVE1 | 1.16 | 1.44E−24 | 0.00 | 0.96 | 4 |
| hyaluronic acid receptor 1 | | | | | | |
| CMRF35-like molecule 6 | CD300C | 0.74 | 1.16E−12 | 0.03 | 0.39 | 4 |
| Interleukin-1 receptor-like 1 | IL1RL1 | 0.66 | 1.76E−09 | 0.75 | 0.10 | 4 |
| Kallikrein-13 | KLK13 | 0.57 | 3.82E−06 | 0.08 | 0.42 | 4 |
| CD48 antigen | CD48 | 0.53 | 8.27E−07 | −0.06 | 0.81 | 4 |
| Rab GDP dissociation inhibitor | GDI2 | −0.23 | 4.69E−05 | 0.27 | 0.09 | 4 |
| beta | | | | | | |
| Chorionic somatomammotropin | CSH1 CSH2 | −0.37 | 2.44E−06 | 0.19 | 9.4E−03 | 4 |
| hormone | | | | | | |
| Leucine-rich repeat transmembrane | FLRT2 | −0.38 | 1.36E−06 | 0.30 | 0.03 | 4 |
| protein FLRT2 | | | | | | |
| Transforming growth factor- | TGFBI | −0.44 | 2.91E−07 | 0.13 | 0.46 | 4 |
| beta-induced protein | | | | | | |
| ig-h3 | | | | | | |
| Testican-2 | SPOCK2 | −0.45 | 5.09E−05 | 0.10 | 0.96 | 4 |
| 72 kDa type IV collagenase | MMP2 | −0.46 | 6.67E−07 | 0.13 | 0.48 | 4 |
| Osteomodulin | OMD | −0.46 | 2.68E−05 | 0.12 | 0.78 | 4 |
| Alpha-2-HS-glycoprotein | AHSG | −0.48 | 2.18E−06 | 0.00 | 0.97 | 4 |
| Iduronate 2-sulfatase | IDS | −0.50 | 6.32E−09 | 0.05 | 0.33 | 4 |
| Complement component C1q receptor | CD93 | −0.52 | 1.08E−09 | 0.19 | 0.15 | 4 |
| Afamin | AFM | −0.52 | 1.36E−05 | 0.02 | 0.94 | 4 |
| Endothelial cell-specific molecule 1 | ESM1 | −0.54 | 3.16E−06 | 0.09 | 0.56 | 4 |
| Scavenger receptor cysteine- | CD163 | 1.45 | 1.33E−52 | NA | NA | 5 |
| rich type 1 protein M130 | | | | | | |
| Macrophage colony-stimulating | CSF1R | 1.09 | 2.07E−25 | NA | NA | 5 |
| factor 1 receptor | | | | | | |
| Interleukin-18-binding protein | IL18BP | 0.67 | 4.56E−15 | NA | NA | 5 |
| Interleukin-6 receptor subunit beta | IL6ST | 0.65 | 1.03E−22 | NA | NA | 5 |
| Urokinase-type plasminogen activator | PLAU | 0.58 | 1.03E−07 | NA | NA | 5 |
| Sialic acid-binding Ig-like lectin 7 | SIGLEC7 | 0.55 | 4.01E−09 | NA | NA | 5 |
| Low affinity immunoglobulin gamma | FCGR3B | 0.47 | 2.57E−05 | NA | NA | 5 |
| Fc region receptor III-B | | | | | | |
| Cell surface glycoprotein CD200 | CD200R1 | 0.46 | 4.48E−05 | NA | NA | 5 |
| receptor 1 | | | | | | |
| T-lymphocyte surface antigen Ly-9 | LY9 | 0.40 | 3.92E−05 | NA | NA | 5 |
| Complement C1s subcomponent | C1S | 0.38 | 2.93E−05 | NA | NA | 5 |
| Complement decay-accelerating | CD55 | 0.37 | 2.96E−07 | NA | NA | 5 |
| factor | | | | | | |
| RGM domain family member B | RGMB | −0.34 | 1.56E−07 | NA | NA | 5 |
| Lumican | LUM | −0.48 | 5.56E−07 | NA | NA | 5 |
| Tumor necrosis factor receptor | TNFRSF17 | −0.48 | 1.67E−05 | NA | NA | 5 |
| superfamily member 17 | | | | | | |

References
1 See also, Nioi, P. et al. Variant ASGR1 Associated with a Reduced Risk of Coronary Artery Disease. The New England journal of medicine 374, 2131-2141, doi: 10.1056/NEJMoal508419 (2016).
2 Gold, L. et al. Aptamer-based multiplexed proteomic technology for biomarker directory. PLoS One 5, e15004, doi: 10.1371/journal.pone.0015004 (2010).

### Example 20: Method of Reducing a Risk of Cardiovascular Disease

[0816] A subject at risk of cardiovascular disease is identified. One or more antibodies as provided herein (see Example 7, as well as Tables A, B and C) and/or RNAi constructs that reduce expression of ASGR-1 and/or ASGR-2 (as outlined in Example 3), are administered to a subject at risk of cardiovascular disease. The antibody and/or RNAi construct reduces the level of expression of ASGR, ASGR-1 and/or ASGR-2. Subsequent rounds of antibodies and/or RNAi are administered to the subject. One or more of the markers in Example 19 (e.g., Tier 1) is monitored to make certain that an adequate amount of the antibody and/or RNAi construct is administered and is functioning as desired. The risk that the subject will experience cardio vascular disease is decreased.

[0817] Additionally, as a further option, physiologic effects of the antibody and/or RNAi can be evaluated in relevant animal models of cardiovascular disease using readouts including blood pressure, primary and secondary hemostasis, heart function and morphology, endothelial function, LDL cholesterol levels, non-HDL cholesterol levels, inflammation, and/or atherosclerosis.

### Example 21: Method of Reducing a Risk of Myocardial Infarction or Coronary Artery Disease

[0818] A subject at risk of a myocardial infarction or coronary artery disease is identified. One or more antibodies as provided herein (see Example 7, as well as Tables A, B and C) and/or RNAi constructs that reduce expression of ASGR-1 and/or ASGR-2 (as outlined in Example 3), are administered to a subject at risk of a myocardial infarction or coronary artery disease. The antibody and/or RNAi construct reduces the level of expression of ASGR, ASGR-1 and/or ASGR-2. Subsequent rounds of antibodies and/or RNAi are administered to the subject. One or more of the markers in Example 19 (e.g., Tier 1) is monitored to make certain that an adequate amount of the antibody and/or RNAi construct is administered and is functioning as desired. The risk that the subject will experience a myocardial infarction or coronary artery disease is decreased.

[0819] Additionally, as a further option, physiologic effects of the antibody and/or RNAi can be evaluated in relevant animal models of myocardial infarction or coronary artery disease using readouts including blood pressure, primary and secondary hemostasis, heart function and morphology, endothelial function, LDL cholesterol levels, non-HDL cholesterol levels, inflammation, and/or atherosclerosis.

### Example 22: Method of Reducing LDL Cholesterol

[0820] A subject having a LDL cholesterol level to be lowered is identified. One or more antibodies as provided herein (see Example 7, as well as Tables A, B and C) and/or RNAi constructs that reduce expression of ASGR-1 and/or ASGR-2 (as outlined in Example 3), are administered to the subject. The antibody and/or RNAi construct reduces the level of expression of ASGR, ASGR-1 and/or ASGR-2. Subsequent rounds of antibodies and/or RNAi are administered to the subject. One or more of the markers in Example 19 (e.g., tier 1) is monitored to make certain that an adequate amount of the antibody and/or RNAi construct is administered and is functioning as desired. The level of LDL cholesterol in the subject is thereby reduced.

### Example 23: Method of Reducing Non-HDL Cholesterol

[0821] A subject having a non-HDL cholesterol level to be lowered is identified. One or more antibodies as provided herein (see Example 7, as well as Tables A, B and C) and/or RNAi constructs that reduce expression of ASGR-1 and/or ASGR-2 (as outlined in Example 3), are administered to the subject. The antibody and/or RNAi construct reduces the level of expression of ASGR, ASGR-1 and/or ASGR-2. Subsequent rounds of antibodies and/or RNAi are administered to the subject. One or more of the markers in Example 19 (e.g., Tier 1) is monitored to make certain that an adequate amount of the antibody and/or RNAi construct is administered and is functioning as desired. The level of non-HDL cholesterol in the subject is thereby reduced.

### Example 24: Method of Increasing ALP Levels

[0822] One or more antibodies as provided herein (see Example 7, as well as Tables A, B, and C) and/or RNAi constructs that reduce expression of ASGR-1 and/or ASGR-2 (as outlined in Example 3), are administered to the subject. The antibody and/or RNAi construct reduces the level of expression of ASGR, ASGR-1 and/or ASGR-2. Subsequent rounds of antibodies and/or RNAi are administered to the subject. One or more of the markers in Example 19 (e.g., Tier 1) is monitored to make certain that an adequate amount of the antibody and/or RNAi construct is administered and is functioning as desired. The level of ALP in the subject is thereby increased.

### Example 25: Method of Monitoring the Effectiveness of an ASGR-1 Therapy

[0823] One or more antibodies as provided herein (see Example 7, as well as Tables A, B and C) and/or RNAi constructs that reduce expression of ASGR-1 and/or ASGR-2 (as outlined in Example 3), are administered to the subject. One or more of the markers in Example 19 is monitored to make certain that an adequate amount of the antibody and/or RNAi construct is administered and is functioning as desired. When the marker level changes in a similar manner to those changes noted in Example 19 (e.g., Tier 1), it is evidence that the amount of the one or more antibody and/or RNAi is effective. Additionally, as a further option, the effectiveness of this biochemical change can be observed by its physiologic effects from the antibody and/or RNAi, which can be evaluated using readouts including blood pressure, primary and secondary hemostasis, heart function and morphology, endothelial function, LDL cholesterol levels, non-HDL cholesterol levels, inflammation, and/or atherosclerosis.

Lengthy table referenced here
US20250051457A1-20250213-T00001
Please refer to the end of the specification for access instructions.

Lengthy table referenced here
US20250051457A1-20250213-T00002
Please refer to the end of the specification for access instructions.

Lengthy table referenced here
US20250051457A1-20250213-T00003
Please refer to the end of the specification for access instructions.

Lengthy table referenced here
US20250051457A1-20250213-T00004
Please refer to the end of the specification for access instructions.

Lengthy table referenced here
US20250051457A1-20250213-T00005
Please refer to the end of the specification for access instructions.

[0824] Each reference cited herein is hereby incorporated by reference in its entirety for all that it teaches and for all purposes.

[0825] The present invention is not to be limited in scope by the specific embodiments described herein, which are intended as single illustrations of individual embodiments of the invention, and functionally equivalent methods and components are invention. Indeed, various modifications of the invention, in addition to those shown and described herein will become apparent to those skilled in the art from the foregoing description and accompanying drawings. Such modifications are intended to fall within the scope of the appended claims.

LENGTHY TABLES
The patent application contains a lengthy table section. A copy of the table is available in electronic form from the USPTO web site (https://seqdata.uspto.gov/?pageRequest=docDetail&DocID=US20250051457A1). An electronic copy of the table will also be available from the USPTO upon request and payment of the fee set forth in 37 CFR 1.19(b)(3).

1. An isolated antigen binding protein that binds to human ASGR-1 comprising the amino acid sequence of SEQ ID NO:5, wherein the antigen binding protein inhibits ASGR-1 binding to ligand.

2. The isolated antigen binding protein of claim 1, wherein the isolated antigen binding protein binds to a carbohydrate recognition domain of human ASGR-1.

3. The isolated antigen binding protein of claim 1, wherein the isolated antigen binding protein inhibits the internalization of ASGR.

4. The isolated antigen binding protein of claim 1, wherein the isolated antigen binding protein further binds ASGR-2.

5. The isolated antigen binding protein of claim 1, wherein the isolated antigen binding protein is a monoclonal antibody.

6.-14. (canceled)

15. An isolated monoclonal antibody, wherein the isolated monoclonal antibody specifically binds to human ASGR-1 and comprises a VH CDR1, VH CDR2 and VH CDR3 having an amino acid sequence identical to or comprising 1, 2, or 3 amino acid residue substitutions in each CDR relative to the antibody VH of any of the sequences set forth in Tables 3-7.

16. The isolated monoclonal antibody of claim 15, wherein said isolated monoclonal antibody further comprises a VL CDR1, VL CDR2 and VL CDR3 having an amino acid sequence identical to or comprising 1, 2, or 3 amino acid residue substitutions in each CDR relative to the antibody VL of any of the sequences set forth in Tables 3-7.

17. The isolated monoclonal antibody of claim 16, wherein said VH CDRs and said VL CDRs are the corresponding paired VH and VL CDRs as set forth in Table 2.

18.-25. (canceled)

26. The isolated antigen binding protein of claim 1, wherein the isolated antigen binding protein r is a chimeric antibody, a humanized antibody, or a human antibody.

27. A pharmaceutical composition comprising the isolated antigen binding protein of claim 1, and a pharmaceutically acceptable excipient.

28. An isolated nucleic acid encoding the isolated antigen binding protein of claim 1.

29. A vector comprising the isolated nucleic acid of claim 28.

30. A host cell comprising the isolated nucleic acid of claim 28.

31. A method for producing an antigen binding protein comprising culturing the host cell of claim 30 under suitable conditions and recovering said antigen binding protein.

32. A method of treating or preventing a cardiovascular disease comprising administering to a patient in need thereof a therapeutically effective dose of an inhibitor of ASGR, ASGR-1, and/or ASGR-2.

33. The method of claim 32, wherein said cardiovascular disease is coronary artery disease or myocardial infarction.

34.-38. (canceled)

39. The method of claim 32, wherein the inhibitor is an interfering RNA (e.g., siRNA or shRNA) that reduces expression of ASGR, ASGR-1 and/or ASGR-2.

40. The method of claim 32, wherein the inhibitor is an isolated neutralizing antigen binding protein that binds to human ASGR, ASGR-1 and/or ASGR-2.

41.-43. (canceled)

The application's sequence listing, which the Patent Office published only in electronic form, follows.

SEQUENCE LISTING (50759 sequences)

SEQ ID NO: 1 - protein, 284 aa, Mus sp.
MTKDYQDFQHLDNDNDHHQLRRGPPPTPRLLQRLCSGSRLLLLSSSLSILLLVVVCVITSQNSQLREDLLALRQNFSNLTVSTEDQVKALSTQGSSVGRKMKLVESKLEKQQKDLTEDHSSLLLHVKQLVSDVRSLSCQMAAFRGNGSERTCCPINWVEYEGSCYWFSSSVRPWTEADKYCQLENAHLVVVTSRDEQNFLQRHMGPLNTWIGLTDQNGPWKWVDGTDYETGFQNWRPEQPDNWYGHGLGGGEDCAHFTTDGRWNDDVCRRPYRWVCETKLDKAN

SEQ ID NO: 2 - protein, 301 aa, Mus sp.
MEKDCQDIQQLDSEENDHQLSGDDEHGSHVQDPRIENPHWKGQPLSRPFPQRLCSTFRLSLLALAFNILLLVVICVVSSQSIQLQEEFRTLKETFSNFSSSTLMEFGALDTLGGSTNAILTSWLAQLEEKQQQLKADHSTLLFHLKHFPMDLRTLTCQLAYFQSNGTECCPVNWVEFGGSCYWFSRDGLTWAEADQYCQLENAHLLVINSREEQDFVVKHRSQFHIWIGLTDRDGSWKWVDGTDYRSNYRNWAFTQPDNWQGHEQGGGEDCAEILSDGHWNDNFCQQVNRWVCEKRRNITH

SEQ ID NO: 3 - protein, 222 aa, Mus sp.
SQLREDLLALRQNFSNLTVSTEDQVKALSTQGSSVGRKMKLVESKLEKQQKDLTEDHSSLLLHVKQLVSDVRSLSCQMAAFRGNGSERTCCPINWVEYEGSCYWFSSSVRPWTEADKYCQLENAHLVVVTSRDEQNFLQRHMGPLNTWIGLTDQNGPWKWVDGTDYETGFQNWRPEQPDNWYGHGLGGGEDCAHFTTDGRWNDDVCRRPYRWVCETKLDKAN

SEQ ID NO: 4 - protein, 132 aa, Mus sp.
CPINWVEYEGSCYWFSSSVRPWTEADKYCQLENAHLVVVTSRDEQNFLQRHMGPLNTWIGLTDQNGPWKWVDGTDYETGFQNWRPEQPDNWYGHGLGGGEDCAHFTTDGRWNDDVCRRPYRWVCETKLDKAN

SEQ ID NO: 5 - protein, 291 aa, Homo sapiens
MTKEYQDLQHLDNEESDHHQLRKGPPPPQPLLQRLCSGPRLLLLSLGLSLLLLVVVCVIGSQNSQLQEELRGLRETFSNFTASTEAQVKGLSTQGGNVGRKMKSLESQLEKQQKDLSEDHSSLLLHVKQFVSDLRSLSCQMAALQGNGSERTCCPVNWVEHERSCYWFSRSGKAWADADNYCRLEDAHLVVVTSWEEQKFVQHHIGPVNTWMGLHDQNGPWKWVDGTDYETGFKNWRPEQPDDWYGHGLGGGEDCAHFTDDGRWNDDVCQRPYRWVCETELDKASQEPPLL

SEQ ID NO: 6 - protein, 287 aa, Homo sapiens
MAKDFQDIQQLSSEENDHPFHQGPPPAQPLAQRLCSMVCFSLLALSFNILLLVVICVTGSQSAQLQAELRSLKEAFSNFSSSTLTEVQAISTHGGSVGDKITSLGAKLEKQQQDLKADHDALLFHLKHFPVDLRFVACQMELLHSNGSQRTCCPVNWVEHQGSCYWFSHSGKAWAEAEKYCQLENAHLVVINSWEEQKFIVQHTNPFNTWIGLTDSDGSWKWVDGTDYRHNYKNWAVTQPDNWHGHELGGSEDCVEVQPDGRWNDDFCLQVYRWVCEKRRNATGEVA

SEQ ID NO: 7 - protein, 228 aa, Homo sapiens
SQLQEELRGLRETFSNFTASTEAQVKGLSTQGGNVGRKMKSLESQLEKQQKDLSEDHSSLLLHVKQFVSDLRSLSCQMAALQGNGSERTCCPVNWVEHERSCYWFSRSGKAWADADNYCRLEDAHLVVVTSWEEQKFVQHHIGPVNTWMGLHDQNGPWKWVDGTDYETGFKNWRPEQPDDWYGHGLGGGEDCAHFTDDGRWNDDVCQRPYRWVCETELDKASQEPPLL

SEQ ID NO: 8 - protein, 138 aa, Homo sapiens
CPVNWVEHERSCYWFSRSGKAWADADNYCRLEDAHLVVVTSWEEQKFVQHHIGPVNTWMGLHDQNGPWKWVDGTDYETGFKNWRPEQPDDWYGHGLGGGEDCAHFTDDGRWNDDVCQRPYRWVCETELDKASQEPPLL

SEQ ID NO: 9 - protein, 227 aa, Homo sapiens
QSAQLQAELRSLKEAFSNFSSSTLTEVQAISTHGGSVGDKITSLGAKLEKQQQDLKADHDALLFHLKHFPVDLRFVACQMELLHSNGSQRTCCPVNWVEHQGSCYWFSHSGKAWAEAEKYCQLENAHLVVINSWEEQKFIVQHTNPFNTWIGLTDSDGSWKWVDGTDYRHNYKNWAVTQPDNWHGHELGGSEDCVEVQPDGRWNDDFCLQVYRWVCEKRRNATGEVA

SEQ ID NO: 10 - protein, 135 aa, Homo sapiens
CPVNWVEHQGSCYWFSHSGKAWAEAEKYCQLENAHLVVINSWEEQKFIVQHTNPFNTWIGLTDSDGSWKWVDGTDYRHNYKNWAVTQPDNWHGHELGGSEDCVEVQPDGRWNDDFCLQVYRWVCEKRRNATGEVA

SEQ ID NO: 11 - protein, 129 aa, Homo sapiens
MCPVNWVEHERSCYWFSRSGKAWADADNYCRLEDAHLVVVTSWEEQKFVQHHIGPVNTWMGLHDQNGPWKWVDGTDYETGFKNWRPEQPDDWYGHGLGGGEDCAHFTDDGRWNDDVCQRPYRWVCETEL

SEQ ID NO: 12 - protein, 145 aa, Homo sapiens
MGSERTCCPVNWVEHERSCYWFSRSGKAWADADNYCRLEDAHLVVVTSWEEQKFVQHHIGPVNTWMGLHDQNGPWKWVDGTDYETGFKNWRPEQPDDWYGHGLGGGEDCAHFTDDGRWNDDVCQRPYRWVCETELDKASQEPPLL

SEQ ID NO: 13 - protein, 146 aa, Homo sapiens
MAGSERTCCPVNWVEHERSCYWFSRSGKAWADADNYCRLEDAHLVVVTSWEEQKFVQHHIGPVNTWMGLHDQNGPWKWVDGTDYETGFKNWRPEQPDDWYGHGLGGGEDCAHFTDDGRWNDDVCQRPYRWVCETELDKASQEPPLL

SEQ ID NO: 14 - protein, 130 aa, Homo sapiens
MACPVNWVEHERSCYWFSRSGKAWADADNYCRLEDAHLVVVTSWEEQKFVQHHIGPVNTWMGLHDQNGPWKWVDGTDYETGFKNWRPEQPDDWYGHGLGGGEDCAHFTDDGRWNDDVCQRPYRWVCETEL

SEQ ID NO: 15 - protein, 96 aa, Homo sapiens
MAGSQNSQLQEELRGLRETFSNFTASTEAQVKGLSTQGGNVGRKMKSLESQLEKQQKDLSEDHSSLLLHVKQFVSDLRSLSCQMAALQGNGSERTC

SEQ ID NO: 16 - protein, 234 aa, Homo sapiens
MAGSQNSQLQEELRGLRETFSNFTASTEAQVKGLSTQGGNVGRKMKSLESQLEKQQKDLSEDHSSLLLHVKQFVSDLRSLSCQMAALQGNGSERTCCPVNWVEHERSCYWFSRSGKAWADADNYCRLEDAHLVVVTSWEEQKFVQHHIGPVNTWMGLHDQNGPWKWVDGTDYETGFKNWRPEQPDDWYGHGLGGGEDCAHFTDDGRWNDDVCQRPYRWVCETELDKASQEPPLL

SEQ ID NO: 17 - protein, 94 aa, Homo sapiens
MAQNSQLQEELRGLRETFSNFTASTEAQVKGLSTQGGNVGRKMKSLESQLEKQQKDLSEDHSSLLLHVKQFVSDLRSLSCQMAALQGNGSERTC

SEQ ID NO: 18 - protein, 98 aa, Homo sapiens
MAVIGSQNSQLQEELRGLRETFSNFTASTEAQVKGLSTQGGNVGRKMKSLESQLEKQQKDLSEDHSSLLLHVKQFVSDLRSLSCQMAALQGNGSERTC

SEQ ID NO: 19 - protein, 88 aa, Homo sapiens
MAVIGSQNSQLQEELRGLRETFSNFTASTEAQVKGLSTQGGNVGRKMKSLESQLEKQQKDLSEDHSSLLLHVKQFVSDLRSLSCQMAA

SEQ ID NO: 20 - protein, 84 aa, Homo sapiens
MAQNSQLQEELRGLRETFSNFTASTEAQVKGLSTQGGNVGRKMKSLESQLEKQQKDLSEDHSSLLLHVKQFVSDLRSLSCQMAA

SEQ ID NO: 21 - protein, 86 aa, Homo sapiens
MAGSQNSQLQEELRGLRETFSNFTASTEAQVKGLSTQGGNVGRKMKSLESQLEKQQKDLSEDHSSLLLHVKQFVSDLRSLSCQMAA

SEQ ID NO: 22 - protein, 225 aa, Homo sapiens
MAGSQNSQLQEELRGLRETFSNFTASTEAQVKGLSTQGGNVGRKMKSLESQLEKQQKDLSEDHSSLLLHVKQFVSDLRSLSCQMAALQGNGSERTCCPVNWVEHERSCYWFSRSGKAWADADNYCRLEDAHLVVVTSWEEQKFVQHHIGPVNTWMGLHDQNGPWKWVDGTDYETGFKNWRPEQPDDWYGHGLGGGEDCAHFTDDGRWNDDVCQRPYRWVCETELD

SEQ ID NO: 23 - protein, 232 aa, Homo sapiens
MAQNSQLQEELRGLRETFSNFTASTEAQVKGLSTQGGNVGRKMKSLESQLEKQQKDLSEDHSSLLLHVKQFVSDLRSLSCQMAALQGNGSERTCCPVNWVEHERSCYWFSRSGKAWADADNYCRLEDAHLVVVTSWEEQKFVQHHIGPVNTWMGLHDQNGPWKWVDGTDYETGFKNWRPEQPDDWYGHGLGGGEDCAHFTDDGRWNDDVCQRPYRWVCETELDKASQEPPLL

SEQ ID NO: 24 - protein, 233 aa, Homo sapiens
MASQNSQLQEELRGLRETFSNFTASTEAQVKGLSTQGGNVGRKMKSLESQLEKQQKDLSEDHSSLLLHVKQFVSDLRSLSCQMAALQGNGSERTCCPVNWVEHERSCYWFSRSGKAWADADNYCRLEDAHLVVVTSWEEQKFVQHHIGPVNTWMGLHDQNGPWKWVDGTDYETGFKNWRPEQPDDWYGHGLGGGEDCAHFTDDGRWNDDVCQRPYRWVCETELDKASQEPPLL

SEQ ID NO: 25 - protein, 236 aa, Homo sapiens
MAVIGSQNSQLQEELRGLRETFSNFTASTEAQVKGLSTQGGNVGRKMKSLESQLEKQQKDLSEDHSSLLLHVKQFVSDLRSLSCQMAALQGNGSERTCCPVNWVEHERSCYWFSRSGKAWADADNYCRLEDAHLVVVTSWEEQKFVQHHIGPVNTWMGLHDQNGPWKWVDGTDYETGFKNWRPEQPDDWYGHGLGGGEDCAHFTDDGRWNDDVCQRPYRWVCETELDKASQEPPLL

SEQ ID NO: 26 - protein, 231 aa, Homo sapiens
MANSQLQEELRGLRETFSNFTASTEAQVKGLSTQGGNVGRKMKSLESQLEKQQKDLSEDHSSLLLHVKQFVSDLRSLSCQMAALQGNGSERTCCPVNWVEHERSCYWFSRSGKAWADADNYCRLEDAHLVVVTSWEEQKFVQHHIGPVNTWMGLHDQNGPWKWVDGTDYETGFKNWRPEQPDDWYGHGLGGGEDCAHFTDDGRWNDDVCQRPYRWVCETELDKASQEPPLL

SEQ ID NO: 27 - protein, 231 aa, Homo sapiens
MAGSQSAQLQAELRSLKEAFSNFSSSTLTEVQAISTHGGSVGDKITSLGAKLEKQQQDLKADHDALLFHLKHFPVDLRFVACQMELLHSNGSQRTCCPVNWVEHQGSCYWFSHSGKAWAEAEKYCQLENAHLVVINSWEEQKFIVQHTNPFNTWIGLTDSDGSWKWVDGTDYRHNYKNWAVTQPDNWHGHELGGSEDCVEVQPDGRWNDDFCLQVYRWVCEKRRNATGEVA

SEQ ID NO: 28 - protein, 233 aa, Homo sapiens
MAVTGSQSAQLQAELRSLKEAFSNFSSSTLTEVQAISTHGGSVGDKITSLGAKLEKQQQDLKADHDALLFHLKHFPVDLRFVACQMELLHSNGSQRTCCPVNWVEHQGSCYWFSHSGKAWAEAEKYCQLENAHLVVINSWEEQKFIVQHTNPFNTWIGLTDSDGSWKWVDGTDYRHNYKNWAVTQPDNWHGHELGGSEDCVEVQPDGRWNDDFCLQVYRWVCEKRRNATGEVA

SEQ ID NO: 29 - protein, 230 aa, Homo sapiens
MASQSAQLQAELRSLKEAFSNFSSSTLTEVQAISTHGGSVGDKITSLGAKLEKQQQDLKADHDALLFHLKHFPVDLRFVACQMELLHSNGSQRTCCPVNWVEHQGSCYWFSHSGKAWAEAEKYCQLENAHLVVINSWEEQKFIVQHTNPFNTWIGLTDSDGSWKWVDGTDYRHNYKNWAVTQPDNWHGHELGGSEDCVEVQPDGRWNDDFCLQVYRWVCEKRRNATGEVA

SEQ ID NO: 30 - protein, 229 aa, Homo sapiens
MAQSAQLQAELRSLKEAFSNFSSSTLTEVQAISTHGGSVGDKITSLGAKLEKQQQDLKADHDALLFHLKHFPVDLRFVACQMELLHSNGSQRTCCPVNWVEHQGSCYWFSHSGKAWAEAEKYCQLENAHLVVINSWEEQKFIVQHTNPFNTWIGLTDSDGSWKWVDGTDYRHNYKNWAVTQPDNWHGHELGGSEDCVEVQPDGRWNDDFCLQVYRWVCEKRRNATGEVA

SEQ ID NO: 31 - protein, 228 aa, Homo sapiens
MASAQLQAELRSLKEAFSNFSSSTLTEVQAISTHGGSVGDKITSLGAKLEKQQQDLKADHDALLFHLKHFPVDLRFVACQMELLHSNGSQRTCCPVNWVEHQGSCYWFSHSGKAWAEAEKYCQLENAHLVVINSWEEQKFIVQHTNPFNTWIGLTDSDGSWKWVDGTDYRHNYKNWAVTQPDNWHGHELGGSEDCVEVQPDGRWNDDFCLQVYRWVCEKRRNATGEVA

SEQ ID NO: 32 - protein, 475 aa, synthetic construct
  REGION 1..475: note = Description of Artificial Sequence: Synthetic polypeptide
MTKEYQDLQHLDNEESDHHQLRKGPPPPQPLLQRLCSGPRLLLLSLGLSLLLLVVVCVIGSQNSQLQEELRGLRETFSNFTASTEAQVKGLSTQGGNVGRKMKSLESQLEKQQKDLSEDHSSLLLHVKQFVSDLRSLSCQMAALQGNGSERTCCPVNWVEHERSCYWFSRSGKAWADADNYCRLEDAHLVVVTSWEEQKFVQHHIGPVNTWMGLHDQNGPWKWVDGTDYETGFKNWRPEQPDDWYGHGLGGGEDCAHFTDDGRWNDDVCQRPYRWVCETELDKASQEPPLLGSMDKDCEMKRTTLDSPLGKLELSGCEQGLHRIIFLGKGTSAADAVEVPAPAAVLGGPEPLMQATAWLNAYFHQPEAIEEFPVPALHHPVFQQESFTRQVLWKLLKVVKFGEVISYSHLAALAGNPAATAAVKTALSGNPVPILIPCHRVVQGDLDVGGYEGGLAVKEWLLAHEGHRLGKPGLG

SEQ ID NO: 33 - protein, 490 aa, synthetic construct
  REGION 1..490: note = Description of Artificial Sequence: Synthetic polypeptide
MTKEYQDLQHLDNEESDHHQLRKGPPPPQPLLQRLCSGPRLLLLSLGLSLLLLVVVCVIGSQNSQLQEELRGLRETFSNFTASTEAQVKGLSTQGGNVGRKMKSLESQLEKQQKDLSEDHSSLLLHVKQFVSDLRSLSCQMAALQGNGSERTCCPVNWVEHERSCYWFSRSGKAWADADNYCRLEDAHLVVVTSWEEQKFVQHHIGPVNTWMGLHDQNGPWKWVDGTDYETGFKNWRPEQPDDWYGHGLGGGEDCAHFTDDGRWNDDVCQRPYRWVCETELDKASQEPPLLGSGGGGSGGGGSGGGGSMDKDCEMKRTTLDSPLGKLELSGCEQGLHRIIFLGKGTSAADAVEVPAPAAVLGGPEPLMQATAWLNAYFHQPEAIEEFPVPALHHPVFQQESFTRQVLWKLLKVVKFGEVISYSHLAALAGNPAATAAVKTALSGNPVPILIPCHRVVQGDLDVGGYEGGLAVKEWLLAHEGHRLGKPGLG

SEQ ID NO: 34 - protein, 475 aa, synthetic construct
  REGION 1..475: note = Description of Artificial Sequence: Synthetic polypeptide
MTKEYQDLQHLDNEESDHHQLRKGPPPPQPLLQRLCSGPRLLLLSLGLSLLLLVVVCVIGSQNSQLQEELRGLRETFSNFTASTEAQVKGLSTQGGNVGRKMKSLESQLEKQQKDLSEDHSSLLLHVKQFVSDLRSLSCQMAALQGNGSERTCCPVNWVEHERSCYWFSRSGKAWADADNYCRLEDAHLVVVTSWEEQKFVQHHIGPVNTWMGLHDQNGPWKWVDGTDYETGFKNWRPEQPDDWYGHGLGGGEDCAHFTDDGRWNDDVCQRPYRWVCETELDKASQEPPLLGSMDKDCEMKRTTLDSPLGKLELSGCEQGLHRIIFLGKGTSAADAVEVPAPAAVLGGPEPLIQATAWLNAYFHQPEAIEEFPVPALHHPVFQQESFTRQVLWKLLKVVKFGEVISESHLAALVGNPAATAAVNTALDGNPVPILIPCHRVVQGDSDVGPYLGGLAVKEWLLAHEGHRLGKPGLG

SEQ ID NO: 35 - protein, 490 aa, synthetic construct
  REGION 1..490: note = Description of Artificial Sequence: Synthetic polypeptide
MTKEYQDLQHLDNEESDHHQLRKGPPPPQPLLQRLCSGPRLLLLSLGLSLLLLVVVCVIGSQNSQLQEELRGLRETFSNFTASTEAQVKGLSTQGGNVGRKMKSLESQLEKQQKDLSEDHSSLLLHVKQFVSDLRSLSCQMAALQGNGSERTCCPVNWVEHERSCYWFSRSGKAWADADNYCRLEDAHLVVVTSWEEQKFVQHHIGPVNTWMGLHDQNGPWKWVDGTDYETGFKNWRPEQPDDWYGHGLGGGEDCAHFTDDGRWNDDVCQRPYRWVCETELDKASQEPPLLGSGGGGSGGGGSGGGGSMDKDCEMKRTTLDSPLGKLELSGCEQGLHRIIFLGKGTSAADAVEVPAPAAVLGGPEPLIQATAWLNAYFHQPEAIEEFPVPALHHPVFQQESFTRQVLWKLLKVVKFGEVISESHLAALVGNPAATAAVNTALDGNPVPILIPCHRVVQGDSDVGPYLGGLAVKEWLLAHEGHRLGKPGLG

SEQ ID NO: 36 - protein, 471 aa, synthetic construct
  REGION 1..471: note = Description of Artificial Sequence: Synthetic polypeptide
MAKDFQDIQQLSSEENDHPFHQGPPPAQPLAQRLCSMVCFSLLALSFNILLLVVICVTGSQSAQLQAELRSLKEAFSNFSSSTLTEVQAISTHGGSVGDKITSLGAKLEKQQQDLKADHDALLFHLKHFPVDLRFVACQMELLHSNGSQRTCCPVNWVEHQGSCYWFSHSGKAWAEAEKYCQLENAHLVVINSWEEQKFIVQHTNPFNTWIGLTDSDGSWKWVDGTDYRHNYKNWAVTQPDNWHGHELGGSEDCVEVQPDGRWNDDFCLQVYRWVCEKRRNATGEVAGSMDKDCEMKRTTLDSPLGKLELSGCEQGLHRIIFLGKGTSAADAVEVPAPAAVLGGPEPLMQATAWLNAYFHQPEAIEEFPVPALHHPVFQQESFTRQVLWKLLKVVKFGEVISYSHLAALAGNPAATAAVKTALSGNPVPILIPCHRVVQGDLDVGGYEGGLAVKEWLLAHEGHRLGKPGLG

SEQ ID NO: 37 - protein, 486 aa, synthetic construct
  REGION 1..486: note = Description of Artificial Sequence: Synthetic polypeptide
MAKDFQDIQQLSSEENDHPFHQGPPPAQPLAQRLCSMVCFSLLALSFNILLLVVICVTGSQSAQLQAELRSLKEAFSNFSSSTLTEVQAISTHGGSVGDKITSLGAKLEKQQQDLKADHDALLFHLKHFPVDLRFVACQMELLHSNGSQRTCCPVNWVEHQGSCYWFSHSGKAWAEAEKYCQLENAHLVVINSWEEQKFIVQHTNPFNTWIGLTDSDGSWKWVDGTDYRHNYKNWAVTQPDNWHGHELGGSEDCVEVQPDGRWNDDFCLQVYRWVCEKRRNATGEVAGSGGGGSGGGGSGGGGSMDKDCEMKRTTLDSPLGKLELSGCEQGLHRIIFLGKGTSAADAVEVPAPAAVLGGPEPLMQATAWLNAYFHQPEAIEEFPVPALHHPVFQQESFTRQVLWKLLKVVKFGEVISYSHLAALAGNPAATAAVKTALSGNPVPILIPCHRVVQGDLDVGGYEGGLAVKEWLLAHEGHRLGKPGLG

SEQ ID NO: 38 - protein, 471 aa, synthetic construct
  REGION 1..471: note = Description of Artificial Sequence: Synthetic polypeptide
MAKDFQDIQQLSSEENDHPFHQGPPPAQPLAQRLCSMVCFSLLALSFNILLLVVICVTGSQSAQLQAELRSLKEAFSNFSSSTLTEVQAISTHGGSVGDKITSLGAKLEKQQQDLKADHDALLFHLKHFPVDLRFVACQMELLHSNGSQRTCCPVNWVEHQGSCYWFSHSGKAWAEAEKYCQLENAHLVVINSWEEQKFIVQHTNPFNTWIGLTDSDGSWKWVDGTDYRHNYKNWAVTQPDNWHGHELGGSEDCVEVQPDGRWNDDFCLQVYRWVCEKRRNATGEVAGSMDKDCEMKRTTLDSPLGKLELSGCEQGLHRIIFLGKGTSAADAVEVPAPAAVLGGPEPLIQATAWLNAYFHQPEAIEEFPVPALHHPVFQQESFTRQVLWKLLKVVKFGEVISESHLAALVGNPAATAAVNTALDGNPVPILIPCHRVVQGDSDVGPYLGGLAVKEWLLAHEGHRLGKPGLG

SEQ ID NO: 39 - protein, 486 aa, synthetic construct
  REGION 1..486: note = Description of Artificial Sequence: Synthetic polypeptide
MAKDFQDIQQLSSEENDHPFHQGPPPAQPLAQRLCSMVCFSLLALSFNILLLVVICVTGSQSAQLQAELRSLKEAFSNFSSSTLTEVQAISTHGGSVGDKITSLGAKLEKQQQDLKADHDALLFHLKHFPVDLRFVACQMELLHSNGSQRTCCPVNWVEHQGSCYWFSHSGKAWAEAEKYCQLENAHLVVINSWEEQKFIVQHTNPFNTWIGLTDSDGSWKWVDGTDYRHNYKNWAVTQPDNWHGHELGGSEDCVEVQPDGRWNDDFCLQVYRWVCEKRRNATGEVAGSGGGGSGGGGSGGGGSMDKDCEMKRTTLDSPLGKLELSGCEQGLHRIIFLGKGTSAADAVEVPAPAAVLGGPEPLIQATAWLNAYFHQPEAIEEFPVPALHHPVFQQESFTRQVLWKLLKVVKFGEVISESHLAALVGNPAATAAVNTALDGNPVPILIPCHRVVQGDSDVGPYLGGLAVKEWLLAHEGHRLGKPGLG

SEQ ID NO: 40 - protein, 490 aa, synthetic construct
  REGION 1..490: note = Description of Artificial Sequence: Synthetic polypeptide
MAKDFQDIQQLSSEENDHPFHQGEGPGTRRLNPRRGNPFLKGPPPAQPLAQRLCSMVCFSLLALSFNILLLVVICVTGSQSAQLQAELRSLKEAFSNFSSSTLTEVQAISTHGGSVGDKITSLGAKLEKQQQDLKADHDALLFHLKHFPVDLRFVACQMELLHSNGSQRTCCPVNWVEHQGSCYWFSHSGKAWAEAEKYCQLENAHLVVINSWEEQKFIVQHTNPFNTWIGLTDSDGSWKWVDGTDYRHNYKNWAVTQPDNWHGHELGGSEDCVEVQPDGRWNDDFCLQVYRWVCEKRRNATGEVAGSMDKDCEMKRTTLDSPLGKLELSGCEQGLHRIIFLGKGTSAADAVEVPAPAAVLGGPEPLMQATAWLNAYFHQPEAIEEFPVPALHHPVFQQESFTRQVLWKLLKVVKFGEVISYSHLAALAGNPAATAAVKTALSGNPVPILIPCHRVVQGDLDVGGYEGGLAVKEWLLAHEGHRLGKPGLG

SEQ ID NO: 41 - protein, 505 aa, synthetic construct
  REGION 1..505: note = Description of Artificial Sequence: Synthetic polypeptide
MAKDFQDIQQLSSEENDHPFHQGEGPGTRRLNPRRGNPFLKGPPPAQPLAQRLCSMVCFSLLALSFNILLLVVICVTGSQSAQLQAELRSLKEAFSNFSSSTLTEVQAISTHGGSVGDKITSLGAKLEKQQQDLKADHDALLFHLKHFPVDLRFVACQMELLHSNGSQRTCCPVNWVEHQGSCYWFSHSGKAWAEAEKYCQLENAHLVVINSWEEQKFIVQHTNPFNTWIGLTDSDGSWKWVDGTDYRHNYKNWAVTQPDNWHGHELGGSEDCVEVQPDGRWNDDFCLQVYRWVCEKRRNATGEVAGSGGGGSGGGGSGGGGSMDKDCEMKRTTLDSPLGKLELSGCEQGLHRIIFLGKGTSAADAVEVPAPAAVLGGPEPLMQATAWLNAYFHQPEAIEEFPVPALHHPVFQQESFTRQVLWKLLKVVKFGEVISYSHLAALAGNPAATAAVKTALSGNPVPILIPCHRVVQGDLDVGGYEGGLAVKEWLLAHEGHRLGKPGLG

SEQ ID NO: 42 - protein, 490 aa, synthetic construct
  REGION 1..490: note = Description of Artificial Sequence: Synthetic polypeptide
MAKDFQDIQQLSSEENDHPFHQGEGPGTRRLNPRRGNPFLKGPPPAQPLAQRLCSMVCFSLLALSFNILLLVVICVTGSQSAQLQAELRSLKEAFSNFSSSTLTEVQAISTHGGSVGDKITSLGAKLEKQQQDLKADHDALLFHLKHFPVDLRFVACQMELLHSNGSQRTCCPVNWVEHQGSCYWFSHSGKAWAEAEKYCQLENAHLVVINSWEEQKFIVQHTNPFNTWIGLTDSDGSWKWVDGTDYRHNYKNWAVTQPDNWHGHELGGSEDCVEVQPDGRWNDDFCLQVYRWVCEKRRNATGEVAGSMDKDCEMKRTTLDSPLGKLELSGCEQGLHRIIFLGKGTSAADAVEVPAPAAVLGGPEPLIQATAWLNAYFHQPEAIEEFPVPALHHPVFQQESFTRQVLWKLLKVVKFGEVISESHLAALVGNPAATAAVNTALDGNPVPILIPCHRVVQGDSDVGPYLGGLAVKEWLLAHEGHRLGKPGLG

SEQ ID NO: 43 - protein, 505 aa, synthetic construct
  REGION 1..505: note = Description of Artificial Sequence: Synthetic polypeptide
MAKDFQDIQQLSSEENDHPFHQGEGPGTRRLNPRRGNPFLKGPPPAQPLAQRLCSMVCFSLLALSFNILLLVVICVTGSQSAQLQAELRSLKEAFSNFSSSTLTEVQAISTHGGSVGDKITSLGAKLEKQQQDLKADHDALLFHLKHFPVDLRFVACQMELLHSNGSQRTCCPVNWVEHQGSCYWFSHSGKAWAEAEKYCQLENAHLVVINSWEEQKFIVQHTNPFNTWIGLTDSDGSWKWVDGTDYRHNYKNWAVTQPDNWHGHELGGSEDCVEVQPDGRWNDDFCLQVYRWVCEKRRNATGEVAGSGGGGSGGGGSGGGGSMDKDCEMKRTTLDSPLGKLELSGCEQGLHRIIFLGKGTSAADAVEVPAPAAVLGGPEPLIQATAWLNAYFHQPEAIEEFPVPALHHPVFQQESFTRQVLWKLLKVVKFGEVISESHLAALVGNPAATAAVNTALDGNPVPILIPCHRVVQGDSDVGPYLGGLAVKEWLLAHEGHRLGKPGLG

SEQ ID NO: 44 - protein, 291 aa, Homo sapiens; identical to SEQ ID NO: 5

SEQ ID NO: 45 - protein, 291 aa, Homo sapiens
MTKEYQDLQHLDNEESDHHQLRKGPPPPQPLLQRLCSGPRLLLLSLGLSLLLLVVVCVIGSQNSQLQEELRGLRETFSNFTASTEAQVKGLSTQGGNVGRKMKSLESQLEKQQKDLSEDHSSLLLHVKQFVSDLRSLSCQMAALQGNGSERTCCPVNWVEHERSCYWFSRSGKAWADADNYCRLEDAHLVVVTSWEEQKFVQHHIGPVNTWMGLHDQNGPWKWVDGTDYETGFKNWRPEQPDDWYGHGLGGGEDCAHFTDDGRWNDDVCQRPCRWVCETELDKASQEPPLL

SEQ ID NO: 46 - protein, 299 aa, synthetic construct
  REGION 1..299: note = Description of Artificial Sequence: Synthetic polypeptide
MTKEYQDLQHLDNEESDHHQLRKGPPPPQPLLQRLCSGPRLLLLSLGLSLLLLVVVCVIGSQNSQLQEELRGLRETFSNFTASTEAQVKGLSTQGGNVGRKMKSLESQLEKQQKDLSEDHSSLLLHVKQFVSDLRSLSCQMAALQGNGSERTCCPVNWVEHERSCYWFSRSGKAWADADNYCRLEDAHLVVVTSWEEQKFVQHHIGPVNTWMGLHDQNGPWKWVDGTDYETGFKNWRPEQPDDWYGHGLGGGEDCAHFTDDGRWNDDVCQRPYRWVCETELDKASQEPPLLDYKDDDDK

SEQ ID NO: 47 - protein, 299 aa, synthetic construct
  REGION 1..299: note = Description of Artificial Sequence: Synthetic polypeptide
MTKEYQDLQHLDNEESDHHQLRKGPPPPQPLLQRLCSGPRLLLLSLGLSLLLLVVVCVIGSQNSQLQEELRGLRETFSNFTASTEAQVKGLSTQGGNVGRKMKSLESQLEKQQKDLSEDHSSLLLHVKQFVSDLRSLSCQMAALQGNGSERTCCPVNWVEHERSCYWFSRSGKAWADADNYCRLEDAHLVVVTSWEEQKFVQHHIGPVNTWMGLHDQNGPWKWVDGTDYETGFKNWRPEQPDDWYGHGLGGGEDCAHFTDDGRWNDDVCQRPCRWVCETELDKASQEPPLLDYKDDDDK

SEQ ID NO: 48 - protein, 291 aa, Macaca fascicularis
MTKEYQDLQHLDNEESDHHQLGKGPPPPQSLLRRLCSGPRLLLLSLGLSLLLLVVVCVIGSQNAQLQRELRGLRETLSNFTASTEAQVKGLSTQGGNVGRKMKSLESQLEKQQKDLSEDHSSLLLHVKQFVSDLRSLSCQMAALQGNGSERACCPVNWVEHERSCYWFSRSGKAWADADNYCRLEDAHLVVVTSWEEQKFVQHHIGPVNTWMGLHDQNGPWKWVDGTDYETGFKNWRPEQPDDWYGHGLGGGEDCAHFTDDGRWNDDVCQRPYRWVCETELDKASQEPPLL

SEQ ID NO: 49 - protein, 291 aa, Macaca fascicularis
MTKEYQDLQHLDNEESDHHQLGKGPPPPQSLLRRLCSGPRLLLLSLGLSLLLLVVVCVIGSQNAQLQRELRGLRETLSNFTASTEAQVKGLSTQGGNVGRKMKSLESQLEKQQKDLSEDHSSLLLHVKQFVSDLRSLSCQMAALQGNGSERACCPVNWVEHERSCYWFSRSGKAWADADNYCRLEDAHLVVVTSWEEQKFVQHHIGPVNTWMGLHDQNGPWKWVDGTDYETGFKNWRPEQPDDWYGHGLGGGEDCAHFTDDGRWNDDVCQRPCRWVCETELDKASQEPPLL

SEQ ID NO: 50 - protein, 299 aa, synthetic construct
  REGION 1..299: note = Description of Artificial Sequence: Synthetic polypeptide
MTKEYQDLQHLDNEESDHHQLGKGPPPPQSLLRRLCSGPRLLLLSLGLSLLLLVVVCVIGSQNAQLQRELRGLRETLSNFTASTEAQVKGLSTQGGNVGRKMKSLESQLEKQQKDLSEDHSSLLLHVKQFVSDLRSLSCQMAALQGNGSERACCPVNWVEHERSCYWFSRSGKAWADADNYCRLEDAHLVVVTSWEEQKFVQHHIGPVNTWMGLHDQNGPWKWVDGTDYETGFKNWRPEQPDDWYGHGLGGGEDCAHFTDDGRWNDDVCQRPYRWVCETELDKASQEPPLLDYKDDDDK

SEQ ID NO: 51 - protein, 299 aa, synthetic construct
  REGION 1..299: note = Description of Artificial Sequence: Synthetic polypeptide
MTKEYQDLQHLDNEESDHHQLGKGPPPPQSLLRRLCSGPRLLLLSLGLSLLLLVVVCVIGSQNAQLQRELRGLRETLSNFTASTEAQVKGLSTQGGNVGRKMKSLESQLEKQQKDLSEDHSSLLLHVKQFVSDLRSLSCQMAALQGNGSERACCPVNWVEHERSCYWFSRSGKAWADADNYCRLEDAHLVVVTSWEEQKFVQHHIGPVNTWMGLHDQNGPWKWVDGTDYETGFKNWRPEQPDDWYGHGLGGGEDCAHFTDDGRWNDDVCQRPCRWVCETELDKASQEPPLLDYKDDDDK

SEQ ID NO: 52 - protein, 284 aa, Mus sp.; identical to SEQ ID NO: 1

SEQ ID NO: 53 - protein, 284 aa, Mus sp.
MTKDYQDFQHLDNDNDHHQLRRGPPPTPRLLQRLCSGSRLLLLSSSLSILLLVVVCVITSQNSQLREDLLALRQNFSNLTVSTEDQVKALSTQGSSVGRKMKLVESKLEKQQKDLTEDHSSLLLHVKQLVSDVRSLSCQMAAFRGNGSERTCCPINWVEYEGSCYWFSSSVRPWTEADKYCQLENAHLVVVTSRDEQNFLQRHMGPLNTWIGLTDQNGPWKWVDGTDYETGFQNWRPEQPDNWYGHGLGGGEDCAHFTTDGRWNDDVCRRPCRWVCETKLDKAN

SEQ ID NO: 54 - protein, 284 aa, Rattus sp.
MTKDYQDFQHLDNENDHHQLQRGPPPAPRLLQRLCSGFRLFLLSLGLSILLLVVVCVITSQNSQLREDLRVLRQNFSNFTVSTEDQVKALTTQGERVGRKMKLVESQLEKHQEDLREDHSRLLLHVKQLVSDVRSLSCQMAALRGNGSERICCPINWVEYEGSCYWFSSSVKPWTEADKYCQLENAHLVVVTSWEEQRFVQQHMGPLNTWIGLTDQNGPWKWVDGTDYETGFKNWRPGQPDDWYGHGLGGGEDCAHFTTDGHWNDDVCRRPYRWVCETELGKAN

SEQ ID NO: 55 - protein, 284 aa, Rattus sp.
MTKDYQDFQHLDNENDHHQLQRGPPPAPRLLQRLCSGFRLFLLSLGLSILLLVVVCVITSQNSQLREDLRVLRQNFSNFTVSTEDQVKALTTQGERVGRKMKLVESQLEKHQEDLREDHSRLLLHVKQLVSDVRSLSCQMAALRGNGSERICCPINWVEYEGSCYWFSSSVKPWTEADKYCQLENAHLVVVTSWEEQRFVQQHMGPLNTWIGLTDQNGPWKWVDGTDYETGFKNWRPGQPDDWYGHGLGGGEDCAHFTTDGHWNDDVCRRPCRWVCETELGKAN

SEQ ID NO: 56 - protein, 292 aa, synthetic construct
  REGION 1..292: note = Description of Artificial Sequence: Synthetic polypeptide
MTKDYQDFQHLDNDNDHHQLRRGPPPTPRLLQRLCSGSRLLLLSSSLSILLLVVVCVITSQNSQLREDLLALRQNFSNLTVSTEDQVKALSTQGSSVGRKMKLVESKLEKQQKDLTEDHSSLLLHVKQLVSDVRSLSCQMAAFRGNGSERTCCPINWVEYEGSCYWFSSSVRPWTEADKYCQLENAHLVVVTSRDEQNFLQRHMGPLNTWIGLTDQNGPWKWVDGTDYETGFQNWRPEQPDNWYGHGLGGGEDCAHFTTDGRWNDDVCRRPYRWVCETKLDKANDYKDDDDK

SEQ ID NO: 57 - protein, 292 aa, synthetic construct
  REGION 1..292: note = Description of Artificial Sequence: Synthetic polypeptide
MTKDYQDFQHLDNDNDHHQLRRGPPPTPRLLQRLCSGSRLLLLSSSLSILLLVVVCVITSQNSQLREDLLALRQNFSNLTVSTEDQVKALSTQGSSVGRKMKLVESKLEKQQKDLTEDHSSLLLHVKQLVSDVRSLSCQMAAFRGNGSERTCCPINWVEYEGSCYWFSSSVRPWTEADKYCQLENAHLVVVTSRDEQNFLQRHMGPLNTWIGLTDQNGPWKWVDGTDYETGFQNWRPEQPDNWYGHGLGGGEDCAHFTTDGRWNDDVCRRPCRWVCETKLDKANDYKDDDDK

SEQ ID NO: 58 - protein, 292 aa, synthetic construct
  REGION 1..292: note = Description of Artificial Sequence: Synthetic polypeptide
MTKDYQDFQHLDNENDHHQLQRGPPPAPRLLQRLCSGFRLFLLSLGLSILLLVVVCVITSQNSQLREDLRVLRQNFSNFTVSTEDQVKALTTQGERVGRKMKLVESQLEKHQEDLREDHSRLLLHVKQLVSDVRSLSCQMAALRGNGSERICCPINWVEYEGSCYWFSSSVKPWTEADKYCQLENAHLVVVTSWEEQRFVQQHMGPLNTWIGLTDQNGPWKWVDGTDYETGFKNWRPGQPDDWYGHGLGGGEDCAHFTTDGHWNDDVCRRPYRWVCETELGKANDYKDDDDK

SEQ ID NO: 59 - protein, 292 aa, synthetic construct
  REGION 1..292: note = Description of Artificial Sequence: Synthetic polypeptide
MTKDYQDFQHLDNENDHHQLQRGPPPAPRLLQRLCSGFRLFLLSLGLSILLLVVVCVITSQNSQLREDLRVLRQNFSNFTVSTEDQVKALTTQGERVGRKMKLVESQLEKHQEDLREDHSRLLLHVKQLVSDVRSLSCQMAALRGNGSERICCPINWVEYEGSCYWFSSSVKPWTEADKYCQLENAHLVVVTSWEEQRFVQQHMGPLNTWIGLTDQNGPWKWVDGTDYETGFKNWRPGQPDDWYGHGLGGGEDCAHFTTDGHWNDDVCRRPCRWVCETELGKANDYKDDDDK

SEQ ID NO: 60 - protein, 287 aa, Homo sapiens; identical to SEQ ID NO: 6

SEQ ID NO: 61 - protein, 301 aa, Mus sp.; identical to SEQ ID NO: 2

SEQ ID NO: 62 - protein, 301 aa, Rattus sp.
MEKDFQDIQQLDSEENDHQLIGDEEQGSHVQNLRTENPRWGGQPPSRPFPQRLCSKFRLSLLALAFNILLLVVICVVSSQSMQLQKEFWTLKETLSNFSTTTLMEFKALDSHGGSRNDNLTSWETILEKKQKDIKADHSTLLFHLKHFPLDLRTLTCQLAFFLSNGTECCPVNWVEFGGSCYWFSRDGLTWAEADQYCQMENAHLLVINSREEQEFVVKHRGAFHIWIGLTDKDGSWKWVDGTEYRSNFKNWAFTQPDNWQGHEEGGSEDCAEILSDGLWNDNFCQQVNRWACERKRDITY

SEQ ID NO: 63 - protein, 293 aa, synthetic construct
  REGION 1..293: note = Description of Artificial Sequence: Synthetic polypeptide
MAKDFQDIQQLSSEENDHPFHQGPPPAQPLAQRLCSMVCFSLLALSFNILLLVVICVTGSQSAQLQAELRSLKEAFSNFSSSTLTEVQAISTHGGSVGDKITSLGAKLEKQQQDLKADHDALLFHLKHFPVDLRFVACQMELLHSNGSQRTCCPVNWVEHQGSCYWFSHSGKAWAEAEKYCQLENAHLVVINSWEEQKFIVQHTNPFNTWIGLTDSDGSWKWVDGTDYRHNYKNWAVTQPDNWHGHELGGSEDCVEVQPDGRWNDDFCLQVYRWVCEKRRNATGEVAHHHHHH

SEQ ID NO: 64 - protein, 307 aa, synthetic construct
  REGION 1..307: note = Description of Artificial Sequence: Synthetic polypeptide
MEKDCQDIQQLDSEENDHQLSGDDEHGSHVQDPRIENPHWKGQPLSRPFPQRLCSTFRLSLLALAFNILLLVVICVVSSQSIQLQEEFRTLKETFSNFSSSTLMEFGALDTLGGSTNAILTSWLAQLEEKQQQLKADHSTLLFHLKHFPMDLRTLTCQLAYFQSNGTECCPVNWVEFGGSCYWFSRDGLTWAEADQYCQLENAHLLVINSREEQDFVVKHRSQFHIWIGLTDRDGSWKWVDGTDYRSNYRNWAFTQPDNWQGHEQGGGEDCAEILSDGHWNDNFCQQVNRWVCEKRRNITHHHHHHH

SEQ ID NO: 65 - protein, 307 aa, synthetic construct
  REGION 1..307: note = Description of Artificial Sequence: Synthetic polypeptide
MEKDFQDIQQLDSEENDHQLIGDEEQGSHVQNLRTENPRWGGQPPSRPFPQRLCSKFRLSLLALAFNILLLVVICVVSSQSMQLQKEFWTLKETLSNFSTTTLMEFKALDSHGGSRNDNLTSWETILEKKQKDIKADHSTLLFHLKHFPLDLRTLTCQLAFFLSNGTECCPVNWVEFGGSCYWFSRDGLTWAEADQYCQMENAHLLVINSREEQEFVVKHRGAFHIWIGLTDKDGSWKWVDGTEYRSNFKNWAFTQPDNWQGHEEGGSEDCAEILSDGLWNDNFCQQVNRWACERKRDITYHHHHHH

SEQ ID NO: 66 - protein, 308 aa, synthetic construct
  REGION 1..308: note = Description of Artificial Sequence: Synthetic polypeptide
MAKDCQDIQQLDSEDSDQQLGRGEGPGPRGHGPRREDRFCRRLPPHQPLLLQRLCSGYRLNLLVLGFNVLMLVAICVIGSQRAQLEEELRILKENFSHFSSGVLMELGVLLSDGGGASSQLTSLEAKLEKQQRDVKADHATLLLHLKHFPSDLRILTCQVAFFQSNGTDCCPVNWLEYEGSCYWFSRSGKTWEEAEKYCQLESAHLVVVNSREEQKFILQHTNPFDTWIGLTDSDGSWRWVDGTDYQQSYKNWAATQPDDWQGHEVGGGEDCAEVRANGRWNDNFCKQVQRWVCEMRRNVTGHHHHHH

SEQ ID NO: 67 - protein, 302 aa, Canis lupus
  source 1..302: note = subsp. familiaris
MAKDCQDIQQLDSEDSDQQLGRGEGPGPRGHGPRREDRFCRRLPPHQPLLLQRLCSGYRLNLLVLGFNVLMLVAICVIGSQRAQLEEELRILKENFSHFSSGVLMELGVLLSDGGGASSQLTSLEAKLEKQQRDVKADHATLLLHLKHFPSDLRILTCQVAFFQSNGTDCCPVNWLEYEGSCYWFSRSGKTWEEAEKYCQLESAHLVVVNSREEQKFILQHTNPFDTWIGLTDSDGSWRWVDGTDYQQSYKNWAATQPDDWQGHEVGGGEDCAEVRANGRWNDNFCKQVQRWVCEMRRNVTG

SEQ ID NO: 68 - protein, 306 aa, Macaca fascicularis
MAKDFQDIQQLSSEENDHPFHRGEGPGPRGLNLRRGNPSLKGPPPAQPLAQRLCSMVRFSLLALSFNILLLVAICVIGSQSAQLQAELWSLKEAFSNFSSSTLMEVHALGTHGGSVGDKITSLGDKLEKQQQDLKADHDILLLHLKHFPVDLRFVACQMELLHSNGSQRTCCPVNWVEHQGSCYWFSRSGKAWAEAEKYCQLENSHLVVINSWEEQKFIVQHTNLFNTWIGLTDSDGSWKWVDGTDYRHNYKNWAVTQPDDWHGHELGGSEDCVEVRPDGRWNDDFCLQVHRWVCEKRRNATGEAA

SEQ ID NO: 69 - protein, 312 aa, synthetic construct
  REGION 1..312: note = Description of Artificial Sequence: Synthetic polypeptide
MAKDFQDIQQLSSEENDHPFHRGEGPGPRGLNLRRGNPSLKGPPPAQPLAQRLCSMVRFSLLALSFNILLLVAICVIGSQSAQLQAELWSLKEAFSNFSSSTLMEVHALGTHGGSVGDKITSLGDKLEKQQQDLKADHDILLLHLKHFPVDLRFVACQMELLHSNGSQRTCCPVNWVEHQGSCYWFSRSGKAWAEAEKYCQLENSHLVVINSWEEQKFIVQHTNPFNTWIGLTDSDGSWKWVDGTDYRHNYKNWAVTQPDDWHGHELGGSEDCVEVRPDGRWNDDFCLQVHRWVCEKRRNATGEAAHHHHHH

SEQ ID NO: 70 - protein, 289 aa, synthetic construct
  REGION 1..289: note = Description of Artificial Sequence: Synthetic polypeptide
MARDFQDIQQLDSEENDHQLGRGTPLPQPLVLQRLCSKLRLSLLVLGFNVLMLVAVCVVGSQRTQLQMELQTLKETFSNFSSSLLMEMLTLSTRGGSAGDKVTSLEAKMEKQQQDLKADHATLRLHLKHFPRDVRTLTCRLVFLQSNGTECCPVNWVDYEGSCYWFSRSGKAWAEAEKYCQLENAHLVVINSREEQKFIAQRTNPFQTWIGLTDSDGSWKWVDGTDYGNGYKNWGALQPDDWQGHELGGSEDCVEIQGDGRWNDDFCQQVKRWVCEMKQNITMHHHHHH

SEQ ID NO: 71 - protein, 306 aa, Macaca fascicularis
MAKDFQDIQQLSSEENDHPFHRGEGPGPRGLNLRRGNPSLKGPPPAQPLAQRLCSMVRFSLLALSFNILLLVAICVIGSQSAQLQAELWSLKEAFSNFSSSTLMEVHALGTHGGSVGDKITSLGDKLEKQQQDLKADHDILLLHLKHFPVDLRFVACQMELLHSNGSQRTCCPVNWVEHQGSCYWFSRSGKAWAEAEKYCQLENSHLVVINSWEEQKFIVQHTNPFNTWIGLTDSDGSWKWVDGTDYRHNYKNWAVTQPDDWHGHELGGSEDCVEVRPDGRWNDDFCLQVHRWVCEKRRNATGEAA

SEQ ID NO: 72 - protein, 283 aa, Sus sp.
MARDFQDIQQLDSEENDHQLGRGTPLPQPLVLQRLCSKLRLSLLVLGFNVLMLVAVCVVGSQRTQLQMELQTLKETFSNFSSSLLMEMLTLSTRGGSAGDKVTSLEAKMEKQQQDLKADHATLRLHLKHFPRDVRTLTCRLVFLQSNGTECCPVNWVDYEGSCYWFSRSGKAWAEAEKYCQLENAHLVVINSREEQKFIAQRTNPFQTWIGLTDSDGSWKWVDGTDYGNGYKNWGALQPDDWQGHELGGSEDCVEIQGDGRWNDDFCQQVKRWVCEMKQNITM

SEQ ID NO: 73 - protein, 284 aa, Canis lupus
  source 1..284: note = subsp. familiaris
MTNDYQDLQHLDNEDNDHHLRQVPPAPQPLLRRLCSGPCLLLLSLGLSVLLLVVVCVIGSQNSKLRGELQALRETFSNFTASTEVEVKALSSQGGNVGRKMKSLESQLEKQQKDLSEDHSDLLLHVKQFVSDLRSLSCQIAALHGNGSTLTCCPVNWLEYEGSCYWFSRSGKSWPEADKYCQLESAHLVVVNSREEQKFIQHHMGPVNTWMGLTDQSGPWKWVDGTDYETGFKNWRPEQPDDWYGHGLGGGEDCAHFTDDGRWNDDVCQRPYRWVCEAARDPAT

SEQ ID NO: 74 - protein, 286 aa, Sus sp.
MTKEYQDLQHLDNEENDQQHRKGPPPQPSLLRRLCSGPCLLLISMGLSLLLLVVVCVIGSQNSKLQEELQALRETFSNLTASTDAKVKTLSMQGGNVGRKMKSLESQLEKQQQDLSEDHSSLLLHVKQFVSDLRSLSCQMAVLQGNGSERTCCPVNWVGYEGSCYWFSRSGKPWPEAEKYCQLENAHLVVVGSWEEQKFIQHHVGPVNSWIGLTDQSGPWKWVDGTDYESGFKNWRPEQPDDWYGHGLGGGEDCAHFTEDGGWNDDICQRPYRWVCETQRDRDSGS

SEQ ID NO: 75 - protein, 292 aa, synthetic construct
  REGION 1..292: note = Description of Artificial Sequence: Synthetic polypeptide
MTNDYQDLQHLDNEDNDHHLRQVPPAPQPLLRRLCSGPCLLLLSLGLSVLLLVVVCVIGSQNSKLRGELQALRETFSNFTASTEVEVKALSSQGGNVGRKMKSLESQLEKQQKDLSEDHSDLLLHVKQFVSDLRSLSCQIAALHGNGSTLTCCPVNWLEYEGSCYWFSRSGKSWPEADKYCQLESAHLVVVNSREEQKFIQHHMGPVNTWMGLTDQSGPWKWVDGTDYETGFKNWRPEQPDDWYGHGLGGGEDCAHFTDDGRWNDDVCQRPYRWVCEAARDPATDYKDDDDK

SEQ ID NO: 76 - protein, 294 aa, synthetic construct
  REGION 1..294: note = Description of Artificial Sequence: Synthetic polypeptide
MTKEYQDLQHLDNEENDQQHRKGPPPQPSLLRRLCSGPCLLLISMGLSLLLLVVVCVIGSQNSKLQEELQALRETFSNLTASTDAKVKTLSMQGGNVGRKMKSLESQLEKQQQDLSEDHSSLLLHVKQFVSDLRSLSCQMAVLQGNGSERTCCPVNWVGYEGSCYWFSRSGKPWPEAEKYCQLENAHLVVVGSWEEQKFIQHHVGPVNSWIGLTDQSGPWKWVDGTDYESGFKNWRPEQPDDWYGHGLGGGEDCAHFTEDGGWNDDICQRPYRWVCETQRDRDSGSDYKDDDDK

SEQ ID NO: 77 - protein, 94 aa, Homo sapiens
MTKEYQDLQHLDNEESDHHQLRKGPPPPQPLLQRLCSGPRLLLLSLGLSLLLLVVVCVIGSQNSQLQEELRGLRETFSNFTASTEAQEAMWEER

SEQ ID NO: 78 - protein, 105 aa, synthetic construct
  REGION 1..105: note = Description of Artificial Sequence: Synthetic polypeptide
MTKEYQDLQHLDNEESDHHQLRKGPPPPQPLLQRLCSGPRLLLLSLGLSLLLLVVVCVIGSQNSQLQEELRGLRETFSNFTASTEAQEAMWEERGQQKLISEEDL

SEQ ID NO: 79 - DNA, 33 bp, synthetic construct
  misc_feature 1..33: note = Description of Artificial Sequence: Synthetic oligonucleotide
  source 1..33: mol_type = other DNA
cgggcaagtcggagcgttagcagatatttaaat

SEQ ID NO: 80 - protein, 11 aa, synthetic construct
  REGION 1..11: note = Description of Artificial Sequence: Synthetic peptide
RASRSVSRYLN

SEQ ID NO: 81 - DNA, 51 bp, synthetic construct
  misc_feature 1..51: note = Description of Artificial Sequence: Synthetic oligonucleotide
  source 1..51: mol_type = other DNA
aagtccagccagagtcttttaaagagctccaacaataagagctacttagct

SEQ ID NO: 82 - protein, 17 aa, synthetic construct
  REGION 1..17: note = Description of Artificial Sequence: Synthetic peptide
KSSQSLLKSSNNKSYLA

SEQ ID NO: 83 - DNA, 51 bp, synthetic construct
  misc_feature 1..51: note = Description of Artificial Sequence: Synthetic oligonucleotide
  source 1..51: mol_type = other DNA
aagtccagccagagtgttttattcagctccaacaattataactacttagct

SEQ ID NO: 84 - protein, 17 aa, synthetic construct
  REGION 1..17: note = Description of Artificial Sequence: Synthetic peptide
KSSQSVLFSSNNYNYLA

SEQ ID NO: 85 - DNA, 48 bp, synthetic construct
  misc_feature 1..48: note = Description of Artificial Sequence: Synthetic oligonucleotide
  source 1..48: mol_type = other DNA
aagtctagtcagagcctcctgcgtagtgatggaaagacccatttgtat

SEQ ID NO: 86 - protein, 16 aa, synthetic construct
  REGION 1..16: note = Description of Artificial Sequence: Synthetic peptide
KSSQSLLRSDGKTHLY

SEQ ID NO: 87 - DNA, 33 bp, synthetic construct
  misc_feature 1..33: note = Description of Artificial Sequence: Synthetic oligonucleotide
  source 1..33: mol_type = other DNA
ccggcgagtcagggcattagcaattatttagct

SEQ ID NO: 88 - protein, 11 aa, synthetic construct
  REGION 1..11: note = Description of Artificial Sequence: Synthetic peptide
PASQGISNYLA

SEQ ID NO: 89 - DNA, 33 bp, synthetic construct
  misc_feature 1..33: note = Description of Artificial Sequence: Synthetic oligonucleotide
  source 1..33: mol_type = other DNA
tctggagataaattgggtaataaatatgtttgt

SEQ ID NO: 90 - protein, 11 aa, synthetic construct
  REGION 1..11: note = Description of Artificial Sequence: Synthetic peptide
SGDKLGNKYVC

SEQ ID NO: 91 - DNA, 33 bp, synthetic construct
  misc_feature 1..33: note = Description of Artificial Sequence: Synthetic oligonucleotide
  source 1..33: mol_type = other DNA
cgggggggtcagggtattagcacatggttagca

SEQ ID NO: 92 - protein, 11 aa, synthetic construct
  REGION 1..11: note = Description of Artificial Sequence: Synthetic peptide
RGGQGISTWLA

SEQ ID NO: 93 - DNA, 33 bp, synthetic construct
  misc_feature 1..33: note = Description of Artificial Sequence: Synthetic oligonucleotide
  source 1..33: mol_type = other DNA
cggacaagtcagggcattagaaatgatttaggc

SEQ ID NO: 94 - protein, 11 aa, synthetic construct
  REGION 1..11: note = Description of Artificial Sequence: Synthetic peptide
RTSQGIRNDLG

SEQ ID NO: 95 - DNA, 33 bp, synthetic construct
  misc_feature 1..33: note = Description of Artificial Sequence: Synthetic oligonucleotide
  source 1..33: mol_type = other DNA
cgggcgagtcagggtattagcaaatggttagcc

SEQ ID NO: 96 - protein, 11 aa, synthetic construct
  REGION 1..11: note = Description of Artificial Sequence: Synthetic peptide
RASQGISKWLA

SEQ ID NO: 97 - DNA, 33 bp, synthetic construct
  misc_feature 1..33: note = Description of Artificial Sequence: Synthetic oligonucleotide
  source 1..33: mol_type = other DNA
cgggcgagtcagggtattagcaagtggttagcc

SEQ ID NO: 98 - protein, 11 aa, synthetic construct
  REGION 1..11: note = Description of Artificial Sequence: Synthetic peptide
RASQGISKWLA

SEQ ID NO: 99 - DNA, 36 bp, synthetic construct
  misc_feature 1..36: note = Description of Artificial Sequence: Synthetic oligonucleotide
  source 1..36: mol_type = other DNA
agggccagtcagagtgttaacagcaactacttagcc

SEQ ID NO: 100 - protein, 12 aa, synthetic construct
  REGION 1..12: note = Description of Artificial Sequence: Synthetic peptide
RASQSVNSNYLA

SEQ ID NO: 101 - DNA, 33 bp, synthetic construct
  misc_feature 1..33: note = Description of Artificial Sequence: Synthetic oligonucleotide
  source 1..33: mol_type = other DNA
cgggcaagtcgagacattagaaatgatttaggc

SEQ ID NO: 102 - protein, 11 aa, synthetic construct
  REGION 1..11: note = Description of Artificial Sequence: Synthetic peptide
RASRDIRNDLG

SEQ ID NO: 103 - DNA, 48 bp, synthetic construct
  misc_feature 1..48: note = Description of Artificial Sequence: Synthetic oligonucleotide
  source 1..48: mol_type = other DNA
aagtctagtcagagcctcctgcatagtgaaggaaagacctatttgtat

SEQ ID NO: 104 - protein, 16 aa, synthetic construct
  REGION 1..16: note = Description of Artificial Sequence: Synthetic peptide
KSSQSLLHSEGKTYLY

SEQ ID NO: 105 - DNA, 33 bp, synthetic construct
  misc_feature 1..33: note = Description of Artificial Sequence: Synthetic oligonucleotide
  source 1..33: mol_type = other DNA
cgggcgagtcagggcattagcaattatttagcc

SEQ ID NO: 106 - protein, 11 aa, synthetic construct
  REGION 1..11: note = Description of Artificial Sequence: Synthetic peptide
RASQGISNYLA

SEQ ID NO: 107 - DNA, 48 bp, synthetic construct
  misc_feature 1..48: note = Description of Artificial Sequence: Synthetic oligonucleotide
  source 1..48: mol_type = other DNA
aagtctagtcagcgcctcctgcatggtgatggaaagacctatttgtat

SEQ ID NO: 108 - protein, 16 aa, synthetic construct
  REGION 1..16: note = Description of Artificial Sequence: Synthetic peptide
KSSQRLLHGDGKTYLY

SEQ ID NO: 109 - DNA, 33 bp, synthetic construct
  misc_feature 1..33: note = Description of Artificial Sequence: Synthetic oligonucleotide
  source 1..33: mol_type = other DNA
cgggcaagtcagggcattagaaatgatttaggc

SEQ ID NO: 110 - protein, 11 aa, synthetic construct
  REGION 1..11: note = Description of Artificial Sequence: Synthetic peptide
RASQGIRNDLG

SEQ ID NO: 111 - DNA, 33 bp, synthetic construct; identical to SEQ ID NO: 109
  misc_feature 1..33: note = Description of Artificial Sequence: Synthetic oligonucleotide
  source 1..33: mol_type = other DNA

SEQ ID NO: 112 - protein, 11 aa, synthetic construct
  REGION 1..11: note = Description of Artificial Sequence: Synthetic peptide
RASQGIRNDLG

SEQ ID NO: 113 - DNA, 33 bp, synthetic construct
  misc_feature 1..33: note = Description of Artificial Sequence: Synthetic oligonucleotide
  source 1..33: mol_type = other DNA
cgggcaagtcagggcattagacatgatttaggc

SEQ ID NO: 114 - protein, 11 aa, synthetic construct
  REGION 1..11: note = Description of Artificial Sequence: Synthetic peptide
RASQGIRHDLG

SEQ ID NO: 115 - DNA, 33 bp, synthetic construct
  misc_feature 1..33: note = Description of Artificial Sequence: Synthetic oligonucleotide
  source 1..33: mol_type = other DNA
agggccagtcagactgttaacagcaacttagcc

SEQ ID NO: 116 - protein, 11 aa, synthetic construct
  REGION 1..11: note = Description of Artificial Sequence: Synthetic peptide
RASQTVNSNLA

SEQ ID NO: 117 - DNA, 33 bp, synthetic construct
  misc_feature 1..33: note = Description of Artificial Sequence: Synthetic oligonucleotide
  source 1..33: mol_type = other DNA
aggaccagtcagagtgtttggattagcgtagcc

SEQ ID NO: 118 - protein, 11 aa, synthetic construct
  REGION 1..11: note = Description of Artificial Sequence: Synthetic peptide
RTSQSVWISVA

SEQ ID NO: 119 - DNA, 33 bp, synthetic construct
  misc_feature 1..33: note = Description of Artificial Sequence: Synthetic oligonucleotide
  source 1..33: mol_type = other DNA
cgggcaagtcaggacattagaaattatttaggc

SEQ ID NO: 120 - protein, 11 aa, synthetic construct
  REGION 1..11: note = Description of Artificial Sequence: Synthetic peptide
RASQDIRNYLG

SEQ ID NO: 121 - DNA, 36 bp, synthetic construct; identical to SEQ ID NO: 99
  misc_feature 1..36: note = Description of Artificial Sequence: Synthetic oligonucleotide
  source 1..36: mol_type = other DNA

SEQ ID NO: 122 - protein, 12 aa, synthetic construct
  REGION 1..12: note = Description of Artificial Sequence: Synthetic peptide
RASQSVNSNYLA

SEQ ID NO: 123 - DNA, 33 bp, synthetic construct
  misc_feature 1..33: note = Description of Artificial Sequence: Synthetic oligonucleotide
  source 1..33: mol_type = other DNA
cgggcaagtcagggcataagaaaagatttaggc

SEQ ID NO: 124 - protein, 11 aa, synthetic construct
  REGION 1..11: note = Description of Artificial Sequence: Synthetic peptide
RASQGIRKDLG

SEQ ID NO: 125 - DNA, 36 bp, synthetic construct
  misc_feature 1..36: note = Description of Artificial Sequence: Synthetic oligonucleotide
  source 1..36: mol_type = other DNA
agggccagtcagagcgttaacagcaactacttagcc

SEQ ID NO: 126 - protein, 12 aa, synthetic construct
  REGION 1..12: note = Description of Artificial Sequence: Synthetic peptide
RASQSVNSNYLA

SEQ ID NO: 127 - DNA, 33 bp, synthetic construct; identical to SEQ ID NO: 109
  misc_feature 1..33: note = Description of Artificial Sequence: Synthetic oligonucleotide
  source 1..33: mol_type = other DNA

SEQ ID NO: 128 - protein, 11 aa, synthetic construct
  REGION 1..11: note = Description of Artificial Sequence: Synthetic peptide
RASQGIRNDLG

SEQ ID NO: 129 - DNA, 36 bp, synthetic construct; identical to SEQ ID NO: 99
  misc_feature 1..36: note = Description of Artificial Sequence: Synthetic oligonucleotide
  source 1..36: mol_type = other DNA

SEQ ID NO: 130 - protein, 12 aa, synthetic construct
  REGION 1..12: note = Description of Artificial Sequence: Synthetic peptide
RASQSVNSNYLA

SEQ ID NO: 131 - DNA, 33 bp, synthetic construct; identical to SEQ ID NO: 109
  misc_feature 1..33: note = Description of Artificial Sequence: Synthetic oligonucleotide
  source 1..33: mol_type = other DNA

SEQ ID NO: 132 - protein, 11 aa, synthetic construct
  REGION 1..11: note = Description of Artificial Sequence: Synthetic peptide
RASQGIRNDLG

SEQ ID NO: 133 - DNA, 33 bp, synthetic construct
  misc_feature 1..33: note = Description of Artificial Sequence: Synthetic oligonucleotide
  source 1..33: mol_type = other DNA
cgggcaagtcagggcattagaagtgatttaggc

SEQ ID NO: 134 - protein, 11 aa, synthetic construct
  REGION 1..11: note = Description of Artificial Sequence: Synthetic peptide
RASQGIRSDLG

SEQ ID NO: 135 - DNA, 33 bp, synthetic construct; identical to SEQ ID NO: 119
  misc_feature 1..33: note = Description of Artificial Sequence: Synthetic oligonucleotide
  source 1..33: mol_type = other DNA

SEQ ID NO: 136 - protein, 11 aa, synthetic construct
  REGION 1..11: note = Description of Artificial Sequence: Synthetic peptide
RASQDIRNYLG

SEQ ID NO: 137 - DNA, 33 bp, synthetic construct
  misc_feature 1..33: note = Description of Artificial Sequence: Synthetic oligonucleotide
  source 1..33: mol_type = other DNA
cgggcaagtcagaacattagcagctatttaaat

SEQ ID NO: 138 - protein, 11 aa, synthetic construct
  REGION 1..11: note = Description of Artificial Sequence: Synthetic peptide
RASQNISSYLN

SEQ ID NO: 139 - DNA, 51 bp, synthetic construct
  misc_feature 1..51: note = Description of Artificial Sequence: Synthetic oligonucleotide
  source 1..51: mol_type = other DNA
aagtccagccagagtgttttatccagctccaacaataacaactacttagct

SEQ ID NO: 140 - protein, 17 aa, synthetic construct
  REGION 1..17: note = Description of Artificial Sequence: Synthetic peptide
KSSQSVLSSSNNNNYLA

SEQ ID NO: 141 - DNA, 51 bp, synthetic construct
  misc_feature 1..51: note = Description of Artificial Sequence: Synthetic oligonucleotide
  source 1..51: mol_type = other DNA
aagtccagccagagtgttttatccaactccaacaataacaactacttagct

SEQ ID NO: 142 - protein, 17 aa, synthetic construct
  REGION 1..17: note = Description of Artificial Sequence: Synthetic peptide
KSSQSVLSNSNNNNYLA

SEQ ID NO: 143 - DNA, 48 bp, synthetic construct
  misc_feature 1..48: note = Description of Artificial Sequence: Synthetic oligonucleotide
  source 1..48: mol_type = other DNA
aggtctggtcaaagcctcgtatacagtgatggaaacacctacttgaat

SEQ ID NO: 144 - protein, 16 aa, synthetic construct
  REGION 1..16: note = Description of Artificial Sequence: Synthetic peptide
RSGQSLVYSDGNTYLN

SEQ ID NO: 145 - DNA, 48 bp, synthetic construct
  misc_feature 1..48: note = Description of Artificial Sequence: Synthetic oligonucleotide
  source 1..48: mol_type = other DNA
aggtctagtcaaagcctcgtttacagtgttggaaacacctccttgagt

SEQ ID NO: 146 - protein, 16 aa, synthetic construct
  REGION 1..16: note = Description of Artificial Sequence: Synthetic peptide
RSSQSLVYSVGNTSLS

SEQ ID NO: 147 - DNA, 33 bp, synthetic construct
  misc_feature 1..33: note = Description of Artificial Sequence: Synthetic oligonucleotide
  source 1..33: mol_type = other DNA
cgggcaagtcggggcattagagatgatttaggc

SEQ ID NO: 148 - protein, 11 aa, synthetic construct
  REGION 1..11: note = Description of Artificial Sequence: Synthetic peptide
RASRGIRDDLG

SEQ ID NO: 149 - DNA, 33 bp, synthetic construct; identical to SEQ ID NO: 109
  misc_feature 1..33: note = Description of Artificial Sequence: Synthetic oligonucleotide
  source 1..33: mol_type = other DNA

SEQ ID NO: 150 - protein, 11 aa, synthetic construct
  REGION 1..11: note = Description of Artificial Sequence: Synthetic peptide
RASQGIRNDLG

SEQ ID NO: 151 - DNA, 42 bp, synthetic construct
  misc_feature 1..42: note = Description of Artificial Sequence: Synthetic oligonucleotide
  source 1..42: mol_type = other DNA
actggaaccagcagtgacgttggtggttataattttgtctcc

SEQ ID NO: 152 - protein, 14 aa, synthetic construct
  REGION 1..14: note = Description of Artificial Sequence: Synthetic peptide
TGTSSDVGGYNFVS

SEQ ID NO: 153 - DNA, 39 bp, synthetic construct
  misc_feature 1..39: note = Description of Artificial Sequence: Synthetic oligonucleotide
  source 1..39: mol_type = other DNA
tctggaagcagctccaacatcggaagtaatactgtaaac

SEQ ID NO: 154 - protein, 13 aa, synthetic construct
  REGION 1..13: note = Description of Artificial Sequence: Synthetic peptide
SGSSSNIGSNTVN

SEQ ID NO: 155 - DNA, 33 bp, synthetic construct
  misc_feature 1..33: note = Description of Artificial Sequence: Synthetic oligonucleotide
  source 1..33: mol_type = other DNA
actggagatgcaatgccgaaaaaatatgcttat

SEQ ID NO: 156 - protein, 11 aa, synthetic construct
  REGION 1..11: note = Description of Artificial Sequence: Synthetic peptide
TGDAMPKKYAY

SEQ ID NO: 157 - DNA, 33 bp, synthetic construct; identical to SEQ ID NO: 109
  misc_feature 1..33: note = Description of Artificial Sequence: Synthetic oligonucleotide
  source 1..33: mol_type = other DNA

SEQ ID NO: 158 - protein, 11 aa, synthetic construct
  REGION 1..11: note = Description of Artificial Sequence: Synthetic peptide
RASQGIRNDLG

SEQ ID NO: 159 - DNA, 51 bp, synthetic construct
  misc_feature 1..51: note = Description of Artificial Sequence: Synthetic oligonucleotide
  source 1..51: mol_type = other DNA
aagtccagccagagtgttttgtacagctccaacagtcacaactacttagct

SEQ ID NO: 160 - protein, 17 aa, synthetic construct
  REGION 1..17: note = Description of Artificial Sequence: Synthetic peptide
KSSQSVLYSSNSHNYLA

SEQ ID NO: 161 - DNA, 33 bp, synthetic construct
  misc_feature 1..33: note = Description of Artificial Sequence: Synthetic oligonucleotide
  source 1..33: mol_type = other DNA
cgggcaagtcaggacattagagataatttaggc

SEQ ID NO: 162 - protein, 11 aa, synthetic construct
  REGION 1..11: note = Description of Artificial Sequence: Synthetic peptide
RASQDIRDNLG

SEQ ID NO: 163 - DNA, 33 bp, synthetic construct
  misc_feature 1..33: note = Description of Artificial Sequence: Synthetic oligonucleotide
  source 1..33: mol_type = other DNA
tctggagataaattgggggataaatatgcttac

SEQ ID NO: 164 - protein, 11 aa, synthetic construct
  REGION 1..11: note = Description of Artificial Sequence: Synthetic peptide
SGDKLGDKYAY

SEQ ID NO: 165 - DNA, 48 bp, synthetic construct
  misc_feature 1..48: note = Description of Artificial Sequence: Synthetic oligonucleotide
  source 1..48: mol_type = other DNA
aggtctagtcaaagcctcgtatacagtgatggaaacaccttcttgaat

SEQ ID NO: 166 - protein, 16 aa, synthetic construct
  REGION 1..16: note = Description of Artificial Sequence: Synthetic peptide
RSSQSLVYSDGNTFLN

SEQ ID NO: 167 - DNA, 42 bp, synthetic construct; identical to SEQ ID NO: 151
  misc_feature 1..42: note = Description of Artificial Sequence: Synthetic oligonucleotide
  source 1..42: mol_type = other DNA

SEQ ID NO: 168 - protein, 14 aa, synthetic construct
  REGION 1..14: note = Description of Artificial Sequence: Synthetic peptide
TGTSSDVGGYNFVS

SEQ ID NO: 169 - DNA, 33 bp, synthetic construct; identical to SEQ ID NO: 133
  misc_feature 1..33: note = Description of Artificial Sequence: Synthetic oligonucleotide
  source 1..33: mol_type = other DNA

SEQ ID NO: 170 - protein, 11 aa, synthetic construct
  REGION 1..11: note = Description of Artificial Sequence: Synthetic peptide
RASQGIRSDLG

SEQ ID NO: 171 - DNA, 33 bp, synthetic construct
  misc_feature 1..33: note = Description of Artificial Sequence: Synthetic oligonucleotide
  source 1..33: mol_type = other DNA
cgggcgagtcagggtattagcagctggttagcc

SEQ ID NO: 172 - protein, 11 aa, synthetic construct
  REGION 1..11: note = Description of Artificial Sequence: Synthetic peptide
RASQGISSWLA

SEQ ID NO: 173 - DNA, 33 bp, synthetic construct
  misc_feature 1..33: note = Description of Artificial Sequence: Synthetic oligonucleotide
  source 1..33: mol_type = other DNA
cgggcgagtcagggtattagcaggtggttagcc

SEQ ID NO: 174 - protein, 11 aa, synthetic construct
  REGION 1..11: note = Description of Artificial Sequence: Synthetic peptide
RASQGISRWLA

SEQ ID NO: 175 - DNA, 33 bp, synthetic construct; identical to SEQ ID NO: 109
  misc_feature 1..33: note = Description of Artificial Sequence: Synthetic oligonucleotide
  source 1..33: mol_type = other DNA

SEQ ID NO: 176 - protein, 11 aa, synthetic construct
  REGION 1..11: note = Description of Artificial Sequence: Synthetic peptide
RASQGIRNDLG

SEQ ID NO: 177 - DNA, 33 bp, synthetic construct
  misc_feature 1..33: note = Description of Artificial Sequence: Synthetic oligonucleotide
  source 1..33: mol_type = other DNA
tctggagataaattgggggataaatatgtttac

SEQ ID NO: 178 - protein, 11 aa, synthetic construct
  REGION 1..11: note = Description of Artificial Sequence: Synthetic peptide
SGDKLGDKYVY

SEQ ID NO: 179 - DNA, 48 bp, synthetic construct
  misc_feature 1..48: note = Description of Artificial Sequence: Synthetic oligonucleotide
  source 1..48: mol_type = other DNA
aggtctagtcaaagcctcgtatccagtgatggaaacaccttcttgaat

SEQ ID NO: 180 - protein, 16 aa, synthetic construct
  REGION 1..16: note = Description of Artificial Sequence: Synthetic peptide
RSSQSLVSSDGNTFLN

SEQ ID NO: 181 - DNA, 33 bp, synthetic construct
  misc_feature 1..33: note = Description of Artificial Sequence: Synthetic oligonucleotide
  source 1..33: mol_type = other DNA
tctggagataaattgggggataaatatacttac

SEQ ID NO: 182 - protein, 11 aa, synthetic construct
  REGION 1..11: note = Description of Artificial Sequence: Synthetic peptide
SGDKLGDKYTY

SEQ ID NO: 183 - DNA, 42 bp, synthetic construct
  misc_feature 1..42: note = Description of Artificial Sequence: Synthetic oligonucleotide
  source 1..42: mol_type = other DNA
actggaaccagcagtgacgttggtggttataactatgtctcc

SEQ ID NO: 184 - protein, 14 aa, synthetic construct
  REGION 1..14: note = Description of Artificial Sequence: Synthetic peptide
TGTSSDVGGYNYVS

SEQ ID NO: 185 - DNA, 33 bp, synthetic construct
  misc_feature 1..33: note = Description of Artificial Sequence: Synthetic oligonucleotide
  source 1..33: mol_type = other DNA
tctggagataaattggggaataaatatgcttgg

SEQ ID NO: 186 - protein, 11 aa, synthetic construct
  REGION 1..11: note = Description of Artificial Sequence: Synthetic peptide
SGDKLGNKYAW

SEQ ID NO: 187 - DNA, 33 bp, synthetic construct
  misc_feature 1..33: note = Description of Artificial Sequence: Synthetic oligonucleotide
  source 1..33: mol_type = other DNA
tctggagataaattgggggaaaaatatgtttgc

SEQ ID NO: 188 - protein, 11 aa, synthetic construct
  REGION 1..11: note = Description of Artificial Sequence: Synthetic peptide
SGDKLGEKYVC

SEQ ID NO: 189 - DNA, 33 bp, synthetic construct
  misc_feature 1..33: note = Description of Artificial Sequence: Synthetic oligonucleotide
  source 1..33: mol_type = other DNA
tctggagagaaattgggggataaatatgtttgt

SEQ ID NO: 190 - protein, 11 aa, synthetic construct
  REGION 1..11: note = Description of Artificial Sequence: Synthetic peptide
SGEKLGDKYVC

SEQ ID NO: 191 - DNA, 33 bp, synthetic construct
  misc_feature 1..33: note = Description of Artificial Sequence: Synthetic oligonucleotide
  source 1..33: mol_type = other DNA
tctggagataaattgggggataaatatgcttcc

SEQ ID NO: 192 - protein, 11 aa, synthetic construct
  REGION 1..11: note = Description of Artificial Sequence: Synthetic peptide
SGDKLGDKYAS

SEQ ID NO: 193 - DNA, 33 bp, synthetic construct
  misc_feature 1..33: note = Description of Artificial Sequence: Synthetic oligonucleotide
  source 1..33: mol_type = other DNA
gggggaaacaacattggaagtaaagctgtgcac

SEQ ID NO: 194 - protein, 11 aa, synthetic construct
  REGION 1..11: note = Description of Artificial Sequence: Synthetic peptide
GGNNIGSKAVH

SEQ ID NO: 195 - DNA, 36 bp, synthetic construct
  misc_feature 1..36: note = Description of Artificial Sequence: Synthetic oligonucleotide
  source 1..36: mol_type = other DNA
accctaagcagtgagcacagcacctacaccatcgaa

SEQ ID NO: 196 - protein, 12 aa, synthetic construct
  REGION 1..12: note = Description of Artificial Sequence: Synthetic peptide
TLSSEHSTYTIE

SEQ ID NO: 197 - DNA, 33 bp, synthetic construct
  misc_feature 1..33: note = Description of Artificial Sequence: Synthetic oligonucleotide
  source 1..33: mol_type = other DNA
tctggagatagattgggggataaatatgcttgg

SEQ ID NO: 198 - protein, 11 aa, synthetic construct
  REGION 1..11: note = Description of Artificial Sequence: Synthetic peptide
SGDRLGDKYAW

SEQ ID NO: 199 - DNA, 48 bp, synthetic construct
  misc_feature 1..48: note = Description of Artificial Sequence: Synthetic oligonucleotide
  source 1..48: mol_type = other DNA
aagtctagtcagagcctcctgcatagtgatggaaagacccatttgaat

SEQ ID NO: 200 - protein, 16 aa, synthetic construct
  REGION 1..16: note = Description of Artificial Sequence: Synthetic peptide
KSSQSLLHSDGKTHLN

SEQ ID NO: 201 - DNA, 33 bp, synthetic construct; identical to SEQ ID NO: 105
  misc_feature 1..33: note = Description of Artificial Sequence: Synthetic oligonucleotide
  source 1..33: mol_type = other DNA

SEQ ID NO: 202 - protein, 11 aa, synthetic construct
  REGION 1..11: note = Description of Artificial Sequence: Synthetic peptide
RASQGISNYLA

SEQ ID NO: 203 - DNA, 33 bp, synthetic construct; identical to SEQ ID NO: 109
  misc_feature 1..33: note = Description of Artificial Sequence: Synthetic oligonucleotide
  source 1..33: mol_type = other DNA

SEQ ID NO: 204 - protein, 11 aa, synthetic construct
  REGION 1..11: note = Description of Artificial Sequence: Synthetic peptide
RASQGIRNDLG

SEQ ID NO: 205 - DNA, 33 bp, synthetic construct
  misc_feature 1..33: note = Description of Artificial Sequence: Synthetic oligonucleotide
  source 1..33: mol_type = other DNA
cgggcaagtcaggacattagaaatgatttaggc

SEQ ID NO: 206 - protein, 11 aa, synthetic construct
  REGION 1..11: note = Description of Artificial Sequence: Synthetic peptide
RASQDIRNDLG

SEQ ID NO: 207 - DNA, 33 bp, synthetic construct; identical to SEQ ID NO: 109
  misc_feature 1..33: note = Description of Artificial Sequence: Synthetic oligonucleotide
  source 1..33: mol_type = other DNA

SEQ ID NO: 208 - protein, 11 aa, synthetic construct
  REGION 1..11: note = Description of Artificial Sequence: Synthetic peptide
RASQGIRNDLG

SEQ ID NO: 209 - DNA, 33 bp, synthetic construct; identical to SEQ ID NO: 109
  misc_feature 1..33: note = Description of Artificial Sequence: Synthetic oligonucleotide
  source 1..33: mol_type = other DNA

SEQ ID NO: 210 - protein, 11 aa, synthetic construct
  REGION 1..11: note = Description of Artificial Sequence: Synthetic peptide
RASQGIRNDLG

SEQ ID NO: 211 - DNA, 33 bp, synthetic construct; identical to SEQ ID NO: 109
  misc_feature 1..33: note = Description of Artificial Sequence: Synthetic oligonucleotide
  source 1..33: mol_type = other DNA

SEQ ID NO: 212 - protein, 11 aa, synthetic construct
  REGION 1..11: note = Description of Artificial Sequence: Synthetic peptide
RASQGIRNDLG

SEQ ID NO: 213 - DNA, 33 bp, synthetic construct
  misc_feature 1..33: note = Description of Artificial Sequence: Synthetic oligonucleotide
  source 1..33: mol_type = other DNA
cgggcaagtcaggacattagaaatcatttaggc

SEQ ID NO: 214 - protein, 11 aa, synthetic construct
  REGION 1..11: note = Description of Artificial Sequence: Synthetic peptide
RASQDIRNHLG

SEQ ID NO: 215 - DNA, 33 bp, synthetic construct; identical to SEQ ID NO: 133
  misc_feature 1..33: note = Description of Artificial Sequence: Synthetic oligonucleotide
  source 1..33: mol_type = other DNA

SEQ ID NO: 216 - protein, 11 aa, synthetic construct
  REGION 1..11: note = Description of Artificial Sequence: Synthetic peptide
RASQGIRSDLG

SEQ ID NO: 217 - DNA, 33 bp, synthetic construct
  misc_feature 1..33: note = Description of Artificial Sequence: Synthetic oligonucleotide
  source 1..33: mol_type = other DNA
cgggcaagtcagaccattagcaactatttaaat

SEQ ID NO: 218 - protein, 11 aa, synthetic construct
  REGION 1..11: note = Description of Artificial Sequence: Synthetic peptide
RASQTISNYLN

SEQ ID NO: 219 - DNA, 33 bp, synthetic construct
  misc_feature 1..33: note = Description of Artificial Sequence: Synthetic oligonucleotide
  source 1..33: mol_type = other DNA
cgggcaagtcaggtcattagaaatgatttaggc

SEQ ID NO: 220 - protein, 11 aa, synthetic construct
  REGION 1..11: note = Description of Artificial Sequence: Synthetic peptide
RASQVIRNDLG

SEQ ID NO: 221 - DNA, 33 bp, synthetic construct; identical to SEQ ID NO: 109
  misc_feature 1..33: note = Description of Artificial Sequence: Synthetic oligonucleotide
  source 1..33: mol_type = other DNA

SEQ ID NO: 222 - protein, 11 aa, synthetic construct
  REGION 1..11: note = Description of Artificial Sequence: Synthetic peptide
RASQGIRNDLG

SEQ ID NO: 223 - DNA, 33 bp, synthetic construct; identical to SEQ ID NO: 93
  misc_feature 1..33: note = Description of Artificial Sequence: Synthetic oligonucleotide
  source 1..33: mol_type = other DNA

SEQ ID NO: 224 - protein, 11 aa, synthetic construct
  REGION 1..11: note = Description of Artificial Sequence: Synthetic peptide
RTSQGIRNDLG

SEQ ID NO: 225 - DNA, 33 bp, synthetic construct; identical to SEQ ID NO: 109
  misc_feature 1..33: note = Description of Artificial Sequence: Synthetic oligonucleotide
  source 1..33: mol_type = other DNA

SEQ ID NO: 226 - protein, 11 aa, synthetic construct
  REGION 1..11: note = Description of Artificial Sequence: Synthetic peptide
RASQGIRNDLG

SEQ ID NO: 227 - DNA, 33 bp, synthetic construct; identical to SEQ ID NO: 109
  misc_feature 1..33: note = Description of Artificial Sequence: Synthetic oligonucleotide
  source 1..33: mol_type = other DNA

SEQ ID NO: 228 - protein, 11 aa, synthetic construct
  REGION 1..11: note = Description of Artificial Sequence: Synthetic peptide
RASQGIRNDLG

SEQ ID NO: 229 - DNA, 33 bp, synthetic construct; identical to SEQ ID NO: 217
  misc_feature 1..33: note = Description of Artificial Sequence: Synthetic oligonucleotide
  source 1..33: mol_type = other DNA

SEQ ID NO: 230 - protein, 11 aa, synthetic construct
  REGION 1..11: note = Description of Artificial Sequence: Synthetic peptide
RASQTISNYLN

SEQ ID NO: 231 - DNA, 33 bp, synthetic construct
  misc_feature 1..33: note = Description of Artificial Sequence: Synthetic oligonucleotide
  source 1..33: mol_type = other DNA
cgggcgagtcagggtattggcaactggttagcc

SEQ ID NO: 232 - protein, 11 aa, synthetic construct
  REGION 1..11: note = Description of Artificial Sequence: Synthetic peptide
RASQGIGNWLA

SEQ ID NO: 233 - DNA, 33 bp, synthetic construct
  misc_feature 1..33: note = Description of Artificial Sequence: Synthetic oligonucleotide
  source 1..33: mol_type = other DNA
cgggcaagtcagagcattaatacttatttaaat

SEQ ID NO: 234 - protein, 11 aa, synthetic construct
  REGION 1..11: note = Description of Artificial Sequence: Synthetic peptide
RASQSINTYLN

SEQ ID NO: 235 - DNA, 33 bp, synthetic construct; identical to SEQ ID NO: 109
  misc_feature 1..33: note = Description of Artificial Sequence: Synthetic oligonucleotide
  source 1..33: mol_type = other DNA

SEQ ID NO: 236 - protein, 11 aa, synthetic construct
  REGION 1..11: note = Description of Artificial Sequence: Synthetic peptide
RASQGIRNDLG

SEQ ID NO: 237 - DNA, 33 bp, synthetic construct; identical to SEQ ID NO: 109
  misc_feature 1..33: note = Description of Artificial Sequence: Synthetic oligonucleotide
  source 1..33: mol_type = other DNA

SEQ ID NO: 238 - protein, 11 aa, synthetic construct
  REGION 1..11: note = Description of Artificial Sequence: Synthetic peptide
RASQGIRNDLG

SEQ ID NO: 239 - DNA, 33 bp, synthetic construct; identical to SEQ ID NO: 109
  misc_feature 1..33: note = Description of Artificial Sequence: Synthetic oligonucleotide
  source 1..33: mol_type = other DNA

SEQ ID NO: 240 - protein, 11 aa, synthetic construct
  REGION 1..11: note = Description of Artificial Sequence: Synthetic peptide
RASQGIRNDLG

SEQ ID NO: 241 - DNA, 33 bp, synthetic construct
  misc_feature 1..33: note = Description of Artificial Sequence: Synthetic oligonucleotide
  source 1..33: mol_type = other DNA
cgggcaggtcagaacattatcaactatttaaat

SEQ ID NO: 242 - protein, 11 aa, synthetic construct
  REGION 1..11: note = Description of Artificial Sequence: Synthetic peptide
RAGQNIINYLN

SEQ ID NO: 243 - DNA, 33 bp, synthetic construct
  misc_feature 1..33: note = Description of Artificial Sequence: Synthetic oligonucleotide
  source 1..33: mol_type = other DNA
cgggcaagtcagagcattatcacctatttaaat

SEQ ID NO: 244 - protein, 11 aa, synthetic construct
  REGION 1..11: note = Description of Artificial Sequence: Synthetic peptide
RASQSIITYLN

SEQ ID NO: 245 - DNA, 33 bp, synthetic construct; identical to SEQ ID NO: 109
  misc_feature 1..33: note = Description of Artificial Sequence: Synthetic oligonucleotide
  source 1..33: mol_type = other DNA

SEQ ID NO: 246 - protein, 11 aa, synthetic construct
  REGION 1..11: note = Description of Artificial Sequence: Synthetic peptide
RASQGIRNDLG

SEQ ID NO: 247 - DNA, 33 bp, synthetic construct
  misc_feature 1..33: note = Description of Artificial Sequence: Synthetic oligonucleotide
  source 1..33: mol_type = other DNA
cgggcaagtcagaacattagtagttatttaaat

SEQ ID NO: 248 - protein, 11 aa, synthetic construct
  REGION 1..11: note = Description of Artificial Sequence: Synthetic peptide
RASQNISSYLN

SEQ ID NO: 249 - DNA, 33 bp, synthetic construct; identical to SEQ ID NO: 109
  misc_feature 1..33: note = Description of Artificial Sequence: Synthetic oligonucleotide
  source 1..33: mol_type = other DNA

SEQ ID NO: 250 - protein, 11 aa, synthetic construct
  REGION 1..11: note = Description of Artificial Sequence: Synthetic peptide
RASQGIRNDLG

SEQ ID NO: 251 - DNA, 33 bp, synthetic construct
  misc_feature 1..33: note = Description of Artificial Sequence: Synthetic oligonucleotide
  source 1..33: mol_type = other DNA
cgggcaagtcagggcataagaaatgatttaggc

SEQ ID NO: 252 - protein, 11 aa, synthetic construct
  REGION 1..11: note = Description of Artificial Sequence: Synthetic peptide
RASQGIRNDLG

SEQ ID NO: 253 - DNA, 33 bp, synthetic construct
  misc_feature 1..33: note = Description of Artificial Sequence: Synthetic oligonucleotide
  source 1..33: mol_type = other DNA
cgggcaagtcagagcattagtagttatttatat

SEQ ID NO: 254 - protein, 11 aa, synthetic construct
  REGION 1..11: note = Description of Artificial Sequence: Synthetic peptide
RASQSISSYLY

SEQ ID NO: 255 - DNA, 33 bp, synthetic construct; identical to SEQ ID NO: 109
  misc_feature 1..33: note = Description of Artificial Sequence: Synthetic oligonucleotide
  source 1..33: mol_type = other DNA

SEQ ID NO: 256 - protein, 11 aa, synthetic construct
  REGION 1..11: note = Description of Artificial Sequence: Synthetic peptide
RASQGIRNDLG

SEQ ID NO: 257 - DNA, 33 bp, synthetic construct
  misc_feature 1..33: note = Description of Artificial Sequence: Synthetic oligonucleotide
  source 1..33: mol_type = other DNA
cgggcgagtcaggccattaacacttatttagcc

SEQ ID NO: 258 - protein, 11 aa, synthetic construct
  REGION 1..11: note = Description of Artificial Sequence: Synthetic peptide
RASQAINTYLA

SEQ ID NO: 259 - DNA, 33 bp, synthetic construct; identical to SEQ ID NO: 109
  misc_feature 1..33: note = Description of Artificial Sequence: Synthetic oligonucleotide
  source 1..33: mol_type = other DNA

SEQ ID NO: 260 - protein, 11 aa, synthetic construct
  REGION 1..11: note = Description of Artificial Sequence: Synthetic peptide
RASQGIRNDLG

SEQ ID NO: 261 - DNA, 33 bp, synthetic construct; identical to SEQ ID NO: 109
  misc_feature 1..33: note = Description of Artificial Sequence: Synthetic oligonucleotide
  source 1..33: mol_type = other DNA

SEQ ID NO: 262 - protein, 11 aa, synthetic construct
  REGION 1..11: note = Description of Artificial Sequence: Synthetic peptide
RASQGIRNDLG

SEQ ID NO: 263 - DNA, 33 bp, synthetic construct; identical to SEQ ID NO: 109
  misc_feature 1..33: note = Description of Artificial Sequence: Synthetic oligonucleotide
  source 1..33: mol_type = other DNA

SEQ ID NO: 264 - protein, 11 aa, synthetic construct
  REGION 1..11: note = Description of Artificial Sequence: Synthetic peptide
RASQGIRNDLG

SEQ ID NO: 265 - DNA, 33 bp, synthetic construct
  misc_feature 1..33: note = Description of Artificial Sequence: Synthetic oligonucleotide
  source 1..33: mol_type = other DNA
cgggcgagtcaggacattagctattatttagcc

SEQ ID NO: 266 - protein, 11 aa, synthetic construct
  REGION 1..11: note = Description of Artificial Sequence: Synthetic peptide
RASQDISYYLA

SEQ ID NO: 267 - DNA, 33 bp, synthetic construct
  misc_feature 1..33: note = Description of Artificial Sequence: Synthetic oligonucleotide
  source 1..33: mol_type = other DNA
cgggcaagtcagaacattatcaactatttaaat

SEQ ID NO: 268 - protein, 11 aa, synthetic construct
  REGION 1..11: note = Description of Artificial Sequence: Synthetic peptide
RASQNIINYLN

SEQ ID NO: 269 - DNA, 33 bp, synthetic construct
  misc_feature 1..33: note = Description of Artificial Sequence: Synthetic oligonucleotide
  source 1..33: mol_type = other DNA
cgggcaagtcagagcattatcaactatttaaat

SEQ ID NO: 270 - protein, 11 aa, synthetic construct
  REGION 1..11: note = Description of Artificial Sequence: Synthetic peptide
RASQSIINYLN

SEQ ID NO: 271 - DNA, 33 bp, synthetic construct; identical to SEQ ID NO: 109
  misc_feature 1..33: note = Description of Artificial Sequence: Synthetic oligonucleotide
  source 1..33: mol_type = other DNA

SEQ ID NO: 272 - protein, 11 aa, synthetic construct
  REGION 1..11: note = Description of Artificial Sequence: Synthetic peptide
RASQGIRNDLG

SEQ ID NO: 273 - DNA, 33 bp, synthetic construct
  misc_feature 1..33: note = Description of Artificial Sequence: Synthetic oligonucleotide
  source 1..33: mol_type = other DNA
cgggcaagtcagaccattagtagttttttaaat

SEQ ID NO: 274 - protein, 11 aa, synthetic construct
  REGION 1..11: note = Description of Artificial Sequence: Synthetic peptide
RASQTISSFLN

SEQ ID NO: 275 - DNA, 33 bp, synthetic construct
  misc_feature 1..33: note = Description of Artificial Sequence: Synthetic oligonucleotide
  source 1..33: mol_type = other DNA
cgggcaagtcggaccattaacaactatttaaat

SEQ ID NO: 276 - protein, 11 aa, synthetic construct
  REGION 1..11: note = Description of Artificial Sequence: Synthetic peptide
RASRTINNYLN

SEQ ID NO: 277 - DNA, 33 bp, synthetic construct; identical to SEQ ID NO: 109
  misc_feature 1..33: note = Description of Artificial Sequence: Synthetic oligonucleotide
  source 1..33: mol_type = other DNA

SEQ ID NO: 278 - protein, 11 aa, synthetic construct
  REGION 1..11: note = Description of Artificial Sequence: Synthetic peptide
RASQGIRNDLG

SEQ ID NO: 279 - DNA, 33 bp, synthetic construct
  misc_feature 1..33: note = Description of Artificial Sequence: Synthetic oligonucleotide
  source 1..33: mol_type = other DNA
cgggcgagtcagggcattagctattatttagcc

SEQ ID NO: 280 - protein, 11 aa, synthetic construct
  REGION 1..11: note = Description of Artificial Sequence: Synthetic peptide
RASQGISYYLA

SEQ ID NO: 281 - DNA, 33 bp, synthetic construct
  misc_feature 1..33: note = Description of Artificial Sequence: Synthetic oligonucleotide
  source 1..33: mol_type = other DNA
cgggcaagtcagggcattagaactgatttaggc

SEQ ID NO: 282 - protein, 11 aa, synthetic construct
  REGION 1..11: note = Description of Artificial Sequence: Synthetic peptide
RASQGIRTDLG

SEQ ID NO: 283 - DNA, 33 bp, synthetic construct
  misc_feature 1..33: note = Description of Artificial Sequence: Synthetic oligonucleotide
  source 1..33: mol_type = other DNA
cgggcgagtcaggacattagcaattatttagcc

SEQ ID NO: 284 - protein, 11 aa, synthetic construct
  REGION 1..11: note = Description of Artificial Sequence: Synthetic peptide
RASQDISNYLA

SEQ ID NO: 285 - DNA, 33 bp, synthetic construct; identical to SEQ ID NO: 109
  misc_feature 1..33: note = Description of Artificial Sequence: Synthetic oligonucleotide
  source 1..33: mol_type = other DNA

SEQ ID NO: 286 - protein, 11 aa, synthetic construct
  REGION 1..11: note = Description of Artificial Sequence: Synthetic peptide
RASQGIRNDLG

SEQ ID NO: 287 - DNA, 48 bp, synthetic construct
  misc_feature 1..48: note = Description of Artificial Sequence: Synthetic oligonucleotide
  source 1..48: mol_type = other DNA
aggtctagtcagagcctcctgcatagtaatgggaacaactctttggat

SEQ ID NO: 288 - protein, 16 aa, synthetic construct
  REGION 1..16: note = Description of Artificial Sequence: Synthetic peptide
RSSQSLLHSNGNNSLD

SEQ ID NO: 289 - DNA, 33 bp, synthetic construct
  misc_feature 1..33: note = Description of Artificial Sequence: Synthetic oligonucleotide
  source 1..33: mol_type = other DNA
cgggcaagtcagagcattagtagttatttaaat

SEQ ID NO: 290 - protein, 11 aa, synthetic construct
  REGION 1..11: note = Description of Artificial Sequence: Synthetic peptide
RASQSISSYLN

SEQ ID NO: 291 - DNA, 33 bp, synthetic construct; identical to SEQ ID NO: 289
  misc_feature 1..33: note = Description of Artificial Sequence: Synthetic oligonucleotide
  source 1..33: mol_type = other DNA

SEQ ID NO: 292 - protein, 11 aa, synthetic construct
  REGION 1..11: note = Description of Artificial Sequence: Synthetic peptide
RASQSISSYLN

SEQ ID NO: 293 - DNA, 33 bp, synthetic construct
  misc_feature 1..33: note = Description of Artificial Sequence: Synthetic oligonucleotide
  source 1..33: mol_type = other DNA
cgggcgagtcagggcattaacaattatttagcc

SEQ ID NO: 294 - protein, 11 aa, synthetic construct
  REGION 1..11: note = Description of Artificial Sequence: Synthetic peptide
RASQGINNYLA

SEQ ID NO: 295 - DNA, 33 bp, synthetic construct; identical to SEQ ID NO: 171
  misc_feature 1..33: note = Description of Artificial Sequence: Synthetic oligonucleotide
  source 1..33: mol_type = other DNA

SEQ ID NO: 296 - protein, 11 aa, synthetic construct
  REGION 1..11: note = Description of Artificial Sequence: Synthetic peptide
RASQGISSWLA

SEQ ID NO: 297 - DNA, 33 bp, synthetic construct
  misc_feature 1..33: note = Description of Artificial Sequence: Synthetic oligonucleotide
  source 1..33: mol_type = other DNA
cgggcaagtcagaacattaacaattatttaaat

SEQ ID NO: 298 - protein, 11 aa, synthetic construct
  REGION 1..11: note = Description of Artificial Sequence: Synthetic peptide
RASQNINNYLN

SEQ ID NO: 299 - DNA, 33 bp, synthetic construct; identical to SEQ ID NO: 109
  misc_feature 1..33: note = Description of Artificial Sequence: Synthetic oligonucleotide
  source 1..33: mol_type = other DNA

SEQ ID NO: 300 - protein, 11 aa, synthetic construct
  REGION 1..11: note = Description of Artificial Sequence: Synthetic peptide
RASQGIRNDLG

SEQ ID NO: 301 - DNA, 33 bp, synthetic construct
  misc_feature 1..33: note = Description of Artificial Sequence: Synthetic oligonucleotide
  source 1..33: mol_type = other DNA
agggccagtcagagtgttagcagcaacttagcc

SEQ ID NO: 302 - protein, 11 aa, synthetic construct
  REGION 1..11: note = Description of Artificial Sequence: Synthetic peptide
RASQSVSSNLA

SEQ ID NO: 303 - DNA, 33 bp, synthetic construct
  misc_feature 1..33: note = Description of Artificial Sequence: Synthetic oligonucleotide
  source 1..33: mol_type = other DNA
cgggcaagtcagaatattaacaactatttaaat

SEQ ID NO: 304 - protein, 11 aa, synthetic construct
  REGION 1..11: note = Description of Artificial Sequence: Synthetic peptide
RASQNINNYLN

SEQ ID NO: 305 - DNA, 33 bp, synthetic construct
  misc_feature 1..33: note = Description of Artificial Sequence: Synthetic oligonucleotide
  source 1..33: mol_type = other DNA
cgggcaagtcagagcattatcagctatttaaat

SEQ ID NO: 306 - protein, 11 aa, synthetic construct
  REGION 1..11: note = Description of Artificial Sequence: Synthetic peptide
RASQSIISYLN

SEQ ID NO: 307 - DNA, 33 bp, synthetic construct; identical to SEQ ID NO: 109
  misc_feature 1..33: note = Description of Artificial Sequence: Synthetic oligonucleotide
  source 1..33: mol_type = other DNA

SEQ ID NO: 308 - protein, 11 aa, synthetic construct
  REGION 1..11: note = Description of Artificial Sequence: Synthetic peptide
RASQGIRNDLG

SEQ ID NO: 309 - DNA, 33 bp, synthetic construct; identical to SEQ ID NO: 205
  misc_feature 1..33: note = Description of Artificial Sequence: Synthetic oligonucleotide
  source 1..33: mol_type = other DNA

SEQ ID NO: 310 - protein, 11 aa, synthetic construct
  REGION 1..11: note = Description of Artificial Sequence: Synthetic peptide
RASQDIRNDLG

SEQ ID NO: 311 - DNA, 33 bp, synthetic construct; identical to SEQ ID NO: 109
  misc_feature 1..33: note = Description of Artificial Sequence: Synthetic oligonucleotide
  source 1..33: mol_type = other DNA

SEQ ID NO: 312 - protein, 11 aa, synthetic construct
  REGION 1..11: note = Description of Artificial Sequence: Synthetic peptide
RASQGIRNDLG

SEQ ID NO: 313 - DNA, 33 bp, synthetic construct
  misc_feature 1..33: note = Description of Artificial Sequence: Synthetic oligonucleotide
  source 1..33: mol_type = other DNA
cggacgagtcagggcattaacaattatttagtc

SEQ ID NO: 314 - protein, 11 aa, synthetic construct
  REGION 1..11: note = Description of Artificial Sequence: Synthetic peptide
RTSQGINNYLV

SEQ ID NO: 315 - DNA, 33 bp, synthetic construct
  misc_feature 1..33: note = Description of Artificial Sequence: Synthetic oligonucleotide
  source 1..33: mol_type = other DNA
cgggcgagtcagggcattaataattatttagtc

SEQ ID NO: 316 - protein, 11 aa, synthetic construct
  REGION 1..11: note = Description of Artificial Sequence: Synthetic peptide
RASQGINNYLV

SEQ ID NO: 317 - DNA, 33 bp, synthetic construct; identical to SEQ ID NO: 109
  misc_feature 1..33: note = Description of Artificial Sequence: Synthetic oligonucleotide
  source 1..33: mol_type = other DNA

SEQ ID NO: 318 - protein, 11 aa, synthetic construct
  REGION 1..11: note = Description of Artificial Sequence: Synthetic peptide
RASQGIRNDLG

SEQ ID NO: 319 - DNA, 33 bp, synthetic construct
  misc_feature 1..33: note = Description of Artificial Sequence: Synthetic oligonucleotide
  source 1..33: mol_type = other DNA
cgggcaagtcagagcattactggttattcaaat

SEQ ID NO: 320 - protein, 11 aa, synthetic construct
  REGION 1..11: note = Description of Artificial Sequence: Synthetic peptide
RASQSITGYSN

SEQ ID NO: 321 - DNA, 33 bp, synthetic construct; identical to SEQ ID NO: 109
  misc_feature 1..33: note = Description of Artificial Sequence: Synthetic oligonucleotide
  source 1..33: mol_type = other DNA

SEQ ID NO: 322 - protein, 11 aa, synthetic construct
  REGION 1..11: note = Description of Artificial Sequence: Synthetic peptide
RASQGIRNDLG

SEQ ID NO: 323 - DNA, 33 bp, synthetic construct
  misc_feature 1..33: note = Description of Artificial Sequence: Synthetic oligonucleotide
  source 1..33: mol_type = other DNA
cgggcaagtcagagcattagtaattatttaaat

SEQ ID NO: 324 - protein, 11 aa, synthetic construct
  REGION 1..11: note = Description of Artificial Sequence: Synthetic peptide
RASQSISNYLN

SEQ ID NO: 325 - DNA, 33 bp, synthetic construct; identical to SEQ ID NO: 137
  misc_feature 1..33: note = Description of Artificial Sequence: Synthetic oligonucleotide
  source 1..33: mol_type = other DNA

SEQ ID NO: 326 - protein, 11 aa, synthetic construct
  REGION 1..11: note = Description of Artificial Sequence: Synthetic peptide
RASQNISSYLN

SEQ ID NO: 327 - DNA, 33 bp, synthetic construct
  misc_feature 1..33: note = Description of Artificial Sequence: Synthetic oligonucleotide
  source 1..33: mol_type = other DNA
cgggcaagtcagagcattttcagctatttaaat

SEQ ID NO: 328 - protein, 11 aa, synthetic construct
  REGION 1..11: note = Description of Artificial Sequence: Synthetic peptide
RASQSIFSYLN

SEQ ID NO: 329 - DNA, 33 bp, synthetic construct
  misc_feature 1..33: note = Description of Artificial Sequence: Synthetic oligonucleotide
  source 1..33: mol_type = other DNA
cgggcaagtcagagcattagcaggtatttaaat

SEQ ID NO: 330 - protein, 11 aa, synthetic construct
  REGION 1..11: note = Description of Artificial Sequence: Synthetic peptide
RASQSISRYLN

SEQ ID NO: 331 - DNA, 33 bp, synthetic construct; identical to SEQ ID NO: 301
  misc_feature 1..33: note = Description of Artificial Sequence: Synthetic oligonucleotide
  source 1..33: mol_type = other DNA

SEQ ID NO: 332 - protein, 11 aa, synthetic construct
  REGION 1..11: note = Description of Artificial Sequence: Synthetic peptide
RASQSVSSNLA

SEQ ID NO: 333 - DNA, 33 bp, synthetic construct
  misc_feature 1..33: note = Description of Artificial Sequence: Synthetic oligonucleotide
  source 1..33: mol_type = other DNA
cgggcaagtcaccatattagcaactatttaaat

SEQ ID NO: 334 - protein, 11 aa, synthetic construct
  REGION 1..11: note = Description of Artificial Sequence: Synthetic peptide
RASHHISNYLN

SEQ ID NO: 335 - DNA, 33 bp, synthetic construct; identical to SEQ ID NO: 109
  misc_feature 1..33: note = Description of Artificial Sequence: Synthetic oligonucleotide
  source 1..33: mol_type = other DNA

SEQ ID NO: 336 - protein, 11 aa, synthetic construct
  REGION 1..11: note = Description of Artificial Sequence: Synthetic peptide
RASQGIRNDLG

SEQ ID NO: 337 - DNA, 33 bp, synthetic construct; identical to SEQ ID NO: 109
  misc_feature 1..33: note = Description of Artificial Sequence: Synthetic oligonucleotide
  source 1..33: mol_type = other DNA

SEQ ID NO: 338 - protein, 11 aa, synthetic construct
  REGION 1..11: note = Description of Artificial Sequence: Synthetic peptide
RASQGIRNDLG

SEQ ID NO: 339 - DNA, 33 bp, synthetic construct
  misc_feature 1..33: note = Description of Artificial Sequence: Synthetic oligonucleotide
  source 1..33: mol_type = other DNA
cgggcgagtcaaggcattagcaaatatttagcc

SEQ ID NO: 340 - protein, 11 aa, synthetic construct
  REGION 1..11: note = Description of Artificial Sequence: Synthetic peptide
RASQGISKYLA

SEQ ID NO: 341 - DNA, 33 bp, synthetic construct
  misc_feature 1..33: note = Description of Artificial Sequence: Synthetic oligonucleotide
  source 1..33: mol_type = other DNA
cgggcaagtcaggacattagaaataatttaggc

SEQ ID NO: 342 - protein, 11 aa, synthetic construct
  REGION 1..11: note = Description of Artificial Sequence: Synthetic peptide
RASQDIRNNLG

SEQ ID NO: 343 - DNA, 33 bp, synthetic construct; identical to SEQ ID NO: 109
  misc_feature 1..33: note = Description of Artificial Sequence: Synthetic oligonucleotide
  source 1..33: mol_type = other DNA

SEQ ID NO: 344 - protein, 11 aa, synthetic construct
  REGION 1..11: note = Description of Artificial Sequence: Synthetic peptide
RASQGIRNDLG

SEQ ID NO: 345 - DNA, 33 bp, synthetic construct; identical to SEQ ID NO: 283
  misc_feature 1..33: note = Description of Artificial Sequence: Synthetic oligonucleotide
  source 1..33: mol_type = other DNA

SEQ ID NO: 346 - protein, 11 aa, synthetic construct
  REGION 1..11: note = Description of Artificial Sequence: Synthetic peptide
RASQDISNYLA

SEQ ID NO: 347 - DNA, 33 bp, synthetic construct
  misc_feature 1..33: note = Description of Artificial Sequence: Synthetic oligonucleotide
  source 1..33: mol_type = other DNA
cgggcgagtcagggcattggcatttatttagcc

SEQ ID NO: 348 - protein, 11 aa, synthetic construct
  REGION 1..11: note = Description of Artificial Sequence: Synthetic peptide
RASQGIGIYLA

SEQ ID NO: 349 - DNA, 51 bp, synthetic construct
  misc_feature 1..51: note = Description of Artificial Sequence: Synthetic oligonucleotide
  source 1..51: mol_type = other DNA
aagtccagccagagtgttttatacacctccaacaataacaactacttaact

SEQ ID NO: 350 - protein, 17 aa, synthetic construct
  REGION 1..17: note = Description of Artificial Sequence: Synthetic peptide
KSSQSVLYTSNNNNYLT

SEQ ID NO: 351 - DNA, 33 bp, synthetic construct; identical to SEQ ID NO: 109
  misc_feature 1..33: note = Description of Artificial Sequence: Synthetic oligonucleotide
  source 1..33: mol_type = other DNA

SEQ ID NO: 352 - protein, 11 aa, synthetic construct
  REGION 1..11: note = Description of Artificial Sequence: Synthetic peptide
RASQGIRNDLG

SEQ ID NO: 353 - DNA, 33 bp, synthetic construct; identical to SEQ ID NO: 109
  misc_feature 1..33: note = Description of Artificial Sequence: Synthetic oligonucleotide
  source 1..33: mol_type = other DNA

SEQ ID NO: 354 - protein, 11 aa, synthetic construct
  REGION 1..11: note = Description of Artificial Sequence: Synthetic peptide
RASQGIRNDLG

SEQ ID NO: 355 - DNA, 33 bp, synthetic construct; identical to SEQ ID NO: 105
  misc_feature 1..33: note = Description of Artificial Sequence: Synthetic oligonucleotide
  source 1..33: mol_type = other DNA

SEQ ID NO: 356 - protein, 11 aa, synthetic construct
  REGION 1..11: note = Description of Artificial Sequence: Synthetic peptide
RASQGISNYLA

SEQ ID NO: 357 - DNA, 33 bp, synthetic construct; identical to SEQ ID NO: 109
  misc_feature 1..33: note = Description of Artificial Sequence: Synthetic oligonucleotide
  source 1..33: mol_type = other DNA

SEQ ID NO: 358 - protein, 11 aa, synthetic construct
  REGION 1..11: note = Description of Artificial Sequence: Synthetic peptide
RASQGIRNDLG

SEQ ID NO: 359 - DNA, 33 bp, synthetic construct; identical to SEQ ID NO: 109
  misc_feature 1..33: note = Description of Artificial Sequence: Synthetic oligonucleotide
  source 1..33: mol_type = other DNA

SEQ ID NO: 360 - protein, 11 aa, synthetic construct
  REGION 1..11: note = Description of Artificial Sequence: Synthetic peptide
RASQGIRNDLG

SEQ ID NO: 361 - DNA, 33 bp, synthetic construct
  misc_feature 1..33: note = Description of Artificial Sequence: Synthetic oligonucleotide
  source 1..33: mol_type = other DNA
cgggcaagtcagaacattatcagctatttaaat

SEQ ID NO: 362 - protein, 11 aa, synthetic construct
  REGION 1..11: note = Description of Artificial Sequence: Synthetic peptide
RASQNIISYLN

SEQ ID NO: 363 - DNA, 33 bp, synthetic construct; identical to SEQ ID NO: 109
  misc_feature 1..33: note = Description of Artificial Sequence: Synthetic oligonucleotide
  source 1..33: mol_type = other DNA

SEQ ID NO: 364 - protein, 11 aa, synthetic construct
  REGION 1..11: note = Description of Artificial Sequence: Synthetic peptide
RASQGIRNDLG

SEQ ID NO: 365 - DNA, 33 bp, synthetic construct; identical to SEQ ID NO: 105
  misc_feature 1..33: note = Description of Artificial Sequence: Synthetic oligonucleotide
  source 1..33: mol_type = other DNA

SEQ ID NO: 366 - protein, 11 aa, synthetic construct
  REGION 1..11: note = Description of Artificial Sequence: Synthetic peptide
RASQGISNYLA

SEQ ID NO: 367 - DNA, 33 bp, synthetic construct; identical to SEQ ID NO: 301
  misc_feature 1..33: note = Description of Artificial Sequence: Synthetic oligonucleotide
  source 1..33: mol_type = other DNA

SEQ ID NO: 368 - protein, 11 aa, synthetic construct
  REGION 1..11: note = Description of Artificial Sequence: Synthetic peptide
RASQSVSSNLA

SEQ ID NO: 369 - DNA, 33 bp, synthetic construct; identical to SEQ ID NO: 329
  misc_feature 1..33: note = Description of Artificial Sequence: Synthetic oligonucleotide
  source 1..33: mol_type = other DNA

SEQ ID NO: 370 - protein, 11 aa, synthetic construct
  REGION 1..11: note = Description of Artificial Sequence: Synthetic peptide
RASQSISRYLN

SEQ ID NO: 371 - DNA, 33 bp, synthetic construct
  misc_feature 1..33: note = Description of Artificial Sequence: Synthetic oligonucleotide
  source 1..33: mol_type = other DNA
cgggcaagtcagggcattagaaatgatttagac

SEQ ID NO: 372 - protein, 11 aa, synthetic construct
  REGION 1..11: note = Description of Artificial Sequence: Synthetic peptide
RASQGIRNDLD

SEQ ID NO: 373 - DNA, 33 bp, synthetic construct
  misc_feature 1..33: note = Description of Artificial Sequence: Synthetic oligonucleotide
  source 1..33: mol_type = other DNA
cgggcaagtcagaacattggtagttatttaaat

SEQ ID NO: 374 - protein, 11 aa, synthetic construct
  REGION 1..11: note = Description of Artificial Sequence: Synthetic peptide
RASQNIGSYLN

SEQ ID NO: 375 - DNA, 48 bp, synthetic construct
  misc_feature 1..48: note = Description of Artificial Sequence: Synthetic oligonucleotide
  source 1..48: mol_type = other DNA
aagtctagtcagagcctcctgcatagtggtggaaagacctatttatat

SEQ ID NO: 376 - protein, 16 aa, synthetic construct
  REGION 1..16: note = Description of Artificial Sequence: Synthetic peptide
KSSQSLLHSGGKTYLY

SEQ ID NO: 377 - DNA, 33 bp, synthetic construct; identical to SEQ ID NO: 247
  misc_feature 1..33: note = Description of Artificial Sequence: Synthetic oligonucleotide
  source 1..33: mol_type = other DNA

SEQ ID NO: 378 - protein, 11 aa, synthetic construct
  REGION 1..11: note = Description of Artificial Sequence: Synthetic peptide
RASQNISSYLN

SEQ ID NO: 379 - DNA, 33 bp, synthetic construct
  misc_feature 1..33: note = Description of Artificial Sequence: Synthetic oligonucleotide
  source 1..33: mol_type = other DNA
cggacaagtcagaacagtaacagttatttaaat

SEQ ID NO: 380 - protein, 11 aa, synthetic construct
  REGION 1..11: note = Description of Artificial Sequence: Synthetic peptide
RTSQNSNSYLN

SEQ ID NO: 381 - DNA, 33 bp, synthetic construct
  misc_feature 1..33: note = Description of Artificial Sequence: Synthetic oligonucleotide
  source 1..33: mol_type = other DNA
cgggcaagtcagggcatcagaaatgatttaggc

SEQ ID NO: 382 - protein, 11 aa, synthetic construct
  REGION 1..11: note = Description of Artificial Sequence: Synthetic peptide
RASQGIRNDLG

SEQ ID NO: 383 - DNA, 33 bp, synthetic construct; identical to SEQ ID NO: 205
  misc_feature 1..33: note = Description of Artificial Sequence: Synthetic oligonucleotide
  source 1..33: mol_type = other DNA

SEQ ID NO: 384 - protein, 11 aa, synthetic construct
  REGION 1..11: note = Description of Artificial Sequence: Synthetic peptide
RASQDIRNDLG

SEQ ID NO: 385 - DNA, 33 bp, synthetic construct; identical to SEQ ID NO: 109
  misc_feature 1..33: note = Description of Artificial Sequence: Synthetic oligonucleotide
  source 1..33: mol_type = other DNA

SEQ ID NO: 386 - protein, 11 aa, synthetic construct
  REGION 1..11: note = Description of Artificial Sequence: Synthetic peptide
RASQGIRNDLG

SEQ ID NO: 387 - DNA, 33 bp, synthetic construct; identical to SEQ ID NO: 105
  misc_feature 1..33: note = Description of Artificial Sequence: Synthetic oligonucleotide
  source 1..33: mol_type = other DNA

SEQ ID NO: 388 - protein, 11 aa, synthetic construct
  REGION 1..11: note = Description of Artificial Sequence: Synthetic peptide
RASQGISNYLA

SEQ ID NO: 389 - DNA, 33 bp, synthetic construct
  misc_feature 1..33: note = Description of Artificial Sequence: Synthetic oligonucleotide
  source 1..33: mol_type = other DNA
cgggcaagtcagaccattagcagccatttaaat

SEQ ID NO: 390 - protein, 11 aa, synthetic construct
  REGION 1..11: note = Description of Artificial Sequence: Synthetic peptide
RASQTISSHLN

SEQ ID NO: 391 - DNA, 33 bp, synthetic construct; identical to SEQ ID NO: 109
  misc_feature 1..33: note = Description of Artificial Sequence: Synthetic oligonucleotide
  source 1..33: mol_type = other DNA

SEQ ID NO: 392 - protein, 11 aa, synthetic construct
  REGION 1..11: note = Description of Artificial Sequence: Synthetic peptide
RASQGIRNDLG

SEQ ID NO: 393 - DNA, 33 bp, synthetic construct; identical to SEQ ID NO: 93
  misc_feature 1..33: note = Description of Artificial Sequence: Synthetic oligonucleotide
  source 1..33: mol_type = other DNA

SEQ ID NO: 394 - protein, 11 aa, synthetic construct
  REGION 1..11: note = Description of Artificial Sequence: Synthetic peptide
RTSQGIRNDLG

SEQ ID NO: 395 - DNA, 33 bp, synthetic construct
  misc_feature 1..33: note = Description of Artificial Sequence: Synthetic oligonucleotide
  source 1..33: mol_type = other DNA
cgggcaagtcaggtcattagagatgatttaggc

SEQ ID NO: 396 - protein, 11 aa, synthetic construct
  REGION 1..11: note = Description of Artificial Sequence: Synthetic peptide
RASQVIRDDLG

SEQ ID NO: 397 - DNA, 33 bp, synthetic construct; identical to SEQ ID NO: 93
  misc_feature 1..33: note = Description of Artificial Sequence: Synthetic oligonucleotide
  source 1..33: mol_type = other DNA

SEQ ID NO: 398 - protein, 11 aa, synthetic construct
  REGION 1..11: note = Description of Artificial Sequence: Synthetic peptide
RTSQGIRNDLG

SEQ ID NO: 399 - DNA, 33 bp, synthetic construct; identical to SEQ ID NO: 105
  misc_feature 1..33: note = Description of Artificial Sequence: Synthetic oligonucleotide
  source 1..33: mol_type = other DNA

SEQ ID NO: 400 - protein, 11 aa, synthetic construct
  REGION 1..11: note = Description of Artificial Sequence: Synthetic peptide
RASQGISNYLA

SEQ ID NO: 401 - DNA, 33 bp, synthetic construct
  misc_feature 1..33: note = Description of Artificial Sequence: Synthetic oligonucleotide
  source 1..33: mol_type = other DNA
cgggcgagtcagggcattagaaattatttagcc

SEQ ID NO: 402 - protein, 11 aa, synthetic construct
  REGION 1..11: note = Description of Artificial Sequence: Synthetic peptide
RASQGIRNYLA

SEQ ID NO: 403 - DNA, 33 bp, synthetic construct; identical to SEQ ID NO: 109
  misc_feature 1..33: note = Description of Artificial Sequence: Synthetic oligonucleotide
  source 1..33: mol_type = other DNA

SEQ ID NO: 404 - protein, 11 aa, synthetic construct
  REGION 1..11: note = Description of Artificial Sequence: Synthetic peptide
RASQGIRNDLG

SEQ ID NO: 405 - DNA, 33 bp, synthetic construct; identical to SEQ ID NO: 205
  misc_feature 1..33: note = Description of Artificial Sequence: Synthetic oligonucleotide
  source 1..33: mol_type = other DNA

SEQ ID NO: 406 - protein, 11 aa, synthetic construct
  REGION 1..11: note = Description of Artificial Sequence: Synthetic peptide
RASQDIRNDLG

SEQ ID NO: 407 - DNA, 33 bp, synthetic construct; identical to SEQ ID NO: 105
  misc_feature 1..33: note = Description of Artificial Sequence: Synthetic oligonucleotide
  source 1..33: mol_type = other DNA

SEQ ID NO: 408 - protein, 11 aa, synthetic construct
  REGION 1..11: note = Description of Artificial Sequence: Synthetic peptide
RASQGISNYLA

SEQ ID NO: 409 - DNA, 33 bp, synthetic construct
  misc_feature 1..33: note = Description of Artificial Sequence: Synthetic oligonucleotide
  source 1..33: mol_type = other DNA
cgggcaagtcagggcattaaaaataatttaggc

SEQ ID NO: 410 - protein, 11 aa, synthetic construct
  REGION 1..11: note = Description of Artificial Sequence: Synthetic peptide
RASQGIKNNLG

SEQ ID NO: 411 - DNA, 33 bp, synthetic construct
  misc_feature 1..33: note = Description of Artificial Sequence: Synthetic oligonucleotide
  source 1..33: mol_type = other DNA
cgggcaagtcagagtattagtagttatttaaat

SEQ ID NO: 412 - protein, 11 aa, synthetic construct
  REGION 1..11: note = Description of Artificial Sequence: Synthetic peptide
RASQSISSYLN

SEQ ID NO: 413 - DNA, 33 bp, synthetic construct; identical to SEQ ID NO: 109
  misc_feature 1..33: note = Description of Artificial Sequence: Synthetic oligonucleotide
  source 1..33: mol_type = other DNA

SEQ ID NO: 414 - protein, 11 aa, synthetic construct
  REGION 1..11: note = Description of Artificial Sequence: Synthetic peptide
RASQGIRNDLG

SEQ ID NO: 415 - DNA, 33 bp, synthetic construct; identical to SEQ ID NO: 283
  misc_feature 1..33: note = Description of Artificial Sequence: Synthetic oligonucleotide
  source 1..33: mol_type = other DNA

SEQ ID NO: 416 - protein, 11 aa, synthetic construct
  REGION 1..11: note = Description of Artificial Sequence: Synthetic peptide
RASQDISNYLA

SEQ ID NO: 417 - DNA, 33 bp, synthetic construct; identical to SEQ ID NO: 109
  misc_feature 1..33: note = Description of Artificial Sequence: Synthetic oligonucleotide
  source 1..33: mol_type = other DNA

SEQ ID NO: 418 - protein, 11 aa, synthetic construct
  REGION 1..11: note = Description of Artificial Sequence: Synthetic peptide
RASQGIRNDLG

SEQ ID NO: 419 - DNA, 48 bp, synthetic construct
  misc_feature 1..48: note = Description of Artificial Sequence: Synthetic oligonucleotide
  source 1..48: mol_type = other DNA
aagtctagtcagagcctcctgcatagtgatggaaagacctttttgtat

SEQ ID NO: 420 - protein, 16 aa, synthetic construct
  REGION 1..16: note = Description of Artificial Sequence: Synthetic peptide
KSSQSLLHSDGKTFLY

SEQ ID NO: 421 - DNA, 36 bp, synthetic construct
  misc_feature 1..36: note = Description of Artificial Sequence: Synthetic oligonucleotide
  source 1..36: mol_type = other DNA
agggccagtcagaatgtttacagcagctacttagcc

SEQ ID NO: 422 - protein, 12 aa, synthetic construct
  REGION 1..12: note = Description of Artificial Sequence: Synthetic peptide
RASQNVYSSYLA

SEQ ID NO: 423 - DNA, 33 bp, synthetic construct; identical to SEQ ID NO: 371
  misc_feature 1..33: note = Description of Artificial Sequence: Synthetic oligonucleotide
  source 1..33: mol_type = other DNA

SEQ ID NO: 424 - protein, 11 aa, synthetic construct
  REGION 1..11: note = Description of Artificial Sequence: Synthetic peptide
RASQGIRNDLD

SEQ ID NO: 425 - DNA, 33 bp, synthetic construct
  misc_feature 1..33: note = Description of Artificial Sequence: Synthetic oligonucleotide
  source 1..33: mol_type = other DNA
caggcgagtcaggacattaacaactatttaaat

SEQ ID NO: 426 - protein, 11 aa, synthetic construct
  REGION 1..11: note = Description of Artificial Sequence: Synthetic peptide
QASQDINNYLN

SEQ ID NO: 427 - DNA, 33 bp, synthetic construct; identical to SEQ ID NO: 109
  misc_feature 1..33: note = Description of Artificial Sequence: Synthetic oligonucleotide
  source 1..33: mol_type = other DNA

SEQ ID NO: 428 - protein, 11 aa, synthetic construct
  REGION 1..11: note = Description of Artificial Sequence: Synthetic peptide
RASQGIRNDLG

SEQ ID NO: 429 - DNA, 33 bp, synthetic construct
  misc_feature 1..33: note = Description of Artificial Sequence: Synthetic oligonucleotide
  source 1..33: mol_type = other DNA
cgggcaagtcagggcattggaaatgatttaggc

SEQ ID NO: 430 - protein, 11 aa, synthetic construct
  REGION 1..11: note = Description of Artificial Sequence: Synthetic peptide
RASQGIGNDLG

SEQ ID NO: 431 - DNA, 33 bp, synthetic construct
  misc_feature 1..33: note = Description of Artificial Sequence: Synthetic oligonucleotide
  source 1..33: mol_type = other DNA
cgggcaagtcagagcattagcgactatttaaat

SEQ ID NO: 432 - protein, 11 aa, synthetic construct
  REGION 1..11: note = Description of Artificial Sequence: Synthetic peptide
RASQSISDYLN

SEQ ID NO: 433 - DNA, 33 bp, synthetic construct; identical to SEQ ID NO: 205
  misc_feature 1..33: note = Description of Artificial Sequence: Synthetic oligonucleotide
  source 1..33: mol_type = other DNA

SEQ ID NO: 434 - protein, 11 aa, synthetic construct
  REGION 1..11: note = Description of Artificial Sequence: Synthetic peptide
RASQDIRNDLG

SEQ ID NO: 435 - DNA, 33 bp, synthetic construct; identical to SEQ ID NO: 137
  misc_feature 1..33: note = Description of Artificial Sequence: Synthetic oligonucleotide
  source 1..33: mol_type = other DNA

SEQ ID NO: 436 - protein, 11 aa, synthetic construct
  REGION 1..11: note = Description of Artificial Sequence: Synthetic peptide
RASQNISSYLN

SEQ ID NO: 437 - DNA, 33 bp, synthetic construct; identical to SEQ ID NO: 109
  misc_feature 1..33: note = Description of Artificial Sequence: Synthetic oligonucleotide
  source 1..33: mol_type = other DNA

SEQ ID NO: 438 - protein, 11 aa, synthetic construct
  REGION 1..11: note = Description of Artificial Sequence: Synthetic peptide
RASQGIRNDLG

SEQ ID NO: 439 - DNA, 33 bp, synthetic construct; identical to SEQ ID NO: 109
  misc_feature 1..33: note = Description of Artificial Sequence: Synthetic oligonucleotide
  source 1..33: mol_type = other DNA

SEQ ID NO: 440 - protein, 11 aa, synthetic construct
  REGION 1..11: note = Description of Artificial Sequence: Synthetic peptide
RASQGIRNDLG

SEQ ID NO: 441 - DNA, 33 bp, synthetic construct; identical to SEQ ID NO: 109
  misc_feature 1..33: note = Description of Artificial Sequence: Synthetic oligonucleotide
  source 1..33: mol_type = other DNA

SEQ ID NO: 442 - protein, 11 aa, synthetic construct
  REGION 1..11: note = Description of Artificial Sequence: Synthetic peptide
RASQGIRNDLG

SEQ ID NO: 443 - DNA, 51 bp, synthetic construct
  misc_feature 1..51: note = Description of Artificial Sequence: Synthetic oligonucleotide
  source 1..51: mol_type = other DNA
aagtccagccagagtgttttatacagctccaacaataacaattatttagct

SEQ ID NO: 444 - protein, 17 aa, synthetic construct
  REGION 1..17: note = Description of Artificial Sequence: Synthetic peptide
KSSQSVLYSSNNNNYLA

SEQ ID NO: 445 - DNA, 48 bp, synthetic construct
  misc_feature 1..48: note = Description of Artificial Sequence: Synthetic oligonucleotide
  source 1..48: mol_type = other DNA
aagtctagtcagagcctcctacatagtgaaggaaagacctatttgtat

SEQ ID NO: 446 - protein, 16 aa, synthetic construct
  REGION 1..16: note = Description of Artificial Sequence: Synthetic peptide
KSSQSLLHSEGKTYLY

SEQ ID NO: 447 - DNA, 33 bp, synthetic construct; identical to SEQ ID NO: 105
  misc_feature 1..33: note = Description of Artificial Sequence: Synthetic oligonucleotide
  source 1..33: mol_type = other DNA

SEQ ID NO: 448 - protein, 11 aa, synthetic construct
  REGION 1..11: note = Description of Artificial Sequence: Synthetic peptide
RASQGISNYLA

SEQ ID NO: 449 - DNA, 33 bp, synthetic construct; identical to SEQ ID NO: 283
  misc_feature 1..33: note = Description of Artificial Sequence: Synthetic oligonucleotide
  source 1..33: mol_type = other DNA

SEQ ID NO: 450 - protein, 11 aa, synthetic construct
  REGION 1..11: note = Description of Artificial Sequence: Synthetic peptide
RASQDISNYLA

SEQ ID NO: 451 - DNA, 33 bp, synthetic construct; identical to SEQ ID NO: 109
  misc_feature 1..33: note = Description of Artificial Sequence: Synthetic oligonucleotide
  source 1..33: mol_type = other DNA

SEQ ID NO: 452 - protein, 11 aa, synthetic construct
  REGION 1..11: note = Description of Artificial Sequence: Synthetic peptide
RASQGIRNDLG

SEQ ID NO: 453 - DNA, 33 bp, synthetic construct
  misc_feature 1..33: note = Description of Artificial Sequence: Synthetic oligonucleotide
  source 1..33: mol_type = other DNA
cgggcaagtcagggcgttagaaatgatttaggc

SEQ ID NO: 454 - protein, 11 aa, synthetic construct
  REGION 1..11: note = Description of Artificial Sequence: Synthetic peptide
RASQGVRNDLG

SEQ ID NO: 455 - DNA, 36 bp, synthetic construct
  misc_feature 1..36: note = Description of Artificial Sequence: Synthetic oligonucleotide
  source 1..36: mol_type = other DNA
agggccagtcagagttttagcagcagctacttagcc

SEQ ID NO: 456 - protein, 12 aa, synthetic construct
  REGION 1..12: note = Description of Artificial Sequence: Synthetic peptide
RASQSFSSSYLA

SEQ ID NO: 457 - DNA, 33 bp, synthetic construct; identical to SEQ ID NO: 109
  misc_feature 1..33: note = Description of Artificial Sequence: Synthetic oligonucleotide
  source 1..33: mol_type = other DNA

SEQ ID NO: 458 - protein, 11 aa, synthetic construct
  REGION 1..11: note = Description of Artificial Sequence: Synthetic peptide
RASQGIRNDLG

SEQ ID NO: 459 - DNA, 33 bp, synthetic construct
  misc_feature 1..33: note = Description of Artificial Sequence: Synthetic oligonucleotide
  source 1..33: mol_type = other DNA
cgggcaagtcagaacatttttagttatttaaat

SEQ ID NO: 460 - protein, 11 aa, synthetic construct
  REGION 1..11: note = Description of Artificial Sequence: Synthetic peptide
RASQNIFSYLN

SEQ ID NO: 461 - DNA, 33 bp, synthetic construct; identical to SEQ ID NO: 109
  misc_feature 1..33: note = Description of Artificial Sequence: Synthetic oligonucleotide
  source 1..33: mol_type = other DNA

SEQ ID NO: 462 - protein, 11 aa, synthetic construct
  REGION 1..11: note = Description of Artificial Sequence: Synthetic peptide
RASQGIRNDLG

SEQ ID NO: 463 - DNA, 33 bp, synthetic construct; identical to SEQ ID NO: 109
  misc_feature 1..33: note = Description of Artificial Sequence: Synthetic oligonucleotide
  source 1..33: mol_type = other DNA

SEQ ID NO: 464 - protein, 11 aa, synthetic construct
  REGION 1..11: note = Description of Artificial Sequence: Synthetic peptide
RASQGIRNDLG

SEQ ID NO: 465 - DNA, 33 bp, synthetic construct; identical to SEQ ID NO: 109
  misc_feature 1..33: note = Description of Artificial Sequence: Synthetic oligonucleotide
  source 1..33: mol_type = other DNA

SEQ ID NO: 466 - protein, 11 aa, synthetic construct
  REGION 1..11: note = Description of Artificial Sequence: Synthetic peptide
RASQGIRNDLG

SEQ ID NO: 467 - DNA, 33 bp, synthetic construct; identical to SEQ ID NO: 93
  misc_feature 1..33: note = Description of Artificial Sequence: Synthetic oligonucleotide
  source 1..33: mol_type = other DNA

SEQ ID NO: 468 - protein, 11 aa, synthetic construct
  REGION 1..11: note = Description of Artificial Sequence: Synthetic peptide
RTSQGIRNDLG

SEQ ID NO: 469 - DNA, 33 bp, synthetic construct; identical to SEQ ID NO: 171
  misc_feature 1..33: note = Description of Artificial Sequence: Synthetic oligonucleotide
  source 1..33: mol_type = other DNA

SEQ ID NO: 470 - protein, 11 aa, synthetic construct
  REGION 1..11: note = Description of Artificial Sequence: Synthetic peptide
RASQGISSWLA

SEQ ID NO: 471 - DNA, 33 bp, synthetic construct; identical to SEQ ID NO: 109
  misc_feature 1..33: note = Description of Artificial Sequence: Synthetic oligonucleotide
  source 1..33: mol_type = other DNA

SEQ ID NO: 472 - protein, 11 aa, synthetic construct
  REGION 1..11: note = Description of Artificial Sequence: Synthetic peptide
RASQGIRNDLG

SEQ ID NO: 473 - DNA, 33 bp, synthetic construct; identical to SEQ ID NO: 109
  misc_feature 1..33: note = Description of Artificial Sequence: Synthetic oligonucleotide
  source 1..33: mol_type = other DNA

SEQ ID NO: 474 - protein, 11 aa, synthetic construct
  REGION 1..11: note = Description of Artificial Sequence: Synthetic peptide
RASQGIRNDLG

SEQ ID NO: 475 - DNA, 33 bp, synthetic construct
  misc_feature 1..33: note = Description of Artificial Sequence: Synthetic oligonucleotide
  source 1..33: mol_type = other DNA
cgggcaactcagaacattttcagctatttaaat

SEQ ID NO: 476 - protein, 11 aa, synthetic construct
  REGION 1..11: note = Description of Artificial Sequence: Synthetic peptide
RATQNIFSYLN

SEQ ID NO: 477 - DNA, 48 bp, synthetic construct
  misc_feature 1..48: note = Description of Artificial Sequence: Synthetic oligonucleotide
  source 1..48: mol_type = other DNA
aggtctagtcagagcctcctccatagtgatggaaggacctatttgtat

SEQ ID NO: 478 - protein, 16 aa, synthetic construct
  REGION 1..16: note = Description of Artificial Sequence: Synthetic peptide
RSSQSLLHSDGRTYLY

SEQ ID NO: 479 - DNA, 51 bp, synthetic construct
  misc_feature 1..51: note = Description of Artificial Sequence: Synthetic oligonucleotide
  source 1..51: mol_type = other DNA
aagtccagccagagtgttttatacagctcccacaataacaactacttagct

SEQ ID NO: 480 - protein, 17 aa, synthetic construct
  REGION 1..17: note = Description of Artificial Sequence: Synthetic peptide
KSSQSVLYSSHNNNYLA

SEQ ID NO: 481 - DNA, 48 bp, synthetic construct
  misc_feature 1..48: note = Description of Artificial Sequence: Synthetic oligonucleotide
  source 1..48: mol_type = other DNA
aagtctagtcagagcctcctgcatggtgatggaaagacctatttgttt

SEQ ID NO: 482 - protein, 16 aa, synthetic construct
  REGION 1..16: note = Description of Artificial Sequence: Synthetic peptide
KSSQSLLHGDGKTYLF

SEQ ID NO: 483 - DNA, 33 bp, synthetic construct; identical to SEQ ID NO: 109
  misc_feature 1..33: note = Description of Artificial Sequence: Synthetic oligonucleotide
  source 1..33: mol_type = other DNA

SEQ ID NO: 484 - protein, 11 aa, synthetic construct
  REGION 1..11: note = Description of Artificial Sequence: Synthetic peptide
RASQGIRNDLG

SEQ ID NO: 485 - DNA, 48 bp, synthetic construct
  misc_feature 1..48: note = Description of Artificial Sequence: Synthetic oligonucleotide
  source 1..48: mol_type = other DNA
cggtctagtcaaagcctcgtatatagtgatggagacacctacttgaat

SEQ ID NO: 486 - protein, 16 aa, synthetic construct
  REGION 1..16: note = Description of Artificial Sequence: Synthetic peptide
RSSQSLVYSDGDTYLN

SEQ ID NO: 487 - DNA, 48 bp, synthetic construct
  misc_feature 1..48: note = Description of Artificial Sequence: Synthetic oligonucleotide
  source 1..48: mol_type = other DNA
aagtctagtcagagcctcctgcatagtgatggaaagacctatttgtat

SEQ ID NO: 488 - protein, 16 aa, synthetic construct
  REGION 1..16: note = Description of Artificial Sequence: Synthetic peptide
KSSQSLLHSDGKTYLY

SEQ ID NO: 489 - DNA, 33 bp, synthetic construct; identical to SEQ ID NO: 109
  misc_feature 1..33: note = Description of Artificial Sequence: Synthetic oligonucleotide
  source 1..33: mol_type = other DNA

SEQ ID NO: 490 - protein, 11 aa, synthetic construct
  REGION 1..11: note = Description of Artificial Sequence: Synthetic peptide
RASQGIRNDLG

SEQ ID NO: 491 - DNA, 33 bp, synthetic construct
  misc_feature 1..33: note = Description of Artificial Sequence: Synthetic oligonucleotide
  source 1..33: mol_type = other DNA
cgggcaagtcaggacattagagatgatttaggc

SEQ ID NO: 492 - protein, 11 aa, synthetic construct
  REGION 1..11: note = Description of Artificial Sequence: Synthetic peptide
RASQDIRDDLG

SEQ ID NO: 493 - DNA, 33 bp, synthetic construct
  misc_feature 1..33: note = Description of Artificial Sequence: Synthetic oligonucleotide
  source 1..33: mol_type = other DNA
cgggcaagtcaggacattagaagtgatttaggc

SEQ ID NO: 494 - protein, 11 aa, synthetic construct
  REGION 1..11: note = Description of Artificial Sequence: Synthetic peptide
RASQDIRSDLG

SEQ ID NO: 495 - DNA, 33 bp, synthetic construct; identical to SEQ ID NO: 205
  misc_feature 1..33: note = Description of Artificial Sequence: Synthetic oligonucleotide
  source 1..33: mol_type = other DNA

SEQ ID NO: 496 - protein, 11 aa, synthetic construct
  REGION 1..11: note = Description of Artificial Sequence: Synthetic peptide
RASQDIRNDLG

SEQ ID NO: 497 - DNA, 33 bp, synthetic construct; identical to SEQ ID NO: 105
  misc_feature 1..33: note = Description of Artificial Sequence: Synthetic oligonucleotide
  source 1..33: mol_type = other DNA

SEQ ID NO: 498 - protein, 11 aa, synthetic construct
  REGION 1..11: note = Description of Artificial Sequence: Synthetic peptide
RASQGISNYLA

SEQ ID NO: 499 - DNA, 33 bp, synthetic construct; identical to SEQ ID NO: 283
  misc_feature 1..33: note = Description of Artificial Sequence: Synthetic oligonucleotide
  source 1..33: mol_type = other DNA

SEQ ID NO: 500 - protein, 11 aa, synthetic construct
  REGION 1..11: note = Description of Artificial Sequence: Synthetic peptide
RASQDISNYLA

SEQ ID NO: 501 - DNA, 33 bp, synthetic construct
  misc_feature 1..33: note = Description of Artificial Sequence: Synthetic oligonucleotide
  source 1..33: mol_type = other DNA
cgggcaagtcagagcattagcagctatttaaat

SEQ ID NO: 502 - protein, 11 aa, synthetic construct
  REGION 1..11: note = Description of Artificial Sequence: Synthetic peptide
RASQSISSYLN

SEQ ID NO: 503 - DNA, 33 bp, synthetic construct
  misc_feature 1..33: note = Description of Artificial Sequence: Synthetic oligonucleotide
  source 1..33: mol_type = other DNA
cgggcgagtcagggtattagtagttggttagcc

SEQ ID NO: 504 - protein, 11 aa, synthetic construct
  REGION 1..11: note = Description of Artificial Sequence: Synthetic peptide
RASQGISSWLA

SEQ ID NO: 505 - DNA, 33 bp, synthetic construct; identical to SEQ ID NO: 109
  misc_feature 1..33: note = Description of Artificial Sequence: Synthetic oligonucleotide
  source 1..33: mol_type = other DNA

SEQ ID NO: 506 - protein, 11 aa, synthetic construct
  REGION 1..11: note = Description of Artificial Sequence: Synthetic peptide
RASQGIRNDLG

SEQ ID NO: 507 - DNA, 51 bp, synthetic construct
  misc_feature 1..51: note = Description of Artificial Sequence: Synthetic oligonucleotide
  source 1..51: mol_type = other DNA
aagtccagccagagtgttttatacagctcccacaataactactacttaact

SEQ ID NO: 508 - protein, 17 aa, synthetic construct
  REGION 1..17: note = Description of Artificial Sequence: Synthetic peptide
KSSQSVLYSSHNNYYLT

SEQ ID NO: 509 - DNA, 33 bp, synthetic construct; identical to SEQ ID NO: 105
  misc_feature 1..33: note = Description of Artificial Sequence: Synthetic oligonucleotide
  source 1..33: mol_type = other DNA

SEQ ID NO: 510 - protein, 11 aa, synthetic construct
  REGION 1..11: note = Description of Artificial Sequence: Synthetic peptide
RASQGISNYLA

SEQ ID NO: 511 - DNA, 33 bp, synthetic construct; identical to SEQ ID NO: 493
  misc_feature 1..33: note = Description of Artificial Sequence: Synthetic oligonucleotide
  source 1..33: mol_type = other DNA

SEQ ID NO: 512 - protein, 11 aa, synthetic construct
  REGION 1..11: note = Description of Artificial Sequence: Synthetic peptide
RASQDIRSDLG

SEQ ID NO: 513 - DNA, 33 bp, synthetic construct
  misc_feature 1..33: note = Description of Artificial Sequence: Synthetic oligonucleotide
  source 1..33: mol_type = other DNA
cgggcgagtcaggccattagcaattatttagcc

SEQ ID NO: 514 - protein, 11 aa, synthetic construct
  REGION 1..11: note = Description of Artificial Sequence: Synthetic peptide
RASQAISNYLA

SEQ ID NO: 515 - DNA, 33 bp, synthetic construct; identical to SEQ ID NO: 109
  misc_feature 1..33: note = Description of Artificial Sequence: Synthetic oligonucleotide
  source 1..33: mol_type = other DNA

SEQ ID NO: 516 - protein, 11 aa, synthetic construct
  REGION 1..11: note = Description of Artificial Sequence: Synthetic peptide
RASQGIRNDLG

SEQ ID NO: 517 - DNA, 33 bp, synthetic construct; identical to SEQ ID NO: 133
  misc_feature 1..33: note = Description of Artificial Sequence: Synthetic oligonucleotide
  source 1..33: mol_type = other DNA

SEQ ID NO: 518 - protein, 11 aa, synthetic construct
  REGION 1..11: note = Description of Artificial Sequence: Synthetic peptide
RASQGIRSDLG

SEQ ID NO: 519 - DNA, 33 bp, synthetic construct
  misc_feature 1..33: note = Description of Artificial Sequence: Synthetic oligonucleotide
  source 1..33: mol_type = other DNA
cgggcaagtcaggccattagaaatgatttaggc

SEQ ID NO: 520 - protein, 11 aa, synthetic construct
  REGION 1..11: note = Description of Artificial Sequence: Synthetic peptide
RASQAIRNDLG

SEQ ID NO: 521 - DNA, 33 bp, synthetic construct; identical to SEQ ID NO: 105
  misc_feature 1..33: note = Description of Artificial Sequence: Synthetic oligonucleotide
  source 1..33: mol_type = other DNA

SEQ ID NO: 522 - protein, 11 aa, synthetic construct
  REGION 1..11: note = Description of Artificial Sequence: Synthetic peptide
RASQGISNYLA

SEQ ID NO: 523 - DNA, 33 bp, synthetic construct; identical to SEQ ID NO: 109
  misc_feature 1..33: note = Description of Artificial Sequence: Synthetic oligonucleotide
  source 1..33: mol_type = other DNA

SEQ ID NO: 524 - protein, 11 aa, synthetic construct
  REGION 1..11: note = Description of Artificial Sequence: Synthetic peptide
RASQGIRNDLG

SEQ ID NO: 525 - DNA, 33 bp, synthetic construct; identical to SEQ ID NO: 109
  misc_feature 1..33: note = Description of Artificial Sequence: Synthetic oligonucleotide
  source 1..33: mol_type = other DNA

SEQ ID NO: 526 - protein, 11 aa, synthetic construct
  REGION 1..11: note = Description of Artificial Sequence: Synthetic peptide
RASQGIRNDLG

SEQ ID NO: 527 - DNA, 33 bp, synthetic construct; identical to SEQ ID NO: 493
  misc_feature 1..33: note = Description of Artificial Sequence: Synthetic oligonucleotide
  source 1..33: mol_type = other DNA

SEQ ID NO: 528 - protein, 11 aa, synthetic construct
  REGION 1..11: note = Description of Artificial Sequence: Synthetic peptide
RASQDIRSDLG

SEQ ID NO: 529 - DNA, 33 bp, synthetic construct
  misc_feature 1..33: note = Description of Artificial Sequence: Synthetic oligonucleotide
  source 1..33: mol_type = other DNA
cgggcaagtcagagcattagcaactatttaaat

SEQ ID NO: 530 - protein, 11 aa, synthetic construct
  REGION 1..11: note = Description of Artificial Sequence: Synthetic peptide
RASQSISNYLN

SEQ ID NO: 531 - DNA, 33 bp, synthetic construct; identical to SEQ ID NO: 493
  misc_feature 1..33: note = Description of Artificial Sequence: Synthetic oligonucleotide
  source 1..33: mol_type = other DNA

SEQ ID NO: 532 - protein, 11 aa, synthetic construct
  REGION 1..11: note = Description of Artificial Sequence: Synthetic peptide
RASQDIRSDLG

SEQ ID NO: 533 - DNA, 33 bp, synthetic construct; identical to SEQ ID NO: 109
  misc_feature 1..33: note = Description of Artificial Sequence: Synthetic oligonucleotide
  source 1..33: mol_type = other DNA

SEQ ID NO: 534 - protein, 11 aa, synthetic construct
  REGION 1..11: note = Description of Artificial Sequence: Synthetic peptide
RASQGIRNDLG

SEQ ID NO: 535 - DNA, 33 bp, synthetic construct
  misc_feature 1..33: note = Description of Artificial Sequence: Synthetic oligonucleotide
  source 1..33: mol_type = other DNA
cgggcaagtcggggcattagaaatgatttaggc

SEQ ID NO: 536 - protein, 11 aa, synthetic construct
  REGION 1..11: note = Description of Artificial Sequence: Synthetic peptide
RASRGIRNDLG

SEQ ID NO: 537 - DNA, 51 bp, synthetic construct
  misc_feature 1..51: note = Description of Artificial Sequence: Synthetic oligonucleotide
  source 1..51: mol_type = other DNA
aagtccagccagagtgttttataccgctccaacaattacaactacttagct

SEQ ID NO: 538 - protein, 17 aa, synthetic construct
  REGION 1..17: note = Description of Artificial Sequence: Synthetic peptide
KSSQSVLYRSNNYNYLA

SEQ ID NO: 539 - DNA, 48 bp, synthetic construct
  misc_feature 1..48: note = Description of Artificial Sequence: Synthetic oligonucleotide
  source 1..48: mol_type = other DNA
aagtctagtcagaccctcctgcatggtgaaggaaagacctatttgtat

SEQ ID NO: 540 - protein, 16 aa, synthetic construct
  REGION 1..16: note = Description of Artificial Sequence: Synthetic peptide
KSSQTLLHGEGKTYLY

SEQ ID NO: 541 - DNA, 33 bp, synthetic construct
  misc_feature 1..33: note = Description of Artificial Sequence: Synthetic oligonucleotide
  source 1..33: mol_type = other DNA
cgggcgagtcaggctatcaatgactggttagcc

SEQ ID NO: 542 - protein, 11 aa, synthetic construct
  REGION 1..11: note = Description of Artificial Sequence: Synthetic peptide
RASQAINDWLA

SEQ ID NO: 543 - DNA, 33 bp, synthetic construct; identical to SEQ ID NO: 109
  misc_feature 1..33: note = Description of Artificial Sequence: Synthetic oligonucleotide
  source 1..33: mol_type = other DNA

SEQ ID NO: 544 - protein, 11 aa, synthetic construct
  REGION 1..11: note = Description of Artificial Sequence: Synthetic peptide
RASQGIRNDLG

SEQ ID NO: 545 - DNA, 33 bp, synthetic construct; identical to SEQ ID NO: 109
  misc_feature 1..33: note = Description of Artificial Sequence: Synthetic oligonucleotide
  source 1..33: mol_type = other DNA

SEQ ID NO: 546 - protein, 11 aa, synthetic construct
  REGION 1..11: note = Description of Artificial Sequence: Synthetic peptide
RASQGIRNDLG

SEQ ID NO: 547 - DNA, 33 bp, synthetic construct
  misc_feature 1..33: note = Description of Artificial Sequence: Synthetic oligonucleotide
  source 1..33: mol_type = other DNA
cgggcaagtcagaacatttacagctatttaaat

SEQ ID NO: 548 - protein, 11 aa, synthetic construct
  REGION 1..11: note = Description of Artificial Sequence: Synthetic peptide
RASQNIYSYLN

SEQ ID NO: 549 - DNA, 33 bp, synthetic construct; identical to SEQ ID NO: 493
  misc_feature 1..33: note = Description of Artificial Sequence: Synthetic oligonucleotide
  source 1..33: mol_type = other DNA

SEQ ID NO: 550 - protein, 11 aa, synthetic construct
  REGION 1..11: note = Description of Artificial Sequence: Synthetic peptide
RASQDIRSDLG

SEQ ID NO: 551 - DNA, 33 bp, synthetic construct; identical to SEQ ID NO: 109
  misc_feature 1..33: note = Description of Artificial Sequence: Synthetic oligonucleotide
  source 1..33: mol_type = other DNA

SEQ ID NO: 552 - protein, 11 aa, synthetic construct
  REGION 1..11: note = Description of Artificial Sequence: Synthetic peptide
RASQGIRNDLG

SEQ ID NO: 553 - DNA, 33 bp, synthetic construct
  misc_feature 1..33: note = Description of Artificial Sequence: Synthetic oligonucleotide
  source 1..33: mol_type = other DNA
cgggcgagtcagggtattagcaactggttagcc

SEQ ID NO: 554 - protein, 11 aa, synthetic construct
  REGION 1..11: note = Description of Artificial Sequence: Synthetic peptide
RASQGISNWLA

SEQ ID NO: 555 - DNA, 48 bp, synthetic construct
  misc_feature 1..48: note = Description of Artificial Sequence: Synthetic oligonucleotide
  source 1..48: mol_type = other DNA
aagtctagtcagagcctcctgcatagtgagggaaagacctatttgtat

SEQ ID NO: 556 - protein, 16 aa, synthetic construct
  REGION 1..16: note = Description of Artificial Sequence: Synthetic peptide
KSSQSLLHSEGKTYLY

SEQ ID NO: 557 - DNA, 33 bp, synthetic construct; identical to SEQ ID NO: 503
  misc_feature 1..33: note = Description of Artificial Sequence: Synthetic oligonucleotide
  source 1..33: mol_type = other DNA

SEQ ID NO: 558 - protein, 11 aa, synthetic construct
  REGION 1..11: note = Description of Artificial Sequence: Synthetic peptide
RASQGISSWLA

SEQ ID NO: 559 - DNA, 33 bp, synthetic construct; identical to SEQ ID NO: 553
  misc_feature 1..33: note = Description of Artificial Sequence: Synthetic oligonucleotide
  source 1..33: mol_type = other DNA

SEQ ID NO: 560 - protein, 11 aa, synthetic construct
  REGION 1..11: note = Description of Artificial Sequence: Synthetic peptide
RASQGISNWLA

SEQ ID NO: 561 - DNA, 33 bp, synthetic construct; identical to SEQ ID NO: 109
  misc_feature 1..33: note = Description of Artificial Sequence: Synthetic oligonucleotide
  source 1..33: mol_type = other DNA

SEQ ID NO: 562 - protein, 11 aa, synthetic construct
  REGION 1..11: note = Description of Artificial Sequence: Synthetic peptide
RASQGIRNDLG

SEQ ID NO: 563 - DNA, 33 bp, synthetic construct
  misc_feature 1..33: note = Description of Artificial Sequence: Synthetic oligonucleotide
  source 1..33: mol_type = other DNA
caggcgagtcagtacattagcaactatttaaat

SEQ ID NO: 564 - protein, 11 aa, synthetic construct
  REGION 1..11: note = Description of Artificial Sequence: Synthetic peptide
QASQYISNYLN

SEQ ID NO: 565 - DNA, 33 bp, synthetic construct; identical to SEQ ID NO: 109
  misc_feature 1..33: note = Description of Artificial Sequence: Synthetic oligonucleotide
  source 1..33: mol_type = other DNA

SEQ ID NO: 566 - protein, 11 aa, synthetic construct
  REGION 1..11: note = Description of Artificial Sequence: Synthetic peptide
RASQGIRNDLG

SEQ ID NO: 567 - DNA, 33 bp, synthetic construct
  misc_feature 1..33: note = Description of Artificial Sequence: Synthetic oligonucleotide
  source 1..33: mol_type = other DNA
cgggcgagtcagggtattaccagctggttaact

SEQ ID NO: 568 - protein, 11 aa, synthetic construct
  REGION 1..11: note = Description of Artificial Sequence: Synthetic peptide
RASQGITSWLT

SEQ ID NO: 569 - DNA, 33 bp, synthetic construct; identical to SEQ ID NO: 109
  misc_feature 1..33: note = Description of Artificial Sequence: Synthetic oligonucleotide
  source 1..33: mol_type = other DNA

SEQ ID NO: 570 - protein, 11 aa, synthetic construct
  REGION 1..11: note = Description of Artificial Sequence: Synthetic peptide
RASQGIRNDLG

SEQ ID NO: 571 - DNA, 33 bp, synthetic construct
  misc_feature 1..33: note = Description of Artificial Sequence: Synthetic oligonucleotide
  source 1..33: mol_type = other DNA
cgggcgagtcaggatattttcgactggttagcc

SEQ ID NO: 572 - protein, 11 aa, synthetic construct
  REGION 1..11: note = Description of Artificial Sequence: Synthetic peptide
RASQDIFDWLA

SEQ ID NO: 573 - DNA, 33 bp, synthetic construct; identical to SEQ ID NO: 281
  misc_feature 1..33: note = Description of Artificial Sequence: Synthetic oligonucleotide
  source 1..33: mol_type = other DNA

SEQ ID NO: 574 - protein, 11 aa, synthetic construct
  REGION 1..11: note = Description of Artificial Sequence: Synthetic peptide
RASQGIRTDLG

SEQ ID NO: 575 - DNA, 48 bp, synthetic construct
  misc_feature 1..48: note = Description of Artificial Sequence: Synthetic oligonucleotide
  source 1..48: mol_type = other DNA
aagtctagtcagagcctcctgcatggtgatggaaagacctatttgtat

SEQ ID NO: 576 - protein, 16 aa, synthetic construct
  REGION 1..16: note = Description of Artificial Sequence: Synthetic peptide
KSSQSLLHGDGKTYLY

SEQ ID NO: 577 - DNA, 33 bp, synthetic construct; identical to SEQ ID NO: 109
  misc_feature 1..33: note = Description of Artificial Sequence: Synthetic oligonucleotide
  source 1..33: mol_type = other DNA

SEQ ID NO: 578 - protein, 11 aa, synthetic construct
  REGION 1..11: note = Description of Artificial Sequence: Synthetic peptide
RASQGIRNDLG

SEQ ID NO: 579 - DNA, 48 bp, synthetic construct
  misc_feature 1..48: note = Description of Artificial Sequence: Synthetic oligonucleotide
  source 1..48: mol_type = other DNA
aagtctagtcagagcctcctacatggtgatggaaagacctatttgtat

SEQ ID NO: 580 - protein, 16 aa, synthetic construct
  REGION 1..16: note = Description of Artificial Sequence: Synthetic peptide
KSSQSLLHGDGKTYLY

SEQ ID NO: 581 - DNA, 33 bp, synthetic construct; identical to SEQ ID NO: 109
  misc_feature 1..33: note = Description of Artificial Sequence: Synthetic oligonucleotide
  source 1..33: mol_type = other DNA

SEQ ID NO: 582 - protein, 11 aa, synthetic construct
  REGION 1..11: note = Description of Artificial Sequence: Synthetic peptide
RASQGIRNDLG

SEQ ID NO: 583 - DNA, 33 bp, synthetic construct; identical to SEQ ID NO: 491
  misc_feature 1..33: note = Description of Artificial Sequence: Synthetic oligonucleotide
  source 1..33: mol_type = other DNA

SEQ ID NO: 584 - protein, 11 aa, synthetic construct
  REGION 1..11: note = Description of Artificial Sequence: Synthetic peptide
RASQDIRDDLG

SEQ ID NO: 585 - DNA, 33 bp, synthetic construct
  misc_feature 1..33: note = Description of Artificial Sequence: Synthetic oligonucleotide
  source 1..33: mol_type = other DNA
cgggcaagtcagaggattagcagctatttaaat

SEQ ID NO: 586 - protein, 11 aa, synthetic construct
  REGION 1..11: note = Description of Artificial Sequence: Synthetic peptide
RASQRISSYLN

SEQ ID NO: 587 - DNA, 33 bp, synthetic construct
  misc_feature 1..33: note = Description of Artificial Sequence: Synthetic oligonucleotide
  source 1..33: mol_type = other DNA
agggccagtcagagtgttagaagtaatttagcc

SEQ ID NO: 588 - protein, 11 aa, synthetic construct
  REGION 1..11: note = Description of Artificial Sequence: Synthetic peptide
RASQSVRSNLA

SEQ ID NO: 589 - DNA, 33 bp, synthetic construct
  misc_feature 1..33: note = Description of Artificial Sequence: Synthetic oligonucleotide
  source 1..33: mol_type = other DNA
cgggcaagtcaggccattagagatgatttaggc

SEQ ID NO: 590 - protein, 11 aa, synthetic construct
  REGION 1..11: note = Description of Artificial Sequence: Synthetic peptide
RASQAIRDDLG

SEQ ID NO: 591 - DNA, 33 bp, synthetic construct; identical to SEQ ID NO: 109
  misc_feature 1..33: note = Description of Artificial Sequence: Synthetic oligonucleotide
  source 1..33: mol_type = other DNA

SEQ ID NO: 592 - protein, 11 aa, synthetic construct
  REGION 1..11: note = Description of Artificial Sequence: Synthetic peptide
RASQGIRNDLG

SEQ ID NO: 593 - DNA, 33 bp, synthetic construct; identical to SEQ ID NO: 301
  misc_feature 1..33: note = Description of Artificial Sequence: Synthetic oligonucleotide
  source 1..33: mol_type = other DNA

SEQ ID NO: 594 - protein, 11 aa, synthetic construct
  REGION 1..11: note = Description of Artificial Sequence: Synthetic peptide
RASQSVSSNLA

SEQ ID NO: 595 - DNA, 33 bp, synthetic construct; identical to SEQ ID NO: 109
  misc_feature 1..33: note = Description of Artificial Sequence: Synthetic oligonucleotide
  source 1..33: mol_type = other DNA

SEQ ID NO: 596 - protein, 11 aa, synthetic construct
  REGION 1..11: note = Description of Artificial Sequence: Synthetic peptide
RASQGIRNDLG

SEQ ID NO: 597 - DNA, 33 bp, synthetic construct; identical to SEQ ID NO: 109
  misc_feature 1..33: note = Description of Artificial Sequence: Synthetic oligonucleotide
  source 1..33: mol_type = other DNA

SEQ ID NO: 598 - protein, 11 aa, synthetic construct
  REGION 1..11: note = Description of Artificial Sequence: Synthetic peptide
RASQGIRNDLG

SEQ ID NO: 599 - DNA, 33 bp, synthetic construct; identical to SEQ ID NO: 491
  misc_feature 1..33: note = Description of Artificial Sequence: Synthetic oligonucleotide
  source 1..33: mol_type = other DNA

SEQ ID NO: 600 - protein, 11 aa, synthetic construct
  REGION 1..11: note = Description of Artificial Sequence: Synthetic peptide
RASQDIRDDLG

SEQ ID NO: 601 - DNA, 33 bp, synthetic construct; identical to SEQ ID NO: 493
  misc_feature 1..33: note = Description of Artificial Sequence: Synthetic oligonucleotide
  source 1..33: mol_type = other DNA

SEQ ID NO: 602 - protein, 11 aa, synthetic construct
  REGION 1..11: note = Description of Artificial Sequence: Synthetic peptide
RASQDIRSDLG

SEQ ID NO: 603 - DNA, 33 bp, synthetic construct
  misc_feature 1..33: note = Description of Artificial Sequence: Synthetic oligonucleotide
  source 1..33: mol_type = other DNA
caggcgagtcaggacatttccaactttttaaat

SEQ ID NO: 604 - protein, 11 aa, synthetic construct
  REGION 1..11: note = Description of Artificial Sequence: Synthetic peptide
QASQDISNFLN

SEQ ID NO: 605 - DNA, 33 bp, synthetic construct
  misc_feature 1..33: note = Description of Artificial Sequence: Synthetic oligonucleotide
  source 1..33: mol_type = other DNA
cgggcaagtcagagcattagcaggtatttaagt

SEQ ID NO: 606 - protein, 11 aa, synthetic construct
  REGION 1..11: note = Description of Artificial Sequence: Synthetic peptide
RASQSISRYLS

SEQ ID NO: 607 - DNA, 33 bp, synthetic construct; identical to SEQ ID NO: 547
  misc_feature 1..33: note = Description of Artificial Sequence: Synthetic oligonucleotide
  source 1..33: mol_type = other DNA

SEQ ID NO: 608 - protein, 11 aa, synthetic construct
  REGION 1..11: note = Description of Artificial Sequence: Synthetic peptide
RASQNIYSYLN

SEQ ID NO: 609 - DNA, 33 bp, synthetic construct; identical to SEQ ID NO: 493
  misc_feature 1..33: note = Description of Artificial Sequence: Synthetic oligonucleotide
  source 1..33: mol_type = other DNA

SEQ ID NO: 610 - protein, 11 aa, synthetic construct
  REGION 1..11: note = Description of Artificial Sequence: Synthetic peptide
RASQDIRSDLG

SEQ ID NO: 611 - DNA, 33 bp, synthetic construct; identical to SEQ ID NO: 493
  misc_feature 1..33: note = Description of Artificial Sequence: Synthetic oligonucleotide
  source 1..33: mol_type = other DNA

SEQ ID NO: 612 - protein, 11 aa, synthetic construct
  REGION 1..11: note = Description of Artificial Sequence: Synthetic peptide
RASQDIRSDLG

SEQ ID NO: 613 - DNA, 33 bp, synthetic construct; identical to SEQ ID NO: 93
  misc_feature 1..33: note = Description of Artificial Sequence: Synthetic oligonucleotide
  source 1..33: mol_type = other DNA

SEQ ID NO: 614 - protein, 11 aa, synthetic construct
  REGION 1..11: note = Description of Artificial Sequence: Synthetic peptide
RTSQGIRNDLG

SEQ ID NO: 615 - DNA, 33 bp, synthetic construct
  misc_feature 1..33: note = Description of Artificial Sequence: Synthetic oligonucleotide
  source 1..33: mol_type = other DNA
cgggcaagtcaggacattagaaatgatgtaggc

SEQ ID NO: 616 - protein, 11 aa, synthetic construct
  REGION 1..11: note = Description of Artificial Sequence: Synthetic peptide
RASQDIRNDVG

SEQ ID NO: 617 - DNA, 33 bp, synthetic construct
  misc_feature 1..33: note = Description of Artificial Sequence: Synthetic oligonucleotide
  source 1..33: mol_type = other DNA
tgggcgagtcagggcattaacagttatttagcc

SEQ ID NO: 618 - protein, 11 aa, synthetic construct
  REGION 1..11: note = Description of Artificial Sequence: Synthetic peptide
WASQGINSYLA

SEQ ID NO: 619 - DNA, 33 bp, synthetic construct
  misc_feature 1..33: note = Description of Artificial Sequence: Synthetic oligonucleotide
  source 1..33: mol_type = other DNA
cgggcgagtcagggtattagtaagtggttagcc

SEQ ID NO: 620 - protein, 11 aa, synthetic construct
  REGION 1..11: note = Description of Artificial Sequence: Synthetic peptide
RASQGISKWLA

SEQ ID NO: 621 - DNA, 33 bp, synthetic construct
  misc_feature 1..33: note = Description of Artificial Sequence: Synthetic oligonucleotide
  source 1..33: mol_type = other DNA
cgggcaagtcagaacattaggaactttttaaat

SEQ ID NO: 622 - protein, 11 aa, synthetic construct
  REGION 1..11: note = Description of Artificial Sequence: Synthetic peptide
RASQNIRNFLN

SEQ ID NO: 623 - DNA, 33 bp, synthetic construct; identical to SEQ ID NO: 95
  misc_feature 1..33: note = Description of Artificial Sequence: Synthetic oligonucleotide
  source 1..33: mol_type = other DNA

SEQ ID NO: 624 - protein, 11 aa, synthetic construct
  REGION 1..11: note = Description of Artificial Sequence: Synthetic peptide
RASQGISKWLA

SEQ ID NO: 625 - DNA, 33 bp, synthetic construct
  misc_feature 1..33: note = Description of Artificial Sequence: Synthetic oligonucleotide
  source 1..33: mol_type = other DNA
cgggcgagtcagggtattagcagatggttagcc

SEQ ID NO: 626 - protein, 11 aa, synthetic construct
  REGION 1..11: note = Description of Artificial Sequence: Synthetic peptide
RASQGISRWLA

SEQ ID NO: 627 - DNA, 51 bp, synthetic construct
  misc_feature 1..51: note = Description of Artificial Sequence: Synthetic oligonucleotide
  source 1..51: mol_type = other DNA
aagtccatccagagtgttttatacagatccaacaataagaactacttaact

SEQ ID NO: 628 - protein, 17 aa, synthetic construct
  REGION 1..17: note = Description of Artificial Sequence: Synthetic peptide
KSIQSVLYRSNNKNYLT

SEQ ID NO: 629 - DNA, 33 bp, synthetic construct
  misc_feature 1..33: note = Description of Artificial Sequence: Synthetic oligonucleotide
  source 1..33: mol_type = other DNA
cgggcgagtcagggcattagcaattacttagcc

SEQ ID NO: 630 - protein, 11 aa, synthetic construct
  REGION 1..11: note = Description of Artificial Sequence: Synthetic peptide
RASQGISNYLA

SEQ ID NO: 631 - DNA, 33 bp, synthetic construct; identical to SEQ ID NO: 305
  misc_feature 1..33: note = Description of Artificial Sequence: Synthetic oligonucleotide
  source 1..33: mol_type = other DNA

SEQ ID NO: 632 - protein, 11 aa, synthetic construct
  REGION 1..11: note = Description of Artificial Sequence: Synthetic peptide
RASQSIISYLN

SEQ ID NO: 633 - DNA, 33 bp, synthetic construct; identical to SEQ ID NO: 109
  misc_feature 1..33: note = Description of Artificial Sequence: Synthetic oligonucleotide
  source 1..33: mol_type = other DNA

SEQ ID NO: 634 - protein, 11 aa, synthetic construct
  REGION 1..11: note = Description of Artificial Sequence: Synthetic peptide
RASQGIRNDLG

SEQ ID NO: 635 - DNA, 33 bp, synthetic construct; identical to SEQ ID NO: 493
  misc_feature 1..33: note = Description of Artificial Sequence: Synthetic oligonucleotide
  source 1..33: mol_type = other DNA

SEQ ID NO: 636 - protein, 11 aa, synthetic construct
  REGION 1..11: note = Description of Artificial Sequence: Synthetic peptide
RASQDIRSDLG

SEQ ID NO: 637 - DNA, 33 bp, synthetic construct
  misc_feature 1..33: note = Description of Artificial Sequence: Synthetic oligonucleotide
  source 1..33: mol_type = other DNA
cgggcgagtcagggtattagccggtggttagcc

SEQ ID NO: 638 - protein, 11 aa, synthetic construct
  REGION 1..11: note = Description of Artificial Sequence: Synthetic peptide
RASQGISRWLA

SEQ ID NO: 639 - DNA, 33 bp, synthetic construct; identical to SEQ ID NO: 305
  misc_feature 1..33: note = Description of Artificial Sequence: Synthetic oligonucleotide
  source 1..33: mol_type = other DNA

SEQ ID NO: 640 - protein, 11 aa, synthetic construct
  REGION 1..11: note = Description of Artificial Sequence: Synthetic peptide
RASQSIISYLN

SEQ ID NO: 641 - DNA, 33 bp, synthetic construct
  misc_feature 1..33: note = Description of Artificial Sequence: Synthetic oligonucleotide
  source 1..33: mol_type = other DNA
cggacaagtcaggacattagaagtgatttaggc

SEQ ID NO: 642 - protein, 11 aa, synthetic construct
  REGION 1..11: note = Description of Artificial Sequence: Synthetic peptide
RTSQDIRSDLG

SEQ ID NO: 643 - DNA, 33 bp, synthetic construct; identical to SEQ ID NO: 493
  misc_feature 1..33: note = Description of Artificial Sequence: Synthetic oligonucleotide
  source 1..33: mol_type = other DNA

SEQ ID NO: 644 - protein, 11 aa, synthetic construct
  REGION 1..11: note = Description of Artificial Sequence: Synthetic peptide
RASQDIRSDLG

SEQ ID NO: 645 - DNA, 33 bp, synthetic construct
  misc_feature 1..33: note = Description of Artificial Sequence: Synthetic oligonucleotide
  source 1..33: mol_type = other DNA
cggacaagtcaggacatcagaaatgatttaggc

SEQ ID NO: 646 - protein, 11 aa, synthetic construct
  REGION 1..11: note = Description of Artificial Sequence: Synthetic peptide
RTSQDIRNDLG

SEQ ID NO: 647 - DNA, 33 bp, synthetic construct
  misc_feature 1..33: note = Description of Artificial Sequence: Synthetic oligonucleotide
  source 1..33: mol_type = other DNA
cgggcaagtcagaacattaacaggtatttaaat

SEQ ID NO: 648 - protein, 11 aa, synthetic construct
  REGION 1..11: note = Description of Artificial Sequence: Synthetic peptide
RASQNINRYLN

SEQ ID NO: 649 - DNA, 33 bp, synthetic construct; identical to SEQ ID NO: 493
  misc_feature 1..33: note = Description of Artificial Sequence: Synthetic oligonucleotide
  source 1..33: mol_type = other DNA

SEQ ID NO: 650 - protein, 11 aa, synthetic construct
  REGION 1..11: note = Description of Artificial Sequence: Synthetic peptide
RASQDIRSDLG

SEQ ID NO: 651 - DNA, 33 bp, synthetic construct; identical to SEQ ID NO: 173
  misc_feature 1..33: note = Description of Artificial Sequence: Synthetic oligonucleotide
  source 1..33: mol_type = other DNA

SEQ ID NO: 652 - protein, 11 aa, synthetic construct
  REGION 1..11: note = Description of Artificial Sequence: Synthetic peptide
RASQGISRWLA

SEQ ID NO: 653 - DNA, 33 bp, synthetic construct; identical to SEQ ID NO: 529
  misc_feature 1..33: note = Description of Artificial Sequence: Synthetic oligonucleotide
  source 1..33: mol_type = other DNA

SEQ ID NO: 654 - protein, 11 aa, synthetic construct
  REGION 1..11: note = Description of Artificial Sequence: Synthetic peptide
RASQSISNYLN

SEQ ID NO: 655 - DNA, 33 bp, synthetic construct
  misc_feature 1..33: note = Description of Artificial Sequence: Synthetic oligonucleotide
  source 1..33: mol_type = other DNA
cgggcgagtcagcttattagcaagtggttagcc

SEQ ID NO: 656 - protein, 11 aa, synthetic construct
  REGION 1..11: note = Description of Artificial Sequence: Synthetic peptide
RASQLISKWLA

SEQ ID NO: 657 - DNA, 33 bp, synthetic construct; identical to SEQ ID NO: 205
  misc_feature 1..33: note = Description of Artificial Sequence: Synthetic oligonucleotide
  source 1..33: mol_type = other DNA

SEQ ID NO: 658 - protein, 11 aa, synthetic construct
  REGION 1..11: note = Description of Artificial Sequence: Synthetic peptide
RASQDIRNDLG

SEQ ID NO: 659 - DNA, 33 bp, synthetic construct
  misc_feature 1..33: note = Description of Artificial Sequence: Synthetic oligonucleotide
  source 1..33: mol_type = other DNA
cgggcgagtcaggccattagtaattatttagcc

SEQ ID NO: 660 - protein, 11 aa, synthetic construct
  REGION 1..11: note = Description of Artificial Sequence: Synthetic peptide
RASQAISNYLA

SEQ ID NO: 661 - DNA, 33 bp, synthetic construct; identical to SEQ ID NO: 305
  misc_feature 1..33: note = Description of Artificial Sequence: Synthetic oligonucleotide
  source 1..33: mol_type = other DNA

SEQ ID NO: 662 - protein, 11 aa, synthetic construct
  REGION 1..11: note = Description of Artificial Sequence: Synthetic peptide
RASQSIISYLN

SEQ ID NO: 663 - DNA, 33 bp, synthetic construct; identical to SEQ ID NO: 109
  misc_feature 1..33: note = Description of Artificial Sequence: Synthetic oligonucleotide
  source 1..33: mol_type = other DNA

SEQ ID NO: 664 - protein, 11 aa, synthetic construct
  REGION 1..11: note = Description of Artificial Sequence: Synthetic peptide
RASQGIRNDLG

SEQ ID NO: 665 - DNA, 33 bp, synthetic construct; identical to SEQ ID NO: 493
  misc_feature 1..33: note = Description of Artificial Sequence: Synthetic oligonucleotide
  source 1..33: mol_type = other DNA

SEQ ID NO: 666 - protein, 11 aa, synthetic construct
  REGION 1..11: note = Description of Artificial Sequence: Synthetic peptide
RASQDIRSDLG

SEQ ID NO: 667 - DNA, 33 bp, synthetic construct; identical to SEQ ID NO: 493
  misc_feature 1..33: note = Description of Artificial Sequence: Synthetic oligonucleotide
  source 1..33: mol_type = other DNA

SEQ ID NO: 668 - protein, 11 aa, synthetic construct
  REGION 1..11: note = Description of Artificial Sequence: Synthetic peptide
RASQDIRSDLG

SEQ ID NO: 669 - DNA, 33 bp, synthetic construct; identical to SEQ ID NO: 109
  misc_feature 1..33: note = Description of Artificial Sequence: Synthetic oligonucleotide
  source 1..33: mol_type = other DNA

SEQ ID NO: 670 - protein, 11 aa, synthetic construct
  REGION 1..11: note = Description of Artificial Sequence: Synthetic peptide
RASQGIRNDLG

SEQ ID NO: 671 - DNA, 33 bp, synthetic construct; identical to SEQ ID NO: 637
  misc_feature 1..33: note = Description of Artificial Sequence: Synthetic oligonucleotide
  source 1..33: mol_type = other DNA

SEQ ID NO: 672 - protein, 11 aa, synthetic construct
  REGION 1..11: note = Description of Artificial Sequence: Synthetic peptide
RASQGISRWLA

SEQ ID NO: 673 - DNA, 33 bp, synthetic construct
  misc_feature 1..33: note = Description of Artificial Sequence: Synthetic oligonucleotide
  source 1..33: mol_type = other DNA
cgggcaagtcagagaattatcagctatttaaat

SEQ ID NO: 674 - protein, 11 aa, synthetic construct
  REGION 1..11: note = Description of Artificial Sequence: Synthetic peptide
RASQRIISYLN

SEQ ID NO: 675 - DNA, 33 bp, synthetic construct
  misc_feature 1..33: note = Description of Artificial Sequence: Synthetic oligonucleotide
  source 1..33: mol_type = other DNA
cgggcaagtcagatcattatcagctatttaaat

SEQ ID NO: 676 - protein, 11 aa, synthetic construct
  REGION 1..11: note = Description of Artificial Sequence: Synthetic peptide
RASQIIISYLN

SEQ ID NO: 677 - DNA, 33 bp, synthetic construct
  misc_feature 1..33: note = Description of Artificial Sequence: Synthetic oligonucleotide
  source 1..33: mol_type = other DNA
caggcgagtcaggacattttcaactatttaaat

SEQ ID NO: 678 - protein, 11 aa, synthetic construct
  REGION 1..11: note = Description of Artificial Sequence: Synthetic peptide
QASQDIFNYLN

SEQ ID NO: 679 - DNA, 33 bp, synthetic construct; identical to SEQ ID NO: 625
  misc_feature 1..33: note = Description of Artificial Sequence: Synthetic oligonucleotide
  source 1..33: mol_type = other DNA

SEQ ID NO: 680 - protein, 11 aa, synthetic construct
  REGION 1..11: note = Description of Artificial Sequence: Synthetic peptide
RASQGISRWLA

SEQ ID NO: 681 - DNA, 33 bp, synthetic construct; identical to SEQ ID NO: 293
  misc_feature 1..33: note = Description of Artificial Sequence: Synthetic oligonucleotide
  source 1..33: mol_type = other DNA

SEQ ID NO: 682 - protein, 11 aa, synthetic construct
  REGION 1..11: note = Description of Artificial Sequence: Synthetic peptide
RASQGINNYLA

SEQ ID NO: 683 - DNA, 48 bp, synthetic construct; identical to SEQ ID NO: 487
  misc_feature 1..48: note = Description of Artificial Sequence: Synthetic oligonucleotide
  source 1..48: mol_type = other DNA

SEQ ID NO: 684 - protein, 16 aa, synthetic construct
  REGION 1..16: note = Description of Artificial Sequence: Synthetic peptide
KSSQSLLHSDGKTYLY

SEQ ID NO: 685 - DNA, 33 bp, synthetic construct; identical to SEQ ID NO: 493
  misc_feature 1..33: note = Description of Artificial Sequence: Synthetic oligonucleotide
  source 1..33: mol_type = other DNA

SEQ ID NO: 686 - protein, 11 aa, synthetic construct
  REGION 1..11: note = Description of Artificial Sequence: Synthetic peptide
RASQDIRSDLG

SEQ ID NO: 687 - DNA, 33 bp, synthetic construct; identical to SEQ ID NO: 501
  misc_feature 1..33: note = Description of Artificial Sequence: Synthetic oligonucleotide
  source 1..33: mol_type = other DNA

SEQ ID NO: 688 - protein, 11 aa, synthetic construct
  REGION 1..11: note = Description of Artificial Sequence: Synthetic peptide
RASQSISSYLN

SEQ ID NO: 689 - DNA, 33 bp, synthetic construct
  misc_feature 1..33: note = Description of Artificial Sequence: Synthetic oligonucleotide
  source 1..33: mol_type = other DNA
cggacaagtcaggacattagaaatgatttaggc

SEQ ID NO: 690 - protein, 11 aa, synthetic construct
  REGION 1..11: note = Description of Artificial Sequence: Synthetic peptide
RTSQDIRNDLG

SEQ ID NO: 691 - DNA, 33 bp, synthetic construct; identical to SEQ ID NO: 171
  misc_feature 1..33: note = Description of Artificial Sequence: Synthetic oligonucleotide
  source 1..33: mol_type = other DNA

SEQ ID NO: 692 - protein, 11 aa, synthetic construct
  REGION 1..11: note = Description of Artificial Sequence: Synthetic peptide
RASQGISSWLA

SEQ ID NO: 693 - DNA, 33 bp, synthetic construct
  misc_feature 1..33: note = Description of Artificial Sequence: Synthetic oligonucleotide
  source 1..33: mol_type = other DNA
tctggagataaattgggggataaatatgcttgc

SEQ ID NO: 694 - protein, 11 aa, synthetic construct
  REGION 1..11: note = Description of Artificial Sequence: Synthetic peptide
SGDKLGDKYAC

SEQ ID NO: 695 - DNA, 33 bp, synthetic construct; identical to SEQ ID NO: 163
  misc_feature 1..33: note = Description of Artificial Sequence: Synthetic oligonucleotide
  source 1..33: mol_type = other DNA

SEQ ID NO: 696 - protein, 11 aa, synthetic construct
  REGION 1..11: note = Description of Artificial Sequence: Synthetic peptide
SGDKLGDKYAY

SEQ ID NO: 697 - DNA, 33 bp, synthetic construct
  misc_feature 1..33: note = Description of Artificial Sequence: Synthetic oligonucleotide
  source 1..33: mol_type = other DNA
tctggagataaattgggggaaaaatatgcttgc

SEQ ID NO: 698 - protein, 11 aa, synthetic construct
  REGION 1..11: note = Description of Artificial Sequence: Synthetic peptide
SGDKLGEKYAC

SEQ ID NO: 699 - DNA, 36 bp, synthetic construct; identical to SEQ ID NO: 195
  misc_feature 1..36: note = Description of Artificial Sequence: Synthetic oligonucleotide
  source 1..36: mol_type = other DNA

SEQ ID NO: 700 - protein, 12 aa, synthetic construct
  REGION 1..12: note = Description of Artificial Sequence: Synthetic peptide
TLSSEHSTYTIE

SEQ ID NO: 701 - DNA, 33 bp, synthetic construct
  misc_feature 1..33: note = Description of Artificial Sequence: Synthetic oligonucleotide
  source 1..33: mol_type = other DNA
tctggagataaattggggaataaatatgcttgc

SEQ ID NO: 702 - protein, 11 aa, synthetic construct
  REGION 1..11: note = Description of Artificial Sequence: Synthetic peptide
SGDKLGNKYAC

SEQ ID NO: 703 - DNA, 33 bp, synthetic construct
  misc_feature 1..33: note = Description of Artificial Sequence: Synthetic oligonucleotide
  source 1..33: mol_type = other DNA
tctggagataaattgggggagaaatatgcttac

SEQ ID NO: 704 - protein, 11 aa, synthetic construct
  REGION 1..11: note = Description of Artificial Sequence: Synthetic peptide
SGDKLGEKYAY

SEQ ID NO: 705 - DNA, 39 bp, synthetic construct
  misc_feature 1..39: note = Description of Artificial Sequence: Synthetic oligonucleotide
  source 1..39: mol_type = other DNA
tctggaaccaactccaacatcggaagttatactgtaaac

SEQ ID NO: 706 - protein, 13 aa, synthetic construct
  REGION 1..13: note = Description of Artificial Sequence: Synthetic peptide
SGTNSNIGSYTVN

SEQ ID NO: 707 - DNA, 33 bp, synthetic construct; identical to SEQ ID NO: 693
  misc_feature 1..33: note = Description of Artificial Sequence: Synthetic oligonucleotide
  source 1..33: mol_type = other DNA

SEQ ID NO: 708 - protein, 11 aa, synthetic construct
  REGION 1..11: note = Description of Artificial Sequence: Synthetic peptide
SGDKLGDKYAC

SEQ ID NO: 709 - DNA, 33 bp, synthetic construct
  misc_feature 1..33: note = Description of Artificial Sequence: Synthetic oligonucleotide
  source 1..33: mol_type = other DNA
tctggagataaattgggggagaaatatgcttgc

SEQ ID NO: 710 - protein, 11 aa, synthetic construct
  REGION 1..11: note = Description of Artificial Sequence: Synthetic peptide
SGDKLGEKYAC

SEQ ID NO: 711 - DNA, 33 bp, synthetic construct
  misc_feature 1..33: note = Description of Artificial Sequence: Synthetic oligonucleotide
  source 1..33: mol_type = other DNA
tctggatataaattgggggataaatatgcttgc

SEQ ID NO: 712 - protein, 11 aa, synthetic construct
  REGION 1..11: note = Description of Artificial Sequence: Synthetic peptide
SGYKLGDKYAC

SEQ ID NO: 713 - DNA, 33 bp, synthetic construct
  misc_feature 1..33: note = Description of Artificial Sequence: Synthetic oligonucleotide
  source 1..33: mol_type = other DNA
tctggagataaattgggggagaaatatgtttcc

SEQ ID NO: 714 - protein, 11 aa, synthetic construct
  REGION 1..11: note = Description of Artificial Sequence: Synthetic peptide
SGDKLGEKYVS

SEQ ID NO: 715 - DNA, 33 bp, synthetic construct; identical to SEQ ID NO: 693
  misc_feature 1..33: note = Description of Artificial Sequence: Synthetic oligonucleotide
  source 1..33: mol_type = other DNA

SEQ ID NO: 716 - protein, 11 aa, synthetic construct
  REGION 1..11: note = Description of Artificial Sequence: Synthetic peptide
SGDKLGDKYAC

SEQ ID NO: 717 - DNA, 33 bp, synthetic construct; identical to SEQ ID NO: 693
  misc_feature 1..33: note = Description of Artificial Sequence: Synthetic oligonucleotide
  source 1..33: mol_type = other DNA

SEQ ID NO: 718 - protein, 11 aa, synthetic construct
  REGION 1..11: note = Description of Artificial Sequence: Synthetic peptide
SGDKLGDKYAC

SEQ ID NO: 719 - DNA, 33 bp, synthetic construct; identical to SEQ ID NO: 697
  misc_feature 1..33: note = Description of Artificial Sequence: Synthetic oligonucleotide
  source 1..33: mol_type = other DNA

SEQ ID NO: 720 - protein, 11 aa, synthetic construct
  REGION 1..11: note = Description of Artificial Sequence: Synthetic peptide
SGDKLGEKYAC

SEQ ID NO: 721 - DNA, 33 bp, synthetic construct; identical to SEQ ID NO: 693
  misc_feature 1..33: note = Description of Artificial Sequence: Synthetic oligonucleotide
  source 1..33: mol_type = other DNA

SEQ ID NO: 722 - protein, 11 aa, synthetic construct
  REGION 1..11: note = Description of Artificial Sequence: Synthetic peptide
SGDKLGDKYAC

SEQ ID NO: 723 - DNA, 33 bp, synthetic construct
  misc_feature 1..33: note = Description of Artificial Sequence: Synthetic oligonucleotide
  source 1..33: mol_type = other DNA
tctggagataaattgggggaaaaatatgcttac

SEQ ID NO: 724 - protein, 11 aa, synthetic construct
  REGION 1..11: note = Description of Artificial Sequence: Synthetic peptide
SGDKLGEKYAY

SEQ ID NO: 725 - DNA, 33 bp, synthetic construct; identical to SEQ ID NO: 693
  misc_feature 1..33: note = Description of Artificial Sequence: Synthetic oligonucleotide
  source 1..33: mol_type = other DNA

SEQ ID NO: 726 - protein, 11 aa, synthetic construct
  REGION 1..11: note = Description of Artificial Sequence: Synthetic peptide
SGDKLGDKYAC

SEQ ID NO: 727 - DNA, 33 bp, synthetic construct; identical to SEQ ID NO: 193
  misc_feature 1..33: note = Description of Artificial Sequence: Synthetic oligonucleotide
  source 1..33: mol_type = other DNA

SEQ ID NO: 728 - protein, 11 aa, synthetic construct
  REGION 1..11: note = Description of Artificial Sequence: Synthetic peptide
GGNNIGSKAVH

SEQ ID NO: 729 - DNA, 33 bp, synthetic construct; identical to SEQ ID NO: 693
  misc_feature 1..33: note = Description of Artificial Sequence: Synthetic oligonucleotide
  source 1..33: mol_type = other DNA

SEQ ID NO: 730 - protein, 11 aa, synthetic construct
  REGION 1..11: note = Description of Artificial Sequence: Synthetic peptide
SGDKLGDKYAC

SEQ ID NO: 731 - DNA, 33 bp, synthetic construct
  misc_feature 1..33: note = Description of Artificial Sequence: Synthetic oligonucleotide
  source 1..33: mol_type = other DNA
gggggaaacaacattggaagtaaaagtgtgcac

SEQ ID NO: 732 - protein, 11 aa, synthetic construct
  REGION 1..11: note = Description of Artificial Sequence: Synthetic peptide
GGNNIGSKSVH

SEQ ID NO: 733 - DNA, 33 bp, synthetic construct; identical to SEQ ID NO: 177
  misc_feature 1..33: note = Description of Artificial Sequence: Synthetic oligonucleotide
  source 1..33: mol_type = other DNA

SEQ ID NO: 734 - protein, 11 aa, synthetic construct
  REGION 1..11: note = Description of Artificial Sequence: Synthetic peptide
SGDKLGDKYVY

SEQ ID NO: 735 - DNA, 33 bp, synthetic construct
  misc_feature 1..33: note = Description of Artificial Sequence: Synthetic oligonucleotide
  source 1..33: mol_type = other DNA
tctggagataaattgggtaataaatatgcttgc

SEQ ID NO: 736 - protein, 11 aa, synthetic construct
  REGION 1..11: note = Description of Artificial Sequence: Synthetic peptide
SGDKLGNKYAC

SEQ ID NO: 737 - DNA, 33 bp, synthetic construct
  misc_feature 1..33: note = Description of Artificial Sequence: Synthetic oligonucleotide
  source 1..33: mol_type = other DNA
tctggagataaattgggggataaatttgtttat

SEQ ID NO: 738 - protein, 11 aa, synthetic construct
  REGION 1..11: note = Description of Artificial Sequence: Synthetic peptide
SGDKLGDKFVY

SEQ ID NO: 739 - DNA, 33 bp, synthetic construct
  misc_feature 1..33: note = Description of Artificial Sequence: Synthetic oligonucleotide
  source 1..33: mol_type = other DNA
tctggagataaattgggggataaatatgtttgc

SEQ ID NO: 740 - protein, 11 aa, synthetic construct
  REGION 1..11: note = Description of Artificial Sequence: Synthetic peptide
SGDKLGDKYVC

SEQ ID NO: 741 - DNA, 33 bp, synthetic construct; identical to SEQ ID NO: 697
  misc_feature 1..33: note = Description of Artificial Sequence: Synthetic oligonucleotide
  source 1..33: mol_type = other DNA

SEQ ID NO: 742 - protein, 11 aa, synthetic construct
  REGION 1..11: note = Description of Artificial Sequence: Synthetic peptide
SGDKLGEKYAC

SEQ ID NO: 743 - DNA, 33 bp, synthetic construct
  misc_feature 1..33: note = Description of Artificial Sequence: Synthetic oligonucleotide
  source 1..33: mol_type = other DNA
tctggagataaattgggaaataaatatgcttgc

SEQ ID NO: 744 - protein, 11 aa, synthetic construct
  REGION 1..11: note = Description of Artificial Sequence: Synthetic peptide
SGDKLGNKYAC

SEQ ID NO: 745 - DNA, 33 bp, synthetic construct; identical to SEQ ID NO: 163
  misc_feature 1..33: note = Description of Artificial Sequence: Synthetic oligonucleotide
  source 1..33: mol_type = other DNA

SEQ ID NO: 746 - protein, 11 aa, synthetic construct
  REGION 1..11: note = Description of Artificial Sequence: Synthetic peptide
SGDKLGDKYAY

SEQ ID NO: 747 - DNA, 39 bp, synthetic construct; identical to SEQ ID NO: 705
  misc_feature 1..39: note = Description of Artificial Sequence: Synthetic oligonucleotide
  source 1..39: mol_type = other DNA

SEQ ID NO: 748 - protein, 13 aa, synthetic construct
  REGION 1..13: note = Description of Artificial Sequence: Synthetic peptide
SGTNSNIGSYTVN

SEQ ID NO: 749 - DNA, 42 bp, synthetic construct
  misc_feature 1..42: note = Description of Artificial Sequence: Synthetic oligonucleotide
  source 1..42: mol_type = other DNA
actggagccagcagtgacgttggtgattataactctgtctcc

SEQ ID NO: 750 - protein, 14 aa, synthetic construct
  REGION 1..14: note = Description of Artificial Sequence: Synthetic peptide
TGASSDVGDYNSVS

SEQ ID NO: 751 - DNA, 33 bp, synthetic construct; identical to SEQ ID NO: 739
  misc_feature 1..33: note = Description of Artificial Sequence: Synthetic oligonucleotide
  source 1..33: mol_type = other DNA

SEQ ID NO: 752 - protein, 11 aa, synthetic construct
  REGION 1..11: note = Description of Artificial Sequence: Synthetic peptide
SGDKLGDKYVC

SEQ ID NO: 753 - DNA, 33 bp, synthetic construct; identical to SEQ ID NO: 185
  misc_feature 1..33: note = Description of Artificial Sequence: Synthetic oligonucleotide
  source 1..33: mol_type = other DNA

SEQ ID NO: 754 - protein, 11 aa, synthetic construct
  REGION 1..11: note = Description of Artificial Sequence: Synthetic peptide
SGDKLGNKYAW

SEQ ID NO: 755 - DNA, 51 bp, synthetic construct
  misc_feature 1..51: note = Description of Artificial Sequence: Synthetic oligonucleotide
  source 1..51: mol_type = other DNA
aggtccagccagactattttacacagctccaacaattacaactacttagct

SEQ ID NO: 756 - protein, 17 aa, synthetic construct
  REGION 1..17: note = Description of Artificial Sequence: Synthetic peptide
RSSQTILHSSNNYNYLA

SEQ ID NO: 757 - DNA, 33 bp, synthetic construct; identical to SEQ ID NO: 693
  misc_feature 1..33: note = Description of Artificial Sequence: Synthetic oligonucleotide
  source 1..33: mol_type = other DNA

SEQ ID NO: 758 - protein, 11 aa, synthetic construct
  REGION 1..11: note = Description of Artificial Sequence: Synthetic peptide
SGDKLGDKYAC

SEQ ID NO: 759 - DNA, 36 bp, synthetic construct
  misc_feature 1..36: note = Description of Artificial Sequence: Synthetic oligonucleotide
  source 1..36: mol_type = other DNA
agggccagtcagagtgttagcagcagctacttagcc

SEQ ID NO: 760 - protein, 12 aa, synthetic construct
  REGION 1..12: note = Description of Artificial Sequence: Synthetic peptide
RASQSVSSSYLA

SEQ ID NO: 761 - DNA, 33 bp, synthetic construct; identical to SEQ ID NO: 109
  misc_feature 1..33: note = Description of Artificial Sequence: Synthetic oligonucleotide
  source 1..33: mol_type = other DNA

SEQ ID NO: 762 - protein, 11 aa, synthetic construct
  REGION 1..11: note = Description of Artificial Sequence: Synthetic peptide
RASQGIRNDLG

SEQ ID NO: 763 - DNA, 33 bp, synthetic construct; identical to SEQ ID NO: 109
  misc_feature 1..33: note = Description of Artificial Sequence: Synthetic oligonucleotide
  source 1..33: mol_type = other DNA

SEQ ID NO: 764 - protein, 11 aa, synthetic construct
  REGION 1..11: note = Description of Artificial Sequence: Synthetic peptide
RASQGIRNDLG

SEQ ID NO: 765 - DNA, 33 bp, synthetic construct; identical to SEQ ID NO: 109
  misc_feature 1..33: note = Description of Artificial Sequence: Synthetic oligonucleotide
  source 1..33: mol_type = other DNA

SEQ ID NO: 766 - protein, 11 aa, synthetic construct
  REGION 1..11: note = Description of Artificial Sequence: Synthetic peptide
RASQGIRNDLG

SEQ ID NO: 767 - DNA, 33 bp, synthetic construct
  misc_feature 1..33: note = Description of Artificial Sequence: Synthetic oligonucleotide
  source 1..33: mol_type = other DNA
cgggcgagtcagggtattagcacctggttagcc

SEQ ID NO: 768 - protein, 11 aa, synthetic construct
  REGION 1..11: note = Description of Artificial Sequence: Synthetic peptide
RASQGISTWLA

SEQ ID NO: 769 - DNA, 33 bp, synthetic construct; identical to SEQ ID NO: 109
  misc_feature 1..33: note = Description of Artificial Sequence: Synthetic oligonucleotide
  source 1..33: mol_type = other DNA

SEQ ID NO: 770 - protein, 11 aa, synthetic construct
  REGION 1..11: note = Description of Artificial Sequence: Synthetic peptide
RASQGIRNDLG

SEQ ID NO: 771 - DNA, 33 bp, synthetic construct; identical to SEQ ID NO: 93
  misc_feature 1..33: note = Description of Artificial Sequence: Synthetic oligonucleotide
  source 1..33: mol_type = other DNA

SEQ ID NO: 772 - protein, 11 aa, synthetic construct
  REGION 1..11: note = Description of Artificial Sequence: Synthetic peptide
RTSQGIRNDLG

SEQ ID NO: 773 - DNA, 33 bp, synthetic construct; identical to SEQ ID NO: 519
  misc_feature 1..33: note = Description of Artificial Sequence: Synthetic oligonucleotide
  source 1..33: mol_type = other DNA

SEQ ID NO: 774 - protein, 11 aa, synthetic construct
  REGION 1..11: note = Description of Artificial Sequence: Synthetic peptide
RASQAIRNDLG

SEQ ID NO: 775 - DNA, 33 bp, synthetic construct; identical to SEQ ID NO: 109
  misc_feature 1..33: note = Description of Artificial Sequence: Synthetic oligonucleotide
  source 1..33: mol_type = other DNA

SEQ ID NO: 776 - protein, 11 aa, synthetic construct
  REGION 1..11: note = Description of Artificial Sequence: Synthetic peptide
RASQGIRNDLG

SEQ ID NO: 777 - DNA, 33 bp, synthetic construct; identical to SEQ ID NO: 109
  misc_feature 1..33: note = Description of Artificial Sequence: Synthetic oligonucleotide
  source 1..33: mol_type = other DNA

SEQ ID NO: 778 - protein, 11 aa, synthetic construct
  REGION 1..11: note = Description of Artificial Sequence: Synthetic peptide
RASQGIRNDLG

SEQ ID NO: 779 - DNA, 33 bp, synthetic construct; identical to SEQ ID NO: 109
  misc_feature 1..33: note = Description of Artificial Sequence: Synthetic oligonucleotide
  source 1..33: mol_type = other DNA

SEQ ID NO: 780 - protein, 11 aa, synthetic construct
  REGION 1..11: note = Description of Artificial Sequence: Synthetic peptide
RASQGIRNDLG

SEQ ID NO: 781 - DNA, 33 bp, synthetic construct; identical to SEQ ID NO: 247
  misc_feature 1..33: note = Description of Artificial Sequence: Synthetic oligonucleotide
  source 1..33: mol_type = other DNA

SEQ ID NO: 782 - protein, 11 aa, synthetic construct
  REGION 1..11: note = Description of Artificial Sequence: Synthetic peptide
RASQNISSYLN

SEQ ID NO: 783 - DNA, 33 bp, synthetic construct; identical to SEQ ID NO: 109
  misc_feature 1..33: note = Description of Artificial Sequence: Synthetic oligonucleotide
  source 1..33: mol_type = other DNA

SEQ ID NO: 784 - protein, 11 aa, synthetic construct
  REGION 1..11: note = Description of Artificial Sequence: Synthetic peptide
RASQGIRNDLG

SEQ ID NO: 785 - DNA, 33 bp, synthetic construct; identical to SEQ ID NO: 109
  misc_feature 1..33: note = Description of Artificial Sequence: Synthetic oligonucleotide
  source 1..33: mol_type = other DNA

SEQ ID NO: 786 - protein, 11 aa, synthetic construct
  REGION 1..11: note = Description of Artificial Sequence: Synthetic peptide
RASQGIRNDLG

SEQ ID NO: 787 - DNA, 33 bp, synthetic construct; identical to SEQ ID NO: 109
  misc_feature 1..33: note = Description of Artificial Sequence: Synthetic oligonucleotide
  source 1..33: mol_type = other DNA

SEQ ID NO: 788 - protein, 11 aa, synthetic construct
  REGION 1..11: note = Description of Artificial Sequence: Synthetic peptide
RASQGIRNDLG

SEQ ID NO: 789 - DNA, 33 bp, synthetic construct; identical to SEQ ID NO: 109
  misc_feature 1..33: note = Description of Artificial Sequence: Synthetic oligonucleotide
  source 1..33: mol_type = other DNA

SEQ ID NO: 790 - protein, 11 aa, synthetic construct
  REGION 1..11: note = Description of Artificial Sequence: Synthetic peptide
RASQGIRNDLG

SEQ ID NO: 791 - DNA, 33 bp, synthetic construct; identical to SEQ ID NO: 105
  misc_feature 1..33: note = Description of Artificial Sequence: Synthetic oligonucleotide
  source 1..33: mol_type = other DNA

SEQ ID NO: 792 - protein, 11 aa, synthetic construct
  REGION 1..11: note = Description of Artificial Sequence: Synthetic peptide
RASQGISNYLA

SEQ ID NO: 793 - DNA, 33 bp, synthetic construct; identical to SEQ ID NO: 109
  misc_feature 1..33: note = Description of Artificial Sequence: Synthetic oligonucleotide
  source 1..33: mol_type = other DNA

SEQ ID NO: 794 - protein, 11 aa, synthetic construct
  REGION 1..11: note = Description of Artificial Sequence: Synthetic peptide
RASQGIRNDLG

SEQ ID NO: 795 - DNA, 33 bp, synthetic construct
  misc_feature 1..33: note = Description of Artificial Sequence: Synthetic oligonucleotide
  source 1..33: mol_type = other DNA
cgggcaagtcagagtattctcagctatttaaat

SEQ ID NO: 796 - protein, 11 aa, synthetic construct
  REGION 1..11: note = Description of Artificial Sequence: Synthetic peptide
RASQSILSYLN

SEQ ID NO: 797 - DNA, 33 bp, synthetic construct
  misc_feature 1..33: note = Description of Artificial Sequence: Synthetic oligonucleotide
  source 1..33: mol_type = other DNA
cgggcaagtcagaacatttacaggtatttaaat

SEQ ID NO: 798 - protein, 11 aa, synthetic construct
  REGION 1..11: note = Description of Artificial Sequence: Synthetic peptide
RASQNIYRYLN

SEQ ID NO: 799 - DNA, 33 bp, synthetic construct
  misc_feature 1..33: note = Description of Artificial Sequence: Synthetic oligonucleotide
  source 1..33: mol_type = other DNA
cgggcaattcagaacattagcagctatttaaat

SEQ ID NO: 800 - protein, 11 aa, synthetic construct
  REGION 1..11: note = Description of Artificial Sequence: Synthetic peptide
RAIQNISSYLN

SEQ ID NO: 801 - DNA, 33 bp, synthetic construct; identical to SEQ ID NO: 547
  misc_feature 1..33: note = Description of Artificial Sequence: Synthetic oligonucleotide
  source 1..33: mol_type = other DNA

SEQ ID NO: 802 - protein, 11 aa, synthetic construct
  REGION 1..11: note = Description of Artificial Sequence: Synthetic peptide
RASQNIYSYLN

SEQ ID NO: 803 - DNA, 33 bp, synthetic construct
  misc_feature 1..33: note = Description of Artificial Sequence: Synthetic oligonucleotide
  source 1..33: mol_type = other DNA
ctggcaagtcagggcattagaaatgatttaggc

SEQ ID NO: 804 - protein, 11 aa, synthetic construct
  REGION 1..11: note = Description of Artificial Sequence: Synthetic peptide
LASQGIRNDLG

SEQ ID NO: 805 - DNA, 33 bp, synthetic construct; identical to SEQ ID NO: 371
  misc_feature 1..33: note = Description of Artificial Sequence: Synthetic oligonucleotide
  source 1..33: mol_type = other DNA

SEQ ID NO: 806 - protein, 11 aa, synthetic construct
  REGION 1..11: note = Description of Artificial Sequence: Synthetic peptide
RASQGIRNDLD

SEQ ID NO: 807 - DNA, 33 bp, synthetic construct
  misc_feature 1..33: note = Description of Artificial Sequence: Synthetic oligonucleotide
  source 1..33: mol_type = other DNA
cgggcaagtcagaacattattagttatttaaat

SEQ ID NO: 808 - protein, 11 aa, synthetic construct
  REGION 1..11: note = Description of Artificial Sequence: Synthetic peptide
RASQNIISYLN

SEQ ID NO: 809 - DNA, 33 bp, synthetic construct
  misc_feature 1..33: note = Description of Artificial Sequence: Synthetic oligonucleotide
  source 1..33: mol_type = other DNA
cgggcaagtcggggcatcagaggtgatttaggt

SEQ ID NO: 810 - protein, 11 aa, synthetic construct
  REGION 1..11: note = Description of Artificial Sequence: Synthetic peptide
RASRGIRGDLG

SEQ ID NO: 811 - DNA, 33 bp, synthetic construct; identical to SEQ ID NO: 109
  misc_feature 1..33: note = Description of Artificial Sequence: Synthetic oligonucleotide
  source 1..33: mol_type = other DNA

SEQ ID NO: 812 - protein, 11 aa, synthetic construct
  REGION 1..11: note = Description of Artificial Sequence: Synthetic peptide
RASQGIRNDLG

SEQ ID NO: 813 - DNA, 33 bp, synthetic construct
  misc_feature 1..33: note = Description of Artificial Sequence: Synthetic oligonucleotide
  source 1..33: mol_type = other DNA
cgggcaagtcagaacattagaaattatttaaat

SEQ ID NO: 814 - protein, 11 aa, synthetic construct
  REGION 1..11: note = Description of Artificial Sequence: Synthetic peptide
RASQNIRNYLN

SEQ ID NO: 815 - DNA, 33 bp, synthetic construct
  misc_feature 1..33: note = Description of Artificial Sequence: Synthetic oligonucleotide
  source 1..33: mol_type = other DNA
cgggcgagtcaggacattagcaatcatttagtc

SEQ ID NO: 816 - protein, 11 aa, synthetic construct
  REGION 1..11: note = Description of Artificial Sequence: Synthetic peptide
RASQDISNHLV

SEQ ID NO: 817 - DNA, 33 bp, synthetic construct; identical to SEQ ID NO: 109
  misc_feature 1..33: note = Description of Artificial Sequence: Synthetic oligonucleotide
  source 1..33: mol_type = other DNA

SEQ ID NO: 818 - protein, 11 aa, synthetic construct
  REGION 1..11: note = Description of Artificial Sequence: Synthetic peptide
RASQGIRNDLG

SEQ ID NO: 819 - DNA, 33 bp, synthetic construct; identical to SEQ ID NO: 109
  misc_feature 1..33: note = Description of Artificial Sequence: Synthetic oligonucleotide
  source 1..33: mol_type = other DNA

SEQ ID NO: 820 - protein, 11 aa, synthetic construct
  REGION 1..11: note = Description of Artificial Sequence: Synthetic peptide
RASQGIRNDLG

SEQ ID NO: 821 - DNA, 33 bp, synthetic construct
  misc_feature 1..33: note = Description of Artificial Sequence: Synthetic oligonucleotide
  source 1..33: mol_type = other DNA
cgggcaagtcagggcattagaaatgatttaggg

SEQ ID NO: 822 - protein, 11 aa, synthetic construct
  REGION 1..11: note = Description of Artificial Sequence: Synthetic peptide
RASQGIRNDLG

SEQ ID NO: 823 - DNA, 33 bp, synthetic construct; identical to SEQ ID NO: 303
  misc_feature 1..33: note = Description of Artificial Sequence: Synthetic oligonucleotide
  source 1..33: mol_type = other DNA

SEQ ID NO: 824 - protein, 11 aa, synthetic construct
  REGION 1..11: note = Description of Artificial Sequence: Synthetic peptide
RASQNINNYLN

SEQ ID NO: 825 - DNA, 33 bp, synthetic construct; identical to SEQ ID NO: 109
  misc_feature 1..33: note = Description of Artificial Sequence: Synthetic oligonucleotide
  source 1..33: mol_type = other DNA

SEQ ID NO: 826 - protein, 11 aa, synthetic construct
  REGION 1..11: note = Description of Artificial Sequence: Synthetic peptide
RASQGIRNDLG

SEQ ID NO: 827 - DNA, 33 bp, synthetic construct; identical to SEQ ID NO: 109
  misc_feature 1..33: note = Description of Artificial Sequence: Synthetic oligonucleotide
  source 1..33: mol_type = other DNA

SEQ ID NO: 828 - protein, 11 aa, synthetic construct
  REGION 1..11: note = Description of Artificial Sequence: Synthetic peptide
RASQGIRNDLG

SEQ ID NO: 829 - DNA, 33 bp, synthetic construct; identical to SEQ ID NO: 109
  misc_feature 1..33: note = Description of Artificial Sequence: Synthetic oligonucleotide
  source 1..33: mol_type = other DNA

SEQ ID NO: 830 - protein, 11 aa, synthetic construct
  REGION 1..11: note = Description of Artificial Sequence: Synthetic peptide
RASQGIRNDLG

SEQ ID NO: 831 - DNA, 33 bp, synthetic construct
  misc_feature 1..33: note = Description of Artificial Sequence: Synthetic oligonucleotide
  source 1..33: mol_type = other DNA
cgggcaagtcagggcattagaaatgatttaggt

SEQ ID NO: 832 - protein, 11 aa, synthetic construct
  REGION 1..11: note = Description of Artificial Sequence: Synthetic peptide
RASQGIRNDLG

SEQ ID NO: 833 - DNA, 33 bp, synthetic construct
  misc_feature 1..33: note = Description of Artificial Sequence: Synthetic oligonucleotide
  source 1..33: mol_type = other DNA
cgggcaagtcagagcattagaagttatttaaat

SEQ ID NO: 834 - protein, 11 aa, synthetic construct
  REGION 1..11: note = Description of Artificial Sequence: Synthetic peptide
RASQSIRSYLN

SEQ ID NO: 835 - DNA, 33 bp, synthetic construct
  misc_feature 1..33: note = Description of Artificial Sequence: Synthetic oligonucleotide
  source 1..33: mol_type = other DNA
cgggcaagtcataccattagaacctatttaaac

SEQ ID NO: 836 - protein, 11 aa, synthetic construct
  REGION 1..11: note = Description of Artificial Sequence: Synthetic peptide
RASHTIRTYLN

SEQ ID NO: 837 - DNA, 33 bp, synthetic construct
  misc_feature 1..33: note = Description of Artificial Sequence: Synthetic oligonucleotide
  source 1..33: mol_type = other DNA
caggcgagtcaggacattagcaactatttaaat

SEQ ID NO: 838 - protein, 11 aa, synthetic construct
  REGION 1..11: note = Description of Artificial Sequence: Synthetic peptide
QASQDISNYLN

SEQ ID NO: 839 - DNA, 33 bp, synthetic construct; identical to SEQ ID NO: 105
  misc_feature 1..33: note = Description of Artificial Sequence: Synthetic oligonucleotide
  source 1..33: mol_type = other DNA

SEQ ID NO: 840 - protein, 11 aa, synthetic construct
  REGION 1..11: note = Description of Artificial Sequence: Synthetic peptide
RASQGISNYLA

SEQ ID NO: 841 - DNA, 33 bp, synthetic construct; identical to SEQ ID NO: 105
  misc_feature 1..33: note = Description of Artificial Sequence: Synthetic oligonucleotide
  source 1..33: mol_type = other DNA

SEQ ID NO: 842 - protein, 11 aa, synthetic construct
  REGION 1..11: note = Description of Artificial Sequence: Synthetic peptide
RASQGISNYLA

SEQ ID NO: 843 - DNA, 33 bp, synthetic construct
  misc_feature 1..33: note = Description of Artificial Sequence: Synthetic oligonucleotide
  source 1..33: mol_type = other DNA
cgggcaagtcagaccattagtagttatttaaat

SEQ ID NO: 844 - protein, 11 aa, synthetic construct
  REGION 1..11: note = Description of Artificial Sequence: Synthetic peptide
RASQTISSYLN

SEQ ID NO: 845 - DNA, 33 bp, synthetic construct
  misc_feature 1..33: note = Description of Artificial Sequence: Synthetic oligonucleotide
  source 1..33: mol_type = other DNA
cgggcaagtcagaacatttacagttatttaaat

SEQ ID NO: 846 - protein, 11 aa, synthetic construct
  REGION 1..11: note = Description of Artificial Sequence: Synthetic peptide
RASQNIYSYLN

SEQ ID NO: 847 - DNA, 33 bp, synthetic construct; identical to SEQ ID NO: 93
  misc_feature 1..33: note = Description of Artificial Sequence: Synthetic oligonucleotide
  source 1..33: mol_type = other DNA

SEQ ID NO: 848 - protein, 11 aa, synthetic construct
  REGION 1..11: note = Description of Artificial Sequence: Synthetic peptide
RTSQGIRNDLG

SEQ ID NO: 849 - DNA, 33 bp, synthetic construct; identical to SEQ ID NO: 361
  misc_feature 1..33: note = Description of Artificial Sequence: Synthetic oligonucleotide
  source 1..33: mol_type = other DNA

SEQ ID NO: 850 - protein, 11 aa, synthetic construct
  REGION 1..11: note = Description of Artificial Sequence: Synthetic peptide
RASQNIISYLN

SEQ ID NO: 851 - DNA, 33 bp, synthetic construct
  misc_feature 1..33: note = Description of Artificial Sequence: Synthetic oligonucleotide
  source 1..33: mol_type = other DNA
agggccagtcagactgttagcagcaacttagcc

SEQ ID NO: 852 - protein, 11 aa, synthetic construct
  REGION 1..11: note = Description of Artificial Sequence: Synthetic peptide
RASQTVSSNLA

SEQ ID NO: 853 - DNA, 33 bp, synthetic construct; identical to SEQ ID NO: 493
  misc_feature 1..33: note = Description of Artificial Sequence: Synthetic oligonucleotide
  source 1..33: mol_type = other DNA

SEQ ID NO: 854 - protein, 11 aa, synthetic construct
  REGION 1..11: note = Description of Artificial Sequence: Synthetic peptide
RASQDIRSDLG

SEQ ID NO: 855 - DNA, 33 bp, synthetic construct
  misc_feature 1..33: note = Description of Artificial Sequence: Synthetic oligonucleotide
  source 1..33: mol_type = other DNA
caggcgaatcaggacattaccaactttttaaat

SEQ ID NO: 856 - protein, 11 aa, synthetic construct
  REGION 1..11: note = Description of Artificial Sequence: Synthetic peptide
QANQDITNFLN

SEQ ID NO: 857 - DNA, 33 bp, synthetic construct; identical to SEQ ID NO: 855
  misc_feature 1..33: note = Description of Artificial Sequence: Synthetic oligonucleotide
  source 1..33: mol_type = other DNA

SEQ ID NO: 858 - protein, 11 aa, synthetic construct
  REGION 1..11: note = Description of Artificial Sequence: Synthetic peptide
QANQDITNFLN

SEQ ID NO: 859 - DNA, 33 bp, synthetic construct; identical to SEQ ID NO: 293
  misc_feature 1..33: note = Description of Artificial Sequence: Synthetic oligonucleotide
  source 1..33: mol_type = other DNA

SEQ ID NO: 860 - protein, 11 aa, synthetic construct
  REGION 1..11: note = Description of Artificial Sequence: Synthetic peptide
RASQGINNYLA

SEQ ID NO: 861 - DNA, 33 bp, synthetic construct; identical to SEQ ID NO: 109
  misc_feature 1..33: note = Description of Artificial Sequence: Synthetic oligonucleotide
  source 1..33: mol_type = other DNA

SEQ ID NO: 862 - protein, 11 aa, synthetic construct
  REGION 1..11: note = Description of Artificial Sequence: Synthetic peptide
RASQGIRNDLG

SEQ ID NO: 863 - DNA, 33 bp, synthetic construct; identical to SEQ ID NO: 797
  misc_feature 1..33: note = Description of Artificial Sequence: Synthetic oligonucleotide
  source 1..33: mol_type = other DNA

SEQ ID NO: 864 - protein, 11 aa, synthetic construct
  REGION 1..11: note = Description of Artificial Sequence: Synthetic peptide
RASQNIYRYLN

SEQ ID NO: 865 - DNA, 33 bp, synthetic construct; identical to SEQ ID NO: 109
  misc_feature 1..33: note = Description of Artificial Sequence: Synthetic oligonucleotide
  source 1..33: mol_type = other DNA

SEQ ID NO: 866 - protein, 11 aa, synthetic construct
  REGION 1..11: note = Description of Artificial Sequence: Synthetic peptide
RASQGIRNDLG

SEQ ID NO: 867 - DNA, 33 bp, synthetic construct
  misc_feature 1..33: note = Description of Artificial Sequence: Synthetic oligonucleotide
  source 1..33: mol_type = other DNA
cgggcaagtcagaccattatcagctatttaaat

SEQ ID NO: 868 - protein, 11 aa, synthetic construct
  REGION 1..11: note = Description of Artificial Sequence: Synthetic peptide
RASQTIISYLN

SEQ ID NO: 869 - DNA, 33 bp, synthetic construct; identical to SEQ ID NO: 109
  misc_feature 1..33: note = Description of Artificial Sequence: Synthetic oligonucleotide
  source 1..33: mol_type = other DNA

SEQ ID NO: 870 - protein, 11 aa, synthetic construct
  REGION 1..11: note = Description of Artificial Sequence: Synthetic peptide
RASQGIRNDLG

SEQ ID NO: 871 - DNA, 33 bp, synthetic construct
  misc_feature 1..33: note = Description of Artificial Sequence: Synthetic oligonucleotide
  source 1..33: mol_type = other DNA
cgggcaagtcaaaacattatcagctatttaaat

SEQ ID NO: 872 - protein, 11 aa, synthetic construct
  REGION 1..11: note = Description of Artificial Sequence: Synthetic peptide
RASQNIISYLN

SEQ ID NO: 873 - DNA, 33 bp, synthetic construct; identical to SEQ ID NO: 797
  misc_feature 1..33: note = Description of Artificial Sequence: Synthetic oligonucleotide
  source 1..33: mol_type = other DNA

SEQ ID NO: 874 - protein, 11 aa, synthetic construct
  REGION 1..11: note = Description of Artificial Sequence: Synthetic peptide
RASQNIYRYLN

SEQ ID NO: 875 - DNA, 33 bp, synthetic construct; identical to SEQ ID NO: 109
  misc_feature 1..33: note = Description of Artificial Sequence: Synthetic oligonucleotide
  source 1..33: mol_type = other DNA

SEQ ID NO: 876 - protein, 11 aa, synthetic construct
  REGION 1..11: note = Description of Artificial Sequence: Synthetic peptide
RASQGIRNDLG

SEQ ID NO: 877 - DNA, 33 bp, synthetic construct
  misc_feature 1..33: note = Description of Artificial Sequence: Synthetic oligonucleotide
  source 1..33: mol_type = other DNA
cgggcaagtcagagcattagcagttatttaaat

SEQ ID NO: 878 - protein, 11 aa, synthetic construct
  REGION 1..11: note = Description of Artificial Sequence: Synthetic peptide
RASQSISSYLN

SEQ ID NO: 879 - DNA, 33 bp, synthetic construct
  misc_feature 1..33: note = Description of Artificial Sequence: Synthetic oligonucleotide
  source 1..33: mol_type = other DNA
cgggcaagtcagagcattagcggctatttaaat

SEQ ID NO: 880 - protein, 11 aa, synthetic construct
  REGION 1..11: note = Description of Artificial Sequence: Synthetic peptide
RASQSISGYLN

SEQ ID NO: 881 - DNA, 51 bp, synthetic construct
  misc_feature 1..51: note = Description of Artificial Sequence: Synthetic oligonucleotide
  source 1..51: mol_type = other DNA
aagtccagccagagtgttttatacagctccaacaataacaactacttaact

SEQ ID NO: 882 - protein, 17 aa, synthetic construct
  REGION 1..17: note = Description of Artificial Sequence: Synthetic peptide
KSSQSVLYSSNNNNYLT

SEQ ID NO: 883 - DNA, 33 bp, synthetic construct; identical to SEQ ID NO: 213
  misc_feature 1..33: note = Description of Artificial Sequence: Synthetic oligonucleotide
  source 1..33: mol_type = other DNA

SEQ ID NO: 884 - protein, 11 aa, synthetic construct
  REGION 1..11: note = Description of Artificial Sequence: Synthetic peptide
RASQDIRNHLG

SEQ ID NO: 885 - DNA, 33 bp, synthetic construct
  misc_feature 1..33: note = Description of Artificial Sequence: Synthetic oligonucleotide
  source 1..33: mol_type = other DNA
cgggcgagtcaggacattagtaattatttagcc

SEQ ID NO: 886 - protein, 11 aa, synthetic construct
  REGION 1..11: note = Description of Artificial Sequence: Synthetic peptide
RASQDISNYLA

SEQ ID NO: 887 - DNA, 33 bp, synthetic construct; identical to SEQ ID NO: 109
  misc_feature 1..33: note = Description of Artificial Sequence: Synthetic oligonucleotide
  source 1..33: mol_type = other DNA

SEQ ID NO: 888 - protein, 11 aa, synthetic construct
  REGION 1..11: note = Description of Artificial Sequence: Synthetic peptide
RASQGIRNDLG

SEQ ID NO: 889 - DNA, 33 bp, synthetic construct; identical to SEQ ID NO: 697
  misc_feature 1..33: note = Description of Artificial Sequence: Synthetic oligonucleotide
  source 1..33: mol_type = other DNA

SEQ ID NO: 890 - protein, 11 aa, synthetic construct
  REGION 1..11: note = Description of Artificial Sequence: Synthetic peptide
SGDKLGEKYAC

SEQ ID NO: 891 - DNA, 33 bp, synthetic construct; identical to SEQ ID NO: 293
  misc_feature 1..33: note = Description of Artificial Sequence: Synthetic oligonucleotide
  source 1..33: mol_type = other DNA

SEQ ID NO: 892 - protein, 11 aa, synthetic construct
  REGION 1..11: note = Description of Artificial Sequence: Synthetic peptide
RASQGINNYLA

SEQ ID NO: 893 - DNA, 33 bp, synthetic construct; identical to SEQ ID NO: 173
  misc_feature 1..33: note = Description of Artificial Sequence: Synthetic oligonucleotide
  source 1..33: mol_type = other DNA

SEQ ID NO: 894 - protein, 11 aa, synthetic construct
  REGION 1..11: note = Description of Artificial Sequence: Synthetic peptide
RASQGISRWLA

SEQ ID NO: 895 - DNA, 33 bp, synthetic construct; identical to SEQ ID NO: 431
  misc_feature 1..33: note = Description of Artificial Sequence: Synthetic oligonucleotide
  source 1..33: mol_type = other DNA

SEQ ID NO: 896 - protein, 11 aa, synthetic construct
  REGION 1..11: note = Description of Artificial Sequence: Synthetic peptide
RASQSISDYLN

SEQ ID NO: 897 - DNA, 33 bp, synthetic construct; identical to SEQ ID NO: 109
  misc_feature 1..33: note = Description of Artificial Sequence: Synthetic oligonucleotide
  source 1..33: mol_type = other DNA

SEQ ID NO: 898 - protein, 11 aa, synthetic construct
  REGION 1..11: note = Description of Artificial Sequence: Synthetic peptide
RASQGIRNDLG

SEQ ID NO: 899 - DNA, 33 bp, synthetic construct; identical to SEQ ID NO: 109
  misc_feature 1..33: note = Description of Artificial Sequence: Synthetic oligonucleotide
  source 1..33: mol_type = other DNA

SEQ ID NO: 900 - protein, 11 aa, synthetic construct
  REGION 1..11: note = Description of Artificial Sequence: Synthetic peptide
RASQGIRNDLG

SEQ ID NO: 901 - DNA, 33 bp, synthetic construct; identical to SEQ ID NO: 109
  misc_feature 1..33: note = Description of Artificial Sequence: Synthetic oligonucleotide
  source 1..33: mol_type = other DNA

SEQ ID NO: 902 - protein, 11 aa, synthetic construct
  REGION 1..11: note = Description of Artificial Sequence: Synthetic peptide
RASQGIRNDLG

SEQ ID NO: 903 - DNA, 33 bp, synthetic construct
  misc_feature 1..33: note = Description of Artificial Sequence: Synthetic oligonucleotide
  source 1..33: mol_type = other DNA
cggacaagtcagaacattatcagctatttaaat

SEQ ID NO: 904 - protein, 11 aa, synthetic construct
  REGION 1..11: note = Description of Artificial Sequence: Synthetic peptide
RTSQNIISYLN

SEQ ID NO: 905 - DNA, 33 bp, synthetic construct; identical to SEQ ID NO: 429
  misc_feature 1..33: note = Description of Artificial Sequence: Synthetic oligonucleotide
  source 1..33: mol_type = other DNA

SEQ ID NO: 906 - protein, 11 aa, synthetic construct
  REGION 1..11: note = Description of Artificial Sequence: Synthetic peptide
RASQGIGNDLG

SEQ ID NO: 907 - DNA, 33 bp, synthetic construct; identical to SEQ ID NO: 105
  misc_feature 1..33: note = Description of Artificial Sequence: Synthetic oligonucleotide
  source 1..33: mol_type = other DNA

SEQ ID NO: 908 - protein, 11 aa, synthetic construct
  REGION 1..11: note = Description of Artificial Sequence: Synthetic peptide
RASQGISNYLA

SEQ ID NO: 909 - DNA, 33 bp, synthetic construct
  misc_feature 1..33: note = Description of Artificial Sequence: Synthetic oligonucleotide
  source 1..33: mol_type = other DNA
cgggcaagtcagggcattagaaacgatttaggc

SEQ ID NO: 910 - protein, 11 aa, synthetic construct
  REGION 1..11: note = Description of Artificial Sequence: Synthetic peptide
RASQGIRNDLG

SEQ ID NO: 911 - DNA, 33 bp, synthetic construct; identical to SEQ ID NO: 109
  misc_feature 1..33: note = Description of Artificial Sequence: Synthetic oligonucleotide
  source 1..33: mol_type = other DNA

SEQ ID NO: 912 - protein, 11 aa, synthetic construct
  REGION 1..11: note = Description of Artificial Sequence: Synthetic peptide
RASQGIRNDLG

SEQ ID NO: 913 - DNA, 33 bp, synthetic construct; identical to SEQ ID NO: 109
  misc_feature 1..33: note = Description of Artificial Sequence: Synthetic oligonucleotide
  source 1..33: mol_type = other DNA

SEQ ID NO: 914 - protein, 11 aa, synthetic construct
  REGION 1..11: note = Description of Artificial Sequence: Synthetic peptide
RASQGIRNDLG

SEQ ID NO: 915 - DNA, 33 bp, synthetic construct; identical to SEQ ID NO: 109
  misc_feature 1..33: note = Description of Artificial Sequence: Synthetic oligonucleotide
  source 1..33: mol_type = other DNA

SEQ ID NO: 916 - protein, 11 aa, synthetic construct
  REGION 1..11: note = Description of Artificial Sequence: Synthetic peptide
RASQGIRNDLG

SEQ ID NO: 917 - DNA, 33 bp, synthetic construct
  misc_feature 1..33: note = Description of Artificial Sequence: Synthetic oligonucleotide
  source 1..33: mol_type = other DNA
cggacaagtcagagcattagtacttatttaaat

SEQ ID NO: 918 - protein, 11 aa, synthetic construct
  REGION 1..11: note = Description of Artificial Sequence: Synthetic peptide
RTSQSISTYLN

SEQ ID NO: 919 - DNA, 33 bp, synthetic construct
  misc_feature 1..33: note = Description of Artificial Sequence: Synthetic oligonucleotide
  source 1..33: mol_type = other DNA
cgggcaagtcagggcattagaagtaatttaggc

SEQ ID NO: 920 - protein, 11 aa, synthetic construct
  REGION 1..11: note = Description of Artificial Sequence: Synthetic peptide
RASQGIRSNLG

SEQ ID NO: 921 - DNA, 33 bp, synthetic construct; identical to SEQ ID NO: 109
  misc_feature 1..33: note = Description of Artificial Sequence: Synthetic oligonucleotide
  source 1..33: mol_type = other DNA

SEQ ID NO: 922 - protein, 11 aa, synthetic construct
  REGION 1..11: note = Description of Artificial Sequence: Synthetic peptide
RASQGIRNDLG

SEQ ID NO: 923 - DNA, 33 bp, synthetic construct; identical to SEQ ID NO: 109
  misc_feature 1..33: note = Description of Artificial Sequence: Synthetic oligonucleotide
  source 1..33: mol_type = other DNA

SEQ ID NO: 924 - protein, 11 aa, synthetic construct
  REGION 1..11: note = Description of Artificial Sequence: Synthetic peptide
RASQGIRNDLG

SEQ ID NO: 925 - DNA, 33 bp, synthetic construct
  misc_feature 1..33: note = Description of Artificial Sequence: Synthetic oligonucleotide
  source 1..33: mol_type = other DNA
cgggcgagtcaggacattaggaattatttagcc

SEQ ID NO: 926 - protein, 11 aa, synthetic construct
  REGION 1..11: note = Description of Artificial Sequence: Synthetic peptide
RASQDIRNYLA

SEQ ID NO: 927 - DNA, 33 bp, synthetic construct; identical to SEQ ID NO: 109
  misc_feature 1..33: note = Description of Artificial Sequence: Synthetic oligonucleotide
  source 1..33: mol_type = other DNA

SEQ ID NO: 928 - protein, 11 aa, synthetic construct
  REGION 1..11: note = Description of Artificial Sequence: Synthetic peptide
RASQGIRNDLG

SEQ ID NO: 929 - DNA, 33 bp, synthetic construct; identical to SEQ ID NO: 279
  misc_feature 1..33: note = Description of Artificial Sequence: Synthetic oligonucleotide
  source 1..33: mol_type = other DNA

SEQ ID NO: 930 - protein, 11 aa, synthetic construct
  REGION 1..11: note = Description of Artificial Sequence: Synthetic peptide
RASQGISYYLA

SEQ ID NO: 931 - DNA, 33 bp, synthetic construct
  misc_feature 1..33: note = Description of Artificial Sequence: Synthetic oligonucleotide
  source 1..33: mol_type = other DNA
cgggcaagtcaggccattagaaatgatttagac

SEQ ID NO: 932 - protein, 11 aa, synthetic construct
  REGION 1..11: note = Description of Artificial Sequence: Synthetic peptide
RASQAIRNDLD

SEQ ID NO: 933 - DNA, 33 bp, synthetic construct; identical to SEQ ID NO: 109
  misc_feature 1..33: note = Description of Artificial Sequence: Synthetic oligonucleotide
  source 1..33: mol_type = other DNA

SEQ ID NO: 934 - protein, 11 aa, synthetic construct
  REGION 1..11: note = Description of Artificial Sequence: Synthetic peptide
RASQGIRNDLG

SEQ ID NO: 935 - DNA, 33 bp, synthetic construct; identical to SEQ ID NO: 109
  misc_feature 1..33: note = Description of Artificial Sequence: Synthetic oligonucleotide
  source 1..33: mol_type = other DNA

SEQ ID NO: 936 - protein, 11 aa, synthetic construct
  REGION 1..11: note = Description of Artificial Sequence: Synthetic peptide
RASQGIRNDLG

SEQ ID NO: 937 - DNA, 33 bp, synthetic construct; identical to SEQ ID NO: 837
  misc_feature 1..33: note = Description of Artificial Sequence: Synthetic oligonucleotide
  source 1..33: mol_type = other DNA

SEQ ID NO: 938 - protein, 11 aa, synthetic construct
  REGION 1..11: note = Description of Artificial Sequence: Synthetic peptide
QASQDISNYLN

SEQ ID NO: 939 - DNA, 33 bp, synthetic construct; identical to SEQ ID NO: 109
  misc_feature 1..33: note = Description of Artificial Sequence: Synthetic oligonucleotide
  source 1..33: mol_type = other DNA

SEQ ID NO: 940 - protein, 11 aa, synthetic construct
  REGION 1..11: note = Description of Artificial Sequence: Synthetic peptide
RASQGIRNDLG

SEQ ID NO: 941 - DNA, 33 bp, synthetic construct; identical to SEQ ID NO: 425
  misc_feature 1..33: note = Description of Artificial Sequence: Synthetic oligonucleotide
  source 1..33: mol_type = other DNA

SEQ ID NO: 942 - protein, 11 aa, synthetic construct
  REGION 1..11: note = Description of Artificial Sequence: Synthetic peptide
QASQDINNYLN

SEQ ID NO: 943 - DNA, 33 bp, synthetic construct
  misc_feature 1..33: note = Description of Artificial Sequence: Synthetic oligonucleotide
  source 1..33: mol_type = other DNA
caggcgagtcaggacattaccaactatttaaat

SEQ ID NO: 944 - protein, 11 aa, synthetic construct
  REGION 1..11: note = Description of Artificial Sequence: Synthetic peptide
QASQDITNYLN

SEQ ID NO: 945 - DNA, 33 bp, synthetic construct; identical to SEQ ID NO: 109
  misc_feature 1..33: note = Description of Artificial Sequence: Synthetic oligonucleotide
  source 1..33: mol_type = other DNA

SEQ ID NO: 946 - protein, 11 aa, synthetic construct
  REGION 1..11: note = Description of Artificial Sequence: Synthetic peptide
RASQGIRNDLG

SEQ ID NO: 947 - DNA, 33 bp, synthetic construct; identical to SEQ ID NO: 283
  misc_feature 1..33: note = Description of Artificial Sequence: Synthetic oligonucleotide
  source 1..33: mol_type = other DNA

SEQ ID NO: 948 - protein, 11 aa, synthetic construct
  REGION 1..11: note = Description of Artificial Sequence: Synthetic peptide
RASQDISNYLA

SEQ ID NO: 949 - DNA, 33 bp, synthetic construct; identical to SEQ ID NO: 305
  misc_feature 1..33: note = Description of Artificial Sequence: Synthetic oligonucleotide
  source 1..33: mol_type = other DNA

SEQ ID NO: 950 - protein, 11 aa, synthetic construct
  REGION 1..11: note = Description of Artificial Sequence: Synthetic peptide
RASQSIISYLN

SEQ ID NO: 951 - DNA, 33 bp, synthetic construct; identical to SEQ ID NO: 289
  misc_feature 1..33: note = Description of Artificial Sequence: Synthetic oligonucleotide
  source 1..33: mol_type = other DNA

SEQ ID NO: 952 - protein, 11 aa, synthetic construct
  REGION 1..11: note = Description of Artificial Sequence: Synthetic peptide
RASQSISSYLN

SEQ ID NO: 953 - DNA, 33 bp, synthetic construct
  misc_feature 1..33: note = Description of Artificial Sequence: Synthetic oligonucleotide
  source 1..33: mol_type = other DNA
cgggcaagtcagagcattttcagctacttaaat

SEQ ID NO: 954 - protein, 11 aa, synthetic construct
  REGION 1..11: note = Description of Artificial Sequence: Synthetic peptide
RASQSIFSYLN

SEQ ID NO: 955 - DNA, 33 bp, synthetic construct; identical to SEQ ID NO: 105
  misc_feature 1..33: note = Description of Artificial Sequence: Synthetic oligonucleotide
  source 1..33: mol_type = other DNA

SEQ ID NO: 956 - protein, 11 aa, synthetic construct
  REGION 1..11: note = Description of Artificial Sequence: Synthetic peptide
RASQGISNYLA

SEQ ID NO: 957 - DNA, 33 bp, synthetic construct; identical to SEQ ID NO: 109
  misc_feature 1..33: note = Description of Artificial Sequence: Synthetic oligonucleotide
  source 1..33: mol_type = other DNA

SEQ ID NO: 958 - protein, 11 aa, synthetic construct
  REGION 1..11: note = Description of Artificial Sequence: Synthetic peptide
RASQGIRNDLG

SEQ ID NO: 959 - DNA, 33 bp, synthetic construct; identical to SEQ ID NO: 137
  misc_feature 1..33: note = Description of Artificial Sequence: Synthetic oligonucleotide
  source 1..33: mol_type = other DNA

SEQ ID NO: 960 - protein, 11 aa, synthetic construct
  REGION 1..11: note = Description of Artificial Sequence: Synthetic peptide
RASQNISSYLN

SEQ ID NO: 961 - DNA, 33 bp, synthetic construct; identical to SEQ ID NO: 109
  misc_feature 1..33: note = Description of Artificial Sequence: Synthetic oligonucleotide
  source 1..33: mol_type = other DNA

SEQ ID NO: 962 - protein, 11 aa, synthetic construct
  REGION 1..11: note = Description of Artificial Sequence: Synthetic peptide
RASQGIRNDLG

SEQ ID NO: 963 - DNA, 33 bp, synthetic construct; identical to SEQ ID NO: 105
  misc_feature 1..33: note = Description of Artificial Sequence: Synthetic oligonucleotide
  source 1..33: mol_type = other DNA

SEQ ID NO: 964 - protein, 11 aa, synthetic construct
  REGION 1..11: note = Description of Artificial Sequence: Synthetic peptide
RASQGISNYLA

SEQ ID NO: 965 - DNA, 33 bp, synthetic construct; identical to SEQ ID NO: 425
  misc_feature 1..33: note = Description of Artificial Sequence: Synthetic oligonucleotide
  source 1..33: mol_type = other DNA

SEQ ID NO: 966 - protein, 11 aa, synthetic construct
  REGION 1..11: note = Description of Artificial Sequence: Synthetic peptide
QASQDINNYLN

SEQ ID NO: 967 - DNA, 33 bp, synthetic construct
  misc_feature 1..33: note = Description of Artificial Sequence: Synthetic oligonucleotide
  source 1..33: mol_type = other DNA
cgggcaagtcagggcattcgaaatcatttaggc

SEQ ID NO: 968 - protein, 11 aa, synthetic construct
  REGION 1..11: note = Description of Artificial Sequence: Synthetic peptide
RASQGIRNHLG

SEQ ID NO: 969 - DNA, 33 bp, synthetic construct
  misc_feature 1..33: note = Description of Artificial Sequence: Synthetic oligonucleotide
  source 1..33: mol_type = other DNA
caggcgagtcagggcattagcaactctttaaat

SEQ ID NO: 970 - protein, 11 aa, synthetic construct
  REGION 1..11: note = Description of Artificial Sequence: Synthetic peptide
QASQGISNSLN

SEQ ID NO: 971 - DNA, 33 bp, synthetic construct; identical to SEQ ID NO: 109
  misc_feature 1..33: note = Description of Artificial Sequence: Synthetic oligonucleotide
  source 1..33: mol_type = other DNA

SEQ ID NO: 972 - protein, 11 aa, synthetic construct
  REGION 1..11: note = Description of Artificial Sequence: Synthetic peptide
RASQGIRNDLG

SEQ ID NO: 973 - DNA, 33 bp, synthetic construct; identical to SEQ ID NO: 109
  misc_feature 1..33: note = Description of Artificial Sequence: Synthetic oligonucleotide
  source 1..33: mol_type = other DNA

SEQ ID NO: 974 - protein, 11 aa, synthetic construct
  REGION 1..11: note = Description of Artificial Sequence: Synthetic peptide
RASQGIRNDLG

SEQ ID NO: 975 - DNA, 33 bp, synthetic construct
  misc_feature 1..33: note = Description of Artificial Sequence: Synthetic oligonucleotide
  source 1..33: mol_type = other DNA
cgggcaagtcagagtattaataattatttaaat

SEQ ID NO: 976 - protein, 11 aa, synthetic construct
  REGION 1..11: note = Description of Artificial Sequence: Synthetic peptide
RASQSINNYLN

SEQ ID NO: 977 - DNA, 33 bp, synthetic construct; identical to SEQ ID NO: 109
  misc_feature 1..33: note = Description of Artificial Sequence: Synthetic oligonucleotide
  source 1..33: mol_type = other DNA

SEQ ID NO: 978 - protein, 11 aa, synthetic construct
  REGION 1..11: note = Description of Artificial Sequence: Synthetic peptide
RASQGIRNDLG

SEQ ID NO: 979 - DNA, 33 bp, synthetic construct; identical to SEQ ID NO: 425
  misc_feature 1..33: note = Description of Artificial Sequence: Synthetic oligonucleotide
  source 1..33: mol_type = other DNA

SEQ ID NO: 980 - protein, 11 aa, synthetic construct
  REGION 1..11: note = Description of Artificial Sequence: Synthetic peptide
QASQDINNYLN

SEQ ID NO: 981 - DNA, 33 bp, synthetic construct; identical to SEQ ID NO: 109
  misc_feature 1..33: note = Description of Artificial Sequence: Synthetic oligonucleotide
  source 1..33: mol_type = other DNA

SEQ ID NO: 982 - protein, 11 aa, synthetic construct
  REGION 1..11: note = Description of Artificial Sequence: Synthetic peptide
RASQGIRNDLG

SEQ ID NO: 983 - DNA, 33 bp, synthetic construct
  misc_feature 1..33: note = Description of Artificial Sequence: Synthetic oligonucleotide
  source 1..33: mol_type = other DNA
cgggcaagtcagagcattgccagttatttaaat

SEQ ID NO: 984 - protein, 11 aa, synthetic construct
  REGION 1..11: note = Description of Artificial Sequence: Synthetic peptide
RASQSIASYLN

SEQ ID NO: 985 - DNA, 33 bp, synthetic construct; identical to SEQ ID NO: 109
  misc_feature 1..33: note = Description of Artificial Sequence: Synthetic oligonucleotide
  source 1..33: mol_type = other DNA

SEQ ID NO: 986 - protein, 11 aa, synthetic construct
  REGION 1..11: note = Description of Artificial Sequence: Synthetic peptide
RASQGIRNDLG

SEQ ID NO: 987 - DNA, 33 bp, synthetic construct; identical to SEQ ID NO: 279
  misc_feature 1..33: note = Description of Artificial Sequence: Synthetic oligonucleotide
  source 1..33: mol_type = other DNA

SEQ ID NO: 988 - protein, 11 aa, synthetic construct
  REGION 1..11: note = Description of Artificial Sequence: Synthetic peptide
RASQGISYYLA

SEQ ID NO: 989 - DNA, 33 bp, synthetic construct; identical to SEQ ID NO: 109
  misc_feature 1..33: note = Description of Artificial Sequence: Synthetic oligonucleotide
  source 1..33: mol_type = other DNA

SEQ ID NO: 990 - protein, 11 aa, synthetic construct
  REGION 1..11: note = Description of Artificial Sequence: Synthetic peptide
RASQGIRNDLG

SEQ ID NO: 991 - DNA, 33 bp, synthetic construct; identical to SEQ ID NO: 109
  misc_feature 1..33: note = Description of Artificial Sequence: Synthetic oligonucleotide
  source 1..33: mol_type = other DNA

SEQ ID NO: 992 - protein, 11 aa, synthetic construct
  REGION 1..11: note = Description of Artificial Sequence: Synthetic peptide
RASQGIRNDLG

SEQ ID NO: 993 - DNA, 48 bp, synthetic construct
  misc_feature 1..48: note = Description of Artificial Sequence: Synthetic oligonucleotide
  source 1..48: mol_type = other DNA
aggtctagtcagagcctcctccatagtaatggatacaactatttggat

SEQ ID NO: 994 - protein, 16 aa, synthetic construct
  REGION 1..16: note = Description of Artificial Sequence: Synthetic peptide
RSSQSLLHSNGYNYLD

SEQ ID NO: 995 - DNA, 33 bp, synthetic construct; identical to SEQ ID NO: 109
  misc_feature 1..33: note = Description of Artificial Sequence: Synthetic oligonucleotide
  source 1..33: mol_type = other DNA

SEQ ID NO: 996 - protein, 11 aa, synthetic construct
  REGION 1..11: note = Description of Artificial Sequence: Synthetic peptide
RASQGIRNDLG

SEQ ID NO: 997 - DNA, 51 bp, synthetic construct
  misc_feature 1..51: note = Description of Artificial Sequence: Synthetic oligonucleotide
  source 1..51: mol_type = other DNA
aagtccaaccagagagttttatccagctccaacaatcacaactacttagct

SEQ ID NO: 998 - protein, 17 aa, synthetic construct
  REGION 1..17: note = Description of Artificial Sequence: Synthetic peptide
KSNQRVLSSSNNHNYLA

SEQ ID NO: 999 - DNA, 33 bp, synthetic construct; identical to SEQ ID NO: 109
  misc_feature 1..33: note = Description of Artificial Sequence: Synthetic oligonucleotide
  source 1..33: mol_type = other DNA

SEQ ID NO: 1000 - protein, 11 aa, synthetic construct
  REGION 1..11: note = Description of Artificial Sequence: Synthetic peptide
RASQGIRNDLG

SEQ ID NO: 1001 - DNA, 33 bp, synthetic construct
  misc_feature 1..33: note = Description of Artificial Sequence: Synthetic oligonucleotide
  source 1..33: mol_type = other DNA
cgggcaagtcagggcattagagatattttaggc

SEQ ID NO: 1002 - protein, 11 aa, synthetic construct
  REGION 1..11: note = Description of Artificial Sequence: Synthetic peptide
RASQGIRDILG

SEQ ID NO: 1003 - DNA, 48 bp, synthetic construct
  misc_feature 1..48: note = Description of Artificial Sequence: Synthetic oligonucleotide
  source 1..48: mol_type = other DNA
aggtctagtcagagcctcctgcatagtaagggatacaactatttggat

SEQ ID NO: 1004 - protein, 16 aa, synthetic construct
  REGION 1..16: note = Description of Artificial Sequence: Synthetic peptide
RSSQSLLHSKGYNYLD

SEQ ID NO: 1005 - DNA, 33 bp, synthetic construct; identical to SEQ ID NO: 109
  misc_feature 1..33: note = Description of Artificial Sequence: Synthetic oligonucleotide
  source 1..33: mol_type = other DNA

SEQ ID NO: 1006 - protein, 11 aa, synthetic construct
  REGION 1..11: note = Description of Artificial Sequence: Synthetic peptide
RASQGIRNDLG

SEQ ID NO: 1007 - DNA, 33 bp, synthetic construct; identical to SEQ ID NO: 109
  misc_feature 1..33: note = Description of Artificial Sequence: Synthetic oligonucleotide
  source 1..33: mol_type = other DNA

SEQ ID NO: 1008 - protein, 11 aa, synthetic construct
  REGION 1..11: note = Description of Artificial Sequence: Synthetic peptide
RASQGIRNDLG

SEQ ID NO: 1009 - DNA, 33 bp, synthetic construct; identical to SEQ ID NO: 323
  misc_feature 1..33: note = Description of Artificial Sequence: Synthetic oligonucleotide
  source 1..33: mol_type = other DNA

SEQ ID NO: 1010 - protein, 11 aa, synthetic construct
  REGION 1..11: note = Description of Artificial Sequence: Synthetic peptide
RASQSISNYLN

SEQ ID NO: 1011 - DNA, 33 bp, synthetic construct; identical to SEQ ID NO: 109
  misc_feature 1..33: note = Description of Artificial Sequence: Synthetic oligonucleotide
  source 1..33: mol_type = other DNA

SEQ ID NO: 1012 - protein, 11 aa, synthetic construct
  REGION 1..11: note = Description of Artificial Sequence: Synthetic peptide
RASQGIRNDLG

SEQ ID NO: 1013 - DNA, 33 bp, synthetic construct; identical to SEQ ID NO: 425
  misc_feature 1..33: note = Description of Artificial Sequence: Synthetic oligonucleotide
  source 1..33: mol_type = other DNA

SEQ ID NO: 1014 - protein, 11 aa, synthetic construct
  REGION 1..11: note = Description of Artificial Sequence: Synthetic peptide
QASQDINNYLN

SEQ ID NO: 1015 - DNA, 33 bp, synthetic construct; identical to SEQ ID NO: 305
  misc_feature 1..33: note = Description of Artificial Sequence: Synthetic oligonucleotide
  source 1..33: mol_type = other DNA

SEQ ID NO: 1016 - protein, 11 aa, synthetic construct
  REGION 1..11: note = Description of Artificial Sequence: Synthetic peptide
RASQSIISYLN

SEQ ID NO: 1017 - DNA, 51 bp, synthetic construct
  misc_feature 1..51: note = Description of Artificial Sequence: Synthetic oligonucleotide
  source 1..51: mol_type = other DNA
aagtccagccagaatgttttatacaactccaacaataacaactacttagct

SEQ ID NO: 1018 - protein, 17 aa, synthetic construct
  REGION 1..17: note = Description of Artificial Sequence: Synthetic peptide
KSSQNVLYNSNNNNYLA

SEQ ID NO: 1019 - DNA, 33 bp, synthetic construct
  misc_feature 1..33: note = Description of Artificial Sequence: Synthetic oligonucleotide
  source 1..33: mol_type = other DNA
cgggcaagtcagaacatttatagttatttaaat

SEQ ID NO: 1020 - protein, 11 aa, synthetic construct
  REGION 1..11: note = Description of Artificial Sequence: Synthetic peptide
RASQNIYSYLN

SEQ ID NO: 1021 - DNA, 33 bp, synthetic construct; identical to SEQ ID NO: 133
  misc_feature 1..33: note = Description of Artificial Sequence: Synthetic oligonucleotide
  source 1..33: mol_type = other DNA

SEQ ID NO: 1022 - protein, 11 aa, synthetic construct
  REGION 1..11: note = Description of Artificial Sequence: Synthetic peptide
RASQGIRSDLG

SEQ ID NO: 1023 - DNA, 33 bp, synthetic construct; identical to SEQ ID NO: 109
  misc_feature 1..33: note = Description of Artificial Sequence: Synthetic oligonucleotide
  source 1..33: mol_type = other DNA

SEQ ID NO: 1024 - protein, 11 aa, synthetic construct
  REGION 1..11: note = Description of Artificial Sequence: Synthetic peptide
RASQGIRNDLG

SEQ ID NO: 1025 - DNA, 33 bp, synthetic construct; identical to SEQ ID NO: 109
  misc_feature 1..33: note = Description of Artificial Sequence: Synthetic oligonucleotide
  source 1..33: mol_type = other DNA

SEQ ID NO: 1026 - protein, 11 aa, synthetic construct
  REGION 1..11: note = Description of Artificial Sequence: Synthetic peptide
RASQGIRNDLG

SEQ ID NO: 1027 - DNA, 33 bp, synthetic construct; identical to SEQ ID NO: 109
  misc_feature 1..33: note = Description of Artificial Sequence: Synthetic oligonucleotide
  source 1..33: mol_type = other DNA

SEQ ID NO: 1028 - protein, 11 aa, synthetic construct
  REGION 1..11: note = Description of Artificial Sequence: Synthetic peptide
RASQGIRNDLG

SEQ ID NO: 1029 - DNA, 33 bp, synthetic construct; identical to SEQ ID NO: 109
  misc_feature 1..33: note = Description of Artificial Sequence: Synthetic oligonucleotide
  source 1..33: mol_type = other DNA

SEQ ID NO: 1030 - protein, 11 aa, synthetic construct
  REGION 1..11: note = Description of Artificial Sequence: Synthetic peptide
RASQGIRNDLG

SEQ ID NO: 1031 - DNA, 33 bp, synthetic construct
  misc_feature 1..33: note = Description of Artificial Sequence: Synthetic oligonucleotide
  source 1..33: mol_type = other DNA
tctggagataaattggggaataaatatgcttac

SEQ ID NO: 1032 - protein, 11 aa, synthetic construct
  REGION 1..11: note = Description of Artificial Sequence: Synthetic peptide
SGDKLGNKYAY

SEQ ID NO: 1033 - DNA, 33 bp, synthetic construct; identical to SEQ ID NO: 177
  misc_feature 1..33: note = Description of Artificial Sequence: Synthetic oligonucleotide
  source 1..33: mol_type = other DNA

SEQ ID NO: 1034 - protein, 11 aa, synthetic construct
  REGION 1..11: note = Description of Artificial Sequence: Synthetic peptide
SGDKLGDKYVY

SEQ ID NO: 1035 - DNA, 33 bp, synthetic construct
  misc_feature 1..33: note = Description of Artificial Sequence: Synthetic oligonucleotide
  source 1..33: mol_type = other DNA
cggtcaagtcagagcattaacagctatttaaat

SEQ ID NO: 1036 - protein, 11 aa, synthetic construct
  REGION 1..11: note = Description of Artificial Sequence: Synthetic peptide
RSSQSINSYLN

SEQ ID NO: 1037 - DNA, 33 bp, synthetic construct
  misc_feature 1..33: note = Description of Artificial Sequence: Synthetic oligonucleotide
  source 1..33: mol_type = other DNA
cgggcaagtcagaacattaacgactatttaaat

SEQ ID NO: 1038 - protein, 11 aa, synthetic construct
  REGION 1..11: note = Description of Artificial Sequence: Synthetic peptide
RASQNINDYLN

SEQ ID NO: 1039 - DNA, 33 bp, synthetic construct; identical to SEQ ID NO: 105
  misc_feature 1..33: note = Description of Artificial Sequence: Synthetic oligonucleotide
  source 1..33: mol_type = other DNA

SEQ ID NO: 1040 - protein, 11 aa, synthetic construct
  REGION 1..11: note = Description of Artificial Sequence: Synthetic peptide
RASQGISNYLA

SEQ ID NO: 1041 - DNA, 33 bp, synthetic construct
  misc_feature 1..33: note = Description of Artificial Sequence: Synthetic oligonucleotide
  source 1..33: mol_type = other DNA
cggacaagtcagaatattagcaactatttaaat

SEQ ID NO: 1042 - protein, 11 aa, synthetic construct
  REGION 1..11: note = Description of Artificial Sequence: Synthetic peptide
RTSQNISNYLN

SEQ ID NO: 1043 - DNA, 33 bp, synthetic construct
  misc_feature 1..33: note = Description of Artificial Sequence: Synthetic oligonucleotide
  source 1..33: mol_type = other DNA
cgggcgagtcgggacattagcaattatttagcc

SEQ ID NO: 1044 - protein, 11 aa, synthetic construct
  REGION 1..11: note = Description of Artificial Sequence: Synthetic peptide
RASRDISNYLA

SEQ ID NO: 1045 - DNA, 33 bp, synthetic construct; identical to SEQ ID NO: 109
  misc_feature 1..33: note = Description of Artificial Sequence: Synthetic oligonucleotide
  source 1..33: mol_type = other DNA

SEQ ID NO: 1046 - protein, 11 aa, synthetic construct
  REGION 1..11: note = Description of Artificial Sequence: Synthetic peptide
RASQGIRNDLG

SEQ ID NO: 1047 - DNA, 33 bp, synthetic construct
  misc_feature 1..33: note = Description of Artificial Sequence: Synthetic oligonucleotide
  source 1..33: mol_type = other DNA
cgggcaagtcataccattaccagctatttaaat

SEQ ID NO: 1048 - protein, 11 aa, synthetic construct
  REGION 1..11: note = Description of Artificial Sequence: Synthetic peptide
RASHTITSYLN

SEQ ID NO: 1049 - DNA, 33 bp, synthetic construct; identical to SEQ ID NO: 693
  misc_feature 1..33: note = Description of Artificial Sequence: Synthetic oligonucleotide
  source 1..33: mol_type = other DNA

SEQ ID NO: 1050 - protein, 11 aa, synthetic construct
  REGION 1..11: note = Description of Artificial Sequence: Synthetic peptide
SGDKLGDKYAC

SEQ ID NO: 1051 - DNA, 33 bp, synthetic construct; identical to SEQ ID NO: 1031
  misc_feature 1..33: note = Description of Artificial Sequence: Synthetic oligonucleotide
  source 1..33: mol_type = other DNA

SEQ ID NO: 1052 - protein, 11 aa, synthetic construct
  REGION 1..11: note = Description of Artificial Sequence: Synthetic peptide
SGDKLGNKYAY

SEQ ID NO: 1053 - DNA, 33 bp, synthetic construct
  misc_feature 1..33: note = Description of Artificial Sequence: Synthetic oligonucleotide
  source 1..33: mol_type = other DNA
cgggcgagtcagggcattaggaattttttagcc

SEQ ID NO: 1054 - protein, 11 aa, synthetic construct
  REGION 1..11: note = Description of Artificial Sequence: Synthetic peptide
RASQGIRNFLA

SEQ ID NO: 1055 - DNA, 42 bp, synthetic construct
  misc_feature 1..42: note = Description of Artificial Sequence: Synthetic oligonucleotide
  source 1..42: mol_type = other DNA
actggaaccagcagtgacgttggtggttataactctgtctcc

SEQ ID NO: 1056 - protein, 14 aa, synthetic construct
  REGION 1..14: note = Description of Artificial Sequence: Synthetic peptide
TGTSSDVGGYNSVS

SEQ ID NO: 1057 - DNA, 51 bp, synthetic construct
  misc_feature 1..51: note = Description of Artificial Sequence: Synthetic oligonucleotide
  source 1..51: mol_type = other DNA
aagtccagccagagtgttttacacagctccaacaataacaactacttagct

SEQ ID NO: 1058 - protein, 17 aa, synthetic construct
  REGION 1..17: note = Description of Artificial Sequence: Synthetic peptide
KSSQSVLHSSNNNNYLA

SEQ ID NO: 1059 - DNA, 33 bp, synthetic construct; identical to SEQ ID NO: 709
  misc_feature 1..33: note = Description of Artificial Sequence: Synthetic oligonucleotide
  source 1..33: mol_type = other DNA

SEQ ID NO: 1060 - protein, 11 aa, synthetic construct
  REGION 1..11: note = Description of Artificial Sequence: Synthetic peptide
SGDKLGEKYAC

SEQ ID NO: 1061 - DNA, 33 bp, synthetic construct; identical to SEQ ID NO: 283
  misc_feature 1..33: note = Description of Artificial Sequence: Synthetic oligonucleotide
  source 1..33: mol_type = other DNA

SEQ ID NO: 1062 - protein, 11 aa, synthetic construct
  REGION 1..11: note = Description of Artificial Sequence: Synthetic peptide
RASQDISNYLA

SEQ ID NO: 1063 - DNA, 33 bp, synthetic construct
  misc_feature 1..33: note = Description of Artificial Sequence: Synthetic oligonucleotide
  source 1..33: mol_type = other DNA
cgggcgagtcagggtattaccaagtggttagcc

SEQ ID NO: 1064 - protein, 11 aa, synthetic construct
  REGION 1..11: note = Description of Artificial Sequence: Synthetic peptide
RASQGITKWLA

SEQ ID NO: 1065 - DNA, 33 bp, synthetic construct
  misc_feature 1..33: note = Description of Artificial Sequence: Synthetic oligonucleotide
  source 1..33: mol_type = other DNA
tctggagaaaaattgggggataaatatgtttgt

SEQ ID NO: 1066 - protein, 11 aa, synthetic construct
  REGION 1..11: note = Description of Artificial Sequence: Synthetic peptide
SGEKLGDKYVC

SEQ ID NO: 1067 - DNA, 51 bp, synthetic construct
  misc_feature 1..51: note = Description of Artificial Sequence: Synthetic oligonucleotide
  source 1..51: mol_type = other DNA
aagtccagccagagtattttattcagctccaacaataacaactacttagct

SEQ ID NO: 1068 - protein, 17 aa, synthetic construct
  REGION 1..17: note = Description of Artificial Sequence: Synthetic peptide
KSSQSILFSSNNNNYLA

SEQ ID NO: 1069 - DNA, 48 bp, synthetic construct
  misc_feature 1..48: note = Description of Artificial Sequence: Synthetic oligonucleotide
  source 1..48: mol_type = other DNA
aggtctagtcaaagcctcgtatacagtgatggaaacacctacttgaat

SEQ ID NO: 1070 - protein, 16 aa, synthetic construct
  REGION 1..16: note = Description of Artificial Sequence: Synthetic peptide
RSSQSLVYSDGNTYLN

SEQ ID NO: 1071 - DNA, 51 bp, synthetic construct
  misc_feature 1..51: note = Description of Artificial Sequence: Synthetic oligonucleotide
  source 1..51: mol_type = other DNA
aagtccagccagagtgttttatacagctccaacaataagaactacttagct

SEQ ID NO: 1072 - protein, 17 aa, synthetic construct
  REGION 1..17: note = Description of Artificial Sequence: Synthetic peptide
KSSQSVLYSSNNKNYLA

SEQ ID NO: 1073 - DNA, 51 bp, synthetic construct
  misc_feature 1..51: note = Description of Artificial Sequence: Synthetic oligonucleotide
  source 1..51: mol_type = other DNA
aagtccagccagagtgttttataccactccaacaattacaactacttagct

SEQ ID NO: 1074 - protein, 17 aa, synthetic construct
  REGION 1..17: note = Description of Artificial Sequence: Synthetic peptide
KSSQSVLYHSNNYNYLA

SEQ ID NO: 1075 - DNA, 51 bp, synthetic construct; identical to SEQ ID NO: 1071
  misc_feature 1..51: note = Description of Artificial Sequence: Synthetic oligonucleotide
  source 1..51: mol_type = other DNA

SEQ ID NO: 1076 - protein, 17 aa, synthetic construct
  REGION 1..17: note = Description of Artificial Sequence: Synthetic peptide
KSSQSVLYSSNNKNYLA

SEQ ID NO: 1077 - DNA, 33 bp, synthetic construct; identical to SEQ ID NO: 95
  misc_feature 1..33: note = Description of Artificial Sequence: Synthetic oligonucleotide
  source 1..33: mol_type = other DNA

SEQ ID NO: 1078 - protein, 11 aa, synthetic construct
  REGION 1..11: note = Description of Artificial Sequence: Synthetic peptide
RASQGISKWLA

SEQ ID NO: 1079 - DNA, 51 bp, synthetic construct
  misc_feature 1..51: note = Description of Artificial Sequence: Synthetic oligonucleotide
  source 1..51: mol_type = other DNA
aagtccagccagagtgttttatacagctccaacaattacaactacttagct

SEQ ID NO: 1080 - protein, 17 aa, synthetic construct
  REGION 1..17: note = Description of Artificial Sequence: Synthetic peptide
KSSQSVLYSSNNYNYLA

SEQ ID NO: 1081 - DNA, 51 bp, synthetic construct
  misc_feature 1..51: note = Description of Artificial Sequence: Synthetic oligonucleotide
  source 1..51: mol_type = other DNA
aagtccagccagagtgttttacacagctccaacaataagaactacttagct

SEQ ID NO: 1082 - protein, 17 aa, synthetic construct
  REGION 1..17: note = Description of Artificial Sequence: Synthetic peptide
KSSQSVLHSSNNKNYLA

SEQ ID NO: 1083 - DNA, 33 bp, synthetic construct; identical to SEQ ID NO: 105
  misc_feature 1..33: note = Description of Artificial Sequence: Synthetic oligonucleotide
  source 1..33: mol_type = other DNA

SEQ ID NO: 1084 - protein, 11 aa, synthetic construct
  REGION 1..11: note = Description of Artificial Sequence: Synthetic peptide
RASQGISNYLA

SEQ ID NO: 1085 - DNA, 33 bp, synthetic construct
  misc_feature 1..33: note = Description of Artificial Sequence: Synthetic oligonucleotide
  source 1..33: mol_type = other DNA
cgggcaagtcaggacatgagaagtgatttaggc

SEQ ID NO: 1086 - protein, 11 aa, synthetic construct
  REGION 1..11: note = Description of Artificial Sequence: Synthetic peptide
RASQDMRSDLG

SEQ ID NO: 1087 - DNA, 48 bp, synthetic construct
  misc_feature 1..48: note = Description of Artificial Sequence: Synthetic oligonucleotide
  source 1..48: mol_type = other DNA
aggtcaagtcaaagcctcgtatacagtgatggaaacacctacttgaat

SEQ ID NO: 1088 - protein, 16 aa, synthetic construct
  REGION 1..16: note = Description of Artificial Sequence: Synthetic peptide
RSSQSLVYSDGNTYLN

SEQ ID NO: 1089 - DNA, 33 bp, synthetic construct
  misc_feature 1..33: note = Description of Artificial Sequence: Synthetic oligonucleotide
  source 1..33: mol_type = other DNA
cgggcgagtcaggacattagcaattatttggcc

SEQ ID NO: 1090 - protein, 11 aa, synthetic construct
  REGION 1..11: note = Description of Artificial Sequence: Synthetic peptide
RASQDISNYLA

SEQ ID NO: 1091 - DNA, 33 bp, synthetic construct; identical to SEQ ID NO: 493
  misc_feature 1..33: note = Description of Artificial Sequence: Synthetic oligonucleotide
  source 1..33: mol_type = other DNA

SEQ ID NO: 1092 - protein, 11 aa, synthetic construct
  REGION 1..11: note = Description of Artificial Sequence: Synthetic peptide
RASQDIRSDLG

SEQ ID NO: 1093 - DNA, 33 bp, synthetic construct
  misc_feature 1..33: note = Description of Artificial Sequence: Synthetic oligonucleotide
  source 1..33: mol_type = other DNA
cgggcaagtcagagcattagaagctatttaaat

SEQ ID NO: 1094 - protein, 11 aa, synthetic construct
  REGION 1..11: note = Description of Artificial Sequence: Synthetic peptide
RASQSIRSYLN

SEQ ID NO: 1095 - DNA, 51 bp, synthetic construct; identical to SEQ ID NO: 1079
  misc_feature 1..51: note = Description of Artificial Sequence: Synthetic oligonucleotide
  source 1..51: mol_type = other DNA

SEQ ID NO: 1096 - protein, 17 aa, synthetic construct
  REGION 1..17: note = Description of Artificial Sequence: Synthetic peptide
KSSQSVLYSSNNYNYLA

SEQ ID NO: 1097 - DNA, 33 bp, synthetic construct; identical to SEQ ID NO: 493
  misc_feature 1..33: note = Description of Artificial Sequence: Synthetic oligonucleotide
  source 1..33: mol_type = other DNA

SEQ ID NO: 1098 - protein, 11 aa, synthetic construct
  REGION 1..11: note = Description of Artificial Sequence: Synthetic peptide
RASQDIRSDLG

SEQ ID NO: 1099 - DNA, 36 bp, synthetic construct; identical to SEQ ID NO: 195
  misc_feature 1..36: note = Description of Artificial Sequence: Synthetic oligonucleotide
  source 1..36: mol_type = other DNA

SEQ ID NO: 1100 - protein, 12 aa, synthetic construct
  REGION 1..12: note = Description of Artificial Sequence: Synthetic peptide
TLSSEHSTYTIE

SEQ ID NO: 1101 - DNA, 33 bp, synthetic construct; identical to SEQ ID NO: 693
  misc_feature 1..33: note = Description of Artificial Sequence: Synthetic oligonucleotide
  source 1..33: mol_type = other DNA

SEQ ID NO: 1102 - protein, 11 aa, synthetic construct
  REGION 1..11: note = Description of Artificial Sequence: Synthetic peptide
SGDKLGDKYAC

SEQ ID NO: 1103 - DNA, 33 bp, synthetic construct; identical to SEQ ID NO: 109
  misc_feature 1..33: note = Description of Artificial Sequence: Synthetic oligonucleotide
  source 1..33: mol_type = other DNA

SEQ ID NO: 1104 - protein, 11 aa, synthetic construct
  REGION 1..11: note = Description of Artificial Sequence: Synthetic peptide
RASQGIRNDLG

SEQ ID NO: 1105 - DNA, 33 bp, synthetic construct; identical to SEQ ID NO: 105
  misc_feature 1..33: note = Description of Artificial Sequence: Synthetic oligonucleotide
  source 1..33: mol_type = other DNA

SEQ ID NO: 1106 - protein, 11 aa, synthetic construct
  REGION 1..11: note = Description of Artificial Sequence: Synthetic peptide
RASQGISNYLA

SEQ ID NO: 1107 - DNA, 33 bp, synthetic construct; identical to SEQ ID NO: 625
  misc_feature 1..33: note = Description of Artificial Sequence: Synthetic oligonucleotide
  source 1..33: mol_type = other DNA

SEQ ID NO: 1108 - protein, 11 aa, synthetic construct
  REGION 1..11: note = Description of Artificial Sequence: Synthetic peptide
RASQGISRWLA

SEQ ID NO: 1109 - DNA, 33 bp, synthetic construct; identical to SEQ ID NO: 693
  misc_feature 1..33: note = Description of Artificial Sequence: Synthetic oligonucleotide
  source 1..33: mol_type = other DNA

SEQ ID NO: 1110 - protein, 11 aa, synthetic construct
  REGION 1..11: note = Description of Artificial Sequence: Synthetic peptide
SGDKLGDKYAC

SEQ ID NO: 1111 - DNA, 33 bp, synthetic construct
  misc_feature 1..33: note = Description of Artificial Sequence: Synthetic oligonucleotide
  source 1..33: mol_type = other DNA
cgggcaagtcagggcattagaaattatttaggc

SEQ ID NO: 1112 - protein, 11 aa, synthetic construct
  REGION 1..11: note = Description of Artificial Sequence: Synthetic peptide
RASQGIRNYLG

SEQ ID NO: 1113 - DNA, 33 bp, synthetic construct; identical to SEQ ID NO: 697
  misc_feature 1..33: note = Description of Artificial Sequence: Synthetic oligonucleotide
  source 1..33: mol_type = other DNA

SEQ ID NO: 1114 - protein, 11 aa, synthetic construct
  REGION 1..11: note = Description of Artificial Sequence: Synthetic peptide
SGDKLGEKYAC

SEQ ID NO: 1115 - DNA, 33 bp, synthetic construct
  misc_feature 1..33: note = Description of Artificial Sequence: Synthetic oligonucleotide
  source 1..33: mol_type = other DNA
cgggcgagtcaggacataagtaattatttagcc

SEQ ID NO: 1116 - protein, 11 aa, synthetic construct
  REGION 1..11: note = Description of Artificial Sequence: Synthetic peptide
RASQDISNYLA

SEQ ID NO: 1117 - DNA, 33 bp, synthetic construct; identical to SEQ ID NO: 293
  misc_feature 1..33: note = Description of Artificial Sequence: Synthetic oligonucleotide
  source 1..33: mol_type = other DNA

SEQ ID NO: 1118 - protein, 11 aa, synthetic construct
  REGION 1..11: note = Description of Artificial Sequence: Synthetic peptide
RASQGINNYLA

SEQ ID NO: 1119 - DNA, 33 bp, synthetic construct
  misc_feature 1..33: note = Description of Artificial Sequence: Synthetic oligonucleotide
  source 1..33: mol_type = other DNA
cgggcgagtcagggcattgccaattatttagcc

SEQ ID NO: 1120 - protein, 11 aa, synthetic construct
  REGION 1..11: note = Description of Artificial Sequence: Synthetic peptide
RASQGIANYLA

SEQ ID NO: 1121 - DNA, 33 bp, synthetic construct; identical to SEQ ID NO: 109
  misc_feature 1..33: note = Description of Artificial Sequence: Synthetic oligonucleotide
  source 1..33: mol_type = other DNA

SEQ ID NO: 1122 - protein, 11 aa, synthetic construct
  REGION 1..11: note = Description of Artificial Sequence: Synthetic peptide
RASQGIRNDLG

SEQ ID NO: 1123 - DNA, 33 bp, synthetic construct; identical to SEQ ID NO: 547
  misc_feature 1..33: note = Description of Artificial Sequence: Synthetic oligonucleotide
  source 1..33: mol_type = other DNA

SEQ ID NO: 1124 - protein, 11 aa, synthetic construct
  REGION 1..11: note = Description of Artificial Sequence: Synthetic peptide
RASQNIYSYLN

SEQ ID NO: 1125 - DNA, 33 bp, synthetic construct
  misc_feature 1..33: note = Description of Artificial Sequence: Synthetic oligonucleotide
  source 1..33: mol_type = other DNA
cgggcaagtcagggcattaggagtgatttaggc

SEQ ID NO: 1126 - protein, 11 aa, synthetic construct
  REGION 1..11: note = Description of Artificial Sequence: Synthetic peptide
RASQGIRSDLG

SEQ ID NO: 1127 - DNA, 33 bp, synthetic construct; identical to SEQ ID NO: 709
  misc_feature 1..33: note = Description of Artificial Sequence: Synthetic oligonucleotide
  source 1..33: mol_type = other DNA

SEQ ID NO: 1128 - protein, 11 aa, synthetic construct
  REGION 1..11: note = Description of Artificial Sequence: Synthetic peptide
SGDKLGEKYAC

SEQ ID NO: 1129 - DNA, 51 bp, synthetic construct
  misc_feature 1..51: note = Description of Artificial Sequence: Synthetic oligonucleotide
  source 1..51: mol_type = other DNA
aagtccagccagagtattttacacagctccaacaataacaactacttagct

SEQ ID NO: 1130 - protein, 17 aa, synthetic construct
  REGION 1..17: note = Description of Artificial Sequence: Synthetic peptide
KSSQSILHSSNNNNYLA

SEQ ID NO: 1131 - DNA, 51 bp, synthetic construct; identical to SEQ ID NO: 1129
  misc_feature 1..51: note = Description of Artificial Sequence: Synthetic oligonucleotide
  source 1..51: mol_type = other DNA

SEQ ID NO: 1132 - protein, 17 aa, synthetic construct
  REGION 1..17: note = Description of Artificial Sequence: Synthetic peptide
KSSQSILHSSNNNNYLA

SEQ ID NO: 1133 - DNA, 33 bp, synthetic construct; identical to SEQ ID NO: 163
  misc_feature 1..33: note = Description of Artificial Sequence: Synthetic oligonucleotide
  source 1..33: mol_type = other DNA

SEQ ID NO: 1134 - protein, 11 aa, synthetic construct
  REGION 1..11: note = Description of Artificial Sequence: Synthetic peptide
SGDKLGDKYAY

SEQ ID NO: 1135 - DNA, 48 bp, synthetic construct
  misc_feature 1..48: note = Description of Artificial Sequence: Synthetic oligonucleotide
  source 1..48: mol_type = other DNA
aggtctagtcaaagcctcatatacagtgatggaaacaccttcttgaat

SEQ ID NO: 1136 - protein, 16 aa, synthetic construct
  REGION 1..16: note = Description of Artificial Sequence: Synthetic peptide
RSSQSLIYSDGNTFLN

SEQ ID NO: 1137 - DNA, 51 bp, synthetic construct
  misc_feature 1..51: note = Description of Artificial Sequence: Synthetic oligonucleotide
  source 1..51: mol_type = other DNA
aagtccagccagagtgttttacacagctccaacaattataactacttagct

SEQ ID NO: 1138 - protein, 17 aa, synthetic construct
  REGION 1..17: note = Description of Artificial Sequence: Synthetic peptide
KSSQSVLHSSNNYNYLA

SEQ ID NO: 1139 - DNA, 51 bp, synthetic construct; identical to SEQ ID NO: 479
  misc_feature 1..51: note = Description of Artificial Sequence: Synthetic oligonucleotide
  source 1..51: mol_type = other DNA

SEQ ID NO: 1140 - protein, 17 aa, synthetic construct
  REGION 1..17: note = Description of Artificial Sequence: Synthetic peptide
KSSQSVLYSSHNNNYLA

SEQ ID NO: 1141 - DNA, 33 bp, synthetic construct; identical to SEQ ID NO: 871
  misc_feature 1..33: note = Description of Artificial Sequence: Synthetic oligonucleotide
  source 1..33: mol_type = other DNA

SEQ ID NO: 1142 - protein, 11 aa, synthetic construct
  REGION 1..11: note = Description of Artificial Sequence: Synthetic peptide
RASQNIISYLN

SEQ ID NO: 1143 - DNA, 33 bp, synthetic construct; identical to SEQ ID NO: 95
  misc_feature 1..33: note = Description of Artificial Sequence: Synthetic oligonucleotide
  source 1..33: mol_type = other DNA

SEQ ID NO: 1144 - protein, 11 aa, synthetic construct
  REGION 1..11: note = Description of Artificial Sequence: Synthetic peptide
RASQGISKWLA

SEQ ID NO: 1145 - DNA, 33 bp, synthetic construct; identical to SEQ ID NO: 171
  misc_feature 1..33: note = Description of Artificial Sequence: Synthetic oligonucleotide
  source 1..33: mol_type = other DNA

SEQ ID NO: 1146 - protein, 11 aa, synthetic construct
  REGION 1..11: note = Description of Artificial Sequence: Synthetic peptide
RASQGISSWLA

SEQ ID NO: 1147 - DNA, 51 bp, synthetic construct
  misc_feature 1..51: note = Description of Artificial Sequence: Synthetic oligonucleotide
  source 1..51: mol_type = other DNA
aagtccagccagactgttttattcagctccaacaataaccactacttagca

SEQ ID NO: 1148 - protein, 17 aa, synthetic construct
  REGION 1..17: note = Description of Artificial Sequence: Synthetic peptide
KSSQTVLFSSNNNHYLA

SEQ ID NO: 1149 - DNA, 33 bp, synthetic construct; identical to SEQ ID NO: 109
  misc_feature 1..33: note = Description of Artificial Sequence: Synthetic oligonucleotide
  source 1..33: mol_type = other DNA

SEQ ID NO: 1150 - protein, 11 aa, synthetic construct
  REGION 1..11: note = Description of Artificial Sequence: Synthetic peptide
RASQGIRNDLG

SEQ ID NO: 1151 - DNA, 33 bp, synthetic construct; identical to SEQ ID NO: 519
  misc_feature 1..33: note = Description of Artificial Sequence: Synthetic oligonucleotide
  source 1..33: mol_type = other DNA

SEQ ID NO: 1152 - protein, 11 aa, synthetic construct
  REGION 1..11: note = Description of Artificial Sequence: Synthetic peptide
RASQAIRNDLG

SEQ ID NO: 1153 - DNA, 33 bp, synthetic construct; identical to SEQ ID NO: 547
  misc_feature 1..33: note = Description of Artificial Sequence: Synthetic oligonucleotide
  source 1..33: mol_type = other DNA

SEQ ID NO: 1154 - protein, 11 aa, synthetic construct
  REGION 1..11: note = Description of Artificial Sequence: Synthetic peptide
RASQNIYSYLN

SEQ ID NO: 1155 - DNA, 33 bp, synthetic construct; identical to SEQ ID NO: 361
  misc_feature 1..33: note = Description of Artificial Sequence: Synthetic oligonucleotide
  source 1..33: mol_type = other DNA

SEQ ID NO: 1156 - protein, 11 aa, synthetic construct
  REGION 1..11: note = Description of Artificial Sequence: Synthetic peptide
RASQNIISYLN

SEQ ID NO: 1157 - DNA, 51 bp, synthetic construct
  misc_feature 1..51: note = Description of Artificial Sequence: Synthetic oligonucleotide
  source 1..51: mol_type = other DNA
aagtccagccagagtgttttacacaactccaacaattataactatttagct

SEQ ID NO: 1158 - protein, 17 aa, synthetic construct
  REGION 1..17: note = Description of Artificial Sequence: Synthetic peptide
KSSQSVLHNSNNYNYLA

SEQ ID NO: 1159 - DNA, 33 bp, synthetic construct; identical to SEQ ID NO: 109
  misc_feature 1..33: note = Description of Artificial Sequence: Synthetic oligonucleotide
  source 1..33: mol_type = other DNA

SEQ ID NO: 1160 - protein, 11 aa, synthetic construct
  REGION 1..11: note = Description of Artificial Sequence: Synthetic peptide
RASQGIRNDLG

SEQ ID NO: 1161 - DNA, 33 bp, synthetic construct
  misc_feature 1..33: note = Description of Artificial Sequence: Synthetic oligonucleotide
  source 1..33: mol_type = other DNA
cgggcgagtcagggtattagcgactggttagcc

SEQ ID NO: 1162 - protein, 11 aa, synthetic construct
  REGION 1..11: note = Description of Artificial Sequence: Synthetic peptide
RASQGISDWLA

SEQ ID NO: 1163 - DNA, 33 bp, synthetic construct; identical to SEQ ID NO: 109
  misc_feature 1..33: note = Description of Artificial Sequence: Synthetic oligonucleotide
  source 1..33: mol_type = other DNA

SEQ ID NO: 1164 - protein, 11 aa, synthetic construct
  REGION 1..11: note = Description of Artificial Sequence: Synthetic peptide
RASQGIRNDLG

SEQ ID NO: 1165 - DNA, 33 bp, synthetic construct; identical to SEQ ID NO: 293
  misc_feature 1..33: note = Description of Artificial Sequence: Synthetic oligonucleotide
  source 1..33: mol_type = other DNA

SEQ ID NO: 1166 - protein, 11 aa, synthetic construct
  REGION 1..11: note = Description of Artificial Sequence: Synthetic peptide
RASQGINNYLA

SEQ ID NO: 1167 - DNA, 33 bp, synthetic construct
  misc_feature 1..33: note = Description of Artificial Sequence: Synthetic oligonucleotide
  source 1..33: mol_type = other DNA
cgggcgagtcagggtattatcaactggttagcc

SEQ ID NO: 1168 - protein, 11 aa, synthetic construct
  REGION 1..11: note = Description of Artificial Sequence: Synthetic peptide
RASQGIINWLA

SEQ ID NO: 1169 - DNA, 33 bp, synthetic construct; identical to SEQ ID NO: 109
  misc_feature 1..33: note = Description of Artificial Sequence: Synthetic oligonucleotide
  source 1..33: mol_type = other DNA

SEQ ID NO: 1170 - protein, 11 aa, synthetic construct
  REGION 1..11: note = Description of Artificial Sequence: Synthetic peptide
RASQGIRNDLG

SEQ ID NO: 1171 - DNA, 51 bp, synthetic construct
  misc_feature 1..51: note = Description of Artificial Sequence: Synthetic oligonucleotide
  source 1..51: mol_type = other DNA
aagtccagccagagtgttttaatgacctccaacgataagaactacttaact

SEQ ID NO: 1172 - protein, 17 aa, synthetic construct
  REGION 1..17: note = Description of Artificial Sequence: Synthetic peptide
KSSQSVLMTSNDKNYLT

SEQ ID NO: 1173 - DNA, 33 bp, synthetic construct; identical to SEQ ID NO: 553
  misc_feature 1..33: note = Description of Artificial Sequence: Synthetic oligonucleotide
  source 1..33: mol_type = other DNA

SEQ ID NO: 1174 - protein, 11 aa, synthetic construct
  REGION 1..11: note = Description of Artificial Sequence: Synthetic peptide
RASQGISNWLA

SEQ ID NO: 1175 - DNA, 33 bp, synthetic construct; identical to SEQ ID NO: 109
  misc_feature 1..33: note = Description of Artificial Sequence: Synthetic oligonucleotide
  source 1..33: mol_type = other DNA

SEQ ID NO: 1176 - protein, 11 aa, synthetic construct
  REGION 1..11: note = Description of Artificial Sequence: Synthetic peptide
RASQGIRNDLG

SEQ ID NO: 1177 - DNA, 33 bp, synthetic construct
  misc_feature 1..33: note = Description of Artificial Sequence: Synthetic oligonucleotide
  source 1..33: mol_type = other DNA
cgggcgagtcaggatattagcagctggttagcc

SEQ ID NO: 1178 - protein, 11 aa, synthetic construct
  REGION 1..11: note = Description of Artificial Sequence: Synthetic peptide
RASQDISSWLA

SEQ ID NO: 1179 - DNA, 48 bp, synthetic construct
  misc_feature 1..48: note = Description of Artificial Sequence: Synthetic oligonucleotide
  source 1..48: mol_type = other DNA
aagtctagtcagagcctcctgcacagtgatggaaggacctatttgtat

SEQ ID NO: 1180 - protein, 16 aa, synthetic construct
  REGION 1..16: note = Description of Artificial Sequence: Synthetic peptide
KSSQSLLHSDGRTYLY

SEQ ID NO: 1181 - DNA, 33 bp, synthetic construct; identical to SEQ ID NO: 109
  misc_feature 1..33: note = Description of Artificial Sequence: Synthetic oligonucleotide
  source 1..33: mol_type = other DNA

SEQ ID NO: 1182 - protein, 11 aa, synthetic construct
  REGION 1..11: note = Description of Artificial Sequence: Synthetic peptide
RASQGIRNDLG

SEQ ID NO: 1183 - DNA, 33 bp, synthetic construct; identical to SEQ ID NO: 109
  misc_feature 1..33: note = Description of Artificial Sequence: Synthetic oligonucleotide
  source 1..33: mol_type = other DNA

SEQ ID NO: 1184 - protein, 11 aa, synthetic construct
  REGION 1..11: note = Description of Artificial Sequence: Synthetic peptide
RASQGIRNDLG

SEQ ID NO: 1185 - DNA, 33 bp, synthetic construct
  misc_feature 1..33: note = Description of Artificial Sequence: Synthetic oligonucleotide
  source 1..33: mol_type = other DNA
cgggcaagtcagggcattagagatgatttaggc

SEQ ID NO: 1186 - protein, 11 aa, synthetic construct
  REGION 1..11: note = Description of Artificial Sequence: Synthetic peptide
RASQGIRDDLG

SEQ ID NO: 1187 - DNA, 33 bp, synthetic construct; identical to SEQ ID NO: 1161
  misc_feature 1..33: note = Description of Artificial Sequence: Synthetic oligonucleotide
  source 1..33: mol_type = other DNA

SEQ ID NO: 1188 - protein, 11 aa, synthetic construct
  REGION 1..11: note = Description of Artificial Sequence: Synthetic peptide
RASQGISDWLA

SEQ ID NO: 1189 - DNA, 33 bp, synthetic construct
  misc_feature 1..33: note = Description of Artificial Sequence: Synthetic oligonucleotide
  source 1..33: mol_type = other DNA
cgggcaagtcaggacattagaaaagatttaggc

SEQ ID NO: 1190 - protein, 11 aa, synthetic construct
  REGION 1..11: note = Description of Artificial Sequence: Synthetic peptide
RASQDIRKDLG

SEQ ID NO: 1191 - DNA, 36 bp, synthetic construct
  misc_feature 1..36: note = Description of Artificial Sequence: Synthetic oligonucleotide
  source 1..36: mol_type = other DNA
agggccagtcagagtgttagtggaagctacttagcc

SEQ ID NO: 1192 - protein, 12 aa, synthetic construct
  REGION 1..12: note = Description of Artificial Sequence: Synthetic peptide
RASQSVSGSYLA

SEQ ID NO: 1193 - DNA, 33 bp, synthetic construct; identical to SEQ ID NO: 109
  misc_feature 1..33: note = Description of Artificial Sequence: Synthetic oligonucleotide
  source 1..33: mol_type = other DNA

SEQ ID NO: 1194 - protein, 11 aa, synthetic construct
  REGION 1..11: note = Description of Artificial Sequence: Synthetic peptide
RASQGIRNDLG

SEQ ID NO: 1195 - DNA, 33 bp, synthetic construct; identical to SEQ ID NO: 109
  misc_feature 1..33: note = Description of Artificial Sequence: Synthetic oligonucleotide
  source 1..33: mol_type = other DNA

SEQ ID NO: 1196 - protein, 11 aa, synthetic construct
  REGION 1..11: note = Description of Artificial Sequence: Synthetic peptide
RASQGIRNDLG

SEQ ID NO: 1197 - DNA, 48 bp, synthetic construct
  misc_feature 1..48: note = Description of Artificial Sequence: Synthetic oligonucleotide
  source 1..48: mol_type = other DNA
aagtctagtcagagcctcctgcatagtgagggaaggacctatttgtat

SEQ ID NO: 1198 - protein, 16 aa, synthetic construct
  REGION 1..16: note = Description of Artificial Sequence: Synthetic peptide
KSSQSLLHSEGRTYLY

SEQ ID NO: 1199 - DNA, 33 bp, synthetic construct; identical to SEQ ID NO: 1185
  misc_feature 1..33: note = Description of Artificial Sequence: Synthetic oligonucleotide
  source 1..33: mol_type = other DNA

SEQ ID NO: 1200 - protein, 11 aa, synthetic construct
  REGION 1..11: note = Description of Artificial Sequence: Synthetic peptide
RASQGIRDDLG

SEQ ID NO: 1201 - DNA, 33 bp, synthetic construct; identical to SEQ ID NO: 1161
  misc_feature 1..33: note = Description of Artificial Sequence: Synthetic oligonucleotide
  source 1..33: mol_type = other DNA

SEQ ID NO: 1202 - protein, 11 aa, synthetic construct
  REGION 1..11: note = Description of Artificial Sequence: Synthetic peptide
RASQGISDWLA

SEQ ID NO: 1203 - DNA, 48 bp, synthetic construct
  misc_feature 1..48: note = Description of Artificial Sequence: Synthetic oligonucleotide
  source 1..48: mol_type = other DNA
aggtctagtcagagcctcctgcatagtaatggatacagctatttggag

SEQ ID NO: 1204 - protein, 16 aa, synthetic construct
  REGION 1..16: note = Description of Artificial Sequence: Synthetic peptide
RSSQSLLHSNGYSYLE

SEQ ID NO: 1205 - DNA, 33 bp, synthetic construct; identical to SEQ ID NO: 553
  misc_feature 1..33: note = Description of Artificial Sequence: Synthetic oligonucleotide
  source 1..33: mol_type = other DNA

SEQ ID NO: 1206 - protein, 11 aa, synthetic construct
  REGION 1..11: note = Description of Artificial Sequence: Synthetic peptide
RASQGISNWLA

SEQ ID NO: 1207 - DNA, 33 bp, synthetic construct; identical to SEQ ID NO: 93
  misc_feature 1..33: note = Description of Artificial Sequence: Synthetic oligonucleotide
  source 1..33: mol_type = other DNA

SEQ ID NO: 1208 - protein, 11 aa, synthetic construct
  REGION 1..11: note = Description of Artificial Sequence: Synthetic peptide
RTSQGIRNDLG

SEQ ID NO: 1209 - DNA, 33 bp, synthetic construct; identical to SEQ ID NO: 109
  misc_feature 1..33: note = Description of Artificial Sequence: Synthetic oligonucleotide
  source 1..33: mol_type = other DNA

SEQ ID NO: 1210 - protein, 11 aa, synthetic construct
  REGION 1..11: note = Description of Artificial Sequence: Synthetic peptide
RASQGIRNDLG

SEQ ID NO: 1211 - DNA, 33 bp, synthetic construct; identical to SEQ ID NO: 1185
  misc_feature 1..33: note = Description of Artificial Sequence: Synthetic oligonucleotide
  source 1..33: mol_type = other DNA

SEQ ID NO: 1212 - protein, 11 aa, synthetic construct
  REGION 1..11: note = Description of Artificial Sequence: Synthetic peptide
RASQGIRDDLG

SEQ ID NO: 1213 - DNA, 33 bp, synthetic construct; identical to SEQ ID NO: 1177
  misc_feature 1..33: note = Description of Artificial Sequence: Synthetic oligonucleotide
  source 1..33: mol_type = other DNA

SEQ ID NO: 1214 - protein, 11 aa, synthetic construct
  REGION 1..11: note = Description of Artificial Sequence: Synthetic peptide
RASQDISSWLA

SEQ ID NO: 1215 - DNA, 33 bp, synthetic construct; identical to SEQ ID NO: 491
  misc_feature 1..33: note = Description of Artificial Sequence: Synthetic oligonucleotide
  source 1..33: mol_type = other DNA

SEQ ID NO: 1216 - protein, 11 aa, synthetic construct
  REGION 1..11: note = Description of Artificial Sequence: Synthetic peptide
RASQDIRDDLG

SEQ ID NO: 1217 - DNA, 33 bp, synthetic construct; identical to SEQ ID NO: 1161
  misc_feature 1..33: note = Description of Artificial Sequence: Synthetic oligonucleotide
  source 1..33: mol_type = other DNA

SEQ ID NO: 1218 - protein, 11 aa, synthetic construct
  REGION 1..11: note = Description of Artificial Sequence: Synthetic peptide
RASQGISDWLA

SEQ ID NO: 1219 - DNA, 33 bp, synthetic construct
  misc_feature 1..33: note = Description of Artificial Sequence: Synthetic oligonucleotide
  source 1..33: mol_type = other DNA
cgggcgagtcaggatattagcgactggttagct

SEQ ID NO: 1220 - protein, 11 aa, synthetic construct
  REGION 1..11: note = Description of Artificial Sequence: Synthetic peptide
RASQDISDWLA

SEQ ID NO: 1221 - DNA, 33 bp, synthetic construct; identical to SEQ ID NO: 293
  misc_feature 1..33: note = Description of Artificial Sequence: Synthetic oligonucleotide
  source 1..33: mol_type = other DNA

SEQ ID NO: 1222 - protein, 11 aa, synthetic construct
  REGION 1..11: note = Description of Artificial Sequence: Synthetic peptide
RASQGINNYLA

SEQ ID NO: 1223 - DNA, 33 bp, synthetic construct; identical to SEQ ID NO: 109
  misc_feature 1..33: note = Description of Artificial Sequence: Synthetic oligonucleotide
  source 1..33: mol_type = other DNA

SEQ ID NO: 1224 - protein, 11 aa, synthetic construct
  REGION 1..11: note = Description of Artificial Sequence: Synthetic peptide
RASQGIRNDLG

SEQ ID NO: 1225 - DNA, 48 bp, synthetic construct
  misc_feature 1..48: note = Description of Artificial Sequence: Synthetic oligonucleotide
  source 1..48: mol_type = other DNA
aagtctagtcagagcctcctgcatggtgatggaaagacatatttgtat

SEQ ID NO: 1226 - protein, 16 aa, synthetic construct
  REGION 1..16: note = Description of Artificial Sequence: Synthetic peptide
KSSQSLLHGDGKTYLY

SEQ ID NO: 1227 - DNA, 33 bp, synthetic construct; identical to SEQ ID NO: 1185
  misc_feature 1..33: note = Description of Artificial Sequence: Synthetic oligonucleotide
  source 1..33: mol_type = other DNA

SEQ ID NO: 1228 - protein, 11 aa, synthetic construct
  REGION 1..11: note = Description of Artificial Sequence: Synthetic peptide
RASQGIRDDLG

SEQ ID NO: 1229 - DNA, 33 bp, synthetic construct
  misc_feature 1..33: note = Description of Artificial Sequence: Synthetic oligonucleotide
  source 1..33: mol_type = other DNA
cgggcaagtcagggcattagaaaagatttaggc

SEQ ID NO: 1230 - protein, 11 aa, synthetic construct
  REGION 1..11: note = Description of Artificial Sequence: Synthetic peptide
RASQGIRKDLG

SEQ ID NO: 1231 - DNA, 33 bp, synthetic construct
  misc_feature 1..33: note = Description of Artificial Sequence: Synthetic oligonucleotide
  source 1..33: mol_type = other DNA
cggacaagtcaggacattagaaaagatttaggc

SEQ ID NO: 1232 - protein, 11 aa, synthetic construct
  REGION 1..11: note = Description of Artificial Sequence: Synthetic peptide
RTSQDIRKDLG

SEQ ID NO: 1233 - DNA, 33 bp, synthetic construct; identical to SEQ ID NO: 553
  misc_feature 1..33: note = Description of Artificial Sequence: Synthetic oligonucleotide
  source 1..33: mol_type = other DNA

SEQ ID NO: 1234 - protein, 11 aa, synthetic construct
  REGION 1..11: note = Description of Artificial Sequence: Synthetic peptide
RASQGISNWLA

SEQ ID NO: 1235 - DNA, 33 bp, synthetic construct; identical to SEQ ID NO: 109
  misc_feature 1..33: note = Description of Artificial Sequence: Synthetic oligonucleotide
  source 1..33: mol_type = other DNA

SEQ ID NO: 1236 - protein, 11 aa, synthetic construct
  REGION 1..11: note = Description of Artificial Sequence: Synthetic peptide
RASQGIRNDLG

SEQ ID NO: 1237 - DNA, 33 bp, synthetic construct; identical to SEQ ID NO: 1229
  misc_feature 1..33: note = Description of Artificial Sequence: Synthetic oligonucleotide
  source 1..33: mol_type = other DNA

SEQ ID NO: 1238 - protein, 11 aa, synthetic construct
  REGION 1..11: note = Description of Artificial Sequence: Synthetic peptide
RASQGIRKDLG

SEQ ID NO: 1239 - DNA, 48 bp, synthetic construct; identical to SEQ ID NO: 555
  misc_feature 1..48: note = Description of Artificial Sequence: Synthetic oligonucleotide
  source 1..48: mol_type = other DNA

SEQ ID NO: 1240 - protein, 16 aa, synthetic construct
  REGION 1..16: note = Description of Artificial Sequence: Synthetic peptide
KSSQSLLHSEGKTYLY

SEQ ID NO: 1241 - DNA, 33 bp, synthetic construct; identical to SEQ ID NO: 109
  misc_feature 1..33: note = Description of Artificial Sequence: Synthetic oligonucleotide
  source 1..33: mol_type = other DNA

SEQ ID NO: 1242 - protein, 11 aa, synthetic construct
  REGION 1..11: note = Description of Artificial Sequence: Synthetic peptide
RASQGIRNDLG

SEQ ID NO: 1243 - DNA, 33 bp, synthetic construct; identical to SEQ ID NO: 205
  misc_feature 1..33: note = Description of Artificial Sequence: Synthetic oligonucleotide
  source 1..33: mol_type = other DNA

SEQ ID NO: 1244 - protein, 11 aa, synthetic construct
  REGION 1..11: note = Description of Artificial Sequence: Synthetic peptide
RASQDIRNDLG

SEQ ID NO: 1245 - DNA, 48 bp, synthetic construct
  misc_feature 1..48: note = Description of Artificial Sequence: Synthetic oligonucleotide
  source 1..48: mol_type = other DNA
acgtctagtcagagcctcctgcatagtgaaggaaagacctatttgtat

SEQ ID NO: 1246 - protein, 16 aa, synthetic construct
  REGION 1..16: note = Description of Artificial Sequence: Synthetic peptide
TSSQSLLHSEGKTYLY

SEQ ID NO: 1247 - DNA, 33 bp, synthetic construct; identical to SEQ ID NO: 109
  misc_feature 1..33: note = Description of Artificial Sequence: Synthetic oligonucleotide
  source 1..33: mol_type = other DNA

SEQ ID NO: 1248 - protein, 11 aa, synthetic construct
  REGION 1..11: note = Description of Artificial Sequence: Synthetic peptide
RASQGIRNDLG

SEQ ID NO: 1249 - DNA, 48 bp, synthetic construct
  misc_feature 1..48: note = Description of Artificial Sequence: Synthetic oligonucleotide
  source 1..48: mol_type = other DNA
aggtctagtcagagcctcctgcatagtaatggatacaactatttggaa

SEQ ID NO: 1250 - protein, 16 aa, synthetic construct
  REGION 1..16: note = Description of Artificial Sequence: Synthetic peptide
RSSQSLLHSNGYNYLE

SEQ ID NO: 1251 - DNA, 48 bp, synthetic construct
  misc_feature 1..48: note = Description of Artificial Sequence: Synthetic oligonucleotide
  source 1..48: mol_type = other DNA
aagtctagtcagagcctcctgcatagtgatggaaggacctatttgtat

SEQ ID NO: 1252 - protein, 16 aa, synthetic construct
  REGION 1..16: note = Description of Artificial Sequence: Synthetic peptide
KSSQSLLHSDGRTYLY

SEQ ID NO: 1253 - DNA, 33 bp, synthetic construct; identical to SEQ ID NO: 553
  misc_feature 1..33: note = Description of Artificial Sequence: Synthetic oligonucleotide
  source 1..33: mol_type = other DNA

SEQ ID NO: 1254 - protein, 11 aa, synthetic construct
  REGION 1..11: note = Description of Artificial Sequence: Synthetic peptide
RASQGISNWLA

SEQ ID NO: 1255 - DNA, 33 bp, synthetic construct; identical to SEQ ID NO: 93
  misc_feature 1..33: note = Description of Artificial Sequence: Synthetic oligonucleotide
  source 1..33: mol_type = other DNA

SEQ ID NO: 1256 - protein, 11 aa, synthetic construct
  REGION 1..11: note = Description of Artificial Sequence: Synthetic peptide
RTSQGIRNDLG

SEQ ID NO: 1257 - DNA, 33 bp, synthetic construct; identical to SEQ ID NO: 93
  misc_feature 1..33: note = Description of Artificial Sequence: Synthetic oligonucleotide
  source 1..33: mol_type = other DNA

SEQ ID NO: 1258 - protein, 11 aa, synthetic construct
  REGION 1..11: note = Description of Artificial Sequence: Synthetic peptide
RTSQGIRNDLG

SEQ ID NO: 1259 - DNA, 33 bp, synthetic construct
  misc_feature 1..33: note = Description of Artificial Sequence: Synthetic oligonucleotide
  source 1..33: mol_type = other DNA
cgggcaagtcagagcattagcagctatttaatt

SEQ ID NO: 1260 - protein, 11 aa, synthetic construct
  REGION 1..11: note = Description of Artificial Sequence: Synthetic peptide
RASQSISSYLI

SEQ ID NO: 1261 - DNA, 33 bp, synthetic construct; identical to SEQ ID NO: 147
  misc_feature 1..33: note = Description of Artificial Sequence: Synthetic oligonucleotide
  source 1..33: mol_type = other DNA

SEQ ID NO: 1262 - protein, 11 aa, synthetic construct
  REGION 1..11: note = Description of Artificial Sequence: Synthetic peptide
RASRGIRDDLG

SEQ ID NO: 1263 - DNA, 33 bp, synthetic construct
  misc_feature 1..33: note = Description of Artificial Sequence: Synthetic oligonucleotide
  source 1..33: mol_type = other DNA
cgggcaagtcagagcattatcagctatttaatt

SEQ ID NO: 1264 - protein, 11 aa, synthetic construct
  REGION 1..11: note = Description of Artificial Sequence: Synthetic peptide
RASQSIISYLI

SEQ ID NO: 1265 - DNA, 33 bp, synthetic construct
  misc_feature 1..33: note = Description of Artificial Sequence: Synthetic oligonucleotide
  source 1..33: mol_type = other DNA
cgggcgagtcaaaatattaccagctggttagcc

SEQ ID NO: 1266 - protein, 11 aa, synthetic construct
  REGION 1..11: note = Description of Artificial Sequence: Synthetic peptide
RASQNITSWLA

SEQ ID NO: 1267 - DNA, 33 bp, synthetic construct; identical to SEQ ID NO: 109
  misc_feature 1..33: note = Description of Artificial Sequence: Synthetic oligonucleotide
  source 1..33: mol_type = other DNA

SEQ ID NO: 1268 - protein, 11 aa, synthetic construct
  REGION 1..11: note = Description of Artificial Sequence: Synthetic peptide
RASQGIRNDLG

SEQ ID NO: 1269 - DNA, 33 bp, synthetic construct
  misc_feature 1..33: note = Description of Artificial Sequence: Synthetic oligonucleotide
  source 1..33: mol_type = other DNA
cgggcaagtcagagcattaggaagtatttaaat

SEQ ID NO: 1270 - protein, 11 aa, synthetic construct
  REGION 1..11: note = Description of Artificial Sequence: Synthetic peptide
RASQSIRKYLN

SEQ ID NO: 1271 - DNA, 33 bp, synthetic construct; identical to SEQ ID NO: 109
  misc_feature 1..33: note = Description of Artificial Sequence: Synthetic oligonucleotide
  source 1..33: mol_type = other DNA

SEQ ID NO: 1272 - protein, 11 aa, synthetic construct
  REGION 1..11: note = Description of Artificial Sequence: Synthetic peptide
RASQGIRNDLG

SEQ ID NO: 1273 - DNA, 33 bp, synthetic construct; identical to SEQ ID NO: 1269
  misc_feature 1..33: note = Description of Artificial Sequence: Synthetic oligonucleotide
  source 1..33: mol_type = other DNA

SEQ ID NO: 1274 - protein, 11 aa, synthetic construct
  REGION 1..11: note = Description of Artificial Sequence: Synthetic peptide
RASQSIRKYLN

SEQ ID NO: 1275 - DNA, 33 bp, synthetic construct; identical to SEQ ID NO: 1269
  misc_feature 1..33: note = Description of Artificial Sequence: Synthetic oligonucleotide
  source 1..33: mol_type = other DNA

SEQ ID NO: 1276 - protein, 11 aa, synthetic construct
  REGION 1..11: note = Description of Artificial Sequence: Synthetic peptide
RASQSIRKYLN

SEQ ID NO: 1277 - DNA, 33 bp, synthetic construct; identical to SEQ ID NO: 371
  misc_feature 1..33: note = Description of Artificial Sequence: Synthetic oligonucleotide
  source 1..33: mol_type = other DNA

SEQ ID NO: 1278 - protein, 11 aa, synthetic construct
  REGION 1..11: note = Description of Artificial Sequence: Synthetic peptide
RASQGIRNDLD

SEQ ID NO: 1279 - DNA, 48 bp, synthetic construct
  misc_feature 1..48: note = Description of Artificial Sequence: Synthetic oligonucleotide
  source 1..48: mol_type = other DNA
aagtctagtcagagcctcctgcatagggaaggaaagacctatttgtac

SEQ ID NO: 1280 - protein, 16 aa, synthetic construct
  REGION 1..16: note = Description of Artificial Sequence: Synthetic peptide
KSSQSLLHREGKTYLY

SEQ ID NO: 1281 - DNA, 33 bp, synthetic construct
  misc_feature 1..33: note = Description of Artificial Sequence: Synthetic oligonucleotide
  source 1..33: mol_type = other DNA
cgggcgagtcgggatattaacggctggttagcc

SEQ ID NO: 1282 - protein, 11 aa, synthetic construct
  REGION 1..11: note = Description of Artificial Sequence: Synthetic peptide
RASRDINGWLA

SEQ ID NO: 1283 - DNA, 48 bp, synthetic construct; identical to SEQ ID NO: 103
  misc_feature 1..48: note = Description of Artificial Sequence: Synthetic oligonucleotide
  source 1..48: mol_type = other DNA

SEQ ID NO: 1284 - protein, 16 aa, synthetic construct
  REGION 1..16: note = Description of Artificial Sequence: Synthetic peptide
KSSQSLLHSEGKTYLY

SEQ ID NO: 1285 - DNA, 33 bp, synthetic construct
  misc_feature 1..33: note = Description of Artificial Sequence: Synthetic oligonucleotide
  source 1..33: mol_type = other DNA
cgggcgagtcagggttttagcacctggttagcc

SEQ ID NO: 1286 - protein, 11 aa, synthetic construct
  REGION 1..11: note = Description of Artificial Sequence: Synthetic peptide
RASQGFSTWLA

SEQ ID NO: 1287 - DNA, 33 bp, synthetic construct; identical to SEQ ID NO: 109
  misc_feature 1..33: note = Description of Artificial Sequence: Synthetic oligonucleotide
  source 1..33: mol_type = other DNA

SEQ ID NO: 1288 - protein, 11 aa, synthetic construct
  REGION 1..11: note = Description of Artificial Sequence: Synthetic peptide
RASQGIRNDLG

SEQ ID NO: 1289 - DNA, 48 bp, synthetic construct
  misc_feature 1..48: note = Description of Artificial Sequence: Synthetic oligonucleotide
  source 1..48: mol_type = other DNA
aagtctagtcagatcttcttgcatagtgaaggaaagacctatttgtat

SEQ ID NO: 1290 - protein, 16 aa, synthetic construct
  REGION 1..16: note = Description of Artificial Sequence: Synthetic peptide
KSSQIFLHSEGKTYLY

SEQ ID NO: 1291 - DNA, 48 bp, synthetic construct
  misc_feature 1..48: note = Description of Artificial Sequence: Synthetic oligonucleotide
  source 1..48: mol_type = other DNA
aagtctaatcagagcctcgtgcataatgaaggaaagacctatttgtat

SEQ ID NO: 1292 - protein, 16 aa, synthetic construct
  REGION 1..16: note = Description of Artificial Sequence: Synthetic peptide
KSNQSLVHNEGKTYLY

SEQ ID NO: 1293 - DNA, 33 bp, synthetic construct; identical to SEQ ID NO: 173
  misc_feature 1..33: note = Description of Artificial Sequence: Synthetic oligonucleotide
  source 1..33: mol_type = other DNA

SEQ ID NO: 1294 - protein, 11 aa, synthetic construct
  REGION 1..11: note = Description of Artificial Sequence: Synthetic peptide
RASQGISRWLA

SEQ ID NO: 1295 - DNA, 33 bp, synthetic construct
  misc_feature 1..33: note = Description of Artificial Sequence: Synthetic oligonucleotide
  source 1..33: mol_type = other DNA
cggtcaagtcagagcattagtacctatttaatg

SEQ ID NO: 1296 - protein, 11 aa, synthetic construct
  REGION 1..11: note = Description of Artificial Sequence: Synthetic peptide
RSSQSISTYLM

SEQ ID NO: 1297 - DNA, 33 bp, synthetic construct; identical to SEQ ID NO: 109
  misc_feature 1..33: note = Description of Artificial Sequence: Synthetic oligonucleotide
  source 1..33: mol_type = other DNA

SEQ ID NO: 1298 - protein, 11 aa, synthetic construct
  REGION 1..11: note = Description of Artificial Sequence: Synthetic peptide
RASQGIRNDLG

SEQ ID NO: 1299 - DNA, 33 bp, synthetic construct; identical to SEQ ID NO: 1259
  misc_feature 1..33: note = Description of Artificial Sequence: Synthetic oligonucleotide
  source 1..33: mol_type = other DNA

SEQ ID NO: 1300 - protein, 11 aa, synthetic construct
  REGION 1..11: note = Description of Artificial Sequence: Synthetic peptide
RASQSISSYLI

SEQ ID NO: 1301 - DNA, 33 bp, synthetic construct
  misc_feature 1..33: note = Description of Artificial Sequence: Synthetic oligonucleotide
  source 1..33: mol_type = other DNA
cgggcaagtcagggcattagaaataatttaggc

SEQ ID NO: 1302 - protein, 11 aa, synthetic construct
  REGION 1..11: note = Description of Artificial Sequence: Synthetic peptide
RASQGIRNNLG

SEQ ID NO: 1303 - DNA, 33 bp, synthetic construct
  misc_feature 1..33: note = Description of Artificial Sequence: Synthetic oligonucleotide
  source 1..33: mol_type = other DNA
cgggcaagtcagagcatttacagctatttaatt

SEQ ID NO: 1304 - protein, 11 aa, synthetic construct
  REGION 1..11: note = Description of Artificial Sequence: Synthetic peptide
RASQSIYSYLI

SEQ ID NO: 1305 - DNA, 33 bp, synthetic construct; identical to SEQ ID NO: 109
  misc_feature 1..33: note = Description of Artificial Sequence: Synthetic oligonucleotide
  source 1..33: mol_type = other DNA

SEQ ID NO: 1306 - protein, 11 aa, synthetic construct
  REGION 1..11: note = Description of Artificial Sequence: Synthetic peptide
RASQGIRNDLG

SEQ ID NO: 1307 - DNA, 33 bp, synthetic construct; identical to SEQ ID NO: 289
  misc_feature 1..33: note = Description of Artificial Sequence: Synthetic oligonucleotide
  source 1..33: mol_type = other DNA

SEQ ID NO: 1308 - protein, 11 aa, synthetic construct
  REGION 1..11: note = Description of Artificial Sequence: Synthetic peptide
RASQSISSYLN

SEQ ID NO: 1309 - DNA, 48 bp, synthetic construct; identical to SEQ ID NO: 555
  misc_feature 1..48: note = Description of Artificial Sequence: Synthetic oligonucleotide
  source 1..48: mol_type = other DNA

SEQ ID NO: 1310 - protein, 16 aa, synthetic construct
  REGION 1..16: note = Description of Artificial Sequence: Synthetic peptide
KSSQSLLHSEGKTYLY

SEQ ID NO: 1311 - DNA, 33 bp, synthetic construct
  misc_feature 1..33: note = Description of Artificial Sequence: Synthetic oligonucleotide
  source 1..33: mol_type = other DNA
caggcgagtcgggacattaccttctatttaaat

SEQ ID NO: 1312 - protein, 11 aa, synthetic construct
  REGION 1..11: note = Description of Artificial Sequence: Synthetic peptide
QASRDITFYLN

SEQ ID NO: 1313 - DNA, 33 bp, synthetic construct; identical to SEQ ID NO: 109
  misc_feature 1..33: note = Description of Artificial Sequence: Synthetic oligonucleotide
  source 1..33: mol_type = other DNA

SEQ ID NO: 1314 - protein, 11 aa, synthetic construct
  REGION 1..11: note = Description of Artificial Sequence: Synthetic peptide
RASQGIRNDLG

SEQ ID NO: 1315 - DNA, 33 bp, synthetic construct; identical to SEQ ID NO: 105
  misc_feature 1..33: note = Description of Artificial Sequence: Synthetic oligonucleotide
  source 1..33: mol_type = other DNA

SEQ ID NO: 1316 - protein, 11 aa, synthetic construct
  REGION 1..11: note = Description of Artificial Sequence: Synthetic peptide
RASQGISNYLA

SEQ ID NO: 1317 - DNA, 33 bp, synthetic construct
  misc_feature 1..33: note = Description of Artificial Sequence: Synthetic oligonucleotide
  source 1..33: mol_type = other DNA
cgggcgagtcaggatgttaacaactacttagcc

SEQ ID NO: 1318 - protein, 11 aa, synthetic construct
  REGION 1..11: note = Description of Artificial Sequence: Synthetic peptide
RASQDVNNYLA

SEQ ID NO: 1319 - DNA, 33 bp, synthetic construct
  misc_feature 1..33: note = Description of Artificial Sequence: Synthetic oligonucleotide
  source 1..33: mol_type = other DNA
cgggcgagtcaggatattagcagttggttagcc

SEQ ID NO: 1320 - protein, 11 aa, synthetic construct
  REGION 1..11: note = Description of Artificial Sequence: Synthetic peptide
RASQDISSWLA

SEQ ID NO: 1321 - DNA, 33 bp, synthetic construct; identical to SEQ ID NO: 173
  misc_feature 1..33: note = Description of Artificial Sequence: Synthetic oligonucleotide
  source 1..33: mol_type = other DNA

SEQ ID NO: 1322 - protein, 11 aa, synthetic construct
  REGION 1..11: note = Description of Artificial Sequence: Synthetic peptide
RASQGISRWLA

SEQ ID NO: 1323 - DNA, 33 bp, synthetic construct
  misc_feature 1..33: note = Description of Artificial Sequence: Synthetic oligonucleotide
  source 1..33: mol_type = other DNA
cgggcaagtcagggcattagaaatgatttgggc

SEQ ID NO: 1324 - protein, 11 aa, synthetic construct
  REGION 1..11: note = Description of Artificial Sequence: Synthetic peptide
RASQGIRNDLG

SEQ ID NO: 1325 - DNA, 33 bp, synthetic construct
  misc_feature 1..33: note = Description of Artificial Sequence: Synthetic oligonucleotide
  source 1..33: mol_type = other DNA
cgggcgagtcagggtattagcagttggttagcc

SEQ ID NO: 1326 - protein, 11 aa, synthetic construct
  REGION 1..11: note = Description of Artificial Sequence: Synthetic peptide
RASQGISSWLA

SEQ ID NO: 1327 - DNA, 33 bp, synthetic construct
  misc_feature 1..33: note = Description of Artificial Sequence: Synthetic oligonucleotide
  source 1..33: mol_type = other DNA
cgggcaagtcagggcattaggactgatttaggc

SEQ ID NO: 1328 - protein, 11 aa, synthetic construct
  REGION 1..11: note = Description of Artificial Sequence: Synthetic peptide
RASQGIRTDLG

SEQ ID NO: 1329 - DNA, 33 bp, synthetic construct
  misc_feature 1..33: note = Description of Artificial Sequence: Synthetic oligonucleotide
  source 1..33: mol_type = other DNA
cgggcaagtcagagcattagtacctatttaatg

SEQ ID NO: 1330 - protein, 11 aa, synthetic construct
  REGION 1..11: note = Description of Artificial Sequence: Synthetic peptide
RASQSISTYLM

SEQ ID NO: 1331 - DNA, 33 bp, synthetic construct; identical to SEQ ID NO: 93
  misc_feature 1..33: note = Description of Artificial Sequence: Synthetic oligonucleotide
  source 1..33: mol_type = other DNA

SEQ ID NO: 1332 - protein, 11 aa, synthetic construct
  REGION 1..11: note = Description of Artificial Sequence: Synthetic peptide
RTSQGIRNDLG

SEQ ID NO: 1333 - DNA, 33 bp, synthetic construct; identical to SEQ ID NO: 109
  misc_feature 1..33: note = Description of Artificial Sequence: Synthetic oligonucleotide
  source 1..33: mol_type = other DNA

SEQ ID NO: 1334 - protein, 11 aa, synthetic construct
  REGION 1..11: note = Description of Artificial Sequence: Synthetic peptide
RASQGIRNDLG

SEQ ID NO: 1335 - DNA, 33 bp, synthetic construct
  misc_feature 1..33: note = Description of Artificial Sequence: Synthetic oligonucleotide
  source 1..33: mol_type = other DNA
cgggcgagtcaggatattcgcacctggttagcc

SEQ ID NO: 1336 - protein, 11 aa, synthetic construct
  REGION 1..11: note = Description of Artificial Sequence: Synthetic peptide
RASQDIRTWLA

SEQ ID NO: 1337 - DNA, 33 bp, synthetic construct; identical to SEQ ID NO: 109
  misc_feature 1..33: note = Description of Artificial Sequence: Synthetic oligonucleotide
  source 1..33: mol_type = other DNA

SEQ ID NO: 1338 - protein, 11 aa, synthetic construct
  REGION 1..11: note = Description of Artificial Sequence: Synthetic peptide
RASQGIRNDLG

SEQ ID NO: 1339 - DNA, 33 bp, synthetic construct
  misc_feature 1..33: note = Description of Artificial Sequence: Synthetic oligonucleotide
  source 1..33: mol_type = other DNA
cgggcgagtcagaatattaccaactggttagcc

SEQ ID NO: 1340 - protein, 11 aa, synthetic construct
  REGION 1..11: note = Description of Artificial Sequence: Synthetic peptide
RASQNITNWLA

SEQ ID NO: 1341 - DNA, 33 bp, synthetic construct; identical to SEQ ID NO: 105
  misc_feature 1..33: note = Description of Artificial Sequence: Synthetic oligonucleotide
  source 1..33: mol_type = other DNA

SEQ ID NO: 1342 - protein, 11 aa, synthetic construct
  REGION 1..11: note = Description of Artificial Sequence: Synthetic peptide
RASQGISNYLA

SEQ ID NO: 1343 - DNA, 33 bp, synthetic construct
  misc_feature 1..33: note = Description of Artificial Sequence: Synthetic oligonucleotide
  source 1..33: mol_type = other DNA
caggcgagtcaggacattagtaactatttacat

SEQ ID NO: 1344 - protein, 11 aa, synthetic construct
  REGION 1..11: note = Description of Artificial Sequence: Synthetic peptide
QASQDISNYLH

SEQ ID NO: 1345 - DNA, 33 bp, synthetic construct; identical to SEQ ID NO: 109
  misc_feature 1..33: note = Description of Artificial Sequence: Synthetic oligonucleotide
  source 1..33: mol_type = other DNA

SEQ ID NO: 1346 - protein, 11 aa, synthetic construct
  REGION 1..11: note = Description of Artificial Sequence: Synthetic peptide
RASQGIRNDLG

SEQ ID NO: 1347 - DNA, 48 bp, synthetic construct; identical to SEQ ID NO: 103
  misc_feature 1..48: note = Description of Artificial Sequence: Synthetic oligonucleotide
  source 1..48: mol_type = other DNA

SEQ ID NO: 1348 - protein, 16 aa, synthetic construct
  REGION 1..16: note = Description of Artificial Sequence: Synthetic peptide
KSSQSLLHSEGKTYLY

SEQ ID NO: 1349 - DNA, 33 bp, synthetic construct
  misc_feature 1..33: note = Description of Artificial Sequence: Synthetic oligonucleotide
  source 1..33: mol_type = other DNA
cgggcgagtcagggtattagtaattatttaggc

SEQ ID NO: 1350 - protein, 11 aa, synthetic construct
  REGION 1..11: note = Description of Artificial Sequence: Synthetic peptide
RASQGISNYLG

SEQ ID NO: 1351 - DNA, 33 bp, synthetic construct
  misc_feature 1..33: note = Description of Artificial Sequence: Synthetic oligonucleotide
  source 1..33: mol_type = other DNA
cgggcgagtcaggatattaacagttggttagcc

SEQ ID NO: 1352 - protein, 11 aa, synthetic construct
  REGION 1..11: note = Description of Artificial Sequence: Synthetic peptide
RASQDINSWLA

SEQ ID NO: 1353 - DNA, 33 bp, synthetic construct
  misc_feature 1..33: note = Description of Artificial Sequence: Synthetic oligonucleotide
  source 1..33: mol_type = other DNA
cgggcaagtcagggcataagaaataatttaggc

SEQ ID NO: 1354 - protein, 11 aa, synthetic construct
  REGION 1..11: note = Description of Artificial Sequence: Synthetic peptide
RASQGIRNNLG

SEQ ID NO: 1355 - DNA, 33 bp, synthetic construct; identical to SEQ ID NO: 109
  misc_feature 1..33: note = Description of Artificial Sequence: Synthetic oligonucleotide
  source 1..33: mol_type = other DNA

SEQ ID NO: 1356 - protein, 11 aa, synthetic construct
  REGION 1..11: note = Description of Artificial Sequence: Synthetic peptide
RASQGIRNDLG

SEQ ID NO: 1357 - DNA, 33 bp, synthetic construct; identical to SEQ ID NO: 109
  misc_feature 1..33: note = Description of Artificial Sequence: Synthetic oligonucleotide
  source 1..33: mol_type = other DNA

SEQ ID NO: 1358 - protein, 11 aa, synthetic construct
  REGION 1..11: note = Description of Artificial Sequence: Synthetic peptide
RASQGIRNDLG

SEQ ID NO: 1359 - DNA, 33 bp, synthetic construct
  misc_feature 1..33: note = Description of Artificial Sequence: Synthetic oligonucleotide
  source 1..33: mol_type = other DNA
cgggcaagtcagagttttagccactatttaaat

SEQ ID NO: 1360 - protein, 11 aa, synthetic construct
  REGION 1..11: note = Description of Artificial Sequence: Synthetic peptide
RASQSFSHYLN

SEQ ID NO: 1361 - DNA, 33 bp, synthetic construct
  misc_feature 1..33: note = Description of Artificial Sequence: Synthetic oligonucleotide
  source 1..33: mol_type = other DNA
caggcgagtcaggacattagcaactatttacat

SEQ ID NO: 1362 - protein, 11 aa, synthetic construct
  REGION 1..11: note = Description of Artificial Sequence: Synthetic peptide
QASQDISNYLH

SEQ ID NO: 1363 - DNA, 33 bp, synthetic construct
  misc_feature 1..33: note = Description of Artificial Sequence: Synthetic oligonucleotide
  source 1..33: mol_type = other DNA
cgggcgagtcaggtcattagcaattatttagcc

SEQ ID NO: 1364 - protein, 11 aa, synthetic construct
  REGION 1..11: note = Description of Artificial Sequence: Synthetic peptide
RASQVISNYLA

SEQ ID NO: 1365 - DNA, 33 bp, synthetic construct
  misc_feature 1..33: note = Description of Artificial Sequence: Synthetic oligonucleotide
  source 1..33: mol_type = other DNA
cgggcaagtcagtacagtagcgactatttaaat

SEQ ID NO: 1366 - protein, 11 aa, synthetic construct
  REGION 1..11: note = Description of Artificial Sequence: Synthetic peptide
RASQYSSDYLN

SEQ ID NO: 1367 - DNA, 33 bp, synthetic construct; identical to SEQ ID NO: 109
  misc_feature 1..33: note = Description of Artificial Sequence: Synthetic oligonucleotide
  source 1..33: mol_type = other DNA

SEQ ID NO: 1368 - protein, 11 aa, synthetic construct
  REGION 1..11: note = Description of Artificial Sequence: Synthetic peptide
RASQGIRNDLG

SEQ ID NO: 1369 - DNA, 33 bp, synthetic construct
  misc_feature 1..33: note = Description of Artificial Sequence: Synthetic oligonucleotide
  source 1..33: mol_type = other DNA
caggcgagtcaagacattaccaactatttagat

SEQ ID NO: 1370 - protein, 11 aa, synthetic construct
  REGION 1..11: note = Description of Artificial Sequence: Synthetic peptide
QASQDITNYLD

SEQ ID NO: 1371 - DNA, 33 bp, synthetic construct; identical to SEQ ID NO: 173
  misc_feature 1..33: note = Description of Artificial Sequence: Synthetic oligonucleotide
  source 1..33: mol_type = other DNA

SEQ ID NO: 1372 - protein, 11 aa, synthetic construct
  REGION 1..11: note = Description of Artificial Sequence: Synthetic peptide
RASQGISRWLA

SEQ ID NO: 1373 - DNA, 36 bp, synthetic construct
  misc_feature 1..36: note = Description of Artificial Sequence: Synthetic oligonucleotide
  source 1..36: mol_type = other DNA
agggccagtcagagtattacaagcagctacttagcc

SEQ ID NO: 1374 - protein, 12 aa, synthetic construct
  REGION 1..12: note = Description of Artificial Sequence: Synthetic peptide
RASQSITSSYLA

SEQ ID NO: 1375 - DNA, 33 bp, synthetic construct; identical to SEQ ID NO: 109
  misc_feature 1..33: note = Description of Artificial Sequence: Synthetic oligonucleotide
  source 1..33: mol_type = other DNA

SEQ ID NO: 1376 - protein, 11 aa, synthetic construct
  REGION 1..11: note = Description of Artificial Sequence: Synthetic peptide
RASQGIRNDLG

SEQ ID NO: 1377 - DNA, 33 bp, synthetic construct; identical to SEQ ID NO: 109
  misc_feature 1..33: note = Description of Artificial Sequence: Synthetic oligonucleotide
  source 1..33: mol_type = other DNA

SEQ ID NO: 1378 - protein, 11 aa, synthetic construct
  REGION 1..11: note = Description of Artificial Sequence: Synthetic peptide
RASQGIRNDLG

SEQ ID NO: 1379 - DNA, 33 bp, synthetic construct; identical to SEQ ID NO: 171
  misc_feature 1..33: note = Description of Artificial Sequence: Synthetic oligonucleotide
  source 1..33: mol_type = other DNA

SEQ ID NO: 1380 - protein, 11 aa, synthetic construct
  REGION 1..11: note = Description of Artificial Sequence: Synthetic peptide
RASQGISSWLA

SEQ ID NO: 1381 - DNA, 33 bp, synthetic construct
  misc_feature 1..33: note = Description of Artificial Sequence: Synthetic oligonucleotide
  source 1..33: mol_type = other DNA
cgggcaagtcaggacattagaaatattttaggc

SEQ ID NO: 1382 - protein, 11 aa, synthetic construct
  REGION 1..11: note = Description of Artificial Sequence: Synthetic peptide
RASQDIRNILG

SEQ ID NO: 1383 - DNA, 48 bp, synthetic construct; identical to SEQ ID NO: 555
  misc_feature 1..48: note = Description of Artificial Sequence: Synthetic oligonucleotide
  source 1..48: mol_type = other DNA

SEQ ID NO: 1384 - protein, 16 aa, synthetic construct
  REGION 1..16: note = Description of Artificial Sequence: Synthetic peptide
KSSQSLLHSEGKTYLY

SEQ ID NO: 1385 - DNA, 33 bp, synthetic construct; identical to SEQ ID NO: 109
  misc_feature 1..33: note = Description of Artificial Sequence: Synthetic oligonucleotide
  source 1..33: mol_type = other DNA

SEQ ID NO: 1386 - protein, 11 aa, synthetic construct
  REGION 1..11: note = Description of Artificial Sequence: Synthetic peptide
RASQGIRNDLG

SEQ ID NO: 1387 - DNA, 33 bp, synthetic construct; identical to SEQ ID NO: 109
  misc_feature 1..33: note = Description of Artificial Sequence: Synthetic oligonucleotide
  source 1..33: mol_type = other DNA

SEQ ID NO: 1388 - protein, 11 aa, synthetic construct
  REGION 1..11: note = Description of Artificial Sequence: Synthetic peptide
RASQGIRNDLG

SEQ ID NO: 1389 - DNA, 33 bp, synthetic construct
  misc_feature 1..33: note = Description of Artificial Sequence: Synthetic oligonucleotide
  source 1..33: mol_type = other DNA
cgggcgagtcaggttattagccgctggttagcc

SEQ ID NO: 1390 - protein, 11 aa, synthetic construct
  REGION 1..11: note = Description of Artificial Sequence: Synthetic peptide
RASQVISRWLA

SEQ ID NO: 1391 - DNA, 33 bp, synthetic construct
  misc_feature 1..33: note = Description of Artificial Sequence: Synthetic oligonucleotide
  source 1..33: mol_type = other DNA
agggccagtcagagtgttagcagcgacttagcc

SEQ ID NO: 1392 - protein, 11 aa, synthetic construct
  REGION 1..11: note = Description of Artificial Sequence: Synthetic peptide
RASQSVSSDLA

SEQ ID NO: 1393 - DNA, 48 bp, synthetic construct
  misc_feature 1..48: note = Description of Artificial Sequence: Synthetic oligonucleotide
  source 1..48: mol_type = other DNA
aaatctagtcagagcctcctgcatagtgaaggaaagacctatttgtat

SEQ ID NO: 1394 - protein, 16 aa, synthetic construct
  REGION 1..16: note = Description of Artificial Sequence: Synthetic peptide
KSSQSLLHSEGKTYLY

SEQ ID NO: 1395 - DNA, 48 bp, synthetic construct
  misc_feature 1..48: note = Description of Artificial Sequence: Synthetic oligonucleotide
  source 1..48: mol_type = other DNA
aagtctagtcagagcctcgtgcatagtgaaggaaagacctatttgtat

SEQ ID NO: 1396 - protein, 16 aa, synthetic construct
  REGION 1..16: note = Description of Artificial Sequence: Synthetic peptide
KSSQSLVHSEGKTYLY

SEQ ID NO: 1397 - DNA, 33 bp, synthetic construct; identical to SEQ ID NO: 109
  misc_feature 1..33: note = Description of Artificial Sequence: Synthetic oligonucleotide
  source 1..33: mol_type = other DNA

SEQ ID NO: 1398 - protein, 11 aa, synthetic construct
  REGION 1..11: note = Description of Artificial Sequence: Synthetic peptide
RASQGIRNDLG

SEQ ID NO: 1399 - DNA, 33 bp, synthetic construct
  misc_feature 1..33: note = Description of Artificial Sequence: Synthetic oligonucleotide
  source 1..33: mol_type = other DNA
cgggcgagtcaggacattagcaattatttaatc

SEQ ID NO: 1400 - protein, 11 aa, synthetic construct
  REGION 1..11: note = Description of Artificial Sequence: Synthetic peptide
RASQDISNYLI

SEQ ID NO: 1401 - DNA, 33 bp, synthetic construct; identical to SEQ ID NO: 519
  misc_feature 1..33: note = Description of Artificial Sequence: Synthetic oligonucleotide
  source 1..33: mol_type = other DNA

SEQ ID NO: 1402 - protein, 11 aa, synthetic construct
  REGION 1..11: note = Description of Artificial Sequence: Synthetic peptide
RASQAIRNDLG

SEQ ID NO: 1403 - DNA, 48 bp, synthetic construct
  misc_feature 1..48: note = Description of Artificial Sequence: Synthetic oligonucleotide
  source 1..48: mol_type = other DNA
aagtctagtcaaagcctcctgcatagtgaaggaaagacctatttgtat

SEQ ID NO: 1404 - protein, 16 aa, synthetic construct
  REGION 1..16: note = Description of Artificial Sequence: Synthetic peptide
KSSQSLLHSEGKTYLY

SEQ ID NO: 1405 - DNA, 33 bp, synthetic construct
  misc_feature 1..33: note = Description of Artificial Sequence: Synthetic oligonucleotide
  source 1..33: mol_type = other DNA
caggcgagtcaagacattagcaactatttagat

SEQ ID NO: 1406 - protein, 11 aa, synthetic construct
  REGION 1..11: note = Description of Artificial Sequence: Synthetic peptide
QASQDISNYLD

SEQ ID NO: 1407 - DNA, 33 bp, synthetic construct
  misc_feature 1..33: note = Description of Artificial Sequence: Synthetic oligonucleotide
  source 1..33: mol_type = other DNA
cgggcaagtcagagcattctcagctatttgaat

SEQ ID NO: 1408 - protein, 11 aa, synthetic construct
  REGION 1..11: note = Description of Artificial Sequence: Synthetic peptide
RASQSILSYLN

SEQ ID NO: 1409 - DNA, 33 bp, synthetic construct
  misc_feature 1..33: note = Description of Artificial Sequence: Synthetic oligonucleotide
  source 1..33: mol_type = other DNA
cgggcgagtcaggatattagcagctggttggcc

SEQ ID NO: 1410 - protein, 11 aa, synthetic construct
  REGION 1..11: note = Description of Artificial Sequence: Synthetic peptide
RASQDISSWLA

SEQ ID NO: 1411 - DNA, 33 bp, synthetic construct; identical to SEQ ID NO: 109
  misc_feature 1..33: note = Description of Artificial Sequence: Synthetic oligonucleotide
  source 1..33: mol_type = other DNA

SEQ ID NO: 1412 - protein, 11 aa, synthetic construct
  REGION 1..11: note = Description of Artificial Sequence: Synthetic peptide
RASQGIRNDLG

SEQ ID NO: 1413 - DNA, 33 bp, synthetic construct
  misc_feature 1..33: note = Description of Artificial Sequence: Synthetic oligonucleotide
  source 1..33: mol_type = other DNA
caggcgagtcaggacattaccaactttttaaat

SEQ ID NO: 1414 - protein, 11 aa, synthetic construct
  REGION 1..11: note = Description of Artificial Sequence: Synthetic peptide
QASQDITNFLN

SEQ ID NO: 1415 - DNA, 33 bp, synthetic construct
  misc_feature 1..33: note = Description of Artificial Sequence: Synthetic oligonucleotide
  source 1..33: mol_type = other DNA
cgggcgagtcaggacattaacatttatttagcc

SEQ ID NO: 1416 - protein, 11 aa, synthetic construct
  REGION 1..11: note = Description of Artificial Sequence: Synthetic peptide
RASQDINIYLA

SEQ ID NO: 1417 - DNA, 51 bp, synthetic construct
  misc_feature 1..51: note = Description of Artificial Sequence: Synthetic oligonucleotide
  source 1..51: mol_type = other DNA
aagtccagccagagtgttttacatagttccaacaataagaactacttagtt

SEQ ID NO: 1418 - protein, 17 aa, synthetic construct
  REGION 1..17: note = Description of Artificial Sequence: Synthetic peptide
KSSQSVLHSSNNKNYLV

SEQ ID NO: 1419 - DNA, 33 bp, synthetic construct; identical to SEQ ID NO: 341
  misc_feature 1..33: note = Description of Artificial Sequence: Synthetic oligonucleotide
  source 1..33: mol_type = other DNA

SEQ ID NO: 1420 - protein, 11 aa, synthetic construct
  REGION 1..11: note = Description of Artificial Sequence: Synthetic peptide
RASQDIRNNLG

SEQ ID NO: 1421 - DNA, 33 bp, synthetic construct; identical to SEQ ID NO: 1359
  misc_feature 1..33: note = Description of Artificial Sequence: Synthetic oligonucleotide
  source 1..33: mol_type = other DNA

SEQ ID NO: 1422 - protein, 11 aa, synthetic construct
  REGION 1..11: note = Description of Artificial Sequence: Synthetic peptide
RASQSFSHYLN

SEQ ID NO: 1423 - DNA, 33 bp, synthetic construct
  misc_feature 1..33: note = Description of Artificial Sequence: Synthetic oligonucleotide
  source 1..33: mol_type = other DNA
cgggcaagtcaggacattagaaatcttttaggc

SEQ ID NO: 1424 - protein, 11 aa, synthetic construct
  REGION 1..11: note = Description of Artificial Sequence: Synthetic peptide
RASQDIRNLLG

SEQ ID NO: 1425 - DNA, 33 bp, synthetic construct
  misc_feature 1..33: note = Description of Artificial Sequence: Synthetic oligonucleotide
  source 1..33: mol_type = other DNA
cgggcgagtcagggtattaggaagtggttagcc

SEQ ID NO: 1426 - protein, 11 aa, synthetic construct
  REGION 1..11: note = Description of Artificial Sequence: Synthetic peptide
RASQGIRKWLA

SEQ ID NO: 1427 - DNA, 33 bp, synthetic construct
  misc_feature 1..33: note = Description of Artificial Sequence: Synthetic oligonucleotide
  source 1..33: mol_type = other DNA
cgggcaagtcagagcattttcagatatttaaat

SEQ ID NO: 1428 - protein, 11 aa, synthetic construct
  REGION 1..11: note = Description of Artificial Sequence: Synthetic peptide
RASQSIFRYLN

SEQ ID NO: 1429 - DNA, 33 bp, synthetic construct; identical to SEQ ID NO: 171
  misc_feature 1..33: note = Description of Artificial Sequence: Synthetic oligonucleotide
  source 1..33: mol_type = other DNA

SEQ ID NO: 1430 - protein, 11 aa, synthetic construct
  REGION 1..11: note = Description of Artificial Sequence: Synthetic peptide
RASQGISSWLA

SEQ ID NO: 1431 - DNA, 33 bp, synthetic construct
  misc_feature 1..33: note = Description of Artificial Sequence: Synthetic oligonucleotide
  source 1..33: mol_type = other DNA
cgggtgagtcaggatattagcaaatggttagcc

SEQ ID NO: 1432 - protein, 11 aa, synthetic construct
  REGION 1..11: note = Description of Artificial Sequence: Synthetic peptide
RVSQDISKWLA

SEQ ID NO: 1433 - DNA, 33 bp, synthetic construct; identical to SEQ ID NO: 109
  misc_feature 1..33: note = Description of Artificial Sequence: Synthetic oligonucleotide
  source 1..33: mol_type = other DNA

SEQ ID NO: 1434 - protein, 11 aa, synthetic construct
  REGION 1..11: note = Description of Artificial Sequence: Synthetic peptide
RASQGIRNDLG

SEQ ID NO: 1435 - DNA, 33 bp, synthetic construct; identical to SEQ ID NO: 109
  misc_feature 1..33: note = Description of Artificial Sequence: Synthetic oligonucleotide
  source 1..33: mol_type = other DNA

SEQ ID NO: 1436 - protein, 11 aa, synthetic construct
  REGION 1..11: note = Description of Artificial Sequence: Synthetic peptide
RASQGIRNDLG

SEQ ID NO: 1437 - DNA, 48 bp, synthetic construct
  misc_feature 1..48: note = Description of Artificial Sequence: Synthetic oligonucleotide
  source 1..48: mol_type = other DNA
aagtctagtcagagcctccagcatggtgaaggaaagacctatttgtat

SEQ ID NO: 1438 - protein, 16 aa, synthetic construct
  REGION 1..16: note = Description of Artificial Sequence: Synthetic peptide
KSSQSLQHGEGKTYLY

SEQ ID NO: 1439 - DNA, 33 bp, synthetic construct; identical to SEQ ID NO: 1229
  misc_feature 1..33: note = Description of Artificial Sequence: Synthetic oligonucleotide
  source 1..33: mol_type = other DNA

SEQ ID NO: 1440 - protein, 11 aa, synthetic construct
  REGION 1..11: note = Description of Artificial Sequence: Synthetic peptide
RASQGIRKDLG

SEQ ID NO: 1441 - DNA, 48 bp, synthetic construct; identical to SEQ ID NO: 103
  misc_feature 1..48: note = Description of Artificial Sequence: Synthetic oligonucleotide
  source 1..48: mol_type = other DNA

SEQ ID NO: 1442 - protein, 16 aa, synthetic construct
  REGION 1..16: note = Description of Artificial Sequence: Synthetic peptide
KSSQSLLHSEGKTYLY

SEQ ID NO: 1443 - DNA, 33 bp, synthetic construct; identical to SEQ ID NO: 109
  misc_feature 1..33: note = Description of Artificial Sequence: Synthetic oligonucleotide
  source 1..33: mol_type = other DNA

SEQ ID NO: 1444 - protein, 11 aa, synthetic construct
  REGION 1..11: note = Description of Artificial Sequence: Synthetic peptide
RASQGIRNDLG

SEQ ID NO: 1445 - DNA, 33 bp, synthetic construct; identical to SEQ ID NO: 109
  misc_feature 1..33: note = Description of Artificial Sequence: Synthetic oligonucleotide
  source 1..33: mol_type = other DNA

SEQ ID NO: 1446 - protein, 11 aa, synthetic construct
  REGION 1..11: note = Description of Artificial Sequence: Synthetic peptide
RASQGIRNDLG

SEQ ID NO: 1447 - DNA, 51 bp, synthetic construct; identical to SEQ ID NO: 1071
  misc_feature 1..51: note = Description of Artificial Sequence: Synthetic oligonucleotide
  source 1..51: mol_type = other DNA

SEQ ID NO: 1448 - protein, 17 aa, synthetic construct
  REGION 1..17: note = Description of Artificial Sequence: Synthetic peptide
KSSQSVLYSSNNKNYLA

SEQ ID NO: 1449 - DNA, 33 bp, synthetic construct; identical to SEQ ID NO: 629
  misc_feature 1..33: note = Description of Artificial Sequence: Synthetic oligonucleotide
  source 1..33: mol_type = other DNA

SEQ ID NO: 1450 - protein, 11 aa, synthetic construct
  REGION 1..11: note = Description of Artificial Sequence: Synthetic peptide
RASQGISNYLA

SEQ ID NO: 1451 - DNA, 33 bp, synthetic construct
  misc_feature 1..33: note = Description of Artificial Sequence: Synthetic oligonucleotide
  source 1..33: mol_type = other DNA
cgggcgagtcaggtcattaagaattatttagtc

SEQ ID NO: 1452 - protein, 11 aa, synthetic construct
  REGION 1..11: note = Description of Artificial Sequence: Synthetic peptide
RASQVIKNYLV

SEQ ID NO: 1453 - DNA, 33 bp, synthetic construct; identical to SEQ ID NO: 109
  misc_feature 1..33: note = Description of Artificial Sequence: Synthetic oligonucleotide
  source 1..33: mol_type = other DNA

SEQ ID NO: 1454 - protein, 11 aa, synthetic construct
  REGION 1..11: note = Description of Artificial Sequence: Synthetic peptide
RASQGIRNDLG

SEQ ID NO: 1455 - DNA, 33 bp, synthetic construct
  misc_feature 1..33: note = Description of Artificial Sequence: Synthetic oligonucleotide
  source 1..33: mol_type = other DNA
agggccagtcagagtgttagcagttccttagcc

SEQ ID NO: 1456 - protein, 11 aa, synthetic construct
  REGION 1..11: note = Description of Artificial Sequence: Synthetic peptide
RASQSVSSSLA

SEQ ID NO: 1457 - DNA, 33 bp, synthetic construct
  misc_feature 1..33: note = Description of Artificial Sequence: Synthetic oligonucleotide
  source 1..33: mol_type = other DNA
cgggcgagtcaggttattagcaactggttagcc

SEQ ID NO: 1458 - protein, 11 aa, synthetic construct
  REGION 1..11: note = Description of Artificial Sequence: Synthetic peptide
RASQVISNWLA

SEQ ID NO: 1459 - DNA, 48 bp, synthetic construct; identical to SEQ ID NO: 555
  misc_feature 1..48: note = Description of Artificial Sequence: Synthetic oligonucleotide
  source 1..48: mol_type = other DNA

SEQ ID NO: 1460 - protein, 16 aa, synthetic construct
  REGION 1..16: note = Description of Artificial Sequence: Synthetic peptide
KSSQSLLHSEGKTYLY

SEQ ID NO: 1461 - DNA, 33 bp, synthetic construct; identical to SEQ ID NO: 501
  misc_feature 1..33: note = Description of Artificial Sequence: Synthetic oligonucleotide
  source 1..33: mol_type = other DNA

SEQ ID NO: 1462 - protein, 11 aa, synthetic construct
  REGION 1..11: note = Description of Artificial Sequence: Synthetic peptide
RASQSISSYLN

SEQ ID NO: 1463 - DNA, 33 bp, synthetic construct; identical to SEQ ID NO: 501
  misc_feature 1..33: note = Description of Artificial Sequence: Synthetic oligonucleotide
  source 1..33: mol_type = other DNA

SEQ ID NO: 1464 - protein, 11 aa, synthetic construct
  REGION 1..11: note = Description of Artificial Sequence: Synthetic peptide
RASQSISSYLN

SEQ ID NO: 1465 - DNA, 33 bp, synthetic construct; identical to SEQ ID NO: 1229
  misc_feature 1..33: note = Description of Artificial Sequence: Synthetic oligonucleotide
  source 1..33: mol_type = other DNA

SEQ ID NO: 1466 - protein, 11 aa, synthetic construct
  REGION 1..11: note = Description of Artificial Sequence: Synthetic peptide
RASQGIRKDLG

SEQ ID NO: 1467 - DNA, 33 bp, synthetic construct; identical to SEQ ID NO: 1185
  misc_feature 1..33: note = Description of Artificial Sequence: Synthetic oligonucleotide
  source 1..33: mol_type = other DNA

SEQ ID NO: 1468 - protein, 11 aa, synthetic construct
  REGION 1..11: note = Description of Artificial Sequence: Synthetic peptide
RASQGIRDDLG

SEQ ID NO: 1469 - DNA, 48 bp, synthetic construct; identical to SEQ ID NO: 103
  misc_feature 1..48: note = Description of Artificial Sequence: Synthetic oligonucleotide
  source 1..48: mol_type = other DNA

SEQ ID NO: 1470 - protein, 16 aa, synthetic construct
  REGION 1..16: note = Description of Artificial Sequence: Synthetic peptide
KSSQSLLHSEGKTYLY

SEQ ID NO: 1471 - DNA, 51 bp, synthetic construct
  misc_feature 1..51: note = Description of Artificial Sequence: Synthetic oligonucleotide
  source 1..51: mol_type = other DNA
aagtccagccagagtgttttacacatctccaacaataacaattacttagct

SEQ ID NO: 1472 - protein, 17 aa, synthetic construct
  REGION 1..17: note = Description of Artificial Sequence: Synthetic peptide
KSSQSVLHISNNNNYLA

SEQ ID NO: 1473 - DNA, 51 bp, synthetic construct
  misc_feature 1..51: note = Description of Artificial Sequence: Synthetic oligonucleotide
  source 1..51: mol_type = other DNA
aagtccagccagagtgttttatacagctccaacaataacaactccttaact

SEQ ID NO: 1474 - protein, 17 aa, synthetic construct
  REGION 1..17: note = Description of Artificial Sequence: Synthetic peptide
KSSQSVLYSSNNNNSLT

SEQ ID NO: 1475 - DNA, 33 bp, synthetic construct
  misc_feature 1..33: note = Description of Artificial Sequence: Synthetic oligonucleotide
  source 1..33: mol_type = other DNA
cgggcaagtcagagcattaccaactttttaaat

SEQ ID NO: 1476 - protein, 11 aa, synthetic construct
  REGION 1..11: note = Description of Artificial Sequence: Synthetic peptide
RASQSITNFLN

SEQ ID NO: 1477 - DNA, 33 bp, synthetic construct; identical to SEQ ID NO: 429
  misc_feature 1..33: note = Description of Artificial Sequence: Synthetic oligonucleotide
  source 1..33: mol_type = other DNA

SEQ ID NO: 1478 - protein, 11 aa, synthetic construct
  REGION 1..11: note = Description of Artificial Sequence: Synthetic peptide
RASQGIGNDLG

SEQ ID NO: 1479 - DNA, 48 bp, synthetic construct
  misc_feature 1..48: note = Description of Artificial Sequence: Synthetic oligonucleotide
  source 1..48: mol_type = other DNA
aggtctagtcagagcctcctacatagtaatggatacaactatttggat

SEQ ID NO: 1480 - protein, 16 aa, synthetic construct
  REGION 1..16: note = Description of Artificial Sequence: Synthetic peptide
RSSQSLLHSNGYNYLD

SEQ ID NO: 1481 - DNA, 33 bp, synthetic construct
  misc_feature 1..33: note = Description of Artificial Sequence: Synthetic oligonucleotide
  source 1..33: mol_type = other DNA
cgggcaagtcagaacattttcagctatttaaat

SEQ ID NO: 1482 - protein, 11 aa, synthetic construct
  REGION 1..11: note = Description of Artificial Sequence: Synthetic peptide
RASQNIFSYLN

SEQ ID NO: 1483 - DNA, 33 bp, synthetic construct
  misc_feature 1..33: note = Description of Artificial Sequence: Synthetic oligonucleotide
  source 1..33: mol_type = other DNA
cgggcaagtcagagcattatcagttatttaaat

SEQ ID NO: 1484 - protein, 11 aa, synthetic construct
  REGION 1..11: note = Description of Artificial Sequence: Synthetic peptide
RASQSIISYLN

SEQ ID NO: 1485 - DNA, 33 bp, synthetic construct; identical to SEQ ID NO: 109
  misc_feature 1..33: note = Description of Artificial Sequence: Synthetic oligonucleotide
  source 1..33: mol_type = other DNA

SEQ ID NO: 1486 - protein, 11 aa, synthetic construct
  REGION 1..11: note = Description of Artificial Sequence: Synthetic peptide
RASQGIRNDLG

SEQ ID NO: 1487 - DNA, 33 bp, synthetic construct; identical to SEQ ID NO: 341
  misc_feature 1..33: note = Description of Artificial Sequence: Synthetic oligonucleotide
  source 1..33: mol_type = other DNA

SEQ ID NO: 1488 - protein, 11 aa, synthetic construct
  REGION 1..11: note = Description of Artificial Sequence: Synthetic peptide
RASQDIRNNLG

SEQ ID NO: 1489 - DNA, 33 bp, synthetic construct; identical to SEQ ID NO: 109
  misc_feature 1..33: note = Description of Artificial Sequence: Synthetic oligonucleotide
  source 1..33: mol_type = other DNA

SEQ ID NO: 1490 - protein, 11 aa, synthetic construct
  REGION 1..11: note = Description of Artificial Sequence: Synthetic peptide
RASQGIRNDLG

SEQ ID NO: 1491 - DNA, 33 bp, synthetic construct
  misc_feature 1..33: note = Description of Artificial Sequence: Synthetic oligonucleotide
  source 1..33: mol_type = other DNA
agggccagtcagagtgttaacagcaacttagcc

SEQ ID NO: 1492 - protein, 11 aa, synthetic construct
  REGION 1..11: note = Description of Artificial Sequence: Synthetic peptide
RASQSVNSNLA

SEQ ID NO: 1493 - DNA, 33 bp, synthetic construct; identical to SEQ ID NO: 519
  misc_feature 1..33: note = Description of Artificial Sequence: Synthetic oligonucleotide
  source 1..33: mol_type = other DNA

SEQ ID NO: 1494 - protein, 11 aa, synthetic construct
  REGION 1..11: note = Description of Artificial Sequence: Synthetic peptide
RASQAIRNDLG

SEQ ID NO: 1495 - DNA, 33 bp, synthetic construct; identical to SEQ ID NO: 1177
  misc_feature 1..33: note = Description of Artificial Sequence: Synthetic oligonucleotide
  source 1..33: mol_type = other DNA

SEQ ID NO: 1496 - protein, 11 aa, synthetic construct
  REGION 1..11: note = Description of Artificial Sequence: Synthetic peptide
RASQDISSWLA

SEQ ID NO: 1497 - DNA, 33 bp, synthetic construct
  misc_feature 1..33: note = Description of Artificial Sequence: Synthetic oligonucleotide
  source 1..33: mol_type = other DNA
cgggcgagtcagggcattagcacttatttagcc

SEQ ID NO: 1498 - protein, 11 aa, synthetic construct
  REGION 1..11: note = Description of Artificial Sequence: Synthetic peptide
RASQGISTYLA

SEQ ID NO: 1499 - DNA, 33 bp, synthetic construct; identical to SEQ ID NO: 205
  misc_feature 1..33: note = Description of Artificial Sequence: Synthetic oligonucleotide
  source 1..33: mol_type = other DNA

SEQ ID NO: 1500 - protein, 11 aa, synthetic construct
  REGION 1..11: note = Description of Artificial Sequence: Synthetic peptide
RASQDIRNDLG

SEQ ID NO: 1501 - DNA, 33 bp, synthetic construct
  misc_feature 1..33: note = Description of Artificial Sequence: Synthetic oligonucleotide
  source 1..33: mol_type = other DNA
cgggcaagtcagggcattagaaatgctttaggc

SEQ ID NO: 1502 - protein, 11 aa, synthetic construct
  REGION 1..11: note = Description of Artificial Sequence: Synthetic peptide
RASQGIRNALG

SEQ ID NO: 1503 - DNA, 33 bp, synthetic construct; identical to SEQ ID NO: 501
  misc_feature 1..33: note = Description of Artificial Sequence: Synthetic oligonucleotide
  source 1..33: mol_type = other DNA

SEQ ID NO: 1504 - protein, 11 aa, synthetic construct
  REGION 1..11: note = Description of Artificial Sequence: Synthetic peptide
RASQSISSYLN

SEQ ID NO: 1505 - DNA, 33 bp, synthetic construct
  misc_feature 1..33: note = Description of Artificial Sequence: Synthetic oligonucleotide
  source 1..33: mol_type = other DNA
agggccagtcagagtgttagcagcagcttagcc

SEQ ID NO: 1506 - protein, 11 aa, synthetic construct
  REGION 1..11: note = Description of Artificial Sequence: Synthetic peptide
RASQSVSSSLA

SEQ ID NO: 1507 - DNA, 33 bp, synthetic construct; identical to SEQ ID NO: 109
  misc_feature 1..33: note = Description of Artificial Sequence: Synthetic oligonucleotide
  source 1..33: mol_type = other DNA

SEQ ID NO: 1508 - protein, 11 aa, synthetic construct
  REGION 1..11: note = Description of Artificial Sequence: Synthetic peptide
RASQGIRNDLG

SEQ ID NO: 1509 - DNA, 33 bp, synthetic construct
  misc_feature 1..33: note = Description of Artificial Sequence: Synthetic oligonucleotide
  source 1..33: mol_type = other DNA
cgggcgagtcaggatattagcaactggttagcc

SEQ ID NO: 1510 - protein, 11 aa, synthetic construct
  REGION 1..11: note = Description of Artificial Sequence: Synthetic peptide
RASQDISNWLA

SEQ ID NO: 1511 - DNA, 33 bp, synthetic construct; identical to SEQ ID NO: 219
  misc_feature 1..33: note = Description of Artificial Sequence: Synthetic oligonucleotide
  source 1..33: mol_type = other DNA

SEQ ID NO: 1512 - protein, 11 aa, synthetic construct
  REGION 1..11: note = Description of Artificial Sequence: Synthetic peptide
RASQVIRNDLG

SEQ ID NO: 1513 - DNA, 33 bp, synthetic construct; identical to SEQ ID NO: 173
  misc_feature 1..33: note = Description of Artificial Sequence: Synthetic oligonucleotide
  source 1..33: mol_type = other DNA

SEQ ID NO: 1514 - protein, 11 aa, synthetic construct
  REGION 1..11: note = Description of Artificial Sequence: Synthetic peptide
RASQGISRWLA

SEQ ID NO: 1515 - DNA, 33 bp, synthetic construct; identical to SEQ ID NO: 1391
  misc_feature 1..33: note = Description of Artificial Sequence: Synthetic oligonucleotide
  source 1..33: mol_type = other DNA

SEQ ID NO: 1516 - protein, 11 aa, synthetic construct
  REGION 1..11: note = Description of Artificial Sequence: Synthetic peptide
RASQSVSSDLA

SEQ ID NO: 1517 - DNA, 33 bp, synthetic construct; identical to SEQ ID NO: 429
  misc_feature 1..33: note = Description of Artificial Sequence: Synthetic oligonucleotide
  source 1..33: mol_type = other DNA

SEQ ID NO: 1518 - protein, 11 aa, synthetic construct
  REGION 1..11: note = Description of Artificial Sequence: Synthetic peptide
RASQGIGNDLG

SEQ ID NO: 1519 - DNA, 33 bp, synthetic construct; identical to SEQ ID NO: 553
  misc_feature 1..33: note = Description of Artificial Sequence: Synthetic oligonucleotide
  source 1..33: mol_type = other DNA

SEQ ID NO: 1520 - protein, 11 aa, synthetic construct
  REGION 1..11: note = Description of Artificial Sequence: Synthetic peptide
RASQGISNWLA

SEQ ID NO: 1521 - DNA, 51 bp, synthetic construct
  misc_feature 1..51: note = Description of Artificial Sequence: Synthetic oligonucleotide
  source 1..51: mol_type = other DNA
aagtccagccaaagtgttttacacagctccaacaattataactacttagct

SEQ ID NO: 1522 - protein, 17 aa, synthetic construct
  REGION 1..17: note = Description of Artificial Sequence: Synthetic peptide
KSSQSVLHSSNNYNYLA

SEQ ID NO: 1523 - DNA, 51 bp, synthetic construct
  misc_feature 1..51: note = Description of Artificial Sequence: Synthetic oligonucleotide
  source 1..51: mol_type = other DNA
aagtccagccagagtgttttattcagctccaacaattacaattacttagct

SEQ ID NO: 1524 - protein, 17 aa, synthetic construct
  REGION 1..17: note = Description of Artificial Sequence: Synthetic peptide
KSSQSVLFSSNNYNYLA

SEQ ID NO: 1525 - DNA, 33 bp, synthetic construct; identical to SEQ ID NO: 1391
  misc_feature 1..33: note = Description of Artificial Sequence: Synthetic oligonucleotide
  source 1..33: mol_type = other DNA

SEQ ID NO: 1526 - protein, 11 aa, synthetic construct
  REGION 1..11: note = Description of Artificial Sequence: Synthetic peptide
RASQSVSSDLA

SEQ ID NO: 1527 - DNA, 33 bp, synthetic construct; identical to SEQ ID NO: 1391
  misc_feature 1..33: note = Description of Artificial Sequence: Synthetic oligonucleotide
  source 1..33: mol_type = other DNA

SEQ ID NO: 1528 - protein, 11 aa, synthetic construct
  REGION 1..11: note = Description of Artificial Sequence: Synthetic peptide
RASQSVSSDLA

SEQ ID NO: 1529 - DNA, 33 bp, synthetic construct; identical to SEQ ID NO: 109
  misc_feature 1..33: note = Description of Artificial Sequence: Synthetic oligonucleotide
  source 1..33: mol_type = other DNA

SEQ ID NO: 1530 - protein, 11 aa, synthetic construct
  REGION 1..11: note = Description of Artificial Sequence: Synthetic peptide
RASQGIRNDLG

SEQ ID NO: 1531 - DNA, 51 bp, synthetic construct
  misc_feature 1..51: note = Description of Artificial Sequence: Synthetic oligonucleotide
  source 1..51: mol_type = other DNA
aagtccggccagagtattttatacagctccaacaataacaactacttagct

SEQ ID NO: 1532 - protein, 17 aa, synthetic construct
  REGION 1..17: note = Description of Artificial Sequence: Synthetic peptide
KSGQSILYSSNNNNYLA

SEQ ID NO: 1533 - DNA, 33 bp, synthetic construct
  misc_feature 1..33: note = Description of Artificial Sequence: Synthetic oligonucleotide
  source 1..33: mol_type = other DNA
agggccagtcagagtgttagcagctccttagcc

SEQ ID NO: 1534 - protein, 11 aa, synthetic construct
  REGION 1..11: note = Description of Artificial Sequence: Synthetic peptide
RASQSVSSSLA

SEQ ID NO: 1535 - DNA, 33 bp, synthetic construct
  misc_feature 1..33: note = Description of Artificial Sequence: Synthetic oligonucleotide
  source 1..33: mol_type = other DNA
cgggcaagtcagggcattagaagtgatttagac

SEQ ID NO: 1536 - protein, 11 aa, synthetic construct
  REGION 1..11: note = Description of Artificial Sequence: Synthetic peptide
RASQGIRSDLD

SEQ ID NO: 1537 - DNA, 33 bp, synthetic construct
  misc_feature 1..33: note = Description of Artificial Sequence: Synthetic oligonucleotide
  source 1..33: mol_type = other DNA
agggccagtcagagtgttagcagcgacttagtc

SEQ ID NO: 1538 - protein, 11 aa, synthetic construct
  REGION 1..11: note = Description of Artificial Sequence: Synthetic peptide
RASQSVSSDLV

SEQ ID NO: 1539 - DNA, 48 bp, synthetic construct; identical to SEQ ID NO: 555
  misc_feature 1..48: note = Description of Artificial Sequence: Synthetic oligonucleotide
  source 1..48: mol_type = other DNA

SEQ ID NO: 1540 - protein, 16 aa, synthetic construct
  REGION 1..16: note = Description of Artificial Sequence: Synthetic peptide
KSSQSLLHSEGKTYLY

SEQ ID NO: 1541 - DNA, 51 bp, synthetic construct
  misc_feature 1..51: note = Description of Artificial Sequence: Synthetic oligonucleotide
  source 1..51: mol_type = other DNA
aagtccagccagagtgttttatacagctccaacaataacaactacttagct

SEQ ID NO: 1542 - protein, 17 aa, synthetic construct
  REGION 1..17: note = Description of Artificial Sequence: Synthetic peptide
KSSQSVLYSSNNNNYLA

SEQ ID NO: 1543 - DNA, 36 bp, synthetic construct
  misc_feature 1..36: note = Description of Artificial Sequence: Synthetic oligonucleotide
  source 1..36: mol_type = other DNA
tgggccagtcagagtgtttacagcagcttcttagcc

SEQ ID NO: 1544 - protein, 12 aa, synthetic construct
  REGION 1..12: note = Description of Artificial Sequence: Synthetic peptide
WASQSVYSSFLA

SEQ ID NO: 1545 - DNA, 33 bp, synthetic construct; identical to SEQ ID NO: 305
  misc_feature 1..33: note = Description of Artificial Sequence: Synthetic oligonucleotide
  source 1..33: mol_type = other DNA

SEQ ID NO: 1546 - protein, 11 aa, synthetic construct
  REGION 1..11: note = Description of Artificial Sequence: Synthetic peptide
RASQSIISYLN

SEQ ID NO: 1547 - DNA, 36 bp, synthetic construct
  misc_feature 1..36: note = Description of Artificial Sequence: Synthetic oligonucleotide
  source 1..36: mol_type = other DNA
agggccagtcagagtgttagcagcatctacttagcc

SEQ ID NO: 1548 - protein, 12 aa, synthetic construct
  REGION 1..12: note = Description of Artificial Sequence: Synthetic peptide
RASQSVSSIYLA

SEQ ID NO: 1549 - DNA, 33 bp, synthetic construct; identical to SEQ ID NO: 109
  misc_feature 1..33: note = Description of Artificial Sequence: Synthetic oligonucleotide
  source 1..33: mol_type = other DNA

SEQ ID NO: 1550 - protein, 11 aa, synthetic construct
  REGION 1..11: note = Description of Artificial Sequence: Synthetic peptide
RASQGIRNDLG

SEQ ID NO: 1551 - DNA, 33 bp, synthetic construct; identical to SEQ ID NO: 109
  misc_feature 1..33: note = Description of Artificial Sequence: Synthetic oligonucleotide
  source 1..33: mol_type = other DNA

SEQ ID NO: 1552 - protein, 11 aa, synthetic construct
  REGION 1..11: note = Description of Artificial Sequence: Synthetic peptide
RASQGIRNDLG

SEQ ID NO: 1553 - DNA, 33 bp, synthetic construct; identical to SEQ ID NO: 501
  misc_feature 1..33: note = Description of Artificial Sequence: Synthetic oligonucleotide
  source 1..33: mol_type = other DNA

SEQ ID NO: 1554 - protein, 11 aa, synthetic construct
  REGION 1..11: note = Description of Artificial Sequence: Synthetic peptide
RASQSISSYLN

SEQ ID NO: 1555 - DNA, 33 bp, synthetic construct; identical to SEQ ID NO: 205
  misc_feature 1..33: note = Description of Artificial Sequence: Synthetic oligonucleotide
  source 1..33: mol_type = other DNA

SEQ ID NO: 1556 - protein, 11 aa, synthetic construct
  REGION 1..11: note = Description of Artificial Sequence: Synthetic peptide
RASQDIRNDLG

SEQ ID NO: 1557 - DNA, 51 bp, synthetic construct
  misc_feature 1..51: note = Description of Artificial Sequence: Synthetic oligonucleotide
  source 1..51: mol_type = other DNA
aagtccagccagactgttttatacaggtccaacaattacaactacttagct

SEQ ID NO: 1558 - protein, 17 aa, synthetic construct
  REGION 1..17: note = Description of Artificial Sequence: Synthetic peptide
KSSQTVLYRSNNYNYLA

SEQ ID NO: 1559 - DNA, 33 bp, synthetic construct; identical to SEQ ID NO: 327
  misc_feature 1..33: note = Description of Artificial Sequence: Synthetic oligonucleotide
  source 1..33: mol_type = other DNA

SEQ ID NO: 1560 - protein, 11 aa, synthetic construct
  REGION 1..11: note = Description of Artificial Sequence: Synthetic peptide
RASQSIFSYLN

SEQ ID NO: 1561 - DNA, 33 bp, synthetic construct; identical to SEQ ID NO: 327
  misc_feature 1..33: note = Description of Artificial Sequence: Synthetic oligonucleotide
  source 1..33: mol_type = other DNA

SEQ ID NO: 1562 - protein, 11 aa, synthetic construct
  REGION 1..11: note = Description of Artificial Sequence: Synthetic peptide
RASQSIFSYLN

SEQ ID NO: 1563 - DNA, 33 bp, synthetic construct; identical to SEQ ID NO: 105
  misc_feature 1..33: note = Description of Artificial Sequence: Synthetic oligonucleotide
  source 1..33: mol_type = other DNA

SEQ ID NO: 1564 - protein, 11 aa, synthetic construct
  REGION 1..11: note = Description of Artificial Sequence: Synthetic peptide
RASQGISNYLA

SEQ ID NO: 1565 - DNA, 33 bp, synthetic construct; identical to SEQ ID NO: 171
  misc_feature 1..33: note = Description of Artificial Sequence: Synthetic oligonucleotide
  source 1..33: mol_type = other DNA

SEQ ID NO: 1566 - protein, 11 aa, synthetic construct
  REGION 1..11: note = Description of Artificial Sequence: Synthetic peptide
RASQGISSWLA

SEQ ID NO: 1567 - DNA, 33 bp, synthetic construct
  misc_feature 1..33: note = Description of Artificial Sequence: Synthetic oligonucleotide
  source 1..33: mol_type = other DNA
cgggcaagtcagagcattttcagctatttacat

SEQ ID NO: 1568 - protein, 11 aa, synthetic construct
  REGION 1..11: note = Description of Artificial Sequence: Synthetic peptide
RASQSIFSYLH

SEQ ID NO: 1569 - DNA, 33 bp, synthetic construct; identical to SEQ ID NO: 109
  misc_feature 1..33: note = Description of Artificial Sequence: Synthetic oligonucleotide
  source 1..33: mol_type = other DNA

SEQ ID NO: 1570 - protein, 11 aa, synthetic construct
  REGION 1..11: note = Description of Artificial Sequence: Synthetic peptide
RASQGIRNDLG

SEQ ID NO: 1571 - DNA, 33 bp, synthetic construct; identical to SEQ ID NO: 109
  misc_feature 1..33: note = Description of Artificial Sequence: Synthetic oligonucleotide
  source 1..33: mol_type = other DNA

SEQ ID NO: 1572 - protein, 11 aa, synthetic construct
  REGION 1..11: note = Description of Artificial Sequence: Synthetic peptide
RASQGIRNDLG

SEQ ID NO: 1573 - DNA, 33 bp, synthetic construct
  misc_feature 1..33: note = Description of Artificial Sequence: Synthetic oligonucleotide
  source 1..33: mol_type = other DNA
cgggcaagtcagaacattaagaaatatttaaat

SEQ ID NO: 1574 - protein, 11 aa, synthetic construct
  REGION 1..11: note = Description of Artificial Sequence: Synthetic peptide
RASQNIKKYLN

SEQ ID NO: 1575 - DNA, 33 bp, synthetic construct; identical to SEQ ID NO: 109
  misc_feature 1..33: note = Description of Artificial Sequence: Synthetic oligonucleotide
  source 1..33: mol_type = other DNA

SEQ ID NO: 1576 - protein, 11 aa, synthetic construct
  REGION 1..11: note = Description of Artificial Sequence: Synthetic peptide
RASQGIRNDLG

SEQ ID NO: 1577 - DNA, 48 bp, synthetic construct
  misc_feature 1..48: note = Description of Artificial Sequence: Synthetic oligonucleotide
  source 1..48: mol_type = other DNA
aagtctagtcagagcctccttcatggtgatggaaagacctatttgttt

SEQ ID NO: 1578 - protein, 16 aa, synthetic construct
  REGION 1..16: note = Description of Artificial Sequence: Synthetic peptide
KSSQSLLHGDGKTYLF

SEQ ID NO: 1579 - DNA, 33 bp, synthetic construct; identical to SEQ ID NO: 171
  misc_feature 1..33: note = Description of Artificial Sequence: Synthetic oligonucleotide
  source 1..33: mol_type = other DNA

SEQ ID NO: 1580 - protein, 11 aa, synthetic construct
  REGION 1..11: note = Description of Artificial Sequence: Synthetic peptide
RASQGISSWLA

SEQ ID NO: 1581 - DNA, 33 bp, synthetic construct; identical to SEQ ID NO: 109
  misc_feature 1..33: note = Description of Artificial Sequence: Synthetic oligonucleotide
  source 1..33: mol_type = other DNA

SEQ ID NO: 1582 - protein, 11 aa, synthetic construct
  REGION 1..11: note = Description of Artificial Sequence: Synthetic peptide
RASQGIRNDLG

SEQ ID NO: 1583 - DNA, 33 bp, synthetic construct
  misc_feature 1..33: note = Description of Artificial Sequence: Synthetic oligonucleotide
  source 1..33: mol_type = other DNA
cgggcgagtcaggacattagcaattatttaaat

SEQ ID NO: 1584 - protein, 11 aa, synthetic construct
  REGION 1..11: note = Description of Artificial Sequence: Synthetic peptide
RASQDISNYLN

SEQ ID NO: 1585 - DNA, 33 bp, synthetic construct
  misc_feature 1..33: note = Description of Artificial Sequence: Synthetic oligonucleotide
  source 1..33: mol_type = other DNA
cgggcgagtcagaatattaccacctggttagcc

SEQ ID NO: 1586 - protein, 11 aa, synthetic construct
  REGION 1..11: note = Description of Artificial Sequence: Synthetic peptide
RASQNITTWLA

SEQ ID NO: 1587 - DNA, 33 bp, synthetic construct
  misc_feature 1..33: note = Description of Artificial Sequence: Synthetic oligonucleotide
  source 1..33: mol_type = other DNA
cgggcgagtcaggtcattagcagttatttacat

SEQ ID NO: 1588 - protein, 11 aa, synthetic construct
  REGION 1..11: note = Description of Artificial Sequence: Synthetic peptide
RASQVISSYLH

SEQ ID NO: 1589 - DNA, 33 bp, synthetic construct; identical to SEQ ID NO: 171
  misc_feature 1..33: note = Description of Artificial Sequence: Synthetic oligonucleotide
  source 1..33: mol_type = other DNA

SEQ ID NO: 1590 - protein, 11 aa, synthetic construct
  REGION 1..11: note = Description of Artificial Sequence: Synthetic peptide
RASQGISSWLA

SEQ ID NO: 1591 - DNA, 33 bp, synthetic construct
  misc_feature 1..33: note = Description of Artificial Sequence: Synthetic oligonucleotide
  source 1..33: mol_type = other DNA
cgggcgagtcaggacattaacaattatttagcc

SEQ ID NO: 1592 - protein, 11 aa, synthetic construct
  REGION 1..11: note = Description of Artificial Sequence: Synthetic peptide
RASQDINNYLA

SEQ ID NO: 1593 - DNA, 33 bp, synthetic construct; identical to SEQ ID NO: 1491
  misc_feature 1..33: note = Description of Artificial Sequence: Synthetic oligonucleotide
  source 1..33: mol_type = other DNA

SEQ ID NO: 1594 - protein, 11 aa, synthetic construct
  REGION 1..11: note = Description of Artificial Sequence: Synthetic peptide
RASQSVNSNLA

SEQ ID NO: 1595 - DNA, 33 bp, synthetic construct
  misc_feature 1..33: note = Description of Artificial Sequence: Synthetic oligonucleotide
  source 1..33: mol_type = other DNA
cgggcgagtcaggacattagcacttatttagcc

SEQ ID NO: 1596 - protein, 11 aa, synthetic construct
  REGION 1..11: note = Description of Artificial Sequence: Synthetic peptide
RASQDISTYLA

SEQ ID NO: 1597 - DNA, 33 bp, synthetic construct; identical to SEQ ID NO: 171
  misc_feature 1..33: note = Description of Artificial Sequence: Synthetic oligonucleotide
  source 1..33: mol_type = other DNA

SEQ ID NO: 1598 - protein, 11 aa, synthetic construct
  REGION 1..11: note = Description of Artificial Sequence: Synthetic peptide
RASQGISSWLA

SEQ ID NO: 1599 - DNA, 33 bp, synthetic construct; identical to SEQ ID NO: 171
  misc_feature 1..33: note = Description of Artificial Sequence: Synthetic oligonucleotide
  source 1..33: mol_type = other DNA

SEQ ID NO: 1600 - protein, 11 aa, synthetic construct
  REGION 1..11: note = Description of Artificial Sequence: Synthetic peptide
RASQGISSWLA

SEQ ID NO: 1601 - DNA, 33 bp, synthetic construct
  misc_feature 1..33: note = Description of Artificial Sequence: Synthetic oligonucleotide
  source 1..33: mol_type = other DNA
cgggcgagtcagggcattagcaattatttacat

SEQ ID NO: 1602 - protein, 11 aa, synthetic construct
  REGION 1..11: note = Description of Artificial Sequence: Synthetic peptide
RASQGISNYLH

SEQ ID NO: 1603 - DNA, 33 bp, synthetic construct; identical to SEQ ID NO: 1481
  misc_feature 1..33: note = Description of Artificial Sequence: Synthetic oligonucleotide
  source 1..33: mol_type = other DNA

SEQ ID NO: 1604 - protein, 11 aa, synthetic construct
  REGION 1..11: note = Description of Artificial Sequence: Synthetic peptide
RASQNIFSYLN

SEQ ID NO: 1605 - DNA, 33 bp, synthetic construct
  misc_feature 1..33: note = Description of Artificial Sequence: Synthetic oligonucleotide
  source 1..33: mol_type = other DNA
cgggcaagtcaggacattagaaatgttttaggc

SEQ ID NO: 1606 - protein, 11 aa, synthetic construct
  REGION 1..11: note = Description of Artificial Sequence: Synthetic peptide
RASQDIRNVLG

SEQ ID NO: 1607 - DNA, 33 bp, synthetic construct; identical to SEQ ID NO: 519
  misc_feature 1..33: note = Description of Artificial Sequence: Synthetic oligonucleotide
  source 1..33: mol_type = other DNA

SEQ ID NO: 1608 - protein, 11 aa, synthetic construct
  REGION 1..11: note = Description of Artificial Sequence: Synthetic peptide
RASQAIRNDLG

SEQ ID NO: 1609 - DNA, 33 bp, synthetic construct; identical to SEQ ID NO: 831
  misc_feature 1..33: note = Description of Artificial Sequence: Synthetic oligonucleotide
  source 1..33: mol_type = other DNA

SEQ ID NO: 1610 - protein, 11 aa, synthetic construct
  REGION 1..11: note = Description of Artificial Sequence: Synthetic peptide
RASQGIRNDLG

SEQ ID NO: 1611 - DNA, 33 bp, synthetic construct
  misc_feature 1..33: note = Description of Artificial Sequence: Synthetic oligonucleotide
  source 1..33: mol_type = other DNA
cgggagagtcagggtattagcatctggttagcc

SEQ ID NO: 1612 - protein, 11 aa, synthetic construct
  REGION 1..11: note = Description of Artificial Sequence: Synthetic peptide
RESQGISIWLA

SEQ ID NO: 1613 - DNA, 33 bp, synthetic construct; identical to SEQ ID NO: 1491
  misc_feature 1..33: note = Description of Artificial Sequence: Synthetic oligonucleotide
  source 1..33: mol_type = other DNA

SEQ ID NO: 1614 - protein, 11 aa, synthetic construct
  REGION 1..11: note = Description of Artificial Sequence: Synthetic peptide
RASQSVNSNLA

SEQ ID NO: 1615 - DNA, 33 bp, synthetic construct; identical to SEQ ID NO: 171
  misc_feature 1..33: note = Description of Artificial Sequence: Synthetic oligonucleotide
  source 1..33: mol_type = other DNA

SEQ ID NO: 1616 - protein, 11 aa, synthetic construct
  REGION 1..11: note = Description of Artificial Sequence: Synthetic peptide
RASQGISSWLA

SEQ ID NO: 1617 - DNA, 33 bp, synthetic construct; identical to SEQ ID NO: 109
  misc_feature 1..33: note = Description of Artificial Sequence: Synthetic oligonucleotide
  source 1..33: mol_type = other DNA

SEQ ID NO: 1618 - protein, 11 aa, synthetic construct
  REGION 1..11: note = Description of Artificial Sequence: Synthetic peptide
RASQGIRNDLG

SEQ ID NO: 1619 - DNA, 33 bp, synthetic construct; identical to SEQ ID NO: 279
  misc_feature 1..33: note = Description of Artificial Sequence: Synthetic oligonucleotide
  source 1..33: mol_type = other DNA

SEQ ID NO: 1620 - protein, 11 aa, synthetic construct
  REGION 1..11: note = Description of Artificial Sequence: Synthetic peptide
RASQGISYYLA

SEQ ID NO: 1621 - DNA, 33 bp, synthetic construct; identical to SEQ ID NO: 1301
  misc_feature 1..33: note = Description of Artificial Sequence: Synthetic oligonucleotide
  source 1..33: mol_type = other DNA

SEQ ID NO: 1622 - protein, 11 aa, synthetic construct
  REGION 1..11: note = Description of Artificial Sequence: Synthetic peptide
RASQGIRNNLG

SEQ ID NO: 1623 - DNA, 33 bp, synthetic construct; identical to SEQ ID NO: 109
  misc_feature 1..33: note = Description of Artificial Sequence: Synthetic oligonucleotide
  source 1..33: mol_type = other DNA

SEQ ID NO: 1624 - protein, 11 aa, synthetic construct
  REGION 1..11: note = Description of Artificial Sequence: Synthetic peptide
RASQGIRNDLG

SEQ ID NO: 1625 - DNA, 33 bp, synthetic construct; identical to SEQ ID NO: 109
  misc_feature 1..33: note = Description of Artificial Sequence: Synthetic oligonucleotide
  source 1..33: mol_type = other DNA

SEQ ID NO: 1626 - protein, 11 aa, synthetic construct
  REGION 1..11: note = Description of Artificial Sequence: Synthetic peptide
RASQGIRNDLG

SEQ ID NO: 1627 - DNA, 33 bp, synthetic construct
  misc_feature 1..33: note = Description of Artificial Sequence: Synthetic oligonucleotide
  source 1..33: mol_type = other DNA
cgggcaggtcagaccatttacaattatttaaat

SEQ ID NO: 1628 - protein, 11 aa, synthetic construct
  REGION 1..11: note = Description of Artificial Sequence: Synthetic peptide
RAGQTIYNYLN

SEQ ID NO: 1629 - DNA, 33 bp, synthetic construct
  misc_feature 1..33: note = Description of Artificial Sequence: Synthetic oligonucleotide
  source 1..33: mol_type = other DNA
cgggcgagtcagggtgttagcaggtggttagcc

SEQ ID NO: 1630 - protein, 11 aa, synthetic construct
  REGION 1..11: note = Description of Artificial Sequence: Synthetic peptide
RASQGVSRWLA

SEQ ID NO: 1631 - DNA, 33 bp, synthetic construct; identical to SEQ ID NO: 1491
  misc_feature 1..33: note = Description of Artificial Sequence: Synthetic oligonucleotide
  source 1..33: mol_type = other DNA

SEQ ID NO: 1632 - protein, 11 aa, synthetic construct
  REGION 1..11: note = Description of Artificial Sequence: Synthetic peptide
RASQSVNSNLA

SEQ ID NO: 1633 - DNA, 33 bp, synthetic construct; identical to SEQ ID NO: 95
  misc_feature 1..33: note = Description of Artificial Sequence: Synthetic oligonucleotide
  source 1..33: mol_type = other DNA

SEQ ID NO: 1634 - protein, 11 aa, synthetic construct
  REGION 1..11: note = Description of Artificial Sequence: Synthetic peptide
RASQGISKWLA

SEQ ID NO: 1635 - DNA, 33 bp, synthetic construct
  misc_feature 1..33: note = Description of Artificial Sequence: Synthetic oligonucleotide
  source 1..33: mol_type = other DNA
cggacaagtcagagcattttcaactatttaaat

SEQ ID NO: 1636 - protein, 11 aa, synthetic construct
  REGION 1..11: note = Description of Artificial Sequence: Synthetic peptide
RTSQSIFNYLN

SEQ ID NO: 1637 - DNA, 51 bp, synthetic construct
  misc_feature 1..51: note = Description of Artificial Sequence: Synthetic oligonucleotide
  source 1..51: mol_type = other DNA
aagtccagccagagtgttttatacagctccaacaataacaactacttggct

SEQ ID NO: 1638 - protein, 17 aa, synthetic construct
  REGION 1..17: note = Description of Artificial Sequence: Synthetic peptide
KSSQSVLYSSNNNNYLA

SEQ ID NO: 1639 - DNA, 33 bp, synthetic construct
  misc_feature 1..33: note = Description of Artificial Sequence: Synthetic oligonucleotide
  source 1..33: mol_type = other DNA
cgggcaagtcagggcattagaaaggatttaggc

SEQ ID NO: 1640 - protein, 11 aa, synthetic construct
  REGION 1..11: note = Description of Artificial Sequence: Synthetic peptide
RASQGIRKDLG

SEQ ID NO: 1641 - DNA, 33 bp, synthetic construct; identical to SEQ ID NO: 1177
  misc_feature 1..33: note = Description of Artificial Sequence: Synthetic oligonucleotide
  source 1..33: mol_type = other DNA

SEQ ID NO: 1642 - protein, 11 aa, synthetic construct
  REGION 1..11: note = Description of Artificial Sequence: Synthetic peptide
RASQDISSWLA

SEQ ID NO: 1643 - DNA, 33 bp, synthetic construct; identical to SEQ ID NO: 171
  misc_feature 1..33: note = Description of Artificial Sequence: Synthetic oligonucleotide
  source 1..33: mol_type = other DNA

SEQ ID NO: 1644 - protein, 11 aa, synthetic construct
  REGION 1..11: note = Description of Artificial Sequence: Synthetic peptide
RASQGISSWLA

SEQ ID NO: 1645 - DNA, 33 bp, synthetic construct
  misc_feature 1..33: note = Description of Artificial Sequence: Synthetic oligonucleotide
  source 1..33: mol_type = other DNA
cgggcaagtcagggcattaacaataatttaaac

SEQ ID NO: 1646 - protein, 11 aa, synthetic construct
  REGION 1..11: note = Description of Artificial Sequence: Synthetic peptide
RASQGINNNLN

SEQ ID NO: 1647 - DNA, 33 bp, synthetic construct
  misc_feature 1..33: note = Description of Artificial Sequence: Synthetic oligonucleotide
  source 1..33: mol_type = other DNA
cgtgcaagtcagggcattagaaatgatttagga

SEQ ID NO: 1648 - protein, 11 aa, synthetic construct
  REGION 1..11: note = Description of Artificial Sequence: Synthetic peptide
RASQGIRNDLG

SEQ ID NO: 1649 - DNA, 51 bp, synthetic construct
  misc_feature 1..51: note = Description of Artificial Sequence: Synthetic oligonucleotide
  source 1..51: mol_type = other DNA
aagtccagccagagtgttttacacagctccaacaataacaactacttagat

SEQ ID NO: 1650 - protein, 17 aa, synthetic construct
  REGION 1..17: note = Description of Artificial Sequence: Synthetic peptide
KSSQSVLHSSNNNNYLD

SEQ ID NO: 1651 - DNA, 33 bp, synthetic construct
  misc_feature 1..33: note = Description of Artificial Sequence: Synthetic oligonucleotide
  source 1..33: mol_type = other DNA
cgggcaagtcagggcattagaaatgatttagat

SEQ ID NO: 1652 - protein, 11 aa, synthetic construct
  REGION 1..11: note = Description of Artificial Sequence: Synthetic peptide
RASQGIRNDLD

SEQ ID NO: 1653 - DNA, 33 bp, synthetic construct
  misc_feature 1..33: note = Description of Artificial Sequence: Synthetic oligonucleotide
  source 1..33: mol_type = other DNA
cgggcaagtcagggcattagaaatgttttaggc

SEQ ID NO: 1654 - protein, 11 aa, synthetic construct
  REGION 1..11: note = Description of Artificial Sequence: Synthetic peptide
RASQGIRNVLG

SEQ ID NO: 1655 - DNA, 33 bp, synthetic construct; identical to SEQ ID NO: 171
  misc_feature 1..33: note = Description of Artificial Sequence: Synthetic oligonucleotide
  source 1..33: mol_type = other DNA

SEQ ID NO: 1656 - protein, 11 aa, synthetic construct
  REGION 1..11: note = Description of Artificial Sequence: Synthetic peptide
RASQGISSWLA

SEQ ID NO: 1657 - DNA, 33 bp, synthetic construct; identical to SEQ ID NO: 1651
  misc_feature 1..33: note = Description of Artificial Sequence: Synthetic oligonucleotide
  source 1..33: mol_type = other DNA

SEQ ID NO: 1658 - protein, 11 aa, synthetic construct
  REGION 1..11: note = Description of Artificial Sequence: Synthetic peptide
RASQGIRNDLD

SEQ ID NO: 1659 - DNA, 33 bp, synthetic construct; identical to SEQ ID NO: 137
  misc_feature 1..33: note = Description of Artificial Sequence: Synthetic oligonucleotide
  source 1..33: mol_type = other DNA

SEQ ID NO: 1660 - protein, 11 aa, synthetic construct
  REGION 1..11: note = Description of Artificial Sequence: Synthetic peptide
RASQNISSYLN

SEQ ID NO: 1661 - DNA, 33 bp, synthetic construct
  misc_feature 1..33: note = Description of Artificial Sequence: Synthetic oligonucleotide
  source 1..33: mol_type = other DNA
cgggcgagtcagggcattagcagttatttaaat

SEQ ID NO: 1662 - protein, 11 aa, synthetic construct
  REGION 1..11: note = Description of Artificial Sequence: Synthetic peptide
RASQGISSYLN

SEQ ID NO: 1663 - DNA, 33 bp, synthetic construct; identical to SEQ ID NO: 171
  misc_feature 1..33: note = Description of Artificial Sequence: Synthetic oligonucleotide
  source 1..33: mol_type = other DNA

SEQ ID NO: 1664 - protein, 11 aa, synthetic construct
  REGION 1..11: note = Description of Artificial Sequence: Synthetic peptide
RASQGISSWLA

SEQ ID NO: 1665 - DNA, 33 bp, synthetic construct; identical to SEQ ID NO: 553
  misc_feature 1..33: note = Description of Artificial Sequence: Synthetic oligonucleotide
  source 1..33: mol_type = other DNA

SEQ ID NO: 1666 - protein, 11 aa, synthetic construct
  REGION 1..11: note = Description of Artificial Sequence: Synthetic peptide
RASQGISNWLA

SEQ ID NO: 1667 - DNA, 33 bp, synthetic construct; identical to SEQ ID NO: 109
  misc_feature 1..33: note = Description of Artificial Sequence: Synthetic oligonucleotide
  source 1..33: mol_type = other DNA

SEQ ID NO: 1668 - protein, 11 aa, synthetic construct
  REGION 1..11: note = Description of Artificial Sequence: Synthetic peptide
RASQGIRNDLG

SEQ ID NO: 1669 - DNA, 33 bp, synthetic construct
  misc_feature 1..33: note = Description of Artificial Sequence: Synthetic oligonucleotide
  source 1..33: mol_type = other DNA
cgggcaagtcaggacatcagaaatgatttaggc

SEQ ID NO: 1670 - protein, 11 aa, synthetic construct
  REGION 1..11: note = Description of Artificial Sequence: Synthetic peptide
RASQDIRNDLG

SEQ ID NO: 1671 - DNA, 33 bp, synthetic construct; identical to SEQ ID NO: 109
  misc_feature 1..33: note = Description of Artificial Sequence: Synthetic oligonucleotide
  source 1..33: mol_type = other DNA

SEQ ID NO: 1672 - protein, 11 aa, synthetic construct
  REGION 1..11: note = Description of Artificial Sequence: Synthetic peptide
RASQGIRNDLG

SEQ ID NO: 1673 - DNA, 36 bp, synthetic construct
  misc_feature 1..36: note = Description of Artificial Sequence: Synthetic oligonucleotide
  source 1..36: mol_type = other DNA
agggcccgtcagaatgttgacagcagctacttagcc

SEQ ID NO: 1674 - protein, 12 aa, synthetic construct
  REGION 1..12: note = Description of Artificial Sequence: Synthetic peptide
RARQNVDSSYLA

SEQ ID NO: 1675 - DNA, 36 bp, synthetic construct
  misc_feature 1..36: note = Description of Artificial Sequence: Synthetic oligonucleotide
  source 1..36: mol_type = other DNA
agggccagtcagaatatttacagcaactacctagcc

SEQ ID NO: 1676 - protein, 12 aa, synthetic construct
  REGION 1..12: note = Description of Artificial Sequence: Synthetic peptide
RASQNIYSNYLA

SEQ ID NO: 1677 - DNA, 51 bp, synthetic construct; identical to SEQ ID NO: 1079
  misc_feature 1..51: note = Description of Artificial Sequence: Synthetic oligonucleotide
  source 1..51: mol_type = other DNA

SEQ ID NO: 1678 - protein, 17 aa, synthetic construct
  REGION 1..17: note = Description of Artificial Sequence: Synthetic peptide
KSSQSVLYSSNNYNYLA

SEQ ID NO: 1679 - DNA, 51 bp, synthetic construct
  misc_feature 1..51: note = Description of Artificial Sequence: Synthetic oligonucleotide
  source 1..51: mol_type = other DNA
aagtccagccagagtgttttacacagctccaacaataacaattacttagcc

SEQ ID NO: 1680 - protein, 17 aa, synthetic construct
  REGION 1..17: note = Description of Artificial Sequence: Synthetic peptide
KSSQSVLHSSNNNNYLA

SEQ ID NO: 1681 - DNA, 36 bp, synthetic construct
  misc_feature 1..36: note = Description of Artificial Sequence: Synthetic oligonucleotide
  source 1..36: mol_type = other DNA
agggccagtcagagtgttagcagcagctacttagtc

SEQ ID NO: 1682 - protein, 12 aa, synthetic construct
  REGION 1..12: note = Description of Artificial Sequence: Synthetic peptide
RASQSVSSSYLV

SEQ ID NO: 1683 - DNA, 51 bp, synthetic construct
  misc_feature 1..51: note = Description of Artificial Sequence: Synthetic oligonucleotide
  source 1..51: mol_type = other DNA
aagtccagccagagtgttttacacagctccaacaataagaactacttaact

SEQ ID NO: 1684 - protein, 17 aa, synthetic construct
  REGION 1..17: note = Description of Artificial Sequence: Synthetic peptide
KSSQSVLHSSNNKNYLT

SEQ ID NO: 1685 - DNA, 51 bp, synthetic construct
  misc_feature 1..51: note = Description of Artificial Sequence: Synthetic oligonucleotide
  source 1..51: mol_type = other DNA
aagtccagccagagtgttttatacagctccaacaatgcgaactacttagct

SEQ ID NO: 1686 - protein, 17 aa, synthetic construct
  REGION 1..17: note = Description of Artificial Sequence: Synthetic peptide
KSSQSVLYSSNNANYLA

SEQ ID NO: 1687 - DNA, 33 bp, synthetic construct
  misc_feature 1..33: note = Description of Artificial Sequence: Synthetic oligonucleotide
  source 1..33: mol_type = other DNA
agggccagtgtgagtgttgtcaacagcttagcc

SEQ ID NO: 1688 - protein, 11 aa, synthetic construct
  REGION 1..11: note = Description of Artificial Sequence: Synthetic peptide
RASVSVVNSLA

SEQ ID NO: 1689 - DNA, 51 bp, synthetic construct
  misc_feature 1..51: note = Description of Artificial Sequence: Synthetic oligonucleotide
  source 1..51: mol_type = other DNA
aagtccagccagagtgttttacacagctccaacaattacaactacttagct

SEQ ID NO: 1690 - protein, 17 aa, synthetic construct
  REGION 1..17: note = Description of Artificial Sequence: Synthetic peptide
KSSQSVLHSSNNYNYLA

SEQ ID NO: 1691 - DNA, 33 bp, synthetic construct; identical to SEQ ID NO: 109
  misc_feature 1..33: note = Description of Artificial Sequence: Synthetic oligonucleotide
  source 1..33: mol_type = other DNA

SEQ ID NO: 1692 - protein, 11 aa, synthetic construct
  REGION 1..11: note = Description of Artificial Sequence: Synthetic peptide
RASQGIRNDLG

SEQ ID NO: 1693 - DNA, 51 bp, synthetic construct
  misc_feature 1..51: note = Description of Artificial Sequence: Synthetic oligonucleotide
  source 1..51: mol_type = other DNA
aagtccagccagagtgttttattcagctccaacaattataattacttagct

SEQ ID NO: 1694 - protein, 17 aa, synthetic construct
  REGION 1..17: note = Description of Artificial Sequence: Synthetic peptide
KSSQSVLFSSNNYNYLA

SEQ ID NO: 1695 - DNA, 36 bp, synthetic construct
  misc_feature 1..36: note = Description of Artificial Sequence: Synthetic oligonucleotide
  source 1..36: mol_type = other DNA
agggccagtcagaatatttacagcagttacttagcc

SEQ ID NO: 1696 - protein, 12 aa, synthetic construct
  REGION 1..12: note = Description of Artificial Sequence: Synthetic peptide
RASQNIYSSYLA

SEQ ID NO: 1697 - DNA, 36 bp, synthetic construct
  misc_feature 1..36: note = Description of Artificial Sequence: Synthetic oligonucleotide
  source 1..36: mol_type = other DNA
agggccagtcagagtgtttacagcagctacttagcc

SEQ ID NO: 1698 - protein, 12 aa, synthetic construct
  REGION 1..12: note = Description of Artificial Sequence: Synthetic peptide
RASQSVYSSYLA

SEQ ID NO: 1699 - DNA, 36 bp, synthetic construct; identical to SEQ ID NO: 1697
  misc_feature 1..36: note = Description of Artificial Sequence: Synthetic oligonucleotide
  source 1..36: mol_type = other DNA

SEQ ID NO: 1700 - protein, 12 aa, synthetic construct
  REGION 1..12: note = Description of Artificial Sequence: Synthetic peptide
RASQSVYSSYLA

SEQ ID NO: 1701 - DNA, 33 bp, synthetic construct; identical to SEQ ID NO: 109
  misc_feature 1..33: note = Description of Artificial Sequence: Synthetic oligonucleotide
  source 1..33: mol_type = other DNA

SEQ ID NO: 1702 - protein, 11 aa, synthetic construct
  REGION 1..11: note = Description of Artificial Sequence: Synthetic peptide
RASQGIRNDLG

SEQ ID NO: 1703 - DNA, 36 bp, synthetic construct; identical to SEQ ID NO: 99
  misc_feature 1..36: note = Description of Artificial Sequence: Synthetic oligonucleotide
  source 1..36: mol_type = other DNA

SEQ ID NO: 1704 - protein, 12 aa, synthetic construct
  REGION 1..12: note = Description of Artificial Sequence: Synthetic peptide
RASQSVNSNYLA

SEQ ID NO: 1705 - DNA, 51 bp, synthetic construct
  misc_feature 1..51: note = Description of Artificial Sequence: Synthetic oligonucleotide
  source 1..51: mol_type = other DNA
aagtccagccagagtgtattacacagctccaacagttacaactacttagct

SEQ ID NO: 1706 - protein, 17 aa, synthetic construct
  REGION 1..17: note = Description of Artificial Sequence: Synthetic peptide
KSSQSVLHSSNSYNYLA

SEQ ID NO: 1707 - DNA, 51 bp, synthetic construct
  misc_feature 1..51: note = Description of Artificial Sequence: Synthetic oligonucleotide
  source 1..51: mol_type = other DNA
aagtccagccagagtattttatacaactccaacaataacaactacttagct

SEQ ID NO: 1708 - protein, 17 aa, synthetic construct
  REGION 1..17: note = Description of Artificial Sequence: Synthetic peptide
KSSQSILYNSNNNNYLA

SEQ ID NO: 1709 - DNA, 36 bp, synthetic construct; identical to SEQ ID NO: 759
  misc_feature 1..36: note = Description of Artificial Sequence: Synthetic oligonucleotide
  source 1..36: mol_type = other DNA

SEQ ID NO: 1710 - protein, 12 aa, synthetic construct
  REGION 1..12: note = Description of Artificial Sequence: Synthetic peptide
RASQSVSSSYLA

SEQ ID NO: 1711 - DNA, 36 bp, synthetic construct; identical to SEQ ID NO: 1681
  misc_feature 1..36: note = Description of Artificial Sequence: Synthetic oligonucleotide
  source 1..36: mol_type = other DNA

SEQ ID NO: 1712 - protein, 12 aa, synthetic construct
  REGION 1..12: note = Description of Artificial Sequence: Synthetic peptide
RASQSVSSSYLV

SEQ ID NO: 1713 - DNA, 36 bp, synthetic construct
  misc_feature 1..36: note = Description of Artificial Sequence: Synthetic oligonucleotide
  source 1..36: mol_type = other DNA
agggccagtccgagtgttgacagcagctacttagcc

SEQ ID NO: 1714 - protein, 12 aa, synthetic construct
  REGION 1..12: note = Description of Artificial Sequence: Synthetic peptide
RASPSVDSSYLA

SEQ ID NO: 1715 - DNA, 36 bp, synthetic construct
  misc_feature 1..36: note = Description of Artificial Sequence: Synthetic oligonucleotide
  source 1..36: mol_type = other DNA
aggaccagtccgaatgttgacagcagctacttagcc

SEQ ID NO: 1716 - protein, 12 aa, synthetic construct
  REGION 1..12: note = Description of Artificial Sequence: Synthetic peptide
RTSPNVDSSYLA

SEQ ID NO: 1717 - DNA, 36 bp, synthetic construct
  misc_feature 1..36: note = Description of Artificial Sequence: Synthetic oligonucleotide
  source 1..36: mol_type = other DNA
agggccagtcagagtgttagcagcaggtacttagcc

SEQ ID NO: 1718 - protein, 12 aa, synthetic construct
  REGION 1..12: note = Description of Artificial Sequence: Synthetic peptide
RASQSVSSRYLA

SEQ ID NO: 1719 - DNA, 51 bp, synthetic construct
  misc_feature 1..51: note = Description of Artificial Sequence: Synthetic oligonucleotide
  source 1..51: mol_type = other DNA
aagtccagccagactgttttacacagctccaacaattataactacttagct

SEQ ID NO: 1720 - protein, 17 aa, synthetic construct
  REGION 1..17: note = Description of Artificial Sequence: Synthetic peptide
KSSQTVLHSSNNYNYLA

SEQ ID NO: 1721 - DNA, 36 bp, synthetic construct; identical to SEQ ID NO: 1681
  misc_feature 1..36: note = Description of Artificial Sequence: Synthetic oligonucleotide
  source 1..36: mol_type = other DNA

SEQ ID NO: 1722 - protein, 12 aa, synthetic construct
  REGION 1..12: note = Description of Artificial Sequence: Synthetic peptide
RASQSVSSSYLV

SEQ ID NO: 1723 - DNA, 36 bp, synthetic construct
  misc_feature 1..36: note = Description of Artificial Sequence: Synthetic oligonucleotide
  source 1..36: mol_type = other DNA
agggccagtcagagtgttagcagcagttacttatcc

SEQ ID NO: 1724 - protein, 12 aa, synthetic construct
  REGION 1..12: note = Description of Artificial Sequence: Synthetic peptide
RASQSVSSSYLS

SEQ ID NO: 1725 - DNA, 36 bp, synthetic construct
  misc_feature 1..36: note = Description of Artificial Sequence: Synthetic oligonucleotide
  source 1..36: mol_type = other DNA
agggccagtcagaatatttacagcaactacttagcc

SEQ ID NO: 1726 - protein, 12 aa, synthetic construct
  REGION 1..12: note = Description of Artificial Sequence: Synthetic peptide
RASQNIYSNYLA

SEQ ID NO: 1727 - DNA, 33 bp, synthetic construct
  misc_feature 1..33: note = Description of Artificial Sequence: Synthetic oligonucleotide
  source 1..33: mol_type = other DNA
cgggcgagtcagggcattggcaagtatttagcc

SEQ ID NO: 1728 - protein, 11 aa, synthetic construct
  REGION 1..11: note = Description of Artificial Sequence: Synthetic peptide
RASQGIGKYLA

SEQ ID NO: 1729 - DNA, 33 bp, synthetic construct
  misc_feature 1..33: note = Description of Artificial Sequence: Synthetic oligonucleotide
  source 1..33: mol_type = other DNA
agggccagtctgagtgttgtcaacagcttagcc

SEQ ID NO: 1730 - protein, 11 aa, synthetic construct
  REGION 1..11: note = Description of Artificial Sequence: Synthetic peptide
RASLSVVNSLA

SEQ ID NO: 1731 - DNA, 48 bp, synthetic construct
  misc_feature 1..48: note = Description of Artificial Sequence: Synthetic oligonucleotide
  source 1..48: mol_type = other DNA
aggtctagtcagagcctcctgcatagtaatggacacaactatttggat

SEQ ID NO: 1732 - protein, 16 aa, synthetic construct
  REGION 1..16: note = Description of Artificial Sequence: Synthetic peptide
RSSQSLLHSNGHNYLD

SEQ ID NO: 1733 - DNA, 36 bp, synthetic construct; identical to SEQ ID NO: 99
  misc_feature 1..36: note = Description of Artificial Sequence: Synthetic oligonucleotide
  source 1..36: mol_type = other DNA

SEQ ID NO: 1734 - protein, 12 aa, synthetic construct
  REGION 1..12: note = Description of Artificial Sequence: Synthetic peptide
RASQSVNSNYLA

SEQ ID NO: 1735 - DNA, 51 bp, synthetic construct
  misc_feature 1..51: note = Description of Artificial Sequence: Synthetic oligonucleotide
  source 1..51: mol_type = other DNA
aagtcccgccagagtgttttacacagctccaacaattacaactacttagct

SEQ ID NO: 1736 - protein, 17 aa, synthetic construct
  REGION 1..17: note = Description of Artificial Sequence: Synthetic peptide
KSRQSVLHSSNNYNYLA

SEQ ID NO: 1737 - DNA, 51 bp, synthetic construct
  misc_feature 1..51: note = Description of Artificial Sequence: Synthetic oligonucleotide
  source 1..51: mol_type = other DNA
aagtccagccagagtattttatacagctccaacaataataactacttagct

SEQ ID NO: 1738 - protein, 17 aa, synthetic construct
  REGION 1..17: note = Description of Artificial Sequence: Synthetic peptide
KSSQSILYSSNNNNYLA

SEQ ID NO: 1739 - DNA, 36 bp, synthetic construct; identical to SEQ ID NO: 1697
  misc_feature 1..36: note = Description of Artificial Sequence: Synthetic oligonucleotide
  source 1..36: mol_type = other DNA

SEQ ID NO: 1740 - protein, 12 aa, synthetic construct
  REGION 1..12: note = Description of Artificial Sequence: Synthetic peptide
RASQSVYSSYLA

SEQ ID NO: 1741 - DNA, 36 bp, synthetic construct; identical to SEQ ID NO: 1697
  misc_feature 1..36: note = Description of Artificial Sequence: Synthetic oligonucleotide
  source 1..36: mol_type = other DNA

SEQ ID NO: 1742 - protein, 12 aa, synthetic construct
  REGION 1..12: note = Description of Artificial Sequence: Synthetic peptide
RASQSVYSSYLA

SEQ ID NO: 1743 - DNA, 48 bp, synthetic construct
  misc_feature 1..48: note = Description of Artificial Sequence: Synthetic oligonucleotide
  source 1..48: mol_type = other DNA
aggtctagtcagagcctcctgcatagtagtggatacaactatttggat

SEQ ID NO: 1744 - protein, 16 aa, synthetic construct
  REGION 1..16: note = Description of Artificial Sequence: Synthetic peptide
RSSQSLLHSSGYNYLD

SEQ ID NO: 1745 - DNA, 36 bp, synthetic construct
  misc_feature 1..36: note = Description of Artificial Sequence: Synthetic oligonucleotide
  source 1..36: mol_type = other DNA
agggccagtccgagtgttaacagctactacttagcc

SEQ ID NO: 1746 - protein, 12 aa, synthetic construct
  REGION 1..12: note = Description of Artificial Sequence: Synthetic peptide
RASPSVNSYYLA

SEQ ID NO: 1747 - DNA, 33 bp, synthetic construct; identical to SEQ ID NO: 1505
  misc_feature 1..33: note = Description of Artificial Sequence: Synthetic oligonucleotide
  source 1..33: mol_type = other DNA

SEQ ID NO: 1748 - protein, 11 aa, synthetic construct
  REGION 1..11: note = Description of Artificial Sequence: Synthetic peptide
RASQSVSSSLA

SEQ ID NO: 1749 - DNA, 36 bp, synthetic construct
  misc_feature 1..36: note = Description of Artificial Sequence: Synthetic oligonucleotide
  source 1..36: mol_type = other DNA
agggccagtcagagtgttgacagcaactacttagcc

SEQ ID NO: 1750 - protein, 12 aa, synthetic construct
  REGION 1..12: note = Description of Artificial Sequence: Synthetic peptide
RASQSVDSNYLA

SEQ ID NO: 1751 - DNA, 33 bp, synthetic construct
  misc_feature 1..33: note = Description of Artificial Sequence: Synthetic oligonucleotide
  source 1..33: mol_type = other DNA
cgggcgagtcagggcattagcaagtatttagcc

SEQ ID NO: 1752 - protein, 11 aa, synthetic construct
  REGION 1..11: note = Description of Artificial Sequence: Synthetic peptide
RASQGISKYLA

SEQ ID NO: 1753 - DNA, 51 bp, synthetic construct; identical to SEQ ID NO: 1719
  misc_feature 1..51: note = Description of Artificial Sequence: Synthetic oligonucleotide
  source 1..51: mol_type = other DNA

SEQ ID NO: 1754 - protein, 17 aa, synthetic construct
  REGION 1..17: note = Description of Artificial Sequence: Synthetic peptide
KSSQTVLHSSNNYNYLA

SEQ ID NO: 1755 - DNA, 36 bp, synthetic construct
  misc_feature 1..36: note = Description of Artificial Sequence: Synthetic oligonucleotide
  source 1..36: mol_type = other DNA
agggccagtcagagtgtttacagcagctacttagcg

SEQ ID NO: 1756 - protein, 12 aa, synthetic construct
  REGION 1..12: note = Description of Artificial Sequence: Synthetic peptide
RASQSVYSSYLA

SEQ ID NO: 1757 - DNA, 36 bp, synthetic construct; identical to SEQ ID NO: 1697
  misc_feature 1..36: note = Description of Artificial Sequence: Synthetic oligonucleotide
  source 1..36: mol_type = other DNA

SEQ ID NO: 1758 - protein, 12 aa, synthetic construct
  REGION 1..12: note = Description of Artificial Sequence: Synthetic peptide
RASQSVYSSYLA

SEQ ID NO: 1759 - DNA, 36 bp, synthetic construct; identical to SEQ ID NO: 759
  misc_feature 1..36: note = Description of Artificial Sequence: Synthetic oligonucleotide
  source 1..36: mol_type = other DNA

SEQ ID NO: 1760 - protein, 12 aa, synthetic construct
  REGION 1..12: note = Description of Artificial Sequence: Synthetic peptide
RASQSVSSSYLA

SEQ ID NO: 1761 - DNA, 36 bp, synthetic construct; identical to SEQ ID NO: 1717
  misc_feature 1..36: note = Description of Artificial Sequence: Synthetic oligonucleotide
  source 1..36: mol_type = other DNA

SEQ ID NO: 1762 - protein, 12 aa, synthetic construct
  REGION 1..12: note = Description of Artificial Sequence: Synthetic peptide
RASQSVSSRYLA

SEQ ID NO: 1763 - DNA, 36 bp, synthetic construct; identical to SEQ ID NO: 1681
  misc_feature 1..36: note = Description of Artificial Sequence: Synthetic oligonucleotide
  source 1..36: mol_type = other DNA

SEQ ID NO: 1764 - protein, 12 aa, synthetic construct
  REGION 1..12: note = Description of Artificial Sequence: Synthetic peptide
RASQSVSSSYLV

SEQ ID NO: 1765 - DNA, 36 bp, synthetic construct
  misc_feature 1..36: note = Description of Artificial Sequence: Synthetic oligonucleotide
  source 1..36: mol_type = other DNA
agggccagtcagagtgttcacagcaggtacttagcc

SEQ ID NO: 1766 - protein, 12 aa, synthetic construct
  REGION 1..12: note = Description of Artificial Sequence: Synthetic peptide
RASQSVHSRYLA

SEQ ID NO: 1767 - DNA, 51 bp, synthetic construct
  misc_feature 1..51: note = Description of Artificial Sequence: Synthetic oligonucleotide
  source 1..51: mol_type = other DNA
aagtccagccagagtgttttatacacctccaacaataacaactacttagct

SEQ ID NO: 1768 - protein, 17 aa, synthetic construct
  REGION 1..17: note = Description of Artificial Sequence: Synthetic peptide
KSSQSVLYTSNNNNYLA

SEQ ID NO: 1769 - DNA, 36 bp, synthetic construct; identical to SEQ ID NO: 1681
  misc_feature 1..36: note = Description of Artificial Sequence: Synthetic oligonucleotide
  source 1..36: mol_type = other DNA

SEQ ID NO: 1770 - protein, 12 aa, synthetic construct
  REGION 1..12: note = Description of Artificial Sequence: Synthetic peptide
RASQSVSSSYLV

SEQ ID NO: 1771 - DNA, 36 bp, synthetic construct
  misc_feature 1..36: note = Description of Artificial Sequence: Synthetic oligonucleotide
  source 1..36: mol_type = other DNA
agggccaggcagagtgttgacagcagttatttagcc

SEQ ID NO: 1772 - protein, 12 aa, synthetic construct
  REGION 1..12: note = Description of Artificial Sequence: Synthetic peptide
RARQSVDSSYLA

SEQ ID NO: 1773 - DNA, 51 bp, synthetic construct
  misc_feature 1..51: note = Description of Artificial Sequence: Synthetic oligonucleotide
  source 1..51: mol_type = other DNA
aggtccagccagagtgttttatacagctccaacaattataactacttagct

SEQ ID NO: 1774 - protein, 17 aa, synthetic construct
  REGION 1..17: note = Description of Artificial Sequence: Synthetic peptide
RSSQSVLYSSNNYNYLA

SEQ ID NO: 1775 - DNA, 33 bp, synthetic construct
  misc_feature 1..33: note = Description of Artificial Sequence: Synthetic oligonucleotide
  source 1..33: mol_type = other DNA
cgggcgagtcaggtcattagcaagtatttagcc

SEQ ID NO: 1776 - protein, 11 aa, synthetic construct
  REGION 1..11: note = Description of Artificial Sequence: Synthetic peptide
RASQVISKYLA

SEQ ID NO: 1777 - DNA, 51 bp, synthetic construct
  misc_feature 1..51: note = Description of Artificial Sequence: Synthetic oligonucleotide
  source 1..51: mol_type = other DNA
aagtccagccagagtgttttacacagctctaataaaaagaactacttagct

SEQ ID NO: 1778 - protein, 17 aa, synthetic construct
  REGION 1..17: note = Description of Artificial Sequence: Synthetic peptide
KSSQSVLHSSNKKNYLA

SEQ ID NO: 1779 - DNA, 51 bp, synthetic construct; identical to SEQ ID NO: 1767
  misc_feature 1..51: note = Description of Artificial Sequence: Synthetic oligonucleotide
  source 1..51: mol_type = other DNA

SEQ ID NO: 1780 - protein, 17 aa, synthetic construct
  REGION 1..17: note = Description of Artificial Sequence: Synthetic peptide
KSSQSVLYTSNNNNYLA

SEQ ID NO: 1781 - DNA, 33 bp, synthetic construct
  misc_feature 1..33: note = Description of Artificial Sequence: Synthetic oligonucleotide
  source 1..33: mol_type = other DNA
agggccagtcagagtgttagcagaaatttagcc

SEQ ID NO: 1782 - protein, 11 aa, synthetic construct
  REGION 1..11: note = Description of Artificial Sequence: Synthetic peptide
RASQSVSRNLA

SEQ ID NO: 1783 - DNA, 33 bp, synthetic construct
  misc_feature 1..33: note = Description of Artificial Sequence: Synthetic oligonucleotide
  source 1..33: mol_type = other DNA
agggccagtcagagtgttgccagcagcttagcc

SEQ ID NO: 1784 - protein, 11 aa, synthetic construct
  REGION 1..11: note = Description of Artificial Sequence: Synthetic peptide
RASQSVASSLA

SEQ ID NO: 1785 - DNA, 36 bp, synthetic construct
  misc_feature 1..36: note = Description of Artificial Sequence: Synthetic oligonucleotide
  source 1..36: mol_type = other DNA
agggccagtcagagttttagcagcgcctacttagcc

SEQ ID NO: 1786 - protein, 12 aa, synthetic construct
  REGION 1..12: note = Description of Artificial Sequence: Synthetic peptide
RASQSFSSAYLA

SEQ ID NO: 1787 - DNA, 51 bp, synthetic construct; identical to SEQ ID NO: 159
  misc_feature 1..51: note = Description of Artificial Sequence: Synthetic oligonucleotide
  source 1..51: mol_type = other DNA

SEQ ID NO: 1788 - protein, 17 aa, synthetic construct
  REGION 1..17: note = Description of Artificial Sequence: Synthetic peptide
KSSQSVLYSSNSHNYLA

SEQ ID NO: 1789 - DNA, 36 bp, synthetic construct
  misc_feature 1..36: note = Description of Artificial Sequence: Synthetic oligonucleotide
  source 1..36: mol_type = other DNA
agggccagtcagaatgttgacagcaactacttagcc

SEQ ID NO: 1790 - protein, 12 aa, synthetic construct
  REGION 1..12: note = Description of Artificial Sequence: Synthetic peptide
RASQNVDSNYLA

SEQ ID NO: 1791 - DNA, 51 bp, synthetic construct; identical to SEQ ID NO: 1719
  misc_feature 1..51: note = Description of Artificial Sequence: Synthetic oligonucleotide
  source 1..51: mol_type = other DNA

SEQ ID NO: 1792 - protein, 17 aa, synthetic construct
  REGION 1..17: note = Description of Artificial Sequence: Synthetic peptide
KSSQTVLHSSNNYNYLA

SEQ ID NO: 1793 - DNA, 51 bp, synthetic construct
  misc_feature 1..51: note = Description of Artificial Sequence: Synthetic oligonucleotide
  source 1..51: mol_type = other DNA
aagtccagccagagtgttttatacagcttcaacaattacaactacttagct

SEQ ID NO: 1794 - protein, 17 aa, synthetic construct
  REGION 1..17: note = Description of Artificial Sequence: Synthetic peptide
KSSQSVLYSFNNYNYLA

SEQ ID NO: 1795 - DNA, 51 bp, synthetic construct; identical to SEQ ID NO: 83
  misc_feature 1..51: note = Description of Artificial Sequence: Synthetic oligonucleotide
  source 1..51: mol_type = other DNA

SEQ ID NO: 1796 - protein, 17 aa, synthetic construct
  REGION 1..17: note = Description of Artificial Sequence: Synthetic peptide
KSSQSVLFSSNNYNYLA

SEQ ID NO: 1797 - DNA, 51 bp, synthetic construct
  misc_feature 1..51: note = Description of Artificial Sequence: Synthetic oligonucleotide
  source 1..51: mol_type = other DNA
aagtccagccagactgttttacacagcttcaacaattataactacttagct

SEQ ID NO: 1798 - protein, 17 aa, synthetic construct
  REGION 1..17: note = Description of Artificial Sequence: Synthetic peptide
KSSQTVLHSFNNYNYLA

SEQ ID NO: 1799 - DNA, 36 bp, synthetic construct; identical to SEQ ID NO: 1697
  misc_feature 1..36: note = Description of Artificial Sequence: Synthetic oligonucleotide
  source 1..36: mol_type = other DNA

SEQ ID NO: 1800 - protein, 12 aa, synthetic construct
  REGION 1..12: note = Description of Artificial Sequence: Synthetic peptide
RASQSVYSSYLA

SEQ ID NO: 1801 - DNA, 36 bp, synthetic construct; identical to SEQ ID NO: 1697
  misc_feature 1..36: note = Description of Artificial Sequence: Synthetic oligonucleotide
  source 1..36: mol_type = other DNA

SEQ ID NO: 1802 - protein, 12 aa, synthetic construct
  REGION 1..12: note = Description of Artificial Sequence: Synthetic peptide
RASQSVYSSYLA

SEQ ID NO: 1803 - DNA, 51 bp, synthetic construct
  misc_feature 1..51: note = Description of Artificial Sequence: Synthetic oligonucleotide
  source 1..51: mol_type = other DNA
aagtccagccagagtgttttatacagttccaacaataataactacttagct

SEQ ID NO: 1804 - protein, 17 aa, synthetic construct
  REGION 1..17: note = Description of Artificial Sequence: Synthetic peptide
KSSQSVLYSSNNNNYLA

SEQ ID NO: 1805 - DNA, 33 bp, synthetic construct; identical to SEQ ID NO: 1751
  misc_feature 1..33: note = Description of Artificial Sequence: Synthetic oligonucleotide
  source 1..33: mol_type = other DNA

SEQ ID NO: 1806 - protein, 11 aa, synthetic construct
  REGION 1..11: note = Description of Artificial Sequence: Synthetic peptide
RASQGISKYLA

SEQ ID NO: 1807 - DNA, 36 bp, synthetic construct
  misc_feature 1..36: note = Description of Artificial Sequence: Synthetic oligonucleotide
  source 1..36: mol_type = other DNA
agggccagtcagatttttagcagcagctacttagcc

SEQ ID NO: 1808 - protein, 12 aa, synthetic construct
  REGION 1..12: note = Description of Artificial Sequence: Synthetic peptide
RASQIFSSSYLA

SEQ ID NO: 1809 - DNA, 33 bp, synthetic construct; identical to SEQ ID NO: 1729
  misc_feature 1..33: note = Description of Artificial Sequence: Synthetic oligonucleotide
  source 1..33: mol_type = other DNA

SEQ ID NO: 1810 - protein, 11 aa, synthetic construct
  REGION 1..11: note = Description of Artificial Sequence: Synthetic peptide
RASLSVVNSLA

SEQ ID NO: 1811 - DNA, 51 bp, synthetic construct
  misc_feature 1..51: note = Description of Artificial Sequence: Synthetic oligonucleotide
  source 1..51: mol_type = other DNA
atgtccagccagagtgttttacacagcttcaacaataagaactacttaact

SEQ ID NO: 1812 - protein, 17 aa, synthetic construct
  REGION 1..17: note = Description of Artificial Sequence: Synthetic peptide
MSSQSVLHSFNNKNYLT

SEQ ID NO: 1813 - DNA, 51 bp, synthetic construct; identical to SEQ ID NO: 159
  misc_feature 1..51: note = Description of Artificial Sequence: Synthetic oligonucleotide
  source 1..51: mol_type = other DNA

SEQ ID NO: 1814 - protein, 17 aa, synthetic construct
  REGION 1..17: note = Description of Artificial Sequence: Synthetic peptide
KSSQSVLYSSNSHNYLA

SEQ ID NO: 1815 - DNA, 51 bp, synthetic construct; identical to SEQ ID NO: 1737
  misc_feature 1..51: note = Description of Artificial Sequence: Synthetic oligonucleotide
  source 1..51: mol_type = other DNA

SEQ ID NO: 1816 - protein, 17 aa, synthetic construct
  REGION 1..17: note = Description of Artificial Sequence: Synthetic peptide
KSSQSILYSSNNNNYLA

SEQ ID NO: 1817 - DNA, 36 bp, synthetic construct; identical to SEQ ID NO: 1697
  misc_feature 1..36: note = Description of Artificial Sequence: Synthetic oligonucleotide
  source 1..36: mol_type = other DNA

SEQ ID NO: 1818 - protein, 12 aa, synthetic construct
  REGION 1..12: note = Description of Artificial Sequence: Synthetic peptide
RASQSVYSSYLA

SEQ ID NO: 1819 - DNA, 51 bp, synthetic construct; identical to SEQ ID NO: 1693
  misc_feature 1..51: note = Description of Artificial Sequence: Synthetic oligonucleotide
  source 1..51: mol_type = other DNA

SEQ ID NO: 1820 - protein, 17 aa, synthetic construct
  REGION 1..17: note = Description of Artificial Sequence: Synthetic peptide
KSSQSVLFSSNNYNYLA

SEQ ID NO: 1821 - DNA, 36 bp, synthetic construct; identical to SEQ ID NO: 1771
  misc_feature 1..36: note = Description of Artificial Sequence: Synthetic oligonucleotide
  source 1..36: mol_type = other DNA

SEQ ID NO: 1822 - protein, 12 aa, synthetic construct
  REGION 1..12: note = Description of Artificial Sequence: Synthetic peptide
RARQSVDSSYLA

SEQ ID NO: 1823 - DNA, 36 bp, synthetic construct; identical to SEQ ID NO: 1697
  misc_feature 1..36: note = Description of Artificial Sequence: Synthetic oligonucleotide
  source 1..36: mol_type = other DNA

SEQ ID NO: 1824 - protein, 12 aa, synthetic construct
  REGION 1..12: note = Description of Artificial Sequence: Synthetic peptide
RASQSVYSSYLA

SEQ ID NO: 1825 - DNA, 51 bp, synthetic construct
  misc_feature 1..51: note = Description of Artificial Sequence: Synthetic oligonucleotide
  source 1..51: mol_type = other DNA
aagtccagccagagtattttatacagctccaacaattacaactacttagct

SEQ ID NO: 1826 - protein, 17 aa, synthetic construct
  REGION 1..17: note = Description of Artificial Sequence: Synthetic peptide
KSSQSILYSSNNYNYLA

SEQ ID NO: 1827 - DNA, 36 bp, synthetic construct; identical to SEQ ID NO: 1697
  misc_feature 1..36: note = Description of Artificial Sequence: Synthetic oligonucleotide
  source 1..36: mol_type = other DNA

SEQ ID NO: 1828 - protein, 12 aa, synthetic construct
  REGION 1..12: note = Description of Artificial Sequence: Synthetic peptide
RASQSVYSSYLA

SEQ ID NO: 1829 - DNA, 36 bp, synthetic construct; identical to SEQ ID NO: 1697
  misc_feature 1..36: note = Description of Artificial Sequence: Synthetic oligonucleotide
  source 1..36: mol_type = other DNA

SEQ ID NO: 1830 - protein, 12 aa, synthetic construct
  REGION 1..12: note = Description of Artificial Sequence: Synthetic peptide
RASQSVYSSYLA

SEQ ID NO: 1831 - DNA, 36 bp, synthetic construct; identical to SEQ ID NO: 1697
  misc_feature 1..36: note = Description of Artificial Sequence: Synthetic oligonucleotide
  source 1..36: mol_type = other DNA

SEQ ID NO: 1832 - protein, 12 aa, synthetic construct
  REGION 1..12: note = Description of Artificial Sequence: Synthetic peptide
RASQSVYSSYLA

SEQ ID NO: 1833 - DNA, 36 bp, synthetic construct; identical to SEQ ID NO: 1681
  misc_feature 1..36: note = Description of Artificial Sequence: Synthetic oligonucleotide
  source 1..36: mol_type = other DNA

SEQ ID NO: 1834 - protein, 12 aa, synthetic construct
  REGION 1..12: note = Description of Artificial Sequence: Synthetic peptide
RASQSVSSSYLV

SEQ ID NO: 1835 - DNA, 51 bp, synthetic construct; identical to SEQ ID NO: 1767
  misc_feature 1..51: note = Description of Artificial Sequence: Synthetic oligonucleotide
  source 1..51: mol_type = other DNA

SEQ ID NO: 1836 - protein, 17 aa, synthetic construct
  REGION 1..17: note = Description of Artificial Sequence: Synthetic peptide
KSSQSVLYTSNNNNYLA

SEQ ID NO: 1837 - DNA, 36 bp, synthetic construct; identical to SEQ ID NO: 1697
  misc_feature 1..36: note = Description of Artificial Sequence: Synthetic oligonucleotide
  source 1..36: mol_type = other DNA

SEQ ID NO: 1838 - protein, 12 aa, synthetic construct
  REGION 1..12: note = Description of Artificial Sequence: Synthetic peptide
RASQSVYSSYLA

SEQ ID NO: 1839 - DNA, 51 bp, synthetic construct
  misc_feature 1..51: note = Description of Artificial Sequence: Synthetic oligonucleotide
  source 1..51: mol_type = other DNA
aagtccagccagagtgttttacacaggtccaacaattacaactacttagcg

SEQ ID NO: 1840 - protein, 17 aa, synthetic construct
  REGION 1..17: note = Description of Artificial Sequence: Synthetic peptide
KSSQSVLHRSNNYNYLA

SEQ ID NO: 1841 - DNA, 36 bp, synthetic construct
  misc_feature 1..36: note = Description of Artificial Sequence: Synthetic oligonucleotide
  source 1..36: mol_type = other DNA
agggccagtcagaatatttacagcagctacttagcc

SEQ ID NO: 1842 - protein, 12 aa, synthetic construct
  REGION 1..12: note = Description of Artificial Sequence: Synthetic peptide
RASQNIYSSYLA

SEQ ID NO: 1843 - DNA, 36 bp, synthetic construct
  misc_feature 1..36: note = Description of Artificial Sequence: Synthetic oligonucleotide
  source 1..36: mol_type = other DNA
agggccagtcagagtgttgacagcggctacttagcc

SEQ ID NO: 1844 - protein, 12 aa, synthetic construct
  REGION 1..12: note = Description of Artificial Sequence: Synthetic peptide
RASQSVDSGYLA

SEQ ID NO: 1845 - DNA, 36 bp, synthetic construct
  misc_feature 1..36: note = Description of Artificial Sequence: Synthetic oligonucleotide
  source 1..36: mol_type = other DNA
agggccagtcagagtattaacagcaactacttagcc

SEQ ID NO: 1846 - protein, 12 aa, synthetic construct
  REGION 1..12: note = Description of Artificial Sequence: Synthetic peptide
RASQSINSNYLA

SEQ ID NO: 1847 - DNA, 51 bp, synthetic construct
  misc_feature 1..51: note = Description of Artificial Sequence: Synthetic oligonucleotide
  source 1..51: mol_type = other DNA
aagtccagacagagtgttttatacagctccaacaattacaactacttaact

SEQ ID NO: 1848 - protein, 17 aa, synthetic construct
  REGION 1..17: note = Description of Artificial Sequence: Synthetic peptide
KSRQSVLYSSNNYNYLT

SEQ ID NO: 1849 - DNA, 51 bp, synthetic construct; identical to SEQ ID NO: 1767
  misc_feature 1..51: note = Description of Artificial Sequence: Synthetic oligonucleotide
  source 1..51: mol_type = other DNA

SEQ ID NO: 1850 - protein, 17 aa, synthetic construct
  REGION 1..17: note = Description of Artificial Sequence: Synthetic peptide
KSSQSVLYTSNNNNYLA

SEQ ID NO: 1851 - DNA, 36 bp, synthetic construct
  misc_feature 1..36: note = Description of Artificial Sequence: Synthetic oligonucleotide
  source 1..36: mol_type = other DNA
agggccagtcagagtgttgacagcagctacttagcc

SEQ ID NO: 1852 - protein, 12 aa, synthetic construct
  REGION 1..12: note = Description of Artificial Sequence: Synthetic peptide
RASQSVDSSYLA

SEQ ID NO: 1853 - DNA, 33 bp, synthetic construct; identical to SEQ ID NO: 1727
  misc_feature 1..33: note = Description of Artificial Sequence: Synthetic oligonucleotide
  source 1..33: mol_type = other DNA

SEQ ID NO: 1854 - protein, 11 aa, synthetic construct
  REGION 1..11: note = Description of Artificial Sequence: Synthetic peptide
RASQGIGKYLA

SEQ ID NO: 1855 - DNA, 33 bp, synthetic construct
  misc_feature 1..33: note = Description of Artificial Sequence: Synthetic oligonucleotide
  source 1..33: mol_type = other DNA
cgggcgagtcagggcattggcaggtatttagcc

SEQ ID NO: 1856 - protein, 11 aa, synthetic construct
  REGION 1..11: note = Description of Artificial Sequence: Synthetic peptide
RASQGIGRYLA

SEQ ID NO: 1857 - DNA, 36 bp, synthetic construct; identical to SEQ ID NO: 1697
  misc_feature 1..36: note = Description of Artificial Sequence: Synthetic oligonucleotide
  source 1..36: mol_type = other DNA

SEQ ID NO: 1858 - protein, 12 aa, synthetic construct
  REGION 1..12: note = Description of Artificial Sequence: Synthetic peptide
RASQSVYSSYLA

SEQ ID NO: 1859 - DNA, 36 bp, synthetic construct; identical to SEQ ID NO: 759
  misc_feature 1..36: note = Description of Artificial Sequence: Synthetic oligonucleotide
  source 1..36: mol_type = other DNA

SEQ ID NO: 1860 - protein, 12 aa, synthetic construct
  REGION 1..12: note = Description of Artificial Sequence: Synthetic peptide
RASQSVSSSYLA

SEQ ID NO: 1861 - DNA, 36 bp, synthetic construct; identical to SEQ ID NO: 1697
  misc_feature 1..36: note = Description of Artificial Sequence: Synthetic oligonucleotide
  source 1..36: mol_type = other DNA

SEQ ID NO: 1862 - protein, 12 aa, synthetic construct
  REGION 1..12: note = Description of Artificial Sequence: Synthetic peptide
RASQSVYSSYLA

SEQ ID NO: 1863 - DNA, 36 bp, synthetic construct; identical to SEQ ID NO: 1697
  misc_feature 1..36: note = Description of Artificial Sequence: Synthetic oligonucleotide
  source 1..36: mol_type = other DNA

SEQ ID NO: 1864 - protein, 12 aa, synthetic construct
  REGION 1..12: note = Description of Artificial Sequence: Synthetic peptide
RASQSVYSSYLA

SEQ ID NO: 1865 - DNA, 51 bp, synthetic construct; identical to SEQ ID NO: 1693
  misc_feature 1..51: note = Description of Artificial Sequence: Synthetic oligonucleotide
  source 1..51: mol_type = other DNA

SEQ ID NO: 1866 - protein, 17 aa, synthetic construct
  REGION 1..17: note = Description of Artificial Sequence: Synthetic peptide
KSSQSVLFSSNNYNYLA

SEQ ID NO: 1867 - DNA, 51 bp, synthetic construct; identical to SEQ ID NO: 1767
  misc_feature 1..51: note = Description of Artificial Sequence: Synthetic oligonucleotide
  source 1..51: mol_type = other DNA

SEQ ID NO: 1868 - protein, 17 aa, synthetic construct
  REGION 1..17: note = Description of Artificial Sequence: Synthetic peptide
KSSQSVLYTSNNNNYLA

SEQ ID NO: 1869 - DNA, 36 bp, synthetic construct; identical to SEQ ID NO: 759
  misc_feature 1..36: note = Description of Artificial Sequence: Synthetic oligonucleotide
  source 1..36: mol_type = other DNA

SEQ ID NO: 1870 - protein, 12 aa, synthetic construct
  REGION 1..12: note = Description of Artificial Sequence: Synthetic peptide
RASQSVSSSYLA

SEQ ID NO: 1871 - DNA, 36 bp, synthetic construct; identical to SEQ ID NO: 1697
  misc_feature 1..36: note = Description of Artificial Sequence: Synthetic oligonucleotide
  source 1..36: mol_type = other DNA

SEQ ID NO: 1872 - protein, 12 aa, synthetic construct
  REGION 1..12: note = Description of Artificial Sequence: Synthetic peptide
RASQSVYSSYLA

SEQ ID NO: 1873 - DNA, 36 bp, synthetic construct; identical to SEQ ID NO: 759
  misc_feature 1..36: note = Description of Artificial Sequence: Synthetic oligonucleotide
  source 1..36: mol_type = other DNA

SEQ ID NO: 1874 - protein, 12 aa, synthetic construct
  REGION 1..12: note = Description of Artificial Sequence: Synthetic peptide
RASQSVSSSYLA

SEQ ID NO: 1875 - DNA, 36 bp, synthetic construct
  misc_feature 1..36: note = Description of Artificial Sequence: Synthetic oligonucleotide
  source 1..36: mol_type = other DNA
agggccagtgagagtgttagcagcagctacttagtc

SEQ ID NO: 1876 - protein, 12 aa, synthetic construct
  REGION 1..12: note = Description of Artificial Sequence: Synthetic peptide
RASESVSSSYLV

SEQ ID NO: 1877 - DNA, 36 bp, synthetic construct; identical to SEQ ID NO: 1875
  misc_feature 1..36: note = Description of Artificial Sequence: Synthetic oligonucleotide
  source 1..36: mol_type = other DNA

SEQ ID NO: 1878 - protein, 12 aa, synthetic construct
  REGION 1..12: note = Description of Artificial Sequence: Synthetic peptide
RASESVSSSYLV

SEQ ID NO: 1879 - DNA, 36 bp, synthetic construct; identical to SEQ ID NO: 1697
  misc_feature 1..36: note = Description of Artificial Sequence: Synthetic oligonucleotide
  source 1..36: mol_type = other DNA

SEQ ID NO: 1880 - protein, 12 aa, synthetic construct
  REGION 1..12: note = Description of Artificial Sequence: Synthetic peptide
RASQSVYSSYLA

SEQ ID NO: 1881 - DNA, 36 bp, synthetic construct; identical to SEQ ID NO: 759
  misc_feature 1..36: note = Description of Artificial Sequence: Synthetic oligonucleotide
  source 1..36: mol_type = other DNA

SEQ ID NO: 1882 - protein, 12 aa, synthetic construct
  REGION 1..12: note = Description of Artificial Sequence: Synthetic peptide
RASQSVSSSYLA

SEQ ID NO: 1883 - DNA, 33 bp, synthetic construct; identical to SEQ ID NO: 205
  misc_feature 1..33: note = Description of Artificial Sequence: Synthetic oligonucleotide
  source 1..33: mol_type = other DNA

SEQ ID NO: 1884 - protein, 11 aa, synthetic construct
  REGION 1..11: note = Description of Artificial Sequence: Synthetic peptide
RASQDIRNDLG

SEQ ID NO: 1885 - DNA, 36 bp, synthetic construct; identical to SEQ ID NO: 1697
  misc_feature 1..36: note = Description of Artificial Sequence: Synthetic oligonucleotide
  source 1..36: mol_type = other DNA

SEQ ID NO: 1886 - protein, 12 aa, synthetic construct
  REGION 1..12: note = Description of Artificial Sequence: Synthetic peptide
RASQSVYSSYLA

SEQ ID NO: 1887 - DNA, 36 bp, synthetic construct; identical to SEQ ID NO: 1681
  misc_feature 1..36: note = Description of Artificial Sequence: Synthetic oligonucleotide
  source 1..36: mol_type = other DNA

SEQ ID NO: 1888 - protein, 12 aa, synthetic construct
  REGION 1..12: note = Description of Artificial Sequence: Synthetic peptide
RASQSVSSSYLV

SEQ ID NO: 1889 - DNA, 51 bp, synthetic construct; identical to SEQ ID NO: 1767
  misc_feature 1..51: note = Description of Artificial Sequence: Synthetic oligonucleotide
  source 1..51: mol_type = other DNA

SEQ ID NO: 1890 - protein, 17 aa, synthetic construct
  REGION 1..17: note = Description of Artificial Sequence: Synthetic peptide
KSSQSVLYTSNNNNYLA

SEQ ID NO: 1891 - DNA, 51 bp, synthetic construct; identical to SEQ ID NO: 1767
  misc_feature 1..51: note = Description of Artificial Sequence: Synthetic oligonucleotide
  source 1..51: mol_type = other DNA

SEQ ID NO: 1892 - protein, 17 aa, synthetic construct
  REGION 1..17: note = Description of Artificial Sequence: Synthetic peptide
KSSQSVLYTSNNNNYLA

SEQ ID NO: 1893 - DNA, 36 bp, synthetic construct; identical to SEQ ID NO: 1875
  misc_feature 1..36: note = Description of Artificial Sequence: Synthetic oligonucleotide
  source 1..36: mol_type = other DNA

SEQ ID NO: 1894 - protein, 12 aa, synthetic construct
  REGION 1..12: note = Description of Artificial Sequence: Synthetic peptide
RASESVSSSYLV

SEQ ID NO: 1895 - DNA, 36 bp, synthetic construct; identical to SEQ ID NO: 1843
  misc_feature 1..36: note = Description of Artificial Sequence: Synthetic oligonucleotide
  source 1..36: mol_type = other DNA

SEQ ID NO: 1896 - protein, 12 aa, synthetic construct
  REGION 1..12: note = Description of Artificial Sequence: Synthetic peptide
RASQSVDSGYLA

SEQ ID NO: 1897 - DNA, 36 bp, synthetic construct; identical to SEQ ID NO: 1755
  misc_feature 1..36: note = Description of Artificial Sequence: Synthetic oligonucleotide
  source 1..36: mol_type = other DNA

SEQ ID NO: 1898 - protein, 12 aa, synthetic construct
  REGION 1..12: note = Description of Artificial Sequence: Synthetic peptide
RASQSVYSSYLA

SEQ ID NO: 1899 - DNA, 51 bp, synthetic construct; identical to SEQ ID NO: 1719
  misc_feature 1..51: note = Description of Artificial Sequence: Synthetic oligonucleotide
  source 1..51: mol_type = other DNA

SEQ ID NO: 1900 - protein, 17 aa, synthetic construct
  REGION 1..17: note = Description of Artificial Sequence: Synthetic peptide
KSSQTVLHSSNNYNYLA

SEQ ID NO: 1901 - DNA, 36 bp, synthetic construct
  misc_feature 1..36: note = Description of Artificial Sequence: Synthetic oligonucleotide
  source 1..36: mol_type = other DNA
agggccagtccgagtgttcacagcaactacttagcc

SEQ ID NO: 1902 - protein, 12 aa, synthetic construct
  REGION 1..12: note = Description of Artificial Sequence: Synthetic peptide
RASPSVHSNYLA

SEQ ID NO: 1903 - DNA, 51 bp, synthetic construct
  misc_feature 1..51: note = Description of Artificial Sequence: Synthetic oligonucleotide
  source 1..51: mol_type = other DNA
aagtccagacagagtgttttacacagctccaacaattacaactacttagct

SEQ ID NO: 1904 - protein, 17 aa, synthetic construct
  REGION 1..17: note = Description of Artificial Sequence: Synthetic peptide
KSRQSVLHSSNNYNYLA

SEQ ID NO: 1905 - DNA, 51 bp, synthetic construct; identical to SEQ ID NO: 1719
  misc_feature 1..51: note = Description of Artificial Sequence: Synthetic oligonucleotide
  source 1..51: mol_type = other DNA

SEQ ID NO: 1906 - protein, 17 aa, synthetic construct
  REGION 1..17: note = Description of Artificial Sequence: Synthetic peptide
KSSQTVLHSSNNYNYLA

SEQ ID NO: 1907 - DNA, 33 bp, synthetic construct; identical to SEQ ID NO: 1775
  misc_feature 1..33: note = Description of Artificial Sequence: Synthetic oligonucleotide
  source 1..33: mol_type = other DNA

SEQ ID NO: 1908 - protein, 11 aa, synthetic construct
  REGION 1..11: note = Description of Artificial Sequence: Synthetic peptide
RASQVISKYLA

SEQ ID NO: 1909 - DNA, 36 bp, synthetic construct; identical to SEQ ID NO: 1845
  misc_feature 1..36: note = Description of Artificial Sequence: Synthetic oligonucleotide
  source 1..36: mol_type = other DNA

SEQ ID NO: 1910 - protein, 12 aa, synthetic construct
  REGION 1..12: note = Description of Artificial Sequence: Synthetic peptide
RASQSINSNYLA

SEQ ID NO: 1911 - DNA, 33 bp, synthetic construct
  misc_feature 1..33: note = Description of Artificial Sequence: Synthetic oligonucleotide
  source 1..33: mol_type = other DNA
agggccagtcaggatgttatcacctacttagcc

SEQ ID NO: 1912 - protein, 11 aa, synthetic construct
  REGION 1..11: note = Description of Artificial Sequence: Synthetic peptide
RASQDVITYLA

SEQ ID NO: 1913 - DNA, 51 bp, synthetic construct; identical to SEQ ID NO: 1777
  misc_feature 1..51: note = Description of Artificial Sequence: Synthetic oligonucleotide
  source 1..51: mol_type = other DNA

SEQ ID NO: 1914 - protein, 17 aa, synthetic construct
  REGION 1..17: note = Description of Artificial Sequence: Synthetic peptide
KSSQSVLHSSNKKNYLA

SEQ ID NO: 1915 - DNA, 36 bp, synthetic construct; identical to SEQ ID NO: 1697
  misc_feature 1..36: note = Description of Artificial Sequence: Synthetic oligonucleotide
  source 1..36: mol_type = other DNA

SEQ ID NO: 1916 - protein, 12 aa, synthetic construct
  REGION 1..12: note = Description of Artificial Sequence: Synthetic peptide
RASQSVYSSYLA

SEQ ID NO: 1917 - DNA, 36 bp, synthetic construct; identical to SEQ ID NO: 1697
  misc_feature 1..36: note = Description of Artificial Sequence: Synthetic oligonucleotide
  source 1..36: mol_type = other DNA

SEQ ID NO: 1918 - protein, 12 aa, synthetic construct
  REGION 1..12: note = Description of Artificial Sequence: Synthetic peptide
RASQSVYSSYLA

SEQ ID NO: 1919 - DNA, 36 bp, synthetic construct
  misc_feature 1..36: note = Description of Artificial Sequence: Synthetic oligonucleotide
  source 1..36: mol_type = other DNA
aggtccagtcagagtgttagcagcagctacttagtc

SEQ ID NO: 1920 - protein, 12 aa, synthetic construct
  REGION 1..12: note = Description of Artificial Sequence: Synthetic peptide
RSSQSVSSSYLV

SEQ ID NO: 1921 - DNA, 36 bp, synthetic construct; identical to SEQ ID NO: 1717
  misc_feature 1..36: note = Description of Artificial Sequence: Synthetic oligonucleotide
  source 1..36: mol_type = other DNA

SEQ ID NO: 1922 - protein, 12 aa, synthetic construct
  REGION 1..12: note = Description of Artificial Sequence: Synthetic peptide
RASQSVSSRYLA

SEQ ID NO: 1923 - DNA, 36 bp, synthetic construct; identical to SEQ ID NO: 1713
  misc_feature 1..36: note = Description of Artificial Sequence: Synthetic oligonucleotide
  source 1..36: mol_type = other DNA

SEQ ID NO: 1924 - protein, 12 aa, synthetic construct
  REGION 1..12: note = Description of Artificial Sequence: Synthetic peptide
RASPSVDSSYLA

SEQ ID NO: 1925 - DNA, 36 bp, synthetic construct; identical to SEQ ID NO: 1841
  misc_feature 1..36: note = Description of Artificial Sequence: Synthetic oligonucleotide
  source 1..36: mol_type = other DNA

SEQ ID NO: 1926 - protein, 12 aa, synthetic construct
  REGION 1..12: note = Description of Artificial Sequence: Synthetic peptide
RASQNIYSSYLA

SEQ ID NO: 1927 - DNA, 36 bp, synthetic construct; identical to SEQ ID NO: 99
  misc_feature 1..36: note = Description of Artificial Sequence: Synthetic oligonucleotide
  source 1..36: mol_type = other DNA

SEQ ID NO: 1928 - protein, 12 aa, synthetic construct
  REGION 1..12: note = Description of Artificial Sequence: Synthetic peptide
RASQSVNSNYLA

SEQ ID NO: 1929 - DNA, 51 bp, synthetic construct; identical to SEQ ID NO: 1839
  misc_feature 1..51: note = Description of Artificial Sequence: Synthetic oligonucleotide
  source 1..51: mol_type = other DNA

SEQ ID NO: 1930 - protein, 17 aa, synthetic construct
  REGION 1..17: note = Description of Artificial Sequence: Synthetic peptide
KSSQSVLHRSNNYNYLA

SEQ ID NO: 1931 - DNA, 36 bp, synthetic construct
  misc_feature 1..36: note = Description of Artificial Sequence: Synthetic oligonucleotide
  source 1..36: mol_type = other DNA
agggccagtcagagtgtttggagcggctacttagcc

SEQ ID NO: 1932 - protein, 12 aa, synthetic construct
  REGION 1..12: note = Description of Artificial Sequence: Synthetic peptide
RASQSVWSGYLA

SEQ ID NO: 1933 - DNA, 51 bp, synthetic construct
  misc_feature 1..51: note = Description of Artificial Sequence: Synthetic oligonucleotide
  source 1..51: mol_type = other DNA
aagtccagccagagtgttttgtacagctccaacagtcacaacttcttagct

SEQ ID NO: 1934 - protein, 17 aa, synthetic construct
  REGION 1..17: note = Description of Artificial Sequence: Synthetic peptide
KSSQSVLYSSNSHNFLA

SEQ ID NO: 1935 - DNA, 36 bp, synthetic construct; identical to SEQ ID NO: 1919
  misc_feature 1..36: note = Description of Artificial Sequence: Synthetic oligonucleotide
  source 1..36: mol_type = other DNA

SEQ ID NO: 1936 - protein, 12 aa, synthetic construct
  REGION 1..12: note = Description of Artificial Sequence: Synthetic peptide
RSSQSVSSSYLV

SEQ ID NO: 1937 - DNA, 36 bp, synthetic construct; identical to SEQ ID NO: 1697
  misc_feature 1..36: note = Description of Artificial Sequence: Synthetic oligonucleotide
  source 1..36: mol_type = other DNA

SEQ ID NO: 1938 - protein, 12 aa, synthetic construct
  REGION 1..12: note = Description of Artificial Sequence: Synthetic peptide
RASQSVYSSYLA

SEQ ID NO: 1939 - DNA, 36 bp, synthetic construct; identical to SEQ ID NO: 1697
  misc_feature 1..36: note = Description of Artificial Sequence: Synthetic oligonucleotide
  source 1..36: mol_type = other DNA

SEQ ID NO: 1940 - protein, 12 aa, synthetic construct
  REGION 1..12: note = Description of Artificial Sequence: Synthetic peptide
RASQSVYSSYLA

SEQ ID NO: 1941 - DNA, 51 bp, synthetic construct
  misc_feature 1..51: note = Description of Artificial Sequence: Synthetic oligonucleotide
  source 1..51: mol_type = other DNA
aagtccagccagagtgttttgcacagatccaacaattataattacttagct

SEQ ID NO: 1942 - protein, 17 aa, synthetic construct
  REGION 1..17: note = Description of Artificial Sequence: Synthetic peptide
KSSQSVLHRSNNYNYLA

SEQ ID NO: 1943 - DNA, 36 bp, synthetic construct; identical to SEQ ID NO: 1697
  misc_feature 1..36: note = Description of Artificial Sequence: Synthetic oligonucleotide
  source 1..36: mol_type = other DNA

SEQ ID NO: 1944 - protein, 12 aa, synthetic construct
  REGION 1..12: note = Description of Artificial Sequence: Synthetic peptide
RASQSVYSSYLA

SEQ ID NO: 1945 - DNA, 36 bp, synthetic construct; identical to SEQ ID NO: 1749
  misc_feature 1..36: note = Description of Artificial Sequence: Synthetic oligonucleotide
  source 1..36: mol_type = other DNA

SEQ ID NO: 1946 - protein, 12 aa, synthetic construct
  REGION 1..12: note = Description of Artificial Sequence: Synthetic peptide
RASQSVDSNYLA

SEQ ID NO: 1947 - DNA, 36 bp, synthetic construct; identical to SEQ ID NO: 1697
  misc_feature 1..36: note = Description of Artificial Sequence: Synthetic oligonucleotide
  source 1..36: mol_type = other DNA

SEQ ID NO: 1948 - protein, 12 aa, synthetic construct
  REGION 1..12: note = Description of Artificial Sequence: Synthetic peptide
RASQSVYSSYLA

SEQ ID NO: 1949 - DNA, 33 bp, synthetic construct; identical to SEQ ID NO: 105
  misc_feature 1..33: note = Description of Artificial Sequence: Synthetic oligonucleotide
  source 1..33: mol_type = other DNA

SEQ ID NO: 1950 - protein, 11 aa, synthetic construct
  REGION 1..11: note = Description of Artificial Sequence: Synthetic peptide
RASQGISNYLA

SEQ ID NO: 1951 - DNA, 36 bp, synthetic construct; identical to SEQ ID NO: 1697
  misc_feature 1..36: note = Description of Artificial Sequence: Synthetic oligonucleotide
  source 1..36: mol_type = other DNA

SEQ ID NO: 1952 - protein, 12 aa, synthetic construct
  REGION 1..12: note = Description of Artificial Sequence: Synthetic peptide
RASQSVYSSYLA

SEQ ID NO: 1953 - DNA, 36 bp, synthetic construct; identical to SEQ ID NO: 759
  misc_feature 1..36: note = Description of Artificial Sequence: Synthetic oligonucleotide
  source 1..36: mol_type = other DNA

SEQ ID NO: 1954 - protein, 12 aa, synthetic construct
  REGION 1..12: note = Description of Artificial Sequence: Synthetic peptide
RASQSVSSSYLA

SEQ ID NO: 1955 - DNA, 51 bp, synthetic construct
  misc_feature 1..51: note = Description of Artificial Sequence: Synthetic oligonucleotide
  source 1..51: mol_type = other DNA
aagtccagccagagtgttttacacagctccaacaatatgaactacttagct

SEQ ID NO: 1956 - protein, 17 aa, synthetic construct
  REGION 1..17: note = Description of Artificial Sequence: Synthetic peptide
KSSQSVLHSSNNMNYLA

SEQ ID NO: 1957 - DNA, 36 bp, synthetic construct; identical to SEQ ID NO: 1697
  misc_feature 1..36: note = Description of Artificial Sequence: Synthetic oligonucleotide
  source 1..36: mol_type = other DNA

SEQ ID NO: 1958 - protein, 12 aa, synthetic construct
  REGION 1..12: note = Description of Artificial Sequence: Synthetic peptide
RASQSVYSSYLA

SEQ ID NO: 1959 - DNA, 51 bp, synthetic construct
  misc_feature 1..51: note = Description of Artificial Sequence: Synthetic oligonucleotide
  source 1..51: mol_type = other DNA
aagtccagccagagtgttttacacagctccaacaattacaactacttaact

SEQ ID NO: 1960 - protein, 17 aa, synthetic construct
  REGION 1..17: note = Description of Artificial Sequence: Synthetic peptide
KSSQSVLHSSNNYNYLT

SEQ ID NO: 1961 - DNA, 36 bp, synthetic construct; identical to SEQ ID NO: 1697
  misc_feature 1..36: note = Description of Artificial Sequence: Synthetic oligonucleotide
  source 1..36: mol_type = other DNA

SEQ ID NO: 1962 - protein, 12 aa, synthetic construct
  REGION 1..12: note = Description of Artificial Sequence: Synthetic peptide
RASQSVYSSYLA

SEQ ID NO: 1963 - DNA, 51 bp, synthetic construct; identical to SEQ ID NO: 1767
  misc_feature 1..51: note = Description of Artificial Sequence: Synthetic oligonucleotide
  source 1..51: mol_type = other DNA

SEQ ID NO: 1964 - protein, 17 aa, synthetic construct
  REGION 1..17: note = Description of Artificial Sequence: Synthetic peptide
KSSQSVLYTSNNNNYLA

SEQ ID NO: 1965 - DNA, 51 bp, synthetic construct
  misc_feature 1..51: note = Description of Artificial Sequence: Synthetic oligonucleotide
  source 1..51: mol_type = other DNA
aagtccagccagagtgttttatacatctccaacaataataattacttagct

SEQ ID NO: 1966 - protein, 17 aa, synthetic construct
  REGION 1..17: note = Description of Artificial Sequence: Synthetic peptide
KSSQSVLYISNNNNYLA

SEQ ID NO: 1967 - DNA, 33 bp, synthetic construct; identical to SEQ ID NO: 109
  misc_feature 1..33: note = Description of Artificial Sequence: Synthetic oligonucleotide
  source 1..33: mol_type = other DNA

SEQ ID NO: 1968 - protein, 11 aa, synthetic construct
  REGION 1..11: note = Description of Artificial Sequence: Synthetic peptide
RASQGIRNDLG

SEQ ID NO: 1969 - DNA, 36 bp, synthetic construct; identical to SEQ ID NO: 1697
  misc_feature 1..36: note = Description of Artificial Sequence: Synthetic oligonucleotide
  source 1..36: mol_type = other DNA

SEQ ID NO: 1970 - protein, 12 aa, synthetic construct
  REGION 1..12: note = Description of Artificial Sequence: Synthetic peptide
RASQSVYSSYLA

SEQ ID NO: 1971 - DNA, 36 bp, synthetic construct; identical to SEQ ID NO: 1697
  misc_feature 1..36: note = Description of Artificial Sequence: Synthetic oligonucleotide
  source 1..36: mol_type = other DNA

SEQ ID NO: 1972 - protein, 12 aa, synthetic construct
  REGION 1..12: note = Description of Artificial Sequence: Synthetic peptide
RASQSVYSSYLA

SEQ ID NO: 1973 - DNA, 36 bp, synthetic construct; identical to SEQ ID NO: 1697
  misc_feature 1..36: note = Description of Artificial Sequence: Synthetic oligonucleotide
  source 1..36: mol_type = other DNA

SEQ ID NO: 1974 - protein, 12 aa, synthetic construct
  REGION 1..12: note = Description of Artificial Sequence: Synthetic peptide
RASQSVYSSYLA

SEQ ID NO: 1975 - DNA, 51 bp, synthetic construct
  misc_feature 1..51: note = Description of Artificial Sequence: Synthetic oligonucleotide
  source 1..51: mol_type = other DNA
aagtccagccagagtgttttacacagctccaacaattggaattacttagct

SEQ ID NO: 1976 - protein, 17 aa, synthetic construct
  REGION 1..17: note = Description of Artificial Sequence: Synthetic peptide
KSSQSVLHSSNNWNYLA

SEQ ID NO: 1977 - DNA, 36 bp, synthetic construct; identical to SEQ ID NO: 1697
  misc_feature 1..36: note = Description of Artificial Sequence: Synthetic oligonucleotide
  source 1..36: mol_type = other DNA

SEQ ID NO: 1978 - protein, 12 aa, synthetic construct
  REGION 1..12: note = Description of Artificial Sequence: Synthetic peptide
RASQSVYSSYLA

SEQ ID NO: 1979 - DNA, 48 bp, synthetic construct; identical to SEQ ID NO: 1743
  misc_feature 1..48: note = Description of Artificial Sequence: Synthetic oligonucleotide
  source 1..48: mol_type = other DNA

SEQ ID NO: 1980 - protein, 16 aa, synthetic construct
  REGION 1..16: note = Description of Artificial Sequence: Synthetic peptide
RSSQSLLHSSGYNYLD

SEQ ID NO: 1981 - DNA, 36 bp, synthetic construct; identical to SEQ ID NO: 1697
  misc_feature 1..36: note = Description of Artificial Sequence: Synthetic oligonucleotide
  source 1..36: mol_type = other DNA

SEQ ID NO: 1982 - protein, 12 aa, synthetic construct
  REGION 1..12: note = Description of Artificial Sequence: Synthetic peptide
RASQSVYSSYLA

SEQ ID NO: 1983 - DNA, 36 bp, synthetic construct; identical to SEQ ID NO: 99
  misc_feature 1..36: note = Description of Artificial Sequence: Synthetic oligonucleotide
  source 1..36: mol_type = other DNA

SEQ ID NO: 1984 - protein, 12 aa, synthetic construct
  REGION 1..12: note = Description of Artificial Sequence: Synthetic peptide
RASQSVNSNYLA

SEQ ID NO: 1985 - DNA, 36 bp, synthetic construct; identical to SEQ ID NO: 1697
  misc_feature 1..36: note = Description of Artificial Sequence: Synthetic oligonucleotide
  source 1..36: mol_type = other DNA

SEQ ID NO: 1986 - protein, 12 aa, synthetic construct
  REGION 1..12: note = Description of Artificial Sequence: Synthetic peptide
RASQSVYSSYLA

SEQ ID NO: 1987 - DNA, 36 bp, synthetic construct
  misc_feature 1..36: note = Description of Artificial Sequence: Synthetic oligonucleotide
  source 1..36: mol_type = other DNA
agggccagtcagagtgttgacagcaacttcttagcc

SEQ ID NO: 1988 - protein, 12 aa, synthetic construct
  REGION 1..12: note = Description of Artificial Sequence: Synthetic peptide
RASQSVDSNFLA

SEQ ID NO: 1989 - DNA, 36 bp, synthetic construct; identical to SEQ ID NO: 1697
  misc_feature 1..36: note = Description of Artificial Sequence: Synthetic oligonucleotide
  source 1..36: mol_type = other DNA

SEQ ID NO: 1990 - protein, 12 aa, synthetic construct
  REGION 1..12: note = Description of Artificial Sequence: Synthetic peptide
RASQSVYSSYLA

SEQ ID NO: 1991 - DNA, 36 bp, synthetic construct; identical to SEQ ID NO: 1697
  misc_feature 1..36: note = Description of Artificial Sequence: Synthetic oligonucleotide
  source 1..36: mol_type = other DNA

SEQ ID NO: 1992 - protein, 12 aa, synthetic construct
  REGION 1..12: note = Description of Artificial Sequence: Synthetic peptide
RASQSVYSSYLA

SEQ ID NO: 1993 - DNA, 36 bp, synthetic construct; identical to SEQ ID NO: 1697
  misc_feature 1..36: note = Description of Artificial Sequence: Synthetic oligonucleotide
  source 1..36: mol_type = other DNA

SEQ ID NO: 1994 - protein, 12 aa, synthetic construct
  REGION 1..12: note = Description of Artificial Sequence: Synthetic peptide
RASQSVYSSYLA

SEQ ID NO: 1995 - DNA, 33 bp, synthetic construct; identical to SEQ ID NO: 109
  misc_feature 1..33: note = Description of Artificial Sequence: Synthetic oligonucleotide
  source 1..33: mol_type = other DNA

SEQ ID NO: 1996 - protein, 11 aa, synthetic construct
  REGION 1..11: note = Description of Artificial Sequence: Synthetic peptide
RASQGIRNDLG

SEQ ID NO: 1997 - DNA, 51 bp, synthetic construct; identical to SEQ ID NO: 1719
  misc_feature 1..51: note = Description of Artificial Sequence: Synthetic oligonucleotide
  source 1..51: mol_type = other DNA

SEQ ID NO: 1998 - protein, 17 aa, synthetic construct
  REGION 1..17: note = Description of Artificial Sequence: Synthetic peptide
KSSQTVLHSSNNYNYLA

SEQ ID NO: 1999 - DNA, 51 bp, synthetic construct
  misc_feature 1..51: note = Description of Artificial Sequence: Synthetic oligonucleotide
  source 1..51: mol_type = other DNA
aagtccagccagagtgttttacacaactccaacaataataactacttggct

SEQ ID NO: 2000 - protein, 17 aa, synthetic construct
  REGION 1..17: note = Description of Artificial Sequence: Synthetic peptide
KSSQSVLHNSNNNNYLA

SEQ ID NO: 2001 - DNA, 36 bp, synthetic construct; identical to SEQ ID NO: 1697
  misc_feature 1..36: note = Description of Artificial Sequence: Synthetic oligonucleotide
  source 1..36: mol_type = other DNA

SEQ ID NO: 2002 - protein, 12 aa, synthetic construct
  REGION 1..12: note = Description of Artificial Sequence: Synthetic peptide
RASQSVYSSYLA

SEQ ID NO: 2003 - DNA, 48 bp, synthetic construct
  misc_feature 1..48: note = Description of Artificial Sequence: Synthetic oligonucleotide
  source 1..48: mol_type = other DNA
aggtatagtcagagcctcgtgcatagtagtggatacaactatttggat

SEQ ID NO: 2004 - protein, 16 aa, synthetic construct
  REGION 1..16: note = Description of Artificial Sequence: Synthetic peptide
RYSQSLVHSSGYNYLD

SEQ ID NO: 2005 - DNA, 51 bp, synthetic construct; identical to SEQ ID NO: 1767
  misc_feature 1..51: note = Description of Artificial Sequence: Synthetic oligonucleotide
  source 1..51: mol_type = other DNA

SEQ ID NO: 2006 - protein, 17 aa, synthetic construct
  REGION 1..17: note = Description of Artificial Sequence: Synthetic peptide
KSSQSVLYTSNNNNYLA

SEQ ID NO: 2007 - DNA, 36 bp, synthetic construct; identical to SEQ ID NO: 1697
  misc_feature 1..36: note = Description of Artificial Sequence: Synthetic oligonucleotide
  source 1..36: mol_type = other DNA

SEQ ID NO: 2008 - protein, 12 aa, synthetic construct
  REGION 1..12: note = Description of Artificial Sequence: Synthetic peptide
RASQSVYSSYLA

SEQ ID NO: 2009 - DNA, 36 bp, synthetic construct; identical to SEQ ID NO: 1697
  misc_feature 1..36: note = Description of Artificial Sequence: Synthetic oligonucleotide
  source 1..36: mol_type = other DNA

SEQ ID NO: 2010 - protein, 12 aa, synthetic construct
  REGION 1..12: note = Description of Artificial Sequence: Synthetic peptide
RASQSVYSSYLA

SEQ ID NO: 2011 - DNA, 36 bp, synthetic construct; identical to SEQ ID NO: 1697
  misc_feature 1..36: note = Description of Artificial Sequence: Synthetic oligonucleotide
  source 1..36: mol_type = other DNA

SEQ ID NO: 2012 - protein, 12 aa, synthetic construct
  REGION 1..12: note = Description of Artificial Sequence: Synthetic peptide
RASQSVYSSYLA

SEQ ID NO: 2013 - DNA, 36 bp, synthetic construct; identical to SEQ ID NO: 1697
  misc_feature 1..36: note = Description of Artificial Sequence: Synthetic oligonucleotide
  source 1..36: mol_type = other DNA

SEQ ID NO: 2014 - protein, 12 aa, synthetic construct
  REGION 1..12: note = Description of Artificial Sequence: Synthetic peptide
RASQSVYSSYLA

SEQ ID NO: 2015 - DNA, 51 bp, synthetic construct; identical to SEQ ID NO: 1767
  misc_feature 1..51: note = Description of Artificial Sequence: Synthetic oligonucleotide
  source 1..51: mol_type = other DNA

SEQ ID NO: 2016 - protein, 17 aa, synthetic construct
  REGION 1..17: note = Description of Artificial Sequence: Synthetic peptide
KSSQSVLYTSNNNNYLA

SEQ ID NO: 2017 - DNA, 36 bp, synthetic construct; identical to SEQ ID NO: 1755
  misc_feature 1..36: note = Description of Artificial Sequence: Synthetic oligonucleotide
  source 1..36: mol_type = other DNA

SEQ ID NO: 2018 - protein, 12 aa, synthetic construct
  REGION 1..12: note = Description of Artificial Sequence: Synthetic peptide
RASQSVYSSYLA

SEQ ID NO: 2019 - DNA, 36 bp, synthetic construct
  misc_feature 1..36: note = Description of Artificial Sequence: Synthetic oligonucleotide
  source 1..36: mol_type = other DNA
agggccagtcagagtgttggcagcaactacttagcc

SEQ ID NO: 2020 - protein, 12 aa, synthetic construct
  REGION 1..12: note = Description of Artificial Sequence: Synthetic peptide
RASQSVGSNYLA

SEQ ID NO: 2021 - DNA, 48 bp, synthetic construct
  misc_feature 1..48: note = Description of Artificial Sequence: Synthetic oligonucleotide
  source 1..48: mol_type = other DNA
aggtctagtcagagcctcgtgcatagtagtggatacaactatttggat

SEQ ID NO: 2022 - protein, 16 aa, synthetic construct
  REGION 1..16: note = Description of Artificial Sequence: Synthetic peptide
RSSQSLVHSSGYNYLD

SEQ ID NO: 2023 - DNA, 33 bp, synthetic construct
  misc_feature 1..33: note = Description of Artificial Sequence: Synthetic oligonucleotide
  source 1..33: mol_type = other DNA
cgggccagtcaggatgttatcacctacttagcc

SEQ ID NO: 2024 - protein, 11 aa, synthetic construct
  REGION 1..11: note = Description of Artificial Sequence: Synthetic peptide
RASQDVITYLA

SEQ ID NO: 2025 - DNA, 36 bp, synthetic construct; identical to SEQ ID NO: 1697
  misc_feature 1..36: note = Description of Artificial Sequence: Synthetic oligonucleotide
  source 1..36: mol_type = other DNA

SEQ ID NO: 2026 - protein, 12 aa, synthetic construct
  REGION 1..12: note = Description of Artificial Sequence: Synthetic peptide
RASQSVYSSYLA

SEQ ID NO: 2027 - DNA, 51 bp, synthetic construct
  misc_feature 1..51: note = Description of Artificial Sequence: Synthetic oligonucleotide
  source 1..51: mol_type = other DNA
aagtccagtcagaatattttatccagctccaacaataagaactacttaact

SEQ ID NO: 2028 - protein, 17 aa, synthetic construct
  REGION 1..17: note = Description of Artificial Sequence: Synthetic peptide
KSSQNILSSSNNKNYLT

SEQ ID NO: 2029 - DNA, 36 bp, synthetic construct; identical to SEQ ID NO: 1697
  misc_feature 1..36: note = Description of Artificial Sequence: Synthetic oligonucleotide
  source 1..36: mol_type = other DNA

SEQ ID NO: 2030 - protein, 12 aa, synthetic construct
  REGION 1..12: note = Description of Artificial Sequence: Synthetic peptide
RASQSVYSSYLA

SEQ ID NO: 2031 - DNA, 51 bp, synthetic construct; identical to SEQ ID NO: 1839
  misc_feature 1..51: note = Description of Artificial Sequence: Synthetic oligonucleotide
  source 1..51: mol_type = other DNA

SEQ ID NO: 2032 - protein, 17 aa, synthetic construct
  REGION 1..17: note = Description of Artificial Sequence: Synthetic peptide
KSSQSVLHRSNNYNYLA

SEQ ID NO: 2033 - DNA, 36 bp, synthetic construct; identical to SEQ ID NO: 1697
  misc_feature 1..36: note = Description of Artificial Sequence: Synthetic oligonucleotide
  source 1..36: mol_type = other DNA

SEQ ID NO: 2034 - protein, 12 aa, synthetic construct
  REGION 1..12: note = Description of Artificial Sequence: Synthetic peptide
RASQSVYSSYLA

SEQ ID NO: 2035 - DNA, 36 bp, synthetic construct; identical to SEQ ID NO: 1697
  misc_feature 1..36: note = Description of Artificial Sequence: Synthetic oligonucleotide
  source 1..36: mol_type = other DNA

SEQ ID NO: 2036 - protein, 12 aa, synthetic construct
  REGION 1..12: note = Description of Artificial Sequence: Synthetic peptide
RASQSVYSSYLA

SEQ ID NO: 2037 - DNA, 36 bp, synthetic construct
  misc_feature 1..36: note = Description of Artificial Sequence: Synthetic oligonucleotide
  source 1..36: mol_type = other DNA
agggccagtcagagtgttgacagcagctacctagcc

SEQ ID NO: 2038 - protein, 12 aa, synthetic construct
  REGION 1..12: note = Description of Artificial Sequence: Synthetic peptide
RASQSVDSSYLA

SEQ ID NO: 2039 - DNA, 36 bp, synthetic construct; identical to SEQ ID NO: 1717
  misc_feature 1..36: note = Description of Artificial Sequence: Synthetic oligonucleotide
  source 1..36: mol_type = other DNA

SEQ ID NO: 2040 - protein, 12 aa, synthetic construct
  REGION 1..12: note = Description of Artificial Sequence: Synthetic peptide
RASQSVSSRYLA

SEQ ID NO: 2041 - DNA, 33 bp, synthetic construct; identical to SEQ ID NO: 589
  misc_feature 1..33: note = Description of Artificial Sequence: Synthetic oligonucleotide
  source 1..33: mol_type = other DNA

SEQ ID NO: 2042 - protein, 11 aa, synthetic construct
  REGION 1..11: note = Description of Artificial Sequence: Synthetic peptide
RASQAIRDDLG

SEQ ID NO: 2043 - DNA, 51 bp, synthetic construct; identical to SEQ ID NO: 1719
  misc_feature 1..51: note = Description of Artificial Sequence: Synthetic oligonucleotide
  source 1..51: mol_type = other DNA

SEQ ID NO: 2044 - protein, 17 aa, synthetic construct
  REGION 1..17: note = Description of Artificial Sequence: Synthetic peptide
KSSQTVLHSSNNYNYLA

SEQ ID NO: 2045 - DNA, 51 bp, synthetic construct
  misc_feature 1..51: note = Description of Artificial Sequence: Synthetic oligonucleotide
  source 1..51: mol_type = other DNA
aagtccagccagagtgttttacacaactccaacaattacaactacttaact

SEQ ID NO: 2046 - protein, 17 aa, synthetic construct
  REGION 1..17: note = Description of Artificial Sequence: Synthetic peptide
KSSQSVLHNSNNYNYLT

SEQ ID NO: 2047 - DNA, 51 bp, synthetic construct; identical to SEQ ID NO: 1693
  misc_feature 1..51: note = Description of Artificial Sequence: Synthetic oligonucleotide
  source 1..51: mol_type = other DNA

SEQ ID NO: 2048 - protein, 17 aa, synthetic construct
  REGION 1..17: note = Description of Artificial Sequence: Synthetic peptide
KSSQSVLFSSNNYNYLA

SEQ ID NO: 2049 - DNA, 51 bp, synthetic construct; identical to SEQ ID NO: 1839
  misc_feature 1..51: note = Description of Artificial Sequence: Synthetic oligonucleotide
  source 1..51: mol_type = other DNA

SEQ ID NO: 2050 - protein, 17 aa, synthetic construct
  REGION 1..17: note = Description of Artificial Sequence: Synthetic peptide
KSSQSVLHRSNNYNYLA

SEQ ID NO: 2051 - DNA, 36 bp, synthetic construct; identical to SEQ ID NO: 1755
  misc_feature 1..36: note = Description of Artificial Sequence: Synthetic oligonucleotide
  source 1..36: mol_type = other DNA

SEQ ID NO: 2052 - protein, 12 aa, synthetic construct
  REGION 1..12: note = Description of Artificial Sequence: Synthetic peptide
RASQSVYSSYLA

SEQ ID NO: 2053 - DNA, 36 bp, synthetic construct; identical to SEQ ID NO: 1697
  misc_feature 1..36: note = Description of Artificial Sequence: Synthetic oligonucleotide
  source 1..36: mol_type = other DNA

SEQ ID NO: 2054 - protein, 12 aa, synthetic construct
  REGION 1..12: note = Description of Artificial Sequence: Synthetic peptide
RASQSVYSSYLA

SEQ ID NO: 2055 - DNA, 33 bp, synthetic construct
  misc_feature 1..33: note = Description of Artificial Sequence: Synthetic oligonucleotide
  source 1..33: mol_type = other DNA
agggccagtatgagtgttgtcaacagcttagcc

SEQ ID NO: 2056 - protein, 11 aa, synthetic construct
  REGION 1..11: note = Description of Artificial Sequence: Synthetic peptide
RASMSVVNSLA

SEQ ID NO: 2057 - DNA, 51 bp, synthetic construct
  misc_feature 1..51: note = Description of Artificial Sequence: Synthetic oligonucleotide
  source 1..51: mol_type = other DNA
aagtccagccagagtgttttattcagatccaacaattataattacttagct

SEQ ID NO: 2058 - protein, 17 aa, synthetic construct
  REGION 1..17: note = Description of Artificial Sequence: Synthetic peptide
KSSQSVLFRSNNYNYLA

SEQ ID NO: 2059 - DNA, 36 bp, synthetic construct; identical to SEQ ID NO: 1697
  misc_feature 1..36: note = Description of Artificial Sequence: Synthetic oligonucleotide
  source 1..36: mol_type = other DNA

SEQ ID NO: 2060 - protein, 12 aa, synthetic construct
  REGION 1..12: note = Description of Artificial Sequence: Synthetic peptide
RASQSVYSSYLA

SEQ ID NO: 2061 - DNA, 36 bp, synthetic construct; identical to SEQ ID NO: 1755
  misc_feature 1..36: note = Description of Artificial Sequence: Synthetic oligonucleotide
  source 1..36: mol_type = other DNA

SEQ ID NO: 2062 - protein, 12 aa, synthetic construct
  REGION 1..12: note = Description of Artificial Sequence: Synthetic peptide
RASQSVYSSYLA

SEQ ID NO: 2063 - DNA, 36 bp, synthetic construct; identical to SEQ ID NO: 1697
  misc_feature 1..36: note = Description of Artificial Sequence: Synthetic oligonucleotide
  source 1..36: mol_type = other DNA

SEQ ID NO: 2064 - protein, 12 aa, synthetic construct
  REGION 1..12: note = Description of Artificial Sequence: Synthetic peptide
RASQSVYSSYLA

SEQ ID NO: 2065 - DNA, 51 bp, synthetic construct; identical to SEQ ID NO: 1685
  misc_feature 1..51: note = Description of Artificial Sequence: Synthetic oligonucleotide
  source 1..51: mol_type = other DNA

SEQ ID NO: 2066 - protein, 17 aa, synthetic construct
  REGION 1..17: note = Description of Artificial Sequence: Synthetic peptide
KSSQSVLYSSNNANYLA

SEQ ID NO: 2067 - DNA, 36 bp, synthetic construct
  misc_feature 1..36: note = Description of Artificial Sequence: Synthetic oligonucleotide
  source 1..36: mol_type = other DNA
agggccagtcagagcgttagcagcagctacttagct

SEQ ID NO: 2068 - protein, 12 aa, synthetic construct
  REGION 1..12: note = Description of Artificial Sequence: Synthetic peptide
RASQSVSSSYLA

SEQ ID NO: 2069 - DNA, 51 bp, synthetic construct; identical to SEQ ID NO: 1777
  misc_feature 1..51: note = Description of Artificial Sequence: Synthetic oligonucleotide
  source 1..51: mol_type = other DNA

SEQ ID NO: 2070 - protein, 17 aa, synthetic construct
  REGION 1..17: note = Description of Artificial Sequence: Synthetic peptide
KSSQSVLHSSNKKNYLA

SEQ ID NO: 2071 - DNA, 33 bp, synthetic construct; identical to SEQ ID NO: 109
  misc_feature 1..33: note = Description of Artificial Sequence: Synthetic oligonucleotide
  source 1..33: mol_type = other DNA

SEQ ID NO: 2072 - protein, 11 aa, synthetic construct
  REGION 1..11: note = Description of Artificial Sequence: Synthetic peptide
RASQGIRNDLG

SEQ ID NO: 2073 - DNA, 33 bp, synthetic construct; identical to SEQ ID NO: 205
  misc_feature 1..33: note = Description of Artificial Sequence: Synthetic oligonucleotide
  source 1..33: mol_type = other DNA

SEQ ID NO: 2074 - protein, 11 aa, synthetic construct
  REGION 1..11: note = Description of Artificial Sequence: Synthetic peptide
RASQDIRNDLG

SEQ ID NO: 2075 - DNA, 51 bp, synthetic construct
  misc_feature 1..51: note = Description of Artificial Sequence: Synthetic oligonucleotide
  source 1..51: mol_type = other DNA
aagtccagccagagtgttttgcacagctccaacaattataattacttagct

SEQ ID NO: 2076 - protein, 17 aa, synthetic construct
  REGION 1..17: note = Description of Artificial Sequence: Synthetic peptide
KSSQSVLHSSNNYNYLA

SEQ ID NO: 2077 - DNA, 51 bp, synthetic construct; identical to SEQ ID NO: 159
  misc_feature 1..51: note = Description of Artificial Sequence: Synthetic oligonucleotide
  source 1..51: mol_type = other DNA

SEQ ID NO: 2078 - protein, 17 aa, synthetic construct
  REGION 1..17: note = Description of Artificial Sequence: Synthetic peptide
KSSQSVLYSSNSHNYLA

SEQ ID NO: 2079 - DNA, 33 bp, synthetic construct; identical to SEQ ID NO: 105
  misc_feature 1..33: note = Description of Artificial Sequence: Synthetic oligonucleotide
  source 1..33: mol_type = other DNA

SEQ ID NO: 2080 - protein, 11 aa, synthetic construct
  REGION 1..11: note = Description of Artificial Sequence: Synthetic peptide
RASQGISNYLA

SEQ ID NO: 2081 - DNA, 51 bp, synthetic construct; identical to SEQ ID NO: 2027
  misc_feature 1..51: note = Description of Artificial Sequence: Synthetic oligonucleotide
  source 1..51: mol_type = other DNA

SEQ ID NO: 2082 - protein, 17 aa, synthetic construct
  REGION 1..17: note = Description of Artificial Sequence: Synthetic peptide
KSSQNILSSSNNKNYLT

SEQ ID NO: 2083 - DNA, 36 bp, synthetic construct; identical to SEQ ID NO: 1697
  misc_feature 1..36: note = Description of Artificial Sequence: Synthetic oligonucleotide
  source 1..36: mol_type = other DNA

SEQ ID NO: 2084 - protein, 12 aa, synthetic construct
  REGION 1..12: note = Description of Artificial Sequence: Synthetic peptide
RASQSVYSSYLA

SEQ ID NO: 2085 - DNA, 51 bp, synthetic construct; identical to SEQ ID NO: 1767
  misc_feature 1..51: note = Description of Artificial Sequence: Synthetic oligonucleotide
  source 1..51: mol_type = other DNA

SEQ ID NO: 2086 - protein, 17 aa, synthetic construct
  REGION 1..17: note = Description of Artificial Sequence: Synthetic peptide
KSSQSVLYTSNNNNYLA

SEQ ID NO: 2087 - DNA, 36 bp, synthetic construct; identical to SEQ ID NO: 1697
  misc_feature 1..36: note = Description of Artificial Sequence: Synthetic oligonucleotide
  source 1..36: mol_type = other DNA

SEQ ID NO: 2088 - protein, 12 aa, synthetic construct
  REGION 1..12: note = Description of Artificial Sequence: Synthetic peptide
RASQSVYSSYLA

SEQ ID NO: 2089 - DNA, 33 bp, synthetic construct
  misc_feature 1..33: note = Description of Artificial Sequence: Synthetic oligonucleotide
  source 1..33: mol_type = other DNA
cgggcgagtcagggtattaacaactggttagtc

SEQ ID NO: 2090 - protein, 11 aa, synthetic construct
  REGION 1..11: note = Description of Artificial Sequence: Synthetic peptide
RASQGINNWLV

SEQ ID NO: 2091 - DNA, 33 bp, synthetic construct; identical to SEQ ID NO: 109
  misc_feature 1..33: note = Description of Artificial Sequence: Synthetic oligonucleotide
  source 1..33: mol_type = other DNA

SEQ ID NO: 2092 - protein, 11 aa, synthetic construct
  REGION 1..11: note = Description of Artificial Sequence: Synthetic peptide
RASQGIRNDLG

SEQ ID NO: 2093 - DNA, 33 bp, synthetic construct; identical to SEQ ID NO: 431
  misc_feature 1..33: note = Description of Artificial Sequence: Synthetic oligonucleotide
  source 1..33: mol_type = other DNA

SEQ ID NO: 2094 - protein, 11 aa, synthetic construct
  REGION 1..11: note = Description of Artificial Sequence: Synthetic peptide
RASQSISDYLN

SEQ ID NO: 2095 - DNA, 48 bp, synthetic construct; identical to SEQ ID NO: 575
  misc_feature 1..48: note = Description of Artificial Sequence: Synthetic oligonucleotide
  source 1..48: mol_type = other DNA

SEQ ID NO: 2096 - protein, 16 aa, synthetic construct
  REGION 1..16: note = Description of Artificial Sequence: Synthetic peptide
KSSQSLLHGDGKTYLY

SEQ ID NO: 2097 - DNA, 51 bp, synthetic construct; identical to SEQ ID NO: 1541
  misc_feature 1..51: note = Description of Artificial Sequence: Synthetic oligonucleotide
  source 1..51: mol_type = other DNA

SEQ ID NO: 2098 - protein, 17 aa, synthetic construct
  REGION 1..17: note = Description of Artificial Sequence: Synthetic peptide
KSSQSVLYSSNNNNYLA

SEQ ID NO: 2099 - DNA, 36 bp, synthetic construct
  misc_feature 1..36: note = Description of Artificial Sequence: Synthetic oligonucleotide
  source 1..36: mol_type = other DNA
agggccagtcagaatattatcagcagctatttagcc

SEQ ID NO: 2100 - protein, 12 aa, synthetic construct
  REGION 1..12: note = Description of Artificial Sequence: Synthetic peptide
RASQNIISSYLA

SEQ ID NO: 2101 - DNA, 33 bp, synthetic construct; identical to SEQ ID NO: 553
  misc_feature 1..33: note = Description of Artificial Sequence: Synthetic oligonucleotide
  source 1..33: mol_type = other DNA

SEQ ID NO: 2102 - protein, 11 aa, synthetic construct
  REGION 1..11: note = Description of Artificial Sequence: Synthetic peptide
RASQGISNWLA

SEQ ID NO: 2103 - DNA, 51 bp, synthetic construct
  misc_feature 1..51: note = Description of Artificial Sequence: Synthetic oligonucleotide
  source 1..51: mol_type = other DNA
aagtccagccagagtgttttacacagctccaacaattataattacttagct

SEQ ID NO: 2104 - protein, 17 aa, synthetic construct
  REGION 1..17: note = Description of Artificial Sequence: Synthetic peptide
KSSQSVLHSSNNYNYLA

SEQ ID NO: 2105 - DNA, 33 bp, synthetic construct; identical to SEQ ID NO: 431
  misc_feature 1..33: note = Description of Artificial Sequence: Synthetic oligonucleotide
  source 1..33: mol_type = other DNA

SEQ ID NO: 2106 - protein, 11 aa, synthetic construct
  REGION 1..11: note = Description of Artificial Sequence: Synthetic peptide
RASQSISDYLN

SEQ ID NO: 2107 - DNA, 51 bp, synthetic construct
  misc_feature 1..51: note = Description of Artificial Sequence: Synthetic oligonucleotide
  source 1..51: mol_type = other DNA
aagtccagccagaatattttacacagctccaacaataacaactacttagct

SEQ ID NO: 2108 - protein, 17 aa, synthetic construct
  REGION 1..17: note = Description of Artificial Sequence: Synthetic peptide
KSSQNILHSSNNNNYLA

SEQ ID NO: 2109 - DNA, 33 bp, synthetic construct; identical to SEQ ID NO: 109
  misc_feature 1..33: note = Description of Artificial Sequence: Synthetic oligonucleotide
  source 1..33: mol_type = other DNA

SEQ ID NO: 2110 - protein, 11 aa, synthetic construct
  REGION 1..11: note = Description of Artificial Sequence: Synthetic peptide
RASQGIRNDLG

SEQ ID NO: 2111 - DNA, 33 bp, synthetic construct
  misc_feature 1..33: note = Description of Artificial Sequence: Synthetic oligonucleotide
  source 1..33: mol_type = other DNA
cgggcaagtcaggacattagaaataattttggc

SEQ ID NO: 2112 - protein, 11 aa, synthetic construct
  REGION 1..11: note = Description of Artificial Sequence: Synthetic peptide
RASQDIRNNFG

SEQ ID NO: 2113 - DNA, 48 bp, synthetic construct; identical to SEQ ID NO: 103
  misc_feature 1..48: note = Description of Artificial Sequence: Synthetic oligonucleotide
  source 1..48: mol_type = other DNA

SEQ ID NO: 2114 - protein, 16 aa, synthetic construct
  REGION 1..16: note = Description of Artificial Sequence: Synthetic peptide
KSSQSLLHSEGKTYLY

SEQ ID NO: 2115 - DNA, 36 bp, synthetic construct
  misc_feature 1..36: note = Description of Artificial Sequence: Synthetic oligonucleotide
  source 1..36: mol_type = other DNA
agggccagtcagagtgttggcagcagctacttagcc

SEQ ID NO: 2116 - protein, 12 aa, synthetic construct
  REGION 1..12: note = Description of Artificial Sequence: Synthetic peptide
RASQSVGSSYLA

SEQ ID NO: 2117 - DNA, 36 bp, synthetic construct
  misc_feature 1..36: note = Description of Artificial Sequence: Synthetic oligonucleotide
  source 1..36: mol_type = other DNA
agggccagtcagagtgttatcagtagctacttagcc

SEQ ID NO: 2118 - protein, 12 aa, synthetic construct
  REGION 1..12: note = Description of Artificial Sequence: Synthetic peptide
RASQSVISSYLA

SEQ ID NO: 2119 - DNA, 51 bp, synthetic construct; identical to SEQ ID NO: 1689
  misc_feature 1..51: note = Description of Artificial Sequence: Synthetic oligonucleotide
  source 1..51: mol_type = other DNA

SEQ ID NO: 2120 - protein, 17 aa, synthetic construct
  REGION 1..17: note = Description of Artificial Sequence: Synthetic peptide
KSSQSVLHSSNNYNYLA

SEQ ID NO: 2121 - DNA, 51 bp, synthetic construct; identical to SEQ ID NO: 1541
  misc_feature 1..51: note = Description of Artificial Sequence: Synthetic oligonucleotide
  source 1..51: mol_type = other DNA

SEQ ID NO: 2122 - protein, 17 aa, synthetic construct
  REGION 1..17: note = Description of Artificial Sequence: Synthetic peptide
KSSQSVLYSSNNNNYLA

SEQ ID NO: 2123 - DNA, 33 bp, synthetic construct; identical to SEQ ID NO: 147
  misc_feature 1..33: note = Description of Artificial Sequence: Synthetic oligonucleotide
  source 1..33: mol_type = other DNA

SEQ ID NO: 2124 - protein, 11 aa, synthetic construct
  REGION 1..11: note = Description of Artificial Sequence: Synthetic peptide
RASRGIRDDLG

SEQ ID NO: 2125 - DNA, 51 bp, synthetic construct
  misc_feature 1..51: note = Description of Artificial Sequence: Synthetic oligonucleotide
  source 1..51: mol_type = other DNA
aagtccagccagagtgttttatacagctccaacagtaacaactacttagct

SEQ ID NO: 2126 - protein, 17 aa, synthetic construct
  REGION 1..17: note = Description of Artificial Sequence: Synthetic peptide
KSSQSVLYSSNSNNYLA

SEQ ID NO: 2127 - DNA, 48 bp, synthetic construct
  misc_feature 1..48: note = Description of Artificial Sequence: Synthetic oligonucleotide
  source 1..48: mol_type = other DNA
aagactagtcagagcctcctgcatagtgaaggaaagacctatttgtat

SEQ ID NO: 2128 - protein, 16 aa, synthetic construct
  REGION 1..16: note = Description of Artificial Sequence: Synthetic peptide
KTSQSLLHSEGKTYLY

SEQ ID NO: 2129 - DNA, 36 bp, synthetic construct
  misc_feature 1..36: note = Description of Artificial Sequence: Synthetic oligonucleotide
  source 1..36: mol_type = other DNA
agggccagtcagagaattttcagcaactacttagcc

SEQ ID NO: 2130 - protein, 12 aa, synthetic construct
  REGION 1..12: note = Description of Artificial Sequence: Synthetic peptide
RASQRIFSNYLA

SEQ ID NO: 2131 - DNA, 33 bp, synthetic construct; identical to SEQ ID NO: 1591
  misc_feature 1..33: note = Description of Artificial Sequence: Synthetic oligonucleotide
  source 1..33: mol_type = other DNA

SEQ ID NO: 2132 - protein, 11 aa, synthetic construct
  REGION 1..11: note = Description of Artificial Sequence: Synthetic peptide
RASQDINNYLA

SEQ ID NO: 2133 - DNA, 33 bp, synthetic construct
  misc_feature 1..33: note = Description of Artificial Sequence: Synthetic oligonucleotide
  source 1..33: mol_type = other DNA
cgggcgagtcagaatattagcaactggttaacc

SEQ ID NO: 2134 - protein, 11 aa, synthetic construct
  REGION 1..11: note = Description of Artificial Sequence: Synthetic peptide
RASQNISNWLT

SEQ ID NO: 2135 - DNA, 33 bp, synthetic construct; identical to SEQ ID NO: 553
  misc_feature 1..33: note = Description of Artificial Sequence: Synthetic oligonucleotide
  source 1..33: mol_type = other DNA

SEQ ID NO: 2136 - protein, 11 aa, synthetic construct
  REGION 1..11: note = Description of Artificial Sequence: Synthetic peptide
RASQGISNWLA

SEQ ID NO: 2137 - DNA, 48 bp, synthetic construct
  misc_feature 1..48: note = Description of Artificial Sequence: Synthetic oligonucleotide
  source 1..48: mol_type = other DNA
aagtctagtcagagcctcctgcatggtgatggaaagacctatttttat

SEQ ID NO: 2138 - protein, 16 aa, synthetic construct
  REGION 1..16: note = Description of Artificial Sequence: Synthetic peptide
KSSQSLLHGDGKTYFY

SEQ ID NO: 2139 - DNA, 33 bp, synthetic construct; identical to SEQ ID NO: 553
  misc_feature 1..33: note = Description of Artificial Sequence: Synthetic oligonucleotide
  source 1..33: mol_type = other DNA

SEQ ID NO: 2140 - protein, 11 aa, synthetic construct
  REGION 1..11: note = Description of Artificial Sequence: Synthetic peptide
RASQGISNWLA

SEQ ID NO: 2141 - DNA, 51 bp, synthetic construct
  misc_feature 1..51: note = Description of Artificial Sequence: Synthetic oligonucleotide
  source 1..51: mol_type = other DNA
aagtccagccaacgtgttttacacagctccaacaattataactacttagct

SEQ ID NO: 2142 - protein, 17 aa, synthetic construct
  REGION 1..17: note = Description of Artificial Sequence: Synthetic peptide
KSSQRVLHSSNNYNYLA

SEQ ID NO: 2143 - DNA, 33 bp, synthetic construct; identical to SEQ ID NO: 269
  misc_feature 1..33: note = Description of Artificial Sequence: Synthetic oligonucleotide
  source 1..33: mol_type = other DNA

SEQ ID NO: 2144 - protein, 11 aa, synthetic construct
  REGION 1..11: note = Description of Artificial Sequence: Synthetic peptide
RASQSIINYLN

SEQ ID NO: 2145 - DNA, 48 bp, synthetic construct; identical to SEQ ID NO: 103
  misc_feature 1..48: note = Description of Artificial Sequence: Synthetic oligonucleotide
  source 1..48: mol_type = other DNA

SEQ ID NO: 2146 - protein, 16 aa, synthetic construct
  REGION 1..16: note = Description of Artificial Sequence: Synthetic peptide
KSSQSLLHSEGKTYLY

SEQ ID NO: 2147 - DNA, 33 bp, synthetic construct
  misc_feature 1..33: note = Description of Artificial Sequence: Synthetic oligonucleotide
  source 1..33: mol_type = other DNA
cgggcgagtcagggcattagcaaatatttagcc

SEQ ID NO: 2148 - protein, 11 aa, synthetic construct
  REGION 1..11: note = Description of Artificial Sequence: Synthetic peptide
RASQGISKYLA

SEQ ID NO: 2149 - DNA, 51 bp, synthetic construct
  misc_feature 1..51: note = Description of Artificial Sequence: Synthetic oligonucleotide
  source 1..51: mol_type = other DNA
aagtccagccagagtgctttacacagctccaacaattacaactacttagct

SEQ ID NO: 2150 - protein, 17 aa, synthetic construct
  REGION 1..17: note = Description of Artificial Sequence: Synthetic peptide
KSSQSALHSSNNYNYLA

SEQ ID NO: 2151 - DNA, 33 bp, synthetic construct
  misc_feature 1..33: note = Description of Artificial Sequence: Synthetic oligonucleotide
  source 1..33: mol_type = other DNA
cgggcaagtcagagcattagtaactatttaaat

SEQ ID NO: 2152 - protein, 11 aa, synthetic construct
  REGION 1..11: note = Description of Artificial Sequence: Synthetic peptide
RASQSISNYLN

SEQ ID NO: 2153 - DNA, 48 bp, synthetic construct; identical to SEQ ID NO: 575
  misc_feature 1..48: note = Description of Artificial Sequence: Synthetic oligonucleotide
  source 1..48: mol_type = other DNA

SEQ ID NO: 2154 - protein, 16 aa, synthetic construct
  REGION 1..16: note = Description of Artificial Sequence: Synthetic peptide
KSSQSLLHGDGKTYLY

SEQ ID NO: 2155 - DNA, 48 bp, synthetic construct; identical to SEQ ID NO: 555
  misc_feature 1..48: note = Description of Artificial Sequence: Synthetic oligonucleotide
  source 1..48: mol_type = other DNA

SEQ ID NO: 2156 - protein, 16 aa, synthetic construct
  REGION 1..16: note = Description of Artificial Sequence: Synthetic peptide
KSSQSLLHSEGKTYLY

SEQ ID NO: 2157 - DNA, 33 bp, synthetic construct; identical to SEQ ID NO: 109
  misc_feature 1..33: note = Description of Artificial Sequence: Synthetic oligonucleotide
  source 1..33: mol_type = other DNA

SEQ ID NO: 2158 - protein, 11 aa, synthetic construct
  REGION 1..11: note = Description of Artificial Sequence: Synthetic peptide
RASQGIRNDLG

SEQ ID NO: 2159 - DNA, 33 bp, synthetic construct
  misc_feature 1..33: note = Description of Artificial Sequence: Synthetic oligonucleotide
  source 1..33: mol_type = other DNA
cgggcaagtcagggcattagaaatgccttaggc

SEQ ID NO: 2160 - protein, 11 aa, synthetic construct
  REGION 1..11: note = Description of Artificial Sequence: Synthetic peptide
RASQGIRNALG

SEQ ID NO: 2161 - DNA, 48 bp, synthetic construct; identical to SEQ ID NO: 2137
  misc_feature 1..48: note = Description of Artificial Sequence: Synthetic oligonucleotide
  source 1..48: mol_type = other DNA

SEQ ID NO: 2162 - protein, 16 aa, synthetic construct
  REGION 1..16: note = Description of Artificial Sequence: Synthetic peptide
KSSQSLLHGDGKTYFY

SEQ ID NO: 2163 - DNA, 33 bp, synthetic construct; identical to SEQ ID NO: 109
  misc_feature 1..33: note = Description of Artificial Sequence: Synthetic oligonucleotide
  source 1..33: mol_type = other DNA

SEQ ID NO: 2164 - protein, 11 aa, synthetic construct
  REGION 1..11: note = Description of Artificial Sequence: Synthetic peptide
RASQGIRNDLG

SEQ ID NO: 2165 - DNA, 51 bp, synthetic construct
  misc_feature 1..51: note = Description of Artificial Sequence: Synthetic oligonucleotide
  source 1..51: mol_type = other DNA
aagtccagccagagtgttttatacagtcccaacaataacaactacttagct

SEQ ID NO: 2166 - protein, 17 aa, synthetic construct
  REGION 1..17: note = Description of Artificial Sequence: Synthetic peptide
KSSQSVLYSPNNNNYLA

SEQ ID NO: 2167 - DNA, 33 bp, synthetic construct; identical to SEQ ID NO: 877
  misc_feature 1..33: note = Description of Artificial Sequence: Synthetic oligonucleotide
  source 1..33: mol_type = other DNA

SEQ ID NO: 2168 - protein, 11 aa, synthetic construct
  REGION 1..11: note = Description of Artificial Sequence: Synthetic peptide
RASQSISSYLN

SEQ ID NO: 2169 - DNA, 51 bp, synthetic construct
  misc_feature 1..51: note = Description of Artificial Sequence: Synthetic oligonucleotide
  source 1..51: mol_type = other DNA
aagtccagccagactgttttacacaactccaataatcacaattactttgct

SEQ ID NO: 2170 - protein, 17 aa, synthetic construct
  REGION 1..17: note = Description of Artificial Sequence: Synthetic peptide
KSSQTVLHNSNNHNYFA

SEQ ID NO: 2171 - DNA, 51 bp, synthetic construct
  misc_feature 1..51: note = Description of Artificial Sequence: Synthetic oligonucleotide
  source 1..51: mol_type = other DNA
aagtccagccagagtgttttatccagctccaacgataacaactacttagct

SEQ ID NO: 2172 - protein, 17 aa, synthetic construct
  REGION 1..17: note = Description of Artificial Sequence: Synthetic peptide
KSSQSVLSSSNDNNYLA

SEQ ID NO: 2173 - DNA, 33 bp, synthetic construct; identical to SEQ ID NO: 2159
  misc_feature 1..33: note = Description of Artificial Sequence: Synthetic oligonucleotide
  source 1..33: mol_type = other DNA

SEQ ID NO: 2174 - protein, 11 aa, synthetic construct
  REGION 1..11: note = Description of Artificial Sequence: Synthetic peptide
RASQGIRNALG

SEQ ID NO: 2175 - DNA, 33 bp, synthetic construct
  misc_feature 1..33: note = Description of Artificial Sequence: Synthetic oligonucleotide
  source 1..33: mol_type = other DNA
cgggcgagtcagggtattatcagttggttagcc

SEQ ID NO: 2176 - protein, 11 aa, synthetic construct
  REGION 1..11: note = Description of Artificial Sequence: Synthetic peptide
RASQGIISWLA

SEQ ID NO: 2177 - DNA, 33 bp, synthetic construct; identical to SEQ ID NO: 553
  misc_feature 1..33: note = Description of Artificial Sequence: Synthetic oligonucleotide
  source 1..33: mol_type = other DNA

SEQ ID NO: 2178 - protein, 11 aa, synthetic construct
  REGION 1..11: note = Description of Artificial Sequence: Synthetic peptide
RASQGISNWLA

SEQ ID NO: 2179 - DNA, 36 bp, synthetic construct
  misc_feature 1..36: note = Description of Artificial Sequence: Synthetic oligonucleotide
  source 1..36: mol_type = other DNA
agggccagtcagagtattatcagcaactacttagcc

SEQ ID NO: 2180 - protein, 12 aa, synthetic construct
  REGION 1..12: note = Description of Artificial Sequence: Synthetic peptide
RASQSIISNYLA

SEQ ID NO: 2181 - DNA, 33 bp, synthetic construct; identical to SEQ ID NO: 553
  misc_feature 1..33: note = Description of Artificial Sequence: Synthetic oligonucleotide
  source 1..33: mol_type = other DNA

SEQ ID NO: 2182 - protein, 11 aa, synthetic construct
  REGION 1..11: note = Description of Artificial Sequence: Synthetic peptide
RASQGISNWLA

SEQ ID NO: 2183 - DNA, 33 bp, synthetic construct; identical to SEQ ID NO: 535
  misc_feature 1..33: note = Description of Artificial Sequence: Synthetic oligonucleotide
  source 1..33: mol_type = other DNA

SEQ ID NO: 2184 - protein, 11 aa, synthetic construct
  REGION 1..11: note = Description of Artificial Sequence: Synthetic peptide
RASRGIRNDLG

SEQ ID NO: 2185 - DNA, 33 bp, synthetic construct; identical to SEQ ID NO: 2133
  misc_feature 1..33: note = Description of Artificial Sequence: Synthetic oligonucleotide
  source 1..33: mol_type = other DNA

SEQ ID NO: 2186 - protein, 11 aa, synthetic construct
  REGION 1..11: note = Description of Artificial Sequence: Synthetic peptide
RASQNISNWLT

SEQ ID NO: 2187 - DNA, 33 bp, synthetic construct; identical to SEQ ID NO: 109
  misc_feature 1..33: note = Description of Artificial Sequence: Synthetic oligonucleotide
  source 1..33: mol_type = other DNA

SEQ ID NO: 2188 - protein, 11 aa, synthetic construct
  REGION 1..11: note = Description of Artificial Sequence: Synthetic peptide
RASQGIRNDLG

SEQ ID NO: 2189 - DNA, 51 bp, synthetic construct
  misc_feature 1..51: note = Description of Artificial Sequence: Synthetic oligonucleotide
  source 1..51: mol_type = other DNA
aagtccagccagagtgttttatacagatccaacagtaagaaatacttaact

SEQ ID NO: 2190 - protein, 17 aa, synthetic construct
  REGION 1..17: note = Description of Artificial Sequence: Synthetic peptide
KSSQSVLYRSNSKKYLT

SEQ ID NO: 2191 - DNA, 33 bp, synthetic construct; identical to SEQ ID NO: 429
  misc_feature 1..33: note = Description of Artificial Sequence: Synthetic oligonucleotide
  source 1..33: mol_type = other DNA

SEQ ID NO: 2192 - protein, 11 aa, synthetic construct
  REGION 1..11: note = Description of Artificial Sequence: Synthetic peptide
RASQGIGNDLG

SEQ ID NO: 2193 - DNA, 33 bp, synthetic construct
  misc_feature 1..33: note = Description of Artificial Sequence: Synthetic oligonucleotide
  source 1..33: mol_type = other DNA
cgggcgagtcagggtattaacaactggttagcc

SEQ ID NO: 2194 - protein, 11 aa, synthetic construct
  REGION 1..11: note = Description of Artificial Sequence: Synthetic peptide
RASQGINNWLA

SEQ ID NO: 2195 - DNA, 51 bp, synthetic construct
  misc_feature 1..51: note = Description of Artificial Sequence: Synthetic oligonucleotide
  source 1..51: mol_type = other DNA
aagtccagccagaatgttttatacagctcccacaataacaactacttagct

SEQ ID NO: 2196 - protein, 17 aa, synthetic construct
  REGION 1..17: note = Description of Artificial Sequence: Synthetic peptide
KSSQNVLYSSHNNNYLA

SEQ ID NO: 2197 - DNA, 33 bp, synthetic construct; identical to SEQ ID NO: 109
  misc_feature 1..33: note = Description of Artificial Sequence: Synthetic oligonucleotide
  source 1..33: mol_type = other DNA

SEQ ID NO: 2198 - protein, 11 aa, synthetic construct
  REGION 1..11: note = Description of Artificial Sequence: Synthetic peptide
RASQGIRNDLG

SEQ ID NO: 2199 - DNA, 33 bp, synthetic construct
  misc_feature 1..33: note = Description of Artificial Sequence: Synthetic oligonucleotide
  source 1..33: mol_type = other DNA
cgggcgagtcagggcattagccattatttagcc

SEQ ID NO: 2200 - protein, 11 aa, synthetic construct
  REGION 1..11: note = Description of Artificial Sequence: Synthetic peptide
RASQGISHYLA

SEQ ID NO: 2201 - DNA, 48 bp, synthetic construct
  misc_feature 1..48: note = Description of Artificial Sequence: Synthetic oligonucleotide
  source 1..48: mol_type = other DNA
aagtctagtcagagcctcgtgcatggtgatggaaagacctatttgtat

SEQ ID NO: 2202 - protein, 16 aa, synthetic construct
  REGION 1..16: note = Description of Artificial Sequence: Synthetic peptide
KSSQSLVHGDGKTYLY

SEQ ID NO: 2203 - DNA, 33 bp, synthetic construct; identical to SEQ ID NO: 501
  misc_feature 1..33: note = Description of Artificial Sequence: Synthetic oligonucleotide
  source 1..33: mol_type = other DNA

SEQ ID NO: 2204 - protein, 11 aa, synthetic construct
  REGION 1..11: note = Description of Artificial Sequence: Synthetic peptide
RASQSISSYLN

SEQ ID NO: 2205 - DNA, 48 bp, synthetic construct; identical to SEQ ID NO: 555
  misc_feature 1..48: note = Description of Artificial Sequence: Synthetic oligonucleotide
  source 1..48: mol_type = other DNA

SEQ ID NO: 2206 - protein, 16 aa, synthetic construct
  REGION 1..16: note = Description of Artificial Sequence: Synthetic peptide
KSSQSLLHSEGKTYLY

SEQ ID NO: 2207 - DNA, 33 bp, synthetic construct; identical to SEQ ID NO: 431
  misc_feature 1..33: note = Description of Artificial Sequence: Synthetic oligonucleotide
  source 1..33: mol_type = other DNA

SEQ ID NO: 2208 - protein, 11 aa, synthetic construct
  REGION 1..11: note = Description of Artificial Sequence: Synthetic peptide
RASQSISDYLN

SEQ ID NO: 2209 - DNA, 33 bp, synthetic construct
  misc_feature 1..33: note = Description of Artificial Sequence: Synthetic oligonucleotide
  source 1..33: mol_type = other DNA
agggccagtcagagtattaacatcaatatagcc

SEQ ID NO: 2210 - protein, 11 aa, synthetic construct
  REGION 1..11: note = Description of Artificial Sequence: Synthetic peptide
RASQSININIA

SEQ ID NO: 2211 - DNA, 48 bp, synthetic construct; identical to SEQ ID NO: 107
  misc_feature 1..48: note = Description of Artificial Sequence: Synthetic oligonucleotide
  source 1..48: mol_type = other DNA

SEQ ID NO: 2212 - protein, 16 aa, synthetic construct
  REGION 1..16: note = Description of Artificial Sequence: Synthetic peptide
KSSQRLLHGDGKTYLY

SEQ ID NO: 2213 - DNA, 33 bp, synthetic construct
  misc_feature 1..33: note = Description of Artificial Sequence: Synthetic oligonucleotide
  source 1..33: mol_type = other DNA
cgggcaagtcagagcattagcaactttttaaat

SEQ ID NO: 2214 - protein, 11 aa, synthetic construct
  REGION 1..11: note = Description of Artificial Sequence: Synthetic peptide
RASQSISNFLN

SEQ ID NO: 2215 - DNA, 33 bp, synthetic construct; identical to SEQ ID NO: 1751
  misc_feature 1..33: note = Description of Artificial Sequence: Synthetic oligonucleotide
  source 1..33: mol_type = other DNA

SEQ ID NO: 2216 - protein, 11 aa, synthetic construct
  REGION 1..11: note = Description of Artificial Sequence: Synthetic peptide
RASQGISKYLA

SEQ ID NO: 2217 - DNA, 48 bp, synthetic construct; identical to SEQ ID NO: 575
  misc_feature 1..48: note = Description of Artificial Sequence: Synthetic oligonucleotide
  source 1..48: mol_type = other DNA

SEQ ID NO: 2218 - protein, 16 aa, synthetic construct
  REGION 1..16: note = Description of Artificial Sequence: Synthetic peptide
KSSQSLLHGDGKTYLY

SEQ ID NO: 2219 - DNA, 33 bp, synthetic construct; identical to SEQ ID NO: 431
  misc_feature 1..33: note = Description of Artificial Sequence: Synthetic oligonucleotide
  source 1..33: mol_type = other DNA

SEQ ID NO: 2220 - protein, 11 aa, synthetic construct
  REGION 1..11: note = Description of Artificial Sequence: Synthetic peptide
RASQSISDYLN

SEQ ID NO: 2221 - DNA, 51 bp, synthetic construct
  misc_feature 1..51: note = Description of Artificial Sequence: Synthetic oligonucleotide
  source 1..51: mol_type = other DNA
aagtccagccagagtgttttacacagctccaacaattacaactacttagtt

SEQ ID NO: 2222 - protein, 17 aa, synthetic construct
  REGION 1..17: note = Description of Artificial Sequence: Synthetic peptide
KSSQSVLHSSNNYNYLV

SEQ ID NO: 2223 - DNA, 51 bp, synthetic construct
  misc_feature 1..51: note = Description of Artificial Sequence: Synthetic oligonucleotide
  source 1..51: mol_type = other DNA
aagtccagccagagtgttttgcacagctccaacaattacaactacttaact

SEQ ID NO: 2224 - protein, 17 aa, synthetic construct
  REGION 1..17: note = Description of Artificial Sequence: Synthetic peptide
KSSQSVLHSSNNYNYLT

SEQ ID NO: 2225 - DNA, 51 bp, synthetic construct; identical to SEQ ID NO: 1079
  misc_feature 1..51: note = Description of Artificial Sequence: Synthetic oligonucleotide
  source 1..51: mol_type = other DNA

SEQ ID NO: 2226 - protein, 17 aa, synthetic construct
  REGION 1..17: note = Description of Artificial Sequence: Synthetic peptide
KSSQSVLYSSNNYNYLA

SEQ ID NO: 2227 - DNA, 33 bp, synthetic construct; identical to SEQ ID NO: 431
  misc_feature 1..33: note = Description of Artificial Sequence: Synthetic oligonucleotide
  source 1..33: mol_type = other DNA

SEQ ID NO: 2228 - protein, 11 aa, synthetic construct
  REGION 1..11: note = Description of Artificial Sequence: Synthetic peptide
RASQSISDYLN

SEQ ID NO: 2229 - DNA, 48 bp, synthetic construct
  misc_feature 1..48: note = Description of Artificial Sequence: Synthetic oligonucleotide
  source 1..48: mol_type = other DNA
aagtctagtcagagcctccggcatggtgatggaaagacctatttgact

SEQ ID NO: 2230 - protein, 16 aa, synthetic construct
  REGION 1..16: note = Description of Artificial Sequence: Synthetic peptide
KSSQSLRHGDGKTYLT

SEQ ID NO: 2231 - DNA, 36 bp, synthetic construct
  misc_feature 1..36: note = Description of Artificial Sequence: Synthetic oligonucleotide
  source 1..36: mol_type = other DNA
agggccagtcagagtgttatcagcagctacttagcc

SEQ ID NO: 2232 - protein, 12 aa, synthetic construct
  REGION 1..12: note = Description of Artificial Sequence: Synthetic peptide
RASQSVISSYLA

SEQ ID NO: 2233 - DNA, 33 bp, synthetic construct; identical to SEQ ID NO: 109
  misc_feature 1..33: note = Description of Artificial Sequence: Synthetic oligonucleotide
  source 1..33: mol_type = other DNA

SEQ ID NO: 2234 - protein, 11 aa, synthetic construct
  REGION 1..11: note = Description of Artificial Sequence: Synthetic peptide
RASQGIRNDLG

SEQ ID NO: 2235 - DNA, 33 bp, synthetic construct; identical to SEQ ID NO: 1509
  misc_feature 1..33: note = Description of Artificial Sequence: Synthetic oligonucleotide
  source 1..33: mol_type = other DNA

SEQ ID NO: 2236 - protein, 11 aa, synthetic construct
  REGION 1..11: note = Description of Artificial Sequence: Synthetic peptide
RASQDISNWLA

SEQ ID NO: 2237 - DNA, 33 bp, synthetic construct; identical to SEQ ID NO: 109
  misc_feature 1..33: note = Description of Artificial Sequence: Synthetic oligonucleotide
  source 1..33: mol_type = other DNA

SEQ ID NO: 2238 - protein, 11 aa, synthetic construct
  REGION 1..11: note = Description of Artificial Sequence: Synthetic peptide
RASQGIRNDLG

SEQ ID NO: 2239 - DNA, 51 bp, synthetic construct; identical to SEQ ID NO: 1071
  misc_feature 1..51: note = Description of Artificial Sequence: Synthetic oligonucleotide
  source 1..51: mol_type = other DNA

SEQ ID NO: 2240 - protein, 17 aa, synthetic construct
  REGION 1..17: note = Description of Artificial Sequence: Synthetic peptide
KSSQSVLYSSNNKNYLA

SEQ ID NO: 2241 - DNA, 33 bp, synthetic construct; identical to SEQ ID NO: 553
  misc_feature 1..33: note = Description of Artificial Sequence: Synthetic oligonucleotide
  source 1..33: mol_type = other DNA

SEQ ID NO: 2242 - protein, 11 aa, synthetic construct
  REGION 1..11: note = Description of Artificial Sequence: Synthetic peptide
RASQGISNWLA

SEQ ID NO: 2243 - DNA, 33 bp, synthetic construct; identical to SEQ ID NO: 431
  misc_feature 1..33: note = Description of Artificial Sequence: Synthetic oligonucleotide
  source 1..33: mol_type = other DNA

SEQ ID NO: 2244 - protein, 11 aa, synthetic construct
  REGION 1..11: note = Description of Artificial Sequence: Synthetic peptide
RASQSISDYLN

SEQ ID NO: 2245 - DNA, 48 bp, synthetic construct
  misc_feature 1..48: note = Description of Artificial Sequence: Synthetic oligonucleotide
  source 1..48: mol_type = other DNA
aagtctagtcagagcctcctgcatggtgatggaaagacctatttatat

SEQ ID NO: 2246 - protein, 16 aa, synthetic construct
  REGION 1..16: note = Description of Artificial Sequence: Synthetic peptide
KSSQSLLHGDGKTYLY

SEQ ID NO: 2247 - DNA, 51 bp, synthetic construct
  misc_feature 1..51: note = Description of Artificial Sequence: Synthetic oligonucleotide
  source 1..51: mol_type = other DNA
acgtccagccagagtattttacacagctccaataattacaactacttagct

SEQ ID NO: 2248 - protein, 17 aa, synthetic construct
  REGION 1..17: note = Description of Artificial Sequence: Synthetic peptide
TSSQSILHSSNNYNYLA

SEQ ID NO: 2249 - DNA, 33 bp, synthetic construct; identical to SEQ ID NO: 1363
  misc_feature 1..33: note = Description of Artificial Sequence: Synthetic oligonucleotide
  source 1..33: mol_type = other DNA

SEQ ID NO: 2250 - protein, 11 aa, synthetic construct
  REGION 1..11: note = Description of Artificial Sequence: Synthetic peptide
RASQVISNYLA

SEQ ID NO: 2251 - DNA, 48 bp, synthetic construct; identical to SEQ ID NO: 2229
  misc_feature 1..48: note = Description of Artificial Sequence: Synthetic oligonucleotide
  source 1..48: mol_type = other DNA

SEQ ID NO: 2252 - protein, 16 aa, synthetic construct
  REGION 1..16: note = Description of Artificial Sequence: Synthetic peptide
KSSQSLRHGDGKTYLT

SEQ ID NO: 2253 - DNA, 36 bp, synthetic construct; identical to SEQ ID NO: 2231
  misc_feature 1..36: note = Description of Artificial Sequence: Synthetic oligonucleotide
  source 1..36: mol_type = other DNA

SEQ ID NO: 2254 - protein, 12 aa, synthetic construct
  REGION 1..12: note = Description of Artificial Sequence: Synthetic peptide
RASQSVISSYLA

SEQ ID NO: 2255 - DNA, 51 bp, synthetic construct; identical to SEQ ID NO: 1071
  misc_feature 1..51: note = Description of Artificial Sequence: Synthetic oligonucleotide
  source 1..51: mol_type = other DNA

SEQ ID NO: 2256 - protein, 17 aa, synthetic construct
  REGION 1..17: note = Description of Artificial Sequence: Synthetic peptide
KSSQSVLYSSNNKNYLA

SEQ ID NO: 2257 - DNA, 48 bp, synthetic construct; identical to SEQ ID NO: 487
  misc_feature 1..48: note = Description of Artificial Sequence: Synthetic oligonucleotide
  source 1..48: mol_type = other DNA

SEQ ID NO: 2258 - protein, 16 aa, synthetic construct
  REGION 1..16: note = Description of Artificial Sequence: Synthetic peptide
KSSQSLLHSDGKTYLY

SEQ ID NO: 2259 - DNA, 51 bp, synthetic construct
  misc_feature 1..51: note = Description of Artificial Sequence: Synthetic oligonucleotide
  source 1..51: mol_type = other DNA
aagtccagccagagtgttttatacagctccaacaattacaagtacttagct

SEQ ID NO: 2260 - protein, 17 aa, synthetic construct
  REGION 1..17: note = Description of Artificial Sequence: Synthetic peptide
KSSQSVLYSSNNYKYLA

SEQ ID NO: 2261 - DNA, 51 bp, synthetic construct
  misc_feature 1..51: note = Description of Artificial Sequence: Synthetic oligonucleotide
  source 1..51: mol_type = other DNA
aagtccagccagagtgttttacacagttccaacaattacaactatttagct

SEQ ID NO: 2262 - protein, 17 aa, synthetic construct
  REGION 1..17: note = Description of Artificial Sequence: Synthetic peptide
KSSQSVLHSSNNYNYLA

SEQ ID NO: 2263 - DNA, 33 bp, synthetic construct; identical to SEQ ID NO: 1509
  misc_feature 1..33: note = Description of Artificial Sequence: Synthetic oligonucleotide
  source 1..33: mol_type = other DNA

SEQ ID NO: 2264 - protein, 11 aa, synthetic construct
  REGION 1..11: note = Description of Artificial Sequence: Synthetic peptide
RASQDISNWLA

SEQ ID NO: 2265 - DNA, 51 bp, synthetic construct
  misc_feature 1..51: note = Description of Artificial Sequence: Synthetic oligonucleotide
  source 1..51: mol_type = other DNA
aggtcaagccagagtgttttacacagctccaacaattataactacttagct

SEQ ID NO: 2266 - protein, 17 aa, synthetic construct
  REGION 1..17: note = Description of Artificial Sequence: Synthetic peptide
RSSQSVLHSSNNYNYLA

SEQ ID NO: 2267 - DNA, 33 bp, synthetic construct; identical to SEQ ID NO: 553
  misc_feature 1..33: note = Description of Artificial Sequence: Synthetic oligonucleotide
  source 1..33: mol_type = other DNA

SEQ ID NO: 2268 - protein, 11 aa, synthetic construct
  REGION 1..11: note = Description of Artificial Sequence: Synthetic peptide
RASQGISNWLA

SEQ ID NO: 2269 - DNA, 33 bp, synthetic construct; identical to SEQ ID NO: 1509
  misc_feature 1..33: note = Description of Artificial Sequence: Synthetic oligonucleotide
  source 1..33: mol_type = other DNA

SEQ ID NO: 2270 - protein, 11 aa, synthetic construct
  REGION 1..11: note = Description of Artificial Sequence: Synthetic peptide
RASQDISNWLA

SEQ ID NO: 2271 - DNA, 33 bp, synthetic construct; identical to SEQ ID NO: 501
  misc_feature 1..33: note = Description of Artificial Sequence: Synthetic oligonucleotide
  source 1..33: mol_type = other DNA

SEQ ID NO: 2272 - protein, 11 aa, synthetic construct
  REGION 1..11: note = Description of Artificial Sequence: Synthetic peptide
RASQSISSYLN

SEQ ID NO: 2273 - DNA, 48 bp, synthetic construct; identical to SEQ ID NO: 575
  misc_feature 1..48: note = Description of Artificial Sequence: Synthetic oligonucleotide
  source 1..48: mol_type = other DNA

SEQ ID NO: 2274 - protein, 16 aa, synthetic construct
  REGION 1..16: note = Description of Artificial Sequence: Synthetic peptide
KSSQSLLHGDGKTYLY

SEQ ID NO: 2275 - DNA, 51 bp, synthetic construct
  misc_feature 1..51: note = Description of Artificial Sequence: Synthetic oligonucleotide
  source 1..51: mol_type = other DNA
aagtccagccagagtgttttatccagctccaacaataataattatttagct

SEQ ID NO: 2276 - protein, 17 aa, synthetic construct
  REGION 1..17: note = Description of Artificial Sequence: Synthetic peptide
KSSQSVLSSSNNNNYLA

SEQ ID NO: 2277 - DNA, 51 bp, synthetic construct
  misc_feature 1..51: note = Description of Artificial Sequence: Synthetic oligonucleotide
  source 1..51: mol_type = other DNA
aagtccagccagagtgttttacacagctccaataattacaactacttagct

SEQ ID NO: 2278 - protein, 17 aa, synthetic construct
  REGION 1..17: note = Description of Artificial Sequence: Synthetic peptide
KSSQSVLHSSNNYNYLA

SEQ ID NO: 2279 - DNA, 33 bp, synthetic construct
  misc_feature 1..33: note = Description of Artificial Sequence: Synthetic oligonucleotide
  source 1..33: mol_type = other DNA
agggccagtcagagtgttagtagtaacttagcc

SEQ ID NO: 2280 - protein, 11 aa, synthetic construct
  REGION 1..11: note = Description of Artificial Sequence: Synthetic peptide
RASQSVSSNLA

SEQ ID NO: 2281 - DNA, 33 bp, synthetic construct; identical to SEQ ID NO: 109
  misc_feature 1..33: note = Description of Artificial Sequence: Synthetic oligonucleotide
  source 1..33: mol_type = other DNA

SEQ ID NO: 2282 - protein, 11 aa, synthetic construct
  REGION 1..11: note = Description of Artificial Sequence: Synthetic peptide
RASQGIRNDLG

SEQ ID NO: 2283 - DNA, 51 bp, synthetic construct; identical to SEQ ID NO: 1541
  misc_feature 1..51: note = Description of Artificial Sequence: Synthetic oligonucleotide
  source 1..51: mol_type = other DNA

SEQ ID NO: 2284 - protein, 17 aa, synthetic construct
  REGION 1..17: note = Description of Artificial Sequence: Synthetic peptide
KSSQSVLYSSNNNNYLA

SEQ ID NO: 2285 - DNA, 33 bp, synthetic construct; identical to SEQ ID NO: 501
  misc_feature 1..33: note = Description of Artificial Sequence: Synthetic oligonucleotide
  source 1..33: mol_type = other DNA

SEQ ID NO: 2286 - protein, 11 aa, synthetic construct
  REGION 1..11: note = Description of Artificial Sequence: Synthetic peptide
RASQSISSYLN

SEQ ID NO: 2287 - DNA, 33 bp, synthetic construct; identical to SEQ ID NO: 105
  misc_feature 1..33: note = Description of Artificial Sequence: Synthetic oligonucleotide
  source 1..33: mol_type = other DNA

SEQ ID NO: 2288 - protein, 11 aa, synthetic construct
  REGION 1..11: note = Description of Artificial Sequence: Synthetic peptide
RASQGISNYLA

SEQ ID NO: 2289 - DNA, 33 bp, synthetic construct
  misc_feature 1..33: note = Description of Artificial Sequence: Synthetic oligonucleotide
  source 1..33: mol_type = other DNA
cgggcgagtcaggacattagcaattatttagtc

SEQ ID NO: 2290 - protein, 11 aa, synthetic construct
  REGION 1..11: note = Description of Artificial Sequence: Synthetic peptide
RASQDISNYLV

SEQ ID NO: 2291 - DNA, 33 bp, synthetic construct; identical to SEQ ID NO: 109
  misc_feature 1..33: note = Description of Artificial Sequence: Synthetic oligonucleotide
  source 1..33: mol_type = other DNA

SEQ ID NO: 2292 - protein, 11 aa, synthetic construct
  REGION 1..11: note = Description of Artificial Sequence: Synthetic peptide
RASQGIRNDLG

SEQ ID NO: 2293 - DNA, 33 bp, synthetic construct
  misc_feature 1..33: note = Description of Artificial Sequence: Synthetic oligonucleotide
  source 1..33: mol_type = other DNA
cgggcaagtcagaacattagcagttatttaaat

SEQ ID NO: 2294 - protein, 11 aa, synthetic construct
  REGION 1..11: note = Description of Artificial Sequence: Synthetic peptide
RASQNISSYLN

SEQ ID NO: 2295 - DNA, 33 bp, synthetic construct; identical to SEQ ID NO: 105
  misc_feature 1..33: note = Description of Artificial Sequence: Synthetic oligonucleotide
  source 1..33: mol_type = other DNA

SEQ ID NO: 2296 - protein, 11 aa, synthetic construct
  REGION 1..11: note = Description of Artificial Sequence: Synthetic peptide
RASQGISNYLA

SEQ ID NO: 2297 - DNA, 33 bp, synthetic construct; identical to SEQ ID NO: 109
  misc_feature 1..33: note = Description of Artificial Sequence: Synthetic oligonucleotide
  source 1..33: mol_type = other DNA

SEQ ID NO: 2298 - protein, 11 aa, synthetic construct
  REGION 1..11: note = Description of Artificial Sequence: Synthetic peptide
RASQGIRNDLG

SEQ ID NO: 2299 - DNA, 33 bp, synthetic construct; identical to SEQ ID NO: 293
  misc_feature 1..33: note = Description of Artificial Sequence: Synthetic oligonucleotide
  source 1..33: mol_type = other DNA

SEQ ID NO: 2300 - protein, 11 aa, synthetic construct
  REGION 1..11: note = Description of Artificial Sequence: Synthetic peptide
RASQGINNYLA

SEQ ID NO: 2301 - DNA, 33 bp, synthetic construct
  misc_feature 1..33: note = Description of Artificial Sequence: Synthetic oligonucleotide
  source 1..33: mol_type = other DNA
cgggcaagtcagagctttagcagctatttaaat

SEQ ID NO: 2302 - protein, 11 aa, synthetic construct
  REGION 1..11: note = Description of Artificial Sequence: Synthetic peptide
RASQSFSSYLN

SEQ ID NO: 2303 - DNA, 33 bp, synthetic construct; identical to SEQ ID NO: 109
  misc_feature 1..33: note = Description of Artificial Sequence: Synthetic oligonucleotide
  source 1..33: mol_type = other DNA

SEQ ID NO: 2304 - protein, 11 aa, synthetic construct
  REGION 1..11: note = Description of Artificial Sequence: Synthetic peptide
RASQGIRNDLG

SEQ ID NO: 2305 - DNA, 33 bp, synthetic construct
  misc_feature 1..33: note = Description of Artificial Sequence: Synthetic oligonucleotide
  source 1..33: mol_type = other DNA
cgggcgagtcaggacattagcaattttttagcc

SEQ ID NO: 2306 - protein, 11 aa, synthetic construct
  REGION 1..11: note = Description of Artificial Sequence: Synthetic peptide
RASQDISNFLA

SEQ ID NO: 2307 - DNA, 48 bp, synthetic construct; identical to SEQ ID NO: 2245
  misc_feature 1..48: note = Description of Artificial Sequence: Synthetic oligonucleotide
  source 1..48: mol_type = other DNA

SEQ ID NO: 2308 - protein, 16 aa, synthetic construct
  REGION 1..16: note = Description of Artificial Sequence: Synthetic peptide
KSSQSLLHGDGKTYLY

SEQ ID NO: 2309 - DNA, 33 bp, synthetic construct; identical to SEQ ID NO: 109
  misc_feature 1..33: note = Description of Artificial Sequence: Synthetic oligonucleotide
  source 1..33: mol_type = other DNA

SEQ ID NO: 2310 - protein, 11 aa, synthetic construct
  REGION 1..11: note = Description of Artificial Sequence: Synthetic peptide
RASQGIRNDLG

SEQ ID NO: 2311 - DNA, 33 bp, synthetic construct
  misc_feature 1..33: note = Description of Artificial Sequence: Synthetic oligonucleotide
  source 1..33: mol_type = other DNA
cgggcgagtcagggcattaccaattatttagcc

SEQ ID NO: 2312 - protein, 11 aa, synthetic construct
  REGION 1..11: note = Description of Artificial Sequence: Synthetic peptide
RASQGITNYLA

SEQ ID NO: 2313 - DNA, 33 bp, synthetic construct
  misc_feature 1..33: note = Description of Artificial Sequence: Synthetic oligonucleotide
  source 1..33: mol_type = other DNA
cgggcaagtcagggcattagaaatgattttggc

SEQ ID NO: 2314 - protein, 11 aa, synthetic construct
  REGION 1..11: note = Description of Artificial Sequence: Synthetic peptide
RASQGIRNDFG

SEQ ID NO: 2315 - DNA, 33 bp, synthetic construct; identical to SEQ ID NO: 109
  misc_feature 1..33: note = Description of Artificial Sequence: Synthetic oligonucleotide
  source 1..33: mol_type = other DNA

SEQ ID NO: 2316 - protein, 11 aa, synthetic construct
  REGION 1..11: note = Description of Artificial Sequence: Synthetic peptide
RASQGIRNDLG

SEQ ID NO: 2317 - DNA, 33 bp, synthetic construct
  misc_feature 1..33: note = Description of Artificial Sequence: Synthetic oligonucleotide
  source 1..33: mol_type = other DNA
cgggcaagtcaggacattagaaaggatttaggc

SEQ ID NO: 2318 - protein, 11 aa, synthetic construct
  REGION 1..11: note = Description of Artificial Sequence: Synthetic peptide
RASQDIRKDLG

SEQ ID NO: 2319 - DNA, 33 bp, synthetic construct
  misc_feature 1..33: note = Description of Artificial Sequence: Synthetic oligonucleotide
  source 1..33: mol_type = other DNA
cgggcaagtcagaacattagaaagtatttacat

SEQ ID NO: 2320 - protein, 11 aa, synthetic construct
  REGION 1..11: note = Description of Artificial Sequence: Synthetic peptide
RASQNIRKYLH

SEQ ID NO: 2321 - DNA, 33 bp, synthetic construct; identical to SEQ ID NO: 109
  misc_feature 1..33: note = Description of Artificial Sequence: Synthetic oligonucleotide
  source 1..33: mol_type = other DNA

SEQ ID NO: 2322 - protein, 11 aa, synthetic construct
  REGION 1..11: note = Description of Artificial Sequence: Synthetic peptide
RASQGIRNDLG

SEQ ID NO: 2323 - DNA, 33 bp, synthetic construct
  misc_feature 1..33: note = Description of Artificial Sequence: Synthetic oligonucleotide
  source 1..33: mol_type = other DNA
cgggcaagtcagggcatgagaattgatttaggg

SEQ ID NO: 2324 - protein, 11 aa, synthetic construct
  REGION 1..11: note = Description of Artificial Sequence: Synthetic peptide
RASQGMRIDLG

SEQ ID NO: 2325 - DNA, 33 bp, synthetic construct; identical to SEQ ID NO: 133
  misc_feature 1..33: note = Description of Artificial Sequence: Synthetic oligonucleotide
  source 1..33: mol_type = other DNA

SEQ ID NO: 2326 - protein, 11 aa, synthetic construct
  REGION 1..11: note = Description of Artificial Sequence: Synthetic peptide
RASQGIRSDLG

SEQ ID NO: 2327 - DNA, 33 bp, synthetic construct; identical to SEQ ID NO: 205
  misc_feature 1..33: note = Description of Artificial Sequence: Synthetic oligonucleotide
  source 1..33: mol_type = other DNA

SEQ ID NO: 2328 - protein, 11 aa, synthetic construct
  REGION 1..11: note = Description of Artificial Sequence: Synthetic peptide
RASQDIRNDLG

SEQ ID NO: 2329 - DNA, 51 bp, synthetic construct
  misc_feature 1..51: note = Description of Artificial Sequence: Synthetic oligonucleotide
  source 1..51: mol_type = other DNA
aagtccagccagaatgttttacacagctccaacaataacaactacttaact

SEQ ID NO: 2330 - protein, 17 aa, synthetic construct
  REGION 1..17: note = Description of Artificial Sequence: Synthetic peptide
KSSQNVLHSSNNNNYLT

SEQ ID NO: 2331 - DNA, 33 bp, synthetic construct; identical to SEQ ID NO: 293
  misc_feature 1..33: note = Description of Artificial Sequence: Synthetic oligonucleotide
  source 1..33: mol_type = other DNA

SEQ ID NO: 2332 - protein, 11 aa, synthetic construct
  REGION 1..11: note = Description of Artificial Sequence: Synthetic peptide
RASQGINNYLA

SEQ ID NO: 2333 - DNA, 33 bp, synthetic construct
  misc_feature 1..33: note = Description of Artificial Sequence: Synthetic oligonucleotide
  source 1..33: mol_type = other DNA
cgggcaagtcagcgcgtcagaaatgatttaggc

SEQ ID NO: 2334 - protein, 11 aa, synthetic construct
  REGION 1..11: note = Description of Artificial Sequence: Synthetic peptide
RASQRVRNDLG

SEQ ID NO: 2335 - DNA, 33 bp, synthetic construct
  misc_feature 1..33: note = Description of Artificial Sequence: Synthetic oligonucleotide
  source 1..33: mol_type = other DNA
cgggcaagtcagagcattagcaaatatttaaat

SEQ ID NO: 2336 - protein, 11 aa, synthetic construct
  REGION 1..11: note = Description of Artificial Sequence: Synthetic peptide
RASQSISKYLN

SEQ ID NO: 2337 - DNA, 33 bp, synthetic construct
  misc_feature 1..33: note = Description of Artificial Sequence: Synthetic oligonucleotide
  source 1..33: mol_type = other DNA
caggcgagtcaggacattagcgactatttaaat

SEQ ID NO: 2338 - protein, 11 aa, synthetic construct
  REGION 1..11: note = Description of Artificial Sequence: Synthetic peptide
QASQDISDYLN

SEQ ID NO: 2339 - DNA, 33 bp, synthetic construct; identical to SEQ ID NO: 93
  misc_feature 1..33: note = Description of Artificial Sequence: Synthetic oligonucleotide
  source 1..33: mol_type = other DNA

SEQ ID NO: 2340 - protein, 11 aa, synthetic construct
  REGION 1..11: note = Description of Artificial Sequence: Synthetic peptide
RTSQGIRNDLG

SEQ ID NO: 2341 - DNA, 33 bp, synthetic construct
  misc_feature 1..33: note = Description of Artificial Sequence: Synthetic oligonucleotide
  source 1..33: mol_type = other DNA
cgggcaagtcaggacattagaaaggatttaggg

SEQ ID NO: 2342 - protein, 11 aa, synthetic construct
  REGION 1..11: note = Description of Artificial Sequence: Synthetic peptide
RASQDIRKDLG

SEQ ID NO: 2343 - DNA, 33 bp, synthetic construct
  misc_feature 1..33: note = Description of Artificial Sequence: Synthetic oligonucleotide
  source 1..33: mol_type = other DNA
cgggcaagtcgggacattggaaatgatttaggc

SEQ ID NO: 2344 - protein, 11 aa, synthetic construct
  REGION 1..11: note = Description of Artificial Sequence: Synthetic peptide
RASRDIGNDLG

SEQ ID NO: 2345 - DNA, 33 bp, synthetic construct
  misc_feature 1..33: note = Description of Artificial Sequence: Synthetic oligonucleotide
  source 1..33: mol_type = other DNA
cgggcgagtcagggcattagcaaatatttagtc

SEQ ID NO: 2346 - protein, 11 aa, synthetic construct
  REGION 1..11: note = Description of Artificial Sequence: Synthetic peptide
RASQGISKYLV

SEQ ID NO: 2347 - DNA, 48 bp, synthetic construct
  misc_feature 1..48: note = Description of Artificial Sequence: Synthetic oligonucleotide
  source 1..48: mol_type = other DNA
aagtctagtcagagcctcctgcatggtgatgggaagacctatttctat

SEQ ID NO: 2348 - protein, 16 aa, synthetic construct
  REGION 1..16: note = Description of Artificial Sequence: Synthetic peptide
KSSQSLLHGDGKTYFY

SEQ ID NO: 2349 - DNA, 33 bp, synthetic construct; identical to SEQ ID NO: 1591
  misc_feature 1..33: note = Description of Artificial Sequence: Synthetic oligonucleotide
  source 1..33: mol_type = other DNA

SEQ ID NO: 2350 - protein, 11 aa, synthetic construct
  REGION 1..11: note = Description of Artificial Sequence: Synthetic peptide
RASQDINNYLA

SEQ ID NO: 2351 - DNA, 33 bp, synthetic construct; identical to SEQ ID NO: 205
  misc_feature 1..33: note = Description of Artificial Sequence: Synthetic oligonucleotide
  source 1..33: mol_type = other DNA

SEQ ID NO: 2352 - protein, 11 aa, synthetic construct
  REGION 1..11: note = Description of Artificial Sequence: Synthetic peptide
RASQDIRNDLG

SEQ ID NO: 2353 - DNA, 33 bp, synthetic construct; identical to SEQ ID NO: 109
  misc_feature 1..33: note = Description of Artificial Sequence: Synthetic oligonucleotide
  source 1..33: mol_type = other DNA

SEQ ID NO: 2354 - protein, 11 aa, synthetic construct
  REGION 1..11: note = Description of Artificial Sequence: Synthetic peptide
RASQGIRNDLG

SEQ ID NO: 2355 - DNA, 33 bp, synthetic construct; identical to SEQ ID NO: 1591
  misc_feature 1..33: note = Description of Artificial Sequence: Synthetic oligonucleotide
  source 1..33: mol_type = other DNA

SEQ ID NO: 2356 - protein, 11 aa, synthetic construct
  REGION 1..11: note = Description of Artificial Sequence: Synthetic peptide
RASQDINNYLA

SEQ ID NO: 2357 - DNA, 33 bp, synthetic construct; identical to SEQ ID NO: 109
  misc_feature 1..33: note = Description of Artificial Sequence: Synthetic oligonucleotide
  source 1..33: mol_type = other DNA

SEQ ID NO: 2358 - protein, 11 aa, synthetic construct
  REGION 1..11: note = Description of Artificial Sequence: Synthetic peptide
RASQGIRNDLG

SEQ ID NO: 2359 - DNA, 51 bp, synthetic construct
  misc_feature 1..51: note = Description of Artificial Sequence: Synthetic oligonucleotide
  source 1..51: mol_type = other DNA
aagtccagccagagtgttttacacagctccaacaataataactacttagct

SEQ ID NO: 2360 - protein, 17 aa, synthetic construct
  REGION 1..17: note = Description of Artificial Sequence: Synthetic peptide
KSSQSVLHSSNNNNYLA

SEQ ID NO: 2361 - DNA, 33 bp, synthetic construct; identical to SEQ ID NO: 2341
  misc_feature 1..33: note = Description of Artificial Sequence: Synthetic oligonucleotide
  source 1..33: mol_type = other DNA

SEQ ID NO: 2362 - protein, 11 aa, synthetic construct
  REGION 1..11: note = Description of Artificial Sequence: Synthetic peptide
RASQDIRKDLG

SEQ ID NO: 2363 - DNA, 33 bp, synthetic construct; identical to SEQ ID NO: 109
  misc_feature 1..33: note = Description of Artificial Sequence: Synthetic oligonucleotide
  source 1..33: mol_type = other DNA

SEQ ID NO: 2364 - protein, 11 aa, synthetic construct
  REGION 1..11: note = Description of Artificial Sequence: Synthetic peptide
RASQGIRNDLG

SEQ ID NO: 2365 - DNA, 33 bp, synthetic construct
  misc_feature 1..33: note = Description of Artificial Sequence: Synthetic oligonucleotide
  source 1..33: mol_type = other DNA
cgggcgagtcaggacattagtaattatttagtc

SEQ ID NO: 2366 - protein, 11 aa, synthetic construct
  REGION 1..11: note = Description of Artificial Sequence: Synthetic peptide
RASQDISNYLV

SEQ ID NO: 2367 - DNA, 33 bp, synthetic construct; identical to SEQ ID NO: 109
  misc_feature 1..33: note = Description of Artificial Sequence: Synthetic oligonucleotide
  source 1..33: mol_type = other DNA

SEQ ID NO: 2368 - protein, 11 aa, synthetic construct
  REGION 1..11: note = Description of Artificial Sequence: Synthetic peptide
RASQGIRNDLG

SEQ ID NO: 2369 - DNA, 48 bp, synthetic construct
  misc_feature 1..48: note = Description of Artificial Sequence: Synthetic oligonucleotide
  source 1..48: mol_type = other DNA
aagtctagtcagagcctcctgcacggtgatggaaagacctatttgtat

SEQ ID NO: 2370 - protein, 16 aa, synthetic construct
  REGION 1..16: note = Description of Artificial Sequence: Synthetic peptide
KSSQSLLHGDGKTYLY

SEQ ID NO: 2371 - DNA, 33 bp, synthetic construct
  misc_feature 1..33: note = Description of Artificial Sequence: Synthetic oligonucleotide
  source 1..33: mol_type = other DNA
aggtccagtcagagtgttaacagcaacttagcc

SEQ ID NO: 2372 - protein, 11 aa, synthetic construct
  REGION 1..11: note = Description of Artificial Sequence: Synthetic peptide
RSSQSVNSNLA

SEQ ID NO: 2373 - DNA, 33 bp, synthetic construct
  misc_feature 1..33: note = Description of Artificial Sequence: Synthetic oligonucleotide
  source 1..33: mol_type = other DNA
caggcgagtcaggacatttacaattatttaaat

SEQ ID NO: 2374 - protein, 11 aa, synthetic construct
  REGION 1..11: note = Description of Artificial Sequence: Synthetic peptide
QASQDIYNYLN

SEQ ID NO: 2375 - DNA, 33 bp, synthetic construct; identical to SEQ ID NO: 1323
  misc_feature 1..33: note = Description of Artificial Sequence: Synthetic oligonucleotide
  source 1..33: mol_type = other DNA

SEQ ID NO: 2376 - protein, 11 aa, synthetic construct
  REGION 1..11: note = Description of Artificial Sequence: Synthetic peptide
RASQGIRNDLG

SEQ ID NO: 2377 - DNA, 33 bp, synthetic construct
  misc_feature 1..33: note = Description of Artificial Sequence: Synthetic oligonucleotide
  source 1..33: mol_type = other DNA
caggcgagtcaggacatttacaaccatttaagt

SEQ ID NO: 2378 - protein, 11 aa, synthetic construct
  REGION 1..11: note = Description of Artificial Sequence: Synthetic peptide
QASQDIYNHLS

SEQ ID NO: 2379 - DNA, 33 bp, synthetic construct; identical to SEQ ID NO: 1323
  misc_feature 1..33: note = Description of Artificial Sequence: Synthetic oligonucleotide
  source 1..33: mol_type = other DNA

SEQ ID NO: 2380 - protein, 11 aa, synthetic construct
  REGION 1..11: note = Description of Artificial Sequence: Synthetic peptide
RASQGIRNDLG

SEQ ID NO: 2381 - DNA, 33 bp, synthetic construct; identical to SEQ ID NO: 2341
  misc_feature 1..33: note = Description of Artificial Sequence: Synthetic oligonucleotide
  source 1..33: mol_type = other DNA

SEQ ID NO: 2382 - protein, 11 aa, synthetic construct
  REGION 1..11: note = Description of Artificial Sequence: Synthetic peptide
RASQDIRKDLG

SEQ ID NO: 2383 - DNA, 33 bp, synthetic construct; identical to SEQ ID NO: 109
  misc_feature 1..33: note = Description of Artificial Sequence: Synthetic oligonucleotide
  source 1..33: mol_type = other DNA

SEQ ID NO: 2384 - protein, 11 aa, synthetic construct
  REGION 1..11: note = Description of Artificial Sequence: Synthetic peptide
RASQGIRNDLG

SEQ ID NO: 2385 - DNA, 33 bp, synthetic construct; identical to SEQ ID NO: 109
  misc_feature 1..33: note = Description of Artificial Sequence: Synthetic oligonucleotide
  source 1..33: mol_type = other DNA

SEQ ID NO: 2386 - protein, 11 aa, synthetic construct
  REGION 1..11: note = Description of Artificial Sequence: Synthetic peptide
RASQGIRNDLG

SEQ ID NO: 2387 - DNA, 51 bp, synthetic construct
  misc_feature 1..51: note = Description of Artificial Sequence: Synthetic oligonucleotide
  source 1..51: mol_type = other DNA
aagtccaaccatagtgttttatacaggtccaacaataatcaatacttagct

SEQ ID NO: 2388 - protein, 17 aa, synthetic construct
  REGION 1..17: note = Description of Artificial Sequence: Synthetic peptide
KSNHSVLYRSNNNQYLA

SEQ ID NO: 2389 - DNA, 51 bp, synthetic construct; identical to SEQ ID NO: 2329
  misc_feature 1..51: note = Description of Artificial Sequence: Synthetic oligonucleotide
  source 1..51: mol_type = other DNA

SEQ ID NO: 2390 - protein, 17 aa, synthetic construct
  REGION 1..17: note = Description of Artificial Sequence: Synthetic peptide
KSSQNVLHSSNNNNYLT

SEQ ID NO: 2391 - DNA, 48 bp, synthetic construct
  misc_feature 1..48: note = Description of Artificial Sequence: Synthetic oligonucleotide
  source 1..48: mol_type = other DNA
aagtctactcagagcctcctgcatggtgatggaaagacctatttgtat

SEQ ID NO: 2392 - protein, 16 aa, synthetic construct
  REGION 1..16: note = Description of Artificial Sequence: Synthetic peptide
KSTQSLLHGDGKTYLY

SEQ ID NO: 2393 - DNA, 33 bp, synthetic construct; identical to SEQ ID NO: 283
  misc_feature 1..33: note = Description of Artificial Sequence: Synthetic oligonucleotide
  source 1..33: mol_type = other DNA

SEQ ID NO: 2394 - protein, 11 aa, synthetic construct
  REGION 1..11: note = Description of Artificial Sequence: Synthetic peptide
RASQDISNYLA

SEQ ID NO: 2395 - DNA, 33 bp, synthetic construct; identical to SEQ ID NO: 205
  misc_feature 1..33: note = Description of Artificial Sequence: Synthetic oligonucleotide
  source 1..33: mol_type = other DNA

SEQ ID NO: 2396 - protein, 11 aa, synthetic construct
  REGION 1..11: note = Description of Artificial Sequence: Synthetic peptide
RASQDIRNDLG

SEQ ID NO: 2397 - DNA, 33 bp, synthetic construct; identical to SEQ ID NO: 2289
  misc_feature 1..33: note = Description of Artificial Sequence: Synthetic oligonucleotide
  source 1..33: mol_type = other DNA

SEQ ID NO: 2398 - protein, 11 aa, synthetic construct
  REGION 1..11: note = Description of Artificial Sequence: Synthetic peptide
RASQDISNYLV

SEQ ID NO: 2399 - DNA, 33 bp, synthetic construct; identical to SEQ ID NO: 491
  misc_feature 1..33: note = Description of Artificial Sequence: Synthetic oligonucleotide
  source 1..33: mol_type = other DNA

SEQ ID NO: 2400 - protein, 11 aa, synthetic construct
  REGION 1..11: note = Description of Artificial Sequence: Synthetic peptide
RASQDIRDDLG

SEQ ID NO: 2401 - DNA, 33 bp, synthetic construct; identical to SEQ ID NO: 341
  misc_feature 1..33: note = Description of Artificial Sequence: Synthetic oligonucleotide
  source 1..33: mol_type = other DNA

SEQ ID NO: 2402 - protein, 11 aa, synthetic construct
  REGION 1..11: note = Description of Artificial Sequence: Synthetic peptide
RASQDIRNNLG

SEQ ID NO: 2403 - DNA, 51 bp, synthetic construct; identical to SEQ ID NO: 1683
  misc_feature 1..51: note = Description of Artificial Sequence: Synthetic oligonucleotide
  source 1..51: mol_type = other DNA

SEQ ID NO: 2404 - protein, 17 aa, synthetic construct
  REGION 1..17: note = Description of Artificial Sequence: Synthetic peptide
KSSQSVLHSSNNKNYLT

SEQ ID NO: 2405 - DNA, 33 bp, synthetic construct
  misc_feature 1..33: note = Description of Artificial Sequence: Synthetic oligonucleotide
  source 1..33: mol_type = other DNA
cgggcgagtcaggacattagccattatttagcc

SEQ ID NO: 2406 - protein, 11 aa, synthetic construct
  REGION 1..11: note = Description of Artificial Sequence: Synthetic peptide
RASQDISHYLA

SEQ ID NO: 2407 - DNA, 48 bp, synthetic construct
  misc_feature 1..48: note = Description of Artificial Sequence: Synthetic oligonucleotide
  source 1..48: mol_type = other DNA
aagtctagtcagagcctcctgcacggtgatgggaagacctatttgtat

SEQ ID NO: 2408 - protein, 16 aa, synthetic construct
  REGION 1..16: note = Description of Artificial Sequence: Synthetic peptide
KSSQSLLHGDGKTYLY

SEQ ID NO: 2409 - DNA, 48 bp, synthetic construct; identical to SEQ ID NO: 2369
  misc_feature 1..48: note = Description of Artificial Sequence: Synthetic oligonucleotide
  source 1..48: mol_type = other DNA

SEQ ID NO: 2410 - protein, 16 aa, synthetic construct
  REGION 1..16: note = Description of Artificial Sequence: Synthetic peptide
KSSQSLLHGDGKTYLY

SEQ ID NO: 2411 - DNA, 33 bp, synthetic construct; identical to SEQ ID NO: 293
  misc_feature 1..33: note = Description of Artificial Sequence: Synthetic oligonucleotide
  source 1..33: mol_type = other DNA

SEQ ID NO: 2412 - protein, 11 aa, synthetic construct
  REGION 1..11: note = Description of Artificial Sequence: Synthetic peptide
RASQGINNYLA

SEQ ID NO: 2413 - DNA, 33 bp, synthetic construct
  misc_feature 1..33: note = Description of Artificial Sequence: Synthetic oligonucleotide
  source 1..33: mol_type = other DNA
cgggctagtcagggcattagaaatgatttaggc

SEQ ID NO: 2414 - protein, 11 aa, synthetic construct
  REGION 1..11: note = Description of Artificial Sequence: Synthetic peptide
RASQGIRNDLG

SEQ ID NO: 2415 - DNA, 51 bp, synthetic construct
  misc_feature 1..51: note = Description of Artificial Sequence: Synthetic oligonucleotide
  source 1..51: mol_type = other DNA
aagtccagccagagtgttttatacatctccaacaataaaaactacttagct

SEQ ID NO: 2416 - protein, 17 aa, synthetic construct
  REGION 1..17: note = Description of Artificial Sequence: Synthetic peptide
KSSQSVLYISNNKNYLA

SEQ ID NO: 2417 - DNA, 48 bp, synthetic construct
  misc_feature 1..48: note = Description of Artificial Sequence: Synthetic oligonucleotide
  source 1..48: mol_type = other DNA
aggtctagtcagagcctcctgcataataatggatacaagtatttggat

SEQ ID NO: 2418 - protein, 16 aa, synthetic construct
  REGION 1..16: note = Description of Artificial Sequence: Synthetic peptide
RSSQSLLHNNGYKYLD

SEQ ID NO: 2419 - DNA, 33 bp, synthetic construct; identical to SEQ ID NO: 109
  misc_feature 1..33: note = Description of Artificial Sequence: Synthetic oligonucleotide
  source 1..33: mol_type = other DNA

SEQ ID NO: 2420 - protein, 11 aa, synthetic construct
  REGION 1..11: note = Description of Artificial Sequence: Synthetic peptide
RASQGIRNDLG

SEQ ID NO: 2421 - DNA, 51 bp, synthetic construct; identical to SEQ ID NO: 2415
  misc_feature 1..51: note = Description of Artificial Sequence: Synthetic oligonucleotide
  source 1..51: mol_type = other DNA

SEQ ID NO: 2422 - protein, 17 aa, synthetic construct
  REGION 1..17: note = Description of Artificial Sequence: Synthetic peptide
KSSQSVLYISNNKNYLA

SEQ ID NO: 2423 - DNA, 48 bp, synthetic construct; identical to SEQ ID NO: 2417
  misc_feature 1..48: note = Description of Artificial Sequence: Synthetic oligonucleotide
  source 1..48: mol_type = other DNA

SEQ ID NO: 2424 - protein, 16 aa, synthetic construct
  REGION 1..16: note = Description of Artificial Sequence: Synthetic peptide
RSSQSLLHNNGYKYLD

SEQ ID NO: 2425 - DNA, 33 bp, synthetic construct; identical to SEQ ID NO: 109
  misc_feature 1..33: note = Description of Artificial Sequence: Synthetic oligonucleotide
  source 1..33: mol_type = other DNA

SEQ ID NO: 2426 - protein, 11 aa, synthetic construct
  REGION 1..11: note = Description of Artificial Sequence: Synthetic peptide
RASQGIRNDLG

SEQ ID NO: 2427 - DNA, 33 bp, synthetic construct; identical to SEQ ID NO: 283
  misc_feature 1..33: note = Description of Artificial Sequence: Synthetic oligonucleotide
  source 1..33: mol_type = other DNA

SEQ ID NO: 2428 - protein, 11 aa, synthetic construct
  REGION 1..11: note = Description of Artificial Sequence: Synthetic peptide
RASQDISNYLA

SEQ ID NO: 2429 - DNA, 33 bp, synthetic construct; identical to SEQ ID NO: 283
  misc_feature 1..33: note = Description of Artificial Sequence: Synthetic oligonucleotide
  source 1..33: mol_type = other DNA

SEQ ID NO: 2430 - protein, 11 aa, synthetic construct
  REGION 1..11: note = Description of Artificial Sequence: Synthetic peptide
RASQDISNYLA

SEQ ID NO: 2431 - DNA, 33 bp, synthetic construct; identical to SEQ ID NO: 1185
  misc_feature 1..33: note = Description of Artificial Sequence: Synthetic oligonucleotide
  source 1..33: mol_type = other DNA

SEQ ID NO: 2432 - protein, 11 aa, synthetic construct
  REGION 1..11: note = Description of Artificial Sequence: Synthetic peptide
RASQGIRDDLG

SEQ ID NO: 2433 - DNA, 48 bp, synthetic construct; identical to SEQ ID NO: 481
  misc_feature 1..48: note = Description of Artificial Sequence: Synthetic oligonucleotide
  source 1..48: mol_type = other DNA

SEQ ID NO: 2434 - protein, 16 aa, synthetic construct
  REGION 1..16: note = Description of Artificial Sequence: Synthetic peptide
KSSQSLLHGDGKTYLF

SEQ ID NO: 2435 - DNA, 33 bp, synthetic construct; identical to SEQ ID NO: 105
  misc_feature 1..33: note = Description of Artificial Sequence: Synthetic oligonucleotide
  source 1..33: mol_type = other DNA

SEQ ID NO: 2436 - protein, 11 aa, synthetic construct
  REGION 1..11: note = Description of Artificial Sequence: Synthetic peptide
RASQGISNYLA

SEQ ID NO: 2437 - DNA, 33 bp, synthetic construct; identical to SEQ ID NO: 109
  misc_feature 1..33: note = Description of Artificial Sequence: Synthetic oligonucleotide
  source 1..33: mol_type = other DNA

SEQ ID NO: 2438 - protein, 11 aa, synthetic construct
  REGION 1..11: note = Description of Artificial Sequence: Synthetic peptide
RASQGIRNDLG

SEQ ID NO: 2439 - DNA, 33 bp, synthetic construct; identical to SEQ ID NO: 535
  misc_feature 1..33: note = Description of Artificial Sequence: Synthetic oligonucleotide
  source 1..33: mol_type = other DNA

SEQ ID NO: 2440 - protein, 11 aa, synthetic construct
  REGION 1..11: note = Description of Artificial Sequence: Synthetic peptide
RASRGIRNDLG

SEQ ID NO: 2441 - DNA, 33 bp, synthetic construct; identical to SEQ ID NO: 109
  misc_feature 1..33: note = Description of Artificial Sequence: Synthetic oligonucleotide
  source 1..33: mol_type = other DNA

SEQ ID NO: 2442 - protein, 11 aa, synthetic construct
  REGION 1..11: note = Description of Artificial Sequence: Synthetic peptide
RASQGIRNDLG

SEQ ID NO: 2443 - DNA, 33 bp, synthetic construct; identical to SEQ ID NO: 109
  misc_feature 1..33: note = Description of Artificial Sequence: Synthetic oligonucleotide
  source 1..33: mol_type = other DNA

SEQ ID NO: 2444 - protein, 11 aa, synthetic construct
  REGION 1..11: note = Description of Artificial Sequence: Synthetic peptide
RASQGIRNDLG

SEQ ID NO: 2445 - DNA, 33 bp, synthetic construct; identical to SEQ ID NO: 281
  misc_feature 1..33: note = Description of Artificial Sequence: Synthetic oligonucleotide
  source 1..33: mol_type = other DNA

SEQ ID NO: 2446 - protein, 11 aa, synthetic construct
  REGION 1..11: note = Description of Artificial Sequence: Synthetic peptide
RASQGIRTDLG

SEQ ID NO: 2447 - DNA, 33 bp, synthetic construct
  misc_feature 1..33: note = Description of Artificial Sequence: Synthetic oligonucleotide
  source 1..33: mol_type = other DNA
cgggcgagtcaggacattggcaattgtttagcc

SEQ ID NO: 2448 - protein, 11 aa, synthetic construct
  REGION 1..11: note = Description of Artificial Sequence: Synthetic peptide
RASQDIGNCLA

SEQ ID NO: 2449 - DNA, 51 bp, synthetic construct; identical to SEQ ID NO: 1689
  misc_feature 1..51: note = Description of Artificial Sequence: Synthetic oligonucleotide
  source 1..51: mol_type = other DNA

SEQ ID NO: 2450 - protein, 17 aa, synthetic construct
  REGION 1..17: note = Description of Artificial Sequence: Synthetic peptide
KSSQSVLHSSNNYNYLA

SEQ ID NO: 2451 - DNA, 33 bp, synthetic construct; identical to SEQ ID NO: 109
  misc_feature 1..33: note = Description of Artificial Sequence: Synthetic oligonucleotide
  source 1..33: mol_type = other DNA

SEQ ID NO: 2452 - protein, 11 aa, synthetic construct
  REGION 1..11: note = Description of Artificial Sequence: Synthetic peptide
RASQGIRNDLG

SEQ ID NO: 2453 - DNA, 33 bp, synthetic construct; identical to SEQ ID NO: 281
  misc_feature 1..33: note = Description of Artificial Sequence: Synthetic oligonucleotide
  source 1..33: mol_type = other DNA

SEQ ID NO: 2454 - protein, 11 aa, synthetic construct
  REGION 1..11: note = Description of Artificial Sequence: Synthetic peptide
RASQGIRTDLG

SEQ ID NO: 2455 - DNA, 33 bp, synthetic construct; identical to SEQ ID NO: 109
  misc_feature 1..33: note = Description of Artificial Sequence: Synthetic oligonucleotide
  source 1..33: mol_type = other DNA

SEQ ID NO: 2456 - protein, 11 aa, synthetic construct
  REGION 1..11: note = Description of Artificial Sequence: Synthetic peptide
RASQGIRNDLG

SEQ ID NO: 2457 - DNA, 33 bp, synthetic construct
  misc_feature 1..33: note = Description of Artificial Sequence: Synthetic oligonucleotide
  source 1..33: mol_type = other DNA
cgggcgagtcagggtgttaacgactggttagcc

SEQ ID NO: 2458 - protein, 11 aa, synthetic construct
  REGION 1..11: note = Description of Artificial Sequence: Synthetic peptide
RASQGVNDWLA

SEQ ID NO: 2459 - DNA, 48 bp, synthetic construct
  misc_feature 1..48: note = Description of Artificial Sequence: Synthetic oligonucleotide
  source 1..48: mol_type = other DNA
aggtctagtcagagcctcctgtatcataatggatacaactatttggat

SEQ ID NO: 2460 - protein, 16 aa, synthetic construct
  REGION 1..16: note = Description of Artificial Sequence: Synthetic peptide
RSSQSLLYHNGYNYLD

SEQ ID NO: 2461 - DNA, 33 bp, synthetic construct; identical to SEQ ID NO: 553
  misc_feature 1..33: note = Description of Artificial Sequence: Synthetic oligonucleotide
  source 1..33: mol_type = other DNA

SEQ ID NO: 2462 - protein, 11 aa, synthetic construct
  REGION 1..11: note = Description of Artificial Sequence: Synthetic peptide
RASQGISNWLA

SEQ ID NO: 2463 - DNA, 33 bp, synthetic construct
  misc_feature 1..33: note = Description of Artificial Sequence: Synthetic oligonucleotide
  source 1..33: mol_type = other DNA
cgggcgagtcaggatattaccacctggttagcc

SEQ ID NO: 2464 - protein, 11 aa, synthetic construct
  REGION 1..11: note = Description of Artificial Sequence: Synthetic peptide
RASQDITTWLA

SEQ ID NO: 2465 - DNA, 33 bp, synthetic construct; identical to SEQ ID NO: 1301
  misc_feature 1..33: note = Description of Artificial Sequence: Synthetic oligonucleotide
  source 1..33: mol_type = other DNA

SEQ ID NO: 2466 - protein, 11 aa, synthetic construct
  REGION 1..11: note = Description of Artificial Sequence: Synthetic peptide
RASQGIRNNLG

SEQ ID NO: 2467 - DNA, 33 bp, synthetic construct; identical to SEQ ID NO: 2413
  misc_feature 1..33: note = Description of Artificial Sequence: Synthetic oligonucleotide
  source 1..33: mol_type = other DNA

SEQ ID NO: 2468 - protein, 11 aa, synthetic construct
  REGION 1..11: note = Description of Artificial Sequence: Synthetic peptide
RASQGIRNDLG

SEQ ID NO: 2469 - DNA, 48 bp, synthetic construct
  misc_feature 1..48: note = Description of Artificial Sequence: Synthetic oligonucleotide
  source 1..48: mol_type = other DNA
aagtctagtcagagcctcctgcatggtgatggaaagacctatttctat

SEQ ID NO: 2470 - protein, 16 aa, synthetic construct
  REGION 1..16: note = Description of Artificial Sequence: Synthetic peptide
KSSQSLLHGDGKTYFY

SEQ ID NO: 2471 - DNA, 33 bp, synthetic construct; identical to SEQ ID NO: 453
  misc_feature 1..33: note = Description of Artificial Sequence: Synthetic oligonucleotide
  source 1..33: mol_type = other DNA

SEQ ID NO: 2472 - protein, 11 aa, synthetic construct
  REGION 1..11: note = Description of Artificial Sequence: Synthetic peptide
RASQGVRNDLG

SEQ ID NO: 2473 - DNA, 51 bp, synthetic construct; identical to SEQ ID NO: 1057
  misc_feature 1..51: note = Description of Artificial Sequence: Synthetic oligonucleotide
  source 1..51: mol_type = other DNA

SEQ ID NO: 2474 - protein, 17 aa, synthetic construct
  REGION 1..17: note = Description of Artificial Sequence: Synthetic peptide
KSSQSVLHSSNNNNYLA

SEQ ID NO: 2475 - DNA, 33 bp, synthetic construct
  misc_feature 1..33: note = Description of Artificial Sequence: Synthetic oligonucleotide
  source 1..33: mol_type = other DNA
cgtgcaagtcagaccattagcaactatttaaat

SEQ ID NO: 2476 - protein, 11 aa, synthetic construct
  REGION 1..11: note = Description of Artificial Sequence: Synthetic peptide
RASQTISNYLN

SEQ ID NO: 2477 - DNA, 48 bp, synthetic construct; identical to SEQ ID NO: 575
  misc_feature 1..48: note = Description of Artificial Sequence: Synthetic oligonucleotide
  source 1..48: mol_type = other DNA

SEQ ID NO: 2478 - protein, 16 aa, synthetic construct
  REGION 1..16: note = Description of Artificial Sequence: Synthetic peptide
KSSQSLLHGDGKTYLY

SEQ ID NO: 2479 - DNA, 48 bp, synthetic construct
  misc_feature 1..48: note = Description of Artificial Sequence: Synthetic oligonucleotide
  source 1..48: mol_type = other DNA
aagtctagtcagagcctcctgcatagtgagggaaagacctacttgtat

SEQ ID NO: 2480 - protein, 16 aa, synthetic construct
  REGION 1..16: note = Description of Artificial Sequence: Synthetic peptide
KSSQSLLHSEGKTYLY

SEQ ID NO: 2481 - DNA, 33 bp, synthetic construct; identical to SEQ ID NO: 109
  misc_feature 1..33: note = Description of Artificial Sequence: Synthetic oligonucleotide
  source 1..33: mol_type = other DNA

SEQ ID NO: 2482 - protein, 11 aa, synthetic construct
  REGION 1..11: note = Description of Artificial Sequence: Synthetic peptide
RASQGIRNDLG

SEQ ID NO: 2483 - DNA, 51 bp, synthetic construct
  misc_feature 1..51: note = Description of Artificial Sequence: Synthetic oligonucleotide
  source 1..51: mol_type = other DNA
aagtccagccagagtgtattacacagctccaacaattacaactacttaact

SEQ ID NO: 2484 - protein, 17 aa, synthetic construct
  REGION 1..17: note = Description of Artificial Sequence: Synthetic peptide
KSSQSVLHSSNNYNYLT

SEQ ID NO: 2485 - DNA, 33 bp, synthetic construct; identical to SEQ ID NO: 553
  misc_feature 1..33: note = Description of Artificial Sequence: Synthetic oligonucleotide
  source 1..33: mol_type = other DNA

SEQ ID NO: 2486 - protein, 11 aa, synthetic construct
  REGION 1..11: note = Description of Artificial Sequence: Synthetic peptide
RASQGISNWLA

SEQ ID NO: 2487 - DNA, 33 bp, synthetic construct; identical to SEQ ID NO: 1185
  misc_feature 1..33: note = Description of Artificial Sequence: Synthetic oligonucleotide
  source 1..33: mol_type = other DNA

SEQ ID NO: 2488 - protein, 11 aa, synthetic construct
  REGION 1..11: note = Description of Artificial Sequence: Synthetic peptide
RASQGIRDDLG

SEQ ID NO: 2489 - DNA, 33 bp, synthetic construct; identical to SEQ ID NO: 281
  misc_feature 1..33: note = Description of Artificial Sequence: Synthetic oligonucleotide
  source 1..33: mol_type = other DNA

SEQ ID NO: 2490 - protein, 11 aa, synthetic construct
  REGION 1..11: note = Description of Artificial Sequence: Synthetic peptide
RASQGIRTDLG

SEQ ID NO: 2491 - DNA, 33 bp, synthetic construct
  misc_feature 1..33: note = Description of Artificial Sequence: Synthetic oligonucleotide
  source 1..33: mol_type = other DNA
cgggcgagtcaggacattagcaatgatttagcc

SEQ ID NO: 2492 - protein, 11 aa, synthetic construct
  REGION 1..11: note = Description of Artificial Sequence: Synthetic peptide
RASQDISNDLA

SEQ ID NO: 2493 - DNA, 33 bp, synthetic construct
  misc_feature 1..33: note = Description of Artificial Sequence: Synthetic oligonucleotide
  source 1..33: mol_type = other DNA
cgggcgagtcagggcattgggaattatttagcc

SEQ ID NO: 2494 - protein, 11 aa, synthetic construct
  REGION 1..11: note = Description of Artificial Sequence: Synthetic peptide
RASQGIGNYLA

SEQ ID NO: 2495 - DNA, 33 bp, synthetic construct
  misc_feature 1..33: note = Description of Artificial Sequence: Synthetic oligonucleotide
  source 1..33: mol_type = other DNA
cgggcgagtcagggtattaccgactggttagcc

SEQ ID NO: 2496 - protein, 11 aa, synthetic construct
  REGION 1..11: note = Description of Artificial Sequence: Synthetic peptide
RASQGITDWLA

SEQ ID NO: 2497 - DNA, 51 bp, synthetic construct; identical to SEQ ID NO: 1541
  misc_feature 1..51: note = Description of Artificial Sequence: Synthetic oligonucleotide
  source 1..51: mol_type = other DNA

SEQ ID NO: 2498 - protein, 17 aa, synthetic construct
  REGION 1..17: note = Description of Artificial Sequence: Synthetic peptide
KSSQSVLYSSNNNNYLA

SEQ ID NO: 2499 - DNA, 33 bp, synthetic construct
  misc_feature 1..33: note = Description of Artificial Sequence: Synthetic oligonucleotide
  source 1..33: mol_type = other DNA
cgggcaagtcagaccattggcaactatttaaat

SEQ ID NO: 2500 - protein, 11 aa, synthetic construct
  REGION 1..11: note = Description of Artificial Sequence: Synthetic peptide
RASQTIGNYLN

SEQ ID NO: 2501 - DNA, 48 bp, synthetic construct; identical to SEQ ID NO: 575
  misc_feature 1..48: note = Description of Artificial Sequence: Synthetic oligonucleotide
  source 1..48: mol_type = other DNA

SEQ ID NO: 2502 - protein, 16 aa, synthetic construct
  REGION 1..16: note = Description of Artificial Sequence: Synthetic peptide
KSSQSLLHGDGKTYLY

SEQ ID NO: 2503 - DNA, 48 bp, synthetic construct; identical to SEQ ID NO: 2417
  misc_feature 1..48: note = Description of Artificial Sequence: Synthetic oligonucleotide
  source 1..48: mol_type = other DNA

SEQ ID NO: 2504 - protein, 16 aa, synthetic construct
  REGION 1..16: note = Description of Artificial Sequence: Synthetic peptide
RSSQSLLHNNGYKYLD

SEQ ID NO: 2505 - DNA, 33 bp, synthetic construct; identical to SEQ ID NO: 109
  misc_feature 1..33: note = Description of Artificial Sequence: Synthetic oligonucleotide
  source 1..33: mol_type = other DNA

SEQ ID NO: 2506 - protein, 11 aa, synthetic construct
  REGION 1..11: note = Description of Artificial Sequence: Synthetic peptide
RASQGIRNDLG

SEQ ID NO: 2507 - DNA, 33 bp, synthetic construct; identical to SEQ ID NO: 109
  misc_feature 1..33: note = Description of Artificial Sequence: Synthetic oligonucleotide
  source 1..33: mol_type = other DNA

SEQ ID NO: 2508 - protein, 11 aa, synthetic construct
  REGION 1..11: note = Description of Artificial Sequence: Synthetic peptide
RASQGIRNDLG

SEQ ID NO: 2509 - DNA, 33 bp, synthetic construct; identical to SEQ ID NO: 2311
  misc_feature 1..33: note = Description of Artificial Sequence: Synthetic oligonucleotide
  source 1..33: mol_type = other DNA

SEQ ID NO: 2510 - protein, 11 aa, synthetic construct
  REGION 1..11: note = Description of Artificial Sequence: Synthetic peptide
RASQGITNYLA

SEQ ID NO: 2511 - DNA, 33 bp, synthetic construct; identical to SEQ ID NO: 109
  misc_feature 1..33: note = Description of Artificial Sequence: Synthetic oligonucleotide
  source 1..33: mol_type = other DNA

SEQ ID NO: 2512 - protein, 11 aa, synthetic construct
  REGION 1..11: note = Description of Artificial Sequence: Synthetic peptide
RASQGIRNDLG

SEQ ID NO: 2513 - DNA, 33 bp, synthetic construct
  misc_feature 1..33: note = Description of Artificial Sequence: Synthetic oligonucleotide
  source 1..33: mol_type = other DNA
cgggcaagtcaggacattagcaatgatttaggc

SEQ ID NO: 2514 - protein, 11 aa, synthetic construct
  REGION 1..11: note = Description of Artificial Sequence: Synthetic peptide
RASQDISNDLG

SEQ ID NO: 2515 - DNA, 48 bp, synthetic construct; identical to SEQ ID NO: 107
  misc_feature 1..48: note = Description of Artificial Sequence: Synthetic oligonucleotide
  source 1..48: mol_type = other DNA

SEQ ID NO: 2516 - protein, 16 aa, synthetic construct
  REGION 1..16: note = Description of Artificial Sequence: Synthetic peptide
KSSQRLLHGDGKTYLY

SEQ ID NO: 2517 - DNA, 51 bp, synthetic construct
  misc_feature 1..51: note = Description of Artificial Sequence: Synthetic oligonucleotide
  source 1..51: mol_type = other DNA
aagtccagccagagtgttttacacagctccaacaataacaactacttaact

SEQ ID NO: 2518 - protein, 17 aa, synthetic construct
  REGION 1..17: note = Description of Artificial Sequence: Synthetic peptide
KSSQSVLHSSNNNNYLT

SEQ ID NO: 2519 - DNA, 33 bp, synthetic construct; identical to SEQ ID NO: 553
  misc_feature 1..33: note = Description of Artificial Sequence: Synthetic oligonucleotide
  source 1..33: mol_type = other DNA

SEQ ID NO: 2520 - protein, 11 aa, synthetic construct
  REGION 1..11: note = Description of Artificial Sequence: Synthetic peptide
RASQGISNWLA

SEQ ID NO: 2521 - DNA, 33 bp, synthetic construct
  misc_feature 1..33: note = Description of Artificial Sequence: Synthetic oligonucleotide
  source 1..33: mol_type = other DNA
cgggcgagtcaggatattactgactggttagcc

SEQ ID NO: 2522 - protein, 11 aa, synthetic construct
  REGION 1..11: note = Description of Artificial Sequence: Synthetic peptide
RASQDITDWLA

SEQ ID NO: 2523 - DNA, 33 bp, synthetic construct; identical to SEQ ID NO: 109
  misc_feature 1..33: note = Description of Artificial Sequence: Synthetic oligonucleotide
  source 1..33: mol_type = other DNA

SEQ ID NO: 2524 - protein, 11 aa, synthetic construct
  REGION 1..11: note = Description of Artificial Sequence: Synthetic peptide
RASQGIRNDLG

SEQ ID NO: 2525 - DNA, 48 bp, synthetic construct; identical to SEQ ID NO: 575
  misc_feature 1..48: note = Description of Artificial Sequence: Synthetic oligonucleotide
  source 1..48: mol_type = other DNA

SEQ ID NO: 2526 - protein, 16 aa, synthetic construct
  REGION 1..16: note = Description of Artificial Sequence: Synthetic peptide
KSSQSLLHGDGKTYLY

SEQ ID NO: 2527 - DNA, 33 bp, synthetic construct
  misc_feature 1..33: note = Description of Artificial Sequence: Synthetic oligonucleotide
  source 1..33: mol_type = other DNA
cgggcgagtcaggatattagcgactggttagcc

SEQ ID NO: 2528 - protein, 11 aa, synthetic construct
  REGION 1..11: note = Description of Artificial Sequence: Synthetic peptide
RASQDISDWLA

SEQ ID NO: 2529 - DNA, 48 bp, synthetic construct
  misc_feature 1..48: note = Description of Artificial Sequence: Synthetic oligonucleotide
  source 1..48: mol_type = other DNA
aaatctagtcagagcctcctgcatagtgagggaaagacctacttgtat

SEQ ID NO: 2530 - protein, 16 aa, synthetic construct
  REGION 1..16: note = Description of Artificial Sequence: Synthetic peptide
KSSQSLLHSEGKTYLY

SEQ ID NO: 2531 - DNA, 33 bp, synthetic construct
  misc_feature 1..33: note = Description of Artificial Sequence: Synthetic oligonucleotide
  source 1..33: mol_type = other DNA
cgggcgagtcaggatattaccagctggttagcc

SEQ ID NO: 2532 - protein, 11 aa, synthetic construct
  REGION 1..11: note = Description of Artificial Sequence: Synthetic peptide
RASQDITSWLA

SEQ ID NO: 2533 - DNA, 48 bp, synthetic construct; identical to SEQ ID NO: 575
  misc_feature 1..48: note = Description of Artificial Sequence: Synthetic oligonucleotide
  source 1..48: mol_type = other DNA

SEQ ID NO: 2534 - protein, 16 aa, synthetic construct
  REGION 1..16: note = Description of Artificial Sequence: Synthetic peptide
KSSQSLLHGDGKTYLY

SEQ ID NO: 2535 - DNA, 33 bp, synthetic construct; identical to SEQ ID NO: 109
  misc_feature 1..33: note = Description of Artificial Sequence: Synthetic oligonucleotide
  source 1..33: mol_type = other DNA

SEQ ID NO: 2536 - protein, 11 aa, synthetic construct
  REGION 1..11: note = Description of Artificial Sequence: Synthetic peptide
RASQGIRNDLG

SEQ ID NO: 2537 - DNA, 33 bp, synthetic construct
  misc_feature 1..33: note = Description of Artificial Sequence: Synthetic oligonucleotide
  source 1..33: mol_type = other DNA
cgggcaagtcagaccattctcagctatttaaat

SEQ ID NO: 2538 - protein, 11 aa, synthetic construct
  REGION 1..11: note = Description of Artificial Sequence: Synthetic peptide
RASQTILSYLN

SEQ ID NO: 2539 - DNA, 48 bp, synthetic construct; identical to SEQ ID NO: 575
  misc_feature 1..48: note = Description of Artificial Sequence: Synthetic oligonucleotide
  source 1..48: mol_type = other DNA

SEQ ID NO: 2540 - protein, 16 aa, synthetic construct
  REGION 1..16: note = Description of Artificial Sequence: Synthetic peptide
KSSQSLLHGDGKTYLY

SEQ ID NO: 2541 - DNA, 33 bp, synthetic construct; identical to SEQ ID NO: 105
  misc_feature 1..33: note = Description of Artificial Sequence: Synthetic oligonucleotide
  source 1..33: mol_type = other DNA

SEQ ID NO: 2542 - protein, 11 aa, synthetic construct
  REGION 1..11: note = Description of Artificial Sequence: Synthetic peptide
RASQGISNYLA

SEQ ID NO: 2543 - DNA, 33 bp, synthetic construct
  misc_feature 1..33: note = Description of Artificial Sequence: Synthetic oligonucleotide
  source 1..33: mol_type = other DNA
cgggcaagtcacagcattagcaactatttaaat

SEQ ID NO: 2544 - protein, 11 aa, synthetic construct
  REGION 1..11: note = Description of Artificial Sequence: Synthetic peptide
RASHSISNYLN

SEQ ID NO: 2545 - DNA, 51 bp, synthetic construct; identical to SEQ ID NO: 1959
  misc_feature 1..51: note = Description of Artificial Sequence: Synthetic oligonucleotide
  source 1..51: mol_type = other DNA

SEQ ID NO: 2546 - protein, 17 aa, synthetic construct
  REGION 1..17: note = Description of Artificial Sequence: Synthetic peptide
KSSQSVLHSSNNYNYLT

SEQ ID NO: 2547 - DNA, 33 bp, synthetic construct; identical to SEQ ID NO: 109
  misc_feature 1..33: note = Description of Artificial Sequence: Synthetic oligonucleotide
  source 1..33: mol_type = other DNA

SEQ ID NO: 2548 - protein, 11 aa, synthetic construct
  REGION 1..11: note = Description of Artificial Sequence: Synthetic peptide
RASQGIRNDLG

SEQ ID NO: 2549 - DNA, 48 bp, synthetic construct; identical to SEQ ID NO: 575
  misc_feature 1..48: note = Description of Artificial Sequence: Synthetic oligonucleotide
  source 1..48: mol_type = other DNA

SEQ ID NO: 2550 - protein, 16 aa, synthetic construct
  REGION 1..16: note = Description of Artificial Sequence: Synthetic peptide
KSSQSLLHGDGKTYLY

SEQ ID NO: 2551 - DNA, 33 bp, synthetic construct; identical to SEQ ID NO: 2531
  misc_feature 1..33: note = Description of Artificial Sequence: Synthetic oligonucleotide
  source 1..33: mol_type = other DNA

SEQ ID NO: 2552 - protein, 11 aa, synthetic construct
  REGION 1..11: note = Description of Artificial Sequence: Synthetic peptide
RASQDITSWLA

SEQ ID NO: 2553 - DNA, 33 bp, synthetic construct; identical to SEQ ID NO: 837
  misc_feature 1..33: note = Description of Artificial Sequence: Synthetic oligonucleotide
  source 1..33: mol_type = other DNA

SEQ ID NO: 2554 - protein, 11 aa, synthetic construct
  REGION 1..11: note = Description of Artificial Sequence: Synthetic peptide
QASQDISNYLN

SEQ ID NO: 2555 - DNA, 33 bp, synthetic construct
  misc_feature 1..33: note = Description of Artificial Sequence: Synthetic oligonucleotide
  source 1..33: mol_type = other DNA
cgggcaagtcggaacatcagcaactatttaaat

SEQ ID NO: 2556 - protein, 11 aa, synthetic construct
  REGION 1..11: note = Description of Artificial Sequence: Synthetic peptide
RASRNISNYLN

SEQ ID NO: 2557 - DNA, 36 bp, synthetic construct
  misc_feature 1..36: note = Description of Artificial Sequence: Synthetic oligonucleotide
  source 1..36: mol_type = other DNA
agggccagtccgagtgttagcagcagattcttagcc

SEQ ID NO: 2558 - protein, 12 aa, synthetic construct
  REGION 1..12: note = Description of Artificial Sequence: Synthetic peptide
RASPSVSSRFLA

SEQ ID NO: 2559 - DNA, 33 bp, synthetic construct
  misc_feature 1..33: note = Description of Artificial Sequence: Synthetic oligonucleotide
  source 1..33: mol_type = other DNA
cgggccagtcagagtattggtagtaacttacac

SEQ ID NO: 2560 - protein, 11 aa, synthetic construct
  REGION 1..11: note = Description of Artificial Sequence: Synthetic peptide
RASQSIGSNLH

SEQ ID NO: 2561 - DNA, 33 bp, synthetic construct
  misc_feature 1..33: note = Description of Artificial Sequence: Synthetic oligonucleotide
  source 1..33: mol_type = other DNA
cggacgagtcagggcattggcaattatttagcc

SEQ ID NO: 2562 - protein, 11 aa, synthetic construct
  REGION 1..11: note = Description of Artificial Sequence: Synthetic peptide
RTSQGIGNYLA

SEQ ID NO: 2563 - DNA, 33 bp, synthetic construct
  misc_feature 1..33: note = Description of Artificial Sequence: Synthetic oligonucleotide
  source 1..33: mol_type = other DNA
agggccagtcagagttttcgcatcaacttagcc

SEQ ID NO: 2564 - protein, 11 aa, synthetic construct
  REGION 1..11: note = Description of Artificial Sequence: Synthetic peptide
RASQSFRINLA

SEQ ID NO: 2565 - DNA, 33 bp, synthetic construct
  misc_feature 1..33: note = Description of Artificial Sequence: Synthetic oligonucleotide
  source 1..33: mol_type = other DNA
cgggccagtcagaacattggtagtagcttacac

SEQ ID NO: 2566 - protein, 11 aa, synthetic construct
  REGION 1..11: note = Description of Artificial Sequence: Synthetic peptide
RASQNIGSSLH

SEQ ID NO: 2567 - DNA, 33 bp, synthetic construct; identical to SEQ ID NO: 2561
  misc_feature 1..33: note = Description of Artificial Sequence: Synthetic oligonucleotide
  source 1..33: mol_type = other DNA

SEQ ID NO: 2568 - protein, 11 aa, synthetic construct
  REGION 1..11: note = Description of Artificial Sequence: Synthetic peptide
RTSQGIGNYLA

SEQ ID NO: 2569 - DNA, 48 bp, synthetic construct
  misc_feature 1..48: note = Description of Artificial Sequence: Synthetic oligonucleotide
  source 1..48: mol_type = other DNA
aagtctagtcagagcctcctccatagtgatggaaggacctatttgtat

SEQ ID NO: 2570 - protein, 16 aa, synthetic construct
  REGION 1..16: note = Description of Artificial Sequence: Synthetic peptide
KSSQSLLHSDGRTYLY

SEQ ID NO: 2571 - DNA, 33 bp, synthetic construct
  misc_feature 1..33: note = Description of Artificial Sequence: Synthetic oligonucleotide
  source 1..33: mol_type = other DNA
cgggccagtcagagtattggtagtagcttacac

SEQ ID NO: 2572 - protein, 11 aa, synthetic construct
  REGION 1..11: note = Description of Artificial Sequence: Synthetic peptide
RASQSIGSSLH

SEQ ID NO: 2573 - DNA, 33 bp, synthetic construct; identical to SEQ ID NO: 1229
  misc_feature 1..33: note = Description of Artificial Sequence: Synthetic oligonucleotide
  source 1..33: mol_type = other DNA

SEQ ID NO: 2574 - protein, 11 aa, synthetic construct
  REGION 1..11: note = Description of Artificial Sequence: Synthetic peptide
RASQGIRKDLG

SEQ ID NO: 2575 - DNA, 33 bp, synthetic construct; identical to SEQ ID NO: 105
  misc_feature 1..33: note = Description of Artificial Sequence: Synthetic oligonucleotide
  source 1..33: mol_type = other DNA

SEQ ID NO: 2576 - protein, 11 aa, synthetic construct
  REGION 1..11: note = Description of Artificial Sequence: Synthetic peptide
RASQGISNYLA

SEQ ID NO: 2577 - DNA, 33 bp, synthetic construct; identical to SEQ ID NO: 1727
  misc_feature 1..33: note = Description of Artificial Sequence: Synthetic oligonucleotide
  source 1..33: mol_type = other DNA

SEQ ID NO: 2578 - protein, 11 aa, synthetic construct
  REGION 1..11: note = Description of Artificial Sequence: Synthetic peptide
RASQGIGKYLA

SEQ ID NO: 2579 - DNA, 33 bp, synthetic construct
  misc_feature 1..33: note = Description of Artificial Sequence: Synthetic oligonucleotide
  source 1..33: mol_type = other DNA
cggacgagtcagggcattggcaagtatttagcc

SEQ ID NO: 2580 - protein, 11 aa, synthetic construct
  REGION 1..11: note = Description of Artificial Sequence: Synthetic peptide
RTSQGIGKYLA

SEQ ID NO: 2581 - DNA, 48 bp, synthetic construct
  misc_feature 1..48: note = Description of Artificial Sequence: Synthetic oligonucleotide
  source 1..48: mol_type = other DNA
aggtctagtcagagcctcctgcatagtgatggaaagacctatttgttt

SEQ ID NO: 2582 - protein, 16 aa, synthetic construct
  REGION 1..16: note = Description of Artificial Sequence: Synthetic peptide
RSSQSLLHSDGKTYLF

SEQ ID NO: 2583 - DNA, 51 bp, synthetic construct
  misc_feature 1..51: note = Description of Artificial Sequence: Synthetic oligonucleotide
  source 1..51: mol_type = other DNA
aggtccagccagagtgttttacacagctccaacaattacaactacttagct

SEQ ID NO: 2584 - protein, 17 aa, synthetic construct
  REGION 1..17: note = Description of Artificial Sequence: Synthetic peptide
RSSQSVLHSSNNYNYLA

SEQ ID NO: 2585 - DNA, 36 bp, synthetic construct
  misc_feature 1..36: note = Description of Artificial Sequence: Synthetic oligonucleotide
  source 1..36: mol_type = other DNA
agggccagtcagagtattagcctcaacttcttagcc

SEQ ID NO: 2586 - protein, 12 aa, synthetic construct
  REGION 1..12: note = Description of Artificial Sequence: Synthetic peptide
RASQSISLNFLA

SEQ ID NO: 2587 - DNA, 33 bp, synthetic construct; identical to SEQ ID NO: 105
  misc_feature 1..33: note = Description of Artificial Sequence: Synthetic oligonucleotide
  source 1..33: mol_type = other DNA

SEQ ID NO: 2588 - protein, 11 aa, synthetic construct
  REGION 1..11: note = Description of Artificial Sequence: Synthetic peptide
RASQGISNYLA

SEQ ID NO: 2589 - DNA, 36 bp, synthetic construct
  misc_feature 1..36: note = Description of Artificial Sequence: Synthetic oligonucleotide
  source 1..36: mol_type = other DNA
agggccagtcagagtattcgcagcagcttcttagcc

SEQ ID NO: 2590 - protein, 12 aa, synthetic construct
  REGION 1..12: note = Description of Artificial Sequence: Synthetic peptide
RASQSIRSSFLA

SEQ ID NO: 2591 - DNA, 36 bp, synthetic construct; identical to SEQ ID NO: 2589
  misc_feature 1..36: note = Description of Artificial Sequence: Synthetic oligonucleotide
  source 1..36: mol_type = other DNA

SEQ ID NO: 2592 - protein, 12 aa, synthetic construct
  REGION 1..12: note = Description of Artificial Sequence: Synthetic peptide
RASQSIRSSFLA

SEQ ID NO: 2593 - DNA, 36 bp, synthetic construct
  misc_feature 1..36: note = Description of Artificial Sequence: Synthetic oligonucleotide
  source 1..36: mol_type = other DNA
agggccggtcaaagtattagaaccaacttcttagcc

SEQ ID NO: 2594 - protein, 12 aa, synthetic construct
  REGION 1..12: note = Description of Artificial Sequence: Synthetic peptide
RAGQSIRTNFLA

SEQ ID NO: 2595 - DNA, 48 bp, synthetic construct; identical to SEQ ID NO: 2569
  misc_feature 1..48: note = Description of Artificial Sequence: Synthetic oligonucleotide
  source 1..48: mol_type = other DNA

SEQ ID NO: 2596 - protein, 16 aa, synthetic construct
  REGION 1..16: note = Description of Artificial Sequence: Synthetic peptide
KSSQSLLHSDGRTYLY

SEQ ID NO: 2597 - DNA, 51 bp, synthetic construct
  misc_feature 1..51: note = Description of Artificial Sequence: Synthetic oligonucleotide
  source 1..51: mol_type = other DNA
aagtccagccagagtgttttacacagctccaacagttacaactacttagct

SEQ ID NO: 2598 - protein, 17 aa, synthetic construct
  REGION 1..17: note = Description of Artificial Sequence: Synthetic peptide
KSSQSVLHSSNSYNYLA

SEQ ID NO: 2599 - DNA, 33 bp, synthetic construct; identical to SEQ ID NO: 1229
  misc_feature 1..33: note = Description of Artificial Sequence: Synthetic oligonucleotide
  source 1..33: mol_type = other DNA

SEQ ID NO: 2600 - protein, 11 aa, synthetic construct
  REGION 1..11: note = Description of Artificial Sequence: Synthetic peptide
RASQGIRKDLG

SEQ ID NO: 2601 - DNA, 33 bp, synthetic construct; identical to SEQ ID NO: 2561
  misc_feature 1..33: note = Description of Artificial Sequence: Synthetic oligonucleotide
  source 1..33: mol_type = other DNA

SEQ ID NO: 2602 - protein, 11 aa, synthetic construct
  REGION 1..11: note = Description of Artificial Sequence: Synthetic peptide
RTSQGIGNYLA

SEQ ID NO: 2603 - DNA, 33 bp, synthetic construct
  misc_feature 1..33: note = Description of Artificial Sequence: Synthetic oligonucleotide
  source 1..33: mol_type = other DNA
cgggcgagtcaggggattggcaatcatttagcc

SEQ ID NO: 2604 - protein, 11 aa, synthetic construct
  REGION 1..11: note = Description of Artificial Sequence: Synthetic peptide
RASQGIGNHLA

SEQ ID NO: 2605 - DNA, 33 bp, synthetic construct
  misc_feature 1..33: note = Description of Artificial Sequence: Synthetic oligonucleotide
  source 1..33: mol_type = other DNA
cgggccaatcagagcattggtagtagcttacac

SEQ ID NO: 2606 - protein, 11 aa, synthetic construct
  REGION 1..11: note = Description of Artificial Sequence: Synthetic peptide
RANQSIGSSLH

SEQ ID NO: 2607 - DNA, 36 bp, synthetic construct
  misc_feature 1..36: note = Description of Artificial Sequence: Synthetic oligonucleotide
  source 1..36: mol_type = other DNA
agggccagtcagagtgttagcagcaggttcttagcc

SEQ ID NO: 2608 - protein, 12 aa, synthetic construct
  REGION 1..12: note = Description of Artificial Sequence: Synthetic peptide
RASQSVSSRFLA

SEQ ID NO: 2609 - DNA, 33 bp, synthetic construct
  misc_feature 1..33: note = Description of Artificial Sequence: Synthetic oligonucleotide
  source 1..33: mol_type = other DNA
cgggccagtcagagcattggtagtagcttacac

SEQ ID NO: 2610 - protein, 11 aa, synthetic construct
  REGION 1..11: note = Description of Artificial Sequence: Synthetic peptide
RASQSIGSSLH

SEQ ID NO: 2611 - DNA, 33 bp, synthetic construct; identical to SEQ ID NO: 401
  misc_feature 1..33: note = Description of Artificial Sequence: Synthetic oligonucleotide
  source 1..33: mol_type = other DNA

SEQ ID NO: 2612 - protein, 11 aa, synthetic construct
  REGION 1..11: note = Description of Artificial Sequence: Synthetic peptide
RASQGIRNYLA

SEQ ID NO: 2613 - DNA, 48 bp, synthetic construct; identical to SEQ ID NO: 2569
  misc_feature 1..48: note = Description of Artificial Sequence: Synthetic oligonucleotide
  source 1..48: mol_type = other DNA

SEQ ID NO: 2614 - protein, 16 aa, synthetic construct
  REGION 1..16: note = Description of Artificial Sequence: Synthetic peptide
KSSQSLLHSDGRTYLY

SEQ ID NO: 2615 - DNA, 33 bp, synthetic construct
  misc_feature 1..33: note = Description of Artificial Sequence: Synthetic oligonucleotide
  source 1..33: mol_type = other DNA
cgggcgagtcaggacattggcagatatttagcc

SEQ ID NO: 2616 - protein, 11 aa, synthetic construct
  REGION 1..11: note = Description of Artificial Sequence: Synthetic peptide
RASQDIGRYLA

SEQ ID NO: 2617 - DNA, 33 bp, synthetic construct; identical to SEQ ID NO: 2193
  misc_feature 1..33: note = Description of Artificial Sequence: Synthetic oligonucleotide
  source 1..33: mol_type = other DNA

SEQ ID NO: 2618 - protein, 11 aa, synthetic construct
  REGION 1..11: note = Description of Artificial Sequence: Synthetic peptide
RASQGINNWLA

SEQ ID NO: 2619 - DNA, 33 bp, synthetic construct; identical to SEQ ID NO: 105
  misc_feature 1..33: note = Description of Artificial Sequence: Synthetic oligonucleotide
  source 1..33: mol_type = other DNA

SEQ ID NO: 2620 - protein, 11 aa, synthetic construct
  REGION 1..11: note = Description of Artificial Sequence: Synthetic peptide
RASQGISNYLA

SEQ ID NO: 2621 - DNA, 33 bp, synthetic construct; identical to SEQ ID NO: 109
  misc_feature 1..33: note = Description of Artificial Sequence: Synthetic oligonucleotide
  source 1..33: mol_type = other DNA

SEQ ID NO: 2622 - protein, 11 aa, synthetic construct
  REGION 1..11: note = Description of Artificial Sequence: Synthetic peptide
RASQGIRNDLG

SEQ ID NO: 2623 - DNA, 33 bp, synthetic construct; identical to SEQ ID NO: 109
  misc_feature 1..33: note = Description of Artificial Sequence: Synthetic oligonucleotide
  source 1..33: mol_type = other DNA

SEQ ID NO: 2624 - protein, 11 aa, synthetic construct
  REGION 1..11: note = Description of Artificial Sequence: Synthetic peptide
RASQGIRNDLG

SEQ ID NO: 2625 - DNA, 33 bp, synthetic construct; identical to SEQ ID NO: 105
  misc_feature 1..33: note = Description of Artificial Sequence: Synthetic oligonucleotide
  source 1..33: mol_type = other DNA

SEQ ID NO: 2626 - protein, 11 aa, synthetic construct
  REGION 1..11: note = Description of Artificial Sequence: Synthetic peptide
RASQGISNYLA

SEQ ID NO: 2627 - DNA, 33 bp, synthetic construct; identical to SEQ ID NO: 105
  misc_feature 1..33: note = Description of Artificial Sequence: Synthetic oligonucleotide
  source 1..33: mol_type = other DNA

SEQ ID NO: 2628 - protein, 11 aa, synthetic construct
  REGION 1..11: note = Description of Artificial Sequence: Synthetic peptide
RASQGISNYLA

SEQ ID NO: 2629 - DNA, 48 bp, synthetic construct
  misc_feature 1..48: note = Description of Artificial Sequence: Synthetic oligonucleotide
  source 1..48: mol_type = other DNA
aagtctagtcagagcctcctgcatggtgatggaaagacctatttgtgt

SEQ ID NO: 2630 - protein, 16 aa, synthetic construct
  REGION 1..16: note = Description of Artificial Sequence: Synthetic peptide
KSSQSLLHGDGKTYLC

SEQ ID NO: 2631 - DNA, 33 bp, synthetic construct; identical to SEQ ID NO: 2531
  misc_feature 1..33: note = Description of Artificial Sequence: Synthetic oligonucleotide
  source 1..33: mol_type = other DNA

SEQ ID NO: 2632 - protein, 11 aa, synthetic construct
  REGION 1..11: note = Description of Artificial Sequence: Synthetic peptide
RASQDITSWLA

SEQ ID NO: 2633 - DNA, 33 bp, synthetic construct; identical to SEQ ID NO: 105
  misc_feature 1..33: note = Description of Artificial Sequence: Synthetic oligonucleotide
  source 1..33: mol_type = other DNA

SEQ ID NO: 2634 - protein, 11 aa, synthetic construct
  REGION 1..11: note = Description of Artificial Sequence: Synthetic peptide
RASQGISNYLA

SEQ ID NO: 2635 - DNA, 33 bp, synthetic construct
  misc_feature 1..33: note = Description of Artificial Sequence: Synthetic oligonucleotide
  source 1..33: mol_type = other DNA
cgggcgaatcaggatatttccagctggttagcc

SEQ ID NO: 2636 - protein, 11 aa, synthetic construct
  REGION 1..11: note = Description of Artificial Sequence: Synthetic peptide
RANQDISSWLA

SEQ ID NO: 2637 - DNA, 33 bp, synthetic construct; identical to SEQ ID NO: 105
  misc_feature 1..33: note = Description of Artificial Sequence: Synthetic oligonucleotide
  source 1..33: mol_type = other DNA

SEQ ID NO: 2638 - protein, 11 aa, synthetic construct
  REGION 1..11: note = Description of Artificial Sequence: Synthetic peptide
RASQGISNYLA

SEQ ID NO: 2639 - DNA, 48 bp, synthetic construct
  misc_feature 1..48: note = Description of Artificial Sequence: Synthetic oligonucleotide
  source 1..48: mol_type = other DNA
atgtctagtcagagcctcctgcatggtgatggaaagacctatttatat

SEQ ID NO: 2640 - protein, 16 aa, synthetic construct
  REGION 1..16: note = Description of Artificial Sequence: Synthetic peptide
MSSQSLLHGDGKTYLY

SEQ ID NO: 2641 - DNA, 48 bp, synthetic construct; identical to SEQ ID NO: 481
  misc_feature 1..48: note = Description of Artificial Sequence: Synthetic oligonucleotide
  source 1..48: mol_type = other DNA

SEQ ID NO: 2642 - protein, 16 aa, synthetic construct
  REGION 1..16: note = Description of Artificial Sequence: Synthetic peptide
KSSQSLLHGDGKTYLF

SEQ ID NO: 2643 - DNA, 51 bp, synthetic construct
  misc_feature 1..51: note = Description of Artificial Sequence: Synthetic oligonucleotide
  source 1..51: mol_type = other DNA
aagtccagccagagtgttttattcaactccaacaataagaactacttagct

SEQ ID NO: 2644 - protein, 17 aa, synthetic construct
  REGION 1..17: note = Description of Artificial Sequence: Synthetic peptide
KSSQSVLFNSNNKNYLA

SEQ ID NO: 2645 - DNA, 36 bp, synthetic construct
  misc_feature 1..36: note = Description of Artificial Sequence: Synthetic oligonucleotide
  source 1..36: mol_type = other DNA
agggccagtcagaatataaggagcaacttcttagcc

SEQ ID NO: 2646 - protein, 12 aa, synthetic construct
  REGION 1..12: note = Description of Artificial Sequence: Synthetic peptide
RASQNIRSNFLA

SEQ ID NO: 2647 - DNA, 33 bp, synthetic construct; identical to SEQ ID NO: 1229
  misc_feature 1..33: note = Description of Artificial Sequence: Synthetic oligonucleotide
  source 1..33: mol_type = other DNA

SEQ ID NO: 2648 - protein, 11 aa, synthetic construct
  REGION 1..11: note = Description of Artificial Sequence: Synthetic peptide
RASQGIRKDLG

SEQ ID NO: 2649 - DNA, 33 bp, synthetic construct
  misc_feature 1..33: note = Description of Artificial Sequence: Synthetic oligonucleotide
  source 1..33: mol_type = other DNA
cgggcgagtcagggtcttaacaactggttagcc

SEQ ID NO: 2650 - protein, 11 aa, synthetic construct
  REGION 1..11: note = Description of Artificial Sequence: Synthetic peptide
RASQGLNNWLA

SEQ ID NO: 2651 - DNA, 36 bp, synthetic construct; identical to SEQ ID NO: 2589
  misc_feature 1..36: note = Description of Artificial Sequence: Synthetic oligonucleotide
  source 1..36: mol_type = other DNA

SEQ ID NO: 2652 - protein, 12 aa, synthetic construct
  REGION 1..12: note = Description of Artificial Sequence: Synthetic peptide
RASQSIRSSFLA

SEQ ID NO: 2653 - DNA, 36 bp, synthetic construct
  misc_feature 1..36: note = Description of Artificial Sequence: Synthetic oligonucleotide
  source 1..36: mol_type = other DNA
agggccagtcagagtgttagaagcaacttcttagcc

SEQ ID NO: 2654 - protein, 12 aa, synthetic construct
  REGION 1..12: note = Description of Artificial Sequence: Synthetic peptide
RASQSVRSNFLA

SEQ ID NO: 2655 - DNA, 51 bp, synthetic construct; identical to SEQ ID NO: 1689
  misc_feature 1..51: note = Description of Artificial Sequence: Synthetic oligonucleotide
  source 1..51: mol_type = other DNA

SEQ ID NO: 2656 - protein, 17 aa, synthetic construct
  REGION 1..17: note = Description of Artificial Sequence: Synthetic peptide
KSSQSVLHSSNNYNYLA

SEQ ID NO: 2657 - DNA, 33 bp, synthetic construct; identical to SEQ ID NO: 2559
  misc_feature 1..33: note = Description of Artificial Sequence: Synthetic oligonucleotide
  source 1..33: mol_type = other DNA

SEQ ID NO: 2658 - protein, 11 aa, synthetic construct
  REGION 1..11: note = Description of Artificial Sequence: Synthetic peptide
RASQSIGSNLH

SEQ ID NO: 2659 - DNA, 33 bp, synthetic construct; identical to SEQ ID NO: 1229
  misc_feature 1..33: note = Description of Artificial Sequence: Synthetic oligonucleotide
  source 1..33: mol_type = other DNA

SEQ ID NO: 2660 - protein, 11 aa, synthetic construct
  REGION 1..11: note = Description of Artificial Sequence: Synthetic peptide
RASQGIRKDLG

SEQ ID NO: 2661 - DNA, 33 bp, synthetic construct; identical to SEQ ID NO: 109
  misc_feature 1..33: note = Description of Artificial Sequence: Synthetic oligonucleotide
  source 1..33: mol_type = other DNA

SEQ ID NO: 2662 - protein, 11 aa, synthetic construct
  REGION 1..11: note = Description of Artificial Sequence: Synthetic peptide
RASQGIRNDLG

SEQ ID NO: 2663 - DNA, 51 bp, synthetic construct; identical to SEQ ID NO: 2643
  misc_feature 1..51: note = Description of Artificial Sequence: Synthetic oligonucleotide
  source 1..51: mol_type = other DNA

SEQ ID NO: 2664 - protein, 17 aa, synthetic construct
  REGION 1..17: note = Description of Artificial Sequence: Synthetic peptide
KSSQSVLFNSNNKNYLA

SEQ ID NO: 2665 - DNA, 51 bp, synthetic construct
  misc_feature 1..51: note = Description of Artificial Sequence: Synthetic oligonucleotide
  source 1..51: mol_type = other DNA
aagtccagccagagtgttttatccagctccaacaattacaactatttagtt

SEQ ID NO: 2666 - protein, 17 aa, synthetic construct
  REGION 1..17: note = Description of Artificial Sequence: Synthetic peptide
KSSQSVLSSSNNYNYLV

SEQ ID NO: 2667 - DNA, 48 bp, synthetic construct; identical to SEQ ID NO: 2569
  misc_feature 1..48: note = Description of Artificial Sequence: Synthetic oligonucleotide
  source 1..48: mol_type = other DNA

SEQ ID NO: 2668 - protein, 16 aa, synthetic construct
  REGION 1..16: note = Description of Artificial Sequence: Synthetic peptide
KSSQSLLHSDGRTYLY

SEQ ID NO: 2669 - DNA, 33 bp, synthetic construct; identical to SEQ ID NO: 2609
  misc_feature 1..33: note = Description of Artificial Sequence: Synthetic oligonucleotide
  source 1..33: mol_type = other DNA

SEQ ID NO: 2670 - protein, 11 aa, synthetic construct
  REGION 1..11: note = Description of Artificial Sequence: Synthetic peptide
RASQSIGSSLH

SEQ ID NO: 2671 - DNA, 33 bp, synthetic construct; identical to SEQ ID NO: 2561
  misc_feature 1..33: note = Description of Artificial Sequence: Synthetic oligonucleotide
  source 1..33: mol_type = other DNA

SEQ ID NO: 2672 - protein, 11 aa, synthetic construct
  REGION 1..11: note = Description of Artificial Sequence: Synthetic peptide
RTSQGIGNYLA

SEQ ID NO: 2673 - DNA, 33 bp, synthetic construct; identical to SEQ ID NO: 2609
  misc_feature 1..33: note = Description of Artificial Sequence: Synthetic oligonucleotide
  source 1..33: mol_type = other DNA

SEQ ID NO: 2674 - protein, 11 aa, synthetic construct
  REGION 1..11: note = Description of Artificial Sequence: Synthetic peptide
RASQSIGSSLH

SEQ ID NO: 2675 - DNA, 33 bp, synthetic construct; identical to SEQ ID NO: 1727
  misc_feature 1..33: note = Description of Artificial Sequence: Synthetic oligonucleotide
  source 1..33: mol_type = other DNA

SEQ ID NO: 2676 - protein, 11 aa, synthetic construct
  REGION 1..11: note = Description of Artificial Sequence: Synthetic peptide
RASQGIGKYLA

SEQ ID NO: 2677 - DNA, 36 bp, synthetic construct
  misc_feature 1..36: note = Description of Artificial Sequence: Synthetic oligonucleotide
  source 1..36: mol_type = other DNA
agggccggtcaaagtattagaaccgacttcttagcc

SEQ ID NO: 2678 - protein, 12 aa, synthetic construct
  REGION 1..12: note = Description of Artificial Sequence: Synthetic peptide
RAGQSIRTDFLA

SEQ ID NO: 2679 - DNA, 33 bp, synthetic construct
  misc_feature 1..33: note = Description of Artificial Sequence: Synthetic oligonucleotide
  source 1..33: mol_type = other DNA
aggcccagtcagagttttagcagaaacttagcc

SEQ ID NO: 2680 - protein, 11 aa, synthetic construct
  REGION 1..11: note = Description of Artificial Sequence: Synthetic peptide
RPSQSFSRNLA

SEQ ID NO: 2681 - DNA, 33 bp, synthetic construct
  misc_feature 1..33: note = Description of Artificial Sequence: Synthetic oligonucleotide
  source 1..33: mol_type = other DNA
cgggccagtcagagtattggtagtagtttacac

SEQ ID NO: 2682 - protein, 11 aa, synthetic construct
  REGION 1..11: note = Description of Artificial Sequence: Synthetic peptide
RASQSIGSSLH

SEQ ID NO: 2683 - DNA, 33 bp, synthetic construct; identical to SEQ ID NO: 1727
  misc_feature 1..33: note = Description of Artificial Sequence: Synthetic oligonucleotide
  source 1..33: mol_type = other DNA

SEQ ID NO: 2684 - protein, 11 aa, synthetic construct
  REGION 1..11: note = Description of Artificial Sequence: Synthetic peptide
RASQGIGKYLA

SEQ ID NO: 2685 - DNA, 33 bp, synthetic construct; identical to SEQ ID NO: 1727
  misc_feature 1..33: note = Description of Artificial Sequence: Synthetic oligonucleotide
  source 1..33: mol_type = other DNA

SEQ ID NO: 2686 - protein, 11 aa, synthetic construct
  REGION 1..11: note = Description of Artificial Sequence: Synthetic peptide
RASQGIGKYLA

SEQ ID NO: 2687 - DNA, 51 bp, synthetic construct; identical to SEQ ID NO: 2643
  misc_feature 1..51: note = Description of Artificial Sequence: Synthetic oligonucleotide
  source 1..51: mol_type = other DNA

SEQ ID NO: 2688 - protein, 17 aa, synthetic construct
  REGION 1..17: note = Description of Artificial Sequence: Synthetic peptide
KSSQSVLFNSNNKNYLA

SEQ ID NO: 2689 - DNA, 33 bp, synthetic construct; identical to SEQ ID NO: 2561
  misc_feature 1..33: note = Description of Artificial Sequence: Synthetic oligonucleotide
  source 1..33: mol_type = other DNA

SEQ ID NO: 2690 - protein, 11 aa, synthetic construct
  REGION 1..11: note = Description of Artificial Sequence: Synthetic peptide
RTSQGIGNYLA

SEQ ID NO: 2691 - DNA, 33 bp, synthetic construct
  misc_feature 1..33: note = Description of Artificial Sequence: Synthetic oligonucleotide
  source 1..33: mol_type = other DNA
cgggcgaatcagggcattaacaattatttagcc

SEQ ID NO: 2692 - protein, 11 aa, synthetic construct
  REGION 1..11: note = Description of Artificial Sequence: Synthetic peptide
RANQGINNYLA

SEQ ID NO: 2693 - DNA, 33 bp, synthetic construct; identical to SEQ ID NO: 105
  misc_feature 1..33: note = Description of Artificial Sequence: Synthetic oligonucleotide
  source 1..33: mol_type = other DNA

SEQ ID NO: 2694 - protein, 11 aa, synthetic construct
  REGION 1..11: note = Description of Artificial Sequence: Synthetic peptide
RASQGISNYLA

SEQ ID NO: 2695 - DNA, 33 bp, synthetic construct
  misc_feature 1..33: note = Description of Artificial Sequence: Synthetic oligonucleotide
  source 1..33: mol_type = other DNA
cgggcgagtcagggtataagtagttggatagcc

SEQ ID NO: 2696 - protein, 11 aa, synthetic construct
  REGION 1..11: note = Description of Artificial Sequence: Synthetic peptide
RASQGISSWIA

SEQ ID NO: 2697 - DNA, 36 bp, synthetic construct
  misc_feature 1..36: note = Description of Artificial Sequence: Synthetic oligonucleotide
  source 1..36: mol_type = other DNA
agggccagtcagagtgttcgcagcagcttccttgcc

SEQ ID NO: 2698 - protein, 12 aa, synthetic construct
  REGION 1..12: note = Description of Artificial Sequence: Synthetic peptide
RASQSVRSSFLA

SEQ ID NO: 2699 - DNA, 33 bp, synthetic construct; identical to SEQ ID NO: 105
  misc_feature 1..33: note = Description of Artificial Sequence: Synthetic oligonucleotide
  source 1..33: mol_type = other DNA

SEQ ID NO: 2700 - protein, 11 aa, synthetic construct
  REGION 1..11: note = Description of Artificial Sequence: Synthetic peptide
RASQGISNYLA

SEQ ID NO: 2701 - DNA, 36 bp, synthetic construct
  misc_feature 1..36: note = Description of Artificial Sequence: Synthetic oligonucleotide
  source 1..36: mol_type = other DNA
agggccagtcagagtgttagcagcaacttcttagcc

SEQ ID NO: 2702 - protein, 12 aa, synthetic construct
  REGION 1..12: note = Description of Artificial Sequence: Synthetic peptide
RASQSVSSNFLA

SEQ ID NO: 2703 - DNA, 33 bp, synthetic construct
  misc_feature 1..33: note = Description of Artificial Sequence: Synthetic oligonucleotide
  source 1..33: mol_type = other DNA
cgggcgagtcagggcattggcaattatttagcc

SEQ ID NO: 2704 - protein, 11 aa, synthetic construct
  REGION 1..11: note = Description of Artificial Sequence: Synthetic peptide
RASQGIGNYLA

SEQ ID NO: 2705 - DNA, 33 bp, synthetic construct; identical to SEQ ID NO: 283
  misc_feature 1..33: note = Description of Artificial Sequence: Synthetic oligonucleotide
  source 1..33: mol_type = other DNA

SEQ ID NO: 2706 - protein, 11 aa, synthetic construct
  REGION 1..11: note = Description of Artificial Sequence: Synthetic peptide
RASQDISNYLA

SEQ ID NO: 2707 - DNA, 33 bp, synthetic construct
  misc_feature 1..33: note = Description of Artificial Sequence: Synthetic oligonucleotide
  source 1..33: mol_type = other DNA
cgggccagtcagagcattggtaggagtttacac

SEQ ID NO: 2708 - protein, 11 aa, synthetic construct
  REGION 1..11: note = Description of Artificial Sequence: Synthetic peptide
RASQSIGRSLH

SEQ ID NO: 2709 - DNA, 33 bp, synthetic construct; identical to SEQ ID NO: 109
  misc_feature 1..33: note = Description of Artificial Sequence: Synthetic oligonucleotide
  source 1..33: mol_type = other DNA

SEQ ID NO: 2710 - protein, 11 aa, synthetic construct
  REGION 1..11: note = Description of Artificial Sequence: Synthetic peptide
RASQGIRNDLG

SEQ ID NO: 2711 - DNA, 33 bp, synthetic construct; identical to SEQ ID NO: 2561
  misc_feature 1..33: note = Description of Artificial Sequence: Synthetic oligonucleotide
  source 1..33: mol_type = other DNA

SEQ ID NO: 2712 - protein, 11 aa, synthetic construct
  REGION 1..11: note = Description of Artificial Sequence: Synthetic peptide
RTSQGIGNYLA

SEQ ID NO: 2713 - DNA, 33 bp, synthetic construct; identical to SEQ ID NO: 1229
  misc_feature 1..33: note = Description of Artificial Sequence: Synthetic oligonucleotide
  source 1..33: mol_type = other DNA

SEQ ID NO: 2714 - protein, 11 aa, synthetic construct
  REGION 1..11: note = Description of Artificial Sequence: Synthetic peptide
RASQGIRKDLG

SEQ ID NO: 2715 - DNA, 33 bp, synthetic construct; identical to SEQ ID NO: 105
  misc_feature 1..33: note = Description of Artificial Sequence: Synthetic oligonucleotide
  source 1..33: mol_type = other DNA

SEQ ID NO: 2716 - protein, 11 aa, synthetic construct
  REGION 1..11: note = Description of Artificial Sequence: Synthetic peptide
RASQGISNYLA

SEQ ID NO: 2717 - DNA, 36 bp, synthetic construct
  misc_feature 1..36: note = Description of Artificial Sequence: Synthetic oligonucleotide
  source 1..36: mol_type = other DNA
agggccagtcagagtattagcagcagctacttagcc

SEQ ID NO: 2718 - protein, 12 aa, synthetic construct
  REGION 1..12: note = Description of Artificial Sequence: Synthetic peptide
RASQSISSSYLA

SEQ ID NO: 2719 - DNA, 33 bp, synthetic construct; identical to SEQ ID NO: 2561
  misc_feature 1..33: note = Description of Artificial Sequence: Synthetic oligonucleotide
  source 1..33: mol_type = other DNA

SEQ ID NO: 2720 - protein, 11 aa, synthetic construct
  REGION 1..11: note = Description of Artificial Sequence: Synthetic peptide
RTSQGIGNYLA

SEQ ID NO: 2721 - DNA, 48 bp, synthetic construct; identical to SEQ ID NO: 2569
  misc_feature 1..48: note = Description of Artificial Sequence: Synthetic oligonucleotide
  source 1..48: mol_type = other DNA

SEQ ID NO: 2722 - protein, 16 aa, synthetic construct
  REGION 1..16: note = Description of Artificial Sequence: Synthetic peptide
KSSQSLLHSDGRTYLY

SEQ ID NO: 2723 - DNA, 33 bp, synthetic construct; identical to SEQ ID NO: 1727
  misc_feature 1..33: note = Description of Artificial Sequence: Synthetic oligonucleotide
  source 1..33: mol_type = other DNA

SEQ ID NO: 2724 - protein, 11 aa, synthetic construct
  REGION 1..11: note = Description of Artificial Sequence: Synthetic peptide
RASQGIGKYLA

SEQ ID NO: 2725 - DNA, 33 bp, synthetic construct; identical to SEQ ID NO: 529
  misc_feature 1..33: note = Description of Artificial Sequence: Synthetic oligonucleotide
  source 1..33: mol_type = other DNA

SEQ ID NO: 2726 - protein, 11 aa, synthetic construct
  REGION 1..11: note = Description of Artificial Sequence: Synthetic peptide
RASQSISNYLN

SEQ ID NO: 2727 - DNA, 33 bp, synthetic construct; identical to SEQ ID NO: 1727
  misc_feature 1..33: note = Description of Artificial Sequence: Synthetic oligonucleotide
  source 1..33: mol_type = other DNA

SEQ ID NO: 2728 - protein, 11 aa, synthetic construct
  REGION 1..11: note = Description of Artificial Sequence: Synthetic peptide
RASQGIGKYLA

SEQ ID NO: 2729 - DNA, 36 bp, synthetic construct
  misc_feature 1..36: note = Description of Artificial Sequence: Synthetic oligonucleotide
  source 1..36: mol_type = other DNA
agggccagtcagagtgtcagaagcgacttcttagcc

SEQ ID NO: 2730 - protein, 12 aa, synthetic construct
  REGION 1..12: note = Description of Artificial Sequence: Synthetic peptide
RASQSVRSDFLA

SEQ ID NO: 2731 - DNA, 36 bp, synthetic construct; identical to SEQ ID NO: 2653
  misc_feature 1..36: note = Description of Artificial Sequence: Synthetic oligonucleotide
  source 1..36: mol_type = other DNA

SEQ ID NO: 2732 - protein, 12 aa, synthetic construct
  REGION 1..12: note = Description of Artificial Sequence: Synthetic peptide
RASQSVRSNFLA

SEQ ID NO: 2733 - DNA, 36 bp, synthetic construct; identical to SEQ ID NO: 2653
  misc_feature 1..36: note = Description of Artificial Sequence: Synthetic oligonucleotide
  source 1..36: mol_type = other DNA

SEQ ID NO: 2734 - protein, 12 aa, synthetic construct
  REGION 1..12: note = Description of Artificial Sequence: Synthetic peptide
RASQSVRSNFLA

SEQ ID NO: 2735 - DNA, 33 bp, synthetic construct; identical to SEQ ID NO: 2193
  misc_feature 1..33: note = Description of Artificial Sequence: Synthetic oligonucleotide
  source 1..33: mol_type = other DNA

SEQ ID NO: 2736 - protein, 11 aa, synthetic construct
  REGION 1..11: note = Description of Artificial Sequence: Synthetic peptide
RASQGINNWLA

SEQ ID NO: 2737 - DNA, 36 bp, synthetic construct; identical to SEQ ID NO: 2589
  misc_feature 1..36: note = Description of Artificial Sequence: Synthetic oligonucleotide
  source 1..36: mol_type = other DNA

SEQ ID NO: 2738 - protein, 12 aa, synthetic construct
  REGION 1..12: note = Description of Artificial Sequence: Synthetic peptide
RASQSIRSSFLA

SEQ ID NO: 2739 - DNA, 36 bp, synthetic construct
  misc_feature 1..36: note = Description of Artificial Sequence: Synthetic oligonucleotide
  source 1..36: mol_type = other DNA
agggccggtcaaagtattagaaccgacttcttagtc

SEQ ID NO: 2740 - protein, 12 aa, synthetic construct
  REGION 1..12: note = Description of Artificial Sequence: Synthetic peptide
RAGQSIRTDFLV

SEQ ID NO: 2741 - DNA, 33 bp, synthetic construct
  misc_feature 1..33: note = Description of Artificial Sequence: Synthetic oligonucleotide
  source 1..33: mol_type = other DNA
cggccgagtcagggcattagcatttatttagcc

SEQ ID NO: 2742 - protein, 11 aa, synthetic construct
  REGION 1..11: note = Description of Artificial Sequence: Synthetic peptide
RPSQGISIYLA

SEQ ID NO: 2743 - DNA, 51 bp, synthetic construct
  misc_feature 1..51: note = Description of Artificial Sequence: Synthetic oligonucleotide
  source 1..51: mol_type = other DNA
aagtccagccagagtgttttatacagctccaacaattataactacttgact

SEQ ID NO: 2744 - protein, 17 aa, synthetic construct
  REGION 1..17: note = Description of Artificial Sequence: Synthetic peptide
KSSQSVLYSSNNYNYLT

SEQ ID NO: 2745 - DNA, 33 bp, synthetic construct; identical to SEQ ID NO: 821
  misc_feature 1..33: note = Description of Artificial Sequence: Synthetic oligonucleotide
  source 1..33: mol_type = other DNA

SEQ ID NO: 2746 - protein, 11 aa, synthetic construct
  REGION 1..11: note = Description of Artificial Sequence: Synthetic peptide
RASQGIRNDLG

SEQ ID NO: 2747 - DNA, 33 bp, synthetic construct; identical to SEQ ID NO: 2609
  misc_feature 1..33: note = Description of Artificial Sequence: Synthetic oligonucleotide
  source 1..33: mol_type = other DNA

SEQ ID NO: 2748 - protein, 11 aa, synthetic construct
  REGION 1..11: note = Description of Artificial Sequence: Synthetic peptide
RASQSIGSSLH

SEQ ID NO: 2749 - DNA, 36 bp, synthetic construct
  misc_feature 1..36: note = Description of Artificial Sequence: Synthetic oligonucleotide
  source 1..36: mol_type = other DNA
agggccagtcagagtgttaggagcggttacttagcc

SEQ ID NO: 2750 - protein, 12 aa, synthetic construct
  REGION 1..12: note = Description of Artificial Sequence: Synthetic peptide
RASQSVRSGYLA

SEQ ID NO: 2751 - DNA, 36 bp, synthetic construct; identical to SEQ ID NO: 2593
  misc_feature 1..36: note = Description of Artificial Sequence: Synthetic oligonucleotide
  source 1..36: mol_type = other DNA

SEQ ID NO: 2752 - protein, 12 aa, synthetic construct
  REGION 1..12: note = Description of Artificial Sequence: Synthetic peptide
RAGQSIRTNFLA

SEQ ID NO: 2753 - DNA, 33 bp, synthetic construct; identical to SEQ ID NO: 1727
  misc_feature 1..33: note = Description of Artificial Sequence: Synthetic oligonucleotide
  source 1..33: mol_type = other DNA

SEQ ID NO: 2754 - protein, 11 aa, synthetic construct
  REGION 1..11: note = Description of Artificial Sequence: Synthetic peptide
RASQGIGKYLA

SEQ ID NO: 2755 - DNA, 33 bp, synthetic construct; identical to SEQ ID NO: 109
  misc_feature 1..33: note = Description of Artificial Sequence: Synthetic oligonucleotide
  source 1..33: mol_type = other DNA

SEQ ID NO: 2756 - protein, 11 aa, synthetic construct
  REGION 1..11: note = Description of Artificial Sequence: Synthetic peptide
RASQGIRNDLG

SEQ ID NO: 2757 - DNA, 36 bp, synthetic construct; identical to SEQ ID NO: 2589
  misc_feature 1..36: note = Description of Artificial Sequence: Synthetic oligonucleotide
  source 1..36: mol_type = other DNA

SEQ ID NO: 2758 - protein, 12 aa, synthetic construct
  REGION 1..12: note = Description of Artificial Sequence: Synthetic peptide
RASQSIRSSFLA

SEQ ID NO: 2759 - DNA, 36 bp, synthetic construct
  misc_feature 1..36: note = Description of Artificial Sequence: Synthetic oligonucleotide
  source 1..36: mol_type = other DNA
agggccagtcagagtataaggaccaacttcttagcc

SEQ ID NO: 2760 - protein, 12 aa, synthetic construct
  REGION 1..12: note = Description of Artificial Sequence: Synthetic peptide
RASQSIRTNFLA

SEQ ID NO: 2761 - DNA, 33 bp, synthetic construct
  misc_feature 1..33: note = Description of Artificial Sequence: Synthetic oligonucleotide
  source 1..33: mol_type = other DNA
cgggcgagtcagggcgttagcaatcatttagcc

SEQ ID NO: 2762 - protein, 11 aa, synthetic construct
  REGION 1..11: note = Description of Artificial Sequence: Synthetic peptide
RASQGVSNHLA

SEQ ID NO: 2763 - DNA, 36 bp, synthetic construct
  misc_feature 1..36: note = Description of Artificial Sequence: Synthetic oligonucleotide
  source 1..36: mol_type = other DNA
agggccagtcagagtgttagaaccaacttcttagcc

SEQ ID NO: 2764 - protein, 12 aa, synthetic construct
  REGION 1..12: note = Description of Artificial Sequence: Synthetic peptide
RASQSVRTNFLA

SEQ ID NO: 2765 - DNA, 33 bp, synthetic construct; identical to SEQ ID NO: 2707
  misc_feature 1..33: note = Description of Artificial Sequence: Synthetic oligonucleotide
  source 1..33: mol_type = other DNA

SEQ ID NO: 2766 - protein, 11 aa, synthetic construct
  REGION 1..11: note = Description of Artificial Sequence: Synthetic peptide
RASQSIGRSLH

SEQ ID NO: 2767 - DNA, 33 bp, synthetic construct; identical to SEQ ID NO: 105
  misc_feature 1..33: note = Description of Artificial Sequence: Synthetic oligonucleotide
  source 1..33: mol_type = other DNA

SEQ ID NO: 2768 - protein, 11 aa, synthetic construct
  REGION 1..11: note = Description of Artificial Sequence: Synthetic peptide
RASQGISNYLA

SEQ ID NO: 2769 - DNA, 36 bp, synthetic construct
  misc_feature 1..36: note = Description of Artificial Sequence: Synthetic oligonucleotide
  source 1..36: mol_type = other DNA
agggccagtccgagtgttagcagcagctacttagcc

SEQ ID NO: 2770 - protein, 12 aa, synthetic construct
  REGION 1..12: note = Description of Artificial Sequence: Synthetic peptide
RASPSVSSSYLA

SEQ ID NO: 2771 - DNA, 36 bp, synthetic construct; identical to SEQ ID NO: 2589
  misc_feature 1..36: note = Description of Artificial Sequence: Synthetic oligonucleotide
  source 1..36: mol_type = other DNA

SEQ ID NO: 2772 - protein, 12 aa, synthetic construct
  REGION 1..12: note = Description of Artificial Sequence: Synthetic peptide
RASQSIRSSFLA

SEQ ID NO: 2773 - DNA, 33 bp, synthetic construct; identical to SEQ ID NO: 1505
  misc_feature 1..33: note = Description of Artificial Sequence: Synthetic oligonucleotide
  source 1..33: mol_type = other DNA

SEQ ID NO: 2774 - protein, 11 aa, synthetic construct
  REGION 1..11: note = Description of Artificial Sequence: Synthetic peptide
RASQSVSSSLA

SEQ ID NO: 2775 - DNA, 33 bp, synthetic construct; identical to SEQ ID NO: 105
  misc_feature 1..33: note = Description of Artificial Sequence: Synthetic oligonucleotide
  source 1..33: mol_type = other DNA

SEQ ID NO: 2776 - protein, 11 aa, synthetic construct
  REGION 1..11: note = Description of Artificial Sequence: Synthetic peptide
RASQGISNYLA

SEQ ID NO: 2777 - DNA, 33 bp, synthetic construct; identical to SEQ ID NO: 2559
  misc_feature 1..33: note = Description of Artificial Sequence: Synthetic oligonucleotide
  source 1..33: mol_type = other DNA

SEQ ID NO: 2778 - protein, 11 aa, synthetic construct
  REGION 1..11: note = Description of Artificial Sequence: Synthetic peptide
RASQSIGSNLH

SEQ ID NO: 2779 - DNA, 36 bp, synthetic construct
  misc_feature 1..36: note = Description of Artificial Sequence: Synthetic oligonucleotide
  source 1..36: mol_type = other DNA
agggccagtcggggtgttagcaacatctacttagcc

SEQ ID NO: 2780 - protein, 12 aa, synthetic construct
  REGION 1..12: note = Description of Artificial Sequence: Synthetic peptide
RASRGVSNIYLA

SEQ ID NO: 2781 - DNA, 48 bp, synthetic construct; identical to SEQ ID NO: 2569
  misc_feature 1..48: note = Description of Artificial Sequence: Synthetic oligonucleotide
  source 1..48: mol_type = other DNA

SEQ ID NO: 2782 - protein, 16 aa, synthetic construct
  REGION 1..16: note = Description of Artificial Sequence: Synthetic peptide
KSSQSLLHSDGRTYLY

SEQ ID NO: 2783 - DNA, 36 bp, synthetic construct; identical to SEQ ID NO: 2593
  misc_feature 1..36: note = Description of Artificial Sequence: Synthetic oligonucleotide
  source 1..36: mol_type = other DNA

SEQ ID NO: 2784 - protein, 12 aa, synthetic construct
  REGION 1..12: note = Description of Artificial Sequence: Synthetic peptide
RAGQSIRTNFLA

SEQ ID NO: 2785 - DNA, 36 bp, synthetic construct
  misc_feature 1..36: note = Description of Artificial Sequence: Synthetic oligonucleotide
  source 1..36: mol_type = other DNA
agggccagtcagagtattagaagcaacttcttagcc

SEQ ID NO: 2786 - protein, 12 aa, synthetic construct
  REGION 1..12: note = Description of Artificial Sequence: Synthetic peptide
RASQSIRSNFLA

SEQ ID NO: 2787 - DNA, 33 bp, synthetic construct; identical to SEQ ID NO: 2147
  misc_feature 1..33: note = Description of Artificial Sequence: Synthetic oligonucleotide
  source 1..33: mol_type = other DNA

SEQ ID NO: 2788 - protein, 11 aa, synthetic construct
  REGION 1..11: note = Description of Artificial Sequence: Synthetic peptide
RASQGISKYLA

SEQ ID NO: 2789 - DNA, 33 bp, synthetic construct; identical to SEQ ID NO: 173
  misc_feature 1..33: note = Description of Artificial Sequence: Synthetic oligonucleotide
  source 1..33: mol_type = other DNA

SEQ ID NO: 2790 - protein, 11 aa, synthetic construct
  REGION 1..11: note = Description of Artificial Sequence: Synthetic peptide
RASQGISRWLA

SEQ ID NO: 2791 - DNA, 36 bp, synthetic construct
  misc_feature 1..36: note = Description of Artificial Sequence: Synthetic oligonucleotide
  source 1..36: mol_type = other DNA
agggccagtccgagtgttaacagcggctacttagcc

SEQ ID NO: 2792 - protein, 12 aa, synthetic construct
  REGION 1..12: note = Description of Artificial Sequence: Synthetic peptide
RASPSVNSGYLA

SEQ ID NO: 2793 - DNA, 33 bp, synthetic construct; identical to SEQ ID NO: 109
  misc_feature 1..33: note = Description of Artificial Sequence: Synthetic oligonucleotide
  source 1..33: mol_type = other DNA

SEQ ID NO: 2794 - protein, 11 aa, synthetic construct
  REGION 1..11: note = Description of Artificial Sequence: Synthetic peptide
RASQGIRNDLG

SEQ ID NO: 2795 - DNA, 33 bp, synthetic construct; identical to SEQ ID NO: 105
  misc_feature 1..33: note = Description of Artificial Sequence: Synthetic oligonucleotide
  source 1..33: mol_type = other DNA

SEQ ID NO: 2796 - protein, 11 aa, synthetic construct
  REGION 1..11: note = Description of Artificial Sequence: Synthetic peptide
RASQGISNYLA

SEQ ID NO: 2797 - DNA, 33 bp, synthetic construct
  misc_feature 1..33: note = Description of Artificial Sequence: Synthetic oligonucleotide
  source 1..33: mol_type = other DNA
cgggcgagtcagggcattggcaagtatttagca

SEQ ID NO: 2798 - protein, 11 aa, synthetic construct
  REGION 1..11: note = Description of Artificial Sequence: Synthetic peptide
RASQGIGKYLA

SEQ ID NO: 2799 - DNA, 36 bp, synthetic construct
  misc_feature 1..36: note = Description of Artificial Sequence: Synthetic oligonucleotide
  source 1..36: mol_type = other DNA
agggccagtccgagtgttaacagtaactacttagcc

SEQ ID NO: 2800 - protein, 12 aa, synthetic construct
  REGION 1..12: note = Description of Artificial Sequence: Synthetic peptide
RASPSVNSNYLA

SEQ ID NO: 2801 - DNA, 33 bp, synthetic construct; identical to SEQ ID NO: 173
  misc_feature 1..33: note = Description of Artificial Sequence: Synthetic oligonucleotide
  source 1..33: mol_type = other DNA

SEQ ID NO: 2802 - protein, 11 aa, synthetic construct
  REGION 1..11: note = Description of Artificial Sequence: Synthetic peptide
RASQGISRWLA

SEQ ID NO: 2803 - DNA, 33 bp, synthetic construct; identical to SEQ ID NO: 2609
  misc_feature 1..33: note = Description of Artificial Sequence: Synthetic oligonucleotide
  source 1..33: mol_type = other DNA

SEQ ID NO: 2804 - protein, 11 aa, synthetic construct
  REGION 1..11: note = Description of Artificial Sequence: Synthetic peptide
RASQSIGSSLH

SEQ ID NO: 2805 - DNA, 33 bp, synthetic construct; identical to SEQ ID NO: 2579
  misc_feature 1..33: note = Description of Artificial Sequence: Synthetic oligonucleotide
  source 1..33: mol_type = other DNA

SEQ ID NO: 2806 - protein, 11 aa, synthetic construct
  REGION 1..11: note = Description of Artificial Sequence: Synthetic peptide
RTSQGIGKYLA

SEQ ID NO: 2807 - DNA, 36 bp, synthetic construct; identical to SEQ ID NO: 2589
  misc_feature 1..36: note = Description of Artificial Sequence: Synthetic oligonucleotide
  source 1..36: mol_type = other DNA

SEQ ID NO: 2808 - protein, 12 aa, synthetic construct
  REGION 1..12: note = Description of Artificial Sequence: Synthetic peptide
RASQSIRSSFLA

SEQ ID NO: 2809 - DNA, 33 bp, synthetic construct; identical to SEQ ID NO: 105
  misc_feature 1..33: note = Description of Artificial Sequence: Synthetic oligonucleotide
  source 1..33: mol_type = other DNA

SEQ ID NO: 2810 - protein, 11 aa, synthetic construct
  REGION 1..11: note = Description of Artificial Sequence: Synthetic peptide
RASQGISNYLA

SEQ ID NO: 2811 - DNA, 33 bp, synthetic construct; identical to SEQ ID NO: 123
  misc_feature 1..33: note = Description of Artificial Sequence: Synthetic oligonucleotide
  source 1..33: mol_type = other DNA

SEQ ID NO: 2812 - protein, 11 aa, synthetic construct
  REGION 1..11: note = Description of Artificial Sequence: Synthetic peptide
RASQGIRKDLG

SEQ ID NO: 2813 - DNA, 33 bp, synthetic construct; identical to SEQ ID NO: 2609
  misc_feature 1..33: note = Description of Artificial Sequence: Synthetic oligonucleotide
  source 1..33: mol_type = other DNA

SEQ ID NO: 2814 - protein, 11 aa, synthetic construct
  REGION 1..11: note = Description of Artificial Sequence: Synthetic peptide
RASQSIGSSLH

SEQ ID NO: 2815 - DNA, 33 bp, synthetic construct; identical to SEQ ID NO: 2609
  misc_feature 1..33: note = Description of Artificial Sequence: Synthetic oligonucleotide
  source 1..33: mol_type = other DNA

SEQ ID NO: 2816 - protein, 11 aa, synthetic construct
  REGION 1..11: note = Description of Artificial Sequence: Synthetic peptide
RASQSIGSSLH

SEQ ID NO: 2817 - DNA, 51 bp, synthetic construct; identical to SEQ ID NO: 2643
  misc_feature 1..51: note = Description of Artificial Sequence: Synthetic oligonucleotide
  source 1..51: mol_type = other DNA

SEQ ID NO: 2818 - protein, 17 aa, synthetic construct
  REGION 1..17: note = Description of Artificial Sequence: Synthetic peptide
KSSQSVLFNSNNKNYLA

SEQ ID NO: 2819 - DNA, 33 bp, synthetic construct; identical to SEQ ID NO: 2193
  misc_feature 1..33: note = Description of Artificial Sequence: Synthetic oligonucleotide
  source 1..33: mol_type = other DNA

SEQ ID NO: 2820 - protein, 11 aa, synthetic construct
  REGION 1..11: note = Description of Artificial Sequence: Synthetic peptide
RASQGINNWLA

SEQ ID NO: 2821 - DNA, 51 bp, synthetic construct
  misc_feature 1..51: note = Description of Artificial Sequence: Synthetic oligonucleotide
  source 1..51: mol_type = other DNA
aagtccagccagagtattttattcagctccaacaataagaggtacttagct

SEQ ID NO: 2822 - protein, 17 aa, synthetic construct
  REGION 1..17: note = Description of Artificial Sequence: Synthetic peptide
KSSQSILFSSNNKRYLA

SEQ ID NO: 2823 - DNA, 51 bp, synthetic construct; identical to SEQ ID NO: 2643
  misc_feature 1..51: note = Description of Artificial Sequence: Synthetic oligonucleotide
  source 1..51: mol_type = other DNA

SEQ ID NO: 2824 - protein, 17 aa, synthetic construct
  REGION 1..17: note = Description of Artificial Sequence: Synthetic peptide
KSSQSVLFNSNNKNYLA

SEQ ID NO: 2825 - DNA, 33 bp, synthetic construct; identical to SEQ ID NO: 171
  misc_feature 1..33: note = Description of Artificial Sequence: Synthetic oligonucleotide
  source 1..33: mol_type = other DNA

SEQ ID NO: 2826 - protein, 11 aa, synthetic construct
  REGION 1..11: note = Description of Artificial Sequence: Synthetic peptide
RASQGISSWLA

SEQ ID NO: 2827 - DNA, 33 bp, synthetic construct
  misc_feature 1..33: note = Description of Artificial Sequence: Synthetic oligonucleotide
  source 1..33: mol_type = other DNA
cgggcaagtcagcgcattcacagctatttaaat

SEQ ID NO: 2828 - protein, 11 aa, synthetic construct
  REGION 1..11: note = Description of Artificial Sequence: Synthetic peptide
RASQRIHSYLN

SEQ ID NO: 2829 - DNA, 33 bp, synthetic construct
  misc_feature 1..33: note = Description of Artificial Sequence: Synthetic oligonucleotide
  source 1..33: mol_type = other DNA
cgggcgaatcaggccattagcaattatttagcc

SEQ ID NO: 2830 - protein, 11 aa, synthetic construct
  REGION 1..11: note = Description of Artificial Sequence: Synthetic peptide
RANQAISNYLA

SEQ ID NO: 2831 - DNA, 51 bp, synthetic construct; identical to SEQ ID NO: 1057
  misc_feature 1..51: note = Description of Artificial Sequence: Synthetic oligonucleotide
  source 1..51: mol_type = other DNA

SEQ ID NO: 2832 - protein, 17 aa, synthetic construct
  REGION 1..17: note = Description of Artificial Sequence: Synthetic peptide
KSSQSVLHSSNNNNYLA

SEQ ID NO: 2833 - DNA, 33 bp, synthetic construct
  misc_feature 1..33: note = Description of Artificial Sequence: Synthetic oligonucleotide
  source 1..33: mol_type = other DNA
cgggcgagtcagggtattagcaactgcttagcc

SEQ ID NO: 2834 - protein, 11 aa, synthetic construct
  REGION 1..11: note = Description of Artificial Sequence: Synthetic peptide
RASQGISNCLA

SEQ ID NO: 2835 - DNA, 33 bp, synthetic construct; identical to SEQ ID NO: 173
  misc_feature 1..33: note = Description of Artificial Sequence: Synthetic oligonucleotide
  source 1..33: mol_type = other DNA

SEQ ID NO: 2836 - protein, 11 aa, synthetic construct
  REGION 1..11: note = Description of Artificial Sequence: Synthetic peptide
RASQGISRWLA

SEQ ID NO: 2837 - DNA, 33 bp, synthetic construct; identical to SEQ ID NO: 109
  misc_feature 1..33: note = Description of Artificial Sequence: Synthetic oligonucleotide
  source 1..33: mol_type = other DNA

SEQ ID NO: 2838 - protein, 11 aa, synthetic construct
  REGION 1..11: note = Description of Artificial Sequence: Synthetic peptide
RASQGIRNDLG

SEQ ID NO: 2839 - DNA, 36 bp, synthetic construct
  misc_feature 1..36: note = Description of Artificial Sequence: Synthetic oligonucleotide
  source 1..36: mol_type = other DNA
agggccagtccgagtgttagcaacagcttcttagcc

SEQ ID NO: 2840 - protein, 12 aa, synthetic construct
  REGION 1..12: note = Description of Artificial Sequence: Synthetic peptide
RASPSVSNSFLA

SEQ ID NO: 2841 - DNA, 33 bp, synthetic construct
  misc_feature 1..33: note = Description of Artificial Sequence: Synthetic oligonucleotide
  source 1..33: mol_type = other DNA
cgggcaagtcagggcattagaaatgatctaggc

SEQ ID NO: 2842 - protein, 11 aa, synthetic construct
  REGION 1..11: note = Description of Artificial Sequence: Synthetic peptide
RASQGIRNDLG

SEQ ID NO: 2843 - DNA, 36 bp, synthetic construct; identical to SEQ ID NO: 2653
  misc_feature 1..36: note = Description of Artificial Sequence: Synthetic oligonucleotide
  source 1..36: mol_type = other DNA

SEQ ID NO: 2844 - protein, 12 aa, synthetic construct
  REGION 1..12: note = Description of Artificial Sequence: Synthetic peptide
RASQSVRSNFLA

SEQ ID NO: 2845 - DNA, 33 bp, synthetic construct; identical to SEQ ID NO: 2561
  misc_feature 1..33: note = Description of Artificial Sequence: Synthetic oligonucleotide
  source 1..33: mol_type = other DNA

SEQ ID NO: 2846 - protein, 11 aa, synthetic construct
  REGION 1..11: note = Description of Artificial Sequence: Synthetic peptide
RTSQGIGNYLA

SEQ ID NO: 2847 - DNA, 33 bp, synthetic construct
  misc_feature 1..33: note = Description of Artificial Sequence: Synthetic oligonucleotide
  source 1..33: mol_type = other DNA
cgggcgagtcagggcattggcaatcatttagcc

SEQ ID NO: 2848 - protein, 11 aa, synthetic construct
  REGION 1..11: note = Description of Artificial Sequence: Synthetic peptide
RASQGIGNHLA

SEQ ID NO: 2849 - DNA, 36 bp, synthetic construct; identical to SEQ ID NO: 2589
  misc_feature 1..36: note = Description of Artificial Sequence: Synthetic oligonucleotide
  source 1..36: mol_type = other DNA

SEQ ID NO: 2850 - protein, 12 aa, synthetic construct
  REGION 1..12: note = Description of Artificial Sequence: Synthetic peptide
RASQSIRSSFLA

SEQ ID NO: 2851 - DNA, 51 bp, synthetic construct
  misc_feature 1..51: note = Description of Artificial Sequence: Synthetic oligonucleotide
  source 1..51: mol_type = other DNA
aggtccagccagagtgttttacacagcttcaacaattacaactacttagct

SEQ ID NO: 2852 - protein, 17 aa, synthetic construct
  REGION 1..17: note = Description of Artificial Sequence: Synthetic peptide
RSSQSVLHSFNNYNYLA

SEQ ID NO: 2853 - DNA, 33 bp, synthetic construct
  misc_feature 1..33: note = Description of Artificial Sequence: Synthetic oligonucleotide
  source 1..33: mol_type = other DNA
cgggcgagtcagggcattggcaaatatttagcc

SEQ ID NO: 2854 - protein, 11 aa, synthetic construct
  REGION 1..11: note = Description of Artificial Sequence: Synthetic peptide
RASQGIGKYLA

SEQ ID NO: 2855 - DNA, 51 bp, synthetic construct; identical to SEQ ID NO: 2583
  misc_feature 1..51: note = Description of Artificial Sequence: Synthetic oligonucleotide
  source 1..51: mol_type = other DNA

SEQ ID NO: 2856 - protein, 17 aa, synthetic construct
  REGION 1..17: note = Description of Artificial Sequence: Synthetic peptide
RSSQSVLHSSNNYNYLA

SEQ ID NO: 2857 - DNA, 51 bp, synthetic construct
  misc_feature 1..51: note = Description of Artificial Sequence: Synthetic oligonucleotide
  source 1..51: mol_type = other DNA
aagtccagccagagtgttttacacagttccaacaataagaactacttagct

SEQ ID NO: 2858 - protein, 17 aa, synthetic construct
  REGION 1..17: note = Description of Artificial Sequence: Synthetic peptide
KSSQSVLHSSNNKNYLA

SEQ ID NO: 2859 - DNA, 48 bp, synthetic construct
  misc_feature 1..48: note = Description of Artificial Sequence: Synthetic oligonucleotide
  source 1..48: mol_type = other DNA
aagtctagtcagaacctcctgcatagtgatggaaagacctatttgtat

SEQ ID NO: 2860 - protein, 16 aa, synthetic construct
  REGION 1..16: note = Description of Artificial Sequence: Synthetic peptide
KSSQNLLHSDGKTYLY

SEQ ID NO: 2861 - DNA, 33 bp, synthetic construct; identical to SEQ ID NO: 553
  misc_feature 1..33: note = Description of Artificial Sequence: Synthetic oligonucleotide
  source 1..33: mol_type = other DNA

SEQ ID NO: 2862 - protein, 11 aa, synthetic construct
  REGION 1..11: note = Description of Artificial Sequence: Synthetic peptide
RASQGISNWLA

SEQ ID NO: 2863 - DNA, 33 bp, synthetic construct; identical to SEQ ID NO: 109
  misc_feature 1..33: note = Description of Artificial Sequence: Synthetic oligonucleotide
  source 1..33: mol_type = other DNA

SEQ ID NO: 2864 - protein, 11 aa, synthetic construct
  REGION 1..11: note = Description of Artificial Sequence: Synthetic peptide
RASQGIRNDLG

SEQ ID NO: 2865 - DNA, 33 bp, synthetic construct
  misc_feature 1..33: note = Description of Artificial Sequence: Synthetic oligonucleotide
  source 1..33: mol_type = other DNA
cgggcgagtcagggcattaacaagtatttatcc

SEQ ID NO: 2866 - protein, 11 aa, synthetic construct
  REGION 1..11: note = Description of Artificial Sequence: Synthetic peptide
RASQGINKYLS

SEQ ID NO: 2867 - DNA, 33 bp, synthetic construct; identical to SEQ ID NO: 2561
  misc_feature 1..33: note = Description of Artificial Sequence: Synthetic oligonucleotide
  source 1..33: mol_type = other DNA

SEQ ID NO: 2868 - protein, 11 aa, synthetic construct
  REGION 1..11: note = Description of Artificial Sequence: Synthetic peptide
RTSQGIGNYLA

SEQ ID NO: 2869 - DNA, 36 bp, synthetic construct; identical to SEQ ID NO: 2593
  misc_feature 1..36: note = Description of Artificial Sequence: Synthetic oligonucleotide
  source 1..36: mol_type = other DNA

SEQ ID NO: 2870 - protein, 12 aa, synthetic construct
  REGION 1..12: note = Description of Artificial Sequence: Synthetic peptide
RAGQSIRTNFLA

SEQ ID NO: 2871 - DNA, 36 bp, synthetic construct
  misc_feature 1..36: note = Description of Artificial Sequence: Synthetic oligonucleotide
  source 1..36: mol_type = other DNA
agggccagtcagagtataaggagcaacttcttagcc

SEQ ID NO: 2872 - protein, 12 aa, synthetic construct
  REGION 1..12: note = Description of Artificial Sequence: Synthetic peptide
RASQSIRSNFLA

SEQ ID NO: 2873 - DNA, 36 bp, synthetic construct
  misc_feature 1..36: note = Description of Artificial Sequence: Synthetic oligonucleotide
  source 1..36: mol_type = other DNA
agggccagtcagagtgttagaagcagctacttagcc

SEQ ID NO: 2874 - protein, 12 aa, synthetic construct
  REGION 1..12: note = Description of Artificial Sequence: Synthetic peptide
RASQSVRSSYLA

SEQ ID NO: 2875 - DNA, 33 bp, synthetic construct; identical to SEQ ID NO: 2703
  misc_feature 1..33: note = Description of Artificial Sequence: Synthetic oligonucleotide
  source 1..33: mol_type = other DNA

SEQ ID NO: 2876 - protein, 11 aa, synthetic construct
  REGION 1..11: note = Description of Artificial Sequence: Synthetic peptide
RASQGIGNYLA

SEQ ID NO: 2877 - DNA, 33 bp, synthetic construct; identical to SEQ ID NO: 123
  misc_feature 1..33: note = Description of Artificial Sequence: Synthetic oligonucleotide
  source 1..33: mol_type = other DNA

SEQ ID NO: 2878 - protein, 11 aa, synthetic construct
  REGION 1..11: note = Description of Artificial Sequence: Synthetic peptide
RASQGIRKDLG

SEQ ID NO: 2879 - DNA, 48 bp, synthetic construct
  misc_feature 1..48: note = Description of Artificial Sequence: Synthetic oligonucleotide
  source 1..48: mol_type = other DNA
aagtctagtcagagcctcctctatagtgatggaaggacctatttgtat

SEQ ID NO: 2880 - protein, 16 aa, synthetic construct
  REGION 1..16: note = Description of Artificial Sequence: Synthetic peptide
KSSQSLLYSDGRTYLY

SEQ ID NO: 2881 - DNA, 36 bp, synthetic construct; identical to SEQ ID NO: 2589
  misc_feature 1..36: note = Description of Artificial Sequence: Synthetic oligonucleotide
  source 1..36: mol_type = other DNA

SEQ ID NO: 2882 - protein, 12 aa, synthetic construct
  REGION 1..12: note = Description of Artificial Sequence: Synthetic peptide
RASQSIRSSFLA

SEQ ID NO: 2883 - DNA, 36 bp, synthetic construct; identical to SEQ ID NO: 2589
  misc_feature 1..36: note = Description of Artificial Sequence: Synthetic oligonucleotide
  source 1..36: mol_type = other DNA

SEQ ID NO: 2884 - protein, 12 aa, synthetic construct
  REGION 1..12: note = Description of Artificial Sequence: Synthetic peptide
RASQSIRSSFLA

SEQ ID NO: 2885 - DNA, 33 bp, synthetic construct; identical to SEQ ID NO: 109
  misc_feature 1..33: note = Description of Artificial Sequence: Synthetic oligonucleotide
  source 1..33: mol_type = other DNA

SEQ ID NO: 2886 - protein, 11 aa, synthetic construct
  REGION 1..11: note = Description of Artificial Sequence: Synthetic peptide
RASQGIRNDLG

SEQ ID NO: 2887 - DNA, 33 bp, synthetic construct; identical to SEQ ID NO: 1751
  misc_feature 1..33: note = Description of Artificial Sequence: Synthetic oligonucleotide
  source 1..33: mol_type = other DNA

SEQ ID NO: 2888 - protein, 11 aa, synthetic construct
  REGION 1..11: note = Description of Artificial Sequence: Synthetic peptide
RASQGISKYLA

SEQ ID NO: 2889 - DNA, 33 bp, synthetic construct; identical to SEQ ID NO: 2679
  misc_feature 1..33: note = Description of Artificial Sequence: Synthetic oligonucleotide
  source 1..33: mol_type = other DNA

SEQ ID NO: 2890 - protein, 11 aa, synthetic construct
  REGION 1..11: note = Description of Artificial Sequence: Synthetic peptide
RPSQSFSRNLA

SEQ ID NO: 2891 - DNA, 33 bp, synthetic construct; identical to SEQ ID NO: 123
  misc_feature 1..33: note = Description of Artificial Sequence: Synthetic oligonucleotide
  source 1..33: mol_type = other DNA

SEQ ID NO: 2892 - protein, 11 aa, synthetic construct
  REGION 1..11: note = Description of Artificial Sequence: Synthetic peptide
RASQGIRKDLG

SEQ ID NO: 2893 - DNA, 36 bp, synthetic construct; identical to SEQ ID NO: 2759
  misc_feature 1..36: note = Description of Artificial Sequence: Synthetic oligonucleotide
  source 1..36: mol_type = other DNA

SEQ ID NO: 2894 - protein, 12 aa, synthetic construct
  REGION 1..12: note = Description of Artificial Sequence: Synthetic peptide
RASQSIRTNFLA

SEQ ID NO: 2895 - DNA, 36 bp, synthetic construct; identical to SEQ ID NO: 2873
  misc_feature 1..36: note = Description of Artificial Sequence: Synthetic oligonucleotide
  source 1..36: mol_type = other DNA

SEQ ID NO: 2896 - protein, 12 aa, synthetic construct
  REGION 1..12: note = Description of Artificial Sequence: Synthetic peptide
RASQSVRSSYLA

SEQ ID NO: 2897 - DNA, 33 bp, synthetic construct; identical to SEQ ID NO: 501
  misc_feature 1..33: note = Description of Artificial Sequence: Synthetic oligonucleotide
  source 1..33: mol_type = other DNA

SEQ ID NO: 2898 - protein, 11 aa, synthetic construct
  REGION 1..11: note = Description of Artificial Sequence: Synthetic peptide
RASQSISSYLN

SEQ ID NO: 2899 - DNA, 33 bp, synthetic construct; identical to SEQ ID NO: 205
  misc_feature 1..33: note = Description of Artificial Sequence: Synthetic oligonucleotide
  source 1..33: mol_type = other DNA

SEQ ID NO: 2900 - protein, 11 aa, synthetic construct
  REGION 1..11: note = Description of Artificial Sequence: Synthetic peptide
RASQDIRNDLG

SEQ ID NO: 2901 - DNA, 33 bp, synthetic construct
  misc_feature 1..33: note = Description of Artificial Sequence: Synthetic oligonucleotide
  source 1..33: mol_type = other DNA
cgggccagtcagaacattggtaataccttgcac

SEQ ID NO: 2902 - protein, 11 aa, synthetic construct
  REGION 1..11: note = Description of Artificial Sequence: Synthetic peptide
RASQNIGNTLH

SEQ ID NO: 2903 - DNA, 51 bp, synthetic construct; identical to SEQ ID NO: 1057
  misc_feature 1..51: note = Description of Artificial Sequence: Synthetic oligonucleotide
  source 1..51: mol_type = other DNA

SEQ ID NO: 2904 - protein, 17 aa, synthetic construct
  REGION 1..17: note = Description of Artificial Sequence: Synthetic peptide
KSSQSVLHSSNNNNYLA

SEQ ID NO: 2905 - DNA, 33 bp, synthetic construct; identical to SEQ ID NO: 2559
  misc_feature 1..33: note = Description of Artificial Sequence: Synthetic oligonucleotide
  source 1..33: mol_type = other DNA

SEQ ID NO: 2906 - protein, 11 aa, synthetic construct
  REGION 1..11: note = Description of Artificial Sequence: Synthetic peptide
RASQSIGSNLH

SEQ ID NO: 2907 - DNA, 33 bp, synthetic construct
  misc_feature 1..33: note = Description of Artificial Sequence: Synthetic oligonucleotide
  source 1..33: mol_type = other DNA
cgggcaactcagggcattagaaaagatttaggc

SEQ ID NO: 2908 - protein, 11 aa, synthetic construct
  REGION 1..11: note = Description of Artificial Sequence: Synthetic peptide
RATQGIRKDLG

SEQ ID NO: 2909 - DNA, 36 bp, synthetic construct
  misc_feature 1..36: note = Description of Artificial Sequence: Synthetic oligonucleotide
  source 1..36: mol_type = other DNA
agggccagtcagaatattcgcagcagcttcttagcc

SEQ ID NO: 2910 - protein, 12 aa, synthetic construct
  REGION 1..12: note = Description of Artificial Sequence: Synthetic peptide
RASQNIRSSFLA

SEQ ID NO: 2911 - DNA, 33 bp, synthetic construct; identical to SEQ ID NO: 109
  misc_feature 1..33: note = Description of Artificial Sequence: Synthetic oligonucleotide
  source 1..33: mol_type = other DNA

SEQ ID NO: 2912 - protein, 11 aa, synthetic construct
  REGION 1..11: note = Description of Artificial Sequence: Synthetic peptide
RASQGIRNDLG

SEQ ID NO: 2913 - DNA, 33 bp, synthetic construct
  misc_feature 1..33: note = Description of Artificial Sequence: Synthetic oligonucleotide
  source 1..33: mol_type = other DNA
cgggcaagtcagggcattaggaatgatttaggc

SEQ ID NO: 2914 - protein, 11 aa, synthetic construct
  REGION 1..11: note = Description of Artificial Sequence: Synthetic peptide
RASQGIRNDLG

SEQ ID NO: 2915 - DNA, 36 bp, synthetic construct
  misc_feature 1..36: note = Description of Artificial Sequence: Synthetic oligonucleotide
  source 1..36: mol_type = other DNA
agggccagtccgagtattaacagcggcttcttagcc

SEQ ID NO: 2916 - protein, 12 aa, synthetic construct
  REGION 1..12: note = Description of Artificial Sequence: Synthetic peptide
RASPSINSGFLA

SEQ ID NO: 2917 - DNA, 39 bp, synthetic construct
  misc_feature 1..39: note = Description of Artificial Sequence: Synthetic oligonucleotide
  source 1..39: mol_type = other DNA
tctggaagcaactccaacatcggaagtaatattgtaacc

SEQ ID NO: 2918 - protein, 13 aa, synthetic construct
  REGION 1..13: note = Description of Artificial Sequence: Synthetic peptide
SGSNSNIGSNIVT

SEQ ID NO: 2919 - DNA, 33 bp, synthetic construct
  misc_feature 1..33: note = Description of Artificial Sequence: Synthetic oligonucleotide
  source 1..33: mol_type = other DNA
agggccagtcagaatattaaaaacaacttagcc

SEQ ID NO: 2920 - protein, 11 aa, synthetic construct
  REGION 1..11: note = Description of Artificial Sequence: Synthetic peptide
RASQNIKNNLA

SEQ ID NO: 2921 - DNA, 36 bp, synthetic construct
  misc_feature 1..36: note = Description of Artificial Sequence: Synthetic oligonucleotide
  source 1..36: mol_type = other DNA
agggccagtcagagtgttagcagcaactacttagcc

SEQ ID NO: 2922 - protein, 12 aa, synthetic construct
  REGION 1..12: note = Description of Artificial Sequence: Synthetic peptide
RASQSVSSNYLA

SEQ ID NO: 2923 - DNA, 33 bp, synthetic construct
  misc_feature 1..33: note = Description of Artificial Sequence: Synthetic oligonucleotide
  source 1..33: mol_type = other DNA
cgggccagtcagaacattggtcgtagtttacac

SEQ ID NO: 2924 - protein, 11 aa, synthetic construct
  REGION 1..11: note = Description of Artificial Sequence: Synthetic peptide
RASQNIGRSLH

SEQ ID NO: 2925 - DNA, 33 bp, synthetic construct; identical to SEQ ID NO: 109
  misc_feature 1..33: note = Description of Artificial Sequence: Synthetic oligonucleotide
  source 1..33: mol_type = other DNA

SEQ ID NO: 2926 - protein, 11 aa, synthetic construct
  REGION 1..11: note = Description of Artificial Sequence: Synthetic peptide
RASQGIRNDLG

SEQ ID NO: 2927 - DNA, 33 bp, synthetic construct
  misc_feature 1..33: note = Description of Artificial Sequence: Synthetic oligonucleotide
  source 1..33: mol_type = other DNA
cgggcaagtcacaacattaacagctatttaaat

SEQ ID NO: 2928 - protein, 11 aa, synthetic construct
  REGION 1..11: note = Description of Artificial Sequence: Synthetic peptide
RASHNINSYLN

SEQ ID NO: 2929 - DNA, 48 bp, synthetic construct
  misc_feature 1..48: note = Description of Artificial Sequence: Synthetic oligonucleotide
  source 1..48: mol_type = other DNA
aggtctagtcagagcctcctccataataatagatacaaccatttggat

SEQ ID NO: 2930 - protein, 16 aa, synthetic construct
  REGION 1..16: note = Description of Artificial Sequence: Synthetic peptide
RSSQSLLHNNRYNHLD

SEQ ID NO: 2931 - DNA, 33 bp, synthetic construct; identical to SEQ ID NO: 109
  misc_feature 1..33: note = Description of Artificial Sequence: Synthetic oligonucleotide
  source 1..33: mol_type = other DNA

SEQ ID NO: 2932 - protein, 11 aa, synthetic construct
  REGION 1..11: note = Description of Artificial Sequence: Synthetic peptide
RASQGIRNDLG

SEQ ID NO: 2933 - DNA, 33 bp, synthetic construct
  misc_feature 1..33: note = Description of Artificial Sequence: Synthetic oligonucleotide
  source 1..33: mol_type = other DNA
aggtccagtcagaatattaaaagcaacttagcc

SEQ ID NO: 2934 - protein, 11 aa, synthetic construct
  REGION 1..11: note = Description of Artificial Sequence: Synthetic peptide
RSSQNIKSNLA

SEQ ID NO: 2935 - DNA, 33 bp, synthetic construct
  misc_feature 1..33: note = Description of Artificial Sequence: Synthetic oligonucleotide
  source 1..33: mol_type = other DNA
agggccagtcagagaattaacaacaacttagcc

SEQ ID NO: 2936 - protein, 11 aa, synthetic construct
  REGION 1..11: note = Description of Artificial Sequence: Synthetic peptide
RASQRINNNLA

SEQ ID NO: 2937 - DNA, 48 bp, synthetic construct
  misc_feature 1..48: note = Description of Artificial Sequence: Synthetic oligonucleotide
  source 1..48: mol_type = other DNA
aggtctagtcagagcctcctgcataataataaatacaaccatttggat

SEQ ID NO: 2938 - protein, 16 aa, synthetic construct
  REGION 1..16: note = Description of Artificial Sequence: Synthetic peptide
RSSQSLLHNNKYNHLD

SEQ ID NO: 2939 - DNA, 36 bp, synthetic construct
  misc_feature 1..36: note = Description of Artificial Sequence: Synthetic oligonucleotide
  source 1..36: mol_type = other DNA
agggccagtcagagtgttaacagcggctacttagcc

SEQ ID NO: 2940 - protein, 12 aa, synthetic construct
  REGION 1..12: note = Description of Artificial Sequence: Synthetic peptide
RASQSVNSGYLA

SEQ ID NO: 2941 - DNA, 33 bp, synthetic construct
  misc_feature 1..33: note = Description of Artificial Sequence: Synthetic oligonucleotide
  source 1..33: mol_type = other DNA
agggccagtcagagtgttctgaacaacttagcc

SEQ ID NO: 2942 - protein, 11 aa, synthetic construct
  REGION 1..11: note = Description of Artificial Sequence: Synthetic peptide
RASQSVLNNLA

SEQ ID NO: 2943 - DNA, 33 bp, synthetic construct; identical to SEQ ID NO: 2703
  misc_feature 1..33: note = Description of Artificial Sequence: Synthetic oligonucleotide
  source 1..33: mol_type = other DNA

SEQ ID NO: 2944 - protein, 11 aa, synthetic construct
  REGION 1..11: note = Description of Artificial Sequence: Synthetic peptide
RASQGIGNYLA

SEQ ID NO: 2945 - DNA, 33 bp, synthetic construct; identical to SEQ ID NO: 2927
  misc_feature 1..33: note = Description of Artificial Sequence: Synthetic oligonucleotide
  source 1..33: mol_type = other DNA

SEQ ID NO: 2946 - protein, 11 aa, synthetic construct
  REGION 1..11: note = Description of Artificial Sequence: Synthetic peptide
RASHNINSYLN

SEQ ID NO: 2947 - DNA, 33 bp, synthetic construct; identical to SEQ ID NO: 113
  misc_feature 1..33: note = Description of Artificial Sequence: Synthetic oligonucleotide
  source 1..33: mol_type = other DNA

SEQ ID NO: 2948 - protein, 11 aa, synthetic construct
  REGION 1..11: note = Description of Artificial Sequence: Synthetic peptide
RASQGIRHDLG

SEQ ID NO: 2949 - DNA, 33 bp, synthetic construct; identical to SEQ ID NO: 109
  misc_feature 1..33: note = Description of Artificial Sequence: Synthetic oligonucleotide
  source 1..33: mol_type = other DNA

SEQ ID NO: 2950 - protein, 11 aa, synthetic construct
  REGION 1..11: note = Description of Artificial Sequence: Synthetic peptide
RASQGIRNDLG

SEQ ID NO: 2951 - DNA, 51 bp, synthetic construct
  misc_feature 1..51: note = Description of Artificial Sequence: Synthetic oligonucleotide
  source 1..51: mol_type = other DNA
aagtccagccagagtgtttttttccactcgaacaataagaactacttagct

SEQ ID NO: 2952 - protein, 17 aa, synthetic construct
  REGION 1..17: note = Description of Artificial Sequence: Synthetic peptide
KSSQSVFFHSNNKNYLA

SEQ ID NO: 2953 - DNA, 51 bp, synthetic construct
  misc_feature 1..51: note = Description of Artificial Sequence: Synthetic oligonucleotide
  source 1..51: mol_type = other DNA
aagtccagccagagtgttttatacagttccaacaataagaactacttagtt

SEQ ID NO: 2954 - protein, 17 aa, synthetic construct
  REGION 1..17: note = Description of Artificial Sequence: Synthetic peptide
KSSQSVLYSSNNKNYLV

SEQ ID NO: 2955 - DNA, 33 bp, synthetic construct; identical to SEQ ID NO: 109
  misc_feature 1..33: note = Description of Artificial Sequence: Synthetic oligonucleotide
  source 1..33: mol_type = other DNA

SEQ ID NO: 2956 - protein, 11 aa, synthetic construct
  REGION 1..11: note = Description of Artificial Sequence: Synthetic peptide
RASQGIRNDLG

SEQ ID NO: 2957 - DNA, 33 bp, synthetic construct; identical to SEQ ID NO: 2927
  misc_feature 1..33: note = Description of Artificial Sequence: Synthetic oligonucleotide
  source 1..33: mol_type = other DNA

SEQ ID NO: 2958 - protein, 11 aa, synthetic construct
  REGION 1..11: note = Description of Artificial Sequence: Synthetic peptide
RASHNINSYLN

SEQ ID NO: 2959 - DNA, 33 bp, synthetic construct
  misc_feature 1..33: note = Description of Artificial Sequence: Synthetic oligonucleotide
  source 1..33: mol_type = other DNA
agggccagtcagaatattaaaagcaacttagcc

SEQ ID NO: 2960 - protein, 11 aa, synthetic construct
  REGION 1..11: note = Description of Artificial Sequence: Synthetic peptide
RASQNIKSNLA

SEQ ID NO: 2961 - DNA, 33 bp, synthetic construct
  misc_feature 1..33: note = Description of Artificial Sequence: Synthetic oligonucleotide
  source 1..33: mol_type = other DNA
cgggcaagtcggagcgttcacacctatttaaat

SEQ ID NO: 2962 - protein, 11 aa, synthetic construct
  REGION 1..11: note = Description of Artificial Sequence: Synthetic peptide
RASRSVHTYLN

SEQ ID NO: 2963 - DNA, 33 bp, synthetic construct; identical to SEQ ID NO: 2561
  misc_feature 1..33: note = Description of Artificial Sequence: Synthetic oligonucleotide
  source 1..33: mol_type = other DNA

SEQ ID NO: 2964 - protein, 11 aa, synthetic construct
  REGION 1..11: note = Description of Artificial Sequence: Synthetic peptide
RTSQGIGNYLA

SEQ ID NO: 2965 - DNA, 33 bp, synthetic construct
  misc_feature 1..33: note = Description of Artificial Sequence: Synthetic oligonucleotide
  source 1..33: mol_type = other DNA
cgggcgagtcagggcataagtaatcatttagcc

SEQ ID NO: 2966 - protein, 11 aa, synthetic construct
  REGION 1..11: note = Description of Artificial Sequence: Synthetic peptide
RASQGISNHLA

SEQ ID NO: 2967 - DNA, 33 bp, synthetic construct; identical to SEQ ID NO: 109
  misc_feature 1..33: note = Description of Artificial Sequence: Synthetic oligonucleotide
  source 1..33: mol_type = other DNA

SEQ ID NO: 2968 - protein, 11 aa, synthetic construct
  REGION 1..11: note = Description of Artificial Sequence: Synthetic peptide
RASQGIRNDLG

SEQ ID NO: 2969 - DNA, 36 bp, synthetic construct
  misc_feature 1..36: note = Description of Artificial Sequence: Synthetic oligonucleotide
  source 1..36: mol_type = other DNA
agggccagtcagaatgttagttacagctacttagcc

SEQ ID NO: 2970 - protein, 12 aa, synthetic construct
  REGION 1..12: note = Description of Artificial Sequence: Synthetic peptide
RASQNVSYSYLA

SEQ ID NO: 2971 - DNA, 33 bp, synthetic construct
  misc_feature 1..33: note = Description of Artificial Sequence: Synthetic oligonucleotide
  source 1..33: mol_type = other DNA
cgggcgagtcaggccattagtaatcatttagcc

SEQ ID NO: 2972 - protein, 11 aa, synthetic construct
  REGION 1..11: note = Description of Artificial Sequence: Synthetic peptide
RASQAISNHLA

SEQ ID NO: 2973 - DNA, 33 bp, synthetic construct; identical to SEQ ID NO: 2959
  misc_feature 1..33: note = Description of Artificial Sequence: Synthetic oligonucleotide
  source 1..33: mol_type = other DNA

SEQ ID NO: 2974 - protein, 11 aa, synthetic construct
  REGION 1..11: note = Description of Artificial Sequence: Synthetic peptide
RASQNIKSNLA

SEQ ID NO: 2975 - DNA, 33 bp, synthetic construct; identical to SEQ ID NO: 2703
  misc_feature 1..33: note = Description of Artificial Sequence: Synthetic oligonucleotide
  source 1..33: mol_type = other DNA

SEQ ID NO: 2976 - protein, 11 aa, synthetic construct
  REGION 1..11: note = Description of Artificial Sequence: Synthetic peptide
RASQGIGNYLA

SEQ ID NO: 2977 - DNA, 36 bp, synthetic construct
  misc_feature 1..36: note = Description of Artificial Sequence: Synthetic oligonucleotide
  source 1..36: mol_type = other DNA
agggccagtcagagtgttttcagcaactacttagcc

SEQ ID NO: 2978 - protein, 12 aa, synthetic construct
  REGION 1..12: note = Description of Artificial Sequence: Synthetic peptide
RASQSVFSNYLA

SEQ ID NO: 2979 - DNA, 48 bp, synthetic construct
  misc_feature 1..48: note = Description of Artificial Sequence: Synthetic oligonucleotide
  source 1..48: mol_type = other DNA
aggtctagtcagagcctcctgcataataatagatacaaccatttggat

SEQ ID NO: 2980 - protein, 16 aa, synthetic construct
  REGION 1..16: note = Description of Artificial Sequence: Synthetic peptide
RSSQSLLHNNRYNHLD

SEQ ID NO: 2981 - DNA, 33 bp, synthetic construct
  misc_feature 1..33: note = Description of Artificial Sequence: Synthetic oligonucleotide
  source 1..33: mol_type = other DNA
agggccagtcagagtgttaatagctacttagcc

SEQ ID NO: 2982 - protein, 11 aa, synthetic construct
  REGION 1..11: note = Description of Artificial Sequence: Synthetic peptide
RASQSVNSYLA

SEQ ID NO: 2983 - DNA, 33 bp, synthetic construct; identical to SEQ ID NO: 109
  misc_feature 1..33: note = Description of Artificial Sequence: Synthetic oligonucleotide
  source 1..33: mol_type = other DNA

SEQ ID NO: 2984 - protein, 11 aa, synthetic construct
  REGION 1..11: note = Description of Artificial Sequence: Synthetic peptide
RASQGIRNDLG

SEQ ID NO: 2985 - DNA, 36 bp, synthetic construct; identical to SEQ ID NO: 1845
  misc_feature 1..36: note = Description of Artificial Sequence: Synthetic oligonucleotide
  source 1..36: mol_type = other DNA

SEQ ID NO: 2986 - protein, 12 aa, synthetic construct
  REGION 1..12: note = Description of Artificial Sequence: Synthetic peptide
RASQSINSNYLA

SEQ ID NO: 2987 - DNA, 33 bp, synthetic construct; identical to SEQ ID NO: 2927
  misc_feature 1..33: note = Description of Artificial Sequence: Synthetic oligonucleotide
  source 1..33: mol_type = other DNA

SEQ ID NO: 2988 - protein, 11 aa, synthetic construct
  REGION 1..11: note = Description of Artificial Sequence: Synthetic peptide
RASHNINSYLN

SEQ ID NO: 2989 - DNA, 33 bp, synthetic construct
  misc_feature 1..33: note = Description of Artificial Sequence: Synthetic oligonucleotide
  source 1..33: mol_type = other DNA
cgggccagtcagagcattggtcgtagcttacac

SEQ ID NO: 2990 - protein, 11 aa, synthetic construct
  REGION 1..11: note = Description of Artificial Sequence: Synthetic peptide
RASQSIGRSLH

SEQ ID NO: 2991 - DNA, 33 bp, synthetic construct; identical to SEQ ID NO: 2927
  misc_feature 1..33: note = Description of Artificial Sequence: Synthetic oligonucleotide
  source 1..33: mol_type = other DNA

SEQ ID NO: 2992 - protein, 11 aa, synthetic construct
  REGION 1..11: note = Description of Artificial Sequence: Synthetic peptide
RASHNINSYLN

SEQ ID NO: 2993 - DNA, 33 bp, synthetic construct; identical to SEQ ID NO: 401
  misc_feature 1..33: note = Description of Artificial Sequence: Synthetic oligonucleotide
  source 1..33: mol_type = other DNA

SEQ ID NO: 2994 - protein, 11 aa, synthetic construct
  REGION 1..11: note = Description of Artificial Sequence: Synthetic peptide
RASQGIRNYLA

SEQ ID NO: 2995 - DNA, 33 bp, synthetic construct; identical to SEQ ID NO: 109
  misc_feature 1..33: note = Description of Artificial Sequence: Synthetic oligonucleotide
  source 1..33: mol_type = other DNA

SEQ ID NO: 2996 - protein, 11 aa, synthetic construct
  REGION 1..11: note = Description of Artificial Sequence: Synthetic peptide
RASQGIRNDLG

SEQ ID NO: 2997 - DNA, 33 bp, synthetic construct; identical to SEQ ID NO: 113
  misc_feature 1..33: note = Description of Artificial Sequence: Synthetic oligonucleotide
  source 1..33: mol_type = other DNA

SEQ ID NO: 2998 - protein, 11 aa, synthetic construct
  REGION 1..11: note = Description of Artificial Sequence: Synthetic peptide
RASQGIRHDLG

SEQ ID NO: 2999 - DNA, 48 bp, synthetic construct; identical to SEQ ID NO: 2937
  misc_feature 1..48: note = Description of Artificial Sequence: Synthetic oligonucleotide
  source 1..48: mol_type = other DNA

SEQ ID NO: 3000 - protein, 16 aa, synthetic construct
  REGION 1..16: note = Description of Artificial Sequence: Synthetic peptide
RSSQSLLHNNKYNHLD

SEQ ID NO: 3001 - DNA, 36 bp, synthetic construct; identical to SEQ ID NO: 2921
  misc_feature 1..36: note = Description of Artificial Sequence: Synthetic oligonucleotide
  source 1..36: mol_type = other DNA

SEQ ID NO: 3002 - protein, 12 aa, synthetic construct
  REGION 1..12: note = Description of Artificial Sequence: Synthetic peptide
RASQSVSSNYLA

SEQ ID NO: 3003 - DNA, 33 bp, synthetic construct; identical to SEQ ID NO: 2927
  misc_feature 1..33: note = Description of Artificial Sequence: Synthetic oligonucleotide
  source 1..33: mol_type = other DNA

SEQ ID NO: 3004 - protein, 11 aa, synthetic construct
  REGION 1..11: note = Description of Artificial Sequence: Synthetic peptide
RASHNINSYLN

SEQ ID NO: 3005 - DNA, 36 bp, synthetic construct
  misc_feature 1..36: note = Description of Artificial Sequence: Synthetic oligonucleotide
  source 1..36: mol_type = other DNA
agggccagtcagagtgttagcaacaactacttagcc

SEQ ID NO: 3006 - protein, 12 aa, synthetic construct
  REGION 1..12: note = Description of Artificial Sequence: Synthetic peptide
RASQSVSNNYLA

SEQ ID NO: 3007 - DNA, 33 bp, synthetic construct; identical to SEQ ID NO: 2927
  misc_feature 1..33: note = Description of Artificial Sequence: Synthetic oligonucleotide
  source 1..33: mol_type = other DNA

SEQ ID NO: 3008 - protein, 11 aa, synthetic construct
  REGION 1..11: note = Description of Artificial Sequence: Synthetic peptide
RASHNINSYLN

SEQ ID NO: 3009 - DNA, 33 bp, synthetic construct; identical to SEQ ID NO: 109
  misc_feature 1..33: note = Description of Artificial Sequence: Synthetic oligonucleotide
  source 1..33: mol_type = other DNA

SEQ ID NO: 3010 - protein, 11 aa, synthetic construct
  REGION 1..11: note = Description of Artificial Sequence: Synthetic peptide
RASQGIRNDLG

SEQ ID NO: 3011 - DNA, 33 bp, synthetic construct; identical to SEQ ID NO: 113
  misc_feature 1..33: note = Description of Artificial Sequence: Synthetic oligonucleotide
  source 1..33: mol_type = other DNA

SEQ ID NO: 3012 - protein, 11 aa, synthetic construct
  REGION 1..11: note = Description of Artificial Sequence: Synthetic peptide
RASQGIRHDLG

SEQ ID NO: 3013 - DNA, 33 bp, synthetic construct; identical to SEQ ID NO: 93
  misc_feature 1..33: note = Description of Artificial Sequence: Synthetic oligonucleotide
  source 1..33: mol_type = other DNA

SEQ ID NO: 3014 - protein, 11 aa, synthetic construct
  REGION 1..11: note = Description of Artificial Sequence: Synthetic peptide
RTSQGIRNDLG

SEQ ID NO: 3015 - DNA, 33 bp, synthetic construct
  misc_feature 1..33: note = Description of Artificial Sequence: Synthetic oligonucleotide
  source 1..33: mol_type = other DNA
agggccagtcagagtgttaaaagcaacttagcc

SEQ ID NO: 3016 - protein, 11 aa, synthetic construct
  REGION 1..11: note = Description of Artificial Sequence: Synthetic peptide
RASQSVKSNLA

SEQ ID NO: 3017 - DNA, 33 bp, synthetic construct; identical to SEQ ID NO: 2927
  misc_feature 1..33: note = Description of Artificial Sequence: Synthetic oligonucleotide
  source 1..33: mol_type = other DNA

SEQ ID NO: 3018 - protein, 11 aa, synthetic construct
  REGION 1..11: note = Description of Artificial Sequence: Synthetic peptide
RASHNINSYLN

SEQ ID NO: 3019 - DNA, 33 bp, synthetic construct
  misc_feature 1..33: note = Description of Artificial Sequence: Synthetic oligonucleotide
  source 1..33: mol_type = other DNA
cgggcgagtcagggtattagcatctggttagcc

SEQ ID NO: 3020 - protein, 11 aa, synthetic construct
  REGION 1..11: note = Description of Artificial Sequence: Synthetic peptide
RASQGISIWLA

SEQ ID NO: 3021 - DNA, 48 bp, synthetic construct
  misc_feature 1..48: note = Description of Artificial Sequence: Synthetic oligonucleotide
  source 1..48: mol_type = other DNA
aggtctagtcagagcctcctgcattataatggacacaactttttggat

SEQ ID NO: 3022 - protein, 16 aa, synthetic construct
  REGION 1..16: note = Description of Artificial Sequence: Synthetic peptide
RSSQSLLHYNGHNFLD

SEQ ID NO: 3023 - DNA, 33 bp, synthetic construct; identical to SEQ ID NO: 2703
  misc_feature 1..33: note = Description of Artificial Sequence: Synthetic oligonucleotide
  source 1..33: mol_type = other DNA

SEQ ID NO: 3024 - protein, 11 aa, synthetic construct
  REGION 1..11: note = Description of Artificial Sequence: Synthetic peptide
RASQGIGNYLA

SEQ ID NO: 3025 - DNA, 33 bp, synthetic construct
  misc_feature 1..33: note = Description of Artificial Sequence: Synthetic oligonucleotide
  source 1..33: mol_type = other DNA
cgggcgagtcaggccattgggaaacatttagcc

SEQ ID NO: 3026 - protein, 11 aa, synthetic construct
  REGION 1..11: note = Description of Artificial Sequence: Synthetic peptide
RASQAIGKHLA

SEQ ID NO: 3027 - DNA, 36 bp, synthetic construct
  misc_feature 1..36: note = Description of Artificial Sequence: Synthetic oligonucleotide
  source 1..36: mol_type = other DNA
agggccagtcagagtgttagcagcagcttcttagcc

SEQ ID NO: 3028 - protein, 12 aa, synthetic construct
  REGION 1..12: note = Description of Artificial Sequence: Synthetic peptide
RASQSVSSSFLA

SEQ ID NO: 3029 - DNA, 33 bp, synthetic construct; identical to SEQ ID NO: 1727
  misc_feature 1..33: note = Description of Artificial Sequence: Synthetic oligonucleotide
  source 1..33: mol_type = other DNA

SEQ ID NO: 3030 - protein, 11 aa, synthetic construct
  REGION 1..11: note = Description of Artificial Sequence: Synthetic peptide
RASQGIGKYLA

SEQ ID NO: 3031 - DNA, 33 bp, synthetic construct
  misc_feature 1..33: note = Description of Artificial Sequence: Synthetic oligonucleotide
  source 1..33: mol_type = other DNA
cgggcgagtcagggcattagcagatatttagcc

SEQ ID NO: 3032 - protein, 11 aa, synthetic construct
  REGION 1..11: note = Description of Artificial Sequence: Synthetic peptide
RASQGISRYLA

SEQ ID NO: 3033 - DNA, 48 bp, synthetic construct; identical to SEQ ID NO: 993
  misc_feature 1..48: note = Description of Artificial Sequence: Synthetic oligonucleotide
  source 1..48: mol_type = other DNA

SEQ ID NO: 3034 - protein, 16 aa, synthetic construct
  REGION 1..16: note = Description of Artificial Sequence: Synthetic peptide
RSSQSLLHSNGYNYLD

SEQ ID NO: 3035 - DNA, 33 bp, synthetic construct
  misc_feature 1..33: note = Description of Artificial Sequence: Synthetic oligonucleotide
  source 1..33: mol_type = other DNA
cgggcgagtcagggcattagcaatcatttagcc

SEQ ID NO: 3036 - protein, 11 aa, synthetic construct
  REGION 1..11: note = Description of Artificial Sequence: Synthetic peptide
RASQGISNHLA

SEQ ID NO: 3037 - DNA, 33 bp, synthetic construct; identical to SEQ ID NO: 3035
  misc_feature 1..33: note = Description of Artificial Sequence: Synthetic oligonucleotide
  source 1..33: mol_type = other DNA

SEQ ID NO: 3038 - protein, 11 aa, synthetic construct
  REGION 1..11: note = Description of Artificial Sequence: Synthetic peptide
RASQGISNHLA

SEQ ID NO: 3039 - DNA, 33 bp, synthetic construct
  misc_feature 1..33: note = Description of Artificial Sequence: Synthetic oligonucleotide
  source 1..33: mol_type = other DNA
cgggcgagtcagggcattagcagttatttagcc

SEQ ID NO: 3040 - protein, 11 aa, synthetic construct
  REGION 1..11: note = Description of Artificial Sequence: Synthetic peptide
RASQGISSYLA

SEQ ID NO: 3041 - DNA, 33 bp, synthetic construct; identical to SEQ ID NO: 1783
  misc_feature 1..33: note = Description of Artificial Sequence: Synthetic oligonucleotide
  source 1..33: mol_type = other DNA

SEQ ID NO: 3042 - protein, 11 aa, synthetic construct
  REGION 1..11: note = Description of Artificial Sequence: Synthetic peptide
RASQSVASSLA

SEQ ID NO: 3043 - DNA, 33 bp, synthetic construct
  misc_feature 1..33: note = Description of Artificial Sequence: Synthetic oligonucleotide
  source 1..33: mol_type = other DNA
cgggcgagtcagggcattagcaattatttagac

SEQ ID NO: 3044 - protein, 11 aa, synthetic construct
  REGION 1..11: note = Description of Artificial Sequence: Synthetic peptide
RASQGISNYLD

SEQ ID NO: 3045 - DNA, 33 bp, synthetic construct; identical to SEQ ID NO: 109
  misc_feature 1..33: note = Description of Artificial Sequence: Synthetic oligonucleotide
  source 1..33: mol_type = other DNA

SEQ ID NO: 3046 - protein, 11 aa, synthetic construct
  REGION 1..11: note = Description of Artificial Sequence: Synthetic peptide
RASQGIRNDLG

SEQ ID NO: 3047 - DNA, 33 bp, synthetic construct; identical to SEQ ID NO: 3025
  misc_feature 1..33: note = Description of Artificial Sequence: Synthetic oligonucleotide
  source 1..33: mol_type = other DNA

SEQ ID NO: 3048 - protein, 11 aa, synthetic construct
  REGION 1..11: note = Description of Artificial Sequence: Synthetic peptide
RASQAIGKHLA

SEQ ID NO: 3049 - DNA, 33 bp, synthetic construct; identical to SEQ ID NO: 3035
  misc_feature 1..33: note = Description of Artificial Sequence: Synthetic oligonucleotide
  source 1..33: mol_type = other DNA

SEQ ID NO: 3050 - protein, 11 aa, synthetic construct
  REGION 1..11: note = Description of Artificial Sequence: Synthetic peptide
RASQGISNHLA

SEQ ID NO: 3051 - DNA, 33 bp, synthetic construct; identical to SEQ ID NO: 1727
  misc_feature 1..33: note = Description of Artificial Sequence: Synthetic oligonucleotide
  source 1..33: mol_type = other DNA

SEQ ID NO: 3052 - protein, 11 aa, synthetic construct
  REGION 1..11: note = Description of Artificial Sequence: Synthetic peptide
RASQGIGKYLA

SEQ ID NO: 3053 - DNA, 33 bp, synthetic construct
  misc_feature 1..33: note = Description of Artificial Sequence: Synthetic oligonucleotide
  source 1..33: mol_type = other DNA
cgggcgagtcaggccattaggaattatttagcc

SEQ ID NO: 3054 - protein, 11 aa, synthetic construct
  REGION 1..11: note = Description of Artificial Sequence: Synthetic peptide
RASQAIRNYLA

SEQ ID NO: 3055 - DNA, 33 bp, synthetic construct; identical to SEQ ID NO: 3025
  misc_feature 1..33: note = Description of Artificial Sequence: Synthetic oligonucleotide
  source 1..33: mol_type = other DNA

SEQ ID NO: 3056 - protein, 11 aa, synthetic construct
  REGION 1..11: note = Description of Artificial Sequence: Synthetic peptide
RASQAIGKHLA

SEQ ID NO: 3057 - DNA, 33 bp, synthetic construct; identical to SEQ ID NO: 3035
  misc_feature 1..33: note = Description of Artificial Sequence: Synthetic oligonucleotide
  source 1..33: mol_type = other DNA

SEQ ID NO: 3058 - protein, 11 aa, synthetic construct
  REGION 1..11: note = Description of Artificial Sequence: Synthetic peptide
RASQGISNHLA

SEQ ID NO: 3059 - DNA, 51 bp, synthetic construct
  misc_feature 1..51: note = Description of Artificial Sequence: Synthetic oligonucleotide
  source 1..51: mol_type = other DNA
aagtccagccagaatgttttagacatctccaacaataagaattccttaggt

SEQ ID NO: 3060 - protein, 17 aa, synthetic construct
  REGION 1..17: note = Description of Artificial Sequence: Synthetic peptide
KSSQNVLDISNNKNSLG

SEQ ID NO: 3061 - DNA, 51 bp, synthetic construct
  misc_feature 1..51: note = Description of Artificial Sequence: Synthetic oligonucleotide
  source 1..51: mol_type = other DNA
aagtccagccagaatgttttaaagacctccaacaataggaactacttagct

SEQ ID NO: 3062 - protein, 17 aa, synthetic construct
  REGION 1..17: note = Description of Artificial Sequence: Synthetic peptide
KSSQNVLKTSNNRNYLA

SEQ ID NO: 3063 - DNA, 33 bp, synthetic construct; identical to SEQ ID NO: 2703
  misc_feature 1..33: note = Description of Artificial Sequence: Synthetic oligonucleotide
  source 1..33: mol_type = other DNA

SEQ ID NO: 3064 - protein, 11 aa, synthetic construct
  REGION 1..11: note = Description of Artificial Sequence: Synthetic peptide
RASQGIGNYLA

SEQ ID NO: 3065 - DNA, 33 bp, synthetic construct; identical to SEQ ID NO: 105
  misc_feature 1..33: note = Description of Artificial Sequence: Synthetic oligonucleotide
  source 1..33: mol_type = other DNA

SEQ ID NO: 3066 - protein, 11 aa, synthetic construct
  REGION 1..11: note = Description of Artificial Sequence: Synthetic peptide
RASQGISNYLA

SEQ ID NO: 3067 - DNA, 33 bp, synthetic construct
  misc_feature 1..33: note = Description of Artificial Sequence: Synthetic oligonucleotide
  source 1..33: mol_type = other DNA
cgggccagtcagagcattggtgttagcttacac

SEQ ID NO: 3068 - protein, 11 aa, synthetic construct
  REGION 1..11: note = Description of Artificial Sequence: Synthetic peptide
RASQSIGVSLH

SEQ ID NO: 3069 - DNA, 33 bp, synthetic construct; identical to SEQ ID NO: 3035
  misc_feature 1..33: note = Description of Artificial Sequence: Synthetic oligonucleotide
  source 1..33: mol_type = other DNA

SEQ ID NO: 3070 - protein, 11 aa, synthetic construct
  REGION 1..11: note = Description of Artificial Sequence: Synthetic peptide
RASQGISNHLA

SEQ ID NO: 3071 - DNA, 33 bp, synthetic construct; identical to SEQ ID NO: 109
  misc_feature 1..33: note = Description of Artificial Sequence: Synthetic oligonucleotide
  source 1..33: mol_type = other DNA

SEQ ID NO: 3072 - protein, 11 aa, synthetic construct
  REGION 1..11: note = Description of Artificial Sequence: Synthetic peptide
RASQGIRNDLG

SEQ ID NO: 3073 - DNA, 33 bp, synthetic construct; identical to SEQ ID NO: 109
  misc_feature 1..33: note = Description of Artificial Sequence: Synthetic oligonucleotide
  source 1..33: mol_type = other DNA

SEQ ID NO: 3074 - protein, 11 aa, synthetic construct
  REGION 1..11: note = Description of Artificial Sequence: Synthetic peptide
RASQGIRNDLG

SEQ ID NO: 3075 - DNA, 33 bp, synthetic construct; identical to SEQ ID NO: 109
  misc_feature 1..33: note = Description of Artificial Sequence: Synthetic oligonucleotide
  source 1..33: mol_type = other DNA

SEQ ID NO: 3076 - protein, 11 aa, synthetic construct
  REGION 1..11: note = Description of Artificial Sequence: Synthetic peptide
RASQGIRNDLG

SEQ ID NO: 3077 - DNA, 33 bp, synthetic construct; identical to SEQ ID NO: 109
  misc_feature 1..33: note = Description of Artificial Sequence: Synthetic oligonucleotide
  source 1..33: mol_type = other DNA

SEQ ID NO: 3078 - protein, 11 aa, synthetic construct
  REGION 1..11: note = Description of Artificial Sequence: Synthetic peptide
RASQGIRNDLG

SEQ ID NO: 3079 - DNA, 33 bp, synthetic construct; identical to SEQ ID NO: 3035
  misc_feature 1..33: note = Description of Artificial Sequence: Synthetic oligonucleotide
  source 1..33: mol_type = other DNA

SEQ ID NO: 3080 - protein, 11 aa, synthetic construct
  REGION 1..11: note = Description of Artificial Sequence: Synthetic peptide
RASQGISNHLA

SEQ ID NO: 3081 - DNA, 33 bp, synthetic construct; identical to SEQ ID NO: 3035
  misc_feature 1..33: note = Description of Artificial Sequence: Synthetic oligonucleotide
  source 1..33: mol_type = other DNA

SEQ ID NO: 3082 - protein, 11 aa, synthetic construct
  REGION 1..11: note = Description of Artificial Sequence: Synthetic peptide
RASQGISNHLA

SEQ ID NO: 3083 - DNA, 33 bp, synthetic construct
  misc_feature 1..33: note = Description of Artificial Sequence: Synthetic oligonucleotide
  source 1..33: mol_type = other DNA
cgggccagtcagagcatcggtgttagcttacac

SEQ ID NO: 3084 - protein, 11 aa, synthetic construct
  REGION 1..11: note = Description of Artificial Sequence: Synthetic peptide
RASQSIGVSLH

SEQ ID NO: 3085 - DNA, 36 bp, synthetic construct
  misc_feature 1..36: note = Description of Artificial Sequence: Synthetic oligonucleotide
  source 1..36: mol_type = other DNA
agggccagtcagaggattaccaccaacttcttagct

SEQ ID NO: 3086 - protein, 12 aa, synthetic construct
  REGION 1..12: note = Description of Artificial Sequence: Synthetic peptide
RASQRITTNFLA

SEQ ID NO: 3087 - DNA, 33 bp, synthetic construct; identical to SEQ ID NO: 109
  misc_feature 1..33: note = Description of Artificial Sequence: Synthetic oligonucleotide
  source 1..33: mol_type = other DNA

SEQ ID NO: 3088 - protein, 11 aa, synthetic construct
  REGION 1..11: note = Description of Artificial Sequence: Synthetic peptide
RASQGIRNDLG

SEQ ID NO: 3089 - DNA, 33 bp, synthetic construct
  misc_feature 1..33: note = Description of Artificial Sequence: Synthetic oligonucleotide
  source 1..33: mol_type = other DNA
cggacgagtcaggacattggcaattatttagcc

SEQ ID NO: 3090 - protein, 11 aa, synthetic construct
  REGION 1..11: note = Description of Artificial Sequence: Synthetic peptide
RTSQDIGNYLA

SEQ ID NO: 3091 - DNA, 36 bp, synthetic construct
  misc_feature 1..36: note = Description of Artificial Sequence: Synthetic oligonucleotide
  source 1..36: mol_type = other DNA
agggccagtcagagtgttagcagcagcttcttagct

SEQ ID NO: 3092 - protein, 12 aa, synthetic construct
  REGION 1..12: note = Description of Artificial Sequence: Synthetic peptide
RASQSVSSSFLA

SEQ ID NO: 3093 - DNA, 33 bp, synthetic construct
  misc_feature 1..33: note = Description of Artificial Sequence: Synthetic oligonucleotide
  source 1..33: mol_type = other DNA
agggccagtcagagtgttaacaacaacttagcc

SEQ ID NO: 3094 - protein, 11 aa, synthetic construct
  REGION 1..11: note = Description of Artificial Sequence: Synthetic peptide
RASQSVNNNLA

SEQ ID NO: 3095 - DNA, 36 bp, synthetic construct; identical to SEQ ID NO: 3027
  misc_feature 1..36: note = Description of Artificial Sequence: Synthetic oligonucleotide
  source 1..36: mol_type = other DNA

SEQ ID NO: 3096 - protein, 12 aa, synthetic construct
  REGION 1..12: note = Description of Artificial Sequence: Synthetic peptide
RASQSVSSSFLA

SEQ ID NO: 3097 - DNA, 33 bp, synthetic construct; identical to SEQ ID NO: 109
  misc_feature 1..33: note = Description of Artificial Sequence: Synthetic oligonucleotide
  source 1..33: mol_type = other DNA

SEQ ID NO: 3098 - protein, 11 aa, synthetic construct
  REGION 1..11: note = Description of Artificial Sequence: Synthetic peptide
RASQGIRNDLG

SEQ ID NO: 3099 - DNA, 33 bp, synthetic construct; identical to SEQ ID NO: 109
  misc_feature 1..33: note = Description of Artificial Sequence: Synthetic oligonucleotide
  source 1..33: mol_type = other DNA

SEQ ID NO: 3100 - protein, 11 aa, synthetic construct
  REGION 1..11: note = Description of Artificial Sequence: Synthetic peptide
RASQGIRNDLG

SEQ ID NO: 3101 - DNA, 33 bp, synthetic construct; identical to SEQ ID NO: 2609
  misc_feature 1..33: note = Description of Artificial Sequence: Synthetic oligonucleotide
  source 1..33: mol_type = other DNA

SEQ ID NO: 3102 - protein, 11 aa, synthetic construct
  REGION 1..11: note = Description of Artificial Sequence: Synthetic peptide
RASQSIGSSLH

SEQ ID NO: 3103 - DNA, 33 bp, synthetic construct; identical to SEQ ID NO: 109
  misc_feature 1..33: note = Description of Artificial Sequence: Synthetic oligonucleotide
  source 1..33: mol_type = other DNA

SEQ ID NO: 3104 - protein, 11 aa, synthetic construct
  REGION 1..11: note = Description of Artificial Sequence: Synthetic peptide
RASQGIRNDLG

SEQ ID NO: 3105 - DNA, 33 bp, synthetic construct; identical to SEQ ID NO: 2703
  misc_feature 1..33: note = Description of Artificial Sequence: Synthetic oligonucleotide
  source 1..33: mol_type = other DNA

SEQ ID NO: 3106 - protein, 11 aa, synthetic construct
  REGION 1..11: note = Description of Artificial Sequence: Synthetic peptide
RASQGIGNYLA

SEQ ID NO: 3107 - DNA, 33 bp, synthetic construct; identical to SEQ ID NO: 3025
  misc_feature 1..33: note = Description of Artificial Sequence: Synthetic oligonucleotide
  source 1..33: mol_type = other DNA

SEQ ID NO: 3108 - protein, 11 aa, synthetic construct
  REGION 1..11: note = Description of Artificial Sequence: Synthetic peptide
RASQAIGKHLA

SEQ ID NO: 3109 - DNA, 33 bp, synthetic construct; identical to SEQ ID NO: 109
  misc_feature 1..33: note = Description of Artificial Sequence: Synthetic oligonucleotide
  source 1..33: mol_type = other DNA

SEQ ID NO: 3110 - protein, 11 aa, synthetic construct
  REGION 1..11: note = Description of Artificial Sequence: Synthetic peptide
RASQGIRNDLG

SEQ ID NO: 3111 - DNA, 33 bp, synthetic construct; identical to SEQ ID NO: 109
  misc_feature 1..33: note = Description of Artificial Sequence: Synthetic oligonucleotide
  source 1..33: mol_type = other DNA

SEQ ID NO: 3112 - protein, 11 aa, synthetic construct
  REGION 1..11: note = Description of Artificial Sequence: Synthetic peptide
RASQGIRNDLG

SEQ ID NO: 3113 - DNA, 33 bp, synthetic construct; identical to SEQ ID NO: 109
  misc_feature 1..33: note = Description of Artificial Sequence: Synthetic oligonucleotide
  source 1..33: mol_type = other DNA

SEQ ID NO: 3114 - protein, 11 aa, synthetic construct
  REGION 1..11: note = Description of Artificial Sequence: Synthetic peptide
RASQGIRNDLG

SEQ ID NO: 3115 - DNA, 33 bp, synthetic construct; identical to SEQ ID NO: 3043
  misc_feature 1..33: note = Description of Artificial Sequence: Synthetic oligonucleotide
  source 1..33: mol_type = other DNA

SEQ ID NO: 3116 - protein, 11 aa, synthetic construct
  REGION 1..11: note = Description of Artificial Sequence: Synthetic peptide
RASQGISNYLD

SEQ ID NO: 3117 - DNA, 36 bp, synthetic construct
  misc_feature 1..36: note = Description of Artificial Sequence: Synthetic oligonucleotide
  source 1..36: mol_type = other DNA
agggccagtcagagtattagccgcagccacttagtc

SEQ ID NO: 3118 - protein, 12 aa, synthetic construct
  REGION 1..12: note = Description of Artificial Sequence: Synthetic peptide
RASQSISRSHLV

SEQ ID NO: 3119 - DNA, 33 bp, synthetic construct; identical to SEQ ID NO: 109
  misc_feature 1..33: note = Description of Artificial Sequence: Synthetic oligonucleotide
  source 1..33: mol_type = other DNA

SEQ ID NO: 3120 - protein, 11 aa, synthetic construct
  REGION 1..11: note = Description of Artificial Sequence: Synthetic peptide
RASQGIRNDLG

SEQ ID NO: 3121 - DNA, 33 bp, synthetic construct; identical to SEQ ID NO: 171
  misc_feature 1..33: note = Description of Artificial Sequence: Synthetic oligonucleotide
  source 1..33: mol_type = other DNA

SEQ ID NO: 3122 - protein, 11 aa, synthetic construct
  REGION 1..11: note = Description of Artificial Sequence: Synthetic peptide
RASQGISSWLA

SEQ ID NO: 3123 - DNA, 33 bp, synthetic construct; identical to SEQ ID NO: 105
  misc_feature 1..33: note = Description of Artificial Sequence: Synthetic oligonucleotide
  source 1..33: mol_type = other DNA

SEQ ID NO: 3124 - protein, 11 aa, synthetic construct
  REGION 1..11: note = Description of Artificial Sequence: Synthetic peptide
RASQGISNYLA

SEQ ID NO: 3125 - DNA, 33 bp, synthetic construct; identical to SEQ ID NO: 171
  misc_feature 1..33: note = Description of Artificial Sequence: Synthetic oligonucleotide
  source 1..33: mol_type = other DNA

SEQ ID NO: 3126 - protein, 11 aa, synthetic construct
  REGION 1..11: note = Description of Artificial Sequence: Synthetic peptide
RASQGISSWLA

SEQ ID NO: 3127 - DNA, 33 bp, synthetic construct; identical to SEQ ID NO: 171
  misc_feature 1..33: note = Description of Artificial Sequence: Synthetic oligonucleotide
  source 1..33: mol_type = other DNA

SEQ ID NO: 3128 - protein, 11 aa, synthetic construct
  REGION 1..11: note = Description of Artificial Sequence: Synthetic peptide
RASQGISSWLA

SEQ ID NO: 3129 - DNA, 51 bp, synthetic construct
  misc_feature 1..51: note = Description of Artificial Sequence: Synthetic oligonucleotide
  source 1..51: mol_type = other DNA
aagtccagccagagtgttttgaaaagttccaaccataggaactacttagct

SEQ ID NO: 3130 - protein, 17 aa, synthetic construct
  REGION 1..17: note = Description of Artificial Sequence: Synthetic peptide
KSSQSVLKSSNHRNYLA

SEQ ID NO: 3131 - DNA, 33 bp, synthetic construct
  misc_feature 1..33: note = Description of Artificial Sequence: Synthetic oligonucleotide
  source 1..33: mol_type = other DNA
cgggcgagtcagggcattagcaattatttggcc

SEQ ID NO: 3132 - protein, 11 aa, synthetic construct
  REGION 1..11: note = Description of Artificial Sequence: Synthetic peptide
RASQGISNYLA

SEQ ID NO: 3133 - DNA, 33 bp, synthetic construct
  misc_feature 1..33: note = Description of Artificial Sequence: Synthetic oligonucleotide
  source 1..33: mol_type = other DNA
cgggcaagtcagaacattagtaattatgttaat

SEQ ID NO: 3134 - protein, 11 aa, synthetic construct
  REGION 1..11: note = Description of Artificial Sequence: Synthetic peptide
RASQNISNYVN

SEQ ID NO: 3135 - DNA, 36 bp, synthetic construct
  misc_feature 1..36: note = Description of Artificial Sequence: Synthetic oligonucleotide
  source 1..36: mol_type = other DNA
agggccagtcagagtgtttacagcaactacttagcc

SEQ ID NO: 3136 - protein, 12 aa, synthetic construct
  REGION 1..12: note = Description of Artificial Sequence: Synthetic peptide
RASQSVYSNYLA

SEQ ID NO: 3137 - DNA, 33 bp, synthetic construct; identical to SEQ ID NO: 171
  misc_feature 1..33: note = Description of Artificial Sequence: Synthetic oligonucleotide
  source 1..33: mol_type = other DNA

SEQ ID NO: 3138 - protein, 11 aa, synthetic construct
  REGION 1..11: note = Description of Artificial Sequence: Synthetic peptide
RASQGISSWLA

SEQ ID NO: 3139 - DNA, 33 bp, synthetic construct; identical to SEQ ID NO: 3133
  misc_feature 1..33: note = Description of Artificial Sequence: Synthetic oligonucleotide
  source 1..33: mol_type = other DNA

SEQ ID NO: 3140 - protein, 11 aa, synthetic construct
  REGION 1..11: note = Description of Artificial Sequence: Synthetic peptide
RASQNISNYVN

SEQ ID NO: 3141 - DNA, 33 bp, synthetic construct; identical to SEQ ID NO: 3131
  misc_feature 1..33: note = Description of Artificial Sequence: Synthetic oligonucleotide
  source 1..33: mol_type = other DNA

SEQ ID NO: 3142 - protein, 11 aa, synthetic construct
  REGION 1..11: note = Description of Artificial Sequence: Synthetic peptide
RASQGISNYLA

SEQ ID NO: 3143 - DNA, 33 bp, synthetic construct
  misc_feature 1..33: note = Description of Artificial Sequence: Synthetic oligonucleotide
  source 1..33: mol_type = other DNA
cgggtgagtcagggtattagcagctggttagcc

SEQ ID NO: 3144 - protein, 11 aa, synthetic construct
  REGION 1..11: note = Description of Artificial Sequence: Synthetic peptide
RVSQGISSWLA

SEQ ID NO: 3145 - DNA, 51 bp, synthetic construct
  misc_feature 1..51: note = Description of Artificial Sequence: Synthetic oligonucleotide
  source 1..51: mol_type = other DNA
aagtccagccagagtattttactcagctccaacaataagaactacttagct

SEQ ID NO: 3146 - protein, 17 aa, synthetic construct
  REGION 1..17: note = Description of Artificial Sequence: Synthetic peptide
KSSQSILLSSNNKNYLA

SEQ ID NO: 3147 - DNA, 33 bp, synthetic construct
  misc_feature 1..33: note = Description of Artificial Sequence: Synthetic oligonucleotide
  source 1..33: mol_type = other DNA
cgggcgagtcagggcattagtaattatttggcc

SEQ ID NO: 3148 - protein, 11 aa, synthetic construct
  REGION 1..11: note = Description of Artificial Sequence: Synthetic peptide
RASQGISNYLA

SEQ ID NO: 3149 - DNA, 33 bp, synthetic construct
  misc_feature 1..33: note = Description of Artificial Sequence: Synthetic oligonucleotide
  source 1..33: mol_type = other DNA
cgggcaagtcagggcattgaaaatgatttaggc

SEQ ID NO: 3150 - protein, 11 aa, synthetic construct
  REGION 1..11: note = Description of Artificial Sequence: Synthetic peptide
RASQGIENDLG

SEQ ID NO: 3151 - DNA, 33 bp, synthetic construct
  misc_feature 1..33: note = Description of Artificial Sequence: Synthetic oligonucleotide
  source 1..33: mol_type = other DNA
cgggcaagtcagggcattagtaatgatttaggc

SEQ ID NO: 3152 - protein, 11 aa, synthetic construct
  REGION 1..11: note = Description of Artificial Sequence: Synthetic peptide
RASQGISNDLG

SEQ ID NO: 3153 - DNA, 33 bp, synthetic construct; identical to SEQ ID NO: 1185
  misc_feature 1..33: note = Description of Artificial Sequence: Synthetic oligonucleotide
  source 1..33: mol_type = other DNA

SEQ ID NO: 3154 - protein, 11 aa, synthetic construct
  REGION 1..11: note = Description of Artificial Sequence: Synthetic peptide
RASQGIRDDLG

SEQ ID NO: 3155 - DNA, 48 bp, synthetic construct
  misc_feature 1..48: note = Description of Artificial Sequence: Synthetic oligonucleotide
  source 1..48: mol_type = other DNA
aagtctggtcagagcctcctgcatagtgatggaaagacctttttgtct

SEQ ID NO: 3156 - protein, 16 aa, synthetic construct
  REGION 1..16: note = Description of Artificial Sequence: Synthetic peptide
KSGQSLLHSDGKTFLS

SEQ ID NO: 3157 - DNA, 33 bp, synthetic construct; identical to SEQ ID NO: 205
  misc_feature 1..33: note = Description of Artificial Sequence: Synthetic oligonucleotide
  source 1..33: mol_type = other DNA

SEQ ID NO: 3158 - protein, 11 aa, synthetic construct
  REGION 1..11: note = Description of Artificial Sequence: Synthetic peptide
RASQDIRNDLG

SEQ ID NO: 3159 - DNA, 33 bp, synthetic construct; identical to SEQ ID NO: 109
  misc_feature 1..33: note = Description of Artificial Sequence: Synthetic oligonucleotide
  source 1..33: mol_type = other DNA

SEQ ID NO: 3160 - protein, 11 aa, synthetic construct
  REGION 1..11: note = Description of Artificial Sequence: Synthetic peptide
RASQGIRNDLG

SEQ ID NO: 3161 - DNA, 51 bp, synthetic construct
  misc_feature 1..51: note = Description of Artificial Sequence: Synthetic oligonucleotide
  source 1..51: mol_type = other DNA
aagtccagccagagtgttttatacagctccaacaatttcaactacttaact

SEQ ID NO: 3162 - protein, 17 aa, synthetic construct
  REGION 1..17: note = Description of Artificial Sequence: Synthetic peptide
KSSQSVLYSSNNFNYLT

SEQ ID NO: 3163 - DNA, 33 bp, synthetic construct; identical to SEQ ID NO: 171
  misc_feature 1..33: note = Description of Artificial Sequence: Synthetic oligonucleotide
  source 1..33: mol_type = other DNA

SEQ ID NO: 3164 - protein, 11 aa, synthetic construct
  REGION 1..11: note = Description of Artificial Sequence: Synthetic peptide
RASQGISSWLA

SEQ ID NO: 3165 - DNA, 48 bp, synthetic construct; identical to SEQ ID NO: 419
  misc_feature 1..48: note = Description of Artificial Sequence: Synthetic oligonucleotide
  source 1..48: mol_type = other DNA

SEQ ID NO: 3166 - protein, 16 aa, synthetic construct
  REGION 1..16: note = Description of Artificial Sequence: Synthetic peptide
KSSQSLLHSDGKTFLY

SEQ ID NO: 3167 - DNA, 51 bp, synthetic construct; identical to SEQ ID NO: 1071
  misc_feature 1..51: note = Description of Artificial Sequence: Synthetic oligonucleotide
  source 1..51: mol_type = other DNA

SEQ ID NO: 3168 - protein, 17 aa, synthetic construct
  REGION 1..17: note = Description of Artificial Sequence: Synthetic peptide
KSSQSVLYSSNNKNYLA

SEQ ID NO: 3169 - DNA, 51 bp, synthetic construct
  misc_feature 1..51: note = Description of Artificial Sequence: Synthetic oligonucleotide
  source 1..51: mol_type = other DNA
aagtccagccagagtgttttatacaattccaacaataagaactacttagct

SEQ ID NO: 3170 - protein, 17 aa, synthetic construct
  REGION 1..17: note = Description of Artificial Sequence: Synthetic peptide
KSSQSVLYNSNNKNYLA

SEQ ID NO: 3171 - DNA, 33 bp, synthetic construct; identical to SEQ ID NO: 109
  misc_feature 1..33: note = Description of Artificial Sequence: Synthetic oligonucleotide
  source 1..33: mol_type = other DNA

SEQ ID NO: 3172 - protein, 11 aa, synthetic construct
  REGION 1..11: note = Description of Artificial Sequence: Synthetic peptide
RASQGIRNDLG

SEQ ID NO: 3173 - DNA, 48 bp, synthetic construct; identical to SEQ ID NO: 419
  misc_feature 1..48: note = Description of Artificial Sequence: Synthetic oligonucleotide
  source 1..48: mol_type = other DNA

SEQ ID NO: 3174 - protein, 16 aa, synthetic construct
  REGION 1..16: note = Description of Artificial Sequence: Synthetic peptide
KSSQSLLHSDGKTFLY

SEQ ID NO: 3175 - DNA, 51 bp, synthetic construct
  misc_feature 1..51: note = Description of Artificial Sequence: Synthetic oligonucleotide
  source 1..51: mol_type = other DNA
aagtccagccagagtgttttatccagctccaacaatcacaactacttagct

SEQ ID NO: 3176 - protein, 17 aa, synthetic construct
  REGION 1..17: note = Description of Artificial Sequence: Synthetic peptide
KSSQSVLSSSNNHNYLA

SEQ ID NO: 3177 - DNA, 48 bp, synthetic construct; identical to SEQ ID NO: 419
  misc_feature 1..48: note = Description of Artificial Sequence: Synthetic oligonucleotide
  source 1..48: mol_type = other DNA

SEQ ID NO: 3178 - protein, 16 aa, synthetic construct
  REGION 1..16: note = Description of Artificial Sequence: Synthetic peptide
KSSQSLLHSDGKTFLY

SEQ ID NO: 3179 - DNA, 33 bp, synthetic construct; identical to SEQ ID NO: 1185
  misc_feature 1..33: note = Description of Artificial Sequence: Synthetic oligonucleotide
  source 1..33: mol_type = other DNA

SEQ ID NO: 3180 - protein, 11 aa, synthetic construct
  REGION 1..11: note = Description of Artificial Sequence: Synthetic peptide
RASQGIRDDLG

SEQ ID NO: 3181 - DNA, 36 bp, synthetic construct
  misc_feature 1..36: note = Description of Artificial Sequence: Synthetic oligonucleotide
  source 1..36: mol_type = other DNA
agggccagtcagaatcttagcagcagctacttaggc

SEQ ID NO: 3182 - protein, 12 aa, synthetic construct
  REGION 1..12: note = Description of Artificial Sequence: Synthetic peptide
RASQNLSSSYLG

SEQ ID NO: 3183 - DNA, 51 bp, synthetic construct
  misc_feature 1..51: note = Description of Artificial Sequence: Synthetic oligonucleotide
  source 1..51: mol_type = other DNA
aagtccagccagagtgttttatatagctccaacaataagaactacttagct

SEQ ID NO: 3184 - protein, 17 aa, synthetic construct
  REGION 1..17: note = Description of Artificial Sequence: Synthetic peptide
KSSQSVLYSSNNKNYLA

SEQ ID NO: 3185 - DNA, 48 bp, synthetic construct; identical to SEQ ID NO: 419
  misc_feature 1..48: note = Description of Artificial Sequence: Synthetic oligonucleotide
  source 1..48: mol_type = other DNA

SEQ ID NO: 3186 - protein, 16 aa, synthetic construct
  REGION 1..16: note = Description of Artificial Sequence: Synthetic peptide
KSSQSLLHSDGKTFLY

SEQ ID NO: 3187 - DNA, 51 bp, synthetic construct; identical to SEQ ID NO: 1017
  misc_feature 1..51: note = Description of Artificial Sequence: Synthetic oligonucleotide
  source 1..51: mol_type = other DNA

SEQ ID NO: 3188 - protein, 17 aa, synthetic construct
  REGION 1..17: note = Description of Artificial Sequence: Synthetic peptide
KSSQNVLYNSNNNNYLA

SEQ ID NO: 3189 - DNA, 33 bp, synthetic construct
  misc_feature 1..33: note = Description of Artificial Sequence: Synthetic oligonucleotide
  source 1..33: mol_type = other DNA
cgggcaagtcagggcatgagaaaagatttaggc

SEQ ID NO: 3190 - protein, 11 aa, synthetic construct
  REGION 1..11: note = Description of Artificial Sequence: Synthetic peptide
RASQGMRKDLG

SEQ ID NO: 3191 - DNA, 33 bp, synthetic construct; identical to SEQ ID NO: 109
  misc_feature 1..33: note = Description of Artificial Sequence: Synthetic oligonucleotide
  source 1..33: mol_type = other DNA

SEQ ID NO: 3192 - protein, 11 aa, synthetic construct
  REGION 1..11: note = Description of Artificial Sequence: Synthetic peptide
RASQGIRNDLG

SEQ ID NO: 3193 - DNA, 36 bp, synthetic construct; identical to SEQ ID NO: 1697
  misc_feature 1..36: note = Description of Artificial Sequence: Synthetic oligonucleotide
  source 1..36: mol_type = other DNA

SEQ ID NO: 3194 - protein, 12 aa, synthetic construct
  REGION 1..12: note = Description of Artificial Sequence: Synthetic peptide
RASQSVYSSYLA

SEQ ID NO: 3195 - DNA, 33 bp, synthetic construct; identical to SEQ ID NO: 109
  misc_feature 1..33: note = Description of Artificial Sequence: Synthetic oligonucleotide
  source 1..33: mol_type = other DNA

SEQ ID NO: 3196 - protein, 11 aa, synthetic construct
  REGION 1..11: note = Description of Artificial Sequence: Synthetic peptide
RASQGIRNDLG

SEQ ID NO: 3197 - DNA, 51 bp, synthetic construct; identical to SEQ ID NO: 1541
  misc_feature 1..51: note = Description of Artificial Sequence: Synthetic oligonucleotide
  source 1..51: mol_type = other DNA

SEQ ID NO: 3198 - protein, 17 aa, synthetic construct
  REGION 1..17: note = Description of Artificial Sequence: Synthetic peptide
KSSQSVLYSSNNNNYLA

SEQ ID NO: 3199 - DNA, 51 bp, synthetic construct; identical to SEQ ID NO: 1079
  misc_feature 1..51: note = Description of Artificial Sequence: Synthetic oligonucleotide
  source 1..51: mol_type = other DNA

SEQ ID NO: 3200 - protein, 17 aa, synthetic construct
  REGION 1..17: note = Description of Artificial Sequence: Synthetic peptide
KSSQSVLYSSNNYNYLA

SEQ ID NO: 3201 - DNA, 51 bp, synthetic construct
  misc_feature 1..51: note = Description of Artificial Sequence: Synthetic oligonucleotide
  source 1..51: mol_type = other DNA
aagtccagccagagtgttttatacagctccaacaatcagaactacttagct

SEQ ID NO: 3202 - protein, 17 aa, synthetic construct
  REGION 1..17: note = Description of Artificial Sequence: Synthetic peptide
KSSQSVLYSSNNQNYLA

SEQ ID NO: 3203 - DNA, 51 bp, synthetic construct
  misc_feature 1..51: note = Description of Artificial Sequence: Synthetic oligonucleotide
  source 1..51: mol_type = other DNA
aagtccagccagagtgttttatacaactccaacaataacaactacttagct

SEQ ID NO: 3204 - protein, 17 aa, synthetic construct
  REGION 1..17: note = Description of Artificial Sequence: Synthetic peptide
KSSQSVLYNSNNNNYLA

SEQ ID NO: 3205 - DNA, 48 bp, synthetic construct; identical to SEQ ID NO: 575
  misc_feature 1..48: note = Description of Artificial Sequence: Synthetic oligonucleotide
  source 1..48: mol_type = other DNA

SEQ ID NO: 3206 - protein, 16 aa, synthetic construct
  REGION 1..16: note = Description of Artificial Sequence: Synthetic peptide
KSSQSLLHGDGKTYLY

SEQ ID NO: 3207 - DNA, 48 bp, synthetic construct; identical to SEQ ID NO: 579
  misc_feature 1..48: note = Description of Artificial Sequence: Synthetic oligonucleotide
  source 1..48: mol_type = other DNA

SEQ ID NO: 3208 - protein, 16 aa, synthetic construct
  REGION 1..16: note = Description of Artificial Sequence: Synthetic peptide
KSSQSLLHGDGKTYLY

SEQ ID NO: 3209 - DNA, 33 bp, synthetic construct; identical to SEQ ID NO: 109
  misc_feature 1..33: note = Description of Artificial Sequence: Synthetic oligonucleotide
  source 1..33: mol_type = other DNA

SEQ ID NO: 3210 - protein, 11 aa, synthetic construct
  REGION 1..11: note = Description of Artificial Sequence: Synthetic peptide
RASQGIRNDLG

SEQ ID NO: 3211 - DNA, 51 bp, synthetic construct
  misc_feature 1..51: note = Description of Artificial Sequence: Synthetic oligonucleotide
  source 1..51: mol_type = other DNA
aggtccagccagagtattttatacatctccaacaataagaactacttagct

SEQ ID NO: 3212 - protein, 17 aa, synthetic construct
  REGION 1..17: note = Description of Artificial Sequence: Synthetic peptide
RSSQSILYISNNKNYLA

SEQ ID NO: 3213 - DNA, 51 bp, synthetic construct; identical to SEQ ID NO: 1825
  misc_feature 1..51: note = Description of Artificial Sequence: Synthetic oligonucleotide
  source 1..51: mol_type = other DNA

SEQ ID NO: 3214 - protein, 17 aa, synthetic construct
  REGION 1..17: note = Description of Artificial Sequence: Synthetic peptide
KSSQSILYSSNNYNYLA

SEQ ID NO: 3215 - DNA, 48 bp, synthetic construct; identical to SEQ ID NO: 575
  misc_feature 1..48: note = Description of Artificial Sequence: Synthetic oligonucleotide
  source 1..48: mol_type = other DNA

SEQ ID NO: 3216 - protein, 16 aa, synthetic construct
  REGION 1..16: note = Description of Artificial Sequence: Synthetic peptide
KSSQSLLHGDGKTYLY

SEQ ID NO: 3217 - DNA, 33 bp, synthetic construct
  misc_feature 1..33: note = Description of Artificial Sequence: Synthetic oligonucleotide
  source 1..33: mol_type = other DNA
cgggcaagtcagggcattgggaatgatttaggc

SEQ ID NO: 3218 - protein, 11 aa, synthetic construct
  REGION 1..11: note = Description of Artificial Sequence: Synthetic peptide
RASQGIGNDLG

SEQ ID NO: 3219 - DNA, 48 bp, synthetic construct; identical to SEQ ID NO: 419
  misc_feature 1..48: note = Description of Artificial Sequence: Synthetic oligonucleotide
  source 1..48: mol_type = other DNA

SEQ ID NO: 3220 - protein, 16 aa, synthetic construct
  REGION 1..16: note = Description of Artificial Sequence: Synthetic peptide
KSSQSLLHSDGKTFLY

SEQ ID NO: 3221 - DNA, 33 bp, synthetic construct; identical to SEQ ID NO: 109
  misc_feature 1..33: note = Description of Artificial Sequence: Synthetic oligonucleotide
  source 1..33: mol_type = other DNA

SEQ ID NO: 3222 - protein, 11 aa, synthetic construct
  REGION 1..11: note = Description of Artificial Sequence: Synthetic peptide
RASQGIRNDLG

SEQ ID NO: 3223 - DNA, 48 bp, synthetic construct; identical to SEQ ID NO: 419
  misc_feature 1..48: note = Description of Artificial Sequence: Synthetic oligonucleotide
  source 1..48: mol_type = other DNA

SEQ ID NO: 3224 - protein, 16 aa, synthetic construct
  REGION 1..16: note = Description of Artificial Sequence: Synthetic peptide
KSSQSLLHSDGKTFLY

SEQ ID NO: 3225 - DNA, 48 bp, synthetic construct; identical to SEQ ID NO: 419
  misc_feature 1..48: note = Description of Artificial Sequence: Synthetic oligonucleotide
  source 1..48: mol_type = other DNA

SEQ ID NO: 3226 - protein, 16 aa, synthetic construct
  REGION 1..16: note = Description of Artificial Sequence: Synthetic peptide
KSSQSLLHSDGKTFLY

SEQ ID NO: 3227 - DNA, 48 bp, synthetic construct; identical to SEQ ID NO: 419
  misc_feature 1..48: note = Description of Artificial Sequence: Synthetic oligonucleotide
  source 1..48: mol_type = other DNA

SEQ ID NO: 3228 - protein, 16 aa, synthetic construct
  REGION 1..16: note = Description of Artificial Sequence: Synthetic peptide
KSSQSLLHSDGKTFLY

SEQ ID NO: 3229 - DNA, 51 bp, synthetic construct
  misc_feature 1..51: note = Description of Artificial Sequence: Synthetic oligonucleotide
  source 1..51: mol_type = other DNA
aagtccagccagaatgttttacacagctccaacagtaataactacttagtt

SEQ ID NO: 3230 - protein, 17 aa, synthetic construct
  REGION 1..17: note = Description of Artificial Sequence: Synthetic peptide
KSSQNVLHSSNSNNYLV

SEQ ID NO: 3231 - DNA, 48 bp, synthetic construct; identical to SEQ ID NO: 419
  misc_feature 1..48: note = Description of Artificial Sequence: Synthetic oligonucleotide
  source 1..48: mol_type = other DNA

SEQ ID NO: 3232 - protein, 16 aa, synthetic construct
  REGION 1..16: note = Description of Artificial Sequence: Synthetic peptide
KSSQSLLHSDGKTFLY

SEQ ID NO: 3233 - DNA, 33 bp, synthetic construct; identical to SEQ ID NO: 93
  misc_feature 1..33: note = Description of Artificial Sequence: Synthetic oligonucleotide
  source 1..33: mol_type = other DNA

SEQ ID NO: 3234 - protein, 11 aa, synthetic construct
  REGION 1..11: note = Description of Artificial Sequence: Synthetic peptide
RTSQGIRNDLG

SEQ ID NO: 3235 - DNA, 51 bp, synthetic construct
  misc_feature 1..51: note = Description of Artificial Sequence: Synthetic oligonucleotide
  source 1..51: mol_type = other DNA
aagtccagccagaatgttttatacagttccaacaataacaactacttagct

SEQ ID NO: 3236 - protein, 17 aa, synthetic construct
  REGION 1..17: note = Description of Artificial Sequence: Synthetic peptide
KSSQNVLYSSNNNNYLA

SEQ ID NO: 3237 - DNA, 48 bp, synthetic construct
  misc_feature 1..48: note = Description of Artificial Sequence: Synthetic oligonucleotide
  source 1..48: mol_type = other DNA
aagtctagtaagaccctcctgcatagtgatggaaagacctttttgtat

SEQ ID NO: 3238 - protein, 16 aa, synthetic construct
  REGION 1..16: note = Description of Artificial Sequence: Synthetic peptide
KSSKTLLHSDGKTFLY

SEQ ID NO: 3239 - DNA, 48 bp, synthetic construct; identical to SEQ ID NO: 419
  misc_feature 1..48: note = Description of Artificial Sequence: Synthetic oligonucleotide
  source 1..48: mol_type = other DNA

SEQ ID NO: 3240 - protein, 16 aa, synthetic construct
  REGION 1..16: note = Description of Artificial Sequence: Synthetic peptide
KSSQSLLHSDGKTFLY

SEQ ID NO: 3241 - DNA, 48 bp, synthetic construct; identical to SEQ ID NO: 419
  misc_feature 1..48: note = Description of Artificial Sequence: Synthetic oligonucleotide
  source 1..48: mol_type = other DNA

SEQ ID NO: 3242 - protein, 16 aa, synthetic construct
  REGION 1..16: note = Description of Artificial Sequence: Synthetic peptide
KSSQSLLHSDGKTFLY

SEQ ID NO: 3243 - DNA, 33 bp, synthetic construct; identical to SEQ ID NO: 109
  misc_feature 1..33: note = Description of Artificial Sequence: Synthetic oligonucleotide
  source 1..33: mol_type = other DNA

SEQ ID NO: 3244 - protein, 11 aa, synthetic construct
  REGION 1..11: note = Description of Artificial Sequence: Synthetic peptide
RASQGIRNDLG

SEQ ID NO: 3245 - DNA, 33 bp, synthetic construct; identical to SEQ ID NO: 1167
  misc_feature 1..33: note = Description of Artificial Sequence: Synthetic oligonucleotide
  source 1..33: mol_type = other DNA

SEQ ID NO: 3246 - protein, 11 aa, synthetic construct
  REGION 1..11: note = Description of Artificial Sequence: Synthetic peptide
RASQGIINWLA

SEQ ID NO: 3247 - DNA, 33 bp, synthetic construct; identical to SEQ ID NO: 205
  misc_feature 1..33: note = Description of Artificial Sequence: Synthetic oligonucleotide
  source 1..33: mol_type = other DNA

SEQ ID NO: 3248 - protein, 11 aa, synthetic construct
  REGION 1..11: note = Description of Artificial Sequence: Synthetic peptide
RASQDIRNDLG

SEQ ID NO: 3249 - DNA, 51 bp, synthetic construct
  misc_feature 1..51: note = Description of Artificial Sequence: Synthetic oligonucleotide
  source 1..51: mol_type = other DNA
aagtccagccagagtgttttatacagctccaacgataagaactacttagct

SEQ ID NO: 3250 - protein, 17 aa, synthetic construct
  REGION 1..17: note = Description of Artificial Sequence: Synthetic peptide
KSSQSVLYSSNDKNYLA

SEQ ID NO: 3251 - DNA, 51 bp, synthetic construct
  misc_feature 1..51: note = Description of Artificial Sequence: Synthetic oligonucleotide
  source 1..51: mol_type = other DNA
aggtccagccagattgttttatccgactccaacaataacaactacttagct

SEQ ID NO: 3252 - protein, 17 aa, synthetic construct
  REGION 1..17: note = Description of Artificial Sequence: Synthetic peptide
RSSQIVLSDSNNNNYLA

SEQ ID NO: 3253 - DNA, 48 bp, synthetic construct; identical to SEQ ID NO: 419
  misc_feature 1..48: note = Description of Artificial Sequence: Synthetic oligonucleotide
  source 1..48: mol_type = other DNA

SEQ ID NO: 3254 - protein, 16 aa, synthetic construct
  REGION 1..16: note = Description of Artificial Sequence: Synthetic peptide
KSSQSLLHSDGKTFLY

SEQ ID NO: 3255 - DNA, 51 bp, synthetic construct; identical to SEQ ID NO: 1057
  misc_feature 1..51: note = Description of Artificial Sequence: Synthetic oligonucleotide
  source 1..51: mol_type = other DNA

SEQ ID NO: 3256 - protein, 17 aa, synthetic construct
  REGION 1..17: note = Description of Artificial Sequence: Synthetic peptide
KSSQSVLHSSNNNNYLA

SEQ ID NO: 3257 - DNA, 51 bp, synthetic construct
  misc_feature 1..51: note = Description of Artificial Sequence: Synthetic oligonucleotide
  source 1..51: mol_type = other DNA
aagtccagccagagtgttttacacagttccaacaataataactacttagct

SEQ ID NO: 3258 - protein, 17 aa, synthetic construct
  REGION 1..17: note = Description of Artificial Sequence: Synthetic peptide
KSSQSVLHSSNNNNYLA

SEQ ID NO: 3259 - DNA, 48 bp, synthetic construct
  misc_feature 1..48: note = Description of Artificial Sequence: Synthetic oligonucleotide
  source 1..48: mol_type = other DNA
tggtctagtcagagcctcctgcatagtaatggatacaactatttggat

SEQ ID NO: 3260 - protein, 16 aa, synthetic construct
  REGION 1..16: note = Description of Artificial Sequence: Synthetic peptide
WSSQSLLHSNGYNYLD

SEQ ID NO: 3261 - DNA, 33 bp, synthetic construct; identical to SEQ ID NO: 109
  misc_feature 1..33: note = Description of Artificial Sequence: Synthetic oligonucleotide
  source 1..33: mol_type = other DNA

SEQ ID NO: 3262 - protein, 11 aa, synthetic construct
  REGION 1..11: note = Description of Artificial Sequence: Synthetic peptide
RASQGIRNDLG

SEQ ID NO: 3263 - DNA, 33 bp, synthetic construct; identical to SEQ ID NO: 191
  misc_feature 1..33: note = Description of Artificial Sequence: Synthetic oligonucleotide
  source 1..33: mol_type = other DNA

SEQ ID NO: 3264 - protein, 11 aa, synthetic construct
  REGION 1..11: note = Description of Artificial Sequence: Synthetic peptide
SGDKLGDKYAS

SEQ ID NO: 3265 - DNA, 33 bp, synthetic construct; identical to SEQ ID NO: 191
  misc_feature 1..33: note = Description of Artificial Sequence: Synthetic oligonucleotide
  source 1..33: mol_type = other DNA

SEQ ID NO: 3266 - protein, 11 aa, synthetic construct
  REGION 1..11: note = Description of Artificial Sequence: Synthetic peptide
SGDKLGDKYAS

SEQ ID NO: 3267 - DNA, 33 bp, synthetic construct; identical to SEQ ID NO: 191
  misc_feature 1..33: note = Description of Artificial Sequence: Synthetic oligonucleotide
  source 1..33: mol_type = other DNA

SEQ ID NO: 3268 - protein, 11 aa, synthetic construct
  REGION 1..11: note = Description of Artificial Sequence: Synthetic peptide
SGDKLGDKYAS

SEQ ID NO: 3269 - DNA, 39 bp, synthetic construct
  misc_feature 1..39: note = Description of Artificial Sequence: Synthetic oligonucleotide
  source 1..39: mol_type = other DNA
tctggaagcagctcctacatcggaagtaatactgtagac

SEQ ID NO: 3270 - protein, 13 aa, synthetic construct
  REGION 1..13: note = Description of Artificial Sequence: Synthetic peptide
SGSSSYIGSNTVD

SEQ ID NO: 3271 - DNA, 33 bp, synthetic construct
  misc_feature 1..33: note = Description of Artificial Sequence: Synthetic oligonucleotide
  source 1..33: mol_type = other DNA
tctggagataaattgggggataaatttgcttgc

SEQ ID NO: 3272 - protein, 11 aa, synthetic construct
  REGION 1..11: note = Description of Artificial Sequence: Synthetic peptide
SGDKLGDKFAC

SEQ ID NO: 3273 - DNA, 33 bp, synthetic construct; identical to SEQ ID NO: 191
  misc_feature 1..33: note = Description of Artificial Sequence: Synthetic oligonucleotide
  source 1..33: mol_type = other DNA

SEQ ID NO: 3274 - protein, 11 aa, synthetic construct
  REGION 1..11: note = Description of Artificial Sequence: Synthetic peptide
SGDKLGDKYAS

SEQ ID NO: 3275 - DNA, 33 bp, synthetic construct; identical to SEQ ID NO: 739
  misc_feature 1..33: note = Description of Artificial Sequence: Synthetic oligonucleotide
  source 1..33: mol_type = other DNA

SEQ ID NO: 3276 - protein, 11 aa, synthetic construct
  REGION 1..11: note = Description of Artificial Sequence: Synthetic peptide
SGDKLGDKYVC

SEQ ID NO: 3277 - DNA, 33 bp, synthetic construct
  misc_feature 1..33: note = Description of Artificial Sequence: Synthetic oligonucleotide
  source 1..33: mol_type = other DNA
tctggagataaattgggggataaatatgtttcc

SEQ ID NO: 3278 - protein, 11 aa, synthetic construct
  REGION 1..11: note = Description of Artificial Sequence: Synthetic peptide
SGDKLGDKYVS

SEQ ID NO: 3279 - DNA, 33 bp, synthetic construct
  misc_feature 1..33: note = Description of Artificial Sequence: Synthetic oligonucleotide
  source 1..33: mol_type = other DNA
tctggagataaattgggtaataaatatgtttgc

SEQ ID NO: 3280 - protein, 11 aa, synthetic construct
  REGION 1..11: note = Description of Artificial Sequence: Synthetic peptide
SGDKLGNKYVC

SEQ ID NO: 3281 - DNA, 33 bp, synthetic construct
  misc_feature 1..33: note = Description of Artificial Sequence: Synthetic oligonucleotide
  source 1..33: mol_type = other DNA
tctggagatgaattggggaataaatatgcttgc

SEQ ID NO: 3282 - protein, 11 aa, synthetic construct
  REGION 1..11: note = Description of Artificial Sequence: Synthetic peptide
SGDELGNKYAC

SEQ ID NO: 3283 - DNA, 33 bp, synthetic construct; identical to SEQ ID NO: 693
  misc_feature 1..33: note = Description of Artificial Sequence: Synthetic oligonucleotide
  source 1..33: mol_type = other DNA

SEQ ID NO: 3284 - protein, 11 aa, synthetic construct
  REGION 1..11: note = Description of Artificial Sequence: Synthetic peptide
SGDKLGDKYAC

SEQ ID NO: 3285 - DNA, 33 bp, synthetic construct; identical to SEQ ID NO: 191
  misc_feature 1..33: note = Description of Artificial Sequence: Synthetic oligonucleotide
  source 1..33: mol_type = other DNA

SEQ ID NO: 3286 - protein, 11 aa, synthetic construct
  REGION 1..11: note = Description of Artificial Sequence: Synthetic peptide
SGDKLGDKYAS

SEQ ID NO: 3287 - DNA, 33 bp, synthetic construct; identical to SEQ ID NO: 191
  misc_feature 1..33: note = Description of Artificial Sequence: Synthetic oligonucleotide
  source 1..33: mol_type = other DNA

SEQ ID NO: 3288 - protein, 11 aa, synthetic construct
  REGION 1..11: note = Description of Artificial Sequence: Synthetic peptide
SGDKLGDKYAS

SEQ ID NO: 3289 - DNA, 39 bp, synthetic construct
  misc_feature 1..39: note = Description of Artificial Sequence: Synthetic oligonucleotide
  source 1..39: mol_type = other DNA
tctggaagcagctccaacatcggaagttatgctgtaaac

SEQ ID NO: 3290 - protein, 13 aa, synthetic construct
  REGION 1..13: note = Description of Artificial Sequence: Synthetic peptide
SGSSSNIGSYAVN

SEQ ID NO: 3291 - DNA, 39 bp, synthetic construct
  misc_feature 1..39: note = Description of Artificial Sequence: Synthetic oligonucleotide
  source 1..39: mol_type = other DNA
tctggaagcagctccaacatcggaagtaattctataaac

SEQ ID NO: 3292 - protein, 13 aa, synthetic construct
  REGION 1..13: note = Description of Artificial Sequence: Synthetic peptide
SGSSSNIGSNSIN

SEQ ID NO: 3293 - DNA, 39 bp, synthetic construct
  misc_feature 1..39: note = Description of Artificial Sequence: Synthetic oligonucleotide
  source 1..39: mol_type = other DNA
tctggaagcagctccaacatcggaagtaatgctgtaaac

SEQ ID NO: 3294 - protein, 13 aa, synthetic construct
  REGION 1..13: note = Description of Artificial Sequence: Synthetic peptide
SGSSSNIGSNAVN

SEQ ID NO: 3295 - DNA, 33 bp, synthetic construct; identical to SEQ ID NO: 191
  misc_feature 1..33: note = Description of Artificial Sequence: Synthetic oligonucleotide
  source 1..33: mol_type = other DNA

SEQ ID NO: 3296 - protein, 11 aa, synthetic construct
  REGION 1..11: note = Description of Artificial Sequence: Synthetic peptide
SGDKLGDKYAS

SEQ ID NO: 3297 - DNA, 33 bp, synthetic construct; identical to SEQ ID NO: 3277
  misc_feature 1..33: note = Description of Artificial Sequence: Synthetic oligonucleotide
  source 1..33: mol_type = other DNA

SEQ ID NO: 3298 - protein, 11 aa, synthetic construct
  REGION 1..11: note = Description of Artificial Sequence: Synthetic peptide
SGDKLGDKYVS

SEQ ID NO: 3299 - DNA, 33 bp, synthetic construct
  misc_feature 1..33: note = Description of Artificial Sequence: Synthetic oligonucleotide
  source 1..33: mol_type = other DNA
tctggagataaattggggaataaatatgtttgc

SEQ ID NO: 3300 - protein, 11 aa, synthetic construct
  REGION 1..11: note = Description of Artificial Sequence: Synthetic peptide
SGDKLGNKYVC

SEQ ID NO: 3301 - DNA, 33 bp, synthetic construct
  misc_feature 1..33: note = Description of Artificial Sequence: Synthetic oligonucleotide
  source 1..33: mol_type = other DNA
tctggagataaattgggggataaatttgcttcc

SEQ ID NO: 3302 - protein, 11 aa, synthetic construct
  REGION 1..11: note = Description of Artificial Sequence: Synthetic peptide
SGDKLGDKFAS

SEQ ID NO: 3303 - DNA, 39 bp, synthetic construct; identical to SEQ ID NO: 3293
  misc_feature 1..39: note = Description of Artificial Sequence: Synthetic oligonucleotide
  source 1..39: mol_type = other DNA

SEQ ID NO: 3304 - protein, 13 aa, synthetic construct
  REGION 1..13: note = Description of Artificial Sequence: Synthetic peptide
SGSSSNIGSNAVN

SEQ ID NO: 3305 - DNA, 33 bp, synthetic construct
  misc_feature 1..33: note = Description of Artificial Sequence: Synthetic oligonucleotide
  source 1..33: mol_type = other DNA
tctggatataaattggggtataaatatgtttgc

SEQ ID NO: 3306 - protein, 11 aa, synthetic construct
  REGION 1..11: note = Description of Artificial Sequence: Synthetic peptide
SGYKLGYKYVC

SEQ ID NO: 3307 - DNA, 33 bp, synthetic construct
  misc_feature 1..33: note = Description of Artificial Sequence: Synthetic oligonucleotide
  source 1..33: mol_type = other DNA
tctggaaataaattgggggataaatatgcttcc

SEQ ID NO: 3308 - protein, 11 aa, synthetic construct
  REGION 1..11: note = Description of Artificial Sequence: Synthetic peptide
SGNKLGDKYAS

SEQ ID NO: 3309 - DNA, 42 bp, synthetic construct
  misc_feature 1..42: note = Description of Artificial Sequence: Synthetic oligonucleotide
  source 1..42: mol_type = other DNA
accttacgcagtggcatcactgttactacctataggatatac

SEQ ID NO: 3310 - protein, 14 aa, synthetic construct
  REGION 1..14: note = Description of Artificial Sequence: Synthetic peptide
TLRSGITVTTYRIY

SEQ ID NO: 3311 - DNA, 33 bp, synthetic construct; identical to SEQ ID NO: 191
  misc_feature 1..33: note = Description of Artificial Sequence: Synthetic oligonucleotide
  source 1..33: mol_type = other DNA

SEQ ID NO: 3312 - protein, 11 aa, synthetic construct
  REGION 1..11: note = Description of Artificial Sequence: Synthetic peptide
SGDKLGDKYAS

SEQ ID NO: 3313 - DNA, 33 bp, synthetic construct
  misc_feature 1..33: note = Description of Artificial Sequence: Synthetic oligonucleotide
  source 1..33: mol_type = other DNA
tctggagataaattggggaataaatatgtttcc

SEQ ID NO: 3314 - protein, 11 aa, synthetic construct
  REGION 1..11: note = Description of Artificial Sequence: Synthetic peptide
SGDKLGNKYVS

SEQ ID NO: 3315 - DNA, 33 bp, synthetic construct; identical to SEQ ID NO: 3281
  misc_feature 1..33: note = Description of Artificial Sequence: Synthetic oligonucleotide
  source 1..33: mol_type = other DNA

SEQ ID NO: 3316 - protein, 11 aa, synthetic construct
  REGION 1..11: note = Description of Artificial Sequence: Synthetic peptide
SGDELGNKYAC

SEQ ID NO: 3317 - DNA, 33 bp, synthetic construct; identical to SEQ ID NO: 191
  misc_feature 1..33: note = Description of Artificial Sequence: Synthetic oligonucleotide
  source 1..33: mol_type = other DNA

SEQ ID NO: 3318 - protein, 11 aa, synthetic construct
  REGION 1..11: note = Description of Artificial Sequence: Synthetic peptide
SGDKLGDKYAS

SEQ ID NO: 3319 - DNA, 39 bp, synthetic construct; identical to SEQ ID NO: 3293
  misc_feature 1..39: note = Description of Artificial Sequence: Synthetic oligonucleotide
  source 1..39: mol_type = other DNA

SEQ ID NO: 3320 - protein, 13 aa, synthetic construct
  REGION 1..13: note = Description of Artificial Sequence: Synthetic peptide
SGSSSNIGSNAVN

SEQ ID NO: 3321 - DNA, 33 bp, synthetic construct; identical to SEQ ID NO: 191
  misc_feature 1..33: note = Description of Artificial Sequence: Synthetic oligonucleotide
  source 1..33: mol_type = other DNA

SEQ ID NO: 3322 - protein, 11 aa, synthetic construct
  REGION 1..11: note = Description of Artificial Sequence: Synthetic peptide
SGDKLGDKYAS

SEQ ID NO: 3323 - DNA, 33 bp, synthetic construct; identical to SEQ ID NO: 739
  misc_feature 1..33: note = Description of Artificial Sequence: Synthetic oligonucleotide
  source 1..33: mol_type = other DNA

SEQ ID NO: 3324 - protein, 11 aa, synthetic construct
  REGION 1..11: note = Description of Artificial Sequence: Synthetic peptide
SGDKLGDKYVC

SEQ ID NO: 3325 - DNA, 33 bp, synthetic construct; identical to SEQ ID NO: 191
  misc_feature 1..33: note = Description of Artificial Sequence: Synthetic oligonucleotide
  source 1..33: mol_type = other DNA

SEQ ID NO: 3326 - protein, 11 aa, synthetic construct
  REGION 1..11: note = Description of Artificial Sequence: Synthetic peptide
SGDKLGDKYAS

SEQ ID NO: 3327 - DNA, 33 bp, synthetic construct; identical to SEQ ID NO: 693
  misc_feature 1..33: note = Description of Artificial Sequence: Synthetic oligonucleotide
  source 1..33: mol_type = other DNA

SEQ ID NO: 3328 - protein, 11 aa, synthetic construct
  REGION 1..11: note = Description of Artificial Sequence: Synthetic peptide
SGDKLGDKYAC

SEQ ID NO: 3329 - DNA, 33 bp, synthetic construct; identical to SEQ ID NO: 191
  misc_feature 1..33: note = Description of Artificial Sequence: Synthetic oligonucleotide
  source 1..33: mol_type = other DNA

SEQ ID NO: 3330 - protein, 11 aa, synthetic construct
  REGION 1..11: note = Description of Artificial Sequence: Synthetic peptide
SGDKLGDKYAS

SEQ ID NO: 3331 - DNA, 33 bp, synthetic construct
  misc_feature 1..33: note = Description of Artificial Sequence: Synthetic oligonucleotide
  source 1..33: mol_type = other DNA
tctggagataatttgggggataaatatgcttcc

SEQ ID NO: 3332 - protein, 11 aa, synthetic construct
  REGION 1..11: note = Description of Artificial Sequence: Synthetic peptide
SGDNLGDKYAS

SEQ ID NO: 3333 - DNA, 33 bp, synthetic construct; identical to SEQ ID NO: 693
  misc_feature 1..33: note = Description of Artificial Sequence: Synthetic oligonucleotide
  source 1..33: mol_type = other DNA

SEQ ID NO: 3334 - protein, 11 aa, synthetic construct
  REGION 1..11: note = Description of Artificial Sequence: Synthetic peptide
SGDKLGDKYAC

SEQ ID NO: 3335 - DNA, 33 bp, synthetic construct; identical to SEQ ID NO: 191
  misc_feature 1..33: note = Description of Artificial Sequence: Synthetic oligonucleotide
  source 1..33: mol_type = other DNA

SEQ ID NO: 3336 - protein, 11 aa, synthetic construct
  REGION 1..11: note = Description of Artificial Sequence: Synthetic peptide
SGDKLGDKYAS

SEQ ID NO: 3337 - DNA, 33 bp, synthetic construct; identical to SEQ ID NO: 191
  misc_feature 1..33: note = Description of Artificial Sequence: Synthetic oligonucleotide
  source 1..33: mol_type = other DNA

SEQ ID NO: 3338 - protein, 11 aa, synthetic construct
  REGION 1..11: note = Description of Artificial Sequence: Synthetic peptide
SGDKLGDKYAS

SEQ ID NO: 3339 - DNA, 33 bp, synthetic construct
  misc_feature 1..33: note = Description of Artificial Sequence: Synthetic oligonucleotide
  source 1..33: mol_type = other DNA
tctggcgataaattgggaaataaatatgcttgc

SEQ ID NO: 3340 - protein, 11 aa, synthetic construct
  REGION 1..11: note = Description of Artificial Sequence: Synthetic peptide
SGDKLGNKYAC

SEQ ID NO: 3341 - DNA, 33 bp, synthetic construct; identical to SEQ ID NO: 693
  misc_feature 1..33: note = Description of Artificial Sequence: Synthetic oligonucleotide
  source 1..33: mol_type = other DNA

SEQ ID NO: 3342 - protein, 11 aa, synthetic construct
  REGION 1..11: note = Description of Artificial Sequence: Synthetic peptide
SGDKLGDKYAC

SEQ ID NO: 3343 - DNA, 33 bp, synthetic construct
  misc_feature 1..33: note = Description of Artificial Sequence: Synthetic oligonucleotide
  source 1..33: mol_type = other DNA
tctggaagtaaattgggtaataaatatgtttgc

SEQ ID NO: 3344 - protein, 11 aa, synthetic construct
  REGION 1..11: note = Description of Artificial Sequence: Synthetic peptide
SGSKLGNKYVC

SEQ ID NO: 3345 - DNA, 33 bp, synthetic construct; identical to SEQ ID NO: 693
  misc_feature 1..33: note = Description of Artificial Sequence: Synthetic oligonucleotide
  source 1..33: mol_type = other DNA

SEQ ID NO: 3346 - protein, 11 aa, synthetic construct
  REGION 1..11: note = Description of Artificial Sequence: Synthetic peptide
SGDKLGDKYAC

SEQ ID NO: 3347 - DNA, 33 bp, synthetic construct; identical to SEQ ID NO: 739
  misc_feature 1..33: note = Description of Artificial Sequence: Synthetic oligonucleotide
  source 1..33: mol_type = other DNA

SEQ ID NO: 3348 - protein, 11 aa, synthetic construct
  REGION 1..11: note = Description of Artificial Sequence: Synthetic peptide
SGDKLGDKYVC

SEQ ID NO: 3349 - DNA, 33 bp, synthetic construct; identical to SEQ ID NO: 191
  misc_feature 1..33: note = Description of Artificial Sequence: Synthetic oligonucleotide
  source 1..33: mol_type = other DNA

SEQ ID NO: 3350 - protein, 11 aa, synthetic construct
  REGION 1..11: note = Description of Artificial Sequence: Synthetic peptide
SGDKLGDKYAS

SEQ ID NO: 3351 - DNA, 33 bp, synthetic construct
  misc_feature 1..33: note = Description of Artificial Sequence: Synthetic oligonucleotide
  source 1..33: mol_type = other DNA
tctggagataaattgggaaataaatatgtttgt

SEQ ID NO: 3352 - protein, 11 aa, synthetic construct
  REGION 1..11: note = Description of Artificial Sequence: Synthetic peptide
SGDKLGNKYVC

SEQ ID NO: 3353 - DNA, 33 bp, synthetic construct; identical to SEQ ID NO: 191
  misc_feature 1..33: note = Description of Artificial Sequence: Synthetic oligonucleotide
  source 1..33: mol_type = other DNA

SEQ ID NO: 3354 - protein, 11 aa, synthetic construct
  REGION 1..11: note = Description of Artificial Sequence: Synthetic peptide
SGDKLGDKYAS

SEQ ID NO: 3355 - DNA, 33 bp, synthetic construct; identical to SEQ ID NO: 693
  misc_feature 1..33: note = Description of Artificial Sequence: Synthetic oligonucleotide
  source 1..33: mol_type = other DNA

SEQ ID NO: 3356 - protein, 11 aa, synthetic construct
  REGION 1..11: note = Description of Artificial Sequence: Synthetic peptide
SGDKLGDKYAC

SEQ ID NO: 3357 - DNA, 39 bp, synthetic construct
  misc_feature 1..39: note = Description of Artificial Sequence: Synthetic oligonucleotide
  source 1..39: mol_type = other DNA
tctggaagcagctccaacatcggaaataatgctgtaagc

SEQ ID NO: 3358 - protein, 13 aa, synthetic construct
  REGION 1..13: note = Description of Artificial Sequence: Synthetic peptide
SGSSSNIGNNAVS

SEQ ID NO: 3359 - DNA, 42 bp, synthetic construct
  misc_feature 1..42: note = Description of Artificial Sequence: Synthetic oligonucleotide
  source 1..42: mol_type = other DNA
actgggagcagctccaatatcggggcaggttatgatgtacac

SEQ ID NO: 3360 - protein, 14 aa, synthetic construct
  REGION 1..14: note = Description of Artificial Sequence: Synthetic peptide
TGSSSNIGAGYDVH

SEQ ID NO: 3361 - DNA, 33 bp, synthetic construct
  misc_feature 1..33: note = Description of Artificial Sequence: Synthetic oligonucleotide
  source 1..33: mol_type = other DNA
tctggagataagttgggggataaatatgtttgc

SEQ ID NO: 3362 - protein, 11 aa, synthetic construct
  REGION 1..11: note = Description of Artificial Sequence: Synthetic peptide
SGDKLGDKYVC

SEQ ID NO: 3363 - DNA, 33 bp, synthetic construct; identical to SEQ ID NO: 739
  misc_feature 1..33: note = Description of Artificial Sequence: Synthetic oligonucleotide
  source 1..33: mol_type = other DNA

SEQ ID NO: 3364 - protein, 11 aa, synthetic construct
  REGION 1..11: note = Description of Artificial Sequence: Synthetic peptide
SGDKLGDKYVC

SEQ ID NO: 3365 - DNA, 33 bp, synthetic construct; identical to SEQ ID NO: 3277
  misc_feature 1..33: note = Description of Artificial Sequence: Synthetic oligonucleotide
  source 1..33: mol_type = other DNA

SEQ ID NO: 3366 - protein, 11 aa, synthetic construct
  REGION 1..11: note = Description of Artificial Sequence: Synthetic peptide
SGDKLGDKYVS

SEQ ID NO: 3367 - DNA, 33 bp, synthetic construct; identical to SEQ ID NO: 3277
  misc_feature 1..33: note = Description of Artificial Sequence: Synthetic oligonucleotide
  source 1..33: mol_type = other DNA

SEQ ID NO: 3368 - protein, 11 aa, synthetic construct
  REGION 1..11: note = Description of Artificial Sequence: Synthetic peptide
SGDKLGDKYVS

SEQ ID NO: 3369 - DNA, 39 bp, synthetic construct
  misc_feature 1..39: note = Description of Artificial Sequence: Synthetic oligonucleotide
  source 1..39: mol_type = other DNA
tctggaagcagctccaacatcggaagtaatactgtaaat

SEQ ID NO: 3370 - protein, 13 aa, synthetic construct
  REGION 1..13: note = Description of Artificial Sequence: Synthetic peptide
SGSSSNIGSNTVN

SEQ ID NO: 3371 - DNA, 33 bp, synthetic construct; identical to SEQ ID NO: 739
  misc_feature 1..33: note = Description of Artificial Sequence: Synthetic oligonucleotide
  source 1..33: mol_type = other DNA

SEQ ID NO: 3372 - protein, 11 aa, synthetic construct
  REGION 1..11: note = Description of Artificial Sequence: Synthetic peptide
SGDKLGDKYVC

SEQ ID NO: 3373 - DNA, 33 bp, synthetic construct; identical to SEQ ID NO: 739
  misc_feature 1..33: note = Description of Artificial Sequence: Synthetic oligonucleotide
  source 1..33: mol_type = other DNA

SEQ ID NO: 3374 - protein, 11 aa, synthetic construct
  REGION 1..11: note = Description of Artificial Sequence: Synthetic peptide
SGDKLGDKYVC

SEQ ID NO: 3375 - DNA, 33 bp, synthetic construct; identical to SEQ ID NO: 739
  misc_feature 1..33: note = Description of Artificial Sequence: Synthetic oligonucleotide
  source 1..33: mol_type = other DNA

SEQ ID NO: 3376 - protein, 11 aa, synthetic construct
  REGION 1..11: note = Description of Artificial Sequence: Synthetic peptide
SGDKLGDKYVC

SEQ ID NO: 3377 - DNA, 33 bp, synthetic construct; identical to SEQ ID NO: 739
  misc_feature 1..33: note = Description of Artificial Sequence: Synthetic oligonucleotide
  source 1..33: mol_type = other DNA

SEQ ID NO: 3378 - protein, 11 aa, synthetic construct
  REGION 1..11: note = Description of Artificial Sequence: Synthetic peptide
SGDKLGDKYVC

SEQ ID NO: 3379 - DNA, 33 bp, synthetic construct
  misc_feature 1..33: note = Description of Artificial Sequence: Synthetic oligonucleotide
  source 1..33: mol_type = other DNA
tctggagatagattgggggataaatatgtttgc

SEQ ID NO: 3380 - protein, 11 aa, synthetic construct
  REGION 1..11: note = Description of Artificial Sequence: Synthetic peptide
SGDRLGDKYVC

SEQ ID NO: 3381 - DNA, 33 bp, synthetic construct; identical to SEQ ID NO: 739
  misc_feature 1..33: note = Description of Artificial Sequence: Synthetic oligonucleotide
  source 1..33: mol_type = other DNA

SEQ ID NO: 3382 - protein, 11 aa, synthetic construct
  REGION 1..11: note = Description of Artificial Sequence: Synthetic peptide
SGDKLGDKYVC

SEQ ID NO: 3383 - DNA, 33 bp, synthetic construct
  misc_feature 1..33: note = Description of Artificial Sequence: Synthetic oligonucleotide
  source 1..33: mol_type = other DNA
tctggagataaattgggtgataaatatgcttgc

SEQ ID NO: 3384 - protein, 11 aa, synthetic construct
  REGION 1..11: note = Description of Artificial Sequence: Synthetic peptide
SGDKLGDKYAC

SEQ ID NO: 3385 - DNA, 33 bp, synthetic construct; identical to SEQ ID NO: 3383
  misc_feature 1..33: note = Description of Artificial Sequence: Synthetic oligonucleotide
  source 1..33: mol_type = other DNA

SEQ ID NO: 3386 - protein, 11 aa, synthetic construct
  REGION 1..11: note = Description of Artificial Sequence: Synthetic peptide
SGDKLGDKYAC

SEQ ID NO: 3387 - DNA, 33 bp, synthetic construct
  misc_feature 1..33: note = Description of Artificial Sequence: Synthetic oligonucleotide
  source 1..33: mol_type = other DNA
tctggagataaattgggggataaatatgttcac

SEQ ID NO: 3388 - protein, 11 aa, synthetic construct
  REGION 1..11: note = Description of Artificial Sequence: Synthetic peptide
SGDKLGDKYVH

SEQ ID NO: 3389 - DNA, 33 bp, synthetic construct
  misc_feature 1..33: note = Description of Artificial Sequence: Synthetic oligonucleotide
  source 1..33: mol_type = other DNA
tctggagataaattgggggataaatatgtttgt

SEQ ID NO: 3390 - protein, 11 aa, synthetic construct
  REGION 1..11: note = Description of Artificial Sequence: Synthetic peptide
SGDKLGDKYVC

SEQ ID NO: 3391 - DNA, 33 bp, synthetic construct; identical to SEQ ID NO: 3389
  misc_feature 1..33: note = Description of Artificial Sequence: Synthetic oligonucleotide
  source 1..33: mol_type = other DNA

SEQ ID NO: 3392 - protein, 11 aa, synthetic construct
  REGION 1..11: note = Description of Artificial Sequence: Synthetic peptide
SGDKLGDKYVC

SEQ ID NO: 3393 - DNA, 33 bp, synthetic construct
  misc_feature 1..33: note = Description of Artificial Sequence: Synthetic oligonucleotide
  source 1..33: mol_type = other DNA
tctggagataaattggggggaaaatatgcttcc

SEQ ID NO: 3394 - protein, 11 aa, synthetic construct
  REGION 1..11: note = Description of Artificial Sequence: Synthetic peptide
SGDKLGGKYAS

SEQ ID NO: 3395 - DNA, 33 bp, synthetic construct; identical to SEQ ID NO: 693
  misc_feature 1..33: note = Description of Artificial Sequence: Synthetic oligonucleotide
  source 1..33: mol_type = other DNA

SEQ ID NO: 3396 - protein, 11 aa, synthetic construct
  REGION 1..11: note = Description of Artificial Sequence: Synthetic peptide
SGDKLGDKYAC

SEQ ID NO: 3397 - DNA, 39 bp, synthetic construct
  misc_feature 1..39: note = Description of Artificial Sequence: Synthetic oligonucleotide
  source 1..39: mol_type = other DNA
acccgcagcagtggcagcattaccggcaactatgtgcag

SEQ ID NO: 3398 - protein, 13 aa, synthetic construct
  REGION 1..13: note = Description of Artificial Sequence: Synthetic peptide
TRSSGSITGNYVQ

SEQ ID NO: 3399 - DNA, 33 bp, synthetic construct
  misc_feature 1..33: note = Description of Artificial Sequence: Synthetic oligonucleotide
  source 1..33: mol_type = other DNA
tctggagataaattgggggataaatattcttgc

SEQ ID NO: 3400 - protein, 11 aa, synthetic construct
  REGION 1..11: note = Description of Artificial Sequence: Synthetic peptide
SGDKLGDKYSC

SEQ ID NO: 3401 - DNA, 33 bp, synthetic construct
  misc_feature 1..33: note = Description of Artificial Sequence: Synthetic oligonucleotide
  source 1..33: mol_type = other DNA
tctggagataaattgggggataaatatgcttgt

SEQ ID NO: 3402 - protein, 11 aa, synthetic construct
  REGION 1..11: note = Description of Artificial Sequence: Synthetic peptide
SGDKLGDKYAC

SEQ ID NO: 3403 - DNA, 33 bp, synthetic construct; identical to SEQ ID NO: 3393
  misc_feature 1..33: note = Description of Artificial Sequence: Synthetic oligonucleotide
  source 1..33: mol_type = other DNA

SEQ ID NO: 3404 - protein, 11 aa, synthetic construct
  REGION 1..11: note = Description of Artificial Sequence: Synthetic peptide
SGDKLGGKYAS

SEQ ID NO: 3405 - DNA, 33 bp, synthetic construct
  misc_feature 1..33: note = Description of Artificial Sequence: Synthetic oligonucleotide
  source 1..33: mol_type = other DNA
caaggagacagcctcagaagctattatgcaagc

SEQ ID NO: 3406 - protein, 11 aa, synthetic construct
  REGION 1..11: note = Description of Artificial Sequence: Synthetic peptide
QGDSLRSYYAS

SEQ ID NO: 3407 - DNA, 33 bp, synthetic construct; identical to SEQ ID NO: 693
  misc_feature 1..33: note = Description of Artificial Sequence: Synthetic oligonucleotide
  source 1..33: mol_type = other DNA

SEQ ID NO: 3408 - protein, 11 aa, synthetic construct
  REGION 1..11: note = Description of Artificial Sequence: Synthetic peptide
SGDKLGDKYAC

SEQ ID NO: 3409 - DNA, 33 bp, synthetic construct
  misc_feature 1..33: note = Description of Artificial Sequence: Synthetic oligonucleotide
  source 1..33: mol_type = other DNA
caaggagacagcctcagaaactattatgtaagc

SEQ ID NO: 3410 - protein, 11 aa, synthetic construct
  REGION 1..11: note = Description of Artificial Sequence: Synthetic peptide
QGDSLRNYYVS

SEQ ID NO: 3411 - DNA, 33 bp, synthetic construct
  misc_feature 1..33: note = Description of Artificial Sequence: Synthetic oligonucleotide
  source 1..33: mol_type = other DNA
caaggagacagcctcagaaactattatgcaagc

SEQ ID NO: 3412 - protein, 11 aa, synthetic construct
  REGION 1..11: note = Description of Artificial Sequence: Synthetic peptide
QGDSLRNYYAS

SEQ ID NO: 3413 - DNA, 33 bp, synthetic construct
  misc_feature 1..33: note = Description of Artificial Sequence: Synthetic oligonucleotide
  source 1..33: mol_type = other DNA
tctggaaataaattggggaataaatatgtttgc

SEQ ID NO: 3414 - protein, 11 aa, synthetic construct
  REGION 1..11: note = Description of Artificial Sequence: Synthetic peptide
SGNKLGNKYVC

SEQ ID NO: 3415 - DNA, 42 bp, synthetic construct
  misc_feature 1..42: note = Description of Artificial Sequence: Synthetic oligonucleotide
  source 1..42: mol_type = other DNA
actggaaccagcagtgatgttggacgttttaaccttgtctcc

SEQ ID NO: 3416 - protein, 14 aa, synthetic construct
  REGION 1..14: note = Description of Artificial Sequence: Synthetic peptide
TGTSSDVGRFNLVS

SEQ ID NO: 3417 - DNA, 33 bp, synthetic construct; identical to SEQ ID NO: 3401
  misc_feature 1..33: note = Description of Artificial Sequence: Synthetic oligonucleotide
  source 1..33: mol_type = other DNA

SEQ ID NO: 3418 - protein, 11 aa, synthetic construct
  REGION 1..11: note = Description of Artificial Sequence: Synthetic peptide
SGDKLGDKYAC

SEQ ID NO: 3419 - DNA, 42 bp, synthetic construct; identical to SEQ ID NO: 3415
  misc_feature 1..42: note = Description of Artificial Sequence: Synthetic oligonucleotide
  source 1..42: mol_type = other DNA

SEQ ID NO: 3420 - protein, 14 aa, synthetic construct
  REGION 1..14: note = Description of Artificial Sequence: Synthetic peptide
TGTSSDVGRFNLVS

SEQ ID NO: 3421 - DNA, 33 bp, synthetic construct
  misc_feature 1..33: note = Description of Artificial Sequence: Synthetic oligonucleotide
  source 1..33: mol_type = other DNA
caaggagacagtctcagaaactattatgcaagc

SEQ ID NO: 3422 - protein, 11 aa, synthetic construct
  REGION 1..11: note = Description of Artificial Sequence: Synthetic peptide
QGDSLRNYYAS

SEQ ID NO: 3423 - DNA, 33 bp, synthetic construct; identical to SEQ ID NO: 739
  misc_feature 1..33: note = Description of Artificial Sequence: Synthetic oligonucleotide
  source 1..33: mol_type = other DNA

SEQ ID NO: 3424 - protein, 11 aa, synthetic construct
  REGION 1..11: note = Description of Artificial Sequence: Synthetic peptide
SGDKLGDKYVC

SEQ ID NO: 3425 - DNA, 42 bp, synthetic construct
  misc_feature 1..42: note = Description of Artificial Sequence: Synthetic oligonucleotide
  source 1..42: mol_type = other DNA
actgggagcagctccaacttcgggacagattatgatgtacac

SEQ ID NO: 3426 - protein, 14 aa, synthetic construct
  REGION 1..14: note = Description of Artificial Sequence: Synthetic peptide
TGSSSNFGTDYDVH

SEQ ID NO: 3427 - DNA, 33 bp, synthetic construct
  misc_feature 1..33: note = Description of Artificial Sequence: Synthetic oligonucleotide
  source 1..33: mol_type = other DNA
tctggagatagattgggggataaatatgcttgc

SEQ ID NO: 3428 - protein, 11 aa, synthetic construct
  REGION 1..11: note = Description of Artificial Sequence: Synthetic peptide
SGDRLGDKYAC

SEQ ID NO: 3429 - DNA, 33 bp, synthetic construct; identical to SEQ ID NO: 697
  misc_feature 1..33: note = Description of Artificial Sequence: Synthetic oligonucleotide
  source 1..33: mol_type = other DNA

SEQ ID NO: 3430 - protein, 11 aa, synthetic construct
  REGION 1..11: note = Description of Artificial Sequence: Synthetic peptide
SGDKLGEKYAC

SEQ ID NO: 3431 - DNA, 33 bp, synthetic construct
  misc_feature 1..33: note = Description of Artificial Sequence: Synthetic oligonucleotide
  source 1..33: mol_type = other DNA
tctggagataaattgggggataaatatgttagc

SEQ ID NO: 3432 - protein, 11 aa, synthetic construct
  REGION 1..11: note = Description of Artificial Sequence: Synthetic peptide
SGDKLGDKYVS

SEQ ID NO: 3433 - DNA, 33 bp, synthetic construct; identical to SEQ ID NO: 693
  misc_feature 1..33: note = Description of Artificial Sequence: Synthetic oligonucleotide
  source 1..33: mol_type = other DNA

SEQ ID NO: 3434 - protein, 11 aa, synthetic construct
  REGION 1..11: note = Description of Artificial Sequence: Synthetic peptide
SGDKLGDKYAC

SEQ ID NO: 3435 - DNA, 39 bp, synthetic construct
  misc_feature 1..39: note = Description of Artificial Sequence: Synthetic oligonucleotide
  source 1..39: mol_type = other DNA
tctggaagcagctccaacatcggaagtaatattgtgacc

SEQ ID NO: 3436 - protein, 13 aa, synthetic construct
  REGION 1..13: note = Description of Artificial Sequence: Synthetic peptide
SGSSSNIGSNIVT

SEQ ID NO: 3437 - DNA, 42 bp, synthetic construct
  misc_feature 1..42: note = Description of Artificial Sequence: Synthetic oligonucleotide
  source 1..42: mol_type = other DNA
actgggagcagctccaacatcggggcaggttttgaagtacac

SEQ ID NO: 3438 - protein, 14 aa, synthetic construct
  REGION 1..14: note = Description of Artificial Sequence: Synthetic peptide
TGSSSNIGAGFEVH

SEQ ID NO: 3439 - DNA, 39 bp, synthetic construct; identical to SEQ ID NO: 3435
  misc_feature 1..39: note = Description of Artificial Sequence: Synthetic oligonucleotide
  source 1..39: mol_type = other DNA

SEQ ID NO: 3440 - protein, 13 aa, synthetic construct
  REGION 1..13: note = Description of Artificial Sequence: Synthetic peptide
SGSSSNIGSNIVT

SEQ ID NO: 3441 - DNA, 33 bp, synthetic construct; identical to SEQ ID NO: 3277
  misc_feature 1..33: note = Description of Artificial Sequence: Synthetic oligonucleotide
  source 1..33: mol_type = other DNA

SEQ ID NO: 3442 - protein, 11 aa, synthetic construct
  REGION 1..11: note = Description of Artificial Sequence: Synthetic peptide
SGDKLGDKYVS

SEQ ID NO: 3443 - DNA, 42 bp, synthetic construct; identical to SEQ ID NO: 183
  misc_feature 1..42: note = Description of Artificial Sequence: Synthetic oligonucleotide
  source 1..42: mol_type = other DNA

SEQ ID NO: 3444 - protein, 14 aa, synthetic construct
  REGION 1..14: note = Description of Artificial Sequence: Synthetic peptide
TGTSSDVGGYNYVS

SEQ ID NO: 3445 - DNA, 33 bp, synthetic construct
  misc_feature 1..33: note = Description of Artificial Sequence: Synthetic oligonucleotide
  source 1..33: mol_type = other DNA
tctggaactaaattgggggataaatatgtttgc

SEQ ID NO: 3446 - protein, 11 aa, synthetic construct
  REGION 1..11: note = Description of Artificial Sequence: Synthetic peptide
SGTKLGDKYVC

SEQ ID NO: 3447 - DNA, 39 bp, synthetic construct
  misc_feature 1..39: note = Description of Artificial Sequence: Synthetic oligonucleotide
  source 1..39: mol_type = other DNA
tctggaagcaactccaacatcggaaataatattgtcacc

SEQ ID NO: 3448 - protein, 13 aa, synthetic construct
  REGION 1..13: note = Description of Artificial Sequence: Synthetic peptide
SGSNSNIGNNIVT

SEQ ID NO: 3449 - DNA, 39 bp, synthetic construct
  misc_feature 1..39: note = Description of Artificial Sequence: Synthetic oligonucleotide
  source 1..39: mol_type = other DNA
tctggaagcagctccaacatcggaagtcatattgttacc

SEQ ID NO: 3450 - protein, 13 aa, synthetic construct
  REGION 1..13: note = Description of Artificial Sequence: Synthetic peptide
SGSSSNIGSHIVT

SEQ ID NO: 3451 - DNA, 39 bp, synthetic construct
  misc_feature 1..39: note = Description of Artificial Sequence: Synthetic oligonucleotide
  source 1..39: mol_type = other DNA
tctggaagcagctccaacatcggaagtaatattgttacc

SEQ ID NO: 3452 - protein, 13 aa, synthetic construct
  REGION 1..13: note = Description of Artificial Sequence: Synthetic peptide
SGSSSNIGSNIVT

SEQ ID NO: 3453 - DNA, 33 bp, synthetic construct
  misc_feature 1..33: note = Description of Artificial Sequence: Synthetic oligonucleotide
  source 1..33: mol_type = other DNA
tctggagataaactgggggaaaaatatgcttgc

SEQ ID NO: 3454 - protein, 11 aa, synthetic construct
  REGION 1..11: note = Description of Artificial Sequence: Synthetic peptide
SGDKLGEKYAC

SEQ ID NO: 3455 - DNA, 33 bp, synthetic construct
  misc_feature 1..33: note = Description of Artificial Sequence: Synthetic oligonucleotide
  source 1..33: mol_type = other DNA
tctggagagaaattgggggaaaaatttgcttgc

SEQ ID NO: 3456 - protein, 11 aa, synthetic construct
  REGION 1..11: note = Description of Artificial Sequence: Synthetic peptide
SGEKLGEKFAC

SEQ ID NO: 3457 - DNA, 33 bp, synthetic construct; identical to SEQ ID NO: 3453
  misc_feature 1..33: note = Description of Artificial Sequence: Synthetic oligonucleotide
  source 1..33: mol_type = other DNA

SEQ ID NO: 3458 - protein, 11 aa, synthetic construct
  REGION 1..11: note = Description of Artificial Sequence: Synthetic peptide
SGDKLGEKYAC

SEQ ID NO: 3459 - DNA, 33 bp, synthetic construct; identical to SEQ ID NO: 701
  misc_feature 1..33: note = Description of Artificial Sequence: Synthetic oligonucleotide
  source 1..33: mol_type = other DNA

SEQ ID NO: 3460 - protein, 11 aa, synthetic construct
  REGION 1..11: note = Description of Artificial Sequence: Synthetic peptide
SGDKLGNKYAC

SEQ ID NO: 3461 - DNA, 39 bp, synthetic construct
  misc_feature 1..39: note = Description of Artificial Sequence: Synthetic oligonucleotide
  source 1..39: mol_type = other DNA
tctggaagcagctccaacattgggaataattatgtatcc

SEQ ID NO: 3462 - protein, 13 aa, synthetic construct
  REGION 1..13: note = Description of Artificial Sequence: Synthetic peptide
SGSSSNIGNNYVS

SEQ ID NO: 3463 - DNA, 33 bp, synthetic construct
  misc_feature 1..33: note = Description of Artificial Sequence: Synthetic oligonucleotide
  source 1..33: mol_type = other DNA
tctggagataaattgggggataaatatacttgc

SEQ ID NO: 3464 - protein, 11 aa, synthetic construct
  REGION 1..11: note = Description of Artificial Sequence: Synthetic peptide
SGDKLGDKYTC

SEQ ID NO: 3465 - DNA, 33 bp, synthetic construct; identical to SEQ ID NO: 693
  misc_feature 1..33: note = Description of Artificial Sequence: Synthetic oligonucleotide
  source 1..33: mol_type = other DNA

SEQ ID NO: 3466 - protein, 11 aa, synthetic construct
  REGION 1..11: note = Description of Artificial Sequence: Synthetic peptide
SGDKLGDKYAC

SEQ ID NO: 3467 - DNA, 33 bp, synthetic construct; identical to SEQ ID NO: 743
  misc_feature 1..33: note = Description of Artificial Sequence: Synthetic oligonucleotide
  source 1..33: mol_type = other DNA

SEQ ID NO: 3468 - protein, 11 aa, synthetic construct
  REGION 1..11: note = Description of Artificial Sequence: Synthetic peptide
SGDKLGNKYAC

SEQ ID NO: 3469 - DNA, 33 bp, synthetic construct; identical to SEQ ID NO: 191
  misc_feature 1..33: note = Description of Artificial Sequence: Synthetic oligonucleotide
  source 1..33: mol_type = other DNA

SEQ ID NO: 3470 - protein, 11 aa, synthetic construct
  REGION 1..11: note = Description of Artificial Sequence: Synthetic peptide
SGDKLGDKYAS

SEQ ID NO: 3471 - DNA, 33 bp, synthetic construct
  misc_feature 1..33: note = Description of Artificial Sequence: Synthetic oligonucleotide
  source 1..33: mol_type = other DNA
tctggagataaattgggggataaatatgcttct

SEQ ID NO: 3472 - protein, 11 aa, synthetic construct
  REGION 1..11: note = Description of Artificial Sequence: Synthetic peptide
SGDKLGDKYAS

SEQ ID NO: 3473 - DNA, 33 bp, synthetic construct; identical to SEQ ID NO: 693
  misc_feature 1..33: note = Description of Artificial Sequence: Synthetic oligonucleotide
  source 1..33: mol_type = other DNA

SEQ ID NO: 3474 - protein, 11 aa, synthetic construct
  REGION 1..11: note = Description of Artificial Sequence: Synthetic peptide
SGDKLGDKYAC

SEQ ID NO: 3475 - DNA, 33 bp, synthetic construct; identical to SEQ ID NO: 3453
  misc_feature 1..33: note = Description of Artificial Sequence: Synthetic oligonucleotide
  source 1..33: mol_type = other DNA

SEQ ID NO: 3476 - protein, 11 aa, synthetic construct
  REGION 1..11: note = Description of Artificial Sequence: Synthetic peptide
SGDKLGEKYAC

SEQ ID NO: 3477 - DNA, 33 bp, synthetic construct
  misc_feature 1..33: note = Description of Artificial Sequence: Synthetic oligonucleotide
  source 1..33: mol_type = other DNA
tctggaaataaattgggggataaatatgcttct

SEQ ID NO: 3478 - protein, 11 aa, synthetic construct
  REGION 1..11: note = Description of Artificial Sequence: Synthetic peptide
SGNKLGDKYAS

SEQ ID NO: 3479 - DNA, 33 bp, synthetic construct; identical to SEQ ID NO: 701
  misc_feature 1..33: note = Description of Artificial Sequence: Synthetic oligonucleotide
  source 1..33: mol_type = other DNA

SEQ ID NO: 3480 - protein, 11 aa, synthetic construct
  REGION 1..11: note = Description of Artificial Sequence: Synthetic peptide
SGDKLGNKYAC

SEQ ID NO: 3481 - DNA, 33 bp, synthetic construct; identical to SEQ ID NO: 697
  misc_feature 1..33: note = Description of Artificial Sequence: Synthetic oligonucleotide
  source 1..33: mol_type = other DNA

SEQ ID NO: 3482 - protein, 11 aa, synthetic construct
  REGION 1..11: note = Description of Artificial Sequence: Synthetic peptide
SGDKLGEKYAC

SEQ ID NO: 3483 - DNA, 33 bp, synthetic construct; identical to SEQ ID NO: 701
  misc_feature 1..33: note = Description of Artificial Sequence: Synthetic oligonucleotide
  source 1..33: mol_type = other DNA

SEQ ID NO: 3484 - protein, 11 aa, synthetic construct
  REGION 1..11: note = Description of Artificial Sequence: Synthetic peptide
SGDKLGNKYAC

SEQ ID NO: 3485 - DNA, 33 bp, synthetic construct
  misc_feature 1..33: note = Description of Artificial Sequence: Synthetic oligonucleotide
  source 1..33: mol_type = other DNA
tctggagatagattggggaataaatatgcttcc

SEQ ID NO: 3486 - protein, 11 aa, synthetic construct
  REGION 1..11: note = Description of Artificial Sequence: Synthetic peptide
SGDRLGNKYAS

SEQ ID NO: 3487 - DNA, 33 bp, synthetic construct; identical to SEQ ID NO: 701
  misc_feature 1..33: note = Description of Artificial Sequence: Synthetic oligonucleotide
  source 1..33: mol_type = other DNA

SEQ ID NO: 3488 - protein, 11 aa, synthetic construct
  REGION 1..11: note = Description of Artificial Sequence: Synthetic peptide
SGDKLGNKYAC

SEQ ID NO: 3489 - DNA, 33 bp, synthetic construct; identical to SEQ ID NO: 701
  misc_feature 1..33: note = Description of Artificial Sequence: Synthetic oligonucleotide
  source 1..33: mol_type = other DNA

SEQ ID NO: 3490 - protein, 11 aa, synthetic construct
  REGION 1..11: note = Description of Artificial Sequence: Synthetic peptide
SGDKLGNKYAC

SEQ ID NO: 3491 - DNA, 33 bp, synthetic construct
  misc_feature 1..33: note = Description of Artificial Sequence: Synthetic oligonucleotide
  source 1..33: mol_type = other DNA
tctggagataaattggggaataaatatacttgc

SEQ ID NO: 3492 - protein, 11 aa, synthetic construct
  REGION 1..11: note = Description of Artificial Sequence: Synthetic peptide
SGDKLGNKYTC

SEQ ID NO: 3493 - DNA, 39 bp, synthetic construct
  misc_feature 1..39: note = Description of Artificial Sequence: Synthetic oligonucleotide
  source 1..39: mol_type = other DNA
acccgcagcaatggcagcattgtcagcaactatgtgcag

SEQ ID NO: 3494 - protein, 13 aa, synthetic construct
  REGION 1..13: note = Description of Artificial Sequence: Synthetic peptide
TRSNGSIVSNYVQ

SEQ ID NO: 3495 - DNA, 39 bp, synthetic construct; identical to SEQ ID NO: 3493
  misc_feature 1..39: note = Description of Artificial Sequence: Synthetic oligonucleotide
  source 1..39: mol_type = other DNA

SEQ ID NO: 3496 - protein, 13 aa, synthetic construct
  REGION 1..13: note = Description of Artificial Sequence: Synthetic peptide
TRSNGSIVSNYVQ

SEQ ID NO: 3497 - DNA, 33 bp, synthetic construct
  misc_feature 1..33: note = Description of Artificial Sequence: Synthetic oligonucleotide
  source 1..33: mol_type = other DNA
tctggagataaattggggaataaatatgattac

SEQ ID NO: 3498 - protein, 11 aa, synthetic construct
  REGION 1..11: note = Description of Artificial Sequence: Synthetic peptide
SGDKLGNKYDY

SEQ ID NO: 3499 - DNA, 33 bp, synthetic construct; identical to SEQ ID NO: 701
  misc_feature 1..33: note = Description of Artificial Sequence: Synthetic oligonucleotide
  source 1..33: mol_type = other DNA

SEQ ID NO: 3500 - protein, 11 aa, synthetic construct
  REGION 1..11: note = Description of Artificial Sequence: Synthetic peptide
SGDKLGNKYAC

SEQ ID NO: 3501 - DNA, 33 bp, synthetic construct
  misc_feature 1..33: note = Description of Artificial Sequence: Synthetic oligonucleotide
  source 1..33: mol_type = other DNA
tctggagataaattggggtataaatatgcttgg

SEQ ID NO: 3502 - protein, 11 aa, synthetic construct
  REGION 1..11: note = Description of Artificial Sequence: Synthetic peptide
SGDKLGYKYAW

SEQ ID NO: 3503 - DNA, 33 bp, synthetic construct; identical to SEQ ID NO: 693
  misc_feature 1..33: note = Description of Artificial Sequence: Synthetic oligonucleotide
  source 1..33: mol_type = other DNA

SEQ ID NO: 3504 - protein, 11 aa, synthetic construct
  REGION 1..11: note = Description of Artificial Sequence: Synthetic peptide
SGDKLGDKYAC

SEQ ID NO: 3505 - DNA, 33 bp, synthetic construct; identical to SEQ ID NO: 3497
  misc_feature 1..33: note = Description of Artificial Sequence: Synthetic oligonucleotide
  source 1..33: mol_type = other DNA

SEQ ID NO: 3506 - protein, 11 aa, synthetic construct
  REGION 1..11: note = Description of Artificial Sequence: Synthetic peptide
SGDKLGNKYDY

SEQ ID NO: 3507 - DNA, 33 bp, synthetic construct
  misc_feature 1..33: note = Description of Artificial Sequence: Synthetic oligonucleotide
  source 1..33: mol_type = other DNA
tctggagataaattgggggataaatatgcttgg

SEQ ID NO: 3508 - protein, 11 aa, synthetic construct
  REGION 1..11: note = Description of Artificial Sequence: Synthetic peptide
SGDKLGDKYAW

SEQ ID NO: 3509 - DNA, 33 bp, synthetic construct; identical to SEQ ID NO: 163
  misc_feature 1..33: note = Description of Artificial Sequence: Synthetic oligonucleotide
  source 1..33: mol_type = other DNA

SEQ ID NO: 3510 - protein, 11 aa, synthetic construct
  REGION 1..11: note = Description of Artificial Sequence: Synthetic peptide
SGDKLGDKYAY

SEQ ID NO: 3511 - DNA, 33 bp, synthetic construct; identical to SEQ ID NO: 3507
  misc_feature 1..33: note = Description of Artificial Sequence: Synthetic oligonucleotide
  source 1..33: mol_type = other DNA

SEQ ID NO: 3512 - protein, 11 aa, synthetic construct
  REGION 1..11: note = Description of Artificial Sequence: Synthetic peptide
SGDKLGDKYAW

SEQ ID NO: 3513 - DNA, 33 bp, synthetic construct; identical to SEQ ID NO: 701
  misc_feature 1..33: note = Description of Artificial Sequence: Synthetic oligonucleotide
  source 1..33: mol_type = other DNA

SEQ ID NO: 3514 - protein, 11 aa, synthetic construct
  REGION 1..11: note = Description of Artificial Sequence: Synthetic peptide
SGDKLGNKYAC

SEQ ID NO: 3515 - DNA, 42 bp, synthetic construct
  misc_feature 1..42: note = Description of Artificial Sequence: Synthetic oligonucleotide
  source 1..42: mol_type = other DNA
ggcttgagctctggctcagtctctactagttactaccccagc

SEQ ID NO: 3516 - protein, 14 aa, synthetic construct
  REGION 1..14: note = Description of Artificial Sequence: Synthetic peptide
GLSSGSVSTSYYPS

SEQ ID NO: 3517 - DNA, 33 bp, synthetic construct; identical to SEQ ID NO: 701
  misc_feature 1..33: note = Description of Artificial Sequence: Synthetic oligonucleotide
  source 1..33: mol_type = other DNA

SEQ ID NO: 3518 - protein, 11 aa, synthetic construct
  REGION 1..11: note = Description of Artificial Sequence: Synthetic peptide
SGDKLGNKYAC

SEQ ID NO: 3519 - DNA, 33 bp, synthetic construct
  misc_feature 1..33: note = Description of Artificial Sequence: Synthetic oligonucleotide
  source 1..33: mol_type = other DNA
tctggagatagattggggactaaatttgcttgc

SEQ ID NO: 3520 - protein, 11 aa, synthetic construct
  REGION 1..11: note = Description of Artificial Sequence: Synthetic peptide
SGDRLGTKFAC

SEQ ID NO: 3521 - DNA, 33 bp, synthetic construct; identical to SEQ ID NO: 89
  misc_feature 1..33: note = Description of Artificial Sequence: Synthetic oligonucleotide
  source 1..33: mol_type = other DNA

SEQ ID NO: 3522 - protein, 11 aa, synthetic construct
  REGION 1..11: note = Description of Artificial Sequence: Synthetic peptide
SGDKLGNKYVC

SEQ ID NO: 3523 - DNA, 33 bp, synthetic construct; identical to SEQ ID NO: 3427
  misc_feature 1..33: note = Description of Artificial Sequence: Synthetic oligonucleotide
  source 1..33: mol_type = other DNA

SEQ ID NO: 3524 - protein, 11 aa, synthetic construct
  REGION 1..11: note = Description of Artificial Sequence: Synthetic peptide
SGDRLGDKYAC

SEQ ID NO: 3525 - DNA, 42 bp, synthetic construct
  misc_feature 1..42: note = Description of Artificial Sequence: Synthetic oligonucleotide
  source 1..42: mol_type = other DNA
gcttccagcactgaaacagtcaccagtggttcttatccgaac

SEQ ID NO: 3526 - protein, 14 aa, synthetic construct
  REGION 1..14: note = Description of Artificial Sequence: Synthetic peptide
ASSTETVTSGSYPN

SEQ ID NO: 3527 - DNA, 33 bp, synthetic construct
  misc_feature 1..33: note = Description of Artificial Sequence: Synthetic oligonucleotide
  source 1..33: mol_type = other DNA
tcaggagataaattggggaataaatatgtttcc

SEQ ID NO: 3528 - protein, 11 aa, synthetic construct
  REGION 1..11: note = Description of Artificial Sequence: Synthetic peptide
SGDKLGNKYVS

SEQ ID NO: 3529 - DNA, 33 bp, synthetic construct; identical to SEQ ID NO: 693
  misc_feature 1..33: note = Description of Artificial Sequence: Synthetic oligonucleotide
  source 1..33: mol_type = other DNA

SEQ ID NO: 3530 - protein, 11 aa, synthetic construct
  REGION 1..11: note = Description of Artificial Sequence: Synthetic peptide
SGDKLGDKYAC

SEQ ID NO: 3531 - DNA, 42 bp, synthetic construct
  misc_feature 1..42: note = Description of Artificial Sequence: Synthetic oligonucleotide
  source 1..42: mol_type = other DNA
gcttccagcactggagcagtcaccagtggttactttccaaac

SEQ ID NO: 3532 - protein, 14 aa, synthetic construct
  REGION 1..14: note = Description of Artificial Sequence: Synthetic peptide
ASSTGAVTSGYFPN

SEQ ID NO: 3533 - DNA, 33 bp, synthetic construct; identical to SEQ ID NO: 3527
  misc_feature 1..33: note = Description of Artificial Sequence: Synthetic oligonucleotide
  source 1..33: mol_type = other DNA

SEQ ID NO: 3534 - protein, 11 aa, synthetic construct
  REGION 1..11: note = Description of Artificial Sequence: Synthetic peptide
SGDKLGNKYVS

SEQ ID NO: 3535 - DNA, 33 bp, synthetic construct; identical to SEQ ID NO: 3299
  misc_feature 1..33: note = Description of Artificial Sequence: Synthetic oligonucleotide
  source 1..33: mol_type = other DNA

SEQ ID NO: 3536 - protein, 11 aa, synthetic construct
  REGION 1..11: note = Description of Artificial Sequence: Synthetic peptide
SGDKLGNKYVC

SEQ ID NO: 3537 - DNA, 33 bp, synthetic construct; identical to SEQ ID NO: 3519
  misc_feature 1..33: note = Description of Artificial Sequence: Synthetic oligonucleotide
  source 1..33: mol_type = other DNA

SEQ ID NO: 3538 - protein, 11 aa, synthetic construct
  REGION 1..11: note = Description of Artificial Sequence: Synthetic peptide
SGDRLGTKFAC

SEQ ID NO: 3539 - DNA, 33 bp, synthetic construct; identical to SEQ ID NO: 3313
  misc_feature 1..33: note = Description of Artificial Sequence: Synthetic oligonucleotide
  source 1..33: mol_type = other DNA

SEQ ID NO: 3540 - protein, 11 aa, synthetic construct
  REGION 1..11: note = Description of Artificial Sequence: Synthetic peptide
SGDKLGNKYVS

SEQ ID NO: 3541 - DNA, 33 bp, synthetic construct
  misc_feature 1..33: note = Description of Artificial Sequence: Synthetic oligonucleotide
  source 1..33: mol_type = other DNA
tctggaaataaattggggaatagatatgcttgc

SEQ ID NO: 3542 - protein, 11 aa, synthetic construct
  REGION 1..11: note = Description of Artificial Sequence: Synthetic peptide
SGNKLGNRYAC

SEQ ID NO: 3543 - DNA, 33 bp, synthetic construct; identical to SEQ ID NO: 739
  misc_feature 1..33: note = Description of Artificial Sequence: Synthetic oligonucleotide
  source 1..33: mol_type = other DNA

SEQ ID NO: 3544 - protein, 11 aa, synthetic construct
  REGION 1..11: note = Description of Artificial Sequence: Synthetic peptide
SGDKLGDKYVC

SEQ ID NO: 3545 - DNA, 33 bp, synthetic construct; identical to SEQ ID NO: 693
  misc_feature 1..33: note = Description of Artificial Sequence: Synthetic oligonucleotide
  source 1..33: mol_type = other DNA

SEQ ID NO: 3546 - protein, 11 aa, synthetic construct
  REGION 1..11: note = Description of Artificial Sequence: Synthetic peptide
SGDKLGDKYAC

SEQ ID NO: 3547 - DNA, 33 bp, synthetic construct; identical to SEQ ID NO: 709
  misc_feature 1..33: note = Description of Artificial Sequence: Synthetic oligonucleotide
  source 1..33: mol_type = other DNA

SEQ ID NO: 3548 - protein, 11 aa, synthetic construct
  REGION 1..11: note = Description of Artificial Sequence: Synthetic peptide
SGDKLGEKYAC

SEQ ID NO: 3549 - DNA, 33 bp, synthetic construct; identical to SEQ ID NO: 3401
  misc_feature 1..33: note = Description of Artificial Sequence: Synthetic oligonucleotide
  source 1..33: mol_type = other DNA

SEQ ID NO: 3550 - protein, 11 aa, synthetic construct
  REGION 1..11: note = Description of Artificial Sequence: Synthetic peptide
SGDKLGDKYAC

SEQ ID NO: 3551 - DNA, 42 bp, synthetic construct
  misc_feature 1..42: note = Description of Artificial Sequence: Synthetic oligonucleotide
  source 1..42: mol_type = other DNA
ggcttgagctctggctcagtctctactactttctaccccagc

SEQ ID NO: 3552 - protein, 14 aa, synthetic construct
  REGION 1..14: note = Description of Artificial Sequence: Synthetic peptide
GLSSGSVSTTFYPS

SEQ ID NO: 3553 - DNA, 33 bp, synthetic construct; identical to SEQ ID NO: 3271
  misc_feature 1..33: note = Description of Artificial Sequence: Synthetic oligonucleotide
  source 1..33: mol_type = other DNA

SEQ ID NO: 3554 - protein, 11 aa, synthetic construct
  REGION 1..11: note = Description of Artificial Sequence: Synthetic peptide
SGDKLGDKFAC

SEQ ID NO: 3555 - DNA, 33 bp, synthetic construct; identical to SEQ ID NO: 693
  misc_feature 1..33: note = Description of Artificial Sequence: Synthetic oligonucleotide
  source 1..33: mol_type = other DNA

SEQ ID NO: 3556 - protein, 11 aa, synthetic construct
  REGION 1..11: note = Description of Artificial Sequence: Synthetic peptide
SGDKLGDKYAC

SEQ ID NO: 3557 - DNA, 33 bp, synthetic construct
  misc_feature 1..33: note = Description of Artificial Sequence: Synthetic oligonucleotide
  source 1..33: mol_type = other DNA
tctggagataaattggggcataaatttgtttgc

SEQ ID NO: 3558 - protein, 11 aa, synthetic construct
  REGION 1..11: note = Description of Artificial Sequence: Synthetic peptide
SGDKLGHKFVC

SEQ ID NO: 3559 - DNA, 33 bp, synthetic construct
  misc_feature 1..33: note = Description of Artificial Sequence: Synthetic oligonucleotide
  source 1..33: mol_type = other DNA
tctggagataaaatgggggaaaaatatgcttgc

SEQ ID NO: 3560 - protein, 11 aa, synthetic construct
  REGION 1..11: note = Description of Artificial Sequence: Synthetic peptide
SGDKMGEKYAC

SEQ ID NO: 3561 - DNA, 42 bp, synthetic construct
  misc_feature 1..42: note = Description of Artificial Sequence: Synthetic oligonucleotide
  source 1..42: mol_type = other DNA
gcttccagcactggagcagtcaccagtggttcctatccaaac

SEQ ID NO: 3562 - protein, 14 aa, synthetic construct
  REGION 1..14: note = Description of Artificial Sequence: Synthetic peptide
ASSTGAVTSGSYPN

SEQ ID NO: 3563 - DNA, 39 bp, synthetic construct
  misc_feature 1..39: note = Description of Artificial Sequence: Synthetic oligonucleotide
  source 1..39: mol_type = other DNA
tctggaagcagctccaacattgggagtaattatgtttcc

SEQ ID NO: 3564 - protein, 13 aa, synthetic construct
  REGION 1..13: note = Description of Artificial Sequence: Synthetic peptide
SGSSSNIGSNYVS

SEQ ID NO: 3565 - DNA, 33 bp, synthetic construct
  misc_feature 1..33: note = Description of Artificial Sequence: Synthetic oligonucleotide
  source 1..33: mol_type = other DNA
tctggagataaattgggggatagatttgcttac

SEQ ID NO: 3566 - protein, 11 aa, synthetic construct
  REGION 1..11: note = Description of Artificial Sequence: Synthetic peptide
SGDKLGDRFAY

SEQ ID NO: 3567 - DNA, 33 bp, synthetic construct
  misc_feature 1..33: note = Description of Artificial Sequence: Synthetic oligonucleotide
  source 1..33: mol_type = other DNA
caaggagacaaactcagaacctattatgcaagc

SEQ ID NO: 3568 - protein, 11 aa, synthetic construct
  REGION 1..11: note = Description of Artificial Sequence: Synthetic peptide
QGDKLRTYYAS

SEQ ID NO: 3569 - DNA, 39 bp, synthetic construct
  misc_feature 1..39: note = Description of Artificial Sequence: Synthetic oligonucleotide
  source 1..39: mol_type = other DNA
tctggaagcagctccaacattggaaataattatgtatcc

SEQ ID NO: 3570 - protein, 13 aa, synthetic construct
  REGION 1..13: note = Description of Artificial Sequence: Synthetic peptide
SGSSSNIGNNYVS

SEQ ID NO: 3571 - DNA, 39 bp, synthetic construct; identical to SEQ ID NO: 3461
  misc_feature 1..39: note = Description of Artificial Sequence: Synthetic oligonucleotide
  source 1..39: mol_type = other DNA

SEQ ID NO: 3572 - protein, 13 aa, synthetic construct
  REGION 1..13: note = Description of Artificial Sequence: Synthetic peptide
SGSSSNIGNNYVS

SEQ ID NO: 3573 - DNA, 33 bp, synthetic construct
  misc_feature 1..33: note = Description of Artificial Sequence: Synthetic oligonucleotide
  source 1..33: mol_type = other DNA
caaggagacaccctcagaccctattatgtaagc

SEQ ID NO: 3574 - protein, 11 aa, synthetic construct
  REGION 1..11: note = Description of Artificial Sequence: Synthetic peptide
QGDTLRPYYVS

SEQ ID NO: 3575 - DNA, 39 bp, synthetic construct
  misc_feature 1..39: note = Description of Artificial Sequence: Synthetic oligonucleotide
  source 1..39: mol_type = other DNA
tctggaggcagctccaacattgggaataattatgtatcc

SEQ ID NO: 3576 - protein, 13 aa, synthetic construct
  REGION 1..13: note = Description of Artificial Sequence: Synthetic peptide
SGGSSNIGNNYVS

SEQ ID NO: 3577 - DNA, 39 bp, synthetic construct; identical to SEQ ID NO: 3563
  misc_feature 1..39: note = Description of Artificial Sequence: Synthetic oligonucleotide
  source 1..39: mol_type = other DNA

SEQ ID NO: 3578 - protein, 13 aa, synthetic construct
  REGION 1..13: note = Description of Artificial Sequence: Synthetic peptide
SGSSSNIGSNYVS

SEQ ID NO: 3579 - DNA, 39 bp, synthetic construct
  misc_feature 1..39: note = Description of Artificial Sequence: Synthetic oligonucleotide
  source 1..39: mol_type = other DNA
tctggaagcagctccaacattgggaatcattatgtctcc

SEQ ID NO: 3580 - protein, 13 aa, synthetic construct
  REGION 1..13: note = Description of Artificial Sequence: Synthetic peptide
SGSSSNIGNHYVS

SEQ ID NO: 3581 - DNA, 33 bp, synthetic construct; identical to SEQ ID NO: 3565
  misc_feature 1..33: note = Description of Artificial Sequence: Synthetic oligonucleotide
  source 1..33: mol_type = other DNA

SEQ ID NO: 3582 - protein, 11 aa, synthetic construct
  REGION 1..11: note = Description of Artificial Sequence: Synthetic peptide
SGDKLGDRFAY

SEQ ID NO: 3583 - DNA, 33 bp, synthetic construct
  misc_feature 1..33: note = Description of Artificial Sequence: Synthetic oligonucleotide
  source 1..33: mol_type = other DNA
caaggagacagcctcagaccctattatgcaagc

SEQ ID NO: 3584 - protein, 11 aa, synthetic construct
  REGION 1..11: note = Description of Artificial Sequence: Synthetic peptide
QGDSLRPYYAS

SEQ ID NO: 3585 - DNA, 39 bp, synthetic construct; identical to SEQ ID NO: 3563
  misc_feature 1..39: note = Description of Artificial Sequence: Synthetic oligonucleotide
  source 1..39: mol_type = other DNA

SEQ ID NO: 3586 - protein, 13 aa, synthetic construct
  REGION 1..13: note = Description of Artificial Sequence: Synthetic peptide
SGSSSNIGSNYVS

SEQ ID NO: 3587 - DNA, 42 bp, synthetic construct
  misc_feature 1..42: note = Description of Artificial Sequence: Synthetic oligonucleotide
  source 1..42: mol_type = other DNA
gtttttagcactggagcagtcaccagtggttcctttccaaac

SEQ ID NO: 3588 - protein, 14 aa, synthetic construct
  REGION 1..14: note = Description of Artificial Sequence: Synthetic peptide
VFSTGAVTSGSFPN

SEQ ID NO: 3589 - DNA, 39 bp, synthetic construct
  misc_feature 1..39: note = Description of Artificial Sequence: Synthetic oligonucleotide
  source 1..39: mol_type = other DNA
tctggaagcagctccaaccttggaaataattttgtatcc

SEQ ID NO: 3590 - protein, 13 aa, synthetic construct
  REGION 1..13: note = Description of Artificial Sequence: Synthetic peptide
SGSSSNLGNNFVS

SEQ ID NO: 3591 - DNA, 42 bp, synthetic construct
  misc_feature 1..42: note = Description of Artificial Sequence: Synthetic oligonucleotide
  source 1..42: mol_type = other DNA
gttcttagcactggagcagtcaccagtggttcctttccaaac

SEQ ID NO: 3592 - protein, 14 aa, synthetic construct
  REGION 1..14: note = Description of Artificial Sequence: Synthetic peptide
VLSTGAVTSGSFPN

SEQ ID NO: 3593 - DNA, 33 bp, synthetic construct
  misc_feature 1..33: note = Description of Artificial Sequence: Synthetic oligonucleotide
  source 1..33: mol_type = other DNA
caaggagacaccctcagaccctattatgcaagt

SEQ ID NO: 3594 - protein, 11 aa, synthetic construct
  REGION 1..11: note = Description of Artificial Sequence: Synthetic peptide
QGDTLRPYYAS

SEQ ID NO: 3595 - DNA, 33 bp, synthetic construct; identical to SEQ ID NO: 3583
  misc_feature 1..33: note = Description of Artificial Sequence: Synthetic oligonucleotide
  source 1..33: mol_type = other DNA

SEQ ID NO: 3596 - protein, 11 aa, synthetic construct
  REGION 1..11: note = Description of Artificial Sequence: Synthetic peptide
QGDSLRPYYAS

SEQ ID NO: 3597 - DNA, 39 bp, synthetic construct
  misc_feature 1..39: note = Description of Artificial Sequence: Synthetic oligonucleotide
  source 1..39: mol_type = other DNA
tctggaagcagctccaacatcgggaataattatgtatcc

SEQ ID NO: 3598 - protein, 13 aa, synthetic construct
  REGION 1..13: note = Description of Artificial Sequence: Synthetic peptide
SGSSSNIGNNYVS

SEQ ID NO: 3599 - DNA, 42 bp, synthetic construct
  misc_feature 1..42: note = Description of Artificial Sequence: Synthetic oligonucleotide
  source 1..42: mol_type = other DNA
accttacgcagtggcatcaatgttggtacctacaggatatac

SEQ ID NO: 3600 - protein, 14 aa, synthetic construct
  REGION 1..14: note = Description of Artificial Sequence: Synthetic peptide
TLRSGINVGTYRIY

SEQ ID NO: 3601 - DNA, 42 bp, synthetic construct
  misc_feature 1..42: note = Description of Artificial Sequence: Synthetic oligonucleotide
  source 1..42: mol_type = other DNA
gcttccagcactggagcagtcaccagtgcttactatccaaac

SEQ ID NO: 3602 - protein, 14 aa, synthetic construct
  REGION 1..14: note = Description of Artificial Sequence: Synthetic peptide
ASSTGAVTSAYYPN

SEQ ID NO: 3603 - DNA, 39 bp, synthetic construct; identical to SEQ ID NO: 3461
  misc_feature 1..39: note = Description of Artificial Sequence: Synthetic oligonucleotide
  source 1..39: mol_type = other DNA

SEQ ID NO: 3604 - protein, 13 aa, synthetic construct
  REGION 1..13: note = Description of Artificial Sequence: Synthetic peptide
SGSSSNIGNNYVS

SEQ ID NO: 3605 - DNA, 42 bp, synthetic construct
  misc_feature 1..42: note = Description of Artificial Sequence: Synthetic oligonucleotide
  source 1..42: mol_type = other DNA
gctttcagcactggatcagtcaccagtggttcctatccaaac

SEQ ID NO: 3606 - protein, 14 aa, synthetic construct
  REGION 1..14: note = Description of Artificial Sequence: Synthetic peptide
AFSTGSVTSGSYPN

SEQ ID NO: 3607 - DNA, 39 bp, synthetic construct; identical to SEQ ID NO: 153
  misc_feature 1..39: note = Description of Artificial Sequence: Synthetic oligonucleotide
  source 1..39: mol_type = other DNA

SEQ ID NO: 3608 - protein, 13 aa, synthetic construct
  REGION 1..13: note = Description of Artificial Sequence: Synthetic peptide
SGSSSNIGSNTVN

SEQ ID NO: 3609 - DNA, 42 bp, synthetic construct
  misc_feature 1..42: note = Description of Artificial Sequence: Synthetic oligonucleotide
  source 1..42: mol_type = other DNA
gcttccagcactggagcagtcaccagtggtaactatccacag

SEQ ID NO: 3610 - protein, 14 aa, synthetic construct
  REGION 1..14: note = Description of Artificial Sequence: Synthetic peptide
ASSTGAVTSGNYPQ

SEQ ID NO: 3611 - DNA, 42 bp, synthetic construct
  misc_feature 1..42: note = Description of Artificial Sequence: Synthetic oligonucleotide
  source 1..42: mol_type = other DNA
gctttcagcactggaacagtcaccagtggtttctatccaaac

SEQ ID NO: 3612 - protein, 14 aa, synthetic construct
  REGION 1..14: note = Description of Artificial Sequence: Synthetic peptide
AFSTGTVTSGFYPN

SEQ ID NO: 3613 - DNA, 33 bp, synthetic construct
  misc_feature 1..33: note = Description of Artificial Sequence: Synthetic oligonucleotide
  source 1..33: mol_type = other DNA
caaggagacagcctcagaagctattatgcaaac

SEQ ID NO: 3614 - protein, 11 aa, synthetic construct
  REGION 1..11: note = Description of Artificial Sequence: Synthetic peptide
QGDSLRSYYAN

SEQ ID NO: 3615 - DNA, 33 bp, synthetic construct
  misc_feature 1..33: note = Description of Artificial Sequence: Synthetic oligonucleotide
  source 1..33: mol_type = other DNA
tctggagataaattgggggatagatttgcttgc

SEQ ID NO: 3616 - protein, 11 aa, synthetic construct
  REGION 1..11: note = Description of Artificial Sequence: Synthetic peptide
SGDKLGDRFAC

SEQ ID NO: 3617 - DNA, 39 bp, synthetic construct
  misc_feature 1..39: note = Description of Artificial Sequence: Synthetic oligonucleotide
  source 1..39: mol_type = other DNA
ttcggaggcagctccaacattgggaataattatgtatcc

SEQ ID NO: 3618 - protein, 13 aa, synthetic construct
  REGION 1..13: note = Description of Artificial Sequence: Synthetic peptide
FGGSSNIGNNYVS

SEQ ID NO: 3619 - DNA, 42 bp, synthetic construct
  misc_feature 1..42: note = Description of Artificial Sequence: Synthetic oligonucleotide
  source 1..42: mol_type = other DNA
gcttccagcactggagcagtcaccagtggtaactatccaaac

SEQ ID NO: 3620 - protein, 14 aa, synthetic construct
  REGION 1..14: note = Description of Artificial Sequence: Synthetic peptide
ASSTGAVTSGNYPN

SEQ ID NO: 3621 - DNA, 39 bp, synthetic construct; identical to SEQ ID NO: 3461
  misc_feature 1..39: note = Description of Artificial Sequence: Synthetic oligonucleotide
  source 1..39: mol_type = other DNA

SEQ ID NO: 3622 - protein, 13 aa, synthetic construct
  REGION 1..13: note = Description of Artificial Sequence: Synthetic peptide
SGSSSNIGNNYVS

SEQ ID NO: 3623 - DNA, 42 bp, synthetic construct
  misc_feature 1..42: note = Description of Artificial Sequence: Synthetic oligonucleotide
  source 1..42: mol_type = other DNA
gcttccagcactggagcagtcaccagtggttcctttccaagc

SEQ ID NO: 3624 - protein, 14 aa, synthetic construct
  REGION 1..14: note = Description of Artificial Sequence: Synthetic peptide
ASSTGAVTSGSFPS

SEQ ID NO: 3625 - DNA, 39 bp, synthetic construct; identical to SEQ ID NO: 3461
  misc_feature 1..39: note = Description of Artificial Sequence: Synthetic oligonucleotide
  source 1..39: mol_type = other DNA

SEQ ID NO: 3626 - protein, 13 aa, synthetic construct
  REGION 1..13: note = Description of Artificial Sequence: Synthetic peptide
SGSSSNIGNNYVS

SEQ ID NO: 3627 - DNA, 33 bp, synthetic construct
  misc_feature 1..33: note = Description of Artificial Sequence: Synthetic oligonucleotide
  source 1..33: mol_type = other DNA
tctggagataaattggggtatagatctgtttgc

SEQ ID NO: 3628 - protein, 11 aa, synthetic construct
  REGION 1..11: note = Description of Artificial Sequence: Synthetic peptide
SGDKLGYRSVC

SEQ ID NO: 3629 - DNA, 39 bp, synthetic construct
  misc_feature 1..39: note = Description of Artificial Sequence: Synthetic oligonucleotide
  source 1..39: mol_type = other DNA
tctggaagcagctccaacatcggaagtcatactgtaaac

SEQ ID NO: 3630 - protein, 13 aa, synthetic construct
  REGION 1..13: note = Description of Artificial Sequence: Synthetic peptide
SGSSSNIGSHTVN

SEQ ID NO: 3631 - DNA, 33 bp, synthetic construct
  misc_feature 1..33: note = Description of Artificial Sequence: Synthetic oligonucleotide
  source 1..33: mol_type = other DNA
tcaggagataaattggggaataaatatgcttac

SEQ ID NO: 3632 - protein, 11 aa, synthetic construct
  REGION 1..11: note = Description of Artificial Sequence: Synthetic peptide
SGDKLGNKYAY

SEQ ID NO: 3633 - DNA, 39 bp, synthetic construct; identical to SEQ ID NO: 3575
  misc_feature 1..39: note = Description of Artificial Sequence: Synthetic oligonucleotide
  source 1..39: mol_type = other DNA

SEQ ID NO: 3634 - protein, 13 aa, synthetic construct
  REGION 1..13: note = Description of Artificial Sequence: Synthetic peptide
SGGSSNIGNNYVS

SEQ ID NO: 3635 - DNA, 42 bp, synthetic construct; identical to SEQ ID NO: 3601
  misc_feature 1..42: note = Description of Artificial Sequence: Synthetic oligonucleotide
  source 1..42: mol_type = other DNA

SEQ ID NO: 3636 - protein, 14 aa, synthetic construct
  REGION 1..14: note = Description of Artificial Sequence: Synthetic peptide
ASSTGAVTSAYYPN

SEQ ID NO: 3637 - DNA, 39 bp, synthetic construct
  misc_feature 1..39: note = Description of Artificial Sequence: Synthetic oligonucleotide
  source 1..39: mol_type = other DNA
tctggaagcagctccaacattgggaataaatatgtatcc

SEQ ID NO: 3638 - protein, 13 aa, synthetic construct
  REGION 1..13: note = Description of Artificial Sequence: Synthetic peptide
SGSSSNIGNKYVS

SEQ ID NO: 3639 - DNA, 39 bp, synthetic construct; identical to SEQ ID NO: 153
  misc_feature 1..39: note = Description of Artificial Sequence: Synthetic oligonucleotide
  source 1..39: mol_type = other DNA

SEQ ID NO: 3640 - protein, 13 aa, synthetic construct
  REGION 1..13: note = Description of Artificial Sequence: Synthetic peptide
SGSSSNIGSNTVN

SEQ ID NO: 3641 - DNA, 42 bp, synthetic construct; identical to SEQ ID NO: 3605
  misc_feature 1..42: note = Description of Artificial Sequence: Synthetic oligonucleotide
  source 1..42: mol_type = other DNA

SEQ ID NO: 3642 - protein, 14 aa, synthetic construct
  REGION 1..14: note = Description of Artificial Sequence: Synthetic peptide
AFSTGSVTSGSYPN

SEQ ID NO: 3643 - DNA, 42 bp, synthetic construct; identical to SEQ ID NO: 3601
  misc_feature 1..42: note = Description of Artificial Sequence: Synthetic oligonucleotide
  source 1..42: mol_type = other DNA

SEQ ID NO: 3644 - protein, 14 aa, synthetic construct
  REGION 1..14: note = Description of Artificial Sequence: Synthetic peptide
ASSTGAVTSAYYPN

SEQ ID NO: 3645 - DNA, 39 bp, synthetic construct
  misc_feature 1..39: note = Description of Artificial Sequence: Synthetic oligonucleotide
  source 1..39: mol_type = other DNA
tctggaagcagctccaacatcgggaataattatatatcc

SEQ ID NO: 3646 - protein, 13 aa, synthetic construct
  REGION 1..13: note = Description of Artificial Sequence: Synthetic peptide
SGSSSNIGNNYIS

SEQ ID NO: 3647 - DNA, 42 bp, synthetic construct; identical to SEQ ID NO: 3591
  misc_feature 1..42: note = Description of Artificial Sequence: Synthetic oligonucleotide
  source 1..42: mol_type = other DNA

SEQ ID NO: 3648 - protein, 14 aa, synthetic construct
  REGION 1..14: note = Description of Artificial Sequence: Synthetic peptide
VLSTGAVTSGSFPN

SEQ ID NO: 3649 - DNA, 39 bp, synthetic construct; identical to SEQ ID NO: 3461
  misc_feature 1..39: note = Description of Artificial Sequence: Synthetic oligonucleotide
  source 1..39: mol_type = other DNA

SEQ ID NO: 3650 - protein, 13 aa, synthetic construct
  REGION 1..13: note = Description of Artificial Sequence: Synthetic peptide
SGSSSNIGNNYVS

SEQ ID NO: 3651 - DNA, 39 bp, synthetic construct; identical to SEQ ID NO: 153
  misc_feature 1..39: note = Description of Artificial Sequence: Synthetic oligonucleotide
  source 1..39: mol_type = other DNA

SEQ ID NO: 3652 - protein, 13 aa, synthetic construct
  REGION 1..13: note = Description of Artificial Sequence: Synthetic peptide
SGSSSNIGSNTVN

SEQ ID NO: 3653 - DNA, 42 bp, synthetic construct
  misc_feature 1..42: note = Description of Artificial Sequence: Synthetic oligonucleotide
  source 1..42: mol_type = other DNA
gcttccaacactggagcagtcaccagtggttcctatccaaac

SEQ ID NO: 3654 - protein, 14 aa, synthetic construct
  REGION 1..14: note = Description of Artificial Sequence: Synthetic peptide
ASNTGAVTSGSYPN

SEQ ID NO: 3655 - DNA, 39 bp, synthetic construct; identical to SEQ ID NO: 3589
  misc_feature 1..39: note = Description of Artificial Sequence: Synthetic oligonucleotide
  source 1..39: mol_type = other DNA

SEQ ID NO: 3656 - protein, 13 aa, synthetic construct
  REGION 1..13: note = Description of Artificial Sequence: Synthetic peptide
SGSSSNLGNNFVS

SEQ ID NO: 3657 - DNA, 42 bp, synthetic construct
  misc_feature 1..42: note = Description of Artificial Sequence: Synthetic oligonucleotide
  source 1..42: mol_type = other DNA
gcttccaacactggagcagtcaccagtggttcctatccaaat

SEQ ID NO: 3658 - protein, 14 aa, synthetic construct
  REGION 1..14: note = Description of Artificial Sequence: Synthetic peptide
ASNTGAVTSGSYPN

SEQ ID NO: 3659 - DNA, 42 bp, synthetic construct
  misc_feature 1..42: note = Description of Artificial Sequence: Synthetic oligonucleotide
  source 1..42: mol_type = other DNA
gcttccagcactggagcagtcaccagtggttactatccaaac

SEQ ID NO: 3660 - protein, 14 aa, synthetic construct
  REGION 1..14: note = Description of Artificial Sequence: Synthetic peptide
ASSTGAVTSGYYPN

SEQ ID NO: 3661 - DNA, 33 bp, synthetic construct; identical to SEQ ID NO: 3615
  misc_feature 1..33: note = Description of Artificial Sequence: Synthetic oligonucleotide
  source 1..33: mol_type = other DNA

SEQ ID NO: 3662 - protein, 11 aa, synthetic construct
  REGION 1..11: note = Description of Artificial Sequence: Synthetic peptide
SGDKLGDRFAC

SEQ ID NO: 3663 - DNA, 33 bp, synthetic construct
  misc_feature 1..33: note = Description of Artificial Sequence: Synthetic oligonucleotide
  source 1..33: mol_type = other DNA
gggggaaacaacattggaagaaaaaatgtgcac

SEQ ID NO: 3664 - protein, 11 aa, synthetic construct
  REGION 1..11: note = Description of Artificial Sequence: Synthetic peptide
GGNNIGRKNVH

SEQ ID NO: 3665 - DNA, 33 bp, synthetic construct; identical to SEQ ID NO: 3615
  misc_feature 1..33: note = Description of Artificial Sequence: Synthetic oligonucleotide
  source 1..33: mol_type = other DNA

SEQ ID NO: 3666 - protein, 11 aa, synthetic construct
  REGION 1..11: note = Description of Artificial Sequence: Synthetic peptide
SGDKLGDRFAC

SEQ ID NO: 3667 - DNA, 33 bp, synthetic construct; identical to SEQ ID NO: 3663
  misc_feature 1..33: note = Description of Artificial Sequence: Synthetic oligonucleotide
  source 1..33: mol_type = other DNA

SEQ ID NO: 3668 - protein, 11 aa, synthetic construct
  REGION 1..11: note = Description of Artificial Sequence: Synthetic peptide
GGNNIGRKNVH

SEQ ID NO: 3669 - DNA, 33 bp, synthetic construct; identical to SEQ ID NO: 3663
  misc_feature 1..33: note = Description of Artificial Sequence: Synthetic oligonucleotide
  source 1..33: mol_type = other DNA

SEQ ID NO: 3670 - protein, 11 aa, synthetic construct
  REGION 1..11: note = Description of Artificial Sequence: Synthetic peptide
GGNNIGRKNVH

SEQ ID NO: 3671 - DNA, 39 bp, synthetic construct
  misc_feature 1..39: note = Description of Artificial Sequence: Synthetic oligonucleotide
  source 1..39: mol_type = other DNA
tctggaagcagctccaacattgggagtaattttttatcc

SEQ ID NO: 3672 - protein, 13 aa, synthetic construct
  REGION 1..13: note = Description of Artificial Sequence: Synthetic peptide
SGSSSNIGSNFLS

SEQ ID NO: 3673 - DNA, 33 bp, synthetic construct; identical to SEQ ID NO: 3663
  misc_feature 1..33: note = Description of Artificial Sequence: Synthetic oligonucleotide
  source 1..33: mol_type = other DNA

SEQ ID NO: 3674 - protein, 11 aa, synthetic construct
  REGION 1..11: note = Description of Artificial Sequence: Synthetic peptide
GGNNIGRKNVH

SEQ ID NO: 3675 - DNA, 42 bp, synthetic construct
  misc_feature 1..42: note = Description of Artificial Sequence: Synthetic oligonucleotide
  source 1..42: mol_type = other DNA
gctttcagcactggagcagtcaccagtggtaattatccaaac

SEQ ID NO: 3676 - protein, 14 aa, synthetic construct
  REGION 1..14: note = Description of Artificial Sequence: Synthetic peptide
AFSTGAVTSGNYPN

SEQ ID NO: 3677 - DNA, 42 bp, synthetic construct; identical to SEQ ID NO: 183
  misc_feature 1..42: note = Description of Artificial Sequence: Synthetic oligonucleotide
  source 1..42: mol_type = other DNA

SEQ ID NO: 3678 - protein, 14 aa, synthetic construct
  REGION 1..14: note = Description of Artificial Sequence: Synthetic peptide
TGTSSDVGGYNYVS

SEQ ID NO: 3679 - DNA, 42 bp, synthetic construct
  misc_feature 1..42: note = Description of Artificial Sequence: Synthetic oligonucleotide
  source 1..42: mol_type = other DNA
actggaaccagcagtgacgttggtggttataattatgtctcc

SEQ ID NO: 3680 - protein, 14 aa, synthetic construct
  REGION 1..14: note = Description of Artificial Sequence: Synthetic peptide
TGTSSDVGGYNYVS

SEQ ID NO: 3681 - DNA, 42 bp, synthetic construct; identical to SEQ ID NO: 183
  misc_feature 1..42: note = Description of Artificial Sequence: Synthetic oligonucleotide
  source 1..42: mol_type = other DNA

SEQ ID NO: 3682 - protein, 14 aa, synthetic construct
  REGION 1..14: note = Description of Artificial Sequence: Synthetic peptide
TGTSSDVGGYNYVS

SEQ ID NO: 3683 - DNA, 42 bp, synthetic construct
  misc_feature 1..42: note = Description of Artificial Sequence: Synthetic oligonucleotide
  source 1..42: mol_type = other DNA
actggaaccagtagtgacgttggtagttataactatgtctcc

SEQ ID NO: 3684 - protein, 14 aa, synthetic construct
  REGION 1..14: note = Description of Artificial Sequence: Synthetic peptide
TGTSSDVGSYNYVS

SEQ ID NO: 3685 - DNA, 33 bp, synthetic construct
  misc_feature 1..33: note = Description of Artificial Sequence: Synthetic oligonucleotide
  source 1..33: mol_type = other DNA
gggggaaacaacattggacgtagaaatgtgcac

SEQ ID NO: 3686 - protein, 11 aa, synthetic construct
  REGION 1..11: note = Description of Artificial Sequence: Synthetic peptide
GGNNIGRRNVH

SEQ ID NO: 3687 - DNA, 33 bp, synthetic construct
  misc_feature 1..33: note = Description of Artificial Sequence: Synthetic oligonucleotide
  source 1..33: mol_type = other DNA
tctggagatgcattgccaaagcaatatgcttat

SEQ ID NO: 3688 - protein, 11 aa, synthetic construct
  REGION 1..11: note = Description of Artificial Sequence: Synthetic peptide
SGDALPKQYAY

SEQ ID NO: 3689 - DNA, 42 bp, synthetic construct; identical to SEQ ID NO: 183
  misc_feature 1..42: note = Description of Artificial Sequence: Synthetic oligonucleotide
  source 1..42: mol_type = other DNA

SEQ ID NO: 3690 - protein, 14 aa, synthetic construct
  REGION 1..14: note = Description of Artificial Sequence: Synthetic peptide
TGTSSDVGGYNYVS

SEQ ID NO: 3691 - DNA, 42 bp, synthetic construct
  misc_feature 1..42: note = Description of Artificial Sequence: Synthetic oligonucleotide
  source 1..42: mol_type = other DNA
gctttcagcactggagcagtcaccagtggtaactatccaagt

SEQ ID NO: 3692 - protein, 14 aa, synthetic construct
  REGION 1..14: note = Description of Artificial Sequence: Synthetic peptide
AFSTGAVTSGNYPS

SEQ ID NO: 3693 - DNA, 42 bp, synthetic construct
  misc_feature 1..42: note = Description of Artificial Sequence: Synthetic oligonucleotide
  source 1..42: mol_type = other DNA
ggttccagcactggatcagtcaccagtggttactttccaaac

SEQ ID NO: 3694 - protein, 14 aa, synthetic construct
  REGION 1..14: note = Description of Artificial Sequence: Synthetic peptide
GSSTGSVTSGYFPN

SEQ ID NO: 3695 - DNA, 42 bp, synthetic construct; identical to SEQ ID NO: 3619
  misc_feature 1..42: note = Description of Artificial Sequence: Synthetic oligonucleotide
  source 1..42: mol_type = other DNA

SEQ ID NO: 3696 - protein, 14 aa, synthetic construct
  REGION 1..14: note = Description of Artificial Sequence: Synthetic peptide
ASSTGAVTSGNYPN

SEQ ID NO: 3697 - DNA, 42 bp, synthetic construct; identical to SEQ ID NO: 183
  misc_feature 1..42: note = Description of Artificial Sequence: Synthetic oligonucleotide
  source 1..42: mol_type = other DNA

SEQ ID NO: 3698 - protein, 14 aa, synthetic construct
  REGION 1..14: note = Description of Artificial Sequence: Synthetic peptide
TGTSSDVGGYNYVS

SEQ ID NO: 3699 - DNA, 42 bp, synthetic construct; identical to SEQ ID NO: 183
  misc_feature 1..42: note = Description of Artificial Sequence: Synthetic oligonucleotide
  source 1..42: mol_type = other DNA

SEQ ID NO: 3700 - protein, 14 aa, synthetic construct
  REGION 1..14: note = Description of Artificial Sequence: Synthetic peptide
TGTSSDVGGYNYVS

SEQ ID NO: 3701 - DNA, 42 bp, synthetic construct
  misc_feature 1..42: note = Description of Artificial Sequence: Synthetic oligonucleotide
  source 1..42: mol_type = other DNA
actggaaccagtagtgacgttggtggttataactatgtctcc

SEQ ID NO: 3702 - protein, 14 aa, synthetic construct
  REGION 1..14: note = Description of Artificial Sequence: Synthetic peptide
TGTSSDVGGYNYVS

SEQ ID NO: 3703 - DNA, 42 bp, synthetic construct; identical to SEQ ID NO: 3679
  misc_feature 1..42: note = Description of Artificial Sequence: Synthetic oligonucleotide
  source 1..42: mol_type = other DNA

SEQ ID NO: 3704 - protein, 14 aa, synthetic construct
  REGION 1..14: note = Description of Artificial Sequence: Synthetic peptide
TGTSSDVGGYNYVS

SEQ ID NO: 3705 - DNA, 42 bp, synthetic construct; identical to SEQ ID NO: 3659
  misc_feature 1..42: note = Description of Artificial Sequence: Synthetic oligonucleotide
  source 1..42: mol_type = other DNA

SEQ ID NO: 3706 - protein, 14 aa, synthetic construct
  REGION 1..14: note = Description of Artificial Sequence: Synthetic peptide
ASSTGAVTSGYYPN

SEQ ID NO: 3707 - DNA, 42 bp, synthetic construct; identical to SEQ ID NO: 3659
  misc_feature 1..42: note = Description of Artificial Sequence: Synthetic oligonucleotide
  source 1..42: mol_type = other DNA

SEQ ID NO: 3708 - protein, 14 aa, synthetic construct
  REGION 1..14: note = Description of Artificial Sequence: Synthetic peptide
ASSTGAVTSGYYPN

SEQ ID NO: 3709 - DNA, 42 bp, synthetic construct; identical to SEQ ID NO: 183
  misc_feature 1..42: note = Description of Artificial Sequence: Synthetic oligonucleotide
  source 1..42: mol_type = other DNA

SEQ ID NO: 3710 - protein, 14 aa, synthetic construct
  REGION 1..14: note = Description of Artificial Sequence: Synthetic peptide
TGTSSDVGGYNYVS

SEQ ID NO: 3711 - DNA, 42 bp, synthetic construct; identical to SEQ ID NO: 183
  misc_feature 1..42: note = Description of Artificial Sequence: Synthetic oligonucleotide
  source 1..42: mol_type = other DNA

SEQ ID NO: 3712 - protein, 14 aa, synthetic construct
  REGION 1..14: note = Description of Artificial Sequence: Synthetic peptide
TGTSSDVGGYNYVS

SEQ ID NO: 3713 - DNA, 42 bp, synthetic construct; identical to SEQ ID NO: 3693
  misc_feature 1..42: note = Description of Artificial Sequence: Synthetic oligonucleotide
  source 1..42: mol_type = other DNA

SEQ ID NO: 3714 - protein, 14 aa, synthetic construct
  REGION 1..14: note = Description of Artificial Sequence: Synthetic peptide
GSSTGSVTSGYFPN

SEQ ID NO: 3715 - DNA, 42 bp, synthetic construct; identical to SEQ ID NO: 183
  misc_feature 1..42: note = Description of Artificial Sequence: Synthetic oligonucleotide
  source 1..42: mol_type = other DNA

SEQ ID NO: 3716 - protein, 14 aa, synthetic construct
  REGION 1..14: note = Description of Artificial Sequence: Synthetic peptide
TGTSSDVGGYNYVS

SEQ ID NO: 3717 - DNA, 42 bp, synthetic construct; identical to SEQ ID NO: 3659
  misc_feature 1..42: note = Description of Artificial Sequence: Synthetic oligonucleotide
  source 1..42: mol_type = other DNA

SEQ ID NO: 3718 - protein, 14 aa, synthetic construct
  REGION 1..14: note = Description of Artificial Sequence: Synthetic peptide
ASSTGAVTSGYYPN

SEQ ID NO: 3719 - DNA, 39 bp, synthetic construct; identical to SEQ ID NO: 3461
  misc_feature 1..39: note = Description of Artificial Sequence: Synthetic oligonucleotide
  source 1..39: mol_type = other DNA

SEQ ID NO: 3720 - protein, 13 aa, synthetic construct
  REGION 1..13: note = Description of Artificial Sequence: Synthetic peptide
SGSSSNIGNNYVS

SEQ ID NO: 3721 - DNA, 42 bp, synthetic construct
  misc_feature 1..42: note = Description of Artificial Sequence: Synthetic oligonucleotide
  source 1..42: mol_type = other DNA
gcttccagcactggagcagtcaccagtggctactatccaaac

SEQ ID NO: 3722 - protein, 14 aa, synthetic construct
  REGION 1..14: note = Description of Artificial Sequence: Synthetic peptide
ASSTGAVTSGYYPN

SEQ ID NO: 3723 - DNA, 42 bp, synthetic construct
  misc_feature 1..42: note = Description of Artificial Sequence: Synthetic oligonucleotide
  source 1..42: mol_type = other DNA
gcttccagcactgaagccgtcaccagtggtaactatccaagc

SEQ ID NO: 3724 - protein, 14 aa, synthetic construct
  REGION 1..14: note = Description of Artificial Sequence: Synthetic peptide
ASSTEAVTSGNYPS

SEQ ID NO: 3725 - DNA, 33 bp, synthetic construct; identical to SEQ ID NO: 3271
  misc_feature 1..33: note = Description of Artificial Sequence: Synthetic oligonucleotide
  source 1..33: mol_type = other DNA

SEQ ID NO: 3726 - protein, 11 aa, synthetic construct
  REGION 1..11: note = Description of Artificial Sequence: Synthetic peptide
SGDKLGDKFAC

SEQ ID NO: 3727 - DNA, 42 bp, synthetic construct
  misc_feature 1..42: note = Description of Artificial Sequence: Synthetic oligonucleotide
  source 1..42: mol_type = other DNA
actggaaccagcagtgacattggtggttataactatgtctcc

SEQ ID NO: 3728 - protein, 14 aa, synthetic construct
  REGION 1..14: note = Description of Artificial Sequence: Synthetic peptide
TGTSSDIGGYNYVS

SEQ ID NO: 3729 - DNA, 42 bp, synthetic construct; identical to SEQ ID NO: 3659
  misc_feature 1..42: note = Description of Artificial Sequence: Synthetic oligonucleotide
  source 1..42: mol_type = other DNA

SEQ ID NO: 3730 - protein, 14 aa, synthetic construct
  REGION 1..14: note = Description of Artificial Sequence: Synthetic peptide
ASSTGAVTSGYYPN

SEQ ID NO: 3731 - DNA, 42 bp, synthetic construct; identical to SEQ ID NO: 3679
  misc_feature 1..42: note = Description of Artificial Sequence: Synthetic oligonucleotide
  source 1..42: mol_type = other DNA

SEQ ID NO: 3732 - protein, 14 aa, synthetic construct
  REGION 1..14: note = Description of Artificial Sequence: Synthetic peptide
TGTSSDVGGYNYVS

SEQ ID NO: 3733 - DNA, 42 bp, synthetic construct; identical to SEQ ID NO: 3659
  misc_feature 1..42: note = Description of Artificial Sequence: Synthetic oligonucleotide
  source 1..42: mol_type = other DNA

SEQ ID NO: 3734 - protein, 14 aa, synthetic construct
  REGION 1..14: note = Description of Artificial Sequence: Synthetic peptide
ASSTGAVTSGYYPN

SEQ ID NO: 3735 - DNA, 42 bp, synthetic construct; identical to SEQ ID NO: 3721
  misc_feature 1..42: note = Description of Artificial Sequence: Synthetic oligonucleotide
  source 1..42: mol_type = other DNA

SEQ ID NO: 3736 - protein, 14 aa, synthetic construct
  REGION 1..14: note = Description of Artificial Sequence: Synthetic peptide
ASSTGAVTSGYYPN

SEQ ID NO: 3737 - DNA, 33 bp, synthetic construct
  misc_feature 1..33: note = Description of Artificial Sequence: Synthetic oligonucleotide
  source 1..33: mol_type = other DNA
gggggagacaacattagaagaagaaatgtgcac

SEQ ID NO: 3738 - protein, 11 aa, synthetic construct
  REGION 1..11: note = Description of Artificial Sequence: Synthetic peptide
GGDNIRRRNVH

SEQ ID NO: 3739 - DNA, 42 bp, synthetic construct; identical to SEQ ID NO: 183
  misc_feature 1..42: note = Description of Artificial Sequence: Synthetic oligonucleotide
  source 1..42: mol_type = other DNA

SEQ ID NO: 3740 - protein, 14 aa, synthetic construct
  REGION 1..14: note = Description of Artificial Sequence: Synthetic peptide
TGTSSDVGGYNYVS

SEQ ID NO: 3741 - DNA, 33 bp, synthetic construct; identical to SEQ ID NO: 3687
  misc_feature 1..33: note = Description of Artificial Sequence: Synthetic oligonucleotide
  source 1..33: mol_type = other DNA

SEQ ID NO: 3742 - protein, 11 aa, synthetic construct
  REGION 1..11: note = Description of Artificial Sequence: Synthetic peptide
SGDALPKQYAY

SEQ ID NO: 3743 - DNA, 33 bp, synthetic construct
  misc_feature 1..33: note = Description of Artificial Sequence: Synthetic oligonucleotide
  source 1..33: mol_type = other DNA
tctggagatgcattgccaaaacaatatgcttat

SEQ ID NO: 3744 - protein, 11 aa, synthetic construct
  REGION 1..11: note = Description of Artificial Sequence: Synthetic peptide
SGDALPKQYAY

SEQ ID NO: 3745 - DNA, 39 bp, synthetic construct; identical to SEQ ID NO: 3461
  misc_feature 1..39: note = Description of Artificial Sequence: Synthetic oligonucleotide
  source 1..39: mol_type = other DNA

SEQ ID NO: 3746 - protein, 13 aa, synthetic construct
  REGION 1..13: note = Description of Artificial Sequence: Synthetic peptide
SGSSSNIGNNYVS

SEQ ID NO: 3747 - DNA, 33 bp, synthetic construct
  misc_feature 1..33: note = Description of Artificial Sequence: Synthetic oligonucleotide
  source 1..33: mol_type = other DNA
tctagagatgtattgccgaagcaatatgcttat

SEQ ID NO: 3748 - protein, 11 aa, synthetic construct
  REGION 1..11: note = Description of Artificial Sequence: Synthetic peptide
SRDVLPKQYAY

SEQ ID NO: 3749 - DNA, 42 bp, synthetic construct; identical to SEQ ID NO: 3679
  misc_feature 1..42: note = Description of Artificial Sequence: Synthetic oligonucleotide
  source 1..42: mol_type = other DNA

SEQ ID NO: 3750 - protein, 14 aa, synthetic construct
  REGION 1..14: note = Description of Artificial Sequence: Synthetic peptide
TGTSSDVGGYNYVS

SEQ ID NO: 3751 - DNA, 42 bp, synthetic construct; identical to SEQ ID NO: 183
  misc_feature 1..42: note = Description of Artificial Sequence: Synthetic oligonucleotide
  source 1..42: mol_type = other DNA

SEQ ID NO: 3752 - protein, 14 aa, synthetic construct
  REGION 1..14: note = Description of Artificial Sequence: Synthetic peptide
TGTSSDVGGYNYVS

SEQ ID NO: 3753 - DNA, 42 bp, synthetic construct; identical to SEQ ID NO: 183
  misc_feature 1..42: note = Description of Artificial Sequence: Synthetic oligonucleotide
  source 1..42: mol_type = other DNA

SEQ ID NO: 3754 - protein, 14 aa, synthetic construct
  REGION 1..14: note = Description of Artificial Sequence: Synthetic peptide
TGTSSDVGGYNYVS

SEQ ID NO: 3755 - DNA, 33 bp, synthetic construct
  misc_feature 1..33: note = Description of Artificial Sequence: Synthetic oligonucleotide
  source 1..33: mol_type = other DNA
tctggagataatttgggggttaaatatacttac

SEQ ID NO: 3756 - protein, 11 aa, synthetic construct
  REGION 1..11: note = Description of Artificial Sequence: Synthetic peptide
SGDNLGVKYTY

SEQ ID NO: 3757 - DNA, 42 bp, synthetic construct
  misc_feature 1..42: note = Description of Artificial Sequence: Synthetic oligonucleotide
  source 1..42: mol_type = other DNA
actgggagcagctccaacatcggggcaggttatgatgtacac

SEQ ID NO: 3758 - protein, 14 aa, synthetic construct
  REGION 1..14: note = Description of Artificial Sequence: Synthetic peptide
TGSSSNIGAGYDVH

SEQ ID NO: 3759 - DNA, 33 bp, synthetic construct; identical to SEQ ID NO: 701
  misc_feature 1..33: note = Description of Artificial Sequence: Synthetic oligonucleotide
  source 1..33: mol_type = other DNA

SEQ ID NO: 3760 - protein, 11 aa, synthetic construct
  REGION 1..11: note = Description of Artificial Sequence: Synthetic peptide
SGDKLGNKYAC

SEQ ID NO: 3761 - DNA, 33 bp, synthetic construct
  misc_feature 1..33: note = Description of Artificial Sequence: Synthetic oligonucleotide
  source 1..33: mol_type = other DNA
tctggagataatttggggaatagatatgcttgc

SEQ ID NO: 3762 - protein, 11 aa, synthetic construct
  REGION 1..11: note = Description of Artificial Sequence: Synthetic peptide
SGDNLGNRYAC

SEQ ID NO: 3763 - DNA, 33 bp, synthetic construct
  misc_feature 1..33: note = Description of Artificial Sequence: Synthetic oligonucleotide
  source 1..33: mol_type = other DNA
tctggagatacattggggggtaaatatgcttgg

SEQ ID NO: 3764 - protein, 11 aa, synthetic construct
  REGION 1..11: note = Description of Artificial Sequence: Synthetic peptide
SGDTLGGKYAW

SEQ ID NO: 3765 - DNA, 33 bp, synthetic construct
  misc_feature 1..33: note = Description of Artificial Sequence: Synthetic oligonucleotide
  source 1..33: mol_type = other DNA
tctggagatgcattgccaaggcattatgtttat

SEQ ID NO: 3766 - protein, 11 aa, synthetic construct
  REGION 1..11: note = Description of Artificial Sequence: Synthetic peptide
SGDALPRHYVY

SEQ ID NO: 3767 - DNA, 42 bp, synthetic construct; identical to SEQ ID NO: 3757
  misc_feature 1..42: note = Description of Artificial Sequence: Synthetic oligonucleotide
  source 1..42: mol_type = other DNA

SEQ ID NO: 3768 - protein, 14 aa, synthetic construct
  REGION 1..14: note = Description of Artificial Sequence: Synthetic peptide
TGSSSNIGAGYDVH

SEQ ID NO: 3769 - DNA, 33 bp, synthetic construct; identical to SEQ ID NO: 3763
  misc_feature 1..33: note = Description of Artificial Sequence: Synthetic oligonucleotide
  source 1..33: mol_type = other DNA

SEQ ID NO: 3770 - protein, 11 aa, synthetic construct
  REGION 1..11: note = Description of Artificial Sequence: Synthetic peptide
SGDTLGGKYAW

SEQ ID NO: 3771 - DNA, 42 bp, synthetic construct; identical to SEQ ID NO: 3757
  misc_feature 1..42: note = Description of Artificial Sequence: Synthetic oligonucleotide
  source 1..42: mol_type = other DNA

SEQ ID NO: 3772 - protein, 14 aa, synthetic construct
  REGION 1..14: note = Description of Artificial Sequence: Synthetic peptide
TGSSSNIGAGYDVH

SEQ ID NO: 3773 - DNA, 33 bp, synthetic construct; identical to SEQ ID NO: 697
  misc_feature 1..33: note = Description of Artificial Sequence: Synthetic oligonucleotide
  source 1..33: mol_type = other DNA

SEQ ID NO: 3774 - protein, 11 aa, synthetic construct
  REGION 1..11: note = Description of Artificial Sequence: Synthetic peptide
SGDKLGEKYAC

SEQ ID NO: 3775 - DNA, 42 bp, synthetic construct; identical to SEQ ID NO: 3757
  misc_feature 1..42: note = Description of Artificial Sequence: Synthetic oligonucleotide
  source 1..42: mol_type = other DNA

SEQ ID NO: 3776 - protein, 14 aa, synthetic construct
  REGION 1..14: note = Description of Artificial Sequence: Synthetic peptide
TGSSSNIGAGYDVH

SEQ ID NO: 3777 - DNA, 33 bp, synthetic construct; identical to SEQ ID NO: 3389
  misc_feature 1..33: note = Description of Artificial Sequence: Synthetic oligonucleotide
  source 1..33: mol_type = other DNA

SEQ ID NO: 3778 - protein, 11 aa, synthetic construct
  REGION 1..11: note = Description of Artificial Sequence: Synthetic peptide
SGDKLGDKYVC

SEQ ID NO: 3779 - DNA, 33 bp, synthetic construct
  misc_feature 1..33: note = Description of Artificial Sequence: Synthetic oligonucleotide
  source 1..33: mol_type = other DNA
tctggagatgcattgccaaaaaaatatgcttat

SEQ ID NO: 3780 - protein, 11 aa, synthetic construct
  REGION 1..11: note = Description of Artificial Sequence: Synthetic peptide
SGDALPKKYAY

SEQ ID NO: 3781 - DNA, 33 bp, synthetic construct; identical to SEQ ID NO: 293
  misc_feature 1..33: note = Description of Artificial Sequence: Synthetic oligonucleotide
  source 1..33: mol_type = other DNA

SEQ ID NO: 3782 - protein, 11 aa, synthetic construct
  REGION 1..11: note = Description of Artificial Sequence: Synthetic peptide
RASQGINNYLA

SEQ ID NO: 3783 - DNA, 33 bp, synthetic construct; identical to SEQ ID NO: 909
  misc_feature 1..33: note = Description of Artificial Sequence: Synthetic oligonucleotide
  source 1..33: mol_type = other DNA

SEQ ID NO: 3784 - protein, 11 aa, synthetic construct
  REGION 1..11: note = Description of Artificial Sequence: Synthetic peptide
RASQGIRNDLG

SEQ ID NO: 3785 - DNA, 33 bp, synthetic construct; identical to SEQ ID NO: 2199
  misc_feature 1..33: note = Description of Artificial Sequence: Synthetic oligonucleotide
  source 1..33: mol_type = other DNA

SEQ ID NO: 3786 - protein, 11 aa, synthetic construct
  REGION 1..11: note = Description of Artificial Sequence: Synthetic peptide
RASQGISHYLA

SEQ ID NO: 3787 - DNA, 48 bp, synthetic construct; identical to SEQ ID NO: 1069
  misc_feature 1..48: note = Description of Artificial Sequence: Synthetic oligonucleotide
  source 1..48: mol_type = other DNA

SEQ ID NO: 3788 - protein, 16 aa, synthetic construct
  REGION 1..16: note = Description of Artificial Sequence: Synthetic peptide
RSSQSLVYSDGNTYLN

SEQ ID NO: 3789 - DNA, 33 bp, synthetic construct
  misc_feature 1..33: note = Description of Artificial Sequence: Synthetic oligonucleotide
  source 1..33: mol_type = other DNA
agggccagtcagagtgttagcaacgacttagcc

SEQ ID NO: 3790 - protein, 11 aa, synthetic construct
  REGION 1..11: note = Description of Artificial Sequence: Synthetic peptide
RASQSVSNDLA

SEQ ID NO: 3791 - DNA, 33 bp, synthetic construct
  misc_feature 1..33: note = Description of Artificial Sequence: Synthetic oligonucleotide
  source 1..33: mol_type = other DNA
cgggcaagtcagagcattaccagctatttaaat

SEQ ID NO: 3792 - protein, 11 aa, synthetic construct
  REGION 1..11: note = Description of Artificial Sequence: Synthetic peptide
RASQSITSYLN

SEQ ID NO: 3793 - DNA, 33 bp, synthetic construct
  misc_feature 1..33: note = Description of Artificial Sequence: Synthetic oligonucleotide
  source 1..33: mol_type = other DNA
cgtgcgagtcagggtattagcagctacttagcc

SEQ ID NO: 3794 - protein, 11 aa, synthetic construct
  REGION 1..11: note = Description of Artificial Sequence: Synthetic peptide
RASQGISSYLA

SEQ ID NO: 3795 - DNA, 33 bp, synthetic construct; identical to SEQ ID NO: 173
  misc_feature 1..33: note = Description of Artificial Sequence: Synthetic oligonucleotide
  source 1..33: mol_type = other DNA

SEQ ID NO: 3796 - protein, 11 aa, synthetic construct
  REGION 1..11: note = Description of Artificial Sequence: Synthetic peptide
RASQGISRWLA

SEQ ID NO: 3797 - DNA, 48 bp, synthetic construct; identical to SEQ ID NO: 1731
  misc_feature 1..48: note = Description of Artificial Sequence: Synthetic oligonucleotide
  source 1..48: mol_type = other DNA

SEQ ID NO: 3798 - protein, 16 aa, synthetic construct
  REGION 1..16: note = Description of Artificial Sequence: Synthetic peptide
RSSQSLLHSNGHNYLD

SEQ ID NO: 3799 - DNA, 48 bp, synthetic construct; identical to SEQ ID NO: 1069
  misc_feature 1..48: note = Description of Artificial Sequence: Synthetic oligonucleotide
  source 1..48: mol_type = other DNA

SEQ ID NO: 3800 - protein, 16 aa, synthetic construct
  REGION 1..16: note = Description of Artificial Sequence: Synthetic peptide
RSSQSLVYSDGNTYLN

SEQ ID NO: 3801 - DNA, 48 bp, synthetic construct; identical to SEQ ID NO: 1069
  misc_feature 1..48: note = Description of Artificial Sequence: Synthetic oligonucleotide
  source 1..48: mol_type = other DNA

SEQ ID NO: 3802 - protein, 16 aa, synthetic construct
  REGION 1..16: note = Description of Artificial Sequence: Synthetic peptide
RSSQSLVYSDGNTYLN

SEQ ID NO: 3803 - DNA, 48 bp, synthetic construct
  misc_feature 1..48: note = Description of Artificial Sequence: Synthetic oligonucleotide
  source 1..48: mol_type = other DNA
aggtctagtcaaagcctcgtatacagtgatggaaacacctccttgaat

SEQ ID NO: 3804 - protein, 16 aa, synthetic construct
  REGION 1..16: note = Description of Artificial Sequence: Synthetic peptide
RSSQSLVYSDGNTSLN

SEQ ID NO: 3805 - DNA, 48 bp, synthetic construct; identical to SEQ ID NO: 3803
  misc_feature 1..48: note = Description of Artificial Sequence: Synthetic oligonucleotide
  source 1..48: mol_type = other DNA

SEQ ID NO: 3806 - protein, 16 aa, synthetic construct
  REGION 1..16: note = Description of Artificial Sequence: Synthetic peptide
RSSQSLVYSDGNTSLN

SEQ ID NO: 3807 - DNA, 33 bp, synthetic construct; identical to SEQ ID NO: 105
  misc_feature 1..33: note = Description of Artificial Sequence: Synthetic oligonucleotide
  source 1..33: mol_type = other DNA

SEQ ID NO: 3808 - protein, 11 aa, synthetic construct
  REGION 1..11: note = Description of Artificial Sequence: Synthetic peptide
RASQGISNYLA

SEQ ID NO: 3809 - DNA, 33 bp, synthetic construct; identical to SEQ ID NO: 283
  misc_feature 1..33: note = Description of Artificial Sequence: Synthetic oligonucleotide
  source 1..33: mol_type = other DNA

SEQ ID NO: 3810 - protein, 11 aa, synthetic construct
  REGION 1..11: note = Description of Artificial Sequence: Synthetic peptide
RASQDISNYLA

SEQ ID NO: 3811 - DNA, 33 bp, synthetic construct; identical to SEQ ID NO: 109
  misc_feature 1..33: note = Description of Artificial Sequence: Synthetic oligonucleotide
  source 1..33: mol_type = other DNA

SEQ ID NO: 3812 - protein, 11 aa, synthetic construct
  REGION 1..11: note = Description of Artificial Sequence: Synthetic peptide
RASQGIRNDLG

SEQ ID NO: 3813 - DNA, 33 bp, synthetic construct; identical to SEQ ID NO: 283
  misc_feature 1..33: note = Description of Artificial Sequence: Synthetic oligonucleotide
  source 1..33: mol_type = other DNA

SEQ ID NO: 3814 - protein, 11 aa, synthetic construct
  REGION 1..11: note = Description of Artificial Sequence: Synthetic peptide
RASQDISNYLA

SEQ ID NO: 3815 - DNA, 33 bp, synthetic construct; identical to SEQ ID NO: 283
  misc_feature 1..33: note = Description of Artificial Sequence: Synthetic oligonucleotide
  source 1..33: mol_type = other DNA

SEQ ID NO: 3816 - protein, 11 aa, synthetic construct
  REGION 1..11: note = Description of Artificial Sequence: Synthetic peptide
RASQDISNYLA

SEQ ID NO: 3817 - DNA, 48 bp, synthetic construct; identical to SEQ ID NO: 1069
  misc_feature 1..48: note = Description of Artificial Sequence: Synthetic oligonucleotide
  source 1..48: mol_type = other DNA

SEQ ID NO: 3818 - protein, 16 aa, synthetic construct
  REGION 1..16: note = Description of Artificial Sequence: Synthetic peptide
RSSQSLVYSDGNTYLN

SEQ ID NO: 3819 - DNA, 33 bp, synthetic construct; identical to SEQ ID NO: 283
  misc_feature 1..33: note = Description of Artificial Sequence: Synthetic oligonucleotide
  source 1..33: mol_type = other DNA

SEQ ID NO: 3820 - protein, 11 aa, synthetic construct
  REGION 1..11: note = Description of Artificial Sequence: Synthetic peptide
RASQDISNYLA

SEQ ID NO: 3821 - DNA, 33 bp, synthetic construct; identical to SEQ ID NO: 105
  misc_feature 1..33: note = Description of Artificial Sequence: Synthetic oligonucleotide
  source 1..33: mol_type = other DNA

SEQ ID NO: 3822 - protein, 11 aa, synthetic construct
  REGION 1..11: note = Description of Artificial Sequence: Synthetic peptide
RASQGISNYLA

SEQ ID NO: 3823 - DNA, 33 bp, synthetic construct; identical to SEQ ID NO: 205
  misc_feature 1..33: note = Description of Artificial Sequence: Synthetic oligonucleotide
  source 1..33: mol_type = other DNA

SEQ ID NO: 3824 - protein, 11 aa, synthetic construct
  REGION 1..11: note = Description of Artificial Sequence: Synthetic peptide
RASQDIRNDLG

SEQ ID NO: 3825 - DNA, 33 bp, synthetic construct
  misc_feature 1..33: note = Description of Artificial Sequence: Synthetic oligonucleotide
  source 1..33: mol_type = other DNA
cgggcaagtcagaggtttagtaactatttaaat

SEQ ID NO: 3826 - protein, 11 aa, synthetic construct
  REGION 1..11: note = Description of Artificial Sequence: Synthetic peptide
RASQRFSNYLN

SEQ ID NO: 3827 - DNA, 33 bp, synthetic construct; identical to SEQ ID NO: 113
  misc_feature 1..33: note = Description of Artificial Sequence: Synthetic oligonucleotide
  source 1..33: mol_type = other DNA

SEQ ID NO: 3828 - protein, 11 aa, synthetic construct
  REGION 1..11: note = Description of Artificial Sequence: Synthetic peptide
RASQGIRHDLG

SEQ ID NO: 3829 - DNA, 33 bp, synthetic construct; identical to SEQ ID NO: 113
  misc_feature 1..33: note = Description of Artificial Sequence: Synthetic oligonucleotide
  source 1..33: mol_type = other DNA

SEQ ID NO: 3830 - protein, 11 aa, synthetic construct
  REGION 1..11: note = Description of Artificial Sequence: Synthetic peptide
RASQGIRHDLG

SEQ ID NO: 3831 - DNA, 48 bp, synthetic construct; identical to SEQ ID NO: 1069
  misc_feature 1..48: note = Description of Artificial Sequence: Synthetic oligonucleotide
  source 1..48: mol_type = other DNA

SEQ ID NO: 3832 - protein, 16 aa, synthetic construct
  REGION 1..16: note = Description of Artificial Sequence: Synthetic peptide
RSSQSLVYSDGNTYLN

SEQ ID NO: 3833 - DNA, 33 bp, synthetic construct; identical to SEQ ID NO: 677
  misc_feature 1..33: note = Description of Artificial Sequence: Synthetic oligonucleotide
  source 1..33: mol_type = other DNA

SEQ ID NO: 3834 - protein, 11 aa, synthetic construct
  REGION 1..11: note = Description of Artificial Sequence: Synthetic peptide
QASQDIFNYLN

SEQ ID NO: 3835 - DNA, 48 bp, synthetic construct; identical to SEQ ID NO: 1731
  misc_feature 1..48: note = Description of Artificial Sequence: Synthetic oligonucleotide
  source 1..48: mol_type = other DNA

SEQ ID NO: 3836 - protein, 16 aa, synthetic construct
  REGION 1..16: note = Description of Artificial Sequence: Synthetic peptide
RSSQSLLHSNGHNYLD

SEQ ID NO: 3837 - DNA, 36 bp, synthetic construct; identical to SEQ ID NO: 1681
  misc_feature 1..36: note = Description of Artificial Sequence: Synthetic oligonucleotide
  source 1..36: mol_type = other DNA

SEQ ID NO: 3838 - protein, 12 aa, synthetic construct
  REGION 1..12: note = Description of Artificial Sequence: Synthetic peptide
RASQSVSSSYLV

SEQ ID NO: 3839 - DNA, 36 bp, synthetic construct; identical to SEQ ID NO: 1697
  misc_feature 1..36: note = Description of Artificial Sequence: Synthetic oligonucleotide
  source 1..36: mol_type = other DNA

SEQ ID NO: 3840 - protein, 12 aa, synthetic construct
  REGION 1..12: note = Description of Artificial Sequence: Synthetic peptide
RASQSVYSSYLA

SEQ ID NO: 3841 - DNA, 33 bp, synthetic construct
  misc_feature 1..33: note = Description of Artificial Sequence: Synthetic oligonucleotide
  source 1..33: mol_type = other DNA
cgggcgagtcagggcattagcatctggttagcc

SEQ ID NO: 3842 - protein, 11 aa, synthetic construct
  REGION 1..11: note = Description of Artificial Sequence: Synthetic peptide
RASQGISIWLA

SEQ ID NO: 3843 - DNA, 36 bp, synthetic construct; identical to SEQ ID NO: 1697
  misc_feature 1..36: note = Description of Artificial Sequence: Synthetic oligonucleotide
  source 1..36: mol_type = other DNA

SEQ ID NO: 3844 - protein, 12 aa, synthetic construct
  REGION 1..12: note = Description of Artificial Sequence: Synthetic peptide
RASQSVYSSYLA

SEQ ID NO: 3845 - DNA, 36 bp, synthetic construct; identical to SEQ ID NO: 1697
  misc_feature 1..36: note = Description of Artificial Sequence: Synthetic oligonucleotide
  source 1..36: mol_type = other DNA

SEQ ID NO: 3846 - protein, 12 aa, synthetic construct
  REGION 1..12: note = Description of Artificial Sequence: Synthetic peptide
RASQSVYSSYLA

SEQ ID NO: 3847 - DNA, 33 bp, synthetic construct; identical to SEQ ID NO: 1781
  misc_feature 1..33: note = Description of Artificial Sequence: Synthetic oligonucleotide
  source 1..33: mol_type = other DNA

SEQ ID NO: 3848 - protein, 11 aa, synthetic construct
  REGION 1..11: note = Description of Artificial Sequence: Synthetic peptide
RASQSVSRNLA

SEQ ID NO: 3849 - DNA, 36 bp, synthetic construct; identical to SEQ ID NO: 1713
  misc_feature 1..36: note = Description of Artificial Sequence: Synthetic oligonucleotide
  source 1..36: mol_type = other DNA

SEQ ID NO: 3850 - protein, 12 aa, synthetic construct
  REGION 1..12: note = Description of Artificial Sequence: Synthetic peptide
RASPSVDSSYLA

SEQ ID NO: 3851 - DNA, 36 bp, synthetic construct; identical to SEQ ID NO: 1697
  misc_feature 1..36: note = Description of Artificial Sequence: Synthetic oligonucleotide
  source 1..36: mol_type = other DNA

SEQ ID NO: 3852 - protein, 12 aa, synthetic construct
  REGION 1..12: note = Description of Artificial Sequence: Synthetic peptide
RASQSVYSSYLA

SEQ ID NO: 3853 - DNA, 33 bp, synthetic construct; identical to SEQ ID NO: 251
  misc_feature 1..33: note = Description of Artificial Sequence: Synthetic oligonucleotide
  source 1..33: mol_type = other DNA

SEQ ID NO: 3854 - protein, 11 aa, synthetic construct
  REGION 1..11: note = Description of Artificial Sequence: Synthetic peptide
RASQGIRNDLG

SEQ ID NO: 3855 - DNA, 36 bp, synthetic construct; identical to SEQ ID NO: 1697
  misc_feature 1..36: note = Description of Artificial Sequence: Synthetic oligonucleotide
  source 1..36: mol_type = other DNA

SEQ ID NO: 3856 - protein, 12 aa, synthetic construct
  REGION 1..12: note = Description of Artificial Sequence: Synthetic peptide
RASQSVYSSYLA

SEQ ID NO: 3857 - DNA, 51 bp, synthetic construct; identical to SEQ ID NO: 1839
  misc_feature 1..51: note = Description of Artificial Sequence: Synthetic oligonucleotide
  source 1..51: mol_type = other DNA

SEQ ID NO: 3858 - protein, 17 aa, synthetic construct
  REGION 1..17: note = Description of Artificial Sequence: Synthetic peptide
KSSQSVLHRSNNYNYLA

SEQ ID NO: 3859 - DNA, 51 bp, synthetic construct
  misc_feature 1..51: note = Description of Artificial Sequence: Synthetic oligonucleotide
  source 1..51: mol_type = other DNA
aagtccagccagagtattttacacagctccaacaattacaattacttagct

SEQ ID NO: 3860 - protein, 17 aa, synthetic construct
  REGION 1..17: note = Description of Artificial Sequence: Synthetic peptide
KSSQSILHSSNNYNYLA

SEQ ID NO: 3861 - DNA, 51 bp, synthetic construct; identical to SEQ ID NO: 1685
  misc_feature 1..51: note = Description of Artificial Sequence: Synthetic oligonucleotide
  source 1..51: mol_type = other DNA

SEQ ID NO: 3862 - protein, 17 aa, synthetic construct
  REGION 1..17: note = Description of Artificial Sequence: Synthetic peptide
KSSQSVLYSSNNANYLA

SEQ ID NO: 3863 - DNA, 36 bp, synthetic construct; identical to SEQ ID NO: 1697
  misc_feature 1..36: note = Description of Artificial Sequence: Synthetic oligonucleotide
  source 1..36: mol_type = other DNA

SEQ ID NO: 3864 - protein, 12 aa, synthetic construct
  REGION 1..12: note = Description of Artificial Sequence: Synthetic peptide
RASQSVYSSYLA

SEQ ID NO: 3865 - DNA, 48 bp, synthetic construct; identical to SEQ ID NO: 2021
  misc_feature 1..48: note = Description of Artificial Sequence: Synthetic oligonucleotide
  source 1..48: mol_type = other DNA

SEQ ID NO: 3866 - protein, 16 aa, synthetic construct
  REGION 1..16: note = Description of Artificial Sequence: Synthetic peptide
RSSQSLVHSSGYNYLD

SEQ ID NO: 3867 - DNA, 36 bp, synthetic construct; identical to SEQ ID NO: 1681
  misc_feature 1..36: note = Description of Artificial Sequence: Synthetic oligonucleotide
  source 1..36: mol_type = other DNA

SEQ ID NO: 3868 - protein, 12 aa, synthetic construct
  REGION 1..12: note = Description of Artificial Sequence: Synthetic peptide
RASQSVSSSYLV

SEQ ID NO: 3869 - DNA, 51 bp, synthetic construct; identical to SEQ ID NO: 1683
  misc_feature 1..51: note = Description of Artificial Sequence: Synthetic oligonucleotide
  source 1..51: mol_type = other DNA

SEQ ID NO: 3870 - protein, 17 aa, synthetic construct
  REGION 1..17: note = Description of Artificial Sequence: Synthetic peptide
KSSQSVLHSSNNKNYLT

SEQ ID NO: 3871 - DNA, 36 bp, synthetic construct; identical to SEQ ID NO: 455
  misc_feature 1..36: note = Description of Artificial Sequence: Synthetic oligonucleotide
  source 1..36: mol_type = other DNA

SEQ ID NO: 3872 - protein, 12 aa, synthetic construct
  REGION 1..12: note = Description of Artificial Sequence: Synthetic peptide
RASQSFSSSYLA

SEQ ID NO: 3873 - DNA, 33 bp, synthetic construct; identical to SEQ ID NO: 3039
  misc_feature 1..33: note = Description of Artificial Sequence: Synthetic oligonucleotide
  source 1..33: mol_type = other DNA

SEQ ID NO: 3874 - protein, 11 aa, synthetic construct
  REGION 1..11: note = Description of Artificial Sequence: Synthetic peptide
RASQGISSYLA

SEQ ID NO: 3875 - DNA, 51 bp, synthetic construct; identical to SEQ ID NO: 479
  misc_feature 1..51: note = Description of Artificial Sequence: Synthetic oligonucleotide
  source 1..51: mol_type = other DNA

SEQ ID NO: 3876 - protein, 17 aa, synthetic construct
  REGION 1..17: note = Description of Artificial Sequence: Synthetic peptide
KSSQSVLYSSHNNNYLA

SEQ ID NO: 3877 - DNA, 51 bp, synthetic construct; identical to SEQ ID NO: 479
  misc_feature 1..51: note = Description of Artificial Sequence: Synthetic oligonucleotide
  source 1..51: mol_type = other DNA

SEQ ID NO: 3878 - protein, 17 aa, synthetic construct
  REGION 1..17: note = Description of Artificial Sequence: Synthetic peptide
KSSQSVLYSSHNNNYLA

SEQ ID NO: 3879 - DNA, 51 bp, synthetic construct; identical to SEQ ID NO: 479
  misc_feature 1..51: note = Description of Artificial Sequence: Synthetic oligonucleotide
  source 1..51: mol_type = other DNA

SEQ ID NO: 3880 - protein, 17 aa, synthetic construct
  REGION 1..17: note = Description of Artificial Sequence: Synthetic peptide
KSSQSVLYSSHNNNYLA

SEQ ID NO: 3881 - DNA, 51 bp, synthetic construct; identical to SEQ ID NO: 479
  misc_feature 1..51: note = Description of Artificial Sequence: Synthetic oligonucleotide
  source 1..51: mol_type = other DNA

SEQ ID NO: 3882 - protein, 17 aa, synthetic construct
  REGION 1..17: note = Description of Artificial Sequence: Synthetic peptide
KSSQSVLYSSHNNNYLA

SEQ ID NO: 3883 - DNA, 51 bp, synthetic construct; identical to SEQ ID NO: 479
  misc_feature 1..51: note = Description of Artificial Sequence: Synthetic oligonucleotide
  source 1..51: mol_type = other DNA

SEQ ID NO: 3884 - protein, 17 aa, synthetic construct
  REGION 1..17: note = Description of Artificial Sequence: Synthetic peptide
KSSQSVLYSSHNNNYLA

SEQ ID NO: 3885 - DNA, 51 bp, synthetic construct; identical to SEQ ID NO: 479
  misc_feature 1..51: note = Description of Artificial Sequence: Synthetic oligonucleotide
  source 1..51: mol_type = other DNA

SEQ ID NO: 3886 - protein, 17 aa, synthetic construct
  REGION 1..17: note = Description of Artificial Sequence: Synthetic peptide
KSSQSVLYSSHNNNYLA

SEQ ID NO: 3887 - DNA, 51 bp, synthetic construct; identical to SEQ ID NO: 479
  misc_feature 1..51: note = Description of Artificial Sequence: Synthetic oligonucleotide
  source 1..51: mol_type = other DNA

SEQ ID NO: 3888 - protein, 17 aa, synthetic construct
  REGION 1..17: note = Description of Artificial Sequence: Synthetic peptide
KSSQSVLYSSHNNNYLA

SEQ ID NO: 3889 - DNA, 51 bp, synthetic construct; identical to SEQ ID NO: 479
  misc_feature 1..51: note = Description of Artificial Sequence: Synthetic oligonucleotide
  source 1..51: mol_type = other DNA

SEQ ID NO: 3890 - protein, 17 aa, synthetic construct
  REGION 1..17: note = Description of Artificial Sequence: Synthetic peptide
KSSQSVLYSSHNNNYLA

SEQ ID NO: 3891 - DNA, 51 bp, synthetic construct; identical to SEQ ID NO: 479
  misc_feature 1..51: note = Description of Artificial Sequence: Synthetic oligonucleotide
  source 1..51: mol_type = other DNA

SEQ ID NO: 3892 - protein, 17 aa, synthetic construct
  REGION 1..17: note = Description of Artificial Sequence: Synthetic peptide
KSSQSVLYSSHNNNYLA

SEQ ID NO: 3893 - DNA, 51 bp, synthetic construct; identical to SEQ ID NO: 479
  misc_feature 1..51: note = Description of Artificial Sequence: Synthetic oligonucleotide
  source 1..51: mol_type = other DNA

SEQ ID NO: 3894 - protein, 17 aa, synthetic construct
  REGION 1..17: note = Description of Artificial Sequence: Synthetic peptide
KSSQSVLYSSHNNNYLA

SEQ ID NO: 3895 - DNA, 51 bp, synthetic construct; identical to SEQ ID NO: 479
  misc_feature 1..51: note = Description of Artificial Sequence: Synthetic oligonucleotide
  source 1..51: mol_type = other DNA

SEQ ID NO: 3896 - protein, 17 aa, synthetic construct
  REGION 1..17: note = Description of Artificial Sequence: Synthetic peptide
KSSQSVLYSSHNNNYLA

SEQ ID NO: 3897 - DNA, 51 bp, synthetic construct; identical to SEQ ID NO: 479
  misc_feature 1..51: note = Description of Artificial Sequence: Synthetic oligonucleotide
  source 1..51: mol_type = other DNA

SEQ ID NO: 3898 - protein, 17 aa, synthetic construct
  REGION 1..17: note = Description of Artificial Sequence: Synthetic peptide
KSSQSVLYSSHNNNYLA

SEQ ID NO: 3899 - DNA, 51 bp, synthetic construct; identical to SEQ ID NO: 1129
  misc_feature 1..51: note = Description of Artificial Sequence: Synthetic oligonucleotide
  source 1..51: mol_type = other DNA

SEQ ID NO: 3900 - protein, 17 aa, synthetic construct
  REGION 1..17: note = Description of Artificial Sequence: Synthetic peptide
KSSQSILHSSNNNNYLA

SEQ ID NO: 3901 - DNA, 51 bp, synthetic construct; identical to SEQ ID NO: 1129
  misc_feature 1..51: note = Description of Artificial Sequence: Synthetic oligonucleotide
  source 1..51: mol_type = other DNA

SEQ ID NO: 3902 - protein, 17 aa, synthetic construct
  REGION 1..17: note = Description of Artificial Sequence: Synthetic peptide
KSSQSILHSSNNNNYLA

SEQ ID NO: 3903 - DNA, 51 bp, synthetic construct; identical to SEQ ID NO: 1129
  misc_feature 1..51: note = Description of Artificial Sequence: Synthetic oligonucleotide
  source 1..51: mol_type = other DNA

SEQ ID NO: 3904 - protein, 17 aa, synthetic construct
  REGION 1..17: note = Description of Artificial Sequence: Synthetic peptide
KSSQSILHSSNNNNYLA

SEQ ID NO: 3905 - DNA, 51 bp, synthetic construct; identical to SEQ ID NO: 1129
  misc_feature 1..51: note = Description of Artificial Sequence: Synthetic oligonucleotide
  source 1..51: mol_type = other DNA

SEQ ID NO: 3906 - protein, 17 aa, synthetic construct
  REGION 1..17: note = Description of Artificial Sequence: Synthetic peptide
KSSQSILHSSNNNNYLA

SEQ ID NO: 3907 - DNA, 51 bp, synthetic construct; identical to SEQ ID NO: 1129
  misc_feature 1..51: note = Description of Artificial Sequence: Synthetic oligonucleotide
  source 1..51: mol_type = other DNA

SEQ ID NO: 3908 - protein, 17 aa, synthetic construct
  REGION 1..17: note = Description of Artificial Sequence: Synthetic peptide
KSSQSILHSSNNNNYLA

SEQ ID NO: 3909 - DNA, 51 bp, synthetic construct; identical to SEQ ID NO: 1129
  misc_feature 1..51: note = Description of Artificial Sequence: Synthetic oligonucleotide
  source 1..51: mol_type = other DNA

SEQ ID NO: 3910 - protein, 17 aa, synthetic construct
  REGION 1..17: note = Description of Artificial Sequence: Synthetic peptide
KSSQSILHSSNNNNYLA

SEQ ID NO: 3911 - DNA, 51 bp, synthetic construct; identical to SEQ ID NO: 1129
  misc_feature 1..51: note = Description of Artificial Sequence: Synthetic oligonucleotide
  source 1..51: mol_type = other DNA

SEQ ID NO: 3912 - protein, 17 aa, synthetic construct
  REGION 1..17: note = Description of Artificial Sequence: Synthetic peptide
KSSQSILHSSNNNNYLA

SEQ ID NO: 3913 - DNA, 51 bp, synthetic construct; identical to SEQ ID NO: 1129
  misc_feature 1..51: note = Description of Artificial Sequence: Synthetic oligonucleotide
  source 1..51: mol_type = other DNA

SEQ ID NO: 3914 - protein, 17 aa, synthetic construct
  REGION 1..17: note = Description of Artificial Sequence: Synthetic peptide
KSSQSILHSSNNNNYLA

SEQ ID NO: 3915 - DNA, 51 bp, synthetic construct; identical to SEQ ID NO: 1129
  misc_feature 1..51: note = Description of Artificial Sequence: Synthetic oligonucleotide
  source 1..51: mol_type = other DNA

SEQ ID NO: 3916 - protein, 17 aa, synthetic construct
  REGION 1..17: note = Description of Artificial Sequence: Synthetic peptide
KSSQSILHSSNNNNYLA

SEQ ID NO: 3917 - DNA, 51 bp, synthetic construct; identical to SEQ ID NO: 1129
  misc_feature 1..51: note = Description of Artificial Sequence: Synthetic oligonucleotide
  source 1..51: mol_type = other DNA

SEQ ID NO: 3918 - protein, 17 aa, synthetic construct
  REGION 1..17: note = Description of Artificial Sequence: Synthetic peptide
KSSQSILHSSNNNNYLA

SEQ ID NO: 3919 - DNA, 51 bp, synthetic construct; identical to SEQ ID NO: 1129
  misc_feature 1..51: note = Description of Artificial Sequence: Synthetic oligonucleotide
  source 1..51: mol_type = other DNA

SEQ ID NO: 3920 - protein, 17 aa, synthetic construct
  REGION 1..17: note = Description of Artificial Sequence: Synthetic peptide
KSSQSILHSSNNNNYLA

SEQ ID NO: 3921 - DNA, 51 bp, synthetic construct; identical to SEQ ID NO: 1129
  misc_feature 1..51: note = Description of Artificial Sequence: Synthetic oligonucleotide
  source 1..51: mol_type = other DNA

SEQ ID NO: 3922 - protein, 17 aa, synthetic construct
  REGION 1..17: note = Description of Artificial Sequence: Synthetic peptide
KSSQSILHSSNNNNYLA

SEQ ID NO: 3923 - DNA, 51 bp, synthetic construct; identical to SEQ ID NO: 1129
  misc_feature 1..51: note = Description of Artificial Sequence: Synthetic oligonucleotide
  source 1..51: mol_type = other DNA

SEQ ID NO: 3924 - protein, 17 aa, synthetic construct
  REGION 1..17: note = Description of Artificial Sequence: Synthetic peptide
KSSQSILHSSNNNNYLA

SEQ ID NO: 3925 - DNA, 51 bp, synthetic construct; identical to SEQ ID NO: 1129
  misc_feature 1..51: note = Description of Artificial Sequence: Synthetic oligonucleotide
  source 1..51: mol_type = other DNA

SEQ ID NO: 3926 - protein, 17 aa, synthetic construct
  REGION 1..17: note = Description of Artificial Sequence: Synthetic peptide
KSSQSILHSSNNNNYLA

SEQ ID NO: 3927 - DNA, 51 bp, synthetic construct; identical to SEQ ID NO: 1129
  misc_feature 1..51: note = Description of Artificial Sequence: Synthetic oligonucleotide
  source 1..51: mol_type = other DNA

SEQ ID NO: 3928 - protein, 17 aa, synthetic construct
  REGION 1..17: note = Description of Artificial Sequence: Synthetic peptide
KSSQSILHSSNNNNYLA

SEQ ID NO: 3929 - DNA, 51 bp, synthetic construct; identical to SEQ ID NO: 1129
  misc_feature 1..51: note = Description of Artificial Sequence: Synthetic oligonucleotide
  source 1..51: mol_type = other DNA

SEQ ID NO: 3930 - protein, 17 aa, synthetic construct
  REGION 1..17: note = Description of Artificial Sequence: Synthetic peptide
KSSQSILHSSNNNNYLA

SEQ ID NO: 3931 - DNA, 51 bp, synthetic construct; identical to SEQ ID NO: 1129
  misc_feature 1..51: note = Description of Artificial Sequence: Synthetic oligonucleotide
  source 1..51: mol_type = other DNA

SEQ ID NO: 3932 - protein, 17 aa, synthetic construct
  REGION 1..17: note = Description of Artificial Sequence: Synthetic peptide
KSSQSILHSSNNNNYLA

SEQ ID NO: 3933 - DNA, 51 bp, synthetic construct; identical to SEQ ID NO: 1129
  misc_feature 1..51: note = Description of Artificial Sequence: Synthetic oligonucleotide
  source 1..51: mol_type = other DNA

SEQ ID NO: 3934 - protein, 17 aa, synthetic construct
  REGION 1..17: note = Description of Artificial Sequence: Synthetic peptide
KSSQSILHSSNNNNYLA

SEQ ID NO: 3935 - DNA, 33 bp, synthetic construct; identical to SEQ ID NO: 173
  misc_feature 1..33: note = Description of Artificial Sequence: Synthetic oligonucleotide
  source 1..33: mol_type = other DNA

SEQ ID NO: 3936 - protein, 11 aa, synthetic construct
  REGION 1..11: note = Description of Artificial Sequence: Synthetic peptide
RASQGISRWLA

SEQ ID NO: 3937 - DNA, 33 bp, synthetic construct; identical to SEQ ID NO: 173
  misc_feature 1..33: note = Description of Artificial Sequence: Synthetic oligonucleotide
  source 1..33: mol_type = other DNA

SEQ ID NO: 3938 - protein, 11 aa, synthetic construct
  REGION 1..11: note = Description of Artificial Sequence: Synthetic peptide
RASQGISRWLA

SEQ ID NO: 3939 - DNA, 33 bp, synthetic construct; identical to SEQ ID NO: 173
  misc_feature 1..33: note = Description of Artificial Sequence: Synthetic oligonucleotide
  source 1..33: mol_type = other DNA

SEQ ID NO: 3940 - protein, 11 aa, synthetic construct
  REGION 1..11: note = Description of Artificial Sequence: Synthetic peptide
RASQGISRWLA

SEQ ID NO: 3941 - DNA, 33 bp, synthetic construct; identical to SEQ ID NO: 173
  misc_feature 1..33: note = Description of Artificial Sequence: Synthetic oligonucleotide
  source 1..33: mol_type = other DNA

SEQ ID NO: 3942 - protein, 11 aa, synthetic construct
  REGION 1..11: note = Description of Artificial Sequence: Synthetic peptide
RASQGISRWLA

SEQ ID NO: 3943 - DNA, 33 bp, synthetic construct; identical to SEQ ID NO: 173
  misc_feature 1..33: note = Description of Artificial Sequence: Synthetic oligonucleotide
  source 1..33: mol_type = other DNA

SEQ ID NO: 3944 - protein, 11 aa, synthetic construct
  REGION 1..11: note = Description of Artificial Sequence: Synthetic peptide
RASQGISRWLA

SEQ ID NO: 3945 - DNA, 33 bp, synthetic construct; identical to SEQ ID NO: 173
  misc_feature 1..33: note = Description of Artificial Sequence: Synthetic oligonucleotide
  source 1..33: mol_type = other DNA

SEQ ID NO: 3946 - protein, 11 aa, synthetic construct
  REGION 1..11: note = Description of Artificial Sequence: Synthetic peptide
RASQGISRWLA

SEQ ID NO: 3947 - DNA, 33 bp, synthetic construct; identical to SEQ ID NO: 173
  misc_feature 1..33: note = Description of Artificial Sequence: Synthetic oligonucleotide
  source 1..33: mol_type = other DNA

SEQ ID NO: 3948 - protein, 11 aa, synthetic construct
  REGION 1..11: note = Description of Artificial Sequence: Synthetic peptide
RASQGISRWLA

SEQ ID NO: 3949 - DNA, 33 bp, synthetic construct; identical to SEQ ID NO: 173
  misc_feature 1..33: note = Description of Artificial Sequence: Synthetic oligonucleotide
  source 1..33: mol_type = other DNA

SEQ ID NO: 3950 - protein, 11 aa, synthetic construct
  REGION 1..11: note = Description of Artificial Sequence: Synthetic peptide
RASQGISRWLA

SEQ ID NO: 3951 - DNA, 33 bp, synthetic construct; identical to SEQ ID NO: 109
  misc_feature 1..33: note = Description of Artificial Sequence: Synthetic oligonucleotide
  source 1..33: mol_type = other DNA

SEQ ID NO: 3952 - protein, 11 aa, synthetic construct
  REGION 1..11: note = Description of Artificial Sequence: Synthetic peptide
RASQGIRNDLG

SEQ ID NO: 3953 - DNA, 33 bp, synthetic construct; identical to SEQ ID NO: 109
  misc_feature 1..33: note = Description of Artificial Sequence: Synthetic oligonucleotide
  source 1..33: mol_type = other DNA

SEQ ID NO: 3954 - protein, 11 aa, synthetic construct
  REGION 1..11: note = Description of Artificial Sequence: Synthetic peptide
RASQGIRNDLG

SEQ ID NO: 3955 - DNA, 33 bp, synthetic construct; identical to SEQ ID NO: 109
  misc_feature 1..33: note = Description of Artificial Sequence: Synthetic oligonucleotide
  source 1..33: mol_type = other DNA

SEQ ID NO: 3956 - protein, 11 aa, synthetic construct
  REGION 1..11: note = Description of Artificial Sequence: Synthetic peptide
RASQGIRNDLG

SEQ ID NO: 3957 - DNA, 33 bp, synthetic construct; identical to SEQ ID NO: 109
  misc_feature 1..33: note = Description of Artificial Sequence: Synthetic oligonucleotide
  source 1..33: mol_type = other DNA

SEQ ID NO: 3958 - protein, 11 aa, synthetic construct
  REGION 1..11: note = Description of Artificial Sequence: Synthetic peptide
RASQGIRNDLG

SEQ ID NO: 3959 - DNA, 33 bp, synthetic construct; identical to SEQ ID NO: 109
  misc_feature 1..33: note = Description of Artificial Sequence: Synthetic oligonucleotide
  source 1..33: mol_type = other DNA

SEQ ID NO: 3960 - protein, 11 aa, synthetic construct
  REGION 1..11: note = Description of Artificial Sequence: Synthetic peptide
RASQGIRNDLG

SEQ ID NO: 3961 - DNA, 33 bp, synthetic construct; identical to SEQ ID NO: 109
  misc_feature 1..33: note = Description of Artificial Sequence: Synthetic oligonucleotide
  source 1..33: mol_type = other DNA

SEQ ID NO: 3962 - protein, 11 aa, synthetic construct
  REGION 1..11: note = Description of Artificial Sequence: Synthetic peptide
RASQGIRNDLG

SEQ ID NO: 3963 - DNA, 33 bp, synthetic construct; identical to SEQ ID NO: 109
  misc_feature 1..33: note = Description of Artificial Sequence: Synthetic oligonucleotide
  source 1..33: mol_type = other DNA

SEQ ID NO: 3964 - protein, 11 aa, synthetic construct
  REGION 1..11: note = Description of Artificial Sequence: Synthetic peptide
RASQGIRNDLG

SEQ ID NO: 3965 - DNA, 33 bp, synthetic construct; identical to SEQ ID NO: 109
  misc_feature 1..33: note = Description of Artificial Sequence: Synthetic oligonucleotide
  source 1..33: mol_type = other DNA

SEQ ID NO: 3966 - protein, 11 aa, synthetic construct
  REGION 1..11: note = Description of Artificial Sequence: Synthetic peptide
RASQGIRNDLG

SEQ ID NO: 3967 - DNA, 33 bp, synthetic construct; identical to SEQ ID NO: 109
  misc_feature 1..33: note = Description of Artificial Sequence: Synthetic oligonucleotide
  source 1..33: mol_type = other DNA

SEQ ID NO: 3968 - protein, 11 aa, synthetic construct
  REGION 1..11: note = Description of Artificial Sequence: Synthetic peptide
RASQGIRNDLG

SEQ ID NO: 3969 - DNA, 33 bp, synthetic construct; identical to SEQ ID NO: 109
  misc_feature 1..33: note = Description of Artificial Sequence: Synthetic oligonucleotide
  source 1..33: mol_type = other DNA

SEQ ID NO: 3970 - protein, 11 aa, synthetic construct
  REGION 1..11: note = Description of Artificial Sequence: Synthetic peptide
RASQGIRNDLG

SEQ ID NO: 3971 - DNA, 33 bp, synthetic construct; identical to SEQ ID NO: 109
  misc_feature 1..33: note = Description of Artificial Sequence: Synthetic oligonucleotide
  source 1..33: mol_type = other DNA

SEQ ID NO: 3972 - protein, 11 aa, synthetic construct
  REGION 1..11: note = Description of Artificial Sequence: Synthetic peptide
RASQGIRNDLG

SEQ ID NO: 3973 - DNA, 33 bp, synthetic construct; identical to SEQ ID NO: 109
  misc_feature 1..33: note = Description of Artificial Sequence: Synthetic oligonucleotide
  source 1..33: mol_type = other DNA

SEQ ID NO: 3974 - protein, 11 aa, synthetic construct
  REGION 1..11: note = Description of Artificial Sequence: Synthetic peptide
RASQGIRNDLG

SEQ ID NO: 3975 - DNA, 33 bp, synthetic construct; identical to SEQ ID NO: 109
  misc_feature 1..33: note = Description of Artificial Sequence: Synthetic oligonucleotide
  source 1..33: mol_type = other DNA

SEQ ID NO: 3976 - protein, 11 aa, synthetic construct
  REGION 1..11: note = Description of Artificial Sequence: Synthetic peptide
RASQGIRNDLG

SEQ ID NO: 3977 - DNA, 33 bp, synthetic construct; identical to SEQ ID NO: 109
  misc_feature 1..33: note = Description of Artificial Sequence: Synthetic oligonucleotide
  source 1..33: mol_type = other DNA

SEQ ID NO: 3978 - protein, 11 aa, synthetic construct
  REGION 1..11: note = Description of Artificial Sequence: Synthetic peptide
RASQGIRNDLG

SEQ ID NO: 3979 - DNA, 33 bp, synthetic construct; identical to SEQ ID NO: 871
  misc_feature 1..33: note = Description of Artificial Sequence: Synthetic oligonucleotide
  source 1..33: mol_type = other DNA

SEQ ID NO: 3980 - protein, 11 aa, synthetic construct
  REGION 1..11: note = Description of Artificial Sequence: Synthetic peptide
RASQNIISYLN

SEQ ID NO: 3981 - DNA, 33 bp, synthetic construct; identical to SEQ ID NO: 871
  misc_feature 1..33: note = Description of Artificial Sequence: Synthetic oligonucleotide
  source 1..33: mol_type = other DNA

SEQ ID NO: 3982 - protein, 11 aa, synthetic construct
  REGION 1..11: note = Description of Artificial Sequence: Synthetic peptide
RASQNIISYLN

SEQ ID NO: 3983 - DNA, 33 bp, synthetic construct; identical to SEQ ID NO: 871
  misc_feature 1..33: note = Description of Artificial Sequence: Synthetic oligonucleotide
  source 1..33: mol_type = other DNA

SEQ ID NO: 3984 - protein, 11 aa, synthetic construct
  REGION 1..11: note = Description of Artificial Sequence: Synthetic peptide
RASQNIISYLN

SEQ ID NO: 3985 - DNA, 33 bp, synthetic construct; identical to SEQ ID NO: 871
  misc_feature 1..33: note = Description of Artificial Sequence: Synthetic oligonucleotide
  source 1..33: mol_type = other DNA

SEQ ID NO: 3986 - protein, 11 aa, synthetic construct
  REGION 1..11: note = Description of Artificial Sequence: Synthetic peptide
RASQNIISYLN

SEQ ID NO: 3987 - DNA, 33 bp, synthetic construct; identical to SEQ ID NO: 871
  misc_feature 1..33: note = Description of Artificial Sequence: Synthetic oligonucleotide
  source 1..33: mol_type = other DNA

SEQ ID NO: 3988 - protein, 11 aa, synthetic construct
  REGION 1..11: note = Description of Artificial Sequence: Synthetic peptide
RASQNIISYLN

SEQ ID NO: 3989 - DNA, 33 bp, synthetic construct; identical to SEQ ID NO: 871
  misc_feature 1..33: note = Description of Artificial Sequence: Synthetic oligonucleotide
  source 1..33: mol_type = other DNA

SEQ ID NO: 3990 - protein, 11 aa, synthetic construct
  REGION 1..11: note = Description of Artificial Sequence: Synthetic peptide
RASQNIISYLN

SEQ ID NO: 3991 - DNA, 33 bp, synthetic construct; identical to SEQ ID NO: 871
  misc_feature 1..33: note = Description of Artificial Sequence: Synthetic oligonucleotide
  source 1..33: mol_type = other DNA

SEQ ID NO: 3992 - protein, 11 aa, synthetic construct
  REGION 1..11: note = Description of Artificial Sequence: Synthetic peptide
RASQNIISYLN

SEQ ID NO: 3993 - DNA, 33 bp, synthetic construct; identical to SEQ ID NO: 871
  misc_feature 1..33: note = Description of Artificial Sequence: Synthetic oligonucleotide
  source 1..33: mol_type = other DNA

SEQ ID NO: 3994 - protein, 11 aa, synthetic construct
  REGION 1..11: note = Description of Artificial Sequence: Synthetic peptide
RASQNIISYLN

SEQ ID NO: 3995 - DNA, 33 bp, synthetic construct; identical to SEQ ID NO: 871
  misc_feature 1..33: note = Description of Artificial Sequence: Synthetic oligonucleotide
  source 1..33: mol_type = other DNA

SEQ ID NO: 3996 - protein, 11 aa, synthetic construct
  REGION 1..11: note = Description of Artificial Sequence: Synthetic peptide
RASQNIISYLN

SEQ ID NO: 3997 - DNA, 33 bp, synthetic construct; identical to SEQ ID NO: 871
  misc_feature 1..33: note = Description of Artificial Sequence: Synthetic oligonucleotide
  source 1..33: mol_type = other DNA

SEQ ID NO: 3998 - protein, 11 aa, synthetic construct
  REGION 1..11: note = Description of Artificial Sequence: Synthetic peptide
RASQNIISYLN

SEQ ID NO: 3999 - DNA, 33 bp, synthetic construct; identical to SEQ ID NO: 871
  misc_feature 1..33: note = Description of Artificial Sequence: Synthetic oligonucleotide
  source 1..33: mol_type = other DNA

SEQ ID NO: 4000 - protein, 11 aa, synthetic construct
  REGION 1..11: note = Description of Artificial Sequence: Synthetic peptide
RASQNIISYLN

SEQ ID NO: 4001 - DNA, 33 bp, synthetic construct; identical to SEQ ID NO: 871
  misc_feature 1..33: note = Description of Artificial Sequence: Synthetic oligonucleotide
  source 1..33: mol_type = other DNA

SEQ ID NO: 4002 - protein, 11 aa, synthetic construct
  REGION 1..11: note = Description of Artificial Sequence: Synthetic peptide
RASQNIISYLN

SEQ ID NO: 4003 - DNA, 33 bp, synthetic construct; identical to SEQ ID NO: 871
  misc_feature 1..33: note = Description of Artificial Sequence: Synthetic oligonucleotide
  source 1..33: mol_type = other DNA

SEQ ID NO: 4004 - protein, 11 aa, synthetic construct
  REGION 1..11: note = Description of Artificial Sequence: Synthetic peptide
RASQNIISYLN

SEQ ID NO: 4005 - DNA, 33 bp, synthetic construct; identical to SEQ ID NO: 871
  misc_feature 1..33: note = Description of Artificial Sequence: Synthetic oligonucleotide
  source 1..33: mol_type = other DNA

SEQ ID NO: 4006 - protein, 11 aa, synthetic construct
  REGION 1..11: note = Description of Artificial Sequence: Synthetic peptide
RASQNIISYLN

SEQ ID NO: 4007 - DNA, 33 bp, synthetic construct; identical to SEQ ID NO: 871
  misc_feature 1..33: note = Description of Artificial Sequence: Synthetic oligonucleotide
  source 1..33: mol_type = other DNA

SEQ ID NO: 4008 - protein, 11 aa, synthetic construct
  REGION 1..11: note = Description of Artificial Sequence: Synthetic peptide
RASQNIISYLN

SEQ ID NO: 4009 - DNA, 33 bp, synthetic construct; identical to SEQ ID NO: 871
  misc_feature 1..33: note = Description of Artificial Sequence: Synthetic oligonucleotide
  source 1..33: mol_type = other DNA

SEQ ID NO: 4010 - protein, 11 aa, synthetic construct
  REGION 1..11: note = Description of Artificial Sequence: Synthetic peptide
RASQNIISYLN

SEQ ID NO: 4011 - DNA, 33 bp, synthetic construct; identical to SEQ ID NO: 871
  misc_feature 1..33: note = Description of Artificial Sequence: Synthetic oligonucleotide
  source 1..33: mol_type = other DNA

SEQ ID NO: 4012 - protein, 11 aa, synthetic construct
  REGION 1..11: note = Description of Artificial Sequence: Synthetic peptide
RASQNIISYLN

SEQ ID NO: 4013 - DNA, 33 bp, synthetic construct; identical to SEQ ID NO: 871
  misc_feature 1..33: note = Description of Artificial Sequence: Synthetic oligonucleotide
  source 1..33: mol_type = other DNA

SEQ ID NO: 4014 - protein, 11 aa, synthetic construct
  REGION 1..11: note = Description of Artificial Sequence: Synthetic peptide
RASQNIISYLN

SEQ ID NO: 4015 - DNA, 33 bp, synthetic construct; identical to SEQ ID NO: 871
  misc_feature 1..33: note = Description of Artificial Sequence: Synthetic oligonucleotide
  source 1..33: mol_type = other DNA

SEQ ID NO: 4016 - protein, 11 aa, synthetic construct
  REGION 1..11: note = Description of Artificial Sequence: Synthetic peptide
RASQNIISYLN

SEQ ID NO: 4017 - DNA, 33 bp, synthetic construct; identical to SEQ ID NO: 871
  misc_feature 1..33: note = Description of Artificial Sequence: Synthetic oligonucleotide
  source 1..33: mol_type = other DNA

SEQ ID NO: 4018 - protein, 11 aa, synthetic construct
  REGION 1..11: note = Description of Artificial Sequence: Synthetic peptide
RASQNIISYLN

SEQ ID NO: 4019 - DNA, 33 bp, synthetic construct; identical to SEQ ID NO: 871
  misc_feature 1..33: note = Description of Artificial Sequence: Synthetic oligonucleotide
  source 1..33: mol_type = other DNA

SEQ ID NO: 4020 - protein, 11 aa, synthetic construct
  REGION 1..11: note = Description of Artificial Sequence: Synthetic peptide
RASQNIISYLN

SEQ ID NO: 4021 - DNA, 36 bp, synthetic construct
  misc_feature 1..36: note = Description of Artificial Sequence: Synthetic oligonucleotide
  source 1..36: mol_type = other DNA
agggccagtcagagtgtgatcagcagctacttagcc

SEQ ID NO: 4022 - protein, 12 aa, synthetic construct
  REGION 1..12: note = Description of Artificial Sequence: Synthetic peptide
RASQSVISSYLA

SEQ ID NO: 4023 - DNA, 42 bp, synthetic construct; identical to SEQ ID NO: 3757
  misc_feature 1..42: note = Description of Artificial Sequence: Synthetic oligonucleotide
  source 1..42: mol_type = other DNA

SEQ ID NO: 4024 - protein, 14 aa, synthetic construct
  REGION 1..14: note = Description of Artificial Sequence: Synthetic peptide
TGSSSNIGAGYDVH

SEQ ID NO: 4025 - DNA, 48 bp, synthetic construct; identical to SEQ ID NO: 1069
  misc_feature 1..48: note = Description of Artificial Sequence: Synthetic oligonucleotide
  source 1..48: mol_type = other DNA

SEQ ID NO: 4026 - protein, 16 aa, synthetic construct
  REGION 1..16: note = Description of Artificial Sequence: Synthetic peptide
RSSQSLVYSDGNTYLN

SEQ ID NO: 4027 - DNA, 51 bp, synthetic construct; identical to SEQ ID NO: 479
  misc_feature 1..51: note = Description of Artificial Sequence: Synthetic oligonucleotide
  source 1..51: mol_type = other DNA

SEQ ID NO: 4028 - protein, 17 aa, synthetic construct
  REGION 1..17: note = Description of Artificial Sequence: Synthetic peptide
KSSQSVLYSSHNNNYLA

SEQ ID NO: 4029 - DNA, 33 bp, synthetic construct; identical to SEQ ID NO: 173
  misc_feature 1..33: note = Description of Artificial Sequence: Synthetic oligonucleotide
  source 1..33: mol_type = other DNA

SEQ ID NO: 4030 - protein, 11 aa, synthetic construct
  REGION 1..11: note = Description of Artificial Sequence: Synthetic peptide
RASQGISRWLA

SEQ ID NO: 4031 - DNA, 33 bp, synthetic construct; identical to SEQ ID NO: 871
  misc_feature 1..33: note = Description of Artificial Sequence: Synthetic oligonucleotide
  source 1..33: mol_type = other DNA

SEQ ID NO: 4032 - protein, 11 aa, synthetic construct
  REGION 1..11: note = Description of Artificial Sequence: Synthetic peptide
RASQNIISYLN

SEQ ID NO: 4033 - DNA, 51 bp, synthetic construct; identical to SEQ ID NO: 1847
  misc_feature 1..51: note = Description of Artificial Sequence: Synthetic oligonucleotide
  source 1..51: mol_type = other DNA

SEQ ID NO: 4034 - protein, 17 aa, synthetic construct
  REGION 1..17: note = Description of Artificial Sequence: Synthetic peptide
KSRQSVLYSSNNYNYLT

SEQ ID NO: 4035 - DNA, 51 bp, synthetic construct
  misc_feature 1..51: note = Description of Artificial Sequence: Synthetic oligonucleotide
  source 1..51: mol_type = other DNA
aagtccagccagactgtcttacacagctccaacaattataactacttagct

SEQ ID NO: 4036 - protein, 17 aa, synthetic construct
  REGION 1..17: note = Description of Artificial Sequence: Synthetic peptide
KSSQTVLHSSNNYNYLA

SEQ ID NO: 4037 - DNA, 33 bp, synthetic construct
  misc_feature 1..33: note = Description of Artificial Sequence: Synthetic oligonucleotide
  source 1..33: mol_type = other DNA
agggccagtcagagtgttagcatcaacttagcc

SEQ ID NO: 4038 - protein, 11 aa, synthetic construct
  REGION 1..11: note = Description of Artificial Sequence: Synthetic peptide
RASQSVSINLA

SEQ ID NO: 4039 - DNA, 33 bp, synthetic construct; identical to SEQ ID NO: 3791
  misc_feature 1..33: note = Description of Artificial Sequence: Synthetic oligonucleotide
  source 1..33: mol_type = other DNA

SEQ ID NO: 4040 - protein, 11 aa, synthetic construct
  REGION 1..11: note = Description of Artificial Sequence: Synthetic peptide
RASQSITSYLN

SEQ ID NO: 4041 - DNA, 33 bp, synthetic construct; identical to SEQ ID NO: 693
  misc_feature 1..33: note = Description of Artificial Sequence: Synthetic oligonucleotide
  source 1..33: mol_type = other DNA

SEQ ID NO: 4042 - protein, 11 aa, synthetic construct
  REGION 1..11: note = Description of Artificial Sequence: Synthetic peptide
SGDKLGDKYAC

SEQ ID NO: 4043 - DNA, 33 bp, synthetic construct; identical to SEQ ID NO: 191
  misc_feature 1..33: note = Description of Artificial Sequence: Synthetic oligonucleotide
  source 1..33: mol_type = other DNA

SEQ ID NO: 4044 - protein, 11 aa, synthetic construct
  REGION 1..11: note = Description of Artificial Sequence: Synthetic peptide
SGDKLGDKYAS

SEQ ID NO: 4045 - DNA, 39 bp, synthetic construct; identical to SEQ ID NO: 3435
  misc_feature 1..39: note = Description of Artificial Sequence: Synthetic oligonucleotide
  source 1..39: mol_type = other DNA

SEQ ID NO: 4046 - protein, 13 aa, synthetic construct
  REGION 1..13: note = Description of Artificial Sequence: Synthetic peptide
SGSSSNIGSNIVT

SEQ ID NO: 4047 - DNA, 39 bp, synthetic construct; identical to SEQ ID NO: 2917
  misc_feature 1..39: note = Description of Artificial Sequence: Synthetic oligonucleotide
  source 1..39: mol_type = other DNA

SEQ ID NO: 4048 - protein, 13 aa, synthetic construct
  REGION 1..13: note = Description of Artificial Sequence: Synthetic peptide
SGSNSNIGSNIVT

SEQ ID NO: 4049 - DNA, 39 bp, synthetic construct
  misc_feature 1..39: note = Description of Artificial Sequence: Synthetic oligonucleotide
  source 1..39: mol_type = other DNA
tctggaagctgctccaacatcggaagtaatattgtgacc

SEQ ID NO: 4050 - protein, 13 aa, synthetic construct
  REGION 1..13: note = Description of Artificial Sequence: Synthetic peptide
SGSCSNIGSNIVT

SEQ ID NO: 4051 - DNA, 33 bp, synthetic construct
  misc_feature 1..33: note = Description of Artificial Sequence: Synthetic oligonucleotide
  source 1..33: mol_type = other DNA
tcaggagataaatcggggaataaatatgtttcc

SEQ ID NO: 4052 - protein, 11 aa, synthetic construct
  REGION 1..11: note = Description of Artificial Sequence: Synthetic peptide
SGDKSGNKYVS

SEQ ID NO: 4053 - DNA, 33 bp, synthetic construct; identical to SEQ ID NO: 701
  misc_feature 1..33: note = Description of Artificial Sequence: Synthetic oligonucleotide
  source 1..33: mol_type = other DNA

SEQ ID NO: 4054 - protein, 11 aa, synthetic construct
  REGION 1..11: note = Description of Artificial Sequence: Synthetic peptide
SGDKLGNKYAC

SEQ ID NO: 4055 - DNA, 33 bp, synthetic construct; identical to SEQ ID NO: 2317
  misc_feature 1..33: note = Description of Artificial Sequence: Synthetic oligonucleotide
  source 1..33: mol_type = other DNA

SEQ ID NO: 4056 - protein, 11 aa, synthetic construct
  REGION 1..11: note = Description of Artificial Sequence: Synthetic peptide
RASQDIRKDLG

SEQ ID NO: 4057 - DNA, 51 bp, synthetic construct
  misc_feature 1..51: note = Description of Artificial Sequence: Synthetic oligonucleotide
  source 1..51: mol_type = other DNA
aagtccagccagagtgttttatacagctccaacaataagaactacttaact

SEQ ID NO: 4058 - protein, 17 aa, synthetic construct
  REGION 1..17: note = Description of Artificial Sequence: Synthetic peptide
KSSQSVLYSSNNKNYLT

SEQ ID NO: 4059 - DNA, 33 bp, synthetic construct
  misc_feature 1..33: note = Description of Artificial Sequence: Synthetic oligonucleotide
  source 1..33: mol_type = other DNA
agggccagtcagagtgttcgcagtaacttagcc

SEQ ID NO: 4060 - protein, 11 aa, synthetic construct
  REGION 1..11: note = Description of Artificial Sequence: Synthetic peptide
RASQSVRSNLA

SEQ ID NO: 4061 - DNA, 33 bp, synthetic construct; identical to SEQ ID NO: 401
  misc_feature 1..33: note = Description of Artificial Sequence: Synthetic oligonucleotide
  source 1..33: mol_type = other DNA

SEQ ID NO: 4062 - protein, 11 aa, synthetic construct
  REGION 1..11: note = Description of Artificial Sequence: Synthetic peptide
RASQGIRNYLA

SEQ ID NO: 4063 - DNA, 36 bp, synthetic construct
  misc_feature 1..36: note = Description of Artificial Sequence: Synthetic oligonucleotide
  source 1..36: mol_type = other DNA
agggccagtcagagtgttaacagcaactatttagcc

SEQ ID NO: 4064 - protein, 12 aa, synthetic construct
  REGION 1..12: note = Description of Artificial Sequence: Synthetic peptide
RASQSVNSNYLA

SEQ ID NO: 4065 - DNA, 51 bp, synthetic construct; identical to SEQ ID NO: 2027
  misc_feature 1..51: note = Description of Artificial Sequence: Synthetic oligonucleotide
  source 1..51: mol_type = other DNA

SEQ ID NO: 4066 - protein, 17 aa, synthetic construct
  REGION 1..17: note = Description of Artificial Sequence: Synthetic peptide
KSSQNILSSSNNKNYLT

SEQ ID NO: 4067 - DNA, 51 bp, synthetic construct; identical to SEQ ID NO: 1057
  misc_feature 1..51: note = Description of Artificial Sequence: Synthetic oligonucleotide
  source 1..51: mol_type = other DNA

SEQ ID NO: 4068 - protein, 17 aa, synthetic construct
  REGION 1..17: note = Description of Artificial Sequence: Synthetic peptide
KSSQSVLHSSNNNNYLA

SEQ ID NO: 4069 - DNA, 51 bp, synthetic construct; identical to SEQ ID NO: 1683
  misc_feature 1..51: note = Description of Artificial Sequence: Synthetic oligonucleotide
  source 1..51: mol_type = other DNA

SEQ ID NO: 4070 - protein, 17 aa, synthetic construct
  REGION 1..17: note = Description of Artificial Sequence: Synthetic peptide
KSSQSVLHSSNNKNYLT

SEQ ID NO: 4071 - DNA, 51 bp, synthetic construct
  misc_feature 1..51: note = Description of Artificial Sequence: Synthetic oligonucleotide
  source 1..51: mol_type = other DNA
aagtccagccagagtgttttatccaactcccacaataacaactacttagct

SEQ ID NO: 4072 - protein, 17 aa, synthetic construct
  REGION 1..17: note = Description of Artificial Sequence: Synthetic peptide
KSSQSVLSNSHNNNYLA

SEQ ID NO: 4073 - DNA, 51 bp, synthetic construct; identical to SEQ ID NO: 1693
  misc_feature 1..51: note = Description of Artificial Sequence: Synthetic oligonucleotide
  source 1..51: mol_type = other DNA

SEQ ID NO: 4074 - protein, 17 aa, synthetic construct
  REGION 1..17: note = Description of Artificial Sequence: Synthetic peptide
KSSQSVLFSSNNYNYLA

SEQ ID NO: 4075 - DNA, 33 bp, synthetic construct; identical to SEQ ID NO: 109
  misc_feature 1..33: note = Description of Artificial Sequence: Synthetic oligonucleotide
  source 1..33: mol_type = other DNA

SEQ ID NO: 4076 - protein, 11 aa, synthetic construct
  REGION 1..11: note = Description of Artificial Sequence: Synthetic peptide
RASQGIRNDLG

SEQ ID NO: 4077 - DNA, 33 bp, synthetic construct; identical to SEQ ID NO: 109
  misc_feature 1..33: note = Description of Artificial Sequence: Synthetic oligonucleotide
  source 1..33: mol_type = other DNA

SEQ ID NO: 4078 - protein, 11 aa, synthetic construct
  REGION 1..11: note = Description of Artificial Sequence: Synthetic peptide
RASQGIRNDLG

SEQ ID NO: 4079 - DNA, 33 bp, synthetic construct
  misc_feature 1..33: note = Description of Artificial Sequence: Synthetic oligonucleotide
  source 1..33: mol_type = other DNA
cgggcgagtcagtttattagcagctggttagcc

SEQ ID NO: 4080 - protein, 11 aa, synthetic construct
  REGION 1..11: note = Description of Artificial Sequence: Synthetic peptide
RASQFISSWLA

SEQ ID NO: 4081 - DNA, 33 bp, synthetic construct; identical to SEQ ID NO: 109
  misc_feature 1..33: note = Description of Artificial Sequence: Synthetic oligonucleotide
  source 1..33: mol_type = other DNA

SEQ ID NO: 4082 - protein, 11 aa, synthetic construct
  REGION 1..11: note = Description of Artificial Sequence: Synthetic peptide
RASQGIRNDLG

SEQ ID NO: 4083 - DNA, 33 bp, synthetic construct; identical to SEQ ID NO: 109
  misc_feature 1..33: note = Description of Artificial Sequence: Synthetic oligonucleotide
  source 1..33: mol_type = other DNA

SEQ ID NO: 4084 - protein, 11 aa, synthetic construct
  REGION 1..11: note = Description of Artificial Sequence: Synthetic peptide
RASQGIRNDLG

SEQ ID NO: 4085 - DNA, 33 bp, synthetic construct; identical to SEQ ID NO: 4079
  misc_feature 1..33: note = Description of Artificial Sequence: Synthetic oligonucleotide
  source 1..33: mol_type = other DNA

SEQ ID NO: 4086 - protein, 11 aa, synthetic construct
  REGION 1..11: note = Description of Artificial Sequence: Synthetic peptide
RASQFISSWLA

SEQ ID NO: 4087 - DNA, 15 bp, synthetic construct
  misc_feature 1..15: note = Description of Artificial Sequence: Synthetic oligonucleotide
  source 1..15: mol_type = other DNA
aactatggcatgcac

SEQ ID NO: 4088 - protein, 5 aa, synthetic construct
  REGION 1..5: note = Description of Artificial Sequence: Synthetic peptide
NYGMH

SEQ ID NO: 4089 - DNA, 15 bp, synthetic construct
  misc_feature 1..15: note = Description of Artificial Sequence: Synthetic oligonucleotide
  source 1..15: mol_type = other DNA
aattatgatatcaac

SEQ ID NO: 4090 - protein, 5 aa, synthetic construct
  REGION 1..5: note = Description of Artificial Sequence: Synthetic peptide
NYDIN

SEQ ID NO: 4091 - DNA, 15 bp, synthetic construct
  misc_feature 1..15: note = Description of Artificial Sequence: Synthetic oligonucleotide
  source 1..15: mol_type = other DNA
aattatgatatcaac

SEQ ID NO: 4092 - protein, 5 aa, synthetic construct
  REGION 1..5: note = Description of Artificial Sequence: Synthetic peptide
NYDIN

SEQ ID NO: 4093 - DNA, 15 bp, synthetic construct
  misc_feature 1..15: note = Description of Artificial Sequence: Synthetic oligonucleotide
  source 1..15: mol_type = other DNA
aactatggcatgcac

SEQ ID NO: 4094 - protein, 5 aa, synthetic construct
  REGION 1..5: note = Description of Artificial Sequence: Synthetic peptide
NYGMH

SEQ ID NO: 4095 - DNA, 15 bp, synthetic construct
  misc_feature 1..15: note = Description of Artificial Sequence: Synthetic oligonucleotide
  source 1..15: mol_type = other DNA
acctatggtatcagc

SEQ ID NO: 4096 - protein, 5 aa, synthetic construct
  REGION 1..5: note = Description of Artificial Sequence: Synthetic peptide
TYGIS

SEQ ID NO: 4097 - DNA, 15 bp, synthetic construct
  misc_feature 1..15: note = Description of Artificial Sequence: Synthetic oligonucleotide
  source 1..15: mol_type = other DNA
agctatggcatgcac

SEQ ID NO: 4098 - protein, 5 aa, synthetic construct
  REGION 1..5: note = Description of Artificial Sequence: Synthetic peptide
SYGMH

SEQ ID NO: 4099 - DNA, 15 bp, synthetic construct
  misc_feature 1..15: note = Description of Artificial Sequence: Synthetic oligonucleotide
  source 1..15: mol_type = other DNA
ggctaccatatgcac

SEQ ID NO: 4100 - protein, 5 aa, synthetic construct
  REGION 1..5: note = Description of Artificial Sequence: Synthetic peptide
GYHMH

SEQ ID NO: 4101 - DNA, 15 bp, synthetic construct
  misc_feature 1..15: note = Description of Artificial Sequence: Synthetic oligonucleotide
  source 1..15: mol_type = other DNA
agttactactggagc

SEQ ID NO: 4102 - protein, 5 aa, synthetic construct
  REGION 1..5: note = Description of Artificial Sequence: Synthetic peptide
SYYWS

SEQ ID NO: 4103 - DNA, 15 bp, synthetic construct
  misc_feature 1..15: note = Description of Artificial Sequence: Synthetic oligonucleotide
  source 1..15: mol_type = other DNA
ggctactatttgcac

SEQ ID NO: 4104 - protein, 5 aa, synthetic construct
  REGION 1..5: note = Description of Artificial Sequence: Synthetic peptide
GYYLH

SEQ ID NO: 4105 - DNA, 15 bp, synthetic construct
  misc_feature 1..15: note = Description of Artificial Sequence: Synthetic oligonucleotide
  source 1..15: mol_type = other DNA
ggctactatttgcac

SEQ ID NO: 4106 - protein, 5 aa, synthetic construct
  REGION 1..5: note = Description of Artificial Sequence: Synthetic peptide
GYYLH

SEQ ID NO: 4107 - DNA, 15 bp, synthetic construct
  misc_feature 1..15: note = Description of Artificial Sequence: Synthetic oligonucleotide
  source 1..15: mol_type = other DNA
ggttgctactggagc

SEQ ID NO: 4108 - protein, 5 aa, synthetic construct
  REGION 1..5: note = Description of Artificial Sequence: Synthetic peptide
GCYWS

SEQ ID NO: 4109 - DNA, 15 bp, synthetic construct
  misc_feature 1..15: note = Description of Artificial Sequence: Synthetic oligonucleotide
  source 1..15: mol_type = other DNA
gactctctcatgcac

SEQ ID NO: 4110 - protein, 5 aa, synthetic construct
  REGION 1..5: note = Description of Artificial Sequence: Synthetic peptide
DSLMH

SEQ ID NO: 4111 - DNA, 15 bp, synthetic construct
  misc_feature 1..15: note = Description of Artificial Sequence: Synthetic oligonucleotide
  source 1..15: mol_type = other DNA
agctatggcatgcac

SEQ ID NO: 4112 - protein, 5 aa, synthetic construct
  REGION 1..5: note = Description of Artificial Sequence: Synthetic peptide
SYGMH

SEQ ID NO: 4113 - DNA, 15 bp, synthetic construct
  misc_feature 1..15: note = Description of Artificial Sequence: Synthetic oligonucleotide
  source 1..15: mol_type = other DNA
aactatggcatggac

SEQ ID NO: 4114 - protein, 5 aa, synthetic construct
  REGION 1..5: note = Description of Artificial Sequence: Synthetic peptide
NYGMD

SEQ ID NO: 4115 - DNA, 15 bp, synthetic construct
  misc_feature 1..15: note = Description of Artificial Sequence: Synthetic oligonucleotide
  source 1..15: mol_type = other DNA
aactatggcttacac

SEQ ID NO: 4116 - protein, 5 aa, synthetic construct
  REGION 1..5: note = Description of Artificial Sequence: Synthetic peptide
NYGLH

SEQ ID NO: 4117 - DNA, 15 bp, synthetic construct
  misc_feature 1..15: note = Description of Artificial Sequence: Synthetic oligonucleotide
  source 1..15: mol_type = other DNA
agctatggcatgcac

SEQ ID NO: 4118 - protein, 5 aa, synthetic construct
  REGION 1..5: note = Description of Artificial Sequence: Synthetic peptide
SYGMH

SEQ ID NO: 4119 - DNA, 15 bp, synthetic construct
  misc_feature 1..15: note = Description of Artificial Sequence: Synthetic oligonucleotide
  source 1..15: mol_type = other DNA
agttatgatatcaac

SEQ ID NO: 4120 - protein, 5 aa, synthetic construct
  REGION 1..5: note = Description of Artificial Sequence: Synthetic peptide
SYDIN

SEQ ID NO: 4121 - DNA, 15 bp, synthetic construct
  misc_feature 1..15: note = Description of Artificial Sequence: Synthetic oligonucleotide
  source 1..15: mol_type = other DNA
gactatgtcatgcac

SEQ ID NO: 4122 - protein, 5 aa, synthetic construct
  REGION 1..5: note = Description of Artificial Sequence: Synthetic peptide
DYVMH

SEQ ID NO: 4123 - DNA, 15 bp, synthetic construct
  misc_feature 1..15: note = Description of Artificial Sequence: Synthetic oligonucleotide
  source 1..15: mol_type = other DNA
agctgtggcatgcac

SEQ ID NO: 4124 - protein, 5 aa, synthetic construct
  REGION 1..5: note = Description of Artificial Sequence: Synthetic peptide
SCGMH

SEQ ID NO: 4125 - DNA, 15 bp, synthetic construct
  misc_feature 1..15: note = Description of Artificial Sequence: Synthetic oligonucleotide
  source 1..15: mol_type = other DNA
ggctactatatgcac

SEQ ID NO: 4126 - protein, 5 aa, synthetic construct
  REGION 1..5: note = Description of Artificial Sequence: Synthetic peptide
GYYMH

SEQ ID NO: 4127 - DNA, 15 bp, synthetic construct
  misc_feature 1..15: note = Description of Artificial Sequence: Synthetic oligonucleotide
  source 1..15: mol_type = other DNA
ggttgctactggagc

SEQ ID NO: 4128 - protein, 5 aa, synthetic construct
  REGION 1..5: note = Description of Artificial Sequence: Synthetic peptide
GCYWS

SEQ ID NO: 4129 - DNA, 15 bp, synthetic construct
  misc_feature 1..15: note = Description of Artificial Sequence: Synthetic oligonucleotide
  source 1..15: mol_type = other DNA
ggttgctactggagc

SEQ ID NO: 4130 - protein, 5 aa, synthetic construct
  REGION 1..5: note = Description of Artificial Sequence: Synthetic peptide
GCYWS

SEQ ID NO: 4131 - DNA, 15 bp, synthetic construct
  misc_feature 1..15: note = Description of Artificial Sequence: Synthetic oligonucleotide
  source 1..15: mol_type = other DNA
agctatggcatgcac

SEQ ID NO: 4132 - protein, 5 aa, synthetic construct
  REGION 1..5: note = Description of Artificial Sequence: Synthetic peptide
SYGMH

SEQ ID NO: 4133 - DNA, 15 bp, synthetic construct
  misc_feature 1..15: note = Description of Artificial Sequence: Synthetic oligonucleotide
  source 1..15: mol_type = other DNA
ggttgctactggagc

SEQ ID NO: 4134 - protein, 5 aa, synthetic construct
  REGION 1..5: note = Description of Artificial Sequence: Synthetic peptide
GCYWS

SEQ ID NO: 4135 - DNA, 21 bp, synthetic construct
  misc_feature 1..21: note = Description of Artificial Sequence: Synthetic oligonucleotide
  source 1..21: mol_type = other DNA
agtggtggtgactactggagc

SEQ ID NO: 4136 - protein, 7 aa, synthetic construct
  REGION 1..7: note = Description of Artificial Sequence: Synthetic peptide
SGGDYWS

SEQ ID NO: 4137 - DNA, 15 bp, synthetic construct
  misc_feature 1..15: note = Description of Artificial Sequence: Synthetic oligonucleotide
  source 1..15: mol_type = other DNA
ggttcctactggagc

SEQ ID NO: 4138 - protein, 5 aa, synthetic construct
  REGION 1..5: note = Description of Artificial Sequence: Synthetic peptide
GSYWS

SEQ ID NO: 4139 - DNA, 15 bp, synthetic construct
  misc_feature 1..15: note = Description of Artificial Sequence: Synthetic oligonucleotide
  source 1..15: mol_type = other DNA
agctatgtcatgcac

SEQ ID NO: 4140 - protein, 5 aa, synthetic construct
  REGION 1..5: note = Description of Artificial Sequence: Synthetic peptide
SYVMH

SEQ ID NO: 4141 - DNA, 15 bp, synthetic construct
  misc_feature 1..15: note = Description of Artificial Sequence: Synthetic oligonucleotide
  source 1..15: mol_type = other DNA
agctataacatgaac

SEQ ID NO: 4142 - protein, 5 aa, synthetic construct
  REGION 1..5: note = Description of Artificial Sequence: Synthetic peptide
SYNMN

SEQ ID NO: 4143 - DNA, 15 bp, synthetic construct
  misc_feature 1..15: note = Description of Artificial Sequence: Synthetic oligonucleotide
  source 1..15: mol_type = other DNA
agctatagcatgaac

SEQ ID NO: 4144 - protein, 5 aa, synthetic construct
  REGION 1..5: note = Description of Artificial Sequence: Synthetic peptide
SYSMN

SEQ ID NO: 4145 - DNA, 15 bp, synthetic construct
  misc_feature 1..15: note = Description of Artificial Sequence: Synthetic oligonucleotide
  source 1..15: mol_type = other DNA
agctatgccatgagc

SEQ ID NO: 4146 - protein, 5 aa, synthetic construct
  REGION 1..5: note = Description of Artificial Sequence: Synthetic peptide
SYAMS

SEQ ID NO: 4147 - DNA, 15 bp, synthetic construct
  misc_feature 1..15: note = Description of Artificial Sequence: Synthetic oligonucleotide
  source 1..15: mol_type = other DNA
aattatgatgtcaac

SEQ ID NO: 4148 - protein, 5 aa, synthetic construct
  REGION 1..5: note = Description of Artificial Sequence: Synthetic peptide
NYDVN

SEQ ID NO: 4149 - DNA, 15 bp, synthetic construct
  misc_feature 1..15: note = Description of Artificial Sequence: Synthetic oligonucleotide
  source 1..15: mol_type = other DNA
aattatgatgtcaac

SEQ ID NO: 4150 - protein, 5 aa, synthetic construct
  REGION 1..5: note = Description of Artificial Sequence: Synthetic peptide
NYDVN

SEQ ID NO: 4151 - DNA, 15 bp, synthetic construct
  misc_feature 1..15: note = Description of Artificial Sequence: Synthetic oligonucleotide
  source 1..15: mol_type = other DNA
aattatgatatcaac

SEQ ID NO: 4152 - protein, 5 aa, synthetic construct
  REGION 1..5: note = Description of Artificial Sequence: Synthetic peptide
NYDIN

SEQ ID NO: 4153 - DNA, 21 bp, synthetic construct
  misc_feature 1..21: note = Description of Artificial Sequence: Synthetic oligonucleotide
  source 1..21: mol_type = other DNA
aggagtagttactactggggc

SEQ ID NO: 4154 - protein, 7 aa, synthetic construct
  REGION 1..7: note = Description of Artificial Sequence: Synthetic peptide
RSSYYWG

SEQ ID NO: 4155 - DNA, 15 bp, synthetic construct
  misc_feature 1..15: note = Description of Artificial Sequence: Synthetic oligonucleotide
  source 1..15: mol_type = other DNA
gactatggcatgcac

SEQ ID NO: 4156 - protein, 5 aa, synthetic construct
  REGION 1..5: note = Description of Artificial Sequence: Synthetic peptide
DYGMH

SEQ ID NO: 4157 - DNA, 15 bp, synthetic construct
  misc_feature 1..15: note = Description of Artificial Sequence: Synthetic oligonucleotide
  source 1..15: mol_type = other DNA
agctatgtcatgcac

SEQ ID NO: 4158 - protein, 5 aa, synthetic construct
  REGION 1..5: note = Description of Artificial Sequence: Synthetic peptide
SYVMH

SEQ ID NO: 4159 - DNA, 15 bp, synthetic construct
  misc_feature 1..15: note = Description of Artificial Sequence: Synthetic oligonucleotide
  source 1..15: mol_type = other DNA
gactattatatgcac

SEQ ID NO: 4160 - protein, 5 aa, synthetic construct
  REGION 1..5: note = Description of Artificial Sequence: Synthetic peptide
DYYMH

SEQ ID NO: 4161 - DNA, 21 bp, synthetic construct
  misc_feature 1..21: note = Description of Artificial Sequence: Synthetic oligonucleotide
  source 1..21: mol_type = other DNA
actagtggagtgggtgtgggc

SEQ ID NO: 4162 - protein, 7 aa, synthetic construct
  REGION 1..7: note = Description of Artificial Sequence: Synthetic peptide
TSGVGVG

SEQ ID NO: 4163 - DNA, 15 bp, synthetic construct
  misc_feature 1..15: note = Description of Artificial Sequence: Synthetic oligonucleotide
  source 1..15: mol_type = other DNA
ggctactatatgcac

SEQ ID NO: 4164 - protein, 5 aa, synthetic construct
  REGION 1..5: note = Description of Artificial Sequence: Synthetic peptide
GYYMH

SEQ ID NO: 4165 - DNA, 21 bp, synthetic construct
  misc_feature 1..21: note = Description of Artificial Sequence: Synthetic oligonucleotide
  source 1..21: mol_type = other DNA
ggtagtagttactactggggc

SEQ ID NO: 4166 - protein, 7 aa, synthetic construct
  REGION 1..7: note = Description of Artificial Sequence: Synthetic peptide
GSSYYWG

SEQ ID NO: 4167 - DNA, 15 bp, synthetic construct
  misc_feature 1..15: note = Description of Artificial Sequence: Synthetic oligonucleotide
  source 1..15: mol_type = other DNA
aattatgatatcaac

SEQ ID NO: 4168 - protein, 5 aa, synthetic construct
  REGION 1..5: note = Description of Artificial Sequence: Synthetic peptide
NYDIN

SEQ ID NO: 4169 - DNA, 15 bp, synthetic construct
  misc_feature 1..15: note = Description of Artificial Sequence: Synthetic oligonucleotide
  source 1..15: mol_type = other DNA
agctataccatgaac

SEQ ID NO: 4170 - protein, 5 aa, synthetic construct
  REGION 1..5: note = Description of Artificial Sequence: Synthetic peptide
SYTMN

SEQ ID NO: 4171 - DNA, 15 bp, synthetic construct
  misc_feature 1..15: note = Description of Artificial Sequence: Synthetic oligonucleotide
  source 1..15: mol_type = other DNA
agctataccatgaac

SEQ ID NO: 4172 - protein, 5 aa, synthetic construct
  REGION 1..5: note = Description of Artificial Sequence: Synthetic peptide
SYTMN

SEQ ID NO: 4173 - DNA, 15 bp, synthetic construct
  misc_feature 1..15: note = Description of Artificial Sequence: Synthetic oligonucleotide
  source 1..15: mol_type = other DNA
agctatgtcatgcac

SEQ ID NO: 4174 - protein, 5 aa, synthetic construct
  REGION 1..5: note = Description of Artificial Sequence: Synthetic peptide
SYVMH

SEQ ID NO: 4175 - DNA, 15 bp, synthetic construct
  misc_feature 1..15: note = Description of Artificial Sequence: Synthetic oligonucleotide
  source 1..15: mol_type = other DNA
agctatgtcatgcac

SEQ ID NO: 4176 - protein, 5 aa, synthetic construct
  REGION 1..5: note = Description of Artificial Sequence: Synthetic peptide
SYVMH

SEQ ID NO: 4177 - DNA, 15 bp, synthetic construct
  misc_feature 1..15: note = Description of Artificial Sequence: Synthetic oligonucleotide
  source 1..15: mol_type = other DNA
gactactatttgcac

SEQ ID NO: 4178 - protein, 5 aa, synthetic construct
  REGION 1..5: note = Description of Artificial Sequence: Synthetic peptide
DYYLH

SEQ ID NO: 4179 - DNA, 15 bp, synthetic construct
  misc_feature 1..15: note = Description of Artificial Sequence: Synthetic oligonucleotide
  source 1..15: mol_type = other DNA
gactactatttgcac

SEQ ID NO: 4180 - protein, 5 aa, synthetic construct
  REGION 1..5: note = Description of Artificial Sequence: Synthetic peptide
DYYLH

SEQ ID NO: 4181 - DNA, 15 bp, synthetic construct
  misc_feature 1..15: note = Description of Artificial Sequence: Synthetic oligonucleotide
  source 1..15: mol_type = other DNA
gactactatttgcac

SEQ ID NO: 4182 - protein, 5 aa, synthetic construct
  REGION 1..5: note = Description of Artificial Sequence: Synthetic peptide
DYYLH

SEQ ID NO: 4183 - DNA, 15 bp, synthetic construct
  misc_feature 1..15: note = Description of Artificial Sequence: Synthetic oligonucleotide
  source 1..15: mol_type = other DNA
gactactatttgcac

SEQ ID NO: 4184 - protein, 5 aa, synthetic construct
  REGION 1..5: note = Description of Artificial Sequence: Synthetic peptide
DYYLH

SEQ ID NO: 4185 - DNA, 15 bp, synthetic construct
  misc_feature 1..15: note = Description of Artificial Sequence: Synthetic oligonucleotide
  source 1..15: mol_type = other DNA
ggctactatctgcac

SEQ ID NO: 4186 - protein, 5 aa, synthetic construct
  REGION 1..5: note = Description of Artificial Sequence: Synthetic peptide
GYYLH

SEQ ID NO: 4187 - DNA, 15 bp, synthetic construct
  misc_feature 1..15: note = Description of Artificial Sequence: Synthetic oligonucleotide
  source 1..15: mol_type = other DNA
ggctactatctgcac

SEQ ID NO: 4188 - protein, 5 aa, synthetic construct
  REGION 1..5: note = Description of Artificial Sequence: Synthetic peptide
GYYLH

SEQ ID NO: 4189 - DNA, 15 bp, synthetic construct
  misc_feature 1..15: note = Description of Artificial Sequence: Synthetic oligonucleotide
  source 1..15: mol_type = other DNA
ggytactatatgcac

SEQ ID NO: 4190 - protein, 5 aa, synthetic construct
  REGION 1..5: note = Description of Artificial Sequence: Synthetic peptide
GYYMH

SEQ ID NO: 4191 - DNA, 21 bp, synthetic construct
  misc_feature 1..21: note = Description of Artificial Sequence: Synthetic oligonucleotide
  source 1..21: mol_type = other DNA
actagtggagtgggtgtgggc

SEQ ID NO: 4192 - protein, 7 aa, synthetic construct
  REGION 1..7: note = Description of Artificial Sequence: Synthetic peptide
TSGVGVG

SEQ ID NO: 4193 - DNA, 21 bp, synthetic construct
  misc_feature 1..21: note = Description of Artificial Sequence: Synthetic oligonucleotide
  source 1..21: mol_type = other DNA
actggtggagtgggtgtgggc

SEQ ID NO: 4194 - protein, 7 aa, synthetic construct
  REGION 1..7: note = Description of Artificial Sequence: Synthetic peptide
TGGVGVG

SEQ ID NO: 4195 - DNA, 15 bp, synthetic construct
  misc_feature 1..15: note = Description of Artificial Sequence: Synthetic oligonucleotide
  source 1..15: mol_type = other DNA
ggccactatatgtgc

SEQ ID NO: 4196 - protein, 5 aa, synthetic construct
  REGION 1..5: note = Description of Artificial Sequence: Synthetic peptide
GHYMC

SEQ ID NO: 4197 - DNA, 21 bp, synthetic construct
  misc_feature 1..21: note = Description of Artificial Sequence: Synthetic oligonucleotide
  source 1..21: mol_type = other DNA
actagtggagtgggtgtgggc

SEQ ID NO: 4198 - protein, 7 aa, synthetic construct
  REGION 1..7: note = Description of Artificial Sequence: Synthetic peptide
TSGVGVG

SEQ ID NO: 4199 - DNA, 15 bp, synthetic construct
  misc_feature 1..15: note = Description of Artificial Sequence: Synthetic oligonucleotide
  source 1..15: mol_type = other DNA
ggctatggcatgcac

SEQ ID NO: 4200 - protein, 5 aa, synthetic construct
  REGION 1..5: note = Description of Artificial Sequence: Synthetic peptide
GYGMH

SEQ ID NO: 4201 - DNA, 21 bp, synthetic construct
  misc_feature 1..21: note = Description of Artificial Sequence: Synthetic oligonucleotide
  source 1..21: mol_type = other DNA
actggtggagtgggtgtgggc

SEQ ID NO: 4202 - protein, 7 aa, synthetic construct
  REGION 1..7: note = Description of Artificial Sequence: Synthetic peptide
TGGVGVG

SEQ ID NO: 4203 - DNA, 15 bp, synthetic construct
  misc_feature 1..15: note = Description of Artificial Sequence: Synthetic oligonucleotide
  source 1..15: mol_type = other DNA
agctatgtcatgagc

SEQ ID NO: 4204 - protein, 5 aa, synthetic construct
  REGION 1..5: note = Description of Artificial Sequence: Synthetic peptide
SYVMS

SEQ ID NO: 4205 - DNA, 15 bp, synthetic construct
  misc_feature 1..15: note = Description of Artificial Sequence: Synthetic oligonucleotide
  source 1..15: mol_type = other DNA
ggctactatatgcac

SEQ ID NO: 4206 - protein, 5 aa, synthetic construct
  REGION 1..5: note = Description of Artificial Sequence: Synthetic peptide
GYYMH

SEQ ID NO: 4207 - DNA, 15 bp, synthetic construct
  misc_feature 1..15: note = Description of Artificial Sequence: Synthetic oligonucleotide
  source 1..15: mol_type = other DNA
gactatggcatgcac

SEQ ID NO: 4208 - protein, 5 aa, synthetic construct
  REGION 1..5: note = Description of Artificial Sequence: Synthetic peptide
DYGMH

SEQ ID NO: 4209 - DNA, 15 bp, synthetic construct
  misc_feature 1..15: note = Description of Artificial Sequence: Synthetic oligonucleotide
  source 1..15: mol_type = other DNA
agctatagcatgaac

SEQ ID NO: 4210 - protein, 5 aa, synthetic construct
  REGION 1..5: note = Description of Artificial Sequence: Synthetic peptide
SYSMN

SEQ ID NO: 4211 - DNA, 21 bp, synthetic construct
  misc_feature 1..21: note = Description of Artificial Sequence: Synthetic oligonucleotide
  source 1..21: mol_type = other DNA
agaagtagttactactggggc

SEQ ID NO: 4212 - protein, 7 aa, synthetic construct
  REGION 1..7: note = Description of Artificial Sequence: Synthetic peptide
RSSYYWG

SEQ ID NO: 4213 - DNA, 15 bp, synthetic construct
  misc_feature 1..15: note = Description of Artificial Sequence: Synthetic oligonucleotide
  source 1..15: mol_type = other DNA
agctataccatgaac

SEQ ID NO: 4214 - protein, 5 aa, synthetic construct
  REGION 1..5: note = Description of Artificial Sequence: Synthetic peptide
SYTMN

SEQ ID NO: 4215 - DNA, 15 bp, synthetic construct
  misc_feature 1..15: note = Description of Artificial Sequence: Synthetic oligonucleotide
  source 1..15: mol_type = other DNA
gactatggcatgcac

SEQ ID NO: 4216 - protein, 5 aa, synthetic construct
  REGION 1..5: note = Description of Artificial Sequence: Synthetic peptide
DYGMH

SEQ ID NO: 4217 - DNA, 21 bp, synthetic construct
  misc_feature 1..21: note = Description of Artificial Sequence: Synthetic oligonucleotide
  source 1..21: mol_type = other DNA
agaagtagttactactggggc

SEQ ID NO: 4218 - protein, 7 aa, synthetic construct
  REGION 1..7: note = Description of Artificial Sequence: Synthetic peptide
RSSYYWG

SEQ ID NO: 4219 - DNA, 15 bp, synthetic construct
  misc_feature 1..15: note = Description of Artificial Sequence: Synthetic oligonucleotide
  source 1..15: mol_type = other DNA
gactatggcatgcac

SEQ ID NO: 4220 - protein, 5 aa, synthetic construct
  REGION 1..5: note = Description of Artificial Sequence: Synthetic peptide
DYGMH

SEQ ID NO: 4221 - DNA, 15 bp, synthetic construct
  misc_feature 1..15: note = Description of Artificial Sequence: Synthetic oligonucleotide
  source 1..15: mol_type = other DNA
agctatagcatgaac

SEQ ID NO: 4222 - protein, 5 aa, synthetic construct
  REGION 1..5: note = Description of Artificial Sequence: Synthetic peptide
SYSMN

SEQ ID NO: 4223 - DNA, 15 bp, synthetic construct
  misc_feature 1..15: note = Description of Artificial Sequence: Synthetic oligonucleotide
  source 1..15: mol_type = other DNA
aactgtgtcatgcac

SEQ ID NO: 4224 - protein, 5 aa, synthetic construct
  REGION 1..5: note = Description of Artificial Sequence: Synthetic peptide
NCVMH

SEQ ID NO: 4225 - DNA, 21 bp, synthetic construct
  misc_feature 1..21: note = Description of Artificial Sequence: Synthetic oligonucleotide
  source 1..21: mol_type = other DNA
cgcaacactgctgcttggagc

SEQ ID NO: 4226 - protein, 7 aa, synthetic construct
  REGION 1..7: note = Description of Artificial Sequence: Synthetic peptide
RNTAAWS

SEQ ID NO: 4227 - DNA, 21 bp, synthetic construct
  misc_feature 1..21: note = Description of Artificial Sequence: Synthetic oligonucleotide
  source 1..21: mol_type = other DNA
agaagtagttactattggggc

SEQ ID NO: 4228 - protein, 7 aa, synthetic construct
  REGION 1..7: note = Description of Artificial Sequence: Synthetic peptide
RSSYYWG

SEQ ID NO: 4229 - DNA, 15 bp, synthetic construct
  misc_feature 1..15: note = Description of Artificial Sequence: Synthetic oligonucleotide
  source 1..15: mol_type = other DNA
agctatggcatgcat

SEQ ID NO: 4230 - protein, 5 aa, synthetic construct
  REGION 1..5: note = Description of Artificial Sequence: Synthetic peptide
SYGMH

SEQ ID NO: 4231 - DNA, 21 bp, synthetic construct
  misc_feature 1..21: note = Description of Artificial Sequence: Synthetic oligonucleotide
  source 1..21: mol_type = other DNA
aggagtagttattactggggc

SEQ ID NO: 4232 - protein, 7 aa, synthetic construct
  REGION 1..7: note = Description of Artificial Sequence: Synthetic peptide
RSSYYWG

SEQ ID NO: 4233 - DNA, 15 bp, synthetic construct
  misc_feature 1..15: note = Description of Artificial Sequence: Synthetic oligonucleotide
  source 1..15: mol_type = other DNA
aactatggcatgcac

SEQ ID NO: 4234 - protein, 5 aa, synthetic construct
  REGION 1..5: note = Description of Artificial Sequence: Synthetic peptide
NYGMH

SEQ ID NO: 4235 - DNA, 15 bp, synthetic construct
  misc_feature 1..15: note = Description of Artificial Sequence: Synthetic oligonucleotide
  source 1..15: mol_type = other DNA
agcgatgacatgcac

SEQ ID NO: 4236 - protein, 5 aa, synthetic construct
  REGION 1..5: note = Description of Artificial Sequence: Synthetic peptide
SDDMH

SEQ ID NO: 4237 - DNA, 21 bp, synthetic construct
  misc_feature 1..21: note = Description of Artificial Sequence: Synthetic oligonucleotide
  source 1..21: mol_type = other DNA
cgcaacactgctgcttggagc

SEQ ID NO: 4238 - protein, 7 aa, synthetic construct
  REGION 1..7: note = Description of Artificial Sequence: Synthetic peptide
RNTAAWS

SEQ ID NO: 4239 - DNA, 15 bp, synthetic construct
  misc_feature 1..15: note = Description of Artificial Sequence: Synthetic oligonucleotide
  source 1..15: mol_type = other DNA
gactactacatgagc

SEQ ID NO: 4240 - protein, 5 aa, synthetic construct
  REGION 1..5: note = Description of Artificial Sequence: Synthetic peptide
DYYMS

SEQ ID NO: 4241 - DNA, 15 bp, synthetic construct
  misc_feature 1..15: note = Description of Artificial Sequence: Synthetic oligonucleotide
  source 1..15: mol_type = other DNA
agctatgccatgaac

SEQ ID NO: 4242 - protein, 5 aa, synthetic construct
  REGION 1..5: note = Description of Artificial Sequence: Synthetic peptide
SYAMN

SEQ ID NO: 4243 - DNA, 15 bp, synthetic construct
  misc_feature 1..15: note = Description of Artificial Sequence: Synthetic oligonucleotide
  source 1..15: mol_type = other DNA
aactatggcatgcac

SEQ ID NO: 4244 - protein, 5 aa, synthetic construct
  REGION 1..5: note = Description of Artificial Sequence: Synthetic peptide
NYGMH

SEQ ID NO: 4245 - DNA, 21 bp, synthetic construct
  misc_feature 1..21: note = Description of Artificial Sequence: Synthetic oligonucleotide
  source 1..21: mol_type = other DNA
aggagtagttactactggggc

SEQ ID NO: 4246 - protein, 7 aa, synthetic construct
  REGION 1..7: note = Description of Artificial Sequence: Synthetic peptide
RSSYYWG

SEQ ID NO: 4247 - DNA, 15 bp, synthetic construct
  misc_feature 1..15: note = Description of Artificial Sequence: Synthetic oligonucleotide
  source 1..15: mol_type = other DNA
aactatggcatgcac

SEQ ID NO: 4248 - protein, 5 aa, synthetic construct
  REGION 1..5: note = Description of Artificial Sequence: Synthetic peptide
NYGMH

SEQ ID NO: 4249 - DNA, 15 bp, synthetic construct
  misc_feature 1..15: note = Description of Artificial Sequence: Synthetic oligonucleotide
  source 1..15: mol_type = other DNA
agttatgacatgcac

SEQ ID NO: 4250 - protein, 5 aa, synthetic construct
  REGION 1..5: note = Description of Artificial Sequence: Synthetic peptide
SYDMH

SEQ ID NO: 4251 - DNA, 15 bp, synthetic construct
  misc_feature 1..15: note = Description of Artificial Sequence: Synthetic oligonucleotide
  source 1..15: mol_type = other DNA
agctatggcatgcac

SEQ ID NO: 4252 - protein, 5 aa, synthetic construct
  REGION 1..5: note = Description of Artificial Sequence: Synthetic peptide
SYGMH

SEQ ID NO: 4253 - DNA, 15 bp, synthetic construct
  misc_feature 1..15: note = Description of Artificial Sequence: Synthetic oligonucleotide
  source 1..15: mol_type = other DNA
agctatggcatgcac

SEQ ID NO: 4254 - protein, 5 aa, synthetic construct
  REGION 1..5: note = Description of Artificial Sequence: Synthetic peptide
SYGMH

SEQ ID NO: 4255 - DNA, 15 bp, synthetic construct
  misc_feature 1..15: note = Description of Artificial Sequence: Synthetic oligonucleotide
  source 1..15: mol_type = other DNA
agctatgccatgaac

SEQ ID NO: 4256 - protein, 5 aa, synthetic construct
  REGION 1..5: note = Description of Artificial Sequence: Synthetic peptide
SYAMN

SEQ ID NO: 4257 - DNA, 15 bp, synthetic construct
  misc_feature 1..15: note = Description of Artificial Sequence: Synthetic oligonucleotide
  source 1..15: mol_type = other DNA
gactatggcatgcac

SEQ ID NO: 4258 - protein, 5 aa, synthetic construct
  REGION 1..5: note = Description of Artificial Sequence: Synthetic peptide
DYGMH

SEQ ID NO: 4259 - DNA, 21 bp, synthetic construct
  misc_feature 1..21: note = Description of Artificial Sequence: Synthetic oligonucleotide
  source 1..21: mol_type = other DNA
ggtagtagttactactggggc

SEQ ID NO: 4260 - protein, 7 aa, synthetic construct
  REGION 1..7: note = Description of Artificial Sequence: Synthetic peptide
GSSYYWG

SEQ ID NO: 4261 - DNA, 15 bp, synthetic construct
  misc_feature 1..15: note = Description of Artificial Sequence: Synthetic oligonucleotide
  source 1..15: mol_type = other DNA
agctatgccatgaac

SEQ ID NO: 4262 - protein, 5 aa, synthetic construct
  REGION 1..5: note = Description of Artificial Sequence: Synthetic peptide
SYAMN

SEQ ID NO: 4263 - DNA, 15 bp, synthetic construct
  misc_feature 1..15: note = Description of Artificial Sequence: Synthetic oligonucleotide
  source 1..15: mol_type = other DNA
aactatggcatgcac

SEQ ID NO: 4264 - protein, 5 aa, synthetic construct
  REGION 1..5: note = Description of Artificial Sequence: Synthetic peptide
NYGMH

SEQ ID NO: 4265 - DNA, 15 bp, synthetic construct
  misc_feature 1..15: note = Description of Artificial Sequence: Synthetic oligonucleotide
  source 1..15: mol_type = other DNA
agctatagaatgaac

SEQ ID NO: 4266 - protein, 5 aa, synthetic construct
  REGION 1..5: note = Description of Artificial Sequence: Synthetic peptide
SYRMN

SEQ ID NO: 4267 - DNA, 15 bp, synthetic construct
  misc_feature 1..15: note = Description of Artificial Sequence: Synthetic oligonucleotide
  source 1..15: mol_type = other DNA
aactatggcatgaac

SEQ ID NO: 4268 - protein, 5 aa, synthetic construct
  REGION 1..5: note = Description of Artificial Sequence: Synthetic peptide
NYGMN

SEQ ID NO: 4269 - DNA, 15 bp, synthetic construct
  misc_feature 1..15: note = Description of Artificial Sequence: Synthetic oligonucleotide
  source 1..15: mol_type = other DNA
gactatggcatgcac

SEQ ID NO: 4270 - protein, 5 aa, synthetic construct
  REGION 1..5: note = Description of Artificial Sequence: Synthetic peptide
DYGMH

SEQ ID NO: 4271 - DNA, 15 bp, synthetic construct
  misc_feature 1..15: note = Description of Artificial Sequence: Synthetic oligonucleotide
  source 1..15: mol_type = other DNA
gactatggcatgcac

SEQ ID NO: 4272 - protein, 5 aa, synthetic construct
  REGION 1..5: note = Description of Artificial Sequence: Synthetic peptide
DYGMH

SEQ ID NO: 4273 - DNA, 15 bp, synthetic construct
  misc_feature 1..15: note = Description of Artificial Sequence: Synthetic oligonucleotide
  source 1..15: mol_type = other DNA
acctatagcatgaac

SEQ ID NO: 4274 - protein, 5 aa, synthetic construct
  REGION 1..5: note = Description of Artificial Sequence: Synthetic peptide
TYSMN

SEQ ID NO: 4275 - DNA, 15 bp, synthetic construct
  misc_feature 1..15: note = Description of Artificial Sequence: Synthetic oligonucleotide
  source 1..15: mol_type = other DNA
agctatgccatgcac

SEQ ID NO: 4276 - protein, 5 aa, synthetic construct
  REGION 1..5: note = Description of Artificial Sequence: Synthetic peptide
SYAMH

SEQ ID NO: 4277 - DNA, 15 bp, synthetic construct
  misc_feature 1..15: note = Description of Artificial Sequence: Synthetic oligonucleotide
  source 1..15: mol_type = other DNA
agctatgccatgacc

SEQ ID NO: 4278 - protein, 5 aa, synthetic construct
  REGION 1..5: note = Description of Artificial Sequence: Synthetic peptide
SYAMT

SEQ ID NO: 4279 - DNA, 15 bp, synthetic construct
  misc_feature 1..15: note = Description of Artificial Sequence: Synthetic oligonucleotide
  source 1..15: mol_type = other DNA
aactatggcatgcac

SEQ ID NO: 4280 - protein, 5 aa, synthetic construct
  REGION 1..5: note = Description of Artificial Sequence: Synthetic peptide
NYGMH

SEQ ID NO: 4281 - DNA, 15 bp, synthetic construct
  misc_feature 1..15: note = Description of Artificial Sequence: Synthetic oligonucleotide
  source 1..15: mol_type = other DNA
agctatgccatgaac

SEQ ID NO: 4282 - protein, 5 aa, synthetic construct
  REGION 1..5: note = Description of Artificial Sequence: Synthetic peptide
SYAMN

SEQ ID NO: 4283 - DNA, 15 bp, synthetic construct
  misc_feature 1..15: note = Description of Artificial Sequence: Synthetic oligonucleotide
  source 1..15: mol_type = other DNA
agctatgccatgagc

SEQ ID NO: 4284 - protein, 5 aa, synthetic construct
  REGION 1..5: note = Description of Artificial Sequence: Synthetic peptide
SYAMS

SEQ ID NO: 4285 - DNA, 21 bp, synthetic construct
  misc_feature 1..21: note = Description of Artificial Sequence: Synthetic oligonucleotide
  source 1..21: mol_type = other DNA
agaagtagttattactggggc

SEQ ID NO: 4286 - protein, 7 aa, synthetic construct
  REGION 1..7: note = Description of Artificial Sequence: Synthetic peptide
RSSYYWG

SEQ ID NO: 4287 - DNA, 15 bp, synthetic construct
  misc_feature 1..15: note = Description of Artificial Sequence: Synthetic oligonucleotide
  source 1..15: mol_type = other DNA
agctatagcatgaac

SEQ ID NO: 4288 - protein, 5 aa, synthetic construct
  REGION 1..5: note = Description of Artificial Sequence: Synthetic peptide
SYSMN

SEQ ID NO: 4289 - DNA, 15 bp, synthetic construct
  misc_feature 1..15: note = Description of Artificial Sequence: Synthetic oligonucleotide
  source 1..15: mol_type = other DNA
agctatggcatgcac

SEQ ID NO: 4290 - protein, 5 aa, synthetic construct
  REGION 1..5: note = Description of Artificial Sequence: Synthetic peptide
SYGMH

SEQ ID NO: 4291 - DNA, 15 bp, synthetic construct
  misc_feature 1..15: note = Description of Artificial Sequence: Synthetic oligonucleotide
  source 1..15: mol_type = other DNA
agctatgccatgacc

SEQ ID NO: 4292 - protein, 5 aa, synthetic construct
  REGION 1..5: note = Description of Artificial Sequence: Synthetic peptide
SYAMT

SEQ ID NO: 4293 - DNA, 15 bp, synthetic construct
  misc_feature 1..15: note = Description of Artificial Sequence: Synthetic oligonucleotide
  source 1..15: mol_type = other DNA
gactatggcatgcac

SEQ ID NO: 4294 - protein, 5 aa, synthetic construct
  REGION 1..5: note = Description of Artificial Sequence: Synthetic peptide
DYGMH

SEQ ID NO: 4295 - DNA, 15 bp, synthetic construct
  misc_feature 1..15: note = Description of Artificial Sequence: Synthetic oligonucleotide
  source 1..15: mol_type = other DNA
agctatgctatcaac

SEQ ID NO: 4296 - protein, 5 aa, synthetic construct
  REGION 1..5: note = Description of Artificial Sequence: Synthetic peptide
SYAIN

SEQ ID NO: 4297 - DNA, 15 bp, synthetic construct
  misc_feature 1..15: note = Description of Artificial Sequence: Synthetic oligonucleotide
  source 1..15: mol_type = other DNA
agctatgccatgagc

SEQ ID NO: 4298 - protein, 5 aa, synthetic construct
  REGION 1..5: note = Description of Artificial Sequence: Synthetic peptide
SYAMS

SEQ ID NO: 4299 - DNA, 15 bp, synthetic construct
  misc_feature 1..15: note = Description of Artificial Sequence: Synthetic oligonucleotide
  source 1..15: mol_type = other DNA
agctatgccatgagc

SEQ ID NO: 4300 - protein, 5 aa, synthetic construct
  REGION 1..5: note = Description of Artificial Sequence: Synthetic peptide
SYAMS

SEQ ID NO: 4301 - DNA, 15 bp, synthetic construct
  misc_feature 1..15: note = Description of Artificial Sequence: Synthetic oligonucleotide
  source 1..15: mol_type = other DNA
agctatagcatgaac

SEQ ID NO: 4302 - protein, 5 aa, synthetic construct
  REGION 1..5: note = Description of Artificial Sequence: Synthetic peptide
SYSMN

SEQ ID NO: 4303 - DNA, 15 bp, synthetic construct
  misc_feature 1..15: note = Description of Artificial Sequence: Synthetic oligonucleotide
  source 1..15: mol_type = other DNA
gactattacatgagc

SEQ ID NO: 4304 - protein, 5 aa, synthetic construct
  REGION 1..5: note = Description of Artificial Sequence: Synthetic peptide
DYYMS

SEQ ID NO: 4305 - DNA, 15 bp, synthetic construct
  misc_feature 1..15: note = Description of Artificial Sequence: Synthetic oligonucleotide
  source 1..15: mol_type = other DNA
agctatgccatgaac

SEQ ID NO: 4306 - protein, 5 aa, synthetic construct
  REGION 1..5: note = Description of Artificial Sequence: Synthetic peptide
SYAMN

SEQ ID NO: 4307 - DNA, 15 bp, synthetic construct
  misc_feature 1..15: note = Description of Artificial Sequence: Synthetic oligonucleotide
  source 1..15: mol_type = other DNA
gactatggcatgcac

SEQ ID NO: 4308 - protein, 5 aa, synthetic construct
  REGION 1..5: note = Description of Artificial Sequence: Synthetic peptide
DYGMH

SEQ ID NO: 4309 - DNA, 15 bp, synthetic construct
  misc_feature 1..15: note = Description of Artificial Sequence: Synthetic oligonucleotide
  source 1..15: mol_type = other DNA
agctatggcttgaac

SEQ ID NO: 4310 - protein, 5 aa, synthetic construct
  REGION 1..5: note = Description of Artificial Sequence: Synthetic peptide
SYGLN

SEQ ID NO: 4311 - DNA, 15 bp, synthetic construct
  misc_feature 1..15: note = Description of Artificial Sequence: Synthetic oligonucleotide
  source 1..15: mol_type = other DNA
agctatgccatgaac

SEQ ID NO: 4312 - protein, 5 aa, synthetic construct
  REGION 1..5: note = Description of Artificial Sequence: Synthetic peptide
SYAMN

SEQ ID NO: 4313 - DNA, 15 bp, synthetic construct
  misc_feature 1..15: note = Description of Artificial Sequence: Synthetic oligonucleotide
  source 1..15: mol_type = other DNA
agctatggcatgcac

SEQ ID NO: 4314 - protein, 5 aa, synthetic construct
  REGION 1..5: note = Description of Artificial Sequence: Synthetic peptide
SYGMH

SEQ ID NO: 4315 - DNA, 15 bp, synthetic construct
  misc_feature 1..15: note = Description of Artificial Sequence: Synthetic oligonucleotide
  source 1..15: mol_type = other DNA
gactatggcatgcac

SEQ ID NO: 4316 - protein, 5 aa, synthetic construct
  REGION 1..5: note = Description of Artificial Sequence: Synthetic peptide
DYGMH

SEQ ID NO: 4317 - DNA, 15 bp, synthetic construct
  misc_feature 1..15: note = Description of Artificial Sequence: Synthetic oligonucleotide
  source 1..15: mol_type = other DNA
aattatgtcattcac

SEQ ID NO: 4318 - protein, 5 aa, synthetic construct
  REGION 1..5: note = Description of Artificial Sequence: Synthetic peptide
NYVIH

SEQ ID NO: 4319 - DNA, 15 bp, synthetic construct
  misc_feature 1..15: note = Description of Artificial Sequence: Synthetic oligonucleotide
  source 1..15: mol_type = other DNA
agctatggcatgcac

SEQ ID NO: 4320 - protein, 5 aa, synthetic construct
  REGION 1..5: note = Description of Artificial Sequence: Synthetic peptide
SYGMH

SEQ ID NO: 4321 - DNA, 15 bp, synthetic construct
  misc_feature 1..15: note = Description of Artificial Sequence: Synthetic oligonucleotide
  source 1..15: mol_type = other DNA
agctatagcatgaac

SEQ ID NO: 4322 - protein, 5 aa, synthetic construct
  REGION 1..5: note = Description of Artificial Sequence: Synthetic peptide
SYSMN

SEQ ID NO: 4323 - DNA, 15 bp, synthetic construct
  misc_feature 1..15: note = Description of Artificial Sequence: Synthetic oligonucleotide
  source 1..15: mol_type = other DNA
agctatagcgtgaac

SEQ ID NO: 4324 - protein, 5 aa, synthetic construct
  REGION 1..5: note = Description of Artificial Sequence: Synthetic peptide
SYSVN

SEQ ID NO: 4325 - DNA, 15 bp, synthetic construct
  misc_feature 1..15: note = Description of Artificial Sequence: Synthetic oligonucleotide
  source 1..15: mol_type = other DNA
agcgatgacatgcac

SEQ ID NO: 4326 - protein, 5 aa, synthetic construct
  REGION 1..5: note = Description of Artificial Sequence: Synthetic peptide
SDDMH

SEQ ID NO: 4327 - DNA, 15 bp, synthetic construct
  misc_feature 1..15: note = Description of Artificial Sequence: Synthetic oligonucleotide
  source 1..15: mol_type = other DNA
agctatggcatgcac

SEQ ID NO: 4328 - protein, 5 aa, synthetic construct
  REGION 1..5: note = Description of Artificial Sequence: Synthetic peptide
SYGMH

SEQ ID NO: 4329 - DNA, 15 bp, synthetic construct
  misc_feature 1..15: note = Description of Artificial Sequence: Synthetic oligonucleotide
  source 1..15: mol_type = other DNA
gactatggcatgcac

SEQ ID NO: 4330 - protein, 5 aa, synthetic construct
  REGION 1..5: note = Description of Artificial Sequence: Synthetic peptide
DYGMH

SEQ ID NO: 4331 - DNA, 15 bp, synthetic construct
  misc_feature 1..15: note = Description of Artificial Sequence: Synthetic oligonucleotide
  source 1..15: mol_type = other DNA
agctatgccatgaac

SEQ ID NO: 4332 - protein, 5 aa, synthetic construct
  REGION 1..5: note = Description of Artificial Sequence: Synthetic peptide
SYAMN

SEQ ID NO: 4333 - DNA, 15 bp, synthetic construct
  misc_feature 1..15: note = Description of Artificial Sequence: Synthetic oligonucleotide
  source 1..15: mol_type = other DNA
agctatgccatgaac

SEQ ID NO: 4334 - protein, 5 aa, synthetic construct
  REGION 1..5: note = Description of Artificial Sequence: Synthetic peptide
SYAMN

SEQ ID NO: 4335 - DNA, 15 bp, synthetic construct
  misc_feature 1..15: note = Description of Artificial Sequence: Synthetic oligonucleotide
  source 1..15: mol_type = other DNA
agctatgccatgaac

SEQ ID NO: 4336 - protein, 5 aa, synthetic construct
  REGION 1..5: note = Description of Artificial Sequence: Synthetic peptide
SYAMN

SEQ ID NO: 4337 - DNA, 15 bp, synthetic construct
  misc_feature 1..15: note = Description of Artificial Sequence: Synthetic oligonucleotide
  source 1..15: mol_type = other DNA
agctatgccatgaac

SEQ ID NO: 4338 - protein, 5 aa, synthetic construct
  REGION 1..5: note = Description of Artificial Sequence: Synthetic peptide
SYAMN

SEQ ID NO: 4339 - DNA, 15 bp, synthetic construct
  misc_feature 1..15: note = Description of Artificial Sequence: Synthetic oligonucleotide
  source 1..15: mol_type = other DNA
agttatagcatgaac

SEQ ID NO: 4340 - protein, 5 aa, synthetic construct
  REGION 1..5: note = Description of Artificial Sequence: Synthetic peptide
SYSMN

SEQ ID NO: 4341 - DNA, 15 bp, synthetic construct
  misc_feature 1..15: note = Description of Artificial Sequence: Synthetic oligonucleotide
  source 1..15: mol_type = other DNA
agctatgccatgaac

SEQ ID NO: 4342 - protein, 5 aa, synthetic construct
  REGION 1..5: note = Description of Artificial Sequence: Synthetic peptide
SYAMN

SEQ ID NO: 4343 - DNA, 15 bp, synthetic construct
  misc_feature 1..15: note = Description of Artificial Sequence: Synthetic oligonucleotide
  source 1..15: mol_type = other DNA
agctatggcatgcac

SEQ ID NO: 4344 - protein, 5 aa, synthetic construct
  REGION 1..5: note = Description of Artificial Sequence: Synthetic peptide
SYGMH

SEQ ID NO: 4345 - DNA, 21 bp, synthetic construct
  misc_feature 1..21: note = Description of Artificial Sequence: Synthetic oligonucleotide
  source 1..21: mol_type = other DNA
agaagtagttactactggggc

SEQ ID NO: 4346 - protein, 7 aa, synthetic construct
  REGION 1..7: note = Description of Artificial Sequence: Synthetic peptide
RSSYYWG

SEQ ID NO: 4347 - DNA, 15 bp, synthetic construct
  misc_feature 1..15: note = Description of Artificial Sequence: Synthetic oligonucleotide
  source 1..15: mol_type = other DNA
agctatagcatgaac

SEQ ID NO: 4348 - protein, 5 aa, synthetic construct
  REGION 1..5: note = Description of Artificial Sequence: Synthetic peptide
SYSMN

SEQ ID NO: 4349 - DNA, 15 bp, synthetic construct
  misc_feature 1..15: note = Description of Artificial Sequence: Synthetic oligonucleotide
  source 1..15: mol_type = other DNA
agctatagcatgaac

SEQ ID NO: 4350 - protein, 5 aa, synthetic construct
  REGION 1..5: note = Description of Artificial Sequence: Synthetic peptide
SYSMN

SEQ ID NO: 4351 - DNA, 15 bp, synthetic construct
  misc_feature 1..15: note = Description of Artificial Sequence: Synthetic oligonucleotide
  source 1..15: mol_type = other DNA
agctatggcatgcac

SEQ ID NO: 4352 - protein, 5 aa, synthetic construct
  REGION 1..5: note = Description of Artificial Sequence: Synthetic peptide
SYGMH

SEQ ID NO: 4353 - DNA, 15 bp, synthetic construct
  misc_feature 1..15: note = Description of Artificial Sequence: Synthetic oligonucleotide
  source 1..15: mol_type = other DNA
agctatagcatgaac

SEQ ID NO: 4354 - protein, 5 aa, synthetic construct
  REGION 1..5: note = Description of Artificial Sequence: Synthetic peptide
SYSMN

SEQ ID NO: 4355 - DNA, 15 bp, synthetic construct
  misc_feature 1..15: note = Description of Artificial Sequence: Synthetic oligonucleotide
  source 1..15: mol_type = other DNA
agctatgttatgagc

SEQ ID NO: 4356 - protein, 5 aa, synthetic construct
  REGION 1..5: note = Description of Artificial Sequence: Synthetic peptide
SYVMS

SEQ ID NO: 4357 - DNA, 15 bp, synthetic construct
  misc_feature 1..15: note = Description of Artificial Sequence: Synthetic oligonucleotide
  source 1..15: mol_type = other DNA
aattatgatatcaac

SEQ ID NO: 4358 - protein, 5 aa, synthetic construct
  REGION 1..5: note = Description of Artificial Sequence: Synthetic peptide
NYDIN

SEQ ID NO: 4359 - DNA, 15 bp, synthetic construct
  misc_feature 1..15: note = Description of Artificial Sequence: Synthetic oligonucleotide
  source 1..15: mol_type = other DNA
agctatagcatgaac

SEQ ID NO: 4360 - protein, 5 aa, synthetic construct
  REGION 1..5: note = Description of Artificial Sequence: Synthetic peptide
SYSMN

SEQ ID NO: 4361 - DNA, 15 bp, synthetic construct
  misc_feature 1..15: note = Description of Artificial Sequence: Synthetic oligonucleotide
  source 1..15: mol_type = other DNA
gactatggcatgcac

SEQ ID NO: 4362 - protein, 5 aa, synthetic construct
  REGION 1..5: note = Description of Artificial Sequence: Synthetic peptide
DYGMH

SEQ ID NO: 4363 - DNA, 15 bp, synthetic construct
  misc_feature 1..15: note = Description of Artificial Sequence: Synthetic oligonucleotide
  source 1..15: mol_type = other DNA
agctatagcatgaac

SEQ ID NO: 4364 - protein, 5 aa, synthetic construct
  REGION 1..5: note = Description of Artificial Sequence: Synthetic peptide
SYSMN

SEQ ID NO: 4365 - DNA, 21 bp, synthetic construct
  misc_feature 1..21: note = Description of Artificial Sequence: Synthetic oligonucleotide
  source 1..21: mol_type = other DNA
aggagtagttactactggggc

SEQ ID NO: 4366 - protein, 7 aa, synthetic construct
  REGION 1..7: note = Description of Artificial Sequence: Synthetic peptide
RSSYYWG

SEQ ID NO: 4367 - DNA, 15 bp, synthetic construct
  misc_feature 1..15: note = Description of Artificial Sequence: Synthetic oligonucleotide
  source 1..15: mol_type = other DNA
gactatggcatacac

SEQ ID NO: 4368 - protein, 5 aa, synthetic construct
  REGION 1..5: note = Description of Artificial Sequence: Synthetic peptide
DYGIH

SEQ ID NO: 4369 - DNA, 15 bp, synthetic construct
  misc_feature 1..15: note = Description of Artificial Sequence: Synthetic oligonucleotide
  source 1..15: mol_type = other DNA
agctatggcatgcac

SEQ ID NO: 4370 - protein, 5 aa, synthetic construct
  REGION 1..5: note = Description of Artificial Sequence: Synthetic peptide
SYGMH

SEQ ID NO: 4371 - DNA, 21 bp, synthetic construct
  misc_feature 1..21: note = Description of Artificial Sequence: Synthetic oligonucleotide
  source 1..21: mol_type = other DNA
aggagtagttactactggggc

SEQ ID NO: 4372 - protein, 7 aa, synthetic construct
  REGION 1..7: note = Description of Artificial Sequence: Synthetic peptide
RSSYYWG

SEQ ID NO: 4373 - DNA, 15 bp, synthetic construct
  misc_feature 1..15: note = Description of Artificial Sequence: Synthetic oligonucleotide
  source 1..15: mol_type = other DNA
agctatgccatgaac

SEQ ID NO: 4374 - protein, 5 aa, synthetic construct
  REGION 1..5: note = Description of Artificial Sequence: Synthetic peptide
SYAMN

SEQ ID NO: 4375 - DNA, 15 bp, synthetic construct
  misc_feature 1..15: note = Description of Artificial Sequence: Synthetic oligonucleotide
  source 1..15: mol_type = other DNA
agctatggcatgcac

SEQ ID NO: 4376 - protein, 5 aa, synthetic construct
  REGION 1..5: note = Description of Artificial Sequence: Synthetic peptide
SYGMH

SEQ ID NO: 4377 - DNA, 15 bp, synthetic construct
  misc_feature 1..15: note = Description of Artificial Sequence: Synthetic oligonucleotide
  source 1..15: mol_type = other DNA
agctatgccatgagc

SEQ ID NO: 4378 - protein, 5 aa, synthetic construct
  REGION 1..5: note = Description of Artificial Sequence: Synthetic peptide
SYAMS

SEQ ID NO: 4379 - DNA, 15 bp, synthetic construct
  misc_feature 1..15: note = Description of Artificial Sequence: Synthetic oligonucleotide
  source 1..15: mol_type = other DNA
aactatggcatgcac

SEQ ID NO: 4380 - protein, 5 aa, synthetic construct
  REGION 1..5: note = Description of Artificial Sequence: Synthetic peptide
NYGMH

SEQ ID NO: 4381 - DNA, 15 bp, synthetic construct
  misc_feature 1..15: note = Description of Artificial Sequence: Synthetic oligonucleotide
  source 1..15: mol_type = other DNA
agctatgccatgaac

SEQ ID NO: 4382 - protein, 5 aa, synthetic construct
  REGION 1..5: note = Description of Artificial Sequence: Synthetic peptide
SYAMN

SEQ ID NO: 4383 - DNA, 15 bp, synthetic construct
  misc_feature 1..15: note = Description of Artificial Sequence: Synthetic oligonucleotide
  source 1..15: mol_type = other DNA
agctatggcatgcac

SEQ ID NO: 4384 - protein, 5 aa, synthetic construct
  REGION 1..5: note = Description of Artificial Sequence: Synthetic peptide
SYGMH

SEQ ID NO: 4385 - DNA, 15 bp, synthetic construct
  misc_feature 1..15: note = Description of Artificial Sequence: Synthetic oligonucleotide
  source 1..15: mol_type = other DNA
agctatgccatgagc

SEQ ID NO: 4386 - protein, 5 aa, synthetic construct
  REGION 1..5: note = Description of Artificial Sequence: Synthetic peptide
SYAMS

SEQ ID NO: 4387 - DNA, 15 bp, synthetic construct
  misc_feature 1..15: note = Description of Artificial Sequence: Synthetic oligonucleotide
  source 1..15: mol_type = other DNA
agctatggcatgcac

SEQ ID NO: 4388 - protein, 5 aa, synthetic construct
  REGION 1..5: note = Description of Artificial Sequence: Synthetic peptide
SYGMH

SEQ ID NO: 4389 - DNA, 21 bp, synthetic construct
  misc_feature 1..21: note = Description of Artificial Sequence: Synthetic oligonucleotide
  source 1..21: mol_type = other DNA
agaagtagttactactggggc

SEQ ID NO: 4390 - protein, 7 aa, synthetic construct
  REGION 1..7: note = Description of Artificial Sequence: Synthetic peptide
RSSYYWG

SEQ ID NO: 4391 - DNA, 21 bp, synthetic construct
  misc_feature 1..21: note = Description of Artificial Sequence: Synthetic oligonucleotide
  source 1..21: mol_type = other DNA
aggagtagttactactggggc

SEQ ID NO: 4392 - protein, 7 aa, synthetic construct
  REGION 1..7: note = Description of Artificial Sequence: Synthetic peptide
RSSYYWG

SEQ ID NO: 4393 - DNA, 21 bp, synthetic construct
  misc_feature 1..21: note = Description of Artificial Sequence: Synthetic oligonucleotide
  source 1..21: mol_type = other DNA
aggagtagttactactggggc

SEQ ID NO: 4394 - protein, 7 aa, synthetic construct
  REGION 1..7: note = Description of Artificial Sequence: Synthetic peptide
RSSYYWG

SEQ ID NO: 4395 - DNA, 15 bp, synthetic construct
  misc_feature 1..15: note = Description of Artificial Sequence: Synthetic oligonucleotide
  source 1..15: mol_type = other DNA
agctatagcatgaac

SEQ ID NO: 4396 - protein, 5 aa, synthetic construct
  REGION 1..5: note = Description of Artificial Sequence: Synthetic peptide
SYSMN

SEQ ID NO: 4397 - DNA, 15 bp, synthetic construct
  misc_feature 1..15: note = Description of Artificial Sequence: Synthetic oligonucleotide
  source 1..15: mol_type = other DNA
agttacttctggagc

SEQ ID NO: 4398 - protein, 5 aa, synthetic construct
  REGION 1..5: note = Description of Artificial Sequence: Synthetic peptide
SYFWS

SEQ ID NO: 4399 - DNA, 15 bp, synthetic construct
  misc_feature 1..15: note = Description of Artificial Sequence: Synthetic oligonucleotide
  source 1..15: mol_type = other DNA
gactatggcatgcac

SEQ ID NO: 4400 - protein, 5 aa, synthetic construct
  REGION 1..5: note = Description of Artificial Sequence: Synthetic peptide
DYGMH

SEQ ID NO: 4401 - DNA, 21 bp, synthetic construct
  misc_feature 1..21: note = Description of Artificial Sequence: Synthetic oligonucleotide
  source 1..21: mol_type = other DNA
aggagtagttactactggggc

SEQ ID NO: 4402 - protein, 7 aa, synthetic construct
  REGION 1..7: note = Description of Artificial Sequence: Synthetic peptide
RSSYYWG

SEQ ID NO: 4403 - DNA, 15 bp, synthetic construct
  misc_feature 1..15: note = Description of Artificial Sequence: Synthetic oligonucleotide
  source 1..15: mol_type = other DNA
gactatggcatgcac

SEQ ID NO: 4404 - protein, 5 aa, synthetic construct
  REGION 1..5: note = Description of Artificial Sequence: Synthetic peptide
DYGMH

SEQ ID NO: 4405 - DNA, 21 bp, synthetic construct
  misc_feature 1..21: note = Description of Artificial Sequence: Synthetic oligonucleotide
  source 1..21: mol_type = other DNA
aggagtagttactactggggc

SEQ ID NO: 4406 - protein, 7 aa, synthetic construct
  REGION 1..7: note = Description of Artificial Sequence: Synthetic peptide
RSSYYWG

SEQ ID NO: 4407 - DNA, 15 bp, synthetic construct
  misc_feature 1..15: note = Description of Artificial Sequence: Synthetic oligonucleotide
  source 1..15: mol_type = other DNA
agctatgccatgagc

SEQ ID NO: 4408 - protein, 5 aa, synthetic construct
  REGION 1..5: note = Description of Artificial Sequence: Synthetic peptide
SYAMS

SEQ ID NO: 4409 - DNA, 15 bp, synthetic construct
  misc_feature 1..15: note = Description of Artificial Sequence: Synthetic oligonucleotide
  source 1..15: mol_type = other DNA
agctatgccatgagc

SEQ ID NO: 4410 - protein, 5 aa, synthetic construct
  REGION 1..5: note = Description of Artificial Sequence: Synthetic peptide
SYAMS

SEQ ID NO: 4411 - DNA, 15 bp, synthetic construct
  misc_feature 1..15: note = Description of Artificial Sequence: Synthetic oligonucleotide
  source 1..15: mol_type = other DNA
tcctataccatgaac

SEQ ID NO: 4412 - protein, 5 aa, synthetic construct
  REGION 1..5: note = Description of Artificial Sequence: Synthetic peptide
SYTMN

SEQ ID NO: 4413 - DNA, 15 bp, synthetic construct
  misc_feature 1..15: note = Description of Artificial Sequence: Synthetic oligonucleotide
  source 1..15: mol_type = other DNA
aactatgtcatgcac

SEQ ID NO: 4414 - protein, 5 aa, synthetic construct
  REGION 1..5: note = Description of Artificial Sequence: Synthetic peptide
NYVMH

SEQ ID NO: 4415 - DNA, 15 bp, synthetic construct
  misc_feature 1..15: note = Description of Artificial Sequence: Synthetic oligonucleotide
  source 1..15: mol_type = other DNA
agctatagcatgaac

SEQ ID NO: 4416 - protein, 5 aa, synthetic construct
  REGION 1..5: note = Description of Artificial Sequence: Synthetic peptide
SYSMN

SEQ ID NO: 4417 - DNA, 15 bp, synthetic construct
  misc_feature 1..15: note = Description of Artificial Sequence: Synthetic oligonucleotide
  source 1..15: mol_type = other DNA
acctatagcatgaac

SEQ ID NO: 4418 - protein, 5 aa, synthetic construct
  REGION 1..5: note = Description of Artificial Sequence: Synthetic peptide
TYSMN

SEQ ID NO: 4419 - DNA, 15 bp, synthetic construct
  misc_feature 1..15: note = Description of Artificial Sequence: Synthetic oligonucleotide
  source 1..15: mol_type = other DNA
agctatgccatgaac

SEQ ID NO: 4420 - protein, 5 aa, synthetic construct
  REGION 1..5: note = Description of Artificial Sequence: Synthetic peptide
SYAMN

SEQ ID NO: 4421 - DNA, 15 bp, synthetic construct
  misc_feature 1..15: note = Description of Artificial Sequence: Synthetic oligonucleotide
  source 1..15: mol_type = other DNA
gactatggcatgcac

SEQ ID NO: 4422 - protein, 5 aa, synthetic construct
  REGION 1..5: note = Description of Artificial Sequence: Synthetic peptide
DYGMH

SEQ ID NO: 4423 - DNA, 15 bp, synthetic construct
  misc_feature 1..15: note = Description of Artificial Sequence: Synthetic oligonucleotide
  source 1..15: mol_type = other DNA
agctatgccatgagc

SEQ ID NO: 4424 - protein, 5 aa, synthetic construct
  REGION 1..5: note = Description of Artificial Sequence: Synthetic peptide
SYAMS

SEQ ID NO: 4425 - DNA, 21 bp, synthetic construct
  misc_feature 1..21: note = Description of Artificial Sequence: Synthetic oligonucleotide
  source 1..21: mol_type = other DNA
aggagtagttactactggggc

SEQ ID NO: 4426 - protein, 7 aa, synthetic construct
  REGION 1..7: note = Description of Artificial Sequence: Synthetic peptide
RSSYYWG

SEQ ID NO: 4427 - DNA, 15 bp, synthetic construct
  misc_feature 1..15: note = Description of Artificial Sequence: Synthetic oligonucleotide
  source 1..15: mol_type = other DNA
agctatggcatgcac

SEQ ID NO: 4428 - protein, 5 aa, synthetic construct
  REGION 1..5: note = Description of Artificial Sequence: Synthetic peptide
SYGMH

SEQ ID NO: 4429 - DNA, 21 bp, synthetic construct
  misc_feature 1..21: note = Description of Artificial Sequence: Synthetic oligonucleotide
  source 1..21: mol_type = other DNA
agtggtggttactactggagc

SEQ ID NO: 4430 - protein, 7 aa, synthetic construct
  REGION 1..7: note = Description of Artificial Sequence: Synthetic peptide
SGGYYWS

SEQ ID NO: 4431 - DNA, 15 bp, synthetic construct
  misc_feature 1..15: note = Description of Artificial Sequence: Synthetic oligonucleotide
  source 1..15: mol_type = other DNA
agctatggcatgcac

SEQ ID NO: 4432 - protein, 5 aa, synthetic construct
  REGION 1..5: note = Description of Artificial Sequence: Synthetic peptide
SYGMH

SEQ ID NO: 4433 - DNA, 15 bp, synthetic construct
  misc_feature 1..15: note = Description of Artificial Sequence: Synthetic oligonucleotide
  source 1..15: mol_type = other DNA
agctatggcatgcac

SEQ ID NO: 4434 - protein, 5 aa, synthetic construct
  REGION 1..5: note = Description of Artificial Sequence: Synthetic peptide
SYGMH

SEQ ID NO: 4435 - DNA, 21 bp, synthetic construct
  misc_feature 1..21: note = Description of Artificial Sequence: Synthetic oligonucleotide
  source 1..21: mol_type = other DNA
aggagtagttactactggggc

SEQ ID NO: 4436 - protein, 7 aa, synthetic construct
  REGION 1..7: note = Description of Artificial Sequence: Synthetic peptide
RSSYYWG

SEQ ID NO: 4437 - DNA, 15 bp, synthetic construct
  misc_feature 1..15: note = Description of Artificial Sequence: Synthetic oligonucleotide
  source 1..15: mol_type = other DNA
agctatgtcatgcac

SEQ ID NO: 4438 - protein, 5 aa, synthetic construct
  REGION 1..5: note = Description of Artificial Sequence: Synthetic peptide
SYVMH

SEQ ID NO: 4439 - DNA, 15 bp, synthetic construct
  misc_feature 1..15: note = Description of Artificial Sequence: Synthetic oligonucleotide
  source 1..15: mol_type = other DNA
aactatgccatgagc

SEQ ID NO: 4440 - protein, 5 aa, synthetic construct
  REGION 1..5: note = Description of Artificial Sequence: Synthetic peptide
NYAMS

SEQ ID NO: 4441 - DNA, 15 bp, synthetic construct
  misc_feature 1..15: note = Description of Artificial Sequence: Synthetic oligonucleotide
  source 1..15: mol_type = other DNA
gactatggcatgcac

SEQ ID NO: 4442 - protein, 5 aa, synthetic construct
  REGION 1..5: note = Description of Artificial Sequence: Synthetic peptide
DYGMH

SEQ ID NO: 4443 - DNA, 15 bp, synthetic construct
  misc_feature 1..15: note = Description of Artificial Sequence: Synthetic oligonucleotide
  source 1..15: mol_type = other DNA
agctatgccatgagc

SEQ ID NO: 4444 - protein, 5 aa, synthetic construct
  REGION 1..5: note = Description of Artificial Sequence: Synthetic peptide
SYAMS

SEQ ID NO: 4445 - DNA, 15 bp, synthetic construct
  misc_feature 1..15: note = Description of Artificial Sequence: Synthetic oligonucleotide
  source 1..15: mol_type = other DNA
agctatggcatgcac

SEQ ID NO: 4446 - protein, 5 aa, synthetic construct
  REGION 1..5: note = Description of Artificial Sequence: Synthetic peptide
SYGMH

SEQ ID NO: 4447 - DNA, 21 bp, synthetic construct
  misc_feature 1..21: note = Description of Artificial Sequence: Synthetic oligonucleotide
  source 1..21: mol_type = other DNA
aggagtagttactactggggc

SEQ ID NO: 4448 - protein, 7 aa, synthetic construct
  REGION 1..7: note = Description of Artificial Sequence: Synthetic peptide
RSSYYWG

SEQ ID NO: 4449 - DNA, 15 bp, synthetic construct
  misc_feature 1..15: note = Description of Artificial Sequence: Synthetic oligonucleotide
  source 1..15: mol_type = other DNA
agctatggcatgcac

SEQ ID NO: 4450 - protein, 5 aa, synthetic construct
  REGION 1..5: note = Description of Artificial Sequence: Synthetic peptide
SYGMH

SEQ ID NO: 4451 - DNA, 15 bp, synthetic construct
  misc_feature 1..15: note = Description of Artificial Sequence: Synthetic oligonucleotide
  source 1..15: mol_type = other DNA
aattatgatatcaac

SEQ ID NO: 4452 - protein, 5 aa, synthetic construct
  REGION 1..5: note = Description of Artificial Sequence: Synthetic peptide
NYDIN

SEQ ID NO: 4453 - DNA, 15 bp, synthetic construct
  misc_feature 1..15: note = Description of Artificial Sequence: Synthetic oligonucleotide
  source 1..15: mol_type = other DNA
agctatggcatgcac

SEQ ID NO: 4454 - protein, 5 aa, synthetic construct
  REGION 1..5: note = Description of Artificial Sequence: Synthetic peptide
SYGMH

SEQ ID NO: 4455 - DNA, 15 bp, synthetic construct
  misc_feature 1..15: note = Description of Artificial Sequence: Synthetic oligonucleotide
  source 1..15: mol_type = other DNA
agctatgccatgagc

SEQ ID NO: 4456 - protein, 5 aa, synthetic construct
  REGION 1..5: note = Description of Artificial Sequence: Synthetic peptide
SYAMS

SEQ ID NO: 4457 - DNA, 15 bp, synthetic construct
  misc_feature 1..15: note = Description of Artificial Sequence: Synthetic oligonucleotide
  source 1..15: mol_type = other DNA
agctatgccatgagc

SEQ ID NO: 4458 - protein, 5 aa, synthetic construct
  REGION 1..5: note = Description of Artificial Sequence: Synthetic peptide
SYAMS

SEQ ID NO: 4459 - DNA, 15 bp, synthetic construct
  misc_feature 1..15: note = Description of Artificial Sequence: Synthetic oligonucleotide
  source 1..15: mol_type = other DNA
gactatggcatgcac

SEQ ID NO: 4460 - protein, 5 aa, synthetic construct
  REGION 1..5: note = Description of Artificial Sequence: Synthetic peptide
DYGMH

SEQ ID NO: 4461 - DNA, 21 bp, synthetic construct
  misc_feature 1..21: note = Description of Artificial Sequence: Synthetic oligonucleotide
  source 1..21: mol_type = other DNA
agaagtagttactactggggc

SEQ ID NO: 4462 - protein, 7 aa, synthetic construct
  REGION 1..7: note = Description of Artificial Sequence: Synthetic peptide
RSSYYWG

SEQ ID NO: 4463 - DNA, 15 bp, synthetic construct
  misc_feature 1..15: note = Description of Artificial Sequence: Synthetic oligonucleotide
  source 1..15: mol_type = other DNA
aacgcctggatgaac

SEQ ID NO: 4464 - protein, 5 aa, synthetic construct
  REGION 1..5: note = Description of Artificial Sequence: Synthetic peptide
NAWMN

SEQ ID NO: 4465 - DNA, 15 bp, synthetic construct
  misc_feature 1..15: note = Description of Artificial Sequence: Synthetic oligonucleotide
  source 1..15: mol_type = other DNA
gactatggcatgcac

SEQ ID NO: 4466 - protein, 5 aa, synthetic construct
  REGION 1..5: note = Description of Artificial Sequence: Synthetic peptide
DYGMH

SEQ ID NO: 4467 - DNA, 15 bp, synthetic construct
  misc_feature 1..15: note = Description of Artificial Sequence: Synthetic oligonucleotide
  source 1..15: mol_type = other DNA
agctatgccatgagc

SEQ ID NO: 4468 - protein, 5 aa, synthetic construct
  REGION 1..5: note = Description of Artificial Sequence: Synthetic peptide
SYAMS

SEQ ID NO: 4469 - DNA, 21 bp, synthetic construct
  misc_feature 1..21: note = Description of Artificial Sequence: Synthetic oligonucleotide
  source 1..21: mol_type = other DNA
ggtagtaattactactggggc

SEQ ID NO: 4470 - protein, 7 aa, synthetic construct
  REGION 1..7: note = Description of Artificial Sequence: Synthetic peptide
GSNYYWG

SEQ ID NO: 4471 - DNA, 15 bp, synthetic construct
  misc_feature 1..15: note = Description of Artificial Sequence: Synthetic oligonucleotide
  source 1..15: mol_type = other DNA
agctatggcatgcac

SEQ ID NO: 4472 - protein, 5 aa, synthetic construct
  REGION 1..5: note = Description of Artificial Sequence: Synthetic peptide
SYGMH

SEQ ID NO: 4473 - DNA, 15 bp, synthetic construct
  misc_feature 1..15: note = Description of Artificial Sequence: Synthetic oligonucleotide
  source 1..15: mol_type = other DNA
agctatggcatgcac

SEQ ID NO: 4474 - protein, 5 aa, synthetic construct
  REGION 1..5: note = Description of Artificial Sequence: Synthetic peptide
SYGMH

SEQ ID NO: 4475 - DNA, 15 bp, synthetic construct
  misc_feature 1..15: note = Description of Artificial Sequence: Synthetic oligonucleotide
  source 1..15: mol_type = other DNA
agcgatggcatgcac

SEQ ID NO: 4476 - protein, 5 aa, synthetic construct
  REGION 1..5: note = Description of Artificial Sequence: Synthetic peptide
SDGMH

SEQ ID NO: 4477 - DNA, 15 bp, synthetic construct
  misc_feature 1..15: note = Description of Artificial Sequence: Synthetic oligonucleotide
  source 1..15: mol_type = other DNA
agctatagcatgaac

SEQ ID NO: 4478 - protein, 5 aa, synthetic construct
  REGION 1..5: note = Description of Artificial Sequence: Synthetic peptide
SYSMN

SEQ ID NO: 4479 - DNA, 15 bp, synthetic construct
  misc_feature 1..15: note = Description of Artificial Sequence: Synthetic oligonucleotide
  source 1..15: mol_type = other DNA
agctatggcatgcac

SEQ ID NO: 4480 - protein, 5 aa, synthetic construct
  REGION 1..5: note = Description of Artificial Sequence: Synthetic peptide
SYGMH

SEQ ID NO: 4481 - DNA, 15 bp, synthetic construct
  misc_feature 1..15: note = Description of Artificial Sequence: Synthetic oligonucleotide
  source 1..15: mol_type = other DNA
gactatggcatacac

SEQ ID NO: 4482 - protein, 5 aa, synthetic construct
  REGION 1..5: note = Description of Artificial Sequence: Synthetic peptide
DYGIH

SEQ ID NO: 4483 - DNA, 15 bp, synthetic construct
  misc_feature 1..15: note = Description of Artificial Sequence: Synthetic oligonucleotide
  source 1..15: mol_type = other DNA
agctatggcatgcac

SEQ ID NO: 4484 - protein, 5 aa, synthetic construct
  REGION 1..5: note = Description of Artificial Sequence: Synthetic peptide
SYGMH

SEQ ID NO: 4485 - DNA, 15 bp, synthetic construct
  misc_feature 1..15: note = Description of Artificial Sequence: Synthetic oligonucleotide
  source 1..15: mol_type = other DNA
agctatggcatgcac

SEQ ID NO: 4486 - protein, 5 aa, synthetic construct
  REGION 1..5: note = Description of Artificial Sequence: Synthetic peptide
SYGMH

SEQ ID NO: 4487 - DNA, 15 bp, synthetic construct
  misc_feature 1..15: note = Description of Artificial Sequence: Synthetic oligonucleotide
  source 1..15: mol_type = other DNA
aattatgatattaat

SEQ ID NO: 4488 - protein, 5 aa, synthetic construct
  REGION 1..5: note = Description of Artificial Sequence: Synthetic peptide
NYDIN

SEQ ID NO: 4489 - DNA, 15 bp, synthetic construct
  misc_feature 1..15: note = Description of Artificial Sequence: Synthetic oligonucleotide
  source 1..15: mol_type = other DNA
aactatggcatgcac

SEQ ID NO: 4490 - protein, 5 aa, synthetic construct
  REGION 1..5: note = Description of Artificial Sequence: Synthetic peptide
NYGMH

SEQ ID NO: 4491 - DNA, 15 bp, synthetic construct
  misc_feature 1..15: note = Description of Artificial Sequence: Synthetic oligonucleotide
  source 1..15: mol_type = other DNA
agctatggcatgcac

SEQ ID NO: 4492 - protein, 5 aa, synthetic construct
  REGION 1..5: note = Description of Artificial Sequence: Synthetic peptide
SYGMH

SEQ ID NO: 4493 - DNA, 15 bp, synthetic construct
  misc_feature 1..15: note = Description of Artificial Sequence: Synthetic oligonucleotide
  source 1..15: mol_type = other DNA
aattatgatattaat

SEQ ID NO: 4494 - protein, 5 aa, synthetic construct
  REGION 1..5: note = Description of Artificial Sequence: Synthetic peptide
NYDIN

SEQ ID NO: 4495 - DNA, 15 bp, synthetic construct
  misc_feature 1..15: note = Description of Artificial Sequence: Synthetic oligonucleotide
  source 1..15: mol_type = other DNA
agctatggcatacac

SEQ ID NO: 4496 - protein, 5 aa, synthetic construct
  REGION 1..5: note = Description of Artificial Sequence: Synthetic peptide
SYGIH

SEQ ID NO: 4497 - DNA, 15 bp, synthetic construct
  misc_feature 1..15: note = Description of Artificial Sequence: Synthetic oligonucleotide
  source 1..15: mol_type = other DNA
gactatggcattcac

SEQ ID NO: 4498 - protein, 5 aa, synthetic construct
  REGION 1..5: note = Description of Artificial Sequence: Synthetic peptide
DYGIH

SEQ ID NO: 4499 - DNA, 15 bp, synthetic construct
  misc_feature 1..15: note = Description of Artificial Sequence: Synthetic oligonucleotide
  source 1..15: mol_type = other DNA
agctgtgccatgaac

SEQ ID NO: 4500 - protein, 5 aa, synthetic construct
  REGION 1..5: note = Description of Artificial Sequence: Synthetic peptide
SCAMN

SEQ ID NO: 4501 - DNA, 15 bp, synthetic construct
  misc_feature 1..15: note = Description of Artificial Sequence: Synthetic oligonucleotide
  source 1..15: mol_type = other DNA
agctatgccatgagc

SEQ ID NO: 4502 - protein, 5 aa, synthetic construct
  REGION 1..5: note = Description of Artificial Sequence: Synthetic peptide
SYAMS

SEQ ID NO: 4503 - DNA, 15 bp, synthetic construct
  misc_feature 1..15: note = Description of Artificial Sequence: Synthetic oligonucleotide
  source 1..15: mol_type = other DNA
gactatggcatacac

SEQ ID NO: 4504 - protein, 5 aa, synthetic construct
  REGION 1..5: note = Description of Artificial Sequence: Synthetic peptide
DYGIH

SEQ ID NO: 4505 - DNA, 15 bp, synthetic construct
  misc_feature 1..15: note = Description of Artificial Sequence: Synthetic oligonucleotide
  source 1..15: mol_type = other DNA
agctataggatgaac

SEQ ID NO: 4506 - protein, 5 aa, synthetic construct
  REGION 1..5: note = Description of Artificial Sequence: Synthetic peptide
SYRMN

SEQ ID NO: 4507 - DNA, 15 bp, synthetic construct
  misc_feature 1..15: note = Description of Artificial Sequence: Synthetic oligonucleotide
  source 1..15: mol_type = other DNA
agctatggcatgaac

SEQ ID NO: 4508 - protein, 5 aa, synthetic construct
  REGION 1..5: note = Description of Artificial Sequence: Synthetic peptide
SYGMN

SEQ ID NO: 4509 - DNA, 15 bp, synthetic construct
  misc_feature 1..15: note = Description of Artificial Sequence: Synthetic oligonucleotide
  source 1..15: mol_type = other DNA
agctatgccatgagc

SEQ ID NO: 4510 - protein, 5 aa, synthetic construct
  REGION 1..5: note = Description of Artificial Sequence: Synthetic peptide
SYAMS

SEQ ID NO: 4511 - DNA, 15 bp, synthetic construct
  misc_feature 1..15: note = Description of Artificial Sequence: Synthetic oligonucleotide
  source 1..15: mol_type = other DNA
agctatggcatgcac

SEQ ID NO: 4512 - protein, 5 aa, synthetic construct
  REGION 1..5: note = Description of Artificial Sequence: Synthetic peptide
SYGMH

SEQ ID NO: 4513 - DNA, 15 bp, synthetic construct
  misc_feature 1..15: note = Description of Artificial Sequence: Synthetic oligonucleotide
  source 1..15: mol_type = other DNA
agctatggcatgcac

SEQ ID NO: 4514 - protein, 5 aa, synthetic construct
  REGION 1..5: note = Description of Artificial Sequence: Synthetic peptide
SYGMH

SEQ ID NO: 4515 - DNA, 15 bp, synthetic construct
  misc_feature 1..15: note = Description of Artificial Sequence: Synthetic oligonucleotide
  source 1..15: mol_type = other DNA
aattatgatattaat

SEQ ID NO: 4516 - protein, 5 aa, synthetic construct
  REGION 1..5: note = Description of Artificial Sequence: Synthetic peptide
NYDIN

SEQ ID NO: 4517 - DNA, 15 bp, synthetic construct
  misc_feature 1..15: note = Description of Artificial Sequence: Synthetic oligonucleotide
  source 1..15: mol_type = other DNA
agctatgtcatgaac

SEQ ID NO: 4518 - protein, 5 aa, synthetic construct
  REGION 1..5: note = Description of Artificial Sequence: Synthetic peptide
SYVMN

SEQ ID NO: 4519 - DNA, 15 bp, synthetic construct
  misc_feature 1..15: note = Description of Artificial Sequence: Synthetic oligonucleotide
  source 1..15: mol_type = other DNA
agctatgccatgagc

SEQ ID NO: 4520 - protein, 5 aa, synthetic construct
  REGION 1..5: note = Description of Artificial Sequence: Synthetic peptide
SYAMS

SEQ ID NO: 4521 - DNA, 15 bp, synthetic construct
  misc_feature 1..15: note = Description of Artificial Sequence: Synthetic oligonucleotide
  source 1..15: mol_type = other DNA
agctatagcatgaac

SEQ ID NO: 4522 - protein, 5 aa, synthetic construct
  REGION 1..5: note = Description of Artificial Sequence: Synthetic peptide
SYSMN

SEQ ID NO: 4523 - DNA, 15 bp, synthetic construct
  misc_feature 1..15: note = Description of Artificial Sequence: Synthetic oligonucleotide
  source 1..15: mol_type = other DNA
aactatggcatgcac

SEQ ID NO: 4524 - protein, 5 aa, synthetic construct
  REGION 1..5: note = Description of Artificial Sequence: Synthetic peptide
NYGMH

SEQ ID NO: 4525 - DNA, 15 bp, synthetic construct
  misc_feature 1..15: note = Description of Artificial Sequence: Synthetic oligonucleotide
  source 1..15: mol_type = other DNA
agctatggcatgcac

SEQ ID NO: 4526 - protein, 5 aa, synthetic construct
  REGION 1..5: note = Description of Artificial Sequence: Synthetic peptide
SYGMH

SEQ ID NO: 4527 - DNA, 15 bp, synthetic construct
  misc_feature 1..15: note = Description of Artificial Sequence: Synthetic oligonucleotide
  source 1..15: mol_type = other DNA
aactgtgtcatgcac

SEQ ID NO: 4528 - protein, 5 aa, synthetic construct
  REGION 1..5: note = Description of Artificial Sequence: Synthetic peptide
NCVMH

SEQ ID NO: 4529 - DNA, 15 bp, synthetic construct
  misc_feature 1..15: note = Description of Artificial Sequence: Synthetic oligonucleotide
  source 1..15: mol_type = other DNA
agctatagcctgaac

SEQ ID NO: 4530 - protein, 5 aa, synthetic construct
  REGION 1..5: note = Description of Artificial Sequence: Synthetic peptide
SYSLN

SEQ ID NO: 4531 - DNA, 15 bp, synthetic construct
  misc_feature 1..15: note = Description of Artificial Sequence: Synthetic oligonucleotide
  source 1..15: mol_type = other DNA
gactatggcatgcac

SEQ ID NO: 4532 - protein, 5 aa, synthetic construct
  REGION 1..5: note = Description of Artificial Sequence: Synthetic peptide
DYGMH

SEQ ID NO: 4533 - DNA, 15 bp, synthetic construct
  misc_feature 1..15: note = Description of Artificial Sequence: Synthetic oligonucleotide
  source 1..15: mol_type = other DNA
gactatggcatgcac

SEQ ID NO: 4534 - protein, 5 aa, synthetic construct
  REGION 1..5: note = Description of Artificial Sequence: Synthetic peptide
DYGMH

SEQ ID NO: 4535 - DNA, 15 bp, synthetic construct
  misc_feature 1..15: note = Description of Artificial Sequence: Synthetic oligonucleotide
  source 1..15: mol_type = other DNA
agctatgccatgagc

SEQ ID NO: 4536 - protein, 5 aa, synthetic construct
  REGION 1..5: note = Description of Artificial Sequence: Synthetic peptide
SYAMS

SEQ ID NO: 4537 - DNA, 15 bp, synthetic construct
  misc_feature 1..15: note = Description of Artificial Sequence: Synthetic oligonucleotide
  source 1..15: mol_type = other DNA
atctatgccatgagc

SEQ ID NO: 4538 - protein, 5 aa, synthetic construct
  REGION 1..5: note = Description of Artificial Sequence: Synthetic peptide
IYAMS

SEQ ID NO: 4539 - DNA, 15 bp, synthetic construct
  misc_feature 1..15: note = Description of Artificial Sequence: Synthetic oligonucleotide
  source 1..15: mol_type = other DNA
agctatgccatgagc

SEQ ID NO: 4540 - protein, 5 aa, synthetic construct
  REGION 1..5: note = Description of Artificial Sequence: Synthetic peptide
SYAMS

SEQ ID NO: 4541 - DNA, 15 bp, synthetic construct
  misc_feature 1..15: note = Description of Artificial Sequence: Synthetic oligonucleotide
  source 1..15: mol_type = other DNA
gactatggcatgcac

SEQ ID NO: 4542 - protein, 5 aa, synthetic construct
  REGION 1..5: note = Description of Artificial Sequence: Synthetic peptide
DYGMH

SEQ ID NO: 4543 - DNA, 15 bp, synthetic construct
  misc_feature 1..15: note = Description of Artificial Sequence: Synthetic oligonucleotide
  source 1..15: mol_type = other DNA
gactatggcatgcac

SEQ ID NO: 4544 - protein, 5 aa, synthetic construct
  REGION 1..5: note = Description of Artificial Sequence: Synthetic peptide
DYGMH

SEQ ID NO: 4545 - DNA, 15 bp, synthetic construct
  misc_feature 1..15: note = Description of Artificial Sequence: Synthetic oligonucleotide
  source 1..15: mol_type = other DNA
aattatgatatcaac

SEQ ID NO: 4546 - protein, 5 aa, synthetic construct
  REGION 1..5: note = Description of Artificial Sequence: Synthetic peptide
NYDIN

SEQ ID NO: 4547 - DNA, 15 bp, synthetic construct
  misc_feature 1..15: note = Description of Artificial Sequence: Synthetic oligonucleotide
  source 1..15: mol_type = other DNA
agctatggcatgcac

SEQ ID NO: 4548 - protein, 5 aa, synthetic construct
  REGION 1..5: note = Description of Artificial Sequence: Synthetic peptide
SYGMH

SEQ ID NO: 4549 - DNA, 15 bp, synthetic construct
  misc_feature 1..15: note = Description of Artificial Sequence: Synthetic oligonucleotide
  source 1..15: mol_type = other DNA
agctatgccatgagc

SEQ ID NO: 4550 - protein, 5 aa, synthetic construct
  REGION 1..5: note = Description of Artificial Sequence: Synthetic peptide
SYAMS

SEQ ID NO: 4551 - DNA, 15 bp, synthetic construct
  misc_feature 1..15: note = Description of Artificial Sequence: Synthetic oligonucleotide
  source 1..15: mol_type = other DNA
agctatggcatacac

SEQ ID NO: 4552 - protein, 5 aa, synthetic construct
  REGION 1..5: note = Description of Artificial Sequence: Synthetic peptide
SYGIH

SEQ ID NO: 4553 - DNA, 15 bp, synthetic construct
  misc_feature 1..15: note = Description of Artificial Sequence: Synthetic oligonucleotide
  source 1..15: mol_type = other DNA
agctatggcatgcac

SEQ ID NO: 4554 - protein, 5 aa, synthetic construct
  REGION 1..5: note = Description of Artificial Sequence: Synthetic peptide
SYGMH

SEQ ID NO: 4555 - DNA, 15 bp, synthetic construct
  misc_feature 1..15: note = Description of Artificial Sequence: Synthetic oligonucleotide
  source 1..15: mol_type = other DNA
tactatggcatgcac

SEQ ID NO: 4556 - protein, 5 aa, synthetic construct
  REGION 1..5: note = Description of Artificial Sequence: Synthetic peptide
YYGMH

SEQ ID NO: 4557 - DNA, 15 bp, synthetic construct
  misc_feature 1..15: note = Description of Artificial Sequence: Synthetic oligonucleotide
  source 1..15: mol_type = other DNA
agctatgccatgagc

SEQ ID NO: 4558 - protein, 5 aa, synthetic construct
  REGION 1..5: note = Description of Artificial Sequence: Synthetic peptide
SYAMS

SEQ ID NO: 4559 - DNA, 15 bp, synthetic construct
  misc_feature 1..15: note = Description of Artificial Sequence: Synthetic oligonucleotide
  source 1..15: mol_type = other DNA
agctatagcatgaac

SEQ ID NO: 4560 - protein, 5 aa, synthetic construct
  REGION 1..5: note = Description of Artificial Sequence: Synthetic peptide
SYSMN

SEQ ID NO: 4561 - DNA, 15 bp, synthetic construct
  misc_feature 1..15: note = Description of Artificial Sequence: Synthetic oligonucleotide
  source 1..15: mol_type = other DNA
agctatgccatgagc

SEQ ID NO: 4562 - protein, 5 aa, synthetic construct
  REGION 1..5: note = Description of Artificial Sequence: Synthetic peptide
SYAMS

SEQ ID NO: 4563 - DNA, 15 bp, synthetic construct
  misc_feature 1..15: note = Description of Artificial Sequence: Synthetic oligonucleotide
  source 1..15: mol_type = other DNA
agctatggcatgcac

SEQ ID NO: 4564 - protein, 5 aa, synthetic construct
  REGION 1..5: note = Description of Artificial Sequence: Synthetic peptide
SYGMH

SEQ ID NO: 4565 - DNA, 15 bp, synthetic construct
  misc_feature 1..15: note = Description of Artificial Sequence: Synthetic oligonucleotide
  source 1..15: mol_type = other DNA
agttatggcatgcac

SEQ ID NO: 4566 - protein, 5 aa, synthetic construct
  REGION 1..5: note = Description of Artificial Sequence: Synthetic peptide
SYGMH

SEQ ID NO: 4567 - DNA, 15 bp, synthetic construct
  misc_feature 1..15: note = Description of Artificial Sequence: Synthetic oligonucleotide
  source 1..15: mol_type = other DNA
agctatgccatgagc

SEQ ID NO: 4568 - protein, 5 aa, synthetic construct
  REGION 1..5: note = Description of Artificial Sequence: Synthetic peptide
SYAMS

SEQ ID NO: 4569 - DNA, 15 bp, synthetic construct
  misc_feature 1..15: note = Description of Artificial Sequence: Synthetic oligonucleotide
  source 1..15: mol_type = other DNA
gactatggcatgcac

SEQ ID NO: 4570 - protein, 5 aa, synthetic construct
  REGION 1..5: note = Description of Artificial Sequence: Synthetic peptide
DYGMH

SEQ ID NO: 4571 - DNA, 15 bp, synthetic construct
  misc_feature 1..15: note = Description of Artificial Sequence: Synthetic oligonucleotide
  source 1..15: mol_type = other DNA
agctatggcatgcac

SEQ ID NO: 4572 - protein, 5 aa, synthetic construct
  REGION 1..5: note = Description of Artificial Sequence: Synthetic peptide
SYGMH

SEQ ID NO: 4573 - DNA, 15 bp, synthetic construct
  misc_feature 1..15: note = Description of Artificial Sequence: Synthetic oligonucleotide
  source 1..15: mol_type = other DNA
agctatagcatgaac

SEQ ID NO: 4574 - protein, 5 aa, synthetic construct
  REGION 1..5: note = Description of Artificial Sequence: Synthetic peptide
SYSMN

SEQ ID NO: 4575 - DNA, 15 bp, synthetic construct
  misc_feature 1..15: note = Description of Artificial Sequence: Synthetic oligonucleotide
  source 1..15: mol_type = other DNA
agctgtgccatgaac

SEQ ID NO: 4576 - protein, 5 aa, synthetic construct
  REGION 1..5: note = Description of Artificial Sequence: Synthetic peptide
SCAMN

SEQ ID NO: 4577 - DNA, 15 bp, synthetic construct
  misc_feature 1..15: note = Description of Artificial Sequence: Synthetic oligonucleotide
  source 1..15: mol_type = other DNA
gactatggcatgcac

SEQ ID NO: 4578 - protein, 5 aa, synthetic construct
  REGION 1..5: note = Description of Artificial Sequence: Synthetic peptide
DYGMH

SEQ ID NO: 4579 - DNA, 15 bp, synthetic construct
  misc_feature 1..15: note = Description of Artificial Sequence: Synthetic oligonucleotide
  source 1..15: mol_type = other DNA
agctatgccatgagc

SEQ ID NO: 4580 - protein, 5 aa, synthetic construct
  REGION 1..5: note = Description of Artificial Sequence: Synthetic peptide
SYAMS

SEQ ID NO: 4581 - DNA, 15 bp, synthetic construct
  misc_feature 1..15: note = Description of Artificial Sequence: Synthetic oligonucleotide
  source 1..15: mol_type = other DNA
gactatggcatgcac

SEQ ID NO: 4582 - protein, 5 aa, synthetic construct
  REGION 1..5: note = Description of Artificial Sequence: Synthetic peptide
DYGMH

SEQ ID NO: 4583 - DNA, 15 bp, synthetic construct
  misc_feature 1..15: note = Description of Artificial Sequence: Synthetic oligonucleotide
  source 1..15: mol_type = other DNA
ggctatggcatgcac

SEQ ID NO: 4584 - protein, 5 aa, synthetic construct
  REGION 1..5: note = Description of Artificial Sequence: Synthetic peptide
GYGMH

SEQ ID NO: 4585 - DNA, 15 bp, synthetic construct
  misc_feature 1..15: note = Description of Artificial Sequence: Synthetic oligonucleotide
  source 1..15: mol_type = other DNA
gactatggcatgcac

SEQ ID NO: 4586 - protein, 5 aa, synthetic construct
  REGION 1..5: note = Description of Artificial Sequence: Synthetic peptide
DYGMH

SEQ ID NO: 4587 - DNA, 15 bp, synthetic construct
  misc_feature 1..15: note = Description of Artificial Sequence: Synthetic oligonucleotide
  source 1..15: mol_type = other DNA
acctatggcatgcac

SEQ ID NO: 4588 - protein, 5 aa, synthetic construct
  REGION 1..5: note = Description of Artificial Sequence: Synthetic peptide
TYGMH

SEQ ID NO: 4589 - DNA, 15 bp, synthetic construct
  misc_feature 1..15: note = Description of Artificial Sequence: Synthetic oligonucleotide
  source 1..15: mol_type = other DNA
gactatggcatacac

SEQ ID NO: 4590 - protein, 5 aa, synthetic construct
  REGION 1..5: note = Description of Artificial Sequence: Synthetic peptide
DYGIH

SEQ ID NO: 4591 - DNA, 15 bp, synthetic construct
  misc_feature 1..15: note = Description of Artificial Sequence: Synthetic oligonucleotide
  source 1..15: mol_type = other DNA
agctatgccatgaac

SEQ ID NO: 4592 - protein, 5 aa, synthetic construct
  REGION 1..5: note = Description of Artificial Sequence: Synthetic peptide
SYAMN

SEQ ID NO: 4593 - DNA, 15 bp, synthetic construct
  misc_feature 1..15: note = Description of Artificial Sequence: Synthetic oligonucleotide
  source 1..15: mol_type = other DNA
gactactatatgcac

SEQ ID NO: 4594 - protein, 5 aa, synthetic construct
  REGION 1..5: note = Description of Artificial Sequence: Synthetic peptide
DYYMH

SEQ ID NO: 4595 - DNA, 15 bp, synthetic construct
  misc_feature 1..15: note = Description of Artificial Sequence: Synthetic oligonucleotide
  source 1..15: mol_type = other DNA
agctatggtatcagc

SEQ ID NO: 4596 - protein, 5 aa, synthetic construct
  REGION 1..5: note = Description of Artificial Sequence: Synthetic peptide
SYGIS

SEQ ID NO: 4597 - DNA, 15 bp, synthetic construct
  misc_feature 1..15: note = Description of Artificial Sequence: Synthetic oligonucleotide
  source 1..15: mol_type = other DNA
aactgtgtcatgcac

SEQ ID NO: 4598 - protein, 5 aa, synthetic construct
  REGION 1..5: note = Description of Artificial Sequence: Synthetic peptide
NCVMH

SEQ ID NO: 4599 - DNA, 15 bp, synthetic construct
  misc_feature 1..15: note = Description of Artificial Sequence: Synthetic oligonucleotide
  source 1..15: mol_type = other DNA
gactatggcatgcac

SEQ ID NO: 4600 - protein, 5 aa, synthetic construct
  REGION 1..5: note = Description of Artificial Sequence: Synthetic peptide
DYGMH

SEQ ID NO: 4601 - DNA, 15 bp, synthetic construct
  misc_feature 1..15: note = Description of Artificial Sequence: Synthetic oligonucleotide
  source 1..15: mol_type = other DNA
agctatggtatcagc

SEQ ID NO: 4602 - protein, 5 aa, synthetic construct
  REGION 1..5: note = Description of Artificial Sequence: Synthetic peptide
SYGIS

SEQ ID NO: 4603 - DNA, 15 bp, synthetic construct
  misc_feature 1..15: note = Description of Artificial Sequence: Synthetic oligonucleotide
  source 1..15: mol_type = other DNA
gactatggcatgcac

SEQ ID NO: 4604 - protein, 5 aa, synthetic construct
  REGION 1..5: note = Description of Artificial Sequence: Synthetic peptide
DYGMH

SEQ ID NO: 4605 - DNA, 15 bp, synthetic construct
  misc_feature 1..15: note = Description of Artificial Sequence: Synthetic oligonucleotide
  source 1..15: mol_type = other DNA
agctatggcatgcac

SEQ ID NO: 4606 - protein, 5 aa, synthetic construct
  REGION 1..5: note = Description of Artificial Sequence: Synthetic peptide
SYGMH

SEQ ID NO: 4607 - DNA, 15 bp, synthetic construct
  misc_feature 1..15: note = Description of Artificial Sequence: Synthetic oligonucleotide
  source 1..15: mol_type = other DNA
agctatgccatgaac

SEQ ID NO: 4608 - protein, 5 aa, synthetic construct
  REGION 1..5: note = Description of Artificial Sequence: Synthetic peptide
SYAMN

SEQ ID NO: 4609 - DNA, 15 bp, synthetic construct
  misc_feature 1..15: note = Description of Artificial Sequence: Synthetic oligonucleotide
  source 1..15: mol_type = other DNA
agctatgccatgagc

SEQ ID NO: 4610 - protein, 5 aa, synthetic construct
  REGION 1..5: note = Description of Artificial Sequence: Synthetic peptide
SYAMS

SEQ ID NO: 4611 - DNA, 15 bp, synthetic construct
  misc_feature 1..15: note = Description of Artificial Sequence: Synthetic oligonucleotide
  source 1..15: mol_type = other DNA
agctatggcatgcac

SEQ ID NO: 4612 - protein, 5 aa, synthetic construct
  REGION 1..5: note = Description of Artificial Sequence: Synthetic peptide
SYGMH

SEQ ID NO: 4613 - DNA, 15 bp, synthetic construct
  misc_feature 1..15: note = Description of Artificial Sequence: Synthetic oligonucleotide
  source 1..15: mol_type = other DNA
agttatgatatcaac

SEQ ID NO: 4614 - protein, 5 aa, synthetic construct
  REGION 1..5: note = Description of Artificial Sequence: Synthetic peptide
SYDIN

SEQ ID NO: 4615 - DNA, 15 bp, synthetic construct
  misc_feature 1..15: note = Description of Artificial Sequence: Synthetic oligonucleotide
  source 1..15: mol_type = other DNA
tactatggcatgcac

SEQ ID NO: 4616 - protein, 5 aa, synthetic construct
  REGION 1..5: note = Description of Artificial Sequence: Synthetic peptide
YYGMH

SEQ ID NO: 4617 - DNA, 15 bp, synthetic construct
  misc_feature 1..15: note = Description of Artificial Sequence: Synthetic oligonucleotide
  source 1..15: mol_type = other DNA
agctatgccatgagc

SEQ ID NO: 4618 - protein, 5 aa, synthetic construct
  REGION 1..5: note = Description of Artificial Sequence: Synthetic peptide
SYAMS

SEQ ID NO: 4619 - DNA, 15 bp, synthetic construct
  misc_feature 1..15: note = Description of Artificial Sequence: Synthetic oligonucleotide
  source 1..15: mol_type = other DNA
agctatgccatgaac

SEQ ID NO: 4620 - protein, 5 aa, synthetic construct
  REGION 1..5: note = Description of Artificial Sequence: Synthetic peptide
SYAMN

SEQ ID NO: 4621 - DNA, 15 bp, synthetic construct
  misc_feature 1..15: note = Description of Artificial Sequence: Synthetic oligonucleotide
  source 1..15: mol_type = other DNA
gactatggcatgcac

SEQ ID NO: 4622 - protein, 5 aa, synthetic construct
  REGION 1..5: note = Description of Artificial Sequence: Synthetic peptide
DYGMH

SEQ ID NO: 4623 - DNA, 15 bp, synthetic construct
  misc_feature 1..15: note = Description of Artificial Sequence: Synthetic oligonucleotide
  source 1..15: mol_type = other DNA
agctatgccatgaac

SEQ ID NO: 4624 - protein, 5 aa, synthetic construct
  REGION 1..5: note = Description of Artificial Sequence: Synthetic peptide
SYAMN

SEQ ID NO: 4625 - DNA, 15 bp, synthetic construct
  misc_feature 1..15: note = Description of Artificial Sequence: Synthetic oligonucleotide
  source 1..15: mol_type = other DNA
agctatagcatgaac

SEQ ID NO: 4626 - protein, 5 aa, synthetic construct
  REGION 1..5: note = Description of Artificial Sequence: Synthetic peptide
SYSMN

SEQ ID NO: 4627 - DNA, 15 bp, synthetic construct
  misc_feature 1..15: note = Description of Artificial Sequence: Synthetic oligonucleotide
  source 1..15: mol_type = other DNA
ggctaccatatgcac

SEQ ID NO: 4628 - protein, 5 aa, synthetic construct
  REGION 1..5: note = Description of Artificial Sequence: Synthetic peptide
GYHMH

SEQ ID NO: 4629 - DNA, 15 bp, synthetic construct
  misc_feature 1..15: note = Description of Artificial Sequence: Synthetic oligonucleotide
  source 1..15: mol_type = other DNA
agttataccatgagc

SEQ ID NO: 4630 - protein, 5 aa, synthetic construct
  REGION 1..5: note = Description of Artificial Sequence: Synthetic peptide
SYTMS

SEQ ID NO: 4631 - DNA, 15 bp, synthetic construct
  misc_feature 1..15: note = Description of Artificial Sequence: Synthetic oligonucleotide
  source 1..15: mol_type = other DNA
ggcgattatatgcac

SEQ ID NO: 4632 - protein, 5 aa, synthetic construct
  REGION 1..5: note = Description of Artificial Sequence: Synthetic peptide
GDYMH

SEQ ID NO: 4633 - DNA, 15 bp, synthetic construct
  misc_feature 1..15: note = Description of Artificial Sequence: Synthetic oligonucleotide
  source 1..15: mol_type = other DNA
gactatcatatgcac

SEQ ID NO: 4634 - protein, 5 aa, synthetic construct
  REGION 1..5: note = Description of Artificial Sequence: Synthetic peptide
DYHMH

SEQ ID NO: 4635 - DNA, 15 bp, synthetic construct
  misc_feature 1..15: note = Description of Artificial Sequence: Synthetic oligonucleotide
  source 1..15: mol_type = other DNA
aattatgacattaac

SEQ ID NO: 4636 - protein, 5 aa, synthetic construct
  REGION 1..5: note = Description of Artificial Sequence: Synthetic peptide
NYDIN

SEQ ID NO: 4637 - DNA, 15 bp, synthetic construct
  misc_feature 1..15: note = Description of Artificial Sequence: Synthetic oligonucleotide
  source 1..15: mol_type = other DNA
agctatgtcataaac

SEQ ID NO: 4638 - protein, 5 aa, synthetic construct
  REGION 1..5: note = Description of Artificial Sequence: Synthetic peptide
SYVIN

SEQ ID NO: 4639 - DNA, 15 bp, synthetic construct
  misc_feature 1..15: note = Description of Artificial Sequence: Synthetic oligonucleotide
  source 1..15: mol_type = other DNA
cactatggcatgcac

SEQ ID NO: 4640 - protein, 5 aa, synthetic construct
  REGION 1..5: note = Description of Artificial Sequence: Synthetic peptide
HYGMH

SEQ ID NO: 4641 - DNA, 21 bp, synthetic construct
  misc_feature 1..21: note = Description of Artificial Sequence: Synthetic oligonucleotide
  source 1..21: mol_type = other DNA
agaagtagttactactggggc

SEQ ID NO: 4642 - protein, 7 aa, synthetic construct
  REGION 1..7: note = Description of Artificial Sequence: Synthetic peptide
RSSYYWG

SEQ ID NO: 4643 - DNA, 15 bp, synthetic construct
  misc_feature 1..15: note = Description of Artificial Sequence: Synthetic oligonucleotide
  source 1..15: mol_type = other DNA
agctatgccatgaac

SEQ ID NO: 4644 - protein, 5 aa, synthetic construct
  REGION 1..5: note = Description of Artificial Sequence: Synthetic peptide
SYAMN

SEQ ID NO: 4645 - DNA, 15 bp, synthetic construct
  misc_feature 1..15: note = Description of Artificial Sequence: Synthetic oligonucleotide
  source 1..15: mol_type = other DNA
gactaccatatacac

SEQ ID NO: 4646 - protein, 5 aa, synthetic construct
  REGION 1..5: note = Description of Artificial Sequence: Synthetic peptide
DYHIH

SEQ ID NO: 4647 - DNA, 15 bp, synthetic construct
  misc_feature 1..15: note = Description of Artificial Sequence: Synthetic oligonucleotide
  source 1..15: mol_type = other DNA
aactatggcatgcac

SEQ ID NO: 4648 - protein, 5 aa, synthetic construct
  REGION 1..5: note = Description of Artificial Sequence: Synthetic peptide
NYGMH

SEQ ID NO: 4649 - DNA, 15 bp, synthetic construct
  misc_feature 1..15: note = Description of Artificial Sequence: Synthetic oligonucleotide
  source 1..15: mol_type = other DNA
agctatgccatgagc

SEQ ID NO: 4650 - protein, 5 aa, synthetic construct
  REGION 1..5: note = Description of Artificial Sequence: Synthetic peptide
SYAMS

SEQ ID NO: 4651 - DNA, 15 bp, synthetic construct
  misc_feature 1..15: note = Description of Artificial Sequence: Synthetic oligonucleotide
  source 1..15: mol_type = other DNA
agctgtgccatgagc

SEQ ID NO: 4652 - protein, 5 aa, synthetic construct
  REGION 1..5: note = Description of Artificial Sequence: Synthetic peptide
SCAMS

SEQ ID NO: 4653 - DNA, 15 bp, synthetic construct
  misc_feature 1..15: note = Description of Artificial Sequence: Synthetic oligonucleotide
  source 1..15: mol_type = other DNA
aactatgccatgaac

SEQ ID NO: 4654 - protein, 5 aa, synthetic construct
  REGION 1..5: note = Description of Artificial Sequence: Synthetic peptide
NYAMN

SEQ ID NO: 4655 - DNA, 15 bp, synthetic construct
  misc_feature 1..15: note = Description of Artificial Sequence: Synthetic oligonucleotide
  source 1..15: mol_type = other DNA
ggctactatatgcac

SEQ ID NO: 4656 - protein, 5 aa, synthetic construct
  REGION 1..5: note = Description of Artificial Sequence: Synthetic peptide
GYYMH

SEQ ID NO: 4657 - DNA, 15 bp, synthetic construct
  misc_feature 1..15: note = Description of Artificial Sequence: Synthetic oligonucleotide
  source 1..15: mol_type = other DNA
agctatgccatgagc

SEQ ID NO: 4658 - protein, 5 aa, synthetic construct
  REGION 1..5: note = Description of Artificial Sequence: Synthetic peptide
SYAMS

SEQ ID NO: 4659 - DNA, 15 bp, synthetic construct
  misc_feature 1..15: note = Description of Artificial Sequence: Synthetic oligonucleotide
  source 1..15: mol_type = other DNA
ggctactatatgcac

SEQ ID NO: 4660 - protein, 5 aa, synthetic construct
  REGION 1..5: note = Description of Artificial Sequence: Synthetic peptide
GYYMH

SEQ ID NO: 4661 - DNA, 15 bp, synthetic construct
  misc_feature 1..15: note = Description of Artificial Sequence: Synthetic oligonucleotide
  source 1..15: mol_type = other DNA
agctatgccatgagc

SEQ ID NO: 4662 - protein, 5 aa, synthetic construct
  REGION 1..5: note = Description of Artificial Sequence: Synthetic peptide
SYAMS

SEQ ID NO: 4663 - DNA, 15 bp, synthetic construct
  misc_feature 1..15: note = Description of Artificial Sequence: Synthetic oligonucleotide
  source 1..15: mol_type = other DNA
gactaccatattcac

SEQ ID NO: 4664 - protein, 5 aa, synthetic construct
  REGION 1..5: note = Description of Artificial Sequence: Synthetic peptide
DYHIH

SEQ ID NO: 4665 - DNA, 15 bp, synthetic construct
  misc_feature 1..15: note = Description of Artificial Sequence: Synthetic oligonucleotide
  source 1..15: mol_type = other DNA
agctatgccatgaac

SEQ ID NO: 4666 - protein, 5 aa, synthetic construct
  REGION 1..5: note = Description of Artificial Sequence: Synthetic peptide
SYAMN

SEQ ID NO: 4667 - DNA, 15 bp, synthetic construct
  misc_feature 1..15: note = Description of Artificial Sequence: Synthetic oligonucleotide
  source 1..15: mol_type = other DNA
agttatagcatgaac

SEQ ID NO: 4668 - protein, 5 aa, synthetic construct
  REGION 1..5: note = Description of Artificial Sequence: Synthetic peptide
SYSMN

SEQ ID NO: 4669 - DNA, 15 bp, synthetic construct
  misc_feature 1..15: note = Description of Artificial Sequence: Synthetic oligonucleotide
  source 1..15: mol_type = other DNA
aactatggcatgcac

SEQ ID NO: 4670 - protein, 5 aa, synthetic construct
  REGION 1..5: note = Description of Artificial Sequence: Synthetic peptide
NYGMH

SEQ ID NO: 4671 - DNA, 15 bp, synthetic construct
  misc_feature 1..15: note = Description of Artificial Sequence: Synthetic oligonucleotide
  source 1..15: mol_type = other DNA
aactatgccatgagc

SEQ ID NO: 4672 - protein, 5 aa, synthetic construct
  REGION 1..5: note = Description of Artificial Sequence: Synthetic peptide
NYAMS

SEQ ID NO: 4673 - DNA, 15 bp, synthetic construct
  misc_feature 1..15: note = Description of Artificial Sequence: Synthetic oligonucleotide
  source 1..15: mol_type = other DNA
agctatgccatgagc

SEQ ID NO: 4674 - protein, 5 aa, synthetic construct
  REGION 1..5: note = Description of Artificial Sequence: Synthetic peptide
SYAMS

SEQ ID NO: 4675 - DNA, 15 bp, synthetic construct
  misc_feature 1..15: note = Description of Artificial Sequence: Synthetic oligonucleotide
  source 1..15: mol_type = other DNA
agctatgccatgagc

SEQ ID NO: 4676 - protein, 5 aa, synthetic construct
  REGION 1..5: note = Description of Artificial Sequence: Synthetic peptide
SYAMS

SEQ ID NO: 4677 - DNA, 15 bp, synthetic construct
  misc_feature 1..15: note = Description of Artificial Sequence: Synthetic oligonucleotide
  source 1..15: mol_type = other DNA
agctataccatgaac

SEQ ID NO: 4678 - protein, 5 aa, synthetic construct
  REGION 1..5: note = Description of Artificial Sequence: Synthetic peptide
SYTMN

SEQ ID NO: 4679 - DNA, 15 bp, synthetic construct
  misc_feature 1..15: note = Description of Artificial Sequence: Synthetic oligonucleotide
  source 1..15: mol_type = other DNA
gactaccatatacac

SEQ ID NO: 4680 - protein, 5 aa, synthetic construct
  REGION 1..5: note = Description of Artificial Sequence: Synthetic peptide
DYHIH

SEQ ID NO: 4681 - DNA, 15 bp, synthetic construct
  misc_feature 1..15: note = Description of Artificial Sequence: Synthetic oligonucleotide
  source 1..15: mol_type = other DNA
aactatgtcatgcac

SEQ ID NO: 4682 - protein, 5 aa, synthetic construct
  REGION 1..5: note = Description of Artificial Sequence: Synthetic peptide
NYVMH

SEQ ID NO: 4683 - DNA, 15 bp, synthetic construct
  misc_feature 1..15: note = Description of Artificial Sequence: Synthetic oligonucleotide
  source 1..15: mol_type = other DNA
aactatggcatgcac

SEQ ID NO: 4684 - protein, 5 aa, synthetic construct
  REGION 1..5: note = Description of Artificial Sequence: Synthetic peptide
NYGMH

SEQ ID NO: 4685 - DNA, 15 bp, synthetic construct
  misc_feature 1..15: note = Description of Artificial Sequence: Synthetic oligonucleotide
  source 1..15: mol_type = other DNA
agctatggcatgcac

SEQ ID NO: 4686 - protein, 5 aa, synthetic construct
  REGION 1..5: note = Description of Artificial Sequence: Synthetic peptide
SYGMH

SEQ ID NO: 4687 - DNA, 15 bp, synthetic construct
  misc_feature 1..15: note = Description of Artificial Sequence: Synthetic oligonucleotide
  source 1..15: mol_type = other DNA
gactactatatacac

SEQ ID NO: 4688 - protein, 5 aa, synthetic construct
  REGION 1..5: note = Description of Artificial Sequence: Synthetic peptide
DYYIH

SEQ ID NO: 4689 - DNA, 15 bp, synthetic construct
  misc_feature 1..15: note = Description of Artificial Sequence: Synthetic oligonucleotide
  source 1..15: mol_type = other DNA
agctatggcatgaac

SEQ ID NO: 4690 - protein, 5 aa, synthetic construct
  REGION 1..5: note = Description of Artificial Sequence: Synthetic peptide
SYGMN

SEQ ID NO: 4691 - DNA, 15 bp, synthetic construct
  misc_feature 1..15: note = Description of Artificial Sequence: Synthetic oligonucleotide
  source 1..15: mol_type = other DNA
aattatgacattaac

SEQ ID NO: 4692 - protein, 5 aa, synthetic construct
  REGION 1..5: note = Description of Artificial Sequence: Synthetic peptide
NYDIN

SEQ ID NO: 4693 - DNA, 15 bp, synthetic construct
  misc_feature 1..15: note = Description of Artificial Sequence: Synthetic oligonucleotide
  source 1..15: mol_type = other DNA
agctatgccatgagc

SEQ ID NO: 4694 - protein, 5 aa, synthetic construct
  REGION 1..5: note = Description of Artificial Sequence: Synthetic peptide
SYAMS

SEQ ID NO: 4695 - DNA, 15 bp, synthetic construct
  misc_feature 1..15: note = Description of Artificial Sequence: Synthetic oligonucleotide
  source 1..15: mol_type = other DNA
agttatgatatcaac

SEQ ID NO: 4696 - protein, 5 aa, synthetic construct
  REGION 1..5: note = Description of Artificial Sequence: Synthetic peptide
SYDIN

SEQ ID NO: 4697 - DNA, 15 bp, synthetic construct
  misc_feature 1..15: note = Description of Artificial Sequence: Synthetic oligonucleotide
  source 1..15: mol_type = other DNA
aactatgccatgaac

SEQ ID NO: 4698 - protein, 5 aa, synthetic construct
  REGION 1..5: note = Description of Artificial Sequence: Synthetic peptide
NYAMN

SEQ ID NO: 4699 - DNA, 15 bp, synthetic construct
  misc_feature 1..15: note = Description of Artificial Sequence: Synthetic oligonucleotide
  source 1..15: mol_type = other DNA
agctatggcatgcac

SEQ ID NO: 4700 - protein, 5 aa, synthetic construct
  REGION 1..5: note = Description of Artificial Sequence: Synthetic peptide
SYGMH

SEQ ID NO: 4701 - DNA, 15 bp, synthetic construct
  misc_feature 1..15: note = Description of Artificial Sequence: Synthetic oligonucleotide
  source 1..15: mol_type = other DNA
ggctatggcatgcac

SEQ ID NO: 4702 - protein, 5 aa, synthetic construct
  REGION 1..5: note = Description of Artificial Sequence: Synthetic peptide
GYGMH

SEQ ID NO: 4703 - DNA, 15 bp, synthetic construct
  misc_feature 1..15: note = Description of Artificial Sequence: Synthetic oligonucleotide
  source 1..15: mol_type = other DNA
ggctactatatgcac

SEQ ID NO: 4704 - protein, 5 aa, synthetic construct
  REGION 1..5: note = Description of Artificial Sequence: Synthetic peptide
GYYMH

SEQ ID NO: 4705 - DNA, 15 bp, synthetic construct
  misc_feature 1..15: note = Description of Artificial Sequence: Synthetic oligonucleotide
  source 1..15: mol_type = other DNA
tactatggcatgcac

SEQ ID NO: 4706 - protein, 5 aa, synthetic construct
  REGION 1..5: note = Description of Artificial Sequence: Synthetic peptide
YYGMH

SEQ ID NO: 4707 - DNA, 15 bp, synthetic construct
  misc_feature 1..15: note = Description of Artificial Sequence: Synthetic oligonucleotide
  source 1..15: mol_type = other DNA
ggctatggcatgcac

SEQ ID NO: 4708 - protein, 5 aa, synthetic construct
  REGION 1..5: note = Description of Artificial Sequence: Synthetic peptide
GYGMH

SEQ ID NO: 4709 - DNA, 15 bp, synthetic construct
  misc_feature 1..15: note = Description of Artificial Sequence: Synthetic oligonucleotide
  source 1..15: mol_type = other DNA
agctatggcatgcac

SEQ ID NO: 4710 - protein, 5 aa, synthetic construct
  REGION 1..5: note = Description of Artificial Sequence: Synthetic peptide
SYGMH

SEQ ID NO: 4711 - DNA, 15 bp, synthetic construct
  misc_feature 1..15: note = Description of Artificial Sequence: Synthetic oligonucleotide
  source 1..15: mol_type = other DNA
ggctactatatgcac

SEQ ID NO: 4712 - protein, 5 aa, synthetic construct
  REGION 1..5: note = Description of Artificial Sequence: Synthetic peptide
GYYMH

SEQ ID NO: 4713 - DNA, 15 bp, synthetic construct
  misc_feature 1..15: note = Description of Artificial Sequence: Synthetic oligonucleotide
  source 1..15: mol_type = other DNA
agctatgccatgagc

SEQ ID NO: 4714 - protein, 5 aa, synthetic construct
  REGION 1..5: note = Description of Artificial Sequence: Synthetic peptide
SYAMS

SEQ ID NO: 4715 - DNA, 15 bp, synthetic construct
  misc_feature 1..15: note = Description of Artificial Sequence: Synthetic oligonucleotide
  source 1..15: mol_type = other DNA
ggctactatatgcac

SEQ ID NO: 4716 - protein, 5 aa, synthetic construct
  REGION 1..5: note = Description of Artificial Sequence: Synthetic peptide
GYYMH

SEQ ID NO: 4717 - DNA, 21 bp, synthetic construct
  misc_feature 1..21: note = Description of Artificial Sequence: Synthetic oligonucleotide
  source 1..21: mol_type = other DNA
actggtggagtgggtgtgggc

SEQ ID NO: 4718 - protein, 7 aa, synthetic construct
  REGION 1..7: note = Description of Artificial Sequence: Synthetic peptide
TGGVGVG

SEQ ID NO: 4719 - DNA, 15 bp, synthetic construct
  misc_feature 1..15: note = Description of Artificial Sequence: Synthetic oligonucleotide
  source 1..15: mol_type = other DNA
ggctactatatgcac

SEQ ID NO: 4720 - protein, 5 aa, synthetic construct
  REGION 1..5: note = Description of Artificial Sequence: Synthetic peptide
GYYMH

SEQ ID NO: 4721 - DNA, 21 bp, synthetic construct
  misc_feature 1..21: note = Description of Artificial Sequence: Synthetic oligonucleotide
  source 1..21: mol_type = other DNA
actagtggagtgggtgtgggc

SEQ ID NO: 4722 - protein, 7 aa, synthetic construct
  REGION 1..7: note = Description of Artificial Sequence: Synthetic peptide
TSGVGVG

SEQ ID NO: 4723 - DNA, 15 bp, synthetic construct
  misc_feature 1..15: note = Description of Artificial Sequence: Synthetic oligonucleotide
  source 1..15: mol_type = other DNA
agctatggcatgcac

SEQ ID NO: 4724 - protein, 5 aa, synthetic construct
  REGION 1..5: note = Description of Artificial Sequence: Synthetic peptide
SYGMH

SEQ ID NO: 4725 - DNA, 15 bp, synthetic construct
  misc_feature 1..15: note = Description of Artificial Sequence: Synthetic oligonucleotide
  source 1..15: mol_type = other DNA
aacgcctggatgaac

SEQ ID NO: 4726 - protein, 5 aa, synthetic construct
  REGION 1..5: note = Description of Artificial Sequence: Synthetic peptide
NAWMN

SEQ ID NO: 4727 - DNA, 15 bp, synthetic construct
  misc_feature 1..15: note = Description of Artificial Sequence: Synthetic oligonucleotide
  source 1..15: mol_type = other DNA
agctatgccatgagc

SEQ ID NO: 4728 - protein, 5 aa, synthetic construct
  REGION 1..5: note = Description of Artificial Sequence: Synthetic peptide
SYAMS

SEQ ID NO: 4729 - DNA, 15 bp, synthetic construct
  misc_feature 1..15: note = Description of Artificial Sequence: Synthetic oligonucleotide
  source 1..15: mol_type = other DNA
ggctatggcctgcac

SEQ ID NO: 4730 - protein, 5 aa, synthetic construct
  REGION 1..5: note = Description of Artificial Sequence: Synthetic peptide
GYGLH

SEQ ID NO: 4731 - DNA, 15 bp, synthetic construct
  misc_feature 1..15: note = Description of Artificial Sequence: Synthetic oligonucleotide
  source 1..15: mol_type = other DNA
ggctactatatgcac

SEQ ID NO: 4732 - protein, 5 aa, synthetic construct
  REGION 1..5: note = Description of Artificial Sequence: Synthetic peptide
GYYMH

SEQ ID NO: 4733 - DNA, 15 bp, synthetic construct
  misc_feature 1..15: note = Description of Artificial Sequence: Synthetic oligonucleotide
  source 1..15: mol_type = other DNA
agctatgccatgagc

SEQ ID NO: 4734 - protein, 5 aa, synthetic construct
  REGION 1..5: note = Description of Artificial Sequence: Synthetic peptide
SYAMS

SEQ ID NO: 4735 - DNA, 15 bp, synthetic construct
  misc_feature 1..15: note = Description of Artificial Sequence: Synthetic oligonucleotide
  source 1..15: mol_type = other DNA
agctatggcatgcac

SEQ ID NO: 4736 - protein, 5 aa, synthetic construct
  REGION 1..5: note = Description of Artificial Sequence: Synthetic peptide
SYGMH

SEQ ID NO: 4737 - DNA, 15 bp, synthetic construct
  misc_feature 1..15: note = Description of Artificial Sequence: Synthetic oligonucleotide
  source 1..15: mol_type = other DNA
ggctactatatgcac

SEQ ID NO: 4738 - protein, 5 aa, synthetic construct
  REGION 1..5: note = Description of Artificial Sequence: Synthetic peptide
GYYMH

SEQ ID NO: 4739 - DNA, 15 bp, synthetic construct
  misc_feature 1..15: note = Description of Artificial Sequence: Synthetic oligonucleotide
  source 1..15: mol_type = other DNA
gggcactatatgcac

SEQ ID NO: 4740 - protein, 5 aa, synthetic construct
  REGION 1..5: note = Description of Artificial Sequence: Synthetic peptide
GHYMH

SEQ ID NO: 4741 - DNA, 15 bp, synthetic construct
  misc_feature 1..15: note = Description of Artificial Sequence: Synthetic oligonucleotide
  source 1..15: mol_type = other DNA
ggctactatatgcac

SEQ ID NO: 4742 - protein, 5 aa, synthetic construct
  REGION 1..5: note = Description of Artificial Sequence: Synthetic peptide
GYYMH

SEQ ID NO: 4743 - DNA, 21 bp, synthetic construct
  misc_feature 1..21: note = Description of Artificial Sequence: Synthetic oligonucleotide
  source 1..21: mol_type = other DNA
actggtggagtgggtgtgggc

SEQ ID NO: 4744 - protein, 7 aa, synthetic construct
  REGION 1..7: note = Description of Artificial Sequence: Synthetic peptide
TGGVGVG

SEQ ID NO: 4745 - DNA, 15 bp, synthetic construct
  misc_feature 1..15: note = Description of Artificial Sequence: Synthetic oligonucleotide
  source 1..15: mol_type = other DNA
ggctactatatgcac

SEQ ID NO: 4746 - protein, 5 aa, synthetic construct
  REGION 1..5: note = Description of Artificial Sequence: Synthetic peptide
GYYMH

SEQ ID NO: 4747 - DNA, 15 bp, synthetic construct
  misc_feature 1..15: note = Description of Artificial Sequence: Synthetic oligonucleotide
  source 1..15: mol_type = other DNA
ggctactatatgtac

SEQ ID NO: 4748 - protein, 5 aa, synthetic construct
  REGION 1..5: note = Description of Artificial Sequence: Synthetic peptide
GYYMY

SEQ ID NO: 4749 - DNA, 21 bp, synthetic construct
  misc_feature 1..21: note = Description of Artificial Sequence: Synthetic oligonucleotide
  source 1..21: mol_type = other DNA
actagtggagtgggtgtgggc

SEQ ID NO: 4750 - protein, 7 aa, synthetic construct
  REGION 1..7: note = Description of Artificial Sequence: Synthetic peptide
TSGVGVG

SEQ ID NO: 4751 - DNA, 21 bp, synthetic construct
  misc_feature 1..21: note = Description of Artificial Sequence: Synthetic oligonucleotide
  source 1..21: mol_type = other DNA
actggtggagtgggtgtgggc

SEQ ID NO: 4752 - protein, 7 aa, synthetic construct
  REGION 1..7: note = Description of Artificial Sequence: Synthetic peptide
TGGVGVG

SEQ ID NO: 4753 - DNA, 15 bp, synthetic construct
  misc_feature 1..15: note = Description of Artificial Sequence: Synthetic oligonucleotide
  source 1..15: mol_type = other DNA
ggctactatatgcac

SEQ ID NO: 4754 - protein, 5 aa, synthetic construct
  REGION 1..5: note = Description of Artificial Sequence: Synthetic peptide
GYYMH

SEQ ID NO: 4755 - DNA, 15 bp, synthetic construct
  misc_feature 1..15: note = Description of Artificial Sequence: Synthetic oligonucleotide
  source 1..15: mol_type = other DNA
ggctactatatacac

SEQ ID NO: 4756 - protein, 5 aa, synthetic construct
  REGION 1..5: note = Description of Artificial Sequence: Synthetic peptide
GYYIH

SEQ ID NO: 4757 - DNA, 15 bp, synthetic construct
  misc_feature 1..15: note = Description of Artificial Sequence: Synthetic oligonucleotide
  source 1..15: mol_type = other DNA
agctatgccatgagc

SEQ ID NO: 4758 - protein, 5 aa, synthetic construct
  REGION 1..5: note = Description of Artificial Sequence: Synthetic peptide
SYAMS

SEQ ID NO: 4759 - DNA, 15 bp, synthetic construct
  misc_feature 1..15: note = Description of Artificial Sequence: Synthetic oligonucleotide
  source 1..15: mol_type = other DNA
ggctactatgtgcac

SEQ ID NO: 4760 - protein, 5 aa, synthetic construct
  REGION 1..5: note = Description of Artificial Sequence: Synthetic peptide
GYYVH

SEQ ID NO: 4761 - DNA, 15 bp, synthetic construct
  misc_feature 1..15: note = Description of Artificial Sequence: Synthetic oligonucleotide
  source 1..15: mol_type = other DNA
agctatgccatgagc

SEQ ID NO: 4762 - protein, 5 aa, synthetic construct
  REGION 1..5: note = Description of Artificial Sequence: Synthetic peptide
SYAMS

SEQ ID NO: 4763 - DNA, 15 bp, synthetic construct
  misc_feature 1..15: note = Description of Artificial Sequence: Synthetic oligonucleotide
  source 1..15: mol_type = other DNA
aattatgatatcaac

SEQ ID NO: 4764 - protein, 5 aa, synthetic construct
  REGION 1..5: note = Description of Artificial Sequence: Synthetic peptide
NYDIN

SEQ ID NO: 4765 - DNA, 15 bp, synthetic construct
  misc_feature 1..15: note = Description of Artificial Sequence: Synthetic oligonucleotide
  source 1..15: mol_type = other DNA
ggctactatatgcac

SEQ ID NO: 4766 - protein, 5 aa, synthetic construct
  REGION 1..5: note = Description of Artificial Sequence: Synthetic peptide
GYYMH

SEQ ID NO: 4767 - DNA, 15 bp, synthetic construct
  misc_feature 1..15: note = Description of Artificial Sequence: Synthetic oligonucleotide
  source 1..15: mol_type = other DNA
accgcctggatgaac

SEQ ID NO: 4768 - protein, 5 aa, synthetic construct
  REGION 1..5: note = Description of Artificial Sequence: Synthetic peptide
TAWMN

SEQ ID NO: 4769 - DNA, 21 bp, synthetic construct
  misc_feature 1..21: note = Description of Artificial Sequence: Synthetic oligonucleotide
  source 1..21: mol_type = other DNA
agaagtagttattactggggc

SEQ ID NO: 4770 - protein, 7 aa, synthetic construct
  REGION 1..7: note = Description of Artificial Sequence: Synthetic peptide
RSSYYWG

SEQ ID NO: 4771 - DNA, 21 bp, synthetic construct
  misc_feature 1..21: note = Description of Artificial Sequence: Synthetic oligonucleotide
  source 1..21: mol_type = other DNA
agaagtagttactactggggc

SEQ ID NO: 4772 - protein, 7 aa, synthetic construct
  REGION 1..7: note = Description of Artificial Sequence: Synthetic peptide
RSSYYWG

SEQ ID NO: 4773 - DNA, 15 bp, synthetic construct
  misc_feature 1..15: note = Description of Artificial Sequence: Synthetic oligonucleotide
  source 1..15: mol_type = other DNA
agctataccatgaac

SEQ ID NO: 4774 - protein, 5 aa, synthetic construct
  REGION 1..5: note = Description of Artificial Sequence: Synthetic peptide
SYTMN

SEQ ID NO: 4775 - DNA, 15 bp, synthetic construct
  misc_feature 1..15: note = Description of Artificial Sequence: Synthetic oligonucleotide
  source 1..15: mol_type = other DNA
agctctgccatgagc

SEQ ID NO: 4776 - protein, 5 aa, synthetic construct
  REGION 1..5: note = Description of Artificial Sequence: Synthetic peptide
SSAMS

SEQ ID NO: 4777 - DNA, 15 bp, synthetic construct
  misc_feature 1..15: note = Description of Artificial Sequence: Synthetic oligonucleotide
  source 1..15: mol_type = other DNA
gactatggcatgcac

SEQ ID NO: 4778 - protein, 5 aa, synthetic construct
  REGION 1..5: note = Description of Artificial Sequence: Synthetic peptide
DYGMH

SEQ ID NO: 4779 - DNA, 21 bp, synthetic construct
  misc_feature 1..21: note = Description of Artificial Sequence: Synthetic oligonucleotide
  source 1..21: mol_type = other DNA
aggagtagttactactggggc

SEQ ID NO: 4780 - protein, 7 aa, synthetic construct
  REGION 1..7: note = Description of Artificial Sequence: Synthetic peptide
RSSYYWG

SEQ ID NO: 4781 - DNA, 21 bp, synthetic construct
  misc_feature 1..21: note = Description of Artificial Sequence: Synthetic oligonucleotide
  source 1..21: mol_type = other DNA
agaagtagttcctactggggc

SEQ ID NO: 4782 - protein, 7 aa, synthetic construct
  REGION 1..7: note = Description of Artificial Sequence: Synthetic peptide
RSSSYWG

SEQ ID NO: 4783 - DNA, 15 bp, synthetic construct
  misc_feature 1..15: note = Description of Artificial Sequence: Synthetic oligonucleotide
  source 1..15: mol_type = other DNA
agctatggcatgcac

SEQ ID NO: 4784 - protein, 5 aa, synthetic construct
  REGION 1..5: note = Description of Artificial Sequence: Synthetic peptide
SYGMH

SEQ ID NO: 4785 - DNA, 15 bp, synthetic construct
  misc_feature 1..15: note = Description of Artificial Sequence: Synthetic oligonucleotide
  source 1..15: mol_type = other DNA
gactttggcatgcac

SEQ ID NO: 4786 - protein, 5 aa, synthetic construct
  REGION 1..5: note = Description of Artificial Sequence: Synthetic peptide
DFGMH

SEQ ID NO: 4787 - DNA, 15 bp, synthetic construct
  misc_feature 1..15: note = Description of Artificial Sequence: Synthetic oligonucleotide
  source 1..15: mol_type = other DNA
aactatggcatgcac

SEQ ID NO: 4788 - protein, 5 aa, synthetic construct
  REGION 1..5: note = Description of Artificial Sequence: Synthetic peptide
NYGMH

SEQ ID NO: 4789 - DNA, 15 bp, synthetic construct
  misc_feature 1..15: note = Description of Artificial Sequence: Synthetic oligonucleotide
  source 1..15: mol_type = other DNA
agctatgccatgagc

SEQ ID NO: 4790 - protein, 5 aa, synthetic construct
  REGION 1..5: note = Description of Artificial Sequence: Synthetic peptide
SYAMS

SEQ ID NO: 4791 - DNA, 15 bp, synthetic construct
  misc_feature 1..15: note = Description of Artificial Sequence: Synthetic oligonucleotide
  source 1..15: mol_type = other DNA
aactatggcatgcac

SEQ ID NO: 4792 - protein, 5 aa, synthetic construct
  REGION 1..5: note = Description of Artificial Sequence: Synthetic peptide
NYGMH

SEQ ID NO: 4793 - DNA, 15 bp, synthetic construct
  misc_feature 1..15: note = Description of Artificial Sequence: Synthetic oligonucleotide
  source 1..15: mol_type = other DNA
gactatggcatgcac

SEQ ID NO: 4794 - protein, 5 aa, synthetic construct
  REGION 1..5: note = Description of Artificial Sequence: Synthetic peptide
DYGMH

SEQ ID NO: 4795 - DNA, 15 bp, synthetic construct
  misc_feature 1..15: note = Description of Artificial Sequence: Synthetic oligonucleotide
  source 1..15: mol_type = other DNA
agctatggcatgcac

SEQ ID NO: 4796 - protein, 5 aa, synthetic construct
  REGION 1..5: note = Description of Artificial Sequence: Synthetic peptide
SYGMH

SEQ ID NO: 4797 - DNA, 21 bp, synthetic construct
  misc_feature 1..21: note = Description of Artificial Sequence: Synthetic oligonucleotide
  source 1..21: mol_type = other DNA
agaagtagttattactggggt

SEQ ID NO: 4798 - protein, 7 aa, synthetic construct
  REGION 1..7: note = Description of Artificial Sequence: Synthetic peptide
RSSYYWG

SEQ ID NO: 4799 - DNA, 15 bp, synthetic construct
  misc_feature 1..15: note = Description of Artificial Sequence: Synthetic oligonucleotide
  source 1..15: mol_type = other DNA
agctataccatgaac

SEQ ID NO: 4800 - protein, 5 aa, synthetic construct
  REGION 1..5: note = Description of Artificial Sequence: Synthetic peptide
SYTMN

SEQ ID NO: 4801 - DNA, 15 bp, synthetic construct
  misc_feature 1..15: note = Description of Artificial Sequence: Synthetic oligonucleotide
  source 1..15: mol_type = other DNA
gactatggcatacac

SEQ ID NO: 4802 - protein, 5 aa, synthetic construct
  REGION 1..5: note = Description of Artificial Sequence: Synthetic peptide
DYGIH

SEQ ID NO: 4803 - DNA, 15 bp, synthetic construct
  misc_feature 1..15: note = Description of Artificial Sequence: Synthetic oligonucleotide
  source 1..15: mol_type = other DNA
agctatggcatgcac

SEQ ID NO: 4804 - protein, 5 aa, synthetic construct
  REGION 1..5: note = Description of Artificial Sequence: Synthetic peptide
SYGMH

SEQ ID NO: 4805 - DNA, 15 bp, synthetic construct
  misc_feature 1..15: note = Description of Artificial Sequence: Synthetic oligonucleotide
  source 1..15: mol_type = other DNA
aactatggcatgcac

SEQ ID NO: 4806 - protein, 5 aa, synthetic construct
  REGION 1..5: note = Description of Artificial Sequence: Synthetic peptide
NYGMH

SEQ ID NO: 4807 - DNA, 15 bp, synthetic construct
  misc_feature 1..15: note = Description of Artificial Sequence: Synthetic oligonucleotide
  source 1..15: mol_type = other DNA
ggctatgccatgaac

SEQ ID NO: 4808 - protein, 5 aa, synthetic construct
  REGION 1..5: note = Description of Artificial Sequence: Synthetic peptide
GYAMN

SEQ ID NO: 4809 - DNA, 15 bp, synthetic construct
  misc_feature 1..15: note = Description of Artificial Sequence: Synthetic oligonucleotide
  source 1..15: mol_type = other DNA
agctatggcatgcac

SEQ ID NO: 4810 - protein, 5 aa, synthetic construct
  REGION 1..5: note = Description of Artificial Sequence: Synthetic peptide
SYGMH

SEQ ID NO: 4811 - DNA, 15 bp, synthetic construct
  misc_feature 1..15: note = Description of Artificial Sequence: Synthetic oligonucleotide
  source 1..15: mol_type = other DNA
gactatggcatgcac

SEQ ID NO: 4812 - protein, 5 aa, synthetic construct
  REGION 1..5: note = Description of Artificial Sequence: Synthetic peptide
DYGMH

SEQ ID NO: 4813 - DNA, 15 bp, synthetic construct
  misc_feature 1..15: note = Description of Artificial Sequence: Synthetic oligonucleotide
  source 1..15: mol_type = other DNA
gactatggcatgcac

SEQ ID NO: 4814 - protein, 5 aa, synthetic construct
  REGION 1..5: note = Description of Artificial Sequence: Synthetic peptide
DYGMH

SEQ ID NO: 4815 - DNA, 15 bp, synthetic construct
  misc_feature 1..15: note = Description of Artificial Sequence: Synthetic oligonucleotide
  source 1..15: mol_type = other DNA
agctatgccatgagc

SEQ ID NO: 4816 - protein, 5 aa, synthetic construct
  REGION 1..5: note = Description of Artificial Sequence: Synthetic peptide
SYAMS

SEQ ID NO: 4817 - DNA, 15 bp, synthetic construct
  misc_feature 1..15: note = Description of Artificial Sequence: Synthetic oligonucleotide
  source 1..15: mol_type = other DNA
agctatgtcctgcac

SEQ ID NO: 4818 - protein, 5 aa, synthetic construct
  REGION 1..5: note = Description of Artificial Sequence: Synthetic peptide
SYVLH

SEQ ID NO: 4819 - DNA, 15 bp, synthetic construct
  misc_feature 1..15: note = Description of Artificial Sequence: Synthetic oligonucleotide
  source 1..15: mol_type = other DNA
gactttggcatgcac

SEQ ID NO: 4820 - protein, 5 aa, synthetic construct
  REGION 1..5: note = Description of Artificial Sequence: Synthetic peptide
DFGMH

SEQ ID NO: 4821 - DNA, 15 bp, synthetic construct
  misc_feature 1..15: note = Description of Artificial Sequence: Synthetic oligonucleotide
  source 1..15: mol_type = other DNA
agctatggcatgcac

SEQ ID NO: 4822 - protein, 5 aa, synthetic construct
  REGION 1..5: note = Description of Artificial Sequence: Synthetic peptide
SYGMH

SEQ ID NO: 4823 - DNA, 15 bp, synthetic construct
  misc_feature 1..15: note = Description of Artificial Sequence: Synthetic oligonucleotide
  source 1..15: mol_type = other DNA
agctatgacatgagc

SEQ ID NO: 4824 - protein, 5 aa, synthetic construct
  REGION 1..5: note = Description of Artificial Sequence: Synthetic peptide
SYDMS

SEQ ID NO: 4825 - DNA, 21 bp, synthetic construct
  misc_feature 1..21: note = Description of Artificial Sequence: Synthetic oligonucleotide
  source 1..21: mol_type = other DNA
aggagtagttactactggggc

SEQ ID NO: 4826 - protein, 7 aa, synthetic construct
  REGION 1..7: note = Description of Artificial Sequence: Synthetic peptide
RSSYYWG

SEQ ID NO: 4827 - DNA, 15 bp, synthetic construct
  misc_feature 1..15: note = Description of Artificial Sequence: Synthetic oligonucleotide
  source 1..15: mol_type = other DNA
aactatggcatgcac

SEQ ID NO: 4828 - protein, 5 aa, synthetic construct
  REGION 1..5: note = Description of Artificial Sequence: Synthetic peptide
NYGMH

SEQ ID NO: 4829 - DNA, 15 bp, synthetic construct
  misc_feature 1..15: note = Description of Artificial Sequence: Synthetic oligonucleotide
  source 1..15: mol_type = other DNA
gactatggcatgcac

SEQ ID NO: 4830 - protein, 5 aa, synthetic construct
  REGION 1..5: note = Description of Artificial Sequence: Synthetic peptide
DYGMH

SEQ ID NO: 4831 - DNA, 15 bp, synthetic construct
  misc_feature 1..15: note = Description of Artificial Sequence: Synthetic oligonucleotide
  source 1..15: mol_type = other DNA
agctatgccatgaac

SEQ ID NO: 4832 - protein, 5 aa, synthetic construct
  REGION 1..5: note = Description of Artificial Sequence: Synthetic peptide
SYAMN

SEQ ID NO: 4833 - DNA, 21 bp, synthetic construct
  misc_feature 1..21: note = Description of Artificial Sequence: Synthetic oligonucleotide
  source 1..21: mol_type = other DNA
agaagtagttactactggggc

SEQ ID NO: 4834 - protein, 7 aa, synthetic construct
  REGION 1..7: note = Description of Artificial Sequence: Synthetic peptide
RSSYYWG

SEQ ID NO: 4835 - DNA, 15 bp, synthetic construct
  misc_feature 1..15: note = Description of Artificial Sequence: Synthetic oligonucleotide
  source 1..15: mol_type = other DNA
agctatggcatgcac

SEQ ID NO: 4836 - protein, 5 aa, synthetic construct
  REGION 1..5: note = Description of Artificial Sequence: Synthetic peptide
SYGMH

SEQ ID NO: 4837 - DNA, 15 bp, synthetic construct
  misc_feature 1..15: note = Description of Artificial Sequence: Synthetic oligonucleotide
  source 1..15: mol_type = other DNA
aactatggcatgcac

SEQ ID NO: 4838 - protein, 5 aa, synthetic construct
  REGION 1..5: note = Description of Artificial Sequence: Synthetic peptide
NYGMH

SEQ ID NO: 4839 - DNA, 18 bp, synthetic construct
  misc_feature 1..18: note = Description of Artificial Sequence: Synthetic oligonucleotide
  source 1..18: mol_type = other DNA
cctaattactactggggc

SEQ ID NO: 4840 - protein, 6 aa, synthetic construct
  REGION 1..6: note = Description of Artificial Sequence: Synthetic peptide
PNYYWG

SEQ ID NO: 4841 - DNA, 15 bp, synthetic construct
  misc_feature 1..15: note = Description of Artificial Sequence: Synthetic oligonucleotide
  source 1..15: mol_type = other DNA
agctatgtcatgagc

SEQ ID NO: 4842 - protein, 5 aa, synthetic construct
  REGION 1..5: note = Description of Artificial Sequence: Synthetic peptide
SYVMS

SEQ ID NO: 4843 - DNA, 15 bp, synthetic construct
  misc_feature 1..15: note = Description of Artificial Sequence: Synthetic oligonucleotide
  source 1..15: mol_type = other DNA
agttactcctggagc

SEQ ID NO: 4844 - protein, 5 aa, synthetic construct
  REGION 1..5: note = Description of Artificial Sequence: Synthetic peptide
SYSWS

SEQ ID NO: 4845 - DNA, 15 bp, synthetic construct
  misc_feature 1..15: note = Description of Artificial Sequence: Synthetic oligonucleotide
  source 1..15: mol_type = other DNA
agctatggcatgcac

SEQ ID NO: 4846 - protein, 5 aa, synthetic construct
  REGION 1..5: note = Description of Artificial Sequence: Synthetic peptide
SYGMH

SEQ ID NO: 4847 - DNA, 15 bp, synthetic construct
  misc_feature 1..15: note = Description of Artificial Sequence: Synthetic oligonucleotide
  source 1..15: mol_type = other DNA
agctatagcatgaac

SEQ ID NO: 4848 - protein, 5 aa, synthetic construct
  REGION 1..5: note = Description of Artificial Sequence: Synthetic peptide
SYSMN

SEQ ID NO: 4849 - DNA, 15 bp, synthetic construct
  misc_feature 1..15: note = Description of Artificial Sequence: Synthetic oligonucleotide
  source 1..15: mol_type = other DNA
agctatagcatgaac

SEQ ID NO: 4850 - protein, 5 aa, synthetic construct
  REGION 1..5: note = Description of Artificial Sequence: Synthetic peptide
SYSMN

SEQ ID NO: 4851 - DNA, 15 bp, synthetic construct
  misc_feature 1..15: note = Description of Artificial Sequence: Synthetic oligonucleotide
  source 1..15: mol_type = other DNA
agctatgccatgagc

SEQ ID NO: 4852 - protein, 5 aa, synthetic construct
  REGION 1..5: note = Description of Artificial Sequence: Synthetic peptide
SYAMS

SEQ ID NO: 4853 - DNA, 15 bp, synthetic construct
  misc_feature 1..15: note = Description of Artificial Sequence: Synthetic oligonucleotide
  source 1..15: mol_type = other DNA
aactatggcatgcac

SEQ ID NO: 4854 - protein, 5 aa, synthetic construct
  REGION 1..5: note = Description of Artificial Sequence: Synthetic peptide
NYGMH

SEQ ID NO: 4855 - DNA, 15 bp, synthetic construct
  misc_feature 1..15: note = Description of Artificial Sequence: Synthetic oligonucleotide
  source 1..15: mol_type = other DNA
gactatggcatgcac

SEQ ID NO: 4856 - protein, 5 aa, synthetic construct
  REGION 1..5: note = Description of Artificial Sequence: Synthetic peptide
DYGMH

SEQ ID NO: 4857 - DNA, 15 bp, synthetic construct
  misc_feature 1..15: note = Description of Artificial Sequence: Synthetic oligonucleotide
  source 1..15: mol_type = other DNA
acctataacatgcac

SEQ ID NO: 4858 - protein, 5 aa, synthetic construct
  REGION 1..5: note = Description of Artificial Sequence: Synthetic peptide
TYNMH

SEQ ID NO: 4859 - DNA, 15 bp, synthetic construct
  misc_feature 1..15: note = Description of Artificial Sequence: Synthetic oligonucleotide
  source 1..15: mol_type = other DNA
agttataccatgaac

SEQ ID NO: 4860 - protein, 5 aa, synthetic construct
  REGION 1..5: note = Description of Artificial Sequence: Synthetic peptide
SYTMN

SEQ ID NO: 4861 - DNA, 15 bp, synthetic construct
  misc_feature 1..15: note = Description of Artificial Sequence: Synthetic oligonucleotide
  source 1..15: mol_type = other DNA
aactatgtcatacac

SEQ ID NO: 4862 - protein, 5 aa, synthetic construct
  REGION 1..5: note = Description of Artificial Sequence: Synthetic peptide
NYVIH

SEQ ID NO: 4863 - DNA, 15 bp, synthetic construct
  misc_feature 1..15: note = Description of Artificial Sequence: Synthetic oligonucleotide
  source 1..15: mol_type = other DNA
agctatggcatgcac

SEQ ID NO: 4864 - protein, 5 aa, synthetic construct
  REGION 1..5: note = Description of Artificial Sequence: Synthetic peptide
SYGMH

SEQ ID NO: 4865 - DNA, 15 bp, synthetic construct
  misc_feature 1..15: note = Description of Artificial Sequence: Synthetic oligonucleotide
  source 1..15: mol_type = other DNA
aactatggcatgcac

SEQ ID NO: 4866 - protein, 5 aa, synthetic construct
  REGION 1..5: note = Description of Artificial Sequence: Synthetic peptide
NYGMH

SEQ ID NO: 4867 - DNA, 15 bp, synthetic construct
  misc_feature 1..15: note = Description of Artificial Sequence: Synthetic oligonucleotide
  source 1..15: mol_type = other DNA
agctatagcatgaac

SEQ ID NO: 4868 - protein, 5 aa, synthetic construct
  REGION 1..5: note = Description of Artificial Sequence: Synthetic peptide
SYSMN

SEQ ID NO: 4869 - DNA, 15 bp, synthetic construct
  misc_feature 1..15: note = Description of Artificial Sequence: Synthetic oligonucleotide
  source 1..15: mol_type = other DNA
agctatgtcatgcac

SEQ ID NO: 4870 - protein, 5 aa, synthetic construct
  REGION 1..5: note = Description of Artificial Sequence: Synthetic peptide
SYVMH

SEQ ID NO: 4871 - DNA, 15 bp, synthetic construct
  misc_feature 1..15: note = Description of Artificial Sequence: Synthetic oligonucleotide
  source 1..15: mol_type = other DNA
agctatggcatgcac

SEQ ID NO: 4872 - protein, 5 aa, synthetic construct
  REGION 1..5: note = Description of Artificial Sequence: Synthetic peptide
SYGMH

SEQ ID NO: 4873 - DNA, 15 bp, synthetic construct
  misc_feature 1..15: note = Description of Artificial Sequence: Synthetic oligonucleotide
  source 1..15: mol_type = other DNA
agctatggcatgcac

SEQ ID NO: 4874 - protein, 5 aa, synthetic construct
  REGION 1..5: note = Description of Artificial Sequence: Synthetic peptide
SYGMH

SEQ ID NO: 4875 - DNA, 15 bp, synthetic construct
  misc_feature 1..15: note = Description of Artificial Sequence: Synthetic oligonucleotide
  source 1..15: mol_type = other DNA
agctatggcatgcac

SEQ ID NO: 4876 - protein, 5 aa, synthetic construct
  REGION 1..5: note = Description of Artificial Sequence: Synthetic peptide
SYGMH

SEQ ID NO: 4877 - DNA, 21 bp, synthetic construct
  misc_feature 1..21: note = Description of Artificial Sequence: Synthetic oligonucleotide
  source 1..21: mol_type = other DNA
cgtagtagttactactggggc

SEQ ID NO: 4878 - protein, 7 aa, synthetic construct
  REGION 1..7: note = Description of Artificial Sequence: Synthetic peptide
RSSYYWG

SEQ ID NO: 4879 - DNA, 15 bp, synthetic construct
  misc_feature 1..15: note = Description of Artificial Sequence: Synthetic oligonucleotide
  source 1..15: mol_type = other DNA
agctttggcatgcac

SEQ ID NO: 4880 - protein, 5 aa, synthetic construct
  REGION 1..5: note = Description of Artificial Sequence: Synthetic peptide
SFGMH

SEQ ID NO: 4881 - DNA, 15 bp, synthetic construct
  misc_feature 1..15: note = Description of Artificial Sequence: Synthetic oligonucleotide
  source 1..15: mol_type = other DNA
agctatggcatgcac

SEQ ID NO: 4882 - protein, 5 aa, synthetic construct
  REGION 1..5: note = Description of Artificial Sequence: Synthetic peptide
SYGMH

SEQ ID NO: 4883 - DNA, 15 bp, synthetic construct
  misc_feature 1..15: note = Description of Artificial Sequence: Synthetic oligonucleotide
  source 1..15: mol_type = other DNA
aactatggcatgcac

SEQ ID NO: 4884 - protein, 5 aa, synthetic construct
  REGION 1..5: note = Description of Artificial Sequence: Synthetic peptide
NYGMH

SEQ ID NO: 4885 - DNA, 15 bp, synthetic construct
  misc_feature 1..15: note = Description of Artificial Sequence: Synthetic oligonucleotide
  source 1..15: mol_type = other DNA
agctatgccatgaac

SEQ ID NO: 4886 - protein, 5 aa, synthetic construct
  REGION 1..5: note = Description of Artificial Sequence: Synthetic peptide
SYAMN

SEQ ID NO: 4887 - DNA, 15 bp, synthetic construct
  misc_feature 1..15: note = Description of Artificial Sequence: Synthetic oligonucleotide
  source 1..15: mol_type = other DNA
agctatgccatgacc

SEQ ID NO: 4888 - protein, 5 aa, synthetic construct
  REGION 1..5: note = Description of Artificial Sequence: Synthetic peptide
SYAMT

SEQ ID NO: 4889 - DNA, 15 bp, synthetic construct
  misc_feature 1..15: note = Description of Artificial Sequence: Synthetic oligonucleotide
  source 1..15: mol_type = other DNA
aattatgatatcaac

SEQ ID NO: 4890 - protein, 5 aa, synthetic construct
  REGION 1..5: note = Description of Artificial Sequence: Synthetic peptide
NYDIN

SEQ ID NO: 4891 - DNA, 15 bp, synthetic construct
  misc_feature 1..15: note = Description of Artificial Sequence: Synthetic oligonucleotide
  source 1..15: mol_type = other DNA
agttataccatgaac

SEQ ID NO: 4892 - protein, 5 aa, synthetic construct
  REGION 1..5: note = Description of Artificial Sequence: Synthetic peptide
SYTMN

SEQ ID NO: 4893 - DNA, 15 bp, synthetic construct
  misc_feature 1..15: note = Description of Artificial Sequence: Synthetic oligonucleotide
  source 1..15: mol_type = other DNA
agctatagcatgaac

SEQ ID NO: 4894 - protein, 5 aa, synthetic construct
  REGION 1..5: note = Description of Artificial Sequence: Synthetic peptide
SYSMN

SEQ ID NO: 4895 - DNA, 15 bp, synthetic construct
  misc_feature 1..15: note = Description of Artificial Sequence: Synthetic oligonucleotide
  source 1..15: mol_type = other DNA
gactatggcatgcac

SEQ ID NO: 4896 - protein, 5 aa, synthetic construct
  REGION 1..5: note = Description of Artificial Sequence: Synthetic peptide
DYGMH

SEQ ID NO: 4897 - DNA, 15 bp, synthetic construct
  misc_feature 1..15: note = Description of Artificial Sequence: Synthetic oligonucleotide
  source 1..15: mol_type = other DNA
agctatgtcatgcac

SEQ ID NO: 4898 - protein, 5 aa, synthetic construct
  REGION 1..5: note = Description of Artificial Sequence: Synthetic peptide
SYVMH

SEQ ID NO: 4899 - DNA, 15 bp, synthetic construct
  misc_feature 1..15: note = Description of Artificial Sequence: Synthetic oligonucleotide
  source 1..15: mol_type = other DNA
agctataacatgaac

SEQ ID NO: 4900 - protein, 5 aa, synthetic construct
  REGION 1..5: note = Description of Artificial Sequence: Synthetic peptide
SYNMN

SEQ ID NO: 4901 - DNA, 15 bp, synthetic construct
  misc_feature 1..15: note = Description of Artificial Sequence: Synthetic oligonucleotide
  source 1..15: mol_type = other DNA
gactactatttgcac

SEQ ID NO: 4902 - protein, 5 aa, synthetic construct
  REGION 1..5: note = Description of Artificial Sequence: Synthetic peptide
DYYLH

SEQ ID NO: 4903 - DNA, 15 bp, synthetic construct
  misc_feature 1..15: note = Description of Artificial Sequence: Synthetic oligonucleotide
  source 1..15: mol_type = other DNA
agctatgccatgagc

SEQ ID NO: 4904 - protein, 5 aa, synthetic construct
  REGION 1..5: note = Description of Artificial Sequence: Synthetic peptide
SYAMS

SEQ ID NO: 4905 - DNA, 15 bp, synthetic construct
  misc_feature 1..15: note = Description of Artificial Sequence: Synthetic oligonucleotide
  source 1..15: mol_type = other DNA
agctataccatgaac

SEQ ID NO: 4906 - protein, 5 aa, synthetic construct
  REGION 1..5: note = Description of Artificial Sequence: Synthetic peptide
SYTMN

SEQ ID NO: 4907 - DNA, 15 bp, synthetic construct
  misc_feature 1..15: note = Description of Artificial Sequence: Synthetic oligonucleotide
  source 1..15: mol_type = other DNA
gactatggcatgcac

SEQ ID NO: 4908 - protein, 5 aa, synthetic construct
  REGION 1..5: note = Description of Artificial Sequence: Synthetic peptide
DYGMH

SEQ ID NO: 4909 - DNA, 21 bp, synthetic construct
  misc_feature 1..21: note = Description of Artificial Sequence: Synthetic oligonucleotide
  source 1..21: mol_type = other DNA
agaagtagttactactggggc

SEQ ID NO: 4910 - protein, 7 aa, synthetic construct
  REGION 1..7: note = Description of Artificial Sequence: Synthetic peptide
RSSYYWG

SEQ ID NO: 4911 - DNA, 15 bp, synthetic construct
  misc_feature 1..15: note = Description of Artificial Sequence: Synthetic oligonucleotide
  source 1..15: mol_type = other DNA
agctatggcatgcac

SEQ ID NO: 4912 - protein, 5 aa, synthetic construct
  REGION 1..5: note = Description of Artificial Sequence: Synthetic peptide
SYGMH

SEQ ID NO: 4913 - DNA, 15 bp, synthetic construct
  misc_feature 1..15: note = Description of Artificial Sequence: Synthetic oligonucleotide
  source 1..15: mol_type = other DNA
agctgtgtcatgcac

SEQ ID NO: 4914 - protein, 5 aa, synthetic construct
  REGION 1..5: note = Description of Artificial Sequence: Synthetic peptide
SCVMH

SEQ ID NO: 4915 - DNA, 15 bp, synthetic construct
  misc_feature 1..15: note = Description of Artificial Sequence: Synthetic oligonucleotide
  source 1..15: mol_type = other DNA
agctatgccatgaac

SEQ ID NO: 4916 - protein, 5 aa, synthetic construct
  REGION 1..5: note = Description of Artificial Sequence: Synthetic peptide
SYAMN

SEQ ID NO: 4917 - DNA, 15 bp, synthetic construct
  misc_feature 1..15: note = Description of Artificial Sequence: Synthetic oligonucleotide
  source 1..15: mol_type = other DNA
aactatgtcatgcac

SEQ ID NO: 4918 - protein, 5 aa, synthetic construct
  REGION 1..5: note = Description of Artificial Sequence: Synthetic peptide
NYVMH

SEQ ID NO: 4919 - DNA, 15 bp, synthetic construct
  misc_feature 1..15: note = Description of Artificial Sequence: Synthetic oligonucleotide
  source 1..15: mol_type = other DNA
aactatggcatgcac

SEQ ID NO: 4920 - protein, 5 aa, synthetic construct
  REGION 1..5: note = Description of Artificial Sequence: Synthetic peptide
NYGMH

SEQ ID NO: 4921 - DNA, 15 bp, synthetic construct
  misc_feature 1..15: note = Description of Artificial Sequence: Synthetic oligonucleotide
  source 1..15: mol_type = other DNA
gactatggcatgcac

SEQ ID NO: 4922 - protein, 5 aa, synthetic construct
  REGION 1..5: note = Description of Artificial Sequence: Synthetic peptide
DYGMH

SEQ ID NO: 4923 - DNA, 15 bp, synthetic construct
  misc_feature 1..15: note = Description of Artificial Sequence: Synthetic oligonucleotide
  source 1..15: mol_type = other DNA
agctatgtcatgcac

SEQ ID NO: 4924 - protein, 5 aa, synthetic construct
  REGION 1..5: note = Description of Artificial Sequence: Synthetic peptide
SYVMH

SEQ ID NO: 4925 - DNA, 15 bp, synthetic construct
  misc_feature 1..15: note = Description of Artificial Sequence: Synthetic oligonucleotide
  source 1..15: mol_type = other DNA
agctatgccatgaac

SEQ ID NO: 4926 - protein, 5 aa, synthetic construct
  REGION 1..5: note = Description of Artificial Sequence: Synthetic peptide
SYAMN

SEQ ID NO: 4927 - DNA, 15 bp, synthetic construct
  misc_feature 1..15: note = Description of Artificial Sequence: Synthetic oligonucleotide
  source 1..15: mol_type = other DNA
agctatagcatgaac

SEQ ID NO: 4928 - protein, 5 aa, synthetic construct
  REGION 1..5: note = Description of Artificial Sequence: Synthetic peptide
SYSMN

SEQ ID NO: 4929 - DNA, 15 bp, synthetic construct
  misc_feature 1..15: note = Description of Artificial Sequence: Synthetic oligonucleotide
  source 1..15: mol_type = other DNA
agctatggcatgcac

SEQ ID NO: 4930 - protein, 5 aa, synthetic construct
  REGION 1..5: note = Description of Artificial Sequence: Synthetic peptide
SYGMH

SEQ ID NO: 4931 - DNA, 15 bp, synthetic construct
  misc_feature 1..15: note = Description of Artificial Sequence: Synthetic oligonucleotide
  source 1..15: mol_type = other DNA
aactatgtcatgcac

SEQ ID NO: 4932 - protein, 5 aa, synthetic construct
  REGION 1..5: note = Description of Artificial Sequence: Synthetic peptide
NYVMH

SEQ ID NO: 4933 - DNA, 15 bp, synthetic construct
  misc_feature 1..15: note = Description of Artificial Sequence: Synthetic oligonucleotide
  source 1..15: mol_type = other DNA
agctatagcatgaac

SEQ ID NO: 4934 - protein, 5 aa, synthetic construct
  REGION 1..5: note = Description of Artificial Sequence: Synthetic peptide
SYSMN

SEQ ID NO: 4935 - DNA, 21 bp, synthetic construct
  misc_feature 1..21: note = Description of Artificial Sequence: Synthetic oligonucleotide
  source 1..21: mol_type = other DNA
aggagtacttactactggggc

SEQ ID NO: 4936 - protein, 7 aa, synthetic construct
  REGION 1..7: note = Description of Artificial Sequence: Synthetic peptide
RSTYYWG

SEQ ID NO: 4937 - DNA, 15 bp, synthetic construct
  misc_feature 1..15: note = Description of Artificial Sequence: Synthetic oligonucleotide
  source 1..15: mol_type = other DNA
agcaatagcatgaac

SEQ ID NO: 4938 - protein, 5 aa, synthetic construct
  REGION 1..5: note = Description of Artificial Sequence: Synthetic peptide
SNSMN

SEQ ID NO: 4939 - DNA, 15 bp, synthetic construct
  misc_feature 1..15: note = Description of Artificial Sequence: Synthetic oligonucleotide
  source 1..15: mol_type = other DNA
agctatggcatgcac

SEQ ID NO: 4940 - protein, 5 aa, synthetic construct
  REGION 1..5: note = Description of Artificial Sequence: Synthetic peptide
SYGMH

SEQ ID NO: 4941 - DNA, 15 bp, synthetic construct
  misc_feature 1..15: note = Description of Artificial Sequence: Synthetic oligonucleotide
  source 1..15: mol_type = other DNA
gactatgtcatgcac

SEQ ID NO: 4942 - protein, 5 aa, synthetic construct
  REGION 1..5: note = Description of Artificial Sequence: Synthetic peptide
DYVMH

SEQ ID NO: 4943 - DNA, 15 bp, synthetic construct
  misc_feature 1..15: note = Description of Artificial Sequence: Synthetic oligonucleotide
  source 1..15: mol_type = other DNA
gactatggcatgcac

SEQ ID NO: 4944 - protein, 5 aa, synthetic construct
  REGION 1..5: note = Description of Artificial Sequence: Synthetic peptide
DYGMH

SEQ ID NO: 4945 - DNA, 15 bp, synthetic construct
  misc_feature 1..15: note = Description of Artificial Sequence: Synthetic oligonucleotide
  source 1..15: mol_type = other DNA
agctatggcatgcac

SEQ ID NO: 4946 - protein, 5 aa, synthetic construct
  REGION 1..5: note = Description of Artificial Sequence: Synthetic peptide
SYGMH

SEQ ID NO: 4947 - DNA, 21 bp, synthetic construct
  misc_feature 1..21: note = Description of Artificial Sequence: Synthetic oligonucleotide
  source 1..21: mol_type = other DNA
aggagtagttcctactggggc

SEQ ID NO: 4948 - protein, 7 aa, synthetic construct
  REGION 1..7: note = Description of Artificial Sequence: Synthetic peptide
RSSSYWG

SEQ ID NO: 4949 - DNA, 15 bp, synthetic construct
  misc_feature 1..15: note = Description of Artificial Sequence: Synthetic oligonucleotide
  source 1..15: mol_type = other DNA
agctatggcatgcac

SEQ ID NO: 4950 - protein, 5 aa, synthetic construct
  REGION 1..5: note = Description of Artificial Sequence: Synthetic peptide
SYGMH

SEQ ID NO: 4951 - DNA, 15 bp, synthetic construct
  misc_feature 1..15: note = Description of Artificial Sequence: Synthetic oligonucleotide
  source 1..15: mol_type = other DNA
agctatggcatgcac

SEQ ID NO: 4952 - protein, 5 aa, synthetic construct
  REGION 1..5: note = Description of Artificial Sequence: Synthetic peptide
SYGMH

SEQ ID NO: 4953 - DNA, 15 bp, synthetic construct
  misc_feature 1..15: note = Description of Artificial Sequence: Synthetic oligonucleotide
  source 1..15: mol_type = other DNA
agctatgtcatgaac

SEQ ID NO: 4954 - protein, 5 aa, synthetic construct
  REGION 1..5: note = Description of Artificial Sequence: Synthetic peptide
SYVMN

SEQ ID NO: 4955 - DNA, 15 bp, synthetic construct
  misc_feature 1..15: note = Description of Artificial Sequence: Synthetic oligonucleotide
  source 1..15: mol_type = other DNA
aactatggcatctac

SEQ ID NO: 4956 - protein, 5 aa, synthetic construct
  REGION 1..5: note = Description of Artificial Sequence: Synthetic peptide
NYGIY

SEQ ID NO: 4957 - DNA, 15 bp, synthetic construct
  misc_feature 1..15: note = Description of Artificial Sequence: Synthetic oligonucleotide
  source 1..15: mol_type = other DNA
agctatggcattcac

SEQ ID NO: 4958 - protein, 5 aa, synthetic construct
  REGION 1..5: note = Description of Artificial Sequence: Synthetic peptide
SYGIH

SEQ ID NO: 4959 - DNA, 15 bp, synthetic construct
  misc_feature 1..15: note = Description of Artificial Sequence: Synthetic oligonucleotide
  source 1..15: mol_type = other DNA
agctatgtcatgaac

SEQ ID NO: 4960 - protein, 5 aa, synthetic construct
  REGION 1..5: note = Description of Artificial Sequence: Synthetic peptide
SYVMN

SEQ ID NO: 4961 - DNA, 15 bp, synthetic construct
  misc_feature 1..15: note = Description of Artificial Sequence: Synthetic oligonucleotide
  source 1..15: mol_type = other DNA
agctatggcatgcac

SEQ ID NO: 4962 - protein, 5 aa, synthetic construct
  REGION 1..5: note = Description of Artificial Sequence: Synthetic peptide
SYGMH

SEQ ID NO: 4963 - DNA, 15 bp, synthetic construct
  misc_feature 1..15: note = Description of Artificial Sequence: Synthetic oligonucleotide
  source 1..15: mol_type = other DNA
agctatgtcatgagc

SEQ ID NO: 4964 - protein, 5 aa, synthetic construct
  REGION 1..5: note = Description of Artificial Sequence: Synthetic peptide
SYVMS

SEQ ID NO: 4965 - DNA, 15 bp, synthetic construct
  misc_feature 1..15: note = Description of Artificial Sequence: Synthetic oligonucleotide
  source 1..15: mol_type = other DNA
aactatggcatgcac

SEQ ID NO: 4966 - protein, 5 aa, synthetic construct
  REGION 1..5: note = Description of Artificial Sequence: Synthetic peptide
NYGMH

SEQ ID NO: 4967 - DNA, 15 bp, synthetic construct
  misc_feature 1..15: note = Description of Artificial Sequence: Synthetic oligonucleotide
  source 1..15: mol_type = other DNA
agctatgccatgaac

SEQ ID NO: 4968 - protein, 5 aa, synthetic construct
  REGION 1..5: note = Description of Artificial Sequence: Synthetic peptide
SYAMN

SEQ ID NO: 4969 - DNA, 15 bp, synthetic construct
  misc_feature 1..15: note = Description of Artificial Sequence: Synthetic oligonucleotide
  source 1..15: mol_type = other DNA
agctatggcatgcac

SEQ ID NO: 4970 - protein, 5 aa, synthetic construct
  REGION 1..5: note = Description of Artificial Sequence: Synthetic peptide
SYGMH

SEQ ID NO: 4971 - DNA, 15 bp, synthetic construct
  misc_feature 1..15: note = Description of Artificial Sequence: Synthetic oligonucleotide
  source 1..15: mol_type = other DNA
agctatgtcatgacc

SEQ ID NO: 4972 - protein, 5 aa, synthetic construct
  REGION 1..5: note = Description of Artificial Sequence: Synthetic peptide
SYVMT

SEQ ID NO: 4973 - DNA, 15 bp, synthetic construct
  misc_feature 1..15: note = Description of Artificial Sequence: Synthetic oligonucleotide
  source 1..15: mol_type = other DNA
agctatggcatgcac

SEQ ID NO: 4974 - protein, 5 aa, synthetic construct
  REGION 1..5: note = Description of Artificial Sequence: Synthetic peptide
SYGMH

SEQ ID NO: 4975 - DNA, 15 bp, synthetic construct
  misc_feature 1..15: note = Description of Artificial Sequence: Synthetic oligonucleotide
  source 1..15: mol_type = other DNA
agctatagcatgaac

SEQ ID NO: 4976 - protein, 5 aa, synthetic construct
  REGION 1..5: note = Description of Artificial Sequence: Synthetic peptide
SYSMN

SEQ ID NO: 4977 - DNA, 15 bp, synthetic construct
  misc_feature 1..15: note = Description of Artificial Sequence: Synthetic oligonucleotide
  source 1..15: mol_type = other DNA
aattatggcatgcac

SEQ ID NO: 4978 - protein, 5 aa, synthetic construct
  REGION 1..5: note = Description of Artificial Sequence: Synthetic peptide
NYGMH

SEQ ID NO: 4979 - DNA, 21 bp, synthetic construct
  misc_feature 1..21: note = Description of Artificial Sequence: Synthetic oligonucleotide
  source 1..21: mol_type = other DNA
aggagtagttactactggggc

SEQ ID NO: 4980 - protein, 7 aa, synthetic construct
  REGION 1..7: note = Description of Artificial Sequence: Synthetic peptide
RSSYYWG

SEQ ID NO: 4981 - DNA, 15 bp, synthetic construct
  misc_feature 1..15: note = Description of Artificial Sequence: Synthetic oligonucleotide
  source 1..15: mol_type = other DNA
aactatgtcatgcac

SEQ ID NO: 4982 - protein, 5 aa, synthetic construct
  REGION 1..5: note = Description of Artificial Sequence: Synthetic peptide
NYVMH

SEQ ID NO: 4983 - DNA, 15 bp, synthetic construct
  misc_feature 1..15: note = Description of Artificial Sequence: Synthetic oligonucleotide
  source 1..15: mol_type = other DNA
agctatgccatgaac

SEQ ID NO: 4984 - protein, 5 aa, synthetic construct
  REGION 1..5: note = Description of Artificial Sequence: Synthetic peptide
SYAMN

SEQ ID NO: 4985 - DNA, 21 bp, synthetic construct
  misc_feature 1..21: note = Description of Artificial Sequence: Synthetic oligonucleotide
  source 1..21: mol_type = other DNA
aggagtagttactactggggc

SEQ ID NO: 4986 - protein, 7 aa, synthetic construct
  REGION 1..7: note = Description of Artificial Sequence: Synthetic peptide
RSSYYWG

SEQ ID NO: 4987 - DNA, 15 bp, synthetic construct
  misc_feature 1..15: note = Description of Artificial Sequence: Synthetic oligonucleotide
  source 1..15: mol_type = other DNA
agctatggcatgcac

SEQ ID NO: 4988 - protein, 5 aa, synthetic construct
  REGION 1..5: note = Description of Artificial Sequence: Synthetic peptide
SYGMH

SEQ ID NO: 4989 - DNA, 21 bp, synthetic construct
  misc_feature 1..21: note = Description of Artificial Sequence: Synthetic oligonucleotide
  source 1..21: mol_type = other DNA
agaagtagttactactggggc

SEQ ID NO: 4990 - protein, 7 aa, synthetic construct
  REGION 1..7: note = Description of Artificial Sequence: Synthetic peptide
RSSYYWG

SEQ ID NO: 4991 - DNA, 15 bp, synthetic construct
  misc_feature 1..15: note = Description of Artificial Sequence: Synthetic oligonucleotide
  source 1..15: mol_type = other DNA
aactatgccatgaac

SEQ ID NO: 4992 - protein, 5 aa, synthetic construct
  REGION 1..5: note = Description of Artificial Sequence: Synthetic peptide
NYAMN

SEQ ID NO: 4993 - DNA, 21 bp, synthetic construct
  misc_feature 1..21: note = Description of Artificial Sequence: Synthetic oligonucleotide
  source 1..21: mol_type = other DNA
agaagtagttactactggggc

SEQ ID NO: 4994 - protein, 7 aa, synthetic construct
  REGION 1..7: note = Description of Artificial Sequence: Synthetic peptide
RSSYYWG

SEQ ID NO: 4995 - DNA, 15 bp, synthetic construct
  misc_feature 1..15: note = Description of Artificial Sequence: Synthetic oligonucleotide
  source 1..15: mol_type = other DNA
agccagagcatgaac

SEQ ID NO: 4996 - protein, 5 aa, synthetic construct
  REGION 1..5: note = Description of Artificial Sequence: Synthetic peptide
SQSMN

SEQ ID NO: 4997 - DNA, 21 bp, synthetic construct
  misc_feature 1..21: note = Description of Artificial Sequence: Synthetic oligonucleotide
  source 1..21: mol_type = other DNA
agaagtagttactactggggc

SEQ ID NO: 4998 - protein, 7 aa, synthetic construct
  REGION 1..7: note = Description of Artificial Sequence: Synthetic peptide
RSSYYWG

SEQ ID NO: 4999 - DNA, 15 bp, synthetic construct
  misc_feature 1..15: note = Description of Artificial Sequence: Synthetic oligonucleotide
  source 1..15: mol_type = other DNA
agctatggcatgcac

SEQ ID NO: 5000 - protein, 5 aa, synthetic construct
  REGION 1..5: note = Description of Artificial Sequence: Synthetic peptide
SYGMH

SEQ ID NO: 5001 - DNA, 15 bp, synthetic construct
  misc_feature 1..15: note = Description of Artificial Sequence: Synthetic oligonucleotide
  source 1..15: mol_type = other DNA
agctatagcatgaac

SEQ ID NO: 5002 - protein, 5 aa, synthetic construct
  REGION 1..5: note = Description of Artificial Sequence: Synthetic peptide
SYSMN

SEQ ID NO: 5003 - DNA, 21 bp, synthetic construct
  misc_feature 1..21: note = Description of Artificial Sequence: Synthetic oligonucleotide
  source 1..21: mol_type = other DNA
aggagtagttactactggggc

SEQ ID NO: 5004 - protein, 7 aa, synthetic construct
  REGION 1..7: note = Description of Artificial Sequence: Synthetic peptide
RSSYYWG

SEQ ID NO: 5005 - DNA, 15 bp, synthetic construct
  misc_feature 1..15: note = Description of Artificial Sequence: Synthetic oligonucleotide
  source 1..15: mol_type = other DNA
aattatgatatcaac

SEQ ID NO: 5006 - protein, 5 aa, synthetic construct
  REGION 1..5: note = Description of Artificial Sequence: Synthetic peptide
NYDIN

SEQ ID NO: 5007 - DNA, 15 bp, synthetic construct
  misc_feature 1..15: note = Description of Artificial Sequence: Synthetic oligonucleotide
  source 1..15: mol_type = other DNA
gactatggcatgcac

SEQ ID NO: 5008 - protein, 5 aa, synthetic construct
  REGION 1..5: note = Description of Artificial Sequence: Synthetic peptide
DYGMH

SEQ ID NO: 5009 - DNA, 15 bp, synthetic construct
  misc_feature 1..15: note = Description of Artificial Sequence: Synthetic oligonucleotide
  source 1..15: mol_type = other DNA
agctatagcatgaac

SEQ ID NO: 5010 - protein, 5 aa, synthetic construct
  REGION 1..5: note = Description of Artificial Sequence: Synthetic peptide
SYSMN

SEQ ID NO: 5011 - DNA, 15 bp, synthetic construct
  misc_feature 1..15: note = Description of Artificial Sequence: Synthetic oligonucleotide
  source 1..15: mol_type = other DNA
agctatagcatgaac

SEQ ID NO: 5012 - protein, 5 aa, synthetic construct
  REGION 1..5: note = Description of Artificial Sequence: Synthetic peptide
SYSMN

SEQ ID NO: 5013 - DNA, 21 bp, synthetic construct
  misc_feature 1..21: note = Description of Artificial Sequence: Synthetic oligonucleotide
  source 1..21: mol_type = other DNA
agaagtagttactactggggc

SEQ ID NO: 5014 - protein, 7 aa, synthetic construct
  REGION 1..7: note = Description of Artificial Sequence: Synthetic peptide
RSSYYWG

SEQ ID NO: 5015 - DNA, 21 bp, synthetic construct
  misc_feature 1..21: note = Description of Artificial Sequence: Synthetic oligonucleotide
  source 1..21: mol_type = other DNA
agaagtagttactactggggc

SEQ ID NO: 5016 - protein, 7 aa, synthetic construct
  REGION 1..7: note = Description of Artificial Sequence: Synthetic peptide
RSSYYWG

SEQ ID NO: 5017 - DNA, 15 bp, synthetic construct
  misc_feature 1..15: note = Description of Artificial Sequence: Synthetic oligonucleotide
  source 1..15: mol_type = other DNA
agctatgccatgagc

SEQ ID NO: 5018 - protein, 5 aa, synthetic construct
  REGION 1..5: note = Description of Artificial Sequence: Synthetic peptide
SYAMS

SEQ ID NO: 5019 - DNA, 21 bp, synthetic construct
  misc_feature 1..21: note = Description of Artificial Sequence: Synthetic oligonucleotide
  source 1..21: mol_type = other DNA
aggagtagttactactggggc

SEQ ID NO: 5020 - protein, 7 aa, synthetic construct
  REGION 1..7: note = Description of Artificial Sequence: Synthetic peptide
RSSYYWG

SEQ ID NO: 5021 - DNA, 15 bp, synthetic construct
  misc_feature 1..15: note = Description of Artificial Sequence: Synthetic oligonucleotide
  source 1..15: mol_type = other DNA
agctatggcatgcac

SEQ ID NO: 5022 - protein, 5 aa, synthetic construct
  REGION 1..5: note = Description of Artificial Sequence: Synthetic peptide
SYGMH

SEQ ID NO: 5023 - DNA, 15 bp, synthetic construct
  misc_feature 1..15: note = Description of Artificial Sequence: Synthetic oligonucleotide
  source 1..15: mol_type = other DNA
agctatggcatgcac

SEQ ID NO: 5024 - protein, 5 aa, synthetic construct
  REGION 1..5: note = Description of Artificial Sequence: Synthetic peptide
SYGMH

SEQ ID NO: 5025 - DNA, 15 bp, synthetic construct
  misc_feature 1..15: note = Description of Artificial Sequence: Synthetic oligonucleotide
  source 1..15: mol_type = other DNA
aattatgatatcaac

SEQ ID NO: 5026 - protein, 5 aa, synthetic construct
  REGION 1..5: note = Description of Artificial Sequence: Synthetic peptide
NYDIN

SEQ ID NO: 5027 - DNA, 15 bp, synthetic construct
  misc_feature 1..15: note = Description of Artificial Sequence: Synthetic oligonucleotide
  source 1..15: mol_type = other DNA
agctatgccatgagc

SEQ ID NO: 5028 - protein, 5 aa, synthetic construct
  REGION 1..5: note = Description of Artificial Sequence: Synthetic peptide
SYAMS

SEQ ID NO: 5029 - DNA, 15 bp, synthetic construct
  misc_feature 1..15: note = Description of Artificial Sequence: Synthetic oligonucleotide
  source 1..15: mol_type = other DNA
gactatggcatgcac

SEQ ID NO: 5030 - protein, 5 aa, synthetic construct
  REGION 1..5: note = Description of Artificial Sequence: Synthetic peptide
DYGMH

SEQ ID NO: 5031 - DNA, 15 bp, synthetic construct
  misc_feature 1..15: note = Description of Artificial Sequence: Synthetic oligonucleotide
  source 1..15: mol_type = other DNA
agctatggcatgcac

SEQ ID NO: 5032 - protein, 5 aa, synthetic construct
  REGION 1..5: note = Description of Artificial Sequence: Synthetic peptide
SYGMH

SEQ ID NO: 5033 - DNA, 15 bp, synthetic construct
  misc_feature 1..15: note = Description of Artificial Sequence: Synthetic oligonucleotide
  source 1..15: mol_type = other DNA
gactatggcatgcac

SEQ ID NO: 5034 - protein, 5 aa, synthetic construct
  REGION 1..5: note = Description of Artificial Sequence: Synthetic peptide
DYGMH

SEQ ID NO: 5035 - DNA, 15 bp, synthetic construct
  misc_feature 1..15: note = Description of Artificial Sequence: Synthetic oligonucleotide
  source 1..15: mol_type = other DNA
aactatggcatgcac

SEQ ID NO: 5036 - protein, 5 aa, synthetic construct
  REGION 1..5: note = Description of Artificial Sequence: Synthetic peptide
NYGMH

SEQ ID NO: 5037 - DNA, 15 bp, synthetic construct
  misc_feature 1..15: note = Description of Artificial Sequence: Synthetic oligonucleotide
  source 1..15: mol_type = other DNA
gactatggcatgcac

SEQ ID NO: 5038 - protein, 5 aa, synthetic construct
  REGION 1..5: note = Description of Artificial Sequence: Synthetic peptide
DYGMH

SEQ ID NO: 5039 - DNA, 15 bp, synthetic construct
  misc_feature 1..15: note = Description of Artificial Sequence: Synthetic oligonucleotide
  source 1..15: mol_type = other DNA
ggctactatatgcac

SEQ ID NO: 5040 - protein, 5 aa, synthetic construct
  REGION 1..5: note = Description of Artificial Sequence: Synthetic peptide
GYYMH

SEQ ID NO: 5041 - DNA, 15 bp, synthetic construct
  misc_feature 1..15: note = Description of Artificial Sequence: Synthetic oligonucleotide
  source 1..15: mol_type = other DNA
agctatgtcatgagc

SEQ ID NO: 5042 - protein, 5 aa, synthetic construct
  REGION 1..5: note = Description of Artificial Sequence: Synthetic peptide
SYVMS

SEQ ID NO: 5043 - DNA, 15 bp, synthetic construct
  misc_feature 1..15: note = Description of Artificial Sequence: Synthetic oligonucleotide
  source 1..15: mol_type = other DNA
agctatgccatgagc

SEQ ID NO: 5044 - protein, 5 aa, synthetic construct
  REGION 1..5: note = Description of Artificial Sequence: Synthetic peptide
SYAMS

SEQ ID NO: 5045 - DNA, 15 bp, synthetic construct
  misc_feature 1..15: note = Description of Artificial Sequence: Synthetic oligonucleotide
  source 1..15: mol_type = other DNA
agctatgccatgagc

SEQ ID NO: 5046 - protein, 5 aa, synthetic construct
  REGION 1..5: note = Description of Artificial Sequence: Synthetic peptide
SYAMS

SEQ ID NO: 5047 - DNA, 15 bp, synthetic construct
  misc_feature 1..15: note = Description of Artificial Sequence: Synthetic oligonucleotide
  source 1..15: mol_type = other DNA
agctatagcatgaac

SEQ ID NO: 5048 - protein, 5 aa, synthetic construct
  REGION 1..5: note = Description of Artificial Sequence: Synthetic peptide
SYSMN

SEQ ID NO: 5049 - DNA, 15 bp, synthetic construct
  misc_feature 1..15: note = Description of Artificial Sequence: Synthetic oligonucleotide
  source 1..15: mol_type = other DNA
gactattatatgcac

SEQ ID NO: 5050 - protein, 5 aa, synthetic construct
  REGION 1..5: note = Description of Artificial Sequence: Synthetic peptide
DYYMH

SEQ ID NO: 5051 - DNA, 15 bp, synthetic construct
  misc_feature 1..15: note = Description of Artificial Sequence: Synthetic oligonucleotide
  source 1..15: mol_type = other DNA
agctatagcatgaac

SEQ ID NO: 5052 - protein, 5 aa, synthetic construct
  REGION 1..5: note = Description of Artificial Sequence: Synthetic peptide
SYSMN

SEQ ID NO: 5053 - DNA, 15 bp, synthetic construct
  misc_feature 1..15: note = Description of Artificial Sequence: Synthetic oligonucleotide
  source 1..15: mol_type = other DNA
ggctactatttgcac

SEQ ID NO: 5054 - protein, 5 aa, synthetic construct
  REGION 1..5: note = Description of Artificial Sequence: Synthetic peptide
GYYLH

SEQ ID NO: 5055 - DNA, 15 bp, synthetic construct
  misc_feature 1..15: note = Description of Artificial Sequence: Synthetic oligonucleotide
  source 1..15: mol_type = other DNA
ggctactatatgcac

SEQ ID NO: 5056 - protein, 5 aa, synthetic construct
  REGION 1..5: note = Description of Artificial Sequence: Synthetic peptide
GYYMH

SEQ ID NO: 5057 - DNA, 15 bp, synthetic construct
  misc_feature 1..15: note = Description of Artificial Sequence: Synthetic oligonucleotide
  source 1..15: mol_type = other DNA
aacgcctggatgaac

SEQ ID NO: 5058 - protein, 5 aa, synthetic construct
  REGION 1..5: note = Description of Artificial Sequence: Synthetic peptide
NAWMN

SEQ ID NO: 5059 - DNA, 15 bp, synthetic construct
  misc_feature 1..15: note = Description of Artificial Sequence: Synthetic oligonucleotide
  source 1..15: mol_type = other DNA
gactactatattcac

SEQ ID NO: 5060 - protein, 5 aa, synthetic construct
  REGION 1..5: note = Description of Artificial Sequence: Synthetic peptide
DYYIH

SEQ ID NO: 5061 - DNA, 15 bp, synthetic construct
  misc_feature 1..15: note = Description of Artificial Sequence: Synthetic oligonucleotide
  source 1..15: mol_type = other DNA
agctatgccatgagc

SEQ ID NO: 5062 - protein, 5 aa, synthetic construct
  REGION 1..5: note = Description of Artificial Sequence: Synthetic peptide
SYAMS

SEQ ID NO: 5063 - DNA, 15 bp, synthetic construct
  misc_feature 1..15: note = Description of Artificial Sequence: Synthetic oligonucleotide
  source 1..15: mol_type = other DNA
aattatgatatcaac

SEQ ID NO: 5064 - protein, 5 aa, synthetic construct
  REGION 1..5: note = Description of Artificial Sequence: Synthetic peptide
NYDIN

SEQ ID NO: 5065 - DNA, 21 bp, synthetic construct
  misc_feature 1..21: note = Description of Artificial Sequence: Synthetic oligonucleotide
  source 1..21: mol_type = other DNA
actggtggagtgggtgtgggc

SEQ ID NO: 5066 - protein, 7 aa, synthetic construct
  REGION 1..7: note = Description of Artificial Sequence: Synthetic peptide
TGGVGVG

SEQ ID NO: 5067 - DNA, 15 bp, synthetic construct
  misc_feature 1..15: note = Description of Artificial Sequence: Synthetic oligonucleotide
  source 1..15: mol_type = other DNA
agttatagcatgaac

SEQ ID NO: 5068 - protein, 5 aa, synthetic construct
  REGION 1..5: note = Description of Artificial Sequence: Synthetic peptide
SYSMN

SEQ ID NO: 5069 - DNA, 15 bp, synthetic construct
  misc_feature 1..15: note = Description of Artificial Sequence: Synthetic oligonucleotide
  source 1..15: mol_type = other DNA
ggctactatctgcac

SEQ ID NO: 5070 - protein, 5 aa, synthetic construct
  REGION 1..5: note = Description of Artificial Sequence: Synthetic peptide
GYYLH

SEQ ID NO: 5071 - DNA, 21 bp, synthetic construct
  misc_feature 1..21: note = Description of Artificial Sequence: Synthetic oligonucleotide
  source 1..21: mol_type = other DNA
actagtggagtgggtgtgggc

SEQ ID NO: 5072 - protein, 7 aa, synthetic construct
  REGION 1..7: note = Description of Artificial Sequence: Synthetic peptide
TSGVGVG

SEQ ID NO: 5073 - DNA, 15 bp, synthetic construct
  misc_feature 1..15: note = Description of Artificial Sequence: Synthetic oligonucleotide
  source 1..15: mol_type = other DNA
aattatgatatcaac

SEQ ID NO: 5074 - protein, 5 aa, synthetic construct
  REGION 1..5: note = Description of Artificial Sequence: Synthetic peptide
NYDIN

SEQ ID NO: 5075 - DNA, 15 bp, synthetic construct
  misc_feature 1..15: note = Description of Artificial Sequence: Synthetic oligonucleotide
  source 1..15: mol_type = other DNA
agctatgccatgagc

SEQ ID NO: 5076 - protein, 5 aa, synthetic construct
  REGION 1..5: note = Description of Artificial Sequence: Synthetic peptide
SYAMS

SEQ ID NO: 5077 - DNA, 15 bp, synthetic construct
  misc_feature 1..15: note = Description of Artificial Sequence: Synthetic oligonucleotide
  source 1..15: mol_type = other DNA
aattatgatatcaac

SEQ ID NO: 5078 - protein, 5 aa, synthetic construct
  REGION 1..5: note = Description of Artificial Sequence: Synthetic peptide
NYDIN

SEQ ID NO: 5079 - DNA, 15 bp, synthetic construct
  misc_feature 1..15: note = Description of Artificial Sequence: Synthetic oligonucleotide
  source 1..15: mol_type = other DNA
aattatgatatcaac

SEQ ID NO: 5080 - protein, 5 aa, synthetic construct
  REGION 1..5: note = Description of Artificial Sequence: Synthetic peptide
NYDIN

SEQ ID NO: 5081 - DNA, 15 bp, synthetic construct
  misc_feature 1..15: note = Description of Artificial Sequence: Synthetic oligonucleotide
  source 1..15: mol_type = other DNA
aattatgatatcaac

SEQ ID NO: 5082 - protein, 5 aa, synthetic construct
  REGION 1..5: note = Description of Artificial Sequence: Synthetic peptide
NYDIN

SEQ ID NO: 5083 - DNA, 15 bp, synthetic construct
  misc_feature 1..15: note = Description of Artificial Sequence: Synthetic oligonucleotide
  source 1..15: mol_type = other DNA
ggcgattatatgcac

SEQ ID NO: 5084 - protein, 5 aa, synthetic construct
  REGION 1..5: note = Description of Artificial Sequence: Synthetic peptide
GDYMH

SEQ ID NO: 5085 - DNA, 15 bp, synthetic construct
  misc_feature 1..15: note = Description of Artificial Sequence: Synthetic oligonucleotide
  source 1..15: mol_type = other DNA
aactatgatattaac

SEQ ID NO: 5086 - protein, 5 aa, synthetic construct
  REGION 1..5: note = Description of Artificial Sequence: Synthetic peptide
NYDIN

SEQ ID NO: 5087 - DNA, 15 bp, synthetic construct
  misc_feature 1..15: note = Description of Artificial Sequence: Synthetic oligonucleotide
  source 1..15: mol_type = other DNA
aattatgacatcaac

SEQ ID NO: 5088 - protein, 5 aa, synthetic construct
  REGION 1..5: note = Description of Artificial Sequence: Synthetic peptide
NYDIN

SEQ ID NO: 5089 - DNA, 15 bp, synthetic construct
  misc_feature 1..15: note = Description of Artificial Sequence: Synthetic oligonucleotide
  source 1..15: mol_type = other DNA
agctatagcatgaac

SEQ ID NO: 5090 - protein, 5 aa, synthetic construct
  REGION 1..5: note = Description of Artificial Sequence: Synthetic peptide
SYSMN

SEQ ID NO: 5091 - DNA, 15 bp, synthetic construct
  misc_feature 1..15: note = Description of Artificial Sequence: Synthetic oligonucleotide
  source 1..15: mol_type = other DNA
agctatgccatgagc

SEQ ID NO: 5092 - protein, 5 aa, synthetic construct
  REGION 1..5: note = Description of Artificial Sequence: Synthetic peptide
SYAMS

SEQ ID NO: 5093 - DNA, 15 bp, synthetic construct
  misc_feature 1..15: note = Description of Artificial Sequence: Synthetic oligonucleotide
  source 1..15: mol_type = other DNA
agttatgatatcaac

SEQ ID NO: 5094 - protein, 5 aa, synthetic construct
  REGION 1..5: note = Description of Artificial Sequence: Synthetic peptide
SYDIN

SEQ ID NO: 5095 - DNA, 15 bp, synthetic construct
  misc_feature 1..15: note = Description of Artificial Sequence: Synthetic oligonucleotide
  source 1..15: mol_type = other DNA
agctataacatgaac

SEQ ID NO: 5096 - protein, 5 aa, synthetic construct
  REGION 1..5: note = Description of Artificial Sequence: Synthetic peptide
SYNMN

SEQ ID NO: 5097 - DNA, 15 bp, synthetic construct
  misc_feature 1..15: note = Description of Artificial Sequence: Synthetic oligonucleotide
  source 1..15: mol_type = other DNA
agctatgccatgagc

SEQ ID NO: 5098 - protein, 5 aa, synthetic construct
  REGION 1..5: note = Description of Artificial Sequence: Synthetic peptide
SYAMS

SEQ ID NO: 5099 - DNA, 15 bp, synthetic construct
  misc_feature 1..15: note = Description of Artificial Sequence: Synthetic oligonucleotide
  source 1..15: mol_type = other DNA
agttatgatatcagc

SEQ ID NO: 5100 - protein, 5 aa, synthetic construct
  REGION 1..5: note = Description of Artificial Sequence: Synthetic peptide
SYDIS

SEQ ID NO: 5101 - DNA, 15 bp, synthetic construct
  misc_feature 1..15: note = Description of Artificial Sequence: Synthetic oligonucleotide
  source 1..15: mol_type = other DNA
aactatgatattaac

SEQ ID NO: 5102 - protein, 5 aa, synthetic construct
  REGION 1..5: note = Description of Artificial Sequence: Synthetic peptide
NYDIN

SEQ ID NO: 5103 - DNA, 15 bp, synthetic construct
  misc_feature 1..15: note = Description of Artificial Sequence: Synthetic oligonucleotide
  source 1..15: mol_type = other DNA
agctatgccatgagc

SEQ ID NO: 5104 - protein, 5 aa, synthetic construct
  REGION 1..5: note = Description of Artificial Sequence: Synthetic peptide
SYAMS

SEQ ID NO: 5105 - DNA, 15 bp, synthetic construct
  misc_feature 1..15: note = Description of Artificial Sequence: Synthetic oligonucleotide
  source 1..15: mol_type = other DNA
aacgcccggatgaac

SEQ ID NO: 5106 - protein, 5 aa, synthetic construct
  REGION 1..5: note = Description of Artificial Sequence: Synthetic peptide
NARMN

SEQ ID NO: 5107 - DNA, 21 bp, synthetic construct
  misc_feature 1..21: note = Description of Artificial Sequence: Synthetic oligonucleotide
  source 1..21: mol_type = other DNA
actagtggagtgggtgtgggc

SEQ ID NO: 5108 - protein, 7 aa, synthetic construct
  REGION 1..7: note = Description of Artificial Sequence: Synthetic peptide
TSGVGVG

SEQ ID NO: 5109 - DNA, 15 bp, synthetic construct
  misc_feature 1..15: note = Description of Artificial Sequence: Synthetic oligonucleotide
  source 1..15: mol_type = other DNA
aactatggcatgcac

SEQ ID NO: 5110 - protein, 5 aa, synthetic construct
  REGION 1..5: note = Description of Artificial Sequence: Synthetic peptide
NYGMH

SEQ ID NO: 5111 - DNA, 15 bp, synthetic construct
  misc_feature 1..15: note = Description of Artificial Sequence: Synthetic oligonucleotide
  source 1..15: mol_type = other DNA
agctatagcatgaac

SEQ ID NO: 5112 - protein, 5 aa, synthetic construct
  REGION 1..5: note = Description of Artificial Sequence: Synthetic peptide
SYSMN

SEQ ID NO: 5113 - DNA, 15 bp, synthetic construct
  misc_feature 1..15: note = Description of Artificial Sequence: Synthetic oligonucleotide
  source 1..15: mol_type = other DNA
gactatcatatgcac

SEQ ID NO: 5114 - protein, 5 aa, synthetic construct
  REGION 1..5: note = Description of Artificial Sequence: Synthetic peptide
DYHMH

SEQ ID NO: 5115 - DNA, 15 bp, synthetic construct
  misc_feature 1..15: note = Description of Artificial Sequence: Synthetic oligonucleotide
  source 1..15: mol_type = other DNA
agctatagcatgaac

SEQ ID NO: 5116 - protein, 5 aa, synthetic construct
  REGION 1..5: note = Description of Artificial Sequence: Synthetic peptide
SYSMN

SEQ ID NO: 5117 - DNA, 15 bp, synthetic construct
  misc_feature 1..15: note = Description of Artificial Sequence: Synthetic oligonucleotide
  source 1..15: mol_type = other DNA
agctatagcatgaac

SEQ ID NO: 5118 - protein, 5 aa, synthetic construct
  REGION 1..5: note = Description of Artificial Sequence: Synthetic peptide
SYSMN

SEQ ID NO: 5119 - DNA, 15 bp, synthetic construct
  misc_feature 1..15: note = Description of Artificial Sequence: Synthetic oligonucleotide
  source 1..15: mol_type = other DNA
aacgcctggatgaac

SEQ ID NO: 5120 - protein, 5 aa, synthetic construct
  REGION 1..5: note = Description of Artificial Sequence: Synthetic peptide
NAWMN

SEQ ID NO: 5121 - DNA, 15 bp, synthetic construct
  misc_feature 1..15: note = Description of Artificial Sequence: Synthetic oligonucleotide
  source 1..15: mol_type = other DNA
acctataacttgaac

SEQ ID NO: 5122 - protein, 5 aa, synthetic construct
  REGION 1..5: note = Description of Artificial Sequence: Synthetic peptide
TYNLN

SEQ ID NO: 5123 - DNA, 15 bp, synthetic construct
  misc_feature 1..15: note = Description of Artificial Sequence: Synthetic oligonucleotide
  source 1..15: mol_type = other DNA
agctatagcatgaac

SEQ ID NO: 5124 - protein, 5 aa, synthetic construct
  REGION 1..5: note = Description of Artificial Sequence: Synthetic peptide
SYSMN

SEQ ID NO: 5125 - DNA, 15 bp, synthetic construct
  misc_feature 1..15: note = Description of Artificial Sequence: Synthetic oligonucleotide
  source 1..15: mol_type = other DNA
agctataacataaac

SEQ ID NO: 5126 - protein, 5 aa, synthetic construct
  REGION 1..5: note = Description of Artificial Sequence: Synthetic peptide
SYNIN

SEQ ID NO: 5127 - DNA, 21 bp, synthetic construct
  misc_feature 1..21: note = Description of Artificial Sequence: Synthetic oligonucleotide
  source 1..21: mol_type = other DNA
agaagtagttattactggggc

SEQ ID NO: 5128 - protein, 7 aa, synthetic construct
  REGION 1..7: note = Description of Artificial Sequence: Synthetic peptide
RSSYYWG

SEQ ID NO: 5129 - DNA, 15 bp, synthetic construct
  misc_feature 1..15: note = Description of Artificial Sequence: Synthetic oligonucleotide
  source 1..15: mol_type = other DNA
agctatgccatgagc

SEQ ID NO: 5130 - protein, 5 aa, synthetic construct
  REGION 1..5: note = Description of Artificial Sequence: Synthetic peptide
SYAMS

SEQ ID NO: 5131 - DNA, 21 bp, synthetic construct
  misc_feature 1..21: note = Description of Artificial Sequence: Synthetic oligonucleotide
  source 1..21: mol_type = other DNA
aggactagttactactggggc

SEQ ID NO: 5132 - protein, 7 aa, synthetic construct
  REGION 1..7: note = Description of Artificial Sequence: Synthetic peptide
RTSYYWG

SEQ ID NO: 5133 - DNA, 15 bp, synthetic construct
  misc_feature 1..15: note = Description of Artificial Sequence: Synthetic oligonucleotide
  source 1..15: mol_type = other DNA
agctatagcatgaac

SEQ ID NO: 5134 - protein, 5 aa, synthetic construct
  REGION 1..5: note = Description of Artificial Sequence: Synthetic peptide
SYSMN

SEQ ID NO: 5135 - DNA, 15 bp, synthetic construct
  misc_feature 1..15: note = Description of Artificial Sequence: Synthetic oligonucleotide
  source 1..15: mol_type = other DNA
aattatgatatcaac

SEQ ID NO: 5136 - protein, 5 aa, synthetic construct
  REGION 1..5: note = Description of Artificial Sequence: Synthetic peptide
NYDIN

SEQ ID NO: 5137 - DNA, 15 bp, synthetic construct
  misc_feature 1..15: note = Description of Artificial Sequence: Synthetic oligonucleotide
  source 1..15: mol_type = other DNA
aattatgatatcaac

SEQ ID NO: 5138 - protein, 5 aa, synthetic construct
  REGION 1..5: note = Description of Artificial Sequence: Synthetic peptide
NYDIN

SEQ ID NO: 5139 - DNA, 15 bp, synthetic construct
  misc_feature 1..15: note = Description of Artificial Sequence: Synthetic oligonucleotide
  source 1..15: mol_type = other DNA
ggctactatatgcac

SEQ ID NO: 5140 - protein, 5 aa, synthetic construct
  REGION 1..5: note = Description of Artificial Sequence: Synthetic peptide
GYYMH

SEQ ID NO: 5141 - DNA, 15 bp, synthetic construct
  misc_feature 1..15: note = Description of Artificial Sequence: Synthetic oligonucleotide
  source 1..15: mol_type = other DNA
ggctactatatgcac

SEQ ID NO: 5142 - protein, 5 aa, synthetic construct
  REGION 1..5: note = Description of Artificial Sequence: Synthetic peptide
GYYMH

SEQ ID NO: 5143 - DNA, 15 bp, synthetic construct
  misc_feature 1..15: note = Description of Artificial Sequence: Synthetic oligonucleotide
  source 1..15: mol_type = other DNA
aattatgatatcaac

SEQ ID NO: 5144 - protein, 5 aa, synthetic construct
  REGION 1..5: note = Description of Artificial Sequence: Synthetic peptide
NYDIN

SEQ ID NO: 5145 - DNA, 15 bp, synthetic construct
  misc_feature 1..15: note = Description of Artificial Sequence: Synthetic oligonucleotide
  source 1..15: mol_type = other DNA
aattatgatattaat

SEQ ID NO: 5146 - protein, 5 aa, synthetic construct
  REGION 1..5: note = Description of Artificial Sequence: Synthetic peptide
NYDIN

SEQ ID NO: 5147 - DNA, 15 bp, synthetic construct
  misc_feature 1..15: note = Description of Artificial Sequence: Synthetic oligonucleotide
  source 1..15: mol_type = other DNA
agctttggcatgcac

SEQ ID NO: 5148 - protein, 5 aa, synthetic construct
  REGION 1..5: note = Description of Artificial Sequence: Synthetic peptide
SFGMH

SEQ ID NO: 5149 - DNA, 15 bp, synthetic construct
  misc_feature 1..15: note = Description of Artificial Sequence: Synthetic oligonucleotide
  source 1..15: mol_type = other DNA
gcctaccatatgcac

SEQ ID NO: 5150 - protein, 5 aa, synthetic construct
  REGION 1..5: note = Description of Artificial Sequence: Synthetic peptide
AYHMH

SEQ ID NO: 5151 - DNA, 15 bp, synthetic construct
  misc_feature 1..15: note = Description of Artificial Sequence: Synthetic oligonucleotide
  source 1..15: mol_type = other DNA
gactactatttgcac

SEQ ID NO: 5152 - protein, 5 aa, synthetic construct
  REGION 1..5: note = Description of Artificial Sequence: Synthetic peptide
DYYLH

SEQ ID NO: 5153 - DNA, 15 bp, synthetic construct
  misc_feature 1..15: note = Description of Artificial Sequence: Synthetic oligonucleotide
  source 1..15: mol_type = other DNA
aattatgatatcaac

SEQ ID NO: 5154 - protein, 5 aa, synthetic construct
  REGION 1..5: note = Description of Artificial Sequence: Synthetic peptide
NYDIN

SEQ ID NO: 5155 - DNA, 15 bp, synthetic construct
  misc_feature 1..15: note = Description of Artificial Sequence: Synthetic oligonucleotide
  source 1..15: mol_type = other DNA
aactatgtcatgcac

SEQ ID NO: 5156 - protein, 5 aa, synthetic construct
  REGION 1..5: note = Description of Artificial Sequence: Synthetic peptide
NYVMH

SEQ ID NO: 5157 - DNA, 15 bp, synthetic construct
  misc_feature 1..15: note = Description of Artificial Sequence: Synthetic oligonucleotide
  source 1..15: mol_type = other DNA
aactgtgtcatgcac

SEQ ID NO: 5158 - protein, 5 aa, synthetic construct
  REGION 1..5: note = Description of Artificial Sequence: Synthetic peptide
NCVMH

SEQ ID NO: 5159 - DNA, 15 bp, synthetic construct
  misc_feature 1..15: note = Description of Artificial Sequence: Synthetic oligonucleotide
  source 1..15: mol_type = other DNA
agctatggcatgcac

SEQ ID NO: 5160 - protein, 5 aa, synthetic construct
  REGION 1..5: note = Description of Artificial Sequence: Synthetic peptide
SYGMH

SEQ ID NO: 5161 - DNA, 15 bp, synthetic construct
  misc_feature 1..15: note = Description of Artificial Sequence: Synthetic oligonucleotide
  source 1..15: mol_type = other DNA
agctatggcatgcac

SEQ ID NO: 5162 - protein, 5 aa, synthetic construct
  REGION 1..5: note = Description of Artificial Sequence: Synthetic peptide
SYGMH

SEQ ID NO: 5163 - DNA, 15 bp, synthetic construct
  misc_feature 1..15: note = Description of Artificial Sequence: Synthetic oligonucleotide
  source 1..15: mol_type = other DNA
aattatgatatcaac

SEQ ID NO: 5164 - protein, 5 aa, synthetic construct
  REGION 1..5: note = Description of Artificial Sequence: Synthetic peptide
NYDIN

SEQ ID NO: 5165 - DNA, 15 bp, synthetic construct
  misc_feature 1..15: note = Description of Artificial Sequence: Synthetic oligonucleotide
  source 1..15: mol_type = other DNA
agctatagcatgaac

SEQ ID NO: 5166 - protein, 5 aa, synthetic construct
  REGION 1..5: note = Description of Artificial Sequence: Synthetic peptide
SYSMN

SEQ ID NO: 5167 - DNA, 15 bp, synthetic construct
  misc_feature 1..15: note = Description of Artificial Sequence: Synthetic oligonucleotide
  source 1..15: mol_type = other DNA
agctatgccatgagc

SEQ ID NO: 5168 - protein, 5 aa, synthetic construct
  REGION 1..5: note = Description of Artificial Sequence: Synthetic peptide
SYAMS

SEQ ID NO: 5169 - DNA, 15 bp, synthetic construct
  misc_feature 1..15: note = Description of Artificial Sequence: Synthetic oligonucleotide
  source 1..15: mol_type = other DNA
agctatggcatacac

SEQ ID NO: 5170 - protein, 5 aa, synthetic construct
  REGION 1..5: note = Description of Artificial Sequence: Synthetic peptide
SYGIH

SEQ ID NO: 5171 - DNA, 15 bp, synthetic construct
  misc_feature 1..15: note = Description of Artificial Sequence: Synthetic oligonucleotide
  source 1..15: mol_type = other DNA
agctataccatgaac

SEQ ID NO: 5172 - protein, 5 aa, synthetic construct
  REGION 1..5: note = Description of Artificial Sequence: Synthetic peptide
SYTMN

SEQ ID NO: 5173 - DNA, 15 bp, synthetic construct
  misc_feature 1..15: note = Description of Artificial Sequence: Synthetic oligonucleotide
  source 1..15: mol_type = other DNA
agctatgccatgagc

SEQ ID NO: 5174 - protein, 5 aa, synthetic construct
  REGION 1..5: note = Description of Artificial Sequence: Synthetic peptide
SYAMS

SEQ ID NO: 5175 - DNA, 15 bp, synthetic construct
  misc_feature 1..15: note = Description of Artificial Sequence: Synthetic oligonucleotide
  source 1..15: mol_type = other DNA
gactactacatgatc

SEQ ID NO: 5176 - protein, 5 aa, synthetic construct
  REGION 1..5: note = Description of Artificial Sequence: Synthetic peptide
DYYMI

SEQ ID NO: 5177 - DNA, 15 bp, synthetic construct
  misc_feature 1..15: note = Description of Artificial Sequence: Synthetic oligonucleotide
  source 1..15: mol_type = other DNA
aattatgatatcaac

SEQ ID NO: 5178 - protein, 5 aa, synthetic construct
  REGION 1..5: note = Description of Artificial Sequence: Synthetic peptide
NYDIN

SEQ ID NO: 5179 - DNA, 15 bp, synthetic construct
  misc_feature 1..15: note = Description of Artificial Sequence: Synthetic oligonucleotide
  source 1..15: mol_type = other DNA
agctatgccatgagc

SEQ ID NO: 5180 - protein, 5 aa, synthetic construct
  REGION 1..5: note = Description of Artificial Sequence: Synthetic peptide
SYAMS

SEQ ID NO: 5181 - DNA, 15 bp, synthetic construct
  misc_feature 1..15: note = Description of Artificial Sequence: Synthetic oligonucleotide
  source 1..15: mol_type = other DNA
gactactacatgaac

SEQ ID NO: 5182 - protein, 5 aa, synthetic construct
  REGION 1..5: note = Description of Artificial Sequence: Synthetic peptide
DYYMN

SEQ ID NO: 5183 - DNA, 15 bp, synthetic construct
  misc_feature 1..15: note = Description of Artificial Sequence: Synthetic oligonucleotide
  source 1..15: mol_type = other DNA
agctatgccatgagt

SEQ ID NO: 5184 - protein, 5 aa, synthetic construct
  REGION 1..5: note = Description of Artificial Sequence: Synthetic peptide
SYAMS

SEQ ID NO: 5185 - DNA, 15 bp, synthetic construct
  misc_feature 1..15: note = Description of Artificial Sequence: Synthetic oligonucleotide
  source 1..15: mol_type = other DNA
gactatggcatgcac

SEQ ID NO: 5186 - protein, 5 aa, synthetic construct
  REGION 1..5: note = Description of Artificial Sequence: Synthetic peptide
DYGMH

SEQ ID NO: 5187 - DNA, 15 bp, synthetic construct
  misc_feature 1..15: note = Description of Artificial Sequence: Synthetic oligonucleotide
  source 1..15: mol_type = other DNA
gactatggcatgcac

SEQ ID NO: 5188 - protein, 5 aa, synthetic construct
  REGION 1..5: note = Description of Artificial Sequence: Synthetic peptide
DYGMH

SEQ ID NO: 5189 - DNA, 15 bp, synthetic construct
  misc_feature 1..15: note = Description of Artificial Sequence: Synthetic oligonucleotide
  source 1..15: mol_type = other DNA
agctatggcatgcac

SEQ ID NO: 5190 - protein, 5 aa, synthetic construct
  REGION 1..5: note = Description of Artificial Sequence: Synthetic peptide
SYGMH

SEQ ID NO: 5191 - DNA, 15 bp, synthetic construct
  misc_feature 1..15: note = Description of Artificial Sequence: Synthetic oligonucleotide
  source 1..15: mol_type = other DNA
agctatgtcatgcac

SEQ ID NO: 5192 - protein, 5 aa, synthetic construct
  REGION 1..5: note = Description of Artificial Sequence: Synthetic peptide
SYVMH

SEQ ID NO: 5193 - DNA, 15 bp, synthetic construct
  misc_feature 1..15: note = Description of Artificial Sequence: Synthetic oligonucleotide
  source 1..15: mol_type = other DNA
agctatgccatgagc

SEQ ID NO: 5194 - protein, 5 aa, synthetic construct
  REGION 1..5: note = Description of Artificial Sequence: Synthetic peptide
SYAMS

SEQ ID NO: 5195 - DNA, 15 bp, synthetic construct
  misc_feature 1..15: note = Description of Artificial Sequence: Synthetic oligonucleotide
  source 1..15: mol_type = other DNA
agctatgtcatgcac

SEQ ID NO: 5196 - protein, 5 aa, synthetic construct
  REGION 1..5: note = Description of Artificial Sequence: Synthetic peptide
SYVMH

SEQ ID NO: 5197 - DNA, 15 bp, synthetic construct
  misc_feature 1..15: note = Description of Artificial Sequence: Synthetic oligonucleotide
  source 1..15: mol_type = other DNA
agttactactggagc

SEQ ID NO: 5198 - protein, 5 aa, synthetic construct
  REGION 1..5: note = Description of Artificial Sequence: Synthetic peptide
SYYWS

SEQ ID NO: 5199 - DNA, 15 bp, synthetic construct
  misc_feature 1..15: note = Description of Artificial Sequence: Synthetic oligonucleotide
  source 1..15: mol_type = other DNA
aactatggcatgcac

SEQ ID NO: 5200 - protein, 5 aa, synthetic construct
  REGION 1..5: note = Description of Artificial Sequence: Synthetic peptide
NYGMH

SEQ ID NO: 5201 - DNA, 15 bp, synthetic construct
  misc_feature 1..15: note = Description of Artificial Sequence: Synthetic oligonucleotide
  source 1..15: mol_type = other DNA
agctatgtcatgcac

SEQ ID NO: 5202 - protein, 5 aa, synthetic construct
  REGION 1..5: note = Description of Artificial Sequence: Synthetic peptide
SYVMH

SEQ ID NO: 5203 - DNA, 15 bp, synthetic construct
  misc_feature 1..15: note = Description of Artificial Sequence: Synthetic oligonucleotide
  source 1..15: mol_type = other DNA
agctatggcatgcac

SEQ ID NO: 5204 - protein, 5 aa, synthetic construct
  REGION 1..5: note = Description of Artificial Sequence: Synthetic peptide
SYGMH

SEQ ID NO: 5205 - DNA, 15 bp, synthetic construct
  misc_feature 1..15: note = Description of Artificial Sequence: Synthetic oligonucleotide
  source 1..15: mol_type = other DNA
gactgtgtcatgcac

SEQ ID NO: 5206 - protein, 5 aa, synthetic construct
  REGION 1..5: note = Description of Artificial Sequence: Synthetic peptide
DCVMH

SEQ ID NO: 5207 - DNA, 15 bp, synthetic construct
  misc_feature 1..15: note = Description of Artificial Sequence: Synthetic oligonucleotide
  source 1..15: mol_type = other DNA
agctatgccatgagc

SEQ ID NO: 5208 - protein, 5 aa, synthetic construct
  REGION 1..5: note = Description of Artificial Sequence: Synthetic peptide
SYAMS

SEQ ID NO: 5209 - DNA, 15 bp, synthetic construct
  misc_feature 1..15: note = Description of Artificial Sequence: Synthetic oligonucleotide
  source 1..15: mol_type = other DNA
agctatgccatgaac

SEQ ID NO: 5210 - protein, 5 aa, synthetic construct
  REGION 1..5: note = Description of Artificial Sequence: Synthetic peptide
SYAMN

SEQ ID NO: 5211 - DNA, 15 bp, synthetic construct
  misc_feature 1..15: note = Description of Artificial Sequence: Synthetic oligonucleotide
  source 1..15: mol_type = other DNA
agctatagcgtgaac

SEQ ID NO: 5212 - protein, 5 aa, synthetic construct
  REGION 1..5: note = Description of Artificial Sequence: Synthetic peptide
SYSVN

SEQ ID NO: 5213 - DNA, 15 bp, synthetic construct
  misc_feature 1..15: note = Description of Artificial Sequence: Synthetic oligonucleotide
  source 1..15: mol_type = other DNA
agcgatgacacgcac

SEQ ID NO: 5214 - protein, 5 aa, synthetic construct
  REGION 1..5: note = Description of Artificial Sequence: Synthetic peptide
SDDTH

SEQ ID NO: 5215 - DNA, 15 bp, synthetic construct
  misc_feature 1..15: note = Description of Artificial Sequence: Synthetic oligonucleotide
  source 1..15: mol_type = other DNA
gactactacatgaac

SEQ ID NO: 5216 - protein, 5 aa, synthetic construct
  REGION 1..5: note = Description of Artificial Sequence: Synthetic peptide
DYYMN

SEQ ID NO: 5217 - DNA, 15 bp, synthetic construct
  misc_feature 1..15: note = Description of Artificial Sequence: Synthetic oligonucleotide
  source 1..15: mol_type = other DNA
gactgtgtcatgcac

SEQ ID NO: 5218 - protein, 5 aa, synthetic construct
  REGION 1..5: note = Description of Artificial Sequence: Synthetic peptide
DCVMH

SEQ ID NO: 5219 - DNA, 15 bp, synthetic construct
  misc_feature 1..15: note = Description of Artificial Sequence: Synthetic oligonucleotide
  source 1..15: mol_type = other DNA
agctatgccatgagt

SEQ ID NO: 5220 - protein, 5 aa, synthetic construct
  REGION 1..5: note = Description of Artificial Sequence: Synthetic peptide
SYAMS

SEQ ID NO: 5221 - DNA, 15 bp, synthetic construct
  misc_feature 1..15: note = Description of Artificial Sequence: Synthetic oligonucleotide
  source 1..15: mol_type = other DNA
gactgtgtcatgcac

SEQ ID NO: 5222 - protein, 5 aa, synthetic construct
  REGION 1..5: note = Description of Artificial Sequence: Synthetic peptide
DCVMH

SEQ ID NO: 5223 - DNA, 15 bp, synthetic construct
  misc_feature 1..15: note = Description of Artificial Sequence: Synthetic oligonucleotide
  source 1..15: mol_type = other DNA
agctatgccatgagc

SEQ ID NO: 5224 - protein, 5 aa, synthetic construct
  REGION 1..5: note = Description of Artificial Sequence: Synthetic peptide
SYAMS

SEQ ID NO: 5225 - DNA, 15 bp, synthetic construct
  misc_feature 1..15: note = Description of Artificial Sequence: Synthetic oligonucleotide
  source 1..15: mol_type = other DNA
agctatgccatgagc

SEQ ID NO: 5226 - protein, 5 aa, synthetic construct
  REGION 1..5: note = Description of Artificial Sequence: Synthetic peptide
SYAMS

SEQ ID NO: 5227 - DNA, 15 bp, synthetic construct
  misc_feature 1..15: note = Description of Artificial Sequence: Synthetic oligonucleotide
  source 1..15: mol_type = other DNA
agctataccatgaac

SEQ ID NO: 5228 - protein, 5 aa, synthetic construct
  REGION 1..5: note = Description of Artificial Sequence: Synthetic peptide
SYTMN

SEQ ID NO: 5229 - DNA, 15 bp, synthetic construct
  misc_feature 1..15: note = Description of Artificial Sequence: Synthetic oligonucleotide
  source 1..15: mol_type = other DNA
agcgatgactcgcac

SEQ ID NO: 5230 - protein, 5 aa, synthetic construct
  REGION 1..5: note = Description of Artificial Sequence: Synthetic peptide
SDDSH

SEQ ID NO: 5231 - DNA, 15 bp, synthetic construct
  misc_feature 1..15: note = Description of Artificial Sequence: Synthetic oligonucleotide
  source 1..15: mol_type = other DNA
agctatggcatgcac

SEQ ID NO: 5232 - protein, 5 aa, synthetic construct
  REGION 1..5: note = Description of Artificial Sequence: Synthetic peptide
SYGMH

SEQ ID NO: 5233 - DNA, 15 bp, synthetic construct
  misc_feature 1..15: note = Description of Artificial Sequence: Synthetic oligonucleotide
  source 1..15: mol_type = other DNA
agctatgtcatgcac

SEQ ID NO: 5234 - protein, 5 aa, synthetic construct
  REGION 1..5: note = Description of Artificial Sequence: Synthetic peptide
SYVMH

SEQ ID NO: 5235 - DNA, 15 bp, synthetic construct
  misc_feature 1..15: note = Description of Artificial Sequence: Synthetic oligonucleotide
  source 1..15: mol_type = other DNA
gattatggcatgcac

SEQ ID NO: 5236 - protein, 5 aa, synthetic construct
  REGION 1..5: note = Description of Artificial Sequence: Synthetic peptide
DYGMH

SEQ ID NO: 5237 - DNA, 15 bp, synthetic construct
  misc_feature 1..15: note = Description of Artificial Sequence: Synthetic oligonucleotide
  source 1..15: mol_type = other DNA
agctatgtcatgcac

SEQ ID NO: 5238 - protein, 5 aa, synthetic construct
  REGION 1..5: note = Description of Artificial Sequence: Synthetic peptide
SYVMH

SEQ ID NO: 5239 - DNA, 15 bp, synthetic construct
  misc_feature 1..15: note = Description of Artificial Sequence: Synthetic oligonucleotide
  source 1..15: mol_type = other DNA
agctatgccatgagc

SEQ ID NO: 5240 - protein, 5 aa, synthetic construct
  REGION 1..5: note = Description of Artificial Sequence: Synthetic peptide
SYAMS

SEQ ID NO: 5241 - DNA, 15 bp, synthetic construct
  misc_feature 1..15: note = Description of Artificial Sequence: Synthetic oligonucleotide
  source 1..15: mol_type = other DNA
agctatggcatacac

SEQ ID NO: 5242 - protein, 5 aa, synthetic construct
  REGION 1..5: note = Description of Artificial Sequence: Synthetic peptide
SYGIH

SEQ ID NO: 5243 - DNA, 15 bp, synthetic construct
  misc_feature 1..15: note = Description of Artificial Sequence: Synthetic oligonucleotide
  source 1..15: mol_type = other DNA
gattatggcatacac

SEQ ID NO: 5244 - protein, 5 aa, synthetic construct
  REGION 1..5: note = Description of Artificial Sequence: Synthetic peptide
DYGIH

SEQ ID NO: 5245 - DNA, 15 bp, synthetic construct
  misc_feature 1..15: note = Description of Artificial Sequence: Synthetic oligonucleotide
  source 1..15: mol_type = other DNA
agctatggcatgcac

SEQ ID NO: 5246 - protein, 5 aa, synthetic construct
  REGION 1..5: note = Description of Artificial Sequence: Synthetic peptide
SYGMH

SEQ ID NO: 5247 - DNA, 15 bp, synthetic construct
  misc_feature 1..15: note = Description of Artificial Sequence: Synthetic oligonucleotide
  source 1..15: mol_type = other DNA
gactactacatgaac

SEQ ID NO: 5248 - protein, 5 aa, synthetic construct
  REGION 1..5: note = Description of Artificial Sequence: Synthetic peptide
DYYMN

SEQ ID NO: 5249 - DNA, 15 bp, synthetic construct
  misc_feature 1..15: note = Description of Artificial Sequence: Synthetic oligonucleotide
  source 1..15: mol_type = other DNA
gactatggcatgcac

SEQ ID NO: 5250 - protein, 5 aa, synthetic construct
  REGION 1..5: note = Description of Artificial Sequence: Synthetic peptide
DYGMH

SEQ ID NO: 5251 - DNA, 15 bp, synthetic construct
  misc_feature 1..15: note = Description of Artificial Sequence: Synthetic oligonucleotide
  source 1..15: mol_type = other DNA
gactatggcatgcac

SEQ ID NO: 5252 - protein, 5 aa, synthetic construct
  REGION 1..5: note = Description of Artificial Sequence: Synthetic peptide
DYGMH

SEQ ID NO: 5253 - DNA, 15 bp, synthetic construct
  misc_feature 1..15: note = Description of Artificial Sequence: Synthetic oligonucleotide
  source 1..15: mol_type = other DNA
gacgatgacacacac

SEQ ID NO: 5254 - protein, 5 aa, synthetic construct
  REGION 1..5: note = Description of Artificial Sequence: Synthetic peptide
DDDTH

SEQ ID NO: 5255 - DNA, 15 bp, synthetic construct
  misc_feature 1..15: note = Description of Artificial Sequence: Synthetic oligonucleotide
  source 1..15: mol_type = other DNA
aactatgccatgagc

SEQ ID NO: 5256 - protein, 5 aa, synthetic construct
  REGION 1..5: note = Description of Artificial Sequence: Synthetic peptide
NYAMS

SEQ ID NO: 5257 - DNA, 15 bp, synthetic construct
  misc_feature 1..15: note = Description of Artificial Sequence: Synthetic oligonucleotide
  source 1..15: mol_type = other DNA
atctatggcatgcac

SEQ ID NO: 5258 - protein, 5 aa, synthetic construct
  REGION 1..5: note = Description of Artificial Sequence: Synthetic peptide
IYGMH

SEQ ID NO: 5259 - DNA, 15 bp, synthetic construct
  misc_feature 1..15: note = Description of Artificial Sequence: Synthetic oligonucleotide
  source 1..15: mol_type = other DNA
agctatgccatgagt

SEQ ID NO: 5260 - protein, 5 aa, synthetic construct
  REGION 1..5: note = Description of Artificial Sequence: Synthetic peptide
SYAMS

SEQ ID NO: 5261 - DNA, 15 bp, synthetic construct
  misc_feature 1..15: note = Description of Artificial Sequence: Synthetic oligonucleotide
  source 1..15: mol_type = other DNA
gactactacatgatc

SEQ ID NO: 5262 - protein, 5 aa, synthetic construct
  REGION 1..5: note = Description of Artificial Sequence: Synthetic peptide
DYYMI

SEQ ID NO: 5263 - DNA, 15 bp, synthetic construct
  misc_feature 1..15: note = Description of Artificial Sequence: Synthetic oligonucleotide
  source 1..15: mol_type = other DNA
agctatggcatgcac

SEQ ID NO: 5264 - protein, 5 aa, synthetic construct
  REGION 1..5: note = Description of Artificial Sequence: Synthetic peptide
SYGMH

SEQ ID NO: 5265 - DNA, 15 bp, synthetic construct
  misc_feature 1..15: note = Description of Artificial Sequence: Synthetic oligonucleotide
  source 1..15: mol_type = other DNA
agttatgccatgagc

SEQ ID NO: 5266 - protein, 5 aa, synthetic construct
  REGION 1..5: note = Description of Artificial Sequence: Synthetic peptide
SYAMS

SEQ ID NO: 5267 - DNA, 15 bp, synthetic construct
  misc_feature 1..15: note = Description of Artificial Sequence: Synthetic oligonucleotide
  source 1..15: mol_type = other DNA
aactatgtcatgcac

SEQ ID NO: 5268 - protein, 5 aa, synthetic construct
  REGION 1..5: note = Description of Artificial Sequence: Synthetic peptide
NYVMH

SEQ ID NO: 5269 - DNA, 15 bp, synthetic construct
  misc_feature 1..15: note = Description of Artificial Sequence: Synthetic oligonucleotide
  source 1..15: mol_type = other DNA
agttatgccatgagc

SEQ ID NO: 5270 - protein, 5 aa, synthetic construct
  REGION 1..5: note = Description of Artificial Sequence: Synthetic peptide
SYAMS

SEQ ID NO: 5271 - DNA, 15 bp, synthetic construct
  misc_feature 1..15: note = Description of Artificial Sequence: Synthetic oligonucleotide
  source 1..15: mol_type = other DNA
aactctgccatgaac

SEQ ID NO: 5272 - protein, 5 aa, synthetic construct
  REGION 1..5: note = Description of Artificial Sequence: Synthetic peptide
NSAMN

SEQ ID NO: 5273 - DNA, 15 bp, synthetic construct
  misc_feature 1..15: note = Description of Artificial Sequence: Synthetic oligonucleotide
  source 1..15: mol_type = other DNA
agctatggcatgcac

SEQ ID NO: 5274 - protein, 5 aa, synthetic construct
  REGION 1..5: note = Description of Artificial Sequence: Synthetic peptide
SYGMH

SEQ ID NO: 5275 - DNA, 15 bp, synthetic construct
  misc_feature 1..15: note = Description of Artificial Sequence: Synthetic oligonucleotide
  source 1..15: mol_type = other DNA
gactacttcatgacc

SEQ ID NO: 5276 - protein, 5 aa, synthetic construct
  REGION 1..5: note = Description of Artificial Sequence: Synthetic peptide
DYFMT

SEQ ID NO: 5277 - DNA, 15 bp, synthetic construct
  misc_feature 1..15: note = Description of Artificial Sequence: Synthetic oligonucleotide
  source 1..15: mol_type = other DNA
gactatggcatgcac

SEQ ID NO: 5278 - protein, 5 aa, synthetic construct
  REGION 1..5: note = Description of Artificial Sequence: Synthetic peptide
DYGMH

SEQ ID NO: 5279 - DNA, 15 bp, synthetic construct
  misc_feature 1..15: note = Description of Artificial Sequence: Synthetic oligonucleotide
  source 1..15: mol_type = other DNA
gactacttcatgacc

SEQ ID NO: 5280 - protein, 5 aa, synthetic construct
  REGION 1..5: note = Description of Artificial Sequence: Synthetic peptide
DYFMT

SEQ ID NO: 5281 - DNA, 15 bp, synthetic construct
  misc_feature 1..15: note = Description of Artificial Sequence: Synthetic oligonucleotide
  source 1..15: mol_type = other DNA
gactacttcatgacc

SEQ ID NO: 5282 - protein, 5 aa, synthetic construct
  REGION 1..5: note = Description of Artificial Sequence: Synthetic peptide
DYFMT

SEQ ID NO: 5283 - DNA, 15 bp, synthetic construct
  misc_feature 1..15: note = Description of Artificial Sequence: Synthetic oligonucleotide
  source 1..15: mol_type = other DNA
gactatggcatgcac

SEQ ID NO: 5284 - protein, 5 aa, synthetic construct
  REGION 1..5: note = Description of Artificial Sequence: Synthetic peptide
DYGMH

SEQ ID NO: 5285 - DNA, 15 bp, synthetic construct
  misc_feature 1..15: note = Description of Artificial Sequence: Synthetic oligonucleotide
  source 1..15: mol_type = other DNA
agctatggcatgcac

SEQ ID NO: 5286 - protein, 5 aa, synthetic construct
  REGION 1..5: note = Description of Artificial Sequence: Synthetic peptide
SYGMH

SEQ ID NO: 5287 - DNA, 15 bp, synthetic construct
  misc_feature 1..15: note = Description of Artificial Sequence: Synthetic oligonucleotide
  source 1..15: mol_type = other DNA
agctatgccatgagc

SEQ ID NO: 5288 - protein, 5 aa, synthetic construct
  REGION 1..5: note = Description of Artificial Sequence: Synthetic peptide
SYAMS

SEQ ID NO: 5289 - DNA, 15 bp, synthetic construct
  misc_feature 1..15: note = Description of Artificial Sequence: Synthetic oligonucleotide
  source 1..15: mol_type = other DNA
agttatggcatgcac

SEQ ID NO: 5290 - protein, 5 aa, synthetic construct
  REGION 1..5: note = Description of Artificial Sequence: Synthetic peptide
SYGMH

SEQ ID NO: 5291 - DNA, 15 bp, synthetic construct
  misc_feature 1..15: note = Description of Artificial Sequence: Synthetic oligonucleotide
  source 1..15: mol_type = other DNA
agctatgccatgacc

SEQ ID NO: 5292 - protein, 5 aa, synthetic construct
  REGION 1..5: note = Description of Artificial Sequence: Synthetic peptide
SYAMT

SEQ ID NO: 5293 - DNA, 15 bp, synthetic construct
  misc_feature 1..15: note = Description of Artificial Sequence: Synthetic oligonucleotide
  source 1..15: mol_type = other DNA
aactatggcatgcac

SEQ ID NO: 5294 - protein, 5 aa, synthetic construct
  REGION 1..5: note = Description of Artificial Sequence: Synthetic peptide
NYGMH

SEQ ID NO: 5295 - DNA, 15 bp, synthetic construct
  misc_feature 1..15: note = Description of Artificial Sequence: Synthetic oligonucleotide
  source 1..15: mol_type = other DNA
agctatggcatgcac

SEQ ID NO: 5296 - protein, 5 aa, synthetic construct
  REGION 1..5: note = Description of Artificial Sequence: Synthetic peptide
SYGMH

SEQ ID NO: 5297 - DNA, 15 bp, synthetic construct
  misc_feature 1..15: note = Description of Artificial Sequence: Synthetic oligonucleotide
  source 1..15: mol_type = other DNA
agttatggcatgcac

SEQ ID NO: 5298 - protein, 5 aa, synthetic construct
  REGION 1..5: note = Description of Artificial Sequence: Synthetic peptide
SYGMH

SEQ ID NO: 5299 - DNA, 15 bp, synthetic construct
  misc_feature 1..15: note = Description of Artificial Sequence: Synthetic oligonucleotide
  source 1..15: mol_type = other DNA
ggctaccatatgcac

SEQ ID NO: 5300 - protein, 5 aa, synthetic construct
  REGION 1..5: note = Description of Artificial Sequence: Synthetic peptide
GYHMH

SEQ ID NO: 5301 - DNA, 15 bp, synthetic construct
  misc_feature 1..15: note = Description of Artificial Sequence: Synthetic oligonucleotide
  source 1..15: mol_type = other DNA
agctatgccatgagc

SEQ ID NO: 5302 - protein, 5 aa, synthetic construct
  REGION 1..5: note = Description of Artificial Sequence: Synthetic peptide
SYAMS

SEQ ID NO: 5303 - DNA, 15 bp, synthetic construct
  misc_feature 1..15: note = Description of Artificial Sequence: Synthetic oligonucleotide
  source 1..15: mol_type = other DNA
gactactacatgaac

SEQ ID NO: 5304 - protein, 5 aa, synthetic construct
  REGION 1..5: note = Description of Artificial Sequence: Synthetic peptide
DYYMN

SEQ ID NO: 5305 - DNA, 15 bp, synthetic construct
  misc_feature 1..15: note = Description of Artificial Sequence: Synthetic oligonucleotide
  source 1..15: mol_type = other DNA
agttatgccatgagc

SEQ ID NO: 5306 - protein, 5 aa, synthetic construct
  REGION 1..5: note = Description of Artificial Sequence: Synthetic peptide
SYAMS

SEQ ID NO: 5307 - DNA, 15 bp, synthetic construct
  misc_feature 1..15: note = Description of Artificial Sequence: Synthetic oligonucleotide
  source 1..15: mol_type = other DNA
agctatagcatgaac

SEQ ID NO: 5308 - protein, 5 aa, synthetic construct
  REGION 1..5: note = Description of Artificial Sequence: Synthetic peptide
SYSMN

SEQ ID NO: 5309 - DNA, 15 bp, synthetic construct
  misc_feature 1..15: note = Description of Artificial Sequence: Synthetic oligonucleotide
  source 1..15: mol_type = other DNA
agttatgccatgagc

SEQ ID NO: 5310 - protein, 5 aa, synthetic construct
  REGION 1..5: note = Description of Artificial Sequence: Synthetic peptide
SYAMS

SEQ ID NO: 5311 - DNA, 15 bp, synthetic construct
  misc_feature 1..15: note = Description of Artificial Sequence: Synthetic oligonucleotide
  source 1..15: mol_type = other DNA
ggccactatataaac

SEQ ID NO: 5312 - protein, 5 aa, synthetic construct
  REGION 1..5: note = Description of Artificial Sequence: Synthetic peptide
GHYIN

SEQ ID NO: 5313 - DNA, 15 bp, synthetic construct
  misc_feature 1..15: note = Description of Artificial Sequence: Synthetic oligonucleotide
  source 1..15: mol_type = other DNA
agccatagcatgaac

SEQ ID NO: 5314 - protein, 5 aa, synthetic construct
  REGION 1..5: note = Description of Artificial Sequence: Synthetic peptide
SHSMN

SEQ ID NO: 5315 - DNA, 15 bp, synthetic construct
  misc_feature 1..15: note = Description of Artificial Sequence: Synthetic oligonucleotide
  source 1..15: mol_type = other DNA
agctatggcatgcac

SEQ ID NO: 5316 - protein, 5 aa, synthetic construct
  REGION 1..5: note = Description of Artificial Sequence: Synthetic peptide
SYGMH

SEQ ID NO: 5317 - DNA, 15 bp, synthetic construct
  misc_feature 1..15: note = Description of Artificial Sequence: Synthetic oligonucleotide
  source 1..15: mol_type = other DNA
agctatgtcatgagc

SEQ ID NO: 5318 - protein, 5 aa, synthetic construct
  REGION 1..5: note = Description of Artificial Sequence: Synthetic peptide
SYVMS

SEQ ID NO: 5319 - DNA, 15 bp, synthetic construct
  misc_feature 1..15: note = Description of Artificial Sequence: Synthetic oligonucleotide
  source 1..15: mol_type = other DNA
agctatggcatgcac

SEQ ID NO: 5320 - protein, 5 aa, synthetic construct
  REGION 1..5: note = Description of Artificial Sequence: Synthetic peptide
SYGMH

SEQ ID NO: 5321 - DNA, 15 bp, synthetic construct
  misc_feature 1..15: note = Description of Artificial Sequence: Synthetic oligonucleotide
  source 1..15: mol_type = other DNA
agctatgtcatgagc

SEQ ID NO: 5322 - protein, 5 aa, synthetic construct
  REGION 1..5: note = Description of Artificial Sequence: Synthetic peptide
SYVMS

SEQ ID NO: 5323 - DNA, 15 bp, synthetic construct
  misc_feature 1..15: note = Description of Artificial Sequence: Synthetic oligonucleotide
  source 1..15: mol_type = other DNA
aactatgccatgacc

SEQ ID NO: 5324 - protein, 5 aa, synthetic construct
  REGION 1..5: note = Description of Artificial Sequence: Synthetic peptide
NYAMT

SEQ ID NO: 5325 - DNA, 15 bp, synthetic construct
  misc_feature 1..15: note = Description of Artificial Sequence: Synthetic oligonucleotide
  source 1..15: mol_type = other DNA
agctatagcatgaac

SEQ ID NO: 5326 - protein, 5 aa, synthetic construct
  REGION 1..5: note = Description of Artificial Sequence: Synthetic peptide
SYSMN

SEQ ID NO: 5327 - DNA, 15 bp, synthetic construct
  misc_feature 1..15: note = Description of Artificial Sequence: Synthetic oligonucleotide
  source 1..15: mol_type = other DNA
ggctaccatatgcac

SEQ ID NO: 5328 - protein, 5 aa, synthetic construct
  REGION 1..5: note = Description of Artificial Sequence: Synthetic peptide
GYHMH

SEQ ID NO: 5329 - DNA, 15 bp, synthetic construct
  misc_feature 1..15: note = Description of Artificial Sequence: Synthetic oligonucleotide
  source 1..15: mol_type = other DNA
ggccactatatgaac

SEQ ID NO: 5330 - protein, 5 aa, synthetic construct
  REGION 1..5: note = Description of Artificial Sequence: Synthetic peptide
GHYMN

SEQ ID NO: 5331 - DNA, 15 bp, synthetic construct
  misc_feature 1..15: note = Description of Artificial Sequence: Synthetic oligonucleotide
  source 1..15: mol_type = other DNA
ggctaccatatacac

SEQ ID NO: 5332 - protein, 5 aa, synthetic construct
  REGION 1..5: note = Description of Artificial Sequence: Synthetic peptide
GYHIH

SEQ ID NO: 5333 - DNA, 15 bp, synthetic construct
  misc_feature 1..15: note = Description of Artificial Sequence: Synthetic oligonucleotide
  source 1..15: mol_type = other DNA
gactatggcatgcac

SEQ ID NO: 5334 - protein, 5 aa, synthetic construct
  REGION 1..5: note = Description of Artificial Sequence: Synthetic peptide
DYGMH

SEQ ID NO: 5335 - DNA, 15 bp, synthetic construct
  misc_feature 1..15: note = Description of Artificial Sequence: Synthetic oligonucleotide
  source 1..15: mol_type = other DNA
agctatgccatgagc

SEQ ID NO: 5336 - protein, 5 aa, synthetic construct
  REGION 1..5: note = Description of Artificial Sequence: Synthetic peptide
SYAMS

SEQ ID NO: 5337 - DNA, 15 bp, synthetic construct
  misc_feature 1..15: note = Description of Artificial Sequence: Synthetic oligonucleotide
  source 1..15: mol_type = other DNA
gactatggcatgcac

SEQ ID NO: 5338 - protein, 5 aa, synthetic construct
  REGION 1..5: note = Description of Artificial Sequence: Synthetic peptide
DYGMH

SEQ ID NO: 5339 - DNA, 15 bp, synthetic construct
  misc_feature 1..15: note = Description of Artificial Sequence: Synthetic oligonucleotide
  source 1..15: mol_type = other DNA
aactttggcatgcac

SEQ ID NO: 5340 - protein, 5 aa, synthetic construct
  REGION 1..5: note = Description of Artificial Sequence: Synthetic peptide
NFGMH

SEQ ID NO: 5341 - DNA, 15 bp, synthetic construct
  misc_feature 1..15: note = Description of Artificial Sequence: Synthetic oligonucleotide
  source 1..15: mol_type = other DNA
ggctatcatatgcag

SEQ ID NO: 5342 - protein, 5 aa, synthetic construct
  REGION 1..5: note = Description of Artificial Sequence: Synthetic peptide
GYHMQ

SEQ ID NO: 5343 - DNA, 15 bp, synthetic construct
  misc_feature 1..15: note = Description of Artificial Sequence: Synthetic oligonucleotide
  source 1..15: mol_type = other DNA
aactatggcatgcac

SEQ ID NO: 5344 - protein, 5 aa, synthetic construct
  REGION 1..5: note = Description of Artificial Sequence: Synthetic peptide
NYGMH

SEQ ID NO: 5345 - DNA, 15 bp, synthetic construct
  misc_feature 1..15: note = Description of Artificial Sequence: Synthetic oligonucleotide
  source 1..15: mol_type = other DNA
agaaatgccatgagc

SEQ ID NO: 5346 - protein, 5 aa, synthetic construct
  REGION 1..5: note = Description of Artificial Sequence: Synthetic peptide
RNAMS

SEQ ID NO: 5347 - DNA, 15 bp, synthetic construct
  misc_feature 1..15: note = Description of Artificial Sequence: Synthetic oligonucleotide
  source 1..15: mol_type = other DNA
agctataaaatgaac

SEQ ID NO: 5348 - protein, 5 aa, synthetic construct
  REGION 1..5: note = Description of Artificial Sequence: Synthetic peptide
SYKMN

SEQ ID NO: 5349 - DNA, 15 bp, synthetic construct
  misc_feature 1..15: note = Description of Artificial Sequence: Synthetic oligonucleotide
  source 1..15: mol_type = other DNA
agctatggcatgcac

SEQ ID NO: 5350 - protein, 5 aa, synthetic construct
  REGION 1..5: note = Description of Artificial Sequence: Synthetic peptide
SYGMH

SEQ ID NO: 5351 - DNA, 15 bp, synthetic construct
  misc_feature 1..15: note = Description of Artificial Sequence: Synthetic oligonucleotide
  source 1..15: mol_type = other DNA
gactatggcatgcac

SEQ ID NO: 5352 - protein, 5 aa, synthetic construct
  REGION 1..5: note = Description of Artificial Sequence: Synthetic peptide
DYGMH

SEQ ID NO: 5353 - DNA, 15 bp, synthetic construct
  misc_feature 1..15: note = Description of Artificial Sequence: Synthetic oligonucleotide
  source 1..15: mol_type = other DNA
agttatggcatgcac

SEQ ID NO: 5354 - protein, 5 aa, synthetic construct
  REGION 1..5: note = Description of Artificial Sequence: Synthetic peptide
SYGMH

SEQ ID NO: 5355 - DNA, 15 bp, synthetic construct
  misc_feature 1..15: note = Description of Artificial Sequence: Synthetic oligonucleotide
  source 1..15: mol_type = other DNA
ttctatggcatgcac

SEQ ID NO: 5356 - protein, 5 aa, synthetic construct
  REGION 1..5: note = Description of Artificial Sequence: Synthetic peptide
FYGMH

SEQ ID NO: 5357 - DNA, 15 bp, synthetic construct
  misc_feature 1..15: note = Description of Artificial Sequence: Synthetic oligonucleotide
  source 1..15: mol_type = other DNA
ggctaccatatgcag

SEQ ID NO: 5358 - protein, 5 aa, synthetic construct
  REGION 1..5: note = Description of Artificial Sequence: Synthetic peptide
GYHMQ

SEQ ID NO: 5359 - DNA, 15 bp, synthetic construct
  misc_feature 1..15: note = Description of Artificial Sequence: Synthetic oligonucleotide
  source 1..15: mol_type = other DNA
agctatagcatgaac

SEQ ID NO: 5360 - protein, 5 aa, synthetic construct
  REGION 1..5: note = Description of Artificial Sequence: Synthetic peptide
SYSMN

SEQ ID NO: 5361 - DNA, 15 bp, synthetic construct
  misc_feature 1..15: note = Description of Artificial Sequence: Synthetic oligonucleotide
  source 1..15: mol_type = other DNA
agctatagcatgaac

SEQ ID NO: 5362 - protein, 5 aa, synthetic construct
  REGION 1..5: note = Description of Artificial Sequence: Synthetic peptide
SYSMN

SEQ ID NO: 5363 - DNA, 15 bp, synthetic construct
  misc_feature 1..15: note = Description of Artificial Sequence: Synthetic oligonucleotide
  source 1..15: mol_type = other DNA
aactatggcatgcac

SEQ ID NO: 5364 - protein, 5 aa, synthetic construct
  REGION 1..5: note = Description of Artificial Sequence: Synthetic peptide
NYGMH

SEQ ID NO: 5365 - DNA, 15 bp, synthetic construct
  misc_feature 1..15: note = Description of Artificial Sequence: Synthetic oligonucleotide
  source 1..15: mol_type = other DNA
agctatgccatgagc

SEQ ID NO: 5366 - protein, 5 aa, synthetic construct
  REGION 1..5: note = Description of Artificial Sequence: Synthetic peptide
SYAMS

SEQ ID NO: 5367 - DNA, 15 bp, synthetic construct
  misc_feature 1..15: note = Description of Artificial Sequence: Synthetic oligonucleotide
  source 1..15: mol_type = other DNA
agctatggcatgcac

SEQ ID NO: 5368 - protein, 5 aa, synthetic construct
  REGION 1..5: note = Description of Artificial Sequence: Synthetic peptide
SYGMH

SEQ ID NO: 5369 - DNA, 15 bp, synthetic construct
  misc_feature 1..15: note = Description of Artificial Sequence: Synthetic oligonucleotide
  source 1..15: mol_type = other DNA
agctatgtcatgagc

SEQ ID NO: 5370 - protein, 5 aa, synthetic construct
  REGION 1..5: note = Description of Artificial Sequence: Synthetic peptide
SYVMS

SEQ ID NO: 5371 - DNA, 15 bp, synthetic construct
  misc_feature 1..15: note = Description of Artificial Sequence: Synthetic oligonucleotide
  source 1..15: mol_type = other DNA
agctatgccatgaac

SEQ ID NO: 5372 - protein, 5 aa, synthetic construct
  REGION 1..5: note = Description of Artificial Sequence: Synthetic peptide
SYAMN

SEQ ID NO: 5373 - DNA, 15 bp, synthetic construct
  misc_feature 1..15: note = Description of Artificial Sequence: Synthetic oligonucleotide
  source 1..15: mol_type = other DNA
gactatggcatccac

SEQ ID NO: 5374 - protein, 5 aa, synthetic construct
  REGION 1..5: note = Description of Artificial Sequence: Synthetic peptide
DYGIH

SEQ ID NO: 5375 - DNA, 15 bp, synthetic construct
  misc_feature 1..15: note = Description of Artificial Sequence: Synthetic oligonucleotide
  source 1..15: mol_type = other DNA
agctatggcatgcac

SEQ ID NO: 5376 - protein, 5 aa, synthetic construct
  REGION 1..5: note = Description of Artificial Sequence: Synthetic peptide
SYGMH

SEQ ID NO: 5377 - DNA, 15 bp, synthetic construct
  misc_feature 1..15: note = Description of Artificial Sequence: Synthetic oligonucleotide
  source 1..15: mol_type = other DNA
ggctaccatatgcac

SEQ ID NO: 5378 - protein, 5 aa, synthetic construct
  REGION 1..5: note = Description of Artificial Sequence: Synthetic peptide
GYHMH

SEQ ID NO: 5379 - DNA, 15 bp, synthetic construct
  misc_feature 1..15: note = Description of Artificial Sequence: Synthetic oligonucleotide
  source 1..15: mol_type = other DNA
agctatggcatgcac

SEQ ID NO: 5380 - protein, 5 aa, synthetic construct
  REGION 1..5: note = Description of Artificial Sequence: Synthetic peptide
SYGMH

SEQ ID NO: 5381 - DNA, 15 bp, synthetic construct
  misc_feature 1..15: note = Description of Artificial Sequence: Synthetic oligonucleotide
  source 1..15: mol_type = other DNA
aactttggcatgcac

SEQ ID NO: 5382 - protein, 5 aa, synthetic construct
  REGION 1..5: note = Description of Artificial Sequence: Synthetic peptide
NFGMH

SEQ ID NO: 5383 - DNA, 15 bp, synthetic construct
  misc_feature 1..15: note = Description of Artificial Sequence: Synthetic oligonucleotide
  source 1..15: mol_type = other DNA
aactatggcatgcac

SEQ ID NO: 5384 - protein, 5 aa, synthetic construct
  REGION 1..5: note = Description of Artificial Sequence: Synthetic peptide
NYGMH

SEQ ID NO: 5385 - DNA, 15 bp, synthetic construct
  misc_feature 1..15: note = Description of Artificial Sequence: Synthetic oligonucleotide
  source 1..15: mol_type = other DNA
acctatgccatgagt

SEQ ID NO: 5386 - protein, 5 aa, synthetic construct
  REGION 1..5: note = Description of Artificial Sequence: Synthetic peptide
TYAMS

SEQ ID NO: 5387 - DNA, 15 bp, synthetic construct
  misc_feature 1..15: note = Description of Artificial Sequence: Synthetic oligonucleotide
  source 1..15: mol_type = other DNA
agctatagcatgatc

SEQ ID NO: 5388 - protein, 5 aa, synthetic construct
  REGION 1..5: note = Description of Artificial Sequence: Synthetic peptide
SYSMI

SEQ ID NO: 5389 - DNA, 15 bp, synthetic construct
  misc_feature 1..15: note = Description of Artificial Sequence: Synthetic oligonucleotide
  source 1..15: mol_type = other DNA
agctatggcatgcac

SEQ ID NO: 5390 - protein, 5 aa, synthetic construct
  REGION 1..5: note = Description of Artificial Sequence: Synthetic peptide
SYGMH

SEQ ID NO: 5391 - DNA, 15 bp, synthetic construct
  misc_feature 1..15: note = Description of Artificial Sequence: Synthetic oligonucleotide
  source 1..15: mol_type = other DNA
gactatggcatccac

SEQ ID NO: 5392 - protein, 5 aa, synthetic construct
  REGION 1..5: note = Description of Artificial Sequence: Synthetic peptide
DYGIH

SEQ ID NO: 5393 - DNA, 15 bp, synthetic construct
  misc_feature 1..15: note = Description of Artificial Sequence: Synthetic oligonucleotide
  source 1..15: mol_type = other DNA
aactatggcatgcac

SEQ ID NO: 5394 - protein, 5 aa, synthetic construct
  REGION 1..5: note = Description of Artificial Sequence: Synthetic peptide
NYGMH

SEQ ID NO: 5395 - DNA, 15 bp, synthetic construct
  misc_feature 1..15: note = Description of Artificial Sequence: Synthetic oligonucleotide
  source 1..15: mol_type = other DNA
ggctactatttccac

SEQ ID NO: 5396 - protein, 5 aa, synthetic construct
  REGION 1..5: note = Description of Artificial Sequence: Synthetic peptide
GYYFH

SEQ ID NO: 5397 - DNA, 15 bp, synthetic construct
  misc_feature 1..15: note = Description of Artificial Sequence: Synthetic oligonucleotide
  source 1..15: mol_type = other DNA
agctatgccatgagc

SEQ ID NO: 5398 - protein, 5 aa, synthetic construct
  REGION 1..5: note = Description of Artificial Sequence: Synthetic peptide
SYAMS

SEQ ID NO: 5399 - DNA, 15 bp, synthetic construct
  misc_feature 1..15: note = Description of Artificial Sequence: Synthetic oligonucleotide
  source 1..15: mol_type = other DNA
agctatggcatgcac

SEQ ID NO: 5400 - protein, 5 aa, synthetic construct
  REGION 1..5: note = Description of Artificial Sequence: Synthetic peptide
SYGMH

SEQ ID NO: 5401 - DNA, 15 bp, synthetic construct
  misc_feature 1..15: note = Description of Artificial Sequence: Synthetic oligonucleotide
  source 1..15: mol_type = other DNA
agttatggcatgcac

SEQ ID NO: 5402 - protein, 5 aa, synthetic construct
  REGION 1..5: note = Description of Artificial Sequence: Synthetic peptide
SYGMH

SEQ ID NO: 5403 - DNA, 15 bp, synthetic construct
  misc_feature 1..15: note = Description of Artificial Sequence: Synthetic oligonucleotide
  source 1..15: mol_type = other DNA
agctatggcatgcac

SEQ ID NO: 5404 - protein, 5 aa, synthetic construct
  REGION 1..5: note = Description of Artificial Sequence: Synthetic peptide
SYGMH

SEQ ID NO: 5405 - DNA, 15 bp, synthetic construct
  misc_feature 1..15: note = Description of Artificial Sequence: Synthetic oligonucleotide
  source 1..15: mol_type = other DNA
agttataggatgaac

SEQ ID NO: 5406 - protein, 5 aa, synthetic construct
  REGION 1..5: note = Description of Artificial Sequence: Synthetic peptide
SYRMN

SEQ ID NO: 5407 - DNA, 15 bp, synthetic construct
  misc_feature 1..15: note = Description of Artificial Sequence: Synthetic oligonucleotide
  source 1..15: mol_type = other DNA
gactatggcatgcac

SEQ ID NO: 5408 - protein, 5 aa, synthetic construct
  REGION 1..5: note = Description of Artificial Sequence: Synthetic peptide
DYGMH

SEQ ID NO: 5409 - DNA, 15 bp, synthetic construct
  misc_feature 1..15: note = Description of Artificial Sequence: Synthetic oligonucleotide
  source 1..15: mol_type = other DNA
agctatggcatgcac

SEQ ID NO: 5410 - protein, 5 aa, synthetic construct
  REGION 1..5: note = Description of Artificial Sequence: Synthetic peptide
SYGMH

SEQ ID NO: 5411 - DNA, 15 bp, synthetic construct
  misc_feature 1..15: note = Description of Artificial Sequence: Synthetic oligonucleotide
  source 1..15: mol_type = other DNA
agctatggcatgcac

SEQ ID NO: 5412 - protein, 5 aa, synthetic construct
  REGION 1..5: note = Description of Artificial Sequence: Synthetic peptide
SYGMH

SEQ ID NO: 5413 - DNA, 15 bp, synthetic construct
  misc_feature 1..15: note = Description of Artificial Sequence: Synthetic oligonucleotide
  source 1..15: mol_type = other DNA
agctatggcatgcac

SEQ ID NO: 5414 - protein, 5 aa, synthetic construct
  REGION 1..5: note = Description of Artificial Sequence: Synthetic peptide
SYGMH

SEQ ID NO: 5415 - DNA, 15 bp, synthetic construct
  misc_feature 1..15: note = Description of Artificial Sequence: Synthetic oligonucleotide
  source 1..15: mol_type = other DNA
acctatgccatgacc

SEQ ID NO: 5416 - protein, 5 aa, synthetic construct
  REGION 1..5: note = Description of Artificial Sequence: Synthetic peptide
TYAMT

SEQ ID NO: 5417 - DNA, 15 bp, synthetic construct
  misc_feature 1..15: note = Description of Artificial Sequence: Synthetic oligonucleotide
  source 1..15: mol_type = other DNA
gactatggcatgcac

SEQ ID NO: 5418 - protein, 5 aa, synthetic construct
  REGION 1..5: note = Description of Artificial Sequence: Synthetic peptide
DYGMH

SEQ ID NO: 5419 - DNA, 15 bp, synthetic construct
  misc_feature 1..15: note = Description of Artificial Sequence: Synthetic oligonucleotide
  source 1..15: mol_type = other DNA
agttactatatacac

SEQ ID NO: 5420 - protein, 5 aa, synthetic construct
  REGION 1..5: note = Description of Artificial Sequence: Synthetic peptide
SYYIH

SEQ ID NO: 5421 - DNA, 15 bp, synthetic construct
  misc_feature 1..15: note = Description of Artificial Sequence: Synthetic oligonucleotide
  source 1..15: mol_type = other DNA
agctatggcatgcac

SEQ ID NO: 5422 - protein, 5 aa, synthetic construct
  REGION 1..5: note = Description of Artificial Sequence: Synthetic peptide
SYGMH

SEQ ID NO: 5423 - DNA, 15 bp, synthetic construct
  misc_feature 1..15: note = Description of Artificial Sequence: Synthetic oligonucleotide
  source 1..15: mol_type = other DNA
aattatgatatcaac

SEQ ID NO: 5424 - protein, 5 aa, synthetic construct
  REGION 1..5: note = Description of Artificial Sequence: Synthetic peptide
NYDIN

SEQ ID NO: 5425 - DNA, 15 bp, synthetic construct
  misc_feature 1..15: note = Description of Artificial Sequence: Synthetic oligonucleotide
  source 1..15: mol_type = other DNA
agctatagcatgaac

SEQ ID NO: 5426 - protein, 5 aa, synthetic construct
  REGION 1..5: note = Description of Artificial Sequence: Synthetic peptide
SYSMN

SEQ ID NO: 5427 - DNA, 15 bp, synthetic construct
  misc_feature 1..15: note = Description of Artificial Sequence: Synthetic oligonucleotide
  source 1..15: mol_type = other DNA
agctatgccatgagc

SEQ ID NO: 5428 - protein, 5 aa, synthetic construct
  REGION 1..5: note = Description of Artificial Sequence: Synthetic peptide
SYAMS

SEQ ID NO: 5429 - DNA, 15 bp, synthetic construct
  misc_feature 1..15: note = Description of Artificial Sequence: Synthetic oligonucleotide
  source 1..15: mol_type = other DNA
agctatagcatgaac

SEQ ID NO: 5430 - protein, 5 aa, synthetic construct
  REGION 1..5: note = Description of Artificial Sequence: Synthetic peptide
SYSMN

SEQ ID NO: 5431 - DNA, 15 bp, synthetic construct
  misc_feature 1..15: note = Description of Artificial Sequence: Synthetic oligonucleotide
  source 1..15: mol_type = other DNA
ggctaccatatgcac

SEQ ID NO: 5432 - protein, 5 aa, synthetic construct
  REGION 1..5: note = Description of Artificial Sequence: Synthetic peptide
GYHMH

SEQ ID NO: 5433 - DNA, 15 bp, synthetic construct
  misc_feature 1..15: note = Description of Artificial Sequence: Synthetic oligonucleotide
  source 1..15: mol_type = other DNA
agctatggcatgcac

SEQ ID NO: 5434 - protein, 5 aa, synthetic construct
  REGION 1..5: note = Description of Artificial Sequence: Synthetic peptide
SYGMH

SEQ ID NO: 5435 - DNA, 15 bp, synthetic construct
  misc_feature 1..15: note = Description of Artificial Sequence: Synthetic oligonucleotide
  source 1..15: mol_type = other DNA
gactaccatatgcac

SEQ ID NO: 5436 - protein, 5 aa, synthetic construct
  REGION 1..5: note = Description of Artificial Sequence: Synthetic peptide
DYHMH

SEQ ID NO: 5437 - DNA, 15 bp, synthetic construct
  misc_feature 1..15: note = Description of Artificial Sequence: Synthetic oligonucleotide
  source 1..15: mol_type = other DNA
gactactatatgcac

SEQ ID NO: 5438 - protein, 5 aa, synthetic construct
  REGION 1..5: note = Description of Artificial Sequence: Synthetic peptide
DYYMH

SEQ ID NO: 5439 - DNA, 15 bp, synthetic construct
  misc_feature 1..15: note = Description of Artificial Sequence: Synthetic oligonucleotide
  source 1..15: mol_type = other DNA
ggccactatataaac

SEQ ID NO: 5440 - protein, 5 aa, synthetic construct
  REGION 1..5: note = Description of Artificial Sequence: Synthetic peptide
GHYIN

SEQ ID NO: 5441 - DNA, 15 bp, synthetic construct
  misc_feature 1..15: note = Description of Artificial Sequence: Synthetic oligonucleotide
  source 1..15: mol_type = other DNA
aactatggcatgcac

SEQ ID NO: 5442 - protein, 5 aa, synthetic construct
  REGION 1..5: note = Description of Artificial Sequence: Synthetic peptide
NYGMH

SEQ ID NO: 5443 - DNA, 15 bp, synthetic construct
  misc_feature 1..15: note = Description of Artificial Sequence: Synthetic oligonucleotide
  source 1..15: mol_type = other DNA
agctatggcatgcac

SEQ ID NO: 5444 - protein, 5 aa, synthetic construct
  REGION 1..5: note = Description of Artificial Sequence: Synthetic peptide
SYGMH

SEQ ID NO: 5445 - DNA, 15 bp, synthetic construct
  misc_feature 1..15: note = Description of Artificial Sequence: Synthetic oligonucleotide
  source 1..15: mol_type = other DNA
gactatggcatgcac

SEQ ID NO: 5446 - protein, 5 aa, synthetic construct
  REGION 1..5: note = Description of Artificial Sequence: Synthetic peptide
DYGMH

SEQ ID NO: 5447 - DNA, 15 bp, synthetic construct
  misc_feature 1..15: note = Description of Artificial Sequence: Synthetic oligonucleotide
  source 1..15: mol_type = other DNA
agttatggcatgcac

SEQ ID NO: 5448 - protein, 5 aa, synthetic construct
  REGION 1..5: note = Description of Artificial Sequence: Synthetic peptide
SYGMH

SEQ ID NO: 5449 - DNA, 15 bp, synthetic construct
  misc_feature 1..15: note = Description of Artificial Sequence: Synthetic oligonucleotide
  source 1..15: mol_type = other DNA
agctatggcatgcac

SEQ ID NO: 5450 - protein, 5 aa, synthetic construct
  REGION 1..5: note = Description of Artificial Sequence: Synthetic peptide
SYGMH

SEQ ID NO: 5451 - DNA, 15 bp, synthetic construct
  misc_feature 1..15: note = Description of Artificial Sequence: Synthetic oligonucleotide
  source 1..15: mol_type = other DNA
ggccactatatacac

SEQ ID NO: 5452 - protein, 5 aa, synthetic construct
  REGION 1..5: note = Description of Artificial Sequence: Synthetic peptide
GHYIH

SEQ ID NO: 5453 - DNA, 15 bp, synthetic construct
  misc_feature 1..15: note = Description of Artificial Sequence: Synthetic oligonucleotide
  source 1..15: mol_type = other DNA
aattatgatatcaac

SEQ ID NO: 5454 - protein, 5 aa, synthetic construct
  REGION 1..5: note = Description of Artificial Sequence: Synthetic peptide
NYDIN

SEQ ID NO: 5455 - DNA, 15 bp, synthetic construct
  misc_feature 1..15: note = Description of Artificial Sequence: Synthetic oligonucleotide
  source 1..15: mol_type = other DNA
agctatgtcatgagc

SEQ ID NO: 5456 - protein, 5 aa, synthetic construct
  REGION 1..5: note = Description of Artificial Sequence: Synthetic peptide
SYVMS

SEQ ID NO: 5457 - DNA, 15 bp, synthetic construct
  misc_feature 1..15: note = Description of Artificial Sequence: Synthetic oligonucleotide
  source 1..15: mol_type = other DNA
agctatgtcatgagc

SEQ ID NO: 5458 - protein, 5 aa, synthetic construct
  REGION 1..5: note = Description of Artificial Sequence: Synthetic peptide
SYVMS

SEQ ID NO: 5459 - DNA, 21 bp, synthetic construct
  misc_feature 1..21: note = Description of Artificial Sequence: Synthetic oligonucleotide
  source 1..21: mol_type = other DNA
aggagtagttactactggggc

SEQ ID NO: 5460 - protein, 7 aa, synthetic construct
  REGION 1..7: note = Description of Artificial Sequence: Synthetic peptide
RSSYYWG

SEQ ID NO: 5461 - DNA, 15 bp, synthetic construct
  misc_feature 1..15: note = Description of Artificial Sequence: Synthetic oligonucleotide
  source 1..15: mol_type = other DNA
agctatgccatgagc

SEQ ID NO: 5462 - protein, 5 aa, synthetic construct
  REGION 1..5: note = Description of Artificial Sequence: Synthetic peptide
SYAMS

SEQ ID NO: 5463 - DNA, 15 bp, synthetic construct
  misc_feature 1..15: note = Description of Artificial Sequence: Synthetic oligonucleotide
  source 1..15: mol_type = other DNA
aactatgccatgacc

SEQ ID NO: 5464 - protein, 5 aa, synthetic construct
  REGION 1..5: note = Description of Artificial Sequence: Synthetic peptide
NYAMT

SEQ ID NO: 5465 - DNA, 15 bp, synthetic construct
  misc_feature 1..15: note = Description of Artificial Sequence: Synthetic oligonucleotide
  source 1..15: mol_type = other DNA
agctatggcatgcac

SEQ ID NO: 5466 - protein, 5 aa, synthetic construct
  REGION 1..5: note = Description of Artificial Sequence: Synthetic peptide
SYGMH

SEQ ID NO: 5467 - DNA, 15 bp, synthetic construct
  misc_feature 1..15: note = Description of Artificial Sequence: Synthetic oligonucleotide
  source 1..15: mol_type = other DNA
agttacttctggagc

SEQ ID NO: 5468 - protein, 5 aa, synthetic construct
  REGION 1..5: note = Description of Artificial Sequence: Synthetic peptide
SYFWS

SEQ ID NO: 5469 - DNA, 15 bp, synthetic construct
  misc_feature 1..15: note = Description of Artificial Sequence: Synthetic oligonucleotide
  source 1..15: mol_type = other DNA
agtcacttctggagc

SEQ ID NO: 5470 - protein, 5 aa, synthetic construct
  REGION 1..5: note = Description of Artificial Sequence: Synthetic peptide
SHFWS

SEQ ID NO: 5471 - DNA, 15 bp, synthetic construct
  misc_feature 1..15: note = Description of Artificial Sequence: Synthetic oligonucleotide
  source 1..15: mol_type = other DNA
gactatggcatgcac

SEQ ID NO: 5472 - protein, 5 aa, synthetic construct
  REGION 1..5: note = Description of Artificial Sequence: Synthetic peptide
DYGMH

SEQ ID NO: 5473 - DNA, 15 bp, synthetic construct
  misc_feature 1..15: note = Description of Artificial Sequence: Synthetic oligonucleotide
  source 1..15: mol_type = other DNA
agctatggcatgcac

SEQ ID NO: 5474 - protein, 5 aa, synthetic construct
  REGION 1..5: note = Description of Artificial Sequence: Synthetic peptide
SYGMH

SEQ ID NO: 5475 - DNA, 15 bp, synthetic construct
  misc_feature 1..15: note = Description of Artificial Sequence: Synthetic oligonucleotide
  source 1..15: mol_type = other DNA
agctatggcatgcac

SEQ ID NO: 5476 - protein, 5 aa, synthetic construct
  REGION 1..5: note = Description of Artificial Sequence: Synthetic peptide
SYGMH

SEQ ID NO: 5477 - DNA, 15 bp, synthetic construct
  misc_feature 1..15: note = Description of Artificial Sequence: Synthetic oligonucleotide
  source 1..15: mol_type = other DNA
aattatgatatcaac

SEQ ID NO: 5478 - protein, 5 aa, synthetic construct
  REGION 1..5: note = Description of Artificial Sequence: Synthetic peptide
NYDIN

SEQ ID NO: 5479 - DNA, 15 bp, synthetic construct
  misc_feature 1..15: note = Description of Artificial Sequence: Synthetic oligonucleotide
  source 1..15: mol_type = other DNA
aattatgatatcaac

SEQ ID NO: 5480 - protein, 5 aa, synthetic construct
  REGION 1..5: note = Description of Artificial Sequence: Synthetic peptide
NYDIN

SEQ ID NO: 5481 - DNA, 15 bp, synthetic construct
  misc_feature 1..15: note = Description of Artificial Sequence: Synthetic oligonucleotide
  source 1..15: mol_type = other DNA
agctatgccatgagt

SEQ ID NO: 5482 - protein, 5 aa, synthetic construct
  REGION 1..5: note = Description of Artificial Sequence: Synthetic peptide
SYAMS

SEQ ID NO: 5483 - DNA, 15 bp, synthetic construct
  misc_feature 1..15: note = Description of Artificial Sequence: Synthetic oligonucleotide
  source 1..15: mol_type = other DNA
agctatgccatgagc

SEQ ID NO: 5484 - protein, 5 aa, synthetic construct
  REGION 1..5: note = Description of Artificial Sequence: Synthetic peptide
SYAMS

SEQ ID NO: 5485 - DNA, 15 bp, synthetic construct
  misc_feature 1..15: note = Description of Artificial Sequence: Synthetic oligonucleotide
  source 1..15: mol_type = other DNA
agctatagcatgaac

SEQ ID NO: 5486 - protein, 5 aa, synthetic construct
  REGION 1..5: note = Description of Artificial Sequence: Synthetic peptide
SYSMN

SEQ ID NO: 5487 - DNA, 15 bp, synthetic construct
  misc_feature 1..15: note = Description of Artificial Sequence: Synthetic oligonucleotide
  source 1..15: mol_type = other DNA
agctatggcatgcac

SEQ ID NO: 5488 - protein, 5 aa, synthetic construct
  REGION 1..5: note = Description of Artificial Sequence: Synthetic peptide
SYGMH

SEQ ID NO: 5489 - DNA, 15 bp, synthetic construct
  misc_feature 1..15: note = Description of Artificial Sequence: Synthetic oligonucleotide
  source 1..15: mol_type = other DNA
agctatggcatgcac

SEQ ID NO: 5490 - protein, 5 aa, synthetic construct
  REGION 1..5: note = Description of Artificial Sequence: Synthetic peptide
SYGMH

SEQ ID NO: 5491 - DNA, 21 bp, synthetic construct
  misc_feature 1..21: note = Description of Artificial Sequence: Synthetic oligonucleotide
  source 1..21: mol_type = other DNA
agaagtagttactactggggc

SEQ ID NO: 5492 - protein, 7 aa, synthetic construct
  REGION 1..7: note = Description of Artificial Sequence: Synthetic peptide
RSSYYWG

SEQ ID NO: 5493 - DNA, 15 bp, synthetic construct
  misc_feature 1..15: note = Description of Artificial Sequence: Synthetic oligonucleotide
  source 1..15: mol_type = other DNA
agctatagcatgaac

SEQ ID NO: 5494 - protein, 5 aa, synthetic construct
  REGION 1..5: note = Description of Artificial Sequence: Synthetic peptide
SYSMN

SEQ ID NO: 5495 - DNA, 15 bp, synthetic construct
  misc_feature 1..15: note = Description of Artificial Sequence: Synthetic oligonucleotide
  source 1..15: mol_type = other DNA
gactatggcatgcac

SEQ ID NO: 5496 - protein, 5 aa, synthetic construct
  REGION 1..5: note = Description of Artificial Sequence: Synthetic peptide
DYGMH

SEQ ID NO: 5497 - DNA, 15 bp, synthetic construct
  misc_feature 1..15: note = Description of Artificial Sequence: Synthetic oligonucleotide
  source 1..15: mol_type = other DNA
tcctatggcatgcac

SEQ ID NO: 5498 - protein, 5 aa, synthetic construct
  REGION 1..5: note = Description of Artificial Sequence: Synthetic peptide
SYGMH

SEQ ID NO: 5499 - DNA, 15 bp, synthetic construct
  misc_feature 1..15: note = Description of Artificial Sequence: Synthetic oligonucleotide
  source 1..15: mol_type = other DNA
agctatgttatgagc

SEQ ID NO: 5500 - protein, 5 aa, synthetic construct
  REGION 1..5: note = Description of Artificial Sequence: Synthetic peptide
SYVMS

SEQ ID NO: 5501 - DNA, 15 bp, synthetic construct
  misc_feature 1..15: note = Description of Artificial Sequence: Synthetic oligonucleotide
  source 1..15: mol_type = other DNA
ggctactatatgcac

SEQ ID NO: 5502 - protein, 5 aa, synthetic construct
  REGION 1..5: note = Description of Artificial Sequence: Synthetic peptide
GYYMH

SEQ ID NO: 5503 - DNA, 15 bp, synthetic construct
  misc_feature 1..15: note = Description of Artificial Sequence: Synthetic oligonucleotide
  source 1..15: mol_type = other DNA
agctatgtcttaaac

SEQ ID NO: 5504 - protein, 5 aa, synthetic construct
  REGION 1..5: note = Description of Artificial Sequence: Synthetic peptide
SYVLN

SEQ ID NO: 5505 - DNA, 15 bp, synthetic construct
  misc_feature 1..15: note = Description of Artificial Sequence: Synthetic oligonucleotide
  source 1..15: mol_type = other DNA
agctatagcatgaac

SEQ ID NO: 5506 - protein, 5 aa, synthetic construct
  REGION 1..5: note = Description of Artificial Sequence: Synthetic peptide
SYSMN

SEQ ID NO: 5507 - DNA, 15 bp, synthetic construct
  misc_feature 1..15: note = Description of Artificial Sequence: Synthetic oligonucleotide
  source 1..15: mol_type = other DNA
agctatagcatgaac

SEQ ID NO: 5508 - protein, 5 aa, synthetic construct
  REGION 1..5: note = Description of Artificial Sequence: Synthetic peptide
SYSMN

SEQ ID NO: 5509 - DNA, 15 bp, synthetic construct
  misc_feature 1..15: note = Description of Artificial Sequence: Synthetic oligonucleotide
  source 1..15: mol_type = other DNA
agttactactggagc

SEQ ID NO: 5510 - protein, 5 aa, synthetic construct
  REGION 1..5: note = Description of Artificial Sequence: Synthetic peptide
SYYWS

SEQ ID NO: 5511 - DNA, 15 bp, synthetic construct
  misc_feature 1..15: note = Description of Artificial Sequence: Synthetic oligonucleotide
  source 1..15: mol_type = other DNA
agctatggcatgcac

SEQ ID NO: 5512 - protein, 5 aa, synthetic construct
  REGION 1..5: note = Description of Artificial Sequence: Synthetic peptide
SYGMH

SEQ ID NO: 5513 - DNA, 15 bp, synthetic construct
  misc_feature 1..15: note = Description of Artificial Sequence: Synthetic oligonucleotide
  source 1..15: mol_type = other DNA
gactatggcatgcac

SEQ ID NO: 5514 - protein, 5 aa, synthetic construct
  REGION 1..5: note = Description of Artificial Sequence: Synthetic peptide
DYGMH

SEQ ID NO: 5515 - DNA, 15 bp, synthetic construct
  misc_feature 1..15: note = Description of Artificial Sequence: Synthetic oligonucleotide
  source 1..15: mol_type = other DNA
agctatgccatgagc

SEQ ID NO: 5516 - protein, 5 aa, synthetic construct
  REGION 1..5: note = Description of Artificial Sequence: Synthetic peptide
SYAMS

SEQ ID NO: 5517 - DNA, 15 bp, synthetic construct
  misc_feature 1..15: note = Description of Artificial Sequence: Synthetic oligonucleotide
  source 1..15: mol_type = other DNA
gactactacatgaac

SEQ ID NO: 5518 - protein, 5 aa, synthetic construct
  REGION 1..5: note = Description of Artificial Sequence: Synthetic peptide
DYYMN

SEQ ID NO: 5519 - DNA, 15 bp, synthetic construct
  misc_feature 1..15: note = Description of Artificial Sequence: Synthetic oligonucleotide
  source 1..15: mol_type = other DNA
ggctaccatatacac

SEQ ID NO: 5520 - protein, 5 aa, synthetic construct
  REGION 1..5: note = Description of Artificial Sequence: Synthetic peptide
GYHIH

SEQ ID NO: 5521 - DNA, 15 bp, synthetic construct
  misc_feature 1..15: note = Description of Artificial Sequence: Synthetic oligonucleotide
  source 1..15: mol_type = other DNA
agctatgccatgagc

SEQ ID NO: 5522 - protein, 5 aa, synthetic construct
  REGION 1..5: note = Description of Artificial Sequence: Synthetic peptide
SYAMS

SEQ ID NO: 5523 - DNA, 15 bp, synthetic construct
  misc_feature 1..15: note = Description of Artificial Sequence: Synthetic oligonucleotide
  source 1..15: mol_type = other DNA
agctatgccatgagc

SEQ ID NO: 5524 - protein, 5 aa, synthetic construct
  REGION 1..5: note = Description of Artificial Sequence: Synthetic peptide
SYAMS

SEQ ID NO: 5525 - DNA, 15 bp, synthetic construct
  misc_feature 1..15: note = Description of Artificial Sequence: Synthetic oligonucleotide
  source 1..15: mol_type = other DNA
aactatgccatgagc

SEQ ID NO: 5526 - protein, 5 aa, synthetic construct
  REGION 1..5: note = Description of Artificial Sequence: Synthetic peptide
NYAMS

SEQ ID NO: 5527 - DNA, 15 bp, synthetic construct
  misc_feature 1..15: note = Description of Artificial Sequence: Synthetic oligonucleotide
  source 1..15: mol_type = other DNA
aattatgatatcaac

SEQ ID NO: 5528 - protein, 5 aa, synthetic construct
  REGION 1..5: note = Description of Artificial Sequence: Synthetic peptide
NYDIN

SEQ ID NO: 5529 - DNA, 15 bp, synthetic construct
  misc_feature 1..15: note = Description of Artificial Sequence: Synthetic oligonucleotide
  source 1..15: mol_type = other DNA
aattatgatatcaac

SEQ ID NO: 5530 - protein, 5 aa, synthetic construct
  REGION 1..5: note = Description of Artificial Sequence: Synthetic peptide
NYDIN

SEQ ID NO: 5531 - DNA, 15 bp, synthetic construct
  misc_feature 1..15: note = Description of Artificial Sequence: Synthetic oligonucleotide
  source 1..15: mol_type = other DNA
agctacgccatgagc

SEQ ID NO: 5532 - protein, 5 aa, synthetic construct
  REGION 1..5: note = Description of Artificial Sequence: Synthetic peptide
SYAMS

SEQ ID NO: 5533 - DNA, 15 bp, synthetic construct
  misc_feature 1..15: note = Description of Artificial Sequence: Synthetic oligonucleotide
  source 1..15: mol_type = other DNA
agctacgccatgagc

SEQ ID NO: 5534 - protein, 5 aa, synthetic construct
  REGION 1..5: note = Description of Artificial Sequence: Synthetic peptide
SYAMS

SEQ ID NO: 5535 - DNA, 15 bp, synthetic construct
  misc_feature 1..15: note = Description of Artificial Sequence: Synthetic oligonucleotide
  source 1..15: mol_type = other DNA
gactatggcatgcac

SEQ ID NO: 5536 - protein, 5 aa, synthetic construct
  REGION 1..5: note = Description of Artificial Sequence: Synthetic peptide
DYGMH

SEQ ID NO: 5537 - DNA, 15 bp, synthetic construct
  misc_feature 1..15: note = Description of Artificial Sequence: Synthetic oligonucleotide
  source 1..15: mol_type = other DNA
aattatgatatcaac

SEQ ID NO: 5538 - protein, 5 aa, synthetic construct
  REGION 1..5: note = Description of Artificial Sequence: Synthetic peptide
NYDIN

SEQ ID NO: 5539 - DNA, 15 bp, synthetic construct
  misc_feature 1..15: note = Description of Artificial Sequence: Synthetic oligonucleotide
  source 1..15: mol_type = other DNA
agctatgccatgagc

SEQ ID NO: 5540 - protein, 5 aa, synthetic construct
  REGION 1..5: note = Description of Artificial Sequence: Synthetic peptide
SYAMS

SEQ ID NO: 5541 - DNA, 15 bp, synthetic construct
  misc_feature 1..15: note = Description of Artificial Sequence: Synthetic oligonucleotide
  source 1..15: mol_type = other DNA
gactatgacatacac

SEQ ID NO: 5542 - protein, 5 aa, synthetic construct
  REGION 1..5: note = Description of Artificial Sequence: Synthetic peptide
DYDIH

SEQ ID NO: 5543 - DNA, 15 bp, synthetic construct
  misc_feature 1..15: note = Description of Artificial Sequence: Synthetic oligonucleotide
  source 1..15: mol_type = other DNA
agctatgccatgagc

SEQ ID NO: 5544 - protein, 5 aa, synthetic construct
  REGION 1..5: note = Description of Artificial Sequence: Synthetic peptide
SYAMS

SEQ ID NO: 5545 - DNA, 15 bp, synthetic construct
  misc_feature 1..15: note = Description of Artificial Sequence: Synthetic oligonucleotide
  source 1..15: mol_type = other DNA
agctatggcatgcac

SEQ ID NO: 5546 - protein, 5 aa, synthetic construct
  REGION 1..5: note = Description of Artificial Sequence: Synthetic peptide
SYGMH

SEQ ID NO: 5547 - DNA, 15 bp, synthetic construct
  misc_feature 1..15: note = Description of Artificial Sequence: Synthetic oligonucleotide
  source 1..15: mol_type = other DNA
aattatgatatcaac

SEQ ID NO: 5548 - protein, 5 aa, synthetic construct
  REGION 1..5: note = Description of Artificial Sequence: Synthetic peptide
NYDIN

SEQ ID NO: 5549 - DNA, 15 bp, synthetic construct
  misc_feature 1..15: note = Description of Artificial Sequence: Synthetic oligonucleotide
  source 1..15: mol_type = other DNA
ggctactatatacac

SEQ ID NO: 5550 - protein, 5 aa, synthetic construct
  REGION 1..5: note = Description of Artificial Sequence: Synthetic peptide
GYYIH

SEQ ID NO: 5551 - DNA, 15 bp, synthetic construct
  misc_feature 1..15: note = Description of Artificial Sequence: Synthetic oligonucleotide
  source 1..15: mol_type = other DNA
agctatgccatgaac

SEQ ID NO: 5552 - protein, 5 aa, synthetic construct
  REGION 1..5: note = Description of Artificial Sequence: Synthetic peptide
SYAMN

SEQ ID NO: 5553 - DNA, 15 bp, synthetic construct
  misc_feature 1..15: note = Description of Artificial Sequence: Synthetic oligonucleotide
  source 1..15: mol_type = other DNA
agctatggcatgcac

SEQ ID NO: 5554 - protein, 5 aa, synthetic construct
  REGION 1..5: note = Description of Artificial Sequence: Synthetic peptide
SYGMH

SEQ ID NO: 5555 - DNA, 21 bp, synthetic construct
  misc_feature 1..21: note = Description of Artificial Sequence: Synthetic oligonucleotide
  source 1..21: mol_type = other DNA
agaagtagttactactggggc

SEQ ID NO: 5556 - protein, 7 aa, synthetic construct
  REGION 1..7: note = Description of Artificial Sequence: Synthetic peptide
RSSYYWG

SEQ ID NO: 5557 - DNA, 15 bp, synthetic construct
  misc_feature 1..15: note = Description of Artificial Sequence: Synthetic oligonucleotide
  source 1..15: mol_type = other DNA
ggccactatatacac

SEQ ID NO: 5558 - protein, 5 aa, synthetic construct
  REGION 1..5: note = Description of Artificial Sequence: Synthetic peptide
GHYIH

SEQ ID NO: 5559 - DNA, 15 bp, synthetic construct
  misc_feature 1..15: note = Description of Artificial Sequence: Synthetic oligonucleotide
  source 1..15: mol_type = other DNA
agctatagcatgaat

SEQ ID NO: 5560 - protein, 5 aa, synthetic construct
  REGION 1..5: note = Description of Artificial Sequence: Synthetic peptide
SYSMN

SEQ ID NO: 5561 - DNA, 15 bp, synthetic construct
  misc_feature 1..15: note = Description of Artificial Sequence: Synthetic oligonucleotide
  source 1..15: mol_type = other DNA
ggcaattatatacac

SEQ ID NO: 5562 - protein, 5 aa, synthetic construct
  REGION 1..5: note = Description of Artificial Sequence: Synthetic peptide
GNYIH

SEQ ID NO: 5563 - DNA, 15 bp, synthetic construct
  misc_feature 1..15: note = Description of Artificial Sequence: Synthetic oligonucleotide
  source 1..15: mol_type = other DNA
aattatgatatcaac

SEQ ID NO: 5564 - protein, 5 aa, synthetic construct
  REGION 1..5: note = Description of Artificial Sequence: Synthetic peptide
NYDIN

SEQ ID NO: 5565 - DNA, 15 bp, synthetic construct
  misc_feature 1..15: note = Description of Artificial Sequence: Synthetic oligonucleotide
  source 1..15: mol_type = other DNA
acctatggcatgcac

SEQ ID NO: 5566 - protein, 5 aa, synthetic construct
  REGION 1..5: note = Description of Artificial Sequence: Synthetic peptide
TYGMH

SEQ ID NO: 5567 - DNA, 15 bp, synthetic construct
  misc_feature 1..15: note = Description of Artificial Sequence: Synthetic oligonucleotide
  source 1..15: mol_type = other DNA
agctatggcatgcac

SEQ ID NO: 5568 - protein, 5 aa, synthetic construct
  REGION 1..5: note = Description of Artificial Sequence: Synthetic peptide
SYGMH

SEQ ID NO: 5569 - DNA, 15 bp, synthetic construct
  misc_feature 1..15: note = Description of Artificial Sequence: Synthetic oligonucleotide
  source 1..15: mol_type = other DNA
agctataacatgaac

SEQ ID NO: 5570 - protein, 5 aa, synthetic construct
  REGION 1..5: note = Description of Artificial Sequence: Synthetic peptide
SYNMN

SEQ ID NO: 5571 - DNA, 15 bp, synthetic construct
  misc_feature 1..15: note = Description of Artificial Sequence: Synthetic oligonucleotide
  source 1..15: mol_type = other DNA
ggctactatatgcac

SEQ ID NO: 5572 - protein, 5 aa, synthetic construct
  REGION 1..5: note = Description of Artificial Sequence: Synthetic peptide
GYYMH

SEQ ID NO: 5573 - DNA, 15 bp, synthetic construct
  misc_feature 1..15: note = Description of Artificial Sequence: Synthetic oligonucleotide
  source 1..15: mol_type = other DNA
agctatggcatgcac

SEQ ID NO: 5574 - protein, 5 aa, synthetic construct
  REGION 1..5: note = Description of Artificial Sequence: Synthetic peptide
SYGMH

SEQ ID NO: 5575 - DNA, 15 bp, synthetic construct
  misc_feature 1..15: note = Description of Artificial Sequence: Synthetic oligonucleotide
  source 1..15: mol_type = other DNA
agctatggcatgcac

SEQ ID NO: 5576 - protein, 5 aa, synthetic construct
  REGION 1..5: note = Description of Artificial Sequence: Synthetic peptide
SYGMH

SEQ ID NO: 5577 - DNA, 15 bp, synthetic construct
  misc_feature 1..15: note = Description of Artificial Sequence: Synthetic oligonucleotide
  source 1..15: mol_type = other DNA
gattatgtcatgcac

SEQ ID NO: 5578 - protein, 5 aa, synthetic construct
  REGION 1..5: note = Description of Artificial Sequence: Synthetic peptide
DYVMH

SEQ ID NO: 5579 - DNA, 15 bp, synthetic construct
  misc_feature 1..15: note = Description of Artificial Sequence: Synthetic oligonucleotide
  source 1..15: mol_type = other DNA
agttacttctggagc

SEQ ID NO: 5580 - protein, 5 aa, synthetic construct
  REGION 1..5: note = Description of Artificial Sequence: Synthetic peptide
SYFWS

SEQ ID NO: 5581 - DNA, 15 bp, synthetic construct
  misc_feature 1..15: note = Description of Artificial Sequence: Synthetic oligonucleotide
  source 1..15: mol_type = other DNA
gactatgtcatgcac

SEQ ID NO: 5582 - protein, 5 aa, synthetic construct
  REGION 1..5: note = Description of Artificial Sequence: Synthetic peptide
DYVMH

SEQ ID NO: 5583 - DNA, 15 bp, synthetic construct
  misc_feature 1..15: note = Description of Artificial Sequence: Synthetic oligonucleotide
  source 1..15: mol_type = other DNA
acctatggcatgcac

SEQ ID NO: 5584 - protein, 5 aa, synthetic construct
  REGION 1..5: note = Description of Artificial Sequence: Synthetic peptide
TYGMH

SEQ ID NO: 5585 - DNA, 15 bp, synthetic construct
  misc_feature 1..15: note = Description of Artificial Sequence: Synthetic oligonucleotide
  source 1..15: mol_type = other DNA
ggctactatatgcac

SEQ ID NO: 5586 - protein, 5 aa, synthetic construct
  REGION 1..5: note = Description of Artificial Sequence: Synthetic peptide
GYYMH

SEQ ID NO: 5587 - DNA, 15 bp, synthetic construct
  misc_feature 1..15: note = Description of Artificial Sequence: Synthetic oligonucleotide
  source 1..15: mol_type = other DNA
agctatggcatgcac

SEQ ID NO: 5588 - protein, 5 aa, synthetic construct
  REGION 1..5: note = Description of Artificial Sequence: Synthetic peptide
SYGMH

SEQ ID NO: 5589 - DNA, 21 bp, synthetic construct
  misc_feature 1..21: note = Description of Artificial Sequence: Synthetic oligonucleotide
  source 1..21: mol_type = other DNA
agaagtagttactactggggc

SEQ ID NO: 5590 - protein, 7 aa, synthetic construct
  REGION 1..7: note = Description of Artificial Sequence: Synthetic peptide
RSSYYWG

SEQ ID NO: 5591 - DNA, 15 bp, synthetic construct
  misc_feature 1..15: note = Description of Artificial Sequence: Synthetic oligonucleotide
  source 1..15: mol_type = other DNA
agtaatgccatgagc

SEQ ID NO: 5592 - protein, 5 aa, synthetic construct
  REGION 1..5: note = Description of Artificial Sequence: Synthetic peptide
SNAMS

SEQ ID NO: 5593 - DNA, 15 bp, synthetic construct
  misc_feature 1..15: note = Description of Artificial Sequence: Synthetic oligonucleotide
  source 1..15: mol_type = other DNA
gactatggcatgcac

SEQ ID NO: 5594 - protein, 5 aa, synthetic construct
  REGION 1..5: note = Description of Artificial Sequence: Synthetic peptide
DYGMH

SEQ ID NO: 5595 - DNA, 15 bp, synthetic construct
  misc_feature 1..15: note = Description of Artificial Sequence: Synthetic oligonucleotide
  source 1..15: mol_type = other DNA
ggctactatatacac

SEQ ID NO: 5596 - protein, 5 aa, synthetic construct
  REGION 1..5: note = Description of Artificial Sequence: Synthetic peptide
GYYIH

SEQ ID NO: 5597 - DNA, 15 bp, synthetic construct
  misc_feature 1..15: note = Description of Artificial Sequence: Synthetic oligonucleotide
  source 1..15: mol_type = other DNA
agctatggtatcagt

SEQ ID NO: 5598 - protein, 5 aa, synthetic construct
  REGION 1..5: note = Description of Artificial Sequence: Synthetic peptide
SYGIS

SEQ ID NO: 5599 - DNA, 15 bp, synthetic construct
  misc_feature 1..15: note = Description of Artificial Sequence: Synthetic oligonucleotide
  source 1..15: mol_type = other DNA
aactatggcatgcac

SEQ ID NO: 5600 - protein, 5 aa, synthetic construct
  REGION 1..5: note = Description of Artificial Sequence: Synthetic peptide
NYGMH

SEQ ID NO: 5601 - DNA, 15 bp, synthetic construct
  misc_feature 1..15: note = Description of Artificial Sequence: Synthetic oligonucleotide
  source 1..15: mol_type = other DNA
agctataggatgaac

SEQ ID NO: 5602 - protein, 5 aa, synthetic construct
  REGION 1..5: note = Description of Artificial Sequence: Synthetic peptide
SYRMN

SEQ ID NO: 5603 - DNA, 15 bp, synthetic construct
  misc_feature 1..15: note = Description of Artificial Sequence: Synthetic oligonucleotide
  source 1..15: mol_type = other DNA
ggctactatatgcac

SEQ ID NO: 5604 - protein, 5 aa, synthetic construct
  REGION 1..5: note = Description of Artificial Sequence: Synthetic peptide
GYYMH

SEQ ID NO: 5605 - DNA, 15 bp, synthetic construct
  misc_feature 1..15: note = Description of Artificial Sequence: Synthetic oligonucleotide
  source 1..15: mol_type = other DNA
ggctactatatgcac

SEQ ID NO: 5606 - protein, 5 aa, synthetic construct
  REGION 1..5: note = Description of Artificial Sequence: Synthetic peptide
GYYMH

SEQ ID NO: 5607 - DNA, 15 bp, synthetic construct
  misc_feature 1..15: note = Description of Artificial Sequence: Synthetic oligonucleotide
  source 1..15: mol_type = other DNA
gactatggcatgcac

SEQ ID NO: 5608 - protein, 5 aa, synthetic construct
  REGION 1..5: note = Description of Artificial Sequence: Synthetic peptide
DYGMH

SEQ ID NO: 5609 - DNA, 15 bp, synthetic construct
  misc_feature 1..15: note = Description of Artificial Sequence: Synthetic oligonucleotide
  source 1..15: mol_type = other DNA
agctatggcatgcac

SEQ ID NO: 5610 - protein, 5 aa, synthetic construct
  REGION 1..5: note = Description of Artificial Sequence: Synthetic peptide
SYGMH

SEQ ID NO: 5611 - DNA, 15 bp, synthetic construct
  misc_feature 1..15: note = Description of Artificial Sequence: Synthetic oligonucleotide
  source 1..15: mol_type = other DNA
agctatagcatgaac

SEQ ID NO: 5612 - protein, 5 aa, synthetic construct
  REGION 1..5: note = Description of Artificial Sequence: Synthetic peptide
SYSMN

SEQ ID NO: 5613 - DNA, 15 bp, synthetic construct
  misc_feature 1..15: note = Description of Artificial Sequence: Synthetic oligonucleotide
  source 1..15: mol_type = other DNA
agctatgttatgagc

SEQ ID NO: 5614 - protein, 5 aa, synthetic construct
  REGION 1..5: note = Description of Artificial Sequence: Synthetic peptide
SYVMS

SEQ ID NO: 5615 - DNA, 15 bp, synthetic construct
  misc_feature 1..15: note = Description of Artificial Sequence: Synthetic oligonucleotide
  source 1..15: mol_type = other DNA
agttatggcatgcac

SEQ ID NO: 5616 - protein, 5 aa, synthetic construct
  REGION 1..5: note = Description of Artificial Sequence: Synthetic peptide
SYGMH

SEQ ID NO: 5617 - DNA, 15 bp, synthetic construct
  misc_feature 1..15: note = Description of Artificial Sequence: Synthetic oligonucleotide
  source 1..15: mol_type = other DNA
ggctaccatatgcac

SEQ ID NO: 5618 - protein, 5 aa, synthetic construct
  REGION 1..5: note = Description of Artificial Sequence: Synthetic peptide
GYHMH

SEQ ID NO: 5619 - DNA, 15 bp, synthetic construct
  misc_feature 1..15: note = Description of Artificial Sequence: Synthetic oligonucleotide
  source 1..15: mol_type = other DNA
agttatggcatgcac

SEQ ID NO: 5620 - protein, 5 aa, synthetic construct
  REGION 1..5: note = Description of Artificial Sequence: Synthetic peptide
SYGMH

SEQ ID NO: 5621 - DNA, 15 bp, synthetic construct
  misc_feature 1..15: note = Description of Artificial Sequence: Synthetic oligonucleotide
  source 1..15: mol_type = other DNA
ggctactatatgcac

SEQ ID NO: 5622 - protein, 5 aa, synthetic construct
  REGION 1..5: note = Description of Artificial Sequence: Synthetic peptide
GYYMH

SEQ ID NO: 5623 - DNA, 15 bp, synthetic construct
  misc_feature 1..15: note = Description of Artificial Sequence: Synthetic oligonucleotide
  source 1..15: mol_type = other DNA
aactatggcatgcac

SEQ ID NO: 5624 - protein, 5 aa, synthetic construct
  REGION 1..5: note = Description of Artificial Sequence: Synthetic peptide
NYGMH

SEQ ID NO: 5625 - DNA, 15 bp, synthetic construct
  misc_feature 1..15: note = Description of Artificial Sequence: Synthetic oligonucleotide
  source 1..15: mol_type = other DNA
agctttggcatgaac

SEQ ID NO: 5626 - protein, 5 aa, synthetic construct
  REGION 1..5: note = Description of Artificial Sequence: Synthetic peptide
SFGMN

SEQ ID NO: 5627 - DNA, 15 bp, synthetic construct
  misc_feature 1..15: note = Description of Artificial Sequence: Synthetic oligonucleotide
  source 1..15: mol_type = other DNA
agctatagcatgaac

SEQ ID NO: 5628 - protein, 5 aa, synthetic construct
  REGION 1..5: note = Description of Artificial Sequence: Synthetic peptide
SYSMN

SEQ ID NO: 5629 - DNA, 15 bp, synthetic construct
  misc_feature 1..15: note = Description of Artificial Sequence: Synthetic oligonucleotide
  source 1..15: mol_type = other DNA
gactatggcatgcac

SEQ ID NO: 5630 - protein, 5 aa, synthetic construct
  REGION 1..5: note = Description of Artificial Sequence: Synthetic peptide
DYGMH

SEQ ID NO: 5631 - DNA, 21 bp, synthetic construct
  misc_feature 1..21: note = Description of Artificial Sequence: Synthetic oligonucleotide
  source 1..21: mol_type = other DNA
agaagtagttactactggggc

SEQ ID NO: 5632 - protein, 7 aa, synthetic construct
  REGION 1..7: note = Description of Artificial Sequence: Synthetic peptide
RSSYYWG

SEQ ID NO: 5633 - DNA, 15 bp, synthetic construct
  misc_feature 1..15: note = Description of Artificial Sequence: Synthetic oligonucleotide
  source 1..15: mol_type = other DNA
aactatgccatgcac

SEQ ID NO: 5634 - protein, 5 aa, synthetic construct
  REGION 1..5: note = Description of Artificial Sequence: Synthetic peptide
NYAMH

SEQ ID NO: 5635 - DNA, 15 bp, synthetic construct
  misc_feature 1..15: note = Description of Artificial Sequence: Synthetic oligonucleotide
  source 1..15: mol_type = other DNA
ggctaccatatgcac

SEQ ID NO: 5636 - protein, 5 aa, synthetic construct
  REGION 1..5: note = Description of Artificial Sequence: Synthetic peptide
GYHMH

SEQ ID NO: 5637 - DNA, 15 bp, synthetic construct
  misc_feature 1..15: note = Description of Artificial Sequence: Synthetic oligonucleotide
  source 1..15: mol_type = other DNA
agctatggcatgcac

SEQ ID NO: 5638 - protein, 5 aa, synthetic construct
  REGION 1..5: note = Description of Artificial Sequence: Synthetic peptide
SYGMH

SEQ ID NO: 5639 - DNA, 15 bp, synthetic construct
  misc_feature 1..15: note = Description of Artificial Sequence: Synthetic oligonucleotide
  source 1..15: mol_type = other DNA
ggctactatatgcac

SEQ ID NO: 5640 - protein, 5 aa, synthetic construct
  REGION 1..5: note = Description of Artificial Sequence: Synthetic peptide
GYYMH

SEQ ID NO: 5641 - DNA, 15 bp, synthetic construct
  misc_feature 1..15: note = Description of Artificial Sequence: Synthetic oligonucleotide
  source 1..15: mol_type = other DNA
agttatggcatgcac

SEQ ID NO: 5642 - protein, 5 aa, synthetic construct
  REGION 1..5: note = Description of Artificial Sequence: Synthetic peptide
SYGMH

SEQ ID NO: 5643 - DNA, 15 bp, synthetic construct
  misc_feature 1..15: note = Description of Artificial Sequence: Synthetic oligonucleotide
  source 1..15: mol_type = other DNA
aattatgatatcaac

SEQ ID NO: 5644 - protein, 5 aa, synthetic construct
  REGION 1..5: note = Description of Artificial Sequence: Synthetic peptide
NYDIN

SEQ ID NO: 5645 - DNA, 15 bp, synthetic construct
  misc_feature 1..15: note = Description of Artificial Sequence: Synthetic oligonucleotide
  source 1..15: mol_type = other DNA
agctatggcatgctc

SEQ ID NO: 5646 - protein, 5 aa, synthetic construct
  REGION 1..5: note = Description of Artificial Sequence: Synthetic peptide
SYGML

SEQ ID NO: 5647 - DNA, 15 bp, synthetic construct
  misc_feature 1..15: note = Description of Artificial Sequence: Synthetic oligonucleotide
  source 1..15: mol_type = other DNA
ggctactatatgcac

SEQ ID NO: 5648 - protein, 5 aa, synthetic construct
  REGION 1..5: note = Description of Artificial Sequence: Synthetic peptide
GYYMH

SEQ ID NO: 5649 - DNA, 15 bp, synthetic construct
  misc_feature 1..15: note = Description of Artificial Sequence: Synthetic oligonucleotide
  source 1..15: mol_type = other DNA
ggctactatatgcac

SEQ ID NO: 5650 - protein, 5 aa, synthetic construct
  REGION 1..5: note = Description of Artificial Sequence: Synthetic peptide
GYYMH

SEQ ID NO: 5651 - DNA, 15 bp, synthetic construct
  misc_feature 1..15: note = Description of Artificial Sequence: Synthetic oligonucleotide
  source 1..15: mol_type = other DNA
agctatagcatgaac

SEQ ID NO: 5652 - protein, 5 aa, synthetic construct
  REGION 1..5: note = Description of Artificial Sequence: Synthetic peptide
SYSMN

SEQ ID NO: 5653 - DNA, 15 bp, synthetic construct
  misc_feature 1..15: note = Description of Artificial Sequence: Synthetic oligonucleotide
  source 1..15: mol_type = other DNA
gactatggcatgcac

SEQ ID NO: 5654 - protein, 5 aa, synthetic construct
  REGION 1..5: note = Description of Artificial Sequence: Synthetic peptide
DYGMH

SEQ ID NO: 5655 - DNA, 15 bp, synthetic construct
  misc_feature 1..15: note = Description of Artificial Sequence: Synthetic oligonucleotide
  source 1..15: mol_type = other DNA
aattatgatatcaac

SEQ ID NO: 5656 - protein, 5 aa, synthetic construct
  REGION 1..5: note = Description of Artificial Sequence: Synthetic peptide
NYDIN

SEQ ID NO: 5657 - DNA, 15 bp, synthetic construct
  misc_feature 1..15: note = Description of Artificial Sequence: Synthetic oligonucleotide
  source 1..15: mol_type = other DNA
aactatggcatgcac

SEQ ID NO: 5658 - protein, 5 aa, synthetic construct
  REGION 1..5: note = Description of Artificial Sequence: Synthetic peptide
NYGMH

SEQ ID NO: 5659 - DNA, 15 bp, synthetic construct
  misc_feature 1..15: note = Description of Artificial Sequence: Synthetic oligonucleotide
  source 1..15: mol_type = other DNA
agctatagcatgaac

SEQ ID NO: 5660 - protein, 5 aa, synthetic construct
  REGION 1..5: note = Description of Artificial Sequence: Synthetic peptide
SYSMN

SEQ ID NO: 5661 - DNA, 15 bp, synthetic construct
  misc_feature 1..15: note = Description of Artificial Sequence: Synthetic oligonucleotide
  source 1..15: mol_type = other DNA
ggctactatatgcac

SEQ ID NO: 5662 - protein, 5 aa, synthetic construct
  REGION 1..5: note = Description of Artificial Sequence: Synthetic peptide
GYYMH

SEQ ID NO: 5663 - DNA, 15 bp, synthetic construct
  misc_feature 1..15: note = Description of Artificial Sequence: Synthetic oligonucleotide
  source 1..15: mol_type = other DNA
gactatggcatgcac

SEQ ID NO: 5664 - protein, 5 aa, synthetic construct
  REGION 1..5: note = Description of Artificial Sequence: Synthetic peptide
DYGMH

SEQ ID NO: 5665 - DNA, 15 bp, synthetic construct
  misc_feature 1..15: note = Description of Artificial Sequence: Synthetic oligonucleotide
  source 1..15: mol_type = other DNA
agctatgccatgatc

SEQ ID NO: 5666 - protein, 5 aa, synthetic construct
  REGION 1..5: note = Description of Artificial Sequence: Synthetic peptide
SYAMI

SEQ ID NO: 5667 - DNA, 15 bp, synthetic construct
  misc_feature 1..15: note = Description of Artificial Sequence: Synthetic oligonucleotide
  source 1..15: mol_type = other DNA
agctatggcatgcac

SEQ ID NO: 5668 - protein, 5 aa, synthetic construct
  REGION 1..5: note = Description of Artificial Sequence: Synthetic peptide
SYGMH

SEQ ID NO: 5669 - DNA, 15 bp, synthetic construct
  misc_feature 1..15: note = Description of Artificial Sequence: Synthetic oligonucleotide
  source 1..15: mol_type = other DNA
ggctactatatgcac

SEQ ID NO: 5670 - protein, 5 aa, synthetic construct
  REGION 1..5: note = Description of Artificial Sequence: Synthetic peptide
GYYMH

SEQ ID NO: 5671 - DNA, 15 bp, synthetic construct
  misc_feature 1..15: note = Description of Artificial Sequence: Synthetic oligonucleotide
  source 1..15: mol_type = other DNA
ggctactatatgcac

SEQ ID NO: 5672 - protein, 5 aa, synthetic construct
  REGION 1..5: note = Description of Artificial Sequence: Synthetic peptide
GYYMH

SEQ ID NO: 5673 - DNA, 15 bp, synthetic construct
  misc_feature 1..15: note = Description of Artificial Sequence: Synthetic oligonucleotide
  source 1..15: mol_type = other DNA
tactatggcatgcac

SEQ ID NO: 5674 - protein, 5 aa, synthetic construct
  REGION 1..5: note = Description of Artificial Sequence: Synthetic peptide
YYGMH

SEQ ID NO: 5675 - DNA, 15 bp, synthetic construct
  misc_feature 1..15: note = Description of Artificial Sequence: Synthetic oligonucleotide
  source 1..15: mol_type = other DNA
agcaatgccatgagc

SEQ ID NO: 5676 - protein, 5 aa, synthetic construct
  REGION 1..5: note = Description of Artificial Sequence: Synthetic peptide
SNAMS

SEQ ID NO: 5677 - DNA, 15 bp, synthetic construct
  misc_feature 1..15: note = Description of Artificial Sequence: Synthetic oligonucleotide
  source 1..15: mol_type = other DNA
aattatgtcatgcac

SEQ ID NO: 5678 - protein, 5 aa, synthetic construct
  REGION 1..5: note = Description of Artificial Sequence: Synthetic peptide
NYVMH

SEQ ID NO: 5679 - DNA, 15 bp, synthetic construct
  misc_feature 1..15: note = Description of Artificial Sequence: Synthetic oligonucleotide
  source 1..15: mol_type = other DNA
ggttcctactggagc

SEQ ID NO: 5680 - protein, 5 aa, synthetic construct
  REGION 1..5: note = Description of Artificial Sequence: Synthetic peptide
GSYWS

SEQ ID NO: 5681 - DNA, 15 bp, synthetic construct
  misc_feature 1..15: note = Description of Artificial Sequence: Synthetic oligonucleotide
  source 1..15: mol_type = other DNA
ggttgctactggagc

SEQ ID NO: 5682 - protein, 5 aa, synthetic construct
  REGION 1..5: note = Description of Artificial Sequence: Synthetic peptide
GCYWS

SEQ ID NO: 5683 - DNA, 15 bp, synthetic construct
  misc_feature 1..15: note = Description of Artificial Sequence: Synthetic oligonucleotide
  source 1..15: mol_type = other DNA
aattatgatatcaac

SEQ ID NO: 5684 - protein, 5 aa, synthetic construct
  REGION 1..5: note = Description of Artificial Sequence: Synthetic peptide
NYDIN

SEQ ID NO: 5685 - DNA, 15 bp, synthetic construct
  misc_feature 1..15: note = Description of Artificial Sequence: Synthetic oligonucleotide
  source 1..15: mol_type = other DNA
aattatgatatcaac

SEQ ID NO: 5686 - protein, 5 aa, synthetic construct
  REGION 1..5: note = Description of Artificial Sequence: Synthetic peptide
NYDIN

SEQ ID NO: 5687 - DNA, 15 bp, synthetic construct
  misc_feature 1..15: note = Description of Artificial Sequence: Synthetic oligonucleotide
  source 1..15: mol_type = other DNA
aattatgatatcaac

SEQ ID NO: 5688 - protein, 5 aa, synthetic construct
  REGION 1..5: note = Description of Artificial Sequence: Synthetic peptide
NYDIN

SEQ ID NO: 5689 - DNA, 15 bp, synthetic construct
  misc_feature 1..15: note = Description of Artificial Sequence: Synthetic oligonucleotide
  source 1..15: mol_type = other DNA
aattatgatatcaac

SEQ ID NO: 5690 - protein, 5 aa, synthetic construct
  REGION 1..5: note = Description of Artificial Sequence: Synthetic peptide
NYDIN

SEQ ID NO: 5691 - DNA, 15 bp, synthetic construct
  misc_feature 1..15: note = Description of Artificial Sequence: Synthetic oligonucleotide
  source 1..15: mol_type = other DNA
aattatgatatcaac

SEQ ID NO: 5692 - protein, 5 aa, synthetic construct
  REGION 1..5: note = Description of Artificial Sequence: Synthetic peptide
NYDIN

SEQ ID NO: 5693 - DNA, 15 bp, synthetic construct
  misc_feature 1..15: note = Description of Artificial Sequence: Synthetic oligonucleotide
  source 1..15: mol_type = other DNA
agctatggcatgcac

SEQ ID NO: 5694 - protein, 5 aa, synthetic construct
  REGION 1..5: note = Description of Artificial Sequence: Synthetic peptide
SYGMH

SEQ ID NO: 5695 - DNA, 15 bp, synthetic construct
  misc_feature 1..15: note = Description of Artificial Sequence: Synthetic oligonucleotide
  source 1..15: mol_type = other DNA
aattatgatatcaac

SEQ ID NO: 5696 - protein, 5 aa, synthetic construct
  REGION 1..5: note = Description of Artificial Sequence: Synthetic peptide
NYDIN

SEQ ID NO: 5697 - DNA, 21 bp, synthetic construct
  misc_feature 1..21: note = Description of Artificial Sequence: Synthetic oligonucleotide
  source 1..21: mol_type = other DNA
agtagtaattactactggggc

SEQ ID NO: 5698 - protein, 7 aa, synthetic construct
  REGION 1..7: note = Description of Artificial Sequence: Synthetic peptide
SSNYYWG

SEQ ID NO: 5699 - DNA, 15 bp, synthetic construct
  misc_feature 1..15: note = Description of Artificial Sequence: Synthetic oligonucleotide
  source 1..15: mol_type = other DNA
aattatgatatcaac

SEQ ID NO: 5700 - protein, 5 aa, synthetic construct
  REGION 1..5: note = Description of Artificial Sequence: Synthetic peptide
NYDIN

SEQ ID NO: 5701 - DNA, 15 bp, synthetic construct
  misc_feature 1..15: note = Description of Artificial Sequence: Synthetic oligonucleotide
  source 1..15: mol_type = other DNA
ggtccctactggagc

SEQ ID NO: 5702 - protein, 5 aa, synthetic construct
  REGION 1..5: note = Description of Artificial Sequence: Synthetic peptide
GPYWS

SEQ ID NO: 5703 - DNA, 15 bp, synthetic construct
  misc_feature 1..15: note = Description of Artificial Sequence: Synthetic oligonucleotide
  source 1..15: mol_type = other DNA
ggttgctactggagc

SEQ ID NO: 5704 - protein, 5 aa, synthetic construct
  REGION 1..5: note = Description of Artificial Sequence: Synthetic peptide
GCYWS

SEQ ID NO: 5705 - DNA, 15 bp, synthetic construct
  misc_feature 1..15: note = Description of Artificial Sequence: Synthetic oligonucleotide
  source 1..15: mol_type = other DNA
ggttgctactggagc

SEQ ID NO: 5706 - protein, 5 aa, synthetic construct
  REGION 1..5: note = Description of Artificial Sequence: Synthetic peptide
GCYWS

SEQ ID NO: 5707 - DNA, 21 bp, synthetic construct
  misc_feature 1..21: note = Description of Artificial Sequence: Synthetic oligonucleotide
  source 1..21: mol_type = other DNA
agaagtagttactactggggc

SEQ ID NO: 5708 - protein, 7 aa, synthetic construct
  REGION 1..7: note = Description of Artificial Sequence: Synthetic peptide
RSSYYWG

SEQ ID NO: 5709 - DNA, 15 bp, synthetic construct
  misc_feature 1..15: note = Description of Artificial Sequence: Synthetic oligonucleotide
  source 1..15: mol_type = other DNA
ggttgctactggagc

SEQ ID NO: 5710 - protein, 5 aa, synthetic construct
  REGION 1..5: note = Description of Artificial Sequence: Synthetic peptide
GCYWS

SEQ ID NO: 5711 - DNA, 15 bp, synthetic construct
  misc_feature 1..15: note = Description of Artificial Sequence: Synthetic oligonucleotide
  source 1..15: mol_type = other DNA
aattatgatatcaac

SEQ ID NO: 5712 - protein, 5 aa, synthetic construct
  REGION 1..5: note = Description of Artificial Sequence: Synthetic peptide
NYDIN

SEQ ID NO: 5713 - DNA, 15 bp, synthetic construct
  misc_feature 1..15: note = Description of Artificial Sequence: Synthetic oligonucleotide
  source 1..15: mol_type = other DNA
aattatgatatcaac

SEQ ID NO: 5714 - protein, 5 aa, synthetic construct
  REGION 1..5: note = Description of Artificial Sequence: Synthetic peptide
NYDIN

SEQ ID NO: 5715 - DNA, 15 bp, synthetic construct
  misc_feature 1..15: note = Description of Artificial Sequence: Synthetic oligonucleotide
  source 1..15: mol_type = other DNA
aattatgatatcaac

SEQ ID NO: 5716 - protein, 5 aa, synthetic construct
  REGION 1..5: note = Description of Artificial Sequence: Synthetic peptide
NYDIN

SEQ ID NO: 5717 - DNA, 15 bp, synthetic construct
  misc_feature 1..15: note = Description of Artificial Sequence: Synthetic oligonucleotide
  source 1..15: mol_type = other DNA
aattatgatatcaac

SEQ ID NO: 5718 - protein, 5 aa, synthetic construct
  REGION 1..5: note = Description of Artificial Sequence: Synthetic peptide
NYDIN

SEQ ID NO: 5719 - DNA, 15 bp, synthetic construct
  misc_feature 1..15: note = Description of Artificial Sequence: Synthetic oligonucleotide
  source 1..15: mol_type = other DNA
ggttgctactggagc

SEQ ID NO: 5720 - protein, 5 aa, synthetic construct
  REGION 1..5: note = Description of Artificial Sequence: Synthetic peptide
GCYWS

SEQ ID NO: 5721 - DNA, 15 bp, synthetic construct
  misc_feature 1..15: note = Description of Artificial Sequence: Synthetic oligonucleotide
  source 1..15: mol_type = other DNA
ggttcctactggagc

SEQ ID NO: 5722 - protein, 5 aa, synthetic construct
  REGION 1..5: note = Description of Artificial Sequence: Synthetic peptide
GSYWS

SEQ ID NO: 5723 - DNA, 15 bp, synthetic construct
  misc_feature 1..15: note = Description of Artificial Sequence: Synthetic oligonucleotide
  source 1..15: mol_type = other DNA
ggttgctactggagc

SEQ ID NO: 5724 - protein, 5 aa, synthetic construct
  REGION 1..5: note = Description of Artificial Sequence: Synthetic peptide
GCYWS

SEQ ID NO: 5725 - DNA, 15 bp, synthetic construct
  misc_feature 1..15: note = Description of Artificial Sequence: Synthetic oligonucleotide
  source 1..15: mol_type = other DNA
aattatgatatcaac

SEQ ID NO: 5726 - protein, 5 aa, synthetic construct
  REGION 1..5: note = Description of Artificial Sequence: Synthetic peptide
NYDIN

SEQ ID NO: 5727 - DNA, 15 bp, synthetic construct
  misc_feature 1..15: note = Description of Artificial Sequence: Synthetic oligonucleotide
  source 1..15: mol_type = other DNA
aattatgatatcaac

SEQ ID NO: 5728 - protein, 5 aa, synthetic construct
  REGION 1..5: note = Description of Artificial Sequence: Synthetic peptide
NYDIN

SEQ ID NO: 5729 - DNA, 15 bp, synthetic construct
  misc_feature 1..15: note = Description of Artificial Sequence: Synthetic oligonucleotide
  source 1..15: mol_type = other DNA
aacgcctggatgaac

SEQ ID NO: 5730 - protein, 5 aa, synthetic construct
  REGION 1..5: note = Description of Artificial Sequence: Synthetic peptide
NAWMN

SEQ ID NO: 5731 - DNA, 15 bp, synthetic construct
  misc_feature 1..15: note = Description of Artificial Sequence: Synthetic oligonucleotide
  source 1..15: mol_type = other DNA
ggtccctactggagc

SEQ ID NO: 5732 - protein, 5 aa, synthetic construct
  REGION 1..5: note = Description of Artificial Sequence: Synthetic peptide
GPYWS

SEQ ID NO: 5733 - DNA, 15 bp, synthetic construct
  misc_feature 1..15: note = Description of Artificial Sequence: Synthetic oligonucleotide
  source 1..15: mol_type = other DNA
agctatggcatgcac

SEQ ID NO: 5734 - protein, 5 aa, synthetic construct
  REGION 1..5: note = Description of Artificial Sequence: Synthetic peptide
SYGMH

SEQ ID NO: 5735 - DNA, 15 bp, synthetic construct
  misc_feature 1..15: note = Description of Artificial Sequence: Synthetic oligonucleotide
  source 1..15: mol_type = other DNA
agctatggcatgcac

SEQ ID NO: 5736 - protein, 5 aa, synthetic construct
  REGION 1..5: note = Description of Artificial Sequence: Synthetic peptide
SYGMH

SEQ ID NO: 5737 - DNA, 15 bp, synthetic construct
  misc_feature 1..15: note = Description of Artificial Sequence: Synthetic oligonucleotide
  source 1..15: mol_type = other DNA
gattactactggagc

SEQ ID NO: 5738 - protein, 5 aa, synthetic construct
  REGION 1..5: note = Description of Artificial Sequence: Synthetic peptide
DYYWS

SEQ ID NO: 5739 - DNA, 15 bp, synthetic construct
  misc_feature 1..15: note = Description of Artificial Sequence: Synthetic oligonucleotide
  source 1..15: mol_type = other DNA
ggttgctactggagc

SEQ ID NO: 5740 - protein, 5 aa, synthetic construct
  REGION 1..5: note = Description of Artificial Sequence: Synthetic peptide
GCYWS

SEQ ID NO: 5741 - DNA, 15 bp, synthetic construct
  misc_feature 1..15: note = Description of Artificial Sequence: Synthetic oligonucleotide
  source 1..15: mol_type = other DNA
aattatgatatcaac

SEQ ID NO: 5742 - protein, 5 aa, synthetic construct
  REGION 1..5: note = Description of Artificial Sequence: Synthetic peptide
NYDIN

SEQ ID NO: 5743 - DNA, 15 bp, synthetic construct
  misc_feature 1..15: note = Description of Artificial Sequence: Synthetic oligonucleotide
  source 1..15: mol_type = other DNA
aattatgatatcaac

SEQ ID NO: 5744 - protein, 5 aa, synthetic construct
  REGION 1..5: note = Description of Artificial Sequence: Synthetic peptide
NYDIN

SEQ ID NO: 5745 - DNA, 15 bp, synthetic construct
  misc_feature 1..15: note = Description of Artificial Sequence: Synthetic oligonucleotide
  source 1..15: mol_type = other DNA
ggttgctactggagc

SEQ ID NO: 5746 - protein, 5 aa, synthetic construct
  REGION 1..5: note = Description of Artificial Sequence: Synthetic peptide
GCYWS

SEQ ID NO: 5747 - DNA, 15 bp, synthetic construct
  misc_feature 1..15: note = Description of Artificial Sequence: Synthetic oligonucleotide
  source 1..15: mol_type = other DNA
ggttgctactggagc

SEQ ID NO: 5748 - protein, 5 aa, synthetic construct
  REGION 1..5: note = Description of Artificial Sequence: Synthetic peptide
GCYWS

SEQ ID NO: 5749 - DNA, 15 bp, synthetic construct
  misc_feature 1..15: note = Description of Artificial Sequence: Synthetic oligonucleotide
  source 1..15: mol_type = other DNA
aactacgacatgcac

SEQ ID NO: 5750 - protein, 5 aa, synthetic construct
  REGION 1..5: note = Description of Artificial Sequence: Synthetic peptide
NYDMH

SEQ ID NO: 5751 - DNA, 15 bp, synthetic construct
  misc_feature 1..15: note = Description of Artificial Sequence: Synthetic oligonucleotide
  source 1..15: mol_type = other DNA
ggttactactggagc

SEQ ID NO: 5752 - protein, 5 aa, synthetic construct
  REGION 1..5: note = Description of Artificial Sequence: Synthetic peptide
GYYWS

SEQ ID NO: 5753 - DNA, 15 bp, synthetic construct
  misc_feature 1..15: note = Description of Artificial Sequence: Synthetic oligonucleotide
  source 1..15: mol_type = other DNA
aattatggcatgcac

SEQ ID NO: 5754 - protein, 5 aa, synthetic construct
  REGION 1..5: note = Description of Artificial Sequence: Synthetic peptide
NYGMH

SEQ ID NO: 5755 - DNA, 15 bp, synthetic construct
  misc_feature 1..15: note = Description of Artificial Sequence: Synthetic oligonucleotide
  source 1..15: mol_type = other DNA
ggttgctactggagc

SEQ ID NO: 5756 - protein, 5 aa, synthetic construct
  REGION 1..5: note = Description of Artificial Sequence: Synthetic peptide
GCYWS

SEQ ID NO: 5757 - DNA, 15 bp, synthetic construct
  misc_feature 1..15: note = Description of Artificial Sequence: Synthetic oligonucleotide
  source 1..15: mol_type = other DNA
agctatggcatgcac

SEQ ID NO: 5758 - protein, 5 aa, synthetic construct
  REGION 1..5: note = Description of Artificial Sequence: Synthetic peptide
SYGMH

SEQ ID NO: 5759 - DNA, 15 bp, synthetic construct
  misc_feature 1..15: note = Description of Artificial Sequence: Synthetic oligonucleotide
  source 1..15: mol_type = other DNA
aattatgatatcaac

SEQ ID NO: 5760 - protein, 5 aa, synthetic construct
  REGION 1..5: note = Description of Artificial Sequence: Synthetic peptide
NYDIN

SEQ ID NO: 5761 - DNA, 15 bp, synthetic construct
  misc_feature 1..15: note = Description of Artificial Sequence: Synthetic oligonucleotide
  source 1..15: mol_type = other DNA
ggttgctactggagc

SEQ ID NO: 5762 - protein, 5 aa, synthetic construct
  REGION 1..5: note = Description of Artificial Sequence: Synthetic peptide
GCYWS

SEQ ID NO: 5763 - DNA, 15 bp, synthetic construct
  misc_feature 1..15: note = Description of Artificial Sequence: Synthetic oligonucleotide
  source 1..15: mol_type = other DNA
ggttgctactggagc

SEQ ID NO: 5764 - protein, 5 aa, synthetic construct
  REGION 1..5: note = Description of Artificial Sequence: Synthetic peptide
GCYWS

SEQ ID NO: 5765 - DNA, 15 bp, synthetic construct
  misc_feature 1..15: note = Description of Artificial Sequence: Synthetic oligonucleotide
  source 1..15: mol_type = other DNA
aattatgatatcaac

SEQ ID NO: 5766 - protein, 5 aa, synthetic construct
  REGION 1..5: note = Description of Artificial Sequence: Synthetic peptide
NYDIN

SEQ ID NO: 5767 - DNA, 15 bp, synthetic construct
  misc_feature 1..15: note = Description of Artificial Sequence: Synthetic oligonucleotide
  source 1..15: mol_type = other DNA
ggttgctactggagc

SEQ ID NO: 5768 - protein, 5 aa, synthetic construct
  REGION 1..5: note = Description of Artificial Sequence: Synthetic peptide
GCYWS

SEQ ID NO: 5769 - DNA, 15 bp, synthetic construct
  misc_feature 1..15: note = Description of Artificial Sequence: Synthetic oligonucleotide
  source 1..15: mol_type = other DNA
aattatgatatcaac

SEQ ID NO: 5770 - protein, 5 aa, synthetic construct
  REGION 1..5: note = Description of Artificial Sequence: Synthetic peptide
NYDIN

SEQ ID NO: 5771 - DNA, 15 bp, synthetic construct
  misc_feature 1..15: note = Description of Artificial Sequence: Synthetic oligonucleotide
  source 1..15: mol_type = other DNA
ggttgctactggagc

SEQ ID NO: 5772 - protein, 5 aa, synthetic construct
  REGION 1..5: note = Description of Artificial Sequence: Synthetic peptide
GCYWS

SEQ ID NO: 5773 - DNA, 15 bp, synthetic construct
  misc_feature 1..15: note = Description of Artificial Sequence: Synthetic oligonucleotide
  source 1..15: mol_type = other DNA
aattatgatatcaac

SEQ ID NO: 5774 - protein, 5 aa, synthetic construct
  REGION 1..5: note = Description of Artificial Sequence: Synthetic peptide
NYDIN

SEQ ID NO: 5775 - DNA, 15 bp, synthetic construct
  misc_feature 1..15: note = Description of Artificial Sequence: Synthetic oligonucleotide
  source 1..15: mol_type = other DNA
aattatgatatcaac

SEQ ID NO: 5776 - protein, 5 aa, synthetic construct
  REGION 1..5: note = Description of Artificial Sequence: Synthetic peptide
NYDIN

SEQ ID NO: 5777 - DNA, 15 bp, synthetic construct
  misc_feature 1..15: note = Description of Artificial Sequence: Synthetic oligonucleotide
  source 1..15: mol_type = other DNA
ggttcctactggagc

SEQ ID NO: 5778 - protein, 5 aa, synthetic construct
  REGION 1..5: note = Description of Artificial Sequence: Synthetic peptide
GSYWS

SEQ ID NO: 5779 - DNA, 15 bp, synthetic construct
  misc_feature 1..15: note = Description of Artificial Sequence: Synthetic oligonucleotide
  source 1..15: mol_type = other DNA
aattatgatatcaac

SEQ ID NO: 5780 - protein, 5 aa, synthetic construct
  REGION 1..5: note = Description of Artificial Sequence: Synthetic peptide
NYDIN

SEQ ID NO: 5781 - DNA, 15 bp, synthetic construct
  misc_feature 1..15: note = Description of Artificial Sequence: Synthetic oligonucleotide
  source 1..15: mol_type = other DNA
agctatggcatgcac

SEQ ID NO: 5782 - protein, 5 aa, synthetic construct
  REGION 1..5: note = Description of Artificial Sequence: Synthetic peptide
SYGMH

SEQ ID NO: 5783 - DNA, 15 bp, synthetic construct
  misc_feature 1..15: note = Description of Artificial Sequence: Synthetic oligonucleotide
  source 1..15: mol_type = other DNA
aattatgatatcaac

SEQ ID NO: 5784 - protein, 5 aa, synthetic construct
  REGION 1..5: note = Description of Artificial Sequence: Synthetic peptide
NYDIN

SEQ ID NO: 5785 - DNA, 15 bp, synthetic construct
  misc_feature 1..15: note = Description of Artificial Sequence: Synthetic oligonucleotide
  source 1..15: mol_type = other DNA
aattatgatatcaac

SEQ ID NO: 5786 - protein, 5 aa, synthetic construct
  REGION 1..5: note = Description of Artificial Sequence: Synthetic peptide
NYDIN

SEQ ID NO: 5787 - DNA, 15 bp, synthetic construct
  misc_feature 1..15: note = Description of Artificial Sequence: Synthetic oligonucleotide
  source 1..15: mol_type = other DNA
agctatggcatgcac

SEQ ID NO: 5788 - protein, 5 aa, synthetic construct
  REGION 1..5: note = Description of Artificial Sequence: Synthetic peptide
SYGMH

SEQ ID NO: 5789 - DNA, 15 bp, synthetic construct
  misc_feature 1..15: note = Description of Artificial Sequence: Synthetic oligonucleotide
  source 1..15: mol_type = other DNA
agctttggcatgcac

SEQ ID NO: 5790 - protein, 5 aa, synthetic construct
  REGION 1..5: note = Description of Artificial Sequence: Synthetic peptide
SFGMH

SEQ ID NO: 5791 - DNA, 15 bp, synthetic construct
  misc_feature 1..15: note = Description of Artificial Sequence: Synthetic oligonucleotide
  source 1..15: mol_type = other DNA
aacgcctggatgaac

SEQ ID NO: 5792 - protein, 5 aa, synthetic construct
  REGION 1..5: note = Description of Artificial Sequence: Synthetic peptide
NAWMN

SEQ ID NO: 5793 - DNA, 15 bp, synthetic construct
  misc_feature 1..15: note = Description of Artificial Sequence: Synthetic oligonucleotide
  source 1..15: mol_type = other DNA
aattatgatatcaac

SEQ ID NO: 5794 - protein, 5 aa, synthetic construct
  REGION 1..5: note = Description of Artificial Sequence: Synthetic peptide
NYDIN

SEQ ID NO: 5795 - DNA, 15 bp, synthetic construct
  misc_feature 1..15: note = Description of Artificial Sequence: Synthetic oligonucleotide
  source 1..15: mol_type = other DNA
ggttcctactggagc

SEQ ID NO: 5796 - protein, 5 aa, synthetic construct
  REGION 1..5: note = Description of Artificial Sequence: Synthetic peptide
GSYWS

SEQ ID NO: 5797 - DNA, 15 bp, synthetic construct
  misc_feature 1..15: note = Description of Artificial Sequence: Synthetic oligonucleotide
  source 1..15: mol_type = other DNA
aattatgatatcaac

SEQ ID NO: 5798 - protein, 5 aa, synthetic construct
  REGION 1..5: note = Description of Artificial Sequence: Synthetic peptide
NYDIN

SEQ ID NO: 5799 - DNA, 15 bp, synthetic construct
  misc_feature 1..15: note = Description of Artificial Sequence: Synthetic oligonucleotide
  source 1..15: mol_type = other DNA
aattatgatatcaac

SEQ ID NO: 5800 - protein, 5 aa, synthetic construct
  REGION 1..5: note = Description of Artificial Sequence: Synthetic peptide
NYDIN

SEQ ID NO: 5801 - DNA, 15 bp, synthetic construct
  misc_feature 1..15: note = Description of Artificial Sequence: Synthetic oligonucleotide
  source 1..15: mol_type = other DNA
aattatgatatcaac

SEQ ID NO: 5802 - protein, 5 aa, synthetic construct
  REGION 1..5: note = Description of Artificial Sequence: Synthetic peptide
NYDIN

SEQ ID NO: 5803 - DNA, 15 bp, synthetic construct
  misc_feature 1..15: note = Description of Artificial Sequence: Synthetic oligonucleotide
  source 1..15: mol_type = other DNA
aattatgatatcaac

SEQ ID NO: 5804 - protein, 5 aa, synthetic construct
  REGION 1..5: note = Description of Artificial Sequence: Synthetic peptide
NYDIN

SEQ ID NO: 5805 - DNA, 15 bp, synthetic construct
  misc_feature 1..15: note = Description of Artificial Sequence: Synthetic oligonucleotide
  source 1..15: mol_type = other DNA
ggttgctactggagc

SEQ ID NO: 5806 - protein, 5 aa, synthetic construct
  REGION 1..5: note = Description of Artificial Sequence: Synthetic peptide
GCYWS

SEQ ID NO: 5807 - DNA, 15 bp, synthetic construct
  misc_feature 1..15: note = Description of Artificial Sequence: Synthetic oligonucleotide
  source 1..15: mol_type = other DNA
ggttgctactggagc

SEQ ID NO: 5808 - protein, 5 aa, synthetic construct
  REGION 1..5: note = Description of Artificial Sequence: Synthetic peptide
GCYWS

SEQ ID NO: 5809 - DNA, 15 bp, synthetic construct
  misc_feature 1..15: note = Description of Artificial Sequence: Synthetic oligonucleotide
  source 1..15: mol_type = other DNA
aattatgatgtcaac

SEQ ID NO: 5810 - protein, 5 aa, synthetic construct
  REGION 1..5: note = Description of Artificial Sequence: Synthetic peptide
NYDVN

SEQ ID NO: 5811 - DNA, 15 bp, synthetic construct
  misc_feature 1..15: note = Description of Artificial Sequence: Synthetic oligonucleotide
  source 1..15: mol_type = other DNA
aactatggcatgcac

SEQ ID NO: 5812 - protein, 5 aa, synthetic construct
  REGION 1..5: note = Description of Artificial Sequence: Synthetic peptide
NYGMH

SEQ ID NO: 5813 - DNA, 15 bp, synthetic construct
  misc_feature 1..15: note = Description of Artificial Sequence: Synthetic oligonucleotide
  source 1..15: mol_type = other DNA
aacgcctggatgaac

SEQ ID NO: 5814 - protein, 5 aa, synthetic construct
  REGION 1..5: note = Description of Artificial Sequence: Synthetic peptide
NAWMN

SEQ ID NO: 5815 - DNA, 15 bp, synthetic construct
  misc_feature 1..15: note = Description of Artificial Sequence: Synthetic oligonucleotide
  source 1..15: mol_type = other DNA
agctatggcatgcac

SEQ ID NO: 5816 - protein, 5 aa, synthetic construct
  REGION 1..5: note = Description of Artificial Sequence: Synthetic peptide
SYGMH

SEQ ID NO: 5817 - DNA, 15 bp, synthetic construct
  misc_feature 1..15: note = Description of Artificial Sequence: Synthetic oligonucleotide
  source 1..15: mol_type = other DNA
aattatgatatcaac

SEQ ID NO: 5818 - protein, 5 aa, synthetic construct
  REGION 1..5: note = Description of Artificial Sequence: Synthetic peptide
NYDIN

SEQ ID NO: 5819 - DNA, 15 bp, synthetic construct
  misc_feature 1..15: note = Description of Artificial Sequence: Synthetic oligonucleotide
  source 1..15: mol_type = other DNA
aattatgatatcaac

SEQ ID NO: 5820 - protein, 5 aa, synthetic construct
  REGION 1..5: note = Description of Artificial Sequence: Synthetic peptide
NYDIN

SEQ ID NO: 5821 - DNA, 15 bp, synthetic construct
  misc_feature 1..15: note = Description of Artificial Sequence: Synthetic oligonucleotide
  source 1..15: mol_type = other DNA
aattatgatatcaac

SEQ ID NO: 5822 - protein, 5 aa, synthetic construct
  REGION 1..5: note = Description of Artificial Sequence: Synthetic peptide
NYDIN

SEQ ID NO: 5823 - DNA, 15 bp, synthetic construct
  misc_feature 1..15: note = Description of Artificial Sequence: Synthetic oligonucleotide
  source 1..15: mol_type = other DNA
ggttgctactggagc

SEQ ID NO: 5824 - protein, 5 aa, synthetic construct
  REGION 1..5: note = Description of Artificial Sequence: Synthetic peptide
GCYWS

SEQ ID NO: 5825 - DNA, 15 bp, synthetic construct
  misc_feature 1..15: note = Description of Artificial Sequence: Synthetic oligonucleotide
  source 1..15: mol_type = other DNA
aattatgatatcaac

SEQ ID NO: 5826 - protein, 5 aa, synthetic construct
  REGION 1..5: note = Description of Artificial Sequence: Synthetic peptide
NYDIN

SEQ ID NO: 5827 - DNA, 15 bp, synthetic construct
  misc_feature 1..15: note = Description of Artificial Sequence: Synthetic oligonucleotide
  source 1..15: mol_type = other DNA
ggttcctactggagc

SEQ ID NO: 5828 - protein, 5 aa, synthetic construct
  REGION 1..5: note = Description of Artificial Sequence: Synthetic peptide
GSYWS

SEQ ID NO: 5829 - DNA, 15 bp, synthetic construct
  misc_feature 1..15: note = Description of Artificial Sequence: Synthetic oligonucleotide
  source 1..15: mol_type = other DNA
ggttgctactggagc

SEQ ID NO: 5830 - protein, 5 aa, synthetic construct
  REGION 1..5: note = Description of Artificial Sequence: Synthetic peptide
GCYWS

SEQ ID NO: 5831 - DNA, 15 bp, synthetic construct
  misc_feature 1..15: note = Description of Artificial Sequence: Synthetic oligonucleotide
  source 1..15: mol_type = other DNA
aattatgatatcaac

SEQ ID NO: 5832 - protein, 5 aa, synthetic construct
  REGION 1..5: note = Description of Artificial Sequence: Synthetic peptide
NYDIN

SEQ ID NO: 5833 - DNA, 15 bp, synthetic construct
  misc_feature 1..15: note = Description of Artificial Sequence: Synthetic oligonucleotide
  source 1..15: mol_type = other DNA
ggttgctactggagc

SEQ ID NO: 5834 - protein, 5 aa, synthetic construct
  REGION 1..5: note = Description of Artificial Sequence: Synthetic peptide
GCYWS

SEQ ID NO: 5835 - DNA, 15 bp, synthetic construct
  misc_feature 1..15: note = Description of Artificial Sequence: Synthetic oligonucleotide
  source 1..15: mol_type = other DNA
ggttgctactggagc

SEQ ID NO: 5836 - protein, 5 aa, synthetic construct
  REGION 1..5: note = Description of Artificial Sequence: Synthetic peptide
GCYWS

SEQ ID NO: 5837 - DNA, 15 bp, synthetic construct
  misc_feature 1..15: note = Description of Artificial Sequence: Synthetic oligonucleotide
  source 1..15: mol_type = other DNA
ggttgctactggagc

SEQ ID NO: 5838 - protein, 5 aa, synthetic construct
  REGION 1..5: note = Description of Artificial Sequence: Synthetic peptide
GCYWS

SEQ ID NO: 5839 - DNA, 15 bp, synthetic construct
  misc_feature 1..15: note = Description of Artificial Sequence: Synthetic oligonucleotide
  source 1..15: mol_type = other DNA
aattatgatatcaac

SEQ ID NO: 5840 - protein, 5 aa, synthetic construct
  REGION 1..5: note = Description of Artificial Sequence: Synthetic peptide
NYDIN

SEQ ID NO: 5841 - DNA, 15 bp, synthetic construct
  misc_feature 1..15: note = Description of Artificial Sequence: Synthetic oligonucleotide
  source 1..15: mol_type = other DNA
aattatgatatcaac

SEQ ID NO: 5842 - protein, 5 aa, synthetic construct
  REGION 1..5: note = Description of Artificial Sequence: Synthetic peptide
NYDIN

SEQ ID NO: 5843 - DNA, 15 bp, synthetic construct
  misc_feature 1..15: note = Description of Artificial Sequence: Synthetic oligonucleotide
  source 1..15: mol_type = other DNA
ggttgctactggagc

SEQ ID NO: 5844 - protein, 5 aa, synthetic construct
  REGION 1..5: note = Description of Artificial Sequence: Synthetic peptide
GCYWS

SEQ ID NO: 5845 - DNA, 15 bp, synthetic construct
  misc_feature 1..15: note = Description of Artificial Sequence: Synthetic oligonucleotide
  source 1..15: mol_type = other DNA
aattatgatatcaac

SEQ ID NO: 5846 - protein, 5 aa, synthetic construct
  REGION 1..5: note = Description of Artificial Sequence: Synthetic peptide
NYDIN

SEQ ID NO: 5847 - DNA, 15 bp, synthetic construct
  misc_feature 1..15: note = Description of Artificial Sequence: Synthetic oligonucleotide
  source 1..15: mol_type = other DNA
ggtccctactggagc

SEQ ID NO: 5848 - protein, 5 aa, synthetic construct
  REGION 1..5: note = Description of Artificial Sequence: Synthetic peptide
GPYWS

SEQ ID NO: 5849 - DNA, 15 bp, synthetic construct
  misc_feature 1..15: note = Description of Artificial Sequence: Synthetic oligonucleotide
  source 1..15: mol_type = other DNA
ggttgctactggagc

SEQ ID NO: 5850 - protein, 5 aa, synthetic construct
  REGION 1..5: note = Description of Artificial Sequence: Synthetic peptide
GCYWS

SEQ ID NO: 5851 - DNA, 15 bp, synthetic construct
  misc_feature 1..15: note = Description of Artificial Sequence: Synthetic oligonucleotide
  source 1..15: mol_type = other DNA
ggttcctactggagc

SEQ ID NO: 5852 - protein, 5 aa, synthetic construct
  REGION 1..5: note = Description of Artificial Sequence: Synthetic peptide
GSYWS

SEQ ID NO: 5853 - DNA, 15 bp, synthetic construct
  misc_feature 1..15: note = Description of Artificial Sequence: Synthetic oligonucleotide
  source 1..15: mol_type = other DNA
aattatgatatcaac

SEQ ID NO: 5854 - protein, 5 aa, synthetic construct
  REGION 1..5: note = Description of Artificial Sequence: Synthetic peptide
NYDIN

SEQ ID NO: 5855 - DNA, 15 bp, synthetic construct
  misc_feature 1..15: note = Description of Artificial Sequence: Synthetic oligonucleotide
  source 1..15: mol_type = other DNA
aattatgatatcaac

SEQ ID NO: 5856 - protein, 5 aa, synthetic construct
  REGION 1..5: note = Description of Artificial Sequence: Synthetic peptide
NYDIN

SEQ ID NO: 5857 - DNA, 15 bp, synthetic construct
  misc_feature 1..15: note = Description of Artificial Sequence: Synthetic oligonucleotide
  source 1..15: mol_type = other DNA
ggttgctactggagc

SEQ ID NO: 5858 - protein, 5 aa, synthetic construct
  REGION 1..5: note = Description of Artificial Sequence: Synthetic peptide
GCYWS

SEQ ID NO: 5859 - DNA, 15 bp, synthetic construct
  misc_feature 1..15: note = Description of Artificial Sequence: Synthetic oligonucleotide
  source 1..15: mol_type = other DNA
agctatggcatgcac

SEQ ID NO: 5860 - protein, 5 aa, synthetic construct
  REGION 1..5: note = Description of Artificial Sequence: Synthetic peptide
SYGMH

SEQ ID NO: 5861 - DNA, 15 bp, synthetic construct
  misc_feature 1..15: note = Description of Artificial Sequence: Synthetic oligonucleotide
  source 1..15: mol_type = other DNA
agctatggcatgcac

SEQ ID NO: 5862 - protein, 5 aa, synthetic construct
  REGION 1..5: note = Description of Artificial Sequence: Synthetic peptide
SYGMH

SEQ ID NO: 5863 - DNA, 15 bp, synthetic construct
  misc_feature 1..15: note = Description of Artificial Sequence: Synthetic oligonucleotide
  source 1..15: mol_type = other DNA
ggttgctactggagc

SEQ ID NO: 5864 - protein, 5 aa, synthetic construct
  REGION 1..5: note = Description of Artificial Sequence: Synthetic peptide
GCYWS

SEQ ID NO: 5865 - DNA, 15 bp, synthetic construct
  misc_feature 1..15: note = Description of Artificial Sequence: Synthetic oligonucleotide
  source 1..15: mol_type = other DNA
aattatgatatcaac

SEQ ID NO: 5866 - protein, 5 aa, synthetic construct
  REGION 1..5: note = Description of Artificial Sequence: Synthetic peptide
NYDIN

SEQ ID NO: 5867 - DNA, 15 bp, synthetic construct
  misc_feature 1..15: note = Description of Artificial Sequence: Synthetic oligonucleotide
  source 1..15: mol_type = other DNA
ggttgctactggagc

SEQ ID NO: 5868 - protein, 5 aa, synthetic construct
  REGION 1..5: note = Description of Artificial Sequence: Synthetic peptide
GCYWS

SEQ ID NO: 5869 - DNA, 15 bp, synthetic construct
  misc_feature 1..15: note = Description of Artificial Sequence: Synthetic oligonucleotide
  source 1..15: mol_type = other DNA
ggttgctactggagc

SEQ ID NO: 5870 - protein, 5 aa, synthetic construct
  REGION 1..5: note = Description of Artificial Sequence: Synthetic peptide
GCYWS

SEQ ID NO: 5871 - DNA, 15 bp, synthetic construct
  misc_feature 1..15: note = Description of Artificial Sequence: Synthetic oligonucleotide
  source 1..15: mol_type = other DNA
aattatgatatcaac

SEQ ID NO: 5872 - protein, 5 aa, synthetic construct
  REGION 1..5: note = Description of Artificial Sequence: Synthetic peptide
NYDIN

SEQ ID NO: 5873 - DNA, 15 bp, synthetic construct
  misc_feature 1..15: note = Description of Artificial Sequence: Synthetic oligonucleotide
  source 1..15: mol_type = other DNA
aattatgatatcaac

SEQ ID NO: 5874 - protein, 5 aa, synthetic construct
  REGION 1..5: note = Description of Artificial Sequence: Synthetic peptide
NYDIN

SEQ ID NO: 5875 - DNA, 15 bp, synthetic construct
  misc_feature 1..15: note = Description of Artificial Sequence: Synthetic oligonucleotide
  source 1..15: mol_type = other DNA
ggtccctactggagc

SEQ ID NO: 5876 - protein, 5 aa, synthetic construct
  REGION 1..5: note = Description of Artificial Sequence: Synthetic peptide
GPYWS

SEQ ID NO: 5877 - DNA, 15 bp, synthetic construct
  misc_feature 1..15: note = Description of Artificial Sequence: Synthetic oligonucleotide
  source 1..15: mol_type = other DNA
ggttgctactggagc

SEQ ID NO: 5878 - protein, 5 aa, synthetic construct
  REGION 1..5: note = Description of Artificial Sequence: Synthetic peptide
GCYWS

SEQ ID NO: 5879 - DNA, 15 bp, synthetic construct
  misc_feature 1..15: note = Description of Artificial Sequence: Synthetic oligonucleotide
  source 1..15: mol_type = other DNA
aattatgatatcaac

SEQ ID NO: 5880 - protein, 5 aa, synthetic construct
  REGION 1..5: note = Description of Artificial Sequence: Synthetic peptide
NYDIN

SEQ ID NO: 5881 - DNA, 15 bp, synthetic construct
  misc_feature 1..15: note = Description of Artificial Sequence: Synthetic oligonucleotide
  source 1..15: mol_type = other DNA
aattatgatatcaac

SEQ ID NO: 5882 - protein, 5 aa, synthetic construct
  REGION 1..5: note = Description of Artificial Sequence: Synthetic peptide
NYDIN

SEQ ID NO: 5883 - DNA, 15 bp, synthetic construct
  misc_feature 1..15: note = Description of Artificial Sequence: Synthetic oligonucleotide
  source 1..15: mol_type = other DNA
aattatgatatcaac

SEQ ID NO: 5884 - protein, 5 aa, synthetic construct
  REGION 1..5: note = Description of Artificial Sequence: Synthetic peptide
NYDIN

SEQ ID NO: 5885 - DNA, 15 bp, synthetic construct
  misc_feature 1..15: note = Description of Artificial Sequence: Synthetic oligonucleotide
  source 1..15: mol_type = other DNA
ggttgctactggagc

SEQ ID NO: 5886 - protein, 5 aa, synthetic construct
  REGION 1..5: note = Description of Artificial Sequence: Synthetic peptide
GCYWS

SEQ ID NO: 5887 - DNA, 15 bp, synthetic construct
  misc_feature 1..15: note = Description of Artificial Sequence: Synthetic oligonucleotide
  source 1..15: mol_type = other DNA
aattatgatatcaac

SEQ ID NO: 5888 - protein, 5 aa, synthetic construct
  REGION 1..5: note = Description of Artificial Sequence: Synthetic peptide
NYDIN

SEQ ID NO: 5889 - DNA, 15 bp, synthetic construct
  misc_feature 1..15: note = Description of Artificial Sequence: Synthetic oligonucleotide
  source 1..15: mol_type = other DNA
agttatgatatcaac

SEQ ID NO: 5890 - protein, 5 aa, synthetic construct
  REGION 1..5: note = Description of Artificial Sequence: Synthetic peptide
SYDIN

SEQ ID NO: 5891 - DNA, 15 bp, synthetic construct
  misc_feature 1..15: note = Description of Artificial Sequence: Synthetic oligonucleotide
  source 1..15: mol_type = other DNA
ggttgctactggagc

SEQ ID NO: 5892 - protein, 5 aa, synthetic construct
  REGION 1..5: note = Description of Artificial Sequence: Synthetic peptide
GCYWS

SEQ ID NO: 5893 - DNA, 15 bp, synthetic construct
  misc_feature 1..15: note = Description of Artificial Sequence: Synthetic oligonucleotide
  source 1..15: mol_type = other DNA
aattatgatatcaac

SEQ ID NO: 5894 - protein, 5 aa, synthetic construct
  REGION 1..5: note = Description of Artificial Sequence: Synthetic peptide
NYDIN

SEQ ID NO: 5895 - DNA, 15 bp, synthetic construct
  misc_feature 1..15: note = Description of Artificial Sequence: Synthetic oligonucleotide
  source 1..15: mol_type = other DNA
aattatgatatcaac

SEQ ID NO: 5896 - protein, 5 aa, synthetic construct
  REGION 1..5: note = Description of Artificial Sequence: Synthetic peptide
NYDIN

SEQ ID NO: 5897 - DNA, 15 bp, synthetic construct
  misc_feature 1..15: note = Description of Artificial Sequence: Synthetic oligonucleotide
  source 1..15: mol_type = other DNA
aattatgatatcaac

SEQ ID NO: 5898 - protein, 5 aa, synthetic construct
  REGION 1..5: note = Description of Artificial Sequence: Synthetic peptide
NYDIN

SEQ ID NO: 5899 - DNA, 15 bp, synthetic construct
  misc_feature 1..15: note = Description of Artificial Sequence: Synthetic oligonucleotide
  source 1..15: mol_type = other DNA
aattatgatatcaac

SEQ ID NO: 5900 - protein, 5 aa, synthetic construct
  REGION 1..5: note = Description of Artificial Sequence: Synthetic peptide
NYDIN

SEQ ID NO: 5901 - DNA, 15 bp, synthetic construct
  misc_feature 1..15: note = Description of Artificial Sequence: Synthetic oligonucleotide
  source 1..15: mol_type = other DNA
ggttgttactggagc

SEQ ID NO: 5902 - protein, 5 aa, synthetic construct
  REGION 1..5: note = Description of Artificial Sequence: Synthetic peptide
GCYWS

SEQ ID NO: 5903 - DNA, 15 bp, synthetic construct
  misc_feature 1..15: note = Description of Artificial Sequence: Synthetic oligonucleotide
  source 1..15: mol_type = other DNA
ggttgctactggagc

SEQ ID NO: 5904 - protein, 5 aa, synthetic construct
  REGION 1..5: note = Description of Artificial Sequence: Synthetic peptide
GCYWS

SEQ ID NO: 5905 - DNA, 15 bp, synthetic construct
  misc_feature 1..15: note = Description of Artificial Sequence: Synthetic oligonucleotide
  source 1..15: mol_type = other DNA
aattatgatatcaac

SEQ ID NO: 5906 - protein, 5 aa, synthetic construct
  REGION 1..5: note = Description of Artificial Sequence: Synthetic peptide
NYDIN

SEQ ID NO: 5907 - DNA, 15 bp, synthetic construct
  misc_feature 1..15: note = Description of Artificial Sequence: Synthetic oligonucleotide
  source 1..15: mol_type = other DNA
ggttactactggagc

SEQ ID NO: 5908 - protein, 5 aa, synthetic construct
  REGION 1..5: note = Description of Artificial Sequence: Synthetic peptide
GYYWS

SEQ ID NO: 5909 - DNA, 15 bp, synthetic construct
  misc_feature 1..15: note = Description of Artificial Sequence: Synthetic oligonucleotide
  source 1..15: mol_type = other DNA
aattatgatatcaac

SEQ ID NO: 5910 - protein, 5 aa, synthetic construct
  REGION 1..5: note = Description of Artificial Sequence: Synthetic peptide
NYDIN

SEQ ID NO: 5911 - DNA, 15 bp, synthetic construct
  misc_feature 1..15: note = Description of Artificial Sequence: Synthetic oligonucleotide
  source 1..15: mol_type = other DNA
aattatgatatcaac

SEQ ID NO: 5912 - protein, 5 aa, synthetic construct
  REGION 1..5: note = Description of Artificial Sequence: Synthetic peptide
NYDIN

SEQ ID NO: 5913 - DNA, 15 bp, synthetic construct
  misc_feature 1..15: note = Description of Artificial Sequence: Synthetic oligonucleotide
  source 1..15: mol_type = other DNA
agctatggcatgcac

SEQ ID NO: 5914 - protein, 5 aa, synthetic construct
  REGION 1..5: note = Description of Artificial Sequence: Synthetic peptide
SYGMH

SEQ ID NO: 5915 - DNA, 15 bp, synthetic construct
  misc_feature 1..15: note = Description of Artificial Sequence: Synthetic oligonucleotide
  source 1..15: mol_type = other DNA
ggttcctactggagc

SEQ ID NO: 5916 - protein, 5 aa, synthetic construct
  REGION 1..5: note = Description of Artificial Sequence: Synthetic peptide
GSYWS

SEQ ID NO: 5917 - DNA, 15 bp, synthetic construct
  misc_feature 1..15: note = Description of Artificial Sequence: Synthetic oligonucleotide
  source 1..15: mol_type = other DNA
agctatggcatacac

SEQ ID NO: 5918 - protein, 5 aa, synthetic construct
  REGION 1..5: note = Description of Artificial Sequence: Synthetic peptide
SYGIH

SEQ ID NO: 5919 - DNA, 15 bp, synthetic construct
  misc_feature 1..15: note = Description of Artificial Sequence: Synthetic oligonucleotide
  source 1..15: mol_type = other DNA
aattatgatatcaac

SEQ ID NO: 5920 - protein, 5 aa, synthetic construct
  REGION 1..5: note = Description of Artificial Sequence: Synthetic peptide
NYDIN

SEQ ID NO: 5921 - DNA, 15 bp, synthetic construct
  misc_feature 1..15: note = Description of Artificial Sequence: Synthetic oligonucleotide
  source 1..15: mol_type = other DNA
ggttgctactggagc

SEQ ID NO: 5922 - protein, 5 aa, synthetic construct
  REGION 1..5: note = Description of Artificial Sequence: Synthetic peptide
GCYWS

SEQ ID NO: 5923 - DNA, 15 bp, synthetic construct
  misc_feature 1..15: note = Description of Artificial Sequence: Synthetic oligonucleotide
  source 1..15: mol_type = other DNA
ggttgctactggagc

SEQ ID NO: 5924 - protein, 5 aa, synthetic construct
  REGION 1..5: note = Description of Artificial Sequence: Synthetic peptide
GCYWS

SEQ ID NO: 5925 - DNA, 15 bp, synthetic construct
  misc_feature 1..15: note = Description of Artificial Sequence: Synthetic oligonucleotide
  source 1..15: mol_type = other DNA
aattatgatatcaac

SEQ ID NO: 5926 - protein, 5 aa, synthetic construct
  REGION 1..5: note = Description of Artificial Sequence: Synthetic peptide
NYDIN

SEQ ID NO: 5927 - DNA, 15 bp, synthetic construct
  misc_feature 1..15: note = Description of Artificial Sequence: Synthetic oligonucleotide
  source 1..15: mol_type = other DNA
ggttgctactggagc

SEQ ID NO: 5928 - protein, 5 aa, synthetic construct
  REGION 1..5: note = Description of Artificial Sequence: Synthetic peptide
GCYWS

SEQ ID NO: 5929 - DNA, 15 bp, synthetic construct
  misc_feature 1..15: note = Description of Artificial Sequence: Synthetic oligonucleotide
  source 1..15: mol_type = other DNA
gattgctactggagc

SEQ ID NO: 5930 - protein, 5 aa, synthetic construct
  REGION 1..5: note = Description of Artificial Sequence: Synthetic peptide
DCYWS

SEQ ID NO: 5931 - DNA, 15 bp, synthetic construct
  misc_feature 1..15: note = Description of Artificial Sequence: Synthetic oligonucleotide
  source 1..15: mol_type = other DNA
ggtccctactggagc

SEQ ID NO: 5932 - protein, 5 aa, synthetic construct
  REGION 1..5: note = Description of Artificial Sequence: Synthetic peptide
GPYWS

SEQ ID NO: 5933 - DNA, 15 bp, synthetic construct
  misc_feature 1..15: note = Description of Artificial Sequence: Synthetic oligonucleotide
  source 1..15: mol_type = other DNA
ggttgctactggagc

SEQ ID NO: 5934 - protein, 5 aa, synthetic construct
  REGION 1..5: note = Description of Artificial Sequence: Synthetic peptide
GCYWS

SEQ ID NO: 5935 - DNA, 15 bp, synthetic construct
  misc_feature 1..15: note = Description of Artificial Sequence: Synthetic oligonucleotide
  source 1..15: mol_type = other DNA
aattatgatatcaac

SEQ ID NO: 5936 - protein, 5 aa, synthetic construct
  REGION 1..5: note = Description of Artificial Sequence: Synthetic peptide
NYDIN

SEQ ID NO: 5937 - DNA, 15 bp, synthetic construct
  misc_feature 1..15: note = Description of Artificial Sequence: Synthetic oligonucleotide
  source 1..15: mol_type = other DNA
ggttgttactggagc

SEQ ID NO: 5938 - protein, 5 aa, synthetic construct
  REGION 1..5: note = Description of Artificial Sequence: Synthetic peptide
GCYWS

SEQ ID NO: 5939 - DNA, 15 bp, synthetic construct
  misc_feature 1..15: note = Description of Artificial Sequence: Synthetic oligonucleotide
  source 1..15: mol_type = other DNA
aattatgatatcaac

SEQ ID NO: 5940 - protein, 5 aa, synthetic construct
  REGION 1..5: note = Description of Artificial Sequence: Synthetic peptide
NYDIN

SEQ ID NO: 5941 - DNA, 15 bp, synthetic construct
  misc_feature 1..15: note = Description of Artificial Sequence: Synthetic oligonucleotide
  source 1..15: mol_type = other DNA
aattatgatatcaac

SEQ ID NO: 5942 - protein, 5 aa, synthetic construct
  REGION 1..5: note = Description of Artificial Sequence: Synthetic peptide
NYDIN

SEQ ID NO: 5943 - DNA, 15 bp, synthetic construct
  misc_feature 1..15: note = Description of Artificial Sequence: Synthetic oligonucleotide
  source 1..15: mol_type = other DNA
ggttgctactggagc

SEQ ID NO: 5944 - protein, 5 aa, synthetic construct
  REGION 1..5: note = Description of Artificial Sequence: Synthetic peptide
GCYWS

SEQ ID NO: 5945 - DNA, 15 bp, synthetic construct
  misc_feature 1..15: note = Description of Artificial Sequence: Synthetic oligonucleotide
  source 1..15: mol_type = other DNA
ggttgctactggagc

SEQ ID NO: 5946 - protein, 5 aa, synthetic construct
  REGION 1..5: note = Description of Artificial Sequence: Synthetic peptide
GCYWS

SEQ ID NO: 5947 - DNA, 15 bp, synthetic construct
  misc_feature 1..15: note = Description of Artificial Sequence: Synthetic oligonucleotide
  source 1..15: mol_type = other DNA
aattatgatatcaac

SEQ ID NO: 5948 - protein, 5 aa, synthetic construct
  REGION 1..5: note = Description of Artificial Sequence: Synthetic peptide
NYDIN

SEQ ID NO: 5949 - DNA, 15 bp, synthetic construct
  misc_feature 1..15: note = Description of Artificial Sequence: Synthetic oligonucleotide
  source 1..15: mol_type = other DNA
ggttgctactggagc

SEQ ID NO: 5950 - protein, 5 aa, synthetic construct
  REGION 1..5: note = Description of Artificial Sequence: Synthetic peptide
GCYWS

SEQ ID NO: 5951 - DNA, 15 bp, synthetic construct
  misc_feature 1..15: note = Description of Artificial Sequence: Synthetic oligonucleotide
  source 1..15: mol_type = other DNA
ggttactactggagc

SEQ ID NO: 5952 - protein, 5 aa, synthetic construct
  REGION 1..5: note = Description of Artificial Sequence: Synthetic peptide
GYYWS

SEQ ID NO: 5953 - DNA, 15 bp, synthetic construct
  misc_feature 1..15: note = Description of Artificial Sequence: Synthetic oligonucleotide
  source 1..15: mol_type = other DNA
ggttgctactggagc

SEQ ID NO: 5954 - protein, 5 aa, synthetic construct
  REGION 1..5: note = Description of Artificial Sequence: Synthetic peptide
GCYWS

SEQ ID NO: 5955 - DNA, 15 bp, synthetic construct
  misc_feature 1..15: note = Description of Artificial Sequence: Synthetic oligonucleotide
  source 1..15: mol_type = other DNA
agctatggcatgcac

SEQ ID NO: 5956 - protein, 5 aa, synthetic construct
  REGION 1..5: note = Description of Artificial Sequence: Synthetic peptide
SYGMH

SEQ ID NO: 5957 - DNA, 15 bp, synthetic construct
  misc_feature 1..15: note = Description of Artificial Sequence: Synthetic oligonucleotide
  source 1..15: mol_type = other DNA
ggttgctactggagc

SEQ ID NO: 5958 - protein, 5 aa, synthetic construct
  REGION 1..5: note = Description of Artificial Sequence: Synthetic peptide
GCYWS

SEQ ID NO: 5959 - DNA, 15 bp, synthetic construct
  misc_feature 1..15: note = Description of Artificial Sequence: Synthetic oligonucleotide
  source 1..15: mol_type = other DNA
aattatgatatcaac

SEQ ID NO: 5960 - protein, 5 aa, synthetic construct
  REGION 1..5: note = Description of Artificial Sequence: Synthetic peptide
NYDIN

SEQ ID NO: 5961 - DNA, 15 bp, synthetic construct
  misc_feature 1..15: note = Description of Artificial Sequence: Synthetic oligonucleotide
  source 1..15: mol_type = other DNA
aattatgatatcaac

SEQ ID NO: 5962 - protein, 5 aa, synthetic construct
  REGION 1..5: note = Description of Artificial Sequence: Synthetic peptide
NYDIN

SEQ ID NO: 5963 - DNA, 15 bp, synthetic construct
  misc_feature 1..15: note = Description of Artificial Sequence: Synthetic oligonucleotide
  source 1..15: mol_type = other DNA
ggttgctactggagc

SEQ ID NO: 5964 - protein, 5 aa, synthetic construct
  REGION 1..5: note = Description of Artificial Sequence: Synthetic peptide
GCYWS

SEQ ID NO: 5965 - DNA, 15 bp, synthetic construct
  misc_feature 1..15: note = Description of Artificial Sequence: Synthetic oligonucleotide
  source 1..15: mol_type = other DNA
aattatgatatcaac

SEQ ID NO: 5966 - protein, 5 aa, synthetic construct
  REGION 1..5: note = Description of Artificial Sequence: Synthetic peptide
NYDIN

SEQ ID NO: 5967 - DNA, 15 bp, synthetic construct
  misc_feature 1..15: note = Description of Artificial Sequence: Synthetic oligonucleotide
  source 1..15: mol_type = other DNA
ggttgctactggagc

SEQ ID NO: 5968 - protein, 5 aa, synthetic construct
  REGION 1..5: note = Description of Artificial Sequence: Synthetic peptide
GCYWS

SEQ ID NO: 5969 - DNA, 15 bp, synthetic construct
  misc_feature 1..15: note = Description of Artificial Sequence: Synthetic oligonucleotide
  source 1..15: mol_type = other DNA
aattatgatatcaac

SEQ ID NO: 5970 - protein, 5 aa, synthetic construct
  REGION 1..5: note = Description of Artificial Sequence: Synthetic peptide
NYDIN

SEQ ID NO: 5971 - DNA, 15 bp, synthetic construct
  misc_feature 1..15: note = Description of Artificial Sequence: Synthetic oligonucleotide
  source 1..15: mol_type = other DNA
aattatgatatcaac

SEQ ID NO: 5972 - protein, 5 aa, synthetic construct
  REGION 1..5: note = Description of Artificial Sequence: Synthetic peptide
NYDIN

SEQ ID NO: 5973 - DNA, 15 bp, synthetic construct
  misc_feature 1..15: note = Description of Artificial Sequence: Synthetic oligonucleotide
  source 1..15: mol_type = other DNA
agttatgatatcaac

SEQ ID NO: 5974 - protein, 5 aa, synthetic construct
  REGION 1..5: note = Description of Artificial Sequence: Synthetic peptide
SYDIN

SEQ ID NO: 5975 - DNA, 15 bp, synthetic construct
  misc_feature 1..15: note = Description of Artificial Sequence: Synthetic oligonucleotide
  source 1..15: mol_type = other DNA
ggttgctactggagc

SEQ ID NO: 5976 - protein, 5 aa, synthetic construct
  REGION 1..5: note = Description of Artificial Sequence: Synthetic peptide
GCYWS

SEQ ID NO: 5977 - DNA, 15 bp, synthetic construct
  misc_feature 1..15: note = Description of Artificial Sequence: Synthetic oligonucleotide
  source 1..15: mol_type = other DNA
ggttgctactggagc

SEQ ID NO: 5978 - protein, 5 aa, synthetic construct
  REGION 1..5: note = Description of Artificial Sequence: Synthetic peptide
GCYWS

SEQ ID NO: 5979 - DNA, 15 bp, synthetic construct
  misc_feature 1..15: note = Description of Artificial Sequence: Synthetic oligonucleotide
  source 1..15: mol_type = other DNA
ggttgctactggagc

SEQ ID NO: 5980 - protein, 5 aa, synthetic construct
  REGION 1..5: note = Description of Artificial Sequence: Synthetic peptide
GCYWS

SEQ ID NO: 5981 - DNA, 15 bp, synthetic construct
  misc_feature 1..15: note = Description of Artificial Sequence: Synthetic oligonucleotide
  source 1..15: mol_type = other DNA
aattatgatatcaac

SEQ ID NO: 5982 - protein, 5 aa, synthetic construct
  REGION 1..5: note = Description of Artificial Sequence: Synthetic peptide
NYDIN

SEQ ID NO: 5983 - DNA, 15 bp, synthetic construct
  misc_feature 1..15: note = Description of Artificial Sequence: Synthetic oligonucleotide
  source 1..15: mol_type = other DNA
ggttgctactggagc

SEQ ID NO: 5984 - protein, 5 aa, synthetic construct
  REGION 1..5: note = Description of Artificial Sequence: Synthetic peptide
GCYWS

SEQ ID NO: 5985 - DNA, 15 bp, synthetic construct
  misc_feature 1..15: note = Description of Artificial Sequence: Synthetic oligonucleotide
  source 1..15: mol_type = other DNA
agctacgacatgcac

SEQ ID NO: 5986 - protein, 5 aa, synthetic construct
  REGION 1..5: note = Description of Artificial Sequence: Synthetic peptide
SYDMH

SEQ ID NO: 5987 - DNA, 15 bp, synthetic construct
  misc_feature 1..15: note = Description of Artificial Sequence: Synthetic oligonucleotide
  source 1..15: mol_type = other DNA
ggttgctactggagc

SEQ ID NO: 5988 - protein, 5 aa, synthetic construct
  REGION 1..5: note = Description of Artificial Sequence: Synthetic peptide
GCYWS

SEQ ID NO: 5989 - DNA, 15 bp, synthetic construct
  misc_feature 1..15: note = Description of Artificial Sequence: Synthetic oligonucleotide
  source 1..15: mol_type = other DNA
ggttgctactggagc

SEQ ID NO: 5990 - protein, 5 aa, synthetic construct
  REGION 1..5: note = Description of Artificial Sequence: Synthetic peptide
GCYWS

SEQ ID NO: 5991 - DNA, 15 bp, synthetic construct
  misc_feature 1..15: note = Description of Artificial Sequence: Synthetic oligonucleotide
  source 1..15: mol_type = other DNA
ggttgctactggagc

SEQ ID NO: 5992 - protein, 5 aa, synthetic construct
  REGION 1..5: note = Description of Artificial Sequence: Synthetic peptide
GCYWS

SEQ ID NO: 5993 - DNA, 15 bp, synthetic construct
  misc_feature 1..15: note = Description of Artificial Sequence: Synthetic oligonucleotide
  source 1..15: mol_type = other DNA
ggttactactggagc

SEQ ID NO: 5994 - protein, 5 aa, synthetic construct
  REGION 1..5: note = Description of Artificial Sequence: Synthetic peptide
GYYWS

SEQ ID NO: 5995 - DNA, 15 bp, synthetic construct
  misc_feature 1..15: note = Description of Artificial Sequence: Synthetic oligonucleotide
  source 1..15: mol_type = other DNA
ggttgctactggagc

SEQ ID NO: 5996 - protein, 5 aa, synthetic construct
  REGION 1..5: note = Description of Artificial Sequence: Synthetic peptide
GCYWS

SEQ ID NO: 5997 - DNA, 15 bp, synthetic construct
  misc_feature 1..15: note = Description of Artificial Sequence: Synthetic oligonucleotide
  source 1..15: mol_type = other DNA
ggttgctactggagc

SEQ ID NO: 5998 - protein, 5 aa, synthetic construct
  REGION 1..5: note = Description of Artificial Sequence: Synthetic peptide
GCYWS

SEQ ID NO: 5999 - DNA, 15 bp, synthetic construct
  misc_feature 1..15: note = Description of Artificial Sequence: Synthetic oligonucleotide
  source 1..15: mol_type = other DNA
ggttgctactggagc

SEQ ID NO: 6000 - protein, 5 aa, synthetic construct
  REGION 1..5: note = Description of Artificial Sequence: Synthetic peptide
GCYWS

SEQ ID NO: 6001 - DNA, 15 bp, synthetic construct
  misc_feature 1..15: note = Description of Artificial Sequence: Synthetic oligonucleotide
  source 1..15: mol_type = other DNA
gactatggcatgcac

SEQ ID NO: 6002 - protein, 5 aa, synthetic construct
  REGION 1..5: note = Description of Artificial Sequence: Synthetic peptide
DYGMH

SEQ ID NO: 6003 - DNA, 15 bp, synthetic construct
  misc_feature 1..15: note = Description of Artificial Sequence: Synthetic oligonucleotide
  source 1..15: mol_type = other DNA
aattatgatatcaac

SEQ ID NO: 6004 - protein, 5 aa, synthetic construct
  REGION 1..5: note = Description of Artificial Sequence: Synthetic peptide
NYDIN

SEQ ID NO: 6005 - DNA, 15 bp, synthetic construct
  misc_feature 1..15: note = Description of Artificial Sequence: Synthetic oligonucleotide
  source 1..15: mol_type = other DNA
aattatgatatcaac

SEQ ID NO: 6006 - protein, 5 aa, synthetic construct
  REGION 1..5: note = Description of Artificial Sequence: Synthetic peptide
NYDIN

SEQ ID NO: 6007 - DNA, 15 bp, synthetic construct
  misc_feature 1..15: note = Description of Artificial Sequence: Synthetic oligonucleotide
  source 1..15: mol_type = other DNA
ggttgctactggagc

SEQ ID NO: 6008 - protein, 5 aa, synthetic construct
  REGION 1..5: note = Description of Artificial Sequence: Synthetic peptide
GCYWS

SEQ ID NO: 6009 - DNA, 15 bp, synthetic construct
  misc_feature 1..15: note = Description of Artificial Sequence: Synthetic oligonucleotide
  source 1..15: mol_type = other DNA
aactacgacatgcac

SEQ ID NO: 6010 - protein, 5 aa, synthetic construct
  REGION 1..5: note = Description of Artificial Sequence: Synthetic peptide
NYDMH

SEQ ID NO: 6011 - DNA, 15 bp, synthetic construct
  misc_feature 1..15: note = Description of Artificial Sequence: Synthetic oligonucleotide
  source 1..15: mol_type = other DNA
aattatgatatcaac

SEQ ID NO: 6012 - protein, 5 aa, synthetic construct
  REGION 1..5: note = Description of Artificial Sequence: Synthetic peptide
NYDIN

SEQ ID NO: 6013 - DNA, 15 bp, synthetic construct
  misc_feature 1..15: note = Description of Artificial Sequence: Synthetic oligonucleotide
  source 1..15: mol_type = other DNA
ggttgctactggagc

SEQ ID NO: 6014 - protein, 5 aa, synthetic construct
  REGION 1..5: note = Description of Artificial Sequence: Synthetic peptide
GCYWS

SEQ ID NO: 6015 - DNA, 15 bp, synthetic construct
  misc_feature 1..15: note = Description of Artificial Sequence: Synthetic oligonucleotide
  source 1..15: mol_type = other DNA
ggttgctactggagc

SEQ ID NO: 6016 - protein, 5 aa, synthetic construct
  REGION 1..5: note = Description of Artificial Sequence: Synthetic peptide
GCYWS

SEQ ID NO: 6017 - DNA, 15 bp, synthetic construct
  misc_feature 1..15: note = Description of Artificial Sequence: Synthetic oligonucleotide
  source 1..15: mol_type = other DNA
ggttgctactggagc

SEQ ID NO: 6018 - protein, 5 aa, synthetic construct
  REGION 1..5: note = Description of Artificial Sequence: Synthetic peptide
GCYWS

SEQ ID NO: 6019 - DNA, 15 bp, synthetic construct
  misc_feature 1..15: note = Description of Artificial Sequence: Synthetic oligonucleotide
  source 1..15: mol_type = other DNA
ggttgctactggagc

SEQ ID NO: 6020 - protein, 5 aa, synthetic construct
  REGION 1..5: note = Description of Artificial Sequence: Synthetic peptide
GCYWS

SEQ ID NO: 6021 - DNA, 15 bp, synthetic construct
  misc_feature 1..15: note = Description of Artificial Sequence: Synthetic oligonucleotide
  source 1..15: mol_type = other DNA
aattatgatatcaac

SEQ ID NO: 6022 - protein, 5 aa, synthetic construct
  REGION 1..5: note = Description of Artificial Sequence: Synthetic peptide
NYDIN

SEQ ID NO: 6023 - DNA, 15 bp, synthetic construct
  misc_feature 1..15: note = Description of Artificial Sequence: Synthetic oligonucleotide
  source 1..15: mol_type = other DNA
ggttgctactggagc

SEQ ID NO: 6024 - protein, 5 aa, synthetic construct
  REGION 1..5: note = Description of Artificial Sequence: Synthetic peptide
GCYWS

SEQ ID NO: 6025 - DNA, 15 bp, synthetic construct
  misc_feature 1..15: note = Description of Artificial Sequence: Synthetic oligonucleotide
  source 1..15: mol_type = other DNA
ggttcctactggagc

SEQ ID NO: 6026 - protein, 5 aa, synthetic construct
  REGION 1..5: note = Description of Artificial Sequence: Synthetic peptide
GSYWS

SEQ ID NO: 6027 - DNA, 15 bp, synthetic construct
  misc_feature 1..15: note = Description of Artificial Sequence: Synthetic oligonucleotide
  source 1..15: mol_type = other DNA
aactacgacatgcac

SEQ ID NO: 6028 - protein, 5 aa, synthetic construct
  REGION 1..5: note = Description of Artificial Sequence: Synthetic peptide
NYDMH

SEQ ID NO: 6029 - DNA, 15 bp, synthetic construct
  misc_feature 1..15: note = Description of Artificial Sequence: Synthetic oligonucleotide
  source 1..15: mol_type = other DNA
agctatggcatgcac

SEQ ID NO: 6030 - protein, 5 aa, synthetic construct
  REGION 1..5: note = Description of Artificial Sequence: Synthetic peptide
SYGMH

SEQ ID NO: 6031 - DNA, 15 bp, synthetic construct
  misc_feature 1..15: note = Description of Artificial Sequence: Synthetic oligonucleotide
  source 1..15: mol_type = other DNA
ggttgctactggagc

SEQ ID NO: 6032 - protein, 5 aa, synthetic construct
  REGION 1..5: note = Description of Artificial Sequence: Synthetic peptide
GCYWS

SEQ ID NO: 6033 - DNA, 15 bp, synthetic construct
  misc_feature 1..15: note = Description of Artificial Sequence: Synthetic oligonucleotide
  source 1..15: mol_type = other DNA
aattatgatatcaac

SEQ ID NO: 6034 - protein, 5 aa, synthetic construct
  REGION 1..5: note = Description of Artificial Sequence: Synthetic peptide
NYDIN

SEQ ID NO: 6035 - DNA, 15 bp, synthetic construct
  misc_feature 1..15: note = Description of Artificial Sequence: Synthetic oligonucleotide
  source 1..15: mol_type = other DNA
ggttgctactggagc

SEQ ID NO: 6036 - protein, 5 aa, synthetic construct
  REGION 1..5: note = Description of Artificial Sequence: Synthetic peptide
GCYWS

SEQ ID NO: 6037 - DNA, 15 bp, synthetic construct
  misc_feature 1..15: note = Description of Artificial Sequence: Synthetic oligonucleotide
  source 1..15: mol_type = other DNA
aattatgatatcaac

SEQ ID NO: 6038 - protein, 5 aa, synthetic construct
  REGION 1..5: note = Description of Artificial Sequence: Synthetic peptide
NYDIN

SEQ ID NO: 6039 - DNA, 15 bp, synthetic construct
  misc_feature 1..15: note = Description of Artificial Sequence: Synthetic oligonucleotide
  source 1..15: mol_type = other DNA
ggttgctactggagc

SEQ ID NO: 6040 - protein, 5 aa, synthetic construct
  REGION 1..5: note = Description of Artificial Sequence: Synthetic peptide
GCYWS

SEQ ID NO: 6041 - DNA, 15 bp, synthetic construct
  misc_feature 1..15: note = Description of Artificial Sequence: Synthetic oligonucleotide
  source 1..15: mol_type = other DNA
ggttgctactggagc

SEQ ID NO: 6042 - protein, 5 aa, synthetic construct
  REGION 1..5: note = Description of Artificial Sequence: Synthetic peptide
GCYWS

SEQ ID NO: 6043 - DNA, 15 bp, synthetic construct
  misc_feature 1..15: note = Description of Artificial Sequence: Synthetic oligonucleotide
  source 1..15: mol_type = other DNA
ggttgctactggagc

SEQ ID NO: 6044 - protein, 5 aa, synthetic construct
  REGION 1..5: note = Description of Artificial Sequence: Synthetic peptide
GCYWS

SEQ ID NO: 6045 - DNA, 15 bp, synthetic construct
  misc_feature 1..15: note = Description of Artificial Sequence: Synthetic oligonucleotide
  source 1..15: mol_type = other DNA
ggttgctactggagc

SEQ ID NO: 6046 - protein, 5 aa, synthetic construct
  REGION 1..5: note = Description of Artificial Sequence: Synthetic peptide
GCYWS

SEQ ID NO: 6047 - DNA, 15 bp, synthetic construct
  misc_feature 1..15: note = Description of Artificial Sequence: Synthetic oligonucleotide
  source 1..15: mol_type = other DNA
aacgatatcatgcac

SEQ ID NO: 6048 - protein, 5 aa, synthetic construct
  REGION 1..5: note = Description of Artificial Sequence: Synthetic peptide
NDIMH

SEQ ID NO: 6049 - DNA, 15 bp, synthetic construct
  misc_feature 1..15: note = Description of Artificial Sequence: Synthetic oligonucleotide
  source 1..15: mol_type = other DNA
aattatgatatcaac

SEQ ID NO: 6050 - protein, 5 aa, synthetic construct
  REGION 1..5: note = Description of Artificial Sequence: Synthetic peptide
NYDIN

SEQ ID NO: 6051 - DNA, 15 bp, synthetic construct
  misc_feature 1..15: note = Description of Artificial Sequence: Synthetic oligonucleotide
  source 1..15: mol_type = other DNA
aattatgatatcaac

SEQ ID NO: 6052 - protein, 5 aa, synthetic construct
  REGION 1..5: note = Description of Artificial Sequence: Synthetic peptide
NYDIN

SEQ ID NO: 6053 - DNA, 15 bp, synthetic construct
  misc_feature 1..15: note = Description of Artificial Sequence: Synthetic oligonucleotide
  source 1..15: mol_type = other DNA
aattatgatatcaac

SEQ ID NO: 6054 - protein, 5 aa, synthetic construct
  REGION 1..5: note = Description of Artificial Sequence: Synthetic peptide
NYDIN

SEQ ID NO: 6055 - DNA, 15 bp, synthetic construct
  misc_feature 1..15: note = Description of Artificial Sequence: Synthetic oligonucleotide
  source 1..15: mol_type = other DNA
aattatgatatcaac

SEQ ID NO: 6056 - protein, 5 aa, synthetic construct
  REGION 1..5: note = Description of Artificial Sequence: Synthetic peptide
NYDIN

SEQ ID NO: 6057 - DNA, 15 bp, synthetic construct
  misc_feature 1..15: note = Description of Artificial Sequence: Synthetic oligonucleotide
  source 1..15: mol_type = other DNA
ggttgctactggagc

SEQ ID NO: 6058 - protein, 5 aa, synthetic construct
  REGION 1..5: note = Description of Artificial Sequence: Synthetic peptide
GCYWS

SEQ ID NO: 6059 - DNA, 15 bp, synthetic construct
  misc_feature 1..15: note = Description of Artificial Sequence: Synthetic oligonucleotide
  source 1..15: mol_type = other DNA
ggttgctactggagc

SEQ ID NO: 6060 - protein, 5 aa, synthetic construct
  REGION 1..5: note = Description of Artificial Sequence: Synthetic peptide
GCYWS

SEQ ID NO: 6061 - DNA, 15 bp, synthetic construct
  misc_feature 1..15: note = Description of Artificial Sequence: Synthetic oligonucleotide
  source 1..15: mol_type = other DNA
agctatggcatgcac

SEQ ID NO: 6062 - protein, 5 aa, synthetic construct
  REGION 1..5: note = Description of Artificial Sequence: Synthetic peptide
SYGMH

SEQ ID NO: 6063 - DNA, 15 bp, synthetic construct
  misc_feature 1..15: note = Description of Artificial Sequence: Synthetic oligonucleotide
  source 1..15: mol_type = other DNA
aattatgatatcaac

SEQ ID NO: 6064 - protein, 5 aa, synthetic construct
  REGION 1..5: note = Description of Artificial Sequence: Synthetic peptide
NYDIN

SEQ ID NO: 6065 - DNA, 15 bp, synthetic construct
  misc_feature 1..15: note = Description of Artificial Sequence: Synthetic oligonucleotide
  source 1..15: mol_type = other DNA
ggttgctactggagc

SEQ ID NO: 6066 - protein, 5 aa, synthetic construct
  REGION 1..5: note = Description of Artificial Sequence: Synthetic peptide
GCYWS

SEQ ID NO: 6067 - DNA, 15 bp, synthetic construct
  misc_feature 1..15: note = Description of Artificial Sequence: Synthetic oligonucleotide
  source 1..15: mol_type = other DNA
ggttgctactggagc

SEQ ID NO: 6068 - protein, 5 aa, synthetic construct
  REGION 1..5: note = Description of Artificial Sequence: Synthetic peptide
GCYWS

SEQ ID NO: 6069 - DNA, 15 bp, synthetic construct
  misc_feature 1..15: note = Description of Artificial Sequence: Synthetic oligonucleotide
  source 1..15: mol_type = other DNA
ggttgctactggagc

SEQ ID NO: 6070 - protein, 5 aa, synthetic construct
  REGION 1..5: note = Description of Artificial Sequence: Synthetic peptide
GCYWS

SEQ ID NO: 6071 - DNA, 15 bp, synthetic construct
  misc_feature 1..15: note = Description of Artificial Sequence: Synthetic oligonucleotide
  source 1..15: mol_type = other DNA
aattatgatatcaac

SEQ ID NO: 6072 - protein, 5 aa, synthetic construct
  REGION 1..5: note = Description of Artificial Sequence: Synthetic peptide
NYDIN

SEQ ID NO: 6073 - DNA, 15 bp, synthetic construct
  misc_feature 1..15: note = Description of Artificial Sequence: Synthetic oligonucleotide
  source 1..15: mol_type = other DNA
aattatgatatcaac

SEQ ID NO: 6074 - protein, 5 aa, synthetic construct
  REGION 1..5: note = Description of Artificial Sequence: Synthetic peptide
NYDIN

SEQ ID NO: 6075 - DNA, 15 bp, synthetic construct
  misc_feature 1..15: note = Description of Artificial Sequence: Synthetic oligonucleotide
  source 1..15: mol_type = other DNA
aattatgatatcaac

SEQ ID NO: 6076 - protein, 5 aa, synthetic construct
  REGION 1..5: note = Description of Artificial Sequence: Synthetic peptide
NYDIN

SEQ ID NO: 6077 - DNA, 21 bp, synthetic construct
  misc_feature 1..21: note = Description of Artificial Sequence: Synthetic oligonucleotide
  source 1..21: mol_type = other DNA
agtagtaattactactggggc

SEQ ID NO: 6078 - protein, 7 aa, synthetic construct
  REGION 1..7: note = Description of Artificial Sequence: Synthetic peptide
SSNYYWG

SEQ ID NO: 6079 - DNA, 15 bp, synthetic construct
  misc_feature 1..15: note = Description of Artificial Sequence: Synthetic oligonucleotide
  source 1..15: mol_type = other DNA
agttatgatatcaac

SEQ ID NO: 6080 - protein, 5 aa, synthetic construct
  REGION 1..5: note = Description of Artificial Sequence: Synthetic peptide
SYDIN

SEQ ID NO: 6081 - DNA, 15 bp, synthetic construct
  misc_feature 1..15: note = Description of Artificial Sequence: Synthetic oligonucleotide
  source 1..15: mol_type = other DNA
aattatgatatcaac

SEQ ID NO: 6082 - protein, 5 aa, synthetic construct
  REGION 1..5: note = Description of Artificial Sequence: Synthetic peptide
NYDIN

SEQ ID NO: 6083 - DNA, 15 bp, synthetic construct
  misc_feature 1..15: note = Description of Artificial Sequence: Synthetic oligonucleotide
  source 1..15: mol_type = other DNA
aattatgatatcaac

SEQ ID NO: 6084 - protein, 5 aa, synthetic construct
  REGION 1..5: note = Description of Artificial Sequence: Synthetic peptide
NYDIN

SEQ ID NO: 6085 - DNA, 15 bp, synthetic construct
  misc_feature 1..15: note = Description of Artificial Sequence: Synthetic oligonucleotide
  source 1..15: mol_type = other DNA
agttatgatatcaac

SEQ ID NO: 6086 - protein, 5 aa, synthetic construct
  REGION 1..5: note = Description of Artificial Sequence: Synthetic peptide
SYDIN

SEQ ID NO: 6087 - DNA, 15 bp, synthetic construct
  misc_feature 1..15: note = Description of Artificial Sequence: Synthetic oligonucleotide
  source 1..15: mol_type = other DNA
aattatgatatcaac

SEQ ID NO: 6088 - protein, 5 aa, synthetic construct
  REGION 1..5: note = Description of Artificial Sequence: Synthetic peptide
NYDIN

SEQ ID NO: 6089 - DNA, 15 bp, synthetic construct
  misc_feature 1..15: note = Description of Artificial Sequence: Synthetic oligonucleotide
  source 1..15: mol_type = other DNA
ggttgctactggagc

SEQ ID NO: 6090 - protein, 5 aa, synthetic construct
  REGION 1..5: note = Description of Artificial Sequence: Synthetic peptide
GCYWS

SEQ ID NO: 6091 - DNA, 15 bp, synthetic construct
  misc_feature 1..15: note = Description of Artificial Sequence: Synthetic oligonucleotide
  source 1..15: mol_type = other DNA
aattatgatatcaac

SEQ ID NO: 6092 - protein, 5 aa, synthetic construct
  REGION 1..5: note = Description of Artificial Sequence: Synthetic peptide
NYDIN

SEQ ID NO: 6093 - DNA, 15 bp, synthetic construct
  misc_feature 1..15: note = Description of Artificial Sequence: Synthetic oligonucleotide
  source 1..15: mol_type = other DNA
ggttgctactggagc

SEQ ID NO: 6094 - protein, 5 aa, synthetic construct
  REGION 1..5: note = Description of Artificial Sequence: Synthetic peptide
GCYWS

SEQ ID NO: 6095 - DNA, 15 bp, synthetic construct
  misc_feature 1..15: note = Description of Artificial Sequence: Synthetic oligonucleotide
  source 1..15: mol_type = other DNA
agctatggcatgcac

SEQ ID NO: 6096 - protein, 5 aa, synthetic construct
  REGION 1..5: note = Description of Artificial Sequence: Synthetic peptide
SYGMH

SEQ ID NO: 6097 - DNA, 21 bp, synthetic construct
  misc_feature 1..21: note = Description of Artificial Sequence: Synthetic oligonucleotide
  source 1..21: mol_type = other DNA
agaagtagttactactggggc

SEQ ID NO: 6098 - protein, 7 aa, synthetic construct
  REGION 1..7: note = Description of Artificial Sequence: Synthetic peptide
RSSYYWG

SEQ ID NO: 6099 - DNA, 15 bp, synthetic construct
  misc_feature 1..15: note = Description of Artificial Sequence: Synthetic oligonucleotide
  source 1..15: mol_type = other DNA
agctatgccatgagc

SEQ ID NO: 6100 - protein, 5 aa, synthetic construct
  REGION 1..5: note = Description of Artificial Sequence: Synthetic peptide
SYAMS

SEQ ID NO: 6101 - DNA, 15 bp, synthetic construct
  misc_feature 1..15: note = Description of Artificial Sequence: Synthetic oligonucleotide
  source 1..15: mol_type = other DNA
agctatggcatgcac

SEQ ID NO: 6102 - protein, 5 aa, synthetic construct
  REGION 1..5: note = Description of Artificial Sequence: Synthetic peptide
SYGMH

SEQ ID NO: 6103 - DNA, 15 bp, synthetic construct
  misc_feature 1..15: note = Description of Artificial Sequence: Synthetic oligonucleotide
  source 1..15: mol_type = other DNA
aattatgatatcaac

SEQ ID NO: 6104 - protein, 5 aa, synthetic construct
  REGION 1..5: note = Description of Artificial Sequence: Synthetic peptide
NYDIN

SEQ ID NO: 6105 - DNA, 21 bp, synthetic construct
  misc_feature 1..21: note = Description of Artificial Sequence: Synthetic oligonucleotide
  source 1..21: mol_type = other DNA
aacagtggttactactggagc

SEQ ID NO: 6106 - protein, 7 aa, synthetic construct
  REGION 1..7: note = Description of Artificial Sequence: Synthetic peptide
NSGYYWS

SEQ ID NO: 6107 - DNA, 15 bp, synthetic construct
  misc_feature 1..15: note = Description of Artificial Sequence: Synthetic oligonucleotide
  source 1..15: mol_type = other DNA
agctatgccatgaac

SEQ ID NO: 6108 - protein, 5 aa, synthetic construct
  REGION 1..5: note = Description of Artificial Sequence: Synthetic peptide
SYAMN

SEQ ID NO: 6109 - DNA, 15 bp, synthetic construct
  misc_feature 1..15: note = Description of Artificial Sequence: Synthetic oligonucleotide
  source 1..15: mol_type = other DNA
aattatgatatcaac

SEQ ID NO: 6110 - protein, 5 aa, synthetic construct
  REGION 1..5: note = Description of Artificial Sequence: Synthetic peptide
NYDIN

SEQ ID NO: 6111 - DNA, 15 bp, synthetic construct
  misc_feature 1..15: note = Description of Artificial Sequence: Synthetic oligonucleotide
  source 1..15: mol_type = other DNA
agctatgccatgagc

SEQ ID NO: 6112 - protein, 5 aa, synthetic construct
  REGION 1..5: note = Description of Artificial Sequence: Synthetic peptide
SYAMS

SEQ ID NO: 6113 - DNA, 15 bp, synthetic construct
  misc_feature 1..15: note = Description of Artificial Sequence: Synthetic oligonucleotide
  source 1..15: mol_type = other DNA
aattatgatatcaac

SEQ ID NO: 6114 - protein, 5 aa, synthetic construct
  REGION 1..5: note = Description of Artificial Sequence: Synthetic peptide
NYDIN

SEQ ID NO: 6115 - DNA, 15 bp, synthetic construct
  misc_feature 1..15: note = Description of Artificial Sequence: Synthetic oligonucleotide
  source 1..15: mol_type = other DNA
agctatggcatgcac

SEQ ID NO: 6116 - protein, 5 aa, synthetic construct
  REGION 1..5: note = Description of Artificial Sequence: Synthetic peptide
SYGMH

SEQ ID NO: 6117 - DNA, 15 bp, synthetic construct
  misc_feature 1..15: note = Description of Artificial Sequence: Synthetic oligonucleotide
  source 1..15: mol_type = other DNA
agctatagcatgaac

SEQ ID NO: 6118 - protein, 5 aa, synthetic construct
  REGION 1..5: note = Description of Artificial Sequence: Synthetic peptide
SYSMN

SEQ ID NO: 6119 - DNA, 15 bp, synthetic construct
  misc_feature 1..15: note = Description of Artificial Sequence: Synthetic oligonucleotide
  source 1..15: mol_type = other DNA
agctatggcatgcac

SEQ ID NO: 6120 - protein, 5 aa, synthetic construct
  REGION 1..5: note = Description of Artificial Sequence: Synthetic peptide
SYGMH

SEQ ID NO: 6121 - DNA, 21 bp, synthetic construct
  misc_feature 1..21: note = Description of Artificial Sequence: Synthetic oligonucleotide
  source 1..21: mol_type = other DNA
agtggtgattactactggaac

SEQ ID NO: 6122 - protein, 7 aa, synthetic construct
  REGION 1..7: note = Description of Artificial Sequence: Synthetic peptide
SGDYYWN

SEQ ID NO: 6123 - DNA, 21 bp, synthetic construct
  misc_feature 1..21: note = Description of Artificial Sequence: Synthetic oligonucleotide
  source 1..21: mol_type = other DNA
aatagtggttactactatagc

SEQ ID NO: 6124 - protein, 7 aa, synthetic construct
  REGION 1..7: note = Description of Artificial Sequence: Synthetic peptide
NSGYYYS

SEQ ID NO: 6125 - DNA, 15 bp, synthetic construct
  misc_feature 1..15: note = Description of Artificial Sequence: Synthetic oligonucleotide
  source 1..15: mol_type = other DNA
aattatgatatcaac

SEQ ID NO: 6126 - protein, 5 aa, synthetic construct
  REGION 1..5: note = Description of Artificial Sequence: Synthetic peptide
NYDIN

SEQ ID NO: 6127 - DNA, 15 bp, synthetic construct
  misc_feature 1..15: note = Description of Artificial Sequence: Synthetic oligonucleotide
  source 1..15: mol_type = other DNA
aattatgatatcaac

SEQ ID NO: 6128 - protein, 5 aa, synthetic construct
  REGION 1..5: note = Description of Artificial Sequence: Synthetic peptide
NYDIN

SEQ ID NO: 6129 - DNA, 15 bp, synthetic construct
  misc_feature 1..15: note = Description of Artificial Sequence: Synthetic oligonucleotide
  source 1..15: mol_type = other DNA
gactatggcatgcac

SEQ ID NO: 6130 - protein, 5 aa, synthetic construct
  REGION 1..5: note = Description of Artificial Sequence: Synthetic peptide
DYGMH

SEQ ID NO: 6131 - DNA, 15 bp, synthetic construct
  misc_feature 1..15: note = Description of Artificial Sequence: Synthetic oligonucleotide
  source 1..15: mol_type = other DNA
aattatgatatcaac

SEQ ID NO: 6132 - protein, 5 aa, synthetic construct
  REGION 1..5: note = Description of Artificial Sequence: Synthetic peptide
NYDIN

SEQ ID NO: 6133 - DNA, 15 bp, synthetic construct
  misc_feature 1..15: note = Description of Artificial Sequence: Synthetic oligonucleotide
  source 1..15: mol_type = other DNA
agctatggcatgcac

SEQ ID NO: 6134 - protein, 5 aa, synthetic construct
  REGION 1..5: note = Description of Artificial Sequence: Synthetic peptide
SYGMH

SEQ ID NO: 6135 - DNA, 15 bp, synthetic construct
  misc_feature 1..15: note = Description of Artificial Sequence: Synthetic oligonucleotide
  source 1..15: mol_type = other DNA
gcttactactggagc

SEQ ID NO: 6136 - protein, 5 aa, synthetic construct
  REGION 1..5: note = Description of Artificial Sequence: Synthetic peptide
AYYWS

SEQ ID NO: 6137 - DNA, 15 bp, synthetic construct
  misc_feature 1..15: note = Description of Artificial Sequence: Synthetic oligonucleotide
  source 1..15: mol_type = other DNA
agctatagcatgaac

SEQ ID NO: 6138 - protein, 5 aa, synthetic construct
  REGION 1..5: note = Description of Artificial Sequence: Synthetic peptide
SYSMN

SEQ ID NO: 6139 - DNA, 15 bp, synthetic construct
  misc_feature 1..15: note = Description of Artificial Sequence: Synthetic oligonucleotide
  source 1..15: mol_type = other DNA
agctatgccatgagc

SEQ ID NO: 6140 - protein, 5 aa, synthetic construct
  REGION 1..5: note = Description of Artificial Sequence: Synthetic peptide
SYAMS

SEQ ID NO: 6141 - DNA, 15 bp, synthetic construct
  misc_feature 1..15: note = Description of Artificial Sequence: Synthetic oligonucleotide
  source 1..15: mol_type = other DNA
agctatgccatgagc

SEQ ID NO: 6142 - protein, 5 aa, synthetic construct
  REGION 1..5: note = Description of Artificial Sequence: Synthetic peptide
SYAMS

SEQ ID NO: 6143 - DNA, 15 bp, synthetic construct
  misc_feature 1..15: note = Description of Artificial Sequence: Synthetic oligonucleotide
  source 1..15: mol_type = other DNA
agctatggcatgcac

SEQ ID NO: 6144 - protein, 5 aa, synthetic construct
  REGION 1..5: note = Description of Artificial Sequence: Synthetic peptide
SYGMH

SEQ ID NO: 6145 - DNA, 15 bp, synthetic construct
  misc_feature 1..15: note = Description of Artificial Sequence: Synthetic oligonucleotide
  source 1..15: mol_type = other DNA
agctatgccatgagc

SEQ ID NO: 6146 - protein, 5 aa, synthetic construct
  REGION 1..5: note = Description of Artificial Sequence: Synthetic peptide
SYAMS

SEQ ID NO: 6147 - DNA, 15 bp, synthetic construct
  misc_feature 1..15: note = Description of Artificial Sequence: Synthetic oligonucleotide
  source 1..15: mol_type = other DNA
aattatgatatcaac

SEQ ID NO: 6148 - protein, 5 aa, synthetic construct
  REGION 1..5: note = Description of Artificial Sequence: Synthetic peptide
NYDIN

SEQ ID NO: 6149 - DNA, 15 bp, synthetic construct
  misc_feature 1..15: note = Description of Artificial Sequence: Synthetic oligonucleotide
  source 1..15: mol_type = other DNA
agctatgccatgaac

SEQ ID NO: 6150 - protein, 5 aa, synthetic construct
  REGION 1..5: note = Description of Artificial Sequence: Synthetic peptide
SYAMN

SEQ ID NO: 6151 - DNA, 15 bp, synthetic construct
  misc_feature 1..15: note = Description of Artificial Sequence: Synthetic oligonucleotide
  source 1..15: mol_type = other DNA
agctatggcatgcac

SEQ ID NO: 6152 - protein, 5 aa, synthetic construct
  REGION 1..5: note = Description of Artificial Sequence: Synthetic peptide
SYGMH

SEQ ID NO: 6153 - DNA, 15 bp, synthetic construct
  misc_feature 1..15: note = Description of Artificial Sequence: Synthetic oligonucleotide
  source 1..15: mol_type = other DNA
ggctactatatgcac

SEQ ID NO: 6154 - protein, 5 aa, synthetic construct
  REGION 1..5: note = Description of Artificial Sequence: Synthetic peptide
GYYMH

SEQ ID NO: 6155 - DNA, 15 bp, synthetic construct
  misc_feature 1..15: note = Description of Artificial Sequence: Synthetic oligonucleotide
  source 1..15: mol_type = other DNA
aattatgatatcaac

SEQ ID NO: 6156 - protein, 5 aa, synthetic construct
  REGION 1..5: note = Description of Artificial Sequence: Synthetic peptide
NYDIN

SEQ ID NO: 6157 - DNA, 15 bp, synthetic construct
  misc_feature 1..15: note = Description of Artificial Sequence: Synthetic oligonucleotide
  source 1..15: mol_type = other DNA
agctatgccatgagc

SEQ ID NO: 6158 - protein, 5 aa, synthetic construct
  REGION 1..5: note = Description of Artificial Sequence: Synthetic peptide
SYAMS

SEQ ID NO: 6159 - DNA, 15 bp, synthetic construct
  misc_feature 1..15: note = Description of Artificial Sequence: Synthetic oligonucleotide
  source 1..15: mol_type = other DNA
agctatggcatgcac

SEQ ID NO: 6160 - protein, 5 aa, synthetic construct
  REGION 1..5: note = Description of Artificial Sequence: Synthetic peptide
SYGMH

SEQ ID NO: 6161 - DNA, 15 bp, synthetic construct
  misc_feature 1..15: note = Description of Artificial Sequence: Synthetic oligonucleotide
  source 1..15: mol_type = other DNA
agctatggcatgcac

SEQ ID NO: 6162 - protein, 5 aa, synthetic construct
  REGION 1..5: note = Description of Artificial Sequence: Synthetic peptide
SYGMH

SEQ ID NO: 6163 - DNA, 21 bp, synthetic construct
  misc_feature 1..21: note = Description of Artificial Sequence: Synthetic oligonucleotide
  source 1..21: mol_type = other DNA
agaagtagttactactggggc

SEQ ID NO: 6164 - protein, 7 aa, synthetic construct
  REGION 1..7: note = Description of Artificial Sequence: Synthetic peptide
RSSYYWG

SEQ ID NO: 6165 - DNA, 21 bp, synthetic construct
  misc_feature 1..21: note = Description of Artificial Sequence: Synthetic oligonucleotide
  source 1..21: mol_type = other DNA
aatggtggttactactggaac

SEQ ID NO: 6166 - protein, 7 aa, synthetic construct
  REGION 1..7: note = Description of Artificial Sequence: Synthetic peptide
NGGYYWN

SEQ ID NO: 6167 - DNA, 15 bp, synthetic construct
  misc_feature 1..15: note = Description of Artificial Sequence: Synthetic oligonucleotide
  source 1..15: mol_type = other DNA
agctatggcatgcac

SEQ ID NO: 6168 - protein, 5 aa, synthetic construct
  REGION 1..5: note = Description of Artificial Sequence: Synthetic peptide
SYGMH

SEQ ID NO: 6169 - DNA, 15 bp, synthetic construct
  misc_feature 1..15: note = Description of Artificial Sequence: Synthetic oligonucleotide
  source 1..15: mol_type = other DNA
gactatggcatgcac

SEQ ID NO: 6170 - protein, 5 aa, synthetic construct
  REGION 1..5: note = Description of Artificial Sequence: Synthetic peptide
DYGMH

SEQ ID NO: 6171 - DNA, 15 bp, synthetic construct
  misc_feature 1..15: note = Description of Artificial Sequence: Synthetic oligonucleotide
  source 1..15: mol_type = other DNA
aattatgatatcaac

SEQ ID NO: 6172 - protein, 5 aa, synthetic construct
  REGION 1..5: note = Description of Artificial Sequence: Synthetic peptide
NYDIN

SEQ ID NO: 6173 - DNA, 15 bp, synthetic construct
  misc_feature 1..15: note = Description of Artificial Sequence: Synthetic oligonucleotide
  source 1..15: mol_type = other DNA
aactatgccatgacc

SEQ ID NO: 6174 - protein, 5 aa, synthetic construct
  REGION 1..5: note = Description of Artificial Sequence: Synthetic peptide
NYAMT

SEQ ID NO: 6175 - DNA, 15 bp, synthetic construct
  misc_feature 1..15: note = Description of Artificial Sequence: Synthetic oligonucleotide
  source 1..15: mol_type = other DNA
aattatgatatcaac

SEQ ID NO: 6176 - protein, 5 aa, synthetic construct
  REGION 1..5: note = Description of Artificial Sequence: Synthetic peptide
NYDIN

SEQ ID NO: 6177 - DNA, 15 bp, synthetic construct
  misc_feature 1..15: note = Description of Artificial Sequence: Synthetic oligonucleotide
  source 1..15: mol_type = other DNA
aattatgatatcaac

SEQ ID NO: 6178 - protein, 5 aa, synthetic construct
  REGION 1..5: note = Description of Artificial Sequence: Synthetic peptide
NYDIN

SEQ ID NO: 6179 - DNA, 21 bp, synthetic construct
  misc_feature 1..21: note = Description of Artificial Sequence: Synthetic oligonucleotide
  source 1..21: mol_type = other DNA
aatggtggttactactggaac

SEQ ID NO: 6180 - protein, 7 aa, synthetic construct
  REGION 1..7: note = Description of Artificial Sequence: Synthetic peptide
NGGYYWN

SEQ ID NO: 6181 - DNA, 15 bp, synthetic construct
  misc_feature 1..15: note = Description of Artificial Sequence: Synthetic oligonucleotide
  source 1..15: mol_type = other DNA
agctatgccatgagc

SEQ ID NO: 6182 - protein, 5 aa, synthetic construct
  REGION 1..5: note = Description of Artificial Sequence: Synthetic peptide
SYAMS

SEQ ID NO: 6183 - DNA, 15 bp, synthetic construct
  misc_feature 1..15: note = Description of Artificial Sequence: Synthetic oligonucleotide
  source 1..15: mol_type = other DNA
agctatgccatgagc

SEQ ID NO: 6184 - protein, 5 aa, synthetic construct
  REGION 1..5: note = Description of Artificial Sequence: Synthetic peptide
SYAMS

SEQ ID NO: 6185 - DNA, 21 bp, synthetic construct
  misc_feature 1..21: note = Description of Artificial Sequence: Synthetic oligonucleotide
  source 1..21: mol_type = other DNA
aacagtggttactactggagc

SEQ ID NO: 6186 - protein, 7 aa, synthetic construct
  REGION 1..7: note = Description of Artificial Sequence: Synthetic peptide
NSGYYWS

SEQ ID NO: 6187 - DNA, 15 bp, synthetic construct
  misc_feature 1..15: note = Description of Artificial Sequence: Synthetic oligonucleotide
  source 1..15: mol_type = other DNA
agctatgccatgagc

SEQ ID NO: 6188 - protein, 5 aa, synthetic construct
  REGION 1..5: note = Description of Artificial Sequence: Synthetic peptide
SYAMS

SEQ ID NO: 6189 - DNA, 15 bp, synthetic construct
  misc_feature 1..15: note = Description of Artificial Sequence: Synthetic oligonucleotide
  source 1..15: mol_type = other DNA
gactatggcatgcac

SEQ ID NO: 6190 - protein, 5 aa, synthetic construct
  REGION 1..5: note = Description of Artificial Sequence: Synthetic peptide
DYGMH

SEQ ID NO: 6191 - DNA, 15 bp, synthetic construct
  misc_feature 1..15: note = Description of Artificial Sequence: Synthetic oligonucleotide
  source 1..15: mol_type = other DNA
agctatgccatgagc

SEQ ID NO: 6192 - protein, 5 aa, synthetic construct
  REGION 1..5: note = Description of Artificial Sequence: Synthetic peptide
SYAMS

SEQ ID NO: 6193 - DNA, 15 bp, synthetic construct
  misc_feature 1..15: note = Description of Artificial Sequence: Synthetic oligonucleotide
  source 1..15: mol_type = other DNA
gactatggcatgcac

SEQ ID NO: 6194 - protein, 5 aa, synthetic construct
  REGION 1..5: note = Description of Artificial Sequence: Synthetic peptide
DYGMH

SEQ ID NO: 6195 - DNA, 15 bp, synthetic construct
  misc_feature 1..15: note = Description of Artificial Sequence: Synthetic oligonucleotide
  source 1..15: mol_type = other DNA
aattatgatatcaac

SEQ ID NO: 6196 - protein, 5 aa, synthetic construct
  REGION 1..5: note = Description of Artificial Sequence: Synthetic peptide
NYDIN

SEQ ID NO: 6197 - DNA, 15 bp, synthetic construct
  misc_feature 1..15: note = Description of Artificial Sequence: Synthetic oligonucleotide
  source 1..15: mol_type = other DNA
agctatgtcatgcac

SEQ ID NO: 6198 - protein, 5 aa, synthetic construct
  REGION 1..5: note = Description of Artificial Sequence: Synthetic peptide
SYVMH

SEQ ID NO: 6199 - DNA, 15 bp, synthetic construct
  misc_feature 1..15: note = Description of Artificial Sequence: Synthetic oligonucleotide
  source 1..15: mol_type = other DNA
agctatgccatgagc

SEQ ID NO: 6200 - protein, 5 aa, synthetic construct
  REGION 1..5: note = Description of Artificial Sequence: Synthetic peptide
SYAMS

SEQ ID NO: 6201 - DNA, 15 bp, synthetic construct
  misc_feature 1..15: note = Description of Artificial Sequence: Synthetic oligonucleotide
  source 1..15: mol_type = other DNA
aattatgatatcaac

SEQ ID NO: 6202 - protein, 5 aa, synthetic construct
  REGION 1..5: note = Description of Artificial Sequence: Synthetic peptide
NYDIN

SEQ ID NO: 6203 - DNA, 15 bp, synthetic construct
  misc_feature 1..15: note = Description of Artificial Sequence: Synthetic oligonucleotide
  source 1..15: mol_type = other DNA
gactatggcatgcac

SEQ ID NO: 6204 - protein, 5 aa, synthetic construct
  REGION 1..5: note = Description of Artificial Sequence: Synthetic peptide
DYGMH

SEQ ID NO: 6205 - DNA, 15 bp, synthetic construct
  misc_feature 1..15: note = Description of Artificial Sequence: Synthetic oligonucleotide
  source 1..15: mol_type = other DNA
acctatagcatgact

SEQ ID NO: 6206 - protein, 5 aa, synthetic construct
  REGION 1..5: note = Description of Artificial Sequence: Synthetic peptide
TYSMT

SEQ ID NO: 6207 - DNA, 15 bp, synthetic construct
  misc_feature 1..15: note = Description of Artificial Sequence: Synthetic oligonucleotide
  source 1..15: mol_type = other DNA
agctatggcatgcac

SEQ ID NO: 6208 - protein, 5 aa, synthetic construct
  REGION 1..5: note = Description of Artificial Sequence: Synthetic peptide
SYGMH

SEQ ID NO: 6209 - DNA, 15 bp, synthetic construct
  misc_feature 1..15: note = Description of Artificial Sequence: Synthetic oligonucleotide
  source 1..15: mol_type = other DNA
agctatgccatgaac

SEQ ID NO: 6210 - protein, 5 aa, synthetic construct
  REGION 1..5: note = Description of Artificial Sequence: Synthetic peptide
SYAMN

SEQ ID NO: 6211 - DNA, 15 bp, synthetic construct
  misc_feature 1..15: note = Description of Artificial Sequence: Synthetic oligonucleotide
  source 1..15: mol_type = other DNA
agctatggcatgcac

SEQ ID NO: 6212 - protein, 5 aa, synthetic construct
  REGION 1..5: note = Description of Artificial Sequence: Synthetic peptide
SYGMH

SEQ ID NO: 6213 - DNA, 15 bp, synthetic construct
  misc_feature 1..15: note = Description of Artificial Sequence: Synthetic oligonucleotide
  source 1..15: mol_type = other DNA
agctatgccatgagc

SEQ ID NO: 6214 - protein, 5 aa, synthetic construct
  REGION 1..5: note = Description of Artificial Sequence: Synthetic peptide
SYAMS

SEQ ID NO: 6215 - DNA, 15 bp, synthetic construct
  misc_feature 1..15: note = Description of Artificial Sequence: Synthetic oligonucleotide
  source 1..15: mol_type = other DNA
agctttagcatgaac

SEQ ID NO: 6216 - protein, 5 aa, synthetic construct
  REGION 1..5: note = Description of Artificial Sequence: Synthetic peptide
SFSMN

SEQ ID NO: 6217 - DNA, 15 bp, synthetic construct
  misc_feature 1..15: note = Description of Artificial Sequence: Synthetic oligonucleotide
  source 1..15: mol_type = other DNA
agctatggcatgcac

SEQ ID NO: 6218 - protein, 5 aa, synthetic construct
  REGION 1..5: note = Description of Artificial Sequence: Synthetic peptide
SYGMH

SEQ ID NO: 6219 - DNA, 15 bp, synthetic construct
  misc_feature 1..15: note = Description of Artificial Sequence: Synthetic oligonucleotide
  source 1..15: mol_type = other DNA
agctatgccatgaac

SEQ ID NO: 6220 - protein, 5 aa, synthetic construct
  REGION 1..5: note = Description of Artificial Sequence: Synthetic peptide
SYAMN

SEQ ID NO: 6221 - DNA, 15 bp, synthetic construct
  misc_feature 1..15: note = Description of Artificial Sequence: Synthetic oligonucleotide
  source 1..15: mol_type = other DNA
agctatggcatgcac

SEQ ID NO: 6222 - protein, 5 aa, synthetic construct
  REGION 1..5: note = Description of Artificial Sequence: Synthetic peptide
SYGMH

SEQ ID NO: 6223 - DNA, 15 bp, synthetic construct
  misc_feature 1..15: note = Description of Artificial Sequence: Synthetic oligonucleotide
  source 1..15: mol_type = other DNA
aactatggcatgcac

SEQ ID NO: 6224 - protein, 5 aa, synthetic construct
  REGION 1..5: note = Description of Artificial Sequence: Synthetic peptide
NYGMH

SEQ ID NO: 6225 - DNA, 15 bp, synthetic construct
  misc_feature 1..15: note = Description of Artificial Sequence: Synthetic oligonucleotide
  source 1..15: mol_type = other DNA
agctatgccatgagc

SEQ ID NO: 6226 - protein, 5 aa, synthetic construct
  REGION 1..5: note = Description of Artificial Sequence: Synthetic peptide
SYAMS

SEQ ID NO: 6227 - DNA, 15 bp, synthetic construct
  misc_feature 1..15: note = Description of Artificial Sequence: Synthetic oligonucleotide
  source 1..15: mol_type = other DNA
aattatgatatcaac

SEQ ID NO: 6228 - protein, 5 aa, synthetic construct
  REGION 1..5: note = Description of Artificial Sequence: Synthetic peptide
NYDIN

SEQ ID NO: 6229 - DNA, 15 bp, synthetic construct
  misc_feature 1..15: note = Description of Artificial Sequence: Synthetic oligonucleotide
  source 1..15: mol_type = other DNA
aattatgatatcaac

SEQ ID NO: 6230 - protein, 5 aa, synthetic construct
  REGION 1..5: note = Description of Artificial Sequence: Synthetic peptide
NYDIN

SEQ ID NO: 6231 - DNA, 15 bp, synthetic construct
  misc_feature 1..15: note = Description of Artificial Sequence: Synthetic oligonucleotide
  source 1..15: mol_type = other DNA
aattatgatatcaac

SEQ ID NO: 6232 - protein, 5 aa, synthetic construct
  REGION 1..5: note = Description of Artificial Sequence: Synthetic peptide
NYDIN

SEQ ID NO: 6233 - DNA, 15 bp, synthetic construct
  misc_feature 1..15: note = Description of Artificial Sequence: Synthetic oligonucleotide
  source 1..15: mol_type = other DNA
agctatgccatgagc

SEQ ID NO: 6234 - protein, 5 aa, synthetic construct
  REGION 1..5: note = Description of Artificial Sequence: Synthetic peptide
SYAMS

SEQ ID NO: 6235 - DNA, 15 bp, synthetic construct
  misc_feature 1..15: note = Description of Artificial Sequence: Synthetic oligonucleotide
  source 1..15: mol_type = other DNA
agctatggcatgcac

SEQ ID NO: 6236 - protein, 5 aa, synthetic construct
  REGION 1..5: note = Description of Artificial Sequence: Synthetic peptide
SYGMH

SEQ ID NO: 6237 - DNA, 21 bp, synthetic construct
  misc_feature 1..21: note = Description of Artificial Sequence: Synthetic oligonucleotide
  source 1..21: mol_type = other DNA
aacagtggttactactggagc

SEQ ID NO: 6238 - protein, 7 aa, synthetic construct
  REGION 1..7: note = Description of Artificial Sequence: Synthetic peptide
NSGYYWS

SEQ ID NO: 6239 - DNA, 15 bp, synthetic construct
  misc_feature 1..15: note = Description of Artificial Sequence: Synthetic oligonucleotide
  source 1..15: mol_type = other DNA
agctatatcatgcac

SEQ ID NO: 6240 - protein, 5 aa, synthetic construct
  REGION 1..5: note = Description of Artificial Sequence: Synthetic peptide
SYIMH

SEQ ID NO: 6241 - DNA, 15 bp, synthetic construct
  misc_feature 1..15: note = Description of Artificial Sequence: Synthetic oligonucleotide
  source 1..15: mol_type = other DNA
agctatgccatgaac

SEQ ID NO: 6242 - protein, 5 aa, synthetic construct
  REGION 1..5: note = Description of Artificial Sequence: Synthetic peptide
SYAMN

SEQ ID NO: 6243 - DNA, 21 bp, synthetic construct
  misc_feature 1..21: note = Description of Artificial Sequence: Synthetic oligonucleotide
  source 1..21: mol_type = other DNA
agaagtagttactactggggc

SEQ ID NO: 6244 - protein, 7 aa, synthetic construct
  REGION 1..7: note = Description of Artificial Sequence: Synthetic peptide
RSSYYWG

SEQ ID NO: 6245 - DNA, 15 bp, synthetic construct
  misc_feature 1..15: note = Description of Artificial Sequence: Synthetic oligonucleotide
  source 1..15: mol_type = other DNA
aattactactggagc

SEQ ID NO: 6246 - protein, 5 aa, synthetic construct
  REGION 1..5: note = Description of Artificial Sequence: Synthetic peptide
NYYWS

SEQ ID NO: 6247 - DNA, 15 bp, synthetic construct
  misc_feature 1..15: note = Description of Artificial Sequence: Synthetic oligonucleotide
  source 1..15: mol_type = other DNA
agctatgccatgagc

SEQ ID NO: 6248 - protein, 5 aa, synthetic construct
  REGION 1..5: note = Description of Artificial Sequence: Synthetic peptide
SYAMS

SEQ ID NO: 6249 - DNA, 15 bp, synthetic construct
  misc_feature 1..15: note = Description of Artificial Sequence: Synthetic oligonucleotide
  source 1..15: mol_type = other DNA
agctatgccatgaac

SEQ ID NO: 6250 - protein, 5 aa, synthetic construct
  REGION 1..5: note = Description of Artificial Sequence: Synthetic peptide
SYAMN

SEQ ID NO: 6251 - DNA, 15 bp, synthetic construct
  misc_feature 1..15: note = Description of Artificial Sequence: Synthetic oligonucleotide
  source 1..15: mol_type = other DNA
aactatggcatgcac

SEQ ID NO: 6252 - protein, 5 aa, synthetic construct
  REGION 1..5: note = Description of Artificial Sequence: Synthetic peptide
NYGMH

SEQ ID NO: 6253 - DNA, 15 bp, synthetic construct
  misc_feature 1..15: note = Description of Artificial Sequence: Synthetic oligonucleotide
  source 1..15: mol_type = other DNA
aattatgatatcaac

SEQ ID NO: 6254 - protein, 5 aa, synthetic construct
  REGION 1..5: note = Description of Artificial Sequence: Synthetic peptide
NYDIN

SEQ ID NO: 6255 - DNA, 15 bp, synthetic construct
  misc_feature 1..15: note = Description of Artificial Sequence: Synthetic oligonucleotide
  source 1..15: mol_type = other DNA
agctatgtcatgagt

SEQ ID NO: 6256 - protein, 5 aa, synthetic construct
  REGION 1..5: note = Description of Artificial Sequence: Synthetic peptide
SYVMS

SEQ ID NO: 6257 - DNA, 15 bp, synthetic construct
  misc_feature 1..15: note = Description of Artificial Sequence: Synthetic oligonucleotide
  source 1..15: mol_type = other DNA
agctatggcatgcac

SEQ ID NO: 6258 - protein, 5 aa, synthetic construct
  REGION 1..5: note = Description of Artificial Sequence: Synthetic peptide
SYGMH

SEQ ID NO: 6259 - DNA, 21 bp, synthetic construct
  misc_feature 1..21: note = Description of Artificial Sequence: Synthetic oligonucleotide
  source 1..21: mol_type = other DNA
aacagtggttactactggagc

SEQ ID NO: 6260 - protein, 7 aa, synthetic construct
  REGION 1..7: note = Description of Artificial Sequence: Synthetic peptide
NSGYYWS

SEQ ID NO: 6261 - DNA, 15 bp, synthetic construct
  misc_feature 1..15: note = Description of Artificial Sequence: Synthetic oligonucleotide
  source 1..15: mol_type = other DNA
agttactactggagc

SEQ ID NO: 6262 - protein, 5 aa, synthetic construct
  REGION 1..5: note = Description of Artificial Sequence: Synthetic peptide
SYYWS

SEQ ID NO: 6263 - DNA, 15 bp, synthetic construct
  misc_feature 1..15: note = Description of Artificial Sequence: Synthetic oligonucleotide
  source 1..15: mol_type = other DNA
agctatggcatgcac

SEQ ID NO: 6264 - protein, 5 aa, synthetic construct
  REGION 1..5: note = Description of Artificial Sequence: Synthetic peptide
SYGMH

SEQ ID NO: 6265 - DNA, 15 bp, synthetic construct
  misc_feature 1..15: note = Description of Artificial Sequence: Synthetic oligonucleotide
  source 1..15: mol_type = other DNA
aattatgatatcaac

SEQ ID NO: 6266 - protein, 5 aa, synthetic construct
  REGION 1..5: note = Description of Artificial Sequence: Synthetic peptide
NYDIN

SEQ ID NO: 6267 - DNA, 15 bp, synthetic construct
  misc_feature 1..15: note = Description of Artificial Sequence: Synthetic oligonucleotide
  source 1..15: mol_type = other DNA
aattatgatatcaac

SEQ ID NO: 6268 - protein, 5 aa, synthetic construct
  REGION 1..5: note = Description of Artificial Sequence: Synthetic peptide
NYDIN

SEQ ID NO: 6269 - DNA, 15 bp, synthetic construct
  misc_feature 1..15: note = Description of Artificial Sequence: Synthetic oligonucleotide
  source 1..15: mol_type = other DNA
agctatgccatgagc

SEQ ID NO: 6270 - protein, 5 aa, synthetic construct
  REGION 1..5: note = Description of Artificial Sequence: Synthetic peptide
SYAMS

SEQ ID NO: 6271 - DNA, 15 bp, synthetic construct
  misc_feature 1..15: note = Description of Artificial Sequence: Synthetic oligonucleotide
  source 1..15: mol_type = other DNA
aattatgatatcaac

SEQ ID NO: 6272 - protein, 5 aa, synthetic construct
  REGION 1..5: note = Description of Artificial Sequence: Synthetic peptide
NYDIN

SEQ ID NO: 6273 - DNA, 15 bp, synthetic construct
  misc_feature 1..15: note = Description of Artificial Sequence: Synthetic oligonucleotide
  source 1..15: mol_type = other DNA
agctatgccatgagc

SEQ ID NO: 6274 - protein, 5 aa, synthetic construct
  REGION 1..5: note = Description of Artificial Sequence: Synthetic peptide
SYAMS

SEQ ID NO: 6275 - DNA, 15 bp, synthetic construct
  misc_feature 1..15: note = Description of Artificial Sequence: Synthetic oligonucleotide
  source 1..15: mol_type = other DNA
agctatgccatgagc

SEQ ID NO: 6276 - protein, 5 aa, synthetic construct
  REGION 1..5: note = Description of Artificial Sequence: Synthetic peptide
SYAMS

SEQ ID NO: 6277 - DNA, 15 bp, synthetic construct
  misc_feature 1..15: note = Description of Artificial Sequence: Synthetic oligonucleotide
  source 1..15: mol_type = other DNA
agctatgccatgagc

SEQ ID NO: 6278 - protein, 5 aa, synthetic construct
  REGION 1..5: note = Description of Artificial Sequence: Synthetic peptide
SYAMS

SEQ ID NO: 6279 - DNA, 15 bp, synthetic construct
  misc_feature 1..15: note = Description of Artificial Sequence: Synthetic oligonucleotide
  source 1..15: mol_type = other DNA
agctatggcatgcac

SEQ ID NO: 6280 - protein, 5 aa, synthetic construct
  REGION 1..5: note = Description of Artificial Sequence: Synthetic peptide
SYGMH

SEQ ID NO: 6281 - DNA, 15 bp, synthetic construct
  misc_feature 1..15: note = Description of Artificial Sequence: Synthetic oligonucleotide
  source 1..15: mol_type = other DNA
aattatgatatcaac

SEQ ID NO: 6282 - protein, 5 aa, synthetic construct
  REGION 1..5: note = Description of Artificial Sequence: Synthetic peptide
NYDIN

SEQ ID NO: 6283 - DNA, 15 bp, synthetic construct
  misc_feature 1..15: note = Description of Artificial Sequence: Synthetic oligonucleotide
  source 1..15: mol_type = other DNA
aattatgatatcaac

SEQ ID NO: 6284 - protein, 5 aa, synthetic construct
  REGION 1..5: note = Description of Artificial Sequence: Synthetic peptide
NYDIN

SEQ ID NO: 6285 - DNA, 15 bp, synthetic construct
  misc_feature 1..15: note = Description of Artificial Sequence: Synthetic oligonucleotide
  source 1..15: mol_type = other DNA
agctatgccatgaac

SEQ ID NO: 6286 - protein, 5 aa, synthetic construct
  REGION 1..5: note = Description of Artificial Sequence: Synthetic peptide
SYAMN

SEQ ID NO: 6287 - DNA, 21 bp, synthetic construct
  misc_feature 1..21: note = Description of Artificial Sequence: Synthetic oligonucleotide
  source 1..21: mol_type = other DNA
agaagtagttactactggggc

SEQ ID NO: 6288 - protein, 7 aa, synthetic construct
  REGION 1..7: note = Description of Artificial Sequence: Synthetic peptide
RSSYYWG

SEQ ID NO: 6289 - DNA, 15 bp, synthetic construct
  misc_feature 1..15: note = Description of Artificial Sequence: Synthetic oligonucleotide
  source 1..15: mol_type = other DNA
aattatgatatcaac

SEQ ID NO: 6290 - protein, 5 aa, synthetic construct
  REGION 1..5: note = Description of Artificial Sequence: Synthetic peptide
NYDIN

SEQ ID NO: 6291 - DNA, 15 bp, synthetic construct
  misc_feature 1..15: note = Description of Artificial Sequence: Synthetic oligonucleotide
  source 1..15: mol_type = other DNA
agctatgccatgagc

SEQ ID NO: 6292 - protein, 5 aa, synthetic construct
  REGION 1..5: note = Description of Artificial Sequence: Synthetic peptide
SYAMS

SEQ ID NO: 6293 - DNA, 15 bp, synthetic construct
  misc_feature 1..15: note = Description of Artificial Sequence: Synthetic oligonucleotide
  source 1..15: mol_type = other DNA
agctatagaatgaac

SEQ ID NO: 6294 - protein, 5 aa, synthetic construct
  REGION 1..5: note = Description of Artificial Sequence: Synthetic peptide
SYRMN

SEQ ID NO: 6295 - DNA, 15 bp, synthetic construct
  misc_feature 1..15: note = Description of Artificial Sequence: Synthetic oligonucleotide
  source 1..15: mol_type = other DNA
agttatgccatgagg

SEQ ID NO: 6296 - protein, 5 aa, synthetic construct
  REGION 1..5: note = Description of Artificial Sequence: Synthetic peptide
SYAMR

SEQ ID NO: 6297 - DNA, 15 bp, synthetic construct
  misc_feature 1..15: note = Description of Artificial Sequence: Synthetic oligonucleotide
  source 1..15: mol_type = other DNA
acctatggcatgcac

SEQ ID NO: 6298 - protein, 5 aa, synthetic construct
  REGION 1..5: note = Description of Artificial Sequence: Synthetic peptide
TYGMH

SEQ ID NO: 6299 - DNA, 15 bp, synthetic construct
  misc_feature 1..15: note = Description of Artificial Sequence: Synthetic oligonucleotide
  source 1..15: mol_type = other DNA
acctatgccatgagc

SEQ ID NO: 6300 - protein, 5 aa, synthetic construct
  REGION 1..5: note = Description of Artificial Sequence: Synthetic peptide
TYAMS

SEQ ID NO: 6301 - DNA, 15 bp, synthetic construct
  misc_feature 1..15: note = Description of Artificial Sequence: Synthetic oligonucleotide
  source 1..15: mol_type = other DNA
agctataccatgaac

SEQ ID NO: 6302 - protein, 5 aa, synthetic construct
  REGION 1..5: note = Description of Artificial Sequence: Synthetic peptide
SYTMN

SEQ ID NO: 6303 - DNA, 15 bp, synthetic construct
  misc_feature 1..15: note = Description of Artificial Sequence: Synthetic oligonucleotide
  source 1..15: mol_type = other DNA
agttatagcatgaac

SEQ ID NO: 6304 - protein, 5 aa, synthetic construct
  REGION 1..5: note = Description of Artificial Sequence: Synthetic peptide
SYSMN

SEQ ID NO: 6305 - DNA, 15 bp, synthetic construct
  misc_feature 1..15: note = Description of Artificial Sequence: Synthetic oligonucleotide
  source 1..15: mol_type = other DNA
agctatgtcatgagc

SEQ ID NO: 6306 - protein, 5 aa, synthetic construct
  REGION 1..5: note = Description of Artificial Sequence: Synthetic peptide
SYVMS

SEQ ID NO: 6307 - DNA, 21 bp, synthetic construct
  misc_feature 1..21: note = Description of Artificial Sequence: Synthetic oligonucleotide
  source 1..21: mol_type = other DNA
agtggtagttactactggggc

SEQ ID NO: 6308 - protein, 7 aa, synthetic construct
  REGION 1..7: note = Description of Artificial Sequence: Synthetic peptide
SGSYYWG

SEQ ID NO: 6309 - DNA, 15 bp, synthetic construct
  misc_feature 1..15: note = Description of Artificial Sequence: Synthetic oligonucleotide
  source 1..15: mol_type = other DNA
agttatagcatgaac

SEQ ID NO: 6310 - protein, 5 aa, synthetic construct
  REGION 1..5: note = Description of Artificial Sequence: Synthetic peptide
SYSMN

SEQ ID NO: 6311 - DNA, 15 bp, synthetic construct
  misc_feature 1..15: note = Description of Artificial Sequence: Synthetic oligonucleotide
  source 1..15: mol_type = other DNA
agctatagcatgaac

SEQ ID NO: 6312 - protein, 5 aa, synthetic construct
  REGION 1..5: note = Description of Artificial Sequence: Synthetic peptide
SYSMN

SEQ ID NO: 6313 - DNA, 15 bp, synthetic construct
  misc_feature 1..15: note = Description of Artificial Sequence: Synthetic oligonucleotide
  source 1..15: mol_type = other DNA
aattatggcatgcac

SEQ ID NO: 6314 - protein, 5 aa, synthetic construct
  REGION 1..5: note = Description of Artificial Sequence: Synthetic peptide
NYGMH

SEQ ID NO: 6315 - DNA, 15 bp, synthetic construct
  misc_feature 1..15: note = Description of Artificial Sequence: Synthetic oligonucleotide
  source 1..15: mol_type = other DNA
agctatggcatgcac

SEQ ID NO: 6316 - protein, 5 aa, synthetic construct
  REGION 1..5: note = Description of Artificial Sequence: Synthetic peptide
SYGMH

SEQ ID NO: 6317 - DNA, 15 bp, synthetic construct
  misc_feature 1..15: note = Description of Artificial Sequence: Synthetic oligonucleotide
  source 1..15: mol_type = other DNA
agctataccatgaac

SEQ ID NO: 6318 - protein, 5 aa, synthetic construct
  REGION 1..5: note = Description of Artificial Sequence: Synthetic peptide
SYTMN

SEQ ID NO: 6319 - DNA, 15 bp, synthetic construct
  misc_feature 1..15: note = Description of Artificial Sequence: Synthetic oligonucleotide
  source 1..15: mol_type = other DNA
agctatagcatgaac

SEQ ID NO: 6320 - protein, 5 aa, synthetic construct
  REGION 1..5: note = Description of Artificial Sequence: Synthetic peptide
SYSMN

SEQ ID NO: 6321 - DNA, 15 bp, synthetic construct
  misc_feature 1..15: note = Description of Artificial Sequence: Synthetic oligonucleotide
  source 1..15: mol_type = other DNA
agttatggcatgaac

SEQ ID NO: 6322 - protein, 5 aa, synthetic construct
  REGION 1..5: note = Description of Artificial Sequence: Synthetic peptide
SYGMN

SEQ ID NO: 6323 - DNA, 15 bp, synthetic construct
  misc_feature 1..15: note = Description of Artificial Sequence: Synthetic oligonucleotide
  source 1..15: mol_type = other DNA
gactatgtcatgcac

SEQ ID NO: 6324 - protein, 5 aa, synthetic construct
  REGION 1..5: note = Description of Artificial Sequence: Synthetic peptide
DYVMH

SEQ ID NO: 6325 - DNA, 15 bp, synthetic construct
  misc_feature 1..15: note = Description of Artificial Sequence: Synthetic oligonucleotide
  source 1..15: mol_type = other DNA
agtcacttctggagc

SEQ ID NO: 6326 - protein, 5 aa, synthetic construct
  REGION 1..5: note = Description of Artificial Sequence: Synthetic peptide
SHFWS

SEQ ID NO: 6327 - DNA, 15 bp, synthetic construct
  misc_feature 1..15: note = Description of Artificial Sequence: Synthetic oligonucleotide
  source 1..15: mol_type = other DNA
agttatagcatgaac

SEQ ID NO: 6328 - protein, 5 aa, synthetic construct
  REGION 1..5: note = Description of Artificial Sequence: Synthetic peptide
SYSMN

SEQ ID NO: 6329 - DNA, 15 bp, synthetic construct
  misc_feature 1..15: note = Description of Artificial Sequence: Synthetic oligonucleotide
  source 1..15: mol_type = other DNA
agctatagcatgaac

SEQ ID NO: 6330 - protein, 5 aa, synthetic construct
  REGION 1..5: note = Description of Artificial Sequence: Synthetic peptide
SYSMN

SEQ ID NO: 6331 - DNA, 15 bp, synthetic construct
  misc_feature 1..15: note = Description of Artificial Sequence: Synthetic oligonucleotide
  source 1..15: mol_type = other DNA
agctatggcatgcac

SEQ ID NO: 6332 - protein, 5 aa, synthetic construct
  REGION 1..5: note = Description of Artificial Sequence: Synthetic peptide
SYGMH

SEQ ID NO: 6333 - DNA, 15 bp, synthetic construct
  misc_feature 1..15: note = Description of Artificial Sequence: Synthetic oligonucleotide
  source 1..15: mol_type = other DNA
agctataccatgaac

SEQ ID NO: 6334 - protein, 5 aa, synthetic construct
  REGION 1..5: note = Description of Artificial Sequence: Synthetic peptide
SYTMN

SEQ ID NO: 6335 - DNA, 15 bp, synthetic construct
  misc_feature 1..15: note = Description of Artificial Sequence: Synthetic oligonucleotide
  source 1..15: mol_type = other DNA
aattatgatatcaac

SEQ ID NO: 6336 - protein, 5 aa, synthetic construct
  REGION 1..5: note = Description of Artificial Sequence: Synthetic peptide
NYDIN

SEQ ID NO: 6337 - DNA, 15 bp, synthetic construct
  misc_feature 1..15: note = Description of Artificial Sequence: Synthetic oligonucleotide
  source 1..15: mol_type = other DNA
agctatgtcatgagc

SEQ ID NO: 6338 - protein, 5 aa, synthetic construct
  REGION 1..5: note = Description of Artificial Sequence: Synthetic peptide
SYVMS

SEQ ID NO: 6339 - DNA, 15 bp, synthetic construct
  misc_feature 1..15: note = Description of Artificial Sequence: Synthetic oligonucleotide
  source 1..15: mol_type = other DNA
agctatagaatgaac

SEQ ID NO: 6340 - protein, 5 aa, synthetic construct
  REGION 1..5: note = Description of Artificial Sequence: Synthetic peptide
SYRMN

SEQ ID NO: 6341 - DNA, 15 bp, synthetic construct
  misc_feature 1..15: note = Description of Artificial Sequence: Synthetic oligonucleotide
  source 1..15: mol_type = other DNA
agttatgatatcaac

SEQ ID NO: 6342 - protein, 5 aa, synthetic construct
  REGION 1..5: note = Description of Artificial Sequence: Synthetic peptide
SYDIN

SEQ ID NO: 6343 - DNA, 15 bp, synthetic construct
  misc_feature 1..15: note = Description of Artificial Sequence: Synthetic oligonucleotide
  source 1..15: mol_type = other DNA
aactatggcatgcac

SEQ ID NO: 6344 - protein, 5 aa, synthetic construct
  REGION 1..5: note = Description of Artificial Sequence: Synthetic peptide
NYGMH

SEQ ID NO: 6345 - DNA, 15 bp, synthetic construct
  misc_feature 1..15: note = Description of Artificial Sequence: Synthetic oligonucleotide
  source 1..15: mol_type = other DNA
agctatggcatacac

SEQ ID NO: 6346 - protein, 5 aa, synthetic construct
  REGION 1..5: note = Description of Artificial Sequence: Synthetic peptide
SYGIH

SEQ ID NO: 6347 - DNA, 15 bp, synthetic construct
  misc_feature 1..15: note = Description of Artificial Sequence: Synthetic oligonucleotide
  source 1..15: mol_type = other DNA
gactatgtcatgcag

SEQ ID NO: 6348 - protein, 5 aa, synthetic construct
  REGION 1..5: note = Description of Artificial Sequence: Synthetic peptide
DYVMQ

SEQ ID NO: 6349 - DNA, 15 bp, synthetic construct
  misc_feature 1..15: note = Description of Artificial Sequence: Synthetic oligonucleotide
  source 1..15: mol_type = other DNA
aactatgtcatgcac

SEQ ID NO: 6350 - protein, 5 aa, synthetic construct
  REGION 1..5: note = Description of Artificial Sequence: Synthetic peptide
NYVMH

SEQ ID NO: 6351 - DNA, 15 bp, synthetic construct
  misc_feature 1..15: note = Description of Artificial Sequence: Synthetic oligonucleotide
  source 1..15: mol_type = other DNA
agctataccatgaac

SEQ ID NO: 6352 - protein, 5 aa, synthetic construct
  REGION 1..5: note = Description of Artificial Sequence: Synthetic peptide
SYTMN

SEQ ID NO: 6353 - DNA, 15 bp, synthetic construct
  misc_feature 1..15: note = Description of Artificial Sequence: Synthetic oligonucleotide
  source 1..15: mol_type = other DNA
agctatggcatgcac

SEQ ID NO: 6354 - protein, 5 aa, synthetic construct
  REGION 1..5: note = Description of Artificial Sequence: Synthetic peptide
SYGMH

SEQ ID NO: 6355 - DNA, 15 bp, synthetic construct
  misc_feature 1..15: note = Description of Artificial Sequence: Synthetic oligonucleotide
  source 1..15: mol_type = other DNA
agctatgtcatgagc

SEQ ID NO: 6356 - protein, 5 aa, synthetic construct
  REGION 1..5: note = Description of Artificial Sequence: Synthetic peptide
SYVMS

SEQ ID NO: 6357 - DNA, 15 bp, synthetic construct
  misc_feature 1..15: note = Description of Artificial Sequence: Synthetic oligonucleotide
  source 1..15: mol_type = other DNA
agctatcgcatgaac

SEQ ID NO: 6358 - protein, 5 aa, synthetic construct
  REGION 1..5: note = Description of Artificial Sequence: Synthetic peptide
SYRMN

SEQ ID NO: 6359 - DNA, 15 bp, synthetic construct
  misc_feature 1..15: note = Description of Artificial Sequence: Synthetic oligonucleotide
  source 1..15: mol_type = other DNA
agttatggcatgaac

SEQ ID NO: 6360 - protein, 5 aa, synthetic construct
  REGION 1..5: note = Description of Artificial Sequence: Synthetic peptide
SYGMN

SEQ ID NO: 6361 - DNA, 15 bp, synthetic construct
  misc_feature 1..15: note = Description of Artificial Sequence: Synthetic oligonucleotide
  source 1..15: mol_type = other DNA
agctatgtcatgagc

SEQ ID NO: 6362 - protein, 5 aa, synthetic construct
  REGION 1..5: note = Description of Artificial Sequence: Synthetic peptide
SYVMS

SEQ ID NO: 6363 - DNA, 21 bp, synthetic construct
  misc_feature 1..21: note = Description of Artificial Sequence: Synthetic oligonucleotide
  source 1..21: mol_type = other DNA
agaagtagttactactggggc

SEQ ID NO: 6364 - protein, 7 aa, synthetic construct
  REGION 1..7: note = Description of Artificial Sequence: Synthetic peptide
RSSYYWG

SEQ ID NO: 6365 - DNA, 15 bp, synthetic construct
  misc_feature 1..15: note = Description of Artificial Sequence: Synthetic oligonucleotide
  source 1..15: mol_type = other DNA
aattatgatatcaac

SEQ ID NO: 6366 - protein, 5 aa, synthetic construct
  REGION 1..5: note = Description of Artificial Sequence: Synthetic peptide
NYDIN

SEQ ID NO: 6367 - DNA, 15 bp, synthetic construct
  misc_feature 1..15: note = Description of Artificial Sequence: Synthetic oligonucleotide
  source 1..15: mol_type = other DNA
gactatgtcatgcag

SEQ ID NO: 6368 - protein, 5 aa, synthetic construct
  REGION 1..5: note = Description of Artificial Sequence: Synthetic peptide
DYVMQ

SEQ ID NO: 6369 - DNA, 15 bp, synthetic construct
  misc_feature 1..15: note = Description of Artificial Sequence: Synthetic oligonucleotide
  source 1..15: mol_type = other DNA
agttatagcatgaac

SEQ ID NO: 6370 - protein, 5 aa, synthetic construct
  REGION 1..5: note = Description of Artificial Sequence: Synthetic peptide
SYSMN

SEQ ID NO: 6371 - DNA, 15 bp, synthetic construct
  misc_feature 1..15: note = Description of Artificial Sequence: Synthetic oligonucleotide
  source 1..15: mol_type = other DNA
agctataggatgaac

SEQ ID NO: 6372 - protein, 5 aa, synthetic construct
  REGION 1..5: note = Description of Artificial Sequence: Synthetic peptide
SYRMN

SEQ ID NO: 6373 - DNA, 21 bp, synthetic construct
  misc_feature 1..21: note = Description of Artificial Sequence: Synthetic oligonucleotide
  source 1..21: mol_type = other DNA
agaagtagctactactggggc

SEQ ID NO: 6374 - protein, 7 aa, synthetic construct
  REGION 1..7: note = Description of Artificial Sequence: Synthetic peptide
RSSYYWG

SEQ ID NO: 6375 - DNA, 15 bp, synthetic construct
  misc_feature 1..15: note = Description of Artificial Sequence: Synthetic oligonucleotide
  source 1..15: mol_type = other DNA
agctttggcatgcac

SEQ ID NO: 6376 - protein, 5 aa, synthetic construct
  REGION 1..5: note = Description of Artificial Sequence: Synthetic peptide
SFGMH

SEQ ID NO: 6377 - DNA, 15 bp, synthetic construct
  misc_feature 1..15: note = Description of Artificial Sequence: Synthetic oligonucleotide
  source 1..15: mol_type = other DNA
agcaactacatgagc

SEQ ID NO: 6378 - protein, 5 aa, synthetic construct
  REGION 1..5: note = Description of Artificial Sequence: Synthetic peptide
SNYMS

SEQ ID NO: 6379 - DNA, 15 bp, synthetic construct
  misc_feature 1..15: note = Description of Artificial Sequence: Synthetic oligonucleotide
  source 1..15: mol_type = other DNA
agctatggcatgcac

SEQ ID NO: 6380 - protein, 5 aa, synthetic construct
  REGION 1..5: note = Description of Artificial Sequence: Synthetic peptide
SYGMH

SEQ ID NO: 6381 - DNA, 15 bp, synthetic construct
  misc_feature 1..15: note = Description of Artificial Sequence: Synthetic oligonucleotide
  source 1..15: mol_type = other DNA
gactttggcttgcac

SEQ ID NO: 6382 - protein, 5 aa, synthetic construct
  REGION 1..5: note = Description of Artificial Sequence: Synthetic peptide
DFGLH

SEQ ID NO: 6383 - DNA, 15 bp, synthetic construct
  misc_feature 1..15: note = Description of Artificial Sequence: Synthetic oligonucleotide
  source 1..15: mol_type = other DNA
agctatggcatgcac

SEQ ID NO: 6384 - protein, 5 aa, synthetic construct
  REGION 1..5: note = Description of Artificial Sequence: Synthetic peptide
SYGMH

SEQ ID NO: 6385 - DNA, 15 bp, synthetic construct
  misc_feature 1..15: note = Description of Artificial Sequence: Synthetic oligonucleotide
  source 1..15: mol_type = other DNA
gactttggcttgcac

SEQ ID NO: 6386 - protein, 5 aa, synthetic construct
  REGION 1..5: note = Description of Artificial Sequence: Synthetic peptide
DFGLH

SEQ ID NO: 6387 - DNA, 15 bp, synthetic construct
  misc_feature 1..15: note = Description of Artificial Sequence: Synthetic oligonucleotide
  source 1..15: mol_type = other DNA
gactatgtcatgcag

SEQ ID NO: 6388 - protein, 5 aa, synthetic construct
  REGION 1..5: note = Description of Artificial Sequence: Synthetic peptide
DYVMQ

SEQ ID NO: 6389 - DNA, 15 bp, synthetic construct
  misc_feature 1..15: note = Description of Artificial Sequence: Synthetic oligonucleotide
  source 1..15: mol_type = other DNA
agttatagcatgaac

SEQ ID NO: 6390 - protein, 5 aa, synthetic construct
  REGION 1..5: note = Description of Artificial Sequence: Synthetic peptide
SYSMN

SEQ ID NO: 6391 - DNA, 15 bp, synthetic construct
  misc_feature 1..15: note = Description of Artificial Sequence: Synthetic oligonucleotide
  source 1..15: mol_type = other DNA
agttatagcatgaac

SEQ ID NO: 6392 - protein, 5 aa, synthetic construct
  REGION 1..5: note = Description of Artificial Sequence: Synthetic peptide
SYSMN

SEQ ID NO: 6393 - DNA, 15 bp, synthetic construct
  misc_feature 1..15: note = Description of Artificial Sequence: Synthetic oligonucleotide
  source 1..15: mol_type = other DNA
aattatgatatcaac

SEQ ID NO: 6394 - protein, 5 aa, synthetic construct
  REGION 1..5: note = Description of Artificial Sequence: Synthetic peptide
NYDIN

SEQ ID NO: 6395 - DNA, 15 bp, synthetic construct
  misc_feature 1..15: note = Description of Artificial Sequence: Synthetic oligonucleotide
  source 1..15: mol_type = other DNA
aattatgatatcaac

SEQ ID NO: 6396 - protein, 5 aa, synthetic construct
  REGION 1..5: note = Description of Artificial Sequence: Synthetic peptide
NYDIN

SEQ ID NO: 6397 - DNA, 15 bp, synthetic construct
  misc_feature 1..15: note = Description of Artificial Sequence: Synthetic oligonucleotide
  source 1..15: mol_type = other DNA
aactatggcatgcac

SEQ ID NO: 6398 - protein, 5 aa, synthetic construct
  REGION 1..5: note = Description of Artificial Sequence: Synthetic peptide
NYGMH

SEQ ID NO: 6399 - DNA, 15 bp, synthetic construct
  misc_feature 1..15: note = Description of Artificial Sequence: Synthetic oligonucleotide
  source 1..15: mol_type = other DNA
agctatagcatgaac

SEQ ID NO: 6400 - protein, 5 aa, synthetic construct
  REGION 1..5: note = Description of Artificial Sequence: Synthetic peptide
SYSMN

SEQ ID NO: 6401 - DNA, 15 bp, synthetic construct
  misc_feature 1..15: note = Description of Artificial Sequence: Synthetic oligonucleotide
  source 1..15: mol_type = other DNA
agctatagcatgaac

SEQ ID NO: 6402 - protein, 5 aa, synthetic construct
  REGION 1..5: note = Description of Artificial Sequence: Synthetic peptide
SYSMN

SEQ ID NO: 6403 - DNA, 15 bp, synthetic construct
  misc_feature 1..15: note = Description of Artificial Sequence: Synthetic oligonucleotide
  source 1..15: mol_type = other DNA
agttatagcatgagc

SEQ ID NO: 6404 - protein, 5 aa, synthetic construct
  REGION 1..5: note = Description of Artificial Sequence: Synthetic peptide
SYSMS

SEQ ID NO: 6405 - DNA, 15 bp, synthetic construct
  misc_feature 1..15: note = Description of Artificial Sequence: Synthetic oligonucleotide
  source 1..15: mol_type = other DNA
agctatagcatgaac

SEQ ID NO: 6406 - protein, 5 aa, synthetic construct
  REGION 1..5: note = Description of Artificial Sequence: Synthetic peptide
SYSMN

SEQ ID NO: 6407 - DNA, 15 bp, synthetic construct
  misc_feature 1..15: note = Description of Artificial Sequence: Synthetic oligonucleotide
  source 1..15: mol_type = other DNA
agctatagcatgaac

SEQ ID NO: 6408 - protein, 5 aa, synthetic construct
  REGION 1..5: note = Description of Artificial Sequence: Synthetic peptide
SYSMN

SEQ ID NO: 6409 - DNA, 15 bp, synthetic construct
  misc_feature 1..15: note = Description of Artificial Sequence: Synthetic oligonucleotide
  source 1..15: mol_type = other DNA
cattatgatatcaac

SEQ ID NO: 6410 - protein, 5 aa, synthetic construct
  REGION 1..5: note = Description of Artificial Sequence: Synthetic peptide
HYDIN

SEQ ID NO: 6411 - DNA, 15 bp, synthetic construct
  misc_feature 1..15: note = Description of Artificial Sequence: Synthetic oligonucleotide
  source 1..15: mol_type = other DNA
agctatagcatgagc

SEQ ID NO: 6412 - protein, 5 aa, synthetic construct
  REGION 1..5: note = Description of Artificial Sequence: Synthetic peptide
SYSMS

SEQ ID NO: 6413 - DNA, 15 bp, synthetic construct
  misc_feature 1..15: note = Description of Artificial Sequence: Synthetic oligonucleotide
  source 1..15: mol_type = other DNA
agctttggcatgcac

SEQ ID NO: 6414 - protein, 5 aa, synthetic construct
  REGION 1..5: note = Description of Artificial Sequence: Synthetic peptide
SFGMH

SEQ ID NO: 6415 - DNA, 15 bp, synthetic construct
  misc_feature 1..15: note = Description of Artificial Sequence: Synthetic oligonucleotide
  source 1..15: mol_type = other DNA
agctttggcatgcac

SEQ ID NO: 6416 - protein, 5 aa, synthetic construct
  REGION 1..5: note = Description of Artificial Sequence: Synthetic peptide
SFGMH

SEQ ID NO: 6417 - DNA, 15 bp, synthetic construct
  misc_feature 1..15: note = Description of Artificial Sequence: Synthetic oligonucleotide
  source 1..15: mol_type = other DNA
agctatgtcatgagc

SEQ ID NO: 6418 - protein, 5 aa, synthetic construct
  REGION 1..5: note = Description of Artificial Sequence: Synthetic peptide
SYVMS

SEQ ID NO: 6419 - DNA, 15 bp, synthetic construct
  misc_feature 1..15: note = Description of Artificial Sequence: Synthetic oligonucleotide
  source 1..15: mol_type = other DNA
agctatggcatgcac

SEQ ID NO: 6420 - protein, 5 aa, synthetic construct
  REGION 1..5: note = Description of Artificial Sequence: Synthetic peptide
SYGMH

SEQ ID NO: 6421 - DNA, 15 bp, synthetic construct
  misc_feature 1..15: note = Description of Artificial Sequence: Synthetic oligonucleotide
  source 1..15: mol_type = other DNA
agttactactggagt

SEQ ID NO: 6422 - protein, 5 aa, synthetic construct
  REGION 1..5: note = Description of Artificial Sequence: Synthetic peptide
SYYWS

SEQ ID NO: 6423 - DNA, 15 bp, synthetic construct
  misc_feature 1..15: note = Description of Artificial Sequence: Synthetic oligonucleotide
  source 1..15: mol_type = other DNA
ggccatagcatgaac

SEQ ID NO: 6424 - protein, 5 aa, synthetic construct
  REGION 1..5: note = Description of Artificial Sequence: Synthetic peptide
GHSMN

SEQ ID NO: 6425 - DNA, 15 bp, synthetic construct
  misc_feature 1..15: note = Description of Artificial Sequence: Synthetic oligonucleotide
  source 1..15: mol_type = other DNA
acctatggcatgcac

SEQ ID NO: 6426 - protein, 5 aa, synthetic construct
  REGION 1..5: note = Description of Artificial Sequence: Synthetic peptide
TYGMH

SEQ ID NO: 6427 - DNA, 15 bp, synthetic construct
  misc_feature 1..15: note = Description of Artificial Sequence: Synthetic oligonucleotide
  source 1..15: mol_type = other DNA
agttactactggagt

SEQ ID NO: 6428 - protein, 5 aa, synthetic construct
  REGION 1..5: note = Description of Artificial Sequence: Synthetic peptide
SYYWS

SEQ ID NO: 6429 - DNA, 15 bp, synthetic construct
  misc_feature 1..15: note = Description of Artificial Sequence: Synthetic oligonucleotide
  source 1..15: mol_type = other DNA
ggccatagcatgaac

SEQ ID NO: 6430 - protein, 5 aa, synthetic construct
  REGION 1..5: note = Description of Artificial Sequence: Synthetic peptide
GHSMN

SEQ ID NO: 6431 - DNA, 15 bp, synthetic construct
  misc_feature 1..15: note = Description of Artificial Sequence: Synthetic oligonucleotide
  source 1..15: mol_type = other DNA
agttactactggacc

SEQ ID NO: 6432 - protein, 5 aa, synthetic construct
  REGION 1..5: note = Description of Artificial Sequence: Synthetic peptide
SYYWT

SEQ ID NO: 6433 - DNA, 15 bp, synthetic construct
  misc_feature 1..15: note = Description of Artificial Sequence: Synthetic oligonucleotide
  source 1..15: mol_type = other DNA
ggctactttatgcac

SEQ ID NO: 6434 - protein, 5 aa, synthetic construct
  REGION 1..5: note = Description of Artificial Sequence: Synthetic peptide
GYFMH

SEQ ID NO: 6435 - DNA, 15 bp, synthetic construct
  misc_feature 1..15: note = Description of Artificial Sequence: Synthetic oligonucleotide
  source 1..15: mol_type = other DNA
agctatgtcatgagt

SEQ ID NO: 6436 - protein, 5 aa, synthetic construct
  REGION 1..5: note = Description of Artificial Sequence: Synthetic peptide
SYVMS

SEQ ID NO: 6437 - DNA, 15 bp, synthetic construct
  misc_feature 1..15: note = Description of Artificial Sequence: Synthetic oligonucleotide
  source 1..15: mol_type = other DNA
gactatgtcatgcac

SEQ ID NO: 6438 - protein, 5 aa, synthetic construct
  REGION 1..5: note = Description of Artificial Sequence: Synthetic peptide
DYVMH

SEQ ID NO: 6439 - DNA, 15 bp, synthetic construct
  misc_feature 1..15: note = Description of Artificial Sequence: Synthetic oligonucleotide
  source 1..15: mol_type = other DNA
agctatggcatgcac

SEQ ID NO: 6440 - protein, 5 aa, synthetic construct
  REGION 1..5: note = Description of Artificial Sequence: Synthetic peptide
SYGMH

SEQ ID NO: 6441 - DNA, 15 bp, synthetic construct
  misc_feature 1..15: note = Description of Artificial Sequence: Synthetic oligonucleotide
  source 1..15: mol_type = other DNA
agctatgtcatgagt

SEQ ID NO: 6442 - protein, 5 aa, synthetic construct
  REGION 1..5: note = Description of Artificial Sequence: Synthetic peptide
SYVMS

SEQ ID NO: 6443 - DNA, 15 bp, synthetic construct
  misc_feature 1..15: note = Description of Artificial Sequence: Synthetic oligonucleotide
  source 1..15: mol_type = other DNA
agttattactggagc

SEQ ID NO: 6444 - protein, 5 aa, synthetic construct
  REGION 1..5: note = Description of Artificial Sequence: Synthetic peptide
SYYWS

SEQ ID NO: 6445 - DNA, 15 bp, synthetic construct
  misc_feature 1..15: note = Description of Artificial Sequence: Synthetic oligonucleotide
  source 1..15: mol_type = other DNA
gactatgtcatgcac

SEQ ID NO: 6446 - protein, 5 aa, synthetic construct
  REGION 1..5: note = Description of Artificial Sequence: Synthetic peptide
DYVMH

SEQ ID NO: 6447 - DNA, 15 bp, synthetic construct
  misc_feature 1..15: note = Description of Artificial Sequence: Synthetic oligonucleotide
  source 1..15: mol_type = other DNA
acctatggcatgcac

SEQ ID NO: 6448 - protein, 5 aa, synthetic construct
  REGION 1..5: note = Description of Artificial Sequence: Synthetic peptide
TYGMH

SEQ ID NO: 6449 - DNA, 15 bp, synthetic construct
  misc_feature 1..15: note = Description of Artificial Sequence: Synthetic oligonucleotide
  source 1..15: mol_type = other DNA
agctatggcatgcac

SEQ ID NO: 6450 - protein, 5 aa, synthetic construct
  REGION 1..5: note = Description of Artificial Sequence: Synthetic peptide
SYGMH

SEQ ID NO: 6451 - DNA, 15 bp, synthetic construct
  misc_feature 1..15: note = Description of Artificial Sequence: Synthetic oligonucleotide
  source 1..15: mol_type = other DNA
acctatggcatgcac

SEQ ID NO: 6452 - protein, 5 aa, synthetic construct
  REGION 1..5: note = Description of Artificial Sequence: Synthetic peptide
TYGMH

SEQ ID NO: 6453 - DNA, 15 bp, synthetic construct
  misc_feature 1..15: note = Description of Artificial Sequence: Synthetic oligonucleotide
  source 1..15: mol_type = other DNA
ggctactttatacac

SEQ ID NO: 6454 - protein, 5 aa, synthetic construct
  REGION 1..5: note = Description of Artificial Sequence: Synthetic peptide
GYFIH

SEQ ID NO: 6455 - DNA, 15 bp, synthetic construct
  misc_feature 1..15: note = Description of Artificial Sequence: Synthetic oligonucleotide
  source 1..15: mol_type = other DNA
aattatgatatcaac

SEQ ID NO: 6456 - protein, 5 aa, synthetic construct
  REGION 1..5: note = Description of Artificial Sequence: Synthetic peptide
NYDIN

SEQ ID NO: 6457 - DNA, 15 bp, synthetic construct
  misc_feature 1..15: note = Description of Artificial Sequence: Synthetic oligonucleotide
  source 1..15: mol_type = other DNA
agctatggcatgcac

SEQ ID NO: 6458 - protein, 5 aa, synthetic construct
  REGION 1..5: note = Description of Artificial Sequence: Synthetic peptide
SYGMH

SEQ ID NO: 6459 - DNA, 15 bp, synthetic construct
  misc_feature 1..15: note = Description of Artificial Sequence: Synthetic oligonucleotide
  source 1..15: mol_type = other DNA
acctatggcatgcac

SEQ ID NO: 6460 - protein, 5 aa, synthetic construct
  REGION 1..5: note = Description of Artificial Sequence: Synthetic peptide
TYGMH

SEQ ID NO: 6461 - DNA, 15 bp, synthetic construct
  misc_feature 1..15: note = Description of Artificial Sequence: Synthetic oligonucleotide
  source 1..15: mol_type = other DNA
acctatggcatgcac

SEQ ID NO: 6462 - protein, 5 aa, synthetic construct
  REGION 1..5: note = Description of Artificial Sequence: Synthetic peptide
TYGMH

SEQ ID NO: 6463 - DNA, 15 bp, synthetic construct
  misc_feature 1..15: note = Description of Artificial Sequence: Synthetic oligonucleotide
  source 1..15: mol_type = other DNA
agctgtgccatgacc

SEQ ID NO: 6464 - protein, 5 aa, synthetic construct
  REGION 1..5: note = Description of Artificial Sequence: Synthetic peptide
SCAMT

SEQ ID NO: 6465 - DNA, 15 bp, synthetic construct
  misc_feature 1..15: note = Description of Artificial Sequence: Synthetic oligonucleotide
  source 1..15: mol_type = other DNA
agctatggcatgcac

SEQ ID NO: 6466 - protein, 5 aa, synthetic construct
  REGION 1..5: note = Description of Artificial Sequence: Synthetic peptide
SYGMH

SEQ ID NO: 6467 - DNA, 15 bp, synthetic construct
  misc_feature 1..15: note = Description of Artificial Sequence: Synthetic oligonucleotide
  source 1..15: mol_type = other DNA
agctctgccatgagc

SEQ ID NO: 6468 - protein, 5 aa, synthetic construct
  REGION 1..5: note = Description of Artificial Sequence: Synthetic peptide
SSAMS

SEQ ID NO: 6469 - DNA, 15 bp, synthetic construct
  misc_feature 1..15: note = Description of Artificial Sequence: Synthetic oligonucleotide
  source 1..15: mol_type = other DNA
agctatgccatgact

SEQ ID NO: 6470 - protein, 5 aa, synthetic construct
  REGION 1..5: note = Description of Artificial Sequence: Synthetic peptide
SYAMT

SEQ ID NO: 6471 - DNA, 15 bp, synthetic construct
  misc_feature 1..15: note = Description of Artificial Sequence: Synthetic oligonucleotide
  source 1..15: mol_type = other DNA
agctatagcatgaac

SEQ ID NO: 6472 - protein, 5 aa, synthetic construct
  REGION 1..5: note = Description of Artificial Sequence: Synthetic peptide
SYSMN

SEQ ID NO: 6473 - DNA, 15 bp, synthetic construct
  misc_feature 1..15: note = Description of Artificial Sequence: Synthetic oligonucleotide
  source 1..15: mol_type = other DNA
acctatggcatgcac

SEQ ID NO: 6474 - protein, 5 aa, synthetic construct
  REGION 1..5: note = Description of Artificial Sequence: Synthetic peptide
TYGMH

SEQ ID NO: 6475 - DNA, 15 bp, synthetic construct
  misc_feature 1..15: note = Description of Artificial Sequence: Synthetic oligonucleotide
  source 1..15: mol_type = other DNA
aactatggcatgcac

SEQ ID NO: 6476 - protein, 5 aa, synthetic construct
  REGION 1..5: note = Description of Artificial Sequence: Synthetic peptide
NYGMH

SEQ ID NO: 6477 - DNA, 15 bp, synthetic construct
  misc_feature 1..15: note = Description of Artificial Sequence: Synthetic oligonucleotide
  source 1..15: mol_type = other DNA
acctatggcatgcac

SEQ ID NO: 6478 - protein, 5 aa, synthetic construct
  REGION 1..5: note = Description of Artificial Sequence: Synthetic peptide
TYGMH

SEQ ID NO: 6479 - DNA, 15 bp, synthetic construct
  misc_feature 1..15: note = Description of Artificial Sequence: Synthetic oligonucleotide
  source 1..15: mol_type = other DNA
aattatgatatcaac

SEQ ID NO: 6480 - protein, 5 aa, synthetic construct
  REGION 1..5: note = Description of Artificial Sequence: Synthetic peptide
NYDIN

SEQ ID NO: 6481 - DNA, 15 bp, synthetic construct
  misc_feature 1..15: note = Description of Artificial Sequence: Synthetic oligonucleotide
  source 1..15: mol_type = other DNA
agctatgccatgagc

SEQ ID NO: 6482 - protein, 5 aa, synthetic construct
  REGION 1..5: note = Description of Artificial Sequence: Synthetic peptide
SYAMS

SEQ ID NO: 6483 - DNA, 15 bp, synthetic construct
  misc_feature 1..15: note = Description of Artificial Sequence: Synthetic oligonucleotide
  source 1..15: mol_type = other DNA
agctatggcatgcac

SEQ ID NO: 6484 - protein, 5 aa, synthetic construct
  REGION 1..5: note = Description of Artificial Sequence: Synthetic peptide
SYGMH

SEQ ID NO: 6485 - DNA, 15 bp, synthetic construct
  misc_feature 1..15: note = Description of Artificial Sequence: Synthetic oligonucleotide
  source 1..15: mol_type = other DNA
agctatggcatacac

SEQ ID NO: 6486 - protein, 5 aa, synthetic construct
  REGION 1..5: note = Description of Artificial Sequence: Synthetic peptide
SYGIH

SEQ ID NO: 6487 - DNA, 15 bp, synthetic construct
  misc_feature 1..15: note = Description of Artificial Sequence: Synthetic oligonucleotide
  source 1..15: mol_type = other DNA
agctatggcatgcac

SEQ ID NO: 6488 - protein, 5 aa, synthetic construct
  REGION 1..5: note = Description of Artificial Sequence: Synthetic peptide
SYGMH

SEQ ID NO: 6489 - DNA, 15 bp, synthetic construct
  misc_feature 1..15: note = Description of Artificial Sequence: Synthetic oligonucleotide
  source 1..15: mol_type = other DNA
aattatgatatcaac

SEQ ID NO: 6490 - protein, 5 aa, synthetic construct
  REGION 1..5: note = Description of Artificial Sequence: Synthetic peptide
NYDIN

SEQ ID NO: 6491 - DNA, 15 bp, synthetic construct
  misc_feature 1..15: note = Description of Artificial Sequence: Synthetic oligonucleotide
  source 1..15: mol_type = other DNA
agctctgccatgagc

SEQ ID NO: 6492 - protein, 5 aa, synthetic construct
  REGION 1..5: note = Description of Artificial Sequence: Synthetic peptide
SSAMS

SEQ ID NO: 6493 - DNA, 15 bp, synthetic construct
  misc_feature 1..15: note = Description of Artificial Sequence: Synthetic oligonucleotide
  source 1..15: mol_type = other DNA
gactatgtcatgcac

SEQ ID NO: 6494 - protein, 5 aa, synthetic construct
  REGION 1..5: note = Description of Artificial Sequence: Synthetic peptide
DYVMH

SEQ ID NO: 6495 - DNA, 15 bp, synthetic construct
  misc_feature 1..15: note = Description of Artificial Sequence: Synthetic oligonucleotide
  source 1..15: mol_type = other DNA
acctatggcatgcac

SEQ ID NO: 6496 - protein, 5 aa, synthetic construct
  REGION 1..5: note = Description of Artificial Sequence: Synthetic peptide
TYGMH

SEQ ID NO: 6497 - DNA, 15 bp, synthetic construct
  misc_feature 1..15: note = Description of Artificial Sequence: Synthetic oligonucleotide
  source 1..15: mol_type = other DNA
ggctactttatgcac

SEQ ID NO: 6498 - protein, 5 aa, synthetic construct
  REGION 1..5: note = Description of Artificial Sequence: Synthetic peptide
GYFMH

SEQ ID NO: 6499 - DNA, 15 bp, synthetic construct
  misc_feature 1..15: note = Description of Artificial Sequence: Synthetic oligonucleotide
  source 1..15: mol_type = other DNA
agctatgtcatgagc

SEQ ID NO: 6500 - protein, 5 aa, synthetic construct
  REGION 1..5: note = Description of Artificial Sequence: Synthetic peptide
SYVMS

SEQ ID NO: 6501 - DNA, 15 bp, synthetic construct
  misc_feature 1..15: note = Description of Artificial Sequence: Synthetic oligonucleotide
  source 1..15: mol_type = other DNA
agctatgccatgagc

SEQ ID NO: 6502 - protein, 5 aa, synthetic construct
  REGION 1..5: note = Description of Artificial Sequence: Synthetic peptide
SYAMS

SEQ ID NO: 6503 - DNA, 15 bp, synthetic construct
  misc_feature 1..15: note = Description of Artificial Sequence: Synthetic oligonucleotide
  source 1..15: mol_type = other DNA
aattatgatctcaac

SEQ ID NO: 6504 - protein, 5 aa, synthetic construct
  REGION 1..5: note = Description of Artificial Sequence: Synthetic peptide
NYDLN

SEQ ID NO: 6505 - DNA, 15 bp, synthetic construct
  misc_feature 1..15: note = Description of Artificial Sequence: Synthetic oligonucleotide
  source 1..15: mol_type = other DNA
agctatgccatgagc

SEQ ID NO: 6506 - protein, 5 aa, synthetic construct
  REGION 1..5: note = Description of Artificial Sequence: Synthetic peptide
SYAMS

SEQ ID NO: 6507 - DNA, 15 bp, synthetic construct
  misc_feature 1..15: note = Description of Artificial Sequence: Synthetic oligonucleotide
  source 1..15: mol_type = other DNA
agctatggcatgcac

SEQ ID NO: 6508 - protein, 5 aa, synthetic construct
  REGION 1..5: note = Description of Artificial Sequence: Synthetic peptide
SYGMH

SEQ ID NO: 6509 - DNA, 15 bp, synthetic construct
  misc_feature 1..15: note = Description of Artificial Sequence: Synthetic oligonucleotide
  source 1..15: mol_type = other DNA
ggccatagtatgaac

SEQ ID NO: 6510 - protein, 5 aa, synthetic construct
  REGION 1..5: note = Description of Artificial Sequence: Synthetic peptide
GHSMN

SEQ ID NO: 6511 - DNA, 15 bp, synthetic construct
  misc_feature 1..15: note = Description of Artificial Sequence: Synthetic oligonucleotide
  source 1..15: mol_type = other DNA
acctatggcatgcac

SEQ ID NO: 6512 - protein, 5 aa, synthetic construct
  REGION 1..5: note = Description of Artificial Sequence: Synthetic peptide
TYGMH

SEQ ID NO: 6513 - DNA, 15 bp, synthetic construct
  misc_feature 1..15: note = Description of Artificial Sequence: Synthetic oligonucleotide
  source 1..15: mol_type = other DNA
gactatgtcatgcac

SEQ ID NO: 6514 - protein, 5 aa, synthetic construct
  REGION 1..5: note = Description of Artificial Sequence: Synthetic peptide
DYVMH

SEQ ID NO: 6515 - DNA, 15 bp, synthetic construct
  misc_feature 1..15: note = Description of Artificial Sequence: Synthetic oligonucleotide
  source 1..15: mol_type = other DNA
agctatgtcatgaac

SEQ ID NO: 6516 - protein, 5 aa, synthetic construct
  REGION 1..5: note = Description of Artificial Sequence: Synthetic peptide
SYVMN

SEQ ID NO: 6517 - DNA, 15 bp, synthetic construct
  misc_feature 1..15: note = Description of Artificial Sequence: Synthetic oligonucleotide
  source 1..15: mol_type = other DNA
gattatgtcatgcac

SEQ ID NO: 6518 - protein, 5 aa, synthetic construct
  REGION 1..5: note = Description of Artificial Sequence: Synthetic peptide
DYVMH

SEQ ID NO: 6519 - DNA, 15 bp, synthetic construct
  misc_feature 1..15: note = Description of Artificial Sequence: Synthetic oligonucleotide
  source 1..15: mol_type = other DNA
agttatgccatgagc

SEQ ID NO: 6520 - protein, 5 aa, synthetic construct
  REGION 1..5: note = Description of Artificial Sequence: Synthetic peptide
SYAMS

SEQ ID NO: 6521 - DNA, 15 bp, synthetic construct
  misc_feature 1..15: note = Description of Artificial Sequence: Synthetic oligonucleotide
  source 1..15: mol_type = other DNA
agctatggcatgcac

SEQ ID NO: 6522 - protein, 5 aa, synthetic construct
  REGION 1..5: note = Description of Artificial Sequence: Synthetic peptide
SYGMH

SEQ ID NO: 6523 - DNA, 15 bp, synthetic construct
  misc_feature 1..15: note = Description of Artificial Sequence: Synthetic oligonucleotide
  source 1..15: mol_type = other DNA
aattatgatatcaac

SEQ ID NO: 6524 - protein, 5 aa, synthetic construct
  REGION 1..5: note = Description of Artificial Sequence: Synthetic peptide
NYDIN

SEQ ID NO: 6525 - DNA, 15 bp, synthetic construct
  misc_feature 1..15: note = Description of Artificial Sequence: Synthetic oligonucleotide
  source 1..15: mol_type = other DNA
agctatgccatgacc

SEQ ID NO: 6526 - protein, 5 aa, synthetic construct
  REGION 1..5: note = Description of Artificial Sequence: Synthetic peptide
SYAMT

SEQ ID NO: 6527 - DNA, 15 bp, synthetic construct
  misc_feature 1..15: note = Description of Artificial Sequence: Synthetic oligonucleotide
  source 1..15: mol_type = other DNA
agctatgccatgacc

SEQ ID NO: 6528 - protein, 5 aa, synthetic construct
  REGION 1..5: note = Description of Artificial Sequence: Synthetic peptide
SYAMT

SEQ ID NO: 6529 - DNA, 15 bp, synthetic construct
  misc_feature 1..15: note = Description of Artificial Sequence: Synthetic oligonucleotide
  source 1..15: mol_type = other DNA
acctatggcatgcac

SEQ ID NO: 6530 - protein, 5 aa, synthetic construct
  REGION 1..5: note = Description of Artificial Sequence: Synthetic peptide
TYGMH

SEQ ID NO: 6531 - DNA, 15 bp, synthetic construct
  misc_feature 1..15: note = Description of Artificial Sequence: Synthetic oligonucleotide
  source 1..15: mol_type = other DNA
acctatggcatgcac

SEQ ID NO: 6532 - protein, 5 aa, synthetic construct
  REGION 1..5: note = Description of Artificial Sequence: Synthetic peptide
TYGMH

SEQ ID NO: 6533 - DNA, 15 bp, synthetic construct
  misc_feature 1..15: note = Description of Artificial Sequence: Synthetic oligonucleotide
  source 1..15: mol_type = other DNA
agctatgccatgacc

SEQ ID NO: 6534 - protein, 5 aa, synthetic construct
  REGION 1..5: note = Description of Artificial Sequence: Synthetic peptide
SYAMT

SEQ ID NO: 6535 - DNA, 15 bp, synthetic construct
  misc_feature 1..15: note = Description of Artificial Sequence: Synthetic oligonucleotide
  source 1..15: mol_type = other DNA
agctatggcatgcac

SEQ ID NO: 6536 - protein, 5 aa, synthetic construct
  REGION 1..5: note = Description of Artificial Sequence: Synthetic peptide
SYGMH

SEQ ID NO: 6537 - DNA, 15 bp, synthetic construct
  misc_feature 1..15: note = Description of Artificial Sequence: Synthetic oligonucleotide
  source 1..15: mol_type = other DNA
agctttgccatgaac

SEQ ID NO: 6538 - protein, 5 aa, synthetic construct
  REGION 1..5: note = Description of Artificial Sequence: Synthetic peptide
SFAMN

SEQ ID NO: 6539 - DNA, 15 bp, synthetic construct
  misc_feature 1..15: note = Description of Artificial Sequence: Synthetic oligonucleotide
  source 1..15: mol_type = other DNA
gcctatggcatgcac

SEQ ID NO: 6540 - protein, 5 aa, synthetic construct
  REGION 1..5: note = Description of Artificial Sequence: Synthetic peptide
AYGMH

SEQ ID NO: 6541 - DNA, 15 bp, synthetic construct
  misc_feature 1..15: note = Description of Artificial Sequence: Synthetic oligonucleotide
  source 1..15: mol_type = other DNA
gactatggcatgcac

SEQ ID NO: 6542 - protein, 5 aa, synthetic construct
  REGION 1..5: note = Description of Artificial Sequence: Synthetic peptide
DYGMH

SEQ ID NO: 6543 - DNA, 15 bp, synthetic construct
  misc_feature 1..15: note = Description of Artificial Sequence: Synthetic oligonucleotide
  source 1..15: mol_type = other DNA
agctatggcatgcac

SEQ ID NO: 6544 - protein, 5 aa, synthetic construct
  REGION 1..5: note = Description of Artificial Sequence: Synthetic peptide
SYGMH

SEQ ID NO: 6545 - DNA, 15 bp, synthetic construct
  misc_feature 1..15: note = Description of Artificial Sequence: Synthetic oligonucleotide
  source 1..15: mol_type = other DNA
agctatggcatgcac

SEQ ID NO: 6546 - protein, 5 aa, synthetic construct
  REGION 1..5: note = Description of Artificial Sequence: Synthetic peptide
SYGMH

SEQ ID NO: 6547 - DNA, 15 bp, synthetic construct
  misc_feature 1..15: note = Description of Artificial Sequence: Synthetic oligonucleotide
  source 1..15: mol_type = other DNA
agctacaatatgcac

SEQ ID NO: 6548 - protein, 5 aa, synthetic construct
  REGION 1..5: note = Description of Artificial Sequence: Synthetic peptide
SYNMH

SEQ ID NO: 6549 - DNA, 15 bp, synthetic construct
  misc_feature 1..15: note = Description of Artificial Sequence: Synthetic oligonucleotide
  source 1..15: mol_type = other DNA
agctatgccatgagt

SEQ ID NO: 6550 - protein, 5 aa, synthetic construct
  REGION 1..5: note = Description of Artificial Sequence: Synthetic peptide
SYAMS

SEQ ID NO: 6551 - DNA, 15 bp, synthetic construct
  misc_feature 1..15: note = Description of Artificial Sequence: Synthetic oligonucleotide
  source 1..15: mol_type = other DNA
aattatgatatcaac

SEQ ID NO: 6552 - protein, 5 aa, synthetic construct
  REGION 1..5: note = Description of Artificial Sequence: Synthetic peptide
NYDIN

SEQ ID NO: 6553 - DNA, 15 bp, synthetic construct
  misc_feature 1..15: note = Description of Artificial Sequence: Synthetic oligonucleotide
  source 1..15: mol_type = other DNA
gactatggcatgcac

SEQ ID NO: 6554 - protein, 5 aa, synthetic construct
  REGION 1..5: note = Description of Artificial Sequence: Synthetic peptide
DYGMH

SEQ ID NO: 6555 - DNA, 15 bp, synthetic construct
  misc_feature 1..15: note = Description of Artificial Sequence: Synthetic oligonucleotide
  source 1..15: mol_type = other DNA
agctatggcatgcac

SEQ ID NO: 6556 - protein, 5 aa, synthetic construct
  REGION 1..5: note = Description of Artificial Sequence: Synthetic peptide
SYGMH

SEQ ID NO: 6557 - DNA, 15 bp, synthetic construct
  misc_feature 1..15: note = Description of Artificial Sequence: Synthetic oligonucleotide
  source 1..15: mol_type = other DNA
agctatgccatgagt

SEQ ID NO: 6558 - protein, 5 aa, synthetic construct
  REGION 1..5: note = Description of Artificial Sequence: Synthetic peptide
SYAMS

SEQ ID NO: 6559 - DNA, 15 bp, synthetic construct
  misc_feature 1..15: note = Description of Artificial Sequence: Synthetic oligonucleotide
  source 1..15: mol_type = other DNA
agctatggcatgcac

SEQ ID NO: 6560 - protein, 5 aa, synthetic construct
  REGION 1..5: note = Description of Artificial Sequence: Synthetic peptide
SYGMH

SEQ ID NO: 6561 - DNA, 15 bp, synthetic construct
  misc_feature 1..15: note = Description of Artificial Sequence: Synthetic oligonucleotide
  source 1..15: mol_type = other DNA
agctatggcatgcac

SEQ ID NO: 6562 - protein, 5 aa, synthetic construct
  REGION 1..5: note = Description of Artificial Sequence: Synthetic peptide
SYGMH

SEQ ID NO: 6563 - DNA, 15 bp, synthetic construct
  misc_feature 1..15: note = Description of Artificial Sequence: Synthetic oligonucleotide
  source 1..15: mol_type = other DNA
gactatagcatgaac

SEQ ID NO: 6564 - protein, 5 aa, synthetic construct
  REGION 1..5: note = Description of Artificial Sequence: Synthetic peptide
DYSMN

SEQ ID NO: 6565 - DNA, 15 bp, synthetic construct
  misc_feature 1..15: note = Description of Artificial Sequence: Synthetic oligonucleotide
  source 1..15: mol_type = other DNA
aattactactggagc

SEQ ID NO: 6566 - protein, 5 aa, synthetic construct
  REGION 1..5: note = Description of Artificial Sequence: Synthetic peptide
NYYWS

SEQ ID NO: 6567 - DNA, 15 bp, synthetic construct
  misc_feature 1..15: note = Description of Artificial Sequence: Synthetic oligonucleotide
  source 1..15: mol_type = other DNA
agctatggcatgcac

SEQ ID NO: 6568 - protein, 5 aa, synthetic construct
  REGION 1..5: note = Description of Artificial Sequence: Synthetic peptide
SYGMH

SEQ ID NO: 6569 - DNA, 15 bp, synthetic construct
  misc_feature 1..15: note = Description of Artificial Sequence: Synthetic oligonucleotide
  source 1..15: mol_type = other DNA
aactatggcatgcac

SEQ ID NO: 6570 - protein, 5 aa, synthetic construct
  REGION 1..5: note = Description of Artificial Sequence: Synthetic peptide
NYGMH

SEQ ID NO: 6571 - DNA, 15 bp, synthetic construct
  misc_feature 1..15: note = Description of Artificial Sequence: Synthetic oligonucleotide
  source 1..15: mol_type = other DNA
agctatgccatgaac

SEQ ID NO: 6572 - protein, 5 aa, synthetic construct
  REGION 1..5: note = Description of Artificial Sequence: Synthetic peptide
SYAMN

SEQ ID NO: 6573 - DNA, 15 bp, synthetic construct
  misc_feature 1..15: note = Description of Artificial Sequence: Synthetic oligonucleotide
  source 1..15: mol_type = other DNA
atttatggcatgcac

SEQ ID NO: 6574 - protein, 5 aa, synthetic construct
  REGION 1..5: note = Description of Artificial Sequence: Synthetic peptide
IYGMH

SEQ ID NO: 6575 - DNA, 15 bp, synthetic construct
  misc_feature 1..15: note = Description of Artificial Sequence: Synthetic oligonucleotide
  source 1..15: mol_type = other DNA
agctaccactggagc

SEQ ID NO: 6576 - protein, 5 aa, synthetic construct
  REGION 1..5: note = Description of Artificial Sequence: Synthetic peptide
SYHWS

SEQ ID NO: 6577 - DNA, 21 bp, synthetic construct
  misc_feature 1..21: note = Description of Artificial Sequence: Synthetic oligonucleotide
  source 1..21: mol_type = other DNA
agtggtggttactactggaac

SEQ ID NO: 6578 - protein, 7 aa, synthetic construct
  REGION 1..7: note = Description of Artificial Sequence: Synthetic peptide
SGGYYWN

SEQ ID NO: 6579 - DNA, 15 bp, synthetic construct
  misc_feature 1..15: note = Description of Artificial Sequence: Synthetic oligonucleotide
  source 1..15: mol_type = other DNA
agctatggcatgcac

SEQ ID NO: 6580 - protein, 5 aa, synthetic construct
  REGION 1..5: note = Description of Artificial Sequence: Synthetic peptide
SYGMH

SEQ ID NO: 6581 - DNA, 15 bp, synthetic construct
  misc_feature 1..15: note = Description of Artificial Sequence: Synthetic oligonucleotide
  source 1..15: mol_type = other DNA
agctatgccatgagc

SEQ ID NO: 6582 - protein, 5 aa, synthetic construct
  REGION 1..5: note = Description of Artificial Sequence: Synthetic peptide
SYAMS

SEQ ID NO: 6583 - DNA, 15 bp, synthetic construct
  misc_feature 1..15: note = Description of Artificial Sequence: Synthetic oligonucleotide
  source 1..15: mol_type = other DNA
aactatggcatgcac

SEQ ID NO: 6584 - protein, 5 aa, synthetic construct
  REGION 1..5: note = Description of Artificial Sequence: Synthetic peptide
NYGMH

SEQ ID NO: 6585 - DNA, 15 bp, synthetic construct
  misc_feature 1..15: note = Description of Artificial Sequence: Synthetic oligonucleotide
  source 1..15: mol_type = other DNA
acctatggcatgcac

SEQ ID NO: 6586 - protein, 5 aa, synthetic construct
  REGION 1..5: note = Description of Artificial Sequence: Synthetic peptide
TYGMH

SEQ ID NO: 6587 - DNA, 15 bp, synthetic construct
  misc_feature 1..15: note = Description of Artificial Sequence: Synthetic oligonucleotide
  source 1..15: mol_type = other DNA
agttatcactggagc

SEQ ID NO: 6588 - protein, 5 aa, synthetic construct
  REGION 1..5: note = Description of Artificial Sequence: Synthetic peptide
SYHWS

SEQ ID NO: 6589 - DNA, 15 bp, synthetic construct
  misc_feature 1..15: note = Description of Artificial Sequence: Synthetic oligonucleotide
  source 1..15: mol_type = other DNA
aattatgatatcaac

SEQ ID NO: 6590 - protein, 5 aa, synthetic construct
  REGION 1..5: note = Description of Artificial Sequence: Synthetic peptide
NYDIN

SEQ ID NO: 6591 - DNA, 21 bp, synthetic construct
  misc_feature 1..21: note = Description of Artificial Sequence: Synthetic oligonucleotide
  source 1..21: mol_type = other DNA
agtggtggttactactggaac

SEQ ID NO: 6592 - protein, 7 aa, synthetic construct
  REGION 1..7: note = Description of Artificial Sequence: Synthetic peptide
SGGYYWN

SEQ ID NO: 6593 - DNA, 15 bp, synthetic construct
  misc_feature 1..15: note = Description of Artificial Sequence: Synthetic oligonucleotide
  source 1..15: mol_type = other DNA
agctatggcatgcac

SEQ ID NO: 6594 - protein, 5 aa, synthetic construct
  REGION 1..5: note = Description of Artificial Sequence: Synthetic peptide
SYGMH

SEQ ID NO: 6595 - DNA, 21 bp, synthetic construct
  misc_feature 1..21: note = Description of Artificial Sequence: Synthetic oligonucleotide
  source 1..21: mol_type = other DNA
agtggtgattactactggaac

SEQ ID NO: 6596 - protein, 7 aa, synthetic construct
  REGION 1..7: note = Description of Artificial Sequence: Synthetic peptide
SGDYYWN

SEQ ID NO: 6597 - DNA, 21 bp, synthetic construct
  misc_feature 1..21: note = Description of Artificial Sequence: Synthetic oligonucleotide
  source 1..21: mol_type = other DNA
agtggtgattactactggaac

SEQ ID NO: 6598 - protein, 7 aa, synthetic construct
  REGION 1..7: note = Description of Artificial Sequence: Synthetic peptide
SGDYYWN

SEQ ID NO: 6599 - DNA, 21 bp, synthetic construct
  misc_feature 1..21: note = Description of Artificial Sequence: Synthetic oligonucleotide
  source 1..21: mol_type = other DNA
agtggtgattactactggaac

SEQ ID NO: 6600 - protein, 7 aa, synthetic construct
  REGION 1..7: note = Description of Artificial Sequence: Synthetic peptide
SGDYYWN

SEQ ID NO: 6601 - DNA, 15 bp, synthetic construct
  misc_feature 1..15: note = Description of Artificial Sequence: Synthetic oligonucleotide
  source 1..15: mol_type = other DNA
agctaccactggagc

SEQ ID NO: 6602 - protein, 5 aa, synthetic construct
  REGION 1..5: note = Description of Artificial Sequence: Synthetic peptide
SYHWS

SEQ ID NO: 6603 - DNA, 15 bp, synthetic construct
  misc_feature 1..15: note = Description of Artificial Sequence: Synthetic oligonucleotide
  source 1..15: mol_type = other DNA
aattatgatatcaac

SEQ ID NO: 6604 - protein, 5 aa, synthetic construct
  REGION 1..5: note = Description of Artificial Sequence: Synthetic peptide
NYDIN

SEQ ID NO: 6605 - DNA, 15 bp, synthetic construct
  misc_feature 1..15: note = Description of Artificial Sequence: Synthetic oligonucleotide
  source 1..15: mol_type = other DNA
agctatggcatgcac

SEQ ID NO: 6606 - protein, 5 aa, synthetic construct
  REGION 1..5: note = Description of Artificial Sequence: Synthetic peptide
SYGMH

SEQ ID NO: 6607 - DNA, 15 bp, synthetic construct
  misc_feature 1..15: note = Description of Artificial Sequence: Synthetic oligonucleotide
  source 1..15: mol_type = other DNA
agctatggcatgcac

SEQ ID NO: 6608 - protein, 5 aa, synthetic construct
  REGION 1..5: note = Description of Artificial Sequence: Synthetic peptide
SYGMH

SEQ ID NO: 6609 - DNA, 15 bp, synthetic construct
  misc_feature 1..15: note = Description of Artificial Sequence: Synthetic oligonucleotide
  source 1..15: mol_type = other DNA
agttatggcatgcac

SEQ ID NO: 6610 - protein, 5 aa, synthetic construct
  REGION 1..5: note = Description of Artificial Sequence: Synthetic peptide
SYGMH

SEQ ID NO: 6611 - DNA, 21 bp, synthetic construct
  misc_feature 1..21: note = Description of Artificial Sequence: Synthetic oligonucleotide
  source 1..21: mol_type = other DNA
agtggtggttactactggaac

SEQ ID NO: 6612 - protein, 7 aa, synthetic construct
  REGION 1..7: note = Description of Artificial Sequence: Synthetic peptide
SGGYYWN

SEQ ID NO: 6613 - DNA, 15 bp, synthetic construct
  misc_feature 1..15: note = Description of Artificial Sequence: Synthetic oligonucleotide
  source 1..15: mol_type = other DNA
gactatagcatgaac

SEQ ID NO: 6614 - protein, 5 aa, synthetic construct
  REGION 1..5: note = Description of Artificial Sequence: Synthetic peptide
DYSMN

SEQ ID NO: 6615 - DNA, 15 bp, synthetic construct
  misc_feature 1..15: note = Description of Artificial Sequence: Synthetic oligonucleotide
  source 1..15: mol_type = other DNA
agctatgccatgaac

SEQ ID NO: 6616 - protein, 5 aa, synthetic construct
  REGION 1..5: note = Description of Artificial Sequence: Synthetic peptide
SYAMN

SEQ ID NO: 6617 - DNA, 15 bp, synthetic construct
  misc_feature 1..15: note = Description of Artificial Sequence: Synthetic oligonucleotide
  source 1..15: mol_type = other DNA
agctatggcatgcac

SEQ ID NO: 6618 - protein, 5 aa, synthetic construct
  REGION 1..5: note = Description of Artificial Sequence: Synthetic peptide
SYGMH

SEQ ID NO: 6619 - DNA, 15 bp, synthetic construct
  misc_feature 1..15: note = Description of Artificial Sequence: Synthetic oligonucleotide
  source 1..15: mol_type = other DNA
agctaccactggagc

SEQ ID NO: 6620 - protein, 5 aa, synthetic construct
  REGION 1..5: note = Description of Artificial Sequence: Synthetic peptide
SYHWS

SEQ ID NO: 6621 - DNA, 15 bp, synthetic construct
  misc_feature 1..15: note = Description of Artificial Sequence: Synthetic oligonucleotide
  source 1..15: mol_type = other DNA
agctatggcatgcac

SEQ ID NO: 6622 - protein, 5 aa, synthetic construct
  REGION 1..5: note = Description of Artificial Sequence: Synthetic peptide
SYGMH

SEQ ID NO: 6623 - DNA, 15 bp, synthetic construct
  misc_feature 1..15: note = Description of Artificial Sequence: Synthetic oligonucleotide
  source 1..15: mol_type = other DNA
acctatgccatgagt

SEQ ID NO: 6624 - protein, 5 aa, synthetic construct
  REGION 1..5: note = Description of Artificial Sequence: Synthetic peptide
TYAMS

SEQ ID NO: 6625 - DNA, 15 bp, synthetic construct
  misc_feature 1..15: note = Description of Artificial Sequence: Synthetic oligonucleotide
  source 1..15: mol_type = other DNA
agctacaatatgcac

SEQ ID NO: 6626 - protein, 5 aa, synthetic construct
  REGION 1..5: note = Description of Artificial Sequence: Synthetic peptide
SYNMH

SEQ ID NO: 6627 - DNA, 15 bp, synthetic construct
  misc_feature 1..15: note = Description of Artificial Sequence: Synthetic oligonucleotide
  source 1..15: mol_type = other DNA
gactatggcatgcac

SEQ ID NO: 6628 - protein, 5 aa, synthetic construct
  REGION 1..5: note = Description of Artificial Sequence: Synthetic peptide
DYGMH

SEQ ID NO: 6629 - DNA, 15 bp, synthetic construct
  misc_feature 1..15: note = Description of Artificial Sequence: Synthetic oligonucleotide
  source 1..15: mol_type = other DNA
gactatggcatgcac

SEQ ID NO: 6630 - protein, 5 aa, synthetic construct
  REGION 1..5: note = Description of Artificial Sequence: Synthetic peptide
DYGMH

SEQ ID NO: 6631 - DNA, 15 bp, synthetic construct
  misc_feature 1..15: note = Description of Artificial Sequence: Synthetic oligonucleotide
  source 1..15: mol_type = other DNA
agctatagcatgaac

SEQ ID NO: 6632 - protein, 5 aa, synthetic construct
  REGION 1..5: note = Description of Artificial Sequence: Synthetic peptide
SYSMN

SEQ ID NO: 6633 - DNA, 15 bp, synthetic construct
  misc_feature 1..15: note = Description of Artificial Sequence: Synthetic oligonucleotide
  source 1..15: mol_type = other DNA
agctacaatatgcac

SEQ ID NO: 6634 - protein, 5 aa, synthetic construct
  REGION 1..5: note = Description of Artificial Sequence: Synthetic peptide
SYNMH

SEQ ID NO: 6635 - DNA, 15 bp, synthetic construct
  misc_feature 1..15: note = Description of Artificial Sequence: Synthetic oligonucleotide
  source 1..15: mol_type = other DNA
acctatggcatgcac

SEQ ID NO: 6636 - protein, 5 aa, synthetic construct
  REGION 1..5: note = Description of Artificial Sequence: Synthetic peptide
TYGMH

SEQ ID NO: 6637 - DNA, 15 bp, synthetic construct
  misc_feature 1..15: note = Description of Artificial Sequence: Synthetic oligonucleotide
  source 1..15: mol_type = other DNA
agctatgccatgagt

SEQ ID NO: 6638 - protein, 5 aa, synthetic construct
  REGION 1..5: note = Description of Artificial Sequence: Synthetic peptide
SYAMS

SEQ ID NO: 6639 - DNA, 15 bp, synthetic construct
  misc_feature 1..15: note = Description of Artificial Sequence: Synthetic oligonucleotide
  source 1..15: mol_type = other DNA
agctacaatatgcac

SEQ ID NO: 6640 - protein, 5 aa, synthetic construct
  REGION 1..5: note = Description of Artificial Sequence: Synthetic peptide
SYNMH

SEQ ID NO: 6641 - DNA, 15 bp, synthetic construct
  misc_feature 1..15: note = Description of Artificial Sequence: Synthetic oligonucleotide
  source 1..15: mol_type = other DNA
agctctgccatgaac

SEQ ID NO: 6642 - protein, 5 aa, synthetic construct
  REGION 1..5: note = Description of Artificial Sequence: Synthetic peptide
SSAMN

SEQ ID NO: 6643 - DNA, 15 bp, synthetic construct
  misc_feature 1..15: note = Description of Artificial Sequence: Synthetic oligonucleotide
  source 1..15: mol_type = other DNA
agctacaatatgcac

SEQ ID NO: 6644 - protein, 5 aa, synthetic construct
  REGION 1..5: note = Description of Artificial Sequence: Synthetic peptide
SYNMH

SEQ ID NO: 6645 - DNA, 15 bp, synthetic construct
  misc_feature 1..15: note = Description of Artificial Sequence: Synthetic oligonucleotide
  source 1..15: mol_type = other DNA
agttatggcatgcac

SEQ ID NO: 6646 - protein, 5 aa, synthetic construct
  REGION 1..5: note = Description of Artificial Sequence: Synthetic peptide
SYGMH

SEQ ID NO: 6647 - DNA, 15 bp, synthetic construct
  misc_feature 1..15: note = Description of Artificial Sequence: Synthetic oligonucleotide
  source 1..15: mol_type = other DNA
aactatggcatgcac

SEQ ID NO: 6648 - protein, 5 aa, synthetic construct
  REGION 1..5: note = Description of Artificial Sequence: Synthetic peptide
NYGMH

SEQ ID NO: 6649 - DNA, 15 bp, synthetic construct
  misc_feature 1..15: note = Description of Artificial Sequence: Synthetic oligonucleotide
  source 1..15: mol_type = other DNA
gactactacatgagc

SEQ ID NO: 6650 - protein, 5 aa, synthetic construct
  REGION 1..5: note = Description of Artificial Sequence: Synthetic peptide
DYYMS

SEQ ID NO: 6651 - DNA, 21 bp, synthetic construct
  misc_feature 1..21: note = Description of Artificial Sequence: Synthetic oligonucleotide
  source 1..21: mol_type = other DNA
agtggtggttactactggaac

SEQ ID NO: 6652 - protein, 7 aa, synthetic construct
  REGION 1..7: note = Description of Artificial Sequence: Synthetic peptide
SGGYYWN

SEQ ID NO: 6653 - DNA, 15 bp, synthetic construct
  misc_feature 1..15: note = Description of Artificial Sequence: Synthetic oligonucleotide
  source 1..15: mol_type = other DNA
agctatggcatgcac

SEQ ID NO: 6654 - protein, 5 aa, synthetic construct
  REGION 1..5: note = Description of Artificial Sequence: Synthetic peptide
SYGMH

SEQ ID NO: 6655 - DNA, 15 bp, synthetic construct
  misc_feature 1..15: note = Description of Artificial Sequence: Synthetic oligonucleotide
  source 1..15: mol_type = other DNA
agctatgccatgagc

SEQ ID NO: 6656 - protein, 5 aa, synthetic construct
  REGION 1..5: note = Description of Artificial Sequence: Synthetic peptide
SYAMS

SEQ ID NO: 6657 - DNA, 21 bp, synthetic construct
  misc_feature 1..21: note = Description of Artificial Sequence: Synthetic oligonucleotide
  source 1..21: mol_type = other DNA
agtggtgattactactggaac

SEQ ID NO: 6658 - protein, 7 aa, synthetic construct
  REGION 1..7: note = Description of Artificial Sequence: Synthetic peptide
SGDYYWN

SEQ ID NO: 6659 - DNA, 21 bp, synthetic construct
  misc_feature 1..21: note = Description of Artificial Sequence: Synthetic oligonucleotide
  source 1..21: mol_type = other DNA
agtggtgtttactactggagc

SEQ ID NO: 6660 - protein, 7 aa, synthetic construct
  REGION 1..7: note = Description of Artificial Sequence: Synthetic peptide
SGVYYWS

SEQ ID NO: 6661 - DNA, 15 bp, synthetic construct
  misc_feature 1..15: note = Description of Artificial Sequence: Synthetic oligonucleotide
  source 1..15: mol_type = other DNA
aattatgatatcaac

SEQ ID NO: 6662 - protein, 5 aa, synthetic construct
  REGION 1..5: note = Description of Artificial Sequence: Synthetic peptide
NYDIN

SEQ ID NO: 6663 - DNA, 15 bp, synthetic construct
  misc_feature 1..15: note = Description of Artificial Sequence: Synthetic oligonucleotide
  source 1..15: mol_type = other DNA
aattactactggagc

SEQ ID NO: 6664 - protein, 5 aa, synthetic construct
  REGION 1..5: note = Description of Artificial Sequence: Synthetic peptide
NYYWS

SEQ ID NO: 6665 - DNA, 15 bp, synthetic construct
  misc_feature 1..15: note = Description of Artificial Sequence: Synthetic oligonucleotide
  source 1..15: mol_type = other DNA
agctatggcatgcac

SEQ ID NO: 6666 - protein, 5 aa, synthetic construct
  REGION 1..5: note = Description of Artificial Sequence: Synthetic peptide
SYGMH

SEQ ID NO: 6667 - DNA, 15 bp, synthetic construct
  misc_feature 1..15: note = Description of Artificial Sequence: Synthetic oligonucleotide
  source 1..15: mol_type = other DNA
agctttatcatgcac

SEQ ID NO: 6668 - protein, 5 aa, synthetic construct
  REGION 1..5: note = Description of Artificial Sequence: Synthetic peptide
SFIMH

SEQ ID NO: 6669 - DNA, 15 bp, synthetic construct
  misc_feature 1..15: note = Description of Artificial Sequence: Synthetic oligonucleotide
  source 1..15: mol_type = other DNA
gactactacatgagc

SEQ ID NO: 6670 - protein, 5 aa, synthetic construct
  REGION 1..5: note = Description of Artificial Sequence: Synthetic peptide
DYYMS

SEQ ID NO: 6671 - DNA, 15 bp, synthetic construct
  misc_feature 1..15: note = Description of Artificial Sequence: Synthetic oligonucleotide
  source 1..15: mol_type = other DNA
aattatgatatcaac

SEQ ID NO: 6672 - protein, 5 aa, synthetic construct
  REGION 1..5: note = Description of Artificial Sequence: Synthetic peptide
NYDIN

SEQ ID NO: 6673 - DNA, 15 bp, synthetic construct
  misc_feature 1..15: note = Description of Artificial Sequence: Synthetic oligonucleotide
  source 1..15: mol_type = other DNA
agttaccactggagt

SEQ ID NO: 6674 - protein, 5 aa, synthetic construct
  REGION 1..5: note = Description of Artificial Sequence: Synthetic peptide
SYHWS

SEQ ID NO: 6675 - DNA, 15 bp, synthetic construct
  misc_feature 1..15: note = Description of Artificial Sequence: Synthetic oligonucleotide
  source 1..15: mol_type = other DNA
agctatgccatgagt

SEQ ID NO: 6676 - protein, 5 aa, synthetic construct
  REGION 1..5: note = Description of Artificial Sequence: Synthetic peptide
SYAMS

SEQ ID NO: 6677 - DNA, 15 bp, synthetic construct
  misc_feature 1..15: note = Description of Artificial Sequence: Synthetic oligonucleotide
  source 1..15: mol_type = other DNA
acttatggcatgcac

SEQ ID NO: 6678 - protein, 5 aa, synthetic construct
  REGION 1..5: note = Description of Artificial Sequence: Synthetic peptide
TYGMH

SEQ ID NO: 6679 - DNA, 15 bp, synthetic construct
  misc_feature 1..15: note = Description of Artificial Sequence: Synthetic oligonucleotide
  source 1..15: mol_type = other DNA
agctatgccatgagc

SEQ ID NO: 6680 - protein, 5 aa, synthetic construct
  REGION 1..5: note = Description of Artificial Sequence: Synthetic peptide
SYAMS

SEQ ID NO: 6681 - DNA, 15 bp, synthetic construct
  misc_feature 1..15: note = Description of Artificial Sequence: Synthetic oligonucleotide
  source 1..15: mol_type = other DNA
aactatggcatgcac

SEQ ID NO: 6682 - protein, 5 aa, synthetic construct
  REGION 1..5: note = Description of Artificial Sequence: Synthetic peptide
NYGMH

SEQ ID NO: 6683 - DNA, 21 bp, synthetic construct
  misc_feature 1..21: note = Description of Artificial Sequence: Synthetic oligonucleotide
  source 1..21: mol_type = other DNA
agtggtgattactactggaac

SEQ ID NO: 6684 - protein, 7 aa, synthetic construct
  REGION 1..7: note = Description of Artificial Sequence: Synthetic peptide
SGDYYWN

SEQ ID NO: 6685 - DNA, 15 bp, synthetic construct
  misc_feature 1..15: note = Description of Artificial Sequence: Synthetic oligonucleotide
  source 1..15: mol_type = other DNA
aactatggcatgcac

SEQ ID NO: 6686 - protein, 5 aa, synthetic construct
  REGION 1..5: note = Description of Artificial Sequence: Synthetic peptide
NYGMH

SEQ ID NO: 6687 - DNA, 21 bp, synthetic construct
  misc_feature 1..21: note = Description of Artificial Sequence: Synthetic oligonucleotide
  source 1..21: mol_type = other DNA
agtggtggttactactggaac

SEQ ID NO: 6688 - protein, 7 aa, synthetic construct
  REGION 1..7: note = Description of Artificial Sequence: Synthetic peptide
SGGYYWN

SEQ ID NO: 6689 - DNA, 15 bp, synthetic construct
  misc_feature 1..15: note = Description of Artificial Sequence: Synthetic oligonucleotide
  source 1..15: mol_type = other DNA
agctatggcatgcac

SEQ ID NO: 6690 - protein, 5 aa, synthetic construct
  REGION 1..5: note = Description of Artificial Sequence: Synthetic peptide
SYGMH

SEQ ID NO: 6691 - DNA, 15 bp, synthetic construct
  misc_feature 1..15: note = Description of Artificial Sequence: Synthetic oligonucleotide
  source 1..15: mol_type = other DNA
agctatggcatgcac

SEQ ID NO: 6692 - protein, 5 aa, synthetic construct
  REGION 1..5: note = Description of Artificial Sequence: Synthetic peptide
SYGMH

SEQ ID NO: 6693 - DNA, 15 bp, synthetic construct
  misc_feature 1..15: note = Description of Artificial Sequence: Synthetic oligonucleotide
  source 1..15: mol_type = other DNA
gactactacatgagc

SEQ ID NO: 6694 - protein, 5 aa, synthetic construct
  REGION 1..5: note = Description of Artificial Sequence: Synthetic peptide
DYYMS

SEQ ID NO: 6695 - DNA, 15 bp, synthetic construct
  misc_feature 1..15: note = Description of Artificial Sequence: Synthetic oligonucleotide
  source 1..15: mol_type = other DNA
agctatggcatgcac

SEQ ID NO: 6696 - protein, 5 aa, synthetic construct
  REGION 1..5: note = Description of Artificial Sequence: Synthetic peptide
SYGMH

SEQ ID NO: 6697 - DNA, 15 bp, synthetic construct
  misc_feature 1..15: note = Description of Artificial Sequence: Synthetic oligonucleotide
  source 1..15: mol_type = other DNA
agctatggcatgcac

SEQ ID NO: 6698 - protein, 5 aa, synthetic construct
  REGION 1..5: note = Description of Artificial Sequence: Synthetic peptide
SYGMH

SEQ ID NO: 6699 - DNA, 15 bp, synthetic construct
  misc_feature 1..15: note = Description of Artificial Sequence: Synthetic oligonucleotide
  source 1..15: mol_type = other DNA
agctatggcatgcac

SEQ ID NO: 6700 - protein, 5 aa, synthetic construct
  REGION 1..5: note = Description of Artificial Sequence: Synthetic peptide
SYGMH

SEQ ID NO: 6701 - DNA, 15 bp, synthetic construct
  misc_feature 1..15: note = Description of Artificial Sequence: Synthetic oligonucleotide
  source 1..15: mol_type = other DNA
agctctgccatgagc

SEQ ID NO: 6702 - protein, 5 aa, synthetic construct
  REGION 1..5: note = Description of Artificial Sequence: Synthetic peptide
SSAMS

SEQ ID NO: 6703 - DNA, 21 bp, synthetic construct
  misc_feature 1..21: note = Description of Artificial Sequence: Synthetic oligonucleotide
  source 1..21: mol_type = other DNA
agtggtgattactactggaac

SEQ ID NO: 6704 - protein, 7 aa, synthetic construct
  REGION 1..7: note = Description of Artificial Sequence: Synthetic peptide
SGDYYWN

SEQ ID NO: 6705 - DNA, 15 bp, synthetic construct
  misc_feature 1..15: note = Description of Artificial Sequence: Synthetic oligonucleotide
  source 1..15: mol_type = other DNA
agctatggcatgcac

SEQ ID NO: 6706 - protein, 5 aa, synthetic construct
  REGION 1..5: note = Description of Artificial Sequence: Synthetic peptide
SYGMH

SEQ ID NO: 6707 - DNA, 21 bp, synthetic construct
  misc_feature 1..21: note = Description of Artificial Sequence: Synthetic oligonucleotide
  source 1..21: mol_type = other DNA
agtgttagttactactggagc

SEQ ID NO: 6708 - protein, 7 aa, synthetic construct
  REGION 1..7: note = Description of Artificial Sequence: Synthetic peptide
SVSYYWS

SEQ ID NO: 6709 - DNA, 15 bp, synthetic construct
  misc_feature 1..15: note = Description of Artificial Sequence: Synthetic oligonucleotide
  source 1..15: mol_type = other DNA
agttatggcatgcac

SEQ ID NO: 6710 - protein, 5 aa, synthetic construct
  REGION 1..5: note = Description of Artificial Sequence: Synthetic peptide
SYGMH

SEQ ID NO: 6711 - DNA, 15 bp, synthetic construct
  misc_feature 1..15: note = Description of Artificial Sequence: Synthetic oligonucleotide
  source 1..15: mol_type = other DNA
agctatggcatgcac

SEQ ID NO: 6712 - protein, 5 aa, synthetic construct
  REGION 1..5: note = Description of Artificial Sequence: Synthetic peptide
SYGMH

SEQ ID NO: 6713 - DNA, 21 bp, synthetic construct
  misc_feature 1..21: note = Description of Artificial Sequence: Synthetic oligonucleotide
  source 1..21: mol_type = other DNA
aatggtggatactactggagc

SEQ ID NO: 6714 - protein, 7 aa, synthetic construct
  REGION 1..7: note = Description of Artificial Sequence: Synthetic peptide
NGGYYWS

SEQ ID NO: 6715 - DNA, 15 bp, synthetic construct
  misc_feature 1..15: note = Description of Artificial Sequence: Synthetic oligonucleotide
  source 1..15: mol_type = other DNA
agctttatcatgcac

SEQ ID NO: 6716 - protein, 5 aa, synthetic construct
  REGION 1..5: note = Description of Artificial Sequence: Synthetic peptide
SFIMH

SEQ ID NO: 6717 - DNA, 15 bp, synthetic construct
  misc_feature 1..15: note = Description of Artificial Sequence: Synthetic oligonucleotide
  source 1..15: mol_type = other DNA
agctatggcatgcac

SEQ ID NO: 6718 - protein, 5 aa, synthetic construct
  REGION 1..5: note = Description of Artificial Sequence: Synthetic peptide
SYGMH

SEQ ID NO: 6719 - DNA, 15 bp, synthetic construct
  misc_feature 1..15: note = Description of Artificial Sequence: Synthetic oligonucleotide
  source 1..15: mol_type = other DNA
agctatggcatgcac

SEQ ID NO: 6720 - protein, 5 aa, synthetic construct
  REGION 1..5: note = Description of Artificial Sequence: Synthetic peptide
SYGMH

SEQ ID NO: 6721 - DNA, 15 bp, synthetic construct
  misc_feature 1..15: note = Description of Artificial Sequence: Synthetic oligonucleotide
  source 1..15: mol_type = other DNA
agctatggcatgcac

SEQ ID NO: 6722 - protein, 5 aa, synthetic construct
  REGION 1..5: note = Description of Artificial Sequence: Synthetic peptide
SYGMH

SEQ ID NO: 6723 - DNA, 15 bp, synthetic construct
  misc_feature 1..15: note = Description of Artificial Sequence: Synthetic oligonucleotide
  source 1..15: mol_type = other DNA
ggttgctactggagc

SEQ ID NO: 6724 - protein, 5 aa, synthetic construct
  REGION 1..5: note = Description of Artificial Sequence: Synthetic peptide
GCYWS

SEQ ID NO: 6725 - DNA, 15 bp, synthetic construct
  misc_feature 1..15: note = Description of Artificial Sequence: Synthetic oligonucleotide
  source 1..15: mol_type = other DNA
agctatggcatgcac

SEQ ID NO: 6726 - protein, 5 aa, synthetic construct
  REGION 1..5: note = Description of Artificial Sequence: Synthetic peptide
SYGMH

SEQ ID NO: 6727 - DNA, 15 bp, synthetic construct
  misc_feature 1..15: note = Description of Artificial Sequence: Synthetic oligonucleotide
  source 1..15: mol_type = other DNA
agctaccactggagc

SEQ ID NO: 6728 - protein, 5 aa, synthetic construct
  REGION 1..5: note = Description of Artificial Sequence: Synthetic peptide
SYHWS

SEQ ID NO: 6729 - DNA, 15 bp, synthetic construct
  misc_feature 1..15: note = Description of Artificial Sequence: Synthetic oligonucleotide
  source 1..15: mol_type = other DNA
aactatggcatgcac

SEQ ID NO: 6730 - protein, 5 aa, synthetic construct
  REGION 1..5: note = Description of Artificial Sequence: Synthetic peptide
NYGMH

SEQ ID NO: 6731 - DNA, 15 bp, synthetic construct
  misc_feature 1..15: note = Description of Artificial Sequence: Synthetic oligonucleotide
  source 1..15: mol_type = other DNA
agctatgccatgagc

SEQ ID NO: 6732 - protein, 5 aa, synthetic construct
  REGION 1..5: note = Description of Artificial Sequence: Synthetic peptide
SYAMS

SEQ ID NO: 6733 - DNA, 15 bp, synthetic construct
  misc_feature 1..15: note = Description of Artificial Sequence: Synthetic oligonucleotide
  source 1..15: mol_type = other DNA
agctatggcatgcac

SEQ ID NO: 6734 - protein, 5 aa, synthetic construct
  REGION 1..5: note = Description of Artificial Sequence: Synthetic peptide
SYGMH

SEQ ID NO: 6735 - DNA, 21 bp, synthetic construct
  misc_feature 1..21: note = Description of Artificial Sequence: Synthetic oligonucleotide
  source 1..21: mol_type = other DNA
agtggtgtttaccactggagc

SEQ ID NO: 6736 - protein, 7 aa, synthetic construct
  REGION 1..7: note = Description of Artificial Sequence: Synthetic peptide
SGVYHWS

SEQ ID NO: 6737 - DNA, 21 bp, synthetic construct
  misc_feature 1..21: note = Description of Artificial Sequence: Synthetic oligonucleotide
  source 1..21: mol_type = other DNA
agtggtgtttactactggagc

SEQ ID NO: 6738 - protein, 7 aa, synthetic construct
  REGION 1..7: note = Description of Artificial Sequence: Synthetic peptide
SGVYYWS

SEQ ID NO: 6739 - DNA, 21 bp, synthetic construct
  misc_feature 1..21: note = Description of Artificial Sequence: Synthetic oligonucleotide
  source 1..21: mol_type = other DNA
agtggtgtttactactggagc

SEQ ID NO: 6740 - protein, 7 aa, synthetic construct
  REGION 1..7: note = Description of Artificial Sequence: Synthetic peptide
SGVYYWS

SEQ ID NO: 6741 - DNA, 15 bp, synthetic construct
  misc_feature 1..15: note = Description of Artificial Sequence: Synthetic oligonucleotide
  source 1..15: mol_type = other DNA
acctttgccatgagt

SEQ ID NO: 6742 - protein, 5 aa, synthetic construct
  REGION 1..5: note = Description of Artificial Sequence: Synthetic peptide
TFAMS

SEQ ID NO: 6743 - DNA, 21 bp, synthetic construct
  misc_feature 1..21: note = Description of Artificial Sequence: Synthetic oligonucleotide
  source 1..21: mol_type = other DNA
agtggtgattactactggaac

SEQ ID NO: 6744 - protein, 7 aa, synthetic construct
  REGION 1..7: note = Description of Artificial Sequence: Synthetic peptide
SGDYYWN

SEQ ID NO: 6745 - DNA, 21 bp, synthetic construct
  misc_feature 1..21: note = Description of Artificial Sequence: Synthetic oligonucleotide
  source 1..21: mol_type = other DNA
agtggtgattactactggaac

SEQ ID NO: 6746 - protein, 7 aa, synthetic construct
  REGION 1..7: note = Description of Artificial Sequence: Synthetic peptide
SGDYYWN

SEQ ID NO: 6747 - DNA, 15 bp, synthetic construct
  misc_feature 1..15: note = Description of Artificial Sequence: Synthetic oligonucleotide
  source 1..15: mol_type = other DNA
agctatgccatgaac

SEQ ID NO: 6748 - protein, 5 aa, synthetic construct
  REGION 1..5: note = Description of Artificial Sequence: Synthetic peptide
SYAMN

SEQ ID NO: 6749 - DNA, 15 bp, synthetic construct
  misc_feature 1..15: note = Description of Artificial Sequence: Synthetic oligonucleotide
  source 1..15: mol_type = other DNA
aattatgatatcaac

SEQ ID NO: 6750 - protein, 5 aa, synthetic construct
  REGION 1..5: note = Description of Artificial Sequence: Synthetic peptide
NYDIN

SEQ ID NO: 6751 - DNA, 15 bp, synthetic construct
  misc_feature 1..15: note = Description of Artificial Sequence: Synthetic oligonucleotide
  source 1..15: mol_type = other DNA
agttatgatatcaac

SEQ ID NO: 6752 - protein, 5 aa, synthetic construct
  REGION 1..5: note = Description of Artificial Sequence: Synthetic peptide
SYDIN

SEQ ID NO: 6753 - DNA, 21 bp, synthetic construct
  misc_feature 1..21: note = Description of Artificial Sequence: Synthetic oligonucleotide
  source 1..21: mol_type = other DNA
agtggtggttactactggagc

SEQ ID NO: 6754 - protein, 7 aa, synthetic construct
  REGION 1..7: note = Description of Artificial Sequence: Synthetic peptide
SGGYYWS

SEQ ID NO: 6755 - DNA, 15 bp, synthetic construct
  misc_feature 1..15: note = Description of Artificial Sequence: Synthetic oligonucleotide
  source 1..15: mol_type = other DNA
ggtccctactggagt

SEQ ID NO: 6756 - protein, 5 aa, synthetic construct
  REGION 1..5: note = Description of Artificial Sequence: Synthetic peptide
GPYWS

SEQ ID NO: 6757 - DNA, 21 bp, synthetic construct
  misc_feature 1..21: note = Description of Artificial Sequence: Synthetic oligonucleotide
  source 1..21: mol_type = other DNA
agtggtgattactactggaac

SEQ ID NO: 6758 - protein, 7 aa, synthetic construct
  REGION 1..7: note = Description of Artificial Sequence: Synthetic peptide
SGDYYWN

SEQ ID NO: 6759 - DNA, 15 bp, synthetic construct
  misc_feature 1..15: note = Description of Artificial Sequence: Synthetic oligonucleotide
  source 1..15: mol_type = other DNA
agctatggcatgcac

SEQ ID NO: 6760 - protein, 5 aa, synthetic construct
  REGION 1..5: note = Description of Artificial Sequence: Synthetic peptide
SYGMH

SEQ ID NO: 6761 - DNA, 15 bp, synthetic construct
  misc_feature 1..15: note = Description of Artificial Sequence: Synthetic oligonucleotide
  source 1..15: mol_type = other DNA
ggttacttctggacc

SEQ ID NO: 6762 - protein, 5 aa, synthetic construct
  REGION 1..5: note = Description of Artificial Sequence: Synthetic peptide
GYFWT

SEQ ID NO: 6763 - DNA, 21 bp, synthetic construct
  misc_feature 1..21: note = Description of Artificial Sequence: Synthetic oligonucleotide
  source 1..21: mol_type = other DNA
agtggtgattactactggaac

SEQ ID NO: 6764 - protein, 7 aa, synthetic construct
  REGION 1..7: note = Description of Artificial Sequence: Synthetic peptide
SGDYYWN

SEQ ID NO: 6765 - DNA, 21 bp, synthetic construct
  misc_feature 1..21: note = Description of Artificial Sequence: Synthetic oligonucleotide
  source 1..21: mol_type = other DNA
agtggtggttactactggaac

SEQ ID NO: 6766 - protein, 7 aa, synthetic construct
  REGION 1..7: note = Description of Artificial Sequence: Synthetic peptide
SGGYYWN

SEQ ID NO: 6767 - DNA, 15 bp, synthetic construct
  misc_feature 1..15: note = Description of Artificial Sequence: Synthetic oligonucleotide
  source 1..15: mol_type = other DNA
atctatggcatggac

SEQ ID NO: 6768 - protein, 5 aa, synthetic construct
  REGION 1..5: note = Description of Artificial Sequence: Synthetic peptide
IYGMD

SEQ ID NO: 6769 - DNA, 21 bp, synthetic construct
  misc_feature 1..21: note = Description of Artificial Sequence: Synthetic oligonucleotide
  source 1..21: mol_type = other DNA
agtggtgtttactactggagc

SEQ ID NO: 6770 - protein, 7 aa, synthetic construct
  REGION 1..7: note = Description of Artificial Sequence: Synthetic peptide
SGVYYWS

SEQ ID NO: 6771 - DNA, 21 bp, synthetic construct
  misc_feature 1..21: note = Description of Artificial Sequence: Synthetic oligonucleotide
  source 1..21: mol_type = other DNA
aatggtggatactactggagc

SEQ ID NO: 6772 - protein, 7 aa, synthetic construct
  REGION 1..7: note = Description of Artificial Sequence: Synthetic peptide
NGGYYWS

SEQ ID NO: 6773 - DNA, 15 bp, synthetic construct
  misc_feature 1..15: note = Description of Artificial Sequence: Synthetic oligonucleotide
  source 1..15: mol_type = other DNA
agctatggcatgcac

SEQ ID NO: 6774 - protein, 5 aa, synthetic construct
  REGION 1..5: note = Description of Artificial Sequence: Synthetic peptide
SYGMH

SEQ ID NO: 6775 - DNA, 15 bp, synthetic construct
  misc_feature 1..15: note = Description of Artificial Sequence: Synthetic oligonucleotide
  source 1..15: mol_type = other DNA
gactatagcatgaac

SEQ ID NO: 6776 - protein, 5 aa, synthetic construct
  REGION 1..5: note = Description of Artificial Sequence: Synthetic peptide
DYSMN

SEQ ID NO: 6777 - DNA, 21 bp, synthetic construct
  misc_feature 1..21: note = Description of Artificial Sequence: Synthetic oligonucleotide
  source 1..21: mol_type = other DNA
agtgctgattactactggaac

SEQ ID NO: 6778 - protein, 7 aa, synthetic construct
  REGION 1..7: note = Description of Artificial Sequence: Synthetic peptide
SADYYWN

SEQ ID NO: 6779 - DNA, 15 bp, synthetic construct
  misc_feature 1..15: note = Description of Artificial Sequence: Synthetic oligonucleotide
  source 1..15: mol_type = other DNA
agctatgccatgcac

SEQ ID NO: 6780 - protein, 5 aa, synthetic construct
  REGION 1..5: note = Description of Artificial Sequence: Synthetic peptide
SYAMH

SEQ ID NO: 6781 - DNA, 15 bp, synthetic construct
  misc_feature 1..15: note = Description of Artificial Sequence: Synthetic oligonucleotide
  source 1..15: mol_type = other DNA
agctatggcatgcac

SEQ ID NO: 6782 - protein, 5 aa, synthetic construct
  REGION 1..5: note = Description of Artificial Sequence: Synthetic peptide
SYGMH

SEQ ID NO: 6783 - DNA, 15 bp, synthetic construct
  misc_feature 1..15: note = Description of Artificial Sequence: Synthetic oligonucleotide
  source 1..15: mol_type = other DNA
aattactactggagc

SEQ ID NO: 6784 - protein, 5 aa, synthetic construct
  REGION 1..5: note = Description of Artificial Sequence: Synthetic peptide
NYYWS

SEQ ID NO: 6785 - DNA, 15 bp, synthetic construct
  misc_feature 1..15: note = Description of Artificial Sequence: Synthetic oligonucleotide
  source 1..15: mol_type = other DNA
gtctactatttgaac

SEQ ID NO: 6786 - protein, 5 aa, synthetic construct
  REGION 1..5: note = Description of Artificial Sequence: Synthetic peptide
VYYLN

SEQ ID NO: 6787 - DNA, 15 bp, synthetic construct
  misc_feature 1..15: note = Description of Artificial Sequence: Synthetic oligonucleotide
  source 1..15: mol_type = other DNA
agttaccactggagc

SEQ ID NO: 6788 - protein, 5 aa, synthetic construct
  REGION 1..5: note = Description of Artificial Sequence: Synthetic peptide
SYHWS

SEQ ID NO: 6789 - DNA, 21 bp, synthetic construct
  misc_feature 1..21: note = Description of Artificial Sequence: Synthetic oligonucleotide
  source 1..21: mol_type = other DNA
agtggtgattactactggaac

SEQ ID NO: 6790 - protein, 7 aa, synthetic construct
  REGION 1..7: note = Description of Artificial Sequence: Synthetic peptide
SGDYYWN

SEQ ID NO: 6791 - DNA, 21 bp, synthetic construct
  misc_feature 1..21: note = Description of Artificial Sequence: Synthetic oligonucleotide
  source 1..21: mol_type = other DNA
agtggtgattactactggaac

SEQ ID NO: 6792 - protein, 7 aa, synthetic construct
  REGION 1..7: note = Description of Artificial Sequence: Synthetic peptide
SGDYYWN

SEQ ID NO: 6793 - DNA, 15 bp, synthetic construct
  misc_feature 1..15: note = Description of Artificial Sequence: Synthetic oligonucleotide
  source 1..15: mol_type = other DNA
agctatggcatgcac

SEQ ID NO: 6794 - protein, 5 aa, synthetic construct
  REGION 1..5: note = Description of Artificial Sequence: Synthetic peptide
SYGMH

SEQ ID NO: 6795 - DNA, 15 bp, synthetic construct
  misc_feature 1..15: note = Description of Artificial Sequence: Synthetic oligonucleotide
  source 1..15: mol_type = other DNA
gactactacatacac

SEQ ID NO: 6796 - protein, 5 aa, synthetic construct
  REGION 1..5: note = Description of Artificial Sequence: Synthetic peptide
DYYIH

SEQ ID NO: 6797 - DNA, 15 bp, synthetic construct
  misc_feature 1..15: note = Description of Artificial Sequence: Synthetic oligonucleotide
  source 1..15: mol_type = other DNA
tattactactggagc

SEQ ID NO: 6798 - protein, 5 aa, synthetic construct
  REGION 1..5: note = Description of Artificial Sequence: Synthetic peptide
YYYWS

SEQ ID NO: 6799 - DNA, 15 bp, synthetic construct
  misc_feature 1..15: note = Description of Artificial Sequence: Synthetic oligonucleotide
  source 1..15: mol_type = other DNA
agctttatcatgcac

SEQ ID NO: 6800 - protein, 5 aa, synthetic construct
  REGION 1..5: note = Description of Artificial Sequence: Synthetic peptide
SFIMH

SEQ ID NO: 6801 - DNA, 15 bp, synthetic construct
  misc_feature 1..15: note = Description of Artificial Sequence: Synthetic oligonucleotide
  source 1..15: mol_type = other DNA
agctatggcatgcac

SEQ ID NO: 6802 - protein, 5 aa, synthetic construct
  REGION 1..5: note = Description of Artificial Sequence: Synthetic peptide
SYGMH

SEQ ID NO: 6803 - DNA, 15 bp, synthetic construct
  misc_feature 1..15: note = Description of Artificial Sequence: Synthetic oligonucleotide
  source 1..15: mol_type = other DNA
aactatggcatgcac

SEQ ID NO: 6804 - protein, 5 aa, synthetic construct
  REGION 1..5: note = Description of Artificial Sequence: Synthetic peptide
NYGMH

SEQ ID NO: 6805 - DNA, 15 bp, synthetic construct
  misc_feature 1..15: note = Description of Artificial Sequence: Synthetic oligonucleotide
  source 1..15: mol_type = other DNA
tattacttctggagc

SEQ ID NO: 6806 - protein, 5 aa, synthetic construct
  REGION 1..5: note = Description of Artificial Sequence: Synthetic peptide
YYFWS

SEQ ID NO: 6807 - DNA, 15 bp, synthetic construct
  misc_feature 1..15: note = Description of Artificial Sequence: Synthetic oligonucleotide
  source 1..15: mol_type = other DNA
cactatgtcatgcac

SEQ ID NO: 6808 - protein, 5 aa, synthetic construct
  REGION 1..5: note = Description of Artificial Sequence: Synthetic peptide
HYVMH

SEQ ID NO: 6809 - DNA, 21 bp, synthetic construct
  misc_feature 1..21: note = Description of Artificial Sequence: Synthetic oligonucleotide
  source 1..21: mol_type = other DNA
agcggtggttactactggagc

SEQ ID NO: 6810 - protein, 7 aa, synthetic construct
  REGION 1..7: note = Description of Artificial Sequence: Synthetic peptide
SGGYYWS

SEQ ID NO: 6811 - DNA, 15 bp, synthetic construct
  misc_feature 1..15: note = Description of Artificial Sequence: Synthetic oligonucleotide
  source 1..15: mol_type = other DNA
agctatggcatgcac

SEQ ID NO: 6812 - protein, 5 aa, synthetic construct
  REGION 1..5: note = Description of Artificial Sequence: Synthetic peptide
SYGMH

SEQ ID NO: 6813 - DNA, 21 bp, synthetic construct
  misc_feature 1..21: note = Description of Artificial Sequence: Synthetic oligonucleotide
  source 1..21: mol_type = other DNA
agtggtgattactactggaac

SEQ ID NO: 6814 - protein, 7 aa, synthetic construct
  REGION 1..7: note = Description of Artificial Sequence: Synthetic peptide
SGDYYWN

SEQ ID NO: 6815 - DNA, 15 bp, synthetic construct
  misc_feature 1..15: note = Description of Artificial Sequence: Synthetic oligonucleotide
  source 1..15: mol_type = other DNA
agctatggcatgcac

SEQ ID NO: 6816 - protein, 5 aa, synthetic construct
  REGION 1..5: note = Description of Artificial Sequence: Synthetic peptide
SYGMH

SEQ ID NO: 6817 - DNA, 15 bp, synthetic construct
  misc_feature 1..15: note = Description of Artificial Sequence: Synthetic oligonucleotide
  source 1..15: mol_type = other DNA
agctatggcatgcac

SEQ ID NO: 6818 - protein, 5 aa, synthetic construct
  REGION 1..5: note = Description of Artificial Sequence: Synthetic peptide
SYGMH

SEQ ID NO: 6819 - DNA, 21 bp, synthetic construct
  misc_feature 1..21: note = Description of Artificial Sequence: Synthetic oligonucleotide
  source 1..21: mol_type = other DNA
aatagtggttactactggagc

SEQ ID NO: 6820 - protein, 7 aa, synthetic construct
  REGION 1..7: note = Description of Artificial Sequence: Synthetic peptide
NSGYYWS

SEQ ID NO: 6821 - DNA, 21 bp, synthetic construct
  misc_feature 1..21: note = Description of Artificial Sequence: Synthetic oligonucleotide
  source 1..21: mol_type = other DNA
agtggtggttactactggagc

SEQ ID NO: 6822 - protein, 7 aa, synthetic construct
  REGION 1..7: note = Description of Artificial Sequence: Synthetic peptide
SGGYYWS

SEQ ID NO: 6823 - DNA, 15 bp, synthetic construct
  misc_feature 1..15: note = Description of Artificial Sequence: Synthetic oligonucleotide
  source 1..15: mol_type = other DNA
gactactacatgagc

SEQ ID NO: 6824 - protein, 5 aa, synthetic construct
  REGION 1..5: note = Description of Artificial Sequence: Synthetic peptide
DYYMS

SEQ ID NO: 6825 - DNA, 15 bp, synthetic construct
  misc_feature 1..15: note = Description of Artificial Sequence: Synthetic oligonucleotide
  source 1..15: mol_type = other DNA
acctatgccatgagt

SEQ ID NO: 6826 - protein, 5 aa, synthetic construct
  REGION 1..5: note = Description of Artificial Sequence: Synthetic peptide
TYAMS

SEQ ID NO: 6827 - DNA, 15 bp, synthetic construct
  misc_feature 1..15: note = Description of Artificial Sequence: Synthetic oligonucleotide
  source 1..15: mol_type = other DNA
gactactacatgagc

SEQ ID NO: 6828 - protein, 5 aa, synthetic construct
  REGION 1..5: note = Description of Artificial Sequence: Synthetic peptide
DYYMS

SEQ ID NO: 6829 - DNA, 15 bp, synthetic construct
  misc_feature 1..15: note = Description of Artificial Sequence: Synthetic oligonucleotide
  source 1..15: mol_type = other DNA
gactactacatgagc

SEQ ID NO: 6830 - protein, 5 aa, synthetic construct
  REGION 1..5: note = Description of Artificial Sequence: Synthetic peptide
DYYMS

SEQ ID NO: 6831 - DNA, 15 bp, synthetic construct
  misc_feature 1..15: note = Description of Artificial Sequence: Synthetic oligonucleotide
  source 1..15: mol_type = other DNA
agctttggcatgcac

SEQ ID NO: 6832 - protein, 5 aa, synthetic construct
  REGION 1..5: note = Description of Artificial Sequence: Synthetic peptide
SFGMH

SEQ ID NO: 6833 - DNA, 15 bp, synthetic construct
  misc_feature 1..15: note = Description of Artificial Sequence: Synthetic oligonucleotide
  source 1..15: mol_type = other DNA
agctgtgccatgacc

SEQ ID NO: 6834 - protein, 5 aa, synthetic construct
  REGION 1..5: note = Description of Artificial Sequence: Synthetic peptide
SCAMT

SEQ ID NO: 6835 - DNA, 15 bp, synthetic construct
  misc_feature 1..15: note = Description of Artificial Sequence: Synthetic oligonucleotide
  source 1..15: mol_type = other DNA
agctatggcatgcac

SEQ ID NO: 6836 - protein, 5 aa, synthetic construct
  REGION 1..5: note = Description of Artificial Sequence: Synthetic peptide
SYGMH

SEQ ID NO: 6837 - DNA, 15 bp, synthetic construct
  misc_feature 1..15: note = Description of Artificial Sequence: Synthetic oligonucleotide
  source 1..15: mol_type = other DNA
aattatgatatcaac

SEQ ID NO: 6838 - protein, 5 aa, synthetic construct
  REGION 1..5: note = Description of Artificial Sequence: Synthetic peptide
NYDIN

SEQ ID NO: 6839 - DNA, 15 bp, synthetic construct
  misc_feature 1..15: note = Description of Artificial Sequence: Synthetic oligonucleotide
  source 1..15: mol_type = other DNA
ggctactatatgcac

SEQ ID NO: 6840 - protein, 5 aa, synthetic construct
  REGION 1..5: note = Description of Artificial Sequence: Synthetic peptide
GYYMH

SEQ ID NO: 6841 - DNA, 15 bp, synthetic construct
  misc_feature 1..15: note = Description of Artificial Sequence: Synthetic oligonucleotide
  source 1..15: mol_type = other DNA
cactatgtcatgcac

SEQ ID NO: 6842 - protein, 5 aa, synthetic construct
  REGION 1..5: note = Description of Artificial Sequence: Synthetic peptide
HYVMH

SEQ ID NO: 6843 - DNA, 21 bp, synthetic construct
  misc_feature 1..21: note = Description of Artificial Sequence: Synthetic oligonucleotide
  source 1..21: mol_type = other DNA
agtggtggtgactactggagc

SEQ ID NO: 6844 - protein, 7 aa, synthetic construct
  REGION 1..7: note = Description of Artificial Sequence: Synthetic peptide
SGGDYWS

SEQ ID NO: 6845 - DNA, 15 bp, synthetic construct
  misc_feature 1..15: note = Description of Artificial Sequence: Synthetic oligonucleotide
  source 1..15: mol_type = other DNA
gactatagcatgaac

SEQ ID NO: 6846 - protein, 5 aa, synthetic construct
  REGION 1..5: note = Description of Artificial Sequence: Synthetic peptide
DYSMN

SEQ ID NO: 6847 - DNA, 15 bp, synthetic construct
  misc_feature 1..15: note = Description of Artificial Sequence: Synthetic oligonucleotide
  source 1..15: mol_type = other DNA
agttatgatatcaac

SEQ ID NO: 6848 - protein, 5 aa, synthetic construct
  REGION 1..5: note = Description of Artificial Sequence: Synthetic peptide
SYDIN

SEQ ID NO: 6849 - DNA, 21 bp, synthetic construct
  misc_feature 1..21: note = Description of Artificial Sequence: Synthetic oligonucleotide
  source 1..21: mol_type = other DNA
agtggtgtttactactggagc

SEQ ID NO: 6850 - protein, 7 aa, synthetic construct
  REGION 1..7: note = Description of Artificial Sequence: Synthetic peptide
SGVYYWS

SEQ ID NO: 6851 - DNA, 15 bp, synthetic construct
  misc_feature 1..15: note = Description of Artificial Sequence: Synthetic oligonucleotide
  source 1..15: mol_type = other DNA
agctatggcatgcac

SEQ ID NO: 6852 - protein, 5 aa, synthetic construct
  REGION 1..5: note = Description of Artificial Sequence: Synthetic peptide
SYGMH

SEQ ID NO: 6853 - DNA, 15 bp, synthetic construct
  misc_feature 1..15: note = Description of Artificial Sequence: Synthetic oligonucleotide
  source 1..15: mol_type = other DNA
agccatggcatgcac

SEQ ID NO: 6854 - protein, 5 aa, synthetic construct
  REGION 1..5: note = Description of Artificial Sequence: Synthetic peptide
SHGMH

SEQ ID NO: 6855 - DNA, 21 bp, synthetic construct
  misc_feature 1..21: note = Description of Artificial Sequence: Synthetic oligonucleotide
  source 1..21: mol_type = other DNA
agtggtgattactactggaac

SEQ ID NO: 6856 - protein, 7 aa, synthetic construct
  REGION 1..7: note = Description of Artificial Sequence: Synthetic peptide
SGDYYWN

SEQ ID NO: 6857 - DNA, 15 bp, synthetic construct
  misc_feature 1..15: note = Description of Artificial Sequence: Synthetic oligonucleotide
  source 1..15: mol_type = other DNA
aattatgatatcaac

SEQ ID NO: 6858 - protein, 5 aa, synthetic construct
  REGION 1..5: note = Description of Artificial Sequence: Synthetic peptide
NYDIN

SEQ ID NO: 6859 - DNA, 15 bp, synthetic construct
  misc_feature 1..15: note = Description of Artificial Sequence: Synthetic oligonucleotide
  source 1..15: mol_type = other DNA
agctatggcatgcac

SEQ ID NO: 6860 - protein, 5 aa, synthetic construct
  REGION 1..5: note = Description of Artificial Sequence: Synthetic peptide
SYGMH

SEQ ID NO: 6861 - DNA, 15 bp, synthetic construct
  misc_feature 1..15: note = Description of Artificial Sequence: Synthetic oligonucleotide
  source 1..15: mol_type = other DNA
aattatgatatcaac

SEQ ID NO: 6862 - protein, 5 aa, synthetic construct
  REGION 1..5: note = Description of Artificial Sequence: Synthetic peptide
NYDIN

SEQ ID NO: 6863 - DNA, 15 bp, synthetic construct
  misc_feature 1..15: note = Description of Artificial Sequence: Synthetic oligonucleotide
  source 1..15: mol_type = other DNA
agctctgccatgacc

SEQ ID NO: 6864 - protein, 5 aa, synthetic construct
  REGION 1..5: note = Description of Artificial Sequence: Synthetic peptide
SSAMT

SEQ ID NO: 6865 - DNA, 15 bp, synthetic construct
  misc_feature 1..15: note = Description of Artificial Sequence: Synthetic oligonucleotide
  source 1..15: mol_type = other DNA
gcttactcctggagc

SEQ ID NO: 6866 - protein, 5 aa, synthetic construct
  REGION 1..5: note = Description of Artificial Sequence: Synthetic peptide
AYSWS

SEQ ID NO: 6867 - DNA, 15 bp, synthetic construct
  misc_feature 1..15: note = Description of Artificial Sequence: Synthetic oligonucleotide
  source 1..15: mol_type = other DNA
agctatgccatgagc

SEQ ID NO: 6868 - protein, 5 aa, synthetic construct
  REGION 1..5: note = Description of Artificial Sequence: Synthetic peptide
SYAMS

SEQ ID NO: 6869 - DNA, 15 bp, synthetic construct
  misc_feature 1..15: note = Description of Artificial Sequence: Synthetic oligonucleotide
  source 1..15: mol_type = other DNA
agctatggcatgcac

SEQ ID NO: 6870 - protein, 5 aa, synthetic construct
  REGION 1..5: note = Description of Artificial Sequence: Synthetic peptide
SYGMH

SEQ ID NO: 6871 - DNA, 15 bp, synthetic construct
  misc_feature 1..15: note = Description of Artificial Sequence: Synthetic oligonucleotide
  source 1..15: mol_type = other DNA
aactatggcatgcac

SEQ ID NO: 6872 - protein, 5 aa, synthetic construct
  REGION 1..5: note = Description of Artificial Sequence: Synthetic peptide
NYGMH

SEQ ID NO: 6873 - DNA, 15 bp, synthetic construct
  misc_feature 1..15: note = Description of Artificial Sequence: Synthetic oligonucleotide
  source 1..15: mol_type = other DNA
agctatggcatgcac

SEQ ID NO: 6874 - protein, 5 aa, synthetic construct
  REGION 1..5: note = Description of Artificial Sequence: Synthetic peptide
SYGMH

SEQ ID NO: 6875 - DNA, 21 bp, synthetic construct
  misc_feature 1..21: note = Description of Artificial Sequence: Synthetic oligonucleotide
  source 1..21: mol_type = other DNA
agtggtgattactactggaac

SEQ ID NO: 6876 - protein, 7 aa, synthetic construct
  REGION 1..7: note = Description of Artificial Sequence: Synthetic peptide
SGDYYWN

SEQ ID NO: 6877 - DNA, 21 bp, synthetic construct
  misc_feature 1..21: note = Description of Artificial Sequence: Synthetic oligonucleotide
  source 1..21: mol_type = other DNA
agtggtggttactactggaac

SEQ ID NO: 6878 - protein, 7 aa, synthetic construct
  REGION 1..7: note = Description of Artificial Sequence: Synthetic peptide
SGGYYWN

SEQ ID NO: 6879 - DNA, 21 bp, synthetic construct
  misc_feature 1..21: note = Description of Artificial Sequence: Synthetic oligonucleotide
  source 1..21: mol_type = other DNA
agtggtggttactactggagc

SEQ ID NO: 6880 - protein, 7 aa, synthetic construct
  REGION 1..7: note = Description of Artificial Sequence: Synthetic peptide
SGGYYWS

SEQ ID NO: 6881 - DNA, 15 bp, synthetic construct
  misc_feature 1..15: note = Description of Artificial Sequence: Synthetic oligonucleotide
  source 1..15: mol_type = other DNA
agctatggcatgcac

SEQ ID NO: 6882 - protein, 5 aa, synthetic construct
  REGION 1..5: note = Description of Artificial Sequence: Synthetic peptide
SYGMH

SEQ ID NO: 6883 - DNA, 15 bp, synthetic construct
  misc_feature 1..15: note = Description of Artificial Sequence: Synthetic oligonucleotide
  source 1..15: mol_type = other DNA
aactatggcatgcac

SEQ ID NO: 6884 - protein, 5 aa, synthetic construct
  REGION 1..5: note = Description of Artificial Sequence: Synthetic peptide
NYGMH

SEQ ID NO: 6885 - DNA, 15 bp, synthetic construct
  misc_feature 1..15: note = Description of Artificial Sequence: Synthetic oligonucleotide
  source 1..15: mol_type = other DNA
agttaccactggagt

SEQ ID NO: 6886 - protein, 5 aa, synthetic construct
  REGION 1..5: note = Description of Artificial Sequence: Synthetic peptide
SYHWS

SEQ ID NO: 6887 - DNA, 21 bp, synthetic construct
  misc_feature 1..21: note = Description of Artificial Sequence: Synthetic oligonucleotide
  source 1..21: mol_type = other DNA
agtggtgattactactggaac

SEQ ID NO: 6888 - protein, 7 aa, synthetic construct
  REGION 1..7: note = Description of Artificial Sequence: Synthetic peptide
SGDYYWN

SEQ ID NO: 6889 - DNA, 21 bp, synthetic construct
  misc_feature 1..21: note = Description of Artificial Sequence: Synthetic oligonucleotide
  source 1..21: mol_type = other DNA
agtggtgattactactggaac

SEQ ID NO: 6890 - protein, 7 aa, synthetic construct
  REGION 1..7: note = Description of Artificial Sequence: Synthetic peptide
SGDYYWN

SEQ ID NO: 6891 - DNA, 15 bp, synthetic construct
  misc_feature 1..15: note = Description of Artificial Sequence: Synthetic oligonucleotide
  source 1..15: mol_type = other DNA
ggttacttctggacc

SEQ ID NO: 6892 - protein, 5 aa, synthetic construct
  REGION 1..5: note = Description of Artificial Sequence: Synthetic peptide
GYFWT

SEQ ID NO: 6893 - DNA, 15 bp, synthetic construct
  misc_feature 1..15: note = Description of Artificial Sequence: Synthetic oligonucleotide
  source 1..15: mol_type = other DNA
agctatggcatgcac

SEQ ID NO: 6894 - protein, 5 aa, synthetic construct
  REGION 1..5: note = Description of Artificial Sequence: Synthetic peptide
SYGMH

SEQ ID NO: 6895 - DNA, 15 bp, synthetic construct
  misc_feature 1..15: note = Description of Artificial Sequence: Synthetic oligonucleotide
  source 1..15: mol_type = other DNA
aactatggcatgcac

SEQ ID NO: 6896 - protein, 5 aa, synthetic construct
  REGION 1..5: note = Description of Artificial Sequence: Synthetic peptide
NYGMH

SEQ ID NO: 6897 - DNA, 15 bp, synthetic construct
  misc_feature 1..15: note = Description of Artificial Sequence: Synthetic oligonucleotide
  source 1..15: mol_type = other DNA
aactatggcatgcac

SEQ ID NO: 6898 - protein, 5 aa, synthetic construct
  REGION 1..5: note = Description of Artificial Sequence: Synthetic peptide
NYGMH

SEQ ID NO: 6899 - DNA, 21 bp, synthetic construct
  misc_feature 1..21: note = Description of Artificial Sequence: Synthetic oligonucleotide
  source 1..21: mol_type = other DNA
agtggtggttactactggaac

SEQ ID NO: 6900 - protein, 7 aa, synthetic construct
  REGION 1..7: note = Description of Artificial Sequence: Synthetic peptide
SGGYYWN

SEQ ID NO: 6901 - DNA, 21 bp, synthetic construct
  misc_feature 1..21: note = Description of Artificial Sequence: Synthetic oligonucleotide
  source 1..21: mol_type = other DNA
agtggtggttactactggagc

SEQ ID NO: 6902 - protein, 7 aa, synthetic construct
  REGION 1..7: note = Description of Artificial Sequence: Synthetic peptide
SGGYYWS

SEQ ID NO: 6903 - DNA, 15 bp, synthetic construct
  misc_feature 1..15: note = Description of Artificial Sequence: Synthetic oligonucleotide
  source 1..15: mol_type = other DNA
agctatgccatgagc

SEQ ID NO: 6904 - protein, 5 aa, synthetic construct
  REGION 1..5: note = Description of Artificial Sequence: Synthetic peptide
SYAMS

SEQ ID NO: 6905 - DNA, 15 bp, synthetic construct
  misc_feature 1..15: note = Description of Artificial Sequence: Synthetic oligonucleotide
  source 1..15: mol_type = other DNA
agttatggcatgcac

SEQ ID NO: 6906 - protein, 5 aa, synthetic construct
  REGION 1..5: note = Description of Artificial Sequence: Synthetic peptide
SYGMH

SEQ ID NO: 6907 - DNA, 21 bp, synthetic construct
  misc_feature 1..21: note = Description of Artificial Sequence: Synthetic oligonucleotide
  source 1..21: mol_type = other DNA
agtggtggttactactggagc

SEQ ID NO: 6908 - protein, 7 aa, synthetic construct
  REGION 1..7: note = Description of Artificial Sequence: Synthetic peptide
SGGYYWS

SEQ ID NO: 6909 - DNA, 15 bp, synthetic construct
  misc_feature 1..15: note = Description of Artificial Sequence: Synthetic oligonucleotide
  source 1..15: mol_type = other DNA
aattatgatatcaac

SEQ ID NO: 6910 - protein, 5 aa, synthetic construct
  REGION 1..5: note = Description of Artificial Sequence: Synthetic peptide
NYDIN

SEQ ID NO: 6911 - DNA, 15 bp, synthetic construct
  misc_feature 1..15: note = Description of Artificial Sequence: Synthetic oligonucleotide
  source 1..15: mol_type = other DNA
aattactactggagc

SEQ ID NO: 6912 - protein, 5 aa, synthetic construct
  REGION 1..5: note = Description of Artificial Sequence: Synthetic peptide
NYYWS

SEQ ID NO: 6913 - DNA, 15 bp, synthetic construct
  misc_feature 1..15: note = Description of Artificial Sequence: Synthetic oligonucleotide
  source 1..15: mol_type = other DNA
agctatggcatgcac

SEQ ID NO: 6914 - protein, 5 aa, synthetic construct
  REGION 1..5: note = Description of Artificial Sequence: Synthetic peptide
SYGMH

SEQ ID NO: 6915 - DNA, 21 bp, synthetic construct
  misc_feature 1..21: note = Description of Artificial Sequence: Synthetic oligonucleotide
  source 1..21: mol_type = other DNA
agtggtgattactactggaac

SEQ ID NO: 6916 - protein, 7 aa, synthetic construct
  REGION 1..7: note = Description of Artificial Sequence: Synthetic peptide
SGDYYWN

SEQ ID NO: 6917 - DNA, 15 bp, synthetic construct
  misc_feature 1..15: note = Description of Artificial Sequence: Synthetic oligonucleotide
  source 1..15: mol_type = other DNA
ggttacttctggacc

SEQ ID NO: 6918 - protein, 5 aa, synthetic construct
  REGION 1..5: note = Description of Artificial Sequence: Synthetic peptide
GYFWT

SEQ ID NO: 6919 - DNA, 15 bp, synthetic construct
  misc_feature 1..15: note = Description of Artificial Sequence: Synthetic oligonucleotide
  source 1..15: mol_type = other DNA
ggttacttctggacc

SEQ ID NO: 6920 - protein, 5 aa, synthetic construct
  REGION 1..5: note = Description of Artificial Sequence: Synthetic peptide
GYFWT

SEQ ID NO: 6921 - DNA, 15 bp, synthetic construct
  misc_feature 1..15: note = Description of Artificial Sequence: Synthetic oligonucleotide
  source 1..15: mol_type = other DNA
ccttactactggagc

SEQ ID NO: 6922 - protein, 5 aa, synthetic construct
  REGION 1..5: note = Description of Artificial Sequence: Synthetic peptide
PYYWS

SEQ ID NO: 6923 - DNA, 15 bp, synthetic construct
  misc_feature 1..15: note = Description of Artificial Sequence: Synthetic oligonucleotide
  source 1..15: mol_type = other DNA
agctatggtatcagc

SEQ ID NO: 6924 - protein, 5 aa, synthetic construct
  REGION 1..5: note = Description of Artificial Sequence: Synthetic peptide
SYGIS

SEQ ID NO: 6925 - DNA, 21 bp, synthetic construct
  misc_feature 1..21: note = Description of Artificial Sequence: Synthetic oligonucleotide
  source 1..21: mol_type = other DNA
agcaacagtgctgcttggaac

SEQ ID NO: 6926 - protein, 7 aa, synthetic construct
  REGION 1..7: note = Description of Artificial Sequence: Synthetic peptide
SNSAAWN

SEQ ID NO: 6927 - DNA, 15 bp, synthetic construct
  misc_feature 1..15: note = Description of Artificial Sequence: Synthetic oligonucleotide
  source 1..15: mol_type = other DNA
gtttactactggacc

SEQ ID NO: 6928 - protein, 5 aa, synthetic construct
  REGION 1..5: note = Description of Artificial Sequence: Synthetic peptide
VYYWT

SEQ ID NO: 6929 - DNA, 15 bp, synthetic construct
  misc_feature 1..15: note = Description of Artificial Sequence: Synthetic oligonucleotide
  source 1..15: mol_type = other DNA
ggctactatatgcac

SEQ ID NO: 6930 - protein, 5 aa, synthetic construct
  REGION 1..5: note = Description of Artificial Sequence: Synthetic peptide
GYYMH

SEQ ID NO: 6931 - DNA, 15 bp, synthetic construct
  misc_feature 1..15: note = Description of Artificial Sequence: Synthetic oligonucleotide
  source 1..15: mol_type = other DNA
ggttacttctggacc

SEQ ID NO: 6932 - protein, 5 aa, synthetic construct
  REGION 1..5: note = Description of Artificial Sequence: Synthetic peptide
GYFWT

SEQ ID NO: 6933 - DNA, 15 bp, synthetic construct
  misc_feature 1..15: note = Description of Artificial Sequence: Synthetic oligonucleotide
  source 1..15: mol_type = other DNA
ggctactatatccac

SEQ ID NO: 6934 - protein, 5 aa, synthetic construct
  REGION 1..5: note = Description of Artificial Sequence: Synthetic peptide
GYYIH

SEQ ID NO: 6935 - DNA, 15 bp, synthetic construct
  misc_feature 1..15: note = Description of Artificial Sequence: Synthetic oligonucleotide
  source 1..15: mol_type = other DNA
agctatgccatgagc

SEQ ID NO: 6936 - protein, 5 aa, synthetic construct
  REGION 1..5: note = Description of Artificial Sequence: Synthetic peptide
SYAMS

SEQ ID NO: 6937 - DNA, 15 bp, synthetic construct
  misc_feature 1..15: note = Description of Artificial Sequence: Synthetic oligonucleotide
  source 1..15: mol_type = other DNA
agttatgatatcaac

SEQ ID NO: 6938 - protein, 5 aa, synthetic construct
  REGION 1..5: note = Description of Artificial Sequence: Synthetic peptide
SYDIN

SEQ ID NO: 6939 - DNA, 21 bp, synthetic construct
  misc_feature 1..21: note = Description of Artificial Sequence: Synthetic oligonucleotide
  source 1..21: mol_type = other DNA
agcaacagtgctgcttggaac

SEQ ID NO: 6940 - protein, 7 aa, synthetic construct
  REGION 1..7: note = Description of Artificial Sequence: Synthetic peptide
SNSAAWN

SEQ ID NO: 6941 - DNA, 21 bp, synthetic construct
  misc_feature 1..21: note = Description of Artificial Sequence: Synthetic oligonucleotide
  source 1..21: mol_type = other DNA
agcaacagtgctgcttggaac

SEQ ID NO: 6942 - protein, 7 aa, synthetic construct
  REGION 1..7: note = Description of Artificial Sequence: Synthetic peptide
SNSAAWN

SEQ ID NO: 6943 - DNA, 15 bp, synthetic construct
  misc_feature 1..15: note = Description of Artificial Sequence: Synthetic oligonucleotide
  source 1..15: mol_type = other DNA
agctatgccatgagc

SEQ ID NO: 6944 - protein, 5 aa, synthetic construct
  REGION 1..5: note = Description of Artificial Sequence: Synthetic peptide
SYAMS

SEQ ID NO: 6945 - DNA, 15 bp, synthetic construct
  misc_feature 1..15: note = Description of Artificial Sequence: Synthetic oligonucleotide
  source 1..15: mol_type = other DNA
ccttactactggagc

SEQ ID NO: 6946 - protein, 5 aa, synthetic construct
  REGION 1..5: note = Description of Artificial Sequence: Synthetic peptide
PYYWS

SEQ ID NO: 6947 - DNA, 15 bp, synthetic construct
  misc_feature 1..15: note = Description of Artificial Sequence: Synthetic oligonucleotide
  source 1..15: mol_type = other DNA
tactatggcatgcac

SEQ ID NO: 6948 - protein, 5 aa, synthetic construct
  REGION 1..5: note = Description of Artificial Sequence: Synthetic peptide
YYGMH

SEQ ID NO: 6949 - DNA, 15 bp, synthetic construct
  misc_feature 1..15: note = Description of Artificial Sequence: Synthetic oligonucleotide
  source 1..15: mol_type = other DNA
agctatggcatgcac

SEQ ID NO: 6950 - protein, 5 aa, synthetic construct
  REGION 1..5: note = Description of Artificial Sequence: Synthetic peptide
SYGMH

SEQ ID NO: 6951 - DNA, 15 bp, synthetic construct
  misc_feature 1..15: note = Description of Artificial Sequence: Synthetic oligonucleotide
  source 1..15: mol_type = other DNA
ggctactatatccac

SEQ ID NO: 6952 - protein, 5 aa, synthetic construct
  REGION 1..5: note = Description of Artificial Sequence: Synthetic peptide
GYYIH

SEQ ID NO: 6953 - DNA, 15 bp, synthetic construct
  misc_feature 1..15: note = Description of Artificial Sequence: Synthetic oligonucleotide
  source 1..15: mol_type = other DNA
gactatgtcatgcac

SEQ ID NO: 6954 - protein, 5 aa, synthetic construct
  REGION 1..5: note = Description of Artificial Sequence: Synthetic peptide
DYVMH

SEQ ID NO: 6955 - DNA, 15 bp, synthetic construct
  misc_feature 1..15: note = Description of Artificial Sequence: Synthetic oligonucleotide
  source 1..15: mol_type = other DNA
agttttggcatgcac

SEQ ID NO: 6956 - protein, 5 aa, synthetic construct
  REGION 1..5: note = Description of Artificial Sequence: Synthetic peptide
SFGMH

SEQ ID NO: 6957 - DNA, 15 bp, synthetic construct
  misc_feature 1..15: note = Description of Artificial Sequence: Synthetic oligonucleotide
  source 1..15: mol_type = other DNA
gactactacatgagc

SEQ ID NO: 6958 - protein, 5 aa, synthetic construct
  REGION 1..5: note = Description of Artificial Sequence: Synthetic peptide
DYYMS

SEQ ID NO: 6959 - DNA, 15 bp, synthetic construct
  misc_feature 1..15: note = Description of Artificial Sequence: Synthetic oligonucleotide
  source 1..15: mol_type = other DNA
aattatgatatcaac

SEQ ID NO: 6960 - protein, 5 aa, synthetic construct
  REGION 1..5: note = Description of Artificial Sequence: Synthetic peptide
NYDIN

SEQ ID NO: 6961 - DNA, 15 bp, synthetic construct
  misc_feature 1..15: note = Description of Artificial Sequence: Synthetic oligonucleotide
  source 1..15: mol_type = other DNA
agctatgtcatgcac

SEQ ID NO: 6962 - protein, 5 aa, synthetic construct
  REGION 1..5: note = Description of Artificial Sequence: Synthetic peptide
SYVMH

SEQ ID NO: 6963 - DNA, 15 bp, synthetic construct
  misc_feature 1..15: note = Description of Artificial Sequence: Synthetic oligonucleotide
  source 1..15: mol_type = other DNA
ggctactatatccac

SEQ ID NO: 6964 - protein, 5 aa, synthetic construct
  REGION 1..5: note = Description of Artificial Sequence: Synthetic peptide
GYYIH

SEQ ID NO: 6965 - DNA, 21 bp, synthetic construct
  misc_feature 1..21: note = Description of Artificial Sequence: Synthetic oligonucleotide
  source 1..21: mol_type = other DNA
agcaacagtgctgcttggaac

SEQ ID NO: 6966 - protein, 7 aa, synthetic construct
  REGION 1..7: note = Description of Artificial Sequence: Synthetic peptide
SNSAAWN

SEQ ID NO: 6967 - DNA, 15 bp, synthetic construct
  misc_feature 1..15: note = Description of Artificial Sequence: Synthetic oligonucleotide
  source 1..15: mol_type = other DNA
acctatgccatgagc

SEQ ID NO: 6968 - protein, 5 aa, synthetic construct
  REGION 1..5: note = Description of Artificial Sequence: Synthetic peptide
TYAMS

SEQ ID NO: 6969 - DNA, 15 bp, synthetic construct
  misc_feature 1..15: note = Description of Artificial Sequence: Synthetic oligonucleotide
  source 1..15: mol_type = other DNA
agctatggcatgcac

SEQ ID NO: 6970 - protein, 5 aa, synthetic construct
  REGION 1..5: note = Description of Artificial Sequence: Synthetic peptide
SYGMH

SEQ ID NO: 6971 - DNA, 15 bp, synthetic construct
  misc_feature 1..15: note = Description of Artificial Sequence: Synthetic oligonucleotide
  source 1..15: mol_type = other DNA
agctatggcatgcac

SEQ ID NO: 6972 - protein, 5 aa, synthetic construct
  REGION 1..5: note = Description of Artificial Sequence: Synthetic peptide
SYGMH

SEQ ID NO: 6973 - DNA, 15 bp, synthetic construct
  misc_feature 1..15: note = Description of Artificial Sequence: Synthetic oligonucleotide
  source 1..15: mol_type = other DNA
ggttacttctggacc

SEQ ID NO: 6974 - protein, 5 aa, synthetic construct
  REGION 1..5: note = Description of Artificial Sequence: Synthetic peptide
GYFWT

SEQ ID NO: 6975 - DNA, 15 bp, synthetic construct
  misc_feature 1..15: note = Description of Artificial Sequence: Synthetic oligonucleotide
  source 1..15: mol_type = other DNA
ggtcactactggagc

SEQ ID NO: 6976 - protein, 5 aa, synthetic construct
  REGION 1..5: note = Description of Artificial Sequence: Synthetic peptide
GHYWS

SEQ ID NO: 6977 - DNA, 15 bp, synthetic construct
  misc_feature 1..15: note = Description of Artificial Sequence: Synthetic oligonucleotide
  source 1..15: mol_type = other DNA
agctatggcatgcac

SEQ ID NO: 6978 - protein, 5 aa, synthetic construct
  REGION 1..5: note = Description of Artificial Sequence: Synthetic peptide
SYGMH

SEQ ID NO: 6979 - DNA, 21 bp, synthetic construct
  misc_feature 1..21: note = Description of Artificial Sequence: Synthetic oligonucleotide
  source 1..21: mol_type = other DNA
agcaacagtgctgcttggaac

SEQ ID NO: 6980 - protein, 7 aa, synthetic construct
  REGION 1..7: note = Description of Artificial Sequence: Synthetic peptide
SNSAAWN

SEQ ID NO: 6981 - DNA, 15 bp, synthetic construct
  misc_feature 1..15: note = Description of Artificial Sequence: Synthetic oligonucleotide
  source 1..15: mol_type = other DNA
agatatggcatgcac

SEQ ID NO: 6982 - protein, 5 aa, synthetic construct
  REGION 1..5: note = Description of Artificial Sequence: Synthetic peptide
RYGMH

SEQ ID NO: 6983 - DNA, 15 bp, synthetic construct
  misc_feature 1..15: note = Description of Artificial Sequence: Synthetic oligonucleotide
  source 1..15: mol_type = other DNA
gtttattactggagc

SEQ ID NO: 6984 - protein, 5 aa, synthetic construct
  REGION 1..5: note = Description of Artificial Sequence: Synthetic peptide
VYYWS

SEQ ID NO: 6985 - DNA, 15 bp, synthetic construct
  misc_feature 1..15: note = Description of Artificial Sequence: Synthetic oligonucleotide
  source 1..15: mol_type = other DNA
agctatgccatgagc

SEQ ID NO: 6986 - protein, 5 aa, synthetic construct
  REGION 1..5: note = Description of Artificial Sequence: Synthetic peptide
SYAMS

SEQ ID NO: 6987 - DNA, 15 bp, synthetic construct
  misc_feature 1..15: note = Description of Artificial Sequence: Synthetic oligonucleotide
  source 1..15: mol_type = other DNA
agctatgccatgcac

SEQ ID NO: 6988 - protein, 5 aa, synthetic construct
  REGION 1..5: note = Description of Artificial Sequence: Synthetic peptide
SYAMH

SEQ ID NO: 6989 - DNA, 15 bp, synthetic construct
  misc_feature 1..15: note = Description of Artificial Sequence: Synthetic oligonucleotide
  source 1..15: mol_type = other DNA
ggttacttctggagc

SEQ ID NO: 6990 - protein, 5 aa, synthetic construct
  REGION 1..5: note = Description of Artificial Sequence: Synthetic peptide
GYFWS

SEQ ID NO: 6991 - DNA, 15 bp, synthetic construct
  misc_feature 1..15: note = Description of Artificial Sequence: Synthetic oligonucleotide
  source 1..15: mol_type = other DNA
ggtccctactggagc

SEQ ID NO: 6992 - protein, 5 aa, synthetic construct
  REGION 1..5: note = Description of Artificial Sequence: Synthetic peptide
GPYWS

SEQ ID NO: 6993 - DNA, 15 bp, synthetic construct
  misc_feature 1..15: note = Description of Artificial Sequence: Synthetic oligonucleotide
  source 1..15: mol_type = other DNA
ggctactatatccac

SEQ ID NO: 6994 - protein, 5 aa, synthetic construct
  REGION 1..5: note = Description of Artificial Sequence: Synthetic peptide
GYYIH

SEQ ID NO: 6995 - DNA, 15 bp, synthetic construct
  misc_feature 1..15: note = Description of Artificial Sequence: Synthetic oligonucleotide
  source 1..15: mol_type = other DNA
ggctactatatacac

SEQ ID NO: 6996 - protein, 5 aa, synthetic construct
  REGION 1..5: note = Description of Artificial Sequence: Synthetic peptide
GYYIH

SEQ ID NO: 6997 - DNA, 15 bp, synthetic construct
  misc_feature 1..15: note = Description of Artificial Sequence: Synthetic oligonucleotide
  source 1..15: mol_type = other DNA
ggctactatatccac

SEQ ID NO: 6998 - protein, 5 aa, synthetic construct
  REGION 1..5: note = Description of Artificial Sequence: Synthetic peptide
GYYIH

SEQ ID NO: 6999 - DNA, 15 bp, synthetic construct
  misc_feature 1..15: note = Description of Artificial Sequence: Synthetic oligonucleotide
  source 1..15: mol_type = other DNA
agctatggcatgcac

SEQ ID NO: 7000 - protein, 5 aa, synthetic construct
  REGION 1..5: note = Description of Artificial Sequence: Synthetic peptide
SYGMH

SEQ ID NO: 7001 - DNA, 15 bp, synthetic construct
  misc_feature 1..15: note = Description of Artificial Sequence: Synthetic oligonucleotide
  source 1..15: mol_type = other DNA
aactatggcatgcac

SEQ ID NO: 7002 - protein, 5 aa, synthetic construct
  REGION 1..5: note = Description of Artificial Sequence: Synthetic peptide
NYGMH

SEQ ID NO: 7003 - DNA, 15 bp, synthetic construct
  misc_feature 1..15: note = Description of Artificial Sequence: Synthetic oligonucleotide
  source 1..15: mol_type = other DNA
gactgtgtcatgcac

SEQ ID NO: 7004 - protein, 5 aa, synthetic construct
  REGION 1..5: note = Description of Artificial Sequence: Synthetic peptide
DCVMH

SEQ ID NO: 7005 - DNA, 15 bp, synthetic construct
  misc_feature 1..15: note = Description of Artificial Sequence: Synthetic oligonucleotide
  source 1..15: mol_type = other DNA
agctatgccatgagc

SEQ ID NO: 7006 - protein, 5 aa, synthetic construct
  REGION 1..5: note = Description of Artificial Sequence: Synthetic peptide
SYAMS

SEQ ID NO: 7007 - DNA, 15 bp, synthetic construct
  misc_feature 1..15: note = Description of Artificial Sequence: Synthetic oligonucleotide
  source 1..15: mol_type = other DNA
gtttactactggacc

SEQ ID NO: 7008 - protein, 5 aa, synthetic construct
  REGION 1..5: note = Description of Artificial Sequence: Synthetic peptide
VYYWT

SEQ ID NO: 7009 - DNA, 15 bp, synthetic construct
  misc_feature 1..15: note = Description of Artificial Sequence: Synthetic oligonucleotide
  source 1..15: mol_type = other DNA
ggctactatatccac

SEQ ID NO: 7010 - protein, 5 aa, synthetic construct
  REGION 1..5: note = Description of Artificial Sequence: Synthetic peptide
GYYIH

SEQ ID NO: 7011 - DNA, 15 bp, synthetic construct
  misc_feature 1..15: note = Description of Artificial Sequence: Synthetic oligonucleotide
  source 1..15: mol_type = other DNA
gtttcctactggagc

SEQ ID NO: 7012 - protein, 5 aa, synthetic construct
  REGION 1..5: note = Description of Artificial Sequence: Synthetic peptide
VSYWS

SEQ ID NO: 7013 - DNA, 15 bp, synthetic construct
  misc_feature 1..15: note = Description of Artificial Sequence: Synthetic oligonucleotide
  source 1..15: mol_type = other DNA
ggctactatatccac

SEQ ID NO: 7014 - protein, 5 aa, synthetic construct
  REGION 1..5: note = Description of Artificial Sequence: Synthetic peptide
GYYIH

SEQ ID NO: 7015 - DNA, 15 bp, synthetic construct
  misc_feature 1..15: note = Description of Artificial Sequence: Synthetic oligonucleotide
  source 1..15: mol_type = other DNA
aactatggcatgcac

SEQ ID NO: 7016 - protein, 5 aa, synthetic construct
  REGION 1..5: note = Description of Artificial Sequence: Synthetic peptide
NYGMH

SEQ ID NO: 7017 - DNA, 15 bp, synthetic construct
  misc_feature 1..15: note = Description of Artificial Sequence: Synthetic oligonucleotide
  source 1..15: mol_type = other DNA
gactgtgtcatgcac

SEQ ID NO: 7018 - protein, 5 aa, synthetic construct
  REGION 1..5: note = Description of Artificial Sequence: Synthetic peptide
DCVMH

SEQ ID NO: 7019 - DNA, 15 bp, synthetic construct
  misc_feature 1..15: note = Description of Artificial Sequence: Synthetic oligonucleotide
  source 1..15: mol_type = other DNA
agttactactggagc

SEQ ID NO: 7020 - protein, 5 aa, synthetic construct
  REGION 1..5: note = Description of Artificial Sequence: Synthetic peptide
SYYWS

SEQ ID NO: 7021 - DNA, 21 bp, synthetic construct
  misc_feature 1..21: note = Description of Artificial Sequence: Synthetic oligonucleotide
  source 1..21: mol_type = other DNA
agcaacagtgctgcttggaac

SEQ ID NO: 7022 - protein, 7 aa, synthetic construct
  REGION 1..7: note = Description of Artificial Sequence: Synthetic peptide
SNSAAWN

SEQ ID NO: 7023 - DNA, 15 bp, synthetic construct
  misc_feature 1..15: note = Description of Artificial Sequence: Synthetic oligonucleotide
  source 1..15: mol_type = other DNA
ggctactatatccac

SEQ ID NO: 7024 - protein, 5 aa, synthetic construct
  REGION 1..5: note = Description of Artificial Sequence: Synthetic peptide
GYYIH

SEQ ID NO: 7025 - DNA, 15 bp, synthetic construct
  misc_feature 1..15: note = Description of Artificial Sequence: Synthetic oligonucleotide
  source 1..15: mol_type = other DNA
agccatggcatgcac

SEQ ID NO: 7026 - protein, 5 aa, synthetic construct
  REGION 1..5: note = Description of Artificial Sequence: Synthetic peptide
SHGMH

SEQ ID NO: 7027 - DNA, 15 bp, synthetic construct
  misc_feature 1..15: note = Description of Artificial Sequence: Synthetic oligonucleotide
  source 1..15: mol_type = other DNA
aacaatggtatcagc

SEQ ID NO: 7028 - protein, 5 aa, synthetic construct
  REGION 1..5: note = Description of Artificial Sequence: Synthetic peptide
NNGIS

SEQ ID NO: 7029 - DNA, 15 bp, synthetic construct
  misc_feature 1..15: note = Description of Artificial Sequence: Synthetic oligonucleotide
  source 1..15: mol_type = other DNA
agctatggcatgcac

SEQ ID NO: 7030 - protein, 5 aa, synthetic construct
  REGION 1..5: note = Description of Artificial Sequence: Synthetic peptide
SYGMH

SEQ ID NO: 7031 - DNA, 15 bp, synthetic construct
  misc_feature 1..15: note = Description of Artificial Sequence: Synthetic oligonucleotide
  source 1..15: mol_type = other DNA
agttatggcatgcac

SEQ ID NO: 7032 - protein, 5 aa, synthetic construct
  REGION 1..5: note = Description of Artificial Sequence: Synthetic peptide
SYGMH

SEQ ID NO: 7033 - DNA, 15 bp, synthetic construct
  misc_feature 1..15: note = Description of Artificial Sequence: Synthetic oligonucleotide
  source 1..15: mol_type = other DNA
aactatggcatgcac

SEQ ID NO: 7034 - protein, 5 aa, synthetic construct
  REGION 1..5: note = Description of Artificial Sequence: Synthetic peptide
NYGMH

SEQ ID NO: 7035 - DNA, 15 bp, synthetic construct
  misc_feature 1..15: note = Description of Artificial Sequence: Synthetic oligonucleotide
  source 1..15: mol_type = other DNA
agctatggcatgcac

SEQ ID NO: 7036 - protein, 5 aa, synthetic construct
  REGION 1..5: note = Description of Artificial Sequence: Synthetic peptide
SYGMH

SEQ ID NO: 7037 - DNA, 15 bp, synthetic construct
  misc_feature 1..15: note = Description of Artificial Sequence: Synthetic oligonucleotide
  source 1..15: mol_type = other DNA
agctatggcatgcac

SEQ ID NO: 7038 - protein, 5 aa, synthetic construct
  REGION 1..5: note = Description of Artificial Sequence: Synthetic peptide
SYGMH

SEQ ID NO: 7039 - DNA, 15 bp, synthetic construct
  misc_feature 1..15: note = Description of Artificial Sequence: Synthetic oligonucleotide
  source 1..15: mol_type = other DNA
aggcatggtatcagc

SEQ ID NO: 7040 - protein, 5 aa, synthetic construct
  REGION 1..5: note = Description of Artificial Sequence: Synthetic peptide
RHGIS

SEQ ID NO: 7041 - DNA, 15 bp, synthetic construct
  misc_feature 1..15: note = Description of Artificial Sequence: Synthetic oligonucleotide
  source 1..15: mol_type = other DNA
agctatggcatgcac

SEQ ID NO: 7042 - protein, 5 aa, synthetic construct
  REGION 1..5: note = Description of Artificial Sequence: Synthetic peptide
SYGMH

SEQ ID NO: 7043 - DNA, 15 bp, synthetic construct
  misc_feature 1..15: note = Description of Artificial Sequence: Synthetic oligonucleotide
  source 1..15: mol_type = other DNA
agctatggcatgcac

SEQ ID NO: 7044 - protein, 5 aa, synthetic construct
  REGION 1..5: note = Description of Artificial Sequence: Synthetic peptide
SYGMH

SEQ ID NO: 7045 - DNA, 15 bp, synthetic construct
  misc_feature 1..15: note = Description of Artificial Sequence: Synthetic oligonucleotide
  source 1..15: mol_type = other DNA
agctatggcatgcac

SEQ ID NO: 7046 - protein, 5 aa, synthetic construct
  REGION 1..5: note = Description of Artificial Sequence: Synthetic peptide
SYGMH

SEQ ID NO: 7047 - DNA, 15 bp, synthetic construct
  misc_feature 1..15: note = Description of Artificial Sequence: Synthetic oligonucleotide
  source 1..15: mol_type = other DNA
agctatggcatgcac

SEQ ID NO: 7048 - protein, 5 aa, synthetic construct
  REGION 1..5: note = Description of Artificial Sequence: Synthetic peptide
SYGMH

SEQ ID NO: 7049 - DNA, 15 bp, synthetic construct
  misc_feature 1..15: note = Description of Artificial Sequence: Synthetic oligonucleotide
  source 1..15: mol_type = other DNA
agatatggcatgcac

SEQ ID NO: 7050 - protein, 5 aa, synthetic construct
  REGION 1..5: note = Description of Artificial Sequence: Synthetic peptide
RYGMH

SEQ ID NO: 7051 - DNA, 15 bp, synthetic construct
  misc_feature 1..15: note = Description of Artificial Sequence: Synthetic oligonucleotide
  source 1..15: mol_type = other DNA
gactatgtcatgcac

SEQ ID NO: 7052 - protein, 5 aa, synthetic construct
  REGION 1..5: note = Description of Artificial Sequence: Synthetic peptide
DYVMH

SEQ ID NO: 7053 - DNA, 15 bp, synthetic construct
  misc_feature 1..15: note = Description of Artificial Sequence: Synthetic oligonucleotide
  source 1..15: mol_type = other DNA
agttatggcatgcac

SEQ ID NO: 7054 - protein, 5 aa, synthetic construct
  REGION 1..5: note = Description of Artificial Sequence: Synthetic peptide
SYGMH

SEQ ID NO: 7055 - DNA, 15 bp, synthetic construct
  misc_feature 1..15: note = Description of Artificial Sequence: Synthetic oligonucleotide
  source 1..15: mol_type = other DNA
agctatggcatgcac

SEQ ID NO: 7056 - protein, 5 aa, synthetic construct
  REGION 1..5: note = Description of Artificial Sequence: Synthetic peptide
SYGMH

SEQ ID NO: 7057 - DNA, 15 bp, synthetic construct
  misc_feature 1..15: note = Description of Artificial Sequence: Synthetic oligonucleotide
  source 1..15: mol_type = other DNA
agctatggcatgcac

SEQ ID NO: 7058 - protein, 5 aa, synthetic construct
  REGION 1..5: note = Description of Artificial Sequence: Synthetic peptide
SYGMH

SEQ ID NO: 7059 - DNA, 15 bp, synthetic construct
  misc_feature 1..15: note = Description of Artificial Sequence: Synthetic oligonucleotide
  source 1..15: mol_type = other DNA
agctatggcatgcac

SEQ ID NO: 7060 - protein, 5 aa, synthetic construct
  REGION 1..5: note = Description of Artificial Sequence: Synthetic peptide
SYGMH

SEQ ID NO: 7061 - DNA, 15 bp, synthetic construct
  misc_feature 1..15: note = Description of Artificial Sequence: Synthetic oligonucleotide
  source 1..15: mol_type = other DNA
agttatggcatgcac

SEQ ID NO: 7062 - protein, 5 aa, synthetic construct
  REGION 1..5: note = Description of Artificial Sequence: Synthetic peptide
SYGMH

SEQ ID NO: 7063 - DNA, 15 bp, synthetic construct
  misc_feature 1..15: note = Description of Artificial Sequence: Synthetic oligonucleotide
  source 1..15: mol_type = other DNA
agctatggcatgcac

SEQ ID NO: 7064 - protein, 5 aa, synthetic construct
  REGION 1..5: note = Description of Artificial Sequence: Synthetic peptide
SYGMH

SEQ ID NO: 7065 - DNA, 15 bp, synthetic construct
  misc_feature 1..15: note = Description of Artificial Sequence: Synthetic oligonucleotide
  source 1..15: mol_type = other DNA
ggctaccatatgcac

SEQ ID NO: 7066 - protein, 5 aa, synthetic construct
  REGION 1..5: note = Description of Artificial Sequence: Synthetic peptide
GYHMH

SEQ ID NO: 7067 - DNA, 15 bp, synthetic construct
  misc_feature 1..15: note = Description of Artificial Sequence: Synthetic oligonucleotide
  source 1..15: mol_type = other DNA
agctatggtatcaac

SEQ ID NO: 7068 - protein, 5 aa, synthetic construct
  REGION 1..5: note = Description of Artificial Sequence: Synthetic peptide
SYGIN

SEQ ID NO: 7069 - DNA, 15 bp, synthetic construct
  misc_feature 1..15: note = Description of Artificial Sequence: Synthetic oligonucleotide
  source 1..15: mol_type = other DNA
agctatggcatgcac

SEQ ID NO: 7070 - protein, 5 aa, synthetic construct
  REGION 1..5: note = Description of Artificial Sequence: Synthetic peptide
SYGMH

SEQ ID NO: 7071 - DNA, 15 bp, synthetic construct
  misc_feature 1..15: note = Description of Artificial Sequence: Synthetic oligonucleotide
  source 1..15: mol_type = other DNA
agctatggcatgcac

SEQ ID NO: 7072 - protein, 5 aa, synthetic construct
  REGION 1..5: note = Description of Artificial Sequence: Synthetic peptide
SYGMH

SEQ ID NO: 7073 - DNA, 15 bp, synthetic construct
  misc_feature 1..15: note = Description of Artificial Sequence: Synthetic oligonucleotide
  source 1..15: mol_type = other DNA
ggccactatatacac

SEQ ID NO: 7074 - protein, 5 aa, synthetic construct
  REGION 1..5: note = Description of Artificial Sequence: Synthetic peptide
GHYIH

SEQ ID NO: 7075 - DNA, 15 bp, synthetic construct
  misc_feature 1..15: note = Description of Artificial Sequence: Synthetic oligonucleotide
  source 1..15: mol_type = other DNA
agctatggcatgcac

SEQ ID NO: 7076 - protein, 5 aa, synthetic construct
  REGION 1..5: note = Description of Artificial Sequence: Synthetic peptide
SYGMH

SEQ ID NO: 7077 - DNA, 15 bp, synthetic construct
  misc_feature 1..15: note = Description of Artificial Sequence: Synthetic oligonucleotide
  source 1..15: mol_type = other DNA
agctatgtcatgcac

SEQ ID NO: 7078 - protein, 5 aa, synthetic construct
  REGION 1..5: note = Description of Artificial Sequence: Synthetic peptide
SYVMH

SEQ ID NO: 7079 - DNA, 15 bp, synthetic construct
  misc_feature 1..15: note = Description of Artificial Sequence: Synthetic oligonucleotide
  source 1..15: mol_type = other DNA
gactatgtcatgcac

SEQ ID NO: 7080 - protein, 5 aa, synthetic construct
  REGION 1..5: note = Description of Artificial Sequence: Synthetic peptide
DYVMH

SEQ ID NO: 7081 - DNA, 15 bp, synthetic construct
  misc_feature 1..15: note = Description of Artificial Sequence: Synthetic oligonucleotide
  source 1..15: mol_type = other DNA
gactatgtcatgcac

SEQ ID NO: 7082 - protein, 5 aa, synthetic construct
  REGION 1..5: note = Description of Artificial Sequence: Synthetic peptide
DYVMH

SEQ ID NO: 7083 - DNA, 15 bp, synthetic construct
  misc_feature 1..15: note = Description of Artificial Sequence: Synthetic oligonucleotide
  source 1..15: mol_type = other DNA
gactatgtcatacac

SEQ ID NO: 7084 - protein, 5 aa, synthetic construct
  REGION 1..5: note = Description of Artificial Sequence: Synthetic peptide
DYVIH

SEQ ID NO: 7085 - DNA, 15 bp, synthetic construct
  misc_feature 1..15: note = Description of Artificial Sequence: Synthetic oligonucleotide
  source 1..15: mol_type = other DNA
agctatggcatgcac

SEQ ID NO: 7086 - protein, 5 aa, synthetic construct
  REGION 1..5: note = Description of Artificial Sequence: Synthetic peptide
SYGMH

SEQ ID NO: 7087 - DNA, 15 bp, synthetic construct
  misc_feature 1..15: note = Description of Artificial Sequence: Synthetic oligonucleotide
  source 1..15: mol_type = other DNA
agctatggcatgcac

SEQ ID NO: 7088 - protein, 5 aa, synthetic construct
  REGION 1..5: note = Description of Artificial Sequence: Synthetic peptide
SYGMH

SEQ ID NO: 7089 - DNA, 15 bp, synthetic construct
  misc_feature 1..15: note = Description of Artificial Sequence: Synthetic oligonucleotide
  source 1..15: mol_type = other DNA
ggccactatatacac

SEQ ID NO: 7090 - protein, 5 aa, synthetic construct
  REGION 1..5: note = Description of Artificial Sequence: Synthetic peptide
GHYIH

SEQ ID NO: 7091 - DNA, 15 bp, synthetic construct
  misc_feature 1..15: note = Description of Artificial Sequence: Synthetic oligonucleotide
  source 1..15: mol_type = other DNA
tactatggcatgcac

SEQ ID NO: 7092 - protein, 5 aa, synthetic construct
  REGION 1..5: note = Description of Artificial Sequence: Synthetic peptide
YYGMH

SEQ ID NO: 7093 - DNA, 15 bp, synthetic construct
  misc_feature 1..15: note = Description of Artificial Sequence: Synthetic oligonucleotide
  source 1..15: mol_type = other DNA
gactatgtcatgcac

SEQ ID NO: 7094 - protein, 5 aa, synthetic construct
  REGION 1..5: note = Description of Artificial Sequence: Synthetic peptide
DYVMH

SEQ ID NO: 7095 - DNA, 15 bp, synthetic construct
  misc_feature 1..15: note = Description of Artificial Sequence: Synthetic oligonucleotide
  source 1..15: mol_type = other DNA
agctatggcatgcac

SEQ ID NO: 7096 - protein, 5 aa, synthetic construct
  REGION 1..5: note = Description of Artificial Sequence: Synthetic peptide
SYGMH

SEQ ID NO: 7097 - DNA, 15 bp, synthetic construct
  misc_feature 1..15: note = Description of Artificial Sequence: Synthetic oligonucleotide
  source 1..15: mol_type = other DNA
aactatggcatgcac

SEQ ID NO: 7098 - protein, 5 aa, synthetic construct
  REGION 1..5: note = Description of Artificial Sequence: Synthetic peptide
NYGMH

SEQ ID NO: 7099 - DNA, 15 bp, synthetic construct
  misc_feature 1..15: note = Description of Artificial Sequence: Synthetic oligonucleotide
  source 1..15: mol_type = other DNA
agctatggcatgcac

SEQ ID NO: 7100 - protein, 5 aa, synthetic construct
  REGION 1..5: note = Description of Artificial Sequence: Synthetic peptide
SYGMH

SEQ ID NO: 7101 - DNA, 15 bp, synthetic construct
  misc_feature 1..15: note = Description of Artificial Sequence: Synthetic oligonucleotide
  source 1..15: mol_type = other DNA
agctatagcatgaac

SEQ ID NO: 7102 - protein, 5 aa, synthetic construct
  REGION 1..5: note = Description of Artificial Sequence: Synthetic peptide
SYSMN

SEQ ID NO: 7103 - DNA, 15 bp, synthetic construct
  misc_feature 1..15: note = Description of Artificial Sequence: Synthetic oligonucleotide
  source 1..15: mol_type = other DNA
gactatgtcatgcac

SEQ ID NO: 7104 - protein, 5 aa, synthetic construct
  REGION 1..5: note = Description of Artificial Sequence: Synthetic peptide
DYVMH

SEQ ID NO: 7105 - DNA, 15 bp, synthetic construct
  misc_feature 1..15: note = Description of Artificial Sequence: Synthetic oligonucleotide
  source 1..15: mol_type = other DNA
gactatgtcatgcac

SEQ ID NO: 7106 - protein, 5 aa, synthetic construct
  REGION 1..5: note = Description of Artificial Sequence: Synthetic peptide
DYVMH

SEQ ID NO: 7107 - DNA, 15 bp, synthetic construct
  misc_feature 1..15: note = Description of Artificial Sequence: Synthetic oligonucleotide
  source 1..15: mol_type = other DNA
agctataatatgaac

SEQ ID NO: 7108 - protein, 5 aa, synthetic construct
  REGION 1..5: note = Description of Artificial Sequence: Synthetic peptide
SYNMN

SEQ ID NO: 7109 - DNA, 15 bp, synthetic construct
  misc_feature 1..15: note = Description of Artificial Sequence: Synthetic oligonucleotide
  source 1..15: mol_type = other DNA
gactatgtcatgcac

SEQ ID NO: 7110 - protein, 5 aa, synthetic construct
  REGION 1..5: note = Description of Artificial Sequence: Synthetic peptide
DYVMH

SEQ ID NO: 7111 - DNA, 15 bp, synthetic construct
  misc_feature 1..15: note = Description of Artificial Sequence: Synthetic oligonucleotide
  source 1..15: mol_type = other DNA
agcaatggcatgcac

SEQ ID NO: 7112 - protein, 5 aa, synthetic construct
  REGION 1..5: note = Description of Artificial Sequence: Synthetic peptide
SNGMH

SEQ ID NO: 7113 - DNA, 15 bp, synthetic construct
  misc_feature 1..15: note = Description of Artificial Sequence: Synthetic oligonucleotide
  source 1..15: mol_type = other DNA
agttatggcatgcac

SEQ ID NO: 7114 - protein, 5 aa, synthetic construct
  REGION 1..5: note = Description of Artificial Sequence: Synthetic peptide
SYGMH

SEQ ID NO: 7115 - DNA, 15 bp, synthetic construct
  misc_feature 1..15: note = Description of Artificial Sequence: Synthetic oligonucleotide
  source 1..15: mol_type = other DNA
gactatgtcatgcac

SEQ ID NO: 7116 - protein, 5 aa, synthetic construct
  REGION 1..5: note = Description of Artificial Sequence: Synthetic peptide
DYVMH

SEQ ID NO: 7117 - DNA, 15 bp, synthetic construct
  misc_feature 1..15: note = Description of Artificial Sequence: Synthetic oligonucleotide
  source 1..15: mol_type = other DNA
gactatgtcatgcac

SEQ ID NO: 7118 - protein, 5 aa, synthetic construct
  REGION 1..5: note = Description of Artificial Sequence: Synthetic peptide
DYVMH

SEQ ID NO: 7119 - DNA, 15 bp, synthetic construct
  misc_feature 1..15: note = Description of Artificial Sequence: Synthetic oligonucleotide
  source 1..15: mol_type = other DNA
gactatgtcatgcac

SEQ ID NO: 7120 - protein, 5 aa, synthetic construct
  REGION 1..5: note = Description of Artificial Sequence: Synthetic peptide
DYVMH

SEQ ID NO: 7121 - DNA, 15 bp, synthetic construct
  misc_feature 1..15: note = Description of Artificial Sequence: Synthetic oligonucleotide
  source 1..15: mol_type = other DNA
agatatggcatgcac

SEQ ID NO: 7122 - protein, 5 aa, synthetic construct
  REGION 1..5: note = Description of Artificial Sequence: Synthetic peptide
RYGMH

SEQ ID NO: 7123 - DNA, 15 bp, synthetic construct
  misc_feature 1..15: note = Description of Artificial Sequence: Synthetic oligonucleotide
  source 1..15: mol_type = other DNA
acttactactggagc

SEQ ID NO: 7124 - protein, 5 aa, synthetic construct
  REGION 1..5: note = Description of Artificial Sequence: Synthetic peptide
TYYWS

SEQ ID NO: 7125 - DNA, 15 bp, synthetic construct
  misc_feature 1..15: note = Description of Artificial Sequence: Synthetic oligonucleotide
  source 1..15: mol_type = other DNA
gactatgtcatgcac

SEQ ID NO: 7126 - protein, 5 aa, synthetic construct
  REGION 1..5: note = Description of Artificial Sequence: Synthetic peptide
DYVMH

SEQ ID NO: 7127 - DNA, 15 bp, synthetic construct
  misc_feature 1..15: note = Description of Artificial Sequence: Synthetic oligonucleotide
  source 1..15: mol_type = other DNA
ggctactatatgcac

SEQ ID NO: 7128 - protein, 5 aa, synthetic construct
  REGION 1..5: note = Description of Artificial Sequence: Synthetic peptide
GYYMH

SEQ ID NO: 7129 - DNA, 15 bp, synthetic construct
  misc_feature 1..15: note = Description of Artificial Sequence: Synthetic oligonucleotide
  source 1..15: mol_type = other DNA
agcaatggcatgcac

SEQ ID NO: 7130 - protein, 5 aa, synthetic construct
  REGION 1..5: note = Description of Artificial Sequence: Synthetic peptide
SNGMH

SEQ ID NO: 7131 - DNA, 15 bp, synthetic construct
  misc_feature 1..15: note = Description of Artificial Sequence: Synthetic oligonucleotide
  source 1..15: mol_type = other DNA
ggctactatatgcac

SEQ ID NO: 7132 - protein, 5 aa, synthetic construct
  REGION 1..5: note = Description of Artificial Sequence: Synthetic peptide
GYYMH

SEQ ID NO: 7133 - DNA, 15 bp, synthetic construct
  misc_feature 1..15: note = Description of Artificial Sequence: Synthetic oligonucleotide
  source 1..15: mol_type = other DNA
agctatggtatcaac

SEQ ID NO: 7134 - protein, 5 aa, synthetic construct
  REGION 1..5: note = Description of Artificial Sequence: Synthetic peptide
SYGIN

SEQ ID NO: 7135 - DNA, 15 bp, synthetic construct
  misc_feature 1..15: note = Description of Artificial Sequence: Synthetic oligonucleotide
  source 1..15: mol_type = other DNA
agctatggcatgcac

SEQ ID NO: 7136 - protein, 5 aa, synthetic construct
  REGION 1..5: note = Description of Artificial Sequence: Synthetic peptide
SYGMH

SEQ ID NO: 7137 - DNA, 15 bp, synthetic construct
  misc_feature 1..15: note = Description of Artificial Sequence: Synthetic oligonucleotide
  source 1..15: mol_type = other DNA
aactttgccatgagt

SEQ ID NO: 7138 - protein, 5 aa, synthetic construct
  REGION 1..5: note = Description of Artificial Sequence: Synthetic peptide
NFAMS

SEQ ID NO: 7139 - DNA, 15 bp, synthetic construct
  misc_feature 1..15: note = Description of Artificial Sequence: Synthetic oligonucleotide
  source 1..15: mol_type = other DNA
ggtcgctactggagc

SEQ ID NO: 7140 - protein, 5 aa, synthetic construct
  REGION 1..5: note = Description of Artificial Sequence: Synthetic peptide
GRYWS

SEQ ID NO: 7141 - DNA, 15 bp, synthetic construct
  misc_feature 1..15: note = Description of Artificial Sequence: Synthetic oligonucleotide
  source 1..15: mol_type = other DNA
ggctactatatgcac

SEQ ID NO: 7142 - protein, 5 aa, synthetic construct
  REGION 1..5: note = Description of Artificial Sequence: Synthetic peptide
GYYMH

SEQ ID NO: 7143 - DNA, 15 bp, synthetic construct
  misc_feature 1..15: note = Description of Artificial Sequence: Synthetic oligonucleotide
  source 1..15: mol_type = other DNA
aactttgccatgagt

SEQ ID NO: 7144 - protein, 5 aa, synthetic construct
  REGION 1..5: note = Description of Artificial Sequence: Synthetic peptide
NFAMS

SEQ ID NO: 7145 - DNA, 15 bp, synthetic construct
  misc_feature 1..15: note = Description of Artificial Sequence: Synthetic oligonucleotide
  source 1..15: mol_type = other DNA
agctatggcatgcac

SEQ ID NO: 7146 - protein, 5 aa, synthetic construct
  REGION 1..5: note = Description of Artificial Sequence: Synthetic peptide
SYGMH

SEQ ID NO: 7147 - DNA, 15 bp, synthetic construct
  misc_feature 1..15: note = Description of Artificial Sequence: Synthetic oligonucleotide
  source 1..15: mol_type = other DNA
ggctactatatgcac

SEQ ID NO: 7148 - protein, 5 aa, synthetic construct
  REGION 1..5: note = Description of Artificial Sequence: Synthetic peptide
GYYMH

SEQ ID NO: 7149 - DNA, 15 bp, synthetic construct
  misc_feature 1..15: note = Description of Artificial Sequence: Synthetic oligonucleotide
  source 1..15: mol_type = other DNA
agctatggtatcaac

SEQ ID NO: 7150 - protein, 5 aa, synthetic construct
  REGION 1..5: note = Description of Artificial Sequence: Synthetic peptide
SYGIN

SEQ ID NO: 7151 - DNA, 15 bp, synthetic construct
  misc_feature 1..15: note = Description of Artificial Sequence: Synthetic oligonucleotide
  source 1..15: mol_type = other DNA
agctatggcatgcac

SEQ ID NO: 7152 - protein, 5 aa, synthetic construct
  REGION 1..5: note = Description of Artificial Sequence: Synthetic peptide
SYGMH

SEQ ID NO: 7153 - DNA, 15 bp, synthetic construct
  misc_feature 1..15: note = Description of Artificial Sequence: Synthetic oligonucleotide
  source 1..15: mol_type = other DNA
agctatgccatgagc

SEQ ID NO: 7154 - protein, 5 aa, synthetic construct
  REGION 1..5: note = Description of Artificial Sequence: Synthetic peptide
SYAMS

SEQ ID NO: 7155 - DNA, 15 bp, synthetic construct
  misc_feature 1..15: note = Description of Artificial Sequence: Synthetic oligonucleotide
  source 1..15: mol_type = other DNA
agctatgccatgagc

SEQ ID NO: 7156 - protein, 5 aa, synthetic construct
  REGION 1..5: note = Description of Artificial Sequence: Synthetic peptide
SYAMS

SEQ ID NO: 7157 - DNA, 15 bp, synthetic construct
  misc_feature 1..15: note = Description of Artificial Sequence: Synthetic oligonucleotide
  source 1..15: mol_type = other DNA
agctatatcatgcac

SEQ ID NO: 7158 - protein, 5 aa, synthetic construct
  REGION 1..5: note = Description of Artificial Sequence: Synthetic peptide
SYIMH

SEQ ID NO: 7159 - DNA, 15 bp, synthetic construct
  misc_feature 1..15: note = Description of Artificial Sequence: Synthetic oligonucleotide
  source 1..15: mol_type = other DNA
ggctactatatacac

SEQ ID NO: 7160 - protein, 5 aa, synthetic construct
  REGION 1..5: note = Description of Artificial Sequence: Synthetic peptide
GYYIH

SEQ ID NO: 7161 - DNA, 21 bp, synthetic construct
  misc_feature 1..21: note = Description of Artificial Sequence: Synthetic oligonucleotide
  source 1..21: mol_type = other DNA
agaagtagttactactggggc

SEQ ID NO: 7162 - protein, 7 aa, synthetic construct
  REGION 1..7: note = Description of Artificial Sequence: Synthetic peptide
RSSYYWG

SEQ ID NO: 7163 - DNA, 15 bp, synthetic construct
  misc_feature 1..15: note = Description of Artificial Sequence: Synthetic oligonucleotide
  source 1..15: mol_type = other DNA
agctatggcatgcac

SEQ ID NO: 7164 - protein, 5 aa, synthetic construct
  REGION 1..5: note = Description of Artificial Sequence: Synthetic peptide
SYGMH

SEQ ID NO: 7165 - DNA, 15 bp, synthetic construct
  misc_feature 1..15: note = Description of Artificial Sequence: Synthetic oligonucleotide
  source 1..15: mol_type = other DNA
aattatgatatcaac

SEQ ID NO: 7166 - protein, 5 aa, synthetic construct
  REGION 1..5: note = Description of Artificial Sequence: Synthetic peptide
NYDIN

SEQ ID NO: 7167 - DNA, 15 bp, synthetic construct
  misc_feature 1..15: note = Description of Artificial Sequence: Synthetic oligonucleotide
  source 1..15: mol_type = other DNA
agcgatgccatgagc

SEQ ID NO: 7168 - protein, 5 aa, synthetic construct
  REGION 1..5: note = Description of Artificial Sequence: Synthetic peptide
SDAMS

SEQ ID NO: 7169 - DNA, 15 bp, synthetic construct
  misc_feature 1..15: note = Description of Artificial Sequence: Synthetic oligonucleotide
  source 1..15: mol_type = other DNA
ggctactatatacac

SEQ ID NO: 7170 - protein, 5 aa, synthetic construct
  REGION 1..5: note = Description of Artificial Sequence: Synthetic peptide
GYYIH

SEQ ID NO: 7171 - DNA, 15 bp, synthetic construct
  misc_feature 1..15: note = Description of Artificial Sequence: Synthetic oligonucleotide
  source 1..15: mol_type = other DNA
aattatgatatcaac

SEQ ID NO: 7172 - protein, 5 aa, synthetic construct
  REGION 1..5: note = Description of Artificial Sequence: Synthetic peptide
NYDIN

SEQ ID NO: 7173 - DNA, 15 bp, synthetic construct
  misc_feature 1..15: note = Description of Artificial Sequence: Synthetic oligonucleotide
  source 1..15: mol_type = other DNA
aattatgatatcaac

SEQ ID NO: 7174 - protein, 5 aa, synthetic construct
  REGION 1..5: note = Description of Artificial Sequence: Synthetic peptide
NYDIN

SEQ ID NO: 7175 - DNA, 15 bp, synthetic construct
  misc_feature 1..15: note = Description of Artificial Sequence: Synthetic oligonucleotide
  source 1..15: mol_type = other DNA
agctatggcatgcac

SEQ ID NO: 7176 - protein, 5 aa, synthetic construct
  REGION 1..5: note = Description of Artificial Sequence: Synthetic peptide
SYGMH

SEQ ID NO: 7177 - DNA, 15 bp, synthetic construct
  misc_feature 1..15: note = Description of Artificial Sequence: Synthetic oligonucleotide
  source 1..15: mol_type = other DNA
ggctactatatacac

SEQ ID NO: 7178 - protein, 5 aa, synthetic construct
  REGION 1..5: note = Description of Artificial Sequence: Synthetic peptide
GYYIH

SEQ ID NO: 7179 - DNA, 15 bp, synthetic construct
  misc_feature 1..15: note = Description of Artificial Sequence: Synthetic oligonucleotide
  source 1..15: mol_type = other DNA
aattatgatatcaac

SEQ ID NO: 7180 - protein, 5 aa, synthetic construct
  REGION 1..5: note = Description of Artificial Sequence: Synthetic peptide
NYDIN

SEQ ID NO: 7181 - DNA, 15 bp, synthetic construct
  misc_feature 1..15: note = Description of Artificial Sequence: Synthetic oligonucleotide
  source 1..15: mol_type = other DNA
ggctactatatacac

SEQ ID NO: 7182 - protein, 5 aa, synthetic construct
  REGION 1..5: note = Description of Artificial Sequence: Synthetic peptide
GYYIH

SEQ ID NO: 7183 - DNA, 15 bp, synthetic construct
  misc_feature 1..15: note = Description of Artificial Sequence: Synthetic oligonucleotide
  source 1..15: mol_type = other DNA
gactatgtcatccac

SEQ ID NO: 7184 - protein, 5 aa, synthetic construct
  REGION 1..5: note = Description of Artificial Sequence: Synthetic peptide
DYVIH

SEQ ID NO: 7185 - DNA, 15 bp, synthetic construct
  misc_feature 1..15: note = Description of Artificial Sequence: Synthetic oligonucleotide
  source 1..15: mol_type = other DNA
agctactatatgcac

SEQ ID NO: 7186 - protein, 5 aa, synthetic construct
  REGION 1..5: note = Description of Artificial Sequence: Synthetic peptide
SYYMH

SEQ ID NO: 7187 - DNA, 15 bp, synthetic construct
  misc_feature 1..15: note = Description of Artificial Sequence: Synthetic oligonucleotide
  source 1..15: mol_type = other DNA
aattatgatatcaac

SEQ ID NO: 7188 - protein, 5 aa, synthetic construct
  REGION 1..5: note = Description of Artificial Sequence: Synthetic peptide
NYDIN

SEQ ID NO: 7189 - DNA, 15 bp, synthetic construct
  misc_feature 1..15: note = Description of Artificial Sequence: Synthetic oligonucleotide
  source 1..15: mol_type = other DNA
ggctactatatacac

SEQ ID NO: 7190 - protein, 5 aa, synthetic construct
  REGION 1..5: note = Description of Artificial Sequence: Synthetic peptide
GYYIH

SEQ ID NO: 7191 - DNA, 15 bp, synthetic construct
  misc_feature 1..15: note = Description of Artificial Sequence: Synthetic oligonucleotide
  source 1..15: mol_type = other DNA
aattatgatatcaac

SEQ ID NO: 7192 - protein, 5 aa, synthetic construct
  REGION 1..5: note = Description of Artificial Sequence: Synthetic peptide
NYDIN

SEQ ID NO: 7193 - DNA, 15 bp, synthetic construct
  misc_feature 1..15: note = Description of Artificial Sequence: Synthetic oligonucleotide
  source 1..15: mol_type = other DNA
gactatggcatgcac

SEQ ID NO: 7194 - protein, 5 aa, synthetic construct
  REGION 1..5: note = Description of Artificial Sequence: Synthetic peptide
DYGMH

SEQ ID NO: 7195 - DNA, 15 bp, synthetic construct
  misc_feature 1..15: note = Description of Artificial Sequence: Synthetic oligonucleotide
  source 1..15: mol_type = other DNA
aactatggcatgcac

SEQ ID NO: 7196 - protein, 5 aa, synthetic construct
  REGION 1..5: note = Description of Artificial Sequence: Synthetic peptide
NYGMH

SEQ ID NO: 7197 - DNA, 21 bp, synthetic construct
  misc_feature 1..21: note = Description of Artificial Sequence: Synthetic oligonucleotide
  source 1..21: mol_type = other DNA
agtggtcattactactggagc

SEQ ID NO: 7198 - protein, 7 aa, synthetic construct
  REGION 1..7: note = Description of Artificial Sequence: Synthetic peptide
SGHYYWS

SEQ ID NO: 7199 - DNA, 15 bp, synthetic construct
  misc_feature 1..15: note = Description of Artificial Sequence: Synthetic oligonucleotide
  source 1..15: mol_type = other DNA
agctatggcatgcac

SEQ ID NO: 7200 - protein, 5 aa, synthetic construct
  REGION 1..5: note = Description of Artificial Sequence: Synthetic peptide
SYGMH

SEQ ID NO: 7201 - DNA, 15 bp, synthetic construct
  misc_feature 1..15: note = Description of Artificial Sequence: Synthetic oligonucleotide
  source 1..15: mol_type = other DNA
aattatgatatcaac

SEQ ID NO: 7202 - protein, 5 aa, synthetic construct
  REGION 1..5: note = Description of Artificial Sequence: Synthetic peptide
NYDIN

SEQ ID NO: 7203 - DNA, 15 bp, synthetic construct
  misc_feature 1..15: note = Description of Artificial Sequence: Synthetic oligonucleotide
  source 1..15: mol_type = other DNA
aattatgatatcaac

SEQ ID NO: 7204 - protein, 5 aa, synthetic construct
  REGION 1..5: note = Description of Artificial Sequence: Synthetic peptide
NYDIN

SEQ ID NO: 7205 - DNA, 15 bp, synthetic construct
  misc_feature 1..15: note = Description of Artificial Sequence: Synthetic oligonucleotide
  source 1..15: mol_type = other DNA
cattatgatatcaac

SEQ ID NO: 7206 - protein, 5 aa, synthetic construct
  REGION 1..5: note = Description of Artificial Sequence: Synthetic peptide
HYDIN

SEQ ID NO: 7207 - DNA, 15 bp, synthetic construct
  misc_feature 1..15: note = Description of Artificial Sequence: Synthetic oligonucleotide
  source 1..15: mol_type = other DNA
aattatgatatcaac

SEQ ID NO: 7208 - protein, 5 aa, synthetic construct
  REGION 1..5: note = Description of Artificial Sequence: Synthetic peptide
NYDIN

SEQ ID NO: 7209 - DNA, 15 bp, synthetic construct
  misc_feature 1..15: note = Description of Artificial Sequence: Synthetic oligonucleotide
  source 1..15: mol_type = other DNA
acctatggcatgcac

SEQ ID NO: 7210 - protein, 5 aa, synthetic construct
  REGION 1..5: note = Description of Artificial Sequence: Synthetic peptide
TYGMH

SEQ ID NO: 7211 - DNA, 15 bp, synthetic construct
  misc_feature 1..15: note = Description of Artificial Sequence: Synthetic oligonucleotide
  source 1..15: mol_type = other DNA
aactatggcatgcac

SEQ ID NO: 7212 - protein, 5 aa, synthetic construct
  REGION 1..5: note = Description of Artificial Sequence: Synthetic peptide
NYGMH

SEQ ID NO: 7213 - DNA, 15 bp, synthetic construct
  misc_feature 1..15: note = Description of Artificial Sequence: Synthetic oligonucleotide
  source 1..15: mol_type = other DNA
gactatggcatgcac

SEQ ID NO: 7214 - protein, 5 aa, synthetic construct
  REGION 1..5: note = Description of Artificial Sequence: Synthetic peptide
DYGMH

SEQ ID NO: 7215 - DNA, 15 bp, synthetic construct
  misc_feature 1..15: note = Description of Artificial Sequence: Synthetic oligonucleotide
  source 1..15: mol_type = other DNA
aattatgatatcaac

SEQ ID NO: 7216 - protein, 5 aa, synthetic construct
  REGION 1..5: note = Description of Artificial Sequence: Synthetic peptide
NYDIN

SEQ ID NO: 7217 - DNA, 15 bp, synthetic construct
  misc_feature 1..15: note = Description of Artificial Sequence: Synthetic oligonucleotide
  source 1..15: mol_type = other DNA
aattatgatatcaac

SEQ ID NO: 7218 - protein, 5 aa, synthetic construct
  REGION 1..5: note = Description of Artificial Sequence: Synthetic peptide
NYDIN

SEQ ID NO: 7219 - DNA, 15 bp, synthetic construct
  misc_feature 1..15: note = Description of Artificial Sequence: Synthetic oligonucleotide
  source 1..15: mol_type = other DNA
acctatggcatgcac

SEQ ID NO: 7220 - protein, 5 aa, synthetic construct
  REGION 1..5: note = Description of Artificial Sequence: Synthetic peptide
TYGMH

SEQ ID NO: 7221 - DNA, 15 bp, synthetic construct
  misc_feature 1..15: note = Description of Artificial Sequence: Synthetic oligonucleotide
  source 1..15: mol_type = other DNA
agctatggcatgcac

SEQ ID NO: 7222 - protein, 5 aa, synthetic construct
  REGION 1..5: note = Description of Artificial Sequence: Synthetic peptide
SYGMH

SEQ ID NO: 7223 - DNA, 15 bp, synthetic construct
  misc_feature 1..15: note = Description of Artificial Sequence: Synthetic oligonucleotide
  source 1..15: mol_type = other DNA
ggctactatatacac

SEQ ID NO: 7224 - protein, 5 aa, synthetic construct
  REGION 1..5: note = Description of Artificial Sequence: Synthetic peptide
GYYIH

SEQ ID NO: 7225 - DNA, 15 bp, synthetic construct
  misc_feature 1..15: note = Description of Artificial Sequence: Synthetic oligonucleotide
  source 1..15: mol_type = other DNA
aactatggcatgcac

SEQ ID NO: 7226 - protein, 5 aa, synthetic construct
  REGION 1..5: note = Description of Artificial Sequence: Synthetic peptide
NYGMH

SEQ ID NO: 7227 - DNA, 15 bp, synthetic construct
  misc_feature 1..15: note = Description of Artificial Sequence: Synthetic oligonucleotide
  source 1..15: mol_type = other DNA
ggctactatatacac

SEQ ID NO: 7228 - protein, 5 aa, synthetic construct
  REGION 1..5: note = Description of Artificial Sequence: Synthetic peptide
GYYIH

SEQ ID NO: 7229 - DNA, 15 bp, synthetic construct
  misc_feature 1..15: note = Description of Artificial Sequence: Synthetic oligonucleotide
  source 1..15: mol_type = other DNA
ggctactatatacac

SEQ ID NO: 7230 - protein, 5 aa, synthetic construct
  REGION 1..5: note = Description of Artificial Sequence: Synthetic peptide
GYYIH

SEQ ID NO: 7231 - DNA, 15 bp, synthetic construct
  misc_feature 1..15: note = Description of Artificial Sequence: Synthetic oligonucleotide
  source 1..15: mol_type = other DNA
ggctattatatacac

SEQ ID NO: 7232 - protein, 5 aa, synthetic construct
  REGION 1..5: note = Description of Artificial Sequence: Synthetic peptide
GYYIH

SEQ ID NO: 7233 - DNA, 15 bp, synthetic construct
  misc_feature 1..15: note = Description of Artificial Sequence: Synthetic oligonucleotide
  source 1..15: mol_type = other DNA
aattatgatatcaac

SEQ ID NO: 7234 - protein, 5 aa, synthetic construct
  REGION 1..5: note = Description of Artificial Sequence: Synthetic peptide
NYDIN

SEQ ID NO: 7235 - DNA, 15 bp, synthetic construct
  misc_feature 1..15: note = Description of Artificial Sequence: Synthetic oligonucleotide
  source 1..15: mol_type = other DNA
ggctactatatacac

SEQ ID NO: 7236 - protein, 5 aa, synthetic construct
  REGION 1..5: note = Description of Artificial Sequence: Synthetic peptide
GYYIH

SEQ ID NO: 7237 - DNA, 15 bp, synthetic construct
  misc_feature 1..15: note = Description of Artificial Sequence: Synthetic oligonucleotide
  source 1..15: mol_type = other DNA
aactgtggcatgcac

SEQ ID NO: 7238 - protein, 5 aa, synthetic construct
  REGION 1..5: note = Description of Artificial Sequence: Synthetic peptide
NCGMH

SEQ ID NO: 7239 - DNA, 15 bp, synthetic construct
  misc_feature 1..15: note = Description of Artificial Sequence: Synthetic oligonucleotide
  source 1..15: mol_type = other DNA
aattatgatatcaac

SEQ ID NO: 7240 - protein, 5 aa, synthetic construct
  REGION 1..5: note = Description of Artificial Sequence: Synthetic peptide
NYDIN

SEQ ID NO: 7241 - DNA, 15 bp, synthetic construct
  misc_feature 1..15: note = Description of Artificial Sequence: Synthetic oligonucleotide
  source 1..15: mol_type = other DNA
ggctactatatacac

SEQ ID NO: 7242 - protein, 5 aa, synthetic construct
  REGION 1..5: note = Description of Artificial Sequence: Synthetic peptide
GYYIH

SEQ ID NO: 7243 - DNA, 15 bp, synthetic construct
  misc_feature 1..15: note = Description of Artificial Sequence: Synthetic oligonucleotide
  source 1..15: mol_type = other DNA
ggctactatacacac

SEQ ID NO: 7244 - protein, 5 aa, synthetic construct
  REGION 1..5: note = Description of Artificial Sequence: Synthetic peptide
GYYTH

SEQ ID NO: 7245 - DNA, 15 bp, synthetic construct
  misc_feature 1..15: note = Description of Artificial Sequence: Synthetic oligonucleotide
  source 1..15: mol_type = other DNA
ggctactatatacac

SEQ ID NO: 7246 - protein, 5 aa, synthetic construct
  REGION 1..5: note = Description of Artificial Sequence: Synthetic peptide
GYYIH

SEQ ID NO: 7247 - DNA, 15 bp, synthetic construct
  misc_feature 1..15: note = Description of Artificial Sequence: Synthetic oligonucleotide
  source 1..15: mol_type = other DNA
agctatggcatgcac

SEQ ID NO: 7248 - protein, 5 aa, synthetic construct
  REGION 1..5: note = Description of Artificial Sequence: Synthetic peptide
SYGMH

SEQ ID NO: 7249 - DNA, 15 bp, synthetic construct
  misc_feature 1..15: note = Description of Artificial Sequence: Synthetic oligonucleotide
  source 1..15: mol_type = other DNA
acttttgccatgacc

SEQ ID NO: 7250 - protein, 5 aa, synthetic construct
  REGION 1..5: note = Description of Artificial Sequence: Synthetic peptide
TFAMT

SEQ ID NO: 7251 - DNA, 15 bp, synthetic construct
  misc_feature 1..15: note = Description of Artificial Sequence: Synthetic oligonucleotide
  source 1..15: mol_type = other DNA
aactatggcatgcac

SEQ ID NO: 7252 - protein, 5 aa, synthetic construct
  REGION 1..5: note = Description of Artificial Sequence: Synthetic peptide
NYGMH

SEQ ID NO: 7253 - DNA, 15 bp, synthetic construct
  misc_feature 1..15: note = Description of Artificial Sequence: Synthetic oligonucleotide
  source 1..15: mol_type = other DNA
aattatgatatcaac

SEQ ID NO: 7254 - protein, 5 aa, synthetic construct
  REGION 1..5: note = Description of Artificial Sequence: Synthetic peptide
NYDIN

SEQ ID NO: 7255 - DNA, 15 bp, synthetic construct
  misc_feature 1..15: note = Description of Artificial Sequence: Synthetic oligonucleotide
  source 1..15: mol_type = other DNA
aattatgatatcaac

SEQ ID NO: 7256 - protein, 5 aa, synthetic construct
  REGION 1..5: note = Description of Artificial Sequence: Synthetic peptide
NYDIN

SEQ ID NO: 7257 - DNA, 15 bp, synthetic construct
  misc_feature 1..15: note = Description of Artificial Sequence: Synthetic oligonucleotide
  source 1..15: mol_type = other DNA
ggctactatatacac

SEQ ID NO: 7258 - protein, 5 aa, synthetic construct
  REGION 1..5: note = Description of Artificial Sequence: Synthetic peptide
GYYIH

SEQ ID NO: 7259 - DNA, 15 bp, synthetic construct
  misc_feature 1..15: note = Description of Artificial Sequence: Synthetic oligonucleotide
  source 1..15: mol_type = other DNA
aattatgatatcaac

SEQ ID NO: 7260 - protein, 5 aa, synthetic construct
  REGION 1..5: note = Description of Artificial Sequence: Synthetic peptide
NYDIN

SEQ ID NO: 7261 - DNA, 15 bp, synthetic construct
  misc_feature 1..15: note = Description of Artificial Sequence: Synthetic oligonucleotide
  source 1..15: mol_type = other DNA
aattatgatatcaac

SEQ ID NO: 7262 - protein, 5 aa, synthetic construct
  REGION 1..5: note = Description of Artificial Sequence: Synthetic peptide
NYDIN

SEQ ID NO: 7263 - DNA, 15 bp, synthetic construct
  misc_feature 1..15: note = Description of Artificial Sequence: Synthetic oligonucleotide
  source 1..15: mol_type = other DNA
acctatagcatgaac

SEQ ID NO: 7264 - protein, 5 aa, synthetic construct
  REGION 1..5: note = Description of Artificial Sequence: Synthetic peptide
TYSMN

SEQ ID NO: 7265 - DNA, 15 bp, synthetic construct
  misc_feature 1..15: note = Description of Artificial Sequence: Synthetic oligonucleotide
  source 1..15: mol_type = other DNA
aactatggcatgcac

SEQ ID NO: 7266 - protein, 5 aa, synthetic construct
  REGION 1..5: note = Description of Artificial Sequence: Synthetic peptide
NYGMH

SEQ ID NO: 7267 - DNA, 15 bp, synthetic construct
  misc_feature 1..15: note = Description of Artificial Sequence: Synthetic oligonucleotide
  source 1..15: mol_type = other DNA
agctatgccatgagc

SEQ ID NO: 7268 - protein, 5 aa, synthetic construct
  REGION 1..5: note = Description of Artificial Sequence: Synthetic peptide
SYAMS

SEQ ID NO: 7269 - DNA, 15 bp, synthetic construct
  misc_feature 1..15: note = Description of Artificial Sequence: Synthetic oligonucleotide
  source 1..15: mol_type = other DNA
agctatgccatgagc

SEQ ID NO: 7270 - protein, 5 aa, synthetic construct
  REGION 1..5: note = Description of Artificial Sequence: Synthetic peptide
SYAMS

SEQ ID NO: 7271 - DNA, 15 bp, synthetic construct
  misc_feature 1..15: note = Description of Artificial Sequence: Synthetic oligonucleotide
  source 1..15: mol_type = other DNA
agctatgccatgagc

SEQ ID NO: 7272 - protein, 5 aa, synthetic construct
  REGION 1..5: note = Description of Artificial Sequence: Synthetic peptide
SYAMS

SEQ ID NO: 7273 - DNA, 15 bp, synthetic construct
  misc_feature 1..15: note = Description of Artificial Sequence: Synthetic oligonucleotide
  source 1..15: mol_type = other DNA
aactataacatgaac

SEQ ID NO: 7274 - protein, 5 aa, synthetic construct
  REGION 1..5: note = Description of Artificial Sequence: Synthetic peptide
NYNMN

SEQ ID NO: 7275 - DNA, 15 bp, synthetic construct
  misc_feature 1..15: note = Description of Artificial Sequence: Synthetic oligonucleotide
  source 1..15: mol_type = other DNA
agttatgatatcaac

SEQ ID NO: 7276 - protein, 5 aa, synthetic construct
  REGION 1..5: note = Description of Artificial Sequence: Synthetic peptide
SYDIN

SEQ ID NO: 7277 - DNA, 15 bp, synthetic construct
  misc_feature 1..15: note = Description of Artificial Sequence: Synthetic oligonucleotide
  source 1..15: mol_type = other DNA
agctatgccatgagc

SEQ ID NO: 7278 - protein, 5 aa, synthetic construct
  REGION 1..5: note = Description of Artificial Sequence: Synthetic peptide
SYAMS

SEQ ID NO: 7279 - DNA, 15 bp, synthetic construct
  misc_feature 1..15: note = Description of Artificial Sequence: Synthetic oligonucleotide
  source 1..15: mol_type = other DNA
gactactatttgcac

SEQ ID NO: 7280 - protein, 5 aa, synthetic construct
  REGION 1..5: note = Description of Artificial Sequence: Synthetic peptide
DYYLH

SEQ ID NO: 7281 - DNA, 15 bp, synthetic construct
  misc_feature 1..15: note = Description of Artificial Sequence: Synthetic oligonucleotide
  source 1..15: mol_type = other DNA
agctatggcatgcac

SEQ ID NO: 7282 - protein, 5 aa, synthetic construct
  REGION 1..5: note = Description of Artificial Sequence: Synthetic peptide
SYGMH

SEQ ID NO: 7283 - DNA, 15 bp, synthetic construct
  misc_feature 1..15: note = Description of Artificial Sequence: Synthetic oligonucleotide
  source 1..15: mol_type = other DNA
agctatggcatgcac

SEQ ID NO: 7284 - protein, 5 aa, synthetic construct
  REGION 1..5: note = Description of Artificial Sequence: Synthetic peptide
SYGMH

SEQ ID NO: 7285 - DNA, 15 bp, synthetic construct
  misc_feature 1..15: note = Description of Artificial Sequence: Synthetic oligonucleotide
  source 1..15: mol_type = other DNA
acctatggcatgcac

SEQ ID NO: 7286 - protein, 5 aa, synthetic construct
  REGION 1..5: note = Description of Artificial Sequence: Synthetic peptide
TYGMH

SEQ ID NO: 7287 - DNA, 15 bp, synthetic construct
  misc_feature 1..15: note = Description of Artificial Sequence: Synthetic oligonucleotide
  source 1..15: mol_type = other DNA
acctatggcatgcac

SEQ ID NO: 7288 - protein, 5 aa, synthetic construct
  REGION 1..5: note = Description of Artificial Sequence: Synthetic peptide
TYGMH

SEQ ID NO: 7289 - DNA, 15 bp, synthetic construct
  misc_feature 1..15: note = Description of Artificial Sequence: Synthetic oligonucleotide
  source 1..15: mol_type = other DNA
aactatgtcatgagc

SEQ ID NO: 7290 - protein, 5 aa, synthetic construct
  REGION 1..5: note = Description of Artificial Sequence: Synthetic peptide
NYVMS

SEQ ID NO: 7291 - DNA, 15 bp, synthetic construct
  misc_feature 1..15: note = Description of Artificial Sequence: Synthetic oligonucleotide
  source 1..15: mol_type = other DNA
agctatgccatgagc

SEQ ID NO: 7292 - protein, 5 aa, synthetic construct
  REGION 1..5: note = Description of Artificial Sequence: Synthetic peptide
SYAMS

SEQ ID NO: 7293 - DNA, 21 bp, synthetic construct
  misc_feature 1..21: note = Description of Artificial Sequence: Synthetic oligonucleotide
  source 1..21: mol_type = other DNA
agtggttattaccactggagc

SEQ ID NO: 7294 - protein, 7 aa, synthetic construct
  REGION 1..7: note = Description of Artificial Sequence: Synthetic peptide
SGYYHWS

SEQ ID NO: 7295 - DNA, 15 bp, synthetic construct
  misc_feature 1..15: note = Description of Artificial Sequence: Synthetic oligonucleotide
  source 1..15: mol_type = other DNA
aactataacatgaac

SEQ ID NO: 7296 - protein, 5 aa, synthetic construct
  REGION 1..5: note = Description of Artificial Sequence: Synthetic peptide
NYNMN

SEQ ID NO: 7297 - DNA, 15 bp, synthetic construct
  misc_feature 1..15: note = Description of Artificial Sequence: Synthetic oligonucleotide
  source 1..15: mol_type = other DNA
agctataacatgaac

SEQ ID NO: 7298 - protein, 5 aa, synthetic construct
  REGION 1..5: note = Description of Artificial Sequence: Synthetic peptide
SYNMN

SEQ ID NO: 7299 - DNA, 15 bp, synthetic construct
  misc_feature 1..15: note = Description of Artificial Sequence: Synthetic oligonucleotide
  source 1..15: mol_type = other DNA
agctatgccatgagc

SEQ ID NO: 7300 - protein, 5 aa, synthetic construct
  REGION 1..5: note = Description of Artificial Sequence: Synthetic peptide
SYAMS

SEQ ID NO: 7301 - DNA, 15 bp, synthetic construct
  misc_feature 1..15: note = Description of Artificial Sequence: Synthetic oligonucleotide
  source 1..15: mol_type = other DNA
agctatggcatgcac

SEQ ID NO: 7302 - protein, 5 aa, synthetic construct
  REGION 1..5: note = Description of Artificial Sequence: Synthetic peptide
SYGMH

SEQ ID NO: 7303 - DNA, 15 bp, synthetic construct
  misc_feature 1..15: note = Description of Artificial Sequence: Synthetic oligonucleotide
  source 1..15: mol_type = other DNA
acctatggcatgcac

SEQ ID NO: 7304 - protein, 5 aa, synthetic construct
  REGION 1..5: note = Description of Artificial Sequence: Synthetic peptide
TYGMH

SEQ ID NO: 7305 - DNA, 15 bp, synthetic construct
  misc_feature 1..15: note = Description of Artificial Sequence: Synthetic oligonucleotide
  source 1..15: mol_type = other DNA
agctatcccatgagc

SEQ ID NO: 7306 - protein, 5 aa, synthetic construct
  REGION 1..5: note = Description of Artificial Sequence: Synthetic peptide
SYPMS

SEQ ID NO: 7307 - DNA, 15 bp, synthetic construct
  misc_feature 1..15: note = Description of Artificial Sequence: Synthetic oligonucleotide
  source 1..15: mol_type = other DNA
agctataacatgaac

SEQ ID NO: 7308 - protein, 5 aa, synthetic construct
  REGION 1..5: note = Description of Artificial Sequence: Synthetic peptide
SYNMN

SEQ ID NO: 7309 - DNA, 15 bp, synthetic construct
  misc_feature 1..15: note = Description of Artificial Sequence: Synthetic oligonucleotide
  source 1..15: mol_type = other DNA
ggctattggatgaac

SEQ ID NO: 7310 - protein, 5 aa, synthetic construct
  REGION 1..5: note = Description of Artificial Sequence: Synthetic peptide
GYWMN

SEQ ID NO: 7311 - DNA, 15 bp, synthetic construct
  misc_feature 1..15: note = Description of Artificial Sequence: Synthetic oligonucleotide
  source 1..15: mol_type = other DNA
agctatgccatgagc

SEQ ID NO: 7312 - protein, 5 aa, synthetic construct
  REGION 1..5: note = Description of Artificial Sequence: Synthetic peptide
SYAMS

SEQ ID NO: 7313 - DNA, 15 bp, synthetic construct
  misc_feature 1..15: note = Description of Artificial Sequence: Synthetic oligonucleotide
  source 1..15: mol_type = other DNA
agttatagcatgaac

SEQ ID NO: 7314 - protein, 5 aa, synthetic construct
  REGION 1..5: note = Description of Artificial Sequence: Synthetic peptide
SYSMN

SEQ ID NO: 7315 - DNA, 15 bp, synthetic construct
  misc_feature 1..15: note = Description of Artificial Sequence: Synthetic oligonucleotide
  source 1..15: mol_type = other DNA
agccacgccatgagc

SEQ ID NO: 7316 - protein, 5 aa, synthetic construct
  REGION 1..5: note = Description of Artificial Sequence: Synthetic peptide
SHAMS

SEQ ID NO: 7317 - DNA, 15 bp, synthetic construct
  misc_feature 1..15: note = Description of Artificial Sequence: Synthetic oligonucleotide
  source 1..15: mol_type = other DNA
agctatggcatgcac

SEQ ID NO: 7318 - protein, 5 aa, synthetic construct
  REGION 1..5: note = Description of Artificial Sequence: Synthetic peptide
SYGMH

SEQ ID NO: 7319 - DNA, 15 bp, synthetic construct
  misc_feature 1..15: note = Description of Artificial Sequence: Synthetic oligonucleotide
  source 1..15: mol_type = other DNA
acctatggcatgcac

SEQ ID NO: 7320 - protein, 5 aa, synthetic construct
  REGION 1..5: note = Description of Artificial Sequence: Synthetic peptide
TYGMH

SEQ ID NO: 7321 - DNA, 15 bp, synthetic construct
  misc_feature 1..15: note = Description of Artificial Sequence: Synthetic oligonucleotide
  source 1..15: mol_type = other DNA
agctatgccatgagc

SEQ ID NO: 7322 - protein, 5 aa, synthetic construct
  REGION 1..5: note = Description of Artificial Sequence: Synthetic peptide
SYAMS

SEQ ID NO: 7323 - DNA, 15 bp, synthetic construct
  misc_feature 1..15: note = Description of Artificial Sequence: Synthetic oligonucleotide
  source 1..15: mol_type = other DNA
agctataacatgaac

SEQ ID NO: 7324 - protein, 5 aa, synthetic construct
  REGION 1..5: note = Description of Artificial Sequence: Synthetic peptide
SYNMN

SEQ ID NO: 7325 - DNA, 15 bp, synthetic construct
  misc_feature 1..15: note = Description of Artificial Sequence: Synthetic oligonucleotide
  source 1..15: mol_type = other DNA
acctatgccatgagc

SEQ ID NO: 7326 - protein, 5 aa, synthetic construct
  REGION 1..5: note = Description of Artificial Sequence: Synthetic peptide
TYAMS

SEQ ID NO: 7327 - DNA, 15 bp, synthetic construct
  misc_feature 1..15: note = Description of Artificial Sequence: Synthetic oligonucleotide
  source 1..15: mol_type = other DNA
acctatggcatgcac

SEQ ID NO: 7328 - protein, 5 aa, synthetic construct
  REGION 1..5: note = Description of Artificial Sequence: Synthetic peptide
TYGMH

SEQ ID NO: 7329 - DNA, 15 bp, synthetic construct
  misc_feature 1..15: note = Description of Artificial Sequence: Synthetic oligonucleotide
  source 1..15: mol_type = other DNA
agctatgccatgagc

SEQ ID NO: 7330 - protein, 5 aa, synthetic construct
  REGION 1..5: note = Description of Artificial Sequence: Synthetic peptide
SYAMS

SEQ ID NO: 7331 - DNA, 15 bp, synthetic construct
  misc_feature 1..15: note = Description of Artificial Sequence: Synthetic oligonucleotide
  source 1..15: mol_type = other DNA
gactatggcatgcac

SEQ ID NO: 7332 - protein, 5 aa, synthetic construct
  REGION 1..5: note = Description of Artificial Sequence: Synthetic peptide
DYGMH

SEQ ID NO: 7333 - DNA, 15 bp, synthetic construct
  misc_feature 1..15: note = Description of Artificial Sequence: Synthetic oligonucleotide
  source 1..15: mol_type = other DNA
agctatgccatgagc

SEQ ID NO: 7334 - protein, 5 aa, synthetic construct
  REGION 1..5: note = Description of Artificial Sequence: Synthetic peptide
SYAMS

SEQ ID NO: 7335 - DNA, 15 bp, synthetic construct
  misc_feature 1..15: note = Description of Artificial Sequence: Synthetic oligonucleotide
  source 1..15: mol_type = other DNA
agctatgccatgagc

SEQ ID NO: 7336 - protein, 5 aa, synthetic construct
  REGION 1..5: note = Description of Artificial Sequence: Synthetic peptide
SYAMS

SEQ ID NO: 7337 - DNA, 15 bp, synthetic construct
  misc_feature 1..15: note = Description of Artificial Sequence: Synthetic oligonucleotide
  source 1..15: mol_type = other DNA
gactatggcatgcac

SEQ ID NO: 7338 - protein, 5 aa, synthetic construct
  REGION 1..5: note = Description of Artificial Sequence: Synthetic peptide
DYGMH

SEQ ID NO: 7339 - DNA, 15 bp, synthetic construct
  misc_feature 1..15: note = Description of Artificial Sequence: Synthetic oligonucleotide
  source 1..15: mol_type = other DNA
agctatgccatgagc

SEQ ID NO: 7340 - protein, 5 aa, synthetic construct
  REGION 1..5: note = Description of Artificial Sequence: Synthetic peptide
SYAMS

SEQ ID NO: 7341 - DNA, 15 bp, synthetic construct
  misc_feature 1..15: note = Description of Artificial Sequence: Synthetic oligonucleotide
  source 1..15: mol_type = other DNA
agctatgccatgagc

SEQ ID NO: 7342 - protein, 5 aa, synthetic construct
  REGION 1..5: note = Description of Artificial Sequence: Synthetic peptide
SYAMS

SEQ ID NO: 7343 - DNA, 15 bp, synthetic construct
  misc_feature 1..15: note = Description of Artificial Sequence: Synthetic oligonucleotide
  source 1..15: mol_type = other DNA
gactatggcatgcac

SEQ ID NO: 7344 - protein, 5 aa, synthetic construct
  REGION 1..5: note = Description of Artificial Sequence: Synthetic peptide
DYGMH

SEQ ID NO: 7345 - DNA, 15 bp, synthetic construct
  misc_feature 1..15: note = Description of Artificial Sequence: Synthetic oligonucleotide
  source 1..15: mol_type = other DNA
gactatggcatgcac

SEQ ID NO: 7346 - protein, 5 aa, synthetic construct
  REGION 1..5: note = Description of Artificial Sequence: Synthetic peptide
DYGMH

SEQ ID NO: 7347 - DNA, 15 bp, synthetic construct
  misc_feature 1..15: note = Description of Artificial Sequence: Synthetic oligonucleotide
  source 1..15: mol_type = other DNA
aactatggcatgcac

SEQ ID NO: 7348 - protein, 5 aa, synthetic construct
  REGION 1..5: note = Description of Artificial Sequence: Synthetic peptide
NYGMH

SEQ ID NO: 7349 - DNA, 15 bp, synthetic construct
  misc_feature 1..15: note = Description of Artificial Sequence: Synthetic oligonucleotide
  source 1..15: mol_type = other DNA
acctatggcatgcac

SEQ ID NO: 7350 - protein, 5 aa, synthetic construct
  REGION 1..5: note = Description of Artificial Sequence: Synthetic peptide
TYGMH

SEQ ID NO: 7351 - DNA, 15 bp, synthetic construct
  misc_feature 1..15: note = Description of Artificial Sequence: Synthetic oligonucleotide
  source 1..15: mol_type = other DNA
acctatggcatgcac

SEQ ID NO: 7352 - protein, 5 aa, synthetic construct
  REGION 1..5: note = Description of Artificial Sequence: Synthetic peptide
TYGMH

SEQ ID NO: 7353 - DNA, 15 bp, synthetic construct
  misc_feature 1..15: note = Description of Artificial Sequence: Synthetic oligonucleotide
  source 1..15: mol_type = other DNA
agctatgccatgagc

SEQ ID NO: 7354 - protein, 5 aa, synthetic construct
  REGION 1..5: note = Description of Artificial Sequence: Synthetic peptide
SYAMS

SEQ ID NO: 7355 - DNA, 15 bp, synthetic construct
  misc_feature 1..15: note = Description of Artificial Sequence: Synthetic oligonucleotide
  source 1..15: mol_type = other DNA
agctatggcatgcac

SEQ ID NO: 7356 - protein, 5 aa, synthetic construct
  REGION 1..5: note = Description of Artificial Sequence: Synthetic peptide
SYGMH

SEQ ID NO: 7357 - DNA, 15 bp, synthetic construct
  misc_feature 1..15: note = Description of Artificial Sequence: Synthetic oligonucleotide
  source 1..15: mol_type = other DNA
agctatgccatgagc

SEQ ID NO: 7358 - protein, 5 aa, synthetic construct
  REGION 1..5: note = Description of Artificial Sequence: Synthetic peptide
SYAMS

SEQ ID NO: 7359 - DNA, 15 bp, synthetic construct
  misc_feature 1..15: note = Description of Artificial Sequence: Synthetic oligonucleotide
  source 1..15: mol_type = other DNA
acctatggcatgcac

SEQ ID NO: 7360 - protein, 5 aa, synthetic construct
  REGION 1..5: note = Description of Artificial Sequence: Synthetic peptide
TYGMH

SEQ ID NO: 7361 - DNA, 21 bp, synthetic construct
  misc_feature 1..21: note = Description of Artificial Sequence: Synthetic oligonucleotide
  source 1..21: mol_type = other DNA
agtggttattactactggagc

SEQ ID NO: 7362 - protein, 7 aa, synthetic construct
  REGION 1..7: note = Description of Artificial Sequence: Synthetic peptide
SGYYYWS

SEQ ID NO: 7363 - DNA, 15 bp, synthetic construct
  misc_feature 1..15: note = Description of Artificial Sequence: Synthetic oligonucleotide
  source 1..15: mol_type = other DNA
agctactggatcggc

SEQ ID NO: 7364 - protein, 5 aa, synthetic construct
  REGION 1..5: note = Description of Artificial Sequence: Synthetic peptide
SYWIG

SEQ ID NO: 7365 - DNA, 15 bp, synthetic construct
  misc_feature 1..15: note = Description of Artificial Sequence: Synthetic oligonucleotide
  source 1..15: mol_type = other DNA
agctatggcatgcac

SEQ ID NO: 7366 - protein, 5 aa, synthetic construct
  REGION 1..5: note = Description of Artificial Sequence: Synthetic peptide
SYGMH

SEQ ID NO: 7367 - DNA, 15 bp, synthetic construct
  misc_feature 1..15: note = Description of Artificial Sequence: Synthetic oligonucleotide
  source 1..15: mol_type = other DNA
ggctatggcatgcac

SEQ ID NO: 7368 - protein, 5 aa, synthetic construct
  REGION 1..5: note = Description of Artificial Sequence: Synthetic peptide
GYGMH

SEQ ID NO: 7369 - DNA, 15 bp, synthetic construct
  misc_feature 1..15: note = Description of Artificial Sequence: Synthetic oligonucleotide
  source 1..15: mol_type = other DNA
agctatgccatgagc

SEQ ID NO: 7370 - protein, 5 aa, synthetic construct
  REGION 1..5: note = Description of Artificial Sequence: Synthetic peptide
SYAMS

SEQ ID NO: 7371 - DNA, 15 bp, synthetic construct
  misc_feature 1..15: note = Description of Artificial Sequence: Synthetic oligonucleotide
  source 1..15: mol_type = other DNA
agctatggcatgcac

SEQ ID NO: 7372 - protein, 5 aa, synthetic construct
  REGION 1..5: note = Description of Artificial Sequence: Synthetic peptide
SYGMH

SEQ ID NO: 7373 - DNA, 15 bp, synthetic construct
  misc_feature 1..15: note = Description of Artificial Sequence: Synthetic oligonucleotide
  source 1..15: mol_type = other DNA
aactataacatgaac

SEQ ID NO: 7374 - protein, 5 aa, synthetic construct
  REGION 1..5: note = Description of Artificial Sequence: Synthetic peptide
NYNMN

SEQ ID NO: 7375 - DNA, 15 bp, synthetic construct
  misc_feature 1..15: note = Description of Artificial Sequence: Synthetic oligonucleotide
  source 1..15: mol_type = other DNA
agctatggcatgcac

SEQ ID NO: 7376 - protein, 5 aa, synthetic construct
  REGION 1..5: note = Description of Artificial Sequence: Synthetic peptide
SYGMH

SEQ ID NO: 7377 - DNA, 15 bp, synthetic construct
  misc_feature 1..15: note = Description of Artificial Sequence: Synthetic oligonucleotide
  source 1..15: mol_type = other DNA
agctatggcatgcac

SEQ ID NO: 7378 - protein, 5 aa, synthetic construct
  REGION 1..5: note = Description of Artificial Sequence: Synthetic peptide
SYGMH

SEQ ID NO: 7379 - DNA, 15 bp, synthetic construct
  misc_feature 1..15: note = Description of Artificial Sequence: Synthetic oligonucleotide
  source 1..15: mol_type = other DNA
acctatggcatgcac

SEQ ID NO: 7380 - protein, 5 aa, synthetic construct
  REGION 1..5: note = Description of Artificial Sequence: Synthetic peptide
TYGMH

SEQ ID NO: 7381 - DNA, 15 bp, synthetic construct
  misc_feature 1..15: note = Description of Artificial Sequence: Synthetic oligonucleotide
  source 1..15: mol_type = other DNA
agctatggcatgcac

SEQ ID NO: 7382 - protein, 5 aa, synthetic construct
  REGION 1..5: note = Description of Artificial Sequence: Synthetic peptide
SYGMH

SEQ ID NO: 7383 - DNA, 15 bp, synthetic construct
  misc_feature 1..15: note = Description of Artificial Sequence: Synthetic oligonucleotide
  source 1..15: mol_type = other DNA
agctatggcatgcac

SEQ ID NO: 7384 - protein, 5 aa, synthetic construct
  REGION 1..5: note = Description of Artificial Sequence: Synthetic peptide
SYGMH

SEQ ID NO: 7385 - DNA, 15 bp, synthetic construct
  misc_feature 1..15: note = Description of Artificial Sequence: Synthetic oligonucleotide
  source 1..15: mol_type = other DNA
agctatggcatgcac

SEQ ID NO: 7386 - protein, 5 aa, synthetic construct
  REGION 1..5: note = Description of Artificial Sequence: Synthetic peptide
SYGMH

SEQ ID NO: 7387 - DNA, 21 bp, synthetic construct
  misc_feature 1..21: note = Description of Artificial Sequence: Synthetic oligonucleotide
  source 1..21: mol_type = other DNA
agtggtggttactactggagc

SEQ ID NO: 7388 - protein, 7 aa, synthetic construct
  REGION 1..7: note = Description of Artificial Sequence: Synthetic peptide
SGGYYWS

SEQ ID NO: 7389 - DNA, 21 bp, synthetic construct
  misc_feature 1..21: note = Description of Artificial Sequence: Synthetic oligonucleotide
  source 1..21: mol_type = other DNA
agtggtggttactactggagc

SEQ ID NO: 7390 - protein, 7 aa, synthetic construct
  REGION 1..7: note = Description of Artificial Sequence: Synthetic peptide
SGGYYWS

SEQ ID NO: 7391 - DNA, 15 bp, synthetic construct
  misc_feature 1..15: note = Description of Artificial Sequence: Synthetic oligonucleotide
  source 1..15: mol_type = other DNA
ggctatggcatgcac

SEQ ID NO: 7392 - protein, 5 aa, synthetic construct
  REGION 1..5: note = Description of Artificial Sequence: Synthetic peptide
GYGMH

SEQ ID NO: 7393 - DNA, 15 bp, synthetic construct
  misc_feature 1..15: note = Description of Artificial Sequence: Synthetic oligonucleotide
  source 1..15: mol_type = other DNA
agcaatggcatgcac

SEQ ID NO: 7394 - protein, 5 aa, synthetic construct
  REGION 1..5: note = Description of Artificial Sequence: Synthetic peptide
SNGMH

SEQ ID NO: 7395 - DNA, 15 bp, synthetic construct
  misc_feature 1..15: note = Description of Artificial Sequence: Synthetic oligonucleotide
  source 1..15: mol_type = other DNA
agcaatggcatgcac

SEQ ID NO: 7396 - protein, 5 aa, synthetic construct
  REGION 1..5: note = Description of Artificial Sequence: Synthetic peptide
SNGMH

SEQ ID NO: 7397 - DNA, 15 bp, synthetic construct
  misc_feature 1..15: note = Description of Artificial Sequence: Synthetic oligonucleotide
  source 1..15: mol_type = other DNA
agctatagcttgaac

SEQ ID NO: 7398 - protein, 5 aa, synthetic construct
  REGION 1..5: note = Description of Artificial Sequence: Synthetic peptide
SYSLN

SEQ ID NO: 7399 - DNA, 15 bp, synthetic construct
  misc_feature 1..15: note = Description of Artificial Sequence: Synthetic oligonucleotide
  source 1..15: mol_type = other DNA
agctatggcatgcac

SEQ ID NO: 7400 - protein, 5 aa, synthetic construct
  REGION 1..5: note = Description of Artificial Sequence: Synthetic peptide
SYGMH

SEQ ID NO: 7401 - DNA, 15 bp, synthetic construct
  misc_feature 1..15: note = Description of Artificial Sequence: Synthetic oligonucleotide
  source 1..15: mol_type = other DNA
agctatggcatgcac

SEQ ID NO: 7402 - protein, 5 aa, synthetic construct
  REGION 1..5: note = Description of Artificial Sequence: Synthetic peptide
SYGMH

SEQ ID NO: 7403 - DNA, 15 bp, synthetic construct
  misc_feature 1..15: note = Description of Artificial Sequence: Synthetic oligonucleotide
  source 1..15: mol_type = other DNA
ggctatggcatgaac

SEQ ID NO: 7404 - protein, 5 aa, synthetic construct
  REGION 1..5: note = Description of Artificial Sequence: Synthetic peptide
GYGMN

SEQ ID NO: 7405 - DNA, 15 bp, synthetic construct
  misc_feature 1..15: note = Description of Artificial Sequence: Synthetic oligonucleotide
  source 1..15: mol_type = other DNA
aactgtggcatgcac

SEQ ID NO: 7406 - protein, 5 aa, synthetic construct
  REGION 1..5: note = Description of Artificial Sequence: Synthetic peptide
NCGMH

SEQ ID NO: 7407 - DNA, 15 bp, synthetic construct
  misc_feature 1..15: note = Description of Artificial Sequence: Synthetic oligonucleotide
  source 1..15: mol_type = other DNA
agctatagcttgaac

SEQ ID NO: 7408 - protein, 5 aa, synthetic construct
  REGION 1..5: note = Description of Artificial Sequence: Synthetic peptide
SYSLN

SEQ ID NO: 7409 - DNA, 15 bp, synthetic construct
  misc_feature 1..15: note = Description of Artificial Sequence: Synthetic oligonucleotide
  source 1..15: mol_type = other DNA
agttactatatgtat

SEQ ID NO: 7410 - protein, 5 aa, synthetic construct
  REGION 1..5: note = Description of Artificial Sequence: Synthetic peptide
SYYMY

SEQ ID NO: 7411 - DNA, 15 bp, synthetic construct
  misc_feature 1..15: note = Description of Artificial Sequence: Synthetic oligonucleotide
  source 1..15: mol_type = other DNA
agttatggcatgcac

SEQ ID NO: 7412 - protein, 5 aa, synthetic construct
  REGION 1..5: note = Description of Artificial Sequence: Synthetic peptide
SYGMH

SEQ ID NO: 7413 - DNA, 15 bp, synthetic construct
  misc_feature 1..15: note = Description of Artificial Sequence: Synthetic oligonucleotide
  source 1..15: mol_type = other DNA
agttactatatgtat

SEQ ID NO: 7414 - protein, 5 aa, synthetic construct
  REGION 1..5: note = Description of Artificial Sequence: Synthetic peptide
SYYMY

SEQ ID NO: 7415 - DNA, 15 bp, synthetic construct
  misc_feature 1..15: note = Description of Artificial Sequence: Synthetic oligonucleotide
  source 1..15: mol_type = other DNA
agttactatatgtat

SEQ ID NO: 7416 - protein, 5 aa, synthetic construct
  REGION 1..5: note = Description of Artificial Sequence: Synthetic peptide
SYYMY

SEQ ID NO: 7417 - DNA, 15 bp, synthetic construct
  misc_feature 1..15: note = Description of Artificial Sequence: Synthetic oligonucleotide
  source 1..15: mol_type = other DNA
agctatggcatgcac

SEQ ID NO: 7418 - protein, 5 aa, synthetic construct
  REGION 1..5: note = Description of Artificial Sequence: Synthetic peptide
SYGMH

SEQ ID NO: 7419 - DNA, 21 bp, synthetic construct
  misc_feature 1..21: note = Description of Artificial Sequence: Synthetic oligonucleotide
  source 1..21: mol_type = other DNA
agcaacagtgctgcttggaac

SEQ ID NO: 7420 - protein, 7 aa, synthetic construct
  REGION 1..7: note = Description of Artificial Sequence: Synthetic peptide
SNSAAWN

SEQ ID NO: 7421 - DNA, 15 bp, synthetic construct
  misc_feature 1..15: note = Description of Artificial Sequence: Synthetic oligonucleotide
  source 1..15: mol_type = other DNA
aactgtggcatgcac

SEQ ID NO: 7422 - protein, 5 aa, synthetic construct
  REGION 1..5: note = Description of Artificial Sequence: Synthetic peptide
NCGMH

SEQ ID NO: 7423 - DNA, 21 bp, synthetic construct
  misc_feature 1..21: note = Description of Artificial Sequence: Synthetic oligonucleotide
  source 1..21: mol_type = other DNA
agcaacagtgctgcttggaac

SEQ ID NO: 7424 - protein, 7 aa, synthetic construct
  REGION 1..7: note = Description of Artificial Sequence: Synthetic peptide
SNSAAWN

SEQ ID NO: 7425 - DNA, 15 bp, synthetic construct
  misc_feature 1..15: note = Description of Artificial Sequence: Synthetic oligonucleotide
  source 1..15: mol_type = other DNA
agctatggcatgcac

SEQ ID NO: 7426 - protein, 5 aa, synthetic construct
  REGION 1..5: note = Description of Artificial Sequence: Synthetic peptide
SYGMH

SEQ ID NO: 7427 - DNA, 15 bp, synthetic construct
  misc_feature 1..15: note = Description of Artificial Sequence: Synthetic oligonucleotide
  source 1..15: mol_type = other DNA
aactctggcatgcac

SEQ ID NO: 7428 - protein, 5 aa, synthetic construct
  REGION 1..5: note = Description of Artificial Sequence: Synthetic peptide
NSGMH

SEQ ID NO: 7429 - DNA, 15 bp, synthetic construct
  misc_feature 1..15: note = Description of Artificial Sequence: Synthetic oligonucleotide
  source 1..15: mol_type = other DNA
agctatagcatgaac

SEQ ID NO: 7430 - protein, 5 aa, synthetic construct
  REGION 1..5: note = Description of Artificial Sequence: Synthetic peptide
SYSMN

SEQ ID NO: 7431 - DNA, 15 bp, synthetic construct
  misc_feature 1..15: note = Description of Artificial Sequence: Synthetic oligonucleotide
  source 1..15: mol_type = other DNA
aactttggcatgcac

SEQ ID NO: 7432 - protein, 5 aa, synthetic construct
  REGION 1..5: note = Description of Artificial Sequence: Synthetic peptide
NFGMH

SEQ ID NO: 7433 - DNA, 21 bp, synthetic construct
  misc_feature 1..21: note = Description of Artificial Sequence: Synthetic oligonucleotide
  source 1..21: mol_type = other DNA
actagtggagtgggtgtgggc

SEQ ID NO: 7434 - protein, 7 aa, synthetic construct
  REGION 1..7: note = Description of Artificial Sequence: Synthetic peptide
TSGVGVG

SEQ ID NO: 7435 - DNA, 15 bp, synthetic construct
  misc_feature 1..15: note = Description of Artificial Sequence: Synthetic oligonucleotide
  source 1..15: mol_type = other DNA
agttatgatatcaac

SEQ ID NO: 7436 - protein, 5 aa, synthetic construct
  REGION 1..5: note = Description of Artificial Sequence: Synthetic peptide
SYDIN

SEQ ID NO: 7437 - DNA, 15 bp, synthetic construct
  misc_feature 1..15: note = Description of Artificial Sequence: Synthetic oligonucleotide
  source 1..15: mol_type = other DNA
aactatggcatgcac

SEQ ID NO: 7438 - protein, 5 aa, synthetic construct
  REGION 1..5: note = Description of Artificial Sequence: Synthetic peptide
NYGMH

SEQ ID NO: 7439 - DNA, 15 bp, synthetic construct
  misc_feature 1..15: note = Description of Artificial Sequence: Synthetic oligonucleotide
  source 1..15: mol_type = other DNA
agctatggtatcagc

SEQ ID NO: 7440 - protein, 5 aa, synthetic construct
  REGION 1..5: note = Description of Artificial Sequence: Synthetic peptide
SYGIS

SEQ ID NO: 7441 - DNA, 21 bp, synthetic construct
  misc_feature 1..21: note = Description of Artificial Sequence: Synthetic oligonucleotide
  source 1..21: mol_type = other DNA
agtaacagtgctgcttggaac

SEQ ID NO: 7442 - protein, 7 aa, synthetic construct
  REGION 1..7: note = Description of Artificial Sequence: Synthetic peptide
SNSAAWN

SEQ ID NO: 7443 - DNA, 15 bp, synthetic construct
  misc_feature 1..15: note = Description of Artificial Sequence: Synthetic oligonucleotide
  source 1..15: mol_type = other DNA
agctatggtgtcagc

SEQ ID NO: 7444 - protein, 5 aa, synthetic construct
  REGION 1..5: note = Description of Artificial Sequence: Synthetic peptide
SYGVS

SEQ ID NO: 7445 - DNA, 15 bp, synthetic construct
  misc_feature 1..15: note = Description of Artificial Sequence: Synthetic oligonucleotide
  source 1..15: mol_type = other DNA
ggctatggcatgcac

SEQ ID NO: 7446 - protein, 5 aa, synthetic construct
  REGION 1..5: note = Description of Artificial Sequence: Synthetic peptide
GYGMH

SEQ ID NO: 7447 - DNA, 15 bp, synthetic construct
  misc_feature 1..15: note = Description of Artificial Sequence: Synthetic oligonucleotide
  source 1..15: mol_type = other DNA
cactttggcatgcac

SEQ ID NO: 7448 - protein, 5 aa, synthetic construct
  REGION 1..5: note = Description of Artificial Sequence: Synthetic peptide
HFGMH

SEQ ID NO: 7449 - DNA, 15 bp, synthetic construct
  misc_feature 1..15: note = Description of Artificial Sequence: Synthetic oligonucleotide
  source 1..15: mol_type = other DNA
ggctactatatgcac

SEQ ID NO: 7450 - protein, 5 aa, synthetic construct
  REGION 1..5: note = Description of Artificial Sequence: Synthetic peptide
GYYMH

SEQ ID NO: 7451 - DNA, 15 bp, synthetic construct
  misc_feature 1..15: note = Description of Artificial Sequence: Synthetic oligonucleotide
  source 1..15: mol_type = other DNA
agctatggtatcagc

SEQ ID NO: 7452 - protein, 5 aa, synthetic construct
  REGION 1..5: note = Description of Artificial Sequence: Synthetic peptide
SYGIS

SEQ ID NO: 7453 - DNA, 15 bp, synthetic construct
  misc_feature 1..15: note = Description of Artificial Sequence: Synthetic oligonucleotide
  source 1..15: mol_type = other DNA
agctatggtatcagc

SEQ ID NO: 7454 - protein, 5 aa, synthetic construct
  REGION 1..5: note = Description of Artificial Sequence: Synthetic peptide
SYGIS

SEQ ID NO: 7455 - DNA, 15 bp, synthetic construct
  misc_feature 1..15: note = Description of Artificial Sequence: Synthetic oligonucleotide
  source 1..15: mol_type = other DNA
agctatggtttcagc

SEQ ID NO: 7456 - protein, 5 aa, synthetic construct
  REGION 1..5: note = Description of Artificial Sequence: Synthetic peptide
SYGFS

SEQ ID NO: 7457 - DNA, 21 bp, synthetic construct
  misc_feature 1..21: note = Description of Artificial Sequence: Synthetic oligonucleotide
  source 1..21: mol_type = other DNA
actagtggagtgggtgtgggc

SEQ ID NO: 7458 - protein, 7 aa, synthetic construct
  REGION 1..7: note = Description of Artificial Sequence: Synthetic peptide
TSGVGVG

SEQ ID NO: 7459 - DNA, 21 bp, synthetic construct
  misc_feature 1..21: note = Description of Artificial Sequence: Synthetic oligonucleotide
  source 1..21: mol_type = other DNA
actagtggagtgggtgtgggc

SEQ ID NO: 7460 - protein, 7 aa, synthetic construct
  REGION 1..7: note = Description of Artificial Sequence: Synthetic peptide
TSGVGVG

SEQ ID NO: 7461 - DNA, 21 bp, synthetic construct
  misc_feature 1..21: note = Description of Artificial Sequence: Synthetic oligonucleotide
  source 1..21: mol_type = other DNA
actagtggagtgggtgtgggc

SEQ ID NO: 7462 - protein, 7 aa, synthetic construct
  REGION 1..7: note = Description of Artificial Sequence: Synthetic peptide
TSGVGVG

SEQ ID NO: 7463 - DNA, 21 bp, synthetic construct
  misc_feature 1..21: note = Description of Artificial Sequence: Synthetic oligonucleotide
  source 1..21: mol_type = other DNA
actagtggagtgggtgtgggc

SEQ ID NO: 7464 - protein, 7 aa, synthetic construct
  REGION 1..7: note = Description of Artificial Sequence: Synthetic peptide
TSGVGVG

SEQ ID NO: 7465 - DNA, 15 bp, synthetic construct
  misc_feature 1..15: note = Description of Artificial Sequence: Synthetic oligonucleotide
  source 1..15: mol_type = other DNA
agctatagcatgaac

SEQ ID NO: 7466 - protein, 5 aa, synthetic construct
  REGION 1..5: note = Description of Artificial Sequence: Synthetic peptide
SYSMN

SEQ ID NO: 7467 - DNA, 15 bp, synthetic construct
  misc_feature 1..15: note = Description of Artificial Sequence: Synthetic oligonucleotide
  source 1..15: mol_type = other DNA
ttctatggcatgcac

SEQ ID NO: 7468 - protein, 5 aa, synthetic construct
  REGION 1..5: note = Description of Artificial Sequence: Synthetic peptide
FYGMH

SEQ ID NO: 7469 - DNA, 15 bp, synthetic construct
  misc_feature 1..15: note = Description of Artificial Sequence: Synthetic oligonucleotide
  source 1..15: mol_type = other DNA
agcttttggatgagc

SEQ ID NO: 7470 - protein, 5 aa, synthetic construct
  REGION 1..5: note = Description of Artificial Sequence: Synthetic peptide
SFWMS

SEQ ID NO: 7471 - DNA, 15 bp, synthetic construct
  misc_feature 1..15: note = Description of Artificial Sequence: Synthetic oligonucleotide
  source 1..15: mol_type = other DNA
agctatggcatgcac

SEQ ID NO: 7472 - protein, 5 aa, synthetic construct
  REGION 1..5: note = Description of Artificial Sequence: Synthetic peptide
SYGMH

SEQ ID NO: 7473 - DNA, 15 bp, synthetic construct
  misc_feature 1..15: note = Description of Artificial Sequence: Synthetic oligonucleotide
  source 1..15: mol_type = other DNA
agctatagcatgaac

SEQ ID NO: 7474 - protein, 5 aa, synthetic construct
  REGION 1..5: note = Description of Artificial Sequence: Synthetic peptide
SYSMN

SEQ ID NO: 7475 - DNA, 15 bp, synthetic construct
  misc_feature 1..15: note = Description of Artificial Sequence: Synthetic oligonucleotide
  source 1..15: mol_type = other DNA
agctatagcatgaac

SEQ ID NO: 7476 - protein, 5 aa, synthetic construct
  REGION 1..5: note = Description of Artificial Sequence: Synthetic peptide
SYSMN

SEQ ID NO: 7477 - DNA, 15 bp, synthetic construct
  misc_feature 1..15: note = Description of Artificial Sequence: Synthetic oligonucleotide
  source 1..15: mol_type = other DNA
agttatggcgtgcac

SEQ ID NO: 7478 - protein, 5 aa, synthetic construct
  REGION 1..5: note = Description of Artificial Sequence: Synthetic peptide
SYGVH

SEQ ID NO: 7479 - DNA, 21 bp, synthetic construct
  misc_feature 1..21: note = Description of Artificial Sequence: Synthetic oligonucleotide
  source 1..21: mol_type = other DNA
actagtggagtgggtgtgggc

SEQ ID NO: 7480 - protein, 7 aa, synthetic construct
  REGION 1..7: note = Description of Artificial Sequence: Synthetic peptide
TSGVGVG

SEQ ID NO: 7481 - DNA, 15 bp, synthetic construct
  misc_feature 1..15: note = Description of Artificial Sequence: Synthetic oligonucleotide
  source 1..15: mol_type = other DNA
agctatagcatgaac

SEQ ID NO: 7482 - protein, 5 aa, synthetic construct
  REGION 1..5: note = Description of Artificial Sequence: Synthetic peptide
SYSMN

SEQ ID NO: 7483 - DNA, 21 bp, synthetic construct
  misc_feature 1..21: note = Description of Artificial Sequence: Synthetic oligonucleotide
  source 1..21: mol_type = other DNA
actagtggagtgggtgtgggc

SEQ ID NO: 7484 - protein, 7 aa, synthetic construct
  REGION 1..7: note = Description of Artificial Sequence: Synthetic peptide
TSGVGVG

SEQ ID NO: 7485 - DNA, 21 bp, synthetic construct
  misc_feature 1..21: note = Description of Artificial Sequence: Synthetic oligonucleotide
  source 1..21: mol_type = other DNA
actagtgggttgggtgtgggc

SEQ ID NO: 7486 - protein, 7 aa, synthetic construct
  REGION 1..7: note = Description of Artificial Sequence: Synthetic peptide
TSGLGVG

SEQ ID NO: 7487 - DNA, 21 bp, synthetic construct
  misc_feature 1..21: note = Description of Artificial Sequence: Synthetic oligonucleotide
  source 1..21: mol_type = other DNA
actagtggagtgggtgtgggc

SEQ ID NO: 7488 - protein, 7 aa, synthetic construct
  REGION 1..7: note = Description of Artificial Sequence: Synthetic peptide
TSGVGVG

SEQ ID NO: 7489 - DNA, 21 bp, synthetic construct
  misc_feature 1..21: note = Description of Artificial Sequence: Synthetic oligonucleotide
  source 1..21: mol_type = other DNA
actagtggagtgggtgtgggc

SEQ ID NO: 7490 - protein, 7 aa, synthetic construct
  REGION 1..7: note = Description of Artificial Sequence: Synthetic peptide
TSGVGVG

SEQ ID NO: 7491 - DNA, 21 bp, synthetic construct
  misc_feature 1..21: note = Description of Artificial Sequence: Synthetic oligonucleotide
  source 1..21: mol_type = other DNA
actagtggagtgggtgtgggc

SEQ ID NO: 7492 - protein, 7 aa, synthetic construct
  REGION 1..7: note = Description of Artificial Sequence: Synthetic peptide
TSGVGVG

SEQ ID NO: 7493 - DNA, 21 bp, synthetic construct
  misc_feature 1..21: note = Description of Artificial Sequence: Synthetic oligonucleotide
  source 1..21: mol_type = other DNA
actagtggagtgggtgtgggc

SEQ ID NO: 7494 - protein, 7 aa, synthetic construct
  REGION 1..7: note = Description of Artificial Sequence: Synthetic peptide
TSGVGVG

SEQ ID NO: 7495 - DNA, 21 bp, synthetic construct
  misc_feature 1..21: note = Description of Artificial Sequence: Synthetic oligonucleotide
  source 1..21: mol_type = other DNA
actagtggagtgggtgtgggc

SEQ ID NO: 7496 - protein, 7 aa, synthetic construct
  REGION 1..7: note = Description of Artificial Sequence: Synthetic peptide
TSGVGVG

SEQ ID NO: 7497 - DNA, 15 bp, synthetic construct
  misc_feature 1..15: note = Description of Artificial Sequence: Synthetic oligonucleotide
  source 1..15: mol_type = other DNA
agctatagcatgaac

SEQ ID NO: 7498 - protein, 5 aa, synthetic construct
  REGION 1..5: note = Description of Artificial Sequence: Synthetic peptide
SYSMN

SEQ ID NO: 7499 - DNA, 15 bp, synthetic construct
  misc_feature 1..15: note = Description of Artificial Sequence: Synthetic oligonucleotide
  source 1..15: mol_type = other DNA
agctatagcatgaac

SEQ ID NO: 7500 - protein, 5 aa, synthetic construct
  REGION 1..5: note = Description of Artificial Sequence: Synthetic peptide
SYSMN

SEQ ID NO: 7501 - DNA, 15 bp, synthetic construct
  misc_feature 1..15: note = Description of Artificial Sequence: Synthetic oligonucleotide
  source 1..15: mol_type = other DNA
ggctactatatgcac

SEQ ID NO: 7502 - protein, 5 aa, synthetic construct
  REGION 1..5: note = Description of Artificial Sequence: Synthetic peptide
GYYMH

SEQ ID NO: 7503 - DNA, 21 bp, synthetic construct
  misc_feature 1..21: note = Description of Artificial Sequence: Synthetic oligonucleotide
  source 1..21: mol_type = other DNA
actagtggagtgggtgtgggc

SEQ ID NO: 7504 - protein, 7 aa, synthetic construct
  REGION 1..7: note = Description of Artificial Sequence: Synthetic peptide
TSGVGVG

SEQ ID NO: 7505 - DNA, 15 bp, synthetic construct
  misc_feature 1..15: note = Description of Artificial Sequence: Synthetic oligonucleotide
  source 1..15: mol_type = other DNA
ggctactatatgcac

SEQ ID NO: 7506 - protein, 5 aa, synthetic construct
  REGION 1..5: note = Description of Artificial Sequence: Synthetic peptide
GYYMH

SEQ ID NO: 7507 - DNA, 21 bp, synthetic construct
  misc_feature 1..21: note = Description of Artificial Sequence: Synthetic oligonucleotide
  source 1..21: mol_type = other DNA
agcaacagtgctgcttggaac

SEQ ID NO: 7508 - protein, 7 aa, synthetic construct
  REGION 1..7: note = Description of Artificial Sequence: Synthetic peptide
SNSAAWN

SEQ ID NO: 7509 - DNA, 15 bp, synthetic construct
  misc_feature 1..15: note = Description of Artificial Sequence: Synthetic oligonucleotide
  source 1..15: mol_type = other DNA
ggctaccatatgcac

SEQ ID NO: 7510 - protein, 5 aa, synthetic construct
  REGION 1..5: note = Description of Artificial Sequence: Synthetic peptide
GYHMH

SEQ ID NO: 7511 - DNA, 15 bp, synthetic construct
  misc_feature 1..15: note = Description of Artificial Sequence: Synthetic oligonucleotide
  source 1..15: mol_type = other DNA
ggctactatatgcac

SEQ ID NO: 7512 - protein, 5 aa, synthetic construct
  REGION 1..5: note = Description of Artificial Sequence: Synthetic peptide
GYYMH

SEQ ID NO: 7513 - DNA, 15 bp, synthetic construct
  misc_feature 1..15: note = Description of Artificial Sequence: Synthetic oligonucleotide
  source 1..15: mol_type = other DNA
ggctactgtatgcac

SEQ ID NO: 7514 - protein, 5 aa, synthetic construct
  REGION 1..5: note = Description of Artificial Sequence: Synthetic peptide
GYCMH

SEQ ID NO: 7515 - DNA, 15 bp, synthetic construct
  misc_feature 1..15: note = Description of Artificial Sequence: Synthetic oligonucleotide
  source 1..15: mol_type = other DNA
ggctactatatgcac

SEQ ID NO: 7516 - protein, 5 aa, synthetic construct
  REGION 1..5: note = Description of Artificial Sequence: Synthetic peptide
GYYMH

SEQ ID NO: 7517 - DNA, 21 bp, synthetic construct
  misc_feature 1..21: note = Description of Artificial Sequence: Synthetic oligonucleotide
  source 1..21: mol_type = other DNA
actagtggagtgggtgtgggc

SEQ ID NO: 7518 - protein, 7 aa, synthetic construct
  REGION 1..7: note = Description of Artificial Sequence: Synthetic peptide
TSGVGVG

SEQ ID NO: 7519 - DNA, 15 bp, synthetic construct
  misc_feature 1..15: note = Description of Artificial Sequence: Synthetic oligonucleotide
  source 1..15: mol_type = other DNA
tactatggcatgcac

SEQ ID NO: 7520 - protein, 5 aa, synthetic construct
  REGION 1..5: note = Description of Artificial Sequence: Synthetic peptide
YYGMH

SEQ ID NO: 7521 - DNA, 21 bp, synthetic construct
  misc_feature 1..21: note = Description of Artificial Sequence: Synthetic oligonucleotide
  source 1..21: mol_type = other DNA
actagtggagtgggtgtgggc

SEQ ID NO: 7522 - protein, 7 aa, synthetic construct
  REGION 1..7: note = Description of Artificial Sequence: Synthetic peptide
TSGVGVG

SEQ ID NO: 7523 - DNA, 21 bp, synthetic construct
  misc_feature 1..21: note = Description of Artificial Sequence: Synthetic oligonucleotide
  source 1..21: mol_type = other DNA
actggtggagtgggtgtgggc

SEQ ID NO: 7524 - protein, 7 aa, synthetic construct
  REGION 1..7: note = Description of Artificial Sequence: Synthetic peptide
TGGVGVG

SEQ ID NO: 7525 - DNA, 15 bp, synthetic construct
  misc_feature 1..15: note = Description of Artificial Sequence: Synthetic oligonucleotide
  source 1..15: mol_type = other DNA
agctatggcatgcac

SEQ ID NO: 7526 - protein, 5 aa, synthetic construct
  REGION 1..5: note = Description of Artificial Sequence: Synthetic peptide
SYGMH

SEQ ID NO: 7527 - DNA, 21 bp, synthetic construct
  misc_feature 1..21: note = Description of Artificial Sequence: Synthetic oligonucleotide
  source 1..21: mol_type = other DNA
actagtggagtgggtgtgggc

SEQ ID NO: 7528 - protein, 7 aa, synthetic construct
  REGION 1..7: note = Description of Artificial Sequence: Synthetic peptide
TSGVGVG

SEQ ID NO: 7529 - DNA, 21 bp, synthetic construct
  misc_feature 1..21: note = Description of Artificial Sequence: Synthetic oligonucleotide
  source 1..21: mol_type = other DNA
agtggtggttactactggagc

SEQ ID NO: 7530 - protein, 7 aa, synthetic construct
  REGION 1..7: note = Description of Artificial Sequence: Synthetic peptide
SGGYYWS

SEQ ID NO: 7531 - DNA, 15 bp, synthetic construct
  misc_feature 1..15: note = Description of Artificial Sequence: Synthetic oligonucleotide
  source 1..15: mol_type = other DNA
agctatggcatgcac

SEQ ID NO: 7532 - protein, 5 aa, synthetic construct
  REGION 1..5: note = Description of Artificial Sequence: Synthetic peptide
SYGMH

SEQ ID NO: 7533 - DNA, 15 bp, synthetic construct
  misc_feature 1..15: note = Description of Artificial Sequence: Synthetic oligonucleotide
  source 1..15: mol_type = other DNA
cgatatggcatgcac

SEQ ID NO: 7534 - protein, 5 aa, synthetic construct
  REGION 1..5: note = Description of Artificial Sequence: Synthetic peptide
RYGMH

SEQ ID NO: 7535 - DNA, 21 bp, synthetic construct
  misc_feature 1..21: note = Description of Artificial Sequence: Synthetic oligonucleotide
  source 1..21: mol_type = other DNA
agtggtggttactactggagc

SEQ ID NO: 7536 - protein, 7 aa, synthetic construct
  REGION 1..7: note = Description of Artificial Sequence: Synthetic peptide
SGGYYWS

SEQ ID NO: 7537 - DNA, 15 bp, synthetic construct
  misc_feature 1..15: note = Description of Artificial Sequence: Synthetic oligonucleotide
  source 1..15: mol_type = other DNA
agctatggcatgcac

SEQ ID NO: 7538 - protein, 5 aa, synthetic construct
  REGION 1..5: note = Description of Artificial Sequence: Synthetic peptide
SYGMH

SEQ ID NO: 7539 - DNA, 15 bp, synthetic construct
  misc_feature 1..15: note = Description of Artificial Sequence: Synthetic oligonucleotide
  source 1..15: mol_type = other DNA
agctatggcatgcac

SEQ ID NO: 7540 - protein, 5 aa, synthetic construct
  REGION 1..5: note = Description of Artificial Sequence: Synthetic peptide
SYGMH

SEQ ID NO: 7541 - DNA, 21 bp, synthetic construct
  misc_feature 1..21: note = Description of Artificial Sequence: Synthetic oligonucleotide
  source 1..21: mol_type = other DNA
actggtggagtgggtgtgggc

SEQ ID NO: 7542 - protein, 7 aa, synthetic construct
  REGION 1..7: note = Description of Artificial Sequence: Synthetic peptide
TGGVGVG

SEQ ID NO: 7543 - DNA, 15 bp, synthetic construct
  misc_feature 1..15: note = Description of Artificial Sequence: Synthetic oligonucleotide
  source 1..15: mol_type = other DNA
agctatggcatgcac

SEQ ID NO: 7544 - protein, 5 aa, synthetic construct
  REGION 1..5: note = Description of Artificial Sequence: Synthetic peptide
SYGMH

SEQ ID NO: 7545 - DNA, 15 bp, synthetic construct
  misc_feature 1..15: note = Description of Artificial Sequence: Synthetic oligonucleotide
  source 1..15: mol_type = other DNA
agctatgccatgagc

SEQ ID NO: 7546 - protein, 5 aa, synthetic construct
  REGION 1..5: note = Description of Artificial Sequence: Synthetic peptide
SYAMS

SEQ ID NO: 7547 - DNA, 15 bp, synthetic construct
  misc_feature 1..15: note = Description of Artificial Sequence: Synthetic oligonucleotide
  source 1..15: mol_type = other DNA
acctatggcatgcac

SEQ ID NO: 7548 - protein, 5 aa, synthetic construct
  REGION 1..5: note = Description of Artificial Sequence: Synthetic peptide
TYGMH

SEQ ID NO: 7549 - DNA, 15 bp, synthetic construct
  misc_feature 1..15: note = Description of Artificial Sequence: Synthetic oligonucleotide
  source 1..15: mol_type = other DNA
agttatgatatcaat

SEQ ID NO: 7550 - protein, 5 aa, synthetic construct
  REGION 1..5: note = Description of Artificial Sequence: Synthetic peptide
SYDIN

SEQ ID NO: 7551 - DNA, 21 bp, synthetic construct
  misc_feature 1..21: note = Description of Artificial Sequence: Synthetic oligonucleotide
  source 1..21: mol_type = other DNA
actactggagtgggtgtgggc

SEQ ID NO: 7552 - protein, 7 aa, synthetic construct
  REGION 1..7: note = Description of Artificial Sequence: Synthetic peptide
TTGVGVG

SEQ ID NO: 7553 - DNA, 15 bp, synthetic construct
  misc_feature 1..15: note = Description of Artificial Sequence: Synthetic oligonucleotide
  source 1..15: mol_type = other DNA
agctatggcatgcac

SEQ ID NO: 7554 - protein, 5 aa, synthetic construct
  REGION 1..5: note = Description of Artificial Sequence: Synthetic peptide
SYGMH

SEQ ID NO: 7555 - DNA, 15 bp, synthetic construct
  misc_feature 1..15: note = Description of Artificial Sequence: Synthetic oligonucleotide
  source 1..15: mol_type = other DNA
agttatggcatgctc

SEQ ID NO: 7556 - protein, 5 aa, synthetic construct
  REGION 1..5: note = Description of Artificial Sequence: Synthetic peptide
SYGML

SEQ ID NO: 7557 - DNA, 15 bp, synthetic construct
  misc_feature 1..15: note = Description of Artificial Sequence: Synthetic oligonucleotide
  source 1..15: mol_type = other DNA
agctatggcatgcac

SEQ ID NO: 7558 - protein, 5 aa, synthetic construct
  REGION 1..5: note = Description of Artificial Sequence: Synthetic peptide
SYGMH

SEQ ID NO: 7559 - DNA, 15 bp, synthetic construct
  misc_feature 1..15: note = Description of Artificial Sequence: Synthetic oligonucleotide
  source 1..15: mol_type = other DNA
aactatggcatgcac

SEQ ID NO: 7560 - protein, 5 aa, synthetic construct
  REGION 1..5: note = Description of Artificial Sequence: Synthetic peptide
NYGMH

SEQ ID NO: 7561 - DNA, 21 bp, synthetic construct
  misc_feature 1..21: note = Description of Artificial Sequence: Synthetic oligonucleotide
  source 1..21: mol_type = other DNA
actggtggagtgggtgtgggc

SEQ ID NO: 7562 - protein, 7 aa, synthetic construct
  REGION 1..7: note = Description of Artificial Sequence: Synthetic peptide
TGGVGVG

SEQ ID NO: 7563 - DNA, 21 bp, synthetic construct
  misc_feature 1..21: note = Description of Artificial Sequence: Synthetic oligonucleotide
  source 1..21: mol_type = other DNA
actagtggagtgggtgtgggc

SEQ ID NO: 7564 - protein, 7 aa, synthetic construct
  REGION 1..7: note = Description of Artificial Sequence: Synthetic peptide
TSGVGVG

SEQ ID NO: 7565 - DNA, 21 bp, synthetic construct
  misc_feature 1..21: note = Description of Artificial Sequence: Synthetic oligonucleotide
  source 1..21: mol_type = other DNA
agtggtggttactactggagc

SEQ ID NO: 7566 - protein, 7 aa, synthetic construct
  REGION 1..7: note = Description of Artificial Sequence: Synthetic peptide
SGGYYWS

SEQ ID NO: 7567 - DNA, 15 bp, synthetic construct
  misc_feature 1..15: note = Description of Artificial Sequence: Synthetic oligonucleotide
  source 1..15: mol_type = other DNA
agctatggcatgcat

SEQ ID NO: 7568 - protein, 5 aa, synthetic construct
  REGION 1..5: note = Description of Artificial Sequence: Synthetic peptide
SYGMH

SEQ ID NO: 7569 - DNA, 21 bp, synthetic construct
  misc_feature 1..21: note = Description of Artificial Sequence: Synthetic oligonucleotide
  source 1..21: mol_type = other DNA
aggaaaagtgctacttggaac

SEQ ID NO: 7570 - protein, 7 aa, synthetic construct
  REGION 1..7: note = Description of Artificial Sequence: Synthetic peptide
RKSATWN

SEQ ID NO: 7571 - DNA, 15 bp, synthetic construct
  misc_feature 1..15: note = Description of Artificial Sequence: Synthetic oligonucleotide
  source 1..15: mol_type = other DNA
aactatggcatacac

SEQ ID NO: 7572 - protein, 5 aa, synthetic construct
  REGION 1..5: note = Description of Artificial Sequence: Synthetic peptide
NYGIH

SEQ ID NO: 7573 - DNA, 15 bp, synthetic construct
  misc_feature 1..15: note = Description of Artificial Sequence: Synthetic oligonucleotide
  source 1..15: mol_type = other DNA
agctatggcatgcac

SEQ ID NO: 7574 - protein, 5 aa, synthetic construct
  REGION 1..5: note = Description of Artificial Sequence: Synthetic peptide
SYGMH

SEQ ID NO: 7575 - DNA, 15 bp, synthetic construct
  misc_feature 1..15: note = Description of Artificial Sequence: Synthetic oligonucleotide
  source 1..15: mol_type = other DNA
agctatggcatgcac

SEQ ID NO: 7576 - protein, 5 aa, synthetic construct
  REGION 1..5: note = Description of Artificial Sequence: Synthetic peptide
SYGMH

SEQ ID NO: 7577 - DNA, 15 bp, synthetic construct
  misc_feature 1..15: note = Description of Artificial Sequence: Synthetic oligonucleotide
  source 1..15: mol_type = other DNA
agctatggcatgcac

SEQ ID NO: 7578 - protein, 5 aa, synthetic construct
  REGION 1..5: note = Description of Artificial Sequence: Synthetic peptide
SYGMH

SEQ ID NO: 7579 - DNA, 15 bp, synthetic construct
  misc_feature 1..15: note = Description of Artificial Sequence: Synthetic oligonucleotide
  source 1..15: mol_type = other DNA
ggctactatatgcac

SEQ ID NO: 7580 - protein, 5 aa, synthetic construct
  REGION 1..5: note = Description of Artificial Sequence: Synthetic peptide
GYYMH

SEQ ID NO: 7581 - DNA, 15 bp, synthetic construct
  misc_feature 1..15: note = Description of Artificial Sequence: Synthetic oligonucleotide
  source 1..15: mol_type = other DNA
agctatggcatgcat

SEQ ID NO: 7582 - protein, 5 aa, synthetic construct
  REGION 1..5: note = Description of Artificial Sequence: Synthetic peptide
SYGMH

SEQ ID NO: 7583 - DNA, 15 bp, synthetic construct
  misc_feature 1..15: note = Description of Artificial Sequence: Synthetic oligonucleotide
  source 1..15: mol_type = other DNA
agctatggcctgcac

SEQ ID NO: 7584 - protein, 5 aa, synthetic construct
  REGION 1..5: note = Description of Artificial Sequence: Synthetic peptide
SYGLH

SEQ ID NO: 7585 - DNA, 21 bp, synthetic construct
  misc_feature 1..21: note = Description of Artificial Sequence: Synthetic oligonucleotide
  source 1..21: mol_type = other DNA
aggaaaagtgctacttggaac

SEQ ID NO: 7586 - protein, 7 aa, synthetic construct
  REGION 1..7: note = Description of Artificial Sequence: Synthetic peptide
RKSATWN

SEQ ID NO: 7587 - DNA, 15 bp, synthetic construct
  misc_feature 1..15: note = Description of Artificial Sequence: Synthetic oligonucleotide
  source 1..15: mol_type = other DNA
aactatggcatgcac

SEQ ID NO: 7588 - protein, 5 aa, synthetic construct
  REGION 1..5: note = Description of Artificial Sequence: Synthetic peptide
NYGMH

SEQ ID NO: 7589 - DNA, 15 bp, synthetic construct
  misc_feature 1..15: note = Description of Artificial Sequence: Synthetic oligonucleotide
  source 1..15: mol_type = other DNA
agctatggcatgcat

SEQ ID NO: 7590 - protein, 5 aa, synthetic construct
  REGION 1..5: note = Description of Artificial Sequence: Synthetic peptide
SYGMH

SEQ ID NO: 7591 - DNA, 21 bp, synthetic construct
  misc_feature 1..21: note = Description of Artificial Sequence: Synthetic oligonucleotide
  source 1..21: mol_type = other DNA
agtggtggtgactactggagc

SEQ ID NO: 7592 - protein, 7 aa, synthetic construct
  REGION 1..7: note = Description of Artificial Sequence: Synthetic peptide
SGGDYWS

SEQ ID NO: 7593 - DNA, 15 bp, synthetic construct
  misc_feature 1..15: note = Description of Artificial Sequence: Synthetic oligonucleotide
  source 1..15: mol_type = other DNA
agttactactggatc

SEQ ID NO: 7594 - protein, 5 aa, synthetic construct
  REGION 1..5: note = Description of Artificial Sequence: Synthetic peptide
SYYWI

SEQ ID NO: 7595 - DNA, 21 bp, synthetic construct
  misc_feature 1..21: note = Description of Artificial Sequence: Synthetic oligonucleotide
  source 1..21: mol_type = other DNA
agtggtggtgactactggagc

SEQ ID NO: 7596 - protein, 7 aa, synthetic construct
  REGION 1..7: note = Description of Artificial Sequence: Synthetic peptide
SGGDYWS

SEQ ID NO: 7597 - DNA, 15 bp, synthetic construct
  misc_feature 1..15: note = Description of Artificial Sequence: Synthetic oligonucleotide
  source 1..15: mol_type = other DNA
agctatggcatgcac

SEQ ID NO: 7598 - protein, 5 aa, synthetic construct
  REGION 1..5: note = Description of Artificial Sequence: Synthetic peptide
SYGMH

SEQ ID NO: 7599 - DNA, 15 bp, synthetic construct
  misc_feature 1..15: note = Description of Artificial Sequence: Synthetic oligonucleotide
  source 1..15: mol_type = other DNA
aattatggcatgcac

SEQ ID NO: 7600 - protein, 5 aa, synthetic construct
  REGION 1..5: note = Description of Artificial Sequence: Synthetic peptide
NYGMH

SEQ ID NO: 7601 - DNA, 15 bp, synthetic construct
  misc_feature 1..15: note = Description of Artificial Sequence: Synthetic oligonucleotide
  source 1..15: mol_type = other DNA
ttccatggcatgcac

SEQ ID NO: 7602 - protein, 5 aa, synthetic construct
  REGION 1..5: note = Description of Artificial Sequence: Synthetic peptide
FHGMH

SEQ ID NO: 7603 - DNA, 15 bp, synthetic construct
  misc_feature 1..15: note = Description of Artificial Sequence: Synthetic oligonucleotide
  source 1..15: mol_type = other DNA
acctatggcatgcac

SEQ ID NO: 7604 - protein, 5 aa, synthetic construct
  REGION 1..5: note = Description of Artificial Sequence: Synthetic peptide
TYGMH

SEQ ID NO: 7605 - DNA, 15 bp, synthetic construct
  misc_feature 1..15: note = Description of Artificial Sequence: Synthetic oligonucleotide
  source 1..15: mol_type = other DNA
ggctacaatatgcac

SEQ ID NO: 7606 - protein, 5 aa, synthetic construct
  REGION 1..5: note = Description of Artificial Sequence: Synthetic peptide
GYNMH

SEQ ID NO: 7607 - DNA, 15 bp, synthetic construct
  misc_feature 1..15: note = Description of Artificial Sequence: Synthetic oligonucleotide
  source 1..15: mol_type = other DNA
agctatggcatgcac

SEQ ID NO: 7608 - protein, 5 aa, synthetic construct
  REGION 1..5: note = Description of Artificial Sequence: Synthetic peptide
SYGMH

SEQ ID NO: 7609 - DNA, 21 bp, synthetic construct
  misc_feature 1..21: note = Description of Artificial Sequence: Synthetic oligonucleotide
  source 1..21: mol_type = other DNA
agtggtggttactactggagc

SEQ ID NO: 7610 - protein, 7 aa, synthetic construct
  REGION 1..7: note = Description of Artificial Sequence: Synthetic peptide
SGGYYWS

SEQ ID NO: 7611 - DNA, 15 bp, synthetic construct
  misc_feature 1..15: note = Description of Artificial Sequence: Synthetic oligonucleotide
  source 1..15: mol_type = other DNA
aattactactggagc

SEQ ID NO: 7612 - protein, 5 aa, synthetic construct
  REGION 1..5: note = Description of Artificial Sequence: Synthetic peptide
NYYWS

SEQ ID NO: 7613 - DNA, 21 bp, synthetic construct
  misc_feature 1..21: note = Description of Artificial Sequence: Synthetic oligonucleotide
  source 1..21: mol_type = other DNA
agtggtggttactactggagc

SEQ ID NO: 7614 - protein, 7 aa, synthetic construct
  REGION 1..7: note = Description of Artificial Sequence: Synthetic peptide
SGGYYWS

SEQ ID NO: 7615 - DNA, 21 bp, synthetic construct
  misc_feature 1..21: note = Description of Artificial Sequence: Synthetic oligonucleotide
  source 1..21: mol_type = other DNA
agtggtggtgactactggagc

SEQ ID NO: 7616 - protein, 7 aa, synthetic construct
  REGION 1..7: note = Description of Artificial Sequence: Synthetic peptide
SGGDYWS

SEQ ID NO: 7617 - DNA, 15 bp, synthetic construct
  misc_feature 1..15: note = Description of Artificial Sequence: Synthetic oligonucleotide
  source 1..15: mol_type = other DNA
agttactactggagc

SEQ ID NO: 7618 - protein, 5 aa, synthetic construct
  REGION 1..5: note = Description of Artificial Sequence: Synthetic peptide
SYYWS

SEQ ID NO: 7619 - DNA, 15 bp, synthetic construct
  misc_feature 1..15: note = Description of Artificial Sequence: Synthetic oligonucleotide
  source 1..15: mol_type = other DNA
aacgcctacatgacc

SEQ ID NO: 7620 - protein, 5 aa, synthetic construct
  REGION 1..5: note = Description of Artificial Sequence: Synthetic peptide
NAYMT

SEQ ID NO: 7621 - DNA, 15 bp, synthetic construct
  misc_feature 1..15: note = Description of Artificial Sequence: Synthetic oligonucleotide
  source 1..15: mol_type = other DNA
ggctactatatgcac

SEQ ID NO: 7622 - protein, 5 aa, synthetic construct
  REGION 1..5: note = Description of Artificial Sequence: Synthetic peptide
GYYMH

SEQ ID NO: 7623 - DNA, 21 bp, synthetic construct
  misc_feature 1..21: note = Description of Artificial Sequence: Synthetic oligonucleotide
  source 1..21: mol_type = other DNA
agtggtggtgactactggagc

SEQ ID NO: 7624 - protein, 7 aa, synthetic construct
  REGION 1..7: note = Description of Artificial Sequence: Synthetic peptide
SGGDYWS

SEQ ID NO: 7625 - DNA, 15 bp, synthetic construct
  misc_feature 1..15: note = Description of Artificial Sequence: Synthetic oligonucleotide
  source 1..15: mol_type = other DNA
agctatggcatgcac

SEQ ID NO: 7626 - protein, 5 aa, synthetic construct
  REGION 1..5: note = Description of Artificial Sequence: Synthetic peptide
SYGMH

SEQ ID NO: 7627 - DNA, 21 bp, synthetic construct
  misc_feature 1..21: note = Description of Artificial Sequence: Synthetic oligonucleotide
  source 1..21: mol_type = other DNA
agtggtggtgactactggagc

SEQ ID NO: 7628 - protein, 7 aa, synthetic construct
  REGION 1..7: note = Description of Artificial Sequence: Synthetic peptide
SGGDYWS

SEQ ID NO: 7629 - DNA, 15 bp, synthetic construct
  misc_feature 1..15: note = Description of Artificial Sequence: Synthetic oligonucleotide
  source 1..15: mol_type = other DNA
agctatggcatgcac

SEQ ID NO: 7630 - protein, 5 aa, synthetic construct
  REGION 1..5: note = Description of Artificial Sequence: Synthetic peptide
SYGMH

SEQ ID NO: 7631 - DNA, 15 bp, synthetic construct
  misc_feature 1..15: note = Description of Artificial Sequence: Synthetic oligonucleotide
  source 1..15: mol_type = other DNA
gactactacatgagc

SEQ ID NO: 7632 - protein, 5 aa, synthetic construct
  REGION 1..5: note = Description of Artificial Sequence: Synthetic peptide
DYYMS

SEQ ID NO: 7633 - DNA, 15 bp, synthetic construct
  misc_feature 1..15: note = Description of Artificial Sequence: Synthetic oligonucleotide
  source 1..15: mol_type = other DNA
aattactactggagc

SEQ ID NO: 7634 - protein, 5 aa, synthetic construct
  REGION 1..5: note = Description of Artificial Sequence: Synthetic peptide
NYYWS

SEQ ID NO: 7635 - DNA, 15 bp, synthetic construct
  misc_feature 1..15: note = Description of Artificial Sequence: Synthetic oligonucleotide
  source 1..15: mol_type = other DNA
ggctactatatgcac

SEQ ID NO: 7636 - protein, 5 aa, synthetic construct
  REGION 1..5: note = Description of Artificial Sequence: Synthetic peptide
GYYMH

SEQ ID NO: 7637 - DNA, 15 bp, synthetic construct
  misc_feature 1..15: note = Description of Artificial Sequence: Synthetic oligonucleotide
  source 1..15: mol_type = other DNA
ggctactatatgcac

SEQ ID NO: 7638 - protein, 5 aa, synthetic construct
  REGION 1..5: note = Description of Artificial Sequence: Synthetic peptide
GYYMH

SEQ ID NO: 7639 - DNA, 15 bp, synthetic construct
  misc_feature 1..15: note = Description of Artificial Sequence: Synthetic oligonucleotide
  source 1..15: mol_type = other DNA
ggctacaatatgcac

SEQ ID NO: 7640 - protein, 5 aa, synthetic construct
  REGION 1..5: note = Description of Artificial Sequence: Synthetic peptide
GYNMH

SEQ ID NO: 7641 - DNA, 15 bp, synthetic construct
  misc_feature 1..15: note = Description of Artificial Sequence: Synthetic oligonucleotide
  source 1..15: mol_type = other DNA
ggctactatatacac

SEQ ID NO: 7642 - protein, 5 aa, synthetic construct
  REGION 1..5: note = Description of Artificial Sequence: Synthetic peptide
GYYIH

SEQ ID NO: 7643 - DNA, 15 bp, synthetic construct
  misc_feature 1..15: note = Description of Artificial Sequence: Synthetic oligonucleotide
  source 1..15: mol_type = other DNA
atttactactggagc

SEQ ID NO: 7644 - protein, 5 aa, synthetic construct
  REGION 1..5: note = Description of Artificial Sequence: Synthetic peptide
IYYWS

SEQ ID NO: 7645 - DNA, 21 bp, synthetic construct
  misc_feature 1..21: note = Description of Artificial Sequence: Synthetic oligonucleotide
  source 1..21: mol_type = other DNA
agtggtggttactactggagc

SEQ ID NO: 7646 - protein, 7 aa, synthetic construct
  REGION 1..7: note = Description of Artificial Sequence: Synthetic peptide
SGGYYWS

SEQ ID NO: 7647 - DNA, 15 bp, synthetic construct
  misc_feature 1..15: note = Description of Artificial Sequence: Synthetic oligonucleotide
  source 1..15: mol_type = other DNA
ggctacaatatgcac

SEQ ID NO: 7648 - protein, 5 aa, synthetic construct
  REGION 1..5: note = Description of Artificial Sequence: Synthetic peptide
GYNMH

SEQ ID NO: 7649 - DNA, 15 bp, synthetic construct
  misc_feature 1..15: note = Description of Artificial Sequence: Synthetic oligonucleotide
  source 1..15: mol_type = other DNA
ttccatggcatgcac

SEQ ID NO: 7650 - protein, 5 aa, synthetic construct
  REGION 1..5: note = Description of Artificial Sequence: Synthetic peptide
FHGMH

SEQ ID NO: 7651 - DNA, 21 bp, synthetic construct
  misc_feature 1..21: note = Description of Artificial Sequence: Synthetic oligonucleotide
  source 1..21: mol_type = other DNA
agtggtggtgactactggagc

SEQ ID NO: 7652 - protein, 7 aa, synthetic construct
  REGION 1..7: note = Description of Artificial Sequence: Synthetic peptide
SGGDYWS

SEQ ID NO: 7653 - DNA, 15 bp, synthetic construct
  misc_feature 1..15: note = Description of Artificial Sequence: Synthetic oligonucleotide
  source 1..15: mol_type = other DNA
ttctatggcatgcac

SEQ ID NO: 7654 - protein, 5 aa, synthetic construct
  REGION 1..5: note = Description of Artificial Sequence: Synthetic peptide
FYGMH

SEQ ID NO: 7655 - DNA, 15 bp, synthetic construct
  misc_feature 1..15: note = Description of Artificial Sequence: Synthetic oligonucleotide
  source 1..15: mol_type = other DNA
atttactactggagc

SEQ ID NO: 7656 - protein, 5 aa, synthetic construct
  REGION 1..5: note = Description of Artificial Sequence: Synthetic peptide
IYYWS

SEQ ID NO: 7657 - DNA, 21 bp, synthetic construct
  misc_feature 1..21: note = Description of Artificial Sequence: Synthetic oligonucleotide
  source 1..21: mol_type = other DNA
agtggtggtgactattggagc

SEQ ID NO: 7658 - protein, 7 aa, synthetic construct
  REGION 1..7: note = Description of Artificial Sequence: Synthetic peptide
SGGDYWS

SEQ ID NO: 7659 - DNA, 15 bp, synthetic construct
  misc_feature 1..15: note = Description of Artificial Sequence: Synthetic oligonucleotide
  source 1..15: mol_type = other DNA
agttactactggagc

SEQ ID NO: 7660 - protein, 5 aa, synthetic construct
  REGION 1..5: note = Description of Artificial Sequence: Synthetic peptide
SYYWS

SEQ ID NO: 7661 - DNA, 21 bp, synthetic construct
  misc_feature 1..21: note = Description of Artificial Sequence: Synthetic oligonucleotide
  source 1..21: mol_type = other DNA
agtggtggtgactactggagc

SEQ ID NO: 7662 - protein, 7 aa, synthetic construct
  REGION 1..7: note = Description of Artificial Sequence: Synthetic peptide
SGGDYWS

SEQ ID NO: 7663 - DNA, 21 bp, synthetic construct
  misc_feature 1..21: note = Description of Artificial Sequence: Synthetic oligonucleotide
  source 1..21: mol_type = other DNA
agtggtggtgactactggagc

SEQ ID NO: 7664 - protein, 7 aa, synthetic construct
  REGION 1..7: note = Description of Artificial Sequence: Synthetic peptide
SGGDYWS

SEQ ID NO: 7665 - DNA, 21 bp, synthetic construct
  misc_feature 1..21: note = Description of Artificial Sequence: Synthetic oligonucleotide
  source 1..21: mol_type = other DNA
cgcatcaatcctacttggaac

SEQ ID NO: 7666 - protein, 7 aa, synthetic construct
  REGION 1..7: note = Description of Artificial Sequence: Synthetic peptide
RINPTWN

SEQ ID NO: 7667 - DNA, 15 bp, synthetic construct
  misc_feature 1..15: note = Description of Artificial Sequence: Synthetic oligonucleotide
  source 1..15: mol_type = other DNA
aactatggcatgcac

SEQ ID NO: 7668 - protein, 5 aa, synthetic construct
  REGION 1..5: note = Description of Artificial Sequence: Synthetic peptide
NYGMH

SEQ ID NO: 7669 - DNA, 21 bp, synthetic construct
  misc_feature 1..21: note = Description of Artificial Sequence: Synthetic oligonucleotide
  source 1..21: mol_type = other DNA
cgcaccaatcctacttggaac

SEQ ID NO: 7670 - protein, 7 aa, synthetic construct
  REGION 1..7: note = Description of Artificial Sequence: Synthetic peptide
RTNPTWN

SEQ ID NO: 7671 - DNA, 15 bp, synthetic construct
  misc_feature 1..15: note = Description of Artificial Sequence: Synthetic oligonucleotide
  source 1..15: mol_type = other DNA
aactatggcatgcac

SEQ ID NO: 7672 - protein, 5 aa, synthetic construct
  REGION 1..5: note = Description of Artificial Sequence: Synthetic peptide
NYGMH

SEQ ID NO: 7673 - DNA, 15 bp, synthetic construct
  misc_feature 1..15: note = Description of Artificial Sequence: Synthetic oligonucleotide
  source 1..15: mol_type = other DNA
agctatggcatgcac

SEQ ID NO: 7674 - protein, 5 aa, synthetic construct
  REGION 1..5: note = Description of Artificial Sequence: Synthetic peptide
SYGMH

SEQ ID NO: 7675 - DNA, 15 bp, synthetic construct
  misc_feature 1..15: note = Description of Artificial Sequence: Synthetic oligonucleotide
  source 1..15: mol_type = other DNA
agttatagcatgaac

SEQ ID NO: 7676 - protein, 5 aa, synthetic construct
  REGION 1..5: note = Description of Artificial Sequence: Synthetic peptide
SYSMN

SEQ ID NO: 7677 - DNA, 15 bp, synthetic construct
  misc_feature 1..15: note = Description of Artificial Sequence: Synthetic oligonucleotide
  source 1..15: mol_type = other DNA
agctatggcatgcac

SEQ ID NO: 7678 - protein, 5 aa, synthetic construct
  REGION 1..5: note = Description of Artificial Sequence: Synthetic peptide
SYGMH

SEQ ID NO: 7679 - DNA, 21 bp, synthetic construct
  misc_feature 1..21: note = Description of Artificial Sequence: Synthetic oligonucleotide
  source 1..21: mol_type = other DNA
agtggtggttcctactggagc

SEQ ID NO: 7680 - protein, 7 aa, synthetic construct
  REGION 1..7: note = Description of Artificial Sequence: Synthetic peptide
SGGSYWS

SEQ ID NO: 7681 - DNA, 15 bp, synthetic construct
  misc_feature 1..15: note = Description of Artificial Sequence: Synthetic oligonucleotide
  source 1..15: mol_type = other DNA
gactactatatgaac

SEQ ID NO: 7682 - protein, 5 aa, synthetic construct
  REGION 1..5: note = Description of Artificial Sequence: Synthetic peptide
DYYMN

SEQ ID NO: 7683 - DNA, 15 bp, synthetic construct
  misc_feature 1..15: note = Description of Artificial Sequence: Synthetic oligonucleotide
  source 1..15: mol_type = other DNA
cactatggcatgcac

SEQ ID NO: 7684 - protein, 5 aa, synthetic construct
  REGION 1..5: note = Description of Artificial Sequence: Synthetic peptide
HYGMH

SEQ ID NO: 7685 - DNA, 15 bp, synthetic construct
  misc_feature 1..15: note = Description of Artificial Sequence: Synthetic oligonucleotide
  source 1..15: mol_type = other DNA
aactatggcatgcac

SEQ ID NO: 7686 - protein, 5 aa, synthetic construct
  REGION 1..5: note = Description of Artificial Sequence: Synthetic peptide
NYGMH

SEQ ID NO: 7687 - DNA, 15 bp, synthetic construct
  misc_feature 1..15: note = Description of Artificial Sequence: Synthetic oligonucleotide
  source 1..15: mol_type = other DNA
cactatggcatgcac

SEQ ID NO: 7688 - protein, 5 aa, synthetic construct
  REGION 1..5: note = Description of Artificial Sequence: Synthetic peptide
HYGMH

SEQ ID NO: 7689 - DNA, 15 bp, synthetic construct
  misc_feature 1..15: note = Description of Artificial Sequence: Synthetic oligonucleotide
  source 1..15: mol_type = other DNA
agctatgccatgcac

SEQ ID NO: 7690 - protein, 5 aa, synthetic construct
  REGION 1..5: note = Description of Artificial Sequence: Synthetic peptide
SYAMH

SEQ ID NO: 7691 - DNA, 15 bp, synthetic construct
  misc_feature 1..15: note = Description of Artificial Sequence: Synthetic oligonucleotide
  source 1..15: mol_type = other DNA
aactatggcatgcac

SEQ ID NO: 7692 - protein, 5 aa, synthetic construct
  REGION 1..5: note = Description of Artificial Sequence: Synthetic peptide
NYGMH

SEQ ID NO: 7693 - DNA, 15 bp, synthetic construct
  misc_feature 1..15: note = Description of Artificial Sequence: Synthetic oligonucleotide
  source 1..15: mol_type = other DNA
cactatggcatgcac

SEQ ID NO: 7694 - protein, 5 aa, synthetic construct
  REGION 1..5: note = Description of Artificial Sequence: Synthetic peptide
HYGMH

SEQ ID NO: 7695 - DNA, 21 bp, synthetic construct
  misc_feature 1..21: note = Description of Artificial Sequence: Synthetic oligonucleotide
  source 1..21: mol_type = other DNA
agtggtggttactactggagc

SEQ ID NO: 7696 - protein, 7 aa, synthetic construct
  REGION 1..7: note = Description of Artificial Sequence: Synthetic peptide
SGGYYWS

SEQ ID NO: 7697 - DNA, 21 bp, synthetic construct
  misc_feature 1..21: note = Description of Artificial Sequence: Synthetic oligonucleotide
  source 1..21: mol_type = other DNA
agtggtggtgactactggagc

SEQ ID NO: 7698 - protein, 7 aa, synthetic construct
  REGION 1..7: note = Description of Artificial Sequence: Synthetic peptide
SGGDYWS

SEQ ID NO: 7699 - DNA, 21 bp, synthetic construct
  misc_feature 1..21: note = Description of Artificial Sequence: Synthetic oligonucleotide
  source 1..21: mol_type = other DNA
agtggtggtgactactggagc

SEQ ID NO: 7700 - protein, 7 aa, synthetic construct
  REGION 1..7: note = Description of Artificial Sequence: Synthetic peptide
SGGDYWS

SEQ ID NO: 7701 - DNA, 15 bp, synthetic construct
  misc_feature 1..15: note = Description of Artificial Sequence: Synthetic oligonucleotide
  source 1..15: mol_type = other DNA
cactatggcatgcac

SEQ ID NO: 7702 - protein, 5 aa, synthetic construct
  REGION 1..5: note = Description of Artificial Sequence: Synthetic peptide
HYGMH

SEQ ID NO: 7703 - DNA, 15 bp, synthetic construct
  misc_feature 1..15: note = Description of Artificial Sequence: Synthetic oligonucleotide
  source 1..15: mol_type = other DNA
aactatggcatgcac

SEQ ID NO: 7704 - protein, 5 aa, synthetic construct
  REGION 1..5: note = Description of Artificial Sequence: Synthetic peptide
NYGMH

SEQ ID NO: 7705 - DNA, 15 bp, synthetic construct
  misc_feature 1..15: note = Description of Artificial Sequence: Synthetic oligonucleotide
  source 1..15: mol_type = other DNA
cactatggcatgcac

SEQ ID NO: 7706 - protein, 5 aa, synthetic construct
  REGION 1..5: note = Description of Artificial Sequence: Synthetic peptide
HYGMH

SEQ ID NO: 7707 - DNA, 15 bp, synthetic construct
  misc_feature 1..15: note = Description of Artificial Sequence: Synthetic oligonucleotide
  source 1..15: mol_type = other DNA
cactatggcatgcac

SEQ ID NO: 7708 - protein, 5 aa, synthetic construct
  REGION 1..5: note = Description of Artificial Sequence: Synthetic peptide
HYGMH

SEQ ID NO: 7709 - DNA, 21 bp, synthetic construct
  misc_feature 1..21: note = Description of Artificial Sequence: Synthetic oligonucleotide
  source 1..21: mol_type = other DNA
agtggtggtgactactggagc

SEQ ID NO: 7710 - protein, 7 aa, synthetic construct
  REGION 1..7: note = Description of Artificial Sequence: Synthetic peptide
SGGDYWS

SEQ ID NO: 7711 - DNA, 21 bp, synthetic construct
  misc_feature 1..21: note = Description of Artificial Sequence: Synthetic oligonucleotide
  source 1..21: mol_type = other DNA
agtggtggtgactactggagt

SEQ ID NO: 7712 - protein, 7 aa, synthetic construct
  REGION 1..7: note = Description of Artificial Sequence: Synthetic peptide
SGGDYWS

SEQ ID NO: 7713 - DNA, 15 bp, synthetic construct
  misc_feature 1..15: note = Description of Artificial Sequence: Synthetic oligonucleotide
  source 1..15: mol_type = other DNA
cactatggcatgcac

SEQ ID NO: 7714 - protein, 5 aa, synthetic construct
  REGION 1..5: note = Description of Artificial Sequence: Synthetic peptide
HYGMH

SEQ ID NO: 7715 - DNA, 15 bp, synthetic construct
  misc_feature 1..15: note = Description of Artificial Sequence: Synthetic oligonucleotide
  source 1..15: mol_type = other DNA
cactatggcatgcac

SEQ ID NO: 7716 - protein, 5 aa, synthetic construct
  REGION 1..5: note = Description of Artificial Sequence: Synthetic peptide
HYGMH

SEQ ID NO: 7717 - DNA, 21 bp, synthetic construct
  misc_feature 1..21: note = Description of Artificial Sequence: Synthetic oligonucleotide
  source 1..21: mol_type = other DNA
agtggtggtgactactggagc

SEQ ID NO: 7718 - protein, 7 aa, synthetic construct
  REGION 1..7: note = Description of Artificial Sequence: Synthetic peptide
SGGDYWS

SEQ ID NO: 7719 - DNA, 15 bp, synthetic construct
  misc_feature 1..15: note = Description of Artificial Sequence: Synthetic oligonucleotide
  source 1..15: mol_type = other DNA
gactactatatgaac

SEQ ID NO: 7720 - protein, 5 aa, synthetic construct
  REGION 1..5: note = Description of Artificial Sequence: Synthetic peptide
DYYMN

SEQ ID NO: 7721 - DNA, 21 bp, synthetic construct
  misc_feature 1..21: note = Description of Artificial Sequence: Synthetic oligonucleotide
  source 1..21: mol_type = other DNA
agtggtggtgactactggagt

SEQ ID NO: 7722 - protein, 7 aa, synthetic construct
  REGION 1..7: note = Description of Artificial Sequence: Synthetic peptide
SGGDYWS

SEQ ID NO: 7723 - DNA, 21 bp, synthetic construct
  misc_feature 1..21: note = Description of Artificial Sequence: Synthetic oligonucleotide
  source 1..21: mol_type = other DNA
actgctttttactactggagc

SEQ ID NO: 7724 - protein, 7 aa, synthetic construct
  REGION 1..7: note = Description of Artificial Sequence: Synthetic peptide
TAFYYWS

SEQ ID NO: 7725 - DNA, 21 bp, synthetic construct
  misc_feature 1..21: note = Description of Artificial Sequence: Synthetic oligonucleotide
  source 1..21: mol_type = other DNA
agtggtggtgattactggagc

SEQ ID NO: 7726 - protein, 7 aa, synthetic construct
  REGION 1..7: note = Description of Artificial Sequence: Synthetic peptide
SGGDYWS

SEQ ID NO: 7727 - DNA, 21 bp, synthetic construct
  misc_feature 1..21: note = Description of Artificial Sequence: Synthetic oligonucleotide
  source 1..21: mol_type = other DNA
agtggtggtgactactggagc

SEQ ID NO: 7728 - protein, 7 aa, synthetic construct
  REGION 1..7: note = Description of Artificial Sequence: Synthetic peptide
SGGDYWS

SEQ ID NO: 7729 - DNA, 15 bp, synthetic construct
  misc_feature 1..15: note = Description of Artificial Sequence: Synthetic oligonucleotide
  source 1..15: mol_type = other DNA
aacgcctggatgcac

SEQ ID NO: 7730 - protein, 5 aa, synthetic construct
  REGION 1..5: note = Description of Artificial Sequence: Synthetic peptide
NAWMH

SEQ ID NO: 7731 - DNA, 15 bp, synthetic construct
  misc_feature 1..15: note = Description of Artificial Sequence: Synthetic oligonucleotide
  source 1..15: mol_type = other DNA
cactatggcatgcac

SEQ ID NO: 7732 - protein, 5 aa, synthetic construct
  REGION 1..5: note = Description of Artificial Sequence: Synthetic peptide
HYGMH

SEQ ID NO: 7733 - DNA, 21 bp, synthetic construct
  misc_feature 1..21: note = Description of Artificial Sequence: Synthetic oligonucleotide
  source 1..21: mol_type = other DNA
agtggtggtgactactggagc

SEQ ID NO: 7734 - protein, 7 aa, synthetic construct
  REGION 1..7: note = Description of Artificial Sequence: Synthetic peptide
SGGDYWS

SEQ ID NO: 7735 - DNA, 15 bp, synthetic construct
  misc_feature 1..15: note = Description of Artificial Sequence: Synthetic oligonucleotide
  source 1..15: mol_type = other DNA
cactatggcatgcac

SEQ ID NO: 7736 - protein, 5 aa, synthetic construct
  REGION 1..5: note = Description of Artificial Sequence: Synthetic peptide
HYGMH

SEQ ID NO: 7737 - DNA, 21 bp, synthetic construct
  misc_feature 1..21: note = Description of Artificial Sequence: Synthetic oligonucleotide
  source 1..21: mol_type = other DNA
agtggtggtgactactggagc

SEQ ID NO: 7738 - protein, 7 aa, synthetic construct
  REGION 1..7: note = Description of Artificial Sequence: Synthetic peptide
SGGDYWS

SEQ ID NO: 7739 - DNA, 21 bp, synthetic construct
  misc_feature 1..21: note = Description of Artificial Sequence: Synthetic oligonucleotide
  source 1..21: mol_type = other DNA
agtggtggtgattactggagc

SEQ ID NO: 7740 - protein, 7 aa, synthetic construct
  REGION 1..7: note = Description of Artificial Sequence: Synthetic peptide
SGGDYWS

SEQ ID NO: 7741 - DNA, 15 bp, synthetic construct
  misc_feature 1..15: note = Description of Artificial Sequence: Synthetic oligonucleotide
  source 1..15: mol_type = other DNA
agctatgccatgcac

SEQ ID NO: 7742 - protein, 5 aa, synthetic construct
  REGION 1..5: note = Description of Artificial Sequence: Synthetic peptide
SYAMH

SEQ ID NO: 7743 - DNA, 15 bp, synthetic construct
  misc_feature 1..15: note = Description of Artificial Sequence: Synthetic oligonucleotide
  source 1..15: mol_type = other DNA
aactatggcatgcac

SEQ ID NO: 7744 - protein, 5 aa, synthetic construct
  REGION 1..5: note = Description of Artificial Sequence: Synthetic peptide
NYGMH

SEQ ID NO: 7745 - DNA, 15 bp, synthetic construct
  misc_feature 1..15: note = Description of Artificial Sequence: Synthetic oligonucleotide
  source 1..15: mol_type = other DNA
aactatggcatgcac

SEQ ID NO: 7746 - protein, 5 aa, synthetic construct
  REGION 1..5: note = Description of Artificial Sequence: Synthetic peptide
NYGMH

SEQ ID NO: 7747 - DNA, 15 bp, synthetic construct
  misc_feature 1..15: note = Description of Artificial Sequence: Synthetic oligonucleotide
  source 1..15: mol_type = other DNA
aactatggcatgcac

SEQ ID NO: 7748 - protein, 5 aa, synthetic construct
  REGION 1..5: note = Description of Artificial Sequence: Synthetic peptide
NYGMH

SEQ ID NO: 7749 - DNA, 15 bp, synthetic construct
  misc_feature 1..15: note = Description of Artificial Sequence: Synthetic oligonucleotide
  source 1..15: mol_type = other DNA
agctatggcttgcac

SEQ ID NO: 7750 - protein, 5 aa, synthetic construct
  REGION 1..5: note = Description of Artificial Sequence: Synthetic peptide
SYGLH

SEQ ID NO: 7751 - DNA, 15 bp, synthetic construct
  misc_feature 1..15: note = Description of Artificial Sequence: Synthetic oligonucleotide
  source 1..15: mol_type = other DNA
aactatggcatgcac

SEQ ID NO: 7752 - protein, 5 aa, synthetic construct
  REGION 1..5: note = Description of Artificial Sequence: Synthetic peptide
NYGMH

SEQ ID NO: 7753 - DNA, 15 bp, synthetic construct
  misc_feature 1..15: note = Description of Artificial Sequence: Synthetic oligonucleotide
  source 1..15: mol_type = other DNA
cactatggcatgcac

SEQ ID NO: 7754 - protein, 5 aa, synthetic construct
  REGION 1..5: note = Description of Artificial Sequence: Synthetic peptide
HYGMH

SEQ ID NO: 7755 - DNA, 15 bp, synthetic construct
  misc_feature 1..15: note = Description of Artificial Sequence: Synthetic oligonucleotide
  source 1..15: mol_type = other DNA
cactatggcatgcac

SEQ ID NO: 7756 - protein, 5 aa, synthetic construct
  REGION 1..5: note = Description of Artificial Sequence: Synthetic peptide
HYGMH

SEQ ID NO: 7757 - DNA, 15 bp, synthetic construct
  misc_feature 1..15: note = Description of Artificial Sequence: Synthetic oligonucleotide
  source 1..15: mol_type = other DNA
cactatggcatgcac

SEQ ID NO: 7758 - protein, 5 aa, synthetic construct
  REGION 1..5: note = Description of Artificial Sequence: Synthetic peptide
HYGMH

SEQ ID NO: 7759 - DNA, 21 bp, synthetic construct
  misc_feature 1..21: note = Description of Artificial Sequence: Synthetic oligonucleotide
  source 1..21: mol_type = other DNA
agcaacagtgctgcttggaac

SEQ ID NO: 7760 - protein, 7 aa, synthetic construct
  REGION 1..7: note = Description of Artificial Sequence: Synthetic peptide
SNSAAWN

SEQ ID NO: 7761 - DNA, 15 bp, synthetic construct
  misc_feature 1..15: note = Description of Artificial Sequence: Synthetic oligonucleotide
  source 1..15: mol_type = other DNA
ggctactatatacac

SEQ ID NO: 7762 - protein, 5 aa, synthetic construct
  REGION 1..5: note = Description of Artificial Sequence: Synthetic peptide
GYYIH

SEQ ID NO: 7763 - DNA, 15 bp, synthetic construct
  misc_feature 1..15: note = Description of Artificial Sequence: Synthetic oligonucleotide
  source 1..15: mol_type = other DNA
acctatggcatgcac

SEQ ID NO: 7764 - protein, 5 aa, synthetic construct
  REGION 1..5: note = Description of Artificial Sequence: Synthetic peptide
TYGMH

SEQ ID NO: 7765 - DNA, 15 bp, synthetic construct
  misc_feature 1..15: note = Description of Artificial Sequence: Synthetic oligonucleotide
  source 1..15: mol_type = other DNA
agctatggcatgcac

SEQ ID NO: 7766 - protein, 5 aa, synthetic construct
  REGION 1..5: note = Description of Artificial Sequence: Synthetic peptide
SYGMH

SEQ ID NO: 7767 - DNA, 15 bp, synthetic construct
  misc_feature 1..15: note = Description of Artificial Sequence: Synthetic oligonucleotide
  source 1..15: mol_type = other DNA
ggctactttatgcac

SEQ ID NO: 7768 - protein, 5 aa, synthetic construct
  REGION 1..5: note = Description of Artificial Sequence: Synthetic peptide
GYFMH

SEQ ID NO: 7769 - DNA, 15 bp, synthetic construct
  misc_feature 1..15: note = Description of Artificial Sequence: Synthetic oligonucleotide
  source 1..15: mol_type = other DNA
ggctactatatgcac

SEQ ID NO: 7770 - protein, 5 aa, synthetic construct
  REGION 1..5: note = Description of Artificial Sequence: Synthetic peptide
GYYMH

SEQ ID NO: 7771 - DNA, 15 bp, synthetic construct
  misc_feature 1..15: note = Description of Artificial Sequence: Synthetic oligonucleotide
  source 1..15: mol_type = other DNA
ggctactatatacac

SEQ ID NO: 7772 - protein, 5 aa, synthetic construct
  REGION 1..5: note = Description of Artificial Sequence: Synthetic peptide
GYYIH

SEQ ID NO: 7773 - DNA, 15 bp, synthetic construct
  misc_feature 1..15: note = Description of Artificial Sequence: Synthetic oligonucleotide
  source 1..15: mol_type = other DNA
ggctactttatgcac

SEQ ID NO: 7774 - protein, 5 aa, synthetic construct
  REGION 1..5: note = Description of Artificial Sequence: Synthetic peptide
GYFMH

SEQ ID NO: 7775 - DNA, 15 bp, synthetic construct
  misc_feature 1..15: note = Description of Artificial Sequence: Synthetic oligonucleotide
  source 1..15: mol_type = other DNA
ggctactatatgcac

SEQ ID NO: 7776 - protein, 5 aa, synthetic construct
  REGION 1..5: note = Description of Artificial Sequence: Synthetic peptide
GYYMH

SEQ ID NO: 7777 - DNA, 15 bp, synthetic construct
  misc_feature 1..15: note = Description of Artificial Sequence: Synthetic oligonucleotide
  source 1..15: mol_type = other DNA
agctatgccatgagc

SEQ ID NO: 7778 - protein, 5 aa, synthetic construct
  REGION 1..5: note = Description of Artificial Sequence: Synthetic peptide
SYAMS

SEQ ID NO: 7779 - DNA, 15 bp, synthetic construct
  misc_feature 1..15: note = Description of Artificial Sequence: Synthetic oligonucleotide
  source 1..15: mol_type = other DNA
ggctactatatgcac

SEQ ID NO: 7780 - protein, 5 aa, synthetic construct
  REGION 1..5: note = Description of Artificial Sequence: Synthetic peptide
GYYMH

SEQ ID NO: 7781 - DNA, 21 bp, synthetic construct
  misc_feature 1..21: note = Description of Artificial Sequence: Synthetic oligonucleotide
  source 1..21: mol_type = other DNA
actagtggagtgggtgtgggc

SEQ ID NO: 7782 - protein, 7 aa, synthetic construct
  REGION 1..7: note = Description of Artificial Sequence: Synthetic peptide
TSGVGVG

SEQ ID NO: 7783 - DNA, 15 bp, synthetic construct
  misc_feature 1..15: note = Description of Artificial Sequence: Synthetic oligonucleotide
  source 1..15: mol_type = other DNA
agctatgccatgaac

SEQ ID NO: 7784 - protein, 5 aa, synthetic construct
  REGION 1..5: note = Description of Artificial Sequence: Synthetic peptide
SYAMN

SEQ ID NO: 7785 - DNA, 15 bp, synthetic construct
  misc_feature 1..15: note = Description of Artificial Sequence: Synthetic oligonucleotide
  source 1..15: mol_type = other DNA
agctatgtcatgagc

SEQ ID NO: 7786 - protein, 5 aa, synthetic construct
  REGION 1..5: note = Description of Artificial Sequence: Synthetic peptide
SYVMS

SEQ ID NO: 7787 - DNA, 15 bp, synthetic construct
  misc_feature 1..15: note = Description of Artificial Sequence: Synthetic oligonucleotide
  source 1..15: mol_type = other DNA
agctatagcatgaac

SEQ ID NO: 7788 - protein, 5 aa, synthetic construct
  REGION 1..5: note = Description of Artificial Sequence: Synthetic peptide
SYSMN

SEQ ID NO: 7789 - DNA, 15 bp, synthetic construct
  misc_feature 1..15: note = Description of Artificial Sequence: Synthetic oligonucleotide
  source 1..15: mol_type = other DNA
aactatagaatgaac

SEQ ID NO: 7790 - protein, 5 aa, synthetic construct
  REGION 1..5: note = Description of Artificial Sequence: Synthetic peptide
NYRMN

SEQ ID NO: 7791 - DNA, 15 bp, synthetic construct
  misc_feature 1..15: note = Description of Artificial Sequence: Synthetic oligonucleotide
  source 1..15: mol_type = other DNA
agctttggcatgaac

SEQ ID NO: 7792 - protein, 5 aa, synthetic construct
  REGION 1..5: note = Description of Artificial Sequence: Synthetic peptide
SFGMN

SEQ ID NO: 7793 - DNA, 15 bp, synthetic construct
  misc_feature 1..15: note = Description of Artificial Sequence: Synthetic oligonucleotide
  source 1..15: mol_type = other DNA
agctatgccatgagc

SEQ ID NO: 7794 - protein, 5 aa, synthetic construct
  REGION 1..5: note = Description of Artificial Sequence: Synthetic peptide
SYAMS

SEQ ID NO: 7795 - DNA, 15 bp, synthetic construct
  misc_feature 1..15: note = Description of Artificial Sequence: Synthetic oligonucleotide
  source 1..15: mol_type = other DNA
agctatagcatgaac

SEQ ID NO: 7796 - protein, 5 aa, synthetic construct
  REGION 1..5: note = Description of Artificial Sequence: Synthetic peptide
SYSMN

SEQ ID NO: 7797 - DNA, 15 bp, synthetic construct
  misc_feature 1..15: note = Description of Artificial Sequence: Synthetic oligonucleotide
  source 1..15: mol_type = other DNA
acttctgccatgagc

SEQ ID NO: 7798 - protein, 5 aa, synthetic construct
  REGION 1..5: note = Description of Artificial Sequence: Synthetic peptide
TSAMS

SEQ ID NO: 7799 - DNA, 15 bp, synthetic construct
  misc_feature 1..15: note = Description of Artificial Sequence: Synthetic oligonucleotide
  source 1..15: mol_type = other DNA
ggctactatatgcac

SEQ ID NO: 7800 - protein, 5 aa, synthetic construct
  REGION 1..5: note = Description of Artificial Sequence: Synthetic peptide
GYYMH

SEQ ID NO: 7801 - DNA, 15 bp, synthetic construct
  misc_feature 1..15: note = Description of Artificial Sequence: Synthetic oligonucleotide
  source 1..15: mol_type = other DNA
gattactactggagc

SEQ ID NO: 7802 - protein, 5 aa, synthetic construct
  REGION 1..5: note = Description of Artificial Sequence: Synthetic peptide
DYYWS

SEQ ID NO: 7803 - DNA, 15 bp, synthetic construct
  misc_feature 1..15: note = Description of Artificial Sequence: Synthetic oligonucleotide
  source 1..15: mol_type = other DNA
agctatgccatgagc

SEQ ID NO: 7804 - protein, 5 aa, synthetic construct
  REGION 1..5: note = Description of Artificial Sequence: Synthetic peptide
SYAMS

SEQ ID NO: 7805 - DNA, 15 bp, synthetic construct
  misc_feature 1..15: note = Description of Artificial Sequence: Synthetic oligonucleotide
  source 1..15: mol_type = other DNA
agctatgccatgagc

SEQ ID NO: 7806 - protein, 5 aa, synthetic construct
  REGION 1..5: note = Description of Artificial Sequence: Synthetic peptide
SYAMS

SEQ ID NO: 7807 - DNA, 15 bp, synthetic construct
  misc_feature 1..15: note = Description of Artificial Sequence: Synthetic oligonucleotide
  source 1..15: mol_type = other DNA
cgctatggcatgcac

SEQ ID NO: 7808 - protein, 5 aa, synthetic construct
  REGION 1..5: note = Description of Artificial Sequence: Synthetic peptide
RYGMH

SEQ ID NO: 7809 - DNA, 15 bp, synthetic construct
  misc_feature 1..15: note = Description of Artificial Sequence: Synthetic oligonucleotide
  source 1..15: mol_type = other DNA
cgctatggcatgcac

SEQ ID NO: 7810 - protein, 5 aa, synthetic construct
  REGION 1..5: note = Description of Artificial Sequence: Synthetic peptide
RYGMH

SEQ ID NO: 7811 - DNA, 15 bp, synthetic construct
  misc_feature 1..15: note = Description of Artificial Sequence: Synthetic oligonucleotide
  source 1..15: mol_type = other DNA
acctatggcatgcac

SEQ ID NO: 7812 - protein, 5 aa, synthetic construct
  REGION 1..5: note = Description of Artificial Sequence: Synthetic peptide
TYGMH

SEQ ID NO: 7813 - DNA, 15 bp, synthetic construct
  misc_feature 1..15: note = Description of Artificial Sequence: Synthetic oligonucleotide
  source 1..15: mol_type = other DNA
ggctactttatgcac

SEQ ID NO: 7814 - protein, 5 aa, synthetic construct
  REGION 1..5: note = Description of Artificial Sequence: Synthetic peptide
GYFMH

SEQ ID NO: 7815 - DNA, 15 bp, synthetic construct
  misc_feature 1..15: note = Description of Artificial Sequence: Synthetic oligonucleotide
  source 1..15: mol_type = other DNA
agctatagcatgaac

SEQ ID NO: 7816 - protein, 5 aa, synthetic construct
  REGION 1..5: note = Description of Artificial Sequence: Synthetic peptide
SYSMN

SEQ ID NO: 7817 - DNA, 15 bp, synthetic construct
  misc_feature 1..15: note = Description of Artificial Sequence: Synthetic oligonucleotide
  source 1..15: mol_type = other DNA
ggctactttatgcac

SEQ ID NO: 7818 - protein, 5 aa, synthetic construct
  REGION 1..5: note = Description of Artificial Sequence: Synthetic peptide
GYFMH

SEQ ID NO: 7819 - DNA, 15 bp, synthetic construct
  misc_feature 1..15: note = Description of Artificial Sequence: Synthetic oligonucleotide
  source 1..15: mol_type = other DNA
ggctactttatgcac

SEQ ID NO: 7820 - protein, 5 aa, synthetic construct
  REGION 1..5: note = Description of Artificial Sequence: Synthetic peptide
GYFMH

SEQ ID NO: 7821 - DNA, 15 bp, synthetic construct
  misc_feature 1..15: note = Description of Artificial Sequence: Synthetic oligonucleotide
  source 1..15: mol_type = other DNA
agctatggcatggac

SEQ ID NO: 7822 - protein, 5 aa, synthetic construct
  REGION 1..5: note = Description of Artificial Sequence: Synthetic peptide
SYGMD

SEQ ID NO: 7823 - DNA, 15 bp, synthetic construct
  misc_feature 1..15: note = Description of Artificial Sequence: Synthetic oligonucleotide
  source 1..15: mol_type = other DNA
ggctactttatgcac

SEQ ID NO: 7824 - protein, 5 aa, synthetic construct
  REGION 1..5: note = Description of Artificial Sequence: Synthetic peptide
GYFMH

SEQ ID NO: 7825 - DNA, 15 bp, synthetic construct
  misc_feature 1..15: note = Description of Artificial Sequence: Synthetic oligonucleotide
  source 1..15: mol_type = other DNA
agctatggcatgcac

SEQ ID NO: 7826 - protein, 5 aa, synthetic construct
  REGION 1..5: note = Description of Artificial Sequence: Synthetic peptide
SYGMH

SEQ ID NO: 7827 - DNA, 15 bp, synthetic construct
  misc_feature 1..15: note = Description of Artificial Sequence: Synthetic oligonucleotide
  source 1..15: mol_type = other DNA
gactatggcatgcac

SEQ ID NO: 7828 - protein, 5 aa, synthetic construct
  REGION 1..5: note = Description of Artificial Sequence: Synthetic peptide
DYGMH

SEQ ID NO: 7829 - DNA, 15 bp, synthetic construct
  misc_feature 1..15: note = Description of Artificial Sequence: Synthetic oligonucleotide
  source 1..15: mol_type = other DNA
agctatgccatgagc

SEQ ID NO: 7830 - protein, 5 aa, synthetic construct
  REGION 1..5: note = Description of Artificial Sequence: Synthetic peptide
SYAMS

SEQ ID NO: 7831 - DNA, 15 bp, synthetic construct
  misc_feature 1..15: note = Description of Artificial Sequence: Synthetic oligonucleotide
  source 1..15: mol_type = other DNA
gactatgtcatgcac

SEQ ID NO: 7832 - protein, 5 aa, synthetic construct
  REGION 1..5: note = Description of Artificial Sequence: Synthetic peptide
DYVMH

SEQ ID NO: 7833 - DNA, 15 bp, synthetic construct
  misc_feature 1..15: note = Description of Artificial Sequence: Synthetic oligonucleotide
  source 1..15: mol_type = other DNA
gactatgtcatgcac

SEQ ID NO: 7834 - protein, 5 aa, synthetic construct
  REGION 1..5: note = Description of Artificial Sequence: Synthetic peptide
DYVMH

SEQ ID NO: 7835 - DNA, 21 bp, synthetic construct
  misc_feature 1..21: note = Description of Artificial Sequence: Synthetic oligonucleotide
  source 1..21: mol_type = other DNA
agtggtggttactactggagc

SEQ ID NO: 7836 - protein, 7 aa, synthetic construct
  REGION 1..7: note = Description of Artificial Sequence: Synthetic peptide
SGGYYWS

SEQ ID NO: 7837 - DNA, 15 bp, synthetic construct
  misc_feature 1..15: note = Description of Artificial Sequence: Synthetic oligonucleotide
  source 1..15: mol_type = other DNA
agctatggcatgcac

SEQ ID NO: 7838 - protein, 5 aa, synthetic construct
  REGION 1..5: note = Description of Artificial Sequence: Synthetic peptide
SYGMH

SEQ ID NO: 7839 - DNA, 15 bp, synthetic construct
  misc_feature 1..15: note = Description of Artificial Sequence: Synthetic oligonucleotide
  source 1..15: mol_type = other DNA
gattactactggagc

SEQ ID NO: 7840 - protein, 5 aa, synthetic construct
  REGION 1..5: note = Description of Artificial Sequence: Synthetic peptide
DYYWS

SEQ ID NO: 7841 - DNA, 15 bp, synthetic construct
  misc_feature 1..15: note = Description of Artificial Sequence: Synthetic oligonucleotide
  source 1..15: mol_type = other DNA
aattatgatatcaac

SEQ ID NO: 7842 - protein, 5 aa, synthetic construct
  REGION 1..5: note = Description of Artificial Sequence: Synthetic peptide
NYDIN

SEQ ID NO: 7843 - DNA, 15 bp, synthetic construct
  misc_feature 1..15: note = Description of Artificial Sequence: Synthetic oligonucleotide
  source 1..15: mol_type = other DNA
ggttgctactggagc

SEQ ID NO: 7844 - protein, 5 aa, synthetic construct
  REGION 1..5: note = Description of Artificial Sequence: Synthetic peptide
GCYWS

SEQ ID NO: 7845 - DNA, 15 bp, synthetic construct
  misc_feature 1..15: note = Description of Artificial Sequence: Synthetic oligonucleotide
  source 1..15: mol_type = other DNA
agttatggcatgcat

SEQ ID NO: 7846 - protein, 5 aa, synthetic construct
  REGION 1..5: note = Description of Artificial Sequence: Synthetic peptide
SYGMH

SEQ ID NO: 7847 - DNA, 15 bp, synthetic construct
  misc_feature 1..15: note = Description of Artificial Sequence: Synthetic oligonucleotide
  source 1..15: mol_type = other DNA
ggttgctactggagc

SEQ ID NO: 7848 - protein, 5 aa, synthetic construct
  REGION 1..5: note = Description of Artificial Sequence: Synthetic peptide
GCYWS

SEQ ID NO: 7849 - DNA, 15 bp, synthetic construct
  misc_feature 1..15: note = Description of Artificial Sequence: Synthetic oligonucleotide
  source 1..15: mol_type = other DNA
ggttgctactggagc

SEQ ID NO: 7850 - protein, 5 aa, synthetic construct
  REGION 1..5: note = Description of Artificial Sequence: Synthetic peptide
GCYWS

SEQ ID NO: 7851 - DNA, 21 bp, synthetic construct
  misc_feature 1..21: note = Description of Artificial Sequence: Synthetic oligonucleotide
  source 1..21: mol_type = other DNA
actggtggagtgggtgtgggc

SEQ ID NO: 7852 - protein, 7 aa, synthetic construct
  REGION 1..7: note = Description of Artificial Sequence: Synthetic peptide
TGGVGVG

SEQ ID NO: 7853 - DNA, 15 bp, synthetic construct
  misc_feature 1..15: note = Description of Artificial Sequence: Synthetic oligonucleotide
  source 1..15: mol_type = other DNA
ggttgctactggagc

SEQ ID NO: 7854 - protein, 5 aa, synthetic construct
  REGION 1..5: note = Description of Artificial Sequence: Synthetic peptide
GCYWS

SEQ ID NO: 7855 - DNA, 15 bp, synthetic construct
  misc_feature 1..15: note = Description of Artificial Sequence: Synthetic oligonucleotide
  source 1..15: mol_type = other DNA
ggttgctactggagc

SEQ ID NO: 7856 - protein, 5 aa, synthetic construct
  REGION 1..5: note = Description of Artificial Sequence: Synthetic peptide
GCYWS

SEQ ID NO: 7857 - DNA, 21 bp, synthetic construct
  misc_feature 1..21: note = Description of Artificial Sequence: Synthetic oligonucleotide
  source 1..21: mol_type = other DNA
aggagtagttactactggggc

SEQ ID NO: 7858 - protein, 7 aa, synthetic construct
  REGION 1..7: note = Description of Artificial Sequence: Synthetic peptide
RSSYYWG

SEQ ID NO: 7859 - DNA, 15 bp, synthetic construct
  misc_feature 1..15: note = Description of Artificial Sequence: Synthetic oligonucleotide
  source 1..15: mol_type = other DNA
ggttgctactggagc

SEQ ID NO: 7860 - protein, 5 aa, synthetic construct
  REGION 1..5: note = Description of Artificial Sequence: Synthetic peptide
GCYWS

SEQ ID NO: 7861 - DNA, 15 bp, synthetic construct
  misc_feature 1..15: note = Description of Artificial Sequence: Synthetic oligonucleotide
  source 1..15: mol_type = other DNA
aattatgatatcaac

SEQ ID NO: 7862 - protein, 5 aa, synthetic construct
  REGION 1..5: note = Description of Artificial Sequence: Synthetic peptide
NYDIN

SEQ ID NO: 7863 - DNA, 15 bp, synthetic construct
  misc_feature 1..15: note = Description of Artificial Sequence: Synthetic oligonucleotide
  source 1..15: mol_type = other DNA
aattatgatatcaac

SEQ ID NO: 7864 - protein, 5 aa, synthetic construct
  REGION 1..5: note = Description of Artificial Sequence: Synthetic peptide
NYDIN

SEQ ID NO: 7865 - DNA, 15 bp, synthetic construct
  misc_feature 1..15: note = Description of Artificial Sequence: Synthetic oligonucleotide
  source 1..15: mol_type = other DNA
aattatgatatcaac

SEQ ID NO: 7866 - protein, 5 aa, synthetic construct
  REGION 1..5: note = Description of Artificial Sequence: Synthetic peptide
NYDIN

SEQ ID NO: 7867 - DNA, 15 bp, synthetic construct
  misc_feature 1..15: note = Description of Artificial Sequence: Synthetic oligonucleotide
  source 1..15: mol_type = other DNA
ggttgctactggagc

SEQ ID NO: 7868 - protein, 5 aa, synthetic construct
  REGION 1..5: note = Description of Artificial Sequence: Synthetic peptide
GCYWS

SEQ ID NO: 7869 - DNA, 15 bp, synthetic construct
  misc_feature 1..15: note = Description of Artificial Sequence: Synthetic oligonucleotide
  source 1..15: mol_type = other DNA
aactacgacatgcac

SEQ ID NO: 7870 - protein, 5 aa, synthetic construct
  REGION 1..5: note = Description of Artificial Sequence: Synthetic peptide
NYDMH

SEQ ID NO: 7871 - DNA, 21 bp, synthetic construct
  misc_feature 1..21: note = Description of Artificial Sequence: Synthetic oligonucleotide
  source 1..21: mol_type = other DNA
actggtggagtgggtgtgggc

SEQ ID NO: 7872 - protein, 7 aa, synthetic construct
  REGION 1..7: note = Description of Artificial Sequence: Synthetic peptide
TGGVGVG

SEQ ID NO: 7873 - DNA, 15 bp, synthetic construct
  misc_feature 1..15: note = Description of Artificial Sequence: Synthetic oligonucleotide
  source 1..15: mol_type = other DNA
aattatgatatcaac

SEQ ID NO: 7874 - protein, 5 aa, synthetic construct
  REGION 1..5: note = Description of Artificial Sequence: Synthetic peptide
NYDIN

SEQ ID NO: 7875 - DNA, 15 bp, synthetic construct
  misc_feature 1..15: note = Description of Artificial Sequence: Synthetic oligonucleotide
  source 1..15: mol_type = other DNA
aacgcctggatgaac

SEQ ID NO: 7876 - protein, 5 aa, synthetic construct
  REGION 1..5: note = Description of Artificial Sequence: Synthetic peptide
NAWMN

SEQ ID NO: 7877 - DNA, 15 bp, synthetic construct
  misc_feature 1..15: note = Description of Artificial Sequence: Synthetic oligonucleotide
  source 1..15: mol_type = other DNA
aactatggcatgcac

SEQ ID NO: 7878 - protein, 5 aa, synthetic construct
  REGION 1..5: note = Description of Artificial Sequence: Synthetic peptide
NYGMH

SEQ ID NO: 7879 - DNA, 15 bp, synthetic construct
  misc_feature 1..15: note = Description of Artificial Sequence: Synthetic oligonucleotide
  source 1..15: mol_type = other DNA
aattatgatattaat

SEQ ID NO: 7880 - protein, 5 aa, synthetic construct
  REGION 1..5: note = Description of Artificial Sequence: Synthetic peptide
NYDIN

SEQ ID NO: 7881 - DNA, 15 bp, synthetic construct
  misc_feature 1..15: note = Description of Artificial Sequence: Synthetic oligonucleotide
  source 1..15: mol_type = other DNA
aattatgatattaat

SEQ ID NO: 7882 - protein, 5 aa, synthetic construct
  REGION 1..5: note = Description of Artificial Sequence: Synthetic peptide
NYDIN

SEQ ID NO: 7883 - DNA, 15 bp, synthetic construct
  misc_feature 1..15: note = Description of Artificial Sequence: Synthetic oligonucleotide
  source 1..15: mol_type = other DNA
aattatgatattaat

SEQ ID NO: 7884 - protein, 5 aa, synthetic construct
  REGION 1..5: note = Description of Artificial Sequence: Synthetic peptide
NYDIN

SEQ ID NO: 7885 - DNA, 15 bp, synthetic construct
  misc_feature 1..15: note = Description of Artificial Sequence: Synthetic oligonucleotide
  source 1..15: mol_type = other DNA
aattatgatattaat

SEQ ID NO: 7886 - protein, 5 aa, synthetic construct
  REGION 1..5: note = Description of Artificial Sequence: Synthetic peptide
NYDIN

SEQ ID NO: 7887 - DNA, 15 bp, synthetic construct
  misc_feature 1..15: note = Description of Artificial Sequence: Synthetic oligonucleotide
  source 1..15: mol_type = other DNA
aattatgatattaat

SEQ ID NO: 7888 - protein, 5 aa, synthetic construct
  REGION 1..5: note = Description of Artificial Sequence: Synthetic peptide
NYDIN

SEQ ID NO: 7889 - DNA, 15 bp, synthetic construct
  misc_feature 1..15: note = Description of Artificial Sequence: Synthetic oligonucleotide
  source 1..15: mol_type = other DNA
aattatgatattaat

SEQ ID NO: 7890 - protein, 5 aa, synthetic construct
  REGION 1..5: note = Description of Artificial Sequence: Synthetic peptide
NYDIN

SEQ ID NO: 7891 - DNA, 15 bp, synthetic construct
  misc_feature 1..15: note = Description of Artificial Sequence: Synthetic oligonucleotide
  source 1..15: mol_type = other DNA
aattatgatattaat

SEQ ID NO: 7892 - protein, 5 aa, synthetic construct
  REGION 1..5: note = Description of Artificial Sequence: Synthetic peptide
NYDIN

SEQ ID NO: 7893 - DNA, 15 bp, synthetic construct
  misc_feature 1..15: note = Description of Artificial Sequence: Synthetic oligonucleotide
  source 1..15: mol_type = other DNA
aattatgatattaat

SEQ ID NO: 7894 - protein, 5 aa, synthetic construct
  REGION 1..5: note = Description of Artificial Sequence: Synthetic peptide
NYDIN

SEQ ID NO: 7895 - DNA, 15 bp, synthetic construct
  misc_feature 1..15: note = Description of Artificial Sequence: Synthetic oligonucleotide
  source 1..15: mol_type = other DNA
aattatgatattaat

SEQ ID NO: 7896 - protein, 5 aa, synthetic construct
  REGION 1..5: note = Description of Artificial Sequence: Synthetic peptide
NYDIN

SEQ ID NO: 7897 - DNA, 15 bp, synthetic construct
  misc_feature 1..15: note = Description of Artificial Sequence: Synthetic oligonucleotide
  source 1..15: mol_type = other DNA
aattatgatattaat

SEQ ID NO: 7898 - protein, 5 aa, synthetic construct
  REGION 1..5: note = Description of Artificial Sequence: Synthetic peptide
NYDIN

SEQ ID NO: 7899 - DNA, 15 bp, synthetic construct
  misc_feature 1..15: note = Description of Artificial Sequence: Synthetic oligonucleotide
  source 1..15: mol_type = other DNA
aattatgatattaat

SEQ ID NO: 7900 - protein, 5 aa, synthetic construct
  REGION 1..5: note = Description of Artificial Sequence: Synthetic peptide
NYDIN

SEQ ID NO: 7901 - DNA, 15 bp, synthetic construct
  misc_feature 1..15: note = Description of Artificial Sequence: Synthetic oligonucleotide
  source 1..15: mol_type = other DNA
aattatgatattaat

SEQ ID NO: 7902 - protein, 5 aa, synthetic construct
  REGION 1..5: note = Description of Artificial Sequence: Synthetic peptide
NYDIN

SEQ ID NO: 7903 - DNA, 15 bp, synthetic construct
  misc_feature 1..15: note = Description of Artificial Sequence: Synthetic oligonucleotide
  source 1..15: mol_type = other DNA
aattatgatatcaac

SEQ ID NO: 7904 - protein, 5 aa, synthetic construct
  REGION 1..5: note = Description of Artificial Sequence: Synthetic peptide
NYDIN

SEQ ID NO: 7905 - DNA, 15 bp, synthetic construct
  misc_feature 1..15: note = Description of Artificial Sequence: Synthetic oligonucleotide
  source 1..15: mol_type = other DNA
aattatgatatcaac

SEQ ID NO: 7906 - protein, 5 aa, synthetic construct
  REGION 1..5: note = Description of Artificial Sequence: Synthetic peptide
NYDIN

SEQ ID NO: 7907 - DNA, 15 bp, synthetic construct
  misc_feature 1..15: note = Description of Artificial Sequence: Synthetic oligonucleotide
  source 1..15: mol_type = other DNA
aattatgatatcaac

SEQ ID NO: 7908 - protein, 5 aa, synthetic construct
  REGION 1..5: note = Description of Artificial Sequence: Synthetic peptide
NYDIN

SEQ ID NO: 7909 - DNA, 15 bp, synthetic construct
  misc_feature 1..15: note = Description of Artificial Sequence: Synthetic oligonucleotide
  source 1..15: mol_type = other DNA
aattatgatatcaac

SEQ ID NO: 7910 - protein, 5 aa, synthetic construct
  REGION 1..5: note = Description of Artificial Sequence: Synthetic peptide
NYDIN

SEQ ID NO: 7911 - DNA, 15 bp, synthetic construct
  misc_feature 1..15: note = Description of Artificial Sequence: Synthetic oligonucleotide
  source 1..15: mol_type = other DNA
aattatgatatcaac

SEQ ID NO: 7912 - protein, 5 aa, synthetic construct
  REGION 1..5: note = Description of Artificial Sequence: Synthetic peptide
NYDIN

SEQ ID NO: 7913 - DNA, 15 bp, synthetic construct
  misc_feature 1..15: note = Description of Artificial Sequence: Synthetic oligonucleotide
  source 1..15: mol_type = other DNA
aattatgatatcaac

SEQ ID NO: 7914 - protein, 5 aa, synthetic construct
  REGION 1..5: note = Description of Artificial Sequence: Synthetic peptide
NYDIN

SEQ ID NO: 7915 - DNA, 15 bp, synthetic construct
  misc_feature 1..15: note = Description of Artificial Sequence: Synthetic oligonucleotide
  source 1..15: mol_type = other DNA
aattatgatatcaac

SEQ ID NO: 7916 - protein, 5 aa, synthetic construct
  REGION 1..5: note = Description of Artificial Sequence: Synthetic peptide
NYDIN

SEQ ID NO: 7917 - DNA, 15 bp, synthetic construct
  misc_feature 1..15: note = Description of Artificial Sequence: Synthetic oligonucleotide
  source 1..15: mol_type = other DNA
aattatgatatcaac

SEQ ID NO: 7918 - protein, 5 aa, synthetic construct
  REGION 1..5: note = Description of Artificial Sequence: Synthetic peptide
NYDIN

SEQ ID NO: 7919 - DNA, 15 bp, synthetic construct
  misc_feature 1..15: note = Description of Artificial Sequence: Synthetic oligonucleotide
  source 1..15: mol_type = other DNA
aattatgatatcaac

SEQ ID NO: 7920 - protein, 5 aa, synthetic construct
  REGION 1..5: note = Description of Artificial Sequence: Synthetic peptide
NYDIN

SEQ ID NO: 7921 - DNA, 15 bp, synthetic construct
  misc_feature 1..15: note = Description of Artificial Sequence: Synthetic oligonucleotide
  source 1..15: mol_type = other DNA
aattatgatatcaac

SEQ ID NO: 7922 - protein, 5 aa, synthetic construct
  REGION 1..5: note = Description of Artificial Sequence: Synthetic peptide
NYDIN

SEQ ID NO: 7923 - DNA, 15 bp, synthetic construct
  misc_feature 1..15: note = Description of Artificial Sequence: Synthetic oligonucleotide
  source 1..15: mol_type = other DNA
aattatgatatcaac

SEQ ID NO: 7924 - protein, 5 aa, synthetic construct
  REGION 1..5: note = Description of Artificial Sequence: Synthetic peptide
NYDIN

SEQ ID NO: 7925 - DNA, 15 bp, synthetic construct
  misc_feature 1..15: note = Description of Artificial Sequence: Synthetic oligonucleotide
  source 1..15: mol_type = other DNA
aattatgatatcaac

SEQ ID NO: 7926 - protein, 5 aa, synthetic construct
  REGION 1..5: note = Description of Artificial Sequence: Synthetic peptide
NYDIN

SEQ ID NO: 7927 - DNA, 15 bp, synthetic construct
  misc_feature 1..15: note = Description of Artificial Sequence: Synthetic oligonucleotide
  source 1..15: mol_type = other DNA
aattatgatatcaac

SEQ ID NO: 7928 - protein, 5 aa, synthetic construct
  REGION 1..5: note = Description of Artificial Sequence: Synthetic peptide
NYDIN

SEQ ID NO: 7929 - DNA, 15 bp, synthetic construct
  misc_feature 1..15: note = Description of Artificial Sequence: Synthetic oligonucleotide
  source 1..15: mol_type = other DNA
aattatgatatcaac

SEQ ID NO: 7930 - protein, 5 aa, synthetic construct
  REGION 1..5: note = Description of Artificial Sequence: Synthetic peptide
NYDIN

SEQ ID NO: 7931 - DNA, 15 bp, synthetic construct
  misc_feature 1..15: note = Description of Artificial Sequence: Synthetic oligonucleotide
  source 1..15: mol_type = other DNA
aattatgatatcaac

SEQ ID NO: 7932 - protein, 5 aa, synthetic construct
  REGION 1..5: note = Description of Artificial Sequence: Synthetic peptide
NYDIN

SEQ ID NO: 7933 - DNA, 15 bp, synthetic construct
  misc_feature 1..15: note = Description of Artificial Sequence: Synthetic oligonucleotide
  source 1..15: mol_type = other DNA
aattatgatatcaac

SEQ ID NO: 7934 - protein, 5 aa, synthetic construct
  REGION 1..5: note = Description of Artificial Sequence: Synthetic peptide
NYDIN

SEQ ID NO: 7935 - DNA, 15 bp, synthetic construct
  misc_feature 1..15: note = Description of Artificial Sequence: Synthetic oligonucleotide
  source 1..15: mol_type = other DNA
aattatgatatcaac

SEQ ID NO: 7936 - protein, 5 aa, synthetic construct
  REGION 1..5: note = Description of Artificial Sequence: Synthetic peptide
NYDIN

SEQ ID NO: 7937 - DNA, 15 bp, synthetic construct
  misc_feature 1..15: note = Description of Artificial Sequence: Synthetic oligonucleotide
  source 1..15: mol_type = other DNA
aattatgatatcaac

SEQ ID NO: 7938 - protein, 5 aa, synthetic construct
  REGION 1..5: note = Description of Artificial Sequence: Synthetic peptide
NYDIN

SEQ ID NO: 7939 - DNA, 15 bp, synthetic construct
  misc_feature 1..15: note = Description of Artificial Sequence: Synthetic oligonucleotide
  source 1..15: mol_type = other DNA
gactactatttgcac

SEQ ID NO: 7940 - protein, 5 aa, synthetic construct
  REGION 1..5: note = Description of Artificial Sequence: Synthetic peptide
DYYLH

SEQ ID NO: 7941 - DNA, 15 bp, synthetic construct
  misc_feature 1..15: note = Description of Artificial Sequence: Synthetic oligonucleotide
  source 1..15: mol_type = other DNA
gactactatttgcac

SEQ ID NO: 7942 - protein, 5 aa, synthetic construct
  REGION 1..5: note = Description of Artificial Sequence: Synthetic peptide
DYYLH

SEQ ID NO: 7943 - DNA, 15 bp, synthetic construct
  misc_feature 1..15: note = Description of Artificial Sequence: Synthetic oligonucleotide
  source 1..15: mol_type = other DNA
gactactatttgcac

SEQ ID NO: 7944 - protein, 5 aa, synthetic construct
  REGION 1..5: note = Description of Artificial Sequence: Synthetic peptide
DYYLH

SEQ ID NO: 7945 - DNA, 15 bp, synthetic construct
  misc_feature 1..15: note = Description of Artificial Sequence: Synthetic oligonucleotide
  source 1..15: mol_type = other DNA
gactactatttgcac

SEQ ID NO: 7946 - protein, 5 aa, synthetic construct
  REGION 1..5: note = Description of Artificial Sequence: Synthetic peptide
DYYLH

SEQ ID NO: 7947 - DNA, 15 bp, synthetic construct
  misc_feature 1..15: note = Description of Artificial Sequence: Synthetic oligonucleotide
  source 1..15: mol_type = other DNA
gactactatttgcac

SEQ ID NO: 7948 - protein, 5 aa, synthetic construct
  REGION 1..5: note = Description of Artificial Sequence: Synthetic peptide
DYYLH

SEQ ID NO: 7949 - DNA, 15 bp, synthetic construct
  misc_feature 1..15: note = Description of Artificial Sequence: Synthetic oligonucleotide
  source 1..15: mol_type = other DNA
gactactatttgcac

SEQ ID NO: 7950 - protein, 5 aa, synthetic construct
  REGION 1..5: note = Description of Artificial Sequence: Synthetic peptide
DYYLH

SEQ ID NO: 7951 - DNA, 15 bp, synthetic construct
  misc_feature 1..15: note = Description of Artificial Sequence: Synthetic oligonucleotide
  source 1..15: mol_type = other DNA
gactactatttgcac

SEQ ID NO: 7952 - protein, 5 aa, synthetic construct
  REGION 1..5: note = Description of Artificial Sequence: Synthetic peptide
DYYLH

SEQ ID NO: 7953 - DNA, 15 bp, synthetic construct
  misc_feature 1..15: note = Description of Artificial Sequence: Synthetic oligonucleotide
  source 1..15: mol_type = other DNA
gactactatttgcac

SEQ ID NO: 7954 - protein, 5 aa, synthetic construct
  REGION 1..5: note = Description of Artificial Sequence: Synthetic peptide
DYYLH

SEQ ID NO: 7955 - DNA, 15 bp, synthetic construct
  misc_feature 1..15: note = Description of Artificial Sequence: Synthetic oligonucleotide
  source 1..15: mol_type = other DNA
aactatgtcatgcac

SEQ ID NO: 7956 - protein, 5 aa, synthetic construct
  REGION 1..5: note = Description of Artificial Sequence: Synthetic peptide
NYVMH

SEQ ID NO: 7957 - DNA, 15 bp, synthetic construct
  misc_feature 1..15: note = Description of Artificial Sequence: Synthetic oligonucleotide
  source 1..15: mol_type = other DNA
aactatgtcatgcac

SEQ ID NO: 7958 - protein, 5 aa, synthetic construct
  REGION 1..5: note = Description of Artificial Sequence: Synthetic peptide
NYVMH

SEQ ID NO: 7959 - DNA, 15 bp, synthetic construct
  misc_feature 1..15: note = Description of Artificial Sequence: Synthetic oligonucleotide
  source 1..15: mol_type = other DNA
aactatgtcatgcac

SEQ ID NO: 7960 - protein, 5 aa, synthetic construct
  REGION 1..5: note = Description of Artificial Sequence: Synthetic peptide
NYVMH

SEQ ID NO: 7961 - DNA, 15 bp, synthetic construct
  misc_feature 1..15: note = Description of Artificial Sequence: Synthetic oligonucleotide
  source 1..15: mol_type = other DNA
aactatgtcatgcac

SEQ ID NO: 7962 - protein, 5 aa, synthetic construct
  REGION 1..5: note = Description of Artificial Sequence: Synthetic peptide
NYVMH

SEQ ID NO: 7963 - DNA, 15 bp, synthetic construct
  misc_feature 1..15: note = Description of Artificial Sequence: Synthetic oligonucleotide
  source 1..15: mol_type = other DNA
aactatgtcatgcac

SEQ ID NO: 7964 - protein, 5 aa, synthetic construct
  REGION 1..5: note = Description of Artificial Sequence: Synthetic peptide
NYVMH

SEQ ID NO: 7965 - DNA, 15 bp, synthetic construct
  misc_feature 1..15: note = Description of Artificial Sequence: Synthetic oligonucleotide
  source 1..15: mol_type = other DNA
aactatgtcatgcac

SEQ ID NO: 7966 - protein, 5 aa, synthetic construct
  REGION 1..5: note = Description of Artificial Sequence: Synthetic peptide
NYVMH

SEQ ID NO: 7967 - DNA, 15 bp, synthetic construct
  misc_feature 1..15: note = Description of Artificial Sequence: Synthetic oligonucleotide
  source 1..15: mol_type = other DNA
aactatgtcatgcac

SEQ ID NO: 7968 - protein, 5 aa, synthetic construct
  REGION 1..5: note = Description of Artificial Sequence: Synthetic peptide
NYVMH

SEQ ID NO: 7969 - DNA, 15 bp, synthetic construct
  misc_feature 1..15: note = Description of Artificial Sequence: Synthetic oligonucleotide
  source 1..15: mol_type = other DNA
aactatgtcatgcac

SEQ ID NO: 7970 - protein, 5 aa, synthetic construct
  REGION 1..5: note = Description of Artificial Sequence: Synthetic peptide
NYVMH

SEQ ID NO: 7971 - DNA, 15 bp, synthetic construct
  misc_feature 1..15: note = Description of Artificial Sequence: Synthetic oligonucleotide
  source 1..15: mol_type = other DNA
aactatgtcatgcac

SEQ ID NO: 7972 - protein, 5 aa, synthetic construct
  REGION 1..5: note = Description of Artificial Sequence: Synthetic peptide
NYVMH

SEQ ID NO: 7973 - DNA, 15 bp, synthetic construct
  misc_feature 1..15: note = Description of Artificial Sequence: Synthetic oligonucleotide
  source 1..15: mol_type = other DNA
aactatgtcatgcac

SEQ ID NO: 7974 - protein, 5 aa, synthetic construct
  REGION 1..5: note = Description of Artificial Sequence: Synthetic peptide
NYVMH

SEQ ID NO: 7975 - DNA, 15 bp, synthetic construct
  misc_feature 1..15: note = Description of Artificial Sequence: Synthetic oligonucleotide
  source 1..15: mol_type = other DNA
aactatgtcatgcac

SEQ ID NO: 7976 - protein, 5 aa, synthetic construct
  REGION 1..5: note = Description of Artificial Sequence: Synthetic peptide
NYVMH

SEQ ID NO: 7977 - DNA, 15 bp, synthetic construct
  misc_feature 1..15: note = Description of Artificial Sequence: Synthetic oligonucleotide
  source 1..15: mol_type = other DNA
aactatgtcatgcac

SEQ ID NO: 7978 - protein, 5 aa, synthetic construct
  REGION 1..5: note = Description of Artificial Sequence: Synthetic peptide
NYVMH

SEQ ID NO: 7979 - DNA, 15 bp, synthetic construct
  misc_feature 1..15: note = Description of Artificial Sequence: Synthetic oligonucleotide
  source 1..15: mol_type = other DNA
aactatgtcatgcac

SEQ ID NO: 7980 - protein, 5 aa, synthetic construct
  REGION 1..5: note = Description of Artificial Sequence: Synthetic peptide
NYVMH

SEQ ID NO: 7981 - DNA, 15 bp, synthetic construct
  misc_feature 1..15: note = Description of Artificial Sequence: Synthetic oligonucleotide
  source 1..15: mol_type = other DNA
aactatgtcatgcac

SEQ ID NO: 7982 - protein, 5 aa, synthetic construct
  REGION 1..5: note = Description of Artificial Sequence: Synthetic peptide
NYVMH

SEQ ID NO: 7983 - DNA, 15 bp, synthetic construct
  misc_feature 1..15: note = Description of Artificial Sequence: Synthetic oligonucleotide
  source 1..15: mol_type = other DNA
agctttggcatgcac

SEQ ID NO: 7984 - protein, 5 aa, synthetic construct
  REGION 1..5: note = Description of Artificial Sequence: Synthetic peptide
SFGMH

SEQ ID NO: 7985 - DNA, 15 bp, synthetic construct
  misc_feature 1..15: note = Description of Artificial Sequence: Synthetic oligonucleotide
  source 1..15: mol_type = other DNA
agctttggcatgcac

SEQ ID NO: 7986 - protein, 5 aa, synthetic construct
  REGION 1..5: note = Description of Artificial Sequence: Synthetic peptide
SFGMH

SEQ ID NO: 7987 - DNA, 15 bp, synthetic construct
  misc_feature 1..15: note = Description of Artificial Sequence: Synthetic oligonucleotide
  source 1..15: mol_type = other DNA
agctttggcatgcac

SEQ ID NO: 7988 - protein, 5 aa, synthetic construct
  REGION 1..5: note = Description of Artificial Sequence: Synthetic peptide
SFGMH

SEQ ID NO: 7989 - DNA, 15 bp, synthetic construct
  misc_feature 1..15: note = Description of Artificial Sequence: Synthetic oligonucleotide
  source 1..15: mol_type = other DNA
agctttggcatgcac

SEQ ID NO: 7990 - protein, 5 aa, synthetic construct
  REGION 1..5: note = Description of Artificial Sequence: Synthetic peptide
SFGMH

SEQ ID NO: 7991 - DNA, 15 bp, synthetic construct
  misc_feature 1..15: note = Description of Artificial Sequence: Synthetic oligonucleotide
  source 1..15: mol_type = other DNA
agctttggcatgcac

SEQ ID NO: 7992 - protein, 5 aa, synthetic construct
  REGION 1..5: note = Description of Artificial Sequence: Synthetic peptide
SFGMH

SEQ ID NO: 7993 - DNA, 15 bp, synthetic construct
  misc_feature 1..15: note = Description of Artificial Sequence: Synthetic oligonucleotide
  source 1..15: mol_type = other DNA
agctttggcatgcac

SEQ ID NO: 7994 - protein, 5 aa, synthetic construct
  REGION 1..5: note = Description of Artificial Sequence: Synthetic peptide
SFGMH

SEQ ID NO: 7995 - DNA, 15 bp, synthetic construct
  misc_feature 1..15: note = Description of Artificial Sequence: Synthetic oligonucleotide
  source 1..15: mol_type = other DNA
agctttggcatgcac

SEQ ID NO: 7996 - protein, 5 aa, synthetic construct
  REGION 1..5: note = Description of Artificial Sequence: Synthetic peptide
SFGMH

SEQ ID NO: 7997 - DNA, 15 bp, synthetic construct
  misc_feature 1..15: note = Description of Artificial Sequence: Synthetic oligonucleotide
  source 1..15: mol_type = other DNA
agctttggcatgcac

SEQ ID NO: 7998 - protein, 5 aa, synthetic construct
  REGION 1..5: note = Description of Artificial Sequence: Synthetic peptide
SFGMH

SEQ ID NO: 7999 - DNA, 15 bp, synthetic construct
  misc_feature 1..15: note = Description of Artificial Sequence: Synthetic oligonucleotide
  source 1..15: mol_type = other DNA
agctttggcatgcac

SEQ ID NO: 8000 - protein, 5 aa, synthetic construct
  REGION 1..5: note = Description of Artificial Sequence: Synthetic peptide
SFGMH

SEQ ID NO: 8001 - DNA, 15 bp, synthetic construct
  misc_feature 1..15: note = Description of Artificial Sequence: Synthetic oligonucleotide
  source 1..15: mol_type = other DNA
agctttggcatgcac

SEQ ID NO: 8002 - protein, 5 aa, synthetic construct
  REGION 1..5: note = Description of Artificial Sequence: Synthetic peptide
SFGMH

SEQ ID NO: 8003 - DNA, 15 bp, synthetic construct
  misc_feature 1..15: note = Description of Artificial Sequence: Synthetic oligonucleotide
  source 1..15: mol_type = other DNA
agctttggcatgcac

SEQ ID NO: 8004 - protein, 5 aa, synthetic construct
  REGION 1..5: note = Description of Artificial Sequence: Synthetic peptide
SFGMH

SEQ ID NO: 8005 - DNA, 15 bp, synthetic construct
  misc_feature 1..15: note = Description of Artificial Sequence: Synthetic oligonucleotide
  source 1..15: mol_type = other DNA
agctttggcatgcac

SEQ ID NO: 8006 - protein, 5 aa, synthetic construct
  REGION 1..5: note = Description of Artificial Sequence: Synthetic peptide
SFGMH

SEQ ID NO: 8007 - DNA, 15 bp, synthetic construct
  misc_feature 1..15: note = Description of Artificial Sequence: Synthetic oligonucleotide
  source 1..15: mol_type = other DNA
agctttggcatgcac

SEQ ID NO: 8008 - protein, 5 aa, synthetic construct
  REGION 1..5: note = Description of Artificial Sequence: Synthetic peptide
SFGMH

SEQ ID NO: 8009 - DNA, 15 bp, synthetic construct
  misc_feature 1..15: note = Description of Artificial Sequence: Synthetic oligonucleotide
  source 1..15: mol_type = other DNA
agctttggcatgcac

SEQ ID NO: 8010 - protein, 5 aa, synthetic construct
  REGION 1..5: note = Description of Artificial Sequence: Synthetic peptide
SFGMH

SEQ ID NO: 8011 - DNA, 15 bp, synthetic construct
  misc_feature 1..15: note = Description of Artificial Sequence: Synthetic oligonucleotide
  source 1..15: mol_type = other DNA
agctttggcatgcac

SEQ ID NO: 8012 - protein, 5 aa, synthetic construct
  REGION 1..5: note = Description of Artificial Sequence: Synthetic peptide
SFGMH

SEQ ID NO: 8013 - DNA, 15 bp, synthetic construct
  misc_feature 1..15: note = Description of Artificial Sequence: Synthetic oligonucleotide
  source 1..15: mol_type = other DNA
agctttggcatgcac

SEQ ID NO: 8014 - protein, 5 aa, synthetic construct
  REGION 1..5: note = Description of Artificial Sequence: Synthetic peptide
SFGMH

SEQ ID NO: 8015 - DNA, 15 bp, synthetic construct
  misc_feature 1..15: note = Description of Artificial Sequence: Synthetic oligonucleotide
  source 1..15: mol_type = other DNA
agctttggcatgcac

SEQ ID NO: 8016 - protein, 5 aa, synthetic construct
  REGION 1..5: note = Description of Artificial Sequence: Synthetic peptide
SFGMH

SEQ ID NO: 8017 - DNA, 15 bp, synthetic construct
  misc_feature 1..15: note = Description of Artificial Sequence: Synthetic oligonucleotide
  source 1..15: mol_type = other DNA
agctttggcatgcac

SEQ ID NO: 8018 - protein, 5 aa, synthetic construct
  REGION 1..5: note = Description of Artificial Sequence: Synthetic peptide
SFGMH

SEQ ID NO: 8019 - DNA, 15 bp, synthetic construct
  misc_feature 1..15: note = Description of Artificial Sequence: Synthetic oligonucleotide
  source 1..15: mol_type = other DNA
agctttggcatgcac

SEQ ID NO: 8020 - protein, 5 aa, synthetic construct
  REGION 1..5: note = Description of Artificial Sequence: Synthetic peptide
SFGMH

SEQ ID NO: 8021 - DNA, 15 bp, synthetic construct
  misc_feature 1..15: note = Description of Artificial Sequence: Synthetic oligonucleotide
  source 1..15: mol_type = other DNA
agctttggcatgcac

SEQ ID NO: 8022 - protein, 5 aa, synthetic construct
  REGION 1..5: note = Description of Artificial Sequence: Synthetic peptide
SFGMH

SEQ ID NO: 8023 - DNA, 15 bp, synthetic construct
  misc_feature 1..15: note = Description of Artificial Sequence: Synthetic oligonucleotide
  source 1..15: mol_type = other DNA
agctttggcatgcac

SEQ ID NO: 8024 - protein, 5 aa, synthetic construct
  REGION 1..5: note = Description of Artificial Sequence: Synthetic peptide
SFGMH

SEQ ID NO: 8025 - DNA, 21 bp, synthetic construct
  misc_feature 1..21: note = Description of Artificial Sequence: Synthetic oligonucleotide
  source 1..21: mol_type = other DNA
aacagtggttactactggagc

SEQ ID NO: 8026 - protein, 7 aa, synthetic construct
  REGION 1..7: note = Description of Artificial Sequence: Synthetic peptide
NSGYYWS

SEQ ID NO: 8027 - DNA, 15 bp, synthetic construct
  misc_feature 1..15: note = Description of Artificial Sequence: Synthetic oligonucleotide
  source 1..15: mol_type = other DNA
ggctactatatacac

SEQ ID NO: 8028 - protein, 5 aa, synthetic construct
  REGION 1..5: note = Description of Artificial Sequence: Synthetic peptide
GYYIH

SEQ ID NO: 8029 - DNA, 15 bp, synthetic construct
  misc_feature 1..15: note = Description of Artificial Sequence: Synthetic oligonucleotide
  source 1..15: mol_type = other DNA
ggctactatatacac

SEQ ID NO: 8030 - protein, 5 aa, synthetic construct
  REGION 1..5: note = Description of Artificial Sequence: Synthetic peptide
GYYIH

SEQ ID NO: 8031 - DNA, 15 bp, synthetic construct
  misc_feature 1..15: note = Description of Artificial Sequence: Synthetic oligonucleotide
  source 1..15: mol_type = other DNA
aattatgatattaat

SEQ ID NO: 8032 - protein, 5 aa, synthetic construct
  REGION 1..5: note = Description of Artificial Sequence: Synthetic peptide
NYDIN

SEQ ID NO: 8033 - DNA, 15 bp, synthetic construct
  misc_feature 1..15: note = Description of Artificial Sequence: Synthetic oligonucleotide
  source 1..15: mol_type = other DNA
gactactatttgcac

SEQ ID NO: 8034 - protein, 5 aa, synthetic construct
  REGION 1..5: note = Description of Artificial Sequence: Synthetic peptide
DYYLH

SEQ ID NO: 8035 - DNA, 15 bp, synthetic construct
  misc_feature 1..15: note = Description of Artificial Sequence: Synthetic oligonucleotide
  source 1..15: mol_type = other DNA
agctttggcatgcac

SEQ ID NO: 8036 - protein, 5 aa, synthetic construct
  REGION 1..5: note = Description of Artificial Sequence: Synthetic peptide
SFGMH

SEQ ID NO: 8037 - DNA, 15 bp, synthetic construct
  misc_feature 1..15: note = Description of Artificial Sequence: Synthetic oligonucleotide
  source 1..15: mol_type = other DNA
aattatgatatcaac

SEQ ID NO: 8038 - protein, 5 aa, synthetic construct
  REGION 1..5: note = Description of Artificial Sequence: Synthetic peptide
NYDIN

SEQ ID NO: 8039 - DNA, 15 bp, synthetic construct
  misc_feature 1..15: note = Description of Artificial Sequence: Synthetic oligonucleotide
  source 1..15: mol_type = other DNA
aattatgatatcaac

SEQ ID NO: 8040 - protein, 5 aa, synthetic construct
  REGION 1..5: note = Description of Artificial Sequence: Synthetic peptide
NYDIN

SEQ ID NO: 8041 - DNA, 15 bp, synthetic construct
  misc_feature 1..15: note = Description of Artificial Sequence: Synthetic oligonucleotide
  source 1..15: mol_type = other DNA
agctttagcttgaac

SEQ ID NO: 8042 - protein, 5 aa, synthetic construct
  REGION 1..5: note = Description of Artificial Sequence: Synthetic peptide
SFSLN

SEQ ID NO: 8043 - DNA, 15 bp, synthetic construct
  misc_feature 1..15: note = Description of Artificial Sequence: Synthetic oligonucleotide
  source 1..15: mol_type = other DNA
agttatagcatgaac

SEQ ID NO: 8044 - protein, 5 aa, synthetic construct
  REGION 1..5: note = Description of Artificial Sequence: Synthetic peptide
SYSMN

SEQ ID NO: 8045 - DNA, 15 bp, synthetic construct
  misc_feature 1..15: note = Description of Artificial Sequence: Synthetic oligonucleotide
  source 1..15: mol_type = other DNA
agctatggcatgcac

SEQ ID NO: 8046 - protein, 5 aa, synthetic construct
  REGION 1..5: note = Description of Artificial Sequence: Synthetic peptide
SYGMH

SEQ ID NO: 8047 - DNA, 15 bp, synthetic construct
  misc_feature 1..15: note = Description of Artificial Sequence: Synthetic oligonucleotide
  source 1..15: mol_type = other DNA
tactatggcttgcac

SEQ ID NO: 8048 - protein, 5 aa, synthetic construct
  REGION 1..5: note = Description of Artificial Sequence: Synthetic peptide
YYGLH

SEQ ID NO: 8049 - DNA, 15 bp, synthetic construct
  misc_feature 1..15: note = Description of Artificial Sequence: Synthetic oligonucleotide
  source 1..15: mol_type = other DNA
agctatggtatcagc

SEQ ID NO: 8050 - protein, 5 aa, synthetic construct
  REGION 1..5: note = Description of Artificial Sequence: Synthetic peptide
SYGIS

SEQ ID NO: 8051 - DNA, 15 bp, synthetic construct
  misc_feature 1..15: note = Description of Artificial Sequence: Synthetic oligonucleotide
  source 1..15: mol_type = other DNA
agctatggtatcagc

SEQ ID NO: 8052 - protein, 5 aa, synthetic construct
  REGION 1..5: note = Description of Artificial Sequence: Synthetic peptide
SYGIS

SEQ ID NO: 8053 - DNA, 15 bp, synthetic construct
  misc_feature 1..15: note = Description of Artificial Sequence: Synthetic oligonucleotide
  source 1..15: mol_type = other DNA
agctatggtatcagc

SEQ ID NO: 8054 - protein, 5 aa, synthetic construct
  REGION 1..5: note = Description of Artificial Sequence: Synthetic peptide
SYGIS

SEQ ID NO: 8055 - DNA, 15 bp, synthetic construct
  misc_feature 1..15: note = Description of Artificial Sequence: Synthetic oligonucleotide
  source 1..15: mol_type = other DNA
agctatggcatgcac

SEQ ID NO: 8056 - protein, 5 aa, synthetic construct
  REGION 1..5: note = Description of Artificial Sequence: Synthetic peptide
SYGMH

SEQ ID NO: 8057 - DNA, 15 bp, synthetic construct
  misc_feature 1..15: note = Description of Artificial Sequence: Synthetic oligonucleotide
  source 1..15: mol_type = other DNA
ggctactatatacac

SEQ ID NO: 8058 - protein, 5 aa, synthetic construct
  REGION 1..5: note = Description of Artificial Sequence: Synthetic peptide
GYYIH

SEQ ID NO: 8059 - DNA, 15 bp, synthetic construct
  misc_feature 1..15: note = Description of Artificial Sequence: Synthetic oligonucleotide
  source 1..15: mol_type = other DNA
gactatgtcatgcag

SEQ ID NO: 8060 - protein, 5 aa, synthetic construct
  REGION 1..5: note = Description of Artificial Sequence: Synthetic peptide
DYVMQ

SEQ ID NO: 8061 - DNA, 15 bp, synthetic construct
  misc_feature 1..15: note = Description of Artificial Sequence: Synthetic oligonucleotide
  source 1..15: mol_type = other DNA
aattatgatatcaac

SEQ ID NO: 8062 - protein, 5 aa, synthetic construct
  REGION 1..5: note = Description of Artificial Sequence: Synthetic peptide
NYDIN

SEQ ID NO: 8063 - DNA, 21 bp, synthetic construct
  misc_feature 1..21: note = Description of Artificial Sequence: Synthetic oligonucleotide
  source 1..21: mol_type = other DNA
agtggtggttactactggagc

SEQ ID NO: 8064 - protein, 7 aa, synthetic construct
  REGION 1..7: note = Description of Artificial Sequence: Synthetic peptide
SGGYYWS

SEQ ID NO: 8065 - DNA, 15 bp, synthetic construct
  misc_feature 1..15: note = Description of Artificial Sequence: Synthetic oligonucleotide
  source 1..15: mol_type = other DNA
agccatggcatgcac

SEQ ID NO: 8066 - protein, 5 aa, synthetic construct
  REGION 1..5: note = Description of Artificial Sequence: Synthetic peptide
SHGMH

SEQ ID NO: 8067 - DNA, 15 bp, synthetic construct
  misc_feature 1..15: note = Description of Artificial Sequence: Synthetic oligonucleotide
  source 1..15: mol_type = other DNA
gtttactattggagc

SEQ ID NO: 8068 - protein, 5 aa, synthetic construct
  REGION 1..5: note = Description of Artificial Sequence: Synthetic peptide
VYYWS

SEQ ID NO: 8069 - DNA, 15 bp, synthetic construct
  misc_feature 1..15: note = Description of Artificial Sequence: Synthetic oligonucleotide
  source 1..15: mol_type = other DNA
aattatgatatcaac

SEQ ID NO: 8070 - protein, 5 aa, synthetic construct
  REGION 1..5: note = Description of Artificial Sequence: Synthetic peptide
NYDIN

SEQ ID NO: 8071 - DNA, 15 bp, synthetic construct
  misc_feature 1..15: note = Description of Artificial Sequence: Synthetic oligonucleotide
  source 1..15: mol_type = other DNA
aattatgatgtcaac

SEQ ID NO: 8072 - protein, 5 aa, synthetic construct
  REGION 1..5: note = Description of Artificial Sequence: Synthetic peptide
NYDVN

SEQ ID NO: 8073 - DNA, 15 bp, synthetic construct
  misc_feature 1..15: note = Description of Artificial Sequence: Synthetic oligonucleotide
  source 1..15: mol_type = other DNA
aattatgatatcaac

SEQ ID NO: 8074 - protein, 5 aa, synthetic construct
  REGION 1..5: note = Description of Artificial Sequence: Synthetic peptide
NYDIN

SEQ ID NO: 8075 - DNA, 15 bp, synthetic construct
  misc_feature 1..15: note = Description of Artificial Sequence: Synthetic oligonucleotide
  source 1..15: mol_type = other DNA
aattatgatatcaac

SEQ ID NO: 8076 - protein, 5 aa, synthetic construct
  REGION 1..5: note = Description of Artificial Sequence: Synthetic peptide
NYDIN

SEQ ID NO: 8077 - DNA, 15 bp, synthetic construct
  misc_feature 1..15: note = Description of Artificial Sequence: Synthetic oligonucleotide
  source 1..15: mol_type = other DNA
aattatgatatcaac

SEQ ID NO: 8078 - protein, 5 aa, synthetic construct
  REGION 1..5: note = Description of Artificial Sequence: Synthetic peptide
NYDIN

SEQ ID NO: 8079 - DNA, 15 bp, synthetic construct
  misc_feature 1..15: note = Description of Artificial Sequence: Synthetic oligonucleotide
  source 1..15: mol_type = other DNA
agttatgatatcaac

SEQ ID NO: 8080 - protein, 5 aa, synthetic construct
  REGION 1..5: note = Description of Artificial Sequence: Synthetic peptide
SYDIN

SEQ ID NO: 8081 - DNA, 15 bp, synthetic construct
  misc_feature 1..15: note = Description of Artificial Sequence: Synthetic oligonucleotide
  source 1..15: mol_type = other DNA
agttatgatatcaac

SEQ ID NO: 8082 - protein, 5 aa, synthetic construct
  REGION 1..5: note = Description of Artificial Sequence: Synthetic peptide
SYDIN

SEQ ID NO: 8083 - DNA, 15 bp, synthetic construct
  misc_feature 1..15: note = Description of Artificial Sequence: Synthetic oligonucleotide
  source 1..15: mol_type = other DNA
agctatgccatgagc

SEQ ID NO: 8084 - protein, 5 aa, synthetic construct
  REGION 1..5: note = Description of Artificial Sequence: Synthetic peptide
SYAMS

SEQ ID NO: 8085 - DNA, 15 bp, synthetic construct
  misc_feature 1..15: note = Description of Artificial Sequence: Synthetic oligonucleotide
  source 1..15: mol_type = other DNA
agttatgatatcaac

SEQ ID NO: 8086 - protein, 5 aa, synthetic construct
  REGION 1..5: note = Description of Artificial Sequence: Synthetic peptide
SYDIN

SEQ ID NO: 8087 - DNA, 15 bp, synthetic construct
  misc_feature 1..15: note = Description of Artificial Sequence: Synthetic oligonucleotide
  source 1..15: mol_type = other DNA
agttatgatatcaac

SEQ ID NO: 8088 - protein, 5 aa, synthetic construct
  REGION 1..5: note = Description of Artificial Sequence: Synthetic peptide
SYDIN

SEQ ID NO: 8089 - DNA, 15 bp, synthetic construct
  misc_feature 1..15: note = Description of Artificial Sequence: Synthetic oligonucleotide
  source 1..15: mol_type = other DNA
agctatgccatgagc

SEQ ID NO: 8090 - protein, 5 aa, synthetic construct
  REGION 1..5: note = Description of Artificial Sequence: Synthetic peptide
SYAMS

SEQ ID NO: 8091 - DNA, 21 bp, synthetic construct
  misc_feature 1..21: note = Description of Artificial Sequence: Synthetic oligonucleotide
  source 1..21: mol_type = other DNA
gttgcatcccgtttgcaaagt

SEQ ID NO: 8092 - protein, 7 aa, synthetic construct
  REGION 1..7: note = Description of Artificial Sequence: Synthetic peptide
VASRLQS

SEQ ID NO: 8093 - DNA, 21 bp, synthetic construct
  misc_feature 1..21: note = Description of Artificial Sequence: Synthetic oligonucleotide
  source 1..21: mol_type = other DNA
tgggcatcttcccgggaatcc

SEQ ID NO: 8094 - protein, 7 aa, synthetic construct
  REGION 1..7: note = Description of Artificial Sequence: Synthetic peptide
WASSRES

SEQ ID NO: 8095 - DNA, 21 bp, synthetic construct
  misc_feature 1..21: note = Description of Artificial Sequence: Synthetic oligonucleotide
  source 1..21: mol_type = other DNA
tgggcatctacccgggaatcc

SEQ ID NO: 8096 - protein, 7 aa, synthetic construct
  REGION 1..7: note = Description of Artificial Sequence: Synthetic peptide
WASTRES

SEQ ID NO: 8097 - DNA, 21 bp, synthetic construct
  misc_feature 1..21: note = Description of Artificial Sequence: Synthetic oligonucleotide
  source 1..21: mol_type = other DNA
gaagtttccaaccggttctct

SEQ ID NO: 8098 - protein, 7 aa, synthetic construct
  REGION 1..7: note = Description of Artificial Sequence: Synthetic peptide
EVSNRFS

SEQ ID NO: 8099 - DNA, 21 bp, synthetic construct
  misc_feature 1..21: note = Description of Artificial Sequence: Synthetic oligonucleotide
  source 1..21: mol_type = other DNA
ggtgcattcaatttgcacagt

SEQ ID NO: 8100 - protein, 7 aa, synthetic construct
  REGION 1..7: note = Description of Artificial Sequence: Synthetic peptide
GAFNLHS

SEQ ID NO: 8101 - DNA, 21 bp, synthetic construct
  misc_feature 1..21: note = Description of Artificial Sequence: Synthetic oligonucleotide
  source 1..21: mol_type = other DNA
caagatagcaagcggccctca

SEQ ID NO: 8102 - protein, 7 aa, synthetic construct
  REGION 1..7: note = Description of Artificial Sequence: Synthetic peptide
QDSKRPS

SEQ ID NO: 8103 - DNA, 21 bp, synthetic construct
  misc_feature 1..21: note = Description of Artificial Sequence: Synthetic oligonucleotide
  source 1..21: mol_type = other DNA
gctgcatccattttgcaaagt

SEQ ID NO: 8104 - protein, 7 aa, synthetic construct
  REGION 1..7: note = Description of Artificial Sequence: Synthetic peptide
AASILQS

SEQ ID NO: 8105 - DNA, 21 bp, synthetic construct
  misc_feature 1..21: note = Description of Artificial Sequence: Synthetic oligonucleotide
  source 1..21: mol_type = other DNA
gctgcatccagtttgcttagt

SEQ ID NO: 8106 - protein, 7 aa, synthetic construct
  REGION 1..7: note = Description of Artificial Sequence: Synthetic peptide
AASSLLS

SEQ ID NO: 8107 - DNA, 21 bp, synthetic construct
  misc_feature 1..21: note = Description of Artificial Sequence: Synthetic oligonucleotide
  source 1..21: mol_type = other DNA
gctgcatccagtttgcaaagt

SEQ ID NO: 8108 - protein, 7 aa, synthetic construct
  REGION 1..7: note = Description of Artificial Sequence: Synthetic peptide
AASSLQS

SEQ ID NO: 8109 - DNA, 21 bp, synthetic construct
  misc_feature 1..21: note = Description of Artificial Sequence: Synthetic oligonucleotide
  source 1..21: mol_type = other DNA
gctgcatccagtttgcaaagt

SEQ ID NO: 8110 - protein, 7 aa, synthetic construct
  REGION 1..7: note = Description of Artificial Sequence: Synthetic peptide
AASSLQS

SEQ ID NO: 8111 - DNA, 21 bp, synthetic construct
  misc_feature 1..21: note = Description of Artificial Sequence: Synthetic oligonucleotide
  source 1..21: mol_type = other DNA
ggtgcatccagcagggccact

SEQ ID NO: 8112 - protein, 7 aa, synthetic construct
  REGION 1..7: note = Description of Artificial Sequence: Synthetic peptide
GASSRAT

SEQ ID NO: 8113 - DNA, 21 bp, synthetic construct
  misc_feature 1..21: note = Description of Artificial Sequence: Synthetic oligonucleotide
  source 1..21: mol_type = other DNA
gctgcatccagtttgcaaagt

SEQ ID NO: 8114 - protein, 7 aa, synthetic construct
  REGION 1..7: note = Description of Artificial Sequence: Synthetic peptide
AASSLQS

SEQ ID NO: 8115 - DNA, 21 bp, synthetic construct
  misc_feature 1..21: note = Description of Artificial Sequence: Synthetic oligonucleotide
  source 1..21: mol_type = other DNA
gaagtttccaagcggctctct

SEQ ID NO: 8116 - protein, 7 aa, synthetic construct
  REGION 1..7: note = Description of Artificial Sequence: Synthetic peptide
EVSKRLS

SEQ ID NO: 8117 - DNA, 21 bp, synthetic construct
  misc_feature 1..21: note = Description of Artificial Sequence: Synthetic oligonucleotide
  source 1..21: mol_type = other DNA
gctgcatccactttgcaaagt

SEQ ID NO: 8118 - protein, 7 aa, synthetic construct
  REGION 1..7: note = Description of Artificial Sequence: Synthetic peptide
AASTLQS

SEQ ID NO: 8119 - DNA, 21 bp, synthetic construct
  misc_feature 1..21: note = Description of Artificial Sequence: Synthetic oligonucleotide
  source 1..21: mol_type = other DNA
gaagtttccaaccggttctct

SEQ ID NO: 8120 - protein, 7 aa, synthetic construct
  REGION 1..7: note = Description of Artificial Sequence: Synthetic peptide
EVSNRFS

SEQ ID NO: 8121 - DNA, 21 bp, synthetic construct
  misc_feature 1..21: note = Description of Artificial Sequence: Synthetic oligonucleotide
  source 1..21: mol_type = other DNA
gctgcatccagtttgcaaagt

SEQ ID NO: 8122 - protein, 7 aa, synthetic construct
  REGION 1..7: note = Description of Artificial Sequence: Synthetic peptide
AASSLQS

SEQ ID NO: 8123 - DNA, 21 bp, synthetic construct
  misc_feature 1..21: note = Description of Artificial Sequence: Synthetic oligonucleotide
  source 1..21: mol_type = other DNA
gctgcatccagtttgcaaagt

SEQ ID NO: 8124 - protein, 7 aa, synthetic construct
  REGION 1..7: note = Description of Artificial Sequence: Synthetic peptide
AASSLQS

SEQ ID NO: 8125 - DNA, 21 bp, synthetic construct
  misc_feature 1..21: note = Description of Artificial Sequence: Synthetic oligonucleotide
  source 1..21: mol_type = other DNA
gctgcatccagtttgcaaagt

SEQ ID NO: 8126 - protein, 7 aa, synthetic construct
  REGION 1..7: note = Description of Artificial Sequence: Synthetic peptide
AASSLQS

SEQ ID NO: 8127 - DNA, 21 bp, synthetic construct
  misc_feature 1..21: note = Description of Artificial Sequence: Synthetic oligonucleotide
  source 1..21: mol_type = other DNA
ggtgcatccaccagggccact

SEQ ID NO: 8128 - protein, 7 aa, synthetic construct
  REGION 1..7: note = Description of Artificial Sequence: Synthetic peptide
GASTRAT

SEQ ID NO: 8129 - DNA, 21 bp, synthetic construct
  misc_feature 1..21: note = Description of Artificial Sequence: Synthetic oligonucleotide
  source 1..21: mol_type = other DNA
ggtgcagccaccagggccact

SEQ ID NO: 8130 - protein, 7 aa, synthetic construct
  REGION 1..7: note = Description of Artificial Sequence: Synthetic peptide
GAATRAT

SEQ ID NO: 8131 - DNA, 21 bp, synthetic construct
  misc_feature 1..21: note = Description of Artificial Sequence: Synthetic oligonucleotide
  source 1..21: mol_type = other DNA
ggtgcatccagtttgcaaagt

SEQ ID NO: 8132 - protein, 7 aa, synthetic construct
  REGION 1..7: note = Description of Artificial Sequence: Synthetic peptide
GASSLQS

SEQ ID NO: 8133 - DNA, 21 bp, synthetic construct
  misc_feature 1..21: note = Description of Artificial Sequence: Synthetic oligonucleotide
  source 1..21: mol_type = other DNA
ggtgcatccagcagggccact

SEQ ID NO: 8134 - protein, 7 aa, synthetic construct
  REGION 1..7: note = Description of Artificial Sequence: Synthetic peptide
GASSRAT

SEQ ID NO: 8135 - DNA, 21 bp, synthetic construct
  misc_feature 1..21: note = Description of Artificial Sequence: Synthetic oligonucleotide
  source 1..21: mol_type = other DNA
gctgcatccagtttgcaaagt

SEQ ID NO: 8136 - protein, 7 aa, synthetic construct
  REGION 1..7: note = Description of Artificial Sequence: Synthetic peptide
AASSLQS

SEQ ID NO: 8137 - DNA, 21 bp, synthetic construct
  misc_feature 1..21: note = Description of Artificial Sequence: Synthetic oligonucleotide
  source 1..21: mol_type = other DNA
ggtgcatccagcagggccact

SEQ ID NO: 8138 - protein, 7 aa, synthetic construct
  REGION 1..7: note = Description of Artificial Sequence: Synthetic peptide
GASSRAT

SEQ ID NO: 8139 - DNA, 21 bp, synthetic construct
  misc_feature 1..21: note = Description of Artificial Sequence: Synthetic oligonucleotide
  source 1..21: mol_type = other DNA
gctgcatccagtttgcaaagt

SEQ ID NO: 8140 - protein, 7 aa, synthetic construct
  REGION 1..7: note = Description of Artificial Sequence: Synthetic peptide
AASSLQS

SEQ ID NO: 8141 - DNA, 21 bp, synthetic construct
  misc_feature 1..21: note = Description of Artificial Sequence: Synthetic oligonucleotide
  source 1..21: mol_type = other DNA
ggtgcatccagcagggccact

SEQ ID NO: 8142 - protein, 7 aa, synthetic construct
  REGION 1..7: note = Description of Artificial Sequence: Synthetic peptide
GASSRAT

SEQ ID NO: 8143 - DNA, 21 bp, synthetic construct
  misc_feature 1..21: note = Description of Artificial Sequence: Synthetic oligonucleotide
  source 1..21: mol_type = other DNA
gctgcatccagtttgcaaagt

SEQ ID NO: 8144 - protein, 7 aa, synthetic construct
  REGION 1..7: note = Description of Artificial Sequence: Synthetic peptide
AASSLQS

SEQ ID NO: 8145 - DNA, 21 bp, synthetic construct
  misc_feature 1..21: note = Description of Artificial Sequence: Synthetic oligonucleotide
  source 1..21: mol_type = other DNA
actgcatccagtttgcaaagt

SEQ ID NO: 8146 - protein, 7 aa, synthetic construct
  REGION 1..7: note = Description of Artificial Sequence: Synthetic peptide
TASSLQS

SEQ ID NO: 8147 - DNA, 21 bp, synthetic construct
  misc_feature 1..21: note = Description of Artificial Sequence: Synthetic oligonucleotide
  source 1..21: mol_type = other DNA
ggtgcatccagtttgcaaagt

SEQ ID NO: 8148 - protein, 7 aa, synthetic construct
  REGION 1..7: note = Description of Artificial Sequence: Synthetic peptide
GASSLQS

SEQ ID NO: 8149 - DNA, 21 bp, synthetic construct
  misc_feature 1..21: note = Description of Artificial Sequence: Synthetic oligonucleotide
  source 1..21: mol_type = other DNA
gctgcatccagtttgcatagt

SEQ ID NO: 8150 - protein, 7 aa, synthetic construct
  REGION 1..7: note = Description of Artificial Sequence: Synthetic peptide
AASSLHS

SEQ ID NO: 8151 - DNA, 21 bp, synthetic construct
  misc_feature 1..21: note = Description of Artificial Sequence: Synthetic oligonucleotide
  source 1..21: mol_type = other DNA
tgggcatctacccgggaatcc

SEQ ID NO: 8152 - protein, 7 aa, synthetic construct
  REGION 1..7: note = Description of Artificial Sequence: Synthetic peptide
WASTRES

SEQ ID NO: 8153 - DNA, 21 bp, synthetic construct
  misc_feature 1..21: note = Description of Artificial Sequence: Synthetic oligonucleotide
  source 1..21: mol_type = other DNA
tgggcatctacccgggaatcc

SEQ ID NO: 8154 - protein, 7 aa, synthetic construct
  REGION 1..7: note = Description of Artificial Sequence: Synthetic peptide
WASTRES

SEQ ID NO: 8155 - DNA, 21 bp, synthetic construct
  misc_feature 1..21: note = Description of Artificial Sequence: Synthetic oligonucleotide
  source 1..21: mol_type = other DNA
gaggtttctaagtgggactct

SEQ ID NO: 8156 - protein, 7 aa, synthetic construct
  REGION 1..7: note = Description of Artificial Sequence: Synthetic peptide
EVSKWDS

SEQ ID NO: 8157 - DNA, 21 bp, synthetic construct
  misc_feature 1..21: note = Description of Artificial Sequence: Synthetic oligonucleotide
  source 1..21: mol_type = other DNA
aaggtttctaactgggactct

SEQ ID NO: 8158 - protein, 7 aa, synthetic construct
  REGION 1..7: note = Description of Artificial Sequence: Synthetic peptide
KVSNWDS

SEQ ID NO: 8159 - DNA, 21 bp, synthetic construct
  misc_feature 1..21: note = Description of Artificial Sequence: Synthetic oligonucleotide
  source 1..21: mol_type = other DNA
gctgcatccagtttgcagagt

SEQ ID NO: 8160 - protein, 7 aa, synthetic construct
  REGION 1..7: note = Description of Artificial Sequence: Synthetic peptide
AASSLQS

SEQ ID NO: 8161 - DNA, 21 bp, synthetic construct
  misc_feature 1..21: note = Description of Artificial Sequence: Synthetic oligonucleotide
  source 1..21: mol_type = other DNA
gctgcatccagtttgcaaagt

SEQ ID NO: 8162 - protein, 7 aa, synthetic construct
  REGION 1..7: note = Description of Artificial Sequence: Synthetic peptide
AASSLQS

SEQ ID NO: 8163 - DNA, 21 bp, synthetic construct
  misc_feature 1..21: note = Description of Artificial Sequence: Synthetic oligonucleotide
  source 1..21: mol_type = other DNA
gaggtcagtaatcggccctca

SEQ ID NO: 8164 - protein, 7 aa, synthetic construct
  REGION 1..7: note = Description of Artificial Sequence: Synthetic peptide
EVSNRPS

SEQ ID NO: 8165 - DNA, 21 bp, synthetic construct
  misc_feature 1..21: note = Description of Artificial Sequence: Synthetic oligonucleotide
  source 1..21: mol_type = other DNA
agtaataatcagcggccctca

SEQ ID NO: 8166 - protein, 7 aa, synthetic construct
  REGION 1..7: note = Description of Artificial Sequence: Synthetic peptide
SNNQRPS

SEQ ID NO: 8167 - DNA, 21 bp, synthetic construct
  misc_feature 1..21: note = Description of Artificial Sequence: Synthetic oligonucleotide
  source 1..21: mol_type = other DNA
gaggacagcaagcgaccctcc

SEQ ID NO: 8168 - protein, 7 aa, synthetic construct
  REGION 1..7: note = Description of Artificial Sequence: Synthetic peptide
EDSKRPS

SEQ ID NO: 8169 - DNA, 21 bp, synthetic construct
  misc_feature 1..21: note = Description of Artificial Sequence: Synthetic oligonucleotide
  source 1..21: mol_type = other DNA
gctgcatccagtttgcaaagt

SEQ ID NO: 8170 - protein, 7 aa, synthetic construct
  REGION 1..7: note = Description of Artificial Sequence: Synthetic peptide
AASSLQS

SEQ ID NO: 8171 - DNA, 21 bp, synthetic construct
  misc_feature 1..21: note = Description of Artificial Sequence: Synthetic oligonucleotide
  source 1..21: mol_type = other DNA
tgggcatctacccgggaatcc

SEQ ID NO: 8172 - protein, 7 aa, synthetic construct
  REGION 1..7: note = Description of Artificial Sequence: Synthetic peptide
WASTRES

SEQ ID NO: 8173 - DNA, 21 bp, synthetic construct
  misc_feature 1..21: note = Description of Artificial Sequence: Synthetic oligonucleotide
  source 1..21: mol_type = other DNA
actgcatacagtttgcaaagt

SEQ ID NO: 8174 - protein, 7 aa, synthetic construct
  REGION 1..7: note = Description of Artificial Sequence: Synthetic peptide
TAYSLQS

SEQ ID NO: 8175 - DNA, 21 bp, synthetic construct
  misc_feature 1..21: note = Description of Artificial Sequence: Synthetic oligonucleotide
  source 1..21: mol_type = other DNA
caagataggaagcgcccctca

SEQ ID NO: 8176 - protein, 7 aa, synthetic construct
  REGION 1..7: note = Description of Artificial Sequence: Synthetic peptide
QDRKRPS

SEQ ID NO: 8177 - DNA, 21 bp, synthetic construct
  misc_feature 1..21: note = Description of Artificial Sequence: Synthetic oligonucleotide
  source 1..21: mol_type = other DNA
aaggtttctaactgggactct

SEQ ID NO: 8178 - protein, 7 aa, synthetic construct
  REGION 1..7: note = Description of Artificial Sequence: Synthetic peptide
KVSNWDS

SEQ ID NO: 8179 - DNA, 21 bp, synthetic construct
  misc_feature 1..21: note = Description of Artificial Sequence: Synthetic oligonucleotide
  source 1..21: mol_type = other DNA
gaggtcagtaatcggccctca

SEQ ID NO: 8180 - protein, 7 aa, synthetic construct
  REGION 1..7: note = Description of Artificial Sequence: Synthetic peptide
EVSNRPS

SEQ ID NO: 8181 - DNA, 21 bp, synthetic construct
  misc_feature 1..21: note = Description of Artificial Sequence: Synthetic oligonucleotide
  source 1..21: mol_type = other DNA
gctgcatccagtttgcaaagt

SEQ ID NO: 8182 - protein, 7 aa, synthetic construct
  REGION 1..7: note = Description of Artificial Sequence: Synthetic peptide
AASSLQS

SEQ ID NO: 8183 - DNA, 21 bp, synthetic construct
  misc_feature 1..21: note = Description of Artificial Sequence: Synthetic oligonucleotide
  source 1..21: mol_type = other DNA
gctgcatccaggttgcaaagt

SEQ ID NO: 8184 - protein, 7 aa, synthetic construct
  REGION 1..7: note = Description of Artificial Sequence: Synthetic peptide
AASRLQS

SEQ ID NO: 8185 - DNA, 21 bp, synthetic construct
  misc_feature 1..21: note = Description of Artificial Sequence: Synthetic oligonucleotide
  source 1..21: mol_type = other DNA
gctgcatccagattgcaaagt

SEQ ID NO: 8186 - protein, 7 aa, synthetic construct
  REGION 1..7: note = Description of Artificial Sequence: Synthetic peptide
AASRLQS

SEQ ID NO: 8187 - DNA, 21 bp, synthetic construct
  misc_feature 1..21: note = Description of Artificial Sequence: Synthetic oligonucleotide
  source 1..21: mol_type = other DNA
gctgcatccagtttgcaaagt

SEQ ID NO: 8188 - protein, 7 aa, synthetic construct
  REGION 1..7: note = Description of Artificial Sequence: Synthetic peptide
AASSLQS

SEQ ID NO: 8189 - DNA, 21 bp, synthetic construct
  misc_feature 1..21: note = Description of Artificial Sequence: Synthetic oligonucleotide
  source 1..21: mol_type = other DNA
caagataggaagcggccctca

SEQ ID NO: 8190 - protein, 7 aa, synthetic construct
  REGION 1..7: note = Description of Artificial Sequence: Synthetic peptide
QDRKRPS

SEQ ID NO: 8191 - DNA, 21 bp, synthetic construct
  misc_feature 1..21: note = Description of Artificial Sequence: Synthetic oligonucleotide
  source 1..21: mol_type = other DNA
aaggtttctaactgggactct

SEQ ID NO: 8192 - protein, 7 aa, synthetic construct
  REGION 1..7: note = Description of Artificial Sequence: Synthetic peptide
KVSNWDS

SEQ ID NO: 8193 - DNA, 21 bp, synthetic construct
  misc_feature 1..21: note = Description of Artificial Sequence: Synthetic oligonucleotide
  source 1..21: mol_type = other DNA
caagataggaagcggccctca

SEQ ID NO: 8194 - protein, 7 aa, synthetic construct
  REGION 1..7: note = Description of Artificial Sequence: Synthetic peptide
QDRKRPS

SEQ ID NO: 8195 - DNA, 21 bp, synthetic construct
  misc_feature 1..21: note = Description of Artificial Sequence: Synthetic oligonucleotide
  source 1..21: mol_type = other DNA
gaggtcagtaatcggccctca

SEQ ID NO: 8196 - protein, 7 aa, synthetic construct
  REGION 1..7: note = Description of Artificial Sequence: Synthetic peptide
EVSNRPS

SEQ ID NO: 8197 - DNA, 21 bp, synthetic construct
  misc_feature 1..21: note = Description of Artificial Sequence: Synthetic oligonucleotide
  source 1..21: mol_type = other DNA
caagataggaagcggccctca

SEQ ID NO: 8198 - protein, 7 aa, synthetic construct
  REGION 1..7: note = Description of Artificial Sequence: Synthetic peptide
QDRKRPS

SEQ ID NO: 8199 - DNA, 21 bp, synthetic construct
  misc_feature 1..21: note = Description of Artificial Sequence: Synthetic oligonucleotide
  source 1..21: mol_type = other DNA
caagataccaagcggccctca

SEQ ID NO: 8200 - protein, 7 aa, synthetic construct
  REGION 1..7: note = Description of Artificial Sequence: Synthetic peptide
QDTKRPS

SEQ ID NO: 8201 - DNA, 21 bp, synthetic construct
  misc_feature 1..21: note = Description of Artificial Sequence: Synthetic oligonucleotide
  source 1..21: mol_type = other DNA
caagatagcaagcggccctca

SEQ ID NO: 8202 - protein, 7 aa, synthetic construct
  REGION 1..7: note = Description of Artificial Sequence: Synthetic peptide
QDSKRPS

SEQ ID NO: 8203 - DNA, 21 bp, synthetic construct
  misc_feature 1..21: note = Description of Artificial Sequence: Synthetic oligonucleotide
  source 1..21: mol_type = other DNA
caagatggcaagcggccctca

SEQ ID NO: 8204 - protein, 7 aa, synthetic construct
  REGION 1..7: note = Description of Artificial Sequence: Synthetic peptide
QDGKRPS

SEQ ID NO: 8205 - DNA, 21 bp, synthetic construct
  misc_feature 1..21: note = Description of Artificial Sequence: Synthetic oligonucleotide
  source 1..21: mol_type = other DNA
agcgatagcaaccggccctca

SEQ ID NO: 8206 - protein, 7 aa, synthetic construct
  REGION 1..7: note = Description of Artificial Sequence: Synthetic peptide
SDSNRPS

SEQ ID NO: 8207 - DNA, 33 bp, synthetic construct
  misc_feature 1..33: note = Description of Artificial Sequence: Synthetic oligonucleotide
  source 1..33: mol_type = other DNA
gttaagagtgatggcagccacagcaagggggac

SEQ ID NO: 8208 - protein, 11 aa, synthetic construct
  REGION 1..11: note = Description of Artificial Sequence: Synthetic peptide
VKSDGSHSKGD

SEQ ID NO: 8209 - DNA, 21 bp, synthetic construct
  misc_feature 1..21: note = Description of Artificial Sequence: Synthetic oligonucleotide
  source 1..21: mol_type = other DNA
caagatcgcaagcggccctca

SEQ ID NO: 8210 - protein, 7 aa, synthetic construct
  REGION 1..7: note = Description of Artificial Sequence: Synthetic peptide
QDRKRPS

SEQ ID NO: 8211 - DNA, 21 bp, synthetic construct
  misc_feature 1..21: note = Description of Artificial Sequence: Synthetic oligonucleotide
  source 1..21: mol_type = other DNA
gaagtttcctaccggttctct

SEQ ID NO: 8212 - protein, 7 aa, synthetic construct
  REGION 1..7: note = Description of Artificial Sequence: Synthetic peptide
EVSYRFS

SEQ ID NO: 8213 - DNA, 21 bp, synthetic construct
  misc_feature 1..21: note = Description of Artificial Sequence: Synthetic oligonucleotide
  source 1..21: mol_type = other DNA
gctgcatccagtttacaaagt

SEQ ID NO: 8214 - protein, 7 aa, synthetic construct
  REGION 1..7: note = Description of Artificial Sequence: Synthetic peptide
AASSLQS

SEQ ID NO: 8215 - DNA, 21 bp, synthetic construct
  misc_feature 1..21: note = Description of Artificial Sequence: Synthetic oligonucleotide
  source 1..21: mol_type = other DNA
ggtgcatccagtttgcaaagt

SEQ ID NO: 8216 - protein, 7 aa, synthetic construct
  REGION 1..7: note = Description of Artificial Sequence: Synthetic peptide
GASSLQS

SEQ ID NO: 8217 - DNA, 21 bp, synthetic construct
  misc_feature 1..21: note = Description of Artificial Sequence: Synthetic oligonucleotide
  source 1..21: mol_type = other DNA
gctgcatccagtttgcaaagt

SEQ ID NO: 8218 - protein, 7 aa, synthetic construct
  REGION 1..7: note = Description of Artificial Sequence: Synthetic peptide
AASSLQS

SEQ ID NO: 8219 - DNA, 21 bp, synthetic construct
  misc_feature 1..21: note = Description of Artificial Sequence: Synthetic oligonucleotide
  source 1..21: mol_type = other DNA
gctgcatccagtttgcaaagt

SEQ ID NO: 8220 - protein, 7 aa, synthetic construct
  REGION 1..7: note = Description of Artificial Sequence: Synthetic peptide
AASSLQS

SEQ ID NO: 8221 - DNA, 21 bp, synthetic construct
  misc_feature 1..21: note = Description of Artificial Sequence: Synthetic oligonucleotide
  source 1..21: mol_type = other DNA
gctgcatccagtttgcaaagt

SEQ ID NO: 8222 - protein, 7 aa, synthetic construct
  REGION 1..7: note = Description of Artificial Sequence: Synthetic peptide
AASSLQS

SEQ ID NO: 8223 - DNA, 21 bp, synthetic construct
  misc_feature 1..21: note = Description of Artificial Sequence: Synthetic oligonucleotide
  source 1..21: mol_type = other DNA
gctgcatccagtttgcaaagt

SEQ ID NO: 8224 - protein, 7 aa, synthetic construct
  REGION 1..7: note = Description of Artificial Sequence: Synthetic peptide
AASSLQS

SEQ ID NO: 8225 - DNA, 21 bp, synthetic construct
  misc_feature 1..21: note = Description of Artificial Sequence: Synthetic oligonucleotide
  source 1..21: mol_type = other DNA
gctgcatccagtttgcaaagt

SEQ ID NO: 8226 - protein, 7 aa, synthetic construct
  REGION 1..7: note = Description of Artificial Sequence: Synthetic peptide
AASSLQS

SEQ ID NO: 8227 - DNA, 21 bp, synthetic construct
  misc_feature 1..21: note = Description of Artificial Sequence: Synthetic oligonucleotide
  source 1..21: mol_type = other DNA
gctgcatccagtttgcaaagt

SEQ ID NO: 8228 - protein, 7 aa, synthetic construct
  REGION 1..7: note = Description of Artificial Sequence: Synthetic peptide
AASSLQS

SEQ ID NO: 8229 - DNA, 21 bp, synthetic construct
  misc_feature 1..21: note = Description of Artificial Sequence: Synthetic oligonucleotide
  source 1..21: mol_type = other DNA
gctgcttccagtttgcaaagt

SEQ ID NO: 8230 - protein, 7 aa, synthetic construct
  REGION 1..7: note = Description of Artificial Sequence: Synthetic peptide
AASSLQS

SEQ ID NO: 8231 - DNA, 21 bp, synthetic construct
  misc_feature 1..21: note = Description of Artificial Sequence: Synthetic oligonucleotide
  source 1..21: mol_type = other DNA
gctgtatccagtttgcaaagt

SEQ ID NO: 8232 - protein, 7 aa, synthetic construct
  REGION 1..7: note = Description of Artificial Sequence: Synthetic peptide
AVSSLQS

SEQ ID NO: 8233 - DNA, 21 bp, synthetic construct
  misc_feature 1..21: note = Description of Artificial Sequence: Synthetic oligonucleotide
  source 1..21: mol_type = other DNA
gctgcatccagtttacaaagt

SEQ ID NO: 8234 - protein, 7 aa, synthetic construct
  REGION 1..7: note = Description of Artificial Sequence: Synthetic peptide
AASSLQS

SEQ ID NO: 8235 - DNA, 21 bp, synthetic construct
  misc_feature 1..21: note = Description of Artificial Sequence: Synthetic oligonucleotide
  source 1..21: mol_type = other DNA
gctgcatccagtttgcaaagt

SEQ ID NO: 8236 - protein, 7 aa, synthetic construct
  REGION 1..7: note = Description of Artificial Sequence: Synthetic peptide
AASSLQS

SEQ ID NO: 8237 - DNA, 21 bp, synthetic construct
  misc_feature 1..21: note = Description of Artificial Sequence: Synthetic oligonucleotide
  source 1..21: mol_type = other DNA
gctgcatccaatttacaaagt

SEQ ID NO: 8238 - protein, 7 aa, synthetic construct
  REGION 1..7: note = Description of Artificial Sequence: Synthetic peptide
AASNLQS

SEQ ID NO: 8239 - DNA, 21 bp, synthetic construct
  misc_feature 1..21: note = Description of Artificial Sequence: Synthetic oligonucleotide
  source 1..21: mol_type = other DNA
gctgcatccagtttccaaagt

SEQ ID NO: 8240 - protein, 7 aa, synthetic construct
  REGION 1..7: note = Description of Artificial Sequence: Synthetic peptide
AASSFQS

SEQ ID NO: 8241 - DNA, 21 bp, synthetic construct
  misc_feature 1..21: note = Description of Artificial Sequence: Synthetic oligonucleotide
  source 1..21: mol_type = other DNA
gctgcatccagtttgcaaagt

SEQ ID NO: 8242 - protein, 7 aa, synthetic construct
  REGION 1..7: note = Description of Artificial Sequence: Synthetic peptide
AASSLQS

SEQ ID NO: 8243 - DNA, 21 bp, synthetic construct
  misc_feature 1..21: note = Description of Artificial Sequence: Synthetic oligonucleotide
  source 1..21: mol_type = other DNA
gctgcatccagtttgcaaagt

SEQ ID NO: 8244 - protein, 7 aa, synthetic construct
  REGION 1..7: note = Description of Artificial Sequence: Synthetic peptide
AASSLQS

SEQ ID NO: 8245 - DNA, 21 bp, synthetic construct
  misc_feature 1..21: note = Description of Artificial Sequence: Synthetic oligonucleotide
  source 1..21: mol_type = other DNA
gctgcatccagtttgcaaagt

SEQ ID NO: 8246 - protein, 7 aa, synthetic construct
  REGION 1..7: note = Description of Artificial Sequence: Synthetic peptide
AASSLQS

SEQ ID NO: 8247 - DNA, 21 bp, synthetic construct
  misc_feature 1..21: note = Description of Artificial Sequence: Synthetic oligonucleotide
  source 1..21: mol_type = other DNA
gctgcatccagtttacaaagt

SEQ ID NO: 8248 - protein, 7 aa, synthetic construct
  REGION 1..7: note = Description of Artificial Sequence: Synthetic peptide
AASSLQS

SEQ ID NO: 8249 - DNA, 21 bp, synthetic construct
  misc_feature 1..21: note = Description of Artificial Sequence: Synthetic oligonucleotide
  source 1..21: mol_type = other DNA
gctgcatccagtgtgcaaagt

SEQ ID NO: 8250 - protein, 7 aa, synthetic construct
  REGION 1..7: note = Description of Artificial Sequence: Synthetic peptide
AASSVQS

SEQ ID NO: 8251 - DNA, 21 bp, synthetic construct
  misc_feature 1..21: note = Description of Artificial Sequence: Synthetic oligonucleotide
  source 1..21: mol_type = other DNA
gctgcatccagtttgcaaagt

SEQ ID NO: 8252 - protein, 7 aa, synthetic construct
  REGION 1..7: note = Description of Artificial Sequence: Synthetic peptide
AASSLQS

SEQ ID NO: 8253 - DNA, 21 bp, synthetic construct
  misc_feature 1..21: note = Description of Artificial Sequence: Synthetic oligonucleotide
  source 1..21: mol_type = other DNA
gttgcatccagtttgcaaagt

SEQ ID NO: 8254 - protein, 7 aa, synthetic construct
  REGION 1..7: note = Description of Artificial Sequence: Synthetic peptide
VASSLQS

SEQ ID NO: 8255 - DNA, 21 bp, synthetic construct
  misc_feature 1..21: note = Description of Artificial Sequence: Synthetic oligonucleotide
  source 1..21: mol_type = other DNA
actgcatccagtttgcaaagt

SEQ ID NO: 8256 - protein, 7 aa, synthetic construct
  REGION 1..7: note = Description of Artificial Sequence: Synthetic peptide
TASSLQS

SEQ ID NO: 8257 - DNA, 21 bp, synthetic construct
  misc_feature 1..21: note = Description of Artificial Sequence: Synthetic oligonucleotide
  source 1..21: mol_type = other DNA
gctgcatccagtgtacaaagt

SEQ ID NO: 8258 - protein, 7 aa, synthetic construct
  REGION 1..7: note = Description of Artificial Sequence: Synthetic peptide
AASSVQS

SEQ ID NO: 8259 - DNA, 21 bp, synthetic construct
  misc_feature 1..21: note = Description of Artificial Sequence: Synthetic oligonucleotide
  source 1..21: mol_type = other DNA
ggtgcatccagtttgcaaact

SEQ ID NO: 8260 - protein, 7 aa, synthetic construct
  REGION 1..7: note = Description of Artificial Sequence: Synthetic peptide
GASSLQT

SEQ ID NO: 8261 - DNA, 21 bp, synthetic construct
  misc_feature 1..21: note = Description of Artificial Sequence: Synthetic oligonucleotide
  source 1..21: mol_type = other DNA
actgcatccagtttgcaaagt

SEQ ID NO: 8262 - protein, 7 aa, synthetic construct
  REGION 1..7: note = Description of Artificial Sequence: Synthetic peptide
TASSLQS

SEQ ID NO: 8263 - DNA, 21 bp, synthetic construct
  misc_feature 1..21: note = Description of Artificial Sequence: Synthetic oligonucleotide
  source 1..21: mol_type = other DNA
gctgtttccagtttgcaaagt

SEQ ID NO: 8264 - protein, 7 aa, synthetic construct
  REGION 1..7: note = Description of Artificial Sequence: Synthetic peptide
AVSSLQS

SEQ ID NO: 8265 - DNA, 21 bp, synthetic construct
  misc_feature 1..21: note = Description of Artificial Sequence: Synthetic oligonucleotide
  source 1..21: mol_type = other DNA
gctgcatccagtttgcaaagt

SEQ ID NO: 8266 - protein, 7 aa, synthetic construct
  REGION 1..7: note = Description of Artificial Sequence: Synthetic peptide
AASSLQS

SEQ ID NO: 8267 - DNA, 21 bp, synthetic construct
  misc_feature 1..21: note = Description of Artificial Sequence: Synthetic oligonucleotide
  source 1..21: mol_type = other DNA
gctgcatccagtttgcaaagt

SEQ ID NO: 8268 - protein, 7 aa, synthetic construct
  REGION 1..7: note = Description of Artificial Sequence: Synthetic peptide
AASSLQS

SEQ ID NO: 8269 - DNA, 21 bp, synthetic construct
  misc_feature 1..21: note = Description of Artificial Sequence: Synthetic oligonucleotide
  source 1..21: mol_type = other DNA
gctgcatccagtttgcaaagt

SEQ ID NO: 8270 - protein, 7 aa, synthetic construct
  REGION 1..7: note = Description of Artificial Sequence: Synthetic peptide
AASSLQS

SEQ ID NO: 8271 - DNA, 21 bp, synthetic construct
  misc_feature 1..21: note = Description of Artificial Sequence: Synthetic oligonucleotide
  source 1..21: mol_type = other DNA
gctgcatccagtttgcaaagt

SEQ ID NO: 8272 - protein, 7 aa, synthetic construct
  REGION 1..7: note = Description of Artificial Sequence: Synthetic peptide
AASSLQS

SEQ ID NO: 8273 - DNA, 21 bp, synthetic construct
  misc_feature 1..21: note = Description of Artificial Sequence: Synthetic oligonucleotide
  source 1..21: mol_type = other DNA
gctgcatccagtttgcaaagt

SEQ ID NO: 8274 - protein, 7 aa, synthetic construct
  REGION 1..7: note = Description of Artificial Sequence: Synthetic peptide
AASSLQS

SEQ ID NO: 8275 - DNA, 21 bp, synthetic construct
  misc_feature 1..21: note = Description of Artificial Sequence: Synthetic oligonucleotide
  source 1..21: mol_type = other DNA
gctgcatccagtttgcaaagt

SEQ ID NO: 8276 - protein, 7 aa, synthetic construct
  REGION 1..7: note = Description of Artificial Sequence: Synthetic peptide
AASSLQS

SEQ ID NO: 8277 - DNA, 21 bp, synthetic construct
  misc_feature 1..21: note = Description of Artificial Sequence: Synthetic oligonucleotide
  source 1..21: mol_type = other DNA
gttgcatccagtttgcaaagt

SEQ ID NO: 8278 - protein, 7 aa, synthetic construct
  REGION 1..7: note = Description of Artificial Sequence: Synthetic peptide
VASSLQS

SEQ ID NO: 8279 - DNA, 21 bp, synthetic construct
  misc_feature 1..21: note = Description of Artificial Sequence: Synthetic oligonucleotide
  source 1..21: mol_type = other DNA
gttgcatccaatttacaaggt

SEQ ID NO: 8280 - protein, 7 aa, synthetic construct
  REGION 1..7: note = Description of Artificial Sequence: Synthetic peptide
VASNLQG

SEQ ID NO: 8281 - DNA, 21 bp, synthetic construct
  misc_feature 1..21: note = Description of Artificial Sequence: Synthetic oligonucleotide
  source 1..21: mol_type = other DNA
gctgcatccagtttgcacagt

SEQ ID NO: 8282 - protein, 7 aa, synthetic construct
  REGION 1..7: note = Description of Artificial Sequence: Synthetic peptide
AASSLHS

SEQ ID NO: 8283 - DNA, 21 bp, synthetic construct
  misc_feature 1..21: note = Description of Artificial Sequence: Synthetic oligonucleotide
  source 1..21: mol_type = other DNA
gctgcatccagtttacaaagt

SEQ ID NO: 8284 - protein, 7 aa, synthetic construct
  REGION 1..7: note = Description of Artificial Sequence: Synthetic peptide
AASSLQS

SEQ ID NO: 8285 - DNA, 21 bp, synthetic construct
  misc_feature 1..21: note = Description of Artificial Sequence: Synthetic oligonucleotide
  source 1..21: mol_type = other DNA
gctgcttccagtttgcaaagt

SEQ ID NO: 8286 - protein, 7 aa, synthetic construct
  REGION 1..7: note = Description of Artificial Sequence: Synthetic peptide
AASSLQS

SEQ ID NO: 8287 - DNA, 21 bp, synthetic construct
  misc_feature 1..21: note = Description of Artificial Sequence: Synthetic oligonucleotide
  source 1..21: mol_type = other DNA
gctacatccagtttacaaagt

SEQ ID NO: 8288 - protein, 7 aa, synthetic construct
  REGION 1..7: note = Description of Artificial Sequence: Synthetic peptide
ATSSLQS

SEQ ID NO: 8289 - DNA, 21 bp, synthetic construct
  misc_feature 1..21: note = Description of Artificial Sequence: Synthetic oligonucleotide
  source 1..21: mol_type = other DNA
gttgcatccagtttgcaaagt

SEQ ID NO: 8290 - protein, 7 aa, synthetic construct
  REGION 1..7: note = Description of Artificial Sequence: Synthetic peptide
VASSLQS

SEQ ID NO: 8291 - DNA, 21 bp, synthetic construct
  misc_feature 1..21: note = Description of Artificial Sequence: Synthetic oligonucleotide
  source 1..21: mol_type = other DNA
gttgcatccagtttgcaaagt

SEQ ID NO: 8292 - protein, 7 aa, synthetic construct
  REGION 1..7: note = Description of Artificial Sequence: Synthetic peptide
VASSLQS

SEQ ID NO: 8293 - DNA, 21 bp, synthetic construct
  misc_feature 1..21: note = Description of Artificial Sequence: Synthetic oligonucleotide
  source 1..21: mol_type = other DNA
actgcatccagtttgcaaagt

SEQ ID NO: 8294 - protein, 7 aa, synthetic construct
  REGION 1..7: note = Description of Artificial Sequence: Synthetic peptide
TASSLQS

SEQ ID NO: 8295 - DNA, 21 bp, synthetic construct
  misc_feature 1..21: note = Description of Artificial Sequence: Synthetic oligonucleotide
  source 1..21: mol_type = other DNA
gctgcatccagtttgcaaagt

SEQ ID NO: 8296 - protein, 7 aa, synthetic construct
  REGION 1..7: note = Description of Artificial Sequence: Synthetic peptide
AASSLQS

SEQ ID NO: 8297 - DNA, 21 bp, synthetic construct
  misc_feature 1..21: note = Description of Artificial Sequence: Synthetic oligonucleotide
  source 1..21: mol_type = other DNA
gctgcatccaatttgcaaagt

SEQ ID NO: 8298 - protein, 7 aa, synthetic construct
  REGION 1..7: note = Description of Artificial Sequence: Synthetic peptide
AASNLQS

SEQ ID NO: 8299 - DNA, 21 bp, synthetic construct
  misc_feature 1..21: note = Description of Artificial Sequence: Synthetic oligonucleotide
  source 1..21: mol_type = other DNA
ttgggttctcatcgggcctcc

SEQ ID NO: 8300 - protein, 7 aa, synthetic construct
  REGION 1..7: note = Description of Artificial Sequence: Synthetic peptide
LGSHRAS

SEQ ID NO: 8301 - DNA, 21 bp, synthetic construct
  misc_feature 1..21: note = Description of Artificial Sequence: Synthetic oligonucleotide
  source 1..21: mol_type = other DNA
gctgcatccagtttgcaaagt

SEQ ID NO: 8302 - protein, 7 aa, synthetic construct
  REGION 1..7: note = Description of Artificial Sequence: Synthetic peptide
AASSLQS

SEQ ID NO: 8303 - DNA, 21 bp, synthetic construct
  misc_feature 1..21: note = Description of Artificial Sequence: Synthetic oligonucleotide
  source 1..21: mol_type = other DNA
gctgcatccagtttacaaagt

SEQ ID NO: 8304 - protein, 7 aa, synthetic construct
  REGION 1..7: note = Description of Artificial Sequence: Synthetic peptide
AASSLQS

SEQ ID NO: 8305 - DNA, 21 bp, synthetic construct
  misc_feature 1..21: note = Description of Artificial Sequence: Synthetic oligonucleotide
  source 1..21: mol_type = other DNA
gctgcatccactttgcaatca

SEQ ID NO: 8306 - protein, 7 aa, synthetic construct
  REGION 1..7: note = Description of Artificial Sequence: Synthetic peptide
AASTLQS

SEQ ID NO: 8307 - DNA, 21 bp, synthetic construct
  misc_feature 1..21: note = Description of Artificial Sequence: Synthetic oligonucleotide
  source 1..21: mol_type = other DNA
gctgcatccagtttgcaaagt

SEQ ID NO: 8308 - protein, 7 aa, synthetic construct
  REGION 1..7: note = Description of Artificial Sequence: Synthetic peptide
AASSLQS

SEQ ID NO: 8309 - DNA, 21 bp, synthetic construct
  misc_feature 1..21: note = Description of Artificial Sequence: Synthetic oligonucleotide
  source 1..21: mol_type = other DNA
actacatctagtttacaaagt

SEQ ID NO: 8310 - protein, 7 aa, synthetic construct
  REGION 1..7: note = Description of Artificial Sequence: Synthetic peptide
TTSSLQS

SEQ ID NO: 8311 - DNA, 21 bp, synthetic construct
  misc_feature 1..21: note = Description of Artificial Sequence: Synthetic oligonucleotide
  source 1..21: mol_type = other DNA
actgcatccagtttgcaaagt

SEQ ID NO: 8312 - protein, 7 aa, synthetic construct
  REGION 1..7: note = Description of Artificial Sequence: Synthetic peptide
TASSLQS

SEQ ID NO: 8313 - DNA, 21 bp, synthetic construct
  misc_feature 1..21: note = Description of Artificial Sequence: Synthetic oligonucleotide
  source 1..21: mol_type = other DNA
ggtgcatccaccagggccagt

SEQ ID NO: 8314 - protein, 7 aa, synthetic construct
  REGION 1..7: note = Description of Artificial Sequence: Synthetic peptide
GASTRAS

SEQ ID NO: 8315 - DNA, 21 bp, synthetic construct
  misc_feature 1..21: note = Description of Artificial Sequence: Synthetic oligonucleotide
  source 1..21: mol_type = other DNA
actgcatccagtttgcaaagt

SEQ ID NO: 8316 - protein, 7 aa, synthetic construct
  REGION 1..7: note = Description of Artificial Sequence: Synthetic peptide
TASSLQS

SEQ ID NO: 8317 - DNA, 21 bp, synthetic construct
  misc_feature 1..21: note = Description of Artificial Sequence: Synthetic oligonucleotide
  source 1..21: mol_type = other DNA
actgcatccagtttgcaaact

SEQ ID NO: 8318 - protein, 7 aa, synthetic construct
  REGION 1..7: note = Description of Artificial Sequence: Synthetic peptide
TASSLQT

SEQ ID NO: 8319 - DNA, 21 bp, synthetic construct
  misc_feature 1..21: note = Description of Artificial Sequence: Synthetic oligonucleotide
  source 1..21: mol_type = other DNA
actgcatccaatttgcaaagt

SEQ ID NO: 8320 - protein, 7 aa, synthetic construct
  REGION 1..7: note = Description of Artificial Sequence: Synthetic peptide
TASNLQS

SEQ ID NO: 8321 - DNA, 21 bp, synthetic construct
  misc_feature 1..21: note = Description of Artificial Sequence: Synthetic oligonucleotide
  source 1..21: mol_type = other DNA
gctgcatccagtttgcaaagt

SEQ ID NO: 8322 - protein, 7 aa, synthetic construct
  REGION 1..7: note = Description of Artificial Sequence: Synthetic peptide
AASSLQS

SEQ ID NO: 8323 - DNA, 21 bp, synthetic construct
  misc_feature 1..21: note = Description of Artificial Sequence: Synthetic oligonucleotide
  source 1..21: mol_type = other DNA
gctgcatccagtttgcaaagt

SEQ ID NO: 8324 - protein, 7 aa, synthetic construct
  REGION 1..7: note = Description of Artificial Sequence: Synthetic peptide
AASSLQS

SEQ ID NO: 8325 - DNA, 21 bp, synthetic construct
  misc_feature 1..21: note = Description of Artificial Sequence: Synthetic oligonucleotide
  source 1..21: mol_type = other DNA
gctgcatccagtttgcaaagt

SEQ ID NO: 8326 - protein, 7 aa, synthetic construct
  REGION 1..7: note = Description of Artificial Sequence: Synthetic peptide
AASSLQS

SEQ ID NO: 8327 - DNA, 21 bp, synthetic construct
  misc_feature 1..21: note = Description of Artificial Sequence: Synthetic oligonucleotide
  source 1..21: mol_type = other DNA
gctgcatccagtttgctgagt

SEQ ID NO: 8328 - protein, 7 aa, synthetic construct
  REGION 1..7: note = Description of Artificial Sequence: Synthetic peptide
AASSLLS

SEQ ID NO: 8329 - DNA, 21 bp, synthetic construct
  misc_feature 1..21: note = Description of Artificial Sequence: Synthetic oligonucleotide
  source 1..21: mol_type = other DNA
gctgcatccagtttgcaaagt

SEQ ID NO: 8330 - protein, 7 aa, synthetic construct
  REGION 1..7: note = Description of Artificial Sequence: Synthetic peptide
AASSLQS

SEQ ID NO: 8331 - DNA, 21 bp, synthetic construct
  misc_feature 1..21: note = Description of Artificial Sequence: Synthetic oligonucleotide
  source 1..21: mol_type = other DNA
gctacatacagtttggaaagt

SEQ ID NO: 8332 - protein, 7 aa, synthetic construct
  REGION 1..7: note = Description of Artificial Sequence: Synthetic peptide
ATYSLES

SEQ ID NO: 8333 - DNA, 21 bp, synthetic construct
  misc_feature 1..21: note = Description of Artificial Sequence: Synthetic oligonucleotide
  source 1..21: mol_type = other DNA
actgcatccagtttgcaaagt

SEQ ID NO: 8334 - protein, 7 aa, synthetic construct
  REGION 1..7: note = Description of Artificial Sequence: Synthetic peptide
TASSLQS

SEQ ID NO: 8335 - DNA, 21 bp, synthetic construct
  misc_feature 1..21: note = Description of Artificial Sequence: Synthetic oligonucleotide
  source 1..21: mol_type = other DNA
gctgcttccagtttgcaaagt

SEQ ID NO: 8336 - protein, 7 aa, synthetic construct
  REGION 1..7: note = Description of Artificial Sequence: Synthetic peptide
AASSLQS

SEQ ID NO: 8337 - DNA, 21 bp, synthetic construct
  misc_feature 1..21: note = Description of Artificial Sequence: Synthetic oligonucleotide
  source 1..21: mol_type = other DNA
gctgcatccagtttgcaaaat

SEQ ID NO: 8338 - protein, 7 aa, synthetic construct
  REGION 1..7: note = Description of Artificial Sequence: Synthetic peptide
AASSLQN

SEQ ID NO: 8339 - DNA, 21 bp, synthetic construct
  misc_feature 1..21: note = Description of Artificial Sequence: Synthetic oligonucleotide
  source 1..21: mol_type = other DNA
gctgcatccagtttacaaagt

SEQ ID NO: 8340 - protein, 7 aa, synthetic construct
  REGION 1..7: note = Description of Artificial Sequence: Synthetic peptide
AASSLQS

SEQ ID NO: 8341 - DNA, 21 bp, synthetic construct
  misc_feature 1..21: note = Description of Artificial Sequence: Synthetic oligonucleotide
  source 1..21: mol_type = other DNA
tctacatccagtttgcaaagt

SEQ ID NO: 8342 - protein, 7 aa, synthetic construct
  REGION 1..7: note = Description of Artificial Sequence: Synthetic peptide
STSSLQS

SEQ ID NO: 8343 - DNA, 21 bp, synthetic construct
  misc_feature 1..21: note = Description of Artificial Sequence: Synthetic oligonucleotide
  source 1..21: mol_type = other DNA
ggtgcatccaccagggccagt

SEQ ID NO: 8344 - protein, 7 aa, synthetic construct
  REGION 1..7: note = Description of Artificial Sequence: Synthetic peptide
GASTRAS

SEQ ID NO: 8345 - DNA, 21 bp, synthetic construct
  misc_feature 1..21: note = Description of Artificial Sequence: Synthetic oligonucleotide
  source 1..21: mol_type = other DNA
actgcatccagtttgcaaagt

SEQ ID NO: 8346 - protein, 7 aa, synthetic construct
  REGION 1..7: note = Description of Artificial Sequence: Synthetic peptide
TASSLQS

SEQ ID NO: 8347 - DNA, 21 bp, synthetic construct
  misc_feature 1..21: note = Description of Artificial Sequence: Synthetic oligonucleotide
  source 1..21: mol_type = other DNA
gctgcatccagtttacaaagt

SEQ ID NO: 8348 - protein, 7 aa, synthetic construct
  REGION 1..7: note = Description of Artificial Sequence: Synthetic peptide
AASSLQS

SEQ ID NO: 8349 - DNA, 21 bp, synthetic construct
  misc_feature 1..21: note = Description of Artificial Sequence: Synthetic oligonucleotide
  source 1..21: mol_type = other DNA
gctgcatccagtttgcaaagt

SEQ ID NO: 8350 - protein, 7 aa, synthetic construct
  REGION 1..7: note = Description of Artificial Sequence: Synthetic peptide
AASSLQS

SEQ ID NO: 8351 - DNA, 21 bp, synthetic construct
  misc_feature 1..21: note = Description of Artificial Sequence: Synthetic oligonucleotide
  source 1..21: mol_type = other DNA
gctgcatccagtttgcaaagt

SEQ ID NO: 8352 - protein, 7 aa, synthetic construct
  REGION 1..7: note = Description of Artificial Sequence: Synthetic peptide
AASSLQS

SEQ ID NO: 8353 - DNA, 21 bp, synthetic construct
  misc_feature 1..21: note = Description of Artificial Sequence: Synthetic oligonucleotide
  source 1..21: mol_type = other DNA
cctgcatccagtttgcaaact

SEQ ID NO: 8354 - protein, 7 aa, synthetic construct
  REGION 1..7: note = Description of Artificial Sequence: Synthetic peptide
PASSLQT

SEQ ID NO: 8355 - DNA, 21 bp, synthetic construct
  misc_feature 1..21: note = Description of Artificial Sequence: Synthetic oligonucleotide
  source 1..21: mol_type = other DNA
actgcatccagtttgcaaagt

SEQ ID NO: 8356 - protein, 7 aa, synthetic construct
  REGION 1..7: note = Description of Artificial Sequence: Synthetic peptide
TASSLQS

SEQ ID NO: 8357 - DNA, 21 bp, synthetic construct
  misc_feature 1..21: note = Description of Artificial Sequence: Synthetic oligonucleotide
  source 1..21: mol_type = other DNA
ggtgcatccagtttgcggagt

SEQ ID NO: 8358 - protein, 7 aa, synthetic construct
  REGION 1..7: note = Description of Artificial Sequence: Synthetic peptide
GASSLRS

SEQ ID NO: 8359 - DNA, 21 bp, synthetic construct
  misc_feature 1..21: note = Description of Artificial Sequence: Synthetic oligonucleotide
  source 1..21: mol_type = other DNA
gctgcatccagtttgcaaagt

SEQ ID NO: 8360 - protein, 7 aa, synthetic construct
  REGION 1..7: note = Description of Artificial Sequence: Synthetic peptide
AASSLQS

SEQ ID NO: 8361 - DNA, 21 bp, synthetic construct
  misc_feature 1..21: note = Description of Artificial Sequence: Synthetic oligonucleotide
  source 1..21: mol_type = other DNA
tgggcatctacccgggaatcc

SEQ ID NO: 8362 - protein, 7 aa, synthetic construct
  REGION 1..7: note = Description of Artificial Sequence: Synthetic peptide
WASTRES

SEQ ID NO: 8363 - DNA, 21 bp, synthetic construct
  misc_feature 1..21: note = Description of Artificial Sequence: Synthetic oligonucleotide
  source 1..21: mol_type = other DNA
gctgcatccagtttgcaaagt

SEQ ID NO: 8364 - protein, 7 aa, synthetic construct
  REGION 1..7: note = Description of Artificial Sequence: Synthetic peptide
AASSLQS

SEQ ID NO: 8365 - DNA, 21 bp, synthetic construct
  misc_feature 1..21: note = Description of Artificial Sequence: Synthetic oligonucleotide
  source 1..21: mol_type = other DNA
gttgcatacagtttgcaaagt

SEQ ID NO: 8366 - protein, 7 aa, synthetic construct
  REGION 1..7: note = Description of Artificial Sequence: Synthetic peptide
VAYSLQS

SEQ ID NO: 8367 - DNA, 21 bp, synthetic construct
  misc_feature 1..21: note = Description of Artificial Sequence: Synthetic oligonucleotide
  source 1..21: mol_type = other DNA
actgcatccactttgcaatca

SEQ ID NO: 8368 - protein, 7 aa, synthetic construct
  REGION 1..7: note = Description of Artificial Sequence: Synthetic peptide
TASTLQS

SEQ ID NO: 8369 - DNA, 21 bp, synthetic construct
  misc_feature 1..21: note = Description of Artificial Sequence: Synthetic oligonucleotide
  source 1..21: mol_type = other DNA
gctgcgtccagtgtgcaaact

SEQ ID NO: 8370 - protein, 7 aa, synthetic construct
  REGION 1..7: note = Description of Artificial Sequence: Synthetic peptide
AASSVQT

SEQ ID NO: 8371 - DNA, 21 bp, synthetic construct
  misc_feature 1..21: note = Description of Artificial Sequence: Synthetic oligonucleotide
  source 1..21: mol_type = other DNA
gctgcatccagtttgcaaagt

SEQ ID NO: 8372 - protein, 7 aa, synthetic construct
  REGION 1..7: note = Description of Artificial Sequence: Synthetic peptide
AASSLQS

SEQ ID NO: 8373 - DNA, 21 bp, synthetic construct
  misc_feature 1..21: note = Description of Artificial Sequence: Synthetic oligonucleotide
  source 1..21: mol_type = other DNA
attgcatccagtttgcaaagt

SEQ ID NO: 8374 - protein, 7 aa, synthetic construct
  REGION 1..7: note = Description of Artificial Sequence: Synthetic peptide
IASSLQS

SEQ ID NO: 8375 - DNA, 21 bp, synthetic construct
  misc_feature 1..21: note = Description of Artificial Sequence: Synthetic oligonucleotide
  source 1..21: mol_type = other DNA
gctgcatccagtttgcagagt

SEQ ID NO: 8376 - protein, 7 aa, synthetic construct
  REGION 1..7: note = Description of Artificial Sequence: Synthetic peptide
AASSLQS

SEQ ID NO: 8377 - DNA, 21 bp, synthetic construct
  misc_feature 1..21: note = Description of Artificial Sequence: Synthetic oligonucleotide
  source 1..21: mol_type = other DNA
gctgcatccagtttgcaaagt

SEQ ID NO: 8378 - protein, 7 aa, synthetic construct
  REGION 1..7: note = Description of Artificial Sequence: Synthetic peptide
AASSLQS

SEQ ID NO: 8379 - DNA, 21 bp, synthetic construct
  misc_feature 1..21: note = Description of Artificial Sequence: Synthetic oligonucleotide
  source 1..21: mol_type = other DNA
tttgcatccatcagggccact

SEQ ID NO: 8380 - protein, 7 aa, synthetic construct
  REGION 1..7: note = Description of Artificial Sequence: Synthetic peptide
FASIRAT

SEQ ID NO: 8381 - DNA, 21 bp, synthetic construct
  misc_feature 1..21: note = Description of Artificial Sequence: Synthetic oligonucleotide
  source 1..21: mol_type = other DNA
gctgcttccagtttgcaaagt

SEQ ID NO: 8382 - protein, 7 aa, synthetic construct
  REGION 1..7: note = Description of Artificial Sequence: Synthetic peptide
AASSLQS

SEQ ID NO: 8383 - DNA, 21 bp, synthetic construct
  misc_feature 1..21: note = Description of Artificial Sequence: Synthetic oligonucleotide
  source 1..21: mol_type = other DNA
gctgcatccagtttgcaaagt

SEQ ID NO: 8384 - protein, 7 aa, synthetic construct
  REGION 1..7: note = Description of Artificial Sequence: Synthetic peptide
AASSLQS

SEQ ID NO: 8385 - DNA, 21 bp, synthetic construct
  misc_feature 1..21: note = Description of Artificial Sequence: Synthetic oligonucleotide
  source 1..21: mol_type = other DNA
gctgcatccagtttgcaaagt

SEQ ID NO: 8386 - protein, 7 aa, synthetic construct
  REGION 1..7: note = Description of Artificial Sequence: Synthetic peptide
AASSLQS

SEQ ID NO: 8387 - DNA, 21 bp, synthetic construct
  misc_feature 1..21: note = Description of Artificial Sequence: Synthetic oligonucleotide
  source 1..21: mol_type = other DNA
gaagtttccaaccggttctct

SEQ ID NO: 8388 - protein, 7 aa, synthetic construct
  REGION 1..7: note = Description of Artificial Sequence: Synthetic peptide
EVSNRFS

SEQ ID NO: 8389 - DNA, 21 bp, synthetic construct
  misc_feature 1..21: note = Description of Artificial Sequence: Synthetic oligonucleotide
  source 1..21: mol_type = other DNA
gctgcatccagtttgcaaagt

SEQ ID NO: 8390 - protein, 7 aa, synthetic construct
  REGION 1..7: note = Description of Artificial Sequence: Synthetic peptide
AASSLQS

SEQ ID NO: 8391 - DNA, 21 bp, synthetic construct
  misc_feature 1..21: note = Description of Artificial Sequence: Synthetic oligonucleotide
  source 1..21: mol_type = other DNA
gctgcatacagtttggaaagt

SEQ ID NO: 8392 - protein, 7 aa, synthetic construct
  REGION 1..7: note = Description of Artificial Sequence: Synthetic peptide
AAYSLES

SEQ ID NO: 8393 - DNA, 21 bp, synthetic construct
  misc_feature 1..21: note = Description of Artificial Sequence: Synthetic oligonucleotide
  source 1..21: mol_type = other DNA
gctgcatccagtttacaaagt

SEQ ID NO: 8394 - protein, 7 aa, synthetic construct
  REGION 1..7: note = Description of Artificial Sequence: Synthetic peptide
AASSLQS

SEQ ID NO: 8395 - DNA, 21 bp, synthetic construct
  misc_feature 1..21: note = Description of Artificial Sequence: Synthetic oligonucleotide
  source 1..21: mol_type = other DNA
ggtgcatccagtgtgcaaagt

SEQ ID NO: 8396 - protein, 7 aa, synthetic construct
  REGION 1..7: note = Description of Artificial Sequence: Synthetic peptide
GASSVQS

SEQ ID NO: 8397 - DNA, 21 bp, synthetic construct
  misc_feature 1..21: note = Description of Artificial Sequence: Synthetic oligonucleotide
  source 1..21: mol_type = other DNA
gctgcatccagtttgcaaagt

SEQ ID NO: 8398 - protein, 7 aa, synthetic construct
  REGION 1..7: note = Description of Artificial Sequence: Synthetic peptide
AASSLQS

SEQ ID NO: 8399 - DNA, 21 bp, synthetic construct
  misc_feature 1..21: note = Description of Artificial Sequence: Synthetic oligonucleotide
  source 1..21: mol_type = other DNA
gttgcatccagtttgcaaagt

SEQ ID NO: 8400 - protein, 7 aa, synthetic construct
  REGION 1..7: note = Description of Artificial Sequence: Synthetic peptide
VASSLQS

SEQ ID NO: 8401 - DNA, 21 bp, synthetic construct
  misc_feature 1..21: note = Description of Artificial Sequence: Synthetic oligonucleotide
  source 1..21: mol_type = other DNA
gctgcatccagtttgcaaagt

SEQ ID NO: 8402 - protein, 7 aa, synthetic construct
  REGION 1..7: note = Description of Artificial Sequence: Synthetic peptide
AASSLQS

SEQ ID NO: 8403 - DNA, 21 bp, synthetic construct
  misc_feature 1..21: note = Description of Artificial Sequence: Synthetic oligonucleotide
  source 1..21: mol_type = other DNA
gctgcatccagtttacaaagt

SEQ ID NO: 8404 - protein, 7 aa, synthetic construct
  REGION 1..7: note = Description of Artificial Sequence: Synthetic peptide
AASSLQS

SEQ ID NO: 8405 - DNA, 21 bp, synthetic construct
  misc_feature 1..21: note = Description of Artificial Sequence: Synthetic oligonucleotide
  source 1..21: mol_type = other DNA
gctgcatccagtttgcaaagt

SEQ ID NO: 8406 - protein, 7 aa, synthetic construct
  REGION 1..7: note = Description of Artificial Sequence: Synthetic peptide
AASSLQS

SEQ ID NO: 8407 - DNA, 21 bp, synthetic construct
  misc_feature 1..21: note = Description of Artificial Sequence: Synthetic oligonucleotide
  source 1..21: mol_type = other DNA
gctgcatccagtttgcaaagt

SEQ ID NO: 8408 - protein, 7 aa, synthetic construct
  REGION 1..7: note = Description of Artificial Sequence: Synthetic peptide
AASSLQS

SEQ ID NO: 8409 - DNA, 21 bp, synthetic construct
  misc_feature 1..21: note = Description of Artificial Sequence: Synthetic oligonucleotide
  source 1..21: mol_type = other DNA
gctgcatccagtttgcaaagt

SEQ ID NO: 8410 - protein, 7 aa, synthetic construct
  REGION 1..7: note = Description of Artificial Sequence: Synthetic peptide
AASSLQS

SEQ ID NO: 8411 - DNA, 21 bp, synthetic construct
  misc_feature 1..21: note = Description of Artificial Sequence: Synthetic oligonucleotide
  source 1..21: mol_type = other DNA
gctgcatccagtttacagagt

SEQ ID NO: 8412 - protein, 7 aa, synthetic construct
  REGION 1..7: note = Description of Artificial Sequence: Synthetic peptide
AASSLQS

SEQ ID NO: 8413 - DNA, 21 bp, synthetic construct
  misc_feature 1..21: note = Description of Artificial Sequence: Synthetic oligonucleotide
  source 1..21: mol_type = other DNA
gctgcatccagtttgcaaagt

SEQ ID NO: 8414 - protein, 7 aa, synthetic construct
  REGION 1..7: note = Description of Artificial Sequence: Synthetic peptide
AASSLQS

SEQ ID NO: 8415 - DNA, 21 bp, synthetic construct
  misc_feature 1..21: note = Description of Artificial Sequence: Synthetic oligonucleotide
  source 1..21: mol_type = other DNA
cctgcatccagtttgcaaagt

SEQ ID NO: 8416 - protein, 7 aa, synthetic construct
  REGION 1..7: note = Description of Artificial Sequence: Synthetic peptide
PASSLQS

SEQ ID NO: 8417 - DNA, 21 bp, synthetic construct
  misc_feature 1..21: note = Description of Artificial Sequence: Synthetic oligonucleotide
  source 1..21: mol_type = other DNA
gctgcatccagtttgcacagt

SEQ ID NO: 8418 - protein, 7 aa, synthetic construct
  REGION 1..7: note = Description of Artificial Sequence: Synthetic peptide
AASSLHS

SEQ ID NO: 8419 - DNA, 21 bp, synthetic construct
  misc_feature 1..21: note = Description of Artificial Sequence: Synthetic oligonucleotide
  source 1..21: mol_type = other DNA
gctgcatccagtttgcaaagt

SEQ ID NO: 8420 - protein, 7 aa, synthetic construct
  REGION 1..7: note = Description of Artificial Sequence: Synthetic peptide
AASSLQS

SEQ ID NO: 8421 - DNA, 21 bp, synthetic construct
  misc_feature 1..21: note = Description of Artificial Sequence: Synthetic oligonucleotide
  source 1..21: mol_type = other DNA
gctgcatccagtttgcaaagt

SEQ ID NO: 8422 - protein, 7 aa, synthetic construct
  REGION 1..7: note = Description of Artificial Sequence: Synthetic peptide
AASSLQS

SEQ ID NO: 8423 - DNA, 21 bp, synthetic construct
  misc_feature 1..21: note = Description of Artificial Sequence: Synthetic oligonucleotide
  source 1..21: mol_type = other DNA
gctgcatccagtttgcaaagt

SEQ ID NO: 8424 - protein, 7 aa, synthetic construct
  REGION 1..7: note = Description of Artificial Sequence: Synthetic peptide
AASSLQS

SEQ ID NO: 8425 - DNA, 21 bp, synthetic construct
  misc_feature 1..21: note = Description of Artificial Sequence: Synthetic oligonucleotide
  source 1..21: mol_type = other DNA
gctacatccagtttgcaaagt

SEQ ID NO: 8426 - protein, 7 aa, synthetic construct
  REGION 1..7: note = Description of Artificial Sequence: Synthetic peptide
ATSSLQS

SEQ ID NO: 8427 - DNA, 21 bp, synthetic construct
  misc_feature 1..21: note = Description of Artificial Sequence: Synthetic oligonucleotide
  source 1..21: mol_type = other DNA
gctgcatccagtttgcaaagt

SEQ ID NO: 8428 - protein, 7 aa, synthetic construct
  REGION 1..7: note = Description of Artificial Sequence: Synthetic peptide
AASSLQS

SEQ ID NO: 8429 - DNA, 21 bp, synthetic construct
  misc_feature 1..21: note = Description of Artificial Sequence: Synthetic oligonucleotide
  source 1..21: mol_type = other DNA
gctgcatccagtgtgcaaagt

SEQ ID NO: 8430 - protein, 7 aa, synthetic construct
  REGION 1..7: note = Description of Artificial Sequence: Synthetic peptide
AASSVQS

SEQ ID NO: 8431 - DNA, 21 bp, synthetic construct
  misc_feature 1..21: note = Description of Artificial Sequence: Synthetic oligonucleotide
  source 1..21: mol_type = other DNA
gaagtttccaaccggttctct

SEQ ID NO: 8432 - protein, 7 aa, synthetic construct
  REGION 1..7: note = Description of Artificial Sequence: Synthetic peptide
EVSNRFS

SEQ ID NO: 8433 - DNA, 21 bp, synthetic construct
  misc_feature 1..21: note = Description of Artificial Sequence: Synthetic oligonucleotide
  source 1..21: mol_type = other DNA
ggtgcatccagcagggccagt

SEQ ID NO: 8434 - protein, 7 aa, synthetic construct
  REGION 1..7: note = Description of Artificial Sequence: Synthetic peptide
GASSRAS

SEQ ID NO: 8435 - DNA, 21 bp, synthetic construct
  misc_feature 1..21: note = Description of Artificial Sequence: Synthetic oligonucleotide
  source 1..21: mol_type = other DNA
gctgcatccagtttgcaaagt

SEQ ID NO: 8436 - protein, 7 aa, synthetic construct
  REGION 1..7: note = Description of Artificial Sequence: Synthetic peptide
AASSLQS

SEQ ID NO: 8437 - DNA, 21 bp, synthetic construct
  misc_feature 1..21: note = Description of Artificial Sequence: Synthetic oligonucleotide
  source 1..21: mol_type = other DNA
gatgcatccgatttggaaaca

SEQ ID NO: 8438 - protein, 7 aa, synthetic construct
  REGION 1..7: note = Description of Artificial Sequence: Synthetic peptide
DASDLET

SEQ ID NO: 8439 - DNA, 21 bp, synthetic construct
  misc_feature 1..21: note = Description of Artificial Sequence: Synthetic oligonucleotide
  source 1..21: mol_type = other DNA
gctgcatccagtttgcaaagt

SEQ ID NO: 8440 - protein, 7 aa, synthetic construct
  REGION 1..7: note = Description of Artificial Sequence: Synthetic peptide
AASSLQS

SEQ ID NO: 8441 - DNA, 21 bp, synthetic construct
  misc_feature 1..21: note = Description of Artificial Sequence: Synthetic oligonucleotide
  source 1..21: mol_type = other DNA
gctgcatccagtttgcatagt

SEQ ID NO: 8442 - protein, 7 aa, synthetic construct
  REGION 1..7: note = Description of Artificial Sequence: Synthetic peptide
AASSLHS

SEQ ID NO: 8443 - DNA, 21 bp, synthetic construct
  misc_feature 1..21: note = Description of Artificial Sequence: Synthetic oligonucleotide
  source 1..21: mol_type = other DNA
gatacatccagtttgcaaagt

SEQ ID NO: 8444 - protein, 7 aa, synthetic construct
  REGION 1..7: note = Description of Artificial Sequence: Synthetic peptide
DTSSLQS

SEQ ID NO: 8445 - DNA, 21 bp, synthetic construct
  misc_feature 1..21: note = Description of Artificial Sequence: Synthetic oligonucleotide
  source 1..21: mol_type = other DNA
gctgcatccaattttcaaagt

SEQ ID NO: 8446 - protein, 7 aa, synthetic construct
  REGION 1..7: note = Description of Artificial Sequence: Synthetic peptide
AASNFQS

SEQ ID NO: 8447 - DNA, 21 bp, synthetic construct
  misc_feature 1..21: note = Description of Artificial Sequence: Synthetic oligonucleotide
  source 1..21: mol_type = other DNA
gctgcatccgttttgcaacat

SEQ ID NO: 8448 - protein, 7 aa, synthetic construct
  REGION 1..7: note = Description of Artificial Sequence: Synthetic peptide
AASVLQH

SEQ ID NO: 8449 - DNA, 21 bp, synthetic construct
  misc_feature 1..21: note = Description of Artificial Sequence: Synthetic oligonucleotide
  source 1..21: mol_type = other DNA
gctgcatccagtttacaaagt

SEQ ID NO: 8450 - protein, 7 aa, synthetic construct
  REGION 1..7: note = Description of Artificial Sequence: Synthetic peptide
AASSLQS

SEQ ID NO: 8451 - DNA, 21 bp, synthetic construct
  misc_feature 1..21: note = Description of Artificial Sequence: Synthetic oligonucleotide
  source 1..21: mol_type = other DNA
gctgcatccagtgtgcaaagt

SEQ ID NO: 8452 - protein, 7 aa, synthetic construct
  REGION 1..7: note = Description of Artificial Sequence: Synthetic peptide
AASSVQS

SEQ ID NO: 8453 - DNA, 21 bp, synthetic construct
  misc_feature 1..21: note = Description of Artificial Sequence: Synthetic oligonucleotide
  source 1..21: mol_type = other DNA
gctgcatccagtttgcaaagt

SEQ ID NO: 8454 - protein, 7 aa, synthetic construct
  REGION 1..7: note = Description of Artificial Sequence: Synthetic peptide
AASSLQS

SEQ ID NO: 8455 - DNA, 21 bp, synthetic construct
  misc_feature 1..21: note = Description of Artificial Sequence: Synthetic oligonucleotide
  source 1..21: mol_type = other DNA
tggacatctacccgggaatcc

SEQ ID NO: 8456 - protein, 7 aa, synthetic construct
  REGION 1..7: note = Description of Artificial Sequence: Synthetic peptide
WTSTRES

SEQ ID NO: 8457 - DNA, 21 bp, synthetic construct
  misc_feature 1..21: note = Description of Artificial Sequence: Synthetic oligonucleotide
  source 1..21: mol_type = other DNA
gaaatttccaaccggttctct

SEQ ID NO: 8458 - protein, 7 aa, synthetic construct
  REGION 1..7: note = Description of Artificial Sequence: Synthetic peptide
EISNRFS

SEQ ID NO: 8459 - DNA, 21 bp, synthetic construct
  misc_feature 1..21: note = Description of Artificial Sequence: Synthetic oligonucleotide
  source 1..21: mol_type = other DNA
gctgcatccagtttgcaaagt

SEQ ID NO: 8460 - protein, 7 aa, synthetic construct
  REGION 1..7: note = Description of Artificial Sequence: Synthetic peptide
AASSLQS

SEQ ID NO: 8461 - DNA, 21 bp, synthetic construct
  misc_feature 1..21: note = Description of Artificial Sequence: Synthetic oligonucleotide
  source 1..21: mol_type = other DNA
gctgcatccagtttgcaaagt

SEQ ID NO: 8462 - protein, 7 aa, synthetic construct
  REGION 1..7: note = Description of Artificial Sequence: Synthetic peptide
AASSLQS

SEQ ID NO: 8463 - DNA, 21 bp, synthetic construct
  misc_feature 1..21: note = Description of Artificial Sequence: Synthetic oligonucleotide
  source 1..21: mol_type = other DNA
acttcatccagtttgcaaagt

SEQ ID NO: 8464 - protein, 7 aa, synthetic construct
  REGION 1..7: note = Description of Artificial Sequence: Synthetic peptide
TSSSLQS

SEQ ID NO: 8465 - DNA, 21 bp, synthetic construct
  misc_feature 1..21: note = Description of Artificial Sequence: Synthetic oligonucleotide
  source 1..21: mol_type = other DNA
gctgcatccagtttgcaaagt

SEQ ID NO: 8466 - protein, 7 aa, synthetic construct
  REGION 1..7: note = Description of Artificial Sequence: Synthetic peptide
AASSLQS

SEQ ID NO: 8467 - DNA, 21 bp, synthetic construct
  misc_feature 1..21: note = Description of Artificial Sequence: Synthetic oligonucleotide
  source 1..21: mol_type = other DNA
ggtgcatccagcagggccact

SEQ ID NO: 8468 - protein, 7 aa, synthetic construct
  REGION 1..7: note = Description of Artificial Sequence: Synthetic peptide
GASSRAT

SEQ ID NO: 8469 - DNA, 21 bp, synthetic construct
  misc_feature 1..21: note = Description of Artificial Sequence: Synthetic oligonucleotide
  source 1..21: mol_type = other DNA
gctgcatccagtttacaaagt

SEQ ID NO: 8470 - protein, 7 aa, synthetic construct
  REGION 1..7: note = Description of Artificial Sequence: Synthetic peptide
AASSLQS

SEQ ID NO: 8471 - DNA, 21 bp, synthetic construct
  misc_feature 1..21: note = Description of Artificial Sequence: Synthetic oligonucleotide
  source 1..21: mol_type = other DNA
gctgcatccagtttgcaaagt

SEQ ID NO: 8472 - protein, 7 aa, synthetic construct
  REGION 1..7: note = Description of Artificial Sequence: Synthetic peptide
AASSLQS

SEQ ID NO: 8473 - DNA, 21 bp, synthetic construct
  misc_feature 1..21: note = Description of Artificial Sequence: Synthetic oligonucleotide
  source 1..21: mol_type = other DNA
gctgcttccagtttgcaaagt

SEQ ID NO: 8474 - protein, 7 aa, synthetic construct
  REGION 1..7: note = Description of Artificial Sequence: Synthetic peptide
AASSLQS

SEQ ID NO: 8475 - DNA, 21 bp, synthetic construct
  misc_feature 1..21: note = Description of Artificial Sequence: Synthetic oligonucleotide
  source 1..21: mol_type = other DNA
gttgcatccagtttgcaaagt

SEQ ID NO: 8476 - protein, 7 aa, synthetic construct
  REGION 1..7: note = Description of Artificial Sequence: Synthetic peptide
VASSLQS

SEQ ID NO: 8477 - DNA, 21 bp, synthetic construct
  misc_feature 1..21: note = Description of Artificial Sequence: Synthetic oligonucleotide
  source 1..21: mol_type = other DNA
gctgcatccagtttgcaaagt

SEQ ID NO: 8478 - protein, 7 aa, synthetic construct
  REGION 1..7: note = Description of Artificial Sequence: Synthetic peptide
AASSLQS

SEQ ID NO: 8479 - DNA, 21 bp, synthetic construct
  misc_feature 1..21: note = Description of Artificial Sequence: Synthetic oligonucleotide
  source 1..21: mol_type = other DNA
gctgcatccagtttacaaagt

SEQ ID NO: 8480 - protein, 7 aa, synthetic construct
  REGION 1..7: note = Description of Artificial Sequence: Synthetic peptide
AASSLQS

SEQ ID NO: 8481 - DNA, 21 bp, synthetic construct
  misc_feature 1..21: note = Description of Artificial Sequence: Synthetic oligonucleotide
  source 1..21: mol_type = other DNA
ggtgcatccagtttgcaaagt

SEQ ID NO: 8482 - protein, 7 aa, synthetic construct
  REGION 1..7: note = Description of Artificial Sequence: Synthetic peptide
GASSLQS

SEQ ID NO: 8483 - DNA, 21 bp, synthetic construct
  misc_feature 1..21: note = Description of Artificial Sequence: Synthetic oligonucleotide
  source 1..21: mol_type = other DNA
actgcatccagtttgcaaagt

SEQ ID NO: 8484 - protein, 7 aa, synthetic construct
  REGION 1..7: note = Description of Artificial Sequence: Synthetic peptide
TASSLQS

SEQ ID NO: 8485 - DNA, 21 bp, synthetic construct
  misc_feature 1..21: note = Description of Artificial Sequence: Synthetic oligonucleotide
  source 1..21: mol_type = other DNA
gctgcatccagtttgcaaagt

SEQ ID NO: 8486 - protein, 7 aa, synthetic construct
  REGION 1..7: note = Description of Artificial Sequence: Synthetic peptide
AASSLQS

SEQ ID NO: 8487 - DNA, 21 bp, synthetic construct
  misc_feature 1..21: note = Description of Artificial Sequence: Synthetic oligonucleotide
  source 1..21: mol_type = other DNA
actgcatccagtttgcaaggt

SEQ ID NO: 8488 - protein, 7 aa, synthetic construct
  REGION 1..7: note = Description of Artificial Sequence: Synthetic peptide
TASSLQG

SEQ ID NO: 8489 - DNA, 21 bp, synthetic construct
  misc_feature 1..21: note = Description of Artificial Sequence: Synthetic oligonucleotide
  source 1..21: mol_type = other DNA
gaactttccaaccggttctct

SEQ ID NO: 8490 - protein, 7 aa, synthetic construct
  REGION 1..7: note = Description of Artificial Sequence: Synthetic peptide
ELSNRFS

SEQ ID NO: 8491 - DNA, 21 bp, synthetic construct
  misc_feature 1..21: note = Description of Artificial Sequence: Synthetic oligonucleotide
  source 1..21: mol_type = other DNA
tgggcatctacccgggaatcc

SEQ ID NO: 8492 - protein, 7 aa, synthetic construct
  REGION 1..7: note = Description of Artificial Sequence: Synthetic peptide
WASTRES

SEQ ID NO: 8493 - DNA, 21 bp, synthetic construct
  misc_feature 1..21: note = Description of Artificial Sequence: Synthetic oligonucleotide
  source 1..21: mol_type = other DNA
gaagtttccaatcggttctct

SEQ ID NO: 8494 - protein, 7 aa, synthetic construct
  REGION 1..7: note = Description of Artificial Sequence: Synthetic peptide
EVSNRFS

SEQ ID NO: 8495 - DNA, 21 bp, synthetic construct
  misc_feature 1..21: note = Description of Artificial Sequence: Synthetic oligonucleotide
  source 1..21: mol_type = other DNA
gctgcatccagtttgcaaagt

SEQ ID NO: 8496 - protein, 7 aa, synthetic construct
  REGION 1..7: note = Description of Artificial Sequence: Synthetic peptide
AASSLQS

SEQ ID NO: 8497 - DNA, 21 bp, synthetic construct
  misc_feature 1..21: note = Description of Artificial Sequence: Synthetic oligonucleotide
  source 1..21: mol_type = other DNA
aaggtttctaactgggactct

SEQ ID NO: 8498 - protein, 7 aa, synthetic construct
  REGION 1..7: note = Description of Artificial Sequence: Synthetic peptide
KVSNWDS

SEQ ID NO: 8499 - DNA, 21 bp, synthetic construct
  misc_feature 1..21: note = Description of Artificial Sequence: Synthetic oligonucleotide
  source 1..21: mol_type = other DNA
gaggtttcccaccggttctct

SEQ ID NO: 8500 - protein, 7 aa, synthetic construct
  REGION 1..7: note = Description of Artificial Sequence: Synthetic peptide
EVSHRFS

SEQ ID NO: 8501 - DNA, 21 bp, synthetic construct
  misc_feature 1..21: note = Description of Artificial Sequence: Synthetic oligonucleotide
  source 1..21: mol_type = other DNA
gctgcatccagtttgcaaagt

SEQ ID NO: 8502 - protein, 7 aa, synthetic construct
  REGION 1..7: note = Description of Artificial Sequence: Synthetic peptide
AASSLQS

SEQ ID NO: 8503 - DNA, 21 bp, synthetic construct
  misc_feature 1..21: note = Description of Artificial Sequence: Synthetic oligonucleotide
  source 1..21: mol_type = other DNA
ggtgcattcagcttgcaaagt

SEQ ID NO: 8504 - protein, 7 aa, synthetic construct
  REGION 1..7: note = Description of Artificial Sequence: Synthetic peptide
GAFSLQS

SEQ ID NO: 8505 - DNA, 21 bp, synthetic construct
  misc_feature 1..21: note = Description of Artificial Sequence: Synthetic oligonucleotide
  source 1..21: mol_type = other DNA
gctgcatccagtttgcaaagt

SEQ ID NO: 8506 - protein, 7 aa, synthetic construct
  REGION 1..7: note = Description of Artificial Sequence: Synthetic peptide
AASSLQS

SEQ ID NO: 8507 - DNA, 21 bp, synthetic construct
  misc_feature 1..21: note = Description of Artificial Sequence: Synthetic oligonucleotide
  source 1..21: mol_type = other DNA
gctgcatccagtttgcaaagt

SEQ ID NO: 8508 - protein, 7 aa, synthetic construct
  REGION 1..7: note = Description of Artificial Sequence: Synthetic peptide
AASSLQS

SEQ ID NO: 8509 - DNA, 21 bp, synthetic construct
  misc_feature 1..21: note = Description of Artificial Sequence: Synthetic oligonucleotide
  source 1..21: mol_type = other DNA
gctgcatccagtttgcaaagt

SEQ ID NO: 8510 - protein, 7 aa, synthetic construct
  REGION 1..7: note = Description of Artificial Sequence: Synthetic peptide
AASSLQS

SEQ ID NO: 8511 - DNA, 21 bp, synthetic construct
  misc_feature 1..21: note = Description of Artificial Sequence: Synthetic oligonucleotide
  source 1..21: mol_type = other DNA
gctgcatccagtttgcgaagt

SEQ ID NO: 8512 - protein, 7 aa, synthetic construct
  REGION 1..7: note = Description of Artificial Sequence: Synthetic peptide
AASSLRS

SEQ ID NO: 8513 - DNA, 21 bp, synthetic construct
  misc_feature 1..21: note = Description of Artificial Sequence: Synthetic oligonucleotide
  source 1..21: mol_type = other DNA
gctgcatccagcttgcaaagt

SEQ ID NO: 8514 - protein, 7 aa, synthetic construct
  REGION 1..7: note = Description of Artificial Sequence: Synthetic peptide
AASSLQS

SEQ ID NO: 8515 - DNA, 21 bp, synthetic construct
  misc_feature 1..21: note = Description of Artificial Sequence: Synthetic oligonucleotide
  source 1..21: mol_type = other DNA
ggtgcatccagtttgcaaagt

SEQ ID NO: 8516 - protein, 7 aa, synthetic construct
  REGION 1..7: note = Description of Artificial Sequence: Synthetic peptide
GASSLQS

SEQ ID NO: 8517 - DNA, 21 bp, synthetic construct
  misc_feature 1..21: note = Description of Artificial Sequence: Synthetic oligonucleotide
  source 1..21: mol_type = other DNA
attgcatccagtttgcaaagt

SEQ ID NO: 8518 - protein, 7 aa, synthetic construct
  REGION 1..7: note = Description of Artificial Sequence: Synthetic peptide
IASSLQS

SEQ ID NO: 8519 - DNA, 21 bp, synthetic construct
  misc_feature 1..21: note = Description of Artificial Sequence: Synthetic oligonucleotide
  source 1..21: mol_type = other DNA
tgggcatcttcccgggaatcc

SEQ ID NO: 8520 - protein, 7 aa, synthetic construct
  REGION 1..7: note = Description of Artificial Sequence: Synthetic peptide
WASSRES

SEQ ID NO: 8521 - DNA, 21 bp, synthetic construct
  misc_feature 1..21: note = Description of Artificial Sequence: Synthetic oligonucleotide
  source 1..21: mol_type = other DNA
gctgcatccagtttgcaaact

SEQ ID NO: 8522 - protein, 7 aa, synthetic construct
  REGION 1..7: note = Description of Artificial Sequence: Synthetic peptide
AASSLQT

SEQ ID NO: 8523 - DNA, 21 bp, synthetic construct
  misc_feature 1..21: note = Description of Artificial Sequence: Synthetic oligonucleotide
  source 1..21: mol_type = other DNA
gctgtatccagtttgcaaagt

SEQ ID NO: 8524 - protein, 7 aa, synthetic construct
  REGION 1..7: note = Description of Artificial Sequence: Synthetic peptide
AVSSLQS

SEQ ID NO: 8525 - DNA, 21 bp, synthetic construct
  misc_feature 1..21: note = Description of Artificial Sequence: Synthetic oligonucleotide
  source 1..21: mol_type = other DNA
gatacatccagtttgcaaagt

SEQ ID NO: 8526 - protein, 7 aa, synthetic construct
  REGION 1..7: note = Description of Artificial Sequence: Synthetic peptide
DTSSLQS

SEQ ID NO: 8527 - DNA, 21 bp, synthetic construct
  misc_feature 1..21: note = Description of Artificial Sequence: Synthetic oligonucleotide
  source 1..21: mol_type = other DNA
cgtgcatccagtttgcaaagt

SEQ ID NO: 8528 - protein, 7 aa, synthetic construct
  REGION 1..7: note = Description of Artificial Sequence: Synthetic peptide
RASSLQS

SEQ ID NO: 8529 - DNA, 21 bp, synthetic construct
  misc_feature 1..21: note = Description of Artificial Sequence: Synthetic oligonucleotide
  source 1..21: mol_type = other DNA
actgcatccagtttgcagagt

SEQ ID NO: 8530 - protein, 7 aa, synthetic construct
  REGION 1..7: note = Description of Artificial Sequence: Synthetic peptide
TASSLQS

SEQ ID NO: 8531 - DNA, 21 bp, synthetic construct
  misc_feature 1..21: note = Description of Artificial Sequence: Synthetic oligonucleotide
  source 1..21: mol_type = other DNA
gctgcatccagtttgcaaagt

SEQ ID NO: 8532 - protein, 7 aa, synthetic construct
  REGION 1..7: note = Description of Artificial Sequence: Synthetic peptide
AASSLQS

SEQ ID NO: 8533 - DNA, 21 bp, synthetic construct
  misc_feature 1..21: note = Description of Artificial Sequence: Synthetic oligonucleotide
  source 1..21: mol_type = other DNA
ggtgcatccagtttgcaaagt

SEQ ID NO: 8534 - protein, 7 aa, synthetic construct
  REGION 1..7: note = Description of Artificial Sequence: Synthetic peptide
GASSLQS

SEQ ID NO: 8535 - DNA, 21 bp, synthetic construct
  misc_feature 1..21: note = Description of Artificial Sequence: Synthetic oligonucleotide
  source 1..21: mol_type = other DNA
gctgcatccagtttgcaaagt

SEQ ID NO: 8536 - protein, 7 aa, synthetic construct
  REGION 1..7: note = Description of Artificial Sequence: Synthetic peptide
AASSLQS

SEQ ID NO: 8537 - DNA, 21 bp, synthetic construct
  misc_feature 1..21: note = Description of Artificial Sequence: Synthetic oligonucleotide
  source 1..21: mol_type = other DNA
gctgcatccagtttgcaaagt

SEQ ID NO: 8538 - protein, 7 aa, synthetic construct
  REGION 1..7: note = Description of Artificial Sequence: Synthetic peptide
AASSLQS

SEQ ID NO: 8539 - DNA, 21 bp, synthetic construct
  misc_feature 1..21: note = Description of Artificial Sequence: Synthetic oligonucleotide
  source 1..21: mol_type = other DNA
gctgcatccagtttgcaaagt

SEQ ID NO: 8540 - protein, 7 aa, synthetic construct
  REGION 1..7: note = Description of Artificial Sequence: Synthetic peptide
AASSLQS

SEQ ID NO: 8541 - DNA, 21 bp, synthetic construct
  misc_feature 1..21: note = Description of Artificial Sequence: Synthetic oligonucleotide
  source 1..21: mol_type = other DNA
gctgcatccagtttgcaaagt

SEQ ID NO: 8542 - protein, 7 aa, synthetic construct
  REGION 1..7: note = Description of Artificial Sequence: Synthetic peptide
AASSLQS

SEQ ID NO: 8543 - DNA, 21 bp, synthetic construct
  misc_feature 1..21: note = Description of Artificial Sequence: Synthetic oligonucleotide
  source 1..21: mol_type = other DNA
ggtgcatccagtttgcaaagt

SEQ ID NO: 8544 - protein, 7 aa, synthetic construct
  REGION 1..7: note = Description of Artificial Sequence: Synthetic peptide
GASSLQS

SEQ ID NO: 8545 - DNA, 21 bp, synthetic construct
  misc_feature 1..21: note = Description of Artificial Sequence: Synthetic oligonucleotide
  source 1..21: mol_type = other DNA
gctgcatccagtttgcaaagt

SEQ ID NO: 8546 - protein, 7 aa, synthetic construct
  REGION 1..7: note = Description of Artificial Sequence: Synthetic peptide
AASSLQS

SEQ ID NO: 8547 - DNA, 21 bp, synthetic construct
  misc_feature 1..21: note = Description of Artificial Sequence: Synthetic oligonucleotide
  source 1..21: mol_type = other DNA
gctgcattcagtttgcaaagt

SEQ ID NO: 8548 - protein, 7 aa, synthetic construct
  REGION 1..7: note = Description of Artificial Sequence: Synthetic peptide
AAFSLQS

SEQ ID NO: 8549 - DNA, 21 bp, synthetic construct
  misc_feature 1..21: note = Description of Artificial Sequence: Synthetic oligonucleotide
  source 1..21: mol_type = other DNA
tgggcatctacccgggaatcc

SEQ ID NO: 8550 - protein, 7 aa, synthetic construct
  REGION 1..7: note = Description of Artificial Sequence: Synthetic peptide
WASTRES

SEQ ID NO: 8551 - DNA, 21 bp, synthetic construct
  misc_feature 1..21: note = Description of Artificial Sequence: Synthetic oligonucleotide
  source 1..21: mol_type = other DNA
gaagtttccaaccggttctct

SEQ ID NO: 8552 - protein, 7 aa, synthetic construct
  REGION 1..7: note = Description of Artificial Sequence: Synthetic peptide
EVSNRFS

SEQ ID NO: 8553 - DNA, 21 bp, synthetic construct
  misc_feature 1..21: note = Description of Artificial Sequence: Synthetic oligonucleotide
  source 1..21: mol_type = other DNA
gctgcatccagtttccaaagt

SEQ ID NO: 8554 - protein, 7 aa, synthetic construct
  REGION 1..7: note = Description of Artificial Sequence: Synthetic peptide
AASSFQS

SEQ ID NO: 8555 - DNA, 21 bp, synthetic construct
  misc_feature 1..21: note = Description of Artificial Sequence: Synthetic oligonucleotide
  source 1..21: mol_type = other DNA
gctgcttctagtttgcaaaat

SEQ ID NO: 8556 - protein, 7 aa, synthetic construct
  REGION 1..7: note = Description of Artificial Sequence: Synthetic peptide
AASSLQN

SEQ ID NO: 8557 - DNA, 21 bp, synthetic construct
  misc_feature 1..21: note = Description of Artificial Sequence: Synthetic oligonucleotide
  source 1..21: mol_type = other DNA
gctgcatccagtttacaaagt

SEQ ID NO: 8558 - protein, 7 aa, synthetic construct
  REGION 1..7: note = Description of Artificial Sequence: Synthetic peptide
AASSLQS

SEQ ID NO: 8559 - DNA, 21 bp, synthetic construct
  misc_feature 1..21: note = Description of Artificial Sequence: Synthetic oligonucleotide
  source 1..21: mol_type = other DNA
gctgcatccagtttgcatagt

SEQ ID NO: 8560 - protein, 7 aa, synthetic construct
  REGION 1..7: note = Description of Artificial Sequence: Synthetic peptide
AASSLHS

SEQ ID NO: 8561 - DNA, 21 bp, synthetic construct
  misc_feature 1..21: note = Description of Artificial Sequence: Synthetic oligonucleotide
  source 1..21: mol_type = other DNA
gctgcatccagtttgcaaagt

SEQ ID NO: 8562 - protein, 7 aa, synthetic construct
  REGION 1..7: note = Description of Artificial Sequence: Synthetic peptide
AASSLQS

SEQ ID NO: 8563 - DNA, 21 bp, synthetic construct
  misc_feature 1..21: note = Description of Artificial Sequence: Synthetic oligonucleotide
  source 1..21: mol_type = other DNA
cctgcatccagtttgcaaagt

SEQ ID NO: 8564 - protein, 7 aa, synthetic construct
  REGION 1..7: note = Description of Artificial Sequence: Synthetic peptide
PASSLQS

SEQ ID NO: 8565 - DNA, 21 bp, synthetic construct
  misc_feature 1..21: note = Description of Artificial Sequence: Synthetic oligonucleotide
  source 1..21: mol_type = other DNA
actgcatccagtttgcaaggt

SEQ ID NO: 8566 - protein, 7 aa, synthetic construct
  REGION 1..7: note = Description of Artificial Sequence: Synthetic peptide
TASSLQG

SEQ ID NO: 8567 - DNA, 21 bp, synthetic construct
  misc_feature 1..21: note = Description of Artificial Sequence: Synthetic oligonucleotide
  source 1..21: mol_type = other DNA
gaagtttcccaccggctctct

SEQ ID NO: 8568 - protein, 7 aa, synthetic construct
  REGION 1..7: note = Description of Artificial Sequence: Synthetic peptide
EVSHRLS

SEQ ID NO: 8569 - DNA, 21 bp, synthetic construct
  misc_feature 1..21: note = Description of Artificial Sequence: Synthetic oligonucleotide
  source 1..21: mol_type = other DNA
ggtgcatccagtttgcaaagt

SEQ ID NO: 8570 - protein, 7 aa, synthetic construct
  REGION 1..7: note = Description of Artificial Sequence: Synthetic peptide
GASSLQS

SEQ ID NO: 8571 - DNA, 21 bp, synthetic construct
  misc_feature 1..21: note = Description of Artificial Sequence: Synthetic oligonucleotide
  source 1..21: mol_type = other DNA
gctgcatccaatttgcaaagt

SEQ ID NO: 8572 - protein, 7 aa, synthetic construct
  REGION 1..7: note = Description of Artificial Sequence: Synthetic peptide
AASNLQS

SEQ ID NO: 8573 - DNA, 21 bp, synthetic construct
  misc_feature 1..21: note = Description of Artificial Sequence: Synthetic oligonucleotide
  source 1..21: mol_type = other DNA
gctgcatccagtttgcaaagt

SEQ ID NO: 8574 - protein, 7 aa, synthetic construct
  REGION 1..7: note = Description of Artificial Sequence: Synthetic peptide
AASSLQS

SEQ ID NO: 8575 - DNA, 21 bp, synthetic construct
  misc_feature 1..21: note = Description of Artificial Sequence: Synthetic oligonucleotide
  source 1..21: mol_type = other DNA
gatggatccagtttggaaaca

SEQ ID NO: 8576 - protein, 7 aa, synthetic construct
  REGION 1..7: note = Description of Artificial Sequence: Synthetic peptide
DGSSLET

SEQ ID NO: 8577 - DNA, 21 bp, synthetic construct
  misc_feature 1..21: note = Description of Artificial Sequence: Synthetic oligonucleotide
  source 1..21: mol_type = other DNA
cctgcatccagtttgcaaagt

SEQ ID NO: 8578 - protein, 7 aa, synthetic construct
  REGION 1..7: note = Description of Artificial Sequence: Synthetic peptide
PASSLQS

SEQ ID NO: 8579 - DNA, 21 bp, synthetic construct
  misc_feature 1..21: note = Description of Artificial Sequence: Synthetic oligonucleotide
  source 1..21: mol_type = other DNA
gatacatccagtttgcaaagt

SEQ ID NO: 8580 - protein, 7 aa, synthetic construct
  REGION 1..7: note = Description of Artificial Sequence: Synthetic peptide
DTSSLQS

SEQ ID NO: 8581 - DNA, 21 bp, synthetic construct
  misc_feature 1..21: note = Description of Artificial Sequence: Synthetic oligonucleotide
  source 1..21: mol_type = other DNA
attgcatccagtttgcaaagt

SEQ ID NO: 8582 - protein, 7 aa, synthetic construct
  REGION 1..7: note = Description of Artificial Sequence: Synthetic peptide
IASSLQS

SEQ ID NO: 8583 - DNA, 21 bp, synthetic construct
  misc_feature 1..21: note = Description of Artificial Sequence: Synthetic oligonucleotide
  source 1..21: mol_type = other DNA
gctgcatccagtttgcaaagt

SEQ ID NO: 8584 - protein, 7 aa, synthetic construct
  REGION 1..7: note = Description of Artificial Sequence: Synthetic peptide
AASSLQS

SEQ ID NO: 8585 - DNA, 21 bp, synthetic construct
  misc_feature 1..21: note = Description of Artificial Sequence: Synthetic oligonucleotide
  source 1..21: mol_type = other DNA
gctgcatccagtttacaaagt

SEQ ID NO: 8586 - protein, 7 aa, synthetic construct
  REGION 1..7: note = Description of Artificial Sequence: Synthetic peptide
AASSLQS

SEQ ID NO: 8587 - DNA, 21 bp, synthetic construct
  misc_feature 1..21: note = Description of Artificial Sequence: Synthetic oligonucleotide
  source 1..21: mol_type = other DNA
gaagtttccaaccggttctct

SEQ ID NO: 8588 - protein, 7 aa, synthetic construct
  REGION 1..7: note = Description of Artificial Sequence: Synthetic peptide
EVSNRFS

SEQ ID NO: 8589 - DNA, 21 bp, synthetic construct
  misc_feature 1..21: note = Description of Artificial Sequence: Synthetic oligonucleotide
  source 1..21: mol_type = other DNA
gttgcatccagtttgcaaagt

SEQ ID NO: 8590 - protein, 7 aa, synthetic construct
  REGION 1..7: note = Description of Artificial Sequence: Synthetic peptide
VASSLQS

SEQ ID NO: 8591 - DNA, 21 bp, synthetic construct
  misc_feature 1..21: note = Description of Artificial Sequence: Synthetic oligonucleotide
  source 1..21: mol_type = other DNA
gaagtttccaaccggttctct

SEQ ID NO: 8592 - protein, 7 aa, synthetic construct
  REGION 1..7: note = Description of Artificial Sequence: Synthetic peptide
EVSNRFS

SEQ ID NO: 8593 - DNA, 21 bp, synthetic construct
  misc_feature 1..21: note = Description of Artificial Sequence: Synthetic oligonucleotide
  source 1..21: mol_type = other DNA
actgcatccagtttgcaaagt

SEQ ID NO: 8594 - protein, 7 aa, synthetic construct
  REGION 1..7: note = Description of Artificial Sequence: Synthetic peptide
TASSLQS

SEQ ID NO: 8595 - DNA, 21 bp, synthetic construct
  misc_feature 1..21: note = Description of Artificial Sequence: Synthetic oligonucleotide
  source 1..21: mol_type = other DNA
gctgcattcagcttgcaaagt

SEQ ID NO: 8596 - protein, 7 aa, synthetic construct
  REGION 1..7: note = Description of Artificial Sequence: Synthetic peptide
AAFSLQS

SEQ ID NO: 8597 - DNA, 21 bp, synthetic construct
  misc_feature 1..21: note = Description of Artificial Sequence: Synthetic oligonucleotide
  source 1..21: mol_type = other DNA
gctgcatccagttcgcaaagt

SEQ ID NO: 8598 - protein, 7 aa, synthetic construct
  REGION 1..7: note = Description of Artificial Sequence: Synthetic peptide
AASSSQS

SEQ ID NO: 8599 - DNA, 21 bp, synthetic construct
  misc_feature 1..21: note = Description of Artificial Sequence: Synthetic oligonucleotide
  source 1..21: mol_type = other DNA
ggtgcatccaccagggccact

SEQ ID NO: 8600 - protein, 7 aa, synthetic construct
  REGION 1..7: note = Description of Artificial Sequence: Synthetic peptide
GASTRAT

SEQ ID NO: 8601 - DNA, 21 bp, synthetic construct
  misc_feature 1..21: note = Description of Artificial Sequence: Synthetic oligonucleotide
  source 1..21: mol_type = other DNA
gctgcatccagtttgcaaagt

SEQ ID NO: 8602 - protein, 7 aa, synthetic construct
  REGION 1..7: note = Description of Artificial Sequence: Synthetic peptide
AASSLQS

SEQ ID NO: 8603 - DNA, 21 bp, synthetic construct
  misc_feature 1..21: note = Description of Artificial Sequence: Synthetic oligonucleotide
  source 1..21: mol_type = other DNA
gctgcatccagtttgcaaagt

SEQ ID NO: 8604 - protein, 7 aa, synthetic construct
  REGION 1..7: note = Description of Artificial Sequence: Synthetic peptide
AASSLQS

SEQ ID NO: 8605 - DNA, 21 bp, synthetic construct
  misc_feature 1..21: note = Description of Artificial Sequence: Synthetic oligonucleotide
  source 1..21: mol_type = other DNA
ggtgcatccaccagggccact

SEQ ID NO: 8606 - protein, 7 aa, synthetic construct
  REGION 1..7: note = Description of Artificial Sequence: Synthetic peptide
GASTRAT

SEQ ID NO: 8607 - DNA, 21 bp, synthetic construct
  misc_feature 1..21: note = Description of Artificial Sequence: Synthetic oligonucleotide
  source 1..21: mol_type = other DNA
gctgcatccagtttgcaaagt

SEQ ID NO: 8608 - protein, 7 aa, synthetic construct
  REGION 1..7: note = Description of Artificial Sequence: Synthetic peptide
AASSLQS

SEQ ID NO: 8609 - DNA, 21 bp, synthetic construct
  misc_feature 1..21: note = Description of Artificial Sequence: Synthetic oligonucleotide
  source 1..21: mol_type = other DNA
actgcatccagtttacaaagt

SEQ ID NO: 8610 - protein, 7 aa, synthetic construct
  REGION 1..7: note = Description of Artificial Sequence: Synthetic peptide
TASSLQS

SEQ ID NO: 8611 - DNA, 21 bp, synthetic construct
  misc_feature 1..21: note = Description of Artificial Sequence: Synthetic oligonucleotide
  source 1..21: mol_type = other DNA
gctgcattcagcttgcaaagt

SEQ ID NO: 8612 - protein, 7 aa, synthetic construct
  REGION 1..7: note = Description of Artificial Sequence: Synthetic peptide
AAFSLQS

SEQ ID NO: 8613 - DNA, 21 bp, synthetic construct
  misc_feature 1..21: note = Description of Artificial Sequence: Synthetic oligonucleotide
  source 1..21: mol_type = other DNA
gctgcatccagtttgcaaagt

SEQ ID NO: 8614 - protein, 7 aa, synthetic construct
  REGION 1..7: note = Description of Artificial Sequence: Synthetic peptide
AASSLQS

SEQ ID NO: 8615 - DNA, 21 bp, synthetic construct
  misc_feature 1..21: note = Description of Artificial Sequence: Synthetic oligonucleotide
  source 1..21: mol_type = other DNA
gatgcatccaatttggtaaca

SEQ ID NO: 8616 - protein, 7 aa, synthetic construct
  REGION 1..7: note = Description of Artificial Sequence: Synthetic peptide
DASNLVT

SEQ ID NO: 8617 - DNA, 21 bp, synthetic construct
  misc_feature 1..21: note = Description of Artificial Sequence: Synthetic oligonucleotide
  source 1..21: mol_type = other DNA
gctgcatccagtttgcaaagt

SEQ ID NO: 8618 - protein, 7 aa, synthetic construct
  REGION 1..7: note = Description of Artificial Sequence: Synthetic peptide
AASSLQS

SEQ ID NO: 8619 - DNA, 21 bp, synthetic construct
  misc_feature 1..21: note = Description of Artificial Sequence: Synthetic oligonucleotide
  source 1..21: mol_type = other DNA
gctgcatccagtttgcatagt

SEQ ID NO: 8620 - protein, 7 aa, synthetic construct
  REGION 1..7: note = Description of Artificial Sequence: Synthetic peptide
AASSLHS

SEQ ID NO: 8621 - DNA, 21 bp, synthetic construct
  misc_feature 1..21: note = Description of Artificial Sequence: Synthetic oligonucleotide
  source 1..21: mol_type = other DNA
gctgcatccagtttgcaaagt

SEQ ID NO: 8622 - protein, 7 aa, synthetic construct
  REGION 1..7: note = Description of Artificial Sequence: Synthetic peptide
AASSLQS

SEQ ID NO: 8623 - DNA, 21 bp, synthetic construct
  misc_feature 1..21: note = Description of Artificial Sequence: Synthetic oligonucleotide
  source 1..21: mol_type = other DNA
gctgcatccagtttgcaaagt

SEQ ID NO: 8624 - protein, 7 aa, synthetic construct
  REGION 1..7: note = Description of Artificial Sequence: Synthetic peptide
AASSLQS

SEQ ID NO: 8625 - DNA, 21 bp, synthetic construct
  misc_feature 1..21: note = Description of Artificial Sequence: Synthetic oligonucleotide
  source 1..21: mol_type = other DNA
actgcatccagtttgcaaagt

SEQ ID NO: 8626 - protein, 7 aa, synthetic construct
  REGION 1..7: note = Description of Artificial Sequence: Synthetic peptide
TASSLQS

SEQ ID NO: 8627 - DNA, 21 bp, synthetic construct
  misc_feature 1..21: note = Description of Artificial Sequence: Synthetic oligonucleotide
  source 1..21: mol_type = other DNA
gctgcatccagtttgcaacgt

SEQ ID NO: 8628 - protein, 7 aa, synthetic construct
  REGION 1..7: note = Description of Artificial Sequence: Synthetic peptide
AASSLQR

SEQ ID NO: 8629 - DNA, 21 bp, synthetic construct
  misc_feature 1..21: note = Description of Artificial Sequence: Synthetic oligonucleotide
  source 1..21: mol_type = other DNA
gctgcatccagtttgcaaggt

SEQ ID NO: 8630 - protein, 7 aa, synthetic construct
  REGION 1..7: note = Description of Artificial Sequence: Synthetic peptide
AASSLQG

SEQ ID NO: 8631 - DNA, 21 bp, synthetic construct
  misc_feature 1..21: note = Description of Artificial Sequence: Synthetic oligonucleotide
  source 1..21: mol_type = other DNA
gctgcatccagtttgcaaagt

SEQ ID NO: 8632 - protein, 7 aa, synthetic construct
  REGION 1..7: note = Description of Artificial Sequence: Synthetic peptide
AASSLQS

SEQ ID NO: 8633 - DNA, 21 bp, synthetic construct
  misc_feature 1..21: note = Description of Artificial Sequence: Synthetic oligonucleotide
  source 1..21: mol_type = other DNA
ggtgcatccactttgcaaagt

SEQ ID NO: 8634 - protein, 7 aa, synthetic construct
  REGION 1..7: note = Description of Artificial Sequence: Synthetic peptide
GASTLQS

SEQ ID NO: 8635 - DNA, 21 bp, synthetic construct
  misc_feature 1..21: note = Description of Artificial Sequence: Synthetic oligonucleotide
  source 1..21: mol_type = other DNA
gctgcatccagtttgcagagt

SEQ ID NO: 8636 - protein, 7 aa, synthetic construct
  REGION 1..7: note = Description of Artificial Sequence: Synthetic peptide
AASSLQS

SEQ ID NO: 8637 - DNA, 21 bp, synthetic construct
  misc_feature 1..21: note = Description of Artificial Sequence: Synthetic oligonucleotide
  source 1..21: mol_type = other DNA
gctgcatcccgtttgcaaagt

SEQ ID NO: 8638 - protein, 7 aa, synthetic construct
  REGION 1..7: note = Description of Artificial Sequence: Synthetic peptide
AASRLQS

SEQ ID NO: 8639 - DNA, 21 bp, synthetic construct
  misc_feature 1..21: note = Description of Artificial Sequence: Synthetic oligonucleotide
  source 1..21: mol_type = other DNA
tgggcatctacccgggaatcc

SEQ ID NO: 8640 - protein, 7 aa, synthetic construct
  REGION 1..7: note = Description of Artificial Sequence: Synthetic peptide
WASTRES

SEQ ID NO: 8641 - DNA, 21 bp, synthetic construct
  misc_feature 1..21: note = Description of Artificial Sequence: Synthetic oligonucleotide
  source 1..21: mol_type = other DNA
gctgcatccagtttgcaaagt

SEQ ID NO: 8642 - protein, 7 aa, synthetic construct
  REGION 1..7: note = Description of Artificial Sequence: Synthetic peptide
AASSLQS

SEQ ID NO: 8643 - DNA, 21 bp, synthetic construct
  misc_feature 1..21: note = Description of Artificial Sequence: Synthetic oligonucleotide
  source 1..21: mol_type = other DNA
gttgcatccagtttgcaaggt

SEQ ID NO: 8644 - protein, 7 aa, synthetic construct
  REGION 1..7: note = Description of Artificial Sequence: Synthetic peptide
VASSLQG

SEQ ID NO: 8645 - DNA, 21 bp, synthetic construct
  misc_feature 1..21: note = Description of Artificial Sequence: Synthetic oligonucleotide
  source 1..21: mol_type = other DNA
actgcatccaatttgcaaagt

SEQ ID NO: 8646 - protein, 7 aa, synthetic construct
  REGION 1..7: note = Description of Artificial Sequence: Synthetic peptide
TASNLQS

SEQ ID NO: 8647 - DNA, 21 bp, synthetic construct
  misc_feature 1..21: note = Description of Artificial Sequence: Synthetic oligonucleotide
  source 1..21: mol_type = other DNA
gctgcatccagtttgcaaagt

SEQ ID NO: 8648 - protein, 7 aa, synthetic construct
  REGION 1..7: note = Description of Artificial Sequence: Synthetic peptide
AASSLQS

SEQ ID NO: 8649 - DNA, 21 bp, synthetic construct
  misc_feature 1..21: note = Description of Artificial Sequence: Synthetic oligonucleotide
  source 1..21: mol_type = other DNA
gctgcatccaggttgcaaagt

SEQ ID NO: 8650 - protein, 7 aa, synthetic construct
  REGION 1..7: note = Description of Artificial Sequence: Synthetic peptide
AASRLQS

SEQ ID NO: 8651 - DNA, 21 bp, synthetic construct
  misc_feature 1..21: note = Description of Artificial Sequence: Synthetic oligonucleotide
  source 1..21: mol_type = other DNA
gttgcatccagtttgcaaagt

SEQ ID NO: 8652 - protein, 7 aa, synthetic construct
  REGION 1..7: note = Description of Artificial Sequence: Synthetic peptide
VASSLQS

SEQ ID NO: 8653 - DNA, 21 bp, synthetic construct
  misc_feature 1..21: note = Description of Artificial Sequence: Synthetic oligonucleotide
  source 1..21: mol_type = other DNA
gctgcatccagtttgcaaagt

SEQ ID NO: 8654 - protein, 7 aa, synthetic construct
  REGION 1..7: note = Description of Artificial Sequence: Synthetic peptide
AASSLQS

SEQ ID NO: 8655 - DNA, 21 bp, synthetic construct
  misc_feature 1..21: note = Description of Artificial Sequence: Synthetic oligonucleotide
  source 1..21: mol_type = other DNA
gttgcatccagtttgcaaagt

SEQ ID NO: 8656 - protein, 7 aa, synthetic construct
  REGION 1..7: note = Description of Artificial Sequence: Synthetic peptide
VASSLQS

SEQ ID NO: 8657 - DNA, 21 bp, synthetic construct
  misc_feature 1..21: note = Description of Artificial Sequence: Synthetic oligonucleotide
  source 1..21: mol_type = other DNA
gctgcatccagtttgcaaagt

SEQ ID NO: 8658 - protein, 7 aa, synthetic construct
  REGION 1..7: note = Description of Artificial Sequence: Synthetic peptide
AASSLQS

SEQ ID NO: 8659 - DNA, 21 bp, synthetic construct
  misc_feature 1..21: note = Description of Artificial Sequence: Synthetic oligonucleotide
  source 1..21: mol_type = other DNA
ggtgcatccagtttgcaaagt

SEQ ID NO: 8660 - protein, 7 aa, synthetic construct
  REGION 1..7: note = Description of Artificial Sequence: Synthetic peptide
GASSLQS

SEQ ID NO: 8661 - DNA, 21 bp, synthetic construct
  misc_feature 1..21: note = Description of Artificial Sequence: Synthetic oligonucleotide
  source 1..21: mol_type = other DNA
gctgcatccagtttgcaaagt

SEQ ID NO: 8662 - protein, 7 aa, synthetic construct
  REGION 1..7: note = Description of Artificial Sequence: Synthetic peptide
AASSLQS

SEQ ID NO: 8663 - DNA, 21 bp, synthetic construct
  misc_feature 1..21: note = Description of Artificial Sequence: Synthetic oligonucleotide
  source 1..21: mol_type = other DNA
ggtgcatacagtctgcaaagt

SEQ ID NO: 8664 - protein, 7 aa, synthetic construct
  REGION 1..7: note = Description of Artificial Sequence: Synthetic peptide
GAYSLQS

SEQ ID NO: 8665 - DNA, 21 bp, synthetic construct
  misc_feature 1..21: note = Description of Artificial Sequence: Synthetic oligonucleotide
  source 1..21: mol_type = other DNA
gctgcatccagtttgcaaagt

SEQ ID NO: 8666 - protein, 7 aa, synthetic construct
  REGION 1..7: note = Description of Artificial Sequence: Synthetic peptide
AASSLQS

SEQ ID NO: 8667 - DNA, 21 bp, synthetic construct
  misc_feature 1..21: note = Description of Artificial Sequence: Synthetic oligonucleotide
  source 1..21: mol_type = other DNA
gctgcatccagtttgcaaagt

SEQ ID NO: 8668 - protein, 7 aa, synthetic construct
  REGION 1..7: note = Description of Artificial Sequence: Synthetic peptide
AASSLQS

SEQ ID NO: 8669 - DNA, 21 bp, synthetic construct
  misc_feature 1..21: note = Description of Artificial Sequence: Synthetic oligonucleotide
  source 1..21: mol_type = other DNA
gctacatccagtttgcaaagt

SEQ ID NO: 8670 - protein, 7 aa, synthetic construct
  REGION 1..7: note = Description of Artificial Sequence: Synthetic peptide
ATSSLQS

SEQ ID NO: 8671 - DNA, 21 bp, synthetic construct
  misc_feature 1..21: note = Description of Artificial Sequence: Synthetic oligonucleotide
  source 1..21: mol_type = other DNA
ggtgcgtccggtttgcaaagt

SEQ ID NO: 8672 - protein, 7 aa, synthetic construct
  REGION 1..7: note = Description of Artificial Sequence: Synthetic peptide
GASGLQS

SEQ ID NO: 8673 - DNA, 21 bp, synthetic construct
  misc_feature 1..21: note = Description of Artificial Sequence: Synthetic oligonucleotide
  source 1..21: mol_type = other DNA
gttgcatccagtttgcaaagt

SEQ ID NO: 8674 - protein, 7 aa, synthetic construct
  REGION 1..7: note = Description of Artificial Sequence: Synthetic peptide
VASSLQS

SEQ ID NO: 8675 - DNA, 21 bp, synthetic construct
  misc_feature 1..21: note = Description of Artificial Sequence: Synthetic oligonucleotide
  source 1..21: mol_type = other DNA
gctgcatccagtttgcaaagt

SEQ ID NO: 8676 - protein, 7 aa, synthetic construct
  REGION 1..7: note = Description of Artificial Sequence: Synthetic peptide
AASSLQS

SEQ ID NO: 8677 - DNA, 21 bp, synthetic construct
  misc_feature 1..21: note = Description of Artificial Sequence: Synthetic oligonucleotide
  source 1..21: mol_type = other DNA
gctgcatccagtttgcaaagt

SEQ ID NO: 8678 - protein, 7 aa, synthetic construct
  REGION 1..7: note = Description of Artificial Sequence: Synthetic peptide
AASSLQS

SEQ ID NO: 8679 - DNA, 21 bp, synthetic construct
  misc_feature 1..21: note = Description of Artificial Sequence: Synthetic oligonucleotide
  source 1..21: mol_type = other DNA
gctgcatccagtttgcaaagt

SEQ ID NO: 8680 - protein, 7 aa, synthetic construct
  REGION 1..7: note = Description of Artificial Sequence: Synthetic peptide
AASSLQS

SEQ ID NO: 8681 - DNA, 21 bp, synthetic construct
  misc_feature 1..21: note = Description of Artificial Sequence: Synthetic oligonucleotide
  source 1..21: mol_type = other DNA
gctgcacccagtttgcaaagt

SEQ ID NO: 8682 - protein, 7 aa, synthetic construct
  REGION 1..7: note = Description of Artificial Sequence: Synthetic peptide
AAPSLQS

SEQ ID NO: 8683 - DNA, 21 bp, synthetic construct
  misc_feature 1..21: note = Description of Artificial Sequence: Synthetic oligonucleotide
  source 1..21: mol_type = other DNA
gctgcatccaggttgcaaagt

SEQ ID NO: 8684 - protein, 7 aa, synthetic construct
  REGION 1..7: note = Description of Artificial Sequence: Synthetic peptide
AASRLQS

SEQ ID NO: 8685 - DNA, 21 bp, synthetic construct
  misc_feature 1..21: note = Description of Artificial Sequence: Synthetic oligonucleotide
  source 1..21: mol_type = other DNA
gttgcatccagtttgcaaagt

SEQ ID NO: 8686 - protein, 7 aa, synthetic construct
  REGION 1..7: note = Description of Artificial Sequence: Synthetic peptide
VASSLQS

SEQ ID NO: 8687 - DNA, 21 bp, synthetic construct
  misc_feature 1..21: note = Description of Artificial Sequence: Synthetic oligonucleotide
  source 1..21: mol_type = other DNA
gttgcatccagtttgcaaagt

SEQ ID NO: 8688 - protein, 7 aa, synthetic construct
  REGION 1..7: note = Description of Artificial Sequence: Synthetic peptide
VASSLQS

SEQ ID NO: 8689 - DNA, 21 bp, synthetic construct
  misc_feature 1..21: note = Description of Artificial Sequence: Synthetic oligonucleotide
  source 1..21: mol_type = other DNA
gatgcctccaatttggaaaca

SEQ ID NO: 8690 - protein, 7 aa, synthetic construct
  REGION 1..7: note = Description of Artificial Sequence: Synthetic peptide
DASNLET

SEQ ID NO: 8691 - DNA, 21 bp, synthetic construct
  misc_feature 1..21: note = Description of Artificial Sequence: Synthetic oligonucleotide
  source 1..21: mol_type = other DNA
gctgcatcccgtttgcaaagt

SEQ ID NO: 8692 - protein, 7 aa, synthetic construct
  REGION 1..7: note = Description of Artificial Sequence: Synthetic peptide
AASRLQS

SEQ ID NO: 8693 - DNA, 21 bp, synthetic construct
  misc_feature 1..21: note = Description of Artificial Sequence: Synthetic oligonucleotide
  source 1..21: mol_type = other DNA
gctgcatccagtttgcaaagt

SEQ ID NO: 8694 - protein, 7 aa, synthetic construct
  REGION 1..7: note = Description of Artificial Sequence: Synthetic peptide
AASSLQS

SEQ ID NO: 8695 - DNA, 21 bp, synthetic construct
  misc_feature 1..21: note = Description of Artificial Sequence: Synthetic oligonucleotide
  source 1..21: mol_type = other DNA
gaagtttccaaccggttctct

SEQ ID NO: 8696 - protein, 7 aa, synthetic construct
  REGION 1..7: note = Description of Artificial Sequence: Synthetic peptide
EVSNRFS

SEQ ID NO: 8697 - DNA, 21 bp, synthetic construct
  misc_feature 1..21: note = Description of Artificial Sequence: Synthetic oligonucleotide
  source 1..21: mol_type = other DNA
gctgcatccagtttgcaaagt

SEQ ID NO: 8698 - protein, 7 aa, synthetic construct
  REGION 1..7: note = Description of Artificial Sequence: Synthetic peptide
AASSLQS

SEQ ID NO: 8699 - DNA, 21 bp, synthetic construct
  misc_feature 1..21: note = Description of Artificial Sequence: Synthetic oligonucleotide
  source 1..21: mol_type = other DNA
ggtgcatccagtttccaaagt

SEQ ID NO: 8700 - protein, 7 aa, synthetic construct
  REGION 1..7: note = Description of Artificial Sequence: Synthetic peptide
GASSFQS

SEQ ID NO: 8701 - DNA, 21 bp, synthetic construct
  misc_feature 1..21: note = Description of Artificial Sequence: Synthetic oligonucleotide
  source 1..21: mol_type = other DNA
gctgcatccagtttgcaaagt

SEQ ID NO: 8702 - protein, 7 aa, synthetic construct
  REGION 1..7: note = Description of Artificial Sequence: Synthetic peptide
AASSLQS

SEQ ID NO: 8703 - DNA, 21 bp, synthetic construct
  misc_feature 1..21: note = Description of Artificial Sequence: Synthetic oligonucleotide
  source 1..21: mol_type = other DNA
ggtgcatccagtttgcaaagt

SEQ ID NO: 8704 - protein, 7 aa, synthetic construct
  REGION 1..7: note = Description of Artificial Sequence: Synthetic peptide
GASSLQS

SEQ ID NO: 8705 - DNA, 21 bp, synthetic construct
  misc_feature 1..21: note = Description of Artificial Sequence: Synthetic oligonucleotide
  source 1..21: mol_type = other DNA
caagataggaagcggccctca

SEQ ID NO: 8706 - protein, 7 aa, synthetic construct
  REGION 1..7: note = Description of Artificial Sequence: Synthetic peptide
QDRKRPS

SEQ ID NO: 8707 - DNA, 21 bp, synthetic construct
  misc_feature 1..21: note = Description of Artificial Sequence: Synthetic oligonucleotide
  source 1..21: mol_type = other DNA
caagatagtaagcggtcctca

SEQ ID NO: 8708 - protein, 7 aa, synthetic construct
  REGION 1..7: note = Description of Artificial Sequence: Synthetic peptide
QDSKRSS

SEQ ID NO: 8709 - DNA, 21 bp, synthetic construct
  misc_feature 1..21: note = Description of Artificial Sequence: Synthetic oligonucleotide
  source 1..21: mol_type = other DNA
caagataggaagcggccctca

SEQ ID NO: 8710 - protein, 7 aa, synthetic construct
  REGION 1..7: note = Description of Artificial Sequence: Synthetic peptide
QDRKRPS

SEQ ID NO: 8711 - DNA, 33 bp, synthetic construct; identical to SEQ ID NO: 8207
  misc_feature 1..33: note = Description of Artificial Sequence: Synthetic oligonucleotide
  source 1..33: mol_type = other DNA

SEQ ID NO: 8712 - protein, 11 aa, synthetic construct
  REGION 1..11: note = Description of Artificial Sequence: Synthetic peptide
VKSDGSHSKGD

SEQ ID NO: 8713 - DNA, 21 bp, synthetic construct
  misc_feature 1..21: note = Description of Artificial Sequence: Synthetic oligonucleotide
  source 1..21: mol_type = other DNA
caagatagcaagcggccctta

SEQ ID NO: 8714 - protein, 7 aa, synthetic construct
  REGION 1..7: note = Description of Artificial Sequence: Synthetic peptide
QDSKRPL

SEQ ID NO: 8715 - DNA, 21 bp, synthetic construct
  misc_feature 1..21: note = Description of Artificial Sequence: Synthetic oligonucleotide
  source 1..21: mol_type = other DNA
caagatagcaagcggccctca

SEQ ID NO: 8716 - protein, 7 aa, synthetic construct
  REGION 1..7: note = Description of Artificial Sequence: Synthetic peptide
QDSKRPS

SEQ ID NO: 8717 - DNA, 21 bp, synthetic construct
  misc_feature 1..21: note = Description of Artificial Sequence: Synthetic oligonucleotide
  source 1..21: mol_type = other DNA
attaataatcagcggccctca

SEQ ID NO: 8718 - protein, 7 aa, synthetic construct
  REGION 1..7: note = Description of Artificial Sequence: Synthetic peptide
INNQRPS

SEQ ID NO: 8719 - DNA, 21 bp, synthetic construct
  misc_feature 1..21: note = Description of Artificial Sequence: Synthetic oligonucleotide
  source 1..21: mol_type = other DNA
caagatcgcaagcggccctca

SEQ ID NO: 8720 - protein, 7 aa, synthetic construct
  REGION 1..7: note = Description of Artificial Sequence: Synthetic peptide
QDRKRPS

SEQ ID NO: 8721 - DNA, 21 bp, synthetic construct
  misc_feature 1..21: note = Description of Artificial Sequence: Synthetic oligonucleotide
  source 1..21: mol_type = other DNA
caagataggaagcggccctca

SEQ ID NO: 8722 - protein, 7 aa, synthetic construct
  REGION 1..7: note = Description of Artificial Sequence: Synthetic peptide
QDRKRPS

SEQ ID NO: 8723 - DNA, 21 bp, synthetic construct
  misc_feature 1..21: note = Description of Artificial Sequence: Synthetic oligonucleotide
  source 1..21: mol_type = other DNA
caagatagcaagcggccctca

SEQ ID NO: 8724 - protein, 7 aa, synthetic construct
  REGION 1..7: note = Description of Artificial Sequence: Synthetic peptide
QDSKRPS

SEQ ID NO: 8725 - DNA, 21 bp, synthetic construct
  misc_feature 1..21: note = Description of Artificial Sequence: Synthetic oligonucleotide
  source 1..21: mol_type = other DNA
caagatagtaagcggccctca

SEQ ID NO: 8726 - protein, 7 aa, synthetic construct
  REGION 1..7: note = Description of Artificial Sequence: Synthetic peptide
QDSKRPS

SEQ ID NO: 8727 - DNA, 21 bp, synthetic construct
  misc_feature 1..21: note = Description of Artificial Sequence: Synthetic oligonucleotide
  source 1..21: mol_type = other DNA
caagatcgcaagcggccctca

SEQ ID NO: 8728 - protein, 7 aa, synthetic construct
  REGION 1..7: note = Description of Artificial Sequence: Synthetic peptide
QDRKRPS

SEQ ID NO: 8729 - DNA, 21 bp, synthetic construct
  misc_feature 1..21: note = Description of Artificial Sequence: Synthetic oligonucleotide
  source 1..21: mol_type = other DNA
caagatagcaagcggccctca

SEQ ID NO: 8730 - protein, 7 aa, synthetic construct
  REGION 1..7: note = Description of Artificial Sequence: Synthetic peptide
QDSKRPS

SEQ ID NO: 8731 - DNA, 21 bp, synthetic construct
  misc_feature 1..21: note = Description of Artificial Sequence: Synthetic oligonucleotide
  source 1..21: mol_type = other DNA
caagataggaagcggccctca

SEQ ID NO: 8732 - protein, 7 aa, synthetic construct
  REGION 1..7: note = Description of Artificial Sequence: Synthetic peptide
QDRKRPS

SEQ ID NO: 8733 - DNA, 21 bp, synthetic construct
  misc_feature 1..21: note = Description of Artificial Sequence: Synthetic oligonucleotide
  source 1..21: mol_type = other DNA
caagatagcaagcggccctca

SEQ ID NO: 8734 - protein, 7 aa, synthetic construct
  REGION 1..7: note = Description of Artificial Sequence: Synthetic peptide
QDSKRPS

SEQ ID NO: 8735 - DNA, 21 bp, synthetic construct
  misc_feature 1..21: note = Description of Artificial Sequence: Synthetic oligonucleotide
  source 1..21: mol_type = other DNA
caagataggaagcggccctca

SEQ ID NO: 8736 - protein, 7 aa, synthetic construct
  REGION 1..7: note = Description of Artificial Sequence: Synthetic peptide
QDRKRPS

SEQ ID NO: 8737 - DNA, 21 bp, synthetic construct
  misc_feature 1..21: note = Description of Artificial Sequence: Synthetic oligonucleotide
  source 1..21: mol_type = other DNA
caagatcgcaagcggccctca

SEQ ID NO: 8738 - protein, 7 aa, synthetic construct
  REGION 1..7: note = Description of Artificial Sequence: Synthetic peptide
QDRKRPS

SEQ ID NO: 8739 - DNA, 21 bp, synthetic construct
  misc_feature 1..21: note = Description of Artificial Sequence: Synthetic oligonucleotide
  source 1..21: mol_type = other DNA
agcgatagcaaccggccctca

SEQ ID NO: 8740 - protein, 7 aa, synthetic construct
  REGION 1..7: note = Description of Artificial Sequence: Synthetic peptide
SDSNRPS

SEQ ID NO: 8741 - DNA, 21 bp, synthetic construct
  misc_feature 1..21: note = Description of Artificial Sequence: Synthetic oligonucleotide
  source 1..21: mol_type = other DNA
caagatagcaagcggccctca

SEQ ID NO: 8742 - protein, 7 aa, synthetic construct
  REGION 1..7: note = Description of Artificial Sequence: Synthetic peptide
QDSKRPS

SEQ ID NO: 8743 - DNA, 21 bp, synthetic construct
  misc_feature 1..21: note = Description of Artificial Sequence: Synthetic oligonucleotide
  source 1..21: mol_type = other DNA
gatgataccgaccggccctca

SEQ ID NO: 8744 - protein, 7 aa, synthetic construct
  REGION 1..7: note = Description of Artificial Sequence: Synthetic peptide
DDTDRPS

SEQ ID NO: 8745 - DNA, 21 bp, synthetic construct
  misc_feature 1..21: note = Description of Artificial Sequence: Synthetic oligonucleotide
  source 1..21: mol_type = other DNA
caagataggaagcggccctca

SEQ ID NO: 8746 - protein, 7 aa, synthetic construct
  REGION 1..7: note = Description of Artificial Sequence: Synthetic peptide
QDRKRPS

SEQ ID NO: 8747 - DNA, 21 bp, synthetic construct
  misc_feature 1..21: note = Description of Artificial Sequence: Synthetic oligonucleotide
  source 1..21: mol_type = other DNA
caagatagcaagcggccctca

SEQ ID NO: 8748 - protein, 7 aa, synthetic construct
  REGION 1..7: note = Description of Artificial Sequence: Synthetic peptide
QDSKRPS

SEQ ID NO: 8749 - DNA, 21 bp, synthetic construct
  misc_feature 1..21: note = Description of Artificial Sequence: Synthetic oligonucleotide
  source 1..21: mol_type = other DNA
caagatagcaagcggccctca

SEQ ID NO: 8750 - protein, 7 aa, synthetic construct
  REGION 1..7: note = Description of Artificial Sequence: Synthetic peptide
QDSKRPS

SEQ ID NO: 8751 - DNA, 21 bp, synthetic construct
  misc_feature 1..21: note = Description of Artificial Sequence: Synthetic oligonucleotide
  source 1..21: mol_type = other DNA
caagatcgcaagcggccctca

SEQ ID NO: 8752 - protein, 7 aa, synthetic construct
  REGION 1..7: note = Description of Artificial Sequence: Synthetic peptide
QDRKRPS

SEQ ID NO: 8753 - DNA, 21 bp, synthetic construct
  misc_feature 1..21: note = Description of Artificial Sequence: Synthetic oligonucleotide
  source 1..21: mol_type = other DNA
caagatagaaagcggccctca

SEQ ID NO: 8754 - protein, 7 aa, synthetic construct
  REGION 1..7: note = Description of Artificial Sequence: Synthetic peptide
QDRKRPS

SEQ ID NO: 8755 - DNA, 21 bp, synthetic construct
  misc_feature 1..21: note = Description of Artificial Sequence: Synthetic oligonucleotide
  source 1..21: mol_type = other DNA
caagattccaagcggccctca

SEQ ID NO: 8756 - protein, 7 aa, synthetic construct
  REGION 1..7: note = Description of Artificial Sequence: Synthetic peptide
QDSKRPS

SEQ ID NO: 8757 - DNA, 21 bp, synthetic construct
  misc_feature 1..21: note = Description of Artificial Sequence: Synthetic oligonucleotide
  source 1..21: mol_type = other DNA
caagataggaagcggccctca

SEQ ID NO: 8758 - protein, 7 aa, synthetic construct
  REGION 1..7: note = Description of Artificial Sequence: Synthetic peptide
QDRKRPS

SEQ ID NO: 8759 - DNA, 21 bp, synthetic construct
  misc_feature 1..21: note = Description of Artificial Sequence: Synthetic oligonucleotide
  source 1..21: mol_type = other DNA
attaataatcagcggccctca

SEQ ID NO: 8760 - protein, 7 aa, synthetic construct
  REGION 1..7: note = Description of Artificial Sequence: Synthetic peptide
INNQRPS

SEQ ID NO: 8761 - DNA, 21 bp, synthetic construct
  misc_feature 1..21: note = Description of Artificial Sequence: Synthetic oligonucleotide
  source 1..21: mol_type = other DNA
gaggtcagtaatcggccctca

SEQ ID NO: 8762 - protein, 7 aa, synthetic construct
  REGION 1..7: note = Description of Artificial Sequence: Synthetic peptide
EVSNRPS

SEQ ID NO: 8763 - DNA, 21 bp, synthetic construct
  misc_feature 1..21: note = Description of Artificial Sequence: Synthetic oligonucleotide
  source 1..21: mol_type = other DNA
caagatagcaagcggccctca

SEQ ID NO: 8764 - protein, 7 aa, synthetic construct
  REGION 1..7: note = Description of Artificial Sequence: Synthetic peptide
QDSKRPS

SEQ ID NO: 8765 - DNA, 21 bp, synthetic construct
  misc_feature 1..21: note = Description of Artificial Sequence: Synthetic oligonucleotide
  source 1..21: mol_type = other DNA
caagataggaagcggccctca

SEQ ID NO: 8766 - protein, 7 aa, synthetic construct
  REGION 1..7: note = Description of Artificial Sequence: Synthetic peptide
QDRKRPS

SEQ ID NO: 8767 - DNA, 21 bp, synthetic construct
  misc_feature 1..21: note = Description of Artificial Sequence: Synthetic oligonucleotide
  source 1..21: mol_type = other DNA
tgggcatctacccgggaatcc

SEQ ID NO: 8768 - protein, 7 aa, synthetic construct
  REGION 1..7: note = Description of Artificial Sequence: Synthetic peptide
WASTRES

SEQ ID NO: 8769 - DNA, 21 bp, synthetic construct
  misc_feature 1..21: note = Description of Artificial Sequence: Synthetic oligonucleotide
  source 1..21: mol_type = other DNA
caagatatgaagcggccctca

SEQ ID NO: 8770 - protein, 7 aa, synthetic construct
  REGION 1..7: note = Description of Artificial Sequence: Synthetic peptide
QDMKRPS

SEQ ID NO: 8771 - DNA, 21 bp, synthetic construct
  misc_feature 1..21: note = Description of Artificial Sequence: Synthetic oligonucleotide
  source 1..21: mol_type = other DNA
ggtacatccagcagggccact

SEQ ID NO: 8772 - protein, 7 aa, synthetic construct
  REGION 1..7: note = Description of Artificial Sequence: Synthetic peptide
GTSSRAT

SEQ ID NO: 8773 - DNA, 21 bp, synthetic construct
  misc_feature 1..21: note = Description of Artificial Sequence: Synthetic oligonucleotide
  source 1..21: mol_type = other DNA
gttacatccagtttgcaaggt

SEQ ID NO: 8774 - protein, 7 aa, synthetic construct
  REGION 1..7: note = Description of Artificial Sequence: Synthetic peptide
VTSSLQG

SEQ ID NO: 8775 - DNA, 21 bp, synthetic construct
  misc_feature 1..21: note = Description of Artificial Sequence: Synthetic oligonucleotide
  source 1..21: mol_type = other DNA
gctgcatccagtttgcaaagt

SEQ ID NO: 8776 - protein, 7 aa, synthetic construct
  REGION 1..7: note = Description of Artificial Sequence: Synthetic peptide
AASSLQS

SEQ ID NO: 8777 - DNA, 21 bp, synthetic construct
  misc_feature 1..21: note = Description of Artificial Sequence: Synthetic oligonucleotide
  source 1..21: mol_type = other DNA
gctgcatccagtttgcaaagt

SEQ ID NO: 8778 - protein, 7 aa, synthetic construct
  REGION 1..7: note = Description of Artificial Sequence: Synthetic peptide
AASSLQS

SEQ ID NO: 8779 - DNA, 21 bp, synthetic construct
  misc_feature 1..21: note = Description of Artificial Sequence: Synthetic oligonucleotide
  source 1..21: mol_type = other DNA
gatgcatccagtttgcaaagt

SEQ ID NO: 8780 - protein, 7 aa, synthetic construct
  REGION 1..7: note = Description of Artificial Sequence: Synthetic peptide
DASSLQS

SEQ ID NO: 8781 - DNA, 21 bp, synthetic construct
  misc_feature 1..21: note = Description of Artificial Sequence: Synthetic oligonucleotide
  source 1..21: mol_type = other DNA
gctgcatccagtttgcaaagt

SEQ ID NO: 8782 - protein, 7 aa, synthetic construct
  REGION 1..7: note = Description of Artificial Sequence: Synthetic peptide
AASSLQS

SEQ ID NO: 8783 - DNA, 21 bp, synthetic construct
  misc_feature 1..21: note = Description of Artificial Sequence: Synthetic oligonucleotide
  source 1..21: mol_type = other DNA
gctgcatccaatttgcaaagt

SEQ ID NO: 8784 - protein, 7 aa, synthetic construct
  REGION 1..7: note = Description of Artificial Sequence: Synthetic peptide
AASNLQS

SEQ ID NO: 8785 - DNA, 21 bp, synthetic construct
  misc_feature 1..21: note = Description of Artificial Sequence: Synthetic oligonucleotide
  source 1..21: mol_type = other DNA
gctgcatccagtttgcaaagt

SEQ ID NO: 8786 - protein, 7 aa, synthetic construct
  REGION 1..7: note = Description of Artificial Sequence: Synthetic peptide
AASSLQS

SEQ ID NO: 8787 - DNA, 21 bp, synthetic construct
  misc_feature 1..21: note = Description of Artificial Sequence: Synthetic oligonucleotide
  source 1..21: mol_type = other DNA
gctgcatccactttgcaaagt

SEQ ID NO: 8788 - protein, 7 aa, synthetic construct
  REGION 1..7: note = Description of Artificial Sequence: Synthetic peptide
AASTLQS

SEQ ID NO: 8789 - DNA, 21 bp, synthetic construct
  misc_feature 1..21: note = Description of Artificial Sequence: Synthetic oligonucleotide
  source 1..21: mol_type = other DNA
gctgcatccagtttgcaaagt

SEQ ID NO: 8790 - protein, 7 aa, synthetic construct
  REGION 1..7: note = Description of Artificial Sequence: Synthetic peptide
AASSLQS

SEQ ID NO: 8791 - DNA, 21 bp, synthetic construct
  misc_feature 1..21: note = Description of Artificial Sequence: Synthetic oligonucleotide
  source 1..21: mol_type = other DNA
gctgcatccagtttgcaaagt

SEQ ID NO: 8792 - protein, 7 aa, synthetic construct
  REGION 1..7: note = Description of Artificial Sequence: Synthetic peptide
AASSLQS

SEQ ID NO: 8793 - DNA, 21 bp, synthetic construct
  misc_feature 1..21: note = Description of Artificial Sequence: Synthetic oligonucleotide
  source 1..21: mol_type = other DNA
gctgcatccagtttgcaaagt

SEQ ID NO: 8794 - protein, 7 aa, synthetic construct
  REGION 1..7: note = Description of Artificial Sequence: Synthetic peptide
AASSLQS

SEQ ID NO: 8795 - DNA, 21 bp, synthetic construct
  misc_feature 1..21: note = Description of Artificial Sequence: Synthetic oligonucleotide
  source 1..21: mol_type = other DNA
gctgcatccagtttgcaaagt

SEQ ID NO: 8796 - protein, 7 aa, synthetic construct
  REGION 1..7: note = Description of Artificial Sequence: Synthetic peptide
AASSLQS

SEQ ID NO: 8797 - DNA, 21 bp, synthetic construct
  misc_feature 1..21: note = Description of Artificial Sequence: Synthetic oligonucleotide
  source 1..21: mol_type = other DNA
ggtgcatccagtttgcaaagt

SEQ ID NO: 8798 - protein, 7 aa, synthetic construct
  REGION 1..7: note = Description of Artificial Sequence: Synthetic peptide
GASSLQS

SEQ ID NO: 8799 - DNA, 21 bp, synthetic construct
  misc_feature 1..21: note = Description of Artificial Sequence: Synthetic oligonucleotide
  source 1..21: mol_type = other DNA
gctgcatccagtttgcaaagt

SEQ ID NO: 8800 - protein, 7 aa, synthetic construct
  REGION 1..7: note = Description of Artificial Sequence: Synthetic peptide
AASSLQS

SEQ ID NO: 8801 - DNA, 21 bp, synthetic construct
  misc_feature 1..21: note = Description of Artificial Sequence: Synthetic oligonucleotide
  source 1..21: mol_type = other DNA
gttacatccagtttgcaaggt

SEQ ID NO: 8802 - protein, 7 aa, synthetic construct
  REGION 1..7: note = Description of Artificial Sequence: Synthetic peptide
VTSSLQG

SEQ ID NO: 8803 - DNA, 21 bp, synthetic construct
  misc_feature 1..21: note = Description of Artificial Sequence: Synthetic oligonucleotide
  source 1..21: mol_type = other DNA
gctgcatccagtttgcaaagt

SEQ ID NO: 8804 - protein, 7 aa, synthetic construct
  REGION 1..7: note = Description of Artificial Sequence: Synthetic peptide
AASSLQS

SEQ ID NO: 8805 - DNA, 21 bp, synthetic construct
  misc_feature 1..21: note = Description of Artificial Sequence: Synthetic oligonucleotide
  source 1..21: mol_type = other DNA
gctgcatccagtctgcaaagt

SEQ ID NO: 8806 - protein, 7 aa, synthetic construct
  REGION 1..7: note = Description of Artificial Sequence: Synthetic peptide
AASSLQS

SEQ ID NO: 8807 - DNA, 21 bp, synthetic construct
  misc_feature 1..21: note = Description of Artificial Sequence: Synthetic oligonucleotide
  source 1..21: mol_type = other DNA
actacatccagtttgcaaagt

SEQ ID NO: 8808 - protein, 7 aa, synthetic construct
  REGION 1..7: note = Description of Artificial Sequence: Synthetic peptide
TTSSLQS

SEQ ID NO: 8809 - DNA, 21 bp, synthetic construct
  misc_feature 1..21: note = Description of Artificial Sequence: Synthetic oligonucleotide
  source 1..21: mol_type = other DNA
gctgcatccagttcgcaaagt

SEQ ID NO: 8810 - protein, 7 aa, synthetic construct
  REGION 1..7: note = Description of Artificial Sequence: Synthetic peptide
AASSSQS

SEQ ID NO: 8811 - DNA, 21 bp, synthetic construct
  misc_feature 1..21: note = Description of Artificial Sequence: Synthetic oligonucleotide
  source 1..21: mol_type = other DNA
gctgcatccagcttgcaaagt

SEQ ID NO: 8812 - protein, 7 aa, synthetic construct
  REGION 1..7: note = Description of Artificial Sequence: Synthetic peptide
AASSLQS

SEQ ID NO: 8813 - DNA, 21 bp, synthetic construct
  misc_feature 1..21: note = Description of Artificial Sequence: Synthetic oligonucleotide
  source 1..21: mol_type = other DNA
actgcatccagtttgcaaagt

SEQ ID NO: 8814 - protein, 7 aa, synthetic construct
  REGION 1..7: note = Description of Artificial Sequence: Synthetic peptide
TASSLQS

SEQ ID NO: 8815 - DNA, 21 bp, synthetic construct
  misc_feature 1..21: note = Description of Artificial Sequence: Synthetic oligonucleotide
  source 1..21: mol_type = other DNA
gttgcatgtagtttccaaagt

SEQ ID NO: 8816 - protein, 7 aa, synthetic construct
  REGION 1..7: note = Description of Artificial Sequence: Synthetic peptide
VACSFQS

SEQ ID NO: 8817 - DNA, 21 bp, synthetic construct
  misc_feature 1..21: note = Description of Artificial Sequence: Synthetic oligonucleotide
  source 1..21: mol_type = other DNA
gctgcatccagtttgcaaagt

SEQ ID NO: 8818 - protein, 7 aa, synthetic construct
  REGION 1..7: note = Description of Artificial Sequence: Synthetic peptide
AASSLQS

SEQ ID NO: 8819 - DNA, 21 bp, synthetic construct
  misc_feature 1..21: note = Description of Artificial Sequence: Synthetic oligonucleotide
  source 1..21: mol_type = other DNA
ggtgcatccagtttgcaaagt

SEQ ID NO: 8820 - protein, 7 aa, synthetic construct
  REGION 1..7: note = Description of Artificial Sequence: Synthetic peptide
GASSLQS

SEQ ID NO: 8821 - DNA, 21 bp, synthetic construct
  misc_feature 1..21: note = Description of Artificial Sequence: Synthetic oligonucleotide
  source 1..21: mol_type = other DNA
gctgcatccaatttgcaaagt

SEQ ID NO: 8822 - protein, 7 aa, synthetic construct
  REGION 1..7: note = Description of Artificial Sequence: Synthetic peptide
AASNLQS

SEQ ID NO: 8823 - DNA, 21 bp, synthetic construct
  misc_feature 1..21: note = Description of Artificial Sequence: Synthetic oligonucleotide
  source 1..21: mol_type = other DNA
tctgcatccagtttgcaaagt

SEQ ID NO: 8824 - protein, 7 aa, synthetic construct
  REGION 1..7: note = Description of Artificial Sequence: Synthetic peptide
SASSLQS

SEQ ID NO: 8825 - DNA, 21 bp, synthetic construct
  misc_feature 1..21: note = Description of Artificial Sequence: Synthetic oligonucleotide
  source 1..21: mol_type = other DNA
gttgcatccagtttgcaaagt

SEQ ID NO: 8826 - protein, 7 aa, synthetic construct
  REGION 1..7: note = Description of Artificial Sequence: Synthetic peptide
VASSLQS

SEQ ID NO: 8827 - DNA, 21 bp, synthetic construct
  misc_feature 1..21: note = Description of Artificial Sequence: Synthetic oligonucleotide
  source 1..21: mol_type = other DNA
gctgcatccagtttacaaagt

SEQ ID NO: 8828 - protein, 7 aa, synthetic construct
  REGION 1..7: note = Description of Artificial Sequence: Synthetic peptide
AASSLQS

SEQ ID NO: 8829 - DNA, 21 bp, synthetic construct
  misc_feature 1..21: note = Description of Artificial Sequence: Synthetic oligonucleotide
  source 1..21: mol_type = other DNA
gctgcatccagtttgcaaagt

SEQ ID NO: 8830 - protein, 7 aa, synthetic construct
  REGION 1..7: note = Description of Artificial Sequence: Synthetic peptide
AASSLQS

SEQ ID NO: 8831 - DNA, 21 bp, synthetic construct
  misc_feature 1..21: note = Description of Artificial Sequence: Synthetic oligonucleotide
  source 1..21: mol_type = other DNA
gctgcatccagtttgcaaagt

SEQ ID NO: 8832 - protein, 7 aa, synthetic construct
  REGION 1..7: note = Description of Artificial Sequence: Synthetic peptide
AASSLQS

SEQ ID NO: 8833 - DNA, 21 bp, synthetic construct
  misc_feature 1..21: note = Description of Artificial Sequence: Synthetic oligonucleotide
  source 1..21: mol_type = other DNA
actgcatccagtttgcaaagt

SEQ ID NO: 8834 - protein, 7 aa, synthetic construct
  REGION 1..7: note = Description of Artificial Sequence: Synthetic peptide
TASSLQS

SEQ ID NO: 8835 - DNA, 21 bp, synthetic construct
  misc_feature 1..21: note = Description of Artificial Sequence: Synthetic oligonucleotide
  source 1..21: mol_type = other DNA
actgcatccagtttgcaaagt

SEQ ID NO: 8836 - protein, 7 aa, synthetic construct
  REGION 1..7: note = Description of Artificial Sequence: Synthetic peptide
TASSLQS

SEQ ID NO: 8837 - DNA, 21 bp, synthetic construct
  misc_feature 1..21: note = Description of Artificial Sequence: Synthetic oligonucleotide
  source 1..21: mol_type = other DNA
gctgcatccagtttacaaagt

SEQ ID NO: 8838 - protein, 7 aa, synthetic construct
  REGION 1..7: note = Description of Artificial Sequence: Synthetic peptide
AASSLQS

SEQ ID NO: 8839 - DNA, 21 bp, synthetic construct
  misc_feature 1..21: note = Description of Artificial Sequence: Synthetic oligonucleotide
  source 1..21: mol_type = other DNA
gctgcatccagttcgcaaagt

SEQ ID NO: 8840 - protein, 7 aa, synthetic construct
  REGION 1..7: note = Description of Artificial Sequence: Synthetic peptide
AASSSQS

SEQ ID NO: 8841 - DNA, 21 bp, synthetic construct
  misc_feature 1..21: note = Description of Artificial Sequence: Synthetic oligonucleotide
  source 1..21: mol_type = other DNA
gttgcatccagtttgcaaagt

SEQ ID NO: 8842 - protein, 7 aa, synthetic construct
  REGION 1..7: note = Description of Artificial Sequence: Synthetic peptide
VASSLQS

SEQ ID NO: 8843 - DNA, 21 bp, synthetic construct
  misc_feature 1..21: note = Description of Artificial Sequence: Synthetic oligonucleotide
  source 1..21: mol_type = other DNA
gctgcatccagtttgcaaagt

SEQ ID NO: 8844 - protein, 7 aa, synthetic construct
  REGION 1..7: note = Description of Artificial Sequence: Synthetic peptide
AASSLQS

SEQ ID NO: 8845 - DNA, 21 bp, synthetic construct
  misc_feature 1..21: note = Description of Artificial Sequence: Synthetic oligonucleotide
  source 1..21: mol_type = other DNA
ggtacatccagtttgcaaagt

SEQ ID NO: 8846 - protein, 7 aa, synthetic construct
  REGION 1..7: note = Description of Artificial Sequence: Synthetic peptide
GTSSLQS

SEQ ID NO: 8847 - DNA, 21 bp, synthetic construct
  misc_feature 1..21: note = Description of Artificial Sequence: Synthetic oligonucleotide
  source 1..21: mol_type = other DNA
gctgcatccagtttgcaaagt

SEQ ID NO: 8848 - protein, 7 aa, synthetic construct
  REGION 1..7: note = Description of Artificial Sequence: Synthetic peptide
AASSLQS

SEQ ID NO: 8849 - DNA, 21 bp, synthetic construct
  misc_feature 1..21: note = Description of Artificial Sequence: Synthetic oligonucleotide
  source 1..21: mol_type = other DNA
gatgcatccactttggaaaca

SEQ ID NO: 8850 - protein, 7 aa, synthetic construct
  REGION 1..7: note = Description of Artificial Sequence: Synthetic peptide
DASTLET

SEQ ID NO: 8851 - DNA, 21 bp, synthetic construct
  misc_feature 1..21: note = Description of Artificial Sequence: Synthetic oligonucleotide
  source 1..21: mol_type = other DNA
gctgcatccagtgtgcagagt

SEQ ID NO: 8852 - protein, 7 aa, synthetic construct
  REGION 1..7: note = Description of Artificial Sequence: Synthetic peptide
AASSVQS

SEQ ID NO: 8853 - DNA, 21 bp, synthetic construct
  misc_feature 1..21: note = Description of Artificial Sequence: Synthetic oligonucleotide
  source 1..21: mol_type = other DNA
actgcatccagtttgcaaagt

SEQ ID NO: 8854 - protein, 7 aa, synthetic construct
  REGION 1..7: note = Description of Artificial Sequence: Synthetic peptide
TASSLQS

SEQ ID NO: 8855 - DNA, 21 bp, synthetic construct
  misc_feature 1..21: note = Description of Artificial Sequence: Synthetic oligonucleotide
  source 1..21: mol_type = other DNA
gctgcatccagtttgcaaagt

SEQ ID NO: 8856 - protein, 7 aa, synthetic construct
  REGION 1..7: note = Description of Artificial Sequence: Synthetic peptide
AASSLQS

SEQ ID NO: 8857 - DNA, 21 bp, synthetic construct
  misc_feature 1..21: note = Description of Artificial Sequence: Synthetic oligonucleotide
  source 1..21: mol_type = other DNA
gctacatccagtttgcaaagt

SEQ ID NO: 8858 - protein, 7 aa, synthetic construct
  REGION 1..7: note = Description of Artificial Sequence: Synthetic peptide
ATSSLQS

SEQ ID NO: 8859 - DNA, 21 bp, synthetic construct
  misc_feature 1..21: note = Description of Artificial Sequence: Synthetic oligonucleotide
  source 1..21: mol_type = other DNA
gctgcatccagtttacaaagt

SEQ ID NO: 8860 - protein, 7 aa, synthetic construct
  REGION 1..7: note = Description of Artificial Sequence: Synthetic peptide
AASSLQS

SEQ ID NO: 8861 - DNA, 21 bp, synthetic construct
  misc_feature 1..21: note = Description of Artificial Sequence: Synthetic oligonucleotide
  source 1..21: mol_type = other DNA
gttacatccagtttgcacagt

SEQ ID NO: 8862 - protein, 7 aa, synthetic construct
  REGION 1..7: note = Description of Artificial Sequence: Synthetic peptide
VTSSLHS

SEQ ID NO: 8863 - DNA, 21 bp, synthetic construct
  misc_feature 1..21: note = Description of Artificial Sequence: Synthetic oligonucleotide
  source 1..21: mol_type = other DNA
ggtgcatccaccagggccact

SEQ ID NO: 8864 - protein, 7 aa, synthetic construct
  REGION 1..7: note = Description of Artificial Sequence: Synthetic peptide
GASTRAT

SEQ ID NO: 8865 - DNA, 21 bp, synthetic construct
  misc_feature 1..21: note = Description of Artificial Sequence: Synthetic oligonucleotide
  source 1..21: mol_type = other DNA
gctgcatccagtttgcaaagt

SEQ ID NO: 8866 - protein, 7 aa, synthetic construct
  REGION 1..7: note = Description of Artificial Sequence: Synthetic peptide
AASSLQS

SEQ ID NO: 8867 - DNA, 21 bp, synthetic construct
  misc_feature 1..21: note = Description of Artificial Sequence: Synthetic oligonucleotide
  source 1..21: mol_type = other DNA
gatgcatccaatttggaaaca

SEQ ID NO: 8868 - protein, 7 aa, synthetic construct
  REGION 1..7: note = Description of Artificial Sequence: Synthetic peptide
DASNLET

SEQ ID NO: 8869 - DNA, 21 bp, synthetic construct
  misc_feature 1..21: note = Description of Artificial Sequence: Synthetic oligonucleotide
  source 1..21: mol_type = other DNA
gatgcatccaatttggaaaca

SEQ ID NO: 8870 - protein, 7 aa, synthetic construct
  REGION 1..7: note = Description of Artificial Sequence: Synthetic peptide
DASNLET

SEQ ID NO: 8871 - DNA, 21 bp, synthetic construct
  misc_feature 1..21: note = Description of Artificial Sequence: Synthetic oligonucleotide
  source 1..21: mol_type = other DNA
gctgcatccagtgtgcagagt

SEQ ID NO: 8872 - protein, 7 aa, synthetic construct
  REGION 1..7: note = Description of Artificial Sequence: Synthetic peptide
AASSVQS

SEQ ID NO: 8873 - DNA, 21 bp, synthetic construct
  misc_feature 1..21: note = Description of Artificial Sequence: Synthetic oligonucleotide
  source 1..21: mol_type = other DNA
gctgcatccagtttgcacagt

SEQ ID NO: 8874 - protein, 7 aa, synthetic construct
  REGION 1..7: note = Description of Artificial Sequence: Synthetic peptide
AASSLHS

SEQ ID NO: 8875 - DNA, 21 bp, synthetic construct
  misc_feature 1..21: note = Description of Artificial Sequence: Synthetic oligonucleotide
  source 1..21: mol_type = other DNA
actgcatccagtttacaaagt

SEQ ID NO: 8876 - protein, 7 aa, synthetic construct
  REGION 1..7: note = Description of Artificial Sequence: Synthetic peptide
TASSLQS

SEQ ID NO: 8877 - DNA, 21 bp, synthetic construct
  misc_feature 1..21: note = Description of Artificial Sequence: Synthetic oligonucleotide
  source 1..21: mol_type = other DNA
gctgcatccagtttacaaagt

SEQ ID NO: 8878 - protein, 7 aa, synthetic construct
  REGION 1..7: note = Description of Artificial Sequence: Synthetic peptide
AASSLQS

SEQ ID NO: 8879 - DNA, 21 bp, synthetic construct
  misc_feature 1..21: note = Description of Artificial Sequence: Synthetic oligonucleotide
  source 1..21: mol_type = other DNA
actgcatccagtttgcaaagt

SEQ ID NO: 8880 - protein, 7 aa, synthetic construct
  REGION 1..7: note = Description of Artificial Sequence: Synthetic peptide
TASSLQS

SEQ ID NO: 8881 - DNA, 21 bp, synthetic construct
  misc_feature 1..21: note = Description of Artificial Sequence: Synthetic oligonucleotide
  source 1..21: mol_type = other DNA
gctgcatccagtttgcaaagt

SEQ ID NO: 8882 - protein, 7 aa, synthetic construct
  REGION 1..7: note = Description of Artificial Sequence: Synthetic peptide
AASSLQS

SEQ ID NO: 8883 - DNA, 21 bp, synthetic construct
  misc_feature 1..21: note = Description of Artificial Sequence: Synthetic oligonucleotide
  source 1..21: mol_type = other DNA
actgcatccagtttgcaaagt

SEQ ID NO: 8884 - protein, 7 aa, synthetic construct
  REGION 1..7: note = Description of Artificial Sequence: Synthetic peptide
TASSLQS

SEQ ID NO: 8885 - DNA, 21 bp, synthetic construct
  misc_feature 1..21: note = Description of Artificial Sequence: Synthetic oligonucleotide
  source 1..21: mol_type = other DNA
actgcatccagtttgcaaagt

SEQ ID NO: 8886 - protein, 7 aa, synthetic construct
  REGION 1..7: note = Description of Artificial Sequence: Synthetic peptide
TASSLQS

SEQ ID NO: 8887 - DNA, 21 bp, synthetic construct
  misc_feature 1..21: note = Description of Artificial Sequence: Synthetic oligonucleotide
  source 1..21: mol_type = other DNA
gctgcatccagtttgcaaagt

SEQ ID NO: 8888 - protein, 7 aa, synthetic construct
  REGION 1..7: note = Description of Artificial Sequence: Synthetic peptide
AASSLQS

SEQ ID NO: 8889 - DNA, 21 bp, synthetic construct
  misc_feature 1..21: note = Description of Artificial Sequence: Synthetic oligonucleotide
  source 1..21: mol_type = other DNA
gctgcatccagtttgcaaaat

SEQ ID NO: 8890 - protein, 7 aa, synthetic construct
  REGION 1..7: note = Description of Artificial Sequence: Synthetic peptide
AASSLQN

SEQ ID NO: 8891 - DNA, 21 bp, synthetic construct
  misc_feature 1..21: note = Description of Artificial Sequence: Synthetic oligonucleotide
  source 1..21: mol_type = other DNA
gctgcatccagtttgcaaagt

SEQ ID NO: 8892 - protein, 7 aa, synthetic construct
  REGION 1..7: note = Description of Artificial Sequence: Synthetic peptide
AASSLQS

SEQ ID NO: 8893 - DNA, 21 bp, synthetic construct
  misc_feature 1..21: note = Description of Artificial Sequence: Synthetic oligonucleotide
  source 1..21: mol_type = other DNA
tgggcatctacccgggaatcc

SEQ ID NO: 8894 - protein, 7 aa, synthetic construct
  REGION 1..7: note = Description of Artificial Sequence: Synthetic peptide
WASTRES

SEQ ID NO: 8895 - DNA, 21 bp, synthetic construct
  misc_feature 1..21: note = Description of Artificial Sequence: Synthetic oligonucleotide
  source 1..21: mol_type = other DNA
gctgcatccagtttgcaaagt

SEQ ID NO: 8896 - protein, 7 aa, synthetic construct
  REGION 1..7: note = Description of Artificial Sequence: Synthetic peptide
AASSLQS

SEQ ID NO: 8897 - DNA, 21 bp, synthetic construct
  misc_feature 1..21: note = Description of Artificial Sequence: Synthetic oligonucleotide
  source 1..21: mol_type = other DNA
gctgcatccagtttgcaaagt

SEQ ID NO: 8898 - protein, 7 aa, synthetic construct
  REGION 1..7: note = Description of Artificial Sequence: Synthetic peptide
AASSLQS

SEQ ID NO: 8899 - DNA, 21 bp, synthetic construct
  misc_feature 1..21: note = Description of Artificial Sequence: Synthetic oligonucleotide
  source 1..21: mol_type = other DNA
gctgcatccagtttgcaaagt

SEQ ID NO: 8900 - protein, 7 aa, synthetic construct
  REGION 1..7: note = Description of Artificial Sequence: Synthetic peptide
AASSLQS

SEQ ID NO: 8901 - DNA, 21 bp, synthetic construct
  misc_feature 1..21: note = Description of Artificial Sequence: Synthetic oligonucleotide
  source 1..21: mol_type = other DNA
caagataggaagcggccctca

SEQ ID NO: 8902 - protein, 7 aa, synthetic construct
  REGION 1..7: note = Description of Artificial Sequence: Synthetic peptide
QDRKRPS

SEQ ID NO: 8903 - DNA, 21 bp, synthetic construct
  misc_feature 1..21: note = Description of Artificial Sequence: Synthetic oligonucleotide
  source 1..21: mol_type = other DNA
gttgcatccagtttgcaaact

SEQ ID NO: 8904 - protein, 7 aa, synthetic construct
  REGION 1..7: note = Description of Artificial Sequence: Synthetic peptide
VASSLQT

SEQ ID NO: 8905 - DNA, 21 bp, synthetic construct
  misc_feature 1..21: note = Description of Artificial Sequence: Synthetic oligonucleotide
  source 1..21: mol_type = other DNA
ggtgcatccagtttgcaaagt

SEQ ID NO: 8906 - protein, 7 aa, synthetic construct
  REGION 1..7: note = Description of Artificial Sequence: Synthetic peptide
GASSLQS

SEQ ID NO: 8907 - DNA, 21 bp, synthetic construct
  misc_feature 1..21: note = Description of Artificial Sequence: Synthetic oligonucleotide
  source 1..21: mol_type = other DNA
gatacaaccagtttgcaaagt

SEQ ID NO: 8908 - protein, 7 aa, synthetic construct
  REGION 1..7: note = Description of Artificial Sequence: Synthetic peptide
DTTSLQS

SEQ ID NO: 8909 - DNA, 21 bp, synthetic construct
  misc_feature 1..21: note = Description of Artificial Sequence: Synthetic oligonucleotide
  source 1..21: mol_type = other DNA
gctgcatccagtttgcaaagt

SEQ ID NO: 8910 - protein, 7 aa, synthetic construct
  REGION 1..7: note = Description of Artificial Sequence: Synthetic peptide
AASSLQS

SEQ ID NO: 8911 - DNA, 21 bp, synthetic construct
  misc_feature 1..21: note = Description of Artificial Sequence: Synthetic oligonucleotide
  source 1..21: mol_type = other DNA
actgcatccagtttgcaaagt

SEQ ID NO: 8912 - protein, 7 aa, synthetic construct
  REGION 1..7: note = Description of Artificial Sequence: Synthetic peptide
TASSLQS

SEQ ID NO: 8913 - DNA, 21 bp, synthetic construct
  misc_feature 1..21: note = Description of Artificial Sequence: Synthetic oligonucleotide
  source 1..21: mol_type = other DNA
gctgcatccagtttgcaaagt

SEQ ID NO: 8914 - protein, 7 aa, synthetic construct
  REGION 1..7: note = Description of Artificial Sequence: Synthetic peptide
AASSLQS

SEQ ID NO: 8915 - DNA, 21 bp, synthetic construct
  misc_feature 1..21: note = Description of Artificial Sequence: Synthetic oligonucleotide
  source 1..21: mol_type = other DNA
actgcatccaatttgcaaact

SEQ ID NO: 8916 - protein, 7 aa, synthetic construct
  REGION 1..7: note = Description of Artificial Sequence: Synthetic peptide
TASNLQT

SEQ ID NO: 8917 - DNA, 21 bp, synthetic construct
  misc_feature 1..21: note = Description of Artificial Sequence: Synthetic oligonucleotide
  source 1..21: mol_type = other DNA
gctgcatccagtttgcaaagt

SEQ ID NO: 8918 - protein, 7 aa, synthetic construct
  REGION 1..7: note = Description of Artificial Sequence: Synthetic peptide
AASSLQS

SEQ ID NO: 8919 - DNA, 21 bp, synthetic construct
  misc_feature 1..21: note = Description of Artificial Sequence: Synthetic oligonucleotide
  source 1..21: mol_type = other DNA
gctgcatccagtttgcaaagt

SEQ ID NO: 8920 - protein, 7 aa, synthetic construct
  REGION 1..7: note = Description of Artificial Sequence: Synthetic peptide
AASSLQS

SEQ ID NO: 8921 - DNA, 21 bp, synthetic construct
  misc_feature 1..21: note = Description of Artificial Sequence: Synthetic oligonucleotide
  source 1..21: mol_type = other DNA
gctgcatccagtttgcaaagt

SEQ ID NO: 8922 - protein, 7 aa, synthetic construct
  REGION 1..7: note = Description of Artificial Sequence: Synthetic peptide
AASSLQS

SEQ ID NO: 8923 - DNA, 21 bp, synthetic construct
  misc_feature 1..21: note = Description of Artificial Sequence: Synthetic oligonucleotide
  source 1..21: mol_type = other DNA
gctgcatccagtttgcaaagt

SEQ ID NO: 8924 - protein, 7 aa, synthetic construct
  REGION 1..7: note = Description of Artificial Sequence: Synthetic peptide
AASSLQS

SEQ ID NO: 8925 - DNA, 21 bp, synthetic construct
  misc_feature 1..21: note = Description of Artificial Sequence: Synthetic oligonucleotide
  source 1..21: mol_type = other DNA
actgcatccagtttgcaaagt

SEQ ID NO: 8926 - protein, 7 aa, synthetic construct
  REGION 1..7: note = Description of Artificial Sequence: Synthetic peptide
TASSLQS

SEQ ID NO: 8927 - DNA, 21 bp, synthetic construct
  misc_feature 1..21: note = Description of Artificial Sequence: Synthetic oligonucleotide
  source 1..21: mol_type = other DNA
gctgcatccagtttgcacagt

SEQ ID NO: 8928 - protein, 7 aa, synthetic construct
  REGION 1..7: note = Description of Artificial Sequence: Synthetic peptide
AASSLHS

SEQ ID NO: 8929 - DNA, 21 bp, synthetic construct
  misc_feature 1..21: note = Description of Artificial Sequence: Synthetic oligonucleotide
  source 1..21: mol_type = other DNA
gctgcatccagtttgcaaagt

SEQ ID NO: 8930 - protein, 7 aa, synthetic construct
  REGION 1..7: note = Description of Artificial Sequence: Synthetic peptide
AASSLQS

SEQ ID NO: 8931 - DNA, 21 bp, synthetic construct
  misc_feature 1..21: note = Description of Artificial Sequence: Synthetic oligonucleotide
  source 1..21: mol_type = other DNA
gctgcatccagtttggaaagt

SEQ ID NO: 8932 - protein, 7 aa, synthetic construct
  REGION 1..7: note = Description of Artificial Sequence: Synthetic peptide
AASSLES

SEQ ID NO: 8933 - DNA, 21 bp, synthetic construct
  misc_feature 1..21: note = Description of Artificial Sequence: Synthetic oligonucleotide
  source 1..21: mol_type = other DNA
gctgcatccagtttgcaaagt

SEQ ID NO: 8934 - protein, 7 aa, synthetic construct
  REGION 1..7: note = Description of Artificial Sequence: Synthetic peptide
AASSLQS

SEQ ID NO: 8935 - DNA, 21 bp, synthetic construct
  misc_feature 1..21: note = Description of Artificial Sequence: Synthetic oligonucleotide
  source 1..21: mol_type = other DNA
gctgcatccagtttgcaaagt

SEQ ID NO: 8936 - protein, 7 aa, synthetic construct
  REGION 1..7: note = Description of Artificial Sequence: Synthetic peptide
AASSLQS

SEQ ID NO: 8937 - DNA, 21 bp, synthetic construct
  misc_feature 1..21: note = Description of Artificial Sequence: Synthetic oligonucleotide
  source 1..21: mol_type = other DNA
gttgcatccagtttgcaaagt

SEQ ID NO: 8938 - protein, 7 aa, synthetic construct
  REGION 1..7: note = Description of Artificial Sequence: Synthetic peptide
VASSLQS

SEQ ID NO: 8939 - DNA, 21 bp, synthetic construct
  misc_feature 1..21: note = Description of Artificial Sequence: Synthetic oligonucleotide
  source 1..21: mol_type = other DNA
gctgcatccagtttgcaaagt

SEQ ID NO: 8940 - protein, 7 aa, synthetic construct
  REGION 1..7: note = Description of Artificial Sequence: Synthetic peptide
AASSLQS

SEQ ID NO: 8941 - DNA, 21 bp, synthetic construct
  misc_feature 1..21: note = Description of Artificial Sequence: Synthetic oligonucleotide
  source 1..21: mol_type = other DNA
gttgcatccagtttgcaaagt

SEQ ID NO: 8942 - protein, 7 aa, synthetic construct
  REGION 1..7: note = Description of Artificial Sequence: Synthetic peptide
VASSLQS

SEQ ID NO: 8943 - DNA, 21 bp, synthetic construct
  misc_feature 1..21: note = Description of Artificial Sequence: Synthetic oligonucleotide
  source 1..21: mol_type = other DNA
gctgcatccagtttgcaaagt

SEQ ID NO: 8944 - protein, 7 aa, synthetic construct
  REGION 1..7: note = Description of Artificial Sequence: Synthetic peptide
AASSLQS

SEQ ID NO: 8945 - DNA, 21 bp, synthetic construct
  misc_feature 1..21: note = Description of Artificial Sequence: Synthetic oligonucleotide
  source 1..21: mol_type = other DNA
gctgcatccagtttgcaaagt

SEQ ID NO: 8946 - protein, 7 aa, synthetic construct
  REGION 1..7: note = Description of Artificial Sequence: Synthetic peptide
AASSLQS

SEQ ID NO: 8947 - DNA, 21 bp, synthetic construct
  misc_feature 1..21: note = Description of Artificial Sequence: Synthetic oligonucleotide
  source 1..21: mol_type = other DNA
actgcatccagtttgcaaagt

SEQ ID NO: 8948 - protein, 7 aa, synthetic construct
  REGION 1..7: note = Description of Artificial Sequence: Synthetic peptide
TASSLQS

SEQ ID NO: 8949 - DNA, 21 bp, synthetic construct
  misc_feature 1..21: note = Description of Artificial Sequence: Synthetic oligonucleotide
  source 1..21: mol_type = other DNA
gatgcatccaatttggaaaca

SEQ ID NO: 8950 - protein, 7 aa, synthetic construct
  REGION 1..7: note = Description of Artificial Sequence: Synthetic peptide
DASNLET

SEQ ID NO: 8951 - DNA, 21 bp, synthetic construct
  misc_feature 1..21: note = Description of Artificial Sequence: Synthetic oligonucleotide
  source 1..21: mol_type = other DNA
gctgcatccagtttgcaaagt

SEQ ID NO: 8952 - protein, 7 aa, synthetic construct
  REGION 1..7: note = Description of Artificial Sequence: Synthetic peptide
AASSLQS

SEQ ID NO: 8953 - DNA, 21 bp, synthetic construct
  misc_feature 1..21: note = Description of Artificial Sequence: Synthetic oligonucleotide
  source 1..21: mol_type = other DNA
gatggatccaatttggaaaca

SEQ ID NO: 8954 - protein, 7 aa, synthetic construct
  REGION 1..7: note = Description of Artificial Sequence: Synthetic peptide
DGSNLET

SEQ ID NO: 8955 - DNA, 21 bp, synthetic construct
  misc_feature 1..21: note = Description of Artificial Sequence: Synthetic oligonucleotide
  source 1..21: mol_type = other DNA
gatgcatccaatttggaaaca

SEQ ID NO: 8956 - protein, 7 aa, synthetic construct
  REGION 1..7: note = Description of Artificial Sequence: Synthetic peptide
DASNLET

SEQ ID NO: 8957 - DNA, 21 bp, synthetic construct
  misc_feature 1..21: note = Description of Artificial Sequence: Synthetic oligonucleotide
  source 1..21: mol_type = other DNA
gctgcatccagtttgcaaagt

SEQ ID NO: 8958 - protein, 7 aa, synthetic construct
  REGION 1..7: note = Description of Artificial Sequence: Synthetic peptide
AASSLQS

SEQ ID NO: 8959 - DNA, 21 bp, synthetic construct
  misc_feature 1..21: note = Description of Artificial Sequence: Synthetic oligonucleotide
  source 1..21: mol_type = other DNA
gctgcatacattttgcaatca

SEQ ID NO: 8960 - protein, 7 aa, synthetic construct
  REGION 1..7: note = Description of Artificial Sequence: Synthetic peptide
AAYILQS

SEQ ID NO: 8961 - DNA, 21 bp, synthetic construct
  misc_feature 1..21: note = Description of Artificial Sequence: Synthetic oligonucleotide
  source 1..21: mol_type = other DNA
actgcatccagtttgcaaagt

SEQ ID NO: 8962 - protein, 7 aa, synthetic construct
  REGION 1..7: note = Description of Artificial Sequence: Synthetic peptide
TASSLQS

SEQ ID NO: 8963 - DNA, 21 bp, synthetic construct
  misc_feature 1..21: note = Description of Artificial Sequence: Synthetic oligonucleotide
  source 1..21: mol_type = other DNA
gctgcatccagtttgcaaagt

SEQ ID NO: 8964 - protein, 7 aa, synthetic construct
  REGION 1..7: note = Description of Artificial Sequence: Synthetic peptide
AASSLQS

SEQ ID NO: 8965 - DNA, 21 bp, synthetic construct
  misc_feature 1..21: note = Description of Artificial Sequence: Synthetic oligonucleotide
  source 1..21: mol_type = other DNA
actgcatccagtttgcaaaat

SEQ ID NO: 8966 - protein, 7 aa, synthetic construct
  REGION 1..7: note = Description of Artificial Sequence: Synthetic peptide
TASSLQN

SEQ ID NO: 8967 - DNA, 21 bp, synthetic construct
  misc_feature 1..21: note = Description of Artificial Sequence: Synthetic oligonucleotide
  source 1..21: mol_type = other DNA
gctgcatccagtttgcaaagt

SEQ ID NO: 8968 - protein, 7 aa, synthetic construct
  REGION 1..7: note = Description of Artificial Sequence: Synthetic peptide
AASSLQS

SEQ ID NO: 8969 - DNA, 21 bp, synthetic construct
  misc_feature 1..21: note = Description of Artificial Sequence: Synthetic oligonucleotide
  source 1..21: mol_type = other DNA
gctgcatccagtttgcaaagt

SEQ ID NO: 8970 - protein, 7 aa, synthetic construct
  REGION 1..7: note = Description of Artificial Sequence: Synthetic peptide
AASSLQS

SEQ ID NO: 8971 - DNA, 21 bp, synthetic construct
  misc_feature 1..21: note = Description of Artificial Sequence: Synthetic oligonucleotide
  source 1..21: mol_type = other DNA
gctgcatccagtttgcaaagt

SEQ ID NO: 8972 - protein, 7 aa, synthetic construct
  REGION 1..7: note = Description of Artificial Sequence: Synthetic peptide
AASSLQS

SEQ ID NO: 8973 - DNA, 21 bp, synthetic construct
  misc_feature 1..21: note = Description of Artificial Sequence: Synthetic oligonucleotide
  source 1..21: mol_type = other DNA
gctgcatccagtttgcaaagt

SEQ ID NO: 8974 - protein, 7 aa, synthetic construct
  REGION 1..7: note = Description of Artificial Sequence: Synthetic peptide
AASSLQS

SEQ ID NO: 8975 - DNA, 21 bp, synthetic construct
  misc_feature 1..21: note = Description of Artificial Sequence: Synthetic oligonucleotide
  source 1..21: mol_type = other DNA
gctgcatccagtttgcaaagt

SEQ ID NO: 8976 - protein, 7 aa, synthetic construct
  REGION 1..7: note = Description of Artificial Sequence: Synthetic peptide
AASSLQS

SEQ ID NO: 8977 - DNA, 21 bp, synthetic construct
  misc_feature 1..21: note = Description of Artificial Sequence: Synthetic oligonucleotide
  source 1..21: mol_type = other DNA
gatgcatccaatttggaaaca

SEQ ID NO: 8978 - protein, 7 aa, synthetic construct
  REGION 1..7: note = Description of Artificial Sequence: Synthetic peptide
DASNLET

SEQ ID NO: 8979 - DNA, 21 bp, synthetic construct
  misc_feature 1..21: note = Description of Artificial Sequence: Synthetic oligonucleotide
  source 1..21: mol_type = other DNA
gctgcctccagtttgcaaagt

SEQ ID NO: 8980 - protein, 7 aa, synthetic construct
  REGION 1..7: note = Description of Artificial Sequence: Synthetic peptide
AASSLQS

SEQ ID NO: 8981 - DNA, 21 bp, synthetic construct
  misc_feature 1..21: note = Description of Artificial Sequence: Synthetic oligonucleotide
  source 1..21: mol_type = other DNA
gatgcatccaatttggaaaca

SEQ ID NO: 8982 - protein, 7 aa, synthetic construct
  REGION 1..7: note = Description of Artificial Sequence: Synthetic peptide
DASNLET

SEQ ID NO: 8983 - DNA, 21 bp, synthetic construct
  misc_feature 1..21: note = Description of Artificial Sequence: Synthetic oligonucleotide
  source 1..21: mol_type = other DNA
gctgcgtccagtgtgcaaact

SEQ ID NO: 8984 - protein, 7 aa, synthetic construct
  REGION 1..7: note = Description of Artificial Sequence: Synthetic peptide
AASSVQT

SEQ ID NO: 8985 - DNA, 21 bp, synthetic construct
  misc_feature 1..21: note = Description of Artificial Sequence: Synthetic oligonucleotide
  source 1..21: mol_type = other DNA
gctgcatccagtttgcaaagt

SEQ ID NO: 8986 - protein, 7 aa, synthetic construct
  REGION 1..7: note = Description of Artificial Sequence: Synthetic peptide
AASSLQS

SEQ ID NO: 8987 - DNA, 21 bp, synthetic construct
  misc_feature 1..21: note = Description of Artificial Sequence: Synthetic oligonucleotide
  source 1..21: mol_type = other DNA
gctacatccagtttgcaaaat

SEQ ID NO: 8988 - protein, 7 aa, synthetic construct
  REGION 1..7: note = Description of Artificial Sequence: Synthetic peptide
ATSSLQN

SEQ ID NO: 8989 - DNA, 21 bp, synthetic construct
  misc_feature 1..21: note = Description of Artificial Sequence: Synthetic oligonucleotide
  source 1..21: mol_type = other DNA
gctgcatccagtgtgcaaagt

SEQ ID NO: 8990 - protein, 7 aa, synthetic construct
  REGION 1..7: note = Description of Artificial Sequence: Synthetic peptide
AASSVQS

SEQ ID NO: 8991 - DNA, 21 bp, synthetic construct
  misc_feature 1..21: note = Description of Artificial Sequence: Synthetic oligonucleotide
  source 1..21: mol_type = other DNA
gatgcatccaatttggaaaca

SEQ ID NO: 8992 - protein, 7 aa, synthetic construct
  REGION 1..7: note = Description of Artificial Sequence: Synthetic peptide
DASNLET

SEQ ID NO: 8993 - DNA, 21 bp, synthetic construct
  misc_feature 1..21: note = Description of Artificial Sequence: Synthetic oligonucleotide
  source 1..21: mol_type = other DNA
gctgcatccagtttgcaaact

SEQ ID NO: 8994 - protein, 7 aa, synthetic construct
  REGION 1..7: note = Description of Artificial Sequence: Synthetic peptide
AASSLQT

SEQ ID NO: 8995 - DNA, 21 bp, synthetic construct
  misc_feature 1..21: note = Description of Artificial Sequence: Synthetic oligonucleotide
  source 1..21: mol_type = other DNA
ggtgcatccagtttgcaaagt

SEQ ID NO: 8996 - protein, 7 aa, synthetic construct
  REGION 1..7: note = Description of Artificial Sequence: Synthetic peptide
GASSLQS

SEQ ID NO: 8997 - DNA, 21 bp, synthetic construct
  misc_feature 1..21: note = Description of Artificial Sequence: Synthetic oligonucleotide
  source 1..21: mol_type = other DNA
gctgcatccagtttacaaagt

SEQ ID NO: 8998 - protein, 7 aa, synthetic construct
  REGION 1..7: note = Description of Artificial Sequence: Synthetic peptide
AASSLQS

SEQ ID NO: 8999 - DNA, 21 bp, synthetic construct
  misc_feature 1..21: note = Description of Artificial Sequence: Synthetic oligonucleotide
  source 1..21: mol_type = other DNA
gttgcatccagtttgcaaagt

SEQ ID NO: 9000 - protein, 7 aa, synthetic construct
  REGION 1..7: note = Description of Artificial Sequence: Synthetic peptide
VASSLQS

SEQ ID NO: 9001 - DNA, 21 bp, synthetic construct
  misc_feature 1..21: note = Description of Artificial Sequence: Synthetic oligonucleotide
  source 1..21: mol_type = other DNA
actgcatccagtttgcaaagt

SEQ ID NO: 9002 - protein, 7 aa, synthetic construct
  REGION 1..7: note = Description of Artificial Sequence: Synthetic peptide
TASSLQS

SEQ ID NO: 9003 - DNA, 21 bp, synthetic construct
  misc_feature 1..21: note = Description of Artificial Sequence: Synthetic oligonucleotide
  source 1..21: mol_type = other DNA
gctgcatccagtttgcaaagt

SEQ ID NO: 9004 - protein, 7 aa, synthetic construct
  REGION 1..7: note = Description of Artificial Sequence: Synthetic peptide
AASSLQS

SEQ ID NO: 9005 - DNA, 21 bp, synthetic construct
  misc_feature 1..21: note = Description of Artificial Sequence: Synthetic oligonucleotide
  source 1..21: mol_type = other DNA
ttgggttctaatcgggcctcc

SEQ ID NO: 9006 - protein, 7 aa, synthetic construct
  REGION 1..7: note = Description of Artificial Sequence: Synthetic peptide
LGSNRAS

SEQ ID NO: 9007 - DNA, 21 bp, synthetic construct
  misc_feature 1..21: note = Description of Artificial Sequence: Synthetic oligonucleotide
  source 1..21: mol_type = other DNA
gctgcgtccagtttgcaaagt

SEQ ID NO: 9008 - protein, 7 aa, synthetic construct
  REGION 1..7: note = Description of Artificial Sequence: Synthetic peptide
AASSLQS

SEQ ID NO: 9009 - DNA, 21 bp, synthetic construct
  misc_feature 1..21: note = Description of Artificial Sequence: Synthetic oligonucleotide
  source 1..21: mol_type = other DNA
tgggcatctacccgggaatcc

SEQ ID NO: 9010 - protein, 7 aa, synthetic construct
  REGION 1..7: note = Description of Artificial Sequence: Synthetic peptide
WASTRES

SEQ ID NO: 9011 - DNA, 21 bp, synthetic construct
  misc_feature 1..21: note = Description of Artificial Sequence: Synthetic oligonucleotide
  source 1..21: mol_type = other DNA
gctgcatccagtttgcaaagt

SEQ ID NO: 9012 - protein, 7 aa, synthetic construct
  REGION 1..7: note = Description of Artificial Sequence: Synthetic peptide
AASSLQS

SEQ ID NO: 9013 - DNA, 21 bp, synthetic construct
  misc_feature 1..21: note = Description of Artificial Sequence: Synthetic oligonucleotide
  source 1..21: mol_type = other DNA
gctgcatccagtttgcaaaat

SEQ ID NO: 9014 - protein, 7 aa, synthetic construct
  REGION 1..7: note = Description of Artificial Sequence: Synthetic peptide
AASSLQN

SEQ ID NO: 9015 - DNA, 21 bp, synthetic construct
  misc_feature 1..21: note = Description of Artificial Sequence: Synthetic oligonucleotide
  source 1..21: mol_type = other DNA
ttgggttctaatcgggcctcc

SEQ ID NO: 9016 - protein, 7 aa, synthetic construct
  REGION 1..7: note = Description of Artificial Sequence: Synthetic peptide
LGSNRAS

SEQ ID NO: 9017 - DNA, 21 bp, synthetic construct
  misc_feature 1..21: note = Description of Artificial Sequence: Synthetic oligonucleotide
  source 1..21: mol_type = other DNA
gctgcatccagtttgcaaagt

SEQ ID NO: 9018 - protein, 7 aa, synthetic construct
  REGION 1..7: note = Description of Artificial Sequence: Synthetic peptide
AASSLQS

SEQ ID NO: 9019 - DNA, 21 bp, synthetic construct
  misc_feature 1..21: note = Description of Artificial Sequence: Synthetic oligonucleotide
  source 1..21: mol_type = other DNA
gctgcatccagtttgcaaagt

SEQ ID NO: 9020 - protein, 7 aa, synthetic construct
  REGION 1..7: note = Description of Artificial Sequence: Synthetic peptide
AASSLQS

SEQ ID NO: 9021 - DNA, 21 bp, synthetic construct
  misc_feature 1..21: note = Description of Artificial Sequence: Synthetic oligonucleotide
  source 1..21: mol_type = other DNA
gctgcatccagtttacaaagt

SEQ ID NO: 9022 - protein, 7 aa, synthetic construct
  REGION 1..7: note = Description of Artificial Sequence: Synthetic peptide
AASSLQS

SEQ ID NO: 9023 - DNA, 21 bp, synthetic construct
  misc_feature 1..21: note = Description of Artificial Sequence: Synthetic oligonucleotide
  source 1..21: mol_type = other DNA
gctgcatccagtgtgcaaagt

SEQ ID NO: 9024 - protein, 7 aa, synthetic construct
  REGION 1..7: note = Description of Artificial Sequence: Synthetic peptide
AASSVQS

SEQ ID NO: 9025 - DNA, 21 bp, synthetic construct
  misc_feature 1..21: note = Description of Artificial Sequence: Synthetic oligonucleotide
  source 1..21: mol_type = other DNA
gatgcatccaatttggaaaca

SEQ ID NO: 9026 - protein, 7 aa, synthetic construct
  REGION 1..7: note = Description of Artificial Sequence: Synthetic peptide
DASNLET

SEQ ID NO: 9027 - DNA, 21 bp, synthetic construct
  misc_feature 1..21: note = Description of Artificial Sequence: Synthetic oligonucleotide
  source 1..21: mol_type = other DNA
actacatccagtttgcaaagt

SEQ ID NO: 9028 - protein, 7 aa, synthetic construct
  REGION 1..7: note = Description of Artificial Sequence: Synthetic peptide
TTSSLQS

SEQ ID NO: 9029 - DNA, 21 bp, synthetic construct
  misc_feature 1..21: note = Description of Artificial Sequence: Synthetic oligonucleotide
  source 1..21: mol_type = other DNA
tgggcatctacccggaaatcc

SEQ ID NO: 9030 - protein, 7 aa, synthetic construct
  REGION 1..7: note = Description of Artificial Sequence: Synthetic peptide
WASTRKS

SEQ ID NO: 9031 - DNA, 21 bp, synthetic construct
  misc_feature 1..21: note = Description of Artificial Sequence: Synthetic oligonucleotide
  source 1..21: mol_type = other DNA
gctgcatccagtttgcaaagt

SEQ ID NO: 9032 - protein, 7 aa, synthetic construct
  REGION 1..7: note = Description of Artificial Sequence: Synthetic peptide
AASSLQS

SEQ ID NO: 9033 - DNA, 21 bp, synthetic construct
  misc_feature 1..21: note = Description of Artificial Sequence: Synthetic oligonucleotide
  source 1..21: mol_type = other DNA
gctgcatccagtttgcaaagt

SEQ ID NO: 9034 - protein, 7 aa, synthetic construct
  REGION 1..7: note = Description of Artificial Sequence: Synthetic peptide
AASSLQS

SEQ ID NO: 9035 - DNA, 21 bp, synthetic construct
  misc_feature 1..21: note = Description of Artificial Sequence: Synthetic oligonucleotide
  source 1..21: mol_type = other DNA
gctgcatccagtttacaaagt

SEQ ID NO: 9036 - protein, 7 aa, synthetic construct
  REGION 1..7: note = Description of Artificial Sequence: Synthetic peptide
AASSLQS

SEQ ID NO: 9037 - DNA, 21 bp, synthetic construct
  misc_feature 1..21: note = Description of Artificial Sequence: Synthetic oligonucleotide
  source 1..21: mol_type = other DNA
gctgcatccagtttgcaaagt

SEQ ID NO: 9038 - protein, 7 aa, synthetic construct
  REGION 1..7: note = Description of Artificial Sequence: Synthetic peptide
AASSLQS

SEQ ID NO: 9039 - DNA, 21 bp, synthetic construct
  misc_feature 1..21: note = Description of Artificial Sequence: Synthetic oligonucleotide
  source 1..21: mol_type = other DNA
actgcatccagtttgcaaagt

SEQ ID NO: 9040 - protein, 7 aa, synthetic construct
  REGION 1..7: note = Description of Artificial Sequence: Synthetic peptide
TASSLQS

SEQ ID NO: 9041 - DNA, 21 bp, synthetic construct
  misc_feature 1..21: note = Description of Artificial Sequence: Synthetic oligonucleotide
  source 1..21: mol_type = other DNA
gctgcatccagtttgcaaagt

SEQ ID NO: 9042 - protein, 7 aa, synthetic construct
  REGION 1..7: note = Description of Artificial Sequence: Synthetic peptide
AASSLQS

SEQ ID NO: 9043 - DNA, 21 bp, synthetic construct
  misc_feature 1..21: note = Description of Artificial Sequence: Synthetic oligonucleotide
  source 1..21: mol_type = other DNA
caagatagaaagcggccctca

SEQ ID NO: 9044 - protein, 7 aa, synthetic construct
  REGION 1..7: note = Description of Artificial Sequence: Synthetic peptide
QDRKRPS

SEQ ID NO: 9045 - DNA, 21 bp, synthetic construct
  misc_feature 1..21: note = Description of Artificial Sequence: Synthetic oligonucleotide
  source 1..21: mol_type = other DNA
caagatagcaagcggccctca

SEQ ID NO: 9046 - protein, 7 aa, synthetic construct
  REGION 1..7: note = Description of Artificial Sequence: Synthetic peptide
QDSKRPS

SEQ ID NO: 9047 - DNA, 21 bp, synthetic construct
  misc_feature 1..21: note = Description of Artificial Sequence: Synthetic oligonucleotide
  source 1..21: mol_type = other DNA
gctgcatccagtttgcacagt

SEQ ID NO: 9048 - protein, 7 aa, synthetic construct
  REGION 1..7: note = Description of Artificial Sequence: Synthetic peptide
AASSLHS

SEQ ID NO: 9049 - DNA, 21 bp, synthetic construct
  misc_feature 1..21: note = Description of Artificial Sequence: Synthetic oligonucleotide
  source 1..21: mol_type = other DNA
gctgcatccaatttgcaaagt

SEQ ID NO: 9050 - protein, 7 aa, synthetic construct
  REGION 1..7: note = Description of Artificial Sequence: Synthetic peptide
AASNLQS

SEQ ID NO: 9051 - DNA, 21 bp, synthetic construct
  misc_feature 1..21: note = Description of Artificial Sequence: Synthetic oligonucleotide
  source 1..21: mol_type = other DNA
gctgcatccactttgcaatca

SEQ ID NO: 9052 - protein, 7 aa, synthetic construct
  REGION 1..7: note = Description of Artificial Sequence: Synthetic peptide
AASTLQS

SEQ ID NO: 9053 - DNA, 21 bp, synthetic construct
  misc_feature 1..21: note = Description of Artificial Sequence: Synthetic oligonucleotide
  source 1..21: mol_type = other DNA
gttgcgtccagtttcccaagt

SEQ ID NO: 9054 - protein, 7 aa, synthetic construct
  REGION 1..7: note = Description of Artificial Sequence: Synthetic peptide
VASSFPS

SEQ ID NO: 9055 - DNA, 21 bp, synthetic construct
  misc_feature 1..21: note = Description of Artificial Sequence: Synthetic oligonucleotide
  source 1..21: mol_type = other DNA
actgcatccagtttgcaaagt

SEQ ID NO: 9056 - protein, 7 aa, synthetic construct
  REGION 1..7: note = Description of Artificial Sequence: Synthetic peptide
TASSLQS

SEQ ID NO: 9057 - DNA, 21 bp, synthetic construct
  misc_feature 1..21: note = Description of Artificial Sequence: Synthetic oligonucleotide
  source 1..21: mol_type = other DNA
gctgcatccagtttggaaagt

SEQ ID NO: 9058 - protein, 7 aa, synthetic construct
  REGION 1..7: note = Description of Artificial Sequence: Synthetic peptide
AASSLES

SEQ ID NO: 9059 - DNA, 21 bp, synthetic construct
  misc_feature 1..21: note = Description of Artificial Sequence: Synthetic oligonucleotide
  source 1..21: mol_type = other DNA
gctacatccaatctccaaagt

SEQ ID NO: 9060 - protein, 7 aa, synthetic construct
  REGION 1..7: note = Description of Artificial Sequence: Synthetic peptide
ATSNLQS

SEQ ID NO: 9061 - DNA, 21 bp, synthetic construct
  misc_feature 1..21: note = Description of Artificial Sequence: Synthetic oligonucleotide
  source 1..21: mol_type = other DNA
caagatagcaagcggccctca

SEQ ID NO: 9062 - protein, 7 aa, synthetic construct
  REGION 1..7: note = Description of Artificial Sequence: Synthetic peptide
QDSKRPS

SEQ ID NO: 9063 - DNA, 21 bp, synthetic construct
  misc_feature 1..21: note = Description of Artificial Sequence: Synthetic oligonucleotide
  source 1..21: mol_type = other DNA
caagatagaaagaggccctca

SEQ ID NO: 9064 - protein, 7 aa, synthetic construct
  REGION 1..7: note = Description of Artificial Sequence: Synthetic peptide
QDRKRPS

SEQ ID NO: 9065 - DNA, 21 bp, synthetic construct
  misc_feature 1..21: note = Description of Artificial Sequence: Synthetic oligonucleotide
  source 1..21: mol_type = other DNA
gctgcatccagtttgcaaact

SEQ ID NO: 9066 - protein, 7 aa, synthetic construct
  REGION 1..7: note = Description of Artificial Sequence: Synthetic peptide
AASSLQT

SEQ ID NO: 9067 - DNA, 21 bp, synthetic construct
  misc_feature 1..21: note = Description of Artificial Sequence: Synthetic oligonucleotide
  source 1..21: mol_type = other DNA
gaggtcagtaatcggccctca

SEQ ID NO: 9068 - protein, 7 aa, synthetic construct
  REGION 1..7: note = Description of Artificial Sequence: Synthetic peptide
EVSNRPS

SEQ ID NO: 9069 - DNA, 21 bp, synthetic construct
  misc_feature 1..21: note = Description of Artificial Sequence: Synthetic oligonucleotide
  source 1..21: mol_type = other DNA
tgggcatctacccggaaatcc

SEQ ID NO: 9070 - protein, 7 aa, synthetic construct
  REGION 1..7: note = Description of Artificial Sequence: Synthetic peptide
WASTRKS

SEQ ID NO: 9071 - DNA, 21 bp, synthetic construct
  misc_feature 1..21: note = Description of Artificial Sequence: Synthetic oligonucleotide
  source 1..21: mol_type = other DNA
caagatagaaagcggccctca

SEQ ID NO: 9072 - protein, 7 aa, synthetic construct
  REGION 1..7: note = Description of Artificial Sequence: Synthetic peptide
QDRKRPS

SEQ ID NO: 9073 - DNA, 21 bp, synthetic construct
  misc_feature 1..21: note = Description of Artificial Sequence: Synthetic oligonucleotide
  source 1..21: mol_type = other DNA
gctgcatccactttgcaaagt

SEQ ID NO: 9074 - protein, 7 aa, synthetic construct
  REGION 1..7: note = Description of Artificial Sequence: Synthetic peptide
AASTLQS

SEQ ID NO: 9075 - DNA, 21 bp, synthetic construct
  misc_feature 1..21: note = Description of Artificial Sequence: Synthetic oligonucleotide
  source 1..21: mol_type = other DNA
gctgcatccagtttgcaaagt

SEQ ID NO: 9076 - protein, 7 aa, synthetic construct
  REGION 1..7: note = Description of Artificial Sequence: Synthetic peptide
AASSLQS

SEQ ID NO: 9077 - DNA, 21 bp, synthetic construct
  misc_feature 1..21: note = Description of Artificial Sequence: Synthetic oligonucleotide
  source 1..21: mol_type = other DNA
caagatagcaagcggccctca

SEQ ID NO: 9078 - protein, 7 aa, synthetic construct
  REGION 1..7: note = Description of Artificial Sequence: Synthetic peptide
QDSKRPS

SEQ ID NO: 9079 - DNA, 21 bp, synthetic construct
  misc_feature 1..21: note = Description of Artificial Sequence: Synthetic oligonucleotide
  source 1..21: mol_type = other DNA
tgggcatctacccgggaatcc

SEQ ID NO: 9080 - protein, 7 aa, synthetic construct
  REGION 1..7: note = Description of Artificial Sequence: Synthetic peptide
WASTRES

SEQ ID NO: 9081 - DNA, 21 bp, synthetic construct
  misc_feature 1..21: note = Description of Artificial Sequence: Synthetic oligonucleotide
  source 1..21: mol_type = other DNA
aaggtttctaactgggactct

SEQ ID NO: 9082 - protein, 7 aa, synthetic construct
  REGION 1..7: note = Description of Artificial Sequence: Synthetic peptide
KVSNWDS

SEQ ID NO: 9083 - DNA, 21 bp, synthetic construct
  misc_feature 1..21: note = Description of Artificial Sequence: Synthetic oligonucleotide
  source 1..21: mol_type = other DNA
tgggcatctacccgggaatcc

SEQ ID NO: 9084 - protein, 7 aa, synthetic construct
  REGION 1..7: note = Description of Artificial Sequence: Synthetic peptide
WASTRES

SEQ ID NO: 9085 - DNA, 21 bp, synthetic construct
  misc_feature 1..21: note = Description of Artificial Sequence: Synthetic oligonucleotide
  source 1..21: mol_type = other DNA
tgggcatctacccgggagtcc

SEQ ID NO: 9086 - protein, 7 aa, synthetic construct
  REGION 1..7: note = Description of Artificial Sequence: Synthetic peptide
WASTRES

SEQ ID NO: 9087 - DNA, 21 bp, synthetic construct
  misc_feature 1..21: note = Description of Artificial Sequence: Synthetic oligonucleotide
  source 1..21: mol_type = other DNA
tgggcatctacccgggaatcc

SEQ ID NO: 9088 - protein, 7 aa, synthetic construct
  REGION 1..7: note = Description of Artificial Sequence: Synthetic peptide
WASTRES

SEQ ID NO: 9089 - DNA, 21 bp, synthetic construct
  misc_feature 1..21: note = Description of Artificial Sequence: Synthetic oligonucleotide
  source 1..21: mol_type = other DNA
gctgcatccagtttgcagagt

SEQ ID NO: 9090 - protein, 7 aa, synthetic construct
  REGION 1..7: note = Description of Artificial Sequence: Synthetic peptide
AASSLQS

SEQ ID NO: 9091 - DNA, 21 bp, synthetic construct
  misc_feature 1..21: note = Description of Artificial Sequence: Synthetic oligonucleotide
  source 1..21: mol_type = other DNA
tgggcatctacccggaaatcc

SEQ ID NO: 9092 - protein, 7 aa, synthetic construct
  REGION 1..7: note = Description of Artificial Sequence: Synthetic peptide
WASTRKS

SEQ ID NO: 9093 - DNA, 21 bp, synthetic construct
  misc_feature 1..21: note = Description of Artificial Sequence: Synthetic oligonucleotide
  source 1..21: mol_type = other DNA
tgggcatctacccgggaatcc

SEQ ID NO: 9094 - protein, 7 aa, synthetic construct
  REGION 1..7: note = Description of Artificial Sequence: Synthetic peptide
WASTRES

SEQ ID NO: 9095 - DNA, 21 bp, synthetic construct
  misc_feature 1..21: note = Description of Artificial Sequence: Synthetic oligonucleotide
  source 1..21: mol_type = other DNA
gctgcatccagtttacaaagt

SEQ ID NO: 9096 - protein, 7 aa, synthetic construct
  REGION 1..7: note = Description of Artificial Sequence: Synthetic peptide
AASSLQS

SEQ ID NO: 9097 - DNA, 21 bp, synthetic construct
  misc_feature 1..21: note = Description of Artificial Sequence: Synthetic oligonucleotide
  source 1..21: mol_type = other DNA
gctgcatccagtttgcaaagt

SEQ ID NO: 9098 - protein, 7 aa, synthetic construct
  REGION 1..7: note = Description of Artificial Sequence: Synthetic peptide
AASSLQS

SEQ ID NO: 9099 - DNA, 21 bp, synthetic construct
  misc_feature 1..21: note = Description of Artificial Sequence: Synthetic oligonucleotide
  source 1..21: mol_type = other DNA
aaggtttctaactgggactct

SEQ ID NO: 9100 - protein, 7 aa, synthetic construct
  REGION 1..7: note = Description of Artificial Sequence: Synthetic peptide
KVSNWDS

SEQ ID NO: 9101 - DNA, 21 bp, synthetic construct
  misc_feature 1..21: note = Description of Artificial Sequence: Synthetic oligonucleotide
  source 1..21: mol_type = other DNA
gctgcatctagtttgcaaagt

SEQ ID NO: 9102 - protein, 7 aa, synthetic construct
  REGION 1..7: note = Description of Artificial Sequence: Synthetic peptide
AASSLQS

SEQ ID NO: 9103 - DNA, 21 bp, synthetic construct
  misc_feature 1..21: note = Description of Artificial Sequence: Synthetic oligonucleotide
  source 1..21: mol_type = other DNA
gctgcatccagtttgcaaagt

SEQ ID NO: 9104 - protein, 7 aa, synthetic construct
  REGION 1..7: note = Description of Artificial Sequence: Synthetic peptide
AASSLQS

SEQ ID NO: 9105 - DNA, 21 bp, synthetic construct
  misc_feature 1..21: note = Description of Artificial Sequence: Synthetic oligonucleotide
  source 1..21: mol_type = other DNA
agtgcatccagtttgcaaagt

SEQ ID NO: 9106 - protein, 7 aa, synthetic construct
  REGION 1..7: note = Description of Artificial Sequence: Synthetic peptide
SASSLQS

SEQ ID NO: 9107 - DNA, 21 bp, synthetic construct
  misc_feature 1..21: note = Description of Artificial Sequence: Synthetic oligonucleotide
  source 1..21: mol_type = other DNA
tgggcatctacccggaaatcc

SEQ ID NO: 9108 - protein, 7 aa, synthetic construct
  REGION 1..7: note = Description of Artificial Sequence: Synthetic peptide
WASTRKS

SEQ ID NO: 9109 - DNA, 21 bp, synthetic construct
  misc_feature 1..21: note = Description of Artificial Sequence: Synthetic oligonucleotide
  source 1..21: mol_type = other DNA
gctacatccagtttgcaaagt

SEQ ID NO: 9110 - protein, 7 aa, synthetic construct
  REGION 1..7: note = Description of Artificial Sequence: Synthetic peptide
ATSSLQS

SEQ ID NO: 9111 - DNA, 33 bp, synthetic construct; identical to SEQ ID NO: 8207
  misc_feature 1..33: note = Description of Artificial Sequence: Synthetic oligonucleotide
  source 1..33: mol_type = other DNA

SEQ ID NO: 9112 - protein, 11 aa, synthetic construct
  REGION 1..11: note = Description of Artificial Sequence: Synthetic peptide
VKSDGSHSKGD

SEQ ID NO: 9113 - DNA, 21 bp, synthetic construct
  misc_feature 1..21: note = Description of Artificial Sequence: Synthetic oligonucleotide
  source 1..21: mol_type = other DNA
caagatagcaagcggccctca

SEQ ID NO: 9114 - protein, 7 aa, synthetic construct
  REGION 1..7: note = Description of Artificial Sequence: Synthetic peptide
QDSKRPS

SEQ ID NO: 9115 - DNA, 21 bp, synthetic construct
  misc_feature 1..21: note = Description of Artificial Sequence: Synthetic oligonucleotide
  source 1..21: mol_type = other DNA
gctgcatccagtttgcaaagt

SEQ ID NO: 9116 - protein, 7 aa, synthetic construct
  REGION 1..7: note = Description of Artificial Sequence: Synthetic peptide
AASSLQS

SEQ ID NO: 9117 - DNA, 21 bp, synthetic construct
  misc_feature 1..21: note = Description of Artificial Sequence: Synthetic oligonucleotide
  source 1..21: mol_type = other DNA
gctgcaaccagtttgcaaagt

SEQ ID NO: 9118 - protein, 7 aa, synthetic construct
  REGION 1..7: note = Description of Artificial Sequence: Synthetic peptide
AATSLQS

SEQ ID NO: 9119 - DNA, 21 bp, synthetic construct
  misc_feature 1..21: note = Description of Artificial Sequence: Synthetic oligonucleotide
  source 1..21: mol_type = other DNA
gctgcatcccgtttgcaaagt

SEQ ID NO: 9120 - protein, 7 aa, synthetic construct
  REGION 1..7: note = Description of Artificial Sequence: Synthetic peptide
AASRLQS

SEQ ID NO: 9121 - DNA, 21 bp, synthetic construct
  misc_feature 1..21: note = Description of Artificial Sequence: Synthetic oligonucleotide
  source 1..21: mol_type = other DNA
caagatcgcaagcggccctca

SEQ ID NO: 9122 - protein, 7 aa, synthetic construct
  REGION 1..7: note = Description of Artificial Sequence: Synthetic peptide
QDRKRPS

SEQ ID NO: 9123 - DNA, 21 bp, synthetic construct
  misc_feature 1..21: note = Description of Artificial Sequence: Synthetic oligonucleotide
  source 1..21: mol_type = other DNA
ggtgcatccagtttgcaaagt

SEQ ID NO: 9124 - protein, 7 aa, synthetic construct
  REGION 1..7: note = Description of Artificial Sequence: Synthetic peptide
GASSLQS

SEQ ID NO: 9125 - DNA, 21 bp, synthetic construct
  misc_feature 1..21: note = Description of Artificial Sequence: Synthetic oligonucleotide
  source 1..21: mol_type = other DNA
caagataagaagcggccctca

SEQ ID NO: 9126 - protein, 7 aa, synthetic construct
  REGION 1..7: note = Description of Artificial Sequence: Synthetic peptide
QDKKRPS

SEQ ID NO: 9127 - DNA, 21 bp, synthetic construct
  misc_feature 1..21: note = Description of Artificial Sequence: Synthetic oligonucleotide
  source 1..21: mol_type = other DNA
gctacacccagtttgcagagt

SEQ ID NO: 9128 - protein, 7 aa, synthetic construct
  REGION 1..7: note = Description of Artificial Sequence: Synthetic peptide
ATPSLQS

SEQ ID NO: 9129 - DNA, 21 bp, synthetic construct
  misc_feature 1..21: note = Description of Artificial Sequence: Synthetic oligonucleotide
  source 1..21: mol_type = other DNA
gctgcatccagtttgcaaagt

SEQ ID NO: 9130 - protein, 7 aa, synthetic construct
  REGION 1..7: note = Description of Artificial Sequence: Synthetic peptide
AASSLQS

SEQ ID NO: 9131 - DNA, 21 bp, synthetic construct
  misc_feature 1..21: note = Description of Artificial Sequence: Synthetic oligonucleotide
  source 1..21: mol_type = other DNA
gctgcatccagtttgcaaagt

SEQ ID NO: 9132 - protein, 7 aa, synthetic construct
  REGION 1..7: note = Description of Artificial Sequence: Synthetic peptide
AASSLQS

SEQ ID NO: 9133 - DNA, 21 bp, synthetic construct
  misc_feature 1..21: note = Description of Artificial Sequence: Synthetic oligonucleotide
  source 1..21: mol_type = other DNA
gctacatccagtttgcaaagt

SEQ ID NO: 9134 - protein, 7 aa, synthetic construct
  REGION 1..7: note = Description of Artificial Sequence: Synthetic peptide
ATSSLQS

SEQ ID NO: 9135 - DNA, 21 bp, synthetic construct
  misc_feature 1..21: note = Description of Artificial Sequence: Synthetic oligonucleotide
  source 1..21: mol_type = other DNA
gctgcatccagtttgcaaagt

SEQ ID NO: 9136 - protein, 7 aa, synthetic construct
  REGION 1..7: note = Description of Artificial Sequence: Synthetic peptide
AASSLQS

SEQ ID NO: 9137 - DNA, 21 bp, synthetic construct
  misc_feature 1..21: note = Description of Artificial Sequence: Synthetic oligonucleotide
  source 1..21: mol_type = other DNA
gatgcatccagtgtgcaaagt

SEQ ID NO: 9138 - protein, 7 aa, synthetic construct
  REGION 1..7: note = Description of Artificial Sequence: Synthetic peptide
DASSVQS

SEQ ID NO: 9139 - DNA, 21 bp, synthetic construct
  misc_feature 1..21: note = Description of Artificial Sequence: Synthetic oligonucleotide
  source 1..21: mol_type = other DNA
caagataggaagcggccctca

SEQ ID NO: 9140 - protein, 7 aa, synthetic construct
  REGION 1..7: note = Description of Artificial Sequence: Synthetic peptide
QDRKRPS

SEQ ID NO: 9141 - DNA, 21 bp, synthetic construct
  misc_feature 1..21: note = Description of Artificial Sequence: Synthetic oligonucleotide
  source 1..21: mol_type = other DNA
tgggcatctacccgggaatcc

SEQ ID NO: 9142 - protein, 7 aa, synthetic construct
  REGION 1..7: note = Description of Artificial Sequence: Synthetic peptide
WASTRES

SEQ ID NO: 9143 - DNA, 21 bp, synthetic construct
  misc_feature 1..21: note = Description of Artificial Sequence: Synthetic oligonucleotide
  source 1..21: mol_type = other DNA
tgggcatctacccgggaatcc

SEQ ID NO: 9144 - protein, 7 aa, synthetic construct
  REGION 1..7: note = Description of Artificial Sequence: Synthetic peptide
WASTRES

SEQ ID NO: 9145 - DNA, 21 bp, synthetic construct
  misc_feature 1..21: note = Description of Artificial Sequence: Synthetic oligonucleotide
  source 1..21: mol_type = other DNA
caagataggaagcggccctca

SEQ ID NO: 9146 - protein, 7 aa, synthetic construct
  REGION 1..7: note = Description of Artificial Sequence: Synthetic peptide
QDRKRPS

SEQ ID NO: 9147 - DNA, 21 bp, synthetic construct
  misc_feature 1..21: note = Description of Artificial Sequence: Synthetic oligonucleotide
  source 1..21: mol_type = other DNA
aaggtttctaattgggactct

SEQ ID NO: 9148 - protein, 7 aa, synthetic construct
  REGION 1..7: note = Description of Artificial Sequence: Synthetic peptide
KVSNWDS

SEQ ID NO: 9149 - DNA, 21 bp, synthetic construct
  misc_feature 1..21: note = Description of Artificial Sequence: Synthetic oligonucleotide
  source 1..21: mol_type = other DNA
tgggcatctacccgggaatcc

SEQ ID NO: 9150 - protein, 7 aa, synthetic construct
  REGION 1..7: note = Description of Artificial Sequence: Synthetic peptide
WASTRES

SEQ ID NO: 9151 - DNA, 21 bp, synthetic construct
  misc_feature 1..21: note = Description of Artificial Sequence: Synthetic oligonucleotide
  source 1..21: mol_type = other DNA
tgggcatctacccgggaatcc

SEQ ID NO: 9152 - protein, 7 aa, synthetic construct
  REGION 1..7: note = Description of Artificial Sequence: Synthetic peptide
WASTRES

SEQ ID NO: 9153 - DNA, 21 bp, synthetic construct
  misc_feature 1..21: note = Description of Artificial Sequence: Synthetic oligonucleotide
  source 1..21: mol_type = other DNA
actgcatccagtttgcaaagt

SEQ ID NO: 9154 - protein, 7 aa, synthetic construct
  REGION 1..7: note = Description of Artificial Sequence: Synthetic peptide
TASSLQS

SEQ ID NO: 9155 - DNA, 21 bp, synthetic construct
  misc_feature 1..21: note = Description of Artificial Sequence: Synthetic oligonucleotide
  source 1..21: mol_type = other DNA
gctgcatatagtttacaaagt

SEQ ID NO: 9156 - protein, 7 aa, synthetic construct
  REGION 1..7: note = Description of Artificial Sequence: Synthetic peptide
AAYSLQS

SEQ ID NO: 9157 - DNA, 21 bp, synthetic construct
  misc_feature 1..21: note = Description of Artificial Sequence: Synthetic oligonucleotide
  source 1..21: mol_type = other DNA
gctgcatccaggttgcaaagt

SEQ ID NO: 9158 - protein, 7 aa, synthetic construct
  REGION 1..7: note = Description of Artificial Sequence: Synthetic peptide
AASRLQS

SEQ ID NO: 9159 - DNA, 21 bp, synthetic construct
  misc_feature 1..21: note = Description of Artificial Sequence: Synthetic oligonucleotide
  source 1..21: mol_type = other DNA
tgggcatctacccgggcatcc

SEQ ID NO: 9160 - protein, 7 aa, synthetic construct
  REGION 1..7: note = Description of Artificial Sequence: Synthetic peptide
WASTRAS

SEQ ID NO: 9161 - DNA, 21 bp, synthetic construct
  misc_feature 1..21: note = Description of Artificial Sequence: Synthetic oligonucleotide
  source 1..21: mol_type = other DNA
gctgcatccagtttgcaaagt

SEQ ID NO: 9162 - protein, 7 aa, synthetic construct
  REGION 1..7: note = Description of Artificial Sequence: Synthetic peptide
AASSLQS

SEQ ID NO: 9163 - DNA, 21 bp, synthetic construct
  misc_feature 1..21: note = Description of Artificial Sequence: Synthetic oligonucleotide
  source 1..21: mol_type = other DNA
gctgcatccagtttgcaaagt

SEQ ID NO: 9164 - protein, 7 aa, synthetic construct
  REGION 1..7: note = Description of Artificial Sequence: Synthetic peptide
AASSLQS

SEQ ID NO: 9165 - DNA, 21 bp, synthetic construct
  misc_feature 1..21: note = Description of Artificial Sequence: Synthetic oligonucleotide
  source 1..21: mol_type = other DNA
tctacatccagtttgcaaagt

SEQ ID NO: 9166 - protein, 7 aa, synthetic construct
  REGION 1..7: note = Description of Artificial Sequence: Synthetic peptide
STSSLQS

SEQ ID NO: 9167 - DNA, 21 bp, synthetic construct
  misc_feature 1..21: note = Description of Artificial Sequence: Synthetic oligonucleotide
  source 1..21: mol_type = other DNA
gttgcatcccgtttgcaaagt

SEQ ID NO: 9168 - protein, 7 aa, synthetic construct
  REGION 1..7: note = Description of Artificial Sequence: Synthetic peptide
VASRLQS

SEQ ID NO: 9169 - DNA, 21 bp, synthetic construct
  misc_feature 1..21: note = Description of Artificial Sequence: Synthetic oligonucleotide
  source 1..21: mol_type = other DNA
tgggcatctacccgggaatcc

SEQ ID NO: 9170 - protein, 7 aa, synthetic construct
  REGION 1..7: note = Description of Artificial Sequence: Synthetic peptide
WASTRES

SEQ ID NO: 9171 - DNA, 21 bp, synthetic construct
  misc_feature 1..21: note = Description of Artificial Sequence: Synthetic oligonucleotide
  source 1..21: mol_type = other DNA
gctgcatccagtttgcaaagt

SEQ ID NO: 9172 - protein, 7 aa, synthetic construct
  REGION 1..7: note = Description of Artificial Sequence: Synthetic peptide
AASSLQS

SEQ ID NO: 9173 - DNA, 21 bp, synthetic construct
  misc_feature 1..21: note = Description of Artificial Sequence: Synthetic oligonucleotide
  source 1..21: mol_type = other DNA
gctgcatccagtttgcaaagt

SEQ ID NO: 9174 - protein, 7 aa, synthetic construct
  REGION 1..7: note = Description of Artificial Sequence: Synthetic peptide
AASSLQS

SEQ ID NO: 9175 - DNA, 21 bp, synthetic construct
  misc_feature 1..21: note = Description of Artificial Sequence: Synthetic oligonucleotide
  source 1..21: mol_type = other DNA
gctgcatccagtttgcaaagt

SEQ ID NO: 9176 - protein, 7 aa, synthetic construct
  REGION 1..7: note = Description of Artificial Sequence: Synthetic peptide
AASSLQS

SEQ ID NO: 9177 - DNA, 21 bp, synthetic construct
  misc_feature 1..21: note = Description of Artificial Sequence: Synthetic oligonucleotide
  source 1..21: mol_type = other DNA
gctgcatccagtttgcaaagt

SEQ ID NO: 9178 - protein, 7 aa, synthetic construct
  REGION 1..7: note = Description of Artificial Sequence: Synthetic peptide
AASSLQS

SEQ ID NO: 9179 - DNA, 21 bp, synthetic construct
  misc_feature 1..21: note = Description of Artificial Sequence: Synthetic oligonucleotide
  source 1..21: mol_type = other DNA
gctgcatccagtttgcaaagt

SEQ ID NO: 9180 - protein, 7 aa, synthetic construct
  REGION 1..7: note = Description of Artificial Sequence: Synthetic peptide
AASSLQS

SEQ ID NO: 9181 - DNA, 21 bp, synthetic construct
  misc_feature 1..21: note = Description of Artificial Sequence: Synthetic oligonucleotide
  source 1..21: mol_type = other DNA
ggtgcatccaatttgcaaagt

SEQ ID NO: 9182 - protein, 7 aa, synthetic construct
  REGION 1..7: note = Description of Artificial Sequence: Synthetic peptide
GASNLQS

SEQ ID NO: 9183 - DNA, 21 bp, synthetic construct
  misc_feature 1..21: note = Description of Artificial Sequence: Synthetic oligonucleotide
  source 1..21: mol_type = other DNA
tgggcttctacccgggaatcc

SEQ ID NO: 9184 - protein, 7 aa, synthetic construct
  REGION 1..7: note = Description of Artificial Sequence: Synthetic peptide
WASTRES

SEQ ID NO: 9185 - DNA, 21 bp, synthetic construct
  misc_feature 1..21: note = Description of Artificial Sequence: Synthetic oligonucleotide
  source 1..21: mol_type = other DNA
gctgcatccagtttgcaaagt

SEQ ID NO: 9186 - protein, 7 aa, synthetic construct
  REGION 1..7: note = Description of Artificial Sequence: Synthetic peptide
AASSLQS

SEQ ID NO: 9187 - DNA, 21 bp, synthetic construct
  misc_feature 1..21: note = Description of Artificial Sequence: Synthetic oligonucleotide
  source 1..21: mol_type = other DNA
gctgcatccagtttgcaaagt

SEQ ID NO: 9188 - protein, 7 aa, synthetic construct
  REGION 1..7: note = Description of Artificial Sequence: Synthetic peptide
AASSLQS

SEQ ID NO: 9189 - DNA, 21 bp, synthetic construct
  misc_feature 1..21: note = Description of Artificial Sequence: Synthetic oligonucleotide
  source 1..21: mol_type = other DNA
gatgcatccagtttgcaaagt

SEQ ID NO: 9190 - protein, 7 aa, synthetic construct
  REGION 1..7: note = Description of Artificial Sequence: Synthetic peptide
DASSLQS

SEQ ID NO: 9191 - DNA, 21 bp, synthetic construct
  misc_feature 1..21: note = Description of Artificial Sequence: Synthetic oligonucleotide
  source 1..21: mol_type = other DNA
gaagtttccaaccggttctct

SEQ ID NO: 9192 - protein, 7 aa, synthetic construct
  REGION 1..7: note = Description of Artificial Sequence: Synthetic peptide
EVSNRFS

SEQ ID NO: 9193 - DNA, 21 bp, synthetic construct
  misc_feature 1..21: note = Description of Artificial Sequence: Synthetic oligonucleotide
  source 1..21: mol_type = other DNA
gctgcatccagtttgcaaagt

SEQ ID NO: 9194 - protein, 7 aa, synthetic construct
  REGION 1..7: note = Description of Artificial Sequence: Synthetic peptide
AASSLQS

SEQ ID NO: 9195 - DNA, 21 bp, synthetic construct
  misc_feature 1..21: note = Description of Artificial Sequence: Synthetic oligonucleotide
  source 1..21: mol_type = other DNA
gctgcatccagtttgcaaagt

SEQ ID NO: 9196 - protein, 7 aa, synthetic construct
  REGION 1..7: note = Description of Artificial Sequence: Synthetic peptide
AASSLQS

SEQ ID NO: 9197 - DNA, 21 bp, synthetic construct
  misc_feature 1..21: note = Description of Artificial Sequence: Synthetic oligonucleotide
  source 1..21: mol_type = other DNA
gctgcatccagtttgcaaagt

SEQ ID NO: 9198 - protein, 7 aa, synthetic construct
  REGION 1..7: note = Description of Artificial Sequence: Synthetic peptide
AASSLQS

SEQ ID NO: 9199 - DNA, 21 bp, synthetic construct
  misc_feature 1..21: note = Description of Artificial Sequence: Synthetic oligonucleotide
  source 1..21: mol_type = other DNA
gctgcatccagtttacaaagt

SEQ ID NO: 9200 - protein, 7 aa, synthetic construct
  REGION 1..7: note = Description of Artificial Sequence: Synthetic peptide
AASSLQS

SEQ ID NO: 9201 - DNA, 21 bp, synthetic construct
  misc_feature 1..21: note = Description of Artificial Sequence: Synthetic oligonucleotide
  source 1..21: mol_type = other DNA
gctgcatccactttggaaagt

SEQ ID NO: 9202 - protein, 7 aa, synthetic construct
  REGION 1..7: note = Description of Artificial Sequence: Synthetic peptide
AASTLES

SEQ ID NO: 9203 - DNA, 21 bp, synthetic construct
  misc_feature 1..21: note = Description of Artificial Sequence: Synthetic oligonucleotide
  source 1..21: mol_type = other DNA
ggtgcatccagcagggccact

SEQ ID NO: 9204 - protein, 7 aa, synthetic construct
  REGION 1..7: note = Description of Artificial Sequence: Synthetic peptide
GASSRAT

SEQ ID NO: 9205 - DNA, 21 bp, synthetic construct
  misc_feature 1..21: note = Description of Artificial Sequence: Synthetic oligonucleotide
  source 1..21: mol_type = other DNA
gctgcatccaatttgcaaagt

SEQ ID NO: 9206 - protein, 7 aa, synthetic construct
  REGION 1..7: note = Description of Artificial Sequence: Synthetic peptide
AASNLQS

SEQ ID NO: 9207 - DNA, 21 bp, synthetic construct
  misc_feature 1..21: note = Description of Artificial Sequence: Synthetic oligonucleotide
  source 1..21: mol_type = other DNA
gctgcatccagtttgcaaagt

SEQ ID NO: 9208 - protein, 7 aa, synthetic construct
  REGION 1..7: note = Description of Artificial Sequence: Synthetic peptide
AASSLQS

SEQ ID NO: 9209 - DNA, 21 bp, synthetic construct
  misc_feature 1..21: note = Description of Artificial Sequence: Synthetic oligonucleotide
  source 1..21: mol_type = other DNA
gaaatttcccaccggttctct

SEQ ID NO: 9210 - protein, 7 aa, synthetic construct
  REGION 1..7: note = Description of Artificial Sequence: Synthetic peptide
EISHRFS

SEQ ID NO: 9211 - DNA, 21 bp, synthetic construct
  misc_feature 1..21: note = Description of Artificial Sequence: Synthetic oligonucleotide
  source 1..21: mol_type = other DNA
gctacatccagtttgcaaagt

SEQ ID NO: 9212 - protein, 7 aa, synthetic construct
  REGION 1..7: note = Description of Artificial Sequence: Synthetic peptide
ATSSLQS

SEQ ID NO: 9213 - DNA, 21 bp, synthetic construct
  misc_feature 1..21: note = Description of Artificial Sequence: Synthetic oligonucleotide
  source 1..21: mol_type = other DNA
gctgcatccagtttgcaaagt

SEQ ID NO: 9214 - protein, 7 aa, synthetic construct
  REGION 1..7: note = Description of Artificial Sequence: Synthetic peptide
AASSLQS

SEQ ID NO: 9215 - DNA, 21 bp, synthetic construct
  misc_feature 1..21: note = Description of Artificial Sequence: Synthetic oligonucleotide
  source 1..21: mol_type = other DNA
ttgggttctaatcgggcctcc

SEQ ID NO: 9216 - protein, 7 aa, synthetic construct
  REGION 1..7: note = Description of Artificial Sequence: Synthetic peptide
LGSNRAS

SEQ ID NO: 9217 - DNA, 21 bp, synthetic construct
  misc_feature 1..21: note = Description of Artificial Sequence: Synthetic oligonucleotide
  source 1..21: mol_type = other DNA
gctgcattcagtttgcaaagt

SEQ ID NO: 9218 - protein, 7 aa, synthetic construct
  REGION 1..7: note = Description of Artificial Sequence: Synthetic peptide
AAFSLQS

SEQ ID NO: 9219 - DNA, 21 bp, synthetic construct
  misc_feature 1..21: note = Description of Artificial Sequence: Synthetic oligonucleotide
  source 1..21: mol_type = other DNA
gctgcatccagtttgcaaagt

SEQ ID NO: 9220 - protein, 7 aa, synthetic construct
  REGION 1..7: note = Description of Artificial Sequence: Synthetic peptide
AASSLQS

SEQ ID NO: 9221 - DNA, 21 bp, synthetic construct
  misc_feature 1..21: note = Description of Artificial Sequence: Synthetic oligonucleotide
  source 1..21: mol_type = other DNA
ggtgcatccaatttgcaaagt

SEQ ID NO: 9222 - protein, 7 aa, synthetic construct
  REGION 1..7: note = Description of Artificial Sequence: Synthetic peptide
GASNLQS

SEQ ID NO: 9223 - DNA, 21 bp, synthetic construct
  misc_feature 1..21: note = Description of Artificial Sequence: Synthetic oligonucleotide
  source 1..21: mol_type = other DNA
gctgcatccagtttgcaaagt

SEQ ID NO: 9224 - protein, 7 aa, synthetic construct
  REGION 1..7: note = Description of Artificial Sequence: Synthetic peptide
AASSLQS

SEQ ID NO: 9225 - DNA, 21 bp, synthetic construct
  misc_feature 1..21: note = Description of Artificial Sequence: Synthetic oligonucleotide
  source 1..21: mol_type = other DNA
gatgcatccagtttgcaaagt

SEQ ID NO: 9226 - protein, 7 aa, synthetic construct
  REGION 1..7: note = Description of Artificial Sequence: Synthetic peptide
DASSLQS

SEQ ID NO: 9227 - DNA, 21 bp, synthetic construct
  misc_feature 1..21: note = Description of Artificial Sequence: Synthetic oligonucleotide
  source 1..21: mol_type = other DNA
gctgcatccagtttgcaaagt

SEQ ID NO: 9228 - protein, 7 aa, synthetic construct
  REGION 1..7: note = Description of Artificial Sequence: Synthetic peptide
AASSLQS

SEQ ID NO: 9229 - DNA, 21 bp, synthetic construct
  misc_feature 1..21: note = Description of Artificial Sequence: Synthetic oligonucleotide
  source 1..21: mol_type = other DNA
ggtgcatccagtttgcaaagt

SEQ ID NO: 9230 - protein, 7 aa, synthetic construct
  REGION 1..7: note = Description of Artificial Sequence: Synthetic peptide
GASSLQS

SEQ ID NO: 9231 - DNA, 21 bp, synthetic construct
  misc_feature 1..21: note = Description of Artificial Sequence: Synthetic oligonucleotide
  source 1..21: mol_type = other DNA
gctgcatccagtttggaaagt

SEQ ID NO: 9232 - protein, 7 aa, synthetic construct
  REGION 1..7: note = Description of Artificial Sequence: Synthetic peptide
AASSLES

SEQ ID NO: 9233 - DNA, 21 bp, synthetic construct
  misc_feature 1..21: note = Description of Artificial Sequence: Synthetic oligonucleotide
  source 1..21: mol_type = other DNA
gctgcatccagtttgcaaagt

SEQ ID NO: 9234 - protein, 7 aa, synthetic construct
  REGION 1..7: note = Description of Artificial Sequence: Synthetic peptide
AASSLQS

SEQ ID NO: 9235 - DNA, 21 bp, synthetic construct
  misc_feature 1..21: note = Description of Artificial Sequence: Synthetic oligonucleotide
  source 1..21: mol_type = other DNA
gctgcatccagtttgcaaggt

SEQ ID NO: 9236 - protein, 7 aa, synthetic construct
  REGION 1..7: note = Description of Artificial Sequence: Synthetic peptide
AASSLQG

SEQ ID NO: 9237 - DNA, 21 bp, synthetic construct
  misc_feature 1..21: note = Description of Artificial Sequence: Synthetic oligonucleotide
  source 1..21: mol_type = other DNA
gaagtttccaatcggttctct

SEQ ID NO: 9238 - protein, 7 aa, synthetic construct
  REGION 1..7: note = Description of Artificial Sequence: Synthetic peptide
EVSNRFS

SEQ ID NO: 9239 - DNA, 21 bp, synthetic construct
  misc_feature 1..21: note = Description of Artificial Sequence: Synthetic oligonucleotide
  source 1..21: mol_type = other DNA
gctgcatccagtttgcaaagt

SEQ ID NO: 9240 - protein, 7 aa, synthetic construct
  REGION 1..7: note = Description of Artificial Sequence: Synthetic peptide
AASSLQS

SEQ ID NO: 9241 - DNA, 21 bp, synthetic construct
  misc_feature 1..21: note = Description of Artificial Sequence: Synthetic oligonucleotide
  source 1..21: mol_type = other DNA
gctgcatccagtttgcaaagt

SEQ ID NO: 9242 - protein, 7 aa, synthetic construct
  REGION 1..7: note = Description of Artificial Sequence: Synthetic peptide
AASSLQS

SEQ ID NO: 9243 - DNA, 21 bp, synthetic construct
  misc_feature 1..21: note = Description of Artificial Sequence: Synthetic oligonucleotide
  source 1..21: mol_type = other DNA
gctgcatccagtttggaaagt

SEQ ID NO: 9244 - protein, 7 aa, synthetic construct
  REGION 1..7: note = Description of Artificial Sequence: Synthetic peptide
AASSLES

SEQ ID NO: 9245 - DNA, 21 bp, synthetic construct
  misc_feature 1..21: note = Description of Artificial Sequence: Synthetic oligonucleotide
  source 1..21: mol_type = other DNA
gctgcatccagtttgcaaagt

SEQ ID NO: 9246 - protein, 7 aa, synthetic construct
  REGION 1..7: note = Description of Artificial Sequence: Synthetic peptide
AASSLQS

SEQ ID NO: 9247 - DNA, 21 bp, synthetic construct
  misc_feature 1..21: note = Description of Artificial Sequence: Synthetic oligonucleotide
  source 1..21: mol_type = other DNA
gctgcatccagtttgcaaagt

SEQ ID NO: 9248 - protein, 7 aa, synthetic construct
  REGION 1..7: note = Description of Artificial Sequence: Synthetic peptide
AASSLQS

SEQ ID NO: 9249 - DNA, 21 bp, synthetic construct
  misc_feature 1..21: note = Description of Artificial Sequence: Synthetic oligonucleotide
  source 1..21: mol_type = other DNA
gctgcatccagtttgcaaagt

SEQ ID NO: 9250 - protein, 7 aa, synthetic construct
  REGION 1..7: note = Description of Artificial Sequence: Synthetic peptide
AASSLQS

SEQ ID NO: 9251 - DNA, 21 bp, synthetic construct
  misc_feature 1..21: note = Description of Artificial Sequence: Synthetic oligonucleotide
  source 1..21: mol_type = other DNA
gaagtttcttaccggttctct

SEQ ID NO: 9252 - protein, 7 aa, synthetic construct
  REGION 1..7: note = Description of Artificial Sequence: Synthetic peptide
EVSYRFS

SEQ ID NO: 9253 - DNA, 21 bp, synthetic construct
  misc_feature 1..21: note = Description of Artificial Sequence: Synthetic oligonucleotide
  source 1..21: mol_type = other DNA
gctgcatccagtttgcaaagt

SEQ ID NO: 9254 - protein, 7 aa, synthetic construct
  REGION 1..7: note = Description of Artificial Sequence: Synthetic peptide
AASSLQS

SEQ ID NO: 9255 - DNA, 21 bp, synthetic construct
  misc_feature 1..21: note = Description of Artificial Sequence: Synthetic oligonucleotide
  source 1..21: mol_type = other DNA
gctgcattcagtttgcaaagt

SEQ ID NO: 9256 - protein, 7 aa, synthetic construct
  REGION 1..7: note = Description of Artificial Sequence: Synthetic peptide
AAFSLQS

SEQ ID NO: 9257 - DNA, 21 bp, synthetic construct
  misc_feature 1..21: note = Description of Artificial Sequence: Synthetic oligonucleotide
  source 1..21: mol_type = other DNA
gaagtttccaaccggttctct

SEQ ID NO: 9258 - protein, 7 aa, synthetic construct
  REGION 1..7: note = Description of Artificial Sequence: Synthetic peptide
EVSNRFS

SEQ ID NO: 9259 - DNA, 21 bp, synthetic construct
  misc_feature 1..21: note = Description of Artificial Sequence: Synthetic oligonucleotide
  source 1..21: mol_type = other DNA
gctgcatccagtttgcaaagt

SEQ ID NO: 9260 - protein, 7 aa, synthetic construct
  REGION 1..7: note = Description of Artificial Sequence: Synthetic peptide
AASSLQS

SEQ ID NO: 9261 - DNA, 21 bp, synthetic construct
  misc_feature 1..21: note = Description of Artificial Sequence: Synthetic oligonucleotide
  source 1..21: mol_type = other DNA
ttgggttttaatcgggcctcc

SEQ ID NO: 9262 - protein, 7 aa, synthetic construct
  REGION 1..7: note = Description of Artificial Sequence: Synthetic peptide
LGFNRAS

SEQ ID NO: 9263 - DNA, 21 bp, synthetic construct
  misc_feature 1..21: note = Description of Artificial Sequence: Synthetic oligonucleotide
  source 1..21: mol_type = other DNA
gaagtttccagccggttctct

SEQ ID NO: 9264 - protein, 7 aa, synthetic construct
  REGION 1..7: note = Description of Artificial Sequence: Synthetic peptide
EVSSRFS

SEQ ID NO: 9265 - DNA, 21 bp, synthetic construct
  misc_feature 1..21: note = Description of Artificial Sequence: Synthetic oligonucleotide
  source 1..21: mol_type = other DNA
gctgcctccaatttgcaaagt

SEQ ID NO: 9266 - protein, 7 aa, synthetic construct
  REGION 1..7: note = Description of Artificial Sequence: Synthetic peptide
AASNLQS

SEQ ID NO: 9267 - DNA, 21 bp, synthetic construct
  misc_feature 1..21: note = Description of Artificial Sequence: Synthetic oligonucleotide
  source 1..21: mol_type = other DNA
gctgcatccagtttgcaaagt

SEQ ID NO: 9268 - protein, 7 aa, synthetic construct
  REGION 1..7: note = Description of Artificial Sequence: Synthetic peptide
AASSLQS

SEQ ID NO: 9269 - DNA, 21 bp, synthetic construct
  misc_feature 1..21: note = Description of Artificial Sequence: Synthetic oligonucleotide
  source 1..21: mol_type = other DNA
agagcatccagtttgcaaagt

SEQ ID NO: 9270 - protein, 7 aa, synthetic construct
  REGION 1..7: note = Description of Artificial Sequence: Synthetic peptide
RASSLQS

SEQ ID NO: 9271 - DNA, 21 bp, synthetic construct
  misc_feature 1..21: note = Description of Artificial Sequence: Synthetic oligonucleotide
  source 1..21: mol_type = other DNA
gctgcatccagtttgcaaagt

SEQ ID NO: 9272 - protein, 7 aa, synthetic construct
  REGION 1..7: note = Description of Artificial Sequence: Synthetic peptide
AASSLQS

SEQ ID NO: 9273 - DNA, 21 bp, synthetic construct
  misc_feature 1..21: note = Description of Artificial Sequence: Synthetic oligonucleotide
  source 1..21: mol_type = other DNA
gctgcatccagtttgcaaagt

SEQ ID NO: 9274 - protein, 7 aa, synthetic construct
  REGION 1..7: note = Description of Artificial Sequence: Synthetic peptide
AASSLQS

SEQ ID NO: 9275 - DNA, 21 bp, synthetic construct
  misc_feature 1..21: note = Description of Artificial Sequence: Synthetic oligonucleotide
  source 1..21: mol_type = other DNA
gctgcatccagtttgcaaagt

SEQ ID NO: 9276 - protein, 7 aa, synthetic construct
  REGION 1..7: note = Description of Artificial Sequence: Synthetic peptide
AASSLQS

SEQ ID NO: 9277 - DNA, 21 bp, synthetic construct
  misc_feature 1..21: note = Description of Artificial Sequence: Synthetic oligonucleotide
  source 1..21: mol_type = other DNA
agtgcatccagtttgcaaaat

SEQ ID NO: 9278 - protein, 7 aa, synthetic construct
  REGION 1..7: note = Description of Artificial Sequence: Synthetic peptide
SASSLQN

SEQ ID NO: 9279 - DNA, 21 bp, synthetic construct
  misc_feature 1..21: note = Description of Artificial Sequence: Synthetic oligonucleotide
  source 1..21: mol_type = other DNA
attgcatccagtttgcaaagt

SEQ ID NO: 9280 - protein, 7 aa, synthetic construct
  REGION 1..7: note = Description of Artificial Sequence: Synthetic peptide
IASSLQS

SEQ ID NO: 9281 - DNA, 21 bp, synthetic construct
  misc_feature 1..21: note = Description of Artificial Sequence: Synthetic oligonucleotide
  source 1..21: mol_type = other DNA
gctgcttccagtttgcaaagt

SEQ ID NO: 9282 - protein, 7 aa, synthetic construct
  REGION 1..7: note = Description of Artificial Sequence: Synthetic peptide
AASSLQS

SEQ ID NO: 9283 - DNA, 21 bp, synthetic construct
  misc_feature 1..21: note = Description of Artificial Sequence: Synthetic oligonucleotide
  source 1..21: mol_type = other DNA
gctgcatccactttgcaaagt

SEQ ID NO: 9284 - protein, 7 aa, synthetic construct
  REGION 1..7: note = Description of Artificial Sequence: Synthetic peptide
AASTLQS

SEQ ID NO: 9285 - DNA, 21 bp, synthetic construct
  misc_feature 1..21: note = Description of Artificial Sequence: Synthetic oligonucleotide
  source 1..21: mol_type = other DNA
gctgcttccagtttgcaaagt

SEQ ID NO: 9286 - protein, 7 aa, synthetic construct
  REGION 1..7: note = Description of Artificial Sequence: Synthetic peptide
AASSLQS

SEQ ID NO: 9287 - DNA, 21 bp, synthetic construct
  misc_feature 1..21: note = Description of Artificial Sequence: Synthetic oligonucleotide
  source 1..21: mol_type = other DNA
gctgcttccagtttgcaaagt

SEQ ID NO: 9288 - protein, 7 aa, synthetic construct
  REGION 1..7: note = Description of Artificial Sequence: Synthetic peptide
AASSLQS

SEQ ID NO: 9289 - DNA, 21 bp, synthetic construct
  misc_feature 1..21: note = Description of Artificial Sequence: Synthetic oligonucleotide
  source 1..21: mol_type = other DNA
gctgcatccagtttgcaaagt

SEQ ID NO: 9290 - protein, 7 aa, synthetic construct
  REGION 1..7: note = Description of Artificial Sequence: Synthetic peptide
AASSLQS

SEQ ID NO: 9291 - DNA, 21 bp, synthetic construct
  misc_feature 1..21: note = Description of Artificial Sequence: Synthetic oligonucleotide
  source 1..21: mol_type = other DNA
gaagtttcccaccggttctct

SEQ ID NO: 9292 - protein, 7 aa, synthetic construct
  REGION 1..7: note = Description of Artificial Sequence: Synthetic peptide
EVSHRFS

SEQ ID NO: 9293 - DNA, 21 bp, synthetic construct
  misc_feature 1..21: note = Description of Artificial Sequence: Synthetic oligonucleotide
  source 1..21: mol_type = other DNA
actgtctccagtttgcaaagt

SEQ ID NO: 9294 - protein, 7 aa, synthetic construct
  REGION 1..7: note = Description of Artificial Sequence: Synthetic peptide
TVSSLQS

SEQ ID NO: 9295 - DNA, 21 bp, synthetic construct
  misc_feature 1..21: note = Description of Artificial Sequence: Synthetic oligonucleotide
  source 1..21: mol_type = other DNA
gaagtttccaaccggctctct

SEQ ID NO: 9296 - protein, 7 aa, synthetic construct
  REGION 1..7: note = Description of Artificial Sequence: Synthetic peptide
EVSNRLS

SEQ ID NO: 9297 - DNA, 21 bp, synthetic construct
  misc_feature 1..21: note = Description of Artificial Sequence: Synthetic oligonucleotide
  source 1..21: mol_type = other DNA
gctgcatccagtttgcaagat

SEQ ID NO: 9298 - protein, 7 aa, synthetic construct
  REGION 1..7: note = Description of Artificial Sequence: Synthetic peptide
AASSLQD

SEQ ID NO: 9299 - DNA, 21 bp, synthetic construct
  misc_feature 1..21: note = Description of Artificial Sequence: Synthetic oligonucleotide
  source 1..21: mol_type = other DNA
gctgcatccagtttgcaaagt

SEQ ID NO: 9300 - protein, 7 aa, synthetic construct
  REGION 1..7: note = Description of Artificial Sequence: Synthetic peptide
AASSLQS

SEQ ID NO: 9301 - DNA, 21 bp, synthetic construct
  misc_feature 1..21: note = Description of Artificial Sequence: Synthetic oligonucleotide
  source 1..21: mol_type = other DNA
gaagtttccaagcggctctct

SEQ ID NO: 9302 - protein, 7 aa, synthetic construct
  REGION 1..7: note = Description of Artificial Sequence: Synthetic peptide
EVSKRLS

SEQ ID NO: 9303 - DNA, 21 bp, synthetic construct
  misc_feature 1..21: note = Description of Artificial Sequence: Synthetic oligonucleotide
  source 1..21: mol_type = other DNA
gaagtttccaaccggttctct

SEQ ID NO: 9304 - protein, 7 aa, synthetic construct
  REGION 1..7: note = Description of Artificial Sequence: Synthetic peptide
EVSNRFS

SEQ ID NO: 9305 - DNA, 21 bp, synthetic construct
  misc_feature 1..21: note = Description of Artificial Sequence: Synthetic oligonucleotide
  source 1..21: mol_type = other DNA
gctgcatccactttgcaaagt

SEQ ID NO: 9306 - protein, 7 aa, synthetic construct
  REGION 1..7: note = Description of Artificial Sequence: Synthetic peptide
AASTLQS

SEQ ID NO: 9307 - DNA, 21 bp, synthetic construct
  misc_feature 1..21: note = Description of Artificial Sequence: Synthetic oligonucleotide
  source 1..21: mol_type = other DNA
gctgcatccagtttgcaaatt

SEQ ID NO: 9308 - protein, 7 aa, synthetic construct
  REGION 1..7: note = Description of Artificial Sequence: Synthetic peptide
AASSLQI

SEQ ID NO: 9309 - DNA, 21 bp, synthetic construct
  misc_feature 1..21: note = Description of Artificial Sequence: Synthetic oligonucleotide
  source 1..21: mol_type = other DNA
gctgcatccagtttgcaaagt

SEQ ID NO: 9310 - protein, 7 aa, synthetic construct
  REGION 1..7: note = Description of Artificial Sequence: Synthetic peptide
AASSLQS

SEQ ID NO: 9311 - DNA, 21 bp, synthetic construct
  misc_feature 1..21: note = Description of Artificial Sequence: Synthetic oligonucleotide
  source 1..21: mol_type = other DNA
gctgcatccagtctgcaaagt

SEQ ID NO: 9312 - protein, 7 aa, synthetic construct
  REGION 1..7: note = Description of Artificial Sequence: Synthetic peptide
AASSLQS

SEQ ID NO: 9313 - DNA, 21 bp, synthetic construct
  misc_feature 1..21: note = Description of Artificial Sequence: Synthetic oligonucleotide
  source 1..21: mol_type = other DNA
gctgcatccagtttgcaaagt

SEQ ID NO: 9314 - protein, 7 aa, synthetic construct
  REGION 1..7: note = Description of Artificial Sequence: Synthetic peptide
AASSLQS

SEQ ID NO: 9315 - DNA, 21 bp, synthetic construct
  misc_feature 1..21: note = Description of Artificial Sequence: Synthetic oligonucleotide
  source 1..21: mol_type = other DNA
gctgcatccagtttgcaaagt

SEQ ID NO: 9316 - protein, 7 aa, synthetic construct
  REGION 1..7: note = Description of Artificial Sequence: Synthetic peptide
AASSLQS

SEQ ID NO: 9317 - DNA, 21 bp, synthetic construct
  misc_feature 1..21: note = Description of Artificial Sequence: Synthetic oligonucleotide
  source 1..21: mol_type = other DNA
actgcatccaatttacaaagt

SEQ ID NO: 9318 - protein, 7 aa, synthetic construct
  REGION 1..7: note = Description of Artificial Sequence: Synthetic peptide
TASNLQS

SEQ ID NO: 9319 - DNA, 21 bp, synthetic construct
  misc_feature 1..21: note = Description of Artificial Sequence: Synthetic oligonucleotide
  source 1..21: mol_type = other DNA
gctgcatccagtttgcaaagt

SEQ ID NO: 9320 - protein, 7 aa, synthetic construct
  REGION 1..7: note = Description of Artificial Sequence: Synthetic peptide
AASSLQS

SEQ ID NO: 9321 - DNA, 21 bp, synthetic construct
  misc_feature 1..21: note = Description of Artificial Sequence: Synthetic oligonucleotide
  source 1..21: mol_type = other DNA
gaagtttccaaccggttctct

SEQ ID NO: 9322 - protein, 7 aa, synthetic construct
  REGION 1..7: note = Description of Artificial Sequence: Synthetic peptide
EVSNRFS

SEQ ID NO: 9323 - DNA, 21 bp, synthetic construct
  misc_feature 1..21: note = Description of Artificial Sequence: Synthetic oligonucleotide
  source 1..21: mol_type = other DNA
gatgcatccaatttggaaaca

SEQ ID NO: 9324 - protein, 7 aa, synthetic construct
  REGION 1..7: note = Description of Artificial Sequence: Synthetic peptide
DASNLET

SEQ ID NO: 9325 - DNA, 21 bp, synthetic construct
  misc_feature 1..21: note = Description of Artificial Sequence: Synthetic oligonucleotide
  source 1..21: mol_type = other DNA
gctgcatccagtttgcaaagt

SEQ ID NO: 9326 - protein, 7 aa, synthetic construct
  REGION 1..7: note = Description of Artificial Sequence: Synthetic peptide
AASSLQS

SEQ ID NO: 9327 - DNA, 21 bp, synthetic construct
  misc_feature 1..21: note = Description of Artificial Sequence: Synthetic oligonucleotide
  source 1..21: mol_type = other DNA
gctgcatccagtttgcgaagt

SEQ ID NO: 9328 - protein, 7 aa, synthetic construct
  REGION 1..7: note = Description of Artificial Sequence: Synthetic peptide
AASSLRS

SEQ ID NO: 9329 - DNA, 21 bp, synthetic construct
  misc_feature 1..21: note = Description of Artificial Sequence: Synthetic oligonucleotide
  source 1..21: mol_type = other DNA
gctgcatccagtttgcaaaat

SEQ ID NO: 9330 - protein, 7 aa, synthetic construct
  REGION 1..7: note = Description of Artificial Sequence: Synthetic peptide
AASSLQN

SEQ ID NO: 9331 - DNA, 21 bp, synthetic construct
  misc_feature 1..21: note = Description of Artificial Sequence: Synthetic oligonucleotide
  source 1..21: mol_type = other DNA
gctccatccaatttgcaaagt

SEQ ID NO: 9332 - protein, 7 aa, synthetic construct
  REGION 1..7: note = Description of Artificial Sequence: Synthetic peptide
APSNLQS

SEQ ID NO: 9333 - DNA, 21 bp, synthetic construct
  misc_feature 1..21: note = Description of Artificial Sequence: Synthetic oligonucleotide
  source 1..21: mol_type = other DNA
gctgcatccactttgcaaagt

SEQ ID NO: 9334 - protein, 7 aa, synthetic construct
  REGION 1..7: note = Description of Artificial Sequence: Synthetic peptide
AASTLQS

SEQ ID NO: 9335 - DNA, 21 bp, synthetic construct
  misc_feature 1..21: note = Description of Artificial Sequence: Synthetic oligonucleotide
  source 1..21: mol_type = other DNA
gctgcttccagtttgcaaagt

SEQ ID NO: 9336 - protein, 7 aa, synthetic construct
  REGION 1..7: note = Description of Artificial Sequence: Synthetic peptide
AASSLQS

SEQ ID NO: 9337 - DNA, 21 bp, synthetic construct
  misc_feature 1..21: note = Description of Artificial Sequence: Synthetic oligonucleotide
  source 1..21: mol_type = other DNA
gttgcatccagtttgcaaagt

SEQ ID NO: 9338 - protein, 7 aa, synthetic construct
  REGION 1..7: note = Description of Artificial Sequence: Synthetic peptide
VASSLQS

SEQ ID NO: 9339 - DNA, 21 bp, synthetic construct
  misc_feature 1..21: note = Description of Artificial Sequence: Synthetic oligonucleotide
  source 1..21: mol_type = other DNA
gctgcatccagtttgcaacgt

SEQ ID NO: 9340 - protein, 7 aa, synthetic construct
  REGION 1..7: note = Description of Artificial Sequence: Synthetic peptide
AASSLQR

SEQ ID NO: 9341 - DNA, 21 bp, synthetic construct
  misc_feature 1..21: note = Description of Artificial Sequence: Synthetic oligonucleotide
  source 1..21: mol_type = other DNA
gctgcatccagtttgcaaagt

SEQ ID NO: 9342 - protein, 7 aa, synthetic construct
  REGION 1..7: note = Description of Artificial Sequence: Synthetic peptide
AASSLQS

SEQ ID NO: 9343 - DNA, 21 bp, synthetic construct
  misc_feature 1..21: note = Description of Artificial Sequence: Synthetic oligonucleotide
  source 1..21: mol_type = other DNA
gctgcatccagtttgcaaagt

SEQ ID NO: 9344 - protein, 7 aa, synthetic construct
  REGION 1..7: note = Description of Artificial Sequence: Synthetic peptide
AASSLQS

SEQ ID NO: 9345 - DNA, 21 bp, synthetic construct
  misc_feature 1..21: note = Description of Artificial Sequence: Synthetic oligonucleotide
  source 1..21: mol_type = other DNA
gctgcatccagtttgcaaagt

SEQ ID NO: 9346 - protein, 7 aa, synthetic construct
  REGION 1..7: note = Description of Artificial Sequence: Synthetic peptide
AASSLQS

SEQ ID NO: 9347 - DNA, 21 bp, synthetic construct
  misc_feature 1..21: note = Description of Artificial Sequence: Synthetic oligonucleotide
  source 1..21: mol_type = other DNA
gctgcatccagtttgcaaaat

SEQ ID NO: 9348 - protein, 7 aa, synthetic construct
  REGION 1..7: note = Description of Artificial Sequence: Synthetic peptide
AASSLQN

SEQ ID NO: 9349 - DNA, 21 bp, synthetic construct
  misc_feature 1..21: note = Description of Artificial Sequence: Synthetic oligonucleotide
  source 1..21: mol_type = other DNA
gctgcatcctttttgcaaagt

SEQ ID NO: 9350 - protein, 7 aa, synthetic construct
  REGION 1..7: note = Description of Artificial Sequence: Synthetic peptide
AASFLQS

SEQ ID NO: 9351 - DNA, 21 bp, synthetic construct
  misc_feature 1..21: note = Description of Artificial Sequence: Synthetic oligonucleotide
  source 1..21: mol_type = other DNA
actacatccagtttgcaaagt

SEQ ID NO: 9352 - protein, 7 aa, synthetic construct
  REGION 1..7: note = Description of Artificial Sequence: Synthetic peptide
TTSSLQS

SEQ ID NO: 9353 - DNA, 21 bp, synthetic construct
  misc_feature 1..21: note = Description of Artificial Sequence: Synthetic oligonucleotide
  source 1..21: mol_type = other DNA
gctgcatccagtttacaaagt

SEQ ID NO: 9354 - protein, 7 aa, synthetic construct
  REGION 1..7: note = Description of Artificial Sequence: Synthetic peptide
AASSLQS

SEQ ID NO: 9355 - DNA, 21 bp, synthetic construct
  misc_feature 1..21: note = Description of Artificial Sequence: Synthetic oligonucleotide
  source 1..21: mol_type = other DNA
gatgcatccactttgggaaca

SEQ ID NO: 9356 - protein, 7 aa, synthetic construct
  REGION 1..7: note = Description of Artificial Sequence: Synthetic peptide
DASTLGT

SEQ ID NO: 9357 - DNA, 21 bp, synthetic construct
  misc_feature 1..21: note = Description of Artificial Sequence: Synthetic oligonucleotide
  source 1..21: mol_type = other DNA
gctgcatccagtttgcaaagt

SEQ ID NO: 9358 - protein, 7 aa, synthetic construct
  REGION 1..7: note = Description of Artificial Sequence: Synthetic peptide
AASSLQS

SEQ ID NO: 9359 - DNA, 21 bp, synthetic construct
  misc_feature 1..21: note = Description of Artificial Sequence: Synthetic oligonucleotide
  source 1..21: mol_type = other DNA
gaagtttccaaccgggtctct

SEQ ID NO: 9360 - protein, 7 aa, synthetic construct
  REGION 1..7: note = Description of Artificial Sequence: Synthetic peptide
EVSNRVS

SEQ ID NO: 9361 - DNA, 21 bp, synthetic construct
  misc_feature 1..21: note = Description of Artificial Sequence: Synthetic oligonucleotide
  source 1..21: mol_type = other DNA
gctgcatctagtttgcaaagt

SEQ ID NO: 9362 - protein, 7 aa, synthetic construct
  REGION 1..7: note = Description of Artificial Sequence: Synthetic peptide
AASSLQS

SEQ ID NO: 9363 - DNA, 21 bp, synthetic construct
  misc_feature 1..21: note = Description of Artificial Sequence: Synthetic oligonucleotide
  source 1..21: mol_type = other DNA
gttgcatccagtttgcaaagt

SEQ ID NO: 9364 - protein, 7 aa, synthetic construct
  REGION 1..7: note = Description of Artificial Sequence: Synthetic peptide
VASSLQS

SEQ ID NO: 9365 - DNA, 21 bp, synthetic construct
  misc_feature 1..21: note = Description of Artificial Sequence: Synthetic oligonucleotide
  source 1..21: mol_type = other DNA
ggtgcatccagtttgcaaagt

SEQ ID NO: 9366 - protein, 7 aa, synthetic construct
  REGION 1..7: note = Description of Artificial Sequence: Synthetic peptide
GASSLQS

SEQ ID NO: 9367 - DNA, 21 bp, synthetic construct
  misc_feature 1..21: note = Description of Artificial Sequence: Synthetic oligonucleotide
  source 1..21: mol_type = other DNA
cctgcatccagtttacaaagt

SEQ ID NO: 9368 - protein, 7 aa, synthetic construct
  REGION 1..7: note = Description of Artificial Sequence: Synthetic peptide
PASSLQS

SEQ ID NO: 9369 - DNA, 21 bp, synthetic construct
  misc_feature 1..21: note = Description of Artificial Sequence: Synthetic oligonucleotide
  source 1..21: mol_type = other DNA
gctgcatccagtttgcaaagt

SEQ ID NO: 9370 - protein, 7 aa, synthetic construct
  REGION 1..7: note = Description of Artificial Sequence: Synthetic peptide
AASSLQS

SEQ ID NO: 9371 - DNA, 21 bp, synthetic construct
  misc_feature 1..21: note = Description of Artificial Sequence: Synthetic oligonucleotide
  source 1..21: mol_type = other DNA
gctgtatccagtttgcaaagt

SEQ ID NO: 9372 - protein, 7 aa, synthetic construct
  REGION 1..7: note = Description of Artificial Sequence: Synthetic peptide
AVSSLQS

SEQ ID NO: 9373 - DNA, 21 bp, synthetic construct
  misc_feature 1..21: note = Description of Artificial Sequence: Synthetic oligonucleotide
  source 1..21: mol_type = other DNA
gatgcatccaatttggaaaca

SEQ ID NO: 9374 - protein, 7 aa, synthetic construct
  REGION 1..7: note = Description of Artificial Sequence: Synthetic peptide
DASNLET

SEQ ID NO: 9375 - DNA, 21 bp, synthetic construct
  misc_feature 1..21: note = Description of Artificial Sequence: Synthetic oligonucleotide
  source 1..21: mol_type = other DNA
gctgcatccagtttgcaaagt

SEQ ID NO: 9376 - protein, 7 aa, synthetic construct
  REGION 1..7: note = Description of Artificial Sequence: Synthetic peptide
AASSLQS

SEQ ID NO: 9377 - DNA, 21 bp, synthetic construct
  misc_feature 1..21: note = Description of Artificial Sequence: Synthetic oligonucleotide
  source 1..21: mol_type = other DNA
gctgcatccagtttgaaaagt

SEQ ID NO: 9378 - protein, 7 aa, synthetic construct
  REGION 1..7: note = Description of Artificial Sequence: Synthetic peptide
AASSLKS

SEQ ID NO: 9379 - DNA, 21 bp, synthetic construct
  misc_feature 1..21: note = Description of Artificial Sequence: Synthetic oligonucleotide
  source 1..21: mol_type = other DNA
gctgcatccaatttgcaaagt

SEQ ID NO: 9380 - protein, 7 aa, synthetic construct
  REGION 1..7: note = Description of Artificial Sequence: Synthetic peptide
AASNLQS

SEQ ID NO: 9381 - DNA, 21 bp, synthetic construct
  misc_feature 1..21: note = Description of Artificial Sequence: Synthetic oligonucleotide
  source 1..21: mol_type = other DNA
gatgcatccaatttgggaaca

SEQ ID NO: 9382 - protein, 7 aa, synthetic construct
  REGION 1..7: note = Description of Artificial Sequence: Synthetic peptide
DASNLGT

SEQ ID NO: 9383 - DNA, 21 bp, synthetic construct
  misc_feature 1..21: note = Description of Artificial Sequence: Synthetic oligonucleotide
  source 1..21: mol_type = other DNA
gctgcatccagtttgcaaagt

SEQ ID NO: 9384 - protein, 7 aa, synthetic construct
  REGION 1..7: note = Description of Artificial Sequence: Synthetic peptide
AASSLQS

SEQ ID NO: 9385 - DNA, 21 bp, synthetic construct
  misc_feature 1..21: note = Description of Artificial Sequence: Synthetic oligonucleotide
  source 1..21: mol_type = other DNA
ggtgcgtccggcagggccact

SEQ ID NO: 9386 - protein, 7 aa, synthetic construct
  REGION 1..7: note = Description of Artificial Sequence: Synthetic peptide
GASGRAT

SEQ ID NO: 9387 - DNA, 21 bp, synthetic construct
  misc_feature 1..21: note = Description of Artificial Sequence: Synthetic oligonucleotide
  source 1..21: mol_type = other DNA
gctgcatccagtttgcaaagt

SEQ ID NO: 9388 - protein, 7 aa, synthetic construct
  REGION 1..7: note = Description of Artificial Sequence: Synthetic peptide
AASSLQS

SEQ ID NO: 9389 - DNA, 21 bp, synthetic construct
  misc_feature 1..21: note = Description of Artificial Sequence: Synthetic oligonucleotide
  source 1..21: mol_type = other DNA
gctgcatccagtttgcaaagt

SEQ ID NO: 9390 - protein, 7 aa, synthetic construct
  REGION 1..7: note = Description of Artificial Sequence: Synthetic peptide
AASSLQS

SEQ ID NO: 9391 - DNA, 21 bp, synthetic construct
  misc_feature 1..21: note = Description of Artificial Sequence: Synthetic oligonucleotide
  source 1..21: mol_type = other DNA
gatgcatccagtttgcaaagt

SEQ ID NO: 9392 - protein, 7 aa, synthetic construct
  REGION 1..7: note = Description of Artificial Sequence: Synthetic peptide
DASSLQS

SEQ ID NO: 9393 - DNA, 21 bp, synthetic construct
  misc_feature 1..21: note = Description of Artificial Sequence: Synthetic oligonucleotide
  source 1..21: mol_type = other DNA
gctgcatccaatttgcaaagt

SEQ ID NO: 9394 - protein, 7 aa, synthetic construct
  REGION 1..7: note = Description of Artificial Sequence: Synthetic peptide
AASNLQS

SEQ ID NO: 9395 - DNA, 21 bp, synthetic construct
  misc_feature 1..21: note = Description of Artificial Sequence: Synthetic oligonucleotide
  source 1..21: mol_type = other DNA
gaagtttccaaccggttctct

SEQ ID NO: 9396 - protein, 7 aa, synthetic construct
  REGION 1..7: note = Description of Artificial Sequence: Synthetic peptide
EVSNRFS

SEQ ID NO: 9397 - DNA, 21 bp, synthetic construct
  misc_feature 1..21: note = Description of Artificial Sequence: Synthetic oligonucleotide
  source 1..21: mol_type = other DNA
gctgcatccaatttgcaaagt

SEQ ID NO: 9398 - protein, 7 aa, synthetic construct
  REGION 1..7: note = Description of Artificial Sequence: Synthetic peptide
AASNLQS

SEQ ID NO: 9399 - DNA, 21 bp, synthetic construct
  misc_feature 1..21: note = Description of Artificial Sequence: Synthetic oligonucleotide
  source 1..21: mol_type = other DNA
gctgcatccagtttgcaaagt

SEQ ID NO: 9400 - protein, 7 aa, synthetic construct
  REGION 1..7: note = Description of Artificial Sequence: Synthetic peptide
AASSLQS

SEQ ID NO: 9401 - DNA, 21 bp, synthetic construct
  misc_feature 1..21: note = Description of Artificial Sequence: Synthetic oligonucleotide
  source 1..21: mol_type = other DNA
gctgcatccagtttgcaaagt

SEQ ID NO: 9402 - protein, 7 aa, synthetic construct
  REGION 1..7: note = Description of Artificial Sequence: Synthetic peptide
AASSLQS

SEQ ID NO: 9403 - DNA, 21 bp, synthetic construct
  misc_feature 1..21: note = Description of Artificial Sequence: Synthetic oligonucleotide
  source 1..21: mol_type = other DNA
gatgcatccgccagggccact

SEQ ID NO: 9404 - protein, 7 aa, synthetic construct
  REGION 1..7: note = Description of Artificial Sequence: Synthetic peptide
DASARAT

SEQ ID NO: 9405 - DNA, 21 bp, synthetic construct
  misc_feature 1..21: note = Description of Artificial Sequence: Synthetic oligonucleotide
  source 1..21: mol_type = other DNA
gaagtttcccaccggttctct

SEQ ID NO: 9406 - protein, 7 aa, synthetic construct
  REGION 1..7: note = Description of Artificial Sequence: Synthetic peptide
EVSHRFS

SEQ ID NO: 9407 - DNA, 21 bp, synthetic construct
  misc_feature 1..21: note = Description of Artificial Sequence: Synthetic oligonucleotide
  source 1..21: mol_type = other DNA
gaagtttccaaccgggtctct

SEQ ID NO: 9408 - protein, 7 aa, synthetic construct
  REGION 1..7: note = Description of Artificial Sequence: Synthetic peptide
EVSNRVS

SEQ ID NO: 9409 - DNA, 21 bp, synthetic construct
  misc_feature 1..21: note = Description of Artificial Sequence: Synthetic oligonucleotide
  source 1..21: mol_type = other DNA
gctgcatccagtttgcaaagt

SEQ ID NO: 9410 - protein, 7 aa, synthetic construct
  REGION 1..7: note = Description of Artificial Sequence: Synthetic peptide
AASSLQS

SEQ ID NO: 9411 - DNA, 21 bp, synthetic construct
  misc_feature 1..21: note = Description of Artificial Sequence: Synthetic oligonucleotide
  source 1..21: mol_type = other DNA
actgcatccagtttgcaaagt

SEQ ID NO: 9412 - protein, 7 aa, synthetic construct
  REGION 1..7: note = Description of Artificial Sequence: Synthetic peptide
TASSLQS

SEQ ID NO: 9413 - DNA, 21 bp, synthetic construct
  misc_feature 1..21: note = Description of Artificial Sequence: Synthetic oligonucleotide
  source 1..21: mol_type = other DNA
gctgcattcaggttgcaaagt

SEQ ID NO: 9414 - protein, 7 aa, synthetic construct
  REGION 1..7: note = Description of Artificial Sequence: Synthetic peptide
AAFRLQS

SEQ ID NO: 9415 - DNA, 21 bp, synthetic construct
  misc_feature 1..21: note = Description of Artificial Sequence: Synthetic oligonucleotide
  source 1..21: mol_type = other DNA
gaagtttccaaccggttctct

SEQ ID NO: 9416 - protein, 7 aa, synthetic construct
  REGION 1..7: note = Description of Artificial Sequence: Synthetic peptide
EVSNRFS

SEQ ID NO: 9417 - DNA, 21 bp, synthetic construct
  misc_feature 1..21: note = Description of Artificial Sequence: Synthetic oligonucleotide
  source 1..21: mol_type = other DNA
gatgcatccaatttggaaaca

SEQ ID NO: 9418 - protein, 7 aa, synthetic construct
  REGION 1..7: note = Description of Artificial Sequence: Synthetic peptide
DASNLET

SEQ ID NO: 9419 - DNA, 21 bp, synthetic construct
  misc_feature 1..21: note = Description of Artificial Sequence: Synthetic oligonucleotide
  source 1..21: mol_type = other DNA
gttgcatccagtttccaaagt

SEQ ID NO: 9420 - protein, 7 aa, synthetic construct
  REGION 1..7: note = Description of Artificial Sequence: Synthetic peptide
VASSFQS

SEQ ID NO: 9421 - DNA, 21 bp, synthetic construct
  misc_feature 1..21: note = Description of Artificial Sequence: Synthetic oligonucleotide
  source 1..21: mol_type = other DNA
gctgcatccagtttgcaaaat

SEQ ID NO: 9422 - protein, 7 aa, synthetic construct
  REGION 1..7: note = Description of Artificial Sequence: Synthetic peptide
AASSLQN

SEQ ID NO: 9423 - DNA, 21 bp, synthetic construct
  misc_feature 1..21: note = Description of Artificial Sequence: Synthetic oligonucleotide
  source 1..21: mol_type = other DNA
gctgcatccagtttgcaaagt

SEQ ID NO: 9424 - protein, 7 aa, synthetic construct
  REGION 1..7: note = Description of Artificial Sequence: Synthetic peptide
AASSLQS

SEQ ID NO: 9425 - DNA, 21 bp, synthetic construct
  misc_feature 1..21: note = Description of Artificial Sequence: Synthetic oligonucleotide
  source 1..21: mol_type = other DNA
gatgcctccaatttggaaaca

SEQ ID NO: 9426 - protein, 7 aa, synthetic construct
  REGION 1..7: note = Description of Artificial Sequence: Synthetic peptide
DASNLET

SEQ ID NO: 9427 - DNA, 21 bp, synthetic construct
  misc_feature 1..21: note = Description of Artificial Sequence: Synthetic oligonucleotide
  source 1..21: mol_type = other DNA
gctgcatccagtttgcaaagt

SEQ ID NO: 9428 - protein, 7 aa, synthetic construct
  REGION 1..7: note = Description of Artificial Sequence: Synthetic peptide
AASSLQS

SEQ ID NO: 9429 - DNA, 21 bp, synthetic construct
  misc_feature 1..21: note = Description of Artificial Sequence: Synthetic oligonucleotide
  source 1..21: mol_type = other DNA
tgggcatctacccgggaatcc

SEQ ID NO: 9430 - protein, 7 aa, synthetic construct
  REGION 1..7: note = Description of Artificial Sequence: Synthetic peptide
WASTRES

SEQ ID NO: 9431 - DNA, 21 bp, synthetic construct
  misc_feature 1..21: note = Description of Artificial Sequence: Synthetic oligonucleotide
  source 1..21: mol_type = other DNA
gctgcatccagtttacaaagt

SEQ ID NO: 9432 - protein, 7 aa, synthetic construct
  REGION 1..7: note = Description of Artificial Sequence: Synthetic peptide
AASSLQS

SEQ ID NO: 9433 - DNA, 21 bp, synthetic construct
  misc_feature 1..21: note = Description of Artificial Sequence: Synthetic oligonucleotide
  source 1..21: mol_type = other DNA
gctgtatccagtttgcaaagt

SEQ ID NO: 9434 - protein, 7 aa, synthetic construct
  REGION 1..7: note = Description of Artificial Sequence: Synthetic peptide
AVSSLQS

SEQ ID NO: 9435 - DNA, 21 bp, synthetic construct
  misc_feature 1..21: note = Description of Artificial Sequence: Synthetic oligonucleotide
  source 1..21: mol_type = other DNA
gctgcatccagtttgcaaagt

SEQ ID NO: 9436 - protein, 7 aa, synthetic construct
  REGION 1..7: note = Description of Artificial Sequence: Synthetic peptide
AASSLQS

SEQ ID NO: 9437 - DNA, 21 bp, synthetic construct
  misc_feature 1..21: note = Description of Artificial Sequence: Synthetic oligonucleotide
  source 1..21: mol_type = other DNA
gctgcatccagtttgcaaagt

SEQ ID NO: 9438 - protein, 7 aa, synthetic construct
  REGION 1..7: note = Description of Artificial Sequence: Synthetic peptide
AASSLQS

SEQ ID NO: 9439 - DNA, 21 bp, synthetic construct
  misc_feature 1..21: note = Description of Artificial Sequence: Synthetic oligonucleotide
  source 1..21: mol_type = other DNA
gctgcatccagtttccaaagt

SEQ ID NO: 9440 - protein, 7 aa, synthetic construct
  REGION 1..7: note = Description of Artificial Sequence: Synthetic peptide
AASSFQS

SEQ ID NO: 9441 - DNA, 21 bp, synthetic construct
  misc_feature 1..21: note = Description of Artificial Sequence: Synthetic oligonucleotide
  source 1..21: mol_type = other DNA
gctgcatccagattgcaaagt

SEQ ID NO: 9442 - protein, 7 aa, synthetic construct
  REGION 1..7: note = Description of Artificial Sequence: Synthetic peptide
AASRLQS

SEQ ID NO: 9443 - DNA, 21 bp, synthetic construct
  misc_feature 1..21: note = Description of Artificial Sequence: Synthetic oligonucleotide
  source 1..21: mol_type = other DNA
gttgcatccggtttgcaaagt

SEQ ID NO: 9444 - protein, 7 aa, synthetic construct
  REGION 1..7: note = Description of Artificial Sequence: Synthetic peptide
VASGLQS

SEQ ID NO: 9445 - DNA, 21 bp, synthetic construct
  misc_feature 1..21: note = Description of Artificial Sequence: Synthetic oligonucleotide
  source 1..21: mol_type = other DNA
actgcatccaatttacaaagt

SEQ ID NO: 9446 - protein, 7 aa, synthetic construct
  REGION 1..7: note = Description of Artificial Sequence: Synthetic peptide
TASNLQS

SEQ ID NO: 9447 - DNA, 21 bp, synthetic construct
  misc_feature 1..21: note = Description of Artificial Sequence: Synthetic oligonucleotide
  source 1..21: mol_type = other DNA
gctgcatccagtttgcaaagt

SEQ ID NO: 9448 - protein, 7 aa, synthetic construct
  REGION 1..7: note = Description of Artificial Sequence: Synthetic peptide
AASSLQS

SEQ ID NO: 9449 - DNA, 21 bp, synthetic construct
  misc_feature 1..21: note = Description of Artificial Sequence: Synthetic oligonucleotide
  source 1..21: mol_type = other DNA
gaagtttcctatcggttttct

SEQ ID NO: 9450 - protein, 7 aa, synthetic construct
  REGION 1..7: note = Description of Artificial Sequence: Synthetic peptide
EVSYRFS

SEQ ID NO: 9451 - DNA, 21 bp, synthetic construct
  misc_feature 1..21: note = Description of Artificial Sequence: Synthetic oligonucleotide
  source 1..21: mol_type = other DNA
gctgcatccagtttgcaaagt

SEQ ID NO: 9452 - protein, 7 aa, synthetic construct
  REGION 1..7: note = Description of Artificial Sequence: Synthetic peptide
AASSLQS

SEQ ID NO: 9453 - DNA, 21 bp, synthetic construct
  misc_feature 1..21: note = Description of Artificial Sequence: Synthetic oligonucleotide
  source 1..21: mol_type = other DNA
gaagtttccaaccggatctct

SEQ ID NO: 9454 - protein, 7 aa, synthetic construct
  REGION 1..7: note = Description of Artificial Sequence: Synthetic peptide
EVSNRIS

SEQ ID NO: 9455 - DNA, 21 bp, synthetic construct
  misc_feature 1..21: note = Description of Artificial Sequence: Synthetic oligonucleotide
  source 1..21: mol_type = other DNA
gctgcatttagtttgcaaagt

SEQ ID NO: 9456 - protein, 7 aa, synthetic construct
  REGION 1..7: note = Description of Artificial Sequence: Synthetic peptide
AAFSLQS

SEQ ID NO: 9457 - DNA, 21 bp, synthetic construct
  misc_feature 1..21: note = Description of Artificial Sequence: Synthetic oligonucleotide
  source 1..21: mol_type = other DNA
tctgcatccagtttacaaagt

SEQ ID NO: 9458 - protein, 7 aa, synthetic construct
  REGION 1..7: note = Description of Artificial Sequence: Synthetic peptide
SASSLQS

SEQ ID NO: 9459 - DNA, 21 bp, synthetic construct
  misc_feature 1..21: note = Description of Artificial Sequence: Synthetic oligonucleotide
  source 1..21: mol_type = other DNA
tgggcatctacccgggaatcc

SEQ ID NO: 9460 - protein, 7 aa, synthetic construct
  REGION 1..7: note = Description of Artificial Sequence: Synthetic peptide
WASTRES

SEQ ID NO: 9461 - DNA, 21 bp, synthetic construct
  misc_feature 1..21: note = Description of Artificial Sequence: Synthetic oligonucleotide
  source 1..21: mol_type = other DNA
gctgcatccagtttgcaaagt

SEQ ID NO: 9462 - protein, 7 aa, synthetic construct
  REGION 1..7: note = Description of Artificial Sequence: Synthetic peptide
AASSLQS

SEQ ID NO: 9463 - DNA, 21 bp, synthetic construct
  misc_feature 1..21: note = Description of Artificial Sequence: Synthetic oligonucleotide
  source 1..21: mol_type = other DNA
gctgcgtccagtttgcaaagt

SEQ ID NO: 9464 - protein, 7 aa, synthetic construct
  REGION 1..7: note = Description of Artificial Sequence: Synthetic peptide
AASSLQS

SEQ ID NO: 9465 - DNA, 21 bp, synthetic construct
  misc_feature 1..21: note = Description of Artificial Sequence: Synthetic oligonucleotide
  source 1..21: mol_type = other DNA
gctgcatccagtttgcaaagt

SEQ ID NO: 9466 - protein, 7 aa, synthetic construct
  REGION 1..7: note = Description of Artificial Sequence: Synthetic peptide
AASSLQS

SEQ ID NO: 9467 - DNA, 21 bp, synthetic construct
  misc_feature 1..21: note = Description of Artificial Sequence: Synthetic oligonucleotide
  source 1..21: mol_type = other DNA
ggtgcatccaccagggccact

SEQ ID NO: 9468 - protein, 7 aa, synthetic construct
  REGION 1..7: note = Description of Artificial Sequence: Synthetic peptide
GASTRAT

SEQ ID NO: 9469 - DNA, 21 bp, synthetic construct
  misc_feature 1..21: note = Description of Artificial Sequence: Synthetic oligonucleotide
  source 1..21: mol_type = other DNA
actgcatccagtttgcaaagt

SEQ ID NO: 9470 - protein, 7 aa, synthetic construct
  REGION 1..7: note = Description of Artificial Sequence: Synthetic peptide
TASSLQS

SEQ ID NO: 9471 - DNA, 21 bp, synthetic construct
  misc_feature 1..21: note = Description of Artificial Sequence: Synthetic oligonucleotide
  source 1..21: mol_type = other DNA
gaagtttccaaccggttctct

SEQ ID NO: 9472 - protein, 7 aa, synthetic construct
  REGION 1..7: note = Description of Artificial Sequence: Synthetic peptide
EVSNRFS

SEQ ID NO: 9473 - DNA, 21 bp, synthetic construct
  misc_feature 1..21: note = Description of Artificial Sequence: Synthetic oligonucleotide
  source 1..21: mol_type = other DNA
gctgcatccagtttgcaaagt

SEQ ID NO: 9474 - protein, 7 aa, synthetic construct
  REGION 1..7: note = Description of Artificial Sequence: Synthetic peptide
AASSLQS

SEQ ID NO: 9475 - DNA, 21 bp, synthetic construct
  misc_feature 1..21: note = Description of Artificial Sequence: Synthetic oligonucleotide
  source 1..21: mol_type = other DNA
gctgcatccagtttgcaaagt

SEQ ID NO: 9476 - protein, 7 aa, synthetic construct
  REGION 1..7: note = Description of Artificial Sequence: Synthetic peptide
AASSLQS

SEQ ID NO: 9477 - DNA, 21 bp, synthetic construct
  misc_feature 1..21: note = Description of Artificial Sequence: Synthetic oligonucleotide
  source 1..21: mol_type = other DNA
gctgcatccagtttgcaaagt

SEQ ID NO: 9478 - protein, 7 aa, synthetic construct
  REGION 1..7: note = Description of Artificial Sequence: Synthetic peptide
AASSLQS

SEQ ID NO: 9479 - DNA, 21 bp, synthetic construct
  misc_feature 1..21: note = Description of Artificial Sequence: Synthetic oligonucleotide
  source 1..21: mol_type = other DNA
gctgcatccagtttgcaaagt

SEQ ID NO: 9480 - protein, 7 aa, synthetic construct
  REGION 1..7: note = Description of Artificial Sequence: Synthetic peptide
AASSLQS

SEQ ID NO: 9481 - DNA, 21 bp, synthetic construct
  misc_feature 1..21: note = Description of Artificial Sequence: Synthetic oligonucleotide
  source 1..21: mol_type = other DNA
gaagtttccaaccggatctct

SEQ ID NO: 9482 - protein, 7 aa, synthetic construct
  REGION 1..7: note = Description of Artificial Sequence: Synthetic peptide
EVSNRIS

SEQ ID NO: 9483 - DNA, 21 bp, synthetic construct
  misc_feature 1..21: note = Description of Artificial Sequence: Synthetic oligonucleotide
  source 1..21: mol_type = other DNA
tgggcatctatccgggaatcc

SEQ ID NO: 9484 - protein, 7 aa, synthetic construct
  REGION 1..7: note = Description of Artificial Sequence: Synthetic peptide
WASIRES

SEQ ID NO: 9485 - DNA, 21 bp, synthetic construct
  misc_feature 1..21: note = Description of Artificial Sequence: Synthetic oligonucleotide
  source 1..21: mol_type = other DNA
tgggcatctacccgggaatcc

SEQ ID NO: 9486 - protein, 7 aa, synthetic construct
  REGION 1..7: note = Description of Artificial Sequence: Synthetic peptide
WASTRES

SEQ ID NO: 9487 - DNA, 21 bp, synthetic construct
  misc_feature 1..21: note = Description of Artificial Sequence: Synthetic oligonucleotide
  source 1..21: mol_type = other DNA
gctgcatccagtttgcaaagt

SEQ ID NO: 9488 - protein, 7 aa, synthetic construct
  REGION 1..7: note = Description of Artificial Sequence: Synthetic peptide
AASSLQS

SEQ ID NO: 9489 - DNA, 21 bp, synthetic construct
  misc_feature 1..21: note = Description of Artificial Sequence: Synthetic oligonucleotide
  source 1..21: mol_type = other DNA
gctgcatccagtttgcaaagt

SEQ ID NO: 9490 - protein, 7 aa, synthetic construct
  REGION 1..7: note = Description of Artificial Sequence: Synthetic peptide
AASSLQS

SEQ ID NO: 9491 - DNA, 21 bp, synthetic construct
  misc_feature 1..21: note = Description of Artificial Sequence: Synthetic oligonucleotide
  source 1..21: mol_type = other DNA
ttggtttctaatcgggcctcc

SEQ ID NO: 9492 - protein, 7 aa, synthetic construct
  REGION 1..7: note = Description of Artificial Sequence: Synthetic peptide
LVSNRAS

SEQ ID NO: 9493 - DNA, 21 bp, synthetic construct
  misc_feature 1..21: note = Description of Artificial Sequence: Synthetic oligonucleotide
  source 1..21: mol_type = other DNA
gctgtatttagtttgcaaagt

SEQ ID NO: 9494 - protein, 7 aa, synthetic construct
  REGION 1..7: note = Description of Artificial Sequence: Synthetic peptide
AVFSLQS

SEQ ID NO: 9495 - DNA, 21 bp, synthetic construct
  misc_feature 1..21: note = Description of Artificial Sequence: Synthetic oligonucleotide
  source 1..21: mol_type = other DNA
gctacatccagtttgcaaagt

SEQ ID NO: 9496 - protein, 7 aa, synthetic construct
  REGION 1..7: note = Description of Artificial Sequence: Synthetic peptide
ATSSLQS

SEQ ID NO: 9497 - DNA, 21 bp, synthetic construct
  misc_feature 1..21: note = Description of Artificial Sequence: Synthetic oligonucleotide
  source 1..21: mol_type = other DNA
gctgcatcccgtttgcaaagt

SEQ ID NO: 9498 - protein, 7 aa, synthetic construct
  REGION 1..7: note = Description of Artificial Sequence: Synthetic peptide
AASRLQS

SEQ ID NO: 9499 - DNA, 21 bp, synthetic construct
  misc_feature 1..21: note = Description of Artificial Sequence: Synthetic oligonucleotide
  source 1..21: mol_type = other DNA
actgcatccagtttgcaaagt

SEQ ID NO: 9500 - protein, 7 aa, synthetic construct
  REGION 1..7: note = Description of Artificial Sequence: Synthetic peptide
TASSLQS

SEQ ID NO: 9501 - DNA, 21 bp, synthetic construct
  misc_feature 1..21: note = Description of Artificial Sequence: Synthetic oligonucleotide
  source 1..21: mol_type = other DNA
gctgcattcagtttgcaaagt

SEQ ID NO: 9502 - protein, 7 aa, synthetic construct
  REGION 1..7: note = Description of Artificial Sequence: Synthetic peptide
AAFSLQS

SEQ ID NO: 9503 - DNA, 21 bp, synthetic construct
  misc_feature 1..21: note = Description of Artificial Sequence: Synthetic oligonucleotide
  source 1..21: mol_type = other DNA
gttgcatccaccagggccact

SEQ ID NO: 9504 - protein, 7 aa, synthetic construct
  REGION 1..7: note = Description of Artificial Sequence: Synthetic peptide
VASTRAT

SEQ ID NO: 9505 - DNA, 21 bp, synthetic construct
  misc_feature 1..21: note = Description of Artificial Sequence: Synthetic oligonucleotide
  source 1..21: mol_type = other DNA
cctgcatcccgtttgcaaagt

SEQ ID NO: 9506 - protein, 7 aa, synthetic construct
  REGION 1..7: note = Description of Artificial Sequence: Synthetic peptide
PASRLQS

SEQ ID NO: 9507 - DNA, 21 bp, synthetic construct
  misc_feature 1..21: note = Description of Artificial Sequence: Synthetic oligonucleotide
  source 1..21: mol_type = other DNA
gctgcatccagtttgcaaagt

SEQ ID NO: 9508 - protein, 7 aa, synthetic construct
  REGION 1..7: note = Description of Artificial Sequence: Synthetic peptide
AASSLQS

SEQ ID NO: 9509 - DNA, 21 bp, synthetic construct
  misc_feature 1..21: note = Description of Artificial Sequence: Synthetic oligonucleotide
  source 1..21: mol_type = other DNA
gctgcatccagtttgcaaggt

SEQ ID NO: 9510 - protein, 7 aa, synthetic construct
  REGION 1..7: note = Description of Artificial Sequence: Synthetic peptide
AASSLQG

SEQ ID NO: 9511 - DNA, 21 bp, synthetic construct
  misc_feature 1..21: note = Description of Artificial Sequence: Synthetic oligonucleotide
  source 1..21: mol_type = other DNA
cctgcatccagtttgctaagt

SEQ ID NO: 9512 - protein, 7 aa, synthetic construct
  REGION 1..7: note = Description of Artificial Sequence: Synthetic peptide
PASSLLS

SEQ ID NO: 9513 - DNA, 21 bp, synthetic construct
  misc_feature 1..21: note = Description of Artificial Sequence: Synthetic oligonucleotide
  source 1..21: mol_type = other DNA
gctgcatccagtttgcaaagt

SEQ ID NO: 9514 - protein, 7 aa, synthetic construct
  REGION 1..7: note = Description of Artificial Sequence: Synthetic peptide
AASSLQS

SEQ ID NO: 9515 - DNA, 21 bp, synthetic construct
  misc_feature 1..21: note = Description of Artificial Sequence: Synthetic oligonucleotide
  source 1..21: mol_type = other DNA
gctgcatccagtttgcaaagt

SEQ ID NO: 9516 - protein, 7 aa, synthetic construct
  REGION 1..7: note = Description of Artificial Sequence: Synthetic peptide
AASSLQS

SEQ ID NO: 9517 - DNA, 21 bp, synthetic construct
  misc_feature 1..21: note = Description of Artificial Sequence: Synthetic oligonucleotide
  source 1..21: mol_type = other DNA
ggtgcatccaccagggccact

SEQ ID NO: 9518 - protein, 7 aa, synthetic construct
  REGION 1..7: note = Description of Artificial Sequence: Synthetic peptide
GASTRAT

SEQ ID NO: 9519 - DNA, 21 bp, synthetic construct
  misc_feature 1..21: note = Description of Artificial Sequence: Synthetic oligonucleotide
  source 1..21: mol_type = other DNA
gctgcatccagtttgctaagt

SEQ ID NO: 9520 - protein, 7 aa, synthetic construct
  REGION 1..7: note = Description of Artificial Sequence: Synthetic peptide
AASSLLS

SEQ ID NO: 9521 - DNA, 21 bp, synthetic construct
  misc_feature 1..21: note = Description of Artificial Sequence: Synthetic oligonucleotide
  source 1..21: mol_type = other DNA
gctgcatccagtttgcaaagt

SEQ ID NO: 9522 - protein, 7 aa, synthetic construct
  REGION 1..7: note = Description of Artificial Sequence: Synthetic peptide
AASSLQS

SEQ ID NO: 9523 - DNA, 21 bp, synthetic construct
  misc_feature 1..21: note = Description of Artificial Sequence: Synthetic oligonucleotide
  source 1..21: mol_type = other DNA
gctgcatccagtttgcaaagt

SEQ ID NO: 9524 - protein, 7 aa, synthetic construct
  REGION 1..7: note = Description of Artificial Sequence: Synthetic peptide
AASSLQS

SEQ ID NO: 9525 - DNA, 21 bp, synthetic construct
  misc_feature 1..21: note = Description of Artificial Sequence: Synthetic oligonucleotide
  source 1..21: mol_type = other DNA
gctgcatccaatttgcaaagt

SEQ ID NO: 9526 - protein, 7 aa, synthetic construct
  REGION 1..7: note = Description of Artificial Sequence: Synthetic peptide
AASNLQS

SEQ ID NO: 9527 - DNA, 21 bp, synthetic construct
  misc_feature 1..21: note = Description of Artificial Sequence: Synthetic oligonucleotide
  source 1..21: mol_type = other DNA
ggtgcatccaccagggccact

SEQ ID NO: 9528 - protein, 7 aa, synthetic construct
  REGION 1..7: note = Description of Artificial Sequence: Synthetic peptide
GASTRAT

SEQ ID NO: 9529 - DNA, 21 bp, synthetic construct
  misc_feature 1..21: note = Description of Artificial Sequence: Synthetic oligonucleotide
  source 1..21: mol_type = other DNA
gctgcatccagtttgcaaagt

SEQ ID NO: 9530 - protein, 7 aa, synthetic construct
  REGION 1..7: note = Description of Artificial Sequence: Synthetic peptide
AASSLQS

SEQ ID NO: 9531 - DNA, 21 bp, synthetic construct
  misc_feature 1..21: note = Description of Artificial Sequence: Synthetic oligonucleotide
  source 1..21: mol_type = other DNA
actgcatccagtttgcaaagt

SEQ ID NO: 9532 - protein, 7 aa, synthetic construct
  REGION 1..7: note = Description of Artificial Sequence: Synthetic peptide
TASSLQS

SEQ ID NO: 9533 - DNA, 21 bp, synthetic construct
  misc_feature 1..21: note = Description of Artificial Sequence: Synthetic oligonucleotide
  source 1..21: mol_type = other DNA
tgggcatctacccgggcatcc

SEQ ID NO: 9534 - protein, 7 aa, synthetic construct
  REGION 1..7: note = Description of Artificial Sequence: Synthetic peptide
WASTRAS

SEQ ID NO: 9535 - DNA, 21 bp, synthetic construct
  misc_feature 1..21: note = Description of Artificial Sequence: Synthetic oligonucleotide
  source 1..21: mol_type = other DNA
tgggcatctacccgggaatcc

SEQ ID NO: 9536 - protein, 7 aa, synthetic construct
  REGION 1..7: note = Description of Artificial Sequence: Synthetic peptide
WASTRES

SEQ ID NO: 9537 - DNA, 21 bp, synthetic construct
  misc_feature 1..21: note = Description of Artificial Sequence: Synthetic oligonucleotide
  source 1..21: mol_type = other DNA
gctgcatctaccagggccact

SEQ ID NO: 9538 - protein, 7 aa, synthetic construct
  REGION 1..7: note = Description of Artificial Sequence: Synthetic peptide
AASTRAT

SEQ ID NO: 9539 - DNA, 21 bp, synthetic construct
  misc_feature 1..21: note = Description of Artificial Sequence: Synthetic oligonucleotide
  source 1..21: mol_type = other DNA
gctgcatctaccagggccact

SEQ ID NO: 9540 - protein, 7 aa, synthetic construct
  REGION 1..7: note = Description of Artificial Sequence: Synthetic peptide
AASTRAT

SEQ ID NO: 9541 - DNA, 21 bp, synthetic construct
  misc_feature 1..21: note = Description of Artificial Sequence: Synthetic oligonucleotide
  source 1..21: mol_type = other DNA
gctgcatccagtttgctaagt

SEQ ID NO: 9542 - protein, 7 aa, synthetic construct
  REGION 1..7: note = Description of Artificial Sequence: Synthetic peptide
AASSLLS

SEQ ID NO: 9543 - DNA, 21 bp, synthetic construct
  misc_feature 1..21: note = Description of Artificial Sequence: Synthetic oligonucleotide
  source 1..21: mol_type = other DNA
tgggcatctacccgggattcc

SEQ ID NO: 9544 - protein, 7 aa, synthetic construct
  REGION 1..7: note = Description of Artificial Sequence: Synthetic peptide
WASTRDS

SEQ ID NO: 9545 - DNA, 21 bp, synthetic construct
  misc_feature 1..21: note = Description of Artificial Sequence: Synthetic oligonucleotide
  source 1..21: mol_type = other DNA
ggtgcatccaccagggccact

SEQ ID NO: 9546 - protein, 7 aa, synthetic construct
  REGION 1..7: note = Description of Artificial Sequence: Synthetic peptide
GASTRAT

SEQ ID NO: 9547 - DNA, 21 bp, synthetic construct
  misc_feature 1..21: note = Description of Artificial Sequence: Synthetic oligonucleotide
  source 1..21: mol_type = other DNA
gctgcatccagtttgcaaagt

SEQ ID NO: 9548 - protein, 7 aa, synthetic construct
  REGION 1..7: note = Description of Artificial Sequence: Synthetic peptide
AASSLQS

SEQ ID NO: 9549 - DNA, 21 bp, synthetic construct
  misc_feature 1..21: note = Description of Artificial Sequence: Synthetic oligonucleotide
  source 1..21: mol_type = other DNA
ggtgtatccaccagggccact

SEQ ID NO: 9550 - protein, 7 aa, synthetic construct
  REGION 1..7: note = Description of Artificial Sequence: Synthetic peptide
GVSTRAT

SEQ ID NO: 9551 - DNA, 21 bp, synthetic construct
  misc_feature 1..21: note = Description of Artificial Sequence: Synthetic oligonucleotide
  source 1..21: mol_type = other DNA
gaagtttcctatcggttttct

SEQ ID NO: 9552 - protein, 7 aa, synthetic construct
  REGION 1..7: note = Description of Artificial Sequence: Synthetic peptide
EVSYRFS

SEQ ID NO: 9553 - DNA, 21 bp, synthetic construct
  misc_feature 1..21: note = Description of Artificial Sequence: Synthetic oligonucleotide
  source 1..21: mol_type = other DNA
tggtcatctacccgggaatcc

SEQ ID NO: 9554 - protein, 7 aa, synthetic construct
  REGION 1..7: note = Description of Artificial Sequence: Synthetic peptide
WSSTRES

SEQ ID NO: 9555 - DNA, 21 bp, synthetic construct
  misc_feature 1..21: note = Description of Artificial Sequence: Synthetic oligonucleotide
  source 1..21: mol_type = other DNA
ggtgcatccagcagggccact

SEQ ID NO: 9556 - protein, 7 aa, synthetic construct
  REGION 1..7: note = Description of Artificial Sequence: Synthetic peptide
GASSRAT

SEQ ID NO: 9557 - DNA, 21 bp, synthetic construct
  misc_feature 1..21: note = Description of Artificial Sequence: Synthetic oligonucleotide
  source 1..21: mol_type = other DNA
ggtgcatccagtttgcagagt

SEQ ID NO: 9558 - protein, 7 aa, synthetic construct
  REGION 1..7: note = Description of Artificial Sequence: Synthetic peptide
GASSLQS

SEQ ID NO: 9559 - DNA, 21 bp, synthetic construct
  misc_feature 1..21: note = Description of Artificial Sequence: Synthetic oligonucleotide
  source 1..21: mol_type = other DNA
ggtgcatccagcagggccact

SEQ ID NO: 9560 - protein, 7 aa, synthetic construct
  REGION 1..7: note = Description of Artificial Sequence: Synthetic peptide
GASSRAT

SEQ ID NO: 9561 - DNA, 21 bp, synthetic construct
  misc_feature 1..21: note = Description of Artificial Sequence: Synthetic oligonucleotide
  source 1..21: mol_type = other DNA
gctgcatccagtttgcaaagt

SEQ ID NO: 9562 - protein, 7 aa, synthetic construct
  REGION 1..7: note = Description of Artificial Sequence: Synthetic peptide
AASSLQS

SEQ ID NO: 9563 - DNA, 21 bp, synthetic construct
  misc_feature 1..21: note = Description of Artificial Sequence: Synthetic oligonucleotide
  source 1..21: mol_type = other DNA
tctgcatccagtttacaaagt

SEQ ID NO: 9564 - protein, 7 aa, synthetic construct
  REGION 1..7: note = Description of Artificial Sequence: Synthetic peptide
SASSLQS

SEQ ID NO: 9565 - DNA, 21 bp, synthetic construct
  misc_feature 1..21: note = Description of Artificial Sequence: Synthetic oligonucleotide
  source 1..21: mol_type = other DNA
gctgcatccagtttgcaaagt

SEQ ID NO: 9566 - protein, 7 aa, synthetic construct
  REGION 1..7: note = Description of Artificial Sequence: Synthetic peptide
AASSLQS

SEQ ID NO: 9567 - DNA, 21 bp, synthetic construct
  misc_feature 1..21: note = Description of Artificial Sequence: Synthetic oligonucleotide
  source 1..21: mol_type = other DNA
gctgcatccagtttacaaagt

SEQ ID NO: 9568 - protein, 7 aa, synthetic construct
  REGION 1..7: note = Description of Artificial Sequence: Synthetic peptide
AASSLQS

SEQ ID NO: 9569 - DNA, 21 bp, synthetic construct
  misc_feature 1..21: note = Description of Artificial Sequence: Synthetic oligonucleotide
  source 1..21: mol_type = other DNA
tgggcatctacccgggaatcc

SEQ ID NO: 9570 - protein, 7 aa, synthetic construct
  REGION 1..7: note = Description of Artificial Sequence: Synthetic peptide
WASTRES

SEQ ID NO: 9571 - DNA, 21 bp, synthetic construct
  misc_feature 1..21: note = Description of Artificial Sequence: Synthetic oligonucleotide
  source 1..21: mol_type = other DNA
gcgtcatccagtttgcaaagt

SEQ ID NO: 9572 - protein, 7 aa, synthetic construct
  REGION 1..7: note = Description of Artificial Sequence: Synthetic peptide
ASSSLQS

SEQ ID NO: 9573 - DNA, 21 bp, synthetic construct
  misc_feature 1..21: note = Description of Artificial Sequence: Synthetic oligonucleotide
  source 1..21: mol_type = other DNA
gatacatccactttgcaaact

SEQ ID NO: 9574 - protein, 7 aa, synthetic construct
  REGION 1..7: note = Description of Artificial Sequence: Synthetic peptide
DTSTLQT

SEQ ID NO: 9575 - DNA, 21 bp, synthetic construct
  misc_feature 1..21: note = Description of Artificial Sequence: Synthetic oligonucleotide
  source 1..21: mol_type = other DNA
gctgcatccagtttgcaaagt

SEQ ID NO: 9576 - protein, 7 aa, synthetic construct
  REGION 1..7: note = Description of Artificial Sequence: Synthetic peptide
AASSLQS

SEQ ID NO: 9577 - DNA, 21 bp, synthetic construct
  misc_feature 1..21: note = Description of Artificial Sequence: Synthetic oligonucleotide
  source 1..21: mol_type = other DNA
gctgcatccagtttgcaaagt

SEQ ID NO: 9578 - protein, 7 aa, synthetic construct
  REGION 1..7: note = Description of Artificial Sequence: Synthetic peptide
AASSLQS

SEQ ID NO: 9579 - DNA, 21 bp, synthetic construct
  misc_feature 1..21: note = Description of Artificial Sequence: Synthetic oligonucleotide
  source 1..21: mol_type = other DNA
gctgcatccagtttacaaagt

SEQ ID NO: 9580 - protein, 7 aa, synthetic construct
  REGION 1..7: note = Description of Artificial Sequence: Synthetic peptide
AASSLQS

SEQ ID NO: 9581 - DNA, 21 bp, synthetic construct
  misc_feature 1..21: note = Description of Artificial Sequence: Synthetic oligonucleotide
  source 1..21: mol_type = other DNA
gctgcatccagtttgcaaagt

SEQ ID NO: 9582 - protein, 7 aa, synthetic construct
  REGION 1..7: note = Description of Artificial Sequence: Synthetic peptide
AASSLQS

SEQ ID NO: 9583 - DNA, 21 bp, synthetic construct
  misc_feature 1..21: note = Description of Artificial Sequence: Synthetic oligonucleotide
  source 1..21: mol_type = other DNA
gctgcatccagtttgcaaagt

SEQ ID NO: 9584 - protein, 7 aa, synthetic construct
  REGION 1..7: note = Description of Artificial Sequence: Synthetic peptide
AASSLQS

SEQ ID NO: 9585 - DNA, 21 bp, synthetic construct
  misc_feature 1..21: note = Description of Artificial Sequence: Synthetic oligonucleotide
  source 1..21: mol_type = other DNA
ggtgcatccagtttgcaaagt

SEQ ID NO: 9586 - protein, 7 aa, synthetic construct
  REGION 1..7: note = Description of Artificial Sequence: Synthetic peptide
GASSLQS

SEQ ID NO: 9587 - DNA, 21 bp, synthetic construct
  misc_feature 1..21: note = Description of Artificial Sequence: Synthetic oligonucleotide
  source 1..21: mol_type = other DNA
gctgcatccagtttgcaaagt

SEQ ID NO: 9588 - protein, 7 aa, synthetic construct
  REGION 1..7: note = Description of Artificial Sequence: Synthetic peptide
AASSLQS

SEQ ID NO: 9589 - DNA, 21 bp, synthetic construct
  misc_feature 1..21: note = Description of Artificial Sequence: Synthetic oligonucleotide
  source 1..21: mol_type = other DNA
gaagtttccaaccggttgtgt

SEQ ID NO: 9590 - protein, 7 aa, synthetic construct
  REGION 1..7: note = Description of Artificial Sequence: Synthetic peptide
EVSNRLC

SEQ ID NO: 9591 - DNA, 21 bp, synthetic construct
  misc_feature 1..21: note = Description of Artificial Sequence: Synthetic oligonucleotide
  source 1..21: mol_type = other DNA
gctgcatccagtttgcaaagt

SEQ ID NO: 9592 - protein, 7 aa, synthetic construct
  REGION 1..7: note = Description of Artificial Sequence: Synthetic peptide
AASSLQS

SEQ ID NO: 9593 - DNA, 21 bp, synthetic construct
  misc_feature 1..21: note = Description of Artificial Sequence: Synthetic oligonucleotide
  source 1..21: mol_type = other DNA
actgcatccactttgcaaagt

SEQ ID NO: 9594 - protein, 7 aa, synthetic construct
  REGION 1..7: note = Description of Artificial Sequence: Synthetic peptide
TASTLQS

SEQ ID NO: 9595 - DNA, 21 bp, synthetic construct
  misc_feature 1..21: note = Description of Artificial Sequence: Synthetic oligonucleotide
  source 1..21: mol_type = other DNA
gatgcatccattttggaaaca

SEQ ID NO: 9596 - protein, 7 aa, synthetic construct
  REGION 1..7: note = Description of Artificial Sequence: Synthetic peptide
DASILET

SEQ ID NO: 9597 - DNA, 21 bp, synthetic construct
  misc_feature 1..21: note = Description of Artificial Sequence: Synthetic oligonucleotide
  source 1..21: mol_type = other DNA
gctgcatccagtttgcaaagt

SEQ ID NO: 9598 - protein, 7 aa, synthetic construct
  REGION 1..7: note = Description of Artificial Sequence: Synthetic peptide
AASSLQS

SEQ ID NO: 9599 - DNA, 21 bp, synthetic construct
  misc_feature 1..21: note = Description of Artificial Sequence: Synthetic oligonucleotide
  source 1..21: mol_type = other DNA
agtgcatccaatttgcaatgt

SEQ ID NO: 9600 - protein, 7 aa, synthetic construct
  REGION 1..7: note = Description of Artificial Sequence: Synthetic peptide
SASNLQC

SEQ ID NO: 9601 - DNA, 21 bp, synthetic construct
  misc_feature 1..21: note = Description of Artificial Sequence: Synthetic oligonucleotide
  source 1..21: mol_type = other DNA
gctgcatccagtttgcaaagt

SEQ ID NO: 9602 - protein, 7 aa, synthetic construct
  REGION 1..7: note = Description of Artificial Sequence: Synthetic peptide
AASSLQS

SEQ ID NO: 9603 - DNA, 21 bp, synthetic construct
  misc_feature 1..21: note = Description of Artificial Sequence: Synthetic oligonucleotide
  source 1..21: mol_type = other DNA
gctgcatccagtttgcacagt

SEQ ID NO: 9604 - protein, 7 aa, synthetic construct
  REGION 1..7: note = Description of Artificial Sequence: Synthetic peptide
AASSLHS

SEQ ID NO: 9605 - DNA, 21 bp, synthetic construct
  misc_feature 1..21: note = Description of Artificial Sequence: Synthetic oligonucleotide
  source 1..21: mol_type = other DNA
ggtgcatccaccagggccact

SEQ ID NO: 9606 - protein, 7 aa, synthetic construct
  REGION 1..7: note = Description of Artificial Sequence: Synthetic peptide
GASTRAT

SEQ ID NO: 9607 - DNA, 21 bp, synthetic construct
  misc_feature 1..21: note = Description of Artificial Sequence: Synthetic oligonucleotide
  source 1..21: mol_type = other DNA
gctgcatccagtttgcaaagt

SEQ ID NO: 9608 - protein, 7 aa, synthetic construct
  REGION 1..7: note = Description of Artificial Sequence: Synthetic peptide
AASSLQS

SEQ ID NO: 9609 - DNA, 21 bp, synthetic construct
  misc_feature 1..21: note = Description of Artificial Sequence: Synthetic oligonucleotide
  source 1..21: mol_type = other DNA
gctgcatccagtttgcaaagt

SEQ ID NO: 9610 - protein, 7 aa, synthetic construct
  REGION 1..7: note = Description of Artificial Sequence: Synthetic peptide
AASSLQS

SEQ ID NO: 9611 - DNA, 21 bp, synthetic construct
  misc_feature 1..21: note = Description of Artificial Sequence: Synthetic oligonucleotide
  source 1..21: mol_type = other DNA
gctgcatccagtttgcaaagt

SEQ ID NO: 9612 - protein, 7 aa, synthetic construct
  REGION 1..7: note = Description of Artificial Sequence: Synthetic peptide
AASSLQS

SEQ ID NO: 9613 - DNA, 21 bp, synthetic construct
  misc_feature 1..21: note = Description of Artificial Sequence: Synthetic oligonucleotide
  source 1..21: mol_type = other DNA
tgtgcatccaatttacaatgt

SEQ ID NO: 9614 - protein, 7 aa, synthetic construct
  REGION 1..7: note = Description of Artificial Sequence: Synthetic peptide
CASNLQC

SEQ ID NO: 9615 - DNA, 21 bp, synthetic construct
  misc_feature 1..21: note = Description of Artificial Sequence: Synthetic oligonucleotide
  source 1..21: mol_type = other DNA
gctgcatccagtttacaaagt

SEQ ID NO: 9616 - protein, 7 aa, synthetic construct
  REGION 1..7: note = Description of Artificial Sequence: Synthetic peptide
AASSLQS

SEQ ID NO: 9617 - DNA, 21 bp, synthetic construct
  misc_feature 1..21: note = Description of Artificial Sequence: Synthetic oligonucleotide
  source 1..21: mol_type = other DNA
actgcatccagtttacaaagt

SEQ ID NO: 9618 - protein, 7 aa, synthetic construct
  REGION 1..7: note = Description of Artificial Sequence: Synthetic peptide
TASSLQS

SEQ ID NO: 9619 - DNA, 21 bp, synthetic construct
  misc_feature 1..21: note = Description of Artificial Sequence: Synthetic oligonucleotide
  source 1..21: mol_type = other DNA
cctgcatccagtttgcaaagt

SEQ ID NO: 9620 - protein, 7 aa, synthetic construct
  REGION 1..7: note = Description of Artificial Sequence: Synthetic peptide
PASSLQS

SEQ ID NO: 9621 - DNA, 21 bp, synthetic construct
  misc_feature 1..21: note = Description of Artificial Sequence: Synthetic oligonucleotide
  source 1..21: mol_type = other DNA
gctgcatccagttgtcaaagt

SEQ ID NO: 9622 - protein, 7 aa, synthetic construct
  REGION 1..7: note = Description of Artificial Sequence: Synthetic peptide
AASSCQS

SEQ ID NO: 9623 - DNA, 21 bp, synthetic construct
  misc_feature 1..21: note = Description of Artificial Sequence: Synthetic oligonucleotide
  source 1..21: mol_type = other DNA
gctgcatccagtttgcaaagt

SEQ ID NO: 9624 - protein, 7 aa, synthetic construct
  REGION 1..7: note = Description of Artificial Sequence: Synthetic peptide
AASSLQS

SEQ ID NO: 9625 - DNA, 21 bp, synthetic construct
  misc_feature 1..21: note = Description of Artificial Sequence: Synthetic oligonucleotide
  source 1..21: mol_type = other DNA
attgcatccaccagggccact

SEQ ID NO: 9626 - protein, 7 aa, synthetic construct
  REGION 1..7: note = Description of Artificial Sequence: Synthetic peptide
IASTRAT

SEQ ID NO: 9627 - DNA, 21 bp, synthetic construct
  misc_feature 1..21: note = Description of Artificial Sequence: Synthetic oligonucleotide
  source 1..21: mol_type = other DNA
gctgcatccagtttgcaaagt

SEQ ID NO: 9628 - protein, 7 aa, synthetic construct
  REGION 1..7: note = Description of Artificial Sequence: Synthetic peptide
AASSLQS

SEQ ID NO: 9629 - DNA, 21 bp, synthetic construct
  misc_feature 1..21: note = Description of Artificial Sequence: Synthetic oligonucleotide
  source 1..21: mol_type = other DNA
gctgcatccagtttgcaaagt

SEQ ID NO: 9630 - protein, 7 aa, synthetic construct
  REGION 1..7: note = Description of Artificial Sequence: Synthetic peptide
AASSLQS

SEQ ID NO: 9631 - DNA, 21 bp, synthetic construct
  misc_feature 1..21: note = Description of Artificial Sequence: Synthetic oligonucleotide
  source 1..21: mol_type = other DNA
gttgcatccagtttgcaaagt

SEQ ID NO: 9632 - protein, 7 aa, synthetic construct
  REGION 1..7: note = Description of Artificial Sequence: Synthetic peptide
VASSLQS

SEQ ID NO: 9633 - DNA, 21 bp, synthetic construct
  misc_feature 1..21: note = Description of Artificial Sequence: Synthetic oligonucleotide
  source 1..21: mol_type = other DNA
gctgcatccagtgtgcaaagt

SEQ ID NO: 9634 - protein, 7 aa, synthetic construct
  REGION 1..7: note = Description of Artificial Sequence: Synthetic peptide
AASSVQS

SEQ ID NO: 9635 - DNA, 21 bp, synthetic construct
  misc_feature 1..21: note = Description of Artificial Sequence: Synthetic oligonucleotide
  source 1..21: mol_type = other DNA
gctgcatccagtttgcaaagt

SEQ ID NO: 9636 - protein, 7 aa, synthetic construct
  REGION 1..7: note = Description of Artificial Sequence: Synthetic peptide
AASSLQS

SEQ ID NO: 9637 - DNA, 21 bp, synthetic construct
  misc_feature 1..21: note = Description of Artificial Sequence: Synthetic oligonucleotide
  source 1..21: mol_type = other DNA
gctgcatccagtttgcaaagt

SEQ ID NO: 9638 - protein, 7 aa, synthetic construct
  REGION 1..7: note = Description of Artificial Sequence: Synthetic peptide
AASSLQS

SEQ ID NO: 9639 - DNA, 21 bp, synthetic construct
  misc_feature 1..21: note = Description of Artificial Sequence: Synthetic oligonucleotide
  source 1..21: mol_type = other DNA
gttgcgtccagtttgcaaagt

SEQ ID NO: 9640 - protein, 7 aa, synthetic construct
  REGION 1..7: note = Description of Artificial Sequence: Synthetic peptide
VASSLQS

SEQ ID NO: 9641 - DNA, 21 bp, synthetic construct
  misc_feature 1..21: note = Description of Artificial Sequence: Synthetic oligonucleotide
  source 1..21: mol_type = other DNA
gctgcatccagtttgcaaagt

SEQ ID NO: 9642 - protein, 7 aa, synthetic construct
  REGION 1..7: note = Description of Artificial Sequence: Synthetic peptide
AASSLQS

SEQ ID NO: 9643 - DNA, 21 bp, synthetic construct
  misc_feature 1..21: note = Description of Artificial Sequence: Synthetic oligonucleotide
  source 1..21: mol_type = other DNA
attgcatccaccagggccact

SEQ ID NO: 9644 - protein, 7 aa, synthetic construct
  REGION 1..7: note = Description of Artificial Sequence: Synthetic peptide
IASTRAT

SEQ ID NO: 9645 - DNA, 21 bp, synthetic construct
  misc_feature 1..21: note = Description of Artificial Sequence: Synthetic oligonucleotide
  source 1..21: mol_type = other DNA
gctgcatccagtttgcaaagt

SEQ ID NO: 9646 - protein, 7 aa, synthetic construct
  REGION 1..7: note = Description of Artificial Sequence: Synthetic peptide
AASSLQS

SEQ ID NO: 9647 - DNA, 21 bp, synthetic construct
  misc_feature 1..21: note = Description of Artificial Sequence: Synthetic oligonucleotide
  source 1..21: mol_type = other DNA
actgcatccagtttgcaaagt

SEQ ID NO: 9648 - protein, 7 aa, synthetic construct
  REGION 1..7: note = Description of Artificial Sequence: Synthetic peptide
TASSLQS

SEQ ID NO: 9649 - DNA, 21 bp, synthetic construct
  misc_feature 1..21: note = Description of Artificial Sequence: Synthetic oligonucleotide
  source 1..21: mol_type = other DNA
tgggcatctacccgggaatcc

SEQ ID NO: 9650 - protein, 7 aa, synthetic construct
  REGION 1..7: note = Description of Artificial Sequence: Synthetic peptide
WASTRES

SEQ ID NO: 9651 - DNA, 21 bp, synthetic construct
  misc_feature 1..21: note = Description of Artificial Sequence: Synthetic oligonucleotide
  source 1..21: mol_type = other DNA
gctgcatccagtttgcaaagt

SEQ ID NO: 9652 - protein, 7 aa, synthetic construct
  REGION 1..7: note = Description of Artificial Sequence: Synthetic peptide
AASSLQS

SEQ ID NO: 9653 - DNA, 21 bp, synthetic construct
  misc_feature 1..21: note = Description of Artificial Sequence: Synthetic oligonucleotide
  source 1..21: mol_type = other DNA
gctgcatccagtttgcaaagt

SEQ ID NO: 9654 - protein, 7 aa, synthetic construct
  REGION 1..7: note = Description of Artificial Sequence: Synthetic peptide
AASSLQS

SEQ ID NO: 9655 - DNA, 21 bp, synthetic construct
  misc_feature 1..21: note = Description of Artificial Sequence: Synthetic oligonucleotide
  source 1..21: mol_type = other DNA
gctgcatccagtttgcaaagt

SEQ ID NO: 9656 - protein, 7 aa, synthetic construct
  REGION 1..7: note = Description of Artificial Sequence: Synthetic peptide
AASSLQS

SEQ ID NO: 9657 - DNA, 21 bp, synthetic construct
  misc_feature 1..21: note = Description of Artificial Sequence: Synthetic oligonucleotide
  source 1..21: mol_type = other DNA
gctgcatccagtttgcaaagt

SEQ ID NO: 9658 - protein, 7 aa, synthetic construct
  REGION 1..7: note = Description of Artificial Sequence: Synthetic peptide
AASSLQS

SEQ ID NO: 9659 - DNA, 21 bp, synthetic construct
  misc_feature 1..21: note = Description of Artificial Sequence: Synthetic oligonucleotide
  source 1..21: mol_type = other DNA
attgcattcagattgcaaatt

SEQ ID NO: 9660 - protein, 7 aa, synthetic construct
  REGION 1..7: note = Description of Artificial Sequence: Synthetic peptide
IAFRLQI

SEQ ID NO: 9661 - DNA, 21 bp, synthetic construct
  misc_feature 1..21: note = Description of Artificial Sequence: Synthetic oligonucleotide
  source 1..21: mol_type = other DNA
tgggcatctacccgggaattc

SEQ ID NO: 9662 - protein, 7 aa, synthetic construct
  REGION 1..7: note = Description of Artificial Sequence: Synthetic peptide
WASTREF

SEQ ID NO: 9663 - DNA, 21 bp, synthetic construct
  misc_feature 1..21: note = Description of Artificial Sequence: Synthetic oligonucleotide
  source 1..21: mol_type = other DNA
gctgcatccagtttgcaaagt

SEQ ID NO: 9664 - protein, 7 aa, synthetic construct
  REGION 1..7: note = Description of Artificial Sequence: Synthetic peptide
AASSLQS

SEQ ID NO: 9665 - DNA, 21 bp, synthetic construct
  misc_feature 1..21: note = Description of Artificial Sequence: Synthetic oligonucleotide
  source 1..21: mol_type = other DNA
gctgcatccagtttacaaagt

SEQ ID NO: 9666 - protein, 7 aa, synthetic construct
  REGION 1..7: note = Description of Artificial Sequence: Synthetic peptide
AASSLQS

SEQ ID NO: 9667 - DNA, 21 bp, synthetic construct
  misc_feature 1..21: note = Description of Artificial Sequence: Synthetic oligonucleotide
  source 1..21: mol_type = other DNA
gctgcatccagtttgcaaggt

SEQ ID NO: 9668 - protein, 7 aa, synthetic construct
  REGION 1..7: note = Description of Artificial Sequence: Synthetic peptide
AASSLQG

SEQ ID NO: 9669 - DNA, 21 bp, synthetic construct
  misc_feature 1..21: note = Description of Artificial Sequence: Synthetic oligonucleotide
  source 1..21: mol_type = other DNA
gctgcatccagtttgcaaagt

SEQ ID NO: 9670 - protein, 7 aa, synthetic construct
  REGION 1..7: note = Description of Artificial Sequence: Synthetic peptide
AASSLQS

SEQ ID NO: 9671 - DNA, 21 bp, synthetic construct
  misc_feature 1..21: note = Description of Artificial Sequence: Synthetic oligonucleotide
  source 1..21: mol_type = other DNA
gctgcatccagtttgcaaagt

SEQ ID NO: 9672 - protein, 7 aa, synthetic construct
  REGION 1..7: note = Description of Artificial Sequence: Synthetic peptide
AASSLQS

SEQ ID NO: 9673 - DNA, 21 bp, synthetic construct
  misc_feature 1..21: note = Description of Artificial Sequence: Synthetic oligonucleotide
  source 1..21: mol_type = other DNA
ggtgcttccaatttgcaatct

SEQ ID NO: 9674 - protein, 7 aa, synthetic construct
  REGION 1..7: note = Description of Artificial Sequence: Synthetic peptide
GASNLQS

SEQ ID NO: 9675 - DNA, 21 bp, synthetic construct
  misc_feature 1..21: note = Description of Artificial Sequence: Synthetic oligonucleotide
  source 1..21: mol_type = other DNA
gctgcatccagtttgcaaagt

SEQ ID NO: 9676 - protein, 7 aa, synthetic construct
  REGION 1..7: note = Description of Artificial Sequence: Synthetic peptide
AASSLQS

SEQ ID NO: 9677 - DNA, 21 bp, synthetic construct
  misc_feature 1..21: note = Description of Artificial Sequence: Synthetic oligonucleotide
  source 1..21: mol_type = other DNA
gctgcatccagtttgcaaagt

SEQ ID NO: 9678 - protein, 7 aa, synthetic construct
  REGION 1..7: note = Description of Artificial Sequence: Synthetic peptide
AASSLQS

SEQ ID NO: 9679 - DNA, 21 bp, synthetic construct
  misc_feature 1..21: note = Description of Artificial Sequence: Synthetic oligonucleotide
  source 1..21: mol_type = other DNA
gctgcatccaatttgcaaagt

SEQ ID NO: 9680 - protein, 7 aa, synthetic construct
  REGION 1..7: note = Description of Artificial Sequence: Synthetic peptide
AASNLQS

SEQ ID NO: 9681 - DNA, 21 bp, synthetic construct
  misc_feature 1..21: note = Description of Artificial Sequence: Synthetic oligonucleotide
  source 1..21: mol_type = other DNA
gctgcatccagtttgcaaagt

SEQ ID NO: 9682 - protein, 7 aa, synthetic construct
  REGION 1..7: note = Description of Artificial Sequence: Synthetic peptide
AASSLQS

SEQ ID NO: 9683 - DNA, 21 bp, synthetic construct
  misc_feature 1..21: note = Description of Artificial Sequence: Synthetic oligonucleotide
  source 1..21: mol_type = other DNA
gctgcatccagtttgcaaagt

SEQ ID NO: 9684 - protein, 7 aa, synthetic construct
  REGION 1..7: note = Description of Artificial Sequence: Synthetic peptide
AASSLQS

SEQ ID NO: 9685 - DNA, 21 bp, synthetic construct
  misc_feature 1..21: note = Description of Artificial Sequence: Synthetic oligonucleotide
  source 1..21: mol_type = other DNA
ggtgcatccagcagggccact

SEQ ID NO: 9686 - protein, 7 aa, synthetic construct
  REGION 1..7: note = Description of Artificial Sequence: Synthetic peptide
GASSRAT

SEQ ID NO: 9687 - DNA, 21 bp, synthetic construct
  misc_feature 1..21: note = Description of Artificial Sequence: Synthetic oligonucleotide
  source 1..21: mol_type = other DNA
ggtgcatccagcagggccact

SEQ ID NO: 9688 - protein, 7 aa, synthetic construct
  REGION 1..7: note = Description of Artificial Sequence: Synthetic peptide
GASSRAT

SEQ ID NO: 9689 - DNA, 21 bp, synthetic construct
  misc_feature 1..21: note = Description of Artificial Sequence: Synthetic oligonucleotide
  source 1..21: mol_type = other DNA
tgggcatctacccgggaatcc

SEQ ID NO: 9690 - protein, 7 aa, synthetic construct
  REGION 1..7: note = Description of Artificial Sequence: Synthetic peptide
WASTRES

SEQ ID NO: 9691 - DNA, 21 bp, synthetic construct
  misc_feature 1..21: note = Description of Artificial Sequence: Synthetic oligonucleotide
  source 1..21: mol_type = other DNA
tgggcatcaacccgggaatcc

SEQ ID NO: 9692 - protein, 7 aa, synthetic construct
  REGION 1..7: note = Description of Artificial Sequence: Synthetic peptide
WASTRES

SEQ ID NO: 9693 - DNA, 21 bp, synthetic construct
  misc_feature 1..21: note = Description of Artificial Sequence: Synthetic oligonucleotide
  source 1..21: mol_type = other DNA
ggtgcatccaccagggccact

SEQ ID NO: 9694 - protein, 7 aa, synthetic construct
  REGION 1..7: note = Description of Artificial Sequence: Synthetic peptide
GASTRAT

SEQ ID NO: 9695 - DNA, 21 bp, synthetic construct
  misc_feature 1..21: note = Description of Artificial Sequence: Synthetic oligonucleotide
  source 1..21: mol_type = other DNA
tgggcatctactcgggaatcc

SEQ ID NO: 9696 - protein, 7 aa, synthetic construct
  REGION 1..7: note = Description of Artificial Sequence: Synthetic peptide
WASTRES

SEQ ID NO: 9697 - DNA, 21 bp, synthetic construct
  misc_feature 1..21: note = Description of Artificial Sequence: Synthetic oligonucleotide
  source 1..21: mol_type = other DNA
tgggcatctacccgggaatcc

SEQ ID NO: 9698 - protein, 7 aa, synthetic construct
  REGION 1..7: note = Description of Artificial Sequence: Synthetic peptide
WASTRES

SEQ ID NO: 9699 - DNA, 21 bp, synthetic construct
  misc_feature 1..21: note = Description of Artificial Sequence: Synthetic oligonucleotide
  source 1..21: mol_type = other DNA
ggtgcatccaccagggccact

SEQ ID NO: 9700 - protein, 7 aa, synthetic construct
  REGION 1..7: note = Description of Artificial Sequence: Synthetic peptide
GASTRAT

SEQ ID NO: 9701 - DNA, 21 bp, synthetic construct
  misc_feature 1..21: note = Description of Artificial Sequence: Synthetic oligonucleotide
  source 1..21: mol_type = other DNA
tgggcatctacccgggaatcc

SEQ ID NO: 9702 - protein, 7 aa, synthetic construct
  REGION 1..7: note = Description of Artificial Sequence: Synthetic peptide
WASTRES

SEQ ID NO: 9703 - DNA, 21 bp, synthetic construct
  misc_feature 1..21: note = Description of Artificial Sequence: Synthetic oligonucleotide
  source 1..21: mol_type = other DNA
gctgcatccactttgcaaagt

SEQ ID NO: 9704 - protein, 7 aa, synthetic construct
  REGION 1..7: note = Description of Artificial Sequence: Synthetic peptide
AASTLQS

SEQ ID NO: 9705 - DNA, 21 bp, synthetic construct
  misc_feature 1..21: note = Description of Artificial Sequence: Synthetic oligonucleotide
  source 1..21: mol_type = other DNA
tgggcatctacccgggaatcc

SEQ ID NO: 9706 - protein, 7 aa, synthetic construct
  REGION 1..7: note = Description of Artificial Sequence: Synthetic peptide
WASTRES

SEQ ID NO: 9707 - DNA, 21 bp, synthetic construct
  misc_feature 1..21: note = Description of Artificial Sequence: Synthetic oligonucleotide
  source 1..21: mol_type = other DNA
ggtgcatccagcagggccact

SEQ ID NO: 9708 - protein, 7 aa, synthetic construct
  REGION 1..7: note = Description of Artificial Sequence: Synthetic peptide
GASSRAT

SEQ ID NO: 9709 - DNA, 21 bp, synthetic construct
  misc_feature 1..21: note = Description of Artificial Sequence: Synthetic oligonucleotide
  source 1..21: mol_type = other DNA
ggtgcatccagccgggccact

SEQ ID NO: 9710 - protein, 7 aa, synthetic construct
  REGION 1..7: note = Description of Artificial Sequence: Synthetic peptide
GASSRAT

SEQ ID NO: 9711 - DNA, 21 bp, synthetic construct
  misc_feature 1..21: note = Description of Artificial Sequence: Synthetic oligonucleotide
  source 1..21: mol_type = other DNA
ggtgcatccagccgggccact

SEQ ID NO: 9712 - protein, 7 aa, synthetic construct
  REGION 1..7: note = Description of Artificial Sequence: Synthetic peptide
GASSRAT

SEQ ID NO: 9713 - DNA, 21 bp, synthetic construct
  misc_feature 1..21: note = Description of Artificial Sequence: Synthetic oligonucleotide
  source 1..21: mol_type = other DNA
gctgcatccagtttgcaaagt

SEQ ID NO: 9714 - protein, 7 aa, synthetic construct
  REGION 1..7: note = Description of Artificial Sequence: Synthetic peptide
AASSLQS

SEQ ID NO: 9715 - DNA, 21 bp, synthetic construct
  misc_feature 1..21: note = Description of Artificial Sequence: Synthetic oligonucleotide
  source 1..21: mol_type = other DNA
ggtgcattcagcagggccact

SEQ ID NO: 9716 - protein, 7 aa, synthetic construct
  REGION 1..7: note = Description of Artificial Sequence: Synthetic peptide
GAFSRAT

SEQ ID NO: 9717 - DNA, 21 bp, synthetic construct
  misc_feature 1..21: note = Description of Artificial Sequence: Synthetic oligonucleotide
  source 1..21: mol_type = other DNA
tggacatctacccgggaatcc

SEQ ID NO: 9718 - protein, 7 aa, synthetic construct
  REGION 1..7: note = Description of Artificial Sequence: Synthetic peptide
WTSTRES

SEQ ID NO: 9719 - DNA, 21 bp, synthetic construct
  misc_feature 1..21: note = Description of Artificial Sequence: Synthetic oligonucleotide
  source 1..21: mol_type = other DNA
tgggcatctacccgggaatcc

SEQ ID NO: 9720 - protein, 7 aa, synthetic construct
  REGION 1..7: note = Description of Artificial Sequence: Synthetic peptide
WASTRES

SEQ ID NO: 9721 - DNA, 21 bp, synthetic construct
  misc_feature 1..21: note = Description of Artificial Sequence: Synthetic oligonucleotide
  source 1..21: mol_type = other DNA
ggtgcatccaccagggccact

SEQ ID NO: 9722 - protein, 7 aa, synthetic construct
  REGION 1..7: note = Description of Artificial Sequence: Synthetic peptide
GASTRAT

SEQ ID NO: 9723 - DNA, 21 bp, synthetic construct
  misc_feature 1..21: note = Description of Artificial Sequence: Synthetic oligonucleotide
  source 1..21: mol_type = other DNA
ggtgcatccaccagggccact

SEQ ID NO: 9724 - protein, 7 aa, synthetic construct
  REGION 1..7: note = Description of Artificial Sequence: Synthetic peptide
GASTRAT

SEQ ID NO: 9725 - DNA, 21 bp, synthetic construct
  misc_feature 1..21: note = Description of Artificial Sequence: Synthetic oligonucleotide
  source 1..21: mol_type = other DNA
ggtgcatccagcagggcccct

SEQ ID NO: 9726 - protein, 7 aa, synthetic construct
  REGION 1..7: note = Description of Artificial Sequence: Synthetic peptide
GASSRAP

SEQ ID NO: 9727 - DNA, 21 bp, synthetic construct
  misc_feature 1..21: note = Description of Artificial Sequence: Synthetic oligonucleotide
  source 1..21: mol_type = other DNA
ggtgcatccagcagggccact

SEQ ID NO: 9728 - protein, 7 aa, synthetic construct
  REGION 1..7: note = Description of Artificial Sequence: Synthetic peptide
GASSRAT

SEQ ID NO: 9729 - DNA, 21 bp, synthetic construct
  misc_feature 1..21: note = Description of Artificial Sequence: Synthetic oligonucleotide
  source 1..21: mol_type = other DNA
ggtgcatccagcagggccact

SEQ ID NO: 9730 - protein, 7 aa, synthetic construct
  REGION 1..7: note = Description of Artificial Sequence: Synthetic peptide
GASSRAT

SEQ ID NO: 9731 - DNA, 21 bp, synthetic construct
  misc_feature 1..21: note = Description of Artificial Sequence: Synthetic oligonucleotide
  source 1..21: mol_type = other DNA
tggacatctacccgggaatcc

SEQ ID NO: 9732 - protein, 7 aa, synthetic construct
  REGION 1..7: note = Description of Artificial Sequence: Synthetic peptide
WTSTRES

SEQ ID NO: 9733 - DNA, 21 bp, synthetic construct
  misc_feature 1..21: note = Description of Artificial Sequence: Synthetic oligonucleotide
  source 1..21: mol_type = other DNA
ggtgcatccaccagggccact

SEQ ID NO: 9734 - protein, 7 aa, synthetic construct
  REGION 1..7: note = Description of Artificial Sequence: Synthetic peptide
GASTRAT

SEQ ID NO: 9735 - DNA, 21 bp, synthetic construct
  misc_feature 1..21: note = Description of Artificial Sequence: Synthetic oligonucleotide
  source 1..21: mol_type = other DNA
ggtgcatccagcagggccact

SEQ ID NO: 9736 - protein, 7 aa, synthetic construct
  REGION 1..7: note = Description of Artificial Sequence: Synthetic peptide
GASSRAT

SEQ ID NO: 9737 - DNA, 21 bp, synthetic construct
  misc_feature 1..21: note = Description of Artificial Sequence: Synthetic oligonucleotide
  source 1..21: mol_type = other DNA
ggtgcatccagcagggccact

SEQ ID NO: 9738 - protein, 7 aa, synthetic construct
  REGION 1..7: note = Description of Artificial Sequence: Synthetic peptide
GASSRAT

SEQ ID NO: 9739 - DNA, 21 bp, synthetic construct
  misc_feature 1..21: note = Description of Artificial Sequence: Synthetic oligonucleotide
  source 1..21: mol_type = other DNA
actacatccaatttacaaagt

SEQ ID NO: 9740 - protein, 7 aa, synthetic construct
  REGION 1..7: note = Description of Artificial Sequence: Synthetic peptide
TTSNLQS

SEQ ID NO: 9741 - DNA, 21 bp, synthetic construct
  misc_feature 1..21: note = Description of Artificial Sequence: Synthetic oligonucleotide
  source 1..21: mol_type = other DNA
ggtgcatccaccagggccact

SEQ ID NO: 9742 - protein, 7 aa, synthetic construct
  REGION 1..7: note = Description of Artificial Sequence: Synthetic peptide
GASTRAT

SEQ ID NO: 9743 - DNA, 21 bp, synthetic construct
  misc_feature 1..21: note = Description of Artificial Sequence: Synthetic oligonucleotide
  source 1..21: mol_type = other DNA
ttgggttctaatcgggcctcc

SEQ ID NO: 9744 - protein, 7 aa, synthetic construct
  REGION 1..7: note = Description of Artificial Sequence: Synthetic peptide
LGSNRAS

SEQ ID NO: 9745 - DNA, 21 bp, synthetic construct
  misc_feature 1..21: note = Description of Artificial Sequence: Synthetic oligonucleotide
  source 1..21: mol_type = other DNA
ggtgcatccagcagggccact

SEQ ID NO: 9746 - protein, 7 aa, synthetic construct
  REGION 1..7: note = Description of Artificial Sequence: Synthetic peptide
GASSRAT

SEQ ID NO: 9747 - DNA, 21 bp, synthetic construct
  misc_feature 1..21: note = Description of Artificial Sequence: Synthetic oligonucleotide
  source 1..21: mol_type = other DNA
tgggcttctacccgggaatcc

SEQ ID NO: 9748 - protein, 7 aa, synthetic construct
  REGION 1..7: note = Description of Artificial Sequence: Synthetic peptide
WASTRES

SEQ ID NO: 9749 - DNA, 21 bp, synthetic construct
  misc_feature 1..21: note = Description of Artificial Sequence: Synthetic oligonucleotide
  source 1..21: mol_type = other DNA
tgggcatctacccgggaatcc

SEQ ID NO: 9750 - protein, 7 aa, synthetic construct
  REGION 1..7: note = Description of Artificial Sequence: Synthetic peptide
WASTRES

SEQ ID NO: 9751 - DNA, 21 bp, synthetic construct
  misc_feature 1..21: note = Description of Artificial Sequence: Synthetic oligonucleotide
  source 1..21: mol_type = other DNA
ggtgcatccagccgggccact

SEQ ID NO: 9752 - protein, 7 aa, synthetic construct
  REGION 1..7: note = Description of Artificial Sequence: Synthetic peptide
GASSRAT

SEQ ID NO: 9753 - DNA, 21 bp, synthetic construct
  misc_feature 1..21: note = Description of Artificial Sequence: Synthetic oligonucleotide
  source 1..21: mol_type = other DNA
ggtgcatccagccgggccact

SEQ ID NO: 9754 - protein, 7 aa, synthetic construct
  REGION 1..7: note = Description of Artificial Sequence: Synthetic peptide
GASSRAT

SEQ ID NO: 9755 - DNA, 21 bp, synthetic construct
  misc_feature 1..21: note = Description of Artificial Sequence: Synthetic oligonucleotide
  source 1..21: mol_type = other DNA
ttgggttctaatcgggcctcc

SEQ ID NO: 9756 - protein, 7 aa, synthetic construct
  REGION 1..7: note = Description of Artificial Sequence: Synthetic peptide
LGSNRAS

SEQ ID NO: 9757 - DNA, 21 bp, synthetic construct
  misc_feature 1..21: note = Description of Artificial Sequence: Synthetic oligonucleotide
  source 1..21: mol_type = other DNA
ggtgcaaccagcagggccact

SEQ ID NO: 9758 - protein, 7 aa, synthetic construct
  REGION 1..7: note = Description of Artificial Sequence: Synthetic peptide
GATSRAT

SEQ ID NO: 9759 - DNA, 21 bp, synthetic construct
  misc_feature 1..21: note = Description of Artificial Sequence: Synthetic oligonucleotide
  source 1..21: mol_type = other DNA
ggtgcatccaccagggccact

SEQ ID NO: 9760 - protein, 7 aa, synthetic construct
  REGION 1..7: note = Description of Artificial Sequence: Synthetic peptide
GASTRAT

SEQ ID NO: 9761 - DNA, 21 bp, synthetic construct
  misc_feature 1..21: note = Description of Artificial Sequence: Synthetic oligonucleotide
  source 1..21: mol_type = other DNA
ggtgcatccagcagggcccct

SEQ ID NO: 9762 - protein, 7 aa, synthetic construct
  REGION 1..7: note = Description of Artificial Sequence: Synthetic peptide
GASSRAP

SEQ ID NO: 9763 - DNA, 21 bp, synthetic construct
  misc_feature 1..21: note = Description of Artificial Sequence: Synthetic oligonucleotide
  source 1..21: mol_type = other DNA
gctgcatccagtttgcaaggt

SEQ ID NO: 9764 - protein, 7 aa, synthetic construct
  REGION 1..7: note = Description of Artificial Sequence: Synthetic peptide
AASSLQG

SEQ ID NO: 9765 - DNA, 21 bp, synthetic construct
  misc_feature 1..21: note = Description of Artificial Sequence: Synthetic oligonucleotide
  source 1..21: mol_type = other DNA
tggacatctacccgggaatcc

SEQ ID NO: 9766 - protein, 7 aa, synthetic construct
  REGION 1..7: note = Description of Artificial Sequence: Synthetic peptide
WTSTRES

SEQ ID NO: 9767 - DNA, 21 bp, synthetic construct
  misc_feature 1..21: note = Description of Artificial Sequence: Synthetic oligonucleotide
  source 1..21: mol_type = other DNA
ggtgcatccagccgggccact

SEQ ID NO: 9768 - protein, 7 aa, synthetic construct
  REGION 1..7: note = Description of Artificial Sequence: Synthetic peptide
GASSRAT

SEQ ID NO: 9769 - DNA, 21 bp, synthetic construct
  misc_feature 1..21: note = Description of Artificial Sequence: Synthetic oligonucleotide
  source 1..21: mol_type = other DNA
ggtgcatccagccggtccact

SEQ ID NO: 9770 - protein, 7 aa, synthetic construct
  REGION 1..7: note = Description of Artificial Sequence: Synthetic peptide
GASSRST

SEQ ID NO: 9771 - DNA, 21 bp, synthetic construct
  misc_feature 1..21: note = Description of Artificial Sequence: Synthetic oligonucleotide
  source 1..21: mol_type = other DNA
ggtgcatccaccagggccact

SEQ ID NO: 9772 - protein, 7 aa, synthetic construct
  REGION 1..7: note = Description of Artificial Sequence: Synthetic peptide
GASTRAT

SEQ ID NO: 9773 - DNA, 21 bp, synthetic construct
  misc_feature 1..21: note = Description of Artificial Sequence: Synthetic oligonucleotide
  source 1..21: mol_type = other DNA
ggtgcatccagcagggccact

SEQ ID NO: 9774 - protein, 7 aa, synthetic construct
  REGION 1..7: note = Description of Artificial Sequence: Synthetic peptide
GASSRAT

SEQ ID NO: 9775 - DNA, 21 bp, synthetic construct
  misc_feature 1..21: note = Description of Artificial Sequence: Synthetic oligonucleotide
  source 1..21: mol_type = other DNA
ggtgcatccaccagggccact

SEQ ID NO: 9776 - protein, 7 aa, synthetic construct
  REGION 1..7: note = Description of Artificial Sequence: Synthetic peptide
GASTRAT

SEQ ID NO: 9777 - DNA, 21 bp, synthetic construct
  misc_feature 1..21: note = Description of Artificial Sequence: Synthetic oligonucleotide
  source 1..21: mol_type = other DNA
ggtgcatccagcagggccact

SEQ ID NO: 9778 - protein, 7 aa, synthetic construct
  REGION 1..7: note = Description of Artificial Sequence: Synthetic peptide
GASSRAT

SEQ ID NO: 9779 - DNA, 21 bp, synthetic construct
  misc_feature 1..21: note = Description of Artificial Sequence: Synthetic oligonucleotide
  source 1..21: mol_type = other DNA
tgggcatctacccgggaatcc

SEQ ID NO: 9780 - protein, 7 aa, synthetic construct
  REGION 1..7: note = Description of Artificial Sequence: Synthetic peptide
WASTRES

SEQ ID NO: 9781 - DNA, 21 bp, synthetic construct
  misc_feature 1..21: note = Description of Artificial Sequence: Synthetic oligonucleotide
  source 1..21: mol_type = other DNA
ggtgcatccaccagggccact

SEQ ID NO: 9782 - protein, 7 aa, synthetic construct
  REGION 1..7: note = Description of Artificial Sequence: Synthetic peptide
GASTRAT

SEQ ID NO: 9783 - DNA, 21 bp, synthetic construct
  misc_feature 1..21: note = Description of Artificial Sequence: Synthetic oligonucleotide
  source 1..21: mol_type = other DNA
ggtgcatccagcagggccact

SEQ ID NO: 9784 - protein, 7 aa, synthetic construct
  REGION 1..7: note = Description of Artificial Sequence: Synthetic peptide
GASSRAT

SEQ ID NO: 9785 - DNA, 21 bp, synthetic construct
  misc_feature 1..21: note = Description of Artificial Sequence: Synthetic oligonucleotide
  source 1..21: mol_type = other DNA
tgggcatctacccgggattcc

SEQ ID NO: 9786 - protein, 7 aa, synthetic construct
  REGION 1..7: note = Description of Artificial Sequence: Synthetic peptide
WASTRDS

SEQ ID NO: 9787 - DNA, 21 bp, synthetic construct
  misc_feature 1..21: note = Description of Artificial Sequence: Synthetic oligonucleotide
  source 1..21: mol_type = other DNA
gctgcatccagtttgcaaagt

SEQ ID NO: 9788 - protein, 7 aa, synthetic construct
  REGION 1..7: note = Description of Artificial Sequence: Synthetic peptide
AASSLQS

SEQ ID NO: 9789 - DNA, 21 bp, synthetic construct
  misc_feature 1..21: note = Description of Artificial Sequence: Synthetic oligonucleotide
  source 1..21: mol_type = other DNA
tgggcatctacccgggaatcc

SEQ ID NO: 9790 - protein, 7 aa, synthetic construct
  REGION 1..7: note = Description of Artificial Sequence: Synthetic peptide
WASTRES

SEQ ID NO: 9791 - DNA, 21 bp, synthetic construct
  misc_feature 1..21: note = Description of Artificial Sequence: Synthetic oligonucleotide
  source 1..21: mol_type = other DNA
tgggcatctacccgggaatcc

SEQ ID NO: 9792 - protein, 7 aa, synthetic construct
  REGION 1..7: note = Description of Artificial Sequence: Synthetic peptide
WASTRES

SEQ ID NO: 9793 - DNA, 21 bp, synthetic construct
  misc_feature 1..21: note = Description of Artificial Sequence: Synthetic oligonucleotide
  source 1..21: mol_type = other DNA
ggtgcatccatcagggccact

SEQ ID NO: 9794 - protein, 7 aa, synthetic construct
  REGION 1..7: note = Description of Artificial Sequence: Synthetic peptide
GASIRAT

SEQ ID NO: 9795 - DNA, 21 bp, synthetic construct
  misc_feature 1..21: note = Description of Artificial Sequence: Synthetic oligonucleotide
  source 1..21: mol_type = other DNA
ggtacatccaccagggccact

SEQ ID NO: 9796 - protein, 7 aa, synthetic construct
  REGION 1..7: note = Description of Artificial Sequence: Synthetic peptide
GTSTRAT

SEQ ID NO: 9797 - DNA, 21 bp, synthetic construct
  misc_feature 1..21: note = Description of Artificial Sequence: Synthetic oligonucleotide
  source 1..21: mol_type = other DNA
ggtacttccagcagggccact

SEQ ID NO: 9798 - protein, 7 aa, synthetic construct
  REGION 1..7: note = Description of Artificial Sequence: Synthetic peptide
GTSSRAT

SEQ ID NO: 9799 - DNA, 21 bp, synthetic construct
  misc_feature 1..21: note = Description of Artificial Sequence: Synthetic oligonucleotide
  source 1..21: mol_type = other DNA
tgggcatctatccgggaatcc

SEQ ID NO: 9800 - protein, 7 aa, synthetic construct
  REGION 1..7: note = Description of Artificial Sequence: Synthetic peptide
WASIRES

SEQ ID NO: 9801 - DNA, 21 bp, synthetic construct
  misc_feature 1..21: note = Description of Artificial Sequence: Synthetic oligonucleotide
  source 1..21: mol_type = other DNA
ggtgcatccagcagggccact

SEQ ID NO: 9802 - protein, 7 aa, synthetic construct
  REGION 1..7: note = Description of Artificial Sequence: Synthetic peptide
GASSRAT

SEQ ID NO: 9803 - DNA, 21 bp, synthetic construct
  misc_feature 1..21: note = Description of Artificial Sequence: Synthetic oligonucleotide
  source 1..21: mol_type = other DNA
tggacatctacccgggaatcc

SEQ ID NO: 9804 - protein, 7 aa, synthetic construct
  REGION 1..7: note = Description of Artificial Sequence: Synthetic peptide
WTSTRES

SEQ ID NO: 9805 - DNA, 21 bp, synthetic construct
  misc_feature 1..21: note = Description of Artificial Sequence: Synthetic oligonucleotide
  source 1..21: mol_type = other DNA
tgggcatctacccgggaatcc

SEQ ID NO: 9806 - protein, 7 aa, synthetic construct
  REGION 1..7: note = Description of Artificial Sequence: Synthetic peptide
WASTRES

SEQ ID NO: 9807 - DNA, 21 bp, synthetic construct
  misc_feature 1..21: note = Description of Artificial Sequence: Synthetic oligonucleotide
  source 1..21: mol_type = other DNA
tgggcatctacccgggaatcc

SEQ ID NO: 9808 - protein, 7 aa, synthetic construct
  REGION 1..7: note = Description of Artificial Sequence: Synthetic peptide
WASTRES

SEQ ID NO: 9809 - DNA, 21 bp, synthetic construct
  misc_feature 1..21: note = Description of Artificial Sequence: Synthetic oligonucleotide
  source 1..21: mol_type = other DNA
tggacatctacccgggaatcc

SEQ ID NO: 9810 - protein, 7 aa, synthetic construct
  REGION 1..7: note = Description of Artificial Sequence: Synthetic peptide
WTSTRES

SEQ ID NO: 9811 - DNA, 21 bp, synthetic construct
  misc_feature 1..21: note = Description of Artificial Sequence: Synthetic oligonucleotide
  source 1..21: mol_type = other DNA
ggtgcatccagccggtccact

SEQ ID NO: 9812 - protein, 7 aa, synthetic construct
  REGION 1..7: note = Description of Artificial Sequence: Synthetic peptide
GASSRST

SEQ ID NO: 9813 - DNA, 21 bp, synthetic construct
  misc_feature 1..21: note = Description of Artificial Sequence: Synthetic oligonucleotide
  source 1..21: mol_type = other DNA
ggtgcatccagccggtccact

SEQ ID NO: 9814 - protein, 7 aa, synthetic construct
  REGION 1..7: note = Description of Artificial Sequence: Synthetic peptide
GASSRST

SEQ ID NO: 9815 - DNA, 21 bp, synthetic construct
  misc_feature 1..21: note = Description of Artificial Sequence: Synthetic oligonucleotide
  source 1..21: mol_type = other DNA
tgggcatctacccgggaatcc

SEQ ID NO: 9816 - protein, 7 aa, synthetic construct
  REGION 1..7: note = Description of Artificial Sequence: Synthetic peptide
WASTRES

SEQ ID NO: 9817 - DNA, 21 bp, synthetic construct
  misc_feature 1..21: note = Description of Artificial Sequence: Synthetic oligonucleotide
  source 1..21: mol_type = other DNA
gctgcatccagtttgcaaggt

SEQ ID NO: 9818 - protein, 7 aa, synthetic construct
  REGION 1..7: note = Description of Artificial Sequence: Synthetic peptide
AASSLQG

SEQ ID NO: 9819 - DNA, 21 bp, synthetic construct
  misc_feature 1..21: note = Description of Artificial Sequence: Synthetic oligonucleotide
  source 1..21: mol_type = other DNA
ggtgcatccagcagggccact

SEQ ID NO: 9820 - protein, 7 aa, synthetic construct
  REGION 1..7: note = Description of Artificial Sequence: Synthetic peptide
GASSRAT

SEQ ID NO: 9821 - DNA, 21 bp, synthetic construct
  misc_feature 1..21: note = Description of Artificial Sequence: Synthetic oligonucleotide
  source 1..21: mol_type = other DNA
ggtgcatccaccagggccact

SEQ ID NO: 9822 - protein, 7 aa, synthetic construct
  REGION 1..7: note = Description of Artificial Sequence: Synthetic peptide
GASTRAT

SEQ ID NO: 9823 - DNA, 21 bp, synthetic construct
  misc_feature 1..21: note = Description of Artificial Sequence: Synthetic oligonucleotide
  source 1..21: mol_type = other DNA
tgggcatctacttgggaatcc

SEQ ID NO: 9824 - protein, 7 aa, synthetic construct
  REGION 1..7: note = Description of Artificial Sequence: Synthetic peptide
WASTWES

SEQ ID NO: 9825 - DNA, 21 bp, synthetic construct
  misc_feature 1..21: note = Description of Artificial Sequence: Synthetic oligonucleotide
  source 1..21: mol_type = other DNA
tgggcatctatccgggaatcc

SEQ ID NO: 9826 - protein, 7 aa, synthetic construct
  REGION 1..7: note = Description of Artificial Sequence: Synthetic peptide
WASIRES

SEQ ID NO: 9827 - DNA, 21 bp, synthetic construct
  misc_feature 1..21: note = Description of Artificial Sequence: Synthetic oligonucleotide
  source 1..21: mol_type = other DNA
tgggcatctacccgggaatcc

SEQ ID NO: 9828 - protein, 7 aa, synthetic construct
  REGION 1..7: note = Description of Artificial Sequence: Synthetic peptide
WASTRES

SEQ ID NO: 9829 - DNA, 21 bp, synthetic construct
  misc_feature 1..21: note = Description of Artificial Sequence: Synthetic oligonucleotide
  source 1..21: mol_type = other DNA
ggtgcatccagccgggccact

SEQ ID NO: 9830 - protein, 7 aa, synthetic construct
  REGION 1..7: note = Description of Artificial Sequence: Synthetic peptide
GASSRAT

SEQ ID NO: 9831 - DNA, 21 bp, synthetic construct
  misc_feature 1..21: note = Description of Artificial Sequence: Synthetic oligonucleotide
  source 1..21: mol_type = other DNA
tgggcatctacccgggaatcc

SEQ ID NO: 9832 - protein, 7 aa, synthetic construct
  REGION 1..7: note = Description of Artificial Sequence: Synthetic peptide
WASTRES

SEQ ID NO: 9833 - DNA, 21 bp, synthetic construct
  misc_feature 1..21: note = Description of Artificial Sequence: Synthetic oligonucleotide
  source 1..21: mol_type = other DNA
ggtgcatccagcagggccact

SEQ ID NO: 9834 - protein, 7 aa, synthetic construct
  REGION 1..7: note = Description of Artificial Sequence: Synthetic peptide
GASSRAT

SEQ ID NO: 9835 - DNA, 21 bp, synthetic construct
  misc_feature 1..21: note = Description of Artificial Sequence: Synthetic oligonucleotide
  source 1..21: mol_type = other DNA
ggtgcatccagccgggccact

SEQ ID NO: 9836 - protein, 7 aa, synthetic construct
  REGION 1..7: note = Description of Artificial Sequence: Synthetic peptide
GASSRAT

SEQ ID NO: 9837 - DNA, 21 bp, synthetic construct
  misc_feature 1..21: note = Description of Artificial Sequence: Synthetic oligonucleotide
  source 1..21: mol_type = other DNA
tgggcatctacccgggaatcc

SEQ ID NO: 9838 - protein, 7 aa, synthetic construct
  REGION 1..7: note = Description of Artificial Sequence: Synthetic peptide
WASTRES

SEQ ID NO: 9839 - DNA, 21 bp, synthetic construct
  misc_feature 1..21: note = Description of Artificial Sequence: Synthetic oligonucleotide
  source 1..21: mol_type = other DNA
ggtgcatccagccggtccact

SEQ ID NO: 9840 - protein, 7 aa, synthetic construct
  REGION 1..7: note = Description of Artificial Sequence: Synthetic peptide
GASSRST

SEQ ID NO: 9841 - DNA, 21 bp, synthetic construct
  misc_feature 1..21: note = Description of Artificial Sequence: Synthetic oligonucleotide
  source 1..21: mol_type = other DNA
ggtgcatccagccggtccact

SEQ ID NO: 9842 - protein, 7 aa, synthetic construct
  REGION 1..7: note = Description of Artificial Sequence: Synthetic peptide
GASSRST

SEQ ID NO: 9843 - DNA, 21 bp, synthetic construct
  misc_feature 1..21: note = Description of Artificial Sequence: Synthetic oligonucleotide
  source 1..21: mol_type = other DNA
ggtgcatccagccggtccact

SEQ ID NO: 9844 - protein, 7 aa, synthetic construct
  REGION 1..7: note = Description of Artificial Sequence: Synthetic peptide
GASSRST

SEQ ID NO: 9845 - DNA, 21 bp, synthetic construct
  misc_feature 1..21: note = Description of Artificial Sequence: Synthetic oligonucleotide
  source 1..21: mol_type = other DNA
ggtgcatccaccagggccact

SEQ ID NO: 9846 - protein, 7 aa, synthetic construct
  REGION 1..7: note = Description of Artificial Sequence: Synthetic peptide
GASTRAT

SEQ ID NO: 9847 - DNA, 21 bp, synthetic construct
  misc_feature 1..21: note = Description of Artificial Sequence: Synthetic oligonucleotide
  source 1..21: mol_type = other DNA
tgggcatctacccgggaatcc

SEQ ID NO: 9848 - protein, 7 aa, synthetic construct
  REGION 1..7: note = Description of Artificial Sequence: Synthetic peptide
WASTRES

SEQ ID NO: 9849 - DNA, 21 bp, synthetic construct
  misc_feature 1..21: note = Description of Artificial Sequence: Synthetic oligonucleotide
  source 1..21: mol_type = other DNA
ggtgcatccagccggtccact

SEQ ID NO: 9850 - protein, 7 aa, synthetic construct
  REGION 1..7: note = Description of Artificial Sequence: Synthetic peptide
GASSRST

SEQ ID NO: 9851 - DNA, 21 bp, synthetic construct
  misc_feature 1..21: note = Description of Artificial Sequence: Synthetic oligonucleotide
  source 1..21: mol_type = other DNA
tgggcatctacccgggaatcc

SEQ ID NO: 9852 - protein, 7 aa, synthetic construct
  REGION 1..7: note = Description of Artificial Sequence: Synthetic peptide
WASTRES

SEQ ID NO: 9853 - DNA, 21 bp, synthetic construct
  misc_feature 1..21: note = Description of Artificial Sequence: Synthetic oligonucleotide
  source 1..21: mol_type = other DNA
ggtgcatccagcagggccact

SEQ ID NO: 9854 - protein, 7 aa, synthetic construct
  REGION 1..7: note = Description of Artificial Sequence: Synthetic peptide
GASSRAT

SEQ ID NO: 9855 - DNA, 21 bp, synthetic construct
  misc_feature 1..21: note = Description of Artificial Sequence: Synthetic oligonucleotide
  source 1..21: mol_type = other DNA
ggtgcatccagcagggcccct

SEQ ID NO: 9856 - protein, 7 aa, synthetic construct
  REGION 1..7: note = Description of Artificial Sequence: Synthetic peptide
GASSRAP

SEQ ID NO: 9857 - DNA, 21 bp, synthetic construct
  misc_feature 1..21: note = Description of Artificial Sequence: Synthetic oligonucleotide
  source 1..21: mol_type = other DNA
ggtgcatccagcagggccact

SEQ ID NO: 9858 - protein, 7 aa, synthetic construct
  REGION 1..7: note = Description of Artificial Sequence: Synthetic peptide
GASSRAT

SEQ ID NO: 9859 - DNA, 21 bp, synthetic construct
  misc_feature 1..21: note = Description of Artificial Sequence: Synthetic oligonucleotide
  source 1..21: mol_type = other DNA
tgggcatctacccgggaatcc

SEQ ID NO: 9860 - protein, 7 aa, synthetic construct
  REGION 1..7: note = Description of Artificial Sequence: Synthetic peptide
WASTRES

SEQ ID NO: 9861 - DNA, 21 bp, synthetic construct
  misc_feature 1..21: note = Description of Artificial Sequence: Synthetic oligonucleotide
  source 1..21: mol_type = other DNA
tgggcatctacccgggaatcc

SEQ ID NO: 9862 - protein, 7 aa, synthetic construct
  REGION 1..7: note = Description of Artificial Sequence: Synthetic peptide
WASTRES

SEQ ID NO: 9863 - DNA, 21 bp, synthetic construct
  misc_feature 1..21: note = Description of Artificial Sequence: Synthetic oligonucleotide
  source 1..21: mol_type = other DNA
ggtgcatccagcagggcccct

SEQ ID NO: 9864 - protein, 7 aa, synthetic construct
  REGION 1..7: note = Description of Artificial Sequence: Synthetic peptide
GASSRAP

SEQ ID NO: 9865 - DNA, 21 bp, synthetic construct
  misc_feature 1..21: note = Description of Artificial Sequence: Synthetic oligonucleotide
  source 1..21: mol_type = other DNA
actacatccagtttgcaaagt

SEQ ID NO: 9866 - protein, 7 aa, synthetic construct
  REGION 1..7: note = Description of Artificial Sequence: Synthetic peptide
TTSSLQS

SEQ ID NO: 9867 - DNA, 21 bp, synthetic construct
  misc_feature 1..21: note = Description of Artificial Sequence: Synthetic oligonucleotide
  source 1..21: mol_type = other DNA
actgcatccagtttgcaaagt

SEQ ID NO: 9868 - protein, 7 aa, synthetic construct
  REGION 1..7: note = Description of Artificial Sequence: Synthetic peptide
TASSLQS

SEQ ID NO: 9869 - DNA, 21 bp, synthetic construct
  misc_feature 1..21: note = Description of Artificial Sequence: Synthetic oligonucleotide
  source 1..21: mol_type = other DNA
ggtgcatccagccggtccact

SEQ ID NO: 9870 - protein, 7 aa, synthetic construct
  REGION 1..7: note = Description of Artificial Sequence: Synthetic peptide
GASSRST

SEQ ID NO: 9871 - DNA, 21 bp, synthetic construct
  misc_feature 1..21: note = Description of Artificial Sequence: Synthetic oligonucleotide
  source 1..21: mol_type = other DNA
ggtgcatccaccagggccact

SEQ ID NO: 9872 - protein, 7 aa, synthetic construct
  REGION 1..7: note = Description of Artificial Sequence: Synthetic peptide
GASTRAT

SEQ ID NO: 9873 - DNA, 21 bp, synthetic construct
  misc_feature 1..21: note = Description of Artificial Sequence: Synthetic oligonucleotide
  source 1..21: mol_type = other DNA
ggtgcatccagccggtccact

SEQ ID NO: 9874 - protein, 7 aa, synthetic construct
  REGION 1..7: note = Description of Artificial Sequence: Synthetic peptide
GASSRST

SEQ ID NO: 9875 - DNA, 21 bp, synthetic construct
  misc_feature 1..21: note = Description of Artificial Sequence: Synthetic oligonucleotide
  source 1..21: mol_type = other DNA
ggtgcatccagccggtccact

SEQ ID NO: 9876 - protein, 7 aa, synthetic construct
  REGION 1..7: note = Description of Artificial Sequence: Synthetic peptide
GASSRST

SEQ ID NO: 9877 - DNA, 21 bp, synthetic construct
  misc_feature 1..21: note = Description of Artificial Sequence: Synthetic oligonucleotide
  source 1..21: mol_type = other DNA
tgggcatctacccgggaatcc

SEQ ID NO: 9878 - protein, 7 aa, synthetic construct
  REGION 1..7: note = Description of Artificial Sequence: Synthetic peptide
WASTRES

SEQ ID NO: 9879 - DNA, 21 bp, synthetic construct
  misc_feature 1..21: note = Description of Artificial Sequence: Synthetic oligonucleotide
  source 1..21: mol_type = other DNA
tgggcatctacccgggaatcc

SEQ ID NO: 9880 - protein, 7 aa, synthetic construct
  REGION 1..7: note = Description of Artificial Sequence: Synthetic peptide
WASTRES

SEQ ID NO: 9881 - DNA, 21 bp, synthetic construct
  misc_feature 1..21: note = Description of Artificial Sequence: Synthetic oligonucleotide
  source 1..21: mol_type = other DNA
ggtgcatccagcagggccact

SEQ ID NO: 9882 - protein, 7 aa, synthetic construct
  REGION 1..7: note = Description of Artificial Sequence: Synthetic peptide
GASSRAT

SEQ ID NO: 9883 - DNA, 21 bp, synthetic construct
  misc_feature 1..21: note = Description of Artificial Sequence: Synthetic oligonucleotide
  source 1..21: mol_type = other DNA
ggtgcatccagccggtccact

SEQ ID NO: 9884 - protein, 7 aa, synthetic construct
  REGION 1..7: note = Description of Artificial Sequence: Synthetic peptide
GASSRST

SEQ ID NO: 9885 - DNA, 21 bp, synthetic construct
  misc_feature 1..21: note = Description of Artificial Sequence: Synthetic oligonucleotide
  source 1..21: mol_type = other DNA
ggtgcatccaccagggccact

SEQ ID NO: 9886 - protein, 7 aa, synthetic construct
  REGION 1..7: note = Description of Artificial Sequence: Synthetic peptide
GASTRAT

SEQ ID NO: 9887 - DNA, 21 bp, synthetic construct
  misc_feature 1..21: note = Description of Artificial Sequence: Synthetic oligonucleotide
  source 1..21: mol_type = other DNA
ggtgcatccaccagggccact

SEQ ID NO: 9888 - protein, 7 aa, synthetic construct
  REGION 1..7: note = Description of Artificial Sequence: Synthetic peptide
GASTRAT

SEQ ID NO: 9889 - DNA, 21 bp, synthetic construct
  misc_feature 1..21: note = Description of Artificial Sequence: Synthetic oligonucleotide
  source 1..21: mol_type = other DNA
ggtgcatccaccagggccact

SEQ ID NO: 9890 - protein, 7 aa, synthetic construct
  REGION 1..7: note = Description of Artificial Sequence: Synthetic peptide
GASTRAT

SEQ ID NO: 9891 - DNA, 21 bp, synthetic construct
  misc_feature 1..21: note = Description of Artificial Sequence: Synthetic oligonucleotide
  source 1..21: mol_type = other DNA
ggtgcatccagccggtccact

SEQ ID NO: 9892 - protein, 7 aa, synthetic construct
  REGION 1..7: note = Description of Artificial Sequence: Synthetic peptide
GASSRST

SEQ ID NO: 9893 - DNA, 21 bp, synthetic construct
  misc_feature 1..21: note = Description of Artificial Sequence: Synthetic oligonucleotide
  source 1..21: mol_type = other DNA
ggtgcatccaccagggcctct

SEQ ID NO: 9894 - protein, 7 aa, synthetic construct
  REGION 1..7: note = Description of Artificial Sequence: Synthetic peptide
GASTRAS

SEQ ID NO: 9895 - DNA, 21 bp, synthetic construct
  misc_feature 1..21: note = Description of Artificial Sequence: Synthetic oligonucleotide
  source 1..21: mol_type = other DNA
gctgcatccagtttgcaaagt

SEQ ID NO: 9896 - protein, 7 aa, synthetic construct
  REGION 1..7: note = Description of Artificial Sequence: Synthetic peptide
AASSLQS

SEQ ID NO: 9897 - DNA, 21 bp, synthetic construct
  misc_feature 1..21: note = Description of Artificial Sequence: Synthetic oligonucleotide
  source 1..21: mol_type = other DNA
ggtgcatccagccggtccacg

SEQ ID NO: 9898 - protein, 7 aa, synthetic construct
  REGION 1..7: note = Description of Artificial Sequence: Synthetic peptide
GASSRST

SEQ ID NO: 9899 - DNA, 21 bp, synthetic construct
  misc_feature 1..21: note = Description of Artificial Sequence: Synthetic oligonucleotide
  source 1..21: mol_type = other DNA
ggtgcatccaccagggccact

SEQ ID NO: 9900 - protein, 7 aa, synthetic construct
  REGION 1..7: note = Description of Artificial Sequence: Synthetic peptide
GASTRAT

SEQ ID NO: 9901 - DNA, 21 bp, synthetic construct
  misc_feature 1..21: note = Description of Artificial Sequence: Synthetic oligonucleotide
  source 1..21: mol_type = other DNA
tgggcatctacccgggaatcc

SEQ ID NO: 9902 - protein, 7 aa, synthetic construct
  REGION 1..7: note = Description of Artificial Sequence: Synthetic peptide
WASTRES

SEQ ID NO: 9903 - DNA, 21 bp, synthetic construct
  misc_feature 1..21: note = Description of Artificial Sequence: Synthetic oligonucleotide
  source 1..21: mol_type = other DNA
tgggcatctacccgggaatcc

SEQ ID NO: 9904 - protein, 7 aa, synthetic construct
  REGION 1..7: note = Description of Artificial Sequence: Synthetic peptide
WASTRES

SEQ ID NO: 9905 - DNA, 21 bp, synthetic construct
  misc_feature 1..21: note = Description of Artificial Sequence: Synthetic oligonucleotide
  source 1..21: mol_type = other DNA
ggtgcatccaccagggccact

SEQ ID NO: 9906 - protein, 7 aa, synthetic construct
  REGION 1..7: note = Description of Artificial Sequence: Synthetic peptide
GASTRAT

SEQ ID NO: 9907 - DNA, 21 bp, synthetic construct
  misc_feature 1..21: note = Description of Artificial Sequence: Synthetic oligonucleotide
  source 1..21: mol_type = other DNA
ggtgcatccagcaggacccct

SEQ ID NO: 9908 - protein, 7 aa, synthetic construct
  REGION 1..7: note = Description of Artificial Sequence: Synthetic peptide
GASSRTP

SEQ ID NO: 9909 - DNA, 21 bp, synthetic construct
  misc_feature 1..21: note = Description of Artificial Sequence: Synthetic oligonucleotide
  source 1..21: mol_type = other DNA
ggtgcatccagccggtccact

SEQ ID NO: 9910 - protein, 7 aa, synthetic construct
  REGION 1..7: note = Description of Artificial Sequence: Synthetic peptide
GASSRST

SEQ ID NO: 9911 - DNA, 21 bp, synthetic construct
  misc_feature 1..21: note = Description of Artificial Sequence: Synthetic oligonucleotide
  source 1..21: mol_type = other DNA
tggacatctacccgggaatcc

SEQ ID NO: 9912 - protein, 7 aa, synthetic construct
  REGION 1..7: note = Description of Artificial Sequence: Synthetic peptide
WTSTRES

SEQ ID NO: 9913 - DNA, 21 bp, synthetic construct
  misc_feature 1..21: note = Description of Artificial Sequence: Synthetic oligonucleotide
  source 1..21: mol_type = other DNA
ggtgcatccagcagggccact

SEQ ID NO: 9914 - protein, 7 aa, synthetic construct
  REGION 1..7: note = Description of Artificial Sequence: Synthetic peptide
GASSRAT

SEQ ID NO: 9915 - DNA, 21 bp, synthetic construct
  misc_feature 1..21: note = Description of Artificial Sequence: Synthetic oligonucleotide
  source 1..21: mol_type = other DNA
tgggcatctacccgggaatcc

SEQ ID NO: 9916 - protein, 7 aa, synthetic construct
  REGION 1..7: note = Description of Artificial Sequence: Synthetic peptide
WASTRES

SEQ ID NO: 9917 - DNA, 21 bp, synthetic construct
  misc_feature 1..21: note = Description of Artificial Sequence: Synthetic oligonucleotide
  source 1..21: mol_type = other DNA
tggacatctacccgggaatcc

SEQ ID NO: 9918 - protein, 7 aa, synthetic construct
  REGION 1..7: note = Description of Artificial Sequence: Synthetic peptide
WTSTRES

SEQ ID NO: 9919 - DNA, 21 bp, synthetic construct
  misc_feature 1..21: note = Description of Artificial Sequence: Synthetic oligonucleotide
  source 1..21: mol_type = other DNA
gctgcatccagtttgcaaagt

SEQ ID NO: 9920 - protein, 7 aa, synthetic construct
  REGION 1..7: note = Description of Artificial Sequence: Synthetic peptide
AASSLQS

SEQ ID NO: 9921 - DNA, 21 bp, synthetic construct
  misc_feature 1..21: note = Description of Artificial Sequence: Synthetic oligonucleotide
  source 1..21: mol_type = other DNA
ggtgcatccagcagggccact

SEQ ID NO: 9922 - protein, 7 aa, synthetic construct
  REGION 1..7: note = Description of Artificial Sequence: Synthetic peptide
GASSRAT

SEQ ID NO: 9923 - DNA, 21 bp, synthetic construct
  misc_feature 1..21: note = Description of Artificial Sequence: Synthetic oligonucleotide
  source 1..21: mol_type = other DNA
ggtgcatccaccagggccact

SEQ ID NO: 9924 - protein, 7 aa, synthetic construct
  REGION 1..7: note = Description of Artificial Sequence: Synthetic peptide
GASTRAT

SEQ ID NO: 9925 - DNA, 21 bp, synthetic construct
  misc_feature 1..21: note = Description of Artificial Sequence: Synthetic oligonucleotide
  source 1..21: mol_type = other DNA
tgggcatctacccgggaatcc

SEQ ID NO: 9926 - protein, 7 aa, synthetic construct
  REGION 1..7: note = Description of Artificial Sequence: Synthetic peptide
WASTRES

SEQ ID NO: 9927 - DNA, 21 bp, synthetic construct
  misc_feature 1..21: note = Description of Artificial Sequence: Synthetic oligonucleotide
  source 1..21: mol_type = other DNA
ggtgcatccagccgggccagt

SEQ ID NO: 9928 - protein, 7 aa, synthetic construct
  REGION 1..7: note = Description of Artificial Sequence: Synthetic peptide
GASSRAS

SEQ ID NO: 9929 - DNA, 21 bp, synthetic construct
  misc_feature 1..21: note = Description of Artificial Sequence: Synthetic oligonucleotide
  source 1..21: mol_type = other DNA
ggtgcatccagccgggccact

SEQ ID NO: 9930 - protein, 7 aa, synthetic construct
  REGION 1..7: note = Description of Artificial Sequence: Synthetic peptide
GASSRAT

SEQ ID NO: 9931 - DNA, 21 bp, synthetic construct
  misc_feature 1..21: note = Description of Artificial Sequence: Synthetic oligonucleotide
  source 1..21: mol_type = other DNA
ggtgcatccaccagggccact

SEQ ID NO: 9932 - protein, 7 aa, synthetic construct
  REGION 1..7: note = Description of Artificial Sequence: Synthetic peptide
GASTRAT

SEQ ID NO: 9933 - DNA, 21 bp, synthetic construct
  misc_feature 1..21: note = Description of Artificial Sequence: Synthetic oligonucleotide
  source 1..21: mol_type = other DNA
ggtgcatccagcagggccact

SEQ ID NO: 9934 - protein, 7 aa, synthetic construct
  REGION 1..7: note = Description of Artificial Sequence: Synthetic peptide
GASSRAT

SEQ ID NO: 9935 - DNA, 21 bp, synthetic construct
  misc_feature 1..21: note = Description of Artificial Sequence: Synthetic oligonucleotide
  source 1..21: mol_type = other DNA
ggtgcagccagcagggcccct

SEQ ID NO: 9936 - protein, 7 aa, synthetic construct
  REGION 1..7: note = Description of Artificial Sequence: Synthetic peptide
GAASRAP

SEQ ID NO: 9937 - DNA, 21 bp, synthetic construct
  misc_feature 1..21: note = Description of Artificial Sequence: Synthetic oligonucleotide
  source 1..21: mol_type = other DNA
ggtgcatccagcagggccact

SEQ ID NO: 9938 - protein, 7 aa, synthetic construct
  REGION 1..7: note = Description of Artificial Sequence: Synthetic peptide
GASSRAT

SEQ ID NO: 9939 - DNA, 21 bp, synthetic construct
  misc_feature 1..21: note = Description of Artificial Sequence: Synthetic oligonucleotide
  source 1..21: mol_type = other DNA
ggtgcatccagcagggccact

SEQ ID NO: 9940 - protein, 7 aa, synthetic construct
  REGION 1..7: note = Description of Artificial Sequence: Synthetic peptide
GASSRAT

SEQ ID NO: 9941 - DNA, 21 bp, synthetic construct
  misc_feature 1..21: note = Description of Artificial Sequence: Synthetic oligonucleotide
  source 1..21: mol_type = other DNA
tgggcatctacccgggaatcc

SEQ ID NO: 9942 - protein, 7 aa, synthetic construct
  REGION 1..7: note = Description of Artificial Sequence: Synthetic peptide
WASTRES

SEQ ID NO: 9943 - DNA, 21 bp, synthetic construct
  misc_feature 1..21: note = Description of Artificial Sequence: Synthetic oligonucleotide
  source 1..21: mol_type = other DNA
ggtgcatctagcagggccact

SEQ ID NO: 9944 - protein, 7 aa, synthetic construct
  REGION 1..7: note = Description of Artificial Sequence: Synthetic peptide
GASSRAT

SEQ ID NO: 9945 - DNA, 21 bp, synthetic construct
  misc_feature 1..21: note = Description of Artificial Sequence: Synthetic oligonucleotide
  source 1..21: mol_type = other DNA
tgggcatttatccgggaatcc

SEQ ID NO: 9946 - protein, 7 aa, synthetic construct
  REGION 1..7: note = Description of Artificial Sequence: Synthetic peptide
WAFIRES

SEQ ID NO: 9947 - DNA, 21 bp, synthetic construct
  misc_feature 1..21: note = Description of Artificial Sequence: Synthetic oligonucleotide
  source 1..21: mol_type = other DNA
ggtgcatccaccagggccact

SEQ ID NO: 9948 - protein, 7 aa, synthetic construct
  REGION 1..7: note = Description of Artificial Sequence: Synthetic peptide
GASTRAT

SEQ ID NO: 9949 - DNA, 21 bp, synthetic construct
  misc_feature 1..21: note = Description of Artificial Sequence: Synthetic oligonucleotide
  source 1..21: mol_type = other DNA
ggtgcatccagccgggccact

SEQ ID NO: 9950 - protein, 7 aa, synthetic construct
  REGION 1..7: note = Description of Artificial Sequence: Synthetic peptide
GASSRAT

SEQ ID NO: 9951 - DNA, 21 bp, synthetic construct
  misc_feature 1..21: note = Description of Artificial Sequence: Synthetic oligonucleotide
  source 1..21: mol_type = other DNA
ggtgcatccagccggtccact

SEQ ID NO: 9952 - protein, 7 aa, synthetic construct
  REGION 1..7: note = Description of Artificial Sequence: Synthetic peptide
GASSRST

SEQ ID NO: 9953 - DNA, 21 bp, synthetic construct
  misc_feature 1..21: note = Description of Artificial Sequence: Synthetic oligonucleotide
  source 1..21: mol_type = other DNA
tgggcatctacccgggaatcc

SEQ ID NO: 9954 - protein, 7 aa, synthetic construct
  REGION 1..7: note = Description of Artificial Sequence: Synthetic peptide
WASTRES

SEQ ID NO: 9955 - DNA, 21 bp, synthetic construct
  misc_feature 1..21: note = Description of Artificial Sequence: Synthetic oligonucleotide
  source 1..21: mol_type = other DNA
ggtgcatccagccggtccact

SEQ ID NO: 9956 - protein, 7 aa, synthetic construct
  REGION 1..7: note = Description of Artificial Sequence: Synthetic peptide
GASSRST

SEQ ID NO: 9957 - DNA, 21 bp, synthetic construct
  misc_feature 1..21: note = Description of Artificial Sequence: Synthetic oligonucleotide
  source 1..21: mol_type = other DNA
ggtgcatctgccaggaccact

SEQ ID NO: 9958 - protein, 7 aa, synthetic construct
  REGION 1..7: note = Description of Artificial Sequence: Synthetic peptide
GASARTT

SEQ ID NO: 9959 - DNA, 21 bp, synthetic construct
  misc_feature 1..21: note = Description of Artificial Sequence: Synthetic oligonucleotide
  source 1..21: mol_type = other DNA
ggtgcatccagccggtccact

SEQ ID NO: 9960 - protein, 7 aa, synthetic construct
  REGION 1..7: note = Description of Artificial Sequence: Synthetic peptide
GASSRST

SEQ ID NO: 9961 - DNA, 21 bp, synthetic construct
  misc_feature 1..21: note = Description of Artificial Sequence: Synthetic oligonucleotide
  source 1..21: mol_type = other DNA
gctgcatccagtttgcacagt

SEQ ID NO: 9962 - protein, 7 aa, synthetic construct
  REGION 1..7: note = Description of Artificial Sequence: Synthetic peptide
AASSLHS

SEQ ID NO: 9963 - DNA, 21 bp, synthetic construct
  misc_feature 1..21: note = Description of Artificial Sequence: Synthetic oligonucleotide
  source 1..21: mol_type = other DNA
ggtgcatccagccggtccact

SEQ ID NO: 9964 - protein, 7 aa, synthetic construct
  REGION 1..7: note = Description of Artificial Sequence: Synthetic peptide
GASSRST

SEQ ID NO: 9965 - DNA, 21 bp, synthetic construct
  misc_feature 1..21: note = Description of Artificial Sequence: Synthetic oligonucleotide
  source 1..21: mol_type = other DNA
ggtgcatccaccagggcctct

SEQ ID NO: 9966 - protein, 7 aa, synthetic construct
  REGION 1..7: note = Description of Artificial Sequence: Synthetic peptide
GASTRAS

SEQ ID NO: 9967 - DNA, 21 bp, synthetic construct
  misc_feature 1..21: note = Description of Artificial Sequence: Synthetic oligonucleotide
  source 1..21: mol_type = other DNA
tgggcatctacccggaaatcc

SEQ ID NO: 9968 - protein, 7 aa, synthetic construct
  REGION 1..7: note = Description of Artificial Sequence: Synthetic peptide
WASTRKS

SEQ ID NO: 9969 - DNA, 21 bp, synthetic construct
  misc_feature 1..21: note = Description of Artificial Sequence: Synthetic oligonucleotide
  source 1..21: mol_type = other DNA
ggtgcatccagccggtccact

SEQ ID NO: 9970 - protein, 7 aa, synthetic construct
  REGION 1..7: note = Description of Artificial Sequence: Synthetic peptide
GASSRST

SEQ ID NO: 9971 - DNA, 21 bp, synthetic construct
  misc_feature 1..21: note = Description of Artificial Sequence: Synthetic oligonucleotide
  source 1..21: mol_type = other DNA
tgggcatctacccggaaatcc

SEQ ID NO: 9972 - protein, 7 aa, synthetic construct
  REGION 1..7: note = Description of Artificial Sequence: Synthetic peptide
WASTRKS

SEQ ID NO: 9973 - DNA, 21 bp, synthetic construct
  misc_feature 1..21: note = Description of Artificial Sequence: Synthetic oligonucleotide
  source 1..21: mol_type = other DNA
ggtgcatccagccggtccacg

SEQ ID NO: 9974 - protein, 7 aa, synthetic construct
  REGION 1..7: note = Description of Artificial Sequence: Synthetic peptide
GASSRST

SEQ ID NO: 9975 - DNA, 21 bp, synthetic construct
  misc_feature 1..21: note = Description of Artificial Sequence: Synthetic oligonucleotide
  source 1..21: mol_type = other DNA
tgggcatctacccgggaatcc

SEQ ID NO: 9976 - protein, 7 aa, synthetic construct
  REGION 1..7: note = Description of Artificial Sequence: Synthetic peptide
WASTRES

SEQ ID NO: 9977 - DNA, 21 bp, synthetic construct
  misc_feature 1..21: note = Description of Artificial Sequence: Synthetic oligonucleotide
  source 1..21: mol_type = other DNA
tgggcatctacccgggaatcc

SEQ ID NO: 9978 - protein, 7 aa, synthetic construct
  REGION 1..7: note = Description of Artificial Sequence: Synthetic peptide
WASTRES

SEQ ID NO: 9979 - DNA, 21 bp, synthetic construct
  misc_feature 1..21: note = Description of Artificial Sequence: Synthetic oligonucleotide
  source 1..21: mol_type = other DNA
gctgcatccagtttgcaaagt

SEQ ID NO: 9980 - protein, 7 aa, synthetic construct
  REGION 1..7: note = Description of Artificial Sequence: Synthetic peptide
AASSLQS

SEQ ID NO: 9981 - DNA, 21 bp, synthetic construct
  misc_feature 1..21: note = Description of Artificial Sequence: Synthetic oligonucleotide
  source 1..21: mol_type = other DNA
ggtgcatccagccggtccact

SEQ ID NO: 9982 - protein, 7 aa, synthetic construct
  REGION 1..7: note = Description of Artificial Sequence: Synthetic peptide
GASSRST

SEQ ID NO: 9983 - DNA, 21 bp, synthetic construct
  misc_feature 1..21: note = Description of Artificial Sequence: Synthetic oligonucleotide
  source 1..21: mol_type = other DNA
ggtgcatccagccggtccact

SEQ ID NO: 9984 - protein, 7 aa, synthetic construct
  REGION 1..7: note = Description of Artificial Sequence: Synthetic peptide
GASSRST

SEQ ID NO: 9985 - DNA, 21 bp, synthetic construct
  misc_feature 1..21: note = Description of Artificial Sequence: Synthetic oligonucleotide
  source 1..21: mol_type = other DNA
ggtgcatccagccggtccact

SEQ ID NO: 9986 - protein, 7 aa, synthetic construct
  REGION 1..7: note = Description of Artificial Sequence: Synthetic peptide
GASSRST

SEQ ID NO: 9987 - DNA, 21 bp, synthetic construct
  misc_feature 1..21: note = Description of Artificial Sequence: Synthetic oligonucleotide
  source 1..21: mol_type = other DNA
tgggcatttactcggaaatcc

SEQ ID NO: 9988 - protein, 7 aa, synthetic construct
  REGION 1..7: note = Description of Artificial Sequence: Synthetic peptide
WAFTRKS

SEQ ID NO: 9989 - DNA, 21 bp, synthetic construct
  misc_feature 1..21: note = Description of Artificial Sequence: Synthetic oligonucleotide
  source 1..21: mol_type = other DNA
ggtgcatccagccgggccact

SEQ ID NO: 9990 - protein, 7 aa, synthetic construct
  REGION 1..7: note = Description of Artificial Sequence: Synthetic peptide
GASSRAT

SEQ ID NO: 9991 - DNA, 21 bp, synthetic construct
  misc_feature 1..21: note = Description of Artificial Sequence: Synthetic oligonucleotide
  source 1..21: mol_type = other DNA
ttgggttctaatcgggcctcc

SEQ ID NO: 9992 - protein, 7 aa, synthetic construct
  REGION 1..7: note = Description of Artificial Sequence: Synthetic peptide
LGSNRAS

SEQ ID NO: 9993 - DNA, 21 bp, synthetic construct
  misc_feature 1..21: note = Description of Artificial Sequence: Synthetic oligonucleotide
  source 1..21: mol_type = other DNA
ggtgcatccagccggtccact

SEQ ID NO: 9994 - protein, 7 aa, synthetic construct
  REGION 1..7: note = Description of Artificial Sequence: Synthetic peptide
GASSRST

SEQ ID NO: 9995 - DNA, 21 bp, synthetic construct
  misc_feature 1..21: note = Description of Artificial Sequence: Synthetic oligonucleotide
  source 1..21: mol_type = other DNA
ggtgcattcagcagggccact

SEQ ID NO: 9996 - protein, 7 aa, synthetic construct
  REGION 1..7: note = Description of Artificial Sequence: Synthetic peptide
GAFSRAT

SEQ ID NO: 9997 - DNA, 21 bp, synthetic construct
  misc_feature 1..21: note = Description of Artificial Sequence: Synthetic oligonucleotide
  source 1..21: mol_type = other DNA
ggtgcatccagccggtccact

SEQ ID NO: 9998 - protein, 7 aa, synthetic construct
  REGION 1..7: note = Description of Artificial Sequence: Synthetic peptide
GASSRST

SEQ ID NO: 9999 - DNA, 21 bp, synthetic construct
  misc_feature 1..21: note = Description of Artificial Sequence: Synthetic oligonucleotide
  source 1..21: mol_type = other DNA
ggtgcatctgccaggaccact

SEQ ID NO: 10000 - protein, 7 aa, synthetic construct
  REGION 1..7: note = Description of Artificial Sequence: Synthetic peptide
GASARTT

SEQ ID NO: 10001 - DNA, 21 bp, synthetic construct
  misc_feature 1..21: note = Description of Artificial Sequence: Synthetic oligonucleotide
  source 1..21: mol_type = other DNA
ggtgcatccagccggtccact

SEQ ID NO: 10002 - protein, 7 aa, synthetic construct
  REGION 1..7: note = Description of Artificial Sequence: Synthetic peptide
GASSRST

SEQ ID NO: 10003 - DNA, 21 bp, synthetic construct
  misc_feature 1..21: note = Description of Artificial Sequence: Synthetic oligonucleotide
  source 1..21: mol_type = other DNA
ggtgcatccagccgggccact

SEQ ID NO: 10004 - protein, 7 aa, synthetic construct
  REGION 1..7: note = Description of Artificial Sequence: Synthetic peptide
GASSRAT

SEQ ID NO: 10005 - DNA, 21 bp, synthetic construct
  misc_feature 1..21: note = Description of Artificial Sequence: Synthetic oligonucleotide
  source 1..21: mol_type = other DNA
ggtgcatccagccgggccact

SEQ ID NO: 10006 - protein, 7 aa, synthetic construct
  REGION 1..7: note = Description of Artificial Sequence: Synthetic peptide
GASSRAT

SEQ ID NO: 10007 - DNA, 21 bp, synthetic construct
  misc_feature 1..21: note = Description of Artificial Sequence: Synthetic oligonucleotide
  source 1..21: mol_type = other DNA
attgcatccagtttgcaaagt

SEQ ID NO: 10008 - protein, 7 aa, synthetic construct
  REGION 1..7: note = Description of Artificial Sequence: Synthetic peptide
IASSLQS

SEQ ID NO: 10009 - DNA, 21 bp, synthetic construct
  misc_feature 1..21: note = Description of Artificial Sequence: Synthetic oligonucleotide
  source 1..21: mol_type = other DNA
tggacatctacccgggaatcc

SEQ ID NO: 10010 - protein, 7 aa, synthetic construct
  REGION 1..7: note = Description of Artificial Sequence: Synthetic peptide
WTSTRES

SEQ ID NO: 10011 - DNA, 21 bp, synthetic construct
  misc_feature 1..21: note = Description of Artificial Sequence: Synthetic oligonucleotide
  source 1..21: mol_type = other DNA
tgggcatctacgcgggagtcc

SEQ ID NO: 10012 - protein, 7 aa, synthetic construct
  REGION 1..7: note = Description of Artificial Sequence: Synthetic peptide
WASTRES

SEQ ID NO: 10013 - DNA, 21 bp, synthetic construct
  misc_feature 1..21: note = Description of Artificial Sequence: Synthetic oligonucleotide
  source 1..21: mol_type = other DNA
ggtgcatccagccggtccact

SEQ ID NO: 10014 - protein, 7 aa, synthetic construct
  REGION 1..7: note = Description of Artificial Sequence: Synthetic peptide
GASSRST

SEQ ID NO: 10015 - DNA, 21 bp, synthetic construct
  misc_feature 1..21: note = Description of Artificial Sequence: Synthetic oligonucleotide
  source 1..21: mol_type = other DNA
ttgggttctaatcgggcctcc

SEQ ID NO: 10016 - protein, 7 aa, synthetic construct
  REGION 1..7: note = Description of Artificial Sequence: Synthetic peptide
LGSNRAS

SEQ ID NO: 10017 - DNA, 21 bp, synthetic construct
  misc_feature 1..21: note = Description of Artificial Sequence: Synthetic oligonucleotide
  source 1..21: mol_type = other DNA
tgggcatctacccgggaatcc

SEQ ID NO: 10018 - protein, 7 aa, synthetic construct
  REGION 1..7: note = Description of Artificial Sequence: Synthetic peptide
WASTRES

SEQ ID NO: 10019 - DNA, 21 bp, synthetic construct
  misc_feature 1..21: note = Description of Artificial Sequence: Synthetic oligonucleotide
  source 1..21: mol_type = other DNA
ggtgcatccagccggtccact

SEQ ID NO: 10020 - protein, 7 aa, synthetic construct
  REGION 1..7: note = Description of Artificial Sequence: Synthetic peptide
GASSRST

SEQ ID NO: 10021 - DNA, 21 bp, synthetic construct
  misc_feature 1..21: note = Description of Artificial Sequence: Synthetic oligonucleotide
  source 1..21: mol_type = other DNA
ggtgcatccagccggtccact

SEQ ID NO: 10022 - protein, 7 aa, synthetic construct
  REGION 1..7: note = Description of Artificial Sequence: Synthetic peptide
GASSRST

SEQ ID NO: 10023 - DNA, 21 bp, synthetic construct
  misc_feature 1..21: note = Description of Artificial Sequence: Synthetic oligonucleotide
  source 1..21: mol_type = other DNA
ggtgcatccagccggtccact

SEQ ID NO: 10024 - protein, 7 aa, synthetic construct
  REGION 1..7: note = Description of Artificial Sequence: Synthetic peptide
GASSRST

SEQ ID NO: 10025 - DNA, 21 bp, synthetic construct
  misc_feature 1..21: note = Description of Artificial Sequence: Synthetic oligonucleotide
  source 1..21: mol_type = other DNA
ggtgcatccagccggtccact

SEQ ID NO: 10026 - protein, 7 aa, synthetic construct
  REGION 1..7: note = Description of Artificial Sequence: Synthetic peptide
GASSRST

SEQ ID NO: 10027 - DNA, 21 bp, synthetic construct
  misc_feature 1..21: note = Description of Artificial Sequence: Synthetic oligonucleotide
  source 1..21: mol_type = other DNA
tgggcatctacccgggaatcc

SEQ ID NO: 10028 - protein, 7 aa, synthetic construct
  REGION 1..7: note = Description of Artificial Sequence: Synthetic peptide
WASTRES

SEQ ID NO: 10029 - DNA, 21 bp, synthetic construct
  misc_feature 1..21: note = Description of Artificial Sequence: Synthetic oligonucleotide
  source 1..21: mol_type = other DNA
ggtgcatccagccgggccacg

SEQ ID NO: 10030 - protein, 7 aa, synthetic construct
  REGION 1..7: note = Description of Artificial Sequence: Synthetic peptide
GASSRAT

SEQ ID NO: 10031 - DNA, 21 bp, synthetic construct
  misc_feature 1..21: note = Description of Artificial Sequence: Synthetic oligonucleotide
  source 1..21: mol_type = other DNA
ggtgcatccagcagggccact

SEQ ID NO: 10032 - protein, 7 aa, synthetic construct
  REGION 1..7: note = Description of Artificial Sequence: Synthetic peptide
GASSRAT

SEQ ID NO: 10033 - DNA, 21 bp, synthetic construct
  misc_feature 1..21: note = Description of Artificial Sequence: Synthetic oligonucleotide
  source 1..21: mol_type = other DNA
ttgggttctaatcgggcctcc

SEQ ID NO: 10034 - protein, 7 aa, synthetic construct
  REGION 1..7: note = Description of Artificial Sequence: Synthetic peptide
LGSNRAS

SEQ ID NO: 10035 - DNA, 21 bp, synthetic construct
  misc_feature 1..21: note = Description of Artificial Sequence: Synthetic oligonucleotide
  source 1..21: mol_type = other DNA
ggtgcatccaccagggccact

SEQ ID NO: 10036 - protein, 7 aa, synthetic construct
  REGION 1..7: note = Description of Artificial Sequence: Synthetic peptide
GASTRAT

SEQ ID NO: 10037 - DNA, 21 bp, synthetic construct
  misc_feature 1..21: note = Description of Artificial Sequence: Synthetic oligonucleotide
  source 1..21: mol_type = other DNA
ggtgcatccagccggtccact

SEQ ID NO: 10038 - protein, 7 aa, synthetic construct
  REGION 1..7: note = Description of Artificial Sequence: Synthetic peptide
GASSRST

SEQ ID NO: 10039 - DNA, 21 bp, synthetic construct
  misc_feature 1..21: note = Description of Artificial Sequence: Synthetic oligonucleotide
  source 1..21: mol_type = other DNA
tggacatctacccgggaatcc

SEQ ID NO: 10040 - protein, 7 aa, synthetic construct
  REGION 1..7: note = Description of Artificial Sequence: Synthetic peptide
WTSTRES

SEQ ID NO: 10041 - DNA, 21 bp, synthetic construct
  misc_feature 1..21: note = Description of Artificial Sequence: Synthetic oligonucleotide
  source 1..21: mol_type = other DNA
ggtgcatccagccggtccact

SEQ ID NO: 10042 - protein, 7 aa, synthetic construct
  REGION 1..7: note = Description of Artificial Sequence: Synthetic peptide
GASSRST

SEQ ID NO: 10043 - DNA, 21 bp, synthetic construct
  misc_feature 1..21: note = Description of Artificial Sequence: Synthetic oligonucleotide
  source 1..21: mol_type = other DNA
tgggcatctacccgggaatcc

SEQ ID NO: 10044 - protein, 7 aa, synthetic construct
  REGION 1..7: note = Description of Artificial Sequence: Synthetic peptide
WASTRES

SEQ ID NO: 10045 - DNA, 21 bp, synthetic construct
  misc_feature 1..21: note = Description of Artificial Sequence: Synthetic oligonucleotide
  source 1..21: mol_type = other DNA
ggtgcatccagccgggccact

SEQ ID NO: 10046 - protein, 7 aa, synthetic construct
  REGION 1..7: note = Description of Artificial Sequence: Synthetic peptide
GASSRAT

SEQ ID NO: 10047 - DNA, 21 bp, synthetic construct
  misc_feature 1..21: note = Description of Artificial Sequence: Synthetic oligonucleotide
  source 1..21: mol_type = other DNA
ggtgcatccagccggtccact

SEQ ID NO: 10048 - protein, 7 aa, synthetic construct
  REGION 1..7: note = Description of Artificial Sequence: Synthetic peptide
GASSRST

SEQ ID NO: 10049 - DNA, 21 bp, synthetic construct
  misc_feature 1..21: note = Description of Artificial Sequence: Synthetic oligonucleotide
  source 1..21: mol_type = other DNA
ggtgcatccagcagggcccct

SEQ ID NO: 10050 - protein, 7 aa, synthetic construct
  REGION 1..7: note = Description of Artificial Sequence: Synthetic peptide
GASSRAP

SEQ ID NO: 10051 - DNA, 21 bp, synthetic construct
  misc_feature 1..21: note = Description of Artificial Sequence: Synthetic oligonucleotide
  source 1..21: mol_type = other DNA
ggtgcatccagcagggccact

SEQ ID NO: 10052 - protein, 7 aa, synthetic construct
  REGION 1..7: note = Description of Artificial Sequence: Synthetic peptide
GASSRAT

SEQ ID NO: 10053 - DNA, 21 bp, synthetic construct
  misc_feature 1..21: note = Description of Artificial Sequence: Synthetic oligonucleotide
  source 1..21: mol_type = other DNA
gctgcatccagtttgcaaagt

SEQ ID NO: 10054 - protein, 7 aa, synthetic construct
  REGION 1..7: note = Description of Artificial Sequence: Synthetic peptide
AASSLQS

SEQ ID NO: 10055 - DNA, 21 bp, synthetic construct
  misc_feature 1..21: note = Description of Artificial Sequence: Synthetic oligonucleotide
  source 1..21: mol_type = other DNA
tggacatctacccgggaatcc

SEQ ID NO: 10056 - protein, 7 aa, synthetic construct
  REGION 1..7: note = Description of Artificial Sequence: Synthetic peptide
WTSTRES

SEQ ID NO: 10057 - DNA, 21 bp, synthetic construct
  misc_feature 1..21: note = Description of Artificial Sequence: Synthetic oligonucleotide
  source 1..21: mol_type = other DNA
tgggcatctacccggaaatcc

SEQ ID NO: 10058 - protein, 7 aa, synthetic construct
  REGION 1..7: note = Description of Artificial Sequence: Synthetic peptide
WASTRKS

SEQ ID NO: 10059 - DNA, 21 bp, synthetic construct
  misc_feature 1..21: note = Description of Artificial Sequence: Synthetic oligonucleotide
  source 1..21: mol_type = other DNA
tgggcatctacccgggaatcc

SEQ ID NO: 10060 - protein, 7 aa, synthetic construct
  REGION 1..7: note = Description of Artificial Sequence: Synthetic peptide
WASTRES

SEQ ID NO: 10061 - DNA, 21 bp, synthetic construct
  misc_feature 1..21: note = Description of Artificial Sequence: Synthetic oligonucleotide
  source 1..21: mol_type = other DNA
tgggcatctacccgggaatcc

SEQ ID NO: 10062 - protein, 7 aa, synthetic construct
  REGION 1..7: note = Description of Artificial Sequence: Synthetic peptide
WASTRES

SEQ ID NO: 10063 - DNA, 21 bp, synthetic construct
  misc_feature 1..21: note = Description of Artificial Sequence: Synthetic oligonucleotide
  source 1..21: mol_type = other DNA
ggtgcatccagccggtccact

SEQ ID NO: 10064 - protein, 7 aa, synthetic construct
  REGION 1..7: note = Description of Artificial Sequence: Synthetic peptide
GASSRST

SEQ ID NO: 10065 - DNA, 21 bp, synthetic construct
  misc_feature 1..21: note = Description of Artificial Sequence: Synthetic oligonucleotide
  source 1..21: mol_type = other DNA
ggtgcatccagccgggccact

SEQ ID NO: 10066 - protein, 7 aa, synthetic construct
  REGION 1..7: note = Description of Artificial Sequence: Synthetic peptide
GASSRAT

SEQ ID NO: 10067 - DNA, 21 bp, synthetic construct
  misc_feature 1..21: note = Description of Artificial Sequence: Synthetic oligonucleotide
  source 1..21: mol_type = other DNA
ggtgcatccaccagggccact

SEQ ID NO: 10068 - protein, 7 aa, synthetic construct
  REGION 1..7: note = Description of Artificial Sequence: Synthetic peptide
GASTRAT

SEQ ID NO: 10069 - DNA, 21 bp, synthetic construct
  misc_feature 1..21: note = Description of Artificial Sequence: Synthetic oligonucleotide
  source 1..21: mol_type = other DNA
tgggcatctacccgggaatcc

SEQ ID NO: 10070 - protein, 7 aa, synthetic construct
  REGION 1..7: note = Description of Artificial Sequence: Synthetic peptide
WASTRES

SEQ ID NO: 10071 - DNA, 21 bp, synthetic construct
  misc_feature 1..21: note = Description of Artificial Sequence: Synthetic oligonucleotide
  source 1..21: mol_type = other DNA
ggtgcatccagccggtccact

SEQ ID NO: 10072 - protein, 7 aa, synthetic construct
  REGION 1..7: note = Description of Artificial Sequence: Synthetic peptide
GASSRST

SEQ ID NO: 10073 - DNA, 21 bp, synthetic construct
  misc_feature 1..21: note = Description of Artificial Sequence: Synthetic oligonucleotide
  source 1..21: mol_type = other DNA
ggtgcatccagccggtccact

SEQ ID NO: 10074 - protein, 7 aa, synthetic construct
  REGION 1..7: note = Description of Artificial Sequence: Synthetic peptide
GASSRST

SEQ ID NO: 10075 - DNA, 21 bp, synthetic construct
  misc_feature 1..21: note = Description of Artificial Sequence: Synthetic oligonucleotide
  source 1..21: mol_type = other DNA
ggtgcatccagccgggccact

SEQ ID NO: 10076 - protein, 7 aa, synthetic construct
  REGION 1..7: note = Description of Artificial Sequence: Synthetic peptide
GASSRAT

SEQ ID NO: 10077 - DNA, 21 bp, synthetic construct
  misc_feature 1..21: note = Description of Artificial Sequence: Synthetic oligonucleotide
  source 1..21: mol_type = other DNA
tgggcatctacccgggaatcc

SEQ ID NO: 10078 - protein, 7 aa, synthetic construct
  REGION 1..7: note = Description of Artificial Sequence: Synthetic peptide
WASTRES

SEQ ID NO: 10079 - DNA, 21 bp, synthetic construct
  misc_feature 1..21: note = Description of Artificial Sequence: Synthetic oligonucleotide
  source 1..21: mol_type = other DNA
ggtgcatccaccagggcctct

SEQ ID NO: 10080 - protein, 7 aa, synthetic construct
  REGION 1..7: note = Description of Artificial Sequence: Synthetic peptide
GASTRAS

SEQ ID NO: 10081 - DNA, 21 bp, synthetic construct
  misc_feature 1..21: note = Description of Artificial Sequence: Synthetic oligonucleotide
  source 1..21: mol_type = other DNA
tgggcatctacctgggaatcc

SEQ ID NO: 10082 - protein, 7 aa, synthetic construct
  REGION 1..7: note = Description of Artificial Sequence: Synthetic peptide
WASTWES

SEQ ID NO: 10083 - DNA, 21 bp, synthetic construct
  misc_feature 1..21: note = Description of Artificial Sequence: Synthetic oligonucleotide
  source 1..21: mol_type = other DNA
gctgcatccactttgcaaagt

SEQ ID NO: 10084 - protein, 7 aa, synthetic construct
  REGION 1..7: note = Description of Artificial Sequence: Synthetic peptide
AASTLQS

SEQ ID NO: 10085 - DNA, 21 bp, synthetic construct
  misc_feature 1..21: note = Description of Artificial Sequence: Synthetic oligonucleotide
  source 1..21: mol_type = other DNA
ggtgtatccagtttgcaaagt

SEQ ID NO: 10086 - protein, 7 aa, synthetic construct
  REGION 1..7: note = Description of Artificial Sequence: Synthetic peptide
GVSSLQS

SEQ ID NO: 10087 - DNA, 21 bp, synthetic construct
  misc_feature 1..21: note = Description of Artificial Sequence: Synthetic oligonucleotide
  source 1..21: mol_type = other DNA
tgggcatctacccgggaatcc

SEQ ID NO: 10088 - protein, 7 aa, synthetic construct
  REGION 1..7: note = Description of Artificial Sequence: Synthetic peptide
WASTRES

SEQ ID NO: 10089 - DNA, 21 bp, synthetic construct
  misc_feature 1..21: note = Description of Artificial Sequence: Synthetic oligonucleotide
  source 1..21: mol_type = other DNA
tgggcatctatccgggaatcc

SEQ ID NO: 10090 - protein, 7 aa, synthetic construct
  REGION 1..7: note = Description of Artificial Sequence: Synthetic peptide
WASIRES

SEQ ID NO: 10091 - DNA, 21 bp, synthetic construct
  misc_feature 1..21: note = Description of Artificial Sequence: Synthetic oligonucleotide
  source 1..21: mol_type = other DNA
gctgcttccagtttgcaaagt

SEQ ID NO: 10092 - protein, 7 aa, synthetic construct
  REGION 1..7: note = Description of Artificial Sequence: Synthetic peptide
AASSLQS

SEQ ID NO: 10093 - DNA, 21 bp, synthetic construct
  misc_feature 1..21: note = Description of Artificial Sequence: Synthetic oligonucleotide
  source 1..21: mol_type = other DNA
tggacatctacccgggaatcc

SEQ ID NO: 10094 - protein, 7 aa, synthetic construct
  REGION 1..7: note = Description of Artificial Sequence: Synthetic peptide
WTSTRES

SEQ ID NO: 10095 - DNA, 21 bp, synthetic construct
  misc_feature 1..21: note = Description of Artificial Sequence: Synthetic oligonucleotide
  source 1..21: mol_type = other DNA
ggtgcatccagccggtccact

SEQ ID NO: 10096 - protein, 7 aa, synthetic construct
  REGION 1..7: note = Description of Artificial Sequence: Synthetic peptide
GASSRST

SEQ ID NO: 10097 - DNA, 21 bp, synthetic construct
  misc_feature 1..21: note = Description of Artificial Sequence: Synthetic oligonucleotide
  source 1..21: mol_type = other DNA
tgggcatctacccgggaatcc

SEQ ID NO: 10098 - protein, 7 aa, synthetic construct
  REGION 1..7: note = Description of Artificial Sequence: Synthetic peptide
WASTRES

SEQ ID NO: 10099 - DNA, 21 bp, synthetic construct
  misc_feature 1..21: note = Description of Artificial Sequence: Synthetic oligonucleotide
  source 1..21: mol_type = other DNA
ggtgcatccagccgggccact

SEQ ID NO: 10100 - protein, 7 aa, synthetic construct
  REGION 1..7: note = Description of Artificial Sequence: Synthetic peptide
GASSRAT

SEQ ID NO: 10101 - DNA, 21 bp, synthetic construct
  misc_feature 1..21: note = Description of Artificial Sequence: Synthetic oligonucleotide
  source 1..21: mol_type = other DNA
gctgcatccagtttgcaaagt

SEQ ID NO: 10102 - protein, 7 aa, synthetic construct
  REGION 1..7: note = Description of Artificial Sequence: Synthetic peptide
AASSLQS

SEQ ID NO: 10103 - DNA, 21 bp, synthetic construct
  misc_feature 1..21: note = Description of Artificial Sequence: Synthetic oligonucleotide
  source 1..21: mol_type = other DNA
gctgcatccagtttgcaaagt

SEQ ID NO: 10104 - protein, 7 aa, synthetic construct
  REGION 1..7: note = Description of Artificial Sequence: Synthetic peptide
AASSLQS

SEQ ID NO: 10105 - DNA, 21 bp, synthetic construct
  misc_feature 1..21: note = Description of Artificial Sequence: Synthetic oligonucleotide
  source 1..21: mol_type = other DNA
actacatccagtttgcaaagt

SEQ ID NO: 10106 - protein, 7 aa, synthetic construct
  REGION 1..7: note = Description of Artificial Sequence: Synthetic peptide
TTSSLQS

SEQ ID NO: 10107 - DNA, 21 bp, synthetic construct
  misc_feature 1..21: note = Description of Artificial Sequence: Synthetic oligonucleotide
  source 1..21: mol_type = other DNA
gaagtttccaaccggttctct

SEQ ID NO: 10108 - protein, 7 aa, synthetic construct
  REGION 1..7: note = Description of Artificial Sequence: Synthetic peptide
EVSNRFS

SEQ ID NO: 10109 - DNA, 21 bp, synthetic construct
  misc_feature 1..21: note = Description of Artificial Sequence: Synthetic oligonucleotide
  source 1..21: mol_type = other DNA
tgggcatctacccgggaatcc

SEQ ID NO: 10110 - protein, 7 aa, synthetic construct
  REGION 1..7: note = Description of Artificial Sequence: Synthetic peptide
WASTRES

SEQ ID NO: 10111 - DNA, 21 bp, synthetic construct
  misc_feature 1..21: note = Description of Artificial Sequence: Synthetic oligonucleotide
  source 1..21: mol_type = other DNA
ggtgtatctagtcgggccact

SEQ ID NO: 10112 - protein, 7 aa, synthetic construct
  REGION 1..7: note = Description of Artificial Sequence: Synthetic peptide
GVSSRAT

SEQ ID NO: 10113 - DNA, 21 bp, synthetic construct
  misc_feature 1..21: note = Description of Artificial Sequence: Synthetic oligonucleotide
  source 1..21: mol_type = other DNA
gctgcatccagtttgcaaggt

SEQ ID NO: 10114 - protein, 7 aa, synthetic construct
  REGION 1..7: note = Description of Artificial Sequence: Synthetic peptide
AASSLQG

SEQ ID NO: 10115 - DNA, 21 bp, synthetic construct
  misc_feature 1..21: note = Description of Artificial Sequence: Synthetic oligonucleotide
  source 1..21: mol_type = other DNA
tgggcatctacccggaaatcc

SEQ ID NO: 10116 - protein, 7 aa, synthetic construct
  REGION 1..7: note = Description of Artificial Sequence: Synthetic peptide
WASTRKS

SEQ ID NO: 10117 - DNA, 21 bp, synthetic construct
  misc_feature 1..21: note = Description of Artificial Sequence: Synthetic oligonucleotide
  source 1..21: mol_type = other DNA
actacatccagtttgcaaagt

SEQ ID NO: 10118 - protein, 7 aa, synthetic construct
  REGION 1..7: note = Description of Artificial Sequence: Synthetic peptide
TTSSLQS

SEQ ID NO: 10119 - DNA, 21 bp, synthetic construct
  misc_feature 1..21: note = Description of Artificial Sequence: Synthetic oligonucleotide
  source 1..21: mol_type = other DNA
tgggcatctacccgggaatcc

SEQ ID NO: 10120 - protein, 7 aa, synthetic construct
  REGION 1..7: note = Description of Artificial Sequence: Synthetic peptide
WASTRES

SEQ ID NO: 10121 - DNA, 21 bp, synthetic construct
  misc_feature 1..21: note = Description of Artificial Sequence: Synthetic oligonucleotide
  source 1..21: mol_type = other DNA
gctgcatccagtttgcaaagt

SEQ ID NO: 10122 - protein, 7 aa, synthetic construct
  REGION 1..7: note = Description of Artificial Sequence: Synthetic peptide
AASSLQS

SEQ ID NO: 10123 - DNA, 21 bp, synthetic construct
  misc_feature 1..21: note = Description of Artificial Sequence: Synthetic oligonucleotide
  source 1..21: mol_type = other DNA
gctgcatccagtttgcaaagt

SEQ ID NO: 10124 - protein, 7 aa, synthetic construct
  REGION 1..7: note = Description of Artificial Sequence: Synthetic peptide
AASSLQS

SEQ ID NO: 10125 - DNA, 21 bp, synthetic construct
  misc_feature 1..21: note = Description of Artificial Sequence: Synthetic oligonucleotide
  source 1..21: mol_type = other DNA
gaagtttcccaccgggtctct

SEQ ID NO: 10126 - protein, 7 aa, synthetic construct
  REGION 1..7: note = Description of Artificial Sequence: Synthetic peptide
EVSHRVS

SEQ ID NO: 10127 - DNA, 21 bp, synthetic construct
  misc_feature 1..21: note = Description of Artificial Sequence: Synthetic oligonucleotide
  source 1..21: mol_type = other DNA
ggtgcatccagcagggccact

SEQ ID NO: 10128 - protein, 7 aa, synthetic construct
  REGION 1..7: note = Description of Artificial Sequence: Synthetic peptide
GASSRAT

SEQ ID NO: 10129 - DNA, 21 bp, synthetic construct
  misc_feature 1..21: note = Description of Artificial Sequence: Synthetic oligonucleotide
  source 1..21: mol_type = other DNA
ggtgcatccagcagggccact

SEQ ID NO: 10130 - protein, 7 aa, synthetic construct
  REGION 1..7: note = Description of Artificial Sequence: Synthetic peptide
GASSRAT

SEQ ID NO: 10131 - DNA, 21 bp, synthetic construct
  misc_feature 1..21: note = Description of Artificial Sequence: Synthetic oligonucleotide
  source 1..21: mol_type = other DNA
tgggcatctacccgggaatcc

SEQ ID NO: 10132 - protein, 7 aa, synthetic construct
  REGION 1..7: note = Description of Artificial Sequence: Synthetic peptide
WASTRES

SEQ ID NO: 10133 - DNA, 21 bp, synthetic construct
  misc_feature 1..21: note = Description of Artificial Sequence: Synthetic oligonucleotide
  source 1..21: mol_type = other DNA
tgggcatctacccgggaatcc

SEQ ID NO: 10134 - protein, 7 aa, synthetic construct
  REGION 1..7: note = Description of Artificial Sequence: Synthetic peptide
WASTRES

SEQ ID NO: 10135 - DNA, 21 bp, synthetic construct
  misc_feature 1..21: note = Description of Artificial Sequence: Synthetic oligonucleotide
  source 1..21: mol_type = other DNA
gctgcatccagtttgcagagt

SEQ ID NO: 10136 - protein, 7 aa, synthetic construct
  REGION 1..7: note = Description of Artificial Sequence: Synthetic peptide
AASSLQS

SEQ ID NO: 10137 - DNA, 21 bp, synthetic construct
  misc_feature 1..21: note = Description of Artificial Sequence: Synthetic oligonucleotide
  source 1..21: mol_type = other DNA
tgggcatctgcccgggaatcc

SEQ ID NO: 10138 - protein, 7 aa, synthetic construct
  REGION 1..7: note = Description of Artificial Sequence: Synthetic peptide
WASARES

SEQ ID NO: 10139 - DNA, 21 bp, synthetic construct
  misc_feature 1..21: note = Description of Artificial Sequence: Synthetic oligonucleotide
  source 1..21: mol_type = other DNA
gaagtttccaaccggttctct

SEQ ID NO: 10140 - protein, 7 aa, synthetic construct
  REGION 1..7: note = Description of Artificial Sequence: Synthetic peptide
EVSNRFS

SEQ ID NO: 10141 - DNA, 21 bp, synthetic construct
  misc_feature 1..21: note = Description of Artificial Sequence: Synthetic oligonucleotide
  source 1..21: mol_type = other DNA
ggtgcatccagcagggccact

SEQ ID NO: 10142 - protein, 7 aa, synthetic construct
  REGION 1..7: note = Description of Artificial Sequence: Synthetic peptide
GASSRAT

SEQ ID NO: 10143 - DNA, 21 bp, synthetic construct
  misc_feature 1..21: note = Description of Artificial Sequence: Synthetic oligonucleotide
  source 1..21: mol_type = other DNA
gctgcatccagtttgcaaagt

SEQ ID NO: 10144 - protein, 7 aa, synthetic construct
  REGION 1..7: note = Description of Artificial Sequence: Synthetic peptide
AASSLQS

SEQ ID NO: 10145 - DNA, 21 bp, synthetic construct
  misc_feature 1..21: note = Description of Artificial Sequence: Synthetic oligonucleotide
  source 1..21: mol_type = other DNA
gctgcatccagtttgcaaagt

SEQ ID NO: 10146 - protein, 7 aa, synthetic construct
  REGION 1..7: note = Description of Artificial Sequence: Synthetic peptide
AASSLQS

SEQ ID NO: 10147 - DNA, 21 bp, synthetic construct
  misc_feature 1..21: note = Description of Artificial Sequence: Synthetic oligonucleotide
  source 1..21: mol_type = other DNA
gctgcatccagtttgcaaagt

SEQ ID NO: 10148 - protein, 7 aa, synthetic construct
  REGION 1..7: note = Description of Artificial Sequence: Synthetic peptide
AASSLQS

SEQ ID NO: 10149 - DNA, 21 bp, synthetic construct
  misc_feature 1..21: note = Description of Artificial Sequence: Synthetic oligonucleotide
  source 1..21: mol_type = other DNA
gaagtttcccaccggttctct

SEQ ID NO: 10150 - protein, 7 aa, synthetic construct
  REGION 1..7: note = Description of Artificial Sequence: Synthetic peptide
EVSHRFS

SEQ ID NO: 10151 - DNA, 21 bp, synthetic construct
  misc_feature 1..21: note = Description of Artificial Sequence: Synthetic oligonucleotide
  source 1..21: mol_type = other DNA
gctgcatccagtttgcaaagt

SEQ ID NO: 10152 - protein, 7 aa, synthetic construct
  REGION 1..7: note = Description of Artificial Sequence: Synthetic peptide
AASSLQS

SEQ ID NO: 10153 - DNA, 21 bp, synthetic construct
  misc_feature 1..21: note = Description of Artificial Sequence: Synthetic oligonucleotide
  source 1..21: mol_type = other DNA
tgggcatctacccgggattcc

SEQ ID NO: 10154 - protein, 7 aa, synthetic construct
  REGION 1..7: note = Description of Artificial Sequence: Synthetic peptide
WASTRDS

SEQ ID NO: 10155 - DNA, 21 bp, synthetic construct
  misc_feature 1..21: note = Description of Artificial Sequence: Synthetic oligonucleotide
  source 1..21: mol_type = other DNA
actgcatccagtttacagagt

SEQ ID NO: 10156 - protein, 7 aa, synthetic construct
  REGION 1..7: note = Description of Artificial Sequence: Synthetic peptide
TASSLQS

SEQ ID NO: 10157 - DNA, 21 bp, synthetic construct
  misc_feature 1..21: note = Description of Artificial Sequence: Synthetic oligonucleotide
  source 1..21: mol_type = other DNA
gaagtttcctaccgggtctct

SEQ ID NO: 10158 - protein, 7 aa, synthetic construct
  REGION 1..7: note = Description of Artificial Sequence: Synthetic peptide
EVSYRVS

SEQ ID NO: 10159 - DNA, 21 bp, synthetic construct
  misc_feature 1..21: note = Description of Artificial Sequence: Synthetic oligonucleotide
  source 1..21: mol_type = other DNA
gctgcatccagtttgcaaagt

SEQ ID NO: 10160 - protein, 7 aa, synthetic construct
  REGION 1..7: note = Description of Artificial Sequence: Synthetic peptide
AASSLQS

SEQ ID NO: 10161 - DNA, 21 bp, synthetic construct
  misc_feature 1..21: note = Description of Artificial Sequence: Synthetic oligonucleotide
  source 1..21: mol_type = other DNA
tgggcatctacccggaaatcc

SEQ ID NO: 10162 - protein, 7 aa, synthetic construct
  REGION 1..7: note = Description of Artificial Sequence: Synthetic peptide
WASTRKS

SEQ ID NO: 10163 - DNA, 21 bp, synthetic construct
  misc_feature 1..21: note = Description of Artificial Sequence: Synthetic oligonucleotide
  source 1..21: mol_type = other DNA
attgcatccagtttgcaaagt

SEQ ID NO: 10164 - protein, 7 aa, synthetic construct
  REGION 1..7: note = Description of Artificial Sequence: Synthetic peptide
IASSLQS

SEQ ID NO: 10165 - DNA, 21 bp, synthetic construct
  misc_feature 1..21: note = Description of Artificial Sequence: Synthetic oligonucleotide
  source 1..21: mol_type = other DNA
gaagtttccaaccggttctct

SEQ ID NO: 10166 - protein, 7 aa, synthetic construct
  REGION 1..7: note = Description of Artificial Sequence: Synthetic peptide
EVSNRFS

SEQ ID NO: 10167 - DNA, 21 bp, synthetic construct
  misc_feature 1..21: note = Description of Artificial Sequence: Synthetic oligonucleotide
  source 1..21: mol_type = other DNA
gaagtttcctaccgggtctct

SEQ ID NO: 10168 - protein, 7 aa, synthetic construct
  REGION 1..7: note = Description of Artificial Sequence: Synthetic peptide
EVSYRVS

SEQ ID NO: 10169 - DNA, 21 bp, synthetic construct
  misc_feature 1..21: note = Description of Artificial Sequence: Synthetic oligonucleotide
  source 1..21: mol_type = other DNA
gctgcatccagtttgcaaagt

SEQ ID NO: 10170 - protein, 7 aa, synthetic construct
  REGION 1..7: note = Description of Artificial Sequence: Synthetic peptide
AASSLQS

SEQ ID NO: 10171 - DNA, 21 bp, synthetic construct
  misc_feature 1..21: note = Description of Artificial Sequence: Synthetic oligonucleotide
  source 1..21: mol_type = other DNA
gctgcatccagtttgcaaagt

SEQ ID NO: 10172 - protein, 7 aa, synthetic construct
  REGION 1..7: note = Description of Artificial Sequence: Synthetic peptide
AASSLQS

SEQ ID NO: 10173 - DNA, 21 bp, synthetic construct
  misc_feature 1..21: note = Description of Artificial Sequence: Synthetic oligonucleotide
  source 1..21: mol_type = other DNA
gaagtttcccaccggttctct

SEQ ID NO: 10174 - protein, 7 aa, synthetic construct
  REGION 1..7: note = Description of Artificial Sequence: Synthetic peptide
EVSHRFS

SEQ ID NO: 10175 - DNA, 21 bp, synthetic construct
  misc_feature 1..21: note = Description of Artificial Sequence: Synthetic oligonucleotide
  source 1..21: mol_type = other DNA
gctgcatccaatttgcaaagt

SEQ ID NO: 10176 - protein, 7 aa, synthetic construct
  REGION 1..7: note = Description of Artificial Sequence: Synthetic peptide
AASNLQS

SEQ ID NO: 10177 - DNA, 21 bp, synthetic construct
  misc_feature 1..21: note = Description of Artificial Sequence: Synthetic oligonucleotide
  source 1..21: mol_type = other DNA
tgggcatctacccgggaatcc

SEQ ID NO: 10178 - protein, 7 aa, synthetic construct
  REGION 1..7: note = Description of Artificial Sequence: Synthetic peptide
WASTRES

SEQ ID NO: 10179 - DNA, 21 bp, synthetic construct
  misc_feature 1..21: note = Description of Artificial Sequence: Synthetic oligonucleotide
  source 1..21: mol_type = other DNA
actgcatccagtttgcaaagt

SEQ ID NO: 10180 - protein, 7 aa, synthetic construct
  REGION 1..7: note = Description of Artificial Sequence: Synthetic peptide
TASSLQS

SEQ ID NO: 10181 - DNA, 21 bp, synthetic construct
  misc_feature 1..21: note = Description of Artificial Sequence: Synthetic oligonucleotide
  source 1..21: mol_type = other DNA
tgggcatctaccctgagatcc

SEQ ID NO: 10182 - protein, 7 aa, synthetic construct
  REGION 1..7: note = Description of Artificial Sequence: Synthetic peptide
WASTLRS

SEQ ID NO: 10183 - DNA, 21 bp, synthetic construct
  misc_feature 1..21: note = Description of Artificial Sequence: Synthetic oligonucleotide
  source 1..21: mol_type = other DNA
tggtcatctacccgggaatcc

SEQ ID NO: 10184 - protein, 7 aa, synthetic construct
  REGION 1..7: note = Description of Artificial Sequence: Synthetic peptide
WSSTRES

SEQ ID NO: 10185 - DNA, 21 bp, synthetic construct
  misc_feature 1..21: note = Description of Artificial Sequence: Synthetic oligonucleotide
  source 1..21: mol_type = other DNA
gctgcatccagtttgcaaagt

SEQ ID NO: 10186 - protein, 7 aa, synthetic construct
  REGION 1..7: note = Description of Artificial Sequence: Synthetic peptide
AASSLQS

SEQ ID NO: 10187 - DNA, 21 bp, synthetic construct
  misc_feature 1..21: note = Description of Artificial Sequence: Synthetic oligonucleotide
  source 1..21: mol_type = other DNA
gctgcatccagtttgcaaagt

SEQ ID NO: 10188 - protein, 7 aa, synthetic construct
  REGION 1..7: note = Description of Artificial Sequence: Synthetic peptide
AASSLQS

SEQ ID NO: 10189 - DNA, 21 bp, synthetic construct
  misc_feature 1..21: note = Description of Artificial Sequence: Synthetic oligonucleotide
  source 1..21: mol_type = other DNA
gctgcatccagtttgcaaggt

SEQ ID NO: 10190 - protein, 7 aa, synthetic construct
  REGION 1..7: note = Description of Artificial Sequence: Synthetic peptide
AASSLQG

SEQ ID NO: 10191 - DNA, 21 bp, synthetic construct
  misc_feature 1..21: note = Description of Artificial Sequence: Synthetic oligonucleotide
  source 1..21: mol_type = other DNA
ggtgtatctagtagggccact

SEQ ID NO: 10192 - protein, 7 aa, synthetic construct
  REGION 1..7: note = Description of Artificial Sequence: Synthetic peptide
GVSSRAT

SEQ ID NO: 10193 - DNA, 21 bp, synthetic construct
  misc_feature 1..21: note = Description of Artificial Sequence: Synthetic oligonucleotide
  source 1..21: mol_type = other DNA
gctgcatccagtttgcaaagt

SEQ ID NO: 10194 - protein, 7 aa, synthetic construct
  REGION 1..7: note = Description of Artificial Sequence: Synthetic peptide
AASSLQS

SEQ ID NO: 10195 - DNA, 21 bp, synthetic construct
  misc_feature 1..21: note = Description of Artificial Sequence: Synthetic oligonucleotide
  source 1..21: mol_type = other DNA
gctgcatccagtttgcagagt

SEQ ID NO: 10196 - protein, 7 aa, synthetic construct
  REGION 1..7: note = Description of Artificial Sequence: Synthetic peptide
AASSLQS

SEQ ID NO: 10197 - DNA, 21 bp, synthetic construct
  misc_feature 1..21: note = Description of Artificial Sequence: Synthetic oligonucleotide
  source 1..21: mol_type = other DNA
gctgcatccagtttgcaaagt

SEQ ID NO: 10198 - protein, 7 aa, synthetic construct
  REGION 1..7: note = Description of Artificial Sequence: Synthetic peptide
AASSLQS

SEQ ID NO: 10199 - DNA, 21 bp, synthetic construct
  misc_feature 1..21: note = Description of Artificial Sequence: Synthetic oligonucleotide
  source 1..21: mol_type = other DNA
gctgcatccaatttgcaaagt

SEQ ID NO: 10200 - protein, 7 aa, synthetic construct
  REGION 1..7: note = Description of Artificial Sequence: Synthetic peptide
AASNLQS

SEQ ID NO: 10201 - DNA, 21 bp, synthetic construct
  misc_feature 1..21: note = Description of Artificial Sequence: Synthetic oligonucleotide
  source 1..21: mol_type = other DNA
tgggcatctacccggaaatcc

SEQ ID NO: 10202 - protein, 7 aa, synthetic construct
  REGION 1..7: note = Description of Artificial Sequence: Synthetic peptide
WASTRKS

SEQ ID NO: 10203 - DNA, 21 bp, synthetic construct
  misc_feature 1..21: note = Description of Artificial Sequence: Synthetic oligonucleotide
  source 1..21: mol_type = other DNA
gctgcatccagtttgcaaagt

SEQ ID NO: 10204 - protein, 7 aa, synthetic construct
  REGION 1..7: note = Description of Artificial Sequence: Synthetic peptide
AASSLQS

SEQ ID NO: 10205 - DNA, 21 bp, synthetic construct
  misc_feature 1..21: note = Description of Artificial Sequence: Synthetic oligonucleotide
  source 1..21: mol_type = other DNA
gctgcatccagtttgcaaggt

SEQ ID NO: 10206 - protein, 7 aa, synthetic construct
  REGION 1..7: note = Description of Artificial Sequence: Synthetic peptide
AASSLQG

SEQ ID NO: 10207 - DNA, 21 bp, synthetic construct
  misc_feature 1..21: note = Description of Artificial Sequence: Synthetic oligonucleotide
  source 1..21: mol_type = other DNA
tgggcatctacccggaaatcc

SEQ ID NO: 10208 - protein, 7 aa, synthetic construct
  REGION 1..7: note = Description of Artificial Sequence: Synthetic peptide
WASTRKS

SEQ ID NO: 10209 - DNA, 21 bp, synthetic construct
  misc_feature 1..21: note = Description of Artificial Sequence: Synthetic oligonucleotide
  source 1..21: mol_type = other DNA
gctgcatccaatttgcaaagt

SEQ ID NO: 10210 - protein, 7 aa, synthetic construct
  REGION 1..7: note = Description of Artificial Sequence: Synthetic peptide
AASNLQS

SEQ ID NO: 10211 - DNA, 21 bp, synthetic construct
  misc_feature 1..21: note = Description of Artificial Sequence: Synthetic oligonucleotide
  source 1..21: mol_type = other DNA
gttgcatccagtttgcaaaat

SEQ ID NO: 10212 - protein, 7 aa, synthetic construct
  REGION 1..7: note = Description of Artificial Sequence: Synthetic peptide
VASSLQN

SEQ ID NO: 10213 - DNA, 21 bp, synthetic construct
  misc_feature 1..21: note = Description of Artificial Sequence: Synthetic oligonucleotide
  source 1..21: mol_type = other DNA
gaagtttccaaccggttctct

SEQ ID NO: 10214 - protein, 7 aa, synthetic construct
  REGION 1..7: note = Description of Artificial Sequence: Synthetic peptide
EVSNRFS

SEQ ID NO: 10215 - DNA, 21 bp, synthetic construct
  misc_feature 1..21: note = Description of Artificial Sequence: Synthetic oligonucleotide
  source 1..21: mol_type = other DNA
actgcatccagtttgcaaagt

SEQ ID NO: 10216 - protein, 7 aa, synthetic construct
  REGION 1..7: note = Description of Artificial Sequence: Synthetic peptide
TASSLQS

SEQ ID NO: 10217 - DNA, 21 bp, synthetic construct
  misc_feature 1..21: note = Description of Artificial Sequence: Synthetic oligonucleotide
  source 1..21: mol_type = other DNA
gaagtttcctaccggttctct

SEQ ID NO: 10218 - protein, 7 aa, synthetic construct
  REGION 1..7: note = Description of Artificial Sequence: Synthetic peptide
EVSYRFS

SEQ ID NO: 10219 - DNA, 21 bp, synthetic construct
  misc_feature 1..21: note = Description of Artificial Sequence: Synthetic oligonucleotide
  source 1..21: mol_type = other DNA
actacatccagtttgcaaagt

SEQ ID NO: 10220 - protein, 7 aa, synthetic construct
  REGION 1..7: note = Description of Artificial Sequence: Synthetic peptide
TTSSLQS

SEQ ID NO: 10221 - DNA, 21 bp, synthetic construct
  misc_feature 1..21: note = Description of Artificial Sequence: Synthetic oligonucleotide
  source 1..21: mol_type = other DNA
ggtgcatccaccagggccact

SEQ ID NO: 10222 - protein, 7 aa, synthetic construct
  REGION 1..7: note = Description of Artificial Sequence: Synthetic peptide
GASTRAT

SEQ ID NO: 10223 - DNA, 21 bp, synthetic construct
  misc_feature 1..21: note = Description of Artificial Sequence: Synthetic oligonucleotide
  source 1..21: mol_type = other DNA
gaagtttccaaccggttctct

SEQ ID NO: 10224 - protein, 7 aa, synthetic construct
  REGION 1..7: note = Description of Artificial Sequence: Synthetic peptide
EVSNRFS

SEQ ID NO: 10225 - DNA, 21 bp, synthetic construct
  misc_feature 1..21: note = Description of Artificial Sequence: Synthetic oligonucleotide
  source 1..21: mol_type = other DNA
actgcatccagtttggaaagt

SEQ ID NO: 10226 - protein, 7 aa, synthetic construct
  REGION 1..7: note = Description of Artificial Sequence: Synthetic peptide
TASSLES

SEQ ID NO: 10227 - DNA, 21 bp, synthetic construct
  misc_feature 1..21: note = Description of Artificial Sequence: Synthetic oligonucleotide
  source 1..21: mol_type = other DNA
gatgcatccaggttgcaaagt

SEQ ID NO: 10228 - protein, 7 aa, synthetic construct
  REGION 1..7: note = Description of Artificial Sequence: Synthetic peptide
DASRLQS

SEQ ID NO: 10229 - DNA, 21 bp, synthetic construct
  misc_feature 1..21: note = Description of Artificial Sequence: Synthetic oligonucleotide
  source 1..21: mol_type = other DNA
gaagtttcccaccggttctct

SEQ ID NO: 10230 - protein, 7 aa, synthetic construct
  REGION 1..7: note = Description of Artificial Sequence: Synthetic peptide
EVSHRFS

SEQ ID NO: 10231 - DNA, 21 bp, synthetic construct
  misc_feature 1..21: note = Description of Artificial Sequence: Synthetic oligonucleotide
  source 1..21: mol_type = other DNA
actacatccagtttgcaaagt

SEQ ID NO: 10232 - protein, 7 aa, synthetic construct
  REGION 1..7: note = Description of Artificial Sequence: Synthetic peptide
TTSSLQS

SEQ ID NO: 10233 - DNA, 21 bp, synthetic construct
  misc_feature 1..21: note = Description of Artificial Sequence: Synthetic oligonucleotide
  source 1..21: mol_type = other DNA
tgggcatctacccgggaatcc

SEQ ID NO: 10234 - protein, 7 aa, synthetic construct
  REGION 1..7: note = Description of Artificial Sequence: Synthetic peptide
WASTRES

SEQ ID NO: 10235 - DNA, 21 bp, synthetic construct
  misc_feature 1..21: note = Description of Artificial Sequence: Synthetic oligonucleotide
  source 1..21: mol_type = other DNA
tgggcatctacccggaaatcc

SEQ ID NO: 10236 - protein, 7 aa, synthetic construct
  REGION 1..7: note = Description of Artificial Sequence: Synthetic peptide
WASTRKS

SEQ ID NO: 10237 - DNA, 21 bp, synthetic construct
  misc_feature 1..21: note = Description of Artificial Sequence: Synthetic oligonucleotide
  source 1..21: mol_type = other DNA
tgggcatctacccggaaatcc

SEQ ID NO: 10238 - protein, 7 aa, synthetic construct
  REGION 1..7: note = Description of Artificial Sequence: Synthetic peptide
WASTRKS

SEQ ID NO: 10239 - DNA, 21 bp, synthetic construct
  misc_feature 1..21: note = Description of Artificial Sequence: Synthetic oligonucleotide
  source 1..21: mol_type = other DNA
actacatccagtttgcaaagt

SEQ ID NO: 10240 - protein, 7 aa, synthetic construct
  REGION 1..7: note = Description of Artificial Sequence: Synthetic peptide
TTSSLQS

SEQ ID NO: 10241 - DNA, 21 bp, synthetic construct
  misc_feature 1..21: note = Description of Artificial Sequence: Synthetic oligonucleotide
  source 1..21: mol_type = other DNA
gaaatttccaagcggttcact

SEQ ID NO: 10242 - protein, 7 aa, synthetic construct
  REGION 1..7: note = Description of Artificial Sequence: Synthetic peptide
EISKRFT

SEQ ID NO: 10243 - DNA, 21 bp, synthetic construct
  misc_feature 1..21: note = Description of Artificial Sequence: Synthetic oligonucleotide
  source 1..21: mol_type = other DNA
ggtgtatctagtagggccact

SEQ ID NO: 10244 - protein, 7 aa, synthetic construct
  REGION 1..7: note = Description of Artificial Sequence: Synthetic peptide
GVSSRAT

SEQ ID NO: 10245 - DNA, 21 bp, synthetic construct
  misc_feature 1..21: note = Description of Artificial Sequence: Synthetic oligonucleotide
  source 1..21: mol_type = other DNA
gctacatccagtttgcaaagt

SEQ ID NO: 10246 - protein, 7 aa, synthetic construct
  REGION 1..7: note = Description of Artificial Sequence: Synthetic peptide
ATSSLQS

SEQ ID NO: 10247 - DNA, 21 bp, synthetic construct
  misc_feature 1..21: note = Description of Artificial Sequence: Synthetic oligonucleotide
  source 1..21: mol_type = other DNA
gctgcatccagtttgcaaggt

SEQ ID NO: 10248 - protein, 7 aa, synthetic construct
  REGION 1..7: note = Description of Artificial Sequence: Synthetic peptide
AASSLQG

SEQ ID NO: 10249 - DNA, 21 bp, synthetic construct
  misc_feature 1..21: note = Description of Artificial Sequence: Synthetic oligonucleotide
  source 1..21: mol_type = other DNA
gctgcatccagtttgcaaagt

SEQ ID NO: 10250 - protein, 7 aa, synthetic construct
  REGION 1..7: note = Description of Artificial Sequence: Synthetic peptide
AASSLQS

SEQ ID NO: 10251 - DNA, 21 bp, synthetic construct
  misc_feature 1..21: note = Description of Artificial Sequence: Synthetic oligonucleotide
  source 1..21: mol_type = other DNA
tgggcatctacccgggaatcc

SEQ ID NO: 10252 - protein, 7 aa, synthetic construct
  REGION 1..7: note = Description of Artificial Sequence: Synthetic peptide
WASTRES

SEQ ID NO: 10253 - DNA, 21 bp, synthetic construct
  misc_feature 1..21: note = Description of Artificial Sequence: Synthetic oligonucleotide
  source 1..21: mol_type = other DNA
gctgcatccagtttgcaaagt

SEQ ID NO: 10254 - protein, 7 aa, synthetic construct
  REGION 1..7: note = Description of Artificial Sequence: Synthetic peptide
AASSLQS

SEQ ID NO: 10255 - DNA, 21 bp, synthetic construct
  misc_feature 1..21: note = Description of Artificial Sequence: Synthetic oligonucleotide
  source 1..21: mol_type = other DNA
actacatccagtttgcaaagt

SEQ ID NO: 10256 - protein, 7 aa, synthetic construct
  REGION 1..7: note = Description of Artificial Sequence: Synthetic peptide
TTSSLQS

SEQ ID NO: 10257 - DNA, 21 bp, synthetic construct
  misc_feature 1..21: note = Description of Artificial Sequence: Synthetic oligonucleotide
  source 1..21: mol_type = other DNA
gaagtttccaaccggttctct

SEQ ID NO: 10258 - protein, 7 aa, synthetic construct
  REGION 1..7: note = Description of Artificial Sequence: Synthetic peptide
EVSNRFS

SEQ ID NO: 10259 - DNA, 21 bp, synthetic construct
  misc_feature 1..21: note = Description of Artificial Sequence: Synthetic oligonucleotide
  source 1..21: mol_type = other DNA
tgggcatctacccgggaatcc

SEQ ID NO: 10260 - protein, 7 aa, synthetic construct
  REGION 1..7: note = Description of Artificial Sequence: Synthetic peptide
WASTRES

SEQ ID NO: 10261 - DNA, 21 bp, synthetic construct
  misc_feature 1..21: note = Description of Artificial Sequence: Synthetic oligonucleotide
  source 1..21: mol_type = other DNA
gctgcatccagtttgcgaagt

SEQ ID NO: 10262 - protein, 7 aa, synthetic construct
  REGION 1..7: note = Description of Artificial Sequence: Synthetic peptide
AASSLRS

SEQ ID NO: 10263 - DNA, 21 bp, synthetic construct
  misc_feature 1..21: note = Description of Artificial Sequence: Synthetic oligonucleotide
  source 1..21: mol_type = other DNA
gaagtttccaagcggttcact

SEQ ID NO: 10264 - protein, 7 aa, synthetic construct
  REGION 1..7: note = Description of Artificial Sequence: Synthetic peptide
EVSKRFT

SEQ ID NO: 10265 - DNA, 21 bp, synthetic construct
  misc_feature 1..21: note = Description of Artificial Sequence: Synthetic oligonucleotide
  source 1..21: mol_type = other DNA
ggtgtatctagtagggccact

SEQ ID NO: 10266 - protein, 7 aa, synthetic construct
  REGION 1..7: note = Description of Artificial Sequence: Synthetic peptide
GVSSRAT

SEQ ID NO: 10267 - DNA, 21 bp, synthetic construct
  misc_feature 1..21: note = Description of Artificial Sequence: Synthetic oligonucleotide
  source 1..21: mol_type = other DNA
tgggcatctacccgggaattt

SEQ ID NO: 10268 - protein, 7 aa, synthetic construct
  REGION 1..7: note = Description of Artificial Sequence: Synthetic peptide
WASTREF

SEQ ID NO: 10269 - DNA, 21 bp, synthetic construct
  misc_feature 1..21: note = Description of Artificial Sequence: Synthetic oligonucleotide
  source 1..21: mol_type = other DNA
gaagtttccaaccggttctct

SEQ ID NO: 10270 - protein, 7 aa, synthetic construct
  REGION 1..7: note = Description of Artificial Sequence: Synthetic peptide
EVSNRFS

SEQ ID NO: 10271 - DNA, 21 bp, synthetic construct
  misc_feature 1..21: note = Description of Artificial Sequence: Synthetic oligonucleotide
  source 1..21: mol_type = other DNA
tgggcatctacccggaaatcc

SEQ ID NO: 10272 - protein, 7 aa, synthetic construct
  REGION 1..7: note = Description of Artificial Sequence: Synthetic peptide
WASTRKS

SEQ ID NO: 10273 - DNA, 21 bp, synthetic construct
  misc_feature 1..21: note = Description of Artificial Sequence: Synthetic oligonucleotide
  source 1..21: mol_type = other DNA
tggacatctacccggaaatcc

SEQ ID NO: 10274 - protein, 7 aa, synthetic construct
  REGION 1..7: note = Description of Artificial Sequence: Synthetic peptide
WTSTRKS

SEQ ID NO: 10275 - DNA, 21 bp, synthetic construct
  misc_feature 1..21: note = Description of Artificial Sequence: Synthetic oligonucleotide
  source 1..21: mol_type = other DNA
gctgcatccagtttgcaaagt

SEQ ID NO: 10276 - protein, 7 aa, synthetic construct
  REGION 1..7: note = Description of Artificial Sequence: Synthetic peptide
AASSLQS

SEQ ID NO: 10277 - DNA, 21 bp, synthetic construct
  misc_feature 1..21: note = Description of Artificial Sequence: Synthetic oligonucleotide
  source 1..21: mol_type = other DNA
tgggcatctaaacgggattcc

SEQ ID NO: 10278 - protein, 7 aa, synthetic construct
  REGION 1..7: note = Description of Artificial Sequence: Synthetic peptide
WASKRDS

SEQ ID NO: 10279 - DNA, 21 bp, synthetic construct
  misc_feature 1..21: note = Description of Artificial Sequence: Synthetic oligonucleotide
  source 1..21: mol_type = other DNA
gctgcatccagtttgcaaggt

SEQ ID NO: 10280 - protein, 7 aa, synthetic construct
  REGION 1..7: note = Description of Artificial Sequence: Synthetic peptide
AASSLQG

SEQ ID NO: 10281 - DNA, 21 bp, synthetic construct
  misc_feature 1..21: note = Description of Artificial Sequence: Synthetic oligonucleotide
  source 1..21: mol_type = other DNA
gctgcatccagtttgcaaggt

SEQ ID NO: 10282 - protein, 7 aa, synthetic construct
  REGION 1..7: note = Description of Artificial Sequence: Synthetic peptide
AASSLQG

SEQ ID NO: 10283 - DNA, 21 bp, synthetic construct
  misc_feature 1..21: note = Description of Artificial Sequence: Synthetic oligonucleotide
  source 1..21: mol_type = other DNA
actgcatccagtttgcaaagt

SEQ ID NO: 10284 - protein, 7 aa, synthetic construct
  REGION 1..7: note = Description of Artificial Sequence: Synthetic peptide
TASSLQS

SEQ ID NO: 10285 - DNA, 21 bp, synthetic construct
  misc_feature 1..21: note = Description of Artificial Sequence: Synthetic oligonucleotide
  source 1..21: mol_type = other DNA
gaagtttccaatcggttctct

SEQ ID NO: 10286 - protein, 7 aa, synthetic construct
  REGION 1..7: note = Description of Artificial Sequence: Synthetic peptide
EVSNRFS

SEQ ID NO: 10287 - DNA, 21 bp, synthetic construct
  misc_feature 1..21: note = Description of Artificial Sequence: Synthetic oligonucleotide
  source 1..21: mol_type = other DNA
tgggcatctacccggaaatcc

SEQ ID NO: 10288 - protein, 7 aa, synthetic construct
  REGION 1..7: note = Description of Artificial Sequence: Synthetic peptide
WASTRKS

SEQ ID NO: 10289 - DNA, 21 bp, synthetic construct
  misc_feature 1..21: note = Description of Artificial Sequence: Synthetic oligonucleotide
  source 1..21: mol_type = other DNA
tggacatctacccgggaatcc

SEQ ID NO: 10290 - protein, 7 aa, synthetic construct
  REGION 1..7: note = Description of Artificial Sequence: Synthetic peptide
WTSTRES

SEQ ID NO: 10291 - DNA, 21 bp, synthetic construct
  misc_feature 1..21: note = Description of Artificial Sequence: Synthetic oligonucleotide
  source 1..21: mol_type = other DNA
ggtgcatccaccagggccact

SEQ ID NO: 10292 - protein, 7 aa, synthetic construct
  REGION 1..7: note = Description of Artificial Sequence: Synthetic peptide
GASTRAT

SEQ ID NO: 10293 - DNA, 21 bp, synthetic construct
  misc_feature 1..21: note = Description of Artificial Sequence: Synthetic oligonucleotide
  source 1..21: mol_type = other DNA
gctgcatccagtttgcaaagt

SEQ ID NO: 10294 - protein, 7 aa, synthetic construct
  REGION 1..7: note = Description of Artificial Sequence: Synthetic peptide
AASSLQS

SEQ ID NO: 10295 - DNA, 21 bp, synthetic construct
  misc_feature 1..21: note = Description of Artificial Sequence: Synthetic oligonucleotide
  source 1..21: mol_type = other DNA
tgggcatctacccgggaatcc

SEQ ID NO: 10296 - protein, 7 aa, synthetic construct
  REGION 1..7: note = Description of Artificial Sequence: Synthetic peptide
WASTRES

SEQ ID NO: 10297 - DNA, 21 bp, synthetic construct
  misc_feature 1..21: note = Description of Artificial Sequence: Synthetic oligonucleotide
  source 1..21: mol_type = other DNA
actgcatccagtttgcaaagt

SEQ ID NO: 10298 - protein, 7 aa, synthetic construct
  REGION 1..7: note = Description of Artificial Sequence: Synthetic peptide
TASSLQS

SEQ ID NO: 10299 - DNA, 21 bp, synthetic construct
  misc_feature 1..21: note = Description of Artificial Sequence: Synthetic oligonucleotide
  source 1..21: mol_type = other DNA
gctgcatccagtttgctaagt

SEQ ID NO: 10300 - protein, 7 aa, synthetic construct
  REGION 1..7: note = Description of Artificial Sequence: Synthetic peptide
AASSLLS

SEQ ID NO: 10301 - DNA, 21 bp, synthetic construct
  misc_feature 1..21: note = Description of Artificial Sequence: Synthetic oligonucleotide
  source 1..21: mol_type = other DNA
gctgcatccagtttgcaaagt

SEQ ID NO: 10302 - protein, 7 aa, synthetic construct
  REGION 1..7: note = Description of Artificial Sequence: Synthetic peptide
AASSLQS

SEQ ID NO: 10303 - DNA, 21 bp, synthetic construct
  misc_feature 1..21: note = Description of Artificial Sequence: Synthetic oligonucleotide
  source 1..21: mol_type = other DNA
gctgcatccagtttgcaaagt

SEQ ID NO: 10304 - protein, 7 aa, synthetic construct
  REGION 1..7: note = Description of Artificial Sequence: Synthetic peptide
AASSLQS

SEQ ID NO: 10305 - DNA, 21 bp, synthetic construct
  misc_feature 1..21: note = Description of Artificial Sequence: Synthetic oligonucleotide
  source 1..21: mol_type = other DNA
actgcatccagtttgcaaagt

SEQ ID NO: 10306 - protein, 7 aa, synthetic construct
  REGION 1..7: note = Description of Artificial Sequence: Synthetic peptide
TASSLQS

SEQ ID NO: 10307 - DNA, 21 bp, synthetic construct
  misc_feature 1..21: note = Description of Artificial Sequence: Synthetic oligonucleotide
  source 1..21: mol_type = other DNA
gctgcatccagtttgcgaagt

SEQ ID NO: 10308 - protein, 7 aa, synthetic construct
  REGION 1..7: note = Description of Artificial Sequence: Synthetic peptide
AASSLRS

SEQ ID NO: 10309 - DNA, 21 bp, synthetic construct
  misc_feature 1..21: note = Description of Artificial Sequence: Synthetic oligonucleotide
  source 1..21: mol_type = other DNA
cctgcatccagtttacaaact

SEQ ID NO: 10310 - protein, 7 aa, synthetic construct
  REGION 1..7: note = Description of Artificial Sequence: Synthetic peptide
PASSLQT

SEQ ID NO: 10311 - DNA, 21 bp, synthetic construct
  misc_feature 1..21: note = Description of Artificial Sequence: Synthetic oligonucleotide
  source 1..21: mol_type = other DNA
gctgcatccagtttacaaagt

SEQ ID NO: 10312 - protein, 7 aa, synthetic construct
  REGION 1..7: note = Description of Artificial Sequence: Synthetic peptide
AASSLQS

SEQ ID NO: 10313 - DNA, 21 bp, synthetic construct
  misc_feature 1..21: note = Description of Artificial Sequence: Synthetic oligonucleotide
  source 1..21: mol_type = other DNA
gctgcatccagtttgcaaagt

SEQ ID NO: 10314 - protein, 7 aa, synthetic construct
  REGION 1..7: note = Description of Artificial Sequence: Synthetic peptide
AASSLQS

SEQ ID NO: 10315 - DNA, 21 bp, synthetic construct
  misc_feature 1..21: note = Description of Artificial Sequence: Synthetic oligonucleotide
  source 1..21: mol_type = other DNA
gttgcatccagtttgcaaagt

SEQ ID NO: 10316 - protein, 7 aa, synthetic construct
  REGION 1..7: note = Description of Artificial Sequence: Synthetic peptide
VASSLQS

SEQ ID NO: 10317 - DNA, 21 bp, synthetic construct
  misc_feature 1..21: note = Description of Artificial Sequence: Synthetic oligonucleotide
  source 1..21: mol_type = other DNA
actgcatccagtttgcaaagt

SEQ ID NO: 10318 - protein, 7 aa, synthetic construct
  REGION 1..7: note = Description of Artificial Sequence: Synthetic peptide
TASSLQS

SEQ ID NO: 10319 - DNA, 21 bp, synthetic construct
  misc_feature 1..21: note = Description of Artificial Sequence: Synthetic oligonucleotide
  source 1..21: mol_type = other DNA
gaaatttccaagcggttctct

SEQ ID NO: 10320 - protein, 7 aa, synthetic construct
  REGION 1..7: note = Description of Artificial Sequence: Synthetic peptide
EISKRFS

SEQ ID NO: 10321 - DNA, 21 bp, synthetic construct
  misc_feature 1..21: note = Description of Artificial Sequence: Synthetic oligonucleotide
  source 1..21: mol_type = other DNA
gctgcatccagtttgcaaagt

SEQ ID NO: 10322 - protein, 7 aa, synthetic construct
  REGION 1..7: note = Description of Artificial Sequence: Synthetic peptide
AASSLQS

SEQ ID NO: 10323 - DNA, 21 bp, synthetic construct
  misc_feature 1..21: note = Description of Artificial Sequence: Synthetic oligonucleotide
  source 1..21: mol_type = other DNA
actgcatccaatttgcaaagt

SEQ ID NO: 10324 - protein, 7 aa, synthetic construct
  REGION 1..7: note = Description of Artificial Sequence: Synthetic peptide
TASNLQS

SEQ ID NO: 10325 - DNA, 21 bp, synthetic construct
  misc_feature 1..21: note = Description of Artificial Sequence: Synthetic oligonucleotide
  source 1..21: mol_type = other DNA
gctgcatccagtttacagagt

SEQ ID NO: 10326 - protein, 7 aa, synthetic construct
  REGION 1..7: note = Description of Artificial Sequence: Synthetic peptide
AASSLQS

SEQ ID NO: 10327 - DNA, 21 bp, synthetic construct
  misc_feature 1..21: note = Description of Artificial Sequence: Synthetic oligonucleotide
  source 1..21: mol_type = other DNA
actgcatccaatttgcaaagt

SEQ ID NO: 10328 - protein, 7 aa, synthetic construct
  REGION 1..7: note = Description of Artificial Sequence: Synthetic peptide
TASNLQS

SEQ ID NO: 10329 - DNA, 21 bp, synthetic construct
  misc_feature 1..21: note = Description of Artificial Sequence: Synthetic oligonucleotide
  source 1..21: mol_type = other DNA
gctgcatccagtttgcaaagt

SEQ ID NO: 10330 - protein, 7 aa, synthetic construct
  REGION 1..7: note = Description of Artificial Sequence: Synthetic peptide
AASSLQS

SEQ ID NO: 10331 - DNA, 21 bp, synthetic construct
  misc_feature 1..21: note = Description of Artificial Sequence: Synthetic oligonucleotide
  source 1..21: mol_type = other DNA
actgcatccactttacaaagt

SEQ ID NO: 10332 - protein, 7 aa, synthetic construct
  REGION 1..7: note = Description of Artificial Sequence: Synthetic peptide
TASTLQS

SEQ ID NO: 10333 - DNA, 21 bp, synthetic construct
  misc_feature 1..21: note = Description of Artificial Sequence: Synthetic oligonucleotide
  source 1..21: mol_type = other DNA
gctgcatccagtttgcaaagt

SEQ ID NO: 10334 - protein, 7 aa, synthetic construct
  REGION 1..7: note = Description of Artificial Sequence: Synthetic peptide
AASSLQS

SEQ ID NO: 10335 - DNA, 21 bp, synthetic construct
  misc_feature 1..21: note = Description of Artificial Sequence: Synthetic oligonucleotide
  source 1..21: mol_type = other DNA
cgtgcatccagtttgcaaagt

SEQ ID NO: 10336 - protein, 7 aa, synthetic construct
  REGION 1..7: note = Description of Artificial Sequence: Synthetic peptide
RASSLQS

SEQ ID NO: 10337 - DNA, 21 bp, synthetic construct
  misc_feature 1..21: note = Description of Artificial Sequence: Synthetic oligonucleotide
  source 1..21: mol_type = other DNA
actgcatccagtttgcaaagt

SEQ ID NO: 10338 - protein, 7 aa, synthetic construct
  REGION 1..7: note = Description of Artificial Sequence: Synthetic peptide
TASSLQS

SEQ ID NO: 10339 - DNA, 21 bp, synthetic construct
  misc_feature 1..21: note = Description of Artificial Sequence: Synthetic oligonucleotide
  source 1..21: mol_type = other DNA
actgcatccagtttgcaaagt

SEQ ID NO: 10340 - protein, 7 aa, synthetic construct
  REGION 1..7: note = Description of Artificial Sequence: Synthetic peptide
TASSLQS

SEQ ID NO: 10341 - DNA, 21 bp, synthetic construct
  misc_feature 1..21: note = Description of Artificial Sequence: Synthetic oligonucleotide
  source 1..21: mol_type = other DNA
tgggcatctacccgggaatcc

SEQ ID NO: 10342 - protein, 7 aa, synthetic construct
  REGION 1..7: note = Description of Artificial Sequence: Synthetic peptide
WASTRES

SEQ ID NO: 10343 - DNA, 21 bp, synthetic construct
  misc_feature 1..21: note = Description of Artificial Sequence: Synthetic oligonucleotide
  source 1..21: mol_type = other DNA
gctgcatccagtttacaaagt

SEQ ID NO: 10344 - protein, 7 aa, synthetic construct
  REGION 1..7: note = Description of Artificial Sequence: Synthetic peptide
AASSLQS

SEQ ID NO: 10345 - DNA, 21 bp, synthetic construct
  misc_feature 1..21: note = Description of Artificial Sequence: Synthetic oligonucleotide
  source 1..21: mol_type = other DNA
gatgcatccaatttgcaaagt

SEQ ID NO: 10346 - protein, 7 aa, synthetic construct
  REGION 1..7: note = Description of Artificial Sequence: Synthetic peptide
DASNLQS

SEQ ID NO: 10347 - DNA, 21 bp, synthetic construct
  misc_feature 1..21: note = Description of Artificial Sequence: Synthetic oligonucleotide
  source 1..21: mol_type = other DNA
gctacatccaatttgcaaagt

SEQ ID NO: 10348 - protein, 7 aa, synthetic construct
  REGION 1..7: note = Description of Artificial Sequence: Synthetic peptide
ATSNLQS

SEQ ID NO: 10349 - DNA, 21 bp, synthetic construct
  misc_feature 1..21: note = Description of Artificial Sequence: Synthetic oligonucleotide
  source 1..21: mol_type = other DNA
gatgcctccactttggaaaca

SEQ ID NO: 10350 - protein, 7 aa, synthetic construct
  REGION 1..7: note = Description of Artificial Sequence: Synthetic peptide
DASTLET

SEQ ID NO: 10351 - DNA, 21 bp, synthetic construct
  misc_feature 1..21: note = Description of Artificial Sequence: Synthetic oligonucleotide
  source 1..21: mol_type = other DNA
gctgcatccagtttgcaaagt

SEQ ID NO: 10352 - protein, 7 aa, synthetic construct
  REGION 1..7: note = Description of Artificial Sequence: Synthetic peptide
AASSLQS

SEQ ID NO: 10353 - DNA, 21 bp, synthetic construct
  misc_feature 1..21: note = Description of Artificial Sequence: Synthetic oligonucleotide
  source 1..21: mol_type = other DNA
gctgcatccagtttgcaaagt

SEQ ID NO: 10354 - protein, 7 aa, synthetic construct
  REGION 1..7: note = Description of Artificial Sequence: Synthetic peptide
AASSLQS

SEQ ID NO: 10355 - DNA, 21 bp, synthetic construct
  misc_feature 1..21: note = Description of Artificial Sequence: Synthetic oligonucleotide
  source 1..21: mol_type = other DNA
gctgcatccagtttgcaaagt

SEQ ID NO: 10356 - protein, 7 aa, synthetic construct
  REGION 1..7: note = Description of Artificial Sequence: Synthetic peptide
AASSLQS

SEQ ID NO: 10357 - DNA, 21 bp, synthetic construct
  misc_feature 1..21: note = Description of Artificial Sequence: Synthetic oligonucleotide
  source 1..21: mol_type = other DNA
gctgcatccagtctgcaaagt

SEQ ID NO: 10358 - protein, 7 aa, synthetic construct
  REGION 1..7: note = Description of Artificial Sequence: Synthetic peptide
AASSLQS

SEQ ID NO: 10359 - DNA, 21 bp, synthetic construct
  misc_feature 1..21: note = Description of Artificial Sequence: Synthetic oligonucleotide
  source 1..21: mol_type = other DNA
gaagtatccaagcggttctct

SEQ ID NO: 10360 - protein, 7 aa, synthetic construct
  REGION 1..7: note = Description of Artificial Sequence: Synthetic peptide
EVSKRFS

SEQ ID NO: 10361 - DNA, 21 bp, synthetic construct
  misc_feature 1..21: note = Description of Artificial Sequence: Synthetic oligonucleotide
  source 1..21: mol_type = other DNA
gcttcatccagtttgcaaagt

SEQ ID NO: 10362 - protein, 7 aa, synthetic construct
  REGION 1..7: note = Description of Artificial Sequence: Synthetic peptide
ASSSLQS

SEQ ID NO: 10363 - DNA, 21 bp, synthetic construct
  misc_feature 1..21: note = Description of Artificial Sequence: Synthetic oligonucleotide
  source 1..21: mol_type = other DNA
gctgcatccagtttgcagaat

SEQ ID NO: 10364 - protein, 7 aa, synthetic construct
  REGION 1..7: note = Description of Artificial Sequence: Synthetic peptide
AASSLQN

SEQ ID NO: 10365 - DNA, 21 bp, synthetic construct
  misc_feature 1..21: note = Description of Artificial Sequence: Synthetic oligonucleotide
  source 1..21: mol_type = other DNA
actgcatccaatttgcaaagt

SEQ ID NO: 10366 - protein, 7 aa, synthetic construct
  REGION 1..7: note = Description of Artificial Sequence: Synthetic peptide
TASNLQS

SEQ ID NO: 10367 - DNA, 21 bp, synthetic construct
  misc_feature 1..21: note = Description of Artificial Sequence: Synthetic oligonucleotide
  source 1..21: mol_type = other DNA
gcttcatccagtttgcaaagt

SEQ ID NO: 10368 - protein, 7 aa, synthetic construct
  REGION 1..7: note = Description of Artificial Sequence: Synthetic peptide
ASSSLQS

SEQ ID NO: 10369 - DNA, 21 bp, synthetic construct
  misc_feature 1..21: note = Description of Artificial Sequence: Synthetic oligonucleotide
  source 1..21: mol_type = other DNA
gctgcatccagtttgcaaagt

SEQ ID NO: 10370 - protein, 7 aa, synthetic construct
  REGION 1..7: note = Description of Artificial Sequence: Synthetic peptide
AASSLQS

SEQ ID NO: 10371 - DNA, 21 bp, synthetic construct
  misc_feature 1..21: note = Description of Artificial Sequence: Synthetic oligonucleotide
  source 1..21: mol_type = other DNA
tgggcatctacccgggaatcc

SEQ ID NO: 10372 - protein, 7 aa, synthetic construct
  REGION 1..7: note = Description of Artificial Sequence: Synthetic peptide
WASTRES

SEQ ID NO: 10373 - DNA, 21 bp, synthetic construct
  misc_feature 1..21: note = Description of Artificial Sequence: Synthetic oligonucleotide
  source 1..21: mol_type = other DNA
gctgcatccagtttgcaaagt

SEQ ID NO: 10374 - protein, 7 aa, synthetic construct
  REGION 1..7: note = Description of Artificial Sequence: Synthetic peptide
AASSLQS

SEQ ID NO: 10375 - DNA, 21 bp, synthetic construct
  misc_feature 1..21: note = Description of Artificial Sequence: Synthetic oligonucleotide
  source 1..21: mol_type = other DNA
gttgcatccagtttgcaaagt

SEQ ID NO: 10376 - protein, 7 aa, synthetic construct
  REGION 1..7: note = Description of Artificial Sequence: Synthetic peptide
VASSLQS

SEQ ID NO: 10377 - DNA, 21 bp, synthetic construct
  misc_feature 1..21: note = Description of Artificial Sequence: Synthetic oligonucleotide
  source 1..21: mol_type = other DNA
gttgcatccagtttgcaaagt

SEQ ID NO: 10378 - protein, 7 aa, synthetic construct
  REGION 1..7: note = Description of Artificial Sequence: Synthetic peptide
VASSLQS

SEQ ID NO: 10379 - DNA, 21 bp, synthetic construct
  misc_feature 1..21: note = Description of Artificial Sequence: Synthetic oligonucleotide
  source 1..21: mol_type = other DNA
gctgcatccagtttgcaaagt

SEQ ID NO: 10380 - protein, 7 aa, synthetic construct
  REGION 1..7: note = Description of Artificial Sequence: Synthetic peptide
AASSLQS

SEQ ID NO: 10381 - DNA, 21 bp, synthetic construct
  misc_feature 1..21: note = Description of Artificial Sequence: Synthetic oligonucleotide
  source 1..21: mol_type = other DNA
gaagtttccaaacggttctct

SEQ ID NO: 10382 - protein, 7 aa, synthetic construct
  REGION 1..7: note = Description of Artificial Sequence: Synthetic peptide
EVSKRFS

SEQ ID NO: 10383 - DNA, 21 bp, synthetic construct
  misc_feature 1..21: note = Description of Artificial Sequence: Synthetic oligonucleotide
  source 1..21: mol_type = other DNA
ggtgcatccatcagggccact

SEQ ID NO: 10384 - protein, 7 aa, synthetic construct
  REGION 1..7: note = Description of Artificial Sequence: Synthetic peptide
GASIRAT

SEQ ID NO: 10385 - DNA, 21 bp, synthetic construct
  misc_feature 1..21: note = Description of Artificial Sequence: Synthetic oligonucleotide
  source 1..21: mol_type = other DNA
gatgcatccaatttggaaaca

SEQ ID NO: 10386 - protein, 7 aa, synthetic construct
  REGION 1..7: note = Description of Artificial Sequence: Synthetic peptide
DASNLET

SEQ ID NO: 10387 - DNA, 21 bp, synthetic construct
  misc_feature 1..21: note = Description of Artificial Sequence: Synthetic oligonucleotide
  source 1..21: mol_type = other DNA
gctgcatccactttgcaaagt

SEQ ID NO: 10388 - protein, 7 aa, synthetic construct
  REGION 1..7: note = Description of Artificial Sequence: Synthetic peptide
AASTLQS

SEQ ID NO: 10389 - DNA, 21 bp, synthetic construct
  misc_feature 1..21: note = Description of Artificial Sequence: Synthetic oligonucleotide
  source 1..21: mol_type = other DNA
gatgcatccaattgggaaaca

SEQ ID NO: 10390 - protein, 7 aa, synthetic construct
  REGION 1..7: note = Description of Artificial Sequence: Synthetic peptide
DASNWET

SEQ ID NO: 10391 - DNA, 21 bp, synthetic construct
  misc_feature 1..21: note = Description of Artificial Sequence: Synthetic oligonucleotide
  source 1..21: mol_type = other DNA
gctgcatccactttgcaaagt

SEQ ID NO: 10392 - protein, 7 aa, synthetic construct
  REGION 1..7: note = Description of Artificial Sequence: Synthetic peptide
AASTLQS

SEQ ID NO: 10393 - DNA, 21 bp, synthetic construct
  misc_feature 1..21: note = Description of Artificial Sequence: Synthetic oligonucleotide
  source 1..21: mol_type = other DNA
gctgcatccagtttgcaaagt

SEQ ID NO: 10394 - protein, 7 aa, synthetic construct
  REGION 1..7: note = Description of Artificial Sequence: Synthetic peptide
AASSLQS

SEQ ID NO: 10395 - DNA, 21 bp, synthetic construct
  misc_feature 1..21: note = Description of Artificial Sequence: Synthetic oligonucleotide
  source 1..21: mol_type = other DNA
gctgcatccagtttgcaaagt

SEQ ID NO: 10396 - protein, 7 aa, synthetic construct
  REGION 1..7: note = Description of Artificial Sequence: Synthetic peptide
AASSLQS

SEQ ID NO: 10397 - DNA, 21 bp, synthetic construct
  misc_feature 1..21: note = Description of Artificial Sequence: Synthetic oligonucleotide
  source 1..21: mol_type = other DNA
gctgcatccagtttgcaaagt

SEQ ID NO: 10398 - protein, 7 aa, synthetic construct
  REGION 1..7: note = Description of Artificial Sequence: Synthetic peptide
AASSLQS

SEQ ID NO: 10399 - DNA, 21 bp, synthetic construct
  misc_feature 1..21: note = Description of Artificial Sequence: Synthetic oligonucleotide
  source 1..21: mol_type = other DNA
cggacatctatccggaaatcc

SEQ ID NO: 10400 - protein, 7 aa, synthetic construct
  REGION 1..7: note = Description of Artificial Sequence: Synthetic peptide
RTSIRKS

SEQ ID NO: 10401 - DNA, 21 bp, synthetic construct
  misc_feature 1..21: note = Description of Artificial Sequence: Synthetic oligonucleotide
  source 1..21: mol_type = other DNA
tgggcatctacccgggaatcc

SEQ ID NO: 10402 - protein, 7 aa, synthetic construct
  REGION 1..7: note = Description of Artificial Sequence: Synthetic peptide
WASTRES

SEQ ID NO: 10403 - DNA, 21 bp, synthetic construct
  misc_feature 1..21: note = Description of Artificial Sequence: Synthetic oligonucleotide
  source 1..21: mol_type = other DNA
gaagtttccaagcggttctct

SEQ ID NO: 10404 - protein, 7 aa, synthetic construct
  REGION 1..7: note = Description of Artificial Sequence: Synthetic peptide
EVSKRFS

SEQ ID NO: 10405 - DNA, 21 bp, synthetic construct
  misc_feature 1..21: note = Description of Artificial Sequence: Synthetic oligonucleotide
  source 1..21: mol_type = other DNA
gctgcatccagtttgcaaagt

SEQ ID NO: 10406 - protein, 7 aa, synthetic construct
  REGION 1..7: note = Description of Artificial Sequence: Synthetic peptide
AASSLQS

SEQ ID NO: 10407 - DNA, 21 bp, synthetic construct
  misc_feature 1..21: note = Description of Artificial Sequence: Synthetic oligonucleotide
  source 1..21: mol_type = other DNA
cctgcatccagtttgcaaagt

SEQ ID NO: 10408 - protein, 7 aa, synthetic construct
  REGION 1..7: note = Description of Artificial Sequence: Synthetic peptide
PASSLQS

SEQ ID NO: 10409 - DNA, 21 bp, synthetic construct
  misc_feature 1..21: note = Description of Artificial Sequence: Synthetic oligonucleotide
  source 1..21: mol_type = other DNA
gctgcatccagtttgctaagt

SEQ ID NO: 10410 - protein, 7 aa, synthetic construct
  REGION 1..7: note = Description of Artificial Sequence: Synthetic peptide
AASSLLS

SEQ ID NO: 10411 - DNA, 21 bp, synthetic construct
  misc_feature 1..21: note = Description of Artificial Sequence: Synthetic oligonucleotide
  source 1..21: mol_type = other DNA
cctgcatccagtttgcaaagt

SEQ ID NO: 10412 - protein, 7 aa, synthetic construct
  REGION 1..7: note = Description of Artificial Sequence: Synthetic peptide
PASSLQS

SEQ ID NO: 10413 - DNA, 21 bp, synthetic construct
  misc_feature 1..21: note = Description of Artificial Sequence: Synthetic oligonucleotide
  source 1..21: mol_type = other DNA
cctgcatccagtttgcaaagt

SEQ ID NO: 10414 - protein, 7 aa, synthetic construct
  REGION 1..7: note = Description of Artificial Sequence: Synthetic peptide
PASSLQS

SEQ ID NO: 10415 - DNA, 21 bp, synthetic construct
  misc_feature 1..21: note = Description of Artificial Sequence: Synthetic oligonucleotide
  source 1..21: mol_type = other DNA
tgggcatctacccgagaatcc

SEQ ID NO: 10416 - protein, 7 aa, synthetic construct
  REGION 1..7: note = Description of Artificial Sequence: Synthetic peptide
WASTRES

SEQ ID NO: 10417 - DNA, 21 bp, synthetic construct
  misc_feature 1..21: note = Description of Artificial Sequence: Synthetic oligonucleotide
  source 1..21: mol_type = other DNA
gctgcatccagtttgcaaagt

SEQ ID NO: 10418 - protein, 7 aa, synthetic construct
  REGION 1..7: note = Description of Artificial Sequence: Synthetic peptide
AASSLQS

SEQ ID NO: 10419 - DNA, 21 bp, synthetic construct
  misc_feature 1..21: note = Description of Artificial Sequence: Synthetic oligonucleotide
  source 1..21: mol_type = other DNA
gaagtttccaaacggttctct

SEQ ID NO: 10420 - protein, 7 aa, synthetic construct
  REGION 1..7: note = Description of Artificial Sequence: Synthetic peptide
EVSKRFS

SEQ ID NO: 10421 - DNA, 21 bp, synthetic construct
  misc_feature 1..21: note = Description of Artificial Sequence: Synthetic oligonucleotide
  source 1..21: mol_type = other DNA
gaagtttccaaacggttctct

SEQ ID NO: 10422 - protein, 7 aa, synthetic construct
  REGION 1..7: note = Description of Artificial Sequence: Synthetic peptide
EVSKRFS

SEQ ID NO: 10423 - DNA, 21 bp, synthetic construct
  misc_feature 1..21: note = Description of Artificial Sequence: Synthetic oligonucleotide
  source 1..21: mol_type = other DNA
gctgcatccagtttgcaaagt

SEQ ID NO: 10424 - protein, 7 aa, synthetic construct
  REGION 1..7: note = Description of Artificial Sequence: Synthetic peptide
AASSLQS

SEQ ID NO: 10425 - DNA, 21 bp, synthetic construct
  misc_feature 1..21: note = Description of Artificial Sequence: Synthetic oligonucleotide
  source 1..21: mol_type = other DNA
gctgaatccagtttgcaaagt

SEQ ID NO: 10426 - protein, 7 aa, synthetic construct
  REGION 1..7: note = Description of Artificial Sequence: Synthetic peptide
AESSLQS

SEQ ID NO: 10427 - DNA, 21 bp, synthetic construct
  misc_feature 1..21: note = Description of Artificial Sequence: Synthetic oligonucleotide
  source 1..21: mol_type = other DNA
tgggcatctacccgggaatcc

SEQ ID NO: 10428 - protein, 7 aa, synthetic construct
  REGION 1..7: note = Description of Artificial Sequence: Synthetic peptide
WASTRES

SEQ ID NO: 10429 - DNA, 21 bp, synthetic construct
  misc_feature 1..21: note = Description of Artificial Sequence: Synthetic oligonucleotide
  source 1..21: mol_type = other DNA
ttgggttctaatcgggcctcc

SEQ ID NO: 10430 - protein, 7 aa, synthetic construct
  REGION 1..7: note = Description of Artificial Sequence: Synthetic peptide
LGSNRAS

SEQ ID NO: 10431 - DNA, 21 bp, synthetic construct
  misc_feature 1..21: note = Description of Artificial Sequence: Synthetic oligonucleotide
  source 1..21: mol_type = other DNA
gctgcatccagtttgcaaagt

SEQ ID NO: 10432 - protein, 7 aa, synthetic construct
  REGION 1..7: note = Description of Artificial Sequence: Synthetic peptide
AASSLQS

SEQ ID NO: 10433 - DNA, 21 bp, synthetic construct
  misc_feature 1..21: note = Description of Artificial Sequence: Synthetic oligonucleotide
  source 1..21: mol_type = other DNA
tgggcatctacccgggaatcc

SEQ ID NO: 10434 - protein, 7 aa, synthetic construct
  REGION 1..7: note = Description of Artificial Sequence: Synthetic peptide
WASTRES

SEQ ID NO: 10435 - DNA, 21 bp, synthetic construct
  misc_feature 1..21: note = Description of Artificial Sequence: Synthetic oligonucleotide
  source 1..21: mol_type = other DNA
ttgggttctaatcgggcctcc

SEQ ID NO: 10436 - protein, 7 aa, synthetic construct
  REGION 1..7: note = Description of Artificial Sequence: Synthetic peptide
LGSNRAS

SEQ ID NO: 10437 - DNA, 21 bp, synthetic construct
  misc_feature 1..21: note = Description of Artificial Sequence: Synthetic oligonucleotide
  source 1..21: mol_type = other DNA
gctgcatccagtttgcaaagt

SEQ ID NO: 10438 - protein, 7 aa, synthetic construct
  REGION 1..7: note = Description of Artificial Sequence: Synthetic peptide
AASSLQS

SEQ ID NO: 10439 - DNA, 21 bp, synthetic construct
  misc_feature 1..21: note = Description of Artificial Sequence: Synthetic oligonucleotide
  source 1..21: mol_type = other DNA
tctgcatccagtttgcaaagt

SEQ ID NO: 10440 - protein, 7 aa, synthetic construct
  REGION 1..7: note = Description of Artificial Sequence: Synthetic peptide
SASSLQS

SEQ ID NO: 10441 - DNA, 21 bp, synthetic construct
  misc_feature 1..21: note = Description of Artificial Sequence: Synthetic oligonucleotide
  source 1..21: mol_type = other DNA
gctgcatccagtttgcaaagt

SEQ ID NO: 10442 - protein, 7 aa, synthetic construct
  REGION 1..7: note = Description of Artificial Sequence: Synthetic peptide
AASSLQS

SEQ ID NO: 10443 - DNA, 21 bp, synthetic construct
  misc_feature 1..21: note = Description of Artificial Sequence: Synthetic oligonucleotide
  source 1..21: mol_type = other DNA
gctgcatccagtttgcaaagt

SEQ ID NO: 10444 - protein, 7 aa, synthetic construct
  REGION 1..7: note = Description of Artificial Sequence: Synthetic peptide
AASSLQS

SEQ ID NO: 10445 - DNA, 21 bp, synthetic construct
  misc_feature 1..21: note = Description of Artificial Sequence: Synthetic oligonucleotide
  source 1..21: mol_type = other DNA
gaagtttccaaccggttctct

SEQ ID NO: 10446 - protein, 7 aa, synthetic construct
  REGION 1..7: note = Description of Artificial Sequence: Synthetic peptide
EVSNRFS

SEQ ID NO: 10447 - DNA, 21 bp, synthetic construct
  misc_feature 1..21: note = Description of Artificial Sequence: Synthetic oligonucleotide
  source 1..21: mol_type = other DNA
gctgcatccagtttgcaaagt

SEQ ID NO: 10448 - protein, 7 aa, synthetic construct
  REGION 1..7: note = Description of Artificial Sequence: Synthetic peptide
AASSLQS

SEQ ID NO: 10449 - DNA, 21 bp, synthetic construct
  misc_feature 1..21: note = Description of Artificial Sequence: Synthetic oligonucleotide
  source 1..21: mol_type = other DNA
gctacatccagtttgcaaagt

SEQ ID NO: 10450 - protein, 7 aa, synthetic construct
  REGION 1..7: note = Description of Artificial Sequence: Synthetic peptide
ATSSLQS

SEQ ID NO: 10451 - DNA, 21 bp, synthetic construct
  misc_feature 1..21: note = Description of Artificial Sequence: Synthetic oligonucleotide
  source 1..21: mol_type = other DNA
gctgcatccagtttgcaaagt

SEQ ID NO: 10452 - protein, 7 aa, synthetic construct
  REGION 1..7: note = Description of Artificial Sequence: Synthetic peptide
AASSLQS

SEQ ID NO: 10453 - DNA, 21 bp, synthetic construct
  misc_feature 1..21: note = Description of Artificial Sequence: Synthetic oligonucleotide
  source 1..21: mol_type = other DNA
gctgcatccactttgcaaagt

SEQ ID NO: 10454 - protein, 7 aa, synthetic construct
  REGION 1..7: note = Description of Artificial Sequence: Synthetic peptide
AASTLQS

SEQ ID NO: 10455 - DNA, 21 bp, synthetic construct
  misc_feature 1..21: note = Description of Artificial Sequence: Synthetic oligonucleotide
  source 1..21: mol_type = other DNA
gctgcatccagtttgcaaaat

SEQ ID NO: 10456 - protein, 7 aa, synthetic construct
  REGION 1..7: note = Description of Artificial Sequence: Synthetic peptide
AASSLQN

SEQ ID NO: 10457 - DNA, 21 bp, synthetic construct
  misc_feature 1..21: note = Description of Artificial Sequence: Synthetic oligonucleotide
  source 1..21: mol_type = other DNA
actgcatccagtttgcaaagt

SEQ ID NO: 10458 - protein, 7 aa, synthetic construct
  REGION 1..7: note = Description of Artificial Sequence: Synthetic peptide
TASSLQS

SEQ ID NO: 10459 - DNA, 21 bp, synthetic construct
  misc_feature 1..21: note = Description of Artificial Sequence: Synthetic oligonucleotide
  source 1..21: mol_type = other DNA
tctgcgtccagtttgcaaagt

SEQ ID NO: 10460 - protein, 7 aa, synthetic construct
  REGION 1..7: note = Description of Artificial Sequence: Synthetic peptide
SASSLQS

SEQ ID NO: 10461 - DNA, 21 bp, synthetic construct
  misc_feature 1..21: note = Description of Artificial Sequence: Synthetic oligonucleotide
  source 1..21: mol_type = other DNA
tgggcatctacccggaaatcc

SEQ ID NO: 10462 - protein, 7 aa, synthetic construct
  REGION 1..7: note = Description of Artificial Sequence: Synthetic peptide
WASTRKS

SEQ ID NO: 10463 - DNA, 21 bp, synthetic construct
  misc_feature 1..21: note = Description of Artificial Sequence: Synthetic oligonucleotide
  source 1..21: mol_type = other DNA
gctgcatccagtttgcaaaat

SEQ ID NO: 10464 - protein, 7 aa, synthetic construct
  REGION 1..7: note = Description of Artificial Sequence: Synthetic peptide
AASSLQN

SEQ ID NO: 10465 - DNA, 21 bp, synthetic construct
  misc_feature 1..21: note = Description of Artificial Sequence: Synthetic oligonucleotide
  source 1..21: mol_type = other DNA
actgcatccagtttgcaaagt

SEQ ID NO: 10466 - protein, 7 aa, synthetic construct
  REGION 1..7: note = Description of Artificial Sequence: Synthetic peptide
TASSLQS

SEQ ID NO: 10467 - DNA, 21 bp, synthetic construct
  misc_feature 1..21: note = Description of Artificial Sequence: Synthetic oligonucleotide
  source 1..21: mol_type = other DNA
actgcatccagtttgcaaagt

SEQ ID NO: 10468 - protein, 7 aa, synthetic construct
  REGION 1..7: note = Description of Artificial Sequence: Synthetic peptide
TASSLQS

SEQ ID NO: 10469 - DNA, 21 bp, synthetic construct
  misc_feature 1..21: note = Description of Artificial Sequence: Synthetic oligonucleotide
  source 1..21: mol_type = other DNA
gatgcatcaagtttgcaaagt

SEQ ID NO: 10470 - protein, 7 aa, synthetic construct
  REGION 1..7: note = Description of Artificial Sequence: Synthetic peptide
DASSLQS

SEQ ID NO: 10471 - DNA, 21 bp, synthetic construct
  misc_feature 1..21: note = Description of Artificial Sequence: Synthetic oligonucleotide
  source 1..21: mol_type = other DNA
gtgggttctaatcgggcctcc

SEQ ID NO: 10472 - protein, 7 aa, synthetic construct
  REGION 1..7: note = Description of Artificial Sequence: Synthetic peptide
VGSNRAS

SEQ ID NO: 10473 - DNA, 21 bp, synthetic construct
  misc_feature 1..21: note = Description of Artificial Sequence: Synthetic oligonucleotide
  source 1..21: mol_type = other DNA
gctgcattcagtttgcaaggt

SEQ ID NO: 10474 - protein, 7 aa, synthetic construct
  REGION 1..7: note = Description of Artificial Sequence: Synthetic peptide
AAFSLQG

SEQ ID NO: 10475 - DNA, 21 bp, synthetic construct
  misc_feature 1..21: note = Description of Artificial Sequence: Synthetic oligonucleotide
  source 1..21: mol_type = other DNA
gatgcatccagtttgcaaagt

SEQ ID NO: 10476 - protein, 7 aa, synthetic construct
  REGION 1..7: note = Description of Artificial Sequence: Synthetic peptide
DASSLQS

SEQ ID NO: 10477 - DNA, 21 bp, synthetic construct
  misc_feature 1..21: note = Description of Artificial Sequence: Synthetic oligonucleotide
  source 1..21: mol_type = other DNA
cctgcatccagtttgcaaagt

SEQ ID NO: 10478 - protein, 7 aa, synthetic construct
  REGION 1..7: note = Description of Artificial Sequence: Synthetic peptide
PASSLQS

SEQ ID NO: 10479 - DNA, 21 bp, synthetic construct
  misc_feature 1..21: note = Description of Artificial Sequence: Synthetic oligonucleotide
  source 1..21: mol_type = other DNA
gctgaatccagtttgcaaagt

SEQ ID NO: 10480 - protein, 7 aa, synthetic construct
  REGION 1..7: note = Description of Artificial Sequence: Synthetic peptide
AESSLQS

SEQ ID NO: 10481 - DNA, 21 bp, synthetic construct
  misc_feature 1..21: note = Description of Artificial Sequence: Synthetic oligonucleotide
  source 1..21: mol_type = other DNA
gaagtttcccaccggttctct

SEQ ID NO: 10482 - protein, 7 aa, synthetic construct
  REGION 1..7: note = Description of Artificial Sequence: Synthetic peptide
EVSHRFS

SEQ ID NO: 10483 - DNA, 21 bp, synthetic construct
  misc_feature 1..21: note = Description of Artificial Sequence: Synthetic oligonucleotide
  source 1..21: mol_type = other DNA
gctgcatccagtttgcaaaat

SEQ ID NO: 10484 - protein, 7 aa, synthetic construct
  REGION 1..7: note = Description of Artificial Sequence: Synthetic peptide
AASSLQN

SEQ ID NO: 10485 - DNA, 21 bp, synthetic construct
  misc_feature 1..21: note = Description of Artificial Sequence: Synthetic oligonucleotide
  source 1..21: mol_type = other DNA
tgggcatctactcgggaatcc

SEQ ID NO: 10486 - protein, 7 aa, synthetic construct
  REGION 1..7: note = Description of Artificial Sequence: Synthetic peptide
WASTRES

SEQ ID NO: 10487 - DNA, 21 bp, synthetic construct
  misc_feature 1..21: note = Description of Artificial Sequence: Synthetic oligonucleotide
  source 1..21: mol_type = other DNA
gctgcatccagtttgcaaatt

SEQ ID NO: 10488 - protein, 7 aa, synthetic construct
  REGION 1..7: note = Description of Artificial Sequence: Synthetic peptide
AASSLQI

SEQ ID NO: 10489 - DNA, 21 bp, synthetic construct
  misc_feature 1..21: note = Description of Artificial Sequence: Synthetic oligonucleotide
  source 1..21: mol_type = other DNA
gaagtttccaaccggttctct

SEQ ID NO: 10490 - protein, 7 aa, synthetic construct
  REGION 1..7: note = Description of Artificial Sequence: Synthetic peptide
EVSNRFS

SEQ ID NO: 10491 - DNA, 21 bp, synthetic construct
  misc_feature 1..21: note = Description of Artificial Sequence: Synthetic oligonucleotide
  source 1..21: mol_type = other DNA
gaagtttcccaccggttctct

SEQ ID NO: 10492 - protein, 7 aa, synthetic construct
  REGION 1..7: note = Description of Artificial Sequence: Synthetic peptide
EVSHRFS

SEQ ID NO: 10493 - DNA, 21 bp, synthetic construct
  misc_feature 1..21: note = Description of Artificial Sequence: Synthetic oligonucleotide
  source 1..21: mol_type = other DNA
actacatccagtttgcaaagt

SEQ ID NO: 10494 - protein, 7 aa, synthetic construct
  REGION 1..7: note = Description of Artificial Sequence: Synthetic peptide
TTSSLQS

SEQ ID NO: 10495 - DNA, 21 bp, synthetic construct
  misc_feature 1..21: note = Description of Artificial Sequence: Synthetic oligonucleotide
  source 1..21: mol_type = other DNA
tgggcatctacccgggaatcc

SEQ ID NO: 10496 - protein, 7 aa, synthetic construct
  REGION 1..7: note = Description of Artificial Sequence: Synthetic peptide
WASTRES

SEQ ID NO: 10497 - DNA, 21 bp, synthetic construct
  misc_feature 1..21: note = Description of Artificial Sequence: Synthetic oligonucleotide
  source 1..21: mol_type = other DNA
gctgcattcagtttgcaaggt

SEQ ID NO: 10498 - protein, 7 aa, synthetic construct
  REGION 1..7: note = Description of Artificial Sequence: Synthetic peptide
AAFSLQG

SEQ ID NO: 10499 - DNA, 21 bp, synthetic construct
  misc_feature 1..21: note = Description of Artificial Sequence: Synthetic oligonucleotide
  source 1..21: mol_type = other DNA
gctgcatccagtttgcaaagt

SEQ ID NO: 10500 - protein, 7 aa, synthetic construct
  REGION 1..7: note = Description of Artificial Sequence: Synthetic peptide
AASSLQS

SEQ ID NO: 10501 - DNA, 21 bp, synthetic construct
  misc_feature 1..21: note = Description of Artificial Sequence: Synthetic oligonucleotide
  source 1..21: mol_type = other DNA
actgcatccagtttgcaaagt

SEQ ID NO: 10502 - protein, 7 aa, synthetic construct
  REGION 1..7: note = Description of Artificial Sequence: Synthetic peptide
TASSLQS

SEQ ID NO: 10503 - DNA, 21 bp, synthetic construct
  misc_feature 1..21: note = Description of Artificial Sequence: Synthetic oligonucleotide
  source 1..21: mol_type = other DNA
tctgcatccagtttgcaaagt

SEQ ID NO: 10504 - protein, 7 aa, synthetic construct
  REGION 1..7: note = Description of Artificial Sequence: Synthetic peptide
SASSLQS

SEQ ID NO: 10505 - DNA, 21 bp, synthetic construct
  misc_feature 1..21: note = Description of Artificial Sequence: Synthetic oligonucleotide
  source 1..21: mol_type = other DNA
gctgcatccggtttgcaaagt

SEQ ID NO: 10506 - protein, 7 aa, synthetic construct
  REGION 1..7: note = Description of Artificial Sequence: Synthetic peptide
AASGLQS

SEQ ID NO: 10507 - DNA, 21 bp, synthetic construct
  misc_feature 1..21: note = Description of Artificial Sequence: Synthetic oligonucleotide
  source 1..21: mol_type = other DNA
gctgcatccagtttgcaaagt

SEQ ID NO: 10508 - protein, 7 aa, synthetic construct
  REGION 1..7: note = Description of Artificial Sequence: Synthetic peptide
AASSLQS

SEQ ID NO: 10509 - DNA, 21 bp, synthetic construct
  misc_feature 1..21: note = Description of Artificial Sequence: Synthetic oligonucleotide
  source 1..21: mol_type = other DNA
tggacatctacccgggaatcc

SEQ ID NO: 10510 - protein, 7 aa, synthetic construct
  REGION 1..7: note = Description of Artificial Sequence: Synthetic peptide
WTSTRES

SEQ ID NO: 10511 - DNA, 21 bp, synthetic construct
  misc_feature 1..21: note = Description of Artificial Sequence: Synthetic oligonucleotide
  source 1..21: mol_type = other DNA
gctgcatccagtttgcacagt

SEQ ID NO: 10512 - protein, 7 aa, synthetic construct
  REGION 1..7: note = Description of Artificial Sequence: Synthetic peptide
AASSLHS

SEQ ID NO: 10513 - DNA, 21 bp, synthetic construct
  misc_feature 1..21: note = Description of Artificial Sequence: Synthetic oligonucleotide
  source 1..21: mol_type = other DNA
gaagtttccaaccggttctct

SEQ ID NO: 10514 - protein, 7 aa, synthetic construct
  REGION 1..7: note = Description of Artificial Sequence: Synthetic peptide
EVSNRFS

SEQ ID NO: 10515 - DNA, 21 bp, synthetic construct
  misc_feature 1..21: note = Description of Artificial Sequence: Synthetic oligonucleotide
  source 1..21: mol_type = other DNA
ttgggttctaatcgggcctcc

SEQ ID NO: 10516 - protein, 7 aa, synthetic construct
  REGION 1..7: note = Description of Artificial Sequence: Synthetic peptide
LGSNRAS

SEQ ID NO: 10517 - DNA, 21 bp, synthetic construct
  misc_feature 1..21: note = Description of Artificial Sequence: Synthetic oligonucleotide
  source 1..21: mol_type = other DNA
gctgcatccagtttgcaaagt

SEQ ID NO: 10518 - protein, 7 aa, synthetic construct
  REGION 1..7: note = Description of Artificial Sequence: Synthetic peptide
AASSLQS

SEQ ID NO: 10519 - DNA, 21 bp, synthetic construct
  misc_feature 1..21: note = Description of Artificial Sequence: Synthetic oligonucleotide
  source 1..21: mol_type = other DNA
gctgcatccagtttgcaaagt

SEQ ID NO: 10520 - protein, 7 aa, synthetic construct
  REGION 1..7: note = Description of Artificial Sequence: Synthetic peptide
AASSLQS

SEQ ID NO: 10521 - DNA, 21 bp, synthetic construct
  misc_feature 1..21: note = Description of Artificial Sequence: Synthetic oligonucleotide
  source 1..21: mol_type = other DNA
gctgcatccagtttgcaaagt

SEQ ID NO: 10522 - protein, 7 aa, synthetic construct
  REGION 1..7: note = Description of Artificial Sequence: Synthetic peptide
AASSLQS

SEQ ID NO: 10523 - DNA, 21 bp, synthetic construct
  misc_feature 1..21: note = Description of Artificial Sequence: Synthetic oligonucleotide
  source 1..21: mol_type = other DNA
gctgcatccagtttgcaaagt

SEQ ID NO: 10524 - protein, 7 aa, synthetic construct
  REGION 1..7: note = Description of Artificial Sequence: Synthetic peptide
AASSLQS

SEQ ID NO: 10525 - DNA, 21 bp, synthetic construct
  misc_feature 1..21: note = Description of Artificial Sequence: Synthetic oligonucleotide
  source 1..21: mol_type = other DNA
gctgcatccagtttgcaaagt

SEQ ID NO: 10526 - protein, 7 aa, synthetic construct
  REGION 1..7: note = Description of Artificial Sequence: Synthetic peptide
AASSLQS

SEQ ID NO: 10527 - DNA, 21 bp, synthetic construct
  misc_feature 1..21: note = Description of Artificial Sequence: Synthetic oligonucleotide
  source 1..21: mol_type = other DNA
gaagtttccaaccggttctct

SEQ ID NO: 10528 - protein, 7 aa, synthetic construct
  REGION 1..7: note = Description of Artificial Sequence: Synthetic peptide
EVSNRFS

SEQ ID NO: 10529 - DNA, 21 bp, synthetic construct
  misc_feature 1..21: note = Description of Artificial Sequence: Synthetic oligonucleotide
  source 1..21: mol_type = other DNA
tgggcatctacccgggaatcc

SEQ ID NO: 10530 - protein, 7 aa, synthetic construct
  REGION 1..7: note = Description of Artificial Sequence: Synthetic peptide
WASTRES

SEQ ID NO: 10531 - DNA, 21 bp, synthetic construct
  misc_feature 1..21: note = Description of Artificial Sequence: Synthetic oligonucleotide
  source 1..21: mol_type = other DNA
gctgcttccagtttgcaaagt

SEQ ID NO: 10532 - protein, 7 aa, synthetic construct
  REGION 1..7: note = Description of Artificial Sequence: Synthetic peptide
AASSLQS

SEQ ID NO: 10533 - DNA, 21 bp, synthetic construct
  misc_feature 1..21: note = Description of Artificial Sequence: Synthetic oligonucleotide
  source 1..21: mol_type = other DNA
gctgcatccagtttgcagagt

SEQ ID NO: 10534 - protein, 7 aa, synthetic construct
  REGION 1..7: note = Description of Artificial Sequence: Synthetic peptide
AASSLQS

SEQ ID NO: 10535 - DNA, 21 bp, synthetic construct
  misc_feature 1..21: note = Description of Artificial Sequence: Synthetic oligonucleotide
  source 1..21: mol_type = other DNA
gctgcatccagtttgcaaaat

SEQ ID NO: 10536 - protein, 7 aa, synthetic construct
  REGION 1..7: note = Description of Artificial Sequence: Synthetic peptide
AASSLQN

SEQ ID NO: 10537 - DNA, 21 bp, synthetic construct
  misc_feature 1..21: note = Description of Artificial Sequence: Synthetic oligonucleotide
  source 1..21: mol_type = other DNA
gaagtttccaaccggttttct

SEQ ID NO: 10538 - protein, 7 aa, synthetic construct
  REGION 1..7: note = Description of Artificial Sequence: Synthetic peptide
EVSNRFS

SEQ ID NO: 10539 - DNA, 21 bp, synthetic construct
  misc_feature 1..21: note = Description of Artificial Sequence: Synthetic oligonucleotide
  source 1..21: mol_type = other DNA
gctgcatccagtttgcaaagt

SEQ ID NO: 10540 - protein, 7 aa, synthetic construct
  REGION 1..7: note = Description of Artificial Sequence: Synthetic peptide
AASSLQS

SEQ ID NO: 10541 - DNA, 21 bp, synthetic construct
  misc_feature 1..21: note = Description of Artificial Sequence: Synthetic oligonucleotide
  source 1..21: mol_type = other DNA
gaggtttcccaccggttctct

SEQ ID NO: 10542 - protein, 7 aa, synthetic construct
  REGION 1..7: note = Description of Artificial Sequence: Synthetic peptide
EVSHRFS

SEQ ID NO: 10543 - DNA, 21 bp, synthetic construct
  misc_feature 1..21: note = Description of Artificial Sequence: Synthetic oligonucleotide
  source 1..21: mol_type = other DNA
gctgcatccagtttgcaaagt

SEQ ID NO: 10544 - protein, 7 aa, synthetic construct
  REGION 1..7: note = Description of Artificial Sequence: Synthetic peptide
AASSLQS

SEQ ID NO: 10545 - DNA, 21 bp, synthetic construct
  misc_feature 1..21: note = Description of Artificial Sequence: Synthetic oligonucleotide
  source 1..21: mol_type = other DNA
gcaacttccaaccggttccct

SEQ ID NO: 10546 - protein, 7 aa, synthetic construct
  REGION 1..7: note = Description of Artificial Sequence: Synthetic peptide
ATSNRFP

SEQ ID NO: 10547 - DNA, 21 bp, synthetic construct
  misc_feature 1..21: note = Description of Artificial Sequence: Synthetic oligonucleotide
  source 1..21: mol_type = other DNA
actgcatccagtttgcaaagt

SEQ ID NO: 10548 - protein, 7 aa, synthetic construct
  REGION 1..7: note = Description of Artificial Sequence: Synthetic peptide
TASSLQS

SEQ ID NO: 10549 - DNA, 21 bp, synthetic construct
  misc_feature 1..21: note = Description of Artificial Sequence: Synthetic oligonucleotide
  source 1..21: mol_type = other DNA
ggtgtatccagtttacaaagt

SEQ ID NO: 10550 - protein, 7 aa, synthetic construct
  REGION 1..7: note = Description of Artificial Sequence: Synthetic peptide
GVSSLQS

SEQ ID NO: 10551 - DNA, 21 bp, synthetic construct
  misc_feature 1..21: note = Description of Artificial Sequence: Synthetic oligonucleotide
  source 1..21: mol_type = other DNA
gaagtttccaaccggttctct

SEQ ID NO: 10552 - protein, 7 aa, synthetic construct
  REGION 1..7: note = Description of Artificial Sequence: Synthetic peptide
EVSNRFS

SEQ ID NO: 10553 - DNA, 21 bp, synthetic construct
  misc_feature 1..21: note = Description of Artificial Sequence: Synthetic oligonucleotide
  source 1..21: mol_type = other DNA
gctgcatccagtttgcaaagt

SEQ ID NO: 10554 - protein, 7 aa, synthetic construct
  REGION 1..7: note = Description of Artificial Sequence: Synthetic peptide
AASSLQS

SEQ ID NO: 10555 - DNA, 21 bp, synthetic construct
  misc_feature 1..21: note = Description of Artificial Sequence: Synthetic oligonucleotide
  source 1..21: mol_type = other DNA
actacattgaatttgcaaagt

SEQ ID NO: 10556 - protein, 7 aa, synthetic construct
  REGION 1..7: note = Description of Artificial Sequence: Synthetic peptide
TTLNLQS

SEQ ID NO: 10557 - DNA, 21 bp, synthetic construct
  misc_feature 1..21: note = Description of Artificial Sequence: Synthetic oligonucleotide
  source 1..21: mol_type = other DNA
tgggcatctacccgggaatcc

SEQ ID NO: 10558 - protein, 7 aa, synthetic construct
  REGION 1..7: note = Description of Artificial Sequence: Synthetic peptide
WASTRES

SEQ ID NO: 10559 - DNA, 21 bp, synthetic construct
  misc_feature 1..21: note = Description of Artificial Sequence: Synthetic oligonucleotide
  source 1..21: mol_type = other DNA
actgcatccagtttgcaaagt

SEQ ID NO: 10560 - protein, 7 aa, synthetic construct
  REGION 1..7: note = Description of Artificial Sequence: Synthetic peptide
TASSLQS

SEQ ID NO: 10561 - DNA, 21 bp, synthetic construct
  misc_feature 1..21: note = Description of Artificial Sequence: Synthetic oligonucleotide
  source 1..21: mol_type = other DNA
gaagtttccaatcggttctct

SEQ ID NO: 10562 - protein, 7 aa, synthetic construct
  REGION 1..7: note = Description of Artificial Sequence: Synthetic peptide
EVSNRFS

SEQ ID NO: 10563 - DNA, 21 bp, synthetic construct
  misc_feature 1..21: note = Description of Artificial Sequence: Synthetic oligonucleotide
  source 1..21: mol_type = other DNA
gctgcatccagtttacaaagt

SEQ ID NO: 10564 - protein, 7 aa, synthetic construct
  REGION 1..7: note = Description of Artificial Sequence: Synthetic peptide
AASSLQS

SEQ ID NO: 10565 - DNA, 21 bp, synthetic construct
  misc_feature 1..21: note = Description of Artificial Sequence: Synthetic oligonucleotide
  source 1..21: mol_type = other DNA
gatgcatccaatttggaaaca

SEQ ID NO: 10566 - protein, 7 aa, synthetic construct
  REGION 1..7: note = Description of Artificial Sequence: Synthetic peptide
DASNLET

SEQ ID NO: 10567 - DNA, 21 bp, synthetic construct
  misc_feature 1..21: note = Description of Artificial Sequence: Synthetic oligonucleotide
  source 1..21: mol_type = other DNA
gttgtatccagtttgcaaagt

SEQ ID NO: 10568 - protein, 7 aa, synthetic construct
  REGION 1..7: note = Description of Artificial Sequence: Synthetic peptide
VVSSLQS

SEQ ID NO: 10569 - DNA, 21 bp, synthetic construct
  misc_feature 1..21: note = Description of Artificial Sequence: Synthetic oligonucleotide
  source 1..21: mol_type = other DNA
ggtgcatccagcagggccact

SEQ ID NO: 10570 - protein, 7 aa, synthetic construct
  REGION 1..7: note = Description of Artificial Sequence: Synthetic peptide
GASSRAT

SEQ ID NO: 10571 - DNA, 21 bp, synthetic construct
  misc_feature 1..21: note = Description of Artificial Sequence: Synthetic oligonucleotide
  source 1..21: mol_type = other DNA
tctgcttcccagtccttctca

SEQ ID NO: 10572 - protein, 7 aa, synthetic construct
  REGION 1..7: note = Description of Artificial Sequence: Synthetic peptide
SASQSFS

SEQ ID NO: 10573 - DNA, 21 bp, synthetic construct
  misc_feature 1..21: note = Description of Artificial Sequence: Synthetic oligonucleotide
  source 1..21: mol_type = other DNA
aaaacatccagtttacaaagt

SEQ ID NO: 10574 - protein, 7 aa, synthetic construct
  REGION 1..7: note = Description of Artificial Sequence: Synthetic peptide
KTSSLQS

SEQ ID NO: 10575 - DNA, 21 bp, synthetic construct
  misc_feature 1..21: note = Description of Artificial Sequence: Synthetic oligonucleotide
  source 1..21: mol_type = other DNA
ggtgcatccaccagggccact

SEQ ID NO: 10576 - protein, 7 aa, synthetic construct
  REGION 1..7: note = Description of Artificial Sequence: Synthetic peptide
GASTRAT

SEQ ID NO: 10577 - DNA, 21 bp, synthetic construct
  misc_feature 1..21: note = Description of Artificial Sequence: Synthetic oligonucleotide
  source 1..21: mol_type = other DNA
tatgcttcccagtccttctca

SEQ ID NO: 10578 - protein, 7 aa, synthetic construct
  REGION 1..7: note = Description of Artificial Sequence: Synthetic peptide
YASQSFS

SEQ ID NO: 10579 - DNA, 21 bp, synthetic construct
  misc_feature 1..21: note = Description of Artificial Sequence: Synthetic oligonucleotide
  source 1..21: mol_type = other DNA
aaagcatccagtttgcaaagt

SEQ ID NO: 10580 - protein, 7 aa, synthetic construct
  REGION 1..7: note = Description of Artificial Sequence: Synthetic peptide
KASSLQS

SEQ ID NO: 10581 - DNA, 21 bp, synthetic construct
  misc_feature 1..21: note = Description of Artificial Sequence: Synthetic oligonucleotide
  source 1..21: mol_type = other DNA
gaggtttccaaccggttcgct

SEQ ID NO: 10582 - protein, 7 aa, synthetic construct
  REGION 1..7: note = Description of Artificial Sequence: Synthetic peptide
EVSNRFA

SEQ ID NO: 10583 - DNA, 21 bp, synthetic construct
  misc_feature 1..21: note = Description of Artificial Sequence: Synthetic oligonucleotide
  source 1..21: mol_type = other DNA
tatgcttcccagtccttctca

SEQ ID NO: 10584 - protein, 7 aa, synthetic construct
  REGION 1..7: note = Description of Artificial Sequence: Synthetic peptide
YASQSFS

SEQ ID NO: 10585 - DNA, 21 bp, synthetic construct
  misc_feature 1..21: note = Description of Artificial Sequence: Synthetic oligonucleotide
  source 1..21: mol_type = other DNA
actgcatccagtttgcaaagt

SEQ ID NO: 10586 - protein, 7 aa, synthetic construct
  REGION 1..7: note = Description of Artificial Sequence: Synthetic peptide
TASSLQS

SEQ ID NO: 10587 - DNA, 21 bp, synthetic construct
  misc_feature 1..21: note = Description of Artificial Sequence: Synthetic oligonucleotide
  source 1..21: mol_type = other DNA
gttgcatccactttgcaatca

SEQ ID NO: 10588 - protein, 7 aa, synthetic construct
  REGION 1..7: note = Description of Artificial Sequence: Synthetic peptide
VASTLQS

SEQ ID NO: 10589 - DNA, 21 bp, synthetic construct
  misc_feature 1..21: note = Description of Artificial Sequence: Synthetic oligonucleotide
  source 1..21: mol_type = other DNA
gctgcatccagtttgcaaagt

SEQ ID NO: 10590 - protein, 7 aa, synthetic construct
  REGION 1..7: note = Description of Artificial Sequence: Synthetic peptide
AASSLQS

SEQ ID NO: 10591 - DNA, 21 bp, synthetic construct
  misc_feature 1..21: note = Description of Artificial Sequence: Synthetic oligonucleotide
  source 1..21: mol_type = other DNA
aaagcatccagtttgcaaggt

SEQ ID NO: 10592 - protein, 7 aa, synthetic construct
  REGION 1..7: note = Description of Artificial Sequence: Synthetic peptide
KASSLQG

SEQ ID NO: 10593 - DNA, 21 bp, synthetic construct
  misc_feature 1..21: note = Description of Artificial Sequence: Synthetic oligonucleotide
  source 1..21: mol_type = other DNA
gaactttccaaccggttctct

SEQ ID NO: 10594 - protein, 7 aa, synthetic construct
  REGION 1..7: note = Description of Artificial Sequence: Synthetic peptide
ELSNRFS

SEQ ID NO: 10595 - DNA, 21 bp, synthetic construct
  misc_feature 1..21: note = Description of Artificial Sequence: Synthetic oligonucleotide
  source 1..21: mol_type = other DNA
tgggcatctacccgggaatcc

SEQ ID NO: 10596 - protein, 7 aa, synthetic construct
  REGION 1..7: note = Description of Artificial Sequence: Synthetic peptide
WASTRES

SEQ ID NO: 10597 - DNA, 21 bp, synthetic construct
  misc_feature 1..21: note = Description of Artificial Sequence: Synthetic oligonucleotide
  source 1..21: mol_type = other DNA
ggtgcatccagcagggccact

SEQ ID NO: 10598 - protein, 7 aa, synthetic construct
  REGION 1..7: note = Description of Artificial Sequence: Synthetic peptide
GASSRAT

SEQ ID NO: 10599 - DNA, 21 bp, synthetic construct
  misc_feature 1..21: note = Description of Artificial Sequence: Synthetic oligonucleotide
  source 1..21: mol_type = other DNA
gctgcatccagtttgcaaagt

SEQ ID NO: 10600 - protein, 7 aa, synthetic construct
  REGION 1..7: note = Description of Artificial Sequence: Synthetic peptide
AASSLQS

SEQ ID NO: 10601 - DNA, 21 bp, synthetic construct
  misc_feature 1..21: note = Description of Artificial Sequence: Synthetic oligonucleotide
  source 1..21: mol_type = other DNA
ggtgcatccagcagggccact

SEQ ID NO: 10602 - protein, 7 aa, synthetic construct
  REGION 1..7: note = Description of Artificial Sequence: Synthetic peptide
GASSRAT

SEQ ID NO: 10603 - DNA, 21 bp, synthetic construct
  misc_feature 1..21: note = Description of Artificial Sequence: Synthetic oligonucleotide
  source 1..21: mol_type = other DNA
ggtgcatccagcagggccact

SEQ ID NO: 10604 - protein, 7 aa, synthetic construct
  REGION 1..7: note = Description of Artificial Sequence: Synthetic peptide
GASSRAT

SEQ ID NO: 10605 - DNA, 21 bp, synthetic construct
  misc_feature 1..21: note = Description of Artificial Sequence: Synthetic oligonucleotide
  source 1..21: mol_type = other DNA
ggtgcatccagcagggccact

SEQ ID NO: 10606 - protein, 7 aa, synthetic construct
  REGION 1..7: note = Description of Artificial Sequence: Synthetic peptide
GASSRAT

SEQ ID NO: 10607 - DNA, 21 bp, synthetic construct
  misc_feature 1..21: note = Description of Artificial Sequence: Synthetic oligonucleotide
  source 1..21: mol_type = other DNA
gaggtttccaaccggttcgct

SEQ ID NO: 10608 - protein, 7 aa, synthetic construct
  REGION 1..7: note = Description of Artificial Sequence: Synthetic peptide
EVSNRFA

SEQ ID NO: 10609 - DNA, 21 bp, synthetic construct
  misc_feature 1..21: note = Description of Artificial Sequence: Synthetic oligonucleotide
  source 1..21: mol_type = other DNA
tgggcatctacccgaaaatcc

SEQ ID NO: 10610 - protein, 7 aa, synthetic construct
  REGION 1..7: note = Description of Artificial Sequence: Synthetic peptide
WASTRKS

SEQ ID NO: 10611 - DNA, 21 bp, synthetic construct
  misc_feature 1..21: note = Description of Artificial Sequence: Synthetic oligonucleotide
  source 1..21: mol_type = other DNA
actgcatccagtttgcaaaat

SEQ ID NO: 10612 - protein, 7 aa, synthetic construct
  REGION 1..7: note = Description of Artificial Sequence: Synthetic peptide
TASSLQN

SEQ ID NO: 10613 - DNA, 21 bp, synthetic construct
  misc_feature 1..21: note = Description of Artificial Sequence: Synthetic oligonucleotide
  source 1..21: mol_type = other DNA
aaagcatccagtttgcaaagt

SEQ ID NO: 10614 - protein, 7 aa, synthetic construct
  REGION 1..7: note = Description of Artificial Sequence: Synthetic peptide
KASSLQS

SEQ ID NO: 10615 - DNA, 21 bp, synthetic construct
  misc_feature 1..21: note = Description of Artificial Sequence: Synthetic oligonucleotide
  source 1..21: mol_type = other DNA
gctgcatccagtttgcaaagt

SEQ ID NO: 10616 - protein, 7 aa, synthetic construct
  REGION 1..7: note = Description of Artificial Sequence: Synthetic peptide
AASSLQS

SEQ ID NO: 10617 - DNA, 21 bp, synthetic construct
  misc_feature 1..21: note = Description of Artificial Sequence: Synthetic oligonucleotide
  source 1..21: mol_type = other DNA
tatgcttcccagtccctctca

SEQ ID NO: 10618 - protein, 7 aa, synthetic construct
  REGION 1..7: note = Description of Artificial Sequence: Synthetic peptide
YASQSLS

SEQ ID NO: 10619 - DNA, 21 bp, synthetic construct
  misc_feature 1..21: note = Description of Artificial Sequence: Synthetic oligonucleotide
  source 1..21: mol_type = other DNA
ggtgcttccaacagggccact

SEQ ID NO: 10620 - protein, 7 aa, synthetic construct
  REGION 1..7: note = Description of Artificial Sequence: Synthetic peptide
GASNRAT

SEQ ID NO: 10621 - DNA, 21 bp, synthetic construct
  misc_feature 1..21: note = Description of Artificial Sequence: Synthetic oligonucleotide
  source 1..21: mol_type = other DNA
tatgcttcccagtccttctca

SEQ ID NO: 10622 - protein, 7 aa, synthetic construct
  REGION 1..7: note = Description of Artificial Sequence: Synthetic peptide
YASQSFS

SEQ ID NO: 10623 - DNA, 21 bp, synthetic construct
  misc_feature 1..21: note = Description of Artificial Sequence: Synthetic oligonucleotide
  source 1..21: mol_type = other DNA
gttgcatccagtttggaaagt

SEQ ID NO: 10624 - protein, 7 aa, synthetic construct
  REGION 1..7: note = Description of Artificial Sequence: Synthetic peptide
VASSLES

SEQ ID NO: 10625 - DNA, 21 bp, synthetic construct
  misc_feature 1..21: note = Description of Artificial Sequence: Synthetic oligonucleotide
  source 1..21: mol_type = other DNA
gaggtttccaaccggttcgct

SEQ ID NO: 10626 - protein, 7 aa, synthetic construct
  REGION 1..7: note = Description of Artificial Sequence: Synthetic peptide
EVSNRFA

SEQ ID NO: 10627 - DNA, 21 bp, synthetic construct
  misc_feature 1..21: note = Description of Artificial Sequence: Synthetic oligonucleotide
  source 1..21: mol_type = other DNA
gctgcatccagtttgcaaagt

SEQ ID NO: 10628 - protein, 7 aa, synthetic construct
  REGION 1..7: note = Description of Artificial Sequence: Synthetic peptide
AASSLQS

SEQ ID NO: 10629 - DNA, 21 bp, synthetic construct
  misc_feature 1..21: note = Description of Artificial Sequence: Synthetic oligonucleotide
  source 1..21: mol_type = other DNA
ggtgtttccagtttgcagagt

SEQ ID NO: 10630 - protein, 7 aa, synthetic construct
  REGION 1..7: note = Description of Artificial Sequence: Synthetic peptide
GVSSLQS

SEQ ID NO: 10631 - DNA, 21 bp, synthetic construct
  misc_feature 1..21: note = Description of Artificial Sequence: Synthetic oligonucleotide
  source 1..21: mol_type = other DNA
gctgcatccagtttgcaaagt

SEQ ID NO: 10632 - protein, 7 aa, synthetic construct
  REGION 1..7: note = Description of Artificial Sequence: Synthetic peptide
AASSLQS

SEQ ID NO: 10633 - DNA, 21 bp, synthetic construct
  misc_feature 1..21: note = Description of Artificial Sequence: Synthetic oligonucleotide
  source 1..21: mol_type = other DNA
attgcatccagtttgcaaagt

SEQ ID NO: 10634 - protein, 7 aa, synthetic construct
  REGION 1..7: note = Description of Artificial Sequence: Synthetic peptide
IASSLQS

SEQ ID NO: 10635 - DNA, 21 bp, synthetic construct
  misc_feature 1..21: note = Description of Artificial Sequence: Synthetic oligonucleotide
  source 1..21: mol_type = other DNA
attgcatccagtttgcaaagt

SEQ ID NO: 10636 - protein, 7 aa, synthetic construct
  REGION 1..7: note = Description of Artificial Sequence: Synthetic peptide
IASSLQS

SEQ ID NO: 10637 - DNA, 21 bp, synthetic construct
  misc_feature 1..21: note = Description of Artificial Sequence: Synthetic oligonucleotide
  source 1..21: mol_type = other DNA
gttgcatccagtttgcaaagt

SEQ ID NO: 10638 - protein, 7 aa, synthetic construct
  REGION 1..7: note = Description of Artificial Sequence: Synthetic peptide
VASSLQS

SEQ ID NO: 10639 - DNA, 21 bp, synthetic construct
  misc_feature 1..21: note = Description of Artificial Sequence: Synthetic oligonucleotide
  source 1..21: mol_type = other DNA
gctgcatccagtttgcaaagt

SEQ ID NO: 10640 - protein, 7 aa, synthetic construct
  REGION 1..7: note = Description of Artificial Sequence: Synthetic peptide
AASSLQS

SEQ ID NO: 10641 - DNA, 21 bp, synthetic construct
  misc_feature 1..21: note = Description of Artificial Sequence: Synthetic oligonucleotide
  source 1..21: mol_type = other DNA
gaagtttccaagcggttctct

SEQ ID NO: 10642 - protein, 7 aa, synthetic construct
  REGION 1..7: note = Description of Artificial Sequence: Synthetic peptide
EVSKRFS

SEQ ID NO: 10643 - DNA, 21 bp, synthetic construct
  misc_feature 1..21: note = Description of Artificial Sequence: Synthetic oligonucleotide
  source 1..21: mol_type = other DNA
gctgcatccagtttacaaagt

SEQ ID NO: 10644 - protein, 7 aa, synthetic construct
  REGION 1..7: note = Description of Artificial Sequence: Synthetic peptide
AASSLQS

SEQ ID NO: 10645 - DNA, 21 bp, synthetic construct
  misc_feature 1..21: note = Description of Artificial Sequence: Synthetic oligonucleotide
  source 1..21: mol_type = other DNA
gctgcttccagtttgcaaagt

SEQ ID NO: 10646 - protein, 7 aa, synthetic construct
  REGION 1..7: note = Description of Artificial Sequence: Synthetic peptide
AASSLQS

SEQ ID NO: 10647 - DNA, 21 bp, synthetic construct
  misc_feature 1..21: note = Description of Artificial Sequence: Synthetic oligonucleotide
  source 1..21: mol_type = other DNA
gctgcatccaatttgcaaagt

SEQ ID NO: 10648 - protein, 7 aa, synthetic construct
  REGION 1..7: note = Description of Artificial Sequence: Synthetic peptide
AASNLQS

SEQ ID NO: 10649 - DNA, 21 bp, synthetic construct
  misc_feature 1..21: note = Description of Artificial Sequence: Synthetic oligonucleotide
  source 1..21: mol_type = other DNA
gctgcatccagtttgcaaagt

SEQ ID NO: 10650 - protein, 7 aa, synthetic construct
  REGION 1..7: note = Description of Artificial Sequence: Synthetic peptide
AASSLQS

SEQ ID NO: 10651 - DNA, 21 bp, synthetic construct
  misc_feature 1..21: note = Description of Artificial Sequence: Synthetic oligonucleotide
  source 1..21: mol_type = other DNA
gaagtttccaaccggttctct

SEQ ID NO: 10652 - protein, 7 aa, synthetic construct
  REGION 1..7: note = Description of Artificial Sequence: Synthetic peptide
EVSNRFS

SEQ ID NO: 10653 - DNA, 21 bp, synthetic construct
  misc_feature 1..21: note = Description of Artificial Sequence: Synthetic oligonucleotide
  source 1..21: mol_type = other DNA
gaagtttccaaccggttctct

SEQ ID NO: 10654 - protein, 7 aa, synthetic construct
  REGION 1..7: note = Description of Artificial Sequence: Synthetic peptide
EVSNRFS

SEQ ID NO: 10655 - DNA, 21 bp, synthetic construct
  misc_feature 1..21: note = Description of Artificial Sequence: Synthetic oligonucleotide
  source 1..21: mol_type = other DNA
tgggcatctacccgggaatcc

SEQ ID NO: 10656 - protein, 7 aa, synthetic construct
  REGION 1..7: note = Description of Artificial Sequence: Synthetic peptide
WASTRES

SEQ ID NO: 10657 - DNA, 21 bp, synthetic construct
  misc_feature 1..21: note = Description of Artificial Sequence: Synthetic oligonucleotide
  source 1..21: mol_type = other DNA
ggtgcatccagcagggccact

SEQ ID NO: 10658 - protein, 7 aa, synthetic construct
  REGION 1..7: note = Description of Artificial Sequence: Synthetic peptide
GASSRAT

SEQ ID NO: 10659 - DNA, 21 bp, synthetic construct
  misc_feature 1..21: note = Description of Artificial Sequence: Synthetic oligonucleotide
  source 1..21: mol_type = other DNA
actgcatccagtttgcaaagt

SEQ ID NO: 10660 - protein, 7 aa, synthetic construct
  REGION 1..7: note = Description of Artificial Sequence: Synthetic peptide
TASSLQS

SEQ ID NO: 10661 - DNA, 21 bp, synthetic construct
  misc_feature 1..21: note = Description of Artificial Sequence: Synthetic oligonucleotide
  source 1..21: mol_type = other DNA
gctgtgtccagtttgcaaagt

SEQ ID NO: 10662 - protein, 7 aa, synthetic construct
  REGION 1..7: note = Description of Artificial Sequence: Synthetic peptide
AVSSLQS

SEQ ID NO: 10663 - DNA, 21 bp, synthetic construct
  misc_feature 1..21: note = Description of Artificial Sequence: Synthetic oligonucleotide
  source 1..21: mol_type = other DNA
ggtgcatccagcagggccact

SEQ ID NO: 10664 - protein, 7 aa, synthetic construct
  REGION 1..7: note = Description of Artificial Sequence: Synthetic peptide
GASSRAT

SEQ ID NO: 10665 - DNA, 21 bp, synthetic construct
  misc_feature 1..21: note = Description of Artificial Sequence: Synthetic oligonucleotide
  source 1..21: mol_type = other DNA
ggtgcataccgcagggccact

SEQ ID NO: 10666 - protein, 7 aa, synthetic construct
  REGION 1..7: note = Description of Artificial Sequence: Synthetic peptide
GAYRRAT

SEQ ID NO: 10667 - DNA, 21 bp, synthetic construct
  misc_feature 1..21: note = Description of Artificial Sequence: Synthetic oligonucleotide
  source 1..21: mol_type = other DNA
tgggcatctacccgggaatcc

SEQ ID NO: 10668 - protein, 7 aa, synthetic construct
  REGION 1..7: note = Description of Artificial Sequence: Synthetic peptide
WASTRES

SEQ ID NO: 10669 - DNA, 21 bp, synthetic construct
  misc_feature 1..21: note = Description of Artificial Sequence: Synthetic oligonucleotide
  source 1..21: mol_type = other DNA
tctgcttcccagtccttctca

SEQ ID NO: 10670 - protein, 7 aa, synthetic construct
  REGION 1..7: note = Description of Artificial Sequence: Synthetic peptide
SASQSFS

SEQ ID NO: 10671 - DNA, 21 bp, synthetic construct
  misc_feature 1..21: note = Description of Artificial Sequence: Synthetic oligonucleotide
  source 1..21: mol_type = other DNA
actgcatccagtttgcaaagt

SEQ ID NO: 10672 - protein, 7 aa, synthetic construct
  REGION 1..7: note = Description of Artificial Sequence: Synthetic peptide
TASSLQS

SEQ ID NO: 10673 - DNA, 21 bp, synthetic construct
  misc_feature 1..21: note = Description of Artificial Sequence: Synthetic oligonucleotide
  source 1..21: mol_type = other DNA
gctgcatccagtttgcaaagt

SEQ ID NO: 10674 - protein, 7 aa, synthetic construct
  REGION 1..7: note = Description of Artificial Sequence: Synthetic peptide
AASSLQS

SEQ ID NO: 10675 - DNA, 21 bp, synthetic construct
  misc_feature 1..21: note = Description of Artificial Sequence: Synthetic oligonucleotide
  source 1..21: mol_type = other DNA
tgggcatctacccgggaatcc

SEQ ID NO: 10676 - protein, 7 aa, synthetic construct
  REGION 1..7: note = Description of Artificial Sequence: Synthetic peptide
WASTRES

SEQ ID NO: 10677 - DNA, 21 bp, synthetic construct
  misc_feature 1..21: note = Description of Artificial Sequence: Synthetic oligonucleotide
  source 1..21: mol_type = other DNA
tgggcatctacccggaaatcc

SEQ ID NO: 10678 - protein, 7 aa, synthetic construct
  REGION 1..7: note = Description of Artificial Sequence: Synthetic peptide
WASTRKS

SEQ ID NO: 10679 - DNA, 21 bp, synthetic construct
  misc_feature 1..21: note = Description of Artificial Sequence: Synthetic oligonucleotide
  source 1..21: mol_type = other DNA
gaggtttccaaccggttctct

SEQ ID NO: 10680 - protein, 7 aa, synthetic construct
  REGION 1..7: note = Description of Artificial Sequence: Synthetic peptide
EVSNRFS

SEQ ID NO: 10681 - DNA, 21 bp, synthetic construct
  misc_feature 1..21: note = Description of Artificial Sequence: Synthetic oligonucleotide
  source 1..21: mol_type = other DNA
tatgcttcccagtccttctca

SEQ ID NO: 10682 - protein, 7 aa, synthetic construct
  REGION 1..7: note = Description of Artificial Sequence: Synthetic peptide
YASQSFS

SEQ ID NO: 10683 - DNA, 21 bp, synthetic construct
  misc_feature 1..21: note = Description of Artificial Sequence: Synthetic oligonucleotide
  source 1..21: mol_type = other DNA
aaagcatccagtttacaaagt

SEQ ID NO: 10684 - protein, 7 aa, synthetic construct
  REGION 1..7: note = Description of Artificial Sequence: Synthetic peptide
KASSLQS

SEQ ID NO: 10685 - DNA, 21 bp, synthetic construct
  misc_feature 1..21: note = Description of Artificial Sequence: Synthetic oligonucleotide
  source 1..21: mol_type = other DNA
tatgcttcccagtccttctca

SEQ ID NO: 10686 - protein, 7 aa, synthetic construct
  REGION 1..7: note = Description of Artificial Sequence: Synthetic peptide
YASQSFS

SEQ ID NO: 10687 - DNA, 21 bp, synthetic construct
  misc_feature 1..21: note = Description of Artificial Sequence: Synthetic oligonucleotide
  source 1..21: mol_type = other DNA
gctgcatccagtttgcaaagt

SEQ ID NO: 10688 - protein, 7 aa, synthetic construct
  REGION 1..7: note = Description of Artificial Sequence: Synthetic peptide
AASSLQS

SEQ ID NO: 10689 - DNA, 21 bp, synthetic construct
  misc_feature 1..21: note = Description of Artificial Sequence: Synthetic oligonucleotide
  source 1..21: mol_type = other DNA
ggtccatccagcagggccact

SEQ ID NO: 10690 - protein, 7 aa, synthetic construct
  REGION 1..7: note = Description of Artificial Sequence: Synthetic peptide
GPSSRAT

SEQ ID NO: 10691 - DNA, 21 bp, synthetic construct
  misc_feature 1..21: note = Description of Artificial Sequence: Synthetic oligonucleotide
  source 1..21: mol_type = other DNA
ggtgcatccactagggccact

SEQ ID NO: 10692 - protein, 7 aa, synthetic construct
  REGION 1..7: note = Description of Artificial Sequence: Synthetic peptide
GASTRAT

SEQ ID NO: 10693 - DNA, 21 bp, synthetic construct
  misc_feature 1..21: note = Description of Artificial Sequence: Synthetic oligonucleotide
  source 1..21: mol_type = other DNA
tatgcttcccagtccttctca

SEQ ID NO: 10694 - protein, 7 aa, synthetic construct
  REGION 1..7: note = Description of Artificial Sequence: Synthetic peptide
YASQSFS

SEQ ID NO: 10695 - DNA, 21 bp, synthetic construct
  misc_feature 1..21: note = Description of Artificial Sequence: Synthetic oligonucleotide
  source 1..21: mol_type = other DNA
gctgcatccagtttgcaaagt

SEQ ID NO: 10696 - protein, 7 aa, synthetic construct
  REGION 1..7: note = Description of Artificial Sequence: Synthetic peptide
AASSLQS

SEQ ID NO: 10697 - DNA, 21 bp, synthetic construct
  misc_feature 1..21: note = Description of Artificial Sequence: Synthetic oligonucleotide
  source 1..21: mol_type = other DNA
gctgcatccagtttgcaaagt

SEQ ID NO: 10698 - protein, 7 aa, synthetic construct
  REGION 1..7: note = Description of Artificial Sequence: Synthetic peptide
AASSLQS

SEQ ID NO: 10699 - DNA, 21 bp, synthetic construct
  misc_feature 1..21: note = Description of Artificial Sequence: Synthetic oligonucleotide
  source 1..21: mol_type = other DNA
tgggcctctacccgggaatcc

SEQ ID NO: 10700 - protein, 7 aa, synthetic construct
  REGION 1..7: note = Description of Artificial Sequence: Synthetic peptide
WASTRES

SEQ ID NO: 10701 - DNA, 21 bp, synthetic construct
  misc_feature 1..21: note = Description of Artificial Sequence: Synthetic oligonucleotide
  source 1..21: mol_type = other DNA
aaagcatccagtttgcaaagt

SEQ ID NO: 10702 - protein, 7 aa, synthetic construct
  REGION 1..7: note = Description of Artificial Sequence: Synthetic peptide
KASSLQS

SEQ ID NO: 10703 - DNA, 21 bp, synthetic construct
  misc_feature 1..21: note = Description of Artificial Sequence: Synthetic oligonucleotide
  source 1..21: mol_type = other DNA
gctgcatccagtttgcaaagt

SEQ ID NO: 10704 - protein, 7 aa, synthetic construct
  REGION 1..7: note = Description of Artificial Sequence: Synthetic peptide
AASSLQS

SEQ ID NO: 10705 - DNA, 21 bp, synthetic construct
  misc_feature 1..21: note = Description of Artificial Sequence: Synthetic oligonucleotide
  source 1..21: mol_type = other DNA
gctgcatccagtttgcaaagt

SEQ ID NO: 10706 - protein, 7 aa, synthetic construct
  REGION 1..7: note = Description of Artificial Sequence: Synthetic peptide
AASSLQS

SEQ ID NO: 10707 - DNA, 21 bp, synthetic construct
  misc_feature 1..21: note = Description of Artificial Sequence: Synthetic oligonucleotide
  source 1..21: mol_type = other DNA
ggtgcatccagtttgcaaagt

SEQ ID NO: 10708 - protein, 7 aa, synthetic construct
  REGION 1..7: note = Description of Artificial Sequence: Synthetic peptide
GASSLQS

SEQ ID NO: 10709 - DNA, 21 bp, synthetic construct
  misc_feature 1..21: note = Description of Artificial Sequence: Synthetic oligonucleotide
  source 1..21: mol_type = other DNA
ggtgcatctagcagggccact

SEQ ID NO: 10710 - protein, 7 aa, synthetic construct
  REGION 1..7: note = Description of Artificial Sequence: Synthetic peptide
GASSRAT

SEQ ID NO: 10711 - DNA, 21 bp, synthetic construct
  misc_feature 1..21: note = Description of Artificial Sequence: Synthetic oligonucleotide
  source 1..21: mol_type = other DNA
gctgcatccagtttgcaaagt

SEQ ID NO: 10712 - protein, 7 aa, synthetic construct
  REGION 1..7: note = Description of Artificial Sequence: Synthetic peptide
AASSLQS

SEQ ID NO: 10713 - DNA, 21 bp, synthetic construct
  misc_feature 1..21: note = Description of Artificial Sequence: Synthetic oligonucleotide
  source 1..21: mol_type = other DNA
ggtgcatccagcagggccact

SEQ ID NO: 10714 - protein, 7 aa, synthetic construct
  REGION 1..7: note = Description of Artificial Sequence: Synthetic peptide
GASSRAT

SEQ ID NO: 10715 - DNA, 21 bp, synthetic construct
  misc_feature 1..21: note = Description of Artificial Sequence: Synthetic oligonucleotide
  source 1..21: mol_type = other DNA
gttgtatccagtttacaaagt

SEQ ID NO: 10716 - protein, 7 aa, synthetic construct
  REGION 1..7: note = Description of Artificial Sequence: Synthetic peptide
VVSSLQS

SEQ ID NO: 10717 - DNA, 21 bp, synthetic construct
  misc_feature 1..21: note = Description of Artificial Sequence: Synthetic oligonucleotide
  source 1..21: mol_type = other DNA
gctgcatccagtttgcaaagt

SEQ ID NO: 10718 - protein, 7 aa, synthetic construct
  REGION 1..7: note = Description of Artificial Sequence: Synthetic peptide
AASSLQS

SEQ ID NO: 10719 - DNA, 21 bp, synthetic construct
  misc_feature 1..21: note = Description of Artificial Sequence: Synthetic oligonucleotide
  source 1..21: mol_type = other DNA
tatgcttcccagtcattctca

SEQ ID NO: 10720 - protein, 7 aa, synthetic construct
  REGION 1..7: note = Description of Artificial Sequence: Synthetic peptide
YASQSFS

SEQ ID NO: 10721 - DNA, 21 bp, synthetic construct
  misc_feature 1..21: note = Description of Artificial Sequence: Synthetic oligonucleotide
  source 1..21: mol_type = other DNA
gctgcatccagtttgcaaagt

SEQ ID NO: 10722 - protein, 7 aa, synthetic construct
  REGION 1..7: note = Description of Artificial Sequence: Synthetic peptide
AASSLQS

SEQ ID NO: 10723 - DNA, 21 bp, synthetic construct
  misc_feature 1..21: note = Description of Artificial Sequence: Synthetic oligonucleotide
  source 1..21: mol_type = other DNA
aaagcatccagtttgcaaagt

SEQ ID NO: 10724 - protein, 7 aa, synthetic construct
  REGION 1..7: note = Description of Artificial Sequence: Synthetic peptide
KASSLQS

SEQ ID NO: 10725 - DNA, 21 bp, synthetic construct
  misc_feature 1..21: note = Description of Artificial Sequence: Synthetic oligonucleotide
  source 1..21: mol_type = other DNA
actgcatccagtttgcaaagt

SEQ ID NO: 10726 - protein, 7 aa, synthetic construct
  REGION 1..7: note = Description of Artificial Sequence: Synthetic peptide
TASSLQS

SEQ ID NO: 10727 - DNA, 21 bp, synthetic construct
  misc_feature 1..21: note = Description of Artificial Sequence: Synthetic oligonucleotide
  source 1..21: mol_type = other DNA
gctgcatccagtttgcaaagt

SEQ ID NO: 10728 - protein, 7 aa, synthetic construct
  REGION 1..7: note = Description of Artificial Sequence: Synthetic peptide
AASSLQS

SEQ ID NO: 10729 - DNA, 21 bp, synthetic construct
  misc_feature 1..21: note = Description of Artificial Sequence: Synthetic oligonucleotide
  source 1..21: mol_type = other DNA
ggtgcatccagcagggccact

SEQ ID NO: 10730 - protein, 7 aa, synthetic construct
  REGION 1..7: note = Description of Artificial Sequence: Synthetic peptide
GASSRAT

SEQ ID NO: 10731 - DNA, 21 bp, synthetic construct
  misc_feature 1..21: note = Description of Artificial Sequence: Synthetic oligonucleotide
  source 1..21: mol_type = other DNA
aaagcatccagtttgcaaagt

SEQ ID NO: 10732 - protein, 7 aa, synthetic construct
  REGION 1..7: note = Description of Artificial Sequence: Synthetic peptide
KASSLQS

SEQ ID NO: 10733 - DNA, 21 bp, synthetic construct
  misc_feature 1..21: note = Description of Artificial Sequence: Synthetic oligonucleotide
  source 1..21: mol_type = other DNA
gaggtttccaaccggttcgct

SEQ ID NO: 10734 - protein, 7 aa, synthetic construct
  REGION 1..7: note = Description of Artificial Sequence: Synthetic peptide
EVSNRFA

SEQ ID NO: 10735 - DNA, 21 bp, synthetic construct
  misc_feature 1..21: note = Description of Artificial Sequence: Synthetic oligonucleotide
  source 1..21: mol_type = other DNA
gctgcatccagtttgcaaagt

SEQ ID NO: 10736 - protein, 7 aa, synthetic construct
  REGION 1..7: note = Description of Artificial Sequence: Synthetic peptide
AASSLQS

SEQ ID NO: 10737 - DNA, 21 bp, synthetic construct
  misc_feature 1..21: note = Description of Artificial Sequence: Synthetic oligonucleotide
  source 1..21: mol_type = other DNA
gctgaatccagtttacaaagt

SEQ ID NO: 10738 - protein, 7 aa, synthetic construct
  REGION 1..7: note = Description of Artificial Sequence: Synthetic peptide
AESSLQS

SEQ ID NO: 10739 - DNA, 21 bp, synthetic construct
  misc_feature 1..21: note = Description of Artificial Sequence: Synthetic oligonucleotide
  source 1..21: mol_type = other DNA
gctgcatccagtttgcaaagt

SEQ ID NO: 10740 - protein, 7 aa, synthetic construct
  REGION 1..7: note = Description of Artificial Sequence: Synthetic peptide
AASSLQS

SEQ ID NO: 10741 - DNA, 21 bp, synthetic construct
  misc_feature 1..21: note = Description of Artificial Sequence: Synthetic oligonucleotide
  source 1..21: mol_type = other DNA
ggtgtatcccgcagggccact

SEQ ID NO: 10742 - protein, 7 aa, synthetic construct
  REGION 1..7: note = Description of Artificial Sequence: Synthetic peptide
GVSRRAT

SEQ ID NO: 10743 - DNA, 21 bp, synthetic construct
  misc_feature 1..21: note = Description of Artificial Sequence: Synthetic oligonucleotide
  source 1..21: mol_type = other DNA
ggtgcatcccgcagggccact

SEQ ID NO: 10744 - protein, 7 aa, synthetic construct
  REGION 1..7: note = Description of Artificial Sequence: Synthetic peptide
GASRRAT

SEQ ID NO: 10745 - DNA, 21 bp, synthetic construct
  misc_feature 1..21: note = Description of Artificial Sequence: Synthetic oligonucleotide
  source 1..21: mol_type = other DNA
ggtgcatcccgcagggccact

SEQ ID NO: 10746 - protein, 7 aa, synthetic construct
  REGION 1..7: note = Description of Artificial Sequence: Synthetic peptide
GASRRAT

SEQ ID NO: 10747 - DNA, 21 bp, synthetic construct
  misc_feature 1..21: note = Description of Artificial Sequence: Synthetic oligonucleotide
  source 1..21: mol_type = other DNA
ggtgtttccagtttgcaaagt

SEQ ID NO: 10748 - protein, 7 aa, synthetic construct
  REGION 1..7: note = Description of Artificial Sequence: Synthetic peptide
GVSSLQS

SEQ ID NO: 10749 - DNA, 21 bp, synthetic construct
  misc_feature 1..21: note = Description of Artificial Sequence: Synthetic oligonucleotide
  source 1..21: mol_type = other DNA
ggtgcatccaacagggccact

SEQ ID NO: 10750 - protein, 7 aa, synthetic construct
  REGION 1..7: note = Description of Artificial Sequence: Synthetic peptide
GASNRAT

SEQ ID NO: 10751 - DNA, 21 bp, synthetic construct
  misc_feature 1..21: note = Description of Artificial Sequence: Synthetic oligonucleotide
  source 1..21: mol_type = other DNA
ggtgcatccagcagggccact

SEQ ID NO: 10752 - protein, 7 aa, synthetic construct
  REGION 1..7: note = Description of Artificial Sequence: Synthetic peptide
GASSRAT

SEQ ID NO: 10753 - DNA, 21 bp, synthetic construct
  misc_feature 1..21: note = Description of Artificial Sequence: Synthetic oligonucleotide
  source 1..21: mol_type = other DNA
gctgcatccactttacaatca

SEQ ID NO: 10754 - protein, 7 aa, synthetic construct
  REGION 1..7: note = Description of Artificial Sequence: Synthetic peptide
AASTLQS

SEQ ID NO: 10755 - DNA, 21 bp, synthetic construct
  misc_feature 1..21: note = Description of Artificial Sequence: Synthetic oligonucleotide
  source 1..21: mol_type = other DNA
tgggcatctacccgaaaatcc

SEQ ID NO: 10756 - protein, 7 aa, synthetic construct
  REGION 1..7: note = Description of Artificial Sequence: Synthetic peptide
WASTRKS

SEQ ID NO: 10757 - DNA, 21 bp, synthetic construct
  misc_feature 1..21: note = Description of Artificial Sequence: Synthetic oligonucleotide
  source 1..21: mol_type = other DNA
gctgcatccagtttgcaaagt

SEQ ID NO: 10758 - protein, 7 aa, synthetic construct
  REGION 1..7: note = Description of Artificial Sequence: Synthetic peptide
AASSLQS

SEQ ID NO: 10759 - DNA, 21 bp, synthetic construct
  misc_feature 1..21: note = Description of Artificial Sequence: Synthetic oligonucleotide
  source 1..21: mol_type = other DNA
tatgcttcccagtccttctca

SEQ ID NO: 10760 - protein, 7 aa, synthetic construct
  REGION 1..7: note = Description of Artificial Sequence: Synthetic peptide
YASQSFS

SEQ ID NO: 10761 - DNA, 21 bp, synthetic construct
  misc_feature 1..21: note = Description of Artificial Sequence: Synthetic oligonucleotide
  source 1..21: mol_type = other DNA
ggtgcatccagcagggccact

SEQ ID NO: 10762 - protein, 7 aa, synthetic construct
  REGION 1..7: note = Description of Artificial Sequence: Synthetic peptide
GASSRAT

SEQ ID NO: 10763 - DNA, 21 bp, synthetic construct
  misc_feature 1..21: note = Description of Artificial Sequence: Synthetic oligonucleotide
  source 1..21: mol_type = other DNA
ggtgcatccagcagggccact

SEQ ID NO: 10764 - protein, 7 aa, synthetic construct
  REGION 1..7: note = Description of Artificial Sequence: Synthetic peptide
GASSRAT

SEQ ID NO: 10765 - DNA, 21 bp, synthetic construct
  misc_feature 1..21: note = Description of Artificial Sequence: Synthetic oligonucleotide
  source 1..21: mol_type = other DNA
gctgcatccagtttgcaaagt

SEQ ID NO: 10766 - protein, 7 aa, synthetic construct
  REGION 1..7: note = Description of Artificial Sequence: Synthetic peptide
AASSLQS

SEQ ID NO: 10767 - DNA, 21 bp, synthetic construct
  misc_feature 1..21: note = Description of Artificial Sequence: Synthetic oligonucleotide
  source 1..21: mol_type = other DNA
tctgcatccagtttgcaaagg

SEQ ID NO: 10768 - protein, 7 aa, synthetic construct
  REGION 1..7: note = Description of Artificial Sequence: Synthetic peptide
SASSLQR

SEQ ID NO: 10769 - DNA, 21 bp, synthetic construct
  misc_feature 1..21: note = Description of Artificial Sequence: Synthetic oligonucleotide
  source 1..21: mol_type = other DNA
ggtgcatccagcagggccact

SEQ ID NO: 10770 - protein, 7 aa, synthetic construct
  REGION 1..7: note = Description of Artificial Sequence: Synthetic peptide
GASSRAT

SEQ ID NO: 10771 - DNA, 21 bp, synthetic construct
  misc_feature 1..21: note = Description of Artificial Sequence: Synthetic oligonucleotide
  source 1..21: mol_type = other DNA
ggtgcatccagcagggccact

SEQ ID NO: 10772 - protein, 7 aa, synthetic construct
  REGION 1..7: note = Description of Artificial Sequence: Synthetic peptide
GASSRAT

SEQ ID NO: 10773 - DNA, 21 bp, synthetic construct
  misc_feature 1..21: note = Description of Artificial Sequence: Synthetic oligonucleotide
  source 1..21: mol_type = other DNA
gctgcatccagtttgcaaagt

SEQ ID NO: 10774 - protein, 7 aa, synthetic construct
  REGION 1..7: note = Description of Artificial Sequence: Synthetic peptide
AASSLQS

SEQ ID NO: 10775 - DNA, 21 bp, synthetic construct
  misc_feature 1..21: note = Description of Artificial Sequence: Synthetic oligonucleotide
  source 1..21: mol_type = other DNA
ggtgcatcccgcagggccact

SEQ ID NO: 10776 - protein, 7 aa, synthetic construct
  REGION 1..7: note = Description of Artificial Sequence: Synthetic peptide
GASRRAT

SEQ ID NO: 10777 - DNA, 21 bp, synthetic construct
  misc_feature 1..21: note = Description of Artificial Sequence: Synthetic oligonucleotide
  source 1..21: mol_type = other DNA
tatgcttcccagtcattctca

SEQ ID NO: 10778 - protein, 7 aa, synthetic construct
  REGION 1..7: note = Description of Artificial Sequence: Synthetic peptide
YASQSFS

SEQ ID NO: 10779 - DNA, 21 bp, synthetic construct
  misc_feature 1..21: note = Description of Artificial Sequence: Synthetic oligonucleotide
  source 1..21: mol_type = other DNA
gctgcatccagtttgcaaagt

SEQ ID NO: 10780 - protein, 7 aa, synthetic construct
  REGION 1..7: note = Description of Artificial Sequence: Synthetic peptide
AASSLQS

SEQ ID NO: 10781 - DNA, 21 bp, synthetic construct
  misc_feature 1..21: note = Description of Artificial Sequence: Synthetic oligonucleotide
  source 1..21: mol_type = other DNA
ggtgcatccaggagggccact

SEQ ID NO: 10782 - protein, 7 aa, synthetic construct
  REGION 1..7: note = Description of Artificial Sequence: Synthetic peptide
GASRRAT

SEQ ID NO: 10783 - DNA, 21 bp, synthetic construct
  misc_feature 1..21: note = Description of Artificial Sequence: Synthetic oligonucleotide
  source 1..21: mol_type = other DNA
gatgcatccagcagggccact

SEQ ID NO: 10784 - protein, 7 aa, synthetic construct
  REGION 1..7: note = Description of Artificial Sequence: Synthetic peptide
DASSRAT

SEQ ID NO: 10785 - DNA, 21 bp, synthetic construct
  misc_feature 1..21: note = Description of Artificial Sequence: Synthetic oligonucleotide
  source 1..21: mol_type = other DNA
ggtgcatccaccagggccact

SEQ ID NO: 10786 - protein, 7 aa, synthetic construct
  REGION 1..7: note = Description of Artificial Sequence: Synthetic peptide
GASTRAT

SEQ ID NO: 10787 - DNA, 21 bp, synthetic construct
  misc_feature 1..21: note = Description of Artificial Sequence: Synthetic oligonucleotide
  source 1..21: mol_type = other DNA
gctgcatccagtttgcaaagt

SEQ ID NO: 10788 - protein, 7 aa, synthetic construct
  REGION 1..7: note = Description of Artificial Sequence: Synthetic peptide
AASSLQS

SEQ ID NO: 10789 - DNA, 21 bp, synthetic construct
  misc_feature 1..21: note = Description of Artificial Sequence: Synthetic oligonucleotide
  source 1..21: mol_type = other DNA
tctgcttcccagtccttctca

SEQ ID NO: 10790 - protein, 7 aa, synthetic construct
  REGION 1..7: note = Description of Artificial Sequence: Synthetic peptide
SASQSFS

SEQ ID NO: 10791 - DNA, 21 bp, synthetic construct
  misc_feature 1..21: note = Description of Artificial Sequence: Synthetic oligonucleotide
  source 1..21: mol_type = other DNA
ggtgcttccaacagggccact

SEQ ID NO: 10792 - protein, 7 aa, synthetic construct
  REGION 1..7: note = Description of Artificial Sequence: Synthetic peptide
GASNRAT

SEQ ID NO: 10793 - DNA, 21 bp, synthetic construct
  misc_feature 1..21: note = Description of Artificial Sequence: Synthetic oligonucleotide
  source 1..21: mol_type = other DNA
gaggtttccaaccggttctct

SEQ ID NO: 10794 - protein, 7 aa, synthetic construct
  REGION 1..7: note = Description of Artificial Sequence: Synthetic peptide
EVSNRFS

SEQ ID NO: 10795 - DNA, 21 bp, synthetic construct
  misc_feature 1..21: note = Description of Artificial Sequence: Synthetic oligonucleotide
  source 1..21: mol_type = other DNA
ggtgcatccagcagggccact

SEQ ID NO: 10796 - protein, 7 aa, synthetic construct
  REGION 1..7: note = Description of Artificial Sequence: Synthetic peptide
GASSRAT

SEQ ID NO: 10797 - DNA, 21 bp, synthetic construct
  misc_feature 1..21: note = Description of Artificial Sequence: Synthetic oligonucleotide
  source 1..21: mol_type = other DNA
ggtgcatccagcagggccact

SEQ ID NO: 10798 - protein, 7 aa, synthetic construct
  REGION 1..7: note = Description of Artificial Sequence: Synthetic peptide
GASSRAT

SEQ ID NO: 10799 - DNA, 21 bp, synthetic construct
  misc_feature 1..21: note = Description of Artificial Sequence: Synthetic oligonucleotide
  source 1..21: mol_type = other DNA
ggtgcatccaggttgcaaagt

SEQ ID NO: 10800 - protein, 7 aa, synthetic construct
  REGION 1..7: note = Description of Artificial Sequence: Synthetic peptide
GASRLQS

SEQ ID NO: 10801 - DNA, 21 bp, synthetic construct
  misc_feature 1..21: note = Description of Artificial Sequence: Synthetic oligonucleotide
  source 1..21: mol_type = other DNA
gctgcatccagtttgcaaagt

SEQ ID NO: 10802 - protein, 7 aa, synthetic construct
  REGION 1..7: note = Description of Artificial Sequence: Synthetic peptide
AASSLQS

SEQ ID NO: 10803 - DNA, 21 bp, synthetic construct
  misc_feature 1..21: note = Description of Artificial Sequence: Synthetic oligonucleotide
  source 1..21: mol_type = other DNA
ggtgcatccagcagggccact

SEQ ID NO: 10804 - protein, 7 aa, synthetic construct
  REGION 1..7: note = Description of Artificial Sequence: Synthetic peptide
GASSRAT

SEQ ID NO: 10805 - DNA, 21 bp, synthetic construct
  misc_feature 1..21: note = Description of Artificial Sequence: Synthetic oligonucleotide
  source 1..21: mol_type = other DNA
gctgcatccagtttacaaagt

SEQ ID NO: 10806 - protein, 7 aa, synthetic construct
  REGION 1..7: note = Description of Artificial Sequence: Synthetic peptide
AASSLQS

SEQ ID NO: 10807 - DNA, 21 bp, synthetic construct
  misc_feature 1..21: note = Description of Artificial Sequence: Synthetic oligonucleotide
  source 1..21: mol_type = other DNA
gctgcatccagtttacaaagt

SEQ ID NO: 10808 - protein, 7 aa, synthetic construct
  REGION 1..7: note = Description of Artificial Sequence: Synthetic peptide
AASSLQS

SEQ ID NO: 10809 - DNA, 21 bp, synthetic construct
  misc_feature 1..21: note = Description of Artificial Sequence: Synthetic oligonucleotide
  source 1..21: mol_type = other DNA
gctgcatccagtttgcaaagt

SEQ ID NO: 10810 - protein, 7 aa, synthetic construct
  REGION 1..7: note = Description of Artificial Sequence: Synthetic peptide
AASSLQS

SEQ ID NO: 10811 - DNA, 21 bp, synthetic construct
  misc_feature 1..21: note = Description of Artificial Sequence: Synthetic oligonucleotide
  source 1..21: mol_type = other DNA
ggtgcatccaacagggccact

SEQ ID NO: 10812 - protein, 7 aa, synthetic construct
  REGION 1..7: note = Description of Artificial Sequence: Synthetic peptide
GASNRAT

SEQ ID NO: 10813 - DNA, 21 bp, synthetic construct
  misc_feature 1..21: note = Description of Artificial Sequence: Synthetic oligonucleotide
  source 1..21: mol_type = other DNA
gctgcatccagtttgctaggt

SEQ ID NO: 10814 - protein, 7 aa, synthetic construct
  REGION 1..7: note = Description of Artificial Sequence: Synthetic peptide
AASSLLG

SEQ ID NO: 10815 - DNA, 21 bp, synthetic construct
  misc_feature 1..21: note = Description of Artificial Sequence: Synthetic oligonucleotide
  source 1..21: mol_type = other DNA
tatgcttcccagtccttctca

SEQ ID NO: 10816 - protein, 7 aa, synthetic construct
  REGION 1..7: note = Description of Artificial Sequence: Synthetic peptide
YASQSFS

SEQ ID NO: 10817 - DNA, 21 bp, synthetic construct
  misc_feature 1..21: note = Description of Artificial Sequence: Synthetic oligonucleotide
  source 1..21: mol_type = other DNA
aaagtatccagtttgcaaagt

SEQ ID NO: 10818 - protein, 7 aa, synthetic construct
  REGION 1..7: note = Description of Artificial Sequence: Synthetic peptide
KVSSLQS

SEQ ID NO: 10819 - DNA, 21 bp, synthetic construct
  misc_feature 1..21: note = Description of Artificial Sequence: Synthetic oligonucleotide
  source 1..21: mol_type = other DNA
ggtgcatttagtagggccact

SEQ ID NO: 10820 - protein, 7 aa, synthetic construct
  REGION 1..7: note = Description of Artificial Sequence: Synthetic peptide
GAFSRAT

SEQ ID NO: 10821 - DNA, 21 bp, synthetic construct
  misc_feature 1..21: note = Description of Artificial Sequence: Synthetic oligonucleotide
  source 1..21: mol_type = other DNA
gctgcatccagtttgcaaagt

SEQ ID NO: 10822 - protein, 7 aa, synthetic construct
  REGION 1..7: note = Description of Artificial Sequence: Synthetic peptide
AASSLQS

SEQ ID NO: 10823 - DNA, 21 bp, synthetic construct
  misc_feature 1..21: note = Description of Artificial Sequence: Synthetic oligonucleotide
  source 1..21: mol_type = other DNA
gctgcatccgatttgcaaagt

SEQ ID NO: 10824 - protein, 7 aa, synthetic construct
  REGION 1..7: note = Description of Artificial Sequence: Synthetic peptide
AASDLQS

SEQ ID NO: 10825 - DNA, 21 bp, synthetic construct
  misc_feature 1..21: note = Description of Artificial Sequence: Synthetic oligonucleotide
  source 1..21: mol_type = other DNA
tatgcttcccagtccttctca

SEQ ID NO: 10826 - protein, 7 aa, synthetic construct
  REGION 1..7: note = Description of Artificial Sequence: Synthetic peptide
YASQSFS

SEQ ID NO: 10827 - DNA, 21 bp, synthetic construct
  misc_feature 1..21: note = Description of Artificial Sequence: Synthetic oligonucleotide
  source 1..21: mol_type = other DNA
tatgcttcccagtccttctca

SEQ ID NO: 10828 - protein, 7 aa, synthetic construct
  REGION 1..7: note = Description of Artificial Sequence: Synthetic peptide
YASQSFS

SEQ ID NO: 10829 - DNA, 21 bp, synthetic construct
  misc_feature 1..21: note = Description of Artificial Sequence: Synthetic oligonucleotide
  source 1..21: mol_type = other DNA
tgggcatctaccctggaatct

SEQ ID NO: 10830 - protein, 7 aa, synthetic construct
  REGION 1..7: note = Description of Artificial Sequence: Synthetic peptide
WASTLES

SEQ ID NO: 10831 - DNA, 21 bp, synthetic construct
  misc_feature 1..21: note = Description of Artificial Sequence: Synthetic oligonucleotide
  source 1..21: mol_type = other DNA
ggtgtttccagtttgcagagt

SEQ ID NO: 10832 - protein, 7 aa, synthetic construct
  REGION 1..7: note = Description of Artificial Sequence: Synthetic peptide
GVSSLQS

SEQ ID NO: 10833 - DNA, 21 bp, synthetic construct
  misc_feature 1..21: note = Description of Artificial Sequence: Synthetic oligonucleotide
  source 1..21: mol_type = other DNA
tgggcatctatccgggaatcc

SEQ ID NO: 10834 - protein, 7 aa, synthetic construct
  REGION 1..7: note = Description of Artificial Sequence: Synthetic peptide
WASIRES

SEQ ID NO: 10835 - DNA, 21 bp, synthetic construct
  misc_feature 1..21: note = Description of Artificial Sequence: Synthetic oligonucleotide
  source 1..21: mol_type = other DNA
tgggcatctaccctggaatct

SEQ ID NO: 10836 - protein, 7 aa, synthetic construct
  REGION 1..7: note = Description of Artificial Sequence: Synthetic peptide
WASTLES

SEQ ID NO: 10837 - DNA, 21 bp, synthetic construct
  misc_feature 1..21: note = Description of Artificial Sequence: Synthetic oligonucleotide
  source 1..21: mol_type = other DNA
gctgcatccagtttgcaaagt

SEQ ID NO: 10838 - protein, 7 aa, synthetic construct
  REGION 1..7: note = Description of Artificial Sequence: Synthetic peptide
AASSLQS

SEQ ID NO: 10839 - DNA, 21 bp, synthetic construct
  misc_feature 1..21: note = Description of Artificial Sequence: Synthetic oligonucleotide
  source 1..21: mol_type = other DNA
actgcatccagtttgcaaggt

SEQ ID NO: 10840 - protein, 7 aa, synthetic construct
  REGION 1..7: note = Description of Artificial Sequence: Synthetic peptide
TASSLQG

SEQ ID NO: 10841 - DNA, 21 bp, synthetic construct
  misc_feature 1..21: note = Description of Artificial Sequence: Synthetic oligonucleotide
  source 1..21: mol_type = other DNA
gctgcatccagtttgcaaagt

SEQ ID NO: 10842 - protein, 7 aa, synthetic construct
  REGION 1..7: note = Description of Artificial Sequence: Synthetic peptide
AASSLQS

SEQ ID NO: 10843 - DNA, 21 bp, synthetic construct
  misc_feature 1..21: note = Description of Artificial Sequence: Synthetic oligonucleotide
  source 1..21: mol_type = other DNA
tgggcatctacccgggaatcc

SEQ ID NO: 10844 - protein, 7 aa, synthetic construct
  REGION 1..7: note = Description of Artificial Sequence: Synthetic peptide
WASTRES

SEQ ID NO: 10845 - DNA, 21 bp, synthetic construct
  misc_feature 1..21: note = Description of Artificial Sequence: Synthetic oligonucleotide
  source 1..21: mol_type = other DNA
gctgcatccagtttgcaaagt

SEQ ID NO: 10846 - protein, 7 aa, synthetic construct
  REGION 1..7: note = Description of Artificial Sequence: Synthetic peptide
AASSLQS

SEQ ID NO: 10847 - DNA, 21 bp, synthetic construct
  misc_feature 1..21: note = Description of Artificial Sequence: Synthetic oligonucleotide
  source 1..21: mol_type = other DNA
gctgcatccagtttgctaggt

SEQ ID NO: 10848 - protein, 7 aa, synthetic construct
  REGION 1..7: note = Description of Artificial Sequence: Synthetic peptide
AASSLLG

SEQ ID NO: 10849 - DNA, 21 bp, synthetic construct
  misc_feature 1..21: note = Description of Artificial Sequence: Synthetic oligonucleotide
  source 1..21: mol_type = other DNA
gctgcatccagtttgcaaagt

SEQ ID NO: 10850 - protein, 7 aa, synthetic construct
  REGION 1..7: note = Description of Artificial Sequence: Synthetic peptide
AASSLQS

SEQ ID NO: 10851 - DNA, 21 bp, synthetic construct
  misc_feature 1..21: note = Description of Artificial Sequence: Synthetic oligonucleotide
  source 1..21: mol_type = other DNA
ggtgcatccagcagggccact

SEQ ID NO: 10852 - protein, 7 aa, synthetic construct
  REGION 1..7: note = Description of Artificial Sequence: Synthetic peptide
GASSRAT

SEQ ID NO: 10853 - DNA, 21 bp, synthetic construct
  misc_feature 1..21: note = Description of Artificial Sequence: Synthetic oligonucleotide
  source 1..21: mol_type = other DNA
gctgcatccagtttgcaaagt

SEQ ID NO: 10854 - protein, 7 aa, synthetic construct
  REGION 1..7: note = Description of Artificial Sequence: Synthetic peptide
AASSLQS

SEQ ID NO: 10855 - DNA, 21 bp, synthetic construct
  misc_feature 1..21: note = Description of Artificial Sequence: Synthetic oligonucleotide
  source 1..21: mol_type = other DNA
ggtgcataccgcagggccact

SEQ ID NO: 10856 - protein, 7 aa, synthetic construct
  REGION 1..7: note = Description of Artificial Sequence: Synthetic peptide
GAYRRAT

SEQ ID NO: 10857 - DNA, 21 bp, synthetic construct
  misc_feature 1..21: note = Description of Artificial Sequence: Synthetic oligonucleotide
  source 1..21: mol_type = other DNA
aaaacatccagtttgcaaagt

SEQ ID NO: 10858 - protein, 7 aa, synthetic construct
  REGION 1..7: note = Description of Artificial Sequence: Synthetic peptide
KTSSLQS

SEQ ID NO: 10859 - DNA, 21 bp, synthetic construct
  misc_feature 1..21: note = Description of Artificial Sequence: Synthetic oligonucleotide
  source 1..21: mol_type = other DNA
gctgcatccagtttgcaaagt

SEQ ID NO: 10860 - protein, 7 aa, synthetic construct
  REGION 1..7: note = Description of Artificial Sequence: Synthetic peptide
AASSLQS

SEQ ID NO: 10861 - DNA, 21 bp, synthetic construct
  misc_feature 1..21: note = Description of Artificial Sequence: Synthetic oligonucleotide
  source 1..21: mol_type = other DNA
ggtgcatccagcagggccact

SEQ ID NO: 10862 - protein, 7 aa, synthetic construct
  REGION 1..7: note = Description of Artificial Sequence: Synthetic peptide
GASSRAT

SEQ ID NO: 10863 - DNA, 21 bp, synthetic construct
  misc_feature 1..21: note = Description of Artificial Sequence: Synthetic oligonucleotide
  source 1..21: mol_type = other DNA
tgggcatctacccgggaatcc

SEQ ID NO: 10864 - protein, 7 aa, synthetic construct
  REGION 1..7: note = Description of Artificial Sequence: Synthetic peptide
WASTRES

SEQ ID NO: 10865 - DNA, 21 bp, synthetic construct
  misc_feature 1..21: note = Description of Artificial Sequence: Synthetic oligonucleotide
  source 1..21: mol_type = other DNA
ggtgcatccagtttgcaaagt

SEQ ID NO: 10866 - protein, 7 aa, synthetic construct
  REGION 1..7: note = Description of Artificial Sequence: Synthetic peptide
GASSLQS

SEQ ID NO: 10867 - DNA, 21 bp, synthetic construct
  misc_feature 1..21: note = Description of Artificial Sequence: Synthetic oligonucleotide
  source 1..21: mol_type = other DNA
tgggcatctacccgggaatcc

SEQ ID NO: 10868 - protein, 7 aa, synthetic construct
  REGION 1..7: note = Description of Artificial Sequence: Synthetic peptide
WASTRES

SEQ ID NO: 10869 - DNA, 21 bp, synthetic construct
  misc_feature 1..21: note = Description of Artificial Sequence: Synthetic oligonucleotide
  source 1..21: mol_type = other DNA
tgggcatctacccgggaatcc

SEQ ID NO: 10870 - protein, 7 aa, synthetic construct
  REGION 1..7: note = Description of Artificial Sequence: Synthetic peptide
WASTRES

SEQ ID NO: 10871 - DNA, 21 bp, synthetic construct
  misc_feature 1..21: note = Description of Artificial Sequence: Synthetic oligonucleotide
  source 1..21: mol_type = other DNA
gaagtttccaaccggttctct

SEQ ID NO: 10872 - protein, 7 aa, synthetic construct
  REGION 1..7: note = Description of Artificial Sequence: Synthetic peptide
EVSNRFS

SEQ ID NO: 10873 - DNA, 21 bp, synthetic construct
  misc_feature 1..21: note = Description of Artificial Sequence: Synthetic oligonucleotide
  source 1..21: mol_type = other DNA
gctgcatccagtttgcaaagt

SEQ ID NO: 10874 - protein, 7 aa, synthetic construct
  REGION 1..7: note = Description of Artificial Sequence: Synthetic peptide
AASSLQS

SEQ ID NO: 10875 - DNA, 21 bp, synthetic construct
  misc_feature 1..21: note = Description of Artificial Sequence: Synthetic oligonucleotide
  source 1..21: mol_type = other DNA
ggtgcatccagtttacaaagt

SEQ ID NO: 10876 - protein, 7 aa, synthetic construct
  REGION 1..7: note = Description of Artificial Sequence: Synthetic peptide
GASSLQS

SEQ ID NO: 10877 - DNA, 21 bp, synthetic construct
  misc_feature 1..21: note = Description of Artificial Sequence: Synthetic oligonucleotide
  source 1..21: mol_type = other DNA
gctgcatccagtgtgcaaagt

SEQ ID NO: 10878 - protein, 7 aa, synthetic construct
  REGION 1..7: note = Description of Artificial Sequence: Synthetic peptide
AASSVQS

SEQ ID NO: 10879 - DNA, 21 bp, synthetic construct
  misc_feature 1..21: note = Description of Artificial Sequence: Synthetic oligonucleotide
  source 1..21: mol_type = other DNA
aaaacatccagtttgcaaagt

SEQ ID NO: 10880 - protein, 7 aa, synthetic construct
  REGION 1..7: note = Description of Artificial Sequence: Synthetic peptide
KTSSLQS

SEQ ID NO: 10881 - DNA, 21 bp, synthetic construct
  misc_feature 1..21: note = Description of Artificial Sequence: Synthetic oligonucleotide
  source 1..21: mol_type = other DNA
ggtgcatccagcagggccact

SEQ ID NO: 10882 - protein, 7 aa, synthetic construct
  REGION 1..7: note = Description of Artificial Sequence: Synthetic peptide
GASSRAT

SEQ ID NO: 10883 - DNA, 21 bp, synthetic construct
  misc_feature 1..21: note = Description of Artificial Sequence: Synthetic oligonucleotide
  source 1..21: mol_type = other DNA
ggtgcattcagtagggccact

SEQ ID NO: 10884 - protein, 7 aa, synthetic construct
  REGION 1..7: note = Description of Artificial Sequence: Synthetic peptide
GAFSRAT

SEQ ID NO: 10885 - DNA, 21 bp, synthetic construct
  misc_feature 1..21: note = Description of Artificial Sequence: Synthetic oligonucleotide
  source 1..21: mol_type = other DNA
ggtgcattcagcagggccagt

SEQ ID NO: 10886 - protein, 7 aa, synthetic construct
  REGION 1..7: note = Description of Artificial Sequence: Synthetic peptide
GAFSRAS

SEQ ID NO: 10887 - DNA, 21 bp, synthetic construct
  misc_feature 1..21: note = Description of Artificial Sequence: Synthetic oligonucleotide
  source 1..21: mol_type = other DNA
gctgcatccagtttgcaaagt

SEQ ID NO: 10888 - protein, 7 aa, synthetic construct
  REGION 1..7: note = Description of Artificial Sequence: Synthetic peptide
AASSLQS

SEQ ID NO: 10889 - DNA, 21 bp, synthetic construct
  misc_feature 1..21: note = Description of Artificial Sequence: Synthetic oligonucleotide
  source 1..21: mol_type = other DNA
gctgcatccagtttgcaaagt

SEQ ID NO: 10890 - protein, 7 aa, synthetic construct
  REGION 1..7: note = Description of Artificial Sequence: Synthetic peptide
AASSLQS

SEQ ID NO: 10891 - DNA, 21 bp, synthetic construct
  misc_feature 1..21: note = Description of Artificial Sequence: Synthetic oligonucleotide
  source 1..21: mol_type = other DNA
gaggtttccaaccggttctct

SEQ ID NO: 10892 - protein, 7 aa, synthetic construct
  REGION 1..7: note = Description of Artificial Sequence: Synthetic peptide
EVSNRFS

SEQ ID NO: 10893 - DNA, 21 bp, synthetic construct
  misc_feature 1..21: note = Description of Artificial Sequence: Synthetic oligonucleotide
  source 1..21: mol_type = other DNA
ggtgcatccagcagggccact

SEQ ID NO: 10894 - protein, 7 aa, synthetic construct
  REGION 1..7: note = Description of Artificial Sequence: Synthetic peptide
GASSRAT

SEQ ID NO: 10895 - DNA, 21 bp, synthetic construct
  misc_feature 1..21: note = Description of Artificial Sequence: Synthetic oligonucleotide
  source 1..21: mol_type = other DNA
ggtgcatccagcagggccact

SEQ ID NO: 10896 - protein, 7 aa, synthetic construct
  REGION 1..7: note = Description of Artificial Sequence: Synthetic peptide
GASSRAT

SEQ ID NO: 10897 - DNA, 21 bp, synthetic construct
  misc_feature 1..21: note = Description of Artificial Sequence: Synthetic oligonucleotide
  source 1..21: mol_type = other DNA
tctgcatccagtttgcaaagg

SEQ ID NO: 10898 - protein, 7 aa, synthetic construct
  REGION 1..7: note = Description of Artificial Sequence: Synthetic peptide
SASSLQR

SEQ ID NO: 10899 - DNA, 21 bp, synthetic construct
  misc_feature 1..21: note = Description of Artificial Sequence: Synthetic oligonucleotide
  source 1..21: mol_type = other DNA
gctgcatccagtttgcaaagt

SEQ ID NO: 10900 - protein, 7 aa, synthetic construct
  REGION 1..7: note = Description of Artificial Sequence: Synthetic peptide
AASSLQS

SEQ ID NO: 10901 - DNA, 21 bp, synthetic construct
  misc_feature 1..21: note = Description of Artificial Sequence: Synthetic oligonucleotide
  source 1..21: mol_type = other DNA
ggtgcatccactagggccact

SEQ ID NO: 10902 - protein, 7 aa, synthetic construct
  REGION 1..7: note = Description of Artificial Sequence: Synthetic peptide
GASTRAT

SEQ ID NO: 10903 - DNA, 21 bp, synthetic construct
  misc_feature 1..21: note = Description of Artificial Sequence: Synthetic oligonucleotide
  source 1..21: mol_type = other DNA
gctgcatccagtttgcaaagt

SEQ ID NO: 10904 - protein, 7 aa, synthetic construct
  REGION 1..7: note = Description of Artificial Sequence: Synthetic peptide
AASSLQS

SEQ ID NO: 10905 - DNA, 21 bp, synthetic construct
  misc_feature 1..21: note = Description of Artificial Sequence: Synthetic oligonucleotide
  source 1..21: mol_type = other DNA
ggtgcatccagcagggccact

SEQ ID NO: 10906 - protein, 7 aa, synthetic construct
  REGION 1..7: note = Description of Artificial Sequence: Synthetic peptide
GASSRAT

SEQ ID NO: 10907 - DNA, 21 bp, synthetic construct
  misc_feature 1..21: note = Description of Artificial Sequence: Synthetic oligonucleotide
  source 1..21: mol_type = other DNA
ggtgcattcagcagggccact

SEQ ID NO: 10908 - protein, 7 aa, synthetic construct
  REGION 1..7: note = Description of Artificial Sequence: Synthetic peptide
GAFSRAT

SEQ ID NO: 10909 - DNA, 21 bp, synthetic construct
  misc_feature 1..21: note = Description of Artificial Sequence: Synthetic oligonucleotide
  source 1..21: mol_type = other DNA
gctgagtccagtttacaaagt

SEQ ID NO: 10910 - protein, 7 aa, synthetic construct
  REGION 1..7: note = Description of Artificial Sequence: Synthetic peptide
AESSLQS

SEQ ID NO: 10911 - DNA, 21 bp, synthetic construct
  misc_feature 1..21: note = Description of Artificial Sequence: Synthetic oligonucleotide
  source 1..21: mol_type = other DNA
gctgcatccagtttgcaaagt

SEQ ID NO: 10912 - protein, 7 aa, synthetic construct
  REGION 1..7: note = Description of Artificial Sequence: Synthetic peptide
AASSLQS

SEQ ID NO: 10913 - DNA, 21 bp, synthetic construct
  misc_feature 1..21: note = Description of Artificial Sequence: Synthetic oligonucleotide
  source 1..21: mol_type = other DNA
tatgcttcccagtccttctca

SEQ ID NO: 10914 - protein, 7 aa, synthetic construct
  REGION 1..7: note = Description of Artificial Sequence: Synthetic peptide
YASQSFS

SEQ ID NO: 10915 - DNA, 21 bp, synthetic construct
  misc_feature 1..21: note = Description of Artificial Sequence: Synthetic oligonucleotide
  source 1..21: mol_type = other DNA
tgggcatctacccgggaatcc

SEQ ID NO: 10916 - protein, 7 aa, synthetic construct
  REGION 1..7: note = Description of Artificial Sequence: Synthetic peptide
WASTRES

SEQ ID NO: 10917 - DNA, 21 bp, synthetic construct
  misc_feature 1..21: note = Description of Artificial Sequence: Synthetic oligonucleotide
  source 1..21: mol_type = other DNA
tctgcttcccagtccttctca

SEQ ID NO: 10918 - protein, 7 aa, synthetic construct
  REGION 1..7: note = Description of Artificial Sequence: Synthetic peptide
SASQSFS

SEQ ID NO: 10919 - DNA, 21 bp, synthetic construct
  misc_feature 1..21: note = Description of Artificial Sequence: Synthetic oligonucleotide
  source 1..21: mol_type = other DNA
actgcatccagtttgcaaagt

SEQ ID NO: 10920 - protein, 7 aa, synthetic construct
  REGION 1..7: note = Description of Artificial Sequence: Synthetic peptide
TASSLQS

SEQ ID NO: 10921 - DNA, 21 bp, synthetic construct
  misc_feature 1..21: note = Description of Artificial Sequence: Synthetic oligonucleotide
  source 1..21: mol_type = other DNA
ggtgcatccagcagggccact

SEQ ID NO: 10922 - protein, 7 aa, synthetic construct
  REGION 1..7: note = Description of Artificial Sequence: Synthetic peptide
GASSRAT

SEQ ID NO: 10923 - DNA, 21 bp, synthetic construct
  misc_feature 1..21: note = Description of Artificial Sequence: Synthetic oligonucleotide
  source 1..21: mol_type = other DNA
tctgcatccagtttgcatact

SEQ ID NO: 10924 - protein, 7 aa, synthetic construct
  REGION 1..7: note = Description of Artificial Sequence: Synthetic peptide
SASSLHT

SEQ ID NO: 10925 - DNA, 21 bp, synthetic construct
  misc_feature 1..21: note = Description of Artificial Sequence: Synthetic oligonucleotide
  source 1..21: mol_type = other DNA
tctgcatccattttacaaagg

SEQ ID NO: 10926 - protein, 7 aa, synthetic construct
  REGION 1..7: note = Description of Artificial Sequence: Synthetic peptide
SASILQR

SEQ ID NO: 10927 - DNA, 21 bp, synthetic construct
  misc_feature 1..21: note = Description of Artificial Sequence: Synthetic oligonucleotide
  source 1..21: mol_type = other DNA
ggtgcatccagcagggccact

SEQ ID NO: 10928 - protein, 7 aa, synthetic construct
  REGION 1..7: note = Description of Artificial Sequence: Synthetic peptide
GASSRAT

SEQ ID NO: 10929 - DNA, 21 bp, synthetic construct
  misc_feature 1..21: note = Description of Artificial Sequence: Synthetic oligonucleotide
  source 1..21: mol_type = other DNA
agtaatgatcagcggccctca

SEQ ID NO: 10930 - protein, 7 aa, synthetic construct
  REGION 1..7: note = Description of Artificial Sequence: Synthetic peptide
SNDQRPS

SEQ ID NO: 10931 - DNA, 21 bp, synthetic construct
  misc_feature 1..21: note = Description of Artificial Sequence: Synthetic oligonucleotide
  source 1..21: mol_type = other DNA
ggtgcatccaccagggccact

SEQ ID NO: 10932 - protein, 7 aa, synthetic construct
  REGION 1..7: note = Description of Artificial Sequence: Synthetic peptide
GASTRAT

SEQ ID NO: 10933 - DNA, 21 bp, synthetic construct
  misc_feature 1..21: note = Description of Artificial Sequence: Synthetic oligonucleotide
  source 1..21: mol_type = other DNA
ggtgcatccagcagggccact

SEQ ID NO: 10934 - protein, 7 aa, synthetic construct
  REGION 1..7: note = Description of Artificial Sequence: Synthetic peptide
GASSRAT

SEQ ID NO: 10935 - DNA, 21 bp, synthetic construct
  misc_feature 1..21: note = Description of Artificial Sequence: Synthetic oligonucleotide
  source 1..21: mol_type = other DNA
tatgcttcccagtccttctca

SEQ ID NO: 10936 - protein, 7 aa, synthetic construct
  REGION 1..7: note = Description of Artificial Sequence: Synthetic peptide
YASQSFS

SEQ ID NO: 10937 - DNA, 21 bp, synthetic construct
  misc_feature 1..21: note = Description of Artificial Sequence: Synthetic oligonucleotide
  source 1..21: mol_type = other DNA
tctacatccagtttgcattct

SEQ ID NO: 10938 - protein, 7 aa, synthetic construct
  REGION 1..7: note = Description of Artificial Sequence: Synthetic peptide
STSSLHS

SEQ ID NO: 10939 - DNA, 21 bp, synthetic construct
  misc_feature 1..21: note = Description of Artificial Sequence: Synthetic oligonucleotide
  source 1..21: mol_type = other DNA
gctgcatccagtttgcaaagt

SEQ ID NO: 10940 - protein, 7 aa, synthetic construct
  REGION 1..7: note = Description of Artificial Sequence: Synthetic peptide
AASSLQS

SEQ ID NO: 10941 - DNA, 21 bp, synthetic construct
  misc_feature 1..21: note = Description of Artificial Sequence: Synthetic oligonucleotide
  source 1..21: mol_type = other DNA
ttgggttctaatcgggcctcc

SEQ ID NO: 10942 - protein, 7 aa, synthetic construct
  REGION 1..7: note = Description of Artificial Sequence: Synthetic peptide
LGSNRAS

SEQ ID NO: 10943 - DNA, 21 bp, synthetic construct
  misc_feature 1..21: note = Description of Artificial Sequence: Synthetic oligonucleotide
  source 1..21: mol_type = other DNA
gctgcatccaggttgcaaagt

SEQ ID NO: 10944 - protein, 7 aa, synthetic construct
  REGION 1..7: note = Description of Artificial Sequence: Synthetic peptide
AASRLQS

SEQ ID NO: 10945 - DNA, 21 bp, synthetic construct
  misc_feature 1..21: note = Description of Artificial Sequence: Synthetic oligonucleotide
  source 1..21: mol_type = other DNA
ggtgcatccaccagggccact

SEQ ID NO: 10946 - protein, 7 aa, synthetic construct
  REGION 1..7: note = Description of Artificial Sequence: Synthetic peptide
GASTRAT

SEQ ID NO: 10947 - DNA, 21 bp, synthetic construct
  misc_feature 1..21: note = Description of Artificial Sequence: Synthetic oligonucleotide
  source 1..21: mol_type = other DNA
ggtgcatccaccagggccact

SEQ ID NO: 10948 - protein, 7 aa, synthetic construct
  REGION 1..7: note = Description of Artificial Sequence: Synthetic peptide
GASTRAT

SEQ ID NO: 10949 - DNA, 21 bp, synthetic construct
  misc_feature 1..21: note = Description of Artificial Sequence: Synthetic oligonucleotide
  source 1..21: mol_type = other DNA
ttgggttctaatcgggcctcc

SEQ ID NO: 10950 - protein, 7 aa, synthetic construct
  REGION 1..7: note = Description of Artificial Sequence: Synthetic peptide
LGSNRAS

SEQ ID NO: 10951 - DNA, 21 bp, synthetic construct
  misc_feature 1..21: note = Description of Artificial Sequence: Synthetic oligonucleotide
  source 1..21: mol_type = other DNA
ggtgcatccagcagggccact

SEQ ID NO: 10952 - protein, 7 aa, synthetic construct
  REGION 1..7: note = Description of Artificial Sequence: Synthetic peptide
GASSRAT

SEQ ID NO: 10953 - DNA, 21 bp, synthetic construct
  misc_feature 1..21: note = Description of Artificial Sequence: Synthetic oligonucleotide
  source 1..21: mol_type = other DNA
ggtgcatccactagggccact

SEQ ID NO: 10954 - protein, 7 aa, synthetic construct
  REGION 1..7: note = Description of Artificial Sequence: Synthetic peptide
GASTRAT

SEQ ID NO: 10955 - DNA, 21 bp, synthetic construct
  misc_feature 1..21: note = Description of Artificial Sequence: Synthetic oligonucleotide
  source 1..21: mol_type = other DNA
gttgcatccaggttgcaaagt

SEQ ID NO: 10956 - protein, 7 aa, synthetic construct
  REGION 1..7: note = Description of Artificial Sequence: Synthetic peptide
VASRLQS

SEQ ID NO: 10957 - DNA, 21 bp, synthetic construct
  misc_feature 1..21: note = Description of Artificial Sequence: Synthetic oligonucleotide
  source 1..21: mol_type = other DNA
gctgcatccagtttgcaaagt

SEQ ID NO: 10958 - protein, 7 aa, synthetic construct
  REGION 1..7: note = Description of Artificial Sequence: Synthetic peptide
AASSLQS

SEQ ID NO: 10959 - DNA, 21 bp, synthetic construct
  misc_feature 1..21: note = Description of Artificial Sequence: Synthetic oligonucleotide
  source 1..21: mol_type = other DNA
gctgcatccagtttgcaaagt

SEQ ID NO: 10960 - protein, 7 aa, synthetic construct
  REGION 1..7: note = Description of Artificial Sequence: Synthetic peptide
AASSLQS

SEQ ID NO: 10961 - DNA, 21 bp, synthetic construct
  misc_feature 1..21: note = Description of Artificial Sequence: Synthetic oligonucleotide
  source 1..21: mol_type = other DNA
agggcatccagtgtgcaaaat

SEQ ID NO: 10962 - protein, 7 aa, synthetic construct
  REGION 1..7: note = Description of Artificial Sequence: Synthetic peptide
RASSVQN

SEQ ID NO: 10963 - DNA, 21 bp, synthetic construct
  misc_feature 1..21: note = Description of Artificial Sequence: Synthetic oligonucleotide
  source 1..21: mol_type = other DNA
tgggcatctacccgggaatcc

SEQ ID NO: 10964 - protein, 7 aa, synthetic construct
  REGION 1..7: note = Description of Artificial Sequence: Synthetic peptide
WASTRES

SEQ ID NO: 10965 - DNA, 21 bp, synthetic construct
  misc_feature 1..21: note = Description of Artificial Sequence: Synthetic oligonucleotide
  source 1..21: mol_type = other DNA
tgggcatctacccgggaatcc

SEQ ID NO: 10966 - protein, 7 aa, synthetic construct
  REGION 1..7: note = Description of Artificial Sequence: Synthetic peptide
WASTRES

SEQ ID NO: 10967 - DNA, 21 bp, synthetic construct
  misc_feature 1..21: note = Description of Artificial Sequence: Synthetic oligonucleotide
  source 1..21: mol_type = other DNA
gctgcagccagtttgcaaggt

SEQ ID NO: 10968 - protein, 7 aa, synthetic construct
  REGION 1..7: note = Description of Artificial Sequence: Synthetic peptide
AAASLQG

SEQ ID NO: 10969 - DNA, 21 bp, synthetic construct
  misc_feature 1..21: note = Description of Artificial Sequence: Synthetic oligonucleotide
  source 1..21: mol_type = other DNA
gctgcatccagtttgcaaagt

SEQ ID NO: 10970 - protein, 7 aa, synthetic construct
  REGION 1..7: note = Description of Artificial Sequence: Synthetic peptide
AASSLQS

SEQ ID NO: 10971 - DNA, 21 bp, synthetic construct
  misc_feature 1..21: note = Description of Artificial Sequence: Synthetic oligonucleotide
  source 1..21: mol_type = other DNA
ggtgcatccaccagggccact

SEQ ID NO: 10972 - protein, 7 aa, synthetic construct
  REGION 1..7: note = Description of Artificial Sequence: Synthetic peptide
GASTRAT

SEQ ID NO: 10973 - DNA, 21 bp, synthetic construct
  misc_feature 1..21: note = Description of Artificial Sequence: Synthetic oligonucleotide
  source 1..21: mol_type = other DNA
ggtgcatccagtttgcaacgt

SEQ ID NO: 10974 - protein, 7 aa, synthetic construct
  REGION 1..7: note = Description of Artificial Sequence: Synthetic peptide
GASSLQR

SEQ ID NO: 10975 - DNA, 21 bp, synthetic construct
  misc_feature 1..21: note = Description of Artificial Sequence: Synthetic oligonucleotide
  source 1..21: mol_type = other DNA
gctgcatccagtttgcaaagt

SEQ ID NO: 10976 - protein, 7 aa, synthetic construct
  REGION 1..7: note = Description of Artificial Sequence: Synthetic peptide
AASSLQS

SEQ ID NO: 10977 - DNA, 21 bp, synthetic construct
  misc_feature 1..21: note = Description of Artificial Sequence: Synthetic oligonucleotide
  source 1..21: mol_type = other DNA
gctgcatccagtttgcaaagt

SEQ ID NO: 10978 - protein, 7 aa, synthetic construct
  REGION 1..7: note = Description of Artificial Sequence: Synthetic peptide
AASSLQS

SEQ ID NO: 10979 - DNA, 21 bp, synthetic construct
  misc_feature 1..21: note = Description of Artificial Sequence: Synthetic oligonucleotide
  source 1..21: mol_type = other DNA
tctgcatccagtttgcaaagt

SEQ ID NO: 10980 - protein, 7 aa, synthetic construct
  REGION 1..7: note = Description of Artificial Sequence: Synthetic peptide
SASSLQS

SEQ ID NO: 10981 - DNA, 21 bp, synthetic construct
  misc_feature 1..21: note = Description of Artificial Sequence: Synthetic oligonucleotide
  source 1..21: mol_type = other DNA
ggtgcatccaggagggccact

SEQ ID NO: 10982 - protein, 7 aa, synthetic construct
  REGION 1..7: note = Description of Artificial Sequence: Synthetic peptide
GASRRAT

SEQ ID NO: 10983 - DNA, 21 bp, synthetic construct
  misc_feature 1..21: note = Description of Artificial Sequence: Synthetic oligonucleotide
  source 1..21: mol_type = other DNA
gctgcatccagtttgcaaagt

SEQ ID NO: 10984 - protein, 7 aa, synthetic construct
  REGION 1..7: note = Description of Artificial Sequence: Synthetic peptide
AASSLQS

SEQ ID NO: 10985 - DNA, 21 bp, synthetic construct
  misc_feature 1..21: note = Description of Artificial Sequence: Synthetic oligonucleotide
  source 1..21: mol_type = other DNA
ggtgcatccaccagggccact

SEQ ID NO: 10986 - protein, 7 aa, synthetic construct
  REGION 1..7: note = Description of Artificial Sequence: Synthetic peptide
GASTRAT

SEQ ID NO: 10987 - DNA, 21 bp, synthetic construct
  misc_feature 1..21: note = Description of Artificial Sequence: Synthetic oligonucleotide
  source 1..21: mol_type = other DNA
ggtgtctccagtttgcaaagt

SEQ ID NO: 10988 - protein, 7 aa, synthetic construct
  REGION 1..7: note = Description of Artificial Sequence: Synthetic peptide
GVSSLQS

SEQ ID NO: 10989 - DNA, 21 bp, synthetic construct
  misc_feature 1..21: note = Description of Artificial Sequence: Synthetic oligonucleotide
  source 1..21: mol_type = other DNA
ggtgcatccagcagggccgct

SEQ ID NO: 10990 - protein, 7 aa, synthetic construct
  REGION 1..7: note = Description of Artificial Sequence: Synthetic peptide
GASSRAA

SEQ ID NO: 10991 - DNA, 21 bp, synthetic construct
  misc_feature 1..21: note = Description of Artificial Sequence: Synthetic oligonucleotide
  source 1..21: mol_type = other DNA
ttgggttctaatcgggcctcc

SEQ ID NO: 10992 - protein, 7 aa, synthetic construct
  REGION 1..7: note = Description of Artificial Sequence: Synthetic peptide
LGSNRAS

SEQ ID NO: 10993 - DNA, 21 bp, synthetic construct
  misc_feature 1..21: note = Description of Artificial Sequence: Synthetic oligonucleotide
  source 1..21: mol_type = other DNA
ggtgcatccaccagggccact

SEQ ID NO: 10994 - protein, 7 aa, synthetic construct
  REGION 1..7: note = Description of Artificial Sequence: Synthetic peptide
GASTRAT

SEQ ID NO: 10995 - DNA, 21 bp, synthetic construct
  misc_feature 1..21: note = Description of Artificial Sequence: Synthetic oligonucleotide
  source 1..21: mol_type = other DNA
tctgcatcctttttgcaaaga

SEQ ID NO: 10996 - protein, 7 aa, synthetic construct
  REGION 1..7: note = Description of Artificial Sequence: Synthetic peptide
SASFLQR

SEQ ID NO: 10997 - DNA, 21 bp, synthetic construct
  misc_feature 1..21: note = Description of Artificial Sequence: Synthetic oligonucleotide
  source 1..21: mol_type = other DNA
ggtgcatccagcagggccact

SEQ ID NO: 10998 - protein, 7 aa, synthetic construct
  REGION 1..7: note = Description of Artificial Sequence: Synthetic peptide
GASSRAT

SEQ ID NO: 10999 - DNA, 21 bp, synthetic construct
  misc_feature 1..21: note = Description of Artificial Sequence: Synthetic oligonucleotide
  source 1..21: mol_type = other DNA
gctgcatccagtttgcaaagt

SEQ ID NO: 11000 - protein, 7 aa, synthetic construct
  REGION 1..7: note = Description of Artificial Sequence: Synthetic peptide
AASSLQS

SEQ ID NO: 11001 - DNA, 21 bp, synthetic construct
  misc_feature 1..21: note = Description of Artificial Sequence: Synthetic oligonucleotide
  source 1..21: mol_type = other DNA
tatgcttcccagtccttctca

SEQ ID NO: 11002 - protein, 7 aa, synthetic construct
  REGION 1..7: note = Description of Artificial Sequence: Synthetic peptide
YASQSFS

SEQ ID NO: 11003 - DNA, 21 bp, synthetic construct
  misc_feature 1..21: note = Description of Artificial Sequence: Synthetic oligonucleotide
  source 1..21: mol_type = other DNA
gctgcatccagtttgcaaagt

SEQ ID NO: 11004 - protein, 7 aa, synthetic construct
  REGION 1..7: note = Description of Artificial Sequence: Synthetic peptide
AASSLQS

SEQ ID NO: 11005 - DNA, 21 bp, synthetic construct
  misc_feature 1..21: note = Description of Artificial Sequence: Synthetic oligonucleotide
  source 1..21: mol_type = other DNA
gctgcatccagtttgcaaagt

SEQ ID NO: 11006 - protein, 7 aa, synthetic construct
  REGION 1..7: note = Description of Artificial Sequence: Synthetic peptide
AASSLQS

SEQ ID NO: 11007 - DNA, 21 bp, synthetic construct
  misc_feature 1..21: note = Description of Artificial Sequence: Synthetic oligonucleotide
  source 1..21: mol_type = other DNA
gctgcatccagtttgcaaagt

SEQ ID NO: 11008 - protein, 7 aa, synthetic construct
  REGION 1..7: note = Description of Artificial Sequence: Synthetic peptide
AASSLQS

SEQ ID NO: 11009 - DNA, 21 bp, synthetic construct
  misc_feature 1..21: note = Description of Artificial Sequence: Synthetic oligonucleotide
  source 1..21: mol_type = other DNA
gctgcatccagtttgcaaagt

SEQ ID NO: 11010 - protein, 7 aa, synthetic construct
  REGION 1..7: note = Description of Artificial Sequence: Synthetic peptide
AASSLQS

SEQ ID NO: 11011 - DNA, 21 bp, synthetic construct
  misc_feature 1..21: note = Description of Artificial Sequence: Synthetic oligonucleotide
  source 1..21: mol_type = other DNA
ttgggttctaatcgggcctcc

SEQ ID NO: 11012 - protein, 7 aa, synthetic construct
  REGION 1..7: note = Description of Artificial Sequence: Synthetic peptide
LGSNRAS

SEQ ID NO: 11013 - DNA, 21 bp, synthetic construct
  misc_feature 1..21: note = Description of Artificial Sequence: Synthetic oligonucleotide
  source 1..21: mol_type = other DNA
ggtgcatccagcagggccact

SEQ ID NO: 11014 - protein, 7 aa, synthetic construct
  REGION 1..7: note = Description of Artificial Sequence: Synthetic peptide
GASSRAT

SEQ ID NO: 11015 - DNA, 21 bp, synthetic construct
  misc_feature 1..21: note = Description of Artificial Sequence: Synthetic oligonucleotide
  source 1..21: mol_type = other DNA
gctgcatccagtttgcaaagt

SEQ ID NO: 11016 - protein, 7 aa, synthetic construct
  REGION 1..7: note = Description of Artificial Sequence: Synthetic peptide
AASSLQS

SEQ ID NO: 11017 - DNA, 21 bp, synthetic construct
  misc_feature 1..21: note = Description of Artificial Sequence: Synthetic oligonucleotide
  source 1..21: mol_type = other DNA
ggtgcatccagcagggccact

SEQ ID NO: 11018 - protein, 7 aa, synthetic construct
  REGION 1..7: note = Description of Artificial Sequence: Synthetic peptide
GASSRAT

SEQ ID NO: 11019 - DNA, 21 bp, synthetic construct
  misc_feature 1..21: note = Description of Artificial Sequence: Synthetic oligonucleotide
  source 1..21: mol_type = other DNA
gctgcatccagtttgcaaagt

SEQ ID NO: 11020 - protein, 7 aa, synthetic construct
  REGION 1..7: note = Description of Artificial Sequence: Synthetic peptide
AASSLQS

SEQ ID NO: 11021 - DNA, 21 bp, synthetic construct
  misc_feature 1..21: note = Description of Artificial Sequence: Synthetic oligonucleotide
  source 1..21: mol_type = other DNA
gctgcatccagtttgcaaagt

SEQ ID NO: 11022 - protein, 7 aa, synthetic construct
  REGION 1..7: note = Description of Artificial Sequence: Synthetic peptide
AASSLQS

SEQ ID NO: 11023 - DNA, 21 bp, synthetic construct
  misc_feature 1..21: note = Description of Artificial Sequence: Synthetic oligonucleotide
  source 1..21: mol_type = other DNA
gctgcatccagtttgcaaagt

SEQ ID NO: 11024 - protein, 7 aa, synthetic construct
  REGION 1..7: note = Description of Artificial Sequence: Synthetic peptide
AASSLQS

SEQ ID NO: 11025 - DNA, 21 bp, synthetic construct
  misc_feature 1..21: note = Description of Artificial Sequence: Synthetic oligonucleotide
  source 1..21: mol_type = other DNA
gctgcatccagtttgtttagt

SEQ ID NO: 11026 - protein, 7 aa, synthetic construct
  REGION 1..7: note = Description of Artificial Sequence: Synthetic peptide
AASSLFS

SEQ ID NO: 11027 - DNA, 21 bp, synthetic construct
  misc_feature 1..21: note = Description of Artificial Sequence: Synthetic oligonucleotide
  source 1..21: mol_type = other DNA
ggtgcatccaccagggccact

SEQ ID NO: 11028 - protein, 7 aa, synthetic construct
  REGION 1..7: note = Description of Artificial Sequence: Synthetic peptide
GASTRAT

SEQ ID NO: 11029 - DNA, 21 bp, synthetic construct
  misc_feature 1..21: note = Description of Artificial Sequence: Synthetic oligonucleotide
  source 1..21: mol_type = other DNA
gctgcatccagtttgcaaagt

SEQ ID NO: 11030 - protein, 7 aa, synthetic construct
  REGION 1..7: note = Description of Artificial Sequence: Synthetic peptide
AASSLQS

SEQ ID NO: 11031 - DNA, 21 bp, synthetic construct
  misc_feature 1..21: note = Description of Artificial Sequence: Synthetic oligonucleotide
  source 1..21: mol_type = other DNA
gctgcatccagtttgcaaagt

SEQ ID NO: 11032 - protein, 7 aa, synthetic construct
  REGION 1..7: note = Description of Artificial Sequence: Synthetic peptide
AASSLQS

SEQ ID NO: 11033 - DNA, 21 bp, synthetic construct
  misc_feature 1..21: note = Description of Artificial Sequence: Synthetic oligonucleotide
  source 1..21: mol_type = other DNA
ttggtttctaatcgggcctcc

SEQ ID NO: 11034 - protein, 7 aa, synthetic construct
  REGION 1..7: note = Description of Artificial Sequence: Synthetic peptide
LVSNRAS

SEQ ID NO: 11035 - DNA, 21 bp, synthetic construct
  misc_feature 1..21: note = Description of Artificial Sequence: Synthetic oligonucleotide
  source 1..21: mol_type = other DNA
gatgcatccagtttggaaagt

SEQ ID NO: 11036 - protein, 7 aa, synthetic construct
  REGION 1..7: note = Description of Artificial Sequence: Synthetic peptide
DASSLES

SEQ ID NO: 11037 - DNA, 21 bp, synthetic construct
  misc_feature 1..21: note = Description of Artificial Sequence: Synthetic oligonucleotide
  source 1..21: mol_type = other DNA
gctgcatccagattgcaaagt

SEQ ID NO: 11038 - protein, 7 aa, synthetic construct
  REGION 1..7: note = Description of Artificial Sequence: Synthetic peptide
AASRLQS

SEQ ID NO: 11039 - DNA, 21 bp, synthetic construct
  misc_feature 1..21: note = Description of Artificial Sequence: Synthetic oligonucleotide
  source 1..21: mol_type = other DNA
ggtgcatccagcagggccact

SEQ ID NO: 11040 - protein, 7 aa, synthetic construct
  REGION 1..7: note = Description of Artificial Sequence: Synthetic peptide
GASSRAT

SEQ ID NO: 11041 - DNA, 21 bp, synthetic construct
  misc_feature 1..21: note = Description of Artificial Sequence: Synthetic oligonucleotide
  source 1..21: mol_type = other DNA
gctgcatccagtttgctaagt

SEQ ID NO: 11042 - protein, 7 aa, synthetic construct
  REGION 1..7: note = Description of Artificial Sequence: Synthetic peptide
AASSLLS

SEQ ID NO: 11043 - DNA, 21 bp, synthetic construct
  misc_feature 1..21: note = Description of Artificial Sequence: Synthetic oligonucleotide
  source 1..21: mol_type = other DNA
gctgcatccagtttgcaaagt

SEQ ID NO: 11044 - protein, 7 aa, synthetic construct
  REGION 1..7: note = Description of Artificial Sequence: Synthetic peptide
AASSLQS

SEQ ID NO: 11045 - DNA, 21 bp, synthetic construct
  misc_feature 1..21: note = Description of Artificial Sequence: Synthetic oligonucleotide
  source 1..21: mol_type = other DNA
ttgggttctaatcgggcctcc

SEQ ID NO: 11046 - protein, 7 aa, synthetic construct
  REGION 1..7: note = Description of Artificial Sequence: Synthetic peptide
LGSNRAS

SEQ ID NO: 11047 - DNA, 21 bp, synthetic construct
  misc_feature 1..21: note = Description of Artificial Sequence: Synthetic oligonucleotide
  source 1..21: mol_type = other DNA
gctgcatccagtttgcaaagt

SEQ ID NO: 11048 - protein, 7 aa, synthetic construct
  REGION 1..7: note = Description of Artificial Sequence: Synthetic peptide
AASSLQS

SEQ ID NO: 11049 - DNA, 21 bp, synthetic construct
  misc_feature 1..21: note = Description of Artificial Sequence: Synthetic oligonucleotide
  source 1..21: mol_type = other DNA
gctgcatccagtttgcaaagt

SEQ ID NO: 11050 - protein, 7 aa, synthetic construct
  REGION 1..7: note = Description of Artificial Sequence: Synthetic peptide
AASSLQS

SEQ ID NO: 11051 - DNA, 21 bp, synthetic construct
  misc_feature 1..21: note = Description of Artificial Sequence: Synthetic oligonucleotide
  source 1..21: mol_type = other DNA
gctgcatccagtttgcaaagt

SEQ ID NO: 11052 - protein, 7 aa, synthetic construct
  REGION 1..7: note = Description of Artificial Sequence: Synthetic peptide
AASSLQS

SEQ ID NO: 11053 - DNA, 21 bp, synthetic construct
  misc_feature 1..21: note = Description of Artificial Sequence: Synthetic oligonucleotide
  source 1..21: mol_type = other DNA
ggtacatccaccagggccact

SEQ ID NO: 11054 - protein, 7 aa, synthetic construct
  REGION 1..7: note = Description of Artificial Sequence: Synthetic peptide
GTSTRAT

SEQ ID NO: 11055 - DNA, 21 bp, synthetic construct
  misc_feature 1..21: note = Description of Artificial Sequence: Synthetic oligonucleotide
  source 1..21: mol_type = other DNA
tctgcatccaatttgcaaagt

SEQ ID NO: 11056 - protein, 7 aa, synthetic construct
  REGION 1..7: note = Description of Artificial Sequence: Synthetic peptide
SASNLQS

SEQ ID NO: 11057 - DNA, 21 bp, synthetic construct
  misc_feature 1..21: note = Description of Artificial Sequence: Synthetic oligonucleotide
  source 1..21: mol_type = other DNA
gctgcatccagtttgcaaagt

SEQ ID NO: 11058 - protein, 7 aa, synthetic construct
  REGION 1..7: note = Description of Artificial Sequence: Synthetic peptide
AASSLQS

SEQ ID NO: 11059 - DNA, 21 bp, synthetic construct
  misc_feature 1..21: note = Description of Artificial Sequence: Synthetic oligonucleotide
  source 1..21: mol_type = other DNA
gctgcatccagattgcaaagt

SEQ ID NO: 11060 - protein, 7 aa, synthetic construct
  REGION 1..7: note = Description of Artificial Sequence: Synthetic peptide
AASRLQS

SEQ ID NO: 11061 - DNA, 21 bp, synthetic construct
  misc_feature 1..21: note = Description of Artificial Sequence: Synthetic oligonucleotide
  source 1..21: mol_type = other DNA
gctgcatccagtttgcaaagt

SEQ ID NO: 11062 - protein, 7 aa, synthetic construct
  REGION 1..7: note = Description of Artificial Sequence: Synthetic peptide
AASSLQS

SEQ ID NO: 11063 - DNA, 21 bp, synthetic construct
  misc_feature 1..21: note = Description of Artificial Sequence: Synthetic oligonucleotide
  source 1..21: mol_type = other DNA
gctgcatccagtgtgctaagt

SEQ ID NO: 11064 - protein, 7 aa, synthetic construct
  REGION 1..7: note = Description of Artificial Sequence: Synthetic peptide
AASSVLS

SEQ ID NO: 11065 - DNA, 21 bp, synthetic construct
  misc_feature 1..21: note = Description of Artificial Sequence: Synthetic oligonucleotide
  source 1..21: mol_type = other DNA
gctgcatccagtttgcaaagt

SEQ ID NO: 11066 - protein, 7 aa, synthetic construct
  REGION 1..7: note = Description of Artificial Sequence: Synthetic peptide
AASSLQS

SEQ ID NO: 11067 - DNA, 21 bp, synthetic construct
  misc_feature 1..21: note = Description of Artificial Sequence: Synthetic oligonucleotide
  source 1..21: mol_type = other DNA
gctgcatccagattgcaaagt

SEQ ID NO: 11068 - protein, 7 aa, synthetic construct
  REGION 1..7: note = Description of Artificial Sequence: Synthetic peptide
AASRLQS

SEQ ID NO: 11069 - DNA, 21 bp, synthetic construct
  misc_feature 1..21: note = Description of Artificial Sequence: Synthetic oligonucleotide
  source 1..21: mol_type = other DNA
gctgcatccagtttgcaaagt

SEQ ID NO: 11070 - protein, 7 aa, synthetic construct
  REGION 1..7: note = Description of Artificial Sequence: Synthetic peptide
AASSLQS

SEQ ID NO: 11071 - DNA, 21 bp, synthetic construct
  misc_feature 1..21: note = Description of Artificial Sequence: Synthetic oligonucleotide
  source 1..21: mol_type = other DNA
tgggcatctacccgggaatcc

SEQ ID NO: 11072 - protein, 7 aa, synthetic construct
  REGION 1..7: note = Description of Artificial Sequence: Synthetic peptide
WASTRES

SEQ ID NO: 11073 - DNA, 21 bp, synthetic construct
  misc_feature 1..21: note = Description of Artificial Sequence: Synthetic oligonucleotide
  source 1..21: mol_type = other DNA
tgggcatctacccgggaatcc

SEQ ID NO: 11074 - protein, 7 aa, synthetic construct
  REGION 1..7: note = Description of Artificial Sequence: Synthetic peptide
WASTRES

SEQ ID NO: 11075 - DNA, 21 bp, synthetic construct
  misc_feature 1..21: note = Description of Artificial Sequence: Synthetic oligonucleotide
  source 1..21: mol_type = other DNA
gctgcatccagtttgcaaagt

SEQ ID NO: 11076 - protein, 7 aa, synthetic construct
  REGION 1..7: note = Description of Artificial Sequence: Synthetic peptide
AASSLQS

SEQ ID NO: 11077 - DNA, 21 bp, synthetic construct
  misc_feature 1..21: note = Description of Artificial Sequence: Synthetic oligonucleotide
  source 1..21: mol_type = other DNA
gctgcatccagtttgcaaagt

SEQ ID NO: 11078 - protein, 7 aa, synthetic construct
  REGION 1..7: note = Description of Artificial Sequence: Synthetic peptide
AASSLQS

SEQ ID NO: 11079 - DNA, 21 bp, synthetic construct
  misc_feature 1..21: note = Description of Artificial Sequence: Synthetic oligonucleotide
  source 1..21: mol_type = other DNA
tatgcttcccagtccttctca

SEQ ID NO: 11080 - protein, 7 aa, synthetic construct
  REGION 1..7: note = Description of Artificial Sequence: Synthetic peptide
YASQSFS

SEQ ID NO: 11081 - DNA, 21 bp, synthetic construct
  misc_feature 1..21: note = Description of Artificial Sequence: Synthetic oligonucleotide
  source 1..21: mol_type = other DNA
gctgcatccagtttgcaaagt

SEQ ID NO: 11082 - protein, 7 aa, synthetic construct
  REGION 1..7: note = Description of Artificial Sequence: Synthetic peptide
AASSLQS

SEQ ID NO: 11083 - DNA, 21 bp, synthetic construct
  misc_feature 1..21: note = Description of Artificial Sequence: Synthetic oligonucleotide
  source 1..21: mol_type = other DNA
gctgcatccagtttgcaaagt

SEQ ID NO: 11084 - protein, 7 aa, synthetic construct
  REGION 1..7: note = Description of Artificial Sequence: Synthetic peptide
AASSLQS

SEQ ID NO: 11085 - DNA, 21 bp, synthetic construct
  misc_feature 1..21: note = Description of Artificial Sequence: Synthetic oligonucleotide
  source 1..21: mol_type = other DNA
gctgcatccagtttgcaaagt

SEQ ID NO: 11086 - protein, 7 aa, synthetic construct
  REGION 1..7: note = Description of Artificial Sequence: Synthetic peptide
AASSLQS

SEQ ID NO: 11087 - DNA, 21 bp, synthetic construct
  misc_feature 1..21: note = Description of Artificial Sequence: Synthetic oligonucleotide
  source 1..21: mol_type = other DNA
gctgcatccagtttgcaaagt

SEQ ID NO: 11088 - protein, 7 aa, synthetic construct
  REGION 1..7: note = Description of Artificial Sequence: Synthetic peptide
AASSLQS

SEQ ID NO: 11089 - DNA, 21 bp, synthetic construct
  misc_feature 1..21: note = Description of Artificial Sequence: Synthetic oligonucleotide
  source 1..21: mol_type = other DNA
gctgcatccagtttgcaaagt

SEQ ID NO: 11090 - protein, 7 aa, synthetic construct
  REGION 1..7: note = Description of Artificial Sequence: Synthetic peptide
AASSLQS

SEQ ID NO: 11091 - DNA, 21 bp, synthetic construct
  misc_feature 1..21: note = Description of Artificial Sequence: Synthetic oligonucleotide
  source 1..21: mol_type = other DNA
gctgcatccagtttgcaaagt

SEQ ID NO: 11092 - protein, 7 aa, synthetic construct
  REGION 1..7: note = Description of Artificial Sequence: Synthetic peptide
AASSLQS

SEQ ID NO: 11093 - DNA, 21 bp, synthetic construct
  misc_feature 1..21: note = Description of Artificial Sequence: Synthetic oligonucleotide
  source 1..21: mol_type = other DNA
gctgcatccagtttgcatagt

SEQ ID NO: 11094 - protein, 7 aa, synthetic construct
  REGION 1..7: note = Description of Artificial Sequence: Synthetic peptide
AASSLHS

SEQ ID NO: 11095 - DNA, 21 bp, synthetic construct
  misc_feature 1..21: note = Description of Artificial Sequence: Synthetic oligonucleotide
  source 1..21: mol_type = other DNA
tatgcttcccagtccctctca

SEQ ID NO: 11096 - protein, 7 aa, synthetic construct
  REGION 1..7: note = Description of Artificial Sequence: Synthetic peptide
YASQSLS

SEQ ID NO: 11097 - DNA, 21 bp, synthetic construct
  misc_feature 1..21: note = Description of Artificial Sequence: Synthetic oligonucleotide
  source 1..21: mol_type = other DNA
ggtgcatccagcagggccact

SEQ ID NO: 11098 - protein, 7 aa, synthetic construct
  REGION 1..7: note = Description of Artificial Sequence: Synthetic peptide
GASSRAT

SEQ ID NO: 11099 - DNA, 21 bp, synthetic construct
  misc_feature 1..21: note = Description of Artificial Sequence: Synthetic oligonucleotide
  source 1..21: mol_type = other DNA
gctgcatccagtttgcaaagt

SEQ ID NO: 11100 - protein, 7 aa, synthetic construct
  REGION 1..7: note = Description of Artificial Sequence: Synthetic peptide
AASSLQS

SEQ ID NO: 11101 - DNA, 21 bp, synthetic construct
  misc_feature 1..21: note = Description of Artificial Sequence: Synthetic oligonucleotide
  source 1..21: mol_type = other DNA
gctgcatccagtttacagagt

SEQ ID NO: 11102 - protein, 7 aa, synthetic construct
  REGION 1..7: note = Description of Artificial Sequence: Synthetic peptide
AASSLQS

SEQ ID NO: 11103 - DNA, 21 bp, synthetic construct
  misc_feature 1..21: note = Description of Artificial Sequence: Synthetic oligonucleotide
  source 1..21: mol_type = other DNA
ggtgcatccagcagggccatt

SEQ ID NO: 11104 - protein, 7 aa, synthetic construct
  REGION 1..7: note = Description of Artificial Sequence: Synthetic peptide
GASSRAI

SEQ ID NO: 11105 - DNA, 21 bp, synthetic construct
  misc_feature 1..21: note = Description of Artificial Sequence: Synthetic oligonucleotide
  source 1..21: mol_type = other DNA
ggtgcatccaccagggccact

SEQ ID NO: 11106 - protein, 7 aa, synthetic construct
  REGION 1..7: note = Description of Artificial Sequence: Synthetic peptide
GASTRAT

SEQ ID NO: 11107 - DNA, 21 bp, synthetic construct
  misc_feature 1..21: note = Description of Artificial Sequence: Synthetic oligonucleotide
  source 1..21: mol_type = other DNA
ggtacatccaccagggccact

SEQ ID NO: 11108 - protein, 7 aa, synthetic construct
  REGION 1..7: note = Description of Artificial Sequence: Synthetic peptide
GTSTRAT

SEQ ID NO: 11109 - DNA, 21 bp, synthetic construct
  misc_feature 1..21: note = Description of Artificial Sequence: Synthetic oligonucleotide
  source 1..21: mol_type = other DNA
gctgcatccagtttgcaaagt

SEQ ID NO: 11110 - protein, 7 aa, synthetic construct
  REGION 1..7: note = Description of Artificial Sequence: Synthetic peptide
AASSLQS

SEQ ID NO: 11111 - DNA, 21 bp, synthetic construct
  misc_feature 1..21: note = Description of Artificial Sequence: Synthetic oligonucleotide
  source 1..21: mol_type = other DNA
ggtgcatccagtttgcaaagt

SEQ ID NO: 11112 - protein, 7 aa, synthetic construct
  REGION 1..7: note = Description of Artificial Sequence: Synthetic peptide
GASSLQS

SEQ ID NO: 11113 - DNA, 21 bp, synthetic construct
  misc_feature 1..21: note = Description of Artificial Sequence: Synthetic oligonucleotide
  source 1..21: mol_type = other DNA
tatgcttcccagtccttctca

SEQ ID NO: 11114 - protein, 7 aa, synthetic construct
  REGION 1..7: note = Description of Artificial Sequence: Synthetic peptide
YASQSFS

SEQ ID NO: 11115 - DNA, 21 bp, synthetic construct
  misc_feature 1..21: note = Description of Artificial Sequence: Synthetic oligonucleotide
  source 1..21: mol_type = other DNA
gctgcatccagtttgcaaagt

SEQ ID NO: 11116 - protein, 7 aa, synthetic construct
  REGION 1..7: note = Description of Artificial Sequence: Synthetic peptide
AASSLQS

SEQ ID NO: 11117 - DNA, 21 bp, synthetic construct
  misc_feature 1..21: note = Description of Artificial Sequence: Synthetic oligonucleotide
  source 1..21: mol_type = other DNA
gctgcatccagtttgcaaagt

SEQ ID NO: 11118 - protein, 7 aa, synthetic construct
  REGION 1..7: note = Description of Artificial Sequence: Synthetic peptide
AASSLQS

SEQ ID NO: 11119 - DNA, 21 bp, synthetic construct
  misc_feature 1..21: note = Description of Artificial Sequence: Synthetic oligonucleotide
  source 1..21: mol_type = other DNA
gctgcatccagattgcaaagt

SEQ ID NO: 11120 - protein, 7 aa, synthetic construct
  REGION 1..7: note = Description of Artificial Sequence: Synthetic peptide
AASRLQS

SEQ ID NO: 11121 - DNA, 21 bp, synthetic construct
  misc_feature 1..21: note = Description of Artificial Sequence: Synthetic oligonucleotide
  source 1..21: mol_type = other DNA
gctgcatccagtttgcaaagt

SEQ ID NO: 11122 - protein, 7 aa, synthetic construct
  REGION 1..7: note = Description of Artificial Sequence: Synthetic peptide
AASSLQS

SEQ ID NO: 11123 - DNA, 21 bp, synthetic construct
  misc_feature 1..21: note = Description of Artificial Sequence: Synthetic oligonucleotide
  source 1..21: mol_type = other DNA
gctgcatccagtttgcaaagt

SEQ ID NO: 11124 - protein, 7 aa, synthetic construct
  REGION 1..7: note = Description of Artificial Sequence: Synthetic peptide
AASSLQS

SEQ ID NO: 11125 - DNA, 21 bp, synthetic construct
  misc_feature 1..21: note = Description of Artificial Sequence: Synthetic oligonucleotide
  source 1..21: mol_type = other DNA
gctgcatccagtttgcaaagt

SEQ ID NO: 11126 - protein, 7 aa, synthetic construct
  REGION 1..7: note = Description of Artificial Sequence: Synthetic peptide
AASSLQS

SEQ ID NO: 11127 - DNA, 21 bp, synthetic construct
  misc_feature 1..21: note = Description of Artificial Sequence: Synthetic oligonucleotide
  source 1..21: mol_type = other DNA
tctgcatccaatttgcaaagt

SEQ ID NO: 11128 - protein, 7 aa, synthetic construct
  REGION 1..7: note = Description of Artificial Sequence: Synthetic peptide
SASNLQS

SEQ ID NO: 11129 - DNA, 21 bp, synthetic construct
  misc_feature 1..21: note = Description of Artificial Sequence: Synthetic oligonucleotide
  source 1..21: mol_type = other DNA
gttacatccagcagggccact

SEQ ID NO: 11130 - protein, 7 aa, synthetic construct
  REGION 1..7: note = Description of Artificial Sequence: Synthetic peptide
VTSSRAT

SEQ ID NO: 11131 - DNA, 21 bp, synthetic construct
  misc_feature 1..21: note = Description of Artificial Sequence: Synthetic oligonucleotide
  source 1..21: mol_type = other DNA
ggtgcatccagtttgcaaagt

SEQ ID NO: 11132 - protein, 7 aa, synthetic construct
  REGION 1..7: note = Description of Artificial Sequence: Synthetic peptide
GASSLQS

SEQ ID NO: 11133 - DNA, 21 bp, synthetic construct
  misc_feature 1..21: note = Description of Artificial Sequence: Synthetic oligonucleotide
  source 1..21: mol_type = other DNA
actgcatccaatttgcaaagt

SEQ ID NO: 11134 - protein, 7 aa, synthetic construct
  REGION 1..7: note = Description of Artificial Sequence: Synthetic peptide
TASNLQS

SEQ ID NO: 11135 - DNA, 21 bp, synthetic construct
  misc_feature 1..21: note = Description of Artificial Sequence: Synthetic oligonucleotide
  source 1..21: mol_type = other DNA
gctgcatccaatttacaaagt

SEQ ID NO: 11136 - protein, 7 aa, synthetic construct
  REGION 1..7: note = Description of Artificial Sequence: Synthetic peptide
AASNLQS

SEQ ID NO: 11137 - DNA, 21 bp, synthetic construct
  misc_feature 1..21: note = Description of Artificial Sequence: Synthetic oligonucleotide
  source 1..21: mol_type = other DNA
actgcatccaatttgcaaagt

SEQ ID NO: 11138 - protein, 7 aa, synthetic construct
  REGION 1..7: note = Description of Artificial Sequence: Synthetic peptide
TASNLQS

SEQ ID NO: 11139 - DNA, 21 bp, synthetic construct
  misc_feature 1..21: note = Description of Artificial Sequence: Synthetic oligonucleotide
  source 1..21: mol_type = other DNA
actgcatccaatttgcaaagt

SEQ ID NO: 11140 - protein, 7 aa, synthetic construct
  REGION 1..7: note = Description of Artificial Sequence: Synthetic peptide
TASNLQS

SEQ ID NO: 11141 - DNA, 21 bp, synthetic construct
  misc_feature 1..21: note = Description of Artificial Sequence: Synthetic oligonucleotide
  source 1..21: mol_type = other DNA
tgggcatctacccgggaaacc

SEQ ID NO: 11142 - protein, 7 aa, synthetic construct
  REGION 1..7: note = Description of Artificial Sequence: Synthetic peptide
WASTRET

SEQ ID NO: 11143 - DNA, 21 bp, synthetic construct
  misc_feature 1..21: note = Description of Artificial Sequence: Synthetic oligonucleotide
  source 1..21: mol_type = other DNA
gctgcatccagtttgcaaagt

SEQ ID NO: 11144 - protein, 7 aa, synthetic construct
  REGION 1..7: note = Description of Artificial Sequence: Synthetic peptide
AASSLQS

SEQ ID NO: 11145 - DNA, 21 bp, synthetic construct
  misc_feature 1..21: note = Description of Artificial Sequence: Synthetic oligonucleotide
  source 1..21: mol_type = other DNA
actgcatcgagtttgcaaagt

SEQ ID NO: 11146 - protein, 7 aa, synthetic construct
  REGION 1..7: note = Description of Artificial Sequence: Synthetic peptide
TASSLQS

SEQ ID NO: 11147 - DNA, 21 bp, synthetic construct
  misc_feature 1..21: note = Description of Artificial Sequence: Synthetic oligonucleotide
  source 1..21: mol_type = other DNA
ggtgcatcaagcagggccact

SEQ ID NO: 11148 - protein, 7 aa, synthetic construct
  REGION 1..7: note = Description of Artificial Sequence: Synthetic peptide
GASSRAT

SEQ ID NO: 11149 - DNA, 21 bp, synthetic construct
  misc_feature 1..21: note = Description of Artificial Sequence: Synthetic oligonucleotide
  source 1..21: mol_type = other DNA
actgcatccaatttgcaaagt

SEQ ID NO: 11150 - protein, 7 aa, synthetic construct
  REGION 1..7: note = Description of Artificial Sequence: Synthetic peptide
TASNLQS

SEQ ID NO: 11151 - DNA, 21 bp, synthetic construct
  misc_feature 1..21: note = Description of Artificial Sequence: Synthetic oligonucleotide
  source 1..21: mol_type = other DNA
attgcatcgagtttgcaaagt

SEQ ID NO: 11152 - protein, 7 aa, synthetic construct
  REGION 1..7: note = Description of Artificial Sequence: Synthetic peptide
IASSLQS

SEQ ID NO: 11153 - DNA, 21 bp, synthetic construct
  misc_feature 1..21: note = Description of Artificial Sequence: Synthetic oligonucleotide
  source 1..21: mol_type = other DNA
gctgcatccagtttgcaaagt

SEQ ID NO: 11154 - protein, 7 aa, synthetic construct
  REGION 1..7: note = Description of Artificial Sequence: Synthetic peptide
AASSLQS

SEQ ID NO: 11155 - DNA, 21 bp, synthetic construct
  misc_feature 1..21: note = Description of Artificial Sequence: Synthetic oligonucleotide
  source 1..21: mol_type = other DNA
actgcatccaatttgcaaagt

SEQ ID NO: 11156 - protein, 7 aa, synthetic construct
  REGION 1..7: note = Description of Artificial Sequence: Synthetic peptide
TASNLQS

SEQ ID NO: 11157 - DNA, 21 bp, synthetic construct
  misc_feature 1..21: note = Description of Artificial Sequence: Synthetic oligonucleotide
  source 1..21: mol_type = other DNA
tgggcatctacccgggaatcc

SEQ ID NO: 11158 - protein, 7 aa, synthetic construct
  REGION 1..7: note = Description of Artificial Sequence: Synthetic peptide
WASTRES

SEQ ID NO: 11159 - DNA, 21 bp, synthetic construct
  misc_feature 1..21: note = Description of Artificial Sequence: Synthetic oligonucleotide
  source 1..21: mol_type = other DNA
gctgcatccaatttgcaaagt

SEQ ID NO: 11160 - protein, 7 aa, synthetic construct
  REGION 1..7: note = Description of Artificial Sequence: Synthetic peptide
AASNLQS

SEQ ID NO: 11161 - DNA, 21 bp, synthetic construct
  misc_feature 1..21: note = Description of Artificial Sequence: Synthetic oligonucleotide
  source 1..21: mol_type = other DNA
gctgcatccagtttgcaaagt

SEQ ID NO: 11162 - protein, 7 aa, synthetic construct
  REGION 1..7: note = Description of Artificial Sequence: Synthetic peptide
AASSLQS

SEQ ID NO: 11163 - DNA, 21 bp, synthetic construct
  misc_feature 1..21: note = Description of Artificial Sequence: Synthetic oligonucleotide
  source 1..21: mol_type = other DNA
gctgcatccagtttgcaaagt

SEQ ID NO: 11164 - protein, 7 aa, synthetic construct
  REGION 1..7: note = Description of Artificial Sequence: Synthetic peptide
AASSLQS

SEQ ID NO: 11165 - DNA, 21 bp, synthetic construct
  misc_feature 1..21: note = Description of Artificial Sequence: Synthetic oligonucleotide
  source 1..21: mol_type = other DNA
gctgcatccagtttgcaaagt

SEQ ID NO: 11166 - protein, 7 aa, synthetic construct
  REGION 1..7: note = Description of Artificial Sequence: Synthetic peptide
AASSLQS

SEQ ID NO: 11167 - DNA, 21 bp, synthetic construct
  misc_feature 1..21: note = Description of Artificial Sequence: Synthetic oligonucleotide
  source 1..21: mol_type = other DNA
gaaatttccaaccggttctct

SEQ ID NO: 11168 - protein, 7 aa, synthetic construct
  REGION 1..7: note = Description of Artificial Sequence: Synthetic peptide
EISNRFS

SEQ ID NO: 11169 - DNA, 21 bp, synthetic construct
  misc_feature 1..21: note = Description of Artificial Sequence: Synthetic oligonucleotide
  source 1..21: mol_type = other DNA
gctacatccagtttgcaaagt

SEQ ID NO: 11170 - protein, 7 aa, synthetic construct
  REGION 1..7: note = Description of Artificial Sequence: Synthetic peptide
ATSSLQS

SEQ ID NO: 11171 - DNA, 21 bp, synthetic construct
  misc_feature 1..21: note = Description of Artificial Sequence: Synthetic oligonucleotide
  source 1..21: mol_type = other DNA
gctgcatccagtttgcaaagt

SEQ ID NO: 11172 - protein, 7 aa, synthetic construct
  REGION 1..7: note = Description of Artificial Sequence: Synthetic peptide
AASSLQS

SEQ ID NO: 11173 - DNA, 21 bp, synthetic construct
  misc_feature 1..21: note = Description of Artificial Sequence: Synthetic oligonucleotide
  source 1..21: mol_type = other DNA
tgggcatctacccgggaatcc

SEQ ID NO: 11174 - protein, 7 aa, synthetic construct
  REGION 1..7: note = Description of Artificial Sequence: Synthetic peptide
WASTRES

SEQ ID NO: 11175 - DNA, 21 bp, synthetic construct
  misc_feature 1..21: note = Description of Artificial Sequence: Synthetic oligonucleotide
  source 1..21: mol_type = other DNA
gctgcatccagtttgcaaagt

SEQ ID NO: 11176 - protein, 7 aa, synthetic construct
  REGION 1..7: note = Description of Artificial Sequence: Synthetic peptide
AASSLQS

SEQ ID NO: 11177 - DNA, 21 bp, synthetic construct
  misc_feature 1..21: note = Description of Artificial Sequence: Synthetic oligonucleotide
  source 1..21: mol_type = other DNA
gaaatttccaaccggttctct

SEQ ID NO: 11178 - protein, 7 aa, synthetic construct
  REGION 1..7: note = Description of Artificial Sequence: Synthetic peptide
EISNRFS

SEQ ID NO: 11179 - DNA, 21 bp, synthetic construct
  misc_feature 1..21: note = Description of Artificial Sequence: Synthetic oligonucleotide
  source 1..21: mol_type = other DNA
tggtcgtctacccggaaatcc

SEQ ID NO: 11180 - protein, 7 aa, synthetic construct
  REGION 1..7: note = Description of Artificial Sequence: Synthetic peptide
WSSTRKS

SEQ ID NO: 11181 - DNA, 21 bp, synthetic construct
  misc_feature 1..21: note = Description of Artificial Sequence: Synthetic oligonucleotide
  source 1..21: mol_type = other DNA
tgggcatctacccgggagtcc

SEQ ID NO: 11182 - protein, 7 aa, synthetic construct
  REGION 1..7: note = Description of Artificial Sequence: Synthetic peptide
WASTRES

SEQ ID NO: 11183 - DNA, 21 bp, synthetic construct
  misc_feature 1..21: note = Description of Artificial Sequence: Synthetic oligonucleotide
  source 1..21: mol_type = other DNA
gctgcatccagtttacaaagt

SEQ ID NO: 11184 - protein, 7 aa, synthetic construct
  REGION 1..7: note = Description of Artificial Sequence: Synthetic peptide
AASSLQS

SEQ ID NO: 11185 - DNA, 21 bp, synthetic construct
  misc_feature 1..21: note = Description of Artificial Sequence: Synthetic oligonucleotide
  source 1..21: mol_type = other DNA
gaaatttccaaccggttctct

SEQ ID NO: 11186 - protein, 7 aa, synthetic construct
  REGION 1..7: note = Description of Artificial Sequence: Synthetic peptide
EISNRFS

SEQ ID NO: 11187 - DNA, 21 bp, synthetic construct
  misc_feature 1..21: note = Description of Artificial Sequence: Synthetic oligonucleotide
  source 1..21: mol_type = other DNA
tgggcatctacccgggaatcc

SEQ ID NO: 11188 - protein, 7 aa, synthetic construct
  REGION 1..7: note = Description of Artificial Sequence: Synthetic peptide
WASTRES

SEQ ID NO: 11189 - DNA, 21 bp, synthetic construct
  misc_feature 1..21: note = Description of Artificial Sequence: Synthetic oligonucleotide
  source 1..21: mol_type = other DNA
gaaatttccaaccggttctct

SEQ ID NO: 11190 - protein, 7 aa, synthetic construct
  REGION 1..7: note = Description of Artificial Sequence: Synthetic peptide
EISNRFS

SEQ ID NO: 11191 - DNA, 21 bp, synthetic construct
  misc_feature 1..21: note = Description of Artificial Sequence: Synthetic oligonucleotide
  source 1..21: mol_type = other DNA
gctgcatccagtttgcaaagt

SEQ ID NO: 11192 - protein, 7 aa, synthetic construct
  REGION 1..7: note = Description of Artificial Sequence: Synthetic peptide
AASSLQS

SEQ ID NO: 11193 - DNA, 21 bp, synthetic construct
  misc_feature 1..21: note = Description of Artificial Sequence: Synthetic oligonucleotide
  source 1..21: mol_type = other DNA
gatacatccagcagggccact

SEQ ID NO: 11194 - protein, 7 aa, synthetic construct
  REGION 1..7: note = Description of Artificial Sequence: Synthetic peptide
DTSSRAT

SEQ ID NO: 11195 - DNA, 21 bp, synthetic construct
  misc_feature 1..21: note = Description of Artificial Sequence: Synthetic oligonucleotide
  source 1..21: mol_type = other DNA
tgggcatctacccgggaatcc

SEQ ID NO: 11196 - protein, 7 aa, synthetic construct
  REGION 1..7: note = Description of Artificial Sequence: Synthetic peptide
WASTRES

SEQ ID NO: 11197 - DNA, 21 bp, synthetic construct
  misc_feature 1..21: note = Description of Artificial Sequence: Synthetic oligonucleotide
  source 1..21: mol_type = other DNA
gaaatttccaaccggttctct

SEQ ID NO: 11198 - protein, 7 aa, synthetic construct
  REGION 1..7: note = Description of Artificial Sequence: Synthetic peptide
EISNRFS

SEQ ID NO: 11199 - DNA, 21 bp, synthetic construct
  misc_feature 1..21: note = Description of Artificial Sequence: Synthetic oligonucleotide
  source 1..21: mol_type = other DNA
tgggcatctacccgggaatcc

SEQ ID NO: 11200 - protein, 7 aa, synthetic construct
  REGION 1..7: note = Description of Artificial Sequence: Synthetic peptide
WASTRES

SEQ ID NO: 11201 - DNA, 21 bp, synthetic construct
  misc_feature 1..21: note = Description of Artificial Sequence: Synthetic oligonucleotide
  source 1..21: mol_type = other DNA
gctgcaaccagtttgcaaagt

SEQ ID NO: 11202 - protein, 7 aa, synthetic construct
  REGION 1..7: note = Description of Artificial Sequence: Synthetic peptide
AATSLQS

SEQ ID NO: 11203 - DNA, 21 bp, synthetic construct
  misc_feature 1..21: note = Description of Artificial Sequence: Synthetic oligonucleotide
  source 1..21: mol_type = other DNA
gctgcatccagtttacaaagt

SEQ ID NO: 11204 - protein, 7 aa, synthetic construct
  REGION 1..7: note = Description of Artificial Sequence: Synthetic peptide
AASSLQS

SEQ ID NO: 11205 - DNA, 21 bp, synthetic construct
  misc_feature 1..21: note = Description of Artificial Sequence: Synthetic oligonucleotide
  source 1..21: mol_type = other DNA
ggtgcatccagcagggccact

SEQ ID NO: 11206 - protein, 7 aa, synthetic construct
  REGION 1..7: note = Description of Artificial Sequence: Synthetic peptide
GASSRAT

SEQ ID NO: 11207 - DNA, 21 bp, synthetic construct
  misc_feature 1..21: note = Description of Artificial Sequence: Synthetic oligonucleotide
  source 1..21: mol_type = other DNA
gctgcatccagtttgctaggt

SEQ ID NO: 11208 - protein, 7 aa, synthetic construct
  REGION 1..7: note = Description of Artificial Sequence: Synthetic peptide
AASSLLG

SEQ ID NO: 11209 - DNA, 21 bp, synthetic construct
  misc_feature 1..21: note = Description of Artificial Sequence: Synthetic oligonucleotide
  source 1..21: mol_type = other DNA
tgggcatctacccgggaatcc

SEQ ID NO: 11210 - protein, 7 aa, synthetic construct
  REGION 1..7: note = Description of Artificial Sequence: Synthetic peptide
WASTRES

SEQ ID NO: 11211 - DNA, 21 bp, synthetic construct
  misc_feature 1..21: note = Description of Artificial Sequence: Synthetic oligonucleotide
  source 1..21: mol_type = other DNA
tgggcttctacccgggaatcc

SEQ ID NO: 11212 - protein, 7 aa, synthetic construct
  REGION 1..7: note = Description of Artificial Sequence: Synthetic peptide
WASTRES

SEQ ID NO: 11213 - DNA, 21 bp, synthetic construct
  misc_feature 1..21: note = Description of Artificial Sequence: Synthetic oligonucleotide
  source 1..21: mol_type = other DNA
tggacatctacccgggaatcc

SEQ ID NO: 11214 - protein, 7 aa, synthetic construct
  REGION 1..7: note = Description of Artificial Sequence: Synthetic peptide
WTSTRES

SEQ ID NO: 11215 - DNA, 21 bp, synthetic construct
  misc_feature 1..21: note = Description of Artificial Sequence: Synthetic oligonucleotide
  source 1..21: mol_type = other DNA
tgggcatctacccgggaatcc

SEQ ID NO: 11216 - protein, 7 aa, synthetic construct
  REGION 1..7: note = Description of Artificial Sequence: Synthetic peptide
WASTRES

SEQ ID NO: 11217 - DNA, 21 bp, synthetic construct
  misc_feature 1..21: note = Description of Artificial Sequence: Synthetic oligonucleotide
  source 1..21: mol_type = other DNA
gaagtttccatccggttctct

SEQ ID NO: 11218 - protein, 7 aa, synthetic construct
  REGION 1..7: note = Description of Artificial Sequence: Synthetic peptide
EVSIRFS

SEQ ID NO: 11219 - DNA, 21 bp, synthetic construct
  misc_feature 1..21: note = Description of Artificial Sequence: Synthetic oligonucleotide
  source 1..21: mol_type = other DNA
gaagtttccaaccggttctct

SEQ ID NO: 11220 - protein, 7 aa, synthetic construct
  REGION 1..7: note = Description of Artificial Sequence: Synthetic peptide
EVSNRFS

SEQ ID NO: 11221 - DNA, 21 bp, synthetic construct
  misc_feature 1..21: note = Description of Artificial Sequence: Synthetic oligonucleotide
  source 1..21: mol_type = other DNA
gctgcatccagtttgcaaagt

SEQ ID NO: 11222 - protein, 7 aa, synthetic construct
  REGION 1..7: note = Description of Artificial Sequence: Synthetic peptide
AASSLQS

SEQ ID NO: 11223 - DNA, 21 bp, synthetic construct
  misc_feature 1..21: note = Description of Artificial Sequence: Synthetic oligonucleotide
  source 1..21: mol_type = other DNA
tgggcatctacccgggaatcc

SEQ ID NO: 11224 - protein, 7 aa, synthetic construct
  REGION 1..7: note = Description of Artificial Sequence: Synthetic peptide
WASTRES

SEQ ID NO: 11225 - DNA, 21 bp, synthetic construct
  misc_feature 1..21: note = Description of Artificial Sequence: Synthetic oligonucleotide
  source 1..21: mol_type = other DNA
tgggcttctacccgggaatcc

SEQ ID NO: 11226 - protein, 7 aa, synthetic construct
  REGION 1..7: note = Description of Artificial Sequence: Synthetic peptide
WASTRES

SEQ ID NO: 11227 - DNA, 21 bp, synthetic construct
  misc_feature 1..21: note = Description of Artificial Sequence: Synthetic oligonucleotide
  source 1..21: mol_type = other DNA
gaagtttccaaccggttctct

SEQ ID NO: 11228 - protein, 7 aa, synthetic construct
  REGION 1..7: note = Description of Artificial Sequence: Synthetic peptide
EVSNRFS

SEQ ID NO: 11229 - DNA, 21 bp, synthetic construct
  misc_feature 1..21: note = Description of Artificial Sequence: Synthetic oligonucleotide
  source 1..21: mol_type = other DNA
gctgcctccagtttgcaaagt

SEQ ID NO: 11230 - protein, 7 aa, synthetic construct
  REGION 1..7: note = Description of Artificial Sequence: Synthetic peptide
AASSLQS

SEQ ID NO: 11231 - DNA, 21 bp, synthetic construct
  misc_feature 1..21: note = Description of Artificial Sequence: Synthetic oligonucleotide
  source 1..21: mol_type = other DNA
gaaatttccaaccggttctct

SEQ ID NO: 11232 - protein, 7 aa, synthetic construct
  REGION 1..7: note = Description of Artificial Sequence: Synthetic peptide
EISNRFS

SEQ ID NO: 11233 - DNA, 21 bp, synthetic construct
  misc_feature 1..21: note = Description of Artificial Sequence: Synthetic oligonucleotide
  source 1..21: mol_type = other DNA
gctgcatccagtttgcaaagt

SEQ ID NO: 11234 - protein, 7 aa, synthetic construct
  REGION 1..7: note = Description of Artificial Sequence: Synthetic peptide
AASSLQS

SEQ ID NO: 11235 - DNA, 21 bp, synthetic construct
  misc_feature 1..21: note = Description of Artificial Sequence: Synthetic oligonucleotide
  source 1..21: mol_type = other DNA
gaaatttccaaccggttctct

SEQ ID NO: 11236 - protein, 7 aa, synthetic construct
  REGION 1..7: note = Description of Artificial Sequence: Synthetic peptide
EISNRFS

SEQ ID NO: 11237 - DNA, 21 bp, synthetic construct
  misc_feature 1..21: note = Description of Artificial Sequence: Synthetic oligonucleotide
  source 1..21: mol_type = other DNA
gaagtttccaaccggttctct

SEQ ID NO: 11238 - protein, 7 aa, synthetic construct
  REGION 1..7: note = Description of Artificial Sequence: Synthetic peptide
EVSNRFS

SEQ ID NO: 11239 - DNA, 21 bp, synthetic construct
  misc_feature 1..21: note = Description of Artificial Sequence: Synthetic oligonucleotide
  source 1..21: mol_type = other DNA
gaaatttccaaccggttctct

SEQ ID NO: 11240 - protein, 7 aa, synthetic construct
  REGION 1..7: note = Description of Artificial Sequence: Synthetic peptide
EISNRFS

SEQ ID NO: 11241 - DNA, 21 bp, synthetic construct
  misc_feature 1..21: note = Description of Artificial Sequence: Synthetic oligonucleotide
  source 1..21: mol_type = other DNA
tgggcatctacccgggaatcc

SEQ ID NO: 11242 - protein, 7 aa, synthetic construct
  REGION 1..7: note = Description of Artificial Sequence: Synthetic peptide
WASTRES

SEQ ID NO: 11243 - DNA, 21 bp, synthetic construct
  misc_feature 1..21: note = Description of Artificial Sequence: Synthetic oligonucleotide
  source 1..21: mol_type = other DNA
gaaatttccaaccggttctct

SEQ ID NO: 11244 - protein, 7 aa, synthetic construct
  REGION 1..7: note = Description of Artificial Sequence: Synthetic peptide
EISNRFS

SEQ ID NO: 11245 - DNA, 21 bp, synthetic construct
  misc_feature 1..21: note = Description of Artificial Sequence: Synthetic oligonucleotide
  source 1..21: mol_type = other DNA
gctgcatccagtttgcaaagt

SEQ ID NO: 11246 - protein, 7 aa, synthetic construct
  REGION 1..7: note = Description of Artificial Sequence: Synthetic peptide
AASSLQS

SEQ ID NO: 11247 - DNA, 21 bp, synthetic construct
  misc_feature 1..21: note = Description of Artificial Sequence: Synthetic oligonucleotide
  source 1..21: mol_type = other DNA
tgggcatctacccggaaatcc

SEQ ID NO: 11248 - protein, 7 aa, synthetic construct
  REGION 1..7: note = Description of Artificial Sequence: Synthetic peptide
WASTRKS

SEQ ID NO: 11249 - DNA, 21 bp, synthetic construct
  misc_feature 1..21: note = Description of Artificial Sequence: Synthetic oligonucleotide
  source 1..21: mol_type = other DNA
gaaatttccaaccggttctct

SEQ ID NO: 11250 - protein, 7 aa, synthetic construct
  REGION 1..7: note = Description of Artificial Sequence: Synthetic peptide
EISNRFS

SEQ ID NO: 11251 - DNA, 21 bp, synthetic construct
  misc_feature 1..21: note = Description of Artificial Sequence: Synthetic oligonucleotide
  source 1..21: mol_type = other DNA
gaaatttccaaccggttctct

SEQ ID NO: 11252 - protein, 7 aa, synthetic construct
  REGION 1..7: note = Description of Artificial Sequence: Synthetic peptide
EISNRFS

SEQ ID NO: 11253 - DNA, 21 bp, synthetic construct
  misc_feature 1..21: note = Description of Artificial Sequence: Synthetic oligonucleotide
  source 1..21: mol_type = other DNA
gaaatttccaaccggttctct

SEQ ID NO: 11254 - protein, 7 aa, synthetic construct
  REGION 1..7: note = Description of Artificial Sequence: Synthetic peptide
EISNRFS

SEQ ID NO: 11255 - DNA, 21 bp, synthetic construct
  misc_feature 1..21: note = Description of Artificial Sequence: Synthetic oligonucleotide
  source 1..21: mol_type = other DNA
gctgcatccagtttgcaaagt

SEQ ID NO: 11256 - protein, 7 aa, synthetic construct
  REGION 1..7: note = Description of Artificial Sequence: Synthetic peptide
AASSLQS

SEQ ID NO: 11257 - DNA, 21 bp, synthetic construct
  misc_feature 1..21: note = Description of Artificial Sequence: Synthetic oligonucleotide
  source 1..21: mol_type = other DNA
gctgcatccagtttgcaaagt

SEQ ID NO: 11258 - protein, 7 aa, synthetic construct
  REGION 1..7: note = Description of Artificial Sequence: Synthetic peptide
AASSLQS

SEQ ID NO: 11259 - DNA, 21 bp, synthetic construct
  misc_feature 1..21: note = Description of Artificial Sequence: Synthetic oligonucleotide
  source 1..21: mol_type = other DNA
gctgcatccagtttgcaaagt

SEQ ID NO: 11260 - protein, 7 aa, synthetic construct
  REGION 1..7: note = Description of Artificial Sequence: Synthetic peptide
AASSLQS

SEQ ID NO: 11261 - DNA, 21 bp, synthetic construct
  misc_feature 1..21: note = Description of Artificial Sequence: Synthetic oligonucleotide
  source 1..21: mol_type = other DNA
tgggcatctacccgggaatcc

SEQ ID NO: 11262 - protein, 7 aa, synthetic construct
  REGION 1..7: note = Description of Artificial Sequence: Synthetic peptide
WASTRES

SEQ ID NO: 11263 - DNA, 21 bp, synthetic construct
  misc_feature 1..21: note = Description of Artificial Sequence: Synthetic oligonucleotide
  source 1..21: mol_type = other DNA
tgggcatctacccgggaatcc

SEQ ID NO: 11264 - protein, 7 aa, synthetic construct
  REGION 1..7: note = Description of Artificial Sequence: Synthetic peptide
WASTRES

SEQ ID NO: 11265 - DNA, 21 bp, synthetic construct
  misc_feature 1..21: note = Description of Artificial Sequence: Synthetic oligonucleotide
  source 1..21: mol_type = other DNA
gaaatttccaaccggttctct

SEQ ID NO: 11266 - protein, 7 aa, synthetic construct
  REGION 1..7: note = Description of Artificial Sequence: Synthetic peptide
EISNRFS

SEQ ID NO: 11267 - DNA, 21 bp, synthetic construct
  misc_feature 1..21: note = Description of Artificial Sequence: Synthetic oligonucleotide
  source 1..21: mol_type = other DNA
tggggatctacccgggaatcc

SEQ ID NO: 11268 - protein, 7 aa, synthetic construct
  REGION 1..7: note = Description of Artificial Sequence: Synthetic peptide
WGSTRES

SEQ ID NO: 11269 - DNA, 21 bp, synthetic construct
  misc_feature 1..21: note = Description of Artificial Sequence: Synthetic oligonucleotide
  source 1..21: mol_type = other DNA
tgggcatctacccgggaatcc

SEQ ID NO: 11270 - protein, 7 aa, synthetic construct
  REGION 1..7: note = Description of Artificial Sequence: Synthetic peptide
WASTRES

SEQ ID NO: 11271 - DNA, 21 bp, synthetic construct
  misc_feature 1..21: note = Description of Artificial Sequence: Synthetic oligonucleotide
  source 1..21: mol_type = other DNA
ttgggttctaatcgggcctcc

SEQ ID NO: 11272 - protein, 7 aa, synthetic construct
  REGION 1..7: note = Description of Artificial Sequence: Synthetic peptide
LGSNRAS

SEQ ID NO: 11273 - DNA, 21 bp, synthetic construct
  misc_feature 1..21: note = Description of Artificial Sequence: Synthetic oligonucleotide
  source 1..21: mol_type = other DNA
gctgcatccagtttgcaaagt

SEQ ID NO: 11274 - protein, 7 aa, synthetic construct
  REGION 1..7: note = Description of Artificial Sequence: Synthetic peptide
AASSLQS

SEQ ID NO: 11275 - DNA, 21 bp, synthetic construct
  misc_feature 1..21: note = Description of Artificial Sequence: Synthetic oligonucleotide
  source 1..21: mol_type = other DNA
caagatagcaagcggccctca

SEQ ID NO: 11276 - protein, 7 aa, synthetic construct
  REGION 1..7: note = Description of Artificial Sequence: Synthetic peptide
QDSKRPS

SEQ ID NO: 11277 - DNA, 21 bp, synthetic construct
  misc_feature 1..21: note = Description of Artificial Sequence: Synthetic oligonucleotide
  source 1..21: mol_type = other DNA
caagatagcaagcggccctca

SEQ ID NO: 11278 - protein, 7 aa, synthetic construct
  REGION 1..7: note = Description of Artificial Sequence: Synthetic peptide
QDSKRPS

SEQ ID NO: 11279 - DNA, 21 bp, synthetic construct
  misc_feature 1..21: note = Description of Artificial Sequence: Synthetic oligonucleotide
  source 1..21: mol_type = other DNA
caagatagcaagcggccctca

SEQ ID NO: 11280 - protein, 7 aa, synthetic construct
  REGION 1..7: note = Description of Artificial Sequence: Synthetic peptide
QDSKRPS

SEQ ID NO: 11281 - DNA, 21 bp, synthetic construct
  misc_feature 1..21: note = Description of Artificial Sequence: Synthetic oligonucleotide
  source 1..21: mol_type = other DNA
agtaataatcagcggccctca

SEQ ID NO: 11282 - protein, 7 aa, synthetic construct
  REGION 1..7: note = Description of Artificial Sequence: Synthetic peptide
SNNQRPS

SEQ ID NO: 11283 - DNA, 21 bp, synthetic construct
  misc_feature 1..21: note = Description of Artificial Sequence: Synthetic oligonucleotide
  source 1..21: mol_type = other DNA
caagataggaagcggccctca

SEQ ID NO: 11284 - protein, 7 aa, synthetic construct
  REGION 1..7: note = Description of Artificial Sequence: Synthetic peptide
QDRKRPS

SEQ ID NO: 11285 - DNA, 21 bp, synthetic construct
  misc_feature 1..21: note = Description of Artificial Sequence: Synthetic oligonucleotide
  source 1..21: mol_type = other DNA
caagatagcaagcgcccctca

SEQ ID NO: 11286 - protein, 7 aa, synthetic construct
  REGION 1..7: note = Description of Artificial Sequence: Synthetic peptide
QDSKRPS

SEQ ID NO: 11287 - DNA, 21 bp, synthetic construct
  misc_feature 1..21: note = Description of Artificial Sequence: Synthetic oligonucleotide
  source 1..21: mol_type = other DNA
caagataggaagcggccctca

SEQ ID NO: 11288 - protein, 7 aa, synthetic construct
  REGION 1..7: note = Description of Artificial Sequence: Synthetic peptide
QDRKRPS

SEQ ID NO: 11289 - DNA, 21 bp, synthetic construct
  misc_feature 1..21: note = Description of Artificial Sequence: Synthetic oligonucleotide
  source 1..21: mol_type = other DNA
caagataggaagcggccctca

SEQ ID NO: 11290 - protein, 7 aa, synthetic construct
  REGION 1..7: note = Description of Artificial Sequence: Synthetic peptide
QDRKRPS

SEQ ID NO: 11291 - DNA, 21 bp, synthetic construct
  misc_feature 1..21: note = Description of Artificial Sequence: Synthetic oligonucleotide
  source 1..21: mol_type = other DNA
caagatagcaagcggccctca

SEQ ID NO: 11292 - protein, 7 aa, synthetic construct
  REGION 1..7: note = Description of Artificial Sequence: Synthetic peptide
QDSKRPS

SEQ ID NO: 11293 - DNA, 21 bp, synthetic construct
  misc_feature 1..21: note = Description of Artificial Sequence: Synthetic oligonucleotide
  source 1..21: mol_type = other DNA
caagatagcaagcggccctca

SEQ ID NO: 11294 - protein, 7 aa, synthetic construct
  REGION 1..7: note = Description of Artificial Sequence: Synthetic peptide
QDSKRPS

SEQ ID NO: 11295 - DNA, 21 bp, synthetic construct
  misc_feature 1..21: note = Description of Artificial Sequence: Synthetic oligonucleotide
  source 1..21: mol_type = other DNA
caagataggaagcggccctca

SEQ ID NO: 11296 - protein, 7 aa, synthetic construct
  REGION 1..7: note = Description of Artificial Sequence: Synthetic peptide
QDRKRPS

SEQ ID NO: 11297 - DNA, 21 bp, synthetic construct
  misc_feature 1..21: note = Description of Artificial Sequence: Synthetic oligonucleotide
  source 1..21: mol_type = other DNA
caagatagcaagcggccctca

SEQ ID NO: 11298 - protein, 7 aa, synthetic construct
  REGION 1..7: note = Description of Artificial Sequence: Synthetic peptide
QDSKRPS

SEQ ID NO: 11299 - DNA, 21 bp, synthetic construct
  misc_feature 1..21: note = Description of Artificial Sequence: Synthetic oligonucleotide
  source 1..21: mol_type = other DNA
caagatagcaagcggccctca

SEQ ID NO: 11300 - protein, 7 aa, synthetic construct
  REGION 1..7: note = Description of Artificial Sequence: Synthetic peptide
QDSKRPS

SEQ ID NO: 11301 - DNA, 21 bp, synthetic construct
  misc_feature 1..21: note = Description of Artificial Sequence: Synthetic oligonucleotide
  source 1..21: mol_type = other DNA
agtaataatcaccggccctca

SEQ ID NO: 11302 - protein, 7 aa, synthetic construct
  REGION 1..7: note = Description of Artificial Sequence: Synthetic peptide
SNNHRPS

SEQ ID NO: 11303 - DNA, 21 bp, synthetic construct
  misc_feature 1..21: note = Description of Artificial Sequence: Synthetic oligonucleotide
  source 1..21: mol_type = other DNA
agtaatgatcagcggccctca

SEQ ID NO: 11304 - protein, 7 aa, synthetic construct
  REGION 1..7: note = Description of Artificial Sequence: Synthetic peptide
SNDQRPS

SEQ ID NO: 11305 - DNA, 21 bp, synthetic construct
  misc_feature 1..21: note = Description of Artificial Sequence: Synthetic oligonucleotide
  source 1..21: mol_type = other DNA
agtaataatcagcggccctca

SEQ ID NO: 11306 - protein, 7 aa, synthetic construct
  REGION 1..7: note = Description of Artificial Sequence: Synthetic peptide
SNNQRPS

SEQ ID NO: 11307 - DNA, 21 bp, synthetic construct
  misc_feature 1..21: note = Description of Artificial Sequence: Synthetic oligonucleotide
  source 1..21: mol_type = other DNA
caagatagcaagcggccctca

SEQ ID NO: 11308 - protein, 7 aa, synthetic construct
  REGION 1..7: note = Description of Artificial Sequence: Synthetic peptide
QDSKRPS

SEQ ID NO: 11309 - DNA, 21 bp, synthetic construct
  misc_feature 1..21: note = Description of Artificial Sequence: Synthetic oligonucleotide
  source 1..21: mol_type = other DNA
caagataggaagcggccctca

SEQ ID NO: 11310 - protein, 7 aa, synthetic construct
  REGION 1..7: note = Description of Artificial Sequence: Synthetic peptide
QDRKRPS

SEQ ID NO: 11311 - DNA, 21 bp, synthetic construct
  misc_feature 1..21: note = Description of Artificial Sequence: Synthetic oligonucleotide
  source 1..21: mol_type = other DNA
caagatagcaagcggccctca

SEQ ID NO: 11312 - protein, 7 aa, synthetic construct
  REGION 1..7: note = Description of Artificial Sequence: Synthetic peptide
QDSKRPS

SEQ ID NO: 11313 - DNA, 21 bp, synthetic construct
  misc_feature 1..21: note = Description of Artificial Sequence: Synthetic oligonucleotide
  source 1..21: mol_type = other DNA
caagatagcaagcggccctca

SEQ ID NO: 11314 - protein, 7 aa, synthetic construct
  REGION 1..7: note = Description of Artificial Sequence: Synthetic peptide
QDSKRPS

SEQ ID NO: 11315 - DNA, 21 bp, synthetic construct
  misc_feature 1..21: note = Description of Artificial Sequence: Synthetic oligonucleotide
  source 1..21: mol_type = other DNA
agtaataatcagcggccctca

SEQ ID NO: 11316 - protein, 7 aa, synthetic construct
  REGION 1..7: note = Description of Artificial Sequence: Synthetic peptide
SNNQRPS

SEQ ID NO: 11317 - DNA, 21 bp, synthetic construct
  misc_feature 1..21: note = Description of Artificial Sequence: Synthetic oligonucleotide
  source 1..21: mol_type = other DNA
caaaataaccagcggccctca

SEQ ID NO: 11318 - protein, 7 aa, synthetic construct
  REGION 1..7: note = Description of Artificial Sequence: Synthetic peptide
QNNQRPS

SEQ ID NO: 11319 - DNA, 21 bp, synthetic construct
  misc_feature 1..21: note = Description of Artificial Sequence: Synthetic oligonucleotide
  source 1..21: mol_type = other DNA
caagatagcaagcggccctca

SEQ ID NO: 11320 - protein, 7 aa, synthetic construct
  REGION 1..7: note = Description of Artificial Sequence: Synthetic peptide
QDSKRPS

SEQ ID NO: 11321 - DNA, 33 bp, synthetic construct
  misc_feature 1..33: note = Description of Artificial Sequence: Synthetic oligonucleotide
  source 1..33: mol_type = other DNA
tacacatcagactcagataaacaccagggctct

SEQ ID NO: 11322 - protein, 11 aa, synthetic construct
  REGION 1..11: note = Description of Artificial Sequence: Synthetic peptide
YTSDSDKHQGS

SEQ ID NO: 11323 - DNA, 21 bp, synthetic construct
  misc_feature 1..21: note = Description of Artificial Sequence: Synthetic oligonucleotide
  source 1..21: mol_type = other DNA
caagataacaagcggccctca

SEQ ID NO: 11324 - protein, 7 aa, synthetic construct
  REGION 1..7: note = Description of Artificial Sequence: Synthetic peptide
QDNKRPS

SEQ ID NO: 11325 - DNA, 21 bp, synthetic construct
  misc_feature 1..21: note = Description of Artificial Sequence: Synthetic oligonucleotide
  source 1..21: mol_type = other DNA
caagatagcaggcggccctca

SEQ ID NO: 11326 - protein, 7 aa, synthetic construct
  REGION 1..7: note = Description of Artificial Sequence: Synthetic peptide
QDSRRPS

SEQ ID NO: 11327 - DNA, 21 bp, synthetic construct
  misc_feature 1..21: note = Description of Artificial Sequence: Synthetic oligonucleotide
  source 1..21: mol_type = other DNA
caagataacaagcggccctca

SEQ ID NO: 11328 - protein, 7 aa, synthetic construct
  REGION 1..7: note = Description of Artificial Sequence: Synthetic peptide
QDNKRPS

SEQ ID NO: 11329 - DNA, 21 bp, synthetic construct
  misc_feature 1..21: note = Description of Artificial Sequence: Synthetic oligonucleotide
  source 1..21: mol_type = other DNA
caagatagcaagcggccctca

SEQ ID NO: 11330 - protein, 7 aa, synthetic construct
  REGION 1..7: note = Description of Artificial Sequence: Synthetic peptide
QDSKRPS

SEQ ID NO: 11331 - DNA, 21 bp, synthetic construct
  misc_feature 1..21: note = Description of Artificial Sequence: Synthetic oligonucleotide
  source 1..21: mol_type = other DNA
agtaatagtcagcggccctca

SEQ ID NO: 11332 - protein, 7 aa, synthetic construct
  REGION 1..7: note = Description of Artificial Sequence: Synthetic peptide
SNSQRPS

SEQ ID NO: 11333 - DNA, 21 bp, synthetic construct
  misc_feature 1..21: note = Description of Artificial Sequence: Synthetic oligonucleotide
  source 1..21: mol_type = other DNA
caagatagcaagcggccctca

SEQ ID NO: 11334 - protein, 7 aa, synthetic construct
  REGION 1..7: note = Description of Artificial Sequence: Synthetic peptide
QDSKRPS

SEQ ID NO: 11335 - DNA, 21 bp, synthetic construct
  misc_feature 1..21: note = Description of Artificial Sequence: Synthetic oligonucleotide
  source 1..21: mol_type = other DNA
caagatcgcaagcggccctca

SEQ ID NO: 11336 - protein, 7 aa, synthetic construct
  REGION 1..7: note = Description of Artificial Sequence: Synthetic peptide
QDRKRPS

SEQ ID NO: 11337 - DNA, 21 bp, synthetic construct
  misc_feature 1..21: note = Description of Artificial Sequence: Synthetic oligonucleotide
  source 1..21: mol_type = other DNA
caagatagcaagcggccctca

SEQ ID NO: 11338 - protein, 7 aa, synthetic construct
  REGION 1..7: note = Description of Artificial Sequence: Synthetic peptide
QDSKRPS

SEQ ID NO: 11339 - DNA, 21 bp, synthetic construct
  misc_feature 1..21: note = Description of Artificial Sequence: Synthetic oligonucleotide
  source 1..21: mol_type = other DNA
caagataccaagcggccctca

SEQ ID NO: 11340 - protein, 7 aa, synthetic construct
  REGION 1..7: note = Description of Artificial Sequence: Synthetic peptide
QDTKRPS

SEQ ID NO: 11341 - DNA, 21 bp, synthetic construct
  misc_feature 1..21: note = Description of Artificial Sequence: Synthetic oligonucleotide
  source 1..21: mol_type = other DNA
caagatagcaagcggccctca

SEQ ID NO: 11342 - protein, 7 aa, synthetic construct
  REGION 1..7: note = Description of Artificial Sequence: Synthetic peptide
QDSKRPS

SEQ ID NO: 11343 - DNA, 21 bp, synthetic construct
  misc_feature 1..21: note = Description of Artificial Sequence: Synthetic oligonucleotide
  source 1..21: mol_type = other DNA
caagatagcaagcggccctca

SEQ ID NO: 11344 - protein, 7 aa, synthetic construct
  REGION 1..7: note = Description of Artificial Sequence: Synthetic peptide
QDSKRPS

SEQ ID NO: 11345 - DNA, 21 bp, synthetic construct
  misc_feature 1..21: note = Description of Artificial Sequence: Synthetic oligonucleotide
  source 1..21: mol_type = other DNA
caagattccaagcggccctca

SEQ ID NO: 11346 - protein, 7 aa, synthetic construct
  REGION 1..7: note = Description of Artificial Sequence: Synthetic peptide
QDSKRPS

SEQ ID NO: 11347 - DNA, 21 bp, synthetic construct
  misc_feature 1..21: note = Description of Artificial Sequence: Synthetic oligonucleotide
  source 1..21: mol_type = other DNA
caagatagcaagcggccctca

SEQ ID NO: 11348 - protein, 7 aa, synthetic construct
  REGION 1..7: note = Description of Artificial Sequence: Synthetic peptide
QDSKRPS

SEQ ID NO: 11349 - DNA, 21 bp, synthetic construct
  misc_feature 1..21: note = Description of Artificial Sequence: Synthetic oligonucleotide
  source 1..21: mol_type = other DNA
caagatagcaagcggccctca

SEQ ID NO: 11350 - protein, 7 aa, synthetic construct
  REGION 1..7: note = Description of Artificial Sequence: Synthetic peptide
QDSKRPS

SEQ ID NO: 11351 - DNA, 21 bp, synthetic construct
  misc_feature 1..21: note = Description of Artificial Sequence: Synthetic oligonucleotide
  source 1..21: mol_type = other DNA
caagataccaagcggccctca

SEQ ID NO: 11352 - protein, 7 aa, synthetic construct
  REGION 1..7: note = Description of Artificial Sequence: Synthetic peptide
QDTKRPS

SEQ ID NO: 11353 - DNA, 21 bp, synthetic construct
  misc_feature 1..21: note = Description of Artificial Sequence: Synthetic oligonucleotide
  source 1..21: mol_type = other DNA
caagataccaagcggccctca

SEQ ID NO: 11354 - protein, 7 aa, synthetic construct
  REGION 1..7: note = Description of Artificial Sequence: Synthetic peptide
QDTKRPS

SEQ ID NO: 11355 - DNA, 21 bp, synthetic construct
  misc_feature 1..21: note = Description of Artificial Sequence: Synthetic oligonucleotide
  source 1..21: mol_type = other DNA
caagataacaagcggccctca

SEQ ID NO: 11356 - protein, 7 aa, synthetic construct
  REGION 1..7: note = Description of Artificial Sequence: Synthetic peptide
QDNKRPS

SEQ ID NO: 11357 - DNA, 21 bp, synthetic construct
  misc_feature 1..21: note = Description of Artificial Sequence: Synthetic oligonucleotide
  source 1..21: mol_type = other DNA
caagataggaagcggccctca

SEQ ID NO: 11358 - protein, 7 aa, synthetic construct
  REGION 1..7: note = Description of Artificial Sequence: Synthetic peptide
QDRKRPS

SEQ ID NO: 11359 - DNA, 21 bp, synthetic construct
  misc_feature 1..21: note = Description of Artificial Sequence: Synthetic oligonucleotide
  source 1..21: mol_type = other DNA
caagataggaagcggccctca

SEQ ID NO: 11360 - protein, 7 aa, synthetic construct
  REGION 1..7: note = Description of Artificial Sequence: Synthetic peptide
QDRKRPS

SEQ ID NO: 11361 - DNA, 21 bp, synthetic construct
  misc_feature 1..21: note = Description of Artificial Sequence: Synthetic oligonucleotide
  source 1..21: mol_type = other DNA
caagatagcaagcggccctca

SEQ ID NO: 11362 - protein, 7 aa, synthetic construct
  REGION 1..7: note = Description of Artificial Sequence: Synthetic peptide
QDSKRPS

SEQ ID NO: 11363 - DNA, 21 bp, synthetic construct
  misc_feature 1..21: note = Description of Artificial Sequence: Synthetic oligonucleotide
  source 1..21: mol_type = other DNA
aaagatagtaagcggccctca

SEQ ID NO: 11364 - protein, 7 aa, synthetic construct
  REGION 1..7: note = Description of Artificial Sequence: Synthetic peptide
KDSKRPS

SEQ ID NO: 11365 - DNA, 21 bp, synthetic construct
  misc_feature 1..21: note = Description of Artificial Sequence: Synthetic oligonucleotide
  source 1..21: mol_type = other DNA
caagatagcaagcggccctca

SEQ ID NO: 11366 - protein, 7 aa, synthetic construct
  REGION 1..7: note = Description of Artificial Sequence: Synthetic peptide
QDSKRPS

SEQ ID NO: 11367 - DNA, 21 bp, synthetic construct
  misc_feature 1..21: note = Description of Artificial Sequence: Synthetic oligonucleotide
  source 1..21: mol_type = other DNA
caagataagaagcggccctca

SEQ ID NO: 11368 - protein, 7 aa, synthetic construct
  REGION 1..7: note = Description of Artificial Sequence: Synthetic peptide
QDKKRPS

SEQ ID NO: 11369 - DNA, 21 bp, synthetic construct
  misc_feature 1..21: note = Description of Artificial Sequence: Synthetic oligonucleotide
  source 1..21: mol_type = other DNA
agtaatgatcaccggccctca

SEQ ID NO: 11370 - protein, 7 aa, synthetic construct
  REGION 1..7: note = Description of Artificial Sequence: Synthetic peptide
SNDHRPS

SEQ ID NO: 11371 - DNA, 21 bp, synthetic construct
  misc_feature 1..21: note = Description of Artificial Sequence: Synthetic oligonucleotide
  source 1..21: mol_type = other DNA
ggtaacagcaatcggccctca

SEQ ID NO: 11372 - protein, 7 aa, synthetic construct
  REGION 1..7: note = Description of Artificial Sequence: Synthetic peptide
GNSNRPS

SEQ ID NO: 11373 - DNA, 21 bp, synthetic construct
  misc_feature 1..21: note = Description of Artificial Sequence: Synthetic oligonucleotide
  source 1..21: mol_type = other DNA
caagatagtaagcggccctca

SEQ ID NO: 11374 - protein, 7 aa, synthetic construct
  REGION 1..7: note = Description of Artificial Sequence: Synthetic peptide
QDSKRPS

SEQ ID NO: 11375 - DNA, 21 bp, synthetic construct
  misc_feature 1..21: note = Description of Artificial Sequence: Synthetic oligonucleotide
  source 1..21: mol_type = other DNA
caagatagaaagcggccctca

SEQ ID NO: 11376 - protein, 7 aa, synthetic construct
  REGION 1..7: note = Description of Artificial Sequence: Synthetic peptide
QDRKRPS

SEQ ID NO: 11377 - DNA, 21 bp, synthetic construct
  misc_feature 1..21: note = Description of Artificial Sequence: Synthetic oligonucleotide
  source 1..21: mol_type = other DNA
caagatagcaagcggccctca

SEQ ID NO: 11378 - protein, 7 aa, synthetic construct
  REGION 1..7: note = Description of Artificial Sequence: Synthetic peptide
QDSKRPS

SEQ ID NO: 11379 - DNA, 21 bp, synthetic construct
  misc_feature 1..21: note = Description of Artificial Sequence: Synthetic oligonucleotide
  source 1..21: mol_type = other DNA
caagataggaagcggccctca

SEQ ID NO: 11380 - protein, 7 aa, synthetic construct
  REGION 1..7: note = Description of Artificial Sequence: Synthetic peptide
QDRKRPS

SEQ ID NO: 11381 - DNA, 21 bp, synthetic construct
  misc_feature 1..21: note = Description of Artificial Sequence: Synthetic oligonucleotide
  source 1..21: mol_type = other DNA
agtagtaatcagcggccctca

SEQ ID NO: 11382 - protein, 7 aa, synthetic construct
  REGION 1..7: note = Description of Artificial Sequence: Synthetic peptide
SSNQRPS

SEQ ID NO: 11383 - DNA, 21 bp, synthetic construct
  misc_feature 1..21: note = Description of Artificial Sequence: Synthetic oligonucleotide
  source 1..21: mol_type = other DNA
caagatagtaagcggccctca

SEQ ID NO: 11384 - protein, 7 aa, synthetic construct
  REGION 1..7: note = Description of Artificial Sequence: Synthetic peptide
QDSKRPS

SEQ ID NO: 11385 - DNA, 21 bp, synthetic construct
  misc_feature 1..21: note = Description of Artificial Sequence: Synthetic oligonucleotide
  source 1..21: mol_type = other DNA
caagatcgcaagcggccctca

SEQ ID NO: 11386 - protein, 7 aa, synthetic construct
  REGION 1..7: note = Description of Artificial Sequence: Synthetic peptide
QDRKRPS

SEQ ID NO: 11387 - DNA, 21 bp, synthetic construct
  misc_feature 1..21: note = Description of Artificial Sequence: Synthetic oligonucleotide
  source 1..21: mol_type = other DNA
caagataggaagcggccctca

SEQ ID NO: 11388 - protein, 7 aa, synthetic construct
  REGION 1..7: note = Description of Artificial Sequence: Synthetic peptide
QDRKRPS

SEQ ID NO: 11389 - DNA, 21 bp, synthetic construct
  misc_feature 1..21: note = Description of Artificial Sequence: Synthetic oligonucleotide
  source 1..21: mol_type = other DNA
caagatagcaagcggccctca

SEQ ID NO: 11390 - protein, 7 aa, synthetic construct
  REGION 1..7: note = Description of Artificial Sequence: Synthetic peptide
QDSKRPS

SEQ ID NO: 11391 - DNA, 21 bp, synthetic construct
  misc_feature 1..21: note = Description of Artificial Sequence: Synthetic oligonucleotide
  source 1..21: mol_type = other DNA
caagataacaagcggccctca

SEQ ID NO: 11392 - protein, 7 aa, synthetic construct
  REGION 1..7: note = Description of Artificial Sequence: Synthetic peptide
QDNKRPS

SEQ ID NO: 11393 - DNA, 21 bp, synthetic construct
  misc_feature 1..21: note = Description of Artificial Sequence: Synthetic oligonucleotide
  source 1..21: mol_type = other DNA
caagatagcaagcggccctca

SEQ ID NO: 11394 - protein, 7 aa, synthetic construct
  REGION 1..7: note = Description of Artificial Sequence: Synthetic peptide
QDSKRPS

SEQ ID NO: 11395 - DNA, 21 bp, synthetic construct
  misc_feature 1..21: note = Description of Artificial Sequence: Synthetic oligonucleotide
  source 1..21: mol_type = other DNA
caagataccaagcggccctca

SEQ ID NO: 11396 - protein, 7 aa, synthetic construct
  REGION 1..7: note = Description of Artificial Sequence: Synthetic peptide
QDTKRPS

SEQ ID NO: 11397 - DNA, 21 bp, synthetic construct
  misc_feature 1..21: note = Description of Artificial Sequence: Synthetic oligonucleotide
  source 1..21: mol_type = other DNA
caagatagcaagcggccctca

SEQ ID NO: 11398 - protein, 7 aa, synthetic construct
  REGION 1..7: note = Description of Artificial Sequence: Synthetic peptide
QDSKRPS

SEQ ID NO: 11399 - DNA, 21 bp, synthetic construct
  misc_feature 1..21: note = Description of Artificial Sequence: Synthetic oligonucleotide
  source 1..21: mol_type = other DNA
caagatagcaagcggccctca

SEQ ID NO: 11400 - protein, 7 aa, synthetic construct
  REGION 1..7: note = Description of Artificial Sequence: Synthetic peptide
QDSKRPS

SEQ ID NO: 11401 - DNA, 21 bp, synthetic construct
  misc_feature 1..21: note = Description of Artificial Sequence: Synthetic oligonucleotide
  source 1..21: mol_type = other DNA
aaagatatcaagcggccctca

SEQ ID NO: 11402 - protein, 7 aa, synthetic construct
  REGION 1..7: note = Description of Artificial Sequence: Synthetic peptide
KDIKRPS

SEQ ID NO: 11403 - DNA, 21 bp, synthetic construct
  misc_feature 1..21: note = Description of Artificial Sequence: Synthetic oligonucleotide
  source 1..21: mol_type = other DNA
caggattacaagcggccctca

SEQ ID NO: 11404 - protein, 7 aa, synthetic construct
  REGION 1..7: note = Description of Artificial Sequence: Synthetic peptide
QDYKRPS

SEQ ID NO: 11405 - DNA, 21 bp, synthetic construct
  misc_feature 1..21: note = Description of Artificial Sequence: Synthetic oligonucleotide
  source 1..21: mol_type = other DNA
caagataggaagcggccctca

SEQ ID NO: 11406 - protein, 7 aa, synthetic construct
  REGION 1..7: note = Description of Artificial Sequence: Synthetic peptide
QDRKRPS

SEQ ID NO: 11407 - DNA, 21 bp, synthetic construct
  misc_feature 1..21: note = Description of Artificial Sequence: Synthetic oligonucleotide
  source 1..21: mol_type = other DNA
caagatagtaagcggccctca

SEQ ID NO: 11408 - protein, 7 aa, synthetic construct
  REGION 1..7: note = Description of Artificial Sequence: Synthetic peptide
QDSKRPS

SEQ ID NO: 11409 - DNA, 21 bp, synthetic construct
  misc_feature 1..21: note = Description of Artificial Sequence: Synthetic oligonucleotide
  source 1..21: mol_type = other DNA
gaggataaaaaaagaccctct

SEQ ID NO: 11410 - protein, 7 aa, synthetic construct
  REGION 1..7: note = Description of Artificial Sequence: Synthetic peptide
EDKKRPS

SEQ ID NO: 11411 - DNA, 21 bp, synthetic construct
  misc_feature 1..21: note = Description of Artificial Sequence: Synthetic oligonucleotide
  source 1..21: mol_type = other DNA
caagatagtaagcggccctca

SEQ ID NO: 11412 - protein, 7 aa, synthetic construct
  REGION 1..7: note = Description of Artificial Sequence: Synthetic peptide
QDSKRPS

SEQ ID NO: 11413 - DNA, 21 bp, synthetic construct
  misc_feature 1..21: note = Description of Artificial Sequence: Synthetic oligonucleotide
  source 1..21: mol_type = other DNA
caagattacaagcggccctca

SEQ ID NO: 11414 - protein, 7 aa, synthetic construct
  REGION 1..7: note = Description of Artificial Sequence: Synthetic peptide
QDYKRPS

SEQ ID NO: 11415 - DNA, 21 bp, synthetic construct
  misc_feature 1..21: note = Description of Artificial Sequence: Synthetic oligonucleotide
  source 1..21: mol_type = other DNA
caagataggaagcggccctca

SEQ ID NO: 11416 - protein, 7 aa, synthetic construct
  REGION 1..7: note = Description of Artificial Sequence: Synthetic peptide
QDRKRPS

SEQ ID NO: 11417 - DNA, 21 bp, synthetic construct
  misc_feature 1..21: note = Description of Artificial Sequence: Synthetic oligonucleotide
  source 1..21: mol_type = other DNA
gctaaaaacaaccggccctca

SEQ ID NO: 11418 - protein, 7 aa, synthetic construct
  REGION 1..7: note = Description of Artificial Sequence: Synthetic peptide
AKNNRPS

SEQ ID NO: 11419 - DNA, 21 bp, synthetic construct
  misc_feature 1..21: note = Description of Artificial Sequence: Synthetic oligonucleotide
  source 1..21: mol_type = other DNA
caagatcgcaagcggccctca

SEQ ID NO: 11420 - protein, 7 aa, synthetic construct
  REGION 1..7: note = Description of Artificial Sequence: Synthetic peptide
QDRKRPS

SEQ ID NO: 11421 - DNA, 21 bp, synthetic construct
  misc_feature 1..21: note = Description of Artificial Sequence: Synthetic oligonucleotide
  source 1..21: mol_type = other DNA
actaaaaacagccggccctca

SEQ ID NO: 11422 - protein, 7 aa, synthetic construct
  REGION 1..7: note = Description of Artificial Sequence: Synthetic peptide
TKNSRPS

SEQ ID NO: 11423 - DNA, 21 bp, synthetic construct
  misc_feature 1..21: note = Description of Artificial Sequence: Synthetic oligonucleotide
  source 1..21: mol_type = other DNA
actaaaaacagccggccctca

SEQ ID NO: 11424 - protein, 7 aa, synthetic construct
  REGION 1..7: note = Description of Artificial Sequence: Synthetic peptide
TKNSRPS

SEQ ID NO: 11425 - DNA, 21 bp, synthetic construct
  misc_feature 1..21: note = Description of Artificial Sequence: Synthetic oligonucleotide
  source 1..21: mol_type = other DNA
caagatagcaggcggccctca

SEQ ID NO: 11426 - protein, 7 aa, synthetic construct
  REGION 1..7: note = Description of Artificial Sequence: Synthetic peptide
QDSRRPS

SEQ ID NO: 11427 - DNA, 21 bp, synthetic construct
  misc_feature 1..21: note = Description of Artificial Sequence: Synthetic oligonucleotide
  source 1..21: mol_type = other DNA
gaggtcagtaagcggccctca

SEQ ID NO: 11428 - protein, 7 aa, synthetic construct
  REGION 1..7: note = Description of Artificial Sequence: Synthetic peptide
EVSKRPS

SEQ ID NO: 11429 - DNA, 21 bp, synthetic construct
  misc_feature 1..21: note = Description of Artificial Sequence: Synthetic oligonucleotide
  source 1..21: mol_type = other DNA
caagattacaagcggccctca

SEQ ID NO: 11430 - protein, 7 aa, synthetic construct
  REGION 1..7: note = Description of Artificial Sequence: Synthetic peptide
QDYKRPS

SEQ ID NO: 11431 - DNA, 21 bp, synthetic construct
  misc_feature 1..21: note = Description of Artificial Sequence: Synthetic oligonucleotide
  source 1..21: mol_type = other DNA
gaagtcagtaagcggccctca

SEQ ID NO: 11432 - protein, 7 aa, synthetic construct
  REGION 1..7: note = Description of Artificial Sequence: Synthetic peptide
EVSKRPS

SEQ ID NO: 11433 - DNA, 21 bp, synthetic construct
  misc_feature 1..21: note = Description of Artificial Sequence: Synthetic oligonucleotide
  source 1..21: mol_type = other DNA
ggtaaaaacaaccggccctca

SEQ ID NO: 11434 - protein, 7 aa, synthetic construct
  REGION 1..7: note = Description of Artificial Sequence: Synthetic peptide
GKNNRPS

SEQ ID NO: 11435 - DNA, 21 bp, synthetic construct
  misc_feature 1..21: note = Description of Artificial Sequence: Synthetic oligonucleotide
  source 1..21: mol_type = other DNA
caggatagtaagcggccctca

SEQ ID NO: 11436 - protein, 7 aa, synthetic construct
  REGION 1..7: note = Description of Artificial Sequence: Synthetic peptide
QDSKRPS

SEQ ID NO: 11437 - DNA, 21 bp, synthetic construct
  misc_feature 1..21: note = Description of Artificial Sequence: Synthetic oligonucleotide
  source 1..21: mol_type = other DNA
ggtcacagcaaccggccctca

SEQ ID NO: 11438 - protein, 7 aa, synthetic construct
  REGION 1..7: note = Description of Artificial Sequence: Synthetic peptide
GHSNRPS

SEQ ID NO: 11439 - DNA, 21 bp, synthetic construct
  misc_feature 1..21: note = Description of Artificial Sequence: Synthetic oligonucleotide
  source 1..21: mol_type = other DNA
gaagataggaagcggccctca

SEQ ID NO: 11440 - protein, 7 aa, synthetic construct
  REGION 1..7: note = Description of Artificial Sequence: Synthetic peptide
EDRKRPS

SEQ ID NO: 11441 - DNA, 21 bp, synthetic construct
  misc_feature 1..21: note = Description of Artificial Sequence: Synthetic oligonucleotide
  source 1..21: mol_type = other DNA
caagatagaaagcggccctca

SEQ ID NO: 11442 - protein, 7 aa, synthetic construct
  REGION 1..7: note = Description of Artificial Sequence: Synthetic peptide
QDRKRPS

SEQ ID NO: 11443 - DNA, 21 bp, synthetic construct
  misc_feature 1..21: note = Description of Artificial Sequence: Synthetic oligonucleotide
  source 1..21: mol_type = other DNA
caagatagcaagcggccctca

SEQ ID NO: 11444 - protein, 7 aa, synthetic construct
  REGION 1..7: note = Description of Artificial Sequence: Synthetic peptide
QDSKRPS

SEQ ID NO: 11445 - DNA, 21 bp, synthetic construct
  misc_feature 1..21: note = Description of Artificial Sequence: Synthetic oligonucleotide
  source 1..21: mol_type = other DNA
gaagataggaagcggccctca

SEQ ID NO: 11446 - protein, 7 aa, synthetic construct
  REGION 1..7: note = Description of Artificial Sequence: Synthetic peptide
EDRKRPS

SEQ ID NO: 11447 - DNA, 21 bp, synthetic construct
  misc_feature 1..21: note = Description of Artificial Sequence: Synthetic oligonucleotide
  source 1..21: mol_type = other DNA
agtaatgatcagcggccctca

SEQ ID NO: 11448 - protein, 7 aa, synthetic construct
  REGION 1..7: note = Description of Artificial Sequence: Synthetic peptide
SNDQRPS

SEQ ID NO: 11449 - DNA, 21 bp, synthetic construct
  misc_feature 1..21: note = Description of Artificial Sequence: Synthetic oligonucleotide
  source 1..21: mol_type = other DNA
ggtaacagcaatcggccctca

SEQ ID NO: 11450 - protein, 7 aa, synthetic construct
  REGION 1..7: note = Description of Artificial Sequence: Synthetic peptide
GNSNRPS

SEQ ID NO: 11451 - DNA, 21 bp, synthetic construct
  misc_feature 1..21: note = Description of Artificial Sequence: Synthetic oligonucleotide
  source 1..21: mol_type = other DNA
agtaatgatcagcggccctca

SEQ ID NO: 11452 - protein, 7 aa, synthetic construct
  REGION 1..7: note = Description of Artificial Sequence: Synthetic peptide
SNDQRPS

SEQ ID NO: 11453 - DNA, 21 bp, synthetic construct
  misc_feature 1..21: note = Description of Artificial Sequence: Synthetic oligonucleotide
  source 1..21: mol_type = other DNA
caagatagaaagcggccctca

SEQ ID NO: 11454 - protein, 7 aa, synthetic construct
  REGION 1..7: note = Description of Artificial Sequence: Synthetic peptide
QDRKRPS

SEQ ID NO: 11455 - DNA, 21 bp, synthetic construct
  misc_feature 1..21: note = Description of Artificial Sequence: Synthetic oligonucleotide
  source 1..21: mol_type = other DNA
gaggtcagtaatcggccctca

SEQ ID NO: 11456 - protein, 7 aa, synthetic construct
  REGION 1..7: note = Description of Artificial Sequence: Synthetic peptide
EVSNRPS

SEQ ID NO: 11457 - DNA, 21 bp, synthetic construct
  misc_feature 1..21: note = Description of Artificial Sequence: Synthetic oligonucleotide
  source 1..21: mol_type = other DNA
caagatacaatgcggccctca

SEQ ID NO: 11458 - protein, 7 aa, synthetic construct
  REGION 1..7: note = Description of Artificial Sequence: Synthetic peptide
QDTMRPS

SEQ ID NO: 11459 - DNA, 21 bp, synthetic construct
  misc_feature 1..21: note = Description of Artificial Sequence: Synthetic oligonucleotide
  source 1..21: mol_type = other DNA
gttaatgatcagcggccctca

SEQ ID NO: 11460 - protein, 7 aa, synthetic construct
  REGION 1..7: note = Description of Artificial Sequence: Synthetic peptide
VNDQRPS

SEQ ID NO: 11461 - DNA, 21 bp, synthetic construct
  misc_feature 1..21: note = Description of Artificial Sequence: Synthetic oligonucleotide
  source 1..21: mol_type = other DNA
agtaatgatcagcggccctca

SEQ ID NO: 11462 - protein, 7 aa, synthetic construct
  REGION 1..7: note = Description of Artificial Sequence: Synthetic peptide
SNDQRPS

SEQ ID NO: 11463 - DNA, 21 bp, synthetic construct
  misc_feature 1..21: note = Description of Artificial Sequence: Synthetic oligonucleotide
  source 1..21: mol_type = other DNA
agtaataatcagcggccctca

SEQ ID NO: 11464 - protein, 7 aa, synthetic construct
  REGION 1..7: note = Description of Artificial Sequence: Synthetic peptide
SNNQRPS

SEQ ID NO: 11465 - DNA, 21 bp, synthetic construct
  misc_feature 1..21: note = Description of Artificial Sequence: Synthetic oligonucleotide
  source 1..21: mol_type = other DNA
caagataggaagcggccctca

SEQ ID NO: 11466 - protein, 7 aa, synthetic construct
  REGION 1..7: note = Description of Artificial Sequence: Synthetic peptide
QDRKRPS

SEQ ID NO: 11467 - DNA, 21 bp, synthetic construct
  misc_feature 1..21: note = Description of Artificial Sequence: Synthetic oligonucleotide
  source 1..21: mol_type = other DNA
caagatagcaagcggccctca

SEQ ID NO: 11468 - protein, 7 aa, synthetic construct
  REGION 1..7: note = Description of Artificial Sequence: Synthetic peptide
QDSKRPS

SEQ ID NO: 11469 - DNA, 21 bp, synthetic construct
  misc_feature 1..21: note = Description of Artificial Sequence: Synthetic oligonucleotide
  source 1..21: mol_type = other DNA
caagataggaagcggccctca

SEQ ID NO: 11470 - protein, 7 aa, synthetic construct
  REGION 1..7: note = Description of Artificial Sequence: Synthetic peptide
QDRKRPS

SEQ ID NO: 11471 - DNA, 21 bp, synthetic construct
  misc_feature 1..21: note = Description of Artificial Sequence: Synthetic oligonucleotide
  source 1..21: mol_type = other DNA
caagataggaagcggccctca

SEQ ID NO: 11472 - protein, 7 aa, synthetic construct
  REGION 1..7: note = Description of Artificial Sequence: Synthetic peptide
QDRKRPS

SEQ ID NO: 11473 - DNA, 21 bp, synthetic construct
  misc_feature 1..21: note = Description of Artificial Sequence: Synthetic oligonucleotide
  source 1..21: mol_type = other DNA
gacaataataagcgaccctca

SEQ ID NO: 11474 - protein, 7 aa, synthetic construct
  REGION 1..7: note = Description of Artificial Sequence: Synthetic peptide
DNNKRPS

SEQ ID NO: 11475 - DNA, 21 bp, synthetic construct
  misc_feature 1..21: note = Description of Artificial Sequence: Synthetic oligonucleotide
  source 1..21: mol_type = other DNA
caagataacaagcggccctca

SEQ ID NO: 11476 - protein, 7 aa, synthetic construct
  REGION 1..7: note = Description of Artificial Sequence: Synthetic peptide
QDNKRPS

SEQ ID NO: 11477 - DNA, 21 bp, synthetic construct
  misc_feature 1..21: note = Description of Artificial Sequence: Synthetic oligonucleotide
  source 1..21: mol_type = other DNA
caagataggaagcggccctca

SEQ ID NO: 11478 - protein, 7 aa, synthetic construct
  REGION 1..7: note = Description of Artificial Sequence: Synthetic peptide
QDRKRPS

SEQ ID NO: 11479 - DNA, 21 bp, synthetic construct
  misc_feature 1..21: note = Description of Artificial Sequence: Synthetic oligonucleotide
  source 1..21: mol_type = other DNA
caagatagcaagcggccctca

SEQ ID NO: 11480 - protein, 7 aa, synthetic construct
  REGION 1..7: note = Description of Artificial Sequence: Synthetic peptide
QDSKRPS

SEQ ID NO: 11481 - DNA, 21 bp, synthetic construct
  misc_feature 1..21: note = Description of Artificial Sequence: Synthetic oligonucleotide
  source 1..21: mol_type = other DNA
caagataacaagcggccctca

SEQ ID NO: 11482 - protein, 7 aa, synthetic construct
  REGION 1..7: note = Description of Artificial Sequence: Synthetic peptide
QDNKRPS

SEQ ID NO: 11483 - DNA, 21 bp, synthetic construct
  misc_feature 1..21: note = Description of Artificial Sequence: Synthetic oligonucleotide
  source 1..21: mol_type = other DNA
caagataacaagcggccctca

SEQ ID NO: 11484 - protein, 7 aa, synthetic construct
  REGION 1..7: note = Description of Artificial Sequence: Synthetic peptide
QDNKRPS

SEQ ID NO: 11485 - DNA, 21 bp, synthetic construct
  misc_feature 1..21: note = Description of Artificial Sequence: Synthetic oligonucleotide
  source 1..21: mol_type = other DNA
caagatagcaagcggccctca

SEQ ID NO: 11486 - protein, 7 aa, synthetic construct
  REGION 1..7: note = Description of Artificial Sequence: Synthetic peptide
QDSKRPS

SEQ ID NO: 11487 - DNA, 21 bp, synthetic construct
  misc_feature 1..21: note = Description of Artificial Sequence: Synthetic oligonucleotide
  source 1..21: mol_type = other DNA
caagataggaagcggccctca

SEQ ID NO: 11488 - protein, 7 aa, synthetic construct
  REGION 1..7: note = Description of Artificial Sequence: Synthetic peptide
QDRKRPS

SEQ ID NO: 11489 - DNA, 21 bp, synthetic construct
  misc_feature 1..21: note = Description of Artificial Sequence: Synthetic oligonucleotide
  source 1..21: mol_type = other DNA
caagataacaagcggccctca

SEQ ID NO: 11490 - protein, 7 aa, synthetic construct
  REGION 1..7: note = Description of Artificial Sequence: Synthetic peptide
QDNKRPS

SEQ ID NO: 11491 - DNA, 21 bp, synthetic construct
  misc_feature 1..21: note = Description of Artificial Sequence: Synthetic oligonucleotide
  source 1..21: mol_type = other DNA
caagataggaagcggccctca

SEQ ID NO: 11492 - protein, 7 aa, synthetic construct
  REGION 1..7: note = Description of Artificial Sequence: Synthetic peptide
QDRKRPS

SEQ ID NO: 11493 - DNA, 21 bp, synthetic construct
  misc_feature 1..21: note = Description of Artificial Sequence: Synthetic oligonucleotide
  source 1..21: mol_type = other DNA
caagatagcaagcggccctca

SEQ ID NO: 11494 - protein, 7 aa, synthetic construct
  REGION 1..7: note = Description of Artificial Sequence: Synthetic peptide
QDSKRPS

SEQ ID NO: 11495 - DNA, 21 bp, synthetic construct
  misc_feature 1..21: note = Description of Artificial Sequence: Synthetic oligonucleotide
  source 1..21: mol_type = other DNA
caagataggaagcggccctca

SEQ ID NO: 11496 - protein, 7 aa, synthetic construct
  REGION 1..7: note = Description of Artificial Sequence: Synthetic peptide
QDRKRPS

SEQ ID NO: 11497 - DNA, 21 bp, synthetic construct
  misc_feature 1..21: note = Description of Artificial Sequence: Synthetic oligonucleotide
  source 1..21: mol_type = other DNA
caggataggaagcggccctca

SEQ ID NO: 11498 - protein, 7 aa, synthetic construct
  REGION 1..7: note = Description of Artificial Sequence: Synthetic peptide
QDRKRPS

SEQ ID NO: 11499 - DNA, 21 bp, synthetic construct
  misc_feature 1..21: note = Description of Artificial Sequence: Synthetic oligonucleotide
  source 1..21: mol_type = other DNA
caagataggaagcggccctca

SEQ ID NO: 11500 - protein, 7 aa, synthetic construct
  REGION 1..7: note = Description of Artificial Sequence: Synthetic peptide
QDRKRPS

SEQ ID NO: 11501 - DNA, 21 bp, synthetic construct
  misc_feature 1..21: note = Description of Artificial Sequence: Synthetic oligonucleotide
  source 1..21: mol_type = other DNA
caagataggaagcggccctca

SEQ ID NO: 11502 - protein, 7 aa, synthetic construct
  REGION 1..7: note = Description of Artificial Sequence: Synthetic peptide
QDRKRPS

SEQ ID NO: 11503 - DNA, 21 bp, synthetic construct
  misc_feature 1..21: note = Description of Artificial Sequence: Synthetic oligonucleotide
  source 1..21: mol_type = other DNA
caagataggaagcggccctca

SEQ ID NO: 11504 - protein, 7 aa, synthetic construct
  REGION 1..7: note = Description of Artificial Sequence: Synthetic peptide
QDRKRPS

SEQ ID NO: 11505 - DNA, 21 bp, synthetic construct
  misc_feature 1..21: note = Description of Artificial Sequence: Synthetic oligonucleotide
  source 1..21: mol_type = other DNA
gaggatagccgaagaccctct

SEQ ID NO: 11506 - protein, 7 aa, synthetic construct
  REGION 1..7: note = Description of Artificial Sequence: Synthetic peptide
EDSRRPS

SEQ ID NO: 11507 - DNA, 21 bp, synthetic construct
  misc_feature 1..21: note = Description of Artificial Sequence: Synthetic oligonucleotide
  source 1..21: mol_type = other DNA
gaggataaaagaagaccctca

SEQ ID NO: 11508 - protein, 7 aa, synthetic construct
  REGION 1..7: note = Description of Artificial Sequence: Synthetic peptide
EDKRRPS

SEQ ID NO: 11509 - DNA, 21 bp, synthetic construct
  misc_feature 1..21: note = Description of Artificial Sequence: Synthetic oligonucleotide
  source 1..21: mol_type = other DNA
caagatagaaagcggccctca

SEQ ID NO: 11510 - protein, 7 aa, synthetic construct
  REGION 1..7: note = Description of Artificial Sequence: Synthetic peptide
QDRKRPS

SEQ ID NO: 11511 - DNA, 21 bp, synthetic construct
  misc_feature 1..21: note = Description of Artificial Sequence: Synthetic oligonucleotide
  source 1..21: mol_type = other DNA
caagataggaagcggccctca

SEQ ID NO: 11512 - protein, 7 aa, synthetic construct
  REGION 1..7: note = Description of Artificial Sequence: Synthetic peptide
QDRKRPS

SEQ ID NO: 11513 - DNA, 21 bp, synthetic construct
  misc_feature 1..21: note = Description of Artificial Sequence: Synthetic oligonucleotide
  source 1..21: mol_type = other DNA
gaagataggaagcggccctca

SEQ ID NO: 11514 - protein, 7 aa, synthetic construct
  REGION 1..7: note = Description of Artificial Sequence: Synthetic peptide
EDRKRPS

SEQ ID NO: 11515 - DNA, 21 bp, synthetic construct
  misc_feature 1..21: note = Description of Artificial Sequence: Synthetic oligonucleotide
  source 1..21: mol_type = other DNA
caagatagcaagcggccctca

SEQ ID NO: 11516 - protein, 7 aa, synthetic construct
  REGION 1..7: note = Description of Artificial Sequence: Synthetic peptide
QDSKRPS

SEQ ID NO: 11517 - DNA, 21 bp, synthetic construct
  misc_feature 1..21: note = Description of Artificial Sequence: Synthetic oligonucleotide
  source 1..21: mol_type = other DNA
caagatagaaagcggccctca

SEQ ID NO: 11518 - protein, 7 aa, synthetic construct
  REGION 1..7: note = Description of Artificial Sequence: Synthetic peptide
QDRKRPS

SEQ ID NO: 11519 - DNA, 21 bp, synthetic construct
  misc_feature 1..21: note = Description of Artificial Sequence: Synthetic oligonucleotide
  source 1..21: mol_type = other DNA
gaagataggaagcggccctca

SEQ ID NO: 11520 - protein, 7 aa, synthetic construct
  REGION 1..7: note = Description of Artificial Sequence: Synthetic peptide
EDRKRPS

SEQ ID NO: 11521 - DNA, 21 bp, synthetic construct
  misc_feature 1..21: note = Description of Artificial Sequence: Synthetic oligonucleotide
  source 1..21: mol_type = other DNA
caagataggaagcggccctca

SEQ ID NO: 11522 - protein, 7 aa, synthetic construct
  REGION 1..7: note = Description of Artificial Sequence: Synthetic peptide
QDRKRPS

SEQ ID NO: 11523 - DNA, 21 bp, synthetic construct
  misc_feature 1..21: note = Description of Artificial Sequence: Synthetic oligonucleotide
  source 1..21: mol_type = other DNA
gaagataggaagcggccctca

SEQ ID NO: 11524 - protein, 7 aa, synthetic construct
  REGION 1..7: note = Description of Artificial Sequence: Synthetic peptide
EDRKRPS

SEQ ID NO: 11525 - DNA, 21 bp, synthetic construct
  misc_feature 1..21: note = Description of Artificial Sequence: Synthetic oligonucleotide
  source 1..21: mol_type = other DNA
caagataggaagcggccctca

SEQ ID NO: 11526 - protein, 7 aa, synthetic construct
  REGION 1..7: note = Description of Artificial Sequence: Synthetic peptide
QDRKRPS

SEQ ID NO: 11527 - DNA, 21 bp, synthetic construct
  misc_feature 1..21: note = Description of Artificial Sequence: Synthetic oligonucleotide
  source 1..21: mol_type = other DNA
aacacaaacactcgctcttct

SEQ ID NO: 11528 - protein, 7 aa, synthetic construct
  REGION 1..7: note = Description of Artificial Sequence: Synthetic peptide
NTNTRSS

SEQ ID NO: 11529 - DNA, 21 bp, synthetic construct
  misc_feature 1..21: note = Description of Artificial Sequence: Synthetic oligonucleotide
  source 1..21: mol_type = other DNA
caagatatgaagcggccctca

SEQ ID NO: 11530 - protein, 7 aa, synthetic construct
  REGION 1..7: note = Description of Artificial Sequence: Synthetic peptide
QDMKRPS

SEQ ID NO: 11531 - DNA, 21 bp, synthetic construct
  misc_feature 1..21: note = Description of Artificial Sequence: Synthetic oligonucleotide
  source 1..21: mol_type = other DNA
caagatagcaagcggccctca

SEQ ID NO: 11532 - protein, 7 aa, synthetic construct
  REGION 1..7: note = Description of Artificial Sequence: Synthetic peptide
QDSKRPS

SEQ ID NO: 11533 - DNA, 21 bp, synthetic construct
  misc_feature 1..21: note = Description of Artificial Sequence: Synthetic oligonucleotide
  source 1..21: mol_type = other DNA
caagataacaggcggccctca

SEQ ID NO: 11534 - protein, 7 aa, synthetic construct
  REGION 1..7: note = Description of Artificial Sequence: Synthetic peptide
QDNRRPS

SEQ ID NO: 11535 - DNA, 21 bp, synthetic construct
  misc_feature 1..21: note = Description of Artificial Sequence: Synthetic oligonucleotide
  source 1..21: mol_type = other DNA
caagataggaagcggccctca

SEQ ID NO: 11536 - protein, 7 aa, synthetic construct
  REGION 1..7: note = Description of Artificial Sequence: Synthetic peptide
QDRKRPS

SEQ ID NO: 11537 - DNA, 21 bp, synthetic construct
  misc_feature 1..21: note = Description of Artificial Sequence: Synthetic oligonucleotide
  source 1..21: mol_type = other DNA
agtacaagcaacaaacactcc

SEQ ID NO: 11538 - protein, 7 aa, synthetic construct
  REGION 1..7: note = Description of Artificial Sequence: Synthetic peptide
STSNKHS

SEQ ID NO: 11539 - DNA, 21 bp, synthetic construct
  misc_feature 1..21: note = Description of Artificial Sequence: Synthetic oligonucleotide
  source 1..21: mol_type = other DNA
caagataacaggcggccgtca

SEQ ID NO: 11540 - protein, 7 aa, synthetic construct
  REGION 1..7: note = Description of Artificial Sequence: Synthetic peptide
QDNRRPS

SEQ ID NO: 11541 - DNA, 21 bp, synthetic construct
  misc_feature 1..21: note = Description of Artificial Sequence: Synthetic oligonucleotide
  source 1..21: mol_type = other DNA
caagatagcaagcggccctca

SEQ ID NO: 11542 - protein, 7 aa, synthetic construct
  REGION 1..7: note = Description of Artificial Sequence: Synthetic peptide
QDSKRPS

SEQ ID NO: 11543 - DNA, 21 bp, synthetic construct
  misc_feature 1..21: note = Description of Artificial Sequence: Synthetic oligonucleotide
  source 1..21: mol_type = other DNA
agtacagacaacaaacactcc

SEQ ID NO: 11544 - protein, 7 aa, synthetic construct
  REGION 1..7: note = Description of Artificial Sequence: Synthetic peptide
STDNKHS

SEQ ID NO: 11545 - DNA, 21 bp, synthetic construct
  misc_feature 1..21: note = Description of Artificial Sequence: Synthetic oligonucleotide
  source 1..21: mol_type = other DNA
caagataacaggcggccctca

SEQ ID NO: 11546 - protein, 7 aa, synthetic construct
  REGION 1..7: note = Description of Artificial Sequence: Synthetic peptide
QDNRRPS

SEQ ID NO: 11547 - DNA, 21 bp, synthetic construct
  misc_feature 1..21: note = Description of Artificial Sequence: Synthetic oligonucleotide
  source 1..21: mol_type = other DNA
caagataacaggcggccctca

SEQ ID NO: 11548 - protein, 7 aa, synthetic construct
  REGION 1..7: note = Description of Artificial Sequence: Synthetic peptide
QDNRRPS

SEQ ID NO: 11549 - DNA, 21 bp, synthetic construct
  misc_feature 1..21: note = Description of Artificial Sequence: Synthetic oligonucleotide
  source 1..21: mol_type = other DNA
caagatagcaagcggccctca

SEQ ID NO: 11550 - protein, 7 aa, synthetic construct
  REGION 1..7: note = Description of Artificial Sequence: Synthetic peptide
QDSKRPS

SEQ ID NO: 11551 - DNA, 21 bp, synthetic construct
  misc_feature 1..21: note = Description of Artificial Sequence: Synthetic oligonucleotide
  source 1..21: mol_type = other DNA
caagataacaggcggccgtca

SEQ ID NO: 11552 - protein, 7 aa, synthetic construct
  REGION 1..7: note = Description of Artificial Sequence: Synthetic peptide
QDNRRPS

SEQ ID NO: 11553 - DNA, 21 bp, synthetic construct
  misc_feature 1..21: note = Description of Artificial Sequence: Synthetic oligonucleotide
  source 1..21: mol_type = other DNA
caagatagcaagcggccctca

SEQ ID NO: 11554 - protein, 7 aa, synthetic construct
  REGION 1..7: note = Description of Artificial Sequence: Synthetic peptide
QDSKRPS

SEQ ID NO: 11555 - DNA, 21 bp, synthetic construct
  misc_feature 1..21: note = Description of Artificial Sequence: Synthetic oligonucleotide
  source 1..21: mol_type = other DNA
caagataggaagcggccctca

SEQ ID NO: 11556 - protein, 7 aa, synthetic construct
  REGION 1..7: note = Description of Artificial Sequence: Synthetic peptide
QDRKRPS

SEQ ID NO: 11557 - DNA, 21 bp, synthetic construct
  misc_feature 1..21: note = Description of Artificial Sequence: Synthetic oligonucleotide
  source 1..21: mol_type = other DNA
caagataagaagcggccctca

SEQ ID NO: 11558 - protein, 7 aa, synthetic construct
  REGION 1..7: note = Description of Artificial Sequence: Synthetic peptide
QDKKRPS

SEQ ID NO: 11559 - DNA, 21 bp, synthetic construct
  misc_feature 1..21: note = Description of Artificial Sequence: Synthetic oligonucleotide
  source 1..21: mol_type = other DNA
caagatagaaagcggccctca

SEQ ID NO: 11560 - protein, 7 aa, synthetic construct
  REGION 1..7: note = Description of Artificial Sequence: Synthetic peptide
QDRKRPS

SEQ ID NO: 11561 - DNA, 21 bp, synthetic construct
  misc_feature 1..21: note = Description of Artificial Sequence: Synthetic oligonucleotide
  source 1..21: mol_type = other DNA
caagataagaaacggccctca

SEQ ID NO: 11562 - protein, 7 aa, synthetic construct
  REGION 1..7: note = Description of Artificial Sequence: Synthetic peptide
QDKKRPS

SEQ ID NO: 11563 - DNA, 21 bp, synthetic construct
  misc_feature 1..21: note = Description of Artificial Sequence: Synthetic oligonucleotide
  source 1..21: mol_type = other DNA
aacacaaacactcgctcttct

SEQ ID NO: 11564 - protein, 7 aa, synthetic construct
  REGION 1..7: note = Description of Artificial Sequence: Synthetic peptide
NTNTRSS

SEQ ID NO: 11565 - DNA, 21 bp, synthetic construct
  misc_feature 1..21: note = Description of Artificial Sequence: Synthetic oligonucleotide
  source 1..21: mol_type = other DNA
gaagataggaagcggccctca

SEQ ID NO: 11566 - protein, 7 aa, synthetic construct
  REGION 1..7: note = Description of Artificial Sequence: Synthetic peptide
EDRKRPS

SEQ ID NO: 11567 - DNA, 21 bp, synthetic construct
  misc_feature 1..21: note = Description of Artificial Sequence: Synthetic oligonucleotide
  source 1..21: mol_type = other DNA
gaagataggaagcggccctca

SEQ ID NO: 11568 - protein, 7 aa, synthetic construct
  REGION 1..7: note = Description of Artificial Sequence: Synthetic peptide
EDRKRPS

SEQ ID NO: 11569 - DNA, 21 bp, synthetic construct
  misc_feature 1..21: note = Description of Artificial Sequence: Synthetic oligonucleotide
  source 1..21: mol_type = other DNA
caagatcgcaagcggccctca

SEQ ID NO: 11570 - protein, 7 aa, synthetic construct
  REGION 1..7: note = Description of Artificial Sequence: Synthetic peptide
QDRKRPS

SEQ ID NO: 11571 - DNA, 21 bp, synthetic construct
  misc_feature 1..21: note = Description of Artificial Sequence: Synthetic oligonucleotide
  source 1..21: mol_type = other DNA
caagatagaaagcggccctca

SEQ ID NO: 11572 - protein, 7 aa, synthetic construct
  REGION 1..7: note = Description of Artificial Sequence: Synthetic peptide
QDRKRPS

SEQ ID NO: 11573 - DNA, 21 bp, synthetic construct
  misc_feature 1..21: note = Description of Artificial Sequence: Synthetic oligonucleotide
  source 1..21: mol_type = other DNA
agtacaagtaacaaacactcc

SEQ ID NO: 11574 - protein, 7 aa, synthetic construct
  REGION 1..7: note = Description of Artificial Sequence: Synthetic peptide
STSNKHS

SEQ ID NO: 11575 - DNA, 21 bp, synthetic construct
  misc_feature 1..21: note = Description of Artificial Sequence: Synthetic oligonucleotide
  source 1..21: mol_type = other DNA
gacaataataagcgaccctca

SEQ ID NO: 11576 - protein, 7 aa, synthetic construct
  REGION 1..7: note = Description of Artificial Sequence: Synthetic peptide
DNNKRPS

SEQ ID NO: 11577 - DNA, 21 bp, synthetic construct
  misc_feature 1..21: note = Description of Artificial Sequence: Synthetic oligonucleotide
  source 1..21: mol_type = other DNA
caagatagcaagcggccctca

SEQ ID NO: 11578 - protein, 7 aa, synthetic construct
  REGION 1..7: note = Description of Artificial Sequence: Synthetic peptide
QDSKRPS

SEQ ID NO: 11579 - DNA, 21 bp, synthetic construct
  misc_feature 1..21: note = Description of Artificial Sequence: Synthetic oligonucleotide
  source 1..21: mol_type = other DNA
ggaaaaaacaaccggccctca

SEQ ID NO: 11580 - protein, 7 aa, synthetic construct
  REGION 1..7: note = Description of Artificial Sequence: Synthetic peptide
GKNNRPS

SEQ ID NO: 11581 - DNA, 21 bp, synthetic construct
  misc_feature 1..21: note = Description of Artificial Sequence: Synthetic oligonucleotide
  source 1..21: mol_type = other DNA
gacagtaataagcgaccctca

SEQ ID NO: 11582 - protein, 7 aa, synthetic construct
  REGION 1..7: note = Description of Artificial Sequence: Synthetic peptide
DSNKRPS

SEQ ID NO: 11583 - DNA, 21 bp, synthetic construct
  misc_feature 1..21: note = Description of Artificial Sequence: Synthetic oligonucleotide
  source 1..21: mol_type = other DNA
gacaataataagcgaccctca

SEQ ID NO: 11584 - protein, 7 aa, synthetic construct
  REGION 1..7: note = Description of Artificial Sequence: Synthetic peptide
DNNKRPS

SEQ ID NO: 11585 - DNA, 21 bp, synthetic construct
  misc_feature 1..21: note = Description of Artificial Sequence: Synthetic oligonucleotide
  source 1..21: mol_type = other DNA
ggtaaaaacaaccggccctca

SEQ ID NO: 11586 - protein, 7 aa, synthetic construct
  REGION 1..7: note = Description of Artificial Sequence: Synthetic peptide
GKNNRPS

SEQ ID NO: 11587 - DNA, 21 bp, synthetic construct
  misc_feature 1..21: note = Description of Artificial Sequence: Synthetic oligonucleotide
  source 1..21: mol_type = other DNA
gacaataataagcgaccctca

SEQ ID NO: 11588 - protein, 7 aa, synthetic construct
  REGION 1..7: note = Description of Artificial Sequence: Synthetic peptide
DNNKRPS

SEQ ID NO: 11589 - DNA, 21 bp, synthetic construct
  misc_feature 1..21: note = Description of Artificial Sequence: Synthetic oligonucleotide
  source 1..21: mol_type = other DNA
gacaataataagcgaccctca

SEQ ID NO: 11590 - protein, 7 aa, synthetic construct
  REGION 1..7: note = Description of Artificial Sequence: Synthetic peptide
DNNKRPS

SEQ ID NO: 11591 - DNA, 21 bp, synthetic construct
  misc_feature 1..21: note = Description of Artificial Sequence: Synthetic oligonucleotide
  source 1..21: mol_type = other DNA
gacagtagtaagcgaccctca

SEQ ID NO: 11592 - protein, 7 aa, synthetic construct
  REGION 1..7: note = Description of Artificial Sequence: Synthetic peptide
DSSKRPS

SEQ ID NO: 11593 - DNA, 21 bp, synthetic construct
  misc_feature 1..21: note = Description of Artificial Sequence: Synthetic oligonucleotide
  source 1..21: mol_type = other DNA
caagataacaagcggccctca

SEQ ID NO: 11594 - protein, 7 aa, synthetic construct
  REGION 1..7: note = Description of Artificial Sequence: Synthetic peptide
QDNKRPS

SEQ ID NO: 11595 - DNA, 21 bp, synthetic construct
  misc_feature 1..21: note = Description of Artificial Sequence: Synthetic oligonucleotide
  source 1..21: mol_type = other DNA
ggtaaaaacaaccggccctca

SEQ ID NO: 11596 - protein, 7 aa, synthetic construct
  REGION 1..7: note = Description of Artificial Sequence: Synthetic peptide
GKNNRPS

SEQ ID NO: 11597 - DNA, 21 bp, synthetic construct
  misc_feature 1..21: note = Description of Artificial Sequence: Synthetic oligonucleotide
  source 1..21: mol_type = other DNA
gacaataataagcgaccctca

SEQ ID NO: 11598 - protein, 7 aa, synthetic construct
  REGION 1..7: note = Description of Artificial Sequence: Synthetic peptide
DNNKRPS

SEQ ID NO: 11599 - DNA, 21 bp, synthetic construct
  misc_feature 1..21: note = Description of Artificial Sequence: Synthetic oligonucleotide
  source 1..21: mol_type = other DNA
agtacaagcaacaaacactcc

SEQ ID NO: 11600 - protein, 7 aa, synthetic construct
  REGION 1..7: note = Description of Artificial Sequence: Synthetic peptide
STSNKHS

SEQ ID NO: 11601 - DNA, 21 bp, synthetic construct
  misc_feature 1..21: note = Description of Artificial Sequence: Synthetic oligonucleotide
  source 1..21: mol_type = other DNA
gacaattataagcgaccctca

SEQ ID NO: 11602 - protein, 7 aa, synthetic construct
  REGION 1..7: note = Description of Artificial Sequence: Synthetic peptide
DNYKRPS

SEQ ID NO: 11603 - DNA, 21 bp, synthetic construct
  misc_feature 1..21: note = Description of Artificial Sequence: Synthetic oligonucleotide
  source 1..21: mol_type = other DNA
agtacaagcaacaaacactcc

SEQ ID NO: 11604 - protein, 7 aa, synthetic construct
  REGION 1..7: note = Description of Artificial Sequence: Synthetic peptide
STSNKHS

SEQ ID NO: 11605 - DNA, 21 bp, synthetic construct
  misc_feature 1..21: note = Description of Artificial Sequence: Synthetic oligonucleotide
  source 1..21: mol_type = other DNA
ggtaaaaacaaccggccctca

SEQ ID NO: 11606 - protein, 7 aa, synthetic construct
  REGION 1..7: note = Description of Artificial Sequence: Synthetic peptide
GKNNRPS

SEQ ID NO: 11607 - DNA, 21 bp, synthetic construct
  misc_feature 1..21: note = Description of Artificial Sequence: Synthetic oligonucleotide
  source 1..21: mol_type = other DNA
ggtaaaaacaaccggccctca

SEQ ID NO: 11608 - protein, 7 aa, synthetic construct
  REGION 1..7: note = Description of Artificial Sequence: Synthetic peptide
GKNNRPS

SEQ ID NO: 11609 - DNA, 21 bp, synthetic construct
  misc_feature 1..21: note = Description of Artificial Sequence: Synthetic oligonucleotide
  source 1..21: mol_type = other DNA
gacaataaaaagcgaccctca

SEQ ID NO: 11610 - protein, 7 aa, synthetic construct
  REGION 1..7: note = Description of Artificial Sequence: Synthetic peptide
DNKKRPS

SEQ ID NO: 11611 - DNA, 33 bp, synthetic construct
  misc_feature 1..33: note = Description of Artificial Sequence: Synthetic oligonucleotide
  source 1..33: mol_type = other DNA
tacaaatcagactcagataagcagcagggctct

SEQ ID NO: 11612 - protein, 11 aa, synthetic construct
  REGION 1..11: note = Description of Artificial Sequence: Synthetic peptide
YKSDSDKQQGS

SEQ ID NO: 11613 - DNA, 21 bp, synthetic construct
  misc_feature 1..21: note = Description of Artificial Sequence: Synthetic oligonucleotide
  source 1..21: mol_type = other DNA
agtacaaacaacaaacactcc

SEQ ID NO: 11614 - protein, 7 aa, synthetic construct
  REGION 1..7: note = Description of Artificial Sequence: Synthetic peptide
STNNKHS

SEQ ID NO: 11615 - DNA, 21 bp, synthetic construct
  misc_feature 1..21: note = Description of Artificial Sequence: Synthetic oligonucleotide
  source 1..21: mol_type = other DNA
gacaataataagcgaccctca

SEQ ID NO: 11616 - protein, 7 aa, synthetic construct
  REGION 1..7: note = Description of Artificial Sequence: Synthetic peptide
DNNKRPS

SEQ ID NO: 11617 - DNA, 21 bp, synthetic construct
  misc_feature 1..21: note = Description of Artificial Sequence: Synthetic oligonucleotide
  source 1..21: mol_type = other DNA
agtacaaacaacaaacactcc

SEQ ID NO: 11618 - protein, 7 aa, synthetic construct
  REGION 1..7: note = Description of Artificial Sequence: Synthetic peptide
STNNKHS

SEQ ID NO: 11619 - DNA, 21 bp, synthetic construct
  misc_feature 1..21: note = Description of Artificial Sequence: Synthetic oligonucleotide
  source 1..21: mol_type = other DNA
ggtaataagcagcggccctca

SEQ ID NO: 11620 - protein, 7 aa, synthetic construct
  REGION 1..7: note = Description of Artificial Sequence: Synthetic peptide
GNKQRPS

SEQ ID NO: 11621 - DNA, 21 bp, synthetic construct
  misc_feature 1..21: note = Description of Artificial Sequence: Synthetic oligonucleotide
  source 1..21: mol_type = other DNA
agtacaaccaacagacattcc

SEQ ID NO: 11622 - protein, 7 aa, synthetic construct
  REGION 1..7: note = Description of Artificial Sequence: Synthetic peptide
STTNRHS

SEQ ID NO: 11623 - DNA, 21 bp, synthetic construct
  misc_feature 1..21: note = Description of Artificial Sequence: Synthetic oligonucleotide
  source 1..21: mol_type = other DNA
aatacaagcaacagacactcc

SEQ ID NO: 11624 - protein, 7 aa, synthetic construct
  REGION 1..7: note = Description of Artificial Sequence: Synthetic peptide
NTSNRHS

SEQ ID NO: 11625 - DNA, 21 bp, synthetic construct
  misc_feature 1..21: note = Description of Artificial Sequence: Synthetic oligonucleotide
  source 1..21: mol_type = other DNA
gctaagaacaaccggccctca

SEQ ID NO: 11626 - protein, 7 aa, synthetic construct
  REGION 1..7: note = Description of Artificial Sequence: Synthetic peptide
AKNNRPS

SEQ ID NO: 11627 - DNA, 21 bp, synthetic construct
  misc_feature 1..21: note = Description of Artificial Sequence: Synthetic oligonucleotide
  source 1..21: mol_type = other DNA
caagatagcaagcggccctca

SEQ ID NO: 11628 - protein, 7 aa, synthetic construct
  REGION 1..7: note = Description of Artificial Sequence: Synthetic peptide
QDSKRPS

SEQ ID NO: 11629 - DNA, 21 bp, synthetic construct
  misc_feature 1..21: note = Description of Artificial Sequence: Synthetic oligonucleotide
  source 1..21: mol_type = other DNA
gacaataataagcgaccctca

SEQ ID NO: 11630 - protein, 7 aa, synthetic construct
  REGION 1..7: note = Description of Artificial Sequence: Synthetic peptide
DNNKRPS

SEQ ID NO: 11631 - DNA, 21 bp, synthetic construct
  misc_feature 1..21: note = Description of Artificial Sequence: Synthetic oligonucleotide
  source 1..21: mol_type = other DNA
agtacaagcaacaaacactcc

SEQ ID NO: 11632 - protein, 7 aa, synthetic construct
  REGION 1..7: note = Description of Artificial Sequence: Synthetic peptide
STSNKHS

SEQ ID NO: 11633 - DNA, 21 bp, synthetic construct
  misc_feature 1..21: note = Description of Artificial Sequence: Synthetic oligonucleotide
  source 1..21: mol_type = other DNA
gacaataataagcgaccctca

SEQ ID NO: 11634 - protein, 7 aa, synthetic construct
  REGION 1..7: note = Description of Artificial Sequence: Synthetic peptide
DNNKRPS

SEQ ID NO: 11635 - DNA, 21 bp, synthetic construct
  misc_feature 1..21: note = Description of Artificial Sequence: Synthetic oligonucleotide
  source 1..21: mol_type = other DNA
agtacaagcaacagacactcc

SEQ ID NO: 11636 - protein, 7 aa, synthetic construct
  REGION 1..7: note = Description of Artificial Sequence: Synthetic peptide
STSNRHS

SEQ ID NO: 11637 - DNA, 21 bp, synthetic construct
  misc_feature 1..21: note = Description of Artificial Sequence: Synthetic oligonucleotide
  source 1..21: mol_type = other DNA
gacaataataagcgaccctca

SEQ ID NO: 11638 - protein, 7 aa, synthetic construct
  REGION 1..7: note = Description of Artificial Sequence: Synthetic peptide
DNNKRPS

SEQ ID NO: 11639 - DNA, 21 bp, synthetic construct
  misc_feature 1..21: note = Description of Artificial Sequence: Synthetic oligonucleotide
  source 1..21: mol_type = other DNA
gaagatagcaagcgaccctca

SEQ ID NO: 11640 - protein, 7 aa, synthetic construct
  REGION 1..7: note = Description of Artificial Sequence: Synthetic peptide
EDSKRPS

SEQ ID NO: 11641 - DNA, 21 bp, synthetic construct
  misc_feature 1..21: note = Description of Artificial Sequence: Synthetic oligonucleotide
  source 1..21: mol_type = other DNA
aataattatcagcggccctca

SEQ ID NO: 11642 - protein, 7 aa, synthetic construct
  REGION 1..7: note = Description of Artificial Sequence: Synthetic peptide
NNYQRPS

SEQ ID NO: 11643 - DNA, 21 bp, synthetic construct
  misc_feature 1..21: note = Description of Artificial Sequence: Synthetic oligonucleotide
  source 1..21: mol_type = other DNA
caagataggaagcggccctca

SEQ ID NO: 11644 - protein, 7 aa, synthetic construct
  REGION 1..7: note = Description of Artificial Sequence: Synthetic peptide
QDRKRPS

SEQ ID NO: 11645 - DNA, 21 bp, synthetic construct
  misc_feature 1..21: note = Description of Artificial Sequence: Synthetic oligonucleotide
  source 1..21: mol_type = other DNA
gacaataataagcgaccctca

SEQ ID NO: 11646 - protein, 7 aa, synthetic construct
  REGION 1..7: note = Description of Artificial Sequence: Synthetic peptide
DNNKRPS

SEQ ID NO: 11647 - DNA, 21 bp, synthetic construct
  misc_feature 1..21: note = Description of Artificial Sequence: Synthetic oligonucleotide
  source 1..21: mol_type = other DNA
agtacaaacaacaaacactcc

SEQ ID NO: 11648 - protein, 7 aa, synthetic construct
  REGION 1..7: note = Description of Artificial Sequence: Synthetic peptide
STNNKHS

SEQ ID NO: 11649 - DNA, 21 bp, synthetic construct
  misc_feature 1..21: note = Description of Artificial Sequence: Synthetic oligonucleotide
  source 1..21: mol_type = other DNA
gacaataataagcgaccctca

SEQ ID NO: 11650 - protein, 7 aa, synthetic construct
  REGION 1..7: note = Description of Artificial Sequence: Synthetic peptide
DNNKRPS

SEQ ID NO: 11651 - DNA, 21 bp, synthetic construct
  misc_feature 1..21: note = Description of Artificial Sequence: Synthetic oligonucleotide
  source 1..21: mol_type = other DNA
agtaataatcagcggccctca

SEQ ID NO: 11652 - protein, 7 aa, synthetic construct
  REGION 1..7: note = Description of Artificial Sequence: Synthetic peptide
SNNQRPS

SEQ ID NO: 11653 - DNA, 21 bp, synthetic construct
  misc_feature 1..21: note = Description of Artificial Sequence: Synthetic oligonucleotide
  source 1..21: mol_type = other DNA
agtacaaacaacaaacactcc

SEQ ID NO: 11654 - protein, 7 aa, synthetic construct
  REGION 1..7: note = Description of Artificial Sequence: Synthetic peptide
STNNKHS

SEQ ID NO: 11655 - DNA, 21 bp, synthetic construct
  misc_feature 1..21: note = Description of Artificial Sequence: Synthetic oligonucleotide
  source 1..21: mol_type = other DNA
agtacaagcaacaaacactcc

SEQ ID NO: 11656 - protein, 7 aa, synthetic construct
  REGION 1..7: note = Description of Artificial Sequence: Synthetic peptide
STSNKHS

SEQ ID NO: 11657 - DNA, 21 bp, synthetic construct
  misc_feature 1..21: note = Description of Artificial Sequence: Synthetic oligonucleotide
  source 1..21: mol_type = other DNA
gacaataaaaagcgaccctca

SEQ ID NO: 11658 - protein, 7 aa, synthetic construct
  REGION 1..7: note = Description of Artificial Sequence: Synthetic peptide
DNKKRPS

SEQ ID NO: 11659 - DNA, 21 bp, synthetic construct
  misc_feature 1..21: note = Description of Artificial Sequence: Synthetic oligonucleotide
  source 1..21: mol_type = other DNA
agtacaagcaacaaacattcc

SEQ ID NO: 11660 - protein, 7 aa, synthetic construct
  REGION 1..7: note = Description of Artificial Sequence: Synthetic peptide
STSNKHS

SEQ ID NO: 11661 - DNA, 21 bp, synthetic construct
  misc_feature 1..21: note = Description of Artificial Sequence: Synthetic oligonucleotide
  source 1..21: mol_type = other DNA
gacaataataagcgcccctca

SEQ ID NO: 11662 - protein, 7 aa, synthetic construct
  REGION 1..7: note = Description of Artificial Sequence: Synthetic peptide
DNNKRPS

SEQ ID NO: 11663 - DNA, 21 bp, synthetic construct
  misc_feature 1..21: note = Description of Artificial Sequence: Synthetic oligonucleotide
  source 1..21: mol_type = other DNA
agtaataatcagcggccctca

SEQ ID NO: 11664 - protein, 7 aa, synthetic construct
  REGION 1..7: note = Description of Artificial Sequence: Synthetic peptide
SNNQRPS

SEQ ID NO: 11665 - DNA, 21 bp, synthetic construct
  misc_feature 1..21: note = Description of Artificial Sequence: Synthetic oligonucleotide
  source 1..21: mol_type = other DNA
catacaaacaacaaacactcc

SEQ ID NO: 11666 - protein, 7 aa, synthetic construct
  REGION 1..7: note = Description of Artificial Sequence: Synthetic peptide
HTNNKHS

SEQ ID NO: 11667 - DNA, 21 bp, synthetic construct
  misc_feature 1..21: note = Description of Artificial Sequence: Synthetic oligonucleotide
  source 1..21: mol_type = other DNA
gacaattataagcgaccctca

SEQ ID NO: 11668 - protein, 7 aa, synthetic construct
  REGION 1..7: note = Description of Artificial Sequence: Synthetic peptide
DNYKRPS

SEQ ID NO: 11669 - DNA, 21 bp, synthetic construct
  misc_feature 1..21: note = Description of Artificial Sequence: Synthetic oligonucleotide
  source 1..21: mol_type = other DNA
catacagacaacaaacactcc

SEQ ID NO: 11670 - protein, 7 aa, synthetic construct
  REGION 1..7: note = Description of Artificial Sequence: Synthetic peptide
HTDNKHS

SEQ ID NO: 11671 - DNA, 21 bp, synthetic construct
  misc_feature 1..21: note = Description of Artificial Sequence: Synthetic oligonucleotide
  source 1..21: mol_type = other DNA
agtacaaacaacaaacactcc

SEQ ID NO: 11672 - protein, 7 aa, synthetic construct
  REGION 1..7: note = Description of Artificial Sequence: Synthetic peptide
STNNKHS

SEQ ID NO: 11673 - DNA, 21 bp, synthetic construct
  misc_feature 1..21: note = Description of Artificial Sequence: Synthetic oligonucleotide
  source 1..21: mol_type = other DNA
caagatagcaagcggccctca

SEQ ID NO: 11674 - protein, 7 aa, synthetic construct
  REGION 1..7: note = Description of Artificial Sequence: Synthetic peptide
QDSKRPS

SEQ ID NO: 11675 - DNA, 21 bp, synthetic construct
  misc_feature 1..21: note = Description of Artificial Sequence: Synthetic oligonucleotide
  source 1..21: mol_type = other DNA
agggatagcgaccggccctct

SEQ ID NO: 11676 - protein, 7 aa, synthetic construct
  REGION 1..7: note = Description of Artificial Sequence: Synthetic peptide
RDSDRPS

SEQ ID NO: 11677 - DNA, 21 bp, synthetic construct
  misc_feature 1..21: note = Description of Artificial Sequence: Synthetic oligonucleotide
  source 1..21: mol_type = other DNA
caagataacaagcggccctca

SEQ ID NO: 11678 - protein, 7 aa, synthetic construct
  REGION 1..7: note = Description of Artificial Sequence: Synthetic peptide
QDNKRPS

SEQ ID NO: 11679 - DNA, 21 bp, synthetic construct
  misc_feature 1..21: note = Description of Artificial Sequence: Synthetic oligonucleotide
  source 1..21: mol_type = other DNA
agggatagcgaccggccctct

SEQ ID NO: 11680 - protein, 7 aa, synthetic construct
  REGION 1..7: note = Description of Artificial Sequence: Synthetic peptide
RDSDRPS

SEQ ID NO: 11681 - DNA, 21 bp, synthetic construct
  misc_feature 1..21: note = Description of Artificial Sequence: Synthetic oligonucleotide
  source 1..21: mol_type = other DNA
agggatagctaccgatcttct

SEQ ID NO: 11682 - protein, 7 aa, synthetic construct
  REGION 1..7: note = Description of Artificial Sequence: Synthetic peptide
RDSYRSS

SEQ ID NO: 11683 - DNA, 21 bp, synthetic construct
  misc_feature 1..21: note = Description of Artificial Sequence: Synthetic oligonucleotide
  source 1..21: mol_type = other DNA
gacaataataagcgaccctca

SEQ ID NO: 11684 - protein, 7 aa, synthetic construct
  REGION 1..7: note = Description of Artificial Sequence: Synthetic peptide
DNNKRPS

SEQ ID NO: 11685 - DNA, 21 bp, synthetic construct
  misc_feature 1..21: note = Description of Artificial Sequence: Synthetic oligonucleotide
  source 1..21: mol_type = other DNA
agggatagctaccggtcttct

SEQ ID NO: 11686 - protein, 7 aa, synthetic construct
  REGION 1..7: note = Description of Artificial Sequence: Synthetic peptide
RDSYRSS

SEQ ID NO: 11687 - DNA, 21 bp, synthetic construct
  misc_feature 1..21: note = Description of Artificial Sequence: Synthetic oligonucleotide
  source 1..21: mol_type = other DNA
agtacaagcaacaaacactcc

SEQ ID NO: 11688 - protein, 7 aa, synthetic construct
  REGION 1..7: note = Description of Artificial Sequence: Synthetic peptide
STSNKHS

SEQ ID NO: 11689 - DNA, 21 bp, synthetic construct
  misc_feature 1..21: note = Description of Artificial Sequence: Synthetic oligonucleotide
  source 1..21: mol_type = other DNA
gaggtcaggaatcggccctca

SEQ ID NO: 11690 - protein, 7 aa, synthetic construct
  REGION 1..7: note = Description of Artificial Sequence: Synthetic peptide
EVRNRPS

SEQ ID NO: 11691 - DNA, 21 bp, synthetic construct
  misc_feature 1..21: note = Description of Artificial Sequence: Synthetic oligonucleotide
  source 1..21: mol_type = other DNA
gaggtcagtaatcggccctca

SEQ ID NO: 11692 - protein, 7 aa, synthetic construct
  REGION 1..7: note = Description of Artificial Sequence: Synthetic peptide
EVSNRPS

SEQ ID NO: 11693 - DNA, 21 bp, synthetic construct
  misc_feature 1..21: note = Description of Artificial Sequence: Synthetic oligonucleotide
  source 1..21: mol_type = other DNA
gaggtcagtaatcggccctca

SEQ ID NO: 11694 - protein, 7 aa, synthetic construct
  REGION 1..7: note = Description of Artificial Sequence: Synthetic peptide
EVSNRPS

SEQ ID NO: 11695 - DNA, 21 bp, synthetic construct
  misc_feature 1..21: note = Description of Artificial Sequence: Synthetic oligonucleotide
  source 1..21: mol_type = other DNA
gaggtcagtaatcggccctca

SEQ ID NO: 11696 - protein, 7 aa, synthetic construct
  REGION 1..7: note = Description of Artificial Sequence: Synthetic peptide
EVSNRPS

SEQ ID NO: 11697 - DNA, 21 bp, synthetic construct
  misc_feature 1..21: note = Description of Artificial Sequence: Synthetic oligonucleotide
  source 1..21: mol_type = other DNA
agagatcgcgaccggccctct

SEQ ID NO: 11698 - protein, 7 aa, synthetic construct
  REGION 1..7: note = Description of Artificial Sequence: Synthetic peptide
RDRDRPS

SEQ ID NO: 11699 - DNA, 21 bp, synthetic construct
  misc_feature 1..21: note = Description of Artificial Sequence: Synthetic oligonucleotide
  source 1..21: mol_type = other DNA
aaagacagtgcgaggccctca

SEQ ID NO: 11700 - protein, 7 aa, synthetic construct
  REGION 1..7: note = Description of Artificial Sequence: Synthetic peptide
KDSARPS

SEQ ID NO: 11701 - DNA, 21 bp, synthetic construct
  misc_feature 1..21: note = Description of Artificial Sequence: Synthetic oligonucleotide
  source 1..21: mol_type = other DNA
gaggtcagtaatcggccctca

SEQ ID NO: 11702 - protein, 7 aa, synthetic construct
  REGION 1..7: note = Description of Artificial Sequence: Synthetic peptide
EVSNRPS

SEQ ID NO: 11703 - DNA, 21 bp, synthetic construct
  misc_feature 1..21: note = Description of Artificial Sequence: Synthetic oligonucleotide
  source 1..21: mol_type = other DNA
agtacaagcaacagacactcc

SEQ ID NO: 11704 - protein, 7 aa, synthetic construct
  REGION 1..7: note = Description of Artificial Sequence: Synthetic peptide
STSNRHS

SEQ ID NO: 11705 - DNA, 21 bp, synthetic construct
  misc_feature 1..21: note = Description of Artificial Sequence: Synthetic oligonucleotide
  source 1..21: mol_type = other DNA
agtacaaacaacaagcactcc

SEQ ID NO: 11706 - protein, 7 aa, synthetic construct
  REGION 1..7: note = Description of Artificial Sequence: Synthetic peptide
STNNKHS

SEQ ID NO: 11707 - DNA, 21 bp, synthetic construct
  misc_feature 1..21: note = Description of Artificial Sequence: Synthetic oligonucleotide
  source 1..21: mol_type = other DNA
agtacaatcaacaaacactcc

SEQ ID NO: 11708 - protein, 7 aa, synthetic construct
  REGION 1..7: note = Description of Artificial Sequence: Synthetic peptide
STINKHS

SEQ ID NO: 11709 - DNA, 21 bp, synthetic construct
  misc_feature 1..21: note = Description of Artificial Sequence: Synthetic oligonucleotide
  source 1..21: mol_type = other DNA
gaggtcagaaatcggccctca

SEQ ID NO: 11710 - protein, 7 aa, synthetic construct
  REGION 1..7: note = Description of Artificial Sequence: Synthetic peptide
EVRNRPS

SEQ ID NO: 11711 - DNA, 21 bp, synthetic construct
  misc_feature 1..21: note = Description of Artificial Sequence: Synthetic oligonucleotide
  source 1..21: mol_type = other DNA
gaggtcagtaatcggccctca

SEQ ID NO: 11712 - protein, 7 aa, synthetic construct
  REGION 1..7: note = Description of Artificial Sequence: Synthetic peptide
EVSNRPS

SEQ ID NO: 11713 - DNA, 21 bp, synthetic construct
  misc_feature 1..21: note = Description of Artificial Sequence: Synthetic oligonucleotide
  source 1..21: mol_type = other DNA
gaggtcagtaatcggccctca

SEQ ID NO: 11714 - protein, 7 aa, synthetic construct
  REGION 1..7: note = Description of Artificial Sequence: Synthetic peptide
EVSNRPS

SEQ ID NO: 11715 - DNA, 21 bp, synthetic construct
  misc_feature 1..21: note = Description of Artificial Sequence: Synthetic oligonucleotide
  source 1..21: mol_type = other DNA
gaggtcagtaatcggccctca

SEQ ID NO: 11716 - protein, 7 aa, synthetic construct
  REGION 1..7: note = Description of Artificial Sequence: Synthetic peptide
EVSNRPS

SEQ ID NO: 11717 - DNA, 21 bp, synthetic construct
  misc_feature 1..21: note = Description of Artificial Sequence: Synthetic oligonucleotide
  source 1..21: mol_type = other DNA
agtacaaacaacaaacactcc

SEQ ID NO: 11718 - protein, 7 aa, synthetic construct
  REGION 1..7: note = Description of Artificial Sequence: Synthetic peptide
STNNKHS

SEQ ID NO: 11719 - DNA, 21 bp, synthetic construct
  misc_feature 1..21: note = Description of Artificial Sequence: Synthetic oligonucleotide
  source 1..21: mol_type = other DNA
agtacaagcaacaaacactcc

SEQ ID NO: 11720 - protein, 7 aa, synthetic construct
  REGION 1..7: note = Description of Artificial Sequence: Synthetic peptide
STSNKHS

SEQ ID NO: 11721 - DNA, 21 bp, synthetic construct
  misc_feature 1..21: note = Description of Artificial Sequence: Synthetic oligonucleotide
  source 1..21: mol_type = other DNA
gaggtcaggaatcggccctca

SEQ ID NO: 11722 - protein, 7 aa, synthetic construct
  REGION 1..7: note = Description of Artificial Sequence: Synthetic peptide
EVRNRPS

SEQ ID NO: 11723 - DNA, 21 bp, synthetic construct
  misc_feature 1..21: note = Description of Artificial Sequence: Synthetic oligonucleotide
  source 1..21: mol_type = other DNA
gaggtccgtaatcggccctca

SEQ ID NO: 11724 - protein, 7 aa, synthetic construct
  REGION 1..7: note = Description of Artificial Sequence: Synthetic peptide
EVRNRPS

SEQ ID NO: 11725 - DNA, 21 bp, synthetic construct
  misc_feature 1..21: note = Description of Artificial Sequence: Synthetic oligonucleotide
  source 1..21: mol_type = other DNA
agtacaaacaacaagcactcc

SEQ ID NO: 11726 - protein, 7 aa, synthetic construct
  REGION 1..7: note = Description of Artificial Sequence: Synthetic peptide
STNNKHS

SEQ ID NO: 11727 - DNA, 21 bp, synthetic construct
  misc_feature 1..21: note = Description of Artificial Sequence: Synthetic oligonucleotide
  source 1..21: mol_type = other DNA
gaggtcaggaatcggccctca

SEQ ID NO: 11728 - protein, 7 aa, synthetic construct
  REGION 1..7: note = Description of Artificial Sequence: Synthetic peptide
EVRNRPS

SEQ ID NO: 11729 - DNA, 21 bp, synthetic construct
  misc_feature 1..21: note = Description of Artificial Sequence: Synthetic oligonucleotide
  source 1..21: mol_type = other DNA
agtacaagcaacaaacactcc

SEQ ID NO: 11730 - protein, 7 aa, synthetic construct
  REGION 1..7: note = Description of Artificial Sequence: Synthetic peptide
STSNKHS

SEQ ID NO: 11731 - DNA, 21 bp, synthetic construct
  misc_feature 1..21: note = Description of Artificial Sequence: Synthetic oligonucleotide
  source 1..21: mol_type = other DNA
gacaataataagcgaccctca

SEQ ID NO: 11732 - protein, 7 aa, synthetic construct
  REGION 1..7: note = Description of Artificial Sequence: Synthetic peptide
DNNKRPS

SEQ ID NO: 11733 - DNA, 21 bp, synthetic construct
  misc_feature 1..21: note = Description of Artificial Sequence: Synthetic oligonucleotide
  source 1..21: mol_type = other DNA
agtacaagcaataaacactcc

SEQ ID NO: 11734 - protein, 7 aa, synthetic construct
  REGION 1..7: note = Description of Artificial Sequence: Synthetic peptide
STSNKHS

SEQ ID NO: 11735 - DNA, 21 bp, synthetic construct
  misc_feature 1..21: note = Description of Artificial Sequence: Synthetic oligonucleotide
  source 1..21: mol_type = other DNA
agtacaagcaacaaacactcc

SEQ ID NO: 11736 - protein, 7 aa, synthetic construct
  REGION 1..7: note = Description of Artificial Sequence: Synthetic peptide
STSNKHS

SEQ ID NO: 11737 - DNA, 21 bp, synthetic construct
  misc_feature 1..21: note = Description of Artificial Sequence: Synthetic oligonucleotide
  source 1..21: mol_type = other DNA
caagatagcaagcggccctca

SEQ ID NO: 11738 - protein, 7 aa, synthetic construct
  REGION 1..7: note = Description of Artificial Sequence: Synthetic peptide
QDSKRPS

SEQ ID NO: 11739 - DNA, 21 bp, synthetic construct
  misc_feature 1..21: note = Description of Artificial Sequence: Synthetic oligonucleotide
  source 1..21: mol_type = other DNA
gaggtcagtaatcggccctca

SEQ ID NO: 11740 - protein, 7 aa, synthetic construct
  REGION 1..7: note = Description of Artificial Sequence: Synthetic peptide
EVSNRPS

SEQ ID NO: 11741 - DNA, 21 bp, synthetic construct
  misc_feature 1..21: note = Description of Artificial Sequence: Synthetic oligonucleotide
  source 1..21: mol_type = other DNA
agtacaaacaacaaacactcc

SEQ ID NO: 11742 - protein, 7 aa, synthetic construct
  REGION 1..7: note = Description of Artificial Sequence: Synthetic peptide
STNNKHS

SEQ ID NO: 11743 - DNA, 21 bp, synthetic construct
  misc_feature 1..21: note = Description of Artificial Sequence: Synthetic oligonucleotide
  source 1..21: mol_type = other DNA
gaggtcagtaatcggccctca

SEQ ID NO: 11744 - protein, 7 aa, synthetic construct
  REGION 1..7: note = Description of Artificial Sequence: Synthetic peptide
EVSNRPS

SEQ ID NO: 11745 - DNA, 21 bp, synthetic construct
  misc_feature 1..21: note = Description of Artificial Sequence: Synthetic oligonucleotide
  source 1..21: mol_type = other DNA
agtacaaacaacaaacactcc

SEQ ID NO: 11746 - protein, 7 aa, synthetic construct
  REGION 1..7: note = Description of Artificial Sequence: Synthetic peptide
STNNKHS

SEQ ID NO: 11747 - DNA, 21 bp, synthetic construct
  misc_feature 1..21: note = Description of Artificial Sequence: Synthetic oligonucleotide
  source 1..21: mol_type = other DNA
agtacaagcaataaacactcc

SEQ ID NO: 11748 - protein, 7 aa, synthetic construct
  REGION 1..7: note = Description of Artificial Sequence: Synthetic peptide
STSNKHS

SEQ ID NO: 11749 - DNA, 21 bp, synthetic construct
  misc_feature 1..21: note = Description of Artificial Sequence: Synthetic oligonucleotide
  source 1..21: mol_type = other DNA
agggatagcaaccggccctct

SEQ ID NO: 11750 - protein, 7 aa, synthetic construct
  REGION 1..7: note = Description of Artificial Sequence: Synthetic peptide
RDSNRPS

SEQ ID NO: 11751 - DNA, 21 bp, synthetic construct
  misc_feature 1..21: note = Description of Artificial Sequence: Synthetic oligonucleotide
  source 1..21: mol_type = other DNA
gaggtcagtaatcggccctca

SEQ ID NO: 11752 - protein, 7 aa, synthetic construct
  REGION 1..7: note = Description of Artificial Sequence: Synthetic peptide
EVSNRPS

SEQ ID NO: 11753 - DNA, 21 bp, synthetic construct
  misc_feature 1..21: note = Description of Artificial Sequence: Synthetic oligonucleotide
  source 1..21: mol_type = other DNA
aaagacagtgagaggccctca

SEQ ID NO: 11754 - protein, 7 aa, synthetic construct
  REGION 1..7: note = Description of Artificial Sequence: Synthetic peptide
KDSERPS

SEQ ID NO: 11755 - DNA, 21 bp, synthetic construct
  misc_feature 1..21: note = Description of Artificial Sequence: Synthetic oligonucleotide
  source 1..21: mol_type = other DNA
aaagacagtgagaggccctca

SEQ ID NO: 11756 - protein, 7 aa, synthetic construct
  REGION 1..7: note = Description of Artificial Sequence: Synthetic peptide
KDSERPS

SEQ ID NO: 11757 - DNA, 21 bp, synthetic construct
  misc_feature 1..21: note = Description of Artificial Sequence: Synthetic oligonucleotide
  source 1..21: mol_type = other DNA
gacagtaataagcgaccctca

SEQ ID NO: 11758 - protein, 7 aa, synthetic construct
  REGION 1..7: note = Description of Artificial Sequence: Synthetic peptide
DSNKRPS

SEQ ID NO: 11759 - DNA, 21 bp, synthetic construct
  misc_feature 1..21: note = Description of Artificial Sequence: Synthetic oligonucleotide
  source 1..21: mol_type = other DNA
aaagacagtgagaggccctca

SEQ ID NO: 11760 - protein, 7 aa, synthetic construct
  REGION 1..7: note = Description of Artificial Sequence: Synthetic peptide
KDSERPS

SEQ ID NO: 11761 - DNA, 21 bp, synthetic construct
  misc_feature 1..21: note = Description of Artificial Sequence: Synthetic oligonucleotide
  source 1..21: mol_type = other DNA
gaggtcagaaatcggccctca

SEQ ID NO: 11762 - protein, 7 aa, synthetic construct
  REGION 1..7: note = Description of Artificial Sequence: Synthetic peptide
EVRNRPS

SEQ ID NO: 11763 - DNA, 21 bp, synthetic construct
  misc_feature 1..21: note = Description of Artificial Sequence: Synthetic oligonucleotide
  source 1..21: mol_type = other DNA
gaggtcaggaatcggccctca

SEQ ID NO: 11764 - protein, 7 aa, synthetic construct
  REGION 1..7: note = Description of Artificial Sequence: Synthetic peptide
EVRNRPS

SEQ ID NO: 11765 - DNA, 21 bp, synthetic construct
  misc_feature 1..21: note = Description of Artificial Sequence: Synthetic oligonucleotide
  source 1..21: mol_type = other DNA
gaggtcaggaatcggccctca

SEQ ID NO: 11766 - protein, 7 aa, synthetic construct
  REGION 1..7: note = Description of Artificial Sequence: Synthetic peptide
EVRNRPS

SEQ ID NO: 11767 - DNA, 21 bp, synthetic construct
  misc_feature 1..21: note = Description of Artificial Sequence: Synthetic oligonucleotide
  source 1..21: mol_type = other DNA
caagatagcaagcggccctca

SEQ ID NO: 11768 - protein, 7 aa, synthetic construct
  REGION 1..7: note = Description of Artificial Sequence: Synthetic peptide
QDSKRPS

SEQ ID NO: 11769 - DNA, 21 bp, synthetic construct
  misc_feature 1..21: note = Description of Artificial Sequence: Synthetic oligonucleotide
  source 1..21: mol_type = other DNA
ggtaacagcaatcggccctca

SEQ ID NO: 11770 - protein, 7 aa, synthetic construct
  REGION 1..7: note = Description of Artificial Sequence: Synthetic peptide
GNSNRPS

SEQ ID NO: 11771 - DNA, 21 bp, synthetic construct
  misc_feature 1..21: note = Description of Artificial Sequence: Synthetic oligonucleotide
  source 1..21: mol_type = other DNA
caagatagcaagcggccctca

SEQ ID NO: 11772 - protein, 7 aa, synthetic construct
  REGION 1..7: note = Description of Artificial Sequence: Synthetic peptide
QDSKRPS

SEQ ID NO: 11773 - DNA, 21 bp, synthetic construct
  misc_feature 1..21: note = Description of Artificial Sequence: Synthetic oligonucleotide
  source 1..21: mol_type = other DNA
caagatcgcaagcggccctca

SEQ ID NO: 11774 - protein, 7 aa, synthetic construct
  REGION 1..7: note = Description of Artificial Sequence: Synthetic peptide
QDRKRPS

SEQ ID NO: 11775 - DNA, 21 bp, synthetic construct
  misc_feature 1..21: note = Description of Artificial Sequence: Synthetic oligonucleotide
  source 1..21: mol_type = other DNA
caagatcgcaagcggccctca

SEQ ID NO: 11776 - protein, 7 aa, synthetic construct
  REGION 1..7: note = Description of Artificial Sequence: Synthetic peptide
QDRKRPS

SEQ ID NO: 11777 - DNA, 21 bp, synthetic construct
  misc_feature 1..21: note = Description of Artificial Sequence: Synthetic oligonucleotide
  source 1..21: mol_type = other DNA
aaagacagtgagaggccctca

SEQ ID NO: 11778 - protein, 7 aa, synthetic construct
  REGION 1..7: note = Description of Artificial Sequence: Synthetic peptide
KDSERPS

SEQ ID NO: 11779 - DNA, 21 bp, synthetic construct
  misc_feature 1..21: note = Description of Artificial Sequence: Synthetic oligonucleotide
  source 1..21: mol_type = other DNA
ggtaacagcaatcggccctca

SEQ ID NO: 11780 - protein, 7 aa, synthetic construct
  REGION 1..7: note = Description of Artificial Sequence: Synthetic peptide
GNSNRPS

SEQ ID NO: 11781 - DNA, 21 bp, synthetic construct
  misc_feature 1..21: note = Description of Artificial Sequence: Synthetic oligonucleotide
  source 1..21: mol_type = other DNA
caagatcgcaagcggccctca

SEQ ID NO: 11782 - protein, 7 aa, synthetic construct
  REGION 1..7: note = Description of Artificial Sequence: Synthetic peptide
QDRKRPS

SEQ ID NO: 11783 - DNA, 21 bp, synthetic construct
  misc_feature 1..21: note = Description of Artificial Sequence: Synthetic oligonucleotide
  source 1..21: mol_type = other DNA
ggtaacagcaatcggccctca

SEQ ID NO: 11784 - protein, 7 aa, synthetic construct
  REGION 1..7: note = Description of Artificial Sequence: Synthetic peptide
GNSNRPS

SEQ ID NO: 11785 - DNA, 21 bp, synthetic construct
  misc_feature 1..21: note = Description of Artificial Sequence: Synthetic oligonucleotide
  source 1..21: mol_type = other DNA
caagataggaagcggccctca

SEQ ID NO: 11786 - protein, 7 aa, synthetic construct
  REGION 1..7: note = Description of Artificial Sequence: Synthetic peptide
QDRKRPS

SEQ ID NO: 11787 - DNA, 21 bp, synthetic construct
  misc_feature 1..21: note = Description of Artificial Sequence: Synthetic oligonucleotide
  source 1..21: mol_type = other DNA
ggtaacagcaatcggccctca

SEQ ID NO: 11788 - protein, 7 aa, synthetic construct
  REGION 1..7: note = Description of Artificial Sequence: Synthetic peptide
GNSNRPS

SEQ ID NO: 11789 - DNA, 21 bp, synthetic construct
  misc_feature 1..21: note = Description of Artificial Sequence: Synthetic oligonucleotide
  source 1..21: mol_type = other DNA
caagatagcaagcggccctca

SEQ ID NO: 11790 - protein, 7 aa, synthetic construct
  REGION 1..7: note = Description of Artificial Sequence: Synthetic peptide
QDSKRPS

SEQ ID NO: 11791 - DNA, 21 bp, synthetic construct
  misc_feature 1..21: note = Description of Artificial Sequence: Synthetic oligonucleotide
  source 1..21: mol_type = other DNA
gaggacagcaaacgaccctcc

SEQ ID NO: 11792 - protein, 7 aa, synthetic construct
  REGION 1..7: note = Description of Artificial Sequence: Synthetic peptide
EDSKRPS

SEQ ID NO: 11793 - DNA, 21 bp, synthetic construct
  misc_feature 1..21: note = Description of Artificial Sequence: Synthetic oligonucleotide
  source 1..21: mol_type = other DNA
gctgcatccagtttgcgaagt

SEQ ID NO: 11794 - protein, 7 aa, synthetic construct
  REGION 1..7: note = Description of Artificial Sequence: Synthetic peptide
AASSLRS

SEQ ID NO: 11795 - DNA, 21 bp, synthetic construct
  misc_feature 1..21: note = Description of Artificial Sequence: Synthetic oligonucleotide
  source 1..21: mol_type = other DNA
ggtgcatccagtttgcaaagt

SEQ ID NO: 11796 - protein, 7 aa, synthetic construct
  REGION 1..7: note = Description of Artificial Sequence: Synthetic peptide
GASSLQS

SEQ ID NO: 11797 - DNA, 21 bp, synthetic construct
  misc_feature 1..21: note = Description of Artificial Sequence: Synthetic oligonucleotide
  source 1..21: mol_type = other DNA
gctgcatccggtttgcaaagt

SEQ ID NO: 11798 - protein, 7 aa, synthetic construct
  REGION 1..7: note = Description of Artificial Sequence: Synthetic peptide
AASGLQS

SEQ ID NO: 11799 - DNA, 21 bp, synthetic construct
  misc_feature 1..21: note = Description of Artificial Sequence: Synthetic oligonucleotide
  source 1..21: mol_type = other DNA
gaggtttctaactgggactct

SEQ ID NO: 11800 - protein, 7 aa, synthetic construct
  REGION 1..7: note = Description of Artificial Sequence: Synthetic peptide
EVSNWDS

SEQ ID NO: 11801 - DNA, 21 bp, synthetic construct
  misc_feature 1..21: note = Description of Artificial Sequence: Synthetic oligonucleotide
  source 1..21: mol_type = other DNA
ggtgcatccaccagggccact

SEQ ID NO: 11802 - protein, 7 aa, synthetic construct
  REGION 1..7: note = Description of Artificial Sequence: Synthetic peptide
GASTRAT

SEQ ID NO: 11803 - DNA, 21 bp, synthetic construct
  misc_feature 1..21: note = Description of Artificial Sequence: Synthetic oligonucleotide
  source 1..21: mol_type = other DNA
actgcatccagtttgcaaagt

SEQ ID NO: 11804 - protein, 7 aa, synthetic construct
  REGION 1..7: note = Description of Artificial Sequence: Synthetic peptide
TASSLQS

SEQ ID NO: 11805 - DNA, 21 bp, synthetic construct
  misc_feature 1..21: note = Description of Artificial Sequence: Synthetic oligonucleotide
  source 1..21: mol_type = other DNA
gctgcatccagtttgcaaagt

SEQ ID NO: 11806 - protein, 7 aa, synthetic construct
  REGION 1..7: note = Description of Artificial Sequence: Synthetic peptide
AASSLQS

SEQ ID NO: 11807 - DNA, 21 bp, synthetic construct
  misc_feature 1..21: note = Description of Artificial Sequence: Synthetic oligonucleotide
  source 1..21: mol_type = other DNA
gctgcatccagtttgcaaagt

SEQ ID NO: 11808 - protein, 7 aa, synthetic construct
  REGION 1..7: note = Description of Artificial Sequence: Synthetic peptide
AASSLQS

SEQ ID NO: 11809 - DNA, 21 bp, synthetic construct
  misc_feature 1..21: note = Description of Artificial Sequence: Synthetic oligonucleotide
  source 1..21: mol_type = other DNA
ttgggttctaatcgggcctcc

SEQ ID NO: 11810 - protein, 7 aa, synthetic construct
  REGION 1..7: note = Description of Artificial Sequence: Synthetic peptide
LGSNRAS

SEQ ID NO: 11811 - DNA, 21 bp, synthetic construct
  misc_feature 1..21: note = Description of Artificial Sequence: Synthetic oligonucleotide
  source 1..21: mol_type = other DNA
aaggtttctaactgggactct

SEQ ID NO: 11812 - protein, 7 aa, synthetic construct
  REGION 1..7: note = Description of Artificial Sequence: Synthetic peptide
KVSNWDS

SEQ ID NO: 11813 - DNA, 21 bp, synthetic construct
  misc_feature 1..21: note = Description of Artificial Sequence: Synthetic oligonucleotide
  source 1..21: mol_type = other DNA
aaggtttctaactgggactct

SEQ ID NO: 11814 - protein, 7 aa, synthetic construct
  REGION 1..7: note = Description of Artificial Sequence: Synthetic peptide
KVSNWDS

SEQ ID NO: 11815 - DNA, 21 bp, synthetic construct
  misc_feature 1..21: note = Description of Artificial Sequence: Synthetic oligonucleotide
  source 1..21: mol_type = other DNA
aaggtttctaactgggactct

SEQ ID NO: 11816 - protein, 7 aa, synthetic construct
  REGION 1..7: note = Description of Artificial Sequence: Synthetic peptide
KVSNWDS

SEQ ID NO: 11817 - DNA, 21 bp, synthetic construct
  misc_feature 1..21: note = Description of Artificial Sequence: Synthetic oligonucleotide
  source 1..21: mol_type = other DNA
aaggtttctaactgggactat

SEQ ID NO: 11818 - protein, 7 aa, synthetic construct
  REGION 1..7: note = Description of Artificial Sequence: Synthetic peptide
KVSNWDY

SEQ ID NO: 11819 - DNA, 21 bp, synthetic construct
  misc_feature 1..21: note = Description of Artificial Sequence: Synthetic oligonucleotide
  source 1..21: mol_type = other DNA
gctgcatccagtttgcaaagt

SEQ ID NO: 11820 - protein, 7 aa, synthetic construct
  REGION 1..7: note = Description of Artificial Sequence: Synthetic peptide
AASSLQS

SEQ ID NO: 11821 - DNA, 21 bp, synthetic construct
  misc_feature 1..21: note = Description of Artificial Sequence: Synthetic oligonucleotide
  source 1..21: mol_type = other DNA
gctgcatccagtttgcaaagt

SEQ ID NO: 11822 - protein, 7 aa, synthetic construct
  REGION 1..7: note = Description of Artificial Sequence: Synthetic peptide
AASSLQS

SEQ ID NO: 11823 - DNA, 21 bp, synthetic construct
  misc_feature 1..21: note = Description of Artificial Sequence: Synthetic oligonucleotide
  source 1..21: mol_type = other DNA
gttgcatccggtttgcaaagt

SEQ ID NO: 11824 - protein, 7 aa, synthetic construct
  REGION 1..7: note = Description of Artificial Sequence: Synthetic peptide
VASGLQS

SEQ ID NO: 11825 - DNA, 21 bp, synthetic construct
  misc_feature 1..21: note = Description of Artificial Sequence: Synthetic oligonucleotide
  source 1..21: mol_type = other DNA
tctgcatccagtttgcaaagt

SEQ ID NO: 11826 - protein, 7 aa, synthetic construct
  REGION 1..7: note = Description of Artificial Sequence: Synthetic peptide
SASSLQS

SEQ ID NO: 11827 - DNA, 21 bp, synthetic construct
  misc_feature 1..21: note = Description of Artificial Sequence: Synthetic oligonucleotide
  source 1..21: mol_type = other DNA
tctgcatccagtttgcaaagt

SEQ ID NO: 11828 - protein, 7 aa, synthetic construct
  REGION 1..7: note = Description of Artificial Sequence: Synthetic peptide
SASSLQS

SEQ ID NO: 11829 - DNA, 21 bp, synthetic construct
  misc_feature 1..21: note = Description of Artificial Sequence: Synthetic oligonucleotide
  source 1..21: mol_type = other DNA
aaggtttctaactgggactct

SEQ ID NO: 11830 - protein, 7 aa, synthetic construct
  REGION 1..7: note = Description of Artificial Sequence: Synthetic peptide
KVSNWDS

SEQ ID NO: 11831 - DNA, 21 bp, synthetic construct
  misc_feature 1..21: note = Description of Artificial Sequence: Synthetic oligonucleotide
  source 1..21: mol_type = other DNA
tctgcatccagtttgcaaagt

SEQ ID NO: 11832 - protein, 7 aa, synthetic construct
  REGION 1..7: note = Description of Artificial Sequence: Synthetic peptide
SASSLQS

SEQ ID NO: 11833 - DNA, 21 bp, synthetic construct
  misc_feature 1..21: note = Description of Artificial Sequence: Synthetic oligonucleotide
  source 1..21: mol_type = other DNA
gctgcatccagtttgcaaagt

SEQ ID NO: 11834 - protein, 7 aa, synthetic construct
  REGION 1..7: note = Description of Artificial Sequence: Synthetic peptide
AASSLQS

SEQ ID NO: 11835 - DNA, 21 bp, synthetic construct
  misc_feature 1..21: note = Description of Artificial Sequence: Synthetic oligonucleotide
  source 1..21: mol_type = other DNA
agagcatccagtttgcaaagt

SEQ ID NO: 11836 - protein, 7 aa, synthetic construct
  REGION 1..7: note = Description of Artificial Sequence: Synthetic peptide
RASSLQS

SEQ ID NO: 11837 - DNA, 21 bp, synthetic construct
  misc_feature 1..21: note = Description of Artificial Sequence: Synthetic oligonucleotide
  source 1..21: mol_type = other DNA
actgcatccagtttgcaaagt

SEQ ID NO: 11838 - protein, 7 aa, synthetic construct
  REGION 1..7: note = Description of Artificial Sequence: Synthetic peptide
TASSLQS

SEQ ID NO: 11839 - DNA, 21 bp, synthetic construct
  misc_feature 1..21: note = Description of Artificial Sequence: Synthetic oligonucleotide
  source 1..21: mol_type = other DNA
gctgcatccagtttgcaaagt

SEQ ID NO: 11840 - protein, 7 aa, synthetic construct
  REGION 1..7: note = Description of Artificial Sequence: Synthetic peptide
AASSLQS

SEQ ID NO: 11841 - DNA, 21 bp, synthetic construct
  misc_feature 1..21: note = Description of Artificial Sequence: Synthetic oligonucleotide
  source 1..21: mol_type = other DNA
gctgcatccagttcgcaaagt

SEQ ID NO: 11842 - protein, 7 aa, synthetic construct
  REGION 1..7: note = Description of Artificial Sequence: Synthetic peptide
AASSSQS

SEQ ID NO: 11843 - DNA, 21 bp, synthetic construct
  misc_feature 1..21: note = Description of Artificial Sequence: Synthetic oligonucleotide
  source 1..21: mol_type = other DNA
aaggtttctaactgggactct

SEQ ID NO: 11844 - protein, 7 aa, synthetic construct
  REGION 1..7: note = Description of Artificial Sequence: Synthetic peptide
KVSNWDS

SEQ ID NO: 11845 - DNA, 21 bp, synthetic construct
  misc_feature 1..21: note = Description of Artificial Sequence: Synthetic oligonucleotide
  source 1..21: mol_type = other DNA
gatgcatccactttggaaaca

SEQ ID NO: 11846 - protein, 7 aa, synthetic construct
  REGION 1..7: note = Description of Artificial Sequence: Synthetic peptide
DASTLET

SEQ ID NO: 11847 - DNA, 21 bp, synthetic construct
  misc_feature 1..21: note = Description of Artificial Sequence: Synthetic oligonucleotide
  source 1..21: mol_type = other DNA
ttgggttctaatcgggcctcc

SEQ ID NO: 11848 - protein, 7 aa, synthetic construct
  REGION 1..7: note = Description of Artificial Sequence: Synthetic peptide
LGSNRAS

SEQ ID NO: 11849 - DNA, 21 bp, synthetic construct
  misc_feature 1..21: note = Description of Artificial Sequence: Synthetic oligonucleotide
  source 1..21: mol_type = other DNA
ggtgcatccaccagggccact

SEQ ID NO: 11850 - protein, 7 aa, synthetic construct
  REGION 1..7: note = Description of Artificial Sequence: Synthetic peptide
GASTRAT

SEQ ID NO: 11851 - DNA, 21 bp, synthetic construct
  misc_feature 1..21: note = Description of Artificial Sequence: Synthetic oligonucleotide
  source 1..21: mol_type = other DNA
ggtgcatccagccgggccact

SEQ ID NO: 11852 - protein, 7 aa, synthetic construct
  REGION 1..7: note = Description of Artificial Sequence: Synthetic peptide
GASSRAT

SEQ ID NO: 11853 - DNA, 21 bp, synthetic construct
  misc_feature 1..21: note = Description of Artificial Sequence: Synthetic oligonucleotide
  source 1..21: mol_type = other DNA
gctgcatccagtttgcaaagt

SEQ ID NO: 11854 - protein, 7 aa, synthetic construct
  REGION 1..7: note = Description of Artificial Sequence: Synthetic peptide
AASSLQS

SEQ ID NO: 11855 - DNA, 21 bp, synthetic construct
  misc_feature 1..21: note = Description of Artificial Sequence: Synthetic oligonucleotide
  source 1..21: mol_type = other DNA
ggtgcatccagccggtccact

SEQ ID NO: 11856 - protein, 7 aa, synthetic construct
  REGION 1..7: note = Description of Artificial Sequence: Synthetic peptide
GASSRST

SEQ ID NO: 11857 - DNA, 21 bp, synthetic construct
  misc_feature 1..21: note = Description of Artificial Sequence: Synthetic oligonucleotide
  source 1..21: mol_type = other DNA
ggtgcatccagccgggccact

SEQ ID NO: 11858 - protein, 7 aa, synthetic construct
  REGION 1..7: note = Description of Artificial Sequence: Synthetic peptide
GASSRAT

SEQ ID NO: 11859 - DNA, 21 bp, synthetic construct
  misc_feature 1..21: note = Description of Artificial Sequence: Synthetic oligonucleotide
  source 1..21: mol_type = other DNA
ggtgcatccatcagggccact

SEQ ID NO: 11860 - protein, 7 aa, synthetic construct
  REGION 1..7: note = Description of Artificial Sequence: Synthetic peptide
GASIRAT

SEQ ID NO: 11861 - DNA, 21 bp, synthetic construct
  misc_feature 1..21: note = Description of Artificial Sequence: Synthetic oligonucleotide
  source 1..21: mol_type = other DNA
ggtgcatccagcagggcccct

SEQ ID NO: 11862 - protein, 7 aa, synthetic construct
  REGION 1..7: note = Description of Artificial Sequence: Synthetic peptide
GASSRAP

SEQ ID NO: 11863 - DNA, 21 bp, synthetic construct
  misc_feature 1..21: note = Description of Artificial Sequence: Synthetic oligonucleotide
  source 1..21: mol_type = other DNA
ggtgcatccagccgggccact

SEQ ID NO: 11864 - protein, 7 aa, synthetic construct
  REGION 1..7: note = Description of Artificial Sequence: Synthetic peptide
GASSRAT

SEQ ID NO: 11865 - DNA, 21 bp, synthetic construct
  misc_feature 1..21: note = Description of Artificial Sequence: Synthetic oligonucleotide
  source 1..21: mol_type = other DNA
gatgcatccagtttgcaaagt

SEQ ID NO: 11866 - protein, 7 aa, synthetic construct
  REGION 1..7: note = Description of Artificial Sequence: Synthetic peptide
DASSLQS

SEQ ID NO: 11867 - DNA, 21 bp, synthetic construct
  misc_feature 1..21: note = Description of Artificial Sequence: Synthetic oligonucleotide
  source 1..21: mol_type = other DNA
ggtgcatccagccggtccact

SEQ ID NO: 11868 - protein, 7 aa, synthetic construct
  REGION 1..7: note = Description of Artificial Sequence: Synthetic peptide
GASSRST

SEQ ID NO: 11869 - DNA, 21 bp, synthetic construct
  misc_feature 1..21: note = Description of Artificial Sequence: Synthetic oligonucleotide
  source 1..21: mol_type = other DNA
tgggcatctacccgggaatcc

SEQ ID NO: 11870 - protein, 7 aa, synthetic construct
  REGION 1..7: note = Description of Artificial Sequence: Synthetic peptide
WASTRES

SEQ ID NO: 11871 - DNA, 21 bp, synthetic construct
  misc_feature 1..21: note = Description of Artificial Sequence: Synthetic oligonucleotide
  source 1..21: mol_type = other DNA
tgggcatctacccgggaatcc

SEQ ID NO: 11872 - protein, 7 aa, synthetic construct
  REGION 1..7: note = Description of Artificial Sequence: Synthetic peptide
WASTRES

SEQ ID NO: 11873 - DNA, 21 bp, synthetic construct
  misc_feature 1..21: note = Description of Artificial Sequence: Synthetic oligonucleotide
  source 1..21: mol_type = other DNA
tgggcatctacccgggaatcc

SEQ ID NO: 11874 - protein, 7 aa, synthetic construct
  REGION 1..7: note = Description of Artificial Sequence: Synthetic peptide
WASTRES

SEQ ID NO: 11875 - DNA, 21 bp, synthetic construct
  misc_feature 1..21: note = Description of Artificial Sequence: Synthetic oligonucleotide
  source 1..21: mol_type = other DNA
ggtgcatccagccgggccact

SEQ ID NO: 11876 - protein, 7 aa, synthetic construct
  REGION 1..7: note = Description of Artificial Sequence: Synthetic peptide
GASSRAT

SEQ ID NO: 11877 - DNA, 21 bp, synthetic construct
  misc_feature 1..21: note = Description of Artificial Sequence: Synthetic oligonucleotide
  source 1..21: mol_type = other DNA
ttgggttctaatcgggcctcc

SEQ ID NO: 11878 - protein, 7 aa, synthetic construct
  REGION 1..7: note = Description of Artificial Sequence: Synthetic peptide
LGSNRAS

SEQ ID NO: 11879 - DNA, 21 bp, synthetic construct
  misc_feature 1..21: note = Description of Artificial Sequence: Synthetic oligonucleotide
  source 1..21: mol_type = other DNA
ggtgcatccaccagggccact

SEQ ID NO: 11880 - protein, 7 aa, synthetic construct
  REGION 1..7: note = Description of Artificial Sequence: Synthetic peptide
GASTRAT

SEQ ID NO: 11881 - DNA, 21 bp, synthetic construct
  misc_feature 1..21: note = Description of Artificial Sequence: Synthetic oligonucleotide
  source 1..21: mol_type = other DNA
tgggcatctactcgggaatcc

SEQ ID NO: 11882 - protein, 7 aa, synthetic construct
  REGION 1..7: note = Description of Artificial Sequence: Synthetic peptide
WASTRES

SEQ ID NO: 11883 - DNA, 21 bp, synthetic construct
  misc_feature 1..21: note = Description of Artificial Sequence: Synthetic oligonucleotide
  source 1..21: mol_type = other DNA
ggtgcatccagcagggccact

SEQ ID NO: 11884 - protein, 7 aa, synthetic construct
  REGION 1..7: note = Description of Artificial Sequence: Synthetic peptide
GASSRAT

SEQ ID NO: 11885 - DNA, 21 bp, synthetic construct
  misc_feature 1..21: note = Description of Artificial Sequence: Synthetic oligonucleotide
  source 1..21: mol_type = other DNA
gctgcatccagtttgcaaagt

SEQ ID NO: 11886 - protein, 7 aa, synthetic construct
  REGION 1..7: note = Description of Artificial Sequence: Synthetic peptide
AASSLQS

SEQ ID NO: 11887 - DNA, 21 bp, synthetic construct
  misc_feature 1..21: note = Description of Artificial Sequence: Synthetic oligonucleotide
  source 1..21: mol_type = other DNA
tgggcatctacccgggaatcc

SEQ ID NO: 11888 - protein, 7 aa, synthetic construct
  REGION 1..7: note = Description of Artificial Sequence: Synthetic peptide
WASTRES

SEQ ID NO: 11889 - DNA, 21 bp, synthetic construct
  misc_feature 1..21: note = Description of Artificial Sequence: Synthetic oligonucleotide
  source 1..21: mol_type = other DNA
tgggcatctacccgggaatcc

SEQ ID NO: 11890 - protein, 7 aa, synthetic construct
  REGION 1..7: note = Description of Artificial Sequence: Synthetic peptide
WASTRES

SEQ ID NO: 11891 - DNA, 21 bp, synthetic construct
  misc_feature 1..21: note = Description of Artificial Sequence: Synthetic oligonucleotide
  source 1..21: mol_type = other DNA
tgggcatctacccgggaatcc

SEQ ID NO: 11892 - protein, 7 aa, synthetic construct
  REGION 1..7: note = Description of Artificial Sequence: Synthetic peptide
WASTRES

SEQ ID NO: 11893 - DNA, 21 bp, synthetic construct
  misc_feature 1..21: note = Description of Artificial Sequence: Synthetic oligonucleotide
  source 1..21: mol_type = other DNA
tgggcatctacccgggaatcc

SEQ ID NO: 11894 - protein, 7 aa, synthetic construct
  REGION 1..7: note = Description of Artificial Sequence: Synthetic peptide
WASTRES

SEQ ID NO: 11895 - DNA, 21 bp, synthetic construct
  misc_feature 1..21: note = Description of Artificial Sequence: Synthetic oligonucleotide
  source 1..21: mol_type = other DNA
tgggcatctacccgggaatcc

SEQ ID NO: 11896 - protein, 7 aa, synthetic construct
  REGION 1..7: note = Description of Artificial Sequence: Synthetic peptide
WASTRES

SEQ ID NO: 11897 - DNA, 21 bp, synthetic construct
  misc_feature 1..21: note = Description of Artificial Sequence: Synthetic oligonucleotide
  source 1..21: mol_type = other DNA
tgggcatctacccgggaatcc

SEQ ID NO: 11898 - protein, 7 aa, synthetic construct
  REGION 1..7: note = Description of Artificial Sequence: Synthetic peptide
WASTRES

SEQ ID NO: 11899 - DNA, 21 bp, synthetic construct
  misc_feature 1..21: note = Description of Artificial Sequence: Synthetic oligonucleotide
  source 1..21: mol_type = other DNA
tgggcatctacccgggaatcc

SEQ ID NO: 11900 - protein, 7 aa, synthetic construct
  REGION 1..7: note = Description of Artificial Sequence: Synthetic peptide
WASTRES

SEQ ID NO: 11901 - DNA, 21 bp, synthetic construct
  misc_feature 1..21: note = Description of Artificial Sequence: Synthetic oligonucleotide
  source 1..21: mol_type = other DNA
tgggcatctacccgggaatcc

SEQ ID NO: 11902 - protein, 7 aa, synthetic construct
  REGION 1..7: note = Description of Artificial Sequence: Synthetic peptide
WASTRES

SEQ ID NO: 11903 - DNA, 21 bp, synthetic construct
  misc_feature 1..21: note = Description of Artificial Sequence: Synthetic oligonucleotide
  source 1..21: mol_type = other DNA
tgggcatctacccgggaatcc

SEQ ID NO: 11904 - protein, 7 aa, synthetic construct
  REGION 1..7: note = Description of Artificial Sequence: Synthetic peptide
WASTRES

SEQ ID NO: 11905 - DNA, 21 bp, synthetic construct
  misc_feature 1..21: note = Description of Artificial Sequence: Synthetic oligonucleotide
  source 1..21: mol_type = other DNA
tgggcatctacccgggaatcc

SEQ ID NO: 11906 - protein, 7 aa, synthetic construct
  REGION 1..7: note = Description of Artificial Sequence: Synthetic peptide
WASTRES

SEQ ID NO: 11907 - DNA, 21 bp, synthetic construct
  misc_feature 1..21: note = Description of Artificial Sequence: Synthetic oligonucleotide
  source 1..21: mol_type = other DNA
tgggcatctacccgggaatcc

SEQ ID NO: 11908 - protein, 7 aa, synthetic construct
  REGION 1..7: note = Description of Artificial Sequence: Synthetic peptide
WASTRES

SEQ ID NO: 11909 - DNA, 21 bp, synthetic construct
  misc_feature 1..21: note = Description of Artificial Sequence: Synthetic oligonucleotide
  source 1..21: mol_type = other DNA
tgggcatctacccgggaatcc

SEQ ID NO: 11910 - protein, 7 aa, synthetic construct
  REGION 1..7: note = Description of Artificial Sequence: Synthetic peptide
WASTRES

SEQ ID NO: 11911 - DNA, 21 bp, synthetic construct
  misc_feature 1..21: note = Description of Artificial Sequence: Synthetic oligonucleotide
  source 1..21: mol_type = other DNA
tgggcatctacccgggaatcc

SEQ ID NO: 11912 - protein, 7 aa, synthetic construct
  REGION 1..7: note = Description of Artificial Sequence: Synthetic peptide
WASTRES

SEQ ID NO: 11913 - DNA, 21 bp, synthetic construct
  misc_feature 1..21: note = Description of Artificial Sequence: Synthetic oligonucleotide
  source 1..21: mol_type = other DNA
tgggcatctacccgggaatcc

SEQ ID NO: 11914 - protein, 7 aa, synthetic construct
  REGION 1..7: note = Description of Artificial Sequence: Synthetic peptide
WASTRES

SEQ ID NO: 11915 - DNA, 21 bp, synthetic construct
  misc_feature 1..21: note = Description of Artificial Sequence: Synthetic oligonucleotide
  source 1..21: mol_type = other DNA
tgggcatctacccgggaatcc

SEQ ID NO: 11916 - protein, 7 aa, synthetic construct
  REGION 1..7: note = Description of Artificial Sequence: Synthetic peptide
WASTRES

SEQ ID NO: 11917 - DNA, 21 bp, synthetic construct
  misc_feature 1..21: note = Description of Artificial Sequence: Synthetic oligonucleotide
  source 1..21: mol_type = other DNA
tgggcatctacccgggaatcc

SEQ ID NO: 11918 - protein, 7 aa, synthetic construct
  REGION 1..7: note = Description of Artificial Sequence: Synthetic peptide
WASTRES

SEQ ID NO: 11919 - DNA, 21 bp, synthetic construct
  misc_feature 1..21: note = Description of Artificial Sequence: Synthetic oligonucleotide
  source 1..21: mol_type = other DNA
tgggcatctacccgggaatcc

SEQ ID NO: 11920 - protein, 7 aa, synthetic construct
  REGION 1..7: note = Description of Artificial Sequence: Synthetic peptide
WASTRES

SEQ ID NO: 11921 - DNA, 21 bp, synthetic construct
  misc_feature 1..21: note = Description of Artificial Sequence: Synthetic oligonucleotide
  source 1..21: mol_type = other DNA
tgggcatctacccgggaatcc

SEQ ID NO: 11922 - protein, 7 aa, synthetic construct
  REGION 1..7: note = Description of Artificial Sequence: Synthetic peptide
WASTRES

SEQ ID NO: 11923 - DNA, 21 bp, synthetic construct
  misc_feature 1..21: note = Description of Artificial Sequence: Synthetic oligonucleotide
  source 1..21: mol_type = other DNA
tgggcatctacccgggaatcc

SEQ ID NO: 11924 - protein, 7 aa, synthetic construct
  REGION 1..7: note = Description of Artificial Sequence: Synthetic peptide
WASTRES

SEQ ID NO: 11925 - DNA, 21 bp, synthetic construct
  misc_feature 1..21: note = Description of Artificial Sequence: Synthetic oligonucleotide
  source 1..21: mol_type = other DNA
tgggcatctacccgggaatcc

SEQ ID NO: 11926 - protein, 7 aa, synthetic construct
  REGION 1..7: note = Description of Artificial Sequence: Synthetic peptide
WASTRES

SEQ ID NO: 11927 - DNA, 21 bp, synthetic construct
  misc_feature 1..21: note = Description of Artificial Sequence: Synthetic oligonucleotide
  source 1..21: mol_type = other DNA
tgggcatctacccgggaatcc

SEQ ID NO: 11928 - protein, 7 aa, synthetic construct
  REGION 1..7: note = Description of Artificial Sequence: Synthetic peptide
WASTRES

SEQ ID NO: 11929 - DNA, 21 bp, synthetic construct
  misc_feature 1..21: note = Description of Artificial Sequence: Synthetic oligonucleotide
  source 1..21: mol_type = other DNA
tgggcatctacccgggaatcc

SEQ ID NO: 11930 - protein, 7 aa, synthetic construct
  REGION 1..7: note = Description of Artificial Sequence: Synthetic peptide
WASTRES

SEQ ID NO: 11931 - DNA, 21 bp, synthetic construct
  misc_feature 1..21: note = Description of Artificial Sequence: Synthetic oligonucleotide
  source 1..21: mol_type = other DNA
tgggcatctacccgggaatcc

SEQ ID NO: 11932 - protein, 7 aa, synthetic construct
  REGION 1..7: note = Description of Artificial Sequence: Synthetic peptide
WASTRES

SEQ ID NO: 11933 - DNA, 21 bp, synthetic construct
  misc_feature 1..21: note = Description of Artificial Sequence: Synthetic oligonucleotide
  source 1..21: mol_type = other DNA
tgggcatctacccgggaatcc

SEQ ID NO: 11934 - protein, 7 aa, synthetic construct
  REGION 1..7: note = Description of Artificial Sequence: Synthetic peptide
WASTRES

SEQ ID NO: 11935 - DNA, 21 bp, synthetic construct
  misc_feature 1..21: note = Description of Artificial Sequence: Synthetic oligonucleotide
  source 1..21: mol_type = other DNA
tgggcatctacccgggaatcc

SEQ ID NO: 11936 - protein, 7 aa, synthetic construct
  REGION 1..7: note = Description of Artificial Sequence: Synthetic peptide
WASTRES

SEQ ID NO: 11937 - DNA, 21 bp, synthetic construct
  misc_feature 1..21: note = Description of Artificial Sequence: Synthetic oligonucleotide
  source 1..21: mol_type = other DNA
tgggcatctacccgggaatcc

SEQ ID NO: 11938 - protein, 7 aa, synthetic construct
  REGION 1..7: note = Description of Artificial Sequence: Synthetic peptide
WASTRES

SEQ ID NO: 11939 - DNA, 21 bp, synthetic construct
  misc_feature 1..21: note = Description of Artificial Sequence: Synthetic oligonucleotide
  source 1..21: mol_type = other DNA
tgggcatctacccgggaatcc

SEQ ID NO: 11940 - protein, 7 aa, synthetic construct
  REGION 1..7: note = Description of Artificial Sequence: Synthetic peptide
WASTRES

SEQ ID NO: 11941 - DNA, 21 bp, synthetic construct
  misc_feature 1..21: note = Description of Artificial Sequence: Synthetic oligonucleotide
  source 1..21: mol_type = other DNA
tgggcatctacccgggaatcc

SEQ ID NO: 11942 - protein, 7 aa, synthetic construct
  REGION 1..7: note = Description of Artificial Sequence: Synthetic peptide
WASTRES

SEQ ID NO: 11943 - DNA, 21 bp, synthetic construct
  misc_feature 1..21: note = Description of Artificial Sequence: Synthetic oligonucleotide
  source 1..21: mol_type = other DNA
tgggcatctacccgggaatcc

SEQ ID NO: 11944 - protein, 7 aa, synthetic construct
  REGION 1..7: note = Description of Artificial Sequence: Synthetic peptide
WASTRES

SEQ ID NO: 11945 - DNA, 21 bp, synthetic construct
  misc_feature 1..21: note = Description of Artificial Sequence: Synthetic oligonucleotide
  source 1..21: mol_type = other DNA
tgggcatctacccgggaatcc

SEQ ID NO: 11946 - protein, 7 aa, synthetic construct
  REGION 1..7: note = Description of Artificial Sequence: Synthetic peptide
WASTRES

SEQ ID NO: 11947 - DNA, 21 bp, synthetic construct
  misc_feature 1..21: note = Description of Artificial Sequence: Synthetic oligonucleotide
  source 1..21: mol_type = other DNA
ggtgcatccagtttgcaaagt

SEQ ID NO: 11948 - protein, 7 aa, synthetic construct
  REGION 1..7: note = Description of Artificial Sequence: Synthetic peptide
GASSLQS

SEQ ID NO: 11949 - DNA, 21 bp, synthetic construct
  misc_feature 1..21: note = Description of Artificial Sequence: Synthetic oligonucleotide
  source 1..21: mol_type = other DNA
ggtgcatccagtttgcaaagt

SEQ ID NO: 11950 - protein, 7 aa, synthetic construct
  REGION 1..7: note = Description of Artificial Sequence: Synthetic peptide
GASSLQS

SEQ ID NO: 11951 - DNA, 21 bp, synthetic construct
  misc_feature 1..21: note = Description of Artificial Sequence: Synthetic oligonucleotide
  source 1..21: mol_type = other DNA
ggtgcatccagtttgcaaagt

SEQ ID NO: 11952 - protein, 7 aa, synthetic construct
  REGION 1..7: note = Description of Artificial Sequence: Synthetic peptide
GASSLQS

SEQ ID NO: 11953 - DNA, 21 bp, synthetic construct
  misc_feature 1..21: note = Description of Artificial Sequence: Synthetic oligonucleotide
  source 1..21: mol_type = other DNA
ggtgcatccagtttgcaaagt

SEQ ID NO: 11954 - protein, 7 aa, synthetic construct
  REGION 1..7: note = Description of Artificial Sequence: Synthetic peptide
GASSLQS

SEQ ID NO: 11955 - DNA, 21 bp, synthetic construct
  misc_feature 1..21: note = Description of Artificial Sequence: Synthetic oligonucleotide
  source 1..21: mol_type = other DNA
ggtgcatccagtttgcaaagt

SEQ ID NO: 11956 - protein, 7 aa, synthetic construct
  REGION 1..7: note = Description of Artificial Sequence: Synthetic peptide
GASSLQS

SEQ ID NO: 11957 - DNA, 21 bp, synthetic construct
  misc_feature 1..21: note = Description of Artificial Sequence: Synthetic oligonucleotide
  source 1..21: mol_type = other DNA
ggtgcatccagtttgcaaagt

SEQ ID NO: 11958 - protein, 7 aa, synthetic construct
  REGION 1..7: note = Description of Artificial Sequence: Synthetic peptide
GASSLQS

SEQ ID NO: 11959 - DNA, 21 bp, synthetic construct
  misc_feature 1..21: note = Description of Artificial Sequence: Synthetic oligonucleotide
  source 1..21: mol_type = other DNA
ggtgcatccagtttgcaaagt

SEQ ID NO: 11960 - protein, 7 aa, synthetic construct
  REGION 1..7: note = Description of Artificial Sequence: Synthetic peptide
GASSLQS

SEQ ID NO: 11961 - DNA, 21 bp, synthetic construct
  misc_feature 1..21: note = Description of Artificial Sequence: Synthetic oligonucleotide
  source 1..21: mol_type = other DNA
ggtgcatccagtttgcaaagt

SEQ ID NO: 11962 - protein, 7 aa, synthetic construct
  REGION 1..7: note = Description of Artificial Sequence: Synthetic peptide
GASSLQS

SEQ ID NO: 11963 - DNA, 21 bp, synthetic construct
  misc_feature 1..21: note = Description of Artificial Sequence: Synthetic oligonucleotide
  source 1..21: mol_type = other DNA
gctgcatccagtttgcaaagt

SEQ ID NO: 11964 - protein, 7 aa, synthetic construct
  REGION 1..7: note = Description of Artificial Sequence: Synthetic peptide
AASSLQS

SEQ ID NO: 11965 - DNA, 21 bp, synthetic construct
  misc_feature 1..21: note = Description of Artificial Sequence: Synthetic oligonucleotide
  source 1..21: mol_type = other DNA
gctgcatccagtttgcaaagt

SEQ ID NO: 11966 - protein, 7 aa, synthetic construct
  REGION 1..7: note = Description of Artificial Sequence: Synthetic peptide
AASSLQS

SEQ ID NO: 11967 - DNA, 21 bp, synthetic construct
  misc_feature 1..21: note = Description of Artificial Sequence: Synthetic oligonucleotide
  source 1..21: mol_type = other DNA
gctgcatccagtttgcaaagt

SEQ ID NO: 11968 - protein, 7 aa, synthetic construct
  REGION 1..7: note = Description of Artificial Sequence: Synthetic peptide
AASSLQS

SEQ ID NO: 11969 - DNA, 21 bp, synthetic construct
  misc_feature 1..21: note = Description of Artificial Sequence: Synthetic oligonucleotide
  source 1..21: mol_type = other DNA
gctgcatccagtttgcaaagt

SEQ ID NO: 11970 - protein, 7 aa, synthetic construct
  REGION 1..7: note = Description of Artificial Sequence: Synthetic peptide
AASSLQS

SEQ ID NO: 11971 - DNA, 21 bp, synthetic construct
  misc_feature 1..21: note = Description of Artificial Sequence: Synthetic oligonucleotide
  source 1..21: mol_type = other DNA
gctgcatccagtttgcaaagt

SEQ ID NO: 11972 - protein, 7 aa, synthetic construct
  REGION 1..7: note = Description of Artificial Sequence: Synthetic peptide
AASSLQS

SEQ ID NO: 11973 - DNA, 21 bp, synthetic construct
  misc_feature 1..21: note = Description of Artificial Sequence: Synthetic oligonucleotide
  source 1..21: mol_type = other DNA
gctgcatccagtttgcaaagt

SEQ ID NO: 11974 - protein, 7 aa, synthetic construct
  REGION 1..7: note = Description of Artificial Sequence: Synthetic peptide
AASSLQS

SEQ ID NO: 11975 - DNA, 21 bp, synthetic construct
  misc_feature 1..21: note = Description of Artificial Sequence: Synthetic oligonucleotide
  source 1..21: mol_type = other DNA
gctgcatccagtttgcaaagt

SEQ ID NO: 11976 - protein, 7 aa, synthetic construct
  REGION 1..7: note = Description of Artificial Sequence: Synthetic peptide
AASSLQS

SEQ ID NO: 11977 - DNA, 21 bp, synthetic construct
  misc_feature 1..21: note = Description of Artificial Sequence: Synthetic oligonucleotide
  source 1..21: mol_type = other DNA
gctgcatccagtttgcaaagt

SEQ ID NO: 11978 - protein, 7 aa, synthetic construct
  REGION 1..7: note = Description of Artificial Sequence: Synthetic peptide
AASSLQS

SEQ ID NO: 11979 - DNA, 21 bp, synthetic construct
  misc_feature 1..21: note = Description of Artificial Sequence: Synthetic oligonucleotide
  source 1..21: mol_type = other DNA
gctgcatccagtttgcaaagt

SEQ ID NO: 11980 - protein, 7 aa, synthetic construct
  REGION 1..7: note = Description of Artificial Sequence: Synthetic peptide
AASSLQS

SEQ ID NO: 11981 - DNA, 21 bp, synthetic construct
  misc_feature 1..21: note = Description of Artificial Sequence: Synthetic oligonucleotide
  source 1..21: mol_type = other DNA
gctgcatccagtttgcaaagt

SEQ ID NO: 11982 - protein, 7 aa, synthetic construct
  REGION 1..7: note = Description of Artificial Sequence: Synthetic peptide
AASSLQS

SEQ ID NO: 11983 - DNA, 21 bp, synthetic construct
  misc_feature 1..21: note = Description of Artificial Sequence: Synthetic oligonucleotide
  source 1..21: mol_type = other DNA
gctgcatccagtttgcaaagt

SEQ ID NO: 11984 - protein, 7 aa, synthetic construct
  REGION 1..7: note = Description of Artificial Sequence: Synthetic peptide
AASSLQS

SEQ ID NO: 11985 - DNA, 21 bp, synthetic construct
  misc_feature 1..21: note = Description of Artificial Sequence: Synthetic oligonucleotide
  source 1..21: mol_type = other DNA
gctgcatccagtttgcaaagt

SEQ ID NO: 11986 - protein, 7 aa, synthetic construct
  REGION 1..7: note = Description of Artificial Sequence: Synthetic peptide
AASSLQS

SEQ ID NO: 11987 - DNA, 21 bp, synthetic construct
  misc_feature 1..21: note = Description of Artificial Sequence: Synthetic oligonucleotide
  source 1..21: mol_type = other DNA
gctgcatccagtttgcaaagt

SEQ ID NO: 11988 - protein, 7 aa, synthetic construct
  REGION 1..7: note = Description of Artificial Sequence: Synthetic peptide
AASSLQS

SEQ ID NO: 11989 - DNA, 21 bp, synthetic construct
  misc_feature 1..21: note = Description of Artificial Sequence: Synthetic oligonucleotide
  source 1..21: mol_type = other DNA
gctgcatccagtttgcaaagt

SEQ ID NO: 11990 - protein, 7 aa, synthetic construct
  REGION 1..7: note = Description of Artificial Sequence: Synthetic peptide
AASSLQS

SEQ ID NO: 11991 - DNA, 21 bp, synthetic construct
  misc_feature 1..21: note = Description of Artificial Sequence: Synthetic oligonucleotide
  source 1..21: mol_type = other DNA
actgcatccagtttgcaaagt

SEQ ID NO: 11992 - protein, 7 aa, synthetic construct
  REGION 1..7: note = Description of Artificial Sequence: Synthetic peptide
TASSLQS

SEQ ID NO: 11993 - DNA, 21 bp, synthetic construct
  misc_feature 1..21: note = Description of Artificial Sequence: Synthetic oligonucleotide
  source 1..21: mol_type = other DNA
actgcatccagtttgcaaagt

SEQ ID NO: 11994 - protein, 7 aa, synthetic construct
  REGION 1..7: note = Description of Artificial Sequence: Synthetic peptide
TASSLQS

SEQ ID NO: 11995 - DNA, 21 bp, synthetic construct
  misc_feature 1..21: note = Description of Artificial Sequence: Synthetic oligonucleotide
  source 1..21: mol_type = other DNA
actgcatccagtttgcaaagt

SEQ ID NO: 11996 - protein, 7 aa, synthetic construct
  REGION 1..7: note = Description of Artificial Sequence: Synthetic peptide
TASSLQS

SEQ ID NO: 11997 - DNA, 21 bp, synthetic construct
  misc_feature 1..21: note = Description of Artificial Sequence: Synthetic oligonucleotide
  source 1..21: mol_type = other DNA
actgcatccagtttgcaaagt

SEQ ID NO: 11998 - protein, 7 aa, synthetic construct
  REGION 1..7: note = Description of Artificial Sequence: Synthetic peptide
TASSLQS

SEQ ID NO: 11999 - DNA, 21 bp, synthetic construct
  misc_feature 1..21: note = Description of Artificial Sequence: Synthetic oligonucleotide
  source 1..21: mol_type = other DNA
actgcatccagtttgcaaagt

SEQ ID NO: 12000 - protein, 7 aa, synthetic construct
  REGION 1..7: note = Description of Artificial Sequence: Synthetic peptide
TASSLQS

SEQ ID NO: 12001 - DNA, 21 bp, synthetic construct
  misc_feature 1..21: note = Description of Artificial Sequence: Synthetic oligonucleotide
  source 1..21: mol_type = other DNA
actgcatccagtttgcaaagt

SEQ ID NO: 12002 - protein, 7 aa, synthetic construct
  REGION 1..7: note = Description of Artificial Sequence: Synthetic peptide
TASSLQS

SEQ ID NO: 12003 - DNA, 21 bp, synthetic construct
  misc_feature 1..21: note = Description of Artificial Sequence: Synthetic oligonucleotide
  source 1..21: mol_type = other DNA
actgcatccagtttgcaaagt

SEQ ID NO: 12004 - protein, 7 aa, synthetic construct
  REGION 1..7: note = Description of Artificial Sequence: Synthetic peptide
TASSLQS

SEQ ID NO: 12005 - DNA, 21 bp, synthetic construct
  misc_feature 1..21: note = Description of Artificial Sequence: Synthetic oligonucleotide
  source 1..21: mol_type = other DNA
actgcatccagtttgcaaagt

SEQ ID NO: 12006 - protein, 7 aa, synthetic construct
  REGION 1..7: note = Description of Artificial Sequence: Synthetic peptide
TASSLQS

SEQ ID NO: 12007 - DNA, 21 bp, synthetic construct
  misc_feature 1..21: note = Description of Artificial Sequence: Synthetic oligonucleotide
  source 1..21: mol_type = other DNA
actgcatccagtttgcaaagt

SEQ ID NO: 12008 - protein, 7 aa, synthetic construct
  REGION 1..7: note = Description of Artificial Sequence: Synthetic peptide
TASSLQS

SEQ ID NO: 12009 - DNA, 21 bp, synthetic construct
  misc_feature 1..21: note = Description of Artificial Sequence: Synthetic oligonucleotide
  source 1..21: mol_type = other DNA
actgcatccagtttgcaaagt

SEQ ID NO: 12010 - protein, 7 aa, synthetic construct
  REGION 1..7: note = Description of Artificial Sequence: Synthetic peptide
TASSLQS

SEQ ID NO: 12011 - DNA, 21 bp, synthetic construct
  misc_feature 1..21: note = Description of Artificial Sequence: Synthetic oligonucleotide
  source 1..21: mol_type = other DNA
actgcatccagtttgcaaagt

SEQ ID NO: 12012 - protein, 7 aa, synthetic construct
  REGION 1..7: note = Description of Artificial Sequence: Synthetic peptide
TASSLQS

SEQ ID NO: 12013 - DNA, 21 bp, synthetic construct
  misc_feature 1..21: note = Description of Artificial Sequence: Synthetic oligonucleotide
  source 1..21: mol_type = other DNA
actgcatccagtttgcaaagt

SEQ ID NO: 12014 - protein, 7 aa, synthetic construct
  REGION 1..7: note = Description of Artificial Sequence: Synthetic peptide
TASSLQS

SEQ ID NO: 12015 - DNA, 21 bp, synthetic construct
  misc_feature 1..21: note = Description of Artificial Sequence: Synthetic oligonucleotide
  source 1..21: mol_type = other DNA
actgcatccagtttgcaaagt

SEQ ID NO: 12016 - protein, 7 aa, synthetic construct
  REGION 1..7: note = Description of Artificial Sequence: Synthetic peptide
TASSLQS

SEQ ID NO: 12017 - DNA, 21 bp, synthetic construct
  misc_feature 1..21: note = Description of Artificial Sequence: Synthetic oligonucleotide
  source 1..21: mol_type = other DNA
actgcatccagtttgcaaagt

SEQ ID NO: 12018 - protein, 7 aa, synthetic construct
  REGION 1..7: note = Description of Artificial Sequence: Synthetic peptide
TASSLQS

SEQ ID NO: 12019 - DNA, 21 bp, synthetic construct
  misc_feature 1..21: note = Description of Artificial Sequence: Synthetic oligonucleotide
  source 1..21: mol_type = other DNA
actgcatccagtttgcaaagt

SEQ ID NO: 12020 - protein, 7 aa, synthetic construct
  REGION 1..7: note = Description of Artificial Sequence: Synthetic peptide
TASSLQS

SEQ ID NO: 12021 - DNA, 21 bp, synthetic construct
  misc_feature 1..21: note = Description of Artificial Sequence: Synthetic oligonucleotide
  source 1..21: mol_type = other DNA
actgcatccagtttgcaaagt

SEQ ID NO: 12022 - protein, 7 aa, synthetic construct
  REGION 1..7: note = Description of Artificial Sequence: Synthetic peptide
TASSLQS

SEQ ID NO: 12023 - DNA, 21 bp, synthetic construct
  misc_feature 1..21: note = Description of Artificial Sequence: Synthetic oligonucleotide
  source 1..21: mol_type = other DNA
actgcatccagtttgcaaagt

SEQ ID NO: 12024 - protein, 7 aa, synthetic construct
  REGION 1..7: note = Description of Artificial Sequence: Synthetic peptide
TASSLQS

SEQ ID NO: 12025 - DNA, 21 bp, synthetic construct
  misc_feature 1..21: note = Description of Artificial Sequence: Synthetic oligonucleotide
  source 1..21: mol_type = other DNA
actgcatccagtttgcaaagt

SEQ ID NO: 12026 - protein, 7 aa, synthetic construct
  REGION 1..7: note = Description of Artificial Sequence: Synthetic peptide
TASSLQS

SEQ ID NO: 12027 - DNA, 21 bp, synthetic construct
  misc_feature 1..21: note = Description of Artificial Sequence: Synthetic oligonucleotide
  source 1..21: mol_type = other DNA
actgcatccagtttgcaaagt

SEQ ID NO: 12028 - protein, 7 aa, synthetic construct
  REGION 1..7: note = Description of Artificial Sequence: Synthetic peptide
TASSLQS

SEQ ID NO: 12029 - DNA, 21 bp, synthetic construct
  misc_feature 1..21: note = Description of Artificial Sequence: Synthetic oligonucleotide
  source 1..21: mol_type = other DNA
actgcatccagtttgcaaagt

SEQ ID NO: 12030 - protein, 7 aa, synthetic construct
  REGION 1..7: note = Description of Artificial Sequence: Synthetic peptide
TASSLQS

SEQ ID NO: 12031 - DNA, 21 bp, synthetic construct
  misc_feature 1..21: note = Description of Artificial Sequence: Synthetic oligonucleotide
  source 1..21: mol_type = other DNA
actgcatccagtttgcaaagt

SEQ ID NO: 12032 - protein, 7 aa, synthetic construct
  REGION 1..7: note = Description of Artificial Sequence: Synthetic peptide
TASSLQS

SEQ ID NO: 12033 - DNA, 21 bp, synthetic construct
  misc_feature 1..21: note = Description of Artificial Sequence: Synthetic oligonucleotide
  source 1..21: mol_type = other DNA
ggtgtatctagttgggccact

SEQ ID NO: 12034 - protein, 7 aa, synthetic construct
  REGION 1..7: note = Description of Artificial Sequence: Synthetic peptide
GVSSWAT

SEQ ID NO: 12035 - DNA, 21 bp, synthetic construct
  misc_feature 1..21: note = Description of Artificial Sequence: Synthetic oligonucleotide
  source 1..21: mol_type = other DNA
ggtaacagcaatcggccctca

SEQ ID NO: 12036 - protein, 7 aa, synthetic construct
  REGION 1..7: note = Description of Artificial Sequence: Synthetic peptide
GNSNRPS

SEQ ID NO: 12037 - DNA, 21 bp, synthetic construct
  misc_feature 1..21: note = Description of Artificial Sequence: Synthetic oligonucleotide
  source 1..21: mol_type = other DNA
aaggtttctaactgggactct

SEQ ID NO: 12038 - protein, 7 aa, synthetic construct
  REGION 1..7: note = Description of Artificial Sequence: Synthetic peptide
KVSNWDS

SEQ ID NO: 12039 - DNA, 21 bp, synthetic construct
  misc_feature 1..21: note = Description of Artificial Sequence: Synthetic oligonucleotide
  source 1..21: mol_type = other DNA
tgggcatctacccgggaatcc

SEQ ID NO: 12040 - protein, 7 aa, synthetic construct
  REGION 1..7: note = Description of Artificial Sequence: Synthetic peptide
WASTRES

SEQ ID NO: 12041 - DNA, 21 bp, synthetic construct
  misc_feature 1..21: note = Description of Artificial Sequence: Synthetic oligonucleotide
  source 1..21: mol_type = other DNA
ggtgcatccagtttgcaaagt

SEQ ID NO: 12042 - protein, 7 aa, synthetic construct
  REGION 1..7: note = Description of Artificial Sequence: Synthetic peptide
GASSLQS

SEQ ID NO: 12043 - DNA, 21 bp, synthetic construct
  misc_feature 1..21: note = Description of Artificial Sequence: Synthetic oligonucleotide
  source 1..21: mol_type = other DNA
actgcatccagtttgcaaagt

SEQ ID NO: 12044 - protein, 7 aa, synthetic construct
  REGION 1..7: note = Description of Artificial Sequence: Synthetic peptide
TASSLQS

SEQ ID NO: 12045 - DNA, 21 bp, synthetic construct
  misc_feature 1..21: note = Description of Artificial Sequence: Synthetic oligonucleotide
  source 1..21: mol_type = other DNA
tgggcatctacccgggaatcc

SEQ ID NO: 12046 - protein, 7 aa, synthetic construct
  REGION 1..7: note = Description of Artificial Sequence: Synthetic peptide
WASTRES

SEQ ID NO: 12047 - DNA, 21 bp, synthetic construct
  misc_feature 1..21: note = Description of Artificial Sequence: Synthetic oligonucleotide
  source 1..21: mol_type = other DNA
tggacatctacccgggaatcc

SEQ ID NO: 12048 - protein, 7 aa, synthetic construct
  REGION 1..7: note = Description of Artificial Sequence: Synthetic peptide
WTSTRES

SEQ ID NO: 12049 - DNA, 21 bp, synthetic construct
  misc_feature 1..21: note = Description of Artificial Sequence: Synthetic oligonucleotide
  source 1..21: mol_type = other DNA
ggtgcatccaccagggccact

SEQ ID NO: 12050 - protein, 7 aa, synthetic construct
  REGION 1..7: note = Description of Artificial Sequence: Synthetic peptide
GASTRAT

SEQ ID NO: 12051 - DNA, 21 bp, synthetic construct
  misc_feature 1..21: note = Description of Artificial Sequence: Synthetic oligonucleotide
  source 1..21: mol_type = other DNA
actgcatccagtttgcaaagt

SEQ ID NO: 12052 - protein, 7 aa, synthetic construct
  REGION 1..7: note = Description of Artificial Sequence: Synthetic peptide
TASSLQS

SEQ ID NO: 12053 - DNA, 21 bp, synthetic construct
  misc_feature 1..21: note = Description of Artificial Sequence: Synthetic oligonucleotide
  source 1..21: mol_type = other DNA
caagatagcaagcggccctca

SEQ ID NO: 12054 - protein, 7 aa, synthetic construct
  REGION 1..7: note = Description of Artificial Sequence: Synthetic peptide
QDSKRPS

SEQ ID NO: 12055 - DNA, 21 bp, synthetic construct
  misc_feature 1..21: note = Description of Artificial Sequence: Synthetic oligonucleotide
  source 1..21: mol_type = other DNA
caagatagtaagcggccctca

SEQ ID NO: 12056 - protein, 7 aa, synthetic construct
  REGION 1..7: note = Description of Artificial Sequence: Synthetic peptide
QDSKRPS

SEQ ID NO: 12057 - DNA, 21 bp, synthetic construct
  misc_feature 1..21: note = Description of Artificial Sequence: Synthetic oligonucleotide
  source 1..21: mol_type = other DNA
agtaatgatcagcggccctca

SEQ ID NO: 12058 - protein, 7 aa, synthetic construct
  REGION 1..7: note = Description of Artificial Sequence: Synthetic peptide
SNDQRPS

SEQ ID NO: 12059 - DNA, 21 bp, synthetic construct
  misc_feature 1..21: note = Description of Artificial Sequence: Synthetic oligonucleotide
  source 1..21: mol_type = other DNA
agtaatgatcagcggccctca

SEQ ID NO: 12060 - protein, 7 aa, synthetic construct
  REGION 1..7: note = Description of Artificial Sequence: Synthetic peptide
SNDQRPS

SEQ ID NO: 12061 - DNA, 21 bp, synthetic construct
  misc_feature 1..21: note = Description of Artificial Sequence: Synthetic oligonucleotide
  source 1..21: mol_type = other DNA
agtaatgatcagcggccctca

SEQ ID NO: 12062 - protein, 7 aa, synthetic construct
  REGION 1..7: note = Description of Artificial Sequence: Synthetic peptide
SNDQRPS

SEQ ID NO: 12063 - DNA, 21 bp, synthetic construct
  misc_feature 1..21: note = Description of Artificial Sequence: Synthetic oligonucleotide
  source 1..21: mol_type = other DNA
caagataacaggcggccgtca

SEQ ID NO: 12064 - protein, 7 aa, synthetic construct
  REGION 1..7: note = Description of Artificial Sequence: Synthetic peptide
QDNRRPS

SEQ ID NO: 12065 - DNA, 21 bp, synthetic construct
  misc_feature 1..21: note = Description of Artificial Sequence: Synthetic oligonucleotide
  source 1..21: mol_type = other DNA
caagatcgcaagcggccctca

SEQ ID NO: 12066 - protein, 7 aa, synthetic construct
  REGION 1..7: note = Description of Artificial Sequence: Synthetic peptide
QDRKRPS

SEQ ID NO: 12067 - DNA, 21 bp, synthetic construct
  misc_feature 1..21: note = Description of Artificial Sequence: Synthetic oligonucleotide
  source 1..21: mol_type = other DNA
gctgcatccagtttgcaaagt

SEQ ID NO: 12068 - protein, 7 aa, synthetic construct
  REGION 1..7: note = Description of Artificial Sequence: Synthetic peptide
AASSLQS

SEQ ID NO: 12069 - DNA, 21 bp, synthetic construct
  misc_feature 1..21: note = Description of Artificial Sequence: Synthetic oligonucleotide
  source 1..21: mol_type = other DNA
tgggcatctacccgggaatcc

SEQ ID NO: 12070 - protein, 7 aa, synthetic construct
  REGION 1..7: note = Description of Artificial Sequence: Synthetic peptide
WASTRES

SEQ ID NO: 12071 - DNA, 21 bp, synthetic construct
  misc_feature 1..21: note = Description of Artificial Sequence: Synthetic oligonucleotide
  source 1..21: mol_type = other DNA
ggtgcatccaccagggccact

SEQ ID NO: 12072 - protein, 7 aa, synthetic construct
  REGION 1..7: note = Description of Artificial Sequence: Synthetic peptide
GASTRAT

SEQ ID NO: 12073 - DNA, 21 bp, synthetic construct
  misc_feature 1..21: note = Description of Artificial Sequence: Synthetic oligonucleotide
  source 1..21: mol_type = other DNA
gctgcatccagtttgcaaagt

SEQ ID NO: 12074 - protein, 7 aa, synthetic construct
  REGION 1..7: note = Description of Artificial Sequence: Synthetic peptide
AASSLQS

SEQ ID NO: 12075 - DNA, 21 bp, synthetic construct
  misc_feature 1..21: note = Description of Artificial Sequence: Synthetic oligonucleotide
  source 1..21: mol_type = other DNA
ggggcatccagcagggccact

SEQ ID NO: 12076 - protein, 7 aa, synthetic construct
  REGION 1..7: note = Description of Artificial Sequence: Synthetic peptide
GASSRAT

SEQ ID NO: 12077 - DNA, 21 bp, synthetic construct
  misc_feature 1..21: note = Description of Artificial Sequence: Synthetic oligonucleotide
  source 1..21: mol_type = other DNA
tggacatctacccgggaatcc

SEQ ID NO: 12078 - protein, 7 aa, synthetic construct
  REGION 1..7: note = Description of Artificial Sequence: Synthetic peptide
WTSTRES

SEQ ID NO: 12079 - DNA, 21 bp, synthetic construct
  misc_feature 1..21: note = Description of Artificial Sequence: Synthetic oligonucleotide
  source 1..21: mol_type = other DNA
tggacatctacccgggaatcc

SEQ ID NO: 12080 - protein, 7 aa, synthetic construct
  REGION 1..7: note = Description of Artificial Sequence: Synthetic peptide
WTSTRES

SEQ ID NO: 12081 - DNA, 21 bp, synthetic construct
  misc_feature 1..21: note = Description of Artificial Sequence: Synthetic oligonucleotide
  source 1..21: mol_type = other DNA
tgggcatctactcgggaatcc

SEQ ID NO: 12082 - protein, 7 aa, synthetic construct
  REGION 1..7: note = Description of Artificial Sequence: Synthetic peptide
WASTRES

SEQ ID NO: 12083 - DNA, 21 bp, synthetic construct
  misc_feature 1..21: note = Description of Artificial Sequence: Synthetic oligonucleotide
  source 1..21: mol_type = other DNA
tgggcatctacccgggaatcc

SEQ ID NO: 12084 - protein, 7 aa, synthetic construct
  REGION 1..7: note = Description of Artificial Sequence: Synthetic peptide
WASTRES

SEQ ID NO: 12085 - DNA, 21 bp, synthetic construct
  misc_feature 1..21: note = Description of Artificial Sequence: Synthetic oligonucleotide
  source 1..21: mol_type = other DNA
tgggcatctacccgggaatcc

SEQ ID NO: 12086 - protein, 7 aa, synthetic construct
  REGION 1..7: note = Description of Artificial Sequence: Synthetic peptide
WASTRES

SEQ ID NO: 12087 - DNA, 21 bp, synthetic construct
  misc_feature 1..21: note = Description of Artificial Sequence: Synthetic oligonucleotide
  source 1..21: mol_type = other DNA
gctgcatccagtttgcaaagt

SEQ ID NO: 12088 - protein, 7 aa, synthetic construct
  REGION 1..7: note = Description of Artificial Sequence: Synthetic peptide
AASSLQS

SEQ ID NO: 12089 - DNA, 21 bp, synthetic construct
  misc_feature 1..21: note = Description of Artificial Sequence: Synthetic oligonucleotide
  source 1..21: mol_type = other DNA
gctgcatccagtttgcaaagt

SEQ ID NO: 12090 - protein, 7 aa, synthetic construct
  REGION 1..7: note = Description of Artificial Sequence: Synthetic peptide
AASSLQS

SEQ ID NO: 12091 - DNA, 21 bp, synthetic construct
  misc_feature 1..21: note = Description of Artificial Sequence: Synthetic oligonucleotide
  source 1..21: mol_type = other DNA
actgcatccagtttgcaaagt

SEQ ID NO: 12092 - protein, 7 aa, synthetic construct
  REGION 1..7: note = Description of Artificial Sequence: Synthetic peptide
TASSLQS

SEQ ID NO: 12093 - DNA, 21 bp, synthetic construct
  misc_feature 1..21: note = Description of Artificial Sequence: Synthetic oligonucleotide
  source 1..21: mol_type = other DNA
gctgcatccagattgcaaagt

SEQ ID NO: 12094 - protein, 7 aa, synthetic construct
  REGION 1..7: note = Description of Artificial Sequence: Synthetic peptide
AASRLQS

SEQ ID NO: 12095 - DNA, 21 bp, synthetic construct
  misc_feature 1..21: note = Description of Artificial Sequence: Synthetic oligonucleotide
  source 1..21: mol_type = other DNA
gctgcatccagtttgcaaagt

SEQ ID NO: 12096 - protein, 7 aa, synthetic construct
  REGION 1..7: note = Description of Artificial Sequence: Synthetic peptide
AASSLQS

SEQ ID NO: 12097 - DNA, 21 bp, synthetic construct
  misc_feature 1..21: note = Description of Artificial Sequence: Synthetic oligonucleotide
  source 1..21: mol_type = other DNA
gctgcatccagtttgcaaagt

SEQ ID NO: 12098 - protein, 7 aa, synthetic construct
  REGION 1..7: note = Description of Artificial Sequence: Synthetic peptide
AASSLQS

SEQ ID NO: 12099 - DNA, 51 bp, synthetic construct
  misc_feature 1..51: note = Description of Artificial Sequence: Synthetic oligonucleotide
  source 1..51: mol_type = other DNA
gttatatcatatgttggaagtaataaatactatgcagactccgtgaagggc

SEQ ID NO: 12100 - protein, 17 aa, synthetic construct
  REGION 1..17: note = Description of Artificial Sequence: Synthetic peptide
VISYVGSNKYYADSVKG

SEQ ID NO: 12101 - DNA, 51 bp, synthetic construct
  misc_feature 1..51: note = Description of Artificial Sequence: Synthetic oligonucleotide
  source 1..51: mol_type = other DNA
tggatgacccctaacagtggtaacacaggctatgcacagaagttccagggc

SEQ ID NO: 12102 - protein, 17 aa, synthetic construct
  REGION 1..17: note = Description of Artificial Sequence: Synthetic peptide
WMTPNSGNTGYAQKFQG

SEQ ID NO: 12103 - DNA, 51 bp, synthetic construct
  misc_feature 1..51: note = Description of Artificial Sequence: Synthetic oligonucleotide
  source 1..51: mol_type = other DNA
tggatgaaccctaacagtggtaacacaggctatgcacagaagttccagggc

SEQ ID NO: 12104 - protein, 17 aa, synthetic construct
  REGION 1..17: note = Description of Artificial Sequence: Synthetic peptide
WMNPNSGNTGYAQKFQG

SEQ ID NO: 12105 - DNA, 51 bp, synthetic construct
  misc_feature 1..51: note = Description of Artificial Sequence: Synthetic oligonucleotide
  source 1..51: mol_type = other DNA
gttatatcatatgatggaagtaatgaatactatgcagactccgtgaagggc

SEQ ID NO: 12106 - protein, 17 aa, synthetic construct
  REGION 1..17: note = Description of Artificial Sequence: Synthetic peptide
VISYDGSNEYYADSVKG

SEQ ID NO: 12107 - DNA, 51 bp, synthetic construct
  misc_feature 1..51: note = Description of Artificial Sequence: Synthetic oligonucleotide
  source 1..51: mol_type = other DNA
tggatcagcgcttacaatggtaacacaaactatgcacagaagctccagggc

SEQ ID NO: 12108 - protein, 17 aa, synthetic construct
  REGION 1..17: note = Description of Artificial Sequence: Synthetic peptide
WISAYNGNTNYAQKLQG

SEQ ID NO: 12109 - DNA, 51 bp, synthetic construct
  misc_feature 1..51: note = Description of Artificial Sequence: Synthetic oligonucleotide
  source 1..51: mol_type = other DNA
gttatatggtttgatggcagtaataaatactatgtagactccgtgaaggac

SEQ ID NO: 12110 - protein, 17 aa, synthetic construct
  REGION 1..17: note = Description of Artificial Sequence: Synthetic peptide
VIWFDGSNKYYVDSVKD

SEQ ID NO: 12111 - DNA, 51 bp, synthetic construct
  misc_feature 1..51: note = Description of Artificial Sequence: Synthetic oligonucleotide
  source 1..51: mol_type = other DNA
tggatcaaccctaacaatggtggcacaagctatgcacagaagtttcaggac

SEQ ID NO: 12112 - protein, 17 aa, synthetic construct
  REGION 1..17: note = Description of Artificial Sequence: Synthetic peptide
WINPNNGGTSYAQKFQD

SEQ ID NO: 12113 - DNA, 48 bp, synthetic construct
  misc_feature 1..48: note = Description of Artificial Sequence: Synthetic oligonucleotide
  source 1..48: mol_type = other DNA
cgtatctataccagtgggagcaccgactacaacccctccctcaagagt

SEQ ID NO: 12114 - protein, 16 aa, synthetic construct
  REGION 1..16: note = Description of Artificial Sequence: Synthetic peptide
RIYTSGSTDYNPSLKS

SEQ ID NO: 12115 - DNA, 51 bp, synthetic construct
  misc_feature 1..51: note = Description of Artificial Sequence: Synthetic oligonucleotide
  source 1..51: mol_type = other DNA
tggatcaaccctaatagaaatggcacaaactatgcacagaagtttcagggc

SEQ ID NO: 12116 - protein, 17 aa, synthetic construct
  REGION 1..17: note = Description of Artificial Sequence: Synthetic peptide
WINPNRNGTNYAQKFQG

SEQ ID NO: 12117 - DNA, 51 bp, synthetic construct
  misc_feature 1..51: note = Description of Artificial Sequence: Synthetic oligonucleotide
  source 1..51: mol_type = other DNA
tggatcaaccctaacagaaatggcacaaactatgcacagaattttcagggc

SEQ ID NO: 12118 - protein, 17 aa, synthetic construct
  REGION 1..17: note = Description of Artificial Sequence: Synthetic peptide
WINPNRNGTNYAQNFQG

SEQ ID NO: 12119 - DNA, 48 bp, synthetic construct
  misc_feature 1..48: note = Description of Artificial Sequence: Synthetic oligonucleotide
  source 1..48: mol_type = other DNA
gaaatcaattatagtggaaggaccaacttcaacccgtccctcaagagt

SEQ ID NO: 12120 - protein, 16 aa, synthetic construct
  REGION 1..16: note = Description of Artificial Sequence: Synthetic peptide
EINYSGRTNFNPSLKS

SEQ ID NO: 12121 - DNA, 51 bp, synthetic construct
  misc_feature 1..51: note = Description of Artificial Sequence: Synthetic oligonucleotide
  source 1..51: mol_type = other DNA
gttatatggtatgatggaagtaataaatactatacagactccgttaagggc

SEQ ID NO: 12122 - protein, 17 aa, synthetic construct
  REGION 1..17: note = Description of Artificial Sequence: Synthetic peptide
VIWYDGSNKYYTDSVKG

SEQ ID NO: 12123 - DNA, 51 bp, synthetic construct
  misc_feature 1..51: note = Description of Artificial Sequence: Synthetic oligonucleotide
  source 1..51: mol_type = other DNA
gttatatggtatgatggaagtaataaatactatgcagactccgtgaagggc

SEQ ID NO: 12124 - protein, 17 aa, synthetic construct
  REGION 1..17: note = Description of Artificial Sequence: Synthetic peptide
VIWYDGSNKYYADSVKG

SEQ ID NO: 12125 - DNA, 51 bp, synthetic construct
  misc_feature 1..51: note = Description of Artificial Sequence: Synthetic oligonucleotide
  source 1..51: mol_type = other DNA
gttatatggtatgatggaagtaatgactactatgcagactccgtgaagggc

SEQ ID NO: 12126 - protein, 17 aa, synthetic construct
  REGION 1..17: note = Description of Artificial Sequence: Synthetic peptide
VIWYDGSNDYYADSVKG

SEQ ID NO: 12127 - DNA, 51 bp, synthetic construct
  misc_feature 1..51: note = Description of Artificial Sequence: Synthetic oligonucleotide
  source 1..51: mol_type = other DNA
attatatggtatgatggaagtaataaatactatgcagactccgtgaagggc

SEQ ID NO: 12128 - protein, 17 aa, synthetic construct
  REGION 1..17: note = Description of Artificial Sequence: Synthetic peptide
IIWYDGSNKYYADSVKG

SEQ ID NO: 12129 - DNA, 51 bp, synthetic construct
  misc_feature 1..51: note = Description of Artificial Sequence: Synthetic oligonucleotide
  source 1..51: mol_type = other DNA
gttatatggtatgatgtaagtaataaatactatggagactccgtgaagggc

SEQ ID NO: 12130 - protein, 17 aa, synthetic construct
  REGION 1..17: note = Description of Artificial Sequence: Synthetic peptide
VIWYDVSNKYYGDSVKG

SEQ ID NO: 12131 - DNA, 51 bp, synthetic construct
  misc_feature 1..51: note = Description of Artificial Sequence: Synthetic oligonucleotide
  source 1..51: mol_type = other DNA
tggatgaaccctaaaaggggtaacacaggctatgcacagaagttccagggc

SEQ ID NO: 12132 - protein, 17 aa, synthetic construct
  REGION 1..17: note = Description of Artificial Sequence: Synthetic peptide
WMNPKRGNTGYAQKFQG

SEQ ID NO: 12133 - DNA, 51 bp, synthetic construct
  misc_feature 1..51: note = Description of Artificial Sequence: Synthetic oligonucleotide
  source 1..51: mol_type = other DNA
gttatatggtatgatggaagtaataaatactatgtagactccgtgaagggc

SEQ ID NO: 12134 - protein, 17 aa, synthetic construct
  REGION 1..17: note = Description of Artificial Sequence: Synthetic peptide
VIWYDGSNKYYVDSVKG

SEQ ID NO: 12135 - DNA, 51 bp, synthetic construct
  misc_feature 1..51: note = Description of Artificial Sequence: Synthetic oligonucleotide
  source 1..51: mol_type = other DNA
gctatatggtatgatggaagcaataaatactatgcagactccgtgaagggc

SEQ ID NO: 12136 - protein, 17 aa, synthetic construct
  REGION 1..17: note = Description of Artificial Sequence: Synthetic peptide
AIWYDGSNKYYADSVKG

SEQ ID NO: 12137 - DNA, 51 bp, synthetic construct
  misc_feature 1..51: note = Description of Artificial Sequence: Synthetic oligonucleotide
  source 1..51: mol_type = other DNA
tggatcaaccctaatagtggtggcacaaactttgcacagaagtttcagggc

SEQ ID NO: 12138 - protein, 17 aa, synthetic construct
  REGION 1..17: note = Description of Artificial Sequence: Synthetic peptide
WINPNSGGTNFAQKFQG

SEQ ID NO: 12139 - DNA, 48 bp, synthetic construct; identical to SEQ ID NO: 12119
  misc_feature 1..48: note = Description of Artificial Sequence: Synthetic oligonucleotide
  source 1..48: mol_type = other DNA

SEQ ID NO: 12140 - protein, 16 aa, synthetic construct
  REGION 1..16: note = Description of Artificial Sequence: Synthetic peptide
EINYSGRTNFNPSLKS

SEQ ID NO: 12141 - DNA, 48 bp, synthetic construct; identical to SEQ ID NO: 12119
  misc_feature 1..48: note = Description of Artificial Sequence: Synthetic oligonucleotide
  source 1..48: mol_type = other DNA

SEQ ID NO: 12142 - protein, 16 aa, synthetic construct
  REGION 1..16: note = Description of Artificial Sequence: Synthetic peptide
EINYSGRTNFNPSLKS

SEQ ID NO: 12143 - DNA, 51 bp, synthetic construct
  misc_feature 1..51: note = Description of Artificial Sequence: Synthetic oligonucleotide
  source 1..51: mol_type = other DNA
gttatatcatatgatggaggttataaaaactatgcagactccgtgaagggc

SEQ ID NO: 12144 - protein, 17 aa, synthetic construct
  REGION 1..17: note = Description of Artificial Sequence: Synthetic peptide
VISYDGGYKNYADSVKG

SEQ ID NO: 12145 - DNA, 48 bp, synthetic construct; identical to SEQ ID NO: 12119
  misc_feature 1..48: note = Description of Artificial Sequence: Synthetic oligonucleotide
  source 1..48: mol_type = other DNA

SEQ ID NO: 12146 - protein, 16 aa, synthetic construct
  REGION 1..16: note = Description of Artificial Sequence: Synthetic peptide
EINYSGRTNFNPSLKS

SEQ ID NO: 12147 - DNA, 48 bp, synthetic construct
  misc_feature 1..48: note = Description of Artificial Sequence: Synthetic oligonucleotide
  source 1..48: mol_type = other DNA
tacatctattacagtgggagcacctactacaacccgtccctcaagagt

SEQ ID NO: 12148 - protein, 16 aa, synthetic construct
  REGION 1..16: note = Description of Artificial Sequence: Synthetic peptide
YIYYSGSTYYNPSLKS

SEQ ID NO: 12149 - DNA, 48 bp, synthetic construct; identical to SEQ ID NO: 12119
  misc_feature 1..48: note = Description of Artificial Sequence: Synthetic oligonucleotide
  source 1..48: mol_type = other DNA

SEQ ID NO: 12150 - protein, 16 aa, synthetic construct
  REGION 1..16: note = Description of Artificial Sequence: Synthetic peptide
EINYSGRTNFNPSLKS

SEQ ID NO: 12151 - DNA, 51 bp, synthetic construct
  misc_feature 1..51: note = Description of Artificial Sequence: Synthetic oligonucleotide
  source 1..51: mol_type = other DNA
gctatatggtatgatggaagtaataaatactatgcagactccgtgaagggc

SEQ ID NO: 12152 - protein, 17 aa, synthetic construct
  REGION 1..17: note = Description of Artificial Sequence: Synthetic peptide
AIWYDGSNKYYADSVKG

SEQ ID NO: 12153 - DNA, 51 bp, synthetic construct
  misc_feature 1..51: note = Description of Artificial Sequence: Synthetic oligonucleotide
  source 1..51: mol_type = other DNA
tccattagtggtagtagtagttacatatactacgcagactcagtgaagggc

SEQ ID NO: 12154 - protein, 17 aa, synthetic construct
  REGION 1..17: note = Description of Artificial Sequence: Synthetic peptide
SISGSSSYIYYADSVKG

SEQ ID NO: 12155 - DNA, 51 bp, synthetic construct
  misc_feature 1..51: note = Description of Artificial Sequence: Synthetic oligonucleotide
  source 1..51: mol_type = other DNA
tccattagtggtagtagcagttacatatactacgtagactcagtgaagggc

SEQ ID NO: 12156 - protein, 17 aa, synthetic construct
  REGION 1..17: note = Description of Artificial Sequence: Synthetic peptide
SISGSSSYIYYVDSVKG

SEQ ID NO: 12157 - DNA, 51 bp, synthetic construct
  misc_feature 1..51: note = Description of Artificial Sequence: Synthetic oligonucleotide
  source 1..51: mol_type = other DNA
gttcttagtggtagtggtggtagcacattctacgcagactccgtgaagggc

SEQ ID NO: 12158 - protein, 17 aa, synthetic construct
  REGION 1..17: note = Description of Artificial Sequence: Synthetic peptide
VLSGSGGSTFYADSVKG

SEQ ID NO: 12159 - DNA, 51 bp, synthetic construct
  misc_feature 1..51: note = Description of Artificial Sequence: Synthetic oligonucleotide
  source 1..51: mol_type = other DNA
tggatgcaccctaacagtggtaacacaggctatgcacagaagttccggggc

SEQ ID NO: 12160 - protein, 17 aa, synthetic construct
  REGION 1..17: note = Description of Artificial Sequence: Synthetic peptide
WMHPNSGNTGYAQKFRG

SEQ ID NO: 12161 - DNA, 51 bp, synthetic construct
  misc_feature 1..51: note = Description of Artificial Sequence: Synthetic oligonucleotide
  source 1..51: mol_type = other DNA
tggatgcaccctaacagtggtaacacaggctatgcacagaagttccagggc

SEQ ID NO: 12162 - protein, 17 aa, synthetic construct
  REGION 1..17: note = Description of Artificial Sequence: Synthetic peptide
WMHPNSGNTGYAQKFQG

SEQ ID NO: 12163 - DNA, 51 bp, synthetic construct; identical to SEQ ID NO: 12161
  misc_feature 1..51: note = Description of Artificial Sequence: Synthetic oligonucleotide
  source 1..51: mol_type = other DNA

SEQ ID NO: 12164 - protein, 17 aa, synthetic construct
  REGION 1..17: note = Description of Artificial Sequence: Synthetic peptide
WMHPNSGNTGYAQKFQG

SEQ ID NO: 12165 - DNA, 48 bp, synthetic construct
  misc_feature 1..48: note = Description of Artificial Sequence: Synthetic oligonucleotide
  source 1..48: mol_type = other DNA
agtatctattatagtgggagcgcctactccaacccgtccctcaagagt

SEQ ID NO: 12166 - protein, 16 aa, synthetic construct
  REGION 1..16: note = Description of Artificial Sequence: Synthetic peptide
SIYYSGSAYSNPSLKS

SEQ ID NO: 12167 - DNA, 51 bp, synthetic construct
  misc_feature 1..51: note = Description of Artificial Sequence: Synthetic oligonucleotide
  source 1..51: mol_type = other DNA
gttatatggtatgatggaagtaataagtactatgcagactccgtgaagggc

SEQ ID NO: 12168 - protein, 17 aa, synthetic construct
  REGION 1..17: note = Description of Artificial Sequence: Synthetic peptide
VIWYDGSNKYYADSVKG

SEQ ID NO: 12169 - DNA, 51 bp, synthetic construct; identical to SEQ ID NO: 12123
  misc_feature 1..51: note = Description of Artificial Sequence: Synthetic oligonucleotide
  source 1..51: mol_type = other DNA

SEQ ID NO: 12170 - protein, 17 aa, synthetic construct
  REGION 1..17: note = Description of Artificial Sequence: Synthetic peptide
VIWYDGSNKYYADSVKG

SEQ ID NO: 12171 - DNA, 51 bp, synthetic construct
  misc_feature 1..51: note = Description of Artificial Sequence: Synthetic oligonucleotide
  source 1..51: mol_type = other DNA
tggatcaaccctaacagaggtggcacaaactatgctcagaagtttcagggc

SEQ ID NO: 12172 - protein, 17 aa, synthetic construct
  REGION 1..17: note = Description of Artificial Sequence: Synthetic peptide
WINPNRGGTNYAQKFQG

SEQ ID NO: 12173 - DNA, 48 bp, synthetic construct
  misc_feature 1..48: note = Description of Artificial Sequence: Synthetic oligonucleotide
  source 1..48: mol_type = other DNA
ctcatttattggaaagatgatgagcgctacagcccatctctgaagagc

SEQ ID NO: 12174 - protein, 16 aa, synthetic construct
  REGION 1..16: note = Description of Artificial Sequence: Synthetic peptide
LIYWKDDERYSPSLKS

SEQ ID NO: 12175 - DNA, 51 bp, synthetic construct
  misc_feature 1..51: note = Description of Artificial Sequence: Synthetic oligonucleotide
  source 1..51: mol_type = other DNA
tggatcaacccttacagtggtggcacaaactatgcacagaagtttcagggc

SEQ ID NO: 12176 - protein, 17 aa, synthetic construct
  REGION 1..17: note = Description of Artificial Sequence: Synthetic peptide
WINPYSGGTNYAQKFQG

SEQ ID NO: 12177 - DNA, 48 bp, synthetic construct
  misc_feature 1..48: note = Description of Artificial Sequence: Synthetic oligonucleotide
  source 1..48: mol_type = other DNA
aatatctattatagtgggagcacctaccacaacccgtccctcaagagt

SEQ ID NO: 12178 - protein, 16 aa, synthetic construct
  REGION 1..16: note = Description of Artificial Sequence: Synthetic peptide
NIYYSGSTYHNPSLKS

SEQ ID NO: 12179 - DNA, 51 bp, synthetic construct; identical to SEQ ID NO: 12161
  misc_feature 1..51: note = Description of Artificial Sequence: Synthetic oligonucleotide
  source 1..51: mol_type = other DNA

SEQ ID NO: 12180 - protein, 17 aa, synthetic construct
  REGION 1..17: note = Description of Artificial Sequence: Synthetic peptide
WMHPNSGNTGYAQKFQG

SEQ ID NO: 12181 - DNA, 51 bp, synthetic construct
  misc_feature 1..51: note = Description of Artificial Sequence: Synthetic oligonucleotide
  source 1..51: mol_type = other DNA
tccataagtggtagtagtagttacttatactacccagactcagtgaagggc

SEQ ID NO: 12182 - protein, 17 aa, synthetic construct
  REGION 1..17: note = Description of Artificial Sequence: Synthetic peptide
SISGSSSYLYYPDSVKG

SEQ ID NO: 12183 - DNA, 51 bp, synthetic construct; identical to SEQ ID NO: 12181
  misc_feature 1..51: note = Description of Artificial Sequence: Synthetic oligonucleotide
  source 1..51: mol_type = other DNA

SEQ ID NO: 12184 - protein, 17 aa, synthetic construct
  REGION 1..17: note = Description of Artificial Sequence: Synthetic peptide
SISGSSSYLYYPDSVKG

SEQ ID NO: 12185 - DNA, 51 bp, synthetic construct
  misc_feature 1..51: note = Description of Artificial Sequence: Synthetic oligonucleotide
  source 1..51: mol_type = other DNA
gttatatggtatgatggaagtaataaatactatgcagactccgtgaaggtc

SEQ ID NO: 12186 - protein, 17 aa, synthetic construct
  REGION 1..17: note = Description of Artificial Sequence: Synthetic peptide
VIWYDGSNKYYADSVKV

SEQ ID NO: 12187 - DNA, 51 bp, synthetic construct; identical to SEQ ID NO: 12185
  misc_feature 1..51: note = Description of Artificial Sequence: Synthetic oligonucleotide
  source 1..51: mol_type = other DNA

SEQ ID NO: 12188 - protein, 17 aa, synthetic construct
  REGION 1..17: note = Description of Artificial Sequence: Synthetic peptide
VIWYDGSNKYYADSVKV

SEQ ID NO: 12189 - DNA, 51 bp, synthetic construct
  misc_feature 1..51: note = Description of Artificial Sequence: Synthetic oligonucleotide
  source 1..51: mol_type = other DNA
tggatccaccctaacagtggtggcacaaactatgcacagaagtttcagggc

SEQ ID NO: 12190 - protein, 17 aa, synthetic construct
  REGION 1..17: note = Description of Artificial Sequence: Synthetic peptide
WIHPNSGGTNYAQKFQG

SEQ ID NO: 12191 - DNA, 51 bp, synthetic construct; identical to SEQ ID NO: 12189
  misc_feature 1..51: note = Description of Artificial Sequence: Synthetic oligonucleotide
  source 1..51: mol_type = other DNA

SEQ ID NO: 12192 - protein, 17 aa, synthetic construct
  REGION 1..17: note = Description of Artificial Sequence: Synthetic peptide
WIHPNSGGTNYAQKFQG

SEQ ID NO: 12193 - DNA, 51 bp, synthetic construct
  misc_feature 1..51: note = Description of Artificial Sequence: Synthetic oligonucleotide
  source 1..51: mol_type = other DNA
tggatccaccctaacagtggtggcacaaactttgcacagaagtttcagggc

SEQ ID NO: 12194 - protein, 17 aa, synthetic construct
  REGION 1..17: note = Description of Artificial Sequence: Synthetic peptide
WIHPNSGGTNFAQKFQG

SEQ ID NO: 12195 - DNA, 51 bp, synthetic construct; identical to SEQ ID NO: 12193
  misc_feature 1..51: note = Description of Artificial Sequence: Synthetic oligonucleotide
  source 1..51: mol_type = other DNA

SEQ ID NO: 12196 - protein, 17 aa, synthetic construct
  REGION 1..17: note = Description of Artificial Sequence: Synthetic peptide
WIHPNSGGTNFAQKFQG

SEQ ID NO: 12197 - DNA, 51 bp, synthetic construct
  misc_feature 1..51: note = Description of Artificial Sequence: Synthetic oligonucleotide
  source 1..51: mol_type = other DNA
tggatcaaccctaacagtggtggcacaaactatgcacagaagtttcagggc

SEQ ID NO: 12198 - protein, 17 aa, synthetic construct
  REGION 1..17: note = Description of Artificial Sequence: Synthetic peptide
WINPNSGGTNYAQKFQG

SEQ ID NO: 12199 - DNA, 51 bp, synthetic construct; identical to SEQ ID NO: 12197
  misc_feature 1..51: note = Description of Artificial Sequence: Synthetic oligonucleotide
  source 1..51: mol_type = other DNA

SEQ ID NO: 12200 - protein, 17 aa, synthetic construct
  REGION 1..17: note = Description of Artificial Sequence: Synthetic peptide
WINPNSGGTNYAQKFQG

SEQ ID NO: 12201 - DNA, 51 bp, synthetic construct
  misc_feature 1..51: note = Description of Artificial Sequence: Synthetic oligonucleotide
  source 1..51: mol_type = other DNA
tcgatctaccgtaacagtggtggcacaaattatgcacagaagtttcagggc

SEQ ID NO: 12202 - protein, 17 aa, synthetic construct
  REGION 1..17: note = Description of Artificial Sequence: Synthetic peptide
SIYRNSGGTNYAQKFQG

SEQ ID NO: 12203 - DNA, 48 bp, synthetic construct
  misc_feature 1..48: note = Description of Artificial Sequence: Synthetic oligonucleotide
  source 1..48: mol_type = other DNA
ctcatttattggaatgatgataagcgctacagcccatctctgaagagc

SEQ ID NO: 12204 - protein, 16 aa, synthetic construct
  REGION 1..16: note = Description of Artificial Sequence: Synthetic peptide
LIYWNDDKRYSPSLKS

SEQ ID NO: 12205 - DNA, 48 bp, synthetic construct
  misc_feature 1..48: note = Description of Artificial Sequence: Synthetic oligonucleotide
  source 1..48: mol_type = other DNA
ttcatttattggagtgatgataagcgctacagcccatctctgaagagc

SEQ ID NO: 12206 - protein, 16 aa, synthetic construct
  REGION 1..16: note = Description of Artificial Sequence: Synthetic peptide
FIYWSDDKRYSPSLKS

SEQ ID NO: 12207 - DNA, 51 bp, synthetic construct
  misc_feature 1..51: note = Description of Artificial Sequence: Synthetic oligonucleotide
  source 1..51: mol_type = other DNA
tggatcaaccctaatagtggtggcacaaactatgcacagaagtttcagggc

SEQ ID NO: 12208 - protein, 17 aa, synthetic construct
  REGION 1..17: note = Description of Artificial Sequence: Synthetic peptide
WINPNSGGTNYAQKFQG

SEQ ID NO: 12209 - DNA, 48 bp, synthetic construct
  misc_feature 1..48: note = Description of Artificial Sequence: Synthetic oligonucleotide
  source 1..48: mol_type = other DNA
ctcatttattggaatgatgataaggtctacagcccatctctgaagagc

SEQ ID NO: 12210 - protein, 16 aa, synthetic construct
  REGION 1..16: note = Description of Artificial Sequence: Synthetic peptide
LIYWNDDKVYSPSLKS

SEQ ID NO: 12211 - DNA, 51 bp, synthetic construct; identical to SEQ ID NO: 12123
  misc_feature 1..51: note = Description of Artificial Sequence: Synthetic oligonucleotide
  source 1..51: mol_type = other DNA

SEQ ID NO: 12212 - protein, 17 aa, synthetic construct
  REGION 1..17: note = Description of Artificial Sequence: Synthetic peptide
VIWYDGSNKYYADSVKG

SEQ ID NO: 12213 - DNA, 48 bp, synthetic construct
  misc_feature 1..48: note = Description of Artificial Sequence: Synthetic oligonucleotide
  source 1..48: mol_type = other DNA
ctcatttattggaatgatgataagcgccacagcccatctctgaagagc

SEQ ID NO: 12214 - protein, 16 aa, synthetic construct
  REGION 1..16: note = Description of Artificial Sequence: Synthetic peptide
LIYWNDDKRHSPSLKS

SEQ ID NO: 12215 - DNA, 51 bp, synthetic construct
  misc_feature 1..51: note = Description of Artificial Sequence: Synthetic oligonucleotide
  source 1..51: mol_type = other DNA
actattagtgttggtggtggtagcacatactacgcagactccgtgaagggc

SEQ ID NO: 12216 - protein, 17 aa, synthetic construct
  REGION 1..17: note = Description of Artificial Sequence: Synthetic peptide
TISVGGGSTYYADSVKG

SEQ ID NO: 12217 - DNA, 51 bp, synthetic construct; identical to SEQ ID NO: 12197
  misc_feature 1..51: note = Description of Artificial Sequence: Synthetic oligonucleotide
  source 1..51: mol_type = other DNA

SEQ ID NO: 12218 - protein, 17 aa, synthetic construct
  REGION 1..17: note = Description of Artificial Sequence: Synthetic peptide
WINPNSGGTNYAQKFQG

SEQ ID NO: 12219 - DNA, 51 bp, synthetic construct
  misc_feature 1..51: note = Description of Artificial Sequence: Synthetic oligonucleotide
  source 1..51: mol_type = other DNA
gtcatatggtatgatggaaataataaatactatgtagactccgtgaagggc

SEQ ID NO: 12220 - protein, 17 aa, synthetic construct
  REGION 1..17: note = Description of Artificial Sequence: Synthetic peptide
VIWYDGNNKYYVDSVKG

SEQ ID NO: 12221 - DNA, 51 bp, synthetic construct
  misc_feature 1..51: note = Description of Artificial Sequence: Synthetic oligonucleotide
  source 1..51: mol_type = other DNA
tccattagtagtagtagtacttacatatactacgcagactcagtgaagggc

SEQ ID NO: 12222 - protein, 17 aa, synthetic construct
  REGION 1..17: note = Description of Artificial Sequence: Synthetic peptide
SISSSSTYIYYADSVKG

SEQ ID NO: 12223 - DNA, 48 bp, synthetic construct
  misc_feature 1..48: note = Description of Artificial Sequence: Synthetic oligonucleotide
  source 1..48: mol_type = other DNA
aatatctattatggtgggaacacctactacaacccgtccctcaagagt

SEQ ID NO: 12224 - protein, 16 aa, synthetic construct
  REGION 1..16: note = Description of Artificial Sequence: Synthetic peptide
NIYYGGNTYYNPSLKS

SEQ ID NO: 12225 - DNA, 51 bp, synthetic construct; identical to SEQ ID NO: 12153
  misc_feature 1..51: note = Description of Artificial Sequence: Synthetic oligonucleotide
  source 1..51: mol_type = other DNA

SEQ ID NO: 12226 - protein, 17 aa, synthetic construct
  REGION 1..17: note = Description of Artificial Sequence: Synthetic peptide
SISGSSSYIYYADSVKG

SEQ ID NO: 12227 - DNA, 51 bp, synthetic construct
  misc_feature 1..51: note = Description of Artificial Sequence: Synthetic oligonucleotide
  source 1..51: mol_type = other DNA
gttatatggtttgatggaagtaataaatactatgcagactccgtgaagggc

SEQ ID NO: 12228 - protein, 17 aa, synthetic construct
  REGION 1..17: note = Description of Artificial Sequence: Synthetic peptide
VIWFDGSNKYYADSVKG

SEQ ID NO: 12229 - DNA, 48 bp, synthetic construct
  misc_feature 1..48: note = Description of Artificial Sequence: Synthetic oligonucleotide
  source 1..48: mol_type = other DNA
aatatctattatagtgggactgcctactgtaattcgtccctcaagagt

SEQ ID NO: 12230 - protein, 16 aa, synthetic construct
  REGION 1..16: note = Description of Artificial Sequence: Synthetic peptide
NIYYSGTAYCNSSLKS

SEQ ID NO: 12231 - DNA, 51 bp, synthetic construct
  misc_feature 1..51: note = Description of Artificial Sequence: Synthetic oligonucleotide
  source 1..51: mol_type = other DNA
gttatttggtatgaagaaaataatcaatactatgcagactccgtgaagggc

SEQ ID NO: 12232 - protein, 17 aa, synthetic construct
  REGION 1..17: note = Description of Artificial Sequence: Synthetic peptide
VIWYEENNQYYADSVKG

SEQ ID NO: 12233 - DNA, 51 bp, synthetic construct
  misc_feature 1..51: note = Description of Artificial Sequence: Synthetic oligonucleotide
  source 1..51: mol_type = other DNA
tccattagtggtagtagtagtctcatatactacgcagactcagtgaagggc

SEQ ID NO: 12234 - protein, 17 aa, synthetic construct
  REGION 1..17: note = Description of Artificial Sequence: Synthetic peptide
SISGSSSLIYYADSVKG

SEQ ID NO: 12235 - DNA, 51 bp, synthetic construct; identical to SEQ ID NO: 12123
  misc_feature 1..51: note = Description of Artificial Sequence: Synthetic oligonucleotide
  source 1..51: mol_type = other DNA

SEQ ID NO: 12236 - protein, 17 aa, synthetic construct
  REGION 1..17: note = Description of Artificial Sequence: Synthetic peptide
VIWYDGSNKYYADSVKG

SEQ ID NO: 12237 - DNA, 54 bp, synthetic construct
  misc_feature 1..54: note = Description of Artificial Sequence: Synthetic oligonucleotide
  source 1..54: mol_type = other DNA
aggacatactacaggtccaagtggtataatgattatgcagtatctgtgaaaagt

SEQ ID NO: 12238 - protein, 18 aa, synthetic construct
  REGION 1..18: note = Description of Artificial Sequence: Synthetic peptide
RTYYRSKWYNDYAVSVKS

SEQ ID NO: 12239 - DNA, 48 bp, synthetic construct
  misc_feature 1..48: note = Description of Artificial Sequence: Synthetic oligonucleotide
  source 1..48: mol_type = other DNA
aatatctattatagtgggagcacctactacaatccgtccctcaagagt

SEQ ID NO: 12240 - protein, 16 aa, synthetic construct
  REGION 1..16: note = Description of Artificial Sequence: Synthetic peptide
NIYYSGSTYYNPSLKS

SEQ ID NO: 12241 - DNA, 51 bp, synthetic construct
  misc_feature 1..51: note = Description of Artificial Sequence: Synthetic oligonucleotide
  source 1..51: mol_type = other DNA
gttatatggtatgaggaaaataataaatattatgtagactccgtgaagggc

SEQ ID NO: 12242 - protein, 17 aa, synthetic construct
  REGION 1..17: note = Description of Artificial Sequence: Synthetic peptide
VIWYEENNKYYVDSVKG

SEQ ID NO: 12243 - DNA, 48 bp, synthetic construct
  misc_feature 1..48: note = Description of Artificial Sequence: Synthetic oligonucleotide
  source 1..48: mol_type = other DNA
aatatctattatagtgggtacacctactacaacccgtccctcaagagt

SEQ ID NO: 12244 - protein, 16 aa, synthetic construct
  REGION 1..16: note = Description of Artificial Sequence: Synthetic peptide
NIYYSGYTYYNPSLKS

SEQ ID NO: 12245 - DNA, 51 bp, synthetic construct; identical to SEQ ID NO: 12231
  misc_feature 1..51: note = Description of Artificial Sequence: Synthetic oligonucleotide
  source 1..51: mol_type = other DNA

SEQ ID NO: 12246 - protein, 17 aa, synthetic construct
  REGION 1..17: note = Description of Artificial Sequence: Synthetic peptide
VIWYEENNQYYADSVKG

SEQ ID NO: 12247 - DNA, 51 bp, synthetic construct; identical to SEQ ID NO: 12227
  misc_feature 1..51: note = Description of Artificial Sequence: Synthetic oligonucleotide
  source 1..51: mol_type = other DNA

SEQ ID NO: 12248 - protein, 17 aa, synthetic construct
  REGION 1..17: note = Description of Artificial Sequence: Synthetic peptide
VIWFDGSNKYYADSVKG

SEQ ID NO: 12249 - DNA, 54 bp, synthetic construct; identical to SEQ ID NO: 12237
  misc_feature 1..54: note = Description of Artificial Sequence: Synthetic oligonucleotide
  source 1..54: mol_type = other DNA

SEQ ID NO: 12250 - protein, 18 aa, synthetic construct
  REGION 1..18: note = Description of Artificial Sequence: Synthetic peptide
RTYYRSKWYNDYAVSVKS

SEQ ID NO: 12251 - DNA, 51 bp, synthetic construct
  misc_feature 1..51: note = Description of Artificial Sequence: Synthetic oligonucleotide
  source 1..51: mol_type = other DNA
cacattagtagtagtggtagtaccatatattacgcagactctgtgaagggc

SEQ ID NO: 12252 - protein, 17 aa, synthetic construct
  REGION 1..17: note = Description of Artificial Sequence: Synthetic peptide
HISSSGSTIYYADSVKG

SEQ ID NO: 12253 - DNA, 51 bp, synthetic construct
  misc_feature 1..51: note = Description of Artificial Sequence: Synthetic oligonucleotide
  source 1..51: mol_type = other DNA
gttattagtggtcgtggtggtaacacattctacgcagactccgtgaagggc

SEQ ID NO: 12254 - protein, 17 aa, synthetic construct
  REGION 1..17: note = Description of Artificial Sequence: Synthetic peptide
VISGRGGNTFYADSVKG

SEQ ID NO: 12255 - DNA, 51 bp, synthetic construct; identical to SEQ ID NO: 12231
  misc_feature 1..51: note = Description of Artificial Sequence: Synthetic oligonucleotide
  source 1..51: mol_type = other DNA

SEQ ID NO: 12256 - protein, 17 aa, synthetic construct
  REGION 1..17: note = Description of Artificial Sequence: Synthetic peptide
VIWYEENNQYYADSVKG

SEQ ID NO: 12257 - DNA, 48 bp, synthetic construct
  misc_feature 1..48: note = Description of Artificial Sequence: Synthetic oligonucleotide
  source 1..48: mol_type = other DNA
aatatttattatagtgggagcgcctacaacaacccgtccctcaagggt

SEQ ID NO: 12258 - protein, 16 aa, synthetic construct
  REGION 1..16: note = Description of Artificial Sequence: Synthetic peptide
NIYYSGSAYNNPSLKG

SEQ ID NO: 12259 - DNA, 51 bp, synthetic construct; identical to SEQ ID NO: 12231
  misc_feature 1..51: note = Description of Artificial Sequence: Synthetic oligonucleotide
  source 1..51: mol_type = other DNA

SEQ ID NO: 12260 - protein, 17 aa, synthetic construct
  REGION 1..17: note = Description of Artificial Sequence: Synthetic peptide
VIWYEENNQYYADSVKG

SEQ ID NO: 12261 - DNA, 51 bp, synthetic construct
  misc_feature 1..51: note = Description of Artificial Sequence: Synthetic oligonucleotide
  source 1..51: mol_type = other DNA
gttatatggtatgacggaagtgataaatactatgcagactccgtgaagggc

SEQ ID NO: 12262 - protein, 17 aa, synthetic construct
  REGION 1..17: note = Description of Artificial Sequence: Synthetic peptide
VIWYDGSDKYYADSVKG

SEQ ID NO: 12263 - DNA, 51 bp, synthetic construct
  misc_feature 1..51: note = Description of Artificial Sequence: Synthetic oligonucleotide
  source 1..51: mol_type = other DNA
gttatatggcatgatggaagtaataaatactatgcagactccgtgaagggc

SEQ ID NO: 12264 - protein, 17 aa, synthetic construct
  REGION 1..17: note = Description of Artificial Sequence: Synthetic peptide
VIWHDGSNKYYADSVKG

SEQ ID NO: 12265 - DNA, 51 bp, synthetic construct
  misc_feature 1..51: note = Description of Artificial Sequence: Synthetic oligonucleotide
  source 1..51: mol_type = other DNA
gttatatggtatgaggaaaataataaatactatgtagactccgtgaagggc

SEQ ID NO: 12266 - protein, 17 aa, synthetic construct
  REGION 1..17: note = Description of Artificial Sequence: Synthetic peptide
VIWYEENNKYYVDSVKG

SEQ ID NO: 12267 - DNA, 51 bp, synthetic construct
  misc_feature 1..51: note = Description of Artificial Sequence: Synthetic oligonucleotide
  source 1..51: mol_type = other DNA
gttattagtggccgtggtggtaacacattctacgcagactccgtgaagggc

SEQ ID NO: 12268 - protein, 17 aa, synthetic construct
  REGION 1..17: note = Description of Artificial Sequence: Synthetic peptide
VISGRGGNTFYADSVKG

SEQ ID NO: 12269 - DNA, 51 bp, synthetic construct
  misc_feature 1..51: note = Description of Artificial Sequence: Synthetic oligonucleotide
  source 1..51: mol_type = other DNA
gttatatggtatgatgtaactaataaatactatgcagactccgtgaagggc

SEQ ID NO: 12270 - protein, 17 aa, synthetic construct
  REGION 1..17: note = Description of Artificial Sequence: Synthetic peptide
VIWYDVTNKYYADSVKG

SEQ ID NO: 12271 - DNA, 48 bp, synthetic construct
  misc_feature 1..48: note = Description of Artificial Sequence: Synthetic oligonucleotide
  source 1..48: mol_type = other DNA
aatatctattatagtgggagcacctactacaacccgtccttcaagagt

SEQ ID NO: 12272 - protein, 16 aa, synthetic construct
  REGION 1..16: note = Description of Artificial Sequence: Synthetic peptide
NIYYSGSTYYNPSFKS

SEQ ID NO: 12273 - DNA, 51 bp, synthetic construct
  misc_feature 1..51: note = Description of Artificial Sequence: Synthetic oligonucleotide
  source 1..51: mol_type = other DNA
gttattagtggtagtggtggtagcacatactacgcagactccgtgaagggc

SEQ ID NO: 12274 - protein, 17 aa, synthetic construct
  REGION 1..17: note = Description of Artificial Sequence: Synthetic peptide
VISGSGGSTYYADSVKG

SEQ ID NO: 12275 - DNA, 51 bp, synthetic construct; identical to SEQ ID NO: 12231
  misc_feature 1..51: note = Description of Artificial Sequence: Synthetic oligonucleotide
  source 1..51: mol_type = other DNA

SEQ ID NO: 12276 - protein, 17 aa, synthetic construct
  REGION 1..17: note = Description of Artificial Sequence: Synthetic peptide
VIWYEENNQYYADSVKG

SEQ ID NO: 12277 - DNA, 51 bp, synthetic construct
  misc_feature 1..51: note = Description of Artificial Sequence: Synthetic oligonucleotide
  source 1..51: mol_type = other DNA
tccattagtggtagtagtactgacatatactacgcagactcagtgaagggc

SEQ ID NO: 12278 - protein, 17 aa, synthetic construct
  REGION 1..17: note = Description of Artificial Sequence: Synthetic peptide
SISGSSTDIYYADSVKG

SEQ ID NO: 12279 - DNA, 51 bp, synthetic construct
  misc_feature 1..51: note = Description of Artificial Sequence: Synthetic oligonucleotide
  source 1..51: mol_type = other DNA
gttatatggtatgatggaaataataaacactatgcagactccgtgaagggc

SEQ ID NO: 12280 - protein, 17 aa, synthetic construct
  REGION 1..17: note = Description of Artificial Sequence: Synthetic peptide
VIWYDGNNKHYADSVKG

SEQ ID NO: 12281 - DNA, 51 bp, synthetic construct; identical to SEQ ID NO: 12227
  misc_feature 1..51: note = Description of Artificial Sequence: Synthetic oligonucleotide
  source 1..51: mol_type = other DNA

SEQ ID NO: 12282 - protein, 17 aa, synthetic construct
  REGION 1..17: note = Description of Artificial Sequence: Synthetic peptide
VIWFDGSNKYYADSVKG

SEQ ID NO: 12283 - DNA, 51 bp, synthetic construct
  misc_feature 1..51: note = Description of Artificial Sequence: Synthetic oligonucleotide
  source 1..51: mol_type = other DNA
gttatatggtttgatggaagtaataaatactatgtagactccgtgaagggc

SEQ ID NO: 12284 - protein, 17 aa, synthetic construct
  REGION 1..17: note = Description of Artificial Sequence: Synthetic peptide
VIWFDGSNKYYVDSVKG

SEQ ID NO: 12285 - DNA, 51 bp, synthetic construct
  misc_feature 1..51: note = Description of Artificial Sequence: Synthetic oligonucleotide
  source 1..51: mol_type = other DNA
tacattagtaggagtagtagtaccatagactacgcagactctgtgaagggc

SEQ ID NO: 12286 - protein, 17 aa, synthetic construct
  REGION 1..17: note = Description of Artificial Sequence: Synthetic peptide
YISRSSSTIDYADSVKG

SEQ ID NO: 12287 - DNA, 51 bp, synthetic construct
  misc_feature 1..51: note = Description of Artificial Sequence: Synthetic oligonucleotide
  source 1..51: mol_type = other DNA
gttatatggtttgatggaagtgataaatactatgcagactccgtgaagggc

SEQ ID NO: 12288 - protein, 17 aa, synthetic construct
  REGION 1..17: note = Description of Artificial Sequence: Synthetic peptide
VIWFDGSDKYYADSVKG

SEQ ID NO: 12289 - DNA, 51 bp, synthetic construct
  misc_feature 1..51: note = Description of Artificial Sequence: Synthetic oligonucleotide
  source 1..51: mol_type = other DNA
gttataagtggtagtggtggttacacatacaacgcggactccgtgaagggc

SEQ ID NO: 12290 - protein, 17 aa, synthetic construct
  REGION 1..17: note = Description of Artificial Sequence: Synthetic peptide
VISGSGGYTYNADSVKG

SEQ ID NO: 12291 - DNA, 51 bp, synthetic construct
  misc_feature 1..51: note = Description of Artificial Sequence: Synthetic oligonucleotide
  source 1..51: mol_type = other DNA
gttatatggtatgagggaagtaataaatattatgtagactccgtgaggggc

SEQ ID NO: 12292 - protein, 17 aa, synthetic construct
  REGION 1..17: note = Description of Artificial Sequence: Synthetic peptide
VIWYEGSNKYYVDSVRG

SEQ ID NO: 12293 - DNA, 51 bp, synthetic construct
  misc_feature 1..51: note = Description of Artificial Sequence: Synthetic oligonucleotide
  source 1..51: mol_type = other DNA
attattagtggtcgtggtggtaacacattctacgcagactccgtgaagggc

SEQ ID NO: 12294 - protein, 17 aa, synthetic construct
  REGION 1..17: note = Description of Artificial Sequence: Synthetic peptide
IISGRGGNTFYADSVKG

SEQ ID NO: 12295 - DNA, 51 bp, synthetic construct
  misc_feature 1..51: note = Description of Artificial Sequence: Synthetic oligonucleotide
  source 1..51: mol_type = other DNA
gttattagtggtagaggtggtaacacatactccgcagactccgtgaagggc

SEQ ID NO: 12296 - protein, 17 aa, synthetic construct
  REGION 1..17: note = Description of Artificial Sequence: Synthetic peptide
VISGRGGNTYSADSVKG

SEQ ID NO: 12297 - DNA, 48 bp, synthetic construct
  misc_feature 1..48: note = Description of Artificial Sequence: Synthetic oligonucleotide
  source 1..48: mol_type = other DNA
aatatctattatagtgggtatacctactacactccgtccctcaagagt

SEQ ID NO: 12298 - protein, 16 aa, synthetic construct
  REGION 1..16: note = Description of Artificial Sequence: Synthetic peptide
NIYYSGYTYYTPSLKS

SEQ ID NO: 12299 - DNA, 51 bp, synthetic construct
  misc_feature 1..51: note = Description of Artificial Sequence: Synthetic oligonucleotide
  source 1..51: mol_type = other DNA
tacattagtagtagtagtggtaccatatactacgcagactctgtgaagggc

SEQ ID NO: 12300 - protein, 17 aa, synthetic construct
  REGION 1..17: note = Description of Artificial Sequence: Synthetic peptide
YISSSSGTIYYADSVKG

SEQ ID NO: 12301 - DNA, 51 bp, synthetic construct
  misc_feature 1..51: note = Description of Artificial Sequence: Synthetic oligonucleotide
  source 1..51: mol_type = other DNA
gttatatggtatgatgaaagtaataaatactatgcagactccgtgaagggc

SEQ ID NO: 12302 - protein, 17 aa, synthetic construct
  REGION 1..17: note = Description of Artificial Sequence: Synthetic peptide
VIWYDESNKYYADSVKG

SEQ ID NO: 12303 - DNA, 51 bp, synthetic construct
  misc_feature 1..51: note = Description of Artificial Sequence: Synthetic oligonucleotide
  source 1..51: mol_type = other DNA
actattagtggtcgtggtggtcacacatactacgcagactccgtgaggggc

SEQ ID NO: 12304 - protein, 17 aa, synthetic construct
  REGION 1..17: note = Description of Artificial Sequence: Synthetic peptide
TISGRGGHTYYADSVRG

SEQ ID NO: 12305 - DNA, 51 bp, synthetic construct
  misc_feature 1..51: note = Description of Artificial Sequence: Synthetic oligonucleotide
  source 1..51: mol_type = other DNA
gttatatggtatgatgaaagtaataaacactatatagactccgtgaagggc

SEQ ID NO: 12306 - protein, 17 aa, synthetic construct
  REGION 1..17: note = Description of Artificial Sequence: Synthetic peptide
VIWYDESNKHYIDSVKG

SEQ ID NO: 12307 - DNA, 51 bp, synthetic construct
  misc_feature 1..51: note = Description of Artificial Sequence: Synthetic oligonucleotide
  source 1..51: mol_type = other DNA
tggatgaaccctaacactggtaacacaggctatgcacagaagttccagggc

SEQ ID NO: 12308 - protein, 17 aa, synthetic construct
  REGION 1..17: note = Description of Artificial Sequence: Synthetic peptide
WMNPNTGNTGYAQKFQG

SEQ ID NO: 12309 - DNA, 51 bp, synthetic construct
  misc_feature 1..51: note = Description of Artificial Sequence: Synthetic oligonucleotide
  source 1..51: mol_type = other DNA
attattagtggtcgtgggggaaacgcattctacgcagactccgtgaagggc

SEQ ID NO: 12310 - protein, 17 aa, synthetic construct
  REGION 1..17: note = Description of Artificial Sequence: Synthetic peptide
IISGRGGNAFYADSVKG

SEQ ID NO: 12311 - DNA, 51 bp, synthetic construct; identical to SEQ ID NO: 12293
  misc_feature 1..51: note = Description of Artificial Sequence: Synthetic oligonucleotide
  source 1..51: mol_type = other DNA

SEQ ID NO: 12312 - protein, 17 aa, synthetic construct
  REGION 1..17: note = Description of Artificial Sequence: Synthetic peptide
IISGRGGNTFYADSVKG

SEQ ID NO: 12313 - DNA, 51 bp, synthetic construct
  misc_feature 1..51: note = Description of Artificial Sequence: Synthetic oligonucleotide
  source 1..51: mol_type = other DNA
tccattagtgggagtagtagttacatatactacgcagactcagtgaagggc

SEQ ID NO: 12314 - protein, 17 aa, synthetic construct
  REGION 1..17: note = Description of Artificial Sequence: Synthetic peptide
SISGSSSYIYYADSVKG

SEQ ID NO: 12315 - DNA, 51 bp, synthetic construct
  misc_feature 1..51: note = Description of Artificial Sequence: Synthetic oligonucleotide
  source 1..51: mol_type = other DNA
cacattagtagtagtggtagtaccatatactacgcagactctgtgaagggc

SEQ ID NO: 12316 - protein, 17 aa, synthetic construct
  REGION 1..17: note = Description of Artificial Sequence: Synthetic peptide
HISSSGSTIYYADSVKG

SEQ ID NO: 12317 - DNA, 51 bp, synthetic construct
  misc_feature 1..51: note = Description of Artificial Sequence: Synthetic oligonucleotide
  source 1..51: mol_type = other DNA
gttattagtggtagtggtagtaacacatactacgcagactccgtgaagggc

SEQ ID NO: 12318 - protein, 17 aa, synthetic construct
  REGION 1..17: note = Description of Artificial Sequence: Synthetic peptide
VISGSGSNTYYADSVKG

SEQ ID NO: 12319 - DNA, 51 bp, synthetic construct
  misc_feature 1..51: note = Description of Artificial Sequence: Synthetic oligonucleotide
  source 1..51: mol_type = other DNA
cttatatggtatgatgtaactaataaatactatggagactccgtgaagggc

SEQ ID NO: 12320 - protein, 17 aa, synthetic construct
  REGION 1..17: note = Description of Artificial Sequence: Synthetic peptide
LIWYDVTNKYYGDSVKG

SEQ ID NO: 12321 - DNA, 51 bp, synthetic construct
  misc_feature 1..51: note = Description of Artificial Sequence: Synthetic oligonucleotide
  source 1..51: mol_type = other DNA
tccattagtggtagtggtagtcacatatcctacgcggactcagtgaagggc

SEQ ID NO: 12322 - protein, 17 aa, synthetic construct
  REGION 1..17: note = Description of Artificial Sequence: Synthetic peptide
SISGSGSHISYADSVKG

SEQ ID NO: 12323 - DNA, 51 bp, synthetic construct; identical to SEQ ID NO: 12273
  misc_feature 1..51: note = Description of Artificial Sequence: Synthetic oligonucleotide
  source 1..51: mol_type = other DNA

SEQ ID NO: 12324 - protein, 17 aa, synthetic construct
  REGION 1..17: note = Description of Artificial Sequence: Synthetic peptide
VISGSGGSTYYADSVKG

SEQ ID NO: 12325 - DNA, 51 bp, synthetic construct; identical to SEQ ID NO: 12127
  misc_feature 1..51: note = Description of Artificial Sequence: Synthetic oligonucleotide
  source 1..51: mol_type = other DNA

SEQ ID NO: 12326 - protein, 17 aa, synthetic construct
  REGION 1..17: note = Description of Artificial Sequence: Synthetic peptide
IIWYDGSNKYYADSVKG

SEQ ID NO: 12327 - DNA, 51 bp, synthetic construct; identical to SEQ ID NO: 12269
  misc_feature 1..51: note = Description of Artificial Sequence: Synthetic oligonucleotide
  source 1..51: mol_type = other DNA

SEQ ID NO: 12328 - protein, 17 aa, synthetic construct
  REGION 1..17: note = Description of Artificial Sequence: Synthetic peptide
VIWYDVTNKYYADSVKG

SEQ ID NO: 12329 - DNA, 51 bp, synthetic construct; identical to SEQ ID NO: 12123
  misc_feature 1..51: note = Description of Artificial Sequence: Synthetic oligonucleotide
  source 1..51: mol_type = other DNA

SEQ ID NO: 12330 - protein, 17 aa, synthetic construct
  REGION 1..17: note = Description of Artificial Sequence: Synthetic peptide
VIWYDGSNKYYADSVKG

SEQ ID NO: 12331 - DNA, 51 bp, synthetic construct; identical to SEQ ID NO: 12231
  misc_feature 1..51: note = Description of Artificial Sequence: Synthetic oligonucleotide
  source 1..51: mol_type = other DNA

SEQ ID NO: 12332 - protein, 17 aa, synthetic construct
  REGION 1..17: note = Description of Artificial Sequence: Synthetic peptide
VIWYEENNQYYADSVKG

SEQ ID NO: 12333 - DNA, 51 bp, synthetic construct
  misc_feature 1..51: note = Description of Artificial Sequence: Synthetic oligonucleotide
  source 1..51: mol_type = other DNA
tccattagtggtagtagtagtttcatatactacgcagactcagtgaagggc

SEQ ID NO: 12334 - protein, 17 aa, synthetic construct
  REGION 1..17: note = Description of Artificial Sequence: Synthetic peptide
SISGSSSFIYYADSVKG

SEQ ID NO: 12335 - DNA, 51 bp, synthetic construct
  misc_feature 1..51: note = Description of Artificial Sequence: Synthetic oligonucleotide
  source 1..51: mol_type = other DNA
tccattagtagtagtagtagtttcctatactacgcagactcagtgaagggc

SEQ ID NO: 12336 - protein, 17 aa, synthetic construct
  REGION 1..17: note = Description of Artificial Sequence: Synthetic peptide
SISSSSSFLYYADSVKG

SEQ ID NO: 12337 - DNA, 51 bp, synthetic construct; identical to SEQ ID NO: 12227
  misc_feature 1..51: note = Description of Artificial Sequence: Synthetic oligonucleotide
  source 1..51: mol_type = other DNA

SEQ ID NO: 12338 - protein, 17 aa, synthetic construct
  REGION 1..17: note = Description of Artificial Sequence: Synthetic peptide
VIWFDGSNKYYADSVKG

SEQ ID NO: 12339 - DNA, 51 bp, synthetic construct
  misc_feature 1..51: note = Description of Artificial Sequence: Synthetic oligonucleotide
  source 1..51: mol_type = other DNA
gttatatcatatgatggaagtaataaatactatgcagactccgtgaagggc

SEQ ID NO: 12340 - protein, 17 aa, synthetic construct
  REGION 1..17: note = Description of Artificial Sequence: Synthetic peptide
VISYDGSNKYYADSVKG

SEQ ID NO: 12341 - DNA, 51 bp, synthetic construct
  misc_feature 1..51: note = Description of Artificial Sequence: Synthetic oligonucleotide
  source 1..51: mol_type = other DNA
gttatatggtatgatgtaactaatgaatactatgcagactccgtgaagggc

SEQ ID NO: 12342 - protein, 17 aa, synthetic construct
  REGION 1..17: note = Description of Artificial Sequence: Synthetic peptide
VIWYDVTNEYYADSVKG

SEQ ID NO: 12343 - DNA, 51 bp, synthetic construct
  misc_feature 1..51: note = Description of Artificial Sequence: Synthetic oligonucleotide
  source 1..51: mol_type = other DNA
attattagtggtcgtggtgttaacacattctacgcagactccgtgaagggc

SEQ ID NO: 12344 - protein, 17 aa, synthetic construct
  REGION 1..17: note = Description of Artificial Sequence: Synthetic peptide
IISGRGVNTFYADSVKG

SEQ ID NO: 12345 - DNA, 51 bp, synthetic construct
  misc_feature 1..51: note = Description of Artificial Sequence: Synthetic oligonucleotide
  source 1..51: mol_type = other DNA
gttattagtcgtagtggtggttacacatactacgcggactccgtgaagggc

SEQ ID NO: 12346 - protein, 17 aa, synthetic construct
  REGION 1..17: note = Description of Artificial Sequence: Synthetic peptide
VISRSGGYTYYADSVKG

SEQ ID NO: 12347 - DNA, 51 bp, synthetic construct
  misc_feature 1..51: note = Description of Artificial Sequence: Synthetic oligonucleotide
  source 1..51: mol_type = other DNA
gttattagtggtagtggtggtaacacattctacgcagactccgtgaagggc

SEQ ID NO: 12348 - protein, 17 aa, synthetic construct
  REGION 1..17: note = Description of Artificial Sequence: Synthetic peptide
VISGSGGNTFYADSVKG

SEQ ID NO: 12349 - DNA, 51 bp, synthetic construct
  misc_feature 1..51: note = Description of Artificial Sequence: Synthetic oligonucleotide
  source 1..51: mol_type = other DNA
gttattagtggtagtggtggtaccacatacttcgcagactccgtgaagggc

SEQ ID NO: 12350 - protein, 17 aa, synthetic construct
  REGION 1..17: note = Description of Artificial Sequence: Synthetic peptide
VISGSGGTTYFADSVKG

SEQ ID NO: 12351 - DNA, 51 bp, synthetic construct
  misc_feature 1..51: note = Description of Artificial Sequence: Synthetic oligonucleotide
  source 1..51: mol_type = other DNA
tccatcagtggcagtggtagtcacatatactacgcggactcagtgaagggc

SEQ ID NO: 12352 - protein, 17 aa, synthetic construct
  REGION 1..17: note = Description of Artificial Sequence: Synthetic peptide
SISGSGSHIYYADSVKG

SEQ ID NO: 12353 - DNA, 51 bp, synthetic construct
  misc_feature 1..51: note = Description of Artificial Sequence: Synthetic oligonucleotide
  source 1..51: mol_type = other DNA
gttattagtggtagtggtggtaccacatactacgcagactccgtgaagggc

SEQ ID NO: 12354 - protein, 17 aa, synthetic construct
  REGION 1..17: note = Description of Artificial Sequence: Synthetic peptide
VISGSGGTTYYADSVKG

SEQ ID NO: 12355 - DNA, 51 bp, synthetic construct
  misc_feature 1..51: note = Description of Artificial Sequence: Synthetic oligonucleotide
  source 1..51: mol_type = other DNA
gttatgtggtatgatgaaagtaataaacactatgcagactccgtgaagggc

SEQ ID NO: 12356 - protein, 17 aa, synthetic construct
  REGION 1..17: note = Description of Artificial Sequence: Synthetic peptide
VMWYDESNKHYADSVKG

SEQ ID NO: 12357 - DNA, 48 bp, synthetic construct
  misc_feature 1..48: note = Description of Artificial Sequence: Synthetic oligonucleotide
  source 1..48: mol_type = other DNA
agcatctattatagtgggagcacctactacaacccgtccctcaagagt

SEQ ID NO: 12358 - protein, 16 aa, synthetic construct
  REGION 1..16: note = Description of Artificial Sequence: Synthetic peptide
SIYYSGSTYYNPSLKS

SEQ ID NO: 12359 - DNA, 51 bp, synthetic construct; identical to SEQ ID NO: 12153
  misc_feature 1..51: note = Description of Artificial Sequence: Synthetic oligonucleotide
  source 1..51: mol_type = other DNA

SEQ ID NO: 12360 - protein, 17 aa, synthetic construct
  REGION 1..17: note = Description of Artificial Sequence: Synthetic peptide
SISGSSSYIYYADSVKG

SEQ ID NO: 12361 - DNA, 51 bp, synthetic construct
  misc_feature 1..51: note = Description of Artificial Sequence: Synthetic oligonucleotide
  source 1..51: mol_type = other DNA
tccattagtagtagtagtagttacatatactacgcagactcagtgaagggc

SEQ ID NO: 12362 - protein, 17 aa, synthetic construct
  REGION 1..17: note = Description of Artificial Sequence: Synthetic peptide
SISSSSSYIYYADSVKG

SEQ ID NO: 12363 - DNA, 51 bp, synthetic construct; identical to SEQ ID NO: 12231
  misc_feature 1..51: note = Description of Artificial Sequence: Synthetic oligonucleotide
  source 1..51: mol_type = other DNA

SEQ ID NO: 12364 - protein, 17 aa, synthetic construct
  REGION 1..17: note = Description of Artificial Sequence: Synthetic peptide
VIWYEENNQYYADSVKG

SEQ ID NO: 12365 - DNA, 51 bp, synthetic construct
  misc_feature 1..51: note = Description of Artificial Sequence: Synthetic oligonucleotide
  source 1..51: mol_type = other DNA
tccattagtggtagtagtagttacacatactacgcagactcagtgaagggc

SEQ ID NO: 12366 - protein, 17 aa, synthetic construct
  REGION 1..17: note = Description of Artificial Sequence: Synthetic peptide
SISGSSSYTYYADSVKG

SEQ ID NO: 12367 - DNA, 51 bp, synthetic construct
  misc_feature 1..51: note = Description of Artificial Sequence: Synthetic oligonucleotide
  source 1..51: mol_type = other DNA
gctatgagtggtagtggtggtagcacatattatgtagactccgtgaagggc

SEQ ID NO: 12368 - protein, 17 aa, synthetic construct
  REGION 1..17: note = Description of Artificial Sequence: Synthetic peptide
AMSGSGGSTYYVDSVKG

SEQ ID NO: 12369 - DNA, 51 bp, synthetic construct
  misc_feature 1..51: note = Description of Artificial Sequence: Synthetic oligonucleotide
  source 1..51: mol_type = other DNA
tggatgcaccctaacagtggtaacacaggctatgcacagaggttccagggc

SEQ ID NO: 12370 - protein, 17 aa, synthetic construct
  REGION 1..17: note = Description of Artificial Sequence: Synthetic peptide
WMHPNSGNTGYAQRFQG

SEQ ID NO: 12371 - DNA, 51 bp, synthetic construct
  misc_feature 1..51: note = Description of Artificial Sequence: Synthetic oligonucleotide
  source 1..51: mol_type = other DNA
tccattagtggcagtagtagttacatatactacgcagactcagtgaaggcc

SEQ ID NO: 12372 - protein, 17 aa, synthetic construct
  REGION 1..17: note = Description of Artificial Sequence: Synthetic peptide
SISGSSSYIYYADSVKA

SEQ ID NO: 12373 - DNA, 51 bp, synthetic construct; identical to SEQ ID NO: 12283
  misc_feature 1..51: note = Description of Artificial Sequence: Synthetic oligonucleotide
  source 1..51: mol_type = other DNA

SEQ ID NO: 12374 - protein, 17 aa, synthetic construct
  REGION 1..17: note = Description of Artificial Sequence: Synthetic peptide
VIWFDGSNKYYVDSVKG

SEQ ID NO: 12375 - DNA, 51 bp, synthetic construct
  misc_feature 1..51: note = Description of Artificial Sequence: Synthetic oligonucleotide
  source 1..51: mol_type = other DNA
tccattagcggtagtagtagttacatctactacgcagactcactgaagggc

SEQ ID NO: 12376 - protein, 17 aa, synthetic construct
  REGION 1..17: note = Description of Artificial Sequence: Synthetic peptide
SISGSSSYIYYADSLKG

SEQ ID NO: 12377 - DNA, 48 bp, synthetic construct
  misc_feature 1..48: note = Description of Artificial Sequence: Synthetic oligonucleotide
  source 1..48: mol_type = other DNA
aatatttattatagtgggagcacctacgacaacccgtccctcaagagt

SEQ ID NO: 12378 - protein, 16 aa, synthetic construct
  REGION 1..16: note = Description of Artificial Sequence: Synthetic peptide
NIYYSGSTYDNPSLKS

SEQ ID NO: 12379 - DNA, 51 bp, synthetic construct; identical to SEQ ID NO: 12227
  misc_feature 1..51: note = Description of Artificial Sequence: Synthetic oligonucleotide
  source 1..51: mol_type = other DNA

SEQ ID NO: 12380 - protein, 17 aa, synthetic construct
  REGION 1..17: note = Description of Artificial Sequence: Synthetic peptide
VIWFDGSNKYYADSVKG

SEQ ID NO: 12381 - DNA, 51 bp, synthetic construct; identical to SEQ ID NO: 12263
  misc_feature 1..51: note = Description of Artificial Sequence: Synthetic oligonucleotide
  source 1..51: mol_type = other DNA

SEQ ID NO: 12382 - protein, 17 aa, synthetic construct
  REGION 1..17: note = Description of Artificial Sequence: Synthetic peptide
VIWHDGSNKYYADSVKG

SEQ ID NO: 12383 - DNA, 48 bp, synthetic construct
  misc_feature 1..48: note = Description of Artificial Sequence: Synthetic oligonucleotide
  source 1..48: mol_type = other DNA
aatatctattatagtgggaccacctcctacaacccgtccctcaagagt

SEQ ID NO: 12384 - protein, 16 aa, synthetic construct
  REGION 1..16: note = Description of Artificial Sequence: Synthetic peptide
NIYYSGTTSYNPSLKS

SEQ ID NO: 12385 - DNA, 51 bp, synthetic construct
  misc_feature 1..51: note = Description of Artificial Sequence: Synthetic oligonucleotide
  source 1..51: mol_type = other DNA
gctattagtggtagtggtggtttcacatactacgcagactccgtgaagggc

SEQ ID NO: 12386 - protein, 17 aa, synthetic construct
  REGION 1..17: note = Description of Artificial Sequence: Synthetic peptide
AISGSGGFTYYADSVKG

SEQ ID NO: 12387 - DNA, 51 bp, synthetic construct; identical to SEQ ID NO: 12123
  misc_feature 1..51: note = Description of Artificial Sequence: Synthetic oligonucleotide
  source 1..51: mol_type = other DNA

SEQ ID NO: 12388 - protein, 17 aa, synthetic construct
  REGION 1..17: note = Description of Artificial Sequence: Synthetic peptide
VIWYDGSNKYYADSVKG

SEQ ID NO: 12389 - DNA, 51 bp, synthetic construct
  misc_feature 1..51: note = Description of Artificial Sequence: Synthetic oligonucleotide
  source 1..51: mol_type = other DNA
gttattagtggtagtggtggtagcacatattacgcagactccgtgaagggc

SEQ ID NO: 12390 - protein, 17 aa, synthetic construct
  REGION 1..17: note = Description of Artificial Sequence: Synthetic peptide
VISGSGGSTYYADSVKG

SEQ ID NO: 12391 - DNA, 51 bp, synthetic construct
  misc_feature 1..51: note = Description of Artificial Sequence: Synthetic oligonucleotide
  source 1..51: mol_type = other DNA
gttatatggtatgatgaaaataataaatactatgtagactccgtgaagggc

SEQ ID NO: 12392 - protein, 17 aa, synthetic construct
  REGION 1..17: note = Description of Artificial Sequence: Synthetic peptide
VIWYDENNKYYVDSVKG

SEQ ID NO: 12393 - DNA, 51 bp, synthetic construct; identical to SEQ ID NO: 12253
  misc_feature 1..51: note = Description of Artificial Sequence: Synthetic oligonucleotide
  source 1..51: mol_type = other DNA

SEQ ID NO: 12394 - protein, 17 aa, synthetic construct
  REGION 1..17: note = Description of Artificial Sequence: Synthetic peptide
VISGRGGNTFYADSVKG

SEQ ID NO: 12395 - DNA, 51 bp, synthetic construct
  misc_feature 1..51: note = Description of Artificial Sequence: Synthetic oligonucleotide
  source 1..51: mol_type = other DNA
gttatgtggtatgatggaagtaataaatattatgcagactccgtgaagggc

SEQ ID NO: 12396 - protein, 17 aa, synthetic construct
  REGION 1..17: note = Description of Artificial Sequence: Synthetic peptide
VMWYDGSNKYYADSVKG

SEQ ID NO: 12397 - DNA, 51 bp, synthetic construct
  misc_feature 1..51: note = Description of Artificial Sequence: Synthetic oligonucleotide
  source 1..51: mol_type = other DNA
attattagtggtcgtggtactaacacattctacgcagactccgtgaagggc

SEQ ID NO: 12398 - protein, 17 aa, synthetic construct
  REGION 1..17: note = Description of Artificial Sequence: Synthetic peptide
IISGRGTNTFYADSVKG

SEQ ID NO: 12399 - DNA, 51 bp, synthetic construct
  misc_feature 1..51: note = Description of Artificial Sequence: Synthetic oligonucleotide
  source 1..51: mol_type = other DNA
attatatcatatgatggaagtaataaatactatgcagactccgtgaagggc

SEQ ID NO: 12400 - protein, 17 aa, synthetic construct
  REGION 1..17: note = Description of Artificial Sequence: Synthetic peptide
IISYDGSNKYYADSVKG

SEQ ID NO: 12401 - DNA, 48 bp, synthetic construct
  misc_feature 1..48: note = Description of Artificial Sequence: Synthetic oligonucleotide
  source 1..48: mol_type = other DNA
agtatctattatagtgggagcgcccagtacaacccgtccctcaagagt

SEQ ID NO: 12402 - protein, 16 aa, synthetic construct
  REGION 1..16: note = Description of Artificial Sequence: Synthetic peptide
SIYYSGSAQYNPSLKS

SEQ ID NO: 12403 - DNA, 48 bp, synthetic construct
  misc_feature 1..48: note = Description of Artificial Sequence: Synthetic oligonucleotide
  source 1..48: mol_type = other DNA
aatatttattatagtgggaccacttacaacaacccgtccctcaagagt

SEQ ID NO: 12404 - protein, 16 aa, synthetic construct
  REGION 1..16: note = Description of Artificial Sequence: Synthetic peptide
NIYYSGTTYNNPSLKS

SEQ ID NO: 12405 - DNA, 48 bp, synthetic construct
  misc_feature 1..48: note = Description of Artificial Sequence: Synthetic oligonucleotide
  source 1..48: mol_type = other DNA
agtatctattatagtgggagcgccaactacaacccgtccctcaagagt

SEQ ID NO: 12406 - protein, 16 aa, synthetic construct
  REGION 1..16: note = Description of Artificial Sequence: Synthetic peptide
SIYYSGSANYNPSLKS

SEQ ID NO: 12407 - DNA, 51 bp, synthetic construct
  misc_feature 1..51: note = Description of Artificial Sequence: Synthetic oligonucleotide
  source 1..51: mol_type = other DNA
tacattagtagtagtagtagtaccatatactatgcagactctgtgaagggc

SEQ ID NO: 12408 - protein, 17 aa, synthetic construct
  REGION 1..17: note = Description of Artificial Sequence: Synthetic peptide
YISSSSSTIYYADSVKG

SEQ ID NO: 12409 - DNA, 48 bp, synthetic construct
  misc_feature 1..48: note = Description of Artificial Sequence: Synthetic oligonucleotide
  source 1..48: mol_type = other DNA
cgtatctataccagtgggatcaccaactacaacccctccctcaagagt

SEQ ID NO: 12410 - protein, 16 aa, synthetic construct
  REGION 1..16: note = Description of Artificial Sequence: Synthetic peptide
RIYTSGITNYNPSLKS

SEQ ID NO: 12411 - DNA, 51 bp, synthetic construct; identical to SEQ ID NO: 12227
  misc_feature 1..51: note = Description of Artificial Sequence: Synthetic oligonucleotide
  source 1..51: mol_type = other DNA

SEQ ID NO: 12412 - protein, 17 aa, synthetic construct
  REGION 1..17: note = Description of Artificial Sequence: Synthetic peptide
VIWFDGSNKYYADSVKG

SEQ ID NO: 12413 - DNA, 48 bp, synthetic construct
  misc_feature 1..48: note = Description of Artificial Sequence: Synthetic oligonucleotide
  source 1..48: mol_type = other DNA
aatatctattatagtggggccacctattataattcgtccctcaagagt

SEQ ID NO: 12414 - protein, 16 aa, synthetic construct
  REGION 1..16: note = Description of Artificial Sequence: Synthetic peptide
NIYYSGATYYNSSLKS

SEQ ID NO: 12415 - DNA, 51 bp, synthetic construct; identical to SEQ ID NO: 12133
  misc_feature 1..51: note = Description of Artificial Sequence: Synthetic oligonucleotide
  source 1..51: mol_type = other DNA

SEQ ID NO: 12416 - protein, 17 aa, synthetic construct
  REGION 1..17: note = Description of Artificial Sequence: Synthetic peptide
VIWYDGSNKYYVDSVKG

SEQ ID NO: 12417 - DNA, 48 bp, synthetic construct
  misc_feature 1..48: note = Description of Artificial Sequence: Synthetic oligonucleotide
  source 1..48: mol_type = other DNA
aatatctattatagtgggagcacctactacaacccgtccgtcaagagt

SEQ ID NO: 12418 - protein, 16 aa, synthetic construct
  REGION 1..16: note = Description of Artificial Sequence: Synthetic peptide
NIYYSGSTYYNPSVKS

SEQ ID NO: 12419 - DNA, 51 bp, synthetic construct
  misc_feature 1..51: note = Description of Artificial Sequence: Synthetic oligonucleotide
  source 1..51: mol_type = other DNA
gttattagtggtagtggtggtaccacatataacacagactccgtgaagggc

SEQ ID NO: 12420 - protein, 17 aa, synthetic construct
  REGION 1..17: note = Description of Artificial Sequence: Synthetic peptide
VISGSGGTTYNTDSVKG

SEQ ID NO: 12421 - DNA, 51 bp, synthetic construct
  misc_feature 1..51: note = Description of Artificial Sequence: Synthetic oligonucleotide
  source 1..51: mol_type = other DNA
gctattagtggtagtggtggtagcacatactacgcagactccgtgaagggc

SEQ ID NO: 12422 - protein, 17 aa, synthetic construct
  REGION 1..17: note = Description of Artificial Sequence: Synthetic peptide
AISGSGGSTYYADSVKG

SEQ ID NO: 12423 - DNA, 51 bp, synthetic construct
  misc_feature 1..51: note = Description of Artificial Sequence: Synthetic oligonucleotide
  source 1..51: mol_type = other DNA
tccattagtggtagtagtagttacatatggtatgtagactcagtgaagggc

SEQ ID NO: 12424 - protein, 17 aa, synthetic construct
  REGION 1..17: note = Description of Artificial Sequence: Synthetic peptide
SISGSSSYIWYVDSVKG

SEQ ID NO: 12425 - DNA, 51 bp, synthetic construct; identical to SEQ ID NO: 12123
  misc_feature 1..51: note = Description of Artificial Sequence: Synthetic oligonucleotide
  source 1..51: mol_type = other DNA

SEQ ID NO: 12426 - protein, 17 aa, synthetic construct
  REGION 1..17: note = Description of Artificial Sequence: Synthetic peptide
VIWYDGSNKYYADSVKG

SEQ ID NO: 12427 - DNA, 51 bp, synthetic construct; identical to SEQ ID NO: 12361
  misc_feature 1..51: note = Description of Artificial Sequence: Synthetic oligonucleotide
  source 1..51: mol_type = other DNA

SEQ ID NO: 12428 - protein, 17 aa, synthetic construct
  REGION 1..17: note = Description of Artificial Sequence: Synthetic peptide
SISSSSSYIYYADSVKG

SEQ ID NO: 12429 - DNA, 51 bp, synthetic construct; identical to SEQ ID NO: 12361
  misc_feature 1..51: note = Description of Artificial Sequence: Synthetic oligonucleotide
  source 1..51: mol_type = other DNA

SEQ ID NO: 12430 - protein, 17 aa, synthetic construct
  REGION 1..17: note = Description of Artificial Sequence: Synthetic peptide
SISSSSSYIYYADSVKG

SEQ ID NO: 12431 - DNA, 51 bp, synthetic construct; identical to SEQ ID NO: 12293
  misc_feature 1..51: note = Description of Artificial Sequence: Synthetic oligonucleotide
  source 1..51: mol_type = other DNA

SEQ ID NO: 12432 - protein, 17 aa, synthetic construct
  REGION 1..17: note = Description of Artificial Sequence: Synthetic peptide
IISGRGGNTFYADSVKG

SEQ ID NO: 12433 - DNA, 51 bp, synthetic construct; identical to SEQ ID NO: 12301
  misc_feature 1..51: note = Description of Artificial Sequence: Synthetic oligonucleotide
  source 1..51: mol_type = other DNA

SEQ ID NO: 12434 - protein, 17 aa, synthetic construct
  REGION 1..17: note = Description of Artificial Sequence: Synthetic peptide
VIWYDESNKYYADSVKG

SEQ ID NO: 12435 - DNA, 51 bp, synthetic construct
  misc_feature 1..51: note = Description of Artificial Sequence: Synthetic oligonucleotide
  source 1..51: mol_type = other DNA
ggtattagtggtagtggaggtaacacaccctacgcagactccgtgaagggc

SEQ ID NO: 12436 - protein, 17 aa, synthetic construct
  REGION 1..17: note = Description of Artificial Sequence: Synthetic peptide
GISGSGGNTPYADSVKG

SEQ ID NO: 12437 - DNA, 48 bp, synthetic construct
  misc_feature 1..48: note = Description of Artificial Sequence: Synthetic oligonucleotide
  source 1..48: mol_type = other DNA
aatatttattatagtgggagcacctaccacaacccgtctctcaagagt

SEQ ID NO: 12438 - protein, 16 aa, synthetic construct
  REGION 1..16: note = Description of Artificial Sequence: Synthetic peptide
NIYYSGSTYHNPSLKS

SEQ ID NO: 12439 - DNA, 51 bp, synthetic construct
  misc_feature 1..51: note = Description of Artificial Sequence: Synthetic oligonucleotide
  source 1..51: mol_type = other DNA
gttatctggtatgatggaaataataaatactatgcagactccgtgaagggc

SEQ ID NO: 12440 - protein, 17 aa, synthetic construct
  REGION 1..17: note = Description of Artificial Sequence: Synthetic peptide
VIWYDGNNKYYADSVKG

SEQ ID NO: 12441 - DNA, 48 bp, synthetic construct; identical to SEQ ID NO: 12147
  misc_feature 1..48: note = Description of Artificial Sequence: Synthetic oligonucleotide
  source 1..48: mol_type = other DNA

SEQ ID NO: 12442 - protein, 16 aa, synthetic construct
  REGION 1..16: note = Description of Artificial Sequence: Synthetic peptide
YIYYSGSTYYNPSLKS

SEQ ID NO: 12443 - DNA, 51 bp, synthetic construct; identical to SEQ ID NO: 12391
  misc_feature 1..51: note = Description of Artificial Sequence: Synthetic oligonucleotide
  source 1..51: mol_type = other DNA

SEQ ID NO: 12444 - protein, 17 aa, synthetic construct
  REGION 1..17: note = Description of Artificial Sequence: Synthetic peptide
VIWYDENNKYYVDSVKG

SEQ ID NO: 12445 - DNA, 51 bp, synthetic construct
  misc_feature 1..51: note = Description of Artificial Sequence: Synthetic oligonucleotide
  source 1..51: mol_type = other DNA
attatatcatatgctggaagtaataaatcctatgcagactccgtgaagggc

SEQ ID NO: 12446 - protein, 17 aa, synthetic construct
  REGION 1..17: note = Description of Artificial Sequence: Synthetic peptide
IISYAGSNKSYADSVKG

SEQ ID NO: 12447 - DNA, 48 bp, synthetic construct
  misc_feature 1..48: note = Description of Artificial Sequence: Synthetic oligonucleotide
  source 1..48: mol_type = other DNA
agtatctattatagtgggagcgcctcttacaacccgtccctcaagagt

SEQ ID NO: 12448 - protein, 16 aa, synthetic construct
  REGION 1..16: note = Description of Artificial Sequence: Synthetic peptide
SIYYSGSASYNPSLKS

SEQ ID NO: 12449 - DNA, 51 bp, synthetic construct; identical to SEQ ID NO: 12185
  misc_feature 1..51: note = Description of Artificial Sequence: Synthetic oligonucleotide
  source 1..51: mol_type = other DNA

SEQ ID NO: 12450 - protein, 17 aa, synthetic construct
  REGION 1..17: note = Description of Artificial Sequence: Synthetic peptide
VIWYDGSNKYYADSVKV

SEQ ID NO: 12451 - DNA, 51 bp, synthetic construct; identical to SEQ ID NO: 12157
  misc_feature 1..51: note = Description of Artificial Sequence: Synthetic oligonucleotide
  source 1..51: mol_type = other DNA

SEQ ID NO: 12452 - protein, 17 aa, synthetic construct
  REGION 1..17: note = Description of Artificial Sequence: Synthetic peptide
VLSGSGGSTFYADSVKG

SEQ ID NO: 12453 - DNA, 51 bp, synthetic construct
  misc_feature 1..51: note = Description of Artificial Sequence: Synthetic oligonucleotide
  source 1..51: mol_type = other DNA
gttatatggtttgatggaaataataaatactatgtagactccgtgaagggc

SEQ ID NO: 12454 - protein, 17 aa, synthetic construct
  REGION 1..17: note = Description of Artificial Sequence: Synthetic peptide
VIWFDGNNKYYVDSVKG

SEQ ID NO: 12455 - DNA, 51 bp, synthetic construct
  misc_feature 1..51: note = Description of Artificial Sequence: Synthetic oligonucleotide
  source 1..51: mol_type = other DNA
attattagtggtagtggtggttacacatactacgcggactccgtgaagggc

SEQ ID NO: 12456 - protein, 17 aa, synthetic construct
  REGION 1..17: note = Description of Artificial Sequence: Synthetic peptide
IISGSGGYTYYADSVKG

SEQ ID NO: 12457 - DNA, 51 bp, synthetic construct
  misc_feature 1..51: note = Description of Artificial Sequence: Synthetic oligonucleotide
  source 1..51: mol_type = other DNA
gttatatggtatgaggaaaataataaagactatgtagactccgtgaagggc

SEQ ID NO: 12458 - protein, 17 aa, synthetic construct
  REGION 1..17: note = Description of Artificial Sequence: Synthetic peptide
VIWYEENNKDYVDSVKG

SEQ ID NO: 12459 - DNA, 48 bp, synthetic construct
  misc_feature 1..48: note = Description of Artificial Sequence: Synthetic oligonucleotide
  source 1..48: mol_type = other DNA
aatatttattatagtgggagcacctacaacaacccgtccctcaagagt

SEQ ID NO: 12460 - protein, 16 aa, synthetic construct
  REGION 1..16: note = Description of Artificial Sequence: Synthetic peptide
NIYYSGSTYNNPSLKS

SEQ ID NO: 12461 - DNA, 51 bp, synthetic construct; identical to SEQ ID NO: 12123
  misc_feature 1..51: note = Description of Artificial Sequence: Synthetic oligonucleotide
  source 1..51: mol_type = other DNA

SEQ ID NO: 12462 - protein, 17 aa, synthetic construct
  REGION 1..17: note = Description of Artificial Sequence: Synthetic peptide
VIWYDGSNKYYADSVKG

SEQ ID NO: 12463 - DNA, 51 bp, synthetic construct; identical to SEQ ID NO: 12161
  misc_feature 1..51: note = Description of Artificial Sequence: Synthetic oligonucleotide
  source 1..51: mol_type = other DNA

SEQ ID NO: 12464 - protein, 17 aa, synthetic construct
  REGION 1..17: note = Description of Artificial Sequence: Synthetic peptide
WMHPNSGNTGYAQKFQG

SEQ ID NO: 12465 - DNA, 51 bp, synthetic construct; identical to SEQ ID NO: 12123
  misc_feature 1..51: note = Description of Artificial Sequence: Synthetic oligonucleotide
  source 1..51: mol_type = other DNA

SEQ ID NO: 12466 - protein, 17 aa, synthetic construct
  REGION 1..17: note = Description of Artificial Sequence: Synthetic peptide
VIWYDGSNKYYADSVKG

SEQ ID NO: 12467 - DNA, 51 bp, synthetic construct
  misc_feature 1..51: note = Description of Artificial Sequence: Synthetic oligonucleotide
  source 1..51: mol_type = other DNA
gctattagtggtagtggtggttacacatactacgcagactccgtgaagggc

SEQ ID NO: 12468 - protein, 17 aa, synthetic construct
  REGION 1..17: note = Description of Artificial Sequence: Synthetic peptide
AISGSGGYTYYADSVKG

SEQ ID NO: 12469 - DNA, 51 bp, synthetic construct
  misc_feature 1..51: note = Description of Artificial Sequence: Synthetic oligonucleotide
  source 1..51: mol_type = other DNA
actattagtggtcgtggtggtcacacatactacgcagactccgtgaagggc

SEQ ID NO: 12470 - protein, 17 aa, synthetic construct
  REGION 1..17: note = Description of Artificial Sequence: Synthetic peptide
TISGRGGHTYYADSVKG

SEQ ID NO: 12471 - DNA, 51 bp, synthetic construct; identical to SEQ ID NO: 12269
  misc_feature 1..51: note = Description of Artificial Sequence: Synthetic oligonucleotide
  source 1..51: mol_type = other DNA

SEQ ID NO: 12472 - protein, 17 aa, synthetic construct
  REGION 1..17: note = Description of Artificial Sequence: Synthetic peptide
VIWYDVTNKYYADSVKG

SEQ ID NO: 12473 - DNA, 48 bp, synthetic construct
  misc_feature 1..48: note = Description of Artificial Sequence: Synthetic oligonucleotide
  source 1..48: mol_type = other DNA
aatatctattatagtgggtatagttactacaatccgtccctcaagagt

SEQ ID NO: 12474 - protein, 16 aa, synthetic construct
  REGION 1..16: note = Description of Artificial Sequence: Synthetic peptide
NIYYSGYSYYNPSLKS

SEQ ID NO: 12475 - DNA, 57 bp, synthetic construct
  misc_feature 1..57: note = Description of Artificial Sequence: Synthetic oligonucleotide
  source 1..57: mol_type = other DNA
cgtattaaaagcaaaactgatggtgggacaacagactacgctgcacccgtgaaaggc

SEQ ID NO: 12476 - protein, 19 aa, synthetic construct
  REGION 1..19: note = Description of Artificial Sequence: Synthetic peptide
RIKSKTDGGTTDYAAPVKG

SEQ ID NO: 12477 - DNA, 51 bp, synthetic construct
  misc_feature 1..51: note = Description of Artificial Sequence: Synthetic oligonucleotide
  source 1..51: mol_type = other DNA
gttatatggtatgagggaagtaataaatactatgtagactccgtgaggggc

SEQ ID NO: 12478 - protein, 17 aa, synthetic construct
  REGION 1..17: note = Description of Artificial Sequence: Synthetic peptide
VIWYEGSNKYYVDSVRG

SEQ ID NO: 12479 - DNA, 51 bp, synthetic construct; identical to SEQ ID NO: 12253
  misc_feature 1..51: note = Description of Artificial Sequence: Synthetic oligonucleotide
  source 1..51: mol_type = other DNA

SEQ ID NO: 12480 - protein, 17 aa, synthetic construct
  REGION 1..17: note = Description of Artificial Sequence: Synthetic peptide
VISGRGGNTFYADSVKG

SEQ ID NO: 12481 - DNA, 48 bp, synthetic construct
  misc_feature 1..48: note = Description of Artificial Sequence: Synthetic oligonucleotide
  source 1..48: mol_type = other DNA
aatatctattatagtgggagcacctactacaacccgtccctcaagagt

SEQ ID NO: 12482 - protein, 16 aa, synthetic construct
  REGION 1..16: note = Description of Artificial Sequence: Synthetic peptide
NIYYSGSTYYNPSLKS

SEQ ID NO: 12483 - DNA, 51 bp, synthetic construct
  misc_feature 1..51: note = Description of Artificial Sequence: Synthetic oligonucleotide
  source 1..51: mol_type = other DNA
gttatatggtatgatgaaactaataaatactatgcagactccgtgaagggc

SEQ ID NO: 12484 - protein, 17 aa, synthetic construct
  REGION 1..17: note = Description of Artificial Sequence: Synthetic peptide
VIWYDETNKYYADSVKG

SEQ ID NO: 12485 - DNA, 51 bp, synthetic construct
  misc_feature 1..51: note = Description of Artificial Sequence: Synthetic oligonucleotide
  source 1..51: mol_type = other DNA
gttatatggtatgatgtaactaataaatactatacaggctccgtgaagggc

SEQ ID NO: 12486 - protein, 17 aa, synthetic construct
  REGION 1..17: note = Description of Artificial Sequence: Synthetic peptide
VIWYDVTNKYYTGSVKG

SEQ ID NO: 12487 - DNA, 51 bp, synthetic construct; identical to SEQ ID NO: 12123
  misc_feature 1..51: note = Description of Artificial Sequence: Synthetic oligonucleotide
  source 1..51: mol_type = other DNA

SEQ ID NO: 12488 - protein, 17 aa, synthetic construct
  REGION 1..17: note = Description of Artificial Sequence: Synthetic peptide
VIWYDGSNKYYADSVKG

SEQ ID NO: 12489 - DNA, 51 bp, synthetic construct
  misc_feature 1..51: note = Description of Artificial Sequence: Synthetic oligonucleotide
  source 1..51: mol_type = other DNA
tccactagtagtagtgatagttatatatactacgcagactcagtgaagggc

SEQ ID NO: 12490 - protein, 17 aa, synthetic construct
  REGION 1..17: note = Description of Artificial Sequence: Synthetic peptide
STSSSDSYIYYADSVKG

SEQ ID NO: 12491 - DNA, 51 bp, synthetic construct
  misc_feature 1..51: note = Description of Artificial Sequence: Synthetic oligonucleotide
  source 1..51: mol_type = other DNA
gttatatggtatgatgaaaataataaatactatgcagactccgtgaagggc

SEQ ID NO: 12492 - protein, 17 aa, synthetic construct
  REGION 1..17: note = Description of Artificial Sequence: Synthetic peptide
VIWYDENNKYYADSVKG

SEQ ID NO: 12493 - DNA, 51 bp, synthetic construct
  misc_feature 1..51: note = Description of Artificial Sequence: Synthetic oligonucleotide
  source 1..51: mol_type = other DNA
gttatatggtatgatgaaagtaataaatactatgcagactccatgaagggc

SEQ ID NO: 12494 - protein, 17 aa, synthetic construct
  REGION 1..17: note = Description of Artificial Sequence: Synthetic peptide
VIWYDESNKYYADSMKG

SEQ ID NO: 12495 - DNA, 51 bp, synthetic construct
  misc_feature 1..51: note = Description of Artificial Sequence: Synthetic oligonucleotide
  source 1..51: mol_type = other DNA
gttatatggtatgatggaactgataaatactatgtagactccgtgaagggc

SEQ ID NO: 12496 - protein, 17 aa, synthetic construct
  REGION 1..17: note = Description of Artificial Sequence: Synthetic peptide
VIWYDGTDKYYVDSVKG

SEQ ID NO: 12497 - DNA, 51 bp, synthetic construct; identical to SEQ ID NO: 12123
  misc_feature 1..51: note = Description of Artificial Sequence: Synthetic oligonucleotide
  source 1..51: mol_type = other DNA

SEQ ID NO: 12498 - protein, 17 aa, synthetic construct
  REGION 1..17: note = Description of Artificial Sequence: Synthetic peptide
VIWYDGSNKYYADSVKG

SEQ ID NO: 12499 - DNA, 51 bp, synthetic construct
  misc_feature 1..51: note = Description of Artificial Sequence: Synthetic oligonucleotide
  source 1..51: mol_type = other DNA
tggatgtaccctaacagtggtaacacaggctatgcacagaaattccagggc

SEQ ID NO: 12500 - protein, 17 aa, synthetic construct
  REGION 1..17: note = Description of Artificial Sequence: Synthetic peptide
WMYPNSGNTGYAQKFQG

SEQ ID NO: 12501 - DNA, 51 bp, synthetic construct
  misc_feature 1..51: note = Description of Artificial Sequence: Synthetic oligonucleotide
  source 1..51: mol_type = other DNA
attatatggtatgatggaagttataaatactatgcagactccgtgaagggc

SEQ ID NO: 12502 - protein, 17 aa, synthetic construct
  REGION 1..17: note = Description of Artificial Sequence: Synthetic peptide
IIWYDGSYKYYADSVKG

SEQ ID NO: 12503 - DNA, 51 bp, synthetic construct
  misc_feature 1..51: note = Description of Artificial Sequence: Synthetic oligonucleotide
  source 1..51: mol_type = other DNA
gttatatggtatgatgaaagtaataaatactatggagactccgtgaagggc

SEQ ID NO: 12504 - protein, 17 aa, synthetic construct
  REGION 1..17: note = Description of Artificial Sequence: Synthetic peptide
VIWYDESNKYYGDSVKG

SEQ ID NO: 12505 - DNA, 51 bp, synthetic construct
  misc_feature 1..51: note = Description of Artificial Sequence: Synthetic oligonucleotide
  source 1..51: mol_type = other DNA
tggatgcaccctgacagtggtaacacaggctatgcacagaagttccagggc

SEQ ID NO: 12506 - protein, 17 aa, synthetic construct
  REGION 1..17: note = Description of Artificial Sequence: Synthetic peptide
WMHPDSGNTGYAQKFQG

SEQ ID NO: 12507 - DNA, 51 bp, synthetic construct; identical to SEQ ID NO: 12123
  misc_feature 1..51: note = Description of Artificial Sequence: Synthetic oligonucleotide
  source 1..51: mol_type = other DNA

SEQ ID NO: 12508 - protein, 17 aa, synthetic construct
  REGION 1..17: note = Description of Artificial Sequence: Synthetic peptide
VIWYDGSNKYYADSVKG

SEQ ID NO: 12509 - DNA, 51 bp, synthetic construct
  misc_feature 1..51: note = Description of Artificial Sequence: Synthetic oligonucleotide
  source 1..51: mol_type = other DNA
gttatatggtatgatgaaagtaataactactatgcagactccgtgaagggc

SEQ ID NO: 12510 - protein, 17 aa, synthetic construct
  REGION 1..17: note = Description of Artificial Sequence: Synthetic peptide
VIWYDESNNYYADSVKG

SEQ ID NO: 12511 - DNA, 51 bp, synthetic construct
  misc_feature 1..51: note = Description of Artificial Sequence: Synthetic oligonucleotide
  source 1..51: mol_type = other DNA
gctattagtggtcgtggtggtagcacattctacgcagactccgtgaagggc

SEQ ID NO: 12512 - protein, 17 aa, synthetic construct
  REGION 1..17: note = Description of Artificial Sequence: Synthetic peptide
AISGRGGSTFYADSVKG

SEQ ID NO: 12513 - DNA, 51 bp, synthetic construct
  misc_feature 1..51: note = Description of Artificial Sequence: Synthetic oligonucleotide
  source 1..51: mol_type = other DNA
gctattagtggtcgtggtggaagcatattccacgcagactccgtgaagggc

SEQ ID NO: 12514 - protein, 17 aa, synthetic construct
  REGION 1..17: note = Description of Artificial Sequence: Synthetic peptide
AISGRGGSIFHADSVKG

SEQ ID NO: 12515 - DNA, 51 bp, synthetic construct
  misc_feature 1..51: note = Description of Artificial Sequence: Synthetic oligonucleotide
  source 1..51: mol_type = other DNA
gttatttggtatgatggaaataataaatattatgcagactccgtgaagggc

SEQ ID NO: 12516 - protein, 17 aa, synthetic construct
  REGION 1..17: note = Description of Artificial Sequence: Synthetic peptide
VIWYDGNNKYYADSVKG

SEQ ID NO: 12517 - DNA, 51 bp, synthetic construct
  misc_feature 1..51: note = Description of Artificial Sequence: Synthetic oligonucleotide
  source 1..51: mol_type = other DNA
tccattagtagtagtagtagtaccatatactacgcagactctgtgaagggc

SEQ ID NO: 12518 - protein, 17 aa, synthetic construct
  REGION 1..17: note = Description of Artificial Sequence: Synthetic peptide
SISSSSSTIYYADSVKG

SEQ ID NO: 12519 - DNA, 51 bp, synthetic construct
  misc_feature 1..51: note = Description of Artificial Sequence: Synthetic oligonucleotide
  source 1..51: mol_type = other DNA
tccattagtggtagtagtagttacatatactacgcggactcagtgaagggc

SEQ ID NO: 12520 - protein, 17 aa, synthetic construct
  REGION 1..17: note = Description of Artificial Sequence: Synthetic peptide
SISGSSSYIYYADSVKG

SEQ ID NO: 12521 - DNA, 51 bp, synthetic construct
  misc_feature 1..51: note = Description of Artificial Sequence: Synthetic oligonucleotide
  source 1..51: mol_type = other DNA
gttattagtggtagtggtgttaacacattctacgcagactccgtgaagggc

SEQ ID NO: 12522 - protein, 17 aa, synthetic construct
  REGION 1..17: note = Description of Artificial Sequence: Synthetic peptide
VISGSGVNTFYADSVKG

SEQ ID NO: 12523 - DNA, 51 bp, synthetic construct; identical to SEQ ID NO: 12123
  misc_feature 1..51: note = Description of Artificial Sequence: Synthetic oligonucleotide
  source 1..51: mol_type = other DNA

SEQ ID NO: 12524 - protein, 17 aa, synthetic construct
  REGION 1..17: note = Description of Artificial Sequence: Synthetic peptide
VIWYDGSNKYYADSVKG

SEQ ID NO: 12525 - DNA, 51 bp, synthetic construct; identical to SEQ ID NO: 12301
  misc_feature 1..51: note = Description of Artificial Sequence: Synthetic oligonucleotide
  source 1..51: mol_type = other DNA

SEQ ID NO: 12526 - protein, 17 aa, synthetic construct
  REGION 1..17: note = Description of Artificial Sequence: Synthetic peptide
VIWYDESNKYYADSVKG

SEQ ID NO: 12527 - DNA, 51 bp, synthetic construct
  misc_feature 1..51: note = Description of Artificial Sequence: Synthetic oligonucleotide
  source 1..51: mol_type = other DNA
tggatgcaccctaacagtggtaacacaggctatgcacagaaattccagggc

SEQ ID NO: 12528 - protein, 17 aa, synthetic construct
  REGION 1..17: note = Description of Artificial Sequence: Synthetic peptide
WMHPNSGNTGYAQKFQG

SEQ ID NO: 12529 - DNA, 51 bp, synthetic construct; identical to SEQ ID NO: 12421
  misc_feature 1..51: note = Description of Artificial Sequence: Synthetic oligonucleotide
  source 1..51: mol_type = other DNA

SEQ ID NO: 12530 - protein, 17 aa, synthetic construct
  REGION 1..17: note = Description of Artificial Sequence: Synthetic peptide
AISGSGGSTYYADSVKG

SEQ ID NO: 12531 - DNA, 51 bp, synthetic construct
  misc_feature 1..51: note = Description of Artificial Sequence: Synthetic oligonucleotide
  source 1..51: mol_type = other DNA
gctattagtggtcgtggtggtagcacattccacgcagactccgtgaagggc

SEQ ID NO: 12532 - protein, 17 aa, synthetic construct
  REGION 1..17: note = Description of Artificial Sequence: Synthetic peptide
AISGRGGSTFHADSVKG

SEQ ID NO: 12533 - DNA, 51 bp, synthetic construct; identical to SEQ ID NO: 12153
  misc_feature 1..51: note = Description of Artificial Sequence: Synthetic oligonucleotide
  source 1..51: mol_type = other DNA

SEQ ID NO: 12534 - protein, 17 aa, synthetic construct
  REGION 1..17: note = Description of Artificial Sequence: Synthetic peptide
SISGSSSYIYYADSVKG

SEQ ID NO: 12535 - DNA, 51 bp, synthetic construct
  misc_feature 1..51: note = Description of Artificial Sequence: Synthetic oligonucleotide
  source 1..51: mol_type = other DNA
gttatatggtatgaggaaagtaataaatactatacagagtccgtgaagggc

SEQ ID NO: 12536 - protein, 17 aa, synthetic construct
  REGION 1..17: note = Description of Artificial Sequence: Synthetic peptide
VIWYEESNKYYTESVKG

SEQ ID NO: 12537 - DNA, 51 bp, synthetic construct
  misc_feature 1..51: note = Description of Artificial Sequence: Synthetic oligonucleotide
  source 1..51: mol_type = other DNA
gttatatggtatgaaggaagtaataaatactatgtagactccgtgaagggc

SEQ ID NO: 12538 - protein, 17 aa, synthetic construct
  REGION 1..17: note = Description of Artificial Sequence: Synthetic peptide
VIWYEGSNKYYVDSVKG

SEQ ID NO: 12539 - DNA, 51 bp, synthetic construct; identical to SEQ ID NO: 12123
  misc_feature 1..51: note = Description of Artificial Sequence: Synthetic oligonucleotide
  source 1..51: mol_type = other DNA

SEQ ID NO: 12540 - protein, 17 aa, synthetic construct
  REGION 1..17: note = Description of Artificial Sequence: Synthetic peptide
VIWYDGSNKYYADSVKG

SEQ ID NO: 12541 - DNA, 51 bp, synthetic construct
  misc_feature 1..51: note = Description of Artificial Sequence: Synthetic oligonucleotide
  source 1..51: mol_type = other DNA
tccattagtggtagtagtagtaacatatactacacagactcagtgaagggc

SEQ ID NO: 12542 - protein, 17 aa, synthetic construct
  REGION 1..17: note = Description of Artificial Sequence: Synthetic peptide
SISGSSSNIYYTDSVKG

SEQ ID NO: 12543 - DNA, 51 bp, synthetic construct
  misc_feature 1..51: note = Description of Artificial Sequence: Synthetic oligonucleotide
  source 1..51: mol_type = other DNA
gttatatggtatgatgcaaataataaatactatgcagactccgtgaagggc

SEQ ID NO: 12544 - protein, 17 aa, synthetic construct
  REGION 1..17: note = Description of Artificial Sequence: Synthetic peptide
VIWYDANNKYYADSVKG

SEQ ID NO: 12545 - DNA, 51 bp, synthetic construct
  misc_feature 1..51: note = Description of Artificial Sequence: Synthetic oligonucleotide
  source 1..51: mol_type = other DNA
gttatatggtataatgaaaataataaatactatgcagactccgtgaagggc

SEQ ID NO: 12546 - protein, 17 aa, synthetic construct
  REGION 1..17: note = Description of Artificial Sequence: Synthetic peptide
VIWYNENNKYYADSVKG

SEQ ID NO: 12547 - DNA, 51 bp, synthetic construct; identical to SEQ ID NO: 12531
  misc_feature 1..51: note = Description of Artificial Sequence: Synthetic oligonucleotide
  source 1..51: mol_type = other DNA

SEQ ID NO: 12548 - protein, 17 aa, synthetic construct
  REGION 1..17: note = Description of Artificial Sequence: Synthetic peptide
AISGRGGSTFHADSVKG

SEQ ID NO: 12549 - DNA, 51 bp, synthetic construct
  misc_feature 1..51: note = Description of Artificial Sequence: Synthetic oligonucleotide
  source 1..51: mol_type = other DNA
gttattagtggtagtggtggtagctcattctacgcagactccgtgaagggc

SEQ ID NO: 12550 - protein, 17 aa, synthetic construct
  REGION 1..17: note = Description of Artificial Sequence: Synthetic peptide
VISGSGGSSFYADSVKG

SEQ ID NO: 12551 - DNA, 51 bp, synthetic construct; identical to SEQ ID NO: 12531
  misc_feature 1..51: note = Description of Artificial Sequence: Synthetic oligonucleotide
  source 1..51: mol_type = other DNA

SEQ ID NO: 12552 - protein, 17 aa, synthetic construct
  REGION 1..17: note = Description of Artificial Sequence: Synthetic peptide
AISGRGGSTFHADSVKG

SEQ ID NO: 12553 - DNA, 51 bp, synthetic construct; identical to SEQ ID NO: 12491
  misc_feature 1..51: note = Description of Artificial Sequence: Synthetic oligonucleotide
  source 1..51: mol_type = other DNA

SEQ ID NO: 12554 - protein, 17 aa, synthetic construct
  REGION 1..17: note = Description of Artificial Sequence: Synthetic peptide
VIWYDENNKYYADSVKG

SEQ ID NO: 12555 - DNA, 51 bp, synthetic construct; identical to SEQ ID NO: 12493
  misc_feature 1..51: note = Description of Artificial Sequence: Synthetic oligonucleotide
  source 1..51: mol_type = other DNA

SEQ ID NO: 12556 - protein, 17 aa, synthetic construct
  REGION 1..17: note = Description of Artificial Sequence: Synthetic peptide
VIWYDESNKYYADSMKG

SEQ ID NO: 12557 - DNA, 51 bp, synthetic construct
  misc_feature 1..51: note = Description of Artificial Sequence: Synthetic oligonucleotide
  source 1..51: mol_type = other DNA
tggatgaaccctaacagtggtaacacaggctatgcacagagattccagggc

SEQ ID NO: 12558 - protein, 17 aa, synthetic construct
  REGION 1..17: note = Description of Artificial Sequence: Synthetic peptide
WMNPNSGNTGYAQRFQG

SEQ ID NO: 12559 - DNA, 51 bp, synthetic construct; identical to SEQ ID NO: 12123
  misc_feature 1..51: note = Description of Artificial Sequence: Synthetic oligonucleotide
  source 1..51: mol_type = other DNA

SEQ ID NO: 12560 - protein, 17 aa, synthetic construct
  REGION 1..17: note = Description of Artificial Sequence: Synthetic peptide
VIWYDGSNKYYADSVKG

SEQ ID NO: 12561 - DNA, 51 bp, synthetic construct
  misc_feature 1..51: note = Description of Artificial Sequence: Synthetic oligonucleotide
  source 1..51: mol_type = other DNA
gctattagtggtagtggaggtaacacattctacgcagactccgtgaagggc

SEQ ID NO: 12562 - protein, 17 aa, synthetic construct
  REGION 1..17: note = Description of Artificial Sequence: Synthetic peptide
AISGSGGNTFYADSVKG

SEQ ID NO: 12563 - DNA, 51 bp, synthetic construct; identical to SEQ ID NO: 12227
  misc_feature 1..51: note = Description of Artificial Sequence: Synthetic oligonucleotide
  source 1..51: mol_type = other DNA

SEQ ID NO: 12564 - protein, 17 aa, synthetic construct
  REGION 1..17: note = Description of Artificial Sequence: Synthetic peptide
VIWFDGSNKYYADSVKG

SEQ ID NO: 12565 - DNA, 51 bp, synthetic construct; identical to SEQ ID NO: 12503
  misc_feature 1..51: note = Description of Artificial Sequence: Synthetic oligonucleotide
  source 1..51: mol_type = other DNA

SEQ ID NO: 12566 - protein, 17 aa, synthetic construct
  REGION 1..17: note = Description of Artificial Sequence: Synthetic peptide
VIWYDESNKYYGDSVKG

SEQ ID NO: 12567 - DNA, 51 bp, synthetic construct
  misc_feature 1..51: note = Description of Artificial Sequence: Synthetic oligonucleotide
  source 1..51: mol_type = other DNA
gttatatggcatgatggaagtaataaatactatgtagactccgtgaagggc

SEQ ID NO: 12568 - protein, 17 aa, synthetic construct
  REGION 1..17: note = Description of Artificial Sequence: Synthetic peptide
VIWHDGSNKYYVDSVKG

SEQ ID NO: 12569 - DNA, 51 bp, synthetic construct
  misc_feature 1..51: note = Description of Artificial Sequence: Synthetic oligonucleotide
  source 1..51: mol_type = other DNA
gctattagtggtcgtggtggtagcacattcaacgcagactccgtgaagggc

SEQ ID NO: 12570 - protein, 17 aa, synthetic construct
  REGION 1..17: note = Description of Artificial Sequence: Synthetic peptide
AISGRGGSTFNADSVKG

SEQ ID NO: 12571 - DNA, 51 bp, synthetic construct
  misc_feature 1..51: note = Description of Artificial Sequence: Synthetic oligonucleotide
  source 1..51: mol_type = other DNA
tcaattagtagtagtagtagttacatatactacgcagactcagtgaagggc

SEQ ID NO: 12572 - protein, 17 aa, synthetic construct
  REGION 1..17: note = Description of Artificial Sequence: Synthetic peptide
SISSSSSYIYYADSVKG

SEQ ID NO: 12573 - DNA, 51 bp, synthetic construct
  misc_feature 1..51: note = Description of Artificial Sequence: Synthetic oligonucleotide
  source 1..51: mol_type = other DNA
gttattagtggtggtggtggtagcacatactacgcagactccgtgaagggc

SEQ ID NO: 12574 - protein, 17 aa, synthetic construct
  REGION 1..17: note = Description of Artificial Sequence: Synthetic peptide
VISGGGGSTYYADSVKG

SEQ ID NO: 12575 - DNA, 51 bp, synthetic construct
  misc_feature 1..51: note = Description of Artificial Sequence: Synthetic oligonucleotide
  source 1..51: mol_type = other DNA
gttatatggtatgatggaagtaataaatattatgcagactccgtgaagggc

SEQ ID NO: 12576 - protein, 17 aa, synthetic construct
  REGION 1..17: note = Description of Artificial Sequence: Synthetic peptide
VIWYDGSNKYYADSVKG

SEQ ID NO: 12577 - DNA, 51 bp, synthetic construct
  misc_feature 1..51: note = Description of Artificial Sequence: Synthetic oligonucleotide
  source 1..51: mol_type = other DNA
gttatatggtatgatggaagtaatgaatactatgcagactccgtgaagggc

SEQ ID NO: 12578 - protein, 17 aa, synthetic construct
  REGION 1..17: note = Description of Artificial Sequence: Synthetic peptide
VIWYDGSNEYYADSVKG

SEQ ID NO: 12579 - DNA, 51 bp, synthetic construct
  misc_feature 1..51: note = Description of Artificial Sequence: Synthetic oligonucleotide
  source 1..51: mol_type = other DNA
gttactagtggtagtggtggtaccacattctacgcagactccgtgaagggc

SEQ ID NO: 12580 - protein, 17 aa, synthetic construct
  REGION 1..17: note = Description of Artificial Sequence: Synthetic peptide
VTSGSGGTTFYADSVKG

SEQ ID NO: 12581 - DNA, 51 bp, synthetic construct; identical to SEQ ID NO: 12491
  misc_feature 1..51: note = Description of Artificial Sequence: Synthetic oligonucleotide
  source 1..51: mol_type = other DNA

SEQ ID NO: 12582 - protein, 17 aa, synthetic construct
  REGION 1..17: note = Description of Artificial Sequence: Synthetic peptide
VIWYDENNKYYADSVKG

SEQ ID NO: 12583 - DNA, 51 bp, synthetic construct
  misc_feature 1..51: note = Description of Artificial Sequence: Synthetic oligonucleotide
  source 1..51: mol_type = other DNA
gttatatcatatggtggaagtaataaattctatgcagtctccgtgaagggc

SEQ ID NO: 12584 - protein, 17 aa, synthetic construct
  REGION 1..17: note = Description of Artificial Sequence: Synthetic peptide
VISYGGSNKFYAVSVKG

SEQ ID NO: 12585 - DNA, 51 bp, synthetic construct; identical to SEQ ID NO: 12153
  misc_feature 1..51: note = Description of Artificial Sequence: Synthetic oligonucleotide
  source 1..51: mol_type = other DNA

SEQ ID NO: 12586 - protein, 17 aa, synthetic construct
  REGION 1..17: note = Description of Artificial Sequence: Synthetic peptide
SISGSSSYIYYADSVKG

SEQ ID NO: 12587 - DNA, 51 bp, synthetic construct
  misc_feature 1..51: note = Description of Artificial Sequence: Synthetic oligonucleotide
  source 1..51: mol_type = other DNA
gctattagtggtagtggtggtagctcattctacgcagactccgtgaagggc

SEQ ID NO: 12588 - protein, 17 aa, synthetic construct
  REGION 1..17: note = Description of Artificial Sequence: Synthetic peptide
AISGSGGSSFYADSVKG

SEQ ID NO: 12589 - DNA, 51 bp, synthetic construct
  misc_feature 1..51: note = Description of Artificial Sequence: Synthetic oligonucleotide
  source 1..51: mol_type = other DNA
gttatatggtatgatgaaaatactaaatactatgcagactccgtgaagggc

SEQ ID NO: 12590 - protein, 17 aa, synthetic construct
  REGION 1..17: note = Description of Artificial Sequence: Synthetic peptide
VIWYDENTKYYADSVKG

SEQ ID NO: 12591 - DNA, 51 bp, synthetic construct
  misc_feature 1..51: note = Description of Artificial Sequence: Synthetic oligonucleotide
  source 1..51: mol_type = other DNA
gctattagtggtagaggtggtaccacattctacgcagactccgtgaagggc

SEQ ID NO: 12592 - protein, 17 aa, synthetic construct
  REGION 1..17: note = Description of Artificial Sequence: Synthetic peptide
AISGRGGTTFYADSVKG

SEQ ID NO: 12593 - DNA, 51 bp, synthetic construct
  misc_feature 1..51: note = Description of Artificial Sequence: Synthetic oligonucleotide
  source 1..51: mol_type = other DNA
gttatatggtatgatgaaaataatgaatactatgcagactccgtgaagggc

SEQ ID NO: 12594 - protein, 17 aa, synthetic construct
  REGION 1..17: note = Description of Artificial Sequence: Synthetic peptide
VIWYDENNEYYADSVKG

SEQ ID NO: 12595 - DNA, 51 bp, synthetic construct; identical to SEQ ID NO: 12127
  misc_feature 1..51: note = Description of Artificial Sequence: Synthetic oligonucleotide
  source 1..51: mol_type = other DNA

SEQ ID NO: 12596 - protein, 17 aa, synthetic construct
  REGION 1..17: note = Description of Artificial Sequence: Synthetic peptide
IIWYDGSNKYYADSVKG

SEQ ID NO: 12597 - DNA, 51 bp, synthetic construct
  misc_feature 1..51: note = Description of Artificial Sequence: Synthetic oligonucleotide
  source 1..51: mol_type = other DNA
gttatatggtatgatgaaaataataaatactatgtagactccgtgaggggc

SEQ ID NO: 12598 - protein, 17 aa, synthetic construct
  REGION 1..17: note = Description of Artificial Sequence: Synthetic peptide
VIWYDENNKYYVDSVRG

SEQ ID NO: 12599 - DNA, 51 bp, synthetic construct; identical to SEQ ID NO: 12123
  misc_feature 1..51: note = Description of Artificial Sequence: Synthetic oligonucleotide
  source 1..51: mol_type = other DNA

SEQ ID NO: 12600 - protein, 17 aa, synthetic construct
  REGION 1..17: note = Description of Artificial Sequence: Synthetic peptide
VIWYDGSNKYYADSVKG

SEQ ID NO: 12601 - DNA, 51 bp, synthetic construct
  misc_feature 1..51: note = Description of Artificial Sequence: Synthetic oligonucleotide
  source 1..51: mol_type = other DNA
gttatatggtttgatggaactaataaatactatgcagactccgtgaagggc

SEQ ID NO: 12602 - protein, 17 aa, synthetic construct
  REGION 1..17: note = Description of Artificial Sequence: Synthetic peptide
VIWFDGTNKYYADSVKG

SEQ ID NO: 12603 - DNA, 51 bp, synthetic construct
  misc_feature 1..51: note = Description of Artificial Sequence: Synthetic oligonucleotide
  source 1..51: mol_type = other DNA
gctattagtggtcgtggtggtagcacattctacgcagactccgagaagggc

SEQ ID NO: 12604 - protein, 17 aa, synthetic construct
  REGION 1..17: note = Description of Artificial Sequence: Synthetic peptide
AISGRGGSTFYADSEKG

SEQ ID NO: 12605 - DNA, 51 bp, synthetic construct; identical to SEQ ID NO: 12197
  misc_feature 1..51: note = Description of Artificial Sequence: Synthetic oligonucleotide
  source 1..51: mol_type = other DNA

SEQ ID NO: 12606 - protein, 17 aa, synthetic construct
  REGION 1..17: note = Description of Artificial Sequence: Synthetic peptide
WINPNSGGTNYAQKFQG

SEQ ID NO: 12607 - DNA, 51 bp, synthetic construct
  misc_feature 1..51: note = Description of Artificial Sequence: Synthetic oligonucleotide
  source 1..51: mol_type = other DNA
tggatcagcgcttacaatggtaacacaacctatgcacagaagctccggggc

SEQ ID NO: 12608 - protein, 17 aa, synthetic construct
  REGION 1..17: note = Description of Artificial Sequence: Synthetic peptide
WISAYNGNTTYAQKLRG

SEQ ID NO: 12609 - DNA, 51 bp, synthetic construct; identical to SEQ ID NO: 12123
  misc_feature 1..51: note = Description of Artificial Sequence: Synthetic oligonucleotide
  source 1..51: mol_type = other DNA

SEQ ID NO: 12610 - protein, 17 aa, synthetic construct
  REGION 1..17: note = Description of Artificial Sequence: Synthetic peptide
VIWYDGSNKYYADSVKG

SEQ ID NO: 12611 - DNA, 51 bp, synthetic construct
  misc_feature 1..51: note = Description of Artificial Sequence: Synthetic oligonucleotide
  source 1..51: mol_type = other DNA
gttatatggtatgatgaaaataataaatcctatgcagactccgtgaagggc

SEQ ID NO: 12612 - protein, 17 aa, synthetic construct
  REGION 1..17: note = Description of Artificial Sequence: Synthetic peptide
VIWYDENNKSYADSVKG

SEQ ID NO: 12613 - DNA, 51 bp, synthetic construct; identical to SEQ ID NO: 12607
  misc_feature 1..51: note = Description of Artificial Sequence: Synthetic oligonucleotide
  source 1..51: mol_type = other DNA

SEQ ID NO: 12614 - protein, 17 aa, synthetic construct
  REGION 1..17: note = Description of Artificial Sequence: Synthetic peptide
WISAYNGNTTYAQKLRG

SEQ ID NO: 12615 - DNA, 51 bp, synthetic construct; identical to SEQ ID NO: 12483
  misc_feature 1..51: note = Description of Artificial Sequence: Synthetic oligonucleotide
  source 1..51: mol_type = other DNA

SEQ ID NO: 12616 - protein, 17 aa, synthetic construct
  REGION 1..17: note = Description of Artificial Sequence: Synthetic peptide
VIWYDETNKYYADSVKG

SEQ ID NO: 12617 - DNA, 51 bp, synthetic construct
  misc_feature 1..51: note = Description of Artificial Sequence: Synthetic oligonucleotide
  source 1..51: mol_type = other DNA
gttatatggtatgatgtaagtaataaatactatgcagactccgtgaagggc

SEQ ID NO: 12618 - protein, 17 aa, synthetic construct
  REGION 1..17: note = Description of Artificial Sequence: Synthetic peptide
VIWYDVSNKYYADSVKG

SEQ ID NO: 12619 - DNA, 51 bp, synthetic construct
  misc_feature 1..51: note = Description of Artificial Sequence: Synthetic oligonucleotide
  source 1..51: mol_type = other DNA
gctattagtggtcgtggtggtaacacattctacgcagactccgtgaagggc

SEQ ID NO: 12620 - protein, 17 aa, synthetic construct
  REGION 1..17: note = Description of Artificial Sequence: Synthetic peptide
AISGRGGNTFYADSVKG

SEQ ID NO: 12621 - DNA, 51 bp, synthetic construct
  misc_feature 1..51: note = Description of Artificial Sequence: Synthetic oligonucleotide
  source 1..51: mol_type = other DNA
tctattagtggtcgtggtggtagcacattccacgcagactccgtgaagggc

SEQ ID NO: 12622 - protein, 17 aa, synthetic construct
  REGION 1..17: note = Description of Artificial Sequence: Synthetic peptide
SISGRGGSTFHADSVKG

SEQ ID NO: 12623 - DNA, 51 bp, synthetic construct
  misc_feature 1..51: note = Description of Artificial Sequence: Synthetic oligonucleotide
  source 1..51: mol_type = other DNA
attatatcatatggtggaagtaataacttctatgcagactccgtgaagggc

SEQ ID NO: 12624 - protein, 17 aa, synthetic construct
  REGION 1..17: note = Description of Artificial Sequence: Synthetic peptide
IISYGGSNNFYADSVKG

SEQ ID NO: 12625 - DNA, 51 bp, synthetic construct; identical to SEQ ID NO: 12103
  misc_feature 1..51: note = Description of Artificial Sequence: Synthetic oligonucleotide
  source 1..51: mol_type = other DNA

SEQ ID NO: 12626 - protein, 17 aa, synthetic construct
  REGION 1..17: note = Description of Artificial Sequence: Synthetic peptide
WMNPNSGNTGYAQKFQG

SEQ ID NO: 12627 - DNA, 51 bp, synthetic construct; identical to SEQ ID NO: 12567
  misc_feature 1..51: note = Description of Artificial Sequence: Synthetic oligonucleotide
  source 1..51: mol_type = other DNA

SEQ ID NO: 12628 - protein, 17 aa, synthetic construct
  REGION 1..17: note = Description of Artificial Sequence: Synthetic peptide
VIWHDGSNKYYVDSVKG

SEQ ID NO: 12629 - DNA, 51 bp, synthetic construct; identical to SEQ ID NO: 12531
  misc_feature 1..51: note = Description of Artificial Sequence: Synthetic oligonucleotide
  source 1..51: mol_type = other DNA

SEQ ID NO: 12630 - protein, 17 aa, synthetic construct
  REGION 1..17: note = Description of Artificial Sequence: Synthetic peptide
AISGRGGSTFHADSVKG

SEQ ID NO: 12631 - DNA, 51 bp, synthetic construct; identical to SEQ ID NO: 12531
  misc_feature 1..51: note = Description of Artificial Sequence: Synthetic oligonucleotide
  source 1..51: mol_type = other DNA

SEQ ID NO: 12632 - protein, 17 aa, synthetic construct
  REGION 1..17: note = Description of Artificial Sequence: Synthetic peptide
AISGRGGSTFHADSVKG

SEQ ID NO: 12633 - DNA, 51 bp, synthetic construct
  misc_feature 1..51: note = Description of Artificial Sequence: Synthetic oligonucleotide
  source 1..51: mol_type = other DNA
gttatatggtatgatagaaataataaatactatgcagactccgtgaagggc

SEQ ID NO: 12634 - protein, 17 aa, synthetic construct
  REGION 1..17: note = Description of Artificial Sequence: Synthetic peptide
VIWYDRNNKYYADSVKG

SEQ ID NO: 12635 - DNA, 51 bp, synthetic construct
  misc_feature 1..51: note = Description of Artificial Sequence: Synthetic oligonucleotide
  source 1..51: mol_type = other DNA
gctattagtcgtcgtggtggtagcacattctacgcagactccgtgaagggc

SEQ ID NO: 12636 - protein, 17 aa, synthetic construct
  REGION 1..17: note = Description of Artificial Sequence: Synthetic peptide
AISRRGGSTFYADSVKG

SEQ ID NO: 12637 - DNA, 51 bp, synthetic construct; identical to SEQ ID NO: 12153
  misc_feature 1..51: note = Description of Artificial Sequence: Synthetic oligonucleotide
  source 1..51: mol_type = other DNA

SEQ ID NO: 12638 - protein, 17 aa, synthetic construct
  REGION 1..17: note = Description of Artificial Sequence: Synthetic peptide
SISGSSSYIYYADSVKG

SEQ ID NO: 12639 - DNA, 51 bp, synthetic construct; identical to SEQ ID NO: 12197
  misc_feature 1..51: note = Description of Artificial Sequence: Synthetic oligonucleotide
  source 1..51: mol_type = other DNA

SEQ ID NO: 12640 - protein, 17 aa, synthetic construct
  REGION 1..17: note = Description of Artificial Sequence: Synthetic peptide
WINPNSGGTNYAQKFQG

SEQ ID NO: 12641 - DNA, 51 bp, synthetic construct
  misc_feature 1..51: note = Description of Artificial Sequence: Synthetic oligonucleotide
  source 1..51: mol_type = other DNA
tccattagtggtagtagtaattacatatactacgcagactcagtgaagggc

SEQ ID NO: 12642 - protein, 17 aa, synthetic construct
  REGION 1..17: note = Description of Artificial Sequence: Synthetic peptide
SISGSSNYIYYADSVKG

SEQ ID NO: 12643 - DNA, 51 bp, synthetic construct
  misc_feature 1..51: note = Description of Artificial Sequence: Synthetic oligonucleotide
  source 1..51: mol_type = other DNA
tggatcagccctaaaaatggtggcacaaactatgcacagaagtttcagggc

SEQ ID NO: 12644 - protein, 17 aa, synthetic construct
  REGION 1..17: note = Description of Artificial Sequence: Synthetic peptide
WISPKNGGTNYAQKFQG

SEQ ID NO: 12645 - DNA, 51 bp, synthetic construct
  misc_feature 1..51: note = Description of Artificial Sequence: Synthetic oligonucleotide
  source 1..51: mol_type = other DNA
tggatcaaccctaataggggtggcacaaactatgcacagaagtttcaggac

SEQ ID NO: 12646 - protein, 17 aa, synthetic construct
  REGION 1..17: note = Description of Artificial Sequence: Synthetic peptide
WINPNRGGTNYAQKFQD

SEQ ID NO: 12647 - DNA, 51 bp, synthetic construct
  misc_feature 1..51: note = Description of Artificial Sequence: Synthetic oligonucleotide
  source 1..51: mol_type = other DNA
tggatgcaccctaacagtggtaacacaggctttgcacagaagttccggggc

SEQ ID NO: 12648 - protein, 17 aa, synthetic construct
  REGION 1..17: note = Description of Artificial Sequence: Synthetic peptide
WMHPNSGNTGFAQKFRG

SEQ ID NO: 12649 - DNA, 51 bp, synthetic construct
  misc_feature 1..51: note = Description of Artificial Sequence: Synthetic oligonucleotide
  source 1..51: mol_type = other DNA
gctattagtggtagtggtgttagcacatactacgcagactccgtgaagggc

SEQ ID NO: 12650 - protein, 17 aa, synthetic construct
  REGION 1..17: note = Description of Artificial Sequence: Synthetic peptide
AISGSGVSTYYADSVKG

SEQ ID NO: 12651 - DNA, 51 bp, synthetic construct; identical to SEQ ID NO: 12123
  misc_feature 1..51: note = Description of Artificial Sequence: Synthetic oligonucleotide
  source 1..51: mol_type = other DNA

SEQ ID NO: 12652 - protein, 17 aa, synthetic construct
  REGION 1..17: note = Description of Artificial Sequence: Synthetic peptide
VIWYDGSNKYYADSVKG

SEQ ID NO: 12653 - DNA, 48 bp, synthetic construct
  misc_feature 1..48: note = Description of Artificial Sequence: Synthetic oligonucleotide
  source 1..48: mol_type = other DNA
agtatctattatagtgggagcaccgcctacaatccgtccctcaagagt

SEQ ID NO: 12654 - protein, 16 aa, synthetic construct
  REGION 1..16: note = Description of Artificial Sequence: Synthetic peptide
SIYYSGSTAYNPSLKS

SEQ ID NO: 12655 - DNA, 51 bp, synthetic construct; identical to SEQ ID NO: 12531
  misc_feature 1..51: note = Description of Artificial Sequence: Synthetic oligonucleotide
  source 1..51: mol_type = other DNA

SEQ ID NO: 12656 - protein, 17 aa, synthetic construct
  REGION 1..17: note = Description of Artificial Sequence: Synthetic peptide
AISGRGGSTFHADSVKG

SEQ ID NO: 12657 - DNA, 51 bp, synthetic construct
  misc_feature 1..51: note = Description of Artificial Sequence: Synthetic oligonucleotide
  source 1..51: mol_type = other DNA
tggatcaaccctaacaatggtggcacacactatgcacaggagtttcagggc

SEQ ID NO: 12658 - protein, 17 aa, synthetic construct
  REGION 1..17: note = Description of Artificial Sequence: Synthetic peptide
WINPNNGGTHYAQEFQG

SEQ ID NO: 12659 - DNA, 51 bp, synthetic construct
  misc_feature 1..51: note = Description of Artificial Sequence: Synthetic oligonucleotide
  source 1..51: mol_type = other DNA
gttatatggcatgatggaagtaataaatactatggagactccgtgaagggc

SEQ ID NO: 12660 - protein, 17 aa, synthetic construct
  REGION 1..17: note = Description of Artificial Sequence: Synthetic peptide
VIWHDGSNKYYGDSVKG

SEQ ID NO: 12661 - DNA, 51 bp, synthetic construct; identical to SEQ ID NO: 12621
  misc_feature 1..51: note = Description of Artificial Sequence: Synthetic oligonucleotide
  source 1..51: mol_type = other DNA

SEQ ID NO: 12662 - protein, 17 aa, synthetic construct
  REGION 1..17: note = Description of Artificial Sequence: Synthetic peptide
SISGRGGSTFHADSVKG

SEQ ID NO: 12663 - DNA, 51 bp, synthetic construct; identical to SEQ ID NO: 12531
  misc_feature 1..51: note = Description of Artificial Sequence: Synthetic oligonucleotide
  source 1..51: mol_type = other DNA

SEQ ID NO: 12664 - protein, 17 aa, synthetic construct
  REGION 1..17: note = Description of Artificial Sequence: Synthetic peptide
AISGRGGSTFHADSVKG

SEQ ID NO: 12665 - DNA, 51 bp, synthetic construct; identical to SEQ ID NO: 12635
  misc_feature 1..51: note = Description of Artificial Sequence: Synthetic oligonucleotide
  source 1..51: mol_type = other DNA

SEQ ID NO: 12666 - protein, 17 aa, synthetic construct
  REGION 1..17: note = Description of Artificial Sequence: Synthetic peptide
AISRRGGSTFYADSVKG

SEQ ID NO: 12667 - DNA, 51 bp, synthetic construct; identical to SEQ ID NO: 12197
  misc_feature 1..51: note = Description of Artificial Sequence: Synthetic oligonucleotide
  source 1..51: mol_type = other DNA

SEQ ID NO: 12668 - protein, 17 aa, synthetic construct
  REGION 1..17: note = Description of Artificial Sequence: Synthetic peptide
WINPNSGGTNYAQKFQG

SEQ ID NO: 12669 - DNA, 51 bp, synthetic construct; identical to SEQ ID NO: 12531
  misc_feature 1..51: note = Description of Artificial Sequence: Synthetic oligonucleotide
  source 1..51: mol_type = other DNA

SEQ ID NO: 12670 - protein, 17 aa, synthetic construct
  REGION 1..17: note = Description of Artificial Sequence: Synthetic peptide
AISGRGGSTFHADSVKG

SEQ ID NO: 12671 - DNA, 51 bp, synthetic construct
  misc_feature 1..51: note = Description of Artificial Sequence: Synthetic oligonucleotide
  source 1..51: mol_type = other DNA
tggatcagccctaacaatggtggcacaaactatgcacagaagtttcagggc

SEQ ID NO: 12672 - protein, 17 aa, synthetic construct
  REGION 1..17: note = Description of Artificial Sequence: Synthetic peptide
WISPNNGGTNYAQKFQG

SEQ ID NO: 12673 - DNA, 51 bp, synthetic construct; identical to SEQ ID NO: 12549
  misc_feature 1..51: note = Description of Artificial Sequence: Synthetic oligonucleotide
  source 1..51: mol_type = other DNA

SEQ ID NO: 12674 - protein, 17 aa, synthetic construct
  REGION 1..17: note = Description of Artificial Sequence: Synthetic peptide
VISGSGGSSFYADSVKG

SEQ ID NO: 12675 - DNA, 51 bp, synthetic construct
  misc_feature 1..51: note = Description of Artificial Sequence: Synthetic oligonucleotide
  source 1..51: mol_type = other DNA
tggatcaaccctaacaatggtggcacacactatgcacagaagtttcagggc

SEQ ID NO: 12676 - protein, 17 aa, synthetic construct
  REGION 1..17: note = Description of Artificial Sequence: Synthetic peptide
WINPNNGGTHYAQKFQG

SEQ ID NO: 12677 - DNA, 51 bp, synthetic construct; identical to SEQ ID NO: 12511
  misc_feature 1..51: note = Description of Artificial Sequence: Synthetic oligonucleotide
  source 1..51: mol_type = other DNA

SEQ ID NO: 12678 - protein, 17 aa, synthetic construct
  REGION 1..17: note = Description of Artificial Sequence: Synthetic peptide
AISGRGGSTFYADSVKG

SEQ ID NO: 12679 - DNA, 51 bp, synthetic construct
  misc_feature 1..51: note = Description of Artificial Sequence: Synthetic oligonucleotide
  source 1..51: mol_type = other DNA
tccattagtggtactggtagtttcatatactacgcagactcagtgaagggc

SEQ ID NO: 12680 - protein, 17 aa, synthetic construct
  REGION 1..17: note = Description of Artificial Sequence: Synthetic peptide
SISGTGSFIYYADSVKG

SEQ ID NO: 12681 - DNA, 51 bp, synthetic construct; identical to SEQ ID NO: 12263
  misc_feature 1..51: note = Description of Artificial Sequence: Synthetic oligonucleotide
  source 1..51: mol_type = other DNA

SEQ ID NO: 12682 - protein, 17 aa, synthetic construct
  REGION 1..17: note = Description of Artificial Sequence: Synthetic peptide
VIWHDGSNKYYADSVKG

SEQ ID NO: 12683 - DNA, 51 bp, synthetic construct; identical to SEQ ID NO: 12635
  misc_feature 1..51: note = Description of Artificial Sequence: Synthetic oligonucleotide
  source 1..51: mol_type = other DNA

SEQ ID NO: 12684 - protein, 17 aa, synthetic construct
  REGION 1..17: note = Description of Artificial Sequence: Synthetic peptide
AISRRGGSTFYADSVKG

SEQ ID NO: 12685 - DNA, 51 bp, synthetic construct; identical to SEQ ID NO: 12531
  misc_feature 1..51: note = Description of Artificial Sequence: Synthetic oligonucleotide
  source 1..51: mol_type = other DNA

SEQ ID NO: 12686 - protein, 17 aa, synthetic construct
  REGION 1..17: note = Description of Artificial Sequence: Synthetic peptide
AISGRGGSTFHADSVKG

SEQ ID NO: 12687 - DNA, 51 bp, synthetic construct
  misc_feature 1..51: note = Description of Artificial Sequence: Synthetic oligonucleotide
  source 1..51: mol_type = other DNA
gctattagtggtcgtggtggtagcacattccacgcagactccatgaagggc

SEQ ID NO: 12688 - protein, 17 aa, synthetic construct
  REGION 1..17: note = Description of Artificial Sequence: Synthetic peptide
AISGRGGSTFHADSMKG

SEQ ID NO: 12689 - DNA, 51 bp, synthetic construct; identical to SEQ ID NO: 12519
  misc_feature 1..51: note = Description of Artificial Sequence: Synthetic oligonucleotide
  source 1..51: mol_type = other DNA

SEQ ID NO: 12690 - protein, 17 aa, synthetic construct
  REGION 1..17: note = Description of Artificial Sequence: Synthetic peptide
SISGSSSYIYYADSVKG

SEQ ID NO: 12691 - DNA, 51 bp, synthetic construct; identical to SEQ ID NO: 12657
  misc_feature 1..51: note = Description of Artificial Sequence: Synthetic oligonucleotide
  source 1..51: mol_type = other DNA

SEQ ID NO: 12692 - protein, 17 aa, synthetic construct
  REGION 1..17: note = Description of Artificial Sequence: Synthetic peptide
WINPNNGGTHYAQEFQG

SEQ ID NO: 12693 - DNA, 51 bp, synthetic construct
  misc_feature 1..51: note = Description of Artificial Sequence: Synthetic oligonucleotide
  source 1..51: mol_type = other DNA
cttatatggtatgatggaagtaataaatactatgcagactccgtgaagggc

SEQ ID NO: 12694 - protein, 17 aa, synthetic construct
  REGION 1..17: note = Description of Artificial Sequence: Synthetic peptide
LIWYDGSNKYYADSVKG

SEQ ID NO: 12695 - DNA, 51 bp, synthetic construct; identical to SEQ ID NO: 12123
  misc_feature 1..51: note = Description of Artificial Sequence: Synthetic oligonucleotide
  source 1..51: mol_type = other DNA

SEQ ID NO: 12696 - protein, 17 aa, synthetic construct
  REGION 1..17: note = Description of Artificial Sequence: Synthetic peptide
VIWYDGSNKYYADSVKG

SEQ ID NO: 12697 - DNA, 51 bp, synthetic construct
  misc_feature 1..51: note = Description of Artificial Sequence: Synthetic oligonucleotide
  source 1..51: mol_type = other DNA
gttatatcatatggtggaagtaataaatactatgcagactccgtgaagggc

SEQ ID NO: 12698 - protein, 17 aa, synthetic construct
  REGION 1..17: note = Description of Artificial Sequence: Synthetic peptide
VISYGGSNKYYADSVKG

SEQ ID NO: 12699 - DNA, 51 bp, synthetic construct
  misc_feature 1..51: note = Description of Artificial Sequence: Synthetic oligonucleotide
  source 1..51: mol_type = other DNA
tggatcaaccctaataggggtggcacaaactatgcacagaagtttcagggc

SEQ ID NO: 12700 - protein, 17 aa, synthetic construct
  REGION 1..17: note = Description of Artificial Sequence: Synthetic peptide
WINPNRGGTNYAQKFQG

SEQ ID NO: 12701 - DNA, 51 bp, synthetic construct
  misc_feature 1..51: note = Description of Artificial Sequence: Synthetic oligonucleotide
  source 1..51: mol_type = other DNA
tccattagtggtagtagtacttacatatactacgcagactcagtgaagggc

SEQ ID NO: 12702 - protein, 17 aa, synthetic construct
  REGION 1..17: note = Description of Artificial Sequence: Synthetic peptide
SISGSSTYIYYADSVKG

SEQ ID NO: 12703 - DNA, 51 bp, synthetic construct
  misc_feature 1..51: note = Description of Artificial Sequence: Synthetic oligonucleotide
  source 1..51: mol_type = other DNA
tggctgcaccctaacagtggtaccacaggctttgcacagaagttccggggc

SEQ ID NO: 12704 - protein, 17 aa, synthetic construct
  REGION 1..17: note = Description of Artificial Sequence: Synthetic peptide
WLHPNSGTTGFAQKFRG

SEQ ID NO: 12705 - DNA, 51 bp, synthetic construct; identical to SEQ ID NO: 12531
  misc_feature 1..51: note = Description of Artificial Sequence: Synthetic oligonucleotide
  source 1..51: mol_type = other DNA

SEQ ID NO: 12706 - protein, 17 aa, synthetic construct
  REGION 1..17: note = Description of Artificial Sequence: Synthetic peptide
AISGRGGSTFHADSVKG

SEQ ID NO: 12707 - DNA, 51 bp, synthetic construct; identical to SEQ ID NO: 12103
  misc_feature 1..51: note = Description of Artificial Sequence: Synthetic oligonucleotide
  source 1..51: mol_type = other DNA

SEQ ID NO: 12708 - protein, 17 aa, synthetic construct
  REGION 1..17: note = Description of Artificial Sequence: Synthetic peptide
WMNPNSGNTGYAQKFQG

SEQ ID NO: 12709 - DNA, 51 bp, synthetic construct
  misc_feature 1..51: note = Description of Artificial Sequence: Synthetic oligonucleotide
  source 1..51: mol_type = other DNA
gctattagtcgtcgtggtggtaacacattctacgcagactccgtgaagggc

SEQ ID NO: 12710 - protein, 17 aa, synthetic construct
  REGION 1..17: note = Description of Artificial Sequence: Synthetic peptide
AISRRGGNTFYADSVKG

SEQ ID NO: 12711 - DNA, 51 bp, synthetic construct; identical to SEQ ID NO: 12575
  misc_feature 1..51: note = Description of Artificial Sequence: Synthetic oligonucleotide
  source 1..51: mol_type = other DNA

SEQ ID NO: 12712 - protein, 17 aa, synthetic construct
  REGION 1..17: note = Description of Artificial Sequence: Synthetic peptide
VIWYDGSNKYYADSVKG

SEQ ID NO: 12713 - DNA, 51 bp, synthetic construct
  misc_feature 1..51: note = Description of Artificial Sequence: Synthetic oligonucleotide
  source 1..51: mol_type = other DNA
attatatggtatgatggaagtaaaaaatacaatgcagactccgtgaagggc

SEQ ID NO: 12714 - protein, 17 aa, synthetic construct
  REGION 1..17: note = Description of Artificial Sequence: Synthetic peptide
IIWYDGSKKYNADSVKG

SEQ ID NO: 12715 - DNA, 51 bp, synthetic construct
  misc_feature 1..51: note = Description of Artificial Sequence: Synthetic oligonucleotide
  source 1..51: mol_type = other DNA
tggatcaaccctaacagtgatggcactaactatgcacagaagtttcagggc

SEQ ID NO: 12716 - protein, 17 aa, synthetic construct
  REGION 1..17: note = Description of Artificial Sequence: Synthetic peptide
WINPNSDGTNYAQKFQG

SEQ ID NO: 12717 - DNA, 51 bp, synthetic construct; identical to SEQ ID NO: 12339
  misc_feature 1..51: note = Description of Artificial Sequence: Synthetic oligonucleotide
  source 1..51: mol_type = other DNA

SEQ ID NO: 12718 - protein, 17 aa, synthetic construct
  REGION 1..17: note = Description of Artificial Sequence: Synthetic peptide
VISYDGSNKYYADSVKG

SEQ ID NO: 12719 - DNA, 51 bp, synthetic construct; identical to SEQ ID NO: 12339
  misc_feature 1..51: note = Description of Artificial Sequence: Synthetic oligonucleotide
  source 1..51: mol_type = other DNA

SEQ ID NO: 12720 - protein, 17 aa, synthetic construct
  REGION 1..17: note = Description of Artificial Sequence: Synthetic peptide
VISYDGSNKYYADSVKG

SEQ ID NO: 12721 - DNA, 51 bp, synthetic construct; identical to SEQ ID NO: 12123
  misc_feature 1..51: note = Description of Artificial Sequence: Synthetic oligonucleotide
  source 1..51: mol_type = other DNA

SEQ ID NO: 12722 - protein, 17 aa, synthetic construct
  REGION 1..17: note = Description of Artificial Sequence: Synthetic peptide
VIWYDGSNKYYADSVKG

SEQ ID NO: 12723 - DNA, 51 bp, synthetic construct; identical to SEQ ID NO: 12197
  misc_feature 1..51: note = Description of Artificial Sequence: Synthetic oligonucleotide
  source 1..51: mol_type = other DNA

SEQ ID NO: 12724 - protein, 17 aa, synthetic construct
  REGION 1..17: note = Description of Artificial Sequence: Synthetic peptide
WINPNSGGTNYAQKFQG

SEQ ID NO: 12725 - DNA, 51 bp, synthetic construct
  misc_feature 1..51: note = Description of Artificial Sequence: Synthetic oligonucleotide
  source 1..51: mol_type = other DNA
actcttagtggtcgtggtggtagcacatactacgcagactccgtgaagggc

SEQ ID NO: 12726 - protein, 17 aa, synthetic construct
  REGION 1..17: note = Description of Artificial Sequence: Synthetic peptide
TLSGRGGSTYYADSVKG

SEQ ID NO: 12727 - DNA, 51 bp, synthetic construct
  misc_feature 1..51: note = Description of Artificial Sequence: Synthetic oligonucleotide
  source 1..51: mol_type = other DNA
tggatcaaccctaacagtggtggcacaaactctgcacagaagtttcagggc

SEQ ID NO: 12728 - protein, 17 aa, synthetic construct
  REGION 1..17: note = Description of Artificial Sequence: Synthetic peptide
WINPNSGGTNSAQKFQG

SEQ ID NO: 12729 - DNA, 48 bp, synthetic construct
  misc_feature 1..48: note = Description of Artificial Sequence: Synthetic oligonucleotide
  source 1..48: mol_type = other DNA
ctcatttattggcatgatgataagcgctacagtccatctctgaggagc

SEQ ID NO: 12730 - protein, 16 aa, synthetic construct
  REGION 1..16: note = Description of Artificial Sequence: Synthetic peptide
LIYWHDDKRYSPSLRS

SEQ ID NO: 12731 - DNA, 51 bp, synthetic construct
  misc_feature 1..51: note = Description of Artificial Sequence: Synthetic oligonucleotide
  source 1..51: mol_type = other DNA
tggatcaaccctaacagtggtggcacaaagtatgcacagaagtttcagggc

SEQ ID NO: 12732 - protein, 17 aa, synthetic construct
  REGION 1..17: note = Description of Artificial Sequence: Synthetic peptide
WINPNSGGTKYAQKFQG

SEQ ID NO: 12733 - DNA, 48 bp, synthetic construct; identical to SEQ ID NO: 12203
  misc_feature 1..48: note = Description of Artificial Sequence: Synthetic oligonucleotide
  source 1..48: mol_type = other DNA

SEQ ID NO: 12734 - protein, 16 aa, synthetic construct
  REGION 1..16: note = Description of Artificial Sequence: Synthetic peptide
LIYWNDDKRYSPSLKS

SEQ ID NO: 12735 - DNA, 51 bp, synthetic construct
  misc_feature 1..51: note = Description of Artificial Sequence: Synthetic oligonucleotide
  source 1..51: mol_type = other DNA
gttatatggaatgatggaagtaataaatactatgcagactccgtgaagggc

SEQ ID NO: 12736 - protein, 17 aa, synthetic construct
  REGION 1..17: note = Description of Artificial Sequence: Synthetic peptide
VIWNDGSNKYYADSVKG

SEQ ID NO: 12737 - DNA, 57 bp, synthetic construct; identical to SEQ ID NO: 12475
  misc_feature 1..57: note = Description of Artificial Sequence: Synthetic oligonucleotide
  source 1..57: mol_type = other DNA

SEQ ID NO: 12738 - protein, 19 aa, synthetic construct
  REGION 1..19: note = Description of Artificial Sequence: Synthetic peptide
RIKSKTDGGTTDYAAPVKG

SEQ ID NO: 12739 - DNA, 51 bp, synthetic construct
  misc_feature 1..51: note = Description of Artificial Sequence: Synthetic oligonucleotide
  source 1..51: mol_type = other DNA
ggtattagtggtagtggtggtagcacatactacgcagactccgtgaagggc

SEQ ID NO: 12740 - protein, 17 aa, synthetic construct
  REGION 1..17: note = Description of Artificial Sequence: Synthetic peptide
GISGSGGSTYYADSVKG

SEQ ID NO: 12741 - DNA, 51 bp, synthetic construct
  misc_feature 1..51: note = Description of Artificial Sequence: Synthetic oligonucleotide
  source 1..51: mol_type = other DNA
cttatatggtatgatggaaataatacatactatgcagactccgtgaagggc

SEQ ID NO: 12742 - protein, 17 aa, synthetic construct
  REGION 1..17: note = Description of Artificial Sequence: Synthetic peptide
LIWYDGNNTYYADSVKG

SEQ ID NO: 12743 - DNA, 51 bp, synthetic construct
  misc_feature 1..51: note = Description of Artificial Sequence: Synthetic oligonucleotide
  source 1..51: mol_type = other DNA
tggatcaaccctaaaagtggtggcacaaattatgcacagaagtttcagggc

SEQ ID NO: 12744 - protein, 17 aa, synthetic construct
  REGION 1..17: note = Description of Artificial Sequence: Synthetic peptide
WINPKSGGTNYAQKFQG

SEQ ID NO: 12745 - DNA, 51 bp, synthetic construct
  misc_feature 1..51: note = Description of Artificial Sequence: Synthetic oligonucleotide
  source 1..51: mol_type = other DNA
gctattagtggtagtggtagtagcacatactacgcagactccgtgaagggc

SEQ ID NO: 12746 - protein, 17 aa, synthetic construct
  REGION 1..17: note = Description of Artificial Sequence: Synthetic peptide
AISGSGSSTYYADSVKG

SEQ ID NO: 12747 - DNA, 51 bp, synthetic construct; identical to SEQ ID NO: 12693
  misc_feature 1..51: note = Description of Artificial Sequence: Synthetic oligonucleotide
  source 1..51: mol_type = other DNA

SEQ ID NO: 12748 - protein, 17 aa, synthetic construct
  REGION 1..17: note = Description of Artificial Sequence: Synthetic peptide
LIWYDGSNKYYADSVKG

SEQ ID NO: 12749 - DNA, 51 bp, synthetic construct
  misc_feature 1..51: note = Description of Artificial Sequence: Synthetic oligonucleotide
  source 1..51: mol_type = other DNA
tggatcaaccctaacagtggtggcgcaaactatgcacagaagtttcagggc

SEQ ID NO: 12750 - protein, 17 aa, synthetic construct
  REGION 1..17: note = Description of Artificial Sequence: Synthetic peptide
WINPNSGGANYAQKFQG

SEQ ID NO: 12751 - DNA, 51 bp, synthetic construct; identical to SEQ ID NO: 12197
  misc_feature 1..51: note = Description of Artificial Sequence: Synthetic oligonucleotide
  source 1..51: mol_type = other DNA

SEQ ID NO: 12752 - protein, 17 aa, synthetic construct
  REGION 1..17: note = Description of Artificial Sequence: Synthetic peptide
WINPNSGGTNYAQKFQG

SEQ ID NO: 12753 - DNA, 51 bp, synthetic construct; identical to SEQ ID NO: 12197
  misc_feature 1..51: note = Description of Artificial Sequence: Synthetic oligonucleotide
  source 1..51: mol_type = other DNA

SEQ ID NO: 12754 - protein, 17 aa, synthetic construct
  REGION 1..17: note = Description of Artificial Sequence: Synthetic peptide
WINPNSGGTNYAQKFQG

SEQ ID NO: 12755 - DNA, 48 bp, synthetic construct
  misc_feature 1..48: note = Description of Artificial Sequence: Synthetic oligonucleotide
  source 1..48: mol_type = other DNA
ctcatttattggcatgatgataagcgctacagtccctctctgaagagc

SEQ ID NO: 12756 - protein, 16 aa, synthetic construct
  REGION 1..16: note = Description of Artificial Sequence: Synthetic peptide
LIYWHDDKRYSPSLKS

SEQ ID NO: 12757 - DNA, 51 bp, synthetic construct; identical to SEQ ID NO: 12675
  misc_feature 1..51: note = Description of Artificial Sequence: Synthetic oligonucleotide
  source 1..51: mol_type = other DNA

SEQ ID NO: 12758 - protein, 17 aa, synthetic construct
  REGION 1..17: note = Description of Artificial Sequence: Synthetic peptide
WINPNNGGTHYAQKFQG

SEQ ID NO: 12759 - DNA, 51 bp, synthetic construct; identical to SEQ ID NO: 12197
  misc_feature 1..51: note = Description of Artificial Sequence: Synthetic oligonucleotide
  source 1..51: mol_type = other DNA

SEQ ID NO: 12760 - protein, 17 aa, synthetic construct
  REGION 1..17: note = Description of Artificial Sequence: Synthetic peptide
WINPNSGGTNYAQKFQG

SEQ ID NO: 12761 - DNA, 48 bp, synthetic construct
  misc_feature 1..48: note = Description of Artificial Sequence: Synthetic oligonucleotide
  source 1..48: mol_type = other DNA
ctcatttattgggatgatgataagcgctacagcccatctctgaagagc

SEQ ID NO: 12762 - protein, 16 aa, synthetic construct
  REGION 1..16: note = Description of Artificial Sequence: Synthetic peptide
LIYWDDDKRYSPSLKS

SEQ ID NO: 12763 - DNA, 48 bp, synthetic construct
  misc_feature 1..48: note = Description of Artificial Sequence: Synthetic oligonucleotide
  source 1..48: mol_type = other DNA
ctcatttattggaatgatgatgagcgctacagcccatctctgaagagc

SEQ ID NO: 12764 - protein, 16 aa, synthetic construct
  REGION 1..16: note = Description of Artificial Sequence: Synthetic peptide
LIYWNDDERYSPSLKS

SEQ ID NO: 12765 - DNA, 51 bp, synthetic construct; identical to SEQ ID NO: 12197
  misc_feature 1..51: note = Description of Artificial Sequence: Synthetic oligonucleotide
  source 1..51: mol_type = other DNA

SEQ ID NO: 12766 - protein, 17 aa, synthetic construct
  REGION 1..17: note = Description of Artificial Sequence: Synthetic peptide
WINPNSGGTNYAQKFQG

SEQ ID NO: 12767 - DNA, 51 bp, synthetic construct
  misc_feature 1..51: note = Description of Artificial Sequence: Synthetic oligonucleotide
  source 1..51: mol_type = other DNA
tggatcaaccctaacagtggtggcacagactatgcacagaagtttcagggc

SEQ ID NO: 12768 - protein, 17 aa, synthetic construct
  REGION 1..17: note = Description of Artificial Sequence: Synthetic peptide
WINPNSGGTDYAQKFQG

SEQ ID NO: 12769 - DNA, 51 bp, synthetic construct
  misc_feature 1..51: note = Description of Artificial Sequence: Synthetic oligonucleotide
  source 1..51: mol_type = other DNA
gctattagtggtggtggtggtagcacatactacgcagactccgtgaagggc

SEQ ID NO: 12770 - protein, 17 aa, synthetic construct
  REGION 1..17: note = Description of Artificial Sequence: Synthetic peptide
AISGGGGSTYYADSVKG

SEQ ID NO: 12771 - DNA, 51 bp, synthetic construct; identical to SEQ ID NO: 12197
  misc_feature 1..51: note = Description of Artificial Sequence: Synthetic oligonucleotide
  source 1..51: mol_type = other DNA

SEQ ID NO: 12772 - protein, 17 aa, synthetic construct
  REGION 1..17: note = Description of Artificial Sequence: Synthetic peptide
WINPNSGGTNYAQKFQG

SEQ ID NO: 12773 - DNA, 51 bp, synthetic construct; identical to SEQ ID NO: 12421
  misc_feature 1..51: note = Description of Artificial Sequence: Synthetic oligonucleotide
  source 1..51: mol_type = other DNA

SEQ ID NO: 12774 - protein, 17 aa, synthetic construct
  REGION 1..17: note = Description of Artificial Sequence: Synthetic peptide
AISGSGGSTYYADSVKG

SEQ ID NO: 12775 - DNA, 51 bp, synthetic construct
  misc_feature 1..51: note = Description of Artificial Sequence: Synthetic oligonucleotide
  source 1..51: mol_type = other DNA
tggatgaaccctaacagtggtaacacaggctatgcacagaggttccagggc

SEQ ID NO: 12776 - protein, 17 aa, synthetic construct
  REGION 1..17: note = Description of Artificial Sequence: Synthetic peptide
WMNPNSGNTGYAQRFQG

SEQ ID NO: 12777 - DNA, 51 bp, synthetic construct; identical to SEQ ID NO: 12197
  misc_feature 1..51: note = Description of Artificial Sequence: Synthetic oligonucleotide
  source 1..51: mol_type = other DNA

SEQ ID NO: 12778 - protein, 17 aa, synthetic construct
  REGION 1..17: note = Description of Artificial Sequence: Synthetic peptide
WINPNSGGTNYAQKFQG

SEQ ID NO: 12779 - DNA, 57 bp, synthetic construct
  misc_feature 1..57: note = Description of Artificial Sequence: Synthetic oligonucleotide
  source 1..57: mol_type = other DNA
cggattaaaaacaaaattgatggtgggacaacagactacgttgcacccgtgaaaggc

SEQ ID NO: 12780 - protein, 19 aa, synthetic construct
  REGION 1..19: note = Description of Artificial Sequence: Synthetic peptide
RIKNKIDGGTTDYVAPVKG

SEQ ID NO: 12781 - DNA, 48 bp, synthetic construct
  misc_feature 1..48: note = Description of Artificial Sequence: Synthetic oligonucleotide
  source 1..48: mol_type = other DNA
aatatctattatagtgggaccacctactacaacccgtccctcaagagt

SEQ ID NO: 12782 - protein, 16 aa, synthetic construct
  REGION 1..16: note = Description of Artificial Sequence: Synthetic peptide
NIYYSGTTYYNPSLKS

SEQ ID NO: 12783 - DNA, 48 bp, synthetic construct
  misc_feature 1..48: note = Description of Artificial Sequence: Synthetic oligonucleotide
  source 1..48: mol_type = other DNA
aatatctattatagtgggatcccctactacaacccgtccctcaagagt

SEQ ID NO: 12784 - protein, 16 aa, synthetic construct
  REGION 1..16: note = Description of Artificial Sequence: Synthetic peptide
NIYYSGIPYYNPSLKS

SEQ ID NO: 12785 - DNA, 51 bp, synthetic construct
  misc_feature 1..51: note = Description of Artificial Sequence: Synthetic oligonucleotide
  source 1..51: mol_type = other DNA
tccattagtggtagtggtagttacatatactacgcagactcagtgaagggc

SEQ ID NO: 12786 - protein, 17 aa, synthetic construct
  REGION 1..17: note = Description of Artificial Sequence: Synthetic peptide
SISGSGSYIYYADSVKG

SEQ ID NO: 12787 - DNA, 51 bp, synthetic construct
  misc_feature 1..51: note = Description of Artificial Sequence: Synthetic oligonucleotide
  source 1..51: mol_type = other DNA
gctattagtggtcgtggtggtaacacattctacacagactccgtgaagggc

SEQ ID NO: 12788 - protein, 17 aa, synthetic construct
  REGION 1..17: note = Description of Artificial Sequence: Synthetic peptide
AISGRGGNTFYTDSVKG

SEQ ID NO: 12789 - DNA, 51 bp, synthetic construct; identical to SEQ ID NO: 12227
  misc_feature 1..51: note = Description of Artificial Sequence: Synthetic oligonucleotide
  source 1..51: mol_type = other DNA

SEQ ID NO: 12790 - protein, 17 aa, synthetic construct
  REGION 1..17: note = Description of Artificial Sequence: Synthetic peptide
VIWFDGSNKYYADSVKG

SEQ ID NO: 12791 - DNA, 48 bp, synthetic construct
  misc_feature 1..48: note = Description of Artificial Sequence: Synthetic oligonucleotide
  source 1..48: mol_type = other DNA
aatatctattatagtggggccacctactacaacccgtccctcaagagt

SEQ ID NO: 12792 - protein, 16 aa, synthetic construct
  REGION 1..16: note = Description of Artificial Sequence: Synthetic peptide
NIYYSGATYYNPSLKS

SEQ ID NO: 12793 - DNA, 48 bp, synthetic construct
  misc_feature 1..48: note = Description of Artificial Sequence: Synthetic oligonucleotide
  source 1..48: mol_type = other DNA
aatatctattatagtgggagcgcctactacattccgtccctcaagagt

SEQ ID NO: 12794 - protein, 16 aa, synthetic construct
  REGION 1..16: note = Description of Artificial Sequence: Synthetic peptide
NIYYSGSAYYIPSLKS

SEQ ID NO: 12795 - DNA, 51 bp, synthetic construct
  misc_feature 1..51: note = Description of Artificial Sequence: Synthetic oligonucleotide
  source 1..51: mol_type = other DNA
gttatttggtatgatagaagtaataactactatgcagactccgtgaagggc

SEQ ID NO: 12796 - protein, 17 aa, synthetic construct
  REGION 1..17: note = Description of Artificial Sequence: Synthetic peptide
VIWYDRSNNYYADSVKG

SEQ ID NO: 12797 - DNA, 51 bp, synthetic construct; identical to SEQ ID NO: 12231
  misc_feature 1..51: note = Description of Artificial Sequence: Synthetic oligonucleotide
  source 1..51: mol_type = other DNA

SEQ ID NO: 12798 - protein, 17 aa, synthetic construct
  REGION 1..17: note = Description of Artificial Sequence: Synthetic peptide
VIWYEENNQYYADSVKG

SEQ ID NO: 12799 - DNA, 51 bp, synthetic construct
  misc_feature 1..51: note = Description of Artificial Sequence: Synthetic oligonucleotide
  source 1..51: mol_type = other DNA
gttatatggtatgaggaaagtaataaatactatacagactccgtgaagggc

SEQ ID NO: 12800 - protein, 17 aa, synthetic construct
  REGION 1..17: note = Description of Artificial Sequence: Synthetic peptide
VIWYEESNKYYTDSVKG

SEQ ID NO: 12801 - DNA, 51 bp, synthetic construct; identical to SEQ ID NO: 12293
  misc_feature 1..51: note = Description of Artificial Sequence: Synthetic oligonucleotide
  source 1..51: mol_type = other DNA

SEQ ID NO: 12802 - protein, 17 aa, synthetic construct
  REGION 1..17: note = Description of Artificial Sequence: Synthetic peptide
IISGRGGNTFYADSVKG

SEQ ID NO: 12803 - DNA, 51 bp, synthetic construct; identical to SEQ ID NO: 12231
  misc_feature 1..51: note = Description of Artificial Sequence: Synthetic oligonucleotide
  source 1..51: mol_type = other DNA

SEQ ID NO: 12804 - protein, 17 aa, synthetic construct
  REGION 1..17: note = Description of Artificial Sequence: Synthetic peptide
VIWYEENNQYYADSVKG

SEQ ID NO: 12805 - DNA, 51 bp, synthetic construct
  misc_feature 1..51: note = Description of Artificial Sequence: Synthetic oligonucleotide
  source 1..51: mol_type = other DNA
gttatttggtatgaagacaataatcaatactatgcagactccgtgaagggc

SEQ ID NO: 12806 - protein, 17 aa, synthetic construct
  REGION 1..17: note = Description of Artificial Sequence: Synthetic peptide
VIWYEDNNQYYADSVKG

SEQ ID NO: 12807 - DNA, 51 bp, synthetic construct; identical to SEQ ID NO: 12231
  misc_feature 1..51: note = Description of Artificial Sequence: Synthetic oligonucleotide
  source 1..51: mol_type = other DNA

SEQ ID NO: 12808 - protein, 17 aa, synthetic construct
  REGION 1..17: note = Description of Artificial Sequence: Synthetic peptide
VIWYEENNQYYADSVKG

SEQ ID NO: 12809 - DNA, 48 bp, synthetic construct; identical to SEQ ID NO: 12781
  misc_feature 1..48: note = Description of Artificial Sequence: Synthetic oligonucleotide
  source 1..48: mol_type = other DNA

SEQ ID NO: 12810 - protein, 16 aa, synthetic construct
  REGION 1..16: note = Description of Artificial Sequence: Synthetic peptide
NIYYSGTTYYNPSLKS

SEQ ID NO: 12811 - DNA, 51 bp, synthetic construct; identical to SEQ ID NO: 12785
  misc_feature 1..51: note = Description of Artificial Sequence: Synthetic oligonucleotide
  source 1..51: mol_type = other DNA

SEQ ID NO: 12812 - protein, 17 aa, synthetic construct
  REGION 1..17: note = Description of Artificial Sequence: Synthetic peptide
SISGSGSYIYYADSVKG

SEQ ID NO: 12813 - DNA, 51 bp, synthetic construct
  misc_feature 1..51: note = Description of Artificial Sequence: Synthetic oligonucleotide
  source 1..51: mol_type = other DNA
gtcatttggtttgatggaagtaataaatactatgcagactccgtgaagggc

SEQ ID NO: 12814 - protein, 17 aa, synthetic construct
  REGION 1..17: note = Description of Artificial Sequence: Synthetic peptide
VIWFDGSNKYYADSVKG

SEQ ID NO: 12815 - DNA, 51 bp, synthetic construct; identical to SEQ ID NO: 12263
  misc_feature 1..51: note = Description of Artificial Sequence: Synthetic oligonucleotide
  source 1..51: mol_type = other DNA

SEQ ID NO: 12816 - protein, 17 aa, synthetic construct
  REGION 1..17: note = Description of Artificial Sequence: Synthetic peptide
VIWHDGSNKYYADSVKG

SEQ ID NO: 12817 - DNA, 51 bp, synthetic construct
  misc_feature 1..51: note = Description of Artificial Sequence: Synthetic oligonucleotide
  source 1..51: mol_type = other DNA
gtcatatggcatgatggaagtaataaatactatgtagactccgtgaagggc

SEQ ID NO: 12818 - protein, 17 aa, synthetic construct
  REGION 1..17: note = Description of Artificial Sequence: Synthetic peptide
VIWHDGSNKYYVDSVKG

SEQ ID NO: 12819 - DNA, 51 bp, synthetic construct; identical to SEQ ID NO: 12345
  misc_feature 1..51: note = Description of Artificial Sequence: Synthetic oligonucleotide
  source 1..51: mol_type = other DNA

SEQ ID NO: 12820 - protein, 17 aa, synthetic construct
  REGION 1..17: note = Description of Artificial Sequence: Synthetic peptide
VISRSGGYTYYADSVKG

SEQ ID NO: 12821 - DNA, 51 bp, synthetic construct
  misc_feature 1..51: note = Description of Artificial Sequence: Synthetic oligonucleotide
  source 1..51: mol_type = other DNA
gttatatggcatgatgaaagtaataaatactatacagactccgtgaagggc

SEQ ID NO: 12822 - protein, 17 aa, synthetic construct
  REGION 1..17: note = Description of Artificial Sequence: Synthetic peptide
VIWHDESNKYYTDSVKG

SEQ ID NO: 12823 - DNA, 51 bp, synthetic construct; identical to SEQ ID NO: 12491
  misc_feature 1..51: note = Description of Artificial Sequence: Synthetic oligonucleotide
  source 1..51: mol_type = other DNA

SEQ ID NO: 12824 - protein, 17 aa, synthetic construct
  REGION 1..17: note = Description of Artificial Sequence: Synthetic peptide
VIWYDENNKYYADSVKG

SEQ ID NO: 12825 - DNA, 51 bp, synthetic construct
  misc_feature 1..51: note = Description of Artificial Sequence: Synthetic oligonucleotide
  source 1..51: mol_type = other DNA
gttatatggtatgacgaaagtaataaatactatgaagactccgtgaagggc

SEQ ID NO: 12826 - protein, 17 aa, synthetic construct
  REGION 1..17: note = Description of Artificial Sequence: Synthetic peptide
VIWYDESNKYYEDSVKG

SEQ ID NO: 12827 - DNA, 51 bp, synthetic construct
  misc_feature 1..51: note = Description of Artificial Sequence: Synthetic oligonucleotide
  source 1..51: mol_type = other DNA
gttattagtggtcgtggtgttaacacattctacgcagactccgtgaagggc

SEQ ID NO: 12828 - protein, 17 aa, synthetic construct
  REGION 1..17: note = Description of Artificial Sequence: Synthetic peptide
VISGRGVNTFYADSVKG

SEQ ID NO: 12829 - DNA, 51 bp, synthetic construct; identical to SEQ ID NO: 12123
  misc_feature 1..51: note = Description of Artificial Sequence: Synthetic oligonucleotide
  source 1..51: mol_type = other DNA

SEQ ID NO: 12830 - protein, 17 aa, synthetic construct
  REGION 1..17: note = Description of Artificial Sequence: Synthetic peptide
VIWYDGSNKYYADSVKG

SEQ ID NO: 12831 - DNA, 51 bp, synthetic construct; identical to SEQ ID NO: 12231
  misc_feature 1..51: note = Description of Artificial Sequence: Synthetic oligonucleotide
  source 1..51: mol_type = other DNA

SEQ ID NO: 12832 - protein, 17 aa, synthetic construct
  REGION 1..17: note = Description of Artificial Sequence: Synthetic peptide
VIWYEENNQYYADSVKG

SEQ ID NO: 12833 - DNA, 51 bp, synthetic construct
  misc_feature 1..51: note = Description of Artificial Sequence: Synthetic oligonucleotide
  source 1..51: mol_type = other DNA
gttatatggcatgatgaaactaataaatactatgcagattccgtgaagggc

SEQ ID NO: 12834 - protein, 17 aa, synthetic construct
  REGION 1..17: note = Description of Artificial Sequence: Synthetic peptide
VIWHDETNKYYADSVKG

SEQ ID NO: 12835 - DNA, 51 bp, synthetic construct
  misc_feature 1..51: note = Description of Artificial Sequence: Synthetic oligonucleotide
  source 1..51: mol_type = other DNA
actattagtggtagtggtggtatcacatactacgcagactccgtgaagggc

SEQ ID NO: 12836 - protein, 17 aa, synthetic construct
  REGION 1..17: note = Description of Artificial Sequence: Synthetic peptide
TISGSGGITYYADSVKG

SEQ ID NO: 12837 - DNA, 48 bp, synthetic construct; identical to SEQ ID NO: 12417
  misc_feature 1..48: note = Description of Artificial Sequence: Synthetic oligonucleotide
  source 1..48: mol_type = other DNA

SEQ ID NO: 12838 - protein, 16 aa, synthetic construct
  REGION 1..16: note = Description of Artificial Sequence: Synthetic peptide
NIYYSGSTYYNPSVKS

SEQ ID NO: 12839 - DNA, 51 bp, synthetic construct; identical to SEQ ID NO: 12231
  misc_feature 1..51: note = Description of Artificial Sequence: Synthetic oligonucleotide
  source 1..51: mol_type = other DNA

SEQ ID NO: 12840 - protein, 17 aa, synthetic construct
  REGION 1..17: note = Description of Artificial Sequence: Synthetic peptide
VIWYEENNQYYADSVKG

SEQ ID NO: 12841 - DNA, 51 bp, synthetic construct; identical to SEQ ID NO: 12227
  misc_feature 1..51: note = Description of Artificial Sequence: Synthetic oligonucleotide
  source 1..51: mol_type = other DNA

SEQ ID NO: 12842 - protein, 17 aa, synthetic construct
  REGION 1..17: note = Description of Artificial Sequence: Synthetic peptide
VIWFDGSNKYYADSVKG

SEQ ID NO: 12843 - DNA, 51 bp, synthetic construct; identical to SEQ ID NO: 12273
  misc_feature 1..51: note = Description of Artificial Sequence: Synthetic oligonucleotide
  source 1..51: mol_type = other DNA

SEQ ID NO: 12844 - protein, 17 aa, synthetic construct
  REGION 1..17: note = Description of Artificial Sequence: Synthetic peptide
VISGSGGSTYYADSVKG

SEQ ID NO: 12845 - DNA, 48 bp, synthetic construct; identical to SEQ ID NO: 12401
  misc_feature 1..48: note = Description of Artificial Sequence: Synthetic oligonucleotide
  source 1..48: mol_type = other DNA

SEQ ID NO: 12846 - protein, 16 aa, synthetic construct
  REGION 1..16: note = Description of Artificial Sequence: Synthetic peptide
SIYYSGSAQYNPSLKS

SEQ ID NO: 12847 - DNA, 51 bp, synthetic construct
  misc_feature 1..51: note = Description of Artificial Sequence: Synthetic oligonucleotide
  source 1..51: mol_type = other DNA
gttatatggtatgaggaaaataataaacactatgcagactccgtgaagggc

SEQ ID NO: 12848 - protein, 17 aa, synthetic construct
  REGION 1..17: note = Description of Artificial Sequence: Synthetic peptide
VIWYEENNKHYADSVKG

SEQ ID NO: 12849 - DNA, 51 bp, synthetic construct
  misc_feature 1..51: note = Description of Artificial Sequence: Synthetic oligonucleotide
  source 1..51: mol_type = other DNA
gttatatggtatgaaggaagtaatcaatactatggagactccgtgaagggc

SEQ ID NO: 12850 - protein, 17 aa, synthetic construct
  REGION 1..17: note = Description of Artificial Sequence: Synthetic peptide
VIWYEGSNQYYGDSVKG

SEQ ID NO: 12851 - DNA, 48 bp, synthetic construct
  misc_feature 1..48: note = Description of Artificial Sequence: Synthetic oligonucleotide
  source 1..48: mol_type = other DNA
agtatctattatagtggaagcacctcctacaacccgtccctcaacagt

SEQ ID NO: 12852 - protein, 16 aa, synthetic construct
  REGION 1..16: note = Description of Artificial Sequence: Synthetic peptide
SIYYSGSTSYNPSLNS

SEQ ID NO: 12853 - DNA, 51 bp, synthetic construct; identical to SEQ ID NO: 12293
  misc_feature 1..51: note = Description of Artificial Sequence: Synthetic oligonucleotide
  source 1..51: mol_type = other DNA

SEQ ID NO: 12854 - protein, 17 aa, synthetic construct
  REGION 1..17: note = Description of Artificial Sequence: Synthetic peptide
IISGRGGNTFYADSVKG

SEQ ID NO: 12855 - DNA, 48 bp, synthetic construct
  misc_feature 1..48: note = Description of Artificial Sequence: Synthetic oligonucleotide
  source 1..48: mol_type = other DNA
cgtatctataccagtgggagcaccaactacatcccctccctcaagagt

SEQ ID NO: 12856 - protein, 16 aa, synthetic construct
  REGION 1..16: note = Description of Artificial Sequence: Synthetic peptide
RIYTSGSTNYIPSLKS

SEQ ID NO: 12857 - DNA, 51 bp, synthetic construct
  misc_feature 1..51: note = Description of Artificial Sequence: Synthetic oligonucleotide
  source 1..51: mol_type = other DNA
attatatcatatgttggaaagaataaatattatgcagactccgtgaagggc

SEQ ID NO: 12858 - protein, 17 aa, synthetic construct
  REGION 1..17: note = Description of Artificial Sequence: Synthetic peptide
IISYVGKNKYYADSVKG

SEQ ID NO: 12859 - DNA, 51 bp, synthetic construct; identical to SEQ ID NO: 12701
  misc_feature 1..51: note = Description of Artificial Sequence: Synthetic oligonucleotide
  source 1..51: mol_type = other DNA

SEQ ID NO: 12860 - protein, 17 aa, synthetic construct
  REGION 1..17: note = Description of Artificial Sequence: Synthetic peptide
SISGSSTYIYYADSVKG

SEQ ID NO: 12861 - DNA, 51 bp, synthetic construct; identical to SEQ ID NO: 12701
  misc_feature 1..51: note = Description of Artificial Sequence: Synthetic oligonucleotide
  source 1..51: mol_type = other DNA

SEQ ID NO: 12862 - protein, 17 aa, synthetic construct
  REGION 1..17: note = Description of Artificial Sequence: Synthetic peptide
SISGSSTYIYYADSVKG

SEQ ID NO: 12863 - DNA, 51 bp, synthetic construct; identical to SEQ ID NO: 12293
  misc_feature 1..51: note = Description of Artificial Sequence: Synthetic oligonucleotide
  source 1..51: mol_type = other DNA

SEQ ID NO: 12864 - protein, 17 aa, synthetic construct
  REGION 1..17: note = Description of Artificial Sequence: Synthetic peptide
IISGRGGNTFYADSVKG

SEQ ID NO: 12865 - DNA, 51 bp, synthetic construct; identical to SEQ ID NO: 12567
  misc_feature 1..51: note = Description of Artificial Sequence: Synthetic oligonucleotide
  source 1..51: mol_type = other DNA

SEQ ID NO: 12866 - protein, 17 aa, synthetic construct
  REGION 1..17: note = Description of Artificial Sequence: Synthetic peptide
VIWHDGSNKYYVDSVKG

SEQ ID NO: 12867 - DNA, 51 bp, synthetic construct; identical to SEQ ID NO: 12123
  misc_feature 1..51: note = Description of Artificial Sequence: Synthetic oligonucleotide
  source 1..51: mol_type = other DNA

SEQ ID NO: 12868 - protein, 17 aa, synthetic construct
  REGION 1..17: note = Description of Artificial Sequence: Synthetic peptide
VIWYDGSNKYYADSVKG

SEQ ID NO: 12869 - DNA, 51 bp, synthetic construct
  misc_feature 1..51: note = Description of Artificial Sequence: Synthetic oligonucleotide
  source 1..51: mol_type = other DNA
gttatatggtatgatggaagtgatagatactctgcagactccgtgaagggc

SEQ ID NO: 12870 - protein, 17 aa, synthetic construct
  REGION 1..17: note = Description of Artificial Sequence: Synthetic peptide
VIWYDGSDRYSADSVKG

SEQ ID NO: 12871 - DNA, 51 bp, synthetic construct; identical to SEQ ID NO: 12519
  misc_feature 1..51: note = Description of Artificial Sequence: Synthetic oligonucleotide
  source 1..51: mol_type = other DNA

SEQ ID NO: 12872 - protein, 17 aa, synthetic construct
  REGION 1..17: note = Description of Artificial Sequence: Synthetic peptide
SISGSSSYIYYADSVKG

SEQ ID NO: 12873 - DNA, 51 bp, synthetic construct; identical to SEQ ID NO: 12123
  misc_feature 1..51: note = Description of Artificial Sequence: Synthetic oligonucleotide
  source 1..51: mol_type = other DNA

SEQ ID NO: 12874 - protein, 17 aa, synthetic construct
  REGION 1..17: note = Description of Artificial Sequence: Synthetic peptide
VIWYDGSNKYYADSVKG

SEQ ID NO: 12875 - DNA, 51 bp, synthetic construct
  misc_feature 1..51: note = Description of Artificial Sequence: Synthetic oligonucleotide
  source 1..51: mol_type = other DNA
gttatatcatatggtggaagtaataattactatgcagactccgtgaagggc

SEQ ID NO: 12876 - protein, 17 aa, synthetic construct
  REGION 1..17: note = Description of Artificial Sequence: Synthetic peptide
VISYGGSNNYYADSVKG

SEQ ID NO: 12877 - DNA, 51 bp, synthetic construct; identical to SEQ ID NO: 12849
  misc_feature 1..51: note = Description of Artificial Sequence: Synthetic oligonucleotide
  source 1..51: mol_type = other DNA

SEQ ID NO: 12878 - protein, 17 aa, synthetic construct
  REGION 1..17: note = Description of Artificial Sequence: Synthetic peptide
VIWYEGSNQYYGDSVKG

SEQ ID NO: 12879 - DNA, 51 bp, synthetic construct; identical to SEQ ID NO: 12701
  misc_feature 1..51: note = Description of Artificial Sequence: Synthetic oligonucleotide
  source 1..51: mol_type = other DNA

SEQ ID NO: 12880 - protein, 17 aa, synthetic construct
  REGION 1..17: note = Description of Artificial Sequence: Synthetic peptide
SISGSSTYIYYADSVKG

SEQ ID NO: 12881 - DNA, 51 bp, synthetic construct; identical to SEQ ID NO: 12123
  misc_feature 1..51: note = Description of Artificial Sequence: Synthetic oligonucleotide
  source 1..51: mol_type = other DNA

SEQ ID NO: 12882 - protein, 17 aa, synthetic construct
  REGION 1..17: note = Description of Artificial Sequence: Synthetic peptide
VIWYDGSNKYYADSVKG

SEQ ID NO: 12883 - DNA, 51 bp, synthetic construct
  misc_feature 1..51: note = Description of Artificial Sequence: Synthetic oligonucleotide
  source 1..51: mol_type = other DNA
attatatggcatgatggaagtaataaatactatgtagactccgtgaagggc

SEQ ID NO: 12884 - protein, 17 aa, synthetic construct
  REGION 1..17: note = Description of Artificial Sequence: Synthetic peptide
IIWHDGSNKYYVDSVKG

SEQ ID NO: 12885 - DNA, 51 bp, synthetic construct; identical to SEQ ID NO: 12265
  misc_feature 1..51: note = Description of Artificial Sequence: Synthetic oligonucleotide
  source 1..51: mol_type = other DNA

SEQ ID NO: 12886 - protein, 17 aa, synthetic construct
  REGION 1..17: note = Description of Artificial Sequence: Synthetic peptide
VIWYEENNKYYVDSVKG

SEQ ID NO: 12887 - DNA, 51 bp, synthetic construct; identical to SEQ ID NO: 12263
  misc_feature 1..51: note = Description of Artificial Sequence: Synthetic oligonucleotide
  source 1..51: mol_type = other DNA

SEQ ID NO: 12888 - protein, 17 aa, synthetic construct
  REGION 1..17: note = Description of Artificial Sequence: Synthetic peptide
VIWHDGSNKYYADSVKG

SEQ ID NO: 12889 - DNA, 48 bp, synthetic construct
  misc_feature 1..48: note = Description of Artificial Sequence: Synthetic oligonucleotide
  source 1..48: mol_type = other DNA
agtgtctattatagtggggccacctcctacaacccgtccctcaagagt

SEQ ID NO: 12890 - protein, 16 aa, synthetic construct
  REGION 1..16: note = Description of Artificial Sequence: Synthetic peptide
SVYYSGATSYNPSLKS

SEQ ID NO: 12891 - DNA, 51 bp, synthetic construct
  misc_feature 1..51: note = Description of Artificial Sequence: Synthetic oligonucleotide
  source 1..51: mol_type = other DNA
attatatggcatgatggaagtaataaatactatgcagactccgtgaagggc

SEQ ID NO: 12892 - protein, 17 aa, synthetic construct
  REGION 1..17: note = Description of Artificial Sequence: Synthetic peptide
IIWHDGSNKYYADSVKG

SEQ ID NO: 12893 - DNA, 51 bp, synthetic construct
  misc_feature 1..51: note = Description of Artificial Sequence: Synthetic oligonucleotide
  source 1..51: mol_type = other DNA
attatatggcatgatggaagtaataaatattatgtagactccgtgaagggc

SEQ ID NO: 12894 - protein, 17 aa, synthetic construct
  REGION 1..17: note = Description of Artificial Sequence: Synthetic peptide
IIWHDGSNKYYVDSVKG

SEQ ID NO: 12895 - DNA, 51 bp, synthetic construct
  misc_feature 1..51: note = Description of Artificial Sequence: Synthetic oligonucleotide
  source 1..51: mol_type = other DNA
gttatatggtatgatgaaaataataaatattatatagactccgtgaagggc

SEQ ID NO: 12896 - protein, 17 aa, synthetic construct
  REGION 1..17: note = Description of Artificial Sequence: Synthetic peptide
VIWYDENNKYYIDSVKG

SEQ ID NO: 12897 - DNA, 51 bp, synthetic construct
  misc_feature 1..51: note = Description of Artificial Sequence: Synthetic oligonucleotide
  source 1..51: mol_type = other DNA
gttattagtggtagaggtggtagtacatactacgcagactccgtgaagggc

SEQ ID NO: 12898 - protein, 17 aa, synthetic construct
  REGION 1..17: note = Description of Artificial Sequence: Synthetic peptide
VISGRGGSTYYADSVKG

SEQ ID NO: 12899 - DNA, 51 bp, synthetic construct
  misc_feature 1..51: note = Description of Artificial Sequence: Synthetic oligonucleotide
  source 1..51: mol_type = other DNA
gttattagtggtagtggtggtagcacattctacgcagactccgtgaagggc

SEQ ID NO: 12900 - protein, 17 aa, synthetic construct
  REGION 1..17: note = Description of Artificial Sequence: Synthetic peptide
VISGSGGSTFYADSVKG

SEQ ID NO: 12901 - DNA, 51 bp, synthetic construct
  misc_feature 1..51: note = Description of Artificial Sequence: Synthetic oligonucleotide
  source 1..51: mol_type = other DNA
tggatgcaccctaacagtggtgccaccggctatgcacagaggttccagggc

SEQ ID NO: 12902 - protein, 17 aa, synthetic construct
  REGION 1..17: note = Description of Artificial Sequence: Synthetic peptide
WMHPNSGATGYAQRFQG

SEQ ID NO: 12903 - DNA, 51 bp, synthetic construct; identical to SEQ ID NO: 12785
  misc_feature 1..51: note = Description of Artificial Sequence: Synthetic oligonucleotide
  source 1..51: mol_type = other DNA

SEQ ID NO: 12904 - protein, 17 aa, synthetic construct
  REGION 1..17: note = Description of Artificial Sequence: Synthetic peptide
SISGSGSYIYYADSVKG

SEQ ID NO: 12905 - DNA, 51 bp, synthetic construct
  misc_feature 1..51: note = Description of Artificial Sequence: Synthetic oligonucleotide
  source 1..51: mol_type = other DNA
tccattagtggtagtagtacttacaaatactacgcagactcagtgaagggc

SEQ ID NO: 12906 - protein, 17 aa, synthetic construct
  REGION 1..17: note = Description of Artificial Sequence: Synthetic peptide
SISGSSTYKYYADSVKG

SEQ ID NO: 12907 - DNA, 51 bp, synthetic construct; identical to SEQ ID NO: 12283
  misc_feature 1..51: note = Description of Artificial Sequence: Synthetic oligonucleotide
  source 1..51: mol_type = other DNA

SEQ ID NO: 12908 - protein, 17 aa, synthetic construct
  REGION 1..17: note = Description of Artificial Sequence: Synthetic peptide
VIWFDGSNKYYVDSVKG

SEQ ID NO: 12909 - DNA, 51 bp, synthetic construct; identical to SEQ ID NO: 12123
  misc_feature 1..51: note = Description of Artificial Sequence: Synthetic oligonucleotide
  source 1..51: mol_type = other DNA

SEQ ID NO: 12910 - protein, 17 aa, synthetic construct
  REGION 1..17: note = Description of Artificial Sequence: Synthetic peptide
VIWYDGSNKYYADSVKG

SEQ ID NO: 12911 - DNA, 51 bp, synthetic construct; identical to SEQ ID NO: 12361
  misc_feature 1..51: note = Description of Artificial Sequence: Synthetic oligonucleotide
  source 1..51: mol_type = other DNA

SEQ ID NO: 12912 - protein, 17 aa, synthetic construct
  REGION 1..17: note = Description of Artificial Sequence: Synthetic peptide
SISSSSSYIYYADSVKG

SEQ ID NO: 12913 - DNA, 51 bp, synthetic construct; identical to SEQ ID NO: 12189
  misc_feature 1..51: note = Description of Artificial Sequence: Synthetic oligonucleotide
  source 1..51: mol_type = other DNA

SEQ ID NO: 12914 - protein, 17 aa, synthetic construct
  REGION 1..17: note = Description of Artificial Sequence: Synthetic peptide
WIHPNSGGTNYAQKFQG

SEQ ID NO: 12915 - DNA, 51 bp, synthetic construct; identical to SEQ ID NO: 12157
  misc_feature 1..51: note = Description of Artificial Sequence: Synthetic oligonucleotide
  source 1..51: mol_type = other DNA

SEQ ID NO: 12916 - protein, 17 aa, synthetic construct
  REGION 1..17: note = Description of Artificial Sequence: Synthetic peptide
VLSGSGGSTFYADSVKG

SEQ ID NO: 12917 - DNA, 51 bp, synthetic construct; identical to SEQ ID NO: 12153
  misc_feature 1..51: note = Description of Artificial Sequence: Synthetic oligonucleotide
  source 1..51: mol_type = other DNA

SEQ ID NO: 12918 - protein, 17 aa, synthetic construct
  REGION 1..17: note = Description of Artificial Sequence: Synthetic peptide
SISGSSSYIYYADSVKG

SEQ ID NO: 12919 - DNA, 51 bp, synthetic construct; identical to SEQ ID NO: 12269
  misc_feature 1..51: note = Description of Artificial Sequence: Synthetic oligonucleotide
  source 1..51: mol_type = other DNA

SEQ ID NO: 12920 - protein, 17 aa, synthetic construct
  REGION 1..17: note = Description of Artificial Sequence: Synthetic peptide
VIWYDVTNKYYADSVKG

SEQ ID NO: 12921 - DNA, 48 bp, synthetic construct
  misc_feature 1..48: note = Description of Artificial Sequence: Synthetic oligonucleotide
  source 1..48: mol_type = other DNA
aatatctattatagtgggagcacctactacatcccgtccctcaagagt

SEQ ID NO: 12922 - protein, 16 aa, synthetic construct
  REGION 1..16: note = Description of Artificial Sequence: Synthetic peptide
NIYYSGSTYYIPSLKS

SEQ ID NO: 12923 - DNA, 51 bp, synthetic construct; identical to SEQ ID NO: 12127
  misc_feature 1..51: note = Description of Artificial Sequence: Synthetic oligonucleotide
  source 1..51: mol_type = other DNA

SEQ ID NO: 12924 - protein, 17 aa, synthetic construct
  REGION 1..17: note = Description of Artificial Sequence: Synthetic peptide
IIWYDGSNKYYADSVKG

SEQ ID NO: 12925 - DNA, 51 bp, synthetic construct; identical to SEQ ID NO: 12123
  misc_feature 1..51: note = Description of Artificial Sequence: Synthetic oligonucleotide
  source 1..51: mol_type = other DNA

SEQ ID NO: 12926 - protein, 17 aa, synthetic construct
  REGION 1..17: note = Description of Artificial Sequence: Synthetic peptide
VIWYDGSNKYYADSVKG

SEQ ID NO: 12927 - DNA, 51 bp, synthetic construct; identical to SEQ ID NO: 12467
  misc_feature 1..51: note = Description of Artificial Sequence: Synthetic oligonucleotide
  source 1..51: mol_type = other DNA

SEQ ID NO: 12928 - protein, 17 aa, synthetic construct
  REGION 1..17: note = Description of Artificial Sequence: Synthetic peptide
AISGSGGYTYYADSVKG

SEQ ID NO: 12929 - DNA, 51 bp, synthetic construct; identical to SEQ ID NO: 12123
  misc_feature 1..51: note = Description of Artificial Sequence: Synthetic oligonucleotide
  source 1..51: mol_type = other DNA

SEQ ID NO: 12930 - protein, 17 aa, synthetic construct
  REGION 1..17: note = Description of Artificial Sequence: Synthetic peptide
VIWYDGSNKYYADSVKG

SEQ ID NO: 12931 - DNA, 51 bp, synthetic construct; identical to SEQ ID NO: 12231
  misc_feature 1..51: note = Description of Artificial Sequence: Synthetic oligonucleotide
  source 1..51: mol_type = other DNA

SEQ ID NO: 12932 - protein, 17 aa, synthetic construct
  REGION 1..17: note = Description of Artificial Sequence: Synthetic peptide
VIWYEENNQYYADSVKG

SEQ ID NO: 12933 - DNA, 51 bp, synthetic construct; identical to SEQ ID NO: 12391
  misc_feature 1..51: note = Description of Artificial Sequence: Synthetic oligonucleotide
  source 1..51: mol_type = other DNA

SEQ ID NO: 12934 - protein, 17 aa, synthetic construct
  REGION 1..17: note = Description of Artificial Sequence: Synthetic peptide
VIWYDENNKYYVDSVKG

SEQ ID NO: 12935 - DNA, 51 bp, synthetic construct; identical to SEQ ID NO: 12123
  misc_feature 1..51: note = Description of Artificial Sequence: Synthetic oligonucleotide
  source 1..51: mol_type = other DNA

SEQ ID NO: 12936 - protein, 17 aa, synthetic construct
  REGION 1..17: note = Description of Artificial Sequence: Synthetic peptide
VIWYDGSNKYYADSVKG

SEQ ID NO: 12937 - DNA, 51 bp, synthetic construct; identical to SEQ ID NO: 12253
  misc_feature 1..51: note = Description of Artificial Sequence: Synthetic oligonucleotide
  source 1..51: mol_type = other DNA

SEQ ID NO: 12938 - protein, 17 aa, synthetic construct
  REGION 1..17: note = Description of Artificial Sequence: Synthetic peptide
VISGRGGNTFYADSVKG

SEQ ID NO: 12939 - DNA, 51 bp, synthetic construct; identical to SEQ ID NO: 12361
  misc_feature 1..51: note = Description of Artificial Sequence: Synthetic oligonucleotide
  source 1..51: mol_type = other DNA

SEQ ID NO: 12940 - protein, 17 aa, synthetic construct
  REGION 1..17: note = Description of Artificial Sequence: Synthetic peptide
SISSSSSYIYYADSVKG

SEQ ID NO: 12941 - DNA, 51 bp, synthetic construct
  misc_feature 1..51: note = Description of Artificial Sequence: Synthetic oligonucleotide
  source 1..51: mol_type = other DNA
gttatatggtatgatgttactaataaaaagtatgcagactccgtgaagggc

SEQ ID NO: 12942 - protein, 17 aa, synthetic construct
  REGION 1..17: note = Description of Artificial Sequence: Synthetic peptide
VIWYDVTNKKYADSVKG

SEQ ID NO: 12943 - DNA, 51 bp, synthetic construct; identical to SEQ ID NO: 12123
  misc_feature 1..51: note = Description of Artificial Sequence: Synthetic oligonucleotide
  source 1..51: mol_type = other DNA

SEQ ID NO: 12944 - protein, 17 aa, synthetic construct
  REGION 1..17: note = Description of Artificial Sequence: Synthetic peptide
VIWYDGSNKYYADSVKG

SEQ ID NO: 12945 - DNA, 51 bp, synthetic construct; identical to SEQ ID NO: 12361
  misc_feature 1..51: note = Description of Artificial Sequence: Synthetic oligonucleotide
  source 1..51: mol_type = other DNA

SEQ ID NO: 12946 - protein, 17 aa, synthetic construct
  REGION 1..17: note = Description of Artificial Sequence: Synthetic peptide
SISSSSSYIYYADSVKG

SEQ ID NO: 12947 - DNA, 48 bp, synthetic construct
  misc_feature 1..48: note = Description of Artificial Sequence: Synthetic oligonucleotide
  source 1..48: mol_type = other DNA
agtatctattatagtgggagcacctcctacagcccgtccctcaagagt

SEQ ID NO: 12948 - protein, 16 aa, synthetic construct
  REGION 1..16: note = Description of Artificial Sequence: Synthetic peptide
SIYYSGSTSYSPSLKS

SEQ ID NO: 12949 - DNA, 51 bp, synthetic construct
  misc_feature 1..51: note = Description of Artificial Sequence: Synthetic oligonucleotide
  source 1..51: mol_type = other DNA
tacattagtagtagtagtagtaccatatactacgcagactctgtgaagggc

SEQ ID NO: 12950 - protein, 17 aa, synthetic construct
  REGION 1..17: note = Description of Artificial Sequence: Synthetic peptide
YISSSSSTIYYADSVKG

SEQ ID NO: 12951 - DNA, 51 bp, synthetic construct; identical to SEQ ID NO: 12391
  misc_feature 1..51: note = Description of Artificial Sequence: Synthetic oligonucleotide
  source 1..51: mol_type = other DNA

SEQ ID NO: 12952 - protein, 17 aa, synthetic construct
  REGION 1..17: note = Description of Artificial Sequence: Synthetic peptide
VIWYDENNKYYVDSVKG

SEQ ID NO: 12953 - DNA, 51 bp, synthetic construct; identical to SEQ ID NO: 12123
  misc_feature 1..51: note = Description of Artificial Sequence: Synthetic oligonucleotide
  source 1..51: mol_type = other DNA

SEQ ID NO: 12954 - protein, 17 aa, synthetic construct
  REGION 1..17: note = Description of Artificial Sequence: Synthetic peptide
VIWYDGSNKYYADSVKG

SEQ ID NO: 12955 - DNA, 51 bp, synthetic construct; identical to SEQ ID NO: 12269
  misc_feature 1..51: note = Description of Artificial Sequence: Synthetic oligonucleotide
  source 1..51: mol_type = other DNA

SEQ ID NO: 12956 - protein, 17 aa, synthetic construct
  REGION 1..17: note = Description of Artificial Sequence: Synthetic peptide
VIWYDVTNKYYADSVKG

SEQ ID NO: 12957 - DNA, 51 bp, synthetic construct
  misc_feature 1..51: note = Description of Artificial Sequence: Synthetic oligonucleotide
  source 1..51: mol_type = other DNA
gttatatcatatggtggaagtaataaagactctgcagactccgtgaagggc

SEQ ID NO: 12958 - protein, 17 aa, synthetic construct
  REGION 1..17: note = Description of Artificial Sequence: Synthetic peptide
VISYGGSNKDSADSVKG

SEQ ID NO: 12959 - DNA, 48 bp, synthetic construct
  misc_feature 1..48: note = Description of Artificial Sequence: Synthetic oligonucleotide
  source 1..48: mol_type = other DNA
agtatctattatagtgggtacacctattacaccccgtccctcaagagt

SEQ ID NO: 12960 - protein, 16 aa, synthetic construct
  REGION 1..16: note = Description of Artificial Sequence: Synthetic peptide
SIYYSGYTYYTPSLKS

SEQ ID NO: 12961 - DNA, 51 bp, synthetic construct
  misc_feature 1..51: note = Description of Artificial Sequence: Synthetic oligonucleotide
  source 1..51: mol_type = other DNA
gttatatcatatgcgggaactaatcaatactatgcagactccgtgaagggc

SEQ ID NO: 12962 - protein, 17 aa, synthetic construct
  REGION 1..17: note = Description of Artificial Sequence: Synthetic peptide
VISYAGTNQYYADSVKG

SEQ ID NO: 12963 - DNA, 51 bp, synthetic construct
  misc_feature 1..51: note = Description of Artificial Sequence: Synthetic oligonucleotide
  source 1..51: mol_type = other DNA
ataatatcatatggtggacgtaataatcactatgcagactccgtgaagggc

SEQ ID NO: 12964 - protein, 17 aa, synthetic construct
  REGION 1..17: note = Description of Artificial Sequence: Synthetic peptide
IISYGGRNNHYADSVKG

SEQ ID NO: 12965 - DNA, 51 bp, synthetic construct
  misc_feature 1..51: note = Description of Artificial Sequence: Synthetic oligonucleotide
  source 1..51: mol_type = other DNA
tccattagtggtagtagtacttacatatactgcgcagactcaatcaagggc

SEQ ID NO: 12966 - protein, 17 aa, synthetic construct
  REGION 1..17: note = Description of Artificial Sequence: Synthetic peptide
SISGSSTYIYCADSIKG

SEQ ID NO: 12967 - DNA, 51 bp, synthetic construct; identical to SEQ ID NO: 12339
  misc_feature 1..51: note = Description of Artificial Sequence: Synthetic oligonucleotide
  source 1..51: mol_type = other DNA

SEQ ID NO: 12968 - protein, 17 aa, synthetic construct
  REGION 1..17: note = Description of Artificial Sequence: Synthetic peptide
VISYDGSNKYYADSVKG

SEQ ID NO: 12969 - DNA, 51 bp, synthetic construct; identical to SEQ ID NO: 12263
  misc_feature 1..51: note = Description of Artificial Sequence: Synthetic oligonucleotide
  source 1..51: mol_type = other DNA

SEQ ID NO: 12970 - protein, 17 aa, synthetic construct
  REGION 1..17: note = Description of Artificial Sequence: Synthetic peptide
VIWHDGSNKYYADSVKG

SEQ ID NO: 12971 - DNA, 51 bp, synthetic construct; identical to SEQ ID NO: 12253
  misc_feature 1..51: note = Description of Artificial Sequence: Synthetic oligonucleotide
  source 1..51: mol_type = other DNA

SEQ ID NO: 12972 - protein, 17 aa, synthetic construct
  REGION 1..17: note = Description of Artificial Sequence: Synthetic peptide
VISGRGGNTFYADSVKG

SEQ ID NO: 12973 - DNA, 51 bp, synthetic construct; identical to SEQ ID NO: 12263
  misc_feature 1..51: note = Description of Artificial Sequence: Synthetic oligonucleotide
  source 1..51: mol_type = other DNA

SEQ ID NO: 12974 - protein, 17 aa, synthetic construct
  REGION 1..17: note = Description of Artificial Sequence: Synthetic peptide
VIWHDGSNKYYADSVKG

SEQ ID NO: 12975 - DNA, 51 bp, synthetic construct
  misc_feature 1..51: note = Description of Artificial Sequence: Synthetic oligonucleotide
  source 1..51: mol_type = other DNA
ggtattagtggtagtggtggtagcacaaacaacgcagactccgtgaagggc

SEQ ID NO: 12976 - protein, 17 aa, synthetic construct
  REGION 1..17: note = Description of Artificial Sequence: Synthetic peptide
GISGSGGSTNNADSVKG

SEQ ID NO: 12977 - DNA, 51 bp, synthetic construct
  misc_feature 1..51: note = Description of Artificial Sequence: Synthetic oligonucleotide
  source 1..51: mol_type = other DNA
gttatatggtatgatgaaagtaataaatactatgaagactccgtgaagggc

SEQ ID NO: 12978 - protein, 17 aa, synthetic construct
  REGION 1..17: note = Description of Artificial Sequence: Synthetic peptide
VIWYDESNKYYEDSVKG

SEQ ID NO: 12979 - DNA, 51 bp, synthetic construct; identical to SEQ ID NO: 12345
  misc_feature 1..51: note = Description of Artificial Sequence: Synthetic oligonucleotide
  source 1..51: mol_type = other DNA

SEQ ID NO: 12980 - protein, 17 aa, synthetic construct
  REGION 1..17: note = Description of Artificial Sequence: Synthetic peptide
VISRSGGYTYYADSVKG

SEQ ID NO: 12981 - DNA, 51 bp, synthetic construct; identical to SEQ ID NO: 12301
  misc_feature 1..51: note = Description of Artificial Sequence: Synthetic oligonucleotide
  source 1..51: mol_type = other DNA

SEQ ID NO: 12982 - protein, 17 aa, synthetic construct
  REGION 1..17: note = Description of Artificial Sequence: Synthetic peptide
VIWYDESNKYYADSVKG

SEQ ID NO: 12983 - DNA, 51 bp, synthetic construct
  misc_feature 1..51: note = Description of Artificial Sequence: Synthetic oligonucleotide
  source 1..51: mol_type = other DNA
actattagtggtagtggtggttggacatattatgcagactccgtgaagggc

SEQ ID NO: 12984 - protein, 17 aa, synthetic construct
  REGION 1..17: note = Description of Artificial Sequence: Synthetic peptide
TISGSGGWTYYADSVKG

SEQ ID NO: 12985 - DNA, 51 bp, synthetic construct; identical to SEQ ID NO: 12445
  misc_feature 1..51: note = Description of Artificial Sequence: Synthetic oligonucleotide
  source 1..51: mol_type = other DNA

SEQ ID NO: 12986 - protein, 17 aa, synthetic construct
  REGION 1..17: note = Description of Artificial Sequence: Synthetic peptide
IISYAGSNKSYADSVKG

SEQ ID NO: 12987 - DNA, 51 bp, synthetic construct; identical to SEQ ID NO: 12153
  misc_feature 1..51: note = Description of Artificial Sequence: Synthetic oligonucleotide
  source 1..51: mol_type = other DNA

SEQ ID NO: 12988 - protein, 17 aa, synthetic construct
  REGION 1..17: note = Description of Artificial Sequence: Synthetic peptide
SISGSSSYIYYADSVKG

SEQ ID NO: 12989 - DNA, 51 bp, synthetic construct
  misc_feature 1..51: note = Description of Artificial Sequence: Synthetic oligonucleotide
  source 1..51: mol_type = other DNA
attatatcatatgctggaagtaataaatactatgcagactccgtgaagggc

SEQ ID NO: 12990 - protein, 17 aa, synthetic construct
  REGION 1..17: note = Description of Artificial Sequence: Synthetic peptide
IISYAGSNKYYADSVKG

SEQ ID NO: 12991 - DNA, 48 bp, synthetic construct; identical to SEQ ID NO: 12377
  misc_feature 1..48: note = Description of Artificial Sequence: Synthetic oligonucleotide
  source 1..48: mol_type = other DNA

SEQ ID NO: 12992 - protein, 16 aa, synthetic construct
  REGION 1..16: note = Description of Artificial Sequence: Synthetic peptide
NIYYSGSTYDNPSLKS

SEQ ID NO: 12993 - DNA, 51 bp, synthetic construct; identical to SEQ ID NO: 12123
  misc_feature 1..51: note = Description of Artificial Sequence: Synthetic oligonucleotide
  source 1..51: mol_type = other DNA

SEQ ID NO: 12994 - protein, 17 aa, synthetic construct
  REGION 1..17: note = Description of Artificial Sequence: Synthetic peptide
VIWYDGSNKYYADSVKG

SEQ ID NO: 12995 - DNA, 51 bp, synthetic construct
  misc_feature 1..51: note = Description of Artificial Sequence: Synthetic oligonucleotide
  source 1..51: mol_type = other DNA
gttattagtggtcgtggtattaacacattctacgcagactccgtgaagggc

SEQ ID NO: 12996 - protein, 17 aa, synthetic construct
  REGION 1..17: note = Description of Artificial Sequence: Synthetic peptide
VISGRGINTFYADSVKG

SEQ ID NO: 12997 - DNA, 48 bp, synthetic construct
  misc_feature 1..48: note = Description of Artificial Sequence: Synthetic oligonucleotide
  source 1..48: mol_type = other DNA
aatatttattatagtgggaacacctacaacaacccgtccctcaagagt

SEQ ID NO: 12998 - protein, 16 aa, synthetic construct
  REGION 1..16: note = Description of Artificial Sequence: Synthetic peptide
NIYYSGNTYNNPSLKS

SEQ ID NO: 12999 - DNA, 51 bp, synthetic construct
  misc_feature 1..51: note = Description of Artificial Sequence: Synthetic oligonucleotide
  source 1..51: mol_type = other DNA
attatatcatatgttggaaataataaatactatgcagactccgtgaagggc

SEQ ID NO: 13000 - protein, 17 aa, synthetic construct
  REGION 1..17: note = Description of Artificial Sequence: Synthetic peptide
IISYVGNNKYYADSVKG

SEQ ID NO: 13001 - DNA, 48 bp, synthetic construct
  misc_feature 1..48: note = Description of Artificial Sequence: Synthetic oligonucleotide
  source 1..48: mol_type = other DNA
agtatctattatagtgggagcacctactacaacccgtccctcaagagt

SEQ ID NO: 13002 - protein, 16 aa, synthetic construct
  REGION 1..16: note = Description of Artificial Sequence: Synthetic peptide
SIYYSGSTYYNPSLKS

SEQ ID NO: 13003 - DNA, 51 bp, synthetic construct
  misc_feature 1..51: note = Description of Artificial Sequence: Synthetic oligonucleotide
  source 1..51: mol_type = other DNA
gctattagtggtggtggtggtaacacattctacgcagactccgtgaagggc

SEQ ID NO: 13004 - protein, 17 aa, synthetic construct
  REGION 1..17: note = Description of Artificial Sequence: Synthetic peptide
AISGGGGNTFYADSVKG

SEQ ID NO: 13005 - DNA, 48 bp, synthetic construct
  misc_feature 1..48: note = Description of Artificial Sequence: Synthetic oligonucleotide
  source 1..48: mol_type = other DNA
agtatttattatagtgggagcgcccagtacaacccgtccctcaagagt

SEQ ID NO: 13006 - protein, 16 aa, synthetic construct
  REGION 1..16: note = Description of Artificial Sequence: Synthetic peptide
SIYYSGSAQYNPSLKS

SEQ ID NO: 13007 - DNA, 48 bp, synthetic construct
  misc_feature 1..48: note = Description of Artificial Sequence: Synthetic oligonucleotide
  source 1..48: mol_type = other DNA
tacattagtattagtagtaccatatactatgcagactctgtgaagggc

SEQ ID NO: 13008 - protein, 16 aa, synthetic construct
  REGION 1..16: note = Description of Artificial Sequence: Synthetic peptide
YISISSTIYYADSVKG

SEQ ID NO: 13009 - DNA, 48 bp, synthetic construct
  misc_feature 1..48: note = Description of Artificial Sequence: Synthetic oligonucleotide
  source 1..48: mol_type = other DNA
aatatctattatagtgggtatccctactacaatccgtccctcaagagt

SEQ ID NO: 13010 - protein, 16 aa, synthetic construct
  REGION 1..16: note = Description of Artificial Sequence: Synthetic peptide
NIYYSGYPYYNPSLKS

SEQ ID NO: 13011 - DNA, 51 bp, synthetic construct; identical to SEQ ID NO: 12231
  misc_feature 1..51: note = Description of Artificial Sequence: Synthetic oligonucleotide
  source 1..51: mol_type = other DNA

SEQ ID NO: 13012 - protein, 17 aa, synthetic construct
  REGION 1..17: note = Description of Artificial Sequence: Synthetic peptide
VIWYEENNQYYADSVKG

SEQ ID NO: 13013 - DNA, 51 bp, synthetic construct; identical to SEQ ID NO: 12361
  misc_feature 1..51: note = Description of Artificial Sequence: Synthetic oligonucleotide
  source 1..51: mol_type = other DNA

SEQ ID NO: 13014 - protein, 17 aa, synthetic construct
  REGION 1..17: note = Description of Artificial Sequence: Synthetic peptide
SISSSSSYIYYADSVKG

SEQ ID NO: 13015 - DNA, 48 bp, synthetic construct
  misc_feature 1..48: note = Description of Artificial Sequence: Synthetic oligonucleotide
  source 1..48: mol_type = other DNA
agtatctattatagtgggagcgcctatcacaacccgtccctcaagagt

SEQ ID NO: 13016 - protein, 16 aa, synthetic construct
  REGION 1..16: note = Description of Artificial Sequence: Synthetic peptide
SIYYSGSAYHNPSLKS

SEQ ID NO: 13017 - DNA, 51 bp, synthetic construct
  misc_feature 1..51: note = Description of Artificial Sequence: Synthetic oligonucleotide
  source 1..51: mol_type = other DNA
tggatgaacactaacagtggtaacacaggctatgcacagaagttccagggc

SEQ ID NO: 13018 - protein, 17 aa, synthetic construct
  REGION 1..17: note = Description of Artificial Sequence: Synthetic peptide
WMNTNSGNTGYAQKFQG

SEQ ID NO: 13019 - DNA, 51 bp, synthetic construct
  misc_feature 1..51: note = Description of Artificial Sequence: Synthetic oligonucleotide
  source 1..51: mol_type = other DNA
gttatatggtttgatggaaataataaatactatgtagattccgtgaagggc

SEQ ID NO: 13020 - protein, 17 aa, synthetic construct
  REGION 1..17: note = Description of Artificial Sequence: Synthetic peptide
VIWFDGNNKYYVDSVKG

SEQ ID NO: 13021 - DNA, 51 bp, synthetic construct; identical to SEQ ID NO: 12701
  misc_feature 1..51: note = Description of Artificial Sequence: Synthetic oligonucleotide
  source 1..51: mol_type = other DNA

SEQ ID NO: 13022 - protein, 17 aa, synthetic construct
  REGION 1..17: note = Description of Artificial Sequence: Synthetic peptide
SISGSSTYIYYADSVKG

SEQ ID NO: 13023 - DNA, 51 bp, synthetic construct
  misc_feature 1..51: note = Description of Artificial Sequence: Synthetic oligonucleotide
  source 1..51: mol_type = other DNA
tccattagtagtagtaataattacatatactacgcagactcagtgaagggc

SEQ ID NO: 13024 - protein, 17 aa, synthetic construct
  REGION 1..17: note = Description of Artificial Sequence: Synthetic peptide
SISSSNNYIYYADSVKG

SEQ ID NO: 13025 - DNA, 48 bp, synthetic construct
  misc_feature 1..48: note = Description of Artificial Sequence: Synthetic oligonucleotide
  source 1..48: mol_type = other DNA
aatatctattatagtgggagcacctacaacaacccgtccctcaagagt

SEQ ID NO: 13026 - protein, 16 aa, synthetic construct
  REGION 1..16: note = Description of Artificial Sequence: Synthetic peptide
NIYYSGSTYNNPSLKS

SEQ ID NO: 13027 - DNA, 48 bp, synthetic construct; identical to SEQ ID NO: 13009
  misc_feature 1..48: note = Description of Artificial Sequence: Synthetic oligonucleotide
  source 1..48: mol_type = other DNA

SEQ ID NO: 13028 - protein, 16 aa, synthetic construct
  REGION 1..16: note = Description of Artificial Sequence: Synthetic peptide
NIYYSGYPYYNPSLKS

SEQ ID NO: 13029 - DNA, 51 bp, synthetic construct; identical to SEQ ID NO: 12293
  misc_feature 1..51: note = Description of Artificial Sequence: Synthetic oligonucleotide
  source 1..51: mol_type = other DNA

SEQ ID NO: 13030 - protein, 17 aa, synthetic construct
  REGION 1..17: note = Description of Artificial Sequence: Synthetic peptide
IISGRGGNTFYADSVKG

SEQ ID NO: 13031 - DNA, 48 bp, synthetic construct
  misc_feature 1..48: note = Description of Artificial Sequence: Synthetic oligonucleotide
  source 1..48: mol_type = other DNA
aatatttattatagtgggagcacctacaccaacccgtccctcaagagt

SEQ ID NO: 13032 - protein, 16 aa, synthetic construct
  REGION 1..16: note = Description of Artificial Sequence: Synthetic peptide
NIYYSGSTYTNPSLKS

SEQ ID NO: 13033 - DNA, 51 bp, synthetic construct
  misc_feature 1..51: note = Description of Artificial Sequence: Synthetic oligonucleotide
  source 1..51: mol_type = other DNA
gttatatcatatgctggaattaataaatcctatgcagactccgtgaagggc

SEQ ID NO: 13034 - protein, 17 aa, synthetic construct
  REGION 1..17: note = Description of Artificial Sequence: Synthetic peptide
VISYAGINKSYADSVKG

SEQ ID NO: 13035 - DNA, 51 bp, synthetic construct; identical to SEQ ID NO: 12567
  misc_feature 1..51: note = Description of Artificial Sequence: Synthetic oligonucleotide
  source 1..51: mol_type = other DNA

SEQ ID NO: 13036 - protein, 17 aa, synthetic construct
  REGION 1..17: note = Description of Artificial Sequence: Synthetic peptide
VIWHDGSNKYYVDSVKG

SEQ ID NO: 13037 - DNA, 51 bp, synthetic construct; identical to SEQ ID NO: 12161
  misc_feature 1..51: note = Description of Artificial Sequence: Synthetic oligonucleotide
  source 1..51: mol_type = other DNA

SEQ ID NO: 13038 - protein, 17 aa, synthetic construct
  REGION 1..17: note = Description of Artificial Sequence: Synthetic peptide
WMHPNSGNTGYAQKFQG

SEQ ID NO: 13039 - DNA, 51 bp, synthetic construct; identical to SEQ ID NO: 12827
  misc_feature 1..51: note = Description of Artificial Sequence: Synthetic oligonucleotide
  source 1..51: mol_type = other DNA

SEQ ID NO: 13040 - protein, 17 aa, synthetic construct
  REGION 1..17: note = Description of Artificial Sequence: Synthetic peptide
VISGRGVNTFYADSVKG

SEQ ID NO: 13041 - DNA, 51 bp, synthetic construct; identical to SEQ ID NO: 12301
  misc_feature 1..51: note = Description of Artificial Sequence: Synthetic oligonucleotide
  source 1..51: mol_type = other DNA

SEQ ID NO: 13042 - protein, 17 aa, synthetic construct
  REGION 1..17: note = Description of Artificial Sequence: Synthetic peptide
VIWYDESNKYYADSVKG

SEQ ID NO: 13043 - DNA, 51 bp, synthetic construct
  misc_feature 1..51: note = Description of Artificial Sequence: Synthetic oligonucleotide
  source 1..51: mol_type = other DNA
gttatttggtatgaggaaagtaataaatactatgtagactccgtgaggggc

SEQ ID NO: 13044 - protein, 17 aa, synthetic construct
  REGION 1..17: note = Description of Artificial Sequence: Synthetic peptide
VIWYEESNKYYVDSVRG

SEQ ID NO: 13045 - DNA, 51 bp, synthetic construct
  misc_feature 1..51: note = Description of Artificial Sequence: Synthetic oligonucleotide
  source 1..51: mol_type = other DNA
gttatatggtatgatggaaataataattactatgcagactccgtgaagggc

SEQ ID NO: 13046 - protein, 17 aa, synthetic construct
  REGION 1..17: note = Description of Artificial Sequence: Synthetic peptide
VIWYDGNNNYYADSVKG

SEQ ID NO: 13047 - DNA, 51 bp, synthetic construct; identical to SEQ ID NO: 12617
  misc_feature 1..51: note = Description of Artificial Sequence: Synthetic oligonucleotide
  source 1..51: mol_type = other DNA

SEQ ID NO: 13048 - protein, 17 aa, synthetic construct
  REGION 1..17: note = Description of Artificial Sequence: Synthetic peptide
VIWYDVSNKYYADSVKG

SEQ ID NO: 13049 - DNA, 51 bp, synthetic construct
  misc_feature 1..51: note = Description of Artificial Sequence: Synthetic oligonucleotide
  source 1..51: mol_type = other DNA
gttatttggtatgatgaaaataatgaatactatgcagactccgtgaagggc

SEQ ID NO: 13050 - protein, 17 aa, synthetic construct
  REGION 1..17: note = Description of Artificial Sequence: Synthetic peptide
VIWYDENNEYYADSVKG

SEQ ID NO: 13051 - DNA, 51 bp, synthetic construct
  misc_feature 1..51: note = Description of Artificial Sequence: Synthetic oligonucleotide
  source 1..51: mol_type = other DNA
tggatcaaccctaacagtggtggcacaaactatgtacagaagtttcagggc

SEQ ID NO: 13052 - protein, 17 aa, synthetic construct
  REGION 1..17: note = Description of Artificial Sequence: Synthetic peptide
WINPNSGGTNYVQKFQG

SEQ ID NO: 13053 - DNA, 51 bp, synthetic construct
  misc_feature 1..51: note = Description of Artificial Sequence: Synthetic oligonucleotide
  source 1..51: mol_type = other DNA
actattagtgttggtggtggtaccacatactacgcagactccgtgaagggc

SEQ ID NO: 13054 - protein, 17 aa, synthetic construct
  REGION 1..17: note = Description of Artificial Sequence: Synthetic peptide
TISVGGGTTYYADSVKG

SEQ ID NO: 13055 - DNA, 51 bp, synthetic construct
  misc_feature 1..51: note = Description of Artificial Sequence: Synthetic oligonucleotide
  source 1..51: mol_type = other DNA
gttattagtggtagtggtggtaacacatacttcgcagactccgtgaagggc

SEQ ID NO: 13056 - protein, 17 aa, synthetic construct
  REGION 1..17: note = Description of Artificial Sequence: Synthetic peptide
VISGSGGNTYFADSVKG

SEQ ID NO: 13057 - DNA, 51 bp, synthetic construct
  misc_feature 1..51: note = Description of Artificial Sequence: Synthetic oligonucleotide
  source 1..51: mol_type = other DNA
gttattagtggtagtggtggtaccacattctacgcagactccgtgaagggc

SEQ ID NO: 13058 - protein, 17 aa, synthetic construct
  REGION 1..17: note = Description of Artificial Sequence: Synthetic peptide
VISGSGGTTFYADSVKG

SEQ ID NO: 13059 - DNA, 51 bp, synthetic construct
  misc_feature 1..51: note = Description of Artificial Sequence: Synthetic oligonucleotide
  source 1..51: mol_type = other DNA
tccattagtggtagtagtagttacatgtactacgcagactcagtgaagggc

SEQ ID NO: 13060 - protein, 17 aa, synthetic construct
  REGION 1..17: note = Description of Artificial Sequence: Synthetic peptide
SISGSSSYMYYADSVKG

SEQ ID NO: 13061 - DNA, 51 bp, synthetic construct
  misc_feature 1..51: note = Description of Artificial Sequence: Synthetic oligonucleotide
  source 1..51: mol_type = other DNA
tggatcaaccctaacagtggtggcacaaactatgaacagaagtttcagggc

SEQ ID NO: 13062 - protein, 17 aa, synthetic construct
  REGION 1..17: note = Description of Artificial Sequence: Synthetic peptide
WINPNSGGTNYEQKFQG

SEQ ID NO: 13063 - DNA, 51 bp, synthetic construct; identical to SEQ ID NO: 12153
  misc_feature 1..51: note = Description of Artificial Sequence: Synthetic oligonucleotide
  source 1..51: mol_type = other DNA

SEQ ID NO: 13064 - protein, 17 aa, synthetic construct
  REGION 1..17: note = Description of Artificial Sequence: Synthetic peptide
SISGSSSYIYYADSVKG

SEQ ID NO: 13065 - DNA, 51 bp, synthetic construct
  misc_feature 1..51: note = Description of Artificial Sequence: Synthetic oligonucleotide
  source 1..51: mol_type = other DNA
tggatcaaccctaacagtaatggcacaatctctgcacagaagtttcagggc

SEQ ID NO: 13066 - protein, 17 aa, synthetic construct
  REGION 1..17: note = Description of Artificial Sequence: Synthetic peptide
WINPNSNGTISAQKFQG

SEQ ID NO: 13067 - DNA, 51 bp, synthetic construct
  misc_feature 1..51: note = Description of Artificial Sequence: Synthetic oligonucleotide
  source 1..51: mol_type = other DNA
tggatcaatcctaacagtggtggcacaaactatgcacagaagtttcagggc

SEQ ID NO: 13068 - protein, 17 aa, synthetic construct
  REGION 1..17: note = Description of Artificial Sequence: Synthetic peptide
WINPNSGGTNYAQKFQG

SEQ ID NO: 13069 - DNA, 57 bp, synthetic construct; identical to SEQ ID NO: 12475
  misc_feature 1..57: note = Description of Artificial Sequence: Synthetic oligonucleotide
  source 1..57: mol_type = other DNA

SEQ ID NO: 13070 - protein, 19 aa, synthetic construct
  REGION 1..19: note = Description of Artificial Sequence: Synthetic peptide
RIKSKTDGGTTDYAAPVKG

SEQ ID NO: 13071 - DNA, 51 bp, synthetic construct
  misc_feature 1..51: note = Description of Artificial Sequence: Synthetic oligonucleotide
  source 1..51: mol_type = other DNA
tggatcaaccctaacagtggtgggacaaacaatgcacagaagtttcagggc

SEQ ID NO: 13072 - protein, 17 aa, synthetic construct
  REGION 1..17: note = Description of Artificial Sequence: Synthetic peptide
WINPNSGGTNNAQKFQG

SEQ ID NO: 13073 - DNA, 51 bp, synthetic construct
  misc_feature 1..51: note = Description of Artificial Sequence: Synthetic oligonucleotide
  source 1..51: mol_type = other DNA
gctcttagtggtcgtggtggtagcacatactacgcagactccgtgaagggc

SEQ ID NO: 13074 - protein, 17 aa, synthetic construct
  REGION 1..17: note = Description of Artificial Sequence: Synthetic peptide
ALSGRGGSTYYADSVKG

SEQ ID NO: 13075 - DNA, 51 bp, synthetic construct; identical to SEQ ID NO: 12505
  misc_feature 1..51: note = Description of Artificial Sequence: Synthetic oligonucleotide
  source 1..51: mol_type = other DNA

SEQ ID NO: 13076 - protein, 17 aa, synthetic construct
  REGION 1..17: note = Description of Artificial Sequence: Synthetic peptide
WMHPDSGNTGYAQKFQG

SEQ ID NO: 13077 - DNA, 48 bp, synthetic construct; identical to SEQ ID NO: 12203
  misc_feature 1..48: note = Description of Artificial Sequence: Synthetic oligonucleotide
  source 1..48: mol_type = other DNA

SEQ ID NO: 13078 - protein, 16 aa, synthetic construct
  REGION 1..16: note = Description of Artificial Sequence: Synthetic peptide
LIYWNDDKRYSPSLKS

SEQ ID NO: 13079 - DNA, 51 bp, synthetic construct; identical to SEQ ID NO: 12701
  misc_feature 1..51: note = Description of Artificial Sequence: Synthetic oligonucleotide
  source 1..51: mol_type = other DNA

SEQ ID NO: 13080 - protein, 17 aa, synthetic construct
  REGION 1..17: note = Description of Artificial Sequence: Synthetic peptide
SISGSSTYIYYADSVKG

SEQ ID NO: 13081 - DNA, 51 bp, synthetic construct
  misc_feature 1..51: note = Description of Artificial Sequence: Synthetic oligonucleotide
  source 1..51: mol_type = other DNA
tggatcaaccctaacaataatggcacaaactatgcacagaagtttcagggc

SEQ ID NO: 13082 - protein, 17 aa, synthetic construct
  REGION 1..17: note = Description of Artificial Sequence: Synthetic peptide
WINPNNNGTNYAQKFQG

SEQ ID NO: 13083 - DNA, 48 bp, synthetic construct
  misc_feature 1..48: note = Description of Artificial Sequence: Synthetic oligonucleotide
  source 1..48: mol_type = other DNA
ctcatttattggaataatgataaggtctacagcccatctctgaagagc

SEQ ID NO: 13084 - protein, 16 aa, synthetic construct
  REGION 1..16: note = Description of Artificial Sequence: Synthetic peptide
LIYWNNDKVYSPSLKS

SEQ ID NO: 13085 - DNA, 51 bp, synthetic construct
  misc_feature 1..51: note = Description of Artificial Sequence: Synthetic oligonucleotide
  source 1..51: mol_type = other DNA
tggatgtaccctaacagtggtaacacgggctatgcacagaagttccagggc

SEQ ID NO: 13086 - protein, 17 aa, synthetic construct
  REGION 1..17: note = Description of Artificial Sequence: Synthetic peptide
WMYPNSGNTGYAQKFQG

SEQ ID NO: 13087 - DNA, 51 bp, synthetic construct
  misc_feature 1..51: note = Description of Artificial Sequence: Synthetic oligonucleotide
  source 1..51: mol_type = other DNA
gctattagtggtcgtggtggtagcacatactacgcagactccgtgaagggc

SEQ ID NO: 13088 - protein, 17 aa, synthetic construct
  REGION 1..17: note = Description of Artificial Sequence: Synthetic peptide
AISGRGGSTYYADSVKG

SEQ ID NO: 13089 - DNA, 51 bp, synthetic construct; identical to SEQ ID NO: 12161
  misc_feature 1..51: note = Description of Artificial Sequence: Synthetic oligonucleotide
  source 1..51: mol_type = other DNA

SEQ ID NO: 13090 - protein, 17 aa, synthetic construct
  REGION 1..17: note = Description of Artificial Sequence: Synthetic peptide
WMHPNSGNTGYAQKFQG

SEQ ID NO: 13091 - DNA, 51 bp, synthetic construct; identical to SEQ ID NO: 12103
  misc_feature 1..51: note = Description of Artificial Sequence: Synthetic oligonucleotide
  source 1..51: mol_type = other DNA

SEQ ID NO: 13092 - protein, 17 aa, synthetic construct
  REGION 1..17: note = Description of Artificial Sequence: Synthetic peptide
WMNPNSGNTGYAQKFQG

SEQ ID NO: 13093 - DNA, 51 bp, synthetic construct
  misc_feature 1..51: note = Description of Artificial Sequence: Synthetic oligonucleotide
  source 1..51: mol_type = other DNA
tggatgcaccctaacagtggtaacacaggctgtgcacagaagttccagggc

SEQ ID NO: 13094 - protein, 17 aa, synthetic construct
  REGION 1..17: note = Description of Artificial Sequence: Synthetic peptide
WMHPNSGNTGCAQKFQG

SEQ ID NO: 13095 - DNA, 51 bp, synthetic construct; identical to SEQ ID NO: 12643
  misc_feature 1..51: note = Description of Artificial Sequence: Synthetic oligonucleotide
  source 1..51: mol_type = other DNA

SEQ ID NO: 13096 - protein, 17 aa, synthetic construct
  REGION 1..17: note = Description of Artificial Sequence: Synthetic peptide
WISPKNGGTNYAQKFQG

SEQ ID NO: 13097 - DNA, 51 bp, synthetic construct; identical to SEQ ID NO: 12103
  misc_feature 1..51: note = Description of Artificial Sequence: Synthetic oligonucleotide
  source 1..51: mol_type = other DNA

SEQ ID NO: 13098 - protein, 17 aa, synthetic construct
  REGION 1..17: note = Description of Artificial Sequence: Synthetic peptide
WMNPNSGNTGYAQKFQG

SEQ ID NO: 13099 - DNA, 51 bp, synthetic construct; identical to SEQ ID NO: 12647
  misc_feature 1..51: note = Description of Artificial Sequence: Synthetic oligonucleotide
  source 1..51: mol_type = other DNA

SEQ ID NO: 13100 - protein, 17 aa, synthetic construct
  REGION 1..17: note = Description of Artificial Sequence: Synthetic peptide
WMHPNSGNTGFAQKFRG

SEQ ID NO: 13101 - DNA, 51 bp, synthetic construct; identical to SEQ ID NO: 12701
  misc_feature 1..51: note = Description of Artificial Sequence: Synthetic oligonucleotide
  source 1..51: mol_type = other DNA

SEQ ID NO: 13102 - protein, 17 aa, synthetic construct
  REGION 1..17: note = Description of Artificial Sequence: Synthetic peptide
SISGSSTYIYYADSVKG

SEQ ID NO: 13103 - DNA, 51 bp, synthetic construct; identical to SEQ ID NO: 12531
  misc_feature 1..51: note = Description of Artificial Sequence: Synthetic oligonucleotide
  source 1..51: mol_type = other DNA

SEQ ID NO: 13104 - protein, 17 aa, synthetic construct
  REGION 1..17: note = Description of Artificial Sequence: Synthetic peptide
AISGRGGSTFHADSVKG

SEQ ID NO: 13105 - DNA, 51 bp, synthetic construct; identical to SEQ ID NO: 12103
  misc_feature 1..51: note = Description of Artificial Sequence: Synthetic oligonucleotide
  source 1..51: mol_type = other DNA

SEQ ID NO: 13106 - protein, 17 aa, synthetic construct
  REGION 1..17: note = Description of Artificial Sequence: Synthetic peptide
WMNPNSGNTGYAQKFQG

SEQ ID NO: 13107 - DNA, 51 bp, synthetic construct; identical to SEQ ID NO: 12153
  misc_feature 1..51: note = Description of Artificial Sequence: Synthetic oligonucleotide
  source 1..51: mol_type = other DNA

SEQ ID NO: 13108 - protein, 17 aa, synthetic construct
  REGION 1..17: note = Description of Artificial Sequence: Synthetic peptide
SISGSSSYIYYADSVKG

SEQ ID NO: 13109 - DNA, 51 bp, synthetic construct; identical to SEQ ID NO: 12531
  misc_feature 1..51: note = Description of Artificial Sequence: Synthetic oligonucleotide
  source 1..51: mol_type = other DNA

SEQ ID NO: 13110 - protein, 17 aa, synthetic construct
  REGION 1..17: note = Description of Artificial Sequence: Synthetic peptide
AISGRGGSTFHADSVKG

SEQ ID NO: 13111 - DNA, 51 bp, synthetic construct; identical to SEQ ID NO: 12103
  misc_feature 1..51: note = Description of Artificial Sequence: Synthetic oligonucleotide
  source 1..51: mol_type = other DNA

SEQ ID NO: 13112 - protein, 17 aa, synthetic construct
  REGION 1..17: note = Description of Artificial Sequence: Synthetic peptide
WMNPNSGNTGYAQKFQG

SEQ ID NO: 13113 - DNA, 51 bp, synthetic construct; identical to SEQ ID NO: 12103
  misc_feature 1..51: note = Description of Artificial Sequence: Synthetic oligonucleotide
  source 1..51: mol_type = other DNA

SEQ ID NO: 13114 - protein, 17 aa, synthetic construct
  REGION 1..17: note = Description of Artificial Sequence: Synthetic peptide
WMNPNSGNTGYAQKFQG

SEQ ID NO: 13115 - DNA, 51 bp, synthetic construct
  misc_feature 1..51: note = Description of Artificial Sequence: Synthetic oligonucleotide
  source 1..51: mol_type = other DNA
actattagtggtcgtggtggtagcacattccacgcagactccgtgaagggc

SEQ ID NO: 13116 - protein, 17 aa, synthetic construct
  REGION 1..17: note = Description of Artificial Sequence: Synthetic peptide
TISGRGGSTFHADSVKG

SEQ ID NO: 13117 - DNA, 57 bp, synthetic construct; identical to SEQ ID NO: 12475
  misc_feature 1..57: note = Description of Artificial Sequence: Synthetic oligonucleotide
  source 1..57: mol_type = other DNA

SEQ ID NO: 13118 - protein, 19 aa, synthetic construct
  REGION 1..19: note = Description of Artificial Sequence: Synthetic peptide
RIKSKTDGGTTDYAAPVKG

SEQ ID NO: 13119 - DNA, 48 bp, synthetic construct
  misc_feature 1..48: note = Description of Artificial Sequence: Synthetic oligonucleotide
  source 1..48: mol_type = other DNA
ctcatttattggagtgatgataagcgctacagcccatctctgaagagc

SEQ ID NO: 13120 - protein, 16 aa, synthetic construct
  REGION 1..16: note = Description of Artificial Sequence: Synthetic peptide
LIYWSDDKRYSPSLKS

SEQ ID NO: 13121 - DNA, 51 bp, synthetic construct; identical to SEQ ID NO: 12391
  misc_feature 1..51: note = Description of Artificial Sequence: Synthetic oligonucleotide
  source 1..51: mol_type = other DNA

SEQ ID NO: 13122 - protein, 17 aa, synthetic construct
  REGION 1..17: note = Description of Artificial Sequence: Synthetic peptide
VIWYDENNKYYVDSVKG

SEQ ID NO: 13123 - DNA, 51 bp, synthetic construct; identical to SEQ ID NO: 13059
  misc_feature 1..51: note = Description of Artificial Sequence: Synthetic oligonucleotide
  source 1..51: mol_type = other DNA

SEQ ID NO: 13124 - protein, 17 aa, synthetic construct
  REGION 1..17: note = Description of Artificial Sequence: Synthetic peptide
SISGSSSYMYYADSVKG

SEQ ID NO: 13125 - DNA, 51 bp, synthetic construct; identical to SEQ ID NO: 12645
  misc_feature 1..51: note = Description of Artificial Sequence: Synthetic oligonucleotide
  source 1..51: mol_type = other DNA

SEQ ID NO: 13126 - protein, 17 aa, synthetic construct
  REGION 1..17: note = Description of Artificial Sequence: Synthetic peptide
WINPNRGGTNYAQKFQD

SEQ ID NO: 13127 - DNA, 51 bp, synthetic construct; identical to SEQ ID NO: 12361
  misc_feature 1..51: note = Description of Artificial Sequence: Synthetic oligonucleotide
  source 1..51: mol_type = other DNA

SEQ ID NO: 13128 - protein, 17 aa, synthetic construct
  REGION 1..17: note = Description of Artificial Sequence: Synthetic peptide
SISSSSSYIYYADSVKG

SEQ ID NO: 13129 - DNA, 51 bp, synthetic construct; identical to SEQ ID NO: 12153
  misc_feature 1..51: note = Description of Artificial Sequence: Synthetic oligonucleotide
  source 1..51: mol_type = other DNA

SEQ ID NO: 13130 - protein, 17 aa, synthetic construct
  REGION 1..17: note = Description of Artificial Sequence: Synthetic peptide
SISGSSSYIYYADSVKG

SEQ ID NO: 13131 - DNA, 57 bp, synthetic construct; identical to SEQ ID NO: 12475
  misc_feature 1..57: note = Description of Artificial Sequence: Synthetic oligonucleotide
  source 1..57: mol_type = other DNA

SEQ ID NO: 13132 - protein, 19 aa, synthetic construct
  REGION 1..19: note = Description of Artificial Sequence: Synthetic peptide
RIKSKTDGGTTDYAAPVKG

SEQ ID NO: 13133 - DNA, 51 bp, synthetic construct
  misc_feature 1..51: note = Description of Artificial Sequence: Synthetic oligonucleotide
  source 1..51: mol_type = other DNA
tccattagtggtggtgccggtcacatatattactcagactcagtgaagggc

SEQ ID NO: 13134 - protein, 17 aa, synthetic construct
  REGION 1..17: note = Description of Artificial Sequence: Synthetic peptide
SISGGAGHIYYSDSVKG

SEQ ID NO: 13135 - DNA, 48 bp, synthetic construct
  misc_feature 1..48: note = Description of Artificial Sequence: Synthetic oligonucleotide
  source 1..48: mol_type = other DNA
tccattagtactagtactttcatatactacgcagattcagtgaagggc

SEQ ID NO: 13136 - protein, 16 aa, synthetic construct
  REGION 1..16: note = Description of Artificial Sequence: Synthetic peptide
SISTSTFIYYADSVKG

SEQ ID NO: 13137 - DNA, 51 bp, synthetic construct
  misc_feature 1..51: note = Description of Artificial Sequence: Synthetic oligonucleotide
  source 1..51: mol_type = other DNA
tccattagtggtaatagtggttacatatactacgcagactcagtgaagggc

SEQ ID NO: 13138 - protein, 17 aa, synthetic construct
  REGION 1..17: note = Description of Artificial Sequence: Synthetic peptide
SISGNSGYIYYADSVKG

SEQ ID NO: 13139 - DNA, 48 bp, synthetic construct; identical to SEQ ID NO: 12405
  misc_feature 1..48: note = Description of Artificial Sequence: Synthetic oligonucleotide
  source 1..48: mol_type = other DNA

SEQ ID NO: 13140 - protein, 16 aa, synthetic construct
  REGION 1..16: note = Description of Artificial Sequence: Synthetic peptide
SIYYSGSANYNPSLKS

SEQ ID NO: 13141 - DNA, 51 bp, synthetic construct
  misc_feature 1..51: note = Description of Artificial Sequence: Synthetic oligonucleotide
  source 1..51: mol_type = other DNA
gttattagtgggcgtggtggtagcacatactacgcagactccgtgaagggc

SEQ ID NO: 13142 - protein, 17 aa, synthetic construct
  REGION 1..17: note = Description of Artificial Sequence: Synthetic peptide
VISGRGGSTYYADSVKG

SEQ ID NO: 13143 - DNA, 48 bp, synthetic construct
  misc_feature 1..48: note = Description of Artificial Sequence: Synthetic oligonucleotide
  source 1..48: mol_type = other DNA
aatatttattatagtgggagcgcctacaacaacccgtccctcaagagt

SEQ ID NO: 13144 - protein, 16 aa, synthetic construct
  REGION 1..16: note = Description of Artificial Sequence: Synthetic peptide
NIYYSGSAYNNPSLKS

SEQ ID NO: 13145 - DNA, 51 bp, synthetic construct; identical to SEQ ID NO: 12361
  misc_feature 1..51: note = Description of Artificial Sequence: Synthetic oligonucleotide
  source 1..51: mol_type = other DNA

SEQ ID NO: 13146 - protein, 17 aa, synthetic construct
  REGION 1..17: note = Description of Artificial Sequence: Synthetic peptide
SISSSSSYIYYADSVKG

SEQ ID NO: 13147 - DNA, 51 bp, synthetic construct; identical to SEQ ID NO: 12161
  misc_feature 1..51: note = Description of Artificial Sequence: Synthetic oligonucleotide
  source 1..51: mol_type = other DNA

SEQ ID NO: 13148 - protein, 17 aa, synthetic construct
  REGION 1..17: note = Description of Artificial Sequence: Synthetic peptide
WMHPNSGNTGYAQKFQG

SEQ ID NO: 13149 - DNA, 51 bp, synthetic construct; identical to SEQ ID NO: 12161
  misc_feature 1..51: note = Description of Artificial Sequence: Synthetic oligonucleotide
  source 1..51: mol_type = other DNA

SEQ ID NO: 13150 - protein, 17 aa, synthetic construct
  REGION 1..17: note = Description of Artificial Sequence: Synthetic peptide
WMHPNSGNTGYAQKFQG

SEQ ID NO: 13151 - DNA, 51 bp, synthetic construct; identical to SEQ ID NO: 13051
  misc_feature 1..51: note = Description of Artificial Sequence: Synthetic oligonucleotide
  source 1..51: mol_type = other DNA

SEQ ID NO: 13152 - protein, 17 aa, synthetic construct
  REGION 1..17: note = Description of Artificial Sequence: Synthetic peptide
WINPNSGGTNYVQKFQG

SEQ ID NO: 13153 - DNA, 51 bp, synthetic construct; identical to SEQ ID NO: 13051
  misc_feature 1..51: note = Description of Artificial Sequence: Synthetic oligonucleotide
  source 1..51: mol_type = other DNA

SEQ ID NO: 13154 - protein, 17 aa, synthetic construct
  REGION 1..17: note = Description of Artificial Sequence: Synthetic peptide
WINPNSGGTNYVQKFQG

SEQ ID NO: 13155 - DNA, 51 bp, synthetic construct
  misc_feature 1..51: note = Description of Artificial Sequence: Synthetic oligonucleotide
  source 1..51: mol_type = other DNA
tggatgcaccctaacagtggtaacacaggctatgcaaagaagttccagggc

SEQ ID NO: 13156 - protein, 17 aa, synthetic construct
  REGION 1..17: note = Description of Artificial Sequence: Synthetic peptide
WMHPNSGNTGYAKKFQG

SEQ ID NO: 13157 - DNA, 51 bp, synthetic construct; identical to SEQ ID NO: 12499
  misc_feature 1..51: note = Description of Artificial Sequence: Synthetic oligonucleotide
  source 1..51: mol_type = other DNA

SEQ ID NO: 13158 - protein, 17 aa, synthetic construct
  REGION 1..17: note = Description of Artificial Sequence: Synthetic peptide
WMYPNSGNTGYAQKFQG

SEQ ID NO: 13159 - DNA, 51 bp, synthetic construct
  misc_feature 1..51: note = Description of Artificial Sequence: Synthetic oligonucleotide
  source 1..51: mol_type = other DNA
attatctggcatgatggaagtaataaatactatgcagactccgtgaagggc

SEQ ID NO: 13160 - protein, 17 aa, synthetic construct
  REGION 1..17: note = Description of Artificial Sequence: Synthetic peptide
IIWHDGSNKYYADSVKG

SEQ ID NO: 13161 - DNA, 51 bp, synthetic construct; identical to SEQ ID NO: 13081
  misc_feature 1..51: note = Description of Artificial Sequence: Synthetic oligonucleotide
  source 1..51: mol_type = other DNA

SEQ ID NO: 13162 - protein, 17 aa, synthetic construct
  REGION 1..17: note = Description of Artificial Sequence: Synthetic peptide
WINPNNNGTNYAQKFQG

SEQ ID NO: 13163 - DNA, 51 bp, synthetic construct
  misc_feature 1..51: note = Description of Artificial Sequence: Synthetic oligonucleotide
  source 1..51: mol_type = other DNA
tgggtccaccctaacagtggtggcacaaactttgcacagaagtttcaggac

SEQ ID NO: 13164 - protein, 17 aa, synthetic construct
  REGION 1..17: note = Description of Artificial Sequence: Synthetic peptide
WVHPNSGGTNFAQKFQD

SEQ ID NO: 13165 - DNA, 51 bp, synthetic construct; identical to SEQ ID NO: 13085
  misc_feature 1..51: note = Description of Artificial Sequence: Synthetic oligonucleotide
  source 1..51: mol_type = other DNA

SEQ ID NO: 13166 - protein, 17 aa, synthetic construct
  REGION 1..17: note = Description of Artificial Sequence: Synthetic peptide
WMYPNSGNTGYAQKFQG

SEQ ID NO: 13167 - DNA, 51 bp, synthetic construct; identical to SEQ ID NO: 12167
  misc_feature 1..51: note = Description of Artificial Sequence: Synthetic oligonucleotide
  source 1..51: mol_type = other DNA

SEQ ID NO: 13168 - protein, 17 aa, synthetic construct
  REGION 1..17: note = Description of Artificial Sequence: Synthetic peptide
VIWYDGSNKYYADSVKG

SEQ ID NO: 13169 - DNA, 51 bp, synthetic construct; identical to SEQ ID NO: 12123
  misc_feature 1..51: note = Description of Artificial Sequence: Synthetic oligonucleotide
  source 1..51: mol_type = other DNA

SEQ ID NO: 13170 - protein, 17 aa, synthetic construct
  REGION 1..17: note = Description of Artificial Sequence: Synthetic peptide
VIWYDGSNKYYADSVKG

SEQ ID NO: 13171 - DNA, 51 bp, synthetic construct; identical to SEQ ID NO: 12123
  misc_feature 1..51: note = Description of Artificial Sequence: Synthetic oligonucleotide
  source 1..51: mol_type = other DNA

SEQ ID NO: 13172 - protein, 17 aa, synthetic construct
  REGION 1..17: note = Description of Artificial Sequence: Synthetic peptide
VIWYDGSNKYYADSVKG

SEQ ID NO: 13173 - DNA, 51 bp, synthetic construct
  misc_feature 1..51: note = Description of Artificial Sequence: Synthetic oligonucleotide
  source 1..51: mol_type = other DNA
gttatatggcatgatggaagtaatgcatactatgcagactccgtgaagggc

SEQ ID NO: 13174 - protein, 17 aa, synthetic construct
  REGION 1..17: note = Description of Artificial Sequence: Synthetic peptide
VIWHDGSNAYYADSVKG

SEQ ID NO: 13175 - DNA, 51 bp, synthetic construct; identical to SEQ ID NO: 13155
  misc_feature 1..51: note = Description of Artificial Sequence: Synthetic oligonucleotide
  source 1..51: mol_type = other DNA

SEQ ID NO: 13176 - protein, 17 aa, synthetic construct
  REGION 1..17: note = Description of Artificial Sequence: Synthetic peptide
WMHPNSGNTGYAKKFQG

SEQ ID NO: 13177 - DNA, 51 bp, synthetic construct
  misc_feature 1..51: note = Description of Artificial Sequence: Synthetic oligonucleotide
  source 1..51: mol_type = other DNA
gccattagtggtaatagtacttacatatactacgcagactcgttgaagggc

SEQ ID NO: 13178 - protein, 17 aa, synthetic construct
  REGION 1..17: note = Description of Artificial Sequence: Synthetic peptide
AISGNSTYIYYADSLKG

SEQ ID NO: 13179 - DNA, 51 bp, synthetic construct
  misc_feature 1..51: note = Description of Artificial Sequence: Synthetic oligonucleotide
  source 1..51: mol_type = other DNA
gctattagtggtcgtggtgttaacacattcgacgcagactccgtgaagggc

SEQ ID NO: 13180 - protein, 17 aa, synthetic construct
  REGION 1..17: note = Description of Artificial Sequence: Synthetic peptide
AISGRGVNTFDADSVKG

SEQ ID NO: 13181 - DNA, 51 bp, synthetic construct; identical to SEQ ID NO: 12491
  misc_feature 1..51: note = Description of Artificial Sequence: Synthetic oligonucleotide
  source 1..51: mol_type = other DNA

SEQ ID NO: 13182 - protein, 17 aa, synthetic construct
  REGION 1..17: note = Description of Artificial Sequence: Synthetic peptide
VIWYDENNKYYADSVKG

SEQ ID NO: 13183 - DNA, 51 bp, synthetic construct
  misc_feature 1..51: note = Description of Artificial Sequence: Synthetic oligonucleotide
  source 1..51: mol_type = other DNA
tccattagtggaagtagtacttacatatactacgcagactcagtgaagggc

SEQ ID NO: 13184 - protein, 17 aa, synthetic construct
  REGION 1..17: note = Description of Artificial Sequence: Synthetic peptide
SISGSSTYIYYADSVKG

SEQ ID NO: 13185 - DNA, 51 bp, synthetic construct
  misc_feature 1..51: note = Description of Artificial Sequence: Synthetic oligonucleotide
  source 1..51: mol_type = other DNA
gctattagtggtcgtggtattaacacattcgacgcagactccgtgaagggc

SEQ ID NO: 13186 - protein, 17 aa, synthetic construct
  REGION 1..17: note = Description of Artificial Sequence: Synthetic peptide
AISGRGINTFDADSVKG

SEQ ID NO: 13187 - DNA, 51 bp, synthetic construct
  misc_feature 1..51: note = Description of Artificial Sequence: Synthetic oligonucleotide
  source 1..51: mol_type = other DNA
tacattagtagtagtggtattaccaaatactacgcagactctatgaagggc

SEQ ID NO: 13188 - protein, 17 aa, synthetic construct
  REGION 1..17: note = Description of Artificial Sequence: Synthetic peptide
YISSSGITKYYADSMKG

SEQ ID NO: 13189 - DNA, 51 bp, synthetic construct; identical to SEQ ID NO: 12161
  misc_feature 1..51: note = Description of Artificial Sequence: Synthetic oligonucleotide
  source 1..51: mol_type = other DNA

SEQ ID NO: 13190 - protein, 17 aa, synthetic construct
  REGION 1..17: note = Description of Artificial Sequence: Synthetic peptide
WMHPNSGNTGYAQKFQG

SEQ ID NO: 13191 - DNA, 51 bp, synthetic construct; identical to SEQ ID NO: 13185
  misc_feature 1..51: note = Description of Artificial Sequence: Synthetic oligonucleotide
  source 1..51: mol_type = other DNA

SEQ ID NO: 13192 - protein, 17 aa, synthetic construct
  REGION 1..17: note = Description of Artificial Sequence: Synthetic peptide
AISGRGINTFDADSVKG

SEQ ID NO: 13193 - DNA, 51 bp, synthetic construct
  misc_feature 1..51: note = Description of Artificial Sequence: Synthetic oligonucleotide
  source 1..51: mol_type = other DNA
tacattagtagtagtggtagaaccatattctacgcagactctttgaagggc

SEQ ID NO: 13194 - protein, 17 aa, synthetic construct
  REGION 1..17: note = Description of Artificial Sequence: Synthetic peptide
YISSSGRTIFYADSLKG

SEQ ID NO: 13195 - DNA, 51 bp, synthetic construct
  misc_feature 1..51: note = Description of Artificial Sequence: Synthetic oligonucleotide
  source 1..51: mol_type = other DNA
gctattagtggtagtggtagtaacacattctacgcagactccgtgaagggc

SEQ ID NO: 13196 - protein, 17 aa, synthetic construct
  REGION 1..17: note = Description of Artificial Sequence: Synthetic peptide
AISGSGSNTFYADSVKG

SEQ ID NO: 13197 - DNA, 51 bp, synthetic construct; identical to SEQ ID NO: 12123
  misc_feature 1..51: note = Description of Artificial Sequence: Synthetic oligonucleotide
  source 1..51: mol_type = other DNA

SEQ ID NO: 13198 - protein, 17 aa, synthetic construct
  REGION 1..17: note = Description of Artificial Sequence: Synthetic peptide
VIWYDGSNKYYADSVKG

SEQ ID NO: 13199 - DNA, 51 bp, synthetic construct; identical to SEQ ID NO: 12123
  misc_feature 1..51: note = Description of Artificial Sequence: Synthetic oligonucleotide
  source 1..51: mol_type = other DNA

SEQ ID NO: 13200 - protein, 17 aa, synthetic construct
  REGION 1..17: note = Description of Artificial Sequence: Synthetic peptide
VIWYDGSNKYYADSVKG

SEQ ID NO: 13201 - DNA, 51 bp, synthetic construct
  misc_feature 1..51: note = Description of Artificial Sequence: Synthetic oligonucleotide
  source 1..51: mol_type = other DNA
gttatatggtttgaaggaagtaataaatactatgcagattccgtgaagggc

SEQ ID NO: 13202 - protein, 17 aa, synthetic construct
  REGION 1..17: note = Description of Artificial Sequence: Synthetic peptide
VIWFEGSNKYYADSVKG

SEQ ID NO: 13203 - DNA, 51 bp, synthetic construct
  misc_feature 1..51: note = Description of Artificial Sequence: Synthetic oligonucleotide
  source 1..51: mol_type = other DNA
gttatatggtatgatggaagtaataaatactatgctgactccgtgaagggc

SEQ ID NO: 13204 - protein, 17 aa, synthetic construct
  REGION 1..17: note = Description of Artificial Sequence: Synthetic peptide
VIWYDGSNKYYADSVKG

SEQ ID NO: 13205 - DNA, 51 bp, synthetic construct
  misc_feature 1..51: note = Description of Artificial Sequence: Synthetic oligonucleotide
  source 1..51: mol_type = other DNA
attctcagtggtggtggtaagaccacatactacgcagactccgtgaagggc

SEQ ID NO: 13206 - protein, 17 aa, synthetic construct
  REGION 1..17: note = Description of Artificial Sequence: Synthetic peptide
ILSGGGKTTYYADSVKG

SEQ ID NO: 13207 - DNA, 51 bp, synthetic construct; identical to SEQ ID NO: 12123
  misc_feature 1..51: note = Description of Artificial Sequence: Synthetic oligonucleotide
  source 1..51: mol_type = other DNA

SEQ ID NO: 13208 - protein, 17 aa, synthetic construct
  REGION 1..17: note = Description of Artificial Sequence: Synthetic peptide
VIWYDGSNKYYADSVKG

SEQ ID NO: 13209 - DNA, 48 bp, synthetic construct
  misc_feature 1..48: note = Description of Artificial Sequence: Synthetic oligonucleotide
  source 1..48: mol_type = other DNA
tatatctattacagtggaaacaccaactacaacccctccctcaagagt

SEQ ID NO: 13210 - protein, 16 aa, synthetic construct
  REGION 1..16: note = Description of Artificial Sequence: Synthetic peptide
YIYYSGNTNYNPSLKS

SEQ ID NO: 13211 - DNA, 51 bp, synthetic construct
  misc_feature 1..51: note = Description of Artificial Sequence: Synthetic oligonucleotide
  source 1..51: mol_type = other DNA
gttatatggtatgaaggaagtaataaatactatgcagactccgtgaagggc

SEQ ID NO: 13212 - protein, 17 aa, synthetic construct
  REGION 1..17: note = Description of Artificial Sequence: Synthetic peptide
VIWYEGSNKYYADSVKG

SEQ ID NO: 13213 - DNA, 51 bp, synthetic construct; identical to SEQ ID NO: 12123
  misc_feature 1..51: note = Description of Artificial Sequence: Synthetic oligonucleotide
  source 1..51: mol_type = other DNA

SEQ ID NO: 13214 - protein, 17 aa, synthetic construct
  REGION 1..17: note = Description of Artificial Sequence: Synthetic peptide
VIWYDGSNKYYADSVKG

SEQ ID NO: 13215 - DNA, 51 bp, synthetic construct; identical to SEQ ID NO: 12123
  misc_feature 1..51: note = Description of Artificial Sequence: Synthetic oligonucleotide
  source 1..51: mol_type = other DNA

SEQ ID NO: 13216 - protein, 17 aa, synthetic construct
  REGION 1..17: note = Description of Artificial Sequence: Synthetic peptide
VIWYDGSNKYYADSVKG

SEQ ID NO: 13217 - DNA, 51 bp, synthetic construct; identical to SEQ ID NO: 13203
  misc_feature 1..51: note = Description of Artificial Sequence: Synthetic oligonucleotide
  source 1..51: mol_type = other DNA

SEQ ID NO: 13218 - protein, 17 aa, synthetic construct
  REGION 1..17: note = Description of Artificial Sequence: Synthetic peptide
VIWYDGSNKYYADSVKG

SEQ ID NO: 13219 - DNA, 51 bp, synthetic construct; identical to SEQ ID NO: 13179
  misc_feature 1..51: note = Description of Artificial Sequence: Synthetic oligonucleotide
  source 1..51: mol_type = other DNA

SEQ ID NO: 13220 - protein, 17 aa, synthetic construct
  REGION 1..17: note = Description of Artificial Sequence: Synthetic peptide
AISGRGVNTFDADSVKG

SEQ ID NO: 13221 - DNA, 51 bp, synthetic construct
  misc_feature 1..51: note = Description of Artificial Sequence: Synthetic oligonucleotide
  source 1..51: mol_type = other DNA
ggtgttgttggtagtggtggtagaacatactacgcagactccgtgaagggc

SEQ ID NO: 13222 - protein, 17 aa, synthetic construct
  REGION 1..17: note = Description of Artificial Sequence: Synthetic peptide
GVVGSGGRTYYADSVKG

SEQ ID NO: 13223 - DNA, 51 bp, synthetic construct; identical to SEQ ID NO: 12949
  misc_feature 1..51: note = Description of Artificial Sequence: Synthetic oligonucleotide
  source 1..51: mol_type = other DNA

SEQ ID NO: 13224 - protein, 17 aa, synthetic construct
  REGION 1..17: note = Description of Artificial Sequence: Synthetic peptide
YISSSSSTIYYADSVKG

SEQ ID NO: 13225 - DNA, 51 bp, synthetic construct
  misc_feature 1..51: note = Description of Artificial Sequence: Synthetic oligonucleotide
  source 1..51: mol_type = other DNA
gttatatggtttgatgaatataataaatactatgcagactccgtgaagggc

SEQ ID NO: 13226 - protein, 17 aa, synthetic construct
  REGION 1..17: note = Description of Artificial Sequence: Synthetic peptide
VIWFDEYNKYYADSVKG

SEQ ID NO: 13227 - DNA, 51 bp, synthetic construct
  misc_feature 1..51: note = Description of Artificial Sequence: Synthetic oligonucleotide
  source 1..51: mol_type = other DNA
tacattagtagtagtggtattaccaaatactacgcagactctgtgaagggc

SEQ ID NO: 13228 - protein, 17 aa, synthetic construct
  REGION 1..17: note = Description of Artificial Sequence: Synthetic peptide
YISSSGITKYYADSVKG

SEQ ID NO: 13229 - DNA, 51 bp, synthetic construct; identical to SEQ ID NO: 13203
  misc_feature 1..51: note = Description of Artificial Sequence: Synthetic oligonucleotide
  source 1..51: mol_type = other DNA

SEQ ID NO: 13230 - protein, 17 aa, synthetic construct
  REGION 1..17: note = Description of Artificial Sequence: Synthetic peptide
VIWYDGSNKYYADSVKG

SEQ ID NO: 13231 - DNA, 51 bp, synthetic construct; identical to SEQ ID NO: 13195
  misc_feature 1..51: note = Description of Artificial Sequence: Synthetic oligonucleotide
  source 1..51: mol_type = other DNA

SEQ ID NO: 13232 - protein, 17 aa, synthetic construct
  REGION 1..17: note = Description of Artificial Sequence: Synthetic peptide
AISGSGSNTFYADSVKG

SEQ ID NO: 13233 - DNA, 51 bp, synthetic construct; identical to SEQ ID NO: 13203
  misc_feature 1..51: note = Description of Artificial Sequence: Synthetic oligonucleotide
  source 1..51: mol_type = other DNA

SEQ ID NO: 13234 - protein, 17 aa, synthetic construct
  REGION 1..17: note = Description of Artificial Sequence: Synthetic peptide
VIWYDGSNKYYADSVKG

SEQ ID NO: 13235 - DNA, 51 bp, synthetic construct; identical to SEQ ID NO: 13179
  misc_feature 1..51: note = Description of Artificial Sequence: Synthetic oligonucleotide
  source 1..51: mol_type = other DNA

SEQ ID NO: 13236 - protein, 17 aa, synthetic construct
  REGION 1..17: note = Description of Artificial Sequence: Synthetic peptide
AISGRGVNTFDADSVKG

SEQ ID NO: 13237 - DNA, 51 bp, synthetic construct
  misc_feature 1..51: note = Description of Artificial Sequence: Synthetic oligonucleotide
  source 1..51: mol_type = other DNA
gttattagtggtcgtggtggtaccacatactacgcagactccgtgaagggc

SEQ ID NO: 13238 - protein, 17 aa, synthetic construct
  REGION 1..17: note = Description of Artificial Sequence: Synthetic peptide
VISGRGGTTYYADSVKG

SEQ ID NO: 13239 - DNA, 51 bp, synthetic construct; identical to SEQ ID NO: 13183
  misc_feature 1..51: note = Description of Artificial Sequence: Synthetic oligonucleotide
  source 1..51: mol_type = other DNA

SEQ ID NO: 13240 - protein, 17 aa, synthetic construct
  REGION 1..17: note = Description of Artificial Sequence: Synthetic peptide
SISGSSTYIYYADSVKG

SEQ ID NO: 13241 - DNA, 51 bp, synthetic construct
  misc_feature 1..51: note = Description of Artificial Sequence: Synthetic oligonucleotide
  source 1..51: mol_type = other DNA
gttatatggtttgatgaatatactaaatactatgcagactccgtgaagggc

SEQ ID NO: 13242 - protein, 17 aa, synthetic construct
  REGION 1..17: note = Description of Artificial Sequence: Synthetic peptide
VIWFDEYTKYYADSVKG

SEQ ID NO: 13243 - DNA, 51 bp, synthetic construct
  misc_feature 1..51: note = Description of Artificial Sequence: Synthetic oligonucleotide
  source 1..51: mol_type = other DNA
attatatggtatgatggaagtaataaatactatgtagactccgtgaagggc

SEQ ID NO: 13244 - protein, 17 aa, synthetic construct
  REGION 1..17: note = Description of Artificial Sequence: Synthetic peptide
IIWYDGSNKYYVDSVKG

SEQ ID NO: 13245 - DNA, 51 bp, synthetic construct; identical to SEQ ID NO: 13203
  misc_feature 1..51: note = Description of Artificial Sequence: Synthetic oligonucleotide
  source 1..51: mol_type = other DNA

SEQ ID NO: 13246 - protein, 17 aa, synthetic construct
  REGION 1..17: note = Description of Artificial Sequence: Synthetic peptide
VIWYDGSNKYYADSVKG

SEQ ID NO: 13247 - DNA, 51 bp, synthetic construct; identical to SEQ ID NO: 13201
  misc_feature 1..51: note = Description of Artificial Sequence: Synthetic oligonucleotide
  source 1..51: mol_type = other DNA

SEQ ID NO: 13248 - protein, 17 aa, synthetic construct
  REGION 1..17: note = Description of Artificial Sequence: Synthetic peptide
VIWFEGSNKYYADSVKG

SEQ ID NO: 13249 - DNA, 51 bp, synthetic construct; identical to SEQ ID NO: 12123
  misc_feature 1..51: note = Description of Artificial Sequence: Synthetic oligonucleotide
  source 1..51: mol_type = other DNA

SEQ ID NO: 13250 - protein, 17 aa, synthetic construct
  REGION 1..17: note = Description of Artificial Sequence: Synthetic peptide
VIWYDGSNKYYADSVKG

SEQ ID NO: 13251 - DNA, 51 bp, synthetic construct; identical to SEQ ID NO: 13185
  misc_feature 1..51: note = Description of Artificial Sequence: Synthetic oligonucleotide
  source 1..51: mol_type = other DNA

SEQ ID NO: 13252 - protein, 17 aa, synthetic construct
  REGION 1..17: note = Description of Artificial Sequence: Synthetic peptide
AISGRGINTFDADSVKG

SEQ ID NO: 13253 - DNA, 51 bp, synthetic construct; identical to SEQ ID NO: 12491
  misc_feature 1..51: note = Description of Artificial Sequence: Synthetic oligonucleotide
  source 1..51: mol_type = other DNA

SEQ ID NO: 13254 - protein, 17 aa, synthetic construct
  REGION 1..17: note = Description of Artificial Sequence: Synthetic peptide
VIWYDENNKYYADSVKG

SEQ ID NO: 13255 - DNA, 51 bp, synthetic construct; identical to SEQ ID NO: 13201
  misc_feature 1..51: note = Description of Artificial Sequence: Synthetic oligonucleotide
  source 1..51: mol_type = other DNA

SEQ ID NO: 13256 - protein, 17 aa, synthetic construct
  REGION 1..17: note = Description of Artificial Sequence: Synthetic peptide
VIWFEGSNKYYADSVKG

SEQ ID NO: 13257 - DNA, 51 bp, synthetic construct
  misc_feature 1..51: note = Description of Artificial Sequence: Synthetic oligonucleotide
  source 1..51: mol_type = other DNA
gttatatggtatgatggaagaaataaatactatgcagactccgtgaagggc

SEQ ID NO: 13258 - protein, 17 aa, synthetic construct
  REGION 1..17: note = Description of Artificial Sequence: Synthetic peptide
VIWYDGRNKYYADSVKG

SEQ ID NO: 13259 - DNA, 51 bp, synthetic construct
  misc_feature 1..51: note = Description of Artificial Sequence: Synthetic oligonucleotide
  source 1..51: mol_type = other DNA
tacattaatagtaatggttttaccatatactacgcagactctgtgaagggc

SEQ ID NO: 13260 - protein, 17 aa, synthetic construct
  REGION 1..17: note = Description of Artificial Sequence: Synthetic peptide
YINSNGFTIYYADSVKG

SEQ ID NO: 13261 - DNA, 51 bp, synthetic construct
  misc_feature 1..51: note = Description of Artificial Sequence: Synthetic oligonucleotide
  source 1..51: mol_type = other DNA
gttatatggtatgatgactataataaaaagtatgcagactccgtgaagggc

SEQ ID NO: 13262 - protein, 17 aa, synthetic construct
  REGION 1..17: note = Description of Artificial Sequence: Synthetic peptide
VIWYDDYNKKYADSVKG

SEQ ID NO: 13263 - DNA, 51 bp, synthetic construct; identical to SEQ ID NO: 12123
  misc_feature 1..51: note = Description of Artificial Sequence: Synthetic oligonucleotide
  source 1..51: mol_type = other DNA

SEQ ID NO: 13264 - protein, 17 aa, synthetic construct
  REGION 1..17: note = Description of Artificial Sequence: Synthetic peptide
VIWYDGSNKYYADSVKG

SEQ ID NO: 13265 - DNA, 51 bp, synthetic construct; identical to SEQ ID NO: 12227
  misc_feature 1..51: note = Description of Artificial Sequence: Synthetic oligonucleotide
  source 1..51: mol_type = other DNA

SEQ ID NO: 13266 - protein, 17 aa, synthetic construct
  REGION 1..17: note = Description of Artificial Sequence: Synthetic peptide
VIWFDGSNKYYADSVKG

SEQ ID NO: 13267 - DNA, 51 bp, synthetic construct
  misc_feature 1..51: note = Description of Artificial Sequence: Synthetic oligonucleotide
  source 1..51: mol_type = other DNA
ggtattagtggtagtggtagtcgcacatactacgcagactccgtgaagggc

SEQ ID NO: 13268 - protein, 17 aa, synthetic construct
  REGION 1..17: note = Description of Artificial Sequence: Synthetic peptide
GISGSGSRTYYADSVKG

SEQ ID NO: 13269 - DNA, 51 bp, synthetic construct; identical to SEQ ID NO: 12123
  misc_feature 1..51: note = Description of Artificial Sequence: Synthetic oligonucleotide
  source 1..51: mol_type = other DNA

SEQ ID NO: 13270 - protein, 17 aa, synthetic construct
  REGION 1..17: note = Description of Artificial Sequence: Synthetic peptide
VIWYDGSNKYYADSVKG

SEQ ID NO: 13271 - DNA, 51 bp, synthetic construct
  misc_feature 1..51: note = Description of Artificial Sequence: Synthetic oligonucleotide
  source 1..51: mol_type = other DNA
gctattagtggtcgtggtggtaacacattctacgcagagtccgtgaggggc

SEQ ID NO: 13272 - protein, 17 aa, synthetic construct
  REGION 1..17: note = Description of Artificial Sequence: Synthetic peptide
AISGRGGNTFYAESVRG

SEQ ID NO: 13273 - DNA, 51 bp, synthetic construct
  misc_feature 1..51: note = Description of Artificial Sequence: Synthetic oligonucleotide
  source 1..51: mol_type = other DNA
tacattaatagtaatggttttaccaaatactacgcagactctgtgaagggc

SEQ ID NO: 13274 - protein, 17 aa, synthetic construct
  REGION 1..17: note = Description of Artificial Sequence: Synthetic peptide
YINSNGFTKYYADSVKG

SEQ ID NO: 13275 - DNA, 51 bp, synthetic construct
  misc_feature 1..51: note = Description of Artificial Sequence: Synthetic oligonucleotide
  source 1..51: mol_type = other DNA
gttgtatggtatgatgaaattaataaaaagtatgcagactccgtgaagggc

SEQ ID NO: 13276 - protein, 17 aa, synthetic construct
  REGION 1..17: note = Description of Artificial Sequence: Synthetic peptide
VVWYDEINKKYADSVKG

SEQ ID NO: 13277 - DNA, 51 bp, synthetic construct
  misc_feature 1..51: note = Description of Artificial Sequence: Synthetic oligonucleotide
  source 1..51: mol_type = other DNA
gttattagtggtcgtggtggtagcacattctacgcagactccgtgaagggc

SEQ ID NO: 13278 - protein, 17 aa, synthetic construct
  REGION 1..17: note = Description of Artificial Sequence: Synthetic peptide
VISGRGGSTFYADSVKG

SEQ ID NO: 13279 - DNA, 51 bp, synthetic construct; identical to SEQ ID NO: 12123
  misc_feature 1..51: note = Description of Artificial Sequence: Synthetic oligonucleotide
  source 1..51: mol_type = other DNA

SEQ ID NO: 13280 - protein, 17 aa, synthetic construct
  REGION 1..17: note = Description of Artificial Sequence: Synthetic peptide
VIWYDGSNKYYADSVKG

SEQ ID NO: 13281 - DNA, 51 bp, synthetic construct; identical to SEQ ID NO: 13277
  misc_feature 1..51: note = Description of Artificial Sequence: Synthetic oligonucleotide
  source 1..51: mol_type = other DNA

SEQ ID NO: 13282 - protein, 17 aa, synthetic construct
  REGION 1..17: note = Description of Artificial Sequence: Synthetic peptide
VISGRGGSTFYADSVKG

SEQ ID NO: 13283 - DNA, 51 bp, synthetic construct
  misc_feature 1..51: note = Description of Artificial Sequence: Synthetic oligonucleotide
  source 1..51: mol_type = other DNA
gctattagtggtagtggtggtaccacattctacgcagactccgtgaagggc

SEQ ID NO: 13284 - protein, 17 aa, synthetic construct
  REGION 1..17: note = Description of Artificial Sequence: Synthetic peptide
AISGSGGTTFYADSVKG

SEQ ID NO: 13285 - DNA, 51 bp, synthetic construct
  misc_feature 1..51: note = Description of Artificial Sequence: Synthetic oligonucleotide
  source 1..51: mol_type = other DNA
gttatatggtatgaggaaaataagaaatactatgcagactccgtgaagggc

SEQ ID NO: 13286 - protein, 17 aa, synthetic construct
  REGION 1..17: note = Description of Artificial Sequence: Synthetic peptide
VIWYEENKKYYADSVKG

SEQ ID NO: 13287 - DNA, 51 bp, synthetic construct
  misc_feature 1..51: note = Description of Artificial Sequence: Synthetic oligonucleotide
  source 1..51: mol_type = other DNA
tacattagtagtgctggtggtgccatatactacgcagactctgtgaagggc

SEQ ID NO: 13288 - protein, 17 aa, synthetic construct
  REGION 1..17: note = Description of Artificial Sequence: Synthetic peptide
YISSAGGAIYYADSVKG

SEQ ID NO: 13289 - DNA, 51 bp, synthetic construct
  misc_feature 1..51: note = Description of Artificial Sequence: Synthetic oligonucleotide
  source 1..51: mol_type = other DNA
gttatatggtatgatgtaagtaataaatactatgtagactccgtgaagggc

SEQ ID NO: 13290 - protein, 17 aa, synthetic construct
  REGION 1..17: note = Description of Artificial Sequence: Synthetic peptide
VIWYDVSNKYYVDSVKG

SEQ ID NO: 13291 - DNA, 51 bp, synthetic construct; identical to SEQ ID NO: 13287
  misc_feature 1..51: note = Description of Artificial Sequence: Synthetic oligonucleotide
  source 1..51: mol_type = other DNA

SEQ ID NO: 13292 - protein, 17 aa, synthetic construct
  REGION 1..17: note = Description of Artificial Sequence: Synthetic peptide
YISSAGGAIYYADSVKG

SEQ ID NO: 13293 - DNA, 51 bp, synthetic construct; identical to SEQ ID NO: 13287
  misc_feature 1..51: note = Description of Artificial Sequence: Synthetic oligonucleotide
  source 1..51: mol_type = other DNA

SEQ ID NO: 13294 - protein, 17 aa, synthetic construct
  REGION 1..17: note = Description of Artificial Sequence: Synthetic peptide
YISSAGGAIYYADSVKG

SEQ ID NO: 13295 - DNA, 51 bp, synthetic construct
  misc_feature 1..51: note = Description of Artificial Sequence: Synthetic oligonucleotide
  source 1..51: mol_type = other DNA
gttatatggtatgatgaagataataaatattatgtagactccgtgaagggc

SEQ ID NO: 13296 - protein, 17 aa, synthetic construct
  REGION 1..17: note = Description of Artificial Sequence: Synthetic peptide
VIWYDEDNKYYVDSVKG

SEQ ID NO: 13297 - DNA, 51 bp, synthetic construct; identical to SEQ ID NO: 12123
  misc_feature 1..51: note = Description of Artificial Sequence: Synthetic oligonucleotide
  source 1..51: mol_type = other DNA

SEQ ID NO: 13298 - protein, 17 aa, synthetic construct
  REGION 1..17: note = Description of Artificial Sequence: Synthetic peptide
VIWYDGSNKYYADSVKG

SEQ ID NO: 13299 - DNA, 51 bp, synthetic construct; identical to SEQ ID NO: 12899
  misc_feature 1..51: note = Description of Artificial Sequence: Synthetic oligonucleotide
  source 1..51: mol_type = other DNA

SEQ ID NO: 13300 - protein, 17 aa, synthetic construct
  REGION 1..17: note = Description of Artificial Sequence: Synthetic peptide
VISGSGGSTFYADSVKG

SEQ ID NO: 13301 - DNA, 51 bp, synthetic construct; identical to SEQ ID NO: 12123
  misc_feature 1..51: note = Description of Artificial Sequence: Synthetic oligonucleotide
  source 1..51: mol_type = other DNA

SEQ ID NO: 13302 - protein, 17 aa, synthetic construct
  REGION 1..17: note = Description of Artificial Sequence: Synthetic peptide
VIWYDGSNKYYADSVKG

SEQ ID NO: 13303 - DNA, 51 bp, synthetic construct
  misc_feature 1..51: note = Description of Artificial Sequence: Synthetic oligonucleotide
  source 1..51: mol_type = other DNA
gctattagtggtagtggtggtaactcattctacgcagactccgtgaagggc

SEQ ID NO: 13304 - protein, 17 aa, synthetic construct
  REGION 1..17: note = Description of Artificial Sequence: Synthetic peptide
AISGSGGNSFYADSVKG

SEQ ID NO: 13305 - DNA, 51 bp, synthetic construct
  misc_feature 1..51: note = Description of Artificial Sequence: Synthetic oligonucleotide
  source 1..51: mol_type = other DNA
gttatatggtttgatgtaagtaataaaaagtatgtagactccgtgaagggc

SEQ ID NO: 13306 - protein, 17 aa, synthetic construct
  REGION 1..17: note = Description of Artificial Sequence: Synthetic peptide
VIWFDVSNKKYVDSVKG

SEQ ID NO: 13307 - DNA, 51 bp, synthetic construct; identical to SEQ ID NO: 12123
  misc_feature 1..51: note = Description of Artificial Sequence: Synthetic oligonucleotide
  source 1..51: mol_type = other DNA

SEQ ID NO: 13308 - protein, 17 aa, synthetic construct
  REGION 1..17: note = Description of Artificial Sequence: Synthetic peptide
VIWYDGSNKYYADSVKG

SEQ ID NO: 13309 - DNA, 51 bp, synthetic construct
  misc_feature 1..51: note = Description of Artificial Sequence: Synthetic oligonucleotide
  source 1..51: mol_type = other DNA
cttatatggtatgatggaaggaataaatactatgcagactccgtgaagggc

SEQ ID NO: 13310 - protein, 17 aa, synthetic construct
  REGION 1..17: note = Description of Artificial Sequence: Synthetic peptide
LIWYDGRNKYYADSVKG

SEQ ID NO: 13311 - DNA, 51 bp, synthetic construct
  misc_feature 1..51: note = Description of Artificial Sequence: Synthetic oligonucleotide
  source 1..51: mol_type = other DNA
tggatcaaccctaataacaatgccacaaactatgctcagaactttcagggc

SEQ ID NO: 13312 - protein, 17 aa, synthetic construct
  REGION 1..17: note = Description of Artificial Sequence: Synthetic peptide
WINPNNNATNYAQNFQG

SEQ ID NO: 13313 - DNA, 51 bp, synthetic construct; identical to SEQ ID NO: 13057
  misc_feature 1..51: note = Description of Artificial Sequence: Synthetic oligonucleotide
  source 1..51: mol_type = other DNA

SEQ ID NO: 13314 - protein, 17 aa, synthetic construct
  REGION 1..17: note = Description of Artificial Sequence: Synthetic peptide
VISGSGGTTFYADSVKG

SEQ ID NO: 13315 - DNA, 51 bp, synthetic construct; identical to SEQ ID NO: 13259
  misc_feature 1..51: note = Description of Artificial Sequence: Synthetic oligonucleotide
  source 1..51: mol_type = other DNA

SEQ ID NO: 13316 - protein, 17 aa, synthetic construct
  REGION 1..17: note = Description of Artificial Sequence: Synthetic peptide
YINSNGFTIYYADSVKG

SEQ ID NO: 13317 - DNA, 51 bp, synthetic construct
  misc_feature 1..51: note = Description of Artificial Sequence: Synthetic oligonucleotide
  source 1..51: mol_type = other DNA
gttattagtggtcgtggtggtaccacattctacgcagactccgtgaagggc

SEQ ID NO: 13318 - protein, 17 aa, synthetic construct
  REGION 1..17: note = Description of Artificial Sequence: Synthetic peptide
VISGRGGTTFYADSVKG

SEQ ID NO: 13319 - DNA, 51 bp, synthetic construct; identical to SEQ ID NO: 12153
  misc_feature 1..51: note = Description of Artificial Sequence: Synthetic oligonucleotide
  source 1..51: mol_type = other DNA

SEQ ID NO: 13320 - protein, 17 aa, synthetic construct
  REGION 1..17: note = Description of Artificial Sequence: Synthetic peptide
SISGSSSYIYYADSVKG

SEQ ID NO: 13321 - DNA, 51 bp, synthetic construct; identical to SEQ ID NO: 13277
  misc_feature 1..51: note = Description of Artificial Sequence: Synthetic oligonucleotide
  source 1..51: mol_type = other DNA

SEQ ID NO: 13322 - protein, 17 aa, synthetic construct
  REGION 1..17: note = Description of Artificial Sequence: Synthetic peptide
VISGRGGSTFYADSVKG

SEQ ID NO: 13323 - DNA, 51 bp, synthetic construct
  misc_feature 1..51: note = Description of Artificial Sequence: Synthetic oligonucleotide
  source 1..51: mol_type = other DNA
tgggtcaaccctaacagtggtggcacaaactctgcacagaagtttcagggc

SEQ ID NO: 13324 - protein, 17 aa, synthetic construct
  REGION 1..17: note = Description of Artificial Sequence: Synthetic peptide
WVNPNSGGTNSAQKFQG

SEQ ID NO: 13325 - DNA, 51 bp, synthetic construct
  misc_feature 1..51: note = Description of Artificial Sequence: Synthetic oligonucleotide
  source 1..51: mol_type = other DNA
tccatcagtagtagtagtaattacatatactacgcagactcagtgaagggc

SEQ ID NO: 13326 - protein, 17 aa, synthetic construct
  REGION 1..17: note = Description of Artificial Sequence: Synthetic peptide
SISSSSNYIYYADSVKG

SEQ ID NO: 13327 - DNA, 51 bp, synthetic construct
  misc_feature 1..51: note = Description of Artificial Sequence: Synthetic oligonucleotide
  source 1..51: mol_type = other DNA
gttatatggtatgatggaagtagtaaatactatgcagactccgtgaagggc

SEQ ID NO: 13328 - protein, 17 aa, synthetic construct
  REGION 1..17: note = Description of Artificial Sequence: Synthetic peptide
VIWYDGSSKYYADSVKG

SEQ ID NO: 13329 - DNA, 51 bp, synthetic construct
  misc_feature 1..51: note = Description of Artificial Sequence: Synthetic oligonucleotide
  source 1..51: mol_type = other DNA
gctattagtggtcgtggtagtaacacattctacacagactccgtgaagggc

SEQ ID NO: 13330 - protein, 17 aa, synthetic construct
  REGION 1..17: note = Description of Artificial Sequence: Synthetic peptide
AISGRGSNTFYTDSVKG

SEQ ID NO: 13331 - DNA, 51 bp, synthetic construct; identical to SEQ ID NO: 12301
  misc_feature 1..51: note = Description of Artificial Sequence: Synthetic oligonucleotide
  source 1..51: mol_type = other DNA

SEQ ID NO: 13332 - protein, 17 aa, synthetic construct
  REGION 1..17: note = Description of Artificial Sequence: Synthetic peptide
VIWYDESNKYYADSVKG

SEQ ID NO: 13333 - DNA, 51 bp, synthetic construct
  misc_feature 1..51: note = Description of Artificial Sequence: Synthetic oligonucleotide
  source 1..51: mol_type = other DNA
actatgagtggtagtggtggtcgcacatactacgcagactccgtgaacggc

SEQ ID NO: 13334 - protein, 17 aa, synthetic construct
  REGION 1..17: note = Description of Artificial Sequence: Synthetic peptide
TMSGSGGRTYYADSVNG

SEQ ID NO: 13335 - DNA, 51 bp, synthetic construct
  misc_feature 1..51: note = Description of Artificial Sequence: Synthetic oligonucleotide
  source 1..51: mol_type = other DNA
gttattagtgctagtggtggtaactcattctacgcagactccgtgaagggc

SEQ ID NO: 13336 - protein, 17 aa, synthetic construct
  REGION 1..17: note = Description of Artificial Sequence: Synthetic peptide
VISASGGNSFYADSVKG

SEQ ID NO: 13337 - DNA, 51 bp, synthetic construct; identical to SEQ ID NO: 12361
  misc_feature 1..51: note = Description of Artificial Sequence: Synthetic oligonucleotide
  source 1..51: mol_type = other DNA

SEQ ID NO: 13338 - protein, 17 aa, synthetic construct
  REGION 1..17: note = Description of Artificial Sequence: Synthetic peptide
SISSSSSYIYYADSVKG

SEQ ID NO: 13339 - DNA, 51 bp, synthetic construct
  misc_feature 1..51: note = Description of Artificial Sequence: Synthetic oligonucleotide
  source 1..51: mol_type = other DNA
tggatcaaccctaataataatgccacaaactatgctcagagctttcagggc

SEQ ID NO: 13340 - protein, 17 aa, synthetic construct
  REGION 1..17: note = Description of Artificial Sequence: Synthetic peptide
WINPNNNATNYAQSFQG

SEQ ID NO: 13341 - DNA, 51 bp, synthetic construct
  misc_feature 1..51: note = Description of Artificial Sequence: Synthetic oligonucleotide
  source 1..51: mol_type = other DNA
tgggtcaaccctaacagtggtggctcaaactctgcacagcagtttcagggc

SEQ ID NO: 13342 - protein, 17 aa, synthetic construct
  REGION 1..17: note = Description of Artificial Sequence: Synthetic peptide
WVNPNSGGSNSAQQFQG

SEQ ID NO: 13343 - DNA, 51 bp, synthetic construct
  misc_feature 1..51: note = Description of Artificial Sequence: Synthetic oligonucleotide
  source 1..51: mol_type = other DNA
tggatcaaccctaacactaatggcacacagtatgcacagaagtttcagggc

SEQ ID NO: 13344 - protein, 17 aa, synthetic construct
  REGION 1..17: note = Description of Artificial Sequence: Synthetic peptide
WINPNTNGTQYAQKFQG

SEQ ID NO: 13345 - DNA, 51 bp, synthetic construct
  misc_feature 1..51: note = Description of Artificial Sequence: Synthetic oligonucleotide
  source 1..51: mol_type = other DNA
gttatatggtttgatggaaataataaatactatgcagactccgtgaagggc

SEQ ID NO: 13346 - protein, 17 aa, synthetic construct
  REGION 1..17: note = Description of Artificial Sequence: Synthetic peptide
VIWFDGNNKYYADSVKG

SEQ ID NO: 13347 - DNA, 51 bp, synthetic construct; identical to SEQ ID NO: 13057
  misc_feature 1..51: note = Description of Artificial Sequence: Synthetic oligonucleotide
  source 1..51: mol_type = other DNA

SEQ ID NO: 13348 - protein, 17 aa, synthetic construct
  REGION 1..17: note = Description of Artificial Sequence: Synthetic peptide
VISGSGGTTFYADSVKG

SEQ ID NO: 13349 - DNA, 51 bp, synthetic construct
  misc_feature 1..51: note = Description of Artificial Sequence: Synthetic oligonucleotide
  source 1..51: mol_type = other DNA
gttatatggtttggtggaaataataaatactatggagactccgtgaagggc

SEQ ID NO: 13350 - protein, 17 aa, synthetic construct
  REGION 1..17: note = Description of Artificial Sequence: Synthetic peptide
VIWFGGNNKYYGDSVKG

SEQ ID NO: 13351 - DNA, 51 bp, synthetic construct
  misc_feature 1..51: note = Description of Artificial Sequence: Synthetic oligonucleotide
  source 1..51: mol_type = other DNA
gttatatggtatgaggaaagtaataaatactatgcagactccgtgaagggc

SEQ ID NO: 13352 - protein, 17 aa, synthetic construct
  REGION 1..17: note = Description of Artificial Sequence: Synthetic peptide
VIWYEESNKYYADSVKG

SEQ ID NO: 13353 - DNA, 51 bp, synthetic construct
  misc_feature 1..51: note = Description of Artificial Sequence: Synthetic oligonucleotide
  source 1..51: mol_type = other DNA
tggatcaaccctaacagtggtgccacaaactatgcacagaactttcagggc

SEQ ID NO: 13354 - protein, 17 aa, synthetic construct
  REGION 1..17: note = Description of Artificial Sequence: Synthetic peptide
WINPNSGATNYAQNFQG

SEQ ID NO: 13355 - DNA, 51 bp, synthetic construct
  misc_feature 1..51: note = Description of Artificial Sequence: Synthetic oligonucleotide
  source 1..51: mol_type = other DNA
gttacatggtttgatggaagtaatcaacgctatgcagactccgtgaagggc

SEQ ID NO: 13356 - protein, 17 aa, synthetic construct
  REGION 1..17: note = Description of Artificial Sequence: Synthetic peptide
VTWFDGSNQRYADSVKG

SEQ ID NO: 13357 - DNA, 51 bp, synthetic construct
  misc_feature 1..51: note = Description of Artificial Sequence: Synthetic oligonucleotide
  source 1..51: mol_type = other DNA
gctattagtggtcgtggtggtaatacattctacgcagactccgtgaagggc

SEQ ID NO: 13358 - protein, 17 aa, synthetic construct
  REGION 1..17: note = Description of Artificial Sequence: Synthetic peptide
AISGRGGNTFYADSVKG

SEQ ID NO: 13359 - DNA, 51 bp, synthetic construct
  misc_feature 1..51: note = Description of Artificial Sequence: Synthetic oligonucleotide
  source 1..51: mol_type = other DNA
tccattagtagtggtaatagttccatatactacgcagactcagtgaagggc

SEQ ID NO: 13360 - protein, 17 aa, synthetic construct
  REGION 1..17: note = Description of Artificial Sequence: Synthetic peptide
SISSGNSSIYYADSVKG

SEQ ID NO: 13361 - DNA, 51 bp, synthetic construct
  misc_feature 1..51: note = Description of Artificial Sequence: Synthetic oligonucleotide
  source 1..51: mol_type = other DNA
attatatcatatggaggaagtaataaatactatgcagactccgtgaagggc

SEQ ID NO: 13362 - protein, 17 aa, synthetic construct
  REGION 1..17: note = Description of Artificial Sequence: Synthetic peptide
IISYGGSNKYYADSVKG

SEQ ID NO: 13363 - DNA, 51 bp, synthetic construct; identical to SEQ ID NO: 13345
  misc_feature 1..51: note = Description of Artificial Sequence: Synthetic oligonucleotide
  source 1..51: mol_type = other DNA

SEQ ID NO: 13364 - protein, 17 aa, synthetic construct
  REGION 1..17: note = Description of Artificial Sequence: Synthetic peptide
VIWFDGNNKYYADSVKG

SEQ ID NO: 13365 - DNA, 51 bp, synthetic construct
  misc_feature 1..51: note = Description of Artificial Sequence: Synthetic oligonucleotide
  source 1..51: mol_type = other DNA
cttatatggtatgatggaagtaataaataccatgcagactccgtgaagggc

SEQ ID NO: 13366 - protein, 17 aa, synthetic construct
  REGION 1..17: note = Description of Artificial Sequence: Synthetic peptide
LIWYDGSNKYHADSVKG

SEQ ID NO: 13367 - DNA, 51 bp, synthetic construct
  misc_feature 1..51: note = Description of Artificial Sequence: Synthetic oligonucleotide
  source 1..51: mol_type = other DNA
gttatatgggacgatggaagtaataaatactatgcagactccgtgaagggc

SEQ ID NO: 13368 - protein, 17 aa, synthetic construct
  REGION 1..17: note = Description of Artificial Sequence: Synthetic peptide
VIWDDGSNKYYADSVKG

SEQ ID NO: 13369 - DNA, 51 bp, synthetic construct
  misc_feature 1..51: note = Description of Artificial Sequence: Synthetic oligonucleotide
  source 1..51: mol_type = other DNA
tggatcaaccctaacaatggtggcacacagtatgcacagaagtttcagggc

SEQ ID NO: 13370 - protein, 17 aa, synthetic construct
  REGION 1..17: note = Description of Artificial Sequence: Synthetic peptide
WINPNNGGTQYAQKFQG

SEQ ID NO: 13371 - DNA, 51 bp, synthetic construct; identical to SEQ ID NO: 12701
  misc_feature 1..51: note = Description of Artificial Sequence: Synthetic oligonucleotide
  source 1..51: mol_type = other DNA

SEQ ID NO: 13372 - protein, 17 aa, synthetic construct
  REGION 1..17: note = Description of Artificial Sequence: Synthetic peptide
SISGSSTYIYYADSVKG

SEQ ID NO: 13373 - DNA, 51 bp, synthetic construct; identical to SEQ ID NO: 12153
  misc_feature 1..51: note = Description of Artificial Sequence: Synthetic oligonucleotide
  source 1..51: mol_type = other DNA

SEQ ID NO: 13374 - protein, 17 aa, synthetic construct
  REGION 1..17: note = Description of Artificial Sequence: Synthetic peptide
SISGSSSYIYYADSVKG

SEQ ID NO: 13375 - DNA, 51 bp, synthetic construct
  misc_feature 1..51: note = Description of Artificial Sequence: Synthetic oligonucleotide
  source 1..51: mol_type = other DNA
gttgtatgggatgatggaagtaataaatactatgcagactccgtgaagggc

SEQ ID NO: 13376 - protein, 17 aa, synthetic construct
  REGION 1..17: note = Description of Artificial Sequence: Synthetic peptide
VVWDDGSNKYYADSVKG

SEQ ID NO: 13377 - DNA, 51 bp, synthetic construct
  misc_feature 1..51: note = Description of Artificial Sequence: Synthetic oligonucleotide
  source 1..51: mol_type = other DNA
gctattagtggtagtggtggtaacacattctacgcagactccgtgaagggc

SEQ ID NO: 13378 - protein, 17 aa, synthetic construct
  REGION 1..17: note = Description of Artificial Sequence: Synthetic peptide
AISGSGGNTFYADSVKG

SEQ ID NO: 13379 - DNA, 51 bp, synthetic construct
  misc_feature 1..51: note = Description of Artificial Sequence: Synthetic oligonucleotide
  source 1..51: mol_type = other DNA
gttatatcatatggtggaagtaataaataccatgcagactccgtgaagggc

SEQ ID NO: 13380 - protein, 17 aa, synthetic construct
  REGION 1..17: note = Description of Artificial Sequence: Synthetic peptide
VISYGGSNKYHADSVKG

SEQ ID NO: 13381 - DNA, 51 bp, synthetic construct
  misc_feature 1..51: note = Description of Artificial Sequence: Synthetic oligonucleotide
  source 1..51: mol_type = other DNA
ggtattagtggtagtggtggtcgcacatactacgcagactccgtgaagggc

SEQ ID NO: 13382 - protein, 17 aa, synthetic construct
  REGION 1..17: note = Description of Artificial Sequence: Synthetic peptide
GISGSGGRTYYADSVKG

SEQ ID NO: 13383 - DNA, 51 bp, synthetic construct
  misc_feature 1..51: note = Description of Artificial Sequence: Synthetic oligonucleotide
  source 1..51: mol_type = other DNA
gctattagtggtagtggtggtgccacatactacgcagactccgtgaagggc

SEQ ID NO: 13384 - protein, 17 aa, synthetic construct
  REGION 1..17: note = Description of Artificial Sequence: Synthetic peptide
AISGSGGATYYADSVKG

SEQ ID NO: 13385 - DNA, 51 bp, synthetic construct; identical to SEQ ID NO: 12503
  misc_feature 1..51: note = Description of Artificial Sequence: Synthetic oligonucleotide
  source 1..51: mol_type = other DNA

SEQ ID NO: 13386 - protein, 17 aa, synthetic construct
  REGION 1..17: note = Description of Artificial Sequence: Synthetic peptide
VIWYDESNKYYGDSVKG

SEQ ID NO: 13387 - DNA, 51 bp, synthetic construct
  misc_feature 1..51: note = Description of Artificial Sequence: Synthetic oligonucleotide
  source 1..51: mol_type = other DNA
gttatatcatatggtggaagtaataaatacgatgcagactccgtgaagggc

SEQ ID NO: 13388 - protein, 17 aa, synthetic construct
  REGION 1..17: note = Description of Artificial Sequence: Synthetic peptide
VISYGGSNKYDADSVKG

SEQ ID NO: 13389 - DNA, 51 bp, synthetic construct
  misc_feature 1..51: note = Description of Artificial Sequence: Synthetic oligonucleotide
  source 1..51: mol_type = other DNA
tggatcaaccctaacaataacggcacaaactatgcacagaagtttcagggc

SEQ ID NO: 13390 - protein, 17 aa, synthetic construct
  REGION 1..17: note = Description of Artificial Sequence: Synthetic peptide
WINPNNNGTNYAQKFQG

SEQ ID NO: 13391 - DNA, 51 bp, synthetic construct; identical to SEQ ID NO: 12123
  misc_feature 1..51: note = Description of Artificial Sequence: Synthetic oligonucleotide
  source 1..51: mol_type = other DNA

SEQ ID NO: 13392 - protein, 17 aa, synthetic construct
  REGION 1..17: note = Description of Artificial Sequence: Synthetic peptide
VIWYDGSNKYYADSVKG

SEQ ID NO: 13393 - DNA, 51 bp, synthetic construct
  misc_feature 1..51: note = Description of Artificial Sequence: Synthetic oligonucleotide
  source 1..51: mol_type = other DNA
gttgtatggtatgatggaaataatagatactatgcagactccgtgaagggc

SEQ ID NO: 13394 - protein, 17 aa, synthetic construct
  REGION 1..17: note = Description of Artificial Sequence: Synthetic peptide
VVWYDGNNRYYADSVKG

SEQ ID NO: 13395 - DNA, 51 bp, synthetic construct
  misc_feature 1..51: note = Description of Artificial Sequence: Synthetic oligonucleotide
  source 1..51: mol_type = other DNA
gttacatggtttgatggaaataataactactatgcagactccgtgaagggc

SEQ ID NO: 13396 - protein, 17 aa, synthetic construct
  REGION 1..17: note = Description of Artificial Sequence: Synthetic peptide
VTWFDGNNNYYADSVKG

SEQ ID NO: 13397 - DNA, 51 bp, synthetic construct
  misc_feature 1..51: note = Description of Artificial Sequence: Synthetic oligonucleotide
  source 1..51: mol_type = other DNA
gctattagtggtagtggtgttaacacattctacgcagactccgtgaagggc

SEQ ID NO: 13398 - protein, 17 aa, synthetic construct
  REGION 1..17: note = Description of Artificial Sequence: Synthetic peptide
AISGSGVNTFYADSVKG

SEQ ID NO: 13399 - DNA, 51 bp, synthetic construct
  misc_feature 1..51: note = Description of Artificial Sequence: Synthetic oligonucleotide
  source 1..51: mol_type = other DNA
tccattagtggtactagtagttacatatactacgcagactcagtgaagggc

SEQ ID NO: 13400 - protein, 17 aa, synthetic construct
  REGION 1..17: note = Description of Artificial Sequence: Synthetic peptide
SISGTSSYIYYADSVKG

SEQ ID NO: 13401 - DNA, 51 bp, synthetic construct; identical to SEQ ID NO: 12123
  misc_feature 1..51: note = Description of Artificial Sequence: Synthetic oligonucleotide
  source 1..51: mol_type = other DNA

SEQ ID NO: 13402 - protein, 17 aa, synthetic construct
  REGION 1..17: note = Description of Artificial Sequence: Synthetic peptide
VIWYDGSNKYYADSVKG

SEQ ID NO: 13403 - DNA, 51 bp, synthetic construct; identical to SEQ ID NO: 12491
  misc_feature 1..51: note = Description of Artificial Sequence: Synthetic oligonucleotide
  source 1..51: mol_type = other DNA

SEQ ID NO: 13404 - protein, 17 aa, synthetic construct
  REGION 1..17: note = Description of Artificial Sequence: Synthetic peptide
VIWYDENNKYYADSVKG

SEQ ID NO: 13405 - DNA, 51 bp, synthetic construct
  misc_feature 1..51: note = Description of Artificial Sequence: Synthetic oligonucleotide
  source 1..51: mol_type = other DNA
gttatatggtatgaggaaagtaataaatactatggagactccgtgaagggc

SEQ ID NO: 13406 - protein, 17 aa, synthetic construct
  REGION 1..17: note = Description of Artificial Sequence: Synthetic peptide
VIWYEESNKYYGDSVKG

SEQ ID NO: 13407 - DNA, 51 bp, synthetic construct
  misc_feature 1..51: note = Description of Artificial Sequence: Synthetic oligonucleotide
  source 1..51: mol_type = other DNA
tggatccaccctaacaataatgccacaaactatgcacagaagtttcagggc

SEQ ID NO: 13408 - protein, 17 aa, synthetic construct
  REGION 1..17: note = Description of Artificial Sequence: Synthetic peptide
WIHPNNNATNYAQKFQG

SEQ ID NO: 13409 - DNA, 51 bp, synthetic construct
  misc_feature 1..51: note = Description of Artificial Sequence: Synthetic oligonucleotide
  source 1..51: mol_type = other DNA
gctattagtggtcgtggtagtagcacattctacgcagactccgtgaagggc

SEQ ID NO: 13410 - protein, 17 aa, synthetic construct
  REGION 1..17: note = Description of Artificial Sequence: Synthetic peptide
AISGRGSSTFYADSVKG

SEQ ID NO: 13411 - DNA, 51 bp, synthetic construct; identical to SEQ ID NO: 12123
  misc_feature 1..51: note = Description of Artificial Sequence: Synthetic oligonucleotide
  source 1..51: mol_type = other DNA

SEQ ID NO: 13412 - protein, 17 aa, synthetic construct
  REGION 1..17: note = Description of Artificial Sequence: Synthetic peptide
VIWYDGSNKYYADSVKG

SEQ ID NO: 13413 - DNA, 51 bp, synthetic construct; identical to SEQ ID NO: 13365
  misc_feature 1..51: note = Description of Artificial Sequence: Synthetic oligonucleotide
  source 1..51: mol_type = other DNA

SEQ ID NO: 13414 - protein, 17 aa, synthetic construct
  REGION 1..17: note = Description of Artificial Sequence: Synthetic peptide
LIWYDGSNKYHADSVKG

SEQ ID NO: 13415 - DNA, 51 bp, synthetic construct
  misc_feature 1..51: note = Description of Artificial Sequence: Synthetic oligonucleotide
  source 1..51: mol_type = other DNA
gttatatggtttgatggaaataataaatactatgaagactccgtgaagggc

SEQ ID NO: 13416 - protein, 17 aa, synthetic construct
  REGION 1..17: note = Description of Artificial Sequence: Synthetic peptide
VIWFDGNNKYYEDSVKG

SEQ ID NO: 13417 - DNA, 51 bp, synthetic construct
  misc_feature 1..51: note = Description of Artificial Sequence: Synthetic oligonucleotide
  source 1..51: mol_type = other DNA
tccattagtagtagtagtaatcacatagactacgcagactcagtgaagggc

SEQ ID NO: 13418 - protein, 17 aa, synthetic construct
  REGION 1..17: note = Description of Artificial Sequence: Synthetic peptide
SISSSSNHIDYADSVKG

SEQ ID NO: 13419 - DNA, 51 bp, synthetic construct; identical to SEQ ID NO: 12491
  misc_feature 1..51: note = Description of Artificial Sequence: Synthetic oligonucleotide
  source 1..51: mol_type = other DNA

SEQ ID NO: 13420 - protein, 17 aa, synthetic construct
  REGION 1..17: note = Description of Artificial Sequence: Synthetic peptide
VIWYDENNKYYADSVKG

SEQ ID NO: 13421 - DNA, 51 bp, synthetic construct
  misc_feature 1..51: note = Description of Artificial Sequence: Synthetic oligonucleotide
  source 1..51: mol_type = other DNA
gttatatggtatgatggaaatggcaaatattatgcagactccgtgaagggc

SEQ ID NO: 13422 - protein, 17 aa, synthetic construct
  REGION 1..17: note = Description of Artificial Sequence: Synthetic peptide
VIWYDGNGKYYADSVKG

SEQ ID NO: 13423 - DNA, 51 bp, synthetic construct
  misc_feature 1..51: note = Description of Artificial Sequence: Synthetic oligonucleotide
  source 1..51: mol_type = other DNA
attatatcatatggtggaagtaataaatacgatgcagactccgtgaagggc

SEQ ID NO: 13424 - protein, 17 aa, synthetic construct
  REGION 1..17: note = Description of Artificial Sequence: Synthetic peptide
IISYGGSNKYDADSVKG

SEQ ID NO: 13425 - DNA, 51 bp, synthetic construct; identical to SEQ ID NO: 12263
  misc_feature 1..51: note = Description of Artificial Sequence: Synthetic oligonucleotide
  source 1..51: mol_type = other DNA

SEQ ID NO: 13426 - protein, 17 aa, synthetic construct
  REGION 1..17: note = Description of Artificial Sequence: Synthetic peptide
VIWHDGSNKYYADSVKG

SEQ ID NO: 13427 - DNA, 51 bp, synthetic construct
  misc_feature 1..51: note = Description of Artificial Sequence: Synthetic oligonucleotide
  source 1..51: mol_type = other DNA
gctatcagtggtagtggtgttaactcattctacgcagactccgtgaagggc

SEQ ID NO: 13428 - protein, 17 aa, synthetic construct
  REGION 1..17: note = Description of Artificial Sequence: Synthetic peptide
AISGSGVNSFYADSVKG

SEQ ID NO: 13429 - DNA, 51 bp, synthetic construct
  misc_feature 1..51: note = Description of Artificial Sequence: Synthetic oligonucleotide
  source 1..51: mol_type = other DNA
gttatatggtatgaagaaactaataaatactatgcagactccgtgaagggc

SEQ ID NO: 13430 - protein, 17 aa, synthetic construct
  REGION 1..17: note = Description of Artificial Sequence: Synthetic peptide
VIWYEETNKYYADSVKG

SEQ ID NO: 13431 - DNA, 51 bp, synthetic construct
  misc_feature 1..51: note = Description of Artificial Sequence: Synthetic oligonucleotide
  source 1..51: mol_type = other DNA
gtaatcaaccctagtaatggtagaacaagctacgcacagaagttccagggc

SEQ ID NO: 13432 - protein, 17 aa, synthetic construct
  REGION 1..17: note = Description of Artificial Sequence: Synthetic peptide
VINPSNGRTSYAQKFQG

SEQ ID NO: 13433 - DNA, 51 bp, synthetic construct
  misc_feature 1..51: note = Description of Artificial Sequence: Synthetic oligonucleotide
  source 1..51: mol_type = other DNA
gttatatcatatgttggaagtactaaatactatgcagactccgtgaggggc

SEQ ID NO: 13434 - protein, 17 aa, synthetic construct
  REGION 1..17: note = Description of Artificial Sequence: Synthetic peptide
VISYVGSTKYYADSVRG

SEQ ID NO: 13435 - DNA, 51 bp, synthetic construct; identical to SEQ ID NO: 12161
  misc_feature 1..51: note = Description of Artificial Sequence: Synthetic oligonucleotide
  source 1..51: mol_type = other DNA

SEQ ID NO: 13436 - protein, 17 aa, synthetic construct
  REGION 1..17: note = Description of Artificial Sequence: Synthetic peptide
WMHPNSGNTGYAQKFQG

SEQ ID NO: 13437 - DNA, 51 bp, synthetic construct
  misc_feature 1..51: note = Description of Artificial Sequence: Synthetic oligonucleotide
  source 1..51: mol_type = other DNA
tccattagtagtagtagtacttacatatactacggagactcagtgaagggc

SEQ ID NO: 13438 - protein, 17 aa, synthetic construct
  REGION 1..17: note = Description of Artificial Sequence: Synthetic peptide
SISSSSTYIYYGDSVKG

SEQ ID NO: 13439 - DNA, 51 bp, synthetic construct; identical to SEQ ID NO: 13377
  misc_feature 1..51: note = Description of Artificial Sequence: Synthetic oligonucleotide
  source 1..51: mol_type = other DNA

SEQ ID NO: 13440 - protein, 17 aa, synthetic construct
  REGION 1..17: note = Description of Artificial Sequence: Synthetic peptide
AISGSGGNTFYADSVKG

SEQ ID NO: 13441 - DNA, 51 bp, synthetic construct; identical to SEQ ID NO: 12153
  misc_feature 1..51: note = Description of Artificial Sequence: Synthetic oligonucleotide
  source 1..51: mol_type = other DNA

SEQ ID NO: 13442 - protein, 17 aa, synthetic construct
  REGION 1..17: note = Description of Artificial Sequence: Synthetic peptide
SISGSSSYIYYADSVKG

SEQ ID NO: 13443 - DNA, 51 bp, synthetic construct
  misc_feature 1..51: note = Description of Artificial Sequence: Synthetic oligonucleotide
  source 1..51: mol_type = other DNA
tggatcaaccctaacaataatgccacaaactatgcacagaagtttcagggc

SEQ ID NO: 13444 - protein, 17 aa, synthetic construct
  REGION 1..17: note = Description of Artificial Sequence: Synthetic peptide
WINPNNNATNYAQKFQG

SEQ ID NO: 13445 - DNA, 51 bp, synthetic construct
  misc_feature 1..51: note = Description of Artificial Sequence: Synthetic oligonucleotide
  source 1..51: mol_type = other DNA
gttatatggcatgatggaagtaataaatattatgtagactccgtgaagggc

SEQ ID NO: 13446 - protein, 17 aa, synthetic construct
  REGION 1..17: note = Description of Artificial Sequence: Synthetic peptide
VIWHDGSNKYYVDSVKG

SEQ ID NO: 13447 - DNA, 51 bp, synthetic construct
  misc_feature 1..51: note = Description of Artificial Sequence: Synthetic oligonucleotide
  source 1..51: mol_type = other DNA
tggatcaaccctaacagaggtggcacaaattatgtacagaagtttcagggt

SEQ ID NO: 13448 - protein, 17 aa, synthetic construct
  REGION 1..17: note = Description of Artificial Sequence: Synthetic peptide
WINPNRGGTNYVQKFQG

SEQ ID NO: 13449 - DNA, 51 bp, synthetic construct
  misc_feature 1..51: note = Description of Artificial Sequence: Synthetic oligonucleotide
  source 1..51: mol_type = other DNA
tggatcaaccctaacagtggtggcacaaactatgcacagaggtttcagggc

SEQ ID NO: 13450 - protein, 17 aa, synthetic construct
  REGION 1..17: note = Description of Artificial Sequence: Synthetic peptide
WINPNSGGTNYAQRFQG

SEQ ID NO: 13451 - DNA, 51 bp, synthetic construct; identical to SEQ ID NO: 13323
  misc_feature 1..51: note = Description of Artificial Sequence: Synthetic oligonucleotide
  source 1..51: mol_type = other DNA

SEQ ID NO: 13452 - protein, 17 aa, synthetic construct
  REGION 1..17: note = Description of Artificial Sequence: Synthetic peptide
WVNPNSGGTNSAQKFQG

SEQ ID NO: 13453 - DNA, 51 bp, synthetic construct
  misc_feature 1..51: note = Description of Artificial Sequence: Synthetic oligonucleotide
  source 1..51: mol_type = other DNA
gttatatggtatgatgaaagtaataaacactatgcagactccgtgaagggc

SEQ ID NO: 13454 - protein, 17 aa, synthetic construct
  REGION 1..17: note = Description of Artificial Sequence: Synthetic peptide
VIWYDESNKHYADSVKG

SEQ ID NO: 13455 - DNA, 51 bp, synthetic construct; identical to SEQ ID NO: 12123
  misc_feature 1..51: note = Description of Artificial Sequence: Synthetic oligonucleotide
  source 1..51: mol_type = other DNA

SEQ ID NO: 13456 - protein, 17 aa, synthetic construct
  REGION 1..17: note = Description of Artificial Sequence: Synthetic peptide
VIWYDGSNKYYADSVKG

SEQ ID NO: 13457 - DNA, 51 bp, synthetic construct
  misc_feature 1..51: note = Description of Artificial Sequence: Synthetic oligonucleotide
  source 1..51: mol_type = other DNA
attatatggtatgatgaaaataataaatactatgcagactccgtgaagggc

SEQ ID NO: 13458 - protein, 17 aa, synthetic construct
  REGION 1..17: note = Description of Artificial Sequence: Synthetic peptide
IIWYDENNKYYADSVKG

SEQ ID NO: 13459 - DNA, 51 bp, synthetic construct; identical to SEQ ID NO: 12123
  misc_feature 1..51: note = Description of Artificial Sequence: Synthetic oligonucleotide
  source 1..51: mol_type = other DNA

SEQ ID NO: 13460 - protein, 17 aa, synthetic construct
  REGION 1..17: note = Description of Artificial Sequence: Synthetic peptide
VIWYDGSNKYYADSVKG

SEQ ID NO: 13461 - DNA, 51 bp, synthetic construct
  misc_feature 1..51: note = Description of Artificial Sequence: Synthetic oligonucleotide
  source 1..51: mol_type = other DNA
gttatatggtatgaagaaagtaataaatactatgcagactccgtgaagggc

SEQ ID NO: 13462 - protein, 17 aa, synthetic construct
  REGION 1..17: note = Description of Artificial Sequence: Synthetic peptide
VIWYEESNKYYADSVKG

SEQ ID NO: 13463 - DNA, 51 bp, synthetic construct
  misc_feature 1..51: note = Description of Artificial Sequence: Synthetic oligonucleotide
  source 1..51: mol_type = other DNA
tggatcaaccctaacagcggtggcacaaactatgtacagaaatttcagggc

SEQ ID NO: 13464 - protein, 17 aa, synthetic construct
  REGION 1..17: note = Description of Artificial Sequence: Synthetic peptide
WINPNSGGTNYVQKFQG

SEQ ID NO: 13465 - DNA, 51 bp, synthetic construct; identical to SEQ ID NO: 12161
  misc_feature 1..51: note = Description of Artificial Sequence: Synthetic oligonucleotide
  source 1..51: mol_type = other DNA

SEQ ID NO: 13466 - protein, 17 aa, synthetic construct
  REGION 1..17: note = Description of Artificial Sequence: Synthetic peptide
WMHPNSGNTGYAQKFQG

SEQ ID NO: 13467 - DNA, 51 bp, synthetic construct
  misc_feature 1..51: note = Description of Artificial Sequence: Synthetic oligonucleotide
  source 1..51: mol_type = other DNA
tctattagtggtagtggtggttggacaaactacgcagactccgtgaagggc

SEQ ID NO: 13468 - protein, 17 aa, synthetic construct
  REGION 1..17: note = Description of Artificial Sequence: Synthetic peptide
SISGSGGWTNYADSVKG

SEQ ID NO: 13469 - DNA, 51 bp, synthetic construct
  misc_feature 1..51: note = Description of Artificial Sequence: Synthetic oligonucleotide
  source 1..51: mol_type = other DNA
ggtattagtggtagtggtaatagaacatactacgcagactccgtgaagggc

SEQ ID NO: 13470 - protein, 17 aa, synthetic construct
  REGION 1..17: note = Description of Artificial Sequence: Synthetic peptide
GISGSGNRTYYADSVKG

SEQ ID NO: 13471 - DNA, 48 bp, synthetic construct
  misc_feature 1..48: note = Description of Artificial Sequence: Synthetic oligonucleotide
  source 1..48: mol_type = other DNA
agtatctattatagtgggagcgcctcctacaacccgtccctcaagagt

SEQ ID NO: 13472 - protein, 16 aa, synthetic construct
  REGION 1..16: note = Description of Artificial Sequence: Synthetic peptide
SIYYSGSASYNPSLKS

SEQ ID NO: 13473 - DNA, 51 bp, synthetic construct; identical to SEQ ID NO: 13377
  misc_feature 1..51: note = Description of Artificial Sequence: Synthetic oligonucleotide
  source 1..51: mol_type = other DNA

SEQ ID NO: 13474 - protein, 17 aa, synthetic construct
  REGION 1..17: note = Description of Artificial Sequence: Synthetic peptide
AISGSGGNTFYADSVKG

SEQ ID NO: 13475 - DNA, 51 bp, synthetic construct
  misc_feature 1..51: note = Description of Artificial Sequence: Synthetic oligonucleotide
  source 1..51: mol_type = other DNA
gctattagtggtagtggtggtaacacattctacgcagactccgtgacgggc

SEQ ID NO: 13476 - protein, 17 aa, synthetic construct
  REGION 1..17: note = Description of Artificial Sequence: Synthetic peptide
AISGSGGNTFYADSVTG

SEQ ID NO: 13477 - DNA, 51 bp, synthetic construct; identical to SEQ ID NO: 12133
  misc_feature 1..51: note = Description of Artificial Sequence: Synthetic oligonucleotide
  source 1..51: mol_type = other DNA

SEQ ID NO: 13478 - protein, 17 aa, synthetic construct
  REGION 1..17: note = Description of Artificial Sequence: Synthetic peptide
VIWYDGSNKYYVDSVKG

SEQ ID NO: 13479 - DNA, 48 bp, synthetic construct
  misc_feature 1..48: note = Description of Artificial Sequence: Synthetic oligonucleotide
  source 1..48: mol_type = other DNA
cgcatctataccagggggagcaccaactacaacccctccctcaagagt

SEQ ID NO: 13480 - protein, 16 aa, synthetic construct
  REGION 1..16: note = Description of Artificial Sequence: Synthetic peptide
RIYTRGSTNYNPSLKS

SEQ ID NO: 13481 - DNA, 48 bp, synthetic construct
  misc_feature 1..48: note = Description of Artificial Sequence: Synthetic oligonucleotide
  source 1..48: mol_type = other DNA
cgcatctatatcagggggagcaccaactacaacccctccctcaagagt

SEQ ID NO: 13482 - protein, 16 aa, synthetic construct
  REGION 1..16: note = Description of Artificial Sequence: Synthetic peptide
RIYIRGSTNYNPSLKS

SEQ ID NO: 13483 - DNA, 51 bp, synthetic construct
  misc_feature 1..51: note = Description of Artificial Sequence: Synthetic oligonucleotide
  source 1..51: mol_type = other DNA
attatatggtatgatgaaagtaataaatactatgcagactccgtgaagggc

SEQ ID NO: 13484 - protein, 17 aa, synthetic construct
  REGION 1..17: note = Description of Artificial Sequence: Synthetic peptide
IIWYDESNKYYADSVKG

SEQ ID NO: 13485 - DNA, 51 bp, synthetic construct; identical to SEQ ID NO: 12123
  misc_feature 1..51: note = Description of Artificial Sequence: Synthetic oligonucleotide
  source 1..51: mol_type = other DNA

SEQ ID NO: 13486 - protein, 17 aa, synthetic construct
  REGION 1..17: note = Description of Artificial Sequence: Synthetic peptide
VIWYDGSNKYYADSVKG

SEQ ID NO: 13487 - DNA, 51 bp, synthetic construct; identical to SEQ ID NO: 12123
  misc_feature 1..51: note = Description of Artificial Sequence: Synthetic oligonucleotide
  source 1..51: mol_type = other DNA

SEQ ID NO: 13488 - protein, 17 aa, synthetic construct
  REGION 1..17: note = Description of Artificial Sequence: Synthetic peptide
VIWYDGSNKYYADSVKG

SEQ ID NO: 13489 - DNA, 51 bp, synthetic construct; identical to SEQ ID NO: 12101
  misc_feature 1..51: note = Description of Artificial Sequence: Synthetic oligonucleotide
  source 1..51: mol_type = other DNA

SEQ ID NO: 13490 - protein, 17 aa, synthetic construct
  REGION 1..17: note = Description of Artificial Sequence: Synthetic peptide
WMTPNSGNTGYAQKFQG

SEQ ID NO: 13491 - DNA, 51 bp, synthetic construct
  misc_feature 1..51: note = Description of Artificial Sequence: Synthetic oligonucleotide
  source 1..51: mol_type = other DNA
tggatgcaccctaacagtggtagcacaggctatgcacagaagttccagggc

SEQ ID NO: 13492 - protein, 17 aa, synthetic construct
  REGION 1..17: note = Description of Artificial Sequence: Synthetic peptide
WMHPNSGSTGYAQKFQG

SEQ ID NO: 13493 - DNA, 51 bp, synthetic construct
  misc_feature 1..51: note = Description of Artificial Sequence: Synthetic oligonucleotide
  source 1..51: mol_type = other DNA
gctattagtactggtggtggtaacacatactacgcagactccgtgaagggc

SEQ ID NO: 13494 - protein, 17 aa, synthetic construct
  REGION 1..17: note = Description of Artificial Sequence: Synthetic peptide
AISTGGGNTYYADSVKG

SEQ ID NO: 13495 - DNA, 51 bp, synthetic construct
  misc_feature 1..51: note = Description of Artificial Sequence: Synthetic oligonucleotide
  source 1..51: mol_type = other DNA
gctactagtggtagtggtgttaacacattctacgcagactccgtgaagggc

SEQ ID NO: 13496 - protein, 17 aa, synthetic construct
  REGION 1..17: note = Description of Artificial Sequence: Synthetic peptide
ATSGSGVNTFYADSVKG

SEQ ID NO: 13497 - DNA, 51 bp, synthetic construct; identical to SEQ ID NO: 12361
  misc_feature 1..51: note = Description of Artificial Sequence: Synthetic oligonucleotide
  source 1..51: mol_type = other DNA

SEQ ID NO: 13498 - protein, 17 aa, synthetic construct
  REGION 1..17: note = Description of Artificial Sequence: Synthetic peptide
SISSSSSYIYYADSVKG

SEQ ID NO: 13499 - DNA, 51 bp, synthetic construct; identical to SEQ ID NO: 12127
  misc_feature 1..51: note = Description of Artificial Sequence: Synthetic oligonucleotide
  source 1..51: mol_type = other DNA

SEQ ID NO: 13500 - protein, 17 aa, synthetic construct
  REGION 1..17: note = Description of Artificial Sequence: Synthetic peptide
IIWYDGSNKYYADSVKG

SEQ ID NO: 13501 - DNA, 51 bp, synthetic construct
  misc_feature 1..51: note = Description of Artificial Sequence: Synthetic oligonucleotide
  source 1..51: mol_type = other DNA
gttatatggtatgatggaagtaataaatactctgcagactccgtgaagggc

SEQ ID NO: 13502 - protein, 17 aa, synthetic construct
  REGION 1..17: note = Description of Artificial Sequence: Synthetic peptide
VIWYDGSNKYSADSVKG

SEQ ID NO: 13503 - DNA, 48 bp, synthetic construct
  misc_feature 1..48: note = Description of Artificial Sequence: Synthetic oligonucleotide
  source 1..48: mol_type = other DNA
agcatctattatagtgggatcgcctcctataatccgtccctcaagagt

SEQ ID NO: 13504 - protein, 16 aa, synthetic construct
  REGION 1..16: note = Description of Artificial Sequence: Synthetic peptide
SIYYSGIASYNPSLKS

SEQ ID NO: 13505 - DNA, 51 bp, synthetic construct; identical to SEQ ID NO: 12361
  misc_feature 1..51: note = Description of Artificial Sequence: Synthetic oligonucleotide
  source 1..51: mol_type = other DNA

SEQ ID NO: 13506 - protein, 17 aa, synthetic construct
  REGION 1..17: note = Description of Artificial Sequence: Synthetic peptide
SISSSSSYIYYADSVKG

SEQ ID NO: 13507 - DNA, 51 bp, synthetic construct
  misc_feature 1..51: note = Description of Artificial Sequence: Synthetic oligonucleotide
  source 1..51: mol_type = other DNA
gttatatggtatgatagaagtaataaatactatgcagactccgtgaagggc

SEQ ID NO: 13508 - protein, 17 aa, synthetic construct
  REGION 1..17: note = Description of Artificial Sequence: Synthetic peptide
VIWYDRSNKYYADSVKG

SEQ ID NO: 13509 - DNA, 51 bp, synthetic construct
  misc_feature 1..51: note = Description of Artificial Sequence: Synthetic oligonucleotide
  source 1..51: mol_type = other DNA
gctatatggtatgatggaagtaataaatactatggagactccgtgaagggc

SEQ ID NO: 13510 - protein, 17 aa, synthetic construct
  REGION 1..17: note = Description of Artificial Sequence: Synthetic peptide
AIWYDGSNKYYGDSVKG

SEQ ID NO: 13511 - DNA, 51 bp, synthetic construct
  misc_feature 1..51: note = Description of Artificial Sequence: Synthetic oligonucleotide
  source 1..51: mol_type = other DNA
ggtattagtggtagtggtgctaaaacatactatgcagactccgtgaagggc

SEQ ID NO: 13512 - protein, 17 aa, synthetic construct
  REGION 1..17: note = Description of Artificial Sequence: Synthetic peptide
GISGSGAKTYYADSVKG

SEQ ID NO: 13513 - DNA, 51 bp, synthetic construct
  misc_feature 1..51: note = Description of Artificial Sequence: Synthetic oligonucleotide
  source 1..51: mol_type = other DNA
tggatcaaacctaaaagtggtggcacaaaccaagcacagaagtttcagggc

SEQ ID NO: 13514 - protein, 17 aa, synthetic construct
  REGION 1..17: note = Description of Artificial Sequence: Synthetic peptide
WIKPKSGGTNQAQKFQG

SEQ ID NO: 13515 - DNA, 51 bp, synthetic construct
  misc_feature 1..51: note = Description of Artificial Sequence: Synthetic oligonucleotide
  source 1..51: mol_type = other DNA
gctatgagtggtagtggtggtagaacatactacgcagactccgtgaagggc

SEQ ID NO: 13516 - protein, 17 aa, synthetic construct
  REGION 1..17: note = Description of Artificial Sequence: Synthetic peptide
AMSGSGGRTYYADSVKG

SEQ ID NO: 13517 - DNA, 51 bp, synthetic construct; identical to SEQ ID NO: 13437
  misc_feature 1..51: note = Description of Artificial Sequence: Synthetic oligonucleotide
  source 1..51: mol_type = other DNA

SEQ ID NO: 13518 - protein, 17 aa, synthetic construct
  REGION 1..17: note = Description of Artificial Sequence: Synthetic peptide
SISSSSTYIYYGDSVKG

SEQ ID NO: 13519 - DNA, 51 bp, synthetic construct
  misc_feature 1..51: note = Description of Artificial Sequence: Synthetic oligonucleotide
  source 1..51: mol_type = other DNA
tccattagtggtagtagtagttacataaactacacagactcagtgaagggc

SEQ ID NO: 13520 - protein, 17 aa, synthetic construct
  REGION 1..17: note = Description of Artificial Sequence: Synthetic peptide
SISGSSSYINYTDSVKG

SEQ ID NO: 13521 - DNA, 48 bp, synthetic construct; identical to SEQ ID NO: 13479
  misc_feature 1..48: note = Description of Artificial Sequence: Synthetic oligonucleotide
  source 1..48: mol_type = other DNA

SEQ ID NO: 13522 - protein, 16 aa, synthetic construct
  REGION 1..16: note = Description of Artificial Sequence: Synthetic peptide
RIYTRGSTNYNPSLKS

SEQ ID NO: 13523 - DNA, 51 bp, synthetic construct; identical to SEQ ID NO: 12151
  misc_feature 1..51: note = Description of Artificial Sequence: Synthetic oligonucleotide
  source 1..51: mol_type = other DNA

SEQ ID NO: 13524 - protein, 17 aa, synthetic construct
  REGION 1..17: note = Description of Artificial Sequence: Synthetic peptide
AIWYDGSNKYYADSVKG

SEQ ID NO: 13525 - DNA, 51 bp, synthetic construct
  misc_feature 1..51: note = Description of Artificial Sequence: Synthetic oligonucleotide
  source 1..51: mol_type = other DNA
gttatatggtatgctggaagtaataaatactatgtagactccgtgaagggc

SEQ ID NO: 13526 - protein, 17 aa, synthetic construct
  REGION 1..17: note = Description of Artificial Sequence: Synthetic peptide
VIWYAGSNKYYVDSVKG

SEQ ID NO: 13527 - DNA, 51 bp, synthetic construct
  misc_feature 1..51: note = Description of Artificial Sequence: Synthetic oligonucleotide
  source 1..51: mol_type = other DNA
gttattagtggtagtggtggtagtacattctacgcagactccgtgaagggc

SEQ ID NO: 13528 - protein, 17 aa, synthetic construct
  REGION 1..17: note = Description of Artificial Sequence: Synthetic peptide
VISGSGGSTFYADSVKG

SEQ ID NO: 13529 - DNA, 51 bp, synthetic construct
  misc_feature 1..51: note = Description of Artificial Sequence: Synthetic oligonucleotide
  source 1..51: mol_type = other DNA
tacattagtagtagtggtagtaccatatactacgcagactctgtgaagggc

SEQ ID NO: 13530 - protein, 17 aa, synthetic construct
  REGION 1..17: note = Description of Artificial Sequence: Synthetic peptide
YISSSGSTIYYADSVKG

SEQ ID NO: 13531 - DNA, 51 bp, synthetic construct; identical to SEQ ID NO: 13081
  misc_feature 1..51: note = Description of Artificial Sequence: Synthetic oligonucleotide
  source 1..51: mol_type = other DNA

SEQ ID NO: 13532 - protein, 17 aa, synthetic construct
  REGION 1..17: note = Description of Artificial Sequence: Synthetic peptide
WINPNNNGTNYAQKFQG

SEQ ID NO: 13533 - DNA, 51 bp, synthetic construct; identical to SEQ ID NO: 13377
  misc_feature 1..51: note = Description of Artificial Sequence: Synthetic oligonucleotide
  source 1..51: mol_type = other DNA

SEQ ID NO: 13534 - protein, 17 aa, synthetic construct
  REGION 1..17: note = Description of Artificial Sequence: Synthetic peptide
AISGSGGNTFYADSVKG

SEQ ID NO: 13535 - DNA, 51 bp, synthetic construct; identical to SEQ ID NO: 13377
  misc_feature 1..51: note = Description of Artificial Sequence: Synthetic oligonucleotide
  source 1..51: mol_type = other DNA

SEQ ID NO: 13536 - protein, 17 aa, synthetic construct
  REGION 1..17: note = Description of Artificial Sequence: Synthetic peptide
AISGSGGNTFYADSVKG

SEQ ID NO: 13537 - DNA, 51 bp, synthetic construct
  misc_feature 1..51: note = Description of Artificial Sequence: Synthetic oligonucleotide
  source 1..51: mol_type = other DNA
gctagcagtggtagtggtggtaacacattctacgcagactccgtgacgggc

SEQ ID NO: 13538 - protein, 17 aa, synthetic construct
  REGION 1..17: note = Description of Artificial Sequence: Synthetic peptide
ASSGSGGNTFYADSVTG

SEQ ID NO: 13539 - DNA, 51 bp, synthetic construct
  misc_feature 1..51: note = Description of Artificial Sequence: Synthetic oligonucleotide
  source 1..51: mol_type = other DNA
tggatgaaccctaacagtgttaacacaggctatgcacagaagttccagggc

SEQ ID NO: 13540 - protein, 17 aa, synthetic construct
  REGION 1..17: note = Description of Artificial Sequence: Synthetic peptide
WMNPNSVNTGYAQKFQG

SEQ ID NO: 13541 - DNA, 51 bp, synthetic construct; identical to SEQ ID NO: 12103
  misc_feature 1..51: note = Description of Artificial Sequence: Synthetic oligonucleotide
  source 1..51: mol_type = other DNA

SEQ ID NO: 13542 - protein, 17 aa, synthetic construct
  REGION 1..17: note = Description of Artificial Sequence: Synthetic peptide
WMNPNSGNTGYAQKFQG

SEQ ID NO: 13543 - DNA, 51 bp, synthetic construct
  misc_feature 1..51: note = Description of Artificial Sequence: Synthetic oligonucleotide
  source 1..51: mol_type = other DNA
gctattagtggtagtggtggtaacacattctacggagactccgtgaagggc

SEQ ID NO: 13544 - protein, 17 aa, synthetic construct
  REGION 1..17: note = Description of Artificial Sequence: Synthetic peptide
AISGSGGNTFYGDSVKG

SEQ ID NO: 13545 - DNA, 51 bp, synthetic construct; identical to SEQ ID NO: 13543
  misc_feature 1..51: note = Description of Artificial Sequence: Synthetic oligonucleotide
  source 1..51: mol_type = other DNA

SEQ ID NO: 13546 - protein, 17 aa, synthetic construct
  REGION 1..17: note = Description of Artificial Sequence: Synthetic peptide
AISGSGGNTFYGDSVKG

SEQ ID NO: 13547 - DNA, 51 bp, synthetic construct
  misc_feature 1..51: note = Description of Artificial Sequence: Synthetic oligonucleotide
  source 1..51: mol_type = other DNA
gttatatggtatgctggaagtaataaataccatgtagactccgtgaagggc

SEQ ID NO: 13548 - protein, 17 aa, synthetic construct
  REGION 1..17: note = Description of Artificial Sequence: Synthetic peptide
VIWYAGSNKYHVDSVKG

SEQ ID NO: 13549 - DNA, 51 bp, synthetic construct
  misc_feature 1..51: note = Description of Artificial Sequence: Synthetic oligonucleotide
  source 1..51: mol_type = other DNA
tggatgaaccctaacagtggtagcacaggctatgcacagaagttccagggc

SEQ ID NO: 13550 - protein, 17 aa, synthetic construct
  REGION 1..17: note = Description of Artificial Sequence: Synthetic peptide
WMNPNSGSTGYAQKFQG

SEQ ID NO: 13551 - DNA, 51 bp, synthetic construct; identical to SEQ ID NO: 13377
  misc_feature 1..51: note = Description of Artificial Sequence: Synthetic oligonucleotide
  source 1..51: mol_type = other DNA

SEQ ID NO: 13552 - protein, 17 aa, synthetic construct
  REGION 1..17: note = Description of Artificial Sequence: Synthetic peptide
AISGSGGNTFYADSVKG

SEQ ID NO: 13553 - DNA, 51 bp, synthetic construct
  misc_feature 1..51: note = Description of Artificial Sequence: Synthetic oligonucleotide
  source 1..51: mol_type = other DNA
gttatatggtatgatggaagtaaaaaatattatgcagactccgtgaagggc

SEQ ID NO: 13554 - protein, 17 aa, synthetic construct
  REGION 1..17: note = Description of Artificial Sequence: Synthetic peptide
VIWYDGSKKYYADSVKG

SEQ ID NO: 13555 - DNA, 51 bp, synthetic construct; identical to SEQ ID NO: 13377
  misc_feature 1..51: note = Description of Artificial Sequence: Synthetic oligonucleotide
  source 1..51: mol_type = other DNA

SEQ ID NO: 13556 - protein, 17 aa, synthetic construct
  REGION 1..17: note = Description of Artificial Sequence: Synthetic peptide
AISGSGGNTFYADSVKG

SEQ ID NO: 13557 - DNA, 51 bp, synthetic construct
  misc_feature 1..51: note = Description of Artificial Sequence: Synthetic oligonucleotide
  source 1..51: mol_type = other DNA
gttatatggtatgatggaagtaataaataccatgcagactccgtgaagggc

SEQ ID NO: 13558 - protein, 17 aa, synthetic construct
  REGION 1..17: note = Description of Artificial Sequence: Synthetic peptide
VIWYDGSNKYHADSVKG

SEQ ID NO: 13559 - DNA, 51 bp, synthetic construct
  misc_feature 1..51: note = Description of Artificial Sequence: Synthetic oligonucleotide
  source 1..51: mol_type = other DNA
tggatgactcctaacagtggtaacacaggctatgcacagaagttccagggc

SEQ ID NO: 13560 - protein, 17 aa, synthetic construct
  REGION 1..17: note = Description of Artificial Sequence: Synthetic peptide
WMTPNSGNTGYAQKFQG

SEQ ID NO: 13561 - DNA, 51 bp, synthetic construct; identical to SEQ ID NO: 12197
  misc_feature 1..51: note = Description of Artificial Sequence: Synthetic oligonucleotide
  source 1..51: mol_type = other DNA

SEQ ID NO: 13562 - protein, 17 aa, synthetic construct
  REGION 1..17: note = Description of Artificial Sequence: Synthetic peptide
WINPNSGGTNYAQKFQG

SEQ ID NO: 13563 - DNA, 51 bp, synthetic construct; identical to SEQ ID NO: 13377
  misc_feature 1..51: note = Description of Artificial Sequence: Synthetic oligonucleotide
  source 1..51: mol_type = other DNA

SEQ ID NO: 13564 - protein, 17 aa, synthetic construct
  REGION 1..17: note = Description of Artificial Sequence: Synthetic peptide
AISGSGGNTFYADSVKG

SEQ ID NO: 13565 - DNA, 51 bp, synthetic construct; identical to SEQ ID NO: 12123
  misc_feature 1..51: note = Description of Artificial Sequence: Synthetic oligonucleotide
  source 1..51: mol_type = other DNA

SEQ ID NO: 13566 - protein, 17 aa, synthetic construct
  REGION 1..17: note = Description of Artificial Sequence: Synthetic peptide
VIWYDGSNKYYADSVKG

SEQ ID NO: 13567 - DNA, 48 bp, synthetic construct; identical to SEQ ID NO: 12481
  misc_feature 1..48: note = Description of Artificial Sequence: Synthetic oligonucleotide
  source 1..48: mol_type = other DNA

SEQ ID NO: 13568 - protein, 16 aa, synthetic construct
  REGION 1..16: note = Description of Artificial Sequence: Synthetic peptide
NIYYSGSTYYNPSLKS

SEQ ID NO: 13569 - DNA, 51 bp, synthetic construct
  misc_feature 1..51: note = Description of Artificial Sequence: Synthetic oligonucleotide
  source 1..51: mol_type = other DNA
tggatcaacccgaacagtggtggcacaaactatgtacagaaatttcagggc

SEQ ID NO: 13570 - protein, 17 aa, synthetic construct
  REGION 1..17: note = Description of Artificial Sequence: Synthetic peptide
WINPNSGGTNYVQKFQG

SEQ ID NO: 13571 - DNA, 51 bp, synthetic construct
  misc_feature 1..51: note = Description of Artificial Sequence: Synthetic oligonucleotide
  source 1..51: mol_type = other DNA
tacattagtagtagtagtgggaccatatactacgcagactctgtgaagggc

SEQ ID NO: 13572 - protein, 17 aa, synthetic construct
  REGION 1..17: note = Description of Artificial Sequence: Synthetic peptide
YISSSSGTIYYADSVKG

SEQ ID NO: 13573 - DNA, 51 bp, synthetic construct; identical to SEQ ID NO: 13051
  misc_feature 1..51: note = Description of Artificial Sequence: Synthetic oligonucleotide
  source 1..51: mol_type = other DNA

SEQ ID NO: 13574 - protein, 17 aa, synthetic construct
  REGION 1..17: note = Description of Artificial Sequence: Synthetic peptide
WINPNSGGTNYVQKFQG

SEQ ID NO: 13575 - DNA, 51 bp, synthetic construct; identical to SEQ ID NO: 12103
  misc_feature 1..51: note = Description of Artificial Sequence: Synthetic oligonucleotide
  source 1..51: mol_type = other DNA

SEQ ID NO: 13576 - protein, 17 aa, synthetic construct
  REGION 1..17: note = Description of Artificial Sequence: Synthetic peptide
WMNPNSGNTGYAQKFQG

SEQ ID NO: 13577 - DNA, 51 bp, synthetic construct
  misc_feature 1..51: note = Description of Artificial Sequence: Synthetic oligonucleotide
  source 1..51: mol_type = other DNA
gttatatggcatgatggaagtgataaatattatgtagactccgtgaagggc

SEQ ID NO: 13578 - protein, 17 aa, synthetic construct
  REGION 1..17: note = Description of Artificial Sequence: Synthetic peptide
VIWHDGSDKYYVDSVKG

SEQ ID NO: 13579 - DNA, 51 bp, synthetic construct; identical to SEQ ID NO: 12123
  misc_feature 1..51: note = Description of Artificial Sequence: Synthetic oligonucleotide
  source 1..51: mol_type = other DNA

SEQ ID NO: 13580 - protein, 17 aa, synthetic construct
  REGION 1..17: note = Description of Artificial Sequence: Synthetic peptide
VIWYDGSNKYYADSVKG

SEQ ID NO: 13581 - DNA, 51 bp, synthetic construct
  misc_feature 1..51: note = Description of Artificial Sequence: Synthetic oligonucleotide
  source 1..51: mol_type = other DNA
tccattagtggtagtagcacttacatgaactacacagactcagtgaagggc

SEQ ID NO: 13582 - protein, 17 aa, synthetic construct
  REGION 1..17: note = Description of Artificial Sequence: Synthetic peptide
SISGSSTYMNYTDSVKG

SEQ ID NO: 13583 - DNA, 51 bp, synthetic construct
  misc_feature 1..51: note = Description of Artificial Sequence: Synthetic oligonucleotide
  source 1..51: mol_type = other DNA
tggatcaaccctaacagtggtggcacaaactttgcacagaagtttcagggc

SEQ ID NO: 13584 - protein, 17 aa, synthetic construct
  REGION 1..17: note = Description of Artificial Sequence: Synthetic peptide
WINPNSGGTNFAQKFQG

SEQ ID NO: 13585 - DNA, 51 bp, synthetic construct
  misc_feature 1..51: note = Description of Artificial Sequence: Synthetic oligonucleotide
  source 1..51: mol_type = other DNA
gtcatatggtatgatggaagtaataaatactatgcagactccgtgaagggc

SEQ ID NO: 13586 - protein, 17 aa, synthetic construct
  REGION 1..17: note = Description of Artificial Sequence: Synthetic peptide
VIWYDGSNKYYADSVKG

SEQ ID NO: 13587 - DNA, 51 bp, synthetic construct
  misc_feature 1..51: note = Description of Artificial Sequence: Synthetic oligonucleotide
  source 1..51: mol_type = other DNA
gttatatggtttgatgaaactaataaatactatggagactccgtgaagggc

SEQ ID NO: 13588 - protein, 17 aa, synthetic construct
  REGION 1..17: note = Description of Artificial Sequence: Synthetic peptide
VIWFDETNKYYGDSVKG

SEQ ID NO: 13589 - DNA, 51 bp, synthetic construct; identical to SEQ ID NO: 13585
  misc_feature 1..51: note = Description of Artificial Sequence: Synthetic oligonucleotide
  source 1..51: mol_type = other DNA

SEQ ID NO: 13590 - protein, 17 aa, synthetic construct
  REGION 1..17: note = Description of Artificial Sequence: Synthetic peptide
VIWYDGSNKYYADSVKG

SEQ ID NO: 13591 - DNA, 48 bp, synthetic construct
  misc_feature 1..48: note = Description of Artificial Sequence: Synthetic oligonucleotide
  source 1..48: mol_type = other DNA
cgtatctataccagtgggatctccaactacaatccctccctcaagagt

SEQ ID NO: 13592 - protein, 16 aa, synthetic construct
  REGION 1..16: note = Description of Artificial Sequence: Synthetic peptide
RIYTSGISNYNPSLKS

SEQ ID NO: 13593 - DNA, 51 bp, synthetic construct
  misc_feature 1..51: note = Description of Artificial Sequence: Synthetic oligonucleotide
  source 1..51: mol_type = other DNA
gttatatggtatgatggaagtaataaatactatgcagactccatgaagggc

SEQ ID NO: 13594 - protein, 17 aa, synthetic construct
  REGION 1..17: note = Description of Artificial Sequence: Synthetic peptide
VIWYDGSNKYYADSMKG

SEQ ID NO: 13595 - DNA, 51 bp, synthetic construct; identical to SEQ ID NO: 12127
  misc_feature 1..51: note = Description of Artificial Sequence: Synthetic oligonucleotide
  source 1..51: mol_type = other DNA

SEQ ID NO: 13596 - protein, 17 aa, synthetic construct
  REGION 1..17: note = Description of Artificial Sequence: Synthetic peptide
IIWYDGSNKYYADSVKG

SEQ ID NO: 13597 - DNA, 51 bp, synthetic construct
  misc_feature 1..51: note = Description of Artificial Sequence: Synthetic oligonucleotide
  source 1..51: mol_type = other DNA
tggatcaaaccaaacagtggtggcacaaaccaagcacagaagtttcagggc

SEQ ID NO: 13598 - protein, 17 aa, synthetic construct
  REGION 1..17: note = Description of Artificial Sequence: Synthetic peptide
WIKPNSGGTNQAQKFQG

SEQ ID NO: 13599 - DNA, 51 bp, synthetic construct
  misc_feature 1..51: note = Description of Artificial Sequence: Synthetic oligonucleotide
  source 1..51: mol_type = other DNA
gttatatggtatgatgaaagtaataaatactatgtagactccgtgaagggc

SEQ ID NO: 13600 - protein, 17 aa, synthetic construct
  REGION 1..17: note = Description of Artificial Sequence: Synthetic peptide
VIWYDESNKYYVDSVKG

SEQ ID NO: 13601 - DNA, 48 bp, synthetic construct
  misc_feature 1..48: note = Description of Artificial Sequence: Synthetic oligonucleotide
  source 1..48: mol_type = other DNA
agtatctattacagtgggagcacctcctacaacccgtccctcaagagt

SEQ ID NO: 13602 - protein, 16 aa, synthetic construct
  REGION 1..16: note = Description of Artificial Sequence: Synthetic peptide
SIYYSGSTSYNPSLKS

SEQ ID NO: 13603 - DNA, 51 bp, synthetic construct; identical to SEQ ID NO: 12273
  misc_feature 1..51: note = Description of Artificial Sequence: Synthetic oligonucleotide
  source 1..51: mol_type = other DNA

SEQ ID NO: 13604 - protein, 17 aa, synthetic construct
  REGION 1..17: note = Description of Artificial Sequence: Synthetic peptide
VISGSGGSTYYADSVKG

SEQ ID NO: 13605 - DNA, 51 bp, synthetic construct
  misc_feature 1..51: note = Description of Artificial Sequence: Synthetic oligonucleotide
  source 1..51: mol_type = other DNA
gtgatatggtttgagggaagtaataaacactatacagactccgtgaagggc

SEQ ID NO: 13606 - protein, 17 aa, synthetic construct
  REGION 1..17: note = Description of Artificial Sequence: Synthetic peptide
VIWFEGSNKHYTDSVKG

SEQ ID NO: 13607 - DNA, 51 bp, synthetic construct; identical to SEQ ID NO: 12727
  misc_feature 1..51: note = Description of Artificial Sequence: Synthetic oligonucleotide
  source 1..51: mol_type = other DNA

SEQ ID NO: 13608 - protein, 17 aa, synthetic construct
  REGION 1..17: note = Description of Artificial Sequence: Synthetic peptide
WINPNSGGTNSAQKFQG

SEQ ID NO: 13609 - DNA, 51 bp, synthetic construct
  misc_feature 1..51: note = Description of Artificial Sequence: Synthetic oligonucleotide
  source 1..51: mol_type = other DNA
tggatcagcgcttacagtggtaacacaaactatgcacagaagctccagggc

SEQ ID NO: 13610 - protein, 17 aa, synthetic construct
  REGION 1..17: note = Description of Artificial Sequence: Synthetic peptide
WISAYSGNTNYAQKLQG

SEQ ID NO: 13611 - DNA, 51 bp, synthetic construct
  misc_feature 1..51: note = Description of Artificial Sequence: Synthetic oligonucleotide
  source 1..51: mol_type = other DNA
gttatatggtatgatggaagtaataaatactatggagactccgtgaagggc

SEQ ID NO: 13612 - protein, 17 aa, synthetic construct
  REGION 1..17: note = Description of Artificial Sequence: Synthetic peptide
VIWYDGSNKYYGDSVKG

SEQ ID NO: 13613 - DNA, 51 bp, synthetic construct
  misc_feature 1..51: note = Description of Artificial Sequence: Synthetic oligonucleotide
  source 1..51: mol_type = other DNA
tccattagtagtagtaatagttccatatactacgcagactcagtgaagggc

SEQ ID NO: 13614 - protein, 17 aa, synthetic construct
  REGION 1..17: note = Description of Artificial Sequence: Synthetic peptide
SISSSNSSIYYADSVKG

SEQ ID NO: 13615 - DNA, 51 bp, synthetic construct
  misc_feature 1..51: note = Description of Artificial Sequence: Synthetic oligonucleotide
  source 1..51: mol_type = other DNA
tggatcaaccctaacagtggtggcacaaacaatgcacagaagtttcagggc

SEQ ID NO: 13616 - protein, 17 aa, synthetic construct
  REGION 1..17: note = Description of Artificial Sequence: Synthetic peptide
WINPNSGGTNNAQKFQG

SEQ ID NO: 13617 - DNA, 51 bp, synthetic construct
  misc_feature 1..51: note = Description of Artificial Sequence: Synthetic oligonucleotide
  source 1..51: mol_type = other DNA
tggatcaaaccaaacagtggtggcacaaaccaagcacagaagttccagggc

SEQ ID NO: 13618 - protein, 17 aa, synthetic construct
  REGION 1..17: note = Description of Artificial Sequence: Synthetic peptide
WIKPNSGGTNQAQKFQG

SEQ ID NO: 13619 - DNA, 51 bp, synthetic construct
  misc_feature 1..51: note = Description of Artificial Sequence: Synthetic oligonucleotide
  source 1..51: mol_type = other DNA
gttatatggtttgagggaagtcataaatactatacagactccgtgaagggc

SEQ ID NO: 13620 - protein, 17 aa, synthetic construct
  REGION 1..17: note = Description of Artificial Sequence: Synthetic peptide
VIWFEGSHKYYTDSVKG

SEQ ID NO: 13621 - DNA, 51 bp, synthetic construct
  misc_feature 1..51: note = Description of Artificial Sequence: Synthetic oligonucleotide
  source 1..51: mol_type = other DNA
gttatatggcatgatggaagtgataaatactatgcagactccgtgaagggc

SEQ ID NO: 13622 - protein, 17 aa, synthetic construct
  REGION 1..17: note = Description of Artificial Sequence: Synthetic peptide
VIWHDGSDKYYADSVKG

SEQ ID NO: 13623 - DNA, 51 bp, synthetic construct; identical to SEQ ID NO: 13399
  misc_feature 1..51: note = Description of Artificial Sequence: Synthetic oligonucleotide
  source 1..51: mol_type = other DNA

SEQ ID NO: 13624 - protein, 17 aa, synthetic construct
  REGION 1..17: note = Description of Artificial Sequence: Synthetic peptide
SISGTSSYIYYADSVKG

SEQ ID NO: 13625 - DNA, 51 bp, synthetic construct
  misc_feature 1..51: note = Description of Artificial Sequence: Synthetic oligonucleotide
  source 1..51: mol_type = other DNA
ggtattagtggtagtggtgctagaacatactacgcagactccgtgaagggc

SEQ ID NO: 13626 - protein, 17 aa, synthetic construct
  REGION 1..17: note = Description of Artificial Sequence: Synthetic peptide
GISGSGARTYYADSVKG

SEQ ID NO: 13627 - DNA, 51 bp, synthetic construct; identical to SEQ ID NO: 12123
  misc_feature 1..51: note = Description of Artificial Sequence: Synthetic oligonucleotide
  source 1..51: mol_type = other DNA

SEQ ID NO: 13628 - protein, 17 aa, synthetic construct
  REGION 1..17: note = Description of Artificial Sequence: Synthetic peptide
VIWYDGSNKYYADSVKG

SEQ ID NO: 13629 - DNA, 51 bp, synthetic construct
  misc_feature 1..51: note = Description of Artificial Sequence: Synthetic oligonucleotide
  source 1..51: mol_type = other DNA
tggatcaaccctaacaatggtggcacacactatgcacagaagtttcaggac

SEQ ID NO: 13630 - protein, 17 aa, synthetic construct
  REGION 1..17: note = Description of Artificial Sequence: Synthetic peptide
WINPNNGGTHYAQKFQD

SEQ ID NO: 13631 - DNA, 51 bp, synthetic construct
  misc_feature 1..51: note = Description of Artificial Sequence: Synthetic oligonucleotide
  source 1..51: mol_type = other DNA
gctatatggtatgatggaagtaataaatattatggagactccgtgaagggc

SEQ ID NO: 13632 - protein, 17 aa, synthetic construct
  REGION 1..17: note = Description of Artificial Sequence: Synthetic peptide
AIWYDGSNKYYGDSVKG

SEQ ID NO: 13633 - DNA, 51 bp, synthetic construct; identical to SEQ ID NO: 13597
  misc_feature 1..51: note = Description of Artificial Sequence: Synthetic oligonucleotide
  source 1..51: mol_type = other DNA

SEQ ID NO: 13634 - protein, 17 aa, synthetic construct
  REGION 1..17: note = Description of Artificial Sequence: Synthetic peptide
WIKPNSGGTNQAQKFQG

SEQ ID NO: 13635 - DNA, 51 bp, synthetic construct
  misc_feature 1..51: note = Description of Artificial Sequence: Synthetic oligonucleotide
  source 1..51: mol_type = other DNA
gttatattatatgatggaagtaagaaatactatgcagactccgtgaagggc

SEQ ID NO: 13636 - protein, 17 aa, synthetic construct
  REGION 1..17: note = Description of Artificial Sequence: Synthetic peptide
VILYDGSKKYYADSVKG

SEQ ID NO: 13637 - DNA, 51 bp, synthetic construct
  misc_feature 1..51: note = Description of Artificial Sequence: Synthetic oligonucleotide
  source 1..51: mol_type = other DNA
tacattagtagaagtagtagtcacatatactacgcagactcagtgaagggc

SEQ ID NO: 13638 - protein, 17 aa, synthetic construct
  REGION 1..17: note = Description of Artificial Sequence: Synthetic peptide
YISRSSSHIYYADSVKG

SEQ ID NO: 13639 - DNA, 51 bp, synthetic construct
  misc_feature 1..51: note = Description of Artificial Sequence: Synthetic oligonucleotide
  source 1..51: mol_type = other DNA
tccattagtggtagtagtagttacatatattacgcagactcagtgatgggc

SEQ ID NO: 13640 - protein, 17 aa, synthetic construct
  REGION 1..17: note = Description of Artificial Sequence: Synthetic peptide
SISGSSSYIYYADSVMG

SEQ ID NO: 13641 - DNA, 51 bp, synthetic construct; identical to SEQ ID NO: 12617
  misc_feature 1..51: note = Description of Artificial Sequence: Synthetic oligonucleotide
  source 1..51: mol_type = other DNA

SEQ ID NO: 13642 - protein, 17 aa, synthetic construct
  REGION 1..17: note = Description of Artificial Sequence: Synthetic peptide
VIWYDVSNKYYADSVKG

SEQ ID NO: 13643 - DNA, 48 bp, synthetic construct
  misc_feature 1..48: note = Description of Artificial Sequence: Synthetic oligonucleotide
  source 1..48: mol_type = other DNA
aatatctattatagtgggagcacctattacatcccgtccctcaagagt

SEQ ID NO: 13644 - protein, 16 aa, synthetic construct
  REGION 1..16: note = Description of Artificial Sequence: Synthetic peptide
NIYYSGSTYYIPSLKS

SEQ ID NO: 13645 - DNA, 51 bp, synthetic construct
  misc_feature 1..51: note = Description of Artificial Sequence: Synthetic oligonucleotide
  source 1..51: mol_type = other DNA
gttatatggtatgatggaagtgataaatactatgcagactccgtgaagggc

SEQ ID NO: 13646 - protein, 17 aa, synthetic construct
  REGION 1..17: note = Description of Artificial Sequence: Synthetic peptide
VIWYDGSDKYYADSVKG

SEQ ID NO: 13647 - DNA, 51 bp, synthetic construct
  misc_feature 1..51: note = Description of Artificial Sequence: Synthetic oligonucleotide
  source 1..51: mol_type = other DNA
tggatcaaccctaacagtaatgccacaaactatgcacagaagtttcagggc

SEQ ID NO: 13648 - protein, 17 aa, synthetic construct
  REGION 1..17: note = Description of Artificial Sequence: Synthetic peptide
WINPNSNATNYAQKFQG

SEQ ID NO: 13649 - DNA, 51 bp, synthetic construct; identical to SEQ ID NO: 12123
  misc_feature 1..51: note = Description of Artificial Sequence: Synthetic oligonucleotide
  source 1..51: mol_type = other DNA

SEQ ID NO: 13650 - protein, 17 aa, synthetic construct
  REGION 1..17: note = Description of Artificial Sequence: Synthetic peptide
VIWYDGSNKYYADSVKG

SEQ ID NO: 13651 - DNA, 51 bp, synthetic construct
  misc_feature 1..51: note = Description of Artificial Sequence: Synthetic oligonucleotide
  source 1..51: mol_type = other DNA
tggatcaaccctaagagtggtggcacaaactctgcacagaagtttcagggc

SEQ ID NO: 13652 - protein, 17 aa, synthetic construct
  REGION 1..17: note = Description of Artificial Sequence: Synthetic peptide
WINPKSGGTNSAQKFQG

SEQ ID NO: 13653 - DNA, 51 bp, synthetic construct; identical to SEQ ID NO: 12263
  misc_feature 1..51: note = Description of Artificial Sequence: Synthetic oligonucleotide
  source 1..51: mol_type = other DNA

SEQ ID NO: 13654 - protein, 17 aa, synthetic construct
  REGION 1..17: note = Description of Artificial Sequence: Synthetic peptide
VIWHDGSNKYYADSVKG

SEQ ID NO: 13655 - DNA, 51 bp, synthetic construct; identical to SEQ ID NO: 12161
  misc_feature 1..51: note = Description of Artificial Sequence: Synthetic oligonucleotide
  source 1..51: mol_type = other DNA

SEQ ID NO: 13656 - protein, 17 aa, synthetic construct
  REGION 1..17: note = Description of Artificial Sequence: Synthetic peptide
WMHPNSGNTGYAQKFQG

SEQ ID NO: 13657 - DNA, 51 bp, synthetic construct; identical to SEQ ID NO: 13483
  misc_feature 1..51: note = Description of Artificial Sequence: Synthetic oligonucleotide
  source 1..51: mol_type = other DNA

SEQ ID NO: 13658 - protein, 17 aa, synthetic construct
  REGION 1..17: note = Description of Artificial Sequence: Synthetic peptide
IIWYDESNKYYADSVKG

SEQ ID NO: 13659 - DNA, 51 bp, synthetic construct
  misc_feature 1..51: note = Description of Artificial Sequence: Synthetic oligonucleotide
  source 1..51: mol_type = other DNA
tggatcaaacctaacagtggtggcacaaaccaagcacagaagtttcagggc

SEQ ID NO: 13660 - protein, 17 aa, synthetic construct
  REGION 1..17: note = Description of Artificial Sequence: Synthetic peptide
WIKPNSGGTNQAQKFQG

SEQ ID NO: 13661 - DNA, 51 bp, synthetic construct; identical to SEQ ID NO: 13597
  misc_feature 1..51: note = Description of Artificial Sequence: Synthetic oligonucleotide
  source 1..51: mol_type = other DNA

SEQ ID NO: 13662 - protein, 17 aa, synthetic construct
  REGION 1..17: note = Description of Artificial Sequence: Synthetic peptide
WIKPNSGGTNQAQKFQG

SEQ ID NO: 13663 - DNA, 51 bp, synthetic construct
  misc_feature 1..51: note = Description of Artificial Sequence: Synthetic oligonucleotide
  source 1..51: mol_type = other DNA
tccattagtggtaatagtacttacatatactacacagactcagtgaagggc

SEQ ID NO: 13664 - protein, 17 aa, synthetic construct
  REGION 1..17: note = Description of Artificial Sequence: Synthetic peptide
SISGNSTYIYYTDSVKG

SEQ ID NO: 13665 - DNA, 51 bp, synthetic construct
  misc_feature 1..51: note = Description of Artificial Sequence: Synthetic oligonucleotide
  source 1..51: mol_type = other DNA
gtgatatggtatgatgaaagtaataaatactatgcagactccgtgaagggc

SEQ ID NO: 13666 - protein, 17 aa, synthetic construct
  REGION 1..17: note = Description of Artificial Sequence: Synthetic peptide
VIWYDESNKYYADSVKG

SEQ ID NO: 13667 - DNA, 51 bp, synthetic construct; identical to SEQ ID NO: 13491
  misc_feature 1..51: note = Description of Artificial Sequence: Synthetic oligonucleotide
  source 1..51: mol_type = other DNA

SEQ ID NO: 13668 - protein, 17 aa, synthetic construct
  REGION 1..17: note = Description of Artificial Sequence: Synthetic peptide
WMHPNSGSTGYAQKFQG

SEQ ID NO: 13669 - DNA, 51 bp, synthetic construct
  misc_feature 1..51: note = Description of Artificial Sequence: Synthetic oligonucleotide
  source 1..51: mol_type = other DNA
gttatttggtatgatagaacaaataaatactatgcagactccgtgaagggc

SEQ ID NO: 13670 - protein, 17 aa, synthetic construct
  REGION 1..17: note = Description of Artificial Sequence: Synthetic peptide
VIWYDRTNKYYADSVKG

SEQ ID NO: 13671 - DNA, 51 bp, synthetic construct; identical to SEQ ID NO: 13399
  misc_feature 1..51: note = Description of Artificial Sequence: Synthetic oligonucleotide
  source 1..51: mol_type = other DNA

SEQ ID NO: 13672 - protein, 17 aa, synthetic construct
  REGION 1..17: note = Description of Artificial Sequence: Synthetic peptide
SISGTSSYIYYADSVKG

SEQ ID NO: 13673 - DNA, 51 bp, synthetic construct; identical to SEQ ID NO: 12727
  misc_feature 1..51: note = Description of Artificial Sequence: Synthetic oligonucleotide
  source 1..51: mol_type = other DNA

SEQ ID NO: 13674 - protein, 17 aa, synthetic construct
  REGION 1..17: note = Description of Artificial Sequence: Synthetic peptide
WINPNSGGTNSAQKFQG

SEQ ID NO: 13675 - DNA, 51 bp, synthetic construct
  misc_feature 1..51: note = Description of Artificial Sequence: Synthetic oligonucleotide
  source 1..51: mol_type = other DNA
gttatatggtatgatagaaataataaatactatggagactccgtgaagggc

SEQ ID NO: 13676 - protein, 17 aa, synthetic construct
  REGION 1..17: note = Description of Artificial Sequence: Synthetic peptide
VIWYDRNNKYYGDSVKG

SEQ ID NO: 13677 - DNA, 51 bp, synthetic construct
  misc_feature 1..51: note = Description of Artificial Sequence: Synthetic oligonucleotide
  source 1..51: mol_type = other DNA
actattagtggtagtggtggttacacatactccgcagactccgtgaagggc

SEQ ID NO: 13678 - protein, 17 aa, synthetic construct
  REGION 1..17: note = Description of Artificial Sequence: Synthetic peptide
TISGSGGYTYSADSVKG

SEQ ID NO: 13679 - DNA, 51 bp, synthetic construct
  misc_feature 1..51: note = Description of Artificial Sequence: Synthetic oligonucleotide
  source 1..51: mol_type = other DNA
gttatatggtttgatgaaagtaataaatactatgcagactccgtgaagggc

SEQ ID NO: 13680 - protein, 17 aa, synthetic construct
  REGION 1..17: note = Description of Artificial Sequence: Synthetic peptide
VIWFDESNKYYADSVKG

SEQ ID NO: 13681 - DNA, 51 bp, synthetic construct
  misc_feature 1..51: note = Description of Artificial Sequence: Synthetic oligonucleotide
  source 1..51: mol_type = other DNA
tggatcaaccctaaaagtggtggcacaaattatgtacagaagtttcagggc

SEQ ID NO: 13682 - protein, 17 aa, synthetic construct
  REGION 1..17: note = Description of Artificial Sequence: Synthetic peptide
WINPKSGGTNYVQKFQG

SEQ ID NO: 13683 - DNA, 51 bp, synthetic construct
  misc_feature 1..51: note = Description of Artificial Sequence: Synthetic oligonucleotide
  source 1..51: mol_type = other DNA
tggatcaaccctaaaagtggtggcacgaatcatgtccagaagtttcagggc

SEQ ID NO: 13684 - protein, 17 aa, synthetic construct
  REGION 1..17: note = Description of Artificial Sequence: Synthetic peptide
WINPKSGGTNHVQKFQG

SEQ ID NO: 13685 - DNA, 51 bp, synthetic construct
  misc_feature 1..51: note = Description of Artificial Sequence: Synthetic oligonucleotide
  source 1..51: mol_type = other DNA
gttatattatatgatggaagtaagaaatactatgcagcctccgtgaagggc

SEQ ID NO: 13686 - protein, 17 aa, synthetic construct
  REGION 1..17: note = Description of Artificial Sequence: Synthetic peptide
VILYDGSKKYYAASVKG

SEQ ID NO: 13687 - DNA, 51 bp, synthetic construct
  misc_feature 1..51: note = Description of Artificial Sequence: Synthetic oligonucleotide
  source 1..51: mol_type = other DNA
gacattagtcgtagtggtggtaccacattctacgcagactccgtgaagggc

SEQ ID NO: 13688 - protein, 17 aa, synthetic construct
  REGION 1..17: note = Description of Artificial Sequence: Synthetic peptide
DISRSGGTTFYADSVKG

SEQ ID NO: 13689 - DNA, 51 bp, synthetic construct; identical to SEQ ID NO: 12123
  misc_feature 1..51: note = Description of Artificial Sequence: Synthetic oligonucleotide
  source 1..51: mol_type = other DNA

SEQ ID NO: 13690 - protein, 17 aa, synthetic construct
  REGION 1..17: note = Description of Artificial Sequence: Synthetic peptide
VIWYDGSNKYYADSVKG

SEQ ID NO: 13691 - DNA, 48 bp, synthetic construct
  misc_feature 1..48: note = Description of Artificial Sequence: Synthetic oligonucleotide
  source 1..48: mol_type = other DNA
gaaatcaatcttagtggaagtaccaactacaacccgtccctcaagagt

SEQ ID NO: 13692 - protein, 16 aa, synthetic construct
  REGION 1..16: note = Description of Artificial Sequence: Synthetic peptide
EINLSGSTNYNPSLKS

SEQ ID NO: 13693 - DNA, 48 bp, synthetic construct
  misc_feature 1..48: note = Description of Artificial Sequence: Synthetic oligonucleotide
  source 1..48: mol_type = other DNA
gaaatcaatcatagtggaagaaccaactacaacccgtccctcaagagt

SEQ ID NO: 13694 - protein, 16 aa, synthetic construct
  REGION 1..16: note = Description of Artificial Sequence: Synthetic peptide
EINHSGRTNYNPSLKS

SEQ ID NO: 13695 - DNA, 51 bp, synthetic construct
  misc_feature 1..51: note = Description of Artificial Sequence: Synthetic oligonucleotide
  source 1..51: mol_type = other DNA
tggatgaaccctaacagtggtaacacaggctgtgcacagaagttccagggc

SEQ ID NO: 13696 - protein, 17 aa, synthetic construct
  REGION 1..17: note = Description of Artificial Sequence: Synthetic peptide
WMNPNSGNTGCAQKFQG

SEQ ID NO: 13697 - DNA, 51 bp, synthetic construct; identical to SEQ ID NO: 12159
  misc_feature 1..51: note = Description of Artificial Sequence: Synthetic oligonucleotide
  source 1..51: mol_type = other DNA

SEQ ID NO: 13698 - protein, 17 aa, synthetic construct
  REGION 1..17: note = Description of Artificial Sequence: Synthetic peptide
WMHPNSGNTGYAQKFRG

SEQ ID NO: 13699 - DNA, 51 bp, synthetic construct; identical to SEQ ID NO: 12161
  misc_feature 1..51: note = Description of Artificial Sequence: Synthetic oligonucleotide
  source 1..51: mol_type = other DNA

SEQ ID NO: 13700 - protein, 17 aa, synthetic construct
  REGION 1..17: note = Description of Artificial Sequence: Synthetic peptide
WMHPNSGNTGYAQKFQG

SEQ ID NO: 13701 - DNA, 51 bp, synthetic construct
  misc_feature 1..51: note = Description of Artificial Sequence: Synthetic oligonucleotide
  source 1..51: mol_type = other DNA
tggatgcaccctaacagtggtaacacaggctttgcacagaagttccagggc

SEQ ID NO: 13702 - protein, 17 aa, synthetic construct
  REGION 1..17: note = Description of Artificial Sequence: Synthetic peptide
WMHPNSGNTGFAQKFQG

SEQ ID NO: 13703 - DNA, 51 bp, synthetic construct; identical to SEQ ID NO: 12103
  misc_feature 1..51: note = Description of Artificial Sequence: Synthetic oligonucleotide
  source 1..51: mol_type = other DNA

SEQ ID NO: 13704 - protein, 17 aa, synthetic construct
  REGION 1..17: note = Description of Artificial Sequence: Synthetic peptide
WMNPNSGNTGYAQKFQG

SEQ ID NO: 13705 - DNA, 51 bp, synthetic construct
  misc_feature 1..51: note = Description of Artificial Sequence: Synthetic oligonucleotide
  source 1..51: mol_type = other DNA
gttatttggtatgatggaagtaataaatactatgcagactccgtgaagggc

SEQ ID NO: 13706 - protein, 17 aa, synthetic construct
  REGION 1..17: note = Description of Artificial Sequence: Synthetic peptide
VIWYDGSNKYYADSVKG

SEQ ID NO: 13707 - DNA, 51 bp, synthetic construct; identical to SEQ ID NO: 12103
  misc_feature 1..51: note = Description of Artificial Sequence: Synthetic oligonucleotide
  source 1..51: mol_type = other DNA

SEQ ID NO: 13708 - protein, 17 aa, synthetic construct
  REGION 1..17: note = Description of Artificial Sequence: Synthetic peptide
WMNPNSGNTGYAQKFQG

SEQ ID NO: 13709 - DNA, 48 bp, synthetic construct
  misc_feature 1..48: note = Description of Artificial Sequence: Synthetic oligonucleotide
  source 1..48: mol_type = other DNA
agtatctattatagtggatacacctcctacaacccgtccctcaagagt

SEQ ID NO: 13710 - protein, 16 aa, synthetic construct
  REGION 1..16: note = Description of Artificial Sequence: Synthetic peptide
SIYYSGYTSYNPSLKS

SEQ ID NO: 13711 - DNA, 51 bp, synthetic construct; identical to SEQ ID NO: 12103
  misc_feature 1..51: note = Description of Artificial Sequence: Synthetic oligonucleotide
  source 1..51: mol_type = other DNA

SEQ ID NO: 13712 - protein, 17 aa, synthetic construct
  REGION 1..17: note = Description of Artificial Sequence: Synthetic peptide
WMNPNSGNTGYAQKFQG

SEQ ID NO: 13713 - DNA, 48 bp, synthetic construct
  misc_feature 1..48: note = Description of Artificial Sequence: Synthetic oligonucleotide
  source 1..48: mol_type = other DNA
gaaatcaatcatagtggaagcaccaactacaacccgtccctcacgagt

SEQ ID NO: 13714 - protein, 16 aa, synthetic construct
  REGION 1..16: note = Description of Artificial Sequence: Synthetic peptide
EINHSGSTNYNPSLTS

SEQ ID NO: 13715 - DNA, 48 bp, synthetic construct
  misc_feature 1..48: note = Description of Artificial Sequence: Synthetic oligonucleotide
  source 1..48: mol_type = other DNA
gaaatcaatcatagtggaagcaccaactacaacccgtccctcaagagt

SEQ ID NO: 13716 - protein, 16 aa, synthetic construct
  REGION 1..16: note = Description of Artificial Sequence: Synthetic peptide
EINHSGSTNYNPSLKS

SEQ ID NO: 13717 - DNA, 48 bp, synthetic construct; identical to SEQ ID NO: 13715
  misc_feature 1..48: note = Description of Artificial Sequence: Synthetic oligonucleotide
  source 1..48: mol_type = other DNA

SEQ ID NO: 13718 - protein, 16 aa, synthetic construct
  REGION 1..16: note = Description of Artificial Sequence: Synthetic peptide
EINHSGSTNYNPSLKS

SEQ ID NO: 13719 - DNA, 48 bp, synthetic construct
  misc_feature 1..48: note = Description of Artificial Sequence: Synthetic oligonucleotide
  source 1..48: mol_type = other DNA
ggtatctattatagtgggagcacctcctacaacccgtccctcaagagt

SEQ ID NO: 13720 - protein, 16 aa, synthetic construct
  REGION 1..16: note = Description of Artificial Sequence: Synthetic peptide
GIYYSGSTSYNPSLKS

SEQ ID NO: 13721 - DNA, 48 bp, synthetic construct
  misc_feature 1..48: note = Description of Artificial Sequence: Synthetic oligonucleotide
  source 1..48: mol_type = other DNA
gaaatcaatcatagtggatgcaccaacttcaacccgtccctcaagagt

SEQ ID NO: 13722 - protein, 16 aa, synthetic construct
  REGION 1..16: note = Description of Artificial Sequence: Synthetic peptide
EINHSGCTNFNPSLKS

SEQ ID NO: 13723 - DNA, 51 bp, synthetic construct; identical to SEQ ID NO: 12103
  misc_feature 1..51: note = Description of Artificial Sequence: Synthetic oligonucleotide
  source 1..51: mol_type = other DNA

SEQ ID NO: 13724 - protein, 17 aa, synthetic construct
  REGION 1..17: note = Description of Artificial Sequence: Synthetic peptide
WMNPNSGNTGYAQKFQG

SEQ ID NO: 13725 - DNA, 51 bp, synthetic construct; identical to SEQ ID NO: 12161
  misc_feature 1..51: note = Description of Artificial Sequence: Synthetic oligonucleotide
  source 1..51: mol_type = other DNA

SEQ ID NO: 13726 - protein, 17 aa, synthetic construct
  REGION 1..17: note = Description of Artificial Sequence: Synthetic peptide
WMHPNSGNTGYAQKFQG

SEQ ID NO: 13727 - DNA, 51 bp, synthetic construct
  misc_feature 1..51: note = Description of Artificial Sequence: Synthetic oligonucleotide
  source 1..51: mol_type = other DNA
tggatgcaccctaacaatggtaacacaggctatgcacagaagttccagggc

SEQ ID NO: 13728 - protein, 17 aa, synthetic construct
  REGION 1..17: note = Description of Artificial Sequence: Synthetic peptide
WMHPNNGNTGYAQKFQG

SEQ ID NO: 13729 - DNA, 51 bp, synthetic construct; identical to SEQ ID NO: 12161
  misc_feature 1..51: note = Description of Artificial Sequence: Synthetic oligonucleotide
  source 1..51: mol_type = other DNA

SEQ ID NO: 13730 - protein, 17 aa, synthetic construct
  REGION 1..17: note = Description of Artificial Sequence: Synthetic peptide
WMHPNSGNTGYAQKFQG

SEQ ID NO: 13731 - DNA, 48 bp, synthetic construct
  misc_feature 1..48: note = Description of Artificial Sequence: Synthetic oligonucleotide
  source 1..48: mol_type = other DNA
gaaatcaatcatagtggaaggaccaactacaacccgtccctcaagagt

SEQ ID NO: 13732 - protein, 16 aa, synthetic construct
  REGION 1..16: note = Description of Artificial Sequence: Synthetic peptide
EINHSGRTNYNPSLKS

SEQ ID NO: 13733 - DNA, 48 bp, synthetic construct
  misc_feature 1..48: note = Description of Artificial Sequence: Synthetic oligonucleotide
  source 1..48: mol_type = other DNA
gaaatcaatcttagtggaagcaccaactacaacccgtccctcaagagt

SEQ ID NO: 13734 - protein, 16 aa, synthetic construct
  REGION 1..16: note = Description of Artificial Sequence: Synthetic peptide
EINLSGSTNYNPSLKS

SEQ ID NO: 13735 - DNA, 48 bp, synthetic construct
  misc_feature 1..48: note = Description of Artificial Sequence: Synthetic oligonucleotide
  source 1..48: mol_type = other DNA
gaaatcaattatagtggaagaaccaactacaacccgtccctcaagagt

SEQ ID NO: 13736 - protein, 16 aa, synthetic construct
  REGION 1..16: note = Description of Artificial Sequence: Synthetic peptide
EINYSGRTNYNPSLKS

SEQ ID NO: 13737 - DNA, 51 bp, synthetic construct; identical to SEQ ID NO: 12103
  misc_feature 1..51: note = Description of Artificial Sequence: Synthetic oligonucleotide
  source 1..51: mol_type = other DNA

SEQ ID NO: 13738 - protein, 17 aa, synthetic construct
  REGION 1..17: note = Description of Artificial Sequence: Synthetic peptide
WMNPNSGNTGYAQKFQG

SEQ ID NO: 13739 - DNA, 51 bp, synthetic construct; identical to SEQ ID NO: 12161
  misc_feature 1..51: note = Description of Artificial Sequence: Synthetic oligonucleotide
  source 1..51: mol_type = other DNA

SEQ ID NO: 13740 - protein, 17 aa, synthetic construct
  REGION 1..17: note = Description of Artificial Sequence: Synthetic peptide
WMHPNSGNTGYAQKFQG

SEQ ID NO: 13741 - DNA, 57 bp, synthetic construct
  misc_feature 1..57: note = Description of Artificial Sequence: Synthetic oligonucleotide
  source 1..57: mol_type = other DNA
cgtattaaaaacaaagctgatggtgggacaacagacttcgctgcacccgtgaaaggc

SEQ ID NO: 13742 - protein, 19 aa, synthetic construct
  REGION 1..19: note = Description of Artificial Sequence: Synthetic peptide
RIKNKADGGTTDFAAPVKG

SEQ ID NO: 13743 - DNA, 48 bp, synthetic construct; identical to SEQ ID NO: 13715
  misc_feature 1..48: note = Description of Artificial Sequence: Synthetic oligonucleotide
  source 1..48: mol_type = other DNA

SEQ ID NO: 13744 - protein, 16 aa, synthetic construct
  REGION 1..16: note = Description of Artificial Sequence: Synthetic peptide
EINHSGSTNYNPSLKS

SEQ ID NO: 13745 - DNA, 51 bp, synthetic construct
  misc_feature 1..51: note = Description of Artificial Sequence: Synthetic oligonucleotide
  source 1..51: mol_type = other DNA
gttatatggtatgatggaagtaataaaaactatgcagactccgtgaagggc

SEQ ID NO: 13746 - protein, 17 aa, synthetic construct
  REGION 1..17: note = Description of Artificial Sequence: Synthetic peptide
VIWYDGSNKNYADSVKG

SEQ ID NO: 13747 - DNA, 51 bp, synthetic construct; identical to SEQ ID NO: 13705
  misc_feature 1..51: note = Description of Artificial Sequence: Synthetic oligonucleotide
  source 1..51: mol_type = other DNA

SEQ ID NO: 13748 - protein, 17 aa, synthetic construct
  REGION 1..17: note = Description of Artificial Sequence: Synthetic peptide
VIWYDGSNKYYADSVKG

SEQ ID NO: 13749 - DNA, 48 bp, synthetic construct
  misc_feature 1..48: note = Description of Artificial Sequence: Synthetic oligonucleotide
  source 1..48: mol_type = other DNA
gaaatcaatcatagtggagacaccaactacaacccgtccctcaagagt

SEQ ID NO: 13750 - protein, 16 aa, synthetic construct
  REGION 1..16: note = Description of Artificial Sequence: Synthetic peptide
EINHSGDTNYNPSLKS

SEQ ID NO: 13751 - DNA, 48 bp, synthetic construct
  misc_feature 1..48: note = Description of Artificial Sequence: Synthetic oligonucleotide
  source 1..48: mol_type = other DNA
gaaatcaatcatagtggaaggaccaacttcaacccgtccctcaagagt

SEQ ID NO: 13752 - protein, 16 aa, synthetic construct
  REGION 1..16: note = Description of Artificial Sequence: Synthetic peptide
EINHSGRTNFNPSLKS

SEQ ID NO: 13753 - DNA, 51 bp, synthetic construct; identical to SEQ ID NO: 12103
  misc_feature 1..51: note = Description of Artificial Sequence: Synthetic oligonucleotide
  source 1..51: mol_type = other DNA

SEQ ID NO: 13754 - protein, 17 aa, synthetic construct
  REGION 1..17: note = Description of Artificial Sequence: Synthetic peptide
WMNPNSGNTGYAQKFQG

SEQ ID NO: 13755 - DNA, 51 bp, synthetic construct
  misc_feature 1..51: note = Description of Artificial Sequence: Synthetic oligonucleotide
  source 1..51: mol_type = other DNA
tggatgcatcctaacagtggtaacacaggctatgcacagaagttccagggc

SEQ ID NO: 13756 - protein, 17 aa, synthetic construct
  REGION 1..17: note = Description of Artificial Sequence: Synthetic peptide
WMHPNSGNTGYAQKFQG

SEQ ID NO: 13757 - DNA, 48 bp, synthetic construct; identical to SEQ ID NO: 13715
  misc_feature 1..48: note = Description of Artificial Sequence: Synthetic oligonucleotide
  source 1..48: mol_type = other DNA

SEQ ID NO: 13758 - protein, 16 aa, synthetic construct
  REGION 1..16: note = Description of Artificial Sequence: Synthetic peptide
EINHSGSTNYNPSLKS

SEQ ID NO: 13759 - DNA, 48 bp, synthetic construct; identical to SEQ ID NO: 13715
  misc_feature 1..48: note = Description of Artificial Sequence: Synthetic oligonucleotide
  source 1..48: mol_type = other DNA

SEQ ID NO: 13760 - protein, 16 aa, synthetic construct
  REGION 1..16: note = Description of Artificial Sequence: Synthetic peptide
EINHSGSTNYNPSLKS

SEQ ID NO: 13761 - DNA, 48 bp, synthetic construct
  misc_feature 1..48: note = Description of Artificial Sequence: Synthetic oligonucleotide
  source 1..48: mol_type = other DNA
gctattggtactgctggtgacacatactatccaggctccgtgaagggc

SEQ ID NO: 13762 - protein, 16 aa, synthetic construct
  REGION 1..16: note = Description of Artificial Sequence: Synthetic peptide
AIGTAGDTYYPGSVKG

SEQ ID NO: 13763 - DNA, 48 bp, synthetic construct
  misc_feature 1..48: note = Description of Artificial Sequence: Synthetic oligonucleotide
  source 1..48: mol_type = other DNA
gaaatcaatcacagtggaagcaccaactacaacccgtccctcaagagt

SEQ ID NO: 13764 - protein, 16 aa, synthetic construct
  REGION 1..16: note = Description of Artificial Sequence: Synthetic peptide
EINHSGSTNYNPSLKS

SEQ ID NO: 13765 - DNA, 51 bp, synthetic construct; identical to SEQ ID NO: 13257
  misc_feature 1..51: note = Description of Artificial Sequence: Synthetic oligonucleotide
  source 1..51: mol_type = other DNA

SEQ ID NO: 13766 - protein, 17 aa, synthetic construct
  REGION 1..17: note = Description of Artificial Sequence: Synthetic peptide
VIWYDGRNKYYADSVKG

SEQ ID NO: 13767 - DNA, 48 bp, synthetic construct; identical to SEQ ID NO: 13731
  misc_feature 1..48: note = Description of Artificial Sequence: Synthetic oligonucleotide
  source 1..48: mol_type = other DNA

SEQ ID NO: 13768 - protein, 16 aa, synthetic construct
  REGION 1..16: note = Description of Artificial Sequence: Synthetic peptide
EINHSGRTNYNPSLKS

SEQ ID NO: 13769 - DNA, 51 bp, synthetic construct
  misc_feature 1..51: note = Description of Artificial Sequence: Synthetic oligonucleotide
  source 1..51: mol_type = other DNA
gttatatggtatgatggaagtaatcaaaactatgcagactccgtgaagggc

SEQ ID NO: 13770 - protein, 17 aa, synthetic construct
  REGION 1..17: note = Description of Artificial Sequence: Synthetic peptide
VIWYDGSNQNYADSVKG

SEQ ID NO: 13771 - DNA, 51 bp, synthetic construct; identical to SEQ ID NO: 12103
  misc_feature 1..51: note = Description of Artificial Sequence: Synthetic oligonucleotide
  source 1..51: mol_type = other DNA

SEQ ID NO: 13772 - protein, 17 aa, synthetic construct
  REGION 1..17: note = Description of Artificial Sequence: Synthetic peptide
WMNPNSGNTGYAQKFQG

SEQ ID NO: 13773 - DNA, 48 bp, synthetic construct; identical to SEQ ID NO: 13715
  misc_feature 1..48: note = Description of Artificial Sequence: Synthetic oligonucleotide
  source 1..48: mol_type = other DNA

SEQ ID NO: 13774 - protein, 16 aa, synthetic construct
  REGION 1..16: note = Description of Artificial Sequence: Synthetic peptide
EINHSGSTNYNPSLKS

SEQ ID NO: 13775 - DNA, 48 bp, synthetic construct; identical to SEQ ID NO: 13715
  misc_feature 1..48: note = Description of Artificial Sequence: Synthetic oligonucleotide
  source 1..48: mol_type = other DNA

SEQ ID NO: 13776 - protein, 16 aa, synthetic construct
  REGION 1..16: note = Description of Artificial Sequence: Synthetic peptide
EINHSGSTNYNPSLKS

SEQ ID NO: 13777 - DNA, 51 bp, synthetic construct; identical to SEQ ID NO: 13727
  misc_feature 1..51: note = Description of Artificial Sequence: Synthetic oligonucleotide
  source 1..51: mol_type = other DNA

SEQ ID NO: 13778 - protein, 17 aa, synthetic construct
  REGION 1..17: note = Description of Artificial Sequence: Synthetic peptide
WMHPNNGNTGYAQKFQG

SEQ ID NO: 13779 - DNA, 48 bp, synthetic construct; identical to SEQ ID NO: 13735
  misc_feature 1..48: note = Description of Artificial Sequence: Synthetic oligonucleotide
  source 1..48: mol_type = other DNA

SEQ ID NO: 13780 - protein, 16 aa, synthetic construct
  REGION 1..16: note = Description of Artificial Sequence: Synthetic peptide
EINYSGRTNYNPSLKS

SEQ ID NO: 13781 - DNA, 51 bp, synthetic construct; identical to SEQ ID NO: 12161
  misc_feature 1..51: note = Description of Artificial Sequence: Synthetic oligonucleotide
  source 1..51: mol_type = other DNA

SEQ ID NO: 13782 - protein, 17 aa, synthetic construct
  REGION 1..17: note = Description of Artificial Sequence: Synthetic peptide
WMHPNSGNTGYAQKFQG

SEQ ID NO: 13783 - DNA, 48 bp, synthetic construct; identical to SEQ ID NO: 13735
  misc_feature 1..48: note = Description of Artificial Sequence: Synthetic oligonucleotide
  source 1..48: mol_type = other DNA

SEQ ID NO: 13784 - protein, 16 aa, synthetic construct
  REGION 1..16: note = Description of Artificial Sequence: Synthetic peptide
EINYSGRTNYNPSLKS

SEQ ID NO: 13785 - DNA, 51 bp, synthetic construct; identical to SEQ ID NO: 12161
  misc_feature 1..51: note = Description of Artificial Sequence: Synthetic oligonucleotide
  source 1..51: mol_type = other DNA

SEQ ID NO: 13786 - protein, 17 aa, synthetic construct
  REGION 1..17: note = Description of Artificial Sequence: Synthetic peptide
WMHPNSGNTGYAQKFQG

SEQ ID NO: 13787 - DNA, 51 bp, synthetic construct; identical to SEQ ID NO: 12161
  misc_feature 1..51: note = Description of Artificial Sequence: Synthetic oligonucleotide
  source 1..51: mol_type = other DNA

SEQ ID NO: 13788 - protein, 17 aa, synthetic construct
  REGION 1..17: note = Description of Artificial Sequence: Synthetic peptide
WMHPNSGNTGYAQKFQG

SEQ ID NO: 13789 - DNA, 48 bp, synthetic construct
  misc_feature 1..48: note = Description of Artificial Sequence: Synthetic oligonucleotide
  source 1..48: mol_type = other DNA
gaaatcaattataggggaagcaccaactacaacccgtccctcaagagt

SEQ ID NO: 13790 - protein, 16 aa, synthetic construct
  REGION 1..16: note = Description of Artificial Sequence: Synthetic peptide
EINYRGSTNYNPSLKS

SEQ ID NO: 13791 - DNA, 51 bp, synthetic construct; identical to SEQ ID NO: 12103
  misc_feature 1..51: note = Description of Artificial Sequence: Synthetic oligonucleotide
  source 1..51: mol_type = other DNA

SEQ ID NO: 13792 - protein, 17 aa, synthetic construct
  REGION 1..17: note = Description of Artificial Sequence: Synthetic peptide
WMNPNSGNTGYAQKFQG

SEQ ID NO: 13793 - DNA, 51 bp, synthetic construct; identical to SEQ ID NO: 13745
  misc_feature 1..51: note = Description of Artificial Sequence: Synthetic oligonucleotide
  source 1..51: mol_type = other DNA

SEQ ID NO: 13794 - protein, 17 aa, synthetic construct
  REGION 1..17: note = Description of Artificial Sequence: Synthetic peptide
VIWYDGSNKNYADSVKG

SEQ ID NO: 13795 - DNA, 51 bp, synthetic construct
  misc_feature 1..51: note = Description of Artificial Sequence: Synthetic oligonucleotide
  source 1..51: mol_type = other DNA
tggatgcaccctaatagtggtaacacaggctatgcacagaagttccagggc

SEQ ID NO: 13796 - protein, 17 aa, synthetic construct
  REGION 1..17: note = Description of Artificial Sequence: Synthetic peptide
WMHPNSGNTGYAQKFQG

SEQ ID NO: 13797 - DNA, 51 bp, synthetic construct; identical to SEQ ID NO: 12161
  misc_feature 1..51: note = Description of Artificial Sequence: Synthetic oligonucleotide
  source 1..51: mol_type = other DNA

SEQ ID NO: 13798 - protein, 17 aa, synthetic construct
  REGION 1..17: note = Description of Artificial Sequence: Synthetic peptide
WMHPNSGNTGYAQKFQG

SEQ ID NO: 13799 - DNA, 51 bp, synthetic construct; identical to SEQ ID NO: 13557
  misc_feature 1..51: note = Description of Artificial Sequence: Synthetic oligonucleotide
  source 1..51: mol_type = other DNA

SEQ ID NO: 13800 - protein, 17 aa, synthetic construct
  REGION 1..17: note = Description of Artificial Sequence: Synthetic peptide
VIWYDGSNKYHADSVKG

SEQ ID NO: 13801 - DNA, 51 bp, synthetic construct
  misc_feature 1..51: note = Description of Artificial Sequence: Synthetic oligonucleotide
  source 1..51: mol_type = other DNA
gctatttggtatgatggaagtaataaatactgtgcagactccgtgaagggc

SEQ ID NO: 13802 - protein, 17 aa, synthetic construct
  REGION 1..17: note = Description of Artificial Sequence: Synthetic peptide
AIWYDGSNKYCADSVKG

SEQ ID NO: 13803 - DNA, 57 bp, synthetic construct
  misc_feature 1..57: note = Description of Artificial Sequence: Synthetic oligonucleotide
  source 1..57: mol_type = other DNA
cgtattaaaaacaaagctgatggtgggacaacagactacgctgcacccgtgaaaggc

SEQ ID NO: 13804 - protein, 19 aa, synthetic construct
  REGION 1..19: note = Description of Artificial Sequence: Synthetic peptide
RIKNKADGGTTDYAAPVKG

SEQ ID NO: 13805 - DNA, 51 bp, synthetic construct; identical to SEQ ID NO: 12161
  misc_feature 1..51: note = Description of Artificial Sequence: Synthetic oligonucleotide
  source 1..51: mol_type = other DNA

SEQ ID NO: 13806 - protein, 17 aa, synthetic construct
  REGION 1..17: note = Description of Artificial Sequence: Synthetic peptide
WMHPNSGNTGYAQKFQG

SEQ ID NO: 13807 - DNA, 48 bp, synthetic construct; identical to SEQ ID NO: 13733
  misc_feature 1..48: note = Description of Artificial Sequence: Synthetic oligonucleotide
  source 1..48: mol_type = other DNA

SEQ ID NO: 13808 - protein, 16 aa, synthetic construct
  REGION 1..16: note = Description of Artificial Sequence: Synthetic peptide
EINLSGSTNYNPSLKS

SEQ ID NO: 13809 - DNA, 51 bp, synthetic construct; identical to SEQ ID NO: 12103
  misc_feature 1..51: note = Description of Artificial Sequence: Synthetic oligonucleotide
  source 1..51: mol_type = other DNA

SEQ ID NO: 13810 - protein, 17 aa, synthetic construct
  REGION 1..17: note = Description of Artificial Sequence: Synthetic peptide
WMNPNSGNTGYAQKFQG

SEQ ID NO: 13811 - DNA, 51 bp, synthetic construct; identical to SEQ ID NO: 13695
  misc_feature 1..51: note = Description of Artificial Sequence: Synthetic oligonucleotide
  source 1..51: mol_type = other DNA

SEQ ID NO: 13812 - protein, 17 aa, synthetic construct
  REGION 1..17: note = Description of Artificial Sequence: Synthetic peptide
WMNPNSGNTGCAQKFQG

SEQ ID NO: 13813 - DNA, 51 bp, synthetic construct; identical to SEQ ID NO: 12103
  misc_feature 1..51: note = Description of Artificial Sequence: Synthetic oligonucleotide
  source 1..51: mol_type = other DNA

SEQ ID NO: 13814 - protein, 17 aa, synthetic construct
  REGION 1..17: note = Description of Artificial Sequence: Synthetic peptide
WMNPNSGNTGYAQKFQG

SEQ ID NO: 13815 - DNA, 51 bp, synthetic construct; identical to SEQ ID NO: 12103
  misc_feature 1..51: note = Description of Artificial Sequence: Synthetic oligonucleotide
  source 1..51: mol_type = other DNA

SEQ ID NO: 13816 - protein, 17 aa, synthetic construct
  REGION 1..17: note = Description of Artificial Sequence: Synthetic peptide
WMNPNSGNTGYAQKFQG

SEQ ID NO: 13817 - DNA, 48 bp, synthetic construct; identical to SEQ ID NO: 13715
  misc_feature 1..48: note = Description of Artificial Sequence: Synthetic oligonucleotide
  source 1..48: mol_type = other DNA

SEQ ID NO: 13818 - protein, 16 aa, synthetic construct
  REGION 1..16: note = Description of Artificial Sequence: Synthetic peptide
EINHSGSTNYNPSLKS

SEQ ID NO: 13819 - DNA, 48 bp, synthetic construct; identical to SEQ ID NO: 13715
  misc_feature 1..48: note = Description of Artificial Sequence: Synthetic oligonucleotide
  source 1..48: mol_type = other DNA

SEQ ID NO: 13820 - protein, 16 aa, synthetic construct
  REGION 1..16: note = Description of Artificial Sequence: Synthetic peptide
EINHSGSTNYNPSLKS

SEQ ID NO: 13821 - DNA, 51 bp, synthetic construct; identical to SEQ ID NO: 12161
  misc_feature 1..51: note = Description of Artificial Sequence: Synthetic oligonucleotide
  source 1..51: mol_type = other DNA

SEQ ID NO: 13822 - protein, 17 aa, synthetic construct
  REGION 1..17: note = Description of Artificial Sequence: Synthetic peptide
WMHPNSGNTGYAQKFQG

SEQ ID NO: 13823 - DNA, 51 bp, synthetic construct; identical to SEQ ID NO: 13769
  misc_feature 1..51: note = Description of Artificial Sequence: Synthetic oligonucleotide
  source 1..51: mol_type = other DNA

SEQ ID NO: 13824 - protein, 17 aa, synthetic construct
  REGION 1..17: note = Description of Artificial Sequence: Synthetic peptide
VIWYDGSNQNYADSVKG

SEQ ID NO: 13825 - DNA, 57 bp, synthetic construct
  misc_feature 1..57: note = Description of Artificial Sequence: Synthetic oligonucleotide
  source 1..57: mol_type = other DNA
cgaattaaaaacaaaattgatggtgggacaacagactacgctgcacccgtgaaaggc

SEQ ID NO: 13826 - protein, 19 aa, synthetic construct
  REGION 1..19: note = Description of Artificial Sequence: Synthetic peptide
RIKNKIDGGTTDYAAPVKG

SEQ ID NO: 13827 - DNA, 51 bp, synthetic construct; identical to SEQ ID NO: 13705
  misc_feature 1..51: note = Description of Artificial Sequence: Synthetic oligonucleotide
  source 1..51: mol_type = other DNA

SEQ ID NO: 13828 - protein, 17 aa, synthetic construct
  REGION 1..17: note = Description of Artificial Sequence: Synthetic peptide
VIWYDGSNKYYADSVKG

SEQ ID NO: 13829 - DNA, 51 bp, synthetic construct; identical to SEQ ID NO: 13701
  misc_feature 1..51: note = Description of Artificial Sequence: Synthetic oligonucleotide
  source 1..51: mol_type = other DNA

SEQ ID NO: 13830 - protein, 17 aa, synthetic construct
  REGION 1..17: note = Description of Artificial Sequence: Synthetic peptide
WMHPNSGNTGFAQKFQG

SEQ ID NO: 13831 - DNA, 51 bp, synthetic construct; identical to SEQ ID NO: 12161
  misc_feature 1..51: note = Description of Artificial Sequence: Synthetic oligonucleotide
  source 1..51: mol_type = other DNA

SEQ ID NO: 13832 - protein, 17 aa, synthetic construct
  REGION 1..17: note = Description of Artificial Sequence: Synthetic peptide
WMHPNSGNTGYAQKFQG

SEQ ID NO: 13833 - DNA, 51 bp, synthetic construct; identical to SEQ ID NO: 13755
  misc_feature 1..51: note = Description of Artificial Sequence: Synthetic oligonucleotide
  source 1..51: mol_type = other DNA

SEQ ID NO: 13834 - protein, 17 aa, synthetic construct
  REGION 1..17: note = Description of Artificial Sequence: Synthetic peptide
WMHPNSGNTGYAQKFQG

SEQ ID NO: 13835 - DNA, 48 bp, synthetic construct; identical to SEQ ID NO: 13715
  misc_feature 1..48: note = Description of Artificial Sequence: Synthetic oligonucleotide
  source 1..48: mol_type = other DNA

SEQ ID NO: 13836 - protein, 16 aa, synthetic construct
  REGION 1..16: note = Description of Artificial Sequence: Synthetic peptide
EINHSGSTNYNPSLKS

SEQ ID NO: 13837 - DNA, 51 bp, synthetic construct; identical to SEQ ID NO: 12103
  misc_feature 1..51: note = Description of Artificial Sequence: Synthetic oligonucleotide
  source 1..51: mol_type = other DNA

SEQ ID NO: 13838 - protein, 17 aa, synthetic construct
  REGION 1..17: note = Description of Artificial Sequence: Synthetic peptide
WMNPNSGNTGYAQKFQG

SEQ ID NO: 13839 - DNA, 48 bp, synthetic construct; identical to SEQ ID NO: 13789
  misc_feature 1..48: note = Description of Artificial Sequence: Synthetic oligonucleotide
  source 1..48: mol_type = other DNA

SEQ ID NO: 13840 - protein, 16 aa, synthetic construct
  REGION 1..16: note = Description of Artificial Sequence: Synthetic peptide
EINYRGSTNYNPSLKS

SEQ ID NO: 13841 - DNA, 48 bp, synthetic construct; identical to SEQ ID NO: 13715
  misc_feature 1..48: note = Description of Artificial Sequence: Synthetic oligonucleotide
  source 1..48: mol_type = other DNA

SEQ ID NO: 13842 - protein, 16 aa, synthetic construct
  REGION 1..16: note = Description of Artificial Sequence: Synthetic peptide
EINHSGSTNYNPSLKS

SEQ ID NO: 13843 - DNA, 51 bp, synthetic construct; identical to SEQ ID NO: 12103
  misc_feature 1..51: note = Description of Artificial Sequence: Synthetic oligonucleotide
  source 1..51: mol_type = other DNA

SEQ ID NO: 13844 - protein, 17 aa, synthetic construct
  REGION 1..17: note = Description of Artificial Sequence: Synthetic peptide
WMNPNSGNTGYAQKFQG

SEQ ID NO: 13845 - DNA, 48 bp, synthetic construct; identical to SEQ ID NO: 13715
  misc_feature 1..48: note = Description of Artificial Sequence: Synthetic oligonucleotide
  source 1..48: mol_type = other DNA

SEQ ID NO: 13846 - protein, 16 aa, synthetic construct
  REGION 1..16: note = Description of Artificial Sequence: Synthetic peptide
EINHSGSTNYNPSLKS

SEQ ID NO: 13847 - DNA, 48 bp, synthetic construct; identical to SEQ ID NO: 13715
  misc_feature 1..48: note = Description of Artificial Sequence: Synthetic oligonucleotide
  source 1..48: mol_type = other DNA

SEQ ID NO: 13848 - protein, 16 aa, synthetic construct
  REGION 1..16: note = Description of Artificial Sequence: Synthetic peptide
EINHSGSTNYNPSLKS

SEQ ID NO: 13849 - DNA, 48 bp, synthetic construct; identical to SEQ ID NO: 13715
  misc_feature 1..48: note = Description of Artificial Sequence: Synthetic oligonucleotide
  source 1..48: mol_type = other DNA

SEQ ID NO: 13850 - protein, 16 aa, synthetic construct
  REGION 1..16: note = Description of Artificial Sequence: Synthetic peptide
EINHSGSTNYNPSLKS

SEQ ID NO: 13851 - DNA, 51 bp, synthetic construct; identical to SEQ ID NO: 12161
  misc_feature 1..51: note = Description of Artificial Sequence: Synthetic oligonucleotide
  source 1..51: mol_type = other DNA

SEQ ID NO: 13852 - protein, 17 aa, synthetic construct
  REGION 1..17: note = Description of Artificial Sequence: Synthetic peptide
WMHPNSGNTGYAQKFQG

SEQ ID NO: 13853 - DNA, 51 bp, synthetic construct; identical to SEQ ID NO: 12161
  misc_feature 1..51: note = Description of Artificial Sequence: Synthetic oligonucleotide
  source 1..51: mol_type = other DNA

SEQ ID NO: 13854 - protein, 17 aa, synthetic construct
  REGION 1..17: note = Description of Artificial Sequence: Synthetic peptide
WMHPNSGNTGYAQKFQG

SEQ ID NO: 13855 - DNA, 48 bp, synthetic construct; identical to SEQ ID NO: 13715
  misc_feature 1..48: note = Description of Artificial Sequence: Synthetic oligonucleotide
  source 1..48: mol_type = other DNA

SEQ ID NO: 13856 - protein, 16 aa, synthetic construct
  REGION 1..16: note = Description of Artificial Sequence: Synthetic peptide
EINHSGSTNYNPSLKS

SEQ ID NO: 13857 - DNA, 51 bp, synthetic construct; identical to SEQ ID NO: 12103
  misc_feature 1..51: note = Description of Artificial Sequence: Synthetic oligonucleotide
  source 1..51: mol_type = other DNA

SEQ ID NO: 13858 - protein, 17 aa, synthetic construct
  REGION 1..17: note = Description of Artificial Sequence: Synthetic peptide
WMNPNSGNTGYAQKFQG

SEQ ID NO: 13859 - DNA, 48 bp, synthetic construct; identical to SEQ ID NO: 13715
  misc_feature 1..48: note = Description of Artificial Sequence: Synthetic oligonucleotide
  source 1..48: mol_type = other DNA

SEQ ID NO: 13860 - protein, 16 aa, synthetic construct
  REGION 1..16: note = Description of Artificial Sequence: Synthetic peptide
EINHSGSTNYNPSLKS

SEQ ID NO: 13861 - DNA, 48 bp, synthetic construct; identical to SEQ ID NO: 13731
  misc_feature 1..48: note = Description of Artificial Sequence: Synthetic oligonucleotide
  source 1..48: mol_type = other DNA

SEQ ID NO: 13862 - protein, 16 aa, synthetic construct
  REGION 1..16: note = Description of Artificial Sequence: Synthetic peptide
EINHSGRTNYNPSLKS

SEQ ID NO: 13863 - DNA, 48 bp, synthetic construct
  misc_feature 1..48: note = Description of Artificial Sequence: Synthetic oligonucleotide
  source 1..48: mol_type = other DNA
gaaatcaatcaaagtggacgcaccaactacaacccgtccctcaagagt

SEQ ID NO: 13864 - protein, 16 aa, synthetic construct
  REGION 1..16: note = Description of Artificial Sequence: Synthetic peptide
EINQSGRTNYNPSLKS

SEQ ID NO: 13865 - DNA, 51 bp, synthetic construct
  misc_feature 1..51: note = Description of Artificial Sequence: Synthetic oligonucleotide
  source 1..51: mol_type = other DNA
tggatgaaccctaacagtggtaacacaggctatgcacagaagttccaggtc

SEQ ID NO: 13866 - protein, 17 aa, synthetic construct
  REGION 1..17: note = Description of Artificial Sequence: Synthetic peptide
WMNPNSGNTGYAQKFQV

SEQ ID NO: 13867 - DNA, 51 bp, synthetic construct; identical to SEQ ID NO: 12161
  misc_feature 1..51: note = Description of Artificial Sequence: Synthetic oligonucleotide
  source 1..51: mol_type = other DNA

SEQ ID NO: 13868 - protein, 17 aa, synthetic construct
  REGION 1..17: note = Description of Artificial Sequence: Synthetic peptide
WMHPNSGNTGYAQKFQG

SEQ ID NO: 13869 - DNA, 48 bp, synthetic construct; identical to SEQ ID NO: 13715
  misc_feature 1..48: note = Description of Artificial Sequence: Synthetic oligonucleotide
  source 1..48: mol_type = other DNA

SEQ ID NO: 13870 - protein, 16 aa, synthetic construct
  REGION 1..16: note = Description of Artificial Sequence: Synthetic peptide
EINHSGSTNYNPSLKS

SEQ ID NO: 13871 - DNA, 51 bp, synthetic construct; identical to SEQ ID NO: 13745
  misc_feature 1..51: note = Description of Artificial Sequence: Synthetic oligonucleotide
  source 1..51: mol_type = other DNA

SEQ ID NO: 13872 - protein, 17 aa, synthetic construct
  REGION 1..17: note = Description of Artificial Sequence: Synthetic peptide
VIWYDGSNKNYADSVKG

SEQ ID NO: 13873 - DNA, 51 bp, synthetic construct; identical to SEQ ID NO: 13745
  misc_feature 1..51: note = Description of Artificial Sequence: Synthetic oligonucleotide
  source 1..51: mol_type = other DNA

SEQ ID NO: 13874 - protein, 17 aa, synthetic construct
  REGION 1..17: note = Description of Artificial Sequence: Synthetic peptide
VIWYDGSNKNYADSVKG

SEQ ID NO: 13875 - DNA, 48 bp, synthetic construct; identical to SEQ ID NO: 13715
  misc_feature 1..48: note = Description of Artificial Sequence: Synthetic oligonucleotide
  source 1..48: mol_type = other DNA

SEQ ID NO: 13876 - protein, 16 aa, synthetic construct
  REGION 1..16: note = Description of Artificial Sequence: Synthetic peptide
EINHSGSTNYNPSLKS

SEQ ID NO: 13877 - DNA, 51 bp, synthetic construct; identical to SEQ ID NO: 13727
  misc_feature 1..51: note = Description of Artificial Sequence: Synthetic oligonucleotide
  source 1..51: mol_type = other DNA

SEQ ID NO: 13878 - protein, 17 aa, synthetic construct
  REGION 1..17: note = Description of Artificial Sequence: Synthetic peptide
WMHPNNGNTGYAQKFQG

SEQ ID NO: 13879 - DNA, 48 bp, synthetic construct; identical to SEQ ID NO: 13715
  misc_feature 1..48: note = Description of Artificial Sequence: Synthetic oligonucleotide
  source 1..48: mol_type = other DNA

SEQ ID NO: 13880 - protein, 16 aa, synthetic construct
  REGION 1..16: note = Description of Artificial Sequence: Synthetic peptide
EINHSGSTNYNPSLKS

SEQ ID NO: 13881 - DNA, 48 bp, synthetic construct; identical to SEQ ID NO: 13715
  misc_feature 1..48: note = Description of Artificial Sequence: Synthetic oligonucleotide
  source 1..48: mol_type = other DNA

SEQ ID NO: 13882 - protein, 16 aa, synthetic construct
  REGION 1..16: note = Description of Artificial Sequence: Synthetic peptide
EINHSGSTNYNPSLKS

SEQ ID NO: 13883 - DNA, 51 bp, synthetic construct; identical to SEQ ID NO: 12103
  misc_feature 1..51: note = Description of Artificial Sequence: Synthetic oligonucleotide
  source 1..51: mol_type = other DNA

SEQ ID NO: 13884 - protein, 17 aa, synthetic construct
  REGION 1..17: note = Description of Artificial Sequence: Synthetic peptide
WMNPNSGNTGYAQKFQG

SEQ ID NO: 13885 - DNA, 51 bp, synthetic construct; identical to SEQ ID NO: 12161
  misc_feature 1..51: note = Description of Artificial Sequence: Synthetic oligonucleotide
  source 1..51: mol_type = other DNA

SEQ ID NO: 13886 - protein, 17 aa, synthetic construct
  REGION 1..17: note = Description of Artificial Sequence: Synthetic peptide
WMHPNSGNTGYAQKFQG

SEQ ID NO: 13887 - DNA, 48 bp, synthetic construct; identical to SEQ ID NO: 13789
  misc_feature 1..48: note = Description of Artificial Sequence: Synthetic oligonucleotide
  source 1..48: mol_type = other DNA

SEQ ID NO: 13888 - protein, 16 aa, synthetic construct
  REGION 1..16: note = Description of Artificial Sequence: Synthetic peptide
EINYRGSTNYNPSLKS

SEQ ID NO: 13889 - DNA, 48 bp, synthetic construct; identical to SEQ ID NO: 13715
  misc_feature 1..48: note = Description of Artificial Sequence: Synthetic oligonucleotide
  source 1..48: mol_type = other DNA

SEQ ID NO: 13890 - protein, 16 aa, synthetic construct
  REGION 1..16: note = Description of Artificial Sequence: Synthetic peptide
EINHSGSTNYNPSLKS

SEQ ID NO: 13891 - DNA, 51 bp, synthetic construct; identical to SEQ ID NO: 13727
  misc_feature 1..51: note = Description of Artificial Sequence: Synthetic oligonucleotide
  source 1..51: mol_type = other DNA

SEQ ID NO: 13892 - protein, 17 aa, synthetic construct
  REGION 1..17: note = Description of Artificial Sequence: Synthetic peptide
WMHPNNGNTGYAQKFQG

SEQ ID NO: 13893 - DNA, 51 bp, synthetic construct; identical to SEQ ID NO: 12161
  misc_feature 1..51: note = Description of Artificial Sequence: Synthetic oligonucleotide
  source 1..51: mol_type = other DNA

SEQ ID NO: 13894 - protein, 17 aa, synthetic construct
  REGION 1..17: note = Description of Artificial Sequence: Synthetic peptide
WMHPNSGNTGYAQKFQG

SEQ ID NO: 13895 - DNA, 51 bp, synthetic construct; identical to SEQ ID NO: 12161
  misc_feature 1..51: note = Description of Artificial Sequence: Synthetic oligonucleotide
  source 1..51: mol_type = other DNA

SEQ ID NO: 13896 - protein, 17 aa, synthetic construct
  REGION 1..17: note = Description of Artificial Sequence: Synthetic peptide
WMHPNSGNTGYAQKFQG

SEQ ID NO: 13897 - DNA, 48 bp, synthetic construct; identical to SEQ ID NO: 13715
  misc_feature 1..48: note = Description of Artificial Sequence: Synthetic oligonucleotide
  source 1..48: mol_type = other DNA

SEQ ID NO: 13898 - protein, 16 aa, synthetic construct
  REGION 1..16: note = Description of Artificial Sequence: Synthetic peptide
EINHSGSTNYNPSLKS

SEQ ID NO: 13899 - DNA, 51 bp, synthetic construct; identical to SEQ ID NO: 13727
  misc_feature 1..51: note = Description of Artificial Sequence: Synthetic oligonucleotide
  source 1..51: mol_type = other DNA

SEQ ID NO: 13900 - protein, 17 aa, synthetic construct
  REGION 1..17: note = Description of Artificial Sequence: Synthetic peptide
WMHPNNGNTGYAQKFQG

SEQ ID NO: 13901 - DNA, 51 bp, synthetic construct; identical to SEQ ID NO: 12103
  misc_feature 1..51: note = Description of Artificial Sequence: Synthetic oligonucleotide
  source 1..51: mol_type = other DNA

SEQ ID NO: 13902 - protein, 17 aa, synthetic construct
  REGION 1..17: note = Description of Artificial Sequence: Synthetic peptide
WMNPNSGNTGYAQKFQG

SEQ ID NO: 13903 - DNA, 48 bp, synthetic construct; identical to SEQ ID NO: 13715
  misc_feature 1..48: note = Description of Artificial Sequence: Synthetic oligonucleotide
  source 1..48: mol_type = other DNA

SEQ ID NO: 13904 - protein, 16 aa, synthetic construct
  REGION 1..16: note = Description of Artificial Sequence: Synthetic peptide
EINHSGSTNYNPSLKS

SEQ ID NO: 13905 - DNA, 51 bp, synthetic construct; identical to SEQ ID NO: 12161
  misc_feature 1..51: note = Description of Artificial Sequence: Synthetic oligonucleotide
  source 1..51: mol_type = other DNA

SEQ ID NO: 13906 - protein, 17 aa, synthetic construct
  REGION 1..17: note = Description of Artificial Sequence: Synthetic peptide
WMHPNSGNTGYAQKFQG

SEQ ID NO: 13907 - DNA, 51 bp, synthetic construct; identical to SEQ ID NO: 12161
  misc_feature 1..51: note = Description of Artificial Sequence: Synthetic oligonucleotide
  source 1..51: mol_type = other DNA

SEQ ID NO: 13908 - protein, 17 aa, synthetic construct
  REGION 1..17: note = Description of Artificial Sequence: Synthetic peptide
WMHPNSGNTGYAQKFQG

SEQ ID NO: 13909 - DNA, 51 bp, synthetic construct; identical to SEQ ID NO: 12161
  misc_feature 1..51: note = Description of Artificial Sequence: Synthetic oligonucleotide
  source 1..51: mol_type = other DNA

SEQ ID NO: 13910 - protein, 17 aa, synthetic construct
  REGION 1..17: note = Description of Artificial Sequence: Synthetic peptide
WMHPNSGNTGYAQKFQG

SEQ ID NO: 13911 - DNA, 51 bp, synthetic construct; identical to SEQ ID NO: 12161
  misc_feature 1..51: note = Description of Artificial Sequence: Synthetic oligonucleotide
  source 1..51: mol_type = other DNA

SEQ ID NO: 13912 - protein, 17 aa, synthetic construct
  REGION 1..17: note = Description of Artificial Sequence: Synthetic peptide
WMHPNSGNTGYAQKFQG

SEQ ID NO: 13913 - DNA, 48 bp, synthetic construct
  misc_feature 1..48: note = Description of Artificial Sequence: Synthetic oligonucleotide
  source 1..48: mol_type = other DNA
gaaatcaatcatagtggaaggaccaactacaacccctccctcaagagt

SEQ ID NO: 13914 - protein, 16 aa, synthetic construct
  REGION 1..16: note = Description of Artificial Sequence: Synthetic peptide
EINHSGRTNYNPSLKS

SEQ ID NO: 13915 - DNA, 48 bp, synthetic construct; identical to SEQ ID NO: 13715
  misc_feature 1..48: note = Description of Artificial Sequence: Synthetic oligonucleotide
  source 1..48: mol_type = other DNA

SEQ ID NO: 13916 - protein, 16 aa, synthetic construct
  REGION 1..16: note = Description of Artificial Sequence: Synthetic peptide
EINHSGSTNYNPSLKS

SEQ ID NO: 13917 - DNA, 51 bp, synthetic construct; identical to SEQ ID NO: 12103
  misc_feature 1..51: note = Description of Artificial Sequence: Synthetic oligonucleotide
  source 1..51: mol_type = other DNA

SEQ ID NO: 13918 - protein, 17 aa, synthetic construct
  REGION 1..17: note = Description of Artificial Sequence: Synthetic peptide
WMNPNSGNTGYAQKFQG

SEQ ID NO: 13919 - DNA, 48 bp, synthetic construct
  misc_feature 1..48: note = Description of Artificial Sequence: Synthetic oligonucleotide
  source 1..48: mol_type = other DNA
gaaatcaatcatagtggaagcaccaacttcaacccgtccctcaagagt

SEQ ID NO: 13920 - protein, 16 aa, synthetic construct
  REGION 1..16: note = Description of Artificial Sequence: Synthetic peptide
EINHSGSTNFNPSLKS

SEQ ID NO: 13921 - DNA, 51 bp, synthetic construct; identical to SEQ ID NO: 12103
  misc_feature 1..51: note = Description of Artificial Sequence: Synthetic oligonucleotide
  source 1..51: mol_type = other DNA

SEQ ID NO: 13922 - protein, 17 aa, synthetic construct
  REGION 1..17: note = Description of Artificial Sequence: Synthetic peptide
WMNPNSGNTGYAQKFQG

SEQ ID NO: 13923 - DNA, 51 bp, synthetic construct
  misc_feature 1..51: note = Description of Artificial Sequence: Synthetic oligonucleotide
  source 1..51: mol_type = other DNA
tggatgaaccctaacagtggtaacacaggctatgcacagaagttccaggac

SEQ ID NO: 13924 - protein, 17 aa, synthetic construct
  REGION 1..17: note = Description of Artificial Sequence: Synthetic peptide
WMNPNSGNTGYAQKFQD

SEQ ID NO: 13925 - DNA, 51 bp, synthetic construct; identical to SEQ ID NO: 13745
  misc_feature 1..51: note = Description of Artificial Sequence: Synthetic oligonucleotide
  source 1..51: mol_type = other DNA

SEQ ID NO: 13926 - protein, 17 aa, synthetic construct
  REGION 1..17: note = Description of Artificial Sequence: Synthetic peptide
VIWYDGSNKNYADSVKG

SEQ ID NO: 13927 - DNA, 48 bp, synthetic construct; identical to SEQ ID NO: 13863
  misc_feature 1..48: note = Description of Artificial Sequence: Synthetic oligonucleotide
  source 1..48: mol_type = other DNA

SEQ ID NO: 13928 - protein, 16 aa, synthetic construct
  REGION 1..16: note = Description of Artificial Sequence: Synthetic peptide
EINQSGRTNYNPSLKS

SEQ ID NO: 13929 - DNA, 51 bp, synthetic construct; identical to SEQ ID NO: 12123
  misc_feature 1..51: note = Description of Artificial Sequence: Synthetic oligonucleotide
  source 1..51: mol_type = other DNA

SEQ ID NO: 13930 - protein, 17 aa, synthetic construct
  REGION 1..17: note = Description of Artificial Sequence: Synthetic peptide
VIWYDGSNKYYADSVKG

SEQ ID NO: 13931 - DNA, 51 bp, synthetic construct; identical to SEQ ID NO: 13795
  misc_feature 1..51: note = Description of Artificial Sequence: Synthetic oligonucleotide
  source 1..51: mol_type = other DNA

SEQ ID NO: 13932 - protein, 17 aa, synthetic construct
  REGION 1..17: note = Description of Artificial Sequence: Synthetic peptide
WMHPNSGNTGYAQKFQG

SEQ ID NO: 13933 - DNA, 48 bp, synthetic construct; identical to SEQ ID NO: 13715
  misc_feature 1..48: note = Description of Artificial Sequence: Synthetic oligonucleotide
  source 1..48: mol_type = other DNA

SEQ ID NO: 13934 - protein, 16 aa, synthetic construct
  REGION 1..16: note = Description of Artificial Sequence: Synthetic peptide
EINHSGSTNYNPSLKS

SEQ ID NO: 13935 - DNA, 48 bp, synthetic construct; identical to SEQ ID NO: 13715
  misc_feature 1..48: note = Description of Artificial Sequence: Synthetic oligonucleotide
  source 1..48: mol_type = other DNA

SEQ ID NO: 13936 - protein, 16 aa, synthetic construct
  REGION 1..16: note = Description of Artificial Sequence: Synthetic peptide
EINHSGSTNYNPSLKS

SEQ ID NO: 13937 - DNA, 51 bp, synthetic construct; identical to SEQ ID NO: 12161
  misc_feature 1..51: note = Description of Artificial Sequence: Synthetic oligonucleotide
  source 1..51: mol_type = other DNA

SEQ ID NO: 13938 - protein, 17 aa, synthetic construct
  REGION 1..17: note = Description of Artificial Sequence: Synthetic peptide
WMHPNSGNTGYAQKFQG

SEQ ID NO: 13939 - DNA, 48 bp, synthetic construct; identical to SEQ ID NO: 13735
  misc_feature 1..48: note = Description of Artificial Sequence: Synthetic oligonucleotide
  source 1..48: mol_type = other DNA

SEQ ID NO: 13940 - protein, 16 aa, synthetic construct
  REGION 1..16: note = Description of Artificial Sequence: Synthetic peptide
EINYSGRTNYNPSLKS

SEQ ID NO: 13941 - DNA, 48 bp, synthetic construct; identical to SEQ ID NO: 13731
  misc_feature 1..48: note = Description of Artificial Sequence: Synthetic oligonucleotide
  source 1..48: mol_type = other DNA

SEQ ID NO: 13942 - protein, 16 aa, synthetic construct
  REGION 1..16: note = Description of Artificial Sequence: Synthetic peptide
EINHSGRTNYNPSLKS

SEQ ID NO: 13943 - DNA, 48 bp, synthetic construct; identical to SEQ ID NO: 13715
  misc_feature 1..48: note = Description of Artificial Sequence: Synthetic oligonucleotide
  source 1..48: mol_type = other DNA

SEQ ID NO: 13944 - protein, 16 aa, synthetic construct
  REGION 1..16: note = Description of Artificial Sequence: Synthetic peptide
EINHSGSTNYNPSLKS

SEQ ID NO: 13945 - DNA, 48 bp, synthetic construct; identical to SEQ ID NO: 13751
  misc_feature 1..48: note = Description of Artificial Sequence: Synthetic oligonucleotide
  source 1..48: mol_type = other DNA

SEQ ID NO: 13946 - protein, 16 aa, synthetic construct
  REGION 1..16: note = Description of Artificial Sequence: Synthetic peptide
EINHSGRTNFNPSLKS

SEQ ID NO: 13947 - DNA, 51 bp, synthetic construct; identical to SEQ ID NO: 12103
  misc_feature 1..51: note = Description of Artificial Sequence: Synthetic oligonucleotide
  source 1..51: mol_type = other DNA

SEQ ID NO: 13948 - protein, 17 aa, synthetic construct
  REGION 1..17: note = Description of Artificial Sequence: Synthetic peptide
WMNPNSGNTGYAQKFQG

SEQ ID NO: 13949 - DNA, 48 bp, synthetic construct
  misc_feature 1..48: note = Description of Artificial Sequence: Synthetic oligonucleotide
  source 1..48: mol_type = other DNA
gaaatcaatcatagtggaatcaccaactacaacccgtccctcaagagt

SEQ ID NO: 13950 - protein, 16 aa, synthetic construct
  REGION 1..16: note = Description of Artificial Sequence: Synthetic peptide
EINHSGITNYNPSLKS

SEQ ID NO: 13951 - DNA, 51 bp, synthetic construct; identical to SEQ ID NO: 12161
  misc_feature 1..51: note = Description of Artificial Sequence: Synthetic oligonucleotide
  source 1..51: mol_type = other DNA

SEQ ID NO: 13952 - protein, 17 aa, synthetic construct
  REGION 1..17: note = Description of Artificial Sequence: Synthetic peptide
WMHPNSGNTGYAQKFQG

SEQ ID NO: 13953 - DNA, 51 bp, synthetic construct; identical to SEQ ID NO: 12161
  misc_feature 1..51: note = Description of Artificial Sequence: Synthetic oligonucleotide
  source 1..51: mol_type = other DNA

SEQ ID NO: 13954 - protein, 17 aa, synthetic construct
  REGION 1..17: note = Description of Artificial Sequence: Synthetic peptide
WMHPNSGNTGYAQKFQG

SEQ ID NO: 13955 - DNA, 48 bp, synthetic construct; identical to SEQ ID NO: 13715
  misc_feature 1..48: note = Description of Artificial Sequence: Synthetic oligonucleotide
  source 1..48: mol_type = other DNA

SEQ ID NO: 13956 - protein, 16 aa, synthetic construct
  REGION 1..16: note = Description of Artificial Sequence: Synthetic peptide
EINHSGSTNYNPSLKS

SEQ ID NO: 13957 - DNA, 48 bp, synthetic construct; identical to SEQ ID NO: 13715
  misc_feature 1..48: note = Description of Artificial Sequence: Synthetic oligonucleotide
  source 1..48: mol_type = other DNA

SEQ ID NO: 13958 - protein, 16 aa, synthetic construct
  REGION 1..16: note = Description of Artificial Sequence: Synthetic peptide
EINHSGSTNYNPSLKS

SEQ ID NO: 13959 - DNA, 51 bp, synthetic construct; identical to SEQ ID NO: 12103
  misc_feature 1..51: note = Description of Artificial Sequence: Synthetic oligonucleotide
  source 1..51: mol_type = other DNA

SEQ ID NO: 13960 - protein, 17 aa, synthetic construct
  REGION 1..17: note = Description of Artificial Sequence: Synthetic peptide
WMNPNSGNTGYAQKFQG

SEQ ID NO: 13961 - DNA, 48 bp, synthetic construct; identical to SEQ ID NO: 13715
  misc_feature 1..48: note = Description of Artificial Sequence: Synthetic oligonucleotide
  source 1..48: mol_type = other DNA

SEQ ID NO: 13962 - protein, 16 aa, synthetic construct
  REGION 1..16: note = Description of Artificial Sequence: Synthetic peptide
EINHSGSTNYNPSLKS

SEQ ID NO: 13963 - DNA, 48 bp, synthetic construct
  misc_feature 1..48: note = Description of Artificial Sequence: Synthetic oligonucleotide
  source 1..48: mol_type = other DNA
gaaatcaatcatagtggacgcaccaactacaacccgtccctcaagagt

SEQ ID NO: 13964 - protein, 16 aa, synthetic construct
  REGION 1..16: note = Description of Artificial Sequence: Synthetic peptide
EINHSGRTNYNPSLKS

SEQ ID NO: 13965 - DNA, 48 bp, synthetic construct; identical to SEQ ID NO: 13715
  misc_feature 1..48: note = Description of Artificial Sequence: Synthetic oligonucleotide
  source 1..48: mol_type = other DNA

SEQ ID NO: 13966 - protein, 16 aa, synthetic construct
  REGION 1..16: note = Description of Artificial Sequence: Synthetic peptide
EINHSGSTNYNPSLKS

SEQ ID NO: 13967 - DNA, 51 bp, synthetic construct; identical to SEQ ID NO: 13745
  misc_feature 1..51: note = Description of Artificial Sequence: Synthetic oligonucleotide
  source 1..51: mol_type = other DNA

SEQ ID NO: 13968 - protein, 17 aa, synthetic construct
  REGION 1..17: note = Description of Artificial Sequence: Synthetic peptide
VIWYDGSNKNYADSVKG

SEQ ID NO: 13969 - DNA, 48 bp, synthetic construct; identical to SEQ ID NO: 13715
  misc_feature 1..48: note = Description of Artificial Sequence: Synthetic oligonucleotide
  source 1..48: mol_type = other DNA

SEQ ID NO: 13970 - protein, 16 aa, synthetic construct
  REGION 1..16: note = Description of Artificial Sequence: Synthetic peptide
EINHSGSTNYNPSLKS

SEQ ID NO: 13971 - DNA, 51 bp, synthetic construct; identical to SEQ ID NO: 13727
  misc_feature 1..51: note = Description of Artificial Sequence: Synthetic oligonucleotide
  source 1..51: mol_type = other DNA

SEQ ID NO: 13972 - protein, 17 aa, synthetic construct
  REGION 1..17: note = Description of Artificial Sequence: Synthetic peptide
WMHPNNGNTGYAQKFQG

SEQ ID NO: 13973 - DNA, 51 bp, synthetic construct; identical to SEQ ID NO: 12103
  misc_feature 1..51: note = Description of Artificial Sequence: Synthetic oligonucleotide
  source 1..51: mol_type = other DNA

SEQ ID NO: 13974 - protein, 17 aa, synthetic construct
  REGION 1..17: note = Description of Artificial Sequence: Synthetic peptide
WMNPNSGNTGYAQKFQG

SEQ ID NO: 13975 - DNA, 48 bp, synthetic construct; identical to SEQ ID NO: 13715
  misc_feature 1..48: note = Description of Artificial Sequence: Synthetic oligonucleotide
  source 1..48: mol_type = other DNA

SEQ ID NO: 13976 - protein, 16 aa, synthetic construct
  REGION 1..16: note = Description of Artificial Sequence: Synthetic peptide
EINHSGSTNYNPSLKS

SEQ ID NO: 13977 - DNA, 51 bp, synthetic construct; identical to SEQ ID NO: 12103
  misc_feature 1..51: note = Description of Artificial Sequence: Synthetic oligonucleotide
  source 1..51: mol_type = other DNA

SEQ ID NO: 13978 - protein, 17 aa, synthetic construct
  REGION 1..17: note = Description of Artificial Sequence: Synthetic peptide
WMNPNSGNTGYAQKFQG

SEQ ID NO: 13979 - DNA, 48 bp, synthetic construct; identical to SEQ ID NO: 13715
  misc_feature 1..48: note = Description of Artificial Sequence: Synthetic oligonucleotide
  source 1..48: mol_type = other DNA

SEQ ID NO: 13980 - protein, 16 aa, synthetic construct
  REGION 1..16: note = Description of Artificial Sequence: Synthetic peptide
EINHSGSTNYNPSLKS

SEQ ID NO: 13981 - DNA, 51 bp, synthetic construct; identical to SEQ ID NO: 12161
  misc_feature 1..51: note = Description of Artificial Sequence: Synthetic oligonucleotide
  source 1..51: mol_type = other DNA

SEQ ID NO: 13982 - protein, 17 aa, synthetic construct
  REGION 1..17: note = Description of Artificial Sequence: Synthetic peptide
WMHPNSGNTGYAQKFQG

SEQ ID NO: 13983 - DNA, 51 bp, synthetic construct
  misc_feature 1..51: note = Description of Artificial Sequence: Synthetic oligonucleotide
  source 1..51: mol_type = other DNA
tggatgaaccctaacagtggtgacacaggctatgcacagaagttccagggc

SEQ ID NO: 13984 - protein, 17 aa, synthetic construct
  REGION 1..17: note = Description of Artificial Sequence: Synthetic peptide
WMNPNSGDTGYAQKFQG

SEQ ID NO: 13985 - DNA, 51 bp, synthetic construct; identical to SEQ ID NO: 12103
  misc_feature 1..51: note = Description of Artificial Sequence: Synthetic oligonucleotide
  source 1..51: mol_type = other DNA

SEQ ID NO: 13986 - protein, 17 aa, synthetic construct
  REGION 1..17: note = Description of Artificial Sequence: Synthetic peptide
WMNPNSGNTGYAQKFQG

SEQ ID NO: 13987 - DNA, 48 bp, synthetic construct; identical to SEQ ID NO: 13715
  misc_feature 1..48: note = Description of Artificial Sequence: Synthetic oligonucleotide
  source 1..48: mol_type = other DNA

SEQ ID NO: 13988 - protein, 16 aa, synthetic construct
  REGION 1..16: note = Description of Artificial Sequence: Synthetic peptide
EINHSGSTNYNPSLKS

SEQ ID NO: 13989 - DNA, 48 bp, synthetic construct; identical to SEQ ID NO: 13715
  misc_feature 1..48: note = Description of Artificial Sequence: Synthetic oligonucleotide
  source 1..48: mol_type = other DNA

SEQ ID NO: 13990 - protein, 16 aa, synthetic construct
  REGION 1..16: note = Description of Artificial Sequence: Synthetic peptide
EINHSGSTNYNPSLKS

SEQ ID NO: 13991 - DNA, 48 bp, synthetic construct; identical to SEQ ID NO: 13715
  misc_feature 1..48: note = Description of Artificial Sequence: Synthetic oligonucleotide
  source 1..48: mol_type = other DNA

SEQ ID NO: 13992 - protein, 16 aa, synthetic construct
  REGION 1..16: note = Description of Artificial Sequence: Synthetic peptide
EINHSGSTNYNPSLKS

SEQ ID NO: 13993 - DNA, 51 bp, synthetic construct; identical to SEQ ID NO: 12101
  misc_feature 1..51: note = Description of Artificial Sequence: Synthetic oligonucleotide
  source 1..51: mol_type = other DNA

SEQ ID NO: 13994 - protein, 17 aa, synthetic construct
  REGION 1..17: note = Description of Artificial Sequence: Synthetic peptide
WMTPNSGNTGYAQKFQG

SEQ ID NO: 13995 - DNA, 48 bp, synthetic construct; identical to SEQ ID NO: 13715
  misc_feature 1..48: note = Description of Artificial Sequence: Synthetic oligonucleotide
  source 1..48: mol_type = other DNA

SEQ ID NO: 13996 - protein, 16 aa, synthetic construct
  REGION 1..16: note = Description of Artificial Sequence: Synthetic peptide
EINHSGSTNYNPSLKS

SEQ ID NO: 13997 - DNA, 48 bp, synthetic construct; identical to SEQ ID NO: 13761
  misc_feature 1..48: note = Description of Artificial Sequence: Synthetic oligonucleotide
  source 1..48: mol_type = other DNA

SEQ ID NO: 13998 - protein, 16 aa, synthetic construct
  REGION 1..16: note = Description of Artificial Sequence: Synthetic peptide
AIGTAGDTYYPGSVKG

SEQ ID NO: 13999 - DNA, 48 bp, synthetic construct; identical to SEQ ID NO: 13715
  misc_feature 1..48: note = Description of Artificial Sequence: Synthetic oligonucleotide
  source 1..48: mol_type = other DNA

SEQ ID NO: 14000 - protein, 16 aa, synthetic construct
  REGION 1..16: note = Description of Artificial Sequence: Synthetic peptide
EINHSGSTNYNPSLKS

SEQ ID NO: 14001 - DNA, 48 bp, synthetic construct
  misc_feature 1..48: note = Description of Artificial Sequence: Synthetic oligonucleotide
  source 1..48: mol_type = other DNA
gaaatcaattatagtggaagcaccaacttcaacccgtccctcaagagt

SEQ ID NO: 14002 - protein, 16 aa, synthetic construct
  REGION 1..16: note = Description of Artificial Sequence: Synthetic peptide
EINYSGSTNFNPSLKS

SEQ ID NO: 14003 - DNA, 48 bp, synthetic construct; identical to SEQ ID NO: 13715
  misc_feature 1..48: note = Description of Artificial Sequence: Synthetic oligonucleotide
  source 1..48: mol_type = other DNA

SEQ ID NO: 14004 - protein, 16 aa, synthetic construct
  REGION 1..16: note = Description of Artificial Sequence: Synthetic peptide
EINHSGSTNYNPSLKS

SEQ ID NO: 14005 - DNA, 48 bp, synthetic construct
  misc_feature 1..48: note = Description of Artificial Sequence: Synthetic oligonucleotide
  source 1..48: mol_type = other DNA
gaaatcaatcatagtggacgcaccagctacaacccgtccctcaagagt

SEQ ID NO: 14006 - protein, 16 aa, synthetic construct
  REGION 1..16: note = Description of Artificial Sequence: Synthetic peptide
EINHSGRTSYNPSLKS

SEQ ID NO: 14007 - DNA, 48 bp, synthetic construct; identical to SEQ ID NO: 13715
  misc_feature 1..48: note = Description of Artificial Sequence: Synthetic oligonucleotide
  source 1..48: mol_type = other DNA

SEQ ID NO: 14008 - protein, 16 aa, synthetic construct
  REGION 1..16: note = Description of Artificial Sequence: Synthetic peptide
EINHSGSTNYNPSLKS

SEQ ID NO: 14009 - DNA, 48 bp, synthetic construct; identical to SEQ ID NO: 13715
  misc_feature 1..48: note = Description of Artificial Sequence: Synthetic oligonucleotide
  source 1..48: mol_type = other DNA

SEQ ID NO: 14010 - protein, 16 aa, synthetic construct
  REGION 1..16: note = Description of Artificial Sequence: Synthetic peptide
EINHSGSTNYNPSLKS

SEQ ID NO: 14011 - DNA, 48 bp, synthetic construct; identical to SEQ ID NO: 13715
  misc_feature 1..48: note = Description of Artificial Sequence: Synthetic oligonucleotide
  source 1..48: mol_type = other DNA

SEQ ID NO: 14012 - protein, 16 aa, synthetic construct
  REGION 1..16: note = Description of Artificial Sequence: Synthetic peptide
EINHSGSTNYNPSLKS

SEQ ID NO: 14013 - DNA, 51 bp, synthetic construct
  misc_feature 1..51: note = Description of Artificial Sequence: Synthetic oligonucleotide
  source 1..51: mol_type = other DNA
gttatatggtatgaaggaagtaatacatactatgcagactccgtgaagggc

SEQ ID NO: 14014 - protein, 17 aa, synthetic construct
  REGION 1..17: note = Description of Artificial Sequence: Synthetic peptide
VIWYEGSNTYYADSVKG

SEQ ID NO: 14015 - DNA, 51 bp, synthetic construct; identical to SEQ ID NO: 12103
  misc_feature 1..51: note = Description of Artificial Sequence: Synthetic oligonucleotide
  source 1..51: mol_type = other DNA

SEQ ID NO: 14016 - protein, 17 aa, synthetic construct
  REGION 1..17: note = Description of Artificial Sequence: Synthetic peptide
WMNPNSGNTGYAQKFQG

SEQ ID NO: 14017 - DNA, 51 bp, synthetic construct; identical to SEQ ID NO: 12161
  misc_feature 1..51: note = Description of Artificial Sequence: Synthetic oligonucleotide
  source 1..51: mol_type = other DNA

SEQ ID NO: 14018 - protein, 17 aa, synthetic construct
  REGION 1..17: note = Description of Artificial Sequence: Synthetic peptide
WMHPNSGNTGYAQKFQG

SEQ ID NO: 14019 - DNA, 48 bp, synthetic construct; identical to SEQ ID NO: 13715
  misc_feature 1..48: note = Description of Artificial Sequence: Synthetic oligonucleotide
  source 1..48: mol_type = other DNA

SEQ ID NO: 14020 - protein, 16 aa, synthetic construct
  REGION 1..16: note = Description of Artificial Sequence: Synthetic peptide
EINHSGSTNYNPSLKS

SEQ ID NO: 14021 - DNA, 48 bp, synthetic construct; identical to SEQ ID NO: 13761
  misc_feature 1..48: note = Description of Artificial Sequence: Synthetic oligonucleotide
  source 1..48: mol_type = other DNA

SEQ ID NO: 14022 - protein, 16 aa, synthetic construct
  REGION 1..16: note = Description of Artificial Sequence: Synthetic peptide
AIGTAGDTYYPGSVKG

SEQ ID NO: 14023 - DNA, 51 bp, synthetic construct; identical to SEQ ID NO: 12161
  misc_feature 1..51: note = Description of Artificial Sequence: Synthetic oligonucleotide
  source 1..51: mol_type = other DNA

SEQ ID NO: 14024 - protein, 17 aa, synthetic construct
  REGION 1..17: note = Description of Artificial Sequence: Synthetic peptide
WMHPNSGNTGYAQKFQG

SEQ ID NO: 14025 - DNA, 48 bp, synthetic construct; identical to SEQ ID NO: 13715
  misc_feature 1..48: note = Description of Artificial Sequence: Synthetic oligonucleotide
  source 1..48: mol_type = other DNA

SEQ ID NO: 14026 - protein, 16 aa, synthetic construct
  REGION 1..16: note = Description of Artificial Sequence: Synthetic peptide
EINHSGSTNYNPSLKS

SEQ ID NO: 14027 - DNA, 48 bp, synthetic construct; identical to SEQ ID NO: 13715
  misc_feature 1..48: note = Description of Artificial Sequence: Synthetic oligonucleotide
  source 1..48: mol_type = other DNA

SEQ ID NO: 14028 - protein, 16 aa, synthetic construct
  REGION 1..16: note = Description of Artificial Sequence: Synthetic peptide
EINHSGSTNYNPSLKS

SEQ ID NO: 14029 - DNA, 48 bp, synthetic construct; identical to SEQ ID NO: 13715
  misc_feature 1..48: note = Description of Artificial Sequence: Synthetic oligonucleotide
  source 1..48: mol_type = other DNA

SEQ ID NO: 14030 - protein, 16 aa, synthetic construct
  REGION 1..16: note = Description of Artificial Sequence: Synthetic peptide
EINHSGSTNYNPSLKS

SEQ ID NO: 14031 - DNA, 48 bp, synthetic construct; identical to SEQ ID NO: 13715
  misc_feature 1..48: note = Description of Artificial Sequence: Synthetic oligonucleotide
  source 1..48: mol_type = other DNA

SEQ ID NO: 14032 - protein, 16 aa, synthetic construct
  REGION 1..16: note = Description of Artificial Sequence: Synthetic peptide
EINHSGSTNYNPSLKS

SEQ ID NO: 14033 - DNA, 51 bp, synthetic construct; identical to SEQ ID NO: 12161
  misc_feature 1..51: note = Description of Artificial Sequence: Synthetic oligonucleotide
  source 1..51: mol_type = other DNA

SEQ ID NO: 14034 - protein, 17 aa, synthetic construct
  REGION 1..17: note = Description of Artificial Sequence: Synthetic peptide
WMHPNSGNTGYAQKFQG

SEQ ID NO: 14035 - DNA, 48 bp, synthetic construct; identical to SEQ ID NO: 13715
  misc_feature 1..48: note = Description of Artificial Sequence: Synthetic oligonucleotide
  source 1..48: mol_type = other DNA

SEQ ID NO: 14036 - protein, 16 aa, synthetic construct
  REGION 1..16: note = Description of Artificial Sequence: Synthetic peptide
EINHSGSTNYNPSLKS

SEQ ID NO: 14037 - DNA, 48 bp, synthetic construct; identical to SEQ ID NO: 13789
  misc_feature 1..48: note = Description of Artificial Sequence: Synthetic oligonucleotide
  source 1..48: mol_type = other DNA

SEQ ID NO: 14038 - protein, 16 aa, synthetic construct
  REGION 1..16: note = Description of Artificial Sequence: Synthetic peptide
EINYRGSTNYNPSLKS

SEQ ID NO: 14039 - DNA, 48 bp, synthetic construct; identical to SEQ ID NO: 13761
  misc_feature 1..48: note = Description of Artificial Sequence: Synthetic oligonucleotide
  source 1..48: mol_type = other DNA

SEQ ID NO: 14040 - protein, 16 aa, synthetic construct
  REGION 1..16: note = Description of Artificial Sequence: Synthetic peptide
AIGTAGDTYYPGSVKG

SEQ ID NO: 14041 - DNA, 51 bp, synthetic construct; identical to SEQ ID NO: 12123
  misc_feature 1..51: note = Description of Artificial Sequence: Synthetic oligonucleotide
  source 1..51: mol_type = other DNA

SEQ ID NO: 14042 - protein, 17 aa, synthetic construct
  REGION 1..17: note = Description of Artificial Sequence: Synthetic peptide
VIWYDGSNKYYADSVKG

SEQ ID NO: 14043 - DNA, 48 bp, synthetic construct; identical to SEQ ID NO: 13715
  misc_feature 1..48: note = Description of Artificial Sequence: Synthetic oligonucleotide
  source 1..48: mol_type = other DNA

SEQ ID NO: 14044 - protein, 16 aa, synthetic construct
  REGION 1..16: note = Description of Artificial Sequence: Synthetic peptide
EINHSGSTNYNPSLKS

SEQ ID NO: 14045 - DNA, 51 bp, synthetic construct; identical to SEQ ID NO: 12161
  misc_feature 1..51: note = Description of Artificial Sequence: Synthetic oligonucleotide
  source 1..51: mol_type = other DNA

SEQ ID NO: 14046 - protein, 17 aa, synthetic construct
  REGION 1..17: note = Description of Artificial Sequence: Synthetic peptide
WMHPNSGNTGYAQKFQG

SEQ ID NO: 14047 - DNA, 48 bp, synthetic construct; identical to SEQ ID NO: 13715
  misc_feature 1..48: note = Description of Artificial Sequence: Synthetic oligonucleotide
  source 1..48: mol_type = other DNA

SEQ ID NO: 14048 - protein, 16 aa, synthetic construct
  REGION 1..16: note = Description of Artificial Sequence: Synthetic peptide
EINHSGSTNYNPSLKS

SEQ ID NO: 14049 - DNA, 51 bp, synthetic construct; identical to SEQ ID NO: 12103
  misc_feature 1..51: note = Description of Artificial Sequence: Synthetic oligonucleotide
  source 1..51: mol_type = other DNA

SEQ ID NO: 14050 - protein, 17 aa, synthetic construct
  REGION 1..17: note = Description of Artificial Sequence: Synthetic peptide
WMNPNSGNTGYAQKFQG

SEQ ID NO: 14051 - DNA, 48 bp, synthetic construct; identical to SEQ ID NO: 13715
  misc_feature 1..48: note = Description of Artificial Sequence: Synthetic oligonucleotide
  source 1..48: mol_type = other DNA

SEQ ID NO: 14052 - protein, 16 aa, synthetic construct
  REGION 1..16: note = Description of Artificial Sequence: Synthetic peptide
EINHSGSTNYNPSLKS

SEQ ID NO: 14053 - DNA, 48 bp, synthetic construct; identical to SEQ ID NO: 13715
  misc_feature 1..48: note = Description of Artificial Sequence: Synthetic oligonucleotide
  source 1..48: mol_type = other DNA

SEQ ID NO: 14054 - protein, 16 aa, synthetic construct
  REGION 1..16: note = Description of Artificial Sequence: Synthetic peptide
EINHSGSTNYNPSLKS

SEQ ID NO: 14055 - DNA, 48 bp, synthetic construct; identical to SEQ ID NO: 13731
  misc_feature 1..48: note = Description of Artificial Sequence: Synthetic oligonucleotide
  source 1..48: mol_type = other DNA

SEQ ID NO: 14056 - protein, 16 aa, synthetic construct
  REGION 1..16: note = Description of Artificial Sequence: Synthetic peptide
EINHSGRTNYNPSLKS

SEQ ID NO: 14057 - DNA, 48 bp, synthetic construct; identical to SEQ ID NO: 13735
  misc_feature 1..48: note = Description of Artificial Sequence: Synthetic oligonucleotide
  source 1..48: mol_type = other DNA

SEQ ID NO: 14058 - protein, 16 aa, synthetic construct
  REGION 1..16: note = Description of Artificial Sequence: Synthetic peptide
EINYSGRTNYNPSLKS

SEQ ID NO: 14059 - DNA, 51 bp, synthetic construct; identical to SEQ ID NO: 12123
  misc_feature 1..51: note = Description of Artificial Sequence: Synthetic oligonucleotide
  source 1..51: mol_type = other DNA

SEQ ID NO: 14060 - protein, 17 aa, synthetic construct
  REGION 1..17: note = Description of Artificial Sequence: Synthetic peptide
VIWYDGSNKYYADSVKG

SEQ ID NO: 14061 - DNA, 51 bp, synthetic construct; identical to SEQ ID NO: 13923
  misc_feature 1..51: note = Description of Artificial Sequence: Synthetic oligonucleotide
  source 1..51: mol_type = other DNA

SEQ ID NO: 14062 - protein, 17 aa, synthetic construct
  REGION 1..17: note = Description of Artificial Sequence: Synthetic peptide
WMNPNSGNTGYAQKFQD

SEQ ID NO: 14063 - DNA, 51 bp, synthetic construct; identical to SEQ ID NO: 12103
  misc_feature 1..51: note = Description of Artificial Sequence: Synthetic oligonucleotide
  source 1..51: mol_type = other DNA

SEQ ID NO: 14064 - protein, 17 aa, synthetic construct
  REGION 1..17: note = Description of Artificial Sequence: Synthetic peptide
WMNPNSGNTGYAQKFQG

SEQ ID NO: 14065 - DNA, 51 bp, synthetic construct; identical to SEQ ID NO: 12103
  misc_feature 1..51: note = Description of Artificial Sequence: Synthetic oligonucleotide
  source 1..51: mol_type = other DNA

SEQ ID NO: 14066 - protein, 17 aa, synthetic construct
  REGION 1..17: note = Description of Artificial Sequence: Synthetic peptide
WMNPNSGNTGYAQKFQG

SEQ ID NO: 14067 - DNA, 51 bp, synthetic construct; identical to SEQ ID NO: 12103
  misc_feature 1..51: note = Description of Artificial Sequence: Synthetic oligonucleotide
  source 1..51: mol_type = other DNA

SEQ ID NO: 14068 - protein, 17 aa, synthetic construct
  REGION 1..17: note = Description of Artificial Sequence: Synthetic peptide
WMNPNSGNTGYAQKFQG

SEQ ID NO: 14069 - DNA, 48 bp, synthetic construct; identical to SEQ ID NO: 13715
  misc_feature 1..48: note = Description of Artificial Sequence: Synthetic oligonucleotide
  source 1..48: mol_type = other DNA

SEQ ID NO: 14070 - protein, 16 aa, synthetic construct
  REGION 1..16: note = Description of Artificial Sequence: Synthetic peptide
EINHSGSTNYNPSLKS

SEQ ID NO: 14071 - DNA, 48 bp, synthetic construct; identical to SEQ ID NO: 13715
  misc_feature 1..48: note = Description of Artificial Sequence: Synthetic oligonucleotide
  source 1..48: mol_type = other DNA

SEQ ID NO: 14072 - protein, 16 aa, synthetic construct
  REGION 1..16: note = Description of Artificial Sequence: Synthetic peptide
EINHSGSTNYNPSLKS

SEQ ID NO: 14073 - DNA, 51 bp, synthetic construct; identical to SEQ ID NO: 13705
  misc_feature 1..51: note = Description of Artificial Sequence: Synthetic oligonucleotide
  source 1..51: mol_type = other DNA

SEQ ID NO: 14074 - protein, 17 aa, synthetic construct
  REGION 1..17: note = Description of Artificial Sequence: Synthetic peptide
VIWYDGSNKYYADSVKG

SEQ ID NO: 14075 - DNA, 51 bp, synthetic construct; identical to SEQ ID NO: 12103
  misc_feature 1..51: note = Description of Artificial Sequence: Synthetic oligonucleotide
  source 1..51: mol_type = other DNA

SEQ ID NO: 14076 - protein, 17 aa, synthetic construct
  REGION 1..17: note = Description of Artificial Sequence: Synthetic peptide
WMNPNSGNTGYAQKFQG

SEQ ID NO: 14077 - DNA, 48 bp, synthetic construct; identical to SEQ ID NO: 13715
  misc_feature 1..48: note = Description of Artificial Sequence: Synthetic oligonucleotide
  source 1..48: mol_type = other DNA

SEQ ID NO: 14078 - protein, 16 aa, synthetic construct
  REGION 1..16: note = Description of Artificial Sequence: Synthetic peptide
EINHSGSTNYNPSLKS

SEQ ID NO: 14079 - DNA, 48 bp, synthetic construct; identical to SEQ ID NO: 13715
  misc_feature 1..48: note = Description of Artificial Sequence: Synthetic oligonucleotide
  source 1..48: mol_type = other DNA

SEQ ID NO: 14080 - protein, 16 aa, synthetic construct
  REGION 1..16: note = Description of Artificial Sequence: Synthetic peptide
EINHSGSTNYNPSLKS

SEQ ID NO: 14081 - DNA, 48 bp, synthetic construct; identical to SEQ ID NO: 13715
  misc_feature 1..48: note = Description of Artificial Sequence: Synthetic oligonucleotide
  source 1..48: mol_type = other DNA

SEQ ID NO: 14082 - protein, 16 aa, synthetic construct
  REGION 1..16: note = Description of Artificial Sequence: Synthetic peptide
EINHSGSTNYNPSLKS

SEQ ID NO: 14083 - DNA, 51 bp, synthetic construct; identical to SEQ ID NO: 12103
  misc_feature 1..51: note = Description of Artificial Sequence: Synthetic oligonucleotide
  source 1..51: mol_type = other DNA

SEQ ID NO: 14084 - protein, 17 aa, synthetic construct
  REGION 1..17: note = Description of Artificial Sequence: Synthetic peptide
WMNPNSGNTGYAQKFQG

SEQ ID NO: 14085 - DNA, 51 bp, synthetic construct; identical to SEQ ID NO: 13727
  misc_feature 1..51: note = Description of Artificial Sequence: Synthetic oligonucleotide
  source 1..51: mol_type = other DNA

SEQ ID NO: 14086 - protein, 17 aa, synthetic construct
  REGION 1..17: note = Description of Artificial Sequence: Synthetic peptide
WMHPNNGNTGYAQKFQG

SEQ ID NO: 14087 - DNA, 51 bp, synthetic construct; identical to SEQ ID NO: 13795
  misc_feature 1..51: note = Description of Artificial Sequence: Synthetic oligonucleotide
  source 1..51: mol_type = other DNA

SEQ ID NO: 14088 - protein, 17 aa, synthetic construct
  REGION 1..17: note = Description of Artificial Sequence: Synthetic peptide
WMHPNSGNTGYAQKFQG

SEQ ID NO: 14089 - DNA, 48 bp, synthetic construct; identical to SEQ ID NO: 13709
  misc_feature 1..48: note = Description of Artificial Sequence: Synthetic oligonucleotide
  source 1..48: mol_type = other DNA

SEQ ID NO: 14090 - protein, 16 aa, synthetic construct
  REGION 1..16: note = Description of Artificial Sequence: Synthetic peptide
SIYYSGYTSYNPSLKS

SEQ ID NO: 14091 - DNA, 51 bp, synthetic construct; identical to SEQ ID NO: 12103
  misc_feature 1..51: note = Description of Artificial Sequence: Synthetic oligonucleotide
  source 1..51: mol_type = other DNA

SEQ ID NO: 14092 - protein, 17 aa, synthetic construct
  REGION 1..17: note = Description of Artificial Sequence: Synthetic peptide
WMNPNSGNTGYAQKFQG

SEQ ID NO: 14093 - DNA, 51 bp, synthetic construct; identical to SEQ ID NO: 12103
  misc_feature 1..51: note = Description of Artificial Sequence: Synthetic oligonucleotide
  source 1..51: mol_type = other DNA

SEQ ID NO: 14094 - protein, 17 aa, synthetic construct
  REGION 1..17: note = Description of Artificial Sequence: Synthetic peptide
WMNPNSGNTGYAQKFQG

SEQ ID NO: 14095 - DNA, 51 bp, synthetic construct; identical to SEQ ID NO: 12161
  misc_feature 1..51: note = Description of Artificial Sequence: Synthetic oligonucleotide
  source 1..51: mol_type = other DNA

SEQ ID NO: 14096 - protein, 17 aa, synthetic construct
  REGION 1..17: note = Description of Artificial Sequence: Synthetic peptide
WMHPNSGNTGYAQKFQG

SEQ ID NO: 14097 - DNA, 51 bp, synthetic construct
  misc_feature 1..51: note = Description of Artificial Sequence: Synthetic oligonucleotide
  source 1..51: mol_type = other DNA
tggatgaaccctaacagtcgtaacacaggctatgcacagaagttccagggc

SEQ ID NO: 14098 - protein, 17 aa, synthetic construct
  REGION 1..17: note = Description of Artificial Sequence: Synthetic peptide
WMNPNSRNTGYAQKFQG

SEQ ID NO: 14099 - DNA, 51 bp, synthetic construct; identical to SEQ ID NO: 12161
  misc_feature 1..51: note = Description of Artificial Sequence: Synthetic oligonucleotide
  source 1..51: mol_type = other DNA

SEQ ID NO: 14100 - protein, 17 aa, synthetic construct
  REGION 1..17: note = Description of Artificial Sequence: Synthetic peptide
WMHPNSGNTGYAQKFQG

SEQ ID NO: 14101 - DNA, 48 bp, synthetic construct; identical to SEQ ID NO: 13715
  misc_feature 1..48: note = Description of Artificial Sequence: Synthetic oligonucleotide
  source 1..48: mol_type = other DNA

SEQ ID NO: 14102 - protein, 16 aa, synthetic construct
  REGION 1..16: note = Description of Artificial Sequence: Synthetic peptide
EINHSGSTNYNPSLKS

SEQ ID NO: 14103 - DNA, 51 bp, synthetic construct; identical to SEQ ID NO: 12161
  misc_feature 1..51: note = Description of Artificial Sequence: Synthetic oligonucleotide
  source 1..51: mol_type = other DNA

SEQ ID NO: 14104 - protein, 17 aa, synthetic construct
  REGION 1..17: note = Description of Artificial Sequence: Synthetic peptide
WMHPNSGNTGYAQKFQG

SEQ ID NO: 14105 - DNA, 48 bp, synthetic construct; identical to SEQ ID NO: 13715
  misc_feature 1..48: note = Description of Artificial Sequence: Synthetic oligonucleotide
  source 1..48: mol_type = other DNA

SEQ ID NO: 14106 - protein, 16 aa, synthetic construct
  REGION 1..16: note = Description of Artificial Sequence: Synthetic peptide
EINHSGSTNYNPSLKS

SEQ ID NO: 14107 - DNA, 51 bp, synthetic construct; identical to SEQ ID NO: 12127
  misc_feature 1..51: note = Description of Artificial Sequence: Synthetic oligonucleotide
  source 1..51: mol_type = other DNA

SEQ ID NO: 14108 - protein, 17 aa, synthetic construct
  REGION 1..17: note = Description of Artificial Sequence: Synthetic peptide
IIWYDGSNKYYADSVKG

SEQ ID NO: 14109 - DNA, 48 bp, synthetic construct
  misc_feature 1..48: note = Description of Artificial Sequence: Synthetic oligonucleotide
  source 1..48: mol_type = other DNA
agtatatattatagtgggagtacctcctacaacccgtccctcaagagt

SEQ ID NO: 14110 - protein, 16 aa, synthetic construct
  REGION 1..16: note = Description of Artificial Sequence: Synthetic peptide
SIYYSGSTSYNPSLKS

SEQ ID NO: 14111 - DNA, 51 bp, synthetic construct; identical to SEQ ID NO: 12619
  misc_feature 1..51: note = Description of Artificial Sequence: Synthetic oligonucleotide
  source 1..51: mol_type = other DNA

SEQ ID NO: 14112 - protein, 17 aa, synthetic construct
  REGION 1..17: note = Description of Artificial Sequence: Synthetic peptide
AISGRGGNTFYADSVKG

SEQ ID NO: 14113 - DNA, 51 bp, synthetic construct
  misc_feature 1..51: note = Description of Artificial Sequence: Synthetic oligonucleotide
  source 1..51: mol_type = other DNA
gttatatggtatgatggaagttataaatactatgcagactccgtgaagggc

SEQ ID NO: 14114 - protein, 17 aa, synthetic construct
  REGION 1..17: note = Description of Artificial Sequence: Synthetic peptide
VIWYDGSYKYYADSVKG

SEQ ID NO: 14115 - DNA, 51 bp, synthetic construct
  misc_feature 1..51: note = Description of Artificial Sequence: Synthetic oligonucleotide
  source 1..51: mol_type = other DNA
tgggtgcaccctaacagtggtaacacaggctatgcacagaagttccagggc

SEQ ID NO: 14116 - protein, 17 aa, synthetic construct
  REGION 1..17: note = Description of Artificial Sequence: Synthetic peptide
WVHPNSGNTGYAQKFQG

SEQ ID NO: 14117 - DNA, 48 bp, synthetic construct
  misc_feature 1..48: note = Description of Artificial Sequence: Synthetic oligonucleotide
  source 1..48: mol_type = other DNA
tacagctattacagtgggagcacctactacaacccgtccctcaagagt

SEQ ID NO: 14118 - protein, 16 aa, synthetic construct
  REGION 1..16: note = Description of Artificial Sequence: Synthetic peptide
YSYYSGSTYYNPSLKS

SEQ ID NO: 14119 - DNA, 51 bp, synthetic construct; identical to SEQ ID NO: 13377
  misc_feature 1..51: note = Description of Artificial Sequence: Synthetic oligonucleotide
  source 1..51: mol_type = other DNA

SEQ ID NO: 14120 - protein, 17 aa, synthetic construct
  REGION 1..17: note = Description of Artificial Sequence: Synthetic peptide
AISGSGGNTFYADSVKG

SEQ ID NO: 14121 - DNA, 51 bp, synthetic construct; identical to SEQ ID NO: 12161
  misc_feature 1..51: note = Description of Artificial Sequence: Synthetic oligonucleotide
  source 1..51: mol_type = other DNA

SEQ ID NO: 14122 - protein, 17 aa, synthetic construct
  REGION 1..17: note = Description of Artificial Sequence: Synthetic peptide
WMHPNSGNTGYAQKFQG

SEQ ID NO: 14123 - DNA, 51 bp, synthetic construct; identical to SEQ ID NO: 12619
  misc_feature 1..51: note = Description of Artificial Sequence: Synthetic oligonucleotide
  source 1..51: mol_type = other DNA

SEQ ID NO: 14124 - protein, 17 aa, synthetic construct
  REGION 1..17: note = Description of Artificial Sequence: Synthetic peptide
AISGRGGNTFYADSVKG

SEQ ID NO: 14125 - DNA, 51 bp, synthetic construct; identical to SEQ ID NO: 12161
  misc_feature 1..51: note = Description of Artificial Sequence: Synthetic oligonucleotide
  source 1..51: mol_type = other DNA

SEQ ID NO: 14126 - protein, 17 aa, synthetic construct
  REGION 1..17: note = Description of Artificial Sequence: Synthetic peptide
WMHPNSGNTGYAQKFQG

SEQ ID NO: 14127 - DNA, 51 bp, synthetic construct
  misc_feature 1..51: note = Description of Artificial Sequence: Synthetic oligonucleotide
  source 1..51: mol_type = other DNA
gtgatatggtttgatgaaagtaataaacactatggagactccgtgaagggc

SEQ ID NO: 14128 - protein, 17 aa, synthetic construct
  REGION 1..17: note = Description of Artificial Sequence: Synthetic peptide
VIWFDESNKHYGDSVKG

SEQ ID NO: 14129 - DNA, 51 bp, synthetic construct
  misc_feature 1..51: note = Description of Artificial Sequence: Synthetic oligonucleotide
  source 1..51: mol_type = other DNA
tccattagtggtagtggtagctacacatactacgcagactcagtgaagggc

SEQ ID NO: 14130 - protein, 17 aa, synthetic construct
  REGION 1..17: note = Description of Artificial Sequence: Synthetic peptide
SISGSGSYTYYADSVKG

SEQ ID NO: 14131 - DNA, 51 bp, synthetic construct; identical to SEQ ID NO: 12123
  misc_feature 1..51: note = Description of Artificial Sequence: Synthetic oligonucleotide
  source 1..51: mol_type = other DNA

SEQ ID NO: 14132 - protein, 17 aa, synthetic construct
  REGION 1..17: note = Description of Artificial Sequence: Synthetic peptide
VIWYDGSNKYYADSVKG

SEQ ID NO: 14133 - DNA, 48 bp, synthetic construct
  misc_feature 1..48: note = Description of Artificial Sequence: Synthetic oligonucleotide
  source 1..48: mol_type = other DNA
ttcatctattacactgggagcacctactacaacccgtccctcaagagt

SEQ ID NO: 14134 - protein, 16 aa, synthetic construct
  REGION 1..16: note = Description of Artificial Sequence: Synthetic peptide
FIYYTGSTYYNPSLKS

SEQ ID NO: 14135 - DNA, 48 bp, synthetic construct
  misc_feature 1..48: note = Description of Artificial Sequence: Synthetic oligonucleotide
  source 1..48: mol_type = other DNA
tacatctattacagtgggggcacctactacaacccgtccctcaagagt

SEQ ID NO: 14136 - protein, 16 aa, synthetic construct
  REGION 1..16: note = Description of Artificial Sequence: Synthetic peptide
YIYYSGGTYYNPSLKS

SEQ ID NO: 14137 - DNA, 51 bp, synthetic construct; identical to SEQ ID NO: 12103
  misc_feature 1..51: note = Description of Artificial Sequence: Synthetic oligonucleotide
  source 1..51: mol_type = other DNA

SEQ ID NO: 14138 - protein, 17 aa, synthetic construct
  REGION 1..17: note = Description of Artificial Sequence: Synthetic peptide
WMNPNSGNTGYAQKFQG

SEQ ID NO: 14139 - DNA, 51 bp, synthetic construct; identical to SEQ ID NO: 14115
  misc_feature 1..51: note = Description of Artificial Sequence: Synthetic oligonucleotide
  source 1..51: mol_type = other DNA

SEQ ID NO: 14140 - protein, 17 aa, synthetic construct
  REGION 1..17: note = Description of Artificial Sequence: Synthetic peptide
WVHPNSGNTGYAQKFQG

SEQ ID NO: 14141 - DNA, 51 bp, synthetic construct; identical to SEQ ID NO: 12167
  misc_feature 1..51: note = Description of Artificial Sequence: Synthetic oligonucleotide
  source 1..51: mol_type = other DNA

SEQ ID NO: 14142 - protein, 17 aa, synthetic construct
  REGION 1..17: note = Description of Artificial Sequence: Synthetic peptide
VIWYDGSNKYYADSVKG

SEQ ID NO: 14143 - DNA, 51 bp, synthetic construct
  misc_feature 1..51: note = Description of Artificial Sequence: Synthetic oligonucleotide
  source 1..51: mol_type = other DNA
tggatgcaccccaacagtggtaacacaggctatgcacagaagttccagggc

SEQ ID NO: 14144 - protein, 17 aa, synthetic construct
  REGION 1..17: note = Description of Artificial Sequence: Synthetic peptide
WMHPNSGNTGYAQKFQG

SEQ ID NO: 14145 - DNA, 51 bp, synthetic construct; identical to SEQ ID NO: 12123
  misc_feature 1..51: note = Description of Artificial Sequence: Synthetic oligonucleotide
  source 1..51: mol_type = other DNA

SEQ ID NO: 14146 - protein, 17 aa, synthetic construct
  REGION 1..17: note = Description of Artificial Sequence: Synthetic peptide
VIWYDGSNKYYADSVKG

SEQ ID NO: 14147 - DNA, 48 bp, synthetic construct
  misc_feature 1..48: note = Description of Artificial Sequence: Synthetic oligonucleotide
  source 1..48: mol_type = other DNA
gaaatcaatcatagtggaagtaccaactacaaaccgtccctcaagagt

SEQ ID NO: 14148 - protein, 16 aa, synthetic construct
  REGION 1..16: note = Description of Artificial Sequence: Synthetic peptide
EINHSGSTNYKPSLKS

SEQ ID NO: 14149 - DNA, 51 bp, synthetic construct
  misc_feature 1..51: note = Description of Artificial Sequence: Synthetic oligonucleotide
  source 1..51: mol_type = other DNA
tccattagtggtagaaacactaccatatactatgcagactctgtgaagggc

SEQ ID NO: 14150 - protein, 17 aa, synthetic construct
  REGION 1..17: note = Description of Artificial Sequence: Synthetic peptide
SISGRNTTIYYADSVKG

SEQ ID NO: 14151 - DNA, 51 bp, synthetic construct; identical to SEQ ID NO: 12619
  misc_feature 1..51: note = Description of Artificial Sequence: Synthetic oligonucleotide
  source 1..51: mol_type = other DNA

SEQ ID NO: 14152 - protein, 17 aa, synthetic construct
  REGION 1..17: note = Description of Artificial Sequence: Synthetic peptide
AISGRGGNTFYADSVKG

SEQ ID NO: 14153 - DNA, 51 bp, synthetic construct; identical to SEQ ID NO: 12619
  misc_feature 1..51: note = Description of Artificial Sequence: Synthetic oligonucleotide
  source 1..51: mol_type = other DNA

SEQ ID NO: 14154 - protein, 17 aa, synthetic construct
  REGION 1..17: note = Description of Artificial Sequence: Synthetic peptide
AISGRGGNTFYADSVKG

SEQ ID NO: 14155 - DNA, 51 bp, synthetic construct
  misc_feature 1..51: note = Description of Artificial Sequence: Synthetic oligonucleotide
  source 1..51: mol_type = other DNA
attatctggtatgatggaagttataaatactatgcagactccgtgaagggc

SEQ ID NO: 14156 - protein, 17 aa, synthetic construct
  REGION 1..17: note = Description of Artificial Sequence: Synthetic peptide
IIWYDGSYKYYADSVKG

SEQ ID NO: 14157 - DNA, 51 bp, synthetic construct; identical to SEQ ID NO: 12619
  misc_feature 1..51: note = Description of Artificial Sequence: Synthetic oligonucleotide
  source 1..51: mol_type = other DNA

SEQ ID NO: 14158 - protein, 17 aa, synthetic construct
  REGION 1..17: note = Description of Artificial Sequence: Synthetic peptide
AISGRGGNTFYADSVKG

SEQ ID NO: 14159 - DNA, 51 bp, synthetic construct
  misc_feature 1..51: note = Description of Artificial Sequence: Synthetic oligonucleotide
  source 1..51: mol_type = other DNA
tggatgcaccctaacagtggtaacacaggctatgcacagaacttccagggc

SEQ ID NO: 14160 - protein, 17 aa, synthetic construct
  REGION 1..17: note = Description of Artificial Sequence: Synthetic peptide
WMHPNSGNTGYAQNFQG

SEQ ID NO: 14161 - DNA, 51 bp, synthetic construct; identical to SEQ ID NO: 13377
  misc_feature 1..51: note = Description of Artificial Sequence: Synthetic oligonucleotide
  source 1..51: mol_type = other DNA

SEQ ID NO: 14162 - protein, 17 aa, synthetic construct
  REGION 1..17: note = Description of Artificial Sequence: Synthetic peptide
AISGSGGNTFYADSVKG

SEQ ID NO: 14163 - DNA, 51 bp, synthetic construct; identical to SEQ ID NO: 12123
  misc_feature 1..51: note = Description of Artificial Sequence: Synthetic oligonucleotide
  source 1..51: mol_type = other DNA

SEQ ID NO: 14164 - protein, 17 aa, synthetic construct
  REGION 1..17: note = Description of Artificial Sequence: Synthetic peptide
VIWYDGSNKYYADSVKG

SEQ ID NO: 14165 - DNA, 51 bp, synthetic construct
  misc_feature 1..51: note = Description of Artificial Sequence: Synthetic oligonucleotide
  source 1..51: mol_type = other DNA
tggatccaccctaacaatggtggcacaaactatgcacagacgtttcagggc

SEQ ID NO: 14166 - protein, 17 aa, synthetic construct
  REGION 1..17: note = Description of Artificial Sequence: Synthetic peptide
WIHPNNGGTNYAQTFQG

SEQ ID NO: 14167 - DNA, 51 bp, synthetic construct; identical to SEQ ID NO: 12103
  misc_feature 1..51: note = Description of Artificial Sequence: Synthetic oligonucleotide
  source 1..51: mol_type = other DNA

SEQ ID NO: 14168 - protein, 17 aa, synthetic construct
  REGION 1..17: note = Description of Artificial Sequence: Synthetic peptide
WMNPNSGNTGYAQKFQG

SEQ ID NO: 14169 - DNA, 51 bp, synthetic construct; identical to SEQ ID NO: 12619
  misc_feature 1..51: note = Description of Artificial Sequence: Synthetic oligonucleotide
  source 1..51: mol_type = other DNA

SEQ ID NO: 14170 - protein, 17 aa, synthetic construct
  REGION 1..17: note = Description of Artificial Sequence: Synthetic peptide
AISGRGGNTFYADSVKG

SEQ ID NO: 14171 - DNA, 51 bp, synthetic construct; identical to SEQ ID NO: 12127
  misc_feature 1..51: note = Description of Artificial Sequence: Synthetic oligonucleotide
  source 1..51: mol_type = other DNA

SEQ ID NO: 14172 - protein, 17 aa, synthetic construct
  REGION 1..17: note = Description of Artificial Sequence: Synthetic peptide
IIWYDGSNKYYADSVKG

SEQ ID NO: 14173 - DNA, 51 bp, synthetic construct; identical to SEQ ID NO: 13611
  misc_feature 1..51: note = Description of Artificial Sequence: Synthetic oligonucleotide
  source 1..51: mol_type = other DNA

SEQ ID NO: 14174 - protein, 17 aa, synthetic construct
  REGION 1..17: note = Description of Artificial Sequence: Synthetic peptide
VIWYDGSNKYYGDSVKG

SEQ ID NO: 14175 - DNA, 48 bp, synthetic construct
  misc_feature 1..48: note = Description of Artificial Sequence: Synthetic oligonucleotide
  source 1..48: mol_type = other DNA
agtatctattatagtgggagcacctcctacaacccgtccctcaagagt

SEQ ID NO: 14176 - protein, 16 aa, synthetic construct
  REGION 1..16: note = Description of Artificial Sequence: Synthetic peptide
SIYYSGSTSYNPSLKS

SEQ ID NO: 14177 - DNA, 48 bp, synthetic construct; identical to SEQ ID NO: 12147
  misc_feature 1..48: note = Description of Artificial Sequence: Synthetic oligonucleotide
  source 1..48: mol_type = other DNA

SEQ ID NO: 14178 - protein, 16 aa, synthetic construct
  REGION 1..16: note = Description of Artificial Sequence: Synthetic peptide
YIYYSGSTYYNPSLKS

SEQ ID NO: 14179 - DNA, 51 bp, synthetic construct; identical to SEQ ID NO: 14155
  misc_feature 1..51: note = Description of Artificial Sequence: Synthetic oligonucleotide
  source 1..51: mol_type = other DNA

SEQ ID NO: 14180 - protein, 17 aa, synthetic construct
  REGION 1..17: note = Description of Artificial Sequence: Synthetic peptide
IIWYDGSYKYYADSVKG

SEQ ID NO: 14181 - DNA, 51 bp, synthetic construct; identical to SEQ ID NO: 13211
  misc_feature 1..51: note = Description of Artificial Sequence: Synthetic oligonucleotide
  source 1..51: mol_type = other DNA

SEQ ID NO: 14182 - protein, 17 aa, synthetic construct
  REGION 1..17: note = Description of Artificial Sequence: Synthetic peptide
VIWYEGSNKYYADSVKG

SEQ ID NO: 14183 - DNA, 51 bp, synthetic construct; identical to SEQ ID NO: 14115
  misc_feature 1..51: note = Description of Artificial Sequence: Synthetic oligonucleotide
  source 1..51: mol_type = other DNA

SEQ ID NO: 14184 - protein, 17 aa, synthetic construct
  REGION 1..17: note = Description of Artificial Sequence: Synthetic peptide
WVHPNSGNTGYAQKFQG

SEQ ID NO: 14185 - DNA, 51 bp, synthetic construct; identical to SEQ ID NO: 12619
  misc_feature 1..51: note = Description of Artificial Sequence: Synthetic oligonucleotide
  source 1..51: mol_type = other DNA

SEQ ID NO: 14186 - protein, 17 aa, synthetic construct
  REGION 1..17: note = Description of Artificial Sequence: Synthetic peptide
AISGRGGNTFYADSVKG

SEQ ID NO: 14187 - DNA, 51 bp, synthetic construct; identical to SEQ ID NO: 12161
  misc_feature 1..51: note = Description of Artificial Sequence: Synthetic oligonucleotide
  source 1..51: mol_type = other DNA

SEQ ID NO: 14188 - protein, 17 aa, synthetic construct
  REGION 1..17: note = Description of Artificial Sequence: Synthetic peptide
WMHPNSGNTGYAQKFQG

SEQ ID NO: 14189 - DNA, 51 bp, synthetic construct
  misc_feature 1..51: note = Description of Artificial Sequence: Synthetic oligonucleotide
  source 1..51: mol_type = other DNA
tggatgcaccctaacagtggtaacacagactatgcacagaagttccagggc

SEQ ID NO: 14190 - protein, 17 aa, synthetic construct
  REGION 1..17: note = Description of Artificial Sequence: Synthetic peptide
WMHPNSGNTDYAQKFQG

SEQ ID NO: 14191 - DNA, 48 bp, synthetic construct; identical to SEQ ID NO: 12147
  misc_feature 1..48: note = Description of Artificial Sequence: Synthetic oligonucleotide
  source 1..48: mol_type = other DNA

SEQ ID NO: 14192 - protein, 16 aa, synthetic construct
  REGION 1..16: note = Description of Artificial Sequence: Synthetic peptide
YIYYSGSTYYNPSLKS

SEQ ID NO: 14193 - DNA, 51 bp, synthetic construct; identical to SEQ ID NO: 12899
  misc_feature 1..51: note = Description of Artificial Sequence: Synthetic oligonucleotide
  source 1..51: mol_type = other DNA

SEQ ID NO: 14194 - protein, 17 aa, synthetic construct
  REGION 1..17: note = Description of Artificial Sequence: Synthetic peptide
VISGSGGSTFYADSVKG

SEQ ID NO: 14195 - DNA, 51 bp, synthetic construct; identical to SEQ ID NO: 13377
  misc_feature 1..51: note = Description of Artificial Sequence: Synthetic oligonucleotide
  source 1..51: mol_type = other DNA

SEQ ID NO: 14196 - protein, 17 aa, synthetic construct
  REGION 1..17: note = Description of Artificial Sequence: Synthetic peptide
AISGSGGNTFYADSVKG

SEQ ID NO: 14197 - DNA, 48 bp, synthetic construct; identical to SEQ ID NO: 14117
  misc_feature 1..48: note = Description of Artificial Sequence: Synthetic oligonucleotide
  source 1..48: mol_type = other DNA

SEQ ID NO: 14198 - protein, 16 aa, synthetic construct
  REGION 1..16: note = Description of Artificial Sequence: Synthetic peptide
YSYYSGSTYYNPSLKS

SEQ ID NO: 14199 - DNA, 51 bp, synthetic construct; identical to SEQ ID NO: 12619
  misc_feature 1..51: note = Description of Artificial Sequence: Synthetic oligonucleotide
  source 1..51: mol_type = other DNA

SEQ ID NO: 14200 - protein, 17 aa, synthetic construct
  REGION 1..17: note = Description of Artificial Sequence: Synthetic peptide
AISGRGGNTFYADSVKG

SEQ ID NO: 14201 - DNA, 51 bp, synthetic construct; identical to SEQ ID NO: 12167
  misc_feature 1..51: note = Description of Artificial Sequence: Synthetic oligonucleotide
  source 1..51: mol_type = other DNA

SEQ ID NO: 14202 - protein, 17 aa, synthetic construct
  REGION 1..17: note = Description of Artificial Sequence: Synthetic peptide
VIWYDGSNKYYADSVKG

SEQ ID NO: 14203 - DNA, 51 bp, synthetic construct; identical to SEQ ID NO: 12619
  misc_feature 1..51: note = Description of Artificial Sequence: Synthetic oligonucleotide
  source 1..51: mol_type = other DNA

SEQ ID NO: 14204 - protein, 17 aa, synthetic construct
  REGION 1..17: note = Description of Artificial Sequence: Synthetic peptide
AISGRGGNTFYADSVKG

SEQ ID NO: 14205 - DNA, 51 bp, synthetic construct
  misc_feature 1..51: note = Description of Artificial Sequence: Synthetic oligonucleotide
  source 1..51: mol_type = other DNA
gttatatggtatgaagaaaataataaatactatgcagactccgtgaagggc

SEQ ID NO: 14206 - protein, 17 aa, synthetic construct
  REGION 1..17: note = Description of Artificial Sequence: Synthetic peptide
VIWYEENNKYYADSVKG

SEQ ID NO: 14207 - DNA, 51 bp, synthetic construct; identical to SEQ ID NO: 12161
  misc_feature 1..51: note = Description of Artificial Sequence: Synthetic oligonucleotide
  source 1..51: mol_type = other DNA

SEQ ID NO: 14208 - protein, 17 aa, synthetic construct
  REGION 1..17: note = Description of Artificial Sequence: Synthetic peptide
WMHPNSGNTGYAQKFQG

SEQ ID NO: 14209 - DNA, 51 bp, synthetic construct; identical to SEQ ID NO: 12123
  misc_feature 1..51: note = Description of Artificial Sequence: Synthetic oligonucleotide
  source 1..51: mol_type = other DNA

SEQ ID NO: 14210 - protein, 17 aa, synthetic construct
  REGION 1..17: note = Description of Artificial Sequence: Synthetic peptide
VIWYDGSNKYYADSVKG

SEQ ID NO: 14211 - DNA, 51 bp, synthetic construct; identical to SEQ ID NO: 13377
  misc_feature 1..51: note = Description of Artificial Sequence: Synthetic oligonucleotide
  source 1..51: mol_type = other DNA

SEQ ID NO: 14212 - protein, 17 aa, synthetic construct
  REGION 1..17: note = Description of Artificial Sequence: Synthetic peptide
AISGSGGNTFYADSVKG

SEQ ID NO: 14213 - DNA, 51 bp, synthetic construct; identical to SEQ ID NO: 12161
  misc_feature 1..51: note = Description of Artificial Sequence: Synthetic oligonucleotide
  source 1..51: mol_type = other DNA

SEQ ID NO: 14214 - protein, 17 aa, synthetic construct
  REGION 1..17: note = Description of Artificial Sequence: Synthetic peptide
WMHPNSGNTGYAQKFQG

SEQ ID NO: 14215 - DNA, 51 bp, synthetic construct; identical to SEQ ID NO: 14205
  misc_feature 1..51: note = Description of Artificial Sequence: Synthetic oligonucleotide
  source 1..51: mol_type = other DNA

SEQ ID NO: 14216 - protein, 17 aa, synthetic construct
  REGION 1..17: note = Description of Artificial Sequence: Synthetic peptide
VIWYEENNKYYADSVKG

SEQ ID NO: 14217 - DNA, 51 bp, synthetic construct
  misc_feature 1..51: note = Description of Artificial Sequence: Synthetic oligonucleotide
  source 1..51: mol_type = other DNA
tacattagtaggagtagtagtaccatatactacgcagactctgtgaagggc

SEQ ID NO: 14218 - protein, 17 aa, synthetic construct
  REGION 1..17: note = Description of Artificial Sequence: Synthetic peptide
YISRSSSTIYYADSVKG

SEQ ID NO: 14219 - DNA, 51 bp, synthetic construct; identical to SEQ ID NO: 12127
  misc_feature 1..51: note = Description of Artificial Sequence: Synthetic oligonucleotide
  source 1..51: mol_type = other DNA

SEQ ID NO: 14220 - protein, 17 aa, synthetic construct
  REGION 1..17: note = Description of Artificial Sequence: Synthetic peptide
IIWYDGSNKYYADSVKG

SEQ ID NO: 14221 - DNA, 51 bp, synthetic construct; identical to SEQ ID NO: 13377
  misc_feature 1..51: note = Description of Artificial Sequence: Synthetic oligonucleotide
  source 1..51: mol_type = other DNA

SEQ ID NO: 14222 - protein, 17 aa, synthetic construct
  REGION 1..17: note = Description of Artificial Sequence: Synthetic peptide
AISGSGGNTFYADSVKG

SEQ ID NO: 14223 - DNA, 51 bp, synthetic construct
  misc_feature 1..51: note = Description of Artificial Sequence: Synthetic oligonucleotide
  source 1..51: mol_type = other DNA
gttatattctatgatggaagtaataaacactatgcagactccgtgaagggc

SEQ ID NO: 14224 - protein, 17 aa, synthetic construct
  REGION 1..17: note = Description of Artificial Sequence: Synthetic peptide
VIFYDGSNKHYADSVKG

SEQ ID NO: 14225 - DNA, 51 bp, synthetic construct; identical to SEQ ID NO: 12619
  misc_feature 1..51: note = Description of Artificial Sequence: Synthetic oligonucleotide
  source 1..51: mol_type = other DNA

SEQ ID NO: 14226 - protein, 17 aa, synthetic construct
  REGION 1..17: note = Description of Artificial Sequence: Synthetic peptide
AISGRGGNTFYADSVKG

SEQ ID NO: 14227 - DNA, 51 bp, synthetic construct
  misc_feature 1..51: note = Description of Artificial Sequence: Synthetic oligonucleotide
  source 1..51: mol_type = other DNA
tccattagtagtagtagttattacatatactacgcagactcagtgaagggc

SEQ ID NO: 14228 - protein, 17 aa, synthetic construct
  REGION 1..17: note = Description of Artificial Sequence: Synthetic peptide
SISSSSYYIYYADSVKG

SEQ ID NO: 14229 - DNA, 51 bp, synthetic construct; identical to SEQ ID NO: 12127
  misc_feature 1..51: note = Description of Artificial Sequence: Synthetic oligonucleotide
  source 1..51: mol_type = other DNA

SEQ ID NO: 14230 - protein, 17 aa, synthetic construct
  REGION 1..17: note = Description of Artificial Sequence: Synthetic peptide
IIWYDGSNKYYADSVKG

SEQ ID NO: 14231 - DNA, 51 bp, synthetic construct
  misc_feature 1..51: note = Description of Artificial Sequence: Synthetic oligonucleotide
  source 1..51: mol_type = other DNA
gctattagtggtagtggtaaaaacacattctacgcagactccgtgaagggc

SEQ ID NO: 14232 - protein, 17 aa, synthetic construct
  REGION 1..17: note = Description of Artificial Sequence: Synthetic peptide
AISGSGKNTFYADSVKG

SEQ ID NO: 14233 - DNA, 51 bp, synthetic construct; identical to SEQ ID NO: 12339
  misc_feature 1..51: note = Description of Artificial Sequence: Synthetic oligonucleotide
  source 1..51: mol_type = other DNA

SEQ ID NO: 14234 - protein, 17 aa, synthetic construct
  REGION 1..17: note = Description of Artificial Sequence: Synthetic peptide
VISYDGSNKYYADSVKG

SEQ ID NO: 14235 - DNA, 51 bp, synthetic construct; identical to SEQ ID NO: 12127
  misc_feature 1..51: note = Description of Artificial Sequence: Synthetic oligonucleotide
  source 1..51: mol_type = other DNA

SEQ ID NO: 14236 - protein, 17 aa, synthetic construct
  REGION 1..17: note = Description of Artificial Sequence: Synthetic peptide
IIWYDGSNKYYADSVKG

SEQ ID NO: 14237 - DNA, 51 bp, synthetic construct; identical to SEQ ID NO: 12619
  misc_feature 1..51: note = Description of Artificial Sequence: Synthetic oligonucleotide
  source 1..51: mol_type = other DNA

SEQ ID NO: 14238 - protein, 17 aa, synthetic construct
  REGION 1..17: note = Description of Artificial Sequence: Synthetic peptide
AISGRGGNTFYADSVKG

SEQ ID NO: 14239 - DNA, 51 bp, synthetic construct; identical to SEQ ID NO: 12161
  misc_feature 1..51: note = Description of Artificial Sequence: Synthetic oligonucleotide
  source 1..51: mol_type = other DNA

SEQ ID NO: 14240 - protein, 17 aa, synthetic construct
  REGION 1..17: note = Description of Artificial Sequence: Synthetic peptide
WMHPNSGNTGYAQKFQG

SEQ ID NO: 14241 - DNA, 51 bp, synthetic construct; identical to SEQ ID NO: 12161
  misc_feature 1..51: note = Description of Artificial Sequence: Synthetic oligonucleotide
  source 1..51: mol_type = other DNA

SEQ ID NO: 14242 - protein, 17 aa, synthetic construct
  REGION 1..17: note = Description of Artificial Sequence: Synthetic peptide
WMHPNSGNTGYAQKFQG

SEQ ID NO: 14243 - DNA, 51 bp, synthetic construct; identical to SEQ ID NO: 12161
  misc_feature 1..51: note = Description of Artificial Sequence: Synthetic oligonucleotide
  source 1..51: mol_type = other DNA

SEQ ID NO: 14244 - protein, 17 aa, synthetic construct
  REGION 1..17: note = Description of Artificial Sequence: Synthetic peptide
WMHPNSGNTGYAQKFQG

SEQ ID NO: 14245 - DNA, 51 bp, synthetic construct; identical to SEQ ID NO: 12619
  misc_feature 1..51: note = Description of Artificial Sequence: Synthetic oligonucleotide
  source 1..51: mol_type = other DNA

SEQ ID NO: 14246 - protein, 17 aa, synthetic construct
  REGION 1..17: note = Description of Artificial Sequence: Synthetic peptide
AISGRGGNTFYADSVKG

SEQ ID NO: 14247 - DNA, 51 bp, synthetic construct; identical to SEQ ID NO: 12501
  misc_feature 1..51: note = Description of Artificial Sequence: Synthetic oligonucleotide
  source 1..51: mol_type = other DNA

SEQ ID NO: 14248 - protein, 17 aa, synthetic construct
  REGION 1..17: note = Description of Artificial Sequence: Synthetic peptide
IIWYDGSYKYYADSVKG

SEQ ID NO: 14249 - DNA, 48 bp, synthetic construct
  misc_feature 1..48: note = Description of Artificial Sequence: Synthetic oligonucleotide
  source 1..48: mol_type = other DNA
tacagttattacagtgggagcacctactacaacccgtccctcaagagt

SEQ ID NO: 14250 - protein, 16 aa, synthetic construct
  REGION 1..16: note = Description of Artificial Sequence: Synthetic peptide
YSYYSGSTYYNPSLKS

SEQ ID NO: 14251 - DNA, 51 bp, synthetic construct; identical to SEQ ID NO: 12123
  misc_feature 1..51: note = Description of Artificial Sequence: Synthetic oligonucleotide
  source 1..51: mol_type = other DNA

SEQ ID NO: 14252 - protein, 17 aa, synthetic construct
  REGION 1..17: note = Description of Artificial Sequence: Synthetic peptide
VIWYDGSNKYYADSVKG

SEQ ID NO: 14253 - DNA, 51 bp, synthetic construct; identical to SEQ ID NO: 13377
  misc_feature 1..51: note = Description of Artificial Sequence: Synthetic oligonucleotide
  source 1..51: mol_type = other DNA

SEQ ID NO: 14254 - protein, 17 aa, synthetic construct
  REGION 1..17: note = Description of Artificial Sequence: Synthetic peptide
AISGSGGNTFYADSVKG

SEQ ID NO: 14255 - DNA, 48 bp, synthetic construct; identical to SEQ ID NO: 13471
  misc_feature 1..48: note = Description of Artificial Sequence: Synthetic oligonucleotide
  source 1..48: mol_type = other DNA

SEQ ID NO: 14256 - protein, 16 aa, synthetic construct
  REGION 1..16: note = Description of Artificial Sequence: Synthetic peptide
SIYYSGSASYNPSLKS

SEQ ID NO: 14257 - DNA, 48 bp, synthetic construct
  misc_feature 1..48: note = Description of Artificial Sequence: Synthetic oligonucleotide
  source 1..48: mol_type = other DNA
cgtatcgataccagtgggatcaccaactacaacccctccctcaagagt

SEQ ID NO: 14258 - protein, 16 aa, synthetic construct
  REGION 1..16: note = Description of Artificial Sequence: Synthetic peptide
RIDTSGITNYNPSLKS

SEQ ID NO: 14259 - DNA, 51 bp, synthetic construct; identical to SEQ ID NO: 12619
  misc_feature 1..51: note = Description of Artificial Sequence: Synthetic oligonucleotide
  source 1..51: mol_type = other DNA

SEQ ID NO: 14260 - protein, 17 aa, synthetic construct
  REGION 1..17: note = Description of Artificial Sequence: Synthetic peptide
AISGRGGNTFYADSVKG

SEQ ID NO: 14261 - DNA, 51 bp, synthetic construct; identical to SEQ ID NO: 12619
  misc_feature 1..51: note = Description of Artificial Sequence: Synthetic oligonucleotide
  source 1..51: mol_type = other DNA

SEQ ID NO: 14262 - protein, 17 aa, synthetic construct
  REGION 1..17: note = Description of Artificial Sequence: Synthetic peptide
AISGRGGNTFYADSVKG

SEQ ID NO: 14263 - DNA, 51 bp, synthetic construct; identical to SEQ ID NO: 12127
  misc_feature 1..51: note = Description of Artificial Sequence: Synthetic oligonucleotide
  source 1..51: mol_type = other DNA

SEQ ID NO: 14264 - protein, 17 aa, synthetic construct
  REGION 1..17: note = Description of Artificial Sequence: Synthetic peptide
IIWYDGSNKYYADSVKG

SEQ ID NO: 14265 - DNA, 51 bp, synthetic construct; identical to SEQ ID NO: 12103
  misc_feature 1..51: note = Description of Artificial Sequence: Synthetic oligonucleotide
  source 1..51: mol_type = other DNA

SEQ ID NO: 14266 - protein, 17 aa, synthetic construct
  REGION 1..17: note = Description of Artificial Sequence: Synthetic peptide
WMNPNSGNTGYAQKFQG

SEQ ID NO: 14267 - DNA, 51 bp, synthetic construct
  misc_feature 1..51: note = Description of Artificial Sequence: Synthetic oligonucleotide
  source 1..51: mol_type = other DNA
gctattagtggaagtggtgatagaacatactacgcagactccgtgaagggc

SEQ ID NO: 14268 - protein, 17 aa, synthetic construct
  REGION 1..17: note = Description of Artificial Sequence: Synthetic peptide
AISGSGDRTYYADSVKG

SEQ ID NO: 14269 - DNA, 51 bp, synthetic construct; identical to SEQ ID NO: 12501
  misc_feature 1..51: note = Description of Artificial Sequence: Synthetic oligonucleotide
  source 1..51: mol_type = other DNA

SEQ ID NO: 14270 - protein, 17 aa, synthetic construct
  REGION 1..17: note = Description of Artificial Sequence: Synthetic peptide
IIWYDGSYKYYADSVKG

SEQ ID NO: 14271 - DNA, 48 bp, synthetic construct; identical to SEQ ID NO: 14117
  misc_feature 1..48: note = Description of Artificial Sequence: Synthetic oligonucleotide
  source 1..48: mol_type = other DNA

SEQ ID NO: 14272 - protein, 16 aa, synthetic construct
  REGION 1..16: note = Description of Artificial Sequence: Synthetic peptide
YSYYSGSTYYNPSLKS

SEQ ID NO: 14273 - DNA, 48 bp, synthetic construct; identical to SEQ ID NO: 14257
  misc_feature 1..48: note = Description of Artificial Sequence: Synthetic oligonucleotide
  source 1..48: mol_type = other DNA

SEQ ID NO: 14274 - protein, 16 aa, synthetic construct
  REGION 1..16: note = Description of Artificial Sequence: Synthetic peptide
RIDTSGITNYNPSLKS

SEQ ID NO: 14275 - DNA, 51 bp, synthetic construct
  misc_feature 1..51: note = Description of Artificial Sequence: Synthetic oligonucleotide
  source 1..51: mol_type = other DNA
cttatattctatgatggaagtaataaatactatgcagactccgtgaagggc

SEQ ID NO: 14276 - protein, 17 aa, synthetic construct
  REGION 1..17: note = Description of Artificial Sequence: Synthetic peptide
LIFYDGSNKYYADSVKG

SEQ ID NO: 14277 - DNA, 51 bp, synthetic construct; identical to SEQ ID NO: 12161
  misc_feature 1..51: note = Description of Artificial Sequence: Synthetic oligonucleotide
  source 1..51: mol_type = other DNA

SEQ ID NO: 14278 - protein, 17 aa, synthetic construct
  REGION 1..17: note = Description of Artificial Sequence: Synthetic peptide
WMHPNSGNTGYAQKFQG

SEQ ID NO: 14279 - DNA, 51 bp, synthetic construct; identical to SEQ ID NO: 12103
  misc_feature 1..51: note = Description of Artificial Sequence: Synthetic oligonucleotide
  source 1..51: mol_type = other DNA

SEQ ID NO: 14280 - protein, 17 aa, synthetic construct
  REGION 1..17: note = Description of Artificial Sequence: Synthetic peptide
WMNPNSGNTGYAQKFQG

SEQ ID NO: 14281 - DNA, 51 bp, synthetic construct; identical to SEQ ID NO: 12619
  misc_feature 1..51: note = Description of Artificial Sequence: Synthetic oligonucleotide
  source 1..51: mol_type = other DNA

SEQ ID NO: 14282 - protein, 17 aa, synthetic construct
  REGION 1..17: note = Description of Artificial Sequence: Synthetic peptide
AISGRGGNTFYADSVKG

SEQ ID NO: 14283 - DNA, 51 bp, synthetic construct; identical to SEQ ID NO: 12103
  misc_feature 1..51: note = Description of Artificial Sequence: Synthetic oligonucleotide
  source 1..51: mol_type = other DNA

SEQ ID NO: 14284 - protein, 17 aa, synthetic construct
  REGION 1..17: note = Description of Artificial Sequence: Synthetic peptide
WMNPNSGNTGYAQKFQG

SEQ ID NO: 14285 - DNA, 51 bp, synthetic construct; identical to SEQ ID NO: 13377
  misc_feature 1..51: note = Description of Artificial Sequence: Synthetic oligonucleotide
  source 1..51: mol_type = other DNA

SEQ ID NO: 14286 - protein, 17 aa, synthetic construct
  REGION 1..17: note = Description of Artificial Sequence: Synthetic peptide
AISGSGGNTFYADSVKG

SEQ ID NO: 14287 - DNA, 51 bp, synthetic construct; identical to SEQ ID NO: 13377
  misc_feature 1..51: note = Description of Artificial Sequence: Synthetic oligonucleotide
  source 1..51: mol_type = other DNA

SEQ ID NO: 14288 - protein, 17 aa, synthetic construct
  REGION 1..17: note = Description of Artificial Sequence: Synthetic peptide
AISGSGGNTFYADSVKG

SEQ ID NO: 14289 - DNA, 51 bp, synthetic construct; identical to SEQ ID NO: 12619
  misc_feature 1..51: note = Description of Artificial Sequence: Synthetic oligonucleotide
  source 1..51: mol_type = other DNA

SEQ ID NO: 14290 - protein, 17 aa, synthetic construct
  REGION 1..17: note = Description of Artificial Sequence: Synthetic peptide
AISGRGGNTFYADSVKG

SEQ ID NO: 14291 - DNA, 51 bp, synthetic construct
  misc_feature 1..51: note = Description of Artificial Sequence: Synthetic oligonucleotide
  source 1..51: mol_type = other DNA
attatatggtatgatggaagtagtaaatactatgcagactccgtgaagggc

SEQ ID NO: 14292 - protein, 17 aa, synthetic construct
  REGION 1..17: note = Description of Artificial Sequence: Synthetic peptide
IIWYDGSSKYYADSVKG

SEQ ID NO: 14293 - DNA, 51 bp, synthetic construct
  misc_feature 1..51: note = Description of Artificial Sequence: Synthetic oligonucleotide
  source 1..51: mol_type = other DNA
tggatgcaccctaacagtggtagtacaggctatgcacagaggttccagggc

SEQ ID NO: 14294 - protein, 17 aa, synthetic construct
  REGION 1..17: note = Description of Artificial Sequence: Synthetic peptide
WMHPNSGSTGYAQRFQG

SEQ ID NO: 14295 - DNA, 51 bp, synthetic construct; identical to SEQ ID NO: 12103
  misc_feature 1..51: note = Description of Artificial Sequence: Synthetic oligonucleotide
  source 1..51: mol_type = other DNA

SEQ ID NO: 14296 - protein, 17 aa, synthetic construct
  REGION 1..17: note = Description of Artificial Sequence: Synthetic peptide
WMNPNSGNTGYAQKFQG

SEQ ID NO: 14297 - DNA, 51 bp, synthetic construct
  misc_feature 1..51: note = Description of Artificial Sequence: Synthetic oligonucleotide
  source 1..51: mol_type = other DNA
actattagtggtagaggtcttggcacatactacgcagactccgtgaagggc

SEQ ID NO: 14298 - protein, 17 aa, synthetic construct
  REGION 1..17: note = Description of Artificial Sequence: Synthetic peptide
TISGRGLGTYYADSVKG

SEQ ID NO: 14299 - DNA, 48 bp, synthetic construct; identical to SEQ ID NO: 13471
  misc_feature 1..48: note = Description of Artificial Sequence: Synthetic oligonucleotide
  source 1..48: mol_type = other DNA

SEQ ID NO: 14300 - protein, 16 aa, synthetic construct
  REGION 1..16: note = Description of Artificial Sequence: Synthetic peptide
SIYYSGSASYNPSLKS

SEQ ID NO: 14301 - DNA, 51 bp, synthetic construct; identical to SEQ ID NO: 14115
  misc_feature 1..51: note = Description of Artificial Sequence: Synthetic oligonucleotide
  source 1..51: mol_type = other DNA

SEQ ID NO: 14302 - protein, 17 aa, synthetic construct
  REGION 1..17: note = Description of Artificial Sequence: Synthetic peptide
WVHPNSGNTGYAQKFQG

SEQ ID NO: 14303 - DNA, 51 bp, synthetic construct; identical to SEQ ID NO: 12619
  misc_feature 1..51: note = Description of Artificial Sequence: Synthetic oligonucleotide
  source 1..51: mol_type = other DNA

SEQ ID NO: 14304 - protein, 17 aa, synthetic construct
  REGION 1..17: note = Description of Artificial Sequence: Synthetic peptide
AISGRGGNTFYADSVKG

SEQ ID NO: 14305 - DNA, 51 bp, synthetic construct
  misc_feature 1..51: note = Description of Artificial Sequence: Synthetic oligonucleotide
  source 1..51: mol_type = other DNA
tccatgagtaatagtagtagttccatatactacgcagactcagtgaagggc

SEQ ID NO: 14306 - protein, 17 aa, synthetic construct
  REGION 1..17: note = Description of Artificial Sequence: Synthetic peptide
SMSNSSSSIYYADSVKG

SEQ ID NO: 14307 - DNA, 51 bp, synthetic construct
  misc_feature 1..51: note = Description of Artificial Sequence: Synthetic oligonucleotide
  source 1..51: mol_type = other DNA
gatattagtggtagtggtggtaccacatactacgcagactccgtgaagggc

SEQ ID NO: 14308 - protein, 17 aa, synthetic construct
  REGION 1..17: note = Description of Artificial Sequence: Synthetic peptide
DISGSGGTTYYADSVKG

SEQ ID NO: 14309 - DNA, 51 bp, synthetic construct
  misc_feature 1..51: note = Description of Artificial Sequence: Synthetic oligonucleotide
  source 1..51: mol_type = other DNA
gttatatggtatgatgtaaataataaatactatgcagactccgtgaagggc

SEQ ID NO: 14310 - protein, 17 aa, synthetic construct
  REGION 1..17: note = Description of Artificial Sequence: Synthetic peptide
VIWYDVNNKYYADSVKG

SEQ ID NO: 14311 - DNA, 51 bp, synthetic construct; identical to SEQ ID NO: 12273
  misc_feature 1..51: note = Description of Artificial Sequence: Synthetic oligonucleotide
  source 1..51: mol_type = other DNA

SEQ ID NO: 14312 - protein, 17 aa, synthetic construct
  REGION 1..17: note = Description of Artificial Sequence: Synthetic peptide
VISGSGGSTYYADSVKG

SEQ ID NO: 14313 - DNA, 51 bp, synthetic construct; identical to SEQ ID NO: 12153
  misc_feature 1..51: note = Description of Artificial Sequence: Synthetic oligonucleotide
  source 1..51: mol_type = other DNA

SEQ ID NO: 14314 - protein, 17 aa, synthetic construct
  REGION 1..17: note = Description of Artificial Sequence: Synthetic peptide
SISGSSSYIYYADSVKG

SEQ ID NO: 14315 - DNA, 51 bp, synthetic construct; identical to SEQ ID NO: 12221
  misc_feature 1..51: note = Description of Artificial Sequence: Synthetic oligonucleotide
  source 1..51: mol_type = other DNA

SEQ ID NO: 14316 - protein, 17 aa, synthetic construct
  REGION 1..17: note = Description of Artificial Sequence: Synthetic peptide
SISSSSTYIYYADSVKG

SEQ ID NO: 14317 - DNA, 51 bp, synthetic construct; identical to SEQ ID NO: 13515
  misc_feature 1..51: note = Description of Artificial Sequence: Synthetic oligonucleotide
  source 1..51: mol_type = other DNA

SEQ ID NO: 14318 - protein, 17 aa, synthetic construct
  REGION 1..17: note = Description of Artificial Sequence: Synthetic peptide
AMSGSGGRTYYADSVKG

SEQ ID NO: 14319 - DNA, 48 bp, synthetic construct
  misc_feature 1..48: note = Description of Artificial Sequence: Synthetic oligonucleotide
  source 1..48: mol_type = other DNA
agtatctactatagtgggagcacctactacaatccgtccctcaagagt

SEQ ID NO: 14320 - protein, 16 aa, synthetic construct
  REGION 1..16: note = Description of Artificial Sequence: Synthetic peptide
SIYYSGSTYYNPSLKS

SEQ ID NO: 14321 - DNA, 51 bp, synthetic construct
  misc_feature 1..51: note = Description of Artificial Sequence: Synthetic oligonucleotide
  source 1..51: mol_type = other DNA
tccattagtggtagtagtacgtacatatactacgcagactcagtgaagggc

SEQ ID NO: 14322 - protein, 17 aa, synthetic construct
  REGION 1..17: note = Description of Artificial Sequence: Synthetic peptide
SISGSSTYIYYADSVKG

SEQ ID NO: 14323 - DNA, 51 bp, synthetic construct
  misc_feature 1..51: note = Description of Artificial Sequence: Synthetic oligonucleotide
  source 1..51: mol_type = other DNA
tgcattagtggtagtagtagttacatatattatgcagactcagtgaagggc

SEQ ID NO: 14324 - protein, 17 aa, synthetic construct
  REGION 1..17: note = Description of Artificial Sequence: Synthetic peptide
CISGSSSYIYYADSVKG

SEQ ID NO: 14325 - DNA, 51 bp, synthetic construct; identical to SEQ ID NO: 12501
  misc_feature 1..51: note = Description of Artificial Sequence: Synthetic oligonucleotide
  source 1..51: mol_type = other DNA

SEQ ID NO: 14326 - protein, 17 aa, synthetic construct
  REGION 1..17: note = Description of Artificial Sequence: Synthetic peptide
IIWYDGSYKYYADSVKG

SEQ ID NO: 14327 - DNA, 51 bp, synthetic construct; identical to SEQ ID NO: 14309
  misc_feature 1..51: note = Description of Artificial Sequence: Synthetic oligonucleotide
  source 1..51: mol_type = other DNA

SEQ ID NO: 14328 - protein, 17 aa, synthetic construct
  REGION 1..17: note = Description of Artificial Sequence: Synthetic peptide
VIWYDVNNKYYADSVKG

SEQ ID NO: 14329 - DNA, 51 bp, synthetic construct
  misc_feature 1..51: note = Description of Artificial Sequence: Synthetic oligonucleotide
  source 1..51: mol_type = other DNA
tccattagtggtagcagtagttacataaactacgcagactcagtgaagggc

SEQ ID NO: 14330 - protein, 17 aa, synthetic construct
  REGION 1..17: note = Description of Artificial Sequence: Synthetic peptide
SISGSSSYINYADSVKG

SEQ ID NO: 14331 - DNA, 51 bp, synthetic construct
  misc_feature 1..51: note = Description of Artificial Sequence: Synthetic oligonucleotide
  source 1..51: mol_type = other DNA
tccattagtggtagtggtagttacataaactacgcagactcagtgaagggc

SEQ ID NO: 14332 - protein, 17 aa, synthetic construct
  REGION 1..17: note = Description of Artificial Sequence: Synthetic peptide
SISGSGSYINYADSVKG

SEQ ID NO: 14333 - DNA, 51 bp, synthetic construct; identical to SEQ ID NO: 12785
  misc_feature 1..51: note = Description of Artificial Sequence: Synthetic oligonucleotide
  source 1..51: mol_type = other DNA

SEQ ID NO: 14334 - protein, 17 aa, synthetic construct
  REGION 1..17: note = Description of Artificial Sequence: Synthetic peptide
SISGSGSYIYYADSVKG

SEQ ID NO: 14335 - DNA, 51 bp, synthetic construct; identical to SEQ ID NO: 12123
  misc_feature 1..51: note = Description of Artificial Sequence: Synthetic oligonucleotide
  source 1..51: mol_type = other DNA

SEQ ID NO: 14336 - protein, 17 aa, synthetic construct
  REGION 1..17: note = Description of Artificial Sequence: Synthetic peptide
VIWYDGSNKYYADSVKG

SEQ ID NO: 14337 - DNA, 48 bp, synthetic construct
  misc_feature 1..48: note = Description of Artificial Sequence: Synthetic oligonucleotide
  source 1..48: mol_type = other DNA
cgtatctataccagtgggaccaccaactacaccccctccctcaagagt

SEQ ID NO: 14338 - protein, 16 aa, synthetic construct
  REGION 1..16: note = Description of Artificial Sequence: Synthetic peptide
RIYTSGTTNYTPSLKS

SEQ ID NO: 14339 - DNA, 51 bp, synthetic construct; identical to SEQ ID NO: 14321
  misc_feature 1..51: note = Description of Artificial Sequence: Synthetic oligonucleotide
  source 1..51: mol_type = other DNA

SEQ ID NO: 14340 - protein, 17 aa, synthetic construct
  REGION 1..17: note = Description of Artificial Sequence: Synthetic peptide
SISGSSTYIYYADSVKG

SEQ ID NO: 14341 - DNA, 51 bp, synthetic construct
  misc_feature 1..51: note = Description of Artificial Sequence: Synthetic oligonucleotide
  source 1..51: mol_type = other DNA
tccatcagtggtagtagtacttacatatactacgcagactcagtgaagggc

SEQ ID NO: 14342 - protein, 17 aa, synthetic construct
  REGION 1..17: note = Description of Artificial Sequence: Synthetic peptide
SISGSSTYIYYADSVKG

SEQ ID NO: 14343 - DNA, 51 bp, synthetic construct; identical to SEQ ID NO: 12269
  misc_feature 1..51: note = Description of Artificial Sequence: Synthetic oligonucleotide
  source 1..51: mol_type = other DNA

SEQ ID NO: 14344 - protein, 17 aa, synthetic construct
  REGION 1..17: note = Description of Artificial Sequence: Synthetic peptide
VIWYDVTNKYYADSVKG

SEQ ID NO: 14345 - DNA, 51 bp, synthetic construct
  misc_feature 1..51: note = Description of Artificial Sequence: Synthetic oligonucleotide
  source 1..51: mol_type = other DNA
ttgattagtggcagtagtagttacatatactacgcagactcagtgaagggc

SEQ ID NO: 14346 - protein, 17 aa, synthetic construct
  REGION 1..17: note = Description of Artificial Sequence: Synthetic peptide
LISGSSSYIYYADSVKG

SEQ ID NO: 14347 - DNA, 51 bp, synthetic construct; identical to SEQ ID NO: 12161
  misc_feature 1..51: note = Description of Artificial Sequence: Synthetic oligonucleotide
  source 1..51: mol_type = other DNA

SEQ ID NO: 14348 - protein, 17 aa, synthetic construct
  REGION 1..17: note = Description of Artificial Sequence: Synthetic peptide
WMHPNSGNTGYAQKFQG

SEQ ID NO: 14349 - DNA, 51 bp, synthetic construct
  misc_feature 1..51: note = Description of Artificial Sequence: Synthetic oligonucleotide
  source 1..51: mol_type = other DNA
gctattagtggtagtggtggtaggacagactacgcagactccgtaaagggc

SEQ ID NO: 14350 - protein, 17 aa, synthetic construct
  REGION 1..17: note = Description of Artificial Sequence: Synthetic peptide
AISGSGGRTDYADSVKG

SEQ ID NO: 14351 - DNA, 51 bp, synthetic construct
  misc_feature 1..51: note = Description of Artificial Sequence: Synthetic oligonucleotide
  source 1..51: mol_type = other DNA
tccataagtggtagtggtaattacatagactacgcagactcagtgaagggc

SEQ ID NO: 14352 - protein, 17 aa, synthetic construct
  REGION 1..17: note = Description of Artificial Sequence: Synthetic peptide
SISGSGNYIDYADSVKG

SEQ ID NO: 14353 - DNA, 51 bp, synthetic construct
  misc_feature 1..51: note = Description of Artificial Sequence: Synthetic oligonucleotide
  source 1..51: mol_type = other DNA
tggatgaaccctaacagtggtaacacaggctatgtacagaagttccagggc

SEQ ID NO: 14354 - protein, 17 aa, synthetic construct
  REGION 1..17: note = Description of Artificial Sequence: Synthetic peptide
WMNPNSGNTGYVQKFQG

SEQ ID NO: 14355 - DNA, 51 bp, synthetic construct
  misc_feature 1..51: note = Description of Artificial Sequence: Synthetic oligonucleotide
  source 1..51: mol_type = other DNA
gttatatcatattctggaaacaataaatactatgcagactccgtgaagggc

SEQ ID NO: 14356 - protein, 17 aa, synthetic construct
  REGION 1..17: note = Description of Artificial Sequence: Synthetic peptide
VISYSGNNKYYADSVKG

SEQ ID NO: 14357 - DNA, 51 bp, synthetic construct
  misc_feature 1..51: note = Description of Artificial Sequence: Synthetic oligonucleotide
  source 1..51: mol_type = other DNA
gttgtatggtatgatgtaaataataaatactatgcagactccgtgaagggc

SEQ ID NO: 14358 - protein, 17 aa, synthetic construct
  REGION 1..17: note = Description of Artificial Sequence: Synthetic peptide
VVWYDVNNKYYADSVKG

SEQ ID NO: 14359 - DNA, 51 bp, synthetic construct; identical to SEQ ID NO: 12123
  misc_feature 1..51: note = Description of Artificial Sequence: Synthetic oligonucleotide
  source 1..51: mol_type = other DNA

SEQ ID NO: 14360 - protein, 17 aa, synthetic construct
  REGION 1..17: note = Description of Artificial Sequence: Synthetic peptide
VIWYDGSNKYYADSVKG

SEQ ID NO: 14361 - DNA, 51 bp, synthetic construct; identical to SEQ ID NO: 12123
  misc_feature 1..51: note = Description of Artificial Sequence: Synthetic oligonucleotide
  source 1..51: mol_type = other DNA

SEQ ID NO: 14362 - protein, 17 aa, synthetic construct
  REGION 1..17: note = Description of Artificial Sequence: Synthetic peptide
VIWYDGSNKYYADSVKG

SEQ ID NO: 14363 - DNA, 51 bp, synthetic construct; identical to SEQ ID NO: 12153
  misc_feature 1..51: note = Description of Artificial Sequence: Synthetic oligonucleotide
  source 1..51: mol_type = other DNA

SEQ ID NO: 14364 - protein, 17 aa, synthetic construct
  REGION 1..17: note = Description of Artificial Sequence: Synthetic peptide
SISGSSSYIYYADSVKG

SEQ ID NO: 14365 - DNA, 51 bp, synthetic construct; identical to SEQ ID NO: 14113
  misc_feature 1..51: note = Description of Artificial Sequence: Synthetic oligonucleotide
  source 1..51: mol_type = other DNA

SEQ ID NO: 14366 - protein, 17 aa, synthetic construct
  REGION 1..17: note = Description of Artificial Sequence: Synthetic peptide
VIWYDGSYKYYADSVKG

SEQ ID NO: 14367 - DNA, 51 bp, synthetic construct
  misc_feature 1..51: note = Description of Artificial Sequence: Synthetic oligonucleotide
  source 1..51: mol_type = other DNA
gctatgagtggtagtggtggtcacacatactacgcagactccgtgaagggc

SEQ ID NO: 14368 - protein, 17 aa, synthetic construct
  REGION 1..17: note = Description of Artificial Sequence: Synthetic peptide
AMSGSGGHTYYADSVKG

SEQ ID NO: 14369 - DNA, 51 bp, synthetic construct
  misc_feature 1..51: note = Description of Artificial Sequence: Synthetic oligonucleotide
  source 1..51: mol_type = other DNA
tccattagtagtagtactggttacatgtactacgcagactcagtgaagggc

SEQ ID NO: 14370 - protein, 17 aa, synthetic construct
  REGION 1..17: note = Description of Artificial Sequence: Synthetic peptide
SISSSTGYMYYADSVKG

SEQ ID NO: 14371 - DNA, 51 bp, synthetic construct; identical to SEQ ID NO: 12785
  misc_feature 1..51: note = Description of Artificial Sequence: Synthetic oligonucleotide
  source 1..51: mol_type = other DNA

SEQ ID NO: 14372 - protein, 17 aa, synthetic construct
  REGION 1..17: note = Description of Artificial Sequence: Synthetic peptide
SISGSGSYIYYADSVKG

SEQ ID NO: 14373 - DNA, 51 bp, synthetic construct; identical to SEQ ID NO: 14367
  misc_feature 1..51: note = Description of Artificial Sequence: Synthetic oligonucleotide
  source 1..51: mol_type = other DNA

SEQ ID NO: 14374 - protein, 17 aa, synthetic construct
  REGION 1..17: note = Description of Artificial Sequence: Synthetic peptide
AMSGSGGHTYYADSVKG

SEQ ID NO: 14375 - DNA, 48 bp, synthetic construct
  misc_feature 1..48: note = Description of Artificial Sequence: Synthetic oligonucleotide
  source 1..48: mol_type = other DNA
agtatctattatagtgggagtacctcctacaacccgtctctcgagagt

SEQ ID NO: 14376 - protein, 16 aa, synthetic construct
  REGION 1..16: note = Description of Artificial Sequence: Synthetic peptide
SIYYSGSTSYNPSLES

SEQ ID NO: 14377 - DNA, 51 bp, synthetic construct
  misc_feature 1..51: note = Description of Artificial Sequence: Synthetic oligonucleotide
  source 1..51: mol_type = other DNA
tggatgcaccctaacagtggtaacacaggctatccacagaagttccagggc

SEQ ID NO: 14378 - protein, 17 aa, synthetic construct
  REGION 1..17: note = Description of Artificial Sequence: Synthetic peptide
WMHPNSGNTGYPQKFQG

SEQ ID NO: 14379 - DNA, 51 bp, synthetic construct; identical to SEQ ID NO: 12123
  misc_feature 1..51: note = Description of Artificial Sequence: Synthetic oligonucleotide
  source 1..51: mol_type = other DNA

SEQ ID NO: 14380 - protein, 17 aa, synthetic construct
  REGION 1..17: note = Description of Artificial Sequence: Synthetic peptide
VIWYDGSNKYYADSVKG

SEQ ID NO: 14381 - DNA, 51 bp, synthetic construct; identical to SEQ ID NO: 14321
  misc_feature 1..51: note = Description of Artificial Sequence: Synthetic oligonucleotide
  source 1..51: mol_type = other DNA

SEQ ID NO: 14382 - protein, 17 aa, synthetic construct
  REGION 1..17: note = Description of Artificial Sequence: Synthetic peptide
SISGSSTYIYYADSVKG

SEQ ID NO: 14383 - DNA, 51 bp, synthetic construct
  misc_feature 1..51: note = Description of Artificial Sequence: Synthetic oligonucleotide
  source 1..51: mol_type = other DNA
tccattagtggtagtagtagttacatagactacgcagactcagtgaagggc

SEQ ID NO: 14384 - protein, 17 aa, synthetic construct
  REGION 1..17: note = Description of Artificial Sequence: Synthetic peptide
SISGSSSYIDYADSVKG

SEQ ID NO: 14385 - DNA, 48 bp, synthetic construct
  misc_feature 1..48: note = Description of Artificial Sequence: Synthetic oligonucleotide
  source 1..48: mol_type = other DNA
aatatctattatagtgggagcgcctaccacattccgtccctcaagagt

SEQ ID NO: 14386 - protein, 16 aa, synthetic construct
  REGION 1..16: note = Description of Artificial Sequence: Synthetic peptide
NIYYSGSAYHIPSLKS

SEQ ID NO: 14387 - DNA, 51 bp, synthetic construct
  misc_feature 1..51: note = Description of Artificial Sequence: Synthetic oligonucleotide
  source 1..51: mol_type = other DNA
gtcatatggtatgatggaagttataaatactatgcagactccgtgaagggc

SEQ ID NO: 14388 - protein, 17 aa, synthetic construct
  REGION 1..17: note = Description of Artificial Sequence: Synthetic peptide
VIWYDGSYKYYADSVKG

SEQ ID NO: 14389 - DNA, 48 bp, synthetic construct
  misc_feature 1..48: note = Description of Artificial Sequence: Synthetic oligonucleotide
  source 1..48: mol_type = other DNA
gttatttataccggtggtagcacatacaacgcagactccgtgaagggc

SEQ ID NO: 14390 - protein, 16 aa, synthetic construct
  REGION 1..16: note = Description of Artificial Sequence: Synthetic peptide
VIYTGGSTYNADSVKG

SEQ ID NO: 14391 - DNA, 51 bp, synthetic construct; identical to SEQ ID NO: 13379
  misc_feature 1..51: note = Description of Artificial Sequence: Synthetic oligonucleotide
  source 1..51: mol_type = other DNA

SEQ ID NO: 14392 - protein, 17 aa, synthetic construct
  REGION 1..17: note = Description of Artificial Sequence: Synthetic peptide
VISYGGSNKYHADSVKG

SEQ ID NO: 14393 - DNA, 51 bp, synthetic construct; identical to SEQ ID NO: 12227
  misc_feature 1..51: note = Description of Artificial Sequence: Synthetic oligonucleotide
  source 1..51: mol_type = other DNA

SEQ ID NO: 14394 - protein, 17 aa, synthetic construct
  REGION 1..17: note = Description of Artificial Sequence: Synthetic peptide
VIWFDGSNKYYADSVKG

SEQ ID NO: 14395 - DNA, 51 bp, synthetic construct
  misc_feature 1..51: note = Description of Artificial Sequence: Synthetic oligonucleotide
  source 1..51: mol_type = other DNA
attatatcatattctggaagaaatgatttctatgcagactccgtgaagggc

SEQ ID NO: 14396 - protein, 17 aa, synthetic construct
  REGION 1..17: note = Description of Artificial Sequence: Synthetic peptide
IISYSGRNDFYADSVKG

SEQ ID NO: 14397 - DNA, 51 bp, synthetic construct; identical to SEQ ID NO: 12227
  misc_feature 1..51: note = Description of Artificial Sequence: Synthetic oligonucleotide
  source 1..51: mol_type = other DNA

SEQ ID NO: 14398 - protein, 17 aa, synthetic construct
  REGION 1..17: note = Description of Artificial Sequence: Synthetic peptide
VIWFDGSNKYYADSVKG

SEQ ID NO: 14399 - DNA, 51 bp, synthetic construct; identical to SEQ ID NO: 12123
  misc_feature 1..51: note = Description of Artificial Sequence: Synthetic oligonucleotide
  source 1..51: mol_type = other DNA

SEQ ID NO: 14400 - protein, 17 aa, synthetic construct
  REGION 1..17: note = Description of Artificial Sequence: Synthetic peptide
VIWYDGSNKYYADSVKG

SEQ ID NO: 14401 - DNA, 51 bp, synthetic construct; identical to SEQ ID NO: 14321
  misc_feature 1..51: note = Description of Artificial Sequence: Synthetic oligonucleotide
  source 1..51: mol_type = other DNA

SEQ ID NO: 14402 - protein, 17 aa, synthetic construct
  REGION 1..17: note = Description of Artificial Sequence: Synthetic peptide
SISGSSTYIYYADSVKG

SEQ ID NO: 14403 - DNA, 51 bp, synthetic construct; identical to SEQ ID NO: 14321
  misc_feature 1..51: note = Description of Artificial Sequence: Synthetic oligonucleotide
  source 1..51: mol_type = other DNA

SEQ ID NO: 14404 - protein, 17 aa, synthetic construct
  REGION 1..17: note = Description of Artificial Sequence: Synthetic peptide
SISGSSTYIYYADSVKG

SEQ ID NO: 14405 - DNA, 51 bp, synthetic construct; identical to SEQ ID NO: 12161
  misc_feature 1..51: note = Description of Artificial Sequence: Synthetic oligonucleotide
  source 1..51: mol_type = other DNA

SEQ ID NO: 14406 - protein, 17 aa, synthetic construct
  REGION 1..17: note = Description of Artificial Sequence: Synthetic peptide
WMHPNSGNTGYAQKFQG

SEQ ID NO: 14407 - DNA, 51 bp, synthetic construct; identical to SEQ ID NO: 12161
  misc_feature 1..51: note = Description of Artificial Sequence: Synthetic oligonucleotide
  source 1..51: mol_type = other DNA

SEQ ID NO: 14408 - protein, 17 aa, synthetic construct
  REGION 1..17: note = Description of Artificial Sequence: Synthetic peptide
WMHPNSGNTGYAQKFQG

SEQ ID NO: 14409 - DNA, 51 bp, synthetic construct; identical to SEQ ID NO: 12123
  misc_feature 1..51: note = Description of Artificial Sequence: Synthetic oligonucleotide
  source 1..51: mol_type = other DNA

SEQ ID NO: 14410 - protein, 17 aa, synthetic construct
  REGION 1..17: note = Description of Artificial Sequence: Synthetic peptide
VIWYDGSNKYYADSVKG

SEQ ID NO: 14411 - DNA, 51 bp, synthetic construct; identical to SEQ ID NO: 12785
  misc_feature 1..51: note = Description of Artificial Sequence: Synthetic oligonucleotide
  source 1..51: mol_type = other DNA

SEQ ID NO: 14412 - protein, 17 aa, synthetic construct
  REGION 1..17: note = Description of Artificial Sequence: Synthetic peptide
SISGSGSYIYYADSVKG

SEQ ID NO: 14413 - DNA, 51 bp, synthetic construct
  misc_feature 1..51: note = Description of Artificial Sequence: Synthetic oligonucleotide
  source 1..51: mol_type = other DNA
tccactagtgggagttctacttacatatactacgcagactcagtgaagggc

SEQ ID NO: 14414 - protein, 17 aa, synthetic construct
  REGION 1..17: note = Description of Artificial Sequence: Synthetic peptide
STSGSSTYIYYADSVKG

SEQ ID NO: 14415 - DNA, 51 bp, synthetic construct
  misc_feature 1..51: note = Description of Artificial Sequence: Synthetic oligonucleotide
  source 1..51: mol_type = other DNA
tccattagtggtagtagtgcttacatatactacgcagactcagtgaagggc

SEQ ID NO: 14416 - protein, 17 aa, synthetic construct
  REGION 1..17: note = Description of Artificial Sequence: Synthetic peptide
SISGSSAYIYYADSVKG

SEQ ID NO: 14417 - DNA, 51 bp, synthetic construct; identical to SEQ ID NO: 12701
  misc_feature 1..51: note = Description of Artificial Sequence: Synthetic oligonucleotide
  source 1..51: mol_type = other DNA

SEQ ID NO: 14418 - protein, 17 aa, synthetic construct
  REGION 1..17: note = Description of Artificial Sequence: Synthetic peptide
SISGSSTYIYYADSVKG

SEQ ID NO: 14419 - DNA, 51 bp, synthetic construct; identical to SEQ ID NO: 12701
  misc_feature 1..51: note = Description of Artificial Sequence: Synthetic oligonucleotide
  source 1..51: mol_type = other DNA

SEQ ID NO: 14420 - protein, 17 aa, synthetic construct
  REGION 1..17: note = Description of Artificial Sequence: Synthetic peptide
SISGSSTYIYYADSVKG

SEQ ID NO: 14421 - DNA, 51 bp, synthetic construct
  misc_feature 1..51: note = Description of Artificial Sequence: Synthetic oligonucleotide
  source 1..51: mol_type = other DNA
tggatgcaccctaacagtcataagacaggctatgcacagaagttccagggc

SEQ ID NO: 14422 - protein, 17 aa, synthetic construct
  REGION 1..17: note = Description of Artificial Sequence: Synthetic peptide
WMHPNSHKTGYAQKFQG

SEQ ID NO: 14423 - DNA, 51 bp, synthetic construct
  misc_feature 1..51: note = Description of Artificial Sequence: Synthetic oligonucleotide
  source 1..51: mol_type = other DNA
tccattagtgggagtagtagttacagttactacgcagactcagtgaagggc

SEQ ID NO: 14424 - protein, 17 aa, synthetic construct
  REGION 1..17: note = Description of Artificial Sequence: Synthetic peptide
SISGSSSYSYYADSVKG

SEQ ID NO: 14425 - DNA, 51 bp, synthetic construct
  misc_feature 1..51: note = Description of Artificial Sequence: Synthetic oligonucleotide
  source 1..51: mol_type = other DNA
gtcatatggtatgatggaacttataaatactatgcagactccgtgaagggc

SEQ ID NO: 14426 - protein, 17 aa, synthetic construct
  REGION 1..17: note = Description of Artificial Sequence: Synthetic peptide
VIWYDGTYKYYADSVKG

SEQ ID NO: 14427 - DNA, 51 bp, synthetic construct
  misc_feature 1..51: note = Description of Artificial Sequence: Synthetic oligonucleotide
  source 1..51: mol_type = other DNA
gtcatatggtatgatggaagttataagtaccatgcagactccgtgaagggc

SEQ ID NO: 14428 - protein, 17 aa, synthetic construct
  REGION 1..17: note = Description of Artificial Sequence: Synthetic peptide
VIWYDGSYKYHADSVKG

SEQ ID NO: 14429 - DNA, 51 bp, synthetic construct; identical to SEQ ID NO: 13515
  misc_feature 1..51: note = Description of Artificial Sequence: Synthetic oligonucleotide
  source 1..51: mol_type = other DNA

SEQ ID NO: 14430 - protein, 17 aa, synthetic construct
  REGION 1..17: note = Description of Artificial Sequence: Synthetic peptide
AMSGSGGRTYYADSVKG

SEQ ID NO: 14431 - DNA, 51 bp, synthetic construct
  misc_feature 1..51: note = Description of Artificial Sequence: Synthetic oligonucleotide
  source 1..51: mol_type = other DNA
gttatatggtatgatggaagtaataaatactatgcagactccgtgaggggc

SEQ ID NO: 14432 - protein, 17 aa, synthetic construct
  REGION 1..17: note = Description of Artificial Sequence: Synthetic peptide
VIWYDGSNKYYADSVRG

SEQ ID NO: 14433 - DNA, 48 bp, synthetic construct; identical to SEQ ID NO: 14257
  misc_feature 1..48: note = Description of Artificial Sequence: Synthetic oligonucleotide
  source 1..48: mol_type = other DNA

SEQ ID NO: 14434 - protein, 16 aa, synthetic construct
  REGION 1..16: note = Description of Artificial Sequence: Synthetic peptide
RIDTSGITNYNPSLKS

SEQ ID NO: 14435 - DNA, 51 bp, synthetic construct
  misc_feature 1..51: note = Description of Artificial Sequence: Synthetic oligonucleotide
  source 1..51: mol_type = other DNA
tacattagccttagtggtagtaccataaagtacgcagactctgtgaagggc

SEQ ID NO: 14436 - protein, 17 aa, synthetic construct
  REGION 1..17: note = Description of Artificial Sequence: Synthetic peptide
YISLSGSTIKYADSVKG

SEQ ID NO: 14437 - DNA, 51 bp, synthetic construct
  misc_feature 1..51: note = Description of Artificial Sequence: Synthetic oligonucleotide
  source 1..51: mol_type = other DNA
attatatggtatgatggaactaataaatactatgcagactccgtgaagggc

SEQ ID NO: 14438 - protein, 17 aa, synthetic construct
  REGION 1..17: note = Description of Artificial Sequence: Synthetic peptide
IIWYDGTNKYYADSVKG

SEQ ID NO: 14439 - DNA, 48 bp, synthetic construct; identical to SEQ ID NO: 14257
  misc_feature 1..48: note = Description of Artificial Sequence: Synthetic oligonucleotide
  source 1..48: mol_type = other DNA

SEQ ID NO: 14440 - protein, 16 aa, synthetic construct
  REGION 1..16: note = Description of Artificial Sequence: Synthetic peptide
RIDTSGITNYNPSLKS

SEQ ID NO: 14441 - DNA, 51 bp, synthetic construct
  misc_feature 1..51: note = Description of Artificial Sequence: Synthetic oligonucleotide
  source 1..51: mol_type = other DNA
tacattagcattagtagtagtaccataaagtacgcagactctgtgaagggc

SEQ ID NO: 14442 - protein, 17 aa, synthetic construct
  REGION 1..17: note = Description of Artificial Sequence: Synthetic peptide
YISISSSTIKYADSVKG

SEQ ID NO: 14443 - DNA, 48 bp, synthetic construct
  misc_feature 1..48: note = Description of Artificial Sequence: Synthetic oligonucleotide
  source 1..48: mol_type = other DNA
cgtatctataccagtgggagcaccaactacaacccctccctcaagagt

SEQ ID NO: 14444 - protein, 16 aa, synthetic construct
  REGION 1..16: note = Description of Artificial Sequence: Synthetic peptide
RIYTSGSTNYNPSLKS

SEQ ID NO: 14445 - DNA, 51 bp, synthetic construct
  misc_feature 1..51: note = Description of Artificial Sequence: Synthetic oligonucleotide
  source 1..51: mol_type = other DNA
tggatcaagcctaagagtggtggcacaaactctgcacagaggtttcagggc

SEQ ID NO: 14446 - protein, 17 aa, synthetic construct
  REGION 1..17: note = Description of Artificial Sequence: Synthetic peptide
WIKPKSGGTNSAQRFQG

SEQ ID NO: 14447 - DNA, 51 bp, synthetic construct
  misc_feature 1..51: note = Description of Artificial Sequence: Synthetic oligonucleotide
  source 1..51: mol_type = other DNA
gctattagtggtagtggtagtagaatatactacgcggactccgtgaagggc

SEQ ID NO: 14448 - protein, 17 aa, synthetic construct
  REGION 1..17: note = Description of Artificial Sequence: Synthetic peptide
AISGSGSRIYYADSVKG

SEQ ID NO: 14449 - DNA, 51 bp, synthetic construct; identical to SEQ ID NO: 12123
  misc_feature 1..51: note = Description of Artificial Sequence: Synthetic oligonucleotide
  source 1..51: mol_type = other DNA

SEQ ID NO: 14450 - protein, 17 aa, synthetic construct
  REGION 1..17: note = Description of Artificial Sequence: Synthetic peptide
VIWYDGSNKYYADSVKG

SEQ ID NO: 14451 - DNA, 51 bp, synthetic construct
  misc_feature 1..51: note = Description of Artificial Sequence: Synthetic oligonucleotide
  source 1..51: mol_type = other DNA
attatatggtatgatggaagttataaatactatgcagattccgtgaagggc

SEQ ID NO: 14452 - protein, 17 aa, synthetic construct
  REGION 1..17: note = Description of Artificial Sequence: Synthetic peptide
IIWYDGSYKYYADSVKG

SEQ ID NO: 14453 - DNA, 51 bp, synthetic construct
  misc_feature 1..51: note = Description of Artificial Sequence: Synthetic oligonucleotide
  source 1..51: mol_type = other DNA
gctattagtggtagtggtaatagaatatactacgcagactccgtgaagggc

SEQ ID NO: 14454 - protein, 17 aa, synthetic construct
  REGION 1..17: note = Description of Artificial Sequence: Synthetic peptide
AISGSGNRIYYADSVKG

SEQ ID NO: 14455 - DNA, 48 bp, synthetic construct; identical to SEQ ID NO: 14443
  misc_feature 1..48: note = Description of Artificial Sequence: Synthetic oligonucleotide
  source 1..48: mol_type = other DNA

SEQ ID NO: 14456 - protein, 16 aa, synthetic construct
  REGION 1..16: note = Description of Artificial Sequence: Synthetic peptide
RIYTSGSTNYNPSLKS

SEQ ID NO: 14457 - DNA, 51 bp, synthetic construct
  misc_feature 1..51: note = Description of Artificial Sequence: Synthetic oligonucleotide
  source 1..51: mol_type = other DNA
gttatatggtatgatggaagtaataaatactatgaagactccgtgaagggc

SEQ ID NO: 14458 - protein, 17 aa, synthetic construct
  REGION 1..17: note = Description of Artificial Sequence: Synthetic peptide
VIWYDGSNKYYEDSVKG

SEQ ID NO: 14459 - DNA, 51 bp, synthetic construct; identical to SEQ ID NO: 14437
  misc_feature 1..51: note = Description of Artificial Sequence: Synthetic oligonucleotide
  source 1..51: mol_type = other DNA

SEQ ID NO: 14460 - protein, 17 aa, synthetic construct
  REGION 1..17: note = Description of Artificial Sequence: Synthetic peptide
IIWYDGTNKYYADSVKG

SEQ ID NO: 14461 - DNA, 51 bp, synthetic construct; identical to SEQ ID NO: 14437
  misc_feature 1..51: note = Description of Artificial Sequence: Synthetic oligonucleotide
  source 1..51: mol_type = other DNA

SEQ ID NO: 14462 - protein, 17 aa, synthetic construct
  REGION 1..17: note = Description of Artificial Sequence: Synthetic peptide
IIWYDGTNKYYADSVKG

SEQ ID NO: 14463 - DNA, 51 bp, synthetic construct
  misc_feature 1..51: note = Description of Artificial Sequence: Synthetic oligonucleotide
  source 1..51: mol_type = other DNA
attatatggtatgatgggactaataaatactatgcagactccgtgaagggc

SEQ ID NO: 14464 - protein, 17 aa, synthetic construct
  REGION 1..17: note = Description of Artificial Sequence: Synthetic peptide
IIWYDGTNKYYADSVKG

SEQ ID NO: 14465 - DNA, 51 bp, synthetic construct
  misc_feature 1..51: note = Description of Artificial Sequence: Synthetic oligonucleotide
  source 1..51: mol_type = other DNA
tggatcaagcctaacagtggtggcacaaactctgcacagaggtttcagggc

SEQ ID NO: 14466 - protein, 17 aa, synthetic construct
  REGION 1..17: note = Description of Artificial Sequence: Synthetic peptide
WIKPNSGGTNSAQRFQG

SEQ ID NO: 14467 - DNA, 51 bp, synthetic construct; identical to SEQ ID NO: 13923
  misc_feature 1..51: note = Description of Artificial Sequence: Synthetic oligonucleotide
  source 1..51: mol_type = other DNA

SEQ ID NO: 14468 - protein, 17 aa, synthetic construct
  REGION 1..17: note = Description of Artificial Sequence: Synthetic peptide
WMNPNSGNTGYAQKFQD

SEQ ID NO: 14469 - DNA, 51 bp, synthetic construct; identical to SEQ ID NO: 14437
  misc_feature 1..51: note = Description of Artificial Sequence: Synthetic oligonucleotide
  source 1..51: mol_type = other DNA

SEQ ID NO: 14470 - protein, 17 aa, synthetic construct
  REGION 1..17: note = Description of Artificial Sequence: Synthetic peptide
IIWYDGTNKYYADSVKG

SEQ ID NO: 14471 - DNA, 51 bp, synthetic construct; identical to SEQ ID NO: 14463
  misc_feature 1..51: note = Description of Artificial Sequence: Synthetic oligonucleotide
  source 1..51: mol_type = other DNA

SEQ ID NO: 14472 - protein, 17 aa, synthetic construct
  REGION 1..17: note = Description of Artificial Sequence: Synthetic peptide
IIWYDGTNKYYADSVKG

SEQ ID NO: 14473 - DNA, 51 bp, synthetic construct; identical to SEQ ID NO: 12127
  misc_feature 1..51: note = Description of Artificial Sequence: Synthetic oligonucleotide
  source 1..51: mol_type = other DNA

SEQ ID NO: 14474 - protein, 17 aa, synthetic construct
  REGION 1..17: note = Description of Artificial Sequence: Synthetic peptide
IIWYDGSNKYYADSVKG

SEQ ID NO: 14475 - DNA, 51 bp, synthetic construct
  misc_feature 1..51: note = Description of Artificial Sequence: Synthetic oligonucleotide
  source 1..51: mol_type = other DNA
gctattagtggtcgtggtggtaccacgttctacgcagactccgtgaggggc

SEQ ID NO: 14476 - protein, 17 aa, synthetic construct
  REGION 1..17: note = Description of Artificial Sequence: Synthetic peptide
AISGRGGTTFYADSVRG

SEQ ID NO: 14477 - DNA, 51 bp, synthetic construct
  misc_feature 1..51: note = Description of Artificial Sequence: Synthetic oligonucleotide
  source 1..51: mol_type = other DNA
gttatatcatatgacggaaacaatagacactatgcagactccgtgcagggc

SEQ ID NO: 14478 - protein, 17 aa, synthetic construct
  REGION 1..17: note = Description of Artificial Sequence: Synthetic peptide
VISYDGNNRHYADSVQG

SEQ ID NO: 14479 - DNA, 51 bp, synthetic construct
  misc_feature 1..51: note = Description of Artificial Sequence: Synthetic oligonucleotide
  source 1..51: mol_type = other DNA
gttattagtggtagtggtggtagcacattctacacagactccgtgaagggc

SEQ ID NO: 14480 - protein, 17 aa, synthetic construct
  REGION 1..17: note = Description of Artificial Sequence: Synthetic peptide
VISGSGGSTFYTDSVKG

SEQ ID NO: 14481 - DNA, 51 bp, synthetic construct
  misc_feature 1..51: note = Description of Artificial Sequence: Synthetic oligonucleotide
  source 1..51: mol_type = other DNA
gctattagtggtagtggtggtaacacattcaacgcagactccgtgaagggc

SEQ ID NO: 14482 - protein, 17 aa, synthetic construct
  REGION 1..17: note = Description of Artificial Sequence: Synthetic peptide
AISGSGGNTFNADSVKG

SEQ ID NO: 14483 - DNA, 51 bp, synthetic construct; identical to SEQ ID NO: 12153
  misc_feature 1..51: note = Description of Artificial Sequence: Synthetic oligonucleotide
  source 1..51: mol_type = other DNA

SEQ ID NO: 14484 - protein, 17 aa, synthetic construct
  REGION 1..17: note = Description of Artificial Sequence: Synthetic peptide
SISGSSSYIYYADSVKG

SEQ ID NO: 14485 - DNA, 51 bp, synthetic construct; identical to SEQ ID NO: 12123
  misc_feature 1..51: note = Description of Artificial Sequence: Synthetic oligonucleotide
  source 1..51: mol_type = other DNA

SEQ ID NO: 14486 - protein, 17 aa, synthetic construct
  REGION 1..17: note = Description of Artificial Sequence: Synthetic peptide
VIWYDGSNKYYADSVKG

SEQ ID NO: 14487 - DNA, 51 bp, synthetic construct; identical to SEQ ID NO: 13243
  misc_feature 1..51: note = Description of Artificial Sequence: Synthetic oligonucleotide
  source 1..51: mol_type = other DNA

SEQ ID NO: 14488 - protein, 17 aa, synthetic construct
  REGION 1..17: note = Description of Artificial Sequence: Synthetic peptide
IIWYDGSNKYYVDSVKG

SEQ ID NO: 14489 - DNA, 51 bp, synthetic construct; identical to SEQ ID NO: 14437
  misc_feature 1..51: note = Description of Artificial Sequence: Synthetic oligonucleotide
  source 1..51: mol_type = other DNA

SEQ ID NO: 14490 - protein, 17 aa, synthetic construct
  REGION 1..17: note = Description of Artificial Sequence: Synthetic peptide
IIWYDGTNKYYADSVKG

SEQ ID NO: 14491 - DNA, 51 bp, synthetic construct; identical to SEQ ID NO: 12161
  misc_feature 1..51: note = Description of Artificial Sequence: Synthetic oligonucleotide
  source 1..51: mol_type = other DNA

SEQ ID NO: 14492 - protein, 17 aa, synthetic construct
  REGION 1..17: note = Description of Artificial Sequence: Synthetic peptide
WMHPNSGNTGYAQKFQG

SEQ ID NO: 14493 - DNA, 51 bp, synthetic construct
  misc_feature 1..51: note = Description of Artificial Sequence: Synthetic oligonucleotide
  source 1..51: mol_type = other DNA
tttattagtggtagtggtggtaacacattctacgcagactccgtgaagggc

SEQ ID NO: 14494 - protein, 17 aa, synthetic construct
  REGION 1..17: note = Description of Artificial Sequence: Synthetic peptide
FISGSGGNTFYADSVKG

SEQ ID NO: 14495 - DNA, 51 bp, synthetic construct; identical to SEQ ID NO: 12127
  misc_feature 1..51: note = Description of Artificial Sequence: Synthetic oligonucleotide
  source 1..51: mol_type = other DNA

SEQ ID NO: 14496 - protein, 17 aa, synthetic construct
  REGION 1..17: note = Description of Artificial Sequence: Synthetic peptide
IIWYDGSNKYYADSVKG

SEQ ID NO: 14497 - DNA, 51 bp, synthetic construct
  misc_feature 1..51: note = Description of Artificial Sequence: Synthetic oligonucleotide
  source 1..51: mol_type = other DNA
cttatattttatgatggaagtaataaatactatgcagactccgtgaagggc

SEQ ID NO: 14498 - protein, 17 aa, synthetic construct
  REGION 1..17: note = Description of Artificial Sequence: Synthetic peptide
LIFYDGSNKYYADSVKG

SEQ ID NO: 14499 - DNA, 51 bp, synthetic construct
  misc_feature 1..51: note = Description of Artificial Sequence: Synthetic oligonucleotide
  source 1..51: mol_type = other DNA
attatatggtatgatggaactaacaaatactatgcagactccgtgaagggc

SEQ ID NO: 14500 - protein, 17 aa, synthetic construct
  REGION 1..17: note = Description of Artificial Sequence: Synthetic peptide
IIWYDGTNKYYADSVKG

SEQ ID NO: 14501 - DNA, 51 bp, synthetic construct; identical to SEQ ID NO: 12161
  misc_feature 1..51: note = Description of Artificial Sequence: Synthetic oligonucleotide
  source 1..51: mol_type = other DNA

SEQ ID NO: 14502 - protein, 17 aa, synthetic construct
  REGION 1..17: note = Description of Artificial Sequence: Synthetic peptide
WMHPNSGNTGYAQKFQG

SEQ ID NO: 14503 - DNA, 51 bp, synthetic construct; identical to SEQ ID NO: 14479
  misc_feature 1..51: note = Description of Artificial Sequence: Synthetic oligonucleotide
  source 1..51: mol_type = other DNA

SEQ ID NO: 14504 - protein, 17 aa, synthetic construct
  REGION 1..17: note = Description of Artificial Sequence: Synthetic peptide
VISGSGGSTFYTDSVKG

SEQ ID NO: 14505 - DNA, 51 bp, synthetic construct; identical to SEQ ID NO: 12123
  misc_feature 1..51: note = Description of Artificial Sequence: Synthetic oligonucleotide
  source 1..51: mol_type = other DNA

SEQ ID NO: 14506 - protein, 17 aa, synthetic construct
  REGION 1..17: note = Description of Artificial Sequence: Synthetic peptide
VIWYDGSNKYYADSVKG

SEQ ID NO: 14507 - DNA, 51 bp, synthetic construct; identical to SEQ ID NO: 12123
  misc_feature 1..51: note = Description of Artificial Sequence: Synthetic oligonucleotide
  source 1..51: mol_type = other DNA

SEQ ID NO: 14508 - protein, 17 aa, synthetic construct
  REGION 1..17: note = Description of Artificial Sequence: Synthetic peptide
VIWYDGSNKYYADSVKG

SEQ ID NO: 14509 - DNA, 51 bp, synthetic construct
  misc_feature 1..51: note = Description of Artificial Sequence: Synthetic oligonucleotide
  source 1..51: mol_type = other DNA
tggatcaagcctaaaagtggtggcacaaactgtgcacagaggtttcagggc

SEQ ID NO: 14510 - protein, 17 aa, synthetic construct
  REGION 1..17: note = Description of Artificial Sequence: Synthetic peptide
WIKPKSGGTNCAQRFQG

SEQ ID NO: 14511 - DNA, 51 bp, synthetic construct
  misc_feature 1..51: note = Description of Artificial Sequence: Synthetic oligonucleotide
  source 1..51: mol_type = other DNA
gctattagtggtagtggtgatagaacatactacgcagactccgtgaagggc

SEQ ID NO: 14512 - protein, 17 aa, synthetic construct
  REGION 1..17: note = Description of Artificial Sequence: Synthetic peptide
AISGSGDRTYYADSVKG

SEQ ID NO: 14513 - DNA, 51 bp, synthetic construct
  misc_feature 1..51: note = Description of Artificial Sequence: Synthetic oligonucleotide
  source 1..51: mol_type = other DNA
tctattagtggtcgtggtggtagcacgttctacgcagactccgtgaagggc

SEQ ID NO: 14514 - protein, 17 aa, synthetic construct
  REGION 1..17: note = Description of Artificial Sequence: Synthetic peptide
SISGRGGSTFYADSVKG

SEQ ID NO: 14515 - DNA, 51 bp, synthetic construct; identical to SEQ ID NO: 12161
  misc_feature 1..51: note = Description of Artificial Sequence: Synthetic oligonucleotide
  source 1..51: mol_type = other DNA

SEQ ID NO: 14516 - protein, 17 aa, synthetic construct
  REGION 1..17: note = Description of Artificial Sequence: Synthetic peptide
WMHPNSGNTGYAQKFQG

SEQ ID NO: 14517 - DNA, 51 bp, synthetic construct
  misc_feature 1..51: note = Description of Artificial Sequence: Synthetic oligonucleotide
  source 1..51: mol_type = other DNA
attattagtggtagtggtggtaacacatactacgcagactccgtgaagggc

SEQ ID NO: 14518 - protein, 17 aa, synthetic construct
  REGION 1..17: note = Description of Artificial Sequence: Synthetic peptide
IISGSGGNTYYADSVKG

SEQ ID NO: 14519 - DNA, 51 bp, synthetic construct; identical to SEQ ID NO: 12501
  misc_feature 1..51: note = Description of Artificial Sequence: Synthetic oligonucleotide
  source 1..51: mol_type = other DNA

SEQ ID NO: 14520 - protein, 17 aa, synthetic construct
  REGION 1..17: note = Description of Artificial Sequence: Synthetic peptide
IIWYDGSYKYYADSVKG

SEQ ID NO: 14521 - DNA, 51 bp, synthetic construct
  misc_feature 1..51: note = Description of Artificial Sequence: Synthetic oligonucleotide
  source 1..51: mol_type = other DNA
tacattagcattagtggtagtaccataaagtacgcagactctgtgaagggc

SEQ ID NO: 14522 - protein, 17 aa, synthetic construct
  REGION 1..17: note = Description of Artificial Sequence: Synthetic peptide
YISISGSTIKYADSVKG

SEQ ID NO: 14523 - DNA, 51 bp, synthetic construct; identical to SEQ ID NO: 14437
  misc_feature 1..51: note = Description of Artificial Sequence: Synthetic oligonucleotide
  source 1..51: mol_type = other DNA

SEQ ID NO: 14524 - protein, 17 aa, synthetic construct
  REGION 1..17: note = Description of Artificial Sequence: Synthetic peptide
IIWYDGTNKYYADSVKG

SEQ ID NO: 14525 - DNA, 51 bp, synthetic construct
  misc_feature 1..51: note = Description of Artificial Sequence: Synthetic oligonucleotide
  source 1..51: mol_type = other DNA
gttatatggtatgatggaagtaataaatactatgccgactccgtgaagggc

SEQ ID NO: 14526 - protein, 17 aa, synthetic construct
  REGION 1..17: note = Description of Artificial Sequence: Synthetic peptide
VIWYDGSNKYYADSVKG

SEQ ID NO: 14527 - DNA, 51 bp, synthetic construct
  misc_feature 1..51: note = Description of Artificial Sequence: Synthetic oligonucleotide
  source 1..51: mol_type = other DNA
ggtatgagcggtagtggtggtagaacatactacgcagactccgtgaaggac

SEQ ID NO: 14528 - protein, 17 aa, synthetic construct
  REGION 1..17: note = Description of Artificial Sequence: Synthetic peptide
GMSGSGGRTYYADSVKD

SEQ ID NO: 14529 - DNA, 51 bp, synthetic construct; identical to SEQ ID NO: 12123
  misc_feature 1..51: note = Description of Artificial Sequence: Synthetic oligonucleotide
  source 1..51: mol_type = other DNA

SEQ ID NO: 14530 - protein, 17 aa, synthetic construct
  REGION 1..17: note = Description of Artificial Sequence: Synthetic peptide
VIWYDGSNKYYADSVKG

SEQ ID NO: 14531 - DNA, 51 bp, synthetic construct
  misc_feature 1..51: note = Description of Artificial Sequence: Synthetic oligonucleotide
  source 1..51: mol_type = other DNA
gttattagtggtagtggtagtaacacatactacgtagactccgtgaagggc

SEQ ID NO: 14532 - protein, 17 aa, synthetic construct
  REGION 1..17: note = Description of Artificial Sequence: Synthetic peptide
VISGSGSNTYYVDSVKG

SEQ ID NO: 14533 - DNA, 51 bp, synthetic construct
  misc_feature 1..51: note = Description of Artificial Sequence: Synthetic oligonucleotide
  source 1..51: mol_type = other DNA
attatatggtatgatggaagttataaatactatacagactccgtgaagggc

SEQ ID NO: 14534 - protein, 17 aa, synthetic construct
  REGION 1..17: note = Description of Artificial Sequence: Synthetic peptide
IIWYDGSYKYYTDSVKG

SEQ ID NO: 14535 - DNA, 51 bp, synthetic construct; identical to SEQ ID NO: 12161
  misc_feature 1..51: note = Description of Artificial Sequence: Synthetic oligonucleotide
  source 1..51: mol_type = other DNA

SEQ ID NO: 14536 - protein, 17 aa, synthetic construct
  REGION 1..17: note = Description of Artificial Sequence: Synthetic peptide
WMHPNSGNTGYAQKFQG

SEQ ID NO: 14537 - DNA, 51 bp, synthetic construct
  misc_feature 1..51: note = Description of Artificial Sequence: Synthetic oligonucleotide
  source 1..51: mol_type = other DNA
gttattagtggtagtggtggtaatacattctacgcagactccgtgaagggc

SEQ ID NO: 14538 - protein, 17 aa, synthetic construct
  REGION 1..17: note = Description of Artificial Sequence: Synthetic peptide
VISGSGGNTFYADSVKG

SEQ ID NO: 14539 - DNA, 51 bp, synthetic construct; identical to SEQ ID NO: 12347
  misc_feature 1..51: note = Description of Artificial Sequence: Synthetic oligonucleotide
  source 1..51: mol_type = other DNA

SEQ ID NO: 14540 - protein, 17 aa, synthetic construct
  REGION 1..17: note = Description of Artificial Sequence: Synthetic peptide
VISGSGGNTFYADSVKG

SEQ ID NO: 14541 - DNA, 51 bp, synthetic construct; identical to SEQ ID NO: 14437
  misc_feature 1..51: note = Description of Artificial Sequence: Synthetic oligonucleotide
  source 1..51: mol_type = other DNA

SEQ ID NO: 14542 - protein, 17 aa, synthetic construct
  REGION 1..17: note = Description of Artificial Sequence: Synthetic peptide
IIWYDGTNKYYADSVKG

SEQ ID NO: 14543 - DNA, 51 bp, synthetic construct
  misc_feature 1..51: note = Description of Artificial Sequence: Synthetic oligonucleotide
  source 1..51: mol_type = other DNA
gttatatggtatgatggaagtaataaatactacgcagactccgtgaagggc

SEQ ID NO: 14544 - protein, 17 aa, synthetic construct
  REGION 1..17: note = Description of Artificial Sequence: Synthetic peptide
VIWYDGSNKYYADSVKG

SEQ ID NO: 14545 - DNA, 51 bp, synthetic construct
  misc_feature 1..51: note = Description of Artificial Sequence: Synthetic oligonucleotide
  source 1..51: mol_type = other DNA
gttattagtggttttggtggtaacacattctacgcagactccgtgaagggc

SEQ ID NO: 14546 - protein, 17 aa, synthetic construct
  REGION 1..17: note = Description of Artificial Sequence: Synthetic peptide
VISGFGGNTFYADSVKG

SEQ ID NO: 14547 - DNA, 51 bp, synthetic construct; identical to SEQ ID NO: 14497
  misc_feature 1..51: note = Description of Artificial Sequence: Synthetic oligonucleotide
  source 1..51: mol_type = other DNA

SEQ ID NO: 14548 - protein, 17 aa, synthetic construct
  REGION 1..17: note = Description of Artificial Sequence: Synthetic peptide
LIFYDGSNKYYADSVKG

SEQ ID NO: 14549 - DNA, 51 bp, synthetic construct
  misc_feature 1..51: note = Description of Artificial Sequence: Synthetic oligonucleotide
  source 1..51: mol_type = other DNA
gttattagcggtcgcggtggtaacacattctacgcagactccgtgaagggc

SEQ ID NO: 14550 - protein, 17 aa, synthetic construct
  REGION 1..17: note = Description of Artificial Sequence: Synthetic peptide
VISGRGGNTFYADSVKG

SEQ ID NO: 14551 - DNA, 51 bp, synthetic construct
  misc_feature 1..51: note = Description of Artificial Sequence: Synthetic oligonucleotide
  source 1..51: mol_type = other DNA
attatttggtatgatggaagttataaatactatgcagactccgtgaagggc

SEQ ID NO: 14552 - protein, 17 aa, synthetic construct
  REGION 1..17: note = Description of Artificial Sequence: Synthetic peptide
IIWYDGSYKYYADSVKG

SEQ ID NO: 14553 - DNA, 51 bp, synthetic construct
  misc_feature 1..51: note = Description of Artificial Sequence: Synthetic oligonucleotide
  source 1..51: mol_type = other DNA
gttatatggtatgatgaaaataataaacactatgcagactccgcgaagggc

SEQ ID NO: 14554 - protein, 17 aa, synthetic construct
  REGION 1..17: note = Description of Artificial Sequence: Synthetic peptide
VIWYDENNKHYADSAKG

SEQ ID NO: 14555 - DNA, 51 bp, synthetic construct
  misc_feature 1..51: note = Description of Artificial Sequence: Synthetic oligonucleotide
  source 1..51: mol_type = other DNA
gttatatggtatgatggaagtgataaatactatgaagactccgtgaagggc

SEQ ID NO: 14556 - protein, 17 aa, synthetic construct
  REGION 1..17: note = Description of Artificial Sequence: Synthetic peptide
VIWYDGSDKYYEDSVKG

SEQ ID NO: 14557 - DNA, 51 bp, synthetic construct; identical to SEQ ID NO: 12501
  misc_feature 1..51: note = Description of Artificial Sequence: Synthetic oligonucleotide
  source 1..51: mol_type = other DNA

SEQ ID NO: 14558 - protein, 17 aa, synthetic construct
  REGION 1..17: note = Description of Artificial Sequence: Synthetic peptide
IIWYDGSYKYYADSVKG

SEQ ID NO: 14559 - DNA, 51 bp, synthetic construct
  misc_feature 1..51: note = Description of Artificial Sequence: Synthetic oligonucleotide
  source 1..51: mol_type = other DNA
tggatcaaccctaacaatggtggctcaaactatacacagaagtttcagggc

SEQ ID NO: 14560 - protein, 17 aa, synthetic construct
  REGION 1..17: note = Description of Artificial Sequence: Synthetic peptide
WINPNNGGSNYTQKFQG

SEQ ID NO: 14561 - DNA, 51 bp, synthetic construct
  misc_feature 1..51: note = Description of Artificial Sequence: Synthetic oligonucleotide
  source 1..51: mol_type = other DNA
gttattagtggtagtggtggtaacacattctacggagactccgtgaagggc

SEQ ID NO: 14562 - protein, 17 aa, synthetic construct
  REGION 1..17: note = Description of Artificial Sequence: Synthetic peptide
VISGSGGNTFYGDSVKG

SEQ ID NO: 14563 - DNA, 51 bp, synthetic construct; identical to SEQ ID NO: 12103
  misc_feature 1..51: note = Description of Artificial Sequence: Synthetic oligonucleotide
  source 1..51: mol_type = other DNA

SEQ ID NO: 14564 - protein, 17 aa, synthetic construct
  REGION 1..17: note = Description of Artificial Sequence: Synthetic peptide
WMNPNSGNTGYAQKFQG

SEQ ID NO: 14565 - DNA, 51 bp, synthetic construct; identical to SEQ ID NO: 14553
  misc_feature 1..51: note = Description of Artificial Sequence: Synthetic oligonucleotide
  source 1..51: mol_type = other DNA

SEQ ID NO: 14566 - protein, 17 aa, synthetic construct
  REGION 1..17: note = Description of Artificial Sequence: Synthetic peptide
VIWYDENNKHYADSAKG

SEQ ID NO: 14567 - DNA, 51 bp, synthetic construct; identical to SEQ ID NO: 12501
  misc_feature 1..51: note = Description of Artificial Sequence: Synthetic oligonucleotide
  source 1..51: mol_type = other DNA

SEQ ID NO: 14568 - protein, 17 aa, synthetic construct
  REGION 1..17: note = Description of Artificial Sequence: Synthetic peptide
IIWYDGSYKYYADSVKG

SEQ ID NO: 14569 - DNA, 51 bp, synthetic construct
  misc_feature 1..51: note = Description of Artificial Sequence: Synthetic oligonucleotide
  source 1..51: mol_type = other DNA
gttattagtggtagaggtggtaccacattctacgcagactccgtgaagggc

SEQ ID NO: 14570 - protein, 17 aa, synthetic construct
  REGION 1..17: note = Description of Artificial Sequence: Synthetic peptide
VISGRGGTTFYADSVKG

SEQ ID NO: 14571 - DNA, 51 bp, synthetic construct
  misc_feature 1..51: note = Description of Artificial Sequence: Synthetic oligonucleotide
  source 1..51: mol_type = other DNA
attatatcatatgctggaagtactaaattctatgcagactccgtgaagggc

SEQ ID NO: 14572 - protein, 17 aa, synthetic construct
  REGION 1..17: note = Description of Artificial Sequence: Synthetic peptide
IISYAGSTKFYADSVKG

SEQ ID NO: 14573 - DNA, 51 bp, synthetic construct
  misc_feature 1..51: note = Description of Artificial Sequence: Synthetic oligonucleotide
  source 1..51: mol_type = other DNA
gttatatcatctgctggaagtaataaatactatgcagactccgtgaagggc

SEQ ID NO: 14574 - protein, 17 aa, synthetic construct
  REGION 1..17: note = Description of Artificial Sequence: Synthetic peptide
VISSAGSNKYYADSVKG

SEQ ID NO: 14575 - DNA, 51 bp, synthetic construct
  misc_feature 1..51: note = Description of Artificial Sequence: Synthetic oligonucleotide
  source 1..51: mol_type = other DNA
tctattagtagtggtagtggttacatacactacgcagactcagtgaagggc

SEQ ID NO: 14576 - protein, 17 aa, synthetic construct
  REGION 1..17: note = Description of Artificial Sequence: Synthetic peptide
SISSGSGYIHYADSVKG

SEQ ID NO: 14577 - DNA, 48 bp, synthetic construct; identical to SEQ ID NO: 14443
  misc_feature 1..48: note = Description of Artificial Sequence: Synthetic oligonucleotide
  source 1..48: mol_type = other DNA

SEQ ID NO: 14578 - protein, 16 aa, synthetic construct
  REGION 1..16: note = Description of Artificial Sequence: Synthetic peptide
RIYTSGSTNYNPSLKS

SEQ ID NO: 14579 - DNA, 51 bp, synthetic construct; identical to SEQ ID NO: 13745
  misc_feature 1..51: note = Description of Artificial Sequence: Synthetic oligonucleotide
  source 1..51: mol_type = other DNA

SEQ ID NO: 14580 - protein, 17 aa, synthetic construct
  REGION 1..17: note = Description of Artificial Sequence: Synthetic peptide
VIWYDGSNKNYADSVKG

SEQ ID NO: 14581 - DNA, 51 bp, synthetic construct
  misc_feature 1..51: note = Description of Artificial Sequence: Synthetic oligonucleotide
  source 1..51: mol_type = other DNA
attatatggtttgatggaagtaataaatactatgcagactccgtgaagggc

SEQ ID NO: 14582 - protein, 17 aa, synthetic construct
  REGION 1..17: note = Description of Artificial Sequence: Synthetic peptide
IIWFDGSNKYYADSVKG

SEQ ID NO: 14583 - DNA, 51 bp, synthetic construct
  misc_feature 1..51: note = Description of Artificial Sequence: Synthetic oligonucleotide
  source 1..51: mol_type = other DNA
actattagtggtactggtcgtaggacatactacgcagactccgtgaagggc

SEQ ID NO: 14584 - protein, 17 aa, synthetic construct
  REGION 1..17: note = Description of Artificial Sequence: Synthetic peptide
TISGTGRRTYYADSVKG

SEQ ID NO: 14585 - DNA, 51 bp, synthetic construct; identical to SEQ ID NO: 13745
  misc_feature 1..51: note = Description of Artificial Sequence: Synthetic oligonucleotide
  source 1..51: mol_type = other DNA

SEQ ID NO: 14586 - protein, 17 aa, synthetic construct
  REGION 1..17: note = Description of Artificial Sequence: Synthetic peptide
VIWYDGSNKNYADSVKG

SEQ ID NO: 14587 - DNA, 48 bp, synthetic construct
  misc_feature 1..48: note = Description of Artificial Sequence: Synthetic oligonucleotide
  source 1..48: mol_type = other DNA
cttatctataccagtaggagcaccatttacaacccctccctcaagagt

SEQ ID NO: 14588 - protein, 16 aa, synthetic construct
  REGION 1..16: note = Description of Artificial Sequence: Synthetic peptide
LIYTSRSTIYNPSLKS

SEQ ID NO: 14589 - DNA, 48 bp, synthetic construct
  misc_feature 1..48: note = Description of Artificial Sequence: Synthetic oligonucleotide
  source 1..48: mol_type = other DNA
tatatctattacagtgggagcacctactacaacccgtccctcaagagt

SEQ ID NO: 14590 - protein, 16 aa, synthetic construct
  REGION 1..16: note = Description of Artificial Sequence: Synthetic peptide
YIYYSGSTYYNPSLKS

SEQ ID NO: 14591 - DNA, 51 bp, synthetic construct
  misc_feature 1..51: note = Description of Artificial Sequence: Synthetic oligonucleotide
  source 1..51: mol_type = other DNA
gttatatcatatgatggaggttataaaaactatgtagactccgtgaagggc

SEQ ID NO: 14592 - protein, 17 aa, synthetic construct
  REGION 1..17: note = Description of Artificial Sequence: Synthetic peptide
VISYDGGYKNYVDSVKG

SEQ ID NO: 14593 - DNA, 51 bp, synthetic construct
  misc_feature 1..51: note = Description of Artificial Sequence: Synthetic oligonucleotide
  source 1..51: mol_type = other DNA
gctattattggtaatggtggtaggacatactacgcagactccgtgaagggc

SEQ ID NO: 14594 - protein, 17 aa, synthetic construct
  REGION 1..17: note = Description of Artificial Sequence: Synthetic peptide
AIIGNGGRTYYADSVKG

SEQ ID NO: 14595 - DNA, 51 bp, synthetic construct
  misc_feature 1..51: note = Description of Artificial Sequence: Synthetic oligonucleotide
  source 1..51: mol_type = other DNA
gttatatggtttgatggaagtaatgactactatgcagactccgtgaagggc

SEQ ID NO: 14596 - protein, 17 aa, synthetic construct
  REGION 1..17: note = Description of Artificial Sequence: Synthetic peptide
VIWFDGSNDYYADSVKG

SEQ ID NO: 14597 - DNA, 51 bp, synthetic construct
  misc_feature 1..51: note = Description of Artificial Sequence: Synthetic oligonucleotide
  source 1..51: mol_type = other DNA
gttatatggtatgatggaactaataaaaactatgcagactccgtgaagggc

SEQ ID NO: 14598 - protein, 17 aa, synthetic construct
  REGION 1..17: note = Description of Artificial Sequence: Synthetic peptide
VIWYDGTNKNYADSVKG

SEQ ID NO: 14599 - DNA, 48 bp, synthetic construct
  misc_feature 1..48: note = Description of Artificial Sequence: Synthetic oligonucleotide
  source 1..48: mol_type = other DNA
catatctataccagtgggagcaccaagtacaacccctccctcaagagt

SEQ ID NO: 14600 - protein, 16 aa, synthetic construct
  REGION 1..16: note = Description of Artificial Sequence: Synthetic peptide
HIYTSGSTKYNPSLKS

SEQ ID NO: 14601 - DNA, 51 bp, synthetic construct; identical to SEQ ID NO: 12161
  misc_feature 1..51: note = Description of Artificial Sequence: Synthetic oligonucleotide
  source 1..51: mol_type = other DNA

SEQ ID NO: 14602 - protein, 17 aa, synthetic construct
  REGION 1..17: note = Description of Artificial Sequence: Synthetic peptide
WMHPNSGNTGYAQKFQG

SEQ ID NO: 14603 - DNA, 48 bp, synthetic construct
  misc_feature 1..48: note = Description of Artificial Sequence: Synthetic oligonucleotide
  source 1..48: mol_type = other DNA
tacatcttttacagtgggagcacctactacaacccgtccctcaagagt

SEQ ID NO: 14604 - protein, 16 aa, synthetic construct
  REGION 1..16: note = Description of Artificial Sequence: Synthetic peptide
YIFYSGSTYYNPSLKS

SEQ ID NO: 14605 - DNA, 51 bp, synthetic construct
  misc_feature 1..51: note = Description of Artificial Sequence: Synthetic oligonucleotide
  source 1..51: mol_type = other DNA
gttatatggtatgatggaagtaatgaacactatgcagactccgtgaagggc

SEQ ID NO: 14606 - protein, 17 aa, synthetic construct
  REGION 1..17: note = Description of Artificial Sequence: Synthetic peptide
VIWYDGSNEHYADSVKG

SEQ ID NO: 14607 - DNA, 48 bp, synthetic construct; identical to SEQ ID NO: 14603
  misc_feature 1..48: note = Description of Artificial Sequence: Synthetic oligonucleotide
  source 1..48: mol_type = other DNA

SEQ ID NO: 14608 - protein, 16 aa, synthetic construct
  REGION 1..16: note = Description of Artificial Sequence: Synthetic peptide
YIFYSGSTYYNPSLKS

SEQ ID NO: 14609 - DNA, 48 bp, synthetic construct; identical to SEQ ID NO: 14603
  misc_feature 1..48: note = Description of Artificial Sequence: Synthetic oligonucleotide
  source 1..48: mol_type = other DNA

SEQ ID NO: 14610 - protein, 16 aa, synthetic construct
  REGION 1..16: note = Description of Artificial Sequence: Synthetic peptide
YIFYSGSTYYNPSLKS

SEQ ID NO: 14611 - DNA, 48 bp, synthetic construct; identical to SEQ ID NO: 14603
  misc_feature 1..48: note = Description of Artificial Sequence: Synthetic oligonucleotide
  source 1..48: mol_type = other DNA

SEQ ID NO: 14612 - protein, 16 aa, synthetic construct
  REGION 1..16: note = Description of Artificial Sequence: Synthetic peptide
YIFYSGSTYYNPSLKS

SEQ ID NO: 14613 - DNA, 48 bp, synthetic construct
  misc_feature 1..48: note = Description of Artificial Sequence: Synthetic oligonucleotide
  source 1..48: mol_type = other DNA
cttatctataccagtaggagcaccaattacaacccctccctcaagagt

SEQ ID NO: 14614 - protein, 16 aa, synthetic construct
  REGION 1..16: note = Description of Artificial Sequence: Synthetic peptide
LIYTSRSTNYNPSLKS

SEQ ID NO: 14615 - DNA, 51 bp, synthetic construct
  misc_feature 1..51: note = Description of Artificial Sequence: Synthetic oligonucleotide
  source 1..51: mol_type = other DNA
cggatgaaccctaacagtggtaacacaggctatgcacagaagttccagggc

SEQ ID NO: 14616 - protein, 17 aa, synthetic construct
  REGION 1..17: note = Description of Artificial Sequence: Synthetic peptide
RMNPNSGNTGYAQKFQG

SEQ ID NO: 14617 - DNA, 51 bp, synthetic construct; identical to SEQ ID NO: 12143
  misc_feature 1..51: note = Description of Artificial Sequence: Synthetic oligonucleotide
  source 1..51: mol_type = other DNA

SEQ ID NO: 14618 - protein, 17 aa, synthetic construct
  REGION 1..17: note = Description of Artificial Sequence: Synthetic peptide
VISYDGGYKNYADSVKG

SEQ ID NO: 14619 - DNA, 51 bp, synthetic construct; identical to SEQ ID NO: 13745
  misc_feature 1..51: note = Description of Artificial Sequence: Synthetic oligonucleotide
  source 1..51: mol_type = other DNA

SEQ ID NO: 14620 - protein, 17 aa, synthetic construct
  REGION 1..17: note = Description of Artificial Sequence: Synthetic peptide
VIWYDGSNKNYADSVKG

SEQ ID NO: 14621 - DNA, 51 bp, synthetic construct; identical to SEQ ID NO: 13745
  misc_feature 1..51: note = Description of Artificial Sequence: Synthetic oligonucleotide
  source 1..51: mol_type = other DNA

SEQ ID NO: 14622 - protein, 17 aa, synthetic construct
  REGION 1..17: note = Description of Artificial Sequence: Synthetic peptide
VIWYDGSNKNYADSVKG

SEQ ID NO: 14623 - DNA, 48 bp, synthetic construct
  misc_feature 1..48: note = Description of Artificial Sequence: Synthetic oligonucleotide
  source 1..48: mol_type = other DNA
tacatcttttacagtgggagcacctactacaacccgtccctcaggagt

SEQ ID NO: 14624 - protein, 16 aa, synthetic construct
  REGION 1..16: note = Description of Artificial Sequence: Synthetic peptide
YIFYSGSTYYNPSLRS

SEQ ID NO: 14625 - DNA, 51 bp, synthetic construct
  misc_feature 1..51: note = Description of Artificial Sequence: Synthetic oligonucleotide
  source 1..51: mol_type = other DNA
tccattagtagtggtagtggttacatatattatgcagactcagtgaagggc

SEQ ID NO: 14626 - protein, 17 aa, synthetic construct
  REGION 1..17: note = Description of Artificial Sequence: Synthetic peptide
SISSGSGYIYYADSVKG

SEQ ID NO: 14627 - DNA, 51 bp, synthetic construct; identical to SEQ ID NO: 14583
  misc_feature 1..51: note = Description of Artificial Sequence: Synthetic oligonucleotide
  source 1..51: mol_type = other DNA

SEQ ID NO: 14628 - protein, 17 aa, synthetic construct
  REGION 1..17: note = Description of Artificial Sequence: Synthetic peptide
TISGTGRRTYYADSVKG

SEQ ID NO: 14629 - DNA, 51 bp, synthetic construct
  misc_feature 1..51: note = Description of Artificial Sequence: Synthetic oligonucleotide
  source 1..51: mol_type = other DNA
gttatatggtatgatggaagtaataaacattatgcagactccgtgaagggc

SEQ ID NO: 14630 - protein, 17 aa, synthetic construct
  REGION 1..17: note = Description of Artificial Sequence: Synthetic peptide
VIWYDGSNKHYADSVKG

SEQ ID NO: 14631 - DNA, 48 bp, synthetic construct; identical to SEQ ID NO: 14613
  misc_feature 1..48: note = Description of Artificial Sequence: Synthetic oligonucleotide
  source 1..48: mol_type = other DNA

SEQ ID NO: 14632 - protein, 16 aa, synthetic construct
  REGION 1..16: note = Description of Artificial Sequence: Synthetic peptide
LIYTSRSTNYNPSLKS

SEQ ID NO: 14633 - DNA, 51 bp, synthetic construct
  misc_feature 1..51: note = Description of Artificial Sequence: Synthetic oligonucleotide
  source 1..51: mol_type = other DNA
gttatatggtatgatggaagtaataaaaactacgcagactccgtgaagggc

SEQ ID NO: 14634 - protein, 17 aa, synthetic construct
  REGION 1..17: note = Description of Artificial Sequence: Synthetic peptide
VIWYDGSNKNYADSVKG

SEQ ID NO: 14635 - DNA, 51 bp, synthetic construct
  misc_feature 1..51: note = Description of Artificial Sequence: Synthetic oligonucleotide
  source 1..51: mol_type = other DNA
gctattagtcgtagtggtggtaacacacactacgcagactccgtgaagggc

SEQ ID NO: 14636 - protein, 17 aa, synthetic construct
  REGION 1..17: note = Description of Artificial Sequence: Synthetic peptide
AISRSGGNTHYADSVKG

SEQ ID NO: 14637 - DNA, 51 bp, synthetic construct; identical to SEQ ID NO: 14559
  misc_feature 1..51: note = Description of Artificial Sequence: Synthetic oligonucleotide
  source 1..51: mol_type = other DNA

SEQ ID NO: 14638 - protein, 17 aa, synthetic construct
  REGION 1..17: note = Description of Artificial Sequence: Synthetic peptide
WINPNNGGSNYTQKFQG

SEQ ID NO: 14639 - DNA, 51 bp, synthetic construct
  misc_feature 1..51: note = Description of Artificial Sequence: Synthetic oligonucleotide
  source 1..51: mol_type = other DNA
gttatttggtatgatgaaactaataaacactatggagactccgtgaagggc

SEQ ID NO: 14640 - protein, 17 aa, synthetic construct
  REGION 1..17: note = Description of Artificial Sequence: Synthetic peptide
VIWYDETNKHYGDSVKG

SEQ ID NO: 14641 - DNA, 51 bp, synthetic construct; identical to SEQ ID NO: 14639
  misc_feature 1..51: note = Description of Artificial Sequence: Synthetic oligonucleotide
  source 1..51: mol_type = other DNA

SEQ ID NO: 14642 - protein, 17 aa, synthetic construct
  REGION 1..17: note = Description of Artificial Sequence: Synthetic peptide
VIWYDETNKHYGDSVKG

SEQ ID NO: 14643 - DNA, 51 bp, synthetic construct
  misc_feature 1..51: note = Description of Artificial Sequence: Synthetic oligonucleotide
  source 1..51: mol_type = other DNA
tccattagcagtagtggtagttacatatattacgcagactcagtgaagggc

SEQ ID NO: 14644 - protein, 17 aa, synthetic construct
  REGION 1..17: note = Description of Artificial Sequence: Synthetic peptide
SISSSGSYIYYADSVKG

SEQ ID NO: 14645 - DNA, 51 bp, synthetic construct; identical to SEQ ID NO: 14559
  misc_feature 1..51: note = Description of Artificial Sequence: Synthetic oligonucleotide
  source 1..51: mol_type = other DNA

SEQ ID NO: 14646 - protein, 17 aa, synthetic construct
  REGION 1..17: note = Description of Artificial Sequence: Synthetic peptide
WINPNNGGSNYTQKFQG

SEQ ID NO: 14647 - DNA, 51 bp, synthetic construct
  misc_feature 1..51: note = Description of Artificial Sequence: Synthetic oligonucleotide
  source 1..51: mol_type = other DNA
attatatggtatgatggaagttataaatattatgcagactccgtgaagggc

SEQ ID NO: 14648 - protein, 17 aa, synthetic construct
  REGION 1..17: note = Description of Artificial Sequence: Synthetic peptide
IIWYDGSYKYYADSVKG

SEQ ID NO: 14649 - DNA, 51 bp, synthetic construct; identical to SEQ ID NO: 14569
  misc_feature 1..51: note = Description of Artificial Sequence: Synthetic oligonucleotide
  source 1..51: mol_type = other DNA

SEQ ID NO: 14650 - protein, 17 aa, synthetic construct
  REGION 1..17: note = Description of Artificial Sequence: Synthetic peptide
VISGRGGTTFYADSVKG

SEQ ID NO: 14651 - DNA, 51 bp, synthetic construct
  misc_feature 1..51: note = Description of Artificial Sequence: Synthetic oligonucleotide
  source 1..51: mol_type = other DNA
tggatcaaccctaacagtggtggctcaaactatacacagaagtttcagggc

SEQ ID NO: 14652 - protein, 17 aa, synthetic construct
  REGION 1..17: note = Description of Artificial Sequence: Synthetic peptide
WINPNSGGSNYTQKFQG

SEQ ID NO: 14653 - DNA, 51 bp, synthetic construct
  misc_feature 1..51: note = Description of Artificial Sequence: Synthetic oligonucleotide
  source 1..51: mol_type = other DNA
gttattagtggtagtggtggttacacatactacgcagactccgtgaagggc

SEQ ID NO: 14654 - protein, 17 aa, synthetic construct
  REGION 1..17: note = Description of Artificial Sequence: Synthetic peptide
VISGSGGYTYYADSVKG

SEQ ID NO: 14655 - DNA, 51 bp, synthetic construct; identical to SEQ ID NO: 14651
  misc_feature 1..51: note = Description of Artificial Sequence: Synthetic oligonucleotide
  source 1..51: mol_type = other DNA

SEQ ID NO: 14656 - protein, 17 aa, synthetic construct
  REGION 1..17: note = Description of Artificial Sequence: Synthetic peptide
WINPNSGGSNYTQKFQG

SEQ ID NO: 14657 - DNA, 51 bp, synthetic construct; identical to SEQ ID NO: 12501
  misc_feature 1..51: note = Description of Artificial Sequence: Synthetic oligonucleotide
  source 1..51: mol_type = other DNA

SEQ ID NO: 14658 - protein, 17 aa, synthetic construct
  REGION 1..17: note = Description of Artificial Sequence: Synthetic peptide
IIWYDGSYKYYADSVKG

SEQ ID NO: 14659 - DNA, 51 bp, synthetic construct; identical to SEQ ID NO: 12501
  misc_feature 1..51: note = Description of Artificial Sequence: Synthetic oligonucleotide
  source 1..51: mol_type = other DNA

SEQ ID NO: 14660 - protein, 17 aa, synthetic construct
  REGION 1..17: note = Description of Artificial Sequence: Synthetic peptide
IIWYDGSYKYYADSVKG

SEQ ID NO: 14661 - DNA, 51 bp, synthetic construct
  misc_feature 1..51: note = Description of Artificial Sequence: Synthetic oligonucleotide
  source 1..51: mol_type = other DNA
tacattagtagtagtggtactaccgtattctacgcagactctgtgaagggc

SEQ ID NO: 14662 - protein, 17 aa, synthetic construct
  REGION 1..17: note = Description of Artificial Sequence: Synthetic peptide
YISSSGTTVFYADSVKG

SEQ ID NO: 14663 - DNA, 48 bp, synthetic construct
  misc_feature 1..48: note = Description of Artificial Sequence: Synthetic oligonucleotide
  source 1..48: mol_type = other DNA
ttcatcttttatagtgggagcacctactacaacccgtccctcaagagt

SEQ ID NO: 14664 - protein, 16 aa, synthetic construct
  REGION 1..16: note = Description of Artificial Sequence: Synthetic peptide
FIFYSGSTYYNPSLKS

SEQ ID NO: 14665 - DNA, 51 bp, synthetic construct; identical to SEQ ID NO: 14591
  misc_feature 1..51: note = Description of Artificial Sequence: Synthetic oligonucleotide
  source 1..51: mol_type = other DNA

SEQ ID NO: 14666 - protein, 17 aa, synthetic construct
  REGION 1..17: note = Description of Artificial Sequence: Synthetic peptide
VISYDGGYKNYVDSVKG

SEQ ID NO: 14667 - DNA, 51 bp, synthetic construct
  misc_feature 1..51: note = Description of Artificial Sequence: Synthetic oligonucleotide
  source 1..51: mol_type = other DNA
gctattagtggtcgtggtggtaacacatactacgcagactccgtgaagggc

SEQ ID NO: 14668 - protein, 17 aa, synthetic construct
  REGION 1..17: note = Description of Artificial Sequence: Synthetic peptide
AISGRGGNTYYADSVKG

SEQ ID NO: 14669 - DNA, 48 bp, synthetic construct; identical to SEQ ID NO: 14603
  misc_feature 1..48: note = Description of Artificial Sequence: Synthetic oligonucleotide
  source 1..48: mol_type = other DNA

SEQ ID NO: 14670 - protein, 16 aa, synthetic construct
  REGION 1..16: note = Description of Artificial Sequence: Synthetic peptide
YIFYSGSTYYNPSLKS

SEQ ID NO: 14671 - DNA, 48 bp, synthetic construct
  misc_feature 1..48: note = Description of Artificial Sequence: Synthetic oligonucleotide
  source 1..48: mol_type = other DNA
aacatctattacagtgggagcacctacaacaacccgtccctcaagagt

SEQ ID NO: 14672 - protein, 16 aa, synthetic construct
  REGION 1..16: note = Description of Artificial Sequence: Synthetic peptide
NIYYSGSTYNNPSLKS

SEQ ID NO: 14673 - DNA, 51 bp, synthetic construct; identical to SEQ ID NO: 12103
  misc_feature 1..51: note = Description of Artificial Sequence: Synthetic oligonucleotide
  source 1..51: mol_type = other DNA

SEQ ID NO: 14674 - protein, 17 aa, synthetic construct
  REGION 1..17: note = Description of Artificial Sequence: Synthetic peptide
WMNPNSGNTGYAQKFQG

SEQ ID NO: 14675 - DNA, 48 bp, synthetic construct
  misc_feature 1..48: note = Description of Artificial Sequence: Synthetic oligonucleotide
  source 1..48: mol_type = other DNA
cgtatctatgccagtgggagcaccaactacaacccctccctcaagagt

SEQ ID NO: 14676 - protein, 16 aa, synthetic construct
  REGION 1..16: note = Description of Artificial Sequence: Synthetic peptide
RIYASGSTNYNPSLKS

SEQ ID NO: 14677 - DNA, 51 bp, synthetic construct; identical to SEQ ID NO: 12143
  misc_feature 1..51: note = Description of Artificial Sequence: Synthetic oligonucleotide
  source 1..51: mol_type = other DNA

SEQ ID NO: 14678 - protein, 17 aa, synthetic construct
  REGION 1..17: note = Description of Artificial Sequence: Synthetic peptide
VISYDGGYKNYADSVKG

SEQ ID NO: 14679 - DNA, 51 bp, synthetic construct; identical to SEQ ID NO: 12123
  misc_feature 1..51: note = Description of Artificial Sequence: Synthetic oligonucleotide
  source 1..51: mol_type = other DNA

SEQ ID NO: 14680 - protein, 17 aa, synthetic construct
  REGION 1..17: note = Description of Artificial Sequence: Synthetic peptide
VIWYDGSNKYYADSVKG

SEQ ID NO: 14681 - DNA, 51 bp, synthetic construct; identical to SEQ ID NO: 14661
  misc_feature 1..51: note = Description of Artificial Sequence: Synthetic oligonucleotide
  source 1..51: mol_type = other DNA

SEQ ID NO: 14682 - protein, 17 aa, synthetic construct
  REGION 1..17: note = Description of Artificial Sequence: Synthetic peptide
YISSSGTTVFYADSVKG

SEQ ID NO: 14683 - DNA, 51 bp, synthetic construct
  misc_feature 1..51: note = Description of Artificial Sequence: Synthetic oligonucleotide
  source 1..51: mol_type = other DNA
tggatgaaccctaatagtggtaatacaggctatgcacagaagttccagggc

SEQ ID NO: 14684 - protein, 17 aa, synthetic construct
  REGION 1..17: note = Description of Artificial Sequence: Synthetic peptide
WMNPNSGNTGYAQKFQG

SEQ ID NO: 14685 - DNA, 48 bp, synthetic construct
  misc_feature 1..48: note = Description of Artificial Sequence: Synthetic oligonucleotide
  source 1..48: mol_type = other DNA
catatctataccagtaggagcaccaactacaacccctccctcaagagt

SEQ ID NO: 14686 - protein, 16 aa, synthetic construct
  REGION 1..16: note = Description of Artificial Sequence: Synthetic peptide
HIYTSRSTNYNPSLKS

SEQ ID NO: 14687 - DNA, 51 bp, synthetic construct; identical to SEQ ID NO: 14583
  misc_feature 1..51: note = Description of Artificial Sequence: Synthetic oligonucleotide
  source 1..51: mol_type = other DNA

SEQ ID NO: 14688 - protein, 17 aa, synthetic construct
  REGION 1..17: note = Description of Artificial Sequence: Synthetic peptide
TISGTGRRTYYADSVKG

SEQ ID NO: 14689 - DNA, 51 bp, synthetic construct; identical to SEQ ID NO: 13745
  misc_feature 1..51: note = Description of Artificial Sequence: Synthetic oligonucleotide
  source 1..51: mol_type = other DNA

SEQ ID NO: 14690 - protein, 17 aa, synthetic construct
  REGION 1..17: note = Description of Artificial Sequence: Synthetic peptide
VIWYDGSNKNYADSVKG

SEQ ID NO: 14691 - DNA, 51 bp, synthetic construct
  misc_feature 1..51: note = Description of Artificial Sequence: Synthetic oligonucleotide
  source 1..51: mol_type = other DNA
actattagtggtactggtcgtaggacatattacgcagactccgtgaagggc

SEQ ID NO: 14692 - protein, 17 aa, synthetic construct
  REGION 1..17: note = Description of Artificial Sequence: Synthetic peptide
TISGTGRRTYYADSVKG

SEQ ID NO: 14693 - DNA, 51 bp, synthetic construct; identical to SEQ ID NO: 14595
  misc_feature 1..51: note = Description of Artificial Sequence: Synthetic oligonucleotide
  source 1..51: mol_type = other DNA

SEQ ID NO: 14694 - protein, 17 aa, synthetic construct
  REGION 1..17: note = Description of Artificial Sequence: Synthetic peptide
VIWFDGSNDYYADSVKG

SEQ ID NO: 14695 - DNA, 48 bp, synthetic construct; identical to SEQ ID NO: 14603
  misc_feature 1..48: note = Description of Artificial Sequence: Synthetic oligonucleotide
  source 1..48: mol_type = other DNA

SEQ ID NO: 14696 - protein, 16 aa, synthetic construct
  REGION 1..16: note = Description of Artificial Sequence: Synthetic peptide
YIFYSGSTYYNPSLKS

SEQ ID NO: 14697 - DNA, 51 bp, synthetic construct
  misc_feature 1..51: note = Description of Artificial Sequence: Synthetic oligonucleotide
  source 1..51: mol_type = other DNA
attatatggtttgatggaagtaatcaatactatgccgactccgtgaagggc

SEQ ID NO: 14698 - protein, 17 aa, synthetic construct
  REGION 1..17: note = Description of Artificial Sequence: Synthetic peptide
IIWFDGSNQYYADSVKG

SEQ ID NO: 14699 - DNA, 48 bp, synthetic construct; identical to SEQ ID NO: 14589
  misc_feature 1..48: note = Description of Artificial Sequence: Synthetic oligonucleotide
  source 1..48: mol_type = other DNA

SEQ ID NO: 14700 - protein, 16 aa, synthetic construct
  REGION 1..16: note = Description of Artificial Sequence: Synthetic peptide
YIYYSGSTYYNPSLKS

SEQ ID NO: 14701 - DNA, 51 bp, synthetic construct; identical to SEQ ID NO: 14633
  misc_feature 1..51: note = Description of Artificial Sequence: Synthetic oligonucleotide
  source 1..51: mol_type = other DNA

SEQ ID NO: 14702 - protein, 17 aa, synthetic construct
  REGION 1..17: note = Description of Artificial Sequence: Synthetic peptide
VIWYDGSNKNYADSVKG

SEQ ID NO: 14703 - DNA, 51 bp, synthetic construct; identical to SEQ ID NO: 14633
  misc_feature 1..51: note = Description of Artificial Sequence: Synthetic oligonucleotide
  source 1..51: mol_type = other DNA

SEQ ID NO: 14704 - protein, 17 aa, synthetic construct
  REGION 1..17: note = Description of Artificial Sequence: Synthetic peptide
VIWYDGSNKNYADSVKG

SEQ ID NO: 14705 - DNA, 51 bp, synthetic construct; identical to SEQ ID NO: 14661
  misc_feature 1..51: note = Description of Artificial Sequence: Synthetic oligonucleotide
  source 1..51: mol_type = other DNA

SEQ ID NO: 14706 - protein, 17 aa, synthetic construct
  REGION 1..17: note = Description of Artificial Sequence: Synthetic peptide
YISSSGTTVFYADSVKG

SEQ ID NO: 14707 - DNA, 51 bp, synthetic construct; identical to SEQ ID NO: 13745
  misc_feature 1..51: note = Description of Artificial Sequence: Synthetic oligonucleotide
  source 1..51: mol_type = other DNA

SEQ ID NO: 14708 - protein, 17 aa, synthetic construct
  REGION 1..17: note = Description of Artificial Sequence: Synthetic peptide
VIWYDGSNKNYADSVKG

SEQ ID NO: 14709 - DNA, 51 bp, synthetic construct; identical to SEQ ID NO: 14113
  misc_feature 1..51: note = Description of Artificial Sequence: Synthetic oligonucleotide
  source 1..51: mol_type = other DNA

SEQ ID NO: 14710 - protein, 17 aa, synthetic construct
  REGION 1..17: note = Description of Artificial Sequence: Synthetic peptide
VIWYDGSYKYYADSVKG

SEQ ID NO: 14711 - DNA, 51 bp, synthetic construct; identical to SEQ ID NO: 13745
  misc_feature 1..51: note = Description of Artificial Sequence: Synthetic oligonucleotide
  source 1..51: mol_type = other DNA

SEQ ID NO: 14712 - protein, 17 aa, synthetic construct
  REGION 1..17: note = Description of Artificial Sequence: Synthetic peptide
VIWYDGSNKNYADSVKG

SEQ ID NO: 14713 - DNA, 51 bp, synthetic construct
  misc_feature 1..51: note = Description of Artificial Sequence: Synthetic oligonucleotide
  source 1..51: mol_type = other DNA
gccattagtggtagtggtggtaacacattctacgcagactccgtgaagggc

SEQ ID NO: 14714 - protein, 17 aa, synthetic construct
  REGION 1..17: note = Description of Artificial Sequence: Synthetic peptide
AISGSGGNTFYADSVKG

SEQ ID NO: 14715 - DNA, 48 bp, synthetic construct
  misc_feature 1..48: note = Description of Artificial Sequence: Synthetic oligonucleotide
  source 1..48: mol_type = other DNA
ttcatcttttacagtgggagcacctactacaacccgtccctcaagagt

SEQ ID NO: 14716 - protein, 16 aa, synthetic construct
  REGION 1..16: note = Description of Artificial Sequence: Synthetic peptide
FIFYSGSTYYNPSLKS

SEQ ID NO: 14717 - DNA, 51 bp, synthetic construct; identical to SEQ ID NO: 14605
  misc_feature 1..51: note = Description of Artificial Sequence: Synthetic oligonucleotide
  source 1..51: mol_type = other DNA

SEQ ID NO: 14718 - protein, 17 aa, synthetic construct
  REGION 1..17: note = Description of Artificial Sequence: Synthetic peptide
VIWYDGSNEHYADSVKG

SEQ ID NO: 14719 - DNA, 48 bp, synthetic construct
  misc_feature 1..48: note = Description of Artificial Sequence: Synthetic oligonucleotide
  source 1..48: mol_type = other DNA
aacctctattacagtgggagcacctactacaacccgtccctcaggagt

SEQ ID NO: 14720 - protein, 16 aa, synthetic construct
  REGION 1..16: note = Description of Artificial Sequence: Synthetic peptide
NLYYSGSTYYNPSLRS

SEQ ID NO: 14721 - DNA, 51 bp, synthetic construct
  misc_feature 1..51: note = Description of Artificial Sequence: Synthetic oligonucleotide
  source 1..51: mol_type = other DNA
gttatatggtatgatggaagtaacaaaaactatgtagactccgtgaggggc

SEQ ID NO: 14722 - protein, 17 aa, synthetic construct
  REGION 1..17: note = Description of Artificial Sequence: Synthetic peptide
VIWYDGSNKNYVDSVRG

SEQ ID NO: 14723 - DNA, 51 bp, synthetic construct
  misc_feature 1..51: note = Description of Artificial Sequence: Synthetic oligonucleotide
  source 1..51: mol_type = other DNA
gttatatggtatgatggaagcaataaaaactatgcagactccgtgaagggc

SEQ ID NO: 14724 - protein, 17 aa, synthetic construct
  REGION 1..17: note = Description of Artificial Sequence: Synthetic peptide
VIWYDGSNKNYADSVKG

SEQ ID NO: 14725 - DNA, 48 bp, synthetic construct
  misc_feature 1..48: note = Description of Artificial Sequence: Synthetic oligonucleotide
  source 1..48: mol_type = other DNA
tacatcttttacagcgggagcacctactacaacccgtccctcaagagt

SEQ ID NO: 14726 - protein, 16 aa, synthetic construct
  REGION 1..16: note = Description of Artificial Sequence: Synthetic peptide
YIFYSGSTYYNPSLKS

SEQ ID NO: 14727 - DNA, 51 bp, synthetic construct; identical to SEQ ID NO: 12133
  misc_feature 1..51: note = Description of Artificial Sequence: Synthetic oligonucleotide
  source 1..51: mol_type = other DNA

SEQ ID NO: 14728 - protein, 17 aa, synthetic construct
  REGION 1..17: note = Description of Artificial Sequence: Synthetic peptide
VIWYDGSNKYYVDSVKG

SEQ ID NO: 14729 - DNA, 51 bp, synthetic construct
  misc_feature 1..51: note = Description of Artificial Sequence: Synthetic oligonucleotide
  source 1..51: mol_type = other DNA
gttttatggtatgatggaactaataaaaactatgcagactccgtgaagggc

SEQ ID NO: 14730 - protein, 17 aa, synthetic construct
  REGION 1..17: note = Description of Artificial Sequence: Synthetic peptide
VLWYDGTNKNYADSVKG

SEQ ID NO: 14731 - DNA, 51 bp, synthetic construct; identical to SEQ ID NO: 12143
  misc_feature 1..51: note = Description of Artificial Sequence: Synthetic oligonucleotide
  source 1..51: mol_type = other DNA

SEQ ID NO: 14732 - protein, 17 aa, synthetic construct
  REGION 1..17: note = Description of Artificial Sequence: Synthetic peptide
VISYDGGYKNYADSVKG

SEQ ID NO: 14733 - DNA, 51 bp, synthetic construct; identical to SEQ ID NO: 14605
  misc_feature 1..51: note = Description of Artificial Sequence: Synthetic oligonucleotide
  source 1..51: mol_type = other DNA

SEQ ID NO: 14734 - protein, 17 aa, synthetic construct
  REGION 1..17: note = Description of Artificial Sequence: Synthetic peptide
VIWYDGSNEHYADSVKG

SEQ ID NO: 14735 - DNA, 48 bp, synthetic construct
  misc_feature 1..48: note = Description of Artificial Sequence: Synthetic oligonucleotide
  source 1..48: mol_type = other DNA
gaaatcaatcaaagtggaaggtccaactacaacccgtccctcaagagt

SEQ ID NO: 14736 - protein, 16 aa, synthetic construct
  REGION 1..16: note = Description of Artificial Sequence: Synthetic peptide
EINQSGRSNYNPSLKS

SEQ ID NO: 14737 - DNA, 51 bp, synthetic construct; identical to SEQ ID NO: 13745
  misc_feature 1..51: note = Description of Artificial Sequence: Synthetic oligonucleotide
  source 1..51: mol_type = other DNA

SEQ ID NO: 14738 - protein, 17 aa, synthetic construct
  REGION 1..17: note = Description of Artificial Sequence: Synthetic peptide
VIWYDGSNKNYADSVKG

SEQ ID NO: 14739 - DNA, 48 bp, synthetic construct; identical to SEQ ID NO: 14613
  misc_feature 1..48: note = Description of Artificial Sequence: Synthetic oligonucleotide
  source 1..48: mol_type = other DNA

SEQ ID NO: 14740 - protein, 16 aa, synthetic construct
  REGION 1..16: note = Description of Artificial Sequence: Synthetic peptide
LIYTSRSTNYNPSLKS

SEQ ID NO: 14741 - DNA, 51 bp, synthetic construct; identical to SEQ ID NO: 14595
  misc_feature 1..51: note = Description of Artificial Sequence: Synthetic oligonucleotide
  source 1..51: mol_type = other DNA

SEQ ID NO: 14742 - protein, 17 aa, synthetic construct
  REGION 1..17: note = Description of Artificial Sequence: Synthetic peptide
VIWFDGSNDYYADSVKG

SEQ ID NO: 14743 - DNA, 51 bp, synthetic construct
  misc_feature 1..51: note = Description of Artificial Sequence: Synthetic oligonucleotide
  source 1..51: mol_type = other DNA
gctattagtggtagaggcggtagtacattctacgcagactccgtgaagggc

SEQ ID NO: 14744 - protein, 17 aa, synthetic construct
  REGION 1..17: note = Description of Artificial Sequence: Synthetic peptide
AISGRGGSTFYADSVKG

SEQ ID NO: 14745 - DNA, 51 bp, synthetic construct; identical to SEQ ID NO: 14633
  misc_feature 1..51: note = Description of Artificial Sequence: Synthetic oligonucleotide
  source 1..51: mol_type = other DNA

SEQ ID NO: 14746 - protein, 17 aa, synthetic construct
  REGION 1..17: note = Description of Artificial Sequence: Synthetic peptide
VIWYDGSNKNYADSVKG

SEQ ID NO: 14747 - DNA, 48 bp, synthetic construct
  misc_feature 1..48: note = Description of Artificial Sequence: Synthetic oligonucleotide
  source 1..48: mol_type = other DNA
aacatccattacagcgggagcacctacaacaacccgtccctcaagagt

SEQ ID NO: 14748 - protein, 16 aa, synthetic construct
  REGION 1..16: note = Description of Artificial Sequence: Synthetic peptide
NIHYSGSTYNNPSLKS

SEQ ID NO: 14749 - DNA, 48 bp, synthetic construct; identical to SEQ ID NO: 14671
  misc_feature 1..48: note = Description of Artificial Sequence: Synthetic oligonucleotide
  source 1..48: mol_type = other DNA

SEQ ID NO: 14750 - protein, 16 aa, synthetic construct
  REGION 1..16: note = Description of Artificial Sequence: Synthetic peptide
NIYYSGSTYNNPSLKS

SEQ ID NO: 14751 - DNA, 48 bp, synthetic construct; identical to SEQ ID NO: 14671
  misc_feature 1..48: note = Description of Artificial Sequence: Synthetic oligonucleotide
  source 1..48: mol_type = other DNA

SEQ ID NO: 14752 - protein, 16 aa, synthetic construct
  REGION 1..16: note = Description of Artificial Sequence: Synthetic peptide
NIYYSGSTYNNPSLKS

SEQ ID NO: 14753 - DNA, 51 bp, synthetic construct; identical to SEQ ID NO: 14635
  misc_feature 1..51: note = Description of Artificial Sequence: Synthetic oligonucleotide
  source 1..51: mol_type = other DNA

SEQ ID NO: 14754 - protein, 17 aa, synthetic construct
  REGION 1..17: note = Description of Artificial Sequence: Synthetic peptide
AISRSGGNTHYADSVKG

SEQ ID NO: 14755 - DNA, 48 bp, synthetic construct; identical to SEQ ID NO: 14603
  misc_feature 1..48: note = Description of Artificial Sequence: Synthetic oligonucleotide
  source 1..48: mol_type = other DNA

SEQ ID NO: 14756 - protein, 16 aa, synthetic construct
  REGION 1..16: note = Description of Artificial Sequence: Synthetic peptide
YIFYSGSTYYNPSLKS

SEQ ID NO: 14757 - DNA, 48 bp, synthetic construct; identical to SEQ ID NO: 14603
  misc_feature 1..48: note = Description of Artificial Sequence: Synthetic oligonucleotide
  source 1..48: mol_type = other DNA

SEQ ID NO: 14758 - protein, 16 aa, synthetic construct
  REGION 1..16: note = Description of Artificial Sequence: Synthetic peptide
YIFYSGSTYYNPSLKS

SEQ ID NO: 14759 - DNA, 51 bp, synthetic construct
  misc_feature 1..51: note = Description of Artificial Sequence: Synthetic oligonucleotide
  source 1..51: mol_type = other DNA
gctattattggtaatggtggtagaacatactacgcagactccgtgaagggc

SEQ ID NO: 14760 - protein, 17 aa, synthetic construct
  REGION 1..17: note = Description of Artificial Sequence: Synthetic peptide
AIIGNGGRTYYADSVKG

SEQ ID NO: 14761 - DNA, 51 bp, synthetic construct; identical to SEQ ID NO: 12103
  misc_feature 1..51: note = Description of Artificial Sequence: Synthetic oligonucleotide
  source 1..51: mol_type = other DNA

SEQ ID NO: 14762 - protein, 17 aa, synthetic construct
  REGION 1..17: note = Description of Artificial Sequence: Synthetic peptide
WMNPNSGNTGYAQKFQG

SEQ ID NO: 14763 - DNA, 51 bp, synthetic construct; identical to SEQ ID NO: 12131
  misc_feature 1..51: note = Description of Artificial Sequence: Synthetic oligonucleotide
  source 1..51: mol_type = other DNA

SEQ ID NO: 14764 - protein, 17 aa, synthetic construct
  REGION 1..17: note = Description of Artificial Sequence: Synthetic peptide
WMNPKRGNTGYAQKFQG

SEQ ID NO: 14765 - DNA, 48 bp, synthetic construct; identical to SEQ ID NO: 12147
  misc_feature 1..48: note = Description of Artificial Sequence: Synthetic oligonucleotide
  source 1..48: mol_type = other DNA

SEQ ID NO: 14766 - protein, 16 aa, synthetic construct
  REGION 1..16: note = Description of Artificial Sequence: Synthetic peptide
YIYYSGSTYYNPSLKS

SEQ ID NO: 14767 - DNA, 48 bp, synthetic construct
  misc_feature 1..48: note = Description of Artificial Sequence: Synthetic oligonucleotide
  source 1..48: mol_type = other DNA
gaatccaatcatagtggacgcaccaactacaacccgtccctcaagagt

SEQ ID NO: 14768 - protein, 16 aa, synthetic construct
  REGION 1..16: note = Description of Artificial Sequence: Synthetic peptide
ESNHSGRTNYNPSLKS

SEQ ID NO: 14769 - DNA, 48 bp, synthetic construct; identical to SEQ ID NO: 14603
  misc_feature 1..48: note = Description of Artificial Sequence: Synthetic oligonucleotide
  source 1..48: mol_type = other DNA

SEQ ID NO: 14770 - protein, 16 aa, synthetic construct
  REGION 1..16: note = Description of Artificial Sequence: Synthetic peptide
YIFYSGSTYYNPSLKS

SEQ ID NO: 14771 - DNA, 51 bp, synthetic construct; identical to SEQ ID NO: 14633
  misc_feature 1..51: note = Description of Artificial Sequence: Synthetic oligonucleotide
  source 1..51: mol_type = other DNA

SEQ ID NO: 14772 - protein, 17 aa, synthetic construct
  REGION 1..17: note = Description of Artificial Sequence: Synthetic peptide
VIWYDGSNKNYADSVKG

SEQ ID NO: 14773 - DNA, 48 bp, synthetic construct; identical to SEQ ID NO: 13715
  misc_feature 1..48: note = Description of Artificial Sequence: Synthetic oligonucleotide
  source 1..48: mol_type = other DNA

SEQ ID NO: 14774 - protein, 16 aa, synthetic construct
  REGION 1..16: note = Description of Artificial Sequence: Synthetic peptide
EINHSGSTNYNPSLKS

SEQ ID NO: 14775 - DNA, 48 bp, synthetic construct; identical to SEQ ID NO: 14603
  misc_feature 1..48: note = Description of Artificial Sequence: Synthetic oligonucleotide
  source 1..48: mol_type = other DNA

SEQ ID NO: 14776 - protein, 16 aa, synthetic construct
  REGION 1..16: note = Description of Artificial Sequence: Synthetic peptide
YIFYSGSTYYNPSLKS

SEQ ID NO: 14777 - DNA, 48 bp, synthetic construct; identical to SEQ ID NO: 14715
  misc_feature 1..48: note = Description of Artificial Sequence: Synthetic oligonucleotide
  source 1..48: mol_type = other DNA

SEQ ID NO: 14778 - protein, 16 aa, synthetic construct
  REGION 1..16: note = Description of Artificial Sequence: Synthetic peptide
FIFYSGSTYYNPSLKS

SEQ ID NO: 14779 - DNA, 51 bp, synthetic construct; identical to SEQ ID NO: 14113
  misc_feature 1..51: note = Description of Artificial Sequence: Synthetic oligonucleotide
  source 1..51: mol_type = other DNA

SEQ ID NO: 14780 - protein, 17 aa, synthetic construct
  REGION 1..17: note = Description of Artificial Sequence: Synthetic peptide
VIWYDGSYKYYADSVKG

SEQ ID NO: 14781 - DNA, 48 bp, synthetic construct; identical to SEQ ID NO: 14671
  misc_feature 1..48: note = Description of Artificial Sequence: Synthetic oligonucleotide
  source 1..48: mol_type = other DNA

SEQ ID NO: 14782 - protein, 16 aa, synthetic construct
  REGION 1..16: note = Description of Artificial Sequence: Synthetic peptide
NIYYSGSTYNNPSLKS

SEQ ID NO: 14783 - DNA, 48 bp, synthetic construct; identical to SEQ ID NO: 14725
  misc_feature 1..48: note = Description of Artificial Sequence: Synthetic oligonucleotide
  source 1..48: mol_type = other DNA

SEQ ID NO: 14784 - protein, 16 aa, synthetic construct
  REGION 1..16: note = Description of Artificial Sequence: Synthetic peptide
YIFYSGSTYYNPSLKS

SEQ ID NO: 14785 - DNA, 51 bp, synthetic construct; identical to SEQ ID NO: 14605
  misc_feature 1..51: note = Description of Artificial Sequence: Synthetic oligonucleotide
  source 1..51: mol_type = other DNA

SEQ ID NO: 14786 - protein, 17 aa, synthetic construct
  REGION 1..17: note = Description of Artificial Sequence: Synthetic peptide
VIWYDGSNEHYADSVKG

SEQ ID NO: 14787 - DNA, 51 bp, synthetic construct
  misc_feature 1..51: note = Description of Artificial Sequence: Synthetic oligonucleotide
  source 1..51: mol_type = other DNA
tccattagtagtgctggtggttacatatactacgcagactcactgaagggc

SEQ ID NO: 14788 - protein, 17 aa, synthetic construct
  REGION 1..17: note = Description of Artificial Sequence: Synthetic peptide
SISSAGGYIYYADSLKG

SEQ ID NO: 14789 - DNA, 48 bp, synthetic construct; identical to SEQ ID NO: 14603
  misc_feature 1..48: note = Description of Artificial Sequence: Synthetic oligonucleotide
  source 1..48: mol_type = other DNA

SEQ ID NO: 14790 - protein, 16 aa, synthetic construct
  REGION 1..16: note = Description of Artificial Sequence: Synthetic peptide
YIFYSGSTYYNPSLKS

SEQ ID NO: 14791 - DNA, 51 bp, synthetic construct
  misc_feature 1..51: note = Description of Artificial Sequence: Synthetic oligonucleotide
  source 1..51: mol_type = other DNA
gttatatggtatgatggaactaataaatactatggagactccgtgaagggc

SEQ ID NO: 14792 - protein, 17 aa, synthetic construct
  REGION 1..17: note = Description of Artificial Sequence: Synthetic peptide
VIWYDGTNKYYGDSVKG

SEQ ID NO: 14793 - DNA, 51 bp, synthetic construct; identical to SEQ ID NO: 14605
  misc_feature 1..51: note = Description of Artificial Sequence: Synthetic oligonucleotide
  source 1..51: mol_type = other DNA

SEQ ID NO: 14794 - protein, 17 aa, synthetic construct
  REGION 1..17: note = Description of Artificial Sequence: Synthetic peptide
VIWYDGSNEHYADSVKG

SEQ ID NO: 14795 - DNA, 48 bp, synthetic construct; identical to SEQ ID NO: 14675
  misc_feature 1..48: note = Description of Artificial Sequence: Synthetic oligonucleotide
  source 1..48: mol_type = other DNA

SEQ ID NO: 14796 - protein, 16 aa, synthetic construct
  REGION 1..16: note = Description of Artificial Sequence: Synthetic peptide
RIYASGSTNYNPSLKS

SEQ ID NO: 14797 - DNA, 51 bp, synthetic construct; identical to SEQ ID NO: 12197
  misc_feature 1..51: note = Description of Artificial Sequence: Synthetic oligonucleotide
  source 1..51: mol_type = other DNA

SEQ ID NO: 14798 - protein, 17 aa, synthetic construct
  REGION 1..17: note = Description of Artificial Sequence: Synthetic peptide
WINPNSGGTNYAQKFQG

SEQ ID NO: 14799 - DNA, 48 bp, synthetic construct
  misc_feature 1..48: note = Description of Artificial Sequence: Synthetic oligonucleotide
  source 1..48: mol_type = other DNA
cttatctataccagtaggagcaccaactacaacccctccctcaagagt

SEQ ID NO: 14800 - protein, 16 aa, synthetic construct
  REGION 1..16: note = Description of Artificial Sequence: Synthetic peptide
LIYTSRSTNYNPSLKS

SEQ ID NO: 14801 - DNA, 48 bp, synthetic construct; identical to SEQ ID NO: 14603
  misc_feature 1..48: note = Description of Artificial Sequence: Synthetic oligonucleotide
  source 1..48: mol_type = other DNA

SEQ ID NO: 14802 - protein, 16 aa, synthetic construct
  REGION 1..16: note = Description of Artificial Sequence: Synthetic peptide
YIFYSGSTYYNPSLKS

SEQ ID NO: 14803 - DNA, 48 bp, synthetic construct; identical to SEQ ID NO: 14715
  misc_feature 1..48: note = Description of Artificial Sequence: Synthetic oligonucleotide
  source 1..48: mol_type = other DNA

SEQ ID NO: 14804 - protein, 16 aa, synthetic construct
  REGION 1..16: note = Description of Artificial Sequence: Synthetic peptide
FIFYSGSTYYNPSLKS

SEQ ID NO: 14805 - DNA, 51 bp, synthetic construct; identical to SEQ ID NO: 13745
  misc_feature 1..51: note = Description of Artificial Sequence: Synthetic oligonucleotide
  source 1..51: mol_type = other DNA

SEQ ID NO: 14806 - protein, 17 aa, synthetic construct
  REGION 1..17: note = Description of Artificial Sequence: Synthetic peptide
VIWYDGSNKNYADSVKG

SEQ ID NO: 14807 - DNA, 51 bp, synthetic construct
  misc_feature 1..51: note = Description of Artificial Sequence: Synthetic oligonucleotide
  source 1..51: mol_type = other DNA
tggatcaaccctaacaatggtggcacaaactatgcacagaaatttcagggc

SEQ ID NO: 14808 - protein, 17 aa, synthetic construct
  REGION 1..17: note = Description of Artificial Sequence: Synthetic peptide
WINPNNGGTNYAQKFQG

SEQ ID NO: 14809 - DNA, 48 bp, synthetic construct; identical to SEQ ID NO: 13715
  misc_feature 1..48: note = Description of Artificial Sequence: Synthetic oligonucleotide
  source 1..48: mol_type = other DNA

SEQ ID NO: 14810 - protein, 16 aa, synthetic construct
  REGION 1..16: note = Description of Artificial Sequence: Synthetic peptide
EINHSGSTNYNPSLKS

SEQ ID NO: 14811 - DNA, 51 bp, synthetic construct; identical to SEQ ID NO: 12123
  misc_feature 1..51: note = Description of Artificial Sequence: Synthetic oligonucleotide
  source 1..51: mol_type = other DNA

SEQ ID NO: 14812 - protein, 17 aa, synthetic construct
  REGION 1..17: note = Description of Artificial Sequence: Synthetic peptide
VIWYDGSNKYYADSVKG

SEQ ID NO: 14813 - DNA, 51 bp, synthetic construct; identical to SEQ ID NO: 14605
  misc_feature 1..51: note = Description of Artificial Sequence: Synthetic oligonucleotide
  source 1..51: mol_type = other DNA

SEQ ID NO: 14814 - protein, 17 aa, synthetic construct
  REGION 1..17: note = Description of Artificial Sequence: Synthetic peptide
VIWYDGSNEHYADSVKG

SEQ ID NO: 14815 - DNA, 51 bp, synthetic construct; identical to SEQ ID NO: 14595
  misc_feature 1..51: note = Description of Artificial Sequence: Synthetic oligonucleotide
  source 1..51: mol_type = other DNA

SEQ ID NO: 14816 - protein, 17 aa, synthetic construct
  REGION 1..17: note = Description of Artificial Sequence: Synthetic peptide
VIWFDGSNDYYADSVKG

SEQ ID NO: 14817 - DNA, 48 bp, synthetic construct; identical to SEQ ID NO: 13963
  misc_feature 1..48: note = Description of Artificial Sequence: Synthetic oligonucleotide
  source 1..48: mol_type = other DNA

SEQ ID NO: 14818 - protein, 16 aa, synthetic construct
  REGION 1..16: note = Description of Artificial Sequence: Synthetic peptide
EINHSGRTNYNPSLKS

SEQ ID NO: 14819 - DNA, 51 bp, synthetic construct
  misc_feature 1..51: note = Description of Artificial Sequence: Synthetic oligonucleotide
  source 1..51: mol_type = other DNA
gttatttggtatgatggaactaataaatactatgcagactccgtgaagggc

SEQ ID NO: 14820 - protein, 17 aa, synthetic construct
  REGION 1..17: note = Description of Artificial Sequence: Synthetic peptide
VIWYDGTNKYYADSVKG

SEQ ID NO: 14821 - DNA, 48 bp, synthetic construct
  misc_feature 1..48: note = Description of Artificial Sequence: Synthetic oligonucleotide
  source 1..48: mol_type = other DNA
tacagctattacagtgggagcaccaactataacccgtccctcaagagt

SEQ ID NO: 14822 - protein, 16 aa, synthetic construct
  REGION 1..16: note = Description of Artificial Sequence: Synthetic peptide
YSYYSGSTNYNPSLKS

SEQ ID NO: 14823 - DNA, 51 bp, synthetic construct; identical to SEQ ID NO: 13745
  misc_feature 1..51: note = Description of Artificial Sequence: Synthetic oligonucleotide
  source 1..51: mol_type = other DNA

SEQ ID NO: 14824 - protein, 17 aa, synthetic construct
  REGION 1..17: note = Description of Artificial Sequence: Synthetic peptide
VIWYDGSNKNYADSVKG

SEQ ID NO: 14825 - DNA, 48 bp, synthetic construct; identical to SEQ ID NO: 14603
  misc_feature 1..48: note = Description of Artificial Sequence: Synthetic oligonucleotide
  source 1..48: mol_type = other DNA

SEQ ID NO: 14826 - protein, 16 aa, synthetic construct
  REGION 1..16: note = Description of Artificial Sequence: Synthetic peptide
YIFYSGSTYYNPSLKS

SEQ ID NO: 14827 - DNA, 51 bp, synthetic construct; identical to SEQ ID NO: 14605
  misc_feature 1..51: note = Description of Artificial Sequence: Synthetic oligonucleotide
  source 1..51: mol_type = other DNA

SEQ ID NO: 14828 - protein, 17 aa, synthetic construct
  REGION 1..17: note = Description of Artificial Sequence: Synthetic peptide
VIWYDGSNEHYADSVKG

SEQ ID NO: 14829 - DNA, 51 bp, synthetic construct; identical to SEQ ID NO: 12123
  misc_feature 1..51: note = Description of Artificial Sequence: Synthetic oligonucleotide
  source 1..51: mol_type = other DNA

SEQ ID NO: 14830 - protein, 17 aa, synthetic construct
  REGION 1..17: note = Description of Artificial Sequence: Synthetic peptide
VIWYDGSNKYYADSVKG

SEQ ID NO: 14831 - DNA, 48 bp, synthetic construct
  misc_feature 1..48: note = Description of Artificial Sequence: Synthetic oligonucleotide
  source 1..48: mol_type = other DNA
tacatgtattacagtgggagcacctactacaacccgtccctcaagagt

SEQ ID NO: 14832 - protein, 16 aa, synthetic construct
  REGION 1..16: note = Description of Artificial Sequence: Synthetic peptide
YMYYSGSTYYNPSLKS

SEQ ID NO: 14833 - DNA, 48 bp, synthetic construct; identical to SEQ ID NO: 12147
  misc_feature 1..48: note = Description of Artificial Sequence: Synthetic oligonucleotide
  source 1..48: mol_type = other DNA

SEQ ID NO: 14834 - protein, 16 aa, synthetic construct
  REGION 1..16: note = Description of Artificial Sequence: Synthetic peptide
YIYYSGSTYYNPSLKS

SEQ ID NO: 14835 - DNA, 51 bp, synthetic construct; identical to SEQ ID NO: 14661
  misc_feature 1..51: note = Description of Artificial Sequence: Synthetic oligonucleotide
  source 1..51: mol_type = other DNA

SEQ ID NO: 14836 - protein, 17 aa, synthetic construct
  REGION 1..17: note = Description of Artificial Sequence: Synthetic peptide
YISSSGTTVFYADSVKG

SEQ ID NO: 14837 - DNA, 51 bp, synthetic construct; identical to SEQ ID NO: 14635
  misc_feature 1..51: note = Description of Artificial Sequence: Synthetic oligonucleotide
  source 1..51: mol_type = other DNA

SEQ ID NO: 14838 - protein, 17 aa, synthetic construct
  REGION 1..17: note = Description of Artificial Sequence: Synthetic peptide
AISRSGGNTHYADSVKG

SEQ ID NO: 14839 - DNA, 51 bp, synthetic construct
  misc_feature 1..51: note = Description of Artificial Sequence: Synthetic oligonucleotide
  source 1..51: mol_type = other DNA
tacattagtagtagtggtattaccatgtactacgcagactctgtgaagggc

SEQ ID NO: 14840 - protein, 17 aa, synthetic construct
  REGION 1..17: note = Description of Artificial Sequence: Synthetic peptide
YISSSGITMYYADSVKG

SEQ ID NO: 14841 - DNA, 51 bp, synthetic construct; identical to SEQ ID NO: 14661
  misc_feature 1..51: note = Description of Artificial Sequence: Synthetic oligonucleotide
  source 1..51: mol_type = other DNA

SEQ ID NO: 14842 - protein, 17 aa, synthetic construct
  REGION 1..17: note = Description of Artificial Sequence: Synthetic peptide
YISSSGTTVFYADSVKG

SEQ ID NO: 14843 - DNA, 51 bp, synthetic construct
  misc_feature 1..51: note = Description of Artificial Sequence: Synthetic oligonucleotide
  source 1..51: mol_type = other DNA
gttatattaaatgatggaagtaataaaaagtgtgcagactccgtgaagggc

SEQ ID NO: 14844 - protein, 17 aa, synthetic construct
  REGION 1..17: note = Description of Artificial Sequence: Synthetic peptide
VILNDGSNKKCADSVKG

SEQ ID NO: 14845 - DNA, 51 bp, synthetic construct; identical to SEQ ID NO: 12421
  misc_feature 1..51: note = Description of Artificial Sequence: Synthetic oligonucleotide
  source 1..51: mol_type = other DNA

SEQ ID NO: 14846 - protein, 17 aa, synthetic construct
  REGION 1..17: note = Description of Artificial Sequence: Synthetic peptide
AISGSGGSTYYADSVKG

SEQ ID NO: 14847 - DNA, 51 bp, synthetic construct; identical to SEQ ID NO: 14605
  misc_feature 1..51: note = Description of Artificial Sequence: Synthetic oligonucleotide
  source 1..51: mol_type = other DNA

SEQ ID NO: 14848 - protein, 17 aa, synthetic construct
  REGION 1..17: note = Description of Artificial Sequence: Synthetic peptide
VIWYDGSNEHYADSVKG

SEQ ID NO: 14849 - DNA, 51 bp, synthetic construct
  misc_feature 1..51: note = Description of Artificial Sequence: Synthetic oligonucleotide
  source 1..51: mol_type = other DNA
tggatgcaccttaacagtggtaacacaggctatgcaccgaagttccagggc

SEQ ID NO: 14850 - protein, 17 aa, synthetic construct
  REGION 1..17: note = Description of Artificial Sequence: Synthetic peptide
WMHLNSGNTGYAPKFQG

SEQ ID NO: 14851 - DNA, 51 bp, synthetic construct
  misc_feature 1..51: note = Description of Artificial Sequence: Synthetic oligonucleotide
  source 1..51: mol_type = other DNA
tggatcaaccctaacagtggtggcacaaactttgcacagaagtttcggggc

SEQ ID NO: 14852 - protein, 17 aa, synthetic construct
  REGION 1..17: note = Description of Artificial Sequence: Synthetic peptide
WINPNSGGTNFAQKFRG

SEQ ID NO: 14853 - DNA, 51 bp, synthetic construct; identical to SEQ ID NO: 14819
  misc_feature 1..51: note = Description of Artificial Sequence: Synthetic oligonucleotide
  source 1..51: mol_type = other DNA

SEQ ID NO: 14854 - protein, 17 aa, synthetic construct
  REGION 1..17: note = Description of Artificial Sequence: Synthetic peptide
VIWYDGTNKYYADSVKG

SEQ ID NO: 14855 - DNA, 48 bp, synthetic construct
  misc_feature 1..48: note = Description of Artificial Sequence: Synthetic oligonucleotide
  source 1..48: mol_type = other DNA
ttcatctattacagtgggagcacctactacaatccgtccctcaagagt

SEQ ID NO: 14856 - protein, 16 aa, synthetic construct
  REGION 1..16: note = Description of Artificial Sequence: Synthetic peptide
FIYYSGSTYYNPSLKS

SEQ ID NO: 14857 - DNA, 51 bp, synthetic construct; identical to SEQ ID NO: 14575
  misc_feature 1..51: note = Description of Artificial Sequence: Synthetic oligonucleotide
  source 1..51: mol_type = other DNA

SEQ ID NO: 14858 - protein, 17 aa, synthetic construct
  REGION 1..17: note = Description of Artificial Sequence: Synthetic peptide
SISSGSGYIHYADSVKG

SEQ ID NO: 14859 - DNA, 51 bp, synthetic construct; identical to SEQ ID NO: 12131
  misc_feature 1..51: note = Description of Artificial Sequence: Synthetic oligonucleotide
  source 1..51: mol_type = other DNA

SEQ ID NO: 14860 - protein, 17 aa, synthetic construct
  REGION 1..17: note = Description of Artificial Sequence: Synthetic peptide
WMNPKRGNTGYAQKFQG

SEQ ID NO: 14861 - DNA, 48 bp, synthetic construct; identical to SEQ ID NO: 14671
  misc_feature 1..48: note = Description of Artificial Sequence: Synthetic oligonucleotide
  source 1..48: mol_type = other DNA

SEQ ID NO: 14862 - protein, 16 aa, synthetic construct
  REGION 1..16: note = Description of Artificial Sequence: Synthetic peptide
NIYYSGSTYNNPSLKS

SEQ ID NO: 14863 - DNA, 51 bp, synthetic construct; identical to SEQ ID NO: 13745
  misc_feature 1..51: note = Description of Artificial Sequence: Synthetic oligonucleotide
  source 1..51: mol_type = other DNA

SEQ ID NO: 14864 - protein, 17 aa, synthetic construct
  REGION 1..17: note = Description of Artificial Sequence: Synthetic peptide
VIWYDGSNKNYADSVKG

SEQ ID NO: 14865 - DNA, 51 bp, synthetic construct; identical to SEQ ID NO: 13745
  misc_feature 1..51: note = Description of Artificial Sequence: Synthetic oligonucleotide
  source 1..51: mol_type = other DNA

SEQ ID NO: 14866 - protein, 17 aa, synthetic construct
  REGION 1..17: note = Description of Artificial Sequence: Synthetic peptide
VIWYDGSNKNYADSVKG

SEQ ID NO: 14867 - DNA, 48 bp, synthetic construct; identical to SEQ ID NO: 14603
  misc_feature 1..48: note = Description of Artificial Sequence: Synthetic oligonucleotide
  source 1..48: mol_type = other DNA

SEQ ID NO: 14868 - protein, 16 aa, synthetic construct
  REGION 1..16: note = Description of Artificial Sequence: Synthetic peptide
YIFYSGSTYYNPSLKS

SEQ ID NO: 14869 - DNA, 51 bp, synthetic construct; identical to SEQ ID NO: 12161
  misc_feature 1..51: note = Description of Artificial Sequence: Synthetic oligonucleotide
  source 1..51: mol_type = other DNA

SEQ ID NO: 14870 - protein, 17 aa, synthetic construct
  REGION 1..17: note = Description of Artificial Sequence: Synthetic peptide
WMHPNSGNTGYAQKFQG

SEQ ID NO: 14871 - DNA, 51 bp, synthetic construct; identical to SEQ ID NO: 14633
  misc_feature 1..51: note = Description of Artificial Sequence: Synthetic oligonucleotide
  source 1..51: mol_type = other DNA

SEQ ID NO: 14872 - protein, 17 aa, synthetic construct
  REGION 1..17: note = Description of Artificial Sequence: Synthetic peptide
VIWYDGSNKNYADSVKG

SEQ ID NO: 14873 - DNA, 51 bp, synthetic construct; identical to SEQ ID NO: 12161
  misc_feature 1..51: note = Description of Artificial Sequence: Synthetic oligonucleotide
  source 1..51: mol_type = other DNA

SEQ ID NO: 14874 - protein, 17 aa, synthetic construct
  REGION 1..17: note = Description of Artificial Sequence: Synthetic peptide
WMHPNSGNTGYAQKFQG

SEQ ID NO: 14875 - DNA, 51 bp, synthetic construct
  misc_feature 1..51: note = Description of Artificial Sequence: Synthetic oligonucleotide
  source 1..51: mol_type = other DNA
gctatcattggtaatggtggtagagcatactacgcagactccgtgaagggc

SEQ ID NO: 14876 - protein, 17 aa, synthetic construct
  REGION 1..17: note = Description of Artificial Sequence: Synthetic peptide
AIIGNGGRAYYADSVKG

SEQ ID NO: 14877 - DNA, 48 bp, synthetic construct
  misc_feature 1..48: note = Description of Artificial Sequence: Synthetic oligonucleotide
  source 1..48: mol_type = other DNA
cgtctctctcctggtgggagcaccaacttcaacccctccctcaagagt

SEQ ID NO: 14878 - protein, 16 aa, synthetic construct
  REGION 1..16: note = Description of Artificial Sequence: Synthetic peptide
RLSPGGSTNFNPSLKS

SEQ ID NO: 14879 - DNA, 51 bp, synthetic construct
  misc_feature 1..51: note = Description of Artificial Sequence: Synthetic oligonucleotide
  source 1..51: mol_type = other DNA
gttattagtggtagaggtggtaacacatactacgcagactccgtgaagggc

SEQ ID NO: 14880 - protein, 17 aa, synthetic construct
  REGION 1..17: note = Description of Artificial Sequence: Synthetic peptide
VISGRGGNTYYADSVKG

SEQ ID NO: 14881 - DNA, 51 bp, synthetic construct
  misc_feature 1..51: note = Description of Artificial Sequence: Synthetic oligonucleotide
  source 1..51: mol_type = other DNA
gttacatggtatgatggaagtaataaatactatgcagactccgtgaagggc

SEQ ID NO: 14882 - protein, 17 aa, synthetic construct
  REGION 1..17: note = Description of Artificial Sequence: Synthetic peptide
VTWYDGSNKYYADSVKG

SEQ ID NO: 14883 - DNA, 51 bp, synthetic construct; identical to SEQ ID NO: 14595
  misc_feature 1..51: note = Description of Artificial Sequence: Synthetic oligonucleotide
  source 1..51: mol_type = other DNA

SEQ ID NO: 14884 - protein, 17 aa, synthetic construct
  REGION 1..17: note = Description of Artificial Sequence: Synthetic peptide
VIWFDGSNDYYADSVKG

SEQ ID NO: 14885 - DNA, 51 bp, synthetic construct; identical to SEQ ID NO: 13745
  misc_feature 1..51: note = Description of Artificial Sequence: Synthetic oligonucleotide
  source 1..51: mol_type = other DNA

SEQ ID NO: 14886 - protein, 17 aa, synthetic construct
  REGION 1..17: note = Description of Artificial Sequence: Synthetic peptide
VIWYDGSNKNYADSVKG

SEQ ID NO: 14887 - DNA, 48 bp, synthetic construct
  misc_feature 1..48: note = Description of Artificial Sequence: Synthetic oligonucleotide
  source 1..48: mol_type = other DNA
tacatcttccacagtgggagcacctactacaacccgtccctcaagagt

SEQ ID NO: 14888 - protein, 16 aa, synthetic construct
  REGION 1..16: note = Description of Artificial Sequence: Synthetic peptide
YIFHSGSTYYNPSLKS

SEQ ID NO: 14889 - DNA, 48 bp, synthetic construct; identical to SEQ ID NO: 14715
  misc_feature 1..48: note = Description of Artificial Sequence: Synthetic oligonucleotide
  source 1..48: mol_type = other DNA

SEQ ID NO: 14890 - protein, 16 aa, synthetic construct
  REGION 1..16: note = Description of Artificial Sequence: Synthetic peptide
FIFYSGSTYYNPSLKS

SEQ ID NO: 14891 - DNA, 48 bp, synthetic construct
  misc_feature 1..48: note = Description of Artificial Sequence: Synthetic oligonucleotide
  source 1..48: mol_type = other DNA
aacatctattacagtgggagcacctactacaacccgtccctcaagagt

SEQ ID NO: 14892 - protein, 16 aa, synthetic construct
  REGION 1..16: note = Description of Artificial Sequence: Synthetic peptide
NIYYSGSTYYNPSLKS

SEQ ID NO: 14893 - DNA, 51 bp, synthetic construct
  misc_feature 1..51: note = Description of Artificial Sequence: Synthetic oligonucleotide
  source 1..51: mol_type = other DNA
gttatatggtatgatggaagtaataaacactatgcagactccgtgaagggc

SEQ ID NO: 14894 - protein, 17 aa, synthetic construct
  REGION 1..17: note = Description of Artificial Sequence: Synthetic peptide
VIWYDGSNKHYADSVKG

SEQ ID NO: 14895 - DNA, 51 bp, synthetic construct
  misc_feature 1..51: note = Description of Artificial Sequence: Synthetic oligonucleotide
  source 1..51: mol_type = other DNA
attatatggtttgatggaagtaataaatactatgtagactccgtgaagggc

SEQ ID NO: 14896 - protein, 17 aa, synthetic construct
  REGION 1..17: note = Description of Artificial Sequence: Synthetic peptide
IIWFDGSNKYYVDSVKG

SEQ ID NO: 14897 - DNA, 48 bp, synthetic construct; identical to SEQ ID NO: 14685
  misc_feature 1..48: note = Description of Artificial Sequence: Synthetic oligonucleotide
  source 1..48: mol_type = other DNA

SEQ ID NO: 14898 - protein, 16 aa, synthetic construct
  REGION 1..16: note = Description of Artificial Sequence: Synthetic peptide
HIYTSRSTNYNPSLKS

SEQ ID NO: 14899 - DNA, 48 bp, synthetic construct; identical to SEQ ID NO: 14603
  misc_feature 1..48: note = Description of Artificial Sequence: Synthetic oligonucleotide
  source 1..48: mol_type = other DNA

SEQ ID NO: 14900 - protein, 16 aa, synthetic construct
  REGION 1..16: note = Description of Artificial Sequence: Synthetic peptide
YIFYSGSTYYNPSLKS

SEQ ID NO: 14901 - DNA, 48 bp, synthetic construct; identical to SEQ ID NO: 14603
  misc_feature 1..48: note = Description of Artificial Sequence: Synthetic oligonucleotide
  source 1..48: mol_type = other DNA

SEQ ID NO: 14902 - protein, 16 aa, synthetic construct
  REGION 1..16: note = Description of Artificial Sequence: Synthetic peptide
YIFYSGSTYYNPSLKS

SEQ ID NO: 14903 - DNA, 48 bp, synthetic construct; identical to SEQ ID NO: 13715
  misc_feature 1..48: note = Description of Artificial Sequence: Synthetic oligonucleotide
  source 1..48: mol_type = other DNA

SEQ ID NO: 14904 - protein, 16 aa, synthetic construct
  REGION 1..16: note = Description of Artificial Sequence: Synthetic peptide
EINHSGSTNYNPSLKS

SEQ ID NO: 14905 - DNA, 51 bp, synthetic construct; identical to SEQ ID NO: 13745
  misc_feature 1..51: note = Description of Artificial Sequence: Synthetic oligonucleotide
  source 1..51: mol_type = other DNA

SEQ ID NO: 14906 - protein, 17 aa, synthetic construct
  REGION 1..17: note = Description of Artificial Sequence: Synthetic peptide
VIWYDGSNKNYADSVKG

SEQ ID NO: 14907 - DNA, 51 bp, synthetic construct; identical to SEQ ID NO: 14697
  misc_feature 1..51: note = Description of Artificial Sequence: Synthetic oligonucleotide
  source 1..51: mol_type = other DNA

SEQ ID NO: 14908 - protein, 17 aa, synthetic construct
  REGION 1..17: note = Description of Artificial Sequence: Synthetic peptide
IIWFDGSNQYYADSVKG

SEQ ID NO: 14909 - DNA, 51 bp, synthetic construct; identical to SEQ ID NO: 14581
  misc_feature 1..51: note = Description of Artificial Sequence: Synthetic oligonucleotide
  source 1..51: mol_type = other DNA

SEQ ID NO: 14910 - protein, 17 aa, synthetic construct
  REGION 1..17: note = Description of Artificial Sequence: Synthetic peptide
IIWFDGSNKYYADSVKG

SEQ ID NO: 14911 - DNA, 48 bp, synthetic construct; identical to SEQ ID NO: 14715
  misc_feature 1..48: note = Description of Artificial Sequence: Synthetic oligonucleotide
  source 1..48: mol_type = other DNA

SEQ ID NO: 14912 - protein, 16 aa, synthetic construct
  REGION 1..16: note = Description of Artificial Sequence: Synthetic peptide
FIFYSGSTYYNPSLKS

SEQ ID NO: 14913 - DNA, 48 bp, synthetic construct; identical to SEQ ID NO: 14891
  misc_feature 1..48: note = Description of Artificial Sequence: Synthetic oligonucleotide
  source 1..48: mol_type = other DNA

SEQ ID NO: 14914 - protein, 16 aa, synthetic construct
  REGION 1..16: note = Description of Artificial Sequence: Synthetic peptide
NIYYSGSTYYNPSLKS

SEQ ID NO: 14915 - DNA, 51 bp, synthetic construct
  misc_feature 1..51: note = Description of Artificial Sequence: Synthetic oligonucleotide
  source 1..51: mol_type = other DNA
gctattagtggtagaggcggtaatacattctacgcagactccgtgaggggc

SEQ ID NO: 14916 - protein, 17 aa, synthetic construct
  REGION 1..17: note = Description of Artificial Sequence: Synthetic peptide
AISGRGGNTFYADSVRG

SEQ ID NO: 14917 - DNA, 51 bp, synthetic construct; identical to SEQ ID NO: 12123
  misc_feature 1..51: note = Description of Artificial Sequence: Synthetic oligonucleotide
  source 1..51: mol_type = other DNA

SEQ ID NO: 14918 - protein, 17 aa, synthetic construct
  REGION 1..17: note = Description of Artificial Sequence: Synthetic peptide
VIWYDGSNKYYADSVKG

SEQ ID NO: 14919 - DNA, 48 bp, synthetic construct
  misc_feature 1..48: note = Description of Artificial Sequence: Synthetic oligonucleotide
  source 1..48: mol_type = other DNA
tacatcttttacagtgggagcaccaactacaacccgtccctcaggagt

SEQ ID NO: 14920 - protein, 16 aa, synthetic construct
  REGION 1..16: note = Description of Artificial Sequence: Synthetic peptide
YIFYSGSTNYNPSLRS

SEQ ID NO: 14921 - DNA, 51 bp, synthetic construct; identical to SEQ ID NO: 14849
  misc_feature 1..51: note = Description of Artificial Sequence: Synthetic oligonucleotide
  source 1..51: mol_type = other DNA

SEQ ID NO: 14922 - protein, 17 aa, synthetic construct
  REGION 1..17: note = Description of Artificial Sequence: Synthetic peptide
WMHLNSGNTGYAPKFQG

SEQ ID NO: 14923 - DNA, 48 bp, synthetic construct; identical to SEQ ID NO: 14443
  misc_feature 1..48: note = Description of Artificial Sequence: Synthetic oligonucleotide
  source 1..48: mol_type = other DNA

SEQ ID NO: 14924 - protein, 16 aa, synthetic construct
  REGION 1..16: note = Description of Artificial Sequence: Synthetic peptide
RIYTSGSTNYNPSLKS

SEQ ID NO: 14925 - DNA, 51 bp, synthetic construct
  misc_feature 1..51: note = Description of Artificial Sequence: Synthetic oligonucleotide
  source 1..51: mol_type = other DNA
gttatatcatatgatggaggttataaaaactatatagactccgtgaagggc

SEQ ID NO: 14926 - protein, 17 aa, synthetic construct
  REGION 1..17: note = Description of Artificial Sequence: Synthetic peptide
VISYDGGYKNYIDSVKG

SEQ ID NO: 14927 - DNA, 48 bp, synthetic construct; identical to SEQ ID NO: 14603
  misc_feature 1..48: note = Description of Artificial Sequence: Synthetic oligonucleotide
  source 1..48: mol_type = other DNA

SEQ ID NO: 14928 - protein, 16 aa, synthetic construct
  REGION 1..16: note = Description of Artificial Sequence: Synthetic peptide
YIFYSGSTYYNPSLKS

SEQ ID NO: 14929 - DNA, 48 bp, synthetic construct
  misc_feature 1..48: note = Description of Artificial Sequence: Synthetic oligonucleotide
  source 1..48: mol_type = other DNA
gaaatcagtcatagtggaagcaccaactacaacccgtccctcaagagt

SEQ ID NO: 14930 - protein, 16 aa, synthetic construct
  REGION 1..16: note = Description of Artificial Sequence: Synthetic peptide
EISHSGSTNYNPSLKS

SEQ ID NO: 14931 - DNA, 48 bp, synthetic construct
  misc_feature 1..48: note = Description of Artificial Sequence: Synthetic oligonucleotide
  source 1..48: mol_type = other DNA
gaaatcagtcatagtggacgcaccaactacaacccgtccctcaagagt

SEQ ID NO: 14932 - protein, 16 aa, synthetic construct
  REGION 1..16: note = Description of Artificial Sequence: Synthetic peptide
EISHSGRTNYNPSLKS

SEQ ID NO: 14933 - DNA, 48 bp, synthetic construct
  misc_feature 1..48: note = Description of Artificial Sequence: Synthetic oligonucleotide
  source 1..48: mol_type = other DNA
gaagtcaatcatagtggaagcaccaactacaacccgtccctcaagagt

SEQ ID NO: 14934 - protein, 16 aa, synthetic construct
  REGION 1..16: note = Description of Artificial Sequence: Synthetic peptide
EVNHSGSTNYNPSLKS

SEQ ID NO: 14935 - DNA, 51 bp, synthetic construct
  misc_feature 1..51: note = Description of Artificial Sequence: Synthetic oligonucleotide
  source 1..51: mol_type = other DNA
tggatcagcgcttataatggtaacacaaagaatgcacagaggttccagggc

SEQ ID NO: 14936 - protein, 17 aa, synthetic construct
  REGION 1..17: note = Description of Artificial Sequence: Synthetic peptide
WISAYNGNTKNAQRFQG

SEQ ID NO: 14937 - DNA, 54 bp, synthetic construct
  misc_feature 1..54: note = Description of Artificial Sequence: Synthetic oligonucleotide
  source 1..54: mol_type = other DNA
aggacatactacaggtccaagtggtataattattatgaagtatctgtgagaagt

SEQ ID NO: 14938 - protein, 18 aa, synthetic construct
  REGION 1..18: note = Description of Artificial Sequence: Synthetic peptide
RTYYRSKWYNYYEVSVRS

SEQ ID NO: 14939 - DNA, 48 bp, synthetic construct; identical to SEQ ID NO: 13715
  misc_feature 1..48: note = Description of Artificial Sequence: Synthetic oligonucleotide
  source 1..48: mol_type = other DNA

SEQ ID NO: 14940 - protein, 16 aa, synthetic construct
  REGION 1..16: note = Description of Artificial Sequence: Synthetic peptide
EINHSGSTNYNPSLKS

SEQ ID NO: 14941 - DNA, 51 bp, synthetic construct
  misc_feature 1..51: note = Description of Artificial Sequence: Synthetic oligonucleotide
  source 1..51: mol_type = other DNA
tggatcgaccctaacagtggtggcacaaactatccacagaagtttcagggc

SEQ ID NO: 14942 - protein, 17 aa, synthetic construct
  REGION 1..17: note = Description of Artificial Sequence: Synthetic peptide
WIDPNSGGTNYPQKFQG

SEQ ID NO: 14943 - DNA, 48 bp, synthetic construct; identical to SEQ ID NO: 14929
  misc_feature 1..48: note = Description of Artificial Sequence: Synthetic oligonucleotide
  source 1..48: mol_type = other DNA

SEQ ID NO: 14944 - protein, 16 aa, synthetic construct
  REGION 1..16: note = Description of Artificial Sequence: Synthetic peptide
EISHSGSTNYNPSLKS

SEQ ID NO: 14945 - DNA, 51 bp, synthetic construct; identical to SEQ ID NO: 12207
  misc_feature 1..51: note = Description of Artificial Sequence: Synthetic oligonucleotide
  source 1..51: mol_type = other DNA

SEQ ID NO: 14946 - protein, 17 aa, synthetic construct
  REGION 1..17: note = Description of Artificial Sequence: Synthetic peptide
WINPNSGGTNYAQKFQG

SEQ ID NO: 14947 - DNA, 51 bp, synthetic construct
  misc_feature 1..51: note = Description of Artificial Sequence: Synthetic oligonucleotide
  source 1..51: mol_type = other DNA
actattagtggtagtggtgttagaacatactacgcagactccgtgaagggc

SEQ ID NO: 14948 - protein, 17 aa, synthetic construct
  REGION 1..17: note = Description of Artificial Sequence: Synthetic peptide
TISGSGVRTYYADSVKG

SEQ ID NO: 14949 - DNA, 51 bp, synthetic construct
  misc_feature 1..51: note = Description of Artificial Sequence: Synthetic oligonucleotide
  source 1..51: mol_type = other DNA
tggatgaaccctaagagaggtaacacaggctatgcacagaagttccagggc

SEQ ID NO: 14950 - protein, 17 aa, synthetic construct
  REGION 1..17: note = Description of Artificial Sequence: Synthetic peptide
WMNPKRGNTGYAQKFQG

SEQ ID NO: 14951 - DNA, 54 bp, synthetic construct
  misc_feature 1..54: note = Description of Artificial Sequence: Synthetic oligonucleotide
  source 1..54: mol_type = other DNA
aggacatactacaggtccaagtggtataattattatgaagtatctgtgaaaagt

SEQ ID NO: 14952 - protein, 18 aa, synthetic construct
  REGION 1..18: note = Description of Artificial Sequence: Synthetic peptide
RTYYRSKWYNYYEVSVKS

SEQ ID NO: 14953 - DNA, 54 bp, synthetic construct
  misc_feature 1..54: note = Description of Artificial Sequence: Synthetic oligonucleotide
  source 1..54: mol_type = other DNA
aggacatactacaggtccaagtggtataatgagtatgcagtatctgtgagaagt

SEQ ID NO: 14954 - protein, 18 aa, synthetic construct
  REGION 1..18: note = Description of Artificial Sequence: Synthetic peptide
RTYYRSKWYNEYAVSVRS

SEQ ID NO: 14955 - DNA, 51 bp, synthetic construct; identical to SEQ ID NO: 14947
  misc_feature 1..51: note = Description of Artificial Sequence: Synthetic oligonucleotide
  source 1..51: mol_type = other DNA

SEQ ID NO: 14956 - protein, 17 aa, synthetic construct
  REGION 1..17: note = Description of Artificial Sequence: Synthetic peptide
TISGSGVRTYYADSVKG

SEQ ID NO: 14957 - DNA, 48 bp, synthetic construct
  misc_feature 1..48: note = Description of Artificial Sequence: Synthetic oligonucleotide
  source 1..48: mol_type = other DNA
gaaatcaatcatagtggaagcaccaactacaatccgtccctcaagagt

SEQ ID NO: 14958 - protein, 16 aa, synthetic construct
  REGION 1..16: note = Description of Artificial Sequence: Synthetic peptide
EINHSGSTNYNPSLKS

SEQ ID NO: 14959 - DNA, 51 bp, synthetic construct
  misc_feature 1..51: note = Description of Artificial Sequence: Synthetic oligonucleotide
  source 1..51: mol_type = other DNA
attatatggtatgatggaagtaataaattctatgcagactccgtgaagggc

SEQ ID NO: 14960 - protein, 17 aa, synthetic construct
  REGION 1..17: note = Description of Artificial Sequence: Synthetic peptide
IIWYDGSNKFYADSVKG

SEQ ID NO: 14961 - DNA, 51 bp, synthetic construct; identical to SEQ ID NO: 13745
  misc_feature 1..51: note = Description of Artificial Sequence: Synthetic oligonucleotide
  source 1..51: mol_type = other DNA

SEQ ID NO: 14962 - protein, 17 aa, synthetic construct
  REGION 1..17: note = Description of Artificial Sequence: Synthetic peptide
VIWYDGSNKNYADSVKG

SEQ ID NO: 14963 - DNA, 51 bp, synthetic construct; identical to SEQ ID NO: 12207
  misc_feature 1..51: note = Description of Artificial Sequence: Synthetic oligonucleotide
  source 1..51: mol_type = other DNA

SEQ ID NO: 14964 - protein, 17 aa, synthetic construct
  REGION 1..17: note = Description of Artificial Sequence: Synthetic peptide
WINPNSGGTNYAQKFQG

SEQ ID NO: 14965 - DNA, 51 bp, synthetic construct; identical to SEQ ID NO: 12133
  misc_feature 1..51: note = Description of Artificial Sequence: Synthetic oligonucleotide
  source 1..51: mol_type = other DNA

SEQ ID NO: 14966 - protein, 17 aa, synthetic construct
  REGION 1..17: note = Description of Artificial Sequence: Synthetic peptide
VIWYDGSNKYYVDSVKG

SEQ ID NO: 14967 - DNA, 51 bp, synthetic construct; identical to SEQ ID NO: 14309
  misc_feature 1..51: note = Description of Artificial Sequence: Synthetic oligonucleotide
  source 1..51: mol_type = other DNA

SEQ ID NO: 14968 - protein, 17 aa, synthetic construct
  REGION 1..17: note = Description of Artificial Sequence: Synthetic peptide
VIWYDVNNKYYADSVKG

SEQ ID NO: 14969 - DNA, 51 bp, synthetic construct
  misc_feature 1..51: note = Description of Artificial Sequence: Synthetic oligonucleotide
  source 1..51: mol_type = other DNA
tacattagtggtagtggtactaccacatactacgcagactctgtgaagggc

SEQ ID NO: 14970 - protein, 17 aa, synthetic construct
  REGION 1..17: note = Description of Artificial Sequence: Synthetic peptide
YISGSGTTTYYADSVKG

SEQ ID NO: 14971 - DNA, 51 bp, synthetic construct; identical to SEQ ID NO: 12161
  misc_feature 1..51: note = Description of Artificial Sequence: Synthetic oligonucleotide
  source 1..51: mol_type = other DNA

SEQ ID NO: 14972 - protein, 17 aa, synthetic construct
  REGION 1..17: note = Description of Artificial Sequence: Synthetic peptide
WMHPNSGNTGYAQKFQG

SEQ ID NO: 14973 - DNA, 51 bp, synthetic construct
  misc_feature 1..51: note = Description of Artificial Sequence: Synthetic oligonucleotide
  source 1..51: mol_type = other DNA
gttatatggtatgatggaagtaataaatataatgcagactccgtgaagggc

SEQ ID NO: 14974 - protein, 17 aa, synthetic construct
  REGION 1..17: note = Description of Artificial Sequence: Synthetic peptide
VIWYDGSNKYNADSVKG

SEQ ID NO: 14975 - DNA, 51 bp, synthetic construct; identical to SEQ ID NO: 12207
  misc_feature 1..51: note = Description of Artificial Sequence: Synthetic oligonucleotide
  source 1..51: mol_type = other DNA

SEQ ID NO: 14976 - protein, 17 aa, synthetic construct
  REGION 1..17: note = Description of Artificial Sequence: Synthetic peptide
WINPNSGGTNYAQKFQG

SEQ ID NO: 14977 - DNA, 54 bp, synthetic construct; identical to SEQ ID NO: 14937
  misc_feature 1..54: note = Description of Artificial Sequence: Synthetic oligonucleotide
  source 1..54: mol_type = other DNA

SEQ ID NO: 14978 - protein, 18 aa, synthetic construct
  REGION 1..18: note = Description of Artificial Sequence: Synthetic peptide
RTYYRSKWYNYYEVSVRS

SEQ ID NO: 14979 - DNA, 51 bp, synthetic construct
  misc_feature 1..51: note = Description of Artificial Sequence: Synthetic oligonucleotide
  source 1..51: mol_type = other DNA
gctattagtggtagtggtggtagcacatattacgcagactccgtgaagggc

SEQ ID NO: 14980 - protein, 17 aa, synthetic construct
  REGION 1..17: note = Description of Artificial Sequence: Synthetic peptide
AISGSGGSTYYADSVKG

SEQ ID NO: 14981 - DNA, 51 bp, synthetic construct; identical to SEQ ID NO: 13745
  misc_feature 1..51: note = Description of Artificial Sequence: Synthetic oligonucleotide
  source 1..51: mol_type = other DNA

SEQ ID NO: 14982 - protein, 17 aa, synthetic construct
  REGION 1..17: note = Description of Artificial Sequence: Synthetic peptide
VIWYDGSNKNYADSVKG

SEQ ID NO: 14983 - DNA, 51 bp, synthetic construct
  misc_feature 1..51: note = Description of Artificial Sequence: Synthetic oligonucleotide
  source 1..51: mol_type = other DNA
gttatatggtatgatggtagcaatgaaaattatgtagcctccgtgaagggc

SEQ ID NO: 14984 - protein, 17 aa, synthetic construct
  REGION 1..17: note = Description of Artificial Sequence: Synthetic peptide
VIWYDGSNENYVASVKG

SEQ ID NO: 14985 - DNA, 48 bp, synthetic construct
  misc_feature 1..48: note = Description of Artificial Sequence: Synthetic oligonucleotide
  source 1..48: mol_type = other DNA
gaaatcagtcatagtggaagcaccagttacaacccgtccctcaagagt

SEQ ID NO: 14986 - protein, 16 aa, synthetic construct
  REGION 1..16: note = Description of Artificial Sequence: Synthetic peptide
EISHSGSTSYNPSLKS

SEQ ID NO: 14987 - DNA, 48 bp, synthetic construct
  misc_feature 1..48: note = Description of Artificial Sequence: Synthetic oligonucleotide
  source 1..48: mol_type = other DNA
gaaatgtatcattttggaaacaccaactacaacccgtccctcaagagt

SEQ ID NO: 14988 - protein, 16 aa, synthetic construct
  REGION 1..16: note = Description of Artificial Sequence: Synthetic peptide
EMYHFGNTNYNPSLKS

SEQ ID NO: 14989 - DNA, 51 bp, synthetic construct; identical to SEQ ID NO: 12123
  misc_feature 1..51: note = Description of Artificial Sequence: Synthetic oligonucleotide
  source 1..51: mol_type = other DNA

SEQ ID NO: 14990 - protein, 17 aa, synthetic construct
  REGION 1..17: note = Description of Artificial Sequence: Synthetic peptide
VIWYDGSNKYYADSVKG

SEQ ID NO: 14991 - DNA, 54 bp, synthetic construct
  misc_feature 1..54: note = Description of Artificial Sequence: Synthetic oligonucleotide
  source 1..54: mol_type = other DNA
aggacatattacaggtccaagtggtataattattatgaagtatctgtgagaagt

SEQ ID NO: 14992 - protein, 18 aa, synthetic construct
  REGION 1..18: note = Description of Artificial Sequence: Synthetic peptide
RTYYRSKWYNYYEVSVRS

SEQ ID NO: 14993 - DNA, 51 bp, synthetic construct
  misc_feature 1..51: note = Description of Artificial Sequence: Synthetic oligonucleotide
  source 1..51: mol_type = other DNA
gttatatggtatgatggaagtaatgagaattatgtagactccgtgaagggc

SEQ ID NO: 14994 - protein, 17 aa, synthetic construct
  REGION 1..17: note = Description of Artificial Sequence: Synthetic peptide
VIWYDGSNENYVDSVKG

SEQ ID NO: 14995 - DNA, 48 bp, synthetic construct
  misc_feature 1..48: note = Description of Artificial Sequence: Synthetic oligonucleotide
  source 1..48: mol_type = other DNA
gaaagcaatcagagtggacgcaccacctacaacccgtccctcaagagt

SEQ ID NO: 14996 - protein, 16 aa, synthetic construct
  REGION 1..16: note = Description of Artificial Sequence: Synthetic peptide
ESNQSGRTTYNPSLKS

SEQ ID NO: 14997 - DNA, 51 bp, synthetic construct; identical to SEQ ID NO: 14947
  misc_feature 1..51: note = Description of Artificial Sequence: Synthetic oligonucleotide
  source 1..51: mol_type = other DNA

SEQ ID NO: 14998 - protein, 17 aa, synthetic construct
  REGION 1..17: note = Description of Artificial Sequence: Synthetic peptide
TISGSGVRTYYADSVKG

SEQ ID NO: 14999 - DNA, 51 bp, synthetic construct
  misc_feature 1..51: note = Description of Artificial Sequence: Synthetic oligonucleotide
  source 1..51: mol_type = other DNA
gctatatggtatgatggaagtaataaatacaatgcagactccgtgaagggc

SEQ ID NO: 15000 - protein, 17 aa, synthetic construct
  REGION 1..17: note = Description of Artificial Sequence: Synthetic peptide
AIWYDGSNKYNADSVKG

SEQ ID NO: 15001 - DNA, 48 bp, synthetic construct
  misc_feature 1..48: note = Description of Artificial Sequence: Synthetic oligonucleotide
  source 1..48: mol_type = other DNA
gaaatcagtcatagtggacgcaccaactacaacccgtccctcaagagc

SEQ ID NO: 15002 - protein, 16 aa, synthetic construct
  REGION 1..16: note = Description of Artificial Sequence: Synthetic peptide
EISHSGRTNYNPSLKS

SEQ ID NO: 15003 - DNA, 48 bp, synthetic construct; identical to SEQ ID NO: 13715
  misc_feature 1..48: note = Description of Artificial Sequence: Synthetic oligonucleotide
  source 1..48: mol_type = other DNA

SEQ ID NO: 15004 - protein, 16 aa, synthetic construct
  REGION 1..16: note = Description of Artificial Sequence: Synthetic peptide
EINHSGSTNYNPSLKS

SEQ ID NO: 15005 - DNA, 51 bp, synthetic construct; identical to SEQ ID NO: 12207
  misc_feature 1..51: note = Description of Artificial Sequence: Synthetic oligonucleotide
  source 1..51: mol_type = other DNA

SEQ ID NO: 15006 - protein, 17 aa, synthetic construct
  REGION 1..17: note = Description of Artificial Sequence: Synthetic peptide
WINPNSGGTNYAQKFQG

SEQ ID NO: 15007 - DNA, 51 bp, synthetic construct
  misc_feature 1..51: note = Description of Artificial Sequence: Synthetic oligonucleotide
  source 1..51: mol_type = other DNA
tggatcgaccctaatagtggtggcacaaactatgcacagaagtttcagggc

SEQ ID NO: 15008 - protein, 17 aa, synthetic construct
  REGION 1..17: note = Description of Artificial Sequence: Synthetic peptide
WIDPNSGGTNYAQKFQG

SEQ ID NO: 15009 - DNA, 51 bp, synthetic construct; identical to SEQ ID NO: 12207
  misc_feature 1..51: note = Description of Artificial Sequence: Synthetic oligonucleotide
  source 1..51: mol_type = other DNA

SEQ ID NO: 15010 - protein, 17 aa, synthetic construct
  REGION 1..17: note = Description of Artificial Sequence: Synthetic peptide
WINPNSGGTNYAQKFQG

SEQ ID NO: 15011 - DNA, 51 bp, synthetic construct
  misc_feature 1..51: note = Description of Artificial Sequence: Synthetic oligonucleotide
  source 1..51: mol_type = other DNA
gttatatggtatgatggaagtaataaaaactatgcagagtccgtgaagggc

SEQ ID NO: 15012 - protein, 17 aa, synthetic construct
  REGION 1..17: note = Description of Artificial Sequence: Synthetic peptide
VIWYDGSNKNYAESVKG

SEQ ID NO: 15013 - DNA, 51 bp, synthetic construct
  misc_feature 1..51: note = Description of Artificial Sequence: Synthetic oligonucleotide
  source 1..51: mol_type = other DNA
gttatatggtatgatagaaataataaatactatggtgactccgtgaagggc

SEQ ID NO: 15014 - protein, 17 aa, synthetic construct
  REGION 1..17: note = Description of Artificial Sequence: Synthetic peptide
VIWYDRNNKYYGDSVKG

SEQ ID NO: 15015 - DNA, 51 bp, synthetic construct; identical to SEQ ID NO: 12133
  misc_feature 1..51: note = Description of Artificial Sequence: Synthetic oligonucleotide
  source 1..51: mol_type = other DNA

SEQ ID NO: 15016 - protein, 17 aa, synthetic construct
  REGION 1..17: note = Description of Artificial Sequence: Synthetic peptide
VIWYDGSNKYYVDSVKG

SEQ ID NO: 15017 - DNA, 51 bp, synthetic construct; identical to SEQ ID NO: 14947
  misc_feature 1..51: note = Description of Artificial Sequence: Synthetic oligonucleotide
  source 1..51: mol_type = other DNA

SEQ ID NO: 15018 - protein, 17 aa, synthetic construct
  REGION 1..17: note = Description of Artificial Sequence: Synthetic peptide
TISGSGVRTYYADSVKG

SEQ ID NO: 15019 - DNA, 48 bp, synthetic construct; identical to SEQ ID NO: 13715
  misc_feature 1..48: note = Description of Artificial Sequence: Synthetic oligonucleotide
  source 1..48: mol_type = other DNA

SEQ ID NO: 15020 - protein, 16 aa, synthetic construct
  REGION 1..16: note = Description of Artificial Sequence: Synthetic peptide
EINHSGSTNYNPSLKS

SEQ ID NO: 15021 - DNA, 51 bp, synthetic construct; identical to SEQ ID NO: 12207
  misc_feature 1..51: note = Description of Artificial Sequence: Synthetic oligonucleotide
  source 1..51: mol_type = other DNA

SEQ ID NO: 15022 - protein, 17 aa, synthetic construct
  REGION 1..17: note = Description of Artificial Sequence: Synthetic peptide
WINPNSGGTNYAQKFQG

SEQ ID NO: 15023 - DNA, 48 bp, synthetic construct
  misc_feature 1..48: note = Description of Artificial Sequence: Synthetic oligonucleotide
  source 1..48: mol_type = other DNA
gaaatcaatcatagtggacgcgccaactacaacccgtccctcaagagt

SEQ ID NO: 15024 - protein, 16 aa, synthetic construct
  REGION 1..16: note = Description of Artificial Sequence: Synthetic peptide
EINHSGRANYNPSLKS

SEQ ID NO: 15025 - DNA, 51 bp, synthetic construct; identical to SEQ ID NO: 12207
  misc_feature 1..51: note = Description of Artificial Sequence: Synthetic oligonucleotide
  source 1..51: mol_type = other DNA

SEQ ID NO: 15026 - protein, 17 aa, synthetic construct
  REGION 1..17: note = Description of Artificial Sequence: Synthetic peptide
WINPNSGGTNYAQKFQG

SEQ ID NO: 15027 - DNA, 51 bp, synthetic construct; identical to SEQ ID NO: 12391
  misc_feature 1..51: note = Description of Artificial Sequence: Synthetic oligonucleotide
  source 1..51: mol_type = other DNA

SEQ ID NO: 15028 - protein, 17 aa, synthetic construct
  REGION 1..17: note = Description of Artificial Sequence: Synthetic peptide
VIWYDENNKYYVDSVKG

SEQ ID NO: 15029 - DNA, 51 bp, synthetic construct; identical to SEQ ID NO: 12133
  misc_feature 1..51: note = Description of Artificial Sequence: Synthetic oligonucleotide
  source 1..51: mol_type = other DNA

SEQ ID NO: 15030 - protein, 17 aa, synthetic construct
  REGION 1..17: note = Description of Artificial Sequence: Synthetic peptide
VIWYDGSNKYYVDSVKG

SEQ ID NO: 15031 - DNA, 48 bp, synthetic construct; identical to SEQ ID NO: 12113
  misc_feature 1..48: note = Description of Artificial Sequence: Synthetic oligonucleotide
  source 1..48: mol_type = other DNA

SEQ ID NO: 15032 - protein, 16 aa, synthetic construct
  REGION 1..16: note = Description of Artificial Sequence: Synthetic peptide
RIYTSGSTDYNPSLKS

SEQ ID NO: 15033 - DNA, 54 bp, synthetic construct
  misc_feature 1..54: note = Description of Artificial Sequence: Synthetic oligonucleotide
  source 1..54: mol_type = other DNA
aggacatactacaggtccaagtggtataattattatccagtatctgtgagaagt

SEQ ID NO: 15034 - protein, 18 aa, synthetic construct
  REGION 1..18: note = Description of Artificial Sequence: Synthetic peptide
RTYYRSKWYNYYPVSVRS

SEQ ID NO: 15035 - DNA, 51 bp, synthetic construct; identical to SEQ ID NO: 12207
  misc_feature 1..51: note = Description of Artificial Sequence: Synthetic oligonucleotide
  source 1..51: mol_type = other DNA

SEQ ID NO: 15036 - protein, 17 aa, synthetic construct
  REGION 1..17: note = Description of Artificial Sequence: Synthetic peptide
WINPNSGGTNYAQKFQG

SEQ ID NO: 15037 - DNA, 51 bp, synthetic construct
  misc_feature 1..51: note = Description of Artificial Sequence: Synthetic oligonucleotide
  source 1..51: mol_type = other DNA
gttacatggtatgatggaagtgataaatactatgcagactccgtgaagggc

SEQ ID NO: 15038 - protein, 17 aa, synthetic construct
  REGION 1..17: note = Description of Artificial Sequence: Synthetic peptide
VTWYDGSDKYYADSVKG

SEQ ID NO: 15039 - DNA, 51 bp, synthetic construct
  misc_feature 1..51: note = Description of Artificial Sequence: Synthetic oligonucleotide
  source 1..51: mol_type = other DNA
tggatcaacgcttacaatggtcacacaaactatgcacagaagttccagggc

SEQ ID NO: 15040 - protein, 17 aa, synthetic construct
  REGION 1..17: note = Description of Artificial Sequence: Synthetic peptide
WINAYNGHTNYAQKFQG

SEQ ID NO: 15041 - DNA, 51 bp, synthetic construct
  misc_feature 1..51: note = Description of Artificial Sequence: Synthetic oligonucleotide
  source 1..51: mol_type = other DNA
gttctttggtttgatggaagtaatagaaactatgcagactccgtgaagggc

SEQ ID NO: 15042 - protein, 17 aa, synthetic construct
  REGION 1..17: note = Description of Artificial Sequence: Synthetic peptide
VLWFDGSNRNYADSVKG

SEQ ID NO: 15043 - DNA, 51 bp, synthetic construct
  misc_feature 1..51: note = Description of Artificial Sequence: Synthetic oligonucleotide
  source 1..51: mol_type = other DNA
gttatatggtatgatggaagtaataaaaactatgaagactccgtgaagggc

SEQ ID NO: 15044 - protein, 17 aa, synthetic construct
  REGION 1..17: note = Description of Artificial Sequence: Synthetic peptide
VIWYDGSNKNYEDSVKG

SEQ ID NO: 15045 - DNA, 51 bp, synthetic construct; identical to SEQ ID NO: 12263
  misc_feature 1..51: note = Description of Artificial Sequence: Synthetic oligonucleotide
  source 1..51: mol_type = other DNA

SEQ ID NO: 15046 - protein, 17 aa, synthetic construct
  REGION 1..17: note = Description of Artificial Sequence: Synthetic peptide
VIWHDGSNKYYADSVKG

SEQ ID NO: 15047 - DNA, 51 bp, synthetic construct; identical to SEQ ID NO: 13745
  misc_feature 1..51: note = Description of Artificial Sequence: Synthetic oligonucleotide
  source 1..51: mol_type = other DNA

SEQ ID NO: 15048 - protein, 17 aa, synthetic construct
  REGION 1..17: note = Description of Artificial Sequence: Synthetic peptide
VIWYDGSNKNYADSVKG

SEQ ID NO: 15049 - DNA, 51 bp, synthetic construct; identical to SEQ ID NO: 14605
  misc_feature 1..51: note = Description of Artificial Sequence: Synthetic oligonucleotide
  source 1..51: mol_type = other DNA

SEQ ID NO: 15050 - protein, 17 aa, synthetic construct
  REGION 1..17: note = Description of Artificial Sequence: Synthetic peptide
VIWYDGSNEHYADSVKG

SEQ ID NO: 15051 - DNA, 51 bp, synthetic construct
  misc_feature 1..51: note = Description of Artificial Sequence: Synthetic oligonucleotide
  source 1..51: mol_type = other DNA
tggatcagcgcttacaatggtctcacaaactatgcacagaagttccagggc

SEQ ID NO: 15052 - protein, 17 aa, synthetic construct
  REGION 1..17: note = Description of Artificial Sequence: Synthetic peptide
WISAYNGLTNYAQKFQG

SEQ ID NO: 15053 - DNA, 51 bp, synthetic construct
  misc_feature 1..51: note = Description of Artificial Sequence: Synthetic oligonucleotide
  source 1..51: mol_type = other DNA
gttatatggtatgatggaagtaataaaaactatgtagactccgtgaagggc

SEQ ID NO: 15054 - protein, 17 aa, synthetic construct
  REGION 1..17: note = Description of Artificial Sequence: Synthetic peptide
VIWYDGSNKNYVDSVKG

SEQ ID NO: 15055 - DNA, 51 bp, synthetic construct
  misc_feature 1..51: note = Description of Artificial Sequence: Synthetic oligonucleotide
  source 1..51: mol_type = other DNA
gttatatggtatgatggaagtaataaaaattatgcagactccgtgaagggc

SEQ ID NO: 15056 - protein, 17 aa, synthetic construct
  REGION 1..17: note = Description of Artificial Sequence: Synthetic peptide
VIWYDGSNKNYADSVKG

SEQ ID NO: 15057 - DNA, 51 bp, synthetic construct; identical to SEQ ID NO: 14605
  misc_feature 1..51: note = Description of Artificial Sequence: Synthetic oligonucleotide
  source 1..51: mol_type = other DNA

SEQ ID NO: 15058 - protein, 17 aa, synthetic construct
  REGION 1..17: note = Description of Artificial Sequence: Synthetic peptide
VIWYDGSNEHYADSVKG

SEQ ID NO: 15059 - DNA, 51 bp, synthetic construct
  misc_feature 1..51: note = Description of Artificial Sequence: Synthetic oligonucleotide
  source 1..51: mol_type = other DNA
gctatatggtatgatggaagtcataaatactatacagattccgtgaagggc

SEQ ID NO: 15060 - protein, 17 aa, synthetic construct
  REGION 1..17: note = Description of Artificial Sequence: Synthetic peptide
AIWYDGSHKYYTDSVKG

SEQ ID NO: 15061 - DNA, 51 bp, synthetic construct; identical to SEQ ID NO: 14893
  misc_feature 1..51: note = Description of Artificial Sequence: Synthetic oligonucleotide
  source 1..51: mol_type = other DNA

SEQ ID NO: 15062 - protein, 17 aa, synthetic construct
  REGION 1..17: note = Description of Artificial Sequence: Synthetic peptide
VIWYDGSNKHYADSVKG

SEQ ID NO: 15063 - DNA, 51 bp, synthetic construct; identical to SEQ ID NO: 12575
  misc_feature 1..51: note = Description of Artificial Sequence: Synthetic oligonucleotide
  source 1..51: mol_type = other DNA

SEQ ID NO: 15064 - protein, 17 aa, synthetic construct
  REGION 1..17: note = Description of Artificial Sequence: Synthetic peptide
VIWYDGSNKYYADSVKG

SEQ ID NO: 15065 - DNA, 51 bp, synthetic construct; identical to SEQ ID NO: 15043
  misc_feature 1..51: note = Description of Artificial Sequence: Synthetic oligonucleotide
  source 1..51: mol_type = other DNA

SEQ ID NO: 15066 - protein, 17 aa, synthetic construct
  REGION 1..17: note = Description of Artificial Sequence: Synthetic peptide
VIWYDGSNKNYEDSVKG

SEQ ID NO: 15067 - DNA, 51 bp, synthetic construct; identical to SEQ ID NO: 15055
  misc_feature 1..51: note = Description of Artificial Sequence: Synthetic oligonucleotide
  source 1..51: mol_type = other DNA

SEQ ID NO: 15068 - protein, 17 aa, synthetic construct
  REGION 1..17: note = Description of Artificial Sequence: Synthetic peptide
VIWYDGSNKNYADSVKG

SEQ ID NO: 15069 - DNA, 51 bp, synthetic construct; identical to SEQ ID NO: 13745
  misc_feature 1..51: note = Description of Artificial Sequence: Synthetic oligonucleotide
  source 1..51: mol_type = other DNA

SEQ ID NO: 15070 - protein, 17 aa, synthetic construct
  REGION 1..17: note = Description of Artificial Sequence: Synthetic peptide
VIWYDGSNKNYADSVKG

SEQ ID NO: 15071 - DNA, 51 bp, synthetic construct; identical to SEQ ID NO: 14893
  misc_feature 1..51: note = Description of Artificial Sequence: Synthetic oligonucleotide
  source 1..51: mol_type = other DNA

SEQ ID NO: 15072 - protein, 17 aa, synthetic construct
  REGION 1..17: note = Description of Artificial Sequence: Synthetic peptide
VIWYDGSNKHYADSVKG

SEQ ID NO: 15073 - DNA, 51 bp, synthetic construct; identical to SEQ ID NO: 15043
  misc_feature 1..51: note = Description of Artificial Sequence: Synthetic oligonucleotide
  source 1..51: mol_type = other DNA

SEQ ID NO: 15074 - protein, 17 aa, synthetic construct
  REGION 1..17: note = Description of Artificial Sequence: Synthetic peptide
VIWYDGSNKNYEDSVKG

SEQ ID NO: 15075 - DNA, 51 bp, synthetic construct; identical to SEQ ID NO: 14893
  misc_feature 1..51: note = Description of Artificial Sequence: Synthetic oligonucleotide
  source 1..51: mol_type = other DNA

SEQ ID NO: 15076 - protein, 17 aa, synthetic construct
  REGION 1..17: note = Description of Artificial Sequence: Synthetic peptide
VIWYDGSNKHYADSVKG

SEQ ID NO: 15077 - DNA, 51 bp, synthetic construct
  misc_feature 1..51: note = Description of Artificial Sequence: Synthetic oligonucleotide
  source 1..51: mol_type = other DNA
tggatcaatcctaagagtgatggcacaaactatgcacagaagtttcagggc

SEQ ID NO: 15078 - protein, 17 aa, synthetic construct
  REGION 1..17: note = Description of Artificial Sequence: Synthetic peptide
WINPKSDGTNYAQKFQG

SEQ ID NO: 15079 - DNA, 51 bp, synthetic construct
  misc_feature 1..51: note = Description of Artificial Sequence: Synthetic oligonucleotide
  source 1..51: mol_type = other DNA
tggatcagcgttcacaatggtaacacagactatgcacagaagttccagggc

SEQ ID NO: 15080 - protein, 17 aa, synthetic construct
  REGION 1..17: note = Description of Artificial Sequence: Synthetic peptide
WISVHNGNTDYAQKFQG

SEQ ID NO: 15081 - DNA, 51 bp, synthetic construct
  misc_feature 1..51: note = Description of Artificial Sequence: Synthetic oligonucleotide
  source 1..51: mol_type = other DNA
gttatatggtatgatggaagtaataaaaactatggagactccgtgaagggc

SEQ ID NO: 15082 - protein, 17 aa, synthetic construct
  REGION 1..17: note = Description of Artificial Sequence: Synthetic peptide
VIWYDGSNKNYGDSVKG

SEQ ID NO: 15083 - DNA, 51 bp, synthetic construct
  misc_feature 1..51: note = Description of Artificial Sequence: Synthetic oligonucleotide
  source 1..51: mol_type = other DNA
gttatatggtatgatggaagtaatgaaaactatgcagactccgtgaagggc

SEQ ID NO: 15084 - protein, 17 aa, synthetic construct
  REGION 1..17: note = Description of Artificial Sequence: Synthetic peptide
VIWYDGSNENYADSVKG

SEQ ID NO: 15085 - DNA, 51 bp, synthetic construct
  misc_feature 1..51: note = Description of Artificial Sequence: Synthetic oligonucleotide
  source 1..51: mol_type = other DNA
tggatcaactctaacagtggtggcacaaactatgcacagaagtttcagggc

SEQ ID NO: 15086 - protein, 17 aa, synthetic construct
  REGION 1..17: note = Description of Artificial Sequence: Synthetic peptide
WINSNSGGTNYAQKFQG

SEQ ID NO: 15087 - DNA, 51 bp, synthetic construct; identical to SEQ ID NO: 12123
  misc_feature 1..51: note = Description of Artificial Sequence: Synthetic oligonucleotide
  source 1..51: mol_type = other DNA

SEQ ID NO: 15088 - protein, 17 aa, synthetic construct
  REGION 1..17: note = Description of Artificial Sequence: Synthetic peptide
VIWYDGSNKYYADSVKG

SEQ ID NO: 15089 - DNA, 51 bp, synthetic construct; identical to SEQ ID NO: 12123
  misc_feature 1..51: note = Description of Artificial Sequence: Synthetic oligonucleotide
  source 1..51: mol_type = other DNA

SEQ ID NO: 15090 - protein, 17 aa, synthetic construct
  REGION 1..17: note = Description of Artificial Sequence: Synthetic peptide
VIWYDGSNKYYADSVKG

SEQ ID NO: 15091 - DNA, 51 bp, synthetic construct; identical to SEQ ID NO: 12575
  misc_feature 1..51: note = Description of Artificial Sequence: Synthetic oligonucleotide
  source 1..51: mol_type = other DNA

SEQ ID NO: 15092 - protein, 17 aa, synthetic construct
  REGION 1..17: note = Description of Artificial Sequence: Synthetic peptide
VIWYDGSNKYYADSVKG

SEQ ID NO: 15093 - DNA, 51 bp, synthetic construct; identical to SEQ ID NO: 12575
  misc_feature 1..51: note = Description of Artificial Sequence: Synthetic oligonucleotide
  source 1..51: mol_type = other DNA

SEQ ID NO: 15094 - protein, 17 aa, synthetic construct
  REGION 1..17: note = Description of Artificial Sequence: Synthetic peptide
VIWYDGSNKYYADSVKG

SEQ ID NO: 15095 - DNA, 51 bp, synthetic construct; identical to SEQ ID NO: 12575
  misc_feature 1..51: note = Description of Artificial Sequence: Synthetic oligonucleotide
  source 1..51: mol_type = other DNA

SEQ ID NO: 15096 - protein, 17 aa, synthetic construct
  REGION 1..17: note = Description of Artificial Sequence: Synthetic peptide
VIWYDGSNKYYADSVKG

SEQ ID NO: 15097 - DNA, 51 bp, synthetic construct; identical to SEQ ID NO: 15055
  misc_feature 1..51: note = Description of Artificial Sequence: Synthetic oligonucleotide
  source 1..51: mol_type = other DNA

SEQ ID NO: 15098 - protein, 17 aa, synthetic construct
  REGION 1..17: note = Description of Artificial Sequence: Synthetic peptide
VIWYDGSNKNYADSVKG

SEQ ID NO: 15099 - DNA, 51 bp, synthetic construct
  misc_feature 1..51: note = Description of Artificial Sequence: Synthetic oligonucleotide
  source 1..51: mol_type = other DNA
gttatatggtatgatggaagtaataaaaactatgcagattccgtgaagggc

SEQ ID NO: 15100 - protein, 17 aa, synthetic construct
  REGION 1..17: note = Description of Artificial Sequence: Synthetic peptide
VIWYDGSNKNYADSVKG

SEQ ID NO: 15101 - DNA, 51 bp, synthetic construct
  misc_feature 1..51: note = Description of Artificial Sequence: Synthetic oligonucleotide
  source 1..51: mol_type = other DNA
tggatcaactctaacagtggtggcacaaattatgcagagaagtttcagggc

SEQ ID NO: 15102 - protein, 17 aa, synthetic construct
  REGION 1..17: note = Description of Artificial Sequence: Synthetic peptide
WINSNSGGTNYAEKFQG

SEQ ID NO: 15103 - DNA, 51 bp, synthetic construct; identical to SEQ ID NO: 12263
  misc_feature 1..51: note = Description of Artificial Sequence: Synthetic oligonucleotide
  source 1..51: mol_type = other DNA

SEQ ID NO: 15104 - protein, 17 aa, synthetic construct
  REGION 1..17: note = Description of Artificial Sequence: Synthetic peptide
VIWHDGSNKYYADSVKG

SEQ ID NO: 15105 - DNA, 51 bp, synthetic construct; identical to SEQ ID NO: 12575
  misc_feature 1..51: note = Description of Artificial Sequence: Synthetic oligonucleotide
  source 1..51: mol_type = other DNA

SEQ ID NO: 15106 - protein, 17 aa, synthetic construct
  REGION 1..17: note = Description of Artificial Sequence: Synthetic peptide
VIWYDGSNKYYADSVKG

SEQ ID NO: 15107 - DNA, 51 bp, synthetic construct; identical to SEQ ID NO: 14605
  misc_feature 1..51: note = Description of Artificial Sequence: Synthetic oligonucleotide
  source 1..51: mol_type = other DNA

SEQ ID NO: 15108 - protein, 17 aa, synthetic construct
  REGION 1..17: note = Description of Artificial Sequence: Synthetic peptide
VIWYDGSNEHYADSVKG

SEQ ID NO: 15109 - DNA, 51 bp, synthetic construct; identical to SEQ ID NO: 12263
  misc_feature 1..51: note = Description of Artificial Sequence: Synthetic oligonucleotide
  source 1..51: mol_type = other DNA

SEQ ID NO: 15110 - protein, 17 aa, synthetic construct
  REGION 1..17: note = Description of Artificial Sequence: Synthetic peptide
VIWHDGSNKYYADSVKG

SEQ ID NO: 15111 - DNA, 51 bp, synthetic construct; identical to SEQ ID NO: 12151
  misc_feature 1..51: note = Description of Artificial Sequence: Synthetic oligonucleotide
  source 1..51: mol_type = other DNA

SEQ ID NO: 15112 - protein, 17 aa, synthetic construct
  REGION 1..17: note = Description of Artificial Sequence: Synthetic peptide
AIWYDGSNKYYADSVKG

SEQ ID NO: 15113 - DNA, 51 bp, synthetic construct
  misc_feature 1..51: note = Description of Artificial Sequence: Synthetic oligonucleotide
  source 1..51: mol_type = other DNA
tacattactggtagtagtagtaccatatactacgcagactctgtgaagggc

SEQ ID NO: 15114 - protein, 17 aa, synthetic construct
  REGION 1..17: note = Description of Artificial Sequence: Synthetic peptide
YITGSSSTIYYADSVKG

SEQ ID NO: 15115 - DNA, 51 bp, synthetic construct; identical to SEQ ID NO: 12575
  misc_feature 1..51: note = Description of Artificial Sequence: Synthetic oligonucleotide
  source 1..51: mol_type = other DNA

SEQ ID NO: 15116 - protein, 17 aa, synthetic construct
  REGION 1..17: note = Description of Artificial Sequence: Synthetic peptide
VIWYDGSNKYYADSVKG

SEQ ID NO: 15117 - DNA, 51 bp, synthetic construct; identical to SEQ ID NO: 12575
  misc_feature 1..51: note = Description of Artificial Sequence: Synthetic oligonucleotide
  source 1..51: mol_type = other DNA

SEQ ID NO: 15118 - protein, 17 aa, synthetic construct
  REGION 1..17: note = Description of Artificial Sequence: Synthetic peptide
VIWYDGSNKYYADSVKG

SEQ ID NO: 15119 - DNA, 51 bp, synthetic construct
  misc_feature 1..51: note = Description of Artificial Sequence: Synthetic oligonucleotide
  source 1..51: mol_type = other DNA
tacattagtagtagtcgtaatatcatatattacgcagactctgtgaagggc

SEQ ID NO: 15120 - protein, 17 aa, synthetic construct
  REGION 1..17: note = Description of Artificial Sequence: Synthetic peptide
YISSSRNIIYYADSVKG

SEQ ID NO: 15121 - DNA, 51 bp, synthetic construct; identical to SEQ ID NO: 12575
  misc_feature 1..51: note = Description of Artificial Sequence: Synthetic oligonucleotide
  source 1..51: mol_type = other DNA

SEQ ID NO: 15122 - protein, 17 aa, synthetic construct
  REGION 1..17: note = Description of Artificial Sequence: Synthetic peptide
VIWYDGSNKYYADSVKG

SEQ ID NO: 15123 - DNA, 51 bp, synthetic construct; identical to SEQ ID NO: 13745
  misc_feature 1..51: note = Description of Artificial Sequence: Synthetic oligonucleotide
  source 1..51: mol_type = other DNA

SEQ ID NO: 15124 - protein, 17 aa, synthetic construct
  REGION 1..17: note = Description of Artificial Sequence: Synthetic peptide
VIWYDGSNKNYADSVKG

SEQ ID NO: 15125 - DNA, 51 bp, synthetic construct; identical to SEQ ID NO: 15043
  misc_feature 1..51: note = Description of Artificial Sequence: Synthetic oligonucleotide
  source 1..51: mol_type = other DNA

SEQ ID NO: 15126 - protein, 17 aa, synthetic construct
  REGION 1..17: note = Description of Artificial Sequence: Synthetic peptide
VIWYDGSNKNYEDSVKG

SEQ ID NO: 15127 - DNA, 51 bp, synthetic construct; identical to SEQ ID NO: 12575
  misc_feature 1..51: note = Description of Artificial Sequence: Synthetic oligonucleotide
  source 1..51: mol_type = other DNA

SEQ ID NO: 15128 - protein, 17 aa, synthetic construct
  REGION 1..17: note = Description of Artificial Sequence: Synthetic peptide
VIWYDGSNKYYADSVKG

SEQ ID NO: 15129 - DNA, 51 bp, synthetic construct; identical to SEQ ID NO: 12575
  misc_feature 1..51: note = Description of Artificial Sequence: Synthetic oligonucleotide
  source 1..51: mol_type = other DNA

SEQ ID NO: 15130 - protein, 17 aa, synthetic construct
  REGION 1..17: note = Description of Artificial Sequence: Synthetic peptide
VIWYDGSNKYYADSVKG

SEQ ID NO: 15131 - DNA, 51 bp, synthetic construct; identical to SEQ ID NO: 12575
  misc_feature 1..51: note = Description of Artificial Sequence: Synthetic oligonucleotide
  source 1..51: mol_type = other DNA

SEQ ID NO: 15132 - protein, 17 aa, synthetic construct
  REGION 1..17: note = Description of Artificial Sequence: Synthetic peptide
VIWYDGSNKYYADSVKG

SEQ ID NO: 15133 - DNA, 51 bp, synthetic construct; identical to SEQ ID NO: 14893
  misc_feature 1..51: note = Description of Artificial Sequence: Synthetic oligonucleotide
  source 1..51: mol_type = other DNA

SEQ ID NO: 15134 - protein, 17 aa, synthetic construct
  REGION 1..17: note = Description of Artificial Sequence: Synthetic peptide
VIWYDGSNKHYADSVKG

SEQ ID NO: 15135 - DNA, 48 bp, synthetic construct
  misc_feature 1..48: note = Description of Artificial Sequence: Synthetic oligonucleotide
  source 1..48: mol_type = other DNA
tatatctattacagtgggaccaccaactacaacccctccctcaagagt

SEQ ID NO: 15136 - protein, 16 aa, synthetic construct
  REGION 1..16: note = Description of Artificial Sequence: Synthetic peptide
YIYYSGTTNYNPSLKS

SEQ ID NO: 15137 - DNA, 51 bp, synthetic construct; identical to SEQ ID NO: 12575
  misc_feature 1..51: note = Description of Artificial Sequence: Synthetic oligonucleotide
  source 1..51: mol_type = other DNA

SEQ ID NO: 15138 - protein, 17 aa, synthetic construct
  REGION 1..17: note = Description of Artificial Sequence: Synthetic peptide
VIWYDGSNKYYADSVKG

SEQ ID NO: 15139 - DNA, 51 bp, synthetic construct
  misc_feature 1..51: note = Description of Artificial Sequence: Synthetic oligonucleotide
  source 1..51: mol_type = other DNA
tggatccaccctaacagtggtggcacaaactatgcacagaaatttcagggc

SEQ ID NO: 15140 - protein, 17 aa, synthetic construct
  REGION 1..17: note = Description of Artificial Sequence: Synthetic peptide
WIHPNSGGTNYAQKFQG

SEQ ID NO: 15141 - DNA, 51 bp, synthetic construct
  misc_feature 1..51: note = Description of Artificial Sequence: Synthetic oligonucleotide
  source 1..51: mol_type = other DNA
gttatatggtacgatggaagtaatgaaaactatgcagactccgtgaagggc

SEQ ID NO: 15142 - protein, 17 aa, synthetic construct
  REGION 1..17: note = Description of Artificial Sequence: Synthetic peptide
VIWYDGSNENYADSVKG

SEQ ID NO: 15143 - DNA, 51 bp, synthetic construct; identical to SEQ ID NO: 15139
  misc_feature 1..51: note = Description of Artificial Sequence: Synthetic oligonucleotide
  source 1..51: mol_type = other DNA

SEQ ID NO: 15144 - protein, 17 aa, synthetic construct
  REGION 1..17: note = Description of Artificial Sequence: Synthetic peptide
WIHPNSGGTNYAQKFQG

SEQ ID NO: 15145 - DNA, 51 bp, synthetic construct
  misc_feature 1..51: note = Description of Artificial Sequence: Synthetic oligonucleotide
  source 1..51: mol_type = other DNA
tggatcagcgtttacaatggtaacacaaactatgcacagaagctccagggc

SEQ ID NO: 15146 - protein, 17 aa, synthetic construct
  REGION 1..17: note = Description of Artificial Sequence: Synthetic peptide
WISVYNGNTNYAQKLQG

SEQ ID NO: 15147 - DNA, 51 bp, synthetic construct; identical to SEQ ID NO: 13745
  misc_feature 1..51: note = Description of Artificial Sequence: Synthetic oligonucleotide
  source 1..51: mol_type = other DNA

SEQ ID NO: 15148 - protein, 17 aa, synthetic construct
  REGION 1..17: note = Description of Artificial Sequence: Synthetic peptide
VIWYDGSNKNYADSVKG

SEQ ID NO: 15149 - DNA, 51 bp, synthetic construct
  misc_feature 1..51: note = Description of Artificial Sequence: Synthetic oligonucleotide
  source 1..51: mol_type = other DNA
agtattgttggtagtggtggtcgcacgtactacgcagactccgtgaagggc

SEQ ID NO: 15150 - protein, 17 aa, synthetic construct
  REGION 1..17: note = Description of Artificial Sequence: Synthetic peptide
SIVGSGGRTYYADSVKG

SEQ ID NO: 15151 - DNA, 48 bp, synthetic construct
  misc_feature 1..48: note = Description of Artificial Sequence: Synthetic oligonucleotide
  source 1..48: mol_type = other DNA
gaaatcaatcatagtggaagcgccaactacaacccgtccctcaagagt

SEQ ID NO: 15152 - protein, 16 aa, synthetic construct
  REGION 1..16: note = Description of Artificial Sequence: Synthetic peptide
EINHSGSANYNPSLKS

SEQ ID NO: 15153 - DNA, 51 bp, synthetic construct; identical to SEQ ID NO: 15139
  misc_feature 1..51: note = Description of Artificial Sequence: Synthetic oligonucleotide
  source 1..51: mol_type = other DNA

SEQ ID NO: 15154 - protein, 17 aa, synthetic construct
  REGION 1..17: note = Description of Artificial Sequence: Synthetic peptide
WIHPNSGGTNYAQKFQG

SEQ ID NO: 15155 - DNA, 51 bp, synthetic construct; identical to SEQ ID NO: 15149
  misc_feature 1..51: note = Description of Artificial Sequence: Synthetic oligonucleotide
  source 1..51: mol_type = other DNA

SEQ ID NO: 15156 - protein, 17 aa, synthetic construct
  REGION 1..17: note = Description of Artificial Sequence: Synthetic peptide
SIVGSGGRTYYADSVKG

SEQ ID NO: 15157 - DNA, 51 bp, synthetic construct; identical to SEQ ID NO: 13745
  misc_feature 1..51: note = Description of Artificial Sequence: Synthetic oligonucleotide
  source 1..51: mol_type = other DNA

SEQ ID NO: 15158 - protein, 17 aa, synthetic construct
  REGION 1..17: note = Description of Artificial Sequence: Synthetic peptide
VIWYDGSNKNYADSVKG

SEQ ID NO: 15159 - DNA, 51 bp, synthetic construct; identical to SEQ ID NO: 15139
  misc_feature 1..51: note = Description of Artificial Sequence: Synthetic oligonucleotide
  source 1..51: mol_type = other DNA

SEQ ID NO: 15160 - protein, 17 aa, synthetic construct
  REGION 1..17: note = Description of Artificial Sequence: Synthetic peptide
WIHPNSGGTNYAQKFQG

SEQ ID NO: 15161 - DNA, 51 bp, synthetic construct
  misc_feature 1..51: note = Description of Artificial Sequence: Synthetic oligonucleotide
  source 1..51: mol_type = other DNA
tggatcagcgtttacagtggtaacacaaactatgcacagaagctccagggc

SEQ ID NO: 15162 - protein, 17 aa, synthetic construct
  REGION 1..17: note = Description of Artificial Sequence: Synthetic peptide
WISVYSGNTNYAQKLQG

SEQ ID NO: 15163 - DNA, 51 bp, synthetic construct; identical to SEQ ID NO: 13745
  misc_feature 1..51: note = Description of Artificial Sequence: Synthetic oligonucleotide
  source 1..51: mol_type = other DNA

SEQ ID NO: 15164 - protein, 17 aa, synthetic construct
  REGION 1..17: note = Description of Artificial Sequence: Synthetic peptide
VIWYDGSNKNYADSVKG

SEQ ID NO: 15165 - DNA, 51 bp, synthetic construct
  misc_feature 1..51: note = Description of Artificial Sequence: Synthetic oligonucleotide
  source 1..51: mol_type = other DNA
gctattagtggcagaggcggcagcacatactacgcagacgccgtgaagggc

SEQ ID NO: 15166 - protein, 17 aa, synthetic construct
  REGION 1..17: note = Description of Artificial Sequence: Synthetic peptide
AISGRGGSTYYADAVKG

SEQ ID NO: 15167 - DNA, 51 bp, synthetic construct
  misc_feature 1..51: note = Description of Artificial Sequence: Synthetic oligonucleotide
  source 1..51: mol_type = other DNA
gctattagtggtagtggtggtaacacatactacgcagactccgtgaagggc

SEQ ID NO: 15168 - protein, 17 aa, synthetic construct
  REGION 1..17: note = Description of Artificial Sequence: Synthetic peptide
AISGSGGNTYYADSVKG

SEQ ID NO: 15169 - DNA, 51 bp, synthetic construct; identical to SEQ ID NO: 12123
  misc_feature 1..51: note = Description of Artificial Sequence: Synthetic oligonucleotide
  source 1..51: mol_type = other DNA

SEQ ID NO: 15170 - protein, 17 aa, synthetic construct
  REGION 1..17: note = Description of Artificial Sequence: Synthetic peptide
VIWYDGSNKYYADSVKG

SEQ ID NO: 15171 - DNA, 51 bp, synthetic construct
  misc_feature 1..51: note = Description of Artificial Sequence: Synthetic oligonucleotide
  source 1..51: mol_type = other DNA
tggatcaacccttacagtggtgacacaaactatgcacagaagtttcagggc

SEQ ID NO: 15172 - protein, 17 aa, synthetic construct
  REGION 1..17: note = Description of Artificial Sequence: Synthetic peptide
WINPYSGDTNYAQKFQG

SEQ ID NO: 15173 - DNA, 48 bp, synthetic construct; identical to SEQ ID NO: 12481
  misc_feature 1..48: note = Description of Artificial Sequence: Synthetic oligonucleotide
  source 1..48: mol_type = other DNA

SEQ ID NO: 15174 - protein, 16 aa, synthetic construct
  REGION 1..16: note = Description of Artificial Sequence: Synthetic peptide
NIYYSGSTYYNPSLKS

SEQ ID NO: 15175 - DNA, 51 bp, synthetic construct; identical to SEQ ID NO: 12123
  misc_feature 1..51: note = Description of Artificial Sequence: Synthetic oligonucleotide
  source 1..51: mol_type = other DNA

SEQ ID NO: 15176 - protein, 17 aa, synthetic construct
  REGION 1..17: note = Description of Artificial Sequence: Synthetic peptide
VIWYDGSNKYYADSVKG

SEQ ID NO: 15177 - DNA, 51 bp, synthetic construct; identical to SEQ ID NO: 12103
  misc_feature 1..51: note = Description of Artificial Sequence: Synthetic oligonucleotide
  source 1..51: mol_type = other DNA

SEQ ID NO: 15178 - protein, 17 aa, synthetic construct
  REGION 1..17: note = Description of Artificial Sequence: Synthetic peptide
WMNPNSGNTGYAQKFQG

SEQ ID NO: 15179 - DNA, 51 bp, synthetic construct
  misc_feature 1..51: note = Description of Artificial Sequence: Synthetic oligonucleotide
  source 1..51: mol_type = other DNA
gctattagtggtagtggtgataacacattctacgcagactccgtgaagggc

SEQ ID NO: 15180 - protein, 17 aa, synthetic construct
  REGION 1..17: note = Description of Artificial Sequence: Synthetic peptide
AISGSGDNTFYADSVKG

SEQ ID NO: 15181 - DNA, 51 bp, synthetic construct; identical to SEQ ID NO: 15171
  misc_feature 1..51: note = Description of Artificial Sequence: Synthetic oligonucleotide
  source 1..51: mol_type = other DNA

SEQ ID NO: 15182 - protein, 17 aa, synthetic construct
  REGION 1..17: note = Description of Artificial Sequence: Synthetic peptide
WINPYSGDTNYAQKFQG

SEQ ID NO: 15183 - DNA, 51 bp, synthetic construct
  misc_feature 1..51: note = Description of Artificial Sequence: Synthetic oligonucleotide
  source 1..51: mol_type = other DNA
tggttgtaccctaacagtggtaacacaggctatgcacagaagttccagggc

SEQ ID NO: 15184 - protein, 17 aa, synthetic construct
  REGION 1..17: note = Description of Artificial Sequence: Synthetic peptide
WLYPNSGNTGYAQKFQG

SEQ ID NO: 15185 - DNA, 51 bp, synthetic construct; identical to SEQ ID NO: 12161
  misc_feature 1..51: note = Description of Artificial Sequence: Synthetic oligonucleotide
  source 1..51: mol_type = other DNA

SEQ ID NO: 15186 - protein, 17 aa, synthetic construct
  REGION 1..17: note = Description of Artificial Sequence: Synthetic peptide
WMHPNSGNTGYAQKFQG

SEQ ID NO: 15187 - DNA, 51 bp, synthetic construct; identical to SEQ ID NO: 12477
  misc_feature 1..51: note = Description of Artificial Sequence: Synthetic oligonucleotide
  source 1..51: mol_type = other DNA

SEQ ID NO: 15188 - protein, 17 aa, synthetic construct
  REGION 1..17: note = Description of Artificial Sequence: Synthetic peptide
VIWYEGSNKYYVDSVRG

SEQ ID NO: 15189 - DNA, 51 bp, synthetic construct; identical to SEQ ID NO: 15171
  misc_feature 1..51: note = Description of Artificial Sequence: Synthetic oligonucleotide
  source 1..51: mol_type = other DNA

SEQ ID NO: 15190 - protein, 17 aa, synthetic construct
  REGION 1..17: note = Description of Artificial Sequence: Synthetic peptide
WINPYSGDTNYAQKFQG

SEQ ID NO: 15191 - DNA, 51 bp, synthetic construct; identical to SEQ ID NO: 12103
  misc_feature 1..51: note = Description of Artificial Sequence: Synthetic oligonucleotide
  source 1..51: mol_type = other DNA

SEQ ID NO: 15192 - protein, 17 aa, synthetic construct
  REGION 1..17: note = Description of Artificial Sequence: Synthetic peptide
WMNPNSGNTGYAQKFQG

SEQ ID NO: 15193 - DNA, 51 bp, synthetic construct; identical to SEQ ID NO: 15171
  misc_feature 1..51: note = Description of Artificial Sequence: Synthetic oligonucleotide
  source 1..51: mol_type = other DNA

SEQ ID NO: 15194 - protein, 17 aa, synthetic construct
  REGION 1..17: note = Description of Artificial Sequence: Synthetic peptide
WINPYSGDTNYAQKFQG

SEQ ID NO: 15195 - DNA, 51 bp, synthetic construct; identical to SEQ ID NO: 12123
  misc_feature 1..51: note = Description of Artificial Sequence: Synthetic oligonucleotide
  source 1..51: mol_type = other DNA

SEQ ID NO: 15196 - protein, 17 aa, synthetic construct
  REGION 1..17: note = Description of Artificial Sequence: Synthetic peptide
VIWYDGSNKYYADSVKG

SEQ ID NO: 15197 - DNA, 51 bp, synthetic construct
  misc_feature 1..51: note = Description of Artificial Sequence: Synthetic oligonucleotide
  source 1..51: mol_type = other DNA
ataatcaaccctagtggtggtagcacaagctacgcacagaagttccagggc

SEQ ID NO: 15198 - protein, 17 aa, synthetic construct
  REGION 1..17: note = Description of Artificial Sequence: Synthetic peptide
IINPSGGSTSYAQKFQG

SEQ ID NO: 15199 - DNA, 51 bp, synthetic construct; identical to SEQ ID NO: 13491
  misc_feature 1..51: note = Description of Artificial Sequence: Synthetic oligonucleotide
  source 1..51: mol_type = other DNA

SEQ ID NO: 15200 - protein, 17 aa, synthetic construct
  REGION 1..17: note = Description of Artificial Sequence: Synthetic peptide
WMHPNSGSTGYAQKFQG

SEQ ID NO: 15201 - DNA, 51 bp, synthetic construct; identical to SEQ ID NO: 15171
  misc_feature 1..51: note = Description of Artificial Sequence: Synthetic oligonucleotide
  source 1..51: mol_type = other DNA

SEQ ID NO: 15202 - protein, 17 aa, synthetic construct
  REGION 1..17: note = Description of Artificial Sequence: Synthetic peptide
WINPYSGDTNYAQKFQG

SEQ ID NO: 15203 - DNA, 51 bp, synthetic construct
  misc_feature 1..51: note = Description of Artificial Sequence: Synthetic oligonucleotide
  source 1..51: mol_type = other DNA
tggatgcatcctaacagtggtaacacaggctttgcacagaagttccagggc

SEQ ID NO: 15204 - protein, 17 aa, synthetic construct
  REGION 1..17: note = Description of Artificial Sequence: Synthetic peptide
WMHPNSGNTGFAQKFQG

SEQ ID NO: 15205 - DNA, 51 bp, synthetic construct; identical to SEQ ID NO: 12491
  misc_feature 1..51: note = Description of Artificial Sequence: Synthetic oligonucleotide
  source 1..51: mol_type = other DNA

SEQ ID NO: 15206 - protein, 17 aa, synthetic construct
  REGION 1..17: note = Description of Artificial Sequence: Synthetic peptide
VIWYDENNKYYADSVKG

SEQ ID NO: 15207 - DNA, 51 bp, synthetic construct; identical to SEQ ID NO: 12491
  misc_feature 1..51: note = Description of Artificial Sequence: Synthetic oligonucleotide
  source 1..51: mol_type = other DNA

SEQ ID NO: 15208 - protein, 17 aa, synthetic construct
  REGION 1..17: note = Description of Artificial Sequence: Synthetic peptide
VIWYDENNKYYADSVKG

SEQ ID NO: 15209 - DNA, 48 bp, synthetic construct; identical to SEQ ID NO: 14133
  misc_feature 1..48: note = Description of Artificial Sequence: Synthetic oligonucleotide
  source 1..48: mol_type = other DNA

SEQ ID NO: 15210 - protein, 16 aa, synthetic construct
  REGION 1..16: note = Description of Artificial Sequence: Synthetic peptide
FIYYTGSTYYNPSLKS

SEQ ID NO: 15211 - DNA, 51 bp, synthetic construct; identical to SEQ ID NO: 12391
  misc_feature 1..51: note = Description of Artificial Sequence: Synthetic oligonucleotide
  source 1..51: mol_type = other DNA

SEQ ID NO: 15212 - protein, 17 aa, synthetic construct
  REGION 1..17: note = Description of Artificial Sequence: Synthetic peptide
VIWYDENNKYYVDSVKG

SEQ ID NO: 15213 - DNA, 51 bp, synthetic construct; identical to SEQ ID NO: 12159
  misc_feature 1..51: note = Description of Artificial Sequence: Synthetic oligonucleotide
  source 1..51: mol_type = other DNA

SEQ ID NO: 15214 - protein, 17 aa, synthetic construct
  REGION 1..17: note = Description of Artificial Sequence: Synthetic peptide
WMHPNSGNTGYAQKFRG

SEQ ID NO: 15215 - DNA, 51 bp, synthetic construct; identical to SEQ ID NO: 12161
  misc_feature 1..51: note = Description of Artificial Sequence: Synthetic oligonucleotide
  source 1..51: mol_type = other DNA

SEQ ID NO: 15216 - protein, 17 aa, synthetic construct
  REGION 1..17: note = Description of Artificial Sequence: Synthetic peptide
WMHPNSGNTGYAQKFQG

SEQ ID NO: 15217 - DNA, 51 bp, synthetic construct
  misc_feature 1..51: note = Description of Artificial Sequence: Synthetic oligonucleotide
  source 1..51: mol_type = other DNA
tggatgcacccaaacagtggtaacacaggctatgcacagaagttccagggc

SEQ ID NO: 15218 - protein, 17 aa, synthetic construct
  REGION 1..17: note = Description of Artificial Sequence: Synthetic peptide
WMHPNSGNTGYAQKFQG

SEQ ID NO: 15219 - DNA, 51 bp, synthetic construct; identical to SEQ ID NO: 12161
  misc_feature 1..51: note = Description of Artificial Sequence: Synthetic oligonucleotide
  source 1..51: mol_type = other DNA

SEQ ID NO: 15220 - protein, 17 aa, synthetic construct
  REGION 1..17: note = Description of Artificial Sequence: Synthetic peptide
WMHPNSGNTGYAQKFQG

SEQ ID NO: 15221 - DNA, 51 bp, synthetic construct
  misc_feature 1..51: note = Description of Artificial Sequence: Synthetic oligonucleotide
  source 1..51: mol_type = other DNA
attatatggtatgatggaggttataaatactatgcagactccgtgaagggc

SEQ ID NO: 15222 - protein, 17 aa, synthetic construct
  REGION 1..17: note = Description of Artificial Sequence: Synthetic peptide
IIWYDGGYKYYADSVKG

SEQ ID NO: 15223 - DNA, 51 bp, synthetic construct
  misc_feature 1..51: note = Description of Artificial Sequence: Synthetic oligonucleotide
  source 1..51: mol_type = other DNA
attatatggtatgatggaactaataaatactatacagactccgtgaagggc

SEQ ID NO: 15224 - protein, 17 aa, synthetic construct
  REGION 1..17: note = Description of Artificial Sequence: Synthetic peptide
IIWYDGTNKYYTDSVKG

SEQ ID NO: 15225 - DNA, 51 bp, synthetic construct; identical to SEQ ID NO: 12123
  misc_feature 1..51: note = Description of Artificial Sequence: Synthetic oligonucleotide
  source 1..51: mol_type = other DNA

SEQ ID NO: 15226 - protein, 17 aa, synthetic construct
  REGION 1..17: note = Description of Artificial Sequence: Synthetic peptide
VIWYDGSNKYYADSVKG

SEQ ID NO: 15227 - DNA, 51 bp, synthetic construct; identical to SEQ ID NO: 12161
  misc_feature 1..51: note = Description of Artificial Sequence: Synthetic oligonucleotide
  source 1..51: mol_type = other DNA

SEQ ID NO: 15228 - protein, 17 aa, synthetic construct
  REGION 1..17: note = Description of Artificial Sequence: Synthetic peptide
WMHPNSGNTGYAQKFQG

SEQ ID NO: 15229 - DNA, 51 bp, synthetic construct; identical to SEQ ID NO: 12161
  misc_feature 1..51: note = Description of Artificial Sequence: Synthetic oligonucleotide
  source 1..51: mol_type = other DNA

SEQ ID NO: 15230 - protein, 17 aa, synthetic construct
  REGION 1..17: note = Description of Artificial Sequence: Synthetic peptide
WMHPNSGNTGYAQKFQG

SEQ ID NO: 15231 - DNA, 51 bp, synthetic construct; identical to SEQ ID NO: 12127
  misc_feature 1..51: note = Description of Artificial Sequence: Synthetic oligonucleotide
  source 1..51: mol_type = other DNA

SEQ ID NO: 15232 - protein, 17 aa, synthetic construct
  REGION 1..17: note = Description of Artificial Sequence: Synthetic peptide
IIWYDGSNKYYADSVKG

SEQ ID NO: 15233 - DNA, 51 bp, synthetic construct; identical to SEQ ID NO: 12127
  misc_feature 1..51: note = Description of Artificial Sequence: Synthetic oligonucleotide
  source 1..51: mol_type = other DNA

SEQ ID NO: 15234 - protein, 17 aa, synthetic construct
  REGION 1..17: note = Description of Artificial Sequence: Synthetic peptide
IIWYDGSNKYYADSVKG

SEQ ID NO: 15235 - DNA, 51 bp, synthetic construct
  misc_feature 1..51: note = Description of Artificial Sequence: Synthetic oligonucleotide
  source 1..51: mol_type = other DNA
tggatcaacccttacagtggtgacacaaagtatgcacagaagtttcagggc

SEQ ID NO: 15236 - protein, 17 aa, synthetic construct
  REGION 1..17: note = Description of Artificial Sequence: Synthetic peptide
WINPYSGDTKYAQKFQG

SEQ ID NO: 15237 - DNA, 51 bp, synthetic construct; identical to SEQ ID NO: 12799
  misc_feature 1..51: note = Description of Artificial Sequence: Synthetic oligonucleotide
  source 1..51: mol_type = other DNA

SEQ ID NO: 15238 - protein, 17 aa, synthetic construct
  REGION 1..17: note = Description of Artificial Sequence: Synthetic peptide
VIWYEESNKYYTDSVKG

SEQ ID NO: 15239 - DNA, 51 bp, synthetic construct; identical to SEQ ID NO: 15235
  misc_feature 1..51: note = Description of Artificial Sequence: Synthetic oligonucleotide
  source 1..51: mol_type = other DNA

SEQ ID NO: 15240 - protein, 17 aa, synthetic construct
  REGION 1..17: note = Description of Artificial Sequence: Synthetic peptide
WINPYSGDTKYAQKFQG

SEQ ID NO: 15241 - DNA, 51 bp, synthetic construct
  misc_feature 1..51: note = Description of Artificial Sequence: Synthetic oligonucleotide
  source 1..51: mol_type = other DNA
tggatcaacccttacagtggtgacacaaactctgcacagaagtttcagggc

SEQ ID NO: 15242 - protein, 17 aa, synthetic construct
  REGION 1..17: note = Description of Artificial Sequence: Synthetic peptide
WINPYSGDTNSAQKFQG

SEQ ID NO: 15243 - DNA, 51 bp, synthetic construct
  misc_feature 1..51: note = Description of Artificial Sequence: Synthetic oligonucleotide
  source 1..51: mol_type = other DNA
tggatcaacccatacagtggtgacacaaactatgcacagaagtttcagggc

SEQ ID NO: 15244 - protein, 17 aa, synthetic construct
  REGION 1..17: note = Description of Artificial Sequence: Synthetic peptide
WINPYSGDTNYAQKFQG

SEQ ID NO: 15245 - DNA, 51 bp, synthetic construct; identical to SEQ ID NO: 12161
  misc_feature 1..51: note = Description of Artificial Sequence: Synthetic oligonucleotide
  source 1..51: mol_type = other DNA

SEQ ID NO: 15246 - protein, 17 aa, synthetic construct
  REGION 1..17: note = Description of Artificial Sequence: Synthetic peptide
WMHPNSGNTGYAQKFQG

SEQ ID NO: 15247 - DNA, 51 bp, synthetic construct; identical to SEQ ID NO: 15171
  misc_feature 1..51: note = Description of Artificial Sequence: Synthetic oligonucleotide
  source 1..51: mol_type = other DNA

SEQ ID NO: 15248 - protein, 17 aa, synthetic construct
  REGION 1..17: note = Description of Artificial Sequence: Synthetic peptide
WINPYSGDTNYAQKFQG

SEQ ID NO: 15249 - DNA, 51 bp, synthetic construct; identical to SEQ ID NO: 12123
  misc_feature 1..51: note = Description of Artificial Sequence: Synthetic oligonucleotide
  source 1..51: mol_type = other DNA

SEQ ID NO: 15250 - protein, 17 aa, synthetic construct
  REGION 1..17: note = Description of Artificial Sequence: Synthetic peptide
VIWYDGSNKYYADSVKG

SEQ ID NO: 15251 - DNA, 51 bp, synthetic construct; identical to SEQ ID NO: 12161
  misc_feature 1..51: note = Description of Artificial Sequence: Synthetic oligonucleotide
  source 1..51: mol_type = other DNA

SEQ ID NO: 15252 - protein, 17 aa, synthetic construct
  REGION 1..17: note = Description of Artificial Sequence: Synthetic peptide
WMHPNSGNTGYAQKFQG

SEQ ID NO: 15253 - DNA, 51 bp, synthetic construct; identical to SEQ ID NO: 15171
  misc_feature 1..51: note = Description of Artificial Sequence: Synthetic oligonucleotide
  source 1..51: mol_type = other DNA

SEQ ID NO: 15254 - protein, 17 aa, synthetic construct
  REGION 1..17: note = Description of Artificial Sequence: Synthetic peptide
WINPYSGDTNYAQKFQG

SEQ ID NO: 15255 - DNA, 51 bp, synthetic construct; identical to SEQ ID NO: 12175
  misc_feature 1..51: note = Description of Artificial Sequence: Synthetic oligonucleotide
  source 1..51: mol_type = other DNA

SEQ ID NO: 15256 - protein, 17 aa, synthetic construct
  REGION 1..17: note = Description of Artificial Sequence: Synthetic peptide
WINPYSGGTNYAQKFQG

SEQ ID NO: 15257 - DNA, 51 bp, synthetic construct; identical to SEQ ID NO: 15235
  misc_feature 1..51: note = Description of Artificial Sequence: Synthetic oligonucleotide
  source 1..51: mol_type = other DNA

SEQ ID NO: 15258 - protein, 17 aa, synthetic construct
  REGION 1..17: note = Description of Artificial Sequence: Synthetic peptide
WINPYSGDTKYAQKFQG

SEQ ID NO: 15259 - DNA, 51 bp, synthetic construct
  misc_feature 1..51: note = Description of Artificial Sequence: Synthetic oligonucleotide
  source 1..51: mol_type = other DNA
gttatatggtatgttggaagtaatcaatactatgcagactccgtgaagggc

SEQ ID NO: 15260 - protein, 17 aa, synthetic construct
  REGION 1..17: note = Description of Artificial Sequence: Synthetic peptide
VIWYVGSNQYYADSVKG

SEQ ID NO: 15261 - DNA, 51 bp, synthetic construct
  misc_feature 1..51: note = Description of Artificial Sequence: Synthetic oligonucleotide
  source 1..51: mol_type = other DNA
gttattagtggtagaggtggtagctcattctacgcagactccgtgaagggc

SEQ ID NO: 15262 - protein, 17 aa, synthetic construct
  REGION 1..17: note = Description of Artificial Sequence: Synthetic peptide
VISGRGGSSFYADSVKG

SEQ ID NO: 15263 - DNA, 51 bp, synthetic construct; identical to SEQ ID NO: 13461
  misc_feature 1..51: note = Description of Artificial Sequence: Synthetic oligonucleotide
  source 1..51: mol_type = other DNA

SEQ ID NO: 15264 - protein, 17 aa, synthetic construct
  REGION 1..17: note = Description of Artificial Sequence: Synthetic peptide
VIWYEESNKYYADSVKG

SEQ ID NO: 15265 - DNA, 51 bp, synthetic construct; identical to SEQ ID NO: 12161
  misc_feature 1..51: note = Description of Artificial Sequence: Synthetic oligonucleotide
  source 1..51: mol_type = other DNA

SEQ ID NO: 15266 - protein, 17 aa, synthetic construct
  REGION 1..17: note = Description of Artificial Sequence: Synthetic peptide
WMHPNSGNTGYAQKFQG

SEQ ID NO: 15267 - DNA, 51 bp, synthetic construct; identical to SEQ ID NO: 13755
  misc_feature 1..51: note = Description of Artificial Sequence: Synthetic oligonucleotide
  source 1..51: mol_type = other DNA

SEQ ID NO: 15268 - protein, 17 aa, synthetic construct
  REGION 1..17: note = Description of Artificial Sequence: Synthetic peptide
WMHPNSGNTGYAQKFQG

SEQ ID NO: 15269 - DNA, 51 bp, synthetic construct; identical to SEQ ID NO: 15171
  misc_feature 1..51: note = Description of Artificial Sequence: Synthetic oligonucleotide
  source 1..51: mol_type = other DNA

SEQ ID NO: 15270 - protein, 17 aa, synthetic construct
  REGION 1..17: note = Description of Artificial Sequence: Synthetic peptide
WINPYSGDTNYAQKFQG

SEQ ID NO: 15271 - DNA, 51 bp, synthetic construct
  misc_feature 1..51: note = Description of Artificial Sequence: Synthetic oligonucleotide
  source 1..51: mol_type = other DNA
tggatgtaccctaacagtggtaacacaggctatgcacagaagttccagggc

SEQ ID NO: 15272 - protein, 17 aa, synthetic construct
  REGION 1..17: note = Description of Artificial Sequence: Synthetic peptide
WMYPNSGNTGYAQKFQG

SEQ ID NO: 15273 - DNA, 51 bp, synthetic construct; identical to SEQ ID NO: 12161
  misc_feature 1..51: note = Description of Artificial Sequence: Synthetic oligonucleotide
  source 1..51: mol_type = other DNA

SEQ ID NO: 15274 - protein, 17 aa, synthetic construct
  REGION 1..17: note = Description of Artificial Sequence: Synthetic peptide
WMHPNSGNTGYAQKFQG

SEQ ID NO: 15275 - DNA, 51 bp, synthetic construct
  misc_feature 1..51: note = Description of Artificial Sequence: Synthetic oligonucleotide
  source 1..51: mol_type = other DNA
tccattagtagtagtattaattacatgtactacgcagactcagtgaagggc

SEQ ID NO: 15276 - protein, 17 aa, synthetic construct
  REGION 1..17: note = Description of Artificial Sequence: Synthetic peptide
SISSSINYMYYADSVKG

SEQ ID NO: 15277 - DNA, 51 bp, synthetic construct
  misc_feature 1..51: note = Description of Artificial Sequence: Synthetic oligonucleotide
  source 1..51: mol_type = other DNA
gttatatggtatattggaagtaatcaatactatgcggactccgtgaagggc

SEQ ID NO: 15278 - protein, 17 aa, synthetic construct
  REGION 1..17: note = Description of Artificial Sequence: Synthetic peptide
VIWYIGSNQYYADSVKG

SEQ ID NO: 15279 - DNA, 51 bp, synthetic construct
  misc_feature 1..51: note = Description of Artificial Sequence: Synthetic oligonucleotide
  source 1..51: mol_type = other DNA
gttattagtggtggtggtagtagcacatactacgcagactccgtgaagggc

SEQ ID NO: 15280 - protein, 17 aa, synthetic construct
  REGION 1..17: note = Description of Artificial Sequence: Synthetic peptide
VISGGGSSTYYADSVKG

SEQ ID NO: 15281 - DNA, 51 bp, synthetic construct; identical to SEQ ID NO: 15279
  misc_feature 1..51: note = Description of Artificial Sequence: Synthetic oligonucleotide
  source 1..51: mol_type = other DNA

SEQ ID NO: 15282 - protein, 17 aa, synthetic construct
  REGION 1..17: note = Description of Artificial Sequence: Synthetic peptide
VISGGGSSTYYADSVKG

SEQ ID NO: 15283 - DNA, 51 bp, synthetic construct; identical to SEQ ID NO: 15279
  misc_feature 1..51: note = Description of Artificial Sequence: Synthetic oligonucleotide
  source 1..51: mol_type = other DNA

SEQ ID NO: 15284 - protein, 17 aa, synthetic construct
  REGION 1..17: note = Description of Artificial Sequence: Synthetic peptide
VISGGGSSTYYADSVKG

SEQ ID NO: 15285 - DNA, 51 bp, synthetic construct
  misc_feature 1..51: note = Description of Artificial Sequence: Synthetic oligonucleotide
  source 1..51: mol_type = other DNA
tacattagtagaagtagtaataccaaatactatgtagactctgtgaagggc

SEQ ID NO: 15286 - protein, 17 aa, synthetic construct
  REGION 1..17: note = Description of Artificial Sequence: Synthetic peptide
YISRSSNTKYYVDSVKG

SEQ ID NO: 15287 - DNA, 51 bp, synthetic construct
  misc_feature 1..51: note = Description of Artificial Sequence: Synthetic oligonucleotide
  source 1..51: mol_type = other DNA
tggatgaaccctaatagtggtaacacaggctatgcacagaagttccagggc

SEQ ID NO: 15288 - protein, 17 aa, synthetic construct
  REGION 1..17: note = Description of Artificial Sequence: Synthetic peptide
WMNPNSGNTGYAQKFQG

SEQ ID NO: 15289 - DNA, 51 bp, synthetic construct
  misc_feature 1..51: note = Description of Artificial Sequence: Synthetic oligonucleotide
  source 1..51: mol_type = other DNA
gttattagtggtggtggtagtagtacatactacgcagactccgtgaagggc

SEQ ID NO: 15290 - protein, 17 aa, synthetic construct
  REGION 1..17: note = Description of Artificial Sequence: Synthetic peptide
VISGGGSSTYYADSVKG

SEQ ID NO: 15291 - DNA, 51 bp, synthetic construct
  misc_feature 1..51: note = Description of Artificial Sequence: Synthetic oligonucleotide
  source 1..51: mol_type = other DNA
tggatcaaccctaacagtggtgacacaaactatgcacagaagtttcagggc

SEQ ID NO: 15292 - protein, 17 aa, synthetic construct
  REGION 1..17: note = Description of Artificial Sequence: Synthetic peptide
WINPNSGDTNYAQKFQG

SEQ ID NO: 15293 - DNA, 51 bp, synthetic construct; identical to SEQ ID NO: 12123
  misc_feature 1..51: note = Description of Artificial Sequence: Synthetic oligonucleotide
  source 1..51: mol_type = other DNA

SEQ ID NO: 15294 - protein, 17 aa, synthetic construct
  REGION 1..17: note = Description of Artificial Sequence: Synthetic peptide
VIWYDGSNKYYADSVKG

SEQ ID NO: 15295 - DNA, 51 bp, synthetic construct
  misc_feature 1..51: note = Description of Artificial Sequence: Synthetic oligonucleotide
  source 1..51: mol_type = other DNA
gatatatggtttgatggcagtaataaatactatgtagactccgtgaaggac

SEQ ID NO: 15296 - protein, 17 aa, synthetic construct
  REGION 1..17: note = Description of Artificial Sequence: Synthetic peptide
DIWFDGSNKYYVDSVKD

SEQ ID NO: 15297 - DNA, 51 bp, synthetic construct
  misc_feature 1..51: note = Description of Artificial Sequence: Synthetic oligonucleotide
  source 1..51: mol_type = other DNA
gttatatggtatggtggaagtgataaagactatgcagactccgtgaagggc

SEQ ID NO: 15298 - protein, 17 aa, synthetic construct
  REGION 1..17: note = Description of Artificial Sequence: Synthetic peptide
VIWYGGSDKDYADSVKG

SEQ ID NO: 15299 - DNA, 51 bp, synthetic construct; identical to SEQ ID NO: 15297
  misc_feature 1..51: note = Description of Artificial Sequence: Synthetic oligonucleotide
  source 1..51: mol_type = other DNA

SEQ ID NO: 15300 - protein, 17 aa, synthetic construct
  REGION 1..17: note = Description of Artificial Sequence: Synthetic peptide
VIWYGGSDKDYADSVKG

SEQ ID NO: 15301 - DNA, 51 bp, synthetic construct; identical to SEQ ID NO: 15289
  misc_feature 1..51: note = Description of Artificial Sequence: Synthetic oligonucleotide
  source 1..51: mol_type = other DNA

SEQ ID NO: 15302 - protein, 17 aa, synthetic construct
  REGION 1..17: note = Description of Artificial Sequence: Synthetic peptide
VISGGGSSTYYADSVKG

SEQ ID NO: 15303 - DNA, 51 bp, synthetic construct; identical to SEQ ID NO: 15279
  misc_feature 1..51: note = Description of Artificial Sequence: Synthetic oligonucleotide
  source 1..51: mol_type = other DNA

SEQ ID NO: 15304 - protein, 17 aa, synthetic construct
  REGION 1..17: note = Description of Artificial Sequence: Synthetic peptide
VISGGGSSTYYADSVKG

SEQ ID NO: 15305 - DNA, 48 bp, synthetic construct; identical to SEQ ID NO: 12147
  misc_feature 1..48: note = Description of Artificial Sequence: Synthetic oligonucleotide
  source 1..48: mol_type = other DNA

SEQ ID NO: 15306 - protein, 16 aa, synthetic construct
  REGION 1..16: note = Description of Artificial Sequence: Synthetic peptide
YIYYSGSTYYNPSLKS

SEQ ID NO: 15307 - DNA, 51 bp, synthetic construct
  misc_feature 1..51: note = Description of Artificial Sequence: Synthetic oligonucleotide
  source 1..51: mol_type = other DNA
tacattagtagaagtagtaataccaaatactacgcagactctgtgaggggc

SEQ ID NO: 15308 - protein, 17 aa, synthetic construct
  REGION 1..17: note = Description of Artificial Sequence: Synthetic peptide
YISRSSNTKYYADSVRG

SEQ ID NO: 15309 - DNA, 51 bp, synthetic construct
  misc_feature 1..51: note = Description of Artificial Sequence: Synthetic oligonucleotide
  source 1..51: mol_type = other DNA
tacattagtagaagtagtaataccaaacactacgcagactctgtgaagggc

SEQ ID NO: 15310 - protein, 17 aa, synthetic construct
  REGION 1..17: note = Description of Artificial Sequence: Synthetic peptide
YISRSSNTKHYADSVKG

SEQ ID NO: 15311 - DNA, 51 bp, synthetic construct; identical to SEQ ID NO: 15279
  misc_feature 1..51: note = Description of Artificial Sequence: Synthetic oligonucleotide
  source 1..51: mol_type = other DNA

SEQ ID NO: 15312 - protein, 17 aa, synthetic construct
  REGION 1..17: note = Description of Artificial Sequence: Synthetic peptide
VISGGGSSTYYADSVKG

SEQ ID NO: 15313 - DNA, 51 bp, synthetic construct; identical to SEQ ID NO: 12123
  misc_feature 1..51: note = Description of Artificial Sequence: Synthetic oligonucleotide
  source 1..51: mol_type = other DNA

SEQ ID NO: 15314 - protein, 17 aa, synthetic construct
  REGION 1..17: note = Description of Artificial Sequence: Synthetic peptide
VIWYDGSNKYYADSVKG

SEQ ID NO: 15315 - DNA, 51 bp, synthetic construct; identical to SEQ ID NO: 15297
  misc_feature 1..51: note = Description of Artificial Sequence: Synthetic oligonucleotide
  source 1..51: mol_type = other DNA

SEQ ID NO: 15316 - protein, 17 aa, synthetic construct
  REGION 1..17: note = Description of Artificial Sequence: Synthetic peptide
VIWYGGSDKDYADSVKG

SEQ ID NO: 15317 - DNA, 51 bp, synthetic construct
  misc_feature 1..51: note = Description of Artificial Sequence: Synthetic oligonucleotide
  source 1..51: mol_type = other DNA
gttattagtggtggtggtagtagtgcatactacgcagactccgtgaagggc

SEQ ID NO: 15318 - protein, 17 aa, synthetic construct
  REGION 1..17: note = Description of Artificial Sequence: Synthetic peptide
VISGGGSSAYYADSVKG

SEQ ID NO: 15319 - DNA, 51 bp, synthetic construct; identical to SEQ ID NO: 15309
  misc_feature 1..51: note = Description of Artificial Sequence: Synthetic oligonucleotide
  source 1..51: mol_type = other DNA

SEQ ID NO: 15320 - protein, 17 aa, synthetic construct
  REGION 1..17: note = Description of Artificial Sequence: Synthetic peptide
YISRSSNTKHYADSVKG

SEQ ID NO: 15321 - DNA, 51 bp, synthetic construct
  misc_feature 1..51: note = Description of Artificial Sequence: Synthetic oligonucleotide
  source 1..51: mol_type = other DNA
aacataaagcaagatggaagtgagaaatactatgtggactctgtgaagggc

SEQ ID NO: 15322 - protein, 17 aa, synthetic construct
  REGION 1..17: note = Description of Artificial Sequence: Synthetic peptide
NIKQDGSEKYYVDSVKG

SEQ ID NO: 15323 - DNA, 51 bp, synthetic construct; identical to SEQ ID NO: 15279
  misc_feature 1..51: note = Description of Artificial Sequence: Synthetic oligonucleotide
  source 1..51: mol_type = other DNA

SEQ ID NO: 15324 - protein, 17 aa, synthetic construct
  REGION 1..17: note = Description of Artificial Sequence: Synthetic peptide
VISGGGSSTYYADSVKG

SEQ ID NO: 15325 - DNA, 51 bp, synthetic construct
  misc_feature 1..51: note = Description of Artificial Sequence: Synthetic oligonucleotide
  source 1..51: mol_type = other DNA
gccattagtagtactggtagttacatatattacgcagactcagtgaagggc

SEQ ID NO: 15326 - protein, 17 aa, synthetic construct
  REGION 1..17: note = Description of Artificial Sequence: Synthetic peptide
AISSTGSYIYYADSVKG

SEQ ID NO: 15327 - DNA, 51 bp, synthetic construct
  misc_feature 1..51: note = Description of Artificial Sequence: Synthetic oligonucleotide
  source 1..51: mol_type = other DNA
gttataagtggaggtggtagtagcacatattacgcagactccgtgaagggc

SEQ ID NO: 15328 - protein, 17 aa, synthetic construct
  REGION 1..17: note = Description of Artificial Sequence: Synthetic peptide
VISGGGSSTYYADSVKG

SEQ ID NO: 15329 - DNA, 51 bp, synthetic construct; identical to SEQ ID NO: 12123
  misc_feature 1..51: note = Description of Artificial Sequence: Synthetic oligonucleotide
  source 1..51: mol_type = other DNA

SEQ ID NO: 15330 - protein, 17 aa, synthetic construct
  REGION 1..17: note = Description of Artificial Sequence: Synthetic peptide
VIWYDGSNKYYADSVKG

SEQ ID NO: 15331 - DNA, 51 bp, synthetic construct
  misc_feature 1..51: note = Description of Artificial Sequence: Synthetic oligonucleotide
  source 1..51: mol_type = other DNA
gttatatggtatggtggaagtaataaagactatgcagactccgtgaagggc

SEQ ID NO: 15332 - protein, 17 aa, synthetic construct
  REGION 1..17: note = Description of Artificial Sequence: Synthetic peptide
VIWYGGSNKDYADSVKG

SEQ ID NO: 15333 - DNA, 51 bp, synthetic construct; identical to SEQ ID NO: 15279
  misc_feature 1..51: note = Description of Artificial Sequence: Synthetic oligonucleotide
  source 1..51: mol_type = other DNA

SEQ ID NO: 15334 - protein, 17 aa, synthetic construct
  REGION 1..17: note = Description of Artificial Sequence: Synthetic peptide
VISGGGSSTYYADSVKG

SEQ ID NO: 15335 - DNA, 51 bp, synthetic construct; identical to SEQ ID NO: 15309
  misc_feature 1..51: note = Description of Artificial Sequence: Synthetic oligonucleotide
  source 1..51: mol_type = other DNA

SEQ ID NO: 15336 - protein, 17 aa, synthetic construct
  REGION 1..17: note = Description of Artificial Sequence: Synthetic peptide
YISRSSNTKHYADSVKG

SEQ ID NO: 15337 - DNA, 51 bp, synthetic construct
  misc_feature 1..51: note = Description of Artificial Sequence: Synthetic oligonucleotide
  source 1..51: mol_type = other DNA
attattagtggtggtggtagtagcacatactacgcagactccgtgaagggc

SEQ ID NO: 15338 - protein, 17 aa, synthetic construct
  REGION 1..17: note = Description of Artificial Sequence: Synthetic peptide
IISGGGSSTYYADSVKG

SEQ ID NO: 15339 - DNA, 51 bp, synthetic construct
  misc_feature 1..51: note = Description of Artificial Sequence: Synthetic oligonucleotide
  source 1..51: mol_type = other DNA
gttatatggtatggtggaagtaatacagactatgcagactccgtgaagggc

SEQ ID NO: 15340 - protein, 17 aa, synthetic construct
  REGION 1..17: note = Description of Artificial Sequence: Synthetic peptide
VIWYGGSNTDYADSVKG

SEQ ID NO: 15341 - DNA, 51 bp, synthetic construct; identical to SEQ ID NO: 15279
  misc_feature 1..51: note = Description of Artificial Sequence: Synthetic oligonucleotide
  source 1..51: mol_type = other DNA

SEQ ID NO: 15342 - protein, 17 aa, synthetic construct
  REGION 1..17: note = Description of Artificial Sequence: Synthetic peptide
VISGGGSSTYYADSVKG

SEQ ID NO: 15343 - DNA, 51 bp, synthetic construct; identical to SEQ ID NO: 12693
  misc_feature 1..51: note = Description of Artificial Sequence: Synthetic oligonucleotide
  source 1..51: mol_type = other DNA

SEQ ID NO: 15344 - protein, 17 aa, synthetic construct
  REGION 1..17: note = Description of Artificial Sequence: Synthetic peptide
LIWYDGSNKYYADSVKG

SEQ ID NO: 15345 - DNA, 51 bp, synthetic construct; identical to SEQ ID NO: 15279
  misc_feature 1..51: note = Description of Artificial Sequence: Synthetic oligonucleotide
  source 1..51: mol_type = other DNA

SEQ ID NO: 15346 - protein, 17 aa, synthetic construct
  REGION 1..17: note = Description of Artificial Sequence: Synthetic peptide
VISGGGSSTYYADSVKG

SEQ ID NO: 15347 - DNA, 51 bp, synthetic construct; identical to SEQ ID NO: 15279
  misc_feature 1..51: note = Description of Artificial Sequence: Synthetic oligonucleotide
  source 1..51: mol_type = other DNA

SEQ ID NO: 15348 - protein, 17 aa, synthetic construct
  REGION 1..17: note = Description of Artificial Sequence: Synthetic peptide
VISGGGSSTYYADSVKG

SEQ ID NO: 15349 - DNA, 51 bp, synthetic construct; identical to SEQ ID NO: 12693
  misc_feature 1..51: note = Description of Artificial Sequence: Synthetic oligonucleotide
  source 1..51: mol_type = other DNA

SEQ ID NO: 15350 - protein, 17 aa, synthetic construct
  REGION 1..17: note = Description of Artificial Sequence: Synthetic peptide
LIWYDGSNKYYADSVKG

SEQ ID NO: 15351 - DNA, 51 bp, synthetic construct; identical to SEQ ID NO: 15279
  misc_feature 1..51: note = Description of Artificial Sequence: Synthetic oligonucleotide
  source 1..51: mol_type = other DNA

SEQ ID NO: 15352 - protein, 17 aa, synthetic construct
  REGION 1..17: note = Description of Artificial Sequence: Synthetic peptide
VISGGGSSTYYADSVKG

SEQ ID NO: 15353 - DNA, 51 bp, synthetic construct; identical to SEQ ID NO: 15279
  misc_feature 1..51: note = Description of Artificial Sequence: Synthetic oligonucleotide
  source 1..51: mol_type = other DNA

SEQ ID NO: 15354 - protein, 17 aa, synthetic construct
  REGION 1..17: note = Description of Artificial Sequence: Synthetic peptide
VISGGGSSTYYADSVKG

SEQ ID NO: 15355 - DNA, 51 bp, synthetic construct; identical to SEQ ID NO: 12123
  misc_feature 1..51: note = Description of Artificial Sequence: Synthetic oligonucleotide
  source 1..51: mol_type = other DNA

SEQ ID NO: 15356 - protein, 17 aa, synthetic construct
  REGION 1..17: note = Description of Artificial Sequence: Synthetic peptide
VIWYDGSNKYYADSVKG

SEQ ID NO: 15357 - DNA, 51 bp, synthetic construct; identical to SEQ ID NO: 12693
  misc_feature 1..51: note = Description of Artificial Sequence: Synthetic oligonucleotide
  source 1..51: mol_type = other DNA

SEQ ID NO: 15358 - protein, 17 aa, synthetic construct
  REGION 1..17: note = Description of Artificial Sequence: Synthetic peptide
LIWYDGSNKYYADSVKG

SEQ ID NO: 15359 - DNA, 51 bp, synthetic construct
  misc_feature 1..51: note = Description of Artificial Sequence: Synthetic oligonucleotide
  source 1..51: mol_type = other DNA
gttatatggtttgatggcagtaataaatactatgttgactccgtgaaggac

SEQ ID NO: 15360 - protein, 17 aa, synthetic construct
  REGION 1..17: note = Description of Artificial Sequence: Synthetic peptide
VIWFDGSNKYYVDSVKD

SEQ ID NO: 15361 - DNA, 51 bp, synthetic construct; identical to SEQ ID NO: 15331
  misc_feature 1..51: note = Description of Artificial Sequence: Synthetic oligonucleotide
  source 1..51: mol_type = other DNA

SEQ ID NO: 15362 - protein, 17 aa, synthetic construct
  REGION 1..17: note = Description of Artificial Sequence: Synthetic peptide
VIWYGGSNKDYADSVKG

SEQ ID NO: 15363 - DNA, 51 bp, synthetic construct
  misc_feature 1..51: note = Description of Artificial Sequence: Synthetic oligonucleotide
  source 1..51: mol_type = other DNA
gttgtatggtatggtggaaataataaagactatgcagactccgtgaagggc

SEQ ID NO: 15364 - protein, 17 aa, synthetic construct
  REGION 1..17: note = Description of Artificial Sequence: Synthetic peptide
VVWYGGNNKDYADSVKG

SEQ ID NO: 15365 - DNA, 51 bp, synthetic construct; identical to SEQ ID NO: 15279
  misc_feature 1..51: note = Description of Artificial Sequence: Synthetic oligonucleotide
  source 1..51: mol_type = other DNA

SEQ ID NO: 15366 - protein, 17 aa, synthetic construct
  REGION 1..17: note = Description of Artificial Sequence: Synthetic peptide
VISGGGSSTYYADSVKG

SEQ ID NO: 15367 - DNA, 51 bp, synthetic construct; identical to SEQ ID NO: 12123
  misc_feature 1..51: note = Description of Artificial Sequence: Synthetic oligonucleotide
  source 1..51: mol_type = other DNA

SEQ ID NO: 15368 - protein, 17 aa, synthetic construct
  REGION 1..17: note = Description of Artificial Sequence: Synthetic peptide
VIWYDGSNKYYADSVKG

SEQ ID NO: 15369 - DNA, 51 bp, synthetic construct; identical to SEQ ID NO: 15279
  misc_feature 1..51: note = Description of Artificial Sequence: Synthetic oligonucleotide
  source 1..51: mol_type = other DNA

SEQ ID NO: 15370 - protein, 17 aa, synthetic construct
  REGION 1..17: note = Description of Artificial Sequence: Synthetic peptide
VISGGGSSTYYADSVKG

SEQ ID NO: 15371 - DNA, 51 bp, synthetic construct
  misc_feature 1..51: note = Description of Artificial Sequence: Synthetic oligonucleotide
  source 1..51: mol_type = other DNA
gttatatggtatggtggaagtaataaagactatgcagactctgtgaagggc

SEQ ID NO: 15372 - protein, 17 aa, synthetic construct
  REGION 1..17: note = Description of Artificial Sequence: Synthetic peptide
VIWYGGSNKDYADSVKG

SEQ ID NO: 15373 - DNA, 48 bp, synthetic construct
  misc_feature 1..48: note = Description of Artificial Sequence: Synthetic oligonucleotide
  source 1..48: mol_type = other DNA
tacatctattatagtgggagcacctactacaacccgtccctcaagagt

SEQ ID NO: 15374 - protein, 16 aa, synthetic construct
  REGION 1..16: note = Description of Artificial Sequence: Synthetic peptide
YIYYSGSTYYNPSLKS

SEQ ID NO: 15375 - DNA, 51 bp, synthetic construct
  misc_feature 1..51: note = Description of Artificial Sequence: Synthetic oligonucleotide
  source 1..51: mol_type = other DNA
ctcatctatcctggtgcctctgataccagatacagcccgtccttccaaggc

SEQ ID NO: 15376 - protein, 17 aa, synthetic construct
  REGION 1..17: note = Description of Artificial Sequence: Synthetic peptide
LIYPGASDTRYSPSFQG

SEQ ID NO: 15377 - DNA, 51 bp, synthetic construct; identical to SEQ ID NO: 12339
  misc_feature 1..51: note = Description of Artificial Sequence: Synthetic oligonucleotide
  source 1..51: mol_type = other DNA

SEQ ID NO: 15378 - protein, 17 aa, synthetic construct
  REGION 1..17: note = Description of Artificial Sequence: Synthetic peptide
VISYDGSNKYYADSVKG

SEQ ID NO: 15379 - DNA, 51 bp, synthetic construct
  misc_feature 1..51: note = Description of Artificial Sequence: Synthetic oligonucleotide
  source 1..51: mol_type = other DNA
cttatacggtatgatggaagcgataaaaactatgcagactccgtgaagggc

SEQ ID NO: 15380 - protein, 17 aa, synthetic construct
  REGION 1..17: note = Description of Artificial Sequence: Synthetic peptide
LIRYDGSDKNYADSVKG

SEQ ID NO: 15381 - DNA, 51 bp, synthetic construct; identical to SEQ ID NO: 15279
  misc_feature 1..51: note = Description of Artificial Sequence: Synthetic oligonucleotide
  source 1..51: mol_type = other DNA

SEQ ID NO: 15382 - protein, 17 aa, synthetic construct
  REGION 1..17: note = Description of Artificial Sequence: Synthetic peptide
VISGGGSSTYYADSVKG

SEQ ID NO: 15383 - DNA, 51 bp, synthetic construct; identical to SEQ ID NO: 12123
  misc_feature 1..51: note = Description of Artificial Sequence: Synthetic oligonucleotide
  source 1..51: mol_type = other DNA

SEQ ID NO: 15384 - protein, 17 aa, synthetic construct
  REGION 1..17: note = Description of Artificial Sequence: Synthetic peptide
VIWYDGSNKYYADSVKG

SEQ ID NO: 15385 - DNA, 51 bp, synthetic construct
  misc_feature 1..51: note = Description of Artificial Sequence: Synthetic oligonucleotide
  source 1..51: mol_type = other DNA
tacattagtagaagtagtaataccaaatactacgcagactctgtgaagggc

SEQ ID NO: 15386 - protein, 17 aa, synthetic construct
  REGION 1..17: note = Description of Artificial Sequence: Synthetic peptide
YISRSSNTKYYADSVKG

SEQ ID NO: 15387 - DNA, 51 bp, synthetic construct; identical to SEQ ID NO: 13327
  misc_feature 1..51: note = Description of Artificial Sequence: Synthetic oligonucleotide
  source 1..51: mol_type = other DNA

SEQ ID NO: 15388 - protein, 17 aa, synthetic construct
  REGION 1..17: note = Description of Artificial Sequence: Synthetic peptide
VIWYDGSSKYYADSVKG

SEQ ID NO: 15389 - DNA, 51 bp, synthetic construct; identical to SEQ ID NO: 12123
  misc_feature 1..51: note = Description of Artificial Sequence: Synthetic oligonucleotide
  source 1..51: mol_type = other DNA

SEQ ID NO: 15390 - protein, 17 aa, synthetic construct
  REGION 1..17: note = Description of Artificial Sequence: Synthetic peptide
VIWYDGSNKYYADSVKG

SEQ ID NO: 15391 - DNA, 51 bp, synthetic construct; identical to SEQ ID NO: 12123
  misc_feature 1..51: note = Description of Artificial Sequence: Synthetic oligonucleotide
  source 1..51: mol_type = other DNA

SEQ ID NO: 15392 - protein, 17 aa, synthetic construct
  REGION 1..17: note = Description of Artificial Sequence: Synthetic peptide
VIWYDGSNKYYADSVKG

SEQ ID NO: 15393 - DNA, 51 bp, synthetic construct; identical to SEQ ID NO: 12123
  misc_feature 1..51: note = Description of Artificial Sequence: Synthetic oligonucleotide
  source 1..51: mol_type = other DNA

SEQ ID NO: 15394 - protein, 17 aa, synthetic construct
  REGION 1..17: note = Description of Artificial Sequence: Synthetic peptide
VIWYDGSNKYYADSVKG

SEQ ID NO: 15395 - DNA, 51 bp, synthetic construct; identical to SEQ ID NO: 12123
  misc_feature 1..51: note = Description of Artificial Sequence: Synthetic oligonucleotide
  source 1..51: mol_type = other DNA

SEQ ID NO: 15396 - protein, 17 aa, synthetic construct
  REGION 1..17: note = Description of Artificial Sequence: Synthetic peptide
VIWYDGSNKYYADSVKG

SEQ ID NO: 15397 - DNA, 51 bp, synthetic construct; identical to SEQ ID NO: 12133
  misc_feature 1..51: note = Description of Artificial Sequence: Synthetic oligonucleotide
  source 1..51: mol_type = other DNA

SEQ ID NO: 15398 - protein, 17 aa, synthetic construct
  REGION 1..17: note = Description of Artificial Sequence: Synthetic peptide
VIWYDGSNKYYVDSVKG

SEQ ID NO: 15399 - DNA, 48 bp, synthetic construct
  misc_feature 1..48: note = Description of Artificial Sequence: Synthetic oligonucleotide
  source 1..48: mol_type = other DNA
tacatctattacagtgggagcccctactacaacccgtccctcaagagt

SEQ ID NO: 15400 - protein, 16 aa, synthetic construct
  REGION 1..16: note = Description of Artificial Sequence: Synthetic peptide
YIYYSGSPYYNPSLKS

SEQ ID NO: 15401 - DNA, 48 bp, synthetic construct
  misc_feature 1..48: note = Description of Artificial Sequence: Synthetic oligonucleotide
  source 1..48: mol_type = other DNA
tacatctattacagtgggagcccctactacaatccgtccctcaagagt

SEQ ID NO: 15402 - protein, 16 aa, synthetic construct
  REGION 1..16: note = Description of Artificial Sequence: Synthetic peptide
YIYYSGSPYYNPSLKS

SEQ ID NO: 15403 - DNA, 51 bp, synthetic construct; identical to SEQ ID NO: 12123
  misc_feature 1..51: note = Description of Artificial Sequence: Synthetic oligonucleotide
  source 1..51: mol_type = other DNA

SEQ ID NO: 15404 - protein, 17 aa, synthetic construct
  REGION 1..17: note = Description of Artificial Sequence: Synthetic peptide
VIWYDGSNKYYADSVKG

SEQ ID NO: 15405 - DNA, 51 bp, synthetic construct; identical to SEQ ID NO: 12123
  misc_feature 1..51: note = Description of Artificial Sequence: Synthetic oligonucleotide
  source 1..51: mol_type = other DNA

SEQ ID NO: 15406 - protein, 17 aa, synthetic construct
  REGION 1..17: note = Description of Artificial Sequence: Synthetic peptide
VIWYDGSNKYYADSVKG

SEQ ID NO: 15407 - DNA, 51 bp, synthetic construct; identical to SEQ ID NO: 12123
  misc_feature 1..51: note = Description of Artificial Sequence: Synthetic oligonucleotide
  source 1..51: mol_type = other DNA

SEQ ID NO: 15408 - protein, 17 aa, synthetic construct
  REGION 1..17: note = Description of Artificial Sequence: Synthetic peptide
VIWYDGSNKYYADSVKG

SEQ ID NO: 15409 - DNA, 51 bp, synthetic construct
  misc_feature 1..51: note = Description of Artificial Sequence: Synthetic oligonucleotide
  source 1..51: mol_type = other DNA
tacattggtagtagtggcagtatcatattctacgcagactctgtgaagggc

SEQ ID NO: 15410 - protein, 17 aa, synthetic construct
  REGION 1..17: note = Description of Artificial Sequence: Synthetic peptide
YIGSSGSIIFYADSVKG

SEQ ID NO: 15411 - DNA, 51 bp, synthetic construct; identical to SEQ ID NO: 12127
  misc_feature 1..51: note = Description of Artificial Sequence: Synthetic oligonucleotide
  source 1..51: mol_type = other DNA

SEQ ID NO: 15412 - protein, 17 aa, synthetic construct
  REGION 1..17: note = Description of Artificial Sequence: Synthetic peptide
IIWYDGSNKYYADSVKG

SEQ ID NO: 15413 - DNA, 51 bp, synthetic construct; identical to SEQ ID NO: 12575
  misc_feature 1..51: note = Description of Artificial Sequence: Synthetic oligonucleotide
  source 1..51: mol_type = other DNA

SEQ ID NO: 15414 - protein, 17 aa, synthetic construct
  REGION 1..17: note = Description of Artificial Sequence: Synthetic peptide
VIWYDGSNKYYADSVKG

SEQ ID NO: 15415 - DNA, 51 bp, synthetic construct
  misc_feature 1..51: note = Description of Artificial Sequence: Synthetic oligonucleotide
  source 1..51: mol_type = other DNA
attatatggtatgatggaaataataaatactatgcagactccgtgaagggc

SEQ ID NO: 15416 - protein, 17 aa, synthetic construct
  REGION 1..17: note = Description of Artificial Sequence: Synthetic peptide
IIWYDGNNKYYADSVKG

SEQ ID NO: 15417 - DNA, 51 bp, synthetic construct; identical to SEQ ID NO: 12127
  misc_feature 1..51: note = Description of Artificial Sequence: Synthetic oligonucleotide
  source 1..51: mol_type = other DNA

SEQ ID NO: 15418 - protein, 17 aa, synthetic construct
  REGION 1..17: note = Description of Artificial Sequence: Synthetic peptide
IIWYDGSNKYYADSVKG

SEQ ID NO: 15419 - DNA, 51 bp, synthetic construct; identical to SEQ ID NO: 15409
  misc_feature 1..51: note = Description of Artificial Sequence: Synthetic oligonucleotide
  source 1..51: mol_type = other DNA

SEQ ID NO: 15420 - protein, 17 aa, synthetic construct
  REGION 1..17: note = Description of Artificial Sequence: Synthetic peptide
YIGSSGSIIFYADSVKG

SEQ ID NO: 15421 - DNA, 51 bp, synthetic construct
  misc_feature 1..51: note = Description of Artificial Sequence: Synthetic oligonucleotide
  source 1..51: mol_type = other DNA
ataatcaaccctagtggtggtagcacaaactacgcacagaagttccagggc

SEQ ID NO: 15422 - protein, 17 aa, synthetic construct
  REGION 1..17: note = Description of Artificial Sequence: Synthetic peptide
IINPSGGSTNYAQKFQG

SEQ ID NO: 15423 - DNA, 51 bp, synthetic construct
  misc_feature 1..51: note = Description of Artificial Sequence: Synthetic oligonucleotide
  source 1..51: mol_type = other DNA
gttatatggaatgatggaggtaataaatataatggagactccgtgaagggc

SEQ ID NO: 15424 - protein, 17 aa, synthetic construct
  REGION 1..17: note = Description of Artificial Sequence: Synthetic peptide
VIWNDGGNKYNGDSVKG

SEQ ID NO: 15425 - DNA, 51 bp, synthetic construct
  misc_feature 1..51: note = Description of Artificial Sequence: Synthetic oligonucleotide
  source 1..51: mol_type = other DNA
acaatcaaccctagtggtggtagcacaaactacgcacagaagttccagggc

SEQ ID NO: 15426 - protein, 17 aa, synthetic construct
  REGION 1..17: note = Description of Artificial Sequence: Synthetic peptide
TINPSGGSTNYAQKFQG

SEQ ID NO: 15427 - DNA, 51 bp, synthetic construct
  misc_feature 1..51: note = Description of Artificial Sequence: Synthetic oligonucleotide
  source 1..51: mol_type = other DNA
acaatcaaccctagtggtggtagcacagactacgcacagaagttccagggc

SEQ ID NO: 15428 - protein, 17 aa, synthetic construct
  REGION 1..17: note = Description of Artificial Sequence: Synthetic peptide
TINPSGGSTDYAQKFQG

SEQ ID NO: 15429 - DNA, 51 bp, synthetic construct
  misc_feature 1..51: note = Description of Artificial Sequence: Synthetic oligonucleotide
  source 1..51: mol_type = other DNA
gttatatcatatgatggaagtcctaaatactgtgcagactccgtgaagggc

SEQ ID NO: 15430 - protein, 17 aa, synthetic construct
  REGION 1..17: note = Description of Artificial Sequence: Synthetic peptide
VISYDGSPKYCADSVKG

SEQ ID NO: 15431 - DNA, 54 bp, synthetic construct
  misc_feature 1..54: note = Description of Artificial Sequence: Synthetic oligonucleotide
  source 1..54: mol_type = other DNA
aggacatactacaggtccaagtggtataatgcttatccagtatctatggaaagt

SEQ ID NO: 15432 - protein, 18 aa, synthetic construct
  REGION 1..18: note = Description of Artificial Sequence: Synthetic peptide
RTYYRSKWYNAYPVSMES

SEQ ID NO: 15433 - DNA, 51 bp, synthetic construct; identical to SEQ ID NO: 12127
  misc_feature 1..51: note = Description of Artificial Sequence: Synthetic oligonucleotide
  source 1..51: mol_type = other DNA

SEQ ID NO: 15434 - protein, 17 aa, synthetic construct
  REGION 1..17: note = Description of Artificial Sequence: Synthetic peptide
IIWYDGSNKYYADSVKG

SEQ ID NO: 15435 - DNA, 54 bp, synthetic construct
  misc_feature 1..54: note = Description of Artificial Sequence: Synthetic oligonucleotide
  source 1..54: mol_type = other DNA
aggacatactacaggtccaagtggtatagtgcttatccagtatctatggaaagt

SEQ ID NO: 15436 - protein, 18 aa, synthetic construct
  REGION 1..18: note = Description of Artificial Sequence: Synthetic peptide
RTYYRSKWYSAYPVSMES

SEQ ID NO: 15437 - DNA, 51 bp, synthetic construct; identical to SEQ ID NO: 12577
  misc_feature 1..51: note = Description of Artificial Sequence: Synthetic oligonucleotide
  source 1..51: mol_type = other DNA

SEQ ID NO: 15438 - protein, 17 aa, synthetic construct
  REGION 1..17: note = Description of Artificial Sequence: Synthetic peptide
VIWYDGSNEYYADSVKG

SEQ ID NO: 15439 - DNA, 51 bp, synthetic construct
  misc_feature 1..51: note = Description of Artificial Sequence: Synthetic oligonucleotide
  source 1..51: mol_type = other DNA
attatatattatgatggaagttataaatacaatgcagactccgtgaagggc

SEQ ID NO: 15440 - protein, 17 aa, synthetic construct
  REGION 1..17: note = Description of Artificial Sequence: Synthetic peptide
IIYYDGSYKYNADSVKG

SEQ ID NO: 15441 - DNA, 51 bp, synthetic construct
  misc_feature 1..51: note = Description of Artificial Sequence: Synthetic oligonucleotide
  source 1..51: mol_type = other DNA
tacattagtagtagtggaagtaccacatactacgcagactctgtgcagggc

SEQ ID NO: 15442 - protein, 17 aa, synthetic construct
  REGION 1..17: note = Description of Artificial Sequence: Synthetic peptide
YISSSGSTTYYADSVQG

SEQ ID NO: 15443 - DNA, 51 bp, synthetic construct
  misc_feature 1..51: note = Description of Artificial Sequence: Synthetic oligonucleotide
  source 1..51: mol_type = other DNA
attatatggtatgatggaagtgataaatactatgcagactccgtgaagggc

SEQ ID NO: 15444 - protein, 17 aa, synthetic construct
  REGION 1..17: note = Description of Artificial Sequence: Synthetic peptide
IIWYDGSDKYYADSVKG

SEQ ID NO: 15445 - DNA, 48 bp, synthetic construct
  misc_feature 1..48: note = Description of Artificial Sequence: Synthetic oligonucleotide
  source 1..48: mol_type = other DNA
ttcatttcttggaatgatgataagcgctacagcccatctctgaagagc

SEQ ID NO: 15446 - protein, 16 aa, synthetic construct
  REGION 1..16: note = Description of Artificial Sequence: Synthetic peptide
FISWNDDKRYSPSLKS

SEQ ID NO: 15447 - DNA, 51 bp, synthetic construct; identical to SEQ ID NO: 12103
  misc_feature 1..51: note = Description of Artificial Sequence: Synthetic oligonucleotide
  source 1..51: mol_type = other DNA

SEQ ID NO: 15448 - protein, 17 aa, synthetic construct
  REGION 1..17: note = Description of Artificial Sequence: Synthetic peptide
WMNPNSGNTGYAQKFQG

SEQ ID NO: 15449 - DNA, 51 bp, synthetic construct; identical to SEQ ID NO: 15443
  misc_feature 1..51: note = Description of Artificial Sequence: Synthetic oligonucleotide
  source 1..51: mol_type = other DNA

SEQ ID NO: 15450 - protein, 17 aa, synthetic construct
  REGION 1..17: note = Description of Artificial Sequence: Synthetic peptide
IIWYDGSDKYYADSVKG

SEQ ID NO: 15451 - DNA, 51 bp, synthetic construct
  misc_feature 1..51: note = Description of Artificial Sequence: Synthetic oligonucleotide
  source 1..51: mol_type = other DNA
tggatcagcgcttataatggtaacacaaagtatgcacagaagctccagggc

SEQ ID NO: 15452 - protein, 17 aa, synthetic construct
  REGION 1..17: note = Description of Artificial Sequence: Synthetic peptide
WISAYNGNTKYAQKLQG

SEQ ID NO: 15453 - DNA, 54 bp, synthetic construct; identical to SEQ ID NO: 12237
  misc_feature 1..54: note = Description of Artificial Sequence: Synthetic oligonucleotide
  source 1..54: mol_type = other DNA

SEQ ID NO: 15454 - protein, 18 aa, synthetic construct
  REGION 1..18: note = Description of Artificial Sequence: Synthetic peptide
RTYYRSKWYNDYAVSVKS

SEQ ID NO: 15455 - DNA, 51 bp, synthetic construct
  misc_feature 1..51: note = Description of Artificial Sequence: Synthetic oligonucleotide
  source 1..51: mol_type = other DNA
tggatcagcgcttataatggtaacagaaagtatgcacagaagctccagggc

SEQ ID NO: 15456 - protein, 17 aa, synthetic construct
  REGION 1..17: note = Description of Artificial Sequence: Synthetic peptide
WISAYNGNRKYAQKLQG

SEQ ID NO: 15457 - DNA, 51 bp, synthetic construct; identical to SEQ ID NO: 12123
  misc_feature 1..51: note = Description of Artificial Sequence: Synthetic oligonucleotide
  source 1..51: mol_type = other DNA

SEQ ID NO: 15458 - protein, 17 aa, synthetic construct
  REGION 1..17: note = Description of Artificial Sequence: Synthetic peptide
VIWYDGSNKYYADSVKG

SEQ ID NO: 15459 - DNA, 51 bp, synthetic construct; identical to SEQ ID NO: 13705
  misc_feature 1..51: note = Description of Artificial Sequence: Synthetic oligonucleotide
  source 1..51: mol_type = other DNA

SEQ ID NO: 15460 - protein, 17 aa, synthetic construct
  REGION 1..17: note = Description of Artificial Sequence: Synthetic peptide
VIWYDGSNKYYADSVKG

SEQ ID NO: 15461 - DNA, 51 bp, synthetic construct
  misc_feature 1..51: note = Description of Artificial Sequence: Synthetic oligonucleotide
  source 1..51: mol_type = other DNA
tggatcatccctaacagtggtgacacaaactatgcacagaagtttcagggc

SEQ ID NO: 15462 - protein, 17 aa, synthetic construct
  REGION 1..17: note = Description of Artificial Sequence: Synthetic peptide
WIIPNSGDTNYAQKFQG

SEQ ID NO: 15463 - DNA, 51 bp, synthetic construct
  misc_feature 1..51: note = Description of Artificial Sequence: Synthetic oligonucleotide
  source 1..51: mol_type = other DNA
tggattagtgcttataatggtaacacaaagaatgcacagaagctccagggc

SEQ ID NO: 15464 - protein, 17 aa, synthetic construct
  REGION 1..17: note = Description of Artificial Sequence: Synthetic peptide
WISAYNGNTKNAQKLQG

SEQ ID NO: 15465 - DNA, 51 bp, synthetic construct
  misc_feature 1..51: note = Description of Artificial Sequence: Synthetic oligonucleotide
  source 1..51: mol_type = other DNA
tggatcagcgcttataatggtaacacaaagtatgcacagaagttccagggc

SEQ ID NO: 15466 - protein, 17 aa, synthetic construct
  REGION 1..17: note = Description of Artificial Sequence: Synthetic peptide
WISAYNGNTKYAQKFQG

SEQ ID NO: 15467 - DNA, 51 bp, synthetic construct
  misc_feature 1..51: note = Description of Artificial Sequence: Synthetic oligonucleotide
  source 1..51: mol_type = other DNA
tggatcagcgcttataatggtaacacaaaggaagcacagaagttccagggc

SEQ ID NO: 15468 - protein, 17 aa, synthetic construct
  REGION 1..17: note = Description of Artificial Sequence: Synthetic peptide
WISAYNGNTKEAQKFQG

SEQ ID NO: 15469 - DNA, 48 bp, synthetic construct
  misc_feature 1..48: note = Description of Artificial Sequence: Synthetic oligonucleotide
  source 1..48: mol_type = other DNA
ctcatttattggcatgaagataagcgctacagcccatctctgaagagc

SEQ ID NO: 15470 - protein, 16 aa, synthetic construct
  REGION 1..16: note = Description of Artificial Sequence: Synthetic peptide
LIYWHEDKRYSPSLKS

SEQ ID NO: 15471 - DNA, 48 bp, synthetic construct
  misc_feature 1..48: note = Description of Artificial Sequence: Synthetic oligonucleotide
  source 1..48: mol_type = other DNA
ctcatttattggaatgatgataagcgctacagtccatctctgaagagc

SEQ ID NO: 15472 - protein, 16 aa, synthetic construct
  REGION 1..16: note = Description of Artificial Sequence: Synthetic peptide
LIYWNDDKRYSPSLKS

SEQ ID NO: 15473 - DNA, 48 bp, synthetic construct
  misc_feature 1..48: note = Description of Artificial Sequence: Synthetic oligonucleotide
  source 1..48: mol_type = other DNA
ctcatttattggcatgaagataggcgctacagcccatctctgaagagc

SEQ ID NO: 15474 - protein, 16 aa, synthetic construct
  REGION 1..16: note = Description of Artificial Sequence: Synthetic peptide
LIYWHEDRRYSPSLKS

SEQ ID NO: 15475 - DNA, 48 bp, synthetic construct; identical to SEQ ID NO: 12761
  misc_feature 1..48: note = Description of Artificial Sequence: Synthetic oligonucleotide
  source 1..48: mol_type = other DNA

SEQ ID NO: 15476 - protein, 16 aa, synthetic construct
  REGION 1..16: note = Description of Artificial Sequence: Synthetic peptide
LIYWDDDKRYSPSLKS

SEQ ID NO: 15477 - DNA, 51 bp, synthetic construct
  misc_feature 1..51: note = Description of Artificial Sequence: Synthetic oligonucleotide
  source 1..51: mol_type = other DNA
tccattagtagtagtagttattacttatactacgcagactcagtgaagggc

SEQ ID NO: 15478 - protein, 17 aa, synthetic construct
  REGION 1..17: note = Description of Artificial Sequence: Synthetic peptide
SISSSSYYLYYADSVKG

SEQ ID NO: 15479 - DNA, 51 bp, synthetic construct
  misc_feature 1..51: note = Description of Artificial Sequence: Synthetic oligonucleotide
  source 1..51: mol_type = other DNA
gttacatcatatgatggaagtgataaatactatgcagactccgtgaagggc

SEQ ID NO: 15480 - protein, 17 aa, synthetic construct
  REGION 1..17: note = Description of Artificial Sequence: Synthetic peptide
VTSYDGSDKYYADSVKG

SEQ ID NO: 15481 - DNA, 51 bp, synthetic construct
  misc_feature 1..51: note = Description of Artificial Sequence: Synthetic oligonucleotide
  source 1..51: mol_type = other DNA
cacataaagcaagatggaagtgagaaatactatgtggactctgtgaagggc

SEQ ID NO: 15482 - protein, 17 aa, synthetic construct
  REGION 1..17: note = Description of Artificial Sequence: Synthetic peptide
HIKQDGSEKYYVDSVKG

SEQ ID NO: 15483 - DNA, 51 bp, synthetic construct; identical to SEQ ID NO: 12339
  misc_feature 1..51: note = Description of Artificial Sequence: Synthetic oligonucleotide
  source 1..51: mol_type = other DNA

SEQ ID NO: 15484 - protein, 17 aa, synthetic construct
  REGION 1..17: note = Description of Artificial Sequence: Synthetic peptide
VISYDGSNKYYADSVKG

SEQ ID NO: 15485 - DNA, 51 bp, synthetic construct
  misc_feature 1..51: note = Description of Artificial Sequence: Synthetic oligonucleotide
  source 1..51: mol_type = other DNA
tacattagtactagtagtagtaccatattctacgcagactctgtgaagggc

SEQ ID NO: 15486 - protein, 17 aa, synthetic construct
  REGION 1..17: note = Description of Artificial Sequence: Synthetic peptide
YISTSSSTIFYADSVKG

SEQ ID NO: 15487 - DNA, 51 bp, synthetic construct
  misc_feature 1..51: note = Description of Artificial Sequence: Synthetic oligonucleotide
  source 1..51: mol_type = other DNA
tacattagtgggagtagtaatatcatatactacacagactctgtgaagggc

SEQ ID NO: 15488 - protein, 17 aa, synthetic construct
  REGION 1..17: note = Description of Artificial Sequence: Synthetic peptide
YISGSSNIIYYTDSVKG

SEQ ID NO: 15489 - DNA, 51 bp, synthetic construct; identical to SEQ ID NO: 12151
  misc_feature 1..51: note = Description of Artificial Sequence: Synthetic oligonucleotide
  source 1..51: mol_type = other DNA

SEQ ID NO: 15490 - protein, 17 aa, synthetic construct
  REGION 1..17: note = Description of Artificial Sequence: Synthetic peptide
AIWYDGSNKYYADSVKG

SEQ ID NO: 15491 - DNA, 48 bp, synthetic construct; identical to SEQ ID NO: 15469
  misc_feature 1..48: note = Description of Artificial Sequence: Synthetic oligonucleotide
  source 1..48: mol_type = other DNA

SEQ ID NO: 15492 - protein, 16 aa, synthetic construct
  REGION 1..16: note = Description of Artificial Sequence: Synthetic peptide
LIYWHEDKRYSPSLKS

SEQ ID NO: 15493 - DNA, 51 bp, synthetic construct
  misc_feature 1..51: note = Description of Artificial Sequence: Synthetic oligonucleotide
  source 1..51: mol_type = other DNA
tacattagtgagagtagtaatatcatatactacacagactctgtgaagggc

SEQ ID NO: 15494 - protein, 17 aa, synthetic construct
  REGION 1..17: note = Description of Artificial Sequence: Synthetic peptide
YISESSNIIYYTDSVKG

SEQ ID NO: 15495 - DNA, 48 bp, synthetic construct; identical to SEQ ID NO: 12761
  misc_feature 1..48: note = Description of Artificial Sequence: Synthetic oligonucleotide
  source 1..48: mol_type = other DNA

SEQ ID NO: 15496 - protein, 16 aa, synthetic construct
  REGION 1..16: note = Description of Artificial Sequence: Synthetic peptide
LIYWDDDKRYSPSLKS

SEQ ID NO: 15497 - DNA, 48 bp, synthetic construct
  misc_feature 1..48: note = Description of Artificial Sequence: Synthetic oligonucleotide
  source 1..48: mol_type = other DNA
ctcatttattcacatgaagataagcgctacagcccatctctgaagagc

SEQ ID NO: 15498 - protein, 16 aa, synthetic construct
  REGION 1..16: note = Description of Artificial Sequence: Synthetic peptide
LIYSHEDKRYSPSLKS

SEQ ID NO: 15499 - DNA, 48 bp, synthetic construct
  misc_feature 1..48: note = Description of Artificial Sequence: Synthetic oligonucleotide
  source 1..48: mol_type = other DNA
ctcattaattggaatgatgataagcgctacagcccatctctgaagagc

SEQ ID NO: 15500 - protein, 16 aa, synthetic construct
  REGION 1..16: note = Description of Artificial Sequence: Synthetic peptide
LINWNDDKRYSPSLKS

SEQ ID NO: 15501 - DNA, 48 bp, synthetic construct; identical to SEQ ID NO: 15499
  misc_feature 1..48: note = Description of Artificial Sequence: Synthetic oligonucleotide
  source 1..48: mol_type = other DNA

SEQ ID NO: 15502 - protein, 16 aa, synthetic construct
  REGION 1..16: note = Description of Artificial Sequence: Synthetic peptide
LINWNDDKRYSPSLKS

SEQ ID NO: 15503 - DNA, 48 bp, synthetic construct; identical to SEQ ID NO: 15499
  misc_feature 1..48: note = Description of Artificial Sequence: Synthetic oligonucleotide
  source 1..48: mol_type = other DNA

SEQ ID NO: 15504 - protein, 16 aa, synthetic construct
  REGION 1..16: note = Description of Artificial Sequence: Synthetic peptide
LINWNDDKRYSPSLKS

SEQ ID NO: 15505 - DNA, 48 bp, synthetic construct
  misc_feature 1..48: note = Description of Artificial Sequence: Synthetic oligonucleotide
  source 1..48: mol_type = other DNA
ctcattaattggaatgatgataaacgctacagcccatctctgaagagc

SEQ ID NO: 15506 - protein, 16 aa, synthetic construct
  REGION 1..16: note = Description of Artificial Sequence: Synthetic peptide
LINWNDDKRYSPSLKS

SEQ ID NO: 15507 - DNA, 48 bp, synthetic construct
  misc_feature 1..48: note = Description of Artificial Sequence: Synthetic oligonucleotide
  source 1..48: mol_type = other DNA
ctcattaattggaatgatgataagcgctacagcccgtctctgaagagc

SEQ ID NO: 15508 - protein, 16 aa, synthetic construct
  REGION 1..16: note = Description of Artificial Sequence: Synthetic peptide
LINWNDDKRYSPSLKS

SEQ ID NO: 15509 - DNA, 51 bp, synthetic construct
  misc_feature 1..51: note = Description of Artificial Sequence: Synthetic oligonucleotide
  source 1..51: mol_type = other DNA
tacattagtagtagtactagtaccatatactacgcagcctctgtgaagggc

SEQ ID NO: 15510 - protein, 17 aa, synthetic construct
  REGION 1..17: note = Description of Artificial Sequence: Synthetic peptide
YISSSTSTIYYAASVKG

SEQ ID NO: 15511 - DNA, 51 bp, synthetic construct; identical to SEQ ID NO: 15509
  misc_feature 1..51: note = Description of Artificial Sequence: Synthetic oligonucleotide
  source 1..51: mol_type = other DNA

SEQ ID NO: 15512 - protein, 17 aa, synthetic construct
  REGION 1..17: note = Description of Artificial Sequence: Synthetic peptide
YISSSTSTIYYAASVKG

SEQ ID NO: 15513 - DNA, 51 bp, synthetic construct
  misc_feature 1..51: note = Description of Artificial Sequence: Synthetic oligonucleotide
  source 1..51: mol_type = other DNA
tggatcaaccctaacagtggtggcacaaattatgcacagaagtttcagggc

SEQ ID NO: 15514 - protein, 17 aa, synthetic construct
  REGION 1..17: note = Description of Artificial Sequence: Synthetic peptide
WINPNSGGTNYAQKFQG

SEQ ID NO: 15515 - DNA, 48 bp, synthetic construct
  misc_feature 1..48: note = Description of Artificial Sequence: Synthetic oligonucleotide
  source 1..48: mol_type = other DNA
ctcattaattggaatgatgataagcgcttcagcccatctctgaagagc

SEQ ID NO: 15516 - protein, 16 aa, synthetic construct
  REGION 1..16: note = Description of Artificial Sequence: Synthetic peptide
LINWNDDKRFSPSLKS

SEQ ID NO: 15517 - DNA, 51 bp, synthetic construct
  misc_feature 1..51: note = Description of Artificial Sequence: Synthetic oligonucleotide
  source 1..51: mol_type = other DNA
tggatcaaccctaacagtggtggcacaaactatggacagaagtttcagggc

SEQ ID NO: 15518 - protein, 17 aa, synthetic construct
  REGION 1..17: note = Description of Artificial Sequence: Synthetic peptide
WINPNSGGTNYGQKFQG

SEQ ID NO: 15519 - DNA, 54 bp, synthetic construct
  misc_feature 1..54: note = Description of Artificial Sequence: Synthetic oligonucleotide
  source 1..54: mol_type = other DNA
aggacatactacaggtccgagtgctataatgattatgcagtatctgtgcagagt

SEQ ID NO: 15520 - protein, 18 aa, synthetic construct
  REGION 1..18: note = Description of Artificial Sequence: Synthetic peptide
RTYYRSECYNDYAVSVQS

SEQ ID NO: 15521 - DNA, 51 bp, synthetic construct; identical to SEQ ID NO: 15513
  misc_feature 1..51: note = Description of Artificial Sequence: Synthetic oligonucleotide
  source 1..51: mol_type = other DNA

SEQ ID NO: 15522 - protein, 17 aa, synthetic construct
  REGION 1..17: note = Description of Artificial Sequence: Synthetic peptide
WINPNSGGTNYAQKFQG

SEQ ID NO: 15523 - DNA, 51 bp, synthetic construct
  misc_feature 1..51: note = Description of Artificial Sequence: Synthetic oligonucleotide
  source 1..51: mol_type = other DNA
tggatcaaccctaacagtggtggcacaaactatggacagaagtttcaggac

SEQ ID NO: 15524 - protein, 17 aa, synthetic construct
  REGION 1..17: note = Description of Artificial Sequence: Synthetic peptide
WINPNSGGTNYGQKFQD

SEQ ID NO: 15525 - DNA, 51 bp, synthetic construct
  misc_feature 1..51: note = Description of Artificial Sequence: Synthetic oligonucleotide
  source 1..51: mol_type = other DNA
tggatcaaccctaacagtggtggcacaaactatgcacagaagtttcaggtc

SEQ ID NO: 15526 - protein, 17 aa, synthetic construct
  REGION 1..17: note = Description of Artificial Sequence: Synthetic peptide
WINPNSGGTNYAQKFQV

SEQ ID NO: 15527 - DNA, 51 bp, synthetic construct; identical to SEQ ID NO: 15517
  misc_feature 1..51: note = Description of Artificial Sequence: Synthetic oligonucleotide
  source 1..51: mol_type = other DNA

SEQ ID NO: 15528 - protein, 17 aa, synthetic construct
  REGION 1..17: note = Description of Artificial Sequence: Synthetic peptide
WINPNSGGTNYGQKFQG

SEQ ID NO: 15529 - DNA, 48 bp, synthetic construct; identical to SEQ ID NO: 15499
  misc_feature 1..48: note = Description of Artificial Sequence: Synthetic oligonucleotide
  source 1..48: mol_type = other DNA

SEQ ID NO: 15530 - protein, 16 aa, synthetic construct
  REGION 1..16: note = Description of Artificial Sequence: Synthetic peptide
LINWNDDKRYSPSLKS

SEQ ID NO: 15531 - DNA, 51 bp, synthetic construct
  misc_feature 1..51: note = Description of Artificial Sequence: Synthetic oligonucleotide
  source 1..51: mol_type = other DNA
gttacaacatatgatggaagtaataaatactatgcagactccgtgaagggc

SEQ ID NO: 15532 - protein, 17 aa, synthetic construct
  REGION 1..17: note = Description of Artificial Sequence: Synthetic peptide
VTTYDGSNKYYADSVKG

SEQ ID NO: 15533 - DNA, 48 bp, synthetic construct; identical to SEQ ID NO: 15499
  misc_feature 1..48: note = Description of Artificial Sequence: Synthetic oligonucleotide
  source 1..48: mol_type = other DNA

SEQ ID NO: 15534 - protein, 16 aa, synthetic construct
  REGION 1..16: note = Description of Artificial Sequence: Synthetic peptide
LINWNDDKRYSPSLKS

SEQ ID NO: 15535 - DNA, 48 bp, synthetic construct; identical to SEQ ID NO: 12761
  misc_feature 1..48: note = Description of Artificial Sequence: Synthetic oligonucleotide
  source 1..48: mol_type = other DNA

SEQ ID NO: 15536 - protein, 16 aa, synthetic construct
  REGION 1..16: note = Description of Artificial Sequence: Synthetic peptide
LIYWDDDKRYSPSLKS

SEQ ID NO: 15537 - DNA, 51 bp, synthetic construct
  misc_feature 1..51: note = Description of Artificial Sequence: Synthetic oligonucleotide
  source 1..51: mol_type = other DNA
gttatatggtatgatggaaataataaatcctatgcagactccgtgaagggc

SEQ ID NO: 15538 - protein, 17 aa, synthetic construct
  REGION 1..17: note = Description of Artificial Sequence: Synthetic peptide
VIWYDGNNKSYADSVKG

SEQ ID NO: 15539 - DNA, 48 bp, synthetic construct
  misc_feature 1..48: note = Description of Artificial Sequence: Synthetic oligonucleotide
  source 1..48: mol_type = other DNA
ttcatttattgggatgatgataagcgctacagcccatctctgaagagc

SEQ ID NO: 15540 - protein, 16 aa, synthetic construct
  REGION 1..16: note = Description of Artificial Sequence: Synthetic peptide
FIYWDDDKRYSPSLKS

SEQ ID NO: 15541 - DNA, 48 bp, synthetic construct
  misc_feature 1..48: note = Description of Artificial Sequence: Synthetic oligonucleotide
  source 1..48: mol_type = other DNA
tacatctattacagtgggagcacctactacaacccgtccctcaggagt

SEQ ID NO: 15542 - protein, 16 aa, synthetic construct
  REGION 1..16: note = Description of Artificial Sequence: Synthetic peptide
YIYYSGSTYYNPSLRS

SEQ ID NO: 15543 - DNA, 51 bp, synthetic construct; identical to SEQ ID NO: 15537
  misc_feature 1..51: note = Description of Artificial Sequence: Synthetic oligonucleotide
  source 1..51: mol_type = other DNA

SEQ ID NO: 15544 - protein, 17 aa, synthetic construct
  REGION 1..17: note = Description of Artificial Sequence: Synthetic peptide
VIWYDGNNKSYADSVKG

SEQ ID NO: 15545 - DNA, 51 bp, synthetic construct
  misc_feature 1..51: note = Description of Artificial Sequence: Synthetic oligonucleotide
  source 1..51: mol_type = other DNA
gttttttggtatgatggaagtaataaagactatgcagactccgtgaagggc

SEQ ID NO: 15546 - protein, 17 aa, synthetic construct
  REGION 1..17: note = Description of Artificial Sequence: Synthetic peptide
VFWYDGSNKDYADSVKG

SEQ ID NO: 15547 - DNA, 48 bp, synthetic construct
  misc_feature 1..48: note = Description of Artificial Sequence: Synthetic oligonucleotide
  source 1..48: mol_type = other DNA
tacatctattacattgggagtgtttactacaacccgtccctcaagagt

SEQ ID NO: 15548 - protein, 16 aa, synthetic construct
  REGION 1..16: note = Description of Artificial Sequence: Synthetic peptide
YIYYIGSVYYNPSLKS

SEQ ID NO: 15549 - DNA, 51 bp, synthetic construct; identical to SEQ ID NO: 15537
  misc_feature 1..51: note = Description of Artificial Sequence: Synthetic oligonucleotide
  source 1..51: mol_type = other DNA

SEQ ID NO: 15550 - protein, 17 aa, synthetic construct
  REGION 1..17: note = Description of Artificial Sequence: Synthetic peptide
VIWYDGNNKSYADSVKG

SEQ ID NO: 15551 - DNA, 51 bp, synthetic construct; identical to SEQ ID NO: 15537
  misc_feature 1..51: note = Description of Artificial Sequence: Synthetic oligonucleotide
  source 1..51: mol_type = other DNA

SEQ ID NO: 15552 - protein, 17 aa, synthetic construct
  REGION 1..17: note = Description of Artificial Sequence: Synthetic peptide
VIWYDGNNKSYADSVKG

SEQ ID NO: 15553 - DNA, 48 bp, synthetic construct; identical to SEQ ID NO: 12761
  misc_feature 1..48: note = Description of Artificial Sequence: Synthetic oligonucleotide
  source 1..48: mol_type = other DNA

SEQ ID NO: 15554 - protein, 16 aa, synthetic construct
  REGION 1..16: note = Description of Artificial Sequence: Synthetic peptide
LIYWDDDKRYSPSLKS

SEQ ID NO: 15555 - DNA, 51 bp, synthetic construct; identical to SEQ ID NO: 15537
  misc_feature 1..51: note = Description of Artificial Sequence: Synthetic oligonucleotide
  source 1..51: mol_type = other DNA

SEQ ID NO: 15556 - protein, 17 aa, synthetic construct
  REGION 1..17: note = Description of Artificial Sequence: Synthetic peptide
VIWYDGNNKSYADSVKG

SEQ ID NO: 15557 - DNA, 51 bp, synthetic construct
  misc_feature 1..51: note = Description of Artificial Sequence: Synthetic oligonucleotide
  source 1..51: mol_type = other DNA
gttattagtggtggtggtactaccacatactacgcagactccgtgaagggc

SEQ ID NO: 15558 - protein, 17 aa, synthetic construct
  REGION 1..17: note = Description of Artificial Sequence: Synthetic peptide
VISGGGTTTYYADSVKG

SEQ ID NO: 15559 - DNA, 51 bp, synthetic construct
  misc_feature 1..51: note = Description of Artificial Sequence: Synthetic oligonucleotide
  source 1..51: mol_type = other DNA
gttgtatggtatggtggaaatgataaagactttgcagactccgtgacgggc

SEQ ID NO: 15560 - protein, 17 aa, synthetic construct
  REGION 1..17: note = Description of Artificial Sequence: Synthetic peptide
VVWYGGNDKDFADSVTG

SEQ ID NO: 15561 - DNA, 51 bp, synthetic construct; identical to SEQ ID NO: 12103
  misc_feature 1..51: note = Description of Artificial Sequence: Synthetic oligonucleotide
  source 1..51: mol_type = other DNA

SEQ ID NO: 15562 - protein, 17 aa, synthetic construct
  REGION 1..17: note = Description of Artificial Sequence: Synthetic peptide
WMNPNSGNTGYAQKFQG

SEQ ID NO: 15563 - DNA, 48 bp, synthetic construct
  misc_feature 1..48: note = Description of Artificial Sequence: Synthetic oligonucleotide
  source 1..48: mol_type = other DNA
atccttttttggaatgatgatgagcgctacagcccatctctgaagagc

SEQ ID NO: 15564 - protein, 16 aa, synthetic construct
  REGION 1..16: note = Description of Artificial Sequence: Synthetic peptide
ILFWNDDERYSPSLKS

SEQ ID NO: 15565 - DNA, 51 bp, synthetic construct; identical to SEQ ID NO: 12123
  misc_feature 1..51: note = Description of Artificial Sequence: Synthetic oligonucleotide
  source 1..51: mol_type = other DNA

SEQ ID NO: 15566 - protein, 17 aa, synthetic construct
  REGION 1..17: note = Description of Artificial Sequence: Synthetic peptide
VIWYDGSNKYYADSVKG

SEQ ID NO: 15567 - DNA, 51 bp, synthetic construct
  misc_feature 1..51: note = Description of Artificial Sequence: Synthetic oligonucleotide
  source 1..51: mol_type = other DNA
gttatatggtatgatggaagtggtaaatactatgcagactccgtgaagggc

SEQ ID NO: 15568 - protein, 17 aa, synthetic construct
  REGION 1..17: note = Description of Artificial Sequence: Synthetic peptide
VIWYDGSGKYYADSVKG

SEQ ID NO: 15569 - DNA, 51 bp, synthetic construct; identical to SEQ ID NO: 12127
  misc_feature 1..51: note = Description of Artificial Sequence: Synthetic oligonucleotide
  source 1..51: mol_type = other DNA

SEQ ID NO: 15570 - protein, 17 aa, synthetic construct
  REGION 1..17: note = Description of Artificial Sequence: Synthetic peptide
IIWYDGSNKYYADSVKG

SEQ ID NO: 15571 - DNA, 51 bp, synthetic construct; identical to SEQ ID NO: 15443
  misc_feature 1..51: note = Description of Artificial Sequence: Synthetic oligonucleotide
  source 1..51: mol_type = other DNA

SEQ ID NO: 15572 - protein, 17 aa, synthetic construct
  REGION 1..17: note = Description of Artificial Sequence: Synthetic peptide
IIWYDGSDKYYADSVKG

SEQ ID NO: 15573 - DNA, 48 bp, synthetic construct; identical to SEQ ID NO: 12763
  misc_feature 1..48: note = Description of Artificial Sequence: Synthetic oligonucleotide
  source 1..48: mol_type = other DNA

SEQ ID NO: 15574 - protein, 16 aa, synthetic construct
  REGION 1..16: note = Description of Artificial Sequence: Synthetic peptide
LIYWNDDERYSPSLKS

SEQ ID NO: 15575 - DNA, 48 bp, synthetic construct; identical to SEQ ID NO: 15445
  misc_feature 1..48: note = Description of Artificial Sequence: Synthetic oligonucleotide
  source 1..48: mol_type = other DNA

SEQ ID NO: 15576 - protein, 16 aa, synthetic construct
  REGION 1..16: note = Description of Artificial Sequence: Synthetic peptide
FISWNDDKRYSPSLKS

SEQ ID NO: 15577 - DNA, 48 bp, synthetic construct; identical to SEQ ID NO: 12147
  misc_feature 1..48: note = Description of Artificial Sequence: Synthetic oligonucleotide
  source 1..48: mol_type = other DNA

SEQ ID NO: 15578 - protein, 16 aa, synthetic construct
  REGION 1..16: note = Description of Artificial Sequence: Synthetic peptide
YIYYSGSTYYNPSLKS

SEQ ID NO: 15579 - DNA, 51 bp, synthetic construct
  misc_feature 1..51: note = Description of Artificial Sequence: Synthetic oligonucleotide
  source 1..51: mol_type = other DNA
gttataatatatgatggaagttataagtactatgcagactccgtgaagggc

SEQ ID NO: 15580 - protein, 17 aa, synthetic construct
  REGION 1..17: note = Description of Artificial Sequence: Synthetic peptide
VIIYDGSYKYYADSVKG

SEQ ID NO: 15581 - DNA, 54 bp, synthetic construct
  misc_feature 1..54: note = Description of Artificial Sequence: Synthetic oligonucleotide
  source 1..54: mol_type = other DNA
aagacatactacaggtccaagtggtataatgattatgcagtatctgtgaaaagt

SEQ ID NO: 15582 - protein, 18 aa, synthetic construct
  REGION 1..18: note = Description of Artificial Sequence: Synthetic peptide
KTYYRSKWYNDYAVSVKS

SEQ ID NO: 15583 - DNA, 51 bp, synthetic construct
  misc_feature 1..51: note = Description of Artificial Sequence: Synthetic oligonucleotide
  source 1..51: mol_type = other DNA
gttatatggtttgatggagataataaatactatgcagactccgtgaagggc

SEQ ID NO: 15584 - protein, 17 aa, synthetic construct
  REGION 1..17: note = Description of Artificial Sequence: Synthetic peptide
VIWFDGDNKYYADSVKG

SEQ ID NO: 15585 - DNA, 51 bp, synthetic construct; identical to SEQ ID NO: 12123
  misc_feature 1..51: note = Description of Artificial Sequence: Synthetic oligonucleotide
  source 1..51: mol_type = other DNA

SEQ ID NO: 15586 - protein, 17 aa, synthetic construct
  REGION 1..17: note = Description of Artificial Sequence: Synthetic peptide
VIWYDGSNKYYADSVKG

SEQ ID NO: 15587 - DNA, 51 bp, synthetic construct
  misc_feature 1..51: note = Description of Artificial Sequence: Synthetic oligonucleotide
  source 1..51: mol_type = other DNA
gttatatggaatgatggaagtaaaaaataccatgtagactccgtgaagggc

SEQ ID NO: 15588 - protein, 17 aa, synthetic construct
  REGION 1..17: note = Description of Artificial Sequence: Synthetic peptide
VIWNDGSKKYHVDSVKG

SEQ ID NO: 15589 - DNA, 51 bp, synthetic construct
  misc_feature 1..51: note = Description of Artificial Sequence: Synthetic oligonucleotide
  source 1..51: mol_type = other DNA
gttatatggtttgatggaagtaataaatactatacagactccgtgaagggc

SEQ ID NO: 15590 - protein, 17 aa, synthetic construct
  REGION 1..17: note = Description of Artificial Sequence: Synthetic peptide
VIWFDGSNKYYTDSVKG

SEQ ID NO: 15591 - DNA, 51 bp, synthetic construct; identical to SEQ ID NO: 12197
  misc_feature 1..51: note = Description of Artificial Sequence: Synthetic oligonucleotide
  source 1..51: mol_type = other DNA

SEQ ID NO: 15592 - protein, 17 aa, synthetic construct
  REGION 1..17: note = Description of Artificial Sequence: Synthetic peptide
WINPNSGGTNYAQKFQG

SEQ ID NO: 15593 - DNA, 51 bp, synthetic construct; identical to SEQ ID NO: 15579
  misc_feature 1..51: note = Description of Artificial Sequence: Synthetic oligonucleotide
  source 1..51: mol_type = other DNA

SEQ ID NO: 15594 - protein, 17 aa, synthetic construct
  REGION 1..17: note = Description of Artificial Sequence: Synthetic peptide
VIIYDGSYKYYADSVKG

SEQ ID NO: 15595 - DNA, 51 bp, synthetic construct; identical to SEQ ID NO: 12123
  misc_feature 1..51: note = Description of Artificial Sequence: Synthetic oligonucleotide
  source 1..51: mol_type = other DNA

SEQ ID NO: 15596 - protein, 17 aa, synthetic construct
  REGION 1..17: note = Description of Artificial Sequence: Synthetic peptide
VIWYDGSNKYYADSVKG

SEQ ID NO: 15597 - DNA, 54 bp, synthetic construct; identical to SEQ ID NO: 12237
  misc_feature 1..54: note = Description of Artificial Sequence: Synthetic oligonucleotide
  source 1..54: mol_type = other DNA

SEQ ID NO: 15598 - protein, 18 aa, synthetic construct
  REGION 1..18: note = Description of Artificial Sequence: Synthetic peptide
RTYYRSKWYNDYAVSVKS

SEQ ID NO: 15599 - DNA, 51 bp, synthetic construct
  misc_feature 1..51: note = Description of Artificial Sequence: Synthetic oligonucleotide
  source 1..51: mol_type = other DNA
gttatatggtttggtggagataataaatactatgcagactccgtgaggggc

SEQ ID NO: 15600 - protein, 17 aa, synthetic construct
  REGION 1..17: note = Description of Artificial Sequence: Synthetic peptide
VIWFGGDNKYYADSVRG

SEQ ID NO: 15601 - DNA, 51 bp, synthetic construct; identical to SEQ ID NO: 15579
  misc_feature 1..51: note = Description of Artificial Sequence: Synthetic oligonucleotide
  source 1..51: mol_type = other DNA

SEQ ID NO: 15602 - protein, 17 aa, synthetic construct
  REGION 1..17: note = Description of Artificial Sequence: Synthetic peptide
VIIYDGSYKYYADSVKG

SEQ ID NO: 15603 - DNA, 48 bp, synthetic construct
  misc_feature 1..48: note = Description of Artificial Sequence: Synthetic oligonucleotide
  source 1..48: mol_type = other DNA
tacatctattacagtgggatcacctactacaatccgtccctcaagagt

SEQ ID NO: 15604 - protein, 16 aa, synthetic construct
  REGION 1..16: note = Description of Artificial Sequence: Synthetic peptide
YIYYSGITYYNPSLKS

SEQ ID NO: 15605 - DNA, 48 bp, synthetic construct
  misc_feature 1..48: note = Description of Artificial Sequence: Synthetic oligonucleotide
  source 1..48: mol_type = other DNA
tatatctattacagtgggagtactaagtacaacccctccctcaagagt

SEQ ID NO: 15606 - protein, 16 aa, synthetic construct
  REGION 1..16: note = Description of Artificial Sequence: Synthetic peptide
YIYYSGSTKYNPSLKS

SEQ ID NO: 15607 - DNA, 48 bp, synthetic construct; identical to SEQ ID NO: 15603
  misc_feature 1..48: note = Description of Artificial Sequence: Synthetic oligonucleotide
  source 1..48: mol_type = other DNA

SEQ ID NO: 15608 - protein, 16 aa, synthetic construct
  REGION 1..16: note = Description of Artificial Sequence: Synthetic peptide
YIYYSGITYYNPSLKS

SEQ ID NO: 15609 - DNA, 51 bp, synthetic construct; identical to SEQ ID NO: 12227
  misc_feature 1..51: note = Description of Artificial Sequence: Synthetic oligonucleotide
  source 1..51: mol_type = other DNA

SEQ ID NO: 15610 - protein, 17 aa, synthetic construct
  REGION 1..17: note = Description of Artificial Sequence: Synthetic peptide
VIWFDGSNKYYADSVKG

SEQ ID NO: 15611 - DNA, 51 bp, synthetic construct
  misc_feature 1..51: note = Description of Artificial Sequence: Synthetic oligonucleotide
  source 1..51: mol_type = other DNA
gttatatggtttggtggagataataaatactatgcagactccgtgaagggc

SEQ ID NO: 15612 - protein, 17 aa, synthetic construct
  REGION 1..17: note = Description of Artificial Sequence: Synthetic peptide
VIWFGGDNKYYADSVKG

SEQ ID NO: 15613 - DNA, 51 bp, synthetic construct
  misc_feature 1..51: note = Description of Artificial Sequence: Synthetic oligonucleotide
  source 1..51: mol_type = other DNA
gttatatggtatgatggaagtaaaaaatactatgcagactccgtgaagggc

SEQ ID NO: 15614 - protein, 17 aa, synthetic construct
  REGION 1..17: note = Description of Artificial Sequence: Synthetic peptide
VIWYDGSKKYYADSVKG

SEQ ID NO: 15615 - DNA, 51 bp, synthetic construct
  misc_feature 1..51: note = Description of Artificial Sequence: Synthetic oligonucleotide
  source 1..51: mol_type = other DNA
cttatatggtttgatggaagtaataaatactatgcagactccgtgaagggc

SEQ ID NO: 15616 - protein, 17 aa, synthetic construct
  REGION 1..17: note = Description of Artificial Sequence: Synthetic peptide
LIWFDGSNKYYADSVKG

SEQ ID NO: 15617 - DNA, 51 bp, synthetic construct
  misc_feature 1..51: note = Description of Artificial Sequence: Synthetic oligonucleotide
  source 1..51: mol_type = other DNA
tggatcaaccctaatagtggtggcacaaactatgcacacaagtttcagggc

SEQ ID NO: 15618 - protein, 17 aa, synthetic construct
  REGION 1..17: note = Description of Artificial Sequence: Synthetic peptide
WINPNSGGTNYAHKFQG

SEQ ID NO: 15619 - DNA, 51 bp, synthetic construct; identical to SEQ ID NO: 12735
  misc_feature 1..51: note = Description of Artificial Sequence: Synthetic oligonucleotide
  source 1..51: mol_type = other DNA

SEQ ID NO: 15620 - protein, 17 aa, synthetic construct
  REGION 1..17: note = Description of Artificial Sequence: Synthetic peptide
VIWNDGSNKYYADSVKG

SEQ ID NO: 15621 - DNA, 48 bp, synthetic construct
  misc_feature 1..48: note = Description of Artificial Sequence: Synthetic oligonucleotide
  source 1..48: mol_type = other DNA
tacatctattacactgggagcacctactacaacccgtccctcaagagt

SEQ ID NO: 15622 - protein, 16 aa, synthetic construct
  REGION 1..16: note = Description of Artificial Sequence: Synthetic peptide
YIYYTGSTYYNPSLKS

SEQ ID NO: 15623 - DNA, 48 bp, synthetic construct
  misc_feature 1..48: note = Description of Artificial Sequence: Synthetic oligonucleotide
  source 1..48: mol_type = other DNA
cggatctattccagtgggagcaccaactacaacccctccctcaagagt

SEQ ID NO: 15624 - protein, 16 aa, synthetic construct
  REGION 1..16: note = Description of Artificial Sequence: Synthetic peptide
RIYSSGSTNYNPSLKS

SEQ ID NO: 15625 - DNA, 48 bp, synthetic construct
  misc_feature 1..48: note = Description of Artificial Sequence: Synthetic oligonucleotide
  source 1..48: mol_type = other DNA
tacatctattacagagggagtacctactacaatccgtccctcaagagt

SEQ ID NO: 15626 - protein, 16 aa, synthetic construct
  REGION 1..16: note = Description of Artificial Sequence: Synthetic peptide
YIYYRGSTYYNPSLKS

SEQ ID NO: 15627 - DNA, 48 bp, synthetic construct
  misc_feature 1..48: note = Description of Artificial Sequence: Synthetic oligonucleotide
  source 1..48: mol_type = other DNA
tacatctattacagtgggcccacctactacaacccgtccctcaagagt

SEQ ID NO: 15628 - protein, 16 aa, synthetic construct
  REGION 1..16: note = Description of Artificial Sequence: Synthetic peptide
YIYYSGPTYYNPSLKS

SEQ ID NO: 15629 - DNA, 48 bp, synthetic construct
  misc_feature 1..48: note = Description of Artificial Sequence: Synthetic oligonucleotide
  source 1..48: mol_type = other DNA
tatatctattacagtgggagcaccaactacaacccctccctcaagagt

SEQ ID NO: 15630 - protein, 16 aa, synthetic construct
  REGION 1..16: note = Description of Artificial Sequence: Synthetic peptide
YIYYSGSTNYNPSLKS

SEQ ID NO: 15631 - DNA, 57 bp, synthetic construct; identical to SEQ ID NO: 12475
  misc_feature 1..57: note = Description of Artificial Sequence: Synthetic oligonucleotide
  source 1..57: mol_type = other DNA

SEQ ID NO: 15632 - protein, 19 aa, synthetic construct
  REGION 1..19: note = Description of Artificial Sequence: Synthetic peptide
RIKSKTDGGTTDYAAPVKG

SEQ ID NO: 15633 - DNA, 51 bp, synthetic construct; identical to SEQ ID NO: 12175
  misc_feature 1..51: note = Description of Artificial Sequence: Synthetic oligonucleotide
  source 1..51: mol_type = other DNA

SEQ ID NO: 15634 - protein, 17 aa, synthetic construct
  REGION 1..17: note = Description of Artificial Sequence: Synthetic peptide
WINPYSGGTNYAQKFQG

SEQ ID NO: 15635 - DNA, 48 bp, synthetic construct
  misc_feature 1..48: note = Description of Artificial Sequence: Synthetic oligonucleotide
  source 1..48: mol_type = other DNA
tacatctattacagtgggagcacctactacaacccgtctctcaagagt

SEQ ID NO: 15636 - protein, 16 aa, synthetic construct
  REGION 1..16: note = Description of Artificial Sequence: Synthetic peptide
YIYYSGSTYYNPSLKS

SEQ ID NO: 15637 - DNA, 51 bp, synthetic construct; identical to SEQ ID NO: 15587
  misc_feature 1..51: note = Description of Artificial Sequence: Synthetic oligonucleotide
  source 1..51: mol_type = other DNA

SEQ ID NO: 15638 - protein, 17 aa, synthetic construct
  REGION 1..17: note = Description of Artificial Sequence: Synthetic peptide
VIWNDGSKKYHVDSVKG

SEQ ID NO: 15639 - DNA, 48 bp, synthetic construct
  misc_feature 1..48: note = Description of Artificial Sequence: Synthetic oligonucleotide
  source 1..48: mol_type = other DNA
tacatctattacagtgggagtacctactacaacccgtccctcaagagt

SEQ ID NO: 15640 - protein, 16 aa, synthetic construct
  REGION 1..16: note = Description of Artificial Sequence: Synthetic peptide
YIYYSGSTYYNPSLKS

SEQ ID NO: 15641 - DNA, 51 bp, synthetic construct; identical to SEQ ID NO: 12735
  misc_feature 1..51: note = Description of Artificial Sequence: Synthetic oligonucleotide
  source 1..51: mol_type = other DNA

SEQ ID NO: 15642 - protein, 17 aa, synthetic construct
  REGION 1..17: note = Description of Artificial Sequence: Synthetic peptide
VIWNDGSNKYYADSVKG

SEQ ID NO: 15643 - DNA, 51 bp, synthetic construct
  misc_feature 1..51: note = Description of Artificial Sequence: Synthetic oligonucleotide
  source 1..51: mol_type = other DNA
tatattactagtagtggtaataccatatactacgcagactctgtgaagggc

SEQ ID NO: 15644 - protein, 17 aa, synthetic construct
  REGION 1..17: note = Description of Artificial Sequence: Synthetic peptide
YITSSGNTIYYADSVKG

SEQ ID NO: 15645 - DNA, 48 bp, synthetic construct
  misc_feature 1..48: note = Description of Artificial Sequence: Synthetic oligonucleotide
  source 1..48: mol_type = other DNA
cgtatctatagcagtgggagcaccaactacaacccctccctcaagagt

SEQ ID NO: 15646 - protein, 16 aa, synthetic construct
  REGION 1..16: note = Description of Artificial Sequence: Synthetic peptide
RIYSSGSTNYNPSLKS

SEQ ID NO: 15647 - DNA, 51 bp, synthetic construct
  misc_feature 1..51: note = Description of Artificial Sequence: Synthetic oligonucleotide
  source 1..51: mol_type = other DNA
tggatcaaccctaacagtggtgccacaaactatgcacagaagtttcagggc

SEQ ID NO: 15648 - protein, 17 aa, synthetic construct
  REGION 1..17: note = Description of Artificial Sequence: Synthetic peptide
WINPNSGATNYAQKFQG

SEQ ID NO: 15649 - DNA, 51 bp, synthetic construct
  misc_feature 1..51: note = Description of Artificial Sequence: Synthetic oligonucleotide
  source 1..51: mol_type = other DNA
tggatcaacccttacagtggtggcacaaactatgcacagaagtttcaggac

SEQ ID NO: 15650 - protein, 17 aa, synthetic construct
  REGION 1..17: note = Description of Artificial Sequence: Synthetic peptide
WINPYSGGTNYAQKFQD

SEQ ID NO: 15651 - DNA, 51 bp, synthetic construct; identical to SEQ ID NO: 15617
  misc_feature 1..51: note = Description of Artificial Sequence: Synthetic oligonucleotide
  source 1..51: mol_type = other DNA

SEQ ID NO: 15652 - protein, 17 aa, synthetic construct
  REGION 1..17: note = Description of Artificial Sequence: Synthetic peptide
WINPNSGGTNYAHKFQG

SEQ ID NO: 15653 - DNA, 51 bp, synthetic construct; identical to SEQ ID NO: 13449
  misc_feature 1..51: note = Description of Artificial Sequence: Synthetic oligonucleotide
  source 1..51: mol_type = other DNA

SEQ ID NO: 15654 - protein, 17 aa, synthetic construct
  REGION 1..17: note = Description of Artificial Sequence: Synthetic peptide
WINPNSGGTNYAQRFQG

SEQ ID NO: 15655 - DNA, 48 bp, synthetic construct
  misc_feature 1..48: note = Description of Artificial Sequence: Synthetic oligonucleotide
  source 1..48: mol_type = other DNA
tatgtctattacagtgggagcaccacctacaacccctccctcaagagt

SEQ ID NO: 15656 - protein, 16 aa, synthetic construct
  REGION 1..16: note = Description of Artificial Sequence: Synthetic peptide
YVYYSGSTTYNPSLKS

SEQ ID NO: 15657 - DNA, 48 bp, synthetic construct; identical to SEQ ID NO: 15621
  misc_feature 1..48: note = Description of Artificial Sequence: Synthetic oligonucleotide
  source 1..48: mol_type = other DNA

SEQ ID NO: 15658 - protein, 16 aa, synthetic construct
  REGION 1..16: note = Description of Artificial Sequence: Synthetic peptide
YIYYTGSTYYNPSLKS

SEQ ID NO: 15659 - DNA, 51 bp, synthetic construct; identical to SEQ ID NO: 15617
  misc_feature 1..51: note = Description of Artificial Sequence: Synthetic oligonucleotide
  source 1..51: mol_type = other DNA

SEQ ID NO: 15660 - protein, 17 aa, synthetic construct
  REGION 1..17: note = Description of Artificial Sequence: Synthetic peptide
WINPNSGGTNYAHKFQG

SEQ ID NO: 15661 - DNA, 51 bp, synthetic construct; identical to SEQ ID NO: 15613
  misc_feature 1..51: note = Description of Artificial Sequence: Synthetic oligonucleotide
  source 1..51: mol_type = other DNA

SEQ ID NO: 15662 - protein, 17 aa, synthetic construct
  REGION 1..17: note = Description of Artificial Sequence: Synthetic peptide
VIWYDGSKKYYADSVKG

SEQ ID NO: 15663 - DNA, 48 bp, synthetic construct; identical to SEQ ID NO: 15603
  misc_feature 1..48: note = Description of Artificial Sequence: Synthetic oligonucleotide
  source 1..48: mol_type = other DNA

SEQ ID NO: 15664 - protein, 16 aa, synthetic construct
  REGION 1..16: note = Description of Artificial Sequence: Synthetic peptide
YIYYSGITYYNPSLKS

SEQ ID NO: 15665 - DNA, 51 bp, synthetic construct
  misc_feature 1..51: note = Description of Artificial Sequence: Synthetic oligonucleotide
  source 1..51: mol_type = other DNA
gttatttggtatgatggaagtagtaaatactatgcagactccgtgaagggc

SEQ ID NO: 15666 - protein, 17 aa, synthetic construct
  REGION 1..17: note = Description of Artificial Sequence: Synthetic peptide
VIWYDGSSKYYADSVKG

SEQ ID NO: 15667 - DNA, 48 bp, synthetic construct
  misc_feature 1..48: note = Description of Artificial Sequence: Synthetic oligonucleotide
  source 1..48: mol_type = other DNA
tatatctattacagtgggagcaccacctacaacccctccctcaagagt

SEQ ID NO: 15668 - protein, 16 aa, synthetic construct
  REGION 1..16: note = Description of Artificial Sequence: Synthetic peptide
YIYYSGSTTYNPSLKS

SEQ ID NO: 15669 - DNA, 48 bp, synthetic construct; identical to SEQ ID NO: 15373
  misc_feature 1..48: note = Description of Artificial Sequence: Synthetic oligonucleotide
  source 1..48: mol_type = other DNA

SEQ ID NO: 15670 - protein, 16 aa, synthetic construct
  REGION 1..16: note = Description of Artificial Sequence: Synthetic peptide
YIYYSGSTYYNPSLKS

SEQ ID NO: 15671 - DNA, 48 bp, synthetic construct; identical to SEQ ID NO: 15605
  misc_feature 1..48: note = Description of Artificial Sequence: Synthetic oligonucleotide
  source 1..48: mol_type = other DNA

SEQ ID NO: 15672 - protein, 16 aa, synthetic construct
  REGION 1..16: note = Description of Artificial Sequence: Synthetic peptide
YIYYSGSTKYNPSLKS

SEQ ID NO: 15673 - DNA, 48 bp, synthetic construct; identical to SEQ ID NO: 12147
  misc_feature 1..48: note = Description of Artificial Sequence: Synthetic oligonucleotide
  source 1..48: mol_type = other DNA

SEQ ID NO: 15674 - protein, 16 aa, synthetic construct
  REGION 1..16: note = Description of Artificial Sequence: Synthetic peptide
YIYYSGSTYYNPSLKS

SEQ ID NO: 15675 - DNA, 48 bp, synthetic construct
  misc_feature 1..48: note = Description of Artificial Sequence: Synthetic oligonucleotide
  source 1..48: mol_type = other DNA
tacatctattacagagggagcacctactacaacccgtccctcaagagt

SEQ ID NO: 15676 - protein, 16 aa, synthetic construct
  REGION 1..16: note = Description of Artificial Sequence: Synthetic peptide
YIYYRGSTYYNPSLKS

SEQ ID NO: 15677 - DNA, 54 bp, synthetic construct
  misc_feature 1..54: note = Description of Artificial Sequence: Synthetic oligonucleotide
  source 1..54: mol_type = other DNA
aggacatactacaggtccaagtggtatcatgtttatgcagtatctgtgaaaagt

SEQ ID NO: 15678 - protein, 18 aa, synthetic construct
  REGION 1..18: note = Description of Artificial Sequence: Synthetic peptide
RTYYRSKWYHVYAVSVKS

SEQ ID NO: 15679 - DNA, 51 bp, synthetic construct
  misc_feature 1..51: note = Description of Artificial Sequence: Synthetic oligonucleotide
  source 1..51: mol_type = other DNA
attatatggtttgatggaagtaatgaatactatgcagactccgtgaagggc

SEQ ID NO: 15680 - protein, 17 aa, synthetic construct
  REGION 1..17: note = Description of Artificial Sequence: Synthetic peptide
IIWFDGSNEYYADSVKG

SEQ ID NO: 15681 - DNA, 54 bp, synthetic construct
  misc_feature 1..54: note = Description of Artificial Sequence: Synthetic oligonucleotide
  source 1..54: mol_type = other DNA
aggacatactacaggtccaagtggtatcatgtttatgcactatctgtgaaaagt

SEQ ID NO: 15682 - protein, 18 aa, synthetic construct
  REGION 1..18: note = Description of Artificial Sequence: Synthetic peptide
RTYYRSKWYHVYALSVKS

SEQ ID NO: 15683 - DNA, 51 bp, synthetic construct; identical to SEQ ID NO: 15679
  misc_feature 1..51: note = Description of Artificial Sequence: Synthetic oligonucleotide
  source 1..51: mol_type = other DNA

SEQ ID NO: 15684 - protein, 17 aa, synthetic construct
  REGION 1..17: note = Description of Artificial Sequence: Synthetic peptide
IIWFDGSNEYYADSVKG

SEQ ID NO: 15685 - DNA, 51 bp, synthetic construct; identical to SEQ ID NO: 12123
  misc_feature 1..51: note = Description of Artificial Sequence: Synthetic oligonucleotide
  source 1..51: mol_type = other DNA

SEQ ID NO: 15686 - protein, 17 aa, synthetic construct
  REGION 1..17: note = Description of Artificial Sequence: Synthetic peptide
VIWYDGSNKYYADSVKG

SEQ ID NO: 15687 - DNA, 51 bp, synthetic construct
  misc_feature 1..51: note = Description of Artificial Sequence: Synthetic oligonucleotide
  source 1..51: mol_type = other DNA
tacattagtagtagtagtagtatcaaaaagtacgcagactctgtgaagggc

SEQ ID NO: 15688 - protein, 17 aa, synthetic construct
  REGION 1..17: note = Description of Artificial Sequence: Synthetic peptide
YISSSSSIKKYADSVKG

SEQ ID NO: 15689 - DNA, 51 bp, synthetic construct; identical to SEQ ID NO: 12123
  misc_feature 1..51: note = Description of Artificial Sequence: Synthetic oligonucleotide
  source 1..51: mol_type = other DNA

SEQ ID NO: 15690 - protein, 17 aa, synthetic construct
  REGION 1..17: note = Description of Artificial Sequence: Synthetic peptide
VIWYDGSNKYYADSVKG

SEQ ID NO: 15691 - DNA, 48 bp, synthetic construct
  misc_feature 1..48: note = Description of Artificial Sequence: Synthetic oligonucleotide
  source 1..48: mol_type = other DNA
tacatctattacattgggaccacctactacaacccgtccctcaagagt

SEQ ID NO: 15692 - protein, 16 aa, synthetic construct
  REGION 1..16: note = Description of Artificial Sequence: Synthetic peptide
YIYYIGTTYYNPSLKS

SEQ ID NO: 15693 - DNA, 51 bp, synthetic construct; identical to SEQ ID NO: 12197
  misc_feature 1..51: note = Description of Artificial Sequence: Synthetic oligonucleotide
  source 1..51: mol_type = other DNA

SEQ ID NO: 15694 - protein, 17 aa, synthetic construct
  REGION 1..17: note = Description of Artificial Sequence: Synthetic peptide
WINPNSGGTNYAQKFQG

SEQ ID NO: 15695 - DNA, 51 bp, synthetic construct; identical to SEQ ID NO: 12123
  misc_feature 1..51: note = Description of Artificial Sequence: Synthetic oligonucleotide
  source 1..51: mol_type = other DNA

SEQ ID NO: 15696 - protein, 17 aa, synthetic construct
  REGION 1..17: note = Description of Artificial Sequence: Synthetic peptide
VIWYDGSNKYYADSVKG

SEQ ID NO: 15697 - DNA, 51 bp, synthetic construct; identical to SEQ ID NO: 12123
  misc_feature 1..51: note = Description of Artificial Sequence: Synthetic oligonucleotide
  source 1..51: mol_type = other DNA

SEQ ID NO: 15698 - protein, 17 aa, synthetic construct
  REGION 1..17: note = Description of Artificial Sequence: Synthetic peptide
VIWYDGSNKYYADSVKG

SEQ ID NO: 15699 - DNA, 51 bp, synthetic construct; identical to SEQ ID NO: 12123
  misc_feature 1..51: note = Description of Artificial Sequence: Synthetic oligonucleotide
  source 1..51: mol_type = other DNA

SEQ ID NO: 15700 - protein, 17 aa, synthetic construct
  REGION 1..17: note = Description of Artificial Sequence: Synthetic peptide
VIWYDGSNKYYADSVKG

SEQ ID NO: 15701 - DNA, 51 bp, synthetic construct; identical to SEQ ID NO: 12123
  misc_feature 1..51: note = Description of Artificial Sequence: Synthetic oligonucleotide
  source 1..51: mol_type = other DNA

SEQ ID NO: 15702 - protein, 17 aa, synthetic construct
  REGION 1..17: note = Description of Artificial Sequence: Synthetic peptide
VIWYDGSNKYYADSVKG

SEQ ID NO: 15703 - DNA, 51 bp, synthetic construct
  misc_feature 1..51: note = Description of Artificial Sequence: Synthetic oligonucleotide
  source 1..51: mol_type = other DNA
attatatggtttgatggaagtgatcaatactatgcagactccgtgaagggc

SEQ ID NO: 15704 - protein, 17 aa, synthetic construct
  REGION 1..17: note = Description of Artificial Sequence: Synthetic peptide
IIWFDGSDQYYADSVKG

SEQ ID NO: 15705 - DNA, 51 bp, synthetic construct; identical to SEQ ID NO: 12123
  misc_feature 1..51: note = Description of Artificial Sequence: Synthetic oligonucleotide
  source 1..51: mol_type = other DNA

SEQ ID NO: 15706 - protein, 17 aa, synthetic construct
  REGION 1..17: note = Description of Artificial Sequence: Synthetic peptide
VIWYDGSNKYYADSVKG

SEQ ID NO: 15707 - DNA, 48 bp, synthetic construct
  misc_feature 1..48: note = Description of Artificial Sequence: Synthetic oligonucleotide
  source 1..48: mol_type = other DNA
tacatctattacgttgggagcacctactacaacccgtccctcaagagt

SEQ ID NO: 15708 - protein, 16 aa, synthetic construct
  REGION 1..16: note = Description of Artificial Sequence: Synthetic peptide
YIYYVGSTYYNPSLKS

SEQ ID NO: 15709 - DNA, 48 bp, synthetic construct; identical to SEQ ID NO: 15373
  misc_feature 1..48: note = Description of Artificial Sequence: Synthetic oligonucleotide
  source 1..48: mol_type = other DNA

SEQ ID NO: 15710 - protein, 16 aa, synthetic construct
  REGION 1..16: note = Description of Artificial Sequence: Synthetic peptide
YIYYSGSTYYNPSLKS

SEQ ID NO: 15711 - DNA, 48 bp, synthetic construct
  misc_feature 1..48: note = Description of Artificial Sequence: Synthetic oligonucleotide
  source 1..48: mol_type = other DNA
tacatctattacactgggagcaactactacaacccgtccctcaagagt

SEQ ID NO: 15712 - protein, 16 aa, synthetic construct
  REGION 1..16: note = Description of Artificial Sequence: Synthetic peptide
YIYYTGSNYYNPSLKS

SEQ ID NO: 15713 - DNA, 51 bp, synthetic construct; identical to SEQ ID NO: 12123
  misc_feature 1..51: note = Description of Artificial Sequence: Synthetic oligonucleotide
  source 1..51: mol_type = other DNA

SEQ ID NO: 15714 - protein, 17 aa, synthetic construct
  REGION 1..17: note = Description of Artificial Sequence: Synthetic peptide
VIWYDGSNKYYADSVKG

SEQ ID NO: 15715 - DNA, 51 bp, synthetic construct; identical to SEQ ID NO: 12123
  misc_feature 1..51: note = Description of Artificial Sequence: Synthetic oligonucleotide
  source 1..51: mol_type = other DNA

SEQ ID NO: 15716 - protein, 17 aa, synthetic construct
  REGION 1..17: note = Description of Artificial Sequence: Synthetic peptide
VIWYDGSNKYYADSVKG

SEQ ID NO: 15717 - DNA, 51 bp, synthetic construct
  misc_feature 1..51: note = Description of Artificial Sequence: Synthetic oligonucleotide
  source 1..51: mol_type = other DNA
gttatatggtatgatggaagtaataaatactatgcggactccgtgaagggc

SEQ ID NO: 15718 - protein, 17 aa, synthetic construct
  REGION 1..17: note = Description of Artificial Sequence: Synthetic peptide
VIWYDGSNKYYADSVKG

SEQ ID NO: 15719 - DNA, 51 bp, synthetic construct
  misc_feature 1..51: note = Description of Artificial Sequence: Synthetic oligonucleotide
  source 1..51: mol_type = other DNA
gttatatggtatgatggaagtaataaatactgtgcagactccgtgaagggc

SEQ ID NO: 15720 - protein, 17 aa, synthetic construct
  REGION 1..17: note = Description of Artificial Sequence: Synthetic peptide
VIWYDGSNKYCADSVKG

SEQ ID NO: 15721 - DNA, 48 bp, synthetic construct
  misc_feature 1..48: note = Description of Artificial Sequence: Synthetic oligonucleotide
  source 1..48: mol_type = other DNA
tatatgtattacagtgggagcacctactacaacccgtccctcaagagt

SEQ ID NO: 15722 - protein, 16 aa, synthetic construct
  REGION 1..16: note = Description of Artificial Sequence: Synthetic peptide
YMYYSGSTYYNPSLKS

SEQ ID NO: 15723 - DNA, 48 bp, synthetic construct; identical to SEQ ID NO: 12147
  misc_feature 1..48: note = Description of Artificial Sequence: Synthetic oligonucleotide
  source 1..48: mol_type = other DNA

SEQ ID NO: 15724 - protein, 16 aa, synthetic construct
  REGION 1..16: note = Description of Artificial Sequence: Synthetic peptide
YIYYSGSTYYNPSLKS

SEQ ID NO: 15725 - DNA, 51 bp, synthetic construct; identical to SEQ ID NO: 12123
  misc_feature 1..51: note = Description of Artificial Sequence: Synthetic oligonucleotide
  source 1..51: mol_type = other DNA

SEQ ID NO: 15726 - protein, 17 aa, synthetic construct
  REGION 1..17: note = Description of Artificial Sequence: Synthetic peptide
VIWYDGSNKYYADSVKG

SEQ ID NO: 15727 - DNA, 51 bp, synthetic construct; identical to SEQ ID NO: 12123
  misc_feature 1..51: note = Description of Artificial Sequence: Synthetic oligonucleotide
  source 1..51: mol_type = other DNA

SEQ ID NO: 15728 - protein, 17 aa, synthetic construct
  REGION 1..17: note = Description of Artificial Sequence: Synthetic peptide
VIWYDGSNKYYADSVKG

SEQ ID NO: 15729 - DNA, 48 bp, synthetic construct; identical to SEQ ID NO: 15373
  misc_feature 1..48: note = Description of Artificial Sequence: Synthetic oligonucleotide
  source 1..48: mol_type = other DNA

SEQ ID NO: 15730 - protein, 16 aa, synthetic construct
  REGION 1..16: note = Description of Artificial Sequence: Synthetic peptide
YIYYSGSTYYNPSLKS

SEQ ID NO: 15731 - DNA, 51 bp, synthetic construct
  misc_feature 1..51: note = Description of Artificial Sequence: Synthetic oligonucleotide
  source 1..51: mol_type = other DNA
tggatcaaccctaagaatggtggcacaaactatgcacagaagtttcagggc

SEQ ID NO: 15732 - protein, 17 aa, synthetic construct
  REGION 1..17: note = Description of Artificial Sequence: Synthetic peptide
WINPKNGGTNYAQKFQG

SEQ ID NO: 15733 - DNA, 48 bp, synthetic construct; identical to SEQ ID NO: 12147
  misc_feature 1..48: note = Description of Artificial Sequence: Synthetic oligonucleotide
  source 1..48: mol_type = other DNA

SEQ ID NO: 15734 - protein, 16 aa, synthetic construct
  REGION 1..16: note = Description of Artificial Sequence: Synthetic peptide
YIYYSGSTYYNPSLKS

SEQ ID NO: 15735 - DNA, 48 bp, synthetic construct
  misc_feature 1..48: note = Description of Artificial Sequence: Synthetic oligonucleotide
  source 1..48: mol_type = other DNA
tacatctatttcagtgggagcacctactacaacccgtccctcaagagt

SEQ ID NO: 15736 - protein, 16 aa, synthetic construct
  REGION 1..16: note = Description of Artificial Sequence: Synthetic peptide
YIYFSGSTYYNPSLKS

SEQ ID NO: 15737 - DNA, 48 bp, synthetic construct; identical to SEQ ID NO: 15627
  misc_feature 1..48: note = Description of Artificial Sequence: Synthetic oligonucleotide
  source 1..48: mol_type = other DNA

SEQ ID NO: 15738 - protein, 16 aa, synthetic construct
  REGION 1..16: note = Description of Artificial Sequence: Synthetic peptide
YIYYSGPTYYNPSLKS

SEQ ID NO: 15739 - DNA, 48 bp, synthetic construct; identical to SEQ ID NO: 15711
  misc_feature 1..48: note = Description of Artificial Sequence: Synthetic oligonucleotide
  source 1..48: mol_type = other DNA

SEQ ID NO: 15740 - protein, 16 aa, synthetic construct
  REGION 1..16: note = Description of Artificial Sequence: Synthetic peptide
YIYYTGSNYYNPSLKS

SEQ ID NO: 15741 - DNA, 57 bp, synthetic construct
  misc_feature 1..57: note = Description of Artificial Sequence: Synthetic oligonucleotide
  source 1..57: mol_type = other DNA
cgtattaaaagcaaaactaatggtgggacaacagactacgctgcacccgtgaaaggc

SEQ ID NO: 15742 - protein, 19 aa, synthetic construct
  REGION 1..19: note = Description of Artificial Sequence: Synthetic peptide
RIKSKTNGGTTDYAAPVKG

SEQ ID NO: 15743 - DNA, 51 bp, synthetic construct
  misc_feature 1..51: note = Description of Artificial Sequence: Synthetic oligonucleotide
  source 1..51: mol_type = other DNA
gttatatggtatgatggaagtaatgagtactatgcagactccgtgaagggc

SEQ ID NO: 15744 - protein, 17 aa, synthetic construct
  REGION 1..17: note = Description of Artificial Sequence: Synthetic peptide
VIWYDGSNEYYADSVKG

SEQ ID NO: 15745 - DNA, 48 bp, synthetic construct; identical to SEQ ID NO: 15721
  misc_feature 1..48: note = Description of Artificial Sequence: Synthetic oligonucleotide
  source 1..48: mol_type = other DNA

SEQ ID NO: 15746 - protein, 16 aa, synthetic construct
  REGION 1..16: note = Description of Artificial Sequence: Synthetic peptide
YMYYSGSTYYNPSLKS

SEQ ID NO: 15747 - DNA, 51 bp, synthetic construct; identical to SEQ ID NO: 12123
  misc_feature 1..51: note = Description of Artificial Sequence: Synthetic oligonucleotide
  source 1..51: mol_type = other DNA

SEQ ID NO: 15748 - protein, 17 aa, synthetic construct
  REGION 1..17: note = Description of Artificial Sequence: Synthetic peptide
VIWYDGSNKYYADSVKG

SEQ ID NO: 15749 - DNA, 48 bp, synthetic construct; identical to SEQ ID NO: 15721
  misc_feature 1..48: note = Description of Artificial Sequence: Synthetic oligonucleotide
  source 1..48: mol_type = other DNA

SEQ ID NO: 15750 - protein, 16 aa, synthetic construct
  REGION 1..16: note = Description of Artificial Sequence: Synthetic peptide
YMYYSGSTYYNPSLKS

SEQ ID NO: 15751 - DNA, 48 bp, synthetic construct; identical to SEQ ID NO: 15627
  misc_feature 1..48: note = Description of Artificial Sequence: Synthetic oligonucleotide
  source 1..48: mol_type = other DNA

SEQ ID NO: 15752 - protein, 16 aa, synthetic construct
  REGION 1..16: note = Description of Artificial Sequence: Synthetic peptide
YIYYSGPTYYNPSLKS

SEQ ID NO: 15753 - DNA, 51 bp, synthetic construct; identical to SEQ ID NO: 12123
  misc_feature 1..51: note = Description of Artificial Sequence: Synthetic oligonucleotide
  source 1..51: mol_type = other DNA

SEQ ID NO: 15754 - protein, 17 aa, synthetic construct
  REGION 1..17: note = Description of Artificial Sequence: Synthetic peptide
VIWYDGSNKYYADSVKG

SEQ ID NO: 15755 - DNA, 51 bp, synthetic construct; identical to SEQ ID NO: 12123
  misc_feature 1..51: note = Description of Artificial Sequence: Synthetic oligonucleotide
  source 1..51: mol_type = other DNA

SEQ ID NO: 15756 - protein, 17 aa, synthetic construct
  REGION 1..17: note = Description of Artificial Sequence: Synthetic peptide
VIWYDGSNKYYADSVKG

SEQ ID NO: 15757 - DNA, 51 bp, synthetic construct
  misc_feature 1..51: note = Description of Artificial Sequence: Synthetic oligonucleotide
  source 1..51: mol_type = other DNA
attatatggtttgatggaagtgatgaatactatgcagactccgtgaagggc

SEQ ID NO: 15758 - protein, 17 aa, synthetic construct
  REGION 1..17: note = Description of Artificial Sequence: Synthetic peptide
IIWFDGSDEYYADSVKG

SEQ ID NO: 15759 - DNA, 51 bp, synthetic construct
  misc_feature 1..51: note = Description of Artificial Sequence: Synthetic oligonucleotide
  source 1..51: mol_type = other DNA
attatatggtttgatggaagtgatcagtactatgcagactccgtgaagggc

SEQ ID NO: 15760 - protein, 17 aa, synthetic construct
  REGION 1..17: note = Description of Artificial Sequence: Synthetic peptide
IIWFDGSDQYYADSVKG

SEQ ID NO: 15761 - DNA, 51 bp, synthetic construct; identical to SEQ ID NO: 12123
  misc_feature 1..51: note = Description of Artificial Sequence: Synthetic oligonucleotide
  source 1..51: mol_type = other DNA

SEQ ID NO: 15762 - protein, 17 aa, synthetic construct
  REGION 1..17: note = Description of Artificial Sequence: Synthetic peptide
VIWYDGSNKYYADSVKG

SEQ ID NO: 15763 - DNA, 51 bp, synthetic construct; identical to SEQ ID NO: 15757
  misc_feature 1..51: note = Description of Artificial Sequence: Synthetic oligonucleotide
  source 1..51: mol_type = other DNA

SEQ ID NO: 15764 - protein, 17 aa, synthetic construct
  REGION 1..17: note = Description of Artificial Sequence: Synthetic peptide
IIWFDGSDEYYADSVKG

SEQ ID NO: 15765 - DNA, 51 bp, synthetic construct; identical to SEQ ID NO: 13585
  misc_feature 1..51: note = Description of Artificial Sequence: Synthetic oligonucleotide
  source 1..51: mol_type = other DNA

SEQ ID NO: 15766 - protein, 17 aa, synthetic construct
  REGION 1..17: note = Description of Artificial Sequence: Synthetic peptide
VIWYDGSNKYYADSVKG

SEQ ID NO: 15767 - DNA, 51 bp, synthetic construct; identical to SEQ ID NO: 12123
  misc_feature 1..51: note = Description of Artificial Sequence: Synthetic oligonucleotide
  source 1..51: mol_type = other DNA

SEQ ID NO: 15768 - protein, 17 aa, synthetic construct
  REGION 1..17: note = Description of Artificial Sequence: Synthetic peptide
VIWYDGSNKYYADSVKG

SEQ ID NO: 15769 - DNA, 51 bp, synthetic construct; identical to SEQ ID NO: 12123
  misc_feature 1..51: note = Description of Artificial Sequence: Synthetic oligonucleotide
  source 1..51: mol_type = other DNA

SEQ ID NO: 15770 - protein, 17 aa, synthetic construct
  REGION 1..17: note = Description of Artificial Sequence: Synthetic peptide
VIWYDGSNKYYADSVKG

SEQ ID NO: 15771 - DNA, 54 bp, synthetic construct; identical to SEQ ID NO: 12237
  misc_feature 1..54: note = Description of Artificial Sequence: Synthetic oligonucleotide
  source 1..54: mol_type = other DNA

SEQ ID NO: 15772 - protein, 18 aa, synthetic construct
  REGION 1..18: note = Description of Artificial Sequence: Synthetic peptide
RTYYRSKWYNDYAVSVKS

SEQ ID NO: 15773 - DNA, 51 bp, synthetic construct
  misc_feature 1..51: note = Description of Artificial Sequence: Synthetic oligonucleotide
  source 1..51: mol_type = other DNA
tggatcaaccctaaaaatggtggcacaaactatgcacagaagtttcagggc

SEQ ID NO: 15774 - protein, 17 aa, synthetic construct
  REGION 1..17: note = Description of Artificial Sequence: Synthetic peptide
WINPKNGGTNYAQKFQG

SEQ ID NO: 15775 - DNA, 51 bp, synthetic construct; identical to SEQ ID NO: 12123
  misc_feature 1..51: note = Description of Artificial Sequence: Synthetic oligonucleotide
  source 1..51: mol_type = other DNA

SEQ ID NO: 15776 - protein, 17 aa, synthetic construct
  REGION 1..17: note = Description of Artificial Sequence: Synthetic peptide
VIWYDGSNKYYADSVKG

SEQ ID NO: 15777 - DNA, 51 bp, synthetic construct
  misc_feature 1..51: note = Description of Artificial Sequence: Synthetic oligonucleotide
  source 1..51: mol_type = other DNA
gttatgtggtatgatggaggtaataaagactatgcagactccgtgaagggc

SEQ ID NO: 15778 - protein, 17 aa, synthetic construct
  REGION 1..17: note = Description of Artificial Sequence: Synthetic peptide
VMWYDGGNKDYADSVKG

SEQ ID NO: 15779 - DNA, 51 bp, synthetic construct; identical to SEQ ID NO: 15291
  misc_feature 1..51: note = Description of Artificial Sequence: Synthetic oligonucleotide
  source 1..51: mol_type = other DNA

SEQ ID NO: 15780 - protein, 17 aa, synthetic construct
  REGION 1..17: note = Description of Artificial Sequence: Synthetic peptide
WINPNSGDTNYAQKFQG

SEQ ID NO: 15781 - DNA, 51 bp, synthetic construct
  misc_feature 1..51: note = Description of Artificial Sequence: Synthetic oligonucleotide
  source 1..51: mol_type = other DNA
tggatcaaccctaacagtggaggcacaaactatgcacagaagtttcaggac

SEQ ID NO: 15782 - protein, 17 aa, synthetic construct
  REGION 1..17: note = Description of Artificial Sequence: Synthetic peptide
WINPNSGGTNYAQKFQD

SEQ ID NO: 15783 - DNA, 51 bp, synthetic construct
  misc_feature 1..51: note = Description of Artificial Sequence: Synthetic oligonucleotide
  source 1..51: mol_type = other DNA
tggatcaaccctaacagtggtggcacaaactatgcacggaagtttcagggc

SEQ ID NO: 15784 - protein, 17 aa, synthetic construct
  REGION 1..17: note = Description of Artificial Sequence: Synthetic peptide
WINPNSGGTNYARKFQG

SEQ ID NO: 15785 - DNA, 51 bp, synthetic construct; identical to SEQ ID NO: 15291
  misc_feature 1..51: note = Description of Artificial Sequence: Synthetic oligonucleotide
  source 1..51: mol_type = other DNA

SEQ ID NO: 15786 - protein, 17 aa, synthetic construct
  REGION 1..17: note = Description of Artificial Sequence: Synthetic peptide
WINPNSGDTNYAQKFQG

SEQ ID NO: 15787 - DNA, 51 bp, synthetic construct
  misc_feature 1..51: note = Description of Artificial Sequence: Synthetic oligonucleotide
  source 1..51: mol_type = other DNA
tggatcaaccctaagagtggtggcacaaactttgcacagaagtttcagggc

SEQ ID NO: 15788 - protein, 17 aa, synthetic construct
  REGION 1..17: note = Description of Artificial Sequence: Synthetic peptide
WINPKSGGTNFAQKFQG

SEQ ID NO: 15789 - DNA, 51 bp, synthetic construct; identical to SEQ ID NO: 12421
  misc_feature 1..51: note = Description of Artificial Sequence: Synthetic oligonucleotide
  source 1..51: mol_type = other DNA

SEQ ID NO: 15790 - protein, 17 aa, synthetic construct
  REGION 1..17: note = Description of Artificial Sequence: Synthetic peptide
AISGSGGSTYYADSVKG

SEQ ID NO: 15791 - DNA, 51 bp, synthetic construct
  misc_feature 1..51: note = Description of Artificial Sequence: Synthetic oligonucleotide
  source 1..51: mol_type = other DNA
tggatcaaccctaagagtggtggcacaaactatgcacagaagtttcagggc

SEQ ID NO: 15792 - protein, 17 aa, synthetic construct
  REGION 1..17: note = Description of Artificial Sequence: Synthetic peptide
WINPKSGGTNYAQKFQG

SEQ ID NO: 15793 - DNA, 48 bp, synthetic construct; identical to SEQ ID NO: 12209
  misc_feature 1..48: note = Description of Artificial Sequence: Synthetic oligonucleotide
  source 1..48: mol_type = other DNA

SEQ ID NO: 15794 - protein, 16 aa, synthetic construct
  REGION 1..16: note = Description of Artificial Sequence: Synthetic peptide
LIYWNDDKVYSPSLKS

SEQ ID NO: 15795 - DNA, 51 bp, synthetic construct; identical to SEQ ID NO: 12619
  misc_feature 1..51: note = Description of Artificial Sequence: Synthetic oligonucleotide
  source 1..51: mol_type = other DNA

SEQ ID NO: 15796 - protein, 17 aa, synthetic construct
  REGION 1..17: note = Description of Artificial Sequence: Synthetic peptide
AISGRGGNTFYADSVKG

SEQ ID NO: 15797 - DNA, 51 bp, synthetic construct; identical to SEQ ID NO: 13333
  misc_feature 1..51: note = Description of Artificial Sequence: Synthetic oligonucleotide
  source 1..51: mol_type = other DNA

SEQ ID NO: 15798 - protein, 17 aa, synthetic construct
  REGION 1..17: note = Description of Artificial Sequence: Synthetic peptide
TMSGSGGRTYYADSVNG

SEQ ID NO: 15799 - DNA, 51 bp, synthetic construct; identical to SEQ ID NO: 12701
  misc_feature 1..51: note = Description of Artificial Sequence: Synthetic oligonucleotide
  source 1..51: mol_type = other DNA

SEQ ID NO: 15800 - protein, 17 aa, synthetic construct
  REGION 1..17: note = Description of Artificial Sequence: Synthetic peptide
SISGSSTYIYYADSVKG

SEQ ID NO: 15801 - DNA, 51 bp, synthetic construct; identical to SEQ ID NO: 12277
  misc_feature 1..51: note = Description of Artificial Sequence: Synthetic oligonucleotide
  source 1..51: mol_type = other DNA

SEQ ID NO: 15802 - protein, 17 aa, synthetic construct
  REGION 1..17: note = Description of Artificial Sequence: Synthetic peptide
SISGSSTDIYYADSVKG

SEQ ID NO: 15803 - DNA, 51 bp, synthetic construct
  misc_feature 1..51: note = Description of Artificial Sequence: Synthetic oligonucleotide
  source 1..51: mol_type = other DNA
tctattagtagtagtactggttacatatacaacgcagactcagtgaagggc

SEQ ID NO: 15804 - protein, 17 aa, synthetic construct
  REGION 1..17: note = Description of Artificial Sequence: Synthetic peptide
SISSSTGYIYNADSVKG

SEQ ID NO: 15805 - DNA, 51 bp, synthetic construct; identical to SEQ ID NO: 13377
  misc_feature 1..51: note = Description of Artificial Sequence: Synthetic oligonucleotide
  source 1..51: mol_type = other DNA

SEQ ID NO: 15806 - protein, 17 aa, synthetic construct
  REGION 1..17: note = Description of Artificial Sequence: Synthetic peptide
AISGSGGNTFYADSVKG

SEQ ID NO: 15807 - DNA, 51 bp, synthetic construct; identical to SEQ ID NO: 12361
  misc_feature 1..51: note = Description of Artificial Sequence: Synthetic oligonucleotide
  source 1..51: mol_type = other DNA

SEQ ID NO: 15808 - protein, 17 aa, synthetic construct
  REGION 1..17: note = Description of Artificial Sequence: Synthetic peptide
SISSSSSYIYYADSVKG

SEQ ID NO: 15809 - DNA, 51 bp, synthetic construct
  misc_feature 1..51: note = Description of Artificial Sequence: Synthetic oligonucleotide
  source 1..51: mol_type = other DNA
gctattagtggtagtggtgctaacacattctacgcagactccgtgaagggc

SEQ ID NO: 15810 - protein, 17 aa, synthetic construct
  REGION 1..17: note = Description of Artificial Sequence: Synthetic peptide
AISGSGANTFYADSVKG

SEQ ID NO: 15811 - DNA, 51 bp, synthetic construct; identical to SEQ ID NO: 13081
  misc_feature 1..51: note = Description of Artificial Sequence: Synthetic oligonucleotide
  source 1..51: mol_type = other DNA

SEQ ID NO: 15812 - protein, 17 aa, synthetic construct
  REGION 1..17: note = Description of Artificial Sequence: Synthetic peptide
WINPNNNGTNYAQKFQG

SEQ ID NO: 15813 - DNA, 48 bp, synthetic construct; identical to SEQ ID NO: 13749
  misc_feature 1..48: note = Description of Artificial Sequence: Synthetic oligonucleotide
  source 1..48: mol_type = other DNA

SEQ ID NO: 15814 - protein, 16 aa, synthetic construct
  REGION 1..16: note = Description of Artificial Sequence: Synthetic peptide
EINHSGDTNYNPSLKS

SEQ ID NO: 15815 - DNA, 51 bp, synthetic construct; identical to SEQ ID NO: 15289
  misc_feature 1..51: note = Description of Artificial Sequence: Synthetic oligonucleotide
  source 1..51: mol_type = other DNA

SEQ ID NO: 15816 - protein, 17 aa, synthetic construct
  REGION 1..17: note = Description of Artificial Sequence: Synthetic peptide
VISGGGSSTYYADSVKG

SEQ ID NO: 15817 - DNA, 51 bp, synthetic construct; identical to SEQ ID NO: 15279
  misc_feature 1..51: note = Description of Artificial Sequence: Synthetic oligonucleotide
  source 1..51: mol_type = other DNA

SEQ ID NO: 15818 - protein, 17 aa, synthetic construct
  REGION 1..17: note = Description of Artificial Sequence: Synthetic peptide
VISGGGSSTYYADSVKG

SEQ ID NO: 15819 - DNA, 51 bp, synthetic construct
  misc_feature 1..51: note = Description of Artificial Sequence: Synthetic oligonucleotide
  source 1..51: mol_type = other DNA
tttatatggtatgatggaagtgagaactactatgcagactccgtgaagggc

SEQ ID NO: 15820 - protein, 17 aa, synthetic construct
  REGION 1..17: note = Description of Artificial Sequence: Synthetic peptide
FIWYDGSENYYADSVKG

SEQ ID NO: 15821 - DNA, 51 bp, synthetic construct; identical to SEQ ID NO: 15819
  misc_feature 1..51: note = Description of Artificial Sequence: Synthetic oligonucleotide
  source 1..51: mol_type = other DNA

SEQ ID NO: 15822 - protein, 17 aa, synthetic construct
  REGION 1..17: note = Description of Artificial Sequence: Synthetic peptide
FIWYDGSENYYADSVKG

SEQ ID NO: 15823 - DNA, 51 bp, synthetic construct
  misc_feature 1..51: note = Description of Artificial Sequence: Synthetic oligonucleotide
  source 1..51: mol_type = other DNA
gttatatggtatggtggaagtgatacagactatgcagactccgtgaggggc

SEQ ID NO: 15824 - protein, 17 aa, synthetic construct
  REGION 1..17: note = Description of Artificial Sequence: Synthetic peptide
VIWYGGSDTDYADSVRG

SEQ ID NO: 15825 - DNA, 51 bp, synthetic construct
  misc_feature 1..51: note = Description of Artificial Sequence: Synthetic oligonucleotide
  source 1..51: mol_type = other DNA
tggatcaagcctaaaagcggtggcacaaactgtgcacagaagtttcagggc

SEQ ID NO: 15826 - protein, 17 aa, synthetic construct
  REGION 1..17: note = Description of Artificial Sequence: Synthetic peptide
WIKPKSGGTNCAQKFQG

SEQ ID NO: 15827 - DNA, 51 bp, synthetic construct
  misc_feature 1..51: note = Description of Artificial Sequence: Synthetic oligonucleotide
  source 1..51: mol_type = other DNA
tacattagcagtagtggtagtaccaaatactacgcagactctgtggagggc

SEQ ID NO: 15828 - protein, 17 aa, synthetic construct
  REGION 1..17: note = Description of Artificial Sequence: Synthetic peptide
YISSSGSTKYYADSVEG

SEQ ID NO: 15829 - DNA, 51 bp, synthetic construct; identical to SEQ ID NO: 14445
  misc_feature 1..51: note = Description of Artificial Sequence: Synthetic oligonucleotide
  source 1..51: mol_type = other DNA

SEQ ID NO: 15830 - protein, 17 aa, synthetic construct
  REGION 1..17: note = Description of Artificial Sequence: Synthetic peptide
WIKPKSGGTNSAQRFQG

SEQ ID NO: 15831 - DNA, 51 bp, synthetic construct; identical to SEQ ID NO: 14445
  misc_feature 1..51: note = Description of Artificial Sequence: Synthetic oligonucleotide
  source 1..51: mol_type = other DNA

SEQ ID NO: 15832 - protein, 17 aa, synthetic construct
  REGION 1..17: note = Description of Artificial Sequence: Synthetic peptide
WIKPKSGGTNSAQRFQG

SEQ ID NO: 15833 - DNA, 51 bp, synthetic construct; identical to SEQ ID NO: 14581
  misc_feature 1..51: note = Description of Artificial Sequence: Synthetic oligonucleotide
  source 1..51: mol_type = other DNA

SEQ ID NO: 15834 - protein, 17 aa, synthetic construct
  REGION 1..17: note = Description of Artificial Sequence: Synthetic peptide
IIWFDGSNKYYADSVKG

SEQ ID NO: 15835 - DNA, 51 bp, synthetic construct
  misc_feature 1..51: note = Description of Artificial Sequence: Synthetic oligonucleotide
  source 1..51: mol_type = other DNA
tggatcaagcctaaaagtggtggcacaaactgtgcacagaagtttcagggc

SEQ ID NO: 15836 - protein, 17 aa, synthetic construct
  REGION 1..17: note = Description of Artificial Sequence: Synthetic peptide
WIKPKSGGTNCAQKFQG

SEQ ID NO: 15837 - DNA, 51 bp, synthetic construct
  misc_feature 1..51: note = Description of Artificial Sequence: Synthetic oligonucleotide
  source 1..51: mol_type = other DNA
gttatatggtatgatggaagtaatagaaactatgcagactccgtgaagggc

SEQ ID NO: 15838 - protein, 17 aa, synthetic construct
  REGION 1..17: note = Description of Artificial Sequence: Synthetic peptide
VIWYDGSNRNYADSVKG

SEQ ID NO: 15839 - DNA, 51 bp, synthetic construct
  misc_feature 1..51: note = Description of Artificial Sequence: Synthetic oligonucleotide
  source 1..51: mol_type = other DNA
gttatatggtatgatggaggtaatacacattatacagactccgtgaagggc

SEQ ID NO: 15840 - protein, 17 aa, synthetic construct
  REGION 1..17: note = Description of Artificial Sequence: Synthetic peptide
VIWYDGGNTHYTDSVKG

SEQ ID NO: 15841 - DNA, 51 bp, synthetic construct; identical to SEQ ID NO: 12421
  misc_feature 1..51: note = Description of Artificial Sequence: Synthetic oligonucleotide
  source 1..51: mol_type = other DNA

SEQ ID NO: 15842 - protein, 17 aa, synthetic construct
  REGION 1..17: note = Description of Artificial Sequence: Synthetic peptide
AISGSGGSTYYADSVKG

SEQ ID NO: 15843 - DNA, 51 bp, synthetic construct; identical to SEQ ID NO: 12133
  misc_feature 1..51: note = Description of Artificial Sequence: Synthetic oligonucleotide
  source 1..51: mol_type = other DNA

SEQ ID NO: 15844 - protein, 17 aa, synthetic construct
  REGION 1..17: note = Description of Artificial Sequence: Synthetic peptide
VIWYDGSNKYYVDSVKG

SEQ ID NO: 15845 - DNA, 51 bp, synthetic construct; identical to SEQ ID NO: 12133
  misc_feature 1..51: note = Description of Artificial Sequence: Synthetic oligonucleotide
  source 1..51: mol_type = other DNA

SEQ ID NO: 15846 - protein, 17 aa, synthetic construct
  REGION 1..17: note = Description of Artificial Sequence: Synthetic peptide
VIWYDGSNKYYVDSVKG

SEQ ID NO: 15847 - DNA, 48 bp, synthetic construct; identical to SEQ ID NO: 12147
  misc_feature 1..48: note = Description of Artificial Sequence: Synthetic oligonucleotide
  source 1..48: mol_type = other DNA

SEQ ID NO: 15848 - protein, 16 aa, synthetic construct
  REGION 1..16: note = Description of Artificial Sequence: Synthetic peptide
YIYYSGSTYYNPSLKS

SEQ ID NO: 15849 - DNA, 51 bp, synthetic construct
  misc_feature 1..51: note = Description of Artificial Sequence: Synthetic oligonucleotide
  source 1..51: mol_type = other DNA
attatatcatatagtggaagtaataaatactatgcagactccgtgaagggc

SEQ ID NO: 15850 - protein, 17 aa, synthetic construct
  REGION 1..17: note = Description of Artificial Sequence: Synthetic peptide
IISYSGSNKYYADSVKG

SEQ ID NO: 15851 - DNA, 48 bp, synthetic construct; identical to SEQ ID NO: 13749
  misc_feature 1..48: note = Description of Artificial Sequence: Synthetic oligonucleotide
  source 1..48: mol_type = other DNA

SEQ ID NO: 15852 - protein, 16 aa, synthetic construct
  REGION 1..16: note = Description of Artificial Sequence: Synthetic peptide
EINHSGDTNYNPSLKS

SEQ ID NO: 15853 - DNA, 51 bp, synthetic construct; identical to SEQ ID NO: 12161
  misc_feature 1..51: note = Description of Artificial Sequence: Synthetic oligonucleotide
  source 1..51: mol_type = other DNA

SEQ ID NO: 15854 - protein, 17 aa, synthetic construct
  REGION 1..17: note = Description of Artificial Sequence: Synthetic peptide
WMHPNSGNTGYAQKFQG

SEQ ID NO: 15855 - DNA, 48 bp, synthetic construct; identical to SEQ ID NO: 13715
  misc_feature 1..48: note = Description of Artificial Sequence: Synthetic oligonucleotide
  source 1..48: mol_type = other DNA

SEQ ID NO: 15856 - protein, 16 aa, synthetic construct
  REGION 1..16: note = Description of Artificial Sequence: Synthetic peptide
EINHSGSTNYNPSLKS

SEQ ID NO: 15857 - DNA, 51 bp, synthetic construct; identical to SEQ ID NO: 13645
  misc_feature 1..51: note = Description of Artificial Sequence: Synthetic oligonucleotide
  source 1..51: mol_type = other DNA

SEQ ID NO: 15858 - protein, 17 aa, synthetic construct
  REGION 1..17: note = Description of Artificial Sequence: Synthetic peptide
VIWYDGSDKYYADSVKG

SEQ ID NO: 15859 - DNA, 48 bp, synthetic construct; identical to SEQ ID NO: 13715
  misc_feature 1..48: note = Description of Artificial Sequence: Synthetic oligonucleotide
  source 1..48: mol_type = other DNA

SEQ ID NO: 15860 - protein, 16 aa, synthetic construct
  REGION 1..16: note = Description of Artificial Sequence: Synthetic peptide
EINHSGSTNYNPSLKS

SEQ ID NO: 15861 - DNA, 48 bp, synthetic construct; identical to SEQ ID NO: 13715
  misc_feature 1..48: note = Description of Artificial Sequence: Synthetic oligonucleotide
  source 1..48: mol_type = other DNA

SEQ ID NO: 15862 - protein, 16 aa, synthetic construct
  REGION 1..16: note = Description of Artificial Sequence: Synthetic peptide
EINHSGSTNYNPSLKS

SEQ ID NO: 15863 - DNA, 48 bp, synthetic construct; identical to SEQ ID NO: 12761
  misc_feature 1..48: note = Description of Artificial Sequence: Synthetic oligonucleotide
  source 1..48: mol_type = other DNA

SEQ ID NO: 15864 - protein, 16 aa, synthetic construct
  REGION 1..16: note = Description of Artificial Sequence: Synthetic peptide
LIYWDDDKRYSPSLKS

SEQ ID NO: 15865 - DNA, 48 bp, synthetic construct; identical to SEQ ID NO: 13731
  misc_feature 1..48: note = Description of Artificial Sequence: Synthetic oligonucleotide
  source 1..48: mol_type = other DNA

SEQ ID NO: 15866 - protein, 16 aa, synthetic construct
  REGION 1..16: note = Description of Artificial Sequence: Synthetic peptide
EINHSGRTNYNPSLKS

SEQ ID NO: 15867 - DNA, 48 bp, synthetic construct; identical to SEQ ID NO: 13715
  misc_feature 1..48: note = Description of Artificial Sequence: Synthetic oligonucleotide
  source 1..48: mol_type = other DNA

SEQ ID NO: 15868 - protein, 16 aa, synthetic construct
  REGION 1..16: note = Description of Artificial Sequence: Synthetic peptide
EINHSGSTNYNPSLKS

SEQ ID NO: 15869 - DNA, 48 bp, synthetic construct; identical to SEQ ID NO: 12165
  misc_feature 1..48: note = Description of Artificial Sequence: Synthetic oligonucleotide
  source 1..48: mol_type = other DNA

SEQ ID NO: 15870 - protein, 16 aa, synthetic construct
  REGION 1..16: note = Description of Artificial Sequence: Synthetic peptide
SIYYSGSAYSNPSLKS

SEQ ID NO: 15871 - DNA, 48 bp, synthetic construct; identical to SEQ ID NO: 13715
  misc_feature 1..48: note = Description of Artificial Sequence: Synthetic oligonucleotide
  source 1..48: mol_type = other DNA

SEQ ID NO: 15872 - protein, 16 aa, synthetic construct
  REGION 1..16: note = Description of Artificial Sequence: Synthetic peptide
EINHSGSTNYNPSLKS

SEQ ID NO: 15873 - DNA, 51 bp, synthetic construct; identical to SEQ ID NO: 12103
  misc_feature 1..51: note = Description of Artificial Sequence: Synthetic oligonucleotide
  source 1..51: mol_type = other DNA

SEQ ID NO: 15874 - protein, 17 aa, synthetic construct
  REGION 1..17: note = Description of Artificial Sequence: Synthetic peptide
WMNPNSGNTGYAQKFQG

SEQ ID NO: 15875 - DNA, 51 bp, synthetic construct
  misc_feature 1..51: note = Description of Artificial Sequence: Synthetic oligonucleotide
  source 1..51: mol_type = other DNA
tggatgaaccctgacagtggtaacacaggctttgcacagaagttccagggc

SEQ ID NO: 15876 - protein, 17 aa, synthetic construct
  REGION 1..17: note = Description of Artificial Sequence: Synthetic peptide
WMNPDSGNTGFAQKFQG

SEQ ID NO: 15877 - DNA, 51 bp, synthetic construct
  misc_feature 1..51: note = Description of Artificial Sequence: Synthetic oligonucleotide
  source 1..51: mol_type = other DNA
tggatgaaccctaacagtggtaacataggctatgcacagaagttccagggc

SEQ ID NO: 15878 - protein, 17 aa, synthetic construct
  REGION 1..17: note = Description of Artificial Sequence: Synthetic peptide
WMNPNSGNIGYAQKFQG

SEQ ID NO: 15879 - DNA, 48 bp, synthetic construct; identical to SEQ ID NO: 13715
  misc_feature 1..48: note = Description of Artificial Sequence: Synthetic oligonucleotide
  source 1..48: mol_type = other DNA

SEQ ID NO: 15880 - protein, 16 aa, synthetic construct
  REGION 1..16: note = Description of Artificial Sequence: Synthetic peptide
EINHSGSTNYNPSLKS

SEQ ID NO: 15881 - DNA, 48 bp, synthetic construct; identical to SEQ ID NO: 13761
  misc_feature 1..48: note = Description of Artificial Sequence: Synthetic oligonucleotide
  source 1..48: mol_type = other DNA

SEQ ID NO: 15882 - protein, 16 aa, synthetic construct
  REGION 1..16: note = Description of Artificial Sequence: Synthetic peptide
AIGTAGDTYYPGSVKG

SEQ ID NO: 15883 - DNA, 48 bp, synthetic construct; identical to SEQ ID NO: 12761
  misc_feature 1..48: note = Description of Artificial Sequence: Synthetic oligonucleotide
  source 1..48: mol_type = other DNA

SEQ ID NO: 15884 - protein, 16 aa, synthetic construct
  REGION 1..16: note = Description of Artificial Sequence: Synthetic peptide
LIYWDDDKRYSPSLKS

SEQ ID NO: 15885 - DNA, 51 bp, synthetic construct; identical to SEQ ID NO: 13701
  misc_feature 1..51: note = Description of Artificial Sequence: Synthetic oligonucleotide
  source 1..51: mol_type = other DNA

SEQ ID NO: 15886 - protein, 17 aa, synthetic construct
  REGION 1..17: note = Description of Artificial Sequence: Synthetic peptide
WMHPNSGNTGFAQKFQG

SEQ ID NO: 15887 - DNA, 57 bp, synthetic construct; identical to SEQ ID NO: 12475
  misc_feature 1..57: note = Description of Artificial Sequence: Synthetic oligonucleotide
  source 1..57: mol_type = other DNA

SEQ ID NO: 15888 - protein, 19 aa, synthetic construct
  REGION 1..19: note = Description of Artificial Sequence: Synthetic peptide
RIKSKTDGGTTDYAAPVKG

SEQ ID NO: 15889 - DNA, 51 bp, synthetic construct; identical to SEQ ID NO: 12123
  misc_feature 1..51: note = Description of Artificial Sequence: Synthetic oligonucleotide
  source 1..51: mol_type = other DNA

SEQ ID NO: 15890 - protein, 17 aa, synthetic construct
  REGION 1..17: note = Description of Artificial Sequence: Synthetic peptide
VIWYDGSNKYYADSVKG

SEQ ID NO: 15891 - DNA, 51 bp, synthetic construct
  misc_feature 1..51: note = Description of Artificial Sequence: Synthetic oligonucleotide
  source 1..51: mol_type = other DNA
tggatgtaccctaacagtggtagcacaggctatgcacagaaattccagggc

SEQ ID NO: 15892 - protein, 17 aa, synthetic construct
  REGION 1..17: note = Description of Artificial Sequence: Synthetic peptide
WMYPNSGSTGYAQKFQG

SEQ ID NO: 15893 - DNA, 51 bp, synthetic construct
  misc_feature 1..51: note = Description of Artificial Sequence: Synthetic oligonucleotide
  source 1..51: mol_type = other DNA
tggatgtaccctaacagtggtaacgcaggctatgcacagaaattccagggc

SEQ ID NO: 15894 - protein, 17 aa, synthetic construct
  REGION 1..17: note = Description of Artificial Sequence: Synthetic peptide
WMYPNSGNAGYAQKFQG

SEQ ID NO: 15895 - DNA, 51 bp, synthetic construct
  misc_feature 1..51: note = Description of Artificial Sequence: Synthetic oligonucleotide
  source 1..51: mol_type = other DNA
tggatgtaccctaacagtggtaacgtaggctatgcacagaaattccagggc

SEQ ID NO: 15896 - protein, 17 aa, synthetic construct
  REGION 1..17: note = Description of Artificial Sequence: Synthetic peptide
WMYPNSGNVGYAQKFQG

SEQ ID NO: 15897 - DNA, 51 bp, synthetic construct
  misc_feature 1..51: note = Description of Artificial Sequence: Synthetic oligonucleotide
  source 1..51: mol_type = other DNA
tggatgtaccctaacagtggtcaaacaggctatgcacagaaattccagggc

SEQ ID NO: 15898 - protein, 17 aa, synthetic construct
  REGION 1..17: note = Description of Artificial Sequence: Synthetic peptide
WMYPNSGQTGYAQKFQG

SEQ ID NO: 15899 - DNA, 51 bp, synthetic construct; identical to SEQ ID NO: 15891
  misc_feature 1..51: note = Description of Artificial Sequence: Synthetic oligonucleotide
  source 1..51: mol_type = other DNA

SEQ ID NO: 15900 - protein, 17 aa, synthetic construct
  REGION 1..17: note = Description of Artificial Sequence: Synthetic peptide
WMYPNSGSTGYAQKFQG

SEQ ID NO: 15901 - DNA, 51 bp, synthetic construct; identical to SEQ ID NO: 15893
  misc_feature 1..51: note = Description of Artificial Sequence: Synthetic oligonucleotide
  source 1..51: mol_type = other DNA

SEQ ID NO: 15902 - protein, 17 aa, synthetic construct
  REGION 1..17: note = Description of Artificial Sequence: Synthetic peptide
WMYPNSGNAGYAQKFQG

SEQ ID NO: 15903 - DNA, 51 bp, synthetic construct; identical to SEQ ID NO: 15895
  misc_feature 1..51: note = Description of Artificial Sequence: Synthetic oligonucleotide
  source 1..51: mol_type = other DNA

SEQ ID NO: 15904 - protein, 17 aa, synthetic construct
  REGION 1..17: note = Description of Artificial Sequence: Synthetic peptide
WMYPNSGNVGYAQKFQG

SEQ ID NO: 15905 - DNA, 51 bp, synthetic construct; identical to SEQ ID NO: 15897
  misc_feature 1..51: note = Description of Artificial Sequence: Synthetic oligonucleotide
  source 1..51: mol_type = other DNA

SEQ ID NO: 15906 - protein, 17 aa, synthetic construct
  REGION 1..17: note = Description of Artificial Sequence: Synthetic peptide
WMYPNSGQTGYAQKFQG

SEQ ID NO: 15907 - DNA, 51 bp, synthetic construct; identical to SEQ ID NO: 15891
  misc_feature 1..51: note = Description of Artificial Sequence: Synthetic oligonucleotide
  source 1..51: mol_type = other DNA

SEQ ID NO: 15908 - protein, 17 aa, synthetic construct
  REGION 1..17: note = Description of Artificial Sequence: Synthetic peptide
WMYPNSGSTGYAQKFQG

SEQ ID NO: 15909 - DNA, 51 bp, synthetic construct; identical to SEQ ID NO: 15891
  misc_feature 1..51: note = Description of Artificial Sequence: Synthetic oligonucleotide
  source 1..51: mol_type = other DNA

SEQ ID NO: 15910 - protein, 17 aa, synthetic construct
  REGION 1..17: note = Description of Artificial Sequence: Synthetic peptide
WMYPNSGSTGYAQKFQG

SEQ ID NO: 15911 - DNA, 51 bp, synthetic construct; identical to SEQ ID NO: 15897
  misc_feature 1..51: note = Description of Artificial Sequence: Synthetic oligonucleotide
  source 1..51: mol_type = other DNA

SEQ ID NO: 15912 - protein, 17 aa, synthetic construct
  REGION 1..17: note = Description of Artificial Sequence: Synthetic peptide
WMYPNSGQTGYAQKFQG

SEQ ID NO: 15913 - DNA, 51 bp, synthetic construct; identical to SEQ ID NO: 15893
  misc_feature 1..51: note = Description of Artificial Sequence: Synthetic oligonucleotide
  source 1..51: mol_type = other DNA

SEQ ID NO: 15914 - protein, 17 aa, synthetic construct
  REGION 1..17: note = Description of Artificial Sequence: Synthetic peptide
WMYPNSGNAGYAQKFQG

SEQ ID NO: 15915 - DNA, 51 bp, synthetic construct; identical to SEQ ID NO: 12161
  misc_feature 1..51: note = Description of Artificial Sequence: Synthetic oligonucleotide
  source 1..51: mol_type = other DNA

SEQ ID NO: 15916 - protein, 17 aa, synthetic construct
  REGION 1..17: note = Description of Artificial Sequence: Synthetic peptide
WMHPNSGNTGYAQKFQG

SEQ ID NO: 15917 - DNA, 51 bp, synthetic construct; identical to SEQ ID NO: 12161
  misc_feature 1..51: note = Description of Artificial Sequence: Synthetic oligonucleotide
  source 1..51: mol_type = other DNA

SEQ ID NO: 15918 - protein, 17 aa, synthetic construct
  REGION 1..17: note = Description of Artificial Sequence: Synthetic peptide
WMHPNSGNTGYAQKFQG

SEQ ID NO: 15919 - DNA, 51 bp, synthetic construct; identical to SEQ ID NO: 12161
  misc_feature 1..51: note = Description of Artificial Sequence: Synthetic oligonucleotide
  source 1..51: mol_type = other DNA

SEQ ID NO: 15920 - protein, 17 aa, synthetic construct
  REGION 1..17: note = Description of Artificial Sequence: Synthetic peptide
WMHPNSGNTGYAQKFQG

SEQ ID NO: 15921 - DNA, 51 bp, synthetic construct
  misc_feature 1..51: note = Description of Artificial Sequence: Synthetic oligonucleotide
  source 1..51: mol_type = other DNA
tggatgcaccctaacagtggtaacgcaggctatgcacagaagttccagggc

SEQ ID NO: 15922 - protein, 17 aa, synthetic construct
  REGION 1..17: note = Description of Artificial Sequence: Synthetic peptide
WMHPNSGNAGYAQKFQG

SEQ ID NO: 15923 - DNA, 51 bp, synthetic construct; identical to SEQ ID NO: 13491
  misc_feature 1..51: note = Description of Artificial Sequence: Synthetic oligonucleotide
  source 1..51: mol_type = other DNA

SEQ ID NO: 15924 - protein, 17 aa, synthetic construct
  REGION 1..17: note = Description of Artificial Sequence: Synthetic peptide
WMHPNSGSTGYAQKFQG

SEQ ID NO: 15925 - DNA, 51 bp, synthetic construct
  misc_feature 1..51: note = Description of Artificial Sequence: Synthetic oligonucleotide
  source 1..51: mol_type = other DNA
tggatgcaccctaacagtggtcaaacaggctatgcacagaagttccagggc

SEQ ID NO: 15926 - protein, 17 aa, synthetic construct
  REGION 1..17: note = Description of Artificial Sequence: Synthetic peptide
WMHPNSGQTGYAQKFQG

SEQ ID NO: 15927 - DNA, 51 bp, synthetic construct; identical to SEQ ID NO: 15925
  misc_feature 1..51: note = Description of Artificial Sequence: Synthetic oligonucleotide
  source 1..51: mol_type = other DNA

SEQ ID NO: 15928 - protein, 17 aa, synthetic construct
  REGION 1..17: note = Description of Artificial Sequence: Synthetic peptide
WMHPNSGQTGYAQKFQG

SEQ ID NO: 15929 - DNA, 51 bp, synthetic construct; identical to SEQ ID NO: 15921
  misc_feature 1..51: note = Description of Artificial Sequence: Synthetic oligonucleotide
  source 1..51: mol_type = other DNA

SEQ ID NO: 15930 - protein, 17 aa, synthetic construct
  REGION 1..17: note = Description of Artificial Sequence: Synthetic peptide
WMHPNSGNAGYAQKFQG

SEQ ID NO: 15931 - DNA, 51 bp, synthetic construct; identical to SEQ ID NO: 15925
  misc_feature 1..51: note = Description of Artificial Sequence: Synthetic oligonucleotide
  source 1..51: mol_type = other DNA

SEQ ID NO: 15932 - protein, 17 aa, synthetic construct
  REGION 1..17: note = Description of Artificial Sequence: Synthetic peptide
WMHPNSGQTGYAQKFQG

SEQ ID NO: 15933 - DNA, 51 bp, synthetic construct; identical to SEQ ID NO: 15921
  misc_feature 1..51: note = Description of Artificial Sequence: Synthetic oligonucleotide
  source 1..51: mol_type = other DNA

SEQ ID NO: 15934 - protein, 17 aa, synthetic construct
  REGION 1..17: note = Description of Artificial Sequence: Synthetic peptide
WMHPNSGNAGYAQKFQG

SEQ ID NO: 15935 - DNA, 51 bp, synthetic construct; identical to SEQ ID NO: 15925
  misc_feature 1..51: note = Description of Artificial Sequence: Synthetic oligonucleotide
  source 1..51: mol_type = other DNA

SEQ ID NO: 15936 - protein, 17 aa, synthetic construct
  REGION 1..17: note = Description of Artificial Sequence: Synthetic peptide
WMHPNSGQTGYAQKFQG

SEQ ID NO: 15937 - DNA, 51 bp, synthetic construct; identical to SEQ ID NO: 13491
  misc_feature 1..51: note = Description of Artificial Sequence: Synthetic oligonucleotide
  source 1..51: mol_type = other DNA

SEQ ID NO: 15938 - protein, 17 aa, synthetic construct
  REGION 1..17: note = Description of Artificial Sequence: Synthetic peptide
WMHPNSGSTGYAQKFQG

SEQ ID NO: 15939 - DNA, 51 bp, synthetic construct; identical to SEQ ID NO: 12161
  misc_feature 1..51: note = Description of Artificial Sequence: Synthetic oligonucleotide
  source 1..51: mol_type = other DNA

SEQ ID NO: 15940 - protein, 17 aa, synthetic construct
  REGION 1..17: note = Description of Artificial Sequence: Synthetic peptide
WMHPNSGNTGYAQKFQG

SEQ ID NO: 15941 - DNA, 51 bp, synthetic construct; identical to SEQ ID NO: 12161
  misc_feature 1..51: note = Description of Artificial Sequence: Synthetic oligonucleotide
  source 1..51: mol_type = other DNA

SEQ ID NO: 15942 - protein, 17 aa, synthetic construct
  REGION 1..17: note = Description of Artificial Sequence: Synthetic peptide
WMHPNSGNTGYAQKFQG

SEQ ID NO: 15943 - DNA, 51 bp, synthetic construct; identical to SEQ ID NO: 15925
  misc_feature 1..51: note = Description of Artificial Sequence: Synthetic oligonucleotide
  source 1..51: mol_type = other DNA

SEQ ID NO: 15944 - protein, 17 aa, synthetic construct
  REGION 1..17: note = Description of Artificial Sequence: Synthetic peptide
WMHPNSGQTGYAQKFQG

SEQ ID NO: 15945 - DNA, 51 bp, synthetic construct; identical to SEQ ID NO: 15925
  misc_feature 1..51: note = Description of Artificial Sequence: Synthetic oligonucleotide
  source 1..51: mol_type = other DNA

SEQ ID NO: 15946 - protein, 17 aa, synthetic construct
  REGION 1..17: note = Description of Artificial Sequence: Synthetic peptide
WMHPNSGQTGYAQKFQG

SEQ ID NO: 15947 - DNA, 51 bp, synthetic construct; identical to SEQ ID NO: 13491
  misc_feature 1..51: note = Description of Artificial Sequence: Synthetic oligonucleotide
  source 1..51: mol_type = other DNA

SEQ ID NO: 15948 - protein, 17 aa, synthetic construct
  REGION 1..17: note = Description of Artificial Sequence: Synthetic peptide
WMHPNSGSTGYAQKFQG

SEQ ID NO: 15949 - DNA, 51 bp, synthetic construct
  misc_feature 1..51: note = Description of Artificial Sequence: Synthetic oligonucleotide
  source 1..51: mol_type = other DNA
tggatgcaccctaacagtggtaacgaaggctatgcacagaagttccagggc

SEQ ID NO: 15950 - protein, 17 aa, synthetic construct
  REGION 1..17: note = Description of Artificial Sequence: Synthetic peptide
WMHPNSGNEGYAQKFQG

SEQ ID NO: 15951 - DNA, 51 bp, synthetic construct; identical to SEQ ID NO: 12189
  misc_feature 1..51: note = Description of Artificial Sequence: Synthetic oligonucleotide
  source 1..51: mol_type = other DNA

SEQ ID NO: 15952 - protein, 17 aa, synthetic construct
  REGION 1..17: note = Description of Artificial Sequence: Synthetic peptide
WIHPNSGGTNYAQKFQG

SEQ ID NO: 15953 - DNA, 51 bp, synthetic construct; identical to SEQ ID NO: 12189
  misc_feature 1..51: note = Description of Artificial Sequence: Synthetic oligonucleotide
  source 1..51: mol_type = other DNA

SEQ ID NO: 15954 - protein, 17 aa, synthetic construct
  REGION 1..17: note = Description of Artificial Sequence: Synthetic peptide
WIHPNSGGTNYAQKFQG

SEQ ID NO: 15955 - DNA, 51 bp, synthetic construct; identical to SEQ ID NO: 12189
  misc_feature 1..51: note = Description of Artificial Sequence: Synthetic oligonucleotide
  source 1..51: mol_type = other DNA

SEQ ID NO: 15956 - protein, 17 aa, synthetic construct
  REGION 1..17: note = Description of Artificial Sequence: Synthetic peptide
WIHPNSGGTNYAQKFQG

SEQ ID NO: 15957 - DNA, 51 bp, synthetic construct; identical to SEQ ID NO: 12189
  misc_feature 1..51: note = Description of Artificial Sequence: Synthetic oligonucleotide
  source 1..51: mol_type = other DNA

SEQ ID NO: 15958 - protein, 17 aa, synthetic construct
  REGION 1..17: note = Description of Artificial Sequence: Synthetic peptide
WIHPNSGGTNYAQKFQG

SEQ ID NO: 15959 - DNA, 51 bp, synthetic construct; identical to SEQ ID NO: 12189
  misc_feature 1..51: note = Description of Artificial Sequence: Synthetic oligonucleotide
  source 1..51: mol_type = other DNA

SEQ ID NO: 15960 - protein, 17 aa, synthetic construct
  REGION 1..17: note = Description of Artificial Sequence: Synthetic peptide
WIHPNSGGTNYAQKFQG

SEQ ID NO: 15961 - DNA, 51 bp, synthetic construct; identical to SEQ ID NO: 12189
  misc_feature 1..51: note = Description of Artificial Sequence: Synthetic oligonucleotide
  source 1..51: mol_type = other DNA

SEQ ID NO: 15962 - protein, 17 aa, synthetic construct
  REGION 1..17: note = Description of Artificial Sequence: Synthetic peptide
WIHPNSGGTNYAQKFQG

SEQ ID NO: 15963 - DNA, 51 bp, synthetic construct; identical to SEQ ID NO: 12189
  misc_feature 1..51: note = Description of Artificial Sequence: Synthetic oligonucleotide
  source 1..51: mol_type = other DNA

SEQ ID NO: 15964 - protein, 17 aa, synthetic construct
  REGION 1..17: note = Description of Artificial Sequence: Synthetic peptide
WIHPNSGGTNYAQKFQG

SEQ ID NO: 15965 - DNA, 51 bp, synthetic construct; identical to SEQ ID NO: 12189
  misc_feature 1..51: note = Description of Artificial Sequence: Synthetic oligonucleotide
  source 1..51: mol_type = other DNA

SEQ ID NO: 15966 - protein, 17 aa, synthetic construct
  REGION 1..17: note = Description of Artificial Sequence: Synthetic peptide
WIHPNSGGTNYAQKFQG

SEQ ID NO: 15967 - DNA, 51 bp, synthetic construct
  misc_feature 1..51: note = Description of Artificial Sequence: Synthetic oligonucleotide
  source 1..51: mol_type = other DNA
gttatctggtatgatgcaagtaataaatactatgcagactccgtgaagggc

SEQ ID NO: 15968 - protein, 17 aa, synthetic construct
  REGION 1..17: note = Description of Artificial Sequence: Synthetic peptide
VIWYDASNKYYADSVKG

SEQ ID NO: 15969 - DNA, 51 bp, synthetic construct
  misc_feature 1..51: note = Description of Artificial Sequence: Synthetic oligonucleotide
  source 1..51: mol_type = other DNA
gttatctggtatgatggaagtaataaatactatgcagaatccgtgaagggc

SEQ ID NO: 15970 - protein, 17 aa, synthetic construct
  REGION 1..17: note = Description of Artificial Sequence: Synthetic peptide
VIWYDGSNKYYAESVKG

SEQ ID NO: 15971 - DNA, 51 bp, synthetic construct
  misc_feature 1..51: note = Description of Artificial Sequence: Synthetic oligonucleotide
  source 1..51: mol_type = other DNA
gttatctggtatgatggaagtaataaatactatgcaggctccgtgaagggc

SEQ ID NO: 15972 - protein, 17 aa, synthetic construct
  REGION 1..17: note = Description of Artificial Sequence: Synthetic peptide
VIWYDGSNKYYAGSVKG

SEQ ID NO: 15973 - DNA, 51 bp, synthetic construct
  misc_feature 1..51: note = Description of Artificial Sequence: Synthetic oligonucleotide
  source 1..51: mol_type = other DNA
gttatctggtatgatggaagtaataaatactatgcagacgccgtgaagggc

SEQ ID NO: 15974 - protein, 17 aa, synthetic construct
  REGION 1..17: note = Description of Artificial Sequence: Synthetic peptide
VIWYDGSNKYYADAVKG

SEQ ID NO: 15975 - DNA, 51 bp, synthetic construct
  misc_feature 1..51: note = Description of Artificial Sequence: Synthetic oligonucleotide
  source 1..51: mol_type = other DNA
gttatctggtatgatgcaagtaataaatactatgcagaatccgtgaagggc

SEQ ID NO: 15976 - protein, 17 aa, synthetic construct
  REGION 1..17: note = Description of Artificial Sequence: Synthetic peptide
VIWYDASNKYYAESVKG

SEQ ID NO: 15977 - DNA, 51 bp, synthetic construct
  misc_feature 1..51: note = Description of Artificial Sequence: Synthetic oligonucleotide
  source 1..51: mol_type = other DNA
gttatctggtatgatgcaagtaataaatactatgcagacgccgtgaagggc

SEQ ID NO: 15978 - protein, 17 aa, synthetic construct
  REGION 1..17: note = Description of Artificial Sequence: Synthetic peptide
VIWYDASNKYYADAVKG

SEQ ID NO: 15979 - DNA, 51 bp, synthetic construct; identical to SEQ ID NO: 15967
  misc_feature 1..51: note = Description of Artificial Sequence: Synthetic oligonucleotide
  source 1..51: mol_type = other DNA

SEQ ID NO: 15980 - protein, 17 aa, synthetic construct
  REGION 1..17: note = Description of Artificial Sequence: Synthetic peptide
VIWYDASNKYYADSVKG

SEQ ID NO: 15981 - DNA, 51 bp, synthetic construct; identical to SEQ ID NO: 15967
  misc_feature 1..51: note = Description of Artificial Sequence: Synthetic oligonucleotide
  source 1..51: mol_type = other DNA

SEQ ID NO: 15982 - protein, 17 aa, synthetic construct
  REGION 1..17: note = Description of Artificial Sequence: Synthetic peptide
VIWYDASNKYYADSVKG

SEQ ID NO: 15983 - DNA, 51 bp, synthetic construct; identical to SEQ ID NO: 15969
  misc_feature 1..51: note = Description of Artificial Sequence: Synthetic oligonucleotide
  source 1..51: mol_type = other DNA

SEQ ID NO: 15984 - protein, 17 aa, synthetic construct
  REGION 1..17: note = Description of Artificial Sequence: Synthetic peptide
VIWYDGSNKYYAESVKG

SEQ ID NO: 15985 - DNA, 51 bp, synthetic construct
  misc_feature 1..51: note = Description of Artificial Sequence: Synthetic oligonucleotide
  source 1..51: mol_type = other DNA
gttatctggtatgatggaagtaataaatactatgcagactccgtgaagggc

SEQ ID NO: 15986 - protein, 17 aa, synthetic construct
  REGION 1..17: note = Description of Artificial Sequence: Synthetic peptide
VIWYDGSNKYYADSVKG

SEQ ID NO: 15987 - DNA, 51 bp, synthetic construct; identical to SEQ ID NO: 15985
  misc_feature 1..51: note = Description of Artificial Sequence: Synthetic oligonucleotide
  source 1..51: mol_type = other DNA

SEQ ID NO: 15988 - protein, 17 aa, synthetic construct
  REGION 1..17: note = Description of Artificial Sequence: Synthetic peptide
VIWYDGSNKYYADSVKG

SEQ ID NO: 15989 - DNA, 51 bp, synthetic construct; identical to SEQ ID NO: 15975
  misc_feature 1..51: note = Description of Artificial Sequence: Synthetic oligonucleotide
  source 1..51: mol_type = other DNA

SEQ ID NO: 15990 - protein, 17 aa, synthetic construct
  REGION 1..17: note = Description of Artificial Sequence: Synthetic peptide
VIWYDASNKYYAESVKG

SEQ ID NO: 15991 - DNA, 51 bp, synthetic construct; identical to SEQ ID NO: 15977
  misc_feature 1..51: note = Description of Artificial Sequence: Synthetic oligonucleotide
  source 1..51: mol_type = other DNA

SEQ ID NO: 15992 - protein, 17 aa, synthetic construct
  REGION 1..17: note = Description of Artificial Sequence: Synthetic peptide
VIWYDASNKYYADAVKG

SEQ ID NO: 15993 - DNA, 51 bp, synthetic construct; identical to SEQ ID NO: 15969
  misc_feature 1..51: note = Description of Artificial Sequence: Synthetic oligonucleotide
  source 1..51: mol_type = other DNA

SEQ ID NO: 15994 - protein, 17 aa, synthetic construct
  REGION 1..17: note = Description of Artificial Sequence: Synthetic peptide
VIWYDGSNKYYAESVKG

SEQ ID NO: 15995 - DNA, 51 bp, synthetic construct; identical to SEQ ID NO: 13159
  misc_feature 1..51: note = Description of Artificial Sequence: Synthetic oligonucleotide
  source 1..51: mol_type = other DNA

SEQ ID NO: 15996 - protein, 17 aa, synthetic construct
  REGION 1..17: note = Description of Artificial Sequence: Synthetic peptide
IIWHDGSNKYYADSVKG

SEQ ID NO: 15997 - DNA, 51 bp, synthetic construct; identical to SEQ ID NO: 13159
  misc_feature 1..51: note = Description of Artificial Sequence: Synthetic oligonucleotide
  source 1..51: mol_type = other DNA

SEQ ID NO: 15998 - protein, 17 aa, synthetic construct
  REGION 1..17: note = Description of Artificial Sequence: Synthetic peptide
IIWHDGSNKYYADSVKG

SEQ ID NO: 15999 - DNA, 51 bp, synthetic construct
  misc_feature 1..51: note = Description of Artificial Sequence: Synthetic oligonucleotide
  source 1..51: mol_type = other DNA
attatctggcatagtggaagtaataaatactatgcagactccgtgaagggc

SEQ ID NO: 16000 - protein, 17 aa, synthetic construct
  REGION 1..17: note = Description of Artificial Sequence: Synthetic peptide
IIWHSGSNKYYADSVKG

SEQ ID NO: 16001 - DNA, 51 bp, synthetic construct
  misc_feature 1..51: note = Description of Artificial Sequence: Synthetic oligonucleotide
  source 1..51: mol_type = other DNA
attatctggcatgaaggaagtaataaatactatgcagactccgtgaagggc

SEQ ID NO: 16002 - protein, 17 aa, synthetic construct
  REGION 1..17: note = Description of Artificial Sequence: Synthetic peptide
IIWHEGSNKYYADSVKG

SEQ ID NO: 16003 - DNA, 51 bp, synthetic construct
  misc_feature 1..51: note = Description of Artificial Sequence: Synthetic oligonucleotide
  source 1..51: mol_type = other DNA
attatctggcatgatgcaagtaataaatactatgcagactccgtgaagggc

SEQ ID NO: 16004 - protein, 17 aa, synthetic construct
  REGION 1..17: note = Description of Artificial Sequence: Synthetic peptide
IIWHDASNKYYADSVKG

SEQ ID NO: 16005 - DNA, 51 bp, synthetic construct
  misc_feature 1..51: note = Description of Artificial Sequence: Synthetic oligonucleotide
  source 1..51: mol_type = other DNA
attatctggcatgatggaagtaataaatactatgcagaatccgtgaagggc

SEQ ID NO: 16006 - protein, 17 aa, synthetic construct
  REGION 1..17: note = Description of Artificial Sequence: Synthetic peptide
IIWHDGSNKYYAESVKG

SEQ ID NO: 16007 - DNA, 51 bp, synthetic construct
  misc_feature 1..51: note = Description of Artificial Sequence: Synthetic oligonucleotide
  source 1..51: mol_type = other DNA
attatctggcatgatggaagtaataaatactatgcagacgccgtgaagggc

SEQ ID NO: 16008 - protein, 17 aa, synthetic construct
  REGION 1..17: note = Description of Artificial Sequence: Synthetic peptide
IIWHDGSNKYYADAVKG

SEQ ID NO: 16009 - DNA, 51 bp, synthetic construct
  misc_feature 1..51: note = Description of Artificial Sequence: Synthetic oligonucleotide
  source 1..51: mol_type = other DNA
attatctggcatgaaggaagtaataaatactatgcagacgccgtgaagggc

SEQ ID NO: 16010 - protein, 17 aa, synthetic construct
  REGION 1..17: note = Description of Artificial Sequence: Synthetic peptide
IIWHEGSNKYYADAVKG

SEQ ID NO: 16011 - DNA, 51 bp, synthetic construct
  misc_feature 1..51: note = Description of Artificial Sequence: Synthetic oligonucleotide
  source 1..51: mol_type = other DNA
attatctggcatgaaggaagtaataaatactatgcagaatccgtgaagggc

SEQ ID NO: 16012 - protein, 17 aa, synthetic construct
  REGION 1..17: note = Description of Artificial Sequence: Synthetic peptide
IIWHEGSNKYYAESVKG

SEQ ID NO: 16013 - DNA, 51 bp, synthetic construct
  misc_feature 1..51: note = Description of Artificial Sequence: Synthetic oligonucleotide
  source 1..51: mol_type = other DNA
attatctggcatagtggaagtaataaatactatgcagaatccgtgaagggc

SEQ ID NO: 16014 - protein, 17 aa, synthetic construct
  REGION 1..17: note = Description of Artificial Sequence: Synthetic peptide
IIWHSGSNKYYAESVKG

SEQ ID NO: 16015 - DNA, 51 bp, synthetic construct
  misc_feature 1..51: note = Description of Artificial Sequence: Synthetic oligonucleotide
  source 1..51: mol_type = other DNA
attatctggcatagtggaagtaataaatactatgcagacgccgtgaagggc

SEQ ID NO: 16016 - protein, 17 aa, synthetic construct
  REGION 1..17: note = Description of Artificial Sequence: Synthetic peptide
IIWHSGSNKYYADAVKG

SEQ ID NO: 16017 - DNA, 51 bp, synthetic construct; identical to SEQ ID NO: 15999
  misc_feature 1..51: note = Description of Artificial Sequence: Synthetic oligonucleotide
  source 1..51: mol_type = other DNA

SEQ ID NO: 16018 - protein, 17 aa, synthetic construct
  REGION 1..17: note = Description of Artificial Sequence: Synthetic peptide
IIWHSGSNKYYADSVKG

SEQ ID NO: 16019 - DNA, 51 bp, synthetic construct; identical to SEQ ID NO: 16005
  misc_feature 1..51: note = Description of Artificial Sequence: Synthetic oligonucleotide
  source 1..51: mol_type = other DNA

SEQ ID NO: 16020 - protein, 17 aa, synthetic construct
  REGION 1..17: note = Description of Artificial Sequence: Synthetic peptide
IIWHDGSNKYYAESVKG

SEQ ID NO: 16021 - DNA, 51 bp, synthetic construct; identical to SEQ ID NO: 16013
  misc_feature 1..51: note = Description of Artificial Sequence: Synthetic oligonucleotide
  source 1..51: mol_type = other DNA

SEQ ID NO: 16022 - protein, 17 aa, synthetic construct
  REGION 1..17: note = Description of Artificial Sequence: Synthetic peptide
IIWHSGSNKYYAESVKG

SEQ ID NO: 16023 - DNA, 51 bp, synthetic construct; identical to SEQ ID NO: 15999
  misc_feature 1..51: note = Description of Artificial Sequence: Synthetic oligonucleotide
  source 1..51: mol_type = other DNA

SEQ ID NO: 16024 - protein, 17 aa, synthetic construct
  REGION 1..17: note = Description of Artificial Sequence: Synthetic peptide
IIWHSGSNKYYADSVKG

SEQ ID NO: 16025 - DNA, 51 bp, synthetic construct; identical to SEQ ID NO: 16013
  misc_feature 1..51: note = Description of Artificial Sequence: Synthetic oligonucleotide
  source 1..51: mol_type = other DNA

SEQ ID NO: 16026 - protein, 17 aa, synthetic construct
  REGION 1..17: note = Description of Artificial Sequence: Synthetic peptide
IIWHSGSNKYYAESVKG

SEQ ID NO: 16027 - DNA, 51 bp, synthetic construct; identical to SEQ ID NO: 16009
  misc_feature 1..51: note = Description of Artificial Sequence: Synthetic oligonucleotide
  source 1..51: mol_type = other DNA

SEQ ID NO: 16028 - protein, 17 aa, synthetic construct
  REGION 1..17: note = Description of Artificial Sequence: Synthetic peptide
IIWHEGSNKYYADAVKG

SEQ ID NO: 16029 - DNA, 51 bp, synthetic construct
  misc_feature 1..51: note = Description of Artificial Sequence: Synthetic oligonucleotide
  source 1..51: mol_type = other DNA
attatctggcatgatgcaagtaataaatactatgcagaatccgtgaagggc

SEQ ID NO: 16030 - protein, 17 aa, synthetic construct
  REGION 1..17: note = Description of Artificial Sequence: Synthetic peptide
IIWHDASNKYYAESVKG

SEQ ID NO: 16031 - DNA, 51 bp, synthetic construct; identical to SEQ ID NO: 16005
  misc_feature 1..51: note = Description of Artificial Sequence: Synthetic oligonucleotide
  source 1..51: mol_type = other DNA

SEQ ID NO: 16032 - protein, 17 aa, synthetic construct
  REGION 1..17: note = Description of Artificial Sequence: Synthetic peptide
IIWHDGSNKYYAESVKG

SEQ ID NO: 16033 - DNA, 51 bp, synthetic construct; identical to SEQ ID NO: 16013
  misc_feature 1..51: note = Description of Artificial Sequence: Synthetic oligonucleotide
  source 1..51: mol_type = other DNA

SEQ ID NO: 16034 - protein, 17 aa, synthetic construct
  REGION 1..17: note = Description of Artificial Sequence: Synthetic peptide
IIWHSGSNKYYAESVKG

SEQ ID NO: 16035 - DNA, 51 bp, synthetic construct; identical to SEQ ID NO: 16011
  misc_feature 1..51: note = Description of Artificial Sequence: Synthetic oligonucleotide
  source 1..51: mol_type = other DNA

SEQ ID NO: 16036 - protein, 17 aa, synthetic construct
  REGION 1..17: note = Description of Artificial Sequence: Synthetic peptide
IIWHEGSNKYYAESVKG

SEQ ID NO: 16037 - DNA, 48 bp, synthetic construct; identical to SEQ ID NO: 14117
  misc_feature 1..48: note = Description of Artificial Sequence: Synthetic oligonucleotide
  source 1..48: mol_type = other DNA

SEQ ID NO: 16038 - protein, 16 aa, synthetic construct
  REGION 1..16: note = Description of Artificial Sequence: Synthetic peptide
YSYYSGSTYYNPSLKS

SEQ ID NO: 16039 - DNA, 51 bp, synthetic construct; identical to SEQ ID NO: 12197
  misc_feature 1..51: note = Description of Artificial Sequence: Synthetic oligonucleotide
  source 1..51: mol_type = other DNA

SEQ ID NO: 16040 - protein, 17 aa, synthetic construct
  REGION 1..17: note = Description of Artificial Sequence: Synthetic peptide
WINPNSGGTNYAQKFQG

SEQ ID NO: 16041 - DNA, 51 bp, synthetic construct; identical to SEQ ID NO: 12197
  misc_feature 1..51: note = Description of Artificial Sequence: Synthetic oligonucleotide
  source 1..51: mol_type = other DNA

SEQ ID NO: 16042 - protein, 17 aa, synthetic construct
  REGION 1..17: note = Description of Artificial Sequence: Synthetic peptide
WINPNSGGTNYAQKFQG

SEQ ID NO: 16043 - DNA, 51 bp, synthetic construct; identical to SEQ ID NO: 15897
  misc_feature 1..51: note = Description of Artificial Sequence: Synthetic oligonucleotide
  source 1..51: mol_type = other DNA

SEQ ID NO: 16044 - protein, 17 aa, synthetic construct
  REGION 1..17: note = Description of Artificial Sequence: Synthetic peptide
WMYPNSGQTGYAQKFQG

SEQ ID NO: 16045 - DNA, 51 bp, synthetic construct; identical to SEQ ID NO: 12189
  misc_feature 1..51: note = Description of Artificial Sequence: Synthetic oligonucleotide
  source 1..51: mol_type = other DNA

SEQ ID NO: 16046 - protein, 17 aa, synthetic construct
  REGION 1..17: note = Description of Artificial Sequence: Synthetic peptide
WIHPNSGGTNYAQKFQG

SEQ ID NO: 16047 - DNA, 51 bp, synthetic construct
  misc_feature 1..51: note = Description of Artificial Sequence: Synthetic oligonucleotide
  source 1..51: mol_type = other DNA
attatctggcatgatgcaagtaataaatactatgcagacgccgtgaagggc

SEQ ID NO: 16048 - protein, 17 aa, synthetic construct
  REGION 1..17: note = Description of Artificial Sequence: Synthetic peptide
IIWHDASNKYYADAVKG

SEQ ID NO: 16049 - DNA, 51 bp, synthetic construct; identical to SEQ ID NO: 13865
  misc_feature 1..51: note = Description of Artificial Sequence: Synthetic oligonucleotide
  source 1..51: mol_type = other DNA

SEQ ID NO: 16050 - protein, 17 aa, synthetic construct
  REGION 1..17: note = Description of Artificial Sequence: Synthetic peptide
WMNPNSGNTGYAQKFQV

SEQ ID NO: 16051 - DNA, 51 bp, synthetic construct; identical to SEQ ID NO: 12103
  misc_feature 1..51: note = Description of Artificial Sequence: Synthetic oligonucleotide
  source 1..51: mol_type = other DNA

SEQ ID NO: 16052 - protein, 17 aa, synthetic construct
  REGION 1..17: note = Description of Artificial Sequence: Synthetic peptide
WMNPNSGNTGYAQKFQG

SEQ ID NO: 16053 - DNA, 51 bp, synthetic construct; identical to SEQ ID NO: 12361
  misc_feature 1..51: note = Description of Artificial Sequence: Synthetic oligonucleotide
  source 1..51: mol_type = other DNA

SEQ ID NO: 16054 - protein, 17 aa, synthetic construct
  REGION 1..17: note = Description of Artificial Sequence: Synthetic peptide
SISSSSSYIYYADSVKG

SEQ ID NO: 16055 - DNA, 51 bp, synthetic construct; identical to SEQ ID NO: 12153
  misc_feature 1..51: note = Description of Artificial Sequence: Synthetic oligonucleotide
  source 1..51: mol_type = other DNA

SEQ ID NO: 16056 - protein, 17 aa, synthetic construct
  REGION 1..17: note = Description of Artificial Sequence: Synthetic peptide
SISGSSSYIYYADSVKG

SEQ ID NO: 16057 - DNA, 51 bp, synthetic construct
  misc_feature 1..51: note = Description of Artificial Sequence: Synthetic oligonucleotide
  source 1..51: mol_type = other DNA
gttatatcacaagatggaattattagatactatgcagactccgtgaagggc

SEQ ID NO: 16058 - protein, 17 aa, synthetic construct
  REGION 1..17: note = Description of Artificial Sequence: Synthetic peptide
VISQDGIIRYYADSVKG

SEQ ID NO: 16059 - DNA, 51 bp, synthetic construct
  misc_feature 1..51: note = Description of Artificial Sequence: Synthetic oligonucleotide
  source 1..51: mol_type = other DNA
gttatatcatatgatggaagtaataaatattatgcagactccgtgaagggc

SEQ ID NO: 16060 - protein, 17 aa, synthetic construct
  REGION 1..17: note = Description of Artificial Sequence: Synthetic peptide
VISYDGSNKYYADSVKG

SEQ ID NO: 16061 - DNA, 51 bp, synthetic construct; identical to SEQ ID NO: 15451
  misc_feature 1..51: note = Description of Artificial Sequence: Synthetic oligonucleotide
  source 1..51: mol_type = other DNA

SEQ ID NO: 16062 - protein, 17 aa, synthetic construct
  REGION 1..17: note = Description of Artificial Sequence: Synthetic peptide
WISAYNGNTKYAQKLQG

SEQ ID NO: 16063 - DNA, 51 bp, synthetic construct
  misc_feature 1..51: note = Description of Artificial Sequence: Synthetic oligonucleotide
  source 1..51: mol_type = other DNA
tggatcagcgcttataatggtaacacaaagaatgcacagaagctccagggc

SEQ ID NO: 16064 - protein, 17 aa, synthetic construct
  REGION 1..17: note = Description of Artificial Sequence: Synthetic peptide
WISAYNGNTKNAQKLQG

SEQ ID NO: 16065 - DNA, 51 bp, synthetic construct
  misc_feature 1..51: note = Description of Artificial Sequence: Synthetic oligonucleotide
  source 1..51: mol_type = other DNA
tggatcagcgcttataatggtaacacaaagtttgcacagaagctccagggc

SEQ ID NO: 16066 - protein, 17 aa, synthetic construct
  REGION 1..17: note = Description of Artificial Sequence: Synthetic peptide
WISAYNGNTKFAQKLQG

SEQ ID NO: 16067 - DNA, 51 bp, synthetic construct; identical to SEQ ID NO: 15537
  misc_feature 1..51: note = Description of Artificial Sequence: Synthetic oligonucleotide
  source 1..51: mol_type = other DNA

SEQ ID NO: 16068 - protein, 17 aa, synthetic construct
  REGION 1..17: note = Description of Artificial Sequence: Synthetic peptide
VIWYDGNNKSYADSVKG

SEQ ID NO: 16069 - DNA, 51 bp, synthetic construct; identical to SEQ ID NO: 12197
  misc_feature 1..51: note = Description of Artificial Sequence: Synthetic oligonucleotide
  source 1..51: mol_type = other DNA

SEQ ID NO: 16070 - protein, 17 aa, synthetic construct
  REGION 1..17: note = Description of Artificial Sequence: Synthetic peptide
WINPNSGGTNYAQKFQG

SEQ ID NO: 16071 - DNA, 51 bp, synthetic construct; identical to SEQ ID NO: 12123
  misc_feature 1..51: note = Description of Artificial Sequence: Synthetic oligonucleotide
  source 1..51: mol_type = other DNA

SEQ ID NO: 16072 - protein, 17 aa, synthetic construct
  REGION 1..17: note = Description of Artificial Sequence: Synthetic peptide
VIWYDGSNKYYADSVKG

SEQ ID NO: 16073 - DNA, 51 bp, synthetic construct; identical to SEQ ID NO: 12161
  misc_feature 1..51: note = Description of Artificial Sequence: Synthetic oligonucleotide
  source 1..51: mol_type = other DNA

SEQ ID NO: 16074 - protein, 17 aa, synthetic construct
  REGION 1..17: note = Description of Artificial Sequence: Synthetic peptide
WMHPNSGNTGYAQKFQG

SEQ ID NO: 16075 - DNA, 48 bp, synthetic construct
  misc_feature 1..48: note = Description of Artificial Sequence: Synthetic oligonucleotide
  source 1..48: mol_type = other DNA
tatatctattacagtgggaccaccatttacaacccctccctcaagagt

SEQ ID NO: 16076 - protein, 16 aa, synthetic construct
  REGION 1..16: note = Description of Artificial Sequence: Synthetic peptide
YIYYSGTTIYNPSLKS

SEQ ID NO: 16077 - DNA, 51 bp, synthetic construct; identical to SEQ ID NO: 14605
  misc_feature 1..51: note = Description of Artificial Sequence: Synthetic oligonucleotide
  source 1..51: mol_type = other DNA

SEQ ID NO: 16078 - protein, 17 aa, synthetic construct
  REGION 1..17: note = Description of Artificial Sequence: Synthetic peptide
VIWYDGSNEHYADSVKG

SEQ ID NO: 16079 - DNA, 48 bp, synthetic construct; identical to SEQ ID NO: 13715
  misc_feature 1..48: note = Description of Artificial Sequence: Synthetic oligonucleotide
  source 1..48: mol_type = other DNA

SEQ ID NO: 16080 - protein, 16 aa, synthetic construct
  REGION 1..16: note = Description of Artificial Sequence: Synthetic peptide
EINHSGSTNYNPSLKS

SEQ ID NO: 16081 - DNA, 51 bp, synthetic construct; identical to SEQ ID NO: 12161
  misc_feature 1..51: note = Description of Artificial Sequence: Synthetic oligonucleotide
  source 1..51: mol_type = other DNA

SEQ ID NO: 16082 - protein, 17 aa, synthetic construct
  REGION 1..17: note = Description of Artificial Sequence: Synthetic peptide
WMHPNSGNTGYAQKFQG

SEQ ID NO: 16083 - DNA, 51 bp, synthetic construct; identical to SEQ ID NO: 12161
  misc_feature 1..51: note = Description of Artificial Sequence: Synthetic oligonucleotide
  source 1..51: mol_type = other DNA

SEQ ID NO: 16084 - protein, 17 aa, synthetic construct
  REGION 1..17: note = Description of Artificial Sequence: Synthetic peptide
WMHPNSGNTGYAQKFQG

SEQ ID NO: 16085 - DNA, 51 bp, synthetic construct; identical to SEQ ID NO: 13701
  misc_feature 1..51: note = Description of Artificial Sequence: Synthetic oligonucleotide
  source 1..51: mol_type = other DNA

SEQ ID NO: 16086 - protein, 17 aa, synthetic construct
  REGION 1..17: note = Description of Artificial Sequence: Synthetic peptide
WMHPNSGNTGFAQKFQG

SEQ ID NO: 16087 - DNA, 51 bp, synthetic construct
  misc_feature 1..51: note = Description of Artificial Sequence: Synthetic oligonucleotide
  source 1..51: mol_type = other DNA
tggatgcaccctcacagtggtaacacaggctatgcacagaagttccagggc

SEQ ID NO: 16088 - protein, 17 aa, synthetic construct
  REGION 1..17: note = Description of Artificial Sequence: Synthetic peptide
WMHPHSGNTGYAQKFQG

SEQ ID NO: 16089 - DNA, 51 bp, synthetic construct; identical to SEQ ID NO: 12103
  misc_feature 1..51: note = Description of Artificial Sequence: Synthetic oligonucleotide
  source 1..51: mol_type = other DNA

SEQ ID NO: 16090 - protein, 17 aa, synthetic construct
  REGION 1..17: note = Description of Artificial Sequence: Synthetic peptide
WMNPNSGNTGYAQKFQG

SEQ ID NO: 16091 - DNA, 51 bp, synthetic construct
  misc_feature 1..51: note = Description of Artificial Sequence: Synthetic oligonucleotide
  source 1..51: mol_type = other DNA
tggctgaaccctcacagtggtaacacaggctatgcacagaagttccagggc

SEQ ID NO: 16092 - protein, 17 aa, synthetic construct
  REGION 1..17: note = Description of Artificial Sequence: Synthetic peptide
WLNPHSGNTGYAQKFQG

SEQ ID NO: 16093 - DNA, 51 bp, synthetic construct; identical to SEQ ID NO: 16091
  misc_feature 1..51: note = Description of Artificial Sequence: Synthetic oligonucleotide
  source 1..51: mol_type = other DNA

SEQ ID NO: 16094 - protein, 17 aa, synthetic construct
  REGION 1..17: note = Description of Artificial Sequence: Synthetic peptide
WLNPHSGNTGYAQKFQG

SEQ ID NO: 16095 - DNA, 51 bp, synthetic construct; identical to SEQ ID NO: 13377
  misc_feature 1..51: note = Description of Artificial Sequence: Synthetic oligonucleotide
  source 1..51: mol_type = other DNA

SEQ ID NO: 16096 - protein, 17 aa, synthetic construct
  REGION 1..17: note = Description of Artificial Sequence: Synthetic peptide
AISGSGGNTFYADSVKG

SEQ ID NO: 16097 - DNA, 51 bp, synthetic construct; identical to SEQ ID NO: 16091
  misc_feature 1..51: note = Description of Artificial Sequence: Synthetic oligonucleotide
  source 1..51: mol_type = other DNA

SEQ ID NO: 16098 - protein, 17 aa, synthetic construct
  REGION 1..17: note = Description of Artificial Sequence: Synthetic peptide
WLNPHSGNTGYAQKFQG

SEQ ID NO: 16099 - DNA, 51 bp, synthetic construct; identical to SEQ ID NO: 12103
  misc_feature 1..51: note = Description of Artificial Sequence: Synthetic oligonucleotide
  source 1..51: mol_type = other DNA

SEQ ID NO: 16100 - protein, 17 aa, synthetic construct
  REGION 1..17: note = Description of Artificial Sequence: Synthetic peptide
WMNPNSGNTGYAQKFQG

SEQ ID NO: 16101 - DNA, 51 bp, synthetic construct; identical to SEQ ID NO: 13377
  misc_feature 1..51: note = Description of Artificial Sequence: Synthetic oligonucleotide
  source 1..51: mol_type = other DNA

SEQ ID NO: 16102 - protein, 17 aa, synthetic construct
  REGION 1..17: note = Description of Artificial Sequence: Synthetic peptide
AISGSGGNTFYADSVKG

SEQ ID NO: 16103 - DNA, 27 bp, synthetic construct
  misc_feature 1..27: note = Description of Artificial Sequence: Synthetic oligonucleotide
  source 1..27: mol_type = other DNA
caacagagtgacagtttccctctcact

SEQ ID NO: 16104 - protein, 9 aa, synthetic construct
  REGION 1..9: note = Description of Artificial Sequence: Synthetic peptide
QQSDSFPLT

SEQ ID NO: 16105 - DNA, 27 bp, synthetic construct
  misc_feature 1..27: note = Description of Artificial Sequence: Synthetic oligonucleotide
  source 1..27: mol_type = other DNA
cagcaatattatagtattcctcccact

SEQ ID NO: 16106 - protein, 9 aa, synthetic construct
  REGION 1..9: note = Description of Artificial Sequence: Synthetic peptide
QQYYSIPPT

SEQ ID NO: 16107 - DNA, 27 bp, synthetic construct
  misc_feature 1..27: note = Description of Artificial Sequence: Synthetic oligonucleotide
  source 1..27: mol_type = other DNA
cagcaatatcatagttctcctccgacg

SEQ ID NO: 16108 - protein, 9 aa, synthetic construct
  REGION 1..9: note = Description of Artificial Sequence: Synthetic peptide
QQYHSSPPT

SEQ ID NO: 16109 - DNA, 27 bp, synthetic construct
  misc_feature 1..27: note = Description of Artificial Sequence: Synthetic oligonucleotide
  source 1..27: mol_type = other DNA
atgcaaagtaaacagcttcctctcact

SEQ ID NO: 16110 - protein, 9 aa, synthetic construct
  REGION 1..9: note = Description of Artificial Sequence: Synthetic peptide
MQSKQLPLT

SEQ ID NO: 16111 - DNA, 27 bp, synthetic construct
  misc_feature 1..27: note = Description of Artificial Sequence: Synthetic oligonucleotide
  source 1..27: mol_type = other DNA
caacagtatagttgttacccattcact

SEQ ID NO: 16112 - protein, 9 aa, synthetic construct
  REGION 1..9: note = Description of Artificial Sequence: Synthetic peptide
QQYSCYPFT

SEQ ID NO: 16113 - DNA, 30 bp, synthetic construct
  misc_feature 1..30: note = Description of Artificial Sequence: Synthetic oligonucleotide
  source 1..30: mol_type = other DNA
caggcgtgggacaggaacacttatgtggtg

SEQ ID NO: 16114 - protein, 10 aa, synthetic construct
  REGION 1..10: note = Description of Artificial Sequence: Synthetic peptide
QAWDRNTYVV

SEQ ID NO: 16115 - DNA, 27 bp, synthetic construct
  misc_feature 1..27: note = Description of Artificial Sequence: Synthetic oligonucleotide
  source 1..27: mol_type = other DNA
caacagggtaacattttcccattcact

SEQ ID NO: 16116 - protein, 9 aa, synthetic construct
  REGION 1..9: note = Description of Artificial Sequence: Synthetic peptide
QQGNIFPFT

SEQ ID NO: 16117 - DNA, 27 bp, synthetic construct
  misc_feature 1..27: note = Description of Artificial Sequence: Synthetic oligonucleotide
  source 1..27: mol_type = other DNA
ctacagtataatagttaccctcccacc

SEQ ID NO: 16118 - protein, 9 aa, synthetic construct
  REGION 1..9: note = Description of Artificial Sequence: Synthetic peptide
LQYNSYPPT

SEQ ID NO: 16119 - DNA, 27 bp, synthetic construct
  misc_feature 1..27: note = Description of Artificial Sequence: Synthetic oligonucleotide
  source 1..27: mol_type = other DNA
caacaggctaacagtttcccattcact

SEQ ID NO: 16120 - protein, 9 aa, synthetic construct
  REGION 1..9: note = Description of Artificial Sequence: Synthetic peptide
QQANSFPFT

SEQ ID NO: 16121 - DNA, 27 bp, synthetic construct
  misc_feature 1..27: note = Description of Artificial Sequence: Synthetic oligonucleotide
  source 1..27: mol_type = other DNA
caacaggctaacagtttcccattcact

SEQ ID NO: 16122 - protein, 9 aa, synthetic construct
  REGION 1..9: note = Description of Artificial Sequence: Synthetic peptide
QQANSFPFT

SEQ ID NO: 16123 - DNA, 27 bp, synthetic construct
  misc_feature 1..27: note = Description of Artificial Sequence: Synthetic oligonucleotide
  source 1..27: mol_type = other DNA
cagcagtatgaaagctcgccgtggacg

SEQ ID NO: 16124 - protein, 9 aa, synthetic construct
  REGION 1..9: note = Description of Artificial Sequence: Synthetic peptide
QQYESSPWT

SEQ ID NO: 16125 - DNA, 27 bp, synthetic construct
  misc_feature 1..27: note = Description of Artificial Sequence: Synthetic oligonucleotide
  source 1..27: mol_type = other DNA
ctacaacattatagttacccgctcact

SEQ ID NO: 16126 - protein, 9 aa, synthetic construct
  REGION 1..9: note = Description of Artificial Sequence: Synthetic peptide
LQHYSYPLT

SEQ ID NO: 16127 - DNA, 27 bp, synthetic construct
  misc_feature 1..27: note = Description of Artificial Sequence: Synthetic oligonucleotide
  source 1..27: mol_type = other DNA
atgcaaagtatgcagcttccgattatc

SEQ ID NO: 16128 - protein, 9 aa, synthetic construct
  REGION 1..9: note = Description of Artificial Sequence: Synthetic peptide
MQSMQLPII

SEQ ID NO: 16129 - DNA, 27 bp, synthetic construct
  misc_feature 1..27: note = Description of Artificial Sequence: Synthetic oligonucleotide
  source 1..27: mol_type = other DNA
caacagtatagtggttacccattcact

SEQ ID NO: 16130 - protein, 9 aa, synthetic construct
  REGION 1..9: note = Description of Artificial Sequence: Synthetic peptide
QQYSGYPFT

SEQ ID NO: 16131 - DNA, 27 bp, synthetic construct
  misc_feature 1..27: note = Description of Artificial Sequence: Synthetic oligonucleotide
  source 1..27: mol_type = other DNA
atgcaaagtatacaggttccgtggacg

SEQ ID NO: 16132 - protein, 9 aa, synthetic construct
  REGION 1..9: note = Description of Artificial Sequence: Synthetic peptide
MQSIQVPWT

SEQ ID NO: 16133 - DNA, 27 bp, synthetic construct
  misc_feature 1..27: note = Description of Artificial Sequence: Synthetic oligonucleotide
  source 1..27: mol_type = other DNA
ctacagcataatagttacccgctcact

SEQ ID NO: 16134 - protein, 9 aa, synthetic construct
  REGION 1..9: note = Description of Artificial Sequence: Synthetic peptide
LQHNSYPLT

SEQ ID NO: 16135 - DNA, 27 bp, synthetic construct
  misc_feature 1..27: note = Description of Artificial Sequence: Synthetic oligonucleotide
  source 1..27: mol_type = other DNA
ctacagcataatgattacccgttcact

SEQ ID NO: 16136 - protein, 9 aa, synthetic construct
  REGION 1..9: note = Description of Artificial Sequence: Synthetic peptide
LQHNDYPFT

SEQ ID NO: 16137 - DNA, 27 bp, synthetic construct
  misc_feature 1..27: note = Description of Artificial Sequence: Synthetic oligonucleotide
  source 1..27: mol_type = other DNA
ctacagcattatagtttccctcggacg

SEQ ID NO: 16138 - protein, 9 aa, synthetic construct
  REGION 1..9: note = Description of Artificial Sequence: Synthetic peptide
LQHYSFPRT

SEQ ID NO: 16139 - DNA, 27 bp, synthetic construct
  misc_feature 1..27: note = Description of Artificial Sequence: Synthetic oligonucleotide
  source 1..27: mol_type = other DNA
cagcagtataatgactggccgtgcagt

SEQ ID NO: 16140 - protein, 9 aa, synthetic construct
  REGION 1..9: note = Description of Artificial Sequence: Synthetic peptide
QQYNDWPCS

SEQ ID NO: 16141 - DNA, 27 bp, synthetic construct
  misc_feature 1..27: note = Description of Artificial Sequence: Synthetic oligonucleotide
  source 1..27: mol_type = other DNA
cagcagtataattactggccgctcact

SEQ ID NO: 16142 - protein, 9 aa, synthetic construct
  REGION 1..9: note = Description of Artificial Sequence: Synthetic peptide
QQYNYWPLT

SEQ ID NO: 16143 - DNA, 27 bp, synthetic construct
  misc_feature 1..27: note = Description of Artificial Sequence: Synthetic oligonucleotide
  source 1..27: mol_type = other DNA
ctacagtataatagttacccattcact

SEQ ID NO: 16144 - protein, 9 aa, synthetic construct
  REGION 1..9: note = Description of Artificial Sequence: Synthetic peptide
LQYNSYPFT

SEQ ID NO: 16145 - DNA, 27 bp, synthetic construct
  misc_feature 1..27: note = Description of Artificial Sequence: Synthetic oligonucleotide
  source 1..27: mol_type = other DNA
cagcagtatgaaagctcgccgtggacg

SEQ ID NO: 16146 - protein, 9 aa, synthetic construct
  REGION 1..9: note = Description of Artificial Sequence: Synthetic peptide
QQYESSPWT

SEQ ID NO: 16147 - DNA, 27 bp, synthetic construct
  misc_feature 1..27: note = Description of Artificial Sequence: Synthetic oligonucleotide
  source 1..27: mol_type = other DNA
ctacaacattatcgttaccctttcact

SEQ ID NO: 16148 - protein, 9 aa, synthetic construct
  REGION 1..9: note = Description of Artificial Sequence: Synthetic peptide
LQHYRYPFT

SEQ ID NO: 16149 - DNA, 27 bp, synthetic construct
  misc_feature 1..27: note = Description of Artificial Sequence: Synthetic oligonucleotide
  source 1..27: mol_type = other DNA
cagcagtatgaaagctcgccgtggacg

SEQ ID NO: 16150 - protein, 9 aa, synthetic construct
  REGION 1..9: note = Description of Artificial Sequence: Synthetic peptide
QQYESSPWT

SEQ ID NO: 16151 - DNA, 27 bp, synthetic construct
  misc_feature 1..27: note = Description of Artificial Sequence: Synthetic oligonucleotide
  source 1..27: mol_type = other DNA
ctacagcataatagttaccctctcact

SEQ ID NO: 16152 - protein, 9 aa, synthetic construct
  REGION 1..9: note = Description of Artificial Sequence: Synthetic peptide
LQHNSYPLT

SEQ ID NO: 16153 - DNA, 27 bp, synthetic construct
  misc_feature 1..27: note = Description of Artificial Sequence: Synthetic oligonucleotide
  source 1..27: mol_type = other DNA
cagcagtatgaaagctcgccgtggacg

SEQ ID NO: 16154 - protein, 9 aa, synthetic construct
  REGION 1..9: note = Description of Artificial Sequence: Synthetic peptide
QQYESSPWT

SEQ ID NO: 16155 - DNA, 27 bp, synthetic construct
  misc_feature 1..27: note = Description of Artificial Sequence: Synthetic oligonucleotide
  source 1..27: mol_type = other DNA
ctacaacattatagttaccctcggacg

SEQ ID NO: 16156 - protein, 9 aa, synthetic construct
  REGION 1..9: note = Description of Artificial Sequence: Synthetic peptide
LQHYSYPRT

SEQ ID NO: 16157 - DNA, 27 bp, synthetic construct
  misc_feature 1..27: note = Description of Artificial Sequence: Synthetic oligonucleotide
  source 1..27: mol_type = other DNA
ctacagtataatagttacccattcact

SEQ ID NO: 16158 - protein, 9 aa, synthetic construct
  REGION 1..9: note = Description of Artificial Sequence: Synthetic peptide
LQYNSYPFT

SEQ ID NO: 16159 - DNA, 27 bp, synthetic construct
  misc_feature 1..27: note = Description of Artificial Sequence: Synthetic oligonucleotide
  source 1..27: mol_type = other DNA
ctacagtataatagttacccattcact

SEQ ID NO: 16160 - protein, 9 aa, synthetic construct
  REGION 1..9: note = Description of Artificial Sequence: Synthetic peptide
LQYNSYPFT

SEQ ID NO: 16161 - DNA, 30 bp, synthetic construct
  misc_feature 1..30: note = Description of Artificial Sequence: Synthetic oligonucleotide
  source 1..30: mol_type = other DNA
caacagagttacagaacccctctgtggacg

SEQ ID NO: 16162 - protein, 10 aa, synthetic construct
  REGION 1..10: note = Description of Artificial Sequence: Synthetic peptide
QQSYRTPLWT

SEQ ID NO: 16163 - DNA, 27 bp, synthetic construct
  misc_feature 1..27: note = Description of Artificial Sequence: Synthetic oligonucleotide
  source 1..27: mol_type = other DNA
cagcaatattatactactccgtgcagt

SEQ ID NO: 16164 - protein, 9 aa, synthetic construct
  REGION 1..9: note = Description of Artificial Sequence: Synthetic peptide
QQYYTTPCS

SEQ ID NO: 16165 - DNA, 27 bp, synthetic construct
  misc_feature 1..27: note = Description of Artificial Sequence: Synthetic oligonucleotide
  source 1..27: mol_type = other DNA
cagcaatattatactactccgtgcagt

SEQ ID NO: 16166 - protein, 9 aa, synthetic construct
  REGION 1..9: note = Description of Artificial Sequence: Synthetic peptide
QQYYTTPCS

SEQ ID NO: 16167 - DNA, 27 bp, synthetic construct
  misc_feature 1..27: note = Description of Artificial Sequence: Synthetic oligonucleotide
  source 1..27: mol_type = other DNA
atgcaaggtacacactggccgctcact

SEQ ID NO: 16168 - protein, 9 aa, synthetic construct
  REGION 1..9: note = Description of Artificial Sequence: Synthetic peptide
MQGTHWPLT

SEQ ID NO: 16169 - DNA, 27 bp, synthetic construct
  misc_feature 1..27: note = Description of Artificial Sequence: Synthetic oligonucleotide
  source 1..27: mol_type = other DNA
atgcaaggtacacactggccattcact

SEQ ID NO: 16170 - protein, 9 aa, synthetic construct
  REGION 1..9: note = Description of Artificial Sequence: Synthetic peptide
MQGTHWPFT

SEQ ID NO: 16171 - DNA, 27 bp, synthetic construct
  misc_feature 1..27: note = Description of Artificial Sequence: Synthetic oligonucleotide
  source 1..27: mol_type = other DNA
ctacagcattatagttatcctcggacg

SEQ ID NO: 16172 - protein, 9 aa, synthetic construct
  REGION 1..9: note = Description of Artificial Sequence: Synthetic peptide
LQHYSYPRT

SEQ ID NO: 16173 - DNA, 27 bp, synthetic construct
  misc_feature 1..27: note = Description of Artificial Sequence: Synthetic oligonucleotide
  source 1..27: mol_type = other DNA
ctacaacattatagttaccctcggacg

SEQ ID NO: 16174 - protein, 9 aa, synthetic construct
  REGION 1..9: note = Description of Artificial Sequence: Synthetic peptide
LQHYSYPRT

SEQ ID NO: 16175 - DNA, 30 bp, synthetic construct
  misc_feature 1..30: note = Description of Artificial Sequence: Synthetic oligonucleotide
  source 1..30: mol_type = other DNA
agctcatatacaagcagctacacttgggtg

SEQ ID NO: 16176 - protein, 10 aa, synthetic construct
  REGION 1..10: note = Description of Artificial Sequence: Synthetic peptide
SSYTSSYTWV

SEQ ID NO: 16177 - DNA, 30 bp, synthetic construct
  misc_feature 1..30: note = Description of Artificial Sequence: Synthetic oligonucleotide
  source 1..30: mol_type = other DNA
gcagcatgggatgacagcctgaatggtccg

SEQ ID NO: 16178 - protein, 10 aa, synthetic construct
  REGION 1..10: note = Description of Artificial Sequence: Synthetic peptide
AAWDDSLNGP

SEQ ID NO: 16179 - DNA, 30 bp, synthetic construct
  misc_feature 1..30: note = Description of Artificial Sequence: Synthetic oligonucleotide
  source 1..30: mol_type = other DNA
aactcaacagacagcagtggtaatcgggtg

SEQ ID NO: 16180 - protein, 10 aa, synthetic construct
  REGION 1..10: note = Description of Artificial Sequence: Synthetic peptide
NSTDSSGNRV

SEQ ID NO: 16181 - DNA, 27 bp, synthetic construct
  misc_feature 1..27: note = Description of Artificial Sequence: Synthetic oligonucleotide
  source 1..27: mol_type = other DNA
ctacagcatgatagttaccctctcact

SEQ ID NO: 16182 - protein, 9 aa, synthetic construct
  REGION 1..9: note = Description of Artificial Sequence: Synthetic peptide
LQHDSYPLT

SEQ ID NO: 16183 - DNA, 27 bp, synthetic construct
  misc_feature 1..27: note = Description of Artificial Sequence: Synthetic oligonucleotide
  source 1..27: mol_type = other DNA
cagcaatattatagtactccgtgcagt

SEQ ID NO: 16184 - protein, 9 aa, synthetic construct
  REGION 1..9: note = Description of Artificial Sequence: Synthetic peptide
QQYYSTPCS

SEQ ID NO: 16185 - DNA, 27 bp, synthetic construct
  misc_feature 1..27: note = Description of Artificial Sequence: Synthetic oligonucleotide
  source 1..27: mol_type = other DNA
ctacaacattataattacccgctcact

SEQ ID NO: 16186 - protein, 9 aa, synthetic construct
  REGION 1..9: note = Description of Artificial Sequence: Synthetic peptide
LQHYNYPLT

SEQ ID NO: 16187 - DNA, 27 bp, synthetic construct
  misc_feature 1..27: note = Description of Artificial Sequence: Synthetic oligonucleotide
  source 1..27: mol_type = other DNA
caggcgtgggacaacagcactgtggtg

SEQ ID NO: 16188 - protein, 9 aa, synthetic construct
  REGION 1..9: note = Description of Artificial Sequence: Synthetic peptide
QAWDNSTVV

SEQ ID NO: 16189 - DNA, 27 bp, synthetic construct
  misc_feature 1..27: note = Description of Artificial Sequence: Synthetic oligonucleotide
  source 1..27: mol_type = other DNA
atacaaggtacgcactggcctttcccc

SEQ ID NO: 16190 - protein, 9 aa, synthetic construct
  REGION 1..9: note = Description of Artificial Sequence: Synthetic peptide
IQGTHWPFP

SEQ ID NO: 16191 - DNA, 30 bp, synthetic construct
  misc_feature 1..30: note = Description of Artificial Sequence: Synthetic oligonucleotide
  source 1..30: mol_type = other DNA
agctcatatacaagcaccggcactgtggta

SEQ ID NO: 16192 - protein, 10 aa, synthetic construct
  REGION 1..10: note = Description of Artificial Sequence: Synthetic peptide
SSYTSTGTVV

SEQ ID NO: 16193 - DNA, 30 bp, synthetic construct
  misc_feature 1..30: note = Description of Artificial Sequence: Synthetic oligonucleotide
  source 1..30: mol_type = other DNA
ctacagcataatagttacctccccatcacc

SEQ ID NO: 16194 - protein, 10 aa, synthetic construct
  REGION 1..10: note = Description of Artificial Sequence: Synthetic peptide
LQHNSYLPIT

SEQ ID NO: 16195 - DNA, 27 bp, synthetic construct
  misc_feature 1..27: note = Description of Artificial Sequence: Synthetic oligonucleotide
  source 1..27: mol_type = other DNA
caacaggctaacagtttcccattcact

SEQ ID NO: 16196 - protein, 9 aa, synthetic construct
  REGION 1..9: note = Description of Artificial Sequence: Synthetic peptide
QQANSFPFT

SEQ ID NO: 16197 - DNA, 27 bp, synthetic construct
  misc_feature 1..27: note = Description of Artificial Sequence: Synthetic oligonucleotide
  source 1..27: mol_type = other DNA
caacaggctaacagtttcccattcact

SEQ ID NO: 16198 - protein, 9 aa, synthetic construct
  REGION 1..9: note = Description of Artificial Sequence: Synthetic peptide
QQANSFPFT

SEQ ID NO: 16199 - DNA, 30 bp, synthetic construct; identical to SEQ ID NO: 16193
  misc_feature 1..30: note = Description of Artificial Sequence: Synthetic oligonucleotide
  source 1..30: mol_type = other DNA

SEQ ID NO: 16200 - protein, 10 aa, synthetic construct
  REGION 1..10: note = Description of Artificial Sequence: Synthetic peptide
LQHNSYLPIT

SEQ ID NO: 16201 - DNA, 27 bp, synthetic construct
  misc_feature 1..27: note = Description of Artificial Sequence: Synthetic oligonucleotide
  source 1..27: mol_type = other DNA
caggcgtgggacaacagcactgcggta

SEQ ID NO: 16202 - protein, 9 aa, synthetic construct
  REGION 1..9: note = Description of Artificial Sequence: Synthetic peptide
QAWDNSTAV

SEQ ID NO: 16203 - DNA, 27 bp, synthetic construct
  misc_feature 1..27: note = Description of Artificial Sequence: Synthetic oligonucleotide
  source 1..27: mol_type = other DNA
ttgcaaggtacacactggcctctcacc

SEQ ID NO: 16204 - protein, 9 aa, synthetic construct
  REGION 1..9: note = Description of Artificial Sequence: Synthetic peptide
LQGTHWPLT

SEQ ID NO: 16205 - DNA, 27 bp, synthetic construct
  misc_feature 1..27: note = Description of Artificial Sequence: Synthetic oligonucleotide
  source 1..27: mol_type = other DNA
caggcgtgggacaatagtactgcggta

SEQ ID NO: 16206 - protein, 9 aa, synthetic construct
  REGION 1..9: note = Description of Artificial Sequence: Synthetic peptide
QAWDNSTAV

SEQ ID NO: 16207 - DNA, 30 bp, synthetic construct
  misc_feature 1..30: note = Description of Artificial Sequence: Synthetic oligonucleotide
  source 1..30: mol_type = other DNA
acctcatatacaagcaccagcactgtggtc

SEQ ID NO: 16208 - protein, 10 aa, synthetic construct
  REGION 1..10: note = Description of Artificial Sequence: Synthetic peptide
TSYTSTSTVV

SEQ ID NO: 16209 - DNA, 27 bp, synthetic construct
  misc_feature 1..27: note = Description of Artificial Sequence: Synthetic oligonucleotide
  source 1..27: mol_type = other DNA
caggcgtgggacaacagcactgtggtt

SEQ ID NO: 16210 - protein, 9 aa, synthetic construct
  REGION 1..9: note = Description of Artificial Sequence: Synthetic peptide
QAWDNSTVV

SEQ ID NO: 16211 - DNA, 24 bp, synthetic construct
  misc_feature 1..24: note = Description of Artificial Sequence: Synthetic oligonucleotide
  source 1..24: mol_type = other DNA
caggcgtgggacagcagcactata

SEQ ID NO: 16212 - protein, 8 aa, synthetic construct
  REGION 1..8: note = Description of Artificial Sequence: Synthetic peptide
QAWDSSTI

SEQ ID NO: 16213 - DNA, 27 bp, synthetic construct
  misc_feature 1..27: note = Description of Artificial Sequence: Synthetic oligonucleotide
  source 1..27: mol_type = other DNA
caggcgtggaacagcagcaatgtggta

SEQ ID NO: 16214 - protein, 9 aa, synthetic construct
  REGION 1..9: note = Description of Artificial Sequence: Synthetic peptide
QAWNSSNVV

SEQ ID NO: 16215 - DNA, 30 bp, synthetic construct
  misc_feature 1..30: note = Description of Artificial Sequence: Synthetic oligonucleotide
  source 1..30: mol_type = other DNA
caggcgtgggacagcagcacttatgtggta

SEQ ID NO: 16216 - protein, 10 aa, synthetic construct
  REGION 1..10: note = Description of Artificial Sequence: Synthetic peptide
QAWDSSTYVV

SEQ ID NO: 16217 - DNA, 33 bp, synthetic construct
  misc_feature 1..33: note = Description of Artificial Sequence: Synthetic oligonucleotide
  source 1..33: mol_type = other DNA
caggtgtgggacagtagtagtgatcatgtggta

SEQ ID NO: 16218 - protein, 11 aa, synthetic construct
  REGION 1..11: note = Description of Artificial Sequence: Synthetic peptide
QVWDSSSDHVV

SEQ ID NO: 16219 - DNA, 39 bp, synthetic construct
  misc_feature 1..39: note = Description of Artificial Sequence: Synthetic oligonucleotide
  source 1..39: mol_type = other DNA
ggagagagccacacgattgatggccaagtcggtgtggta

SEQ ID NO: 16220 - protein, 13 aa, synthetic construct
  REGION 1..13: note = Description of Artificial Sequence: Synthetic peptide
GESHTIDGQVGVV

SEQ ID NO: 16221 - DNA, 27 bp, synthetic construct
  misc_feature 1..27: note = Description of Artificial Sequence: Synthetic oligonucleotide
  source 1..27: mol_type = other DNA
caggcgtgggacagcagcacagtggta

SEQ ID NO: 16222 - protein, 9 aa, synthetic construct
  REGION 1..9: note = Description of Artificial Sequence: Synthetic peptide
QAWDSSTVV

SEQ ID NO: 16223 - DNA, 27 bp, synthetic construct
  misc_feature 1..27: note = Description of Artificial Sequence: Synthetic oligonucleotide
  source 1..27: mol_type = other DNA
tttcaaagtatacagcttccgctcact

SEQ ID NO: 16224 - protein, 9 aa, synthetic construct
  REGION 1..9: note = Description of Artificial Sequence: Synthetic peptide
FQSIQLPLT

SEQ ID NO: 16225 - DNA, 27 bp, synthetic construct
  misc_feature 1..27: note = Description of Artificial Sequence: Synthetic oligonucleotide
  source 1..27: mol_type = other DNA
caacagtatcatagttacccattcact

SEQ ID NO: 16226 - protein, 9 aa, synthetic construct
  REGION 1..9: note = Description of Artificial Sequence: Synthetic peptide
QQYHSYPFT

SEQ ID NO: 16227 - DNA, 27 bp, synthetic construct
  misc_feature 1..27: note = Description of Artificial Sequence: Synthetic oligonucleotide
  source 1..27: mol_type = other DNA
ctacagcataatagttacccactcact

SEQ ID NO: 16228 - protein, 9 aa, synthetic construct
  REGION 1..9: note = Description of Artificial Sequence: Synthetic peptide
LQHNSYPLT

SEQ ID NO: 16229 - DNA, 27 bp, synthetic construct
  misc_feature 1..27: note = Description of Artificial Sequence: Synthetic oligonucleotide
  source 1..27: mol_type = other DNA
ctacagcattatagttatatgttcact

SEQ ID NO: 16230 - protein, 9 aa, synthetic construct
  REGION 1..9: note = Description of Artificial Sequence: Synthetic peptide
LQHYSYMFT

SEQ ID NO: 16231 - DNA, 27 bp, synthetic construct
  misc_feature 1..27: note = Description of Artificial Sequence: Synthetic oligonucleotide
  source 1..27: mol_type = other DNA
ctacagcataatagttacccgtggacg

SEQ ID NO: 16232 - protein, 9 aa, synthetic construct
  REGION 1..9: note = Description of Artificial Sequence: Synthetic peptide
LQHNSYPWT

SEQ ID NO: 16233 - DNA, 27 bp, synthetic construct
  misc_feature 1..27: note = Description of Artificial Sequence: Synthetic oligonucleotide
  source 1..27: mol_type = other DNA
cttcaacatgctagttacccgctcact

SEQ ID NO: 16234 - protein, 9 aa, synthetic construct
  REGION 1..9: note = Description of Artificial Sequence: Synthetic peptide
LQHASYPLT

SEQ ID NO: 16235 - DNA, 27 bp, synthetic construct
  misc_feature 1..27: note = Description of Artificial Sequence: Synthetic oligonucleotide
  source 1..27: mol_type = other DNA
ctacagcataatagttacccgctcact

SEQ ID NO: 16236 - protein, 9 aa, synthetic construct
  REGION 1..9: note = Description of Artificial Sequence: Synthetic peptide
LQHNSYPLT

SEQ ID NO: 16237 - DNA, 27 bp, synthetic construct
  misc_feature 1..27: note = Description of Artificial Sequence: Synthetic oligonucleotide
  source 1..27: mol_type = other DNA
ctacagtataatagttatccattcact

SEQ ID NO: 16238 - protein, 9 aa, synthetic construct
  REGION 1..9: note = Description of Artificial Sequence: Synthetic peptide
LQYNSYPFT

SEQ ID NO: 16239 - DNA, 27 bp, synthetic construct
  misc_feature 1..27: note = Description of Artificial Sequence: Synthetic oligonucleotide
  source 1..27: mol_type = other DNA
ctacagcaatatagttaccctcggacg

SEQ ID NO: 16240 - protein, 9 aa, synthetic construct
  REGION 1..9: note = Description of Artificial Sequence: Synthetic peptide
LQQYSYPRT

SEQ ID NO: 16241 - DNA, 27 bp, synthetic construct
  misc_feature 1..27: note = Description of Artificial Sequence: Synthetic oligonucleotide
  source 1..27: mol_type = other DNA
caacagagtcacacttccccgctcact

SEQ ID NO: 16242 - protein, 9 aa, synthetic construct
  REGION 1..9: note = Description of Artificial Sequence: Synthetic peptide
QQSHTSPLT

SEQ ID NO: 16243 - DNA, 27 bp, synthetic construct
  misc_feature 1..27: note = Description of Artificial Sequence: Synthetic oligonucleotide
  source 1..27: mol_type = other DNA
ctacaacataatacttatccgctcact

SEQ ID NO: 16244 - protein, 9 aa, synthetic construct
  REGION 1..9: note = Description of Artificial Sequence: Synthetic peptide
LQHNTYPLT

SEQ ID NO: 16245 - DNA, 27 bp, synthetic construct
  misc_feature 1..27: note = Description of Artificial Sequence: Synthetic oligonucleotide
  source 1..27: mol_type = other DNA
ctacagcataatagttacccgctcact

SEQ ID NO: 16246 - protein, 9 aa, synthetic construct
  REGION 1..9: note = Description of Artificial Sequence: Synthetic peptide
LQHNSYPLT

SEQ ID NO: 16247 - DNA, 27 bp, synthetic construct
  misc_feature 1..27: note = Description of Artificial Sequence: Synthetic oligonucleotide
  source 1..27: mol_type = other DNA
ctacagcatagttcttacccgctcact

SEQ ID NO: 16248 - protein, 9 aa, synthetic construct
  REGION 1..9: note = Description of Artificial Sequence: Synthetic peptide
LQHSSYPLT

SEQ ID NO: 16249 - DNA, 27 bp, synthetic construct
  misc_feature 1..27: note = Description of Artificial Sequence: Synthetic oligonucleotide
  source 1..27: mol_type = other DNA
ctacagcataatagtttcccgctcact

SEQ ID NO: 16250 - protein, 9 aa, synthetic construct
  REGION 1..9: note = Description of Artificial Sequence: Synthetic peptide
LQHNSFPLT

SEQ ID NO: 16251 - DNA, 27 bp, synthetic construct
  misc_feature 1..27: note = Description of Artificial Sequence: Synthetic oligonucleotide
  source 1..27: mol_type = other DNA
ctacagcataatagttacccgctcact

SEQ ID NO: 16252 - protein, 9 aa, synthetic construct
  REGION 1..9: note = Description of Artificial Sequence: Synthetic peptide
LQHNSYPLT

SEQ ID NO: 16253 - DNA, 27 bp, synthetic construct
  misc_feature 1..27: note = Description of Artificial Sequence: Synthetic oligonucleotide
  source 1..27: mol_type = other DNA
caacagagtcacagttccccgctcact

SEQ ID NO: 16254 - protein, 9 aa, synthetic construct
  REGION 1..9: note = Description of Artificial Sequence: Synthetic peptide
QQSHSSPLT

SEQ ID NO: 16255 - DNA, 27 bp, synthetic construct
  misc_feature 1..27: note = Description of Artificial Sequence: Synthetic oligonucleotide
  source 1..27: mol_type = other DNA
caacaggctaacagtttccctcggacg

SEQ ID NO: 16256 - protein, 9 aa, synthetic construct
  REGION 1..9: note = Description of Artificial Sequence: Synthetic peptide
QQANSFPRT

SEQ ID NO: 16257 - DNA, 30 bp, synthetic construct
  misc_feature 1..30: note = Description of Artificial Sequence: Synthetic oligonucleotide
  source 1..30: mol_type = other DNA
caacagagttacagaaccccctttttcact

SEQ ID NO: 16258 - protein, 10 aa, synthetic construct
  REGION 1..10: note = Description of Artificial Sequence: Synthetic peptide
QQSYRTPFFT

SEQ ID NO: 16259 - DNA, 27 bp, synthetic construct
  misc_feature 1..27: note = Description of Artificial Sequence: Synthetic oligonucleotide
  source 1..27: mol_type = other DNA
ctacagcataatagttacccgctcact

SEQ ID NO: 16260 - protein, 9 aa, synthetic construct
  REGION 1..9: note = Description of Artificial Sequence: Synthetic peptide
LQHNSYPLT

SEQ ID NO: 16261 - DNA, 27 bp, synthetic construct
  misc_feature 1..27: note = Description of Artificial Sequence: Synthetic oligonucleotide
  source 1..27: mol_type = other DNA
ctacagcataatagttacccgctcact

SEQ ID NO: 16262 - protein, 9 aa, synthetic construct
  REGION 1..9: note = Description of Artificial Sequence: Synthetic peptide
LQHNSYPLT

SEQ ID NO: 16263 - DNA, 27 bp, synthetic construct
  misc_feature 1..27: note = Description of Artificial Sequence: Synthetic oligonucleotide
  source 1..27: mol_type = other DNA
ctacagcataatagttacccgctcact

SEQ ID NO: 16264 - protein, 9 aa, synthetic construct
  REGION 1..9: note = Description of Artificial Sequence: Synthetic peptide
LQHNSYPLT

SEQ ID NO: 16265 - DNA, 27 bp, synthetic construct
  misc_feature 1..27: note = Description of Artificial Sequence: Synthetic oligonucleotide
  source 1..27: mol_type = other DNA
caacagagttacagtacccctttcact

SEQ ID NO: 16266 - protein, 9 aa, synthetic construct
  REGION 1..9: note = Description of Artificial Sequence: Synthetic peptide
QQSYSTPFT

SEQ ID NO: 16267 - DNA, 27 bp, synthetic construct
  misc_feature 1..27: note = Description of Artificial Sequence: Synthetic oligonucleotide
  source 1..27: mol_type = other DNA
caacagacttacagtcccccgctcact

SEQ ID NO: 16268 - protein, 9 aa, synthetic construct
  REGION 1..9: note = Description of Artificial Sequence: Synthetic peptide
QQTYSPPLT

SEQ ID NO: 16269 - DNA, 27 bp, synthetic construct
  misc_feature 1..27: note = Description of Artificial Sequence: Synthetic oligonucleotide
  source 1..27: mol_type = other DNA
ctacagcataatagttacccgctcact

SEQ ID NO: 16270 - protein, 9 aa, synthetic construct
  REGION 1..9: note = Description of Artificial Sequence: Synthetic peptide
LQHNSYPLT

SEQ ID NO: 16271 - DNA, 30 bp, synthetic construct; identical to SEQ ID NO: 16257
  misc_feature 1..30: note = Description of Artificial Sequence: Synthetic oligonucleotide
  source 1..30: mol_type = other DNA

SEQ ID NO: 16272 - protein, 10 aa, synthetic construct
  REGION 1..10: note = Description of Artificial Sequence: Synthetic peptide
QQSYRTPFFT

SEQ ID NO: 16273 - DNA, 27 bp, synthetic construct
  misc_feature 1..27: note = Description of Artificial Sequence: Synthetic oligonucleotide
  source 1..27: mol_type = other DNA
ctacaacataatagttacccgtggacg

SEQ ID NO: 16274 - protein, 9 aa, synthetic construct
  REGION 1..9: note = Description of Artificial Sequence: Synthetic peptide
LQHNSYPWT

SEQ ID NO: 16275 - DNA, 27 bp, synthetic construct
  misc_feature 1..27: note = Description of Artificial Sequence: Synthetic oligonucleotide
  source 1..27: mol_type = other DNA
ctacagcatgccagttacccgctcact

SEQ ID NO: 16276 - protein, 9 aa, synthetic construct
  REGION 1..9: note = Description of Artificial Sequence: Synthetic peptide
LQHASYPLT

SEQ ID NO: 16277 - DNA, 30 bp, synthetic construct
  misc_feature 1..30: note = Description of Artificial Sequence: Synthetic oligonucleotide
  source 1..30: mol_type = other DNA
caacagagttacagtgcccctccattcact

SEQ ID NO: 16278 - protein, 10 aa, synthetic construct
  REGION 1..10: note = Description of Artificial Sequence: Synthetic peptide
QQSYSAPPFT

SEQ ID NO: 16279 - DNA, 27 bp, synthetic construct
  misc_feature 1..27: note = Description of Artificial Sequence: Synthetic oligonucleotide
  source 1..27: mol_type = other DNA
ctacagcataatagttacccgctcact

SEQ ID NO: 16280 - protein, 9 aa, synthetic construct
  REGION 1..9: note = Description of Artificial Sequence: Synthetic peptide
LQHNSYPLT

SEQ ID NO: 16281 - DNA, 27 bp, synthetic construct
  misc_feature 1..27: note = Description of Artificial Sequence: Synthetic oligonucleotide
  source 1..27: mol_type = other DNA
caacagtattatagttatccgctcact

SEQ ID NO: 16282 - protein, 9 aa, synthetic construct
  REGION 1..9: note = Description of Artificial Sequence: Synthetic peptide
QQYYSYPLT

SEQ ID NO: 16283 - DNA, 27 bp, synthetic construct
  misc_feature 1..27: note = Description of Artificial Sequence: Synthetic oligonucleotide
  source 1..27: mol_type = other DNA
ctacagcataatagttacccattcact

SEQ ID NO: 16284 - protein, 9 aa, synthetic construct
  REGION 1..9: note = Description of Artificial Sequence: Synthetic peptide
LQHNSYPFT

SEQ ID NO: 16285 - DNA, 27 bp, synthetic construct
  misc_feature 1..27: note = Description of Artificial Sequence: Synthetic oligonucleotide
  source 1..27: mol_type = other DNA
ctacagcataatagttacccgtggacg

SEQ ID NO: 16286 - protein, 9 aa, synthetic construct
  REGION 1..9: note = Description of Artificial Sequence: Synthetic peptide
LQHNSYPWT

SEQ ID NO: 16287 - DNA, 27 bp, synthetic construct
  misc_feature 1..27: note = Description of Artificial Sequence: Synthetic oligonucleotide
  source 1..27: mol_type = other DNA
ctacagcataatagttacccgtggacg

SEQ ID NO: 16288 - protein, 9 aa, synthetic construct
  REGION 1..9: note = Description of Artificial Sequence: Synthetic peptide
LQHNSYPWT

SEQ ID NO: 16289 - DNA, 27 bp, synthetic construct
  misc_feature 1..27: note = Description of Artificial Sequence: Synthetic oligonucleotide
  source 1..27: mol_type = other DNA
ttacagtataatagttacccattcact

SEQ ID NO: 16290 - protein, 9 aa, synthetic construct
  REGION 1..9: note = Description of Artificial Sequence: Synthetic peptide
LQYNSYPFT

SEQ ID NO: 16291 - DNA, 27 bp, synthetic construct
  misc_feature 1..27: note = Description of Artificial Sequence: Synthetic oligonucleotide
  source 1..27: mol_type = other DNA
caacagagttacagtacccctttcact

SEQ ID NO: 16292 - protein, 9 aa, synthetic construct
  REGION 1..9: note = Description of Artificial Sequence: Synthetic peptide
QQSYSTPFT

SEQ ID NO: 16293 - DNA, 30 bp, synthetic construct
  misc_feature 1..30: note = Description of Artificial Sequence: Synthetic oligonucleotide
  source 1..30: mol_type = other DNA
caacagagttacagaacccccttattcact

SEQ ID NO: 16294 - protein, 10 aa, synthetic construct
  REGION 1..10: note = Description of Artificial Sequence: Synthetic peptide
QQSYRTPLFT

SEQ ID NO: 16295 - DNA, 27 bp, synthetic construct
  misc_feature 1..27: note = Description of Artificial Sequence: Synthetic oligonucleotide
  source 1..27: mol_type = other DNA
ctacagcataatagttacccgctcact

SEQ ID NO: 16296 - protein, 9 aa, synthetic construct
  REGION 1..9: note = Description of Artificial Sequence: Synthetic peptide
LQHNSYPLT

SEQ ID NO: 16297 - DNA, 30 bp, synthetic construct; identical to SEQ ID NO: 16257
  misc_feature 1..30: note = Description of Artificial Sequence: Synthetic oligonucleotide
  source 1..30: mol_type = other DNA

SEQ ID NO: 16298 - protein, 10 aa, synthetic construct
  REGION 1..10: note = Description of Artificial Sequence: Synthetic peptide
QQSYRTPFFT

SEQ ID NO: 16299 - DNA, 30 bp, synthetic construct
  misc_feature 1..30: note = Description of Artificial Sequence: Synthetic oligonucleotide
  source 1..30: mol_type = other DNA
caacagacttacagtacccccttattcgct

SEQ ID NO: 16300 - protein, 10 aa, synthetic construct
  REGION 1..10: note = Description of Artificial Sequence: Synthetic peptide
QQTYSTPLFA

SEQ ID NO: 16301 - DNA, 27 bp, synthetic construct
  misc_feature 1..27: note = Description of Artificial Sequence: Synthetic oligonucleotide
  source 1..27: mol_type = other DNA
ctacagcatagtagttacccgctcact

SEQ ID NO: 16302 - protein, 9 aa, synthetic construct
  REGION 1..9: note = Description of Artificial Sequence: Synthetic peptide
LQHSSYPLT

SEQ ID NO: 16303 - DNA, 27 bp, synthetic construct
  misc_feature 1..27: note = Description of Artificial Sequence: Synthetic oligonucleotide
  source 1..27: mol_type = other DNA
caacagtataatacttacccattcact

SEQ ID NO: 16304 - protein, 9 aa, synthetic construct
  REGION 1..9: note = Description of Artificial Sequence: Synthetic peptide
QQYNTYPFT

SEQ ID NO: 16305 - DNA, 27 bp, synthetic construct
  misc_feature 1..27: note = Description of Artificial Sequence: Synthetic oligonucleotide
  source 1..27: mol_type = other DNA
ctacagcataatggttacccgtggacg

SEQ ID NO: 16306 - protein, 9 aa, synthetic construct
  REGION 1..9: note = Description of Artificial Sequence: Synthetic peptide
LQHNGYPWT

SEQ ID NO: 16307 - DNA, 27 bp, synthetic construct
  misc_feature 1..27: note = Description of Artificial Sequence: Synthetic oligonucleotide
  source 1..27: mol_type = other DNA
caacagtatcatagtttcccattcact

SEQ ID NO: 16308 - protein, 9 aa, synthetic construct
  REGION 1..9: note = Description of Artificial Sequence: Synthetic peptide
QQYHSFPFT

SEQ ID NO: 16309 - DNA, 27 bp, synthetic construct
  misc_feature 1..27: note = Description of Artificial Sequence: Synthetic oligonucleotide
  source 1..27: mol_type = other DNA
ctacagcataatagttacccgctcact

SEQ ID NO: 16310 - protein, 9 aa, synthetic construct
  REGION 1..9: note = Description of Artificial Sequence: Synthetic peptide
LQHNSYPLT

SEQ ID NO: 16311 - DNA, 30 bp, synthetic construct
  misc_feature 1..30: note = Description of Artificial Sequence: Synthetic oligonucleotide
  source 1..30: mol_type = other DNA
atgcaagttctacaaactcctcccctcact

SEQ ID NO: 16312 - protein, 10 aa, synthetic construct
  REGION 1..10: note = Description of Artificial Sequence: Synthetic peptide
MQVLQTPPLT

SEQ ID NO: 16313 - DNA, 30 bp, synthetic construct
  misc_feature 1..30: note = Description of Artificial Sequence: Synthetic oligonucleotide
  source 1..30: mol_type = other DNA
caacagagttacaatacccccttattcact

SEQ ID NO: 16314 - protein, 10 aa, synthetic construct
  REGION 1..10: note = Description of Artificial Sequence: Synthetic peptide
QQSYNTPLFT

SEQ ID NO: 16315 - DNA, 30 bp, synthetic construct; identical to SEQ ID NO: 16257
  misc_feature 1..30: note = Description of Artificial Sequence: Synthetic oligonucleotide
  source 1..30: mol_type = other DNA

SEQ ID NO: 16316 - protein, 10 aa, synthetic construct
  REGION 1..10: note = Description of Artificial Sequence: Synthetic peptide
QQSYRTPFFT

SEQ ID NO: 16317 - DNA, 30 bp, synthetic construct
  misc_feature 1..30: note = Description of Artificial Sequence: Synthetic oligonucleotide
  source 1..30: mol_type = other DNA
caaaagtataacagtgcccctccgatcacc

SEQ ID NO: 16318 - protein, 10 aa, synthetic construct
  REGION 1..10: note = Description of Artificial Sequence: Synthetic peptide
QKYNSAPPIT

SEQ ID NO: 16319 - DNA, 27 bp, synthetic construct
  misc_feature 1..27: note = Description of Artificial Sequence: Synthetic oligonucleotide
  source 1..27: mol_type = other DNA
caacaggctaacagtttccctcggacg

SEQ ID NO: 16320 - protein, 9 aa, synthetic construct
  REGION 1..9: note = Description of Artificial Sequence: Synthetic peptide
QQANSFPRT

SEQ ID NO: 16321 - DNA, 30 bp, synthetic construct
  misc_feature 1..30: note = Description of Artificial Sequence: Synthetic oligonucleotide
  source 1..30: mol_type = other DNA
caacagagttacactacccccacgtggacg

SEQ ID NO: 16322 - protein, 10 aa, synthetic construct
  REGION 1..10: note = Description of Artificial Sequence: Synthetic peptide
QQSYTTPTWT

SEQ ID NO: 16323 - DNA, 27 bp, synthetic construct
  misc_feature 1..27: note = Description of Artificial Sequence: Synthetic oligonucleotide
  source 1..27: mol_type = other DNA
ctacaacataatagttacccgttgacg

SEQ ID NO: 16324 - protein, 9 aa, synthetic construct
  REGION 1..9: note = Description of Artificial Sequence: Synthetic peptide
LQHNSYPLT

SEQ ID NO: 16325 - DNA, 27 bp, synthetic construct
  misc_feature 1..27: note = Description of Artificial Sequence: Synthetic oligonucleotide
  source 1..27: mol_type = other DNA
cagcagtataataactggcctctgacg

SEQ ID NO: 16326 - protein, 9 aa, synthetic construct
  REGION 1..9: note = Description of Artificial Sequence: Synthetic peptide
QQYNNWPLT

SEQ ID NO: 16327 - DNA, 30 bp, synthetic construct
  misc_feature 1..30: note = Description of Artificial Sequence: Synthetic oligonucleotide
  source 1..30: mol_type = other DNA
caacagacttacactacccccacgtggacg

SEQ ID NO: 16328 - protein, 10 aa, synthetic construct
  REGION 1..10: note = Description of Artificial Sequence: Synthetic peptide
QQTYTTPTWT

SEQ ID NO: 16329 - DNA, 27 bp, synthetic construct
  misc_feature 1..27: note = Description of Artificial Sequence: Synthetic oligonucleotide
  source 1..27: mol_type = other DNA
caacagacttacagtcccccgctcact

SEQ ID NO: 16330 - protein, 9 aa, synthetic construct
  REGION 1..9: note = Description of Artificial Sequence: Synthetic peptide
QQTYSPPLT

SEQ ID NO: 16331 - DNA, 27 bp, synthetic construct
  misc_feature 1..27: note = Description of Artificial Sequence: Synthetic oligonucleotide
  source 1..27: mol_type = other DNA
ctacaacataataattacccgtggacg

SEQ ID NO: 16332 - protein, 9 aa, synthetic construct
  REGION 1..9: note = Description of Artificial Sequence: Synthetic peptide
LQHNNYPWT

SEQ ID NO: 16333 - DNA, 27 bp, synthetic construct
  misc_feature 1..27: note = Description of Artificial Sequence: Synthetic oligonucleotide
  source 1..27: mol_type = other DNA
ctacagcattataattaccctcgggcg

SEQ ID NO: 16334 - protein, 9 aa, synthetic construct
  REGION 1..9: note = Description of Artificial Sequence: Synthetic peptide
LQHYNYPRA

SEQ ID NO: 16335 - DNA, 27 bp, synthetic construct
  misc_feature 1..27: note = Description of Artificial Sequence: Synthetic oligonucleotide
  source 1..27: mol_type = other DNA
ctacagcataatagttacccgttcact

SEQ ID NO: 16336 - protein, 9 aa, synthetic construct
  REGION 1..9: note = Description of Artificial Sequence: Synthetic peptide
LQHNSYPFT

SEQ ID NO: 16337 - DNA, 27 bp, synthetic construct
  misc_feature 1..27: note = Description of Artificial Sequence: Synthetic oligonucleotide
  source 1..27: mol_type = other DNA
caacagtattatagttacccattcact

SEQ ID NO: 16338 - protein, 9 aa, synthetic construct
  REGION 1..9: note = Description of Artificial Sequence: Synthetic peptide
QQYYSYPFT

SEQ ID NO: 16339 - DNA, 27 bp, synthetic construct
  misc_feature 1..27: note = Description of Artificial Sequence: Synthetic oligonucleotide
  source 1..27: mol_type = other DNA
caacagtataatagttacccgatcacc

SEQ ID NO: 16340 - protein, 9 aa, synthetic construct
  REGION 1..9: note = Description of Artificial Sequence: Synthetic peptide
QQYNSYPIT

SEQ ID NO: 16341 - DNA, 27 bp, synthetic construct
  misc_feature 1..27: note = Description of Artificial Sequence: Synthetic oligonucleotide
  source 1..27: mol_type = other DNA
ctacagcataatagatacccgctcact

SEQ ID NO: 16342 - protein, 9 aa, synthetic construct
  REGION 1..9: note = Description of Artificial Sequence: Synthetic peptide
LQHNRYPLT

SEQ ID NO: 16343 - DNA, 27 bp, synthetic construct
  misc_feature 1..27: note = Description of Artificial Sequence: Synthetic oligonucleotide
  source 1..27: mol_type = other DNA
caacagagttacagtacctcgatcacc

SEQ ID NO: 16344 - protein, 9 aa, synthetic construct
  REGION 1..9: note = Description of Artificial Sequence: Synthetic peptide
QQSYSTSIT

SEQ ID NO: 16345 - DNA, 27 bp, synthetic construct
  misc_feature 1..27: note = Description of Artificial Sequence: Synthetic oligonucleotide
  source 1..27: mol_type = other DNA
ctacaacataataattacccgtggacg

SEQ ID NO: 16346 - protein, 9 aa, synthetic construct
  REGION 1..9: note = Description of Artificial Sequence: Synthetic peptide
LQHNNYPWT

SEQ ID NO: 16347 - DNA, 30 bp, synthetic construct
  misc_feature 1..30: note = Description of Artificial Sequence: Synthetic oligonucleotide
  source 1..30: mol_type = other DNA
caacagagtttcagaaccccctttttcact

SEQ ID NO: 16348 - protein, 10 aa, synthetic construct
  REGION 1..10: note = Description of Artificial Sequence: Synthetic peptide
QQSFRTPFFT

SEQ ID NO: 16349 - DNA, 30 bp, synthetic construct; identical to SEQ ID NO: 16293
  misc_feature 1..30: note = Description of Artificial Sequence: Synthetic oligonucleotide
  source 1..30: mol_type = other DNA

SEQ ID NO: 16350 - protein, 10 aa, synthetic construct
  REGION 1..10: note = Description of Artificial Sequence: Synthetic peptide
QQSYRTPLFT

SEQ ID NO: 16351 - DNA, 30 bp, synthetic construct
  misc_feature 1..30: note = Description of Artificial Sequence: Synthetic oligonucleotide
  source 1..30: mol_type = other DNA
caacagagtttcagaacccccttattcact

SEQ ID NO: 16352 - protein, 10 aa, synthetic construct
  REGION 1..10: note = Description of Artificial Sequence: Synthetic peptide
QQSFRTPLFT

SEQ ID NO: 16353 - DNA, 30 bp, synthetic construct
  misc_feature 1..30: note = Description of Artificial Sequence: Synthetic oligonucleotide
  source 1..30: mol_type = other DNA
caacagagttacagtacccccacgtggacg

SEQ ID NO: 16354 - protein, 10 aa, synthetic construct
  REGION 1..10: note = Description of Artificial Sequence: Synthetic peptide
QQSYSTPTWT

SEQ ID NO: 16355 - DNA, 27 bp, synthetic construct
  misc_feature 1..27: note = Description of Artificial Sequence: Synthetic oligonucleotide
  source 1..27: mol_type = other DNA
cagcagtataataactgtcctctgacg

SEQ ID NO: 16356 - protein, 9 aa, synthetic construct
  REGION 1..9: note = Description of Artificial Sequence: Synthetic peptide
QQYNNCPLT

SEQ ID NO: 16357 - DNA, 30 bp, synthetic construct; identical to SEQ ID NO: 16321
  misc_feature 1..30: note = Description of Artificial Sequence: Synthetic oligonucleotide
  source 1..30: mol_type = other DNA

SEQ ID NO: 16358 - protein, 10 aa, synthetic construct
  REGION 1..10: note = Description of Artificial Sequence: Synthetic peptide
QQSYTTPTWT

SEQ ID NO: 16359 - DNA, 27 bp, synthetic construct
  misc_feature 1..27: note = Description of Artificial Sequence: Synthetic oligonucleotide
  source 1..27: mol_type = other DNA
ctacagcataatagttacccgttcact

SEQ ID NO: 16360 - protein, 9 aa, synthetic construct
  REGION 1..9: note = Description of Artificial Sequence: Synthetic peptide
LQHNSYPFT

SEQ ID NO: 16361 - DNA, 27 bp, synthetic construct
  misc_feature 1..27: note = Description of Artificial Sequence: Synthetic oligonucleotide
  source 1..27: mol_type = other DNA
ctacagcatagtagttaccccctcact

SEQ ID NO: 16362 - protein, 9 aa, synthetic construct
  REGION 1..9: note = Description of Artificial Sequence: Synthetic peptide
LQHSSYPLT

SEQ ID NO: 16363 - DNA, 27 bp, synthetic construct
  misc_feature 1..27: note = Description of Artificial Sequence: Synthetic oligonucleotide
  source 1..27: mol_type = other DNA
caacagtataatagttacccgttcagg

SEQ ID NO: 16364 - protein, 9 aa, synthetic construct
  REGION 1..9: note = Description of Artificial Sequence: Synthetic peptide
QQYNSYPFR

SEQ ID NO: 16365 - DNA, 27 bp, synthetic construct
  misc_feature 1..27: note = Description of Artificial Sequence: Synthetic oligonucleotide
  source 1..27: mol_type = other DNA
ctacaggataatagttacccattcact

SEQ ID NO: 16366 - protein, 9 aa, synthetic construct
  REGION 1..9: note = Description of Artificial Sequence: Synthetic peptide
LQDNSYPFT

SEQ ID NO: 16367 - DNA, 27 bp, synthetic construct
  misc_feature 1..27: note = Description of Artificial Sequence: Synthetic oligonucleotide
  source 1..27: mol_type = other DNA
ctacagcataatacttacccgctcact

SEQ ID NO: 16368 - protein, 9 aa, synthetic construct
  REGION 1..9: note = Description of Artificial Sequence: Synthetic peptide
LQHNTYPLT

SEQ ID NO: 16369 - DNA, 27 bp, synthetic construct
  misc_feature 1..27: note = Description of Artificial Sequence: Synthetic oligonucleotide
  source 1..27: mol_type = other DNA
caacagtatcatagttacccattcact

SEQ ID NO: 16370 - protein, 9 aa, synthetic construct
  REGION 1..9: note = Description of Artificial Sequence: Synthetic peptide
QQYHSYPFT

SEQ ID NO: 16371 - DNA, 27 bp, synthetic construct
  misc_feature 1..27: note = Description of Artificial Sequence: Synthetic oligonucleotide
  source 1..27: mol_type = other DNA
caacagtataatagttacccattcact

SEQ ID NO: 16372 - protein, 9 aa, synthetic construct
  REGION 1..9: note = Description of Artificial Sequence: Synthetic peptide
QQYNSYPFT

SEQ ID NO: 16373 - DNA, 27 bp, synthetic construct
  misc_feature 1..27: note = Description of Artificial Sequence: Synthetic oligonucleotide
  source 1..27: mol_type = other DNA
cagcaattttatagtactcctccgacg

SEQ ID NO: 16374 - protein, 9 aa, synthetic construct
  REGION 1..9: note = Description of Artificial Sequence: Synthetic peptide
QQFYSTPPT

SEQ ID NO: 16375 - DNA, 27 bp, synthetic construct
  misc_feature 1..27: note = Description of Artificial Sequence: Synthetic oligonucleotide
  source 1..27: mol_type = other DNA
ctacaagataatagttacccgttcact

SEQ ID NO: 16376 - protein, 9 aa, synthetic construct
  REGION 1..9: note = Description of Artificial Sequence: Synthetic peptide
LQDNSYPFT

SEQ ID NO: 16377 - DNA, 27 bp, synthetic construct
  misc_feature 1..27: note = Description of Artificial Sequence: Synthetic oligonucleotide
  source 1..27: mol_type = other DNA
atacagcaaaatagttacccgtggacg

SEQ ID NO: 16378 - protein, 9 aa, synthetic construct
  REGION 1..9: note = Description of Artificial Sequence: Synthetic peptide
IQQNSYPWT

SEQ ID NO: 16379 - DNA, 30 bp, synthetic construct; identical to SEQ ID NO: 16317
  misc_feature 1..30: note = Description of Artificial Sequence: Synthetic oligonucleotide
  source 1..30: mol_type = other DNA

SEQ ID NO: 16380 - protein, 10 aa, synthetic construct
  REGION 1..10: note = Description of Artificial Sequence: Synthetic peptide
QKYNSAPPIT

SEQ ID NO: 16381 - DNA, 27 bp, synthetic construct
  misc_feature 1..27: note = Description of Artificial Sequence: Synthetic oligonucleotide
  source 1..27: mol_type = other DNA
ctacagcataatagttatccgctcact

SEQ ID NO: 16382 - protein, 9 aa, synthetic construct
  REGION 1..9: note = Description of Artificial Sequence: Synthetic peptide
LQHNSYPLT

SEQ ID NO: 16383 - DNA, 27 bp, synthetic construct
  misc_feature 1..27: note = Description of Artificial Sequence: Synthetic oligonucleotide
  source 1..27: mol_type = other DNA
cttcagcataatagttacccgtggacg

SEQ ID NO: 16384 - protein, 9 aa, synthetic construct
  REGION 1..9: note = Description of Artificial Sequence: Synthetic peptide
LQHNSYPWT

SEQ ID NO: 16385 - DNA, 27 bp, synthetic construct
  misc_feature 1..27: note = Description of Artificial Sequence: Synthetic oligonucleotide
  source 1..27: mol_type = other DNA
caacagacttacagtaccccgctcact

SEQ ID NO: 16386 - protein, 9 aa, synthetic construct
  REGION 1..9: note = Description of Artificial Sequence: Synthetic peptide
QQTYSTPLT

SEQ ID NO: 16387 - DNA, 27 bp, synthetic construct
  misc_feature 1..27: note = Description of Artificial Sequence: Synthetic oligonucleotide
  source 1..27: mol_type = other DNA
ctacagcatagtacttaccctctcact

SEQ ID NO: 16388 - protein, 9 aa, synthetic construct
  REGION 1..9: note = Description of Artificial Sequence: Synthetic peptide
LQHSTYPLT

SEQ ID NO: 16389 - DNA, 27 bp, synthetic construct
  misc_feature 1..27: note = Description of Artificial Sequence: Synthetic oligonucleotide
  source 1..27: mol_type = other DNA
caacagttttatagttacccattcact

SEQ ID NO: 16390 - protein, 9 aa, synthetic construct
  REGION 1..9: note = Description of Artificial Sequence: Synthetic peptide
QQFYSYPFT

SEQ ID NO: 16391 - DNA, 30 bp, synthetic construct
  misc_feature 1..30: note = Description of Artificial Sequence: Synthetic oligonucleotide
  source 1..30: mol_type = other DNA
cagcagtataataactggcccatgtgcagt

SEQ ID NO: 16392 - protein, 10 aa, synthetic construct
  REGION 1..10: note = Description of Artificial Sequence: Synthetic peptide
QQYNNWPMCS

SEQ ID NO: 16393 - DNA, 30 bp, synthetic construct
  misc_feature 1..30: note = Description of Artificial Sequence: Synthetic oligonucleotide
  source 1..30: mol_type = other DNA
caacagagttacaatacccccacgtggacg

SEQ ID NO: 16394 - protein, 10 aa, synthetic construct
  REGION 1..10: note = Description of Artificial Sequence: Synthetic peptide
QQSYNTPTWT

SEQ ID NO: 16395 - DNA, 27 bp, synthetic construct
  misc_feature 1..27: note = Description of Artificial Sequence: Synthetic oligonucleotide
  source 1..27: mol_type = other DNA
ctacagcataatagttacccgctcact

SEQ ID NO: 16396 - protein, 9 aa, synthetic construct
  REGION 1..9: note = Description of Artificial Sequence: Synthetic peptide
LQHNSYPLT

SEQ ID NO: 16397 - DNA, 30 bp, synthetic construct; identical to SEQ ID NO: 16257
  misc_feature 1..30: note = Description of Artificial Sequence: Synthetic oligonucleotide
  source 1..30: mol_type = other DNA

SEQ ID NO: 16398 - protein, 10 aa, synthetic construct
  REGION 1..10: note = Description of Artificial Sequence: Synthetic peptide
QQSYRTPFFT

SEQ ID NO: 16399 - DNA, 27 bp, synthetic construct
  misc_feature 1..27: note = Description of Artificial Sequence: Synthetic oligonucleotide
  source 1..27: mol_type = other DNA
atgcaaactttacaccttccgtggacg

SEQ ID NO: 16400 - protein, 9 aa, synthetic construct
  REGION 1..9: note = Description of Artificial Sequence: Synthetic peptide
MQTLHLPWT

SEQ ID NO: 16401 - DNA, 30 bp, synthetic construct; identical to SEQ ID NO: 16313
  misc_feature 1..30: note = Description of Artificial Sequence: Synthetic oligonucleotide
  source 1..30: mol_type = other DNA

SEQ ID NO: 16402 - protein, 10 aa, synthetic construct
  REGION 1..10: note = Description of Artificial Sequence: Synthetic peptide
QQSYNTPLFT

SEQ ID NO: 16403 - DNA, 27 bp, synthetic construct
  misc_feature 1..27: note = Description of Artificial Sequence: Synthetic oligonucleotide
  source 1..27: mol_type = other DNA
caacagacttacggtacctcgatcacc

SEQ ID NO: 16404 - protein, 9 aa, synthetic construct
  REGION 1..9: note = Description of Artificial Sequence: Synthetic peptide
QQTYGTSIT

SEQ ID NO: 16405 - DNA, 27 bp, synthetic construct
  misc_feature 1..27: note = Description of Artificial Sequence: Synthetic oligonucleotide
  source 1..27: mol_type = other DNA
ctacagcatagtagttaccctctcact

SEQ ID NO: 16406 - protein, 9 aa, synthetic construct
  REGION 1..9: note = Description of Artificial Sequence: Synthetic peptide
LQHSSYPLT

SEQ ID NO: 16407 - DNA, 27 bp, synthetic construct
  misc_feature 1..27: note = Description of Artificial Sequence: Synthetic oligonucleotide
  source 1..27: mol_type = other DNA
ctacagcataatagttacccgctcact

SEQ ID NO: 16408 - protein, 9 aa, synthetic construct
  REGION 1..9: note = Description of Artificial Sequence: Synthetic peptide
LQHNSYPLT

SEQ ID NO: 16409 - DNA, 27 bp, synthetic construct
  misc_feature 1..27: note = Description of Artificial Sequence: Synthetic oligonucleotide
  source 1..27: mol_type = other DNA
ctacagcatagtaattacccgctcact

SEQ ID NO: 16410 - protein, 9 aa, synthetic construct
  REGION 1..9: note = Description of Artificial Sequence: Synthetic peptide
LQHSNYPLT

SEQ ID NO: 16411 - DNA, 27 bp, synthetic construct
  misc_feature 1..27: note = Description of Artificial Sequence: Synthetic oligonucleotide
  source 1..27: mol_type = other DNA
caacagtataatacttatccattcact

SEQ ID NO: 16412 - protein, 9 aa, synthetic construct
  REGION 1..9: note = Description of Artificial Sequence: Synthetic peptide
QQYNTYPFT

SEQ ID NO: 16413 - DNA, 27 bp, synthetic construct
  misc_feature 1..27: note = Description of Artificial Sequence: Synthetic oligonucleotide
  source 1..27: mol_type = other DNA
caacagagttacaatatctcattcact

SEQ ID NO: 16414 - protein, 9 aa, synthetic construct
  REGION 1..9: note = Description of Artificial Sequence: Synthetic peptide
QQSYNISFT

SEQ ID NO: 16415 - DNA, 27 bp, synthetic construct
  misc_feature 1..27: note = Description of Artificial Sequence: Synthetic oligonucleotide
  source 1..27: mol_type = other DNA
ctacagcataatagttacccgtggacg

SEQ ID NO: 16416 - protein, 9 aa, synthetic construct
  REGION 1..9: note = Description of Artificial Sequence: Synthetic peptide
LQHNSYPWT

SEQ ID NO: 16417 - DNA, 27 bp, synthetic construct
  misc_feature 1..27: note = Description of Artificial Sequence: Synthetic oligonucleotide
  source 1..27: mol_type = other DNA
ctacagcatagtacttacccgctcact

SEQ ID NO: 16418 - protein, 9 aa, synthetic construct
  REGION 1..9: note = Description of Artificial Sequence: Synthetic peptide
LQHSTYPLT

SEQ ID NO: 16419 - DNA, 27 bp, synthetic construct
  misc_feature 1..27: note = Description of Artificial Sequence: Synthetic oligonucleotide
  source 1..27: mol_type = other DNA
ctacaccactatagttatcctcggacg

SEQ ID NO: 16420 - protein, 9 aa, synthetic construct
  REGION 1..9: note = Description of Artificial Sequence: Synthetic peptide
LHHYSYPRT

SEQ ID NO: 16421 - DNA, 27 bp, synthetic construct
  misc_feature 1..27: note = Description of Artificial Sequence: Synthetic oligonucleotide
  source 1..27: mol_type = other DNA
ctacagcataatagttacccgctcact

SEQ ID NO: 16422 - protein, 9 aa, synthetic construct
  REGION 1..9: note = Description of Artificial Sequence: Synthetic peptide
LQHNSYPLT

SEQ ID NO: 16423 - DNA, 27 bp, synthetic construct
  misc_feature 1..27: note = Description of Artificial Sequence: Synthetic oligonucleotide
  source 1..27: mol_type = other DNA
caacagtataatagttacccattcact

SEQ ID NO: 16424 - protein, 9 aa, synthetic construct
  REGION 1..9: note = Description of Artificial Sequence: Synthetic peptide
QQYNSYPFT

SEQ ID NO: 16425 - DNA, 27 bp, synthetic construct
  misc_feature 1..27: note = Description of Artificial Sequence: Synthetic oligonucleotide
  source 1..27: mol_type = other DNA
caacagtataatagttaccctttcact

SEQ ID NO: 16426 - protein, 9 aa, synthetic construct
  REGION 1..9: note = Description of Artificial Sequence: Synthetic peptide
QQYNSYPFT

SEQ ID NO: 16427 - DNA, 27 bp, synthetic construct
  misc_feature 1..27: note = Description of Artificial Sequence: Synthetic oligonucleotide
  source 1..27: mol_type = other DNA
ctacagcataatagttacccgtggacg

SEQ ID NO: 16428 - protein, 9 aa, synthetic construct
  REGION 1..9: note = Description of Artificial Sequence: Synthetic peptide
LQHNSYPWT

SEQ ID NO: 16429 - DNA, 27 bp, synthetic construct
  misc_feature 1..27: note = Description of Artificial Sequence: Synthetic oligonucleotide
  source 1..27: mol_type = other DNA
ctacagcattatagttaccctcggacg

SEQ ID NO: 16430 - protein, 9 aa, synthetic construct
  REGION 1..9: note = Description of Artificial Sequence: Synthetic peptide
LQHYSYPRT

SEQ ID NO: 16431 - DNA, 27 bp, synthetic construct
  misc_feature 1..27: note = Description of Artificial Sequence: Synthetic oligonucleotide
  source 1..27: mol_type = other DNA
caacagtatcatagttacccgtggacg

SEQ ID NO: 16432 - protein, 9 aa, synthetic construct
  REGION 1..9: note = Description of Artificial Sequence: Synthetic peptide
QQYHSYPWT

SEQ ID NO: 16433 - DNA, 27 bp, synthetic construct
  misc_feature 1..27: note = Description of Artificial Sequence: Synthetic oligonucleotide
  source 1..27: mol_type = other DNA
ctacagcataatagttacccgctcact

SEQ ID NO: 16434 - protein, 9 aa, synthetic construct
  REGION 1..9: note = Description of Artificial Sequence: Synthetic peptide
LQHNSYPLT

SEQ ID NO: 16435 - DNA, 30 bp, synthetic construct; identical to SEQ ID NO: 16257
  misc_feature 1..30: note = Description of Artificial Sequence: Synthetic oligonucleotide
  source 1..30: mol_type = other DNA

SEQ ID NO: 16436 - protein, 10 aa, synthetic construct
  REGION 1..10: note = Description of Artificial Sequence: Synthetic peptide
QQSYRTPFFT

SEQ ID NO: 16437 - DNA, 27 bp, synthetic construct
  misc_feature 1..27: note = Description of Artificial Sequence: Synthetic oligonucleotide
  source 1..27: mol_type = other DNA
ctacagcataatagttaccccctcact

SEQ ID NO: 16438 - protein, 9 aa, synthetic construct
  REGION 1..9: note = Description of Artificial Sequence: Synthetic peptide
LQHNSYPLT

SEQ ID NO: 16439 - DNA, 27 bp, synthetic construct
  misc_feature 1..27: note = Description of Artificial Sequence: Synthetic oligonucleotide
  source 1..27: mol_type = other DNA
caacagtataatagtttcccgctcact

SEQ ID NO: 16440 - protein, 9 aa, synthetic construct
  REGION 1..9: note = Description of Artificial Sequence: Synthetic peptide
QQYNSFPLT

SEQ ID NO: 16441 - DNA, 27 bp, synthetic construct
  misc_feature 1..27: note = Description of Artificial Sequence: Synthetic oligonucleotide
  source 1..27: mol_type = other DNA
ctacagcataatagttacccgctcact

SEQ ID NO: 16442 - protein, 9 aa, synthetic construct
  REGION 1..9: note = Description of Artificial Sequence: Synthetic peptide
LQHNSYPLT

SEQ ID NO: 16443 - DNA, 27 bp, synthetic construct
  misc_feature 1..27: note = Description of Artificial Sequence: Synthetic oligonucleotide
  source 1..27: mol_type = other DNA
atgcaaagtatacagcttccgctctca

SEQ ID NO: 16444 - protein, 9 aa, synthetic construct
  REGION 1..9: note = Description of Artificial Sequence: Synthetic peptide
MQSIQLPLS

SEQ ID NO: 16445 - DNA, 27 bp, synthetic construct
  misc_feature 1..27: note = Description of Artificial Sequence: Synthetic oligonucleotide
  source 1..27: mol_type = other DNA
cagcagtatggtagctcacctcggacg

SEQ ID NO: 16446 - protein, 9 aa, synthetic construct
  REGION 1..9: note = Description of Artificial Sequence: Synthetic peptide
QQYGSSPRT

SEQ ID NO: 16447 - DNA, 27 bp, synthetic construct
  misc_feature 1..27: note = Description of Artificial Sequence: Synthetic oligonucleotide
  source 1..27: mol_type = other DNA
ctacagcataatcgttacccgctcact

SEQ ID NO: 16448 - protein, 9 aa, synthetic construct
  REGION 1..9: note = Description of Artificial Sequence: Synthetic peptide
LQHNRYPLT

SEQ ID NO: 16449 - DNA, 27 bp, synthetic construct
  misc_feature 1..27: note = Description of Artificial Sequence: Synthetic oligonucleotide
  source 1..27: mol_type = other DNA
caacagtatgaaaatctcccgatcacc

SEQ ID NO: 16450 - protein, 9 aa, synthetic construct
  REGION 1..9: note = Description of Artificial Sequence: Synthetic peptide
QQYENLPIT

SEQ ID NO: 16451 - DNA, 27 bp, synthetic construct
  misc_feature 1..27: note = Description of Artificial Sequence: Synthetic oligonucleotide
  source 1..27: mol_type = other DNA
ctacagcatagtacttaccctctcact

SEQ ID NO: 16452 - protein, 9 aa, synthetic construct
  REGION 1..9: note = Description of Artificial Sequence: Synthetic peptide
LQHSTYPLT

SEQ ID NO: 16453 - DNA, 27 bp, synthetic construct
  misc_feature 1..27: note = Description of Artificial Sequence: Synthetic oligonucleotide
  source 1..27: mol_type = other DNA
ctacagcattatagttaccctcggacg

SEQ ID NO: 16454 - protein, 9 aa, synthetic construct
  REGION 1..9: note = Description of Artificial Sequence: Synthetic peptide
LQHYSYPRT

SEQ ID NO: 16455 - DNA, 33 bp, synthetic construct
  misc_feature 1..33: note = Description of Artificial Sequence: Synthetic oligonucleotide
  source 1..33: mol_type = other DNA
caacagacttacaatattcttccggagcgcagt

SEQ ID NO: 16456 - protein, 11 aa, synthetic construct
  REGION 1..11: note = Description of Artificial Sequence: Synthetic peptide
QQTYNILPERS

SEQ ID NO: 16457 - DNA, 27 bp, synthetic construct
  misc_feature 1..27: note = Description of Artificial Sequence: Synthetic oligonucleotide
  source 1..27: mol_type = other DNA
ctacagcataataattacccgtggacg

SEQ ID NO: 16458 - protein, 9 aa, synthetic construct
  REGION 1..9: note = Description of Artificial Sequence: Synthetic peptide
LQHNNYPWT

SEQ ID NO: 16459 - DNA, 30 bp, synthetic construct; identical to SEQ ID NO: 16293
  misc_feature 1..30: note = Description of Artificial Sequence: Synthetic oligonucleotide
  source 1..30: mol_type = other DNA

SEQ ID NO: 16460 - protein, 10 aa, synthetic construct
  REGION 1..10: note = Description of Artificial Sequence: Synthetic peptide
QQSYRTPLFT

SEQ ID NO: 16461 - DNA, 27 bp, synthetic construct
  misc_feature 1..27: note = Description of Artificial Sequence: Synthetic oligonucleotide
  source 1..27: mol_type = other DNA
ctacagcataatagttacccgctcact

SEQ ID NO: 16462 - protein, 9 aa, synthetic construct
  REGION 1..9: note = Description of Artificial Sequence: Synthetic peptide
LQHNSYPLT

SEQ ID NO: 16463 - DNA, 27 bp, synthetic construct
  misc_feature 1..27: note = Description of Artificial Sequence: Synthetic oligonucleotide
  source 1..27: mol_type = other DNA
ctacagcataatagttacccgctcact

SEQ ID NO: 16464 - protein, 9 aa, synthetic construct
  REGION 1..9: note = Description of Artificial Sequence: Synthetic peptide
LQHNSYPLT

SEQ ID NO: 16465 - DNA, 27 bp, synthetic construct
  misc_feature 1..27: note = Description of Artificial Sequence: Synthetic oligonucleotide
  source 1..27: mol_type = other DNA
ctgcaacattatagttaccctcggacg

SEQ ID NO: 16466 - protein, 9 aa, synthetic construct
  REGION 1..9: note = Description of Artificial Sequence: Synthetic peptide
LQHYSYPRT

SEQ ID NO: 16467 - DNA, 27 bp, synthetic construct
  misc_feature 1..27: note = Description of Artificial Sequence: Synthetic oligonucleotide
  source 1..27: mol_type = other DNA
cagcagtattatgatactcctccgacg

SEQ ID NO: 16468 - protein, 9 aa, synthetic construct
  REGION 1..9: note = Description of Artificial Sequence: Synthetic peptide
QQYYDTPPT

SEQ ID NO: 16469 - DNA, 27 bp, synthetic construct
  misc_feature 1..27: note = Description of Artificial Sequence: Synthetic oligonucleotide
  source 1..27: mol_type = other DNA
atgcaaagtacacagtttccgctcact

SEQ ID NO: 16470 - protein, 9 aa, synthetic construct
  REGION 1..9: note = Description of Artificial Sequence: Synthetic peptide
MQSTQFPLT

SEQ ID NO: 16471 - DNA, 27 bp, synthetic construct
  misc_feature 1..27: note = Description of Artificial Sequence: Synthetic oligonucleotide
  source 1..27: mol_type = other DNA
caacagtataatagttacccattcact

SEQ ID NO: 16472 - protein, 9 aa, synthetic construct
  REGION 1..9: note = Description of Artificial Sequence: Synthetic peptide
QQYNSYPFT

SEQ ID NO: 16473 - DNA, 27 bp, synthetic construct
  misc_feature 1..27: note = Description of Artificial Sequence: Synthetic oligonucleotide
  source 1..27: mol_type = other DNA
caacagtatcatagtttcccattcact

SEQ ID NO: 16474 - protein, 9 aa, synthetic construct
  REGION 1..9: note = Description of Artificial Sequence: Synthetic peptide
QQYHSFPFT

SEQ ID NO: 16475 - DNA, 27 bp, synthetic construct
  misc_feature 1..27: note = Description of Artificial Sequence: Synthetic oligonucleotide
  source 1..27: mol_type = other DNA
ctacaacataatagttacccgtggacg

SEQ ID NO: 16476 - protein, 9 aa, synthetic construct
  REGION 1..9: note = Description of Artificial Sequence: Synthetic peptide
LQHNSYPWT

SEQ ID NO: 16477 - DNA, 27 bp, synthetic construct
  misc_feature 1..27: note = Description of Artificial Sequence: Synthetic oligonucleotide
  source 1..27: mol_type = other DNA
ctacagcatagtagttacccgctcact

SEQ ID NO: 16478 - protein, 9 aa, synthetic construct
  REGION 1..9: note = Description of Artificial Sequence: Synthetic peptide
LQHSSYPLT

SEQ ID NO: 16479 - DNA, 24 bp, synthetic construct
  misc_feature 1..24: note = Description of Artificial Sequence: Synthetic oligonucleotide
  source 1..24: mol_type = other DNA
cagcagtatggtagctcacgcagt

SEQ ID NO: 16480 - protein, 8 aa, synthetic construct
  REGION 1..8: note = Description of Artificial Sequence: Synthetic peptide
QQYGSSRS

SEQ ID NO: 16481 - DNA, 27 bp, synthetic construct
  misc_feature 1..27: note = Description of Artificial Sequence: Synthetic oligonucleotide
  source 1..27: mol_type = other DNA
ctacagcataatagttacccgctcact

SEQ ID NO: 16482 - protein, 9 aa, synthetic construct
  REGION 1..9: note = Description of Artificial Sequence: Synthetic peptide
LQHNSYPLT

SEQ ID NO: 16483 - DNA, 30 bp, synthetic construct
  misc_feature 1..30: note = Description of Artificial Sequence: Synthetic oligonucleotide
  source 1..30: mol_type = other DNA
caacagagttacagtacccccttattcact

SEQ ID NO: 16484 - protein, 10 aa, synthetic construct
  REGION 1..10: note = Description of Artificial Sequence: Synthetic peptide
QQSYSTPLFT

SEQ ID NO: 16485 - DNA, 27 bp, synthetic construct
  misc_feature 1..27: note = Description of Artificial Sequence: Synthetic oligonucleotide
  source 1..27: mol_type = other DNA
ctacagcatgccagttacccgctcact

SEQ ID NO: 16486 - protein, 9 aa, synthetic construct
  REGION 1..9: note = Description of Artificial Sequence: Synthetic peptide
LQHASYPLT

SEQ ID NO: 16487 - DNA, 27 bp, synthetic construct
  misc_feature 1..27: note = Description of Artificial Sequence: Synthetic oligonucleotide
  source 1..27: mol_type = other DNA
ctacagcataatagttacccgtggacg

SEQ ID NO: 16488 - protein, 9 aa, synthetic construct
  REGION 1..9: note = Description of Artificial Sequence: Synthetic peptide
LQHNSYPWT

SEQ ID NO: 16489 - DNA, 27 bp, synthetic construct
  misc_feature 1..27: note = Description of Artificial Sequence: Synthetic oligonucleotide
  source 1..27: mol_type = other DNA
ctacagcataatagttacccattcact

SEQ ID NO: 16490 - protein, 9 aa, synthetic construct
  REGION 1..9: note = Description of Artificial Sequence: Synthetic peptide
LQHNSYPFT

SEQ ID NO: 16491 - DNA, 27 bp, synthetic construct
  misc_feature 1..27: note = Description of Artificial Sequence: Synthetic oligonucleotide
  source 1..27: mol_type = other DNA
ctacagcattatagtttccctcggacg

SEQ ID NO: 16492 - protein, 9 aa, synthetic construct
  REGION 1..9: note = Description of Artificial Sequence: Synthetic peptide
LQHYSFPRT

SEQ ID NO: 16493 - DNA, 27 bp, synthetic construct
  misc_feature 1..27: note = Description of Artificial Sequence: Synthetic oligonucleotide
  source 1..27: mol_type = other DNA
caacagtatgacagtttccctcggacg

SEQ ID NO: 16494 - protein, 9 aa, synthetic construct
  REGION 1..9: note = Description of Artificial Sequence: Synthetic peptide
QQYDSFPRT

SEQ ID NO: 16495 - DNA, 27 bp, synthetic construct
  misc_feature 1..27: note = Description of Artificial Sequence: Synthetic oligonucleotide
  source 1..27: mol_type = other DNA
ctacagcataatacttacccgtggacg

SEQ ID NO: 16496 - protein, 9 aa, synthetic construct
  REGION 1..9: note = Description of Artificial Sequence: Synthetic peptide
LQHNTYPWT

SEQ ID NO: 16497 - DNA, 27 bp, synthetic construct
  misc_feature 1..27: note = Description of Artificial Sequence: Synthetic oligonucleotide
  source 1..27: mol_type = other DNA
ctacagcataatagttacccgctcact

SEQ ID NO: 16498 - protein, 9 aa, synthetic construct
  REGION 1..9: note = Description of Artificial Sequence: Synthetic peptide
LQHNSYPLT

SEQ ID NO: 16499 - DNA, 27 bp, synthetic construct
  misc_feature 1..27: note = Description of Artificial Sequence: Synthetic oligonucleotide
  source 1..27: mol_type = other DNA
caactcagctacagtcccccgtacact

SEQ ID NO: 16500 - protein, 9 aa, synthetic construct
  REGION 1..9: note = Description of Artificial Sequence: Synthetic peptide
QLSYSPPYT

SEQ ID NO: 16501 - DNA, 27 bp, synthetic construct
  misc_feature 1..27: note = Description of Artificial Sequence: Synthetic oligonucleotide
  source 1..27: mol_type = other DNA
ttgcaaagtatacaatatcccatcacc

SEQ ID NO: 16502 - protein, 9 aa, synthetic construct
  REGION 1..9: note = Description of Artificial Sequence: Synthetic peptide
LQSIQYPIT

SEQ ID NO: 16503 - DNA, 27 bp, synthetic construct
  misc_feature 1..27: note = Description of Artificial Sequence: Synthetic oligonucleotide
  source 1..27: mol_type = other DNA
cagcagtattatagtactcctccgacg

SEQ ID NO: 16504 - protein, 9 aa, synthetic construct
  REGION 1..9: note = Description of Artificial Sequence: Synthetic peptide
QQYYSTPPT

SEQ ID NO: 16505 - DNA, 27 bp, synthetic construct
  misc_feature 1..27: note = Description of Artificial Sequence: Synthetic oligonucleotide
  source 1..27: mol_type = other DNA
atgcaaagtatacagcttccgtggacg

SEQ ID NO: 16506 - protein, 9 aa, synthetic construct
  REGION 1..9: note = Description of Artificial Sequence: Synthetic peptide
MQSIQLPWT

SEQ ID NO: 16507 - DNA, 27 bp, synthetic construct
  misc_feature 1..27: note = Description of Artificial Sequence: Synthetic oligonucleotide
  source 1..27: mol_type = other DNA
ctacagcataatagttacccattcact

SEQ ID NO: 16508 - protein, 9 aa, synthetic construct
  REGION 1..9: note = Description of Artificial Sequence: Synthetic peptide
LQHNSYPFT

SEQ ID NO: 16509 - DNA, 24 bp, synthetic construct
  misc_feature 1..24: note = Description of Artificial Sequence: Synthetic oligonucleotide
  source 1..24: mol_type = other DNA
atgcattgtacacactggctcctt

SEQ ID NO: 16510 - protein, 8 aa, synthetic construct
  REGION 1..8: note = Description of Artificial Sequence: Synthetic peptide
MHCTHWLL

SEQ ID NO: 16511 - DNA, 27 bp, synthetic construct
  misc_feature 1..27: note = Description of Artificial Sequence: Synthetic oligonucleotide
  source 1..27: mol_type = other DNA
atgcaaagtatacagcatccgttcact

SEQ ID NO: 16512 - protein, 9 aa, synthetic construct
  REGION 1..9: note = Description of Artificial Sequence: Synthetic peptide
MQSIQHPFT

SEQ ID NO: 16513 - DNA, 27 bp, synthetic construct
  misc_feature 1..27: note = Description of Artificial Sequence: Synthetic oligonucleotide
  source 1..27: mol_type = other DNA
ctacagcataatacttacccattcact

SEQ ID NO: 16514 - protein, 9 aa, synthetic construct
  REGION 1..9: note = Description of Artificial Sequence: Synthetic peptide
LQHNTYPFT

SEQ ID NO: 16515 - DNA, 27 bp, synthetic construct
  misc_feature 1..27: note = Description of Artificial Sequence: Synthetic oligonucleotide
  source 1..27: mol_type = other DNA
ctacagcatactagttaccctcctact

SEQ ID NO: 16516 - protein, 9 aa, synthetic construct
  REGION 1..9: note = Description of Artificial Sequence: Synthetic peptide
LQHTSYPPT

SEQ ID NO: 16517 - DNA, 27 bp, synthetic construct
  misc_feature 1..27: note = Description of Artificial Sequence: Synthetic oligonucleotide
  source 1..27: mol_type = other DNA
atacaacatattatttaccctcctact

SEQ ID NO: 16518 - protein, 9 aa, synthetic construct
  REGION 1..9: note = Description of Artificial Sequence: Synthetic peptide
IQHIIYPPT

SEQ ID NO: 16519 - DNA, 27 bp, synthetic construct
  misc_feature 1..27: note = Description of Artificial Sequence: Synthetic oligonucleotide
  source 1..27: mol_type = other DNA
ctacagcataatagttaccccttcact

SEQ ID NO: 16520 - protein, 9 aa, synthetic construct
  REGION 1..9: note = Description of Artificial Sequence: Synthetic peptide
LQHNSYPFT

SEQ ID NO: 16521 - DNA, 27 bp, synthetic construct
  misc_feature 1..27: note = Description of Artificial Sequence: Synthetic oligonucleotide
  source 1..27: mol_type = other DNA
caacagtatcatagttacccattcact

SEQ ID NO: 16522 - protein, 9 aa, synthetic construct
  REGION 1..9: note = Description of Artificial Sequence: Synthetic peptide
QQYHSYPFT

SEQ ID NO: 16523 - DNA, 27 bp, synthetic construct
  misc_feature 1..27: note = Description of Artificial Sequence: Synthetic oligonucleotide
  source 1..27: mol_type = other DNA
caacagtatcatagttacccattcact

SEQ ID NO: 16524 - protein, 9 aa, synthetic construct
  REGION 1..9: note = Description of Artificial Sequence: Synthetic peptide
QQYHSYPFT

SEQ ID NO: 16525 - DNA, 30 bp, synthetic construct
  misc_feature 1..30: note = Description of Artificial Sequence: Synthetic oligonucleotide
  source 1..30: mol_type = other DNA
caacagagttacagtacccctacgtggacg

SEQ ID NO: 16526 - protein, 10 aa, synthetic construct
  REGION 1..10: note = Description of Artificial Sequence: Synthetic peptide
QQSYSTPTWT

SEQ ID NO: 16527 - DNA, 27 bp, synthetic construct
  misc_feature 1..27: note = Description of Artificial Sequence: Synthetic oligonucleotide
  source 1..27: mol_type = other DNA
caacagtctgacagtttccctcggacg

SEQ ID NO: 16528 - protein, 9 aa, synthetic construct
  REGION 1..9: note = Description of Artificial Sequence: Synthetic peptide
QQSDSFPRT

SEQ ID NO: 16529 - DNA, 27 bp, synthetic construct
  misc_feature 1..27: note = Description of Artificial Sequence: Synthetic oligonucleotide
  source 1..27: mol_type = other DNA
ctacagcataatacttacccgtggacg

SEQ ID NO: 16530 - protein, 9 aa, synthetic construct
  REGION 1..9: note = Description of Artificial Sequence: Synthetic peptide
LQHNTYPWT

SEQ ID NO: 16531 - DNA, 27 bp, synthetic construct
  misc_feature 1..27: note = Description of Artificial Sequence: Synthetic oligonucleotide
  source 1..27: mol_type = other DNA
cagcagtattatagtactcctccgacg

SEQ ID NO: 16532 - protein, 9 aa, synthetic construct
  REGION 1..9: note = Description of Artificial Sequence: Synthetic peptide
QQYYSTPPT

SEQ ID NO: 16533 - DNA, 27 bp, synthetic construct
  misc_feature 1..27: note = Description of Artificial Sequence: Synthetic oligonucleotide
  source 1..27: mol_type = other DNA
caacagtataatagttacccattcact

SEQ ID NO: 16534 - protein, 9 aa, synthetic construct
  REGION 1..9: note = Description of Artificial Sequence: Synthetic peptide
QQYNSYPFT

SEQ ID NO: 16535 - DNA, 27 bp, synthetic construct
  misc_feature 1..27: note = Description of Artificial Sequence: Synthetic oligonucleotide
  source 1..27: mol_type = other DNA
ctacagcatactatttaccctcctact

SEQ ID NO: 16536 - protein, 9 aa, synthetic construct
  REGION 1..9: note = Description of Artificial Sequence: Synthetic peptide
LQHTIYPPT

SEQ ID NO: 16537 - DNA, 27 bp, synthetic construct
  misc_feature 1..27: note = Description of Artificial Sequence: Synthetic oligonucleotide
  source 1..27: mol_type = other DNA
caacagtatcatagttacccgctcact

SEQ ID NO: 16538 - protein, 9 aa, synthetic construct
  REGION 1..9: note = Description of Artificial Sequence: Synthetic peptide
QQYHSYPLT

SEQ ID NO: 16539 - DNA, 27 bp, synthetic construct
  misc_feature 1..27: note = Description of Artificial Sequence: Synthetic oligonucleotide
  source 1..27: mol_type = other DNA
ctacagcataatagttacccattcact

SEQ ID NO: 16540 - protein, 9 aa, synthetic construct
  REGION 1..9: note = Description of Artificial Sequence: Synthetic peptide
LQHNSYPFT

SEQ ID NO: 16541 - DNA, 27 bp, synthetic construct
  misc_feature 1..27: note = Description of Artificial Sequence: Synthetic oligonucleotide
  source 1..27: mol_type = other DNA
ctacagcataatcgttacccgtggacg

SEQ ID NO: 16542 - protein, 9 aa, synthetic construct
  REGION 1..9: note = Description of Artificial Sequence: Synthetic peptide
LQHNRYPWT

SEQ ID NO: 16543 - DNA, 27 bp, synthetic construct
  misc_feature 1..27: note = Description of Artificial Sequence: Synthetic oligonucleotide
  source 1..27: mol_type = other DNA
ctacagcattataattaccctcgcagt

SEQ ID NO: 16544 - protein, 9 aa, synthetic construct
  REGION 1..9: note = Description of Artificial Sequence: Synthetic peptide
LQHYNYPRS

SEQ ID NO: 16545 - DNA, 27 bp, synthetic construct
  misc_feature 1..27: note = Description of Artificial Sequence: Synthetic oligonucleotide
  source 1..27: mol_type = other DNA
caacagtattatagttacccattcact

SEQ ID NO: 16546 - protein, 9 aa, synthetic construct
  REGION 1..9: note = Description of Artificial Sequence: Synthetic peptide
QQYYSYPFT

SEQ ID NO: 16547 - DNA, 27 bp, synthetic construct
  misc_feature 1..27: note = Description of Artificial Sequence: Synthetic oligonucleotide
  source 1..27: mol_type = other DNA
ctacagcataatagttacccattcact

SEQ ID NO: 16548 - protein, 9 aa, synthetic construct
  REGION 1..9: note = Description of Artificial Sequence: Synthetic peptide
LQHNSYPFT

SEQ ID NO: 16549 - DNA, 27 bp, synthetic construct
  misc_feature 1..27: note = Description of Artificial Sequence: Synthetic oligonucleotide
  source 1..27: mol_type = other DNA
ctacagcataatagttacccgctcact

SEQ ID NO: 16550 - protein, 9 aa, synthetic construct
  REGION 1..9: note = Description of Artificial Sequence: Synthetic peptide
LQHNSYPLT

SEQ ID NO: 16551 - DNA, 27 bp, synthetic construct
  misc_feature 1..27: note = Description of Artificial Sequence: Synthetic oligonucleotide
  source 1..27: mol_type = other DNA
ctacagcatactatttaccctcctact

SEQ ID NO: 16552 - protein, 9 aa, synthetic construct
  REGION 1..9: note = Description of Artificial Sequence: Synthetic peptide
LQHTIYPPT

SEQ ID NO: 16553 - DNA, 27 bp, synthetic construct
  misc_feature 1..27: note = Description of Artificial Sequence: Synthetic oligonucleotide
  source 1..27: mol_type = other DNA
caacagagttacagtaccccattcact

SEQ ID NO: 16554 - protein, 9 aa, synthetic construct
  REGION 1..9: note = Description of Artificial Sequence: Synthetic peptide
QQSYSTPFT

SEQ ID NO: 16555 - DNA, 27 bp, synthetic construct
  misc_feature 1..27: note = Description of Artificial Sequence: Synthetic oligonucleotide
  source 1..27: mol_type = other DNA
ctacagcatattatttaccctcctact

SEQ ID NO: 16556 - protein, 9 aa, synthetic construct
  REGION 1..9: note = Description of Artificial Sequence: Synthetic peptide
LQHIIYPPT

SEQ ID NO: 16557 - DNA, 27 bp, synthetic construct
  misc_feature 1..27: note = Description of Artificial Sequence: Synthetic oligonucleotide
  source 1..27: mol_type = other DNA
ctacagcataatagttacccgctcact

SEQ ID NO: 16558 - protein, 9 aa, synthetic construct
  REGION 1..9: note = Description of Artificial Sequence: Synthetic peptide
LQHNSYPLT

SEQ ID NO: 16559 - DNA, 27 bp, synthetic construct
  misc_feature 1..27: note = Description of Artificial Sequence: Synthetic oligonucleotide
  source 1..27: mol_type = other DNA
ctacagcataatagttacccgctcact

SEQ ID NO: 16560 - protein, 9 aa, synthetic construct
  REGION 1..9: note = Description of Artificial Sequence: Synthetic peptide
LQHNSYPLT

SEQ ID NO: 16561 - DNA, 27 bp, synthetic construct
  misc_feature 1..27: note = Description of Artificial Sequence: Synthetic oligonucleotide
  source 1..27: mol_type = other DNA
cagcaatattatagtactcctccgacg

SEQ ID NO: 16562 - protein, 9 aa, synthetic construct
  REGION 1..9: note = Description of Artificial Sequence: Synthetic peptide
QQYYSTPPT

SEQ ID NO: 16563 - DNA, 27 bp, synthetic construct
  misc_feature 1..27: note = Description of Artificial Sequence: Synthetic oligonucleotide
  source 1..27: mol_type = other DNA
atgcaaagtataaagcttccgctcact

SEQ ID NO: 16564 - protein, 9 aa, synthetic construct
  REGION 1..9: note = Description of Artificial Sequence: Synthetic peptide
MQSIKLPLT

SEQ ID NO: 16565 - DNA, 27 bp, synthetic construct
  misc_feature 1..27: note = Description of Artificial Sequence: Synthetic oligonucleotide
  source 1..27: mol_type = other DNA
caacaggctagcagtttcccattcact

SEQ ID NO: 16566 - protein, 9 aa, synthetic construct
  REGION 1..9: note = Description of Artificial Sequence: Synthetic peptide
QQASSFPFT

SEQ ID NO: 16567 - DNA, 27 bp, synthetic construct
  misc_feature 1..27: note = Description of Artificial Sequence: Synthetic oligonucleotide
  source 1..27: mol_type = other DNA
ctacagcataatcgttacccattcact

SEQ ID NO: 16568 - protein, 9 aa, synthetic construct
  REGION 1..9: note = Description of Artificial Sequence: Synthetic peptide
LQHNRYPFT

SEQ ID NO: 16569 - DNA, 27 bp, synthetic construct
  misc_feature 1..27: note = Description of Artificial Sequence: Synthetic oligonucleotide
  source 1..27: mol_type = other DNA
ctacagcataatagttacccattcact

SEQ ID NO: 16570 - protein, 9 aa, synthetic construct
  REGION 1..9: note = Description of Artificial Sequence: Synthetic peptide
LQHNSYPFT

SEQ ID NO: 16571 - DNA, 27 bp, synthetic construct
  misc_feature 1..27: note = Description of Artificial Sequence: Synthetic oligonucleotide
  source 1..27: mol_type = other DNA
caacagagttacagtactccgctcact

SEQ ID NO: 16572 - protein, 9 aa, synthetic construct
  REGION 1..9: note = Description of Artificial Sequence: Synthetic peptide
QQSYSTPLT

SEQ ID NO: 16573 - DNA, 27 bp, synthetic construct
  misc_feature 1..27: note = Description of Artificial Sequence: Synthetic oligonucleotide
  source 1..27: mol_type = other DNA
ctacagcatactatttaccctcctact

SEQ ID NO: 16574 - protein, 9 aa, synthetic construct
  REGION 1..9: note = Description of Artificial Sequence: Synthetic peptide
LQHTIYPPT

SEQ ID NO: 16575 - DNA, 27 bp, synthetic construct
  misc_feature 1..27: note = Description of Artificial Sequence: Synthetic oligonucleotide
  source 1..27: mol_type = other DNA
ctacaggataatagttaccctttcact

SEQ ID NO: 16576 - protein, 9 aa, synthetic construct
  REGION 1..9: note = Description of Artificial Sequence: Synthetic peptide
LQDNSYPFT

SEQ ID NO: 16577 - DNA, 27 bp, synthetic construct
  misc_feature 1..27: note = Description of Artificial Sequence: Synthetic oligonucleotide
  source 1..27: mol_type = other DNA
caacaggctaacagtttcccaatcact

SEQ ID NO: 16578 - protein, 9 aa, synthetic construct
  REGION 1..9: note = Description of Artificial Sequence: Synthetic peptide
QQANSFPIT

SEQ ID NO: 16579 - DNA, 27 bp, synthetic construct
  misc_feature 1..27: note = Description of Artificial Sequence: Synthetic oligonucleotide
  source 1..27: mol_type = other DNA
atgcaaagtatacagcttccgctcact

SEQ ID NO: 16580 - protein, 9 aa, synthetic construct
  REGION 1..9: note = Description of Artificial Sequence: Synthetic peptide
MQSIQLPLT

SEQ ID NO: 16581 - DNA, 27 bp, synthetic construct
  misc_feature 1..27: note = Description of Artificial Sequence: Synthetic oligonucleotide
  source 1..27: mol_type = other DNA
caacagtctgacagtttccctcggacg

SEQ ID NO: 16582 - protein, 9 aa, synthetic construct
  REGION 1..9: note = Description of Artificial Sequence: Synthetic peptide
QQSDSFPRT

SEQ ID NO: 16583 - DNA, 27 bp, synthetic construct
  misc_feature 1..27: note = Description of Artificial Sequence: Synthetic oligonucleotide
  source 1..27: mol_type = other DNA
caacaggctaacagtctcccattcact

SEQ ID NO: 16584 - protein, 9 aa, synthetic construct
  REGION 1..9: note = Description of Artificial Sequence: Synthetic peptide
QQANSLPFT

SEQ ID NO: 16585 - DNA, 27 bp, synthetic construct
  misc_feature 1..27: note = Description of Artificial Sequence: Synthetic oligonucleotide
  source 1..27: mol_type = other DNA
ctacagcataatagttacccgctcact

SEQ ID NO: 16586 - protein, 9 aa, synthetic construct
  REGION 1..9: note = Description of Artificial Sequence: Synthetic peptide
LQHNSYPLT

SEQ ID NO: 16587 - DNA, 27 bp, synthetic construct
  misc_feature 1..27: note = Description of Artificial Sequence: Synthetic oligonucleotide
  source 1..27: mol_type = other DNA
caacagtatgataatctcccgatcacc

SEQ ID NO: 16588 - protein, 9 aa, synthetic construct
  REGION 1..9: note = Description of Artificial Sequence: Synthetic peptide
QQYDNLPIT

SEQ ID NO: 16589 - DNA, 27 bp, synthetic construct
  misc_feature 1..27: note = Description of Artificial Sequence: Synthetic oligonucleotide
  source 1..27: mol_type = other DNA
ctacaggataatagtcatccattcact

SEQ ID NO: 16590 - protein, 9 aa, synthetic construct
  REGION 1..9: note = Description of Artificial Sequence: Synthetic peptide
LQDNSHPFT

SEQ ID NO: 16591 - DNA, 27 bp, synthetic construct
  misc_feature 1..27: note = Description of Artificial Sequence: Synthetic oligonucleotide
  source 1..27: mol_type = other DNA
caacagggtaacagtttcccattcact

SEQ ID NO: 16592 - protein, 9 aa, synthetic construct
  REGION 1..9: note = Description of Artificial Sequence: Synthetic peptide
QQGNSFPFT

SEQ ID NO: 16593 - DNA, 27 bp, synthetic construct
  misc_feature 1..27: note = Description of Artificial Sequence: Synthetic oligonucleotide
  source 1..27: mol_type = other DNA
ctacagcataatagttacccgtggacg

SEQ ID NO: 16594 - protein, 9 aa, synthetic construct
  REGION 1..9: note = Description of Artificial Sequence: Synthetic peptide
LQHNSYPWT

SEQ ID NO: 16595 - DNA, 27 bp, synthetic construct
  misc_feature 1..27: note = Description of Artificial Sequence: Synthetic oligonucleotide
  source 1..27: mol_type = other DNA
caacaggcttacagtttcccgtggacg

SEQ ID NO: 16596 - protein, 9 aa, synthetic construct
  REGION 1..9: note = Description of Artificial Sequence: Synthetic peptide
QQAYSFPWT

SEQ ID NO: 16597 - DNA, 27 bp, synthetic construct
  misc_feature 1..27: note = Description of Artificial Sequence: Synthetic oligonucleotide
  source 1..27: mol_type = other DNA
ctacagcataatagttacccgctcact

SEQ ID NO: 16598 - protein, 9 aa, synthetic construct
  REGION 1..9: note = Description of Artificial Sequence: Synthetic peptide
LQHNSYPLT

SEQ ID NO: 16599 - DNA, 27 bp, synthetic construct
  misc_feature 1..27: note = Description of Artificial Sequence: Synthetic oligonucleotide
  source 1..27: mol_type = other DNA
atgcaaagtatacagcttccgtggacg

SEQ ID NO: 16600 - protein, 9 aa, synthetic construct
  REGION 1..9: note = Description of Artificial Sequence: Synthetic peptide
MQSIQLPWT

SEQ ID NO: 16601 - DNA, 27 bp, synthetic construct
  misc_feature 1..27: note = Description of Artificial Sequence: Synthetic oligonucleotide
  source 1..27: mol_type = other DNA
ctacagcataatagttacccgctcact

SEQ ID NO: 16602 - protein, 9 aa, synthetic construct
  REGION 1..9: note = Description of Artificial Sequence: Synthetic peptide
LQHNSYPLT

SEQ ID NO: 16603 - DNA, 27 bp, synthetic construct
  misc_feature 1..27: note = Description of Artificial Sequence: Synthetic oligonucleotide
  source 1..27: mol_type = other DNA
atgcaaagtatacagattccgtggacg

SEQ ID NO: 16604 - protein, 9 aa, synthetic construct
  REGION 1..9: note = Description of Artificial Sequence: Synthetic peptide
MQSIQIPWT

SEQ ID NO: 16605 - DNA, 27 bp, synthetic construct
  misc_feature 1..27: note = Description of Artificial Sequence: Synthetic oligonucleotide
  source 1..27: mol_type = other DNA
ctacagcataatagttacccattcact

SEQ ID NO: 16606 - protein, 9 aa, synthetic construct
  REGION 1..9: note = Description of Artificial Sequence: Synthetic peptide
LQHNSYPFT

SEQ ID NO: 16607 - DNA, 27 bp, synthetic construct
  misc_feature 1..27: note = Description of Artificial Sequence: Synthetic oligonucleotide
  source 1..27: mol_type = other DNA
ctacagcatactagttaccctcctact

SEQ ID NO: 16608 - protein, 9 aa, synthetic construct
  REGION 1..9: note = Description of Artificial Sequence: Synthetic peptide
LQHTSYPPT

SEQ ID NO: 16609 - DNA, 27 bp, synthetic construct
  misc_feature 1..27: note = Description of Artificial Sequence: Synthetic oligonucleotide
  source 1..27: mol_type = other DNA
caacagagttacattaccccgctcact

SEQ ID NO: 16610 - protein, 9 aa, synthetic construct
  REGION 1..9: note = Description of Artificial Sequence: Synthetic peptide
QQSYITPLT

SEQ ID NO: 16611 - DNA, 30 bp, synthetic construct
  misc_feature 1..30: note = Description of Artificial Sequence: Synthetic oligonucleotide
  source 1..30: mol_type = other DNA
cagcagtataataattggcctccgtggccg

SEQ ID NO: 16612 - protein, 10 aa, synthetic construct
  REGION 1..10: note = Description of Artificial Sequence: Synthetic peptide
QQYNNWPPWP

SEQ ID NO: 16613 - DNA, 27 bp, synthetic construct
  misc_feature 1..27: note = Description of Artificial Sequence: Synthetic oligonucleotide
  source 1..27: mol_type = other DNA
ctacagcattataattaccctcgcagt

SEQ ID NO: 16614 - protein, 9 aa, synthetic construct
  REGION 1..9: note = Description of Artificial Sequence: Synthetic peptide
LQHYNYPRS

SEQ ID NO: 16615 - DNA, 27 bp, synthetic construct
  misc_feature 1..27: note = Description of Artificial Sequence: Synthetic oligonucleotide
  source 1..27: mol_type = other DNA
ctacagcataatcgttacccgctcact

SEQ ID NO: 16616 - protein, 9 aa, synthetic construct
  REGION 1..9: note = Description of Artificial Sequence: Synthetic peptide
LQHNRYPLT

SEQ ID NO: 16617 - DNA, 30 bp, synthetic construct; identical to SEQ ID NO: 16611
  misc_feature 1..30: note = Description of Artificial Sequence: Synthetic oligonucleotide
  source 1..30: mol_type = other DNA

SEQ ID NO: 16618 - protein, 10 aa, synthetic construct
  REGION 1..10: note = Description of Artificial Sequence: Synthetic peptide
QQYNNWPPWP

SEQ ID NO: 16619 - DNA, 27 bp, synthetic construct
  misc_feature 1..27: note = Description of Artificial Sequence: Synthetic oligonucleotide
  source 1..27: mol_type = other DNA
ctacagcataatagttatccgctcact

SEQ ID NO: 16620 - protein, 9 aa, synthetic construct
  REGION 1..9: note = Description of Artificial Sequence: Synthetic peptide
LQHNSYPLT

SEQ ID NO: 16621 - DNA, 27 bp, synthetic construct
  misc_feature 1..27: note = Description of Artificial Sequence: Synthetic oligonucleotide
  source 1..27: mol_type = other DNA
ctacagcataatagttacccgttcact

SEQ ID NO: 16622 - protein, 9 aa, synthetic construct
  REGION 1..9: note = Description of Artificial Sequence: Synthetic peptide
LQHNSYPFT

SEQ ID NO: 16623 - DNA, 27 bp, synthetic construct
  misc_feature 1..27: note = Description of Artificial Sequence: Synthetic oligonucleotide
  source 1..27: mol_type = other DNA
ctacagcatactagttaccctcctact

SEQ ID NO: 16624 - protein, 9 aa, synthetic construct
  REGION 1..9: note = Description of Artificial Sequence: Synthetic peptide
LQHTSYPPT

SEQ ID NO: 16625 - DNA, 27 bp, synthetic construct
  misc_feature 1..27: note = Description of Artificial Sequence: Synthetic oligonucleotide
  source 1..27: mol_type = other DNA
ctgcagcatactatttaccctcctact

SEQ ID NO: 16626 - protein, 9 aa, synthetic construct
  REGION 1..9: note = Description of Artificial Sequence: Synthetic peptide
LQHTIYPPT

SEQ ID NO: 16627 - DNA, 27 bp, synthetic construct
  misc_feature 1..27: note = Description of Artificial Sequence: Synthetic oligonucleotide
  source 1..27: mol_type = other DNA
caacagtatgataatctcccgatcacc

SEQ ID NO: 16628 - protein, 9 aa, synthetic construct
  REGION 1..9: note = Description of Artificial Sequence: Synthetic peptide
QQYDNLPIT

SEQ ID NO: 16629 - DNA, 27 bp, synthetic construct
  misc_feature 1..27: note = Description of Artificial Sequence: Synthetic oligonucleotide
  source 1..27: mol_type = other DNA
caacagagttacaatatcccgatcacc

SEQ ID NO: 16630 - protein, 9 aa, synthetic construct
  REGION 1..9: note = Description of Artificial Sequence: Synthetic peptide
QQSYNIPIT

SEQ ID NO: 16631 - DNA, 27 bp, synthetic construct
  misc_feature 1..27: note = Description of Artificial Sequence: Synthetic oligonucleotide
  source 1..27: mol_type = other DNA
caacagagttacagtactccgctcact

SEQ ID NO: 16632 - protein, 9 aa, synthetic construct
  REGION 1..9: note = Description of Artificial Sequence: Synthetic peptide
QQSYSTPLT

SEQ ID NO: 16633 - DNA, 27 bp, synthetic construct
  misc_feature 1..27: note = Description of Artificial Sequence: Synthetic oligonucleotide
  source 1..27: mol_type = other DNA
ctccagcatactatttaccctcctact

SEQ ID NO: 16634 - protein, 9 aa, synthetic construct
  REGION 1..9: note = Description of Artificial Sequence: Synthetic peptide
LQHTIYPPT

SEQ ID NO: 16635 - DNA, 27 bp, synthetic construct
  misc_feature 1..27: note = Description of Artificial Sequence: Synthetic oligonucleotide
  source 1..27: mol_type = other DNA
ctccatcatcctatttaccctcctact

SEQ ID NO: 16636 - protein, 9 aa, synthetic construct
  REGION 1..9: note = Description of Artificial Sequence: Synthetic peptide
LHHPIYPPT

SEQ ID NO: 16637 - DNA, 27 bp, synthetic construct
  misc_feature 1..27: note = Description of Artificial Sequence: Synthetic oligonucleotide
  source 1..27: mol_type = other DNA
ctacagcataatagttacccgctcact

SEQ ID NO: 16638 - protein, 9 aa, synthetic construct
  REGION 1..9: note = Description of Artificial Sequence: Synthetic peptide
LQHNSYPLT

SEQ ID NO: 16639 - DNA, 27 bp, synthetic construct
  misc_feature 1..27: note = Description of Artificial Sequence: Synthetic oligonucleotide
  source 1..27: mol_type = other DNA
ctacagcattatagttaccctcctact

SEQ ID NO: 16640 - protein, 9 aa, synthetic construct
  REGION 1..9: note = Description of Artificial Sequence: Synthetic peptide
LQHYSYPPT

SEQ ID NO: 16641 - DNA, 27 bp, synthetic construct
  misc_feature 1..27: note = Description of Artificial Sequence: Synthetic oligonucleotide
  source 1..27: mol_type = other DNA
caacagtttaatagttaccctctgacg

SEQ ID NO: 16642 - protein, 9 aa, synthetic construct
  REGION 1..9: note = Description of Artificial Sequence: Synthetic peptide
QQFNSYPLT

SEQ ID NO: 16643 - DNA, 27 bp, synthetic construct
  misc_feature 1..27: note = Description of Artificial Sequence: Synthetic oligonucleotide
  source 1..27: mol_type = other DNA
caacaggctaacagtttccctttcact

SEQ ID NO: 16644 - protein, 9 aa, synthetic construct
  REGION 1..9: note = Description of Artificial Sequence: Synthetic peptide
QQANSFPFT

SEQ ID NO: 16645 - DNA, 27 bp, synthetic construct
  misc_feature 1..27: note = Description of Artificial Sequence: Synthetic oligonucleotide
  source 1..27: mol_type = other DNA
caacagacttgcagtaccccgctcact

SEQ ID NO: 16646 - protein, 9 aa, synthetic construct
  REGION 1..9: note = Description of Artificial Sequence: Synthetic peptide
QQTCSTPLT

SEQ ID NO: 16647 - DNA, 27 bp, synthetic construct
  misc_feature 1..27: note = Description of Artificial Sequence: Synthetic oligonucleotide
  source 1..27: mol_type = other DNA
caacaggctaacagtttcccattcact

SEQ ID NO: 16648 - protein, 9 aa, synthetic construct
  REGION 1..9: note = Description of Artificial Sequence: Synthetic peptide
QQANSFPFT

SEQ ID NO: 16649 - DNA, 27 bp, synthetic construct
  source 1..27: mol_type = other DNA
caacaggctaacagtttccctttcact

SEQ ID NO: 16650 - protein, 9 aa, synthetic construct
  REGION 1..9: note = Description of Artificial Sequence: Synthetic peptide
QQANSFPFT

SEQ ID NO: 16651 - DNA, 27 bp, synthetic construct
  misc_feature 1..27: note = Description of Artificial Sequence: Synthetic oligonucleotide
  source 1..27: mol_type = other DNA
cagcaatattatagttctccgtgcagt

SEQ ID NO: 16652 - protein, 9 aa, synthetic construct
  REGION 1..9: note = Description of Artificial Sequence: Synthetic peptide
QQYYSSPCS

SEQ ID NO: 16653 - DNA, 27 bp, synthetic construct
  misc_feature 1..27: note = Description of Artificial Sequence: Synthetic oligonucleotide
  source 1..27: mol_type = other DNA
caacagtataatagttacccattcact

SEQ ID NO: 16654 - protein, 9 aa, synthetic construct
  REGION 1..9: note = Description of Artificial Sequence: Synthetic peptide
QQYNSYPFT

SEQ ID NO: 16655 - DNA, 27 bp, synthetic construct
  misc_feature 1..27: note = Description of Artificial Sequence: Synthetic oligonucleotide
  source 1..27: mol_type = other DNA
caacagagttacagtaccccgtacact

SEQ ID NO: 16656 - protein, 9 aa, synthetic construct
  REGION 1..9: note = Description of Artificial Sequence: Synthetic peptide
QQSYSTPYT

SEQ ID NO: 16657 - DNA, 27 bp, synthetic construct
  misc_feature 1..27: note = Description of Artificial Sequence: Synthetic oligonucleotide
  source 1..27: mol_type = other DNA
ctacaacatagttcttaccccatcacc

SEQ ID NO: 16658 - protein, 9 aa, synthetic construct
  REGION 1..9: note = Description of Artificial Sequence: Synthetic peptide
LQHSSYPIT

SEQ ID NO: 16659 - DNA, 27 bp, synthetic construct
  misc_feature 1..27: note = Description of Artificial Sequence: Synthetic oligonucleotide
  source 1..27: mol_type = other DNA
ctacagcatactatttaccctcctact

SEQ ID NO: 16660 - protein, 9 aa, synthetic construct
  REGION 1..9: note = Description of Artificial Sequence: Synthetic peptide
LQHTIYPPT

SEQ ID NO: 16661 - DNA, 27 bp, synthetic construct
  misc_feature 1..27: note = Description of Artificial Sequence: Synthetic oligonucleotide
  source 1..27: mol_type = other DNA
caacaggctaacagtttcccgttcact

SEQ ID NO: 16662 - protein, 9 aa, synthetic construct
  REGION 1..9: note = Description of Artificial Sequence: Synthetic peptide
QQANSFPFT

SEQ ID NO: 16663 - DNA, 27 bp, synthetic construct
  misc_feature 1..27: note = Description of Artificial Sequence: Synthetic oligonucleotide
  source 1..27: mol_type = other DNA
caacagagttacagtaccccgtacact

SEQ ID NO: 16664 - protein, 9 aa, synthetic construct
  REGION 1..9: note = Description of Artificial Sequence: Synthetic peptide
QQSYSTPYT

SEQ ID NO: 16665 - DNA, 27 bp, synthetic construct
  misc_feature 1..27: note = Description of Artificial Sequence: Synthetic oligonucleotide
  source 1..27: mol_type = other DNA
ctacagcatactatttaccctcctact

SEQ ID NO: 16666 - protein, 9 aa, synthetic construct
  REGION 1..9: note = Description of Artificial Sequence: Synthetic peptide
LQHTIYPPT

SEQ ID NO: 16667 - DNA, 27 bp, synthetic construct
  misc_feature 1..27: note = Description of Artificial Sequence: Synthetic oligonucleotide
  source 1..27: mol_type = other DNA
ctacagcatactatttaccctcctact

SEQ ID NO: 16668 - protein, 9 aa, synthetic construct
  REGION 1..9: note = Description of Artificial Sequence: Synthetic peptide
LQHTIYPPT

SEQ ID NO: 16669 - DNA, 27 bp, synthetic construct
  misc_feature 1..27: note = Description of Artificial Sequence: Synthetic oligonucleotide
  source 1..27: mol_type = other DNA
ctacagcataatagttaccctcctact

SEQ ID NO: 16670 - protein, 9 aa, synthetic construct
  REGION 1..9: note = Description of Artificial Sequence: Synthetic peptide
LQHNSYPPT

SEQ ID NO: 16671 - DNA, 27 bp, synthetic construct
  misc_feature 1..27: note = Description of Artificial Sequence: Synthetic oligonucleotide
  source 1..27: mol_type = other DNA
caacagacttacattaccccgctcact

SEQ ID NO: 16672 - protein, 9 aa, synthetic construct
  REGION 1..9: note = Description of Artificial Sequence: Synthetic peptide
QQTYITPLT

SEQ ID NO: 16673 - DNA, 27 bp, synthetic construct
  misc_feature 1..27: note = Description of Artificial Sequence: Synthetic oligonucleotide
  source 1..27: mol_type = other DNA
ctacagcatactatttaccctcctact

SEQ ID NO: 16674 - protein, 9 aa, synthetic construct
  REGION 1..9: note = Description of Artificial Sequence: Synthetic peptide
LQHTIYPPT

SEQ ID NO: 16675 - DNA, 27 bp, synthetic construct
  misc_feature 1..27: note = Description of Artificial Sequence: Synthetic oligonucleotide
  source 1..27: mol_type = other DNA
caacaggctaacagtttcccattcact

SEQ ID NO: 16676 - protein, 9 aa, synthetic construct
  REGION 1..9: note = Description of Artificial Sequence: Synthetic peptide
QQANSFPFT

SEQ ID NO: 16677 - DNA, 27 bp, synthetic construct
  misc_feature 1..27: note = Description of Artificial Sequence: Synthetic oligonucleotide
  source 1..27: mol_type = other DNA
caacagagttacagtaccccattcact

SEQ ID NO: 16678 - protein, 9 aa, synthetic construct
  REGION 1..9: note = Description of Artificial Sequence: Synthetic peptide
QQSYSTPFT

SEQ ID NO: 16679 - DNA, 27 bp, synthetic construct
  misc_feature 1..27: note = Description of Artificial Sequence: Synthetic oligonucleotide
  source 1..27: mol_type = other DNA
caacaggctaacagtttcccattcact

SEQ ID NO: 16680 - protein, 9 aa, synthetic construct
  REGION 1..9: note = Description of Artificial Sequence: Synthetic peptide
QQANSFPFT

SEQ ID NO: 16681 - DNA, 27 bp, synthetic construct
  misc_feature 1..27: note = Description of Artificial Sequence: Synthetic oligonucleotide
  source 1..27: mol_type = other DNA
ctacagcataatagttaccctcctact

SEQ ID NO: 16682 - protein, 9 aa, synthetic construct
  REGION 1..9: note = Description of Artificial Sequence: Synthetic peptide
LQHNSYPPT

SEQ ID NO: 16683 - DNA, 27 bp, synthetic construct
  misc_feature 1..27: note = Description of Artificial Sequence: Synthetic oligonucleotide
  source 1..27: mol_type = other DNA
caacagtataatagttacccattcact

SEQ ID NO: 16684 - protein, 9 aa, synthetic construct
  REGION 1..9: note = Description of Artificial Sequence: Synthetic peptide
QQYNSYPFT

SEQ ID NO: 16685 - DNA, 27 bp, synthetic construct
  misc_feature 1..27: note = Description of Artificial Sequence: Synthetic oligonucleotide
  source 1..27: mol_type = other DNA
caacagagttacagtaccccgtacact

SEQ ID NO: 16686 - protein, 9 aa, synthetic construct
  REGION 1..9: note = Description of Artificial Sequence: Synthetic peptide
QQSYSTPYT

SEQ ID NO: 16687 - DNA, 27 bp, synthetic construct
  misc_feature 1..27: note = Description of Artificial Sequence: Synthetic oligonucleotide
  source 1..27: mol_type = other DNA
ctacagcattatagttaccctcctact

SEQ ID NO: 16688 - protein, 9 aa, synthetic construct
  REGION 1..9: note = Description of Artificial Sequence: Synthetic peptide
LQHYSYPPT

SEQ ID NO: 16689 - DNA, 27 bp, synthetic construct
  misc_feature 1..27: note = Description of Artificial Sequence: Synthetic oligonucleotide
  source 1..27: mol_type = other DNA
ctacagcatactatttaccctcccact

SEQ ID NO: 16690 - protein, 9 aa, synthetic construct
  REGION 1..9: note = Description of Artificial Sequence: Synthetic peptide
LQHTIYPPT

SEQ ID NO: 16691 - DNA, 27 bp, synthetic construct
  misc_feature 1..27: note = Description of Artificial Sequence: Synthetic oligonucleotide
  source 1..27: mol_type = other DNA
ctacagcatactgtttaccctcctact

SEQ ID NO: 16692 - protein, 9 aa, synthetic construct
  REGION 1..9: note = Description of Artificial Sequence: Synthetic peptide
LQHTVYPPT

SEQ ID NO: 16693 - DNA, 27 bp, synthetic construct
  misc_feature 1..27: note = Description of Artificial Sequence: Synthetic oligonucleotide
  source 1..27: mol_type = other DNA
ctacagcataatagttacccgtggacg

SEQ ID NO: 16694 - protein, 9 aa, synthetic construct
  REGION 1..9: note = Description of Artificial Sequence: Synthetic peptide
LQHNSYPWT

SEQ ID NO: 16695 - DNA, 27 bp, synthetic construct
  misc_feature 1..27: note = Description of Artificial Sequence: Synthetic oligonucleotide
  source 1..27: mol_type = other DNA
caacaggctaacattttcccgttcact

SEQ ID NO: 16696 - protein, 9 aa, synthetic construct
  REGION 1..9: note = Description of Artificial Sequence: Synthetic peptide
QQANIFPFT

SEQ ID NO: 16697 - DNA, 27 bp, synthetic construct
  misc_feature 1..27: note = Description of Artificial Sequence: Synthetic oligonucleotide
  source 1..27: mol_type = other DNA
caacagagttacagtaccccgtacact

SEQ ID NO: 16698 - protein, 9 aa, synthetic construct
  REGION 1..9: note = Description of Artificial Sequence: Synthetic peptide
QQSYSTPYT

SEQ ID NO: 16699 - DNA, 27 bp, synthetic construct
  misc_feature 1..27: note = Description of Artificial Sequence: Synthetic oligonucleotide
  source 1..27: mol_type = other DNA
caacagagttacagtaccccgtacact

SEQ ID NO: 16700 - protein, 9 aa, synthetic construct
  REGION 1..9: note = Description of Artificial Sequence: Synthetic peptide
QQSYSTPYT

SEQ ID NO: 16701 - DNA, 27 bp, synthetic construct
  misc_feature 1..27: note = Description of Artificial Sequence: Synthetic oligonucleotide
  source 1..27: mol_type = other DNA
caacagtatgataatctcccgatcacc

SEQ ID NO: 16702 - protein, 9 aa, synthetic construct
  REGION 1..9: note = Description of Artificial Sequence: Synthetic peptide
QQYDNLPIT

SEQ ID NO: 16703 - DNA, 27 bp, synthetic construct
  misc_feature 1..27: note = Description of Artificial Sequence: Synthetic oligonucleotide
  source 1..27: mol_type = other DNA
caacaggctaacagtttcccattcact

SEQ ID NO: 16704 - protein, 9 aa, synthetic construct
  REGION 1..9: note = Description of Artificial Sequence: Synthetic peptide
QQANSFPFT

SEQ ID NO: 16705 - DNA, 27 bp, synthetic construct
  misc_feature 1..27: note = Description of Artificial Sequence: Synthetic oligonucleotide
  source 1..27: mol_type = other DNA
caacagtttaatagttaccctccgacg

SEQ ID NO: 16706 - protein, 9 aa, synthetic construct
  REGION 1..9: note = Description of Artificial Sequence: Synthetic peptide
QQFNSYPPT

SEQ ID NO: 16707 - DNA, 24 bp, synthetic construct
  misc_feature 1..24: note = Description of Artificial Sequence: Synthetic oligonucleotide
  source 1..24: mol_type = other DNA
atgcaaagtaaacagcttcctcct

SEQ ID NO: 16708 - protein, 8 aa, synthetic construct
  REGION 1..8: note = Description of Artificial Sequence: Synthetic peptide
MQSKQLPP

SEQ ID NO: 16709 - DNA, 27 bp, synthetic construct
  misc_feature 1..27: note = Description of Artificial Sequence: Synthetic oligonucleotide
  source 1..27: mol_type = other DNA
ctacagcatactatttaccctcctact

SEQ ID NO: 16710 - protein, 9 aa, synthetic construct
  REGION 1..9: note = Description of Artificial Sequence: Synthetic peptide
LQHTIYPPT

SEQ ID NO: 16711 - DNA, 27 bp, synthetic construct
  misc_feature 1..27: note = Description of Artificial Sequence: Synthetic oligonucleotide
  source 1..27: mol_type = other DNA
caccagagttacaatctcccgatcacc

SEQ ID NO: 16712 - protein, 9 aa, synthetic construct
  REGION 1..9: note = Description of Artificial Sequence: Synthetic peptide
HQSYNLPIT

SEQ ID NO: 16713 - DNA, 27 bp, synthetic construct
  misc_feature 1..27: note = Description of Artificial Sequence: Synthetic oligonucleotide
  source 1..27: mol_type = other DNA
ctacaccacaatagttaccctcctaag

SEQ ID NO: 16714 - protein, 9 aa, synthetic construct
  REGION 1..9: note = Description of Artificial Sequence: Synthetic peptide
LHHNSYPPK

SEQ ID NO: 16715 - DNA, 27 bp, synthetic construct
  misc_feature 1..27: note = Description of Artificial Sequence: Synthetic oligonucleotide
  source 1..27: mol_type = other DNA
caacagtctgacagtttccctcggacg

SEQ ID NO: 16716 - protein, 9 aa, synthetic construct
  REGION 1..9: note = Description of Artificial Sequence: Synthetic peptide
QQSDSFPRT

SEQ ID NO: 16717 - DNA, 30 bp, synthetic construct
  misc_feature 1..30: note = Description of Artificial Sequence: Synthetic oligonucleotide
  source 1..30: mol_type = other DNA
caggcgtgggacagcagctcttatgtggta

SEQ ID NO: 16718 - protein, 10 aa, synthetic construct
  REGION 1..10: note = Description of Artificial Sequence: Synthetic peptide
QAWDSSSYVV

SEQ ID NO: 16719 - DNA, 27 bp, synthetic construct
  misc_feature 1..27: note = Description of Artificial Sequence: Synthetic oligonucleotide
  source 1..27: mol_type = other DNA
caggcgtgggacaacagcactgtggta

SEQ ID NO: 16720 - protein, 9 aa, synthetic construct
  REGION 1..9: note = Description of Artificial Sequence: Synthetic peptide
QAWDNSTVV

SEQ ID NO: 16721 - DNA, 27 bp, synthetic construct
  misc_feature 1..27: note = Description of Artificial Sequence: Synthetic oligonucleotide
  source 1..27: mol_type = other DNA
caggcgtgggtcaacaacactatgata

SEQ ID NO: 16722 - protein, 9 aa, synthetic construct
  REGION 1..9: note = Description of Artificial Sequence: Synthetic peptide
QAWVNNTMI

SEQ ID NO: 16723 - DNA, 39 bp, synthetic construct
  misc_feature 1..39: note = Description of Artificial Sequence: Synthetic oligonucleotide
  source 1..39: mol_type = other DNA
ggagagagccacacgatcgatggccaagtcggtgtggta

SEQ ID NO: 16724 - protein, 13 aa, synthetic construct
  REGION 1..13: note = Description of Artificial Sequence: Synthetic peptide
GESHTIDGQVGVV

SEQ ID NO: 16725 - DNA, 27 bp, synthetic construct
  misc_feature 1..27: note = Description of Artificial Sequence: Synthetic oligonucleotide
  source 1..27: mol_type = other DNA
caggcgtgggacagtagtactgtggta

SEQ ID NO: 16726 - protein, 9 aa, synthetic construct
  REGION 1..9: note = Description of Artificial Sequence: Synthetic peptide
QAWDSSTVV

SEQ ID NO: 16727 - DNA, 27 bp, synthetic construct
  misc_feature 1..27: note = Description of Artificial Sequence: Synthetic oligonucleotide
  source 1..27: mol_type = other DNA
caggcgtgggacaacaccactgtggta

SEQ ID NO: 16728 - protein, 9 aa, synthetic construct
  REGION 1..9: note = Description of Artificial Sequence: Synthetic peptide
QAWDNTTVV

SEQ ID NO: 16729 - DNA, 36 bp, synthetic construct
  misc_feature 1..36: note = Description of Artificial Sequence: Synthetic oligonucleotide
  source 1..36: mol_type = other DNA
gcagcatgggatgacagcctgaatggtcatgtggta

SEQ ID NO: 16730 - protein, 12 aa, synthetic construct
  REGION 1..12: note = Description of Artificial Sequence: Synthetic peptide
AAWDDSLNGHVV

SEQ ID NO: 16731 - DNA, 27 bp, synthetic construct
  misc_feature 1..27: note = Description of Artificial Sequence: Synthetic oligonucleotide
  source 1..27: mol_type = other DNA
caggcgtgggacaacaacactgtgata

SEQ ID NO: 16732 - protein, 9 aa, synthetic construct
  REGION 1..9: note = Description of Artificial Sequence: Synthetic peptide
QAWDNNTVI

SEQ ID NO: 16733 - DNA, 27 bp, synthetic construct
  misc_feature 1..27: note = Description of Artificial Sequence: Synthetic oligonucleotide
  source 1..27: mol_type = other DNA
caggcgtgggacagcagcactgcggta

SEQ ID NO: 16734 - protein, 9 aa, synthetic construct
  REGION 1..9: note = Description of Artificial Sequence: Synthetic peptide
QAWDSSTAV

SEQ ID NO: 16735 - DNA, 24 bp, synthetic construct
  misc_feature 1..24: note = Description of Artificial Sequence: Synthetic oligonucleotide
  source 1..24: mol_type = other DNA
caggcgtgggtcaacaacactgta

SEQ ID NO: 16736 - protein, 8 aa, synthetic construct
  REGION 1..8: note = Description of Artificial Sequence: Synthetic peptide
QAWVNNTV

SEQ ID NO: 16737 - DNA, 24 bp, synthetic construct
  misc_feature 1..24: note = Description of Artificial Sequence: Synthetic oligonucleotide
  source 1..24: mol_type = other DNA
caggcgtgggacagcagcactgta

SEQ ID NO: 16738 - protein, 8 aa, synthetic construct
  REGION 1..8: note = Description of Artificial Sequence: Synthetic peptide
QAWDSSTV

SEQ ID NO: 16739 - DNA, 27 bp, synthetic construct
  misc_feature 1..27: note = Description of Artificial Sequence: Synthetic oligonucleotide
  source 1..27: mol_type = other DNA
caggcgtgggacaacaacactgtgata

SEQ ID NO: 16740 - protein, 9 aa, synthetic construct
  REGION 1..9: note = Description of Artificial Sequence: Synthetic peptide
QAWDNNTVI

SEQ ID NO: 16741 - DNA, 30 bp, synthetic construct; identical to SEQ ID NO: 16215
  misc_feature 1..30: note = Description of Artificial Sequence: Synthetic oligonucleotide
  source 1..30: mol_type = other DNA

SEQ ID NO: 16742 - protein, 10 aa, synthetic construct
  REGION 1..10: note = Description of Artificial Sequence: Synthetic peptide
QAWDSSTYVV

SEQ ID NO: 16743 - DNA, 27 bp, synthetic construct
  misc_feature 1..27: note = Description of Artificial Sequence: Synthetic oligonucleotide
  source 1..27: mol_type = other DNA
caggcgtgggtcaataacactatgata

SEQ ID NO: 16744 - protein, 9 aa, synthetic construct
  REGION 1..9: note = Description of Artificial Sequence: Synthetic peptide
QAWVNNTMI

SEQ ID NO: 16745 - DNA, 30 bp, synthetic construct
  misc_feature 1..30: note = Description of Artificial Sequence: Synthetic oligonucleotide
  source 1..30: mol_type = other DNA
caggcgtgggacagtagcacttatgtggta

SEQ ID NO: 16746 - protein, 10 aa, synthetic construct
  REGION 1..10: note = Description of Artificial Sequence: Synthetic peptide
QAWDSSTYVV

SEQ ID NO: 16747 - DNA, 27 bp, synthetic construct
  misc_feature 1..27: note = Description of Artificial Sequence: Synthetic oligonucleotide
  source 1..27: mol_type = other DNA
caggcgtgggacaacagcactgcggta

SEQ ID NO: 16748 - protein, 9 aa, synthetic construct
  REGION 1..9: note = Description of Artificial Sequence: Synthetic peptide
QAWDNSTAV

SEQ ID NO: 16749 - DNA, 27 bp, synthetic construct
  misc_feature 1..27: note = Description of Artificial Sequence: Synthetic oligonucleotide
  source 1..27: mol_type = other DNA
caggcgtgggacaacaacactgtgata

SEQ ID NO: 16750 - protein, 9 aa, synthetic construct
  REGION 1..9: note = Description of Artificial Sequence: Synthetic peptide
QAWDNNTVI

SEQ ID NO: 16751 - DNA, 33 bp, synthetic construct; identical to SEQ ID NO: 16217
  misc_feature 1..33: note = Description of Artificial Sequence: Synthetic oligonucleotide
  source 1..33: mol_type = other DNA

SEQ ID NO: 16752 - protein, 11 aa, synthetic construct
  REGION 1..11: note = Description of Artificial Sequence: Synthetic peptide
QVWDSSSDHVV

SEQ ID NO: 16753 - DNA, 30 bp, synthetic construct
  misc_feature 1..30: note = Description of Artificial Sequence: Synthetic oligonucleotide
  source 1..30: mol_type = other DNA
caggcgtggggcaacagcactgctgtggta

SEQ ID NO: 16754 - protein, 10 aa, synthetic construct
  REGION 1..10: note = Description of Artificial Sequence: Synthetic peptide
QAWGNSTAVV

SEQ ID NO: 16755 - DNA, 33 bp, synthetic construct
  misc_feature 1..33: note = Description of Artificial Sequence: Synthetic oligonucleotide
  source 1..33: mol_type = other DNA
caggtgtgggatagtagcagtgatcatgtggta

SEQ ID NO: 16756 - protein, 11 aa, synthetic construct
  REGION 1..11: note = Description of Artificial Sequence: Synthetic peptide
QVWDSSSDHVV

SEQ ID NO: 16757 - DNA, 27 bp, synthetic construct
  misc_feature 1..27: note = Description of Artificial Sequence: Synthetic oligonucleotide
  source 1..27: mol_type = other DNA
caggcgtgggacagcatcactgcagta

SEQ ID NO: 16758 - protein, 9 aa, synthetic construct
  REGION 1..9: note = Description of Artificial Sequence: Synthetic peptide
QAWDSITAV

SEQ ID NO: 16759 - DNA, 24 bp, synthetic construct
  misc_feature 1..24: note = Description of Artificial Sequence: Synthetic oligonucleotide
  source 1..24: mol_type = other DNA
caggcgtgggacagcagcactgtt

SEQ ID NO: 16760 - protein, 8 aa, synthetic construct
  REGION 1..8: note = Description of Artificial Sequence: Synthetic peptide
QAWDSSTV

SEQ ID NO: 16761 - DNA, 27 bp, synthetic construct
  misc_feature 1..27: note = Description of Artificial Sequence: Synthetic oligonucleotide
  source 1..27: mol_type = other DNA
caggcgtgggacagcaccaccgtggta

SEQ ID NO: 16762 - protein, 9 aa, synthetic construct
  REGION 1..9: note = Description of Artificial Sequence: Synthetic peptide
QAWDSTTVV

SEQ ID NO: 16763 - DNA, 30 bp, synthetic construct; identical to SEQ ID NO: 16753
  misc_feature 1..30: note = Description of Artificial Sequence: Synthetic oligonucleotide
  source 1..30: mol_type = other DNA

SEQ ID NO: 16764 - protein, 10 aa, synthetic construct
  REGION 1..10: note = Description of Artificial Sequence: Synthetic peptide
QAWGNSTAVV

SEQ ID NO: 16765 - DNA, 24 bp, synthetic construct
  misc_feature 1..24: note = Description of Artificial Sequence: Synthetic oligonucleotide
  source 1..24: mol_type = other DNA
caggcgtgggacagcagcacggta

SEQ ID NO: 16766 - protein, 8 aa, synthetic construct
  REGION 1..8: note = Description of Artificial Sequence: Synthetic peptide
QAWDSSTV

SEQ ID NO: 16767 - DNA, 24 bp, synthetic construct
  misc_feature 1..24: note = Description of Artificial Sequence: Synthetic oligonucleotide
  source 1..24: mol_type = other DNA
caggcgtgggacagcagcactgta

SEQ ID NO: 16768 - protein, 8 aa, synthetic construct
  REGION 1..8: note = Description of Artificial Sequence: Synthetic peptide
QAWDSSTV

SEQ ID NO: 16769 - DNA, 27 bp, synthetic construct
  misc_feature 1..27: note = Description of Artificial Sequence: Synthetic oligonucleotide
  source 1..27: mol_type = other DNA
caggcgtgggacaacagcactgcggta

SEQ ID NO: 16770 - protein, 9 aa, synthetic construct
  REGION 1..9: note = Description of Artificial Sequence: Synthetic peptide
QAWDNSTAV

SEQ ID NO: 16771 - DNA, 36 bp, synthetic construct; identical to SEQ ID NO: 16729
  misc_feature 1..36: note = Description of Artificial Sequence: Synthetic oligonucleotide
  source 1..36: mol_type = other DNA

SEQ ID NO: 16772 - protein, 12 aa, synthetic construct
  REGION 1..12: note = Description of Artificial Sequence: Synthetic peptide
AAWDDSLNGHVV

SEQ ID NO: 16773 - DNA, 30 bp, synthetic construct
  misc_feature 1..30: note = Description of Artificial Sequence: Synthetic oligonucleotide
  source 1..30: mol_type = other DNA
agctcatatacaagcagcatcactgtggta

SEQ ID NO: 16774 - protein, 10 aa, synthetic construct
  REGION 1..10: note = Description of Artificial Sequence: Synthetic peptide
SSYTSSITVV

SEQ ID NO: 16775 - DNA, 24 bp, synthetic construct
  misc_feature 1..24: note = Description of Artificial Sequence: Synthetic oligonucleotide
  source 1..24: mol_type = other DNA
caggcgtgggtcaacaacactgta

SEQ ID NO: 16776 - protein, 8 aa, synthetic construct
  REGION 1..8: note = Description of Artificial Sequence: Synthetic peptide
QAWVNNTV

SEQ ID NO: 16777 - DNA, 27 bp, synthetic construct
  misc_feature 1..27: note = Description of Artificial Sequence: Synthetic oligonucleotide
  source 1..27: mol_type = other DNA
caggcgtgggacaacagcactgtggtt

SEQ ID NO: 16778 - protein, 9 aa, synthetic construct
  REGION 1..9: note = Description of Artificial Sequence: Synthetic peptide
QAWDNSTVV

SEQ ID NO: 16779 - DNA, 27 bp, synthetic construct
  misc_feature 1..27: note = Description of Artificial Sequence: Synthetic oligonucleotide
  source 1..27: mol_type = other DNA
cagcaatattattgtactcctccgacg

SEQ ID NO: 16780 - protein, 9 aa, synthetic construct
  REGION 1..9: note = Description of Artificial Sequence: Synthetic peptide
QQYYCTPPT

SEQ ID NO: 16781 - DNA, 27 bp, synthetic construct
  misc_feature 1..27: note = Description of Artificial Sequence: Synthetic oligonucleotide
  source 1..27: mol_type = other DNA
caggcgtgggacaacagcactgcggta

SEQ ID NO: 16782 - protein, 9 aa, synthetic construct
  REGION 1..9: note = Description of Artificial Sequence: Synthetic peptide
QAWDNSTAV

SEQ ID NO: 16783 - DNA, 24 bp, synthetic construct
  misc_feature 1..24: note = Description of Artificial Sequence: Synthetic oligonucleotide
  source 1..24: mol_type = other DNA
cagcagtatggtagttcacgcagt

SEQ ID NO: 16784 - protein, 8 aa, synthetic construct
  REGION 1..8: note = Description of Artificial Sequence: Synthetic peptide
QQYGSSRS

SEQ ID NO: 16785 - DNA, 27 bp, synthetic construct
  misc_feature 1..27: note = Description of Artificial Sequence: Synthetic oligonucleotide
  source 1..27: mol_type = other DNA
ctacaacataatagttacccgctcact

SEQ ID NO: 16786 - protein, 9 aa, synthetic construct
  REGION 1..9: note = Description of Artificial Sequence: Synthetic peptide
LQHNSYPLT

SEQ ID NO: 16787 - DNA, 27 bp, synthetic construct
  misc_feature 1..27: note = Description of Artificial Sequence: Synthetic oligonucleotide
  source 1..27: mol_type = other DNA
ctacagcatagtagttacccgctcact

SEQ ID NO: 16788 - protein, 9 aa, synthetic construct
  REGION 1..9: note = Description of Artificial Sequence: Synthetic peptide
LQHSSYPLT

SEQ ID NO: 16789 - DNA, 27 bp, synthetic construct
  misc_feature 1..27: note = Description of Artificial Sequence: Synthetic oligonucleotide
  source 1..27: mol_type = other DNA
ctacagcataatagtcaccctctcact

SEQ ID NO: 16790 - protein, 9 aa, synthetic construct
  REGION 1..9: note = Description of Artificial Sequence: Synthetic peptide
LQHNSHPLT

SEQ ID NO: 16791 - DNA, 27 bp, synthetic construct
  misc_feature 1..27: note = Description of Artificial Sequence: Synthetic oligonucleotide
  source 1..27: mol_type = other DNA
caacaggctaacagtttcccgtggacg

SEQ ID NO: 16792 - protein, 9 aa, synthetic construct
  REGION 1..9: note = Description of Artificial Sequence: Synthetic peptide
QQANSFPWT

SEQ ID NO: 16793 - DNA, 27 bp, synthetic construct
  misc_feature 1..27: note = Description of Artificial Sequence: Synthetic oligonucleotide
  source 1..27: mol_type = other DNA
ctacagcataatagttacccgtggacg

SEQ ID NO: 16794 - protein, 9 aa, synthetic construct
  REGION 1..9: note = Description of Artificial Sequence: Synthetic peptide
LQHNSYPWT

SEQ ID NO: 16795 - DNA, 27 bp, synthetic construct
  misc_feature 1..27: note = Description of Artificial Sequence: Synthetic oligonucleotide
  source 1..27: mol_type = other DNA
ctacagcatagtgcttacccgctcact

SEQ ID NO: 16796 - protein, 9 aa, synthetic construct
  REGION 1..9: note = Description of Artificial Sequence: Synthetic peptide
LQHSAYPLT

SEQ ID NO: 16797 - DNA, 27 bp, synthetic construct
  misc_feature 1..27: note = Description of Artificial Sequence: Synthetic oligonucleotide
  source 1..27: mol_type = other DNA
ctacagcatagtagttacccgctcact

SEQ ID NO: 16798 - protein, 9 aa, synthetic construct
  REGION 1..9: note = Description of Artificial Sequence: Synthetic peptide
LQHSSYPLT

SEQ ID NO: 16799 - DNA, 27 bp, synthetic construct
  misc_feature 1..27: note = Description of Artificial Sequence: Synthetic oligonucleotide
  source 1..27: mol_type = other DNA
ctacagcataatagttacccgctcact

SEQ ID NO: 16800 - protein, 9 aa, synthetic construct
  REGION 1..9: note = Description of Artificial Sequence: Synthetic peptide
LQHNSYPLT

SEQ ID NO: 16801 - DNA, 27 bp, synthetic construct
  misc_feature 1..27: note = Description of Artificial Sequence: Synthetic oligonucleotide
  source 1..27: mol_type = other DNA
ctacagcataatagttacccgttcact

SEQ ID NO: 16802 - protein, 9 aa, synthetic construct
  REGION 1..9: note = Description of Artificial Sequence: Synthetic peptide
LQHNSYPFT

SEQ ID NO: 16803 - DNA, 27 bp, synthetic construct
  misc_feature 1..27: note = Description of Artificial Sequence: Synthetic oligonucleotide
  source 1..27: mol_type = other DNA
ctacagcataatagttacccattcact

SEQ ID NO: 16804 - protein, 9 aa, synthetic construct
  REGION 1..9: note = Description of Artificial Sequence: Synthetic peptide
LQHNSYPFT

SEQ ID NO: 16805 - DNA, 30 bp, synthetic construct
  misc_feature 1..30: note = Description of Artificial Sequence: Synthetic oligonucleotide
  source 1..30: mol_type = other DNA
caacagagttacaatacccccttcttcact

SEQ ID NO: 16806 - protein, 10 aa, synthetic construct
  REGION 1..10: note = Description of Artificial Sequence: Synthetic peptide
QQSYNTPFFT

SEQ ID NO: 16807 - DNA, 27 bp, synthetic construct
  misc_feature 1..27: note = Description of Artificial Sequence: Synthetic oligonucleotide
  source 1..27: mol_type = other DNA
ctacagcataatagttacccgctcact

SEQ ID NO: 16808 - protein, 9 aa, synthetic construct
  REGION 1..9: note = Description of Artificial Sequence: Synthetic peptide
LQHNSYPLT

SEQ ID NO: 16809 - DNA, 27 bp, synthetic construct
  misc_feature 1..27: note = Description of Artificial Sequence: Synthetic oligonucleotide
  source 1..27: mol_type = other DNA
ctacagcataatagttacccgctcact

SEQ ID NO: 16810 - protein, 9 aa, synthetic construct
  REGION 1..9: note = Description of Artificial Sequence: Synthetic peptide
LQHNSYPLT

SEQ ID NO: 16811 - DNA, 27 bp, synthetic construct
  misc_feature 1..27: note = Description of Artificial Sequence: Synthetic oligonucleotide
  source 1..27: mol_type = other DNA
ctacagcataatagttacccgctcact

SEQ ID NO: 16812 - protein, 9 aa, synthetic construct
  REGION 1..9: note = Description of Artificial Sequence: Synthetic peptide
LQHNSYPLT

SEQ ID NO: 16813 - DNA, 27 bp, synthetic construct
  misc_feature 1..27: note = Description of Artificial Sequence: Synthetic oligonucleotide
  source 1..27: mol_type = other DNA
ctacaacataatagttacccgctcact

SEQ ID NO: 16814 - protein, 9 aa, synthetic construct
  REGION 1..9: note = Description of Artificial Sequence: Synthetic peptide
LQHNSYPLT

SEQ ID NO: 16815 - DNA, 27 bp, synthetic construct
  misc_feature 1..27: note = Description of Artificial Sequence: Synthetic oligonucleotide
  source 1..27: mol_type = other DNA
caacagtattatagttacccattcact

SEQ ID NO: 16816 - protein, 9 aa, synthetic construct
  REGION 1..9: note = Description of Artificial Sequence: Synthetic peptide
QQYYSYPFT

SEQ ID NO: 16817 - DNA, 27 bp, synthetic construct
  misc_feature 1..27: note = Description of Artificial Sequence: Synthetic oligonucleotide
  source 1..27: mol_type = other DNA
atacagcataatagttacctgtggacg

SEQ ID NO: 16818 - protein, 9 aa, synthetic construct
  REGION 1..9: note = Description of Artificial Sequence: Synthetic peptide
IQHNSYLWT

SEQ ID NO: 16819 - DNA, 27 bp, synthetic construct
  misc_feature 1..27: note = Description of Artificial Sequence: Synthetic oligonucleotide
  source 1..27: mol_type = other DNA
caacagacttacagtaccccgctcact

SEQ ID NO: 16820 - protein, 9 aa, synthetic construct
  REGION 1..9: note = Description of Artificial Sequence: Synthetic peptide
QQTYSTPLT

SEQ ID NO: 16821 - DNA, 27 bp, synthetic construct
  misc_feature 1..27: note = Description of Artificial Sequence: Synthetic oligonucleotide
  source 1..27: mol_type = other DNA
caacagagttacagtccccctttcact

SEQ ID NO: 16822 - protein, 9 aa, synthetic construct
  REGION 1..9: note = Description of Artificial Sequence: Synthetic peptide
QQSYSPPFT

SEQ ID NO: 16823 - DNA, 30 bp, synthetic construct; identical to SEQ ID NO: 16293
  misc_feature 1..30: note = Description of Artificial Sequence: Synthetic oligonucleotide
  source 1..30: mol_type = other DNA

SEQ ID NO: 16824 - protein, 10 aa, synthetic construct
  REGION 1..10: note = Description of Artificial Sequence: Synthetic peptide
QQSYRTPLFT

SEQ ID NO: 16825 - DNA, 27 bp, synthetic construct
  misc_feature 1..27: note = Description of Artificial Sequence: Synthetic oligonucleotide
  source 1..27: mol_type = other DNA
cagcagagttacagtccccctctcact

SEQ ID NO: 16826 - protein, 9 aa, synthetic construct
  REGION 1..9: note = Description of Artificial Sequence: Synthetic peptide
QQSYSPPLT

SEQ ID NO: 16827 - DNA, 27 bp, synthetic construct
  misc_feature 1..27: note = Description of Artificial Sequence: Synthetic oligonucleotide
  source 1..27: mol_type = other DNA
ctacaacataatctttacccgctcact

SEQ ID NO: 16828 - protein, 9 aa, synthetic construct
  REGION 1..9: note = Description of Artificial Sequence: Synthetic peptide
LQHNLYPLT

SEQ ID NO: 16829 - DNA, 27 bp, synthetic construct
  misc_feature 1..27: note = Description of Artificial Sequence: Synthetic oligonucleotide
  source 1..27: mol_type = other DNA
gtacagcataatagttacccgctcact

SEQ ID NO: 16830 - protein, 9 aa, synthetic construct
  REGION 1..9: note = Description of Artificial Sequence: Synthetic peptide
VQHNSYPLT

SEQ ID NO: 16831 - DNA, 30 bp, synthetic construct
  misc_feature 1..30: note = Description of Artificial Sequence: Synthetic oligonucleotide
  source 1..30: mol_type = other DNA
caacagagttacagtactcccttattcact

SEQ ID NO: 16832 - protein, 10 aa, synthetic construct
  REGION 1..10: note = Description of Artificial Sequence: Synthetic peptide
QQSYSTPLFT

SEQ ID NO: 16833 - DNA, 27 bp, synthetic construct
  misc_feature 1..27: note = Description of Artificial Sequence: Synthetic oligonucleotide
  source 1..27: mol_type = other DNA
ctacagcattatagttaccctcggacg

SEQ ID NO: 16834 - protein, 9 aa, synthetic construct
  REGION 1..9: note = Description of Artificial Sequence: Synthetic peptide
LQHYSYPRT

SEQ ID NO: 16835 - DNA, 27 bp, synthetic construct
  misc_feature 1..27: note = Description of Artificial Sequence: Synthetic oligonucleotide
  source 1..27: mol_type = other DNA
gtacagcattatagttacccgttcact

SEQ ID NO: 16836 - protein, 9 aa, synthetic construct
  REGION 1..9: note = Description of Artificial Sequence: Synthetic peptide
VQHYSYPFT

SEQ ID NO: 16837 - DNA, 27 bp, synthetic construct
  misc_feature 1..27: note = Description of Artificial Sequence: Synthetic oligonucleotide
  source 1..27: mol_type = other DNA
catcagagtaacagtactcctctcacg

SEQ ID NO: 16838 - protein, 9 aa, synthetic construct
  REGION 1..9: note = Description of Artificial Sequence: Synthetic peptide
HQSNSTPLT

SEQ ID NO: 16839 - DNA, 27 bp, synthetic construct
  misc_feature 1..27: note = Description of Artificial Sequence: Synthetic oligonucleotide
  source 1..27: mol_type = other DNA
caccagtataatagttaccccttcact

SEQ ID NO: 16840 - protein, 9 aa, synthetic construct
  REGION 1..9: note = Description of Artificial Sequence: Synthetic peptide
HQYNSYPFT

SEQ ID NO: 16841 - DNA, 27 bp, synthetic construct
  misc_feature 1..27: note = Description of Artificial Sequence: Synthetic oligonucleotide
  source 1..27: mol_type = other DNA
ctacagcataatagttacccgctcact

SEQ ID NO: 16842 - protein, 9 aa, synthetic construct
  REGION 1..9: note = Description of Artificial Sequence: Synthetic peptide
LQHNSYPLT

SEQ ID NO: 16843 - DNA, 27 bp, synthetic construct
  misc_feature 1..27: note = Description of Artificial Sequence: Synthetic oligonucleotide
  source 1..27: mol_type = other DNA
ctacagcataatagttacccgctcact

SEQ ID NO: 16844 - protein, 9 aa, synthetic construct
  REGION 1..9: note = Description of Artificial Sequence: Synthetic peptide
LQHNSYPLT

SEQ ID NO: 16845 - DNA, 27 bp, synthetic construct
  misc_feature 1..27: note = Description of Artificial Sequence: Synthetic oligonucleotide
  source 1..27: mol_type = other DNA
atacagcataatagttacctgtggacg

SEQ ID NO: 16846 - protein, 9 aa, synthetic construct
  REGION 1..9: note = Description of Artificial Sequence: Synthetic peptide
IQHNSYLWT

SEQ ID NO: 16847 - DNA, 30 bp, synthetic construct; identical to SEQ ID NO: 16321
  misc_feature 1..30: note = Description of Artificial Sequence: Synthetic oligonucleotide
  source 1..30: mol_type = other DNA

SEQ ID NO: 16848 - protein, 10 aa, synthetic construct
  REGION 1..10: note = Description of Artificial Sequence: Synthetic peptide
QQSYTTPTWT

SEQ ID NO: 16849 - DNA, 27 bp, synthetic construct
  misc_feature 1..27: note = Description of Artificial Sequence: Synthetic oligonucleotide
  source 1..27: mol_type = other DNA
ctacacaacagtagttaccctgttaag

SEQ ID NO: 16850 - protein, 9 aa, synthetic construct
  REGION 1..9: note = Description of Artificial Sequence: Synthetic peptide
LHNSSYPVK

SEQ ID NO: 16851 - DNA, 27 bp, synthetic construct
  misc_feature 1..27: note = Description of Artificial Sequence: Synthetic oligonucleotide
  source 1..27: mol_type = other DNA
ctacagcatcatagttacccgctcact

SEQ ID NO: 16852 - protein, 9 aa, synthetic construct
  REGION 1..9: note = Description of Artificial Sequence: Synthetic peptide
LQHHSYPLT

SEQ ID NO: 16853 - DNA, 27 bp, synthetic construct
  misc_feature 1..27: note = Description of Artificial Sequence: Synthetic oligonucleotide
  source 1..27: mol_type = other DNA
atacagcataatagttatccgttcact

SEQ ID NO: 16854 - protein, 9 aa, synthetic construct
  REGION 1..9: note = Description of Artificial Sequence: Synthetic peptide
IQHNSYPFT

SEQ ID NO: 16855 - DNA, 27 bp, synthetic construct
  misc_feature 1..27: note = Description of Artificial Sequence: Synthetic oligonucleotide
  source 1..27: mol_type = other DNA
ttacagcatgaaagttaccctctcact

SEQ ID NO: 16856 - protein, 9 aa, synthetic construct
  REGION 1..9: note = Description of Artificial Sequence: Synthetic peptide
LQHESYPLT

SEQ ID NO: 16857 - DNA, 30 bp, synthetic construct
  misc_feature 1..30: note = Description of Artificial Sequence: Synthetic oligonucleotide
  source 1..30: mol_type = other DNA
caacagagttacagtacccccttgttcact

SEQ ID NO: 16858 - protein, 10 aa, synthetic construct
  REGION 1..10: note = Description of Artificial Sequence: Synthetic peptide
QQSYSTPLFT

SEQ ID NO: 16859 - DNA, 27 bp, synthetic construct
  misc_feature 1..27: note = Description of Artificial Sequence: Synthetic oligonucleotide
  source 1..27: mol_type = other DNA
caacagagttacaatatctcattcact

SEQ ID NO: 16860 - protein, 9 aa, synthetic construct
  REGION 1..9: note = Description of Artificial Sequence: Synthetic peptide
QQSYNISFT

SEQ ID NO: 16861 - DNA, 27 bp, synthetic construct
  misc_feature 1..27: note = Description of Artificial Sequence: Synthetic oligonucleotide
  source 1..27: mol_type = other DNA
caacagtatgataatgtcccgatcacc

SEQ ID NO: 16862 - protein, 9 aa, synthetic construct
  REGION 1..9: note = Description of Artificial Sequence: Synthetic peptide
QQYDNVPIT

SEQ ID NO: 16863 - DNA, 27 bp, synthetic construct
  misc_feature 1..27: note = Description of Artificial Sequence: Synthetic oligonucleotide
  source 1..27: mol_type = other DNA
caccagtatcacagttacccattcact

SEQ ID NO: 16864 - protein, 9 aa, synthetic construct
  REGION 1..9: note = Description of Artificial Sequence: Synthetic peptide
HQYHSYPFT

SEQ ID NO: 16865 - DNA, 27 bp, synthetic construct
  misc_feature 1..27: note = Description of Artificial Sequence: Synthetic oligonucleotide
  source 1..27: mol_type = other DNA
caacagtataatagttacccattcact

SEQ ID NO: 16866 - protein, 9 aa, synthetic construct
  REGION 1..9: note = Description of Artificial Sequence: Synthetic peptide
QQYNSYPFT

SEQ ID NO: 16867 - DNA, 30 bp, synthetic construct; identical to SEQ ID NO: 16313
  misc_feature 1..30: note = Description of Artificial Sequence: Synthetic oligonucleotide
  source 1..30: mol_type = other DNA

SEQ ID NO: 16868 - protein, 10 aa, synthetic construct
  REGION 1..10: note = Description of Artificial Sequence: Synthetic peptide
QQSYNTPLFT

SEQ ID NO: 16869 - DNA, 27 bp, synthetic construct
  misc_feature 1..27: note = Description of Artificial Sequence: Synthetic oligonucleotide
  source 1..27: mol_type = other DNA
caacagaattacagtccccctctcact

SEQ ID NO: 16870 - protein, 9 aa, synthetic construct
  REGION 1..9: note = Description of Artificial Sequence: Synthetic peptide
QQNYSPPLT

SEQ ID NO: 16871 - DNA, 27 bp, synthetic construct
  misc_feature 1..27: note = Description of Artificial Sequence: Synthetic oligonucleotide
  source 1..27: mol_type = other DNA
ctgcagcattatagttaccctcggacg

SEQ ID NO: 16872 - protein, 9 aa, synthetic construct
  REGION 1..9: note = Description of Artificial Sequence: Synthetic peptide
LQHYSYPRT

SEQ ID NO: 16873 - DNA, 27 bp, synthetic construct
  misc_feature 1..27: note = Description of Artificial Sequence: Synthetic oligonucleotide
  source 1..27: mol_type = other DNA
caacagagttacagtacccctttcact

SEQ ID NO: 16874 - protein, 9 aa, synthetic construct
  REGION 1..9: note = Description of Artificial Sequence: Synthetic peptide
QQSYSTPFT

SEQ ID NO: 16875 - DNA, 27 bp, synthetic construct
  misc_feature 1..27: note = Description of Artificial Sequence: Synthetic oligonucleotide
  source 1..27: mol_type = other DNA
cagcagtatcatgactggcctccgacg

SEQ ID NO: 16876 - protein, 9 aa, synthetic construct
  REGION 1..9: note = Description of Artificial Sequence: Synthetic peptide
QQYHDWPPT

SEQ ID NO: 16877 - DNA, 27 bp, synthetic construct
  misc_feature 1..27: note = Description of Artificial Sequence: Synthetic oligonucleotide
  source 1..27: mol_type = other DNA
ctacagcattatagttaccctcggacg

SEQ ID NO: 16878 - protein, 9 aa, synthetic construct
  REGION 1..9: note = Description of Artificial Sequence: Synthetic peptide
LQHYSYPRT

SEQ ID NO: 16879 - DNA, 27 bp, synthetic construct
  misc_feature 1..27: note = Description of Artificial Sequence: Synthetic oligonucleotide
  source 1..27: mol_type = other DNA
caacagtatgataatctcccgatcacc

SEQ ID NO: 16880 - protein, 9 aa, synthetic construct
  REGION 1..9: note = Description of Artificial Sequence: Synthetic peptide
QQYDNLPIT

SEQ ID NO: 16881 - DNA, 27 bp, synthetic construct
  misc_feature 1..27: note = Description of Artificial Sequence: Synthetic oligonucleotide
  source 1..27: mol_type = other DNA
caacagtatgataatctcccgatcacc

SEQ ID NO: 16882 - protein, 9 aa, synthetic construct
  REGION 1..9: note = Description of Artificial Sequence: Synthetic peptide
QQYDNLPIT

SEQ ID NO: 16883 - DNA, 27 bp, synthetic construct
  misc_feature 1..27: note = Description of Artificial Sequence: Synthetic oligonucleotide
  source 1..27: mol_type = other DNA
caccagtatcacagttacccattcact

SEQ ID NO: 16884 - protein, 9 aa, synthetic construct
  REGION 1..9: note = Description of Artificial Sequence: Synthetic peptide
HQYHSYPFT

SEQ ID NO: 16885 - DNA, 27 bp, synthetic construct
  misc_feature 1..27: note = Description of Artificial Sequence: Synthetic oligonucleotide
  source 1..27: mol_type = other DNA
ctacaacattatagtttccctcggacg

SEQ ID NO: 16886 - protein, 9 aa, synthetic construct
  REGION 1..9: note = Description of Artificial Sequence: Synthetic peptide
LQHYSFPRT

SEQ ID NO: 16887 - DNA, 27 bp, synthetic construct
  misc_feature 1..27: note = Description of Artificial Sequence: Synthetic oligonucleotide
  source 1..27: mol_type = other DNA
caacagagttacagtccccctctcact

SEQ ID NO: 16888 - protein, 9 aa, synthetic construct
  REGION 1..9: note = Description of Artificial Sequence: Synthetic peptide
QQSYSPPLT

SEQ ID NO: 16889 - DNA, 27 bp, synthetic construct
  misc_feature 1..27: note = Description of Artificial Sequence: Synthetic oligonucleotide
  source 1..27: mol_type = other DNA
ctacagcataatagttacccgctcact

SEQ ID NO: 16890 - protein, 9 aa, synthetic construct
  REGION 1..9: note = Description of Artificial Sequence: Synthetic peptide
LQHNSYPLT

SEQ ID NO: 16891 - DNA, 27 bp, synthetic construct
  misc_feature 1..27: note = Description of Artificial Sequence: Synthetic oligonucleotide
  source 1..27: mol_type = other DNA
caacagacttacagtactccgctcact

SEQ ID NO: 16892 - protein, 9 aa, synthetic construct
  REGION 1..9: note = Description of Artificial Sequence: Synthetic peptide
QQTYSTPLT

SEQ ID NO: 16893 - DNA, 27 bp, synthetic construct
  misc_feature 1..27: note = Description of Artificial Sequence: Synthetic oligonucleotide
  source 1..27: mol_type = other DNA
ttacagcatgataattaccctctcact

SEQ ID NO: 16894 - protein, 9 aa, synthetic construct
  REGION 1..9: note = Description of Artificial Sequence: Synthetic peptide
LQHDNYPLT

SEQ ID NO: 16895 - DNA, 27 bp, synthetic construct
  misc_feature 1..27: note = Description of Artificial Sequence: Synthetic oligonucleotide
  source 1..27: mol_type = other DNA
caacagacttacagtaccccgctcact

SEQ ID NO: 16896 - protein, 9 aa, synthetic construct
  REGION 1..9: note = Description of Artificial Sequence: Synthetic peptide
QQTYSTPLT

SEQ ID NO: 16897 - DNA, 27 bp, synthetic construct
  misc_feature 1..27: note = Description of Artificial Sequence: Synthetic oligonucleotide
  source 1..27: mol_type = other DNA
caacagagttacagtccccctctcact

SEQ ID NO: 16898 - protein, 9 aa, synthetic construct
  REGION 1..9: note = Description of Artificial Sequence: Synthetic peptide
QQSYSPPLT

SEQ ID NO: 16899 - DNA, 27 bp, synthetic construct
  misc_feature 1..27: note = Description of Artificial Sequence: Synthetic oligonucleotide
  source 1..27: mol_type = other DNA
gtacagcataatagttacccgctcact

SEQ ID NO: 16900 - protein, 9 aa, synthetic construct
  REGION 1..9: note = Description of Artificial Sequence: Synthetic peptide
VQHNSYPLT

SEQ ID NO: 16901 - DNA, 30 bp, synthetic construct
  misc_feature 1..30: note = Description of Artificial Sequence: Synthetic oligonucleotide
  source 1..30: mol_type = other DNA
caacagacttacagtagccctccattcact

SEQ ID NO: 16902 - protein, 10 aa, synthetic construct
  REGION 1..10: note = Description of Artificial Sequence: Synthetic peptide
QQTYSSPPFT

SEQ ID NO: 16903 - DNA, 33 bp, synthetic construct
  misc_feature 1..33: note = Description of Artificial Sequence: Synthetic oligonucleotide
  source 1..33: mol_type = other DNA
caacagacttacaatacccctccggagcgcagt

SEQ ID NO: 16904 - protein, 11 aa, synthetic construct
  REGION 1..11: note = Description of Artificial Sequence: Synthetic peptide
QQTYNTPPERS

SEQ ID NO: 16905 - DNA, 27 bp, synthetic construct
  misc_feature 1..27: note = Description of Artificial Sequence: Synthetic oligonucleotide
  source 1..27: mol_type = other DNA
cagcaatattatagtactcctccgacg

SEQ ID NO: 16906 - protein, 9 aa, synthetic construct
  REGION 1..9: note = Description of Artificial Sequence: Synthetic peptide
QQYYSTPPT

SEQ ID NO: 16907 - DNA, 27 bp, synthetic construct
  misc_feature 1..27: note = Description of Artificial Sequence: Synthetic oligonucleotide
  source 1..27: mol_type = other DNA
ctacagtataatagttacccattcact

SEQ ID NO: 16908 - protein, 9 aa, synthetic construct
  REGION 1..9: note = Description of Artificial Sequence: Synthetic peptide
LQYNSYPFT

SEQ ID NO: 16909 - DNA, 27 bp, synthetic construct
  misc_feature 1..27: note = Description of Artificial Sequence: Synthetic oligonucleotide
  source 1..27: mol_type = other DNA
caacagtatcatagttacccgtggacg

SEQ ID NO: 16910 - protein, 9 aa, synthetic construct
  REGION 1..9: note = Description of Artificial Sequence: Synthetic peptide
QQYHSYPWT

SEQ ID NO: 16911 - DNA, 27 bp, synthetic construct
  misc_feature 1..27: note = Description of Artificial Sequence: Synthetic oligonucleotide
  source 1..27: mol_type = other DNA
ctacagcataatagttacccgtggacg

SEQ ID NO: 16912 - protein, 9 aa, synthetic construct
  REGION 1..9: note = Description of Artificial Sequence: Synthetic peptide
LQHNSYPWT

SEQ ID NO: 16913 - DNA, 27 bp, synthetic construct
  misc_feature 1..27: note = Description of Artificial Sequence: Synthetic oligonucleotide
  source 1..27: mol_type = other DNA
caggcgtgggtcaacaacactatgata

SEQ ID NO: 16914 - protein, 9 aa, synthetic construct
  REGION 1..9: note = Description of Artificial Sequence: Synthetic peptide
QAWVNNTMI

SEQ ID NO: 16915 - DNA, 27 bp, synthetic construct
  misc_feature 1..27: note = Description of Artificial Sequence: Synthetic oligonucleotide
  source 1..27: mol_type = other DNA
caacagtataatagttaccctctcact

SEQ ID NO: 16916 - protein, 9 aa, synthetic construct
  REGION 1..9: note = Description of Artificial Sequence: Synthetic peptide
QQYNSYPLT

SEQ ID NO: 16917 - DNA, 27 bp, synthetic construct
  misc_feature 1..27: note = Description of Artificial Sequence: Synthetic oligonucleotide
  source 1..27: mol_type = other DNA
caacaggctaacagtttcccattcact

SEQ ID NO: 16918 - protein, 9 aa, synthetic construct
  REGION 1..9: note = Description of Artificial Sequence: Synthetic peptide
QQANSFPFT

SEQ ID NO: 16919 - DNA, 33 bp, synthetic construct; identical to SEQ ID NO: 16903
  misc_feature 1..33: note = Description of Artificial Sequence: Synthetic oligonucleotide
  source 1..33: mol_type = other DNA

SEQ ID NO: 16920 - protein, 11 aa, synthetic construct
  REGION 1..11: note = Description of Artificial Sequence: Synthetic peptide
QQTYNTPPERS

SEQ ID NO: 16921 - DNA, 27 bp, synthetic construct
  misc_feature 1..27: note = Description of Artificial Sequence: Synthetic oligonucleotide
  source 1..27: mol_type = other DNA
ctacagcataatagttaccctctcact

SEQ ID NO: 16922 - protein, 9 aa, synthetic construct
  REGION 1..9: note = Description of Artificial Sequence: Synthetic peptide
LQHNSYPLT

SEQ ID NO: 16923 - DNA, 27 bp, synthetic construct
  misc_feature 1..27: note = Description of Artificial Sequence: Synthetic oligonucleotide
  source 1..27: mol_type = other DNA
ctacaacataatagttacccgtggacg

SEQ ID NO: 16924 - protein, 9 aa, synthetic construct
  REGION 1..9: note = Description of Artificial Sequence: Synthetic peptide
LQHNSYPWT

SEQ ID NO: 16925 - DNA, 27 bp, synthetic construct
  misc_feature 1..27: note = Description of Artificial Sequence: Synthetic oligonucleotide
  source 1..27: mol_type = other DNA
ctacagcatagtagttacccgttcact

SEQ ID NO: 16926 - protein, 9 aa, synthetic construct
  REGION 1..9: note = Description of Artificial Sequence: Synthetic peptide
LQHSSYPFT

SEQ ID NO: 16927 - DNA, 27 bp, synthetic construct
  misc_feature 1..27: note = Description of Artificial Sequence: Synthetic oligonucleotide
  source 1..27: mol_type = other DNA
caacagcctcacagtcccccgctcact

SEQ ID NO: 16928 - protein, 9 aa, synthetic construct
  REGION 1..9: note = Description of Artificial Sequence: Synthetic peptide
QQPHSPPLT

SEQ ID NO: 16929 - DNA, 27 bp, synthetic construct
  misc_feature 1..27: note = Description of Artificial Sequence: Synthetic oligonucleotide
  source 1..27: mol_type = other DNA
ctacaacattatacttaccctcggacg

SEQ ID NO: 16930 - protein, 9 aa, synthetic construct
  REGION 1..9: note = Description of Artificial Sequence: Synthetic peptide
LQHYTYPRT

SEQ ID NO: 16931 - DNA, 27 bp, synthetic construct
  misc_feature 1..27: note = Description of Artificial Sequence: Synthetic oligonucleotide
  source 1..27: mol_type = other DNA
caacagtataatagttacccattcact

SEQ ID NO: 16932 - protein, 9 aa, synthetic construct
  REGION 1..9: note = Description of Artificial Sequence: Synthetic peptide
QQYNSYPFT

SEQ ID NO: 16933 - DNA, 27 bp, synthetic construct
  misc_feature 1..27: note = Description of Artificial Sequence: Synthetic oligonucleotide
  source 1..27: mol_type = other DNA
ctacagctttatagttaccctcggacg

SEQ ID NO: 16934 - protein, 9 aa, synthetic construct
  REGION 1..9: note = Description of Artificial Sequence: Synthetic peptide
LQLYSYPRT

SEQ ID NO: 16935 - DNA, 27 bp, synthetic construct
  misc_feature 1..27: note = Description of Artificial Sequence: Synthetic oligonucleotide
  source 1..27: mol_type = other DNA
ctacagcataatagttacccgctcact

SEQ ID NO: 16936 - protein, 9 aa, synthetic construct
  REGION 1..9: note = Description of Artificial Sequence: Synthetic peptide
LQHNSYPLT

SEQ ID NO: 16937 - DNA, 27 bp, synthetic construct
  misc_feature 1..27: note = Description of Artificial Sequence: Synthetic oligonucleotide
  source 1..27: mol_type = other DNA
ctacagcataatagttacccgctcact

SEQ ID NO: 16938 - protein, 9 aa, synthetic construct
  REGION 1..9: note = Description of Artificial Sequence: Synthetic peptide
LQHNSYPLT

SEQ ID NO: 16939 - DNA, 27 bp, synthetic construct
  misc_feature 1..27: note = Description of Artificial Sequence: Synthetic oligonucleotide
  source 1..27: mol_type = other DNA
ctacaacattatagtttccctcggacg

SEQ ID NO: 16940 - protein, 9 aa, synthetic construct
  REGION 1..9: note = Description of Artificial Sequence: Synthetic peptide
LQHYSFPRT

SEQ ID NO: 16941 - DNA, 30 bp, synthetic construct; identical to SEQ ID NO: 16257
  misc_feature 1..30: note = Description of Artificial Sequence: Synthetic oligonucleotide
  source 1..30: mol_type = other DNA

SEQ ID NO: 16942 - protein, 10 aa, synthetic construct
  REGION 1..10: note = Description of Artificial Sequence: Synthetic peptide
QQSYRTPFFT

SEQ ID NO: 16943 - DNA, 27 bp, synthetic construct
  misc_feature 1..27: note = Description of Artificial Sequence: Synthetic oligonucleotide
  source 1..27: mol_type = other DNA
ctacaggataatagttatccgttcact

SEQ ID NO: 16944 - protein, 9 aa, synthetic construct
  REGION 1..9: note = Description of Artificial Sequence: Synthetic peptide
LQDNSYPFT

SEQ ID NO: 16945 - DNA, 27 bp, synthetic construct
  misc_feature 1..27: note = Description of Artificial Sequence: Synthetic oligonucleotide
  source 1..27: mol_type = other DNA
ctacagcataatagttacgcgctcact

SEQ ID NO: 16946 - protein, 9 aa, synthetic construct
  REGION 1..9: note = Description of Artificial Sequence: Synthetic peptide
LQHNSYALT

SEQ ID NO: 16947 - DNA, 27 bp, synthetic construct
  misc_feature 1..27: note = Description of Artificial Sequence: Synthetic oligonucleotide
  source 1..27: mol_type = other DNA
ctacatcaatatagttaccctcggacg

SEQ ID NO: 16948 - protein, 9 aa, synthetic construct
  REGION 1..9: note = Description of Artificial Sequence: Synthetic peptide
LHQYSYPRT

SEQ ID NO: 16949 - DNA, 27 bp, synthetic construct
  misc_feature 1..27: note = Description of Artificial Sequence: Synthetic oligonucleotide
  source 1..27: mol_type = other DNA
caacagtataatagttaccctctcact

SEQ ID NO: 16950 - protein, 9 aa, synthetic construct
  REGION 1..9: note = Description of Artificial Sequence: Synthetic peptide
QQYNSYPLT

SEQ ID NO: 16951 - DNA, 27 bp, synthetic construct
  misc_feature 1..27: note = Description of Artificial Sequence: Synthetic oligonucleotide
  source 1..27: mol_type = other DNA
ctacagcatagtaattaccctctcact

SEQ ID NO: 16952 - protein, 9 aa, synthetic construct
  REGION 1..9: note = Description of Artificial Sequence: Synthetic peptide
LQHSNYPLT

SEQ ID NO: 16953 - DNA, 27 bp, synthetic construct
  misc_feature 1..27: note = Description of Artificial Sequence: Synthetic oligonucleotide
  source 1..27: mol_type = other DNA
caacagtataatagttacccattcact

SEQ ID NO: 16954 - protein, 9 aa, synthetic construct
  REGION 1..9: note = Description of Artificial Sequence: Synthetic peptide
QQYNSYPFT

SEQ ID NO: 16955 - DNA, 27 bp, synthetic construct
  misc_feature 1..27: note = Description of Artificial Sequence: Synthetic oligonucleotide
  source 1..27: mol_type = other DNA
ctacagcataatagttatccgctcact

SEQ ID NO: 16956 - protein, 9 aa, synthetic construct
  REGION 1..9: note = Description of Artificial Sequence: Synthetic peptide
LQHNSYPLT

SEQ ID NO: 16957 - DNA, 27 bp, synthetic construct
  misc_feature 1..27: note = Description of Artificial Sequence: Synthetic oligonucleotide
  source 1..27: mol_type = other DNA
ctactgcattatagttaccctcggacg

SEQ ID NO: 16958 - protein, 9 aa, synthetic construct
  REGION 1..9: note = Description of Artificial Sequence: Synthetic peptide
LLHYSYPRT

SEQ ID NO: 16959 - DNA, 27 bp, synthetic construct
  misc_feature 1..27: note = Description of Artificial Sequence: Synthetic oligonucleotide
  source 1..27: mol_type = other DNA
ctacaacataatagttacccgtggacg

SEQ ID NO: 16960 - protein, 9 aa, synthetic construct
  REGION 1..9: note = Description of Artificial Sequence: Synthetic peptide
LQHNSYPWT

SEQ ID NO: 16961 - DNA, 27 bp, synthetic construct
  misc_feature 1..27: note = Description of Artificial Sequence: Synthetic oligonucleotide
  source 1..27: mol_type = other DNA
caacagtatgataatctcccgatcacc

SEQ ID NO: 16962 - protein, 9 aa, synthetic construct
  REGION 1..9: note = Description of Artificial Sequence: Synthetic peptide
QQYDNLPIT

SEQ ID NO: 16963 - DNA, 27 bp, synthetic construct
  misc_feature 1..27: note = Description of Artificial Sequence: Synthetic oligonucleotide
  source 1..27: mol_type = other DNA
ctacagcatagtaattaccctctcact

SEQ ID NO: 16964 - protein, 9 aa, synthetic construct
  REGION 1..9: note = Description of Artificial Sequence: Synthetic peptide
LQHSNYPLT

SEQ ID NO: 16965 - DNA, 27 bp, synthetic construct
  misc_feature 1..27: note = Description of Artificial Sequence: Synthetic oligonucleotide
  source 1..27: mol_type = other DNA
caacagtatgaaaatctcccgatcact

SEQ ID NO: 16966 - protein, 9 aa, synthetic construct
  REGION 1..9: note = Description of Artificial Sequence: Synthetic peptide
QQYENLPIT

SEQ ID NO: 16967 - DNA, 27 bp, synthetic construct
  misc_feature 1..27: note = Description of Artificial Sequence: Synthetic oligonucleotide
  source 1..27: mol_type = other DNA
caacagtatgataatctcccgatcacc

SEQ ID NO: 16968 - protein, 9 aa, synthetic construct
  REGION 1..9: note = Description of Artificial Sequence: Synthetic peptide
QQYDNLPIT

SEQ ID NO: 16969 - DNA, 27 bp, synthetic construct
  misc_feature 1..27: note = Description of Artificial Sequence: Synthetic oligonucleotide
  source 1..27: mol_type = other DNA
ctacagcataatagttacccgctcact

SEQ ID NO: 16970 - protein, 9 aa, synthetic construct
  REGION 1..9: note = Description of Artificial Sequence: Synthetic peptide
LQHNSYPLT

SEQ ID NO: 16971 - DNA, 27 bp, synthetic construct
  misc_feature 1..27: note = Description of Artificial Sequence: Synthetic oligonucleotide
  source 1..27: mol_type = other DNA
caaaagtatgacagtgccccattcact

SEQ ID NO: 16972 - protein, 9 aa, synthetic construct
  REGION 1..9: note = Description of Artificial Sequence: Synthetic peptide
QKYDSAPFT

SEQ ID NO: 16973 - DNA, 27 bp, synthetic construct
  misc_feature 1..27: note = Description of Artificial Sequence: Synthetic oligonucleotide
  source 1..27: mol_type = other DNA
caacagacttacagtaccccgctcact

SEQ ID NO: 16974 - protein, 9 aa, synthetic construct
  REGION 1..9: note = Description of Artificial Sequence: Synthetic peptide
QQTYSTPLT

SEQ ID NO: 16975 - DNA, 30 bp, synthetic construct; identical to SEQ ID NO: 16257
  misc_feature 1..30: note = Description of Artificial Sequence: Synthetic oligonucleotide
  source 1..30: mol_type = other DNA

SEQ ID NO: 16976 - protein, 10 aa, synthetic construct
  REGION 1..10: note = Description of Artificial Sequence: Synthetic peptide
QQSYRTPFFT

SEQ ID NO: 16977 - DNA, 27 bp, synthetic construct
  misc_feature 1..27: note = Description of Artificial Sequence: Synthetic oligonucleotide
  source 1..27: mol_type = other DNA
caacagacttacagtcttccgctcact

SEQ ID NO: 16978 - protein, 9 aa, synthetic construct
  REGION 1..9: note = Description of Artificial Sequence: Synthetic peptide
QQTYSLPLT

SEQ ID NO: 16979 - DNA, 27 bp, synthetic construct
  misc_feature 1..27: note = Description of Artificial Sequence: Synthetic oligonucleotide
  source 1..27: mol_type = other DNA
caacagtatcatagttacccattcact

SEQ ID NO: 16980 - protein, 9 aa, synthetic construct
  REGION 1..9: note = Description of Artificial Sequence: Synthetic peptide
QQYHSYPFT

SEQ ID NO: 16981 - DNA, 27 bp, synthetic construct
  misc_feature 1..27: note = Description of Artificial Sequence: Synthetic oligonucleotide
  source 1..27: mol_type = other DNA
ctacagcataatagttacccgctcact

SEQ ID NO: 16982 - protein, 9 aa, synthetic construct
  REGION 1..9: note = Description of Artificial Sequence: Synthetic peptide
LQHNSYPLT

SEQ ID NO: 16983 - DNA, 30 bp, synthetic construct; identical to SEQ ID NO: 16293
  misc_feature 1..30: note = Description of Artificial Sequence: Synthetic oligonucleotide
  source 1..30: mol_type = other DNA

SEQ ID NO: 16984 - protein, 10 aa, synthetic construct
  REGION 1..10: note = Description of Artificial Sequence: Synthetic peptide
QQSYRTPLFT

SEQ ID NO: 16985 - DNA, 27 bp, synthetic construct
  misc_feature 1..27: note = Description of Artificial Sequence: Synthetic oligonucleotide
  source 1..27: mol_type = other DNA
ctacagcataatagttacccgctcact

SEQ ID NO: 16986 - protein, 9 aa, synthetic construct
  REGION 1..9: note = Description of Artificial Sequence: Synthetic peptide
LQHNSYPLT

SEQ ID NO: 16987 - DNA, 27 bp, synthetic construct
  misc_feature 1..27: note = Description of Artificial Sequence: Synthetic oligonucleotide
  source 1..27: mol_type = other DNA
caacagtataatagttacccattcact

SEQ ID NO: 16988 - protein, 9 aa, synthetic construct
  REGION 1..9: note = Description of Artificial Sequence: Synthetic peptide
QQYNSYPFT

SEQ ID NO: 16989 - DNA, 27 bp, synthetic construct
  misc_feature 1..27: note = Description of Artificial Sequence: Synthetic oligonucleotide
  source 1..27: mol_type = other DNA
caacagtatgaaaatctcccgatcacc

SEQ ID NO: 16990 - protein, 9 aa, synthetic construct
  REGION 1..9: note = Description of Artificial Sequence: Synthetic peptide
QQYENLPIT

SEQ ID NO: 16991 - DNA, 27 bp, synthetic construct
  misc_feature 1..27: note = Description of Artificial Sequence: Synthetic oligonucleotide
  source 1..27: mol_type = other DNA
ctacagtataatggttacccattcact

SEQ ID NO: 16992 - protein, 9 aa, synthetic construct
  REGION 1..9: note = Description of Artificial Sequence: Synthetic peptide
LQYNGYPFT

SEQ ID NO: 16993 - DNA, 27 bp, synthetic construct
  misc_feature 1..27: note = Description of Artificial Sequence: Synthetic oligonucleotide
  source 1..27: mol_type = other DNA
caacaatatgataatctcccgctcact

SEQ ID NO: 16994 - protein, 9 aa, synthetic construct
  REGION 1..9: note = Description of Artificial Sequence: Synthetic peptide
QQYDNLPLT

SEQ ID NO: 16995 - DNA, 27 bp, synthetic construct
  misc_feature 1..27: note = Description of Artificial Sequence: Synthetic oligonucleotide
  source 1..27: mol_type = other DNA
ctacagcataatagttacccgctcact

SEQ ID NO: 16996 - protein, 9 aa, synthetic construct
  REGION 1..9: note = Description of Artificial Sequence: Synthetic peptide
LQHNSYPLT

SEQ ID NO: 16997 - DNA, 27 bp, synthetic construct
  misc_feature 1..27: note = Description of Artificial Sequence: Synthetic oligonucleotide
  source 1..27: mol_type = other DNA
ctacagcattatagttaccctcggacg

SEQ ID NO: 16998 - protein, 9 aa, synthetic construct
  REGION 1..9: note = Description of Artificial Sequence: Synthetic peptide
LQHYSYPRT

SEQ ID NO: 16999 - DNA, 30 bp, synthetic construct; identical to SEQ ID NO: 16483
  misc_feature 1..30: note = Description of Artificial Sequence: Synthetic oligonucleotide
  source 1..30: mol_type = other DNA

SEQ ID NO: 17000 - protein, 10 aa, synthetic construct
  REGION 1..10: note = Description of Artificial Sequence: Synthetic peptide
QQSYSTPLFT

SEQ ID NO: 17001 - DNA, 27 bp, synthetic construct
  misc_feature 1..27: note = Description of Artificial Sequence: Synthetic oligonucleotide
  source 1..27: mol_type = other DNA
ctacagcataatagttacccgctcact

SEQ ID NO: 17002 - protein, 9 aa, synthetic construct
  REGION 1..9: note = Description of Artificial Sequence: Synthetic peptide
LQHNSYPLT

SEQ ID NO: 17003 - DNA, 27 bp, synthetic construct
  misc_feature 1..27: note = Description of Artificial Sequence: Synthetic oligonucleotide
  source 1..27: mol_type = other DNA
caacagtatgataatctcccgatcacc

SEQ ID NO: 17004 - protein, 9 aa, synthetic construct
  REGION 1..9: note = Description of Artificial Sequence: Synthetic peptide
QQYDNLPIT

SEQ ID NO: 17005 - DNA, 27 bp, synthetic construct
  misc_feature 1..27: note = Description of Artificial Sequence: Synthetic oligonucleotide
  source 1..27: mol_type = other DNA
ctacagcataatagttaccctctcact

SEQ ID NO: 17006 - protein, 9 aa, synthetic construct
  REGION 1..9: note = Description of Artificial Sequence: Synthetic peptide
LQHNSYPLT

SEQ ID NO: 17007 - DNA, 30 bp, synthetic construct
  misc_feature 1..30: note = Description of Artificial Sequence: Synthetic oligonucleotide
  source 1..30: mol_type = other DNA
caacagagttacagtacccccttattcagt

SEQ ID NO: 17008 - protein, 10 aa, synthetic construct
  REGION 1..10: note = Description of Artificial Sequence: Synthetic peptide
QQSYSTPLFS

SEQ ID NO: 17009 - DNA, 27 bp, synthetic construct
  misc_feature 1..27: note = Description of Artificial Sequence: Synthetic oligonucleotide
  source 1..27: mol_type = other DNA
ctacagcatagtagttaccctctcact

SEQ ID NO: 17010 - protein, 9 aa, synthetic construct
  REGION 1..9: note = Description of Artificial Sequence: Synthetic peptide
LQHSSYPLT

SEQ ID NO: 17011 - DNA, 27 bp, synthetic construct
  misc_feature 1..27: note = Description of Artificial Sequence: Synthetic oligonucleotide
  source 1..27: mol_type = other DNA
caacagtatgatagttacccattcact

SEQ ID NO: 17012 - protein, 9 aa, synthetic construct
  REGION 1..9: note = Description of Artificial Sequence: Synthetic peptide
QQYDSYPFT

SEQ ID NO: 17013 - DNA, 27 bp, synthetic construct
  misc_feature 1..27: note = Description of Artificial Sequence: Synthetic oligonucleotide
  source 1..27: mol_type = other DNA
ctacagcatagtagttacccgctcact

SEQ ID NO: 17014 - protein, 9 aa, synthetic construct
  REGION 1..9: note = Description of Artificial Sequence: Synthetic peptide
LQHSSYPLT

SEQ ID NO: 17015 - DNA, 27 bp, synthetic construct
  misc_feature 1..27: note = Description of Artificial Sequence: Synthetic oligonucleotide
  source 1..27: mol_type = other DNA
ctacagcataatagttacccgctcact

SEQ ID NO: 17016 - protein, 9 aa, synthetic construct
  REGION 1..9: note = Description of Artificial Sequence: Synthetic peptide
LQHNSYPLT

SEQ ID NO: 17017 - DNA, 27 bp, synthetic construct
  misc_feature 1..27: note = Description of Artificial Sequence: Synthetic oligonucleotide
  source 1..27: mol_type = other DNA
atgcaagctctacaaactcctatcacc

SEQ ID NO: 17018 - protein, 9 aa, synthetic construct
  REGION 1..9: note = Description of Artificial Sequence: Synthetic peptide
MQALQTPIT

SEQ ID NO: 17019 - DNA, 27 bp, synthetic construct
  misc_feature 1..27: note = Description of Artificial Sequence: Synthetic oligonucleotide
  source 1..27: mol_type = other DNA
ctacaccatagtaattaccctctcact

SEQ ID NO: 17020 - protein, 9 aa, synthetic construct
  REGION 1..9: note = Description of Artificial Sequence: Synthetic peptide
LHHSNYPLT

SEQ ID NO: 17021 - DNA, 27 bp, synthetic construct
  misc_feature 1..27: note = Description of Artificial Sequence: Synthetic oligonucleotide
  source 1..27: mol_type = other DNA
cagcaatattttagtactccattcact

SEQ ID NO: 17022 - protein, 9 aa, synthetic construct
  REGION 1..9: note = Description of Artificial Sequence: Synthetic peptide
QQYFSTPFT

SEQ ID NO: 17023 - DNA, 27 bp, synthetic construct
  misc_feature 1..27: note = Description of Artificial Sequence: Synthetic oligonucleotide
  source 1..27: mol_type = other DNA
ctacagcataatagttatccgtggacg

SEQ ID NO: 17024 - protein, 9 aa, synthetic construct
  REGION 1..9: note = Description of Artificial Sequence: Synthetic peptide
LQHNSYPWT

SEQ ID NO: 17025 - DNA, 27 bp, synthetic construct
  misc_feature 1..27: note = Description of Artificial Sequence: Synthetic oligonucleotide
  source 1..27: mol_type = other DNA
ctacagtatcatagttacccattcact

SEQ ID NO: 17026 - protein, 9 aa, synthetic construct
  REGION 1..9: note = Description of Artificial Sequence: Synthetic peptide
LQYHSYPFT

SEQ ID NO: 17027 - DNA, 27 bp, synthetic construct
  misc_feature 1..27: note = Description of Artificial Sequence: Synthetic oligonucleotide
  source 1..27: mol_type = other DNA
atgcaagctctacaaactcctctcacc

SEQ ID NO: 17028 - protein, 9 aa, synthetic construct
  REGION 1..9: note = Description of Artificial Sequence: Synthetic peptide
MQALQTPLT

SEQ ID NO: 17029 - DNA, 27 bp, synthetic construct
  misc_feature 1..27: note = Description of Artificial Sequence: Synthetic oligonucleotide
  source 1..27: mol_type = other DNA
ctacaacatactagttacccgctcact

SEQ ID NO: 17030 - protein, 9 aa, synthetic construct
  REGION 1..9: note = Description of Artificial Sequence: Synthetic peptide
LQHTSYPLT

SEQ ID NO: 17031 - DNA, 27 bp, synthetic construct
  misc_feature 1..27: note = Description of Artificial Sequence: Synthetic oligonucleotide
  source 1..27: mol_type = other DNA
ctacagcatagtagttacccgctcact

SEQ ID NO: 17032 - protein, 9 aa, synthetic construct
  REGION 1..9: note = Description of Artificial Sequence: Synthetic peptide
LQHSSYPLT

SEQ ID NO: 17033 - DNA, 30 bp, synthetic construct; identical to SEQ ID NO: 16257
  misc_feature 1..30: note = Description of Artificial Sequence: Synthetic oligonucleotide
  source 1..30: mol_type = other DNA

SEQ ID NO: 17034 - protein, 10 aa, synthetic construct
  REGION 1..10: note = Description of Artificial Sequence: Synthetic peptide
QQSYRTPFFT

SEQ ID NO: 17035 - DNA, 27 bp, synthetic construct
  misc_feature 1..27: note = Description of Artificial Sequence: Synthetic oligonucleotide
  source 1..27: mol_type = other DNA
ctacagcataatagttacccgctcact

SEQ ID NO: 17036 - protein, 9 aa, synthetic construct
  REGION 1..9: note = Description of Artificial Sequence: Synthetic peptide
LQHNSYPLT

SEQ ID NO: 17037 - DNA, 27 bp, synthetic construct
  misc_feature 1..27: note = Description of Artificial Sequence: Synthetic oligonucleotide
  source 1..27: mol_type = other DNA
caacagtttgataatctcccgatcacc

SEQ ID NO: 17038 - protein, 9 aa, synthetic construct
  REGION 1..9: note = Description of Artificial Sequence: Synthetic peptide
QQFDNLPIT

SEQ ID NO: 17039 - DNA, 27 bp, synthetic construct
  misc_feature 1..27: note = Description of Artificial Sequence: Synthetic oligonucleotide
  source 1..27: mol_type = other DNA
cagcagacttacagtaccccgctcact

SEQ ID NO: 17040 - protein, 9 aa, synthetic construct
  REGION 1..9: note = Description of Artificial Sequence: Synthetic peptide
QQTYSTPLT

SEQ ID NO: 17041 - DNA, 27 bp, synthetic construct
  misc_feature 1..27: note = Description of Artificial Sequence: Synthetic oligonucleotide
  source 1..27: mol_type = other DNA
cagcaatattatactactccgtgcagt

SEQ ID NO: 17042 - protein, 9 aa, synthetic construct
  REGION 1..9: note = Description of Artificial Sequence: Synthetic peptide
QQYYTTPCS

SEQ ID NO: 17043 - DNA, 30 bp, synthetic construct; identical to SEQ ID NO: 16313
  misc_feature 1..30: note = Description of Artificial Sequence: Synthetic oligonucleotide
  source 1..30: mol_type = other DNA

SEQ ID NO: 17044 - protein, 10 aa, synthetic construct
  REGION 1..10: note = Description of Artificial Sequence: Synthetic peptide
QQSYNTPLFT

SEQ ID NO: 17045 - DNA, 27 bp, synthetic construct
  misc_feature 1..27: note = Description of Artificial Sequence: Synthetic oligonucleotide
  source 1..27: mol_type = other DNA
ctacagcataatagttacccgtggacg

SEQ ID NO: 17046 - protein, 9 aa, synthetic construct
  REGION 1..9: note = Description of Artificial Sequence: Synthetic peptide
LQHNSYPWT

SEQ ID NO: 17047 - DNA, 27 bp, synthetic construct
  misc_feature 1..27: note = Description of Artificial Sequence: Synthetic oligonucleotide
  source 1..27: mol_type = other DNA
ctacagcataatagttacccgctcact

SEQ ID NO: 17048 - protein, 9 aa, synthetic construct
  REGION 1..9: note = Description of Artificial Sequence: Synthetic peptide
LQHNSYPLT

SEQ ID NO: 17049 - DNA, 27 bp, synthetic construct
  misc_feature 1..27: note = Description of Artificial Sequence: Synthetic oligonucleotide
  source 1..27: mol_type = other DNA
ctacagcataatagttacccgtggacg

SEQ ID NO: 17050 - protein, 9 aa, synthetic construct
  REGION 1..9: note = Description of Artificial Sequence: Synthetic peptide
LQHNSYPWT

SEQ ID NO: 17051 - DNA, 27 bp, synthetic construct
  misc_feature 1..27: note = Description of Artificial Sequence: Synthetic oligonucleotide
  source 1..27: mol_type = other DNA
ctacagcataatagttacccgtggacg

SEQ ID NO: 17052 - protein, 9 aa, synthetic construct
  REGION 1..9: note = Description of Artificial Sequence: Synthetic peptide
LQHNSYPWT

SEQ ID NO: 17053 - DNA, 27 bp, synthetic construct
  misc_feature 1..27: note = Description of Artificial Sequence: Synthetic oligonucleotide
  source 1..27: mol_type = other DNA
ctacaacataatagttacccgtggacg

SEQ ID NO: 17054 - protein, 9 aa, synthetic construct
  REGION 1..9: note = Description of Artificial Sequence: Synthetic peptide
LQHNSYPWT

SEQ ID NO: 17055 - DNA, 27 bp, synthetic construct
  misc_feature 1..27: note = Description of Artificial Sequence: Synthetic oligonucleotide
  source 1..27: mol_type = other DNA
caggcgtggaacaacagcactgtggta

SEQ ID NO: 17056 - protein, 9 aa, synthetic construct
  REGION 1..9: note = Description of Artificial Sequence: Synthetic peptide
QAWNNSTVV

SEQ ID NO: 17057 - DNA, 27 bp, synthetic construct
  misc_feature 1..27: note = Description of Artificial Sequence: Synthetic oligonucleotide
  source 1..27: mol_type = other DNA
caggcgtgggacagcagcactgtggtt

SEQ ID NO: 17058 - protein, 9 aa, synthetic construct
  REGION 1..9: note = Description of Artificial Sequence: Synthetic peptide
QAWDSSTVV

SEQ ID NO: 17059 - DNA, 30 bp, synthetic construct
  misc_feature 1..30: note = Description of Artificial Sequence: Synthetic oligonucleotide
  source 1..30: mol_type = other DNA
caacagggttacaatacccccacgtggacg

SEQ ID NO: 17060 - protein, 10 aa, synthetic construct
  REGION 1..10: note = Description of Artificial Sequence: Synthetic peptide
QQGYNTPTWT

SEQ ID NO: 17061 - DNA, 33 bp, synthetic construct; identical to SEQ ID NO: 16903
  misc_feature 1..33: note = Description of Artificial Sequence: Synthetic oligonucleotide
  source 1..33: mol_type = other DNA

SEQ ID NO: 17062 - protein, 11 aa, synthetic construct
  REGION 1..11: note = Description of Artificial Sequence: Synthetic peptide
QQTYNTPPERS

SEQ ID NO: 17063 - DNA, 30 bp, synthetic construct
  misc_feature 1..30: note = Description of Artificial Sequence: Synthetic oligonucleotide
  source 1..30: mol_type = other DNA
caaaagtataacagtgcccctccgctcacc

SEQ ID NO: 17064 - protein, 10 aa, synthetic construct
  REGION 1..10: note = Description of Artificial Sequence: Synthetic peptide
QKYNSAPPLT

SEQ ID NO: 17065 - DNA, 27 bp, synthetic construct
  misc_feature 1..27: note = Description of Artificial Sequence: Synthetic oligonucleotide
  source 1..27: mol_type = other DNA
caacagagtaactttttcccgctcact

SEQ ID NO: 17066 - protein, 9 aa, synthetic construct
  REGION 1..9: note = Description of Artificial Sequence: Synthetic peptide
QQSNFFPLT

SEQ ID NO: 17067 - DNA, 27 bp, synthetic construct
  misc_feature 1..27: note = Description of Artificial Sequence: Synthetic oligonucleotide
  source 1..27: mol_type = other DNA
caacagtatcatagttacccattcact

SEQ ID NO: 17068 - protein, 9 aa, synthetic construct
  REGION 1..9: note = Description of Artificial Sequence: Synthetic peptide
QQYHSYPFT

SEQ ID NO: 17069 - DNA, 30 bp, synthetic construct
  misc_feature 1..30: note = Description of Artificial Sequence: Synthetic oligonucleotide
  source 1..30: mol_type = other DNA
ctacatcataataattacctccccatcacc

SEQ ID NO: 17070 - protein, 10 aa, synthetic construct
  REGION 1..10: note = Description of Artificial Sequence: Synthetic peptide
LHHNNYLPIT

SEQ ID NO: 17071 - DNA, 27 bp, synthetic construct
  misc_feature 1..27: note = Description of Artificial Sequence: Synthetic oligonucleotide
  source 1..27: mol_type = other DNA
caacagagttacaacttcccgctcact

SEQ ID NO: 17072 - protein, 9 aa, synthetic construct
  REGION 1..9: note = Description of Artificial Sequence: Synthetic peptide
QQSYNFPLT

SEQ ID NO: 17073 - DNA, 27 bp, synthetic construct
  misc_feature 1..27: note = Description of Artificial Sequence: Synthetic oligonucleotide
  source 1..27: mol_type = other DNA
caggcgtgggacaacaacactgtggta

SEQ ID NO: 17074 - protein, 9 aa, synthetic construct
  REGION 1..9: note = Description of Artificial Sequence: Synthetic peptide
QAWDNNTVV

SEQ ID NO: 17075 - DNA, 27 bp, synthetic construct
  misc_feature 1..27: note = Description of Artificial Sequence: Synthetic oligonucleotide
  source 1..27: mol_type = other DNA
caggcgtgggacaacagcactgtggta

SEQ ID NO: 17076 - protein, 9 aa, synthetic construct
  REGION 1..9: note = Description of Artificial Sequence: Synthetic peptide
QAWDNSTVV

SEQ ID NO: 17077 - DNA, 27 bp, synthetic construct
  misc_feature 1..27: note = Description of Artificial Sequence: Synthetic oligonucleotide
  source 1..27: mol_type = other DNA
caacagtataatagtttcccattcact

SEQ ID NO: 17078 - protein, 9 aa, synthetic construct
  REGION 1..9: note = Description of Artificial Sequence: Synthetic peptide
QQYNSFPFT

SEQ ID NO: 17079 - DNA, 30 bp, synthetic construct
  misc_feature 1..30: note = Description of Artificial Sequence: Synthetic oligonucleotide
  source 1..30: mol_type = other DNA
agctcatatacaaggagcagcactgtggta

SEQ ID NO: 17080 - protein, 10 aa, synthetic construct
  REGION 1..10: note = Description of Artificial Sequence: Synthetic peptide
SSYTRSSTVV

SEQ ID NO: 17081 - DNA, 27 bp, synthetic construct
  misc_feature 1..27: note = Description of Artificial Sequence: Synthetic oligonucleotide
  source 1..27: mol_type = other DNA
cagcaatattatagtactccgtgcagt

SEQ ID NO: 17082 - protein, 9 aa, synthetic construct
  REGION 1..9: note = Description of Artificial Sequence: Synthetic peptide
QQYYSTPCS

SEQ ID NO: 17083 - DNA, 27 bp, synthetic construct
  misc_feature 1..27: note = Description of Artificial Sequence: Synthetic oligonucleotide
  source 1..27: mol_type = other DNA
caggcgtgggacagcagcactgcggta

SEQ ID NO: 17084 - protein, 9 aa, synthetic construct
  REGION 1..9: note = Description of Artificial Sequence: Synthetic peptide
QAWDSSTAV

SEQ ID NO: 17085 - DNA, 27 bp, synthetic construct
  misc_feature 1..27: note = Description of Artificial Sequence: Synthetic oligonucleotide
  source 1..27: mol_type = other DNA
caacagtataatagttacccattcact

SEQ ID NO: 17086 - protein, 9 aa, synthetic construct
  REGION 1..9: note = Description of Artificial Sequence: Synthetic peptide
QQYNSYPFT

SEQ ID NO: 17087 - DNA, 27 bp, synthetic construct
  misc_feature 1..27: note = Description of Artificial Sequence: Synthetic oligonucleotide
  source 1..27: mol_type = other DNA
caacaggctaacagtttcccattcact

SEQ ID NO: 17088 - protein, 9 aa, synthetic construct
  REGION 1..9: note = Description of Artificial Sequence: Synthetic peptide
QQANSFPFT

SEQ ID NO: 17089 - DNA, 27 bp, synthetic construct
  misc_feature 1..27: note = Description of Artificial Sequence: Synthetic oligonucleotide
  source 1..27: mol_type = other DNA
caggcgtggaacagcagcaatgtggta

SEQ ID NO: 17090 - protein, 9 aa, synthetic construct
  REGION 1..9: note = Description of Artificial Sequence: Synthetic peptide
QAWNSSNVV

SEQ ID NO: 17091 - DNA, 27 bp, synthetic construct
  misc_feature 1..27: note = Description of Artificial Sequence: Synthetic oligonucleotide
  source 1..27: mol_type = other DNA
cagcaatattctagtactccgtggacg

SEQ ID NO: 17092 - protein, 9 aa, synthetic construct
  REGION 1..9: note = Description of Artificial Sequence: Synthetic peptide
QQYSSTPWT

SEQ ID NO: 17093 - DNA, 30 bp, synthetic construct
  misc_feature 1..30: note = Description of Artificial Sequence: Synthetic oligonucleotide
  source 1..30: mol_type = other DNA
atgcaaggtgcacactggcctccgatcacc

SEQ ID NO: 17094 - protein, 10 aa, synthetic construct
  REGION 1..10: note = Description of Artificial Sequence: Synthetic peptide
MQGAHWPPIT

SEQ ID NO: 17095 - DNA, 27 bp, synthetic construct
  misc_feature 1..27: note = Description of Artificial Sequence: Synthetic oligonucleotide
  source 1..27: mol_type = other DNA
cagcaatattatagtactccgtgcagt

SEQ ID NO: 17096 - protein, 9 aa, synthetic construct
  REGION 1..9: note = Description of Artificial Sequence: Synthetic peptide
QQYYSTPCS

SEQ ID NO: 17097 - DNA, 27 bp, synthetic construct
  misc_feature 1..27: note = Description of Artificial Sequence: Synthetic oligonucleotide
  source 1..27: mol_type = other DNA
cagcaatattacagtactccgtgcagt

SEQ ID NO: 17098 - protein, 9 aa, synthetic construct
  REGION 1..9: note = Description of Artificial Sequence: Synthetic peptide
QQYYSTPCS

SEQ ID NO: 17099 - DNA, 27 bp, synthetic construct
  misc_feature 1..27: note = Description of Artificial Sequence: Synthetic oligonucleotide
  source 1..27: mol_type = other DNA
cagcaatattatagtagtccgtgcagt

SEQ ID NO: 17100 - protein, 9 aa, synthetic construct
  REGION 1..9: note = Description of Artificial Sequence: Synthetic peptide
QQYYSSPCS

SEQ ID NO: 17101 - DNA, 27 bp, synthetic construct
  misc_feature 1..27: note = Description of Artificial Sequence: Synthetic oligonucleotide
  source 1..27: mol_type = other DNA
caacaggctaacagtttcccattcact

SEQ ID NO: 17102 - protein, 9 aa, synthetic construct
  REGION 1..9: note = Description of Artificial Sequence: Synthetic peptide
QQANSFPFT

SEQ ID NO: 17103 - DNA, 27 bp, synthetic construct
  misc_feature 1..27: note = Description of Artificial Sequence: Synthetic oligonucleotide
  source 1..27: mol_type = other DNA
caacaatattatacttctccgtgcagt

SEQ ID NO: 17104 - protein, 9 aa, synthetic construct
  REGION 1..9: note = Description of Artificial Sequence: Synthetic peptide
QQYYTSPCS

SEQ ID NO: 17105 - DNA, 27 bp, synthetic construct
  misc_feature 1..27: note = Description of Artificial Sequence: Synthetic oligonucleotide
  source 1..27: mol_type = other DNA
cagcaatattatagttctccgtgcagt

SEQ ID NO: 17106 - protein, 9 aa, synthetic construct
  REGION 1..9: note = Description of Artificial Sequence: Synthetic peptide
QQYYSSPCS

SEQ ID NO: 17107 - DNA, 27 bp, synthetic construct
  misc_feature 1..27: note = Description of Artificial Sequence: Synthetic oligonucleotide
  source 1..27: mol_type = other DNA
caacagtataatagttatccattcact

SEQ ID NO: 17108 - protein, 9 aa, synthetic construct
  REGION 1..9: note = Description of Artificial Sequence: Synthetic peptide
QQYNSYPFT

SEQ ID NO: 17109 - DNA, 27 bp, synthetic construct
  misc_feature 1..27: note = Description of Artificial Sequence: Synthetic oligonucleotide
  source 1..27: mol_type = other DNA
ctacagcatactatttcccctcctact

SEQ ID NO: 17110 - protein, 9 aa, synthetic construct
  REGION 1..9: note = Description of Artificial Sequence: Synthetic peptide
LQHTISPPT

SEQ ID NO: 17111 - DNA, 24 bp, synthetic construct
  misc_feature 1..24: note = Description of Artificial Sequence: Synthetic oligonucleotide
  source 1..24: mol_type = other DNA
atgcaaggtatacactggctcact

SEQ ID NO: 17112 - protein, 8 aa, synthetic construct
  REGION 1..8: note = Description of Artificial Sequence: Synthetic peptide
MQGIHWLT

SEQ ID NO: 17113 - DNA, 27 bp, synthetic construct
  misc_feature 1..27: note = Description of Artificial Sequence: Synthetic oligonucleotide
  source 1..27: mol_type = other DNA
caacagtatcatagttacccgctcacc

SEQ ID NO: 17114 - protein, 9 aa, synthetic construct
  REGION 1..9: note = Description of Artificial Sequence: Synthetic peptide
QQYHSYPLT

SEQ ID NO: 17115 - DNA, 27 bp, synthetic construct
  misc_feature 1..27: note = Description of Artificial Sequence: Synthetic oligonucleotide
  source 1..27: mol_type = other DNA
ctacagcatactatttaccctcctact

SEQ ID NO: 17116 - protein, 9 aa, synthetic construct
  REGION 1..9: note = Description of Artificial Sequence: Synthetic peptide
LQHTIYPPT

SEQ ID NO: 17117 - DNA, 27 bp, synthetic construct
  misc_feature 1..27: note = Description of Artificial Sequence: Synthetic oligonucleotide
  source 1..27: mol_type = other DNA
caacagagttacagtatcccgatcacc

SEQ ID NO: 17118 - protein, 9 aa, synthetic construct
  REGION 1..9: note = Description of Artificial Sequence: Synthetic peptide
QQSYSIPIT

SEQ ID NO: 17119 - DNA, 27 bp, synthetic construct
  misc_feature 1..27: note = Description of Artificial Sequence: Synthetic oligonucleotide
  source 1..27: mol_type = other DNA
cagcaatattatacttctccgtgcagt

SEQ ID NO: 17120 - protein, 9 aa, synthetic construct
  REGION 1..9: note = Description of Artificial Sequence: Synthetic peptide
QQYYTSPCS

SEQ ID NO: 17121 - DNA, 27 bp, synthetic construct
  misc_feature 1..27: note = Description of Artificial Sequence: Synthetic oligonucleotide
  source 1..27: mol_type = other DNA
ctacagcatactatttaccctcctact

SEQ ID NO: 17122 - protein, 9 aa, synthetic construct
  REGION 1..9: note = Description of Artificial Sequence: Synthetic peptide
LQHTIYPPT

SEQ ID NO: 17123 - DNA, 39 bp, synthetic construct
  misc_feature 1..39: note = Description of Artificial Sequence: Synthetic oligonucleotide
  source 1..39: mol_type = other DNA
ggagagagccacccgattgatggccaagtcggtgtggta

SEQ ID NO: 17124 - protein, 13 aa, synthetic construct
  REGION 1..13: note = Description of Artificial Sequence: Synthetic peptide
GESHPIDGQVGVV

SEQ ID NO: 17125 - DNA, 30 bp, synthetic construct; identical to SEQ ID NO: 16215
  misc_feature 1..30: note = Description of Artificial Sequence: Synthetic oligonucleotide
  source 1..30: mol_type = other DNA

SEQ ID NO: 17126 - protein, 10 aa, synthetic construct
  REGION 1..10: note = Description of Artificial Sequence: Synthetic peptide
QAWDSSTYVV

SEQ ID NO: 17127 - DNA, 27 bp, synthetic construct
  misc_feature 1..27: note = Description of Artificial Sequence: Synthetic oligonucleotide
  source 1..27: mol_type = other DNA
ctacaacataatagttacccgctcact

SEQ ID NO: 17128 - protein, 9 aa, synthetic construct
  REGION 1..9: note = Description of Artificial Sequence: Synthetic peptide
LQHNSYPLT

SEQ ID NO: 17129 - DNA, 27 bp, synthetic construct
  misc_feature 1..27: note = Description of Artificial Sequence: Synthetic oligonucleotide
  source 1..27: mol_type = other DNA
caacagtattatagttacccgatcacc

SEQ ID NO: 17130 - protein, 9 aa, synthetic construct
  REGION 1..9: note = Description of Artificial Sequence: Synthetic peptide
QQYYSYPIT

SEQ ID NO: 17131 - DNA, 27 bp, synthetic construct
  misc_feature 1..27: note = Description of Artificial Sequence: Synthetic oligonucleotide
  source 1..27: mol_type = other DNA
caacaggctaacagtttcccattcact

SEQ ID NO: 17132 - protein, 9 aa, synthetic construct
  REGION 1..9: note = Description of Artificial Sequence: Synthetic peptide
QQANSFPFT

SEQ ID NO: 17133 - DNA, 27 bp, synthetic construct
  misc_feature 1..27: note = Description of Artificial Sequence: Synthetic oligonucleotide
  source 1..27: mol_type = other DNA
caggcgtgggacaacaacactgtggta

SEQ ID NO: 17134 - protein, 9 aa, synthetic construct
  REGION 1..9: note = Description of Artificial Sequence: Synthetic peptide
QAWDNNTVV

SEQ ID NO: 17135 - DNA, 27 bp, synthetic construct
  misc_feature 1..27: note = Description of Artificial Sequence: Synthetic oligonucleotide
  source 1..27: mol_type = other DNA
ctacagtatcatagttatctattcact

SEQ ID NO: 17136 - protein, 9 aa, synthetic construct
  REGION 1..9: note = Description of Artificial Sequence: Synthetic peptide
LQYHSYLFT

SEQ ID NO: 17137 - DNA, 24 bp, synthetic construct
  misc_feature 1..24: note = Description of Artificial Sequence: Synthetic oligonucleotide
  source 1..24: mol_type = other DNA
caggcgtgggacagcagcactgta

SEQ ID NO: 17138 - protein, 8 aa, synthetic construct
  REGION 1..8: note = Description of Artificial Sequence: Synthetic peptide
QAWDSSTV

SEQ ID NO: 17139 - DNA, 27 bp, synthetic construct
  misc_feature 1..27: note = Description of Artificial Sequence: Synthetic oligonucleotide
  source 1..27: mol_type = other DNA
caacagtataatagttacccgctcact

SEQ ID NO: 17140 - protein, 9 aa, synthetic construct
  REGION 1..9: note = Description of Artificial Sequence: Synthetic peptide
QQYNSYPLT

SEQ ID NO: 17141 - DNA, 27 bp, synthetic construct
  misc_feature 1..27: note = Description of Artificial Sequence: Synthetic oligonucleotide
  source 1..27: mol_type = other DNA
cagcaatataatagttacccattcact

SEQ ID NO: 17142 - protein, 9 aa, synthetic construct
  REGION 1..9: note = Description of Artificial Sequence: Synthetic peptide
QQYNSYPFT

SEQ ID NO: 17143 - DNA, 27 bp, synthetic construct
  misc_feature 1..27: note = Description of Artificial Sequence: Synthetic oligonucleotide
  source 1..27: mol_type = other DNA
caacagtatcatagttacccgctcact

SEQ ID NO: 17144 - protein, 9 aa, synthetic construct
  REGION 1..9: note = Description of Artificial Sequence: Synthetic peptide
QQYHSYPLT

SEQ ID NO: 17145 - DNA, 27 bp, synthetic construct
  misc_feature 1..27: note = Description of Artificial Sequence: Synthetic oligonucleotide
  source 1..27: mol_type = other DNA
ctacagtattatagttacccgctcact

SEQ ID NO: 17146 - protein, 9 aa, synthetic construct
  REGION 1..9: note = Description of Artificial Sequence: Synthetic peptide
LQYYSYPLT

SEQ ID NO: 17147 - DNA, 33 bp, synthetic construct
  misc_feature 1..33: note = Description of Artificial Sequence: Synthetic oligonucleotide
  source 1..33: mol_type = other DNA
caacagagttacaatacccctccggagtgcaat

SEQ ID NO: 17148 - protein, 11 aa, synthetic construct
  REGION 1..11: note = Description of Artificial Sequence: Synthetic peptide
QQSYNTPPECN

SEQ ID NO: 17149 - DNA, 27 bp, synthetic construct
  misc_feature 1..27: note = Description of Artificial Sequence: Synthetic oligonucleotide
  source 1..27: mol_type = other DNA
ctacaacattatacttacccgctcact

SEQ ID NO: 17150 - protein, 9 aa, synthetic construct
  REGION 1..9: note = Description of Artificial Sequence: Synthetic peptide
LQHYTYPLT

SEQ ID NO: 17151 - DNA, 27 bp, synthetic construct
  misc_feature 1..27: note = Description of Artificial Sequence: Synthetic oligonucleotide
  source 1..27: mol_type = other DNA
caggcgtgggacagcagcactgcggta

SEQ ID NO: 17152 - protein, 9 aa, synthetic construct
  REGION 1..9: note = Description of Artificial Sequence: Synthetic peptide
QAWDSSTAV

SEQ ID NO: 17153 - DNA, 27 bp, synthetic construct
  misc_feature 1..27: note = Description of Artificial Sequence: Synthetic oligonucleotide
  source 1..27: mol_type = other DNA
cagcaatattataatactccagtcact

SEQ ID NO: 17154 - protein, 9 aa, synthetic construct
  REGION 1..9: note = Description of Artificial Sequence: Synthetic peptide
QQYYNTPVT

SEQ ID NO: 17155 - DNA, 27 bp, synthetic construct
  misc_feature 1..27: note = Description of Artificial Sequence: Synthetic oligonucleotide
  source 1..27: mol_type = other DNA
cagcaatattataatactccagtcact

SEQ ID NO: 17156 - protein, 9 aa, synthetic construct
  REGION 1..9: note = Description of Artificial Sequence: Synthetic peptide
QQYYNTPVT

SEQ ID NO: 17157 - DNA, 27 bp, synthetic construct
  misc_feature 1..27: note = Description of Artificial Sequence: Synthetic oligonucleotide
  source 1..27: mol_type = other DNA
caggcgtgggacaacagcactgcggta

SEQ ID NO: 17158 - protein, 9 aa, synthetic construct
  REGION 1..9: note = Description of Artificial Sequence: Synthetic peptide
QAWDNSTAV

SEQ ID NO: 17159 - DNA, 27 bp, synthetic construct
  misc_feature 1..27: note = Description of Artificial Sequence: Synthetic oligonucleotide
  source 1..27: mol_type = other DNA
atgcaaggtacacactggcctctcacc

SEQ ID NO: 17160 - protein, 9 aa, synthetic construct
  REGION 1..9: note = Description of Artificial Sequence: Synthetic peptide
MQGTHWPLT

SEQ ID NO: 17161 - DNA, 27 bp, synthetic construct
  misc_feature 1..27: note = Description of Artificial Sequence: Synthetic oligonucleotide
  source 1..27: mol_type = other DNA
cagcaatattatgatactccattcact

SEQ ID NO: 17162 - protein, 9 aa, synthetic construct
  REGION 1..9: note = Description of Artificial Sequence: Synthetic peptide
QQYYDTPFT

SEQ ID NO: 17163 - DNA, 27 bp, synthetic construct
  misc_feature 1..27: note = Description of Artificial Sequence: Synthetic oligonucleotide
  source 1..27: mol_type = other DNA
cagcagtattatagtactcctccgacg

SEQ ID NO: 17164 - protein, 9 aa, synthetic construct
  REGION 1..9: note = Description of Artificial Sequence: Synthetic peptide
QQYYSTPPT

SEQ ID NO: 17165 - DNA, 27 bp, synthetic construct
  misc_feature 1..27: note = Description of Artificial Sequence: Synthetic oligonucleotide
  source 1..27: mol_type = other DNA
caacagacttacagtaccccgctcact

SEQ ID NO: 17166 - protein, 9 aa, synthetic construct
  REGION 1..9: note = Description of Artificial Sequence: Synthetic peptide
QQTYSTPLT

SEQ ID NO: 17167 - DNA, 27 bp, synthetic construct
  misc_feature 1..27: note = Description of Artificial Sequence: Synthetic oligonucleotide
  source 1..27: mol_type = other DNA
caacaggctaacagtttcccattcact

SEQ ID NO: 17168 - protein, 9 aa, synthetic construct
  REGION 1..9: note = Description of Artificial Sequence: Synthetic peptide
QQANSFPFT

SEQ ID NO: 17169 - DNA, 27 bp, synthetic construct
  misc_feature 1..27: note = Description of Artificial Sequence: Synthetic oligonucleotide
  source 1..27: mol_type = other DNA
caacaggctaacagtttcccattcact

SEQ ID NO: 17170 - protein, 9 aa, synthetic construct
  REGION 1..9: note = Description of Artificial Sequence: Synthetic peptide
QQANSFPFT

SEQ ID NO: 17171 - DNA, 27 bp, synthetic construct
  misc_feature 1..27: note = Description of Artificial Sequence: Synthetic oligonucleotide
  source 1..27: mol_type = other DNA
cagcaatattatagtagtccgtggacg

SEQ ID NO: 17172 - protein, 9 aa, synthetic construct
  REGION 1..9: note = Description of Artificial Sequence: Synthetic peptide
QQYYSSPWT

SEQ ID NO: 17173 - DNA, 27 bp, synthetic construct
  misc_feature 1..27: note = Description of Artificial Sequence: Synthetic oligonucleotide
  source 1..27: mol_type = other DNA
ctacaacattatagttaccctcgcagt

SEQ ID NO: 17174 - protein, 9 aa, synthetic construct
  REGION 1..9: note = Description of Artificial Sequence: Synthetic peptide
LQHYSYPRS

SEQ ID NO: 17175 - DNA, 27 bp, synthetic construct
  misc_feature 1..27: note = Description of Artificial Sequence: Synthetic oligonucleotide
  source 1..27: mol_type = other DNA
ttacagcattataattaccctcgcagt

SEQ ID NO: 17176 - protein, 9 aa, synthetic construct
  REGION 1..9: note = Description of Artificial Sequence: Synthetic peptide
LQHYNYPRS

SEQ ID NO: 17177 - DNA, 27 bp, synthetic construct
  misc_feature 1..27: note = Description of Artificial Sequence: Synthetic oligonucleotide
  source 1..27: mol_type = other DNA
caacagagttacagtccccctctcact

SEQ ID NO: 17178 - protein, 9 aa, synthetic construct
  REGION 1..9: note = Description of Artificial Sequence: Synthetic peptide
QQSYSPPLT

SEQ ID NO: 17179 - DNA, 27 bp, synthetic construct
  misc_feature 1..27: note = Description of Artificial Sequence: Synthetic oligonucleotide
  source 1..27: mol_type = other DNA
caacagagttacagtaccccgtacact

SEQ ID NO: 17180 - protein, 9 aa, synthetic construct
  REGION 1..9: note = Description of Artificial Sequence: Synthetic peptide
QQSYSTPYT

SEQ ID NO: 17181 - DNA, 27 bp, synthetic construct
  misc_feature 1..27: note = Description of Artificial Sequence: Synthetic oligonucleotide
  source 1..27: mol_type = other DNA
cagcaatattatgatactccattcact

SEQ ID NO: 17182 - protein, 9 aa, synthetic construct
  REGION 1..9: note = Description of Artificial Sequence: Synthetic peptide
QQYYDTPFT

SEQ ID NO: 17183 - DNA, 27 bp, synthetic construct
  misc_feature 1..27: note = Description of Artificial Sequence: Synthetic oligonucleotide
  source 1..27: mol_type = other DNA
ctacagcataatagttacccattcact

SEQ ID NO: 17184 - protein, 9 aa, synthetic construct
  REGION 1..9: note = Description of Artificial Sequence: Synthetic peptide
LQHNSYPFT

SEQ ID NO: 17185 - DNA, 27 bp, synthetic construct
  misc_feature 1..27: note = Description of Artificial Sequence: Synthetic oligonucleotide
  source 1..27: mol_type = other DNA
caacagactaacagtttcccgtggacg

SEQ ID NO: 17186 - protein, 9 aa, synthetic construct
  REGION 1..9: note = Description of Artificial Sequence: Synthetic peptide
QQTNSFPWT

SEQ ID NO: 17187 - DNA, 27 bp, synthetic construct
  misc_feature 1..27: note = Description of Artificial Sequence: Synthetic oligonucleotide
  source 1..27: mol_type = other DNA
ctacagcataatagttaccctctcact

SEQ ID NO: 17188 - protein, 9 aa, synthetic construct
  REGION 1..9: note = Description of Artificial Sequence: Synthetic peptide
LQHNSYPLT

SEQ ID NO: 17189 - DNA, 27 bp, synthetic construct
  misc_feature 1..27: note = Description of Artificial Sequence: Synthetic oligonucleotide
  source 1..27: mol_type = other DNA
caacagtattatagttacccattcact

SEQ ID NO: 17190 - protein, 9 aa, synthetic construct
  REGION 1..9: note = Description of Artificial Sequence: Synthetic peptide
QQYYSYPFT

SEQ ID NO: 17191 - DNA, 27 bp, synthetic construct
  misc_feature 1..27: note = Description of Artificial Sequence: Synthetic oligonucleotide
  source 1..27: mol_type = other DNA
caacagactaacagtttcccgtggacg

SEQ ID NO: 17192 - protein, 9 aa, synthetic construct
  REGION 1..9: note = Description of Artificial Sequence: Synthetic peptide
QQTNSFPWT

SEQ ID NO: 17193 - DNA, 27 bp, synthetic construct
  misc_feature 1..27: note = Description of Artificial Sequence: Synthetic oligonucleotide
  source 1..27: mol_type = other DNA
ctacagcatactagtttcccattcact

SEQ ID NO: 17194 - protein, 9 aa, synthetic construct
  REGION 1..9: note = Description of Artificial Sequence: Synthetic peptide
LQHTSFPFT

SEQ ID NO: 17195 - DNA, 27 bp, synthetic construct
  misc_feature 1..27: note = Description of Artificial Sequence: Synthetic oligonucleotide
  source 1..27: mol_type = other DNA
cagcaatattatagtactcctccgacg

SEQ ID NO: 17196 - protein, 9 aa, synthetic construct
  REGION 1..9: note = Description of Artificial Sequence: Synthetic peptide
QQYYSTPPT

SEQ ID NO: 17197 - DNA, 27 bp, synthetic construct
  misc_feature 1..27: note = Description of Artificial Sequence: Synthetic oligonucleotide
  source 1..27: mol_type = other DNA
caacagactaacagtttcccgtggacg

SEQ ID NO: 17198 - protein, 9 aa, synthetic construct
  REGION 1..9: note = Description of Artificial Sequence: Synthetic peptide
QQTNSFPWT

SEQ ID NO: 17199 - DNA, 27 bp, synthetic construct
  misc_feature 1..27: note = Description of Artificial Sequence: Synthetic oligonucleotide
  source 1..27: mol_type = other DNA
ctacagcataatagtttcccattcact

SEQ ID NO: 17200 - protein, 9 aa, synthetic construct
  REGION 1..9: note = Description of Artificial Sequence: Synthetic peptide
LQHNSFPFT

SEQ ID NO: 17201 - DNA, 27 bp, synthetic construct
  misc_feature 1..27: note = Description of Artificial Sequence: Synthetic oligonucleotide
  source 1..27: mol_type = other DNA
caacaggctaacagtctcccattcact

SEQ ID NO: 17202 - protein, 9 aa, synthetic construct
  REGION 1..9: note = Description of Artificial Sequence: Synthetic peptide
QQANSLPFT

SEQ ID NO: 17203 - DNA, 27 bp, synthetic construct
  misc_feature 1..27: note = Description of Artificial Sequence: Synthetic oligonucleotide
  source 1..27: mol_type = other DNA
atgcaaagtatacagcttccgtggacg

SEQ ID NO: 17204 - protein, 9 aa, synthetic construct
  REGION 1..9: note = Description of Artificial Sequence: Synthetic peptide
MQSIQLPWT

SEQ ID NO: 17205 - DNA, 27 bp, synthetic construct
  misc_feature 1..27: note = Description of Artificial Sequence: Synthetic oligonucleotide
  source 1..27: mol_type = other DNA
ctactgcattataattaccctcggacg

SEQ ID NO: 17206 - protein, 9 aa, synthetic construct
  REGION 1..9: note = Description of Artificial Sequence: Synthetic peptide
LLHYNYPRT

SEQ ID NO: 17207 - DNA, 27 bp, synthetic construct
  misc_feature 1..27: note = Description of Artificial Sequence: Synthetic oligonucleotide
  source 1..27: mol_type = other DNA
ctacagcatagtagttaccctctcact

SEQ ID NO: 17208 - protein, 9 aa, synthetic construct
  REGION 1..9: note = Description of Artificial Sequence: Synthetic peptide
LQHSSYPLT

SEQ ID NO: 17209 - DNA, 27 bp, synthetic construct
  misc_feature 1..27: note = Description of Artificial Sequence: Synthetic oligonucleotide
  source 1..27: mol_type = other DNA
ctacagcattatagttaccctcggacg

SEQ ID NO: 17210 - protein, 9 aa, synthetic construct
  REGION 1..9: note = Description of Artificial Sequence: Synthetic peptide
LQHYSYPRT

SEQ ID NO: 17211 - DNA, 27 bp, synthetic construct
  misc_feature 1..27: note = Description of Artificial Sequence: Synthetic oligonucleotide
  source 1..27: mol_type = other DNA
caacaggctaacagtttcccattcact

SEQ ID NO: 17212 - protein, 9 aa, synthetic construct
  REGION 1..9: note = Description of Artificial Sequence: Synthetic peptide
QQANSFPFT

SEQ ID NO: 17213 - DNA, 27 bp, synthetic construct
  misc_feature 1..27: note = Description of Artificial Sequence: Synthetic oligonucleotide
  source 1..27: mol_type = other DNA
ctacagcattatagtttcccgtggacg

SEQ ID NO: 17214 - protein, 9 aa, synthetic construct
  REGION 1..9: note = Description of Artificial Sequence: Synthetic peptide
LQHYSFPWT

SEQ ID NO: 17215 - DNA, 27 bp, synthetic construct
  misc_feature 1..27: note = Description of Artificial Sequence: Synthetic oligonucleotide
  source 1..27: mol_type = other DNA
cagcagtatggtagttcaccgtggacg

SEQ ID NO: 17216 - protein, 9 aa, synthetic construct
  REGION 1..9: note = Description of Artificial Sequence: Synthetic peptide
QQYGSSPWT

SEQ ID NO: 17217 - DNA, 27 bp, synthetic construct
  misc_feature 1..27: note = Description of Artificial Sequence: Synthetic oligonucleotide
  source 1..27: mol_type = other DNA
ctacagcataatagttacccattcact

SEQ ID NO: 17218 - protein, 9 aa, synthetic construct
  REGION 1..9: note = Description of Artificial Sequence: Synthetic peptide
LQHNSYPFT

SEQ ID NO: 17219 - DNA, 27 bp, synthetic construct
  misc_feature 1..27: note = Description of Artificial Sequence: Synthetic oligonucleotide
  source 1..27: mol_type = other DNA
ctccaccattataattaccctcggacg

SEQ ID NO: 17220 - protein, 9 aa, synthetic construct
  REGION 1..9: note = Description of Artificial Sequence: Synthetic peptide
LHHYNYPRT

SEQ ID NO: 17221 - DNA, 27 bp, synthetic construct
  misc_feature 1..27: note = Description of Artificial Sequence: Synthetic oligonucleotide
  source 1..27: mol_type = other DNA
atgcaaagtatccaccttccgttcact

SEQ ID NO: 17222 - protein, 9 aa, synthetic construct
  REGION 1..9: note = Description of Artificial Sequence: Synthetic peptide
MQSIHLPFT

SEQ ID NO: 17223 - DNA, 27 bp, synthetic construct
  misc_feature 1..27: note = Description of Artificial Sequence: Synthetic oligonucleotide
  source 1..27: mol_type = other DNA
ctacagcattatagttaccctcggacg

SEQ ID NO: 17224 - protein, 9 aa, synthetic construct
  REGION 1..9: note = Description of Artificial Sequence: Synthetic peptide
LQHYSYPRT

SEQ ID NO: 17225 - DNA, 27 bp, synthetic construct
  misc_feature 1..27: note = Description of Artificial Sequence: Synthetic oligonucleotide
  source 1..27: mol_type = other DNA
caacagactaacagtttcccgtggacg

SEQ ID NO: 17226 - protein, 9 aa, synthetic construct
  REGION 1..9: note = Description of Artificial Sequence: Synthetic peptide
QQTNSFPWT

SEQ ID NO: 17227 - DNA, 27 bp, synthetic construct
  misc_feature 1..27: note = Description of Artificial Sequence: Synthetic oligonucleotide
  source 1..27: mol_type = other DNA
atgcaaactctacaaactccattcact

SEQ ID NO: 17228 - protein, 9 aa, synthetic construct
  REGION 1..9: note = Description of Artificial Sequence: Synthetic peptide
MQTLQTPFT

SEQ ID NO: 17229 - DNA, 27 bp, synthetic construct
  misc_feature 1..27: note = Description of Artificial Sequence: Synthetic oligonucleotide
  source 1..27: mol_type = other DNA
caacagtctaacagtttcccgtggacg

SEQ ID NO: 17230 - protein, 9 aa, synthetic construct
  REGION 1..9: note = Description of Artificial Sequence: Synthetic peptide
QQSNSFPWT

SEQ ID NO: 17231 - DNA, 27 bp, synthetic construct
  misc_feature 1..27: note = Description of Artificial Sequence: Synthetic oligonucleotide
  source 1..27: mol_type = other DNA
ctacaacataatagttacccgctcact

SEQ ID NO: 17232 - protein, 9 aa, synthetic construct
  REGION 1..9: note = Description of Artificial Sequence: Synthetic peptide
LQHNSYPLT

SEQ ID NO: 17233 - DNA, 27 bp, synthetic construct
  misc_feature 1..27: note = Description of Artificial Sequence: Synthetic oligonucleotide
  source 1..27: mol_type = other DNA
ctacagcatactagtttcccattcact

SEQ ID NO: 17234 - protein, 9 aa, synthetic construct
  REGION 1..9: note = Description of Artificial Sequence: Synthetic peptide
LQHTSFPFT

SEQ ID NO: 17235 - DNA, 27 bp, synthetic construct
  misc_feature 1..27: note = Description of Artificial Sequence: Synthetic oligonucleotide
  source 1..27: mol_type = other DNA
ctacagcattatagttaccctcggacg

SEQ ID NO: 17236 - protein, 9 aa, synthetic construct
  REGION 1..9: note = Description of Artificial Sequence: Synthetic peptide
LQHYSYPRT

SEQ ID NO: 17237 - DNA, 27 bp, synthetic construct
  misc_feature 1..27: note = Description of Artificial Sequence: Synthetic oligonucleotide
  source 1..27: mol_type = other DNA
caacaggctaacagtctccctttcact

SEQ ID NO: 17238 - protein, 9 aa, synthetic construct
  REGION 1..9: note = Description of Artificial Sequence: Synthetic peptide
QQANSLPFT

SEQ ID NO: 17239 - DNA, 27 bp, synthetic construct
  misc_feature 1..27: note = Description of Artificial Sequence: Synthetic oligonucleotide
  source 1..27: mol_type = other DNA
ctacagcattataattaccctcggacg

SEQ ID NO: 17240 - protein, 9 aa, synthetic construct
  REGION 1..9: note = Description of Artificial Sequence: Synthetic peptide
LQHYNYPRT

SEQ ID NO: 17241 - DNA, 27 bp, synthetic construct
  misc_feature 1..27: note = Description of Artificial Sequence: Synthetic oligonucleotide
  source 1..27: mol_type = other DNA
caacagactaacagtttcccgtggacg

SEQ ID NO: 17242 - protein, 9 aa, synthetic construct
  REGION 1..9: note = Description of Artificial Sequence: Synthetic peptide
QQTNSFPWT

SEQ ID NO: 17243 - DNA, 27 bp, synthetic construct
  misc_feature 1..27: note = Description of Artificial Sequence: Synthetic oligonucleotide
  source 1..27: mol_type = other DNA
caacaggctaacagtttcccattcact

SEQ ID NO: 17244 - protein, 9 aa, synthetic construct
  REGION 1..9: note = Description of Artificial Sequence: Synthetic peptide
QQANSFPFT

SEQ ID NO: 17245 - DNA, 27 bp, synthetic construct
  misc_feature 1..27: note = Description of Artificial Sequence: Synthetic oligonucleotide
  source 1..27: mol_type = other DNA
caacactattatagttacccattcact

SEQ ID NO: 17246 - protein, 9 aa, synthetic construct
  REGION 1..9: note = Description of Artificial Sequence: Synthetic peptide
QHYYSYPFT

SEQ ID NO: 17247 - DNA, 27 bp, synthetic construct
  misc_feature 1..27: note = Description of Artificial Sequence: Synthetic oligonucleotide
  source 1..27: mol_type = other DNA
ctacagcataatagttacccgctcact

SEQ ID NO: 17248 - protein, 9 aa, synthetic construct
  REGION 1..9: note = Description of Artificial Sequence: Synthetic peptide
LQHNSYPLT

SEQ ID NO: 17249 - DNA, 27 bp, synthetic construct
  misc_feature 1..27: note = Description of Artificial Sequence: Synthetic oligonucleotide
  source 1..27: mol_type = other DNA
atgcaaagtatacagcttccgtggacg

SEQ ID NO: 17250 - protein, 9 aa, synthetic construct
  REGION 1..9: note = Description of Artificial Sequence: Synthetic peptide
MQSIQLPWT

SEQ ID NO: 17251 - DNA, 27 bp, synthetic construct
  misc_feature 1..27: note = Description of Artificial Sequence: Synthetic oligonucleotide
  source 1..27: mol_type = other DNA
ctacagcattatagttaccctcggacg

SEQ ID NO: 17252 - protein, 9 aa, synthetic construct
  REGION 1..9: note = Description of Artificial Sequence: Synthetic peptide
LQHYSYPRT

SEQ ID NO: 17253 - DNA, 27 bp, synthetic construct
  misc_feature 1..27: note = Description of Artificial Sequence: Synthetic oligonucleotide
  source 1..27: mol_type = other DNA
ctacagcataatagttaccctctcact

SEQ ID NO: 17254 - protein, 9 aa, synthetic construct
  REGION 1..9: note = Description of Artificial Sequence: Synthetic peptide
LQHNSYPLT

SEQ ID NO: 17255 - DNA, 27 bp, synthetic construct
  misc_feature 1..27: note = Description of Artificial Sequence: Synthetic oligonucleotide
  source 1..27: mol_type = other DNA
ctacagcattatagtttcccgtggacg

SEQ ID NO: 17256 - protein, 9 aa, synthetic construct
  REGION 1..9: note = Description of Artificial Sequence: Synthetic peptide
LQHYSFPWT

SEQ ID NO: 17257 - DNA, 27 bp, synthetic construct
  misc_feature 1..27: note = Description of Artificial Sequence: Synthetic oligonucleotide
  source 1..27: mol_type = other DNA
caacagactaacagtttcccgtggacg

SEQ ID NO: 17258 - protein, 9 aa, synthetic construct
  REGION 1..9: note = Description of Artificial Sequence: Synthetic peptide
QQTNSFPWT

SEQ ID NO: 17259 - DNA, 27 bp, synthetic construct
  misc_feature 1..27: note = Description of Artificial Sequence: Synthetic oligonucleotide
  source 1..27: mol_type = other DNA
ctacagcataatagttaccctctcact

SEQ ID NO: 17260 - protein, 9 aa, synthetic construct
  REGION 1..9: note = Description of Artificial Sequence: Synthetic peptide
LQHNSYPLT

SEQ ID NO: 17261 - DNA, 27 bp, synthetic construct
  misc_feature 1..27: note = Description of Artificial Sequence: Synthetic oligonucleotide
  source 1..27: mol_type = other DNA
ctacagcataatagttaccctctcact

SEQ ID NO: 17262 - protein, 9 aa, synthetic construct
  REGION 1..9: note = Description of Artificial Sequence: Synthetic peptide
LQHNSYPLT

SEQ ID NO: 17263 - DNA, 27 bp, synthetic construct
  misc_feature 1..27: note = Description of Artificial Sequence: Synthetic oligonucleotide
  source 1..27: mol_type = other DNA
atgcacagtatacagtatccgctcacg

SEQ ID NO: 17264 - protein, 9 aa, synthetic construct
  REGION 1..9: note = Description of Artificial Sequence: Synthetic peptide
MHSIQYPLT

SEQ ID NO: 17265 - DNA, 27 bp, synthetic construct
  misc_feature 1..27: note = Description of Artificial Sequence: Synthetic oligonucleotide
  source 1..27: mol_type = other DNA
cttcagcatactagtttcccattcact

SEQ ID NO: 17266 - protein, 9 aa, synthetic construct
  REGION 1..9: note = Description of Artificial Sequence: Synthetic peptide
LQHTSFPFT

SEQ ID NO: 17267 - DNA, 27 bp, synthetic construct
  misc_feature 1..27: note = Description of Artificial Sequence: Synthetic oligonucleotide
  source 1..27: mol_type = other DNA
ctgcaacataatagttacccgctcact

SEQ ID NO: 17268 - protein, 9 aa, synthetic construct
  REGION 1..9: note = Description of Artificial Sequence: Synthetic peptide
LQHNSYPLT

SEQ ID NO: 17269 - DNA, 27 bp, synthetic construct
  misc_feature 1..27: note = Description of Artificial Sequence: Synthetic oligonucleotide
  source 1..27: mol_type = other DNA
atgcaaagtatacagcttccgtggacg

SEQ ID NO: 17270 - protein, 9 aa, synthetic construct
  REGION 1..9: note = Description of Artificial Sequence: Synthetic peptide
MQSIQLPWT

SEQ ID NO: 17271 - DNA, 27 bp, synthetic construct
  misc_feature 1..27: note = Description of Artificial Sequence: Synthetic oligonucleotide
  source 1..27: mol_type = other DNA
ctacagcataatagttacccgctcact

SEQ ID NO: 17272 - protein, 9 aa, synthetic construct
  REGION 1..9: note = Description of Artificial Sequence: Synthetic peptide
LQHNSYPLT

SEQ ID NO: 17273 - DNA, 27 bp, synthetic construct
  misc_feature 1..27: note = Description of Artificial Sequence: Synthetic oligonucleotide
  source 1..27: mol_type = other DNA
atgcaagttctacaaactccattcact

SEQ ID NO: 17274 - protein, 9 aa, synthetic construct
  REGION 1..9: note = Description of Artificial Sequence: Synthetic peptide
MQVLQTPFT

SEQ ID NO: 17275 - DNA, 27 bp, synthetic construct
  misc_feature 1..27: note = Description of Artificial Sequence: Synthetic oligonucleotide
  source 1..27: mol_type = other DNA
atgcaaagtacacaacttccgtggacg

SEQ ID NO: 17276 - protein, 9 aa, synthetic construct
  REGION 1..9: note = Description of Artificial Sequence: Synthetic peptide
MQSTQLPWT

SEQ ID NO: 17277 - DNA, 27 bp, synthetic construct
  misc_feature 1..27: note = Description of Artificial Sequence: Synthetic oligonucleotide
  source 1..27: mol_type = other DNA
caacaggttaacagtttcccgtggacg

SEQ ID NO: 17278 - protein, 9 aa, synthetic construct
  REGION 1..9: note = Description of Artificial Sequence: Synthetic peptide
QQVNSFPWT

SEQ ID NO: 17279 - DNA, 27 bp, synthetic construct
  misc_feature 1..27: note = Description of Artificial Sequence: Synthetic oligonucleotide
  source 1..27: mol_type = other DNA
ctacaacatactagtttcccattcact

SEQ ID NO: 17280 - protein, 9 aa, synthetic construct
  REGION 1..9: note = Description of Artificial Sequence: Synthetic peptide
LQHTSFPFT

SEQ ID NO: 17281 - DNA, 27 bp, synthetic construct
  misc_feature 1..27: note = Description of Artificial Sequence: Synthetic oligonucleotide
  source 1..27: mol_type = other DNA
ctacagcataatttttacccgtggacg

SEQ ID NO: 17282 - protein, 9 aa, synthetic construct
  REGION 1..9: note = Description of Artificial Sequence: Synthetic peptide
LQHNFYPWT

SEQ ID NO: 17283 - DNA, 27 bp, synthetic construct
  misc_feature 1..27: note = Description of Artificial Sequence: Synthetic oligonucleotide
  source 1..27: mol_type = other DNA
caacagagtaacagtattccattcact

SEQ ID NO: 17284 - protein, 9 aa, synthetic construct
  REGION 1..9: note = Description of Artificial Sequence: Synthetic peptide
QQSNSIPFT

SEQ ID NO: 17285 - DNA, 27 bp, synthetic construct
  misc_feature 1..27: note = Description of Artificial Sequence: Synthetic oligonucleotide
  source 1..27: mol_type = other DNA
ctacagcaatatagttatcctcggacg

SEQ ID NO: 17286 - protein, 9 aa, synthetic construct
  REGION 1..9: note = Description of Artificial Sequence: Synthetic peptide
LQQYSYPRT

SEQ ID NO: 17287 - DNA, 27 bp, synthetic construct
  misc_feature 1..27: note = Description of Artificial Sequence: Synthetic oligonucleotide
  source 1..27: mol_type = other DNA
caacagactaacagtattccattcact

SEQ ID NO: 17288 - protein, 9 aa, synthetic construct
  REGION 1..9: note = Description of Artificial Sequence: Synthetic peptide
QQTNSIPFT

SEQ ID NO: 17289 - DNA, 27 bp, synthetic construct
  misc_feature 1..27: note = Description of Artificial Sequence: Synthetic oligonucleotide
  source 1..27: mol_type = other DNA
caacaggctaacagtttcccgtggacg

SEQ ID NO: 17290 - protein, 9 aa, synthetic construct
  REGION 1..9: note = Description of Artificial Sequence: Synthetic peptide
QQANSFPWT

SEQ ID NO: 17291 - DNA, 27 bp, synthetic construct
  misc_feature 1..27: note = Description of Artificial Sequence: Synthetic oligonucleotide
  source 1..27: mol_type = other DNA
ctacagcataatcgttacccgtggacg

SEQ ID NO: 17292 - protein, 9 aa, synthetic construct
  REGION 1..9: note = Description of Artificial Sequence: Synthetic peptide
LQHNRYPWT

SEQ ID NO: 17293 - DNA, 27 bp, synthetic construct
  misc_feature 1..27: note = Description of Artificial Sequence: Synthetic oligonucleotide
  source 1..27: mol_type = other DNA
caacagacttacagtaacccactcact

SEQ ID NO: 17294 - protein, 9 aa, synthetic construct
  REGION 1..9: note = Description of Artificial Sequence: Synthetic peptide
QQTYSNPLT

SEQ ID NO: 17295 - DNA, 27 bp, synthetic construct
  misc_feature 1..27: note = Description of Artificial Sequence: Synthetic oligonucleotide
  source 1..27: mol_type = other DNA
ctacagcataatagttacccgctcact

SEQ ID NO: 17296 - protein, 9 aa, synthetic construct
  REGION 1..9: note = Description of Artificial Sequence: Synthetic peptide
LQHNSYPLT

SEQ ID NO: 17297 - DNA, 27 bp, synthetic construct
  misc_feature 1..27: note = Description of Artificial Sequence: Synthetic oligonucleotide
  source 1..27: mol_type = other DNA
caacagacttacagtaacccgctcact

SEQ ID NO: 17298 - protein, 9 aa, synthetic construct
  REGION 1..9: note = Description of Artificial Sequence: Synthetic peptide
QQTYSNPLT

SEQ ID NO: 17299 - DNA, 27 bp, synthetic construct
  misc_feature 1..27: note = Description of Artificial Sequence: Synthetic oligonucleotide
  source 1..27: mol_type = other DNA
caacagacttacagtaacccgctcact

SEQ ID NO: 17300 - protein, 9 aa, synthetic construct
  REGION 1..9: note = Description of Artificial Sequence: Synthetic peptide
QQTYSNPLT

SEQ ID NO: 17301 - DNA, 27 bp, synthetic construct
  misc_feature 1..27: note = Description of Artificial Sequence: Synthetic oligonucleotide
  source 1..27: mol_type = other DNA
ctacagcataatagttacccgctcact

SEQ ID NO: 17302 - protein, 9 aa, synthetic construct
  REGION 1..9: note = Description of Artificial Sequence: Synthetic peptide
LQHNSYPLT

SEQ ID NO: 17303 - DNA, 27 bp, synthetic construct
  misc_feature 1..27: note = Description of Artificial Sequence: Synthetic oligonucleotide
  source 1..27: mol_type = other DNA
atgcaaagtatacagattccgatcacc

SEQ ID NO: 17304 - protein, 9 aa, synthetic construct
  REGION 1..9: note = Description of Artificial Sequence: Synthetic peptide
MQSIQIPIT

SEQ ID NO: 17305 - DNA, 27 bp, synthetic construct
  misc_feature 1..27: note = Description of Artificial Sequence: Synthetic oligonucleotide
  source 1..27: mol_type = other DNA
caacagtctaacagtttcccattcact

SEQ ID NO: 17306 - protein, 9 aa, synthetic construct
  REGION 1..9: note = Description of Artificial Sequence: Synthetic peptide
QQSNSFPFT

SEQ ID NO: 17307 - DNA, 27 bp, synthetic construct
  misc_feature 1..27: note = Description of Artificial Sequence: Synthetic oligonucleotide
  source 1..27: mol_type = other DNA
atgcaaagtatgcagcttccgatcacc

SEQ ID NO: 17308 - protein, 9 aa, synthetic construct
  REGION 1..9: note = Description of Artificial Sequence: Synthetic peptide
MQSMQLPIT

SEQ ID NO: 17309 - DNA, 27 bp, synthetic construct
  misc_feature 1..27: note = Description of Artificial Sequence: Synthetic oligonucleotide
  source 1..27: mol_type = other DNA
caacagactaacagtttcccgttcact

SEQ ID NO: 17310 - protein, 9 aa, synthetic construct
  REGION 1..9: note = Description of Artificial Sequence: Synthetic peptide
QQTNSFPFT

SEQ ID NO: 17311 - DNA, 27 bp, synthetic construct
  misc_feature 1..27: note = Description of Artificial Sequence: Synthetic oligonucleotide
  source 1..27: mol_type = other DNA
ctacagcataatagttaccctctcact

SEQ ID NO: 17312 - protein, 9 aa, synthetic construct
  REGION 1..9: note = Description of Artificial Sequence: Synthetic peptide
LQHNSYPLT

SEQ ID NO: 17313 - DNA, 27 bp, synthetic construct
  misc_feature 1..27: note = Description of Artificial Sequence: Synthetic oligonucleotide
  source 1..27: mol_type = other DNA
atgcaaagtatgcagcttccgattatc

SEQ ID NO: 17314 - protein, 9 aa, synthetic construct
  REGION 1..9: note = Description of Artificial Sequence: Synthetic peptide
MQSMQLPII

SEQ ID NO: 17315 - DNA, 27 bp, synthetic construct
  misc_feature 1..27: note = Description of Artificial Sequence: Synthetic oligonucleotide
  source 1..27: mol_type = other DNA
atgcaaagtatacagtatccgatcacc

SEQ ID NO: 17316 - protein, 9 aa, synthetic construct
  REGION 1..9: note = Description of Artificial Sequence: Synthetic peptide
MQSIQYPIT

SEQ ID NO: 17317 - DNA, 27 bp, synthetic construct
  misc_feature 1..27: note = Description of Artificial Sequence: Synthetic oligonucleotide
  source 1..27: mol_type = other DNA
caacaggctaacagtttcccattcact

SEQ ID NO: 17318 - protein, 9 aa, synthetic construct
  REGION 1..9: note = Description of Artificial Sequence: Synthetic peptide
QQANSFPFT

SEQ ID NO: 17319 - DNA, 27 bp, synthetic construct
  misc_feature 1..27: note = Description of Artificial Sequence: Synthetic oligonucleotide
  source 1..27: mol_type = other DNA
caacagagttacagtatcccattcact

SEQ ID NO: 17320 - protein, 9 aa, synthetic construct
  REGION 1..9: note = Description of Artificial Sequence: Synthetic peptide
QQSYSIPFT

SEQ ID NO: 17321 - DNA, 27 bp, synthetic construct
  misc_feature 1..27: note = Description of Artificial Sequence: Synthetic oligonucleotide
  source 1..27: mol_type = other DNA
ctacagcatactagtttcccattcact

SEQ ID NO: 17322 - protein, 9 aa, synthetic construct
  REGION 1..9: note = Description of Artificial Sequence: Synthetic peptide
LQHTSFPFT

SEQ ID NO: 17323 - DNA, 27 bp, synthetic construct
  misc_feature 1..27: note = Description of Artificial Sequence: Synthetic oligonucleotide
  source 1..27: mol_type = other DNA
caacagagtaacagtcttccattcact

SEQ ID NO: 17324 - protein, 9 aa, synthetic construct
  REGION 1..9: note = Description of Artificial Sequence: Synthetic peptide
QQSNSLPFT

SEQ ID NO: 17325 - DNA, 27 bp, synthetic construct
  misc_feature 1..27: note = Description of Artificial Sequence: Synthetic oligonucleotide
  source 1..27: mol_type = other DNA
ctacagtataatagttacccgttcact

SEQ ID NO: 17326 - protein, 9 aa, synthetic construct
  REGION 1..9: note = Description of Artificial Sequence: Synthetic peptide
LQYNSYPFT

SEQ ID NO: 17327 - DNA, 27 bp, synthetic construct
  misc_feature 1..27: note = Description of Artificial Sequence: Synthetic oligonucleotide
  source 1..27: mol_type = other DNA
caacagagtaacagtattccattcact

SEQ ID NO: 17328 - protein, 9 aa, synthetic construct
  REGION 1..9: note = Description of Artificial Sequence: Synthetic peptide
QQSNSIPFT

SEQ ID NO: 17329 - DNA, 27 bp, synthetic construct
  misc_feature 1..27: note = Description of Artificial Sequence: Synthetic oligonucleotide
  source 1..27: mol_type = other DNA
ctacagcataatagttacccgtggacg

SEQ ID NO: 17330 - protein, 9 aa, synthetic construct
  REGION 1..9: note = Description of Artificial Sequence: Synthetic peptide
LQHNSYPWT

SEQ ID NO: 17331 - DNA, 27 bp, synthetic construct
  misc_feature 1..27: note = Description of Artificial Sequence: Synthetic oligonucleotide
  source 1..27: mol_type = other DNA
caacagagttacattgccccattcact

SEQ ID NO: 17332 - protein, 9 aa, synthetic construct
  REGION 1..9: note = Description of Artificial Sequence: Synthetic peptide
QQSYIAPFT

SEQ ID NO: 17333 - DNA, 27 bp, synthetic construct
  misc_feature 1..27: note = Description of Artificial Sequence: Synthetic oligonucleotide
  source 1..27: mol_type = other DNA
atgcaaagtatacagcttccattcact

SEQ ID NO: 17334 - protein, 9 aa, synthetic construct
  REGION 1..9: note = Description of Artificial Sequence: Synthetic peptide
MQSIQLPFT

SEQ ID NO: 17335 - DNA, 27 bp, synthetic construct
  misc_feature 1..27: note = Description of Artificial Sequence: Synthetic oligonucleotide
  source 1..27: mol_type = other DNA
caacagtatgataatcttccattcact

SEQ ID NO: 17336 - protein, 9 aa, synthetic construct
  REGION 1..9: note = Description of Artificial Sequence: Synthetic peptide
QQYDNLPFT

SEQ ID NO: 17337 - DNA, 27 bp, synthetic construct
  misc_feature 1..27: note = Description of Artificial Sequence: Synthetic oligonucleotide
  source 1..27: mol_type = other DNA
ctacagcataatagttacccattcact

SEQ ID NO: 17338 - protein, 9 aa, synthetic construct
  REGION 1..9: note = Description of Artificial Sequence: Synthetic peptide
LQHNSYPFT

SEQ ID NO: 17339 - DNA, 27 bp, synthetic construct
  misc_feature 1..27: note = Description of Artificial Sequence: Synthetic oligonucleotide
  source 1..27: mol_type = other DNA
caacagtattatagttacccattcact

SEQ ID NO: 17340 - protein, 9 aa, synthetic construct
  REGION 1..9: note = Description of Artificial Sequence: Synthetic peptide
QQYYSYPFT

SEQ ID NO: 17341 - DNA, 27 bp, synthetic construct
  misc_feature 1..27: note = Description of Artificial Sequence: Synthetic oligonucleotide
  source 1..27: mol_type = other DNA
caacaaactaacagtttcccattcact

SEQ ID NO: 17342 - protein, 9 aa, synthetic construct
  REGION 1..9: note = Description of Artificial Sequence: Synthetic peptide
QQTNSFPFT

SEQ ID NO: 17343 - DNA, 27 bp, synthetic construct
  misc_feature 1..27: note = Description of Artificial Sequence: Synthetic oligonucleotide
  source 1..27: mol_type = other DNA
caacaggctcacagtttcccgtggacg

SEQ ID NO: 17344 - protein, 9 aa, synthetic construct
  REGION 1..9: note = Description of Artificial Sequence: Synthetic peptide
QQAHSFPWT

SEQ ID NO: 17345 - DNA, 27 bp, synthetic construct
  misc_feature 1..27: note = Description of Artificial Sequence: Synthetic oligonucleotide
  source 1..27: mol_type = other DNA
caacaggctaacagtttcccattcact

SEQ ID NO: 17346 - protein, 9 aa, synthetic construct
  REGION 1..9: note = Description of Artificial Sequence: Synthetic peptide
QQANSFPFT

SEQ ID NO: 17347 - DNA, 27 bp, synthetic construct
  misc_feature 1..27: note = Description of Artificial Sequence: Synthetic oligonucleotide
  source 1..27: mol_type = other DNA
ctacagcataatagttacccgtggacg

SEQ ID NO: 17348 - protein, 9 aa, synthetic construct
  REGION 1..9: note = Description of Artificial Sequence: Synthetic peptide
LQHNSYPWT

SEQ ID NO: 17349 - DNA, 27 bp, synthetic construct
  misc_feature 1..27: note = Description of Artificial Sequence: Synthetic oligonucleotide
  source 1..27: mol_type = other DNA
caacaggctaaaagtttcccattcact

SEQ ID NO: 17350 - protein, 9 aa, synthetic construct
  REGION 1..9: note = Description of Artificial Sequence: Synthetic peptide
QQAKSFPFT

SEQ ID NO: 17351 - DNA, 27 bp, synthetic construct
  misc_feature 1..27: note = Description of Artificial Sequence: Synthetic oligonucleotide
  source 1..27: mol_type = other DNA
ctacagcataatagttacccattcact

SEQ ID NO: 17352 - protein, 9 aa, synthetic construct
  REGION 1..9: note = Description of Artificial Sequence: Synthetic peptide
LQHNSYPFT

SEQ ID NO: 17353 - DNA, 27 bp, synthetic construct
  misc_feature 1..27: note = Description of Artificial Sequence: Synthetic oligonucleotide
  source 1..27: mol_type = other DNA
caacagagttacagtatcccattcact

SEQ ID NO: 17354 - protein, 9 aa, synthetic construct
  REGION 1..9: note = Description of Artificial Sequence: Synthetic peptide
QQSYSIPFT

SEQ ID NO: 17355 - DNA, 27 bp, synthetic construct
  misc_feature 1..27: note = Description of Artificial Sequence: Synthetic oligonucleotide
  source 1..27: mol_type = other DNA
ctacagcataatagttacccattcact

SEQ ID NO: 17356 - protein, 9 aa, synthetic construct
  REGION 1..9: note = Description of Artificial Sequence: Synthetic peptide
LQHNSYPFT

SEQ ID NO: 17357 - DNA, 27 bp, synthetic construct
  misc_feature 1..27: note = Description of Artificial Sequence: Synthetic oligonucleotide
  source 1..27: mol_type = other DNA
ctacagcataatagttacccgttcact

SEQ ID NO: 17358 - protein, 9 aa, synthetic construct
  REGION 1..9: note = Description of Artificial Sequence: Synthetic peptide
LQHNSYPFT

SEQ ID NO: 17359 - DNA, 27 bp, synthetic construct
  misc_feature 1..27: note = Description of Artificial Sequence: Synthetic oligonucleotide
  source 1..27: mol_type = other DNA
caacaggctaaaagtttcccattcact

SEQ ID NO: 17360 - protein, 9 aa, synthetic construct
  REGION 1..9: note = Description of Artificial Sequence: Synthetic peptide
QQAKSFPFT

SEQ ID NO: 17361 - DNA, 27 bp, synthetic construct
  misc_feature 1..27: note = Description of Artificial Sequence: Synthetic oligonucleotide
  source 1..27: mol_type = other DNA
ctgcagcataatagctaccctctcact

SEQ ID NO: 17362 - protein, 9 aa, synthetic construct
  REGION 1..9: note = Description of Artificial Sequence: Synthetic peptide
LQHNSYPLT

SEQ ID NO: 17363 - DNA, 27 bp, synthetic construct
  misc_feature 1..27: note = Description of Artificial Sequence: Synthetic oligonucleotide
  source 1..27: mol_type = other DNA
caacagactaacagtttcccgtggacg

SEQ ID NO: 17364 - protein, 9 aa, synthetic construct
  REGION 1..9: note = Description of Artificial Sequence: Synthetic peptide
QQTNSFPWT

SEQ ID NO: 17365 - DNA, 27 bp, synthetic construct
  misc_feature 1..27: note = Description of Artificial Sequence: Synthetic oligonucleotide
  source 1..27: mol_type = other DNA
caacagtataatagtttccctttcact

SEQ ID NO: 17366 - protein, 9 aa, synthetic construct
  REGION 1..9: note = Description of Artificial Sequence: Synthetic peptide
QQYNSFPFT

SEQ ID NO: 17367 - DNA, 27 bp, synthetic construct
  misc_feature 1..27: note = Description of Artificial Sequence: Synthetic oligonucleotide
  source 1..27: mol_type = other DNA
caacagtgtgataatctcccgctcact

SEQ ID NO: 17368 - protein, 9 aa, synthetic construct
  REGION 1..9: note = Description of Artificial Sequence: Synthetic peptide
QQCDNLPLT

SEQ ID NO: 17369 - DNA, 27 bp, synthetic construct
  misc_feature 1..27: note = Description of Artificial Sequence: Synthetic oligonucleotide
  source 1..27: mol_type = other DNA
ctacagcataatagttacccattcact

SEQ ID NO: 17370 - protein, 9 aa, synthetic construct
  REGION 1..9: note = Description of Artificial Sequence: Synthetic peptide
LQHNSYPFT

SEQ ID NO: 17371 - DNA, 27 bp, synthetic construct
  misc_feature 1..27: note = Description of Artificial Sequence: Synthetic oligonucleotide
  source 1..27: mol_type = other DNA
atgcaaagtatacagtatccgatcacc

SEQ ID NO: 17372 - protein, 9 aa, synthetic construct
  REGION 1..9: note = Description of Artificial Sequence: Synthetic peptide
MQSIQYPIT

SEQ ID NO: 17373 - DNA, 27 bp, synthetic construct
  misc_feature 1..27: note = Description of Artificial Sequence: Synthetic oligonucleotide
  source 1..27: mol_type = other DNA
caacagtataatagttatcctccgacg

SEQ ID NO: 17374 - protein, 9 aa, synthetic construct
  REGION 1..9: note = Description of Artificial Sequence: Synthetic peptide
QQYNSYPPT

SEQ ID NO: 17375 - DNA, 27 bp, synthetic construct
  misc_feature 1..27: note = Description of Artificial Sequence: Synthetic oligonucleotide
  source 1..27: mol_type = other DNA
caacaggctaaaagtttcccattcact

SEQ ID NO: 17376 - protein, 9 aa, synthetic construct
  REGION 1..9: note = Description of Artificial Sequence: Synthetic peptide
QQAKSFPFT

SEQ ID NO: 17377 - DNA, 27 bp, synthetic construct
  misc_feature 1..27: note = Description of Artificial Sequence: Synthetic oligonucleotide
  source 1..27: mol_type = other DNA
ctacagtataatagttatccattcact

SEQ ID NO: 17378 - protein, 9 aa, synthetic construct
  REGION 1..9: note = Description of Artificial Sequence: Synthetic peptide
LQYNSYPFT

SEQ ID NO: 17379 - DNA, 27 bp, synthetic construct
  misc_feature 1..27: note = Description of Artificial Sequence: Synthetic oligonucleotide
  source 1..27: mol_type = other DNA
ctacaggataatagttacccattcact

SEQ ID NO: 17380 - protein, 9 aa, synthetic construct
  REGION 1..9: note = Description of Artificial Sequence: Synthetic peptide
LQDNSYPFT

SEQ ID NO: 17381 - DNA, 27 bp, synthetic construct
  misc_feature 1..27: note = Description of Artificial Sequence: Synthetic oligonucleotide
  source 1..27: mol_type = other DNA
ctacaacataatagatacccgctcact

SEQ ID NO: 17382 - protein, 9 aa, synthetic construct
  REGION 1..9: note = Description of Artificial Sequence: Synthetic peptide
LQHNRYPLT

SEQ ID NO: 17383 - DNA, 27 bp, synthetic construct
  misc_feature 1..27: note = Description of Artificial Sequence: Synthetic oligonucleotide
  source 1..27: mol_type = other DNA
caacagagtttcagtaccccattcact

SEQ ID NO: 17384 - protein, 9 aa, synthetic construct
  REGION 1..9: note = Description of Artificial Sequence: Synthetic peptide
QQSFSTPFT

SEQ ID NO: 17385 - DNA, 27 bp, synthetic construct
  misc_feature 1..27: note = Description of Artificial Sequence: Synthetic oligonucleotide
  source 1..27: mol_type = other DNA
catcagtatgataatctcccgctcact

SEQ ID NO: 17386 - protein, 9 aa, synthetic construct
  REGION 1..9: note = Description of Artificial Sequence: Synthetic peptide
HQYDNLPLT

SEQ ID NO: 17387 - DNA, 27 bp, synthetic construct
  misc_feature 1..27: note = Description of Artificial Sequence: Synthetic oligonucleotide
  source 1..27: mol_type = other DNA
caacagtatcatagttacccactcact

SEQ ID NO: 17388 - protein, 9 aa, synthetic construct
  REGION 1..9: note = Description of Artificial Sequence: Synthetic peptide
QQYHSYPLT

SEQ ID NO: 17389 - DNA, 27 bp, synthetic construct
  misc_feature 1..27: note = Description of Artificial Sequence: Synthetic oligonucleotide
  source 1..27: mol_type = other DNA
caacagagttacagtaccccgttcacc

SEQ ID NO: 17390 - protein, 9 aa, synthetic construct
  REGION 1..9: note = Description of Artificial Sequence: Synthetic peptide
QQSYSTPFT

SEQ ID NO: 17391 - DNA, 27 bp, synthetic construct
  misc_feature 1..27: note = Description of Artificial Sequence: Synthetic oligonucleotide
  source 1..27: mol_type = other DNA
ctacaacataatcgttacccgctcact

SEQ ID NO: 17392 - protein, 9 aa, synthetic construct
  REGION 1..9: note = Description of Artificial Sequence: Synthetic peptide
LQHNRYPLT

SEQ ID NO: 17393 - DNA, 27 bp, synthetic construct
  misc_feature 1..27: note = Description of Artificial Sequence: Synthetic oligonucleotide
  source 1..27: mol_type = other DNA
caacagtgtgataatctcccgctcact

SEQ ID NO: 17394 - protein, 9 aa, synthetic construct
  REGION 1..9: note = Description of Artificial Sequence: Synthetic peptide
QQCDNLPLT

SEQ ID NO: 17395 - DNA, 27 bp, synthetic construct
  misc_feature 1..27: note = Description of Artificial Sequence: Synthetic oligonucleotide
  source 1..27: mol_type = other DNA
cagcaggctaacagtttcccattcact

SEQ ID NO: 17396 - protein, 9 aa, synthetic construct
  REGION 1..9: note = Description of Artificial Sequence: Synthetic peptide
QQANSFPFT

SEQ ID NO: 17397 - DNA, 30 bp, synthetic construct
  misc_feature 1..30: note = Description of Artificial Sequence: Synthetic oligonucleotide
  source 1..30: mol_type = other DNA
cagcagtttgaaagctcacccatgtgcagt

SEQ ID NO: 17398 - protein, 10 aa, synthetic construct
  REGION 1..10: note = Description of Artificial Sequence: Synthetic peptide
QQFESSPMCS

SEQ ID NO: 17399 - DNA, 27 bp, synthetic construct
  misc_feature 1..27: note = Description of Artificial Sequence: Synthetic oligonucleotide
  source 1..27: mol_type = other DNA
ctacagcataatagttacccattcact

SEQ ID NO: 17400 - protein, 9 aa, synthetic construct
  REGION 1..9: note = Description of Artificial Sequence: Synthetic peptide
LQHNSYPFT

SEQ ID NO: 17401 - DNA, 27 bp, synthetic construct
  misc_feature 1..27: note = Description of Artificial Sequence: Synthetic oligonucleotide
  source 1..27: mol_type = other DNA
ctacaacataatagttacccattcact

SEQ ID NO: 17402 - protein, 9 aa, synthetic construct
  REGION 1..9: note = Description of Artificial Sequence: Synthetic peptide
LQHNSYPFT

SEQ ID NO: 17403 - DNA, 27 bp, synthetic construct
  misc_feature 1..27: note = Description of Artificial Sequence: Synthetic oligonucleotide
  source 1..27: mol_type = other DNA
caacaggctaacagtttcccgtggacg

SEQ ID NO: 17404 - protein, 9 aa, synthetic construct
  REGION 1..9: note = Description of Artificial Sequence: Synthetic peptide
QQANSFPWT

SEQ ID NO: 17405 - DNA, 27 bp, synthetic construct
  misc_feature 1..27: note = Description of Artificial Sequence: Synthetic oligonucleotide
  source 1..27: mol_type = other DNA
ctacagtataatagttacccgtggacg

SEQ ID NO: 17406 - protein, 9 aa, synthetic construct
  REGION 1..9: note = Description of Artificial Sequence: Synthetic peptide
LQYNSYPWT

SEQ ID NO: 17407 - DNA, 27 bp, synthetic construct
  misc_feature 1..27: note = Description of Artificial Sequence: Synthetic oligonucleotide
  source 1..27: mol_type = other DNA
atgcaaagtatacagtttccattcact

SEQ ID NO: 17408 - protein, 9 aa, synthetic construct
  REGION 1..9: note = Description of Artificial Sequence: Synthetic peptide
MQSIQFPFT

SEQ ID NO: 17409 - DNA, 27 bp, synthetic construct
  misc_feature 1..27: note = Description of Artificial Sequence: Synthetic oligonucleotide
  source 1..27: mol_type = other DNA
ctacagcataatcgttacccgctcact

SEQ ID NO: 17410 - protein, 9 aa, synthetic construct
  REGION 1..9: note = Description of Artificial Sequence: Synthetic peptide
LQHNRYPLT

SEQ ID NO: 17411 - DNA, 27 bp, synthetic construct
  misc_feature 1..27: note = Description of Artificial Sequence: Synthetic oligonucleotide
  source 1..27: mol_type = other DNA
ctacatcataatacttacccattcact

SEQ ID NO: 17412 - protein, 9 aa, synthetic construct
  REGION 1..9: note = Description of Artificial Sequence: Synthetic peptide
LHHNTYPFT

SEQ ID NO: 17413 - DNA, 27 bp, synthetic construct
  misc_feature 1..27: note = Description of Artificial Sequence: Synthetic oligonucleotide
  source 1..27: mol_type = other DNA
caacaggctaacagtttcccattcact

SEQ ID NO: 17414 - protein, 9 aa, synthetic construct
  REGION 1..9: note = Description of Artificial Sequence: Synthetic peptide
QQANSFPFT

SEQ ID NO: 17415 - DNA, 27 bp, synthetic construct
  misc_feature 1..27: note = Description of Artificial Sequence: Synthetic oligonucleotide
  source 1..27: mol_type = other DNA
cagcagtattataactggcctctcact

SEQ ID NO: 17416 - protein, 9 aa, synthetic construct
  REGION 1..9: note = Description of Artificial Sequence: Synthetic peptide
QQYYNWPLT

SEQ ID NO: 17417 - DNA, 27 bp, synthetic construct
  misc_feature 1..27: note = Description of Artificial Sequence: Synthetic oligonucleotide
  source 1..27: mol_type = other DNA
atgcaaagtatacagcttccattcact

SEQ ID NO: 17418 - protein, 9 aa, synthetic construct
  REGION 1..9: note = Description of Artificial Sequence: Synthetic peptide
MQSIQLPFT

SEQ ID NO: 17419 - DNA, 27 bp, synthetic construct
  misc_feature 1..27: note = Description of Artificial Sequence: Synthetic oligonucleotide
  source 1..27: mol_type = other DNA
atgcaaagtatactgtatccgatcacc

SEQ ID NO: 17420 - protein, 9 aa, synthetic construct
  REGION 1..9: note = Description of Artificial Sequence: Synthetic peptide
MQSILYPIT

(The sequence listing continues in the following parts.)
